United States Patent Application Publication US 2018/0305689 A1 - sequence listing, part 168

SEQ ID NO: 2476281 - RNA, 19 nt, Artificial Sequence
  Description of Artificial Sequence: Synthetic oligonucleotide
  Antisense strand to SEQ ID NO: 2476280
caaauccauacaaucauau

SEQ ID NO: 2476282 - RNA, 19 nt, Artificial Sequence
  Description of Artificial Sequence: Synthetic oligonucleotide
  Sense strand starting at position 201 of SEQ ID NO: 1887495
ccaaguguuuguuggucca

SEQ ID NO: 2476283 - RNA, 19 nt, Artificial Sequence
  Description of Artificial Sequence: Synthetic oligonucleotide
  Antisense strand to SEQ ID NO: 2476282
uggaccaacaaacacuugg

SEQ ID NO: 2476284 - RNA, 19 nt, Artificial Sequence
  Description of Artificial Sequence: Synthetic oligonucleotide
  Sense strand starting at position 203 of SEQ ID NO: 1887495
aaguguuuguugguccaaa

SEQ ID NO: 2476285 - RNA, 19 nt, Artificial Sequence
  Description of Artificial Sequence: Synthetic oligonucleotide
  Antisense strand to SEQ ID NO: 2476284
uuuggaccaacaaacacuu

SEQ ID NO: 2476286 - RNA, 19 nt, Artificial Sequence
  Description of Artificial Sequence: Synthetic oligonucleotide
  Sense strand starting at position 204 of SEQ ID NO: 1887495
aguguuuguugguccaaau

SEQ ID NO: 2476287 - RNA, 19 nt, Artificial Sequence
  Description of Artificial Sequence: Synthetic oligonucleotide
  Antisense strand to SEQ ID NO: 2476286
auuuggaccaacaaacacu

SEQ ID NO: 2476288 - RNA, 19 nt, Artificial Sequence
  Description of Artificial Sequence: Synthetic oligonucleotide
  Sense strand starting at position 307 of SEQ ID NO: 1887495
ccuagcacacgauauaauu

SEQ ID NO: 2476289 - RNA, 19 nt, Artificial Sequence
  Description of Artificial Sequence: Synthetic oligonucleotide
  Antisense strand to SEQ ID NO: 2476288
aauuauaucgugugcuagg

SEQ ID NO: 2476290 - RNA, 19 nt, Artificial Sequence
  Description of Artificial Sequence: Synthetic oligonucleotide
  Sense strand starting at position 429 of SEQ ID NO: 1887495
uugucaaaugacugaacga

SEQ ID NO: 2476291 - RNA, 19 nt, Artificial Sequence
  Description of Artificial Sequence: Synthetic oligonucleotide
  Antisense strand to SEQ ID NO: 2476290
ucguucagucauuugacaa

SEQ ID NO: 2476292 - RNA, 19 nt, Artificial Sequence
  Description of Artificial Sequence: Synthetic oligonucleotide
  Sense strand starting at position 633 of SEQ ID NO: 1887495
gacugacugucagaggcaa

SEQ ID NO: 2476293 - RNA, 19 nt, Artificial Sequence
  Description of Artificial Sequence: Synthetic oligonucleotide
  Antisense strand to SEQ ID NO: 2476292
uugccucugacagucaguc

SEQ ID NO: 2476294 - RNA, 19 nt, Artificial Sequence
  Description of Artificial Sequence: Synthetic oligonucleotide
  Sense strand starting at position 751 of SEQ ID NO: 1887495
cugagauguugccaacucu

SEQ ID NO: 2476295 - RNA, 19 nt, Artificial Sequence
  Description of Artificial Sequence: Synthetic oligonucleotide
  Antisense strand to SEQ ID NO: 2476294
agaguuggcaacaucucag

SEQ ID NO: 2476296 - RNA, 19 nt, Artificial Sequence
  Description of Artificial Sequence: Synthetic oligonucleotide
  Sense strand starting at position 759 of SEQ ID NO: 1887495
uugccaacucuuuggacua

SEQ ID NO: 2476297 - RNA, 19 nt, Artificial Sequence
  Description of Artificial Sequence: Synthetic oligonucleotide
  Antisense strand to SEQ ID NO: 2476296
uaguccaaagaguuggcaa

SEQ ID NO: 2476298 - RNA, 19 nt, Artificial Sequence
  Description of Artificial Sequence: Synthetic oligonucleotide
  Sense strand starting at position 760 of SEQ ID NO: 1887495
ugccaacucuuuggacuaa

SEQ ID NO: 2476299 - RNA, 19 nt, Artificial Sequence
  Description of Artificial Sequence: Synthetic oligonucleotide
  Antisense strand to SEQ ID NO: 2476298
uuaguccaaagaguuggca

SEQ ID NO: 2476300 - RNA, 19 nt, Artificial Sequence
  Description of Artificial Sequence: Synthetic oligonucleotide
  Sense strand starting at position 784 of SEQ ID NO: 1887495
gcucaacagcuuugccuaa

SEQ ID NO: 2476301 - RNA, 19 nt, Artificial Sequence
  Description of Artificial Sequence: Synthetic oligonucleotide
  Antisense strand to SEQ ID NO: 2476300
uuaggcaaagcuguugagc

SEQ ID NO: 2476302 - RNA, 19 nt, Artificial Sequence
  Description of Artificial Sequence: Synthetic oligonucleotide
  Sense strand starting at position 839 of SEQ ID NO: 1887495
ccuggcugcugaguagaaa

SEQ ID NO: 2476303 - RNA, 19 nt, Artificial Sequence
  Description of Artificial Sequence: Synthetic oligonucleotide
  Antisense strand to SEQ ID NO: 2476302
uuucuacucagcagccagg

SEQ ID NO: 2476304 - RNA, 19 nt, Artificial Sequence
  Description of Artificial Sequence: Synthetic oligonucleotide
  Sense strand starting at position 879 of SEQ ID NO: 1887495
aaaugaaacucagugaguu

SEQ ID NO: 2476305 - RNA, 19 nt, Artificial Sequence
  Description of Artificial Sequence: Synthetic oligonucleotide
  Antisense strand to SEQ ID NO: 2476304
aacucacugaguuucauuu

SEQ ID NO: 2476306 - RNA, 19 nt, Artificial Sequence
  Description of Artificial Sequence: Synthetic oligonucleotide
  Sense strand starting at position 880 of SEQ ID NO: 1887495
aaugaaacucagugaguuc

SEQ ID NO: 2476307 - RNA, 19 nt, Artificial Sequence
  Description of Artificial Sequence: Synthetic oligonucleotide
  Antisense strand to SEQ ID NO: 2476306
gaacucacugaguuucauu

SEQ ID NO: 2476308 - RNA, 19 nt, Artificial Sequence
  Description of Artificial Sequence: Synthetic oligonucleotide
  Sense strand starting at position 893 of SEQ ID NO: 1887495
gaguucuucuuggagguga

SEQ ID NO: 2476309 - RNA, 19 nt, Artificial Sequence
  Description of Artificial Sequence: Synthetic oligonucleotide
  Antisense strand to SEQ ID NO: 2476308
ucaccuccaagaagaacuc

SEQ ID NO: 2476310 - RNA, 19 nt, Artificial Sequence
  Description of Artificial Sequence: Synthetic oligonucleotide
  Sense strand starting at position 895 of SEQ ID NO: 1887495
guucuucuuggaggugaaa

SEQ ID NO: 2476311 - RNA, 19 nt, Artificial Sequence
  Description of Artificial Sequence: Synthetic oligonucleotide
  Antisense strand to SEQ ID NO: 2476310
uuucaccuccaagaagaac

SEQ ID NO: 2476312 - RNA, 19 nt, Artificial Sequence
  Description of Artificial Sequence: Synthetic oligonucleotide
  Sense strand starting at position 897 of SEQ ID NO: 1887495
ucuucuuggaggugaaauu

SEQ ID NO: 2476313 - RNA, 19 nt, Artificial Sequence
  Description of Artificial Sequence: Synthetic oligonucleotide
  Antisense strand to SEQ ID NO: 2476312
aauuucaccuccaagaaga

SEQ ID NO: 2476314 - RNA, 19 nt, Artificial Sequence
  Description of Artificial Sequence: Synthetic oligonucleotide
  Sense strand starting at position 971 of SEQ ID NO: 1887495
gucugagguguccaaagag

SEQ ID NO: 2476315 - RNA, 19 nt, Artificial Sequence
  Description of Artificial Sequence: Synthetic oligonucleotide
  Antisense strand to SEQ ID NO: 2476314
cucuuuggacaccucagac

SEQ ID NO: 2476316 - RNA, 19 nt, Artificial Sequence
  Description of Artificial Sequence: Synthetic oligonucleotide
  Sense strand starting at position 1139 of SEQ ID NO: 1887495
aggccagagaugggucuua

SEQ ID NO: 2476317 - RNA, 19 nt, Artificial Sequence
  Description of Artificial Sequence: Synthetic oligonucleotide
  Antisense strand to SEQ ID NO: 2476316
uaagacccaucucuggccu

SEQ ID NO: 2476318 - RNA, 19 nt, Artificial Sequence
  Description of Artificial Sequence: Synthetic oligonucleotide
  Sense strand starting at position 2082 of SEQ ID NO: 1887495
gucauuuccucuuggguuu

SEQ ID NO: 2476319 - RNA, 19 nt, Artificial Sequence
  Description of Artificial Sequence: Synthetic oligonucleotide
  Antisense strand to SEQ ID NO: 2476318
aaacccaagaggaaaugac

SEQ ID NO: 2476320 - RNA, 19 nt, Artificial Sequence
  Description of Artificial Sequence: Synthetic oligonucleotide
  Sense strand starting at position 2223 of SEQ ID NO: 1887495
aguggacgccucugagaga

SEQ ID NO: 2476321 - RNA, 19 nt, Artificial Sequence
  Description of Artificial Sequence: Synthetic oligonucleotide
  Antisense strand to SEQ ID NO: 2476320
ucucucagaggcguccacu

SEQ ID NO: 2476322 - RNA, 19 nt, Artificial Sequence
  Description of Artificial Sequence: Synthetic oligonucleotide
  Sense strand starting at position 2293 of SEQ ID NO: 1887495
aggacaaauccggaggugu

SEQ ID NO: 2476323 - RNA, 19 nt, Artificial Sequence
  Description of Artificial Sequence: Synthetic oligonucleotide
  Antisense strand to SEQ ID NO: 2476322
acaccuccggauuuguccu

SEQ ID NO: 2476324 - RNA, 19 nt, Artificial Sequence
  Description of Artificial Sequence: Synthetic oligonucleotide
  Sense strand starting at position 2295 of SEQ ID NO: 1887495
gacaaauccggagguguug

SEQ ID NO: 2476325 - RNA, 19 nt, Artificial Sequence
  Description of Artificial Sequence: Synthetic oligonucleotide
  Antisense strand to SEQ ID NO: 2476324
caacaccuccggauuuguc

SEQ ID NO: 2476326 - RNA, 19 nt, Artificial Sequence
  Description of Artificial Sequence: Synthetic oligonucleotide
  Sense strand starting at position 2300 of SEQ ID NO: 1887495
auccggagguguugaggaa

SEQ ID NO: 2476327 - RNA, 19 nt, Artificial Sequence
  Description of Artificial Sequence: Synthetic oligonucleotide
  Antisense strand to SEQ ID NO: 2476326
uuccucaacaccuccggau

SEQ ID NO: 2476328 - RNA, 19 nt, Artificial Sequence
  Description of Artificial Sequence: Synthetic oligonucleotide
  Sense strand starting at position 3063 of SEQ ID NO: 1887495
ggcugcugucauggagaga

SEQ ID NO: 2476329 - RNA, 19 nt, Artificial Sequence
  Description of Artificial Sequence: Synthetic oligonucleotide
  Antisense strand to SEQ ID NO: 2476328
ucucuccaugacagcagcc

SEQ ID NO: 2476330 - RNA, 19 nt, Artificial Sequence
  Description of Artificial Sequence: Synthetic oligonucleotide
  Sense strand starting at position 3129 of SEQ ID NO: 1887495
gggcuauccgccugccaga

SEQ ID NO: 2476331 - RNA, 19 nt, Artificial Sequence
  Description of Artificial Sequence: Synthetic oligonucleotide
  Antisense strand to SEQ ID NO: 2476330
ucuggcaggcggauagccc

SEQ ID NO: 2476332 - RNA, 19 nt, Artificial Sequence
  Description of Artificial Sequence: Synthetic oligonucleotide
  Sense strand starting at position 3218 of SEQ ID NO: 1887495
uccugaacauuuggauaca

SEQ ID NO: 2476333 - RNA, 19 nt, Artificial Sequence
  Description of Artificial Sequence: Synthetic oligonucleotide
  Antisense strand to SEQ ID NO: 2476332
uguauccaaauguucagga

SEQ ID NO: 2476334 - RNA, 19 nt, Artificial Sequence
  Description of Artificial Sequence: Synthetic oligonucleotide
  Sense strand starting at position 3219 of SEQ ID NO: 1887495
ccugaacauuuggauacaa

SEQ ID NO: 2476335 - RNA, 19 nt, Artificial Sequence
  Description of Artificial Sequence: Synthetic oligonucleotide
  Antisense strand to SEQ ID NO: 2476334
uuguauccaaauguucagg

SEQ ID NO: 2476336 - RNA, 19 nt, Artificial Sequence
  Description of Artificial Sequence: Synthetic oligonucleotide
  Sense strand starting at position 3290 of SEQ ID NO: 1887495
accagaaaccugugcaaag

SEQ ID NO: 2476337 - RNA, 19 nt, Artificial Sequence
  Description of Artificial Sequence: Synthetic oligonucleotide
  Antisense strand to SEQ ID NO: 2476336
cuuugcacagguuucuggu

SEQ ID NO: 2476338 - RNA, 19 nt, Artificial Sequence
  Description of Artificial Sequence: Synthetic oligonucleotide
  Sense strand starting at position 3291 of SEQ ID NO: 1887495
ccagaaaccugugcaaagu

SEQ ID NO: 2476339 - RNA, 19 nt, Artificial Sequence
  Description of Artificial Sequence: Synthetic oligonucleotide
  Antisense strand to SEQ ID NO: 2476338
acuuugcacagguuucugg

SEQ ID NO: 2476340 - RNA, 19 nt, Artificial Sequence
  Description of Artificial Sequence: Synthetic oligonucleotide
  Sense strand starting at position 3629 of SEQ ID NO: 1887495
guugcaguguuguaauaag

SEQ ID NO: 2476341 - RNA, 19 nt, Artificial Sequence
  Description of Artificial Sequence: Synthetic oligonucleotide
  Antisense strand to SEQ ID NO: 2476340
cuuauuacaacacugcaac

SEQ ID NO: 2476342 - RNA, 19 nt, Artificial Sequence
  Description of Artificial Sequence: Synthetic oligonucleotide
  Sense strand starting at position 3959 of SEQ ID NO: 1887495
agaucagucuuucguugac

SEQ ID NO: 2476343 - RNA, 19 nt, Artificial Sequence
  Description of Artificial Sequence: Synthetic oligonucleotide
  Antisense strand to SEQ ID NO: 2476342
gucaacgaaagacugaucu

SEQ ID NO: 2476344 - RNA, 19 nt, Artificial Sequence
  Description of Artificial Sequence: Synthetic oligonucleotide
  Sense strand starting at position 3961 of SEQ ID NO: 1887495
aucagucuuucguugacau

SEQ ID NO: 2476345 - RNA, 19 nt, Artificial Sequence
  Description of Artificial Sequence: Synthetic oligonucleotide
  Antisense strand to SEQ ID NO: 2476344
augucaacgaaagacugau

SEQ ID NO: 2476346 - RNA, 19 nt, Artificial Sequence
  Description of Artificial Sequence: Synthetic oligonucleotide
  Sense strand starting at position 3962 of SEQ ID NO: 1887495
ucagucuuucguugacaug

SEQ ID NO: 2476347 - RNA, 19 nt, Artificial Sequence
  Description of Artificial Sequence: Synthetic oligonucleotide
  Antisense strand to SEQ ID NO: 2476346
caugucaacgaaagacuga

SEQ ID NO: 2476348 - RNA, 19 nt, Artificial Sequence
  Description of Artificial Sequence: Synthetic oligonucleotide
  Sense strand starting at position 187 of SEQ ID NO: 1887496
acuguaauccaguaaucca

SEQ ID NO: 2476349 - RNA, 19 nt, Artificial Sequence
  Description of Artificial Sequence: Synthetic oligonucleotide
  Antisense strand to SEQ ID NO: 2476348
uggauuacuggauuacagu

SEQ ID NO: 2476350 - RNA, 19 nt, Artificial Sequence
  Description of Artificial Sequence: Synthetic oligonucleotide
  Sense strand starting at position 931 of SEQ ID NO: 1887496
uggagagauacuuguuccu

SEQ ID NO: 2476351 - RNA, 19 nt, Artificial Sequence
  Description of Artificial Sequence: Synthetic oligonucleotide
  Antisense strand to SEQ ID NO: 2476350
aggaacaaguaucucucca

SEQ ID NO: 2476352 - RNA, 19 nt, Artificial Sequence
  Description of Artificial Sequence: Synthetic oligonucleotide
  Sense strand starting at position 933 of SEQ ID NO: 1887496
gagagauacuuguuccuac

SEQ ID NO: 2476353 - RNA, 19 nt, Artificial Sequence
  Description of Artificial Sequence: Synthetic oligonucleotide
  Antisense strand to SEQ ID NO: 2476352
guaggaacaaguaucucuc

SEQ ID NO: 2476354 - RNA, 19 nt, Artificial Sequence
  Description of Artificial Sequence: Synthetic oligonucleotide
  Sense strand starting at position 940 of SEQ ID NO: 1887496
acuuguuccuaccuuugau

SEQ ID NO: 2476355 - RNA, 19 nt, Artificial Sequence
  Description of Artificial Sequence: Synthetic oligonucleotide
  Antisense strand to SEQ ID NO: 2476354
aucaaagguaggaacaagu

SEQ ID NO: 2476356 - RNA, 19 nt, Artificial Sequence
  Description of Artificial Sequence: Synthetic oligonucleotide
  Sense strand starting at position 2088 of SEQ ID NO: 1887496
uagccuugccuguggaaau

SEQ ID NO: 2476357 - RNA, 19 nt, Artificial Sequence
  Description of Artificial Sequence: Synthetic oligonucleotide
  Antisense strand to SEQ ID NO: 2476356
auuuccacaggcaaggcua

SEQ ID NO: 2476358 - RNA, 19 nt, Artificial Sequence
  Description of Artificial Sequence: Synthetic oligonucleotide
  Sense strand starting at position 2194 of SEQ ID NO: 1887496
cuggguuucuccucuuauu

SEQ ID NO: 2476359 - RNA, 19 nt, Artificial Sequence
  Description of Artificial Sequence: Synthetic oligonucleotide
  Antisense strand to SEQ ID NO: 2476358
aauaagaggagaaacccag

SEQ ID NO: 2476360 - RNA, 19 nt, Artificial Sequence
  Description of Artificial Sequence: Synthetic oligonucleotide
  Sense strand starting at position 2206 of SEQ ID NO: 1887496
ucuuauuggccguaggaaa

SEQ ID NO: 2476361 - RNA, 19 nt, Artificial Sequence
  Description of Artificial Sequence: Synthetic oligonucleotide
  Antisense strand to SEQ ID NO: 2476360
uuuccuacggccaauaaga

SEQ ID NO: 2476362 - RNA, 19 nt, Artificial Sequence
  Description of Artificial Sequence: Synthetic oligonucleotide
  Sense strand starting at position 2266 of SEQ ID NO: 1887496
ugcggagggagucaagaau

SEQ ID NO: 2476363 - RNA, 19 nt, Artificial Sequence
  Description of Artificial Sequence: Synthetic oligonucleotide
  Antisense strand to SEQ ID NO: 2476362
auucuugacucccuccgca

SEQ ID NO: 2476364 - RNA, 19 nt, Artificial Sequence
  Description of Artificial Sequence: Synthetic oligonucleotide
  Sense strand starting at position 2339 of SEQ ID NO: 1887496
agacucgaguucucuaauu

SEQ ID NO: 2476365 - RNA, 19 nt, Artificial Sequence
  Description of Artificial Sequence: Synthetic oligonucleotide
  Antisense strand to SEQ ID NO: 2476364
aauuagagaacucgagucu

SEQ ID NO: 2476366 - RNA, 19 nt, Artificial Sequence
  Description of Artificial Sequence: Synthetic oligonucleotide
  Sense strand starting at position 2341 of SEQ ID NO: 1887496
acucgaguucucuaauugg

SEQ ID NO: 2476367 - RNA, 19 nt, Artificial Sequence
  Description of Artificial Sequence: Synthetic oligonucleotide
  Antisense strand to SEQ ID NO: 2476366
ccaauuagagaacucgagu

SEQ ID NO: 2476368 - RNA, 19 nt, Artificial Sequence
  Description of Artificial Sequence: Synthetic oligonucleotide
  Sense strand starting at position 2383 of SEQ ID NO: 1887496
cuccaagugggcgaucuua

SEQ ID NO: 2476369 - RNA, 19 nt, Artificial Sequence
  Description of Artificial Sequence: Synthetic oligonucleotide
  Antisense strand to SEQ ID NO: 2476368
uaagaucgcccacuuggag

SEQ ID NO: 2476370 - RNA, 19 nt, Artificial Sequence
  Description of Artificial Sequence: Synthetic oligonucleotide
  Sense strand starting at position 2425 of SEQ ID NO: 1887496
ccaggaagcacauguagau

SEQ ID NO: 2476371 - RNA, 19 nt, Artificial Sequence
  Description of Artificial Sequence: Synthetic oligonucleotide
  Antisense strand to SEQ ID NO: 2476370
aucuacaugugcuuccugg

SEQ ID NO: 2476372 - RNA, 19 nt, Artificial Sequence
  Description of Artificial Sequence: Synthetic oligonucleotide
  Sense strand starting at position 2511 of SEQ ID NO: 1887496
ugugaacuugugugauucu

SEQ ID NO: 2476373 - RNA, 19 nt, Artificial Sequence
  Description of Artificial Sequence: Synthetic oligonucleotide
  Antisense strand to SEQ ID NO: 2476372
agaaucacacaaguucaca

SEQ ID NO: 2476374 - RNA, 19 nt, Artificial Sequence
  Description of Artificial Sequence: Synthetic oligonucleotide
  Sense strand starting at position 2522 of SEQ ID NO: 1887496
gugauucugugagucuaug

SEQ ID NO: 2476375 - RNA, 19 nt, Artificial Sequence
  Description of Artificial Sequence: Synthetic oligonucleotide
  Antisense strand to SEQ ID NO: 2476374
cauagacucacagaaucac

SEQ ID NO: 2476376 - RNA, 19 nt, Artificial Sequence
  Description of Artificial Sequence: Synthetic oligonucleotide
  Sense strand starting at position 3055 of SEQ ID NO: 1887496
acccauucugauuguguau

SEQ ID NO: 2476377 - RNA, 19 nt, Artificial Sequence
  Description of Artificial Sequence: Synthetic oligonucleotide
  Antisense strand to SEQ ID NO: 2476376
auacacaaucagaaugggu

SEQ ID NO: 2476378 - RNA, 19 nt, Artificial Sequence
  Description of Artificial Sequence: Synthetic oligonucleotide
  Sense strand starting at position 3062 of SEQ ID NO: 1887496
cugauuguguaucuguuga

SEQ ID NO: 2476379 - RNA, 19 nt, Artificial Sequence
  Description of Artificial Sequence: Synthetic oligonucleotide
  Antisense strand to SEQ ID NO: 2476378
ucaacagauacacaaucag

SEQ ID NO: 2476380 - RNA, 19 nt, Artificial Sequence
  Description of Artificial Sequence: Synthetic oligonucleotide
  Sense strand starting at position 3064 of SEQ ID NO: 1887496
gauuguguaucuguugaga

SEQ ID NO: 2476381 - RNA, 19 nt, Artificial Sequence
  Description of Artificial Sequence: Synthetic oligonucleotide
  Antisense strand to SEQ ID NO: 2476380
ucucaacagauacacaauc

SEQ ID NO: 2476382 - RNA, 19 nt, Artificial Sequence
  Description of Artificial Sequence: Synthetic oligonucleotide
  Sense strand starting at position 3167 of SEQ ID NO: 1887496
ggcacugguagcuaugcaa

SEQ ID NO: 2476383 - RNA, 19 nt, Artificial Sequence
  Description of Artificial Sequence: Synthetic oligonucleotide
  Antisense strand to SEQ ID NO: 2476382
uugcauagcuaccagugcc

SEQ ID NO: 2476384 - RNA, 19 nt, Artificial Sequence
  Description of Artificial Sequence: Synthetic oligonucleotide
  Sense strand starting at position 3180 of SEQ ID NO: 1887496
augcaacugugacuaaaua

SEQ ID NO: 2476385 - RNA, 19 nt, Artificial Sequence
  Description of Artificial Sequence: Synthetic oligonucleotide
  Antisense strand to SEQ ID NO: 2476384
uauuuagucacaguugcau

SEQ ID NO: 2476386 - RNA, 19 nt, Artificial Sequence
  Description of Artificial Sequence: Synthetic oligonucleotide
  Sense strand starting at position 3181 of SEQ ID NO: 1887496
ugcaacugugacuaaauaa

SEQ ID NO: 2476387 - RNA, 19 nt, Artificial Sequence
  Description of Artificial Sequence: Synthetic oligonucleotide
  Antisense strand to SEQ ID NO: 2476386
uuauuuagucacaguugca

SEQ ID NO: 2476388 - RNA, 19 nt, Artificial Sequence
  Description of Artificial Sequence: Synthetic oligonucleotide
  Sense strand starting at position 3762 of SEQ ID NO: 1887496
uaaauugugucaguaggau

SEQ ID NO: 2476389 - RNA, 19 nt, Artificial Sequence
  Description of Artificial Sequence: Synthetic oligonucleotide
  Antisense strand to SEQ ID NO: 2476388
auccuacugacacaauuua

SEQ ID NO: 2476390 - RNA, 19 nt, Artificial Sequence
  Description of Artificial Sequence: Synthetic oligonucleotide
  Sense strand starting at position 3796 of SEQ ID NO: 1887496
cugccuguggauuaugaau

SEQ ID NO: 2476391 - RNA, 19 nt, Artificial Sequence
  Description of Artificial Sequence: Synthetic oligonucleotide
  Antisense strand to SEQ ID NO: 2476390
auucauaauccacaggcag

SEQ ID NO: 2476392 - RNA, 19 nt, Artificial Sequence
  Description of Artificial Sequence: Synthetic oligonucleotide
  Sense strand starting at position 3822 of SEQ ID NO: 1887496
uuuagagauuguuuggcua

SEQ ID NO: 2476393 - RNA, 19 nt, Artificial Sequence
  Description of Artificial Sequence: Synthetic oligonucleotide
  Antisense strand to SEQ ID NO: 2476392
uagccaaacaaucucuaaa

SEQ ID NO: 2476394 - RNA, 19 nt, Artificial Sequence
  Description of Artificial Sequence: Synthetic oligonucleotide
  Sense strand starting at position 3825 of SEQ ID NO: 1887496
agagauuguuuggcuauga

SEQ ID NO: 2476395 - RNA, 19 nt, Artificial Sequence
  Description of Artificial Sequence: Synthetic oligonucleotide
  Antisense strand to SEQ ID NO: 2476394
ucauagccaaacaaucucu

SEQ ID NO: 2476396 - RNA, 19 nt, Artificial Sequence
  Description of Artificial Sequence: Synthetic oligonucleotide
  Sense strand starting at position 3826 of SEQ ID NO: 1887496
gagauuguuuggcuaugac

SEQ ID NO: 2476397 - RNA, 19 nt, Artificial Sequence
  Description of Artificial Sequence: Synthetic oligonucleotide
  Antisense strand to SEQ ID NO: 2476396
gucauagccaaacaaucuc

SEQ ID NO: 2476398 - RNA, 19 nt, Artificial Sequence
  Description of Artificial Sequence: Synthetic oligonucleotide
  Sense strand starting at position 3829 of SEQ ID NO: 1887496
auuguuuggcuaugacauu

SEQ ID NO: 2476399 - RNA, 19 nt, Artificial Sequence
  Description of Artificial Sequence: Synthetic oligonucleotide
  Antisense strand to SEQ ID NO: 2476398
aaugucauagccaaacaau

SEQ ID NO: 2476400 - RNA, 19 nt, Artificial Sequence
  Description of Artificial Sequence: Synthetic oligonucleotide
  Sense strand starting at position 3835 of SEQ ID NO: 1887496
uggcuaugacauuguguaa

SEQ ID NO: 2476401 - RNA, 19 nt, Artificial Sequence
  Description of Artificial Sequence: Synthetic oligonucleotide
  Antisense strand to SEQ ID NO: 2476400
uuacacaaugucauagcca

SEQ ID NO: 2476402 - RNA, 19 nt, Artificial Sequence
  Description of Artificial Sequence: Synthetic oligonucleotide
  Sense strand starting at position 3838 of SEQ ID NO: 1887496
cuaugacauuguguaacca

SEQ ID NO: 2476403 - RNA, 19 nt, Artificial Sequence
  Description of Artificial Sequence: Synthetic oligonucleotide
  Antisense strand to SEQ ID NO: 2476402
ugguuacacaaugucauag

SEQ ID NO: 2476404 - RNA, 19 nt, Artificial Sequence
  Description of Artificial Sequence: Synthetic oligonucleotide
  Sense strand starting at position 3846 of SEQ ID NO: 1887496
uuguguaaccaauauagca

SEQ ID NO: 2476405 - RNA, 19 nt, Artificial Sequence
  Description of Artificial Sequence: Synthetic oligonucleotide
  Antisense strand to SEQ ID NO: 2476404
ugcuauauugguuacacaa

SEQ ID NO: 2476406 - RNA, 19 nt, Artificial Sequence
  Description of Artificial Sequence: Synthetic oligonucleotide
  Sense strand starting at position 3884 of SEQ ID NO: 1887496
cugggaauuguaugucugu

SEQ ID NO: 2476407 - RNA, 19 nt, Artificial Sequence
  Description of Artificial Sequence: Synthetic oligonucleotide
  Antisense strand to SEQ ID NO: 2476406
acagacauacaauucccag

SEQ ID NO: 2476408 - RNA, 19 nt, Artificial Sequence
  Description of Artificial Sequence: Synthetic oligonucleotide
  Sense strand starting at position 3901 of SEQ ID NO: 1887496
gugcauaguccauauacau

SEQ ID NO: 2476409 - RNA, 19 nt, Artificial Sequence
  Description of Artificial Sequence: Synthetic oligonucleotide
  Antisense strand to SEQ ID NO: 2476408
auguauauggacuaugcac

SEQ ID NO: 2476410 - RNA, 19 nt, Artificial Sequence
  Description of Artificial Sequence: Synthetic oligonucleotide
  Sense strand starting at position 3930 of SEQ ID NO: 1887496
acaauuauaugugcacgga

SEQ ID NO: 2476411 - RNA, 19 nt, Artificial Sequence
  Description of Artificial Sequence: Synthetic oligonucleotide
  Antisense strand to SEQ ID NO: 2476410
uccgugcacauauaauugu

SEQ ID NO: 2476412 - RNA, 19 nt, Artificial Sequence
  Description of Artificial Sequence: Synthetic oligonucleotide
  Sense strand starting at position 3931 of SEQ ID NO: 1887496
caauuauaugugcacggau

SEQ ID NO: 2476413 - RNA, 19 nt, Artificial Sequence
  Description of Artificial Sequence: Synthetic oligonucleotide
  Antisense strand to SEQ ID NO: 2476412
auccgugcacauauaauug

SEQ ID NO: 2476414 - RNA, 19 nt, Artificial Sequence
  Description of Artificial Sequence: Synthetic oligonucleotide
  Sense strand starting at position 3933 of SEQ ID NO: 1887496
auuauaugugcacggauua

SEQ ID NO: 2476415 - RNA, 19 nt, Artificial Sequence
  Description of Artificial Sequence: Synthetic oligonucleotide
  Antisense strand to SEQ ID NO: 2476414
uaauccgugcacauauaau

SEQ ID NO: 2476416 - RNA, 19 nt, Artificial Sequence
  Description of Artificial Sequence: Synthetic oligonucleotide
  Sense strand starting at position 3934 of SEQ ID NO: 1887496
uuauaugugcacggauuau

SEQ ID NO: 2476417 - RNA, 19 nt, Artificial Sequence
  Description of Artificial Sequence: Synthetic oligonucleotide
  Antisense strand to SEQ ID NO: 2476416
auaauccgugcacauauaa

SEQ ID NO: 2476418 - RNA, 19 nt, Artificial Sequence
  Description of Artificial Sequence: Synthetic oligonucleotide
  Sense strand starting at position 3945 of SEQ ID NO: 1887496
cggauuauaugaucagugu

SEQ ID NO: 2476419 - RNA, 19 nt, Artificial Sequence
  Description of Artificial Sequence: Synthetic oligonucleotide
  Antisense strand to SEQ ID NO: 2476418
acacugaucauauaauccg

SEQ ID NO: 2476420 - RNA, 19 nt, Artificial Sequence
  Description of Artificial Sequence: Synthetic oligonucleotide
  Sense strand starting at position 3946 of SEQ ID NO: 1887496
ggauuauaugaucagugug

SEQ ID NO: 2476421 - RNA, 19 nt, Artificial Sequence
  Description of Artificial Sequence: Synthetic oligonucleotide
  Antisense strand to SEQ ID NO: 2476420
cacacugaucauauaaucc

SEQ ID NO: 2476422 - RNA, 19 nt, Artificial Sequence
  Description of Artificial Sequence: Synthetic oligonucleotide
  Sense strand starting at position 3948 of SEQ ID NO: 1887496
auuauaugaucagugugac

SEQ ID NO: 2476423 - RNA, 19 nt, Artificial Sequence
  Description of Artificial Sequence: Synthetic oligonucleotide
  Antisense strand to SEQ ID NO: 2476422
gucacacugaucauauaau

SEQ ID NO: 2476424 - RNA, 19 nt, Artificial Sequence
  Description of Artificial Sequence: Synthetic oligonucleotide
  Sense strand starting at position 3949 of SEQ ID NO: 1887496
uuauaugaucagugugacu

SEQ ID NO: 2476425 - RNA, 19 nt, Artificial Sequence
  Description of Artificial Sequence: Synthetic oligonucleotide
  Antisense strand to SEQ ID NO: 2476424
agucacacugaucauauaa

SEQ ID NO: 2476426 - RNA, 19 nt, Artificial Sequence
  Description of Artificial Sequence: Synthetic oligonucleotide
  Sense strand starting at position 3951 of SEQ ID NO: 1887496
auaugaucagugugacuga

SEQ ID NO: 2476427 - RNA, 19 nt, Artificial Sequence
  Description of Artificial Sequence: Synthetic oligonucleotide
  Antisense strand to SEQ ID NO: 2476426
ucagucacacugaucauau

SEQ ID NO: 2476428 - RNA, 19 nt, Artificial Sequence
  Description of Artificial Sequence: Synthetic oligonucleotide
  Sense strand starting at position 107 of SEQ ID NO: 1887497
gguggagucaccugacaau

SEQ ID NO: 2476429 - RNA, 19 nt, Artificial Sequence
  Description of Artificial Sequence: Synthetic oligonucleotide
  Antisense strand to SEQ ID NO: 2476428
auugucaggugacuccacc

SEQ ID NO: 2476430 - RNA, 19 nt, Artificial Sequence
  Description of Artificial Sequence: Synthetic oligonucleotide
  Sense strand starting at position 277 of SEQ ID NO: 1887497
ucugaaagacacugaucuu

SEQ ID NO: 2476431 - RNA, 19 nt, Artificial Sequence
  Description of Artificial Sequence: Synthetic oligonucleotide
  Antisense strand to SEQ ID NO: 2476430
aagaucagugucuuucaga

SEQ ID NO: 2476432 - RNA, 19 nt, Artificial Sequence
  Description of Artificial Sequence: Synthetic oligonucleotide
  Sense strand starting at position 302 of SEQ ID NO: 1887497
ugucaucuuacagaggagu

SEQ ID NO: 2476433 - RNA, 19 nt, Artificial Sequence
  Description of Artificial Sequence: Synthetic oligonucleotide
  Antisense strand to SEQ ID NO: 2476432
acuccucuguaagaugaca

SEQ ID NO: 2476434 - RNA, 19 nt, Artificial Sequence
  Description of Artificial Sequence: Synthetic oligonucleotide
  Sense strand starting at position 373 of SEQ ID NO: 1887497
aggcaaagaugagcucaaa

SEQ ID NO: 2476435 - RNA, 19 nt, Artificial Sequence
  Description of Artificial Sequence: Synthetic oligonucleotide
  Antisense strand to SEQ ID NO: 2476434
uuugagcucaucuuugccu

SEQ ID NO: 2476436 - RNA, 19 nt, Artificial Sequence
  Description of Artificial Sequence: Synthetic oligonucleotide
  Sense strand starting at position 587 of SEQ ID NO: 1887497
uguacuuggcauuaacaua

SEQ ID NO: 2476437 - RNA, 19 nt, Artificial Sequence
  Description of Artificial Sequence: Synthetic oligonucleotide
  Antisense strand to SEQ ID NO: 2476436
uauguuaaugccaaguaca

SEQ ID NO: 2476438 - RNA, 19 nt, Artificial Sequence
  Description of Artificial Sequence: Synthetic oligonucleotide
  Sense strand starting at position 1125 of SEQ ID NO: 1887497
gauugauaccacggcuuaa

SEQ ID NO: 2476439 - RNA, 19 nt, Artificial Sequence
  Description of Artificial Sequence: Synthetic oligonucleotide
  Antisense strand to SEQ ID NO: 2476438
uuaagccgugguaucaauc

SEQ ID NO: 2476440 - RNA, 19 nt, Artificial Sequence
  Description of Artificial Sequence: Synthetic oligonucleotide
  Sense strand starting at position 1171 of SEQ ID NO: 1887497
gucuucugacuccaagauc

SEQ ID NO: 2476441 - RNA, 19 nt, Artificial Sequence
  Description of Artificial Sequence: Synthetic oligonucleotide
  Antisense strand to SEQ ID NO: 2476440
gaucuuggagucagaagac

SEQ ID NO: 2476442 - RNA, 19 nt, Artificial Sequence
  Description of Artificial Sequence: Synthetic oligonucleotide
  Sense strand starting at position 1358 of SEQ ID NO: 1887497
augaguccucauggcagaa

SEQ ID NO: 2476443 - RNA, 19 nt, Artificial Sequence
  Description of Artificial Sequence: Synthetic oligonucleotide
  Antisense strand to SEQ ID NO: 2476442
uucugccaugaggacucau

SEQ ID NO: 2476444 - RNA, 19 nt, Artificial Sequence
  Description of Artificial Sequence: Synthetic oligonucleotide
  Sense strand starting at position 1387 of SEQ ID NO: 1887497
cuguuacaucugggaauug

SEQ ID NO: 2476445 - RNA, 19 nt, Artificial Sequence
  Description of Artificial Sequence: Synthetic oligonucleotide
  Antisense strand to SEQ ID NO: 2476444
caauucccagauguaacag

SEQ ID NO: 2476446 - RNA, 19 nt, Artificial Sequence
  Description of Artificial Sequence: Synthetic oligonucleotide
  Sense strand starting at position 1481 of SEQ ID NO: 1887497
cccuaaguccaugaacguu

SEQ ID NO: 2476447 - RNA, 19 nt, Artificial Sequence
  Description of Artificial Sequence: Synthetic oligonucleotide
  Antisense strand to SEQ ID NO: 2476446
aacguucauggacuuaggg

SEQ ID NO: 2476448 - RNA, 19 nt, Artificial Sequence
  Description of Artificial Sequence: Synthetic oligonucleotide
  Sense strand starting at position 1572 of SEQ ID NO: 1887497
agucaccuagguugagaua

SEQ ID NO: 2476449 - RNA, 19 nt, Artificial Sequence
  Description of Artificial Sequence: Synthetic oligonucleotide
  Antisense strand to SEQ ID NO: 2476448
uaucucaaccuaggugacu

SEQ ID NO: 2476450 - RNA, 19 nt, Artificial Sequence
  Description of Artificial Sequence: Synthetic oligonucleotide
  Sense strand starting at position 1573 of SEQ ID NO: 1887497
gucaccuagguugagauau

SEQ ID NO: 2476451 - RNA, 19 nt, Artificial Sequence
  Description of Artificial Sequence: Synthetic oligonucleotide
  Antisense strand to SEQ ID NO: 2476450
auaucucaaccuaggugac

SEQ ID NO: 2476452 - RNA, 19 nt, Artificial Sequence
  Description of Artificial Sequence: Synthetic oligonucleotide
  Sense strand starting at position 1695 of SEQ ID NO: 1887497
cugacaagacuuugguaga

SEQ ID NO: 2476453 - RNA, 19 nt, Artificial Sequence
  Description of Artificial Sequence: Synthetic oligonucleotide
  Antisense strand to SEQ ID NO: 2476452
ucuaccaaagucuugucag

SEQ ID NO: 2476454 - RNA, 19 nt, Artificial Sequence
  Description of Artificial Sequence: Synthetic oligonucleotide
  Sense strand starting at position 2047 of SEQ ID NO: 1887497
gcccauuggucgaugcgaa

SEQ ID NO: 2476455 - RNA, 19 nt, Artificial Sequence
  Description of Artificial Sequence: Synthetic oligonucleotide
  Antisense strand to SEQ ID NO: 2476454
uucgcaucgaccaaugggc

SEQ ID NO: 2476456 - RNA, 19 nt, Artificial Sequence
  Description of Artificial Sequence: Synthetic oligonucleotide
  Sense strand starting at position 2250 of SEQ ID NO: 1887497
cggcucuaagggugagaga

SEQ ID NO: 2476457 - RNA, 19 nt, Artificial Sequence
  Description of Artificial Sequence: Synthetic oligonucleotide
  Antisense strand to SEQ ID NO: 2476456
ucucucacccuuagagccg

SEQ ID NO: 2476458 - RNA, 19 nt, Artificial Sequence
  Description of Artificial Sequence: Synthetic oligonucleotide
  Sense strand starting at position 2307 of SEQ ID NO: 1887497
agacuuucucugggugaag

SEQ ID NO: 2476459 - RNA, 19 nt, Artificial Sequence
  Description of Artificial Sequence: Synthetic oligonucleotide
  Antisense strand to SEQ ID NO: 2476458
cuucacccagagaaagucu

SEQ ID NO: 2476460 - RNA, 19 nt, Artificial Sequence
  Description of Artificial Sequence: Synthetic oligonucleotide
  Sense strand starting at position 2308 of SEQ ID NO: 1887497
gacuuucucugggugaagu

SEQ ID NO: 2476461 - RNA, 19 nt, Artificial Sequence
  Description of Artificial Sequence: Synthetic oligonucleotide
  Antisense strand to SEQ ID NO: 2476460
acuucacccagagaaaguc

SEQ ID NO: 2476462 - RNA, 19 nt, Artificial Sequence
  Description of Artificial Sequence: Synthetic oligonucleotide
  Sense strand starting at position 2356 of SEQ ID NO: 1887497
gagucagaguuccuuuaca

SEQ ID NO: 2476463 - RNA, 19 nt, Artificial Sequence
  Description of Artificial Sequence: Synthetic oligonucleotide
  Antisense strand to SEQ ID NO: 2476462
uguaaaggaacucugacuc

SEQ ID NO: 2476464 - RNA, 19 nt, Artificial Sequence
  Description of Artificial Sequence: Synthetic oligonucleotide
  Sense strand starting at position 2565 of SEQ ID NO: 1887497
gccaauguuccagacacac

SEQ ID NO: 2476465 - RNA, 19 nt, Artificial Sequence
  Description of Artificial Sequence: Synthetic oligonucleotide
  Antisense strand to SEQ ID NO: 2476464
gugugucuggaacauuggc

SEQ ID NO: 2476466 - RNA, 19 nt, Artificial Sequence
  Description of Artificial Sequence: Synthetic oligonucleotide
  Sense strand starting at position 2598 of SEQ ID NO: 1887497
gucccauuccuagagggua

SEQ ID NO: 2476467 - RNA, 19 nt, Artificial Sequence
  Description of Artificial Sequence: Synthetic oligonucleotide
  Antisense strand to SEQ ID NO: 2476466
uacccucuaggaaugggac

SEQ ID NO: 2476468 - RNA, 19 nt, Artificial Sequence
  Description of Artificial Sequence: Synthetic oligonucleotide
  Sense strand starting at position 2610 of SEQ ID NO: 1887497
gaggguaccuacccugauu

SEQ ID NO: 2476469 - RNA, 19 nt, Artificial Sequence
  Description of Artificial Sequence: Synthetic oligonucleotide
  Antisense strand to SEQ ID NO: 2476468
aaucaggguagguacccuc

SEQ ID NO: 2476470 - RNA, 19 nt, Artificial Sequence
  Description of Artificial Sequence: Synthetic oligonucleotide
  Sense strand starting at position 2621 of SEQ ID NO: 1887497
cccugauuccgggagagca

SEQ ID NO: 2476471 - RNA, 19 nt, Artificial Sequence
  Description of Artificial Sequence: Synthetic oligonucleotide
  Antisense strand to SEQ ID NO: 2476470
ugcucucccggaaucaggg

SEQ ID NO: 2476472 - RNA, 19 nt, Artificial Sequence
  Description of Artificial Sequence: Synthetic oligonucleotide
  Sense strand starting at position 2760 of SEQ ID NO: 1887497
cucggauccucuccaggau

SEQ ID NO: 2476473 - RNA, 19 nt, Artificial Sequence
  Description of Artificial Sequence: Synthetic oligonucleotide
  Antisense strand to SEQ ID NO: 2476472
auccuggagaggauccgag

SEQ ID NO: 2476474 - RNA, 19 nt, Artificial Sequence
  Description of Artificial Sequence: Synthetic oligonucleotide
  Sense strand starting at position 2782 of SEQ ID NO: 1887497
ccaggacuuaccugagguu

SEQ ID NO: 2476475 - RNA, 19 nt, Artificial Sequence
  Description of Artificial Sequence: Synthetic oligonucleotide
  Antisense strand to SEQ ID NO: 2476474
aaccucagguaaguccugg

SEQ ID NO: 2476476 - RNA, 19 nt, Artificial Sequence
  Description of Artificial Sequence: Synthetic oligonucleotide
  Sense strand starting at position 2835 of SEQ ID NO: 1887497
gaugcuagaugucuuccaa

SEQ ID NO: 2476477 - RNA, 19 nt, Artificial Sequence
  Description of Artificial Sequence: Synthetic oligonucleotide
  Antisense strand to SEQ ID NO: 2476476
uuggaagacaucuagcauc

SEQ ID NO: 2476478 - RNA, 19 nt, Artificial Sequence
  Description of Artificial Sequence: Synthetic oligonucleotide
  Sense strand starting at position 2871 of SEQ ID NO: 1887497
aacuuaguagcugagucaa

SEQ ID NO: 2476479 - RNA, 19 nt, Artificial Sequence
  Description of Artificial Sequence: Synthetic oligonucleotide
  Antisense strand to SEQ ID NO: 2476478
uugacucagcuacuaaguu

SEQ ID NO: 2476480 - RNA, 19 nt, Artificial Sequence
  Description of Artificial Sequence: Synthetic oligonucleotide
  Sense strand starting at position 2948 of SEQ ID NO: 1887497
caacucuaguguguaagaa

SEQ ID NO: 2476481 - RNA, 19 nt, Artificial Sequence
  Description of Artificial Sequence: Synthetic oligonucleotide
  Antisense strand to SEQ ID NO: 2476480
uucuuacacacuagaguug

SEQ ID NO: 2476482 - RNA, 19 nt, Artificial Sequence
  Description of Artificial Sequence: Synthetic oligonucleotide
  Sense strand starting at position 2949 of SEQ ID NO: 1887497
aacucuaguguguaagaaa

SEQ ID NO: 2476483 - RNA, 19 nt, Artificial Sequence
  Description of Artificial Sequence: Synthetic oligonucleotide
  Antisense strand to SEQ ID NO: 2476482
uuucuuacacacuagaguu

SEQ ID NO: 2476484 - RNA, 19 nt, Artificial Sequence
  Description of Artificial Sequence: Synthetic oligonucleotide
  Sense strand starting at position 2966 of SEQ ID NO: 1887497
aaaugaaugcgacagcuga

SEQ ID NO: 2476485 - RNA, 19 nt, Artificial Sequence
  Description of Artificial Sequence: Synthetic oligonucleotide
  Antisense strand to SEQ ID NO: 2476484
ucagcugucgcauucauuu

SEQ ID NO: 2476486 - RNA, 19 nt, Artificial Sequence
  Description of Artificial Sequence: Synthetic oligonucleotide
  Sense strand starting at position 2989 of SEQ ID NO: 1887497
guagaaagcuucucugacu

SEQ ID NO: 2476487 - RNA, 19 nt, Artificial Sequence
  Description of Artificial Sequence: Synthetic oligonucleotide
  Antisense strand to SEQ ID NO: 2476486
agucagagaagcuuucuac

SEQ ID NO: 2476488 - RNA, 19 nt, Artificial Sequence
  Description of Artificial Sequence: Synthetic oligonucleotide
  Sense strand starting at position 3295 of SEQ ID NO: 1887497
ccauaaucccgugagucag

SEQ ID NO: 2476489 - RNA, 19 nt, Artificial Sequence
  Description of Artificial Sequence: Synthetic oligonucleotide
  Antisense strand to SEQ ID NO: 2476488
cugacucacgggauuaugg

SEQ ID NO: 2476490 - RNA, 19 nt, Artificial Sequence
  Description of Artificial Sequence: Synthetic oligonucleotide
  Sense strand starting at position 3360 of SEQ ID NO: 1887497
gguacuguuucuuuggaga

SEQ ID NO: 2476491 - RNA, 19 nt, Artificial Sequence
  Description of Artificial Sequence: Synthetic oligonucleotide
  Antisense strand to SEQ ID NO: 2476490
ucuccaaagaaacaguacc

SEQ ID NO: 2476492 - RNA, 19 nt, Artificial Sequence
  Description of Artificial Sequence: Synthetic oligonucleotide
  Sense strand starting at position 3404 of SEQ ID NO: 1887497
cuggcucuuugaguauaag

SEQ ID NO: 2476493 - RNA, 19 nt, Artificial Sequence
  Description of Artificial Sequence: Synthetic oligonucleotide
  Antisense strand to SEQ ID NO: 2476492
cuuauacucaaagagccag

SEQ ID NO: 2476494 - RNA, 19 nt, Artificial Sequence
  Description of Artificial Sequence: Synthetic oligonucleotide
  Sense strand starting at position 3405 of SEQ ID NO: 1887497
uggcucuuugaguauaaga

SEQ ID NO: 2476495 - RNA, 19 nt, Artificial Sequence
  Description of Artificial Sequence: Synthetic oligonucleotide
  Antisense strand to SEQ ID NO: 2476494
ucuuauacucaaagagcca

SEQ ID NO: 2476496 - RNA, 19 nt, Artificial Sequence
  Description of Artificial Sequence: Synthetic oligonucleotide
  Sense strand starting at position 3407 of SEQ ID NO: 1887497
gcucuuugaguauaagaug

SEQ ID NO: 2476497 - RNA, 19 nt, Artificial Sequence
  Description of Artificial Sequence: Synthetic oligonucleotide
  Antisense strand to SEQ ID NO: 2476496
caucuuauacucaaagagc

SEQ ID NO: 2476498 - RNA, 19 nt, Artificial Sequence
  Description of Artificial Sequence: Synthetic oligonucleotide
  Sense strand starting at position 3419 of SEQ ID NO: 1887497
uaagaugauuggccaggau

SEQ ID NO: 2476499 - RNA, 19 nt, Artificial Sequence
  Description of Artificial Sequence: Synthetic oligonucleotide
  Antisense strand to SEQ ID NO: 2476498
auccuggccaaucaucuua

SEQ ID NO: 2476500 - RNA, 19 nt, Artificial Sequence
  Description of Artificial Sequence: Synthetic oligonucleotide
  Sense strand starting at position 3422 of SEQ ID NO: 1887497
gaugauuggccaggauuaa

SEQ ID NO: 2476501 - RNA, 19 nt, Artificial Sequence
  Description of Artificial Sequence: Synthetic oligonucleotide
  Antisense strand to SEQ ID NO: 2476500
uuaauccuggccaaucauc

SEQ ID NO: 2476502 - RNA, 19 nt, Artificial Sequence
  Description of Artificial Sequence: Synthetic oligonucleotide
  Sense strand starting at position 3628 of SEQ ID NO: 1887497
ugagaaaugucauugucau

SEQ ID NO: 2476503 - RNA, 19 nt, Artificial Sequence
  Description of Artificial Sequence: Synthetic oligonucleotide
  Antisense strand to SEQ ID NO: 2476502
augacaaugacauuucuca

SEQ ID NO: 2476504 - RNA, 19 nt, Artificial Sequence
  Description of Artificial Sequence: Synthetic oligonucleotide
  Sense strand starting at position 3629 of SEQ ID NO: 1887497
gagaaaugucauugucauu

SEQ ID NO: 2476505 - RNA, 19 nt, Artificial Sequence
  Description of Artificial Sequence: Synthetic oligonucleotide
  Antisense strand to SEQ ID NO: 2476504
aaugacaaugacauuucuc

SEQ ID NO: 2476506 - RNA, 19 nt, Artificial Sequence
  Description of Artificial Sequence: Synthetic oligonucleotide
  Sense strand starting at position 3937 of SEQ ID NO: 1887497
gcuguuugucaggaagaua

SEQ ID NO: 2476507 - RNA, 19 nt, Artificial Sequence
  Description of Artificial Sequence: Synthetic oligonucleotide
  Antisense strand to SEQ ID NO: 2476506
uaucuuccugacaaacagc

SEQ ID NO: 2476508 - RNA, 19 nt, Artificial Sequence
  Description of Artificial Sequence: Synthetic oligonucleotide
  Sense strand starting at position 261 of SEQ ID NO: 1887498
gagcccauaguuuggagua

SEQ ID NO: 2476509 - RNA, 19 nt, Artificial Sequence
  Description of Artificial Sequence: Synthetic oligonucleotide
  Antisense strand to SEQ ID NO: 2476508
uacuccaaacuaugggcuc

SEQ ID NO: 2476510 - RNA, 19 nt, Artificial Sequence
  Description of Artificial Sequence: Synthetic oligonucleotide
  Sense strand starting at position 321 of SEQ ID NO: 1887498
gcaguccuccugggucuaa

SEQ ID NO: 2476511 - RNA, 19 nt, Artificial Sequence
  Description of Artificial Sequence: Synthetic oligonucleotide
  Antisense strand to SEQ ID NO: 2476510
uuagacccaggaggacugc

SEQ ID NO: 2476512 - RNA, 19 nt, Artificial Sequence
  Description of Artificial Sequence: Synthetic oligonucleotide
  Sense strand starting at position 387 of SEQ ID NO: 1887498
gcuagacuucugggucuga

SEQ ID NO: 2476513 - RNA, 19 nt, Artificial Sequence
  Description of Artificial Sequence: Synthetic oligonucleotide
  Antisense strand to SEQ ID NO: 2476512
ucagacccagaagucuagc

SEQ ID NO: 2476514 - RNA, 19 nt, Artificial Sequence
  Description of Artificial Sequence: Synthetic oligonucleotide
  Sense strand starting at position 391 of SEQ ID NO: 1887498
gacuucugggucugagaga

SEQ ID NO: 2476515 - RNA, 19 nt, Artificial Sequence
  Description of Artificial Sequence: Synthetic oligonucleotide
  Antisense strand to SEQ ID NO: 2476514
ucucucagacccagaaguc

SEQ ID NO: 2476516 - RNA, 19 nt, Artificial Sequence
  Description of Artificial Sequence: Synthetic oligonucleotide
  Sense strand starting at position 876 of SEQ ID NO: 1887498
ugcucuuugaggugugaga

SEQ ID NO: 2476517 - RNA, 19 nt, Artificial Sequence
  Description of Artificial Sequence: Synthetic oligonucleotide
  Antisense strand to SEQ ID NO: 2476516
ucucacaccucaaagagca

SEQ ID NO: 2476518 - RNA, 19 nt, Artificial Sequence
  Description of Artificial Sequence: Synthetic oligonucleotide
  Sense strand starting at position 878 of SEQ ID NO: 1887498
cucuuugaggugugagauu

SEQ ID NO: 2476519 - RNA, 19 nt, Artificial Sequence
  Description of Artificial Sequence: Synthetic oligonucleotide
  Antisense strand to SEQ ID NO: 2476518
aaucucacaccucaaagag

SEQ ID NO: 2476520 - RNA, 19 nt, Artificial Sequence
  Description of Artificial Sequence: Synthetic oligonucleotide
  Sense strand starting at position 936 of SEQ ID NO: 1887498
gccagaaccucagcuuucu

SEQ ID NO: 2476521 - RNA, 19 nt, Artificial Sequence
  Description of Artificial Sequence: Synthetic oligonucleotide
  Antisense strand to SEQ ID NO: 2476520
agaaagcugagguucuggc

SEQ ID NO: 2476522 - RNA, 19 nt, Artificial Sequence
  Description of Artificial Sequence: Synthetic oligonucleotide
  Sense strand starting at position 1271 of SEQ ID NO: 1887498
gggucauaggucugaaacc

SEQ ID NO: 2476523 - RNA, 19 nt, Artificial Sequence
  Description of Artificial Sequence: Synthetic oligonucleotide
  Antisense strand to SEQ ID NO: 2476522
gguuucagaccuaugaccc

SEQ ID NO: 2476524 - RNA, 19 nt, Artificial Sequence
  Description of Artificial Sequence: Synthetic oligonucleotide
  Sense strand starting at position 1356 of SEQ ID NO: 1887498
gguaucuagucucucggaa

SEQ ID NO: 2476525 - RNA, 19 nt, Artificial Sequence
  Description of Artificial Sequence: Synthetic oligonucleotide
  Antisense strand to SEQ ID NO: 2476524
uuccgagagacuagauacc

SEQ ID NO: 2476526 - RNA, 19 nt, Artificial Sequence
  Description of Artificial Sequence: Synthetic oligonucleotide
  Sense strand starting at position 1679 of SEQ ID NO: 1887498
ugcguucuccaggucgaau

SEQ ID NO: 2476527 - RNA, 19 nt, Artificial Sequence
  Description of Artificial Sequence: Synthetic oligonucleotide
  Antisense strand to SEQ ID NO: 2476526
auucgaccuggagaacgca

SEQ ID NO: 2476528 - RNA, 19 nt, Artificial Sequence
  Description of Artificial Sequence: Synthetic oligonucleotide
  Sense strand starting at position 1680 of SEQ ID NO: 1887498
gcguucuccaggucgaauu

SEQ ID NO: 2476529 - RNA, 19 nt, Artificial Sequence
  Description of Artificial Sequence: Synthetic oligonucleotide
  Antisense strand to SEQ ID NO: 2476528
aauucgaccuggagaacgc

SEQ ID NO: 2476530 - RNA, 19 nt, Artificial Sequence
  Description of Artificial Sequence: Synthetic oligonucleotide
  Sense strand starting at position 1804 of SEQ ID NO: 1887498
cccggaggugucuagggaa

SEQ ID NO: 2476531 - RNA, 19 nt, Artificial Sequence
  Description of Artificial Sequence: Synthetic oligonucleotide
  Antisense strand to SEQ ID NO: 2476530
uucccuagacaccuccggg

SEQ ID NO: 2476532 - RNA, 19 nt, Artificial Sequence
  Description of Artificial Sequence: Synthetic oligonucleotide
  Sense strand starting at position 2148 of SEQ ID NO: 1887498
gcgcuuuacggaaacgagu

SEQ ID NO: 2476533 - RNA, 19 nt, Artificial Sequence
  Description of Artificial Sequence: Synthetic oligonucleotide
  Antisense strand to SEQ ID NO: 2476532
acucguuuccguaaagcgc

SEQ ID NO: 2476534 - RNA, 19 nt, Artificial Sequence
  Description of Artificial Sequence: Synthetic oligonucleotide
  Sense strand starting at position 2253 of SEQ ID NO: 1887498
acgugugguuacucaaaga

SEQ ID NO: 2476535 - RNA, 19 nt, Artificial Sequence
  Description of Artificial Sequence: Synthetic oligonucleotide
  Antisense strand to SEQ ID NO: 2476534
ucuuugaguaaccacacgu

SEQ ID NO: 2476536 - RNA, 19 nt, Artificial Sequence
  Description of Artificial Sequence: Synthetic oligonucleotide
  Sense strand starting at position 2339 of SEQ ID NO: 1887498
aggagacauugggaaugga

SEQ ID NO: 2476537 - RNA, 19 nt, Artificial Sequence
  Description of Artificial Sequence: Synthetic oligonucleotide
  Antisense strand to SEQ ID NO: 2476536
uccauucccaaugucuccu

SEQ ID NO: 2476538 - RNA, 19 nt, Artificial Sequence
  Description of Artificial Sequence: Synthetic oligonucleotide
  Sense strand starting at position 2442 of SEQ ID NO: 1887498
acauauuuaugaggaacca

SEQ ID NO: 2476539 - RNA, 19 nt, Artificial Sequence
  Description of Artificial Sequence: Synthetic oligonucleotide
  Antisense strand to SEQ ID NO: 2476538
ugguuccucauaaauaugu

SEQ ID NO: 2476540 - RNA, 19 nt, Artificial Sequence
  Description of Artificial Sequence: Synthetic oligonucleotide
  Sense strand starting at position 2459 of SEQ ID NO: 1887498
caucgagaucuuugaagaa

SEQ ID NO: 2476541 - RNA, 19 nt, Artificial Sequence
  Description of Artificial Sequence: Synthetic oligonucleotide
  Antisense strand to SEQ ID NO: 2476540
uucuucaaagaucucgaug

SEQ ID NO: 2476542 - RNA, 19 nt, Artificial Sequence
  Description of Artificial Sequence: Synthetic oligonucleotide
  Sense strand starting at position 2608 of SEQ ID NO: 1887498
cagucucgaguuugagaga

SEQ ID NO: 2476543 - RNA, 19 nt, Artificial Sequence
  Description of Artificial Sequence: Synthetic oligonucleotide
  Antisense strand to SEQ ID NO: 2476542
ucucucaaacucgagacug

SEQ ID NO: 2476544 - RNA, 19 nt, Artificial Sequence
  Description of Artificial Sequence: Synthetic oligonucleotide
  Sense strand starting at position 2684 of SEQ ID NO: 1887498
gacuccugggucugaaaga

SEQ ID NO: 2476545 - RNA, 19 nt, Artificial Sequence
  Description of Artificial Sequence: Synthetic oligonucleotide
  Antisense strand to SEQ ID NO: 2476544
ucuuucagacccaggaguc

SEQ ID NO: 2476546 - RNA, 19 nt, Artificial Sequence
  Description of Artificial Sequence: Synthetic oligonucleotide
  Sense strand starting at position 2749 of SEQ ID NO: 1887498
gcuggacuucuggaucuga

SEQ ID NO: 2476547 - RNA, 19 nt, Artificial Sequence
  Description of Artificial Sequence: Synthetic oligonucleotide
  Antisense strand to SEQ ID NO: 2476546
ucagauccagaaguccagc

SEQ ID NO: 2476548 - RNA, 19 nt, Artificial Sequence
  Description of Artificial Sequence: Synthetic oligonucleotide
  Sense strand starting at position 2928 of SEQ ID NO: 1887498
ggagccuuggauuguuagu

SEQ ID NO: 2476549 - RNA, 19 nt, Artificial Sequence
  Description of Artificial Sequence: Synthetic oligonucleotide
  Antisense strand to SEQ ID NO: 2476548
acuaacaauccaaggcucc

SEQ ID NO: 2476550 - RNA, 19 nt, Artificial Sequence
  Description of Artificial Sequence: Synthetic oligonucleotide
  Sense strand starting at position 3021 of SEQ ID NO: 1887498
cgccuagugagccuuuagu

SEQ ID NO: 2476551 - RNA, 19 nt, Artificial Sequence
  Description of Artificial Sequence: Synthetic oligonucleotide
  Antisense strand to SEQ ID NO: 2476550
acuaaaggcucacuaggcg

SEQ ID NO: 2476552 - RNA, 19 nt, Artificial Sequence
  Description of Artificial Sequence: Synthetic oligonucleotide
  Sense strand starting at position 3028 of SEQ ID NO: 1887498
ugagccuuuagugggaaga

SEQ ID NO: 2476553 - RNA, 19 nt, Artificial Sequence
  Description of Artificial Sequence: Synthetic oligonucleotide
  Antisense strand to SEQ ID NO: 2476552
ucuucccacuaaaggcuca

SEQ ID NO: 2476554 - RNA, 19 nt, Artificial Sequence
  Description of Artificial Sequence: Synthetic oligonucleotide
  Sense strand starting at position 3029 of SEQ ID NO: 1887498
gagccuuuagugggaagaa

SEQ ID NO: 2476555 - RNA, 19 nt, Artificial Sequence
  Description of Artificial Sequence: Synthetic oligonucleotide
  Antisense strand to SEQ ID NO: 2476554
uucuucccacuaaaggcuc

SEQ ID NO: 2476556 - RNA, 19 nt, Artificial Sequence
  Description of Artificial Sequence: Synthetic oligonucleotide
  Sense strand starting at position 3216 of SEQ ID NO: 1887498
augaauacaugugaaugaa

SEQ ID NO: 2476557 - RNA, 19 nt, Artificial Sequence
  Description of Artificial Sequence: Synthetic oligonucleotide
  Antisense strand to SEQ ID NO: 2476556
uucauucacauguauucau

SEQ ID NO: 2476558 - RNA, 19 nt, Artificial Sequence
  Description of Artificial Sequence: Synthetic oligonucleotide
  Sense strand starting at position 3367 of SEQ ID NO: 1887498
aggaguucguggccaacau

SEQ ID NO: 2476559 - RNA, 19 nt, Artificial Sequence
  Description of Artificial Sequence: Synthetic oligonucleotide
  Antisense strand to SEQ ID NO: 2476558
auguuggccacgaacuccu

SEQ ID NO: 2476560 - RNA, 19 nt, Artificial Sequence
  Description of Artificial Sequence: Synthetic oligonucleotide
  Sense strand starting at position 3368 of SEQ ID NO: 1887498
ggaguucguggccaacauu

SEQ ID NO: 2476561 - RNA, 19 nt, Artificial Sequence
  Description of Artificial Sequence: Synthetic oligonucleotide
  Antisense strand to SEQ ID NO: 2476560
aauguuggccacgaacucc

SEQ ID NO: 2476562 - RNA, 19 nt, Artificial Sequence
  Description of Artificial Sequence: Synthetic oligonucleotide
  Sense strand starting at position 3578 of SEQ ID NO: 1887498
aagguaaugugaccugaac

SEQ ID NO: 2476563 - RNA, 19 nt, Artificial Sequence
  Description of Artificial Sequence: Synthetic oligonucleotide
  Antisense strand to SEQ ID NO: 2476562
guucaggucacauuaccuu

SEQ ID NO: 2476564 - RNA, 19 nt, Artificial Sequence
  Description of Artificial Sequence: Synthetic oligonucleotide
  Sense strand starting at position 3580 of SEQ ID NO: 1887498
gguaaugugaccugaacuu

SEQ ID NO: 2476565 - RNA, 19 nt, Artificial Sequence
  Description of Artificial Sequence: Synthetic oligonucleotide
  Antisense strand to SEQ ID NO: 2476564
aaguucaggucacauuacc

SEQ ID NO: 2476566 - RNA, 19 nt, Artificial Sequence
  Description of Artificial Sequence: Synthetic oligonucleotide
  Sense strand starting at position 3633 of SEQ ID NO: 1887498
ccaugaugagcccagucaa

SEQ ID NO: 2476567 - RNA, 19 nt, Artificial Sequence
  Description of Artificial Sequence: Synthetic oligonucleotide
  Antisense strand to SEQ ID NO: 2476566
uugacugggcucaucaugg

SEQ ID NO: 2476568 - RNA, 19 nt, Artificial Sequence
  Description of Artificial Sequence: Synthetic oligonucleotide
  Sense strand starting at position 3668 of SEQ ID NO: 1887498
gggagaaaguuguugguag

SEQ ID NO: 2476569 - RNA, 19 nt, Artificial Sequence
  Description of Artificial Sequence: Synthetic oligonucleotide
  Antisense strand to SEQ ID NO: 2476568
cuaccaacaacuuucuccc

SEQ ID NO: 2476570 - RNA, 19 nt, Artificial Sequence
  Description of Artificial Sequence: Synthetic oligonucleotide
  Sense strand starting at position 3670 of SEQ ID NO: 1887498
gagaaaguuguugguagcu

SEQ ID NO: 2476571 - RNA, 19 nt, Artificial Sequence
  Description of Artificial Sequence: Synthetic oligonucleotide
  Antisense strand to SEQ ID NO: 2476570
agcuaccaacaacuuucuc

SEQ ID NO: 2476572 - RNA, 19 nt, Artificial Sequence
  Description of Artificial Sequence: Synthetic oligonucleotide
  Sense strand starting at position 3772 of SEQ ID NO: 1887498
ccagaacuaccguggagaa

SEQ ID NO: 2476573 - RNA, 19 nt, Artificial Sequence
  Description of Artificial Sequence: Synthetic oligonucleotide
  Antisense strand to SEQ ID NO: 2476572
uucuccacgguaguucugg

SEQ ID NO: 2476574 - RNA, 19 nt, Artificial Sequence
  Description of Artificial Sequence: Synthetic oligonucleotide
  Sense strand starting at position 3773 of SEQ ID NO: 1887498
cagaacuaccguggagaaa

SEQ ID NO: 2476575 - RNA, 19 nt, Artificial Sequence
  Description of Artificial Sequence: Synthetic oligonucleotide
  Antisense strand to SEQ ID NO: 2476574
uuucuccacgguaguucug

SEQ ID NO: 2476576 - RNA, 19 nt, Artificial Sequence
  Description of Artificial Sequence: Synthetic oligonucleotide
  Sense strand starting at position 3873 of SEQ ID NO: 1887498
uggagagacuuaugaugaa

SEQ ID NO: 2476577 - RNA, 19 nt, Artificial Sequence
  Description of Artificial Sequence: Synthetic oligonucleotide
  Antisense strand to SEQ ID NO: 2476576
uucaucauaagucucucca

SEQ ID NO: 2476578 - RNA, 19 nt, Artificial Sequence
  Description of Artificial Sequence: Synthetic oligonucleotide
  Sense strand starting at position 3876 of SEQ ID NO: 1887498
agagacuuaugaugaaaga

SEQ ID NO: 2476579 - RNA, 19 nt, Artificial Sequence
  Description of Artificial Sequence: Synthetic oligonucleotide
  Antisense strand to SEQ ID NO: 2476578
ucuuucaucauaagucucu

SEQ ID NO: 2476580 - RNA, 19 nt, Artificial Sequence
  Description of Artificial Sequence: Synthetic oligonucleotide
  Sense strand starting at position 3907 of SEQ ID NO: 1887498
aggagacaguccuugguaa

SEQ ID NO: 2476581 - RNA, 19 nt, Artificial Sequence
  Description of Artificial Sequence: Synthetic oligonucleotide
  Antisense strand to SEQ ID NO: 2476580
uuaccaaggacugucuccu

SEQ ID NO: 2476582 - RNA, 19 nt, Artificial Sequence
  Description of Artificial Sequence: Synthetic oligonucleotide
  Sense strand starting at position 3908 of SEQ ID NO: 1887498
ggagacaguccuugguaag

SEQ ID NO: 2476583 - RNA, 19 nt, Artificial Sequence
  Description of Artificial Sequence: Synthetic oligonucleotide
  Antisense strand to SEQ ID NO: 2476582
cuuaccaaggacugucucc

SEQ ID NO: 2476584 - RNA, 19 nt, Artificial Sequence
  Description of Artificial Sequence: Synthetic oligonucleotide
  Sense strand starting at position 3927 of SEQ ID NO: 1887498
gggccuguuuauguugaga

SEQ ID NO: 2476585 - RNA, 19 nt, Artificial Sequence
  Description of Artificial Sequence: Synthetic oligonucleotide
  Antisense strand to SEQ ID NO: 2476584
ucucaacauaaacaggccc

SEQ ID NO: 2476586 - RNA, 19 nt, Artificial Sequence
  Description of Artificial Sequence: Synthetic oligonucleotide
  Sense strand starting at position 3930 of SEQ ID NO: 1887498
ccuguuuauguugagagag

SEQ ID NO: 2476587 - RNA, 19 nt, Artificial Sequence
  Description of Artificial Sequence: Synthetic oligonucleotide
  Antisense strand to SEQ ID NO: 2476586
cucucucaacauaaacagg

SEQ ID NO: 2476588 - RNA, 19 nt, Artificial Sequence
  Description of Artificial Sequence: Synthetic oligonucleotide
  Sense strand starting at position 19 of SEQ ID NO: 1887499
cgagaucauucuguccaac

SEQ ID NO: 2476589 - RNA, 19 nt, Artificial Sequence
  Description of Artificial Sequence: Synthetic oligonucleotide
  Antisense strand to SEQ ID NO: 2476588
guuggacagaaugaucucg

SEQ ID NO: 2476590 - RNA, 19 nt, Artificial Sequence
  Description of Artificial Sequence: Synthetic oligonucleotide
  Sense strand starting at position 248 of SEQ ID NO: 1887499
guugaaucaccuggcaaau

SEQ ID NO: 2476591 - RNA, 19 nt, Artificial Sequence
  Description of Artificial Sequence: Synthetic oligonucleotide
  Antisense strand to SEQ ID NO: 2476590
auuugccaggugauucaac

SEQ ID NO: 2476592 - RNA, 19 nt, Artificial Sequence
  Description of Artificial Sequence: Synthetic oligonucleotide
  Sense strand starting at position 587 of SEQ ID NO: 1887499
cagcuuugauggccaagau

SEQ ID NO: 2476593 - RNA, 19 nt, Artificial Sequence
  Description of Artificial Sequence: Synthetic oligonucleotide
  Antisense strand to SEQ ID NO: 2476592
aucuuggccaucaaagcug

SEQ ID NO: 2476594 - RNA, 19 nt, Artificial Sequence
  Description of Artificial Sequence: Synthetic oligonucleotide
  Sense strand starting at position 588 of SEQ ID NO: 1887499
agcuuugauggccaagaua

SEQ ID NO: 2476595 - RNA, 19 nt, Artificial Sequence
  Description of Artificial Sequence: Synthetic oligonucleotide
  Antisense strand to SEQ ID NO: 2476594
uaucuuggccaucaaagcu

SEQ ID NO: 2476596 - RNA, 19 nt, Artificial Sequence
  Description of Artificial Sequence: Synthetic oligonucleotide
  Sense strand starting at position 631 of SEQ ID NO: 1887499
ggacuauucucuuugaugg

SEQ ID NO: 2476597 - RNA, 19 nt, Artificial Sequence
  Description of Artificial Sequence: Synthetic oligonucleotide
  Antisense strand to SEQ ID NO: 2476596
ccaucaaagagaauagucc

SEQ ID NO: 2476598 - RNA, 19 nt, Artificial Sequence
  Description of Artificial Sequence: Synthetic oligonucleotide
  Sense strand starting at position 632 of SEQ ID NO: 1887499
gacuauucucuuugaugga

SEQ ID NO: 2476599 - RNA, 19 nt, Artificial Sequence
  Description of Artificial Sequence: Synthetic oligonucleotide
  Antisense strand to SEQ ID NO: 2476598
uccaucaaagagaauaguc

SEQ ID NO: 2476600 - RNA, 19 nt, Artificial Sequence
  Description of Artificial Sequence: Synthetic oligonucleotide
  Sense strand starting at position 636 of SEQ ID NO: 1887499
auucucuuugauggauaca

SEQ ID NO: 2476601 - RNA, 19 nt, Artificial Sequence
  Description of Artificial Sequence: Synthetic oligonucleotide
  Antisense strand to SEQ ID NO: 2476600
uguauccaucaaagagaau

SEQ ID NO: 2476602 - RNA, 19 nt, Artificial Sequence
  Description of Artificial Sequence: Synthetic oligonucleotide
  Sense strand starting at position 691 of SEQ ID NO: 1887499
aguguucauguuugagaga

SEQ ID NO: 2476603 - RNA, 19 nt, Artificial Sequence
  Description of Artificial Sequence: Synthetic oligonucleotide
  Antisense strand to SEQ ID NO: 2476602
ucucucaaacaugaacacu

SEQ ID NO: 2476604 - RNA, 19 nt, Artificial Sequence
  Description of Artificial Sequence: Synthetic oligonucleotide
  Sense strand starting at position 789 of SEQ ID NO: 1887499
cacaguuuggagugggaga

SEQ ID NO: 2476605 - RNA, 19 nt, Artificial Sequence
  Description of Artificial Sequence: Synthetic oligonucleotide
  Antisense strand to SEQ ID NO: 2476604
ucucccacuccaaacugug

SEQ ID NO: 2476606 - RNA, 19 nt, Artificial Sequence
  Description of Artificial Sequence: Synthetic oligonucleotide
  Sense strand starting at position 1032 of SEQ ID NO: 1887499
ugcaaagcuuuaguuugaa

SEQ ID NO: 2476607 - RNA, 19 nt, Artificial Sequence
  Description of Artificial Sequence: Synthetic oligonucleotide
  Antisense strand to SEQ ID NO: 2476606
uucaaacuaaagcuuugca

SEQ ID NO: 2476608 - RNA, 19 nt, Artificial Sequence
  Description of Artificial Sequence: Synthetic oligonucleotide
  Sense strand starting at position 1035 of SEQ ID NO: 1887499
aaagcuuuaguuugaagac

SEQ ID NO: 2476609 - RNA, 19 nt, Artificial Sequence
  Description of Artificial Sequence: Synthetic oligonucleotide
  Antisense strand to SEQ ID NO: 2476608
gucuucaaacuaaagcuuu

SEQ ID NO: 2476610 - RNA, 19 nt, Artificial Sequence
  Description of Artificial Sequence: Synthetic oligonucleotide
  Sense strand starting at position 1042 of SEQ ID NO: 1887499
uaguuugaagacugcuaaa

SEQ ID NO: 2476611 - RNA, 19 nt, Artificial Sequence
  Description of Artificial Sequence: Synthetic oligonucleotide
  Antisense strand to SEQ ID NO: 2476610
uuuagcagucuucaaacua

SEQ ID NO: 2476612 - RNA, 19 nt, Artificial Sequence
  Description of Artificial Sequence: Synthetic oligonucleotide
  Sense strand starting at position 1077 of SEQ ID NO: 1887499
ugagucuccucuuugaaga

SEQ ID NO: 2476613 - RNA, 19 nt, Artificial Sequence
  Description of Artificial Sequence: Synthetic oligonucleotide
  Antisense strand to SEQ ID NO: 2476612
ucuucaaagaggagacuca

SEQ ID NO: 2476614 - RNA, 19 nt, Artificial Sequence
  Description of Artificial Sequence: Synthetic oligonucleotide
  Sense strand starting at position 1078 of SEQ ID NO: 1887499
gagucuccucuuugaagaa

SEQ ID NO: 2476615 - RNA, 19 nt, Artificial Sequence
  Description of Artificial Sequence: Synthetic oligonucleotide
  Antisense strand to SEQ ID NO: 2476614
uucuucaaagaggagacuc

SEQ ID NO: 2476616 - RNA, 19 nt, Artificial Sequence
  Description of Artificial Sequence: Synthetic oligonucleotide
  Sense strand starting at position 1160 of SEQ ID NO: 1887499
agcacagauuccuuuagug

SEQ ID NO: 2476617 - RNA, 19 nt, Artificial Sequence
  Description of Artificial Sequence: Synthetic oligonucleotide
  Antisense strand to SEQ ID NO: 2476616
cacuaaaggaaucugugcu

SEQ ID NO: 2476618 - RNA, 19 nt, Artificial Sequence
  Description of Artificial Sequence: Synthetic oligonucleotide
  Sense strand starting at position 1209 of SEQ ID NO: 1887499
gacaguugaguuugauugu

SEQ ID NO: 2476619 - RNA, 19 nt, Artificial Sequence
  Description of Artificial Sequence: Synthetic oligonucleotide
  Antisense strand to SEQ ID NO: 2476618
acaaucaaacucaacuguc

SEQ ID NO: 2476620 - RNA, 19 nt, Artificial Sequence
  Description of Artificial Sequence: Synthetic oligonucleotide
  Sense strand starting at position 1241 of SEQ ID NO: 1887499
aucugaagacucugucaug

SEQ ID NO: 2476621 - RNA, 19 nt, Artificial Sequence
  Description of Artificial Sequence: Synthetic oligonucleotide
  Antisense strand to SEQ ID NO: 2476620
caugacagagucuucagau

SEQ ID NO: 2476622 - RNA, 19 nt, Artificial Sequence
  Description of Artificial Sequence: Synthetic oligonucleotide
  Sense strand starting at position 1367 of SEQ ID NO: 1887499
uggugaaguggcuacugau

SEQ ID NO: 2476623 - RNA, 19 nt, Artificial Sequence
  Description of Artificial Sequence: Synthetic oligonucleotide
  Antisense strand to SEQ ID NO: 2476622
aucaguagccacuucacca

SEQ ID NO: 2476624 - RNA, 19 nt, Artificial Sequence
  Description of Artificial Sequence: Synthetic oligonucleotide
  Sense strand starting at position 1424 of SEQ ID NO: 1887499
gguagagaccauuguuguc

SEQ ID NO: 2476625 - RNA, 19 nt, Artificial Sequence
  Description of Artificial Sequence: Synthetic oligonucleotide
  Antisense strand to SEQ ID NO: 2476624
gacaacaauggucucuacc

SEQ ID NO: 2476626 - RNA, 19 nt, Artificial Sequence
  Description of Artificial Sequence: Synthetic oligonucleotide
  Sense strand starting at position 1426 of SEQ ID NO: 1887499
uagagaccauuguugucau

SEQ ID NO: 2476627 - RNA, 19 nt, Artificial Sequence
  Description of Artificial Sequence: Synthetic oligonucleotide
  Antisense strand to SEQ ID NO: 2476626
augacaacaauggucucua

SEQ ID NO: 2476628 - RNA, 19 nt, Artificial Sequence
  Description of Artificial Sequence: Synthetic oligonucleotide
  Sense strand starting at position 1433 of SEQ ID NO: 1887499
cauuguugucauuggaaca

SEQ ID NO: 2476629 - RNA, 19 nt, Artificial Sequence
  Description of Artificial Sequence: Synthetic oligonucleotide
  Antisense strand to SEQ ID NO: 2476628
uguuccaaugacaacaaug

SEQ ID NO: 2476630 - RNA, 19 nt, Artificial Sequence
  Description of Artificial Sequence: Synthetic oligonucleotide
  Sense strand starting at position 1528 of SEQ ID NO: 1887499
uugucauuggaacagugau

SEQ ID NO: 2476631 - RNA, 19 nt, Artificial Sequence
  Description of Artificial Sequence: Synthetic oligonucleotide
  Antisense strand to SEQ ID NO: 2476630
aucacuguuccaaugacaa

SEQ ID NO: 2476632 - RNA, 19 nt, Artificial Sequence
  Description of Artificial Sequence: Synthetic oligonucleotide
  Sense strand starting at position 1577 of SEQ ID NO: 1887499
aguugugacaauuggugua

SEQ ID NO: 2476633 - RNA, 19 nt, Artificial Sequence
  Description of Artificial Sequence: Synthetic oligonucleotide
  Antisense strand to SEQ ID NO: 2476632
uacaccaauugucacaacu

SEQ ID NO: 2476634 - RNA, 19 nt, Artificial Sequence
  Description of Artificial Sequence: Synthetic oligonucleotide
  Sense strand starting at position 1582 of SEQ ID NO: 1887499
ugacaauugguguagucgu

SEQ ID NO: 2476635 - RNA, 19 nt, Artificial Sequence
  Description of Artificial Sequence: Synthetic oligonucleotide
  Antisense strand to SEQ ID NO: 2476634
acgacuacaccaauuguca

SEQ ID NO: 2476636 - RNA, 19 nt, Artificial Sequence
  Description of Artificial Sequence: Synthetic oligonucleotide
  Sense strand starting at position 1723 of SEQ ID NO: 1887499
ggacaucccuucuugaaag

SEQ ID NO: 2476637 - RNA, 19 nt, Artificial Sequence
  Description of Artificial Sequence: Synthetic oligonucleotide
  Antisense strand to SEQ ID NO: 2476636
cuuucaagaagggaugucc

SEQ ID NO: 2476638 - RNA, 19 nt, Artificial Sequence
  Description of Artificial Sequence: Synthetic oligonucleotide
  Sense strand starting at position 1858 of SEQ ID NO: 1887499
augugacagcuccauugua

SEQ ID NO: 2476639 - RNA, 19 nt, Artificial Sequence
  Description of Artificial Sequence: Synthetic oligonucleotide
  Antisense strand to SEQ ID NO: 2476638
uacaauggagcugucacau

SEQ ID NO: 2476640 - RNA, 19 nt, Artificial Sequence
  Description of Artificial Sequence: Synthetic oligonucleotide
  Sense strand starting at position 1932 of SEQ ID NO: 1887499
gcuacagaaucugccagau

SEQ ID NO: 2476641 - RNA, 19 nt, Artificial Sequence
  Description of Artificial Sequence: Synthetic oligonucleotide
  Antisense strand to SEQ ID NO: 2476640
aucuggcagauucuguagc

SEQ ID NO: 2476642 - RNA, 19 nt, Artificial Sequence
  Description of Artificial Sequence: Synthetic oligonucleotide
  Sense strand starting at position 1936 of SEQ ID NO: 1887499
cagaaucugccagauguag

SEQ ID NO: 2476643 - RNA, 19 nt, Artificial Sequence
  Description of Artificial Sequence: Synthetic oligonucleotide
  Antisense strand to SEQ ID NO: 2476642
cuacaucuggcagauucug

SEQ ID NO: 2476644 - RNA, 19 nt, Artificial Sequence
  Description of Artificial Sequence: Synthetic oligonucleotide
  Sense strand starting at position 2293 of SEQ ID NO: 1887499
ucuccaguacacugauacu

SEQ ID NO: 2476645 - RNA, 19 nt, Artificial Sequence
  Description of Artificial Sequence: Synthetic oligonucleotide
  Antisense strand to SEQ ID NO: 2476644
aguaucaguguacuggaga

SEQ ID NO: 2476646 - RNA, 19 nt, Artificial Sequence
  Description of Artificial Sequence: Synthetic oligonucleotide
  Sense strand starting at position 3028 of SEQ ID NO: 1887499
aguagcuaugaauagcuua

SEQ ID NO: 2476647 - RNA, 19 nt, Artificial Sequence
  Description of Artificial Sequence: Synthetic oligonucleotide
  Antisense strand to SEQ ID NO: 2476646
uaagcuauucauagcuacu

SEQ ID NO: 2476648 - RNA, 19 nt, Artificial Sequence
  Description of Artificial Sequence: Synthetic oligonucleotide
  Sense strand starting at position 3123 of SEQ ID NO: 1887499
aaggguaauuaucugguaa

SEQ ID NO: 2476649 - RNA, 19 nt, Artificial Sequence
  Description of Artificial Sequence: Synthetic oligonucleotide
  Antisense strand to SEQ ID NO: 2476648
uuaccagauaauuacccuu

SEQ ID NO: 2476650 - RNA, 19 nt, Artificial Sequence
  Description of Artificial Sequence: Synthetic oligonucleotide
  Sense strand starting at position 3124 of SEQ ID NO: 1887499
aggguaauuaucugguaag

SEQ ID NO: 2476651 - RNA, 19 nt, Artificial Sequence
  Description of Artificial Sequence: Synthetic oligonucleotide
  Antisense strand to SEQ ID NO: 2476650
cuuaccagauaauuacccu

SEQ ID NO: 2476652 - RNA, 19 nt, Artificial Sequence
  Description of Artificial Sequence: Synthetic oligonucleotide
  Sense strand starting at position 3161 of SEQ ID NO: 1887499
guaauuagauuccuaaaug

SEQ ID NO: 2476653 - RNA, 19 nt, Artificial Sequence
  Description of Artificial Sequence: Synthetic oligonucleotide
  Antisense strand to SEQ ID NO: 2476652
cauuuaggaaucuaauuac

SEQ ID NO: 2476654 - RNA, 19 nt, Artificial Sequence
  Description of Artificial Sequence: Synthetic oligonucleotide
  Sense strand starting at position 3231 of SEQ ID NO: 1887499
agaguaccuuaagauuuaa

SEQ ID NO: 2476655 - RNA, 19 nt, Artificial Sequence
  Description of Artificial Sequence: Synthetic oligonucleotide
  Antisense strand to SEQ ID NO: 2476654
uuaaaucuuaagguacucu

SEQ ID NO: 2476656 - RNA, 19 nt, Artificial Sequence
  Description of Artificial Sequence: Synthetic oligonucleotide
  Sense strand starting at position 3427 of SEQ ID NO: 1887499
ugauauuuaugguuguggu

SEQ ID NO: 2476657 - RNA, 19 nt, Artificial Sequence
  Description of Artificial Sequence: Synthetic oligonucleotide
  Antisense strand to SEQ ID NO: 2476656
accacaaccauaaauauca

SEQ ID NO: 2476658 - RNA, 19 nt, Artificial Sequence
  Description of Artificial Sequence: Synthetic oligonucleotide
  Sense strand starting at position 3463 of SEQ ID NO: 1887499
gcuuccaagcaagaaauga

SEQ ID NO: 2476659 - RNA, 19 nt, Artificial Sequence
  Description of Artificial Sequence: Synthetic oligonucleotide
  Antisense strand to SEQ ID NO: 2476658
ucauuucuugcuuggaagc

SEQ ID NO: 2476660 - RNA, 19 nt, Artificial Sequence
  Description of Artificial Sequence: Synthetic oligonucleotide
  Sense strand starting at position 3541 of SEQ ID NO: 1887499
cagguuacaucugucagaa

SEQ ID NO: 2476661 - RNA, 19 nt, Artificial Sequence
  Description of Artificial Sequence: Synthetic oligonucleotide
  Antisense strand to SEQ ID NO: 2476660
uucugacagauguaaccug

SEQ ID NO: 2476662 - RNA, 19 nt, Artificial Sequence
  Description of Artificial Sequence: Synthetic oligonucleotide
  Sense strand starting at position 3681 of SEQ ID NO: 1887499
augugagauugucuuagaa

SEQ ID NO: 2476663 - RNA, 19 nt, Artificial Sequence
  Description of Artificial Sequence: Synthetic oligonucleotide
  Antisense strand to SEQ ID NO: 2476662
uucuaagacaaucucacau

SEQ ID NO: 2476664 - RNA, 19 nt, Artificial Sequence
  Description of Artificial Sequence: Synthetic oligonucleotide
  Sense strand starting at position 3794 of SEQ ID NO: 1887499
ccacucacugaguaguuga

SEQ ID NO: 2476665 - RNA, 19 nt, Artificial Sequence
  Description of Artificial Sequence: Synthetic oligonucleotide
  Antisense strand to SEQ ID NO: 2476664
ucaacuacucagugagugg

SEQ ID NO: 2476666 - RNA, 19 nt, Artificial Sequence
  Description of Artificial Sequence: Synthetic oligonucleotide
  Sense strand starting at position 3810 of SEQ ID NO: 1887499
ugaggaaugcccugaugga

SEQ ID NO: 2476667 - RNA, 19 nt, Artificial Sequence
  Description of Artificial Sequence: Synthetic oligonucleotide
  Antisense strand to SEQ ID NO: 2476666
uccaucagggcauuccuca

SEQ ID NO: 2476668 - RNA, 19 nt, Artificial Sequence
  Description of Artificial Sequence: Synthetic oligonucleotide
  Sense strand starting at position 456 of SEQ ID NO: 1887500
gcuguuaacuuccuagaga

SEQ ID NO: 2476669 - RNA, 19 nt, Artificial Sequence
  Description of Artificial Sequence: Synthetic oligonucleotide
  Antisense strand to SEQ ID NO: 2476668
ucucuaggaaguuaacagc

SEQ ID NO: 2476670 - RNA, 19 nt, Artificial Sequence
  Description of Artificial Sequence: Synthetic oligonucleotide
  Sense strand starting at position 457 of SEQ ID NO: 1887500
cuguuaacuuccuagagac

SEQ ID NO: 2476671 - RNA, 19 nt, Artificial Sequence
  Description of Artificial Sequence: Synthetic oligonucleotide
  Antisense strand to SEQ ID NO: 2476670
gucucuaggaaguuaacag

SEQ ID NO: 2476672 - RNA, 19 nt, Artificial Sequence
  Description of Artificial Sequence: Synthetic oligonucleotide
  Sense strand starting at position 605 of SEQ ID NO: 1887500
gguauauuguacugagauu

SEQ ID NO: 2476673 - RNA, 19 nt, Artificial Sequence
  Description of Artificial Sequence: Synthetic oligonucleotide
  Antisense strand to SEQ ID NO: 2476672
aaucucaguacaauauacc

SEQ ID NO: 2476674 - RNA, 19 nt, Artificial Sequence
  Description of Artificial Sequence: Synthetic oligonucleotide
  Sense strand starting at position 2026 of SEQ ID NO: 1887500
aaauauguauucgugaaac

SEQ ID NO: 2476675 - RNA, 19 nt, Artificial Sequence
  Description of Artificial Sequence: Synthetic oligonucleotide
  Antisense strand to SEQ ID NO: 2476674
guuucacgaauacauauuu

SEQ ID NO: 2476676 - RNA, 19 nt, Artificial Sequence
  Description of Artificial Sequence: Synthetic oligonucleotide
  Sense strand starting at position 2028 of SEQ ID NO: 1887500
auauguauucgugaaacag

SEQ ID NO: 2476677 - RNA, 19 nt, Artificial Sequence
  Description of Artificial Sequence: Synthetic oligonucleotide
  Antisense strand to SEQ ID NO: 2476676
cuguuucacgaauacauau

SEQ ID NO: 2476678 - RNA, 19 nt, Artificial Sequence
  Description of Artificial Sequence: Synthetic oligonucleotide
  Sense strand starting at position 2055 of SEQ ID NO: 1887500
agauaaggaucccauccau

SEQ ID NO: 2476679 - RNA, 19 nt, Artificial Sequence
  Description of Artificial Sequence: Synthetic oligonucleotide
  Antisense strand to SEQ ID NO: 2476678
auggaugggauccuuaucu

SEQ ID NO: 2476680 - RNA, 19 nt, Artificial Sequence
  Description of Artificial Sequence: Synthetic oligonucleotide
  Sense strand starting at position 2089 of SEQ ID NO: 1887500
cccgcugguccuugguaau

SEQ ID NO: 2476681 - RNA, 19 nt, Artificial Sequence
  Description of Artificial Sequence: Synthetic oligonucleotide
  Antisense strand to SEQ ID NO: 2476680
auuaccaaggaccagcggg

SEQ ID NO: 2476682 - RNA, 19 nt, Artificial Sequence
  Description of Artificial Sequence: Synthetic oligonucleotide
  Sense strand starting at position 2148 of SEQ ID NO: 1887500
gauggaauccugcaguuug

SEQ ID NO: 2476683 - RNA, 19 nt, Artificial Sequence
  Description of Artificial Sequence: Synthetic oligonucleotide
  Antisense strand to SEQ ID NO: 2476682
caaacugcaggauuccauc

SEQ ID NO: 2476684 - RNA, 19 nt, Artificial Sequence
  Description of Artificial Sequence: Synthetic oligonucleotide
  Sense strand starting at position 2214 of SEQ ID NO: 1887500
ccaauaguucuuuauugua

SEQ ID NO: 2476685 - RNA, 19 nt, Artificial Sequence
  Description of Artificial Sequence: Synthetic oligonucleotide
  Antisense strand to SEQ ID NO: 2476684
uacaauaaagaacuauugg

SEQ ID NO: 2476686 - RNA, 19 nt, Artificial Sequence
  Description of Artificial Sequence: Synthetic oligonucleotide
  Sense strand starting at position 2219 of SEQ ID NO: 1887500
aguucuuuauuguacauga

SEQ ID NO: 2476687 - RNA, 19 nt, Artificial Sequence
  Description of Artificial Sequence: Synthetic oligonucleotide
  Antisense strand to SEQ ID NO: 2476686
ucauguacaauaaagaacu

SEQ ID NO: 2476688 - RNA, 19 nt, Artificial Sequence
  Description of Artificial Sequence: Synthetic oligonucleotide
  Sense strand starting at position 2276 of SEQ ID NO: 1887500
ccagcuguugauggauauu

SEQ ID NO: 2476689 - RNA, 19 nt, Artificial Sequence
  Description of Artificial Sequence: Synthetic oligonucleotide
  Antisense strand to SEQ ID NO: 2476688
aauauccaucaacagcugg

SEQ ID NO: 2476690 - RNA, 19 nt, Artificial Sequence
  Description of Artificial Sequence: Synthetic oligonucleotide
  Sense strand starting at position 2285 of SEQ ID NO: 1887500
gauggauauuuggguuaau

SEQ ID NO: 2476691 - RNA, 19 nt, Artificial Sequence
  Description of Artificial Sequence: Synthetic oligonucleotide
  Antisense strand to SEQ ID NO: 2476690
auuaacccaaauauccauc

SEQ ID NO: 2476692 - RNA, 19 nt, Artificial Sequence
  Description of Artificial Sequence: Synthetic oligonucleotide
  Sense strand starting at position 2345 of SEQ ID NO: 1887500
cauaccaguguuuguaaga

SEQ ID NO: 2476693 - RNA, 19 nt, Artificial Sequence
  Description of Artificial Sequence: Synthetic oligonucleotide
  Antisense strand to SEQ ID NO: 2476692
ucuuacaaacacugguaug

SEQ ID NO: 2476694 - RNA, 19 nt, Artificial Sequence
  Description of Artificial Sequence: Synthetic oligonucleotide
  Sense strand starting at position 2346 of SEQ ID NO: 1887500
auaccaguguuuguaagaa

SEQ ID NO: 2476695 - RNA, 19 nt, Artificial Sequence
  Description of Artificial Sequence: Synthetic oligonucleotide
  Antisense strand to SEQ ID NO: 2476694
uucuuacaaacacugguau

SEQ ID NO: 2476696 - RNA, 19 nt, Artificial Sequence
  Description of Artificial Sequence: Synthetic oligonucleotide
  Sense strand starting at position 2350 of SEQ ID NO: 1887500
caguguuuguaagaacaua

SEQ ID NO: 2476697 - RNA, 19 nt, Artificial Sequence
  Description of Artificial Sequence: Synthetic oligonucleotide
  Antisense strand to SEQ ID NO: 2476696
uauguucuuacaaacacug

SEQ ID NO: 2476698 - RNA, 19 nt, Artificial Sequence
  Description of Artificial Sequence: Synthetic oligonucleotide
  Sense strand starting at position 2721 of SEQ ID NO: 1887500
ggguguugugacaggugua

SEQ ID NO: 2476699 - RNA, 19 nt, Artificial Sequence
  Description of Artificial Sequence: Synthetic oligonucleotide
  Antisense strand to SEQ ID NO: 2476698
uacaccugucacaacaccc

SEQ ID NO: 2476700 - RNA, 19 nt, Artificial Sequence
  Description of Artificial Sequence: Synthetic oligonucleotide
  Sense strand starting at position 2722 of SEQ ID NO: 1887500
gguguugugacagguguau

SEQ ID NO: 2476701 - RNA, 19 nt, Artificial Sequence
  Description of Artificial Sequence: Synthetic oligonucleotide
  Antisense strand to SEQ ID NO: 2476700
auacaccugucacaacacc

SEQ ID NO: 2476702 - RNA, 19 nt, Artificial Sequence
  Description of Artificial Sequence: Synthetic oligonucleotide
  Sense strand starting at position 2724 of SEQ ID NO: 1887500
uguugugacagguguaugu

SEQ ID NO: 2476703 - RNA, 19 nt, Artificial Sequence
  Description of Artificial Sequence: Synthetic oligonucleotide
  Antisense strand to SEQ ID NO: 2476702
acauacaccugucacaaca

SEQ ID NO: 2476704 - RNA, 19 nt, Artificial Sequence
  Description of Artificial Sequence: Synthetic oligonucleotide
  Sense strand starting at position 2726 of SEQ ID NO: 1887500
uugugacagguguauguuu

SEQ ID NO: 2476705 - RNA, 19 nt, Artificial Sequence
  Description of Artificial Sequence: Synthetic oligonucleotide
  Antisense strand to SEQ ID NO: 2476704
aaacauacaccugucacaa

SEQ ID NO: 2476706 - RNA, 19 nt, Artificial Sequence
  Description of Artificial Sequence: Synthetic oligonucleotide
  Sense strand starting at position 2728 of SEQ ID NO: 1887500
gugacagguguauguuuaa

SEQ ID NO: 2476707 - RNA, 19 nt, Artificial Sequence
  Description of Artificial Sequence: Synthetic oligonucleotide
  Antisense strand to SEQ ID NO: 2476706
uuaaacauacaccugucac

SEQ ID NO: 2476708 - RNA, 19 nt, Artificial Sequence
  Description of Artificial Sequence: Synthetic oligonucleotide
  Sense strand starting at position 2731 of SEQ ID NO: 1887500
acagguguauguuuaacuu

SEQ ID NO: 2476709 - RNA, 19 nt, Artificial Sequence
  Description of Artificial Sequence: Synthetic oligonucleotide
  Antisense strand to SEQ ID NO: 2476708
aaguuaaacauacaccugu

SEQ ID NO: 2476710 - RNA, 19 nt, Artificial Sequence
  Description of Artificial Sequence: Synthetic oligonucleotide
  Sense strand starting at position 2800 of SEQ ID NO: 1887500
ccaccaacgucauaagagu

SEQ ID NO: 2476711 - RNA, 19 nt, Artificial Sequence
  Description of Artificial Sequence: Synthetic oligonucleotide
  Antisense strand to SEQ ID NO: 2476710
acucuuaugacguuggugg

SEQ ID NO: 2476712 - RNA, 19 nt, Artificial Sequence
  Description of Artificial Sequence: Synthetic oligonucleotide
  Sense strand starting at position 2828 of SEQ ID NO: 1887500
uucgcauugucaccaacau

SEQ ID NO: 2476713 - RNA, 19 nt, Artificial Sequence
  Description of Artificial Sequence: Synthetic oligonucleotide
  Antisense strand to SEQ ID NO: 2476712
auguuggugacaaugcgaa

SEQ ID NO: 2476714 - RNA, 19 nt, Artificial Sequence
  Description of Artificial Sequence: Synthetic oligonucleotide
  Sense strand starting at position 2829 of SEQ ID NO: 1887500
ucgcauugucaccaacauu

SEQ ID NO: 2476715 - RNA, 19 nt, Artificial Sequence
  Description of Artificial Sequence: Synthetic oligonucleotide
  Antisense strand to SEQ ID NO: 2476714
aauguuggugacaaugcga

SEQ ID NO: 2476716 - RNA, 19 nt, Artificial Sequence
  Description of Artificial Sequence: Synthetic oligonucleotide
  Sense strand starting at position 2898 of SEQ ID NO: 1887500
uuagaauuguggcuuaaug

SEQ ID NO: 2476717 - RNA, 19 nt, Artificial Sequence
  Description of Artificial Sequence: Synthetic oligonucleotide
  Antisense strand to SEQ ID NO: 2476716
cauuaagccacaauucuaa

SEQ ID NO: 2476718 - RNA, 19 nt, Artificial Sequence
  Description of Artificial Sequence: Synthetic oligonucleotide
  Sense strand starting at position 3212 of SEQ ID NO: 1887500
guggcuuaaguuuguguuu

SEQ ID NO: 2476719 - RNA, 19 nt, Artificial Sequence
  Description of Artificial Sequence: Synthetic oligonucleotide
  Antisense strand to SEQ ID NO: 2476718
aaacacaaacuuaagccac

SEQ ID NO: 2476720 - RNA, 19 nt, Artificial Sequence
  Description of Artificial Sequence: Synthetic oligonucleotide
  Sense strand starting at position 3213 of SEQ ID NO: 1887500
uggcuuaaguuuguguuua

SEQ ID NO: 2476721 - RNA, 19 nt, Artificial Sequence
  Description of Artificial Sequence: Synthetic oligonucleotide
  Antisense strand to SEQ ID NO: 2476720
uaaacacaaacuuaagcca

SEQ ID NO: 2476722 - RNA, 19 nt, Artificial Sequence
  Description of Artificial Sequence: Synthetic oligonucleotide
  Sense strand starting at position 3215 of SEQ ID NO: 1887500
gcuuaaguuuguguuuacu

SEQ ID NO: 2476723 - RNA, 19 nt, Artificial Sequence
  Description of Artificial Sequence: Synthetic oligonucleotide
  Antisense strand to SEQ ID NO: 2476722
aguaaacacaaacuuaagc

SEQ ID NO: 2476724 - RNA, 19 nt, Artificial Sequence
  Description of Artificial Sequence: Synthetic oligonucleotide
  Sense strand starting at position 3221 of SEQ ID NO: 1887500
guuuguguuuacuuaauga

SEQ ID NO: 2476725 - RNA, 19 nt, Artificial Sequence
  Description of Artificial Sequence: Synthetic oligonucleotide
  Antisense strand to SEQ ID NO: 2476724
ucauuaaguaaacacaaac

SEQ ID NO: 2476726 - RNA, 19 nt, Artificial Sequence
  Description of Artificial Sequence: Synthetic oligonucleotide
  Sense strand starting at position 3225 of SEQ ID NO: 1887500
guguuuacuuaaugaauga

SEQ ID NO: 2476727 - RNA, 19 nt, Artificial Sequence
  Description of Artificial Sequence: Synthetic oligonucleotide
  Antisense strand to SEQ ID NO: 2476726
ucauucauuaaguaaacac

SEQ ID NO: 2476728 - RNA, 19 nt, Artificial Sequence
  Description of Artificial Sequence: Synthetic oligonucleotide
  Sense strand starting at position 3235 of SEQ ID NO: 1887500
aaugaaugaugauguugaa

SEQ ID NO: 2476729 - RNA, 19 nt, Artificial Sequence
  Description of Artificial Sequence: Synthetic oligonucleotide
  Antisense strand to SEQ ID NO: 2476728
uucaacaucaucauucauu

SEQ ID NO: 2476730 - RNA, 19 nt, Artificial Sequence
  Description of Artificial Sequence: Synthetic oligonucleotide
  Sense strand starting at position 3238 of SEQ ID NO: 1887500
gaaugaugauguugaauga

SEQ ID NO: 2476731 - RNA, 19 nt, Artificial Sequence
  Description of Artificial Sequence: Synthetic oligonucleotide
  Antisense strand to SEQ ID NO: 2476730
ucauucaacaucaucauuc

SEQ ID NO: 2476732 - RNA, 19 nt, Artificial Sequence
  Description of Artificial Sequence: Synthetic oligonucleotide
  Sense strand starting at position 3242 of SEQ ID NO: 1887500
gaugauguugaaugauauu

SEQ ID NO: 2476733 - RNA, 19 nt, Artificial Sequence
  Description of Artificial Sequence: Synthetic oligonucleotide
  Antisense strand to SEQ ID NO: 2476732
aauaucauucaacaucauc

SEQ ID NO: 2476734 - RNA, 19 nt, Artificial Sequence
  Description of Artificial Sequence: Synthetic oligonucleotide
  Sense strand starting at position 3285 of SEQ ID NO: 1887500
aauauucuguggucaagua

SEQ ID NO: 2476735 - RNA, 19 nt, Artificial Sequence
  Description of Artificial Sequence: Synthetic oligonucleotide
  Antisense strand to SEQ ID NO: 2476734
uacuugaccacagaauauu

SEQ ID NO: 2476736 - RNA, 19 nt, Artificial Sequence
  Description of Artificial Sequence: Synthetic oligonucleotide
  Sense strand starting at position 3286 of SEQ ID NO: 1887500
auauucuguggucaaguau

SEQ ID NO: 2476737 - RNA, 19 nt, Artificial Sequence
  Description of Artificial Sequence: Synthetic oligonucleotide
  Antisense strand to SEQ ID NO: 2476736
auacuugaccacagaauau

SEQ ID NO: 2476738 - RNA, 19 nt, Artificial Sequence
  Description of Artificial Sequence: Synthetic oligonucleotide
  Sense strand starting at position 3362 of SEQ ID NO: 1887500
auauaauugcugcaucaga

SEQ ID NO: 2476739 - RNA, 19 nt, Artificial Sequence
  Description of Artificial Sequence: Synthetic oligonucleotide
  Antisense strand to SEQ ID NO: 2476738
ucugaugcagcaauuauau

SEQ ID NO: 2476740 - RNA, 19 nt, Artificial Sequence
  Description of Artificial Sequence: Synthetic oligonucleotide
  Sense strand starting at position 3375 of SEQ ID NO: 1887500
aucagauuaugguuuguau

SEQ ID NO: 2476741 - RNA, 19 nt, Artificial Sequence
  Description of Artificial Sequence: Synthetic oligonucleotide
  Antisense strand to SEQ ID NO: 2476740
auacaaaccauaaucugau

SEQ ID NO: 2476742 - RNA, 19 nt, Artificial Sequence
  Description of Artificial Sequence: Synthetic oligonucleotide
  Sense strand starting at position 3377 of SEQ ID NO: 1887500
cagauuaugguuuguaugu

SEQ ID NO: 2476743 - RNA, 19 nt, Artificial Sequence
  Description of Artificial Sequence: Synthetic oligonucleotide
  Antisense strand to SEQ ID NO: 2476742
acauacaaaccauaaucug

SEQ ID NO: 2476744 - RNA, 19 nt, Artificial Sequence
  Description of Artificial Sequence: Synthetic oligonucleotide
  Sense strand starting at position 3378 of SEQ ID NO: 1887500
agauuaugguuuguaugua

SEQ ID NO: 2476745 - RNA, 19 nt, Artificial Sequence
  Description of Artificial Sequence: Synthetic oligonucleotide
  Antisense strand to SEQ ID NO: 2476744
uacauacaaaccauaaucu

SEQ ID NO: 2476746 - RNA, 19 nt, Artificial Sequence
  Description of Artificial Sequence: Synthetic oligonucleotide
  Sense strand starting at position 3750 of SEQ ID NO: 1887500
gcagucuuaugccuauaau

SEQ ID NO: 2476747 - RNA, 19 nt, Artificial Sequence
  Description of Artificial Sequence: Synthetic oligonucleotide
  Antisense strand to SEQ ID NO: 2476746
auuauaggcauaagacugc

SEQ ID NO: 2476748 - RNA, 19 nt, Artificial Sequence
  Description of Artificial Sequence: Synthetic oligonucleotide
  Sense strand starting at position 56 of SEQ ID NO: 1887501
agaagaagaucuucgugaa

SEQ ID NO: 2476749 - RNA, 19 nt, Artificial Sequence
  Description of Artificial Sequence: Synthetic oligonucleotide
  Antisense strand to SEQ ID NO: 2476748
uucacgaagaucuucuucu

SEQ ID NO: 2476750 - RNA, 19 nt, Artificial Sequence
  Description of Artificial Sequence: Synthetic oligonucleotide
  Sense strand starting at position 57 of SEQ ID NO: 1887501
gaagaagaucuucgugaaa

SEQ ID NO: 2476751 - RNA, 19 nt, Artificial Sequence
  Description of Artificial Sequence: Synthetic oligonucleotide
  Antisense strand to SEQ ID NO: 2476750
uuucacgaagaucuucuuc

SEQ ID NO: 2476752 - RNA, 19 nt, Artificial Sequence
  Description of Artificial Sequence: Synthetic oligonucleotide
  Sense strand starting at position 59 of SEQ ID NO: 1887501
agaagaucuucgugaaagc

SEQ ID NO: 2476753 - RNA, 19 nt, Artificial Sequence
  Description of Artificial Sequence: Synthetic oligonucleotide
  Antisense strand to SEQ ID NO: 2476752
gcuuucacgaagaucuucu

SEQ ID NO: 2476754 - RNA, 19 nt, Artificial Sequence
  Description of Artificial Sequence: Synthetic oligonucleotide
  Sense strand starting at position 60 of SEQ ID NO: 1887501
gaagaucuucgugaaagca

SEQ ID NO: 2476755 - RNA, 19 nt, Artificial Sequence
  Description of Artificial Sequence: Synthetic oligonucleotide
  Antisense strand to SEQ ID NO: 2476754
ugcuuucacgaagaucuuc

SEQ ID NO: 2476756 - RNA, 19 nt, Artificial Sequence
  Description of Artificial Sequence: Synthetic oligonucleotide
  Sense strand starting at position 99 of SEQ ID NO: 1887501
ggauaaagauaauaaugga

SEQ ID NO: 2476757 - RNA, 19 nt, Artificial Sequence
  Description of Artificial Sequence: Synthetic oligonucleotide
  Antisense strand to SEQ ID NO: 2476756
uccauuauuaucuuuaucc

SEQ ID NO: 2476758 - RNA, 19 nt, Artificial Sequence
  Description of Artificial Sequence: Synthetic oligonucleotide
  Sense strand starting at position 145 of SEQ ID NO: 1887501
aggugaggaugaagguauu

SEQ ID NO: 2476759 - RNA, 19 nt, Artificial Sequence
  Description of Artificial Sequence: Synthetic oligonucleotide
  Antisense strand to SEQ ID NO: 2476758
aauaccuucauccucaccu

SEQ ID NO: 2476760 - RNA, 19 nt, Artificial Sequence
  Description of Artificial Sequence: Synthetic oligonucleotide
  Sense strand starting at position 786 of SEQ ID NO: 1887501
gcccgaacuucugggaagu

SEQ ID NO: 2476761 - RNA, 19 nt, Artificial Sequence
  Description of Artificial Sequence: Synthetic oligonucleotide
  Antisense strand to SEQ ID NO: 2476760
acuucccagaaguucgggc

SEQ ID NO: 2476762 - RNA, 19 nt, Artificial Sequence
  Description of Artificial Sequence: Synthetic oligonucleotide
  Sense strand starting at position 787 of SEQ ID NO: 1887501
cccgaacuucugggaaguu

SEQ ID NO: 2476763 - RNA, 19 nt, Artificial Sequence
  Description of Artificial Sequence: Synthetic oligonucleotide
  Antisense strand to SEQ ID NO: 2476762
aacuucccagaaguucggg

SEQ ID NO: 2476764 - RNA, 19 nt, Artificial Sequence
  Description of Artificial Sequence: Synthetic oligonucleotide
  Sense strand starting at position 788 of SEQ ID NO: 1887501
ccgaacuucugggaaguuu

SEQ ID NO: 2476765 - RNA, 19 nt, Artificial Sequence
  Description of Artificial Sequence: Synthetic oligonucleotide
  Antisense strand to SEQ ID NO: 2476764
aaacuucccagaaguucgg

SEQ ID NO: 2476766 - RNA, 19 nt, Artificial Sequence
  Description of Artificial Sequence: Synthetic oligonucleotide
  Sense strand starting at position 816 of SEQ ID NO: 1887501
ucauguugggagugacagu

SEQ ID NO: 2476767 - RNA, 19 nt, Artificial Sequence
  Description of Artificial Sequence: Synthetic oligonucleotide
  Antisense strand to SEQ ID NO: 2476766
acugucacucccaacauga

SEQ ID NO: 2476768 - RNA, 19 nt, Artificial Sequence
  Description of Artificial Sequence: Synthetic oligonucleotide
  Sense strand starting at position 825 of SEQ ID NO: 1887501
gagugacagugcuguugau

SEQ ID NO: 2476769 - RNA, 19 nt, Artificial Sequence
  Description of Artificial Sequence: Synthetic oligonucleotide
  Antisense strand to SEQ ID NO: 2476768
aucaacagcacugucacuc

SEQ ID NO: 2476770 - RNA, 19 nt, Artificial Sequence
  Description of Artificial Sequence: Synthetic oligonucleotide
  Sense strand starting at position 880 of SEQ ID NO: 1887501
ugggacagauacuaacaaa

SEQ ID NO: 2476771 - RNA, 19 nt, Artificial Sequence
  Description of Artificial Sequence: Synthetic oligonucleotide
  Antisense strand to SEQ ID NO: 2476770
uuuguuaguaucuguccca

SEQ ID NO: 2476772 - RNA, 19 nt, Artificial Sequence
  Description of Artificial Sequence: Synthetic oligonucleotide
  Sense strand starting at position 924 of SEQ ID NO: 1887501
guauuagggucuugaaggu

SEQ ID NO: 2476773 - RNA, 19 nt, Artificial Sequence
  Description of Artificial Sequence: Synthetic oligonucleotide
  Antisense strand to SEQ ID NO: 2476772
accuucaagacccuaauac

SEQ ID NO: 2476774 - RNA, 19 nt, Artificial Sequence
  Description of Artificial Sequence: Synthetic oligonucleotide
  Sense strand starting at position 933 of SEQ ID NO: 1887501
ucuugaaggucuuuacucu

SEQ ID NO: 2476775 - RNA, 19 nt, Artificial Sequence
  Description of Artificial Sequence: Synthetic oligonucleotide
  Antisense strand to SEQ ID NO: 2476774
agaguaaagaccuucaaga

SEQ ID NO: 2476776 - RNA, 19 nt, Artificial Sequence
  Description of Artificial Sequence: Synthetic oligonucleotide
  Sense strand starting at position 937 of SEQ ID NO: 1887501
gaaggucuuuacucugaac

SEQ ID NO: 2476777 - RNA, 19 nt, Artificial Sequence
  Description of Artificial Sequence: Synthetic oligonucleotide
  Antisense strand to SEQ ID NO: 2476776
guucagaguaaagaccuuc

SEQ ID NO: 2476778 - RNA, 19 nt, Artificial Sequence
  Description of Artificial Sequence: Synthetic oligonucleotide
  Sense strand starting at position 1130 of SEQ ID NO: 1887501
cggguggcaucguagaaau

SEQ ID NO: 2476779 - RNA, 19 nt, Artificial Sequence
  Description of Artificial Sequence: Synthetic oligonucleotide
  Antisense strand to SEQ ID NO: 2476778
auuucuacgaugccacccg

SEQ ID NO: 2476780 - RNA, 19 nt, Artificial Sequence
  Description of Artificial Sequence: Synthetic oligonucleotide
  Sense strand starting at position 1132 of SEQ ID NO: 1887501
gguggcaucguagaaauag

SEQ ID NO: 2476781 - RNA, 19 nt, Artificial Sequence
  Description of Artificial Sequence: Synthetic oligonucleotide
  Antisense strand to SEQ ID NO: 2476780
cuauuucuacgaugccacc

SEQ ID NO: 2476782 - RNA, 19 nt, Artificial Sequence
  Description of Artificial Sequence: Synthetic oligonucleotide
  Sense strand starting at position 1223 of SEQ ID NO: 1887501
gcccgugugcugaagauug

SEQ ID NO: 2476783 - RNA, 19 nt, Artificial Sequence
  Description of Artificial Sequence: Synthetic oligonucleotide
  Antisense strand to SEQ ID NO: 2476782
caaucuucagcacacgggc

SEQ ID NO: 2476784 - RNA, 19 nt, Artificial Sequence
  Description of Artificial Sequence: Synthetic oligonucleotide
  Sense strand starting at position 1497 of SEQ ID NO: 1887501
aggugugcccgucauggaa

SEQ ID NO: 2476785 - RNA, 19 nt, Artificial Sequence
  Description of Artificial Sequence: Synthetic oligonucleotide
  Antisense strand to SEQ ID NO: 2476784
uuccaugacgggcacaccu

SEQ ID NO: 2476786 - RNA, 19 nt, Artificial Sequence
  Description of Artificial Sequence: Synthetic oligonucleotide
  Sense strand starting at position 1859 of SEQ ID NO: 1887501
auagauaacucagagcaag

SEQ ID NO: 2476787 - RNA, 19 nt, Artificial Sequence
  Description of Artificial Sequence: Synthetic oligonucleotide
  Antisense strand to SEQ ID NO: 2476786
cuugcucugaguuaucuau

SEQ ID NO: 2476788 - RNA, 19 nt, Artificial Sequence
  Description of Artificial Sequence: Synthetic oligonucleotide
  Sense strand starting at position 1959 of SEQ ID NO: 1887501
cgcugacauccagauguaa

SEQ ID NO: 2476789 - RNA, 19 nt, Artificial Sequence
  Description of Artificial Sequence: Synthetic oligonucleotide
  Antisense strand to SEQ ID NO: 2476788
uuacaucuggaugucagcg

SEQ ID NO: 2476790 - RNA, 19 nt, Artificial Sequence
  Description of Artificial Sequence: Synthetic oligonucleotide
  Sense strand starting at position 2042 of SEQ ID NO: 1887501
ggccaaaucucugcugagu

SEQ ID NO: 2476791 - RNA, 19 nt, Artificial Sequence
  Description of Artificial Sequence: Synthetic oligonucleotide
  Antisense strand to SEQ ID NO: 2476790
acucagcagagauuuggcc

SEQ ID NO: 2476792 - RNA, 19 nt, Artificial Sequence
  Description of Artificial Sequence: Synthetic oligonucleotide
  Sense strand starting at position 2044 of SEQ ID NO: 1887501
ccaaaucucugcugaguuc

SEQ ID NO: 2476793 - RNA, 19 nt, Artificial Sequence
  Description of Artificial Sequence: Synthetic oligonucleotide
  Antisense strand to SEQ ID NO: 2476792
gaacucagcagagauuugg

SEQ ID NO: 2476794 - RNA, 19 nt, Artificial Sequence
  Description of Artificial Sequence: Synthetic oligonucleotide
  Sense strand starting at position 2055 of SEQ ID NO: 1887501
cugaguucuuuccaccaca

SEQ ID NO: 2476795 - RNA, 19 nt, Artificial Sequence
  Description of Artificial Sequence: Synthetic oligonucleotide
  Antisense strand to SEQ ID NO: 2476794
ugugguggaaagaacucag

SEQ ID NO: 2476796 - RNA, 19 nt, Artificial Sequence
  Description of Artificial Sequence: Synthetic oligonucleotide
  Sense strand starting at position 2120 of SEQ ID NO: 1887501
cguugagagguguguagua

SEQ ID NO: 2476797 - RNA, 19 nt, Artificial Sequence
  Description of Artificial Sequence: Synthetic oligonucleotide
  Antisense strand to SEQ ID NO: 2476796
uacuacacaccucucaacg

SEQ ID NO: 2476798 - RNA, 19 nt, Artificial Sequence
  Description of Artificial Sequence: Synthetic oligonucleotide
  Sense strand starting at position 3011 of SEQ ID NO: 1887501
cuucgugacuccuccucua

SEQ ID NO: 2476799 - RNA, 19 nt, Artificial Sequence
  Description of Artificial Sequence: Synthetic oligonucleotide
  Antisense strand to SEQ ID NO: 2476798
uagaggaggagucacgaag

SEQ ID NO: 2476800 - RNA, 19 nt, Artificial Sequence
  Description of Artificial Sequence: Synthetic oligonucleotide
  Sense strand starting at position 3014 of SEQ ID NO: 1887501
cgugacuccuccucuaacu

SEQ ID NO: 2476801 - RNA, 19 nt, Artificial Sequence
  Description of Artificial Sequence: Synthetic oligonucleotide
  Antisense strand to SEQ ID NO: 2476800
aguuagaggaggagucacg

SEQ ID NO: 2476802 - RNA, 19 nt, Artificial Sequence
  Description of Artificial Sequence: Synthetic oligonucleotide
  Sense strand starting at position 3854 of SEQ ID NO: 1887501
agggacaucugggaugaga

SEQ ID NO: 2476803 - RNA, 19 nt, Artificial Sequence
  Description of Artificial Sequence: Synthetic oligonucleotide
  Antisense strand to SEQ ID NO: 2476802
ucucaucccagaugucccu

SEQ ID NO: 2476804 - RNA, 19 nt, Artificial Sequence
  Description of Artificial Sequence: Synthetic oligonucleotide
  Sense strand starting at position 3968 of SEQ ID NO: 1887501
gucaccuucucaggagaca

SEQ ID NO: 2476805 - RNA, 19 nt, Artificial Sequence
  Description of Artificial Sequence: Synthetic oligonucleotide
  Antisense strand to SEQ ID NO: 2476804
ugucuccugagaaggugac

SEQ ID NO: 2476806 - RNA, 19 nt, Artificial Sequence
  Description of Artificial Sequence: Synthetic oligonucleotide
  Sense strand starting at position 45 of SEQ ID NO: 1887502
aaguguacuagggagguau

SEQ ID NO: 2476807 - RNA, 19 nt, Artificial Sequence
  Description of Artificial Sequence: Synthetic oligonucleotide
  Antisense strand to SEQ ID NO: 2476806
auaccucccuaguacacuu

SEQ ID NO: 2476808 - RNA, 19 nt, Artificial Sequence
  Description of Artificial Sequence: Synthetic oligonucleotide
  Sense strand starting at position 91 of SEQ ID NO: 1887502
ggaucuaaugugcgauuuc

SEQ ID NO: 2476809 - RNA, 19 nt, Artificial Sequence
  Description of Artificial Sequence: Synthetic oligonucleotide
  Antisense strand to SEQ ID NO: 2476808
gaaaucgcacauuagaucc

SEQ ID NO: 2476810 - RNA, 19 nt, Artificial Sequence
  Description of Artificial Sequence: Synthetic oligonucleotide
  Sense strand starting at position 608 of SEQ ID NO: 1887502
uguggagaacugcauccau

SEQ ID NO: 2476811 - RNA, 19 nt, Artificial Sequence
  Description of Artificial Sequence: Synthetic oligonucleotide
  Antisense strand to SEQ ID NO: 2476810
auggaugcaguucuccaca

SEQ ID NO: 2476812 - RNA, 19 nt, Artificial Sequence
  Description of Artificial Sequence: Synthetic oligonucleotide
  Sense strand starting at position 652 of SEQ ID NO: 1887502
gagagacucugugugccau

SEQ ID NO: 2476813 - RNA, 19 nt, Artificial Sequence
  Description of Artificial Sequence: Synthetic oligonucleotide
  Antisense strand to SEQ ID NO: 2476812
auggcacacagagucucuc

SEQ ID NO: 2476814 - RNA, 19 nt, Artificial Sequence
  Description of Artificial Sequence: Synthetic oligonucleotide
  Sense strand starting at position 653 of SEQ ID NO: 1887502
agagacucugugugccaua

SEQ ID NO: 2476815 - RNA, 19 nt, Artificial Sequence
  Description of Artificial Sequence: Synthetic oligonucleotide
  Antisense strand to SEQ ID NO: 2476814
uauggcacacagagucucu

SEQ ID NO: 2476816 - RNA, 19 nt, Artificial Sequence
  Description of Artificial Sequence: Synthetic oligonucleotide
  Sense strand starting at position 751 of SEQ ID NO: 1887502
ggguauucccagggagggu

SEQ ID NO: 2476817 - RNA, 19 nt, Artificial Sequence
  Description of Artificial Sequence: Synthetic oligonucleotide
  Antisense strand to SEQ ID NO: 2476816
acccucccugggaauaccc

SEQ ID NO: 2476818 - RNA, 19 nt, Artificial Sequence
  Description of Artificial Sequence: Synthetic oligonucleotide
  Sense strand starting at position 869 of SEQ ID NO: 1887502
aacuguucccgcgaagaac

SEQ ID NO: 2476819 - RNA, 19 nt, Artificial Sequence
  Description of Artificial Sequence: Synthetic oligonucleotide
  Antisense strand to SEQ ID NO: 2476818
guucuucgcgggaacaguu

SEQ ID NO: 2476820 - RNA, 19 nt, Artificial Sequence
  Description of Artificial Sequence: Synthetic oligonucleotide
  Sense strand starting at position 880 of SEQ ID NO: 1887502
cgaagaaccuaccugcuua

SEQ ID NO: 2476821 - RNA, 19 nt, Artificial Sequence
  Description of Artificial Sequence: Synthetic oligonucleotide
  Antisense strand to SEQ ID NO: 2476820
uaagcagguagguucuucg

SEQ ID NO: 2476822 - RNA, 19 nt, Artificial Sequence
  Description of Artificial Sequence: Synthetic oligonucleotide
  Sense strand starting at position 920 of SEQ ID NO: 1887502
agaugacacugagugcuau

SEQ ID NO: 2476823 - RNA, 19 nt, Artificial Sequence
  Description of Artificial Sequence: Synthetic oligonucleotide
  Antisense strand to SEQ ID NO: 2476822
auagcacucagugucaucu

SEQ ID NO: 2476824 - RNA, 19 nt, Artificial Sequence
  Description of Artificial Sequence: Synthetic oligonucleotide
  Sense strand starting at position 921 of SEQ ID NO: 1887502
gaugacacugagugcuauu

SEQ ID NO: 2476825 - RNA, 19 nt, Artificial Sequence
  Description of Artificial Sequence: Synthetic oligonucleotide
  Antisense strand to SEQ ID NO: 2476824
aauagcacucagugucauc

SEQ ID NO: 2476826 - RNA, 19 nt, Artificial Sequence
  Description of Artificial Sequence: Synthetic oligonucleotide
  Sense strand starting at position 932 of SEQ ID NO: 1887502
gugcuauugcaucagucag

SEQ ID NO: 2476827 - RNA, 19 nt, Artificial Sequence
  Description of Artificial Sequence: Synthetic oligonucleotide
  Antisense strand to SEQ ID NO: 2476826
cugacugaugcaauagcac

SEQ ID NO: 2476828 - RNA, 19 nt, Artificial Sequence
  Description of Artificial Sequence: Synthetic oligonucleotide
  Sense strand starting at position 934 of SEQ ID NO: 1887502
gcuauugcaucagucagga

SEQ ID NO: 2476829 - RNA, 19 nt, Artificial Sequence
  Description of Artificial Sequence: Synthetic oligonucleotide
  Antisense strand to SEQ ID NO: 2476828
uccugacugaugcaauagc

SEQ ID NO: 2476830 - RNA, 19 nt, Artificial Sequence
  Description of Artificial Sequence: Synthetic oligonucleotide
  Sense strand starting at position 1688 of SEQ ID NO: 1887502
ccguuaaucaccgccguga

SEQ ID NO: 2476831 - RNA, 19 nt, Artificial Sequence
  Description of Artificial Sequence: Synthetic oligonucleotide
  Antisense strand to SEQ ID NO: 2476830
ucacggcggugauuaacgg

SEQ ID NO: 2476832 - RNA, 19 nt, Artificial Sequence
  Description of Artificial Sequence: Synthetic oligonucleotide
  Sense strand starting at position 1810 of SEQ ID NO: 1887502
augcuacauccugaugaug

SEQ ID NO: 2476833 - RNA, 19 nt, Artificial Sequence
  Description of Artificial Sequence: Synthetic oligonucleotide
  Antisense strand to SEQ ID NO: 2476832
caucaucaggauguagcau

SEQ ID NO: 2476834 - RNA, 19 nt, Artificial Sequence
  Description of Artificial Sequence: Synthetic oligonucleotide
  Sense strand starting at position 1897 of SEQ ID NO: 1887502
guccuauucugguuggaaa

SEQ ID NO: 2476835 - RNA, 19 nt, Artificial Sequence
  Description of Artificial Sequence: Synthetic oligonucleotide
  Antisense strand to SEQ ID NO: 2476834
uuuccaaccagaauaggac

SEQ ID NO: 2476836 - RNA, 19 nt, Artificial Sequence
  Description of Artificial Sequence: Synthetic oligonucleotide
  Sense strand starting at position 1898 of SEQ ID NO: 1887502
uccuauucugguuggaaau

SEQ ID NO: 2476837 - RNA, 19 nt, Artificial Sequence
  Description of Artificial Sequence: Synthetic oligonucleotide
  Antisense strand to SEQ ID NO: 2476836
auuuccaaccagaauagga

SEQ ID NO: 2476838 - RNA, 19 nt, Artificial Sequence
  Description of Artificial Sequence: Synthetic oligonucleotide
  Sense strand starting at position 1899 of SEQ ID NO: 1887502
ccuauucugguuggaaaug

SEQ ID NO: 2476839 - RNA, 19 nt, Artificial Sequence
  Description of Artificial Sequence: Synthetic oligonucleotide
  Antisense strand to SEQ ID NO: 2476838
cauuuccaaccagaauagg

SEQ ID NO: 2476840 - RNA, 19 nt, Artificial Sequence
  Description of Artificial Sequence: Synthetic oligonucleotide
  Sense strand starting at position 1927 of SEQ ID NO: 1887502
aguaaugcuugcucaauua

SEQ ID NO: 2476841 - RNA, 19 nt, Artificial Sequence
  Description of Artificial Sequence: Synthetic oligonucleotide
  Antisense strand to SEQ ID NO: 2476840
uaauugagcaagcauuacu

SEQ ID NO: 2476842 - RNA, 19 nt, Artificial Sequence
  Description of Artificial Sequence: Synthetic oligonucleotide
  Sense strand starting at position 2197 of SEQ ID NO: 1887502
gggagcgcugugagcaauu

SEQ ID NO: 2476843 - RNA, 19 nt, Artificial Sequence
  Description of Artificial Sequence: Synthetic oligonucleotide
  Antisense strand to SEQ ID NO: 2476842
aauugcucacagcgcuccc

SEQ ID NO: 2476844 - RNA, 19 nt, Artificial Sequence
  Description of Artificial Sequence: Synthetic oligonucleotide
  Sense strand starting at position 2325 of SEQ ID NO: 1887502
ccuggcauuuaucaagcaa

SEQ ID NO: 2476845 - RNA, 19 nt, Artificial Sequence
  Description of Artificial Sequence: Synthetic oligonucleotide
  Antisense strand to SEQ ID NO: 2476844
uugcuugauaaaugccagg

SEQ ID NO: 2476846 - RNA, 19 nt, Artificial Sequence
  Description of Artificial Sequence: Synthetic oligonucleotide
  Sense strand starting at position 2361 of SEQ ID NO: 1887502
gccuccuuugaccggaaga

SEQ ID NO: 2476847 - RNA, 19 nt, Artificial Sequence
  Description of Artificial Sequence: Synthetic oligonucleotide
  Antisense strand to SEQ ID NO: 2476846
ucuuccggucaaaggaggc

SEQ ID NO: 2476848 - RNA, 19 nt, Artificial Sequence
  Description of Artificial Sequence: Synthetic oligonucleotide
  Sense strand starting at position 2363 of SEQ ID NO: 1887502
cuccuuugaccggaagagu

SEQ ID NO: 2476849 - RNA, 19 nt, Artificial Sequence
  Description of Artificial Sequence: Synthetic oligonucleotide
  Antisense strand to SEQ ID NO: 2476848
acucuuccggucaaaggag

SEQ ID NO: 2476850 - RNA, 19 nt, Artificial Sequence
  Description of Artificial Sequence: Synthetic oligonucleotide
  Sense strand starting at position 2529 of SEQ ID NO: 1887502
ccagguuugucugcagaga

SEQ ID NO: 2476851 - RNA, 19 nt, Artificial Sequence
  Description of Artificial Sequence: Synthetic oligonucleotide
  Antisense strand to SEQ ID NO: 2476850
ucucugcagacaaaccugg

SEQ ID NO: 2476852 - RNA, 19 nt, Artificial Sequence
  Description of Artificial Sequence: Synthetic oligonucleotide
  Sense strand starting at position 2530 of SEQ ID NO: 1887502
cagguuugucugcagagag

SEQ ID NO: 2476853 - RNA, 19 nt, Artificial Sequence
  Description of Artificial Sequence: Synthetic oligonucleotide
  Antisense strand to SEQ ID NO: 2476852
cucucugcagacaaaccug

SEQ ID NO: 2476854 - RNA, 19 nt, Artificial Sequence
  Description of Artificial Sequence: Synthetic oligonucleotide
  Sense strand starting at position 2588 of SEQ ID NO: 1887502
agacucuugaaccgauuga

SEQ ID NO: 2476855 - RNA, 19 nt, Artificial Sequence
  Description of Artificial Sequence: Synthetic oligonucleotide
  Antisense strand to SEQ ID NO: 2476854
ucaaucgguucaagagucu

SEQ ID NO: 2476856 - RNA, 19 nt, Artificial Sequence
  Description of Artificial Sequence: Synthetic oligonucleotide
  Sense strand starting at position 2592 of SEQ ID NO: 1887502
ucuugaaccgauugaagcu

SEQ ID NO: 2476857 - RNA, 19 nt, Artificial Sequence
  Description of Artificial Sequence: Synthetic oligonucleotide
  Antisense strand to SEQ ID NO: 2476856
agcuucaaucgguucaaga

SEQ ID NO: 2476858 - RNA, 19 nt, Artificial Sequence
  Description of Artificial Sequence: Synthetic oligonucleotide
  Sense strand starting at position 2668 of SEQ ID NO: 1887502
uagagauucuggguccaca

SEQ ID NO: 2476859 - RNA, 19 nt, Artificial Sequence
  Description of Artificial Sequence: Synthetic oligonucleotide
  Antisense strand to SEQ ID NO: 2476858
uguggacccagaaucucua

SEQ ID NO: 2476860 - RNA, 19 nt, Artificial Sequence
  Description of Artificial Sequence: Synthetic oligonucleotide
  Sense strand starting at position 2811 of SEQ ID NO: 1887502
gagaucaggcaugguuuga

SEQ ID NO: 2476861 - RNA, 19 nt, Artificial Sequence
  Description of Artificial Sequence: Synthetic oligonucleotide
  Antisense strand to SEQ ID NO: 2476860
ucaaaccaugccugaucuc

SEQ ID NO: 2476862 - RNA, 19 nt, Artificial Sequence
  Description of Artificial Sequence: Synthetic oligonucleotide
  Sense strand starting at position 2822 of SEQ ID NO: 1887502
ugguuugaucagggugcua

SEQ ID NO: 2476863 - RNA, 19 nt, Artificial Sequence
  Description of Artificial Sequence: Synthetic oligonucleotide
  Antisense strand to SEQ ID NO: 2476862
uagcacccugaucaaacca

SEQ ID NO: 2476864 - RNA, 19 nt, Artificial Sequence
  Description of Artificial Sequence: Synthetic oligonucleotide
  Sense strand starting at position 2824 of SEQ ID NO: 1887502
guuugaucagggugcuaac

SEQ ID NO: 2476865 - RNA, 19 nt, Artificial Sequence
  Description of Artificial Sequence: Synthetic oligonucleotide
  Antisense strand to SEQ ID NO: 2476864
guuagcacccugaucaaac

SEQ ID NO: 2476866 - RNA, 19 nt, Artificial Sequence
  Description of Artificial Sequence: Synthetic oligonucleotide
  Sense strand starting at position 3094 of SEQ ID NO: 1887502
aggaguuguaggugggaga

SEQ ID NO: 2476867 - RNA, 19 nt, Artificial Sequence
  Description of Artificial Sequence: Synthetic oligonucleotide
  Antisense strand to SEQ ID NO: 2476866
ucucccaccuacaacuccu

SEQ ID NO: 2476868 - RNA, 19 nt, Artificial Sequence
  Description of Artificial Sequence: Synthetic oligonucleotide
  Sense strand starting at position 3144 of SEQ ID NO: 1887502
uacuucuugcagggagaga

SEQ ID NO: 2476869 - RNA, 19 nt, Artificial Sequence
  Description of Artificial Sequence: Synthetic oligonucleotide
  Antisense strand to SEQ ID NO: 2476868
ucucucccugcaagaagua

SEQ ID NO: 2476870 - RNA, 19 nt, Artificial Sequence
  Description of Artificial Sequence: Synthetic oligonucleotide
  Sense strand starting at position 3235 of SEQ ID NO: 1887502
gaguguaaaugcccuggua

SEQ ID NO: 2476871 - RNA, 19 nt, Artificial Sequence
  Description of Artificial Sequence: Synthetic oligonucleotide
  Antisense strand to SEQ ID NO: 2476870
uaccagggcauuuacacuc

SEQ ID NO: 2476872 - RNA, 19 nt, Artificial Sequence
  Description of Artificial Sequence: Synthetic oligonucleotide
  Sense strand starting at position 3237 of SEQ ID NO: 1887502
guguaaaugcccugguaaa

SEQ ID NO: 2476873 - RNA, 19 nt, Artificial Sequence
  Description of Artificial Sequence: Synthetic oligonucleotide
  Antisense strand to SEQ ID NO: 2476872
uuuaccagggcauuuacac

SEQ ID NO: 2476874 - RNA, 19 nt, Artificial Sequence
  Description of Artificial Sequence: Synthetic oligonucleotide
  Sense strand starting at position 3238 of SEQ ID NO: 1887502
uguaaaugcccugguaaac

SEQ ID NO: 2476875 - RNA, 19 nt, Artificial Sequence
  Description of Artificial Sequence: Synthetic oligonucleotide
  Antisense strand to SEQ ID NO: 2476874
guuuaccagggcauuuaca

SEQ ID NO: 2476876 - RNA, 19 nt, Artificial Sequence
  Description of Artificial Sequence: Synthetic oligonucleotide
  Sense strand starting at position 3337 of SEQ ID NO: 1887502
agaguuccauuguuggcua

SEQ ID NO: 2476877 - RNA, 19 nt, Artificial Sequence
  Description of Artificial Sequence: Synthetic oligonucleotide
  Antisense strand to SEQ ID NO: 2476876
uagccaacaauggaacucu

SEQ ID NO: 2476878 - RNA, 19 nt, Artificial Sequence
  Description of Artificial Sequence: Synthetic oligonucleotide
  Sense strand starting at position 3342 of SEQ ID NO: 1887502
uccauuguuggcuauugga

SEQ ID NO: 2476879 - RNA, 19 nt, Artificial Sequence
  Description of Artificial Sequence: Synthetic oligonucleotide
  Antisense strand to SEQ ID NO: 2476878
uccaauagccaacaaugga

SEQ ID NO: 2476880 - RNA, 19 nt, Artificial Sequence
  Description of Artificial Sequence: Synthetic oligonucleotide
  Sense strand starting at position 3491 of SEQ ID NO: 1887502
cuauuaucccagugguaca

SEQ ID NO: 2476881 - RNA, 19 nt, Artificial Sequence
  Description of Artificial Sequence: Synthetic oligonucleotide
  Antisense strand to SEQ ID NO: 2476880
uguaccacugggauaauag

SEQ ID NO: 2476882 - RNA, 19 nt, Artificial Sequence
  Description of Artificial Sequence: Synthetic oligonucleotide
  Sense strand starting at position 3563 of SEQ ID NO: 1887502
ggagaaaguggcugugcua

SEQ ID NO: 2476883 - RNA, 19 nt, Artificial Sequence
  Description of Artificial Sequence: Synthetic oligonucleotide
  Antisense strand to SEQ ID NO: 2476882
uagcacagccacuuucucc

SEQ ID NO: 2476884 - RNA, 19 nt, Artificial Sequence
  Description of Artificial Sequence: Synthetic oligonucleotide
  Sense strand starting at position 3701 of SEQ ID NO: 1887502
gggccugggauauauagua

SEQ ID NO: 2476885 - RNA, 19 nt, Artificial Sequence
  Description of Artificial Sequence: Synthetic oligonucleotide
  Antisense strand to SEQ ID NO: 2476884
uacuauauaucccaggccc

SEQ ID NO: 2476886 - RNA, 19 nt, Artificial Sequence
  Description of Artificial Sequence: Synthetic oligonucleotide
  Sense strand starting at position 12 of SEQ ID NO: 1887503
aaguguacuagggagguau

SEQ ID NO: 2476887 - RNA, 19 nt, Artificial Sequence
  Description of Artificial Sequence: Synthetic oligonucleotide
  Antisense strand to SEQ ID NO: 2476886
auaccucccuaguacacuu

SEQ ID NO: 2476888 - RNA, 19 nt, Artificial Sequence
  Description of Artificial Sequence: Synthetic oligonucleotide
  Sense strand starting at position 58 of SEQ ID NO: 1887503
ggaucuaaugugcgauuuc

SEQ ID NO: 2476889 - RNA, 19 nt, Artificial Sequence
  Description of Artificial Sequence: Synthetic oligonucleotide
  Antisense strand to SEQ ID NO: 2476888
gaaaucgcacauuagaucc

SEQ ID NO: 2476890 - RNA, 19 nt, Artificial Sequence
  Description of Artificial Sequence: Synthetic oligonucleotide
  Sense strand starting at position 575 of SEQ ID NO: 1887503
uguggagaacugcauccau

SEQ ID NO: 2476891 - RNA, 19 nt, Artificial Sequence
  Description of Artificial Sequence: Synthetic oligonucleotide
  Antisense strand to SEQ ID NO: 2476890
auggaugcaguucuccaca

SEQ ID NO: 2476892 - RNA, 19 nt, Artificial Sequence
  Description of Artificial Sequence: Synthetic oligonucleotide
  Sense strand starting at position 619 of SEQ ID NO: 1887503
gagagacucugugugccau

SEQ ID NO: 2476893 - RNA, 19 nt, Artificial Sequence
  Description of Artificial Sequence: Synthetic oligonucleotide
  Antisense strand to SEQ ID NO: 2476892
auggcacacagagucucuc

SEQ ID NO: 2476894 - RNA, 19 nt, Artificial Sequence
  Description of Artificial Sequence: Synthetic oligonucleotide
  Sense strand starting at position 620 of SEQ ID NO: 1887503
agagacucugugugccaua

SEQ ID NO: 2476895 - RNA, 19 nt, Artificial Sequence
  Description of Artificial Sequence: Synthetic oligonucleotide
  Antisense strand to SEQ ID NO: 2476894
uauggcacacagagucucu

SEQ ID NO: 2476896 - RNA, 19 nt, Artificial Sequence
  Description of Artificial Sequence: Synthetic oligonucleotide
  Sense strand starting at position 718 of SEQ ID NO: 1887503
ggguauucccagggagggu

SEQ ID NO: 2476897 - RNA, 19 nt, Artificial Sequence
  Description of Artificial Sequence: Synthetic oligonucleotide
  Antisense strand to SEQ ID NO: 2476896
acccucccugggaauaccc

SEQ ID NO: 2476898 - RNA, 19 nt, Artificial Sequence
  Description of Artificial Sequence: Synthetic oligonucleotide
  Sense strand starting at position 836 of SEQ ID NO: 1887503
aacuguucccgcgaagaac

SEQ ID NO: 2476899 - RNA, 19 nt, Artificial Sequence
  Description of Artificial Sequence: Synthetic oligonucleotide
  Antisense strand to SEQ ID NO: 2476898
guucuucgcgggaacaguu

SEQ ID NO: 2476900 - RNA, 19 nt, Artificial Sequence
  Description of Artificial Sequence: Synthetic oligonucleotide
  Sense strand starting at position 847 of SEQ ID NO: 1887503
cgaagaaccuaccugcuua

SEQ ID NO: 2476901 - RNA, 19 nt, Artificial Sequence
  Description of Artificial Sequence: Synthetic oligonucleotide
  Antisense strand to SEQ ID NO: 2476900
uaagcagguagguucuucg

SEQ ID NO: 2476902 - RNA, 19 nt, Artificial Sequence
  Description of Artificial Sequence: Synthetic oligonucleotide
  Sense strand starting at position 887 of SEQ ID NO: 1887503
agaugacacugagugcuau

SEQ ID NO: 2476903 - RNA, 19 nt, Artificial Sequence
  Description of Artificial Sequence: Synthetic oligonucleotide
  Antisense strand to SEQ ID NO: 2476902
auagcacucagugucaucu

SEQ ID NO: 2476904 - RNA, 19 nt, Artificial Sequence
  Description of Artificial Sequence: Synthetic oligonucleotide
  Sense strand starting at position 888 of SEQ ID NO: 1887503
gaugacacugagugcuauu

SEQ ID NO: 2476905 - RNA, 19 nt, Artificial Sequence
  Description of Artificial Sequence: Synthetic oligonucleotide
  Antisense strand to SEQ ID NO: 2476904
aauagcacucagugucauc

SEQ ID NO: 2476906 - RNA, 19 nt, Artificial Sequence
  Description of Artificial Sequence: Synthetic oligonucleotide
  Sense strand starting at position 899 of SEQ ID NO: 1887503
gugcuauugcaucagucag

SEQ ID NO: 2476907 - RNA, 19 nt, Artificial Sequence
  Description of Artificial Sequence: Synthetic oligonucleotide
  Antisense strand to SEQ ID NO: 2476906
cugacugaugcaauagcac

SEQ ID NO: 2476908 - RNA, 19 nt, Artificial Sequence
  Description of Artificial Sequence: Synthetic oligonucleotide
  Sense strand starting at position 901 of SEQ ID NO: 1887503
gcuauugcaucagucagga

SEQ ID NO: 2476909 - RNA, 19 nt, Artificial Sequence
  Description of Artificial Sequence: Synthetic oligonucleotide
  Antisense strand to SEQ ID NO: 2476908
uccugacugaugcaauagc

SEQ ID NO: 2476910 - RNA, 19 nt, Artificial Sequence
  Description of Artificial Sequence: Synthetic oligonucleotide
  Sense strand starting at position 1655 of SEQ ID NO: 1887503
ccguuaaucaccgccguga

SEQ ID NO: 2476911 - RNA, 19 nt, Artificial Sequence
  Description of Artificial Sequence: Synthetic oligonucleotide
  Antisense strand to SEQ ID NO: 2476910
ucacggcggugauuaacgg

SEQ ID NO: 2476912 - RNA, 19 nt, Artificial Sequence
  Description of Artificial Sequence: Synthetic oligonucleotide
  Sense strand starting at position 1777 of SEQ ID NO: 1887503
augcuacauccugaugaug

SEQ ID NO: 2476913 - RNA, 19 nt, Artificial Sequence
  Description of Artificial Sequence: Synthetic oligonucleotide
  Antisense strand to SEQ ID NO: 2476912
caucaucaggauguagcau

SEQ ID NO: 2476914 - RNA, 19 nt, Artificial Sequence
  Description of Artificial Sequence: Synthetic oligonucleotide
  Sense strand starting at position 1864 of SEQ ID NO: 1887503
guccuauucugguuggaaa

SEQ ID NO: 2476915 - RNA, 19 nt, Artificial Sequence
  Description of Artificial Sequence: Synthetic oligonucleotide
  Antisense strand to SEQ ID NO: 2476914
uuuccaaccagaauaggac

SEQ ID NO: 2476916 - RNA, 19 nt, Artificial Sequence
  Description of Artificial Sequence: Synthetic oligonucleotide
  Sense strand starting at position 1865 of SEQ ID NO: 1887503
uccuauucugguuggaaau

SEQ ID NO: 2476917 - RNA, 19 nt, Artificial Sequence
  Description of Artificial Sequence: Synthetic oligonucleotide
  Antisense strand to SEQ ID NO: 2476916
auuuccaaccagaauagga

SEQ ID NO: 2476918 - RNA, 19 nt, Artificial Sequence
  Description of Artificial Sequence: Synthetic oligonucleotide
  Sense strand starting at position 1866 of SEQ ID NO: 1887503
ccuauucugguuggaaaug

SEQ ID NO: 2476919 - RNA, 19 nt, Artificial Sequence
  Description of Artificial Sequence: Synthetic oligonucleotide
  Antisense strand to SEQ ID NO: 2476918
cauuuccaaccagaauagg

SEQ ID NO: 2476920 - RNA, 19 nt, Artificial Sequence
  Description of Artificial Sequence: Synthetic oligonucleotide
  Sense strand starting at position 1894 of SEQ ID NO: 1887503
aguaaugcuugcucaauua

SEQ ID NO: 2476921 - RNA, 19 nt, Artificial Sequence
  Description of Artificial Sequence: Synthetic oligonucleotide
  Antisense strand to SEQ ID NO: 2476920
uaauugagcaagcauuacu

SEQ ID NO: 2476922 - RNA, 19 nt, Artificial Sequence
  Description of Artificial Sequence: Synthetic oligonucleotide
  Sense strand starting at position 2164 of SEQ ID NO: 1887503
gggagcgcugugagcaauu

SEQ ID NO: 2476923 - RNA, 19 nt, Artificial Sequence
  Description of Artificial Sequence: Synthetic oligonucleotide
  Antisense strand to SEQ ID NO: 2476922
aauugcucacagcgcuccc

SEQ ID NO: 2476924 - RNA, 19 nt, Artificial Sequence
  Description of Artificial Sequence: Synthetic oligonucleotide
  Sense strand starting at position 2292 of SEQ ID NO: 1887503
ccuggcauuuaucaagcaa

SEQ ID NO: 2476925 - RNA, 19 nt, Artificial Sequence
  Description of Artificial Sequence: Synthetic oligonucleotide
  Antisense strand to SEQ ID NO: 2476924
uugcuugauaaaugccagg

SEQ ID NO: 2476926 - RNA, 19 nt, Artificial Sequence
  Description of Artificial Sequence: Synthetic oligonucleotide
  Sense strand starting at position 2328 of SEQ ID NO: 1887503
gccuccuuugaccggaaga

SEQ ID NO: 2476927 - RNA, 19 nt, Artificial Sequence
  Description of Artificial Sequence: Synthetic oligonucleotide
  Antisense strand to SEQ ID NO: 2476926
ucuuccggucaaaggaggc

SEQ ID NO: 2476928 - RNA, 19 nt, Artificial Sequence
  Description of Artificial Sequence: Synthetic oligonucleotide
  Sense strand starting at position 2330 of SEQ ID NO: 1887503
cuccuuugaccggaagagu

SEQ ID NO: 2476929 - RNA, 19 nt, Artificial Sequence
  Description of Artificial Sequence: Synthetic oligonucleotide
  Antisense strand to SEQ ID NO: 2476928
acucuuccggucaaaggag

SEQ ID NO: 2476930 - RNA, 19 nt, Artificial Sequence
  Description of Artificial Sequence: Synthetic oligonucleotide
  Sense strand starting at position 2496 of SEQ ID NO: 1887503
ccagguuugucugcagaga

SEQ ID NO: 2476931 - RNA, 19 nt, Artificial Sequence
  Description of Artificial Sequence: Synthetic oligonucleotide
  Antisense strand to SEQ ID NO: 2476930
ucucugcagacaaaccugg

SEQ ID NO: 2476932 - RNA, 19 nt, Artificial Sequence
  Description of Artificial Sequence: Synthetic oligonucleotide
  Sense strand starting at position 2497 of SEQ ID NO: 1887503
cagguuugucugcagagag

SEQ ID NO: 2476933 - RNA, 19 nt, Artificial Sequence
  Description of Artificial Sequence: Synthetic oligonucleotide
  Antisense strand to SEQ ID NO: 2476932
cucucugcagacaaaccug

SEQ ID NO: 2476934 - RNA, 19 nt, Artificial Sequence
  Description of Artificial Sequence: Synthetic oligonucleotide
  Sense strand starting at position 2555 of SEQ ID NO: 1887503
agacucuugaaccgauuga

SEQ ID NO: 2476935 - RNA, 19 nt, Artificial Sequence
  Description of Artificial Sequence: Synthetic oligonucleotide
  Antisense strand to SEQ ID NO: 2476934
ucaaucgguucaagagucu

SEQ ID NO: 2476936 - RNA, 19 nt, Artificial Sequence
  Description of Artificial Sequence: Synthetic oligonucleotide
  Sense strand starting at position 2559 of SEQ ID NO: 1887503
ucuugaaccgauugaagcu

SEQ ID NO: 2476937 - RNA, 19 nt, Artificial Sequence
  Description of Artificial Sequence: Synthetic oligonucleotide
  Antisense strand to SEQ ID NO: 2476936
agcuucaaucgguucaaga

SEQ ID NO: 2476938 - RNA, 19 nt, Artificial Sequence
  Description of Artificial Sequence: Synthetic oligonucleotide
  Sense strand starting at position 2635 of SEQ ID NO: 1887503
uagagauucuggguccaca

SEQ ID NO: 2476939 - RNA, 19 nt, Artificial Sequence
  Description of Artificial Sequence: Synthetic oligonucleotide
  Antisense strand to SEQ ID NO: 2476938
uguggacccagaaucucua

SEQ ID NO: 2476940 - RNA, 19 nt, Artificial Sequence
  Description of Artificial Sequence: Synthetic oligonucleotide
  Sense strand starting at position 2778 of SEQ ID NO: 1887503
gagaucaggcaugguuuga

SEQ ID NO: 2476941 - RNA, 19 nt, Artificial Sequence
  Description of Artificial Sequence: Synthetic oligonucleotide
  Antisense strand to SEQ ID NO: 2476940
ucaaaccaugccugaucuc

SEQ ID NO: 2476942 - RNA, 19 nt, Artificial Sequence
  Description of Artificial Sequence: Synthetic oligonucleotide
  Sense strand starting at position 2789 of SEQ ID NO: 1887503
ugguuugaucagggugcua

SEQ ID NO: 2476943 - RNA, 19 nt, Artificial Sequence
  Description of Artificial Sequence: Synthetic oligonucleotide
  Antisense strand to SEQ ID NO: 2476942
uagcacccugaucaaacca

SEQ ID NO: 2476944 - RNA, 19 nt, Artificial Sequence
  Description of Artificial Sequence: Synthetic oligonucleotide
  Sense strand starting at position 2791 of SEQ ID NO: 1887503
guuugaucagggugcuaac

SEQ ID NO: 2476945 - RNA, 19 nt, Artificial Sequence
  Description of Artificial Sequence: Synthetic oligonucleotide
  Antisense strand to SEQ ID NO: 2476944
guuagcacccugaucaaac

SEQ ID NO: 2476946 - RNA, 19 nt, Artificial Sequence
  Description of Artificial Sequence: Synthetic oligonucleotide
  Sense strand starting at position 3061 of SEQ ID NO: 1887503
aggaguuguaggugggaga

SEQ ID NO: 2476947 - RNA, 19 nt, Artificial Sequence
  Description of Artificial Sequence: Synthetic oligonucleotide
  Antisense strand to SEQ ID NO: 2476946
ucucccaccuacaacuccu

SEQ ID NO: 2476948 - RNA, 19 nt, Artificial Sequence
  Description of Artificial Sequence: Synthetic oligonucleotide
  Sense strand starting at position 3111 of SEQ ID NO: 1887503
uacuucuugcagggagaga

SEQ ID NO: 2476949 - RNA, 19 nt, Artificial Sequence
  Description of Artificial Sequence: Synthetic oligonucleotide
  Antisense strand to SEQ ID NO: 2476948
ucucucccugcaagaagua

SEQ ID NO: 2476950 - RNA, 19 nt, Artificial Sequence
  Description of Artificial Sequence: Synthetic oligonucleotide
  Sense strand starting at position 3202 of SEQ ID NO: 1887503
gaguguaaaugcccuggua

SEQ ID NO: 2476951 - RNA, 19 nt, Artificial Sequence
  Description of Artificial Sequence: Synthetic oligonucleotide
  Antisense strand to SEQ ID NO: 2476950
uaccagggcauuuacacuc

SEQ ID NO: 2476952 - RNA, 19 nt, Artificial Sequence
  Description of Artificial Sequence: Synthetic oligonucleotide
  Sense strand starting at position 3204 of SEQ ID NO: 1887503
guguaaaugcccugguaaa

SEQ ID NO: 2476953 - RNA, 19 nt, Artificial Sequence
  Description of Artificial Sequence: Synthetic oligonucleotide
  Antisense strand to SEQ ID NO: 2476952
uuuaccagggcauuuacac

SEQ ID NO: 2476954 - RNA, 19 nt, Artificial Sequence
  Description of Artificial Sequence: Synthetic oligonucleotide
  Sense strand starting at position 3205 of SEQ ID NO: 1887503
uguaaaugcccugguaaac

SEQ ID NO: 2476955 - RNA, 19 nt, Artificial Sequence
  Description of Artificial Sequence: Synthetic oligonucleotide
  Antisense strand to SEQ ID NO: 2476954
guuuaccagggcauuuaca

SEQ ID NO: 2476956 - RNA, 19 nt, Artificial Sequence
  Description of Artificial Sequence: Synthetic oligonucleotide
  Sense strand starting at position 3304 of SEQ ID NO: 1887503
agaguuccauuguuggcua

SEQ ID NO: 2476957 - RNA, 19 nt, Artificial Sequence
  Description of Artificial Sequence: Synthetic oligonucleotide
  Antisense strand to SEQ ID NO: 2476956
uagccaacaauggaacucu

SEQ ID NO: 2476958 - RNA, 19 nt, Artificial Sequence
  Description of Artificial Sequence: Synthetic oligonucleotide
  Sense strand starting at position 3309 of SEQ ID NO: 1887503
uccauuguuggcuauugga

SEQ ID NO: 2476959 - RNA, 19 nt, Artificial Sequence
  Description of Artificial Sequence: Synthetic oligonucleotide
  Antisense strand to SEQ ID NO: 2476958
uccaauagccaacaaugga

SEQ ID NO: 2476960 - RNA, 19 nt, Artificial Sequence
  Description of Artificial Sequence: Synthetic oligonucleotide
  Sense strand starting at position 3458 of SEQ ID NO: 1887503
cuauuaucccagugguaca

SEQ ID NO: 2476961 - RNA, 19 nt, Artificial Sequence
  Description of Artificial Sequence: Synthetic oligonucleotide
  Antisense strand to SEQ ID NO: 2476960
uguaccacugggauaauag

SEQ ID NO: 2476962 - RNA, 19 nt, Artificial Sequence
  Description of Artificial Sequence: Synthetic oligonucleotide
  Sense strand starting at position 3530 of SEQ ID NO: 1887503
ggagaaaguggcugugcua

SEQ ID NO: 2476963 - RNA, 19 nt, Artificial Sequence
  Description of Artificial Sequence: Synthetic oligonucleotide
  Antisense strand to SEQ ID NO: 2476962
uagcacagccacuuucucc

SEQ ID NO: 2476964 - RNA, 19 nt, Artificial Sequence
  Description of Artificial Sequence: Synthetic oligonucleotide
  Sense strand starting at position 3668 of SEQ ID NO: 1887503
gggccugggauauauagua

SEQ ID NO: 2476965 - RNA, 19 nt, Artificial Sequence
  Description of Artificial Sequence: Synthetic oligonucleotide
  Antisense strand to SEQ ID NO: 2476964
uacuauauaucccaggccc

SEQ ID NO: 2476966 - RNA, 19 nt, Artificial Sequence
  Description of Artificial Sequence: Synthetic oligonucleotide
  Sense strand starting at position 61 of SEQ ID NO: 1887504
gcugguuucuuugagggaa

SEQ ID NO: 2476967 - RNA, 19 nt, Artificial Sequence
  Description of Artificial Sequence: Synthetic oligonucleotide
  Antisense strand to SEQ ID NO: 2476966
uucccucaaagaaaccagc

SEQ ID NO: 2476968 - RNA, 19 nt, Artificial Sequence
  Description of Artificial Sequence: Synthetic oligonucleotide
  Sense strand starting at position 240 of SEQ ID NO: 1887504
ucauaaaugcuaugaagau

SEQ ID NO: 2476969 - RNA, 19 nt, Artificial Sequence
  Description of Artificial Sequence: Synthetic oligonucleotide
  Antisense strand to SEQ ID NO: 2476968
aucuucauagcauuuauga

SEQ ID NO: 2476970 - RNA, 19 nt, Artificial Sequence
  Description of Artificial Sequence: Synthetic oligonucleotide
  Sense strand starting at position 246 of SEQ ID NO: 1887504
augcuaugaagaugagcua

SEQ ID NO: 2476971 - RNA, 19 nt, Artificial Sequence
  Description of Artificial Sequence: Synthetic oligonucleotide
  Antisense strand to SEQ ID NO: 2476970
uagcucaucuucauagcau

SEQ ID NO: 2476972 - RNA, 19 nt, Artificial Sequence
  Description of Artificial Sequence: Synthetic oligonucleotide
  Sense strand starting at position 301 of SEQ ID NO: 1887504
agagguagcccuggauaac

SEQ ID NO: 2476973 - RNA, 19 nt, Artificial Sequence
  Description of Artificial Sequence: Synthetic oligonucleotide
  Antisense strand to SEQ ID NO: 2476972
guuauccagggcuaccucu

SEQ ID NO: 2476974 - RNA, 19 nt, Artificial Sequence
  Description of Artificial Sequence: Synthetic oligonucleotide
  Sense strand starting at position 313 of SEQ ID NO: 1887504
ggauaaccaugaugugaug

SEQ ID NO: 2476975 - RNA, 19 nt, Artificial Sequence
  Description of Artificial Sequence: Synthetic oligonucleotide
  Antisense strand to SEQ ID NO: 2476974
caucacaucaugguuaucc

SEQ ID NO: 2476976 - RNA, 19 nt, Artificial Sequence
  Description of Artificial Sequence: Synthetic oligonucleotide
  Sense strand starting at position 319 of SEQ ID NO: 1887504
ccaugaugugauggacagu

SEQ ID NO: 2476977 - RNA, 19 nt, Artificial Sequence
  Description of Artificial Sequence: Synthetic oligonucleotide
  Antisense strand to SEQ ID NO: 2476976
acuguccaucacaucaugg

SEQ ID NO: 2476978 - RNA, 19 nt, Artificial Sequence
  Description of Artificial Sequence: Synthetic oligonucleotide
  Sense strand starting at position 396 of SEQ ID NO: 1887504
gggccuucucagugaugag

SEQ ID NO: 2476979 - RNA, 19 nt, Artificial Sequence
  Description of Artificial Sequence: Synthetic oligonucleotide
  Antisense strand to SEQ ID NO: 2476978
cucaucacugagaaggccc

SEQ ID NO: 2476980 - RNA, 19 nt, Artificial Sequence
  Description of Artificial Sequence: Synthetic oligonucleotide
  Sense strand starting at position 397 of SEQ ID NO: 1887504
ggccuucucagugaugagu

SEQ ID NO: 2476981 - RNA, 19 nt, Artificial Sequence
  Description of Artificial Sequence: Synthetic oligonucleotide
  Antisense strand to SEQ ID NO: 2476980
acucaucacugagaaggcc

SEQ ID NO: 2476982 - RNA, 19 nt, Artificial Sequence
  Description of Artificial Sequence: Synthetic oligonucleotide
  Sense strand starting at position 407 of SEQ ID NO: 1887504
gugaugaguguggagugaa

SEQ ID NO: 2476983 - RNA, 19 nt, Artificial Sequence
  Description of Artificial Sequence: Synthetic oligonucleotide
  Antisense strand to SEQ ID NO: 2476982
uucacuccacacucaucac

SEQ ID NO: 2476984 - RNA, 19 nt, Artificial Sequence
  Description of Artificial Sequence: Synthetic oligonucleotide
  Sense strand starting at position 408 of SEQ ID NO: 1887504
ugaugaguguggagugaag

SEQ ID NO: 2476985 - RNA, 19 nt, Artificial Sequence
  Description of Artificial Sequence: Synthetic oligonucleotide
  Antisense strand to SEQ ID NO: 2476984
cuucacuccacacucauca

SEQ ID NO: 2476986 - RNA, 19 nt, Artificial Sequence
  Description of Artificial Sequence: Synthetic oligonucleotide
  Sense strand starting at position 1091 of SEQ ID NO: 1887504
uguccaggauggucuuuaa

SEQ ID NO: 2476987 - RNA, 19 nt, Artificial Sequence
  Description of Artificial Sequence: Synthetic oligonucleotide
  Antisense strand to SEQ ID NO: 2476986
uuaaagaccauccuggaca

SEQ ID NO: 2476988 - RNA, 19 nt, Artificial Sequence
  Description of Artificial Sequence: Synthetic oligonucleotide
  Sense strand starting at position 1094 of SEQ ID NO: 1887504
ccaggauggucuuuaacuu

SEQ ID NO: 2476989 - RNA, 19 nt, Artificial Sequence
  Description of Artificial Sequence: Synthetic oligonucleotide
  Antisense strand to SEQ ID NO: 2476988
aaguuaaagaccauccugg

SEQ ID NO: 2476990 - RNA, 19 nt, Artificial Sequence
  Description of Artificial Sequence: Synthetic oligonucleotide
  Sense strand starting at position 1227 of SEQ ID NO: 1887504
ucaguuucguaaggacacu

SEQ ID NO: 2476991 - RNA, 19 nt, Artificial Sequence
  Description of Artificial Sequence: Synthetic oligonucleotide
  Antisense strand to SEQ ID NO: 2476990
aguguccuuacgaaacuga

SEQ ID NO: 2476992 - RNA, 19 nt, Artificial Sequence
  Description of Artificial Sequence: Synthetic oligonucleotide
  Sense strand starting at position 1378 of SEQ ID NO: 1887504
cagggucagggcuguguua

SEQ ID NO: 2476993 - RNA, 19 nt, Artificial Sequence
  Description of Artificial Sequence: Synthetic oligonucleotide
  Antisense strand to SEQ ID NO: 2476992
uaacacagcccugacccug

SEQ ID NO: 2476994 - RNA, 19 nt, Artificial Sequence
  Description of Artificial Sequence: Synthetic oligonucleotide
  Sense strand starting at position 1380 of SEQ ID NO: 1887504
gggucagggcuguguuaug

SEQ ID NO: 2476995 - RNA, 19 nt, Artificial Sequence
  Description of Artificial Sequence: Synthetic oligonucleotide
  Antisense strand to SEQ ID NO: 2476994
cauaacacagcccugaccc

SEQ ID NO: 2476996 - RNA, 19 nt, Artificial Sequence
  Description of Artificial Sequence: Synthetic oligonucleotide
  Sense strand starting at position 1502 of SEQ ID NO: 1887504
aagcauagugugugcagaa

SEQ ID NO: 2476997 - RNA, 19 nt, Artificial Sequence
  Description of Artificial Sequence: Synthetic oligonucleotide
  Antisense strand to SEQ ID NO: 2476996
uucugcacacacuaugcuu

SEQ ID NO: 2476998 - RNA, 19 nt, Artificial Sequence
  Description of Artificial Sequence: Synthetic oligonucleotide
  Sense strand starting at position 1503 of SEQ ID NO: 1887504
agcauagugugugcagaaa

SEQ ID NO: 2476999 - RNA, 19 nt, Artificial Sequence
  Description of Artificial Sequence: Synthetic oligonucleotide
  Antisense strand to SEQ ID NO: 2476998
uuucugcacacacuaugcu

SEQ ID NO: 2477000 - RNA, 19 nt, Artificial Sequence
  Description of Artificial Sequence: Synthetic oligonucleotide
  Sense strand starting at position 1536 of SEQ ID NO: 1887504
ugaggcugcuuccugagaa

SEQ ID NO: 2477001 - RNA, 19 nt, Artificial Sequence
  Description of Artificial Sequence: Synthetic oligonucleotide
  Antisense strand to SEQ ID NO: 2477000
uucucaggaagcagccuca

SEQ ID NO: 2477002 - RNA, 19 nt, Artificial Sequence
  Description of Artificial Sequence: Synthetic oligonucleotide
  Sense strand starting at position 1537 of SEQ ID NO: 1887504
gaggcugcuuccugagaaa

SEQ ID NO: 2477003 - RNA, 19 nt, Artificial Sequence
  Description of Artificial Sequence: Synthetic oligonucleotide
  Antisense strand to SEQ ID NO: 2477002
uuucucaggaagcagccuc

SEQ ID NO: 2477004 - RNA, 19 nt, Artificial Sequence
  Description of Artificial Sequence: Synthetic oligonucleotide
  Sense strand starting at position 1574 of SEQ ID NO: 1887504
gccugcaguugguaaaguu

SEQ ID NO: 2477005 - RNA, 19 nt, Artificial Sequence
  Description of Artificial Sequence: Synthetic oligonucleotide
  Antisense strand to SEQ ID NO: 2477004
aacuuuaccaacugcaggc

SEQ ID NO: 2477006 - RNA, 19 nt, Artificial Sequence
  Description of Artificial Sequence: Synthetic oligonucleotide
  Sense strand starting at position 1583 of SEQ ID NO: 1887504
ugguaaaguucccuacgga

SEQ ID NO: 2477007 - RNA, 19 nt, Artificial Sequence
  Description of Artificial Sequence: Synthetic oligonucleotide
  Antisense strand to SEQ ID NO: 2477006
uccguagggaacuuuacca

SEQ ID NO: 2477008 - RNA, 19 nt, Artificial Sequence
  Description of Artificial Sequence: Synthetic oligonucleotide
  Sense strand starting at position 1584 of SEQ ID NO: 1887504
gguaaaguucccuacggau

SEQ ID NO: 2477009 - RNA, 19 nt, Artificial Sequence
  Description of Artificial Sequence: Synthetic oligonucleotide
  Antisense strand to SEQ ID NO: 2477008
auccguagggaacuuuacc

SEQ ID NO: 2477010 - RNA, 19 nt, Artificial Sequence
  Description of Artificial Sequence: Synthetic oligonucleotide
  Sense strand starting at position 1586 of SEQ ID NO: 1887504
uaaaguucccuacggauau

SEQ ID NO: 2477011 - RNA, 19 nt, Artificial Sequence
  Description of Artificial Sequence: Synthetic oligonucleotide
  Antisense strand to SEQ ID NO: 2477010
auauccguagggaacuuua

SEQ ID NO: 2477012 - RNA, 19 nt, Artificial Sequence
  Description of Artificial Sequence: Synthetic oligonucleotide
  Sense strand starting at position 1587 of SEQ ID NO: 1887504
aaaguucccuacggauauu

SEQ ID NO: 2477013 - RNA, 19 nt, Artificial Sequence
  Description of Artificial Sequence: Synthetic oligonucleotide
  Antisense strand to SEQ ID NO: 2477012
aauauccguagggaacuuu

SEQ ID NO: 2477014 - RNA, 19 nt, Artificial Sequence
  Description of Artificial Sequence: Synthetic oligonucleotide
  Sense strand starting at position 1590 of SEQ ID NO: 1887504
guucccuacggauauuaaa

SEQ ID NO: 2477015 - RNA, 19 nt, Artificial Sequence
  Description of Artificial Sequence: Synthetic oligonucleotide
  Antisense strand to SEQ ID NO: 2477014
uuuaauauccguagggaac

SEQ ID NO: 2477016 - RNA, 19 nt, Artificial Sequence
  Description of Artificial Sequence: Synthetic oligonucleotide
  Sense strand starting at position 1630 of SEQ ID NO: 1887504
auacacuuucuguacaagu

SEQ ID NO: 2477017 - RNA, 19 nt, Artificial Sequence
  Description of Artificial Sequence: Synthetic oligonucleotide
  Antisense strand to SEQ ID NO: 2477016
acuuguacagaaaguguau

SEQ ID NO: 2477018 - RNA, 19 nt, Artificial Sequence
  Description of Artificial Sequence: Synthetic oligonucleotide
  Sense strand starting at position 1632 of SEQ ID NO: 1887504
acacuuucuguacaaguga

SEQ ID NO: 2477019 - RNA, 19 nt, Artificial Sequence
  Description of Artificial Sequence: Synthetic oligonucleotide
  Antisense strand to SEQ ID NO: 2477018
ucacuuguacagaaagugu

SEQ ID NO: 2477020 - RNA, 19 nt, Artificial Sequence
  Description of Artificial Sequence: Synthetic oligonucleotide
  Sense strand starting at position 1641 of SEQ ID NO: 1887504
guacaagugaugcgguuua

SEQ ID NO: 2477021 - RNA, 19 nt, Artificial Sequence
  Description of Artificial Sequence: Synthetic oligonucleotide
  Antisense strand to SEQ ID NO: 2477020
uaaaccgcaucacuuguac

SEQ ID NO: 2477022 - RNA, 19 nt, Artificial Sequence
  Description of Artificial Sequence: Synthetic oligonucleotide
  Sense strand starting at position 1646 of SEQ ID NO: 1887504
agugaugcgguuuaugcua

SEQ ID NO: 2477023 - RNA, 19 nt, Artificial Sequence
  Description of Artificial Sequence: Synthetic oligonucleotide
  Antisense strand to SEQ ID NO: 2477022
uagcauaaaccgcaucacu

SEQ ID NO: 2477024 - RNA, 19 nt, Artificial Sequence
  Description of Artificial Sequence: Synthetic oligonucleotide
  Sense strand starting at position 1648 of SEQ ID NO: 1887504
ugaugcgguuuaugcuaaa

SEQ ID NO: 2477025 - RNA, 19 nt, Artificial Sequence
  Description of Artificial Sequence: Synthetic oligonucleotide
  Antisense strand to SEQ ID NO: 2477024
uuuagcauaaaccgcauca

SEQ ID NO: 2477026 - RNA, 19 nt, Artificial Sequence
  Description of Artificial Sequence: Synthetic oligonucleotide
  Sense strand starting at position 1668 of SEQ ID NO: 1887504
cccugcuuucuuuguagga

SEQ ID NO: 2477027 - RNA, 19 nt, Artificial Sequence
  Description of Artificial Sequence: Synthetic oligonucleotide
  Antisense strand to SEQ ID NO: 2477026
uccuacaaagaaagcaggg

SEQ ID NO: 2477028 - RNA, 19 nt, Artificial Sequence
  Description of Artificial Sequence: Synthetic oligonucleotide
  Sense strand starting at position 1670 of SEQ ID NO: 1887504
cugcuuucuuuguaggagu

SEQ ID NO: 2477029 - RNA, 19 nt, Artificial Sequence
  Description of Artificial Sequence: Synthetic oligonucleotide
  Antisense strand to SEQ ID NO: 2477028
acuccuacaaagaaagcag

SEQ ID NO: 2477030 - RNA, 19 nt, Artificial Sequence
  Description of Artificial Sequence: Synthetic oligonucleotide
  Sense strand starting at position 1672 of SEQ ID NO: 1887504
gcuuucuuuguaggagucu

SEQ ID NO: 2477031 - RNA, 19 nt, Artificial Sequence
  Description of Artificial Sequence: Synthetic oligonucleotide
  Antisense strand to SEQ ID NO: 2477030
agacuccuacaaagaaagc

SEQ ID NO: 2477032 - RNA, 19 nt, Artificial Sequence
  Description of Artificial Sequence: Synthetic oligonucleotide
  Sense strand starting at position 1698 of SEQ ID NO: 1887504
ugauaagugccagguagag

SEQ ID NO: 2477033 - RNA, 19 nt, Artificial Sequence
  Description of Artificial Sequence: Synthetic oligonucleotide
  Antisense strand to SEQ ID NO: 2477032
cucuaccuggcacuuauca

SEQ ID NO: 2477034 - RNA, 19 nt, Artificial Sequence
  Description of Artificial Sequence: Synthetic oligonucleotide
  Sense strand starting at position 1722 of SEQ ID NO: 1887504
cuaugugacuggcuccaua

SEQ ID NO: 2477035 - RNA, 19 nt, Artificial Sequence
  Description of Artificial Sequence: Synthetic oligonucleotide
  Antisense strand to SEQ ID NO: 2477034
uauggagccagucacauag

SEQ ID NO: 2477036 - RNA, 19 nt, Artificial Sequence
  Description of Artificial Sequence: Synthetic oligonucleotide
  Sense strand starting at position 2299 of SEQ ID NO: 1887504
ggguaauccaugggcucua

SEQ ID NO: 2477037 - RNA, 19 nt, Artificial Sequence
  Description of Artificial Sequence: Synthetic oligonucleotide
  Antisense strand to SEQ ID NO: 2477036
uagagcccauggauuaccc

SEQ ID NO: 2477038 - RNA, 19 nt, Artificial Sequence
  Description of Artificial Sequence: Synthetic oligonucleotide
  Sense strand starting at position 3808 of SEQ ID NO: 1887504
uguugccuuccugaaauca

SEQ ID NO: 2477039 - RNA, 19 nt, Artificial Sequence
  Description of Artificial Sequence: Synthetic oligonucleotide
  Antisense strand to SEQ ID NO: 2477038
ugauuucaggaaggcaaca

SEQ ID NO: 2477040 - RNA, 19 nt, Artificial Sequence
  Description of Artificial Sequence: Synthetic oligonucleotide
  Sense strand starting at position 3839 of SEQ ID NO: 1887504
ugagguuaucacugagaau

SEQ ID NO: 2477041 - RNA, 19 nt, Artificial Sequence
  Description of Artificial Sequence: Synthetic oligonucleotide
  Antisense strand to SEQ ID NO: 2477040
auucucagugauaaccuca

SEQ ID NO: 2477042 - RNA, 19 nt, Artificial Sequence
  Description of Artificial Sequence: Synthetic oligonucleotide
  Sense strand starting at position 3842 of SEQ ID NO: 1887504
gguuaucacugagaaucag

SEQ ID NO: 2477043 - RNA, 19 nt, Artificial Sequence
  Description of Artificial Sequence: Synthetic oligonucleotide
  Antisense strand to SEQ ID NO: 2477042
cugauucucagugauaacc

SEQ ID NO: 2477044 - RNA, 19 nt, Artificial Sequence
  Description of Artificial Sequence: Synthetic oligonucleotide
  Sense strand starting at position 53 of SEQ ID NO: 1887505
gaaauaucguggcuuccug

SEQ ID NO: 2477045 - RNA, 19 nt, Artificial Sequence
  Description of Artificial Sequence: Synthetic oligonucleotide
  Antisense strand to SEQ ID NO: 2477044
caggaagccacgauauuuc

SEQ ID NO: 2477046 - RNA, 19 nt, Artificial Sequence
  Description of Artificial Sequence: Synthetic oligonucleotide
  Sense strand starting at position 57 of SEQ ID NO: 1887505
uaucguggcuuccuggaga

SEQ ID NO: 2477047 - RNA, 19 nt, Artificial Sequence
  Description of Artificial Sequence: Synthetic oligonucleotide
  Antisense strand to SEQ ID NO: 2477046
ucuccaggaagccacgaua

SEQ ID NO: 2477048 - RNA, 19 nt, Artificial Sequence
  Description of Artificial Sequence: Synthetic oligonucleotide
  Sense strand starting at position 60 of SEQ ID NO: 1887505
cguggcuuccuggagaacu

SEQ ID NO: 2477049 - RNA, 19 nt, Artificial Sequence
  Description of Artificial Sequence: Synthetic oligonucleotide
  Antisense strand to SEQ ID NO: 2477048
aguucuccaggaagccacg

SEQ ID NO: 2477050 - RNA, 19 nt, Artificial Sequence
  Description of Artificial Sequence: Synthetic oligonucleotide
  Sense strand starting at position 71 of SEQ ID NO: 1887505
ggagaacuguggucucuuc

SEQ ID NO: 2477051 - RNA, 19 nt, Artificial Sequence
  Description of Artificial Sequence: Synthetic oligonucleotide
  Antisense strand to SEQ ID NO: 2477050
gaagagaccacaguucucc

SEQ ID NO: 2477052 - RNA, 19 nt, Artificial Sequence
  Description of Artificial Sequence: Synthetic oligonucleotide
  Sense strand starting at position 79 of SEQ ID NO: 1887505
guggucucuucccuguaga

SEQ ID NO: 2477053 - RNA, 19 nt, Artificial Sequence
  Description of Artificial Sequence: Synthetic oligonucleotide
  Antisense strand to SEQ ID NO: 2477052
ucuacagggaagagaccac

SEQ ID NO: 2477054 - RNA, 19 nt, Artificial Sequence
  Description of Artificial Sequence: Synthetic oligonucleotide
  Sense strand starting at position 80 of SEQ ID NO: 1887505
uggucucuucccuguagaa

SEQ ID NO: 2477055 - RNA, 19 nt, Artificial Sequence
  Description of Artificial Sequence: Synthetic oligonucleotide
  Antisense strand to SEQ ID NO: 2477054
uucuacagggaagagacca

SEQ ID NO: 2477056 - RNA, 19 nt, Artificial Sequence
  Description of Artificial Sequence: Synthetic oligonucleotide
  Sense strand starting at position 108 of SEQ ID NO: 1887505
ccucuuauaucugagacag

SEQ ID NO: 2477057 - RNA, 19 nt, Artificial Sequence
  Description of Artificial Sequence: Synthetic oligonucleotide
  Antisense strand to SEQ ID NO: 2477056
cugucucagauauaagagg

SEQ ID NO: 2477058 - RNA, 19 nt, Artificial Sequence
  Description of Artificial Sequence: Synthetic oligonucleotide
  Sense strand starting at position 110 of SEQ ID NO: 1887505
ucuuauaucugagacagug

SEQ ID NO: 2477059 - RNA, 19 nt, Artificial Sequence
  Description of Artificial Sequence: Synthetic oligonucleotide
  Antisense strand to SEQ ID NO: 2477058
cacugucucagauauaaga

SEQ ID NO: 2477060 - RNA, 19 nt, Artificial Sequence
  Description of Artificial Sequence: Synthetic oligonucleotide
  Sense strand starting at position 246 of SEQ ID NO: 1887505
ggagguuuccgugcugcca

SEQ ID NO: 2477061 - RNA, 19 nt, Artificial Sequence
  Description of Artificial Sequence: Synthetic oligonucleotide
  Antisense strand to SEQ ID NO: 2477060
uggcagcacggaaaccucc

SEQ ID NO: 2477062 - RNA, 19 nt, Artificial Sequence
  Description of Artificial Sequence: Synthetic oligonucleotide
  Sense strand starting at position 509 of SEQ ID NO: 1887505
cccuguauugccuguugca

SEQ ID NO: 2477063 - RNA, 19 nt, Artificial Sequence
  Description of Artificial Sequence: Synthetic oligonucleotide
  Antisense strand to SEQ ID NO: 2477062
ugcaacaggcaauacaggg

SEQ ID NO: 2477064 - RNA, 19 nt, Artificial Sequence
  Description of Artificial Sequence: Synthetic oligonucleotide
  Sense strand starting at position 1211 of SEQ ID NO: 1887505
gggauuccuggacguggau

SEQ ID NO: 2477065 - RNA, 19 nt, Artificial Sequence
  Description of Artificial Sequence: Synthetic oligonucleotide
  Antisense strand to SEQ ID NO: 2477064
auccacguccaggaauccc

SEQ ID NO: 2477066 - RNA, 19 nt, Artificial Sequence
  Description of Artificial Sequence: Synthetic oligonucleotide
  Sense strand starting at position 1251 of SEQ ID NO: 1887505
gugccugucguguacugaa

SEQ ID NO: 2477067 - RNA, 19 nt, Artificial Sequence
  Description of Artificial Sequence: Synthetic oligonucleotide
  Antisense strand to SEQ ID NO: 2477066
uucaguacacgacaggcac

SEQ ID NO: 2477068 - RNA, 19 nt, Artificial Sequence
  Description of Artificial Sequence: Synthetic oligonucleotide
  Sense strand starting at position 1369 of SEQ ID NO: 1887505
ggcucccuucugugauuga

SEQ ID NO: 2477069 - RNA, 19 nt, Artificial Sequence
  Description of Artificial Sequence: Synthetic oligonucleotide
  Antisense strand to SEQ ID NO: 2477068
ucaaucacagaagggagcc

SEQ ID NO: 2477070 - RNA, 19 nt, Artificial Sequence
  Description of Artificial Sequence: Synthetic oligonucleotide
  Sense strand starting at position 1426 of SEQ ID NO: 1887505
gggucucguggugggaauu

SEQ ID NO: 2477071 - RNA, 19 nt, Artificial Sequence
  Description of Artificial Sequence: Synthetic oligonucleotide
  Antisense strand to SEQ ID NO: 2477070
aauucccaccacgagaccc

SEQ ID NO: 2477072 - RNA, 19 nt, Artificial Sequence
  Description of Artificial Sequence: Synthetic oligonucleotide
  Sense strand starting at position 1441 of SEQ ID NO: 1887505
aauugugggcgcugacaua

SEQ ID NO: 2477073 - RNA, 19 nt, Artificial Sequence
  Description of Artificial Sequence: Synthetic oligonucleotide
  Antisense strand to SEQ ID NO: 2477072
uaugucagcgcccacaauu

SEQ ID NO: 2477074 - RNA, 19 nt, Artificial Sequence
  Description of Artificial Sequence: Synthetic oligonucleotide
  Sense strand starting at position 1797 of SEQ ID NO: 1887505
ggguuaggaucccagggaa

SEQ ID NO: 2477075 - RNA, 19 nt, Artificial Sequence
  Description of Artificial Sequence: Synthetic oligonucleotide
  Antisense strand to SEQ ID NO: 2477074
uucccugggauccuaaccc

SEQ ID NO: 2477076 - RNA, 19 nt, Artificial Sequence
  Description of Artificial Sequence: Synthetic oligonucleotide
  Sense strand starting at position 2075 of SEQ ID NO: 1887505
gggcaagcuuucccaacau

SEQ ID NO: 2477077 - RNA, 19 nt, Artificial Sequence
  Description of Artificial Sequence: Synthetic oligonucleotide
  Antisense strand to SEQ ID NO: 2477076
auguugggaaagcuugccc

SEQ ID NO: 2477078 - RNA, 19 nt, Artificial Sequence
  Description of Artificial Sequence: Synthetic oligonucleotide
  Sense strand starting at position 2254 of SEQ ID NO: 1887505
ucuuuaucuucguucugca

SEQ ID NO: 2477079 - RNA, 19 nt, Artificial Sequence
  Description of Artificial Sequence: Synthetic oligonucleotide
  Antisense strand to SEQ ID NO: 2477078
ugcagaacgaagauaaaga

SEQ ID NO: 2477080 - RNA, 19 nt, Artificial Sequence
  Description of Artificial Sequence: Synthetic oligonucleotide
  Sense strand starting at position 2290 of SEQ ID NO: 1887505
uguaguguugacugugcau

SEQ ID NO: 2477081 - RNA, 19 nt, Artificial Sequence
  Description of Artificial Sequence: Synthetic oligonucleotide
  Antisense strand to SEQ ID NO: 2477080
augcacagucaacacuaca

SEQ ID NO: 2477082 - RNA, 19 nt, Artificial Sequence
  Description of Artificial Sequence: Synthetic oligonucleotide
  Sense strand starting at position 2292 of SEQ ID NO: 1887505
uaguguugacugugcauca

SEQ ID NO: 2477083 - RNA, 19 nt, Artificial Sequence
  Description of Artificial Sequence: Synthetic oligonucleotide
  Antisense strand to SEQ ID NO: 2477082
ugaugcacagucaacacua

SEQ ID NO: 2477084 - RNA, 19 nt, Artificial Sequence
  Description of Artificial Sequence: Synthetic oligonucleotide
  Sense strand starting at position 2305 of SEQ ID NO: 1887505
gcaucaggcucucuucuau

SEQ ID NO: 2477085 - RNA, 19 nt, Artificial Sequence
  Description of Artificial Sequence: Synthetic oligonucleotide
  Antisense strand to SEQ ID NO: 2477084
auagaagagagccugaugc

SEQ ID NO: 2477086 - RNA, 19 nt, Artificial Sequence
  Description of Artificial Sequence: Synthetic oligonucleotide
  Sense strand starting at position 2311 of SEQ ID NO: 1887505
ggcucucuucuauguaauu

SEQ ID NO: 2477087 - RNA, 19 nt, Artificial Sequence
  Description of Artificial Sequence: Synthetic oligonucleotide
  Antisense strand to SEQ ID NO: 2477086
aauuacauagaagagagcc

SEQ ID NO: 2477088 - RNA, 19 nt, Artificial Sequence
  Description of Artificial Sequence: Synthetic oligonucleotide
  Sense strand starting at position 2312 of SEQ ID NO: 1887505
gcucucuucuauguaauug

SEQ ID NO: 2477089 - RNA, 19 nt, Artificial Sequence
  Description of Artificial Sequence: Synthetic oligonucleotide
  Antisense strand to SEQ ID NO: 2477088
caauuacauagaagagagc

SEQ ID NO: 2477090 - RNA, 19 nt, Artificial Sequence
  Description of Artificial Sequence: Synthetic oligonucleotide
  Sense strand starting at position 2618 of SEQ ID NO: 1887505
gccugagcucaagacaucu

SEQ ID NO: 2477091 - RNA, 19 nt, Artificial Sequence
  Description of Artificial Sequence: Synthetic oligonucleotide
  Antisense strand to SEQ ID NO: 2477090
agaugucuugagcucaggc

SEQ ID NO: 2477092 - RNA, 19 nt, Artificial Sequence
  Description of Artificial Sequence: Synthetic oligonucleotide
  Sense strand starting at position 2730 of SEQ ID NO: 1887505
uaucuaugggugcauugau

SEQ ID NO: 2477093 - RNA, 19 nt, Artificial Sequence
  Description of Artificial Sequence: Synthetic oligonucleotide
  Antisense strand to SEQ ID NO: 2477092
aucaaugcacccauagaua

SEQ ID NO: 2477094 - RNA, 19 nt, Artificial Sequence
  Description of Artificial Sequence: Synthetic oligonucleotide
  Sense strand starting at position 2789 of SEQ ID NO: 1887505
ggacgcuuccuuugcuuau

SEQ ID NO: 2477095 - RNA, 19 nt, Artificial Sequence
  Description of Artificial Sequence: Synthetic oligonucleotide
  Antisense strand to SEQ ID NO: 2477094
auaagcaaaggaagcgucc

SEQ ID NO: 2477096 - RNA, 19 nt, Artificial Sequence
  Description of Artificial Sequence: Synthetic oligonucleotide
  Sense strand starting at position 2790 of SEQ ID NO: 1887505
gacgcuuccuuugcuuauu

SEQ ID NO: 2477097 - RNA, 19 nt, Artificial Sequence
  Description of Artificial Sequence: Synthetic oligonucleotide
  Antisense strand to SEQ ID NO: 2477096
aauaagcaaaggaagcguc

SEQ ID NO: 2477098 - RNA, 19 nt, Artificial Sequence
  Description of Artificial Sequence: Synthetic oligonucleotide
  Sense strand starting at position 2791 of SEQ ID NO: 1887505
acgcuuccuuugcuuauua

SEQ ID NO: 2477099 - RNA, 19 nt, Artificial Sequence
  Description of Artificial Sequence: Synthetic oligonucleotide
  Antisense strand to SEQ ID NO: 2477098
uaauaagcaaaggaagcgu

SEQ ID NO: 2477100 - RNA, 19 nt, Artificial Sequence
  Description of Artificial Sequence: Synthetic oligonucleotide
  Sense strand starting at position 2799 of SEQ ID NO: 1887505
uuugcuuauuacuggagga

SEQ ID NO: 2477101 - RNA, 19 nt, Artificial Sequence
  Description of Artificial Sequence: Synthetic oligonucleotide
  Antisense strand to SEQ ID NO: 2477100
uccuccaguaauaagcaaa

SEQ ID NO: 2477102 - RNA, 19 nt, Artificial Sequence
  Description of Artificial Sequence: Synthetic oligonucleotide
  Sense strand starting at position 2800 of SEQ ID NO: 1887505
uugcuuauuacuggaggaa

SEQ ID NO: 2477103 - RNA, 19 nt, Artificial Sequence
  Description of Artificial Sequence: Synthetic oligonucleotide
  Antisense strand to SEQ ID NO: 2477102
uuccuccaguaauaagcaa

SEQ ID NO: 2477104 - RNA, 19 nt, Artificial Sequence
  Description of Artificial Sequence: Synthetic oligonucleotide
  Sense strand starting at position 2862 of SEQ ID NO: 1887505
cacgguuaccuuuagauca

SEQ ID NO: 2477105 - RNA, 19 nt, Artificial Sequence
  Description of Artificial Sequence: Synthetic oligonucleotide
  Antisense strand to SEQ ID NO: 2477104
ugaucuaaagguaaccgug

SEQ ID NO: 2477106 - RNA, 19 nt, Artificial Sequence
  Description of Artificial Sequence: Synthetic oligonucleotide
  Sense strand starting at position 2864 of SEQ ID NO: 1887505
cgguuaccuuuagaucauu

SEQ ID NO: 2477107 - RNA, 19 nt, Artificial Sequence
  Description of Artificial Sequence: Synthetic oligonucleotide
  Antisense strand to SEQ ID NO: 2477106
aaugaucuaaagguaaccg

SEQ ID NO: 2477108 - RNA, 19 nt, Artificial Sequence
  Description of Artificial Sequence: Synthetic oligonucleotide
  Sense strand starting at position 2955 of SEQ ID NO: 1887505
uaugaagaggcaugcuuau

SEQ ID NO: 2477109 - RNA, 19 nt, Artificial Sequence
  Description of Artificial Sequence: Synthetic oligonucleotide
  Antisense strand to SEQ ID NO: 2477108
auaagcaugccucuucaua

SEQ ID NO: 2477110 - RNA, 19 nt, Artificial Sequence
  Description of Artificial Sequence: Synthetic oligonucleotide
  Sense strand starting at position 2961 of SEQ ID NO: 1887505
gaggcaugcuuaugaucug

SEQ ID NO: 2477111 - RNA, 19 nt, Artificial Sequence
  Description of Artificial Sequence: Synthetic oligonucleotide
  Antisense strand to SEQ ID NO: 2477110
cagaucauaagcaugccuc

SEQ ID NO: 2477112 - RNA, 19 nt, Artificial Sequence
  Description of Artificial Sequence: Synthetic oligonucleotide
  Sense strand starting at position 2991 of SEQ ID NO: 1887505
ggaguugcucucugcgcau

SEQ ID NO: 2477113 - RNA, 19 nt, Artificial Sequence
  Description of Artificial Sequence: Synthetic oligonucleotide
  Antisense strand to SEQ ID NO: 2477112
augcgcagagagcaacucc

SEQ ID NO: 2477114 - RNA, 19 nt, Artificial Sequence
  Description of Artificial Sequence: Synthetic oligonucleotide
  Sense strand starting at position 3381 of SEQ ID NO: 1887505
gcaauaaggugucuuuaga

SEQ ID NO: 2477115 - RNA, 19 nt, Artificial Sequence
  Description of Artificial Sequence: Synthetic oligonucleotide
  Antisense strand to SEQ ID NO: 2477114
ucuaaagacaccuuauugc

SEQ ID NO: 2477116 - RNA, 19 nt, Artificial Sequence
  Description of Artificial Sequence: Synthetic oligonucleotide
  Sense strand starting at position 3398 of SEQ ID NO: 1887505
gagcaagaguucucuccuu

SEQ ID NO: 2477117 - RNA, 19 nt, Artificial Sequence
  Description of Artificial Sequence: Synthetic oligonucleotide
  Antisense strand to SEQ ID NO: 2477116
aaggagagaacucuugcuc

SEQ ID NO: 2477118 - RNA, 19 nt, Artificial Sequence
  Description of Artificial Sequence: Synthetic oligonucleotide
  Sense strand starting at position 3419 of SEQ ID NO: 1887505
ccauccuagcuaggaauaa

SEQ ID NO: 2477119 - RNA, 19 nt, Artificial Sequence
  Description of Artificial Sequence: Synthetic oligonucleotide
  Antisense strand to SEQ ID NO: 2477118
uuauuccuagcuaggaugg

SEQ ID NO: 2477120 - RNA, 19 nt, Artificial Sequence
  Description of Artificial Sequence: Synthetic oligonucleotide
  Sense strand starting at position 3465 of SEQ ID NO: 1887505
ggguguucuuucuuugcaa

SEQ ID NO: 2477121 - RNA, 19 nt, Artificial Sequence
  Description of Artificial Sequence: Synthetic oligonucleotide
  Antisense strand to SEQ ID NO: 2477120
uugcaaagaaagaacaccc

SEQ ID NO: 2477122 - RNA, 19 nt, Artificial Sequence
  Description of Artificial Sequence: Synthetic oligonucleotide
  Sense strand starting at position 3466 of SEQ ID NO: 1887505
gguguucuuucuuugcaac

SEQ ID NO: 2477123 - RNA, 19 nt, Artificial Sequence
  Description of Artificial Sequence: Synthetic oligonucleotide
  Antisense strand to SEQ ID NO: 2477122
guugcaaagaaagaacacc

SEQ ID NO: 2477124 - RNA, 19 nt, Artificial Sequence
  Description of Artificial Sequence: Synthetic oligonucleotide
  Sense strand starting at position 66 of SEQ ID NO: 1887506
caguaagugcucuaaggga

SEQ ID NO: 2477125 - RNA, 19 nt, Artificial Sequence
  Description of Artificial Sequence: Synthetic oligonucleotide
  Antisense strand to SEQ ID NO: 2477124
ucccuuagagcacuuacug

SEQ ID NO: 2477126 - RNA, 19 nt, Artificial Sequence
  Description of Artificial Sequence: Synthetic oligonucleotide
  Sense strand starting at position 145 of SEQ ID NO: 1887506
uuguguguaccgcucagua

SEQ ID NO: 2477127 - RNA, 19 nt, Artificial Sequence
  Description of Artificial Sequence: Synthetic oligonucleotide
  Antisense strand to SEQ ID NO: 2477126
uacugagcgguacacacaa

SEQ ID NO: 2477128 - RNA, 19 nt, Artificial Sequence
  Description of Artificial Sequence: Synthetic oligonucleotide
  Sense strand starting at position 248 of SEQ ID NO: 1887506
uccugauguggaugggaca

SEQ ID NO: 2477129 - RNA, 19 nt, Artificial Sequence
  Description of Artificial Sequence: Synthetic oligonucleotide
  Antisense strand to SEQ ID NO: 2477128
ugucccauccacaucagga

SEQ ID NO: 2477130 - RNA, 19 nt, Artificial Sequence
  Description of Artificial Sequence: Synthetic oligonucleotide
  Sense strand starting at position 347 of SEQ ID NO: 1887506
auggcuacccugugacuaa

SEQ ID NO: 2477131 - RNA, 19 nt, Artificial Sequence
  Description of Artificial Sequence: Synthetic oligonucleotide
  Antisense strand to SEQ ID NO: 2477130
uuagucacaggguagccau

SEQ ID NO: 2477132 - RNA, 19 nt, Artificial Sequence
  Description of Artificial Sequence: Synthetic oligonucleotide
  Sense strand starting at position 392 of SEQ ID NO: 1887506
gcaggguugggagauaguu

SEQ ID NO: 2477133 - RNA, 19 nt, Artificial Sequence
  Description of Artificial Sequence: Synthetic oligonucleotide
  Antisense strand to SEQ ID NO: 2477132
aacuaucucccaacccugc

SEQ ID NO: 2477134 - RNA, 19 nt, Artificial Sequence
  Description of Artificial Sequence: Synthetic oligonucleotide
  Sense strand starting at position 400 of SEQ ID NO: 1887506
gggagauaguuccuaucca

SEQ ID NO: 2477135 - RNA, 19 nt, Artificial Sequence
  Description of Artificial Sequence: Synthetic oligonucleotide
  Antisense strand to SEQ ID NO: 2477134
uggauaggaacuaucuccc

SEQ ID NO: 2477136 - RNA, 19 nt, Artificial Sequence
  Description of Artificial Sequence: Synthetic oligonucleotide
  Sense strand starting at position 401 of SEQ ID NO: 1887506
ggagauaguuccuauccag

SEQ ID NO: 2477137 - RNA, 19 nt, Artificial Sequence
  Description of Artificial Sequence: Synthetic oligonucleotide
  Antisense strand to SEQ ID NO: 2477136
cuggauaggaacuaucucc

SEQ ID NO: 2477138 - RNA, 19 nt, Artificial Sequence
  Description of Artificial Sequence: Synthetic oligonucleotide
  Sense strand starting at position 630 of SEQ ID NO: 1887506
ggcucuuacaagugguaag

SEQ ID NO: 2477139 - RNA, 19 nt, Artificial Sequence
  Description of Artificial Sequence: Synthetic oligonucleotide
  Antisense strand to SEQ ID NO: 2477138
cuuaccacuuguaagagcc

SEQ ID NO: 2477140 - RNA, 19 nt, Artificial Sequence
  Description of Artificial Sequence: Synthetic oligonucleotide
  Sense strand starting at position 633 of SEQ ID NO: 1887506
ucuuacaagugguaaggaa

SEQ ID NO: 2477141 - RNA, 19 nt, Artificial Sequence
  Description of Artificial Sequence: Synthetic oligonucleotide
  Antisense strand to SEQ ID NO: 2477140
uuccuuaccacuuguaaga

SEQ ID NO: 2477142 - RNA, 19 nt, Artificial Sequence
  Description of Artificial Sequence: Synthetic oligonucleotide
  Sense strand starting at position 1001 of SEQ ID NO: 1887506
acaggaauguaugaguuga

SEQ ID NO: 2477143 - RNA, 19 nt, Artificial Sequence
  Description of Artificial Sequence: Synthetic oligonucleotide
  Antisense strand to SEQ ID NO: 2477142
ucaacucauacauuccugu

SEQ ID NO: 2477144 - RNA, 19 nt, Artificial Sequence
  Description of Artificial Sequence: Synthetic oligonucleotide
  Sense strand starting at position 1005 of SEQ ID NO: 1887506
gaauguaugaguugagcuc

SEQ ID NO: 2477145 - RNA, 19 nt, Artificial Sequence
  Description of Artificial Sequence: Synthetic oligonucleotide
  Antisense strand to SEQ ID NO: 2477144
gagcucaacucauacauuc

SEQ ID NO: 2477146 - RNA, 19 nt, Artificial Sequence
  Description of Artificial Sequence: Synthetic oligonucleotide
  Sense strand starting at position 1012 of SEQ ID NO: 1887506
ugaguugagcucugugcau

SEQ ID NO: 2477147 - RNA, 19 nt, Artificial Sequence
  Description of Artificial Sequence: Synthetic oligonucleotide
  Antisense strand to SEQ ID NO: 2477146
augcacagagcucaacuca

SEQ ID NO: 2477148 - RNA, 19 nt, Artificial Sequence
  Description of Artificial Sequence: Synthetic oligonucleotide
  Sense strand starting at position 1014 of SEQ ID NO: 1887506
aguugagcucugugcauaa

SEQ ID NO: 2477149 - RNA, 19 nt, Artificial Sequence
  Description of Artificial Sequence: Synthetic oligonucleotide
  Antisense strand to SEQ ID NO: 2477148
uuaugcacagagcucaacu

SEQ ID NO: 2477150 - RNA, 19 nt, Artificial Sequence
  Description of Artificial Sequence: Synthetic oligonucleotide
  Sense strand starting at position 1025 of SEQ ID NO: 1887506
gugcauaaggcuugccaga

SEQ ID NO: 2477151 - RNA, 19 nt, Artificial Sequence
  Description of Artificial Sequence: Synthetic oligonucleotide
  Antisense strand to SEQ ID NO: 2477150
ucuggcaagccuuaugcac

SEQ ID NO: 2477152 - RNA, 19 nt, Artificial Sequence
  Description of Artificial Sequence: Synthetic oligonucleotide
  Sense strand starting at position 1027 of SEQ ID NO: 1887506
gcauaaggcuugccagaca

SEQ ID NO: 2477153 - RNA, 19 nt, Artificial Sequence
  Description of Artificial Sequence: Synthetic oligonucleotide
  Antisense strand to SEQ ID NO: 2477152
ugucuggcaagccuuaugc

SEQ ID NO: 2477154 - RNA, 19 nt, Artificial Sequence
  Description of Artificial Sequence: Synthetic oligonucleotide
  Sense strand starting at position 1035 of SEQ ID NO: 1887506
cuugccagacaucgucuua

SEQ ID NO: 2477155 - RNA, 19 nt, Artificial Sequence
  Description of Artificial Sequence: Synthetic oligonucleotide
  Antisense strand to SEQ ID NO: 2477154
uaagacgaugucuggcaag

SEQ ID NO: 2477156 - RNA, 19 nt, Artificial Sequence
  Description of Artificial Sequence: Synthetic oligonucleotide
  Sense strand starting at position 1040 of SEQ ID NO: 1887506
cagacaucgucuuauuuga

SEQ ID NO: 2477157 - RNA, 19 nt, Artificial Sequence
  Description of Artificial Sequence: Synthetic oligonucleotide
  Antisense strand to SEQ ID NO: 2477156
ucaaauaagacgaugucug

SEQ ID NO: 2477158 - RNA, 19 nt, Artificial Sequence
  Description of Artificial Sequence: Synthetic oligonucleotide
  Sense strand starting at position 1042 of SEQ ID NO: 1887506
gacaucgucuuauuugagu

SEQ ID NO: 2477159 - RNA, 19 nt, Artificial Sequence
  Description of Artificial Sequence: Synthetic oligonucleotide
  Antisense strand to SEQ ID NO: 2477158
acucaaauaagacgauguc

SEQ ID NO: 2477160 - RNA, 19 nt, Artificial Sequence
  Description of Artificial Sequence: Synthetic oligonucleotide
  Sense strand starting at position 1047 of SEQ ID NO: 1887506
cgucuuauuugagucucau

SEQ ID NO: 2477161 - RNA, 19 nt, Artificial Sequence
  Description of Artificial Sequence: Synthetic oligonucleotide
  Antisense strand to SEQ ID NO: 2477160
augagacucaaauaagacg

SEQ ID NO: 2477162 - RNA, 19 nt, Artificial Sequence
  Description of Artificial Sequence: Synthetic oligonucleotide
  Sense strand starting at position 1129 of SEQ ID NO: 1887506
aguuauuugcccgaggcca

SEQ ID NO: 2477163 - RNA, 19 nt, Artificial Sequence
  Description of Artificial Sequence: Synthetic oligonucleotide
  Antisense strand to SEQ ID NO: 2477162
uggccucgggcaaauaacu

SEQ ID NO: 2477164 - RNA, 19 nt, Artificial Sequence
  Description of Artificial Sequence: Synthetic oligonucleotide
  Sense strand starting at position 1157 of SEQ ID NO: 1887506
gucuguauuugggagagug

SEQ ID NO: 2477165 - RNA, 19 nt, Artificial Sequence
  Description of Artificial Sequence: Synthetic oligonucleotide
  Antisense strand to SEQ ID NO: 2477164
cacucucccaaauacagac

SEQ ID NO: 2477166 - RNA, 19 nt, Artificial Sequence
  Description of Artificial Sequence: Synthetic oligonucleotide
  Sense strand starting at position 1851 of SEQ ID NO: 1887506
gcagccauggagugaguaa

SEQ ID NO: 2477167 - RNA, 19 nt, Artificial Sequence
  Description of Artificial Sequence: Synthetic oligonucleotide
  Antisense strand to SEQ ID NO: 2477166
uuacucacuccauggcugc

SEQ ID NO: 2477168 - RNA, 19 nt, Artificial Sequence
  Description of Artificial Sequence: Synthetic oligonucleotide
  Sense strand starting at position 1863 of SEQ ID NO: 1887506
ugaguaaccgcuuaccucu

SEQ ID NO: 2477169 - RNA, 19 nt, Artificial Sequence
  Description of Artificial Sequence: Synthetic oligonucleotide
  Antisense strand to SEQ ID NO: 2477168
agagguaagcgguuacuca

SEQ ID NO: 2477170 - RNA, 19 nt, Artificial Sequence
  Description of Artificial Sequence: Synthetic oligonucleotide
  Sense strand starting at position 2042 of SEQ ID NO: 1887506
gugggagaguucuagacuc

SEQ ID NO: 2477171 - RNA, 19 nt, Artificial Sequence
  Description of Artificial Sequence: Synthetic oligonucleotide
  Antisense strand to SEQ ID NO: 2477170
gagucuagaacucucccac

SEQ ID NO: 2477172 - RNA, 19 nt, Artificial Sequence
  Description of Artificial Sequence: Synthetic oligonucleotide
  Sense strand starting at position 2048 of SEQ ID NO: 1887506
gaguucuagacucgauguu

SEQ ID NO: 2477173 - RNA, 19 nt, Artificial Sequence
  Description of Artificial Sequence: Synthetic oligonucleotide
  Antisense strand to SEQ ID NO: 2477172
aacaucgagucuagaacuc

SEQ ID NO: 2477174 - RNA, 19 nt, Artificial Sequence
  Description of Artificial Sequence: Synthetic oligonucleotide
  Sense strand starting at position 2049 of SEQ ID NO: 1887506
aguucuagacucgauguuu

SEQ ID NO: 2477175 - RNA, 19 nt, Artificial Sequence
  Description of Artificial Sequence: Synthetic oligonucleotide
  Antisense strand to SEQ ID NO: 2477174
aaacaucgagucuagaacu

SEQ ID NO: 2477176 - RNA, 19 nt, Artificial Sequence
  Description of Artificial Sequence: Synthetic oligonucleotide
  Sense strand starting at position 2131 of SEQ ID NO: 1887506
cgauucuucgugcuugguu

SEQ ID NO: 2477177 - RNA, 19 nt, Artificial Sequence
  Description of Artificial Sequence: Synthetic oligonucleotide
  Antisense strand to SEQ ID NO: 2477176
aaccaagcacgaagaaucg

SEQ ID NO: 2477178 - RNA, 19 nt, Artificial Sequence
  Description of Artificial Sequence: Synthetic oligonucleotide
  Sense strand starting at position 2444 of SEQ ID NO: 1887506
cuuagauugacagggcaga

SEQ ID NO: 2477179 - RNA, 19 nt, Artificial Sequence
  Description of Artificial Sequence: Synthetic oligonucleotide
  Antisense strand to SEQ ID NO: 2477178
ucugcccugucaaucuaag

SEQ ID NO: 2477180 - RNA, 19 nt, Artificial Sequence
  Description of Artificial Sequence: Synthetic oligonucleotide
  Sense strand starting at position 2503 of SEQ ID NO: 1887506
gaaccacugucgucacgau

SEQ ID NO: 2477181 - RNA, 19 nt, Artificial Sequence
  Description of Artificial Sequence: Synthetic oligonucleotide
  Antisense strand to SEQ ID NO: 2477180
aucgugacgacagugguuc

SEQ ID NO: 2477182 - RNA, 19 nt, Artificial Sequence
  Description of Artificial Sequence: Synthetic oligonucleotide
  Sense strand starting at position 2559 of SEQ ID NO: 1887506
ggcuaaaccaaccguuagu

SEQ ID NO: 2477183 - RNA, 19 nt, Artificial Sequence
  Description of Artificial Sequence: Synthetic oligonucleotide
  Antisense strand to SEQ ID NO: 2477182
acuaacgguugguuuagcc

SEQ ID NO: 2477184 - RNA, 19 nt, Artificial Sequence
  Description of Artificial Sequence: Synthetic oligonucleotide
  Sense strand starting at position 2903 of SEQ ID NO: 1887506
cugggagaccuuuagguuu

SEQ ID NO: 2477185 - RNA, 19 nt, Artificial Sequence
  Description of Artificial Sequence: Synthetic oligonucleotide
  Antisense strand to SEQ ID NO: 2477184
aaaccuaaaggucucccag

SEQ ID NO: 2477186 - RNA, 19 nt, Artificial Sequence
  Description of Artificial Sequence: Synthetic oligonucleotide
  Sense strand starting at position 2975 of SEQ ID NO: 1887506
aagaaauucccuugggagu

SEQ ID NO: 2477187 - RNA, 19 nt, Artificial Sequence
  Description of Artificial Sequence: Synthetic oligonucleotide
  Antisense strand to SEQ ID NO: 2477186
acucccaagggaauuucuu

SEQ ID NO: 2477188 - RNA, 19 nt, Artificial Sequence
  Description of Artificial Sequence: Synthetic oligonucleotide
  Sense strand starting at position 3002 of SEQ ID NO: 1887506
cucagagauuuggguaaag

SEQ ID NO: 2477189 - RNA, 19 nt, Artificial Sequence
  Description of Artificial Sequence: Synthetic oligonucleotide
  Antisense strand to SEQ ID NO: 2477188
cuuuacccaaaucucugag

SEQ ID NO: 2477190 - RNA, 19 nt, Artificial Sequence
  Description of Artificial Sequence: Synthetic oligonucleotide
  Sense strand starting at position 3050 of SEQ ID NO: 1887506
gaggcuuaguguucuaaac

SEQ ID NO: 2477191 - RNA, 19 nt, Artificial Sequence
  Description of Artificial Sequence: Synthetic oligonucleotide
  Antisense strand to SEQ ID NO: 2477190
guuuagaacacuaagccuc

SEQ ID NO: 2477192 - RNA, 19 nt, Artificial Sequence
  Description of Artificial Sequence: Synthetic oligonucleotide
  Sense strand starting at position 3692 of SEQ ID NO: 1887506
auuaaaugagaguguauug

SEQ ID NO: 2477193 - RNA, 19 nt, Artificial Sequence
  Description of Artificial Sequence: Synthetic oligonucleotide
  Antisense strand to SEQ ID NO: 2477192
caauacacucucauuuaau

SEQ ID NO: 2477194 - RNA, 19 nt, Artificial Sequence
  Description of Artificial Sequence: Synthetic oligonucleotide
  Sense strand starting at position 3699 of SEQ ID NO: 1887506
gagaguguauuggaauaag

SEQ ID NO: 2477195 - RNA, 19 nt, Artificial Sequence
  Description of Artificial Sequence: Synthetic oligonucleotide
  Antisense strand to SEQ ID NO: 2477194
cuuauuccaauacacucuc

SEQ ID NO: 2477196 - RNA, 19 nt, Artificial Sequence
  Description of Artificial Sequence: Synthetic oligonucleotide
  Sense strand starting at position 3702 of SEQ ID NO: 1887506
aguguauuggaauaaguca

SEQ ID NO: 2477197 - RNA, 19 nt, Artificial Sequence
  Description of Artificial Sequence: Synthetic oligonucleotide
  Antisense strand to SEQ ID NO: 2477196
ugacuuauuccaauacacu

SEQ ID NO: 2477198 - RNA, 19 nt, Artificial Sequence
  Description of Artificial Sequence: Synthetic oligonucleotide
  Sense strand starting at position 3767 of SEQ ID NO: 1887506
uagaauggguagccagaaa

SEQ ID NO: 2477199 - RNA, 19 nt, Artificial Sequence
  Description of Artificial Sequence: Synthetic oligonucleotide
  Antisense strand to SEQ ID NO: 2477198
uuucuggcuacccauucua

SEQ ID NO: 2477200 - RNA, 19 nt, Artificial Sequence
  Description of Artificial Sequence: Synthetic oligonucleotide
  Sense strand starting at position 3807 of SEQ ID NO: 1887506
uguugacugaggcauaaau

SEQ ID NO: 2477201 - RNA, 19 nt, Artificial Sequence
  Description of Artificial Sequence: Synthetic oligonucleotide
  Antisense strand to SEQ ID NO: 2477200
auuuaugccucagucaaca

SEQ ID NO: 2477202 - RNA, 19 nt, Artificial Sequence
  Description of Artificial Sequence: Synthetic oligonucleotide
  Sense strand starting at position 3819 of SEQ ID NO: 1887506
cauaaaugaugggaaggaa

SEQ ID NO: 2477203 - RNA, 19 nt, Artificial Sequence
  Description of Artificial Sequence: Synthetic oligonucleotide
  Antisense strand to SEQ ID NO: 2477202
uuccuucccaucauuuaug

SEQ ID NO: 2477204 - RNA, 19 nt, Artificial Sequence
  Description of Artificial Sequence: Synthetic oligonucleotide
  Sense strand starting at position 258 of SEQ ID NO: 1887507
ggcaaacagucauauuuaa

SEQ ID NO: 2477205 - RNA, 19 nt, Artificial Sequence
  Description of Artificial Sequence: Synthetic oligonucleotide
  Antisense strand to SEQ ID NO: 2477204
uuaaauaugacuguuugcc

SEQ ID NO: 2477206 - RNA, 19 nt, Artificial Sequence
  Description of Artificial Sequence: Synthetic oligonucleotide
  Sense strand starting at position 316 of SEQ ID NO: 1887507
ucaacuuugcuccggagga

SEQ ID NO: 2477207 - RNA, 19 nt, Artificial Sequence
  Description of Artificial Sequence: Synthetic oligonucleotide
  Antisense strand to SEQ ID NO: 2477206
uccuccggagcaaaguuga

SEQ ID NO: 2477208 - RNA, 19 nt, Artificial Sequence
  Description of Artificial Sequence: Synthetic oligonucleotide
  Sense strand starting at position 374 of SEQ ID NO: 1887507
uguuauaacuguccuugaa

SEQ ID NO: 2477209 - RNA, 19 nt, Artificial Sequence
  Description of Artificial Sequence: Synthetic oligonucleotide
  Antisense strand to SEQ ID NO: 2477208
uucaaggacaguuauaaca

SEQ ID NO: 2477210 - RNA, 19 nt, Artificial Sequence
  Description of Artificial Sequence: Synthetic oligonucleotide
  Sense strand starting at position 378 of SEQ ID NO: 1887507
auaacuguccuugaaguaa

SEQ ID NO: 2477211 - RNA, 19 nt, Artificial Sequence
  Description of Artificial Sequence: Synthetic oligonucleotide
  Antisense strand to SEQ ID NO: 2477210
uuacuucaaggacaguuau

SEQ ID NO: 2477212 - RNA, 19 nt, Artificial Sequence
  Description of Artificial Sequence: Synthetic oligonucleotide
  Sense strand starting at position 1311 of SEQ ID NO: 1887507
cuccaaauccugggaacgu

SEQ ID NO: 2477213 - RNA, 19 nt, Artificial Sequence
  Description of Artificial Sequence: Synthetic oligonucleotide
  Antisense strand to SEQ ID NO: 2477212
acguucccaggauuuggag

SEQ ID NO: 2477214 - RNA, 19 nt, Artificial Sequence
  Description of Artificial Sequence: Synthetic oligonucleotide
  Sense strand starting at position 1410 of SEQ ID NO: 1887507
ggguuuaguuaagcacaga

SEQ ID NO: 2477215 - RNA, 19 nt, Artificial Sequence
  Description of Artificial Sequence: Synthetic oligonucleotide
  Antisense strand to SEQ ID NO: 2477214
ucugugcuuaacuaaaccc

SEQ ID NO: 2477216 - RNA, 19 nt, Artificial Sequence
  Description of Artificial Sequence: Synthetic oligonucleotide
  Sense strand starting at position 1411 of SEQ ID NO: 1887507
gguuuaguuaagcacagau

SEQ ID NO: 2477217 - RNA, 19 nt, Artificial Sequence
  Description of Artificial Sequence: Synthetic oligonucleotide
  Antisense strand to SEQ ID NO: 2477216
aucugugcuuaacuaaacc

SEQ ID NO: 2477218 - RNA, 19 nt, Artificial Sequence
  Description of Artificial Sequence: Synthetic oligonucleotide
  Sense strand starting at position 1592 of SEQ ID NO: 1887507
gcccucuagugagauauuu

SEQ ID NO: 2477219 - RNA, 19 nt, Artificial Sequence
  Description of Artificial Sequence: Synthetic oligonucleotide
  Antisense strand to SEQ ID NO: 2477218
aaauaucucacuagagggc

SEQ ID NO: 2477220 - RNA, 19 nt, Artificial Sequence
  Description of Artificial Sequence: Synthetic oligonucleotide
  Sense strand starting at position 1729 of SEQ ID NO: 1887507
gcaggucugcgggacgaaa

SEQ ID NO: 2477221 - RNA, 19 nt, Artificial Sequence
  Description of Artificial Sequence: Synthetic oligonucleotide
  Antisense strand to SEQ ID NO: 2477220
uuucgucccgcagaccugc

SEQ ID NO: 2477222 - RNA, 19 nt, Artificial Sequence
  Description of Artificial Sequence: Synthetic oligonucleotide
  Sense strand starting at position 1913 of SEQ ID NO: 1887507
ccgagauaccgccacuaaa

SEQ ID NO: 2477223 - RNA, 19 nt, Artificial Sequence
  Description of Artificial Sequence: Synthetic oligonucleotide
  Antisense strand to SEQ ID NO: 2477222
uuuaguggcgguaucucgg

SEQ ID NO: 2477224 - RNA, 19 nt, Artificial Sequence
  Description of Artificial Sequence: Synthetic oligonucleotide
  Sense strand starting at position 1960 of SEQ ID NO: 1887507
agccauuuccgcuaacgua

SEQ ID NO: 2477225 - RNA, 19 nt, Artificial Sequence
  Description of Artificial Sequence: Synthetic oligonucleotide
  Antisense strand to SEQ ID NO: 2477224
uacguuagcggaaauggcu

SEQ ID NO: 2477226 - RNA, 19 nt, Artificial Sequence
  Description of Artificial Sequence: Synthetic oligonucleotide
  Sense strand starting at position 2059 of SEQ ID NO: 1887507
ccuugcaucacgugguaau

SEQ ID NO: 2477227 - RNA, 19 nt, Artificial Sequence
  Description of Artificial Sequence: Synthetic oligonucleotide
  Antisense strand to SEQ ID NO: 2477226
auuaccacgugaugcaagg

SEQ ID NO: 2477228 - RNA, 19 nt, Artificial Sequence
  Description of Artificial Sequence: Synthetic oligonucleotide
  Sense strand starting at position 2165 of SEQ ID NO: 1887507
aaaguugucagauggcgaa

SEQ ID NO: 2477229 - RNA, 19 nt, Artificial Sequence
  Description of Artificial Sequence: Synthetic oligonucleotide
  Antisense strand to SEQ ID NO: 2477228
uucgccaucugacaacuuu

SEQ ID NO: 2477230 - RNA, 19 nt, Artificial Sequence
  Description of Artificial Sequence: Synthetic oligonucleotide
  Sense strand starting at position 2193 of SEQ ID NO: 1887507
gaaauucgccauugucaca

SEQ ID NO: 2477231 - RNA, 19 nt, Artificial Sequence
  Description of Artificial Sequence: Synthetic oligonucleotide
  Antisense strand to SEQ ID NO: 2477230
ugugacaauggcgaauuuc

SEQ ID NO: 2477232 - RNA, 19 nt, Artificial Sequence
  Description of Artificial Sequence: Synthetic oligonucleotide
  Sense strand starting at position 2200 of SEQ ID NO: 1887507
gccauugucacaugaugga

SEQ ID NO: 2477233 - RNA, 19 nt, Artificial Sequence
  Description of Artificial Sequence: Synthetic oligonucleotide
  Antisense strand to SEQ ID NO: 2477232
uccaucaugugacaauggc

SEQ ID NO: 2477234 - RNA, 19 nt, Artificial Sequence
  Description of Artificial Sequence: Synthetic oligonucleotide
  Sense strand starting at position 2247 of SEQ ID NO: 1887507
gccgaagucacgugacuac

SEQ ID NO: 2477235 - RNA, 19 nt, Artificial Sequence
  Description of Artificial Sequence: Synthetic oligonucleotide
  Antisense strand to SEQ ID NO: 2477234
guagucacgugacuucggc

SEQ ID NO: 2477236 - RNA, 19 nt, Artificial Sequence
  Description of Artificial Sequence: Synthetic oligonucleotide
  Sense strand starting at position 2609 of SEQ ID NO: 1887507
cgacaagguaagcgucaau

SEQ ID NO: 2477237 - RNA, 19 nt, Artificial Sequence
  Description of Artificial Sequence: Synthetic oligonucleotide
  Antisense strand to SEQ ID NO: 2477236
auugacgcuuaccuugucg

SEQ ID NO: 2477238 - RNA, 19 nt, Artificial Sequence
  Description of Artificial Sequence: Synthetic oligonucleotide
  Sense strand starting at position 2695 of SEQ ID NO: 1887507
gaggguucgcggugacaag

SEQ ID NO: 2477239 - RNA, 19 nt, Artificial Sequence
  Description of Artificial Sequence: Synthetic oligonucleotide
  Antisense strand to SEQ ID NO: 2477238
cuugucaccgcgaacccuc

SEQ ID NO: 2477240 - RNA, 19 nt, Artificial Sequence
  Description of Artificial Sequence: Synthetic oligonucleotide
  Sense strand starting at position 2806 of SEQ ID NO: 1887507
gccguuaacucucuuccau

SEQ ID NO: 2477241 - RNA, 19 nt, Artificial Sequence
  Description of Artificial Sequence: Synthetic oligonucleotide
  Antisense strand to SEQ ID NO: 2477240
auggaagagaguuaacggc

SEQ ID NO: 2477242 - RNA, 19 nt, Artificial Sequence
  Description of Artificial Sequence: Synthetic oligonucleotide
  Sense strand starting at position 2808 of SEQ ID NO: 1887507
cguuaacucucuuccauug

SEQ ID NO: 2477243 - RNA, 19 nt, Artificial Sequence
  Description of Artificial Sequence: Synthetic oligonucleotide
  Antisense strand to SEQ ID NO: 2477242
caauggaagagaguuaacg

SEQ ID NO: 2477244 - RNA, 19 nt, Artificial Sequence
  Description of Artificial Sequence: Synthetic oligonucleotide
  Sense strand starting at position 2819 of SEQ ID NO: 1887507
uuccauugugcggaggaaa

SEQ ID NO: 2477245 - RNA, 19 nt, Artificial Sequence
  Description of Artificial Sequence: Synthetic oligonucleotide
  Antisense strand to SEQ ID NO: 2477244
uuuccuccgcacaauggaa

SEQ ID NO: 2477246 - RNA, 19 nt, Artificial Sequence
  Description of Artificial Sequence: Synthetic oligonucleotide
  Sense strand starting at position 3235 of SEQ ID NO: 1887507
ugaggaagccuuugugggu

SEQ ID NO: 2477247 - RNA, 19 nt, Artificial Sequence
  Description of Artificial Sequence: Synthetic oligonucleotide
  Antisense strand to SEQ ID NO: 2477246
acccacaaaggcuuccuca

SEQ ID NO: 2477248 - RNA, 19 nt, Artificial Sequence
  Description of Artificial Sequence: Synthetic oligonucleotide
  Sense strand starting at position 3265 of SEQ ID NO: 1887507
ccaaaucucuggucagcca

SEQ ID NO: 2477249 - RNA, 19 nt, Artificial Sequence
  Description of Artificial Sequence: Synthetic oligonucleotide
  Antisense strand to SEQ ID NO: 2477248
uggcugaccagagauuugg

SEQ ID NO: 2477250 - RNA, 19 nt, Artificial Sequence
  Description of Artificial Sequence: Synthetic oligonucleotide
  Sense strand starting at position 3289 of SEQ ID NO: 1887507
cucucagaucagggucaaa

SEQ ID NO: 2477251 - RNA, 19 nt, Artificial Sequence
  Description of Artificial Sequence: Synthetic oligonucleotide
  Antisense strand to SEQ ID NO: 2477250
uuugacccugaucugagag

SEQ ID NO: 2477252 - RNA, 19 nt, Artificial Sequence
  Description of Artificial Sequence: Synthetic oligonucleotide
  Sense strand starting at position 3369 of SEQ ID NO: 1887507
gauuguuaguauuugccuu

SEQ ID NO: 2477253 - RNA, 19 nt, Artificial Sequence
  Description of Artificial Sequence: Synthetic oligonucleotide
  Antisense strand to SEQ ID NO: 2477252
aaggcaaauacuaacaauc

SEQ ID NO: 2477254 - RNA, 19 nt, Artificial Sequence
  Description of Artificial Sequence: Synthetic oligonucleotide
  Sense strand starting at position 3373 of SEQ ID NO: 1887507
guuaguauuugccuucucu

SEQ ID NO: 2477255 - RNA, 19 nt, Artificial Sequence
  Description of Artificial Sequence: Synthetic oligonucleotide
  Antisense strand to SEQ ID NO: 2477254
agagaaggcaaauacuaac

SEQ ID NO: 2477256 - RNA, 19 nt, Artificial Sequence
  Description of Artificial Sequence: Synthetic oligonucleotide
  Sense strand starting at position 3377 of SEQ ID NO: 1887507
guauuugccuucucuagac

SEQ ID NO: 2477257 - RNA, 19 nt, Artificial Sequence
  Description of Artificial Sequence: Synthetic oligonucleotide
  Antisense strand to SEQ ID NO: 2477256
gucuagagaaggcaaauac

SEQ ID NO: 2477258 - RNA, 19 nt, Artificial Sequence
  Description of Artificial Sequence: Synthetic oligonucleotide
  Sense strand starting at position 3426 of SEQ ID NO: 1887507
ccgaaacguggaugcuuaa

SEQ ID NO: 2477259 - RNA, 19 nt, Artificial Sequence
  Description of Artificial Sequence: Synthetic oligonucleotide
  Antisense strand to SEQ ID NO: 2477258
uuaagcauccacguuucgg

SEQ ID NO: 2477260 - RNA, 19 nt, Artificial Sequence
  Description of Artificial Sequence: Synthetic oligonucleotide
  Sense strand starting at position 3466 of SEQ ID NO: 1887507
ucucaaguaguugaacgau

SEQ ID NO: 2477261 - RNA, 19 nt, Artificial Sequence
  Description of Artificial Sequence: Synthetic oligonucleotide
  Antisense strand to SEQ ID NO: 2477260
aucguucaacuacuugaga

SEQ ID NO: 2477262 - RNA, 19 nt, Artificial Sequence
  Description of Artificial Sequence: Synthetic oligonucleotide
  Sense strand starting at position 3469 of SEQ ID NO: 1887507
caaguaguugaacgauuga

SEQ ID NO: 2477263 - RNA, 19 nt, Artificial Sequence
  Description of Artificial Sequence: Synthetic oligonucleotide
  Antisense strand to SEQ ID NO: 2477262
ucaaucguucaacuacuug

SEQ ID NO: 2477264 - RNA, 19 nt, Artificial Sequence
  Description of Artificial Sequence: Synthetic oligonucleotide
  Sense strand starting at position 3485 of SEQ ID NO: 1887507
ugagauucucgagguuacu

SEQ ID NO: 2477265 - RNA, 19 nt, Artificial Sequence
  Description of Artificial Sequence: Synthetic oligonucleotide
  Antisense strand to SEQ ID NO: 2477264
aguaaccucgagaaucuca

SEQ ID NO: 2477266 - RNA, 19 nt, Artificial Sequence
  Description of Artificial Sequence: Synthetic oligonucleotide
  Sense strand starting at position 3488 of SEQ ID NO: 1887507
gauucucgagguuacucau

SEQ ID NO: 2477267 - RNA, 19 nt, Artificial Sequence
  Description of Artificial Sequence: Synthetic oligonucleotide
  Antisense strand to SEQ ID NO: 2477266
augaguaaccucgagaauc

SEQ ID NO: 2477268 - RNA, 19 nt, Artificial Sequence
  Description of Artificial Sequence: Synthetic oligonucleotide
  Sense strand starting at position 3609 of SEQ ID NO: 1887507
agggaucucuucuccacau

SEQ ID NO: 2477269 - RNA, 19 nt, Artificial Sequence
  Description of Artificial Sequence: Synthetic oligonucleotide
  Antisense strand to SEQ ID NO: 2477268
auguggagaagagaucccu

SEQ ID NO: 2477270 - RNA, 19 nt, Artificial Sequence
  Description of Artificial Sequence: Synthetic oligonucleotide
  Sense strand starting at position 3610 of SEQ ID NO: 1887507
gggaucucuucuccacauu

SEQ ID NO: 2477271 - RNA, 19 nt, Artificial Sequence
  Description of Artificial Sequence: Synthetic oligonucleotide
  Antisense strand to SEQ ID NO: 2477270
aauguggagaagagauccc

SEQ ID NO: 2477272 - RNA, 19 nt, Artificial Sequence
  Description of Artificial Sequence: Synthetic oligonucleotide
  Sense strand starting at position 3776 of SEQ ID NO: 1887507
gcauauuugugguccacau

SEQ ID NO: 2477273 - RNA, 19 nt, Artificial Sequence
  Description of Artificial Sequence: Synthetic oligonucleotide
  Antisense strand to SEQ ID NO: 2477272
auguggaccacaaauaugc

SEQ ID NO: 2477274 - RNA, 19 nt, Artificial Sequence
  Description of Artificial Sequence: Synthetic oligonucleotide
  Sense strand starting at position 3928 of SEQ ID NO: 1887507
guguguggucucgugggau

SEQ ID NO: 2477275 - RNA, 19 nt, Artificial Sequence
  Description of Artificial Sequence: Synthetic oligonucleotide
  Antisense strand to SEQ ID NO: 2477274
aucccacgagaccacacac

SEQ ID NO: 2477276 - RNA, 19 nt, Artificial Sequence
  Description of Artificial Sequence: Synthetic oligonucleotide
  Sense strand starting at position 3931 of SEQ ID NO: 1887507
uguggucucgugggaugua

SEQ ID NO: 2477277 - RNA, 19 nt, Artificial Sequence
  Description of Artificial Sequence: Synthetic oligonucleotide
  Antisense strand to SEQ ID NO: 2477276
uacaucccacgagaccaca

SEQ ID NO: 2477278 - RNA, 19 nt, Artificial Sequence
  Description of Artificial Sequence: Synthetic oligonucleotide
  Sense strand starting at position 3934 of SEQ ID NO: 1887507
ggucucgugggauguaguu

SEQ ID NO: 2477279 - RNA, 19 nt, Artificial Sequence
  Description of Artificial Sequence: Synthetic oligonucleotide
  Antisense strand to SEQ ID NO: 2477278
aacuacaucccacgagacc

SEQ ID NO: 2477280 - RNA, 19 nt, Artificial Sequence
  Description of Artificial Sequence: Synthetic oligonucleotide
  Sense strand starting at position 3940 of SEQ ID NO: 1887507
gugggauguaguuacagua

SEQ ID NO: 2477281 - RNA, 19 nt, Artificial Sequence
  Description of Artificial Sequence: Synthetic oligonucleotide
  Antisense strand to SEQ ID NO: 2477280
uacuguaacuacaucccac

SEQ ID NO: 2477282 - RNA, 19 nt, Artificial Sequence
  Description of Artificial Sequence: Synthetic oligonucleotide
  Sense strand starting at position 3973 of SEQ ID NO: 1887507
gaaugaagugugggaacca

SEQ ID NO: 2477283 - RNA, 19 nt, Artificial Sequence
  Description of Artificial Sequence: Synthetic oligonucleotide
  Antisense strand to SEQ ID NO: 2477282
ugguucccacacuucauuc

SEQ ID NO: 2477284 - RNA, 19 nt, Artificial Sequence
  Description of Artificial Sequence: Synthetic oligonucleotide
  Sense strand starting at position 15 of SEQ ID NO: 1887508
cagcuuccugcaugucaga

SEQ ID NO: 2477285 - RNA, 19 nt, Artificial Sequence
  Description of Artificial Sequence: Synthetic oligonucleotide
  Antisense strand to SEQ ID NO: 2477284
ucugacaugcaggaagcug

SEQ ID NO: 2477286 - RNA, 19 nt, Artificial Sequence
  Description of Artificial Sequence: Synthetic oligonucleotide
  Sense strand starting at position 57 of SEQ ID NO: 1887508
gccucagucuuccaggaug

SEQ ID NO: 2477287 - RNA, 19 nt, Artificial Sequence
  Description of Artificial Sequence: Synthetic oligonucleotide
  Antisense strand to SEQ ID NO: 2477286
cauccuggaagacugaggc

SEQ ID NO: 2477288 - RNA, 19 nt, Artificial Sequence
  Description of Artificial Sequence: Synthetic oligonucleotide
  Sense strand starting at position 199 of SEQ ID NO: 1887508
ggucauuggcucugagauu

SEQ ID NO: 2477289 - RNA, 19 nt, Artificial Sequence
  Description of Artificial Sequence: Synthetic oligonucleotide
  Antisense strand to SEQ ID NO: 2477288
aaucucagagccaaugacc

SEQ ID NO: 2477290 - RNA, 19 nt, Artificial Sequence
  Description of Artificial Sequence: Synthetic oligonucleotide
  Sense strand starting at position 200 of SEQ ID NO: 1887508
gucauuggcucugagauuu

SEQ ID NO: 2477291 - RNA, 19 nt, Artificial Sequence
  Description of Artificial Sequence: Synthetic oligonucleotide
  Antisense strand to SEQ ID NO: 2477290
aaaucucagagccaaugac

SEQ ID NO: 2477292 - RNA, 19 nt, Artificial Sequence
  Description of Artificial Sequence: Synthetic oligonucleotide
  Sense strand starting at position 314 of SEQ ID NO: 1887508
aacugagaucccuggguga

SEQ ID NO: 2477293 - RNA, 19 nt, Artificial Sequence
  Description of Artificial Sequence: Synthetic oligonucleotide
  Antisense strand to SEQ ID NO: 2477292
ucacccagggaucucaguu

SEQ ID NO: 2477294 - RNA, 19 nt, Artificial Sequence
  Description of Artificial Sequence: Synthetic oligonucleotide
  Sense strand starting at position 316 of SEQ ID NO: 1887508
cugagaucccugggugauu

SEQ ID NO: 2477295 - RNA, 19 nt, Artificial Sequence
  Description of Artificial Sequence: Synthetic oligonucleotide
  Antisense strand to SEQ ID NO: 2477294
aaucacccagggaucucag

SEQ ID NO: 2477296 - RNA, 19 nt, Artificial Sequence
  Description of Artificial Sequence: Synthetic oligonucleotide
  Sense strand starting at position 337 of SEQ ID NO: 1887508
gccucugucccugacauga

SEQ ID NO: 2477297 - RNA, 19 nt, Artificial Sequence
  Description of Artificial Sequence: Synthetic oligonucleotide
  Antisense strand to SEQ ID NO: 2477296
ucaugucagggacagaggc

SEQ ID NO: 2477298 - RNA, 19 nt, Artificial Sequence
  Description of Artificial Sequence: Synthetic oligonucleotide
  Sense strand starting at position 339 of SEQ ID NO: 1887508
cucugucccugacaugaua

SEQ ID NO: 2477299 - RNA, 19 nt, Artificial Sequence
  Description of Artificial Sequence: Synthetic oligonucleotide
  Antisense strand to SEQ ID NO: 2477298
uaucaugucagggacagag

SEQ ID NO: 2477300 - RNA, 19 nt, Artificial Sequence
  Description of Artificial Sequence: Synthetic oligonucleotide
  Sense strand starting at position 342 of SEQ ID NO: 1887508
ugucccugacaugauaauu

SEQ ID NO: 2477301 - RNA, 19 nt, Artificial Sequence
  Description of Artificial Sequence: Synthetic oligonucleotide
  Antisense strand to SEQ ID NO: 2477300
aauuaucaugucagggaca

SEQ ID NO: 2477302 - RNA, 19 nt, Artificial Sequence
  Description of Artificial Sequence: Synthetic oligonucleotide
  Sense strand starting at position 384 of SEQ ID NO: 1887508
cccagcuauuguccuauau

SEQ ID NO: 2477303 - RNA, 19 nt, Artificial Sequence
  Description of Artificial Sequence: Synthetic oligonucleotide
  Antisense strand to SEQ ID NO: 2477302
auauaggacaauagcuggg

SEQ ID NO: 2477304 - RNA, 19 nt, Artificial Sequence
  Description of Artificial Sequence: Synthetic oligonucleotide
  Sense strand starting at position 417 of SEQ ID NO: 1887508
ucuugucuccugugcugua

SEQ ID NO: 2477305 - RNA, 19 nt, Artificial Sequence
  Description of Artificial Sequence: Synthetic oligonucleotide
  Antisense strand to SEQ ID NO: 2477304
uacagcacaggagacaaga

SEQ ID NO: 2477306 - RNA, 19 nt, Artificial Sequence
  Description of Artificial Sequence: Synthetic oligonucleotide
  Sense strand starting at position 672 of SEQ ID NO: 1887508
ggcaucucugcagacaaca

SEQ ID NO: 2477307 - RNA, 19 nt, Artificial Sequence
  Description of Artificial Sequence: Synthetic oligonucleotide
  Antisense strand to SEQ ID NO: 2477306
uguugucugcagagaugcc

SEQ ID NO: 2477308 - RNA, 19 nt, Artificial Sequence
  Description of Artificial Sequence: Synthetic oligonucleotide
  Sense strand starting at position 2571 of SEQ ID NO: 1887508
gcggaagcacugcguuuaa

SEQ ID NO: 2477309 - RNA, 19 nt, Artificial Sequence
  Description of Artificial Sequence: Synthetic oligonucleotide
  Antisense strand to SEQ ID NO: 2477308
uuaaacgcagugcuuccgc

SEQ ID NO: 2477310 - RNA, 19 nt, Artificial Sequence
  Description of Artificial Sequence: Synthetic oligonucleotide
  Sense strand starting at position 2597 of SEQ ID NO: 1887508
gggcuggcgcccgaguaau

SEQ ID NO: 2477311 - RNA, 19 nt, Artificial Sequence
  Description of Artificial Sequence: Synthetic oligonucleotide
  Antisense strand to SEQ ID NO: 2477310
auuacucgggcgccagccc

SEQ ID NO: 2477312 - RNA, 19 nt, Artificial Sequence
  Description of Artificial Sequence: Synthetic oligonucleotide
  Sense strand starting at position 2669 of SEQ ID NO: 1887508
gcgggagauucggccugaa

SEQ ID NO: 2477313 - RNA, 19 nt, Artificial Sequence
  Description of Artificial Sequence: Synthetic oligonucleotide
  Antisense strand to SEQ ID NO: 2477312
uucaggccgaaucucccgc

SEQ ID NO: 2477314 - RNA, 19 nt, Artificial Sequence
  Description of Artificial Sequence: Synthetic oligonucleotide
  Sense strand starting at position 2672 of SEQ ID NO: 1887508
ggagauucggccugaagac

SEQ ID NO: 2477315 - RNA, 19 nt, Artificial Sequence
  Description of Artificial Sequence: Synthetic oligonucleotide
  Antisense strand to SEQ ID NO: 2477314
gucuucaggccgaaucucc

SEQ ID NO: 2477316 - RNA, 19 nt, Artificial Sequence
  Description of Artificial Sequence: Synthetic oligonucleotide
  Sense strand starting at position 2673 of SEQ ID NO: 1887508
gagauucggccugaagacu

SEQ ID NO: 2477317 - RNA, 19 nt, Artificial Sequence
  Description of Artificial Sequence: Synthetic oligonucleotide
  Antisense strand to SEQ ID NO: 2477316
agucuucaggccgaaucuc

SEQ ID NO: 2477318 - RNA, 19 nt, Artificial Sequence
  Description of Artificial Sequence: Synthetic oligonucleotide
  Sense strand starting at position 3128 of SEQ ID NO: 1887508
ccacgucucucauccaguu

SEQ ID NO: 2477319 - RNA, 19 nt, Artificial Sequence
  Description of Artificial Sequence: Synthetic oligonucleotide
  Antisense strand to SEQ ID NO: 2477318
aacuggaugagagacgugg

SEQ ID NO: 2477320 - RNA, 19 nt, Artificial Sequence
  Description of Artificial Sequence: Synthetic oligonucleotide
  Sense strand starting at position 3195 of SEQ ID NO: 1887508
gacuaauccucucagcgga

SEQ ID NO: 2477321 - RNA, 19 nt, Artificial Sequence
  Description of Artificial Sequence: Synthetic oligonucleotide
  Antisense strand to SEQ ID NO: 2477320
uccgcugagaggauuaguc

SEQ ID NO: 2477322 - RNA, 19 nt, Artificial Sequence
  Description of Artificial Sequence: Synthetic oligonucleotide
  Sense strand starting at position 3243 of SEQ ID NO: 1887508
accguuuacaaucgaggaa

SEQ ID NO: 2477323 - RNA, 19 nt, Artificial Sequence
  Description of Artificial Sequence: Synthetic oligonucleotide
  Antisense strand to SEQ ID NO: 2477322
uuccucgauuguaaacggu

SEQ ID NO: 2477324 - RNA, 19 nt, Artificial Sequence
  Description of Artificial Sequence: Synthetic oligonucleotide
  Sense strand starting at position 3244 of SEQ ID NO: 1887508
ccguuuacaaucgaggaaa

SEQ ID NO: 2477325 - RNA, 19 nt, Artificial Sequence
  Description of Artificial Sequence: Synthetic oligonucleotide
  Antisense strand to SEQ ID NO: 2477324
uuuccucgauuguaaacgg

SEQ ID NO: 2477326 - RNA, 19 nt, Artificial Sequence
  Description of Artificial Sequence: Synthetic oligonucleotide
  Sense strand starting at position 3576 of SEQ ID NO: 1887508
gcacuucgucggucccaaa

SEQ ID NO: 2477327 - RNA, 19 nt, Artificial Sequence
  Description of Artificial Sequence: Synthetic oligonucleotide
  Antisense strand to SEQ ID NO: 2477326
uuugggaccgacgaagugc

SEQ ID NO: 2477328 - RNA, 19 nt, Artificial Sequence
  Description of Artificial Sequence: Synthetic oligonucleotide
  Sense strand starting at position 3602 of SEQ ID NO: 1887508
ucggguacgcaugucuauu

SEQ ID NO: 2477329 - RNA, 19 nt, Artificial Sequence
  Description of Artificial Sequence: Synthetic oligonucleotide
  Antisense strand to SEQ ID NO: 2477328
aauagacaugcguacccga

SEQ ID NO: 2477330 - RNA, 19 nt, Artificial Sequence
  Description of Artificial Sequence: Synthetic oligonucleotide
  Sense strand starting at position 3608 of SEQ ID NO: 1887508
acgcaugucuauucuaauu

SEQ ID NO: 2477331 - RNA, 19 nt, Artificial Sequence
  Description of Artificial Sequence: Synthetic oligonucleotide
  Antisense strand to SEQ ID NO: 2477330
aauuagaauagacaugcgu

SEQ ID NO: 2477332 - RNA, 19 nt, Artificial Sequence
  Description of Artificial Sequence: Synthetic oligonucleotide
  Sense strand starting at position 3610 of SEQ ID NO: 1887508
gcaugucuauucuaauuug

SEQ ID NO: 2477333 - RNA, 19 nt, Artificial Sequence
  Description of Artificial Sequence: Synthetic oligonucleotide
  Antisense strand to SEQ ID NO: 2477332
caaauuagaauagacaugc

SEQ ID NO: 2477334 - RNA, 19 nt, Artificial Sequence
  Description of Artificial Sequence: Synthetic oligonucleotide
  Sense strand starting at position 1 of SEQ ID NO: 1887509
guggguaucuuggauuauc

SEQ ID NO: 2477335 - RNA, 19 nt, Artificial Sequence
  Description of Artificial Sequence: Synthetic oligonucleotide
  Antisense strand to SEQ ID NO: 2477334
gauaauccaagauacccac

SEQ ID NO: 2477336 - RNA, 19 nt, Artificial Sequence
  Description of Artificial Sequence: Synthetic oligonucleotide
  Sense strand starting at position 4 of SEQ ID NO: 1887509
gguaucuuggauuauccca

SEQ ID NO: 2477337 - RNA, 19 nt, Artificial Sequence
  Description of Artificial Sequence: Synthetic oligonucleotide
  Antisense strand to SEQ ID NO: 2477336
ugggauaauccaagauacc

SEQ ID NO: 2477338 - RNA, 19 nt, Artificial Sequence
  Description of Artificial Sequence: Synthetic oligonucleotide
  Sense strand starting at position 9 of SEQ ID NO: 1887509
cuuggauuaucccagacca

SEQ ID NO: 2477339 - RNA, 19 nt, Artificial Sequence
  Description of Artificial Sequence: Synthetic oligonucleotide
  Antisense strand to SEQ ID NO: 2477338
uggucugggauaauccaag

SEQ ID NO: 2477340 - RNA, 19 nt, Artificial Sequence
  Description of Artificial Sequence: Synthetic oligonucleotide
  Sense strand starting at position 66 of SEQ ID NO: 1887509
uguaaagggcucuguaauu

SEQ ID NO: 2477341 - RNA, 19 nt, Artificial Sequence
  Description of Artificial Sequence: Synthetic oligonucleotide
  Antisense strand to SEQ ID NO: 2477340
aauuacagagcccuuuaca

SEQ ID NO: 2477342 - RNA, 19 nt, Artificial Sequence
  Description of Artificial Sequence: Synthetic oligonucleotide
  Sense strand starting at position 109 of SEQ ID NO: 1887509
aagauuuacuaaggugugu

SEQ ID NO: 2477343 - RNA, 19 nt, Artificial Sequence
  Description of Artificial Sequence: Synthetic oligonucleotide
  Antisense strand to SEQ ID NO: 2477342
acacaccuuaguaaaucuu

SEQ ID NO: 2477344 - RNA, 19 nt, Artificial Sequence
  Description of Artificial Sequence: Synthetic oligonucleotide
  Sense strand starting at position 622 of SEQ ID NO: 1887509
agaggaagcuguccucauu

SEQ ID NO: 2477345 - RNA, 19 nt, Artificial Sequence
  Description of Artificial Sequence: Synthetic oligonucleotide
  Antisense strand to SEQ ID NO: 2477344
aaugaggacagcuuccucu

SEQ ID NO: 2477346 - RNA, 19 nt, Artificial Sequence
  Description of Artificial Sequence: Synthetic oligonucleotide
  Sense strand starting at position 641 of SEQ ID NO: 1887509
uccuacauuugagaaugua

SEQ ID NO: 2477347 - RNA, 19 nt, Artificial Sequence
  Description of Artificial Sequence: Synthetic oligonucleotide
  Antisense strand to SEQ ID NO: 2477346
uacauucucaaauguagga

SEQ ID NO: 2477348 - RNA, 19 nt, Artificial Sequence
  Description of Artificial Sequence: Synthetic oligonucleotide
  Sense strand starting at position 659 of SEQ ID NO: 1887509
aggaaugaaagcggacauu

SEQ ID NO: 2477349 - RNA, 19 nt, Artificial Sequence
  Description of Artificial Sequence: Synthetic oligonucleotide
  Antisense strand to SEQ ID NO: 2477348
aauguccgcuuucauuccu

SEQ ID NO: 2477350 - RNA, 19 nt, Artificial Sequence
  Description of Artificial Sequence: Synthetic oligonucleotide
  Sense strand starting at position 686 of SEQ ID NO: 1887509
uacugcaagccugaguuaa

SEQ ID NO: 2477351 - RNA, 19 nt, Artificial Sequence
  Description of Artificial Sequence: Synthetic oligonucleotide
  Antisense strand to SEQ ID NO: 2477350
uuaacucaggcuugcagua

SEQ ID NO: 2477352 - RNA, 19 nt, Artificial Sequence
  Description of Artificial Sequence: Synthetic oligonucleotide
  Sense strand starting at position 690 of SEQ ID NO: 1887509
gcaagccugaguuaagcua

SEQ ID NO: 2477353 - RNA, 19 nt, Artificial Sequence
  Description of Artificial Sequence: Synthetic oligonucleotide
  Antisense strand to SEQ ID NO: 2477352
uagcuuaacucaggcuugc

SEQ ID NO: 2477354 - RNA, 19 nt, Artificial Sequence
  Description of Artificial Sequence: Synthetic oligonucleotide
  Sense strand starting at position 697 of SEQ ID NO: 1887509
ugaguuaagcuaggagaaa

SEQ ID NO: 2477355 - RNA, 19 nt, Artificial Sequence
  Description of Artificial Sequence: Synthetic oligonucleotide
  Antisense strand to SEQ ID NO: 2477354
uuucuccuagcuuaacuca

SEQ ID NO: 2477356 - RNA, 19 nt, Artificial Sequence
  Description of Artificial Sequence: Synthetic oligonucleotide
  Sense strand starting at position 725 of SEQ ID NO: 1887509
ugaaguccugcuugccaua

SEQ ID NO: 2477357 - RNA, 19 nt, Artificial Sequence
  Description of Artificial Sequence: Synthetic oligonucleotide
  Antisense strand to SEQ ID NO: 2477356
uauggcaagcaggacuuca

SEQ ID NO: 2477358 - RNA, 19 nt, Artificial Sequence
  Description of Artificial Sequence: Synthetic oligonucleotide
  Sense strand starting at position 956 of SEQ ID NO: 1887509
ccaggaaauuuccaccuga

SEQ ID NO: 2477359 - RNA, 19 nt, Artificial Sequence
  Description of Artificial Sequence: Synthetic oligonucleotide
  Antisense strand to SEQ ID NO: 2477358
ucagguggaaauuuccugg

SEQ ID NO: 2477360 - RNA, 19 nt, Artificial Sequence
  Description of Artificial Sequence: Synthetic oligonucleotide
  Sense strand starting at position 1070 of SEQ ID NO: 1887509
ucaggugggccacauauua

SEQ ID NO: 2477361 - RNA, 19 nt, Artificial Sequence
  Description of Artificial Sequence: Synthetic oligonucleotide
  Antisense strand to SEQ ID NO: 2477360
uaauauguggcccaccuga

SEQ ID NO: 2477362 - RNA, 19 nt, Artificial Sequence
  Description of Artificial Sequence: Synthetic oligonucleotide
  Sense strand starting at position 1082 of SEQ ID NO: 1887509
cauauuauggcuggguguu

SEQ ID NO: 2477363 - RNA, 19 nt, Artificial Sequence
  Description of Artificial Sequence: Synthetic oligonucleotide
  Antisense strand to SEQ ID NO: 2477362
aacacccagccauaauaug

SEQ ID NO: 2477364 - RNA, 19 nt, Artificial Sequence
  Description of Artificial Sequence: Synthetic oligonucleotide
  Sense strand starting at position 1083 of SEQ ID NO: 1887509
auauuauggcuggguguuu

SEQ ID NO: 2477365 - RNA, 19 nt, Artificial Sequence
  Description of Artificial Sequence: Synthetic oligonucleotide
  Antisense strand to SEQ ID NO: 2477364
aaacacccagccauaauau

SEQ ID NO: 2477366 - RNA, 19 nt, Artificial Sequence
  Description of Artificial Sequence: Synthetic oligonucleotide
  Sense strand starting at position 1123 of SEQ ID NO: 1887509
caaauaaacucguuaacgu

SEQ ID NO: 2477367 - RNA, 19 nt, Artificial Sequence
  Description of Artificial Sequence: Synthetic oligonucleotide
  Antisense strand to SEQ ID NO: 2477366
acguuaacgaguuuauuug

SEQ ID NO: 2477368 - RNA, 19 nt, Artificial Sequence
  Description of Artificial Sequence: Synthetic oligonucleotide
  Sense strand starting at position 1124 of SEQ ID NO: 1887509
aaauaaacucguuaacguu

SEQ ID NO: 2477369 - RNA, 19 nt, Artificial Sequence
  Description of Artificial Sequence: Synthetic oligonucleotide
  Antisense strand to SEQ ID NO: 2477368
aacguuaacgaguuuauuu

SEQ ID NO: 2477370 - RNA, 19 nt, Artificial Sequence
  Description of Artificial Sequence: Synthetic oligonucleotide
  Sense strand starting at position 1493 of SEQ ID NO: 1887509
gggagucucaccugccaca

SEQ ID NO: 2477371 - RNA, 19 nt, Artificial Sequence
  Description of Artificial Sequence: Synthetic oligonucleotide
  Antisense strand to SEQ ID NO: 2477370
uguggcaggugagacuccc

SEQ ID NO: 2477372 - RNA, 19 nt, Artificial Sequence
  Description of Artificial Sequence: Synthetic oligonucleotide
  Sense strand starting at position 1534 of SEQ ID NO: 1887509
ucggaauucugcccuaaug

SEQ ID NO: 2477373 - RNA, 19 nt, Artificial Sequence
  Description of Artificial Sequence: Synthetic oligonucleotide
  Antisense strand to SEQ ID NO: 2477372
cauuagggcagaauuccga

SEQ ID NO: 2477374 - RNA, 19 nt, Artificial Sequence
  Description of Artificial Sequence: Synthetic oligonucleotide
  Sense strand starting at position 1536 of SEQ ID NO: 1887509
ggaauucugcccuaaugac

SEQ ID NO: 2477375 - RNA, 19 nt, Artificial Sequence
  Description of Artificial Sequence: Synthetic oligonucleotide
  Antisense strand to SEQ ID NO: 2477374
gucauuagggcagaauucc

SEQ ID NO: 2477376 - RNA, 19 nt, Artificial Sequence
  Description of Artificial Sequence: Synthetic oligonucleotide
  Sense strand starting at position 1567 of SEQ ID NO: 1887509
ccugaacaauccgggaaau

SEQ ID NO: 2477377 - RNA, 19 nt, Artificial Sequence
  Description of Artificial Sequence: Synthetic oligonucleotide
  Antisense strand to SEQ ID NO: 2477376
auuucccggauuguucagg

SEQ ID NO: 2477378 - RNA, 19 nt, Artificial Sequence
  Description of Artificial Sequence: Synthetic oligonucleotide
  Sense strand starting at position 1858 of SEQ ID NO: 1887509
agcugugcgucucccagaa

SEQ ID NO: 2477379 - RNA, 19 nt, Artificial Sequence
  Description of Artificial Sequence: Synthetic oligonucleotide
  Antisense strand to SEQ ID NO: 2477378
uucugggagacgcacagcu

SEQ ID NO: 2477380 - RNA, 19 nt, Artificial Sequence
  Description of Artificial Sequence: Synthetic oligonucleotide
  Sense strand starting at position 2221 of SEQ ID NO: 1887509
uggguuugcuuguauaaug

SEQ ID NO: 2477381 - RNA, 19 nt, Artificial Sequence
  Description of Artificial Sequence: Synthetic oligonucleotide
  Antisense strand to SEQ ID NO: 2477380
cauuauacaagcaaaccca

SEQ ID NO: 2477382 - RNA, 19 nt, Artificial Sequence
  Description of Artificial Sequence: Synthetic oligonucleotide
  Sense strand starting at position 2296 of SEQ ID NO: 1887509
guaccuaguuucgcucuua

SEQ ID NO: 2477383 - RNA, 19 nt, Artificial Sequence
  Description of Artificial Sequence: Synthetic oligonucleotide
  Antisense strand to SEQ ID NO: 2477382
uaagagcgaaacuagguac

SEQ ID NO: 2477384 - RNA, 19 nt, Artificial Sequence
  Description of Artificial Sequence: Synthetic oligonucleotide
  Sense strand starting at position 3274 of SEQ ID NO: 1887509
ggugcugcuggauaugagu

SEQ ID NO: 2477385 - RNA, 19 nt, Artificial Sequence
  Description of Artificial Sequence: Synthetic oligonucleotide
  Antisense strand to SEQ ID NO: 2477384
acucauauccagcagcacc

SEQ ID NO: 2477386 - RNA, 19 nt, Artificial Sequence
  Description of Artificial Sequence: Synthetic oligonucleotide
  Sense strand starting at position 3280 of SEQ ID NO: 1887509
gcuggauaugagugcugga

SEQ ID NO: 2477387 - RNA, 19 nt, Artificial Sequence
  Description of Artificial Sequence: Synthetic oligonucleotide
  Antisense strand to SEQ ID NO: 2477386
uccagcacucauauccagc

SEQ ID NO: 2477388 - RNA, 19 nt, Artificial Sequence
  Description of Artificial Sequence: Synthetic oligonucleotide
  Sense strand starting at position 3283 of SEQ ID NO: 1887509
ggauaugagugcuggaaag

SEQ ID NO: 2477389 - RNA, 19 nt, Artificial Sequence
  Description of Artificial Sequence: Synthetic oligonucleotide
  Antisense strand to SEQ ID NO: 2477388
cuuuccagcacucauaucc

SEQ ID NO: 2477390 - RNA, 19 nt, Artificial Sequence
  Description of Artificial Sequence: Synthetic oligonucleotide
  Sense strand starting at position 3457 of SEQ ID NO: 1887509
gguguauguggacaucaga

SEQ ID NO: 2477391 - RNA, 19 nt, Artificial Sequence
  Description of Artificial Sequence: Synthetic oligonucleotide
  Antisense strand to SEQ ID NO: 2477390
ucugauguccacauacacc

SEQ ID NO: 2477392 - RNA, 19 nt, Artificial Sequence
  Description of Artificial Sequence: Synthetic oligonucleotide
  Sense strand starting at position 3471 of SEQ ID NO: 1887509
ucagauugcagcugggaaa

SEQ ID NO: 2477393 - RNA, 19 nt, Artificial Sequence
  Description of Artificial Sequence: Synthetic oligonucleotide
  Antisense strand to SEQ ID NO: 2477392
uuucccagcugcaaucuga

SEQ ID NO: 2477394 - RNA, 19 nt, Artificial Sequence
  Description of Artificial Sequence: Synthetic oligonucleotide
  Sense strand starting at position 3532 of SEQ ID NO: 1887509
ugcccaugaggguauagau

SEQ ID NO: 2477395 - RNA, 19 nt, Artificial Sequence
  Description of Artificial Sequence: Synthetic oligonucleotide
  Antisense strand to SEQ ID NO: 2477394
aucuauacccucaugggca

SEQ ID NO: 2477396 - RNA, 19 nt, Artificial Sequence
  Description of Artificial Sequence: Synthetic oligonucleotide
  Sense strand starting at position 3540 of SEQ ID NO: 1887509
aggguauagaucugucauu

SEQ ID NO: 2477397 - RNA, 19 nt, Artificial Sequence
  Description of Artificial Sequence: Synthetic oligonucleotide
  Antisense strand to SEQ ID NO: 2477396
aaugacagaucuauacccu

SEQ ID NO: 2477398 - RNA, 19 nt, Artificial Sequence
  Description of Artificial Sequence: Synthetic oligonucleotide
  Sense strand starting at position 3541 of SEQ ID NO: 1887509
ggguauagaucugucauuc

SEQ ID NO: 2477399 - RNA, 19 nt, Artificial Sequence
  Description of Artificial Sequence: Synthetic oligonucleotide
  Antisense strand to SEQ ID NO: 2477398
gaaugacagaucuauaccc

SEQ ID NO: 2477400 - RNA, 19 nt, Artificial Sequence
  Description of Artificial Sequence: Synthetic oligonucleotide
  Sense strand starting at position 3552 of SEQ ID NO: 1887509
ugucauucuuaacuuguau

SEQ ID NO: 2477401 - RNA, 19 nt, Artificial Sequence
  Description of Artificial Sequence: Synthetic oligonucleotide
  Antisense strand to SEQ ID NO: 2477400
auacaaguuaagaaugaca

SEQ ID NO: 2477402 - RNA, 19 nt, Artificial Sequence
  Description of Artificial Sequence: Synthetic oligonucleotide
  Sense strand starting at position 3577 of SEQ ID NO: 1887509
cuaggucaguucugacuca

SEQ ID NO: 2477403 - RNA, 19 nt, Artificial Sequence
  Description of Artificial Sequence: Synthetic oligonucleotide
  Antisense strand to SEQ ID NO: 2477402
ugagucagaacugaccuag

SEQ ID NO: 2477404 - RNA, 19 nt, Artificial Sequence
  Description of Artificial Sequence: Synthetic oligonucleotide
  Sense strand starting at position 3578 of SEQ ID NO: 1887509
uaggucaguucugacucaa

SEQ ID NO: 2477405 - RNA, 19 nt, Artificial Sequence
  Description of Artificial Sequence: Synthetic oligonucleotide
  Antisense strand to SEQ ID NO: 2477404
uugagucagaacugaccua

SEQ ID NO: 2477406 - RNA, 19 nt, Artificial Sequence
  Description of Artificial Sequence: Synthetic oligonucleotide
  Sense strand starting at position 3617 of SEQ ID NO: 1887509
ucagaucauuuguauguuu

SEQ ID NO: 2477407 - RNA, 19 nt, Artificial Sequence
  Description of Artificial Sequence: Synthetic oligonucleotide
  Antisense strand to SEQ ID NO: 2477406
aaacauacaaaugaucuga

SEQ ID NO: 2477408 - RNA, 19 nt, Artificial Sequence
  Description of Artificial Sequence: Synthetic oligonucleotide
  Sense strand starting at position 3868 of SEQ ID NO: 1887509
ggaaucagcauugguuguu

SEQ ID NO: 2477409 - RNA, 19 nt, Artificial Sequence
  Description of Artificial Sequence: Synthetic oligonucleotide
  Antisense strand to SEQ ID NO: 2477408
aacaaccaaugcugauucc

SEQ ID NO: 2477410 - RNA, 19 nt, Artificial Sequence
  Description of Artificial Sequence: Synthetic oligonucleotide
  Sense strand starting at position 133 of SEQ ID NO: 1887510
uuugaaaccucuuugguuu

SEQ ID NO: 2477411 - RNA, 19 nt, Artificial Sequence
  Description of Artificial Sequence: Synthetic oligonucleotide
  Antisense strand to SEQ ID NO: 2477410
aaaccaaagagguuucaaa

SEQ ID NO: 2477412 - RNA, 19 nt, Artificial Sequence
  Description of Artificial Sequence: Synthetic oligonucleotide
  Sense strand starting at position 335 of SEQ ID NO: 1887510
ugucuaaucccgugcacca

SEQ ID NO: 2477413 - RNA, 19 nt, Artificial Sequence
  Description of Artificial Sequence: Synthetic oligonucleotide
  Antisense strand to SEQ ID NO: 2477412
uggugcacgggauuagaca

SEQ ID NO: 2477414 - RNA, 19 nt, Artificial Sequence
  Description of Artificial Sequence: Synthetic oligonucleotide
  Sense strand starting at position 361 of SEQ ID NO: 1887510
cgcgacacccucugugaua

SEQ ID NO: 2477415 - RNA, 19 nt, Artificial Sequence
  Description of Artificial Sequence: Synthetic oligonucleotide
  Antisense strand to SEQ ID NO: 2477414
uaucacagagggugucgcg

SEQ ID NO: 2477416 - RNA, 19 nt, Artificial Sequence
  Description of Artificial Sequence: Synthetic oligonucleotide
  Sense strand starting at position 362 of SEQ ID NO: 1887510
gcgacacccucugugauaa

SEQ ID NO: 2477417 - RNA, 19 nt, Artificial Sequence
  Description of Artificial Sequence: Synthetic oligonucleotide
  Antisense strand to SEQ ID NO: 2477416
uuaucacagagggugucgc

SEQ ID NO: 2477418 - RNA, 19 nt, Artificial Sequence
  Description of Artificial Sequence: Synthetic oligonucleotide
  Sense strand starting at position 410 of SEQ ID NO: 1887510
ggcauauacuaauucggua

SEQ ID NO: 2477419 - RNA, 19 nt, Artificial Sequence
  Description of Artificial Sequence: Synthetic oligonucleotide
  Antisense strand to SEQ ID NO: 2477418
uaccgaauuaguauaugcc

SEQ ID NO: 2477420 - RNA, 19 nt, Artificial Sequence
  Description of Artificial Sequence: Synthetic oligonucleotide
  Sense strand starting at position 414 of SEQ ID NO: 1887510
uauacuaauucgguaguua

SEQ ID NO: 2477421 - RNA, 19 nt, Artificial Sequence
  Description of Artificial Sequence: Synthetic oligonucleotide
  Antisense strand to SEQ ID NO: 2477420
uaacuaccgaauuaguaua

SEQ ID NO: 2477422 - RNA, 19 nt, Artificial Sequence
  Description of Artificial Sequence: Synthetic oligonucleotide
  Sense strand starting at position 415 of SEQ ID NO: 1887510
auacuaauucgguaguuag

SEQ ID NO: 2477423 - RNA, 19 nt, Artificial Sequence
  Description of Artificial Sequence: Synthetic oligonucleotide
  Antisense strand to SEQ ID NO: 2477422
cuaacuaccgaauuaguau

SEQ ID NO: 2477424 - RNA, 19 nt, Artificial Sequence
  Description of Artificial Sequence: Synthetic oligonucleotide
  Sense strand starting at position 418 of SEQ ID NO: 1887510
cuaauucgguaguuaggaa

SEQ ID NO: 2477425 - RNA, 19 nt, Artificial Sequence
  Description of Artificial Sequence: Synthetic oligonucleotide
  Antisense strand to SEQ ID NO: 2477424
uuccuaacuaccgaauuag

SEQ ID NO: 2477426 - RNA, 19 nt, Artificial Sequence
  Description of Artificial Sequence: Synthetic oligonucleotide
  Sense strand starting at position 543 of SEQ ID NO: 1887510
ggaugcauuuccuuugcgu

SEQ ID NO: 2477427 - RNA, 19 nt, Artificial Sequence
  Description of Artificial Sequence: Synthetic oligonucleotide
  Antisense strand to SEQ ID NO: 2477426
acgcaaaggaaaugcaucc

SEQ ID NO: 2477428 - RNA, 19 nt, Artificial Sequence
  Description of Artificial Sequence: Synthetic oligonucleotide
  Sense strand starting at position 798 of SEQ ID NO: 1887510
ccuggaagauuccgaaauc

SEQ ID NO: 2477429 - RNA, 19 nt, Artificial Sequence
  Description of Artificial Sequence: Synthetic oligonucleotide
  Antisense strand to SEQ ID NO: 2477428
gauuucggaaucuuccagg

SEQ ID NO: 2477430 - RNA, 19 nt, Artificial Sequence
  Description of Artificial Sequence: Synthetic oligonucleotide
  Sense strand starting at position 840 of SEQ ID NO: 1887510
ggccgugcuuccaagggau

SEQ ID NO: 2477431 - RNA, 19 nt, Artificial Sequence
  Description of Artificial Sequence: Synthetic oligonucleotide
  Antisense strand to SEQ ID NO: 2477430
aucccuuggaagcacggcc

SEQ ID NO: 2477432 - RNA, 19 nt, Artificial Sequence
  Description of Artificial Sequence: Synthetic oligonucleotide
  Sense strand starting at position 1136 of SEQ ID NO: 1887510
ccgagaggcucucuaauca

SEQ ID NO: 2477433 - RNA, 19 nt, Artificial Sequence
  Description of Artificial Sequence: Synthetic oligonucleotide
  Antisense strand to SEQ ID NO: 2477432
ugauuagagagccucucgg

SEQ ID NO: 2477434 - RNA, 19 nt, Artificial Sequence
  Description of Artificial Sequence: Synthetic oligonucleotide
  Sense strand starting at position 1160 of SEQ ID NO: 1887510
gguuccuucccauauccau

SEQ ID NO: 2477435 - RNA, 19 nt, Artificial Sequence
  Description of Artificial Sequence: Synthetic oligonucleotide
  Antisense strand to SEQ ID NO: 2477434
auggauaugggaaggaacc

SEQ ID NO: 2477436 - RNA, 19 nt, Artificial Sequence
  Description of Artificial Sequence: Synthetic oligonucleotide
  Sense strand starting at position 1221 of SEQ ID NO: 1887510
ccucaauuccgccaguaua

SEQ ID NO: 2477437 - RNA, 19 nt, Artificial Sequence
  Description of Artificial Sequence: Synthetic oligonucleotide
  Antisense strand to SEQ ID NO: 2477436
uauacuggcggaauugagg

SEQ ID NO: 2477438 - RNA, 19 nt, Artificial Sequence
  Description of Artificial Sequence: Synthetic oligonucleotide
  Sense strand starting at position 2407 of SEQ ID NO: 1887510
uugguaguucccgaugcuu

SEQ ID NO: 2477439 - RNA, 19 nt, Artificial Sequence
  Description of Artificial Sequence: Synthetic oligonucleotide
  Antisense strand to SEQ ID NO: 2477438
aagcaucgggaacuaccaa

SEQ ID NO: 2477440 - RNA, 19 nt, Artificial Sequence
  Description of Artificial Sequence: Synthetic oligonucleotide
  Sense strand starting at position 2409 of SEQ ID NO: 1887510
gguaguucccgaugcuuua

SEQ ID NO: 2477441 - RNA, 19 nt, Artificial Sequence
  Description of Artificial Sequence: Synthetic oligonucleotide
  Antisense strand to SEQ ID NO: 2477440
uaaagcaucgggaacuacc

SEQ ID NO: 2477442 - RNA, 19 nt, Artificial Sequence
  Description of Artificial Sequence: Synthetic oligonucleotide
  Sense strand starting at position 2423 of SEQ ID NO: 1887510
cuuuaaggguuucaggagu

SEQ ID NO: 2477443 - RNA, 19 nt, Artificial Sequence
  Description of Artificial Sequence: Synthetic oligonucleotide
  Antisense strand to SEQ ID NO: 2477442
acuccugaaacccuuaaag

SEQ ID NO: 2477444 - RNA, 19 nt, Artificial Sequence
  Description of Artificial Sequence: Synthetic oligonucleotide
  Sense strand starting at position 2431 of SEQ ID NO: 1887510
guuucaggaguuuggcaua

SEQ ID NO: 2477445 - RNA, 19 nt, Artificial Sequence
  Description of Artificial Sequence: Synthetic oligonucleotide
  Antisense strand to SEQ ID NO: 2477444
uaugccaaacuccugaaac

SEQ ID NO: 2477446 - RNA, 19 nt, Artificial Sequence
  Description of Artificial Sequence: Synthetic oligonucleotide
  Sense strand starting at position 2436 of SEQ ID NO: 1887510
aggaguuuggcauaugccu

SEQ ID NO: 2477447 - RNA, 19 nt, Artificial Sequence
  Description of Artificial Sequence: Synthetic oligonucleotide
  Antisense strand to SEQ ID NO: 2477446
aggcauaugccaaacuccu

SEQ ID NO: 2477448 - RNA, 19 nt, Artificial Sequence
  Description of Artificial Sequence: Synthetic oligonucleotide
  Sense strand starting at position 2605 of SEQ ID NO: 1887510
ccaccuuuccuuggaucga

SEQ ID NO: 2477449 - RNA, 19 nt, Artificial Sequence
  Description of Artificial Sequence: Synthetic oligonucleotide
  Antisense strand to SEQ ID NO: 2477448
ucgauccaaggaaaggugg

SEQ ID NO: 2477450 - RNA, 19 nt, Artificial Sequence
  Description of Artificial Sequence: Synthetic oligonucleotide
  Sense strand starting at position 2610 of SEQ ID NO: 1887510
uuuccuuggaucgaagagu

SEQ ID NO: 2477451 - RNA, 19 nt, Artificial Sequence
  Description of Artificial Sequence: Synthetic oligonucleotide
  Antisense strand to SEQ ID NO: 2477450
acucuucgauccaaggaaa

SEQ ID NO: 2477452 - RNA, 19 nt, Artificial Sequence
  Description of Artificial Sequence: Synthetic oligonucleotide
  Sense strand starting at position 3274 of SEQ ID NO: 1887510
gguuuagagccugguaaga

SEQ ID NO: 2477453 - RNA, 19 nt, Artificial Sequence
  Description of Artificial Sequence: Synthetic oligonucleotide
  Antisense strand to SEQ ID NO: 2477452
ucuuaccaggcucuaaacc

SEQ ID NO: 2477454 - RNA, 19 nt, Artificial Sequence
  Description of Artificial Sequence: Synthetic oligonucleotide
  Sense strand starting at position 3276 of SEQ ID NO: 1887510
uuuagagccugguaagaga

SEQ ID NO: 2477455 - RNA, 19 nt, Artificial Sequence
  Description of Artificial Sequence: Synthetic oligonucleotide
  Antisense strand to SEQ ID NO: 2477454
ucucuuaccaggcucuaaa

SEQ ID NO: 2477456 - RNA, 19 nt, Artificial Sequence
  Description of Artificial Sequence: Synthetic oligonucleotide
  Sense strand starting at position 3287 of SEQ ID NO: 1887510
guaagagauuuccaugauc

SEQ ID NO: 2477457 - RNA, 19 nt, Artificial Sequence
  Description of Artificial Sequence: Synthetic oligonucleotide
  Antisense strand to SEQ ID NO: 2477456
gaucauggaaaucucuuac

SEQ ID NO: 2477458 - RNA, 19 nt, Artificial Sequence
  Description of Artificial Sequence: Synthetic oligonucleotide
  Sense strand starting at position 3341 of SEQ ID NO: 1887510
aguuuaagaucacucagcu

SEQ ID NO: 2477459 - RNA, 19 nt, Artificial Sequence
  Description of Artificial Sequence: Synthetic oligonucleotide
  Antisense strand to SEQ ID NO: 2477458
agcugagugaucuuaaacu

SEQ ID NO: 2477460 - RNA, 19 nt, Artificial Sequence
  Description of Artificial Sequence: Synthetic oligonucleotide
  Sense strand starting at position 3463 of SEQ ID NO: 1887510
cagagagcauuuggucaau

SEQ ID NO: 2477461 - RNA, 19 nt, Artificial Sequence
  Description of Artificial Sequence: Synthetic oligonucleotide
  Antisense strand to SEQ ID NO: 2477460
auugaccaaaugcucucug

SEQ ID NO: 2477462 - RNA, 19 nt, Artificial Sequence
  Description of Artificial Sequence: Synthetic oligonucleotide
  Sense strand starting at position 3474 of SEQ ID NO: 1887510
uggucaaucugguuguugu

SEQ ID NO: 2477463 - RNA, 19 nt, Artificial Sequence
  Description of Artificial Sequence: Synthetic oligonucleotide
  Antisense strand to SEQ ID NO: 2477462
acaacaaccagauugacca

SEQ ID NO: 2477464 - RNA, 19 nt, Artificial Sequence
  Description of Artificial Sequence: Synthetic oligonucleotide
  Sense strand starting at position 3675 of SEQ ID NO: 1887510
ggaggaggucacuggacuu

SEQ ID NO: 2477465 - RNA, 19 nt, Artificial Sequence
  Description of Artificial Sequence: Synthetic oligonucleotide
  Antisense strand to SEQ ID NO: 2477464
aaguccagugaccuccucc

SEQ ID NO: 2477466 - RNA, 19 nt, Artificial Sequence
  Description of Artificial Sequence: Synthetic oligonucleotide
  Sense strand starting at position 3681 of SEQ ID NO: 1887510
ggucacuggacuugaucaa

SEQ ID NO: 2477467 - RNA, 19 nt, Artificial Sequence
  Description of Artificial Sequence: Synthetic oligonucleotide
  Antisense strand to SEQ ID NO: 2477466
uugaucaaguccagugacc

SEQ ID NO: 2477468 - RNA, 19 nt, Artificial Sequence
  Description of Artificial Sequence: Synthetic oligonucleotide
  Sense strand starting at position 3697 of SEQ ID NO: 1887510
caaggugacccacaaguuu

SEQ ID NO: 2477469 - RNA, 19 nt, Artificial Sequence
  Description of Artificial Sequence: Synthetic oligonucleotide
  Antisense strand to SEQ ID NO: 2477468
aaacuugugggucaccuug

SEQ ID NO: 2477470 - RNA, 19 nt, Artificial Sequence
  Description of Artificial Sequence: Synthetic oligonucleotide
  Sense strand starting at position 3712 of SEQ ID NO: 1887510
guuuccucauaggugugaa

SEQ ID NO: 2477471 - RNA, 19 nt, Artificial Sequence
  Description of Artificial Sequence: Synthetic oligonucleotide
  Antisense strand to SEQ ID NO: 2477470
uucacaccuaugaggaaac

SEQ ID NO: 2477472 - RNA, 19 nt, Artificial Sequence
  Description of Artificial Sequence: Synthetic oligonucleotide
  Sense strand starting at position 3715 of SEQ ID NO: 1887510
uccucauaggugugaaccu

SEQ ID NO: 2477473 - RNA, 19 nt, Artificial Sequence
  Description of Artificial Sequence: Synthetic oligonucleotide
  Antisense strand to SEQ ID NO: 2477472
agguucacaccuaugagga

SEQ ID NO: 2477474 - RNA, 19 nt, Artificial Sequence
  Description of Artificial Sequence: Synthetic oligonucleotide
  Sense strand starting at position 3722 of SEQ ID NO: 1887510
aggugugaaccuggacaga

SEQ ID NO: 2477475 - RNA, 19 nt, Artificial Sequence
  Description of Artificial Sequence: Synthetic oligonucleotide
  Antisense strand to SEQ ID NO: 2477474
ucuguccagguucacaccu

SEQ ID NO: 2477476 - RNA, 19 nt, Artificial Sequence
  Description of Artificial Sequence: Synthetic oligonucleotide
  Sense strand starting at position 3813 of SEQ ID NO: 1887510
uggugaugucuguagugag

SEQ ID NO: 2477477 - RNA, 19 nt, Artificial Sequence
  Description of Artificial Sequence: Synthetic oligonucleotide
  Antisense strand to SEQ ID NO: 2477476
cucacuacagacaucacca

SEQ ID NO: 2477478 - RNA, 19 nt, Artificial Sequence
  Description of Artificial Sequence: Synthetic oligonucleotide
  Sense strand starting at position 3814 of SEQ ID NO: 1887510
ggugaugucuguagugagu

SEQ ID NO: 2477479 - RNA, 19 nt, Artificial Sequence
  Description of Artificial Sequence: Synthetic oligonucleotide
  Antisense strand to SEQ ID NO: 2477478
acucacuacagacaucacc

SEQ ID NO: 2477480 - RNA, 19 nt, Artificial Sequence
  Description of Artificial Sequence: Synthetic oligonucleotide
  Sense strand starting at position 3863 of SEQ ID NO: 1887510
guguuugccuuccuuggau

SEQ ID NO: 2477481 - RNA, 19 nt, Artificial Sequence
  Description of Artificial Sequence: Synthetic oligonucleotide
  Antisense strand to SEQ ID NO: 2477480
auccaaggaaggcaaacac

SEQ ID NO: 2477482 - RNA, 19 nt, Artificial Sequence
  Description of Artificial Sequence: Synthetic oligonucleotide
  Sense strand starting at position 3865 of SEQ ID NO: 1887510
guuugccuuccuuggauga

SEQ ID NO: 2477483 - RNA, 19 nt, Artificial Sequence
  Description of Artificial Sequence: Synthetic oligonucleotide
  Antisense strand to SEQ ID NO: 2477482
ucauccaaggaaggcaaac

SEQ ID NO: 2477484 - RNA, 19 nt, Artificial Sequence
  Description of Artificial Sequence: Synthetic oligonucleotide
  Sense strand starting at position 3869 of SEQ ID NO: 1887510
gccuuccuuggaugagauc

SEQ ID NO: 2477485 - RNA, 19 nt, Artificial Sequence
  Description of Artificial Sequence: Synthetic oligonucleotide
  Antisense strand to SEQ ID NO: 2477484
gaucucauccaaggaaggc

SEQ ID NO: 2477486 - RNA, 19 nt, Artificial Sequence
  Description of Artificial Sequence: Synthetic oligonucleotide
  Sense strand starting at position 3895 of SEQ ID NO: 1887510
aggucuaguugagcucuga

SEQ ID NO: 2477487 - RNA, 19 nt, Artificial Sequence
  Description of Artificial Sequence: Synthetic oligonucleotide
  Antisense strand to SEQ ID NO: 2477486
ucagagcucaacuagaccu

SEQ ID NO: 2477488 - RNA, 19 nt, Artificial Sequence
  Description of Artificial Sequence: Synthetic oligonucleotide
  Sense strand starting at position 3899 of SEQ ID NO: 1887510
cuaguugagcucugacagu

SEQ ID NO: 2477489 - RNA, 19 nt, Artificial Sequence
  Description of Artificial Sequence: Synthetic oligonucleotide
  Antisense strand to SEQ ID NO: 2477488
acugucagagcucaacuag

SEQ ID NO: 2477490 - RNA, 19 nt, Artificial Sequence
  Description of Artificial Sequence: Synthetic oligonucleotide
  Sense strand starting at position 59 of SEQ ID NO: 1887512
gucguugaggccuggaauc

SEQ ID NO: 2477491 - RNA, 19 nt, Artificial Sequence
  Description of Artificial Sequence: Synthetic oligonucleotide
  Antisense strand to SEQ ID NO: 2477490
gauuccaggccucaacgac

SEQ ID NO: 2477492 - RNA, 19 nt, Artificial Sequence
  Description of Artificial Sequence: Synthetic oligonucleotide
  Sense strand starting at position 112 of SEQ ID NO: 1887512
gcacuaugacuuuguccag

SEQ ID NO: 2477493 - RNA, 19 nt, Artificial Sequence
  Description of Artificial Sequence: Synthetic oligonucleotide
  Antisense strand to SEQ ID NO: 2477492
cuggacaaagucauagugc

SEQ ID NO: 2477494 - RNA, 19 nt, Artificial Sequence
  Description of Artificial Sequence: Synthetic oligonucleotide
  Sense strand starting at position 151 of SEQ ID NO: 1887512
cucggaugucccugcggau

SEQ ID NO: 2477495 - RNA, 19 nt, Artificial Sequence
  Description of Artificial Sequence: Synthetic oligonucleotide
  Antisense strand to SEQ ID NO: 2477494
auccgcagggacauccgag

SEQ ID NO: 2477496 - RNA, 19 nt, Artificial Sequence
  Description of Artificial Sequence: Synthetic oligonucleotide
  Sense strand starting at position 222 of SEQ ID NO: 1887512
uagggaaguugguuguaca

SEQ ID NO: 2477497 - RNA, 19 nt, Artificial Sequence
  Description of Artificial Sequence: Synthetic oligonucleotide
  Antisense strand to SEQ ID NO: 2477496
uguacaaccaacuucccua

SEQ ID NO: 2477498 - RNA, 19 nt, Artificial Sequence
  Description of Artificial Sequence: Synthetic oligonucleotide
  Sense strand starting at position 223 of SEQ ID NO: 1887512
agggaaguugguuguacau

SEQ ID NO: 2477499 - RNA, 19 nt, Artificial Sequence
  Description of Artificial Sequence: Synthetic oligonucleotide
  Antisense strand to SEQ ID NO: 2477498
auguacaaccaacuucccu

SEQ ID NO: 2477500 - RNA, 19 nt, Artificial Sequence
  Description of Artificial Sequence: Synthetic oligonucleotide
  Sense strand starting at position 236 of SEQ ID NO: 1887512
guacauacucucggacuca

SEQ ID NO: 2477501 - RNA, 19 nt, Artificial Sequence
  Description of Artificial Sequence: Synthetic oligonucleotide
  Antisense strand to SEQ ID NO: 2477500
ugaguccgagaguauguac

SEQ ID NO: 2477502 - RNA, 19 nt, Artificial Sequence
  Description of Artificial Sequence: Synthetic oligonucleotide
  Sense strand starting at position 427 of SEQ ID NO: 1887512
ucugguuggccgcgaugaa

SEQ ID NO: 2477503 - RNA, 19 nt, Artificial Sequence
  Description of Artificial Sequence: Synthetic oligonucleotide
  Antisense strand to SEQ ID NO: 2477502
uucaucgcggccaaccaga

SEQ ID NO: 2477504 - RNA, 19 nt, Artificial Sequence
  Description of Artificial Sequence: Synthetic oligonucleotide
  Sense strand starting at position 428 of SEQ ID NO: 1887512
cugguuggccgcgaugaau

SEQ ID NO: 2477505 - RNA, 19 nt, Artificial Sequence
  Description of Artificial Sequence: Synthetic oligonucleotide
  Antisense strand to SEQ ID NO: 2477504
auucaucgcggccaaccag

SEQ ID NO: 2477506 - RNA, 19 nt, Artificial Sequence
  Description of Artificial Sequence: Synthetic oligonucleotide
  Sense strand starting at position 777 of SEQ ID NO: 1887512
gagucagcgagccguagua

SEQ ID NO: 2477507 - RNA, 19 nt, Artificial Sequence
  Description of Artificial Sequence: Synthetic oligonucleotide
  Antisense strand to SEQ ID NO: 2477506
uacuacggcucgcugacuc

SEQ ID NO: 2477508 - RNA, 19 nt, Artificial Sequence
  Description of Artificial Sequence: Synthetic oligonucleotide
  Sense strand starting at position 1600 of SEQ ID NO: 1887512
acucguauugcgccucgau

SEQ ID NO: 2477509 - RNA, 19 nt, Artificial Sequence
  Description of Artificial Sequence: Synthetic oligonucleotide
  Antisense strand to SEQ ID NO: 2477508
aucgaggcgcaauacgagu

SEQ ID NO: 2477510 - RNA, 19 nt, Artificial Sequence
  Description of Artificial Sequence: Synthetic oligonucleotide
  Sense strand starting at position 1642 of SEQ ID NO: 1887512
ccgggcucucgacgaagaa

SEQ ID NO: 2477511 - RNA, 19 nt, Artificial Sequence
  Description of Artificial Sequence: Synthetic oligonucleotide
  Antisense strand to SEQ ID NO: 2477510
uucuucgucgagagcccgg

SEQ ID NO: 2477512 - RNA, 19 nt, Artificial Sequence
  Description of Artificial Sequence: Synthetic oligonucleotide
  Sense strand starting at position 1842 of SEQ ID NO: 1887512
cgcgcgaccuccggagaaa

SEQ ID NO: 2477513 - RNA, 19 nt, Artificial Sequence
  Description of Artificial Sequence: Synthetic oligonucleotide
  Antisense strand to SEQ ID NO: 2477512
uuucuccggaggucgcgcg

SEQ ID NO: 2477514 - RNA, 19 nt, Artificial Sequence
  Description of Artificial Sequence: Synthetic oligonucleotide
  Sense strand starting at position 2445 of SEQ ID NO: 1887512
ggaggcuguucgcuggaaa

SEQ ID NO: 2477515 - RNA, 19 nt, Artificial Sequence
  Description of Artificial Sequence: Synthetic oligonucleotide
  Antisense strand to SEQ ID NO: 2477514
uuuccagcgaacagccucc

SEQ ID NO: 2477516 - RNA, 19 nt, Artificial Sequence
  Description of Artificial Sequence: Synthetic oligonucleotide
  Sense strand starting at position 2446 of SEQ ID NO: 1887512
gaggcuguucgcuggaaag

SEQ ID NO: 2477517 - RNA, 19 nt, Artificial Sequence
  Description of Artificial Sequence: Synthetic oligonucleotide
  Antisense strand to SEQ ID NO: 2477516
cuuuccagcgaacagccuc

SEQ ID NO: 2477518 - RNA, 19 nt, Artificial Sequence
  Description of Artificial Sequence: Synthetic oligonucleotide
  Sense strand starting at position 2532 of SEQ ID NO: 1887512
cccucaugcgcgcugauaa

SEQ ID NO: 2477519 - RNA, 19 nt, Artificial Sequence
  Description of Artificial Sequence: Synthetic oligonucleotide
  Antisense strand to SEQ ID NO: 2477518
uuaucagcgcgcaugaggg

SEQ ID NO: 2477520 - RNA, 19 nt, Artificial Sequence
  Description of Artificial Sequence: Synthetic oligonucleotide
  Sense strand starting at position 2622 of SEQ ID NO: 1887512
ccggaaaguuuccaccacu

SEQ ID NO: 2477521 - RNA, 19 nt, Artificial Sequence
  Description of Artificial Sequence: Synthetic oligonucleotide
  Antisense strand to SEQ ID NO: 2477520
agugguggaaacuuuccgg

SEQ ID NO: 2477522 - RNA, 19 nt, Artificial Sequence
  Description of Artificial Sequence: Synthetic oligonucleotide
  Sense strand starting at position 2657 of SEQ ID NO: 1887512
guggauaguugggaacguu

SEQ ID NO: 2477523 - RNA, 19 nt, Artificial Sequence
  Description of Artificial Sequence: Synthetic oligonucleotide
  Antisense strand to SEQ ID NO: 2477522
aacguucccaacuauccac

SEQ ID NO: 2477524 - RNA, 19 nt, Artificial Sequence
  Description of Artificial Sequence: Synthetic oligonucleotide
  Sense strand starting at position 2666 of SEQ ID NO: 1887512
ugggaacguuugcaagaga

SEQ ID NO: 2477525 - RNA, 19 nt, Artificial Sequence
  Description of Artificial Sequence: Synthetic oligonucleotide
  Antisense strand to SEQ ID NO: 2477524
ucucuugcaaacguuccca

SEQ ID NO: 2477526 - RNA, 19 nt, Artificial Sequence
  Description of Artificial Sequence: Synthetic oligonucleotide
  Sense strand starting at position 2669 of SEQ ID NO: 1887512
gaacguuugcaagagacag

SEQ ID NO: 2477527 - RNA, 19 nt, Artificial Sequence
  Description of Artificial Sequence: Synthetic oligonucleotide
  Antisense strand to SEQ ID NO: 2477526
cugucucuugcaaacguuc

SEQ ID NO: 2477528 - RNA, 19 nt, Artificial Sequence
  Description of Artificial Sequence: Synthetic oligonucleotide
  Sense strand starting at position 3006 of SEQ ID NO: 1887512
gaaagaguauuugguguuu

SEQ ID NO: 2477529 - RNA, 19 nt, Artificial Sequence
  Description of Artificial Sequence: Synthetic oligonucleotide
  Antisense strand to SEQ ID NO: 2477528
aaacaccaaauacucuuuc

SEQ ID NO: 2477530 - RNA, 19 nt, Artificial Sequence
  Description of Artificial Sequence: Synthetic oligonucleotide
  Sense strand starting at position 3008 of SEQ ID NO: 1887512
aagaguauuugguguuugu

SEQ ID NO: 2477531 - RNA, 19 nt, Artificial Sequence
  Description of Artificial Sequence: Synthetic oligonucleotide
  Antisense strand to SEQ ID NO: 2477530
acaaacaccaaauacucuu

SEQ ID NO: 2477532 - RNA, 19 nt, Artificial Sequence
  Description of Artificial Sequence: Synthetic oligonucleotide
  Sense strand starting at position 3018 of SEQ ID NO: 1887512
gguguuuguuccugguucu

SEQ ID NO: 2477533 - RNA, 19 nt, Artificial Sequence
  Description of Artificial Sequence: Synthetic oligonucleotide
  Antisense strand to SEQ ID NO: 2477532
agaaccaggaacaaacacc

SEQ ID NO: 2477534 - RNA, 19 nt, Artificial Sequence
  Description of Artificial Sequence: Synthetic oligonucleotide
  Sense strand starting at position 3019 of SEQ ID NO: 1887512
guguuuguuccugguucuu

SEQ ID NO: 2477535 - RNA, 19 nt, Artificial Sequence
  Description of Artificial Sequence: Synthetic oligonucleotide
  Antisense strand to SEQ ID NO: 2477534
aagaaccaggaacaaacac

SEQ ID NO: 2477536 - RNA, 19 nt, Artificial Sequence
  Description of Artificial Sequence: Synthetic oligonucleotide
  Sense strand starting at position 3028 of SEQ ID NO: 1887512
ccugguucuugguuagaca

SEQ ID NO: 2477537 - RNA, 19 nt, Artificial Sequence
  Description of Artificial Sequence: Synthetic oligonucleotide
  Antisense strand to SEQ ID NO: 2477536
ugucuaaccaagaaccagg

SEQ ID NO: 2477538 - RNA, 19 nt, Artificial Sequence
  Description of Artificial Sequence: Synthetic oligonucleotide
  Sense strand starting at position 3029 of SEQ ID NO: 1887512
cugguucuugguuagacau

SEQ ID NO: 2477539 - RNA, 19 nt, Artificial Sequence
  Description of Artificial Sequence: Synthetic oligonucleotide
  Antisense strand to SEQ ID NO: 2477538
augucuaaccaagaaccag

SEQ ID NO: 2477540 - RNA, 19 nt, Artificial Sequence
  Description of Artificial Sequence: Synthetic oligonucleotide
  Sense strand starting at position 3183 of SEQ ID NO: 1887512
ucggaaagcucagaaucga

SEQ ID NO: 2477541 - RNA, 19 nt, Artificial Sequence
  Description of Artificial Sequence: Synthetic oligonucleotide
  Antisense strand to SEQ ID NO: 2477540
ucgauucugagcuuuccga

SEQ ID NO: 2477542 - RNA, 19 nt, Artificial Sequence
  Description of Artificial Sequence: Synthetic oligonucleotide
  Sense strand starting at position 3415 of SEQ ID NO: 1887512
aaggaaugcuacccagagu

SEQ ID NO: 2477543 - RNA, 19 nt, Artificial Sequence
  Description of Artificial Sequence: Synthetic oligonucleotide
  Antisense strand to SEQ ID NO: 2477542
acucuggguagcauuccuu

SEQ ID NO: 2477544 - RNA, 19 nt, Artificial Sequence
  Description of Artificial Sequence: Synthetic oligonucleotide
  Sense strand starting at position 3418 of SEQ ID NO: 1887512
gaaugcuacccagagucua

SEQ ID NO: 2477545 - RNA, 19 nt, Artificial Sequence
  Description of Artificial Sequence: Synthetic oligonucleotide
  Antisense strand to SEQ ID NO: 2477544
uagacucuggguagcauuc

SEQ ID NO: 2477546 - RNA, 19 nt, Artificial Sequence
  Description of Artificial Sequence: Synthetic oligonucleotide
  Sense strand starting at position 3473 of SEQ ID NO: 1887512
gucugcucccuuuaagauc

SEQ ID NO: 2477547 - RNA, 19 nt, Artificial Sequence
  Description of Artificial Sequence: Synthetic oligonucleotide
  Antisense strand to SEQ ID NO: 2477546
gaucuuaaagggagcagac

SEQ ID NO: 2477548 - RNA, 19 nt, Artificial Sequence
  Description of Artificial Sequence: Synthetic oligonucleotide
  Sense strand starting at position 3482 of SEQ ID NO: 1887512
cuuuaagaucuacaguguu

SEQ ID NO: 2477549 - RNA, 19 nt, Artificial Sequence
  Description of Artificial Sequence: Synthetic oligonucleotide
  Antisense strand to SEQ ID NO: 2477548
aacacuguagaucuuaaag

SEQ ID NO: 2477550 - RNA, 19 nt, Artificial Sequence
  Description of Artificial Sequence: Synthetic oligonucleotide
  Sense strand starting at position 3949 of SEQ ID NO: 1887512
uccauuuggcugugagcau

SEQ ID NO: 2477551 - RNA, 19 nt, Artificial Sequence
  Description of Artificial Sequence: Synthetic oligonucleotide
  Antisense strand to SEQ ID NO: 2477550
augcucacagccaaaugga

SEQ ID NO: 2477552 - RNA, 19 nt, Artificial Sequence
  Description of Artificial Sequence: Synthetic oligonucleotide
  Sense strand starting at position 3950 of SEQ ID NO: 1887512
ccauuuggcugugagcauu

SEQ ID NO: 2477553 - RNA, 19 nt, Artificial Sequence
  Description of Artificial Sequence: Synthetic oligonucleotide
  Antisense strand to SEQ ID NO: 2477552
aaugcucacagccaaaugg

SEQ ID NO: 2477554 - RNA, 19 nt, Artificial Sequence
  Description of Artificial Sequence: Synthetic oligonucleotide
  Sense strand starting at position 3970 of SEQ ID NO: 1887512
uccggaguucugugagcug

SEQ ID NO: 2477555 - RNA, 19 nt, Artificial Sequence
  Description of Artificial Sequence: Synthetic oligonucleotide
  Antisense strand to SEQ ID NO: 2477554
cagcucacagaacuccgga

SEQ ID NO: 2477556 - RNA, 19 nt, Artificial Sequence
  Description of Artificial Sequence: Synthetic oligonucleotide
  Sense strand starting at position 3972 of SEQ ID NO: 1887512
cggaguucugugagcuguu

SEQ ID NO: 2477557 - RNA, 19 nt, Artificial Sequence
  Description of Artificial Sequence: Synthetic oligonucleotide
  Antisense strand to SEQ ID NO: 2477556
aacagcucacagaacuccg

SEQ ID NO: 2477558 - RNA, 19 nt, Artificial Sequence
  Description of Artificial Sequence: Synthetic oligonucleotide
  Sense strand starting at position 198 of SEQ ID NO: 1887511
gucguugaggccuggaauc

SEQ ID NO: 2477559 - RNA, 19 nt, Artificial Sequence
  Description of Artificial Sequence: Synthetic oligonucleotide
  Antisense strand to SEQ ID NO: 2477558
gauuccaggccucaacgac

SEQ ID NO: 2477560 - RNA, 19 nt, Artificial Sequence
  Description of Artificial Sequence: Synthetic oligonucleotide
  Sense strand starting at position 251 of SEQ ID NO: 1887511
gcacuaugacuuuguccag

SEQ ID NO: 2477561 - RNA, 19 nt, Artificial Sequence
  Description of Artificial Sequence: Synthetic oligonucleotide
  Antisense strand to SEQ ID NO: 2477560
cuggacaaagucauagugc

SEQ ID NO: 2477562 - RNA, 19 nt, Artificial Sequence
  Description of Artificial Sequence: Synthetic oligonucleotide
  Sense strand starting at position 290 of SEQ ID NO: 1887511
cucggaugucccugcggau

SEQ ID NO: 2477563 - RNA, 19 nt, Artificial Sequence
  Description of Artificial Sequence: Synthetic oligonucleotide
  Antisense strand to SEQ ID NO: 2477562
auccgcagggacauccgag

SEQ ID NO: 2477564 - RNA, 19 nt, Artificial Sequence
  Description of Artificial Sequence: Synthetic oligonucleotide
  Sense strand starting at position 361 of SEQ ID NO: 1887511
uagggaaguugguuguaca

SEQ ID NO: 2477565 - RNA, 19 nt, Artificial Sequence
  Description of Artificial Sequence: Synthetic oligonucleotide
  Antisense strand to SEQ ID NO: 2477564
uguacaaccaacuucccua

SEQ ID NO: 2477566 - RNA, 19 nt, Artificial Sequence
  Description of Artificial Sequence: Synthetic oligonucleotide
  Sense strand starting at position 362 of SEQ ID NO: 1887511
agggaaguugguuguacau

SEQ ID NO: 2477567 - RNA, 19 nt, Artificial Sequence
  Description of Artificial Sequence: Synthetic oligonucleotide
  Antisense strand to SEQ ID NO: 2477566
auguacaaccaacuucccu

SEQ ID NO: 2477568 - RNA, 19 nt, Artificial Sequence
  Description of Artificial Sequence: Synthetic oligonucleotide
  Sense strand starting at position 375 of SEQ ID NO: 1887511
guacauacucucggacuca

SEQ ID NO: 2477569 - RNA, 19 nt, Artificial Sequence
  Description of Artificial Sequence: Synthetic oligonucleotide
  Antisense strand to SEQ ID NO: 2477568
ugaguccgagaguauguac

SEQ ID NO: 2477570 - RNA, 19 nt, Artificial Sequence
  Description of Artificial Sequence: Synthetic oligonucleotide
  Sense strand starting at position 566 of SEQ ID NO: 1887511
ucugguuggccgcgaugaa

SEQ ID NO: 2477571 - RNA, 19 nt, Artificial Sequence
  Description of Artificial Sequence: Synthetic oligonucleotide
  Antisense strand to SEQ ID NO: 2477570
uucaucgcggccaaccaga

SEQ ID NO: 2477572 - RNA, 19 nt, Artificial Sequence
  Description of Artificial Sequence: Synthetic oligonucleotide
  Sense strand starting at position 567 of SEQ ID NO: 1887511
cugguuggccgcgaugaau

SEQ ID NO: 2477573 - RNA, 19 nt, Artificial Sequence
  Description of Artificial Sequence: Synthetic oligonucleotide
  Antisense strand to SEQ ID NO: 2477572
auucaucgcggccaaccag

SEQ ID NO: 2477574 - RNA, 19 nt, Artificial Sequence
  Description of Artificial Sequence: Synthetic oligonucleotide
  Sense strand starting at position 916 of SEQ ID NO: 1887511
gagucagcgagccguagua

SEQ ID NO: 2477575 - RNA, 19 nt, Artificial Sequence
  Description of Artificial Sequence: Synthetic oligonucleotide
  Antisense strand to SEQ ID NO: 2477574
uacuacggcucgcugacuc

SEQ ID NO: 2477576 - RNA, 19 nt, Artificial Sequence
  Description of Artificial Sequence: Synthetic oligonucleotide
  Sense strand starting at position 1739 of SEQ ID NO: 1887511
acucguauugcgccucgau

SEQ ID NO: 2477577 - RNA, 19 nt, Artificial Sequence
  Description of Artificial Sequence: Synthetic oligonucleotide
  Antisense strand to SEQ ID NO: 2477576
aucgaggcgcaauacgagu

SEQ ID NO: 2477578 - RNA, 19 nt, Artificial Sequence
  Description of Artificial Sequence: Synthetic oligonucleotide
  Sense strand starting at position 1781 of SEQ ID NO: 1887511
ccgggcucucgacgaagaa

SEQ ID NO: 2477579 - RNA, 19 nt, Artificial Sequence
  Description of Artificial Sequence: Synthetic oligonucleotide
  Antisense strand to SEQ ID NO: 2477578
uucuucgucgagagcccgg

SEQ ID NO: 2477580 - RNA, 19 nt, Artificial Sequence
  Description of Artificial Sequence: Synthetic oligonucleotide
  Sense strand starting at position 1981 of SEQ ID NO: 1887511
cgcgcgaccuccggagaaa

SEQ ID NO: 2477581 - RNA, 19 nt, Artificial Sequence
  Description of Artificial Sequence: Synthetic oligonucleotide
  Antisense strand to SEQ ID NO: 2477580
uuucuccggaggucgcgcg

SEQ ID NO: 2477582 - RNA, 19 nt, Artificial Sequence
  Description of Artificial Sequence: Synthetic oligonucleotide
  Sense strand starting at position 2584 of SEQ ID NO: 1887511
ggaggcuguucgcuggaaa

SEQ ID NO: 2477583 - RNA, 19 nt, Artificial Sequence
  Description of Artificial Sequence: Synthetic oligonucleotide
  Antisense strand to SEQ ID NO: 2477582
uuuccagcgaacagccucc

SEQ ID NO: 2477584 - RNA, 19 nt, Artificial Sequence
  Description of Artificial Sequence: Synthetic oligonucleotide
  Sense strand starting at position 2585 of SEQ ID NO: 1887511
gaggcuguucgcuggaaag

SEQ ID NO: 2477585 - RNA, 19 nt, Artificial Sequence
  Description of Artificial Sequence: Synthetic oligonucleotide
  Antisense strand to SEQ ID NO: 2477584
cuuuccagcgaacagccuc

SEQ ID NO: 2477586 - RNA, 19 nt, Artificial Sequence
  Description of Artificial Sequence: Synthetic oligonucleotide
  Sense strand starting at position 2671 of SEQ ID NO: 1887511
cccucaugcgcgcugauaa

SEQ ID NO: 2477587 - RNA, 19 nt, Artificial Sequence
  Description of Artificial Sequence: Synthetic oligonucleotide
  Antisense strand to SEQ ID NO: 2477586
uuaucagcgcgcaugaggg

SEQ ID NO: 2477588 - RNA, 19 nt, Artificial Sequence
  Description of Artificial Sequence: Synthetic oligonucleotide
  Sense strand starting at position 2761 of SEQ ID NO: 1887511
ccggaaaguuuccaccacu

SEQ ID NO: 2477589 - RNA, 19 nt, Artificial Sequence
  Description of Artificial Sequence: Synthetic oligonucleotide
  Antisense strand to SEQ ID NO: 2477588
agugguggaaacuuuccgg

SEQ ID NO: 2477590 - RNA, 19 nt, Artificial Sequence
  Description of Artificial Sequence: Synthetic oligonucleotide
  Sense strand starting at position 2796 of SEQ ID NO: 1887511
guggauaguugggaacguu

SEQ ID NO: 2477591 - RNA, 19 nt, Artificial Sequence
  Description of Artificial Sequence: Synthetic oligonucleotide
  Antisense strand to SEQ ID NO: 2477590
aacguucccaacuauccac

SEQ ID NO: 2477592 - RNA, 19 nt, Artificial Sequence
  Description of Artificial Sequence: Synthetic oligonucleotide
  Sense strand starting at position 2805 of SEQ ID NO: 1887511
ugggaacguuugcaagaga

SEQ ID NO: 2477593 - RNA, 19 nt, Artificial Sequence
  Description of Artificial Sequence: Synthetic oligonucleotide
  Antisense strand to SEQ ID NO: 2477592
ucucuugcaaacguuccca

SEQ ID NO: 2477594 - RNA, 19 nt, Artificial Sequence
  Description of Artificial Sequence: Synthetic oligonucleotide
  Sense strand starting at position 2808 of SEQ ID NO: 1887511
gaacguuugcaagagacag

SEQ ID NO: 2477595 - RNA, 19 nt, Artificial Sequence
  Description of Artificial Sequence: Synthetic oligonucleotide
  Antisense strand to SEQ ID NO: 2477594
cugucucuugcaaacguuc

SEQ ID NO: 2477596 - RNA, 19 nt, Artificial Sequence
  Description of Artificial Sequence: Synthetic oligonucleotide
  Sense strand starting at position 3145 of SEQ ID NO: 1887511
gaaagaguauuugguguuu

SEQ ID NO: 2477597 - RNA, 19 nt, Artificial Sequence
  Description of Artificial Sequence: Synthetic oligonucleotide
  Antisense strand to SEQ ID NO: 2477596
aaacaccaaauacucuuuc

SEQ ID NO: 2477598 - RNA, 19 nt, Artificial Sequence
  Description of Artificial Sequence: Synthetic oligonucleotide
  Sense strand starting at position 3147 of SEQ ID NO: 1887511
aagaguauuugguguuugu

SEQ ID NO: 2477599 - RNA, 19 nt, Artificial Sequence
  Description of Artificial Sequence: Synthetic oligonucleotide
  Antisense strand to SEQ ID NO: 2477598
acaaacaccaaauacucuu

SEQ ID NO: 2477600 - RNA, 19 nt, Artificial Sequence
  Description of Artificial Sequence: Synthetic oligonucleotide
  Sense strand starting at position 3157 of SEQ ID NO: 1887511
gguguuuguuccugguucu

SEQ ID NO: 2477601 - RNA, 19 nt, Artificial Sequence
  Description of Artificial Sequence: Synthetic oligonucleotide
  Antisense strand to SEQ ID NO: 2477600
agaaccaggaacaaacacc

SEQ ID NO: 2477602 - RNA, 19 nt, Artificial Sequence
  Description of Artificial Sequence: Synthetic oligonucleotide
  Sense strand starting at position 3158 of SEQ ID NO: 1887511
guguuuguuccugguucuu

SEQ ID NO: 2477603 - RNA, 19 nt, Artificial Sequence
  Description of Artificial Sequence: Synthetic oligonucleotide
  Antisense strand to SEQ ID NO: 2477602
aagaaccaggaacaaacac

SEQ ID NO: 2477604 - RNA, 19 nt, Artificial Sequence
  Description of Artificial Sequence: Synthetic oligonucleotide
  Sense strand starting at position 3167 of SEQ ID NO: 1887511
ccugguucuugguuagaca

SEQ ID NO: 2477605 - RNA, 19 nt, Artificial Sequence
  Description of Artificial Sequence: Synthetic oligonucleotide
  Antisense strand to SEQ ID NO: 2477604
ugucuaaccaagaaccagg

SEQ ID NO: 2477606 - RNA, 19 nt, Artificial Sequence
  Description of Artificial Sequence: Synthetic oligonucleotide
  Sense strand starting at position 3168 of SEQ ID NO: 1887511
cugguucuugguuagacau

SEQ ID NO: 2477607 - RNA, 19 nt, Artificial Sequence
  Description of Artificial Sequence: Synthetic oligonucleotide
  Antisense strand to SEQ ID NO: 2477606
augucuaaccaagaaccag

SEQ ID NO: 2477608 - RNA, 19 nt, Artificial Sequence
  Description of Artificial Sequence: Synthetic oligonucleotide
  Sense strand starting at position 3322 of SEQ ID NO: 1887511
ucggaaagcucagaaucga

SEQ ID NO: 2477609 - RNA, 19 nt, Artificial Sequence
  Description of Artificial Sequence: Synthetic oligonucleotide
  Antisense strand to SEQ ID NO: 2477608
ucgauucugagcuuuccga

SEQ ID NO: 2477610 - RNA, 19 nt, Artificial Sequence
  Description of Artificial Sequence: Synthetic oligonucleotide
  Sense strand starting at position 3554 of SEQ ID NO: 1887511
aaggaaugcuacccagagu

SEQ ID NO: 2477611 - RNA, 19 nt, Artificial Sequence
  Description of Artificial Sequence: Synthetic oligonucleotide
  Antisense strand to SEQ ID NO: 2477610
acucuggguagcauuccuu

SEQ ID NO: 2477612 - RNA, 19 nt, Artificial Sequence
  Description of Artificial Sequence: Synthetic oligonucleotide
  Sense strand starting at position 3557 of SEQ ID NO: 1887511
gaaugcuacccagagucua

SEQ ID NO: 2477613 - RNA, 19 nt, Artificial Sequence
  Description of Artificial Sequence: Synthetic oligonucleotide
  Antisense strand to SEQ ID NO: 2477612
uagacucuggguagcauuc

SEQ ID NO: 2477614 - RNA, 19 nt, Artificial Sequence
  Description of Artificial Sequence: Synthetic oligonucleotide
  Sense strand starting at position 3612 of SEQ ID NO: 1887511
gucugcucccuuuaagauc

SEQ ID NO: 2477615 - RNA, 19 nt, Artificial Sequence
  Description of Artificial Sequence: Synthetic oligonucleotide
  Antisense strand to SEQ ID NO: 2477614
gaucuuaaagggagcagac

SEQ ID NO: 2477616 - RNA, 19 nt, Artificial Sequence
  Description of Artificial Sequence: Synthetic oligonucleotide
  Sense strand starting at position 3621 of SEQ ID NO: 1887511
cuuuaagaucuacaguguu

SEQ ID NO: 2477617 - RNA, 19 nt, Artificial Sequence
  Description of Artificial Sequence: Synthetic oligonucleotide
  Antisense strand to SEQ ID NO: 2477616
aacacuguagaucuuaaag

SEQ ID NO: 2477618 - RNA, 19 nt, Artificial Sequence
  Description of Artificial Sequence: Synthetic oligonucleotide
  Sense strand starting at position 701 of SEQ ID NO: 1887513
ggcacuaugggcuagguaa

SEQ ID NO: 2477619 - RNA, 19 nt, Artificial Sequence
  Description of Artificial Sequence: Synthetic oligonucleotide
  Antisense strand to SEQ ID NO: 2477618
uuaccuagcccauagugcc

SEQ ID NO: 2477620 - RNA, 19 nt, Artificial Sequence
  Description of Artificial Sequence: Synthetic oligonucleotide
  Sense strand starting at position 796 of SEQ ID NO: 1887513
acgguaucaaguggcuaaa

SEQ ID NO: 2477621 - RNA, 19 nt, Artificial Sequence
  Description of Artificial Sequence: Synthetic oligonucleotide
  Antisense strand to SEQ ID NO: 2477620
uuuagccacuugauaccgu

SEQ ID NO: 2477622 - RNA, 19 nt, Artificial Sequence
  Description of Artificial Sequence: Synthetic oligonucleotide
  Sense strand starting at position 799 of SEQ ID NO: 1887513
guaucaaguggcuaaauca

SEQ ID NO: 2477623 - RNA, 19 nt, Artificial Sequence
  Description of Artificial Sequence: Synthetic oligonucleotide
  Antisense strand to SEQ ID NO: 2477622
ugauuuagccacuugauac

SEQ ID NO: 2477624 - RNA, 19 nt, Artificial Sequence
  Description of Artificial Sequence: Synthetic oligonucleotide
  Sense strand starting at position 833 of SEQ ID NO: 1887513
ggucagaagugugggagaa

SEQ ID NO: 2477625 - RNA, 19 nt, Artificial Sequence
  Description of Artificial Sequence: Synthetic oligonucleotide
  Antisense strand to SEQ ID NO: 2477624
uucucccacacuucugacc

SEQ ID NO: 2477626 - RNA, 19 nt, Artificial Sequence
  Description of Artificial Sequence: Synthetic oligonucleotide
  Sense strand starting at position 885 of SEQ ID NO: 1887513
ggaggaaugugcgaugcga

SEQ ID NO: 2477627 - RNA, 19 nt, Artificial Sequence
  Description of Artificial Sequence: Synthetic oligonucleotide
  Antisense strand to SEQ ID NO: 2477626
ucgcaucgcacauuccucc

SEQ ID NO: 2477628 - RNA, 19 nt, Artificial Sequence
  Description of Artificial Sequence: Synthetic oligonucleotide
  Sense strand starting at position 894 of SEQ ID NO: 1887513
ugcgaugcgacucaggauu

SEQ ID NO: 2477629 - RNA, 19 nt, Artificial Sequence
  Description of Artificial Sequence: Synthetic oligonucleotide
  Antisense strand to SEQ ID NO: 2477628
aauccugagucgcaucgca

SEQ ID NO: 2477630 - RNA, 19 nt, Artificial Sequence
  Description of Artificial Sequence: Synthetic oligonucleotide
  Sense strand starting at position 1033 of SEQ ID NO: 1887513
cagggucuaugggaggauu

SEQ ID NO: 2477631 - RNA, 19 nt, Artificial Sequence
  Description of Artificial Sequence: Synthetic oligonucleotide
  Antisense strand to SEQ ID NO: 2477630
aauccucccauagacccug

SEQ ID NO: 2477632 - RNA, 19 nt, Artificial Sequence
  Description of Artificial Sequence: Synthetic oligonucleotide
  Sense strand starting at position 1155 of SEQ ID NO: 1887513
ggaaguagacucgacucuu

SEQ ID NO: 2477633 - RNA, 19 nt, Artificial Sequence
  Description of Artificial Sequence: Synthetic oligonucleotide
  Antisense strand to SEQ ID NO: 2477632
aagagucgagucuacuucc

SEQ ID NO: 2477634 - RNA, 19 nt, Artificial Sequence
  Description of Artificial Sequence: Synthetic oligonucleotide
  Sense strand starting at position 1444 of SEQ ID NO: 1887513
gagccuuggucucuggaca

SEQ ID NO: 2477635 - RNA, 19 nt, Artificial Sequence
  Description of Artificial Sequence: Synthetic oligonucleotide
  Antisense strand to SEQ ID NO: 2477634
uguccagagaccaaggcuc

SEQ ID NO: 2477636 - RNA, 19 nt, Artificial Sequence
  Description of Artificial Sequence: Synthetic oligonucleotide
  Sense strand starting at position 1612 of SEQ ID NO: 1887513
uaggauucgggcugucuua

SEQ ID NO: 2477637 - RNA, 19 nt, Artificial Sequence
  Description of Artificial Sequence: Synthetic oligonucleotide
  Antisense strand to SEQ ID NO: 2477636
uaagacagcccgaauccua

SEQ ID NO: 2477638 - RNA, 19 nt, Artificial Sequence
  Description of Artificial Sequence: Synthetic oligonucleotide
  Sense strand starting at position 2089 of SEQ ID NO: 1887513
ccaggagccuuugacgaaa

SEQ ID NO: 2477639 - RNA, 19 nt, Artificial Sequence
  Description of Artificial Sequence: Synthetic oligonucleotide
  Antisense strand to SEQ ID NO: 2477638
uuucgucaaaggcuccugg

SEQ ID NO: 2477640 - RNA, 19 nt, Artificial Sequence
  Description of Artificial Sequence: Synthetic oligonucleotide
  Sense strand starting at position 2272 of SEQ ID NO: 1887513
cuaggcagguucguucaau

SEQ ID NO: 2477641 - RNA, 19 nt, Artificial Sequence
  Description of Artificial Sequence: Synthetic oligonucleotide
  Antisense strand to SEQ ID NO: 2477640
auugaacgaaccugccuag

SEQ ID NO: 2477642 - RNA, 19 nt, Artificial Sequence
  Description of Artificial Sequence: Synthetic oligonucleotide
  Sense strand starting at position 2278 of SEQ ID NO: 1887513
agguucguucaauggaaau

SEQ ID NO: 2477643 - RNA, 19 nt, Artificial Sequence
  Description of Artificial Sequence: Synthetic oligonucleotide
  Antisense strand to SEQ ID NO: 2477642
auuuccauugaacgaaccu

SEQ ID NO: 2477644 - RNA, 19 nt, Artificial Sequence
  Description of Artificial Sequence: Synthetic oligonucleotide
  Sense strand starting at position 2568 of SEQ ID NO: 1887513
ggacgucacccugagcaaa

SEQ ID NO: 2477645 - RNA, 19 nt, Artificial Sequence
  Description of Artificial Sequence: Synthetic oligonucleotide
  Antisense strand to SEQ ID NO: 2477644
uuugcucagggugacgucc

SEQ ID NO: 2477646 - RNA, 19 nt, Artificial Sequence
  Description of Artificial Sequence: Synthetic oligonucleotide
  Sense strand starting at position 2705 of SEQ ID NO: 1887513
cggcccuagugauguccaa

SEQ ID NO: 2477647 - RNA, 19 nt, Artificial Sequence
  Description of Artificial Sequence: Synthetic oligonucleotide
  Antisense strand to SEQ ID NO: 2477646
uuggacaucacuagggccg

SEQ ID NO: 2477648 - RNA, 19 nt, Artificial Sequence
  Description of Artificial Sequence: Synthetic oligonucleotide
  Sense strand starting at position 2709 of SEQ ID NO: 1887513
ccuagugauguccaacuac

SEQ ID NO: 2477649 - RNA, 19 nt, Artificial Sequence
  Description of Artificial Sequence: Synthetic oligonucleotide
  Antisense strand to SEQ ID NO: 2477648
guaguuggacaucacuagg

SEQ ID NO: 2477650 - RNA, 19 nt, Artificial Sequence
  Description of Artificial Sequence: Synthetic oligonucleotide
  Sense strand starting at position 2758 of SEQ ID NO: 1887513
acaucacuguggcgucauu

SEQ ID NO: 2477651 - RNA, 19 nt, Artificial Sequence
  Description of Artificial Sequence: Synthetic oligonucleotide
  Antisense strand to SEQ ID NO: 2477650
aaugacgccacagugaugu

SEQ ID NO: 2477652 - RNA, 19 nt, Artificial Sequence
  Description of Artificial Sequence: Synthetic oligonucleotide
  Sense strand starting at position 2803 of SEQ ID NO: 1887513
aauccugggccgugagauu

SEQ ID NO: 2477653 - RNA, 19 nt, Artificial Sequence
  Description of Artificial Sequence: Synthetic oligonucleotide
  Antisense strand to SEQ ID NO: 2477652
aaucucacggcccaggauu

SEQ ID NO: 2477654 - RNA, 19 nt, Artificial Sequence
  Description of Artificial Sequence: Synthetic oligonucleotide
  Sense strand starting at position 2922 of SEQ ID NO: 1887513
agauuccugcucugcucaa

SEQ ID NO: 2477655 - RNA, 19 nt, Artificial Sequence
  Description of Artificial Sequence: Synthetic oligonucleotide
  Antisense strand to SEQ ID NO: 2477654
uugagcagagcaggaaucu

SEQ ID NO: 2477656 - RNA, 19 nt, Artificial Sequence
  Description of Artificial Sequence: Synthetic oligonucleotide
  Sense strand starting at position 2957 of SEQ ID NO: 1887513
cccagugccauggaguaau

SEQ ID NO: 2477657 - RNA, 19 nt, Artificial Sequence
  Description of Artificial Sequence: Synthetic oligonucleotide
  Antisense strand to SEQ ID NO: 2477656
auuacuccauggcacuggg

SEQ ID NO: 2477658 - RNA, 19 nt, Artificial Sequence
  Description of Artificial Sequence: Synthetic oligonucleotide
  Sense strand starting at position 2960 of SEQ ID NO: 1887513
agugccauggaguaauguu

SEQ ID NO: 2477659 - RNA, 19 nt, Artificial Sequence
  Description of Artificial Sequence: Synthetic oligonucleotide
  Antisense strand to SEQ ID NO: 2477658
aacauuacuccauggcacu

SEQ ID NO: 2477660 - RNA, 19 nt, Artificial Sequence
  Description of Artificial Sequence: Synthetic oligonucleotide
  Sense strand starting at position 2981 of SEQ ID NO: 1887513
uauugagcaccuggguauu

SEQ ID NO: 2477661 - RNA, 19 nt, Artificial Sequence
  Description of Artificial Sequence: Synthetic oligonucleotide
  Antisense strand to SEQ ID NO: 2477660
aauacccaggugcucaaua

SEQ ID NO: 2477662 - RNA, 19 nt, Artificial Sequence
  Description of Artificial Sequence: Synthetic oligonucleotide
  Sense strand starting at position 3131 of SEQ ID NO: 1887513
cauagacacuugggaagua

SEQ ID NO: 2477663 - RNA, 19 nt, Artificial Sequence
  Description of Artificial Sequence: Synthetic oligonucleotide
  Antisense strand to SEQ ID NO: 2477662
uacuucccaagugucuaug

SEQ ID NO: 2477664 - RNA, 19 nt, Artificial Sequence
  Description of Artificial Sequence: Synthetic oligonucleotide
  Sense strand starting at position 3141 of SEQ ID NO: 1887513
ugggaaguaucuuugcuuc

SEQ ID NO: 2477665 - RNA, 19 nt, Artificial Sequence
  Description of Artificial Sequence: Synthetic oligonucleotide
  Antisense strand to SEQ ID NO: 2477664
gaagcaaagauacuuccca

SEQ ID NO: 2477666 - RNA, 19 nt, Artificial Sequence
  Description of Artificial Sequence: Synthetic oligonucleotide
  Sense strand starting at position 3143 of SEQ ID NO: 1887513
ggaaguaucuuugcuuccu

SEQ ID NO: 2477667 - RNA, 19 nt, Artificial Sequence
  Description of Artificial Sequence: Synthetic oligonucleotide
  Antisense strand to SEQ ID NO: 2477666
aggaagcaaagauacuucc

SEQ ID NO: 2477668 - RNA, 19 nt, Artificial Sequence
  Description of Artificial Sequence: Synthetic oligonucleotide
  Sense strand starting at position 3172 of SEQ ID NO: 1887513
ucuggcaugucacuuaaga

SEQ ID NO: 2477669 - RNA, 19 nt, Artificial Sequence
  Description of Artificial Sequence: Synthetic oligonucleotide
  Antisense strand to SEQ ID NO: 2477668
ucuuaagugacaugccaga

SEQ ID NO: 2477670 - RNA, 19 nt, Artificial Sequence
  Description of Artificial Sequence: Synthetic oligonucleotide
  Sense strand starting at position 3174 of SEQ ID NO: 1887513
uggcaugucacuuaagaag

SEQ ID NO: 2477671 - RNA, 19 nt, Artificial Sequence
  Description of Artificial Sequence: Synthetic oligonucleotide
  Antisense strand to SEQ ID NO: 2477670
cuucuuaagugacaugcca

SEQ ID NO: 2477672 - RNA, 19 nt, Artificial Sequence
  Description of Artificial Sequence: Synthetic oligonucleotide
  Sense strand starting at position 3247 of SEQ ID NO: 1887513
cgcaguguucgccauggaa

SEQ ID NO: 2477673 - RNA, 19 nt, Artificial Sequence
  Description of Artificial Sequence: Synthetic oligonucleotide
  Antisense strand to SEQ ID NO: 2477672
uuccauggcgaacacugcg

SEQ ID NO: 2477674 - RNA, 19 nt, Artificial Sequence
  Description of Artificial Sequence: Synthetic oligonucleotide
  Sense strand starting at position 3249 of SEQ ID NO: 1887513
caguguucgccauggaauu

SEQ ID NO: 2477675 - RNA, 19 nt, Artificial Sequence
  Description of Artificial Sequence: Synthetic oligonucleotide
  Antisense strand to SEQ ID NO: 2477674
aauuccauggcgaacacug

SEQ ID NO: 2477676 - RNA, 19 nt, Artificial Sequence
  Description of Artificial Sequence: Synthetic oligonucleotide
  Sense strand starting at position 3395 of SEQ ID NO: 1887513
gccuguauccaggauggca

SEQ ID NO: 2477677 - RNA, 19 nt, Artificial Sequence
  Description of Artificial Sequence: Synthetic oligonucleotide
  Antisense strand to SEQ ID NO: 2477676
ugccauccuggauacaggc

SEQ ID NO: 2477678 - RNA, 19 nt, Artificial Sequence
  Description of Artificial Sequence: Synthetic oligonucleotide
  Sense strand starting at position 3674 of SEQ ID NO: 1887513
ggcagaguguagaggucau

SEQ ID NO: 2477679 - RNA, 19 nt, Artificial Sequence
  Description of Artificial Sequence: Synthetic oligonucleotide
  Antisense strand to SEQ ID NO: 2477678
augaccucuacacucugcc

SEQ ID NO: 2477680 - RNA, 19 nt, Artificial Sequence
  Description of Artificial Sequence: Synthetic oligonucleotide
  Sense strand starting at position 3799 of SEQ ID NO: 1887513
ccgagauguugggacugga

SEQ ID NO: 2477681 - RNA, 19 nt, Artificial Sequence
  Description of Artificial Sequence: Synthetic oligonucleotide
  Antisense strand to SEQ ID NO: 2477680
uccagucccaacaucucgg

SEQ ID NO: 2477682 - RNA, 19 nt, Artificial Sequence
  Description of Artificial Sequence: Synthetic oligonucleotide
  Sense strand starting at position 3850 of SEQ ID NO: 1887513
gauggaaguuaggacuuua

SEQ ID NO: 2477683 - RNA, 19 nt, Artificial Sequence
  Description of Artificial Sequence: Synthetic oligonucleotide
  Antisense strand to SEQ ID NO: 2477682
uaaaguccuaacuuccauc

SEQ ID NO: 2477684 - RNA, 19 nt, Artificial Sequence
  Description of Artificial Sequence: Synthetic oligonucleotide
  Sense strand starting at position 3873 of SEQ ID NO: 1887513
gauggauacuuccugaagu

SEQ ID NO: 2477685 - RNA, 19 nt, Artificial Sequence
  Description of Artificial Sequence: Synthetic oligonucleotide
  Antisense strand to SEQ ID NO: 2477684
acuucaggaaguauccauc

SEQ ID NO: 2477686 - RNA, 19 nt, Artificial Sequence
  Description of Artificial Sequence: Synthetic oligonucleotide
  Sense strand starting at position 3874 of SEQ ID NO: 1887513
auggauacuuccugaagug

SEQ ID NO: 2477687 - RNA, 19 nt, Artificial Sequence
  Description of Artificial Sequence: Synthetic oligonucleotide
  Antisense strand to SEQ ID NO: 2477686
cacuucaggaaguauccau

SEQ ID NO: 2477688 - RNA, 19 nt, Artificial Sequence
  Description of Artificial Sequence: Synthetic oligonucleotide
  Sense strand starting at position 3938 of SEQ ID NO: 1887513
ggaaauuccugagcugaau

SEQ ID NO: 2477689 - RNA, 19 nt, Artificial Sequence
  Description of Artificial Sequence: Synthetic oligonucleotide
  Antisense strand to SEQ ID NO: 2477688
auucagcucaggaauuucc

SEQ ID NO: 2477690 - RNA, 19 nt, Artificial Sequence
  Description of Artificial Sequence: Synthetic oligonucleotide
  Sense strand starting at position 138 of SEQ ID NO: 1887514
uuucuaacucuccgugaga

SEQ ID NO: 2477691 - RNA, 19 nt, Artificial Sequence
  Description of Artificial Sequence: Synthetic oligonucleotide
  Antisense strand to SEQ ID NO: 2477690
ucucacggagaguuagaaa

SEQ ID NO: 2477692 - RNA, 19 nt, Artificial Sequence
  Description of Artificial Sequence: Synthetic oligonucleotide
  Sense strand starting at position 140 of SEQ ID NO: 1887514
ucuaacucuccgugagaca

SEQ ID NO: 2477693 - RNA, 19 nt, Artificial Sequence
  Description of Artificial Sequence: Synthetic oligonucleotide
  Antisense strand to SEQ ID NO: 2477692
ugucucacggagaguuaga

SEQ ID NO: 2477694 - RNA, 19 nt, Artificial Sequence
  Description of Artificial Sequence: Synthetic oligonucleotide
  Sense strand starting at position 160 of SEQ ID NO: 1887514
ucugcacauccaugagaga

SEQ ID NO: 2477695 - RNA, 19 nt, Artificial Sequence
  Description of Artificial Sequence: Synthetic oligonucleotide
  Antisense strand to SEQ ID NO: 2477694
ucucucauggaugugcaga

SEQ ID NO: 2477696 - RNA, 19 nt, Artificial Sequence
  Description of Artificial Sequence: Synthetic oligonucleotide
  Sense strand starting at position 1150 of SEQ ID NO: 1887514
agaacagaauucuacuaag

SEQ ID NO: 2477697 - RNA, 19 nt, Artificial Sequence
  Description of Artificial Sequence: Synthetic oligonucleotide
  Antisense strand to SEQ ID NO: 2477696
cuuaguagaauucuguucu

SEQ ID NO: 2477698 - RNA, 19 nt, Artificial Sequence
  Description of Artificial Sequence: Synthetic oligonucleotide
  Sense strand starting at position 1159 of SEQ ID NO: 1887514
uucuacuaagcaugaugau

SEQ ID NO: 2477699 - RNA, 19 nt, Artificial Sequence
  Description of Artificial Sequence: Synthetic oligonucleotide
  Antisense strand to SEQ ID NO: 2477698
aucaucaugcuuaguagaa

SEQ ID NO: 2477700 - RNA, 19 nt, Artificial Sequence
  Description of Artificial Sequence: Synthetic oligonucleotide
  Sense strand starting at position 1176 of SEQ ID NO: 1887514
auacaauauugagccaagu

SEQ ID NO: 2477701 - RNA, 19 nt, Artificial Sequence
  Description of Artificial Sequence: Synthetic oligonucleotide
  Antisense strand to SEQ ID NO: 2477700
acuuggcucaauauuguau

SEQ ID NO: 2477702 - RNA, 19 nt, Artificial Sequence
  Description of Artificial Sequence: Synthetic oligonucleotide
  Sense strand starting at position 1199 of SEQ ID NO: 1887514
ccuaguucuugucuacaac

SEQ ID NO: 2477703 - RNA, 19 nt, Artificial Sequence
  Description of Artificial Sequence: Synthetic oligonucleotide
  Antisense strand to SEQ ID NO: 2477702
guuguagacaagaacuagg

SEQ ID NO: 2477704 - RNA, 19 nt, Artificial Sequence
  Description of Artificial Sequence: Synthetic oligonucleotide
  Sense strand starting at position 1200 of SEQ ID NO: 1887514
cuaguucuugucuacaaca

SEQ ID NO: 2477705 - RNA, 19 nt, Artificial Sequence
  Description of Artificial Sequence: Synthetic oligonucleotide
  Antisense strand to SEQ ID NO: 2477704
uguuguagacaagaacuag

SEQ ID NO: 2477706 - RNA, 19 nt, Artificial Sequence
  Description of Artificial Sequence: Synthetic oligonucleotide
  Sense strand starting at position 1202 of SEQ ID NO: 1887514
aguucuugucuacaacaga

SEQ ID NO: 2477707 - RNA, 19 nt, Artificial Sequence
  Description of Artificial Sequence: Synthetic oligonucleotide
  Antisense strand to SEQ ID NO: 2477706
ucuguuguagacaagaacu

SEQ ID NO: 2477708 - RNA, 19 nt, Artificial Sequence
  Description of Artificial Sequence: Synthetic oligonucleotide
  Sense strand starting at position 1370 of SEQ ID NO: 1887514
gcuggauucugagcaucac

SEQ ID NO: 2477709 - RNA, 19 nt, Artificial Sequence
  Description of Artificial Sequence: Synthetic oligonucleotide
  Antisense strand to SEQ ID NO: 2477708
gugaugcucagaauccagc

SEQ ID NO: 2477710 - RNA, 19 nt, Artificial Sequence
  Description of Artificial Sequence: Synthetic oligonucleotide
  Sense strand starting at position 1371 of SEQ ID NO: 1887514
cuggauucugagcaucaca

SEQ ID NO: 2477711 - RNA, 19 nt, Artificial Sequence
  Description of Artificial Sequence: Synthetic oligonucleotide
  Antisense strand to SEQ ID NO: 2477710
ugugaugcucagaauccag

SEQ ID NO: 2477712 - RNA, 19 nt, Artificial Sequence
  Description of Artificial Sequence: Synthetic oligonucleotide
  Sense strand starting at position 1428 of SEQ ID NO: 1887514
uauggaggguuucuagaac

SEQ ID NO: 2477713 - RNA, 19 nt, Artificial Sequence
  Description of Artificial Sequence: Synthetic oligonucleotide
  Antisense strand to SEQ ID NO: 2477712
guucuagaaacccuccaua

SEQ ID NO: 2477714 - RNA, 19 nt, Artificial Sequence
  Description of Artificial Sequence: Synthetic oligonucleotide
  Sense strand starting at position 1564 of SEQ ID NO: 1887514
aaucauuuguguuuggcca

SEQ ID NO: 2477715 - RNA, 19 nt, Artificial Sequence
  Description of Artificial Sequence: Synthetic oligonucleotide
  Antisense strand to SEQ ID NO: 2477714
uggccaaacacaaaugauu

SEQ ID NO: 2477716 - RNA, 19 nt, Artificial Sequence
  Description of Artificial Sequence: Synthetic oligonucleotide
  Sense strand starting at position 1565 of SEQ ID NO: 1887514
aucauuuguguuuggccaa

SEQ ID NO: 2477717 - RNA, 19 nt, Artificial Sequence
  Description of Artificial Sequence: Synthetic oligonucleotide
  Antisense strand to SEQ ID NO: 2477716
uuggccaaacacaaaugau

SEQ ID NO: 2477718 - RNA, 19 nt, Artificial Sequence
  Description of Artificial Sequence: Synthetic oligonucleotide
  Sense strand starting at position 1588 of SEQ ID NO: 1887514
gcauccuaggacugggaua

SEQ ID NO: 2477719 - RNA, 19 nt, Artificial Sequence
  Description of Artificial Sequence: Synthetic oligonucleotide
  Antisense strand to SEQ ID NO: 2477718
uaucccaguccuaggaugc

SEQ ID NO: 2477720 - RNA, 19 nt, Artificial Sequence
  Description of Artificial Sequence: Synthetic oligonucleotide
  Sense strand starting at position 2219 of SEQ ID NO: 1887514
ugauuugauuucugugaug

SEQ ID NO: 2477721 - RNA, 19 nt, Artificial Sequence
  Description of Artificial Sequence: Synthetic oligonucleotide
  Antisense strand to SEQ ID NO: 2477720
caucacagaaaucaaauca

SEQ ID NO: 2477722 - RNA, 19 nt, Artificial Sequence
  Description of Artificial Sequence: Synthetic oligonucleotide
  Sense strand starting at position 2239 of SEQ ID NO: 1887514
aagguucuccgccaaauua

SEQ ID NO: 2477723 - RNA, 19 nt, Artificial Sequence
  Description of Artificial Sequence: Synthetic oligonucleotide
  Antisense strand to SEQ ID NO: 2477722
uaauuuggcggagaaccuu

SEQ ID NO: 2477724 - RNA, 19 nt, Artificial Sequence
  Description of Artificial Sequence: Synthetic oligonucleotide
  Sense strand starting at position 2303 of SEQ ID NO: 1887514
ugaaauguuuauccuguca

SEQ ID NO: 2477725 - RNA, 19 nt, Artificial Sequence
  Description of Artificial Sequence: Synthetic oligonucleotide
  Antisense strand to SEQ ID NO: 2477724
ugacaggauaaacauuuca

SEQ ID NO: 2477726 - RNA, 19 nt, Artificial Sequence
  Description of Artificial Sequence: Synthetic oligonucleotide
  Sense strand starting at position 2601 of SEQ ID NO: 1887514
gcauauaacgcugaagguu

SEQ ID NO: 2477727 - RNA, 19 nt, Artificial Sequence
  Description of Artificial Sequence: Synthetic oligonucleotide
  Antisense strand to SEQ ID NO: 2477726
aaccuucagcguuauaugc

SEQ ID NO: 2477728 - RNA, 19 nt, Artificial Sequence
  Description of Artificial Sequence: Synthetic oligonucleotide
  Sense strand starting at position 2758 of SEQ ID NO: 1887514
agaacuucucaauguauga

SEQ ID NO: 2477729 - RNA, 19 nt, Artificial Sequence
  Description of Artificial Sequence: Synthetic oligonucleotide
  Antisense strand to SEQ ID NO: 2477728
ucauacauugagaaguucu

SEQ ID NO: 2477730 - RNA, 19 nt, Artificial Sequence
  Description of Artificial Sequence: Synthetic oligonucleotide
  Sense strand starting at position 2820 of SEQ ID NO: 1887514
guaaauaugugucucugau

SEQ ID NO: 2477731 - RNA, 19 nt, Artificial Sequence
  Description of Artificial Sequence: Synthetic oligonucleotide
  Antisense strand to SEQ ID NO: 2477730
aucagagacacauauuuac

SEQ ID NO: 2477732 - RNA, 19 nt, Artificial Sequence
  Description of Artificial Sequence: Synthetic oligonucleotide
  Sense strand starting at position 2852 of SEQ ID NO: 1887514
ucugguaauauuugugugu

SEQ ID NO: 2477733 - RNA, 19 nt, Artificial Sequence
  Description of Artificial Sequence: Synthetic oligonucleotide
  Antisense strand to SEQ ID NO: 2477732
acacacaaauauuaccaga

SEQ ID NO: 2477734 - RNA, 19 nt, Artificial Sequence
  Description of Artificial Sequence: Synthetic oligonucleotide
  Sense strand starting at position 3049 of SEQ ID NO: 1887514
gcagauaugauguauguuu

SEQ ID NO: 2477735 - RNA, 19 nt, Artificial Sequence
  Description of Artificial Sequence: Synthetic oligonucleotide
  Antisense strand to SEQ ID NO: 2477734
aaacauacaucauaucugc

SEQ ID NO: 2477736 - RNA, 19 nt, Artificial Sequence
  Description of Artificial Sequence: Synthetic oligonucleotide
  Sense strand starting at position 3137 of SEQ ID NO: 1887514
gagugaguuucccugagua

SEQ ID NO: 2477737 - RNA, 19 nt, Artificial Sequence
  Description of Artificial Sequence: Synthetic oligonucleotide
  Antisense strand to SEQ ID NO: 2477736
uacucagggaaacucacuc

SEQ ID NO: 2477738 - RNA, 19 nt, Artificial Sequence
  Description of Artificial Sequence: Synthetic oligonucleotide
  Sense strand starting at position 3139 of SEQ ID NO: 1887514
gugaguuucccugaguaca

SEQ ID NO: 2477739 - RNA, 19 nt, Artificial Sequence
  Description of Artificial Sequence: Synthetic oligonucleotide
  Antisense strand to SEQ ID NO: 2477738
uguacucagggaaacucac

SEQ ID NO: 2477740 - RNA, 19 nt, Artificial Sequence
  Description of Artificial Sequence: Synthetic oligonucleotide
  Sense strand starting at position 3141 of SEQ ID NO: 1887514
gaguuucccugaguacaca

SEQ ID NO: 2477741 - RNA, 19 nt, Artificial Sequence
  Description of Artificial Sequence: Synthetic oligonucleotide
  Antisense strand to SEQ ID NO: 2477740
uguguacucagggaaacuc

SEQ ID NO: 2477742 - RNA, 19 nt, Artificial Sequence
  Description of Artificial Sequence: Synthetic oligonucleotide
  Sense strand starting at position 3375 of SEQ ID NO: 1887514
gaauaaaugcugugauaca

SEQ ID NO: 2477743 - RNA, 19 nt, Artificial Sequence
  Description of Artificial Sequence: Synthetic oligonucleotide
  Antisense strand to SEQ ID NO: 2477742
uguaucacagcauuuauuc

SEQ ID NO: 2477744 - RNA, 19 nt, Artificial Sequence
  Description of Artificial Sequence: Synthetic oligonucleotide
  Sense strand starting at position 3411 of SEQ ID NO: 1887514
gcaaauguaucaccuauga

SEQ ID NO: 2477745 - RNA, 19 nt, Artificial Sequence
  Description of Artificial Sequence: Synthetic oligonucleotide
  Antisense strand to SEQ ID NO: 2477744
ucauaggugauacauuugc

SEQ ID NO: 2477746 - RNA, 19 nt, Artificial Sequence
  Description of Artificial Sequence: Synthetic oligonucleotide
  Sense strand starting at position 3493 of SEQ ID NO: 1887514
guuauaauugauugacuug

SEQ ID NO: 2477747 - RNA, 19 nt, Artificial Sequence
  Description of Artificial Sequence: Synthetic oligonucleotide
  Antisense strand to SEQ ID NO: 2477746
caagucaaucaauuauaac

SEQ ID NO: 2477748 - RNA, 19 nt, Artificial Sequence
  Description of Artificial Sequence: Synthetic oligonucleotide
  Sense strand starting at position 3504 of SEQ ID NO: 1887514
uugacuuggaagugagauu

SEQ ID NO: 2477749 - RNA, 19 nt, Artificial Sequence
  Description of Artificial Sequence: Synthetic oligonucleotide
  Antisense strand to SEQ ID NO: 2477748
aaucucacuuccaagucaa

SEQ ID NO: 2477750 - RNA, 19 nt, Artificial Sequence
  Description of Artificial Sequence: Synthetic oligonucleotide
  Sense strand starting at position 3513 of SEQ ID NO: 1887514
aagugagauuugcaaaguu

SEQ ID NO: 2477751 - RNA, 19 nt, Artificial Sequence
  Description of Artificial Sequence: Synthetic oligonucleotide
  Antisense strand to SEQ ID NO: 2477750
aacuuugcaaaucucacuu

SEQ ID NO: 2477752 - RNA, 19 nt, Artificial Sequence
  Description of Artificial Sequence: Synthetic oligonucleotide
  Sense strand starting at position 3668 of SEQ ID NO: 1887514
acggguuucuugccaggaa

SEQ ID NO: 2477753 - RNA, 19 nt, Artificial Sequence
  Description of Artificial Sequence: Synthetic oligonucleotide
  Antisense strand to SEQ ID NO: 2477752
uuccuggcaagaaacccgu

SEQ ID NO: 2477754 - RNA, 19 nt, Artificial Sequence
  Description of Artificial Sequence: Synthetic oligonucleotide
  Sense strand starting at position 3671 of SEQ ID NO: 1887514
gguuucuugccaggaagac

SEQ ID NO: 2477755 - RNA, 19 nt, Artificial Sequence
  Description of Artificial Sequence: Synthetic oligonucleotide
  Antisense strand to SEQ ID NO: 2477754
gucuuccuggcaagaaacc

SEQ ID NO: 2477756 - RNA, 19 nt, Artificial Sequence
  Description of Artificial Sequence: Synthetic oligonucleotide
  Sense strand starting at position 3672 of SEQ ID NO: 1887514
guuucuugccaggaagaca

SEQ ID NO: 2477757 - RNA, 19 nt, Artificial Sequence
  Description of Artificial Sequence: Synthetic oligonucleotide
  Antisense strand to SEQ ID NO: 2477756
ugucuuccuggcaagaaac

SEQ ID NO: 2477758 - RNA, 19 nt, Artificial Sequence
  Description of Artificial Sequence: Synthetic oligonucleotide
  Sense strand starting at position 3692 of SEQ ID NO: 1887514
cuuagcaguguuuacacau

SEQ ID NO: 2477759 - RNA, 19 nt, Artificial Sequence
  Description of Artificial Sequence: Synthetic oligonucleotide
  Antisense strand to SEQ ID NO: 2477758
auguguaaacacugcuaag

SEQ ID NO: 2477760 - RNA, 19 nt, Artificial Sequence
  Description of Artificial Sequence: Synthetic oligonucleotide
  Sense strand starting at position 3699 of SEQ ID NO: 1887514
guguuuacacauugggaug

SEQ ID NO: 2477761 - RNA, 19 nt, Artificial Sequence
  Description of Artificial Sequence: Synthetic oligonucleotide
  Antisense strand to SEQ ID NO: 2477760
caucccaauguguaaacac

SEQ ID NO: 2477762 - RNA, 19 nt, Artificial Sequence
  Description of Artificial Sequence: Synthetic oligonucleotide
  Sense strand starting at position 3700 of SEQ ID NO: 1887514
uguuuacacauugggauga

SEQ ID NO: 2477763 - RNA, 19 nt, Artificial Sequence
  Description of Artificial Sequence: Synthetic oligonucleotide
  Antisense strand to SEQ ID NO: 2477762
ucaucccaauguguaaaca

SEQ ID NO: 2477764 - RNA, 19 nt, Artificial Sequence
  Description of Artificial Sequence: Synthetic oligonucleotide
  Sense strand starting at position 3719 of SEQ ID NO: 1887514
ggccaacagcuuuaugaag

SEQ ID NO: 2477765 - RNA, 19 nt, Artificial Sequence
  Description of Artificial Sequence: Synthetic oligonucleotide
  Antisense strand to SEQ ID NO: 2477764
cuucauaaagcuguuggcc

SEQ ID NO: 2477766 - RNA, 19 nt, Artificial Sequence
  Description of Artificial Sequence: Synthetic oligonucleotide
  Sense strand starting at position 3934 of SEQ ID NO: 1887514
caaagcguuccaugaaauu

SEQ ID NO: 2477767 - RNA, 19 nt, Artificial Sequence
  Description of Artificial Sequence: Synthetic oligonucleotide
  Antisense strand to SEQ ID NO: 2477766
aauuucauggaacgcuuug

SEQ ID NO: 2477768 - RNA, 19 nt, Artificial Sequence
  Description of Artificial Sequence: Synthetic oligonucleotide
  Sense strand starting at position 3973 of SEQ ID NO: 1887514
ugaagaaugugauucugug

SEQ ID NO: 2477769 - RNA, 19 nt, Artificial Sequence
  Description of Artificial Sequence: Synthetic oligonucleotide
  Antisense strand to SEQ ID NO: 2477768
cacagaaucacauucuuca

SEQ ID NO: 2477770 - RNA, 19 nt, Artificial Sequence
  Description of Artificial Sequence: Synthetic oligonucleotide
  Sense strand starting at position 538 of SEQ ID NO: 1887515
uggagucacugauuggguu

SEQ ID NO: 2477771 - RNA, 19 nt, Artificial Sequence
  Description of Artificial Sequence: Synthetic oligonucleotide
  Antisense strand to SEQ ID NO: 2477770
aacccaaucagugacucca

SEQ ID NO: 2477772 - RNA, 19 nt, Artificial Sequence
  Description of Artificial Sequence: Synthetic oligonucleotide
  Sense strand starting at position 539 of SEQ ID NO: 1887515
ggagucacugauuggguuu

SEQ ID NO: 2477773 - RNA, 19 nt, Artificial Sequence
  Description of Artificial Sequence: Synthetic oligonucleotide
  Antisense strand to SEQ ID NO: 2477772
aaacccaaucagugacucc

SEQ ID NO: 2477774 - RNA, 19 nt, Artificial Sequence
  Description of Artificial Sequence: Synthetic oligonucleotide
  Sense strand starting at position 585 of SEQ ID NO: 1887515
uggagaggaugugaacaua

SEQ ID NO: 2477775 - RNA, 19 nt, Artificial Sequence
  Description of Artificial Sequence: Synthetic oligonucleotide
  Antisense strand to SEQ ID NO: 2477774
uauguucacauccucucca

SEQ ID NO: 2477776 - RNA, 19 nt, Artificial Sequence
  Description of Artificial Sequence: Synthetic oligonucleotide
  Sense strand starting at position 662 of SEQ ID NO: 1887515
acagaauggcauuaugcuu

SEQ ID NO: 2477777 - RNA, 19 nt, Artificial Sequence
  Description of Artificial Sequence: Synthetic oligonucleotide
  Antisense strand to SEQ ID NO: 2477776
aagcauaaugccauucugu

SEQ ID NO: 2477778 - RNA, 19 nt, Artificial Sequence
  Description of Artificial Sequence: Synthetic oligonucleotide
  Sense strand starting at position 667 of SEQ ID NO: 1887515
auggcauuaugcuuaagga

SEQ ID NO: 2477779 - RNA, 19 nt, Artificial Sequence
  Description of Artificial Sequence: Synthetic oligonucleotide
  Antisense strand to SEQ ID NO: 2477778
uccuuaagcauaaugccau

SEQ ID NO: 2477780 - RNA, 19 nt, Artificial Sequence
  Description of Artificial Sequence: Synthetic oligonucleotide
  Sense strand starting at position 668 of SEQ ID NO: 1887515
uggcauuaugcuuaaggac

SEQ ID NO: 2477781 - RNA, 19 nt, Artificial Sequence
  Description of Artificial Sequence: Synthetic oligonucleotide
  Antisense strand to SEQ ID NO: 2477780
guccuuaagcauaaugcca

SEQ ID NO: 2477782 - RNA, 19 nt, Artificial Sequence
  Description of Artificial Sequence: Synthetic oligonucleotide
  Sense strand starting at position 676 of SEQ ID NO: 1887515
ugcuuaaggacaugauuag

SEQ ID NO: 2477783 - RNA, 19 nt, Artificial Sequence
  Description of Artificial Sequence: Synthetic oligonucleotide
  Antisense strand to SEQ ID NO: 2477782
cuaaucauguccuuaagca

SEQ ID NO: 2477784 - RNA, 19 nt, Artificial Sequence
  Description of Artificial Sequence: Synthetic oligonucleotide
  Sense strand starting at position 682 of SEQ ID NO: 1887515
aggacaugauuagagacau

SEQ ID NO: 2477785 - RNA, 19 nt, Artificial Sequence
  Description of Artificial Sequence: Synthetic oligonucleotide
  Antisense strand to SEQ ID NO: 2477784
augucucuaaucauguccu

SEQ ID NO: 2477786 - RNA, 19 nt, Artificial Sequence
  Description of Artificial Sequence: Synthetic oligonucleotide
  Sense strand starting at position 1111 of SEQ ID NO: 1887515
gagggucauuuguggcaga

SEQ ID NO: 2477787 - RNA, 19 nt, Artificial Sequence
  Description of Artificial Sequence: Synthetic oligonucleotide
  Antisense strand to SEQ ID NO: 2477786
ucugccacaaaugacccuc

SEQ ID NO: 2477788 - RNA, 19 nt, Artificial Sequence
  Description of Artificial Sequence: Synthetic oligonucleotide
  Sense strand starting at position 1112 of SEQ ID NO: 1887515
agggucauuuguggcagaa

SEQ ID NO: 2477789 - RNA, 19 nt, Artificial Sequence
  Description of Artificial Sequence: Synthetic oligonucleotide
  Antisense strand to SEQ ID NO: 2477788
uucugccacaaaugacccu

SEQ ID NO: 2477790 - RNA, 19 nt, Artificial Sequence
  Description of Artificial Sequence: Synthetic oligonucleotide
  Sense strand starting at position 1116 of SEQ ID NO: 1887515
ucauuuguggcagaacguu

SEQ ID NO: 2477791 - RNA, 19 nt, Artificial Sequence
  Description of Artificial Sequence: Synthetic oligonucleotide
  Antisense strand to SEQ ID NO: 2477790
aacguucugccacaaauga

SEQ ID NO: 2477792 - RNA, 19 nt, Artificial Sequence
  Description of Artificial Sequence: Synthetic oligonucleotide
  Sense strand starting at position 1122 of SEQ ID NO: 1887515
guggcagaacguuaaugaa

SEQ ID NO: 2477793 - RNA, 19 nt, Artificial Sequence
  Description of Artificial Sequence: Synthetic oligonucleotide
  Antisense strand to SEQ ID NO: 2477792
uucauuaacguucugccac

SEQ ID NO: 2477794 - RNA, 19 nt, Artificial Sequence
  Description of Artificial Sequence: Synthetic oligonucleotide
  Sense strand starting at position 1168 of SEQ ID NO: 1887515
gaggcaucagguuacaauu

SEQ ID NO: 2477795 - RNA, 19 nt, Artificial Sequence
  Description of Artificial Sequence: Synthetic oligonucleotide
  Antisense strand to SEQ ID NO: 2477794
aauuguaaccugaugccuc

SEQ ID NO: 2477796 - RNA, 19 nt, Artificial Sequence
  Description of Artificial Sequence: Synthetic oligonucleotide
  Sense strand starting at position 1170 of SEQ ID NO: 1887515
ggcaucagguuacaauuaa

SEQ ID NO: 2477797 - RNA, 19 nt, Artificial Sequence
  Description of Artificial Sequence: Synthetic oligonucleotide
  Antisense strand to SEQ ID NO: 2477796
uuaauuguaaccugaugcc

SEQ ID NO: 2477798 - RNA, 19 nt, Artificial Sequence
  Description of Artificial Sequence: Synthetic oligonucleotide
  Sense strand starting at position 1182 of SEQ ID NO: 1887515
caauuaauuucuuggugug

SEQ ID NO: 2477799 - RNA, 19 nt, Artificial Sequence
  Description of Artificial Sequence: Synthetic oligonucleotide
  Antisense strand to SEQ ID NO: 2477798
cacaccaagaaauuaauug

SEQ ID NO: 2477800 - RNA, 19 nt, Artificial Sequence
  Description of Artificial Sequence: Synthetic oligonucleotide
  Sense strand starting at position 1183 of SEQ ID NO: 1887515
aauuaauuucuuggugugu

SEQ ID NO: 2477801 - RNA, 19 nt, Artificial Sequence
  Description of Artificial Sequence: Synthetic oligonucleotide
  Antisense strand to SEQ ID NO: 2477800
acacaccaagaaauuaauu

SEQ ID NO: 2477802 - RNA, 19 nt, Artificial Sequence
  Description of Artificial Sequence: Synthetic oligonucleotide
  Sense strand starting at position 1199 of SEQ ID NO: 1887515
uguggcagcugaguucaau

SEQ ID NO: 2477803 - RNA, 19 nt, Artificial Sequence
  Description of Artificial Sequence: Synthetic oligonucleotide
  Antisense strand to SEQ ID NO: 2477802
auugaacucagcugccaca

SEQ ID NO: 2477804 - RNA, 19 nt, Artificial Sequence
  Description of Artificial Sequence: Synthetic oligonucleotide
  Sense strand starting at position 1315 of SEQ ID NO: 1887515
acacauagacguuguaugu

SEQ ID NO: 2477805 - RNA, 19 nt, Artificial Sequence
  Description of Artificial Sequence: Synthetic oligonucleotide
  Antisense strand to SEQ ID NO: 2477804
acauacaacgucuaugugu

SEQ ID NO: 2477806 - RNA, 19 nt, Artificial Sequence
  Description of Artificial Sequence: Synthetic oligonucleotide
  Sense strand starting at position 1324 of SEQ ID NO: 1887515
cguuguauguaagcucuaa

SEQ ID NO: 2477807 - RNA, 19 nt, Artificial Sequence
  Description of Artificial Sequence: Synthetic oligonucleotide
  Antisense strand to SEQ ID NO: 2477806
uuagagcuuacauacaacg

SEQ ID NO: 2477808 - RNA, 19 nt, Artificial Sequence
  Description of Artificial Sequence: Synthetic oligonucleotide
  Sense strand starting at position 1328 of SEQ ID NO: 1887515
guauguaagcucuaagcac

SEQ ID NO: 2477809 - RNA, 19 nt, Artificial Sequence
  Description of Artificial Sequence: Synthetic oligonucleotide
  Antisense strand to SEQ ID NO: 2477808
gugcuuagagcuuacauac

SEQ ID NO: 2477810 - RNA, 19 nt, Artificial Sequence
  Description of Artificial Sequence: Synthetic oligonucleotide
  Sense strand starting at position 1427 of SEQ ID NO: 1887515
ccucaaagacccuguaaga

SEQ ID NO: 2477811 - RNA, 19 nt, Artificial Sequence
  Description of Artificial Sequence: Synthetic oligonucleotide
  Antisense strand to SEQ ID NO: 2477810
ucuuacagggucuuugagg

SEQ ID NO: 2477812 - RNA, 19 nt, Artificial Sequence
  Description of Artificial Sequence: Synthetic oligonucleotide
  Sense strand starting at position 1510 of SEQ ID NO: 1887515
ugucuaaugcuugcuaugu

SEQ ID NO: 2477813 - RNA, 19 nt, Artificial Sequence
  Description of Artificial Sequence: Synthetic oligonucleotide
  Antisense strand to SEQ ID NO: 2477812
acauagcaagcauuagaca

SEQ ID NO: 2477814 - RNA, 19 nt, Artificial Sequence
  Description of Artificial Sequence: Synthetic oligonucleotide
  Sense strand starting at position 1511 of SEQ ID NO: 1887515
gucuaaugcuugcuaugua

SEQ ID NO: 2477815 - RNA, 19 nt, Artificial Sequence
  Description of Artificial Sequence: Synthetic oligonucleotide
  Antisense strand to SEQ ID NO: 2477814
uacauagcaagcauuagac

SEQ ID NO: 2477816 - RNA, 19 nt, Artificial Sequence
  Description of Artificial Sequence: Synthetic oligonucleotide
  Sense strand starting at position 1527 of SEQ ID NO: 1887515
guauauuaccucuguuaug

SEQ ID NO: 2477817 - RNA, 19 nt, Artificial Sequence
  Description of Artificial Sequence: Synthetic oligonucleotide
  Antisense strand to SEQ ID NO: 2477816
cauaacagagguaauauac

SEQ ID NO: 2477818 - RNA, 19 nt, Artificial Sequence
  Description of Artificial Sequence: Synthetic oligonucleotide
  Sense strand starting at position 1549 of SEQ ID NO: 1887515
uugagaccucacuguuauu

SEQ ID NO: 2477819 - RNA, 19 nt, Artificial Sequence
  Description of Artificial Sequence: Synthetic oligonucleotide
  Antisense strand to SEQ ID NO: 2477818
aauaacagugaggucucaa

SEQ ID NO: 2477820 - RNA, 19 nt, Artificial Sequence
  Description of Artificial Sequence: Synthetic oligonucleotide
  Sense strand starting at position 1582 of SEQ ID NO: 1887515
cugucuuauagagaaggca

SEQ ID NO: 2477821 - RNA, 19 nt, Artificial Sequence
  Description of Artificial Sequence: Synthetic oligonucleotide
  Antisense strand to SEQ ID NO: 2477820
ugccuucucuauaagacag

SEQ ID NO: 2477822 - RNA, 19 nt, Artificial Sequence
  Description of Artificial Sequence: Synthetic oligonucleotide
  Sense strand starting at position 1668 of SEQ ID NO: 1887515
ucagcucagguuuguguaa

SEQ ID NO: 2477823 - RNA, 19 nt, Artificial Sequence
  Description of Artificial Sequence: Synthetic oligonucleotide
  Antisense strand to SEQ ID NO: 2477822
uuacacaaaccugagcuga

SEQ ID NO: 2477824 - RNA, 19 nt, Artificial Sequence
  Description of Artificial Sequence: Synthetic oligonucleotide
  Sense strand starting at position 1810 of SEQ ID NO: 1887515
gaaggaucuuuaguggucu

SEQ ID NO: 2477825 - RNA, 19 nt, Artificial Sequence
  Description of Artificial Sequence: Synthetic oligonucleotide
  Antisense strand to SEQ ID NO: 2477824
agaccacuaaagauccuuc

SEQ ID NO: 2477826 - RNA, 19 nt, Artificial Sequence
  Description of Artificial Sequence: Synthetic oligonucleotide
  Sense strand starting at position 1818 of SEQ ID NO: 1887515
uuuaguggucucuggguga

SEQ ID NO: 2477827 - RNA, 19 nt, Artificial Sequence
  Description of Artificial Sequence: Synthetic oligonucleotide
  Antisense strand to SEQ ID NO: 2477826
ucacccagagaccacuaaa

SEQ ID NO: 2477828 - RNA, 19 nt, Artificial Sequence
  Description of Artificial Sequence: Synthetic oligonucleotide
  Sense strand starting at position 1822 of SEQ ID NO: 1887515
guggucucugggugaggua

SEQ ID NO: 2477829 - RNA, 19 nt, Artificial Sequence
  Description of Artificial Sequence: Synthetic oligonucleotide
  Antisense strand to SEQ ID NO: 2477828
uaccucacccagagaccac

SEQ ID NO: 2477830 - RNA, 19 nt, Artificial Sequence
  Description of Artificial Sequence: Synthetic oligonucleotide
  Sense strand starting at position 2676 of SEQ ID NO: 1887515
cccaaagggucuuucuaca

SEQ ID NO: 2477831 - RNA, 19 nt, Artificial Sequence
  Description of Artificial Sequence: Synthetic oligonucleotide
  Antisense strand to SEQ ID NO: 2477830
uguagaaagacccuuuggg

SEQ ID NO: 2477832 - RNA, 19 nt, Artificial Sequence
  Description of Artificial Sequence: Synthetic oligonucleotide
  Sense strand starting at position 3406 of SEQ ID NO: 1887515
ggaagcuuugagggugaau

SEQ ID NO: 2477833 - RNA, 19 nt, Artificial Sequence
  Description of Artificial Sequence: Synthetic oligonucleotide
  Antisense strand to SEQ ID NO: 2477832
auucacccucaaagcuucc

SEQ ID NO: 2477834 - RNA, 19 nt, Artificial Sequence
  Description of Artificial Sequence: Synthetic oligonucleotide
  Sense strand starting at position 3409 of SEQ ID NO: 1887515
agcuuugagggugaauuga

SEQ ID NO: 2477835 - RNA, 19 nt, Artificial Sequence
  Description of Artificial Sequence: Synthetic oligonucleotide
  Antisense strand to SEQ ID NO: 2477834
ucaauucacccucaaagcu

SEQ ID NO: 2477836 - RNA, 19 nt, Artificial Sequence
  Description of Artificial Sequence: Synthetic oligonucleotide
  Sense strand starting at position 3455 of SEQ ID NO: 1887515
ucaucuuuguccucugaca

SEQ ID NO: 2477837 - RNA, 19 nt, Artificial Sequence
  Description of Artificial Sequence: Synthetic oligonucleotide
  Antisense strand to SEQ ID NO: 2477836
ugucagaggacaaagauga

SEQ ID NO: 2477838 - RNA, 19 nt, Artificial Sequence
  Description of Artificial Sequence: Synthetic oligonucleotide
  Sense strand starting at position 3457 of SEQ ID NO: 1887515
aucuuuguccucugacacu

SEQ ID NO: 2477839 - RNA, 19 nt, Artificial Sequence
  Description of Artificial Sequence: Synthetic oligonucleotide
  Antisense strand to SEQ ID NO: 2477838
agugucagaggacaaagau

SEQ ID NO: 2477840 - RNA, 19 nt, Artificial Sequence
  Description of Artificial Sequence: Synthetic oligonucleotide
  Sense strand starting at position 3580 of SEQ ID NO: 1887515
ugaggucuggccuguucuu

SEQ ID NO: 2477841 - RNA, 19 nt, Artificial Sequence
  Description of Artificial Sequence: Synthetic oligonucleotide
  Antisense strand to SEQ ID NO: 2477840
aagaacaggccagaccuca

SEQ ID NO: 2477842 - RNA, 19 nt, Artificial Sequence
  Description of Artificial Sequence: Synthetic oligonucleotide
  Sense strand starting at position 3696 of SEQ ID NO: 1887515
ggagguugugcugaacuga

SEQ ID NO: 2477843 - RNA, 19 nt, Artificial Sequence
  Description of Artificial Sequence: Synthetic oligonucleotide
  Antisense strand to SEQ ID NO: 2477842
ucaguucagcacaaccucc

SEQ ID NO: 2477844 - RNA, 19 nt, Artificial Sequence
  Description of Artificial Sequence: Synthetic oligonucleotide
  Sense strand starting at position 3714 of SEQ ID NO: 1887515
acuugaacccgugaucacu

SEQ ID NO: 2477845 - RNA, 19 nt, Artificial Sequence
  Description of Artificial Sequence: Synthetic oligonucleotide
  Antisense strand to SEQ ID NO: 2477844
agugaucacggguucaagu

SEQ ID NO: 2477846 - RNA, 19 nt, Artificial Sequence
  Description of Artificial Sequence: Synthetic oligonucleotide
  Sense strand starting at position 3741 of SEQ ID NO: 1887515
cguucuuggcucugauaca

SEQ ID NO: 2477847 - RNA, 19 nt, Artificial Sequence
  Description of Artificial Sequence: Synthetic oligonucleotide
  Antisense strand to SEQ ID NO: 2477846
uguaucagagccaagaacg

SEQ ID NO: 2477848 - RNA, 19 nt, Artificial Sequence
  Description of Artificial Sequence: Synthetic oligonucleotide
  Sense strand starting at position 3977 of SEQ ID NO: 1887515
cccucagucuugucucaaa

SEQ ID NO: 2477849 - RNA, 19 nt, Artificial Sequence
  Description of Artificial Sequence: Synthetic oligonucleotide
  Antisense strand to SEQ ID NO: 2477848
uuugagacaagacugaggg

SEQ ID NO: 2477850 - RNA, 19 nt, Artificial Sequence
  Description of Artificial Sequence: Synthetic oligonucleotide
  Sense strand starting at position 30 of SEQ ID NO: 1887516
cagagagugcugugcaaug

SEQ ID NO: 2477851 - RNA, 19 nt, Artificial Sequence
  Description of Artificial Sequence: Synthetic oligonucleotide
  Antisense strand to SEQ ID NO: 2477850
cauugcacagcacucucug

SEQ ID NO: 2477852 - RNA, 19 nt, Artificial Sequence
  Description of Artificial Sequence: Synthetic oligonucleotide
  Sense strand starting at position 126 of SEQ ID NO: 1887516
ggguguguucaguagugau

SEQ ID NO: 2477853 - RNA, 19 nt, Artificial Sequence
  Description of Artificial Sequence: Synthetic oligonucleotide
  Antisense strand to SEQ ID NO: 2477852
aucacuacugaacacaccc

SEQ ID NO: 2477854 - RNA, 19 nt, Artificial Sequence
  Description of Artificial Sequence: Synthetic oligonucleotide
  Sense strand starting at position 458 of SEQ ID NO: 1887516
gaagccucaccugagaagu

SEQ ID NO: 2477855 - RNA, 19 nt, Artificial Sequence
  Description of Artificial Sequence: Synthetic oligonucleotide
  Antisense strand to SEQ ID NO: 2477854
acuucucaggugaggcuuc

SEQ ID NO: 2477856 - RNA, 19 nt, Artificial Sequence
  Description of Artificial Sequence: Synthetic oligonucleotide
  Sense strand starting at position 855 of SEQ ID NO: 1887516
cuggcaauucuguagcuau

SEQ ID NO: 2477857 - RNA, 19 nt, Artificial Sequence
  Description of Artificial Sequence: Synthetic oligonucleotide
  Antisense strand to SEQ ID NO: 2477856
auagcuacagaauugccag

SEQ ID NO: 2477858 - RNA, 19 nt, Artificial Sequence
  Description of Artificial Sequence: Synthetic oligonucleotide
  Sense strand starting at position 998 of SEQ ID NO: 1887516
uugggucauuuggagugau

SEQ ID NO: 2477859 - RNA, 19 nt, Artificial Sequence
  Description of Artificial Sequence: Synthetic oligonucleotide
  Antisense strand to SEQ ID NO: 2477858
aucacuccaaaugacccaa

SEQ ID NO: 2477860 - RNA, 19 nt, Artificial Sequence
  Description of Artificial Sequence: Synthetic oligonucleotide
  Sense strand starting at position 1094 of SEQ ID NO: 1887516
aggauaagugcccagugga

SEQ ID NO: 2477861 - RNA, 19 nt, Artificial Sequence
  Description of Artificial Sequence: Synthetic oligonucleotide
  Antisense strand to SEQ ID NO: 2477860
uccacugggcacuuauccu

SEQ ID NO: 2477862 - RNA, 19 nt, Artificial Sequence
  Description of Artificial Sequence: Synthetic oligonucleotide
  Sense strand starting at position 1115 of SEQ ID NO: 1887516
gguuuaguugcugggagag

SEQ ID NO: 2477863 - RNA, 19 nt, Artificial Sequence
  Description of Artificial Sequence: Synthetic oligonucleotide
  Antisense strand to SEQ ID NO: 2477862
cucucccagcaacuaaacc

SEQ ID NO: 2477864 - RNA, 19 nt, Artificial Sequence
  Description of Artificial Sequence: Synthetic oligonucleotide
  Sense strand starting at position 1144 of SEQ ID NO: 1887516
gaugguuuaccauguccaa

SEQ ID NO: 2477865 - RNA, 19 nt, Artificial Sequence
  Description of Artificial Sequence: Synthetic oligonucleotide
  Antisense strand to SEQ ID NO: 2477864
uuggacaugguaaaccauc

SEQ ID NO: 2477866 - RNA, 19 nt, Artificial Sequence
  Description of Artificial Sequence: Synthetic oligonucleotide
  Sense strand starting at position 1172 of SEQ ID NO: 1887516
aacaguucugccugaguug

SEQ ID NO: 2477867 - RNA, 19 nt, Artificial Sequence
  Description of Artificial Sequence: Synthetic oligonucleotide
  Antisense strand to SEQ ID NO: 2477866
caacucaggcagaacuguu

SEQ ID NO: 2477868 - RNA, 19 nt, Artificial Sequence
  Description of Artificial Sequence: Synthetic oligonucleotide
  Sense strand starting at position 1173 of SEQ ID NO: 1887516
acaguucugccugaguugu

SEQ ID NO: 2477869 - RNA, 19 nt, Artificial Sequence
  Description of Artificial Sequence: Synthetic oligonucleotide
  Antisense strand to SEQ ID NO: 2477868
acaacucaggcagaacugu

SEQ ID NO: 2477870 - RNA, 19 nt, Artificial Sequence
  Description of Artificial Sequence: Synthetic oligonucleotide
  Sense strand starting at position 1181 of SEQ ID NO: 1887516
gccugaguuguuucuugcu

SEQ ID NO: 2477871 - RNA, 19 nt, Artificial Sequence
  Description of Artificial Sequence: Synthetic oligonucleotide
  Antisense strand to SEQ ID NO: 2477870
agcaagaaacaacucaggc

SEQ ID NO: 2477872 - RNA, 19 nt, Artificial Sequence
  Description of Artificial Sequence: Synthetic oligonucleotide
  Sense strand starting at position 1431 of SEQ ID NO: 1887516
gaaggaagugucuggugga

SEQ ID NO: 2477873 - RNA, 19 nt, Artificial Sequence
  Description of Artificial Sequence: Synthetic oligonucleotide
  Antisense strand to SEQ ID NO: 2477872
uccaccagacacuuccuuc

SEQ ID NO: 2477874 - RNA, 19 nt, Artificial Sequence
  Description of Artificial Sequence: Synthetic oligonucleotide
  Sense strand starting at position 1444 of SEQ ID NO: 1887516
gguggaaucuggguuuccu

SEQ ID NO: 2477875 - RNA, 19 nt, Artificial Sequence
  Description of Artificial Sequence: Synthetic oligonucleotide
  Antisense strand to SEQ ID NO: 2477874
aggaaacccagauuccacc

SEQ ID NO: 2477876 - RNA, 19 nt, Artificial Sequence
  Description of Artificial Sequence: Synthetic oligonucleotide
  Sense strand starting at position 1532 of SEQ ID NO: 1887516
aagucaguagacuguggua

SEQ ID NO: 2477877 - RNA, 19 nt, Artificial Sequence
  Description of Artificial Sequence: Synthetic oligonucleotide
  Antisense strand to SEQ ID NO: 2477876
uaccacagucuacugacuu

SEQ ID NO: 2477878 - RNA, 19 nt, Artificial Sequence
  Description of Artificial Sequence: Synthetic oligonucleotide
  Sense strand starting at position 1650 of SEQ ID NO: 1887516
cagagaugcccaggaacuu

SEQ ID NO: 2477879 - RNA, 19 nt, Artificial Sequence
  Description of Artificial Sequence: Synthetic oligonucleotide
  Antisense strand to SEQ ID NO: 2477878
aaguuccugggcaucucug

SEQ ID NO: 2477880 - RNA, 19 nt, Artificial Sequence
  Description of Artificial Sequence: Synthetic oligonucleotide
  Sense strand starting at position 1662 of SEQ ID NO: 1887516
ggaacuugcucuuuaguaa

SEQ ID NO: 2477881 - RNA, 19 nt, Artificial Sequence
  Description of Artificial Sequence: Synthetic oligonucleotide
  Antisense strand to SEQ ID NO: 2477880
uuacuaaagagcaaguucc

SEQ ID NO: 2477882 - RNA, 19 nt, Artificial Sequence
  Description of Artificial Sequence: Synthetic oligonucleotide
  Sense strand starting at position 1759 of SEQ ID NO: 1887516
gggcaugaggacuauugca

SEQ ID NO: 2477883 - RNA, 19 nt, Artificial Sequence
  Description of Artificial Sequence: Synthetic oligonucleotide
  Antisense strand to SEQ ID NO: 2477882
ugcaauaguccucaugccc

SEQ ID NO: 2477884 - RNA, 19 nt, Artificial Sequence
  Description of Artificial Sequence: Synthetic oligonucleotide
  Sense strand starting at position 1767 of SEQ ID NO: 1887516
ggacuauugcaauguggaa

SEQ ID NO: 2477885 - RNA, 19 nt, Artificial Sequence
  Description of Artificial Sequence: Synthetic oligonucleotide
  Antisense strand to SEQ ID NO: 2477884
uuccacauugcaauagucc

SEQ ID NO: 2477886 - RNA, 19 nt, Artificial Sequence
  Description of Artificial Sequence: Synthetic oligonucleotide
  Sense strand starting at position 1769 of SEQ ID NO: 1887516
acuauugcaauguggaaga

SEQ ID NO: 2477887 - RNA, 19 nt, Artificial Sequence
  Description of Artificial Sequence: Synthetic oligonucleotide
  Antisense strand to SEQ ID NO: 2477886
ucuuccacauugcaauagu

SEQ ID NO: 2477888 - RNA, 19 nt, Artificial Sequence
  Description of Artificial Sequence: Synthetic oligonucleotide
  Sense strand starting at position 1795 of SEQ ID NO: 1887516
gcacauugucugggcugaa

SEQ ID NO: 2477889 - RNA, 19 nt, Artificial Sequence
  Description of Artificial Sequence: Synthetic oligonucleotide
  Antisense strand to SEQ ID NO: 2477888
uucagcccagacaaugugc

SEQ ID NO: 2477890 - RNA, 19 nt, Artificial Sequence
  Description of Artificial Sequence: Synthetic oligonucleotide
  Sense strand starting at position 1858 of SEQ ID NO: 1887516
agggcuucagcauaagagu

SEQ ID NO: 2477891 - RNA, 19 nt, Artificial Sequence
  Description of Artificial Sequence: Synthetic oligonucleotide
  Antisense strand to SEQ ID NO: 2477890
acucuuaugcugaagcccu

SEQ ID NO: 2477892 - RNA, 19 nt, Artificial Sequence
  Description of Artificial Sequence: Synthetic oligonucleotide
  Sense strand starting at position 2234 of SEQ ID NO: 1887516
ggaucauggagaugugauc

SEQ ID NO: 2477893 - RNA, 19 nt, Artificial Sequence
  Description of Artificial Sequence: Synthetic oligonucleotide
  Antisense strand to SEQ ID NO: 2477892
gaucacaucuccaugaucc

SEQ ID NO: 2477894 - RNA, 19 nt, Artificial Sequence
  Description of Artificial Sequence: Synthetic oligonucleotide
  Sense strand starting at position 2302 of SEQ ID NO: 1887516
uugggaugaucacugauuc

SEQ ID NO: 2477895 - RNA, 19 nt, Artificial Sequence
  Description of Artificial Sequence: Synthetic oligonucleotide
  Antisense strand to SEQ ID NO: 2477894
gaaucagugaucaucccaa

SEQ ID NO: 2477896 - RNA, 19 nt, Artificial Sequence
  Description of Artificial Sequence: Synthetic oligonucleotide
  Sense strand starting at position 2303 of SEQ ID NO: 1887516
ugggaugaucacugauucu

SEQ ID NO: 2477897 - RNA, 19 nt, Artificial Sequence
  Description of Artificial Sequence: Synthetic oligonucleotide
  Antisense strand to SEQ ID NO: 2477896
agaaucagugaucauccca

SEQ ID NO: 2477898 - RNA, 19 nt, Artificial Sequence
  Description of Artificial Sequence: Synthetic oligonucleotide
  Sense strand starting at position 2429 of SEQ ID NO: 1887516
ugucucagccuccaggaua

SEQ ID NO: 2477899 - RNA, 19 nt, Artificial Sequence
  Description of Artificial Sequence: Synthetic oligonucleotide
  Antisense strand to SEQ ID NO: 2477898
uauccuggaggcugagaca

SEQ ID NO: 2477900 - RNA, 19 nt, Artificial Sequence
  Description of Artificial Sequence: Synthetic oligonucleotide
  Sense strand starting at position 2695 of SEQ ID NO: 1887516
ccugaaauaucagaaugau

SEQ ID NO: 2477901 - RNA, 19 nt, Artificial Sequence
  Description of Artificial Sequence: Synthetic oligonucleotide
  Antisense strand to SEQ ID NO: 2477900
aucauucugauauuucagg

SEQ ID NO: 2477902 - RNA, 19 nt, Artificial Sequence
  Description of Artificial Sequence: Synthetic oligonucleotide
  Sense strand starting at position 2701 of SEQ ID NO: 1887516
auaucagaaugaucggauu

SEQ ID NO: 2477903 - RNA, 19 nt, Artificial Sequence
  Description of Artificial Sequence: Synthetic oligonucleotide
  Antisense strand to SEQ ID NO: 2477902
aauccgaucauucugauau

SEQ ID NO: 2477904 - RNA, 19 nt, Artificial Sequence
  Description of Artificial Sequence: Synthetic oligonucleotide
  Sense strand starting at position 2707 of SEQ ID NO: 1887516
gaaugaucggauugugaga

SEQ ID NO: 2477905 - RNA, 19 nt, Artificial Sequence
  Description of Artificial Sequence: Synthetic oligonucleotide
  Antisense strand to SEQ ID NO: 2477904
ucucacaauccgaucauuc

SEQ ID NO: 2477906 - RNA, 19 nt, Artificial Sequence
  Description of Artificial Sequence: Synthetic oligonucleotide
  Sense strand starting at position 2720 of SEQ ID NO: 1887516
gugagacuuccuggucccu

SEQ ID NO: 2477907 - RNA, 19 nt, Artificial Sequence
  Description of Artificial Sequence: Synthetic oligonucleotide
  Antisense strand to SEQ ID NO: 2477906
agggaccaggaagucucac

SEQ ID NO: 2477908 - RNA, 19 nt, Artificial Sequence
  Description of Artificial Sequence: Synthetic oligonucleotide
  Sense strand starting at position 2722 of SEQ ID NO: 1887516
gagacuuccuggucccuau

SEQ ID NO: 2477909 - RNA, 19 nt, Artificial Sequence
  Description of Artificial Sequence: Synthetic oligonucleotide
  Antisense strand to SEQ ID NO: 2477908
auagggaccaggaagucuc

SEQ ID NO: 2477910 - RNA, 19 nt, Artificial Sequence
  Description of Artificial Sequence: Synthetic oligonucleotide
  Sense strand starting at position 3049 of SEQ ID NO: 1887516
gcccuccuaggucagaauu

SEQ ID NO: 2477911 - RNA, 19 nt, Artificial Sequence
  Description of Artificial Sequence: Synthetic oligonucleotide
  Antisense strand to SEQ ID NO: 2477910
aauucugaccuaggagggc

SEQ ID NO: 2477912 - RNA, 19 nt, Artificial Sequence
  Description of Artificial Sequence: Synthetic oligonucleotide
  Sense strand starting at position 3057 of SEQ ID NO: 1887516
aggucagaauuguccucau

SEQ ID NO: 2477913 - RNA, 19 nt, Artificial Sequence
  Description of Artificial Sequence: Synthetic oligonucleotide
  Antisense strand to SEQ ID NO: 2477912
augaggacaauucugaccu

SEQ ID NO: 2477914 - RNA, 19 nt, Artificial Sequence
  Description of Artificial Sequence: Synthetic oligonucleotide
  Sense strand starting at position 3101 of SEQ ID NO: 1887516
ugaaaugucuagcuaucag

SEQ ID NO: 2477915 - RNA, 19 nt, Artificial Sequence
  Description of Artificial Sequence: Synthetic oligonucleotide
  Antisense strand to SEQ ID NO: 2477914
cugauagcuagacauuuca

SEQ ID NO: 2477916 - RNA, 19 nt, Artificial Sequence
  Description of Artificial Sequence: Synthetic oligonucleotide
  Sense strand starting at position 3475 of SEQ ID NO: 1887516
aaagaauuaggguggcauu

SEQ ID NO: 2477917 - RNA, 19 nt, Artificial Sequence
  Description of Artificial Sequence: Synthetic oligonucleotide
  Antisense strand to SEQ ID NO: 2477916
aaugccacccuaauucuuu

SEQ ID NO: 2477918 - RNA, 19 nt, Artificial Sequence
  Description of Artificial Sequence: Synthetic oligonucleotide
  Sense strand starting at position 3556 of SEQ ID NO: 1887516
auuauaagaguccacuguu

SEQ ID NO: 2477919 - RNA, 19 nt, Artificial Sequence
  Description of Artificial Sequence: Synthetic oligonucleotide
  Antisense strand to SEQ ID NO: 2477918
aacaguggacucuuauaau

SEQ ID NO: 2477920 - RNA, 19 nt, Artificial Sequence
  Description of Artificial Sequence: Synthetic oligonucleotide
  Sense strand starting at position 3559 of SEQ ID NO: 1887516
auaagaguccacuguuaac

SEQ ID NO: 2477921 - RNA, 19 nt, Artificial Sequence
  Description of Artificial Sequence: Synthetic oligonucleotide
  Antisense strand to SEQ ID NO: 2477920
guuaacaguggacucuuau

SEQ ID NO: 2477922 - RNA, 19 nt, Artificial Sequence
  Description of Artificial Sequence: Synthetic oligonucleotide
  Sense strand starting at position 3565 of SEQ ID NO: 1887516
guccacuguuaacucuaua

SEQ ID NO: 2477923 - RNA, 19 nt, Artificial Sequence
  Description of Artificial Sequence: Synthetic oligonucleotide
  Antisense strand to SEQ ID NO: 2477922
uauagaguuaacaguggac

SEQ ID NO: 2477924 - RNA, 19 nt, Artificial Sequence
  Description of Artificial Sequence: Synthetic oligonucleotide
  Sense strand starting at position 3824 of SEQ ID NO: 1887516
accacucguucccuggaau

SEQ ID NO: 2477925 - RNA, 19 nt, Artificial Sequence
  Description of Artificial Sequence: Synthetic oligonucleotide
  Antisense strand to SEQ ID NO: 2477924
auuccagggaacgaguggu

SEQ ID NO: 2477926 - RNA, 19 nt, Artificial Sequence
  Description of Artificial Sequence: Synthetic oligonucleotide
  Sense strand starting at position 3860 of SEQ ID NO: 1887516
uuugccucagcuugaauga

SEQ ID NO: 2477927 - RNA, 19 nt, Artificial Sequence
  Description of Artificial Sequence: Synthetic oligonucleotide
  Antisense strand to SEQ ID NO: 2477926
ucauucaagcugaggcaaa

SEQ ID NO: 2477928 - RNA, 19 nt, Artificial Sequence
  Description of Artificial Sequence: Synthetic oligonucleotide
  Sense strand starting at position 3884 of SEQ ID NO: 1887516
accugaauccaguguccca

SEQ ID NO: 2477929 - RNA, 19 nt, Artificial Sequence
  Description of Artificial Sequence: Synthetic oligonucleotide
  Antisense strand to SEQ ID NO: 2477928
ugggacacuggauucaggu

SEQ ID NO: 2477930 - RNA, 19 nt, Artificial Sequence
  Description of Artificial Sequence: Synthetic oligonucleotide
  Sense strand starting at position 263 of SEQ ID NO: 1887517
acaagaacuugccuuaguu

SEQ ID NO: 2477931 - RNA, 19 nt, Artificial Sequence
  Description of Artificial Sequence: Synthetic oligonucleotide
  Antisense strand to SEQ ID NO: 2477930
aacuaaggcaaguucuugu

SEQ ID NO: 2477932 - RNA, 19 nt, Artificial Sequence
  Description of Artificial Sequence: Synthetic oligonucleotide
  Sense strand starting at position 292 of SEQ ID NO: 1887517
ucagcacugggcugagauu

SEQ ID NO: 2477933 - RNA, 19 nt, Artificial Sequence
  Description of Artificial Sequence: Synthetic oligonucleotide
  Antisense strand to SEQ ID NO: 2477932
aaucucagcccagugcuga

SEQ ID NO: 2477934 - RNA, 19 nt, Artificial Sequence
  Description of Artificial Sequence: Synthetic oligonucleotide
  Sense strand starting at position 322 of SEQ ID NO: 1887517
cucucugaguccuuccgaa

SEQ ID NO: 2477935 - RNA, 19 nt, Artificial Sequence
  Description of Artificial Sequence: Synthetic oligonucleotide
  Antisense strand to SEQ ID NO: 2477934
uucggaaggacucagagag

SEQ ID NO: 2477936 - RNA, 19 nt, Artificial Sequence
  Description of Artificial Sequence: Synthetic oligonucleotide
  Sense strand starting at position 330 of SEQ ID NO: 1887517
guccuuccgaagcaagauu

SEQ ID NO: 2477937 - RNA, 19 nt, Artificial Sequence
  Description of Artificial Sequence: Synthetic oligonucleotide
  Antisense strand to SEQ ID NO: 2477936
aaucuugcuucggaaggac

SEQ ID NO: 2477938 - RNA, 19 nt, Artificial Sequence
  Description of Artificial Sequence: Synthetic oligonucleotide
  Sense strand starting at position 445 of SEQ ID NO: 1887517
agaugagccugauauuagg

SEQ ID NO: 2477939 - RNA, 19 nt, Artificial Sequence
  Description of Artificial Sequence: Synthetic oligonucleotide
  Antisense strand to SEQ ID NO: 2477938
ccuaauaucaggcucaucu

SEQ ID NO: 2477940 - RNA, 19 nt, Artificial Sequence
  Description of Artificial Sequence: Synthetic oligonucleotide
  Sense strand starting at position 628 of SEQ ID NO: 1887517
caguccucgccguuuauga

SEQ ID NO: 2477941 - RNA, 19 nt, Artificial Sequence
  Description of Artificial Sequence: Synthetic oligonucleotide
  Antisense strand to SEQ ID NO: 2477940
ucauaaacggcgaggacug

SEQ ID NO: 2477942 - RNA, 19 nt, Artificial Sequence
  Description of Artificial Sequence: Synthetic oligonucleotide
  Sense strand starting at position 629 of SEQ ID NO: 1887517
aguccucgccguuuaugau

SEQ ID NO: 2477943 - RNA, 19 nt, Artificial Sequence
  Description of Artificial Sequence: Synthetic oligonucleotide
  Antisense strand to SEQ ID NO: 2477942
aucauaaacggcgaggacu

SEQ ID NO: 2477944 - RNA, 19 nt, Artificial Sequence
  Description of Artificial Sequence: Synthetic oligonucleotide
  Sense strand starting at position 630 of SEQ ID NO: 1887517
guccucgccguuuaugauu

SEQ ID NO: 2477945 - RNA, 19 nt, Artificial Sequence
  Description of Artificial Sequence: Synthetic oligonucleotide
  Antisense strand to SEQ ID NO: 2477944
aaucauaaacggcgaggac

SEQ ID NO: 2477946 - RNA, 19 nt, Artificial Sequence
  Description of Artificial Sequence: Synthetic oligonucleotide
  Sense strand starting at position 641 of SEQ ID NO: 1887517
uuaugauuuggcugcagcu

SEQ ID NO: 2477947 - RNA, 19 nt, Artificial Sequence
  Description of Artificial Sequence: Synthetic oligonucleotide
  Antisense strand to SEQ ID NO: 2477946
agcugcagccaaaucauaa

SEQ ID NO: 2477948 - RNA, 19 nt, Artificial Sequence
  Description of Artificial Sequence: Synthetic oligonucleotide
  Sense strand starting at position 1171 of SEQ ID NO: 1887517
gcuucaagagcuggguuau

SEQ ID NO: 2477949 - RNA, 19 nt, Artificial Sequence
  Description of Artificial Sequence: Synthetic oligonucleotide
  Antisense strand to SEQ ID NO: 2477948
auaacccagcucuugaagc

SEQ ID NO: 2477950 - RNA, 19 nt, Artificial Sequence
  Description of Artificial Sequence: Synthetic oligonucleotide
  Sense strand starting at position 1172 of SEQ ID NO: 1887517
cuucaagagcuggguuaug

SEQ ID NO: 2477951 - RNA, 19 nt, Artificial Sequence
  Description of Artificial Sequence: Synthetic oligonucleotide
  Antisense strand to SEQ ID NO: 2477950
cauaacccagcucuugaag

SEQ ID NO: 2477952 - RNA, 19 nt, Artificial Sequence
  Description of Artificial Sequence: Synthetic oligonucleotide
  Sense strand starting at position 1250 of SEQ ID NO: 1887517
gugagcucuggaggugaga

SEQ ID NO: 2477953 - RNA, 19 nt, Artificial Sequence
  Description of Artificial Sequence: Synthetic oligonucleotide
  Antisense strand to SEQ ID NO: 2477952
ucucaccuccagagcucac

SEQ ID NO: 2477954 - RNA, 19 nt, Artificial Sequence
  Description of Artificial Sequence: Synthetic oligonucleotide
  Sense strand starting at position 1271 of SEQ ID NO: 1887517
ggugccaucgcggugcaaa

SEQ ID NO: 2477955 - RNA, 19 nt, Artificial Sequence
  Description of Artificial Sequence: Synthetic oligonucleotide
  Antisense strand to SEQ ID NO: 2477954
uuugcaccgcgauggcacc

SEQ ID NO: 2477956 - RNA, 19 nt, Artificial Sequence
  Description of Artificial Sequence: Synthetic oligonucleotide
  Sense strand starting at position 1313 of SEQ ID NO: 1887517
agaggagucuaggcucaua

SEQ ID NO: 2477957 - RNA, 19 nt, Artificial Sequence
  Description of Artificial Sequence: Synthetic oligonucleotide
  Antisense strand to SEQ ID NO: 2477956
uaugagccuagacuccucu

SEQ ID NO: 2477958 - RNA, 19 nt, Artificial Sequence
  Description of Artificial Sequence: Synthetic oligonucleotide
  Sense strand starting at position 1376 of SEQ ID NO: 1887517
ggaguuguugcugggagca

SEQ ID NO: 2477959 - RNA, 19 nt, Artificial Sequence
  Description of Artificial Sequence: Synthetic oligonucleotide
  Antisense strand to SEQ ID NO: 2477958
ugcucccagcaacaacucc

SEQ ID NO: 2477960 - RNA, 19 nt, Artificial Sequence
  Description of Artificial Sequence: Synthetic oligonucleotide
  Sense strand starting at position 1416 of SEQ ID NO: 1887517
gcagacugaugcucaaaga

SEQ ID NO: 2477961 - RNA, 19 nt, Artificial Sequence
  Description of Artificial Sequence: Synthetic oligonucleotide
  Antisense strand to SEQ ID NO: 2477960
ucuuugagcaucagucugc

SEQ ID NO: 2477962 - RNA, 19 nt, Artificial Sequence
  Description of Artificial Sequence: Synthetic oligonucleotide
  Sense strand starting at position 1523 of SEQ ID NO: 1887517
uuuauaguccugugaggug

SEQ ID NO: 2477963 - RNA, 19 nt, Artificial Sequence
  Description of Artificial Sequence: Synthetic oligonucleotide
  Antisense strand to SEQ ID NO: 2477962
caccucacaggacuauaaa

SEQ ID NO: 2477964 - RNA, 19 nt, Artificial Sequence
  Description of Artificial Sequence: Synthetic oligonucleotide
  Sense strand starting at position 1683 of SEQ ID NO: 1887517
uugucacuccaccagauau

SEQ ID NO: 2477965 - RNA, 19 nt, Artificial Sequence
  Description of Artificial Sequence: Synthetic oligonucleotide
  Antisense strand to SEQ ID NO: 2477964
auaucugguggagugacaa

SEQ ID NO: 2477966 - RNA, 19 nt, Artificial Sequence
  Description of Artificial Sequence: Synthetic oligonucleotide
  Sense strand starting at position 2103 of SEQ ID NO: 1887517
ggacguuauuagguaggca

SEQ ID NO: 2477967 - RNA, 19 nt, Artificial Sequence
  Description of Artificial Sequence: Synthetic oligonucleotide
  Antisense strand to SEQ ID NO: 2477966
ugccuaccuaauaacgucc

SEQ ID NO: 2477968 - RNA, 19 nt, Artificial Sequence
  Description of Artificial Sequence: Synthetic oligonucleotide
  Sense strand starting at position 2104 of SEQ ID NO: 1887517
gacguuauuagguaggcaa

SEQ ID NO: 2477969 - RNA, 19 nt, Artificial Sequence
  Description of Artificial Sequence: Synthetic oligonucleotide
  Antisense strand to SEQ ID NO: 2477968
uugccuaccuaauaacguc

SEQ ID NO: 2477970 - RNA, 19 nt, Artificial Sequence
  Description of Artificial Sequence: Synthetic oligonucleotide
  Sense strand starting at position 2106 of SEQ ID NO: 1887517
cguuauuagguaggcaaga

SEQ ID NO: 2477971 - RNA, 19 nt, Artificial Sequence
  Description of Artificial Sequence: Synthetic oligonucleotide
  Antisense strand to SEQ ID NO: 2477970
ucuugccuaccuaauaacg

SEQ ID NO: 2477972 - RNA, 19 nt, Artificial Sequence
  Description of Artificial Sequence: Synthetic oligonucleotide
  Sense strand starting at position 2289 of SEQ ID NO: 1887517
gagagauggugucuagcca

SEQ ID NO: 2477973 - RNA, 19 nt, Artificial Sequence
  Description of Artificial Sequence: Synthetic oligonucleotide
  Antisense strand to SEQ ID NO: 2477972
uggcuagacaccaucucuc

SEQ ID NO: 2477974 - RNA, 19 nt, Artificial Sequence
  Description of Artificial Sequence: Synthetic oligonucleotide
  Sense strand starting at position 2359 of SEQ ID NO: 1887517
cagagugcuugagagauau

SEQ ID NO: 2477975 - RNA, 19 nt, Artificial Sequence
  Description of Artificial Sequence: Synthetic oligonucleotide
  Antisense strand to SEQ ID NO: 2477974
auaucucucaagcacucug

SEQ ID NO: 2477976 - RNA, 19 nt, Artificial Sequence
  Description of Artificial Sequence: Synthetic oligonucleotide
  Sense strand starting at position 2363 of SEQ ID NO: 1887517
gugcuugagagauauccuc

SEQ ID NO: 2477977 - RNA, 19 nt, Artificial Sequence
  Description of Artificial Sequence: Synthetic oligonucleotide
  Antisense strand to SEQ ID NO: 2477976
gaggauaucucucaagcac

SEQ ID NO: 2477978 - RNA, 19 nt, Artificial Sequence
  Description of Artificial Sequence: Synthetic oligonucleotide
  Sense strand starting at position 2371 of SEQ ID NO: 1887517
gagauauccucagagacag

SEQ ID NO: 2477979 - RNA, 19 nt, Artificial Sequence
  Description of Artificial Sequence: Synthetic oligonucleotide
  Antisense strand to SEQ ID NO: 2477978
cugucucugaggauaucuc

SEQ ID NO: 2477980 - RNA, 19 nt, Artificial Sequence
  Description of Artificial Sequence: Synthetic oligonucleotide
  Sense strand starting at position 2381 of SEQ ID NO: 1887517
cagagacagucugagaguu

SEQ ID NO: 2477981 - RNA, 19 nt, Artificial Sequence
  Description of Artificial Sequence: Synthetic oligonucleotide
  Antisense strand to SEQ ID NO: 2477980
aacucucagacugucucug

SEQ ID NO: 2477982 - RNA, 19 nt, Artificial Sequence
  Description of Artificial Sequence: Synthetic oligonucleotide
  Sense strand starting at position 2383 of SEQ ID NO: 1887517
gagacagucugagaguuag

SEQ ID NO: 2477983 - RNA, 19 nt, Artificial Sequence
  Description of Artificial Sequence: Synthetic oligonucleotide
  Antisense strand to SEQ ID NO: 2477982
cuaacucucagacugucuc

SEQ ID NO: 2477984 - RNA, 19 nt, Artificial Sequence
  Description of Artificial Sequence: Synthetic oligonucleotide
  Sense strand starting at position 2447 of SEQ ID NO: 1887517
gacagugacuccuaacuag

SEQ ID NO: 2477985 - RNA, 19 nt, Artificial Sequence
  Description of Artificial Sequence: Synthetic oligonucleotide
  Antisense strand to SEQ ID NO: 2477984
cuaguuaggagucacuguc

SEQ ID NO: 2477986 - RNA, 19 nt, Artificial Sequence
  Description of Artificial Sequence: Synthetic oligonucleotide
  Sense strand starting at position 2450 of SEQ ID NO: 1887517
agugacuccuaacuagaga

SEQ ID NO: 2477987 - RNA, 19 nt, Artificial Sequence
  Description of Artificial Sequence: Synthetic oligonucleotide
  Antisense strand to SEQ ID NO: 2477986
ucucuaguuaggagucacu

SEQ ID NO: 2477988 - RNA, 19 nt, Artificial Sequence
  Description of Artificial Sequence: Synthetic oligonucleotide
  Sense strand starting at position 2469 of SEQ ID NO: 1887517
cagugagagaucugucuag

SEQ ID NO: 2477989 - RNA, 19 nt, Artificial Sequence
  Description of Artificial Sequence: Synthetic oligonucleotide
  Antisense strand to SEQ ID NO: 2477988
cuagacagaucucucacug

SEQ ID NO: 2477990 - RNA, 19 nt, Artificial Sequence
  Description of Artificial Sequence: Synthetic oligonucleotide
  Sense strand starting at position 2516 of SEQ ID NO: 1887517
cugagaauccagcgacaug

SEQ ID NO: 2477991 - RNA, 19 nt, Artificial Sequence
  Description of Artificial Sequence: Synthetic oligonucleotide
  Antisense strand to SEQ ID NO: 2477990
caugucgcuggauucucag

SEQ ID NO: 2477992 - RNA, 19 nt, Artificial Sequence
  Description of Artificial Sequence: Synthetic oligonucleotide
  Sense strand starting at position 2546 of SEQ ID NO: 1887517
agaguuggaucaugaacac

SEQ ID NO: 2477993 - RNA, 19 nt, Artificial Sequence
  Description of Artificial Sequence: Synthetic oligonucleotide
  Antisense strand to SEQ ID NO: 2477992
guguucaugauccaacucu

SEQ ID NO: 2477994 - RNA, 19 nt, Artificial Sequence
  Description of Artificial Sequence: Synthetic oligonucleotide
  Sense strand starting at position 3126 of SEQ ID NO: 1887517
uucugugcuucuccagcaa

SEQ ID NO: 2477995 - RNA, 19 nt, Artificial Sequence
  Description of Artificial Sequence: Synthetic oligonucleotide
  Antisense strand to SEQ ID NO: 2477994
uugcuggagaagcacagaa

SEQ ID NO: 2477996 - RNA, 19 nt, Artificial Sequence
  Description of Artificial Sequence: Synthetic oligonucleotide
  Sense strand starting at position 3130 of SEQ ID NO: 1887517
gugcuucuccagcaaauuu

SEQ ID NO: 2477997 - RNA, 19 nt, Artificial Sequence
  Description of Artificial Sequence: Synthetic oligonucleotide
  Antisense strand to SEQ ID NO: 2477996
aaauuugcuggagaagcac

SEQ ID NO: 2477998 - RNA, 19 nt, Artificial Sequence
  Description of Artificial Sequence: Synthetic oligonucleotide
  Sense strand starting at position 3165 of SEQ ID NO: 1887517
agccuacaucacgaacuau

SEQ ID NO: 2477999 - RNA, 19 nt, Artificial Sequence
  Description of Artificial Sequence: Synthetic oligonucleotide
  Antisense strand to SEQ ID NO: 2477998
auaguucgugauguaggcu

SEQ ID NO: 2478000 - RNA, 19 nt, Artificial Sequence
  Description of Artificial Sequence: Synthetic oligonucleotide
  Sense strand starting at position 3282 of SEQ ID NO: 1887517
agagguaauucagggaaag

SEQ ID NO: 2478001 - RNA, 19 nt, Artificial Sequence
  Description of Artificial Sequence: Synthetic oligonucleotide
  Antisense strand to SEQ ID NO: 2478000
cuuucccugaauuaccucu

SEQ ID NO: 2478002 - RNA, 19 nt, Artificial Sequence
  Description of Artificial Sequence: Synthetic oligonucleotide
  Sense strand starting at position 3431 of SEQ ID NO: 1887517
cagcaaaguccucgucacu

SEQ ID NO: 2478003 - RNA, 19 nt, Artificial Sequence
  Description of Artificial Sequence: Synthetic oligonucleotide
  Antisense strand to SEQ ID NO: 2478002
agugacgaggacuuugcug

SEQ ID NO: 2478004 - RNA, 19 nt, Artificial Sequence
  Description of Artificial Sequence: Synthetic oligonucleotide
  Sense strand starting at position 3705 of SEQ ID NO: 1887517
guuuacguaccaggauuaa

SEQ ID NO: 2478005 - RNA, 19 nt, Artificial Sequence
  Description of Artificial Sequence: Synthetic oligonucleotide
  Antisense strand to SEQ ID NO: 2478004
uuaauccugguacguaaac

SEQ ID NO: 2478006 - RNA, 19 nt, Artificial Sequence
  Description of Artificial Sequence: Synthetic oligonucleotide
  Sense strand starting at position 3926 of SEQ ID NO: 1887517
caaguuacugcccgaugga

SEQ ID NO: 2478007 - RNA, 19 nt, Artificial Sequence
  Description of Artificial Sequence: Synthetic oligonucleotide
  Antisense strand to SEQ ID NO: 2478006
uccaucgggcaguaacuug

SEQ ID NO: 2478008 - RNA, 19 nt, Artificial Sequence
  Description of Artificial Sequence: Synthetic oligonucleotide
  Sense strand starting at position 3927 of SEQ ID NO: 1887517
aaguuacugcccgauggau

SEQ ID NO: 2478009 - RNA, 19 nt, Artificial Sequence
  Description of Artificial Sequence: Synthetic oligonucleotide
  Antisense strand to SEQ ID NO: 2478008
auccaucgggcaguaacuu

SEQ ID NO: 2478010 - RNA, 19 nt, Artificial Sequence
  Description of Artificial Sequence: Synthetic oligonucleotide
  Sense strand starting at position 113 of SEQ ID NO: 1887518
ccacucuuguuaguaguca

SEQ ID NO: 2478011 - RNA, 19 nt, Artificial Sequence
  Description of Artificial Sequence: Synthetic oligonucleotide
  Antisense strand to SEQ ID NO: 2478010
ugacuacuaacaagagugg

SEQ ID NO: 2478012 - RNA, 19 nt, Artificial Sequence
  Description of Artificial Sequence: Synthetic oligonucleotide
  Sense strand starting at position 117 of SEQ ID NO: 1887518
ucuuguuaguagucagauc

SEQ ID NO: 2478013 - RNA, 19 nt, Artificial Sequence
  Description of Artificial Sequence: Synthetic oligonucleotide
  Antisense strand to SEQ ID NO: 2478012
gaucugacuacuaacaaga

SEQ ID NO: 2478014 - RNA, 19 nt, Artificial Sequence
  Description of Artificial Sequence: Synthetic oligonucleotide
  Sense strand starting at position 118 of SEQ ID NO: 1887518
cuuguuaguagucagaucu

SEQ ID NO: 2478015 - RNA, 19 nt, Artificial Sequence
  Description of Artificial Sequence: Synthetic oligonucleotide
  Antisense strand to SEQ ID NO: 2478014
agaucugacuacuaacaag

SEQ ID NO: 2478016 - RNA, 19 nt, Artificial Sequence
  Description of Artificial Sequence: Synthetic oligonucleotide
  Sense strand starting at position 135 of SEQ ID NO: 1887518
cuucgaggcuucucauaug

SEQ ID NO: 2478017 - RNA, 19 nt, Artificial Sequence
  Description of Artificial Sequence: Synthetic oligonucleotide
  Antisense strand to SEQ ID NO: 2478016
cauaugagaagccucgaag

SEQ ID NO: 2478018 - RNA, 19 nt, Artificial Sequence
  Description of Artificial Sequence: Synthetic oligonucleotide
  Sense strand starting at position 150 of SEQ ID NO: 1887518
uaugacuccugcuugugaa

SEQ ID NO: 2478019 - RNA, 19 nt, Artificial Sequence
  Description of Artificial Sequence: Synthetic oligonucleotide
  Antisense strand to SEQ ID NO: 2478018
uucacaagcaggagucaua

SEQ ID NO: 2478020 - RNA, 19 nt, Artificial Sequence
  Description of Artificial Sequence: Synthetic oligonucleotide
  Sense strand starting at position 151 of SEQ ID NO: 1887518
augacuccugcuugugaau

SEQ ID NO: 2478021 - RNA, 19 nt, Artificial Sequence
  Description of Artificial Sequence: Synthetic oligonucleotide
  Antisense strand to SEQ ID NO: 2478020
auucacaagcaggagucau

SEQ ID NO: 2478022 - RNA, 19 nt, Artificial Sequence
  Description of Artificial Sequence: Synthetic oligonucleotide
  Sense strand starting at position 211 of SEQ ID NO: 1887518
gggaccaagcuuugccaau

SEQ ID NO: 2478023 - RNA, 19 nt, Artificial Sequence
  Description of Artificial Sequence: Synthetic oligonucleotide
  Antisense strand to SEQ ID NO: 2478022
auuggcaaagcuugguccc

SEQ ID NO: 2478024 - RNA, 19 nt, Artificial Sequence
  Description of Artificial Sequence: Synthetic oligonucleotide
  Sense strand starting at position 212 of SEQ ID NO: 1887518
ggaccaagcuuugccaaua

SEQ ID NO: 2478025 - RNA, 19 nt, Artificial Sequence
  Description of Artificial Sequence: Synthetic oligonucleotide
  Antisense strand to SEQ ID NO: 2478024
uauuggcaaagcuuggucc

SEQ ID NO: 2478026 - RNA, 19 nt, Artificial Sequence
  Description of Artificial Sequence: Synthetic oligonucleotide
  Sense strand starting at position 354 of SEQ ID NO: 1887518
aaugaucugccaggcugau

SEQ ID NO: 2478027 - RNA, 19 nt, Artificial Sequence
  Description of Artificial Sequence: Synthetic oligonucleotide
  Antisense strand to SEQ ID NO: 2478026
aucagccuggcagaucauu

SEQ ID NO: 2478028 - RNA, 19 nt, Artificial Sequence
  Description of Artificial Sequence: Synthetic oligonucleotide
  Sense strand starting at position 414 of SEQ ID NO: 1887518
gaagaagcaucagaucaug

SEQ ID NO: 2478029 - RNA, 19 nt, Artificial Sequence
  Description of Artificial Sequence: Synthetic oligonucleotide
  Antisense strand to SEQ ID NO: 2478028
caugaucugaugcuucuuc

SEQ ID NO: 2478030 - RNA, 19 nt, Artificial Sequence
  Description of Artificial Sequence: Synthetic oligonucleotide
  Sense strand starting at position 417 of SEQ ID NO: 1887518
gaagcaucagaucaugguu

SEQ ID NO: 2478031 - RNA, 19 nt, Artificial Sequence
  Description of Artificial Sequence: Synthetic oligonucleotide
  Antisense strand to SEQ ID NO: 2478030
aaccaugaucugaugcuuc

SEQ ID NO: 2478032 - RNA, 19 nt, Artificial Sequence
  Description of Artificial Sequence: Synthetic oligonucleotide
  Sense strand starting at position 506 of SEQ ID NO: 1887518
gggccaucuuuauucugua

SEQ ID NO: 2478033 - RNA, 19 nt, Artificial Sequence
  Description of Artificial Sequence: Synthetic oligonucleotide
  Antisense strand to SEQ ID NO: 2478032
uacagaauaaagauggccc

SEQ ID NO: 2478034 - RNA, 19 nt, Artificial Sequence
  Description of Artificial Sequence: Synthetic oligonucleotide
  Sense strand starting at position 548 of SEQ ID NO: 1887518
guguauuuccuguaauggu

SEQ ID NO: 2478035 - RNA, 19 nt, Artificial Sequence
  Description of Artificial Sequence: Synthetic oligonucleotide
  Antisense strand to SEQ ID NO: 2478034
accauuacaggaaauacac

SEQ ID NO: 2478036 - RNA, 19 nt, Artificial Sequence
  Description of Artificial Sequence: Synthetic oligonucleotide
  Sense strand starting at position 646 of SEQ ID NO: 1887518
ucuccuuccugagucgaaa

SEQ ID NO: 2478037 - RNA, 19 nt, Artificial Sequence
  Description of Artificial Sequence: Synthetic oligonucleotide
  Antisense strand to SEQ ID NO: 2478036
uuucgacucaggaaggaga

SEQ ID NO: 2478038 - RNA, 19 nt, Artificial Sequence
  Description of Artificial Sequence: Synthetic oligonucleotide
  Sense strand starting at position 969 of SEQ ID NO: 1887518
gcaaguucuccgcauacaa

SEQ ID NO: 2478039 - RNA, 19 nt, Artificial Sequence
  Description of Artificial Sequence: Synthetic oligonucleotide
  Antisense strand to SEQ ID NO: 2478038
uuguaugcggagaacuugc

SEQ ID NO: 2478040 - RNA, 19 nt, Artificial Sequence
  Description of Artificial Sequence: Synthetic oligonucleotide
  Sense strand starting at position 1042 of SEQ ID NO: 1887518
guccaugugucaucauaca

SEQ ID NO: 2478041 - RNA, 19 nt, Artificial Sequence
  Description of Artificial Sequence: Synthetic oligonucleotide
  Antisense strand to SEQ ID NO: 2478040
uguaugaugacacauggac

SEQ ID NO: 2478042 - RNA, 19 nt, Artificial Sequence
  Description of Artificial Sequence: Synthetic oligonucleotide
  Sense strand starting at position 1047 of SEQ ID NO: 1887518
ugugucaucauacaagagu

SEQ ID NO: 2478043 - RNA, 19 nt, Artificial Sequence
  Description of Artificial Sequence: Synthetic oligonucleotide
  Antisense strand to SEQ ID NO: 2478042
acucuuguaugaugacaca

SEQ ID NO: 2478044 - RNA, 19 nt, Artificial Sequence
  Description of Artificial Sequence: Synthetic oligonucleotide
  Sense strand starting at position 1115 of SEQ ID NO: 1887518
cgaguacucccaggugaau

SEQ ID NO: 2478045 - RNA, 19 nt, Artificial Sequence
  Description of Artificial Sequence: Synthetic oligonucleotide
  Antisense strand to SEQ ID NO: 2478044
auucaccugggaguacucg

SEQ ID NO: 2478046 - RNA, 19 nt, Artificial Sequence
  Description of Artificial Sequence: Synthetic oligonucleotide
  Sense strand starting at position 1231 of SEQ ID NO: 1887518
cucuguccacccugaggaa

SEQ ID NO: 2478047 - RNA, 19 nt, Artificial Sequence
  Description of Artificial Sequence: Synthetic oligonucleotide
  Antisense strand to SEQ ID NO: 2478046
uuccucaggguggacagag

SEQ ID NO: 2478048 - RNA, 19 nt, Artificial Sequence
  Description of Artificial Sequence: Synthetic oligonucleotide
  Sense strand starting at position 1463 of SEQ ID NO: 1887518
cauggugaggucugggaaa

SEQ ID NO: 2478049 - RNA, 19 nt, Artificial Sequence
  Description of Artificial Sequence: Synthetic oligonucleotide
  Antisense strand to SEQ ID NO: 2478048
uuucccagaccucaccaug

SEQ ID NO: 2478050 - RNA, 19 nt, Artificial Sequence
  Description of Artificial Sequence: Synthetic oligonucleotide
  Sense strand starting at position 1609 of SEQ ID NO: 1887518
gggacuggauuccuacauu

SEQ ID NO: 2478051 - RNA, 19 nt, Artificial Sequence
  Description of Artificial Sequence: Synthetic oligonucleotide
  Antisense strand to SEQ ID NO: 2478050
aauguaggaauccaguccc

SEQ ID NO: 2478052 - RNA, 19 nt, Artificial Sequence
  Description of Artificial Sequence: Synthetic oligonucleotide
  Sense strand starting at position 1645 of SEQ ID NO: 1887518
ccucgaugucugggucuga

SEQ ID NO: 2478053 - RNA, 19 nt, Artificial Sequence
  Description of Artificial Sequence: Synthetic oligonucleotide
  Antisense strand to SEQ ID NO: 2478052
ucagacccagacaucgagg

SEQ ID NO: 2478054 - RNA, 19 nt, Artificial Sequence
  Description of Artificial Sequence: Synthetic oligonucleotide
  Sense strand starting at position 1763 of SEQ ID NO: 1887518
gguccuggaaucuggagaa

SEQ ID NO: 2478055 - RNA, 19 nt, Artificial Sequence
  Description of Artificial Sequence: Synthetic oligonucleotide
  Antisense strand to SEQ ID NO: 2478054
uucuccagauuccaggacc

SEQ ID NO: 2478056 - RNA, 19 nt, Artificial Sequence
  Description of Artificial Sequence: Synthetic oligonucleotide
  Sense strand starting at position 1794 of SEQ ID NO: 1887518
gccugaugucuguaucuga

SEQ ID NO: 2478057 - RNA, 19 nt, Artificial Sequence
  Description of Artificial Sequence: Synthetic oligonucleotide
  Antisense strand to SEQ ID NO: 2478056
ucagauacagacaucaggc

SEQ ID NO: 2478058 - RNA, 19 nt, Artificial Sequence
  Description of Artificial Sequence: Synthetic oligonucleotide
  Sense strand starting at position 1797 of SEQ ID NO: 1887518
ugaugucuguaucugagua

SEQ ID NO: 2478059 - RNA, 19 nt, Artificial Sequence
  Description of Artificial Sequence: Synthetic oligonucleotide
  Antisense strand to SEQ ID NO: 2478058
uacucagauacagacauca

SEQ ID NO: 2478060 - RNA, 19 nt, Artificial Sequence
  Description of Artificial Sequence: Synthetic oligonucleotide
  Sense strand starting at position 2043 of SEQ ID NO: 1887518
cgugaaaucuugagggagg

SEQ ID NO: 2478061 - RNA, 19 nt, Artificial Sequence
  Description of Artificial Sequence: Synthetic oligonucleotide
  Antisense strand to SEQ ID NO: 2478060
ccucccucaagauuucacg

SEQ ID NO: 2478062 - RNA, 19 nt, Artificial Sequence
  Description of Artificial Sequence: Synthetic oligonucleotide
  Sense strand starting at position 2373 of SEQ ID NO: 1887518
ccuggauuccuggguguga

SEQ ID NO: 2478063 - RNA, 19 nt, Artificial Sequence
  Description of Artificial Sequence: Synthetic oligonucleotide
  Antisense strand to SEQ ID NO: 2478062
ucacacccaggaauccagg

SEQ ID NO: 2478064 - RNA, 19 nt, Artificial Sequence
  Description of Artificial Sequence: Synthetic oligonucleotide
  Sense strand starting at position 2410 of SEQ ID NO: 1887518
gcugaauucuaaguacuuu

SEQ ID NO: 2478065 - RNA, 19 nt, Artificial Sequence
  Description of Artificial Sequence: Synthetic oligonucleotide
  Antisense strand to SEQ ID NO: 2478064
aaaguacuuagaauucagc

SEQ ID NO: 2478066 - RNA, 19 nt, Artificial Sequence
  Description of Artificial Sequence: Synthetic oligonucleotide
  Sense strand starting at position 2644 of SEQ ID NO: 1887518
agcagaacccaggagucuu

SEQ ID NO: 2478067 - RNA, 19 nt, Artificial Sequence
  Description of Artificial Sequence: Synthetic oligonucleotide
  Antisense strand to SEQ ID NO: 2478066
aagacuccuggguucugcu

SEQ ID NO: 2478068 - RNA, 19 nt, Artificial Sequence
  Description of Artificial Sequence: Synthetic oligonucleotide
  Sense strand starting at position 2652 of SEQ ID NO: 1887518
ccaggagucuugcugcaau

SEQ ID NO: 2478069 - RNA, 19 nt, Artificial Sequence
  Description of Artificial Sequence: Synthetic oligonucleotide
  Antisense strand to SEQ ID NO: 2478068
auugcagcaagacuccugg

SEQ ID NO: 2478070 - RNA, 19 nt, Artificial Sequence
  Description of Artificial Sequence: Synthetic oligonucleotide
  Sense strand starting at position 2812 of SEQ ID NO: 1887518
gagguuucccgcguuuacu

SEQ ID NO: 2478071 - RNA, 19 nt, Artificial Sequence
  Description of Artificial Sequence: Synthetic oligonucleotide
  Antisense strand to SEQ ID NO: 2478070
aguaaacgcgggaaaccuc

SEQ ID NO: 2478072 - RNA, 19 nt, Artificial Sequence
  Description of Artificial Sequence: Synthetic oligonucleotide
  Sense strand starting at position 2844 of SEQ ID NO: 1887518
uugcauuggcucuaaaggu

SEQ ID NO: 2478073 - RNA, 19 nt, Artificial Sequence
  Description of Artificial Sequence: Synthetic oligonucleotide
  Antisense strand to SEQ ID NO: 2478072
accuuuagagccaaugcaa

SEQ ID NO: 2478074 - RNA, 19 nt, Artificial Sequence
  Description of Artificial Sequence: Synthetic oligonucleotide
  Sense strand starting at position 2888 of SEQ ID NO: 1887518
ccaggucuccgccaggauu

SEQ ID NO: 2478075 - RNA, 19 nt, Artificial Sequence
  Description of Artificial Sequence: Synthetic oligonucleotide
  Antisense strand to SEQ ID NO: 2478074
aauccuggcggagaccugg

SEQ ID NO: 2478076 - RNA, 19 nt, Artificial Sequence
  Description of Artificial Sequence: Synthetic oligonucleotide
  Sense strand starting at position 3005 of SEQ ID NO: 1887518
gggcgagaucucuggugaa

SEQ ID NO: 2478077 - RNA, 19 nt, Artificial Sequence
  Description of Artificial Sequence: Synthetic oligonucleotide
  Antisense strand to SEQ ID NO: 2478076
uucaccagagaucucgccc

SEQ ID NO: 2478078 - RNA, 19 nt, Artificial Sequence
  Description of Artificial Sequence: Synthetic oligonucleotide
  Sense strand starting at position 3405 of SEQ ID NO: 1887518
gggcucaguucuccaugau

SEQ ID NO: 2478079 - RNA, 19 nt, Artificial Sequence
  Description of Artificial Sequence: Synthetic oligonucleotide
  Antisense strand to SEQ ID NO: 2478078
aucauggagaacugagccc

SEQ ID NO: 2478080 - RNA, 19 nt, Artificial Sequence
  Description of Artificial Sequence: Synthetic oligonucleotide
  Sense strand starting at position 3406 of SEQ ID NO: 1887518
ggcucaguucuccaugauu

SEQ ID NO: 2478081 - RNA, 19 nt, Artificial Sequence
  Description of Artificial Sequence: Synthetic oligonucleotide
  Antisense strand to SEQ ID NO: 2478080
aaucauggagaacugagcc

SEQ ID NO: 2478082 - RNA, 19 nt, Artificial Sequence
  Description of Artificial Sequence: Synthetic oligonucleotide
  Sense strand starting at position 3426 of SEQ ID NO: 1887518
cuuggauccagucaaggua

SEQ ID NO: 2478083 - RNA, 19 nt, Artificial Sequence
  Description of Artificial Sequence: Synthetic oligonucleotide
  Antisense strand to SEQ ID NO: 2478082
uaccuugacuggauccaag

SEQ ID NO: 2478084 - RNA, 19 nt, Artificial Sequence
  Description of Artificial Sequence: Synthetic oligonucleotide
  Sense strand starting at position 3666 of SEQ ID NO: 1887518
auccgagaguccuccaucu

SEQ ID NO: 2478085 - RNA, 19 nt, Artificial Sequence
  Description of Artificial Sequence: Synthetic oligonucleotide
  Antisense strand to SEQ ID NO: 2478084
agauggaggacucucggau

SEQ ID NO: 2478086 - RNA, 19 nt, Artificial Sequence
  Description of Artificial Sequence: Synthetic oligonucleotide
  Sense strand starting at position 3697 of SEQ ID NO: 1887518
uccucagacccaggaguaa

SEQ ID NO: 2478087 - RNA, 19 nt, Artificial Sequence
  Description of Artificial Sequence: Synthetic oligonucleotide
  Antisense strand to SEQ ID NO: 2478086
uuacuccugggucugagga

SEQ ID NO: 2478088 - RNA, 19 nt, Artificial Sequence
  Description of Artificial Sequence: Synthetic oligonucleotide
  Sense strand starting at position 3797 of SEQ ID NO: 1887518
ccuguagauccagaagucu

SEQ ID NO: 2478089 - RNA, 19 nt, Artificial Sequence
  Description of Artificial Sequence: Synthetic oligonucleotide
  Antisense strand to SEQ ID NO: 2478088
agacuucuggaucuacagg

SEQ ID NO: 2478090 - RNA, 19 nt, Artificial Sequence
  Description of Artificial Sequence: Synthetic oligonucleotide
  Sense strand starting at position 7 of SEQ ID NO: 1887519
guuauccuuuccuuccgaa

SEQ ID NO: 2478091 - RNA, 19 nt, Artificial Sequence
  Description of Artificial Sequence: Synthetic oligonucleotide
  Antisense strand to SEQ ID NO: 2478090
uucggaaggaaaggauaac

SEQ ID NO: 2478092 - RNA, 19 nt, Artificial Sequence
  Description of Artificial Sequence: Synthetic oligonucleotide
  Sense strand starting at position 490 of SEQ ID NO: 1887519
ccgagagcaucaucucuga

SEQ ID NO: 2478093 - RNA, 19 nt, Artificial Sequence
  Description of Artificial Sequence: Synthetic oligonucleotide
  Antisense strand to SEQ ID NO: 2478092
ucagagaugaugcucucgg

SEQ ID NO: 2478094 - RNA, 19 nt, Artificial Sequence
  Description of Artificial Sequence: Synthetic oligonucleotide
  Sense strand starting at position 695 of SEQ ID NO: 1887519
cacuguggaugcucuaaga

SEQ ID NO: 2478095 - RNA, 19 nt, Artificial Sequence
  Description of Artificial Sequence: Synthetic oligonucleotide
  Antisense strand to SEQ ID NO: 2478094
ucuuagagcauccacagug

SEQ ID NO: 2478096 - RNA, 19 nt, Artificial Sequence
  Description of Artificial Sequence: Synthetic oligonucleotide
  Sense strand starting at position 817 of SEQ ID NO: 1887519
uggagaaagugcuugggaa

SEQ ID NO: 2478097 - RNA, 19 nt, Artificial Sequence
  Description of Artificial Sequence: Synthetic oligonucleotide
  Antisense strand to SEQ ID NO: 2478096
uucccaagcacuuucucca

SEQ ID NO: 2478098 - RNA, 19 nt, Artificial Sequence
  Description of Artificial Sequence: Synthetic oligonucleotide
  Sense strand starting at position 955 of SEQ ID NO: 1887519
gggugugaugguuaauauc

SEQ ID NO: 2478099 - RNA, 19 nt, Artificial Sequence
  Description of Artificial Sequence: Synthetic oligonucleotide
  Antisense strand to SEQ ID NO: 2478098
gauauuaaccaucacaccc

SEQ ID NO: 2478100 - RNA, 19 nt, Artificial Sequence
  Description of Artificial Sequence: Synthetic oligonucleotide
  Sense strand starting at position 1212 of SEQ ID NO: 1887519
gcuuccugaccucgacauu

SEQ ID NO: 2478101 - RNA, 19 nt, Artificial Sequence
  Description of Artificial Sequence: Synthetic oligonucleotide
  Antisense strand to SEQ ID NO: 2478100
aaugucgaggucaggaagc

SEQ ID NO: 2478102 - RNA, 19 nt, Artificial Sequence
  Description of Artificial Sequence: Synthetic oligonucleotide
  Sense strand starting at position 1321 of SEQ ID NO: 1887519
augugagucgcuuauccuu

SEQ ID NO: 2478103 - RNA, 19 nt, Artificial Sequence
  Description of Artificial Sequence: Synthetic oligonucleotide
  Antisense strand to SEQ ID NO: 2478102
aaggauaagcgacucacau

SEQ ID NO: 2478104 - RNA, 19 nt, Artificial Sequence
  Description of Artificial Sequence: Synthetic oligonucleotide
  Sense strand starting at position 1324 of SEQ ID NO: 1887519
ugagucgcuuauccuuaau

SEQ ID NO: 2478105 - RNA, 19 nt, Artificial Sequence
  Description of Artificial Sequence: Synthetic oligonucleotide
  Antisense strand to SEQ ID NO: 2478104
auuaaggauaagcgacuca

SEQ ID NO: 2478106 - RNA, 19 nt, Artificial Sequence
  Description of Artificial Sequence: Synthetic oligonucleotide
  Sense strand starting at position 1326 of SEQ ID NO: 1887519
agucgcuuauccuuaauaa

SEQ ID NO: 2478107 - RNA, 19 nt, Artificial Sequence
  Description of Artificial Sequence: Synthetic oligonucleotide
  Antisense strand to SEQ ID NO: 2478106
uuauuaaggauaagcgacu

SEQ ID NO: 2478108 - RNA, 19 nt, Artificial Sequence
  Description of Artificial Sequence: Synthetic oligonucleotide
  Sense strand starting at position 1327 of SEQ ID NO: 1887519
gucgcuuauccuuaauaaa

SEQ ID NO: 2478109 - RNA, 19 nt, Artificial Sequence
  Description of Artificial Sequence: Synthetic oligonucleotide
  Antisense strand to SEQ ID NO: 2478108
uuuauuaaggauaagcgac

SEQ ID NO: 2478110 - RNA, 19 nt, Artificial Sequence
  Description of Artificial Sequence: Synthetic oligonucleotide
  Sense strand starting at position 1465 of SEQ ID NO: 1887519
ggcuaaaggacaugucagu

SEQ ID NO: 2478111 - RNA, 19 nt, Artificial Sequence
  Description of Artificial Sequence: Synthetic oligonucleotide
  Antisense strand to SEQ ID NO: 2478110
acugacauguccuuuagcc

SEQ ID NO: 2478112 - RNA, 19 nt, Artificial Sequence
  Description of Artificial Sequence: Synthetic oligonucleotide
  Sense strand starting at position 1797 of SEQ ID NO: 1887519
ccaggacauguccguucua

SEQ ID NO: 2478113 - RNA, 19 nt, Artificial Sequence
  Description of Artificial Sequence: Synthetic oligonucleotide
  Antisense strand to SEQ ID NO: 2478112
uagaacggacauguccugg

SEQ ID NO: 2478114 - RNA, 19 nt, Artificial Sequence
  Description of Artificial Sequence: Synthetic oligonucleotide
  Sense strand starting at position 1798 of SEQ ID NO: 1887519
caggacauguccguucuaa

SEQ ID NO: 2478115 - RNA, 19 nt, Artificial Sequence
  Description of Artificial Sequence: Synthetic oligonucleotide
  Antisense strand to SEQ ID NO: 2478114
uuagaacggacauguccug

SEQ ID NO: 2478116 - RNA, 19 nt, Artificial Sequence
  Description of Artificial Sequence: Synthetic oligonucleotide
  Sense strand starting at position 2418 of SEQ ID NO: 1887519
gggugacucauacaaugug

SEQ ID NO: 2478117 - RNA, 19 nt, Artificial Sequence
  Description of Artificial Sequence: Synthetic oligonucleotide
  Antisense strand to SEQ ID NO: 2478116
cacauuguaugagucaccc

SEQ ID NO: 2478118 - RNA, 19 nt, Artificial Sequence
  Description of Artificial Sequence: Synthetic oligonucleotide
  Sense strand starting at position 2434 of SEQ ID NO: 1887519
guggucacaccaugauaca

SEQ ID NO: 2478119 - RNA, 19 nt, Artificial Sequence
  Description of Artificial Sequence: Synthetic oligonucleotide
  Antisense strand to SEQ ID NO: 2478118
uguaucauggugugaccac

SEQ ID NO: 2478120 - RNA, 19 nt, Artificial Sequence
  Description of Artificial Sequence: Synthetic oligonucleotide
  Sense strand starting at position 2506 of SEQ ID NO: 1887519
gguaaauuacagugauauc

SEQ ID NO: 2478121 - RNA, 19 nt, Artificial Sequence
  Description of Artificial Sequence: Synthetic oligonucleotide
  Antisense strand to SEQ ID NO: 2478120
gauaucacuguaauuuacc

SEQ ID NO: 2478122 - RNA, 19 nt, Artificial Sequence
  Description of Artificial Sequence: Synthetic oligonucleotide
  Sense strand starting at position 2619 of SEQ ID NO: 1887519
acgucauacgggcauguaa

SEQ ID NO: 2478123 - RNA, 19 nt, Artificial Sequence
  Description of Artificial Sequence: Synthetic oligonucleotide
  Antisense strand to SEQ ID NO: 2478122
uuacaugcccguaugacgu

SEQ ID NO: 2478124 - RNA, 19 nt, Artificial Sequence
  Description of Artificial Sequence: Synthetic oligonucleotide
  Sense strand starting at position 2648 of SEQ ID NO: 1887519
aacccugucugcuugaaga

SEQ ID NO: 2478125 - RNA, 19 nt, Artificial Sequence
  Description of Artificial Sequence: Synthetic oligonucleotide
  Antisense strand to SEQ ID NO: 2478124
ucuucaagcagacaggguu

SEQ ID NO: 2478126 - RNA, 19 nt, Artificial Sequence
  Description of Artificial Sequence: Synthetic oligonucleotide
  Sense strand starting at position 2733 of SEQ ID NO: 1887519
ccagacuuauaugucaaag

SEQ ID NO: 2478127 - RNA, 19 nt, Artificial Sequence
  Description of Artificial Sequence: Synthetic oligonucleotide
  Antisense strand to SEQ ID NO: 2478126
cuuugacauauaagucugg

SEQ ID NO: 2478128 - RNA, 19 nt, Artificial Sequence
  Description of Artificial Sequence: Synthetic oligonucleotide
  Sense strand starting at position 2913 of SEQ ID NO: 1887519
acuuuccggucuccagaau

SEQ ID NO: 2478129 - RNA, 19 nt, Artificial Sequence
  Description of Artificial Sequence: Synthetic oligonucleotide
  Antisense strand to SEQ ID NO: 2478128
auucuggagaccggaaagu

SEQ ID NO: 2478130 - RNA, 19 nt, Artificial Sequence
  Description of Artificial Sequence: Synthetic oligonucleotide
  Sense strand starting at position 3057 of SEQ ID NO: 1887519
ugacauuguggacgacaua

SEQ ID NO: 2478131 - RNA, 19 nt, Artificial Sequence
  Description of Artificial Sequence: Synthetic oligonucleotide
  Antisense strand to SEQ ID NO: 2478130
uaugucguccacaauguca

SEQ ID NO: 2478132 - RNA, 19 nt, Artificial Sequence
  Description of Artificial Sequence: Synthetic oligonucleotide
  Sense strand starting at position 3069 of SEQ ID NO: 1887519
cgacauaucccaggagccu

SEQ ID NO: 2478133 - RNA, 19 nt, Artificial Sequence
  Description of Artificial Sequence: Synthetic oligonucleotide
  Antisense strand to SEQ ID NO: 2478132
aggcuccugggauaugucg

SEQ ID NO: 2478134 - RNA, 19 nt, Artificial Sequence
  Description of Artificial Sequence: Synthetic oligonucleotide
  Sense strand starting at position 3256 of SEQ ID NO: 1887519
ggcagaauuucucaaccug

SEQ ID NO: 2478135 - RNA, 19 nt, Artificial Sequence
  Description of Artificial Sequence: Synthetic oligonucleotide
  Antisense strand to SEQ ID NO: 2478134
cagguugagaaauucugcc

SEQ ID NO: 2478136 - RNA, 19 nt, Artificial Sequence
  Description of Artificial Sequence: Synthetic oligonucleotide
  Sense strand starting at position 3281 of SEQ ID NO: 1887519
acugacacuucugauugaa

SEQ ID NO: 2478137 - RNA, 19 nt, Artificial Sequence
  Description of Artificial Sequence: Synthetic oligonucleotide
  Antisense strand to SEQ ID NO: 2478136
uucaaucagaagugucagu

SEQ ID NO: 2478138 - RNA, 19 nt, Artificial Sequence
  Description of Artificial Sequence: Synthetic oligonucleotide
  Sense strand starting at position 3283 of SEQ ID NO: 1887519
ugacacuucugauugaauc

SEQ ID NO: 2478139 - RNA, 19 nt, Artificial Sequence
  Description of Artificial Sequence: Synthetic oligonucleotide
  Antisense strand to SEQ ID NO: 2478138
gauucaaucagaaguguca

SEQ ID NO: 2478140 - RNA, 19 nt, Artificial Sequence
  Description of Artificial Sequence: Synthetic oligonucleotide
  Sense strand starting at position 3322 of SEQ ID NO: 1887519
cccugugugcuguaggaua

SEQ ID NO: 2478141 - RNA, 19 nt, Artificial Sequence
  Description of Artificial Sequence: Synthetic oligonucleotide
  Antisense strand to SEQ ID NO: 2478140
uauccuacagcacacaggg

SEQ ID NO: 2478142 - RNA, 19 nt, Artificial Sequence
  Description of Artificial Sequence: Synthetic oligonucleotide
  Sense strand starting at position 3333 of SEQ ID NO: 1887519
guaggauauuacgcagcau

SEQ ID NO: 2478143 - RNA, 19 nt, Artificial Sequence
  Description of Artificial Sequence: Synthetic oligonucleotide
  Antisense strand to SEQ ID NO: 2478142
augcugcguaauauccuac

SEQ ID NO: 2478144 - RNA, 19 nt, Artificial Sequence
  Description of Artificial Sequence: Synthetic oligonucleotide
  Sense strand starting at position 3424 of SEQ ID NO: 1887519
uccaguggucucugggaga

SEQ ID NO: 2478145 - RNA, 19 nt, Artificial Sequence
  Description of Artificial Sequence: Synthetic oligonucleotide
  Antisense strand to SEQ ID NO: 2478144
ucucccagagaccacugga

SEQ ID NO: 2478146 - RNA, 19 nt, Artificial Sequence
  Description of Artificial Sequence: Synthetic oligonucleotide
  Sense strand starting at position 3437 of SEQ ID NO: 1887519
gggagaagucaguguuagc

SEQ ID NO: 2478147 - RNA, 19 nt, Artificial Sequence
  Description of Artificial Sequence: Synthetic oligonucleotide
  Antisense strand to SEQ ID NO: 2478146
gcuaacacugacuucuccc

SEQ ID NO: 2478148 - RNA, 19 nt, Artificial Sequence
  Description of Artificial Sequence: Synthetic oligonucleotide
  Sense strand starting at position 3442 of SEQ ID NO: 1887519
aagucaguguuagcaacau

SEQ ID NO: 2478149 - RNA, 19 nt, Artificial Sequence
  Description of Artificial Sequence: Synthetic oligonucleotide
  Antisense strand to SEQ ID NO: 2478148
auguugcuaacacugacuu

SEQ ID NO: 2478150 - RNA, 19 nt, Artificial Sequence
  Description of Artificial Sequence: Synthetic oligonucleotide
  Sense strand starting at position 3497 of SEQ ID NO: 1887519
ggaaacucagagugcaaga

SEQ ID NO: 2478151 - RNA, 19 nt, Artificial Sequence
  Description of Artificial Sequence: Synthetic oligonucleotide
  Antisense strand to SEQ ID NO: 2478150
ucuugcacucugaguuucc

SEQ ID NO: 2478152 - RNA, 19 nt, Artificial Sequence
  Description of Artificial Sequence: Synthetic oligonucleotide
  Sense strand starting at position 3547 of SEQ ID NO: 1887519
aaaguuagauagggauaga

SEQ ID NO: 2478153 - RNA, 19 nt, Artificial Sequence
  Description of Artificial Sequence: Synthetic oligonucleotide
  Antisense strand to SEQ ID NO: 2478152
ucuaucccuaucuaacuuu

SEQ ID NO: 2478154 - RNA, 19 nt, Artificial Sequence
  Description of Artificial Sequence: Synthetic oligonucleotide
  Sense strand starting at position 3654 of SEQ ID NO: 1887519
cacaaagaguucucagggu

SEQ ID NO: 2478155 - RNA, 19 nt, Artificial Sequence
  Description of Artificial Sequence: Synthetic oligonucleotide
  Antisense strand to SEQ ID NO: 2478154
acccugagaacucuuugug

SEQ ID NO: 2478156 - RNA, 19 nt, Artificial Sequence
  Description of Artificial Sequence: Synthetic oligonucleotide
  Sense strand starting at position 3658 of SEQ ID NO: 1887519
aagaguucucagggucagu

SEQ ID NO: 2478157 - RNA, 19 nt, Artificial Sequence
  Description of Artificial Sequence: Synthetic oligonucleotide
  Antisense strand to SEQ ID NO: 2478156
acugacccugagaacucuu

SEQ ID NO: 2478158 - RNA, 19 nt, Artificial Sequence
  Description of Artificial Sequence: Synthetic oligonucleotide
  Sense strand starting at position 3798 of SEQ ID NO: 1887519
ccuggaagauuugauuauu

SEQ ID NO: 2478159 - RNA, 19 nt, Artificial Sequence
  Description of Artificial Sequence: Synthetic oligonucleotide
  Antisense strand to SEQ ID NO: 2478158
aauaaucaaaucuuccagg

SEQ ID NO: 2478160 - RNA, 19 nt, Artificial Sequence
  Description of Artificial Sequence: Synthetic oligonucleotide
  Sense strand starting at position 3830 of SEQ ID NO: 1887519
agaguuaaguaucagagag

SEQ ID NO: 2478161 - RNA, 19 nt, Artificial Sequence
  Description of Artificial Sequence: Synthetic oligonucleotide
  Antisense strand to SEQ ID NO: 2478160
cucucugauacuuaacucu

SEQ ID NO: 2478162 - RNA, 19 nt, Artificial Sequence
  Description of Artificial Sequence: Synthetic oligonucleotide
  Sense strand starting at position 3880 of SEQ ID NO: 1887519
ucagcaguuuauuccauuu

SEQ ID NO: 2478163 - RNA, 19 nt, Artificial Sequence
  Description of Artificial Sequence: Synthetic oligonucleotide
  Antisense strand to SEQ ID NO: 2478162
aaauggaauaaacugcuga

SEQ ID NO: 2478164 - RNA, 19 nt, Artificial Sequence
  Description of Artificial Sequence: Synthetic oligonucleotide
  Sense strand starting at position 3898 of SEQ ID NO: 1887519
uuuacugcugaauaggauu

SEQ ID NO: 2478165 - RNA, 19 nt, Artificial Sequence
  Description of Artificial Sequence: Synthetic oligonucleotide
  Antisense strand to SEQ ID NO: 2478164
aauccuauucagcaguaaa

SEQ ID NO: 2478166 - RNA, 19 nt, Artificial Sequence
  Description of Artificial Sequence: Synthetic oligonucleotide
  Sense strand starting at position 3924 of SEQ ID NO: 1887519
auggaugcaccaugguuua

SEQ ID NO: 2478167 - RNA, 19 nt, Artificial Sequence
  Description of Artificial Sequence: Synthetic oligonucleotide
  Antisense strand to SEQ ID NO: 2478166
uaaaccauggugcauccau

SEQ ID NO: 2478168 - RNA, 19 nt, Artificial Sequence
  Description of Artificial Sequence: Synthetic oligonucleotide
  Sense strand starting at position 3969 of SEQ ID NO: 1887519
gucugucacugcuuuaaca

SEQ ID NO: 2478169 - RNA, 19 nt, Artificial Sequence
  Description of Artificial Sequence: Synthetic oligonucleotide
  Antisense strand to SEQ ID NO: 2478168
uguuaaagcagugacagac

SEQ ID NO: 2478170 - RNA, 19 nt, Artificial Sequence
  Description of Artificial Sequence: Synthetic oligonucleotide
  Sense strand starting at position 268 of SEQ ID NO: 1887520
uguagaaucugauugucua

SEQ ID NO: 2478171 - RNA, 19 nt, Artificial Sequence
  Description of Artificial Sequence: Synthetic oligonucleotide
  Antisense strand to SEQ ID NO: 2478170
uagacaaucagauucuaca

SEQ ID NO: 2478172 - RNA, 19 nt, Artificial Sequence
  Description of Artificial Sequence: Synthetic oligonucleotide
  Sense strand starting at position 269 of SEQ ID NO: 1887520
guagaaucugauugucuau

SEQ ID NO: 2478173 - RNA, 19 nt, Artificial Sequence
  Description of Artificial Sequence: Synthetic oligonucleotide
  Antisense strand to SEQ ID NO: 2478172
auagacaaucagauucuac

SEQ ID NO: 2478174 - RNA, 19 nt, Artificial Sequence
  Description of Artificial Sequence: Synthetic oligonucleotide
  Sense strand starting at position 272 of SEQ ID NO: 1887520
gaaucugauugucuaugga

SEQ ID NO: 2478175 - RNA, 19 nt, Artificial Sequence
  Description of Artificial Sequence: Synthetic oligonucleotide
  Antisense strand to SEQ ID NO: 2478174
uccauagacaaucagauuc

SEQ ID NO: 2478176 - RNA, 19 nt, Artificial Sequence
  Description of Artificial Sequence: Synthetic oligonucleotide
  Sense strand starting at position 275 of SEQ ID NO: 1887520
ucugauugucuauggacaa

SEQ ID NO: 2478177 - RNA, 19 nt, Artificial Sequence
  Description of Artificial Sequence: Synthetic oligonucleotide
  Antisense strand to SEQ ID NO: 2478176
uuguccauagacaaucaga

SEQ ID NO: 2478178 - RNA, 19 nt, Artificial Sequence
  Description of Artificial Sequence: Synthetic oligonucleotide
  Sense strand starting at position 297 of SEQ ID NO: 1887520
cguggucuccaguuagcua

SEQ ID NO: 2478179 - RNA, 19 nt, Artificial Sequence
  Description of Artificial Sequence: Synthetic oligonucleotide
  Antisense strand to SEQ ID NO: 2478178
uagcuaacuggagaccacg

SEQ ID NO: 2478180 - RNA, 19 nt, Artificial Sequence
  Description of Artificial Sequence: Synthetic oligonucleotide
  Sense strand starting at position 349 of SEQ ID NO: 1887520
gcacaugugcucccuguua

SEQ ID NO: 2478181 - RNA, 19 nt, Artificial Sequence
  Description of Artificial Sequence: Synthetic oligonucleotide
  Antisense strand to SEQ ID NO: 2478180
uaacagggagcacaugugc

SEQ ID NO: 2478182 - RNA, 19 nt, Artificial Sequence
  Description of Artificial Sequence: Synthetic oligonucleotide
  Sense strand starting at position 370 of SEQ ID NO: 1887520
uuacauuugugcuuuccau

SEQ ID NO: 2478183 - RNA, 19 nt, Artificial Sequence
  Description of Artificial Sequence: Synthetic oligonucleotide
  Antisense strand to SEQ ID NO: 2478182
auggaaagcacaaauguaa

SEQ ID NO: 2478184 - RNA, 19 nt, Artificial Sequence
  Description of Artificial Sequence: Synthetic oligonucleotide
  Sense strand starting at position 563 of SEQ ID NO: 1887520
uccugaguaggcugggauu

SEQ ID NO: 2478185 - RNA, 19 nt, Artificial Sequence
  Description of Artificial Sequence: Synthetic oligonucleotide
  Antisense strand to SEQ ID NO: 2478184
aaucccagccuacucagga

SEQ ID NO: 2478186 - RNA, 19 nt, Artificial Sequence
  Description of Artificial Sequence: Synthetic oligonucleotide
  Sense strand starting at position 1031 of SEQ ID NO: 1887520
gggcaauagagucaagguu

SEQ ID NO: 2478187 - RNA, 19 nt, Artificial Sequence
  Description of Artificial Sequence: Synthetic oligonucleotide
  Antisense strand to SEQ ID NO: 2478186
aaccuugacucuauugccc

SEQ ID NO: 2478188 - RNA, 19 nt, Artificial Sequence
  Description of Artificial Sequence: Synthetic oligonucleotide
  Sense strand starting at position 1065 of SEQ ID NO: 1887520
cucguagucgcaguaaaug

SEQ ID NO: 2478189 - RNA, 19 nt, Artificial Sequence
  Description of Artificial Sequence: Synthetic oligonucleotide
  Antisense strand to SEQ ID NO: 2478188
cauuuacugcgacuacgag

SEQ ID NO: 2478190 - RNA, 19 nt, Artificial Sequence
  Description of Artificial Sequence: Synthetic oligonucleotide
  Sense strand starting at position 1073 of SEQ ID NO: 1887520
cgcaguaaauguucaggaa

SEQ ID NO: 2478191 - RNA, 19 nt, Artificial Sequence
  Description of Artificial Sequence: Synthetic oligonucleotide
  Antisense strand to SEQ ID NO: 2478190
uuccugaacauuuacugcg

SEQ ID NO: 2478192 - RNA, 19 nt, Artificial Sequence
  Description of Artificial Sequence: Synthetic oligonucleotide
  Sense strand starting at position 1074 of SEQ ID NO: 1887520
gcaguaaauguucaggaag

SEQ ID NO: 2478193 - RNA, 19 nt, Artificial Sequence
  Description of Artificial Sequence: Synthetic oligonucleotide
  Antisense strand to SEQ ID NO: 2478192
cuuccugaacauuuacugc

SEQ ID NO: 2478194 - RNA, 19 nt, Artificial Sequence
  Description of Artificial Sequence: Synthetic oligonucleotide
  Sense strand starting at position 1277 of SEQ ID NO: 1887520
gggugacuuguugaaagug

SEQ ID NO: 2478195 - RNA, 19 nt, Artificial Sequence
  Description of Artificial Sequence: Synthetic oligonucleotide
  Antisense strand to SEQ ID NO: 2478194
cacuuucaacaagucaccc

SEQ ID NO: 2478196 - RNA, 19 nt, Artificial Sequence
  Description of Artificial Sequence: Synthetic oligonucleotide
  Sense strand starting at position 1289 of SEQ ID NO: 1887520
gaaagugucgauggagaca

SEQ ID NO: 2478197 - RNA, 19 nt, Artificial Sequence
  Description of Artificial Sequence: Synthetic oligonucleotide
  Antisense strand to SEQ ID NO: 2478196
ugucuccaucgacacuuuc

SEQ ID NO: 2478198 - RNA, 19 nt, Artificial Sequence
  Description of Artificial Sequence: Synthetic oligonucleotide
  Sense strand starting at position 1353 of SEQ ID NO: 1887520
gcagacucaugcuuccaau

SEQ ID NO: 2478199 - RNA, 19 nt, Artificial Sequence
  Description of Artificial Sequence: Synthetic oligonucleotide
  Antisense strand to SEQ ID NO: 2478198
auuggaagcaugagucugc

SEQ ID NO: 2478200 - RNA, 19 nt, Artificial Sequence
  Description of Artificial Sequence: Synthetic oligonucleotide
  Sense strand starting at position 1444 of SEQ ID NO: 1887520
gaucucuguucccugggua

SEQ ID NO: 2478201 - RNA, 19 nt, Artificial Sequence
  Description of Artificial Sequence: Synthetic oligonucleotide
  Antisense strand to SEQ ID NO: 2478200
uacccagggaacagagauc

SEQ ID NO: 2478202 - RNA, 19 nt, Artificial Sequence
  Description of Artificial Sequence: Synthetic oligonucleotide
  Sense strand starting at position 1466 of SEQ ID NO: 1887520
gggauccugaccuguaagu

SEQ ID NO: 2478203 - RNA, 19 nt, Artificial Sequence
  Description of Artificial Sequence: Synthetic oligonucleotide
  Antisense strand to SEQ ID NO: 2478202
acuuacaggucaggauccc

SEQ ID NO: 2478204 - RNA, 19 nt, Artificial Sequence
  Description of Artificial Sequence: Synthetic oligonucleotide
  Sense strand starting at position 1468 of SEQ ID NO: 1887520
gauccugaccuguaagucu

SEQ ID NO: 2478205 - RNA, 19 nt, Artificial Sequence
  Description of Artificial Sequence: Synthetic oligonucleotide
  Antisense strand to SEQ ID NO: 2478204
agacuuacaggucaggauc

SEQ ID NO: 2478206 - RNA, 19 nt, Artificial Sequence
  Description of Artificial Sequence: Synthetic oligonucleotide
  Sense strand starting at position 1670 of SEQ ID NO: 1887520
ccgggaauguaguugaacu

SEQ ID NO: 2478207 - RNA, 19 nt, Artificial Sequence
  Description of Artificial Sequence: Synthetic oligonucleotide
  Antisense strand to SEQ ID NO: 2478206
aguucaacuacauucccgg

SEQ ID NO: 2478208 - RNA, 19 nt, Artificial Sequence
  Description of Artificial Sequence: Synthetic oligonucleotide
  Sense strand starting at position 2253 of SEQ ID NO: 1887520
gaacuacuguaagugcauu

SEQ ID NO: 2478209 - RNA, 19 nt, Artificial Sequence
  Description of Artificial Sequence: Synthetic oligonucleotide
  Antisense strand to SEQ ID NO: 2478208
aaugcacuuacaguaguuc

SEQ ID NO: 2478210 - RNA, 19 nt, Artificial Sequence
  Description of Artificial Sequence: Synthetic oligonucleotide
  Sense strand starting at position 2307 of SEQ ID NO: 1887520
ggagguagguacuuaaauc

SEQ ID NO: 2478211 - RNA, 19 nt, Artificial Sequence
  Description of Artificial Sequence: Synthetic oligonucleotide
  Antisense strand to SEQ ID NO: 2478210
gauuuaaguaccuaccucc

SEQ ID NO: 2478212 - RNA, 19 nt, Artificial Sequence
  Description of Artificial Sequence: Synthetic oligonucleotide
  Sense strand starting at position 2862 of SEQ ID NO: 1887520
uggcucugauaaucugauu

SEQ ID NO: 2478213 - RNA, 19 nt, Artificial Sequence
  Description of Artificial Sequence: Synthetic oligonucleotide
  Antisense strand to SEQ ID NO: 2478212
aaucagauuaucagagcca

SEQ ID NO: 2478214 - RNA, 19 nt, Artificial Sequence
  Description of Artificial Sequence: Synthetic oligonucleotide
  Sense strand starting at position 3021 of SEQ ID NO: 1887520
agagguuuauuaucccagu

SEQ ID NO: 2478215 - RNA, 19 nt, Artificial Sequence
  Description of Artificial Sequence: Synthetic oligonucleotide
  Antisense strand to SEQ ID NO: 2478214
acugggauaauaaaccucu

SEQ ID NO: 2478216 - RNA, 19 nt, Artificial Sequence
  Description of Artificial Sequence: Synthetic oligonucleotide
  Sense strand starting at position 3022 of SEQ ID NO: 1887520
gagguuuauuaucccaguu

SEQ ID NO: 2478217 - RNA, 19 nt, Artificial Sequence
  Description of Artificial Sequence: Synthetic oligonucleotide
  Antisense strand to SEQ ID NO: 2478216
aacugggauaauaaaccuc

SEQ ID NO: 2478218 - RNA, 19 nt, Artificial Sequence
  Description of Artificial Sequence: Synthetic oligonucleotide
  Sense strand starting at position 3069 of SEQ ID NO: 1887520
gaguaaguccacugacuga

SEQ ID NO: 2478219 - RNA, 19 nt, Artificial Sequence
  Description of Artificial Sequence: Synthetic oligonucleotide
  Antisense strand to SEQ ID NO: 2478218
ucagucaguggacuuacuc

SEQ ID NO: 2478220 - RNA, 19 nt, Artificial Sequence
  Description of Artificial Sequence: Synthetic oligonucleotide
  Sense strand starting at position 3111 of SEQ ID NO: 1887520
ggauguaaaccagguguuu

SEQ ID NO: 2478221 - RNA, 19 nt, Artificial Sequence
  Description of Artificial Sequence: Synthetic oligonucleotide
  Antisense strand to SEQ ID NO: 2478220
aaacaccugguuuacaucc

SEQ ID NO: 2478222 - RNA, 19 nt, Artificial Sequence
  Description of Artificial Sequence: Synthetic oligonucleotide
  Sense strand starting at position 3164 of SEQ ID NO: 1887520
cugcuuugucccuagaagg

SEQ ID NO: 2478223 - RNA, 19 nt, Artificial Sequence
  Description of Artificial Sequence: Synthetic oligonucleotide
  Antisense strand to SEQ ID NO: 2478222
ccuucuagggacaaagcag

SEQ ID NO: 2478224 - RNA, 19 nt, Artificial Sequence
  Description of Artificial Sequence: Synthetic oligonucleotide
  Sense strand starting at position 3205 of SEQ ID NO: 1887520
ugcacaucuguguaucauu

SEQ ID NO: 2478225 - RNA, 19 nt, Artificial Sequence
  Description of Artificial Sequence: Synthetic oligonucleotide
  Antisense strand to SEQ ID NO: 2478224
aaugauacacagaugugca

SEQ ID NO: 2478226 - RNA, 19 nt, Artificial Sequence
  Description of Artificial Sequence: Synthetic oligonucleotide
  Sense strand starting at position 3214 of SEQ ID NO: 1887520
guguaucauuuccagaaga

SEQ ID NO: 2478227 - RNA, 19 nt, Artificial Sequence
  Description of Artificial Sequence: Synthetic oligonucleotide
  Antisense strand to SEQ ID NO: 2478226
ucuucuggaaaugauacac

SEQ ID NO: 2478228 - RNA, 19 nt, Artificial Sequence
  Description of Artificial Sequence: Synthetic oligonucleotide
  Sense strand starting at position 3300 of SEQ ID NO: 1887520
gcugaucucccuugaucac

SEQ ID NO: 2478229 - RNA, 19 nt, Artificial Sequence
  Description of Artificial Sequence: Synthetic oligonucleotide
  Antisense strand to SEQ ID NO: 2478228
gugaucaagggagaucagc

SEQ ID NO: 2478230 - RNA, 19 nt, Artificial Sequence
  Description of Artificial Sequence: Synthetic oligonucleotide
  Sense strand starting at position 3396 of SEQ ID NO: 1887520
cuaugugcugagcauguaa

SEQ ID NO: 2478231 - RNA, 19 nt, Artificial Sequence
  Description of Artificial Sequence: Synthetic oligonucleotide
  Antisense strand to SEQ ID NO: 2478230
uuacaugcucagcacauag

SEQ ID NO: 2478232 - RNA, 19 nt, Artificial Sequence
  Description of Artificial Sequence: Synthetic oligonucleotide
  Sense strand starting at position 3422 of SEQ ID NO: 1887520
cucuuacaugauggaaagu

SEQ ID NO: 2478233 - RNA, 19 nt, Artificial Sequence
  Description of Artificial Sequence: Synthetic oligonucleotide
  Antisense strand to SEQ ID NO: 2478232
acuuuccaucauguaagag

SEQ ID NO: 2478234 - RNA, 19 nt, Artificial Sequence
  Description of Artificial Sequence: Synthetic oligonucleotide
  Sense strand starting at position 3471 of SEQ ID NO: 1887520
caaggaauuugugaugauu

SEQ ID NO: 2478235 - RNA, 19 nt, Artificial Sequence
  Description of Artificial Sequence: Synthetic oligonucleotide
  Antisense strand to SEQ ID NO: 2478234
aaucaucacaaauuccuug

SEQ ID NO: 2478236 - RNA, 19 nt, Artificial Sequence
  Description of Artificial Sequence: Synthetic oligonucleotide
  Sense strand starting at position 3479 of SEQ ID NO: 1887520
uugugaugauuccagauuu

SEQ ID NO: 2478237 - RNA, 19 nt, Artificial Sequence
  Description of Artificial Sequence: Synthetic oligonucleotide
  Antisense strand to SEQ ID NO: 2478236
aaaucuggaaucaucacaa

SEQ ID NO: 2478238 - RNA, 19 nt, Artificial Sequence
  Description of Artificial Sequence: Synthetic oligonucleotide
  Sense strand starting at position 3542 of SEQ ID NO: 1887520
ccgucagugcugcuguauu

SEQ ID NO: 2478239 - RNA, 19 nt, Artificial Sequence
  Description of Artificial Sequence: Synthetic oligonucleotide
  Antisense strand to SEQ ID NO: 2478238
aauacagcagcacugacgg

SEQ ID NO: 2478240 - RNA, 19 nt, Artificial Sequence
  Description of Artificial Sequence: Synthetic oligonucleotide
  Sense strand starting at position 3590 of SEQ ID NO: 1887520
gugaauauucgcugaggga

SEQ ID NO: 2478241 - RNA, 19 nt, Artificial Sequence
  Description of Artificial Sequence: Synthetic oligonucleotide
  Antisense strand to SEQ ID NO: 2478240
ucccucagcgaauauucac

SEQ ID NO: 2478242 - RNA, 19 nt, Artificial Sequence
  Description of Artificial Sequence: Synthetic oligonucleotide
  Sense strand starting at position 3591 of SEQ ID NO: 1887520
ugaauauucgcugagggag

SEQ ID NO: 2478243 - RNA, 19 nt, Artificial Sequence
  Description of Artificial Sequence: Synthetic oligonucleotide
  Antisense strand to SEQ ID NO: 2478242
cucccucagcgaauauuca

SEQ ID NO: 2478244 - RNA, 19 nt, Artificial Sequence
  Description of Artificial Sequence: Synthetic oligonucleotide
  Sense strand starting at position 3654 of SEQ ID NO: 1887520
gcgucuucccgcccuagua

SEQ ID NO: 2478245 - RNA, 19 nt, Artificial Sequence
  Description of Artificial Sequence: Synthetic oligonucleotide
  Antisense strand to SEQ ID NO: 2478244
uacuagggcgggaagacgc

SEQ ID NO: 2478246 - RNA, 19 nt, Artificial Sequence
  Description of Artificial Sequence: Synthetic oligonucleotide
  Sense strand starting at position 3655 of SEQ ID NO: 1887520
cgucuucccgcccuaguaa

SEQ ID NO: 2478247 - RNA, 19 nt, Artificial Sequence
  Description of Artificial Sequence: Synthetic oligonucleotide
  Antisense strand to SEQ ID NO: 2478246
uuacuagggcgggaagacg

SEQ ID NO: 2478248 - RNA, 19 nt, Artificial Sequence
  Description of Artificial Sequence: Synthetic oligonucleotide
  Sense strand starting at position 3684 of SEQ ID NO: 1887520
acauguugagcggaugaau

SEQ ID NO: 2478249 - RNA, 19 nt, Artificial Sequence
  Description of Artificial Sequence: Synthetic oligonucleotide
  Antisense strand to SEQ ID NO: 2478248
auucauccgcucaacaugu

SEQ ID NO: 2478250 - RNA, 19 nt, Artificial Sequence
  Description of Artificial Sequence: Synthetic oligonucleotide
  Sense strand starting at position 216 of SEQ ID NO: 1887521
gaggaugaguguucagagu

SEQ ID NO: 2478251 - RNA, 19 nt, Artificial Sequence
  Description of Artificial Sequence: Synthetic oligonucleotide
  Antisense strand to SEQ ID NO: 2478250
acucugaacacucauccuc

SEQ ID NO: 2478252 - RNA, 19 nt, Artificial Sequence
  Description of Artificial Sequence: Synthetic oligonucleotide
  Sense strand starting at position 331 of SEQ ID NO: 1887521
ggguuugaauucucauugu

SEQ ID NO: 2478253 - RNA, 19 nt, Artificial Sequence
  Description of Artificial Sequence: Synthetic oligonucleotide
  Antisense strand to SEQ ID NO: 2478252
acaaugagaauucaaaccc

SEQ ID NO: 2478254 - RNA, 19 nt, Artificial Sequence
  Description of Artificial Sequence: Synthetic oligonucleotide
  Sense strand starting at position 334 of SEQ ID NO: 1887521
uuugaauucucauugugga

SEQ ID NO: 2478255 - RNA, 19 nt, Artificial Sequence
  Description of Artificial Sequence: Synthetic oligonucleotide
  Antisense strand to SEQ ID NO: 2478254
uccacaaugagaauucaaa

SEQ ID NO: 2478256 - RNA, 19 nt, Artificial Sequence
  Description of Artificial Sequence: Synthetic oligonucleotide
  Sense strand starting at position 335 of SEQ ID NO: 1887521
uugaauucucauuguggaa

SEQ ID NO: 2478257 - RNA, 19 nt, Artificial Sequence
  Description of Artificial Sequence: Synthetic oligonucleotide
  Antisense strand to SEQ ID NO: 2478256
uuccacaaugagaauucaa

SEQ ID NO: 2478258 - RNA, 19 nt, Artificial Sequence
  Description of Artificial Sequence: Synthetic oligonucleotide
  Sense strand starting at position 473 of SEQ ID NO: 1887521
guguauaugcaauggaaua

SEQ ID NO: 2478259 - RNA, 19 nt, Artificial Sequence
  Description of Artificial Sequence: Synthetic oligonucleotide
  Antisense strand to SEQ ID NO: 2478258
uauuccauugcauauacac

SEQ ID NO: 2478260 - RNA, 19 nt, Artificial Sequence
  Description of Artificial Sequence: Synthetic oligonucleotide
  Sense strand starting at position 511 of SEQ ID NO: 1887521
gaaggacauucugucauuc

SEQ ID NO: 2478261 - RNA, 19 nt, Artificial Sequence
  Description of Artificial Sequence: Synthetic oligonucleotide
  Antisense strand to SEQ ID NO: 2478260
gaaugacagaauguccuuc

SEQ ID NO: 2478262 - RNA, 19 nt, Artificial Sequence
  Description of Artificial Sequence: Synthetic oligonucleotide
  Sense strand starting at position 554 of SEQ ID NO: 1887521
acguuaggcuaagugaaau

SEQ ID NO: 2478263 - RNA, 19 nt, Artificial Sequence
  Description of Artificial Sequence: Synthetic oligonucleotide
  Antisense strand to SEQ ID NO: 2478262
auuucacuuagccuaacgu

SEQ ID NO: 2478264 - RNA, 19 nt, Artificial Sequence
  Description of Artificial Sequence: Synthetic oligonucleotide
  Sense strand starting at position 591 of SEQ ID NO: 1887521
caauuacugcgcguucuca

SEQ ID NO: 2478265 - RNA, 19 nt, Artificial Sequence
  Description of Artificial Sequence: Synthetic oligonucleotide
  Antisense strand to SEQ ID NO: 2478264
ugagaacgcgcaguaauug

SEQ ID NO: 2478266 - RNA, 19 nt, Artificial Sequence
  Description of Artificial Sequence: Synthetic oligonucleotide
  Sense strand starting at position 599 of SEQ ID NO: 1887521
gcgcguucucacuuaucug

SEQ ID NO: 2478267 - RNA, 19 nt, Artificial Sequence
  Description of Artificial Sequence: Synthetic oligonucleotide
  Antisense strand to SEQ ID NO: 2478266
cagauaagugagaacgcgc

SEQ ID NO: 2478268 - RNA, 19 nt, Artificial Sequence
  Description of Artificial Sequence: Synthetic oligonucleotide
  Sense strand starting at position 632 of SEQ ID NO: 1887521
aguugaucacccggaagca

SEQ ID NO: 2478269 - RNA, 19 nt, Artificial Sequence
  Description of Artificial Sequence: Synthetic oligonucleotide
  Antisense strand to SEQ ID NO: 2478268
ugcuuccgggugaucaacu

SEQ ID NO: 2478270 - RNA, 19 nt, Artificial Sequence
  Description of Artificial Sequence: Synthetic oligonucleotide
  Sense strand starting at position 751 of SEQ ID NO: 1887521
agaucuauggcacagcaga

SEQ ID NO: 2478271 - RNA, 19 nt, Artificial Sequence
  Description of Artificial Sequence: Synthetic oligonucleotide
  Antisense strand to SEQ ID NO: 2478270
ucugcugugccauagaucu

SEQ ID NO: 2478272 - RNA, 19 nt, Artificial Sequence
  Description of Artificial Sequence: Synthetic oligonucleotide
  Sense strand starting at position 838 of SEQ ID NO: 1887521
ucacaauaaguaugugaug

SEQ ID NO: 2478273 - RNA, 19 nt, Artificial Sequence
  Description of Artificial Sequence: Synthetic oligonucleotide
  Antisense strand to SEQ ID NO: 2478272
caucacauacuuauuguga

SEQ ID NO: 2478274 - RNA, 19 nt, Artificial Sequence
  Description of Artificial Sequence: Synthetic oligonucleotide
  Sense strand starting at position 860 of SEQ ID NO: 1887521
cugauauguuaaucagcuu

SEQ ID NO: 2478275 - RNA, 19 nt, Artificial Sequence
  Description of Artificial Sequence: Synthetic oligonucleotide
  Antisense strand to SEQ ID NO: 2478274
aagcugauuaacauaucag

SEQ ID NO: 2478276 - RNA, 19 nt, Artificial Sequence
  Description of Artificial Sequence: Synthetic oligonucleotide
  Sense strand starting at position 898 of SEQ ID NO: 1887521
guguacauacgucauaaua

SEQ ID NO: 2478277 - RNA, 19 nt, Artificial Sequence
  Description of Artificial Sequence: Synthetic oligonucleotide
  Antisense strand to SEQ ID NO: 2478276
uauuaugacguauguacac

SEQ ID NO: 2478278 - RNA, 19 nt, Artificial Sequence
  Description of Artificial Sequence: Synthetic oligonucleotide
  Sense strand starting at position 1017 of SEQ ID NO: 1887521
cugggugaggguugguuau

SEQ ID NO: 2478279 - RNA, 19 nt, Artificial Sequence
  Description of Artificial Sequence: Synthetic oligonucleotide
  Antisense strand to SEQ ID NO: 2478278
auaaccaacccucacccag

SEQ ID NO: 2478280 - RNA, 19 nt, Artificial Sequence
  Description of Artificial Sequence: Synthetic oligonucleotide
  Sense strand starting at position 1046 of SEQ ID NO: 1887521
uuuggaagaguuugcaauc

SEQ ID NO: 2478281 - RNA, 19 nt, Artificial Sequence
  Description of Artificial Sequence: Synthetic oligonucleotide
  Antisense strand to SEQ ID NO: 2478280
gauugcaaacucuuccaaa

SEQ ID NO: 2478282 - RNA, 19 nt, Artificial Sequence
  Description of Artificial Sequence: Synthetic oligonucleotide
  Sense strand starting at position 1047 of SEQ ID NO: 1887521
uuggaagaguuugcaaucu

SEQ ID NO: 2478283 - RNA, 19 nt, Artificial Sequence
  Description of Artificial Sequence: Synthetic oligonucleotide
  Antisense strand to SEQ ID NO: 2478282
agauugcaaacucuuccaa

SEQ ID NO: 2478284 - RNA, 19 nt, Artificial Sequence
  Description of Artificial Sequence: Synthetic oligonucleotide
  Sense strand starting at position 1053 of SEQ ID NO: 1887521
gaguuugcaaucuagggua

SEQ ID NO: 2478285 - RNA, 19 nt, Artificial Sequence
  Description of Artificial Sequence: Synthetic oligonucleotide
  Antisense strand to SEQ ID NO: 2478284
uacccuagauugcaaacuc

SEQ ID NO: 2478286 - RNA, 19 nt, Artificial Sequence
  Description of Artificial Sequence: Synthetic oligonucleotide
  Sense strand starting at position 1055 of SEQ ID NO: 1887521
guuugcaaucuaggguaua

SEQ ID NO: 2478287 - RNA, 19 nt, Artificial Sequence
  Description of Artificial Sequence: Synthetic oligonucleotide
  Antisense strand to SEQ ID NO: 2478286
uauacccuagauugcaaac

SEQ ID NO: 2478288 - RNA, 19 nt, Artificial Sequence
  Description of Artificial Sequence: Synthetic oligonucleotide
  Sense strand starting at position 1344 of SEQ ID NO: 1887521
acaucacugucuccaugua

SEQ ID NO: 2478289 - RNA, 19 nt, Artificial Sequence
  Description of Artificial Sequence: Synthetic oligonucleotide
  Antisense strand to SEQ ID NO: 2478288
uacauggagacagugaugu

SEQ ID NO: 2478290 - RNA, 19 nt, Artificial Sequence
  Description of Artificial Sequence: Synthetic oligonucleotide
  Sense strand starting at position 1586 of SEQ ID NO: 1887521
caggcuugagcagggaauu

SEQ ID NO: 2478291 - RNA, 19 nt, Artificial Sequence
  Description of Artificial Sequence: Synthetic oligonucleotide
  Antisense strand to SEQ ID NO: 2478290
aauucccugcucaagccug

SEQ ID NO: 2478292 - RNA, 19 nt, Artificial Sequence
  Description of Artificial Sequence: Synthetic oligonucleotide
  Sense strand starting at position 1739 of SEQ ID NO: 1887521
gacagaacucugcagcaga

SEQ ID NO: 2478293 - RNA, 19 nt, Artificial Sequence
  Description of Artificial Sequence: Synthetic oligonucleotide
  Antisense strand to SEQ ID NO: 2478292
ucugcugcagaguucuguc

SEQ ID NO: 2478294 - RNA, 19 nt, Artificial Sequence
  Description of Artificial Sequence: Synthetic oligonucleotide
  Sense strand starting at position 1933 of SEQ ID NO: 1887521
ggcagaugaccguaaacua

SEQ ID NO: 2478295 - RNA, 19 nt, Artificial Sequence
  Description of Artificial Sequence: Synthetic oligonucleotide
  Antisense strand to SEQ ID NO: 2478294
uaguuuacggucaucugcc

SEQ ID NO: 2478296 - RNA, 19 nt, Artificial Sequence
  Description of Artificial Sequence: Synthetic oligonucleotide
  Sense strand starting at position 1949 of SEQ ID NO: 1887521
cuaguuaccagauguguca

SEQ ID NO: 2478297 - RNA, 19 nt, Artificial Sequence
  Description of Artificial Sequence: Synthetic oligonucleotide
  Antisense strand to SEQ ID NO: 2478296
ugacacaucugguaacuag

SEQ ID NO: 2478298 - RNA, 19 nt, Artificial Sequence
  Description of Artificial Sequence: Synthetic oligonucleotide
  Sense strand starting at position 1973 of SEQ ID NO: 1887521
uuucuaaaucuaugggaca

SEQ ID NO: 2478299 - RNA, 19 nt, Artificial Sequence
  Description of Artificial Sequence: Synthetic oligonucleotide
  Antisense strand to SEQ ID NO: 2478298
ugucccauagauuuagaaa

SEQ ID NO: 2478300 - RNA, 19 nt, Artificial Sequence
  Description of Artificial Sequence: Synthetic oligonucleotide
  Sense strand starting at position 2032 of SEQ ID NO: 1887521
gucccaacuccacaaguua

SEQ ID NO: 2478301 - RNA, 19 nt, Artificial Sequence
  Description of Artificial Sequence: Synthetic oligonucleotide
  Antisense strand to SEQ ID NO: 2478300
uaacuuguggaguugggac

SEQ ID NO: 2478302 - RNA, 19 nt, Artificial Sequence
  Description of Artificial Sequence: Synthetic oligonucleotide
  Sense strand starting at position 2089 of SEQ ID NO: 1887521
agcugacauuuccuuguau

SEQ ID NO: 2478303 - RNA, 19 nt, Artificial Sequence
  Description of Artificial Sequence: Synthetic oligonucleotide
  Antisense strand to SEQ ID NO: 2478302
auacaaggaaaugucagcu

SEQ ID NO: 2478304 - RNA, 19 nt, Artificial Sequence
  Description of Artificial Sequence: Synthetic oligonucleotide
  Sense strand starting at position 2090 of SEQ ID NO: 1887521
gcugacauuuccuuguauu

SEQ ID NO: 2478305 - RNA, 19 nt, Artificial Sequence
  Description of Artificial Sequence: Synthetic oligonucleotide
  Antisense strand to SEQ ID NO: 2478304
aauacaaggaaaugucagc

SEQ ID NO: 2478306 - RNA, 19 nt, Artificial Sequence
  Description of Artificial Sequence: Synthetic oligonucleotide
  Sense strand starting at position 2144 of SEQ ID NO: 1887521
uuaauauugugaucuaugc

SEQ ID NO: 2478307 - RNA, 19 nt, Artificial Sequence
  Description of Artificial Sequence: Synthetic oligonucleotide
  Antisense strand to SEQ ID NO: 2478306
gcauagaucacaauauuaa

SEQ ID NO: 2478308 - RNA, 19 nt, Artificial Sequence
  Description of Artificial Sequence: Synthetic oligonucleotide
  Sense strand starting at position 3039 of SEQ ID NO: 1887521
agagaucugcugcaccaca

SEQ ID NO: 2478309 - RNA, 19 nt, Artificial Sequence
  Description of Artificial Sequence: Synthetic oligonucleotide
  Antisense strand to SEQ ID NO: 2478308
uguggugcagcagaucucu

SEQ ID NO: 2478310 - RNA, 19 nt, Artificial Sequence
  Description of Artificial Sequence: Synthetic oligonucleotide
  Sense strand starting at position 3061 of SEQ ID NO: 1887521
gacccaucgucagcaauaa

SEQ ID NO: 2478311 - RNA, 19 nt, Artificial Sequence
  Description of Artificial Sequence: Synthetic oligonucleotide
  Antisense strand to SEQ ID NO: 2478310
uuauugcugacgauggguc

SEQ ID NO: 2478312 - RNA, 19 nt, Artificial Sequence
  Description of Artificial Sequence: Synthetic oligonucleotide
  Sense strand starting at position 3091 of SEQ ID NO: 1887521
cuugaaauuuguuaacgga

SEQ ID NO: 2478313 - RNA, 19 nt, Artificial Sequence
  Description of Artificial Sequence: Synthetic oligonucleotide
  Antisense strand to SEQ ID NO: 2478312
uccguuaacaaauuucaag

SEQ ID NO: 2478314 - RNA, 19 nt, Artificial Sequence
  Description of Artificial Sequence: Synthetic oligonucleotide
  Sense strand starting at position 3094 of SEQ ID NO: 1887521
gaaauuuguuaacggaaua

SEQ ID NO: 2478315 - RNA, 19 nt, Artificial Sequence
  Description of Artificial Sequence: Synthetic oligonucleotide
  Antisense strand to SEQ ID NO: 2478314
uauuccguuaacaaauuuc

SEQ ID NO: 2478316 - RNA, 19 nt, Artificial Sequence
  Description of Artificial Sequence: Synthetic oligonucleotide
  Sense strand starting at position 3106 of SEQ ID NO: 1887521
cggaauagaccucauguua

SEQ ID NO: 2478317 - RNA, 19 nt, Artificial Sequence
  Description of Artificial Sequence: Synthetic oligonucleotide
  Antisense strand to SEQ ID NO: 2478316
uaacaugaggucuauuccg

SEQ ID NO: 2478318 - RNA, 19 nt, Artificial Sequence
  Description of Artificial Sequence: Synthetic oligonucleotide
  Sense strand starting at position 3212 of SEQ ID NO: 1887521
uagugaugugaacagcgaa

SEQ ID NO: 2478319 - RNA, 19 nt, Artificial Sequence
  Description of Artificial Sequence: Synthetic oligonucleotide
  Antisense strand to SEQ ID NO: 2478318
uucgcuguucacaucacua

SEQ ID NO: 2478320 - RNA, 19 nt, Artificial Sequence
  Description of Artificial Sequence: Synthetic oligonucleotide
  Sense strand starting at position 3243 of SEQ ID NO: 1887521
aaggucucagcuggaaaua

SEQ ID NO: 2478321 - RNA, 19 nt, Artificial Sequence
  Description of Artificial Sequence: Synthetic oligonucleotide
  Antisense strand to SEQ ID NO: 2478320
uauuuccagcugagaccuu

SEQ ID NO: 2478322 - RNA, 19 nt, Artificial Sequence
  Description of Artificial Sequence: Synthetic oligonucleotide
  Sense strand starting at position 3329 of SEQ ID NO: 1887521
cuguccaugcccuagagau

SEQ ID NO: 2478323 - RNA, 19 nt, Artificial Sequence
  Description of Artificial Sequence: Synthetic oligonucleotide
  Antisense strand to SEQ ID NO: 2478322
aucucuagggcauggacag

SEQ ID NO: 2478324 - RNA, 19 nt, Artificial Sequence
  Description of Artificial Sequence: Synthetic oligonucleotide
  Sense strand starting at position 3736 of SEQ ID NO: 1887521
ggcucagaugugggagcaa

SEQ ID NO: 2478325 - RNA, 19 nt, Artificial Sequence
  Description of Artificial Sequence: Synthetic oligonucleotide
  Antisense strand to SEQ ID NO: 2478324
uugcucccacaucugagcc

SEQ ID NO: 2478326 - RNA, 19 nt, Artificial Sequence
  Description of Artificial Sequence: Synthetic oligonucleotide
  Sense strand starting at position 3822 of SEQ ID NO: 1887521
ggacuagccacaugguaga

SEQ ID NO: 2478327 - RNA, 19 nt, Artificial Sequence
  Description of Artificial Sequence: Synthetic oligonucleotide
  Antisense strand to SEQ ID NO: 2478326
ucuaccauguggcuagucc

SEQ ID NO: 2478328 - RNA, 19 nt, Artificial Sequence
  Description of Artificial Sequence: Synthetic oligonucleotide
  Sense strand starting at position 3887 of SEQ ID NO: 1887521
caacgacuugcuggagaaa

SEQ ID NO: 2478329 - RNA, 19 nt, Artificial Sequence
  Description of Artificial Sequence: Synthetic oligonucleotide
  Antisense strand to SEQ ID NO: 2478328
uuucuccagcaagucguug

SEQ ID NO: 2478330 - RNA, 19 nt, Artificial Sequence
  Description of Artificial Sequence: Synthetic oligonucleotide
  Sense strand starting at position 41 of SEQ ID NO: 1887522
agacacauuucuuagguau

SEQ ID NO: 2478331 - RNA, 19 nt, Artificial Sequence
  Description of Artificial Sequence: Synthetic oligonucleotide
  Antisense strand to SEQ ID NO: 2478330
auaccuaagaaaugugucu

SEQ ID NO: 2478332 - RNA, 19 nt, Artificial Sequence
  Description of Artificial Sequence: Synthetic oligonucleotide
  Sense strand starting at position 43 of SEQ ID NO: 1887522
acacauuucuuagguauuu

SEQ ID NO: 2478333 - RNA, 19 nt, Artificial Sequence
  Description of Artificial Sequence: Synthetic oligonucleotide
  Antisense strand to SEQ ID NO: 2478332
aaauaccuaagaaaugugu

SEQ ID NO: 2478334 - RNA, 19 nt, Artificial Sequence
  Description of Artificial Sequence: Synthetic oligonucleotide
  Sense strand starting at position 83 of SEQ ID NO: 1887522
gugauauaauuuguccugu

SEQ ID NO: 2478335 - RNA, 19 nt, Artificial Sequence
  Description of Artificial Sequence: Synthetic oligonucleotide
  Antisense strand to SEQ ID NO: 2478334
acaggacaaauuauaucac

SEQ ID NO: 2478336 - RNA, 19 nt, Artificial Sequence
  Description of Artificial Sequence: Synthetic oligonucleotide
  Sense strand starting at position 118 of SEQ ID NO: 1887522
ccugacauguaagauaaau

SEQ ID NO: 2478337 - RNA, 19 nt, Artificial Sequence
  Description of Artificial Sequence: Synthetic oligonucleotide
  Antisense strand to SEQ ID NO: 2478336
auuuaucuuacaugucagg

SEQ ID NO: 2478338 - RNA, 19 nt, Artificial Sequence
  Description of Artificial Sequence: Synthetic oligonucleotide
  Sense strand starting at position 139 of SEQ ID NO: 1887522
aucuaauugugggcuuacu

SEQ ID NO: 2478339 - RNA, 19 nt, Artificial Sequence
  Description of Artificial Sequence: Synthetic oligonucleotide
  Antisense strand to SEQ ID NO: 2478338
aguaagcccacaauuagau

SEQ ID NO: 2478340 - RNA, 19 nt, Artificial Sequence
  Description of Artificial Sequence: Synthetic oligonucleotide
  Sense strand starting at position 172 of SEQ ID NO: 1887522
acauuuaaguuccagucau

SEQ ID NO: 2478341 - RNA, 19 nt, Artificial Sequence
  Description of Artificial Sequence: Synthetic oligonucleotide
  Antisense strand to SEQ ID NO: 2478340
augacuggaacuuaaaugu

SEQ ID NO: 2478342 - RNA, 19 nt, Artificial Sequence
  Description of Artificial Sequence: Synthetic oligonucleotide
  Sense strand starting at position 202 of SEQ ID NO: 1887522
gcuguaucuguguacagaa

SEQ ID NO: 2478343 - RNA, 19 nt, Artificial Sequence
  Description of Artificial Sequence: Synthetic oligonucleotide
  Antisense strand to SEQ ID NO: 2478342
uucuguacacagauacagc

SEQ ID NO: 2478344 - RNA, 19 nt, Artificial Sequence
  Description of Artificial Sequence: Synthetic oligonucleotide
  Sense strand starting at position 212 of SEQ ID NO: 1887522
uguacagaaugcuaaagaa

SEQ ID NO: 2478345 - RNA, 19 nt, Artificial Sequence
  Description of Artificial Sequence: Synthetic oligonucleotide
  Antisense strand to SEQ ID NO: 2478344
uucuuuagcauucuguaca

SEQ ID NO: 2478346 - RNA, 19 nt, Artificial Sequence
  Description of Artificial Sequence: Synthetic oligonucleotide
  Sense strand starting at position 222 of SEQ ID NO: 1887522
gcuaaagaauaagacauaa

SEQ ID NO: 2478347 - RNA, 19 nt, Artificial Sequence
  Description of Artificial Sequence: Synthetic oligonucleotide
  Antisense strand to SEQ ID NO: 2478346
uuaugucuuauucuuuagc

SEQ ID NO: 2478348 - RNA, 19 nt, Artificial Sequence
  Description of Artificial Sequence: Synthetic oligonucleotide
  Sense strand starting at position 283 of SEQ ID NO: 1887522
gacuguucgcuugggcaaa

SEQ ID NO: 2478349 - RNA, 19 nt, Artificial Sequence
  Description of Artificial Sequence: Synthetic oligonucleotide
  Antisense strand to SEQ ID NO: 2478348
uuugcccaagcgaacaguc

SEQ ID NO: 2478350 - RNA, 19 nt, Artificial Sequence
  Description of Artificial Sequence: Synthetic oligonucleotide
  Sense strand starting at position 440 of SEQ ID NO: 1887522
cccaguaaagucuggguuu

SEQ ID NO: 2478351 - RNA, 19 nt, Artificial Sequence
  Description of Artificial Sequence: Synthetic oligonucleotide
  Antisense strand to SEQ ID NO: 2478350
aaacccagacuuuacuggg

SEQ ID NO: 2478352 - RNA, 19 nt, Artificial Sequence
  Description of Artificial Sequence: Synthetic oligonucleotide
  Sense strand starting at position 464 of SEQ ID NO: 1887522
acaguaaugcaucauguca

SEQ ID NO: 2478353 - RNA, 19 nt, Artificial Sequence
  Description of Artificial Sequence: Synthetic oligonucleotide
  Antisense strand to SEQ ID NO: 2478352
ugacaugaugcauuacugu

SEQ ID NO: 2478354 - RNA, 19 nt, Artificial Sequence
  Description of Artificial Sequence: Synthetic oligonucleotide
  Sense strand starting at position 471 of SEQ ID NO: 1887522
ugcaucaugucaguaucua

SEQ ID NO: 2478355 - RNA, 19 nt, Artificial Sequence
  Description of Artificial Sequence: Synthetic oligonucleotide
  Antisense strand to SEQ ID NO: 2478354
uagauacugacaugaugca

SEQ ID NO: 2478356 - RNA, 19 nt, Artificial Sequence
  Description of Artificial Sequence: Synthetic oligonucleotide
  Sense strand starting at position 472 of SEQ ID NO: 1887522
gcaucaugucaguaucuac

SEQ ID NO: 2478357 - RNA, 19 nt, Artificial Sequence
  Description of Artificial Sequence: Synthetic oligonucleotide
  Antisense strand to SEQ ID NO: 2478356
guagauacugacaugaugc

SEQ ID NO: 2478358 - RNA, 19 nt, Artificial Sequence
  Description of Artificial Sequence: Synthetic oligonucleotide
  Sense strand starting at position 513 of SEQ ID NO: 1887522
uugugaugacagcaucaga

SEQ ID NO: 2478359 - RNA, 19 nt, Artificial Sequence
  Description of Artificial Sequence: Synthetic oligonucleotide
  Antisense strand to SEQ ID NO: 2478358
ucugaugcugucaucacaa

SEQ ID NO: 2478360 - RNA, 19 nt, Artificial Sequence
  Description of Artificial Sequence: Synthetic oligonucleotide
  Sense strand starting at position 559 of SEQ ID NO: 1887522
ugcuuaugaucuuugcaac

SEQ ID NO: 2478361 - RNA, 19 nt, Artificial Sequence
  Description of Artificial Sequence: Synthetic oligonucleotide
  Antisense strand to SEQ ID NO: 2478360
guugcaaagaucauaagca

SEQ ID NO: 2478362 - RNA, 19 nt, Artificial Sequence
  Description of Artificial Sequence: Synthetic oligonucleotide
  Sense strand starting at position 560 of SEQ ID NO: 1887522
gcuuaugaucuuugcaacu

SEQ ID NO: 2478363 - RNA, 19 nt, Artificial Sequence
  Description of Artificial Sequence: Synthetic oligonucleotide
  Antisense strand to SEQ ID NO: 2478362
aguugcaaagaucauaagc

SEQ ID NO: 2478364 - RNA, 19 nt, Artificial Sequence
  Description of Artificial Sequence: Synthetic oligonucleotide
  Sense strand starting at position 1219 of SEQ ID NO: 1887522
cagagaaaugccuauguac

SEQ ID NO: 2478365 - RNA, 19 nt, Artificial Sequence
  Description of Artificial Sequence: Synthetic oligonucleotide
  Antisense strand to SEQ ID NO: 2478364
guacauaggcauuucucug

SEQ ID NO: 2478366 - RNA, 19 nt, Artificial Sequence
  Description of Artificial Sequence: Synthetic oligonucleotide
  Sense strand starting at position 1560 of SEQ ID NO: 1887522
guuuacauuuaggaacagu

SEQ ID NO: 2478367 - RNA, 19 nt, Artificial Sequence
  Description of Artificial Sequence: Synthetic oligonucleotide
  Antisense strand to SEQ ID NO: 2478366
acuguuccuaaauguaaac

SEQ ID NO: 2478368 - RNA, 19 nt, Artificial Sequence
  Description of Artificial Sequence: Synthetic oligonucleotide
  Sense strand starting at position 1887 of SEQ ID NO: 1887522
aagacuccgucuccgagaa

SEQ ID NO: 2478369 - RNA, 19 nt, Artificial Sequence
  Description of Artificial Sequence: Synthetic oligonucleotide
  Antisense strand to SEQ ID NO: 2478368
uucucggagacggagucuu

SEQ ID NO: 2478370 - RNA, 19 nt, Artificial Sequence
  Description of Artificial Sequence: Synthetic oligonucleotide
  Sense strand starting at position 2258 of SEQ ID NO: 1887522
gaaggauccugguugguaa

SEQ ID NO: 2478371 - RNA, 19 nt, Artificial Sequence
  Description of Artificial Sequence: Synthetic oligonucleotide
  Antisense strand to SEQ ID NO: 2478370
uuaccaaccaggauccuuc

SEQ ID NO: 2478372 - RNA, 19 nt, Artificial Sequence
  Description of Artificial Sequence: Synthetic oligonucleotide
  Sense strand starting at position 2469 of SEQ ID NO: 1887522
ugcgccgucgucuucuaau

SEQ ID NO: 2478373 - RNA, 19 nt, Artificial Sequence
  Description of Artificial Sequence: Synthetic oligonucleotide
  Antisense strand to SEQ ID NO: 2478372
auuagaagacgacggcgca

SEQ ID NO: 2478374 - RNA, 19 nt, Artificial Sequence
  Description of Artificial Sequence: Synthetic oligonucleotide
  Sense strand starting at position 2492 of SEQ ID NO: 1887522
guuccucucccuuggaguu

SEQ ID NO: 2478375 - RNA, 19 nt, Artificial Sequence
  Description of Artificial Sequence: Synthetic oligonucleotide
  Antisense strand to SEQ ID NO: 2478374
aacuccaagggagaggaac

SEQ ID NO: 2478376 - RNA, 19 nt, Artificial Sequence
  Description of Artificial Sequence: Synthetic oligonucleotide
  Sense strand starting at position 2732 of SEQ ID NO: 1887522
gucugaugccugucucugu

SEQ ID NO: 2478377 - RNA, 19 nt, Artificial Sequence
  Description of Artificial Sequence: Synthetic oligonucleotide
  Antisense strand to SEQ ID NO: 2478376
acagagacaggcaucagac

SEQ ID NO: 2478378 - RNA, 19 nt, Artificial Sequence
  Description of Artificial Sequence: Synthetic oligonucleotide
  Sense strand starting at position 2875 of SEQ ID NO: 1887522
cuguguccuguuuaaguua

SEQ ID NO: 2478379 - RNA, 19 nt, Artificial Sequence
  Description of Artificial Sequence: Synthetic oligonucleotide
  Antisense strand to SEQ ID NO: 2478378
uaacuuaaacaggacacag

SEQ ID NO: 2478380 - RNA, 19 nt, Artificial Sequence
  Description of Artificial Sequence: Synthetic oligonucleotide
  Sense strand starting at position 2887 of SEQ ID NO: 1887522
uaaguuaagccuuugcguu

SEQ ID NO: 2478381 - RNA, 19 nt, Artificial Sequence
  Description of Artificial Sequence: Synthetic oligonucleotide
  Antisense strand to SEQ ID NO: 2478380
aacgcaaaggcuuaacuua

SEQ ID NO: 2478382 - RNA, 19 nt, Artificial Sequence
  Description of Artificial Sequence: Synthetic oligonucleotide
  Sense strand starting at position 2945 of SEQ ID NO: 1887522
ccgucaacucgugggaauu

SEQ ID NO: 2478383 - RNA, 19 nt, Artificial Sequence
  Description of Artificial Sequence: Synthetic oligonucleotide
  Antisense strand to SEQ ID NO: 2478382
aauucccacgaguugacgg

SEQ ID NO: 2478384 - RNA, 19 nt, Artificial Sequence
  Description of Artificial Sequence: Synthetic oligonucleotide
  Sense strand starting at position 2946 of SEQ ID NO: 1887522
cgucaacucgugggaauuc

SEQ ID NO: 2478385 - RNA, 19 nt, Artificial Sequence
  Description of Artificial Sequence: Synthetic oligonucleotide
  Antisense strand to SEQ ID NO: 2478384
gaauucccacgaguugacg

SEQ ID NO: 2478386 - RNA, 19 nt, Artificial Sequence
  Description of Artificial Sequence: Synthetic oligonucleotide
  Sense strand starting at position 2966 of SEQ ID NO: 1887522
gguucuccugcgggauuaa

SEQ ID NO: 2478387 - RNA, 19 nt, Artificial Sequence
  Description of Artificial Sequence: Synthetic oligonucleotide
  Antisense strand to SEQ ID NO: 2478386
uuaaucccgcaggagaacc

SEQ ID NO: 2478388 - RNA, 19 nt, Artificial Sequence
  Description of Artificial Sequence: Synthetic oligonucleotide
  Sense strand starting at position 2967 of SEQ ID NO: 1887522
guucuccugcgggauuaau

SEQ ID NO: 2478389 - RNA, 19 nt, Artificial Sequence
  Description of Artificial Sequence: Synthetic oligonucleotide
  Antisense strand to SEQ ID NO: 2478388
auuaaucccgcaggagaac

SEQ ID NO: 2478390 - RNA, 19 nt, Artificial Sequence
  Description of Artificial Sequence: Synthetic oligonucleotide
  Sense strand starting at position 2976 of SEQ ID NO: 1887522
cgggauuaauuauccuacu

SEQ ID NO: 2478391 - RNA, 19 nt, Artificial Sequence
  Description of Artificial Sequence: Synthetic oligonucleotide
  Antisense strand to SEQ ID NO: 2478390
aguaggauaauuaaucccg

SEQ ID NO: 2478392 - RNA, 19 nt, Artificial Sequence
  Description of Artificial Sequence: Synthetic oligonucleotide
  Sense strand starting at position 2977 of SEQ ID NO: 1887522
gggauuaauuauccuacuu

SEQ ID NO: 2478393 - RNA, 19 nt, Artificial Sequence
  Description of Artificial Sequence: Synthetic oligonucleotide
  Antisense strand to SEQ ID NO: 2478392
aaguaggauaauuaauccc

SEQ ID NO: 2478394 - RNA, 19 nt, Artificial Sequence
  Description of Artificial Sequence: Synthetic oligonucleotide
  Sense strand starting at position 3081 of SEQ ID NO: 1887522
acucuuaauucguugaaca

SEQ ID NO: 2478395 - RNA, 19 nt, Artificial Sequence
  Description of Artificial Sequence: Synthetic oligonucleotide
  Antisense strand to SEQ ID NO: 2478394
uguucaacgaauuaagagu

SEQ ID NO: 2478396 - RNA, 19 nt, Artificial Sequence
  Description of Artificial Sequence: Synthetic oligonucleotide
  Sense strand starting at position 3082 of SEQ ID NO: 1887522
cucuuaauucguugaacau

SEQ ID NO: 2478397 - RNA, 19 nt, Artificial Sequence
  Description of Artificial Sequence: Synthetic oligonucleotide
  Antisense strand to SEQ ID NO: 2478396
auguucaacgaauuaagag

SEQ ID NO: 2478398 - RNA, 19 nt, Artificial Sequence
  Description of Artificial Sequence: Synthetic oligonucleotide
  Sense strand starting at position 3083 of SEQ ID NO: 1887522
ucuuaauucguugaacaug

SEQ ID NO: 2478399 - RNA, 19 nt, Artificial Sequence
  Description of Artificial Sequence: Synthetic oligonucleotide
  Antisense strand to SEQ ID NO: 2478398
cauguucaacgaauuaaga

SEQ ID NO: 2478400 - RNA, 19 nt, Artificial Sequence
  Description of Artificial Sequence: Synthetic oligonucleotide
  Sense strand starting at position 3238 of SEQ ID NO: 1887522
ccacguaggucucuuuacu

SEQ ID NO: 2478401 - RNA, 19 nt, Artificial Sequence
  Description of Artificial Sequence: Synthetic oligonucleotide
  Antisense strand to SEQ ID NO: 2478400
aguaaagagaccuacgugg

SEQ ID NO: 2478402 - RNA, 19 nt, Artificial Sequence
  Description of Artificial Sequence: Synthetic oligonucleotide
  Sense strand starting at position 3274 of SEQ ID NO: 1887522
uugaaaucagucugucagu

SEQ ID NO: 2478403 - RNA, 19 nt, Artificial Sequence
  Description of Artificial Sequence: Synthetic oligonucleotide
  Antisense strand to SEQ ID NO: 2478402
acugacagacugauuucaa

SEQ ID NO: 2478404 - RNA, 19 nt, Artificial Sequence
  Description of Artificial Sequence: Synthetic oligonucleotide
  Sense strand starting at position 3279 of SEQ ID NO: 1887522
aucagucugucagugcuaa

SEQ ID NO: 2478405 - RNA, 19 nt, Artificial Sequence
  Description of Artificial Sequence: Synthetic oligonucleotide
  Antisense strand to SEQ ID NO: 2478404
uuagcacugacagacugau

SEQ ID NO: 2478406 - RNA, 19 nt, Artificial Sequence
  Description of Artificial Sequence: Synthetic oligonucleotide
  Sense strand starting at position 3435 of SEQ ID NO: 1887522
ccucgaugcucccugaaag

SEQ ID NO: 2478407 - RNA, 19 nt, Artificial Sequence
  Description of Artificial Sequence: Synthetic oligonucleotide
  Antisense strand to SEQ ID NO: 2478406
cuuucagggagcaucgagg

SEQ ID NO: 2478408 - RNA, 19 nt, Artificial Sequence
  Description of Artificial Sequence: Synthetic oligonucleotide
  Sense strand starting at position 3499 of SEQ ID NO: 1887522
ccuuaaggguucccucaga

SEQ ID NO: 2478409 - RNA, 19 nt, Artificial Sequence
  Description of Artificial Sequence: Synthetic oligonucleotide
  Antisense strand to SEQ ID NO: 2478408
ucugagggaacccuuaagg

SEQ ID NO: 2478410 - RNA, 19 nt, Artificial Sequence
  Description of Artificial Sequence: Synthetic oligonucleotide
  Sense strand starting at position 1 of SEQ ID NO: 1887523
aacagauuccuauggugca

SEQ ID NO: 2478411 - RNA, 19 nt, Artificial Sequence
  Description of Artificial Sequence: Synthetic oligonucleotide
  Antisense strand to SEQ ID NO: 2478410
ugcaccauaggaaucuguu

SEQ ID NO: 2478412 - RNA, 19 nt, Artificial Sequence
  Description of Artificial Sequence: Synthetic oligonucleotide
  Sense strand starting at position 80 of SEQ ID NO: 1887523
cggcauauuccugaagaaa

SEQ ID NO: 2478413 - RNA, 19 nt, Artificial Sequence
  Description of Artificial Sequence: Synthetic oligonucleotide
  Antisense strand to SEQ ID NO: 2478412
uuucuucaggaauaugccg

SEQ ID NO: 2478414 - RNA, 19 nt, Artificial Sequence
  Description of Artificial Sequence: Synthetic oligonucleotide
  Sense strand starting at position 370 of SEQ ID NO: 1887523
ggaacaccgaccugugauu

SEQ ID NO: 2478415 - RNA, 19 nt, Artificial Sequence
  Description of Artificial Sequence: Synthetic oligonucleotide
  Antisense strand to SEQ ID NO: 2478414
aaucacaggucgguguucc

SEQ ID NO: 2478416 - RNA, 19 nt, Artificial Sequence
  Description of Artificial Sequence: Synthetic oligonucleotide
  Sense strand starting at position 372 of SEQ ID NO: 1887523
aacaccgaccugugauuau

SEQ ID NO: 2478417 - RNA, 19 nt, Artificial Sequence
  Description of Artificial Sequence: Synthetic oligonucleotide
  Antisense strand to SEQ ID NO: 2478416
auaaucacaggucgguguu

SEQ ID NO: 2478418 - RNA, 19 nt, Artificial Sequence
  Description of Artificial Sequence: Synthetic oligonucleotide
  Sense strand starting at position 611 of SEQ ID NO: 1887523
agggaagucauuggaggua

SEQ ID NO: 2478419 - RNA, 19 nt, Artificial Sequence
  Description of Artificial Sequence: Synthetic oligonucleotide
  Antisense strand to SEQ ID NO: 2478418
uaccuccaaugacuucccu

SEQ ID NO: 2478420 - RNA, 19 nt, Artificial Sequence
  Description of Artificial Sequence: Synthetic oligonucleotide
  Sense strand starting at position 614 of SEQ ID NO: 1887523
gaagucauuggagguaauc

SEQ ID NO: 2478421 - RNA, 19 nt, Artificial Sequence
  Description of Artificial Sequence: Synthetic oligonucleotide
  Antisense strand to SEQ ID NO: 2478420
gauuaccuccaaugacuuc

SEQ ID NO: 2478422 - RNA, 19 nt, Artificial Sequence
  Description of Artificial Sequence: Synthetic oligonucleotide
  Sense strand starting at position 796 of SEQ ID NO: 1887523
aguaguugugaaugaaggu

SEQ ID NO: 2478423 - RNA, 19 nt, Artificial Sequence
  Description of Artificial Sequence: Synthetic oligonucleotide
  Antisense strand to SEQ ID NO: 2478422
accuucauucacaacuacu

SEQ ID NO: 2478424 - RNA, 19 nt, Artificial Sequence
  Description of Artificial Sequence: Synthetic oligonucleotide
  Sense strand starting at position 825 of SEQ ID NO: 1887523
augcuuggauaaucuuuaa

SEQ ID NO: 2478425 - RNA, 19 nt, Artificial Sequence
  Description of Artificial Sequence: Synthetic oligonucleotide
  Antisense strand to SEQ ID NO: 2478424
uuaaagauuauccaagcau

SEQ ID NO: 2478426 - RNA, 19 nt, Artificial Sequence
  Description of Artificial Sequence: Synthetic oligonucleotide
  Sense strand starting at position 838 of SEQ ID NO: 1887523
cuuuaaauucuggguacag

SEQ ID NO: 2478427 - RNA, 19 nt, Artificial Sequence
  Description of Artificial Sequence: Synthetic oligonucleotide
  Antisense strand to SEQ ID NO: 2478426
cuguacccagaauuuaaag

SEQ ID NO: 2478428 - RNA, 19 nt, Artificial Sequence
  Description of Artificial Sequence: Synthetic oligonucleotide
  Sense strand starting at position 839 of SEQ ID NO: 1887523
uuuaaauucuggguacaga

SEQ ID NO: 2478429 - RNA, 19 nt, Artificial Sequence
  Description of Artificial Sequence: Synthetic oligonucleotide
  Antisense strand to SEQ ID NO: 2478428
ucuguacccagaauuuaaa

SEQ ID NO: 2478430 - RNA, 19 nt, Artificial Sequence
  Description of Artificial Sequence: Synthetic oligonucleotide
  Sense strand starting at position 963 of SEQ ID NO: 1887523
ccuggcaaguuauugauua

SEQ ID NO: 2478431 - RNA, 19 nt, Artificial Sequence
  Description of Artificial Sequence: Synthetic oligonucleotide
  Antisense strand to SEQ ID NO: 2478430
uaaucaauaacuugccagg

SEQ ID NO: 2478432 - RNA, 19 nt, Artificial Sequence
  Description of Artificial Sequence: Synthetic oligonucleotide
  Sense strand starting at position 989 of SEQ ID NO: 1887523
cuguaagcucuguaugaac

SEQ ID NO: 2478433 - RNA, 19 nt, Artificial Sequence
  Description of Artificial Sequence: Synthetic oligonucleotide
  Antisense strand to SEQ ID NO: 2478432
guucauacagagcuuacag

SEQ ID NO: 2478434 - RNA, 19 nt, Artificial Sequence
  Description of Artificial Sequence: Synthetic oligonucleotide
  Sense strand starting at position 1401 of SEQ ID NO: 1887523
cuguguugggaggaaacuu

SEQ ID NO: 2478435 - RNA, 19 nt, Artificial Sequence
  Description of Artificial Sequence: Synthetic oligonucleotide
  Antisense strand to SEQ ID NO: 2478434
aaguuuccucccaacacag

SEQ ID NO: 2478436 - RNA, 19 nt, Artificial Sequence
  Description of Artificial Sequence: Synthetic oligonucleotide
  Sense strand starting at position 1685 of SEQ ID NO: 1887523
acaucaucucagcagaggu

SEQ ID NO: 2478437 - RNA, 19 nt, Artificial Sequence
  Description of Artificial Sequence: Synthetic oligonucleotide
  Antisense strand to SEQ ID NO: 2478436
accucugcugagaugaugu

SEQ ID NO: 2478438 - RNA, 19 nt, Artificial Sequence
  Description of Artificial Sequence: Synthetic oligonucleotide
  Sense strand starting at position 1700 of SEQ ID NO: 1887523
agguuacucucaucagaca

SEQ ID NO: 2478439 - RNA, 19 nt, Artificial Sequence
  Description of Artificial Sequence: Synthetic oligonucleotide
  Antisense strand to SEQ ID NO: 2478438
ugucugaugagaguaaccu

SEQ ID NO: 2478440 - RNA, 19 nt, Artificial Sequence
  Description of Artificial Sequence: Synthetic oligonucleotide
  Sense strand starting at position 1819 of SEQ ID NO: 1887523
ccacaacucucaguaaagu

SEQ ID NO: 2478441 - RNA, 19 nt, Artificial Sequence
  Description of Artificial Sequence: Synthetic oligonucleotide
  Antisense strand to SEQ ID NO: 2478440
acuuuacugagaguugugg

SEQ ID NO: 2478442 - RNA, 19 nt, Artificial Sequence
  Description of Artificial Sequence: Synthetic oligonucleotide
  Sense strand starting at position 2000 of SEQ ID NO: 1887523
cugugugagucucugauuu

SEQ ID NO: 2478443 - RNA, 19 nt, Artificial Sequence
  Description of Artificial Sequence: Synthetic oligonucleotide
  Antisense strand to SEQ ID NO: 2478442
aaaucagagacucacacag

SEQ ID NO: 2478444 - RNA, 19 nt, Artificial Sequence
  Description of Artificial Sequence: Synthetic oligonucleotide
  Sense strand starting at position 2004 of SEQ ID NO: 1887523
gugagucucugauuugcag

SEQ ID NO: 2478445 - RNA, 19 nt, Artificial Sequence
  Description of Artificial Sequence: Synthetic oligonucleotide
  Antisense strand to SEQ ID NO: 2478444
cugcaaaucagagacucac

SEQ ID NO: 2478446 - RNA, 19 nt, Artificial Sequence
  Description of Artificial Sequence: Synthetic oligonucleotide
  Sense strand starting at position 2086 of SEQ ID NO: 1887523
gaagauuucucagcagcgu

SEQ ID NO: 2478447 - RNA, 19 nt, Artificial Sequence
  Description of Artificial Sequence: Synthetic oligonucleotide
  Antisense strand to SEQ ID NO: 2478446
acgcugcugagaaaucuuc

SEQ ID NO: 2478448 - RNA, 19 nt, Artificial Sequence
  Description of Artificial Sequence: Synthetic oligonucleotide
  Sense strand starting at position 2336 of SEQ ID NO: 1887523
gauugacacucugcaaagu

SEQ ID NO: 2478449 - RNA, 19 nt, Artificial Sequence
  Description of Artificial Sequence: Synthetic oligonucleotide
  Antisense strand to SEQ ID NO: 2478448
acuuugcagagugucaauc

SEQ ID NO: 2478450 - RNA, 19 nt, Artificial Sequence
  Description of Artificial Sequence: Synthetic oligonucleotide
  Sense strand starting at position 2337 of SEQ ID NO: 1887523
auugacacucugcaaagua

SEQ ID NO: 2478451 - RNA, 19 nt, Artificial Sequence
  Description of Artificial Sequence: Synthetic oligonucleotide
  Antisense strand to SEQ ID NO: 2478450
uacuuugcagagugucaau

SEQ ID NO: 2478452 - RNA, 19 nt, Artificial Sequence
  Description of Artificial Sequence: Synthetic oligonucleotide
  Sense strand starting at position 2437 of SEQ ID NO: 1887523
gguagaagggcauggucau

SEQ ID NO: 2478453 - RNA, 19 nt, Artificial Sequence
  Description of Artificial Sequence: Synthetic oligonucleotide
  Antisense strand to SEQ ID NO: 2478452
augaccaugcccuucuacc

SEQ ID NO: 2478454 - RNA, 19 nt, Artificial Sequence
  Description of Artificial Sequence: Synthetic oligonucleotide
  Sense strand starting at position 2443 of SEQ ID NO: 1887523
agggcauggucaucuauga

SEQ ID NO: 2478455 - RNA, 19 nt, Artificial Sequence
  Description of Artificial Sequence: Synthetic oligonucleotide
  Antisense strand to SEQ ID NO: 2478454
ucauagaugaccaugcccu

SEQ ID NO: 2478456 - RNA, 19 nt, Artificial Sequence
  Description of Artificial Sequence: Synthetic oligonucleotide
  Sense strand starting at position 2657 of SEQ ID NO: 1887523
ucuguuucaguguagagag

SEQ ID NO: 2478457 - RNA, 19 nt, Artificial Sequence
  Description of Artificial Sequence: Synthetic oligonucleotide
  Antisense strand to SEQ ID NO: 2478456
cucucuacacugaaacaga

SEQ ID NO: 2478458 - RNA, 19 nt, Artificial Sequence
  Description of Artificial Sequence: Synthetic oligonucleotide
  Sense strand starting at position 2756 of SEQ ID NO: 1887523
cccgucucaguccagaaau

SEQ ID NO: 2478459 - RNA, 19 nt, Artificial Sequence
  Description of Artificial Sequence: Synthetic oligonucleotide
  Antisense strand to SEQ ID NO: 2478458
auuucuggacugagacggg

SEQ ID NO: 2478460 - RNA, 19 nt, Artificial Sequence
  Description of Artificial Sequence: Synthetic oligonucleotide
  Sense strand starting at position 2758 of SEQ ID NO: 1887523
cgucucaguccagaaaucu

SEQ ID NO: 2478461 - RNA, 19 nt, Artificial Sequence
  Description of Artificial Sequence: Synthetic oligonucleotide
  Antisense strand to SEQ ID NO: 2478460
agauuucuggacugagacg

SEQ ID NO: 2478462 - RNA, 19 nt, Artificial Sequence
  Description of Artificial Sequence: Synthetic oligonucleotide
  Sense strand starting at position 2766 of SEQ ID NO: 1887523
uccagaaaucucuaugcug

SEQ ID NO: 2478463 - RNA, 19 nt, Artificial Sequence
  Description of Artificial Sequence: Synthetic oligonucleotide
  Antisense strand to SEQ ID NO: 2478462
cagcauagagauuucugga

SEQ ID NO: 2478464 - RNA, 19 nt, Artificial Sequence
  Description of Artificial Sequence: Synthetic oligonucleotide
  Sense strand starting at position 2826 of SEQ ID NO: 1887523
auagaaaguucuccuaguc

SEQ ID NO: 2478465 - RNA, 19 nt, Artificial Sequence
  Description of Artificial Sequence: Synthetic oligonucleotide
  Antisense strand to SEQ ID NO: 2478464
gacuaggagaacuuucuau

SEQ ID NO: 2478466 - RNA, 19 nt, Artificial Sequence
  Description of Artificial Sequence: Synthetic oligonucleotide
  Sense strand starting at position 2848 of SEQ ID NO: 1887523
auagguuucuacuuuccua

SEQ ID NO: 2478467 - RNA, 19 nt, Artificial Sequence
  Description of Artificial Sequence: Synthetic oligonucleotide
  Antisense strand to SEQ ID NO: 2478466
uaggaaaguagaaaccuau

SEQ ID NO: 2478468 - RNA, 19 nt, Artificial Sequence
  Description of Artificial Sequence: Synthetic oligonucleotide
  Sense strand starting at position 2851 of SEQ ID NO: 1887523
gguuucuacuuuccuaaag

SEQ ID NO: 2478469 - RNA, 19 nt, Artificial Sequence
  Description of Artificial Sequence: Synthetic oligonucleotide
  Antisense strand to SEQ ID NO: 2478468
cuuuaggaaaguagaaacc

SEQ ID NO: 2478470 - RNA, 19 nt, Artificial Sequence
  Description of Artificial Sequence: Synthetic oligonucleotide
  Sense strand starting at position 2919 of SEQ ID NO: 1887523
gcaagacacucuguaucua

SEQ ID NO: 2478471 - RNA, 19 nt, Artificial Sequence
  Description of Artificial Sequence: Synthetic oligonucleotide
  Antisense strand to SEQ ID NO: 2478470
uagauacagagugucuugc

SEQ ID NO: 2478472 - RNA, 19 nt, Artificial Sequence
  Description of Artificial Sequence: Synthetic oligonucleotide
  Sense strand starting at position 3012 of SEQ ID NO: 1887523
gagaguaugcaucagacuc

SEQ ID NO: 2478473 - RNA, 19 nt, Artificial Sequence
  Description of Artificial Sequence: Synthetic oligonucleotide
  Antisense strand to SEQ ID NO: 2478472
gagucugaugcauacucuc

SEQ ID NO: 2478474 - RNA, 19 nt, Artificial Sequence
  Description of Artificial Sequence: Synthetic oligonucleotide
  Sense strand starting at position 3025 of SEQ ID NO: 1887523
agacucaagcagugaauua

SEQ ID NO: 2478475 - RNA, 19 nt, Artificial Sequence
  Description of Artificial Sequence: Synthetic oligonucleotide
  Antisense strand to SEQ ID NO: 2478474
uaauucacugcuugagucu

SEQ ID NO: 2478476 - RNA, 19 nt, Artificial Sequence
  Description of Artificial Sequence: Synthetic oligonucleotide
  Sense strand starting at position 3152 of SEQ ID NO: 1887523
gcuggaauuaugugaaagu

SEQ ID NO: 2478477 - RNA, 19 nt, Artificial Sequence
  Description of Artificial Sequence: Synthetic oligonucleotide
  Antisense strand to SEQ ID NO: 2478476
acuuucacauaauuccagc

SEQ ID NO: 2478478 - RNA, 19 nt, Artificial Sequence
  Description of Artificial Sequence: Synthetic oligonucleotide
  Sense strand starting at position 3276 of SEQ ID NO: 1887523
ggcagaaucccacauuggu

SEQ ID NO: 2478479 - RNA, 19 nt, Artificial Sequence
  Description of Artificial Sequence: Synthetic oligonucleotide
  Antisense strand to SEQ ID NO: 2478478
accaaugugggauucugcc

SEQ ID NO: 2478480 - RNA, 19 nt, Artificial Sequence
  Description of Artificial Sequence: Synthetic oligonucleotide
  Sense strand starting at position 3308 of SEQ ID NO: 1887523
cagggaggaaugugauagu

SEQ ID NO: 2478481 - RNA, 19 nt, Artificial Sequence
  Description of Artificial Sequence: Synthetic oligonucleotide
  Antisense strand to SEQ ID NO: 2478480
acuaucacauuccucccug

SEQ ID NO: 2478482 - RNA, 19 nt, Artificial Sequence
  Description of Artificial Sequence: Synthetic oligonucleotide
  Sense strand starting at position 3422 of SEQ ID NO: 1887523
uacagucaugagggacuuu

SEQ ID NO: 2478483 - RNA, 19 nt, Artificial Sequence
  Description of Artificial Sequence: Synthetic oligonucleotide
  Antisense strand to SEQ ID NO: 2478482
aaagucccucaugacugua

SEQ ID NO: 2478484 - RNA, 19 nt, Artificial Sequence
  Description of Artificial Sequence: Synthetic oligonucleotide
  Sense strand starting at position 3729 of SEQ ID NO: 1887523
ggcccauauuuggcaguuu

SEQ ID NO: 2478485 - RNA, 19 nt, Artificial Sequence
  Description of Artificial Sequence: Synthetic oligonucleotide
  Antisense strand to SEQ ID NO: 2478484
aaacugccaaauaugggcc

SEQ ID NO: 2478486 - RNA, 19 nt, Artificial Sequence
  Description of Artificial Sequence: Synthetic oligonucleotide
  Sense strand starting at position 3864 of SEQ ID NO: 1887523
cagguuuacguguauaaca

SEQ ID NO: 2478487 - RNA, 19 nt, Artificial Sequence
  Description of Artificial Sequence: Synthetic oligonucleotide
  Antisense strand to SEQ ID NO: 2478486
uguuauacacguaaaccug

SEQ ID NO: 2478488 - RNA, 19 nt, Artificial Sequence
  Description of Artificial Sequence: Synthetic oligonucleotide
  Sense strand starting at position 3866 of SEQ ID NO: 1887523
gguuuacguguauaacaag

SEQ ID NO: 2478489 - RNA, 19 nt, Artificial Sequence
  Description of Artificial Sequence: Synthetic oligonucleotide
  Antisense strand to SEQ ID NO: 2478488
cuuguuauacacguaaacc

SEQ ID NO: 2478490 - RNA, 19 nt, Artificial Sequence
  Description of Artificial Sequence: Synthetic oligonucleotide
  Sense strand starting at position 47 of SEQ ID NO: 1887524
gggaacugguucccucauu

SEQ ID NO: 2478491 - RNA, 19 nt, Artificial Sequence
  Description of Artificial Sequence: Synthetic oligonucleotide
  Antisense strand to SEQ ID NO: 2478490
aaugagggaaccaguuccc

SEQ ID NO: 2478492 - RNA, 19 nt, Artificial Sequence
  Description of Artificial Sequence: Synthetic oligonucleotide
  Sense strand starting at position 48 of SEQ ID NO: 1887524
ggaacugguucccucauua

SEQ ID NO: 2478493 - RNA, 19 nt, Artificial Sequence
  Description of Artificial Sequence: Synthetic oligonucleotide
  Antisense strand to SEQ ID NO: 2478492
uaaugagggaaccaguucc

SEQ ID NO: 2478494 - RNA, 19 nt, Artificial Sequence
  Description of Artificial Sequence: Synthetic oligonucleotide
  Sense strand starting at position 69 of SEQ ID NO: 1887524
ggaauaccauaugguagaa

SEQ ID NO: 2478495 - RNA, 19 nt, Artificial Sequence
  Description of Artificial Sequence: Synthetic oligonucleotide
  Antisense strand to SEQ ID NO: 2478494
uucuaccauaugguauucc

SEQ ID NO: 2478496 - RNA, 19 nt, Artificial Sequence
  Description of Artificial Sequence: Synthetic oligonucleotide
  Sense strand starting at position 82 of SEQ ID NO: 1887524
guagaauauuguucagggu

SEQ ID NO: 2478497 - RNA, 19 nt, Artificial Sequence
  Description of Artificial Sequence: Synthetic oligonucleotide
  Antisense strand to SEQ ID NO: 2478496
acccugaacaauauucuac

SEQ ID NO: 2478498 - RNA, 19 nt, Artificial Sequence
  Description of Artificial Sequence: Synthetic oligonucleotide
  Sense strand starting at position 176 of SEQ ID NO: 1887524
ugguaauaacugcacaacu

SEQ ID NO: 2478499 - RNA, 19 nt, Artificial Sequence
  Description of Artificial Sequence: Synthetic oligonucleotide
  Antisense strand to SEQ ID NO: 2478498
aguugugcaguuauuacca

SEQ ID NO: 2478500 - RNA, 19 nt, Artificial Sequence
  Description of Artificial Sequence: Synthetic oligonucleotide
  Sense strand starting at position 279 of SEQ ID NO: 1887524
accgcugacuuguacauuu

SEQ ID NO: 2478501 - RNA, 19 nt, Artificial Sequence
  Description of Artificial Sequence: Synthetic oligonucleotide
  Antisense strand to SEQ ID NO: 2478500
aaauguacaagucagcggu

SEQ ID NO: 2478502 - RNA, 19 nt, Artificial Sequence
  Description of Artificial Sequence: Synthetic oligonucleotide
  Sense strand starting at position 324 of SEQ ID NO: 1887524
augggcaaacuguauaauu

SEQ ID NO: 2478503 - RNA, 19 nt, Artificial Sequence
  Description of Artificial Sequence: Synthetic oligonucleotide
  Antisense strand to SEQ ID NO: 2478502
aauuauacaguuugcccau

SEQ ID NO: 2478504 - RNA, 19 nt, Artificial Sequence
  Description of Artificial Sequence: Synthetic oligonucleotide
  Sense strand starting at position 326 of SEQ ID NO: 1887524
gggcaaacuguauaauugu

SEQ ID NO: 2478505 - RNA, 19 nt, Artificial Sequence
  Description of Artificial Sequence: Synthetic oligonucleotide
  Antisense strand to SEQ ID NO: 2478504
acaauuauacaguuugccc

SEQ ID NO: 2478506 - RNA, 19 nt, Artificial Sequence
  Description of Artificial Sequence: Synthetic oligonucleotide
  Sense strand starting at position 378 of SEQ ID NO: 1887524
aagagauaaugacaggaaa

SEQ ID NO: 2478507 - RNA, 19 nt, Artificial Sequence
  Description of Artificial Sequence: Synthetic oligonucleotide
  Antisense strand to SEQ ID NO: 2478506
uuuccugucauuaucucuu

SEQ ID NO: 2478508 - RNA, 19 nt, Artificial Sequence
  Description of Artificial Sequence: Synthetic oligonucleotide
  Sense strand starting at position 479 of SEQ ID NO: 1887524
gggcauugugcagaguaga

SEQ ID NO: 2478509 - RNA, 19 nt, Artificial Sequence
  Description of Artificial Sequence: Synthetic oligonucleotide
  Antisense strand to SEQ ID NO: 2478508
ucuacucugcacaaugccc

SEQ ID NO: 2478510 - RNA, 19 nt, Artificial Sequence
  Description of Artificial Sequence: Synthetic oligonucleotide
  Sense strand starting at position 536 of SEQ ID NO: 1887524
auaacaaucuccgaaugac

SEQ ID NO: 2478511 - RNA, 19 nt, Artificial Sequence
  Description of Artificial Sequence: Synthetic oligonucleotide
  Antisense strand to SEQ ID NO: 2478510
gucauucggagauuguuau

SEQ ID NO: 2478512 - RNA, 19 nt, Artificial Sequence
  Description of Artificial Sequence: Synthetic oligonucleotide
  Sense strand starting at position 601 of SEQ ID NO: 1887524
aggaguucuuauguggaga

SEQ ID NO: 2478513 - RNA, 19 nt, Artificial Sequence
  Description of Artificial Sequence: Synthetic oligonucleotide
  Antisense strand to SEQ ID NO: 2478512
ucuccacauaagaacuccu

SEQ ID NO: 2478514 - RNA, 19 nt, Artificial Sequence
  Description of Artificial Sequence: Synthetic oligonucleotide
  Sense strand starting at position 602 of SEQ ID NO: 1887524
ggaguucuuauguggagag

SEQ ID NO: 2478515 - RNA, 19 nt, Artificial Sequence
  Description of Artificial Sequence: Synthetic oligonucleotide
  Antisense strand to SEQ ID NO: 2478514
cucuccacauaagaacucc

SEQ ID NO: 2478516 - RNA, 19 nt, Artificial Sequence
  Description of Artificial Sequence: Synthetic oligonucleotide
  Sense strand starting at position 614 of SEQ ID NO: 1887524
uggagagggaacuguucua

SEQ ID NO: 2478517 - RNA, 19 nt, Artificial Sequence
  Description of Artificial Sequence: Synthetic oligonucleotide
  Antisense strand to SEQ ID NO: 2478516
uagaacaguucccucucca

SEQ ID NO: 2478518 - RNA, 19 nt, Artificial Sequence
  Description of Artificial Sequence: Synthetic oligonucleotide
  Sense strand starting at position 619 of SEQ ID NO: 1887524
agggaacuguucuauauca

SEQ ID NO: 2478519 - RNA, 19 nt, Artificial Sequence
  Description of Artificial Sequence: Synthetic oligonucleotide
  Antisense strand to SEQ ID NO: 2478518
ugauauagaacaguucccu

SEQ ID NO: 2478520 - RNA, 19 nt, Artificial Sequence
  Description of Artificial Sequence: Synthetic oligonucleotide
  Sense strand starting at position 735 of SEQ ID NO: 1887524
ugaacaaggucuguaaucu

SEQ ID NO: 2478521 - RNA, 19 nt, Artificial Sequence
  Description of Artificial Sequence: Synthetic oligonucleotide
  Antisense strand to SEQ ID NO: 2478520
agauuacagaccuuguuca

SEQ ID NO: 2478522 - RNA, 19 nt, Artificial Sequence
  Description of Artificial Sequence: Synthetic oligonucleotide
  Sense strand starting at position 739 of SEQ ID NO: 1887524
caaggucuguaaucuaguu

SEQ ID NO: 2478523 - RNA, 19 nt, Artificial Sequence
  Description of Artificial Sequence: Synthetic oligonucleotide
  Antisense strand to SEQ ID NO: 2478522
aacuagauuacagaccuug

SEQ ID NO: 2478524 - RNA, 19 nt, Artificial Sequence
  Description of Artificial Sequence: Synthetic oligonucleotide
  Sense strand starting at position 765 of SEQ ID NO: 1887524
cuguauugaugucaauuuc

SEQ ID NO: 2478525 - RNA, 19 nt, Artificial Sequence
  Description of Artificial Sequence: Synthetic oligonucleotide
  Antisense strand to SEQ ID NO: 2478524
gaaauugacaucaauacag

SEQ ID NO: 2478526 - RNA, 19 nt, Artificial Sequence
  Description of Artificial Sequence: Synthetic oligonucleotide
  Sense strand starting at position 786 of SEQ ID NO: 1887524
gguuucgauauugggacua

SEQ ID NO: 2478527 - RNA, 19 nt, Artificial Sequence
  Description of Artificial Sequence: Synthetic oligonucleotide
  Antisense strand to SEQ ID NO: 2478526
uagucccaauaucgaaacc

SEQ ID NO: 2478528 - RNA, 19 nt, Artificial Sequence
  Description of Artificial Sequence: Synthetic oligonucleotide
  Sense strand starting at position 788 of SEQ ID NO: 1887524
uuucgauauugggacuaca

SEQ ID NO: 2478529 - RNA, 19 nt, Artificial Sequence
  Description of Artificial Sequence: Synthetic oligonucleotide
  Antisense strand to SEQ ID NO: 2478528
uguagucccaauaucgaaa

SEQ ID NO: 2478530 - RNA, 19 nt, Artificial Sequence
  Description of Artificial Sequence: Synthetic oligonucleotide
  Sense strand starting at position 1059 of SEQ ID NO: 1887524
ugcugcugcccgcgauuua

SEQ ID NO: 2478531 - RNA, 19 nt, Artificial Sequence
  Description of Artificial Sequence: Synthetic oligonucleotide
  Antisense strand to SEQ ID NO: 2478530
uaaaucgcgggcagcagca

SEQ ID NO: 2478532 - RNA, 19 nt, Artificial Sequence
  Description of Artificial Sequence: Synthetic oligonucleotide
  Sense strand starting at position 2318 of SEQ ID NO: 1887524
gggccaugucuagaacgaa

SEQ ID NO: 2478533 - RNA, 19 nt, Artificial Sequence
  Description of Artificial Sequence: Synthetic oligonucleotide
  Antisense strand to SEQ ID NO: 2478532
uucguucuagacauggccc

SEQ ID NO: 2478534 - RNA, 19 nt, Artificial Sequence
  Description of Artificial Sequence: Synthetic oligonucleotide
  Sense strand starting at position 2321 of SEQ ID NO: 1887524
ccaugucuagaacgaagau

SEQ ID NO: 2478535 - RNA, 19 nt, Artificial Sequence
  Description of Artificial Sequence: Synthetic oligonucleotide
  Antisense strand to SEQ ID NO: 2478534
aucuucguucuagacaugg

SEQ ID NO: 2478536 - RNA, 19 nt, Artificial Sequence
  Description of Artificial Sequence: Synthetic oligonucleotide
  Sense strand starting at position 2426 of SEQ ID NO: 1887524
gugaauacuggugacacuu

SEQ ID NO: 2478537 - RNA, 19 nt, Artificial Sequence
  Description of Artificial Sequence: Synthetic oligonucleotide
  Antisense strand to SEQ ID NO: 2478536
aagugucaccaguauucac

SEQ ID NO: 2478538 - RNA, 19 nt, Artificial Sequence
  Description of Artificial Sequence: Synthetic oligonucleotide
  Sense strand starting at position 2435 of SEQ ID NO: 1887524
ggugacacuuccgaggaga

SEQ ID NO: 2478539 - RNA, 19 nt, Artificial Sequence
  Description of Artificial Sequence: Synthetic oligonucleotide
  Antisense strand to SEQ ID NO: 2478538
ucuccucggaagugucacc

SEQ ID NO: 2478540 - RNA, 19 nt, Artificial Sequence
  Description of Artificial Sequence: Synthetic oligonucleotide
  Sense strand starting at position 2508 of SEQ ID NO: 1887524
gggaguacaucuggagaug

SEQ ID NO: 2478541 - RNA, 19 nt, Artificial Sequence
  Description of Artificial Sequence: Synthetic oligonucleotide
  Antisense strand to SEQ ID NO: 2478540
caucuccagauguacuccc

SEQ ID NO: 2478542 - RNA, 19 nt, Artificial Sequence
  Description of Artificial Sequence: Synthetic oligonucleotide
  Sense strand starting at position 2519 of SEQ ID NO: 1887524
uggagaugagagugucuca

SEQ ID NO: 2478543 - RNA, 19 nt, Artificial Sequence
  Description of Artificial Sequence: Synthetic oligonucleotide
  Antisense strand to SEQ ID NO: 2478542
ugagacacucucaucucca

SEQ ID NO: 2478544 - RNA, 19 nt, Artificial Sequence
  Description of Artificial Sequence: Synthetic oligonucleotide
  Sense strand starting at position 2567 of SEQ ID NO: 1887524
gagccauagggucauaauc

SEQ ID NO: 2478545 - RNA, 19 nt, Artificial Sequence
  Description of Artificial Sequence: Synthetic oligonucleotide
  Antisense strand to SEQ ID NO: 2478544
gauuaugacccuauggcuc

SEQ ID NO: 2478546 - RNA, 19 nt, Artificial Sequence
  Description of Artificial Sequence: Synthetic oligonucleotide
  Sense strand starting at position 2758 of SEQ ID NO: 1887524
uccagaugaauacgagagu

SEQ ID NO: 2478547 - RNA, 19 nt, Artificial Sequence
  Description of Artificial Sequence: Synthetic oligonucleotide
  Antisense strand to SEQ ID NO: 2478546
acucucguauucaucugga

SEQ ID NO: 2478548 - RNA, 19 nt, Artificial Sequence
  Description of Artificial Sequence: Synthetic oligonucleotide
  Sense strand starting at position 2759 of SEQ ID NO: 1887524
ccagaugaauacgagaguu

SEQ ID NO: 2478549 - RNA, 19 nt, Artificial Sequence
  Description of Artificial Sequence: Synthetic oligonucleotide
  Antisense strand to SEQ ID NO: 2478548
aacucucguauucaucugg

SEQ ID NO: 2478550 - RNA, 19 nt, Artificial Sequence
  Description of Artificial Sequence: Synthetic oligonucleotide
  Sense strand starting at position 2782 of SEQ ID NO: 1887524
guuacucuugggugagaga

SEQ ID NO: 2478551 - RNA, 19 nt, Artificial Sequence
  Description of Artificial Sequence: Synthetic oligonucleotide
  Antisense strand to SEQ ID NO: 2478550
ucucucacccaagaguaac

SEQ ID NO: 2478552 - RNA, 19 nt, Artificial Sequence
  Description of Artificial Sequence: Synthetic oligonucleotide
  Sense strand starting at position 2827 of SEQ ID NO: 1887524
gcuggaauuugagaacaca

SEQ ID NO: 2478553 - RNA, 19 nt, Artificial Sequence
  Description of Artificial Sequence: Synthetic oligonucleotide
  Antisense strand to SEQ ID NO: 2478552
uguguucucaaauuccagc

SEQ ID NO: 2478554 - RNA, 19 nt, Artificial Sequence
  Description of Artificial Sequence: Synthetic oligonucleotide
  Sense strand starting at position 2864 of SEQ ID NO: 1887524
agggacaucugagcuuaag

SEQ ID NO: 2478555 - RNA, 19 nt, Artificial Sequence
  Description of Artificial Sequence: Synthetic oligonucleotide
  Antisense strand to SEQ ID NO: 2478554
cuuaagcucagaugucccu

SEQ ID NO: 2478556 - RNA, 19 nt, Artificial Sequence
  Description of Artificial Sequence: Synthetic oligonucleotide
  Sense strand starting at position 2874 of SEQ ID NO: 1887524
gagcuuaagggucguauuu

SEQ ID NO: 2478557 - RNA, 19 nt, Artificial Sequence
  Description of Artificial Sequence: Synthetic oligonucleotide
  Antisense strand to SEQ ID NO: 2478556
aaauacgacccuuaagcuc

SEQ ID NO: 2478558 - RNA, 19 nt, Artificial Sequence
  Description of Artificial Sequence: Synthetic oligonucleotide
  Sense strand starting at position 2939 of SEQ ID NO: 1887524
aggagacgaguuggaauua

SEQ ID NO: 2478559 - RNA, 19 nt, Artificial Sequence
  Description of Artificial Sequence: Synthetic oligonucleotide
  Antisense strand to SEQ ID NO: 2478558
uaauuccaacucgucuccu

SEQ ID NO: 2478560 - RNA, 19 nt, Artificial Sequence
  Description of Artificial Sequence: Synthetic oligonucleotide
  Sense strand starting at position 3018 of SEQ ID NO: 1887524
uaggauggagguugauauu

SEQ ID NO: 2478561 - RNA, 19 nt, Artificial Sequence
  Description of Artificial Sequence: Synthetic oligonucleotide
  Antisense strand to SEQ ID NO: 2478560
aauaucaaccuccauccua

SEQ ID NO: 2478562 - RNA, 19 nt, Artificial Sequence
  Description of Artificial Sequence: Synthetic oligonucleotide
  Sense strand starting at position 3021 of SEQ ID NO: 1887524
gauggagguugauauuuau

SEQ ID NO: 2478563 - RNA, 19 nt, Artificial Sequence
  Description of Artificial Sequence: Synthetic oligonucleotide
  Antisense strand to SEQ ID NO: 2478562
auaaauaucaaccuccauc

SEQ ID NO: 2478564 - RNA, 19 nt, Artificial Sequence
  Description of Artificial Sequence: Synthetic oligonucleotide
  Sense strand starting at position 3146 of SEQ ID NO: 1887524
ugggaaugggucugauauc

SEQ ID NO: 2478565 - RNA, 19 nt, Artificial Sequence
  Description of Artificial Sequence: Synthetic oligonucleotide
  Antisense strand to SEQ ID NO: 2478564
gauaucagacccauuccca

SEQ ID NO: 2478566 - RNA, 19 nt, Artificial Sequence
  Description of Artificial Sequence: Synthetic oligonucleotide
  Sense strand starting at position 3632 of SEQ ID NO: 1887524
agggacauguacugagaga

SEQ ID NO: 2478567 - RNA, 19 nt, Artificial Sequence
  Description of Artificial Sequence: Synthetic oligonucleotide
  Antisense strand to SEQ ID NO: 2478566
ucucucaguacaugucccu

SEQ ID NO: 2478568 - RNA, 19 nt, Artificial Sequence
  Description of Artificial Sequence: Synthetic oligonucleotide
  Sense strand starting at position 3671 of SEQ ID NO: 1887524
aaagauacucacggagcaa

SEQ ID NO: 2478569 - RNA, 19 nt, Artificial Sequence
  Description of Artificial Sequence: Synthetic oligonucleotide
  Antisense strand to SEQ ID NO: 2478568
uugcuccgugaguaucuuu

SEQ ID NO: 2478570 - RNA, 19 nt, Artificial Sequence
  Description of Artificial Sequence: Synthetic oligonucleotide
  Sense strand starting at position 1628 of SEQ ID NO: 1887525
uccucuucucacugagaga

SEQ ID NO: 2478571 - RNA, 19 nt, Artificial Sequence
  Description of Artificial Sequence: Synthetic oligonucleotide
  Antisense strand to SEQ ID NO: 2478570
ucucucagugagaagagga

SEQ ID NO: 2478572 - RNA, 19 nt, Artificial Sequence
  Description of Artificial Sequence: Synthetic oligonucleotide
  Sense strand starting at position 2170 of SEQ ID NO: 1887525
augacuuauguuugagcuu

SEQ ID NO: 2478573 - RNA, 19 nt, Artificial Sequence
  Description of Artificial Sequence: Synthetic oligonucleotide
  Antisense strand to SEQ ID NO: 2478572
aagcucaaacauaagucau

SEQ ID NO: 2478574 - RNA, 19 nt, Artificial Sequence
  Description of Artificial Sequence: Synthetic oligonucleotide
  Sense strand starting at position 2173 of SEQ ID NO: 1887525
acuuauguuugagcuuuga

SEQ ID NO: 2478575 - RNA, 19 nt, Artificial Sequence
  Description of Artificial Sequence: Synthetic oligonucleotide
  Antisense strand to SEQ ID NO: 2478574
ucaaagcucaaacauaagu

SEQ ID NO: 2478576 - RNA, 19 nt, Artificial Sequence
  Description of Artificial Sequence: Synthetic oligonucleotide
  Sense strand starting at position 2223 of SEQ ID NO: 1887525
uuugaugacugguuaucau

SEQ ID NO: 2478577 - RNA, 19 nt, Artificial Sequence
  Description of Artificial Sequence: Synthetic oligonucleotide
  Antisense strand to SEQ ID NO: 2478576
augauaaccagucaucaaa

SEQ ID NO: 2478578 - RNA, 19 nt, Artificial Sequence
  Description of Artificial Sequence: Synthetic oligonucleotide
  Sense strand starting at position 2233 of SEQ ID NO: 1887525
gguuaucauccgcugccua

SEQ ID NO: 2478579 - RNA, 19 nt, Artificial Sequence
  Description of Artificial Sequence: Synthetic oligonucleotide
  Antisense strand to SEQ ID NO: 2478578
uaggcagcggaugauaacc

SEQ ID NO: 2478580 - RNA, 19 nt, Artificial Sequence
  Description of Artificial Sequence: Synthetic oligonucleotide
  Sense strand starting at position 2251 of SEQ ID NO: 1887525
acaugaccuugguuuguaa

SEQ ID NO: 2478581 - RNA, 19 nt, Artificial Sequence
  Description of Artificial Sequence: Synthetic oligonucleotide
  Antisense strand to SEQ ID NO: 2478580
uuacaaaccaaggucaugu

SEQ ID NO: 2478582 - RNA, 19 nt, Artificial Sequence
  Description of Artificial Sequence: Synthetic oligonucleotide
  Sense strand starting at position 2290 of SEQ ID NO: 1887525
guuuccuccuuugcagauu

SEQ ID NO: 2478583 - RNA, 19 nt, Artificial Sequence
  Description of Artificial Sequence: Synthetic oligonucleotide
  Antisense strand to SEQ ID NO: 2478582
aaucugcaaaggaggaaac

SEQ ID NO: 2478584 - RNA, 19 nt, Artificial Sequence
  Description of Artificial Sequence: Synthetic oligonucleotide
  Sense strand starting at position 2301 of SEQ ID NO: 1887525
ugcagauuguugucaugaa

SEQ ID NO: 2478585 - RNA, 19 nt, Artificial Sequence
  Description of Artificial Sequence: Synthetic oligonucleotide
  Antisense strand to SEQ ID NO: 2478584
uucaugacaacaaucugca

SEQ ID NO: 2478586 - RNA, 19 nt, Artificial Sequence
  Description of Artificial Sequence: Synthetic oligonucleotide
  Sense strand starting at position 2345 of SEQ ID NO: 1887525
gucaguggugccugggaca

SEQ ID NO: 2478587 - RNA, 19 nt, Artificial Sequence
  Description of Artificial Sequence: Synthetic oligonucleotide
  Antisense strand to SEQ ID NO: 2478586
ugucccaggcaccacugac

SEQ ID NO: 2478588 - RNA, 19 nt, Artificial Sequence
  Description of Artificial Sequence: Synthetic oligonucleotide
  Sense strand starting at position 2371 of SEQ ID NO: 1887525
gggcucauuugugcuugau

SEQ ID NO: 2478589 - RNA, 19 nt, Artificial Sequence
  Description of Artificial Sequence: Synthetic oligonucleotide
  Antisense strand to SEQ ID NO: 2478588
aucaagcacaaaugagccc

SEQ ID NO: 2478590 - RNA, 19 nt, Artificial Sequence
  Description of Artificial Sequence: Synthetic oligonucleotide
  Sense strand starting at position 2381 of SEQ ID NO: 1887525
gugcuugauuuccagacca

SEQ ID NO: 2478591 - RNA, 19 nt, Artificial Sequence
  Description of Artificial Sequence: Synthetic oligonucleotide
  Antisense strand to SEQ ID NO: 2478590
uggucuggaaaucaagcac

SEQ ID NO: 2478592 - RNA, 19 nt, Artificial Sequence
  Description of Artificial Sequence: Synthetic oligonucleotide
  Sense strand starting at position 2407 of SEQ ID NO: 1887525
accugaacuguuugggaug

SEQ ID NO: 2478593 - RNA, 19 nt, Artificial Sequence
  Description of Artificial Sequence: Synthetic oligonucleotide
  Antisense strand to SEQ ID NO: 2478592
caucccaaacaguucaggu

SEQ ID NO: 2478594 - RNA, 19 nt, Artificial Sequence
  Description of Artificial Sequence: Synthetic oligonucleotide
  Sense strand starting at position 2412 of SEQ ID NO: 1887525
aacuguuugggaugugaaa

SEQ ID NO: 2478595 - RNA, 19 nt, Artificial Sequence
  Description of Artificial Sequence: Synthetic oligonucleotide
  Antisense strand to SEQ ID NO: 2478594
uuucacaucccaaacaguu

SEQ ID NO: 2478596 - RNA, 19 nt, Artificial Sequence
  Description of Artificial Sequence: Synthetic oligonucleotide
  Sense strand starting at position 2428 of SEQ ID NO: 1887525
aaaggaucucgauguugga

SEQ ID NO: 2478597 - RNA, 19 nt, Artificial Sequence
  Description of Artificial Sequence: Synthetic oligonucleotide
  Antisense strand to SEQ ID NO: 2478596
uccaacaucgagauccuuu

SEQ ID NO: 2478598 - RNA, 19 nt, Artificial Sequence
  Description of Artificial Sequence: Synthetic oligonucleotide
  Sense strand starting at position 2451 of SEQ ID NO: 1887525
ccagucuguguagaugauu

SEQ ID NO: 2478599 - RNA, 19 nt, Artificial Sequence
  Description of Artificial Sequence: Synthetic oligonucleotide
  Antisense strand to SEQ ID NO: 2478598
aaucaucuacacagacugg

SEQ ID NO: 2478600 - RNA, 19 nt, Artificial Sequence
  Description of Artificial Sequence: Synthetic oligonucleotide
  Sense strand starting at position 2454 of SEQ ID NO: 1887525
gucuguguagaugauugau

SEQ ID NO: 2478601 - RNA, 19 nt, Artificial Sequence
  Description of Artificial Sequence: Synthetic oligonucleotide
  Antisense strand to SEQ ID NO: 2478600
aucaaucaucuacacagac

SEQ ID NO: 2478602 - RNA, 19 nt, Artificial Sequence
  Description of Artificial Sequence: Synthetic oligonucleotide
  Sense strand starting at position 2456 of SEQ ID NO: 1887525
cuguguagaugauugaugu

SEQ ID NO: 2478603 - RNA, 19 nt, Artificial Sequence
  Description of Artificial Sequence: Synthetic oligonucleotide
  Antisense strand to SEQ ID NO: 2478602
acaucaaucaucuacacag

SEQ ID NO: 2478604 - RNA, 19 nt, Artificial Sequence
  Description of Artificial Sequence: Synthetic oligonucleotide
  Sense strand starting at position 2462 of SEQ ID NO: 1887525
agaugauugauguguccac

SEQ ID NO: 2478605 - RNA, 19 nt, Artificial Sequence
  Description of Artificial Sequence: Synthetic oligonucleotide
  Antisense strand to SEQ ID NO: 2478604
guggacacaucaaucaucu

SEQ ID NO: 2478606 - RNA, 19 nt, Artificial Sequence
  Description of Artificial Sequence: Synthetic oligonucleotide
  Sense strand starting at position 2463 of SEQ ID NO: 1887525
gaugauugauguguccacu

SEQ ID NO: 2478607 - RNA, 19 nt, Artificial Sequence
  Description of Artificial Sequence: Synthetic oligonucleotide
  Antisense strand to SEQ ID NO: 2478606
aguggacacaucaaucauc

SEQ ID NO: 2478608 - RNA, 19 nt, Artificial Sequence
  Description of Artificial Sequence: Synthetic oligonucleotide
  Sense strand starting at position 2519 of SEQ ID NO: 1887525
ugaggcauuucugaaauac

SEQ ID NO: 2478609 - RNA, 19 nt, Artificial Sequence
  Description of Artificial Sequence: Synthetic oligonucleotide
  Antisense strand to SEQ ID NO: 2478608
guauuucagaaaugccuca

SEQ ID NO: 2478610 - RNA, 19 nt, Artificial Sequence
  Description of Artificial Sequence: Synthetic oligonucleotide
  Sense strand starting at position 2642 of SEQ ID NO: 1887525
gguaauuagaauggaguuu

SEQ ID NO: 2478611 - RNA, 19 nt, Artificial Sequence
  Description of Artificial Sequence: Synthetic oligonucleotide
  Antisense strand to SEQ ID NO: 2478610
aaacuccauucuaauuacc

SEQ ID NO: 2478612 - RNA, 19 nt, Artificial Sequence
  Description of Artificial Sequence: Synthetic oligonucleotide
  Sense strand starting at position 2819 of SEQ ID NO: 1887525
caaaccguccagugauaga

SEQ ID NO: 2478613 - RNA, 19 nt, Artificial Sequence
  Description of Artificial Sequence: Synthetic oligonucleotide
  Antisense strand to SEQ ID NO: 2478612
ucuaucacuggacgguuug

SEQ ID NO: 2478614 - RNA, 19 nt, Artificial Sequence
  Description of Artificial Sequence: Synthetic oligonucleotide
  Sense strand starting at position 2923 of SEQ ID NO: 1887525
gcagcauguccuggaggua

SEQ ID NO: 2478615 - RNA, 19 nt, Artificial Sequence
  Description of Artificial Sequence: Synthetic oligonucleotide
  Antisense strand to SEQ ID NO: 2478614
uaccuccaggacaugcugc

SEQ ID NO: 2478616 - RNA, 19 nt, Artificial Sequence
  Description of Artificial Sequence: Synthetic oligonucleotide
  Sense strand starting at position 2947 of SEQ ID NO: 1887525
ggugacacuggguguucua

SEQ ID NO: 2478617 - RNA, 19 nt, Artificial Sequence
  Description of Artificial Sequence: Synthetic oligonucleotide
  Antisense strand to SEQ ID NO: 2478616
uagaacacccagugucacc

SEQ ID NO: 2478618 - RNA, 19 nt, Artificial Sequence
  Description of Artificial Sequence: Synthetic oligonucleotide
  Sense strand starting at position 2956 of SEQ ID NO: 1887525
ggguguucuauccaaugcu

SEQ ID NO: 2478619 - RNA, 19 nt, Artificial Sequence
  Description of Artificial Sequence: Synthetic oligonucleotide
  Antisense strand to SEQ ID NO: 2478618
agcauuggauagaacaccc

SEQ ID NO: 2478620 - RNA, 19 nt, Artificial Sequence
  Description of Artificial Sequence: Synthetic oligonucleotide
  Sense strand starting at position 3028 of SEQ ID NO: 1887525
acaguuguucuuuggugua

SEQ ID NO: 2478621 - RNA, 19 nt, Artificial Sequence
  Description of Artificial Sequence: Synthetic oligonucleotide
  Antisense strand to SEQ ID NO: 2478620
uacaccaaagaacaacugu

SEQ ID NO: 2478622 - RNA, 19 nt, Artificial Sequence
  Description of Artificial Sequence: Synthetic oligonucleotide
  Sense strand starting at position 3030 of SEQ ID NO: 1887525
aguuguucuuugguguaca

SEQ ID NO: 2478623 - RNA, 19 nt, Artificial Sequence
  Description of Artificial Sequence: Synthetic oligonucleotide
  Antisense strand to SEQ ID NO: 2478622
uguacaccaaagaacaacu

SEQ ID NO: 2478624 - RNA, 19 nt, Artificial Sequence
  Description of Artificial Sequence: Synthetic oligonucleotide
  Sense strand starting at position 3161 of SEQ ID NO: 1887525
ggauuugcaucccacaaau

SEQ ID NO: 2478625 - RNA, 19 nt, Artificial Sequence
  Description of Artificial Sequence: Synthetic oligonucleotide
  Antisense strand to SEQ ID NO: 2478624
auuugugggaugcaaaucc

SEQ ID NO: 2478626 - RNA, 19 nt, Artificial Sequence
  Description of Artificial Sequence: Synthetic oligonucleotide
  Sense strand starting at position 3196 of SEQ ID NO: 1887525
ccguuugguugaagagagu

SEQ ID NO: 2478627 - RNA, 19 nt, Artificial Sequence
  Description of Artificial Sequence: Synthetic oligonucleotide
  Antisense strand to SEQ ID NO: 2478626
acucucuucaaccaaacgg

SEQ ID NO: 2478628 - RNA, 19 nt, Artificial Sequence
  Description of Artificial Sequence: Synthetic oligonucleotide
  Sense strand starting at position 3202 of SEQ ID NO: 1887525
gguugaagagagugugcau

SEQ ID NO: 2478629 - RNA, 19 nt, Artificial Sequence
  Description of Artificial Sequence: Synthetic oligonucleotide
  Antisense strand to SEQ ID NO: 2478628
augcacacucucuucaacc

SEQ ID NO: 2478630 - RNA, 19 nt, Artificial Sequence
  Description of Artificial Sequence: Synthetic oligonucleotide
  Sense strand starting at position 3244 of SEQ ID NO: 1887525
gcugcauugcuccaggguu

SEQ ID NO: 2478631 - RNA, 19 nt, Artificial Sequence
  Description of Artificial Sequence: Synthetic oligonucleotide
  Antisense strand to SEQ ID NO: 2478630
aacccuggagcaaugcagc

SEQ ID NO: 2478632 - RNA, 19 nt, Artificial Sequence
  Description of Artificial Sequence: Synthetic oligonucleotide
  Sense strand starting at position 3274 of SEQ ID NO: 1887525
gcuuguauuugacaaugag

SEQ ID NO: 2478633 - RNA, 19 nt, Artificial Sequence
  Description of Artificial Sequence: Synthetic oligonucleotide
  Antisense strand to SEQ ID NO: 2478632
cucauugucaaauacaagc

SEQ ID NO: 2478634 - RNA, 19 nt, Artificial Sequence
  Description of Artificial Sequence: Synthetic oligonucleotide
  Sense strand starting at position 3431 of SEQ ID NO: 1887525
guuagaguauuggcugugu

SEQ ID NO: 2478635 - RNA, 19 nt, Artificial Sequence
  Description of Artificial Sequence: Synthetic oligonucleotide
  Antisense strand to SEQ ID NO: 2478634
acacagccaauacucuaac

SEQ ID NO: 2478636 - RNA, 19 nt, Artificial Sequence
  Description of Artificial Sequence: Synthetic oligonucleotide
  Sense strand starting at position 3433 of SEQ ID NO: 1887525
uagaguauuggcuguguua

SEQ ID NO: 2478637 - RNA, 19 nt, Artificial Sequence
  Description of Artificial Sequence: Synthetic oligonucleotide
  Antisense strand to SEQ ID NO: 2478636
uaacacagccaauacucua

SEQ ID NO: 2478638 - RNA, 19 nt, Artificial Sequence
  Description of Artificial Sequence: Synthetic oligonucleotide
  Sense strand starting at position 3435 of SEQ ID NO: 1887525
gaguauuggcuguguuagg

SEQ ID NO: 2478639 - RNA, 19 nt, Artificial Sequence
  Description of Artificial Sequence: Synthetic oligonucleotide
  Antisense strand to SEQ ID NO: 2478638
ccuaacacagccaauacuc

SEQ ID NO: 2478640 - RNA, 19 nt, Artificial Sequence
  Description of Artificial Sequence: Synthetic oligonucleotide
  Sense strand starting at position 3501 of SEQ ID NO: 1887525
aaggcaagacucgaauguu

SEQ ID NO: 2478641 - RNA, 19 nt, Artificial Sequence
  Description of Artificial Sequence: Synthetic oligonucleotide
  Antisense strand to SEQ ID NO: 2478640
aacauucgagucuugccuu

SEQ ID NO: 2478642 - RNA, 19 nt, Artificial Sequence
  Description of Artificial Sequence: Synthetic oligonucleotide
  Sense strand starting at position 3510 of SEQ ID NO: 1887525
cucgaauguucccugccuu

SEQ ID NO: 2478643 - RNA, 19 nt, Artificial Sequence
  Description of Artificial Sequence: Synthetic oligonucleotide
  Antisense strand to SEQ ID NO: 2478642
aaggcagggaacauucgag

SEQ ID NO: 2478644 - RNA, 19 nt, Artificial Sequence
  Description of Artificial Sequence: Synthetic oligonucleotide
  Sense strand starting at position 3787 of SEQ ID NO: 1887525
gucagugucucccugaguu

SEQ ID NO: 2478645 - RNA, 19 nt, Artificial Sequence
  Description of Artificial Sequence: Synthetic oligonucleotide
  Antisense strand to SEQ ID NO: 2478644
aacucagggagacacugac

SEQ ID NO: 2478646 - RNA, 19 nt, Artificial Sequence
  Description of Artificial Sequence: Synthetic oligonucleotide
  Sense strand starting at position 3789 of SEQ ID NO: 1887525
cagugucucccugaguucu

SEQ ID NO: 2478647 - RNA, 19 nt, Artificial Sequence
  Description of Artificial Sequence: Synthetic oligonucleotide
  Antisense strand to SEQ ID NO: 2478646
agaacucagggagacacug

SEQ ID NO: 2478648 - RNA, 19 nt, Artificial Sequence
  Description of Artificial Sequence: Synthetic oligonucleotide
  Sense strand starting at position 3959 of SEQ ID NO: 1887525
gacugugucuggguagaca

SEQ ID NO: 2478649 - RNA, 19 nt, Artificial Sequence
  Description of Artificial Sequence: Synthetic oligonucleotide
  Antisense strand to SEQ ID NO: 2478648
ugucuacccagacacaguc

SEQ ID NO: 2478650 - RNA, 19 nt, Artificial Sequence
  Description of Artificial Sequence: Synthetic oligonucleotide
  Sense strand starting at position 1031 of SEQ ID NO: 1887526
gccacauuggagggucaua

SEQ ID NO: 2478651 - RNA, 19 nt, Artificial Sequence
  Description of Artificial Sequence: Synthetic oligonucleotide
  Antisense strand to SEQ ID NO: 2478650
uaugacccuccaauguggc

SEQ ID NO: 2478652 - RNA, 19 nt, Artificial Sequence
  Description of Artificial Sequence: Synthetic oligonucleotide
  Sense strand starting at position 1100 of SEQ ID NO: 1887526
gcuauaggcuccuaggaga

SEQ ID NO: 2478653 - RNA, 19 nt, Artificial Sequence
  Description of Artificial Sequence: Synthetic oligonucleotide
  Antisense strand to SEQ ID NO: 2478652
ucuccuaggagccuauagc

SEQ ID NO: 2478654 - RNA, 19 nt, Artificial Sequence
  Description of Artificial Sequence: Synthetic oligonucleotide
  Sense strand starting at position 1332 of SEQ ID NO: 1887526
cccgcauggugcucuguua

SEQ ID NO: 2478655 - RNA, 19 nt, Artificial Sequence
  Description of Artificial Sequence: Synthetic oligonucleotide
  Antisense strand to SEQ ID NO: 2478654
uaacagagcaccaugcggg

SEQ ID NO: 2478656 - RNA, 19 nt, Artificial Sequence
  Description of Artificial Sequence: Synthetic oligonucleotide
  Sense strand starting at position 1333 of SEQ ID NO: 1887526
ccgcauggugcucuguuau

SEQ ID NO: 2478657 - RNA, 19 nt, Artificial Sequence
  Description of Artificial Sequence: Synthetic oligonucleotide
  Antisense strand to SEQ ID NO: 2478656
auaacagagcaccaugcgg

SEQ ID NO: 2478658 - RNA, 19 nt, Artificial Sequence
  Description of Artificial Sequence: Synthetic oligonucleotide
  Sense strand starting at position 1341 of SEQ ID NO: 1887526
ugcucuguuauggauggga

SEQ ID NO: 2478659 - RNA, 19 nt, Artificial Sequence
  Description of Artificial Sequence: Synthetic oligonucleotide
  Antisense strand to SEQ ID NO: 2478658
ucccauccauaacagagca

SEQ ID NO: 2478660 - RNA, 19 nt, Artificial Sequence
  Description of Artificial Sequence: Synthetic oligonucleotide
  Sense strand starting at position 1343 of SEQ ID NO: 1887526
cucuguuauggaugggaug

SEQ ID NO: 2478661 - RNA, 19 nt, Artificial Sequence
  Description of Artificial Sequence: Synthetic oligonucleotide
  Antisense strand to SEQ ID NO: 2478660
caucccauccauaacagag

SEQ ID NO: 2478662 - RNA, 19 nt, Artificial Sequence
  Description of Artificial Sequence: Synthetic oligonucleotide
  Sense strand starting at position 1345 of SEQ ID NO: 1887526
cuguuauggaugggaugga

SEQ ID NO: 2478663 - RNA, 19 nt, Artificial Sequence
  Description of Artificial Sequence: Synthetic oligonucleotide
  Antisense strand to SEQ ID NO: 2478662
uccaucccauccauaacag

SEQ ID NO: 2478664 - RNA, 19 nt, Artificial Sequence
  Description of Artificial Sequence: Synthetic oligonucleotide
  Sense strand starting at position 1696 of SEQ ID NO: 1887526
uggcccuugucccuaguaa

SEQ ID NO: 2478665 - RNA, 19 nt, Artificial Sequence
  Description of Artificial Sequence: Synthetic oligonucleotide
  Antisense strand to SEQ ID NO: 2478664
uuacuagggacaagggcca

SEQ ID NO: 2478666 - RNA, 19 nt, Artificial Sequence
  Description of Artificial Sequence: Synthetic oligonucleotide
  Sense strand starting at position 1697 of SEQ ID NO: 1887526
ggcccuugucccuaguaag

SEQ ID NO: 2478667 - RNA, 19 nt, Artificial Sequence
  Description of Artificial Sequence: Synthetic oligonucleotide
  Antisense strand to SEQ ID NO: 2478666
cuuacuagggacaagggcc

SEQ ID NO: 2478668 - RNA, 19 nt, Artificial Sequence
  Description of Artificial Sequence: Synthetic oligonucleotide
  Sense strand starting at position 1700 of SEQ ID NO: 1887526
ccuugucccuaguaaggau

SEQ ID NO: 2478669 - RNA, 19 nt, Artificial Sequence
  Description of Artificial Sequence: Synthetic oligonucleotide
  Antisense strand to SEQ ID NO: 2478668
auccuuacuagggacaagg

SEQ ID NO: 2478670 - RNA, 19 nt, Artificial Sequence
  Description of Artificial Sequence: Synthetic oligonucleotide
  Sense strand starting at position 1794 of SEQ ID NO: 1887526
agaauucccugugaggcau

SEQ ID NO: 2478671 - RNA, 19 nt, Artificial Sequence
  Description of Artificial Sequence: Synthetic oligonucleotide
  Antisense strand to SEQ ID NO: 2478670
augccucacagggaauucu

SEQ ID NO: 2478672 - RNA, 19 nt, Artificial Sequence
  Description of Artificial Sequence: Synthetic oligonucleotide
  Sense strand starting at position 2568 of SEQ ID NO: 1887526
ggagaaaugcagcgucuac

SEQ ID NO: 2478673 - RNA, 19 nt, Artificial Sequence
  Description of Artificial Sequence: Synthetic oligonucleotide
  Antisense strand to SEQ ID NO: 2478672
guagacgcugcauuucucc

SEQ ID NO: 2478674 - RNA, 19 nt, Artificial Sequence
  Description of Artificial Sequence: Synthetic oligonucleotide
  Sense strand starting at position 2988 of SEQ ID NO: 1887526
uuaugagacuuuggacaug

SEQ ID NO: 2478675 - RNA, 19 nt, Artificial Sequence
  Description of Artificial Sequence: Synthetic oligonucleotide
  Antisense strand to SEQ ID NO: 2478674
cauguccaaagucucauaa

SEQ ID NO: 2478676 - RNA, 19 nt, Artificial Sequence
  Description of Artificial Sequence: Synthetic oligonucleotide
  Sense strand starting at position 2993 of SEQ ID NO: 1887526
agacuuuggacaugaaugu

SEQ ID NO: 2478677 - RNA, 19 nt, Artificial Sequence
  Description of Artificial Sequence: Synthetic oligonucleotide
  Antisense strand to SEQ ID NO: 2478676
acauucauguccaaagucu

SEQ ID NO: 2478678 - RNA, 19 nt, Artificial Sequence
  Description of Artificial Sequence: Synthetic oligonucleotide
  Sense strand starting at position 3218 of SEQ ID NO: 1887526
ccaugaaauucuugugaua

SEQ ID NO: 2478679 - RNA, 19 nt, Artificial Sequence
  Description of Artificial Sequence: Synthetic oligonucleotide
  Antisense strand to SEQ ID NO: 2478678
uaucacaagaauuucaugg

SEQ ID NO: 2478680 - RNA, 19 nt, Artificial Sequence
  Description of Artificial Sequence: Synthetic oligonucleotide
  Sense strand starting at position 3220 of SEQ ID NO: 1887526
augaaauucuugugauacg

SEQ ID NO: 2478681 - RNA, 19 nt, Artificial Sequence
  Description of Artificial Sequence: Synthetic oligonucleotide
  Antisense strand to SEQ ID NO: 2478680
cguaucacaagaauuucau

SEQ ID NO: 2478682 - RNA, 19 nt, Artificial Sequence
  Description of Artificial Sequence: Synthetic oligonucleotide
  Sense strand starting at position 3221 of SEQ ID NO: 1887526
ugaaauucuugugauacgu

SEQ ID NO: 2478683 - RNA, 19 nt, Artificial Sequence
  Description of Artificial Sequence: Synthetic oligonucleotide
  Antisense strand to SEQ ID NO: 2478682
acguaucacaagaauuuca

SEQ ID NO: 2478684 - RNA, 19 nt, Artificial Sequence
  Description of Artificial Sequence: Synthetic oligonucleotide
  Sense strand starting at position 3223 of SEQ ID NO: 1887526
aaauucuugugauacgucu

SEQ ID NO: 2478685 - RNA, 19 nt, Artificial Sequence
  Description of Artificial Sequence: Synthetic oligonucleotide
  Antisense strand to SEQ ID NO: 2478684
agacguaucacaagaauuu

SEQ ID NO: 2478686 - RNA, 19 nt, Artificial Sequence
  Description of Artificial Sequence: Synthetic oligonucleotide
  Sense strand starting at position 3225 of SEQ ID NO: 1887526
auucuugugauacgucuga

SEQ ID NO: 2478687 - RNA, 19 nt, Artificial Sequence
  Description of Artificial Sequence: Synthetic oligonucleotide
  Antisense strand to SEQ ID NO: 2478686
ucagacguaucacaagaau

SEQ ID NO: 2478688 - RNA, 19 nt, Artificial Sequence
  Description of Artificial Sequence: Synthetic oligonucleotide
  Sense strand starting at position 3780 of SEQ ID NO: 1887526
ggagcugucccacaggaau

SEQ ID NO: 2478689 - RNA, 19 nt, Artificial Sequence
  Description of Artificial Sequence: Synthetic oligonucleotide
  Antisense strand to SEQ ID NO: 2478688
auuccugugggacagcucc

SEQ ID NO: 2478690 - RNA, 19 nt, Artificial Sequence
  Description of Artificial Sequence: Synthetic oligonucleotide
  Sense strand starting at position 3823 of SEQ ID NO: 1887526
cacagacaguuguugaaau

SEQ ID NO: 2478691 - RNA, 19 nt, Artificial Sequence
  Description of Artificial Sequence: Synthetic oligonucleotide
  Antisense strand to SEQ ID NO: 2478690
auuucaacaacugucugug

SEQ ID NO: 2478692 - RNA, 19 nt, Artificial Sequence
  Description of Artificial Sequence: Synthetic oligonucleotide
  Sense strand starting at position 3847 of SEQ ID NO: 1887526
agacagacgucgugaaggu

SEQ ID NO: 2478693 - RNA, 19 nt, Artificial Sequence
  Description of Artificial Sequence: Synthetic oligonucleotide
  Antisense strand to SEQ ID NO: 2478692
accuucacgacgucugucu

SEQ ID NO: 2478694 - RNA, 19 nt, Artificial Sequence
  Description of Artificial Sequence: Synthetic oligonucleotide
  Sense strand starting at position 3851 of SEQ ID NO: 1887526
agacgucgugaaggugaaa

SEQ ID NO: 2478695 - RNA, 19 nt, Artificial Sequence
  Description of Artificial Sequence: Synthetic oligonucleotide
  Antisense strand to SEQ ID NO: 2478694
uuucaccuucacgacgucu

SEQ ID NO: 2478696 - RNA, 19 nt, Artificial Sequence
  Description of Artificial Sequence: Synthetic oligonucleotide
  Sense strand starting at position 3879 of SEQ ID NO: 1887526
uugaauuaauaccaucgaa

SEQ ID NO: 2478697 - RNA, 19 nt, Artificial Sequence
  Description of Artificial Sequence: Synthetic oligonucleotide
  Antisense strand to SEQ ID NO: 2478696
uucgaugguauuaauucaa

SEQ ID NO: 2478698 - RNA, 19 nt, Artificial Sequence
  Description of Artificial Sequence: Synthetic oligonucleotide
  Sense strand starting at position 605 of SEQ ID NO: 1887527
uguuaaauguggcucagac

SEQ ID NO: 2478699 - RNA, 19 nt, Artificial Sequence
  Description of Artificial Sequence: Synthetic oligonucleotide
  Antisense strand to SEQ ID NO: 2478698
gucugagccacauuuaaca

SEQ ID NO: 2478700 - RNA, 19 nt, Artificial Sequence
  Description of Artificial Sequence: Synthetic oligonucleotide
  Sense strand starting at position 1033 of SEQ ID NO: 1887527
ggagucagauucuaacuca

SEQ ID NO: 2478701 - RNA, 19 nt, Artificial Sequence
  Description of Artificial Sequence: Synthetic oligonucleotide
  Antisense strand to SEQ ID NO: 2478700
ugaguuagaaucugacucc

SEQ ID NO: 2478702 - RNA, 19 nt, Artificial Sequence
  Description of Artificial Sequence: Synthetic oligonucleotide
  Sense strand starting at position 1254 of SEQ ID NO: 1887527
gagaguucccggugaggga

SEQ ID NO: 2478703 - RNA, 19 nt, Artificial Sequence
  Description of Artificial Sequence: Synthetic oligonucleotide
  Antisense strand to SEQ ID NO: 2478702
ucccucaccgggaacucuc

SEQ ID NO: 2478704 - RNA, 19 nt, Artificial Sequence
  Description of Artificial Sequence: Synthetic oligonucleotide
  Sense strand starting at position 1255 of SEQ ID NO: 1887527
agaguucccggugagggau

SEQ ID NO: 2478705 - RNA, 19 nt, Artificial Sequence
  Description of Artificial Sequence: Synthetic oligonucleotide
  Antisense strand to SEQ ID NO: 2478704
aucccucaccgggaacucu

SEQ ID NO: 2478706 - RNA, 19 nt, Artificial Sequence
  Description of Artificial Sequence: Synthetic oligonucleotide
  Sense strand starting at position 1725 of SEQ ID NO: 1887527
cacugagagccaggaugua

SEQ ID NO: 2478707 - RNA, 19 nt, Artificial Sequence
  Description of Artificial Sequence: Synthetic oligonucleotide
  Antisense strand to SEQ ID NO: 2478706
uacauccuggcucucagug

SEQ ID NO: 2478708 - RNA, 19 nt, Artificial Sequence
  Description of Artificial Sequence: Synthetic oligonucleotide
  Sense strand starting at position 2163 of SEQ ID NO: 1887527
ggaacaaaucucugagucu

SEQ ID NO: 2478709 - RNA, 19 nt, Artificial Sequence
  Description of Artificial Sequence: Synthetic oligonucleotide
  Antisense strand to SEQ ID NO: 2478708
agacucagagauuuguucc

SEQ ID NO: 2478710 - RNA, 19 nt, Artificial Sequence
  Description of Artificial Sequence: Synthetic oligonucleotide
  Sense strand starting at position 2259 of SEQ ID NO: 1887527
ugacuuauauuugagcuuu

SEQ ID NO: 2478711 - RNA, 19 nt, Artificial Sequence
  Description of Artificial Sequence: Synthetic oligonucleotide
  Antisense strand to SEQ ID NO: 2478710
aaagcucaaauauaaguca

SEQ ID NO: 2478712 - RNA, 19 nt, Artificial Sequence
  Description of Artificial Sequence: Synthetic oligonucleotide
  Sense strand starting at position 2387 of SEQ ID NO: 1887527
ugccgacuguugucacaaa

SEQ ID NO: 2478713 - RNA, 19 nt, Artificial Sequence
  Description of Artificial Sequence: Synthetic oligonucleotide
  Antisense strand to SEQ ID NO: 2478712
uuugugacaacagucggca

SEQ ID NO: 2478714 - RNA, 19 nt, Artificial Sequence
  Description of Artificial Sequence: Synthetic oligonucleotide
  Sense strand starting at position 2410 of SEQ ID NO: 1887527
acucgugacagugguugua

SEQ ID NO: 2478715 - RNA, 19 nt, Artificial Sequence
  Description of Artificial Sequence: Synthetic oligonucleotide
  Antisense strand to SEQ ID NO: 2478714
uacaaccacugucacgagu

SEQ ID NO: 2478716 - RNA, 19 nt, Artificial Sequence
  Description of Artificial Sequence: Synthetic oligonucleotide
  Sense strand starting at position 2431 of SEQ ID NO: 1887527
gucaguggugcuggaacau

SEQ ID NO: 2478717 - RNA, 19 nt, Artificial Sequence
  Description of Artificial Sequence: Synthetic oligonucleotide
  Antisense strand to SEQ ID NO: 2478716
auguuccagcaccacugac

SEQ ID NO: 2478718 - RNA, 19 nt, Artificial Sequence
  Description of Artificial Sequence: Synthetic oligonucleotide
  Sense strand starting at position 2456 of SEQ ID NO: 1887527
gggcucauuugugccugau

SEQ ID NO: 2478719 - RNA, 19 nt, Artificial Sequence
  Description of Artificial Sequence: Synthetic oligonucleotide
  Antisense strand to SEQ ID NO: 2478718
aucaggcacaaaugagccc

SEQ ID NO: 2478720 - RNA, 19 nt, Artificial Sequence
  Description of Artificial Sequence: Synthetic oligonucleotide
  Sense strand starting at position 2466 of SEQ ID NO: 1887527
gugccugauuuccagacca

SEQ ID NO: 2478721 - RNA, 19 nt, Artificial Sequence
  Description of Artificial Sequence: Synthetic oligonucleotide
  Antisense strand to SEQ ID NO: 2478720
uggucuggaaaucaggcac

SEQ ID NO: 2478722 - RNA, 19 nt, Artificial Sequence
  Description of Artificial Sequence: Synthetic oligonucleotide
  Sense strand starting at position 2492 of SEQ ID NO: 1887527
accugagguguuugggaca

SEQ ID NO: 2478723 - RNA, 19 nt, Artificial Sequence
  Description of Artificial Sequence: Synthetic oligonucleotide
  Antisense strand to SEQ ID NO: 2478722
ugucccaaacaccucaggu

SEQ ID NO: 2478724 - RNA, 19 nt, Artificial Sequence
  Description of Artificial Sequence: Synthetic oligonucleotide
  Sense strand starting at position 2536 of SEQ ID NO: 1887527
acagucuacguaggugauu

SEQ ID NO: 2478725 - RNA, 19 nt, Artificial Sequence
  Description of Artificial Sequence: Synthetic oligonucleotide
  Antisense strand to SEQ ID NO: 2478724
aaucaccuacguagacugu

SEQ ID NO: 2478726 - RNA, 19 nt, Artificial Sequence
  Description of Artificial Sequence: Synthetic oligonucleotide
  Sense strand starting at position 2541 of SEQ ID NO: 1887527
cuacguaggugauugaugu

SEQ ID NO: 2478727 - RNA, 19 nt, Artificial Sequence
  Description of Artificial Sequence: Synthetic oligonucleotide
  Antisense strand to SEQ ID NO: 2478726
acaucaaucaccuacguag

SEQ ID NO: 2478728 - RNA, 19 nt, Artificial Sequence
  Description of Artificial Sequence: Synthetic oligonucleotide
  Sense strand starting at position 2547 of SEQ ID NO: 1887527
aggugauugauguguccac

SEQ ID NO: 2478729 - RNA, 19 nt, Artificial Sequence
  Description of Artificial Sequence: Synthetic oligonucleotide
  Antisense strand to SEQ ID NO: 2478728
guggacacaucaaucaccu

SEQ ID NO: 2478730 - RNA, 19 nt, Artificial Sequence
  Description of Artificial Sequence: Synthetic oligonucleotide
  Sense strand starting at position 2548 of SEQ ID NO: 1887527
ggugauugauguguccacu

SEQ ID NO: 2478731 - RNA, 19 nt, Artificial Sequence
  Description of Artificial Sequence: Synthetic oligonucleotide
  Antisense strand to SEQ ID NO: 2478730
aguggacacaucaaucacc

SEQ ID NO: 2478732 - RNA, 19 nt, Artificial Sequence
  Description of Artificial Sequence: Synthetic oligonucleotide
  Sense strand starting at position 2590 of SEQ ID NO: 1887527
uggauagauggacguguau

SEQ ID NO: 2478733 - RNA, 19 nt, Artificial Sequence
  Description of Artificial Sequence: Synthetic oligonucleotide
  Antisense strand to SEQ ID NO: 2478732
auacacguccaucuaucca

SEQ ID NO: 2478734 - RNA, 19 nt, Artificial Sequence
  Description of Artificial Sequence: Synthetic oligonucleotide
  Sense strand starting at position 2601 of SEQ ID NO: 1887527
acguguauuuguccaucua

SEQ ID NO: 2478735 - RNA, 19 nt, Artificial Sequence
  Description of Artificial Sequence: Synthetic oligonucleotide
  Antisense strand to SEQ ID NO: 2478734
uagauggacaaauacacgu

SEQ ID NO: 2478736 - RNA, 19 nt, Artificial Sequence
  Description of Artificial Sequence: Synthetic oligonucleotide
  Sense strand starting at position 2602 of SEQ ID NO: 1887527
cguguauuuguccaucuau

SEQ ID NO: 2478737 - RNA, 19 nt, Artificial Sequence
  Description of Artificial Sequence: Synthetic oligonucleotide
  Antisense strand to SEQ ID NO: 2478736
auagauggacaaauacacg

SEQ ID NO: 2478738 - RNA, 19 nt, Artificial Sequence
  Description of Artificial Sequence: Synthetic oligonucleotide
  Sense strand starting at position 3002 of SEQ ID NO: 1887527
gaucauuuauuagggagac

SEQ ID NO: 2478739 - RNA, 19 nt, Artificial Sequence
  Description of Artificial Sequence: Synthetic oligonucleotide
  Antisense strand to SEQ ID NO: 2478738
gucucccuaauaaaugauc

SEQ ID NO: 2478740 - RNA, 19 nt, Artificial Sequence
  Description of Artificial Sequence: Synthetic oligonucleotide
  Sense strand starting at position 3003 of SEQ ID NO: 1887527
aucauuuauuagggagacu

SEQ ID NO: 2478741 - RNA, 19 nt, Artificial Sequence
  Description of Artificial Sequence: Synthetic oligonucleotide
  Antisense strand to SEQ ID NO: 2478740
agucucccuaauaaaugau

SEQ ID NO: 2478742 - RNA, 19 nt, Artificial Sequence
  Description of Artificial Sequence: Synthetic oligonucleotide
  Sense strand starting at position 3014 of SEQ ID NO: 1887527
gggagacuucugcacagug

SEQ ID NO: 2478743 - RNA, 19 nt, Artificial Sequence
  Description of Artificial Sequence: Synthetic oligonucleotide
  Antisense strand to SEQ ID NO: 2478742
cacugugcagaagucuccc

SEQ ID NO: 2478744 - RNA, 19 nt, Artificial Sequence
  Description of Artificial Sequence: Synthetic oligonucleotide
  Sense strand starting at position 3052 of SEQ ID NO: 1887527
cccagugucuccuugugga

SEQ ID NO: 2478745 - RNA, 19 nt, Artificial Sequence
  Description of Artificial Sequence: Synthetic oligonucleotide
  Antisense strand to SEQ ID NO: 2478744
uccacaaggagacacuggg

SEQ ID NO: 2478746 - RNA, 19 nt, Artificial Sequence
  Description of Artificial Sequence: Synthetic oligonucleotide
  Sense strand starting at position 3118 of SEQ ID NO: 1887527
ggagacacuggguguucua

SEQ ID NO: 2478747 - RNA, 19 nt, Artificial Sequence
  Description of Artificial Sequence: Synthetic oligonucleotide
  Antisense strand to SEQ ID NO: 2478746
uagaacacccagugucucc

SEQ ID NO: 2478748 - RNA, 19 nt, Artificial Sequence
  Description of Artificial Sequence: Synthetic oligonucleotide
  Sense strand starting at position 3127 of SEQ ID NO: 1887527
ggguguucuacccgaagcu

SEQ ID NO: 2478749 - RNA, 19 nt, Artificial Sequence
  Description of Artificial Sequence: Synthetic oligonucleotide
  Antisense strand to SEQ ID NO: 2478748
agcuucggguagaacaccc

SEQ ID NO: 2478750 - RNA, 19 nt, Artificial Sequence
  Description of Artificial Sequence: Synthetic oligonucleotide
  Sense strand starting at position 3128 of SEQ ID NO: 1887527
gguguucuacccgaagcuu

SEQ ID NO: 2478751 - RNA, 19 nt, Artificial Sequence
  Description of Artificial Sequence: Synthetic oligonucleotide
  Antisense strand to SEQ ID NO: 2478750
aagcuucggguagaacacc

SEQ ID NO: 2478752 - RNA, 19 nt, Artificial Sequence
  Description of Artificial Sequence: Synthetic oligonucleotide
  Sense strand starting at position 3186 of SEQ ID NO: 1887527
agaauaugaucucucagua

SEQ ID NO: 2478753 - RNA, 19 nt, Artificial Sequence
  Description of Artificial Sequence: Synthetic oligonucleotide
  Antisense strand to SEQ ID NO: 2478752
uacugagagaucauauucu

SEQ ID NO: 2478754 - RNA, 19 nt, Artificial Sequence
  Description of Artificial Sequence: Synthetic oligonucleotide
  Sense strand starting at position 3190 of SEQ ID NO: 1887527
uaugaucucucaguagagu

SEQ ID NO: 2478755 - RNA, 19 nt, Artificial Sequence
  Description of Artificial Sequence: Synthetic oligonucleotide
  Antisense strand to SEQ ID NO: 2478754
acucuacugagagaucaua

SEQ ID NO: 2478756 - RNA, 19 nt, Artificial Sequence
  Description of Artificial Sequence: Synthetic oligonucleotide
  Sense strand starting at position 3191 of SEQ ID NO: 1887527
augaucucucaguagaguu

SEQ ID NO: 2478757 - RNA, 19 nt, Artificial Sequence
  Description of Artificial Sequence: Synthetic oligonucleotide
  Antisense strand to SEQ ID NO: 2478756
aacucuacugagagaucau

SEQ ID NO: 2478758 - RNA, 19 nt, Artificial Sequence
  Description of Artificial Sequence: Synthetic oligonucleotide
  Sense strand starting at position 3203 of SEQ ID NO: 1887527
uagaguuguuucuugggau

SEQ ID NO: 2478759 - RNA, 19 nt, Artificial Sequence
  Description of Artificial Sequence: Synthetic oligonucleotide
  Antisense strand to SEQ ID NO: 2478758
aucccaagaaacaacucua

SEQ ID NO: 2478760 - RNA, 19 nt, Artificial Sequence
  Description of Artificial Sequence: Synthetic oligonucleotide
  Sense strand starting at position 3215 of SEQ ID NO: 1887527
uugggauacacaggcaauu

SEQ ID NO: 2478761 - RNA, 19 nt, Artificial Sequence
  Description of Artificial Sequence: Synthetic oligonucleotide
  Antisense strand to SEQ ID NO: 2478760
aauugccuguguaucccaa

SEQ ID NO: 2478762 - RNA, 19 nt, Artificial Sequence
  Description of Artificial Sequence: Synthetic oligonucleotide
  Sense strand starting at position 3428 of SEQ ID NO: 1887527
gcuccaggguugucuggau

SEQ ID NO: 2478763 - RNA, 19 nt, Artificial Sequence
  Description of Artificial Sequence: Synthetic oligonucleotide
  Antisense strand to SEQ ID NO: 2478762
auccagacaacccuggagc

SEQ ID NO: 2478764 - RNA, 19 nt, Artificial Sequence
  Description of Artificial Sequence: Synthetic oligonucleotide
  Sense strand starting at position 3449 of SEQ ID NO: 1887527
ugaguuuauuugggaguga

SEQ ID NO: 2478765 - RNA, 19 nt, Artificial Sequence
  Description of Artificial Sequence: Synthetic oligonucleotide
  Antisense strand to SEQ ID NO: 2478764
ucacucccaaauaaacuca

SEQ ID NO: 2478766 - RNA, 19 nt, Artificial Sequence
  Description of Artificial Sequence: Synthetic oligonucleotide
  Sense strand starting at position 3450 of SEQ ID NO: 1887527
gaguuuauuugggagugag

SEQ ID NO: 2478767 - RNA, 19 nt, Artificial Sequence
  Description of Artificial Sequence: Synthetic oligonucleotide
  Antisense strand to SEQ ID NO: 2478766
cucacucccaaauaaacuc

SEQ ID NO: 2478768 - RNA, 19 nt, Artificial Sequence
  Description of Artificial Sequence: Synthetic oligonucleotide
  Sense strand starting at position 3581 of SEQ ID NO: 1887527
cuccauagcccuuguuaca

SEQ ID NO: 2478769 - RNA, 19 nt, Artificial Sequence
  Description of Artificial Sequence: Synthetic oligonucleotide
  Antisense strand to SEQ ID NO: 2478768
uguaacaagggcuauggag

SEQ ID NO: 2478770 - RNA, 19 nt, Artificial Sequence
  Description of Artificial Sequence: Synthetic oligonucleotide
  Sense strand starting at position 3609 of SEQ ID NO: 1887527
uauaacauuggcuguguua

SEQ ID NO: 2478771 - RNA, 19 nt, Artificial Sequence
  Description of Artificial Sequence: Synthetic oligonucleotide
  Antisense strand to SEQ ID NO: 2478770
uaacacagccaauguuaua

SEQ ID NO: 2478772 - RNA, 19 nt, Artificial Sequence
  Description of Artificial Sequence: Synthetic oligonucleotide
  Sense strand starting at position 3750 of SEQ ID NO: 1887527
uuccuugugggaggaaaua

SEQ ID NO: 2478773 - RNA, 19 nt, Artificial Sequence
  Description of Artificial Sequence: Synthetic oligonucleotide
  Antisense strand to SEQ ID NO: 2478772
uauuuccucccacaaggaa

SEQ ID NO: 2478774 - RNA, 19 nt, Artificial Sequence
  Description of Artificial Sequence: Synthetic oligonucleotide
  Sense strand starting at position 3761 of SEQ ID NO: 1887527
aggaaauacugacaucaug

SEQ ID NO: 2478775 - RNA, 19 nt, Artificial Sequence
  Description of Artificial Sequence: Synthetic oligonucleotide
  Antisense strand to SEQ ID NO: 2478774
caugaugucaguauuuccu

SEQ ID NO: 2478776 - RNA, 19 nt, Artificial Sequence
  Description of Artificial Sequence: Synthetic oligonucleotide
  Sense strand starting at position 3963 of SEQ ID NO: 1887527
gucagugucucucugaguu

SEQ ID NO: 2478777 - RNA, 19 nt, Artificial Sequence
  Description of Artificial Sequence: Synthetic oligonucleotide
  Antisense strand to SEQ ID NO: 2478776
aacucagagagacacugac

SEQ ID NO: 2478778 - RNA, 19 nt, Artificial Sequence
  Description of Artificial Sequence: Synthetic oligonucleotide
  Sense strand starting at position 459 of SEQ ID NO: 1887528
agugauggcuucuuagaaa

SEQ ID NO: 2478779 - RNA, 19 nt, Artificial Sequence
  Description of Artificial Sequence: Synthetic oligonucleotide
  Antisense strand to SEQ ID NO: 2478778
uuucuaagaagccaucacu

SEQ ID NO: 2478780 - RNA, 19 nt, Artificial Sequence
  Description of Artificial Sequence: Synthetic oligonucleotide
  Sense strand starting at position 1241 of SEQ ID NO: 1887528
uguguucccaggugaugga

SEQ ID NO: 2478781 - RNA, 19 nt, Artificial Sequence
  Description of Artificial Sequence: Synthetic oligonucleotide
  Antisense strand to SEQ ID NO: 2478780
uccaucaccugggaacaca

SEQ ID NO: 2478782 - RNA, 19 nt, Artificial Sequence
  Description of Artificial Sequence: Synthetic oligonucleotide
  Sense strand starting at position 1294 of SEQ ID NO: 1887528
ggucguauccguguaaucc

SEQ ID NO: 2478783 - RNA, 19 nt, Artificial Sequence
  Description of Artificial Sequence: Synthetic oligonucleotide
  Antisense strand to SEQ ID NO: 2478782
ggauuacacggauacgacc

SEQ ID NO: 2478784 - RNA, 19 nt, Artificial Sequence
  Description of Artificial Sequence: Synthetic oligonucleotide
  Sense strand starting at position 1298 of SEQ ID NO: 1887528
guauccguguaauccaaga

SEQ ID NO: 2478785 - RNA, 19 nt, Artificial Sequence
  Description of Artificial Sequence: Synthetic oligonucleotide
  Antisense strand to SEQ ID NO: 2478784
ucuuggauuacacggauac

SEQ ID NO: 2478786 - RNA, 19 nt, Artificial Sequence
  Description of Artificial Sequence: Synthetic oligonucleotide
  Sense strand starting at position 1300 of SEQ ID NO: 1887528
auccguguaauccaagaug

SEQ ID NO: 2478787 - RNA, 19 nt, Artificial Sequence
  Description of Artificial Sequence: Synthetic oligonucleotide
  Antisense strand to SEQ ID NO: 2478786
caucuuggauuacacggau

SEQ ID NO: 2478788 - RNA, 19 nt, Artificial Sequence
  Description of Artificial Sequence: Synthetic oligonucleotide
  Sense strand starting at position 1303 of SEQ ID NO: 1887528
cguguaauccaagaugcug

SEQ ID NO: 2478789 - RNA, 19 nt, Artificial Sequence
  Description of Artificial Sequence: Synthetic oligonucleotide
  Antisense strand to SEQ ID NO: 2478788
cagcaucuuggauuacacg

SEQ ID NO: 2478790 - RNA, 19 nt, Artificial Sequence
  Description of Artificial Sequence: Synthetic oligonucleotide
  Sense strand starting at position 1791 of SEQ ID NO: 1887528
ggucccuccuagguuagaa

SEQ ID NO: 2478791 - RNA, 19 nt, Artificial Sequence
  Description of Artificial Sequence: Synthetic oligonucleotide
  Antisense strand to SEQ ID NO: 2478790
uucuaaccuaggagggacc

SEQ ID NO: 2478792 - RNA, 19 nt, Artificial Sequence
  Description of Artificial Sequence: Synthetic oligonucleotide
  Sense strand starting at position 1841 of SEQ ID NO: 1887528
agaucaggacugugacgau

SEQ ID NO: 2478793 - RNA, 19 nt, Artificial Sequence
  Description of Artificial Sequence: Synthetic oligonucleotide
  Antisense strand to SEQ ID NO: 2478792
aucgucacaguccugaucu

SEQ ID NO: 2478794 - RNA, 19 nt, Artificial Sequence
  Description of Artificial Sequence: Synthetic oligonucleotide
  Sense strand starting at position 2503 of SEQ ID NO: 1887528
guugacuucuuucuugaca

SEQ ID NO: 2478795 - RNA, 19 nt, Artificial Sequence
  Description of Artificial Sequence: Synthetic oligonucleotide
  Antisense strand to SEQ ID NO: 2478794
ugucaagaaagaagucaac

SEQ ID NO: 2478796 - RNA, 19 nt, Artificial Sequence
  Description of Artificial Sequence: Synthetic oligonucleotide
  Sense strand starting at position 2613 of SEQ ID NO: 1887528
ggaagaaaccucugagucu

SEQ ID NO: 2478797 - RNA, 19 nt, Artificial Sequence
  Description of Artificial Sequence: Synthetic oligonucleotide
  Antisense strand to SEQ ID NO: 2478796
agacucagagguuucuucc

SEQ ID NO: 2478798 - RNA, 19 nt, Artificial Sequence
  Description of Artificial Sequence: Synthetic oligonucleotide
  Sense strand starting at position 2708 of SEQ ID NO: 1887528
augacuuauguuugagcuu

SEQ ID NO: 2478799 - RNA, 19 nt, Artificial Sequence
  Description of Artificial Sequence: Synthetic oligonucleotide
  Antisense strand to SEQ ID NO: 2478798
aagcucaaacauaagucau

SEQ ID NO: 2478800 - RNA, 19 nt, Artificial Sequence
  Description of Artificial Sequence: Synthetic oligonucleotide
  Sense strand starting at position 2761 of SEQ ID NO: 1887528
uuugaugacugguuaucau

SEQ ID NO: 2478801 - RNA, 19 nt, Artificial Sequence
  Description of Artificial Sequence: Synthetic oligonucleotide
  Antisense strand to SEQ ID NO: 2478800
augauaaccagucaucaaa

SEQ ID NO: 2478802 - RNA, 19 nt, Artificial Sequence
  Description of Artificial Sequence: Synthetic oligonucleotide
  Sense strand starting at position 2771 of SEQ ID NO: 1887528
gguuaucauccgcugccua

SEQ ID NO: 2478803 - RNA, 19 nt, Artificial Sequence
  Description of Artificial Sequence: Synthetic oligonucleotide
  Antisense strand to SEQ ID NO: 2478802
uaggcagcggaugauaacc

SEQ ID NO: 2478804 - RNA, 19 nt, Artificial Sequence
  Description of Artificial Sequence: Synthetic oligonucleotide
  Sense strand starting at position 2789 of SEQ ID NO: 1887528
acgugaccuugguuuguaa

SEQ ID NO: 2478805 - RNA, 19 nt, Artificial Sequence
  Description of Artificial Sequence: Synthetic oligonucleotide
  Antisense strand to SEQ ID NO: 2478804
uuacaaaccaaggucacgu

SEQ ID NO: 2478806 - RNA, 19 nt, Artificial Sequence
  Description of Artificial Sequence: Synthetic oligonucleotide
  Sense strand starting at position 2791 of SEQ ID NO: 1887528
gugaccuugguuuguaaug

SEQ ID NO: 2478807 - RNA, 19 nt, Artificial Sequence
  Description of Artificial Sequence: Synthetic oligonucleotide
  Antisense strand to SEQ ID NO: 2478806
cauuacaaaccaaggucac

SEQ ID NO: 2478808 - RNA, 19 nt, Artificial Sequence
  Description of Artificial Sequence: Synthetic oligonucleotide
  Sense strand starting at position 2792 of SEQ ID NO: 1887528
ugaccuugguuuguaaugu

SEQ ID NO: 2478809 - RNA, 19 nt, Artificial Sequence
  Description of Artificial Sequence: Synthetic oligonucleotide
  Antisense strand to SEQ ID NO: 2478808
acauuacaaaccaagguca

SEQ ID NO: 2478810 - RNA, 19 nt, Artificial Sequence
  Description of Artificial Sequence: Synthetic oligonucleotide
  Sense strand starting at position 2827 of SEQ ID NO: 1887528
aguuucuuccuuugcagau

SEQ ID NO: 2478811 - RNA, 19 nt, Artificial Sequence
  Description of Artificial Sequence: Synthetic oligonucleotide
  Antisense strand to SEQ ID NO: 2478810
aucugcaaaggaagaaacu

SEQ ID NO: 2478812 - RNA, 19 nt, Artificial Sequence
  Description of Artificial Sequence: Synthetic oligonucleotide
  Sense strand starting at position 2839 of SEQ ID NO: 1887528
ugcagauuguugucaugaa

SEQ ID NO: 2478813 - RNA, 19 nt, Artificial Sequence
  Description of Artificial Sequence: Synthetic oligonucleotide
  Antisense strand to SEQ ID NO: 2478812
uucaugacaacaaucugca

SEQ ID NO: 2478814 - RNA, 19 nt, Artificial Sequence
  Description of Artificial Sequence: Synthetic oligonucleotide
  Sense strand starting at position 2883 of SEQ ID NO: 1887528
gucaguggugccugggaca

SEQ ID NO: 2478815 - RNA, 19 nt, Artificial Sequence
  Description of Artificial Sequence: Synthetic oligonucleotide
  Antisense strand to SEQ ID NO: 2478814
ugucccaggcaccacugac

SEQ ID NO: 2478816 - RNA, 19 nt, Artificial Sequence
  Description of Artificial Sequence: Synthetic oligonucleotide
  Sense strand starting at position 2909 of SEQ ID NO: 1887528
gggcucauuugugcuugau

SEQ ID NO: 2478817 - RNA, 19 nt, Artificial Sequence
  Description of Artificial Sequence: Synthetic oligonucleotide
  Antisense strand to SEQ ID NO: 2478816
aucaagcacaaaugagccc

SEQ ID NO: 2478818 - RNA, 19 nt, Artificial Sequence
  Description of Artificial Sequence: Synthetic oligonucleotide
  Sense strand starting at position 2919 of SEQ ID NO: 1887528
gugcuugauuuccagacca

SEQ ID NO: 2478819 - RNA, 19 nt, Artificial Sequence
  Description of Artificial Sequence: Synthetic oligonucleotide
  Antisense strand to SEQ ID NO: 2478818
uggucuggaaaucaagcac

SEQ ID NO: 2478820 - RNA, 19 nt, Artificial Sequence
  Description of Artificial Sequence: Synthetic oligonucleotide
  Sense strand starting at position 2949 of SEQ ID NO: 1887528
gaggcuuugggacgugaga

SEQ ID NO: 2478821 - RNA, 19 nt, Artificial Sequence
  Description of Artificial Sequence: Synthetic oligonucleotide
  Antisense strand to SEQ ID NO: 2478820
ucucacgucccaaagccuc

SEQ ID NO: 2478822 - RNA, 19 nt, Artificial Sequence
  Description of Artificial Sequence: Synthetic oligonucleotide
  Sense strand starting at position 2986 of SEQ ID NO: 1887528
ccacauucuguaggugauu

SEQ ID NO: 2478823 - RNA, 19 nt, Artificial Sequence
  Description of Artificial Sequence: Synthetic oligonucleotide
  Antisense strand to SEQ ID NO: 2478822
aaucaccuacagaaugugg

SEQ ID NO: 2478824 - RNA, 19 nt, Artificial Sequence
  Description of Artificial Sequence: Synthetic oligonucleotide
  Sense strand starting at position 2988 of SEQ ID NO: 1887528
acauucuguaggugauuga

SEQ ID NO: 2478825 - RNA, 19 nt, Artificial Sequence
  Description of Artificial Sequence: Synthetic oligonucleotide
  Antisense strand to SEQ ID NO: 2478824
ucaaucaccuacagaaugu

SEQ ID NO: 2478826 - RNA, 19 nt, Artificial Sequence
  Description of Artificial Sequence: Synthetic oligonucleotide
  Sense strand starting at position 2989 of SEQ ID NO: 1887528
cauucuguaggugauugau

SEQ ID NO: 2478827 - RNA, 19 nt, Artificial Sequence
  Description of Artificial Sequence: Synthetic oligonucleotide
  Antisense strand to SEQ ID NO: 2478826
aucaaucaccuacagaaug

SEQ ID NO: 2478828 - RNA, 19 nt, Artificial Sequence
  Description of Artificial Sequence: Synthetic oligonucleotide
  Sense strand starting at position 2991 of SEQ ID NO: 1887528
uucuguaggugauugauga

SEQ ID NO: 2478829 - RNA, 19 nt, Artificial Sequence
  Description of Artificial Sequence: Synthetic oligonucleotide
  Antisense strand to SEQ ID NO: 2478828
ucaucaaucaccuacagaa

SEQ ID NO: 2478830 - RNA, 19 nt, Artificial Sequence
  Description of Artificial Sequence: Synthetic oligonucleotide
  Sense strand starting at position 2998 of SEQ ID NO: 1887528
ggugauugaugaguccacu

SEQ ID NO: 2478831 - RNA, 19 nt, Artificial Sequence
  Description of Artificial Sequence: Synthetic oligonucleotide
  Antisense strand to SEQ ID NO: 2478830
aguggacucaucaaucacc

SEQ ID NO: 2478832 - RNA, 19 nt, Artificial Sequence
  Description of Artificial Sequence: Synthetic oligonucleotide
  Sense strand starting at position 3008 of SEQ ID NO: 1887528
gaguccacucaagauguca

SEQ ID NO: 2478833 - RNA, 19 nt, Artificial Sequence
  Description of Artificial Sequence: Synthetic oligonucleotide
  Antisense strand to SEQ ID NO: 2478832
ugacaucuugaguggacuc

SEQ ID NO: 2478834 - RNA, 19 nt, Artificial Sequence
  Description of Artificial Sequence: Synthetic oligonucleotide
  Sense strand starting at position 3022 of SEQ ID NO: 1887528
ugucacaucugaccguaau

SEQ ID NO: 2478835 - RNA, 19 nt, Artificial Sequence
  Description of Artificial Sequence: Synthetic oligonucleotide
  Antisense strand to SEQ ID NO: 2478834
auuacggucagaugugaca

SEQ ID NO: 2478836 - RNA, 19 nt, Artificial Sequence
  Description of Artificial Sequence: Synthetic oligonucleotide
  Sense strand starting at position 3023 of SEQ ID NO: 1887528
gucacaucugaccguaaug

SEQ ID NO: 2478837 - RNA, 19 nt, Artificial Sequence
  Description of Artificial Sequence: Synthetic oligonucleotide
  Antisense strand to SEQ ID NO: 2478836
cauuacggucagaugugac

SEQ ID NO: 2478838 - RNA, 19 nt, Artificial Sequence
  Description of Artificial Sequence: Synthetic oligonucleotide
  Sense strand starting at position 3025 of SEQ ID NO: 1887528
cacaucugaccguaaugga

SEQ ID NO: 2478839 - RNA, 19 nt, Artificial Sequence
  Description of Artificial Sequence: Synthetic oligonucleotide
  Antisense strand to SEQ ID NO: 2478838
uccauuacggucagaugug

SEQ ID NO: 2478840 - RNA, 19 nt, Artificial Sequence
  Description of Artificial Sequence: Synthetic oligonucleotide
  Sense strand starting at position 3032 of SEQ ID NO: 1887528
gaccguaauggagaaacgu

SEQ ID NO: 2478841 - RNA, 19 nt, Artificial Sequence
  Description of Artificial Sequence: Synthetic oligonucleotide
  Antisense strand to SEQ ID NO: 2478840
acguuucuccauuacgguc

SEQ ID NO: 2478842 - RNA, 19 nt, Artificial Sequence
  Description of Artificial Sequence: Synthetic oligonucleotide
  Sense strand starting at position 3040 of SEQ ID NO: 1887528
uggagaaacguauguguag

SEQ ID NO: 2478843 - RNA, 19 nt, Artificial Sequence
  Description of Artificial Sequence: Synthetic oligonucleotide
  Antisense strand to SEQ ID NO: 2478842
cuacacauacguuucucca

SEQ ID NO: 2478844 - RNA, 19 nt, Artificial Sequence
  Description of Artificial Sequence: Synthetic oligonucleotide
  Sense strand starting at position 3042 of SEQ ID NO: 1887528
gagaaacguauguguagca

SEQ ID NO: 2478845 - RNA, 19 nt, Artificial Sequence
  Description of Artificial Sequence: Synthetic oligonucleotide
  Antisense strand to SEQ ID NO: 2478844
ugcuacacauacguuucuc

SEQ ID NO: 2478846 - RNA, 19 nt, Artificial Sequence
  Description of Artificial Sequence: Synthetic oligonucleotide
  Sense strand starting at position 3052 of SEQ ID NO: 1887528
uguguagcauuucugaaau

SEQ ID NO: 2478847 - RNA, 19 nt, Artificial Sequence
  Description of Artificial Sequence: Synthetic oligonucleotide
  Antisense strand to SEQ ID NO: 2478846
auuucagaaaugcuacaca

SEQ ID NO: 2478848 - RNA, 19 nt, Artificial Sequence
  Description of Artificial Sequence: Synthetic oligonucleotide
  Sense strand starting at position 3054 of SEQ ID NO: 1887528
uguagcauuucugaaauac

SEQ ID NO: 2478849 - RNA, 19 nt, Artificial Sequence
  Description of Artificial Sequence: Synthetic oligonucleotide
  Antisense strand to SEQ ID NO: 2478848
guauuucagaaaugcuaca

SEQ ID NO: 2478850 - RNA, 19 nt, Artificial Sequence
  Description of Artificial Sequence: Synthetic oligonucleotide
  Sense strand starting at position 3241 of SEQ ID NO: 1887528
cgggaucugcaaugacagu

SEQ ID NO: 2478851 - RNA, 19 nt, Artificial Sequence
  Description of Artificial Sequence: Synthetic oligonucleotide
  Antisense strand to SEQ ID NO: 2478850
acugucauugcagaucccg

SEQ ID NO: 2478852 - RNA, 19 nt, Artificial Sequence
  Description of Artificial Sequence: Synthetic oligonucleotide
  Sense strand starting at position 3617 of SEQ ID NO: 1887528
augaucucucaguacaguu

SEQ ID NO: 2478853 - RNA, 19 nt, Artificial Sequence
  Description of Artificial Sequence: Synthetic oligonucleotide
  Antisense strand to SEQ ID NO: 2478852
aacuguacugagagaucau

SEQ ID NO: 2478854 - RNA, 19 nt, Artificial Sequence
  Description of Artificial Sequence: Synthetic oligonucleotide
  Sense strand starting at position 3629 of SEQ ID NO: 1887528
uacaguuguuucuugggau

SEQ ID NO: 2478855 - RNA, 19 nt, Artificial Sequence
  Description of Artificial Sequence: Synthetic oligonucleotide
  Antisense strand to SEQ ID NO: 2478854
aucccaagaaacaacugua

SEQ ID NO: 2478856 - RNA, 19 nt, Artificial Sequence
  Description of Artificial Sequence: Synthetic oligonucleotide
  Sense strand starting at position 3641 of SEQ ID NO: 1887528
uugggauacacaggcaauu

SEQ ID NO: 2478857 - RNA, 19 nt, Artificial Sequence
  Description of Artificial Sequence: Synthetic oligonucleotide
  Antisense strand to SEQ ID NO: 2478856
aauugccuguguaucccaa

SEQ ID NO: 2478858 - RNA, 19 nt, Artificial Sequence
  Description of Artificial Sequence: Synthetic oligonucleotide
  Sense strand starting at position 519 of SEQ ID NO: 1887529
ccgugagaguaaguucuca

SEQ ID NO: 2478859 - RNA, 19 nt, Artificial Sequence
  Description of Artificial Sequence: Synthetic oligonucleotide
  Antisense strand to SEQ ID NO: 2478858
ugagaacuuacucucacgg

SEQ ID NO: 2478860 - RNA, 19 nt, Artificial Sequence
  Description of Artificial Sequence: Synthetic oligonucleotide
  Sense strand starting at position 892 of SEQ ID NO: 1887529
aggagacacugucuuaaau

SEQ ID NO: 2478861 - RNA, 19 nt, Artificial Sequence
  Description of Artificial Sequence: Synthetic oligonucleotide
  Antisense strand to SEQ ID NO: 2478860
auuuaagacagugucuccu

SEQ ID NO: 2478862 - RNA, 19 nt, Artificial Sequence
  Description of Artificial Sequence: Synthetic oligonucleotide
  Sense strand starting at position 939 of SEQ ID NO: 1887529
agggcugaguuauuagaac

SEQ ID NO: 2478863 - RNA, 19 nt, Artificial Sequence
  Description of Artificial Sequence: Synthetic oligonucleotide
  Antisense strand to SEQ ID NO: 2478862
guucuaauaacucagcccu

SEQ ID NO: 2478864 - RNA, 19 nt, Artificial Sequence
  Description of Artificial Sequence: Synthetic oligonucleotide
  Sense strand starting at position 945 of SEQ ID NO: 1887529
gaguuauuagaacggagau

SEQ ID NO: 2478865 - RNA, 19 nt, Artificial Sequence
  Description of Artificial Sequence: Synthetic oligonucleotide
  Antisense strand to SEQ ID NO: 2478864
aucuccguucuaauaacuc

SEQ ID NO: 2478866 - RNA, 19 nt, Artificial Sequence
  Description of Artificial Sequence: Synthetic oligonucleotide
  Sense strand starting at position 946 of SEQ ID NO: 1887529
aguuauuagaacggagaug

SEQ ID NO: 2478867 - RNA, 19 nt, Artificial Sequence
  Description of Artificial Sequence: Synthetic oligonucleotide
  Antisense strand to SEQ ID NO: 2478866
caucuccguucuaauaacu

SEQ ID NO: 2478868 - RNA, 19 nt, Artificial Sequence
  Description of Artificial Sequence: Synthetic oligonucleotide
  Sense strand starting at position 2035 of SEQ ID NO: 1887529
ccaacuuagcugggucuaa

SEQ ID NO: 2478869 - RNA, 19 nt, Artificial Sequence
  Description of Artificial Sequence: Synthetic oligonucleotide
  Antisense strand to SEQ ID NO: 2478868
uuagacccagcuaaguugg

SEQ ID NO: 2478870 - RNA, 19 nt, Artificial Sequence
  Description of Artificial Sequence: Synthetic oligonucleotide
  Sense strand starting at position 2036 of SEQ ID NO: 1887529
caacuuagcugggucuaaa

SEQ ID NO: 2478871 - RNA, 19 nt, Artificial Sequence
  Description of Artificial Sequence: Synthetic oligonucleotide
  Antisense strand to SEQ ID NO: 2478870
uuuagacccagcuaaguug

SEQ ID NO: 2478872 - RNA, 19 nt, Artificial Sequence
  Description of Artificial Sequence: Synthetic oligonucleotide
  Sense strand starting at position 2142 of SEQ ID NO: 1887529
agcagaaagucauccugau

SEQ ID NO: 2478873 - RNA, 19 nt, Artificial Sequence
  Description of Artificial Sequence: Synthetic oligonucleotide
  Antisense strand to SEQ ID NO: 2478872
aucaggaugacuuucugcu

SEQ ID NO: 2478874 - RNA, 19 nt, Artificial Sequence
  Description of Artificial Sequence: Synthetic oligonucleotide
  Sense strand starting at position 2148 of SEQ ID NO: 1887529
aagucauccugaucuggag

SEQ ID NO: 2478875 - RNA, 19 nt, Artificial Sequence
  Description of Artificial Sequence: Synthetic oligonucleotide
  Antisense strand to SEQ ID NO: 2478874
cuccagaucaggaugacuu

SEQ ID NO: 2478876 - RNA, 19 nt, Artificial Sequence
  Description of Artificial Sequence: Synthetic oligonucleotide
  Sense strand starting at position 2151 of SEQ ID NO: 1887529
ucauccugaucuggagaga

SEQ ID NO: 2478877 - RNA, 19 nt, Artificial Sequence
  Description of Artificial Sequence: Synthetic oligonucleotide
  Antisense strand to SEQ ID NO: 2478876
ucucuccagaucaggauga

SEQ ID NO: 2478878 - RNA, 19 nt, Artificial Sequence
  Description of Artificial Sequence: Synthetic oligonucleotide
  Sense strand starting at position 2282 of SEQ ID NO: 1887529
uugauuuauuaccaaagag

SEQ ID NO: 2478879 - RNA, 19 nt, Artificial Sequence
  Description of Artificial Sequence: Synthetic oligonucleotide
  Antisense strand to SEQ ID NO: 2478878
cucuuugguaauaaaucaa

SEQ ID NO: 2478880 - RNA, 19 nt, Artificial Sequence
  Description of Artificial Sequence: Synthetic oligonucleotide
  Sense strand starting at position 2328 of SEQ ID NO: 1887529
ccaugacuagaaugugguu

SEQ ID NO: 2478881 - RNA, 19 nt, Artificial Sequence
  Description of Artificial Sequence: Synthetic oligonucleotide
  Antisense strand to SEQ ID NO: 2478880
aaccacauucuagucaugg

SEQ ID NO: 2478882 - RNA, 19 nt, Artificial Sequence
  Description of Artificial Sequence: Synthetic oligonucleotide
  Sense strand starting at position 2334 of SEQ ID NO: 1887529
cuagaaugugguugaggga

SEQ ID NO: 2478883 - RNA, 19 nt, Artificial Sequence
  Description of Artificial Sequence: Synthetic oligonucleotide
  Antisense strand to SEQ ID NO: 2478882
ucccucaaccacauucuag

SEQ ID NO: 2478884 - RNA, 19 nt, Artificial Sequence
  Description of Artificial Sequence: Synthetic oligonucleotide
  Sense strand starting at position 2348 of SEQ ID NO: 1887529
agggaaugguuucuaucuu

SEQ ID NO: 2478885 - RNA, 19 nt, Artificial Sequence
  Description of Artificial Sequence: Synthetic oligonucleotide
  Antisense strand to SEQ ID NO: 2478884
aagauagaaaccauucccu

SEQ ID NO: 2478886 - RNA, 19 nt, Artificial Sequence
  Description of Artificial Sequence: Synthetic oligonucleotide
  Sense strand starting at position 2349 of SEQ ID NO: 1887529
gggaaugguuucuaucuua

SEQ ID NO: 2478887 - RNA, 19 nt, Artificial Sequence
  Description of Artificial Sequence: Synthetic oligonucleotide
  Antisense strand to SEQ ID NO: 2478886
uaagauagaaaccauuccc

SEQ ID NO: 2478888 - RNA, 19 nt, Artificial Sequence
  Description of Artificial Sequence: Synthetic oligonucleotide
  Sense strand starting at position 2362 of SEQ ID NO: 1887529
aucuuauucccuggcagag

SEQ ID NO: 2478889 - RNA, 19 nt, Artificial Sequence
  Description of Artificial Sequence: Synthetic oligonucleotide
  Antisense strand to SEQ ID NO: 2478888
cucugccagggaauaagau

SEQ ID NO: 2478890 - RNA, 19 nt, Artificial Sequence
  Description of Artificial Sequence: Synthetic oligonucleotide
  Sense strand starting at position 2364 of SEQ ID NO: 1887529
cuuauucccuggcagagaa

SEQ ID NO: 2478891 - RNA, 19 nt, Artificial Sequence
  Description of Artificial Sequence: Synthetic oligonucleotide
  Antisense strand to SEQ ID NO: 2478890
uucucugccagggaauaag

SEQ ID NO: 2478892 - RNA, 19 nt, Artificial Sequence
  Description of Artificial Sequence: Synthetic oligonucleotide
  Sense strand starting at position 2733 of SEQ ID NO: 1887529
gugagagguaguugugaga

SEQ ID NO: 2478893 - RNA, 19 nt, Artificial Sequence
  Description of Artificial Sequence: Synthetic oligonucleotide
  Antisense strand to SEQ ID NO: 2478892
ucucacaacuaccucucac

SEQ ID NO: 2478894 - RNA, 19 nt, Artificial Sequence
  Description of Artificial Sequence: Synthetic oligonucleotide
  Sense strand starting at position 2736 of SEQ ID NO: 1887529
agagguaguugugagaaca

SEQ ID NO: 2478895 - RNA, 19 nt, Artificial Sequence
  Description of Artificial Sequence: Synthetic oligonucleotide
  Antisense strand to SEQ ID NO: 2478894
uguucucacaacuaccucu

SEQ ID NO: 2478896 - RNA, 19 nt, Artificial Sequence
  Description of Artificial Sequence: Synthetic oligonucleotide
  Sense strand starting at position 3093 of SEQ ID NO: 1887529
caagaaagcucagugagag

SEQ ID NO: 2478897 - RNA, 19 nt, Artificial Sequence
  Description of Artificial Sequence: Synthetic oligonucleotide
  Antisense strand to SEQ ID NO: 2478896
cucucacugagcuuucuug

SEQ ID NO: 2478898 - RNA, 19 nt, Artificial Sequence
  Description of Artificial Sequence: Synthetic oligonucleotide
  Sense strand starting at position 3105 of SEQ ID NO: 1887529
gugagaggugguugugaga

SEQ ID NO: 2478899 - RNA, 19 nt, Artificial Sequence
  Description of Artificial Sequence: Synthetic oligonucleotide
  Antisense strand to SEQ ID NO: 2478898
ucucacaaccaccucucac

SEQ ID NO: 2478900 - RNA, 19 nt, Artificial Sequence
  Description of Artificial Sequence: Synthetic oligonucleotide
  Sense strand starting at position 3108 of SEQ ID NO: 1887529
agaggugguugugagaaca

SEQ ID NO: 2478901 - RNA, 19 nt, Artificial Sequence
  Description of Artificial Sequence: Synthetic oligonucleotide
  Antisense strand to SEQ ID NO: 2478900
uguucucacaaccaccucu

SEQ ID NO: 2478902 - RNA, 19 nt, Artificial Sequence
  Description of Artificial Sequence: Synthetic oligonucleotide
  Sense strand starting at position 3546 of SEQ ID NO: 1887529
ccgauagagcacugaaacu

SEQ ID NO: 2478903 - RNA, 19 nt, Artificial Sequence
  Description of Artificial Sequence: Synthetic oligonucleotide
  Antisense strand to SEQ ID NO: 2478902
aguuucagugcucuaucgg

SEQ ID NO: 2478904 - RNA, 19 nt, Artificial Sequence
  Description of Artificial Sequence: Synthetic oligonucleotide
  Sense strand starting at position 3557 of SEQ ID NO: 1887529
cugaaacucucgcugggua

SEQ ID NO: 2478905 - RNA, 19 nt, Artificial Sequence
  Description of Artificial Sequence: Synthetic oligonucleotide
  Antisense strand to SEQ ID NO: 2478904
uacccagcgagaguuucag

SEQ ID NO: 2478906 - RNA, 19 nt, Artificial Sequence
  Description of Artificial Sequence: Synthetic oligonucleotide
  Sense strand starting at position 183 of SEQ ID NO: 1887530
gcuugaguucagcauggca

SEQ ID NO: 2478907 - RNA, 19 nt, Artificial Sequence
  Description of Artificial Sequence: Synthetic oligonucleotide
  Antisense strand to SEQ ID NO: 2478906
ugccaugcugaacucaagc

SEQ ID NO: 2478908 - RNA, 19 nt, Artificial Sequence
  Description of Artificial Sequence: Synthetic oligonucleotide
  Sense strand starting at position 291 of SEQ ID NO: 1887530
guggguacauuugaggaaa

SEQ ID NO: 2478909 - RNA, 19 nt, Artificial Sequence
  Description of Artificial Sequence: Synthetic oligonucleotide
  Antisense strand to SEQ ID NO: 2478908
uuuccucaaauguacccac

SEQ ID NO: 2478910 - RNA, 19 nt, Artificial Sequence
  Description of Artificial Sequence: Synthetic oligonucleotide
  Sense strand starting at position 328 of SEQ ID NO: 1887530
auggagucgccgugaggau

SEQ ID NO: 2478911 - RNA, 19 nt, Artificial Sequence
  Description of Artificial Sequence: Synthetic oligonucleotide
  Antisense strand to SEQ ID NO: 2478910
auccucacggcgacuccau

SEQ ID NO: 2478912 - RNA, 19 nt, Artificial Sequence
  Description of Artificial Sequence: Synthetic oligonucleotide
  Sense strand starting at position 361 of SEQ ID NO: 1887530
uuugcauggucagcauaga

SEQ ID NO: 2478913 - RNA, 19 nt, Artificial Sequence
  Description of Artificial Sequence: Synthetic oligonucleotide
  Antisense strand to SEQ ID NO: 2478912
ucuaugcugaccaugcaaa

SEQ ID NO: 2478914 - RNA, 19 nt, Artificial Sequence
  Description of Artificial Sequence: Synthetic oligonucleotide
  Sense strand starting at position 362 of SEQ ID NO: 1887530
uugcauggucagcauagaa

SEQ ID NO: 2478915 - RNA, 19 nt, Artificial Sequence
  Description of Artificial Sequence: Synthetic oligonucleotide
  Antisense strand to SEQ ID NO: 2478914
uucuaugcugaccaugcaa

SEQ ID NO: 2478916 - RNA, 19 nt, Artificial Sequence
  Description of Artificial Sequence: Synthetic oligonucleotide
  Sense strand starting at position 480 of SEQ ID NO: 1887530
acgcuuuccugagucugau

SEQ ID NO: 2478917 - RNA, 19 nt, Artificial Sequence
  Description of Artificial Sequence: Synthetic oligonucleotide
  Antisense strand to SEQ ID NO: 2478916
aucagacucaggaaagcgu

SEQ ID NO: 2478918 - RNA, 19 nt, Artificial Sequence
  Description of Artificial Sequence: Synthetic oligonucleotide
  Sense strand starting at position 486 of SEQ ID NO: 1887530
uccugagucugaucaggca

SEQ ID NO: 2478919 - RNA, 19 nt, Artificial Sequence
  Description of Artificial Sequence: Synthetic oligonucleotide
  Antisense strand to SEQ ID NO: 2478918
ugccugaucagacucagga

SEQ ID NO: 2478920 - RNA, 19 nt, Artificial Sequence
  Description of Artificial Sequence: Synthetic oligonucleotide
  Sense strand starting at position 690 of SEQ ID NO: 1887530
cguccucugcccgcuuaau

SEQ ID NO: 2478921 - RNA, 19 nt, Artificial Sequence
  Description of Artificial Sequence: Synthetic oligonucleotide
  Antisense strand to SEQ ID NO: 2478920
auuaagcgggcagaggacg

SEQ ID NO: 2478922 - RNA, 19 nt, Artificial Sequence
  Description of Artificial Sequence: Synthetic oligonucleotide
  Sense strand starting at position 699 of SEQ ID NO: 1887530
cccgcuuaauggucaacau

SEQ ID NO: 2478923 - RNA, 19 nt, Artificial Sequence
  Description of Artificial Sequence: Synthetic oligonucleotide
  Antisense strand to SEQ ID NO: 2478922
auguugaccauuaagcggg

SEQ ID NO: 2478924 - RNA, 19 nt, Artificial Sequence
  Description of Artificial Sequence: Synthetic oligonucleotide
  Sense strand starting at position 700 of SEQ ID NO: 1887530
ccgcuuaauggucaacaug

SEQ ID NO: 2478925 - RNA, 19 nt, Artificial Sequence
  Description of Artificial Sequence: Synthetic oligonucleotide
  Antisense strand to SEQ ID NO: 2478924
cauguugaccauuaagcgg

SEQ ID NO: 2478926 - RNA, 19 nt, Artificial Sequence
  Description of Artificial Sequence: Synthetic oligonucleotide
  Sense strand starting at position 703 of SEQ ID NO: 1887530
cuuaauggucaacauguau

SEQ ID NO: 2478927 - RNA, 19 nt, Artificial Sequence
  Description of Artificial Sequence: Synthetic oligonucleotide
  Antisense strand to SEQ ID NO: 2478926
auacauguugaccauuaag

SEQ ID NO: 2478928 - RNA, 19 nt, Artificial Sequence
  Description of Artificial Sequence: Synthetic oligonucleotide
  Sense strand starting at position 711 of SEQ ID NO: 1887530
ucaacauguaugcgugcaa

SEQ ID NO: 2478929 - RNA, 19 nt, Artificial Sequence
  Description of Artificial Sequence: Synthetic oligonucleotide
  Antisense strand to SEQ ID NO: 2478928
uugcacgcauacauguuga

SEQ ID NO: 2478930 - RNA, 19 nt, Artificial Sequence
  Description of Artificial Sequence: Synthetic oligonucleotide
  Sense strand starting at position 712 of SEQ ID NO: 1887530
caacauguaugcgugcaau

SEQ ID NO: 2478931 - RNA, 19 nt, Artificial Sequence
  Description of Artificial Sequence: Synthetic oligonucleotide
  Antisense strand to SEQ ID NO: 2478930
auugcacgcauacauguug

SEQ ID NO: 2478932 - RNA, 19 nt, Artificial Sequence
  Description of Artificial Sequence: Synthetic oligonucleotide
  Sense strand starting at position 715 of SEQ ID NO: 1887530
cauguaugcgugcaauuug

SEQ ID NO: 2478933 - RNA, 19 nt, Artificial Sequence
  Description of Artificial Sequence: Synthetic oligonucleotide
  Antisense strand to SEQ ID NO: 2478932
caaauugcacgcauacaug

SEQ ID NO: 2478934 - RNA, 19 nt, Artificial Sequence
  Description of Artificial Sequence: Synthetic oligonucleotide
  Sense strand starting at position 722 of SEQ ID NO: 1887530
gcgugcaauuugucugugu

SEQ ID NO: 2478935 - RNA, 19 nt, Artificial Sequence
  Description of Artificial Sequence: Synthetic oligonucleotide
  Antisense strand to SEQ ID NO: 2478934
acacagacaaauugcacgc

SEQ ID NO: 2478936 - RNA, 19 nt, Artificial Sequence
  Description of Artificial Sequence: Synthetic oligonucleotide
  Sense strand starting at position 723 of SEQ ID NO: 1887530
cgugcaauuugucugugua

SEQ ID NO: 2478937 - RNA, 19 nt, Artificial Sequence
  Description of Artificial Sequence: Synthetic oligonucleotide
  Antisense strand to SEQ ID NO: 2478936
uacacagacaaauugcacg

SEQ ID NO: 2478938 - RNA, 19 nt, Artificial Sequence
  Description of Artificial Sequence: Synthetic oligonucleotide
  Sense strand starting at position 724 of SEQ ID NO: 1887530
gugcaauuugucuguguau

SEQ ID NO: 2478939 - RNA, 19 nt, Artificial Sequence
  Description of Artificial Sequence: Synthetic oligonucleotide
  Antisense strand to SEQ ID NO: 2478938
auacacagacaaauugcac

SEQ ID NO: 2478940 - RNA, 19 nt, Artificial Sequence
  Description of Artificial Sequence: Synthetic oligonucleotide
  Sense strand starting at position 725 of SEQ ID NO: 1887530
ugcaauuugucuguguaug

SEQ ID NO: 2478941 - RNA, 19 nt, Artificial Sequence
  Description of Artificial Sequence: Synthetic oligonucleotide
  Antisense strand to SEQ ID NO: 2478940
cauacacagacaaauugca

SEQ ID NO: 2478942 - RNA, 19 nt, Artificial Sequence
  Description of Artificial Sequence: Synthetic oligonucleotide
  Sense strand starting at position 726 of SEQ ID NO: 1887530
gcaauuugucuguguaugu

SEQ ID NO: 2478943 - RNA, 19 nt, Artificial Sequence
  Description of Artificial Sequence: Synthetic oligonucleotide
  Antisense strand to SEQ ID NO: 2478942
acauacacagacaaauugc

SEQ ID NO: 2478944 - RNA, 19 nt, Artificial Sequence
  Description of Artificial Sequence: Synthetic oligonucleotide
  Sense strand starting at position 736 of SEQ ID NO: 1887530
uguguaugugaggaugcau

SEQ ID NO: 2478945 - RNA, 19 nt, Artificial Sequence
  Description of Artificial Sequence: Synthetic oligonucleotide
  Antisense strand to SEQ ID NO: 2478944
augcauccucacauacaca

SEQ ID NO: 2478946 - RNA, 19 nt, Artificial Sequence
  Description of Artificial Sequence: Synthetic oligonucleotide
  Sense strand starting at position 1181 of SEQ ID NO: 1887530
ccaggcuuccaaugguuaa

SEQ ID NO: 2478947 - RNA, 19 nt, Artificial Sequence
  Description of Artificial Sequence: Synthetic oligonucleotide
  Antisense strand to SEQ ID NO: 2478946
uuaaccauuggaagccugg

SEQ ID NO: 2478948 - RNA, 19 nt, Artificial Sequence
  Description of Artificial Sequence: Synthetic oligonucleotide
  Sense strand starting at position 1193 of SEQ ID NO: 1887530
ugguuaagcucccacugaa

SEQ ID NO: 2478949 - RNA, 19 nt, Artificial Sequence
  Description of Artificial Sequence: Synthetic oligonucleotide
  Antisense strand to SEQ ID NO: 2478948
uucagugggagcuuaacca

SEQ ID NO: 2478950 - RNA, 19 nt, Artificial Sequence
  Description of Artificial Sequence: Synthetic oligonucleotide
  Sense strand starting at position 1685 of SEQ ID NO: 1887530
gcuggacugcacugaucaa

SEQ ID NO: 2478951 - RNA, 19 nt, Artificial Sequence
  Description of Artificial Sequence: Synthetic oligonucleotide
  Antisense strand to SEQ ID NO: 2478950
uugaucagugcaguccagc

SEQ ID NO: 2478952 - RNA, 19 nt, Artificial Sequence
  Description of Artificial Sequence: Synthetic oligonucleotide
  Sense strand starting at position 1787 of SEQ ID NO: 1887530
caggccucuucuuaugaga

SEQ ID NO: 2478953 - RNA, 19 nt, Artificial Sequence
  Description of Artificial Sequence: Synthetic oligonucleotide
  Antisense strand to SEQ ID NO: 2478952
ucucauaagaagaggccug

SEQ ID NO: 2478954 - RNA, 19 nt, Artificial Sequence
  Description of Artificial Sequence: Synthetic oligonucleotide
  Sense strand starting at position 2172 of SEQ ID NO: 1887530
cugcgagacccaugcagau

SEQ ID NO: 2478955 - RNA, 19 nt, Artificial Sequence
  Description of Artificial Sequence: Synthetic oligonucleotide
  Antisense strand to SEQ ID NO: 2478954
aucugcaugggucucgcag

SEQ ID NO: 2478956 - RNA, 19 nt, Artificial Sequence
  Description of Artificial Sequence: Synthetic oligonucleotide
  Sense strand starting at position 2228 of SEQ ID NO: 1887530
cugaucugauccucacuga

SEQ ID NO: 2478957 - RNA, 19 nt, Artificial Sequence
  Description of Artificial Sequence: Synthetic oligonucleotide
  Antisense strand to SEQ ID NO: 2478956
ucagugaggaucagaucag

SEQ ID NO: 2478958 - RNA, 19 nt, Artificial Sequence
  Description of Artificial Sequence: Synthetic oligonucleotide
  Sense strand starting at position 2488 of SEQ ID NO: 1887530
ccaugagacccucgccaaa

SEQ ID NO: 2478959 - RNA, 19 nt, Artificial Sequence
  Description of Artificial Sequence: Synthetic oligonucleotide
  Antisense strand to SEQ ID NO: 2478958
uuuggcgagggucucaugg

SEQ ID NO: 2478960 - RNA, 19 nt, Artificial Sequence
  Description of Artificial Sequence: Synthetic oligonucleotide
  Sense strand starting at position 2574 of SEQ ID NO: 1887530
cugacuaggucucacugau

SEQ ID NO: 2478961 - RNA, 19 nt, Artificial Sequence
  Description of Artificial Sequence: Synthetic oligonucleotide
  Antisense strand to SEQ ID NO: 2478960
aucagugagaccuagucag

SEQ ID NO: 2478962 - RNA, 19 nt, Artificial Sequence
  Description of Artificial Sequence: Synthetic oligonucleotide
  Sense strand starting at position 2580 of SEQ ID NO: 1887530
aggucucacugaucagauc

SEQ ID NO: 2478963 - RNA, 19 nt, Artificial Sequence
  Description of Artificial Sequence: Synthetic oligonucleotide
  Antisense strand to SEQ ID NO: 2478962
gaucugaucagugagaccu

SEQ ID NO: 2478964 - RNA, 19 nt, Artificial Sequence
  Description of Artificial Sequence: Synthetic oligonucleotide
  Sense strand starting at position 2809 of SEQ ID NO: 1887530
auuacucuuuguugcguua

SEQ ID NO: 2478965 - RNA, 19 nt, Artificial Sequence
  Description of Artificial Sequence: Synthetic oligonucleotide
  Antisense strand to SEQ ID NO: 2478964
uaacgcaacaaagaguaau

SEQ ID NO: 2478966 - RNA, 19 nt, Artificial Sequence
  Description of Artificial Sequence: Synthetic oligonucleotide
  Sense strand starting at position 2812 of SEQ ID NO: 1887530
acucuuuguugcguuacua

SEQ ID NO: 2478967 - RNA, 19 nt, Artificial Sequence
  Description of Artificial Sequence: Synthetic oligonucleotide
  Antisense strand to SEQ ID NO: 2478966
uaguaacgcaacaaagagu

SEQ ID NO: 2478968 - RNA, 19 nt, Artificial Sequence
  Description of Artificial Sequence: Synthetic oligonucleotide
  Sense strand starting at position 2816 of SEQ ID NO: 1887530
uuuguugcguuacuaacau

SEQ ID NO: 2478969 - RNA, 19 nt, Artificial Sequence
  Description of Artificial Sequence: Synthetic oligonucleotide
  Antisense strand to SEQ ID NO: 2478968
auguuaguaacgcaacaaa

SEQ ID NO: 2478970 - RNA, 19 nt, Artificial Sequence
  Description of Artificial Sequence: Synthetic oligonucleotide
  Sense strand starting at position 2841 of SEQ ID NO: 1887530
ggaauaacuggcggguaga

SEQ ID NO: 2478971 - RNA, 19 nt, Artificial Sequence
  Description of Artificial Sequence: Synthetic oligonucleotide
  Antisense strand to SEQ ID NO: 2478970
ucuacccgccaguuauucc

SEQ ID NO: 2478972 - RNA, 19 nt, Artificial Sequence
  Description of Artificial Sequence: Synthetic oligonucleotide
  Sense strand starting at position 2907 of SEQ ID NO: 1887530
aggugagcccucugucaac

SEQ ID NO: 2478973 - RNA, 19 nt, Artificial Sequence
  Description of Artificial Sequence: Synthetic oligonucleotide
  Antisense strand to SEQ ID NO: 2478972
guugacagagggcucaccu

SEQ ID NO: 2478974 - RNA, 19 nt, Artificial Sequence
  Description of Artificial Sequence: Synthetic oligonucleotide
  Sense strand starting at position 2916 of SEQ ID NO: 1887530
cucugucaacgcgugcaua

SEQ ID NO: 2478975 - RNA, 19 nt, Artificial Sequence
  Description of Artificial Sequence: Synthetic oligonucleotide
  Antisense strand to SEQ ID NO: 2478974
uaugcacgcguugacagag

SEQ ID NO: 2478976 - RNA, 19 nt, Artificial Sequence
  Description of Artificial Sequence: Synthetic oligonucleotide
  Sense strand starting at position 2917 of SEQ ID NO: 1887530
ucugucaacgcgugcauaa

SEQ ID NO: 2478977 - RNA, 19 nt, Artificial Sequence
  Description of Artificial Sequence: Synthetic oligonucleotide
  Antisense strand to SEQ ID NO: 2478976
uuaugcacgcguugacaga

SEQ ID NO: 2478978 - RNA, 19 nt, Artificial Sequence
  Description of Artificial Sequence: Synthetic oligonucleotide
  Sense strand starting at position 2988 of SEQ ID NO: 1887530
gcccguuacuuagcagacu

SEQ ID NO: 2478979 - RNA, 19 nt, Artificial Sequence
  Description of Artificial Sequence: Synthetic oligonucleotide
  Antisense strand to SEQ ID NO: 2478978
agucugcuaaguaacgggc

SEQ ID NO: 2478980 - RNA, 19 nt, Artificial Sequence
  Description of Artificial Sequence: Synthetic oligonucleotide
  Sense strand starting at position 3739 of SEQ ID NO: 1887530
uugaauggaucccguuaag

SEQ ID NO: 2478981 - RNA, 19 nt, Artificial Sequence
  Description of Artificial Sequence: Synthetic oligonucleotide
  Antisense strand to SEQ ID NO: 2478980
cuuaacgggauccauucaa

SEQ ID NO: 2478982 - RNA, 19 nt, Artificial Sequence
  Description of Artificial Sequence: Synthetic oligonucleotide
  Sense strand starting at position 4 of SEQ ID NO: 1887531
aguagauacucucauuuac

SEQ ID NO: 2478983 - RNA, 19 nt, Artificial Sequence
  Description of Artificial Sequence: Synthetic oligonucleotide
  Antisense strand to SEQ ID NO: 2478982
guaaaugagaguaucuacu

SEQ ID NO: 2478984 - RNA, 19 nt, Artificial Sequence
  Description of Artificial Sequence: Synthetic oligonucleotide
  Sense strand starting at position 54 of SEQ ID NO: 1887531
ucuggcuuccgguaauacu

SEQ ID NO: 2478985 - RNA, 19 nt, Artificial Sequence
  Description of Artificial Sequence: Synthetic oligonucleotide
  Antisense strand to SEQ ID NO: 2478984
aguauuaccggaagccaga

SEQ ID NO: 2478986 - RNA, 19 nt, Artificial Sequence
  Description of Artificial Sequence: Synthetic oligonucleotide
  Sense strand starting at position 70 of SEQ ID NO: 1887531
acuggaguagcuugcuaaa

SEQ ID NO: 2478987 - RNA, 19 nt, Artificial Sequence
  Description of Artificial Sequence: Synthetic oligonucleotide
  Antisense strand to SEQ ID NO: 2478986
uuuagcaagcuacuccagu

SEQ ID NO: 2478988 - RNA, 19 nt, Artificial Sequence
  Description of Artificial Sequence: Synthetic oligonucleotide
  Sense strand starting at position 72 of SEQ ID NO: 1887531
uggaguagcuugcuaaacu

SEQ ID NO: 2478989 - RNA, 19 nt, Artificial Sequence
  Description of Artificial Sequence: Synthetic oligonucleotide
  Antisense strand to SEQ ID NO: 2478988
aguuuagcaagcuacucca

SEQ ID NO: 2478990 - RNA, 19 nt, Artificial Sequence
  Description of Artificial Sequence: Synthetic oligonucleotide
  Sense strand starting at position 110 of SEQ ID NO: 1887531
augauacaaucuggauaaa

SEQ ID NO: 2478991 - RNA, 19 nt, Artificial Sequence
  Description of Artificial Sequence: Synthetic oligonucleotide
  Antisense strand to SEQ ID NO: 2478990
uuuauccagauuguaucau

SEQ ID NO: 2478992 - RNA, 19 nt, Artificial Sequence
  Description of Artificial Sequence: Synthetic oligonucleotide
  Sense strand starting at position 223 of SEQ ID NO: 1887531
ggaagauaauuauucuguu

SEQ ID NO: 2478993 - RNA, 19 nt, Artificial Sequence
  Description of Artificial Sequence: Synthetic oligonucleotide
  Antisense strand to SEQ ID NO: 2478992
aacagaauaauuaucuucc

SEQ ID NO: 2478994 - RNA, 19 nt, Artificial Sequence
  Description of Artificial Sequence: Synthetic oligonucleotide
  Sense strand starting at position 417 of SEQ ID NO: 1887531
agaagcuauuucuaagaug

SEQ ID NO: 2478995 - RNA, 19 nt, Artificial Sequence
  Description of Artificial Sequence: Synthetic oligonucleotide
  Antisense strand to SEQ ID NO: 2478994
caucuuagaaauagcuucu

SEQ ID NO: 2478996 - RNA, 19 nt, Artificial Sequence
  Description of Artificial Sequence: Synthetic oligonucleotide
  Sense strand starting at position 425 of SEQ ID NO: 1887531
uuucuaagauguccgagau

SEQ ID NO: 2478997 - RNA, 19 nt, Artificial Sequence
  Description of Artificial Sequence: Synthetic oligonucleotide
  Antisense strand to SEQ ID NO: 2478996
aucucggacaucuuagaaa

SEQ ID NO: 2478998 - RNA, 19 nt, Artificial Sequence
  Description of Artificial Sequence: Synthetic oligonucleotide
  Sense strand starting at position 426 of SEQ ID NO: 1887531
uucuaagauguccgagaug

SEQ ID NO: 2478999 - RNA, 19 nt, Artificial Sequence
  Description of Artificial Sequence: Synthetic oligonucleotide
  Antisense strand to SEQ ID NO: 2478998
caucucggacaucuuagaa

SEQ ID NO: 2479000 - RNA, 19 nt, Artificial Sequence
  Description of Artificial Sequence: Synthetic oligonucleotide
  Sense strand starting at position 431 of SEQ ID NO: 1887531
agauguccgagaugaugua

SEQ ID NO: 2479001 - RNA, 19 nt, Artificial Sequence
  Description of Artificial Sequence: Synthetic oligonucleotide
  Antisense strand to SEQ ID NO: 2479000
uacaucaucucggacaucu

SEQ ID NO: 2479002 - RNA, 19 nt, Artificial Sequence
  Description of Artificial Sequence: Synthetic oligonucleotide
  Sense strand starting at position 445 of SEQ ID NO: 1887531
auguaaucagcagacaagu

SEQ ID NO: 2479003 - RNA, 19 nt, Artificial Sequence
  Description of Artificial Sequence: Synthetic oligonucleotide
  Antisense strand to SEQ ID NO: 2479002
acuugucugcugauuacau

SEQ ID NO: 2479004 - RNA, 19 nt, Artificial Sequence
  Description of Artificial Sequence: Synthetic oligonucleotide
  Sense strand starting at position 521 of SEQ ID NO: 1887531
ugaauuaacucauguagag

SEQ ID NO: 2479005 - RNA, 19 nt, Artificial Sequence
  Description of Artificial Sequence: Synthetic oligonucleotide
  Antisense strand to SEQ ID NO: 2479004
cucuacaugaguuaauuca

SEQ ID NO: 2479006 - RNA, 19 nt, Artificial Sequence
  Description of Artificial Sequence: Synthetic oligonucleotide
  Sense strand starting at position 533 of SEQ ID NO: 1887531
uguagagucucagcagaga

SEQ ID NO: 2479007 - RNA, 19 nt, Artificial Sequence
  Description of Artificial Sequence: Synthetic oligonucleotide
  Antisense strand to SEQ ID NO: 2479006
ucucugcugagacucuaca

SEQ ID NO: 2479008 - RNA, 19 nt, Artificial Sequence
  Description of Artificial Sequence: Synthetic oligonucleotide
  Sense strand starting at position 696 of SEQ ID NO: 1887531
gccuaagagaccugugaaa

SEQ ID NO: 2479009 - RNA, 19 nt, Artificial Sequence
  Description of Artificial Sequence: Synthetic oligonucleotide
  Antisense strand to SEQ ID NO: 2479008
uuucacaggucucuuaggc

SEQ ID NO: 2479010 - RNA, 19 nt, Artificial Sequence
  Description of Artificial Sequence: Synthetic oligonucleotide
  Sense strand starting at position 707 of SEQ ID NO: 1887531
cugugaaaugauugagucu

SEQ ID NO: 2479011 - RNA, 19 nt, Artificial Sequence
  Description of Artificial Sequence: Synthetic oligonucleotide
  Antisense strand to SEQ ID NO: 2479010
agacucaaucauuucacag

SEQ ID NO: 2479012 - RNA, 19 nt, Artificial Sequence
  Description of Artificial Sequence: Synthetic oligonucleotide
  Sense strand starting at position 714 of SEQ ID NO: 1887531
augauugagucugagacag

SEQ ID NO: 2479013 - RNA, 19 nt, Artificial Sequence
  Description of Artificial Sequence: Synthetic oligonucleotide
  Antisense strand to SEQ ID NO: 2479012
cugucucagacucaaucau

SEQ ID NO: 2479014 - RNA, 19 nt, Artificial Sequence
  Description of Artificial Sequence: Synthetic oligonucleotide
  Sense strand starting at position 716 of SEQ ID NO: 1887531
gauugagucugagacagag

SEQ ID NO: 2479015 - RNA, 19 nt, Artificial Sequence
  Description of Artificial Sequence: Synthetic oligonucleotide
  Antisense strand to SEQ ID NO: 2479014
cucugucucagacucaauc

SEQ ID NO: 2479016 - RNA, 19 nt, Artificial Sequence
  Description of Artificial Sequence: Synthetic oligonucleotide
  Sense strand starting at position 923 of SEQ ID NO: 1887531
gggaguugcuaugauuucu

SEQ ID NO: 2479017 - RNA, 19 nt, Artificial Sequence
  Description of Artificial Sequence: Synthetic oligonucleotide
  Antisense strand to SEQ ID NO: 2479016
agaaaucauagcaacuccc

SEQ ID NO: 2479018 - RNA, 19 nt, Artificial Sequence
  Description of Artificial Sequence: Synthetic oligonucleotide
  Sense strand starting at position 993 of SEQ ID NO: 1887531
uggagaaagucugacuugu

SEQ ID NO: 2479019 - RNA, 19 nt, Artificial Sequence
  Description of Artificial Sequence: Synthetic oligonucleotide
  Antisense strand to SEQ ID NO: 2479018
acaagucagacuuucucca

SEQ ID NO: 2479020 - RNA, 19 nt, Artificial Sequence
  Description of Artificial Sequence: Synthetic oligonucleotide
  Sense strand starting at position 995 of SEQ ID NO: 1887531
gagaaagucugacuuguca

SEQ ID NO: 2479021 - RNA, 19 nt, Artificial Sequence
  Description of Artificial Sequence: Synthetic oligonucleotide
  Antisense strand to SEQ ID NO: 2479020
ugacaagucagacuuucuc

SEQ ID NO: 2479022 - RNA, 19 nt, Artificial Sequence
  Description of Artificial Sequence: Synthetic oligonucleotide
  Sense strand starting at position 1104 of SEQ ID NO: 1887531
auugcuccuccagacagau

SEQ ID NO: 2479023 - RNA, 19 nt, Artificial Sequence
  Description of Artificial Sequence: Synthetic oligonucleotide
  Antisense strand to SEQ ID NO: 2479022
aucugucuggaggagcaau

SEQ ID NO: 2479024 - RNA, 19 nt, Artificial Sequence
  Description of Artificial Sequence: Synthetic oligonucleotide
  Sense strand starting at position 1116 of SEQ ID NO: 1887531
gacagauguccacggagau

SEQ ID NO: 2479025 - RNA, 19 nt, Artificial Sequence
  Description of Artificial Sequence: Synthetic oligonucleotide
  Antisense strand to SEQ ID NO: 2479024
aucuccguggacaucuguc

SEQ ID NO: 2479026 - RNA, 19 nt, Artificial Sequence
  Description of Artificial Sequence: Synthetic oligonucleotide
  Sense strand starting at position 1117 of SEQ ID NO: 1887531
acagauguccacggagauu

SEQ ID NO: 2479027 - RNA, 19 nt, Artificial Sequence
  Description of Artificial Sequence: Synthetic oligonucleotide
  Antisense strand to SEQ ID NO: 2479026
aaucuccguggacaucugu

SEQ ID NO: 2479028 - RNA, 19 nt, Artificial Sequence
  Description of Artificial Sequence: Synthetic oligonucleotide
  Sense strand starting at position 1163 of SEQ ID NO: 1887531
aacugagguuguuccuaca

SEQ ID NO: 2479029 - RNA, 19 nt, Artificial Sequence
  Description of Artificial Sequence: Synthetic oligonucleotide
  Antisense strand to SEQ ID NO: 2479028
uguaggaacaaccucaguu

SEQ ID NO: 2479030 - RNA, 19 nt, Artificial Sequence
  Description of Artificial Sequence: Synthetic oligonucleotide
  Sense strand starting at position 1194 of SEQ ID NO: 1887531
gcguguaggcacgcuuuau

SEQ ID NO: 2479031 - RNA, 19 nt, Artificial Sequence
  Description of Artificial Sequence: Synthetic oligonucleotide
  Antisense strand to SEQ ID NO: 2479030
auaaagcgugccuacacgc

SEQ ID NO: 2479032 - RNA, 19 nt, Artificial Sequence
  Description of Artificial Sequence: Synthetic oligonucleotide
  Sense strand starting at position 1195 of SEQ ID NO: 1887531
cguguaggcacgcuuuauu

SEQ ID NO: 2479033 - RNA, 19 nt, Artificial Sequence
  Description of Artificial Sequence: Synthetic oligonucleotide
  Antisense strand to SEQ ID NO: 2479032
aauaaagcgugccuacacg

SEQ ID NO: 2479034 - RNA, 19 nt, Artificial Sequence
  Description of Artificial Sequence: Synthetic oligonucleotide
  Sense strand starting at position 1198 of SEQ ID NO: 1887531
guaggcacgcuuuauuaca

SEQ ID NO: 2479035 - RNA, 19 nt, Artificial Sequence
  Description of Artificial Sequence: Synthetic oligonucleotide
  Antisense strand to SEQ ID NO: 2479034
uguaauaaagcgugccuac

SEQ ID NO: 2479036 - RNA, 19 nt, Artificial Sequence
  Description of Artificial Sequence: Synthetic oligonucleotide
  Sense strand starting at position 1228 of SEQ ID NO: 1887531
gucccugugcgaggucuaa

SEQ ID NO: 2479037 - RNA, 19 nt, Artificial Sequence
  Description of Artificial Sequence: Synthetic oligonucleotide
  Antisense strand to SEQ ID NO: 2479036
uuagaccucgcacagggac

SEQ ID NO: 2479038 - RNA, 19 nt, Artificial Sequence
  Description of Artificial Sequence: Synthetic oligonucleotide
  Sense strand starting at position 2203 of SEQ ID NO: 1887531
guauggauacguugaggga

SEQ ID NO: 2479039 - RNA, 19 nt, Artificial Sequence
  Description of Artificial Sequence: Synthetic oligonucleotide
  Antisense strand to SEQ ID NO: 2479038
ucccucaacguauccauac

SEQ ID NO: 2479040 - RNA, 19 nt, Artificial Sequence
  Description of Artificial Sequence: Synthetic oligonucleotide
  Sense strand starting at position 2239 of SEQ ID NO: 1887531
ggagguuacggauacguua

SEQ ID NO: 2479041 - RNA, 19 nt, Artificial Sequence
  Description of Artificial Sequence: Synthetic oligonucleotide
  Antisense strand to SEQ ID NO: 2479040
uaacguauccguaaccucc

SEQ ID NO: 2479042 - RNA, 19 nt, Artificial Sequence
  Description of Artificial Sequence: Synthetic oligonucleotide
  Sense strand starting at position 2436 of SEQ ID NO: 1887531
ugguaauagugucuuagcu

SEQ ID NO: 2479043 - RNA, 19 nt, Artificial Sequence
  Description of Artificial Sequence: Synthetic oligonucleotide
  Antisense strand to SEQ ID NO: 2479042
agcuaagacacuauuacca

SEQ ID NO: 2479044 - RNA, 19 nt, Artificial Sequence
  Description of Artificial Sequence: Synthetic oligonucleotide
  Sense strand starting at position 2551 of SEQ ID NO: 1887531
guugaccucuguuuccaaa

SEQ ID NO: 2479045 - RNA, 19 nt, Artificial Sequence
  Description of Artificial Sequence: Synthetic oligonucleotide
  Antisense strand to SEQ ID NO: 2479044
uuuggaaacagaggucaac

SEQ ID NO: 2479046 - RNA, 19 nt, Artificial Sequence
  Description of Artificial Sequence: Synthetic oligonucleotide
  Sense strand starting at position 2956 of SEQ ID NO: 1887531
ggcuauggcuuccuggaaa

SEQ ID NO: 2479047 - RNA, 19 nt, Artificial Sequence
  Description of Artificial Sequence: Synthetic oligonucleotide
  Antisense strand to SEQ ID NO: 2479046
uuuccaggaagccauagcc

SEQ ID NO: 2479048 - RNA, 19 nt, Artificial Sequence
  Description of Artificial Sequence: Synthetic oligonucleotide
  Sense strand starting at position 2959 of SEQ ID NO: 1887531
uauggcuuccuggaaaugu

SEQ ID NO: 2479049 - RNA, 19 nt, Artificial Sequence
  Description of Artificial Sequence: Synthetic oligonucleotide
  Antisense strand to SEQ ID NO: 2479048
acauuuccaggaagccaua

SEQ ID NO: 2479050 - RNA, 19 nt, Artificial Sequence
  Description of Artificial Sequence: Synthetic oligonucleotide
  Sense strand starting at position 3301 of SEQ ID NO: 1887531
ggucuuugugcugaaggau

SEQ ID NO: 2479051 - RNA, 19 nt, Artificial Sequence
  Description of Artificial Sequence: Synthetic oligonucleotide
  Antisense strand to SEQ ID NO: 2479050
auccuucagcacaaagacc

SEQ ID NO: 2479052 - RNA, 19 nt, Artificial Sequence
  Description of Artificial Sequence: Synthetic oligonucleotide
  Sense strand starting at position 3342 of SEQ ID NO: 1887531
ggaacacugcucuaggcaa

SEQ ID NO: 2479053 - RNA, 19 nt, Artificial Sequence
  Description of Artificial Sequence: Synthetic oligonucleotide
  Antisense strand to SEQ ID NO: 2479052
uugccuagagcaguguucc

SEQ ID NO: 2479054 - RNA, 19 nt, Artificial Sequence
  Description of Artificial Sequence: Synthetic oligonucleotide
  Sense strand starting at position 3360 of SEQ ID NO: 1887531
aggugccuuucuuccagau

SEQ ID NO: 2479055 - RNA, 19 nt, Artificial Sequence
  Description of Artificial Sequence: Synthetic oligonucleotide
  Antisense strand to SEQ ID NO: 2479054
aucuggaagaaaggcaccu

SEQ ID NO: 2479056 - RNA, 19 nt, Artificial Sequence
  Description of Artificial Sequence: Synthetic oligonucleotide
  Sense strand starting at position 3362 of SEQ ID NO: 1887531
gugccuuucuuccagauuu

SEQ ID NO: 2479057 - RNA, 19 nt, Artificial Sequence
  Description of Artificial Sequence: Synthetic oligonucleotide
  Antisense strand to SEQ ID NO: 2479056
aaaucuggaagaaaggcac

SEQ ID NO: 2479058 - RNA, 19 nt, Artificial Sequence
  Description of Artificial Sequence: Synthetic oligonucleotide
  Sense strand starting at position 3477 of SEQ ID NO: 1887531
ggcuuuguguggcccacua

SEQ ID NO: 2479059 - RNA, 19 nt, Artificial Sequence
  Description of Artificial Sequence: Synthetic oligonucleotide
  Antisense strand to SEQ ID NO: 2479058
uagugggccacacaaagcc

SEQ ID NO: 2479060 - RNA, 19 nt, Artificial Sequence
  Description of Artificial Sequence: Synthetic oligonucleotide
  Sense strand starting at position 3793 of SEQ ID NO: 1887531
uggcaugaguucccacauu

SEQ ID NO: 2479061 - RNA, 19 nt, Artificial Sequence
  Description of Artificial Sequence: Synthetic oligonucleotide
  Antisense strand to SEQ ID NO: 2479060
aaugugggaacucaugcca

SEQ ID NO: 2479062 - RNA, 19 nt, Artificial Sequence
  Description of Artificial Sequence: Synthetic oligonucleotide
  Sense strand starting at position 82 of SEQ ID NO: 1887532
uggcuacaucuguaccaau

SEQ ID NO: 2479063 - RNA, 19 nt, Artificial Sequence
  Description of Artificial Sequence: Synthetic oligonucleotide
  Antisense strand to SEQ ID NO: 2479062
auugguacagauguagcca

SEQ ID NO: 2479064 - RNA, 19 nt, Artificial Sequence
  Description of Artificial Sequence: Synthetic oligonucleotide
  Sense strand starting at position 210 of SEQ ID NO: 1887532
gauggauaugguuauguua

SEQ ID NO: 2479065 - RNA, 19 nt, Artificial Sequence
  Description of Artificial Sequence: Synthetic oligonucleotide
  Antisense strand to SEQ ID NO: 2479064
uaacauaaccauauccauc

SEQ ID NO: 2479066 - RNA, 19 nt, Artificial Sequence
  Description of Artificial Sequence: Synthetic oligonucleotide
  Sense strand starting at position 213 of SEQ ID NO: 1887532
ggauaugguuauguuacaa

SEQ ID NO: 2479067 - RNA, 19 nt, Artificial Sequence
  Description of Artificial Sequence: Synthetic oligonucleotide
  Antisense strand to SEQ ID NO: 2479066
uuguaacauaaccauaucc

SEQ ID NO: 2479068 - RNA, 19 nt, Artificial Sequence
  Description of Artificial Sequence: Synthetic oligonucleotide
  Sense strand starting at position 252 of SEQ ID NO: 1887532
gggcgaggguaaucagaca

SEQ ID NO: 2479069 - RNA, 19 nt, Artificial Sequence
  Description of Artificial Sequence: Synthetic oligonucleotide
  Antisense strand to SEQ ID NO: 2479068
ugucugauuacccucgccc

SEQ ID NO: 2479070 - RNA, 19 nt, Artificial Sequence
  Description of Artificial Sequence: Synthetic oligonucleotide
  Sense strand starting at position 329 of SEQ ID NO: 1887532
augugugcucuggaucaca

SEQ ID NO: 2479071 - RNA, 19 nt, Artificial Sequence
  Description of Artificial Sequence: Synthetic oligonucleotide
  Antisense strand to SEQ ID NO: 2479070
ugugauccagagcacacau

SEQ ID NO: 2479072 - RNA, 19 nt, Artificial Sequence
  Description of Artificial Sequence: Synthetic oligonucleotide
  Sense strand starting at position 506 of SEQ ID NO: 1887532
aaugaaguggcuugaccua

SEQ ID NO: 2479073 - RNA, 19 nt, Artificial Sequence
  Description of Artificial Sequence: Synthetic oligonucleotide
  Antisense strand to SEQ ID NO: 2479072
uaggucaagccacuucauu

SEQ ID NO: 2479074 - RNA, 19 nt, Artificial Sequence
  Description of Artificial Sequence: Synthetic oligonucleotide
  Sense strand starting at position 939 of SEQ ID NO: 1887532
gaacaaugucuuggagguu

SEQ ID NO: 2479075 - RNA, 19 nt, Artificial Sequence
  Description of Artificial Sequence: Synthetic oligonucleotide
  Antisense strand to SEQ ID NO: 2479074
aaccuccaagacauuguuc

SEQ ID NO: 2479076 - RNA, 19 nt, Artificial Sequence
  Description of Artificial Sequence: Synthetic oligonucleotide
  Sense strand starting at position 942 of SEQ ID NO: 1887532
caaugucuuggagguuaac

SEQ ID NO: 2479077 - RNA, 19 nt, Artificial Sequence
  Description of Artificial Sequence: Synthetic oligonucleotide
  Antisense strand to SEQ ID NO: 2479076
guuaaccuccaagacauug

SEQ ID NO: 2479078 - RNA, 19 nt, Artificial Sequence
  Description of Artificial Sequence: Synthetic oligonucleotide
  Sense strand starting at position 1020 of SEQ ID NO: 1887532
aggaacugucccugagaac

SEQ ID NO: 2479079 - RNA, 19 nt, Artificial Sequence
  Description of Artificial Sequence: Synthetic oligonucleotide
  Antisense strand to SEQ ID NO: 2479078
guucucagggacaguuccu

SEQ ID NO: 2479080 - RNA, 19 nt, Artificial Sequence
  Description of Artificial Sequence: Synthetic oligonucleotide
  Sense strand starting at position 1065 of SEQ ID NO: 1887532
aagaguuuacauggaagca

SEQ ID NO: 2479081 - RNA, 19 nt, Artificial Sequence
  Description of Artificial Sequence: Synthetic oligonucleotide
  Antisense strand to SEQ ID NO: 2479080
ugcuuccauguaaacucuu

SEQ ID NO: 2479082 - RNA, 19 nt, Artificial Sequence
  Description of Artificial Sequence: Synthetic oligonucleotide
  Sense strand starting at position 1095 of SEQ ID NO: 1887532
agauguuuccauuaucuag

SEQ ID NO: 2479083 - RNA, 19 nt, Artificial Sequence
  Description of Artificial Sequence: Synthetic oligonucleotide
  Antisense strand to SEQ ID NO: 2479082
cuagauaauggaaacaucu

SEQ ID NO: 2479084 - RNA, 19 nt, Artificial Sequence
  Description of Artificial Sequence: Synthetic oligonucleotide
  Sense strand starting at position 1097 of SEQ ID NO: 1887532
auguuuccauuaucuagau

SEQ ID NO: 2479085 - RNA, 19 nt, Artificial Sequence
  Description of Artificial Sequence: Synthetic oligonucleotide
  Antisense strand to SEQ ID NO: 2479084
aucuagauaauggaaacau

SEQ ID NO: 2479086 - RNA, 19 nt, Artificial Sequence
  Description of Artificial Sequence: Synthetic oligonucleotide
  Sense strand starting at position 1098 of SEQ ID NO: 1887532
uguuuccauuaucuagaua

SEQ ID NO: 2479087 - RNA, 19 nt, Artificial Sequence
  Description of Artificial Sequence: Synthetic oligonucleotide
  Antisense strand to SEQ ID NO: 2479086
uaucuagauaauggaaaca

SEQ ID NO: 2479088 - RNA, 19 nt, Artificial Sequence
  Description of Artificial Sequence: Synthetic oligonucleotide
  Sense strand starting at position 1274 of SEQ ID NO: 1887532
cuaucuguuccugagggau

SEQ ID NO: 2479089 - RNA, 19 nt, Artificial Sequence
  Description of Artificial Sequence: Synthetic oligonucleotide
  Antisense strand to SEQ ID NO: 2479088
aucccucaggaacagauag

SEQ ID NO: 2479090 - RNA, 19 nt, Artificial Sequence
  Description of Artificial Sequence: Synthetic oligonucleotide
  Sense strand starting at position 1313 of SEQ ID NO: 1887532
aagacacugccuugagaug

SEQ ID NO: 2479091 - RNA, 19 nt, Artificial Sequence
  Description of Artificial Sequence: Synthetic oligonucleotide
  Antisense strand to SEQ ID NO: 2479090
caucucaaggcagugucuu

SEQ ID NO: 2479092 - RNA, 19 nt, Artificial Sequence
  Description of Artificial Sequence: Synthetic oligonucleotide
  Sense strand starting at position 1324 of SEQ ID NO: 1887532
uugagaugaggccgaugau

SEQ ID NO: 2479093 - RNA, 19 nt, Artificial Sequence
  Description of Artificial Sequence: Synthetic oligonucleotide
  Antisense strand to SEQ ID NO: 2479092
aucaucggccucaucucaa

SEQ ID NO: 2479094 - RNA, 19 nt, Artificial Sequence
  Description of Artificial Sequence: Synthetic oligonucleotide
  Sense strand starting at position 1325 of SEQ ID NO: 1887532
ugagaugaggccgaugauu

SEQ ID NO: 2479095 - RNA, 19 nt, Artificial Sequence
  Description of Artificial Sequence: Synthetic oligonucleotide
  Antisense strand to SEQ ID NO: 2479094
aaucaucggccucaucuca

SEQ ID NO: 2479096 - RNA, 19 nt, Artificial Sequence
  Description of Artificial Sequence: Synthetic oligonucleotide
  Sense strand starting at position 1348 of SEQ ID NO: 1887532
acguaaauugccuaaauua

SEQ ID NO: 2479097 - RNA, 19 nt, Artificial Sequence
  Description of Artificial Sequence: Synthetic oligonucleotide
  Antisense strand to SEQ ID NO: 2479096
uaauuuaggcaauuuacgu

SEQ ID NO: 2479098 - RNA, 19 nt, Artificial Sequence
  Description of Artificial Sequence: Synthetic oligonucleotide
  Sense strand starting at position 1399 of SEQ ID NO: 1887532
ccacuuaaguggguugaua

SEQ ID NO: 2479099 - RNA, 19 nt, Artificial Sequence
  Description of Artificial Sequence: Synthetic oligonucleotide
  Antisense strand to SEQ ID NO: 2479098
uaucaacccacuuaagugg

SEQ ID NO: 2479100 - RNA, 19 nt, Artificial Sequence
  Description of Artificial Sequence: Synthetic oligonucleotide
  Sense strand starting at position 1401 of SEQ ID NO: 1887532
acuuaaguggguugauaaa

SEQ ID NO: 2479101 - RNA, 19 nt, Artificial Sequence
  Description of Artificial Sequence: Synthetic oligonucleotide
  Antisense strand to SEQ ID NO: 2479100
uuuaucaacccacuuaagu

SEQ ID NO: 2479102 - RNA, 19 nt, Artificial Sequence
  Description of Artificial Sequence: Synthetic oligonucleotide
  Sense strand starting at position 1432 of SEQ ID NO: 1887532
agacacaugccugggaaau

SEQ ID NO: 2479103 - RNA, 19 nt, Artificial Sequence
  Description of Artificial Sequence: Synthetic oligonucleotide
  Antisense strand to SEQ ID NO: 2479102
auuucccaggcaugugucu

SEQ ID NO: 2479104 - RNA, 19 nt, Artificial Sequence
  Description of Artificial Sequence: Synthetic oligonucleotide
  Sense strand starting at position 1433 of SEQ ID NO: 1887532
gacacaugccugggaaaug

SEQ ID NO: 2479105 - RNA, 19 nt, Artificial Sequence
  Description of Artificial Sequence: Synthetic oligonucleotide
  Antisense strand to SEQ ID NO: 2479104
cauuucccaggcauguguc

SEQ ID NO: 2479106 - RNA, 19 nt, Artificial Sequence
  Description of Artificial Sequence: Synthetic oligonucleotide
  Sense strand starting at position 1547 of SEQ ID NO: 1887532
gcgugacauuucccugaag

SEQ ID NO: 2479107 - RNA, 19 nt, Artificial Sequence
  Description of Artificial Sequence: Synthetic oligonucleotide
  Antisense strand to SEQ ID NO: 2479106
cuucagggaaaugucacgc

SEQ ID NO: 2479108 - RNA, 19 nt, Artificial Sequence
  Description of Artificial Sequence: Synthetic oligonucleotide
  Sense strand starting at position 1718 of SEQ ID NO: 1887532
ucuauagcaguuuaggaaa

SEQ ID NO: 2479109 - RNA, 19 nt, Artificial Sequence
  Description of Artificial Sequence: Synthetic oligonucleotide
  Antisense strand to SEQ ID NO: 2479108
uuuccuaaacugcuauaga

SEQ ID NO: 2479110 - RNA, 19 nt, Artificial Sequence
  Description of Artificial Sequence: Synthetic oligonucleotide
  Sense strand starting at position 1979 of SEQ ID NO: 1887532
gugcuuuagacacagguua

SEQ ID NO: 2479111 - RNA, 19 nt, Artificial Sequence
  Description of Artificial Sequence: Synthetic oligonucleotide
  Antisense strand to SEQ ID NO: 2479110
uaaccugugucuaaagcac

SEQ ID NO: 2479112 - RNA, 19 nt, Artificial Sequence
  Description of Artificial Sequence: Synthetic oligonucleotide
  Sense strand starting at position 1981 of SEQ ID NO: 1887532
gcuuuagacacagguuaag

SEQ ID NO: 2479113 - RNA, 19 nt, Artificial Sequence
  Description of Artificial Sequence: Synthetic oligonucleotide
  Antisense strand to SEQ ID NO: 2479112
cuuaaccugugucuaaagc

SEQ ID NO: 2479114 - RNA, 19 nt, Artificial Sequence
  Description of Artificial Sequence: Synthetic oligonucleotide
  Sense strand starting at position 2043 of SEQ ID NO: 1887532
cugggauuguaguucugaa

SEQ ID NO: 2479115 - RNA, 19 nt, Artificial Sequence
  Description of Artificial Sequence: Synthetic oligonucleotide
  Antisense strand to SEQ ID NO: 2479114
uucagaacuacaaucccag

SEQ ID NO: 2479116 - RNA, 19 nt, Artificial Sequence
  Description of Artificial Sequence: Synthetic oligonucleotide
  Sense strand starting at position 2218 of SEQ ID NO: 1887532
ugggacuggccaugagauu

SEQ ID NO: 2479117 - RNA, 19 nt, Artificial Sequence
  Description of Artificial Sequence: Synthetic oligonucleotide
  Antisense strand to SEQ ID NO: 2479116
aaucucauggccaguccca

SEQ ID NO: 2479118 - RNA, 19 nt, Artificial Sequence
  Description of Artificial Sequence: Synthetic oligonucleotide
  Sense strand starting at position 2231 of SEQ ID NO: 1887532
gagauuacauguccuagca

SEQ ID NO: 2479119 - RNA, 19 nt, Artificial Sequence
  Description of Artificial Sequence: Synthetic oligonucleotide
  Antisense strand to SEQ ID NO: 2479118
ugcuaggacauguaaucuc

SEQ ID NO: 2479120 - RNA, 19 nt, Artificial Sequence
  Description of Artificial Sequence: Synthetic oligonucleotide
  Sense strand starting at position 2430 of SEQ ID NO: 1887532
agagcuguuccgccaugca

SEQ ID NO: 2479121 - RNA, 19 nt, Artificial Sequence
  Description of Artificial Sequence: Synthetic oligonucleotide
  Antisense strand to SEQ ID NO: 2479120
ugcauggcggaacagcucu

SEQ ID NO: 2479122 - RNA, 19 nt, Artificial Sequence
  Description of Artificial Sequence: Synthetic oligonucleotide
  Sense strand starting at position 2580 of SEQ ID NO: 1887532
cgguaaguuugauuucuca

SEQ ID NO: 2479123 - RNA, 19 nt, Artificial Sequence
  Description of Artificial Sequence: Synthetic oligonucleotide
  Antisense strand to SEQ ID NO: 2479122
ugagaaaucaaacuuaccg

SEQ ID NO: 2479124 - RNA, 19 nt, Artificial Sequence
  Description of Artificial Sequence: Synthetic oligonucleotide
  Sense strand starting at position 2814 of SEQ ID NO: 1887532
acacauguugguuagguaa

SEQ ID NO: 2479125 - RNA, 19 nt, Artificial Sequence
  Description of Artificial Sequence: Synthetic oligonucleotide
  Antisense strand to SEQ ID NO: 2479124
uuaccuaaccaacaugugu

SEQ ID NO: 2479126 - RNA, 19 nt, Artificial Sequence
  Description of Artificial Sequence: Synthetic oligonucleotide
  Sense strand starting at position 2829 of SEQ ID NO: 1887532
guaaucuguugauuagaca

SEQ ID NO: 2479127 - RNA, 19 nt, Artificial Sequence
  Description of Artificial Sequence: Synthetic oligonucleotide
  Antisense strand to SEQ ID NO: 2479126
ugucuaaucaacagauuac

SEQ ID NO: 2479128 - RNA, 19 nt, Artificial Sequence
  Description of Artificial Sequence: Synthetic oligonucleotide
  Sense strand starting at position 2864 of SEQ ID NO: 1887532
gggauuaucucuuccugau

SEQ ID NO: 2479129 - RNA, 19 nt, Artificial Sequence
  Description of Artificial Sequence: Synthetic oligonucleotide
  Antisense strand to SEQ ID NO: 2479128
aucaggaagagauaauccc

SEQ ID NO: 2479130 - RNA, 19 nt, Artificial Sequence
  Description of Artificial Sequence: Synthetic oligonucleotide
  Sense strand starting at position 2910 of SEQ ID NO: 1887532
gggcgcucuaaggaucuau

SEQ ID NO: 2479131 - RNA, 19 nt, Artificial Sequence
  Description of Artificial Sequence: Synthetic oligonucleotide
  Antisense strand to SEQ ID NO: 2479130
auagauccuuagagcgccc

SEQ ID NO: 2479132 - RNA, 19 nt, Artificial Sequence
  Description of Artificial Sequence: Synthetic oligonucleotide
  Sense strand starting at position 2951 of SEQ ID NO: 1887532
cugaucauuccugggcaaa

SEQ ID NO: 2479133 - RNA, 19 nt, Artificial Sequence
  Description of Artificial Sequence: Synthetic oligonucleotide
  Antisense strand to SEQ ID NO: 2479132
uuugcccaggaaugaucag

SEQ ID NO: 2479134 - RNA, 19 nt, Artificial Sequence
  Description of Artificial Sequence: Synthetic oligonucleotide
  Sense strand starting at position 3150 of SEQ ID NO: 1887532
ggugaaaucauagguacug

SEQ ID NO: 2479135 - RNA, 19 nt, Artificial Sequence
  Description of Artificial Sequence: Synthetic oligonucleotide
  Antisense strand to SEQ ID NO: 2479134
caguaccuaugauuucacc

SEQ ID NO: 2479136 - RNA, 19 nt, Artificial Sequence
  Description of Artificial Sequence: Synthetic oligonucleotide
  Sense strand starting at position 3331 of SEQ ID NO: 1887532
cuuguugggccaggacaaa

SEQ ID NO: 2479137 - RNA, 19 nt, Artificial Sequence
  Description of Artificial Sequence: Synthetic oligonucleotide
  Antisense strand to SEQ ID NO: 2479136
uuuguccuggcccaacaag

SEQ ID NO: 2479138 - RNA, 19 nt, Artificial Sequence
  Description of Artificial Sequence: Synthetic oligonucleotide
  Sense strand starting at position 3666 of SEQ ID NO: 1887532
ucucgugguagugaauaua

SEQ ID NO: 2479139 - RNA, 19 nt, Artificial Sequence
  Description of Artificial Sequence: Synthetic oligonucleotide
  Antisense strand to SEQ ID NO: 2479138
uauauucacuaccacgaga

SEQ ID NO: 2479140 - RNA, 19 nt, Artificial Sequence
  Description of Artificial Sequence: Synthetic oligonucleotide
  Sense strand starting at position 3809 of SEQ ID NO: 1887532
gaccuacagccauguggaa

SEQ ID NO: 2479141 - RNA, 19 nt, Artificial Sequence
  Description of Artificial Sequence: Synthetic oligonucleotide
  Antisense strand to SEQ ID NO: 2479140
uuccacauggcuguagguc

SEQ ID NO: 2479142 - RNA, 19 nt, Artificial Sequence
  Description of Artificial Sequence: Synthetic oligonucleotide
  Sense strand starting at position 699 of SEQ ID NO: 1887533
gguggauugcuugaucaca

SEQ ID NO: 2479143 - RNA, 19 nt, Artificial Sequence
  Description of Artificial Sequence: Synthetic oligonucleotide
  Antisense strand to SEQ ID NO: 2479142
ugugaucaagcaauccacc

SEQ ID NO: 2479144 - RNA, 19 nt, Artificial Sequence
  Description of Artificial Sequence: Synthetic oligonucleotide
  Sense strand starting at position 732 of SEQ ID NO: 1887533
gucugagaaacauggcaga

SEQ ID NO: 2479145 - RNA, 19 nt, Artificial Sequence
  Description of Artificial Sequence: Synthetic oligonucleotide
  Antisense strand to SEQ ID NO: 2479144
ucugccauguuucucagac

SEQ ID NO: 2479146 - RNA, 19 nt, Artificial Sequence
  Description of Artificial Sequence: Synthetic oligonucleotide
  Sense strand starting at position 805 of SEQ ID NO: 1887533
gugguacgugacuguagua

SEQ ID NO: 2479147 - RNA, 19 nt, Artificial Sequence
  Description of Artificial Sequence: Synthetic oligonucleotide
  Antisense strand to SEQ ID NO: 2479146
uacuacagucacguaccac

SEQ ID NO: 2479148 - RNA, 19 nt, Artificial Sequence
  Description of Artificial Sequence: Synthetic oligonucleotide
  Sense strand starting at position 1016 of SEQ ID NO: 1887533
gaaggugcuuaagagagaa

SEQ ID NO: 2479149 - RNA, 19 nt, Artificial Sequence
  Description of Artificial Sequence: Synthetic oligonucleotide
  Antisense strand to SEQ ID NO: 2479148
uucucucuuaagcaccuuc

SEQ ID NO: 2479150 - RNA, 19 nt, Artificial Sequence
  Description of Artificial Sequence: Synthetic oligonucleotide
  Sense strand starting at position 1059 of SEQ ID NO: 1887533
aacucaauguaccguggaa

SEQ ID NO: 2479151 - RNA, 19 nt, Artificial Sequence
  Description of Artificial Sequence: Synthetic oligonucleotide
  Antisense strand to SEQ ID NO: 2479150
uuccacgguacauugaguu

SEQ ID NO: 2479152 - RNA, 19 nt, Artificial Sequence
  Description of Artificial Sequence: Synthetic oligonucleotide
  Sense strand starting at position 1061 of SEQ ID NO: 1887533
cucaauguaccguggaaac

SEQ ID NO: 2479153 - RNA, 19 nt, Artificial Sequence
  Description of Artificial Sequence: Synthetic oligonucleotide
  Antisense strand to SEQ ID NO: 2479152
guuuccacgguacauugag

SEQ ID NO: 2479154 - RNA, 19 nt, Artificial Sequence
  Description of Artificial Sequence: Synthetic oligonucleotide
  Sense strand starting at position 1063 of SEQ ID NO: 1887533
caauguaccguggaaacaa

SEQ ID NO: 2479155 - RNA, 19 nt, Artificial Sequence
  Description of Artificial Sequence: Synthetic oligonucleotide
  Antisense strand to SEQ ID NO: 2479154
uuguuuccacgguacauug

SEQ ID NO: 2479156 - RNA, 19 nt, Artificial Sequence
  Description of Artificial Sequence: Synthetic oligonucleotide
  Sense strand starting at position 1661 of SEQ ID NO: 1887533
agcuaucuaguccgucuua

SEQ ID NO: 2479157 - RNA, 19 nt, Artificial Sequence
  Description of Artificial Sequence: Synthetic oligonucleotide
  Antisense strand to SEQ ID NO: 2479156
uaagacggacuagauagcu

SEQ ID NO: 2479158 - RNA, 19 nt, Artificial Sequence
  Description of Artificial Sequence: Synthetic oligonucleotide
  Sense strand starting at position 1662 of SEQ ID NO: 1887533
gcuaucuaguccgucuuaa

SEQ ID NO: 2479159 - RNA, 19 nt, Artificial Sequence
  Description of Artificial Sequence: Synthetic oligonucleotide
  Antisense strand to SEQ ID NO: 2479158
uuaagacggacuagauagc

SEQ ID NO: 2479160 - RNA, 19 nt, Artificial Sequence
  Description of Artificial Sequence: Synthetic oligonucleotide
  Sense strand starting at position 1666 of SEQ ID NO: 1887533
ucuaguccgucuuaaacau

SEQ ID NO: 2479161 - RNA, 19 nt, Artificial Sequence
  Description of Artificial Sequence: Synthetic oligonucleotide
  Antisense strand to SEQ ID NO: 2479160
auguuuaagacggacuaga

SEQ ID NO: 2479162 - RNA, 19 nt, Artificial Sequence
  Description of Artificial Sequence: Synthetic oligonucleotide
  Sense strand starting at position 2517 of SEQ ID NO: 1887533
agcuaugacucacaaggga

SEQ ID NO: 2479163 - RNA, 19 nt, Artificial Sequence
  Description of Artificial Sequence: Synthetic oligonucleotide
  Antisense strand to SEQ ID NO: 2479162
ucccuugugagucauagcu

SEQ ID NO: 2479164 - RNA, 19 nt, Artificial Sequence
  Description of Artificial Sequence: Synthetic oligonucleotide
  Sense strand starting at position 2557 of SEQ ID NO: 1887533
ucgggacuguucugcugaa

SEQ ID NO: 2479165 - RNA, 19 nt, Artificial Sequence
  Description of Artificial Sequence: Synthetic oligonucleotide
  Antisense strand to SEQ ID NO: 2479164
uucagcagaacagucccga

SEQ ID NO: 2479166 - RNA, 19 nt, Artificial Sequence
  Description of Artificial Sequence: Synthetic oligonucleotide
  Sense strand starting at position 2819 of SEQ ID NO: 1887533
ugcauauacugaucaaaga

SEQ ID NO: 2479167 - RNA, 19 nt, Artificial Sequence
  Description of Artificial Sequence: Synthetic oligonucleotide
  Antisense strand to SEQ ID NO: 2479166
ucuuugaucaguauaugca

SEQ ID NO: 2479168 - RNA, 19 nt, Artificial Sequence
  Description of Artificial Sequence: Synthetic oligonucleotide
  Sense strand starting at position 2952 of SEQ ID NO: 1887533
cugugagaccuugguuuag

SEQ ID NO: 2479169 - RNA, 19 nt, Artificial Sequence
  Description of Artificial Sequence: Synthetic oligonucleotide
  Antisense strand to SEQ ID NO: 2479168
cuaaaccaaggucucacag

SEQ ID NO: 2479170 - RNA, 19 nt, Artificial Sequence
  Description of Artificial Sequence: Synthetic oligonucleotide
  Sense strand starting at position 3168 of SEQ ID NO: 1887533
accucaaccuccugaggaa

SEQ ID NO: 2479171 - RNA, 19 nt, Artificial Sequence
  Description of Artificial Sequence: Synthetic oligonucleotide
  Antisense strand to SEQ ID NO: 2479170
uuccucaggagguugaggu

SEQ ID NO: 2479172 - RNA, 19 nt, Artificial Sequence
  Description of Artificial Sequence: Synthetic oligonucleotide
  Sense strand starting at position 3177 of SEQ ID NO: 1887533
uccugaggaacugguauua

SEQ ID NO: 2479173 - RNA, 19 nt, Artificial Sequence
  Description of Artificial Sequence: Synthetic oligonucleotide
  Antisense strand to SEQ ID NO: 2479172
uaauaccaguuccucagga

SEQ ID NO: 2479174 - RNA, 19 nt, Artificial Sequence
  Description of Artificial Sequence: Synthetic oligonucleotide
  Sense strand starting at position 3374 of SEQ ID NO: 1887533
uguguaugguccugugaua

SEQ ID NO: 2479175 - RNA, 19 nt, Artificial Sequence
  Description of Artificial Sequence: Synthetic oligonucleotide
  Antisense strand to SEQ ID NO: 2479174
uaucacaggaccauacaca

SEQ ID NO: 2479176 - RNA, 19 nt, Artificial Sequence
  Description of Artificial Sequence: Synthetic oligonucleotide
  Sense strand starting at position 3426 of SEQ ID NO: 1887533
gccagaaguuaacguccua

SEQ ID NO: 2479177 - RNA, 19 nt, Artificial Sequence
  Description of Artificial Sequence: Synthetic oligonucleotide
  Antisense strand to SEQ ID NO: 2479176
uaggacguuaacuucuggc

SEQ ID NO: 2479178 - RNA, 19 nt, Artificial Sequence
  Description of Artificial Sequence: Synthetic oligonucleotide
  Sense strand starting at position 3431 of SEQ ID NO: 1887533
aaguuaacguccuaaaugu

SEQ ID NO: 2479179 - RNA, 19 nt, Artificial Sequence
  Description of Artificial Sequence: Synthetic oligonucleotide
  Antisense strand to SEQ ID NO: 2479178
acauuuaggacguuaacuu

SEQ ID NO: 2479180 - RNA, 19 nt, Artificial Sequence
  Description of Artificial Sequence: Synthetic oligonucleotide
  Sense strand starting at position 3438 of SEQ ID NO: 1887533
cguccuaaaugucuauuua

SEQ ID NO: 2479181 - RNA, 19 nt, Artificial Sequence
  Description of Artificial Sequence: Synthetic oligonucleotide
  Antisense strand to SEQ ID NO: 2479180
uaaauagacauuuaggacg

SEQ ID NO: 2479182 - RNA, 19 nt, Artificial Sequence
  Description of Artificial Sequence: Synthetic oligonucleotide
  Sense strand starting at position 3486 of SEQ ID NO: 1887533
ccacgaaacucucagaaag

SEQ ID NO: 2479183 - RNA, 19 nt, Artificial Sequence
  Description of Artificial Sequence: Synthetic oligonucleotide
  Antisense strand to SEQ ID NO: 2479182
cuuucugagaguuucgugg

SEQ ID NO: 2479184 - RNA, 19 nt, Artificial Sequence
  Description of Artificial Sequence: Synthetic oligonucleotide
  Sense strand starting at position 3527 of SEQ ID NO: 1887533
gcaaccuggcaaugaauca

SEQ ID NO: 2479185 - RNA, 19 nt, Artificial Sequence
  Description of Artificial Sequence: Synthetic oligonucleotide
  Antisense strand to SEQ ID NO: 2479184
ugauucauugccagguugc

SEQ ID NO: 2479186 - RNA, 19 nt, Artificial Sequence
  Description of Artificial Sequence: Synthetic oligonucleotide
  Sense strand starting at position 3538 of SEQ ID NO: 1887533
augaaucacgccuguaauc

SEQ ID NO: 2479187 - RNA, 19 nt, Artificial Sequence
  Description of Artificial Sequence: Synthetic oligonucleotide
  Antisense strand to SEQ ID NO: 2479186
gauuacaggcgugauucau

SEQ ID NO: 2479188 - RNA, 19 nt, Artificial Sequence
  Description of Artificial Sequence: Synthetic oligonucleotide
  Sense strand starting at position 3755 of SEQ ID NO: 1887533
uuugcuuccuacccagaga

SEQ ID NO: 2479189 - RNA, 19 nt, Artificial Sequence
  Description of Artificial Sequence: Synthetic oligonucleotide
  Antisense strand to SEQ ID NO: 2479188
ucucuggguaggaagcaaa

SEQ ID NO: 2479190 - RNA, 19 nt, Artificial Sequence
  Description of Artificial Sequence: Synthetic oligonucleotide
  Sense strand starting at position 3922 of SEQ ID NO: 1887533
gcugaaaucacaggugugu

SEQ ID NO: 2479191 - RNA, 19 nt, Artificial Sequence
  Description of Artificial Sequence: Synthetic oligonucleotide
  Antisense strand to SEQ ID NO: 2479190
acacaccugugauuucagc

SEQ ID NO: 2479192 - RNA, 19 nt, Artificial Sequence
  Description of Artificial Sequence: Synthetic oligonucleotide
  Sense strand starting at position 26 of SEQ ID NO: 1887534
cauugacaggccgguauaa

SEQ ID NO: 2479193 - RNA, 19 nt, Artificial Sequence
  Description of Artificial Sequence: Synthetic oligonucleotide
  Antisense strand to SEQ ID NO: 2479192
uuauaccggccugucaaug

SEQ ID NO: 2479194 - RNA, 19 nt, Artificial Sequence
  Description of Artificial Sequence: Synthetic oligonucleotide
  Sense strand starting at position 406 of SEQ ID NO: 1887534
cacagaggcgucuaacaga

SEQ ID NO: 2479195 - RNA, 19 nt, Artificial Sequence
  Description of Artificial Sequence: Synthetic oligonucleotide
  Antisense strand to SEQ ID NO: 2479194
ucuguuagacgccucugug

SEQ ID NO: 2479196 - RNA, 19 nt, Artificial Sequence
  Description of Artificial Sequence: Synthetic oligonucleotide
  Sense strand starting at position 440 of SEQ ID NO: 1887534
ccucuagcauccuagagaa

SEQ ID NO: 2479197 - RNA, 19 nt, Artificial Sequence
  Description of Artificial Sequence: Synthetic oligonucleotide
  Antisense strand to SEQ ID NO: 2479196
uucucuaggaugcuagagg

SEQ ID NO: 2479198 - RNA, 19 nt, Artificial Sequence
  Description of Artificial Sequence: Synthetic oligonucleotide
  Sense strand starting at position 764 of SEQ ID NO: 1887534
aaaugucguaccugagcga

SEQ ID NO: 2479199 - RNA, 19 nt, Artificial Sequence
  Description of Artificial Sequence: Synthetic oligonucleotide
  Antisense strand to SEQ ID NO: 2479198
ucgcucagguacgacauuu

SEQ ID NO: 2479200 - RNA, 19 nt, Artificial Sequence
  Description of Artificial Sequence: Synthetic oligonucleotide
  Sense strand starting at position 770 of SEQ ID NO: 1887534
cguaccugagcgaguuaga

SEQ ID NO: 2479201 - RNA, 19 nt, Artificial Sequence
  Description of Artificial Sequence: Synthetic oligonucleotide
  Antisense strand to SEQ ID NO: 2479200
ucuaacucgcucagguacg

SEQ ID NO: 2479202 - RNA, 19 nt, Artificial Sequence
  Description of Artificial Sequence: Synthetic oligonucleotide
  Sense strand starting at position 840 of SEQ ID NO: 1887534
ccaagagauggcuaaugcu

SEQ ID NO: 2479203 - RNA, 19 nt, Artificial Sequence
  Description of Artificial Sequence: Synthetic oligonucleotide
  Antisense strand to SEQ ID NO: 2479202
agcauuagccaucucuugg

SEQ ID NO: 2479204 - RNA, 19 nt, Artificial Sequence
  Description of Artificial Sequence: Synthetic oligonucleotide
  Sense strand starting at position 864 of SEQ ID NO: 1887534
uucucuccgcucugaagaa

SEQ ID NO: 2479205 - RNA, 19 nt, Artificial Sequence
  Description of Artificial Sequence: Synthetic oligonucleotide
  Antisense strand to SEQ ID NO: 2479204
uucuucagagcggagagaa

SEQ ID NO: 2479206 - RNA, 19 nt, Artificial Sequence
  Description of Artificial Sequence: Synthetic oligonucleotide
  Sense strand starting at position 1020 of SEQ ID NO: 1887534
gcuuuaagauuauuacaag

SEQ ID NO: 2479207 - RNA, 19 nt, Artificial Sequence
  Description of Artificial Sequence: Synthetic oligonucleotide
  Antisense strand to SEQ ID NO: 2479206
cuuguaauaaucuuaaagc

SEQ ID NO: 2479208 - RNA, 19 nt, Artificial Sequence
  Description of Artificial Sequence: Synthetic oligonucleotide
  Sense strand starting at position 1060 of SEQ ID NO: 1887534
ggcauaaucaaucggauga

SEQ ID NO: 2479209 - RNA, 19 nt, Artificial Sequence
  Description of Artificial Sequence: Synthetic oligonucleotide
  Antisense strand to SEQ ID NO: 2479208
ucauccgauugauuaugcc

SEQ ID NO: 2479210 - RNA, 19 nt, Artificial Sequence
  Description of Artificial Sequence: Synthetic oligonucleotide
  Sense strand starting at position 1071 of SEQ ID NO: 1887534
ucggaugaauuccucggaa

SEQ ID NO: 2479211 - RNA, 19 nt, Artificial Sequence
  Description of Artificial Sequence: Synthetic oligonucleotide
  Antisense strand to SEQ ID NO: 2479210
uuccgaggaauucauccga

SEQ ID NO: 2479212 - RNA, 19 nt, Artificial Sequence
  Description of Artificial Sequence: Synthetic oligonucleotide
  Sense strand starting at position 1073 of SEQ ID NO: 1887534
ggaugaauuccucggaacu

SEQ ID NO: 2479213 - RNA, 19 nt, Artificial Sequence
  Description of Artificial Sequence: Synthetic oligonucleotide
  Antisense strand to SEQ ID NO: 2479212
aguuccgaggaauucaucc

SEQ ID NO: 2479214 - RNA, 19 nt, Artificial Sequence
  Description of Artificial Sequence: Synthetic oligonucleotide
  Sense strand starting at position 1074 of SEQ ID NO: 1887534
gaugaauuccucggaacug

SEQ ID NO: 2479215 - RNA, 19 nt, Artificial Sequence
  Description of Artificial Sequence: Synthetic oligonucleotide
  Antisense strand to SEQ ID NO: 2479214
caguuccgaggaauucauc

SEQ ID NO: 2479216 - RNA, 19 nt, Artificial Sequence
  Description of Artificial Sequence: Synthetic oligonucleotide
  Sense strand starting at position 1108 of SEQ ID NO: 1887534
acaguaucuuaacaguuaa

SEQ ID NO: 2479217 - RNA, 19 nt, Artificial Sequence
  Description of Artificial Sequence: Synthetic oligonucleotide
  Antisense strand to SEQ ID NO: 2479216
uuaacuguuaagauacugu

SEQ ID NO: 2479218 - RNA, 19 nt, Artificial Sequence
  Description of Artificial Sequence: Synthetic oligonucleotide
  Sense strand starting at position 1422 of SEQ ID NO: 1887534
uuuauaaagccugagaagu

SEQ ID NO: 2479219 - RNA, 19 nt, Artificial Sequence
  Description of Artificial Sequence: Synthetic oligonucleotide
  Antisense strand to SEQ ID NO: 2479218
acuucucaggcuuuauaaa

SEQ ID NO: 2479220 - RNA, 19 nt, Artificial Sequence
  Description of Artificial Sequence: Synthetic oligonucleotide
  Sense strand starting at position 1474 of SEQ ID NO: 1887534
uugguuuaauuagcaacaa

SEQ ID NO: 2479221 - RNA, 19 nt, Artificial Sequence
  Description of Artificial Sequence: Synthetic oligonucleotide
  Antisense strand to SEQ ID NO: 2479220
uuguugcuaauuaaaccaa

SEQ ID NO: 2479222 - RNA, 19 nt, Artificial Sequence
  Description of Artificial Sequence: Synthetic oligonucleotide
  Sense strand starting at position 1508 of SEQ ID NO: 1887534
acuggcuguccuuaucaga

SEQ ID NO: 2479223 - RNA, 19 nt, Artificial Sequence
  Description of Artificial Sequence: Synthetic oligonucleotide
  Antisense strand to SEQ ID NO: 2479222
ucugauaaggacagccagu

SEQ ID NO: 2479224 - RNA, 19 nt, Artificial Sequence
  Description of Artificial Sequence: Synthetic oligonucleotide
  Sense strand starting at position 1738 of SEQ ID NO: 1887534
ggagacaauacgggucaga

SEQ ID NO: 2479225 - RNA, 19 nt, Artificial Sequence
  Description of Artificial Sequence: Synthetic oligonucleotide
  Antisense strand to SEQ ID NO: 2479224
ucugacccguauugucucc

SEQ ID NO: 2479226 - RNA, 19 nt, Artificial Sequence
  Description of Artificial Sequence: Synthetic oligonucleotide
  Sense strand starting at position 1799 of SEQ ID NO: 1887534
ccgguggacggaugagaaa

SEQ ID NO: 2479227 - RNA, 19 nt, Artificial Sequence
  Description of Artificial Sequence: Synthetic oligonucleotide
  Antisense strand to SEQ ID NO: 2479226
uuucucauccguccaccgg

SEQ ID NO: 2479228 - RNA, 19 nt, Artificial Sequence
  Description of Artificial Sequence: Synthetic oligonucleotide
  Sense strand starting at position 1941 of SEQ ID NO: 1887534
ggccgaauagcccaagacu

SEQ ID NO: 2479229 - RNA, 19 nt, Artificial Sequence
  Description of Artificial Sequence: Synthetic oligonucleotide
  Antisense strand to SEQ ID NO: 2479228
agucuugggcuauucggcc

SEQ ID NO: 2479230 - RNA, 19 nt, Artificial Sequence
  Description of Artificial Sequence: Synthetic oligonucleotide
  Sense strand starting at position 2062 of SEQ ID NO: 1887534
ugggaaacgugaucagaug

SEQ ID NO: 2479231 - RNA, 19 nt, Artificial Sequence
  Description of Artificial Sequence: Synthetic oligonucleotide
  Antisense strand to SEQ ID NO: 2479230
caucugaucacguuuccca

SEQ ID NO: 2479232 - RNA, 19 nt, Artificial Sequence
  Description of Artificial Sequence: Synthetic oligonucleotide
  Sense strand starting at position 2063 of SEQ ID NO: 1887534
gggaaacgugaucagaugu

SEQ ID NO: 2479233 - RNA, 19 nt, Artificial Sequence
  Description of Artificial Sequence: Synthetic oligonucleotide
  Antisense strand to SEQ ID NO: 2479232
acaucugaucacguuuccc

SEQ ID NO: 2479234 - RNA, 19 nt, Artificial Sequence
  Description of Artificial Sequence: Synthetic oligonucleotide
  Sense strand starting at position 2076 of SEQ ID NO: 1887534
agauguuacuaggcagaca

SEQ ID NO: 2479235 - RNA, 19 nt, Artificial Sequence
  Description of Artificial Sequence: Synthetic oligonucleotide
  Antisense strand to SEQ ID NO: 2479234
ugucugccuaguaacaucu

SEQ ID NO: 2479236 - RNA, 19 nt, Artificial Sequence
  Description of Artificial Sequence: Synthetic oligonucleotide
  Sense strand starting at position 2127 of SEQ ID NO: 1887534
gcgcucagucagccucaaa

SEQ ID NO: 2479237 - RNA, 19 nt, Artificial Sequence
  Description of Artificial Sequence: Synthetic oligonucleotide
  Antisense strand to SEQ ID NO: 2479236
uuugaggcugacugagcgc

SEQ ID NO: 2479238 - RNA, 19 nt, Artificial Sequence
  Description of Artificial Sequence: Synthetic oligonucleotide
  Sense strand starting at position 2138 of SEQ ID NO: 1887534
gccucaaauagacggagau

SEQ ID NO: 2479239 - RNA, 19 nt, Artificial Sequence
  Description of Artificial Sequence: Synthetic oligonucleotide
  Antisense strand to SEQ ID NO: 2479238
aucuccgucuauuugaggc

SEQ ID NO: 2479240 - RNA, 19 nt, Artificial Sequence
  Description of Artificial Sequence: Synthetic oligonucleotide
  Sense strand starting at position 2139 of SEQ ID NO: 1887534
ccucaaauagacggagauu

SEQ ID NO: 2479241 - RNA, 19 nt, Artificial Sequence
  Description of Artificial Sequence: Synthetic oligonucleotide
  Antisense strand to SEQ ID NO: 2479240
aaucuccgucuauuugagg

SEQ ID NO: 2479242 - RNA, 19 nt, Artificial Sequence
  Description of Artificial Sequence: Synthetic oligonucleotide
  Sense strand starting at position 2173 of SEQ ID NO: 1887534
gcagguucccuccacauua

SEQ ID NO: 2479243 - RNA, 19 nt, Artificial Sequence
  Description of Artificial Sequence: Synthetic oligonucleotide
  Antisense strand to SEQ ID NO: 2479242
uaauguggagggaaccugc

SEQ ID NO: 2479244 - RNA, 19 nt, Artificial Sequence
  Description of Artificial Sequence: Synthetic oligonucleotide
  Sense strand starting at position 2415 of SEQ ID NO: 1887534
ccagucuuguugucagcga

SEQ ID NO: 2479245 - RNA, 19 nt, Artificial Sequence
  Description of Artificial Sequence: Synthetic oligonucleotide
  Antisense strand to SEQ ID NO: 2479244
ucgcugacaacaagacugg

SEQ ID NO: 2479246 - RNA, 19 nt, Artificial Sequence
  Description of Artificial Sequence: Synthetic oligonucleotide
  Sense strand starting at position 2419 of SEQ ID NO: 1887534
ucuuguugucagcgaacag

SEQ ID NO: 2479247 - RNA, 19 nt, Artificial Sequence
  Description of Artificial Sequence: Synthetic oligonucleotide
  Antisense strand to SEQ ID NO: 2479246
cuguucgcugacaacaaga

SEQ ID NO: 2479248 - RNA, 19 nt, Artificial Sequence
  Description of Artificial Sequence: Synthetic oligonucleotide
  Sense strand starting at position 2428 of SEQ ID NO: 1887534
cagcgaacaggcuaguaaa

SEQ ID NO: 2479249 - RNA, 19 nt, Artificial Sequence
  Description of Artificial Sequence: Synthetic oligonucleotide
  Antisense strand to SEQ ID NO: 2479248
uuuacuagccuguucgcug

SEQ ID NO: 2479250 - RNA, 19 nt, Artificial Sequence
  Description of Artificial Sequence: Synthetic oligonucleotide
  Sense strand starting at position 2484 of SEQ ID NO: 1887534
uauuucucgucagguggaa

SEQ ID NO: 2479251 - RNA, 19 nt, Artificial Sequence
  Description of Artificial Sequence: Synthetic oligonucleotide
  Antisense strand to SEQ ID NO: 2479250
uuccaccugacgagaaaua

SEQ ID NO: 2479252 - RNA, 19 nt, Artificial Sequence
  Description of Artificial Sequence: Synthetic oligonucleotide
  Sense strand starting at position 2598 of SEQ ID NO: 1887534
ggacacuggucucugaguu

SEQ ID NO: 2479253 - RNA, 19 nt, Artificial Sequence
  Description of Artificial Sequence: Synthetic oligonucleotide
  Antisense strand to SEQ ID NO: 2479252
aacucagagaccagugucc

SEQ ID NO: 2479254 - RNA, 19 nt, Artificial Sequence
  Description of Artificial Sequence: Synthetic oligonucleotide
  Sense strand starting at position 2599 of SEQ ID NO: 1887534
gacacuggucucugaguuc

SEQ ID NO: 2479255 - RNA, 19 nt, Artificial Sequence
  Description of Artificial Sequence: Synthetic oligonucleotide
  Antisense strand to SEQ ID NO: 2479254
gaacucagagaccaguguc

SEQ ID NO: 2479256 - RNA, 19 nt, Artificial Sequence
  Description of Artificial Sequence: Synthetic oligonucleotide
  Sense strand starting at position 2758 of SEQ ID NO: 1887534
gugccuugaugugcacuua

SEQ ID NO: 2479257 - RNA, 19 nt, Artificial Sequence
  Description of Artificial Sequence: Synthetic oligonucleotide
  Antisense strand to SEQ ID NO: 2479256
uaagugcacaucaaggcac

SEQ ID NO: 2479258 - RNA, 19 nt, Artificial Sequence
  Description of Artificial Sequence: Synthetic oligonucleotide
  Sense strand starting at position 2759 of SEQ ID NO: 1887534
ugccuugaugugcacuuau

SEQ ID NO: 2479259 - RNA, 19 nt, Artificial Sequence
  Description of Artificial Sequence: Synthetic oligonucleotide
  Antisense strand to SEQ ID NO: 2479258
auaagugcacaucaaggca

SEQ ID NO: 2479260 - RNA, 19 nt, Artificial Sequence
  Description of Artificial Sequence: Synthetic oligonucleotide
  Sense strand starting at position 3238 of SEQ ID NO: 1887534
uccauugaaccuugaguca

SEQ ID NO: 2479261 - RNA, 19 nt, Artificial Sequence
  Description of Artificial Sequence: Synthetic oligonucleotide
  Antisense strand to SEQ ID NO: 2479260
ugacucaagguucaaugga

SEQ ID NO: 2479262 - RNA, 19 nt, Artificial Sequence
  Description of Artificial Sequence: Synthetic oligonucleotide
  Sense strand starting at position 3521 of SEQ ID NO: 1887534
gaaggagugugguaagaug

SEQ ID NO: 2479263 - RNA, 19 nt, Artificial Sequence
  Description of Artificial Sequence: Synthetic oligonucleotide
  Antisense strand to SEQ ID NO: 2479262
caucuuaccacacuccuuc

SEQ ID NO: 2479264 - RNA, 19 nt, Artificial Sequence
  Description of Artificial Sequence: Synthetic oligonucleotide
  Sense strand starting at position 3600 of SEQ ID NO: 1887534
ggcuuacugucccugguuu

SEQ ID NO: 2479265 - RNA, 19 nt, Artificial Sequence
  Description of Artificial Sequence: Synthetic oligonucleotide
  Antisense strand to SEQ ID NO: 2479264
aaaccagggacaguaagcc

SEQ ID NO: 2479266 - RNA, 19 nt, Artificial Sequence
  Description of Artificial Sequence: Synthetic oligonucleotide
  Sense strand starting at position 3611 of SEQ ID NO: 1887534
ccugguuucugacugcuuu

SEQ ID NO: 2479267 - RNA, 19 nt, Artificial Sequence
  Description of Artificial Sequence: Synthetic oligonucleotide
  Antisense strand to SEQ ID NO: 2479266
aaagcagucagaaaccagg

SEQ ID NO: 2479268 - RNA, 19 nt, Artificial Sequence
  Description of Artificial Sequence: Synthetic oligonucleotide
  Sense strand starting at position 3623 of SEQ ID NO: 1887534
cugcuuuguggugaagcuu

SEQ ID NO: 2479269 - RNA, 19 nt, Artificial Sequence
  Description of Artificial Sequence: Synthetic oligonucleotide
  Antisense strand to SEQ ID NO: 2479268
aagcuucaccacaaagcag

SEQ ID NO: 2479270 - RNA, 19 nt, Artificial Sequence
  Description of Artificial Sequence: Synthetic oligonucleotide
  Sense strand starting at position 3663 of SEQ ID NO: 1887534
gccagaauugguggcuuau

SEQ ID NO: 2479271 - RNA, 19 nt, Artificial Sequence
  Description of Artificial Sequence: Synthetic oligonucleotide
  Antisense strand to SEQ ID NO: 2479270
auaagccaccaauucuggc

SEQ ID NO: 2479272 - RNA, 19 nt, Artificial Sequence
  Description of Artificial Sequence: Synthetic oligonucleotide
  Sense strand starting at position 344 of SEQ ID NO: 1887535
ugauuaaauuuggaugcuu

SEQ ID NO: 2479273 - RNA, 19 nt, Artificial Sequence
  Description of Artificial Sequence: Synthetic oligonucleotide
  Antisense strand to SEQ ID NO: 2479272
aagcauccaaauuuaauca

SEQ ID NO: 2479274 - RNA, 19 nt, Artificial Sequence
  Description of Artificial Sequence: Synthetic oligonucleotide
  Sense strand starting at position 383 of SEQ ID NO: 1887535
agauuauaggcugggcaua

SEQ ID NO: 2479275 - RNA, 19 nt, Artificial Sequence
  Description of Artificial Sequence: Synthetic oligonucleotide
  Antisense strand to SEQ ID NO: 2479274
uaugcccagccuauaaucu

SEQ ID NO: 2479276 - RNA, 19 nt, Artificial Sequence
  Description of Artificial Sequence: Synthetic oligonucleotide
  Sense strand starting at position 753 of SEQ ID NO: 1887535
uugagucuuuagcuagaga

SEQ ID NO: 2479277 - RNA, 19 nt, Artificial Sequence
  Description of Artificial Sequence: Synthetic oligonucleotide
  Antisense strand to SEQ ID NO: 2479276
ucucuagcuaaagacucaa

SEQ ID NO: 2479278 - RNA, 19 nt, Artificial Sequence
  Description of Artificial Sequence: Synthetic oligonucleotide
  Sense strand starting at position 754 of SEQ ID NO: 1887535
ugagucuuuagcuagagaa

SEQ ID NO: 2479279 - RNA, 19 nt, Artificial Sequence
  Description of Artificial Sequence: Synthetic oligonucleotide
  Antisense strand to SEQ ID NO: 2479278
uucucuagcuaaagacuca

SEQ ID NO: 2479280 - RNA, 19 nt, Artificial Sequence
  Description of Artificial Sequence: Synthetic oligonucleotide
  Sense strand starting at position 756 of SEQ ID NO: 1887535
agucuuuagcuagagaaau

SEQ ID NO: 2479281 - RNA, 19 nt, Artificial Sequence
  Description of Artificial Sequence: Synthetic oligonucleotide
  Antisense strand to SEQ ID NO: 2479280
auuucucuagcuaaagacu

SEQ ID NO: 2479282 - RNA, 19 nt, Artificial Sequence
  Description of Artificial Sequence: Synthetic oligonucleotide
  Sense strand starting at position 1101 of SEQ ID NO: 1887535
gcuugauauuguuuaagau

SEQ ID NO: 2479283 - RNA, 19 nt, Artificial Sequence
  Description of Artificial Sequence: Synthetic oligonucleotide
  Antisense strand to SEQ ID NO: 2479282
aucuuaaacaauaucaagc

SEQ ID NO: 2479284 - RNA, 19 nt, Artificial Sequence
  Description of Artificial Sequence: Synthetic oligonucleotide
  Sense strand starting at position 1150 of SEQ ID NO: 1887535
caaagcagucucuagcaga

SEQ ID NO: 2479285 - RNA, 19 nt, Artificial Sequence
  Description of Artificial Sequence: Synthetic oligonucleotide
  Antisense strand to SEQ ID NO: 2479284
ucugcuagagacugcuuug

SEQ ID NO: 2479286 - RNA, 19 nt, Artificial Sequence
  Description of Artificial Sequence: Synthetic oligonucleotide
  Sense strand starting at position 1174 of SEQ ID NO: 1887535
agcugaccacuuuguagaa

SEQ ID NO: 2479287 - RNA, 19 nt, Artificial Sequence
  Description of Artificial Sequence: Synthetic oligonucleotide
  Antisense strand to SEQ ID NO: 2479286
uucuacaaaguggucagcu

SEQ ID NO: 2479288 - RNA, 19 nt, Artificial Sequence
  Description of Artificial Sequence: Synthetic oligonucleotide
  Sense strand starting at position 1175 of SEQ ID NO: 1887535
gcugaccacuuuguagaaa

SEQ ID NO: 2479289 - RNA, 19 nt, Artificial Sequence
  Description of Artificial Sequence: Synthetic oligonucleotide
  Antisense strand to SEQ ID NO: 2479288
uuucuacaaaguggucagc

SEQ ID NO: 2479290 - RNA, 19 nt, Artificial Sequence
  Description of Artificial Sequence: Synthetic oligonucleotide
  Sense strand starting at position 1183 of SEQ ID NO: 1887535
cuuuguagaaagugauaag

SEQ ID NO: 2479291 - RNA, 19 nt, Artificial Sequence
  Description of Artificial Sequence: Synthetic oligonucleotide
  Antisense strand to SEQ ID NO: 2479290
cuuaucacuuucuacaaag

SEQ ID NO: 2479292 - RNA, 19 nt, Artificial Sequence
  Description of Artificial Sequence: Synthetic oligonucleotide
  Sense strand starting at position 1192 of SEQ ID NO: 1887535
aagugauaaggugauugua

SEQ ID NO: 2479293 - RNA, 19 nt, Artificial Sequence
  Description of Artificial Sequence: Synthetic oligonucleotide
  Antisense strand to SEQ ID NO: 2479292
uacaaucaccuuaucacuu

SEQ ID NO: 2479294 - RNA, 19 nt, Artificial Sequence
  Description of Artificial Sequence: Synthetic oligonucleotide
  Sense strand starting at position 1194 of SEQ ID NO: 1887535
gugauaaggugauuguaaa

SEQ ID NO: 2479295 - RNA, 19 nt, Artificial Sequence
  Description of Artificial Sequence: Synthetic oligonucleotide
  Antisense strand to SEQ ID NO: 2479294
uuuacaaucaccuuaucac

SEQ ID NO: 2479296 - RNA, 19 nt, Artificial Sequence
  Description of Artificial Sequence: Synthetic oligonucleotide
  Sense strand starting at position 2012 of SEQ ID NO: 1887535
gugagccaugcucauauca

SEQ ID NO: 2479297 - RNA, 19 nt, Artificial Sequence
  Description of Artificial Sequence: Synthetic oligonucleotide
  Antisense strand to SEQ ID NO: 2479296
ugauaugagcauggcucac

SEQ ID NO: 2479298 - RNA, 19 nt, Artificial Sequence
  Description of Artificial Sequence: Synthetic oligonucleotide
  Sense strand starting at position 2107 of SEQ ID NO: 1887535
auugcaaugcaauaguaau

SEQ ID NO: 2479299 - RNA, 19 nt, Artificial Sequence
  Description of Artificial Sequence: Synthetic oligonucleotide
  Antisense strand to SEQ ID NO: 2479298
auuacuauugcauugcaau

SEQ ID NO: 2479300 - RNA, 19 nt, Artificial Sequence
  Description of Artificial Sequence: Synthetic oligonucleotide
  Sense strand starting at position 2113 of SEQ ID NO: 1887535
augcaauaguaaucaagac

SEQ ID NO: 2479301 - RNA, 19 nt, Artificial Sequence
  Description of Artificial Sequence: Synthetic oligonucleotide
  Antisense strand to SEQ ID NO: 2479300
gucuugauuacuauugcau

SEQ ID NO: 2479302 - RNA, 19 nt, Artificial Sequence
  Description of Artificial Sequence: Synthetic oligonucleotide
  Sense strand starting at position 2280 of SEQ ID NO: 1887535
cgguauuaucuuggaaauc

SEQ ID NO: 2479303 - RNA, 19 nt, Artificial Sequence
  Description of Artificial Sequence: Synthetic oligonucleotide
  Antisense strand to SEQ ID NO: 2479302
gauuuccaagauaauaccg

SEQ ID NO: 2479304 - RNA, 19 nt, Artificial Sequence
  Description of Artificial Sequence: Synthetic oligonucleotide
  Sense strand starting at position 2289 of SEQ ID NO: 1887535
cuuggaaaucacuguguug

SEQ ID NO: 2479305 - RNA, 19 nt, Artificial Sequence
  Description of Artificial Sequence: Synthetic oligonucleotide
  Antisense strand to SEQ ID NO: 2479304
caacacagugauuuccaag

SEQ ID NO: 2479306 - RNA, 19 nt, Artificial Sequence
  Description of Artificial Sequence: Synthetic oligonucleotide
  Sense strand starting at position 2334 of SEQ ID NO: 1887535
gaucauagaguuugccuau

SEQ ID NO: 2479307 - RNA, 19 nt, Artificial Sequence
  Description of Artificial Sequence: Synthetic oligonucleotide
  Antisense strand to SEQ ID NO: 2479306
auaggcaaacucuaugauc

SEQ ID NO: 2479308 - RNA, 19 nt, Artificial Sequence
  Description of Artificial Sequence: Synthetic oligonucleotide
  Sense strand starting at position 2458 of SEQ ID NO: 1887535
cauugaaggauguguuagu

SEQ ID NO: 2479309 - RNA, 19 nt, Artificial Sequence
  Description of Artificial Sequence: Synthetic oligonucleotide
  Antisense strand to SEQ ID NO: 2479308
acuaacacauccuucaaug

SEQ ID NO: 2479310 - RNA, 19 nt, Artificial Sequence
  Description of Artificial Sequence: Synthetic oligonucleotide
  Sense strand starting at position 2459 of SEQ ID NO: 1887535
auugaaggauguguuaguu

SEQ ID NO: 2479311 - RNA, 19 nt, Artificial Sequence
  Description of Artificial Sequence: Synthetic oligonucleotide
  Antisense strand to SEQ ID NO: 2479310
aacuaacacauccuucaau

SEQ ID NO: 2479312 - RNA, 19 nt, Artificial Sequence
  Description of Artificial Sequence: Synthetic oligonucleotide
  Sense strand starting at position 2463 of SEQ ID NO: 1887535
aaggauguguuaguuauuc

SEQ ID NO: 2479313 - RNA, 19 nt, Artificial Sequence
  Description of Artificial Sequence: Synthetic oligonucleotide
  Antisense strand to SEQ ID NO: 2479312
gaauaacuaacacauccuu

SEQ ID NO: 2479314 - RNA, 19 nt, Artificial Sequence
  Description of Artificial Sequence: Synthetic oligonucleotide
  Sense strand starting at position 2465 of SEQ ID NO: 1887535
ggauguguuaguuauucca

SEQ ID NO: 2479315 - RNA, 19 nt, Artificial Sequence
  Description of Artificial Sequence: Synthetic oligonucleotide
  Antisense strand to SEQ ID NO: 2479314
uggaauaacuaacacaucc

SEQ ID NO: 2479316 - RNA, 19 nt, Artificial Sequence
  Description of Artificial Sequence: Synthetic oligonucleotide
  Sense strand starting at position 2528 of SEQ ID NO: 1887535
cuuagagauucuuuguagu

SEQ ID NO: 2479317 - RNA, 19 nt, Artificial Sequence
  Description of Artificial Sequence: Synthetic oligonucleotide
  Antisense strand to SEQ ID NO: 2479316
acuacaaagaaucucuaag

SEQ ID NO: 2479318 - RNA, 19 nt, Artificial Sequence
  Description of Artificial Sequence: Synthetic oligonucleotide
  Sense strand starting at position 2530 of SEQ ID NO: 1887535
uagagauucuuuguaguuu

SEQ ID NO: 2479319 - RNA, 19 nt, Artificial Sequence
  Description of Artificial Sequence: Synthetic oligonucleotide
  Antisense strand to SEQ ID NO: 2479318
aaacuacaaagaaucucua

SEQ ID NO: 2479320 - RNA, 19 nt, Artificial Sequence
  Description of Artificial Sequence: Synthetic oligonucleotide
  Sense strand starting at position 2544 of SEQ ID NO: 1887535
aguuuaucuguugaguauc

SEQ ID NO: 2479321 - RNA, 19 nt, Artificial Sequence
  Description of Artificial Sequence: Synthetic oligonucleotide
  Antisense strand to SEQ ID NO: 2479320
gauacucaacagauaaacu

SEQ ID NO: 2479322 - RNA, 19 nt, Artificial Sequence
  Description of Artificial Sequence: Synthetic oligonucleotide
  Sense strand starting at position 2725 of SEQ ID NO: 1887535
aggagacccucucauuuga

SEQ ID NO: 2479323 - RNA, 19 nt, Artificial Sequence
  Description of Artificial Sequence: Synthetic oligonucleotide
  Antisense strand to SEQ ID NO: 2479322
ucaaaugagagggucuccu

SEQ ID NO: 2479324 - RNA, 19 nt, Artificial Sequence
  Description of Artificial Sequence: Synthetic oligonucleotide
  Sense strand starting at position 2748 of SEQ ID NO: 1887535
ugggauauugcuggugauu

SEQ ID NO: 2479325 - RNA, 19 nt, Artificial Sequence
  Description of Artificial Sequence: Synthetic oligonucleotide
  Antisense strand to SEQ ID NO: 2479324
aaucaccagcaauauccca

SEQ ID NO: 2479326 - RNA, 19 nt, Artificial Sequence
  Description of Artificial Sequence: Synthetic oligonucleotide
  Sense strand starting at position 2751 of SEQ ID NO: 1887535
gauauugcuggugauuauc

SEQ ID NO: 2479327 - RNA, 19 nt, Artificial Sequence
  Description of Artificial Sequence: Synthetic oligonucleotide
  Antisense strand to SEQ ID NO: 2479326
gauaaucaccagcaauauc

SEQ ID NO: 2479328 - RNA, 19 nt, Artificial Sequence
  Description of Artificial Sequence: Synthetic oligonucleotide
  Sense strand starting at position 2775 of SEQ ID NO: 1887535
gcuggauauuuguuucugu

SEQ ID NO: 2479329 - RNA, 19 nt, Artificial Sequence
  Description of Artificial Sequence: Synthetic oligonucleotide
  Antisense strand to SEQ ID NO: 2479328
acagaaacaaauauccagc

SEQ ID NO: 2479330 - RNA, 19 nt, Artificial Sequence
  Description of Artificial Sequence: Synthetic oligonucleotide
  Sense strand starting at position 2776 of SEQ ID NO: 1887535
cuggauauuuguuucuguu

SEQ ID NO: 2479331 - RNA, 19 nt, Artificial Sequence
  Description of Artificial Sequence: Synthetic oligonucleotide
  Antisense strand to SEQ ID NO: 2479330
aacagaaacaaauauccag

SEQ ID NO: 2479332 - RNA, 19 nt, Artificial Sequence
  Description of Artificial Sequence: Synthetic oligonucleotide
  Sense strand starting at position 2778 of SEQ ID NO: 1887535
ggauauuuguuucuguuuc

SEQ ID NO: 2479333 - RNA, 19 nt, Artificial Sequence
  Description of Artificial Sequence: Synthetic oligonucleotide
  Antisense strand to SEQ ID NO: 2479332
gaaacagaaacaaauaucc

SEQ ID NO: 2479334 - RNA, 19 nt, Artificial Sequence
  Description of Artificial Sequence: Synthetic oligonucleotide
  Sense strand starting at position 2863 of SEQ ID NO: 1887535
auauaucuuucgucaacug

SEQ ID NO: 2479335 - RNA, 19 nt, Artificial Sequence
  Description of Artificial Sequence: Synthetic oligonucleotide
  Antisense strand to SEQ ID NO: 2479334
caguugacgaaagauauau

SEQ ID NO: 2479336 - RNA, 19 nt, Artificial Sequence
  Description of Artificial Sequence: Synthetic oligonucleotide
  Sense strand starting at position 3255 of SEQ ID NO: 1887535
caaaucauauacgugguaa

SEQ ID NO: 2479337 - RNA, 19 nt, Artificial Sequence
  Description of Artificial Sequence: Synthetic oligonucleotide
  Antisense strand to SEQ ID NO: 2479336
uuaccacguauaugauuug

SEQ ID NO: 2479338 - RNA, 19 nt, Artificial Sequence
  Description of Artificial Sequence: Synthetic oligonucleotide
  Sense strand starting at position 3257 of SEQ ID NO: 1887535
aaucauauacgugguaaga

SEQ ID NO: 2479339 - RNA, 19 nt, Artificial Sequence
  Description of Artificial Sequence: Synthetic oligonucleotide
  Antisense strand to SEQ ID NO: 2479338
ucuuaccacguauaugauu

SEQ ID NO: 2479340 - RNA, 19 nt, Artificial Sequence
  Description of Artificial Sequence: Synthetic oligonucleotide
  Sense strand starting at position 3273 of SEQ ID NO: 1887535
agaggcuuguacuccuaau

SEQ ID NO: 2479341 - RNA, 19 nt, Artificial Sequence
  Description of Artificial Sequence: Synthetic oligonucleotide
  Antisense strand to SEQ ID NO: 2479340
auuaggaguacaagccucu

SEQ ID NO: 2479342 - RNA, 19 nt, Artificial Sequence
  Description of Artificial Sequence: Synthetic oligonucleotide
  Sense strand starting at position 3385 of SEQ ID NO: 1887535
auggucaauuugcaaacaa

SEQ ID NO: 2479343 - RNA, 19 nt, Artificial Sequence
  Description of Artificial Sequence: Synthetic oligonucleotide
  Antisense strand to SEQ ID NO: 2479342
uuguuugcaaauugaccau

SEQ ID NO: 2479344 - RNA, 19 nt, Artificial Sequence
  Description of Artificial Sequence: Synthetic oligonucleotide
  Sense strand starting at position 3761 of SEQ ID NO: 1887535
uccaaaugcccaggugauu

SEQ ID NO: 2479345 - RNA, 19 nt, Artificial Sequence
  Description of Artificial Sequence: Synthetic oligonucleotide
  Antisense strand to SEQ ID NO: 2479344
aaucaccugggcauuugga

SEQ ID NO: 2479346 - RNA, 19 nt, Artificial Sequence
  Description of Artificial Sequence: Synthetic oligonucleotide
  Sense strand starting at position 3772 of SEQ ID NO: 1887535
aggugauuaauggguaaac

SEQ ID NO: 2479347 - RNA, 19 nt, Artificial Sequence
  Description of Artificial Sequence: Synthetic oligonucleotide
  Antisense strand to SEQ ID NO: 2479346
guuuacccauuaaucaccu

SEQ ID NO: 2479348 - RNA, 19 nt, Artificial Sequence
  Description of Artificial Sequence: Synthetic oligonucleotide
  Sense strand starting at position 3773 of SEQ ID NO: 1887535
ggugauuaauggguaaaca

SEQ ID NO: 2479349 - RNA, 19 nt, Artificial Sequence
  Description of Artificial Sequence: Synthetic oligonucleotide
  Antisense strand to SEQ ID NO: 2479348
uguuuacccauuaaucacc

SEQ ID NO: 2479350 - RNA, 19 nt, Artificial Sequence
  Description of Artificial Sequence: Synthetic oligonucleotide
  Sense strand starting at position 3795 of SEQ ID NO: 1887535
gcgguacauccauauaaua

SEQ ID NO: 2479351 - RNA, 19 nt, Artificial Sequence
  Description of Artificial Sequence: Synthetic oligonucleotide
  Antisense strand to SEQ ID NO: 2479350
uauuauauggauguaccgc

SEQ ID NO: 2479352 - RNA, 19 nt, Artificial Sequence
  Description of Artificial Sequence: Synthetic oligonucleotide
  Sense strand starting at position 369 of SEQ ID NO: 1887536
gcagaugcuugcccaggaa

SEQ ID NO: 2479353 - RNA, 19 nt, Artificial Sequence
  Description of Artificial Sequence: Synthetic oligonucleotide
  Antisense strand to SEQ ID NO: 2479352
uuccugggcaagcaucugc

SEQ ID NO: 2479354 - RNA, 19 nt, Artificial Sequence
  Description of Artificial Sequence: Synthetic oligonucleotide
  Sense strand starting at position 567 of SEQ ID NO: 1887536
cugugaugccauuggcaag

SEQ ID NO: 2479355 - RNA, 19 nt, Artificial Sequence
  Description of Artificial Sequence: Synthetic oligonucleotide
  Antisense strand to SEQ ID NO: 2479354
cuugccaauggcaucacag

SEQ ID NO: 2479356 - RNA, 19 nt, Artificial Sequence
  Description of Artificial Sequence: Synthetic oligonucleotide
  Sense strand starting at position 1226 of SEQ ID NO: 1887536
gggucugugcugggagaga

SEQ ID NO: 2479357 - RNA, 19 nt, Artificial Sequence
  Description of Artificial Sequence: Synthetic oligonucleotide
  Antisense strand to SEQ ID NO: 2479356
ucucucccagcacagaccc

SEQ ID NO: 2479358 - RNA, 19 nt, Artificial Sequence
  Description of Artificial Sequence: Synthetic oligonucleotide
  Sense strand starting at position 1302 of SEQ ID NO: 1887536
aagucagaguguucccuga

SEQ ID NO: 2479359 - RNA, 19 nt, Artificial Sequence
  Description of Artificial Sequence: Synthetic oligonucleotide
  Antisense strand to SEQ ID NO: 2479358
ucagggaacacucugacuu

SEQ ID NO: 2479360 - RNA, 19 nt, Artificial Sequence
  Description of Artificial Sequence: Synthetic oligonucleotide
  Sense strand starting at position 1306 of SEQ ID NO: 1887536
cagaguguucccugaggau

SEQ ID NO: 2479361 - RNA, 19 nt, Artificial Sequence
  Description of Artificial Sequence: Synthetic oligonucleotide
  Antisense strand to SEQ ID NO: 2479360
auccucagggaacacucug

SEQ ID NO: 2479362 - RNA, 19 nt, Artificial Sequence
  Description of Artificial Sequence: Synthetic oligonucleotide
  Sense strand starting at position 1319 of SEQ ID NO: 1887536
gaggaucaguccugggaug

SEQ ID NO: 2479363 - RNA, 19 nt, Artificial Sequence
  Description of Artificial Sequence: Synthetic oligonucleotide
  Antisense strand to SEQ ID NO: 2479362
caucccaggacugauccuc

SEQ ID NO: 2479364 - RNA, 19 nt, Artificial Sequence
  Description of Artificial Sequence: Synthetic oligonucleotide
  Sense strand starting at position 1320 of SEQ ID NO: 1887536
aggaucaguccugggauga

SEQ ID NO: 2479365 - RNA, 19 nt, Artificial Sequence
  Description of Artificial Sequence: Synthetic oligonucleotide
  Antisense strand to SEQ ID NO: 2479364
ucaucccaggacugauccu

SEQ ID NO: 2479366 - RNA, 19 nt, Artificial Sequence
  Description of Artificial Sequence: Synthetic oligonucleotide
  Sense strand starting at position 1321 of SEQ ID NO: 1887536
ggaucaguccugggaugac

SEQ ID NO: 2479367 - RNA, 19 nt, Artificial Sequence
  Description of Artificial Sequence: Synthetic oligonucleotide
  Antisense strand to SEQ ID NO: 2479366
gucaucccaggacugaucc

SEQ ID NO: 2479368 - RNA, 19 nt, Artificial Sequence
  Description of Artificial Sequence: Synthetic oligonucleotide
  Sense strand starting at position 1388 of SEQ ID NO: 1887536
ugaccuggcccucacuaaa

SEQ ID NO: 2479369 - RNA, 19 nt, Artificial Sequence
  Description of Artificial Sequence: Synthetic oligonucleotide
  Antisense strand to SEQ ID NO: 2479368
uuuagugagggccagguca

SEQ ID NO: 2479370 - RNA, 19 nt, Artificial Sequence
  Description of Artificial Sequence: Synthetic oligonucleotide
  Sense strand starting at position 1844 of SEQ ID NO: 1887536
aggccucaucaaugagacu

SEQ ID NO: 2479371 - RNA, 19 nt, Artificial Sequence
  Description of Artificial Sequence: Synthetic oligonucleotide
  Antisense strand to SEQ ID NO: 2479370
agucucauugaugaggccu

SEQ ID NO: 2479372 - RNA, 19 nt, Artificial Sequence
  Description of Artificial Sequence: Synthetic oligonucleotide
  Sense strand starting at position 1992 of SEQ ID NO: 1887536
acgagauucugacuggcca

SEQ ID NO: 2479373 - RNA, 19 nt, Artificial Sequence
  Description of Artificial Sequence: Synthetic oligonucleotide
  Antisense strand to SEQ ID NO: 2479372
uggccagucagaaucucgu

SEQ ID NO: 2479374 - RNA, 19 nt, Artificial Sequence
  Description of Artificial Sequence: Synthetic oligonucleotide
  Sense strand starting at position 2252 of SEQ ID NO: 1887536
cuggccagguccuuaauga

SEQ ID NO: 2479375 - RNA, 19 nt, Artificial Sequence
  Description of Artificial Sequence: Synthetic oligonucleotide
  Antisense strand to SEQ ID NO: 2479374
ucauuaaggaccuggccag

SEQ ID NO: 2479376 - RNA, 19 nt, Artificial Sequence
  Description of Artificial Sequence: Synthetic oligonucleotide
  Sense strand starting at position 2423 of SEQ ID NO: 1887536
guccuuaaccgacaagguu

SEQ ID NO: 2479377 - RNA, 19 nt, Artificial Sequence
  Description of Artificial Sequence: Synthetic oligonucleotide
  Antisense strand to SEQ ID NO: 2479376
aaccuugucgguuaaggac

SEQ ID NO: 2479378 - RNA, 19 nt, Artificial Sequence
  Description of Artificial Sequence: Synthetic oligonucleotide
  Sense strand starting at position 2431 of SEQ ID NO: 1887536
ccgacaagguucugacuga

SEQ ID NO: 2479379 - RNA, 19 nt, Artificial Sequence
  Description of Artificial Sequence: Synthetic oligonucleotide
  Antisense strand to SEQ ID NO: 2479378
ucagucagaaccuugucgg

SEQ ID NO: 2479380 - RNA, 19 nt, Artificial Sequence
  Description of Artificial Sequence: Synthetic oligonucleotide
  Sense strand starting at position 2501 of SEQ ID NO: 1887536
cccagugauccaggccuuu

SEQ ID NO: 2479381 - RNA, 19 nt, Artificial Sequence
  Description of Artificial Sequence: Synthetic oligonucleotide
  Antisense strand to SEQ ID NO: 2479380
aaaggccuggaucacuggg

SEQ ID NO: 2479382 - RNA, 19 nt, Artificial Sequence
  Description of Artificial Sequence: Synthetic oligonucleotide
  Sense strand starting at position 2569 of SEQ ID NO: 1887536
ccaagucucucugaauaga

SEQ ID NO: 2479383 - RNA, 19 nt, Artificial Sequence
  Description of Artificial Sequence: Synthetic oligonucleotide
  Antisense strand to SEQ ID NO: 2479382
ucuauucagagagacuugg

SEQ ID NO: 2479384 - RNA, 19 nt, Artificial Sequence
  Description of Artificial Sequence: Synthetic oligonucleotide
  Sense strand starting at position 2988 of SEQ ID NO: 1887536
gugacaagguuccaacuga

SEQ ID NO: 2479385 - RNA, 19 nt, Artificial Sequence
  Description of Artificial Sequence: Synthetic oligonucleotide
  Antisense strand to SEQ ID NO: 2479384
ucaguuggaaccuugucac

SEQ ID NO: 2479386 - RNA, 19 nt, Artificial Sequence
  Description of Artificial Sequence: Synthetic oligonucleotide
  Sense strand starting at position 3003 of SEQ ID NO: 1887536
cugaccagguccuuaauga

SEQ ID NO: 2479387 - RNA, 19 nt, Artificial Sequence
  Description of Artificial Sequence: Synthetic oligonucleotide
  Antisense strand to SEQ ID NO: 2479386
ucauuaaggaccuggucag

SEQ ID NO: 2479388 - RNA, 19 nt, Artificial Sequence
  Description of Artificial Sequence: Synthetic oligonucleotide
  Sense strand starting at position 3326 of SEQ ID NO: 1887536
cugaccauguccuuacuga

SEQ ID NO: 2479389 - RNA, 19 nt, Artificial Sequence
  Description of Artificial Sequence: Synthetic oligonucleotide
  Antisense strand to SEQ ID NO: 2479388
ucaguaaggacauggucag

SEQ ID NO: 2479390 - RNA, 19 nt, Artificial Sequence
  Description of Artificial Sequence: Synthetic oligonucleotide
  Sense strand starting at position 3327 of SEQ ID NO: 1887536
ugaccauguccuuacugaa

SEQ ID NO: 2479391 - RNA, 19 nt, Artificial Sequence
  Description of Artificial Sequence: Synthetic oligonucleotide
  Antisense strand to SEQ ID NO: 2479390
uucaguaaggacaugguca

SEQ ID NO: 2479392 - RNA, 19 nt, Artificial Sequence
  Description of Artificial Sequence: Synthetic oligonucleotide
  Sense strand starting at position 3447 of SEQ ID NO: 1887536
ccagguuuccaaugacuag

SEQ ID NO: 2479393 - RNA, 19 nt, Artificial Sequence
  Description of Artificial Sequence: Synthetic oligonucleotide
  Antisense strand to SEQ ID NO: 2479392
cuagucauuggaaaccugg

SEQ ID NO: 2479394 - RNA, 19 nt, Artificial Sequence
  Description of Artificial Sequence: Synthetic oligonucleotide
  Sense strand starting at position 3533 of SEQ ID NO: 1887536
ugaccagguccucacugau

SEQ ID NO: 2479395 - RNA, 19 nt, Artificial Sequence
  Description of Artificial Sequence: Synthetic oligonucleotide
  Antisense strand to SEQ ID NO: 2479394
aucagugaggaccugguca

SEQ ID NO: 2479396 - RNA, 19 nt, Artificial Sequence
  Description of Artificial Sequence: Synthetic oligonucleotide
  Sense strand starting at position 3551 of SEQ ID NO: 1887536
ugaggugccaagugacuaa

SEQ ID NO: 2479397 - RNA, 19 nt, Artificial Sequence
  Description of Artificial Sequence: Synthetic oligonucleotide
  Antisense strand to SEQ ID NO: 2479396
uuagucacuuggcaccuca

SEQ ID NO: 2479398 - RNA, 19 nt, Artificial Sequence
  Description of Artificial Sequence: Synthetic oligonucleotide
  Sense strand starting at position 3558 of SEQ ID NO: 1887536
ccaagugacuaaguccuua

SEQ ID NO: 2479399 - RNA, 19 nt, Artificial Sequence
  Description of Artificial Sequence: Synthetic oligonucleotide
  Antisense strand to SEQ ID NO: 2479398
uaaggacuuagucacuugg

SEQ ID NO: 2479400 - RNA, 19 nt, Artificial Sequence
  Description of Artificial Sequence: Synthetic oligonucleotide
  Sense strand starting at position 3562 of SEQ ID NO: 1887536
gugacuaaguccuuaacuc

SEQ ID NO: 2479401 - RNA, 19 nt, Artificial Sequence
  Description of Artificial Sequence: Synthetic oligonucleotide
  Antisense strand to SEQ ID NO: 2479400
gaguuaaggacuuagucac

SEQ ID NO: 2479402 - RNA, 19 nt, Artificial Sequence
  Description of Artificial Sequence: Synthetic oligonucleotide
  Sense strand starting at position 3750 of SEQ ID NO: 1887536
cccauugacuaggacacau

SEQ ID NO: 2479403 - RNA, 19 nt, Artificial Sequence
  Description of Artificial Sequence: Synthetic oligonucleotide
  Antisense strand to SEQ ID NO: 2479402
auguguccuagucaauggg

SEQ ID NO: 2479404 - RNA, 19 nt, Artificial Sequence
  Description of Artificial Sequence: Synthetic oligonucleotide
  Sense strand starting at position 3768 of SEQ ID NO: 1887536
uuguuuaggucccauugau

SEQ ID NO: 2479405 - RNA, 19 nt, Artificial Sequence
  Description of Artificial Sequence: Synthetic oligonucleotide
  Antisense strand to SEQ ID NO: 2479404
aucaaugggaccuaaacaa

SEQ ID NO: 2479406 - RNA, 19 nt, Artificial Sequence
  Description of Artificial Sequence: Synthetic oligonucleotide
  Sense strand starting at position 3891 of SEQ ID NO: 1887536
ccacaauguccagguccua

SEQ ID NO: 2479407 - RNA, 19 nt, Artificial Sequence
  Description of Artificial Sequence: Synthetic oligonucleotide
  Antisense strand to SEQ ID NO: 2479406
uaggaccuggacauugugg

SEQ ID NO: 2479408 - RNA, 19 nt, Artificial Sequence
  Description of Artificial Sequence: Synthetic oligonucleotide
  Sense strand starting at position 3973 of SEQ ID NO: 1887536
aagccauaaggucgaggua

SEQ ID NO: 2479409 - RNA, 19 nt, Artificial Sequence
  Description of Artificial Sequence: Synthetic oligonucleotide
  Antisense strand to SEQ ID NO: 2479408
uaccucgaccuuauggcuu

SEQ ID NO: 2479410 - RNA, 19 nt, Artificial Sequence
  Description of Artificial Sequence: Synthetic oligonucleotide
  Sense strand starting at position 13 of SEQ ID NO: 1887537
cagcuagggcagugaugau

SEQ ID NO: 2479411 - RNA, 19 nt, Artificial Sequence
  Description of Artificial Sequence: Synthetic oligonucleotide
  Antisense strand to SEQ ID NO: 2479410
aucaucacugcccuagcug

SEQ ID NO: 2479412 - RNA, 19 nt, Artificial Sequence
  Description of Artificial Sequence: Synthetic oligonucleotide
  Sense strand starting at position 223 of SEQ ID NO: 1887537
ggcguugggcucugugaaa

SEQ ID NO: 2479413 - RNA, 19 nt, Artificial Sequence
  Description of Artificial Sequence: Synthetic oligonucleotide
  Antisense strand to SEQ ID NO: 2479412
uuucacagagcccaacgcc

SEQ ID NO: 2479414 - RNA, 19 nt, Artificial Sequence
  Description of Artificial Sequence: Synthetic oligonucleotide
  Sense strand starting at position 224 of SEQ ID NO: 1887537
gcguugggcucugugaaag

SEQ ID NO: 2479415 - RNA, 19 nt, Artificial Sequence
  Description of Artificial Sequence: Synthetic oligonucleotide
  Antisense strand to SEQ ID NO: 2479414
cuuucacagagcccaacgc

SEQ ID NO: 2479416 - RNA, 19 nt, Artificial Sequence
  Description of Artificial Sequence: Synthetic oligonucleotide
  Sense strand starting at position 776 of SEQ ID NO: 1887537
gcagaugcuugcccaggaa

SEQ ID NO: 2479417 - RNA, 19 nt, Artificial Sequence
  Description of Artificial Sequence: Synthetic oligonucleotide
  Antisense strand to SEQ ID NO: 2479416
uuccugggcaagcaucugc

SEQ ID NO: 2479418 - RNA, 19 nt, Artificial Sequence
  Description of Artificial Sequence: Synthetic oligonucleotide
  Sense strand starting at position 974 of SEQ ID NO: 1887537
cugugaugccauuggcaag

SEQ ID NO: 2479419 - RNA, 19 nt, Artificial Sequence
  Description of Artificial Sequence: Synthetic oligonucleotide
  Antisense strand to SEQ ID NO: 2479418
cuugccaauggcaucacag

SEQ ID NO: 2479420 - RNA, 19 nt, Artificial Sequence
  Description of Artificial Sequence: Synthetic oligonucleotide
  Sense strand starting at position 1633 of SEQ ID NO: 1887537
gggucugugcugggagaga

SEQ ID NO: 2479421 - RNA, 19 nt, Artificial Sequence
  Description of Artificial Sequence: Synthetic oligonucleotide
  Antisense strand to SEQ ID NO: 2479420
ucucucccagcacagaccc

SEQ ID NO: 2479422 - RNA, 19 nt, Artificial Sequence
  Description of Artificial Sequence: Synthetic oligonucleotide
  Sense strand starting at position 1709 of SEQ ID NO: 1887537
aagucagaguguucccuga

SEQ ID NO: 2479423 - RNA, 19 nt, Artificial Sequence
  Description of Artificial Sequence: Synthetic oligonucleotide
  Antisense strand to SEQ ID NO: 2479422
ucagggaacacucugacuu

SEQ ID NO: 2479424 - RNA, 19 nt, Artificial Sequence
  Description of Artificial Sequence: Synthetic oligonucleotide
  Sense strand starting at position 1713 of SEQ ID NO: 1887537
cagaguguucccugaggau

SEQ ID NO: 2479425 - RNA, 19 nt, Artificial Sequence
  Description of Artificial Sequence: Synthetic oligonucleotide
  Antisense strand to SEQ ID NO: 2479424
auccucagggaacacucug

SEQ ID NO: 2479426 - RNA, 19 nt, Artificial Sequence
  Description of Artificial Sequence: Synthetic oligonucleotide
  Sense strand starting at position 1726 of SEQ ID NO: 1887537
gaggaucaguccugggaug

SEQ ID NO: 2479427 - RNA, 19 nt, Artificial Sequence
  Description of Artificial Sequence: Synthetic oligonucleotide
  Antisense strand to SEQ ID NO: 2479426
caucccaggacugauccuc

SEQ ID NO: 2479428 - RNA, 19 nt, Artificial Sequence
  Description of Artificial Sequence: Synthetic oligonucleotide
  Sense strand starting at position 1727 of SEQ ID NO: 1887537
aggaucaguccugggauga

SEQ ID NO: 2479429 - RNA, 19 nt, Artificial Sequence
  Description of Artificial Sequence: Synthetic oligonucleotide
  Antisense strand to SEQ ID NO: 2479428
ucaucccaggacugauccu

SEQ ID NO: 2479430 - RNA, 19 nt, Artificial Sequence
  Description of Artificial Sequence: Synthetic oligonucleotide
  Sense strand starting at position 1728 of SEQ ID NO: 1887537
ggaucaguccugggaugac

SEQ ID NO: 2479431 - RNA, 19 nt, Artificial Sequence
  Description of Artificial Sequence: Synthetic oligonucleotide
  Antisense strand to SEQ ID NO: 2479430
gucaucccaggacugaucc

SEQ ID NO: 2479432 - RNA, 19 nt, Artificial Sequence
  Description of Artificial Sequence: Synthetic oligonucleotide
  Sense strand starting at position 1795 of SEQ ID NO: 1887537
ugaccuggcccucacuaaa

SEQ ID NO: 2479433 - RNA, 19 nt, Artificial Sequence
  Description of Artificial Sequence: Synthetic oligonucleotide
  Antisense strand to SEQ ID NO: 2479432
uuuagugagggccagguca

SEQ ID NO: 2479434 - RNA, 19 nt, Artificial Sequence
  Description of Artificial Sequence: Synthetic oligonucleotide
  Sense strand starting at position 2251 of SEQ ID NO: 1887537
aggccucaucaaugagacu

SEQ ID NO: 2479435 - RNA, 19 nt, Artificial Sequence
  Description of Artificial Sequence: Synthetic oligonucleotide
  Antisense strand to SEQ ID NO: 2479434
agucucauugaugaggccu

SEQ ID NO: 2479436 - RNA, 19 nt, Artificial Sequence
  Description of Artificial Sequence: Synthetic oligonucleotide
  Sense strand starting at position 2399 of SEQ ID NO: 1887537
acgagauucugacuggcca

SEQ ID NO: 2479437 - RNA, 19 nt, Artificial Sequence
  Description of Artificial Sequence: Synthetic oligonucleotide
  Antisense strand to SEQ ID NO: 2479436
uggccagucagaaucucgu

SEQ ID NO: 2479438 - RNA, 19 nt, Artificial Sequence
  Description of Artificial Sequence: Synthetic oligonucleotide
  Sense strand starting at position 2659 of SEQ ID NO: 1887537
cuggccagguccuuaauga

SEQ ID NO: 2479439 - RNA, 19 nt, Artificial Sequence
  Description of Artificial Sequence: Synthetic oligonucleotide
  Antisense strand to SEQ ID NO: 2479438
ucauuaaggaccuggccag

SEQ ID NO: 2479440 - RNA, 19 nt, Artificial Sequence
  Description of Artificial Sequence: Synthetic oligonucleotide
  Sense strand starting at position 2830 of SEQ ID NO: 1887537
guccuuaaccgacaagguu

SEQ ID NO: 2479441 - RNA, 19 nt, Artificial Sequence
  Description of Artificial Sequence: Synthetic oligonucleotide
  Antisense strand to SEQ ID NO: 2479440
aaccuugucgguuaaggac

SEQ ID NO: 2479442 - RNA, 19 nt, Artificial Sequence
  Description of Artificial Sequence: Synthetic oligonucleotide
  Sense strand starting at position 2838 of SEQ ID NO: 1887537
ccgacaagguucugacuga

SEQ ID NO: 2479443 - RNA, 19 nt, Artificial Sequence
  Description of Artificial Sequence: Synthetic oligonucleotide
  Antisense strand to SEQ ID NO: 2479442
ucagucagaaccuugucgg

SEQ ID NO: 2479444 - RNA, 19 nt, Artificial Sequence
  Description of Artificial Sequence: Synthetic oligonucleotide
  Sense strand starting at position 2908 of SEQ ID NO: 1887537
cccagugauccaggccuuu

SEQ ID NO: 2479445 - RNA, 19 nt, Artificial Sequence
  Description of Artificial Sequence: Synthetic oligonucleotide
  Antisense strand to SEQ ID NO: 2479444
aaaggccuggaucacuggg

SEQ ID NO: 2479446 - RNA, 19 nt, Artificial Sequence
  Description of Artificial Sequence: Synthetic oligonucleotide
  Sense strand starting at position 2976 of SEQ ID NO: 1887537
ccaagucucucugaauaga

SEQ ID NO: 2479447 - RNA, 19 nt, Artificial Sequence
  Description of Artificial Sequence: Synthetic oligonucleotide
  Antisense strand to SEQ ID NO: 2479446
ucuauucagagagacuugg

SEQ ID NO: 2479448 - RNA, 19 nt, Artificial Sequence
  Description of Artificial Sequence: Synthetic oligonucleotide
  Sense strand starting at position 3395 of SEQ ID NO: 1887537
gugacaagguuccaacuga

SEQ ID NO: 2479449 - RNA, 19 nt, Artificial Sequence
  Description of Artificial Sequence: Synthetic oligonucleotide
  Antisense strand to SEQ ID NO: 2479448
ucaguuggaaccuugucac

SEQ ID NO: 2479450 - RNA, 19 nt, Artificial Sequence
  Description of Artificial Sequence: Synthetic oligonucleotide
  Sense strand starting at position 3410 of SEQ ID NO: 1887537
cugaccagguccuuaauga

SEQ ID NO: 2479451 - RNA, 19 nt, Artificial Sequence
  Description of Artificial Sequence: Synthetic oligonucleotide
  Antisense strand to SEQ ID NO: 2479450
ucauuaaggaccuggucag

SEQ ID NO: 2479452 - RNA, 19 nt, Artificial Sequence
  Description of Artificial Sequence: Synthetic oligonucleotide
  Sense strand starting at position 3733 of SEQ ID NO: 1887537
cugaccauguccuuacuga

SEQ ID NO: 2479453 - RNA, 19 nt, Artificial Sequence
  Description of Artificial Sequence: Synthetic oligonucleotide
  Antisense strand to SEQ ID NO: 2479452
ucaguaaggacauggucag

SEQ ID NO: 2479454 - RNA, 19 nt, Artificial Sequence
  Description of Artificial Sequence: Synthetic oligonucleotide
  Sense strand starting at position 3734 of SEQ ID NO: 1887537
ugaccauguccuuacugaa

SEQ ID NO: 2479455 - RNA, 19 nt, Artificial Sequence
  Description of Artificial Sequence: Synthetic oligonucleotide
  Antisense strand to SEQ ID NO: 2479454
uucaguaaggacaugguca

SEQ ID NO: 2479456 - RNA, 19 nt, Artificial Sequence
  Description of Artificial Sequence: Synthetic oligonucleotide
  Sense strand starting at position 3854 of SEQ ID NO: 1887537
ccagguuuccaaugacuag

SEQ ID NO: 2479457 - RNA, 19 nt, Artificial Sequence
  Description of Artificial Sequence: Synthetic oligonucleotide
  Antisense strand to SEQ ID NO: 2479456
cuagucauuggaaaccugg

SEQ ID NO: 2479458 - RNA, 19 nt, Artificial Sequence
  Description of Artificial Sequence: Synthetic oligonucleotide
  Sense strand starting at position 3940 of SEQ ID NO: 1887537
ugaccagguccucacugau

SEQ ID NO: 2479459 - RNA, 19 nt, Artificial Sequence
  Description of Artificial Sequence: Synthetic oligonucleotide
  Antisense strand to SEQ ID NO: 2479458
aucagugaggaccugguca

SEQ ID NO: 2479460 - RNA, 19 nt, Artificial Sequence
  Description of Artificial Sequence: Synthetic oligonucleotide
  Sense strand starting at position 3958 of SEQ ID NO: 1887537
ugaggugccaagugacuaa

SEQ ID NO: 2479461 - RNA, 19 nt, Artificial Sequence
  Description of Artificial Sequence: Synthetic oligonucleotide
  Antisense strand to SEQ ID NO: 2479460
uuagucacuuggcaccuca

SEQ ID NO: 2479462 - RNA, 19 nt, Artificial Sequence
  Description of Artificial Sequence: Synthetic oligonucleotide
  Sense strand starting at position 3965 of SEQ ID NO: 1887537
ccaagugacuaaguccuua

SEQ ID NO: 2479463 - RNA, 19 nt, Artificial Sequence
  Description of Artificial Sequence: Synthetic oligonucleotide
  Antisense strand to SEQ ID NO: 2479462
uaaggacuuagucacuugg

SEQ ID NO: 2479464 - RNA, 19 nt, Artificial Sequence
  Description of Artificial Sequence: Synthetic oligonucleotide
  Sense strand starting at position 3969 of SEQ ID NO: 1887537
gugacuaaguccuuaacuc

SEQ ID NO: 2479465 - RNA, 19 nt, Artificial Sequence
  Description of Artificial Sequence: Synthetic oligonucleotide
  Antisense strand to SEQ ID NO: 2479464
gaguuaaggacuuagucac

SEQ ID NO: 2479466 - RNA, 19 nt, Artificial Sequence
  Description of Artificial Sequence: Synthetic oligonucleotide
  Sense strand starting at position 1318 of SEQ ID NO: 1887538
cuuuguuuauguuuccuaa

SEQ ID NO: 2479467 - RNA, 19 nt, Artificial Sequence
  Description of Artificial Sequence: Synthetic oligonucleotide
  Antisense strand to SEQ ID NO: 2479466
uuaggaaacauaaacaaag

SEQ ID NO: 2479468 - RNA, 19 nt, Artificial Sequence
  Description of Artificial Sequence: Synthetic oligonucleotide
  Sense strand starting at position 1662 of SEQ ID NO: 1887538
ucccaauugucauauggcu

SEQ ID NO: 2479469 - RNA, 19 nt, Artificial Sequence
  Description of Artificial Sequence: Synthetic oligonucleotide
  Antisense strand to SEQ ID NO: 2479468
agccauaugacaauuggga

SEQ ID NO: 2479470 - RNA, 19 nt, Artificial Sequence
  Description of Artificial Sequence: Synthetic oligonucleotide
  Sense strand starting at position 1668 of SEQ ID NO: 1887538
uugucauauggcugcucuu

SEQ ID NO: 2479471 - RNA, 19 nt, Artificial Sequence
  Description of Artificial Sequence: Synthetic oligonucleotide
  Antisense strand to SEQ ID NO: 2479470
aagagcagccauaugacaa

SEQ ID NO: 2479472 - RNA, 19 nt, Artificial Sequence
  Description of Artificial Sequence: Synthetic oligonucleotide
  Sense strand starting at position 1671 of SEQ ID NO: 1887538
ucauauggcugcucuuaaa

SEQ ID NO: 2479473 - RNA, 19 nt, Artificial Sequence
  Description of Artificial Sequence: Synthetic oligonucleotide
  Antisense strand to SEQ ID NO: 2479472
uuuaagagcagccauauga

SEQ ID NO: 2479474 - RNA, 19 nt, Artificial Sequence
  Description of Artificial Sequence: Synthetic oligonucleotide
  Sense strand starting at position 1733 of SEQ ID NO: 1887538
cauuguaauugauggguau

SEQ ID NO: 2479475 - RNA, 19 nt, Artificial Sequence
  Description of Artificial Sequence: Synthetic oligonucleotide
  Antisense strand to SEQ ID NO: 2479474
auacccaucaauuacaaug

SEQ ID NO: 2479476 - RNA, 19 nt, Artificial Sequence
  Description of Artificial Sequence: Synthetic oligonucleotide
  Sense strand starting at position 1734 of SEQ ID NO: 1887538
auuguaauugauggguaua

SEQ ID NO: 2479477 - RNA, 19 nt, Artificial Sequence
  Description of Artificial Sequence: Synthetic oligonucleotide
  Antisense strand to SEQ ID NO: 2479476
uauacccaucaauuacaau

SEQ ID NO: 2479478 - RNA, 19 nt, Artificial Sequence
  Description of Artificial Sequence: Synthetic oligonucleotide
  Sense strand starting at position 1735 of SEQ ID NO: 1887538
uuguaauugauggguauaa

SEQ ID NO: 2479479 - RNA, 19 nt, Artificial Sequence
  Description of Artificial Sequence: Synthetic oligonucleotide
  Antisense strand to SEQ ID NO: 2479478
uuauacccaucaauuacaa

SEQ ID NO: 2479480 - RNA, 19 nt, Artificial Sequence
  Description of Artificial Sequence: Synthetic oligonucleotide
  Sense strand starting at position 1736 of SEQ ID NO: 1887538
uguaauugauggguauaac

SEQ ID NO: 2479481 - RNA, 19 nt, Artificial Sequence
  Description of Artificial Sequence: Synthetic oligonucleotide
  Antisense strand to SEQ ID NO: 2479480
guuauacccaucaauuaca

SEQ ID NO: 2479482 - RNA, 19 nt, Artificial Sequence
  Description of Artificial Sequence: Synthetic oligonucleotide
  Sense strand starting at position 1746 of SEQ ID NO: 1887538
ggguauaacucuuauguuu

SEQ ID NO: 2479483 - RNA, 19 nt, Artificial Sequence
  Description of Artificial Sequence: Synthetic oligonucleotide
  Antisense strand to SEQ ID NO: 2479482
aaacauaagaguuauaccc

SEQ ID NO: 2479484 - RNA, 19 nt, Artificial Sequence
  Description of Artificial Sequence: Synthetic oligonucleotide
  Sense strand starting at position 1989 of SEQ ID NO: 1887538
uugugacaagacugcuuua

SEQ ID NO: 2479485 - RNA, 19 nt, Artificial Sequence
  Description of Artificial Sequence: Synthetic oligonucleotide
  Antisense strand to SEQ ID NO: 2479484
uaaagcagucuugucacaa

SEQ ID NO: 2479486 - RNA, 19 nt, Artificial Sequence
  Description of Artificial Sequence: Synthetic oligonucleotide
  Sense strand starting at position 1992 of SEQ ID NO: 1887538
ugacaagacugcuuuagag

SEQ ID NO: 2479487 - RNA, 19 nt, Artificial Sequence
  Description of Artificial Sequence: Synthetic oligonucleotide
  Antisense strand to SEQ ID NO: 2479486
cucuaaagcagucuuguca

SEQ ID NO: 2479488 - RNA, 19 nt, Artificial Sequence
  Description of Artificial Sequence: Synthetic oligonucleotide
  Sense strand starting at position 1994 of SEQ ID NO: 1887538
acaagacugcuuuagaggu

SEQ ID NO: 2479489 - RNA, 19 nt, Artificial Sequence
  Description of Artificial Sequence: Synthetic oligonucleotide
  Antisense strand to SEQ ID NO: 2479488
accucuaaagcagucuugu

SEQ ID NO: 2479490 - RNA, 19 nt, Artificial Sequence
  Description of Artificial Sequence: Synthetic oligonucleotide
  Sense strand starting at position 2010 of SEQ ID NO: 1887538
gguggugcugugugaguuu

SEQ ID NO: 2479491 - RNA, 19 nt, Artificial Sequence
  Description of Artificial Sequence: Synthetic oligonucleotide
  Antisense strand to SEQ ID NO: 2479490
aaacucacacagcaccacc

SEQ ID NO: 2479492 - RNA, 19 nt, Artificial Sequence
  Description of Artificial Sequence: Synthetic oligonucleotide
  Sense strand starting at position 2013 of SEQ ID NO: 1887538
ggugcugugugaguuucau

SEQ ID NO: 2479493 - RNA, 19 nt, Artificial Sequence
  Description of Artificial Sequence: Synthetic oligonucleotide
  Antisense strand to SEQ ID NO: 2479492
augaaacucacacagcacc

SEQ ID NO: 2479494 - RNA, 19 nt, Artificial Sequence
  Description of Artificial Sequence: Synthetic oligonucleotide
  Sense strand starting at position 2033 of SEQ ID NO: 1887538
aggccuuauugugugaugu

SEQ ID NO: 2479495 - RNA, 19 nt, Artificial Sequence
  Description of Artificial Sequence: Synthetic oligonucleotide
  Antisense strand to SEQ ID NO: 2479494
acaucacacaauaaggccu

SEQ ID NO: 2479496 - RNA, 19 nt, Artificial Sequence
  Description of Artificial Sequence: Synthetic oligonucleotide
  Sense strand starting at position 2034 of SEQ ID NO: 1887538
ggccuuauugugugauguu

SEQ ID NO: 2479497 - RNA, 19 nt, Artificial Sequence
  Description of Artificial Sequence: Synthetic oligonucleotide
  Antisense strand to SEQ ID NO: 2479496
aacaucacacaauaaggcc

SEQ ID NO: 2479498 - RNA, 19 nt, Artificial Sequence
  Description of Artificial Sequence: Synthetic oligonucleotide
  Sense strand starting at position 2050 of SEQ ID NO: 1887538
guuaacagccaucaaugau

SEQ ID NO: 2479499 - RNA, 19 nt, Artificial Sequence
  Description of Artificial Sequence: Synthetic oligonucleotide
  Antisense strand to SEQ ID NO: 2479498
aucauugauggcuguuaac

SEQ ID NO: 2479500 - RNA, 19 nt, Artificial Sequence
  Description of Artificial Sequence: Synthetic oligonucleotide
  Sense strand starting at position 2107 of SEQ ID NO: 1887538
gggauagucuagucucauc

SEQ ID NO: 2479501 - RNA, 19 nt, Artificial Sequence
  Description of Artificial Sequence: Synthetic oligonucleotide
  Antisense strand to SEQ ID NO: 2479500
gaugagacuagacuauccc

SEQ ID NO: 2479502 - RNA, 19 nt, Artificial Sequence
  Description of Artificial Sequence: Synthetic oligonucleotide
  Sense strand starting at position 2145 of SEQ ID NO: 1887538
gcuggaauaugcucauaaa

SEQ ID NO: 2479503 - RNA, 19 nt, Artificial Sequence
  Description of Artificial Sequence: Synthetic oligonucleotide
  Antisense strand to SEQ ID NO: 2479502
uuuaugagcauauuccagc

SEQ ID NO: 2479504 - RNA, 19 nt, Artificial Sequence
  Description of Artificial Sequence: Synthetic oligonucleotide
  Sense strand starting at position 2197 of SEQ ID NO: 1887538
cugagaaagugugccuaua

SEQ ID NO: 2479505 - RNA, 19 nt, Artificial Sequence
  Description of Artificial Sequence: Synthetic oligonucleotide
  Antisense strand to SEQ ID NO: 2479504
uauaggcacacuuucucag

SEQ ID NO: 2479506 - RNA, 19 nt, Artificial Sequence
  Description of Artificial Sequence: Synthetic oligonucleotide
  Sense strand starting at position 2209 of SEQ ID NO: 1887538
gccuauagggaagguauua

SEQ ID NO: 2479507 - RNA, 19 nt, Artificial Sequence
  Description of Artificial Sequence: Synthetic oligonucleotide
  Antisense strand to SEQ ID NO: 2479506
uaauaccuucccuauaggc

SEQ ID NO: 2479508 - RNA, 19 nt, Artificial Sequence
  Description of Artificial Sequence: Synthetic oligonucleotide
  Sense strand starting at position 2214 of SEQ ID NO: 1887538
uagggaagguauuacacau

SEQ ID NO: 2479509 - RNA, 19 nt, Artificial Sequence
  Description of Artificial Sequence: Synthetic oligonucleotide
  Antisense strand to SEQ ID NO: 2479508
auguguaauaccuucccua

SEQ ID NO: 2479510 - RNA, 19 nt, Artificial Sequence
  Description of Artificial Sequence: Synthetic oligonucleotide
  Sense strand starting at position 2685 of SEQ ID NO: 1887538
uguuauuggugaguaggau

SEQ ID NO: 2479511 - RNA, 19 nt, Artificial Sequence
  Description of Artificial Sequence: Synthetic oligonucleotide
  Antisense strand to SEQ ID NO: 2479510
auccuacucaccaauaaca

SEQ ID NO: 2479512 - RNA, 19 nt, Artificial Sequence
  Description of Artificial Sequence: Synthetic oligonucleotide
  Sense strand starting at position 2686 of SEQ ID NO: 1887538
guuauuggugaguaggauu

SEQ ID NO: 2479513 - RNA, 19 nt, Artificial Sequence
  Description of Artificial Sequence: Synthetic oligonucleotide
  Antisense strand to SEQ ID NO: 2479512
aauccuacucaccaauaac

SEQ ID NO: 2479514 - RNA, 19 nt, Artificial Sequence
  Description of Artificial Sequence: Synthetic oligonucleotide
  Sense strand starting at position 2694 of SEQ ID NO: 1887538
ugaguaggauuucauggua

SEQ ID NO: 2479515 - RNA, 19 nt, Artificial Sequence
  Description of Artificial Sequence: Synthetic oligonucleotide
  Antisense strand to SEQ ID NO: 2479514
uaccaugaaauccuacuca

SEQ ID NO: 2479516 - RNA, 19 nt, Artificial Sequence
  Description of Artificial Sequence: Synthetic oligonucleotide
  Sense strand starting at position 2699 of SEQ ID NO: 1887538
aggauuucaugguauggau

SEQ ID NO: 2479517 - RNA, 19 nt, Artificial Sequence
  Description of Artificial Sequence: Synthetic oligonucleotide
  Antisense strand to SEQ ID NO: 2479516
auccauaccaugaaauccu

SEQ ID NO: 2479518 - RNA, 19 nt, Artificial Sequence
  Description of Artificial Sequence: Synthetic oligonucleotide
  Sense strand starting at position 2718 of SEQ ID NO: 1887538
guaccaucaugugcuaaua

SEQ ID NO: 2479519 - RNA, 19 nt, Artificial Sequence
  Description of Artificial Sequence: Synthetic oligonucleotide
  Antisense strand to SEQ ID NO: 2479518
uauuagcacaugaugguac

SEQ ID NO: 2479520 - RNA, 19 nt, Artificial Sequence
  Description of Artificial Sequence: Synthetic oligonucleotide
  Sense strand starting at position 2784 of SEQ ID NO: 1887538
cuuacuugcuguuuauuau

SEQ ID NO: 2479521 - RNA, 19 nt, Artificial Sequence
  Description of Artificial Sequence: Synthetic oligonucleotide
  Antisense strand to SEQ ID NO: 2479520
auaauaaacagcaaguaag

SEQ ID NO: 2479522 - RNA, 19 nt, Artificial Sequence
  Description of Artificial Sequence: Synthetic oligonucleotide
  Sense strand starting at position 3089 of SEQ ID NO: 1887538
cugagaucaugagaucgca

SEQ ID NO: 2479523 - RNA, 19 nt, Artificial Sequence
  Description of Artificial Sequence: Synthetic oligonucleotide
  Antisense strand to SEQ ID NO: 2479522
ugcgaucucaugaucucag

SEQ ID NO: 2479524 - RNA, 19 nt, Artificial Sequence
  Description of Artificial Sequence: Synthetic oligonucleotide
  Sense strand starting at position 3222 of SEQ ID NO: 1887538
auauauucuuaaggcaagu

SEQ ID NO: 2479525 - RNA, 19 nt, Artificial Sequence
  Description of Artificial Sequence: Synthetic oligonucleotide
  Antisense strand to SEQ ID NO: 2479524
acuugccuuaagaauauau

SEQ ID NO: 2479526 - RNA, 19 nt, Artificial Sequence
  Description of Artificial Sequence: Synthetic oligonucleotide
  Sense strand starting at position 3233 of SEQ ID NO: 1887538
aggcaaguuccuuaucaaa

SEQ ID NO: 2479527 - RNA, 19 nt, Artificial Sequence
  Description of Artificial Sequence: Synthetic oligonucleotide
  Antisense strand to SEQ ID NO: 2479526
uuugauaaggaacuugccu

SEQ ID NO: 2479528 - RNA, 19 nt, Artificial Sequence
  Description of Artificial Sequence: Synthetic oligonucleotide
  Sense strand starting at position 3235 of SEQ ID NO: 1887538
gcaaguuccuuaucaaaug

SEQ ID NO: 2479529 - RNA, 19 nt, Artificial Sequence
  Description of Artificial Sequence: Synthetic oligonucleotide
  Antisense strand to SEQ ID NO: 2479528
cauuugauaaggaacuugc

SEQ ID NO: 2479530 - RNA, 19 nt, Artificial Sequence
  Description of Artificial Sequence: Synthetic oligonucleotide
  Sense strand starting at position 3386 of SEQ ID NO: 1887538
ugaccaaacgugugggaau

SEQ ID NO: 2479531 - RNA, 19 nt, Artificial Sequence
  Description of Artificial Sequence: Synthetic oligonucleotide
  Antisense strand to SEQ ID NO: 2479530
auucccacacguuugguca

SEQ ID NO: 2479532 - RNA, 19 nt, Artificial Sequence
  Description of Artificial Sequence: Synthetic oligonucleotide
  Sense strand starting at position 3387 of SEQ ID NO: 1887538
gaccaaacgugugggaauu

SEQ ID NO: 2479533 - RNA, 19 nt, Artificial Sequence
  Description of Artificial Sequence: Synthetic oligonucleotide
  Antisense strand to SEQ ID NO: 2479532
aauucccacacguuugguc

SEQ ID NO: 2479534 - RNA, 19 nt, Artificial Sequence
  Description of Artificial Sequence: Synthetic oligonucleotide
  Sense strand starting at position 3488 of SEQ ID NO: 1887538
caguuuagaucucaugggu

SEQ ID NO: 2479535 - RNA, 19 nt, Artificial Sequence
  Description of Artificial Sequence: Synthetic oligonucleotide
  Antisense strand to SEQ ID NO: 2479534
acccaugagaucuaaacug

SEQ ID NO: 2479536 - RNA, 19 nt, Artificial Sequence
  Description of Artificial Sequence: Synthetic oligonucleotide
  Sense strand starting at position 3491 of SEQ ID NO: 1887538
uuuagaucucauggguuaa

SEQ ID NO: 2479537 - RNA, 19 nt, Artificial Sequence
  Description of Artificial Sequence: Synthetic oligonucleotide
  Antisense strand to SEQ ID NO: 2479536
uuaacccaugagaucuaaa

SEQ ID NO: 2479538 - RNA, 19 nt, Artificial Sequence
  Description of Artificial Sequence: Synthetic oligonucleotide
  Sense strand starting at position 3492 of SEQ ID NO: 1887538
uuagaucucauggguuaag

SEQ ID NO: 2479539 - RNA, 19 nt, Artificial Sequence
  Description of Artificial Sequence: Synthetic oligonucleotide
  Antisense strand to SEQ ID NO: 2479538
cuuaacccaugagaucuaa

SEQ ID NO: 2479540 - RNA, 19 nt, Artificial Sequence
  Description of Artificial Sequence: Synthetic oligonucleotide
  Sense strand starting at position 3493 of SEQ ID NO: 1887538
uagaucucauggguuaaga

SEQ ID NO: 2479541 - RNA, 19 nt, Artificial Sequence
  Description of Artificial Sequence: Synthetic oligonucleotide
  Antisense strand to SEQ ID NO: 2479540
ucuuaacccaugagaucua

SEQ ID NO: 2479542 - RNA, 19 nt, Artificial Sequence
  Description of Artificial Sequence: Synthetic oligonucleotide
  Sense strand starting at position 3671 of SEQ ID NO: 1887538
gggaaacacuuauguuuau

SEQ ID NO: 2479543 - RNA, 19 nt, Artificial Sequence
  Description of Artificial Sequence: Synthetic oligonucleotide
  Antisense strand to SEQ ID NO: 2479542
auaaacauaaguguuuccc

SEQ ID NO: 2479544 - RNA, 19 nt, Artificial Sequence
  Description of Artificial Sequence: Synthetic oligonucleotide
  Sense strand starting at position 3807 of SEQ ID NO: 1887538
uccacauguuccgcuauca

SEQ ID NO: 2479545 - RNA, 19 nt, Artificial Sequence
  Description of Artificial Sequence: Synthetic oligonucleotide
  Antisense strand to SEQ ID NO: 2479544
ugauagcggaacaugugga

SEQ ID NO: 2479546 - RNA, 19 nt, Artificial Sequence
  Description of Artificial Sequence: Synthetic oligonucleotide
  Sense strand starting at position 1555 of SEQ ID NO: 1887539
agaauuagugggcguguca

SEQ ID NO: 2479547 - RNA, 19 nt, Artificial Sequence
  Description of Artificial Sequence: Synthetic oligonucleotide
  Antisense strand to SEQ ID NO: 2479546
ugacacgcccacuaauucu

SEQ ID NO: 2479548 - RNA, 19 nt, Artificial Sequence
  Description of Artificial Sequence: Synthetic oligonucleotide
  Sense strand starting at position 1564 of SEQ ID NO: 1887539
gggcgugucaagcuuguuu

SEQ ID NO: 2479549 - RNA, 19 nt, Artificial Sequence
  Description of Artificial Sequence: Synthetic oligonucleotide
  Antisense strand to SEQ ID NO: 2479548
aaacaagcuugacacgccc

SEQ ID NO: 2479550 - RNA, 19 nt, Artificial Sequence
  Description of Artificial Sequence: Synthetic oligonucleotide
  Sense strand starting at position 2261 of SEQ ID NO: 1887539
gcuagcacagaguaaagau

SEQ ID NO: 2479551 - RNA, 19 nt, Artificial Sequence
  Description of Artificial Sequence: Synthetic oligonucleotide
  Antisense strand to SEQ ID NO: 2479550
aucuuuacucugugcuagc

SEQ ID NO: 2479552 - RNA, 19 nt, Artificial Sequence
  Description of Artificial Sequence: Synthetic oligonucleotide
  Sense strand starting at position 3880 of SEQ ID NO: 1887539
auaaauaaagcagguuaga

SEQ ID NO: 2479553 - RNA, 19 nt, Artificial Sequence
  Description of Artificial Sequence: Synthetic oligonucleotide
  Antisense strand to SEQ ID NO: 2479552
ucuaaccugcuuuauuuau

SEQ ID NO: 2479554 - RNA, 19 nt, Artificial Sequence
  Description of Artificial Sequence: Synthetic oligonucleotide
  Sense strand starting at position 45 of SEQ ID NO: 1887540
uuggguuaucccugacggu

SEQ ID NO: 2479555 - RNA, 19 nt, Artificial Sequence
  Description of Artificial Sequence: Synthetic oligonucleotide
  Antisense strand to SEQ ID NO: 2479554
accgucagggauaacccaa

SEQ ID NO: 2479556 - RNA, 19 nt, Artificial Sequence
  Description of Artificial Sequence: Synthetic oligonucleotide
  Sense strand starting at position 46 of SEQ ID NO: 1887540
uggguuaucccugacgguu

SEQ ID NO: 2479557 - RNA, 19 nt, Artificial Sequence
  Description of Artificial Sequence: Synthetic oligonucleotide
  Antisense strand to SEQ ID NO: 2479556
aaccgucagggauaaccca

SEQ ID NO: 2479558 - RNA, 19 nt, Artificial Sequence
  Description of Artificial Sequence: Synthetic oligonucleotide
  Sense strand starting at position 101 of SEQ ID NO: 1887540
cacaaagggcccuggaauu

SEQ ID NO: 2479559 - RNA, 19 nt, Artificial Sequence
  Description of Artificial Sequence: Synthetic oligonucleotide
  Antisense strand to SEQ ID NO: 2479558
aauuccagggcccuuugug

SEQ ID NO: 2479560 - RNA, 19 nt, Artificial Sequence
  Description of Artificial Sequence: Synthetic oligonucleotide
  Sense strand starting at position 181 of SEQ ID NO: 1887540
aaaggacagucacagagau

SEQ ID NO: 2479561 - RNA, 19 nt, Artificial Sequence
  Description of Artificial Sequence: Synthetic oligonucleotide
  Antisense strand to SEQ ID NO: 2479560
aucucugugacuguccuuu

SEQ ID NO: 2479562 - RNA, 19 nt, Artificial Sequence
  Description of Artificial Sequence: Synthetic oligonucleotide
  Sense strand starting at position 218 of SEQ ID NO: 1887540
uggaguuccagaggauuau

SEQ ID NO: 2479563 - RNA, 19 nt, Artificial Sequence
  Description of Artificial Sequence: Synthetic oligonucleotide
  Antisense strand to SEQ ID NO: 2479562
auaauccucuggaacucca

SEQ ID NO: 2479564 - RNA, 19 nt, Artificial Sequence
  Description of Artificial Sequence: Synthetic oligonucleotide
  Sense strand starting at position 242 of SEQ ID NO: 1887540
cacguaacauguuuacaga

SEQ ID NO: 2479565 - RNA, 19 nt, Artificial Sequence
  Description of Artificial Sequence: Synthetic oligonucleotide
  Antisense strand to SEQ ID NO: 2479564
ucuguaaacauguuacgug

SEQ ID NO: 2479566 - RNA, 19 nt, Artificial Sequence
  Description of Artificial Sequence: Synthetic oligonucleotide
  Sense strand starting at position 544 of SEQ ID NO: 1887540
cauccacugcuguguaaga

SEQ ID NO: 2479567 - RNA, 19 nt, Artificial Sequence
  Description of Artificial Sequence: Synthetic oligonucleotide
  Antisense strand to SEQ ID NO: 2479566
ucuuacacagcaguggaug

SEQ ID NO: 2479568 - RNA, 19 nt, Artificial Sequence
  Description of Artificial Sequence: Synthetic oligonucleotide
  Sense strand starting at position 545 of SEQ ID NO: 1887540
auccacugcuguguaagaa

SEQ ID NO: 2479569 - RNA, 19 nt, Artificial Sequence
  Description of Artificial Sequence: Synthetic oligonucleotide
  Antisense strand to SEQ ID NO: 2479568
uucuuacacagcaguggau

SEQ ID NO: 2479570 - RNA, 19 nt, Artificial Sequence
  Description of Artificial Sequence: Synthetic oligonucleotide
  Sense strand starting at position 639 of SEQ ID NO: 1887540
agaggaaguuguucucauu

SEQ ID NO: 2479571 - RNA, 19 nt, Artificial Sequence
  Description of Artificial Sequence: Synthetic oligonucleotide
  Antisense strand to SEQ ID NO: 2479570
aaugagaacaacuuccucu

SEQ ID NO: 2479572 - RNA, 19 nt, Artificial Sequence
  Description of Artificial Sequence: Synthetic oligonucleotide
  Sense strand starting at position 701 of SEQ ID NO: 1887540
uuacuacaagccugaguua

SEQ ID NO: 2479573 - RNA, 19 nt, Artificial Sequence
  Description of Artificial Sequence: Synthetic oligonucleotide
  Antisense strand to SEQ ID NO: 2479572
uaacucaggcuuguaguaa

SEQ ID NO: 2479574 - RNA, 19 nt, Artificial Sequence
  Description of Artificial Sequence: Synthetic oligonucleotide
  Sense strand starting at position 713 of SEQ ID NO: 1887540
ugaguuaagcuaggguaaa

SEQ ID NO: 2479575 - RNA, 19 nt, Artificial Sequence
  Description of Artificial Sequence: Synthetic oligonucleotide
  Antisense strand to SEQ ID NO: 2479574
uuuacccuagcuuaacuca

SEQ ID NO: 2479576 - RNA, 19 nt, Artificial Sequence
  Description of Artificial Sequence: Synthetic oligonucleotide
  Sense strand starting at position 745 of SEQ ID NO: 1887540
agaaguccugcuugccaua

SEQ ID NO: 2479577 - RNA, 19 nt, Artificial Sequence
  Description of Artificial Sequence: Synthetic oligonucleotide
  Antisense strand to SEQ ID NO: 2479576
uauggcaagcaggacuucu

SEQ ID NO: 2479578 - RNA, 19 nt, Artificial Sequence
  Description of Artificial Sequence: Synthetic oligonucleotide
  Sense strand starting at position 926 of SEQ ID NO: 1887540
aggcuuaaccugcaauuaa

SEQ ID NO: 2479579 - RNA, 19 nt, Artificial Sequence
  Description of Artificial Sequence: Synthetic oligonucleotide
  Antisense strand to SEQ ID NO: 2479578
uuaauugcagguuaagccu

SEQ ID NO: 2479580 - RNA, 19 nt, Artificial Sequence
  Description of Artificial Sequence: Synthetic oligonucleotide
  Sense strand starting at position 960 of SEQ ID NO: 1887540
ccaggaaauuuccacccga

SEQ ID NO: 2479581 - RNA, 19 nt, Artificial Sequence
  Description of Artificial Sequence: Synthetic oligonucleotide
  Antisense strand to SEQ ID NO: 2479580
ucggguggaaauuuccugg

SEQ ID NO: 2479582 - RNA, 19 nt, Artificial Sequence
  Description of Artificial Sequence: Synthetic oligonucleotide
  Sense strand starting at position 1075 of SEQ ID NO: 1887540
ucagguggcccacauauua

SEQ ID NO: 2479583 - RNA, 19 nt, Artificial Sequence
  Description of Artificial Sequence: Synthetic oligonucleotide
  Antisense strand to SEQ ID NO: 2479582
uaauaugugggccaccuga

SEQ ID NO: 2479584 - RNA, 19 nt, Artificial Sequence
  Description of Artificial Sequence: Synthetic oligonucleotide
  Sense strand starting at position 1128 of SEQ ID NO: 1887540
cagauaaacucguuaacgu

SEQ ID NO: 2479585 - RNA, 19 nt, Artificial Sequence
  Description of Artificial Sequence: Synthetic oligonucleotide
  Antisense strand to SEQ ID NO: 2479584
acguuaacgaguuuaucug

SEQ ID NO: 2479586 - RNA, 19 nt, Artificial Sequence
  Description of Artificial Sequence: Synthetic oligonucleotide
  Sense strand starting at position 1129 of SEQ ID NO: 1887540
agauaaacucguuaacguu

SEQ ID NO: 2479587 - RNA, 19 nt, Artificial Sequence
  Description of Artificial Sequence: Synthetic oligonucleotide
  Antisense strand to SEQ ID NO: 2479586
aacguuaacgaguuuaucu

SEQ ID NO: 2479588 - RNA, 19 nt, Artificial Sequence
  Description of Artificial Sequence: Synthetic oligonucleotide
  Sense strand starting at position 1533 of SEQ ID NO: 1887540
ucgggauucugcccugaug

SEQ ID NO: 2479589 - RNA, 19 nt, Artificial Sequence
  Description of Artificial Sequence: Synthetic oligonucleotide
  Antisense strand to SEQ ID NO: 2479588
caucagggcagaaucccga

SEQ ID NO: 2479590 - RNA, 19 nt, Artificial Sequence
  Description of Artificial Sequence: Synthetic oligonucleotide
  Sense strand starting at position 1535 of SEQ ID NO: 1887540
gggauucugcccugaugac

SEQ ID NO: 2479591 - RNA, 19 nt, Artificial Sequence
  Description of Artificial Sequence: Synthetic oligonucleotide
  Antisense strand to SEQ ID NO: 2479590
gucaucagggcagaauccc

SEQ ID NO: 2479592 - RNA, 19 nt, Artificial Sequence
  Description of Artificial Sequence: Synthetic oligonucleotide
  Sense strand starting at position 1568 of SEQ ID NO: 1887540
ugaacaaucugggaaacac

SEQ ID NO: 2479593 - RNA, 19 nt, Artificial Sequence
  Description of Artificial Sequence: Synthetic oligonucleotide
  Antisense strand to SEQ ID NO: 2479592
guguuucccagauuguuca

SEQ ID NO: 2479594 - RNA, 19 nt, Artificial Sequence
  Description of Artificial Sequence: Synthetic oligonucleotide
  Sense strand starting at position 1833 of SEQ ID NO: 1887540
cuggaauguccuggcaucu

SEQ ID NO: 2479595 - RNA, 19 nt, Artificial Sequence
  Description of Artificial Sequence: Synthetic oligonucleotide
  Antisense strand to SEQ ID NO: 2479594
agaugccaggacauuccag

SEQ ID NO: 2479596 - RNA, 19 nt, Artificial Sequence
  Description of Artificial Sequence: Synthetic oligonucleotide
  Sense strand starting at position 2028 of SEQ ID NO: 1887540
cugugccacugauucgaua

SEQ ID NO: 2479597 - RNA, 19 nt, Artificial Sequence
  Description of Artificial Sequence: Synthetic oligonucleotide
  Antisense strand to SEQ ID NO: 2479596
uaucgaaucaguggcacag

SEQ ID NO: 2479598 - RNA, 19 nt, Artificial Sequence
  Description of Artificial Sequence: Synthetic oligonucleotide
  Sense strand starting at position 2030 of SEQ ID NO: 1887540
gugccacugauucgauaaa

SEQ ID NO: 2479599 - RNA, 19 nt, Artificial Sequence
  Description of Artificial Sequence: Synthetic oligonucleotide
  Antisense strand to SEQ ID NO: 2479598
uuuaucgaaucaguggcac

SEQ ID NO: 2479600 - RNA, 19 nt, Artificial Sequence
  Description of Artificial Sequence: Synthetic oligonucleotide
  Sense strand starting at position 2109 of SEQ ID NO: 1887540
gugucaaccauagggaauu

SEQ ID NO: 2479601 - RNA, 19 nt, Artificial Sequence
  Description of Artificial Sequence: Synthetic oligonucleotide
  Antisense strand to SEQ ID NO: 2479600
aauucccuaugguugacac

SEQ ID NO: 2479602 - RNA, 19 nt, Artificial Sequence
  Description of Artificial Sequence: Synthetic oligonucleotide
  Sense strand starting at position 2210 of SEQ ID NO: 1887540
uugcuacuuaaggguaaga

SEQ ID NO: 2479603 - RNA, 19 nt, Artificial Sequence
  Description of Artificial Sequence: Synthetic oligonucleotide
  Antisense strand to SEQ ID NO: 2479602
ucuuacccuuaaguagcaa

SEQ ID NO: 2479604 - RNA, 19 nt, Artificial Sequence
  Description of Artificial Sequence: Synthetic oligonucleotide
  Sense strand starting at position 2608 of SEQ ID NO: 1887540
cugaguaccucucucauca

SEQ ID NO: 2479605 - RNA, 19 nt, Artificial Sequence
  Description of Artificial Sequence: Synthetic oligonucleotide
  Antisense strand to SEQ ID NO: 2479604
ugaugagagagguacucag

SEQ ID NO: 2479606 - RNA, 19 nt, Artificial Sequence
  Description of Artificial Sequence: Synthetic oligonucleotide
  Sense strand starting at position 2688 of SEQ ID NO: 1887540
gaaagcgguggcugagaau

SEQ ID NO: 2479607 - RNA, 19 nt, Artificial Sequence
  Description of Artificial Sequence: Synthetic oligonucleotide
  Antisense strand to SEQ ID NO: 2479606
auucucagccaccgcuuuc

SEQ ID NO: 2479608 - RNA, 19 nt, Artificial Sequence
  Description of Artificial Sequence: Synthetic oligonucleotide
  Sense strand starting at position 2694 of SEQ ID NO: 1887540
gguggcugagaaugguuaa

SEQ ID NO: 2479609 - RNA, 19 nt, Artificial Sequence
  Description of Artificial Sequence: Synthetic oligonucleotide
  Antisense strand to SEQ ID NO: 2479608
uuaaccauucucagccacc

SEQ ID NO: 2479610 - RNA, 19 nt, Artificial Sequence
  Description of Artificial Sequence: Synthetic oligonucleotide
  Sense strand starting at position 2697 of SEQ ID NO: 1887540
ggcugagaaugguuaagca

SEQ ID NO: 2479611 - RNA, 19 nt, Artificial Sequence
  Description of Artificial Sequence: Synthetic oligonucleotide
  Antisense strand to SEQ ID NO: 2479610
ugcuuaaccauucucagcc

SEQ ID NO: 2479612 - RNA, 19 nt, Artificial Sequence
  Description of Artificial Sequence: Synthetic oligonucleotide
  Sense strand starting at position 2756 of SEQ ID NO: 1887540
cucaaucauucugugugaa

SEQ ID NO: 2479613 - RNA, 19 nt, Artificial Sequence
  Description of Artificial Sequence: Synthetic oligonucleotide
  Antisense strand to SEQ ID NO: 2479612
uucacacagaaugauugag

SEQ ID NO: 2479614 - RNA, 19 nt, Artificial Sequence
  Description of Artificial Sequence: Synthetic oligonucleotide
  Sense strand starting at position 2757 of SEQ ID NO: 1887540
ucaaucauucugugugaag

SEQ ID NO: 2479615 - RNA, 19 nt, Artificial Sequence
  Description of Artificial Sequence: Synthetic oligonucleotide
  Antisense strand to SEQ ID NO: 2479614
cuucacacagaaugauuga

SEQ ID NO: 2479616 - RNA, 19 nt, Artificial Sequence
  Description of Artificial Sequence: Synthetic oligonucleotide
  Sense strand starting at position 2768 of SEQ ID NO: 1887540
gugugaaguguguauucca

SEQ ID NO: 2479617 - RNA, 19 nt, Artificial Sequence
  Description of Artificial Sequence: Synthetic oligonucleotide
  Antisense strand to SEQ ID NO: 2479616
uggaauacacacuucacac

SEQ ID NO: 2479618 - RNA, 19 nt, Artificial Sequence
  Description of Artificial Sequence: Synthetic oligonucleotide
  Sense strand starting at position 2775 of SEQ ID NO: 1887540
guguguauuccaggguaau

SEQ ID NO: 2479619 - RNA, 19 nt, Artificial Sequence
  Description of Artificial Sequence: Synthetic oligonucleotide
  Antisense strand to SEQ ID NO: 2479618
auuacccuggaauacacac

SEQ ID NO: 2479620 - RNA, 19 nt, Artificial Sequence
  Description of Artificial Sequence: Synthetic oligonucleotide
  Sense strand starting at position 2776 of SEQ ID NO: 1887540
uguguauuccaggguaauu

SEQ ID NO: 2479621 - RNA, 19 nt, Artificial Sequence
  Description of Artificial Sequence: Synthetic oligonucleotide
  Antisense strand to SEQ ID NO: 2479620
aauuacccuggaauacaca

SEQ ID NO: 2479622 - RNA, 19 nt, Artificial Sequence
  Description of Artificial Sequence: Synthetic oligonucleotide
  Sense strand starting at position 2778 of SEQ ID NO: 1887540
uguauuccaggguaauugu

SEQ ID NO: 2479623 - RNA, 19 nt, Artificial Sequence
  Description of Artificial Sequence: Synthetic oligonucleotide
  Antisense strand to SEQ ID NO: 2479622
acaauuacccuggaauaca

SEQ ID NO: 2479624 - RNA, 19 nt, Artificial Sequence
  Description of Artificial Sequence: Synthetic oligonucleotide
  Sense strand starting at position 2940 of SEQ ID NO: 1887540
ggguuagaccauggaggua

SEQ ID NO: 2479625 - RNA, 19 nt, Artificial Sequence
  Description of Artificial Sequence: Synthetic oligonucleotide
  Antisense strand to SEQ ID NO: 2479624
uaccuccauggucuaaccc

SEQ ID NO: 2479626 - RNA, 19 nt, Artificial Sequence
  Description of Artificial Sequence: Synthetic oligonucleotide
  Sense strand starting at position 3724 of SEQ ID NO: 1887540
auuuaacagugauagcuua

SEQ ID NO: 2479627 - RNA, 19 nt, Artificial Sequence
  Description of Artificial Sequence: Synthetic oligonucleotide
  Antisense strand to SEQ ID NO: 2479626
uaagcuaucacuguuaaau

SEQ ID NO: 2479628 - RNA, 19 nt, Artificial Sequence
  Description of Artificial Sequence: Synthetic oligonucleotide
  Sense strand starting at position 3875 of SEQ ID NO: 1887540
gcuaauaacuugguuguaa

SEQ ID NO: 2479629 - RNA, 19 nt, Artificial Sequence
  Description of Artificial Sequence: Synthetic oligonucleotide
  Antisense strand to SEQ ID NO: 2479628
uuacaaccaaguuauuagc

SEQ ID NO: 2479630 - RNA, 19 nt, Artificial Sequence
  Description of Artificial Sequence: Synthetic oligonucleotide
  Sense strand starting at position 3876 of SEQ ID NO: 1887540
cuaauaacuugguuguaac

SEQ ID NO: 2479631 - RNA, 19 nt, Artificial Sequence
  Description of Artificial Sequence: Synthetic oligonucleotide
  Antisense strand to SEQ ID NO: 2479630
guuacaaccaaguuauuag

SEQ ID NO: 2479632 - RNA, 19 nt, Artificial Sequence
  Description of Artificial Sequence: Synthetic oligonucleotide
  Sense strand starting at position 3967 of SEQ ID NO: 1887540
guggaaugauugcuuaaac

SEQ ID NO: 2479633 - RNA, 19 nt, Artificial Sequence
  Description of Artificial Sequence: Synthetic oligonucleotide
  Antisense strand to SEQ ID NO: 2479632
guuuaagcaaucauuccac

SEQ ID NO: 2479634 - RNA, 19 nt, Artificial Sequence
  Description of Artificial Sequence: Synthetic oligonucleotide
  Sense strand starting at position 158 of SEQ ID NO: 1887541
ccauuuaaauaaggaauga

SEQ ID NO: 2479635 - RNA, 19 nt, Artificial Sequence
  Description of Artificial Sequence: Synthetic oligonucleotide
  Antisense strand to SEQ ID NO: 2479634
ucauuccuuauuuaaaugg

SEQ ID NO: 2479636 - RNA, 19 nt, Artificial Sequence
  Description of Artificial Sequence: Synthetic oligonucleotide
  Sense strand starting at position 171 of SEQ ID NO: 1887541
gaaugagcuagugguuaca

SEQ ID NO: 2479637 - RNA, 19 nt, Artificial Sequence
  Description of Artificial Sequence: Synthetic oligonucleotide
  Antisense strand to SEQ ID NO: 2479636
uguaaccacuagcucauuc

SEQ ID NO: 2479638 - RNA, 19 nt, Artificial Sequence
  Description of Artificial Sequence: Synthetic oligonucleotide
  Sense strand starting at position 565 of SEQ ID NO: 1887541
acagaugaauaauagauga

SEQ ID NO: 2479639 - RNA, 19 nt, Artificial Sequence
  Description of Artificial Sequence: Synthetic oligonucleotide
  Antisense strand to SEQ ID NO: 2479638
ucaucuauuauucaucugu

SEQ ID NO: 2479640 - RNA, 19 nt, Artificial Sequence
  Description of Artificial Sequence: Synthetic oligonucleotide
  Sense strand starting at position 585 of SEQ ID NO: 1887541
agaugaauaugauagauga

SEQ ID NO: 2479641 - RNA, 19 nt, Artificial Sequence
  Description of Artificial Sequence: Synthetic oligonucleotide
  Antisense strand to SEQ ID NO: 2479640
ucaucuaucauauucaucu

SEQ ID NO: 2479642 - RNA, 19 nt, Artificial Sequence
  Description of Artificial Sequence: Synthetic oligonucleotide
  Sense strand starting at position 592 of SEQ ID NO: 1887541
uaugauagaugauagauga

SEQ ID NO: 2479643 - RNA, 19 nt, Artificial Sequence
  Description of Artificial Sequence: Synthetic oligonucleotide
  Antisense strand to SEQ ID NO: 2479642
ucaucuaucaucuaucaua

SEQ ID NO: 2479644 - RNA, 19 nt, Artificial Sequence
  Description of Artificial Sequence: Synthetic oligonucleotide
  Sense strand starting at position 690 of SEQ ID NO: 1887541
aucaauacaugauagauga

SEQ ID NO: 2479645 - RNA, 19 nt, Artificial Sequence
  Description of Artificial Sequence: Synthetic oligonucleotide
  Antisense strand to SEQ ID NO: 2479644
ucaucuaucauguauugau

SEQ ID NO: 2479646 - RNA, 19 nt, Artificial Sequence
  Description of Artificial Sequence: Synthetic oligonucleotide
  Sense strand starting at position 781 of SEQ ID NO: 1887541
gaugaauuaucguuauaug

SEQ ID NO: 2479647 - RNA, 19 nt, Artificial Sequence
  Description of Artificial Sequence: Synthetic oligonucleotide
  Antisense strand to SEQ ID NO: 2479646
cauauaacgauaauucauc

SEQ ID NO: 2479648 - RNA, 19 nt, Artificial Sequence
  Description of Artificial Sequence: Synthetic oligonucleotide
  Sense strand starting at position 857 of SEQ ID NO: 1887541
gaugauuuaugaugggaau

SEQ ID NO: 2479649 - RNA, 19 nt, Artificial Sequence
  Description of Artificial Sequence: Synthetic oligonucleotide
  Antisense strand to SEQ ID NO: 2479648
auucccaucauaaaucauc

SEQ ID NO: 2479650 - RNA, 19 nt, Artificial Sequence
  Description of Artificial Sequence: Synthetic oligonucleotide
  Sense strand starting at position 871 of SEQ ID NO: 1887541
ggaauuaaugcaugggauu

SEQ ID NO: 2479651 - RNA, 19 nt, Artificial Sequence
  Description of Artificial Sequence: Synthetic oligonucleotide
  Antisense strand to SEQ ID NO: 2479650
aaucccaugcauuaauucc

SEQ ID NO: 2479652 - RNA, 19 nt, Artificial Sequence
  Description of Artificial Sequence: Synthetic oligonucleotide
  Sense strand starting at position 872 of SEQ ID NO: 1887541
gaauuaaugcaugggauua

SEQ ID NO: 2479653 - RNA, 19 nt, Artificial Sequence
  Description of Artificial Sequence: Synthetic oligonucleotide
  Antisense strand to SEQ ID NO: 2479652
uaaucccaugcauuaauuc

SEQ ID NO: 2479654 - RNA, 19 nt, Artificial Sequence
  Description of Artificial Sequence: Synthetic oligonucleotide
  Sense strand starting at position 889 of SEQ ID NO: 1887541
uauggagguucuucugaaa

SEQ ID NO: 2479655 - RNA, 19 nt, Artificial Sequence
  Description of Artificial Sequence: Synthetic oligonucleotide
  Antisense strand to SEQ ID NO: 2479654
uuucagaagaaccuccaua

SEQ ID NO: 2479656 - RNA, 19 nt, Artificial Sequence
  Description of Artificial Sequence: Synthetic oligonucleotide
  Sense strand starting at position 937 of SEQ ID NO: 1887541
uugaguaccugcucaggaa

SEQ ID NO: 2479657 - RNA, 19 nt, Artificial Sequence
  Description of Artificial Sequence: Synthetic oligonucleotide
  Antisense strand to SEQ ID NO: 2479656
uuccugagcagguacucaa

SEQ ID NO: 2479658 - RNA, 19 nt, Artificial Sequence
  Description of Artificial Sequence: Synthetic oligonucleotide
  Sense strand starting at position 1078 of SEQ ID NO: 1887541
gugaaauuauaguugaagu

SEQ ID NO: 2479659 - RNA, 19 nt, Artificial Sequence
  Description of Artificial Sequence: Synthetic oligonucleotide
  Antisense strand to SEQ ID NO: 2479658
acuucaacuauaauuucac

SEQ ID NO: 2479660 - RNA, 19 nt, Artificial Sequence
  Description of Artificial Sequence: Synthetic oligonucleotide
  Sense strand starting at position 1079 of SEQ ID NO: 1887541
ugaaauuauaguugaagug

SEQ ID NO: 2479661 - RNA, 19 nt, Artificial Sequence
  Description of Artificial Sequence: Synthetic oligonucleotide
  Antisense strand to SEQ ID NO: 2479660
cacuucaacuauaauuuca

SEQ ID NO: 2479662 - RNA, 19 nt, Artificial Sequence
  Description of Artificial Sequence: Synthetic oligonucleotide
  Sense strand starting at position 1120 of SEQ ID NO: 1887541
aagggagcuuaccuguauu

SEQ ID NO: 2479663 - RNA, 19 nt, Artificial Sequence
  Description of Artificial Sequence: Synthetic oligonucleotide
  Antisense strand to SEQ ID NO: 2479662
aauacagguaagcucccuu

SEQ ID NO: 2479664 - RNA, 19 nt, Artificial Sequence
  Description of Artificial Sequence: Synthetic oligonucleotide
  Sense strand starting at position 1543 of SEQ ID NO: 1887541
aaaugugcucccggaauca

SEQ ID NO: 2479665 - RNA, 19 nt, Artificial Sequence
  Description of Artificial Sequence: Synthetic oligonucleotide
  Antisense strand to SEQ ID NO: 2479664
ugauuccgggagcacauuu

SEQ ID NO: 2479666 - RNA, 19 nt, Artificial Sequence
  Description of Artificial Sequence: Synthetic oligonucleotide
  Sense strand starting at position 1595 of SEQ ID NO: 1887541
gagguaggcgucuggaaca

SEQ ID NO: 2479667 - RNA, 19 nt, Artificial Sequence
  Description of Artificial Sequence: Synthetic oligonucleotide
  Antisense strand to SEQ ID NO: 2479666
uguuccagacgccuaccuc

SEQ ID NO: 2479668 - RNA, 19 nt, Artificial Sequence
  Description of Artificial Sequence: Synthetic oligonucleotide
  Sense strand starting at position 1600 of SEQ ID NO: 1887541
aggcgucuggaacauugau

SEQ ID NO: 2479669 - RNA, 19 nt, Artificial Sequence
  Description of Artificial Sequence: Synthetic oligonucleotide
  Antisense strand to SEQ ID NO: 2479668
aucaauguuccagacgccu

SEQ ID NO: 2479670 - RNA, 19 nt, Artificial Sequence
  Description of Artificial Sequence: Synthetic oligonucleotide
  Sense strand starting at position 2048 of SEQ ID NO: 1887541
cugucaucuuucucaucga

SEQ ID NO: 2479671 - RNA, 19 nt, Artificial Sequence
  Description of Artificial Sequence: Synthetic oligonucleotide
  Antisense strand to SEQ ID NO: 2479670
ucgaugagaaagaugacag

SEQ ID NO: 2479672 - RNA, 19 nt, Artificial Sequence
  Description of Artificial Sequence: Synthetic oligonucleotide
  Sense strand starting at position 2182 of SEQ ID NO: 1887541
agugguaagccgcaaucua

SEQ ID NO: 2479673 - RNA, 19 nt, Artificial Sequence
  Description of Artificial Sequence: Synthetic oligonucleotide
  Antisense strand to SEQ ID NO: 2479672
uagauugcggcuuaccacu

SEQ ID NO: 2479674 - RNA, 19 nt, Artificial Sequence
  Description of Artificial Sequence: Synthetic oligonucleotide
  Sense strand starting at position 2234 of SEQ ID NO: 1887541
cccugcaaugucugaagaa

SEQ ID NO: 2479675 - RNA, 19 nt, Artificial Sequence
  Description of Artificial Sequence: Synthetic oligonucleotide
  Antisense strand to SEQ ID NO: 2479674
uucuucagacauugcaggg

SEQ ID NO: 2479676 - RNA, 19 nt, Artificial Sequence
  Description of Artificial Sequence: Synthetic oligonucleotide
  Sense strand starting at position 2287 of SEQ ID NO: 1887541
agguacuaucgccagguga

SEQ ID NO: 2479677 - RNA, 19 nt, Artificial Sequence
  Description of Artificial Sequence: Synthetic oligonucleotide
  Antisense strand to SEQ ID NO: 2479676
ucaccuggcgauaguaccu

SEQ ID NO: 2479678 - RNA, 19 nt, Artificial Sequence
  Description of Artificial Sequence: Synthetic oligonucleotide
  Sense strand starting at position 2418 of SEQ ID NO: 1887541
aucaaagucuugucaguca

SEQ ID NO: 2479679 - RNA, 19 nt, Artificial Sequence
  Description of Artificial Sequence: Synthetic oligonucleotide
  Antisense strand to SEQ ID NO: 2479678
ugacugacaagacuuugau

SEQ ID NO: 2479680 - RNA, 19 nt, Artificial Sequence
  Description of Artificial Sequence: Synthetic oligonucleotide
  Sense strand starting at position 2523 of SEQ ID NO: 1887541
gcuugaaucuuccucaugu

SEQ ID NO: 2479681 - RNA, 19 nt, Artificial Sequence
  Description of Artificial Sequence: Synthetic oligonucleotide
  Antisense strand to SEQ ID NO: 2479680
acaugaggaagauucaagc

SEQ ID NO: 2479682 - RNA, 19 nt, Artificial Sequence
  Description of Artificial Sequence: Synthetic oligonucleotide
  Sense strand starting at position 2558 of SEQ ID NO: 1887541
uugagugucacaggguaau

SEQ ID NO: 2479683 - RNA, 19 nt, Artificial Sequence
  Description of Artificial Sequence: Synthetic oligonucleotide
  Antisense strand to SEQ ID NO: 2479682
auuacccugugacacucaa

SEQ ID NO: 2479684 - RNA, 19 nt, Artificial Sequence
  Description of Artificial Sequence: Synthetic oligonucleotide
  Sense strand starting at position 2649 of SEQ ID NO: 1887541
augaccgucucauagauuu

SEQ ID NO: 2479685 - RNA, 19 nt, Artificial Sequence
  Description of Artificial Sequence: Synthetic oligonucleotide
  Antisense strand to SEQ ID NO: 2479684
aaaucuaugagacggucau

SEQ ID NO: 2479686 - RNA, 19 nt, Artificial Sequence
  Description of Artificial Sequence: Synthetic oligonucleotide
  Sense strand starting at position 2657 of SEQ ID NO: 1887541
cucauagauuucuaagagu

SEQ ID NO: 2479687 - RNA, 19 nt, Artificial Sequence
  Description of Artificial Sequence: Synthetic oligonucleotide
  Antisense strand to SEQ ID NO: 2479686
acucuuagaaaucuaugag

SEQ ID NO: 2479688 - RNA, 19 nt, Artificial Sequence
  Description of Artificial Sequence: Synthetic oligonucleotide
  Sense strand starting at position 2678 of SEQ ID NO: 1887541
accagaccucucugaaaug

SEQ ID NO: 2479689 - RNA, 19 nt, Artificial Sequence
  Description of Artificial Sequence: Synthetic oligonucleotide
  Antisense strand to SEQ ID NO: 2479688
cauuucagagaggucuggu

SEQ ID NO: 2479690 - RNA, 19 nt, Artificial Sequence
  Description of Artificial Sequence: Synthetic oligonucleotide
  Sense strand starting at position 2757 of SEQ ID NO: 1887541
cgugaggacgcaugggaaa

SEQ ID NO: 2479691 - RNA, 19 nt, Artificial Sequence
  Description of Artificial Sequence: Synthetic oligonucleotide
  Antisense strand to SEQ ID NO: 2479690
uuucccaugcguccucacg

SEQ ID NO: 2479692 - RNA, 19 nt, Artificial Sequence
  Description of Artificial Sequence: Synthetic oligonucleotide
  Sense strand starting at position 2898 of SEQ ID NO: 1887541
cuauuuggacagcguuauu

SEQ ID NO: 2479693 - RNA, 19 nt, Artificial Sequence
  Description of Artificial Sequence: Synthetic oligonucleotide
  Antisense strand to SEQ ID NO: 2479692
aauaacgcuguccaaauag

SEQ ID NO: 2479694 - RNA, 19 nt, Artificial Sequence
  Description of Artificial Sequence: Synthetic oligonucleotide
  Sense strand starting at position 3030 of SEQ ID NO: 1887541
agugaauacauguaguacu

SEQ ID NO: 2479695 - RNA, 19 nt, Artificial Sequence
  Description of Artificial Sequence: Synthetic oligonucleotide
  Antisense strand to SEQ ID NO: 2479694
aguacuacauguauucacu

SEQ ID NO: 2479696 - RNA, 19 nt, Artificial Sequence
  Description of Artificial Sequence: Synthetic oligonucleotide
  Sense strand starting at position 3120 of SEQ ID NO: 1887541
gcauuacuauuacuuaguu

SEQ ID NO: 2479697 - RNA, 19 nt, Artificial Sequence
  Description of Artificial Sequence: Synthetic oligonucleotide
  Antisense strand to SEQ ID NO: 2479696
aacuaaguaauaguaaugc

SEQ ID NO: 2479698 - RNA, 19 nt, Artificial Sequence
  Description of Artificial Sequence: Synthetic oligonucleotide
  Sense strand starting at position 3194 of SEQ ID NO: 1887541
gagcuauuagcugaguguu

SEQ ID NO: 2479699 - RNA, 19 nt, Artificial Sequence
  Description of Artificial Sequence: Synthetic oligonucleotide
  Antisense strand to SEQ ID NO: 2479698
aacacucagcuaauagcuc

SEQ ID NO: 2479700 - RNA, 19 nt, Artificial Sequence
  Description of Artificial Sequence: Synthetic oligonucleotide
  Sense strand starting at position 3197 of SEQ ID NO: 1887541
cuauuagcugaguguugau

SEQ ID NO: 2479701 - RNA, 19 nt, Artificial Sequence
  Description of Artificial Sequence: Synthetic oligonucleotide
  Antisense strand to SEQ ID NO: 2479700
aucaacacucagcuaauag

SEQ ID NO: 2479702 - RNA, 19 nt, Artificial Sequence
  Description of Artificial Sequence: Synthetic oligonucleotide
  Sense strand starting at position 3376 of SEQ ID NO: 1887541
ggagacuacucuuuccaag

SEQ ID NO: 2479703 - RNA, 19 nt, Artificial Sequence
  Description of Artificial Sequence: Synthetic oligonucleotide
  Antisense strand to SEQ ID NO: 2479702
cuuggaaagaguagucucc

SEQ ID NO: 2479704 - RNA, 19 nt, Artificial Sequence
  Description of Artificial Sequence: Synthetic oligonucleotide
  Sense strand starting at position 3536 of SEQ ID NO: 1887541
aaguuaaucuguucugaug

SEQ ID NO: 2479705 - RNA, 19 nt, Artificial Sequence
  Description of Artificial Sequence: Synthetic oligonucleotide
  Antisense strand to SEQ ID NO: 2479704
caucagaacagauuaacuu

SEQ ID NO: 2479706 - RNA, 19 nt, Artificial Sequence
  Description of Artificial Sequence: Synthetic oligonucleotide
  Sense strand starting at position 3596 of SEQ ID NO: 1887541
ugcauuugcugucuuauua

SEQ ID NO: 2479707 - RNA, 19 nt, Artificial Sequence
  Description of Artificial Sequence: Synthetic oligonucleotide
  Antisense strand to SEQ ID NO: 2479706
uaauaagacagcaaaugca

SEQ ID NO: 2479708 - RNA, 19 nt, Artificial Sequence
  Description of Artificial Sequence: Synthetic oligonucleotide
  Sense strand starting at position 3603 of SEQ ID NO: 1887541
gcugucuuauuagugauga

SEQ ID NO: 2479709 - RNA, 19 nt, Artificial Sequence
  Description of Artificial Sequence: Synthetic oligonucleotide
  Antisense strand to SEQ ID NO: 2479708
ucaucacuaauaagacagc

SEQ ID NO: 2479710 - RNA, 19 nt, Artificial Sequence
  Description of Artificial Sequence: Synthetic oligonucleotide
  Sense strand starting at position 3677 of SEQ ID NO: 1887541
guaugccuaugacuuauuu

SEQ ID NO: 2479711 - RNA, 19 nt, Artificial Sequence
  Description of Artificial Sequence: Synthetic oligonucleotide
  Antisense strand to SEQ ID NO: 2479710
aaauaagucauaggcauac

SEQ ID NO: 2479712 - RNA, 19 nt, Artificial Sequence
  Description of Artificial Sequence: Synthetic oligonucleotide
  Sense strand starting at position 3824 of SEQ ID NO: 1887541
ccuaaaguuucucucuguu

SEQ ID NO: 2479713 - RNA, 19 nt, Artificial Sequence
  Description of Artificial Sequence: Synthetic oligonucleotide
  Antisense strand to SEQ ID NO: 2479712
aacagagagaaacuuuagg

SEQ ID NO: 2479714 - RNA, 19 nt, Artificial Sequence
  Description of Artificial Sequence: Synthetic oligonucleotide
  Sense strand starting at position 108 of SEQ ID NO: 1887542
ucaaauaaugugugagaga

SEQ ID NO: 2479715 - RNA, 19 nt, Artificial Sequence
  Description of Artificial Sequence: Synthetic oligonucleotide
  Antisense strand to SEQ ID NO: 2479714
ucucucacacauuauuuga

SEQ ID NO: 2479716 - RNA, 19 nt, Artificial Sequence
  Description of Artificial Sequence: Synthetic oligonucleotide
  Sense strand starting at position 1136 of SEQ ID NO: 1887542
ucuguaucaauaggugaug

SEQ ID NO: 2479717 - RNA, 19 nt, Artificial Sequence
  Description of Artificial Sequence: Synthetic oligonucleotide
  Antisense strand to SEQ ID NO: 2479716
caucaccuauugauacaga

SEQ ID NO: 2479718 - RNA, 19 nt, Artificial Sequence
  Description of Artificial Sequence: Synthetic oligonucleotide
  Sense strand starting at position 1138 of SEQ ID NO: 1887542
uguaucaauaggugauguu

SEQ ID NO: 2479719 - RNA, 19 nt, Artificial Sequence
  Description of Artificial Sequence: Synthetic oligonucleotide
  Antisense strand to SEQ ID NO: 2479718
aacaucaccuauugauaca

SEQ ID NO: 2479720 - RNA, 19 nt, Artificial Sequence
  Description of Artificial Sequence: Synthetic oligonucleotide
  Sense strand starting at position 1139 of SEQ ID NO: 1887542
guaucaauaggugauguuu

SEQ ID NO: 2479721 - RNA, 19 nt, Artificial Sequence
  Description of Artificial Sequence: Synthetic oligonucleotide
  Antisense strand to SEQ ID NO: 2479720
aaacaucaccuauugauac

SEQ ID NO: 2479722 - RNA, 19 nt, Artificial Sequence
  Description of Artificial Sequence: Synthetic oligonucleotide
  Sense strand starting at position 1232 of SEQ ID NO: 1887542
gcuggcaagacauaguauu

SEQ ID NO: 2479723 - RNA, 19 nt, Artificial Sequence
  Description of Artificial Sequence: Synthetic oligonucleotide
  Antisense strand to SEQ ID NO: 2479722
aauacuaugucuugccagc

SEQ ID NO: 2479724 - RNA, 19 nt, Artificial Sequence
  Description of Artificial Sequence: Synthetic oligonucleotide
  Sense strand starting at position 1427 of SEQ ID NO: 1887542
uuaucucacgcaugacaaa

SEQ ID NO: 2479725 - RNA, 19 nt, Artificial Sequence
  Description of Artificial Sequence: Synthetic oligonucleotide
  Antisense strand to SEQ ID NO: 2479724
uuugucaugcgugagauaa

SEQ ID NO: 2479726 - RNA, 19 nt, Artificial Sequence
  Description of Artificial Sequence: Synthetic oligonucleotide
  Sense strand starting at position 1475 of SEQ ID NO: 1887542
uggugaugaucuuuauaaa

SEQ ID NO: 2479727 - RNA, 19 nt, Artificial Sequence
  Description of Artificial Sequence: Synthetic oligonucleotide
  Antisense strand to SEQ ID NO: 2479726
uuuauaaagaucaucacca

SEQ ID NO: 2479728 - RNA, 19 nt, Artificial Sequence
  Description of Artificial Sequence: Synthetic oligonucleotide
  Sense strand starting at position 1641 of SEQ ID NO: 1887542
uaaugauaugaucggagcu

SEQ ID NO: 2479729 - RNA, 19 nt, Artificial Sequence
  Description of Artificial Sequence: Synthetic oligonucleotide
  Antisense strand to SEQ ID NO: 2479728
agcuccgaucauaucauua

SEQ ID NO: 2479730 - RNA, 19 nt, Artificial Sequence
  Description of Artificial Sequence: Synthetic oligonucleotide
  Sense strand starting at position 1654 of SEQ ID NO: 1887542
ggagcuauuugaugaaaga

SEQ ID NO: 2479731 - RNA, 19 nt, Artificial Sequence
  Description of Artificial Sequence: Synthetic oligonucleotide
  Antisense strand to SEQ ID NO: 2479730
ucuuucaucaaauagcucc

SEQ ID NO: 2479732 - RNA, 19 nt, Artificial Sequence
  Description of Artificial Sequence: Synthetic oligonucleotide
  Sense strand starting at position 1776 of SEQ ID NO: 1887542
uuaagagucgcuuaaagca

SEQ ID NO: 2479733 - RNA, 19 nt, Artificial Sequence
  Description of Artificial Sequence: Synthetic oligonucleotide
  Antisense strand to SEQ ID NO: 2479732
ugcuuuaagcgacucuuaa

SEQ ID NO: 2479734 - RNA, 19 nt, Artificial Sequence
  Description of Artificial Sequence: Synthetic oligonucleotide
  Sense strand starting at position 1891 of SEQ ID NO: 1887542
gcaguaccuguguccugua

SEQ ID NO: 2479735 - RNA, 19 nt, Artificial Sequence
  Description of Artificial Sequence: Synthetic oligonucleotide
  Antisense strand to SEQ ID NO: 2479734
uacaggacacagguacugc

SEQ ID NO: 2479736 - RNA, 19 nt, Artificial Sequence
  Description of Artificial Sequence: Synthetic oligonucleotide
  Sense strand starting at position 2105 of SEQ ID NO: 1887542
cuaguuugugacuacuguu

SEQ ID NO: 2479737 - RNA, 19 nt, Artificial Sequence
  Description of Artificial Sequence: Synthetic oligonucleotide
  Antisense strand to SEQ ID NO: 2479736
aacaguagucacaaacuag

SEQ ID NO: 2479738 - RNA, 19 nt, Artificial Sequence
  Description of Artificial Sequence: Synthetic oligonucleotide
  Sense strand starting at position 2153 of SEQ ID NO: 1887542
gcugauauuucuucugccu

SEQ ID NO: 2479739 - RNA, 19 nt, Artificial Sequence
  Description of Artificial Sequence: Synthetic oligonucleotide
  Antisense strand to SEQ ID NO: 2479738
aggcagaagaaauaucagc

SEQ ID NO: 2479740 - RNA, 19 nt, Artificial Sequence
  Description of Artificial Sequence: Synthetic oligonucleotide
  Sense strand starting at position 2164 of SEQ ID NO: 1887542
uucugccuugcagaagauu

SEQ ID NO: 2479741 - RNA, 19 nt, Artificial Sequence
  Description of Artificial Sequence: Synthetic oligonucleotide
  Antisense strand to SEQ ID NO: 2479740
aaucuucugcaaggcagaa

SEQ ID NO: 2479742 - RNA, 19 nt, Artificial Sequence
  Description of Artificial Sequence: Synthetic oligonucleotide
  Sense strand starting at position 2195 of SEQ ID NO: 1887542
agguccuauugaucuuauu

SEQ ID NO: 2479743 - RNA, 19 nt, Artificial Sequence
  Description of Artificial Sequence: Synthetic oligonucleotide
  Antisense strand to SEQ ID NO: 2479742
aauaagaucaauaggaccu

SEQ ID NO: 2479744 - RNA, 19 nt, Artificial Sequence
  Description of Artificial Sequence: Synthetic oligonucleotide
  Sense strand starting at position 2244 of SEQ ID NO: 1887542
ggcauuagucaugacuacu

SEQ ID NO: 2479745 - RNA, 19 nt, Artificial Sequence
  Description of Artificial Sequence: Synthetic oligonucleotide
  Antisense strand to SEQ ID NO: 2479744
aguagucaugacuaaugcc

SEQ ID NO: 2479746 - RNA, 19 nt, Artificial Sequence
  Description of Artificial Sequence: Synthetic oligonucleotide
  Sense strand starting at position 2252 of SEQ ID NO: 1887542
ucaugacuacuuggccuaa

SEQ ID NO: 2479747 - RNA, 19 nt, Artificial Sequence
  Description of Artificial Sequence: Synthetic oligonucleotide
  Antisense strand to SEQ ID NO: 2479746
uuaggccaaguagucauga

SEQ ID NO: 2479748 - RNA, 19 nt, Artificial Sequence
  Description of Artificial Sequence: Synthetic oligonucleotide
  Sense strand starting at position 2323 of SEQ ID NO: 1887542
ucaggucuuagauggaagu

SEQ ID NO: 2479749 - RNA, 19 nt, Artificial Sequence
  Description of Artificial Sequence: Synthetic oligonucleotide
  Antisense strand to SEQ ID NO: 2479748
acuuccaucuaagaccuga

SEQ ID NO: 2479750 - RNA, 19 nt, Artificial Sequence
  Description of Artificial Sequence: Synthetic oligonucleotide
  Sense strand starting at position 2324 of SEQ ID NO: 1887542
caggucuuagauggaaguu

SEQ ID NO: 2479751 - RNA, 19 nt, Artificial Sequence
  Description of Artificial Sequence: Synthetic oligonucleotide
  Antisense strand to SEQ ID NO: 2479750
aacuuccaucuaagaccug

SEQ ID NO: 2479752 - RNA, 19 nt, Artificial Sequence
  Description of Artificial Sequence: Synthetic oligonucleotide
  Sense strand starting at position 2325 of SEQ ID NO: 1887542
aggucuuagauggaaguuu

SEQ ID NO: 2479753 - RNA, 19 nt, Artificial Sequence
  Description of Artificial Sequence: Synthetic oligonucleotide
  Antisense strand to SEQ ID NO: 2479752
aaacuuccaucuaagaccu

SEQ ID NO: 2479754 - RNA, 19 nt, Artificial Sequence
  Description of Artificial Sequence: Synthetic oligonucleotide
  Sense strand starting at position 2360 of SEQ ID NO: 1887542
agaucaggugacugaaagu

SEQ ID NO: 2479755 - RNA, 19 nt, Artificial Sequence
  Description of Artificial Sequence: Synthetic oligonucleotide
  Antisense strand to SEQ ID NO: 2479754
acuuucagucaccugaucu

SEQ ID NO: 2479756 - RNA, 19 nt, Artificial Sequence
  Description of Artificial Sequence: Synthetic oligonucleotide
  Sense strand starting at position 2488 of SEQ ID NO: 1887542
uugcauacuuuguugaaga

SEQ ID NO: 2479757 - RNA, 19 nt, Artificial Sequence
  Description of Artificial Sequence: Synthetic oligonucleotide
  Antisense strand to SEQ ID NO: 2479756
ucuucaacaaaguaugcaa

SEQ ID NO: 2479758 - RNA, 19 nt, Artificial Sequence
  Description of Artificial Sequence: Synthetic oligonucleotide
  Sense strand starting at position 2490 of SEQ ID NO: 1887542
gcauacuuuguugaagauu

SEQ ID NO: 2479759 - RNA, 19 nt, Artificial Sequence
  Description of Artificial Sequence: Synthetic oligonucleotide
  Antisense strand to SEQ ID NO: 2479758
aaucuucaacaaaguaugc

SEQ ID NO: 2479760 - RNA, 19 nt, Artificial Sequence
  Description of Artificial Sequence: Synthetic oligonucleotide
  Sense strand starting at position 2493 of SEQ ID NO: 1887542
uacuuuguugaagauuagu

SEQ ID NO: 2479761 - RNA, 19 nt, Artificial Sequence
  Description of Artificial Sequence: Synthetic oligonucleotide
  Antisense strand to SEQ ID NO: 2479760
acuaaucuucaacaaagua

SEQ ID NO: 2479762 - RNA, 19 nt, Artificial Sequence
  Description of Artificial Sequence: Synthetic oligonucleotide
  Sense strand starting at position 2502 of SEQ ID NO: 1887542
gaagauuaguugucuguaa

SEQ ID NO: 2479763 - RNA, 19 nt, Artificial Sequence
  Description of Artificial Sequence: Synthetic oligonucleotide
  Antisense strand to SEQ ID NO: 2479762
uuacagacaacuaaucuuc

SEQ ID NO: 2479764 - RNA, 19 nt, Artificial Sequence
  Description of Artificial Sequence: Synthetic oligonucleotide
  Sense strand starting at position 2503 of SEQ ID NO: 1887542
aagauuaguugucuguaag

SEQ ID NO: 2479765 - RNA, 19 nt, Artificial Sequence
  Description of Artificial Sequence: Synthetic oligonucleotide
  Antisense strand to SEQ ID NO: 2479764
cuuacagacaacuaaucuu

SEQ ID NO: 2479766 - RNA, 19 nt, Artificial Sequence
  Description of Artificial Sequence: Synthetic oligonucleotide
  Sense strand starting at position 2634 of SEQ ID NO: 1887542
guguacuuuguugaagauu

SEQ ID NO: 2479767 - RNA, 19 nt, Artificial Sequence
  Description of Artificial Sequence: Synthetic oligonucleotide
  Antisense strand to SEQ ID NO: 2479766
aaucuucaacaaaguacac

SEQ ID NO: 2479768 - RNA, 19 nt, Artificial Sequence
  Description of Artificial Sequence: Synthetic oligonucleotide
  Sense strand starting at position 2801 of SEQ ID NO: 1887542
aaaguauugcuuuggauau

SEQ ID NO: 2479769 - RNA, 19 nt, Artificial Sequence
  Description of Artificial Sequence: Synthetic oligonucleotide
  Antisense strand to SEQ ID NO: 2479768
auauccaaagcaauacuuu

SEQ ID NO: 2479770 - RNA, 19 nt, Artificial Sequence
  Description of Artificial Sequence: Synthetic oligonucleotide
  Sense strand starting at position 2861 of SEQ ID NO: 1887542
uuucuaguucugggaagga

SEQ ID NO: 2479771 - RNA, 19 nt, Artificial Sequence
  Description of Artificial Sequence: Synthetic oligonucleotide
  Antisense strand to SEQ ID NO: 2479770
uccuucccagaacuagaaa

SEQ ID NO: 2479772 - RNA, 19 nt, Artificial Sequence
  Description of Artificial Sequence: Synthetic oligonucleotide
  Sense strand starting at position 2926 of SEQ ID NO: 1887542
uggagaguauggucacuuu

SEQ ID NO: 2479773 - RNA, 19 nt, Artificial Sequence
  Description of Artificial Sequence: Synthetic oligonucleotide
  Antisense strand to SEQ ID NO: 2479772
aaagugaccauacucucca

SEQ ID NO: 2479774 - RNA, 19 nt, Artificial Sequence
  Description of Artificial Sequence: Synthetic oligonucleotide
  Sense strand starting at position 3259 of SEQ ID NO: 1887542
uuguauucuggagacucuu

SEQ ID NO: 2479775 - RNA, 19 nt, Artificial Sequence
  Description of Artificial Sequence: Synthetic oligonucleotide
  Antisense strand to SEQ ID NO: 2479774
aagagucuccagaauacaa

SEQ ID NO: 2479776 - RNA, 19 nt, Artificial Sequence
  Description of Artificial Sequence: Synthetic oligonucleotide
  Sense strand starting at position 3341 of SEQ ID NO: 1887542
auagauucuuguucucuuu

SEQ ID NO: 2479777 - RNA, 19 nt, Artificial Sequence
  Description of Artificial Sequence: Synthetic oligonucleotide
  Antisense strand to SEQ ID NO: 2479776
aaagagaacaagaaucuau

SEQ ID NO: 2479778 - RNA, 19 nt, Artificial Sequence
  Description of Artificial Sequence: Synthetic oligonucleotide
  Sense strand starting at position 3350 of SEQ ID NO: 1887542
uguucucuuuaacuaguaa

SEQ ID NO: 2479779 - RNA, 19 nt, Artificial Sequence
  Description of Artificial Sequence: Synthetic oligonucleotide
  Antisense strand to SEQ ID NO: 2479778
uuacuaguuaaagagaaca

SEQ ID NO: 2479780 - RNA, 19 nt, Artificial Sequence
  Description of Artificial Sequence: Synthetic oligonucleotide
  Sense strand starting at position 3387 of SEQ ID NO: 1887542
aucuaagaaguauggcaaa

SEQ ID NO: 2479781 - RNA, 19 nt, Artificial Sequence
  Description of Artificial Sequence: Synthetic oligonucleotide
  Antisense strand to SEQ ID NO: 2479780
uuugccauacuucuuagau

SEQ ID NO: 2479782 - RNA, 19 nt, Artificial Sequence
  Description of Artificial Sequence: Synthetic oligonucleotide
  Sense strand starting at position 3500 of SEQ ID NO: 1887542
aauagacaucuggguugca

SEQ ID NO: 2479783 - RNA, 19 nt, Artificial Sequence
  Description of Artificial Sequence: Synthetic oligonucleotide
  Antisense strand to SEQ ID NO: 2479782
ugcaacccagaugucuauu

SEQ ID NO: 2479784 - RNA, 19 nt, Artificial Sequence
  Description of Artificial Sequence: Synthetic oligonucleotide
  Sense strand starting at position 3501 of SEQ ID NO: 1887542
auagacaucuggguugcau

SEQ ID NO: 2479785 - RNA, 19 nt, Artificial Sequence
  Description of Artificial Sequence: Synthetic oligonucleotide
  Antisense strand to SEQ ID NO: 2479784
augcaacccagaugucuau

SEQ ID NO: 2479786 - RNA, 19 nt, Artificial Sequence
  Description of Artificial Sequence: Synthetic oligonucleotide
  Sense strand starting at position 3796 of SEQ ID NO: 1887542
augagaugcuaucuuaauc

SEQ ID NO: 2479787 - RNA, 19 nt, Artificial Sequence
  Description of Artificial Sequence: Synthetic oligonucleotide
  Antisense strand to SEQ ID NO: 2479786
gauuaagauagcaucucau

SEQ ID NO: 2479788 - RNA, 19 nt, Artificial Sequence
  Description of Artificial Sequence: Synthetic oligonucleotide
  Sense strand starting at position 3806 of SEQ ID NO: 1887542
aucuuaaucuugcuagaag

SEQ ID NO: 2479789 - RNA, 19 nt, Artificial Sequence
  Description of Artificial Sequence: Synthetic oligonucleotide
  Antisense strand to SEQ ID NO: 2479788
cuucuagcaagauuaagau

SEQ ID NO: 2479790 - RNA, 19 nt, Artificial Sequence
  Description of Artificial Sequence: Synthetic oligonucleotide
  Sense strand starting at position 3815 of SEQ ID NO: 1887542
uugcuagaagcccauaauu

SEQ ID NO: 2479791 - RNA, 19 nt, Artificial Sequence
  Description of Artificial Sequence: Synthetic oligonucleotide
  Antisense strand to SEQ ID NO: 2479790
aauuaugggcuucuagcaa

SEQ ID NO: 2479792 - RNA, 19 nt, Artificial Sequence
  Description of Artificial Sequence: Synthetic oligonucleotide
  Sense strand starting at position 3915 of SEQ ID NO: 1887542
guccgaccacuaugguaaa

SEQ ID NO: 2479793 - RNA, 19 nt, Artificial Sequence
  Description of Artificial Sequence: Synthetic oligonucleotide
  Antisense strand to SEQ ID NO: 2479792
uuuaccauaguggucggac

SEQ ID NO: 2479794 - RNA, 19 nt, Artificial Sequence
  Description of Artificial Sequence: Synthetic oligonucleotide
  Sense strand starting at position 40 of SEQ ID NO: 1887543
aggugugagccauguggaa

SEQ ID NO: 2479795 - RNA, 19 nt, Artificial Sequence
  Description of Artificial Sequence: Synthetic oligonucleotide
  Antisense strand to SEQ ID NO: 2479794
uuccacauggcucacaccu

SEQ ID NO: 2479796 - RNA, 19 nt, Artificial Sequence
  Description of Artificial Sequence: Synthetic oligonucleotide
  Sense strand starting at position 42 of SEQ ID NO: 1887543
gugugagccauguggaaca

SEQ ID NO: 2479797 - RNA, 19 nt, Artificial Sequence
  Description of Artificial Sequence: Synthetic oligonucleotide
  Antisense strand to SEQ ID NO: 2479796
uguuccacauggcucacac

SEQ ID NO: 2479798 - RNA, 19 nt, Artificial Sequence
  Description of Artificial Sequence: Synthetic oligonucleotide
  Sense strand starting at position 168 of SEQ ID NO: 1887543
cccuuaacuguguggacuu

SEQ ID NO: 2479799 - RNA, 19 nt, Artificial Sequence
  Description of Artificial Sequence: Synthetic oligonucleotide
  Antisense strand to SEQ ID NO: 2479798
aaguccacacaguuaaggg

SEQ ID NO: 2479800 - RNA, 19 nt, Artificial Sequence
  Description of Artificial Sequence: Synthetic oligonucleotide
  Sense strand starting at position 626 of SEQ ID NO: 1887543
ggcugacucuuauacugua

SEQ ID NO: 2479801 - RNA, 19 nt, Artificial Sequence
  Description of Artificial Sequence: Synthetic oligonucleotide
  Antisense strand to SEQ ID NO: 2479800
uacaguauaagagucagcc

SEQ ID NO: 2479802 - RNA, 19 nt, Artificial Sequence
  Description of Artificial Sequence: Synthetic oligonucleotide
  Sense strand starting at position 629 of SEQ ID NO: 1887543
ugacucuuauacuguaaga

SEQ ID NO: 2479803 - RNA, 19 nt, Artificial Sequence
  Description of Artificial Sequence: Synthetic oligonucleotide
  Antisense strand to SEQ ID NO: 2479802
ucuuacaguauaagaguca

SEQ ID NO: 2479804 - RNA, 19 nt, Artificial Sequence
  Description of Artificial Sequence: Synthetic oligonucleotide
  Sense strand starting at position 1622 of SEQ ID NO: 1887543
uagggaagugucugugugu

SEQ ID NO: 2479805 - RNA, 19 nt, Artificial Sequence
  Description of Artificial Sequence: Synthetic oligonucleotide
  Antisense strand to SEQ ID NO: 2479804
acacacagacacuucccua

SEQ ID NO: 2479806 - RNA, 19 nt, Artificial Sequence
  Description of Artificial Sequence: Synthetic oligonucleotide
  Sense strand starting at position 1623 of SEQ ID NO: 1887543
agggaagugucuguguguu

SEQ ID NO: 2479807 - RNA, 19 nt, Artificial Sequence
  Description of Artificial Sequence: Synthetic oligonucleotide
  Antisense strand to SEQ ID NO: 2479806
aacacacagacacuucccu

SEQ ID NO: 2479808 - RNA, 19 nt, Artificial Sequence
  Description of Artificial Sequence: Synthetic oligonucleotide
  Sense strand starting at position 1624 of SEQ ID NO: 1887543
gggaagugucuguguguug

SEQ ID NO: 2479809 - RNA, 19 nt, Artificial Sequence
  Description of Artificial Sequence: Synthetic oligonucleotide
  Antisense strand to SEQ ID NO: 2479808
caacacacagacacuuccc

SEQ ID NO: 2479810 - RNA, 19 nt, Artificial Sequence
  Description of Artificial Sequence: Synthetic oligonucleotide
  Sense strand starting at position 1717 of SEQ ID NO: 1887543
gggaaaggguucgcuaaag

SEQ ID NO: 2479811 - RNA, 19 nt, Artificial Sequence
  Description of Artificial Sequence: Synthetic oligonucleotide
  Antisense strand to SEQ ID NO: 2479810
cuuuagcgaacccuuuccc

SEQ ID NO: 2479812 - RNA, 19 nt, Artificial Sequence
  Description of Artificial Sequence: Synthetic oligonucleotide
  Sense strand starting at position 1831 of SEQ ID NO: 1887543
cccagaaagcucugggaaa

SEQ ID NO: 2479813 - RNA, 19 nt, Artificial Sequence
  Description of Artificial Sequence: Synthetic oligonucleotide
  Antisense strand to SEQ ID NO: 2479812
uuucccagagcuuucuggg

SEQ ID NO: 2479814 - RNA, 19 nt, Artificial Sequence
  Description of Artificial Sequence: Synthetic oligonucleotide
  Sense strand starting at position 1832 of SEQ ID NO: 1887543
ccagaaagcucugggaaag

SEQ ID NO: 2479815 - RNA, 19 nt, Artificial Sequence
  Description of Artificial Sequence: Synthetic oligonucleotide
  Antisense strand to SEQ ID NO: 2479814
cuuucccagagcuuucugg

SEQ ID NO: 2479816 - RNA, 19 nt, Artificial Sequence
  Description of Artificial Sequence: Synthetic oligonucleotide
  Sense strand starting at position 1901 of SEQ ID NO: 1887543
gauaguggucgccaccuga

SEQ ID NO: 2479817 - RNA, 19 nt, Artificial Sequence
  Description of Artificial Sequence: Synthetic oligonucleotide
  Antisense strand to SEQ ID NO: 2479816
ucagguggcgaccacuauc

SEQ ID NO: 2479818 - RNA, 19 nt, Artificial Sequence
  Description of Artificial Sequence: Synthetic oligonucleotide
  Sense strand starting at position 1937 of SEQ ID NO: 1887543
cggcuguaugagcgggaau

SEQ ID NO: 2479819 - RNA, 19 nt, Artificial Sequence
  Description of Artificial Sequence: Synthetic oligonucleotide
  Antisense strand to SEQ ID NO: 2479818
auucccgcucauacagccg

SEQ ID NO: 2479820 - RNA, 19 nt, Artificial Sequence
  Description of Artificial Sequence: Synthetic oligonucleotide
  Sense strand starting at position 1948 of SEQ ID NO: 1887543
gcgggaauccgaggugcuu

SEQ ID NO: 2479821 - RNA, 19 nt, Artificial Sequence
  Description of Artificial Sequence: Synthetic oligonucleotide
  Antisense strand to SEQ ID NO: 2479820
aagcaccucggauucccgc

SEQ ID NO: 2479822 - RNA, 19 nt, Artificial Sequence
  Description of Artificial Sequence: Synthetic oligonucleotide
  Sense strand starting at position 2132 of SEQ ID NO: 1887543
ggucguucuugucacuguu

SEQ ID NO: 2479823 - RNA, 19 nt, Artificial Sequence
  Description of Artificial Sequence: Synthetic oligonucleotide
  Antisense strand to SEQ ID NO: 2479822
aacagugacaagaacgacc

SEQ ID NO: 2479824 - RNA, 19 nt, Artificial Sequence
  Description of Artificial Sequence: Synthetic oligonucleotide
  Sense strand starting at position 3105 of SEQ ID NO: 1887543
cuuauuaacugagagaaug

SEQ ID NO: 2479825 - RNA, 19 nt, Artificial Sequence
  Description of Artificial Sequence: Synthetic oligonucleotide
  Antisense strand to SEQ ID NO: 2479824
cauucucucaguuaauaag

SEQ ID NO: 2479826 - RNA, 19 nt, Artificial Sequence
  Description of Artificial Sequence: Synthetic oligonucleotide
  Sense strand starting at position 3115 of SEQ ID NO: 1887543
gagagaauggcuuggcucu

SEQ ID NO: 2479827 - RNA, 19 nt, Artificial Sequence
  Description of Artificial Sequence: Synthetic oligonucleotide
  Antisense strand to SEQ ID NO: 2479826
agagccaagccauucucuc

SEQ ID NO: 2479828 - RNA, 19 nt, Artificial Sequence
  Description of Artificial Sequence: Synthetic oligonucleotide
  Sense strand starting at position 3116 of SEQ ID NO: 1887543
agagaauggcuuggcucuu

SEQ ID NO: 2479829 - RNA, 19 nt, Artificial Sequence
  Description of Artificial Sequence: Synthetic oligonucleotide
  Antisense strand to SEQ ID NO: 2479828
aagagccaagccauucucu

SEQ ID NO: 2479830 - RNA, 19 nt, Artificial Sequence
  Description of Artificial Sequence: Synthetic oligonucleotide
  Sense strand starting at position 3117 of SEQ ID NO: 1887543
gagaauggcuuggcucuuu

SEQ ID NO: 2479831 - RNA, 19 nt, Artificial Sequence
  Description of Artificial Sequence: Synthetic oligonucleotide
  Antisense strand to SEQ ID NO: 2479830
aaagagccaagccauucuc

SEQ ID NO: 2479832 - RNA, 19 nt, Artificial Sequence
  Description of Artificial Sequence: Synthetic oligonucleotide
  Sense strand starting at position 3238 of SEQ ID NO: 1887543
ugaagaaaguucugcauca

SEQ ID NO: 2479833 - RNA, 19 nt, Artificial Sequence
  Description of Artificial Sequence: Synthetic oligonucleotide
  Antisense strand to SEQ ID NO: 2479832
ugaugcagaacuuucuuca

SEQ ID NO: 2479834 - RNA, 19 nt, Artificial Sequence
  Description of Artificial Sequence: Synthetic oligonucleotide
  Sense strand starting at position 3239 of SEQ ID NO: 1887543
gaagaaaguucugcaucag

SEQ ID NO: 2479835 - RNA, 19 nt, Artificial Sequence
  Description of Artificial Sequence: Synthetic oligonucleotide
  Antisense strand to SEQ ID NO: 2479834
cugaugcagaacuuucuuc

SEQ ID NO: 2479836 - RNA, 19 nt, Artificial Sequence
  Description of Artificial Sequence: Synthetic oligonucleotide
  Sense strand starting at position 3240 of SEQ ID NO: 1887543
aagaaaguucugcaucagu

SEQ ID NO: 2479837 - RNA, 19 nt, Artificial Sequence
  Description of Artificial Sequence: Synthetic oligonucleotide
  Antisense strand to SEQ ID NO: 2479836
acugaugcagaacuuucuu

SEQ ID NO: 2479838 - RNA, 19 nt, Artificial Sequence
  Description of Artificial Sequence: Synthetic oligonucleotide
  Sense strand starting at position 3309 of SEQ ID NO: 1887543
uccuuaguccuccgucaau

SEQ ID NO: 2479839 - RNA, 19 nt, Artificial Sequence
  Description of Artificial Sequence: Synthetic oligonucleotide
  Antisense strand to SEQ ID NO: 2479838
auugacggaggacuaagga

SEQ ID NO: 2479840 - RNA, 19 nt, Artificial Sequence
  Description of Artificial Sequence: Synthetic oligonucleotide
  Sense strand starting at position 3320 of SEQ ID NO: 1887543
ccgucaaugcccuggcuau

SEQ ID NO: 2479841 - RNA, 19 nt, Artificial Sequence
  Description of Artificial Sequence: Synthetic oligonucleotide
  Antisense strand to SEQ ID NO: 2479840
auagccagggcauugacgg

SEQ ID NO: 2479842 - RNA, 19 nt, Artificial Sequence
  Description of Artificial Sequence: Synthetic oligonucleotide
  Sense strand starting at position 3337 of SEQ ID NO: 1887543
augcucaaugggugucuaa

SEQ ID NO: 2479843 - RNA, 19 nt, Artificial Sequence
  Description of Artificial Sequence: Synthetic oligonucleotide
  Antisense strand to SEQ ID NO: 2479842
uuagacacccauugagcau

SEQ ID NO: 2479844 - RNA, 19 nt, Artificial Sequence
  Description of Artificial Sequence: Synthetic oligonucleotide
  Sense strand starting at position 3344 of SEQ ID NO: 1887543
augggugucuaacgaucuu

SEQ ID NO: 2479845 - RNA, 19 nt, Artificial Sequence
  Description of Artificial Sequence: Synthetic oligonucleotide
  Antisense strand to SEQ ID NO: 2479844
aagaucguuagacacccau

SEQ ID NO: 2479846 - RNA, 19 nt, Artificial Sequence
  Description of Artificial Sequence: Synthetic oligonucleotide
  Sense strand starting at position 3868 of SEQ ID NO: 1887543
gaaagaauauugcuauguu

SEQ ID NO: 2479847 - RNA, 19 nt, Artificial Sequence
  Description of Artificial Sequence: Synthetic oligonucleotide
  Antisense strand to SEQ ID NO: 2479846
aacauagcaauauucuuuc

SEQ ID NO: 2479848 - RNA, 19 nt, Artificial Sequence
  Description of Artificial Sequence: Synthetic oligonucleotide
  Sense strand starting at position 3869 of SEQ ID NO: 1887543
aaagaauauugcuauguug

SEQ ID NO: 2479849 - RNA, 19 nt, Artificial Sequence
  Description of Artificial Sequence: Synthetic oligonucleotide
  Antisense strand to SEQ ID NO: 2479848
caacauagcaauauucuuu

SEQ ID NO: 2479850 - RNA, 19 nt, Artificial Sequence
  Description of Artificial Sequence: Synthetic oligonucleotide
  Sense strand starting at position 30 of SEQ ID NO: 1887544
guggcuguccaccaugagu

SEQ ID NO: 2479851 - RNA, 19 nt, Artificial Sequence
  Description of Artificial Sequence: Synthetic oligonucleotide
  Antisense strand to SEQ ID NO: 2479850
acucaugguggacagccac

SEQ ID NO: 2479852 - RNA, 19 nt, Artificial Sequence
  Description of Artificial Sequence: Synthetic oligonucleotide
  Sense strand starting at position 56 of SEQ ID NO: 1887544
aaaugcucguucuuaauga

SEQ ID NO: 2479853 - RNA, 19 nt, Artificial Sequence
  Description of Artificial Sequence: Synthetic oligonucleotide
  Antisense strand to SEQ ID NO: 2479852
ucauuaagaacgagcauuu

SEQ ID NO: 2479854 - RNA, 19 nt, Artificial Sequence
  Description of Artificial Sequence: Synthetic oligonucleotide
  Sense strand starting at position 125 of SEQ ID NO: 1887544
auugaauuccguuaucaag

SEQ ID NO: 2479855 - RNA, 19 nt, Artificial Sequence
  Description of Artificial Sequence: Synthetic oligonucleotide
  Antisense strand to SEQ ID NO: 2479854
cuugauaacggaauucaau

SEQ ID NO: 2479856 - RNA, 19 nt, Artificial Sequence
  Description of Artificial Sequence: Synthetic oligonucleotide
  Sense strand starting at position 127 of SEQ ID NO: 1887544
ugaauuccguuaucaagug

SEQ ID NO: 2479857 - RNA, 19 nt, Artificial Sequence
  Description of Artificial Sequence: Synthetic oligonucleotide
  Antisense strand to SEQ ID NO: 2479856
cacuugauaacggaauuca

SEQ ID NO: 2479858 - RNA, 19 nt, Artificial Sequence
  Description of Artificial Sequence: Synthetic oligonucleotide
  Sense strand starting at position 143 of SEQ ID NO: 1887544
gugugaaguccugauccag

SEQ ID NO: 2479859 - RNA, 19 nt, Artificial Sequence
  Description of Artificial Sequence: Synthetic oligonucleotide
  Antisense strand to SEQ ID NO: 2479858
cuggaucaggacuucacac

SEQ ID NO: 2479860 - RNA, 19 nt, Artificial Sequence
  Description of Artificial Sequence: Synthetic oligonucleotide
  Sense strand starting at position 242 of SEQ ID NO: 1887544
cuaauuaguguuuguuaag

SEQ ID NO: 2479861 - RNA, 19 nt, Artificial Sequence
  Description of Artificial Sequence: Synthetic oligonucleotide
  Antisense strand to SEQ ID NO: 2479860
cuuaacaaacacuaauuag

SEQ ID NO: 2479862 - RNA, 19 nt, Artificial Sequence
  Description of Artificial Sequence: Synthetic oligonucleotide
  Sense strand starting at position 532 of SEQ ID NO: 1887544
cuuggaaguuauguccaca

SEQ ID NO: 2479863 - RNA, 19 nt, Artificial Sequence
  Description of Artificial Sequence: Synthetic oligonucleotide
  Antisense strand to SEQ ID NO: 2479862
uguggacauaacuuccaag

SEQ ID NO: 2479864 - RNA, 19 nt, Artificial Sequence
  Description of Artificial Sequence: Synthetic oligonucleotide
  Sense strand starting at position 535 of SEQ ID NO: 1887544
ggaaguuauguccacagug

SEQ ID NO: 2479865 - RNA, 19 nt, Artificial Sequence
  Description of Artificial Sequence: Synthetic oligonucleotide
  Antisense strand to SEQ ID NO: 2479864
cacuguggacauaacuucc

SEQ ID NO: 2479866 - RNA, 19 nt, Artificial Sequence
  Description of Artificial Sequence: Synthetic oligonucleotide
  Sense strand starting at position 537 of SEQ ID NO: 1887544
aaguuauguccacagugag

SEQ ID NO: 2479867 - RNA, 19 nt, Artificial Sequence
  Description of Artificial Sequence: Synthetic oligonucleotide
  Antisense strand to SEQ ID NO: 2479866
cucacuguggacauaacuu

SEQ ID NO: 2479868 - RNA, 19 nt, Artificial Sequence
  Description of Artificial Sequence: Synthetic oligonucleotide
  Sense strand starting at position 540 of SEQ ID NO: 1887544
uuauguccacagugagguu

SEQ ID NO: 2479869 - RNA, 19 nt, Artificial Sequence
  Description of Artificial Sequence: Synthetic oligonucleotide
  Antisense strand to SEQ ID NO: 2479868
aaccucacuguggacauaa

SEQ ID NO: 2479870 - RNA, 19 nt, Artificial Sequence
  Description of Artificial Sequence: Synthetic oligonucleotide
  Sense strand starting at position 606 of SEQ ID NO: 1887544
aguugaugccaucaucaga

SEQ ID NO: 2479871 - RNA, 19 nt, Artificial Sequence
  Description of Artificial Sequence: Synthetic oligonucleotide
  Antisense strand to SEQ ID NO: 2479870
ucugaugauggcaucaacu

SEQ ID NO: 2479872 - RNA, 19 nt, Artificial Sequence
  Description of Artificial Sequence: Synthetic oligonucleotide
  Sense strand starting at position 1021 of SEQ ID NO: 1887544
ugaugucauccucaucauc

SEQ ID NO: 2479873 - RNA, 19 nt, Artificial Sequence
  Description of Artificial Sequence: Synthetic oligonucleotide
  Antisense strand to SEQ ID NO: 2479872
gaugaugaggaugacauca

SEQ ID NO: 2479874 - RNA, 19 nt, Artificial Sequence
  Description of Artificial Sequence: Synthetic oligonucleotide
  Sense strand starting at position 1045 of SEQ ID NO: 1887544
cccacuacacguuggagaa

SEQ ID NO: 2479875 - RNA, 19 nt, Artificial Sequence
  Description of Artificial Sequence: Synthetic oligonucleotide
  Antisense strand to SEQ ID NO: 2479874
uucuccaacguguaguggg

SEQ ID NO: 2479876 - RNA, 19 nt, Artificial Sequence
  Description of Artificial Sequence: Synthetic oligonucleotide
  Sense strand starting at position 1291 of SEQ ID NO: 1887544
gggccuagcacacagauua

SEQ ID NO: 2479877 - RNA, 19 nt, Artificial Sequence
  Description of Artificial Sequence: Synthetic oligonucleotide
  Antisense strand to SEQ ID NO: 2479876
uaaucugugugcuaggccc

SEQ ID NO: 2479878 - RNA, 19 nt, Artificial Sequence
  Description of Artificial Sequence: Synthetic oligonucleotide
  Sense strand starting at position 1606 of SEQ ID NO: 1887544
uugugucagaaagacgauu

SEQ ID NO: 2479879 - RNA, 19 nt, Artificial Sequence
  Description of Artificial Sequence: Synthetic oligonucleotide
  Antisense strand to SEQ ID NO: 2479878
aaucgucuuucugacacaa

SEQ ID NO: 2479880 - RNA, 19 nt, Artificial Sequence
  Description of Artificial Sequence: Synthetic oligonucleotide
  Sense strand starting at position 1814 of SEQ ID NO: 1887544
ggcccaauccuaggaaugu

SEQ ID NO: 2479881 - RNA, 19 nt, Artificial Sequence
  Description of Artificial Sequence: Synthetic oligonucleotide
  Antisense strand to SEQ ID NO: 2479880
acauuccuaggauugggcc

SEQ ID NO: 2479882 - RNA, 19 nt, Artificial Sequence
  Description of Artificial Sequence: Synthetic oligonucleotide
  Sense strand starting at position 2082 of SEQ ID NO: 1887544
ccgcgaggaucucugggaa

SEQ ID NO: 2479883 - RNA, 19 nt, Artificial Sequence
  Description of Artificial Sequence: Synthetic oligonucleotide
  Antisense strand to SEQ ID NO: 2479882
uucccagagauccucgcgg

SEQ ID NO: 2479884 - RNA, 19 nt, Artificial Sequence
  Description of Artificial Sequence: Synthetic oligonucleotide
  Sense strand starting at position 2085 of SEQ ID NO: 1887544
cgaggaucucugggaacug

SEQ ID NO: 2479885 - RNA, 19 nt, Artificial Sequence
  Description of Artificial Sequence: Synthetic oligonucleotide
  Antisense strand to SEQ ID NO: 2479884
caguucccagagauccucg

SEQ ID NO: 2479886 - RNA, 19 nt, Artificial Sequence
  Description of Artificial Sequence: Synthetic oligonucleotide
  Sense strand starting at position 2118 of SEQ ID NO: 1887544
ccgagagccgcaaguguuu

SEQ ID NO: 2479887 - RNA, 19 nt, Artificial Sequence
  Description of Artificial Sequence: Synthetic oligonucleotide
  Antisense strand to SEQ ID NO: 2479886
aaacacuugcggcucucgg

SEQ ID NO: 2479888 - RNA, 19 nt, Artificial Sequence
  Description of Artificial Sequence: Synthetic oligonucleotide
  Sense strand starting at position 2252 of SEQ ID NO: 1887544
uccaguucugcccagguga

SEQ ID NO: 2479889 - RNA, 19 nt, Artificial Sequence
  Description of Artificial Sequence: Synthetic oligonucleotide
  Antisense strand to SEQ ID NO: 2479888
ucaccugggcagaacugga

SEQ ID NO: 2479890 - RNA, 19 nt, Artificial Sequence
  Description of Artificial Sequence: Synthetic oligonucleotide
  Sense strand starting at position 2324 of SEQ ID NO: 1887544
aguugagggucucuguauu

SEQ ID NO: 2479891 - RNA, 19 nt, Artificial Sequence
  Description of Artificial Sequence: Synthetic oligonucleotide
  Antisense strand to SEQ ID NO: 2479890
aauacagagacccucaacu

SEQ ID NO: 2479892 - RNA, 19 nt, Artificial Sequence
  Description of Artificial Sequence: Synthetic oligonucleotide
  Sense strand starting at position 2361 of SEQ ID NO: 1887544
guaggcgucccuggaaaga

SEQ ID NO: 2479893 - RNA, 19 nt, Artificial Sequence
  Description of Artificial Sequence: Synthetic oligonucleotide
  Antisense strand to SEQ ID NO: 2479892
ucuuuccagggacgccuac

SEQ ID NO: 2479894 - RNA, 19 nt, Artificial Sequence
  Description of Artificial Sequence: Synthetic oligonucleotide
  Sense strand starting at position 2363 of SEQ ID NO: 1887544
aggcgucccuggaaagaug

SEQ ID NO: 2479895 - RNA, 19 nt, Artificial Sequence
  Description of Artificial Sequence: Synthetic oligonucleotide
  Antisense strand to SEQ ID NO: 2479894
caucuuuccagggacgccu

SEQ ID NO: 2479896 - RNA, 19 nt, Artificial Sequence
  Description of Artificial Sequence: Synthetic oligonucleotide
  Sense strand starting at position 2419 of SEQ ID NO: 1887544
gugggagugcucuaagcag

SEQ ID NO: 2479897 - RNA, 19 nt, Artificial Sequence
  Description of Artificial Sequence: Synthetic oligonucleotide
  Antisense strand to SEQ ID NO: 2479896
cugcuuagagcacucccac

SEQ ID NO: 2479898 - RNA, 19 nt, Artificial Sequence
  Description of Artificial Sequence: Synthetic oligonucleotide
  Sense strand starting at position 2784 of SEQ ID NO: 1887544
gccaguguucuguuucucu

SEQ ID NO: 2479899 - RNA, 19 nt, Artificial Sequence
  Description of Artificial Sequence: Synthetic oligonucleotide
  Antisense strand to SEQ ID NO: 2479898
agagaaacagaacacuggc

SEQ ID NO: 2479900 - RNA, 19 nt, Artificial Sequence
  Description of Artificial Sequence: Synthetic oligonucleotide
  Sense strand starting at position 2826 of SEQ ID NO: 1887544
aaucuugugugagucucau

SEQ ID NO: 2479901 - RNA, 19 nt, Artificial Sequence
  Description of Artificial Sequence: Synthetic oligonucleotide
  Antisense strand to SEQ ID NO: 2479900
augagacucacacaagauu

SEQ ID NO: 2479902 - RNA, 19 nt, Artificial Sequence
  Description of Artificial Sequence: Synthetic oligonucleotide
  Sense strand starting at position 2845 of SEQ ID NO: 1887544
cgucucuaucuccagaaga

SEQ ID NO: 2479903 - RNA, 19 nt, Artificial Sequence
  Description of Artificial Sequence: Synthetic oligonucleotide
  Antisense strand to SEQ ID NO: 2479902
ucuucuggagauagagacg

SEQ ID NO: 2479904 - RNA, 19 nt, Artificial Sequence
  Description of Artificial Sequence: Synthetic oligonucleotide
  Sense strand starting at position 3010 of SEQ ID NO: 1887544
ccaggaagccuguggaaau

SEQ ID NO: 2479905 - RNA, 19 nt, Artificial Sequence
  Description of Artificial Sequence: Synthetic oligonucleotide
  Antisense strand to SEQ ID NO: 2479904
auuuccacaggcuuccugg

SEQ ID NO: 2479906 - RNA, 19 nt, Artificial Sequence
  Description of Artificial Sequence: Synthetic oligonucleotide
  Sense strand starting at position 3243 of SEQ ID NO: 1887544
ggagcauucuucccacccu

SEQ ID NO: 2479907 - RNA, 19 nt, Artificial Sequence
  Description of Artificial Sequence: Synthetic oligonucleotide
  Antisense strand to SEQ ID NO: 2479906
agggugggaagaaugcucc

SEQ ID NO: 2479908 - RNA, 19 nt, Artificial Sequence
  Description of Artificial Sequence: Synthetic oligonucleotide
  Sense strand starting at position 3388 of SEQ ID NO: 1887544
gcaucuuagucauuuacuu

SEQ ID NO: 2479909 - RNA, 19 nt, Artificial Sequence
  Description of Artificial Sequence: Synthetic oligonucleotide
  Antisense strand to SEQ ID NO: 2479908
aaguaaaugacuaagaugc

SEQ ID NO: 2479910 - RNA, 19 nt, Artificial Sequence
  Description of Artificial Sequence: Synthetic oligonucleotide
  Sense strand starting at position 3421 of SEQ ID NO: 1887544
ugguuccuccauuagaaca

SEQ ID NO: 2479911 - RNA, 19 nt, Artificial Sequence
  Description of Artificial Sequence: Synthetic oligonucleotide
  Antisense strand to SEQ ID NO: 2479910
uguucuaauggaggaacca

SEQ ID NO: 2479912 - RNA, 19 nt, Artificial Sequence
  Description of Artificial Sequence: Synthetic oligonucleotide
  Sense strand starting at position 3435 of SEQ ID NO: 1887544
gaacaucagugcccugaca

SEQ ID NO: 2479913 - RNA, 19 nt, Artificial Sequence
  Description of Artificial Sequence: Synthetic oligonucleotide
  Antisense strand to SEQ ID NO: 2479912
ugucagggcacugauguuc

SEQ ID NO: 2479914 - RNA, 19 nt, Artificial Sequence
  Description of Artificial Sequence: Synthetic oligonucleotide
  Sense strand starting at position 3498 of SEQ ID NO: 1887544
agagcaugcuggguacaua

SEQ ID NO: 2479915 - RNA, 19 nt, Artificial Sequence
  Description of Artificial Sequence: Synthetic oligonucleotide
  Antisense strand to SEQ ID NO: 2479914
uauguacccagcaugcucu

SEQ ID NO: 2479916 - RNA, 19 nt, Artificial Sequence
  Description of Artificial Sequence: Synthetic oligonucleotide
  Sense strand starting at position 3551 of SEQ ID NO: 1887544
augaaaguuugagcugaga

SEQ ID NO: 2479917 - RNA, 19 nt, Artificial Sequence
  Description of Artificial Sequence: Synthetic oligonucleotide
  Antisense strand to SEQ ID NO: 2479916
ucucagcucaaacuuucau

SEQ ID NO: 2479918 - RNA, 19 nt, Artificial Sequence
  Description of Artificial Sequence: Synthetic oligonucleotide
  Sense strand starting at position 3554 of SEQ ID NO: 1887544
aaaguuugagcugagacuu

SEQ ID NO: 2479919 - RNA, 19 nt, Artificial Sequence
  Description of Artificial Sequence: Synthetic oligonucleotide
  Antisense strand to SEQ ID NO: 2479918
aagucucagcucaaacuuu

SEQ ID NO: 2479920 - RNA, 19 nt, Artificial Sequence
  Description of Artificial Sequence: Synthetic oligonucleotide
  Sense strand starting at position 3573 of SEQ ID NO: 1887544
gaagguaagaguuaggucu

SEQ ID NO: 2479921 - RNA, 19 nt, Artificial Sequence
  Description of Artificial Sequence: Synthetic oligonucleotide
  Antisense strand to SEQ ID NO: 2479920
agaccuaacucuuaccuuc

SEQ ID NO: 2479922 - RNA, 19 nt, Artificial Sequence
  Description of Artificial Sequence: Synthetic oligonucleotide
  Sense strand starting at position 3587 of SEQ ID NO: 1887544
ggucuaccacaguguuuag

SEQ ID NO: 2479923 - RNA, 19 nt, Artificial Sequence
  Description of Artificial Sequence: Synthetic oligonucleotide
  Antisense strand to SEQ ID NO: 2479922
cuaaacacugugguagacc

SEQ ID NO: 2479924 - RNA, 19 nt, Artificial Sequence
  Description of Artificial Sequence: Synthetic oligonucleotide
  Sense strand starting at position 3750 of SEQ ID NO: 1887544
guacuaggugacugcagau

SEQ ID NO: 2479925 - RNA, 19 nt, Artificial Sequence
  Description of Artificial Sequence: Synthetic oligonucleotide
  Antisense strand to SEQ ID NO: 2479924
aucugcagucaccuaguac

SEQ ID NO: 2479926 - RNA, 19 nt, Artificial Sequence
  Description of Artificial Sequence: Synthetic oligonucleotide
  Sense strand starting at position 3788 of SEQ ID NO: 1887544
aguugucuuccauagagaa

SEQ ID NO: 2479927 - RNA, 19 nt, Artificial Sequence
  Description of Artificial Sequence: Synthetic oligonucleotide
  Antisense strand to SEQ ID NO: 2479926
uucucuauggaagacaacu

SEQ ID NO: 2479928 - RNA, 19 nt, Artificial Sequence
  Description of Artificial Sequence: Synthetic oligonucleotide
  Sense strand starting at position 3886 of SEQ ID NO: 1887544
ucaguugggcacugagaua

SEQ ID NO: 2479929 - RNA, 19 nt, Artificial Sequence
  Description of Artificial Sequence: Synthetic oligonucleotide
  Antisense strand to SEQ ID NO: 2479928
uaucucagugcccaacuga

SEQ ID NO: 2479930 - RNA, 19 nt, Artificial Sequence
  Description of Artificial Sequence: Synthetic oligonucleotide
  Sense strand starting at position 1024 of SEQ ID NO: 1887545
cuggaagagucaugugguc

SEQ ID NO: 2479931 - RNA, 19 nt, Artificial Sequence
  Description of Artificial Sequence: Synthetic oligonucleotide
  Antisense strand to SEQ ID NO: 2479930
gaccacaugacucuuccag

SEQ ID NO: 2479932 - RNA, 19 nt, Artificial Sequence
  Description of Artificial Sequence: Synthetic oligonucleotide
  Sense strand starting at position 1026 of SEQ ID NO: 1887545
ggaagagucauguggucaa

SEQ ID NO: 2479933 - RNA, 19 nt, Artificial Sequence
  Description of Artificial Sequence: Synthetic oligonucleotide
  Antisense strand to SEQ ID NO: 2479932
uugaccacaugacucuucc

SEQ ID NO: 2479934 - RNA, 19 nt, Artificial Sequence
  Description of Artificial Sequence: Synthetic oligonucleotide
  Sense strand starting at position 1048 of SEQ ID NO: 1887545
gaggaaagucagugguuga

SEQ ID NO: 2479935 - RNA, 19 nt, Artificial Sequence
  Description of Artificial Sequence: Synthetic oligonucleotide
  Antisense strand to SEQ ID NO: 2479934
ucaaccacugacuuuccuc

SEQ ID NO: 2479936 - RNA, 19 nt, Artificial Sequence
  Description of Artificial Sequence: Synthetic oligonucleotide
  Sense strand starting at position 1063 of SEQ ID NO: 1887545
uugagcucuuucuaaagca

SEQ ID NO: 2479937 - RNA, 19 nt, Artificial Sequence
  Description of Artificial Sequence: Synthetic oligonucleotide
  Antisense strand to SEQ ID NO: 2479936
ugcuuuagaaagagcucaa

SEQ ID NO: 2479938 - RNA, 19 nt, Artificial Sequence
  Description of Artificial Sequence: Synthetic oligonucleotide
  Sense strand starting at position 1494 of SEQ ID NO: 1887545
guugaauucuguuuccuuc

SEQ ID NO: 2479939 - RNA, 19 nt, Artificial Sequence
  Description of Artificial Sequence: Synthetic oligonucleotide
  Antisense strand to SEQ ID NO: 2479938
gaaggaaacagaauucaac

SEQ ID NO: 2479940 - RNA, 19 nt, Artificial Sequence
  Description of Artificial Sequence: Synthetic oligonucleotide
  Sense strand starting at position 1504 of SEQ ID NO: 1887545
guuuccuucccaugggcaa

SEQ ID NO: 2479941 - RNA, 19 nt, Artificial Sequence
  Description of Artificial Sequence: Synthetic oligonucleotide
  Antisense strand to SEQ ID NO: 2479940
uugcccaugggaaggaaac

SEQ ID NO: 2479942 - RNA, 19 nt, Artificial Sequence
  Description of Artificial Sequence: Synthetic oligonucleotide
  Sense strand starting at position 1517 of SEQ ID NO: 1887545
gggcaauuaucccacacga

SEQ ID NO: 2479943 - RNA, 19 nt, Artificial Sequence
  Description of Artificial Sequence: Synthetic oligonucleotide
  Antisense strand to SEQ ID NO: 2479942
ucgugugggauaauugccc

SEQ ID NO: 2479944 - RNA, 19 nt, Artificial Sequence
  Description of Artificial Sequence: Synthetic oligonucleotide
  Sense strand starting at position 1781 of SEQ ID NO: 1887545
ucaccauguuaccaagagu

SEQ ID NO: 2479945 - RNA, 19 nt, Artificial Sequence
  Description of Artificial Sequence: Synthetic oligonucleotide
  Antisense strand to SEQ ID NO: 2479944
acucuugguaacaugguga

SEQ ID NO: 2479946 - RNA, 19 nt, Artificial Sequence
  Description of Artificial Sequence: Synthetic oligonucleotide
  Sense strand starting at position 1784 of SEQ ID NO: 1887545
ccauguuaccaagaguugu

SEQ ID NO: 2479947 - RNA, 19 nt, Artificial Sequence
  Description of Artificial Sequence: Synthetic oligonucleotide
  Antisense strand to SEQ ID NO: 2479946
acaacucuugguaacaugg

SEQ ID NO: 2479948 - RNA, 19 nt, Artificial Sequence
  Description of Artificial Sequence: Synthetic oligonucleotide
  Sense strand starting at position 1788 of SEQ ID NO: 1887545
guuaccaagaguugucgaa

SEQ ID NO: 2479949 - RNA, 19 nt, Artificial Sequence
  Description of Artificial Sequence: Synthetic oligonucleotide
  Antisense strand to SEQ ID NO: 2479948
uucgacaacucuugguaac

SEQ ID NO: 2479950 - RNA, 19 nt, Artificial Sequence
  Description of Artificial Sequence: Synthetic oligonucleotide
  Sense strand starting at position 1790 of SEQ ID NO: 1887545
uaccaagaguugucgaacu

SEQ ID NO: 2479951 - RNA, 19 nt, Artificial Sequence
  Description of Artificial Sequence: Synthetic oligonucleotide
  Antisense strand to SEQ ID NO: 2479950
aguucgacaacucuuggua

SEQ ID NO: 2479952 - RNA, 19 nt, Artificial Sequence
  Description of Artificial Sequence: Synthetic oligonucleotide
  Sense strand starting at position 1792 of SEQ ID NO: 1887545
ccaagaguugucgaacucu

SEQ ID NO: 2479953 - RNA, 19 nt, Artificial Sequence
  Description of Artificial Sequence: Synthetic oligonucleotide
  Antisense strand to SEQ ID NO: 2479952
agaguucgacaacucuugg

SEQ ID NO: 2479954 - RNA, 19 nt, Artificial Sequence
  Description of Artificial Sequence: Synthetic oligonucleotide
  Sense strand starting at position 1912 of SEQ ID NO: 1887545
agcauugucccuugccuau

SEQ ID NO: 2479955 - RNA, 19 nt, Artificial Sequence
  Description of Artificial Sequence: Synthetic oligonucleotide
  Antisense strand to SEQ ID NO: 2479954
auaggcaagggacaaugcu

SEQ ID NO: 2479956 - RNA, 19 nt, Artificial Sequence
  Description of Artificial Sequence: Synthetic oligonucleotide
  Sense strand starting at position 1918 of SEQ ID NO: 1887545
gucccuugccuauaacaga

SEQ ID NO: 2479957 - RNA, 19 nt, Artificial Sequence
  Description of Artificial Sequence: Synthetic oligonucleotide
  Antisense strand to SEQ ID NO: 2479956
ucuguuauaggcaagggac

SEQ ID NO: 2479958 - RNA, 19 nt, Artificial Sequence
  Description of Artificial Sequence: Synthetic oligonucleotide
  Sense strand starting at position 2008 of SEQ ID NO: 1887545
agcaaagaaugugucagaa

SEQ ID NO: 2479959 - RNA, 19 nt, Artificial Sequence
  Description of Artificial Sequence: Synthetic oligonucleotide
  Antisense strand to SEQ ID NO: 2479958
uucugacacauucuuugcu

SEQ ID NO: 2479960 - RNA, 19 nt, Artificial Sequence
  Description of Artificial Sequence: Synthetic oligonucleotide
  Sense strand starting at position 2058 of SEQ ID NO: 1887545
cauucuguugcccggguua

SEQ ID NO: 2479961 - RNA, 19 nt, Artificial Sequence
  Description of Artificial Sequence: Synthetic oligonucleotide
  Antisense strand to SEQ ID NO: 2479960
uaacccgggcaacagaaug

SEQ ID NO: 2479962 - RNA, 19 nt, Artificial Sequence
  Description of Artificial Sequence: Synthetic oligonucleotide
  Sense strand starting at position 2085 of SEQ ID NO: 1887545
gggacaucuuuggugcuga

SEQ ID NO: 2479963 - RNA, 19 nt, Artificial Sequence
  Description of Artificial Sequence: Synthetic oligonucleotide
  Antisense strand to SEQ ID NO: 2479962
ucagcaccaaagauguccc

SEQ ID NO: 2479964 - RNA, 19 nt, Artificial Sequence
  Description of Artificial Sequence: Synthetic oligonucleotide
  Sense strand starting at position 2203 of SEQ ID NO: 1887545
ggcagugcaucaucucaaa

SEQ ID NO: 2479965 - RNA, 19 nt, Artificial Sequence
  Description of Artificial Sequence: Synthetic oligonucleotide
  Antisense strand to SEQ ID NO: 2479964
uuugagaugaugcacugcc

SEQ ID NO: 2479966 - RNA, 19 nt, Artificial Sequence
  Description of Artificial Sequence: Synthetic oligonucleotide
  Sense strand starting at position 2234 of SEQ ID NO: 1887545
gagcaaugguucgggcuga

SEQ ID NO: 2479967 - RNA, 19 nt, Artificial Sequence
  Description of Artificial Sequence: Synthetic oligonucleotide
  Antisense strand to SEQ ID NO: 2479966
ucagcccgaaccauugcuc

SEQ ID NO: 2479968 - RNA, 19 nt, Artificial Sequence
  Description of Artificial Sequence: Synthetic oligonucleotide
  Sense strand starting at position 2238 of SEQ ID NO: 1887545
aaugguucgggcugaguca

SEQ ID NO: 2479969 - RNA, 19 nt, Artificial Sequence
  Description of Artificial Sequence: Synthetic oligonucleotide
  Antisense strand to SEQ ID NO: 2479968
ugacucagcccgaaccauu

SEQ ID NO: 2479970 - RNA, 19 nt, Artificial Sequence
  Description of Artificial Sequence: Synthetic oligonucleotide
  Sense strand starting at position 2250 of SEQ ID NO: 1887545
ugagucacaccauguauga

SEQ ID NO: 2479971 - RNA, 19 nt, Artificial Sequence
  Description of Artificial Sequence: Synthetic oligonucleotide
  Antisense strand to SEQ ID NO: 2479970
ucauacauggugugacuca

SEQ ID NO: 2479972 - RNA, 19 nt, Artificial Sequence
  Description of Artificial Sequence: Synthetic oligonucleotide
  Sense strand starting at position 2283 of SEQ ID NO: 1887545
guauguggcuccucuccaa

SEQ ID NO: 2479973 - RNA, 19 nt, Artificial Sequence
  Description of Artificial Sequence: Synthetic oligonucleotide
  Antisense strand to SEQ ID NO: 2479972
uuggagaggagccacauac

SEQ ID NO: 2479974 - RNA, 19 nt, Artificial Sequence
  Description of Artificial Sequence: Synthetic oligonucleotide
  Sense strand starting at position 2344 of SEQ ID NO: 1887545
cguuacucugugugaggua

SEQ ID NO: 2479975 - RNA, 19 nt, Artificial Sequence
  Description of Artificial Sequence: Synthetic oligonucleotide
  Antisense strand to SEQ ID NO: 2479974
uaccucacacagaguaacg

SEQ ID NO: 2479976 - RNA, 19 nt, Artificial Sequence
  Description of Artificial Sequence: Synthetic oligonucleotide
  Sense strand starting at position 3288 of SEQ ID NO: 1887545
aggaaaggccugggacauu

SEQ ID NO: 2479977 - RNA, 19 nt, Artificial Sequence
  Description of Artificial Sequence: Synthetic oligonucleotide
  Antisense strand to SEQ ID NO: 2479976
aaugucccaggccuuuccu

SEQ ID NO: 2479978 - RNA, 19 nt, Artificial Sequence
  Description of Artificial Sequence: Synthetic oligonucleotide
  Sense strand starting at position 3325 of SEQ ID NO: 1887545
ccacuaucugaagagcguu

SEQ ID NO: 2479979 - RNA, 19 nt, Artificial Sequence
  Description of Artificial Sequence: Synthetic oligonucleotide
  Antisense strand to SEQ ID NO: 2479978
aacgcucuucagauagugg

SEQ ID NO: 2479980 - RNA, 19 nt, Artificial Sequence
  Description of Artificial Sequence: Synthetic oligonucleotide
  Sense strand starting at position 3362 of SEQ ID NO: 1887545
gggaacuuagccugaacca

SEQ ID NO: 2479981 - RNA, 19 nt, Artificial Sequence
  Description of Artificial Sequence: Synthetic oligonucleotide
  Antisense strand to SEQ ID NO: 2479980
ugguucaggcuaaguuccc

SEQ ID NO: 2479982 - RNA, 19 nt, Artificial Sequence
  Description of Artificial Sequence: Synthetic oligonucleotide
  Sense strand starting at position 3390 of SEQ ID NO: 1887545
ugaguuggacuugagaugu

SEQ ID NO: 2479983 - RNA, 19 nt, Artificial Sequence
  Description of Artificial Sequence: Synthetic oligonucleotide
  Antisense strand to SEQ ID NO: 2479982
acaucucaaguccaacuca

SEQ ID NO: 2479984 - RNA, 19 nt, Artificial Sequence
  Description of Artificial Sequence: Synthetic oligonucleotide
  Sense strand starting at position 3472 of SEQ ID NO: 1887545
acagcuuagucugaauucu

SEQ ID NO: 2479985 - RNA, 19 nt, Artificial Sequence
  Description of Artificial Sequence: Synthetic oligonucleotide
  Antisense strand to SEQ ID NO: 2479984
agaauucagacuaagcugu

SEQ ID NO: 2479986 - RNA, 19 nt, Artificial Sequence
  Description of Artificial Sequence: Synthetic oligonucleotide
  Sense strand starting at position 3930 of SEQ ID NO: 1887545
gcuguaaagugcugacuuu

SEQ ID NO: 2479987 - RNA, 19 nt, Artificial Sequence
  Description of Artificial Sequence: Synthetic oligonucleotide
  Antisense strand to SEQ ID NO: 2479986
aaagucagcacuuuacagc

SEQ ID NO: 2479988 - RNA, 19 nt, Artificial Sequence
  Description of Artificial Sequence: Synthetic oligonucleotide
  Sense strand starting at position 3931 of SEQ ID NO: 1887545
cuguaaagugcugacuuua

SEQ ID NO: 2479989 - RNA, 19 nt, Artificial Sequence
  Description of Artificial Sequence: Synthetic oligonucleotide
  Antisense strand to SEQ ID NO: 2479988
uaaagucagcacuuuacag

SEQ ID NO: 2479990 - RNA, 19 nt, Artificial Sequence
  Description of Artificial Sequence: Synthetic oligonucleotide
  Sense strand starting at position 3981 of SEQ ID NO: 1887545
accucauccguugaucaua

SEQ ID NO: 2479991 - RNA, 19 nt, Artificial Sequence
  Description of Artificial Sequence: Synthetic oligonucleotide
  Antisense strand to SEQ ID NO: 2479990
uaugaucaacggaugaggu

SEQ ID NO: 2479992 - RNA, 19 nt, Artificial Sequence
  Description of Artificial Sequence: Synthetic oligonucleotide
  Sense strand starting at position 163 of SEQ ID NO: 1887546
ugcuaagugagauggaaca

SEQ ID NO: 2479993 - RNA, 19 nt, Artificial Sequence
  Description of Artificial Sequence: Synthetic oligonucleotide
  Antisense strand to SEQ ID NO: 2479992
uguuccaucucacuuagca

SEQ ID NO: 2479994 - RNA, 19 nt, Artificial Sequence
  Description of Artificial Sequence: Synthetic oligonucleotide
  Sense strand starting at position 388 of SEQ ID NO: 1887546
gugucaggaugauugaaca

SEQ ID NO: 2479995 - RNA, 19 nt, Artificial Sequence
  Description of Artificial Sequence: Synthetic oligonucleotide
  Antisense strand to SEQ ID NO: 2479994
uguucaaucauccugacac

SEQ ID NO: 2479996 - RNA, 19 nt, Artificial Sequence
  Description of Artificial Sequence: Synthetic oligonucleotide
  Sense strand starting at position 423 of SEQ ID NO: 1887546
ugagacaugccaggcuuua

SEQ ID NO: 2479997 - RNA, 19 nt, Artificial Sequence
  Description of Artificial Sequence: Synthetic oligonucleotide
  Antisense strand to SEQ ID NO: 2479996
uaaagccuggcaugucuca

SEQ ID NO: 2479998 - RNA, 19 nt, Artificial Sequence
  Description of Artificial Sequence: Synthetic oligonucleotide
  Sense strand starting at position 555 of SEQ ID NO: 1887546
gccugagcuggucaugaga

SEQ ID NO: 2479999 - RNA, 19 nt, Artificial Sequence
  Description of Artificial Sequence: Synthetic oligonucleotide
  Antisense strand to SEQ ID NO: 2479998
ucucaugaccagcucaggc

SEQ ID NO: 2480000 - RNA, 19 nt, Artificial Sequence
  Description of Artificial Sequence: Synthetic oligonucleotide
  Sense strand starting at position 563 of SEQ ID NO: 1887546
uggucaugagagugaaggu

SEQ ID NO: 2480001 - RNA, 19 nt, Artificial Sequence
  Description of Artificial Sequence: Synthetic oligonucleotide
  Antisense strand to SEQ ID NO: 2480000
accuucacucucaugacca

SEQ ID NO: 2480002 - RNA, 19 nt, Artificial Sequence
  Description of Artificial Sequence: Synthetic oligonucleotide
  Sense strand starting at position 655 of SEQ ID NO: 1887546
ggcagcagccuguuuagua

SEQ ID NO: 2480003 - RNA, 19 nt, Artificial Sequence
  Description of Artificial Sequence: Synthetic oligonucleotide
  Antisense strand to SEQ ID NO: 2480002
uacuaaacaggcugcugcc

SEQ ID NO: 2480004 - RNA, 19 nt, Artificial Sequence
  Description of Artificial Sequence: Synthetic oligonucleotide
  Sense strand starting at position 746 of SEQ ID NO: 1887546
gcgcccaguguguuaggaa

SEQ ID NO: 2480005 - RNA, 19 nt, Artificial Sequence
  Description of Artificial Sequence: Synthetic oligonucleotide
  Antisense strand to SEQ ID NO: 2480004
uuccuaacacacugggcgc

SEQ ID NO: 2480006 - RNA, 19 nt, Artificial Sequence
  Description of Artificial Sequence: Synthetic oligonucleotide
  Sense strand starting at position 1019 of SEQ ID NO: 1887546
uugguuucucuacagaaau

SEQ ID NO: 2480007 - RNA, 19 nt, Artificial Sequence
  Description of Artificial Sequence: Synthetic oligonucleotide
  Antisense strand to SEQ ID NO: 2480006
auuucuguagagaaaccaa

SEQ ID NO: 2480008 - RNA, 19 nt, Artificial Sequence
  Description of Artificial Sequence: Synthetic oligonucleotide
  Sense strand starting at position 1054 of SEQ ID NO: 1887546
acauaugucccugaguucu

SEQ ID NO: 2480009 - RNA, 19 nt, Artificial Sequence
  Description of Artificial Sequence: Synthetic oligonucleotide
  Antisense strand to SEQ ID NO: 2480008
agaacucagggacauaugu

SEQ ID NO: 2480010 - RNA, 19 nt, Artificial Sequence
  Description of Artificial Sequence: Synthetic oligonucleotide
  Sense strand starting at position 1104 of SEQ ID NO: 1887546
gugggauucgcugacaggu

SEQ ID NO: 2480011 - RNA, 19 nt, Artificial Sequence
  Description of Artificial Sequence: Synthetic oligonucleotide
  Antisense strand to SEQ ID NO: 2480010
accugucagcgaaucccac

SEQ ID NO: 2480012 - RNA, 19 nt, Artificial Sequence
  Description of Artificial Sequence: Synthetic oligonucleotide
  Sense strand starting at position 1117 of SEQ ID NO: 1887546
acagguagaccucggauaa

SEQ ID NO: 2480013 - RNA, 19 nt, Artificial Sequence
  Description of Artificial Sequence: Synthetic oligonucleotide
  Antisense strand to SEQ ID NO: 2480012
uuauccgaggucuaccugu

SEQ ID NO: 2480014 - RNA, 19 nt, Artificial Sequence
  Description of Artificial Sequence: Synthetic oligonucleotide
  Sense strand starting at position 1118 of SEQ ID NO: 1887546
cagguagaccucggauaag

SEQ ID NO: 2480015 - RNA, 19 nt, Artificial Sequence
  Description of Artificial Sequence: Synthetic oligonucleotide
  Antisense strand to SEQ ID NO: 2480014
cuuauccgaggucuaccug

SEQ ID NO: 2480016 - RNA, 19 nt, Artificial Sequence
  Description of Artificial Sequence: Synthetic oligonucleotide
  Sense strand starting at position 1138 of SEQ ID NO: 1887546
gggaauugcaggcagaacu

SEQ ID NO: 2480017 - RNA, 19 nt, Artificial Sequence
  Description of Artificial Sequence: Synthetic oligonucleotide
  Antisense strand to SEQ ID NO: 2480016
aguucugccugcaauuccc

SEQ ID NO: 2480018 - RNA, 19 nt, Artificial Sequence
  Description of Artificial Sequence: Synthetic oligonucleotide
  Sense strand starting at position 1149 of SEQ ID NO: 1887546
gcagaacucugaccacacu

SEQ ID NO: 2480019 - RNA, 19 nt, Artificial Sequence
  Description of Artificial Sequence: Synthetic oligonucleotide
  Antisense strand to SEQ ID NO: 2480018
aguguggucagaguucugc

SEQ ID NO: 2480020 - RNA, 19 nt, Artificial Sequence
  Description of Artificial Sequence: Synthetic oligonucleotide
  Sense strand starting at position 1178 of SEQ ID NO: 1887546
uuaaguuuauuccugagag

SEQ ID NO: 2480021 - RNA, 19 nt, Artificial Sequence
  Description of Artificial Sequence: Synthetic oligonucleotide
  Antisense strand to SEQ ID NO: 2480020
cucucaggaauaaacuuaa

SEQ ID NO: 2480022 - RNA, 19 nt, Artificial Sequence
  Description of Artificial Sequence: Synthetic oligonucleotide
  Sense strand starting at position 1373 of SEQ ID NO: 1887546
guguguacccuccauauau

SEQ ID NO: 2480023 - RNA, 19 nt, Artificial Sequence
  Description of Artificial Sequence: Synthetic oligonucleotide
  Antisense strand to SEQ ID NO: 2480022
auauauggaggguacacac

SEQ ID NO: 2480024 - RNA, 19 nt, Artificial Sequence
  Description of Artificial Sequence: Synthetic oligonucleotide
  Sense strand starting at position 2061 of SEQ ID NO: 1887546
ugcuuuguucugucuguca

SEQ ID NO: 2480025 - RNA, 19 nt, Artificial Sequence
  Description of Artificial Sequence: Synthetic oligonucleotide
  Antisense strand to SEQ ID NO: 2480024
ugacagacagaacaaagca

SEQ ID NO: 2480026 - RNA, 19 nt, Artificial Sequence
  Description of Artificial Sequence: Synthetic oligonucleotide
  Sense strand starting at position 2137 of SEQ ID NO: 1887546
ggguguccucccgagacca

SEQ ID NO: 2480027 - RNA, 19 nt, Artificial Sequence
  Description of Artificial Sequence: Synthetic oligonucleotide
  Antisense strand to SEQ ID NO: 2480026
uggucucgggaggacaccc

SEQ ID NO: 2480028 - RNA, 19 nt, Artificial Sequence
  Description of Artificial Sequence: Synthetic oligonucleotide
  Sense strand starting at position 2249 of SEQ ID NO: 1887546
gggauucucugacuccauu

SEQ ID NO: 2480029 - RNA, 19 nt, Artificial Sequence
  Description of Artificial Sequence: Synthetic oligonucleotide
  Antisense strand to SEQ ID NO: 2480028
aauggagucagagaauccc

SEQ ID NO: 2480030 - RNA, 19 nt, Artificial Sequence
  Description of Artificial Sequence: Synthetic oligonucleotide
  Sense strand starting at position 2260 of SEQ ID NO: 1887546
acuccauuccuuuggguga

SEQ ID NO: 2480031 - RNA, 19 nt, Artificial Sequence
  Description of Artificial Sequence: Synthetic oligonucleotide
  Antisense strand to SEQ ID NO: 2480030
ucacccaaaggaauggagu

SEQ ID NO: 2480032 - RNA, 19 nt, Artificial Sequence
  Description of Artificial Sequence: Synthetic oligonucleotide
  Sense strand starting at position 2281 of SEQ ID NO: 1887546
ggaacacguguuuagucaa

SEQ ID NO: 2480033 - RNA, 19 nt, Artificial Sequence
  Description of Artificial Sequence: Synthetic oligonucleotide
  Antisense strand to SEQ ID NO: 2480032
uugacuaaacacguguucc

SEQ ID NO: 2480034 - RNA, 19 nt, Artificial Sequence
  Description of Artificial Sequence: Synthetic oligonucleotide
  Sense strand starting at position 2403 of SEQ ID NO: 1887546
acccguuaagcagaaacaa

SEQ ID NO: 2480035 - RNA, 19 nt, Artificial Sequence
  Description of Artificial Sequence: Synthetic oligonucleotide
  Antisense strand to SEQ ID NO: 2480034
uuguuucugcuuaacgggu

SEQ ID NO: 2480036 - RNA, 19 nt, Artificial Sequence
  Description of Artificial Sequence: Synthetic oligonucleotide
  Sense strand starting at position 2551 of SEQ ID NO: 1887546
gaaguaccgacucaguguu

SEQ ID NO: 2480037 - RNA, 19 nt, Artificial Sequence
  Description of Artificial Sequence: Synthetic oligonucleotide
  Antisense strand to SEQ ID NO: 2480036
aacacugagucgguacuuc

SEQ ID NO: 2480038 - RNA, 19 nt, Artificial Sequence
  Description of Artificial Sequence: Synthetic oligonucleotide
  Sense strand starting at position 2598 of SEQ ID NO: 1887546
caagcugaucagugaauca

SEQ ID NO: 2480039 - RNA, 19 nt, Artificial Sequence
  Description of Artificial Sequence: Synthetic oligonucleotide
  Antisense strand to SEQ ID NO: 2480038
ugauucacugaucagcuug

SEQ ID NO: 2480040 - RNA, 19 nt, Artificial Sequence
  Description of Artificial Sequence: Synthetic oligonucleotide
  Sense strand starting at position 2609 of SEQ ID NO: 1887546
gugaaucagucacccagaa

SEQ ID NO: 2480041 - RNA, 19 nt, Artificial Sequence
  Description of Artificial Sequence: Synthetic oligonucleotide
  Antisense strand to SEQ ID NO: 2480040
uucugggugacugauucac

SEQ ID NO: 2480042 - RNA, 19 nt, Artificial Sequence
  Description of Artificial Sequence: Synthetic oligonucleotide
  Sense strand starting at position 2629 of SEQ ID NO: 1887546
uguuuccucccgggaauga

SEQ ID NO: 2480043 - RNA, 19 nt, Artificial Sequence
  Description of Artificial Sequence: Synthetic oligonucleotide
  Antisense strand to SEQ ID NO: 2480042
ucauucccgggaggaaaca

SEQ ID NO: 2480044 - RNA, 19 nt, Artificial Sequence
  Description of Artificial Sequence: Synthetic oligonucleotide
  Sense strand starting at position 2642 of SEQ ID NO: 1887546
gaaugagcucugggagcua

SEQ ID NO: 2480045 - RNA, 19 nt, Artificial Sequence
  Description of Artificial Sequence: Synthetic oligonucleotide
  Antisense strand to SEQ ID NO: 2480044
uagcucccagagcucauuc

SEQ ID NO: 2480046 - RNA, 19 nt, Artificial Sequence
  Description of Artificial Sequence: Synthetic oligonucleotide
  Sense strand starting at position 2653 of SEQ ID NO: 1887546
gggagcuaaccuugaacca

SEQ ID NO: 2480047 - RNA, 19 nt, Artificial Sequence
  Description of Artificial Sequence: Synthetic oligonucleotide
  Antisense strand to SEQ ID NO: 2480046
ugguucaagguuagcuccc

SEQ ID NO: 2480048 - RNA, 19 nt, Artificial Sequence
  Description of Artificial Sequence: Synthetic oligonucleotide
  Sense strand starting at position 2870 of SEQ ID NO: 1887546
augguaauauggccauaga

SEQ ID NO: 2480049 - RNA, 19 nt, Artificial Sequence
  Description of Artificial Sequence: Synthetic oligonucleotide
  Antisense strand to SEQ ID NO: 2480048
ucuauggccauauuaccau

SEQ ID NO: 2480050 - RNA, 19 nt, Artificial Sequence
  Description of Artificial Sequence: Synthetic oligonucleotide
  Sense strand starting at position 2871 of SEQ ID NO: 1887546
ugguaauauggccauagac

SEQ ID NO: 2480051 - RNA, 19 nt, Artificial Sequence
  Description of Artificial Sequence: Synthetic oligonucleotide
  Antisense strand to SEQ ID NO: 2480050
gucuauggccauauuacca

SEQ ID NO: 2480052 - RNA, 19 nt, Artificial Sequence
  Description of Artificial Sequence: Synthetic oligonucleotide
  Sense strand starting at position 2873 of SEQ ID NO: 1887546
guaauauggccauagacac

SEQ ID NO: 2480053 - RNA, 19 nt, Artificial Sequence
  Description of Artificial Sequence: Synthetic oligonucleotide
  Antisense strand to SEQ ID NO: 2480052
gugucuauggccauauuac

SEQ ID NO: 2480054 - RNA, 19 nt, Artificial Sequence
  Description of Artificial Sequence: Synthetic oligonucleotide
  Sense strand starting at position 3189 of SEQ ID NO: 1887546
guggaugcaucuccagaca

SEQ ID NO: 2480055 - RNA, 19 nt, Artificial Sequence
  Description of Artificial Sequence: Synthetic oligonucleotide
  Antisense strand to SEQ ID NO: 2480054
ugucuggagaugcauccac

SEQ ID NO: 2480056 - RNA, 19 nt, Artificial Sequence
  Description of Artificial Sequence: Synthetic oligonucleotide
  Sense strand starting at position 3328 of SEQ ID NO: 1887546
gauguuuguaaagagcagu

SEQ ID NO: 2480057 - RNA, 19 nt, Artificial Sequence
  Description of Artificial Sequence: Synthetic oligonucleotide
  Antisense strand to SEQ ID NO: 2480056
acugcucuuuacaaacauc

SEQ ID NO: 2480058 - RNA, 19 nt, Artificial Sequence
  Description of Artificial Sequence: Synthetic oligonucleotide
  Sense strand starting at position 3386 of SEQ ID NO: 1887546
cacccaugucuuugaagug

SEQ ID NO: 2480059 - RNA, 19 nt, Artificial Sequence
  Description of Artificial Sequence: Synthetic oligonucleotide
  Antisense strand to SEQ ID NO: 2480058
cacuucaaagacaugggug

SEQ ID NO: 2480060 - RNA, 19 nt, Artificial Sequence
  Description of Artificial Sequence: Synthetic oligonucleotide
  Sense strand starting at position 3391 of SEQ ID NO: 1887546
augucuuugaaguggaauu

SEQ ID NO: 2480061 - RNA, 19 nt, Artificial Sequence
  Description of Artificial Sequence: Synthetic oligonucleotide
  Antisense strand to SEQ ID NO: 2480060
aauuccacuucaaagacau

SEQ ID NO: 2480062 - RNA, 19 nt, Artificial Sequence
  Description of Artificial Sequence: Synthetic oligonucleotide
  Sense strand starting at position 3510 of SEQ ID NO: 1887546
ggauguauuuaggagugaa

SEQ ID NO: 2480063 - RNA, 19 nt, Artificial Sequence
  Description of Artificial Sequence: Synthetic oligonucleotide
  Antisense strand to SEQ ID NO: 2480062
uucacuccuaaauacaucc

SEQ ID NO: 2480064 - RNA, 19 nt, Artificial Sequence
  Description of Artificial Sequence: Synthetic oligonucleotide
  Sense strand starting at position 3523 of SEQ ID NO: 1887546
agugaaaugacacgauguu

SEQ ID NO: 2480065 - RNA, 19 nt, Artificial Sequence
  Description of Artificial Sequence: Synthetic oligonucleotide
  Antisense strand to SEQ ID NO: 2480064
aacaucgugucauuucacu

SEQ ID NO: 2480066 - RNA, 19 nt, Artificial Sequence
  Description of Artificial Sequence: Synthetic oligonucleotide
  Sense strand starting at position 3594 of SEQ ID NO: 1887546
agaaacacguaauuguuaa

SEQ ID NO: 2480067 - RNA, 19 nt, Artificial Sequence
  Description of Artificial Sequence: Synthetic oligonucleotide
  Antisense strand to SEQ ID NO: 2480066
uuaacaauuacguguuucu

SEQ ID NO: 2480068 - RNA, 19 nt, Artificial Sequence
  Description of Artificial Sequence: Synthetic oligonucleotide
  Sense strand starting at position 3770 of SEQ ID NO: 1887546
ggugguccaggauaucauu

SEQ ID NO: 2480069 - RNA, 19 nt, Artificial Sequence
  Description of Artificial Sequence: Synthetic oligonucleotide
  Antisense strand to SEQ ID NO: 2480068
aaugauauccuggaccacc

SEQ ID NO: 2480070 - RNA, 19 nt, Artificial Sequence
  Description of Artificial Sequence: Synthetic oligonucleotide
  Sense strand starting at position 3815 of SEQ ID NO: 1887546
ucauuaaccuaauugugga

SEQ ID NO: 2480071 - RNA, 19 nt, Artificial Sequence
  Description of Artificial Sequence: Synthetic oligonucleotide
  Antisense strand to SEQ ID NO: 2480070
uccacaauuagguuaauga

SEQ ID NO: 2480072 - RNA, 19 nt, Artificial Sequence
  Description of Artificial Sequence: Synthetic oligonucleotide
  Sense strand starting at position 203 of SEQ ID NO: 1887547
uuucuagugaggugaaugu

SEQ ID NO: 2480073 - RNA, 19 nt, Artificial Sequence
  Description of Artificial Sequence: Synthetic oligonucleotide
  Antisense strand to SEQ ID NO: 2480072
acauucaccucacuagaaa

SEQ ID NO: 2480074 - RNA, 19 nt, Artificial Sequence
  Description of Artificial Sequence: Synthetic oligonucleotide
  Sense strand starting at position 207 of SEQ ID NO: 1887547
uagugaggugaauguggau

SEQ ID NO: 2480075 - RNA, 19 nt, Artificial Sequence
  Description of Artificial Sequence: Synthetic oligonucleotide
  Antisense strand to SEQ ID NO: 2480074
auccacauucaccucacua

SEQ ID NO: 2480076 - RNA, 19 nt, Artificial Sequence
  Description of Artificial Sequence: Synthetic oligonucleotide
  Sense strand starting at position 391 of SEQ ID NO: 1887547
ggagaucggcuuugagcaa

SEQ ID NO: 2480077 - RNA, 19 nt, Artificial Sequence
  Description of Artificial Sequence: Synthetic oligonucleotide
  Antisense strand to SEQ ID NO: 2480076
uugcucaaagccgaucucc

SEQ ID NO: 2480078 - RNA, 19 nt, Artificial Sequence
  Description of Artificial Sequence: Synthetic oligonucleotide
  Sense strand starting at position 398 of SEQ ID NO: 1887547
ggcuuugagcaaggacaga

SEQ ID NO: 2480079 - RNA, 19 nt, Artificial Sequence
  Description of Artificial Sequence: Synthetic oligonucleotide
  Antisense strand to SEQ ID NO: 2480078
ucuguccuugcucaaagcc

SEQ ID NO: 2480080 - RNA, 19 nt, Artificial Sequence
  Description of Artificial Sequence: Synthetic oligonucleotide
  Sense strand starting at position 590 of SEQ ID NO: 1887547
acccauuggccuuaucagu

SEQ ID NO: 2480081 - RNA, 19 nt, Artificial Sequence
  Description of Artificial Sequence: Synthetic oligonucleotide
  Antisense strand to SEQ ID NO: 2480080
acugauaaggccaaugggu

SEQ ID NO: 2480082 - RNA, 19 nt, Artificial Sequence
  Description of Artificial Sequence: Synthetic oligonucleotide
  Sense strand starting at position 596 of SEQ ID NO: 1887547
uggccuuaucaguacucuu

SEQ ID NO: 2480083 - RNA, 19 nt, Artificial Sequence
  Description of Artificial Sequence: Synthetic oligonucleotide
  Antisense strand to SEQ ID NO: 2480082
aagaguacugauaaggcca

SEQ ID NO: 2480084 - RNA, 19 nt, Artificial Sequence
  Description of Artificial Sequence: Synthetic oligonucleotide
  Sense strand starting at position 697 of SEQ ID NO: 1887547
ggcccuugucaugaacaua

SEQ ID NO: 2480085 - RNA, 19 nt, Artificial Sequence
  Description of Artificial Sequence: Synthetic oligonucleotide
  Antisense strand to SEQ ID NO: 2480084
uauguucaugacaagggcc

SEQ ID NO: 2480086 - RNA, 19 nt, Artificial Sequence
  Description of Artificial Sequence: Synthetic oligonucleotide
  Sense strand starting at position 773 of SEQ ID NO: 1887547
uugggaagagcuugaguua

SEQ ID NO: 2480087 - RNA, 19 nt, Artificial Sequence
  Description of Artificial Sequence: Synthetic oligonucleotide
  Antisense strand to SEQ ID NO: 2480086
uaacucaagcucuucccaa

SEQ ID NO: 2480088 - RNA, 19 nt, Artificial Sequence
  Description of Artificial Sequence: Synthetic oligonucleotide
  Sense strand starting at position 776 of SEQ ID NO: 1887547
ggaagagcuugaguuagca

SEQ ID NO: 2480089 - RNA, 19 nt, Artificial Sequence
  Description of Artificial Sequence: Synthetic oligonucleotide
  Antisense strand to SEQ ID NO: 2480088
ugcuaacucaagcucuucc

SEQ ID NO: 2480090 - RNA, 19 nt, Artificial Sequence
  Description of Artificial Sequence: Synthetic oligonucleotide
  Sense strand starting at position 805 of SEQ ID NO: 1887547
cagguaaagcuauggcaga

SEQ ID NO: 2480091 - RNA, 19 nt, Artificial Sequence
  Description of Artificial Sequence: Synthetic oligonucleotide
  Antisense strand to SEQ ID NO: 2480090
ucugccauagcuuuaccug

SEQ ID NO: 2480092 - RNA, 19 nt, Artificial Sequence
  Description of Artificial Sequence: Synthetic oligonucleotide
  Sense strand starting at position 891 of SEQ ID NO: 1887547
gggagccauggguggaaau

SEQ ID NO: 2480093 - RNA, 19 nt, Artificial Sequence
  Description of Artificial Sequence: Synthetic oligonucleotide
  Antisense strand to SEQ ID NO: 2480092
auuuccacccauggcuccc

SEQ ID NO: 2480094 - RNA, 19 nt, Artificial Sequence
  Description of Artificial Sequence: Synthetic oligonucleotide
  Sense strand starting at position 914 of SEQ ID NO: 1887547
uggaguggucauggaggaa

SEQ ID NO: 2480095 - RNA, 19 nt, Artificial Sequence
  Description of Artificial Sequence: Synthetic oligonucleotide
  Antisense strand to SEQ ID NO: 2480094
uuccuccaugaccacucca

SEQ ID NO: 2480096 - RNA, 19 nt, Artificial Sequence
  Description of Artificial Sequence: Synthetic oligonucleotide
  Sense strand starting at position 1028 of SEQ ID NO: 1887547
cugaggagugggugucuga

SEQ ID NO: 2480097 - RNA, 19 nt, Artificial Sequence
  Description of Artificial Sequence: Synthetic oligonucleotide
  Antisense strand to SEQ ID NO: 2480096
ucagacacccacuccucag

SEQ ID NO: 2480098 - RNA, 19 nt, Artificial Sequence
  Description of Artificial Sequence: Synthetic oligonucleotide
  Sense strand starting at position 1031 of SEQ ID NO: 1887547
aggagugggugucugagau

SEQ ID NO: 2480099 - RNA, 19 nt, Artificial Sequence
  Description of Artificial Sequence: Synthetic oligonucleotide
  Antisense strand to SEQ ID NO: 2480098
aucucagacacccacuccu

SEQ ID NO: 2480100 - RNA, 19 nt, Artificial Sequence
  Description of Artificial Sequence: Synthetic oligonucleotide
  Sense strand starting at position 1043 of SEQ ID NO: 1887547
cugagaucugccuauggga

SEQ ID NO: 2480101 - RNA, 19 nt, Artificial Sequence
  Description of Artificial Sequence: Synthetic oligonucleotide
  Antisense strand to SEQ ID NO: 2480100
ucccauaggcagaucucag

SEQ ID NO: 2480102 - RNA, 19 nt, Artificial Sequence
  Description of Artificial Sequence: Synthetic oligonucleotide
  Sense strand starting at position 1045 of SEQ ID NO: 1887547
gagaucugccuaugggaag

SEQ ID NO: 2480103 - RNA, 19 nt, Artificial Sequence
  Description of Artificial Sequence: Synthetic oligonucleotide
  Antisense strand to SEQ ID NO: 2480102
cuucccauaggcagaucuc

SEQ ID NO: 2480104 - RNA, 19 nt, Artificial Sequence
  Description of Artificial Sequence: Synthetic oligonucleotide
  Sense strand starting at position 1345 of SEQ ID NO: 1887547
ggcagaaagcccugaugga

SEQ ID NO: 2480105 - RNA, 19 nt, Artificial Sequence
  Description of Artificial Sequence: Synthetic oligonucleotide
  Antisense strand to SEQ ID NO: 2480104
uccaucagggcuuucugcc

SEQ ID NO: 2480106 - RNA, 19 nt, Artificial Sequence
  Description of Artificial Sequence: Synthetic oligonucleotide
  Sense strand starting at position 1415 of SEQ ID NO: 1887547
gcgagauucuuaccauuag

SEQ ID NO: 2480107 - RNA, 19 nt, Artificial Sequence
  Description of Artificial Sequence: Synthetic oligonucleotide
  Antisense strand to SEQ ID NO: 2480106
cuaaugguaagaaucucgc

SEQ ID NO: 2480108 - RNA, 19 nt, Artificial Sequence
  Description of Artificial Sequence: Synthetic oligonucleotide
  Sense strand starting at position 1533 of SEQ ID NO: 1887547
agaccaguguguucuuaug

SEQ ID NO: 2480109 - RNA, 19 nt, Artificial Sequence
  Description of Artificial Sequence: Synthetic oligonucleotide
  Antisense strand to SEQ ID NO: 2480108
cauaagaacacacuggucu

SEQ ID NO: 2480110 - RNA, 19 nt, Artificial Sequence
  Description of Artificial Sequence: Synthetic oligonucleotide
  Sense strand starting at position 1535 of SEQ ID NO: 1887547
accaguguguucuuaugaa

SEQ ID NO: 2480111 - RNA, 19 nt, Artificial Sequence
  Description of Artificial Sequence: Synthetic oligonucleotide
  Antisense strand to SEQ ID NO: 2480110
uucauaagaacacacuggu

SEQ ID NO: 2480112 - RNA, 19 nt, Artificial Sequence
  Description of Artificial Sequence: Synthetic oligonucleotide
  Sense strand starting at position 1822 of SEQ ID NO: 1887547
gcuuucuugcaugagauug

SEQ ID NO: 2480113 - RNA, 19 nt, Artificial Sequence
  Description of Artificial Sequence: Synthetic oligonucleotide
  Antisense strand to SEQ ID NO: 2480112
caaucucaugcaagaaagc

SEQ ID NO: 2480114 - RNA, 19 nt, Artificial Sequence
  Description of Artificial Sequence: Synthetic oligonucleotide
  Sense strand starting at position 1830 of SEQ ID NO: 1887547
gcaugagauugagcgagau

SEQ ID NO: 2480115 - RNA, 19 nt, Artificial Sequence
  Description of Artificial Sequence: Synthetic oligonucleotide
  Antisense strand to SEQ ID NO: 2480114
aucucgcucaaucucaugc

SEQ ID NO: 2480116 - RNA, 19 nt, Artificial Sequence
  Description of Artificial Sequence: Synthetic oligonucleotide
  Sense strand starting at position 2073 of SEQ ID NO: 1887547
ggagugggagggugauuaa

SEQ ID NO: 2480117 - RNA, 19 nt, Artificial Sequence
  Description of Artificial Sequence: Synthetic oligonucleotide
  Antisense strand to SEQ ID NO: 2480116
uuaaucacccucccacucc

SEQ ID NO: 2480118 - RNA, 19 nt, Artificial Sequence
  Description of Artificial Sequence: Synthetic oligonucleotide
  Sense strand starting at position 2201 of SEQ ID NO: 1887547
auguguuacggagauggga

SEQ ID NO: 2480119 - RNA, 19 nt, Artificial Sequence
  Description of Artificial Sequence: Synthetic oligonucleotide
  Antisense strand to SEQ ID NO: 2480118
ucccaucuccguaacacau

SEQ ID NO: 2480120 - RNA, 19 nt, Artificial Sequence
  Description of Artificial Sequence: Synthetic oligonucleotide
  Sense strand starting at position 2220 of SEQ ID NO: 1887547
gcuuguuuggcuccagguu

SEQ ID NO: 2480121 - RNA, 19 nt, Artificial Sequence
  Description of Artificial Sequence: Synthetic oligonucleotide
  Antisense strand to SEQ ID NO: 2480120
aaccuggagccaaacaagc

SEQ ID NO: 2480122 - RNA, 19 nt, Artificial Sequence
  Description of Artificial Sequence: Synthetic oligonucleotide
  Sense strand starting at position 2526 of SEQ ID NO: 1887547
gccauucucugauuccaag

SEQ ID NO: 2480123 - RNA, 19 nt, Artificial Sequence
  Description of Artificial Sequence: Synthetic oligonucleotide
  Antisense strand to SEQ ID NO: 2480122
cuuggaaucagagaauggc

SEQ ID NO: 2480124 - RNA, 19 nt, Artificial Sequence
  Description of Artificial Sequence: Synthetic oligonucleotide
  Sense strand starting at position 2545 of SEQ ID NO: 1887547
ucucccuuuccugauguuu

SEQ ID NO: 2480125 - RNA, 19 nt, Artificial Sequence
  Description of Artificial Sequence: Synthetic oligonucleotide
  Antisense strand to SEQ ID NO: 2480124
aaacaucaggaaagggaga

SEQ ID NO: 2480126 - RNA, 19 nt, Artificial Sequence
  Description of Artificial Sequence: Synthetic oligonucleotide
  Sense strand starting at position 2674 of SEQ ID NO: 1887547
uuggauggccgugagcaaa

SEQ ID NO: 2480127 - RNA, 19 nt, Artificial Sequence
  Description of Artificial Sequence: Synthetic oligonucleotide
  Antisense strand to SEQ ID NO: 2480126
uuugcucacggccauccaa

SEQ ID NO: 2480128 - RNA, 19 nt, Artificial Sequence
  Description of Artificial Sequence: Synthetic oligonucleotide
  Sense strand starting at position 2782 of SEQ ID NO: 1887547
gcgaauuguacccaaagga

SEQ ID NO: 2480129 - RNA, 19 nt, Artificial Sequence
  Description of Artificial Sequence: Synthetic oligonucleotide
  Antisense strand to SEQ ID NO: 2480128
uccuuuggguacaauucgc

SEQ ID NO: 2480130 - RNA, 19 nt, Artificial Sequence
  Description of Artificial Sequence: Synthetic oligonucleotide
  Sense strand starting at position 2806 of SEQ ID NO: 1887547
gggaauguuccauagguuu

SEQ ID NO: 2480131 - RNA, 19 nt, Artificial Sequence
  Description of Artificial Sequence: Synthetic oligonucleotide
  Antisense strand to SEQ ID NO: 2480130
aaaccuauggaacauuccc

SEQ ID NO: 2480132 - RNA, 19 nt, Artificial Sequence
  Description of Artificial Sequence: Synthetic oligonucleotide
  Sense strand starting at position 2944 of SEQ ID NO: 1887547
uccagcuuucuuuaucagu

SEQ ID NO: 2480133 - RNA, 19 nt, Artificial Sequence
  Description of Artificial Sequence: Synthetic oligonucleotide
  Antisense strand to SEQ ID NO: 2480132
acugauaaagaaagcugga

SEQ ID NO: 2480134 - RNA, 19 nt, Artificial Sequence
  Description of Artificial Sequence: Synthetic oligonucleotide
  Sense strand starting at position 2963 of SEQ ID NO: 1887547
gcugaauaccuugaccucu

SEQ ID NO: 2480135 - RNA, 19 nt, Artificial Sequence
  Description of Artificial Sequence: Synthetic oligonucleotide
  Antisense strand to SEQ ID NO: 2480134
agaggucaagguauucagc

SEQ ID NO: 2480136 - RNA, 19 nt, Artificial Sequence
  Description of Artificial Sequence: Synthetic oligonucleotide
  Sense strand starting at position 2992 of SEQ ID NO: 1887547
gcaagcucggucuugcaaa

SEQ ID NO: 2480137 - RNA, 19 nt, Artificial Sequence
  Description of Artificial Sequence: Synthetic oligonucleotide
  Antisense strand to SEQ ID NO: 2480136
uuugcaagaccgagcuugc

SEQ ID NO: 2480138 - RNA, 19 nt, Artificial Sequence
  Description of Artificial Sequence: Synthetic oligonucleotide
  Sense strand starting at position 3027 of SEQ ID NO: 1887547
guuuguuguccucuccagu

SEQ ID NO: 2480139 - RNA, 19 nt, Artificial Sequence
  Description of Artificial Sequence: Synthetic oligonucleotide
  Antisense strand to SEQ ID NO: 2480138
acuggagaggacaacaaac

SEQ ID NO: 2480140 - RNA, 19 nt, Artificial Sequence
  Description of Artificial Sequence: Synthetic oligonucleotide
  Sense strand starting at position 3100 of SEQ ID NO: 1887547
ccaggaggucuuggcaacu

SEQ ID NO: 2480141 - RNA, 19 nt, Artificial Sequence
  Description of Artificial Sequence: Synthetic oligonucleotide
  Antisense strand to SEQ ID NO: 2480140
aguugccaagaccuccugg

SEQ ID NO: 2480142 - RNA, 19 nt, Artificial Sequence
  Description of Artificial Sequence: Synthetic oligonucleotide
  Sense strand starting at position 3394 of SEQ ID NO: 1887547
uauauauuguuguugggaa

SEQ ID NO: 2480143 - RNA, 19 nt, Artificial Sequence
  Description of Artificial Sequence: Synthetic oligonucleotide
  Antisense strand to SEQ ID NO: 2480142
uucccaacaacaauauaua

SEQ ID NO: 2480144 - RNA, 19 nt, Artificial Sequence
  Description of Artificial Sequence: Synthetic oligonucleotide
  Sense strand starting at position 3485 of SEQ ID NO: 1887547
cugcaaucucacuacugga

SEQ ID NO: 2480145 - RNA, 19 nt, Artificial Sequence
  Description of Artificial Sequence: Synthetic oligonucleotide
  Antisense strand to SEQ ID NO: 2480144
uccaguagugagauugcag

SEQ ID NO: 2480146 - RNA, 19 nt, Artificial Sequence
  Description of Artificial Sequence: Synthetic oligonucleotide
  Sense strand starting at position 3843 of SEQ ID NO: 1887547
gggagcuaaucagugggaa

SEQ ID NO: 2480147 - RNA, 19 nt, Artificial Sequence
  Description of Artificial Sequence: Synthetic oligonucleotide
  Antisense strand to SEQ ID NO: 2480146
uucccacugauuagcuccc

SEQ ID NO: 2480148 - RNA, 19 nt, Artificial Sequence
  Description of Artificial Sequence: Synthetic oligonucleotide
  Sense strand starting at position 3844 of SEQ ID NO: 1887547
ggagcuaaucagugggaac

SEQ ID NO: 2480149 - RNA, 19 nt, Artificial Sequence
  Description of Artificial Sequence: Synthetic oligonucleotide
  Antisense strand to SEQ ID NO: 2480148
guucccacugauuagcucc

SEQ ID NO: 2480150 - RNA, 19 nt, Artificial Sequence
  Description of Artificial Sequence: Synthetic oligonucleotide
  Sense strand starting at position 3920 of SEQ ID NO: 1887547
gagugaggcaguuguugaa

SEQ ID NO: 2480151 - RNA, 19 nt, Artificial Sequence
  Description of Artificial Sequence: Synthetic oligonucleotide
  Antisense strand to SEQ ID NO: 2480150
uucaacaacugccucacuc

SEQ ID NO: 2480152 - RNA, 19 nt, Artificial Sequence
  Description of Artificial Sequence: Synthetic oligonucleotide
  Sense strand starting at position 36 of SEQ ID NO: 1887548
aaugcaaaguuggucaaga

SEQ ID NO: 2480153 - RNA, 19 nt, Artificial Sequence
  Description of Artificial Sequence: Synthetic oligonucleotide
  Antisense strand to SEQ ID NO: 2480152
ucuugaccaacuuugcauu

SEQ ID NO: 2480154 - RNA, 19 nt, Artificial Sequence
  Description of Artificial Sequence: Synthetic oligonucleotide
  Sense strand starting at position 38 of SEQ ID NO: 1887548
ugcaaaguuggucaagaca

SEQ ID NO: 2480155 - RNA, 19 nt, Artificial Sequence
  Description of Artificial Sequence: Synthetic oligonucleotide
  Antisense strand to SEQ ID NO: 2480154
ugucuugaccaacuuugca

SEQ ID NO: 2480156 - RNA, 19 nt, Artificial Sequence
  Description of Artificial Sequence: Synthetic oligonucleotide
  Sense strand starting at position 92 of SEQ ID NO: 1887548
ggaaguuaguaguuaaaua

SEQ ID NO: 2480157 - RNA, 19 nt, Artificial Sequence
  Description of Artificial Sequence: Synthetic oligonucleotide
  Antisense strand to SEQ ID NO: 2480156
uauuuaacuacuaacuucc

SEQ ID NO: 2480158 - RNA, 19 nt, Artificial Sequence
  Description of Artificial Sequence: Synthetic oligonucleotide
  Sense strand starting at position 446 of SEQ ID NO: 1887548
gaggcuggaugguucaaga

SEQ ID NO: 2480159 - RNA, 19 nt, Artificial Sequence
  Description of Artificial Sequence: Synthetic oligonucleotide
  Antisense strand to SEQ ID NO: 2480158
ucuugaaccauccagccuc

SEQ ID NO: 2480160 - RNA, 19 nt, Artificial Sequence
  Description of Artificial Sequence: Synthetic oligonucleotide
  Sense strand starting at position 459 of SEQ ID NO: 1887548
ucaagauggucucccugaa

SEQ ID NO: 2480161 - RNA, 19 nt, Artificial Sequence
  Description of Artificial Sequence: Synthetic oligonucleotide
  Antisense strand to SEQ ID NO: 2480160
uucagggagaccaucuuga

SEQ ID NO: 2480162 - RNA, 19 nt, Artificial Sequence
  Description of Artificial Sequence: Synthetic oligonucleotide
  Sense strand starting at position 474 of SEQ ID NO: 1887548
ugaaauuucuggccguugu

SEQ ID NO: 2480163 - RNA, 19 nt, Artificial Sequence
  Description of Artificial Sequence: Synthetic oligonucleotide
  Antisense strand to SEQ ID NO: 2480162
acaacggccagaaauuuca

SEQ ID NO: 2480164 - RNA, 19 nt, Artificial Sequence
  Description of Artificial Sequence: Synthetic oligonucleotide
  Sense strand starting at position 475 of SEQ ID NO: 1887548
gaaauuucuggccguuguu

SEQ ID NO: 2480165 - RNA, 19 nt, Artificial Sequence
  Description of Artificial Sequence: Synthetic oligonucleotide
  Antisense strand to SEQ ID NO: 2480164
aacaacggccagaaauuuc

SEQ ID NO: 2480166 - RNA, 19 nt, Artificial Sequence
  Description of Artificial Sequence: Synthetic oligonucleotide
  Sense strand starting at position 599 of SEQ ID NO: 1887548
gcaagacuuccugaagcuu

SEQ ID NO: 2480167 - RNA, 19 nt, Artificial Sequence
  Description of Artificial Sequence: Synthetic oligonucleotide
  Antisense strand to SEQ ID NO: 2480166
aagcuucaggaagucuugc

SEQ ID NO: 2480168 - RNA, 19 nt, Artificial Sequence
  Description of Artificial Sequence: Synthetic oligonucleotide
  Sense strand starting at position 808 of SEQ ID NO: 1887548
agauaugcucagcaauggu

SEQ ID NO: 2480169 - RNA, 19 nt, Artificial Sequence
  Description of Artificial Sequence: Synthetic oligonucleotide
  Antisense strand to SEQ ID NO: 2480168
accauugcugagcauaucu

SEQ ID NO: 2480170 - RNA, 19 nt, Artificial Sequence
  Description of Artificial Sequence: Synthetic oligonucleotide
  Sense strand starting at position 1036 of SEQ ID NO: 1887548
aggccagggucacugauau

SEQ ID NO: 2480171 - RNA, 19 nt, Artificial Sequence
  Description of Artificial Sequence: Synthetic oligonucleotide
  Antisense strand to SEQ ID NO: 2480170
auaucagugacccuggccu

SEQ ID NO: 2480172 - RNA, 19 nt, Artificial Sequence
  Description of Artificial Sequence: Synthetic oligonucleotide
  Sense strand starting at position 1097 of SEQ ID NO: 1887548
cggagacagcucugggaau

SEQ ID NO: 2480173 - RNA, 19 nt, Artificial Sequence
  Description of Artificial Sequence: Synthetic oligonucleotide
  Antisense strand to SEQ ID NO: 2480172
auucccagagcugucuccg

SEQ ID NO: 2480174 - RNA, 19 nt, Artificial Sequence
  Description of Artificial Sequence: Synthetic oligonucleotide
  Sense strand starting at position 1108 of SEQ ID NO: 1887548
cugggaaugauguggauca

SEQ ID NO: 2480175 - RNA, 19 nt, Artificial Sequence
  Description of Artificial Sequence: Synthetic oligonucleotide
  Antisense strand to SEQ ID NO: 2480174
ugauccacaucauucccag

SEQ ID NO: 2480176 - RNA, 19 nt, Artificial Sequence
  Description of Artificial Sequence: Synthetic oligonucleotide
  Sense strand starting at position 1131 of SEQ ID NO: 1887548
gaaccugaccucugagagu

SEQ ID NO: 2480177 - RNA, 19 nt, Artificial Sequence
  Description of Artificial Sequence: Synthetic oligonucleotide
  Antisense strand to SEQ ID NO: 2480176
acucucagaggucagguuc

SEQ ID NO: 2480178 - RNA, 19 nt, Artificial Sequence
  Description of Artificial Sequence: Synthetic oligonucleotide
  Sense strand starting at position 1201 of SEQ ID NO: 1887548
gacgucuucccagaacucu

SEQ ID NO: 2480179 - RNA, 19 nt, Artificial Sequence
  Description of Artificial Sequence: Synthetic oligonucleotide
  Antisense strand to SEQ ID NO: 2480178
agaguucugggaagacguc

SEQ ID NO: 2480180 - RNA, 19 nt, Artificial Sequence
  Description of Artificial Sequence: Synthetic oligonucleotide
  Sense strand starting at position 1356 of SEQ ID NO: 1887548
agcuauaaagcgggagaaa

SEQ ID NO: 2480181 - RNA, 19 nt, Artificial Sequence
  Description of Artificial Sequence: Synthetic oligonucleotide
  Antisense strand to SEQ ID NO: 2480180
uuucucccgcuuuauagcu

SEQ ID NO: 2480182 - RNA, 19 nt, Artificial Sequence
  Description of Artificial Sequence: Synthetic oligonucleotide
  Sense strand starting at position 1536 of SEQ ID NO: 1887548
agaugacucugcuuaacau

SEQ ID NO: 2480183 - RNA, 19 nt, Artificial Sequence
  Description of Artificial Sequence: Synthetic oligonucleotide
  Antisense strand to SEQ ID NO: 2480182
auguuaagcagagucaucu

SEQ ID NO: 2480184 - RNA, 19 nt, Artificial Sequence
  Description of Artificial Sequence: Synthetic oligonucleotide
  Sense strand starting at position 1707 of SEQ ID NO: 1887548
cagcacugucaugauggaa

SEQ ID NO: 2480185 - RNA, 19 nt, Artificial Sequence
  Description of Artificial Sequence: Synthetic oligonucleotide
  Antisense strand to SEQ ID NO: 2480184
uuccaucaugacagugcug

SEQ ID NO: 2480186 - RNA, 19 nt, Artificial Sequence
  Description of Artificial Sequence: Synthetic oligonucleotide
  Sense strand starting at position 1849 of SEQ ID NO: 1887548
cgccuuguccuggcaucaa

SEQ ID NO: 2480187 - RNA, 19 nt, Artificial Sequence
  Description of Artificial Sequence: Synthetic oligonucleotide
  Antisense strand to SEQ ID NO: 2480186
uugaugccaggacaaggcg

SEQ ID NO: 2480188 - RNA, 19 nt, Artificial Sequence
  Description of Artificial Sequence: Synthetic oligonucleotide
  Sense strand starting at position 2445 of SEQ ID NO: 1887548
gcaggaauuucgucugauu

SEQ ID NO: 2480189 - RNA, 19 nt, Artificial Sequence
  Description of Artificial Sequence: Synthetic oligonucleotide
  Antisense strand to SEQ ID NO: 2480188
aaucagacgaaauuccugc

SEQ ID NO: 2480190 - RNA, 19 nt, Artificial Sequence
  Description of Artificial Sequence: Synthetic oligonucleotide
  Sense strand starting at position 2596 of SEQ ID NO: 1887548
uguuuaugaaagugauagg

SEQ ID NO: 2480191 - RNA, 19 nt, Artificial Sequence
  Description of Artificial Sequence: Synthetic oligonucleotide
  Antisense strand to SEQ ID NO: 2480190
ccuaucacuuucauaaaca

SEQ ID NO: 2480192 - RNA, 19 nt, Artificial Sequence
  Description of Artificial Sequence: Synthetic oligonucleotide
  Sense strand starting at position 2702 of SEQ ID NO: 1887548
agggcauugugagugaaag

SEQ ID NO: 2480193 - RNA, 19 nt, Artificial Sequence
  Description of Artificial Sequence: Synthetic oligonucleotide
  Antisense strand to SEQ ID NO: 2480192
cuuucacucacaaugcccu

SEQ ID NO: 2480194 - RNA, 19 nt, Artificial Sequence
  Description of Artificial Sequence: Synthetic oligonucleotide
  Sense strand starting at position 2703 of SEQ ID NO: 1887548
gggcauugugagugaaagg

SEQ ID NO: 2480195 - RNA, 19 nt, Artificial Sequence
  Description of Artificial Sequence: Synthetic oligonucleotide
  Antisense strand to SEQ ID NO: 2480194
ccuuucacucacaaugccc

SEQ ID NO: 2480196 - RNA, 19 nt, Artificial Sequence
  Description of Artificial Sequence: Synthetic oligonucleotide
  Sense strand starting at position 2704 of SEQ ID NO: 1887548
ggcauugugagugaaaggu

SEQ ID NO: 2480197 - RNA, 19 nt, Artificial Sequence
  Description of Artificial Sequence: Synthetic oligonucleotide
  Antisense strand to SEQ ID NO: 2480196
accuuucacucacaaugcc

SEQ ID NO: 2480198 - RNA, 19 nt, Artificial Sequence
  Description of Artificial Sequence: Synthetic oligonucleotide
  Sense strand starting at position 2733 of SEQ ID NO: 1887548
uguagaaguucugugaaau

SEQ ID NO: 2480199 - RNA, 19 nt, Artificial Sequence
  Description of Artificial Sequence: Synthetic oligonucleotide
  Antisense strand to SEQ ID NO: 2480198
auuucacagaacuucuaca

SEQ ID NO: 2480200 - RNA, 19 nt, Artificial Sequence
  Description of Artificial Sequence: Synthetic oligonucleotide
  Sense strand starting at position 2745 of SEQ ID NO: 1887548
gugaaauugugcacgacgu

SEQ ID NO: 2480201 - RNA, 19 nt, Artificial Sequence
  Description of Artificial Sequence: Synthetic oligonucleotide
  Antisense strand to SEQ ID NO: 2480200
acgucgugcacaauuucac

SEQ ID NO: 2480202 - RNA, 19 nt, Artificial Sequence
  Description of Artificial Sequence: Synthetic oligonucleotide
  Sense strand starting at position 2767 of SEQ ID NO: 1887548
ggccuaugggauuaugacu

SEQ ID NO: 2480203 - RNA, 19 nt, Artificial Sequence
  Description of Artificial Sequence: Synthetic oligonucleotide
  Antisense strand to SEQ ID NO: 2480202
agucauaaucccauaggcc

SEQ ID NO: 2480204 - RNA, 19 nt, Artificial Sequence
  Description of Artificial Sequence: Synthetic oligonucleotide
  Sense strand starting at position 2772 of SEQ ID NO: 1887548
augggauuaugacuaugua

SEQ ID NO: 2480205 - RNA, 19 nt, Artificial Sequence
  Description of Artificial Sequence: Synthetic oligonucleotide
  Antisense strand to SEQ ID NO: 2480204
uacauagucauaaucccau

SEQ ID NO: 2480206 - RNA, 19 nt, Artificial Sequence
  Description of Artificial Sequence: Synthetic oligonucleotide
  Sense strand starting at position 2775 of SEQ ID NO: 1887548
ggauuaugacuauguagug

SEQ ID NO: 2480207 - RNA, 19 nt, Artificial Sequence
  Description of Artificial Sequence: Synthetic oligonucleotide
  Antisense strand to SEQ ID NO: 2480206
cacuacauagucauaaucc

SEQ ID NO: 2480208 - RNA, 19 nt, Artificial Sequence
  Description of Artificial Sequence: Synthetic oligonucleotide
  Sense strand starting at position 2782 of SEQ ID NO: 1887548
gacuauguagugggugaua

SEQ ID NO: 2480209 - RNA, 19 nt, Artificial Sequence
  Description of Artificial Sequence: Synthetic oligonucleotide
  Antisense strand to SEQ ID NO: 2480208
uaucacccacuacauaguc

SEQ ID NO: 2480210 - RNA, 19 nt, Artificial Sequence
  Description of Artificial Sequence: Synthetic oligonucleotide
  Sense strand starting at position 2795 of SEQ ID NO: 1887548
gugauacagcuaugaauau

SEQ ID NO: 2480211 - RNA, 19 nt, Artificial Sequence
  Description of Artificial Sequence: Synthetic oligonucleotide
  Antisense strand to SEQ ID NO: 2480210
auauucauagcuguaucac

SEQ ID NO: 2480212 - RNA, 19 nt, Artificial Sequence
  Description of Artificial Sequence: Synthetic oligonucleotide
  Sense strand starting at position 2843 of SEQ ID NO: 1887548
gaccuaugaugacugugaa

SEQ ID NO: 2480213 - RNA, 19 nt, Artificial Sequence
  Description of Artificial Sequence: Synthetic oligonucleotide
  Antisense strand to SEQ ID NO: 2480212
uucacagucaucauagguc

SEQ ID NO: 2480214 - RNA, 19 nt, Artificial Sequence
  Description of Artificial Sequence: Synthetic oligonucleotide
  Sense strand starting at position 2844 of SEQ ID NO: 1887548
accuaugaugacugugaau

SEQ ID NO: 2480215 - RNA, 19 nt, Artificial Sequence
  Description of Artificial Sequence: Synthetic oligonucleotide
  Antisense strand to SEQ ID NO: 2480214
auucacagucaucauaggu

SEQ ID NO: 2480216 - RNA, 19 nt, Artificial Sequence
  Description of Artificial Sequence: Synthetic oligonucleotide
  Sense strand starting at position 2846 of SEQ ID NO: 1887548
cuaugaugacugugaaugu

SEQ ID NO: 2480217 - RNA, 19 nt, Artificial Sequence
  Description of Artificial Sequence: Synthetic oligonucleotide
  Antisense strand to SEQ ID NO: 2480216
acauucacagucaucauag

SEQ ID NO: 2480218 - RNA, 19 nt, Artificial Sequence
  Description of Artificial Sequence: Synthetic oligonucleotide
  Sense strand starting at position 2883 of SEQ ID NO: 1887548
gguggagugcuugagaaac

SEQ ID NO: 2480219 - RNA, 19 nt, Artificial Sequence
  Description of Artificial Sequence: Synthetic oligonucleotide
  Antisense strand to SEQ ID NO: 2480218
guuucucaagcacuccacc

SEQ ID NO: 2480220 - RNA, 19 nt, Artificial Sequence
  Description of Artificial Sequence: Synthetic oligonucleotide
  Sense strand starting at position 2894 of SEQ ID NO: 1887548
ugagaaaccgaguguugac

SEQ ID NO: 2480221 - RNA, 19 nt, Artificial Sequence
  Description of Artificial Sequence: Synthetic oligonucleotide
  Antisense strand to SEQ ID NO: 2480220
gucaacacucgguuucuca

SEQ ID NO: 2480222 - RNA, 19 nt, Artificial Sequence
  Description of Artificial Sequence: Synthetic oligonucleotide
  Sense strand starting at position 2901 of SEQ ID NO: 1887548
ccgaguguugacuaaagua

SEQ ID NO: 2480223 - RNA, 19 nt, Artificial Sequence
  Description of Artificial Sequence: Synthetic oligonucleotide
  Antisense strand to SEQ ID NO: 2480222
uacuuuagucaacacucgg

SEQ ID NO: 2480224 - RNA, 19 nt, Artificial Sequence
  Description of Artificial Sequence: Synthetic oligonucleotide
  Sense strand starting at position 2976 of SEQ ID NO: 1887548
ugacucugguaauuagaca

SEQ ID NO: 2480225 - RNA, 19 nt, Artificial Sequence
  Description of Artificial Sequence: Synthetic oligonucleotide
  Antisense strand to SEQ ID NO: 2480224
ugucuaauuaccagaguca

SEQ ID NO: 2480226 - RNA, 19 nt, Artificial Sequence
  Description of Artificial Sequence: Synthetic oligonucleotide
  Sense strand starting at position 3448 of SEQ ID NO: 1887548
ucaggaguuugaccagcau

SEQ ID NO: 2480227 - RNA, 19 nt, Artificial Sequence
  Description of Artificial Sequence: Synthetic oligonucleotide
  Antisense strand to SEQ ID NO: 2480226
augcuggucaaacuccuga

SEQ ID NO: 2480228 - RNA, 19 nt, Artificial Sequence
  Description of Artificial Sequence: Synthetic oligonucleotide
  Sense strand starting at position 3664 of SEQ ID NO: 1887548
aucauuuauugggaaaccu

SEQ ID NO: 2480229 - RNA, 19 nt, Artificial Sequence
  Description of Artificial Sequence: Synthetic oligonucleotide
  Antisense strand to SEQ ID NO: 2480228
agguuucccaauaaaugau

SEQ ID NO: 2480230 - RNA, 19 nt, Artificial Sequence
  Description of Artificial Sequence: Synthetic oligonucleotide
  Sense strand starting at position 3863 of SEQ ID NO: 1887548
ggaagccugaaaugugaaa

SEQ ID NO: 2480231 - RNA, 19 nt, Artificial Sequence
  Description of Artificial Sequence: Synthetic oligonucleotide
  Antisense strand to SEQ ID NO: 2480230
uuucacauuucaggcuucc

SEQ ID NO: 2480232 - RNA, 19 nt, Artificial Sequence
  Description of Artificial Sequence: Synthetic oligonucleotide
  Sense strand starting at position 9 of SEQ ID NO: 1887549
gauugagggucacuauuaa

SEQ ID NO: 2480233 - RNA, 19 nt, Artificial Sequence
  Description of Artificial Sequence: Synthetic oligonucleotide
  Antisense strand to SEQ ID NO: 2480232
uuaauagugacccucaauc

SEQ ID NO: 2480234 - RNA, 19 nt, Artificial Sequence
  Description of Artificial Sequence: Synthetic oligonucleotide
  Sense strand starting at position 48 of SEQ ID NO: 1887549
ggaaacauuaguggcuaau

SEQ ID NO: 2480235 - RNA, 19 nt, Artificial Sequence
  Description of Artificial Sequence: Synthetic oligonucleotide
  Antisense strand to SEQ ID NO: 2480234
auuagccacuaauguuucc

SEQ ID NO: 2480236 - RNA, 19 nt, Artificial Sequence
  Description of Artificial Sequence: Synthetic oligonucleotide
  Sense strand starting at position 59 of SEQ ID NO: 1887549
uggcuaaugcugggcauuu

SEQ ID NO: 2480237 - RNA, 19 nt, Artificial Sequence
  Description of Artificial Sequence: Synthetic oligonucleotide
  Antisense strand to SEQ ID NO: 2480236
aaaugcccagcauuagcca

SEQ ID NO: 2480238 - RNA, 19 nt, Artificial Sequence
  Description of Artificial Sequence: Synthetic oligonucleotide
  Sense strand starting at position 229 of SEQ ID NO: 1887549
gccuauaggaggugucuca

SEQ ID NO: 2480239 - RNA, 19 nt, Artificial Sequence
  Description of Artificial Sequence: Synthetic oligonucleotide
  Antisense strand to SEQ ID NO: 2480238
ugagacaccuccuauaggc

SEQ ID NO: 2480240 - RNA, 19 nt, Artificial Sequence
  Description of Artificial Sequence: Synthetic oligonucleotide
  Sense strand starting at position 332 of SEQ ID NO: 1887549
gacugagucuugcucuaug

SEQ ID NO: 2480241 - RNA, 19 nt, Artificial Sequence
  Description of Artificial Sequence: Synthetic oligonucleotide
  Antisense strand to SEQ ID NO: 2480240
cauagagcaagacucaguc

SEQ ID NO: 2480242 - RNA, 19 nt, Artificial Sequence
  Description of Artificial Sequence: Synthetic oligonucleotide
  Sense strand starting at position 1668 of SEQ ID NO: 1887549
uuacuugagugggcugaaa

SEQ ID NO: 2480243 - RNA, 19 nt, Artificial Sequence
  Description of Artificial Sequence: Synthetic oligonucleotide
  Antisense strand to SEQ ID NO: 2480242
uuucagcccacucaaguaa

SEQ ID NO: 2480244 - RNA, 19 nt, Artificial Sequence
  Description of Artificial Sequence: Synthetic oligonucleotide
  Sense strand starting at position 2089 of SEQ ID NO: 1887549
gaagguggcagucagacuu

SEQ ID NO: 2480245 - RNA, 19 nt, Artificial Sequence
  Description of Artificial Sequence: Synthetic oligonucleotide
  Antisense strand to SEQ ID NO: 2480244
aagucugacugccaccuuc

SEQ ID NO: 2480246 - RNA, 19 nt, Artificial Sequence
  Description of Artificial Sequence: Synthetic oligonucleotide
  Sense strand starting at position 2095 of SEQ ID NO: 1887549
ggcagucagacuuaaguag

SEQ ID NO: 2480247 - RNA, 19 nt, Artificial Sequence
  Description of Artificial Sequence: Synthetic oligonucleotide
  Antisense strand to SEQ ID NO: 2480246
cuacuuaagucugacugcc

SEQ ID NO: 2480248 - RNA, 19 nt, Artificial Sequence
  Description of Artificial Sequence: Synthetic oligonucleotide
  Sense strand starting at position 2148 of SEQ ID NO: 1887549
ggagguuugcuccauguug

SEQ ID NO: 2480249 - RNA, 19 nt, Artificial Sequence
  Description of Artificial Sequence: Synthetic oligonucleotide
  Antisense strand to SEQ ID NO: 2480248
caacauggagcaaaccucc

SEQ ID NO: 2480250 - RNA, 19 nt, Artificial Sequence
  Description of Artificial Sequence: Synthetic oligonucleotide
  Sense strand starting at position 2160 of SEQ ID NO: 1887549
cauguuggccaguaagaag

SEQ ID NO: 2480251 - RNA, 19 nt, Artificial Sequence
  Description of Artificial Sequence: Synthetic oligonucleotide
  Antisense strand to SEQ ID NO: 2480250
cuucuuacuggccaacaug

SEQ ID NO: 2480252 - RNA, 19 nt, Artificial Sequence
  Description of Artificial Sequence: Synthetic oligonucleotide
  Sense strand starting at position 2298 of SEQ ID NO: 1887549
accuuugccgcucagauua

SEQ ID NO: 2480253 - RNA, 19 nt, Artificial Sequence
  Description of Artificial Sequence: Synthetic oligonucleotide
  Antisense strand to SEQ ID NO: 2480252
uaaucugagcggcaaaggu

SEQ ID NO: 2480254 - RNA, 19 nt, Artificial Sequence
  Description of Artificial Sequence: Synthetic oligonucleotide
  Sense strand starting at position 2314 of SEQ ID NO: 1887549
uuaccaagccugugacuuu

SEQ ID NO: 2480255 - RNA, 19 nt, Artificial Sequence
  Description of Artificial Sequence: Synthetic oligonucleotide
  Antisense strand to SEQ ID NO: 2480254
aaagucacaggcuugguaa

SEQ ID NO: 2480256 - RNA, 19 nt, Artificial Sequence
  Description of Artificial Sequence: Synthetic oligonucleotide
  Sense strand starting at position 2326 of SEQ ID NO: 1887549
ugacuuugagaaugggugu

SEQ ID NO: 2480257 - RNA, 19 nt, Artificial Sequence
  Description of Artificial Sequence: Synthetic oligonucleotide
  Antisense strand to SEQ ID NO: 2480256
acacccauucucaaaguca

SEQ ID NO: 2480258 - RNA, 19 nt, Artificial Sequence
  Description of Artificial Sequence: Synthetic oligonucleotide
  Sense strand starting at position 2329 of SEQ ID NO: 1887549
cuuugagaaugggugucuu

SEQ ID NO: 2480259 - RNA, 19 nt, Artificial Sequence
  Description of Artificial Sequence: Synthetic oligonucleotide
  Antisense strand to SEQ ID NO: 2480258
aagacacccauucucaaag

SEQ ID NO: 2480260 - RNA, 19 nt, Artificial Sequence
  Description of Artificial Sequence: Synthetic oligonucleotide
  Sense strand starting at position 2333 of SEQ ID NO: 1887549
gagaaugggugucuuccuu

SEQ ID NO: 2480261 - RNA, 19 nt, Artificial Sequence
  Description of Artificial Sequence: Synthetic oligonucleotide
  Antisense strand to SEQ ID NO: 2480260
aaggaagacacccauucuc

SEQ ID NO: 2480262 - RNA, 19 nt, Artificial Sequence
  Description of Artificial Sequence: Synthetic oligonucleotide
  Sense strand starting at position 2387 of SEQ ID NO: 1887549
ggaauuggagccugaugga

SEQ ID NO: 2480263 - RNA, 19 nt, Artificial Sequence
  Description of Artificial Sequence: Synthetic oligonucleotide
  Antisense strand to SEQ ID NO: 2480262
uccaucaggcuccaauucc

SEQ ID NO: 2480264 - RNA, 19 nt, Artificial Sequence
  Description of Artificial Sequence: Synthetic oligonucleotide
  Sense strand starting at position 2503 of SEQ ID NO: 1887549
cagucuauuccaggagcau

SEQ ID NO: 2480265 - RNA, 19 nt, Artificial Sequence
  Description of Artificial Sequence: Synthetic oligonucleotide
  Antisense strand to SEQ ID NO: 2480264
augcuccuggaauagacug

SEQ ID NO: 2480266 - RNA, 19 nt, Artificial Sequence
  Description of Artificial Sequence: Synthetic oligonucleotide
  Sense strand starting at position 2504 of SEQ ID NO: 1887549
agucuauuccaggagcaug

SEQ ID NO: 2480267 - RNA, 19 nt, Artificial Sequence
  Description of Artificial Sequence: Synthetic oligonucleotide
  Antisense strand to SEQ ID NO: 2480266
caugcuccuggaauagacu

SEQ ID NO: 2480268 - RNA, 19 nt, Artificial Sequence
  Description of Artificial Sequence: Synthetic oligonucleotide
  Sense strand starting at position 2599 of SEQ ID NO: 1887549
ccacgaacuuaggcauuau

SEQ ID NO: 2480269 - RNA, 19 nt, Artificial Sequence
  Description of Artificial Sequence: Synthetic oligonucleotide
  Antisense strand to SEQ ID NO: 2480268
auaaugccuaaguucgugg

SEQ ID NO: 2480270 - RNA, 19 nt, Artificial Sequence
  Description of Artificial Sequence: Synthetic oligonucleotide
  Sense strand starting at position 2717 of SEQ ID NO: 1887549
auauaugauugccuugaag

SEQ ID NO: 2480271 - RNA, 19 nt, Artificial Sequence
  Description of Artificial Sequence: Synthetic oligonucleotide
  Antisense strand to SEQ ID NO: 2480270
cuucaaggcaaucauauau

SEQ ID NO: 2480272 - RNA, 19 nt, Artificial Sequence
  Description of Artificial Sequence: Synthetic oligonucleotide
  Sense strand starting at position 2719 of SEQ ID NO: 1887549
auaugauugccuugaagau

SEQ ID NO: 2480273 - RNA, 19 nt, Artificial Sequence
  Description of Artificial Sequence: Synthetic oligonucleotide
  Antisense strand to SEQ ID NO: 2480272
aucuucaaggcaaucauau

SEQ ID NO: 2480274 - RNA, 19 nt, Artificial Sequence
  Description of Artificial Sequence: Synthetic oligonucleotide
  Sense strand starting at position 2900 of SEQ ID NO: 1887549
ugaugagcaucuucccauu

SEQ ID NO: 2480275 - RNA, 19 nt, Artificial Sequence
  Description of Artificial Sequence: Synthetic oligonucleotide
  Antisense strand to SEQ ID NO: 2480274
aaugggaagaugcucauca

SEQ ID NO: 2480276 - RNA, 19 nt, Artificial Sequence
  Description of Artificial Sequence: Synthetic oligonucleotide
  Sense strand starting at position 2906 of SEQ ID NO: 1887549
gcaucuucccauuauguuc

SEQ ID NO: 2480277 - RNA, 19 nt, Artificial Sequence
  Description of Artificial Sequence: Synthetic oligonucleotide
  Antisense strand to SEQ ID NO: 2480276
gaacauaaugggaagaugc

SEQ ID NO: 2480278 - RNA, 19 nt, Artificial Sequence
  Description of Artificial Sequence: Synthetic oligonucleotide
  Sense strand starting at position 2913 of SEQ ID NO: 1887549
cccauuauguucuccacga

SEQ ID NO: 2480279 - RNA, 19 nt, Artificial Sequence
  Description of Artificial Sequence: Synthetic oligonucleotide
  Antisense strand to SEQ ID NO: 2480278
ucguggagaacauaauggg

SEQ ID NO: 2480280 - RNA, 19 nt, Artificial Sequence
  Description of Artificial Sequence: Synthetic oligonucleotide
  Sense strand starting at position 2914 of SEQ ID NO: 1887549
ccauuauguucuccacgau

SEQ ID NO: 2480281 - RNA, 19 nt, Artificial Sequence
  Description of Artificial Sequence: Synthetic oligonucleotide
  Antisense strand to SEQ ID NO: 2480280
aucguggagaacauaaugg

SEQ ID NO: 2480282 - RNA, 19 nt, Artificial Sequence
  Description of Artificial Sequence: Synthetic oligonucleotide
  Sense strand starting at position 3007 of SEQ ID NO: 1887549
uucgguuacccacaguaaa

SEQ ID NO: 2480283 - RNA, 19 nt, Artificial Sequence
  Description of Artificial Sequence: Synthetic oligonucleotide
  Antisense strand to SEQ ID NO: 2480282
uuuacuguggguaaccgaa

SEQ ID NO: 2480284 - RNA, 19 nt, Artificial Sequence
  Description of Artificial Sequence: Synthetic oligonucleotide
  Sense strand starting at position 3020 of SEQ ID NO: 1887549
aguaaauuguggucugaaa

SEQ ID NO: 2480285 - RNA, 19 nt, Artificial Sequence
  Description of Artificial Sequence: Synthetic oligonucleotide
  Antisense strand to SEQ ID NO: 2480284
uuucagaccacaauuuacu

SEQ ID NO: 2480286 - RNA, 19 nt, Artificial Sequence
  Description of Artificial Sequence: Synthetic oligonucleotide
  Sense strand starting at position 3130 of SEQ ID NO: 1887549
cuuuauucugccugggaua

SEQ ID NO: 2480287 - RNA, 19 nt, Artificial Sequence
  Description of Artificial Sequence: Synthetic oligonucleotide
  Antisense strand to SEQ ID NO: 2480286
uaucccaggcagaauaaag

SEQ ID NO: 2480288 - RNA, 19 nt, Artificial Sequence
  Description of Artificial Sequence: Synthetic oligonucleotide
  Sense strand starting at position 3131 of SEQ ID NO: 1887549
uuuauucugccugggauau

SEQ ID NO: 2480289 - RNA, 19 nt, Artificial Sequence
  Description of Artificial Sequence: Synthetic oligonucleotide
  Antisense strand to SEQ ID NO: 2480288
auaucccaggcagaauaaa

SEQ ID NO: 2480290 - RNA, 19 nt, Artificial Sequence
  Description of Artificial Sequence: Synthetic oligonucleotide
  Sense strand starting at position 3132 of SEQ ID NO: 1887549
uuauucugccugggauaug

SEQ ID NO: 2480291 - RNA, 19 nt, Artificial Sequence
  Description of Artificial Sequence: Synthetic oligonucleotide
  Antisense strand to SEQ ID NO: 2480290
cauaucccaggcagaauaa

SEQ ID NO: 2480292 - RNA, 19 nt, Artificial Sequence
  Description of Artificial Sequence: Synthetic oligonucleotide
  Sense strand starting at position 3206 of SEQ ID NO: 1887549
agccaacuugguuaucaga

SEQ ID NO: 2480293 - RNA, 19 nt, Artificial Sequence
  Description of Artificial Sequence: Synthetic oligonucleotide
  Antisense strand to SEQ ID NO: 2480292
ucugauaaccaaguuggcu

SEQ ID NO: 2480294 - RNA, 19 nt, Artificial Sequence
  Description of Artificial Sequence: Synthetic oligonucleotide
  Sense strand starting at position 3208 of SEQ ID NO: 1887549
ccaacuugguuaucagacu

SEQ ID NO: 2480295 - RNA, 19 nt, Artificial Sequence
  Description of Artificial Sequence: Synthetic oligonucleotide
  Antisense strand to SEQ ID NO: 2480294
agucugauaaccaaguugg

SEQ ID NO: 2480296 - RNA, 19 nt, Artificial Sequence
  Description of Artificial Sequence: Synthetic oligonucleotide
  Sense strand starting at position 3263 of SEQ ID NO: 1887549
cgcuaauuguaccuaauga

SEQ ID NO: 2480297 - RNA, 19 nt, Artificial Sequence
  Description of Artificial Sequence: Synthetic oligonucleotide
  Antisense strand to SEQ ID NO: 2480296
ucauuagguacaauuagcg

SEQ ID NO: 2480298 - RNA, 19 nt, Artificial Sequence
  Description of Artificial Sequence: Synthetic oligonucleotide
  Sense strand starting at position 3273 of SEQ ID NO: 1887549
accuaaugauggcccuaaa

SEQ ID NO: 2480299 - RNA, 19 nt, Artificial Sequence
  Description of Artificial Sequence: Synthetic oligonucleotide
  Antisense strand to SEQ ID NO: 2480298
uuuagggccaucauuaggu

SEQ ID NO: 2480300 - RNA, 19 nt, Artificial Sequence
  Description of Artificial Sequence: Synthetic oligonucleotide
  Sense strand starting at position 3338 of SEQ ID NO: 1887549
ccuaaaguguuuccuuuaa

SEQ ID NO: 2480301 - RNA, 19 nt, Artificial Sequence
  Description of Artificial Sequence: Synthetic oligonucleotide
  Antisense strand to SEQ ID NO: 2480300
uuaaaggaaacacuuuagg

SEQ ID NO: 2480302 - RNA, 19 nt, Artificial Sequence
  Description of Artificial Sequence: Synthetic oligonucleotide
  Sense strand starting at position 3585 of SEQ ID NO: 1887549
acagaaauguguucugauc

SEQ ID NO: 2480303 - RNA, 19 nt, Artificial Sequence
  Description of Artificial Sequence: Synthetic oligonucleotide
  Antisense strand to SEQ ID NO: 2480302
gaucagaacacauuucugu

SEQ ID NO: 2480304 - RNA, 19 nt, Artificial Sequence
  Description of Artificial Sequence: Synthetic oligonucleotide
  Sense strand starting at position 3594 of SEQ ID NO: 1887549
uguucugaucgacagcaau

SEQ ID NO: 2480305 - RNA, 19 nt, Artificial Sequence
  Description of Artificial Sequence: Synthetic oligonucleotide
  Antisense strand to SEQ ID NO: 2480304
auugcugucgaucagaaca

SEQ ID NO: 2480306 - RNA, 19 nt, Artificial Sequence
  Description of Artificial Sequence: Synthetic oligonucleotide
  Sense strand starting at position 3606 of SEQ ID NO: 1887549
cagcaauugggucauacua

SEQ ID NO: 2480307 - RNA, 19 nt, Artificial Sequence
  Description of Artificial Sequence: Synthetic oligonucleotide
  Antisense strand to SEQ ID NO: 2480306
uaguaugacccaauugcug

SEQ ID NO: 2480308 - RNA, 19 nt, Artificial Sequence
  Description of Artificial Sequence: Synthetic oligonucleotide
  Sense strand starting at position 3808 of SEQ ID NO: 1887549
ggagcuaacucauucuuuc

SEQ ID NO: 2480309 - RNA, 19 nt, Artificial Sequence
  Description of Artificial Sequence: Synthetic oligonucleotide
  Antisense strand to SEQ ID NO: 2480308
gaaagaaugaguuagcucc

SEQ ID NO: 2480310 - RNA, 19 nt, Artificial Sequence
  Description of Artificial Sequence: Synthetic oligonucleotide
  Sense strand starting at position 3852 of SEQ ID NO: 1887549
augagcauuuaagauguua

SEQ ID NO: 2480311 - RNA, 19 nt, Artificial Sequence
  Description of Artificial Sequence: Synthetic oligonucleotide
  Antisense strand to SEQ ID NO: 2480310
uaacaucuuaaaugcucau

SEQ ID NO: 2480312 - RNA, 19 nt, Artificial Sequence
  Description of Artificial Sequence: Synthetic oligonucleotide
  Sense strand starting at position 273 of SEQ ID NO: 1887551
aaguaaggguucuugcaca

SEQ ID NO: 2480313 - RNA, 19 nt, Artificial Sequence
  Description of Artificial Sequence: Synthetic oligonucleotide
  Antisense strand to SEQ ID NO: 2480312
ugugcaagaacccuuacuu

SEQ ID NO: 2480314 - RNA, 19 nt, Artificial Sequence
  Description of Artificial Sequence: Synthetic oligonucleotide
  Sense strand starting at position 2016 of SEQ ID NO: 1887551
ggagccagaucuuaaauuc

SEQ ID NO: 2480315 - RNA, 19 nt, Artificial Sequence
  Description of Artificial Sequence: Synthetic oligonucleotide
  Antisense strand to SEQ ID NO: 2480314
gaauuuaagaucuggcucc

SEQ ID NO: 2480316 - RNA, 19 nt, Artificial Sequence
  Description of Artificial Sequence: Synthetic oligonucleotide
  Sense strand starting at position 2479 of SEQ ID NO: 1887551
gaugauccauugugagaag

SEQ ID NO: 2480317 - RNA, 19 nt, Artificial Sequence
  Description of Artificial Sequence: Synthetic oligonucleotide
  Antisense strand to SEQ ID NO: 2480316
cuucucacaauggaucauc

SEQ ID NO: 2480318 - RNA, 19 nt, Artificial Sequence
  Description of Artificial Sequence: Synthetic oligonucleotide
  Sense strand starting at position 2612 of SEQ ID NO: 1887551
uuccguauucgcuguguga

SEQ ID NO: 2480319 - RNA, 19 nt, Artificial Sequence
  Description of Artificial Sequence: Synthetic oligonucleotide
  Antisense strand to SEQ ID NO: 2480318
ucacacagcgaauacggaa

SEQ ID NO: 2480320 - RNA, 19 nt, Artificial Sequence
  Description of Artificial Sequence: Synthetic oligonucleotide
  Sense strand starting at position 2616 of SEQ ID NO: 1887551
guauucgcugugugaccaa

SEQ ID NO: 2480321 - RNA, 19 nt, Artificial Sequence
  Description of Artificial Sequence: Synthetic oligonucleotide
  Antisense strand to SEQ ID NO: 2480320
uuggucacacagcgaauac

SEQ ID NO: 2480322 - RNA, 19 nt, Artificial Sequence
  Description of Artificial Sequence: Synthetic oligonucleotide
  Sense strand starting at position 2639 of SEQ ID NO: 1887551
aacggaugcccucaguguu

SEQ ID NO: 2480323 - RNA, 19 nt, Artificial Sequence
  Description of Artificial Sequence: Synthetic oligonucleotide
  Antisense strand to SEQ ID NO: 2480322
aacacugagggcauccguu

SEQ ID NO: 2480324 - RNA, 19 nt, Artificial Sequence
  Description of Artificial Sequence: Synthetic oligonucleotide
  Sense strand starting at position 2699 of SEQ ID NO: 1887551
cagcgcucuugagaggaua

SEQ ID NO: 2480325 - RNA, 19 nt, Artificial Sequence
  Description of Artificial Sequence: Synthetic oligonucleotide
  Antisense strand to SEQ ID NO: 2480324
uauccucucaagagcgcug

SEQ ID NO: 2480326 - RNA, 19 nt, Artificial Sequence
  Description of Artificial Sequence: Synthetic oligonucleotide
  Sense strand starting at position 2727 of SEQ ID NO: 1887551
gagguuagcagguguuacu

SEQ ID NO: 2480327 - RNA, 19 nt, Artificial Sequence
  Description of Artificial Sequence: Synthetic oligonucleotide
  Antisense strand to SEQ ID NO: 2480326
aguaacaccugcuaaccuc

SEQ ID NO: 2480328 - RNA, 19 nt, Artificial Sequence
  Description of Artificial Sequence: Synthetic oligonucleotide
  Sense strand starting at position 2730 of SEQ ID NO: 1887551
guuagcagguguuacucaa

SEQ ID NO: 2480329 - RNA, 19 nt, Artificial Sequence
  Description of Artificial Sequence: Synthetic oligonucleotide
  Antisense strand to SEQ ID NO: 2480328
uugaguaacaccugcuaac

SEQ ID NO: 2480330 - RNA, 19 nt, Artificial Sequence
  Description of Artificial Sequence: Synthetic oligonucleotide
  Sense strand starting at position 2734 of SEQ ID NO: 1887551
gcagguguuacucaaagag

SEQ ID NO: 2480331 - RNA, 19 nt, Artificial Sequence
  Description of Artificial Sequence: Synthetic oligonucleotide
  Antisense strand to SEQ ID NO: 2480330
cucuuugaguaacaccugc

SEQ ID NO: 2480332 - RNA, 19 nt, Artificial Sequence
  Description of Artificial Sequence: Synthetic oligonucleotide
  Sense strand starting at position 2753 of SEQ ID NO: 1887551
gaagucuagcggugaguca

SEQ ID NO: 2480333 - RNA, 19 nt, Artificial Sequence
  Description of Artificial Sequence: Synthetic oligonucleotide
  Antisense strand to SEQ ID NO: 2480332
ugacucaccgcuagacuuc

SEQ ID NO: 2480334 - RNA, 19 nt, Artificial Sequence
  Description of Artificial Sequence: Synthetic oligonucleotide
  Sense strand starting at position 3006 of SEQ ID NO: 1887551
ucauuucucuaggguguca

SEQ ID NO: 2480335 - RNA, 19 nt, Artificial Sequence
  Description of Artificial Sequence: Synthetic oligonucleotide
  Antisense strand to SEQ ID NO: 2480334
ugacacccuagagaaauga

SEQ ID NO: 2480336 - RNA, 19 nt, Artificial Sequence
  Description of Artificial Sequence: Synthetic oligonucleotide
  Sense strand starting at position 3011 of SEQ ID NO: 1887551
ucucuagggugucacauua

SEQ ID NO: 2480337 - RNA, 19 nt, Artificial Sequence
  Description of Artificial Sequence: Synthetic oligonucleotide
  Antisense strand to SEQ ID NO: 2480336
uaaugugacacccuagaga

SEQ ID NO: 2480338 - RNA, 19 nt, Artificial Sequence
  Description of Artificial Sequence: Synthetic oligonucleotide
  Sense strand starting at position 3238 of SEQ ID NO: 1887551
ccagaauagaccuggaguu

SEQ ID NO: 2480339 - RNA, 19 nt, Artificial Sequence
  Description of Artificial Sequence: Synthetic oligonucleotide
  Antisense strand to SEQ ID NO: 2480338
aacuccaggucuauucugg

SEQ ID NO: 2480340 - RNA, 19 nt, Artificial Sequence
  Description of Artificial Sequence: Synthetic oligonucleotide
  Sense strand starting at position 3375 of SEQ ID NO: 1887551
uacagacuguaguuaagaa

SEQ ID NO: 2480341 - RNA, 19 nt, Artificial Sequence
  Description of Artificial Sequence: Synthetic oligonucleotide
  Antisense strand to SEQ ID NO: 2480340
uucuuaacuacagucugua

SEQ ID NO: 2480342 - RNA, 19 nt, Artificial Sequence
  Description of Artificial Sequence: Synthetic oligonucleotide
  Sense strand starting at position 3379 of SEQ ID NO: 1887551
gacuguaguuaagaaacgu

SEQ ID NO: 2480343 - RNA, 19 nt, Artificial Sequence
  Description of Artificial Sequence: Synthetic oligonucleotide
  Antisense strand to SEQ ID NO: 2480342
acguuucuuaacuacaguc

SEQ ID NO: 2480344 - RNA, 19 nt, Artificial Sequence
  Description of Artificial Sequence: Synthetic oligonucleotide
  Sense strand starting at position 3422 of SEQ ID NO: 1887551
ggcugggagcugugauguu

SEQ ID NO: 2480345 - RNA, 19 nt, Artificial Sequence
  Description of Artificial Sequence: Synthetic oligonucleotide
  Antisense strand to SEQ ID NO: 2480344
aacaucacagcucccagcc

SEQ ID NO: 2480346 - RNA, 19 nt, Artificial Sequence
  Description of Artificial Sequence: Synthetic oligonucleotide
  Sense strand starting at position 3432 of SEQ ID NO: 1887551
ugugauguucugggcagga

SEQ ID NO: 2480347 - RNA, 19 nt, Artificial Sequence
  Description of Artificial Sequence: Synthetic oligonucleotide
  Antisense strand to SEQ ID NO: 2480346
uccugcccagaacaucaca

SEQ ID NO: 2480348 - RNA, 19 nt, Artificial Sequence
  Description of Artificial Sequence: Synthetic oligonucleotide
  Sense strand starting at position 3434 of SEQ ID NO: 1887551
ugauguucugggcaggaga

SEQ ID NO: 2480349 - RNA, 19 nt, Artificial Sequence
  Description of Artificial Sequence: Synthetic oligonucleotide
  Antisense strand to SEQ ID NO: 2480348
ucuccugcccagaacauca

SEQ ID NO: 2480350 - RNA, 19 nt, Artificial Sequence
  Description of Artificial Sequence: Synthetic oligonucleotide
  Sense strand starting at position 3470 of SEQ ID NO: 1887551
ucagcuuucugagcucuaa

SEQ ID NO: 2480351 - RNA, 19 nt, Artificial Sequence
  Description of Artificial Sequence: Synthetic oligonucleotide
  Antisense strand to SEQ ID NO: 2480350
uuagagcucagaaagcuga

SEQ ID NO: 2480352 - RNA, 19 nt, Artificial Sequence
  Description of Artificial Sequence: Synthetic oligonucleotide
  Sense strand starting at position 3491 of SEQ ID NO: 1887551
uggguaugaugauaggagu

SEQ ID NO: 2480353 - RNA, 19 nt, Artificial Sequence
  Description of Artificial Sequence: Synthetic oligonucleotide
  Antisense strand to SEQ ID NO: 2480352
acuccuaucaucauaccca

SEQ ID NO: 2480354 - RNA, 19 nt, Artificial Sequence
  Description of Artificial Sequence: Synthetic oligonucleotide
  Sense strand starting at position 3572 of SEQ ID NO: 1887551
aggagaagugaagguuauu

SEQ ID NO: 2480355 - RNA, 19 nt, Artificial Sequence
  Description of Artificial Sequence: Synthetic oligonucleotide
  Antisense strand to SEQ ID NO: 2480354
aauaaccuucacuucuccu

SEQ ID NO: 2480356 - RNA, 19 nt, Artificial Sequence
  Description of Artificial Sequence: Synthetic oligonucleotide
  Sense strand starting at position 3575 of SEQ ID NO: 1887551
agaagugaagguuauuguu

SEQ ID NO: 2480357 - RNA, 19 nt, Artificial Sequence
  Description of Artificial Sequence: Synthetic oligonucleotide
  Antisense strand to SEQ ID NO: 2480356
aacaauaaccuucacuucu

SEQ ID NO: 2480358 - RNA, 19 nt, Artificial Sequence
  Description of Artificial Sequence: Synthetic oligonucleotide
  Sense strand starting at position 3578 of SEQ ID NO: 1887551
agugaagguuauuguuacu

SEQ ID NO: 2480359 - RNA, 19 nt, Artificial Sequence
  Description of Artificial Sequence: Synthetic oligonucleotide
  Antisense strand to SEQ ID NO: 2480358
aguaacaauaaccuucacu

SEQ ID NO: 2480360 - RNA, 19 nt, Artificial Sequence
  Description of Artificial Sequence: Synthetic oligonucleotide
  Sense strand starting at position 3581 of SEQ ID NO: 1887551
gaagguuauuguuacuguu

SEQ ID NO: 2480361 - RNA, 19 nt, Artificial Sequence
  Description of Artificial Sequence: Synthetic oligonucleotide
  Antisense strand to SEQ ID NO: 2480360
aacaguaacaauaaccuuc

SEQ ID NO: 2480362 - RNA, 19 nt, Artificial Sequence
  Description of Artificial Sequence: Synthetic oligonucleotide
  Sense strand starting at position 3634 of SEQ ID NO: 1887551
ggcuguaucugccuuguuu

SEQ ID NO: 2480363 - RNA, 19 nt, Artificial Sequence
  Description of Artificial Sequence: Synthetic oligonucleotide
  Antisense strand to SEQ ID NO: 2480362
aaacaaggcagauacagcc

SEQ ID NO: 2480364 - RNA, 19 nt, Artificial Sequence
  Description of Artificial Sequence: Synthetic oligonucleotide
  Sense strand starting at position 3635 of SEQ ID NO: 1887551
gcuguaucugccuuguuua

SEQ ID NO: 2480365 - RNA, 19 nt, Artificial Sequence
  Description of Artificial Sequence: Synthetic oligonucleotide
  Antisense strand to SEQ ID NO: 2480364
uaaacaaggcagauacagc

SEQ ID NO: 2480366 - RNA, 19 nt, Artificial Sequence
  Description of Artificial Sequence: Synthetic oligonucleotide
  Sense strand starting at position 3645 of SEQ ID NO: 1887551
ccuuguuuacccuguauuu

SEQ ID NO: 2480367 - RNA, 19 nt, Artificial Sequence
  Description of Artificial Sequence: Synthetic oligonucleotide
  Antisense strand to SEQ ID NO: 2480366
aaauacaggguaaacaagg

SEQ ID NO: 2480368 - RNA, 19 nt, Artificial Sequence
  Description of Artificial Sequence: Synthetic oligonucleotide
  Sense strand starting at position 3670 of SEQ ID NO: 1887551
ccugguaugccaggcaaau

SEQ ID NO: 2480369 - RNA, 19 nt, Artificial Sequence
  Description of Artificial Sequence: Synthetic oligonucleotide
  Antisense strand to SEQ ID NO: 2480368
auuugccuggcauaccagg

SEQ ID NO: 2480370 - RNA, 19 nt, Artificial Sequence
  Description of Artificial Sequence: Synthetic oligonucleotide
  Sense strand starting at position 3711 of SEQ ID NO: 1887551
uuaauaagugaaggaaugu

SEQ ID NO: 2480371 - RNA, 19 nt, Artificial Sequence
  Description of Artificial Sequence: Synthetic oligonucleotide
  Antisense strand to SEQ ID NO: 2480370
acauuccuucacuuauuaa

SEQ ID NO: 2480372 - RNA, 19 nt, Artificial Sequence
  Description of Artificial Sequence: Synthetic oligonucleotide
  Sense strand starting at position 3720 of SEQ ID NO: 1887551
gaaggaaugugugaacugu

SEQ ID NO: 2480373 - RNA, 19 nt, Artificial Sequence
  Description of Artificial Sequence: Synthetic oligonucleotide
  Antisense strand to SEQ ID NO: 2480372
acaguucacacauuccuuc

SEQ ID NO: 2480374 - RNA, 19 nt, Artificial Sequence
  Description of Artificial Sequence: Synthetic oligonucleotide
  Sense strand starting at position 3726 of SEQ ID NO: 1887551
augugugaacuguaacaga

SEQ ID NO: 2480375 - RNA, 19 nt, Artificial Sequence
  Description of Artificial Sequence: Synthetic oligonucleotide
  Antisense strand to SEQ ID NO: 2480374
ucuguuacaguucacacau

SEQ ID NO: 2480376 - RNA, 19 nt, Artificial Sequence
  Description of Artificial Sequence: Synthetic oligonucleotide
  Sense strand starting at position 3729 of SEQ ID NO: 1887551
ugugaacuguaacagagau

SEQ ID NO: 2480377 - RNA, 19 nt, Artificial Sequence
  Description of Artificial Sequence: Synthetic oligonucleotide
  Antisense strand to SEQ ID NO: 2480376
aucucuguuacaguucaca

SEQ ID NO: 2480378 - RNA, 19 nt, Artificial Sequence
  Description of Artificial Sequence: Synthetic oligonucleotide
  Sense strand starting at position 3768 of SEQ ID NO: 1887551
uaggguugucaugaggagu

SEQ ID NO: 2480379 - RNA, 19 nt, Artificial Sequence
  Description of Artificial Sequence: Synthetic oligonucleotide
  Antisense strand to SEQ ID NO: 2480378
acuccucaugacaacccua

SEQ ID NO: 2480380 - RNA, 19 nt, Artificial Sequence
  Description of Artificial Sequence: Synthetic oligonucleotide
  Sense strand starting at position 3834 of SEQ ID NO: 1887551
ggcucauuccugcaaacuc

SEQ ID NO: 2480381 - RNA, 19 nt, Artificial Sequence
  Description of Artificial Sequence: Synthetic oligonucleotide
  Antisense strand to SEQ ID NO: 2480380
gaguuugcaggaaugagcc

SEQ ID NO: 2480382 - RNA, 19 nt, Artificial Sequence
  Description of Artificial Sequence: Synthetic oligonucleotide
  Sense strand starting at position 3850 of SEQ ID NO: 1887551
cuccaagauuugccuguca

SEQ ID NO: 2480383 - RNA, 19 nt, Artificial Sequence
  Description of Artificial Sequence: Synthetic oligonucleotide
  Antisense strand to SEQ ID NO: 2480382
ugacaggcaaaucuuggag

SEQ ID NO: 2480384 - RNA, 19 nt, Artificial Sequence
  Description of Artificial Sequence: Synthetic oligonucleotide
  Sense strand starting at position 3852 of SEQ ID NO: 1887551
ccaagauuugccugucauu

SEQ ID NO: 2480385 - RNA, 19 nt, Artificial Sequence
  Description of Artificial Sequence: Synthetic oligonucleotide
  Antisense strand to SEQ ID NO: 2480384
aaugacaggcaaaucuugg

SEQ ID NO: 2480386 - RNA, 19 nt, Artificial Sequence
  Description of Artificial Sequence: Synthetic oligonucleotide
  Sense strand starting at position 3888 of SEQ ID NO: 1887551
cgugccaggcuuuagauaa

SEQ ID NO: 2480387 - RNA, 19 nt, Artificial Sequence
  Description of Artificial Sequence: Synthetic oligonucleotide
  Antisense strand to SEQ ID NO: 2480386
uuaucuaaagccuggcacg

SEQ ID NO: 2480388 - RNA, 19 nt, Artificial Sequence
  Description of Artificial Sequence: Synthetic oligonucleotide
  Sense strand starting at position 3952 of SEQ ID NO: 1887551
gagcaauccucgucaucag

SEQ ID NO: 2480389 - RNA, 19 nt, Artificial Sequence
  Description of Artificial Sequence: Synthetic oligonucleotide
  Antisense strand to SEQ ID NO: 2480388
cugaugacgaggauugcuc

SEQ ID NO: 2480390 - RNA, 19 nt, Artificial Sequence
  Description of Artificial Sequence: Synthetic oligonucleotide
  Sense strand starting at position 3953 of SEQ ID NO: 1887551
agcaauccucgucaucagu

SEQ ID NO: 2480391 - RNA, 19 nt, Artificial Sequence
  Description of Artificial Sequence: Synthetic oligonucleotide
  Antisense strand to SEQ ID NO: 2480390
acugaugacgaggauugcu

SEQ ID NO: 2480392 - RNA, 19 nt, Artificial Sequence
  Description of Artificial Sequence: Synthetic oligonucleotide
  Sense strand starting at position 79 of SEQ ID NO: 1887550
ggagcuguagcccagaacu

SEQ ID NO: 2480393 - RNA, 19 nt, Artificial Sequence
  Description of Artificial Sequence: Synthetic oligonucleotide
  Antisense strand to SEQ ID NO: 2480392
aguucugggcuacagcucc

SEQ ID NO: 2480394 - RNA, 19 nt, Artificial Sequence
  Description of Artificial Sequence: Synthetic oligonucleotide
  Sense strand starting at position 161 of SEQ ID NO: 1887550
cuuggucaccucugucaaa

SEQ ID NO: 2480395 - RNA, 19 nt, Artificial Sequence
  Description of Artificial Sequence: Synthetic oligonucleotide
  Antisense strand to SEQ ID NO: 2480394
uuugacagaggugaccaag

SEQ ID NO: 2480396 - RNA, 19 nt, Artificial Sequence
  Description of Artificial Sequence: Synthetic oligonucleotide
  Sense strand starting at position 235 of SEQ ID NO: 1887550
uccacuguccuccagacua

SEQ ID NO: 2480397 - RNA, 19 nt, Artificial Sequence
  Description of Artificial Sequence: Synthetic oligonucleotide
  Antisense strand to SEQ ID NO: 2480396
uagucuggaggacagugga

SEQ ID NO: 2480398 - RNA, 19 nt, Artificial Sequence
  Description of Artificial Sequence: Synthetic oligonucleotide
  Sense strand starting at position 845 of SEQ ID NO: 1887550
uagagaugaggcugucacu

SEQ ID NO: 2480399 - RNA, 19 nt, Artificial Sequence
  Description of Artificial Sequence: Synthetic oligonucleotide
  Antisense strand to SEQ ID NO: 2480398
agugacagccucaucucua

SEQ ID NO: 2480400 - RNA, 19 nt, Artificial Sequence
  Description of Artificial Sequence: Synthetic oligonucleotide
  Sense strand starting at position 1072 of SEQ ID NO: 1887550
gucucauuccuccaguucu

SEQ ID NO: 2480401 - RNA, 19 nt, Artificial Sequence
  Description of Artificial Sequence: Synthetic oligonucleotide
  Antisense strand to SEQ ID NO: 2480400
agaacuggaggaaugagac

SEQ ID NO: 2480402 - RNA, 19 nt, Artificial Sequence
  Description of Artificial Sequence: Synthetic oligonucleotide
  Sense strand starting at position 1083 of SEQ ID NO: 1887550
ccaguucuggaccaacuau

SEQ ID NO: 2480403 - RNA, 19 nt, Artificial Sequence
  Description of Artificial Sequence: Synthetic oligonucleotide
  Antisense strand to SEQ ID NO: 2480402
auaguugguccagaacugg

SEQ ID NO: 2480404 - RNA, 19 nt, Artificial Sequence
  Description of Artificial Sequence: Synthetic oligonucleotide
  Sense strand starting at position 1595 of SEQ ID NO: 1887550
ucaggaaauguuugucuaa

SEQ ID NO: 2480405 - RNA, 19 nt, Artificial Sequence
  Description of Artificial Sequence: Synthetic oligonucleotide
  Antisense strand to SEQ ID NO: 2480404
uuagacaaacauuuccuga

SEQ ID NO: 2480406 - RNA, 19 nt, Artificial Sequence
  Description of Artificial Sequence: Synthetic oligonucleotide
  Sense strand starting at position 1596 of SEQ ID NO: 1887550
caggaaauguuugucuaac

SEQ ID NO: 2480407 - RNA, 19 nt, Artificial Sequence
  Description of Artificial Sequence: Synthetic oligonucleotide
  Antisense strand to SEQ ID NO: 2480406
guuagacaaacauuuccug

SEQ ID NO: 2480408 - RNA, 19 nt, Artificial Sequence
  Description of Artificial Sequence: Synthetic oligonucleotide
  Sense strand starting at position 1597 of SEQ ID NO: 1887550
aggaaauguuugucuaacu

SEQ ID NO: 2480409 - RNA, 19 nt, Artificial Sequence
  Description of Artificial Sequence: Synthetic oligonucleotide
  Antisense strand to SEQ ID NO: 2480408
aguuagacaaacauuuccu

SEQ ID NO: 2480410 - RNA, 19 nt, Artificial Sequence
  Description of Artificial Sequence: Synthetic oligonucleotide
  Sense strand starting at position 1598 of SEQ ID NO: 1887550
ggaaauguuugucuaacua

SEQ ID NO: 2480411 - RNA, 19 nt, Artificial Sequence
  Description of Artificial Sequence: Synthetic oligonucleotide
  Antisense strand to SEQ ID NO: 2480410
uaguuagacaaacauuucc

SEQ ID NO: 2480412 - RNA, 19 nt, Artificial Sequence
  Description of Artificial Sequence: Synthetic oligonucleotide
  Sense strand starting at position 1602 of SEQ ID NO: 1887550
auguuugucuaacuaauag

SEQ ID NO: 2480413 - RNA, 19 nt, Artificial Sequence
  Description of Artificial Sequence: Synthetic oligonucleotide
  Antisense strand to SEQ ID NO: 2480412
cuauuaguuagacaaacau

SEQ ID NO: 2480414 - RNA, 19 nt, Artificial Sequence
  Description of Artificial Sequence: Synthetic oligonucleotide
  Sense strand starting at position 1612 of SEQ ID NO: 1887550
aacuaauaggugggagagu

SEQ ID NO: 2480415 - RNA, 19 nt, Artificial Sequence
  Description of Artificial Sequence: Synthetic oligonucleotide
  Antisense strand to SEQ ID NO: 2480414
acucucccaccuauuaguu

SEQ ID NO: 2480416 - RNA, 19 nt, Artificial Sequence
  Description of Artificial Sequence: Synthetic oligonucleotide
  Sense strand starting at position 1650 of SEQ ID NO: 1887550
cgagggaauccgugaguga

SEQ ID NO: 2480417 - RNA, 19 nt, Artificial Sequence
  Description of Artificial Sequence: Synthetic oligonucleotide
  Antisense strand to SEQ ID NO: 2480416
ucacucacggauucccucg

SEQ ID NO: 2480418 - RNA, 19 nt, Artificial Sequence
  Description of Artificial Sequence: Synthetic oligonucleotide
  Sense strand starting at position 1651 of SEQ ID NO: 1887550
gagggaauccgugagugag

SEQ ID NO: 2480419 - RNA, 19 nt, Artificial Sequence
  Description of Artificial Sequence: Synthetic oligonucleotide
  Antisense strand to SEQ ID NO: 2480418
cucacucacggauucccuc

SEQ ID NO: 2480420 - RNA, 19 nt, Artificial Sequence
  Description of Artificial Sequence: Synthetic oligonucleotide
  Sense strand starting at position 1654 of SEQ ID NO: 1887550
ggaauccgugagugagaga

SEQ ID NO: 2480421 - RNA, 19 nt, Artificial Sequence
  Description of Artificial Sequence: Synthetic oligonucleotide
  Antisense strand to SEQ ID NO: 2480420
ucucucacucacggauucc

SEQ ID NO: 2480422 - RNA, 19 nt, Artificial Sequence
  Description of Artificial Sequence: Synthetic oligonucleotide
  Sense strand starting at position 1659 of SEQ ID NO: 1887550
ccgugagugagagaauuga

SEQ ID NO: 2480423 - RNA, 19 nt, Artificial Sequence
  Description of Artificial Sequence: Synthetic oligonucleotide
  Antisense strand to SEQ ID NO: 2480422
ucaauucucucacucacgg

SEQ ID NO: 2480424 - RNA, 19 nt, Artificial Sequence
  Description of Artificial Sequence: Synthetic oligonucleotide
  Sense strand starting at position 1782 of SEQ ID NO: 1887550
ggucucaguuucuccaaga

SEQ ID NO: 2480425 - RNA, 19 nt, Artificial Sequence
  Description of Artificial Sequence: Synthetic oligonucleotide
  Antisense strand to SEQ ID NO: 2480424
ucuuggagaaacugagacc

SEQ ID NO: 2480426 - RNA, 19 nt, Artificial Sequence
  Description of Artificial Sequence: Synthetic oligonucleotide
  Sense strand starting at position 1783 of SEQ ID NO: 1887550
gucucaguuucuccaagaa

SEQ ID NO: 2480427 - RNA, 19 nt, Artificial Sequence
  Description of Artificial Sequence: Synthetic oligonucleotide
  Antisense strand to SEQ ID NO: 2480426
uucuuggagaaacugagac

SEQ ID NO: 2480428 - RNA, 19 nt, Artificial Sequence
  Description of Artificial Sequence: Synthetic oligonucleotide
  Sense strand starting at position 1878 of SEQ ID NO: 1887550
gagcuaugugcagaauccu

SEQ ID NO: 2480429 - RNA, 19 nt, Artificial Sequence
  Description of Artificial Sequence: Synthetic oligonucleotide
  Antisense strand to SEQ ID NO: 2480428
aggauucugcacauagcuc

SEQ ID NO: 2480430 - RNA, 19 nt, Artificial Sequence
  Description of Artificial Sequence: Synthetic oligonucleotide
  Sense strand starting at position 2140 of SEQ ID NO: 1887550
guguccauuggcuggaaga

SEQ ID NO: 2480431 - RNA, 19 nt, Artificial Sequence
  Description of Artificial Sequence: Synthetic oligonucleotide
  Antisense strand to SEQ ID NO: 2480430
ucuuccagccaauggacac

SEQ ID NO: 2480432 - RNA, 19 nt, Artificial Sequence
  Description of Artificial Sequence: Synthetic oligonucleotide
  Sense strand starting at position 2141 of SEQ ID NO: 1887550
uguccauuggcuggaagau

SEQ ID NO: 2480433 - RNA, 19 nt, Artificial Sequence
  Description of Artificial Sequence: Synthetic oligonucleotide
  Antisense strand to SEQ ID NO: 2480432
aucuuccagccaauggaca

SEQ ID NO: 2480434 - RNA, 19 nt, Artificial Sequence
  Description of Artificial Sequence: Synthetic oligonucleotide
  Sense strand starting at position 2142 of SEQ ID NO: 1887550
guccauuggcuggaagaua

SEQ ID NO: 2480435 - RNA, 19 nt, Artificial Sequence
  Description of Artificial Sequence: Synthetic oligonucleotide
  Antisense strand to SEQ ID NO: 2480434
uaucuuccagccaauggac

SEQ ID NO: 2480436 - RNA, 19 nt, Artificial Sequence
  Description of Artificial Sequence: Synthetic oligonucleotide
  Sense strand starting at position 2160 of SEQ ID NO: 1887550
agugacugacgucauggau

SEQ ID NO: 2480437 - RNA, 19 nt, Artificial Sequence
  Description of Artificial Sequence: Synthetic oligonucleotide
  Antisense strand to SEQ ID NO: 2480436
auccaugacgucagucacu

SEQ ID NO: 2480438 - RNA, 19 nt, Artificial Sequence
  Description of Artificial Sequence: Synthetic oligonucleotide
  Sense strand starting at position 2166 of SEQ ID NO: 1887550
ugacgucauggauagcuuu

SEQ ID NO: 2480439 - RNA, 19 nt, Artificial Sequence
  Description of Artificial Sequence: Synthetic oligonucleotide
  Antisense strand to SEQ ID NO: 2480438
aaagcuauccaugacguca

SEQ ID NO: 2480440 - RNA, 19 nt, Artificial Sequence
  Description of Artificial Sequence: Synthetic oligonucleotide
  Sense strand starting at position 2178 of SEQ ID NO: 1887550
uagcuuucgccgccagacu

SEQ ID NO: 2480441 - RNA, 19 nt, Artificial Sequence
  Description of Artificial Sequence: Synthetic oligonucleotide
  Antisense strand to SEQ ID NO: 2480440
agucuggcggcgaaagcua

SEQ ID NO: 2480442 - RNA, 19 nt, Artificial Sequence
  Description of Artificial Sequence: Synthetic oligonucleotide
  Sense strand starting at position 2274 of SEQ ID NO: 1887550
cagaauggucgugaaugga

SEQ ID NO: 2480443 - RNA, 19 nt, Artificial Sequence
  Description of Artificial Sequence: Synthetic oligonucleotide
  Antisense strand to SEQ ID NO: 2480442
uccauucacgaccauucug

SEQ ID NO: 2480444 - RNA, 19 nt, Artificial Sequence
  Description of Artificial Sequence: Synthetic oligonucleotide
  Sense strand starting at position 2335 of SEQ ID NO: 1887550
uugggucuugaggaagguu

SEQ ID NO: 2480445 - RNA, 19 nt, Artificial Sequence
  Description of Artificial Sequence: Synthetic oligonucleotide
  Antisense strand to SEQ ID NO: 2480444
aaccuuccucaagacccaa

SEQ ID NO: 2480446 - RNA, 19 nt, Artificial Sequence
  Description of Artificial Sequence: Synthetic oligonucleotide
  Sense strand starting at position 2369 of SEQ ID NO: 1887550
cagacuccuugguucugaa

SEQ ID NO: 2480447 - RNA, 19 nt, Artificial Sequence
  Description of Artificial Sequence: Synthetic oligonucleotide
  Antisense strand to SEQ ID NO: 2480446
uucagaaccaaggagucug

SEQ ID NO: 2480448 - RNA, 19 nt, Artificial Sequence
  Description of Artificial Sequence: Synthetic oligonucleotide
  Sense strand starting at position 2428 of SEQ ID NO: 1887550
cccggacuccugggucaga

SEQ ID NO: 2480449 - RNA, 19 nt, Artificial Sequence
  Description of Artificial Sequence: Synthetic oligonucleotide
  Antisense strand to SEQ ID NO: 2480448
ucugacccaggaguccggg

SEQ ID NO: 2480450 - RNA, 19 nt, Artificial Sequence
  Description of Artificial Sequence: Synthetic oligonucleotide
  Sense strand starting at position 2466 of SEQ ID NO: 1887550
ccugaagguuuggugucua

SEQ ID NO: 2480451 - RNA, 19 nt, Artificial Sequence
  Description of Artificial Sequence: Synthetic oligonucleotide
  Antisense strand to SEQ ID NO: 2480450
uagacaccaaaccuucagg

SEQ ID NO: 2480452 - RNA, 19 nt, Artificial Sequence
  Description of Artificial Sequence: Synthetic oligonucleotide
  Sense strand starting at position 2558 of SEQ ID NO: 1887550
ggcuauuuaugggaaggga

SEQ ID NO: 2480453 - RNA, 19 nt, Artificial Sequence
  Description of Artificial Sequence: Synthetic oligonucleotide
  Antisense strand to SEQ ID NO: 2480452
ucccuucccauaaauagcc

SEQ ID NO: 2480454 - RNA, 19 nt, Artificial Sequence
  Description of Artificial Sequence: Synthetic oligonucleotide
  Sense strand starting at position 2597 of SEQ ID NO: 1887550
aaguguucuggguaaugag

SEQ ID NO: 2480455 - RNA, 19 nt, Artificial Sequence
  Description of Artificial Sequence: Synthetic oligonucleotide
  Antisense strand to SEQ ID NO: 2480454
cucauuacccagaacacuu

SEQ ID NO: 2480456 - RNA, 19 nt, Artificial Sequence
  Description of Artificial Sequence: Synthetic oligonucleotide
  Sense strand starting at position 2657 of SEQ ID NO: 1887550
gaagcucuggccuggauau

SEQ ID NO: 2480457 - RNA, 19 nt, Artificial Sequence
  Description of Artificial Sequence: Synthetic oligonucleotide
  Antisense strand to SEQ ID NO: 2480456
auauccaggccagagcuuc

SEQ ID NO: 2480458 - RNA, 19 nt, Artificial Sequence
  Description of Artificial Sequence: Synthetic oligonucleotide
  Sense strand starting at position 2750 of SEQ ID NO: 1887550
uggagacucacgugagacu

SEQ ID NO: 2480459 - RNA, 19 nt, Artificial Sequence
  Description of Artificial Sequence: Synthetic oligonucleotide
  Antisense strand to SEQ ID NO: 2480458
agucucacgugagucucca

SEQ ID NO: 2480460 - RNA, 19 nt, Artificial Sequence
  Description of Artificial Sequence: Synthetic oligonucleotide
  Sense strand starting at position 2968 of SEQ ID NO: 1887550
aggccuagugagggagaau

SEQ ID NO: 2480461 - RNA, 19 nt, Artificial Sequence
  Description of Artificial Sequence: Synthetic oligonucleotide
  Antisense strand to SEQ ID NO: 2480460
auucucccucacuaggccu

SEQ ID NO: 2480462 - RNA, 19 nt, Artificial Sequence
  Description of Artificial Sequence: Synthetic oligonucleotide
  Sense strand starting at position 3207 of SEQ ID NO: 1887550
ccgugaauccacgauacua

SEQ ID NO: 2480463 - RNA, 19 nt, Artificial Sequence
  Description of Artificial Sequence: Synthetic oligonucleotide
  Antisense strand to SEQ ID NO: 2480462
uaguaucguggauucacgg

SEQ ID NO: 2480464 - RNA, 19 nt, Artificial Sequence
  Description of Artificial Sequence: Synthetic oligonucleotide
  Sense strand starting at position 3306 of SEQ ID NO: 1887550
agccuauuaggaggugaua

SEQ ID NO: 2480465 - RNA, 19 nt, Artificial Sequence
  Description of Artificial Sequence: Synthetic oligonucleotide
  Antisense strand to SEQ ID NO: 2480464
uaucaccuccuaauaggcu

SEQ ID NO: 2480466 - RNA, 19 nt, Artificial Sequence
  Description of Artificial Sequence: Synthetic oligonucleotide
  Sense strand starting at position 3560 of SEQ ID NO: 1887550
accagagguccuggcacau

SEQ ID NO: 2480467 - RNA, 19 nt, Artificial Sequence
  Description of Artificial Sequence: Synthetic oligonucleotide
  Antisense strand to SEQ ID NO: 2480466
augugccaggaccucuggu

SEQ ID NO: 2480468 - RNA, 19 nt, Artificial Sequence
  Description of Artificial Sequence: Synthetic oligonucleotide
  Sense strand starting at position 3820 of SEQ ID NO: 1887550
gggucaccuaugggauguu

SEQ ID NO: 2480469 - RNA, 19 nt, Artificial Sequence
  Description of Artificial Sequence: Synthetic oligonucleotide
  Antisense strand to SEQ ID NO: 2480468
aacaucccauaggugaccc

SEQ ID NO: 2480470 - RNA, 19 nt, Artificial Sequence
  Description of Artificial Sequence: Synthetic oligonucleotide
  Sense strand starting at position 3952 of SEQ ID NO: 1887550
caauuuguguuagauuuga

SEQ ID NO: 2480471 - RNA, 19 nt, Artificial Sequence
  Description of Artificial Sequence: Synthetic oligonucleotide
  Antisense strand to SEQ ID NO: 2480470
ucaaaucuaacacaaauug

SEQ ID NO: 2480472 - RNA, 19 nt, Artificial Sequence
  Description of Artificial Sequence: Synthetic oligonucleotide
  Sense strand starting at position 33 of SEQ ID NO: 1887552
aauugagaauuagggagau

SEQ ID NO: 2480473 - RNA, 19 nt, Artificial Sequence
  Description of Artificial Sequence: Synthetic oligonucleotide
  Antisense strand to SEQ ID NO: 2480472
aucucccuaauucucaauu

SEQ ID NO: 2480474 - RNA, 19 nt, Artificial Sequence
  Description of Artificial Sequence: Synthetic oligonucleotide
  Sense strand starting at position 63 of SEQ ID NO: 1887552
ggcuguuaccaggauguga

SEQ ID NO: 2480475 - RNA, 19 nt, Artificial Sequence
  Description of Artificial Sequence: Synthetic oligonucleotide
  Antisense strand to SEQ ID NO: 2480474
ucacauccugguaacagcc

SEQ ID NO: 2480476 - RNA, 19 nt, Artificial Sequence
  Description of Artificial Sequence: Synthetic oligonucleotide
  Sense strand starting at position 77 of SEQ ID NO: 1887552
ugugacaucugugcuguga

SEQ ID NO: 2480477 - RNA, 19 nt, Artificial Sequence
  Description of Artificial Sequence: Synthetic oligonucleotide
  Antisense strand to SEQ ID NO: 2480476
ucacagcacagaugucaca

SEQ ID NO: 2480478 - RNA, 19 nt, Artificial Sequence
  Description of Artificial Sequence: Synthetic oligonucleotide
  Sense strand starting at position 86 of SEQ ID NO: 1887552
ugugcugugaucuggauga

SEQ ID NO: 2480479 - RNA, 19 nt, Artificial Sequence
  Description of Artificial Sequence: Synthetic oligonucleotide
  Antisense strand to SEQ ID NO: 2480478
ucauccagaucacagcaca

SEQ ID NO: 2480480 - RNA, 19 nt, Artificial Sequence
  Description of Artificial Sequence: Synthetic oligonucleotide
  Sense strand starting at position 88 of SEQ ID NO: 1887552
ugcugugaucuggaugaaa

SEQ ID NO: 2480481 - RNA, 19 nt, Artificial Sequence
  Description of Artificial Sequence: Synthetic oligonucleotide
  Antisense strand to SEQ ID NO: 2480480
uuucauccagaucacagca

SEQ ID NO: 2480482 - RNA, 19 nt, Artificial Sequence
  Description of Artificial Sequence: Synthetic oligonucleotide
  Sense strand starting at position 185 of SEQ ID NO: 1887552
auggacuuacccuguuuga

SEQ ID NO: 2480483 - RNA, 19 nt, Artificial Sequence
  Description of Artificial Sequence: Synthetic oligonucleotide
  Antisense strand to SEQ ID NO: 2480482
ucaaacaggguaaguccau

SEQ ID NO: 2480484 - RNA, 19 nt, Artificial Sequence
  Description of Artificial Sequence: Synthetic oligonucleotide
  Sense strand starting at position 188 of SEQ ID NO: 1887552
gacuuacccuguuugagga

SEQ ID NO: 2480485 - RNA, 19 nt, Artificial Sequence
  Description of Artificial Sequence: Synthetic oligonucleotide
  Antisense strand to SEQ ID NO: 2480484
uccucaaacaggguaaguc

SEQ ID NO: 2480486 - RNA, 19 nt, Artificial Sequence
  Description of Artificial Sequence: Synthetic oligonucleotide
  Sense strand starting at position 520 of SEQ ID NO: 1887552
ggaaauuguggcuguacca

SEQ ID NO: 2480487 - RNA, 19 nt, Artificial Sequence
  Description of Artificial Sequence: Synthetic oligonucleotide
  Antisense strand to SEQ ID NO: 2480486
ugguacagccacaauuucc

SEQ ID NO: 2480488 - RNA, 19 nt, Artificial Sequence
  Description of Artificial Sequence: Synthetic oligonucleotide
  Sense strand starting at position 1716 of SEQ ID NO: 1887552
caaucuugcgaacgccaaa

SEQ ID NO: 2480489 - RNA, 19 nt, Artificial Sequence
  Description of Artificial Sequence: Synthetic oligonucleotide
  Antisense strand to SEQ ID NO: 2480488
uuuggcguucgcaagauug

SEQ ID NO: 2480490 - RNA, 19 nt, Artificial Sequence
  Description of Artificial Sequence: Synthetic oligonucleotide
  Sense strand starting at position 2537 of SEQ ID NO: 1887552
gucggucuugaggaggaaa

SEQ ID NO: 2480491 - RNA, 19 nt, Artificial Sequence
  Description of Artificial Sequence: Synthetic oligonucleotide
  Antisense strand to SEQ ID NO: 2480490
uuuccuccucaagaccgac

SEQ ID NO: 2480492 - RNA, 19 nt, Artificial Sequence
  Description of Artificial Sequence: Synthetic oligonucleotide
  Sense strand starting at position 2539 of SEQ ID NO: 1887552
cggucuugaggaggaaauu

SEQ ID NO: 2480493 - RNA, 19 nt, Artificial Sequence
  Description of Artificial Sequence: Synthetic oligonucleotide
  Antisense strand to SEQ ID NO: 2480492
aauuuccuccucaagaccg

SEQ ID NO: 2480494 - RNA, 19 nt, Artificial Sequence
  Description of Artificial Sequence: Synthetic oligonucleotide
  Sense strand starting at position 2756 of SEQ ID NO: 1887552
caaauaauggugcaaagua

SEQ ID NO: 2480495 - RNA, 19 nt, Artificial Sequence
  Description of Artificial Sequence: Synthetic oligonucleotide
  Antisense strand to SEQ ID NO: 2480494
uacuuugcaccauuauuug

SEQ ID NO: 2480496 - RNA, 19 nt, Artificial Sequence
  Description of Artificial Sequence: Synthetic oligonucleotide
  Sense strand starting at position 2824 of SEQ ID NO: 1887552
cuguguguucuagugcuuu

SEQ ID NO: 2480497 - RNA, 19 nt, Artificial Sequence
  Description of Artificial Sequence: Synthetic oligonucleotide
  Antisense strand to SEQ ID NO: 2480496
aaagcacuagaacacacag

SEQ ID NO: 2480498 - RNA, 19 nt, Artificial Sequence
  Description of Artificial Sequence: Synthetic oligonucleotide
  Sense strand starting at position 2826 of SEQ ID NO: 1887552
guguguucuagugcuuuau

SEQ ID NO: 2480499 - RNA, 19 nt, Artificial Sequence
  Description of Artificial Sequence: Synthetic oligonucleotide
  Antisense strand to SEQ ID NO: 2480498
auaaagcacuagaacacac

SEQ ID NO: 2480500 - RNA, 19 nt, Artificial Sequence
  Description of Artificial Sequence: Synthetic oligonucleotide
  Sense strand starting at position 2830 of SEQ ID NO: 1887552
guucuagugcuuuauacac

SEQ ID NO: 2480501 - RNA, 19 nt, Artificial Sequence
  Description of Artificial Sequence: Synthetic oligonucleotide
  Antisense strand to SEQ ID NO: 2480500
guguauaaagcacuagaac

SEQ ID NO: 2480502 - RNA, 19 nt, Artificial Sequence
  Description of Artificial Sequence: Synthetic oligonucleotide
  Sense strand starting at position 2874 of SEQ ID NO: 1887552
ugcugacuuguacaaagau

SEQ ID NO: 2480503 - RNA, 19 nt, Artificial Sequence
  Description of Artificial Sequence: Synthetic oligonucleotide
  Antisense strand to SEQ ID NO: 2480502
aucuuuguacaagucagca

SEQ ID NO: 2480504 - RNA, 19 nt, Artificial Sequence
  Description of Artificial Sequence: Synthetic oligonucleotide
  Sense strand starting at position 2955 of SEQ ID NO: 1887552
caagcuuaggcuuaguaaa

SEQ ID NO: 2480505 - RNA, 19 nt, Artificial Sequence
  Description of Artificial Sequence: Synthetic oligonucleotide
  Antisense strand to SEQ ID NO: 2480504
uuuacuaagccuaagcuug

SEQ ID NO: 2480506 - RNA, 19 nt, Artificial Sequence
  Description of Artificial Sequence: Synthetic oligonucleotide
  Sense strand starting at position 2957 of SEQ ID NO: 1887552
agcuuaggcuuaguaaauc

SEQ ID NO: 2480507 - RNA, 19 nt, Artificial Sequence
  Description of Artificial Sequence: Synthetic oligonucleotide
  Antisense strand to SEQ ID NO: 2480506
gauuuacuaagccuaagcu

SEQ ID NO: 2480508 - RNA, 19 nt, Artificial Sequence
  Description of Artificial Sequence: Synthetic oligonucleotide
  Sense strand starting at position 2969 of SEQ ID NO: 1887552
guaaaucuuggaggugaau

SEQ ID NO: 2480509 - RNA, 19 nt, Artificial Sequence
  Description of Artificial Sequence: Synthetic oligonucleotide
  Antisense strand to SEQ ID NO: 2480508
auucaccuccaagauuuac

SEQ ID NO: 2480510 - RNA, 19 nt, Artificial Sequence
  Description of Artificial Sequence: Synthetic oligonucleotide
  Sense strand starting at position 3002 of SEQ ID NO: 1887552
ggauuaaauuugcauaaca

SEQ ID NO: 2480511 - RNA, 19 nt, Artificial Sequence
  Description of Artificial Sequence: Synthetic oligonucleotide
  Antisense strand to SEQ ID NO: 2480510
uguuaugcaaauuuaaucc

SEQ ID NO: 2480512 - RNA, 19 nt, Artificial Sequence
  Description of Artificial Sequence: Synthetic oligonucleotide
  Sense strand starting at position 3196 of SEQ ID NO: 1887552
ccacuaauauaugaggauu

SEQ ID NO: 2480513 - RNA, 19 nt, Artificial Sequence
  Description of Artificial Sequence: Synthetic oligonucleotide
  Antisense strand to SEQ ID NO: 2480512
aauccucauauauuagugg

SEQ ID NO: 2480514 - RNA, 19 nt, Artificial Sequence
  Description of Artificial Sequence: Synthetic oligonucleotide
  Sense strand starting at position 3202 of SEQ ID NO: 1887552
auauaugaggauugcaagu

SEQ ID NO: 2480515 - RNA, 19 nt, Artificial Sequence
  Description of Artificial Sequence: Synthetic oligonucleotide
  Antisense strand to SEQ ID NO: 2480514
acuugcaauccucauauau

SEQ ID NO: 2480516 - RNA, 19 nt, Artificial Sequence
  Description of Artificial Sequence: Synthetic oligonucleotide
  Sense strand starting at position 3409 of SEQ ID NO: 1887552
uuacgaugcuccuuacaag

SEQ ID NO: 2480517 - RNA, 19 nt, Artificial Sequence
  Description of Artificial Sequence: Synthetic oligonucleotide
  Antisense strand to SEQ ID NO: 2480516
cuuguaaggagcaucguaa

SEQ ID NO: 2480518 - RNA, 19 nt, Artificial Sequence
  Description of Artificial Sequence: Synthetic oligonucleotide
  Sense strand starting at position 3410 of SEQ ID NO: 1887552
uacgaugcuccuuacaagu

SEQ ID NO: 2480519 - RNA, 19 nt, Artificial Sequence
  Description of Artificial Sequence: Synthetic oligonucleotide
  Antisense strand to SEQ ID NO: 2480518
acuuguaaggagcaucgua

SEQ ID NO: 2480520 - RNA, 19 nt, Artificial Sequence
  Description of Artificial Sequence: Synthetic oligonucleotide
  Sense strand starting at position 3467 of SEQ ID NO: 1887552
cccacuuggucuucuguga

SEQ ID NO: 2480521 - RNA, 19 nt, Artificial Sequence
  Description of Artificial Sequence: Synthetic oligonucleotide
  Antisense strand to SEQ ID NO: 2480520
ucacagaagaccaaguggg

SEQ ID NO: 2480522 - RNA, 19 nt, Artificial Sequence
  Description of Artificial Sequence: Synthetic oligonucleotide
  Sense strand starting at position 3471 of SEQ ID NO: 1887552
cuuggucuucugugagaaa

SEQ ID NO: 2480523 - RNA, 19 nt, Artificial Sequence
  Description of Artificial Sequence: Synthetic oligonucleotide
  Antisense strand to SEQ ID NO: 2480522
uuucucacagaagaccaag

SEQ ID NO: 2480524 - RNA, 19 nt, Artificial Sequence
  Description of Artificial Sequence: Synthetic oligonucleotide
  Sense strand starting at position 3527 of SEQ ID NO: 1887552
ugggauuugcuguguuccu

SEQ ID NO: 2480525 - RNA, 19 nt, Artificial Sequence
  Description of Artificial Sequence: Synthetic oligonucleotide
  Antisense strand to SEQ ID NO: 2480524
aggaacacagcaaauccca

SEQ ID NO: 2480526 - RNA, 19 nt, Artificial Sequence
  Description of Artificial Sequence: Synthetic oligonucleotide
  Sense strand starting at position 3548 of SEQ ID NO: 1887552
gcaggugccuggucaauca

SEQ ID NO: 2480527 - RNA, 19 nt, Artificial Sequence
  Description of Artificial Sequence: Synthetic oligonucleotide
  Antisense strand to SEQ ID NO: 2480526
ugauugaccaggcaccugc

SEQ ID NO: 2480528 - RNA, 19 nt, Artificial Sequence
  Description of Artificial Sequence: Synthetic oligonucleotide
  Sense strand starting at position 3559 of SEQ ID NO: 1887552
gucaaucaguccucgggau

SEQ ID NO: 2480529 - RNA, 19 nt, Artificial Sequence
  Description of Artificial Sequence: Synthetic oligonucleotide
  Antisense strand to SEQ ID NO: 2480528
aucccgaggacugauugac

SEQ ID NO: 2480530 - RNA, 19 nt, Artificial Sequence
  Description of Artificial Sequence: Synthetic oligonucleotide
  Sense strand starting at position 3652 of SEQ ID NO: 1887552
gcugcagucaugggucaga

SEQ ID NO: 2480531 - RNA, 19 nt, Artificial Sequence
  Description of Artificial Sequence: Synthetic oligonucleotide
  Antisense strand to SEQ ID NO: 2480530
ucugacccaugacugcagc

SEQ ID NO: 2480532 - RNA, 19 nt, Artificial Sequence
  Description of Artificial Sequence: Synthetic oligonucleotide
  Sense strand starting at position 3707 of SEQ ID NO: 1887552
gggucugucuaucuuggua

SEQ ID NO: 2480533 - RNA, 19 nt, Artificial Sequence
  Description of Artificial Sequence: Synthetic oligonucleotide
  Antisense strand to SEQ ID NO: 2480532
uaccaagauagacagaccc

SEQ ID NO: 2480534 - RNA, 19 nt, Artificial Sequence
  Description of Artificial Sequence: Synthetic oligonucleotide
  Sense strand starting at position 3710 of SEQ ID NO: 1887552
ucugucuaucuugguacaa

SEQ ID NO: 2480535 - RNA, 19 nt, Artificial Sequence
  Description of Artificial Sequence: Synthetic oligonucleotide
  Antisense strand to SEQ ID NO: 2480534
uuguaccaagauagacaga

SEQ ID NO: 2480536 - RNA, 19 nt, Artificial Sequence
  Description of Artificial Sequence: Synthetic oligonucleotide
  Sense strand starting at position 3711 of SEQ ID NO: 1887552
cugucuaucuugguacaaa

SEQ ID NO: 2480537 - RNA, 19 nt, Artificial Sequence
  Description of Artificial Sequence: Synthetic oligonucleotide
  Antisense strand to SEQ ID NO: 2480536
uuuguaccaagauagacag

SEQ ID NO: 2480538 - RNA, 19 nt, Artificial Sequence
  Description of Artificial Sequence: Synthetic oligonucleotide
  Sense strand starting at position 3731 of SEQ ID NO: 1887552
uuagaacugauugguggua

SEQ ID NO: 2480539 - RNA, 19 nt, Artificial Sequence
  Description of Artificial Sequence: Synthetic oligonucleotide
  Antisense strand to SEQ ID NO: 2480538
uaccaccaaucaguucuaa

SEQ ID NO: 2480540 - RNA, 19 nt, Artificial Sequence
  Description of Artificial Sequence: Synthetic oligonucleotide
  Sense strand starting at position 3796 of SEQ ID NO: 1887552
uagucaucuccugagaggu

SEQ ID NO: 2480541 - RNA, 19 nt, Artificial Sequence
  Description of Artificial Sequence: Synthetic oligonucleotide
  Antisense strand to SEQ ID NO: 2480540
accucucaggagaugacua

SEQ ID NO: 2480542 - RNA, 19 nt, Artificial Sequence
  Description of Artificial Sequence: Synthetic oligonucleotide
  Sense strand starting at position 3802 of SEQ ID NO: 1887552
ucuccugagaggugucauu

SEQ ID NO: 2480543 - RNA, 19 nt, Artificial Sequence
  Description of Artificial Sequence: Synthetic oligonucleotide
  Antisense strand to SEQ ID NO: 2480542
aaugacaccucucaggaga

SEQ ID NO: 2480544 - RNA, 19 nt, Artificial Sequence
  Description of Artificial Sequence: Synthetic oligonucleotide
  Sense strand starting at position 3889 of SEQ ID NO: 1887552
ugucucuacugcucucaua

SEQ ID NO: 2480545 - RNA, 19 nt, Artificial Sequence
  Description of Artificial Sequence: Synthetic oligonucleotide
  Antisense strand to SEQ ID NO: 2480544
uaugagagcaguagagaca

SEQ ID NO: 2480546 - RNA, 19 nt, Artificial Sequence
  Description of Artificial Sequence: Synthetic oligonucleotide
  Sense strand starting at position 3937 of SEQ ID NO: 1887552
uauagcauugguugguaau

SEQ ID NO: 2480547 - RNA, 19 nt, Artificial Sequence
  Description of Artificial Sequence: Synthetic oligonucleotide
  Antisense strand to SEQ ID NO: 2480546
auuaccaaccaaugcuaua

SEQ ID NO: 2480548 - RNA, 19 nt, Artificial Sequence
  Description of Artificial Sequence: Synthetic oligonucleotide
  Sense strand starting at position 3938 of SEQ ID NO: 1887552
auagcauugguugguaauu

SEQ ID NO: 2480549 - RNA, 19 nt, Artificial Sequence
  Description of Artificial Sequence: Synthetic oligonucleotide
  Antisense strand to SEQ ID NO: 2480548
aauuaccaaccaaugcuau

SEQ ID NO: 2480550 - RNA, 19 nt, Artificial Sequence
  Description of Artificial Sequence: Synthetic oligonucleotide
  Sense strand starting at position 3939 of SEQ ID NO: 1887552
uagcauugguugguaauuu

SEQ ID NO: 2480551 - RNA, 19 nt, Artificial Sequence
  Description of Artificial Sequence: Synthetic oligonucleotide
  Antisense strand to SEQ ID NO: 2480550
aaauuaccaaccaaugcua

SEQ ID NO: 2480552 - RNA, 19 nt, Artificial Sequence
  Description of Artificial Sequence: Synthetic oligonucleotide
  Sense strand starting at position 17 of SEQ ID NO: 1887553
ugaguaagcauuggcuguu

SEQ ID NO: 2480553 - RNA, 19 nt, Artificial Sequence
  Description of Artificial Sequence: Synthetic oligonucleotide
  Antisense strand to SEQ ID NO: 2480552
aacagccaaugcuuacuca

SEQ ID NO: 2480554 - RNA, 19 nt, Artificial Sequence
  Description of Artificial Sequence: Synthetic oligonucleotide
  Sense strand starting at position 18 of SEQ ID NO: 1887553
gaguaagcauuggcuguuu

SEQ ID NO: 2480555 - RNA, 19 nt, Artificial Sequence
  Description of Artificial Sequence: Synthetic oligonucleotide
  Antisense strand to SEQ ID NO: 2480554
aaacagccaaugcuuacuc

SEQ ID NO: 2480556 - RNA, 19 nt, Artificial Sequence
  Description of Artificial Sequence: Synthetic oligonucleotide
  Sense strand starting at position 298 of SEQ ID NO: 1887553
guaguacacagcuguaaug

SEQ ID NO: 2480557 - RNA, 19 nt, Artificial Sequence
  Description of Artificial Sequence: Synthetic oligonucleotide
  Antisense strand to SEQ ID NO: 2480556
cauuacagcuguguacuac

SEQ ID NO: 2480558 - RNA, 19 nt, Artificial Sequence
  Description of Artificial Sequence: Synthetic oligonucleotide
  Sense strand starting at position 512 of SEQ ID NO: 1887553
cuauaucuggcccacagau

SEQ ID NO: 2480559 - RNA, 19 nt, Artificial Sequence
  Description of Artificial Sequence: Synthetic oligonucleotide
  Antisense strand to SEQ ID NO: 2480558
aucugugggccagauauag

SEQ ID NO: 2480560 - RNA, 19 nt, Artificial Sequence
  Description of Artificial Sequence: Synthetic oligonucleotide
  Sense strand starting at position 645 of SEQ ID NO: 1887553
gacccuuagguuggaauga

SEQ ID NO: 2480561 - RNA, 19 nt, Artificial Sequence
  Description of Artificial Sequence: Synthetic oligonucleotide
  Antisense strand to SEQ ID NO: 2480560
ucauuccaaccuaaggguc

SEQ ID NO: 2480562 - RNA, 19 nt, Artificial Sequence
  Description of Artificial Sequence: Synthetic oligonucleotide
  Sense strand starting at position 658 of SEQ ID NO: 1887553
gaaugagcuugugcuccaa

SEQ ID NO: 2480563 - RNA, 19 nt, Artificial Sequence
  Description of Artificial Sequence: Synthetic oligonucleotide
  Antisense strand to SEQ ID NO: 2480562
uuggagcacaagcucauuc

SEQ ID NO: 2480564 - RNA, 19 nt, Artificial Sequence
  Description of Artificial Sequence: Synthetic oligonucleotide
  Sense strand starting at position 662 of SEQ ID NO: 1887553
gagcuugugcuccaaggau

SEQ ID NO: 2480565 - RNA, 19 nt, Artificial Sequence
  Description of Artificial Sequence: Synthetic oligonucleotide
  Antisense strand to SEQ ID NO: 2480564
auccuuggagcacaagcuc

SEQ ID NO: 2480566 - RNA, 19 nt, Artificial Sequence
  Description of Artificial Sequence: Synthetic oligonucleotide
  Sense strand starting at position 774 of SEQ ID NO: 1887553
gguuuaggauauuccaagu

SEQ ID NO: 2480567 - RNA, 19 nt, Artificial Sequence
  Description of Artificial Sequence: Synthetic oligonucleotide
  Antisense strand to SEQ ID NO: 2480566
acuuggaauauccuaaacc

SEQ ID NO: 2480568 - RNA, 19 nt, Artificial Sequence
  Description of Artificial Sequence: Synthetic oligonucleotide
  Sense strand starting at position 842 of SEQ ID NO: 1887553
ucagucuauguguauauau

SEQ ID NO: 2480569 - RNA, 19 nt, Artificial Sequence
  Description of Artificial Sequence: Synthetic oligonucleotide
  Antisense strand to SEQ ID NO: 2480568
auauauacacauagacuga

SEQ ID NO: 2480570 - RNA, 19 nt, Artificial Sequence
  Description of Artificial Sequence: Synthetic oligonucleotide
  Sense strand starting at position 888 of SEQ ID NO: 1887553
ugcacacguguauguauau

SEQ ID NO: 2480571 - RNA, 19 nt, Artificial Sequence
  Description of Artificial Sequence: Synthetic oligonucleotide
  Antisense strand to SEQ ID NO: 2480570
auauacauacacgugugca

SEQ ID NO: 2480572 - RNA, 19 nt, Artificial Sequence
  Description of Artificial Sequence: Synthetic oligonucleotide
  Sense strand starting at position 889 of SEQ ID NO: 1887553
gcacacguguauguauaua

SEQ ID NO: 2480573 - RNA, 19 nt, Artificial Sequence
  Description of Artificial Sequence: Synthetic oligonucleotide
  Antisense strand to SEQ ID NO: 2480572
uauauacauacacgugugc

SEQ ID NO: 2480574 - RNA, 19 nt, Artificial Sequence
  Description of Artificial Sequence: Synthetic oligonucleotide
  Sense strand starting at position 968 of SEQ ID NO: 1887553
cuugcugugucccuaggau

SEQ ID NO: 2480575 - RNA, 19 nt, Artificial Sequence
  Description of Artificial Sequence: Synthetic oligonucleotide
  Antisense strand to SEQ ID NO: 2480574
auccuagggacacagcaag

SEQ ID NO: 2480576 - RNA, 19 nt, Artificial Sequence
  Description of Artificial Sequence: Synthetic oligonucleotide
  Sense strand starting at position 1222 of SEQ ID NO: 1887553
ccgcgucuggcugauuaua

SEQ ID NO: 2480577 - RNA, 19 nt, Artificial Sequence
  Description of Artificial Sequence: Synthetic oligonucleotide
  Antisense strand to SEQ ID NO: 2480576
uauaaucagccagacgcgg

SEQ ID NO: 2480578 - RNA, 19 nt, Artificial Sequence
  Description of Artificial Sequence: Synthetic oligonucleotide
  Sense strand starting at position 1224 of SEQ ID NO: 1887553
gcgucuggcugauuauauu

SEQ ID NO: 2480579 - RNA, 19 nt, Artificial Sequence
  Description of Artificial Sequence: Synthetic oligonucleotide
  Antisense strand to SEQ ID NO: 2480578
aauauaaucagccagacgc

SEQ ID NO: 2480580 - RNA, 19 nt, Artificial Sequence
  Description of Artificial Sequence: Synthetic oligonucleotide
  Sense strand starting at position 1332 of SEQ ID NO: 1887553
ccaagucuuccaugagaua

SEQ ID NO: 2480581 - RNA, 19 nt, Artificial Sequence
  Description of Artificial Sequence: Synthetic oligonucleotide
  Antisense strand to SEQ ID NO: 2480580
uaucucauggaagacuugg

SEQ ID NO: 2480582 - RNA, 19 nt, Artificial Sequence
  Description of Artificial Sequence: Synthetic oligonucleotide
  Sense strand starting at position 1335 of SEQ ID NO: 1887553
agucuuccaugagauagau

SEQ ID NO: 2480583 - RNA, 19 nt, Artificial Sequence
  Description of Artificial Sequence: Synthetic oligonucleotide
  Antisense strand to SEQ ID NO: 2480582
aucuaucucauggaagacu

SEQ ID NO: 2480584 - RNA, 19 nt, Artificial Sequence
  Description of Artificial Sequence: Synthetic oligonucleotide
  Sense strand starting at position 1440 of SEQ ID NO: 1887553
aggauuugcugagagauuc

SEQ ID NO: 2480585 - RNA, 19 nt, Artificial Sequence
  Description of Artificial Sequence: Synthetic oligonucleotide
  Antisense strand to SEQ ID NO: 2480584
gaaucucucagcaaauccu

SEQ ID NO: 2480586 - RNA, 19 nt, Artificial Sequence
  Description of Artificial Sequence: Synthetic oligonucleotide
  Sense strand starting at position 1451 of SEQ ID NO: 1887553
agagauucauagcagguga

SEQ ID NO: 2480587 - RNA, 19 nt, Artificial Sequence
  Description of Artificial Sequence: Synthetic oligonucleotide
  Antisense strand to SEQ ID NO: 2480586
ucaccugcuaugaaucucu

SEQ ID NO: 2480588 - RNA, 19 nt, Artificial Sequence
  Description of Artificial Sequence: Synthetic oligonucleotide
  Sense strand starting at position 1453 of SEQ ID NO: 1887553
agauucauagcaggugagu

SEQ ID NO: 2480589 - RNA, 19 nt, Artificial Sequence
  Description of Artificial Sequence: Synthetic oligonucleotide
  Antisense strand to SEQ ID NO: 2480588
acucaccugcuaugaaucu

SEQ ID NO: 2480590 - RNA, 19 nt, Artificial Sequence
  Description of Artificial Sequence: Synthetic oligonucleotide
  Sense strand starting at position 1501 of SEQ ID NO: 1887553
ucccaugagccuugugagu

SEQ ID NO: 2480591 - RNA, 19 nt, Artificial Sequence
  Description of Artificial Sequence: Synthetic oligonucleotide
  Antisense strand to SEQ ID NO: 2480590
acucacaaggcucauggga

SEQ ID NO: 2480592 - RNA, 19 nt, Artificial Sequence
  Description of Artificial Sequence: Synthetic oligonucleotide
  Sense strand starting at position 1572 of SEQ ID NO: 1887553
cucccaugagcuugugaag

SEQ ID NO: 2480593 - RNA, 19 nt, Artificial Sequence
  Description of Artificial Sequence: Synthetic oligonucleotide
  Antisense strand to SEQ ID NO: 2480592
cuucacaagcucaugggag

SEQ ID NO: 2480594 - RNA, 19 nt, Artificial Sequence
  Description of Artificial Sequence: Synthetic oligonucleotide
  Sense strand starting at position 1710 of SEQ ID NO: 1887553
gccgaugagcucugauuua

SEQ ID NO: 2480595 - RNA, 19 nt, Artificial Sequence
  Description of Artificial Sequence: Synthetic oligonucleotide
  Antisense strand to SEQ ID NO: 2480594
uaaaucagagcucaucggc

SEQ ID NO: 2480596 - RNA, 19 nt, Artificial Sequence
  Description of Artificial Sequence: Synthetic oligonucleotide
  Sense strand starting at position 1779 of SEQ ID NO: 1887553
caggaaagcguuugccgaa

SEQ ID NO: 2480597 - RNA, 19 nt, Artificial Sequence
  Description of Artificial Sequence: Synthetic oligonucleotide
  Antisense strand to SEQ ID NO: 2480596
uucggcaaacgcuuuccug

SEQ ID NO: 2480598 - RNA, 19 nt, Artificial Sequence
  Description of Artificial Sequence: Synthetic oligonucleotide
  Sense strand starting at position 2221 of SEQ ID NO: 1887553
acggagucggcuuguuaag

SEQ ID NO: 2480599 - RNA, 19 nt, Artificial Sequence
  Description of Artificial Sequence: Synthetic oligonucleotide
  Antisense strand to SEQ ID NO: 2480598
cuuaacaagccgacuccgu

SEQ ID NO: 2480600 - RNA, 19 nt, Artificial Sequence
  Description of Artificial Sequence: Synthetic oligonucleotide
  Sense strand starting at position 2222 of SEQ ID NO: 1887553
cggagucggcuuguuaagu

SEQ ID NO: 2480601 - RNA, 19 nt, Artificial Sequence
  Description of Artificial Sequence: Synthetic oligonucleotide
  Antisense strand to SEQ ID NO: 2480600
acuuaacaagccgacuccg

SEQ ID NO: 2480602 - RNA, 19 nt, Artificial Sequence
  Description of Artificial Sequence: Synthetic oligonucleotide
  Sense strand starting at position 2251 of SEQ ID NO: 1887553
gggaguuucuggcagaaag

SEQ ID NO: 2480603 - RNA, 19 nt, Artificial Sequence
  Description of Artificial Sequence: Synthetic oligonucleotide
  Antisense strand to SEQ ID NO: 2480602
cuuucugccagaaacuccc

SEQ ID NO: 2480604 - RNA, 19 nt, Artificial Sequence
  Description of Artificial Sequence: Synthetic oligonucleotide
  Sense strand starting at position 2253 of SEQ ID NO: 1887553
gaguuucuggcagaaagca

SEQ ID NO: 2480605 - RNA, 19 nt, Artificial Sequence
  Description of Artificial Sequence: Synthetic oligonucleotide
  Antisense strand to SEQ ID NO: 2480604
ugcuuucugccagaaacuc

SEQ ID NO: 2480606 - RNA, 19 nt, Artificial Sequence
  Description of Artificial Sequence: Synthetic oligonucleotide
  Sense strand starting at position 3004 of SEQ ID NO: 1887553
gcugcacuuccagacaaga

SEQ ID NO: 2480607 - RNA, 19 nt, Artificial Sequence
  Description of Artificial Sequence: Synthetic oligonucleotide
  Antisense strand to SEQ ID NO: 2480606
ucuugucuggaagugcagc

SEQ ID NO: 2480608 - RNA, 19 nt, Artificial Sequence
  Description of Artificial Sequence: Synthetic oligonucleotide
  Sense strand starting at position 3118 of SEQ ID NO: 1887553
gcugaugucugcuuccauc

SEQ ID NO: 2480609 - RNA, 19 nt, Artificial Sequence
  Description of Artificial Sequence: Synthetic oligonucleotide
  Antisense strand to SEQ ID NO: 2480608
gauggaagcagacaucagc

SEQ ID NO: 2480610 - RNA, 19 nt, Artificial Sequence
  Description of Artificial Sequence: Synthetic oligonucleotide
  Sense strand starting at position 3135 of SEQ ID NO: 1887553
uccauagucguguugccau

SEQ ID NO: 2480611 - RNA, 19 nt, Artificial Sequence
  Description of Artificial Sequence: Synthetic oligonucleotide
  Antisense strand to SEQ ID NO: 2480610
auggcaacacgacuaugga

SEQ ID NO: 2480612 - RNA, 19 nt, Artificial Sequence
  Description of Artificial Sequence: Synthetic oligonucleotide
  Sense strand starting at position 3289 of SEQ ID NO: 1887553
accgaauugcaguaaugaa

SEQ ID NO: 2480613 - RNA, 19 nt, Artificial Sequence
  Description of Artificial Sequence: Synthetic oligonucleotide
  Antisense strand to SEQ ID NO: 2480612
uucauuacugcaauucggu

SEQ ID NO: 2480614 - RNA, 19 nt, Artificial Sequence
  Description of Artificial Sequence: Synthetic oligonucleotide
  Sense strand starting at position 3317 of SEQ ID NO: 1887553
auaggaagugcuuggucuu

SEQ ID NO: 2480615 - RNA, 19 nt, Artificial Sequence
  Description of Artificial Sequence: Synthetic oligonucleotide
  Antisense strand to SEQ ID NO: 2480614
aagaccaagcacuuccuau

SEQ ID NO: 2480616 - RNA, 19 nt, Artificial Sequence
  Description of Artificial Sequence: Synthetic oligonucleotide
  Sense strand starting at position 3327 of SEQ ID NO: 1887553
cuuggucuuguggagcauu

SEQ ID NO: 2480617 - RNA, 19 nt, Artificial Sequence
  Description of Artificial Sequence: Synthetic oligonucleotide
  Antisense strand to SEQ ID NO: 2480616
aaugcuccacaagaccaag

SEQ ID NO: 2480618 - RNA, 19 nt, Artificial Sequence
  Description of Artificial Sequence: Synthetic oligonucleotide
  Sense strand starting at position 3366 of SEQ ID NO: 1887553
gugcaaagucuugacauac

SEQ ID NO: 2480619 - RNA, 19 nt, Artificial Sequence
  Description of Artificial Sequence: Synthetic oligonucleotide
  Antisense strand to SEQ ID NO: 2480618
guaugucaagacuuugcac

SEQ ID NO: 2480620 - RNA, 19 nt, Artificial Sequence
  Description of Artificial Sequence: Synthetic oligonucleotide
  Sense strand starting at position 3443 of SEQ ID NO: 1887553
gagucaacgugguuaaguc

SEQ ID NO: 2480621 - RNA, 19 nt, Artificial Sequence
  Description of Artificial Sequence: Synthetic oligonucleotide
  Antisense strand to SEQ ID NO: 2480620
gacuuaaccacguugacuc

SEQ ID NO: 2480622 - RNA, 19 nt, Artificial Sequence
  Description of Artificial Sequence: Synthetic oligonucleotide
  Sense strand starting at position 3453 of SEQ ID NO: 1887553
gguuaagucgcuuauccaa

SEQ ID NO: 2480623 - RNA, 19 nt, Artificial Sequence
  Description of Artificial Sequence: Synthetic oligonucleotide
  Antisense strand to SEQ ID NO: 2480622
uuggauaagcgacuuaacc

SEQ ID NO: 2480624 - RNA, 19 nt, Artificial Sequence
  Description of Artificial Sequence: Synthetic oligonucleotide
  Sense strand starting at position 3562 of SEQ ID NO: 1887553
ucugauucugugugguguu

SEQ ID NO: 2480625 - RNA, 19 nt, Artificial Sequence
  Description of Artificial Sequence: Synthetic oligonucleotide
  Antisense strand to SEQ ID NO: 2480624
aacaccacacagaaucaga

SEQ ID NO: 2480626 - RNA, 19 nt, Artificial Sequence
  Description of Artificial Sequence: Synthetic oligonucleotide
  Sense strand starting at position 3616 of SEQ ID NO: 1887553
agguucucucccugauucu

SEQ ID NO: 2480627 - RNA, 19 nt, Artificial Sequence
  Description of Artificial Sequence: Synthetic oligonucleotide
  Antisense strand to SEQ ID NO: 2480626
agaaucagggagagaaccu

SEQ ID NO: 2480628 - RNA, 19 nt, Artificial Sequence
  Description of Artificial Sequence: Synthetic oligonucleotide
  Sense strand starting at position 3617 of SEQ ID NO: 1887553
gguucucucccugauucuu

SEQ ID NO: 2480629 - RNA, 19 nt, Artificial Sequence
  Description of Artificial Sequence: Synthetic oligonucleotide
  Antisense strand to SEQ ID NO: 2480628
aagaaucagggagagaacc

SEQ ID NO: 2480630 - RNA, 19 nt, Artificial Sequence
  Description of Artificial Sequence: Synthetic oligonucleotide
  Sense strand starting at position 3625 of SEQ ID NO: 1887553
cccugauucuuggccauuu

SEQ ID NO: 2480631 - RNA, 19 nt, Artificial Sequence
  Description of Artificial Sequence: Synthetic oligonucleotide
  Antisense strand to SEQ ID NO: 2480630
aaauggccaagaaucaggg

SEQ ID NO: 2480632 - RNA, 19 nt, Artificial Sequence
  Description of Artificial Sequence: Synthetic oligonucleotide
  Sense strand starting at position 1257 of SEQ ID NO: 1887554
ugcuuaacgcucugaagac

SEQ ID NO: 2480633 - RNA, 19 nt, Artificial Sequence
  Description of Artificial Sequence: Synthetic oligonucleotide
  Antisense strand to SEQ ID NO: 2480632
gucuucagagcguuaagca

SEQ ID NO: 2480634 - RNA, 19 nt, Artificial Sequence
  Description of Artificial Sequence: Synthetic oligonucleotide
  Sense strand starting at position 1775 of SEQ ID NO: 1887554
gcagcuuggccaugaguau

SEQ ID NO: 2480635 - RNA, 19 nt, Artificial Sequence
  Description of Artificial Sequence: Synthetic oligonucleotide
  Antisense strand to SEQ ID NO: 2480634
auacucauggccaagcugc

SEQ ID NO: 2480636 - RNA, 19 nt, Artificial Sequence
  Description of Artificial Sequence: Synthetic oligonucleotide
  Sense strand starting at position 1779 of SEQ ID NO: 1887554
cuuggccaugaguaugaaa

SEQ ID NO: 2480637 - RNA, 19 nt, Artificial Sequence
  Description of Artificial Sequence: Synthetic oligonucleotide
  Antisense strand to SEQ ID NO: 2480636
uuucauacucauggccaag

SEQ ID NO: 2480638 - RNA, 19 nt, Artificial Sequence
  Description of Artificial Sequence: Synthetic oligonucleotide
  Sense strand starting at position 1781 of SEQ ID NO: 1887554
uggccaugaguaugaaauc

SEQ ID NO: 2480639 - RNA, 19 nt, Artificial Sequence
  Description of Artificial Sequence: Synthetic oligonucleotide
  Antisense strand to SEQ ID NO: 2480638
gauuucauacucauggcca

SEQ ID NO: 2480640 - RNA, 19 nt, Artificial Sequence
  Description of Artificial Sequence: Synthetic oligonucleotide
  Sense strand starting at position 1782 of SEQ ID NO: 1887554
ggccaugaguaugaaauca

SEQ ID NO: 2480641 - RNA, 19 nt, Artificial Sequence
  Description of Artificial Sequence: Synthetic oligonucleotide
  Antisense strand to SEQ ID NO: 2480640
ugauuucauacucauggcc

SEQ ID NO: 2480642 - RNA, 19 nt, Artificial Sequence
  Description of Artificial Sequence: Synthetic oligonucleotide
  Sense strand starting at position 1884 of SEQ ID NO: 1887554
agguguaaagucgaucacu

SEQ ID NO: 2480643 - RNA, 19 nt, Artificial Sequence
  Description of Artificial Sequence: Synthetic oligonucleotide
  Antisense strand to SEQ ID NO: 2480642
agugaucgacuuuacaccu

SEQ ID NO: 2480644 - RNA, 19 nt, Artificial Sequence
  Description of Artificial Sequence: Synthetic oligonucleotide
  Sense strand starting at position 2607 of SEQ ID NO: 1887554
gugagacccugucuauaag

SEQ ID NO: 2480645 - RNA, 19 nt, Artificial Sequence
  Description of Artificial Sequence: Synthetic oligonucleotide
  Antisense strand to SEQ ID NO: 2480644
cuuauagacagggucucac

SEQ ID NO: 2480646 - RNA, 19 nt, Artificial Sequence
  Description of Artificial Sequence: Synthetic oligonucleotide
  Sense strand starting at position 2613 of SEQ ID NO: 1887554
cccugucuauaagagcuua

SEQ ID NO: 2480647 - RNA, 19 nt, Artificial Sequence
  Description of Artificial Sequence: Synthetic oligonucleotide
  Antisense strand to SEQ ID NO: 2480646
uaagcucuuauagacaggg

SEQ ID NO: 2480648 - RNA, 19 nt, Artificial Sequence
  Description of Artificial Sequence: Synthetic oligonucleotide
  Sense strand starting at position 3365 of SEQ ID NO: 1887554
uugcuauucuccugauggu

SEQ ID NO: 2480649 - RNA, 19 nt, Artificial Sequence
  Description of Artificial Sequence: Synthetic oligonucleotide
  Antisense strand to SEQ ID NO: 2480648
accaucaggagaauagcaa

SEQ ID NO: 2480650 - RNA, 19 nt, Artificial Sequence
  Description of Artificial Sequence: Synthetic oligonucleotide
  Sense strand starting at position 3561 of SEQ ID NO: 1887554
augagauguucugcaaaga

SEQ ID NO: 2480651 - RNA, 19 nt, Artificial Sequence
  Description of Artificial Sequence: Synthetic oligonucleotide
  Antisense strand to SEQ ID NO: 2480650
ucuuugcagaacaucucau

SEQ ID NO: 2480652 - RNA, 19 nt, Artificial Sequence
  Description of Artificial Sequence: Synthetic oligonucleotide
  Sense strand starting at position 3644 of SEQ ID NO: 1887554
gggugaaucacuugagcac

SEQ ID NO: 2480653 - RNA, 19 nt, Artificial Sequence
  Description of Artificial Sequence: Synthetic oligonucleotide
  Antisense strand to SEQ ID NO: 2480652
gugcucaagugauucaccc

SEQ ID NO: 2480654 - RNA, 19 nt, Artificial Sequence
  Description of Artificial Sequence: Synthetic oligonucleotide
  Sense strand starting at position 3645 of SEQ ID NO: 1887554
ggugaaucacuugagcaca

SEQ ID NO: 2480655 - RNA, 19 nt, Artificial Sequence
  Description of Artificial Sequence: Synthetic oligonucleotide
  Antisense strand to SEQ ID NO: 2480654
ugugcucaagugauucacc

SEQ ID NO: 2480656 - RNA, 19 nt, Artificial Sequence
  Description of Artificial Sequence: Synthetic oligonucleotide
  Sense strand starting at position 3879 of SEQ ID NO: 1887554
gcccguagucuuuaagguu

SEQ ID NO: 2480657 - RNA, 19 nt, Artificial Sequence
  Description of Artificial Sequence: Synthetic oligonucleotide
  Antisense strand to SEQ ID NO: 2480656
aaccuuaaagacuacgggc

SEQ ID NO: 2480658 - RNA, 19 nt, Artificial Sequence
  Description of Artificial Sequence: Synthetic oligonucleotide
  Sense strand starting at position 320 of SEQ ID NO: 1887555
cccugaucucucuggugau

SEQ ID NO: 2480659 - RNA, 19 nt, Artificial Sequence
  Description of Artificial Sequence: Synthetic oligonucleotide
  Antisense strand to SEQ ID NO: 2480658
aucaccagagagaucaggg

SEQ ID NO: 2480660 - RNA, 19 nt, Artificial Sequence
  Description of Artificial Sequence: Synthetic oligonucleotide
  Sense strand starting at position 435 of SEQ ID NO: 1887555
gucacuuaccugggucuau

SEQ ID NO: 2480661 - RNA, 19 nt, Artificial Sequence
  Description of Artificial Sequence: Synthetic oligonucleotide
  Antisense strand to SEQ ID NO: 2480660
auagacccagguaagugac

SEQ ID NO: 2480662 - RNA, 19 nt, Artificial Sequence
  Description of Artificial Sequence: Synthetic oligonucleotide
  Sense strand starting at position 446 of SEQ ID NO: 1887555
gggucuaugccuuguccau

SEQ ID NO: 2480663 - RNA, 19 nt, Artificial Sequence
  Description of Artificial Sequence: Synthetic oligonucleotide
  Antisense strand to SEQ ID NO: 2480662
auggacaaggcauagaccc

SEQ ID NO: 2480664 - RNA, 19 nt, Artificial Sequence
  Description of Artificial Sequence: Synthetic oligonucleotide
  Sense strand starting at position 2004 of SEQ ID NO: 1887555
augguaagauuauagacau

SEQ ID NO: 2480665 - RNA, 19 nt, Artificial Sequence
  Description of Artificial Sequence: Synthetic oligonucleotide
  Antisense strand to SEQ ID NO: 2480664
augucuauaaucuuaccau

SEQ ID NO: 2480666 - RNA, 19 nt, Artificial Sequence
  Description of Artificial Sequence: Synthetic oligonucleotide
  Sense strand starting at position 2239 of SEQ ID NO: 1887555
gcaggagaucauggucacu

SEQ ID NO: 2480667 - RNA, 19 nt, Artificial Sequence
  Description of Artificial Sequence: Synthetic oligonucleotide
  Antisense strand to SEQ ID NO: 2480666
agugaccaugaucuccugc

SEQ ID NO: 2480668 - RNA, 19 nt, Artificial Sequence
  Description of Artificial Sequence: Synthetic oligonucleotide
  Sense strand starting at position 2241 of SEQ ID NO: 1887555
aggagaucauggucacuau

SEQ ID NO: 2480669 - RNA, 19 nt, Artificial Sequence
  Description of Artificial Sequence: Synthetic oligonucleotide
  Antisense strand to SEQ ID NO: 2480668
auagugaccaugaucuccu

SEQ ID NO: 2480670 - RNA, 19 nt, Artificial Sequence
  Description of Artificial Sequence: Synthetic oligonucleotide
  Sense strand starting at position 2276 of SEQ ID NO: 1887555
agggaccauuguucccaua

SEQ ID NO: 2480671 - RNA, 19 nt, Artificial Sequence
  Description of Artificial Sequence: Synthetic oligonucleotide
  Antisense strand to SEQ ID NO: 2480670
uaugggaacaauggucccu

SEQ ID NO: 2480672 - RNA, 19 nt, Artificial Sequence
  Description of Artificial Sequence: Synthetic oligonucleotide
  Sense strand starting at position 2278 of SEQ ID NO: 1887555
ggaccauuguucccauagu

SEQ ID NO: 2480673 - RNA, 19 nt, Artificial Sequence
  Description of Artificial Sequence: Synthetic oligonucleotide
  Antisense strand to SEQ ID NO: 2480672
acuaugggaacaauggucc

SEQ ID NO: 2480674 - RNA, 19 nt, Artificial Sequence
  Description of Artificial Sequence: Synthetic oligonucleotide
  Sense strand starting at position 2369 of SEQ ID NO: 1887555
acaaaugagucauugguaa

SEQ ID NO: 2480675 - RNA, 19 nt, Artificial Sequence
  Description of Artificial Sequence: Synthetic oligonucleotide
  Antisense strand to SEQ ID NO: 2480674
uuaccaaugacucauuugu

SEQ ID NO: 2480676 - RNA, 19 nt, Artificial Sequence
  Description of Artificial Sequence: Synthetic oligonucleotide
  Sense strand starting at position 2608 of SEQ ID NO: 1887555
ccugcucacuguccauaua

SEQ ID NO: 2480677 - RNA, 19 nt, Artificial Sequence
  Description of Artificial Sequence: Synthetic oligonucleotide
  Antisense strand to SEQ ID NO: 2480676
uauauggacagugagcagg

SEQ ID NO: 2480678 - RNA, 19 nt, Artificial Sequence
  Description of Artificial Sequence: Synthetic oligonucleotide
  Sense strand starting at position 2611 of SEQ ID NO: 1887555
gcucacuguccauauaaag

SEQ ID NO: 2480679 - RNA, 19 nt, Artificial Sequence
  Description of Artificial Sequence: Synthetic oligonucleotide
  Antisense strand to SEQ ID NO: 2480678
cuuuauauggacagugagc

SEQ ID NO: 2480680 - RNA, 19 nt, Artificial Sequence
  Description of Artificial Sequence: Synthetic oligonucleotide
  Sense strand starting at position 2622 of SEQ ID NO: 1887555
auauaaagaugcucaugca

SEQ ID NO: 2480681 - RNA, 19 nt, Artificial Sequence
  Description of Artificial Sequence: Synthetic oligonucleotide
  Antisense strand to SEQ ID NO: 2480680
ugcaugagcaucuuuauau

SEQ ID NO: 2480682 - RNA, 19 nt, Artificial Sequence
  Description of Artificial Sequence: Synthetic oligonucleotide
  Sense strand starting at position 2774 of SEQ ID NO: 1887555
agaguugacucucaucaga

SEQ ID NO: 2480683 - RNA, 19 nt, Artificial Sequence
  Description of Artificial Sequence: Synthetic oligonucleotide
  Antisense strand to SEQ ID NO: 2480682
ucugaugagagucaacucu

SEQ ID NO: 2480684 - RNA, 19 nt, Artificial Sequence
  Description of Artificial Sequence: Synthetic oligonucleotide
  Sense strand starting at position 2776 of SEQ ID NO: 1887555
aguugacucucaucagaca

SEQ ID NO: 2480685 - RNA, 19 nt, Artificial Sequence
  Description of Artificial Sequence: Synthetic oligonucleotide
  Antisense strand to SEQ ID NO: 2480684
ugucugaugagagucaacu

SEQ ID NO: 2480686 - RNA, 19 nt, Artificial Sequence
  Description of Artificial Sequence: Synthetic oligonucleotide
  Sense strand starting at position 2811 of SEQ ID NO: 1887555
gaggguuacacugguccau

SEQ ID NO: 2480687 - RNA, 19 nt, Artificial Sequence
  Description of Artificial Sequence: Synthetic oligonucleotide
  Antisense strand to SEQ ID NO: 2480686
auggaccaguguaacccuc

SEQ ID NO: 2480688 - RNA, 19 nt, Artificial Sequence
  Description of Artificial Sequence: Synthetic oligonucleotide
  Sense strand starting at position 2970 of SEQ ID NO: 1887555
ucuuuaaugugacuugaga

SEQ ID NO: 2480689 - RNA, 19 nt, Artificial Sequence
  Description of Artificial Sequence: Synthetic oligonucleotide
  Antisense strand to SEQ ID NO: 2480688
ucucaagucacauuaaaga

SEQ ID NO: 2480690 - RNA, 19 nt, Artificial Sequence
  Description of Artificial Sequence: Synthetic oligonucleotide
  Sense strand starting at position 3044 of SEQ ID NO: 1887555
uggguuggcucuucugaau

SEQ ID NO: 2480691 - RNA, 19 nt, Artificial Sequence
  Description of Artificial Sequence: Synthetic oligonucleotide
  Antisense strand to SEQ ID NO: 2480690
auucagaagagccaaccca

SEQ ID NO: 2480692 - RNA, 19 nt, Artificial Sequence
  Description of Artificial Sequence: Synthetic oligonucleotide
  Sense strand starting at position 3079 of SEQ ID NO: 1887555
ugugaaucucuaggaguug

SEQ ID NO: 2480693 - RNA, 19 nt, Artificial Sequence
  Description of Artificial Sequence: Synthetic oligonucleotide
  Antisense strand to SEQ ID NO: 2480692
caacuccuagagauucaca

SEQ ID NO: 2480694 - RNA, 19 nt, Artificial Sequence
  Description of Artificial Sequence: Synthetic oligonucleotide
  Sense strand starting at position 3188 of SEQ ID NO: 1887555
aggguaaggugucagaaau

SEQ ID NO: 2480695 - RNA, 19 nt, Artificial Sequence
  Description of Artificial Sequence: Synthetic oligonucleotide
  Antisense strand to SEQ ID NO: 2480694
auuucugacaccuuacccu

SEQ ID NO: 2480696 - RNA, 19 nt, Artificial Sequence
  Description of Artificial Sequence: Synthetic oligonucleotide
  Sense strand starting at position 3233 of SEQ ID NO: 1887555
gcaagucugugucugugau

SEQ ID NO: 2480697 - RNA, 19 nt, Artificial Sequence
  Description of Artificial Sequence: Synthetic oligonucleotide
  Antisense strand to SEQ ID NO: 2480696
aucacagacacagacuugc

SEQ ID NO: 2480698 - RNA, 19 nt, Artificial Sequence
  Description of Artificial Sequence: Synthetic oligonucleotide
  Sense strand starting at position 3390 of SEQ ID NO: 1887555
ugcagaaucuaccaagaau

SEQ ID NO: 2480699 - RNA, 19 nt, Artificial Sequence
  Description of Artificial Sequence: Synthetic oligonucleotide
  Antisense strand to SEQ ID NO: 2480698
auucuugguagauucugca

SEQ ID NO: 2480700 - RNA, 19 nt, Artificial Sequence
  Description of Artificial Sequence: Synthetic oligonucleotide
  Sense strand starting at position 3399 of SEQ ID NO: 1887555
uaccaagaaugugugcauu

SEQ ID NO: 2480701 - RNA, 19 nt, Artificial Sequence
  Description of Artificial Sequence: Synthetic oligonucleotide
  Antisense strand to SEQ ID NO: 2480700
aaugcacacauucuuggua

SEQ ID NO: 2480702 - RNA, 19 nt, Artificial Sequence
  Description of Artificial Sequence: Synthetic oligonucleotide
  Sense strand starting at position 3446 of SEQ ID NO: 1887555
ugaggauucugguggaaau

SEQ ID NO: 2480703 - RNA, 19 nt, Artificial Sequence
  Description of Artificial Sequence: Synthetic oligonucleotide
  Antisense strand to SEQ ID NO: 2480702
auuuccaccagaauccuca

SEQ ID NO: 2480704 - RNA, 19 nt, Artificial Sequence
  Description of Artificial Sequence: Synthetic oligonucleotide
  Sense strand starting at position 3447 of SEQ ID NO: 1887555
gaggauucugguggaaauu

SEQ ID NO: 2480705 - RNA, 19 nt, Artificial Sequence
  Description of Artificial Sequence: Synthetic oligonucleotide
  Antisense strand to SEQ ID NO: 2480704
aauuuccaccagaauccuc

SEQ ID NO: 2480706 - RNA, 19 nt, Artificial Sequence
  Description of Artificial Sequence: Synthetic oligonucleotide
  Sense strand starting at position 3459 of SEQ ID NO: 1887555
ggaaauuauuggcaacgga

SEQ ID NO: 2480707 - RNA, 19 nt, Artificial Sequence
  Description of Artificial Sequence: Synthetic oligonucleotide
  Antisense strand to SEQ ID NO: 2480706
uccguugccaauaauuucc

SEQ ID NO: 2480708 - RNA, 19 nt, Artificial Sequence
  Description of Artificial Sequence: Synthetic oligonucleotide
  Sense strand starting at position 3498 of SEQ ID NO: 1887555
uauagagguucugggagaa

SEQ ID NO: 2480709 - RNA, 19 nt, Artificial Sequence
  Description of Artificial Sequence: Synthetic oligonucleotide
  Antisense strand to SEQ ID NO: 2480708
uucucccagaaccucuaua

SEQ ID NO: 2480710 - RNA, 19 nt, Artificial Sequence
  Description of Artificial Sequence: Synthetic oligonucleotide
  Sense strand starting at position 3520 of SEQ ID NO: 1887555
uggucuugauccuaaacag

SEQ ID NO: 2480711 - RNA, 19 nt, Artificial Sequence
  Description of Artificial Sequence: Synthetic oligonucleotide
  Antisense strand to SEQ ID NO: 2480710
cuguuuaggaucaagacca

SEQ ID NO: 2480712 - RNA, 19 nt, Artificial Sequence
  Description of Artificial Sequence: Synthetic oligonucleotide
  Sense strand starting at position 3714 of SEQ ID NO: 1887555
caagaagauuuguggagaa

SEQ ID NO: 2480713 - RNA, 19 nt, Artificial Sequence
  Description of Artificial Sequence: Synthetic oligonucleotide
  Antisense strand to SEQ ID NO: 2480712
uucuccacaaaucuucuug

SEQ ID NO: 2480714 - RNA, 19 nt, Artificial Sequence
  Description of Artificial Sequence: Synthetic oligonucleotide
  Sense strand starting at position 3733 of SEQ ID NO: 1887555
aguugaauuucuugucuag

SEQ ID NO: 2480715 - RNA, 19 nt, Artificial Sequence
  Description of Artificial Sequence: Synthetic oligonucleotide
  Antisense strand to SEQ ID NO: 2480714
cuagacaagaaauucaacu

SEQ ID NO: 2480716 - RNA, 19 nt, Artificial Sequence
  Description of Artificial Sequence: Synthetic oligonucleotide
  Sense strand starting at position 3735 of SEQ ID NO: 1887555
uugaauuucuugucuaguu

SEQ ID NO: 2480717 - RNA, 19 nt, Artificial Sequence
  Description of Artificial Sequence: Synthetic oligonucleotide
  Antisense strand to SEQ ID NO: 2480716
aacuagacaagaaauucaa

SEQ ID NO: 2480718 - RNA, 19 nt, Artificial Sequence
  Description of Artificial Sequence: Synthetic oligonucleotide
  Sense strand starting at position 3740 of SEQ ID NO: 1887555
uuucuugucuaguucuuga

SEQ ID NO: 2480719 - RNA, 19 nt, Artificial Sequence
  Description of Artificial Sequence: Synthetic oligonucleotide
  Antisense strand to SEQ ID NO: 2480718
ucaagaacuagacaagaaa

SEQ ID NO: 2480720 - RNA, 19 nt, Artificial Sequence
  Description of Artificial Sequence: Synthetic oligonucleotide
  Sense strand starting at position 3743 of SEQ ID NO: 1887555
cuugucuaguucuugauuu

SEQ ID NO: 2480721 - RNA, 19 nt, Artificial Sequence
  Description of Artificial Sequence: Synthetic oligonucleotide
  Antisense strand to SEQ ID NO: 2480720
aaaucaagaacuagacaag

SEQ ID NO: 2480722 - RNA, 19 nt, Artificial Sequence
  Description of Artificial Sequence: Synthetic oligonucleotide
  Sense strand starting at position 3745 of SEQ ID NO: 1887555
ugucuaguucuugauuugu

SEQ ID NO: 2480723 - RNA, 19 nt, Artificial Sequence
  Description of Artificial Sequence: Synthetic oligonucleotide
  Antisense strand to SEQ ID NO: 2480722
acaaaucaagaacuagaca

SEQ ID NO: 2480724 - RNA, 19 nt, Artificial Sequence
  Description of Artificial Sequence: Synthetic oligonucleotide
  Sense strand starting at position 3753 of SEQ ID NO: 1887555
ucuugauuuguguguuccu

SEQ ID NO: 2480725 - RNA, 19 nt, Artificial Sequence
  Description of Artificial Sequence: Synthetic oligonucleotide
  Antisense strand to SEQ ID NO: 2480724
aggaacacacaaaucaaga

SEQ ID NO: 2480726 - RNA, 19 nt, Artificial Sequence
  Description of Artificial Sequence: Synthetic oligonucleotide
  Sense strand starting at position 3754 of SEQ ID NO: 1887555
cuugauuuguguguuccuu

SEQ ID NO: 2480727 - RNA, 19 nt, Artificial Sequence
  Description of Artificial Sequence: Synthetic oligonucleotide
  Antisense strand to SEQ ID NO: 2480726
aaggaacacacaaaucaag

SEQ ID NO: 2480728 - RNA, 19 nt, Artificial Sequence
  Description of Artificial Sequence: Synthetic oligonucleotide
  Sense strand starting at position 3756 of SEQ ID NO: 1887555
ugauuuguguguuccuuau

SEQ ID NO: 2480729 - RNA, 19 nt, Artificial Sequence
  Description of Artificial Sequence: Synthetic oligonucleotide
  Antisense strand to SEQ ID NO: 2480728
auaaggaacacacaaauca

SEQ ID NO: 2480730 - RNA, 19 nt, Artificial Sequence
  Description of Artificial Sequence: Synthetic oligonucleotide
  Sense strand starting at position 3762 of SEQ ID NO: 1887555
guguguuccuuauuuccag

SEQ ID NO: 2480731 - RNA, 19 nt, Artificial Sequence
  Description of Artificial Sequence: Synthetic oligonucleotide
  Antisense strand to SEQ ID NO: 2480730
cuggaaauaaggaacacac

SEQ ID NO: 2480732 - RNA, 19 nt, Artificial Sequence
  Description of Artificial Sequence: Synthetic oligonucleotide
  Sense strand starting at position 3763 of SEQ ID NO: 1887555
uguguuccuuauuuccaga

SEQ ID NO: 2480733 - RNA, 19 nt, Artificial Sequence
  Description of Artificial Sequence: Synthetic oligonucleotide
  Antisense strand to SEQ ID NO: 2480732
ucuggaaauaaggaacaca

SEQ ID NO: 2480734 - RNA, 19 nt, Artificial Sequence
  Description of Artificial Sequence: Synthetic oligonucleotide
  Sense strand starting at position 3784 of SEQ ID NO: 1887555
gugugagguacaggugauu

SEQ ID NO: 2480735 - RNA, 19 nt, Artificial Sequence
  Description of Artificial Sequence: Synthetic oligonucleotide
  Antisense strand to SEQ ID NO: 2480734
aaucaccuguaccucacac

SEQ ID NO: 2480736 - RNA, 19 nt, Artificial Sequence
  Description of Artificial Sequence: Synthetic oligonucleotide
  Sense strand starting at position 3907 of SEQ ID NO: 1887555
ucaagugaauucgaauuuc

SEQ ID NO: 2480737 - RNA, 19 nt, Artificial Sequence
  Description of Artificial Sequence: Synthetic oligonucleotide
  Antisense strand to SEQ ID NO: 2480736
gaaauucgaauucacuuga

SEQ ID NO: 2480738 - RNA, 19 nt, Artificial Sequence
  Description of Artificial Sequence: Synthetic oligonucleotide
  Sense strand starting at position 81 of SEQ ID NO: 1887556
uuuggaugaucucgggauc

SEQ ID NO: 2480739 - RNA, 19 nt, Artificial Sequence
  Description of Artificial Sequence: Synthetic oligonucleotide
  Antisense strand to SEQ ID NO: 2480738
gaucccgagaucauccaaa

SEQ ID NO: 2480740 - RNA, 19 nt, Artificial Sequence
  Description of Artificial Sequence: Synthetic oligonucleotide
  Sense strand starting at position 213 of SEQ ID NO: 1887556
uuugguucccagugagcau

SEQ ID NO: 2480741 - RNA, 19 nt, Artificial Sequence
  Description of Artificial Sequence: Synthetic oligonucleotide
  Antisense strand to SEQ ID NO: 2480740
augcucacugggaaccaaa

SEQ ID NO: 2480742 - RNA, 19 nt, Artificial Sequence
  Description of Artificial Sequence: Synthetic oligonucleotide
  Sense strand starting at position 214 of SEQ ID NO: 1887556
uugguucccagugagcauu

SEQ ID NO: 2480743 - RNA, 19 nt, Artificial Sequence
  Description of Artificial Sequence: Synthetic oligonucleotide
  Antisense strand to SEQ ID NO: 2480742
aaugcucacugggaaccaa

SEQ ID NO: 2480744 - RNA, 19 nt, Artificial Sequence
  Description of Artificial Sequence: Synthetic oligonucleotide
  Sense strand starting at position 217 of SEQ ID NO: 1887556
guucccagugagcauugua

SEQ ID NO: 2480745 - RNA, 19 nt, Artificial Sequence
  Description of Artificial Sequence: Synthetic oligonucleotide
  Antisense strand to SEQ ID NO: 2480744
uacaaugcucacugggaac

SEQ ID NO: 2480746 - RNA, 19 nt, Artificial Sequence
  Description of Artificial Sequence: Synthetic oligonucleotide
  Sense strand starting at position 220 of SEQ ID NO: 1887556
cccagugagcauuguacau

SEQ ID NO: 2480747 - RNA, 19 nt, Artificial Sequence
  Description of Artificial Sequence: Synthetic oligonucleotide
  Antisense strand to SEQ ID NO: 2480746
auguacaaugcucacuggg

SEQ ID NO: 2480748 - RNA, 19 nt, Artificial Sequence
  Description of Artificial Sequence: Synthetic oligonucleotide
  Sense strand starting at position 222 of SEQ ID NO: 1887556
cagugagcauuguacauuu

SEQ ID NO: 2480749 - RNA, 19 nt, Artificial Sequence
  Description of Artificial Sequence: Synthetic oligonucleotide
  Antisense strand to SEQ ID NO: 2480748
aaauguacaaugcucacug

SEQ ID NO: 2480750 - RNA, 19 nt, Artificial Sequence
  Description of Artificial Sequence: Synthetic oligonucleotide
  Sense strand starting at position 230 of SEQ ID NO: 1887556
auuguacauuuguggauau

SEQ ID NO: 2480751 - RNA, 19 nt, Artificial Sequence
  Description of Artificial Sequence: Synthetic oligonucleotide
  Antisense strand to SEQ ID NO: 2480750
auauccacaaauguacaau

SEQ ID NO: 2480752 - RNA, 19 nt, Artificial Sequence
  Description of Artificial Sequence: Synthetic oligonucleotide
  Sense strand starting at position 231 of SEQ ID NO: 1887556
uuguacauuuguggauauu

SEQ ID NO: 2480753 - RNA, 19 nt, Artificial Sequence
  Description of Artificial Sequence: Synthetic oligonucleotide
  Antisense strand to SEQ ID NO: 2480752
aauauccacaaauguacaa

SEQ ID NO: 2480754 - RNA, 19 nt, Artificial Sequence
  Description of Artificial Sequence: Synthetic oligonucleotide
  Sense strand starting at position 247 of SEQ ID NO: 1887556
auuaaaucuuuggcaaagu

SEQ ID NO: 2480755 - RNA, 19 nt, Artificial Sequence
  Description of Artificial Sequence: Synthetic oligonucleotide
  Antisense strand to SEQ ID NO: 2480754
acuuugccaaagauuuaau

SEQ ID NO: 2480756 - RNA, 19 nt, Artificial Sequence
  Description of Artificial Sequence: Synthetic oligonucleotide
  Sense strand starting at position 326 of SEQ ID NO: 1887556
gggagaggcugauacucaa

SEQ ID NO: 2480757 - RNA, 19 nt, Artificial Sequence
  Description of Artificial Sequence: Synthetic oligonucleotide
  Antisense strand to SEQ ID NO: 2480756
uugaguaucagccucuccc

SEQ ID NO: 2480758 - RNA, 19 nt, Artificial Sequence
  Description of Artificial Sequence: Synthetic oligonucleotide
  Sense strand starting at position 333 of SEQ ID NO: 1887556
gcugauacucaacaugcaa

SEQ ID NO: 2480759 - RNA, 19 nt, Artificial Sequence
  Description of Artificial Sequence: Synthetic oligonucleotide
  Antisense strand to SEQ ID NO: 2480758
uugcauguugaguaucagc

SEQ ID NO: 2480760 - RNA, 19 nt, Artificial Sequence
  Description of Artificial Sequence: Synthetic oligonucleotide
  Sense strand starting at position 344 of SEQ ID NO: 1887556
acaugcaaaccuuguguuu

SEQ ID NO: 2480761 - RNA, 19 nt, Artificial Sequence
  Description of Artificial Sequence: Synthetic oligonucleotide
  Antisense strand to SEQ ID NO: 2480760
aaacacaagguuugcaugu

SEQ ID NO: 2480762 - RNA, 19 nt, Artificial Sequence
  Description of Artificial Sequence: Synthetic oligonucleotide
  Sense strand starting at position 448 of SEQ ID NO: 1887556
caugauaggucuuggaggu

SEQ ID NO: 2480763 - RNA, 19 nt, Artificial Sequence
  Description of Artificial Sequence: Synthetic oligonucleotide
  Antisense strand to SEQ ID NO: 2480762
accuccaagaccuaucaug

SEQ ID NO: 2480764 - RNA, 19 nt, Artificial Sequence
  Description of Artificial Sequence: Synthetic oligonucleotide
  Sense strand starting at position 496 of SEQ ID NO: 1887556
uuacgaggaaauuguggau

SEQ ID NO: 2480765 - RNA, 19 nt, Artificial Sequence
  Description of Artificial Sequence: Synthetic oligonucleotide
  Antisense strand to SEQ ID NO: 2480764
auccacaauuuccucguaa

SEQ ID NO: 2480766 - RNA, 19 nt, Artificial Sequence
  Description of Artificial Sequence: Synthetic oligonucleotide
  Sense strand starting at position 499 of SEQ ID NO: 1887556
cgaggaaauuguggauauu

SEQ ID NO: 2480767 - RNA, 19 nt, Artificial Sequence
  Description of Artificial Sequence: Synthetic oligonucleotide
  Antisense strand to SEQ ID NO: 2480766
aauauccacaauuuccucg

SEQ ID NO: 2480768 - RNA, 19 nt, Artificial Sequence
  Description of Artificial Sequence: Synthetic oligonucleotide
  Sense strand starting at position 505 of SEQ ID NO: 1887556
aauuguggauauuaaggaa

SEQ ID NO: 2480769 - RNA, 19 nt, Artificial Sequence
  Description of Artificial Sequence: Synthetic oligonucleotide
  Antisense strand to SEQ ID NO: 2480768
uuccuuaauauccacaauu

SEQ ID NO: 2480770 - RNA, 19 nt, Artificial Sequence
  Description of Artificial Sequence: Synthetic oligonucleotide
  Sense strand starting at position 562 of SEQ ID NO: 1887556
agagaaagcuccuaaggga

SEQ ID NO: 2480771 - RNA, 19 nt, Artificial Sequence
  Description of Artificial Sequence: Synthetic oligonucleotide
  Antisense strand to SEQ ID NO: 2480770
ucccuuaggagcuuucucu

SEQ ID NO: 2480772 - RNA, 19 nt, Artificial Sequence
  Description of Artificial Sequence: Synthetic oligonucleotide
  Sense strand starting at position 578 of SEQ ID NO: 1887556
ggacuuucuggcugcuuga

SEQ ID NO: 2480773 - RNA, 19 nt, Artificial Sequence
  Description of Artificial Sequence: Synthetic oligonucleotide
  Antisense strand to SEQ ID NO: 2480772
ucaagcagccagaaagucc

SEQ ID NO: 2480774 - RNA, 19 nt, Artificial Sequence
  Description of Artificial Sequence: Synthetic oligonucleotide
  Sense strand starting at position 610 of SEQ ID NO: 1887556
ggcccucacuucguauuaa

SEQ ID NO: 2480775 - RNA, 19 nt, Artificial Sequence
  Description of Artificial Sequence: Synthetic oligonucleotide
  Antisense strand to SEQ ID NO: 2480774
uuaauacgaagugagggcc

SEQ ID NO: 2480776 - RNA, 19 nt, Artificial Sequence
  Description of Artificial Sequence: Synthetic oligonucleotide
  Sense strand starting at position 611 of SEQ ID NO: 1887556
gcccucacuucguauuaag

SEQ ID NO: 2480777 - RNA, 19 nt, Artificial Sequence
  Description of Artificial Sequence: Synthetic oligonucleotide
  Antisense strand to SEQ ID NO: 2480776
cuuaauacgaagugagggc

SEQ ID NO: 2480778 - RNA, 19 nt, Artificial Sequence
  Description of Artificial Sequence: Synthetic oligonucleotide
  Sense strand starting at position 621 of SEQ ID NO: 1887556
cguauuaaggcucaggacu

SEQ ID NO: 2480779 - RNA, 19 nt, Artificial Sequence
  Description of Artificial Sequence: Synthetic oligonucleotide
  Antisense strand to SEQ ID NO: 2480778
aguccugagccuuaauacg

SEQ ID NO: 2480780 - RNA, 19 nt, Artificial Sequence
  Description of Artificial Sequence: Synthetic oligonucleotide
  Sense strand starting at position 817 of SEQ ID NO: 1887556
ccguaccuguaagaguaaa

SEQ ID NO: 2480781 - RNA, 19 nt, Artificial Sequence
  Description of Artificial Sequence: Synthetic oligonucleotide
  Antisense strand to SEQ ID NO: 2480780
uuuacucuuacagguacgg

SEQ ID NO: 2480782 - RNA, 19 nt, Artificial Sequence
  Description of Artificial Sequence: Synthetic oligonucleotide
  Sense strand starting at position 969 of SEQ ID NO: 1887556
gggcaauguggugaaacau

SEQ ID NO: 2480783 - RNA, 19 nt, Artificial Sequence
  Description of Artificial Sequence: Synthetic oligonucleotide
  Antisense strand to SEQ ID NO: 2480782
auguuucaccacauugccc

SEQ ID NO: 2480784 - RNA, 19 nt, Artificial Sequence
  Description of Artificial Sequence: Synthetic oligonucleotide
  Sense strand starting at position 1134 of SEQ ID NO: 1887556
ugcacuacauccugggaga

SEQ ID NO: 2480785 - RNA, 19 nt, Artificial Sequence
  Description of Artificial Sequence: Synthetic oligonucleotide
  Antisense strand to SEQ ID NO: 2480784
ucucccaggauguagugca

SEQ ID NO: 2480786 - RNA, 19 nt, Artificial Sequence
  Description of Artificial Sequence: Synthetic oligonucleotide
  Sense strand starting at position 1188 of SEQ ID NO: 1887556
acaaacaccucgggaauuu

SEQ ID NO: 2480787 - RNA, 19 nt, Artificial Sequence
  Description of Artificial Sequence: Synthetic oligonucleotide
  Antisense strand to SEQ ID NO: 2480786
aaauucccgagguguuugu

SEQ ID NO: 2480788 - RNA, 19 nt, Artificial Sequence
  Description of Artificial Sequence: Synthetic oligonucleotide
  Sense strand starting at position 1197 of SEQ ID NO: 1887556
ucgggaauuucuggcucaa

SEQ ID NO: 2480789 - RNA, 19 nt, Artificial Sequence
  Description of Artificial Sequence: Synthetic oligonucleotide
  Antisense strand to SEQ ID NO: 2480788
uugagccagaaauucccga

SEQ ID NO: 2480790 - RNA, 19 nt, Artificial Sequence
  Description of Artificial Sequence: Synthetic oligonucleotide
  Sense strand starting at position 1320 of SEQ ID NO: 1887556
aucuccauuccgggaguuu

SEQ ID NO: 2480791 - RNA, 19 nt, Artificial Sequence
  Description of Artificial Sequence: Synthetic oligonucleotide
  Antisense strand to SEQ ID NO: 2480790
aaacucccggaauggagau

SEQ ID NO: 2480792 - RNA, 19 nt, Artificial Sequence
  Description of Artificial Sequence: Synthetic oligonucleotide
  Sense strand starting at position 1331 of SEQ ID NO: 1887556
gggaguuugccucaagcca

SEQ ID NO: 2480793 - RNA, 19 nt, Artificial Sequence
  Description of Artificial Sequence: Synthetic oligonucleotide
  Antisense strand to SEQ ID NO: 2480792
uggcuugaggcaaacuccc

SEQ ID NO: 2480794 - RNA, 19 nt, Artificial Sequence
  Description of Artificial Sequence: Synthetic oligonucleotide
  Sense strand starting at position 285 of SEQ ID NO: 1887557
uagcauuuguggugacgca

SEQ ID NO: 2480795 - RNA, 19 nt, Artificial Sequence
  Description of Artificial Sequence: Synthetic oligonucleotide
  Antisense strand to SEQ ID NO: 2480794
ugcgucaccacaaaugcua

SEQ ID NO: 2480796 - RNA, 19 nt, Artificial Sequence
  Description of Artificial Sequence: Synthetic oligonucleotide
  Sense strand starting at position 614 of SEQ ID NO: 1887557
ggugcuugcucaugggaug

SEQ ID NO: 2480797 - RNA, 19 nt, Artificial Sequence
  Description of Artificial Sequence: Synthetic oligonucleotide
  Antisense strand to SEQ ID NO: 2480796
caucccaugagcaagcacc

SEQ ID NO: 2480798 - RNA, 19 nt, Artificial Sequence
  Description of Artificial Sequence: Synthetic oligonucleotide
  Sense strand starting at position 615 of SEQ ID NO: 1887557
gugcuugcucaugggauga

SEQ ID NO: 2480799 - RNA, 19 nt, Artificial Sequence
  Description of Artificial Sequence: Synthetic oligonucleotide
  Antisense strand to SEQ ID NO: 2480798
ucaucccaugagcaagcac

SEQ ID NO: 2480800 - RNA, 19 nt, Artificial Sequence
  Description of Artificial Sequence: Synthetic oligonucleotide
  Sense strand starting at position 617 of SEQ ID NO: 1887557
gcuugcucaugggaugacu

SEQ ID NO: 2480801 - RNA, 19 nt, Artificial Sequence
  Description of Artificial Sequence: Synthetic oligonucleotide
  Antisense strand to SEQ ID NO: 2480800
agucaucccaugagcaagc

SEQ ID NO: 2480802 - RNA, 19 nt, Artificial Sequence
  Description of Artificial Sequence: Synthetic oligonucleotide
  Sense strand starting at position 619 of SEQ ID NO: 1887557
uugcucaugggaugacuuu

SEQ ID NO: 2480803 - RNA, 19 nt, Artificial Sequence
  Description of Artificial Sequence: Synthetic oligonucleotide
  Antisense strand to SEQ ID NO: 2480802
aaagucaucccaugagcaa

SEQ ID NO: 2480804 - RNA, 19 nt, Artificial Sequence
  Description of Artificial Sequence: Synthetic oligonucleotide
  Sense strand starting at position 661 of SEQ ID NO: 1887557
gccugccugucugugaaau

SEQ ID NO: 2480805 - RNA, 19 nt, Artificial Sequence
  Description of Artificial Sequence: Synthetic oligonucleotide
  Antisense strand to SEQ ID NO: 2480804
auuucacagacaggcaggc

SEQ ID NO: 2480806 - RNA, 19 nt, Artificial Sequence
  Description of Artificial Sequence: Synthetic oligonucleotide
  Sense strand starting at position 662 of SEQ ID NO: 1887557
ccugccugucugugaaaug

SEQ ID NO: 2480807 - RNA, 19 nt, Artificial Sequence
  Description of Artificial Sequence: Synthetic oligonucleotide
  Antisense strand to SEQ ID NO: 2480806
cauuucacagacaggcagg

SEQ ID NO: 2480808 - RNA, 19 nt, Artificial Sequence
  Description of Artificial Sequence: Synthetic oligonucleotide
  Sense strand starting at position 2097 of SEQ ID NO: 1887557
gggccuuucccucagacau

SEQ ID NO: 2480809 - RNA, 19 nt, Artificial Sequence
  Description of Artificial Sequence: Synthetic oligonucleotide
  Antisense strand to SEQ ID NO: 2480808
augucugagggaaaggccc

SEQ ID NO: 2480810 - RNA, 19 nt, Artificial Sequence
  Description of Artificial Sequence: Synthetic oligonucleotide
  Sense strand starting at position 2240 of SEQ ID NO: 1887557
gcuagagccugaugccauu

SEQ ID NO: 2480811 - RNA, 19 nt, Artificial Sequence
  Description of Artificial Sequence: Synthetic oligonucleotide
  Antisense strand to SEQ ID NO: 2480810
aauggcaucaggcucuagc

SEQ ID NO: 2480812 - RNA, 19 nt, Artificial Sequence
  Description of Artificial Sequence: Synthetic oligonucleotide
  Sense strand starting at position 3416 of SEQ ID NO: 1887557
gagcaacuuuagguuucua

SEQ ID NO: 2480813 - RNA, 19 nt, Artificial Sequence
  Description of Artificial Sequence: Synthetic oligonucleotide
  Antisense strand to SEQ ID NO: 2480812
uagaaaccuaaaguugcuc

SEQ ID NO: 2480814 - RNA, 19 nt, Artificial Sequence
  Description of Artificial Sequence: Synthetic oligonucleotide
  Sense strand starting at position 3421 of SEQ ID NO: 1887557
acuuuagguuucuaggaaa

SEQ ID NO: 2480815 - RNA, 19 nt, Artificial Sequence
  Description of Artificial Sequence: Synthetic oligonucleotide
  Antisense strand to SEQ ID NO: 2480814
uuuccuagaaaccuaaagu

SEQ ID NO: 2480816 - RNA, 19 nt, Artificial Sequence
  Description of Artificial Sequence: Synthetic oligonucleotide
  Sense strand starting at position 3482 of SEQ ID NO: 1887557
cucaguuucccaugaccuu

SEQ ID NO: 2480817 - RNA, 19 nt, Artificial Sequence
  Description of Artificial Sequence: Synthetic oligonucleotide
  Antisense strand to SEQ ID NO: 2480816
aaggucaugggaaacugag

SEQ ID NO: 2480818 - RNA, 19 nt, Artificial Sequence
  Description of Artificial Sequence: Synthetic oligonucleotide
  Sense strand starting at position 3483 of SEQ ID NO: 1887557
ucaguuucccaugaccuua

SEQ ID NO: 2480819 - RNA, 19 nt, Artificial Sequence
  Description of Artificial Sequence: Synthetic oligonucleotide
  Antisense strand to SEQ ID NO: 2480818
uaaggucaugggaaacuga

SEQ ID NO: 2480820 - RNA, 19 nt, Artificial Sequence
  Description of Artificial Sequence: Synthetic oligonucleotide
  Sense strand starting at position 3680 of SEQ ID NO: 1887557
uugccuucccucuagaguu

SEQ ID NO: 2480821 - RNA, 19 nt, Artificial Sequence
  Description of Artificial Sequence: Synthetic oligonucleotide
  Antisense strand to SEQ ID NO: 2480820
aacucuagagggaaggcaa

SEQ ID NO: 2480822 - RNA, 19 nt, Artificial Sequence
  Description of Artificial Sequence: Synthetic oligonucleotide
  Sense strand starting at position 3682 of SEQ ID NO: 1887557
gccuucccucuagaguuua

SEQ ID NO: 2480823 - RNA, 19 nt, Artificial Sequence
  Description of Artificial Sequence: Synthetic oligonucleotide
  Antisense strand to SEQ ID NO: 2480822
uaaacucuagagggaaggc

SEQ ID NO: 2480824 - RNA, 19 nt, Artificial Sequence
  Description of Artificial Sequence: Synthetic oligonucleotide
  Sense strand starting at position 3769 of SEQ ID NO: 1887557
ccuguucaucgaggagugu

SEQ ID NO: 2480825 - RNA, 19 nt, Artificial Sequence
  Description of Artificial Sequence: Synthetic oligonucleotide
  Antisense strand to SEQ ID NO: 2480824
acacuccucgaugaacagg

SEQ ID NO: 2480826 - RNA, 19 nt, Artificial Sequence
  Description of Artificial Sequence: Synthetic oligonucleotide
  Sense strand starting at position 3778 of SEQ ID NO: 1887557
cgaggagugucucaaguuc

SEQ ID NO: 2480827 - RNA, 19 nt, Artificial Sequence
  Description of Artificial Sequence: Synthetic oligonucleotide
  Antisense strand to SEQ ID NO: 2480826
gaacuugagacacuccucg

SEQ ID NO: 2480828 - RNA, 19 nt, Artificial Sequence
  Description of Artificial Sequence: Synthetic oligonucleotide
  Sense strand starting at position 3925 of SEQ ID NO: 1887557
ggagcugccugggagagau

SEQ ID NO: 2480829 - RNA, 19 nt, Artificial Sequence
  Description of Artificial Sequence: Synthetic oligonucleotide
  Antisense strand to SEQ ID NO: 2480828
aucucucccaggcagcucc

SEQ ID NO: 2480830 - RNA, 19 nt, Artificial Sequence
  Description of Artificial Sequence: Synthetic oligonucleotide
  Sense strand starting at position 187 of SEQ ID NO: 1887558
uccagucauuuguaacaug

SEQ ID NO: 2480831 - RNA, 19 nt, Artificial Sequence
  Description of Artificial Sequence: Synthetic oligonucleotide
  Antisense strand to SEQ ID NO: 2480830
cauguuacaaaugacugga

SEQ ID NO: 2480832 - RNA, 19 nt, Artificial Sequence
  Description of Artificial Sequence: Synthetic oligonucleotide
  Sense strand starting at position 190 of SEQ ID NO: 1887558
agucauuuguaacauggau

SEQ ID NO: 2480833 - RNA, 19 nt, Artificial Sequence
  Description of Artificial Sequence: Synthetic oligonucleotide
  Antisense strand to SEQ ID NO: 2480832
auccauguuacaaaugacu

SEQ ID NO: 2480834 - RNA, 19 nt, Artificial Sequence
  Description of Artificial Sequence: Synthetic oligonucleotide
  Sense strand starting at position 196 of SEQ ID NO: 1887558
uuguaacauggauggaauu

SEQ ID NO: 2480835 - RNA, 19 nt, Artificial Sequence
  Description of Artificial Sequence: Synthetic oligonucleotide
  Antisense strand to SEQ ID NO: 2480834
aauuccauccauguuacaa

SEQ ID NO: 2480836 - RNA, 19 nt, Artificial Sequence
  Description of Artificial Sequence: Synthetic oligonucleotide
  Sense strand starting at position 641 of SEQ ID NO: 1887558
uagagaguagggugguuau

SEQ ID NO: 2480837 - RNA, 19 nt, Artificial Sequence
  Description of Artificial Sequence: Synthetic oligonucleotide
  Antisense strand to SEQ ID NO: 2480836
auaaccacccuacucucua

SEQ ID NO: 2480838 - RNA, 19 nt, Artificial Sequence
  Description of Artificial Sequence: Synthetic oligonucleotide
  Sense strand starting at position 655 of SEQ ID NO: 1887558
guuauuagaagcugggaaa

SEQ ID NO: 2480839 - RNA, 19 nt, Artificial Sequence
  Description of Artificial Sequence: Synthetic oligonucleotide
  Antisense strand to SEQ ID NO: 2480838
uuucccagcuucuaauaac

SEQ ID NO: 2480840 - RNA, 19 nt, Artificial Sequence
  Description of Artificial Sequence: Synthetic oligonucleotide
  Sense strand starting at position 757 of SEQ ID NO: 1887558
uauagaguguaacuggauu

SEQ ID NO: 2480841 - RNA, 19 nt, Artificial Sequence
  Description of Artificial Sequence: Synthetic oligonucleotide
  Antisense strand to SEQ ID NO: 2480840
aauccaguuacacucuaua

SEQ ID NO: 2480842 - RNA, 19 nt, Artificial Sequence
  Description of Artificial Sequence: Synthetic oligonucleotide
  Sense strand starting at position 833 of SEQ ID NO: 1887558
guugcaugccugcaucaaa

SEQ ID NO: 2480843 - RNA, 19 nt, Artificial Sequence
  Description of Artificial Sequence: Synthetic oligonucleotide
  Antisense strand to SEQ ID NO: 2480842
uuugaugcaggcaugcaac

SEQ ID NO: 2480844 - RNA, 19 nt, Artificial Sequence
  Description of Artificial Sequence: Synthetic oligonucleotide
  Sense strand starting at position 930 of SEQ ID NO: 1887558
guagcuauugauuauauac

SEQ ID NO: 2480845 - RNA, 19 nt, Artificial Sequence
  Description of Artificial Sequence: Synthetic oligonucleotide
  Antisense strand to SEQ ID NO: 2480844
guauauaaucaauagcuac

SEQ ID NO: 2480846 - RNA, 19 nt, Artificial Sequence
  Description of Artificial Sequence: Synthetic oligonucleotide
  Sense strand starting at position 973 of SEQ ID NO: 1887558
cacacaagugaguggucaa

SEQ ID NO: 2480847 - RNA, 19 nt, Artificial Sequence
  Description of Artificial Sequence: Synthetic oligonucleotide
  Antisense strand to SEQ ID NO: 2480846
uugaccacucacuugugug

SEQ ID NO: 2480848 - RNA, 19 nt, Artificial Sequence
  Description of Artificial Sequence: Synthetic oligonucleotide
  Sense strand starting at position 974 of SEQ ID NO: 1887558
acacaagugaguggucaaa

SEQ ID NO: 2480849 - RNA, 19 nt, Artificial Sequence
  Description of Artificial Sequence: Synthetic oligonucleotide
  Antisense strand to SEQ ID NO: 2480848
uuugaccacucacuugugu

SEQ ID NO: 2480850 - RNA, 19 nt, Artificial Sequence
  Description of Artificial Sequence: Synthetic oligonucleotide
  Sense strand starting at position 976 of SEQ ID NO: 1887558
acaagugaguggucaaauc

SEQ ID NO: 2480851 - RNA, 19 nt, Artificial Sequence
  Description of Artificial Sequence: Synthetic oligonucleotide
  Antisense strand to SEQ ID NO: 2480850
gauuugaccacucacuugu

SEQ ID NO: 2480852 - RNA, 19 nt, Artificial Sequence
  Description of Artificial Sequence: Synthetic oligonucleotide
  Sense strand starting at position 1061 of SEQ ID NO: 1887558
cagggaaguuuccaaagag

SEQ ID NO: 2480853 - RNA, 19 nt, Artificial Sequence
  Description of Artificial Sequence: Synthetic oligonucleotide
  Antisense strand to SEQ ID NO: 2480852
cucuuuggaaacuucccug

SEQ ID NO: 2480854 - RNA, 19 nt, Artificial Sequence
  Description of Artificial Sequence: Synthetic oligonucleotide
  Sense strand starting at position 1106 of SEQ ID NO: 1887558
ugugucugugcucaggaga

SEQ ID NO: 2480855 - RNA, 19 nt, Artificial Sequence
  Description of Artificial Sequence: Synthetic oligonucleotide
  Antisense strand to SEQ ID NO: 2480854
ucuccugagcacagacaca

SEQ ID NO: 2480856 - RNA, 19 nt, Artificial Sequence
  Description of Artificial Sequence: Synthetic oligonucleotide
  Sense strand starting at position 1109 of SEQ ID NO: 1887558
gucugugcucaggagagau

SEQ ID NO: 2480857 - RNA, 19 nt, Artificial Sequence
  Description of Artificial Sequence: Synthetic oligonucleotide
  Antisense strand to SEQ ID NO: 2480856
aucucuccugagcacagac

SEQ ID NO: 2480858 - RNA, 19 nt, Artificial Sequence
  Description of Artificial Sequence: Synthetic oligonucleotide
  Sense strand starting at position 1132 of SEQ ID NO: 1887558
gaaggagagucauaaggau

SEQ ID NO: 2480859 - RNA, 19 nt, Artificial Sequence
  Description of Artificial Sequence: Synthetic oligonucleotide
  Antisense strand to SEQ ID NO: 2480858
auccuuaugacucuccuuc

SEQ ID NO: 2480860 - RNA, 19 nt, Artificial Sequence
  Description of Artificial Sequence: Synthetic oligonucleotide
  Sense strand starting at position 1155 of SEQ ID NO: 1887558
guaacaauuccaggugggu

SEQ ID NO: 2480861 - RNA, 19 nt, Artificial Sequence
  Description of Artificial Sequence: Synthetic oligonucleotide
  Antisense strand to SEQ ID NO: 2480860
acccaccuggaauuguuac

SEQ ID NO: 2480862 - RNA, 19 nt, Artificial Sequence
  Description of Artificial Sequence: Synthetic oligonucleotide
  Sense strand starting at position 1230 of SEQ ID NO: 1887558
acgagucaucccugguucu

SEQ ID NO: 2480863 - RNA, 19 nt, Artificial Sequence
  Description of Artificial Sequence: Synthetic oligonucleotide
  Antisense strand to SEQ ID NO: 2480862
agaaccagggaugacucgu

SEQ ID NO: 2480864 - RNA, 19 nt, Artificial Sequence
  Description of Artificial Sequence: Synthetic oligonucleotide
  Sense strand starting at position 1237 of SEQ ID NO: 1887558
aucccugguucuucggaaa

SEQ ID NO: 2480865 - RNA, 19 nt, Artificial Sequence
  Description of Artificial Sequence: Synthetic oligonucleotide
  Antisense strand to SEQ ID NO: 2480864
uuuccgaagaaccagggau

SEQ ID NO: 2480866 - RNA, 19 nt, Artificial Sequence
  Description of Artificial Sequence: Synthetic oligonucleotide
  Sense strand starting at position 1303 of SEQ ID NO: 1887558
ugacaaugacgcugugaac

SEQ ID NO: 2480867 - RNA, 19 nt, Artificial Sequence
  Description of Artificial Sequence: Synthetic oligonucleotide
  Antisense strand to SEQ ID NO: 2480866
guucacagcgucauuguca

SEQ ID NO: 2480868 - RNA, 19 nt, Artificial Sequence
  Description of Artificial Sequence: Synthetic oligonucleotide
  Sense strand starting at position 1331 of SEQ ID NO: 1887558
ggcguuagacuuugggaau

SEQ ID NO: 2480869 - RNA, 19 nt, Artificial Sequence
  Description of Artificial Sequence: Synthetic oligonucleotide
  Antisense strand to SEQ ID NO: 2480868
auucccaaagucuaacgcc

SEQ ID NO: 2480870 - RNA, 19 nt, Artificial Sequence
  Description of Artificial Sequence: Synthetic oligonucleotide
  Sense strand starting at position 1362 of SEQ ID NO: 1887558
ccgcaaacuuaggaauuua

SEQ ID NO: 2480871 - RNA, 19 nt, Artificial Sequence
  Description of Artificial Sequence: Synthetic oligonucleotide
  Antisense strand to SEQ ID NO: 2480870
uaaauuccuaaguuugcgg

SEQ ID NO: 2480872 - RNA, 19 nt, Artificial Sequence
  Description of Artificial Sequence: Synthetic oligonucleotide
  Sense strand starting at position 1408 of SEQ ID NO: 1887558
gagacaggauuauggauuu

SEQ ID NO: 2480873 - RNA, 19 nt, Artificial Sequence
  Description of Artificial Sequence: Synthetic oligonucleotide
  Antisense strand to SEQ ID NO: 2480872
aaauccauaauccugucuc

SEQ ID NO: 2480874 - RNA, 19 nt, Artificial Sequence
  Description of Artificial Sequence: Synthetic oligonucleotide
  Sense strand starting at position 1463 of SEQ ID NO: 1887558
gaagaugggugaccuuuau

SEQ ID NO: 2480875 - RNA, 19 nt, Artificial Sequence
  Description of Artificial Sequence: Synthetic oligonucleotide
  Antisense strand to SEQ ID NO: 2480874
auaaaggucacccaucuuc

SEQ ID NO: 2480876 - RNA, 19 nt, Artificial Sequence
  Description of Artificial Sequence: Synthetic oligonucleotide
  Sense strand starting at position 2104 of SEQ ID NO: 1887558
gagugacagagcugcgaaa

SEQ ID NO: 2480877 - RNA, 19 nt, Artificial Sequence
  Description of Artificial Sequence: Synthetic oligonucleotide
  Antisense strand to SEQ ID NO: 2480876
uuucgcagcucugucacuc

SEQ ID NO: 2480878 - RNA, 19 nt, Artificial Sequence
  Description of Artificial Sequence: Synthetic oligonucleotide
  Sense strand starting at position 2393 of SEQ ID NO: 1887558
gggacuuggccugagucua

SEQ ID NO: 2480879 - RNA, 19 nt, Artificial Sequence
  Description of Artificial Sequence: Synthetic oligonucleotide
  Antisense strand to SEQ ID NO: 2480878
uagacucaggccaaguccc

SEQ ID NO: 2480880 - RNA, 19 nt, Artificial Sequence
  Description of Artificial Sequence: Synthetic oligonucleotide
  Sense strand starting at position 2463 of SEQ ID NO: 1887558
agugacuucgccgugugua

SEQ ID NO: 2480881 - RNA, 19 nt, Artificial Sequence
  Description of Artificial Sequence: Synthetic oligonucleotide
  Antisense strand to SEQ ID NO: 2480880
uacacacggcgaagucacu

SEQ ID NO: 2480882 - RNA, 19 nt, Artificial Sequence
  Description of Artificial Sequence: Synthetic oligonucleotide
  Sense strand starting at position 2465 of SEQ ID NO: 1887558
ugacuucgccguguguaau

SEQ ID NO: 2480883 - RNA, 19 nt, Artificial Sequence
  Description of Artificial Sequence: Synthetic oligonucleotide
  Antisense strand to SEQ ID NO: 2480882
auuacacacggcgaaguca

SEQ ID NO: 2480884 - RNA, 19 nt, Artificial Sequence
  Description of Artificial Sequence: Synthetic oligonucleotide
  Sense strand starting at position 2640 of SEQ ID NO: 1887558
caaggacgcuuaucagacu

SEQ ID NO: 2480885 - RNA, 19 nt, Artificial Sequence
  Description of Artificial Sequence: Synthetic oligonucleotide
  Antisense strand to SEQ ID NO: 2480884
agucugauaagcguccuug

SEQ ID NO: 2480886 - RNA, 19 nt, Artificial Sequence
  Description of Artificial Sequence: Synthetic oligonucleotide
  Sense strand starting at position 2658 of SEQ ID NO: 1887558
uaaccacagcugugagaua

SEQ ID NO: 2480887 - RNA, 19 nt, Artificial Sequence
  Description of Artificial Sequence: Synthetic oligonucleotide
  Antisense strand to SEQ ID NO: 2480886
uaucucacagcugugguua

SEQ ID NO: 2480888 - RNA, 19 nt, Artificial Sequence
  Description of Artificial Sequence: Synthetic oligonucleotide
  Sense strand starting at position 2680 of SEQ ID NO: 1887558
ucaauuaaacucugaagug

SEQ ID NO: 2480889 - RNA, 19 nt, Artificial Sequence
  Description of Artificial Sequence: Synthetic oligonucleotide
  Antisense strand to SEQ ID NO: 2480888
cacuucagaguuuaauuga

SEQ ID NO: 2480890 - RNA, 19 nt, Artificial Sequence
  Description of Artificial Sequence: Synthetic oligonucleotide
  Sense strand starting at position 2737 of SEQ ID NO: 1887558
uacagauuguguucgcaga

SEQ ID NO: 2480891 - RNA, 19 nt, Artificial Sequence
  Description of Artificial Sequence: Synthetic oligonucleotide
  Antisense strand to SEQ ID NO: 2480890
ucugcgaacacaaucugua

SEQ ID NO: 2480892 - RNA, 19 nt, Artificial Sequence
  Description of Artificial Sequence: Synthetic oligonucleotide
  Sense strand starting at position 2738 of SEQ ID NO: 1887558
acagauuguguucgcagag

SEQ ID NO: 2480893 - RNA, 19 nt, Artificial Sequence
  Description of Artificial Sequence: Synthetic oligonucleotide
  Antisense strand to SEQ ID NO: 2480892
cucugcgaacacaaucugu

SEQ ID NO: 2480894 - RNA, 19 nt, Artificial Sequence
  Description of Artificial Sequence: Synthetic oligonucleotide
  Sense strand starting at position 2739 of SEQ ID NO: 1887558
cagauuguguucgcagaga

SEQ ID NO: 2480895 - RNA, 19 nt, Artificial Sequence
  Description of Artificial Sequence: Synthetic oligonucleotide
  Antisense strand to SEQ ID NO: 2480894
ucucugcgaacacaaucug

SEQ ID NO: 2480896 - RNA, 19 nt, Artificial Sequence
  Description of Artificial Sequence: Synthetic oligonucleotide
  Sense strand starting at position 2744 of SEQ ID NO: 1887558
uguguucgcagagaacuuu

SEQ ID NO: 2480897 - RNA, 19 nt, Artificial Sequence
  Description of Artificial Sequence: Synthetic oligonucleotide
  Antisense strand to SEQ ID NO: 2480896
aaaguucucugcgaacaca

SEQ ID NO: 2480898 - RNA, 19 nt, Artificial Sequence
  Description of Artificial Sequence: Synthetic oligonucleotide
  Sense strand starting at position 2750 of SEQ ID NO: 1887558
cgcagagaacuuugaaaug

SEQ ID NO: 2480899 - RNA, 19 nt, Artificial Sequence
  Description of Artificial Sequence: Synthetic oligonucleotide
  Antisense strand to SEQ ID NO: 2480898
cauuucaaaguucucugcg

SEQ ID NO: 2480900 - RNA, 19 nt, Artificial Sequence
  Description of Artificial Sequence: Synthetic oligonucleotide
  Sense strand starting at position 2767 of SEQ ID NO: 1887558
uguaaacgacuaugauaua

SEQ ID NO: 2480901 - RNA, 19 nt, Artificial Sequence
  Description of Artificial Sequence: Synthetic oligonucleotide
  Antisense strand to SEQ ID NO: 2480900
uauaucauagucguuuaca

SEQ ID NO: 2480902 - RNA, 19 nt, Artificial Sequence
  Description of Artificial Sequence: Synthetic oligonucleotide
  Sense strand starting at position 2860 of SEQ ID NO: 1887558
uggaaacucuuaguaugcu

SEQ ID NO: 2480903 - RNA, 19 nt, Artificial Sequence
  Description of Artificial Sequence: Synthetic oligonucleotide
  Antisense strand to SEQ ID NO: 2480902
agcauacuaagaguuucca

SEQ ID NO: 2480904 - RNA, 19 nt, Artificial Sequence
  Description of Artificial Sequence: Synthetic oligonucleotide
  Sense strand starting at position 3358 of SEQ ID NO: 1887558
ucuuguuugagacggaauc

SEQ ID NO: 2480905 - RNA, 19 nt, Artificial Sequence
  Description of Artificial Sequence: Synthetic oligonucleotide
  Antisense strand to SEQ ID NO: 2480904
gauuccgucucaaacaaga

SEQ ID NO: 2480906 - RNA, 19 nt, Artificial Sequence
  Description of Artificial Sequence: Synthetic oligonucleotide
  Sense strand starting at position 3636 of SEQ ID NO: 1887558
gcgccaggccuagaacauu

SEQ ID NO: 2480907 - RNA, 19 nt, Artificial Sequence
  Description of Artificial Sequence: Synthetic oligonucleotide
  Antisense strand to SEQ ID NO: 2480906
aauguucuaggccuggcgc

SEQ ID NO: 2480908 - RNA, 19 nt, Artificial Sequence
  Description of Artificial Sequence: Synthetic oligonucleotide
  Sense strand starting at position 3883 of SEQ ID NO: 1887558
aauccagaaguuugagagu

SEQ ID NO: 2480909 - RNA, 19 nt, Artificial Sequence
  Description of Artificial Sequence: Synthetic oligonucleotide
  Antisense strand to SEQ ID NO: 2480908
acucucaaacuucuggauu

SEQ ID NO: 2480910 - RNA, 19 nt, Artificial Sequence
  Description of Artificial Sequence: Synthetic oligonucleotide
  Sense strand starting at position 1189 of SEQ ID NO: 1887559
cucaguaauuuccaucugu

SEQ ID NO: 2480911 - RNA, 19 nt, Artificial Sequence
  Description of Artificial Sequence: Synthetic oligonucleotide
  Antisense strand to SEQ ID NO: 2480910
acagauggaaauuacugag

SEQ ID NO: 2480912 - RNA, 19 nt, Artificial Sequence
  Description of Artificial Sequence: Synthetic oligonucleotide
  Sense strand starting at position 1193 of SEQ ID NO: 1887559
guaauuuccaucugugugu

SEQ ID NO: 2480913 - RNA, 19 nt, Artificial Sequence
  Description of Artificial Sequence: Synthetic oligonucleotide
  Antisense strand to SEQ ID NO: 2480912
acacacagauggaaauuac

SEQ ID NO: 2480914 - RNA, 19 nt, Artificial Sequence
  Description of Artificial Sequence: Synthetic oligonucleotide
  Sense strand starting at position 1215 of SEQ ID NO: 1887559
uguauaugugugcaggcau

SEQ ID NO: 2480915 - RNA, 19 nt, Artificial Sequence
  Description of Artificial Sequence: Synthetic oligonucleotide
  Antisense strand to SEQ ID NO: 2480914
augccugcacacauauaca

SEQ ID NO: 2480916 - RNA, 19 nt, Artificial Sequence
  Description of Artificial Sequence: Synthetic oligonucleotide
  Sense strand starting at position 1940 of SEQ ID NO: 1887559
acguuacgcaccucuguua

SEQ ID NO: 2480917 - RNA, 19 nt, Artificial Sequence
  Description of Artificial Sequence: Synthetic oligonucleotide
  Antisense strand to SEQ ID NO: 2480916
uaacagaggugcguaacgu

SEQ ID NO: 2480918 - RNA, 19 nt, Artificial Sequence
  Description of Artificial Sequence: Synthetic oligonucleotide
  Sense strand starting at position 1943 of SEQ ID NO: 1887559
uuacgcaccucuguuaagu

SEQ ID NO: 2480919 - RNA, 19 nt, Artificial Sequence
  Description of Artificial Sequence: Synthetic oligonucleotide
  Antisense strand to SEQ ID NO: 2480918
acuuaacagaggugcguaa

SEQ ID NO: 2480920 - RNA, 19 nt, Artificial Sequence
  Description of Artificial Sequence: Synthetic oligonucleotide
  Sense strand starting at position 2023 of SEQ ID NO: 1887559
gcuuaaucauguugaagca

SEQ ID NO: 2480921 - RNA, 19 nt, Artificial Sequence
  Description of Artificial Sequence: Synthetic oligonucleotide
  Antisense strand to SEQ ID NO: 2480920
ugcuucaacaugauuaagc

SEQ ID NO: 2480922 - RNA, 19 nt, Artificial Sequence
  Description of Artificial Sequence: Synthetic oligonucleotide
  Sense strand starting at position 2079 of SEQ ID NO: 1887559
auuuguuuguacgcauaga

SEQ ID NO: 2480923 - RNA, 19 nt, Artificial Sequence
  Description of Artificial Sequence: Synthetic oligonucleotide
  Antisense strand to SEQ ID NO: 2480922
ucuaugcguacaaacaaau

SEQ ID NO: 2480924 - RNA, 19 nt, Artificial Sequence
  Description of Artificial Sequence: Synthetic oligonucleotide
  Sense strand starting at position 2080 of SEQ ID NO: 1887559
uuuguuuguacgcauagac

SEQ ID NO: 2480925 - RNA, 19 nt, Artificial Sequence
  Description of Artificial Sequence: Synthetic oligonucleotide
  Antisense strand to SEQ ID NO: 2480924
gucuaugcguacaaacaaa

SEQ ID NO: 2480926 - RNA, 19 nt, Artificial Sequence
  Description of Artificial Sequence: Synthetic oligonucleotide
  Sense strand starting at position 2296 of SEQ ID NO: 1887559
cacaguuguugugccauau

SEQ ID NO: 2480927 - RNA, 19 nt, Artificial Sequence
  Description of Artificial Sequence: Synthetic oligonucleotide
  Antisense strand to SEQ ID NO: 2480926
auauggcacaacaacugug

SEQ ID NO: 2480928 - RNA, 19 nt, Artificial Sequence
  Description of Artificial Sequence: Synthetic oligonucleotide
  Sense strand starting at position 2300 of SEQ ID NO: 1887559
guuguugugccauauuaca

SEQ ID NO: 2480929 - RNA, 19 nt, Artificial Sequence
  Description of Artificial Sequence: Synthetic oligonucleotide
  Antisense strand to SEQ ID NO: 2480928
uguaauauggcacaacaac

SEQ ID NO: 2480930 - RNA, 19 nt, Artificial Sequence
  Description of Artificial Sequence: Synthetic oligonucleotide
  Sense strand starting at position 2401 of SEQ ID NO: 1887559
gaacaaccaucguaaagga

SEQ ID NO: 2480931 - RNA, 19 nt, Artificial Sequence
  Description of Artificial Sequence: Synthetic oligonucleotide
  Antisense strand to SEQ ID NO: 2480930
uccuuuacgaugguuguuc

SEQ ID NO: 2480932 - RNA, 19 nt, Artificial Sequence
  Description of Artificial Sequence: Synthetic oligonucleotide
  Sense strand starting at position 2688 of SEQ ID NO: 1887559
gacccaguucccuacggau

SEQ ID NO: 2480933 - RNA, 19 nt, Artificial Sequence
  Description of Artificial Sequence: Synthetic oligonucleotide
  Antisense strand to SEQ ID NO: 2480932
auccguagggaacuggguc

SEQ ID NO: 2480934 - RNA, 19 nt, Artificial Sequence
  Description of Artificial Sequence: Synthetic oligonucleotide
  Sense strand starting at position 2690 of SEQ ID NO: 1887559
cccaguucccuacggauaa

SEQ ID NO: 2480935 - RNA, 19 nt, Artificial Sequence
  Description of Artificial Sequence: Synthetic oligonucleotide
  Antisense strand to SEQ ID NO: 2480934
uuauccguagggaacuggg

SEQ ID NO: 2480936 - RNA, 19 nt, Artificial Sequence
  Description of Artificial Sequence: Synthetic oligonucleotide
  Sense strand starting at position 2691 of SEQ ID NO: 1887559
ccaguucccuacggauaaa

SEQ ID NO: 2480937 - RNA, 19 nt, Artificial Sequence
  Description of Artificial Sequence: Synthetic oligonucleotide
  Antisense strand to SEQ ID NO: 2480936
uuuauccguagggaacugg

SEQ ID NO: 2480938 - RNA, 19 nt, Artificial Sequence
  Description of Artificial Sequence: Synthetic oligonucleotide
  Sense strand starting at position 2703 of SEQ ID NO: 1887559
ggauaaacgucaaggucgu

SEQ ID NO: 2480939 - RNA, 19 nt, Artificial Sequence
  Description of Artificial Sequence: Synthetic oligonucleotide
  Antisense strand to SEQ ID NO: 2480938
acgaccuugacguuuaucc

SEQ ID NO: 2480940 - RNA, 19 nt, Artificial Sequence
  Description of Artificial Sequence: Synthetic oligonucleotide
  Sense strand starting at position 2748 of SEQ ID NO: 1887559
ugccgcgacuagucuagaa

SEQ ID NO: 2480941 - RNA, 19 nt, Artificial Sequence
  Description of Artificial Sequence: Synthetic oligonucleotide
  Antisense strand to SEQ ID NO: 2480940
uucuagacuagucgcggca

SEQ ID NO: 2480942 - RNA, 19 nt, Artificial Sequence
  Description of Artificial Sequence: Synthetic oligonucleotide
  Sense strand starting at position 2750 of SEQ ID NO: 1887559
ccgcgacuagucuagaaug

SEQ ID NO: 2480943 - RNA, 19 nt, Artificial Sequence
  Description of Artificial Sequence: Synthetic oligonucleotide
  Antisense strand to SEQ ID NO: 2480942
cauucuagacuagucgcgg

SEQ ID NO: 2480944 - RNA, 19 nt, Artificial Sequence
  Description of Artificial Sequence: Synthetic oligonucleotide
  Sense strand starting at position 2844 of SEQ ID NO: 1887559
ugacuccaaucucaggaaa

SEQ ID NO: 2480945 - RNA, 19 nt, Artificial Sequence
  Description of Artificial Sequence: Synthetic oligonucleotide
  Antisense strand to SEQ ID NO: 2480944
uuuccugagauuggaguca

SEQ ID NO: 2480946 - RNA, 19 nt, Artificial Sequence
  Description of Artificial Sequence: Synthetic oligonucleotide
  Sense strand starting at position 3080 of SEQ ID NO: 1887559
gacugaggguucucuuaau

SEQ ID NO: 2480947 - RNA, 19 nt, Artificial Sequence
  Description of Artificial Sequence: Synthetic oligonucleotide
  Antisense strand to SEQ ID NO: 2480946
auuaagagaacccucaguc

SEQ ID NO: 2480948 - RNA, 19 nt, Artificial Sequence
  Description of Artificial Sequence: Synthetic oligonucleotide
  Sense strand starting at position 3148 of SEQ ID NO: 1887559
aguggugaaucuguggauu

SEQ ID NO: 2480949 - RNA, 19 nt, Artificial Sequence
  Description of Artificial Sequence: Synthetic oligonucleotide
  Antisense strand to SEQ ID NO: 2480948
aauccacagauucaccacu

SEQ ID NO: 2480950 - RNA, 19 nt, Artificial Sequence
  Description of Artificial Sequence: Synthetic oligonucleotide
  Sense strand starting at position 3150 of SEQ ID NO: 1887559
uggugaaucuguggauuaa

SEQ ID NO: 2480951 - RNA, 19 nt, Artificial Sequence
  Description of Artificial Sequence: Synthetic oligonucleotide
  Antisense strand to SEQ ID NO: 2480950
uuaauccacagauucacca

SEQ ID NO: 2480952 - RNA, 19 nt, Artificial Sequence
  Description of Artificial Sequence: Synthetic oligonucleotide
  Sense strand starting at position 3296 of SEQ ID NO: 1887559
ucacuuuccugguguggaa

SEQ ID NO: 2480953 - RNA, 19 nt, Artificial Sequence
  Description of Artificial Sequence: Synthetic oligonucleotide
  Antisense strand to SEQ ID NO: 2480952
uuccacaccaggaaaguga

SEQ ID NO: 2480954 - RNA, 19 nt, Artificial Sequence
  Description of Artificial Sequence: Synthetic oligonucleotide
  Sense strand starting at position 3300 of SEQ ID NO: 1887559
uuuccugguguggaaagua

SEQ ID NO: 2480955 - RNA, 19 nt, Artificial Sequence
  Description of Artificial Sequence: Synthetic oligonucleotide
  Antisense strand to SEQ ID NO: 2480954
uacuuuccacaccaggaaa

SEQ ID NO: 2480956 - RNA, 19 nt, Artificial Sequence
  Description of Artificial Sequence: Synthetic oligonucleotide
  Sense strand starting at position 3400 of SEQ ID NO: 1887559
acacauuccugcuucgacu

SEQ ID NO: 2480957 - RNA, 19 nt, Artificial Sequence
  Description of Artificial Sequence: Synthetic oligonucleotide
  Antisense strand to SEQ ID NO: 2480956
agucgaagcaggaaugugu

SEQ ID NO: 2480958 - RNA, 19 nt, Artificial Sequence
  Description of Artificial Sequence: Synthetic oligonucleotide
  Sense strand starting at position 3522 of SEQ ID NO: 1887559
augagacggcuccaucauu

SEQ ID NO: 2480959 - RNA, 19 nt, Artificial Sequence
  Description of Artificial Sequence: Synthetic oligonucleotide
  Antisense strand to SEQ ID NO: 2480958
aaugauggagccgucucau

SEQ ID NO: 2480960 - RNA, 19 nt, Artificial Sequence
  Description of Artificial Sequence: Synthetic oligonucleotide
  Sense strand starting at position 3533 of SEQ ID NO: 1887559
ccaucauuacuuuggucuu

SEQ ID NO: 2480961 - RNA, 19 nt, Artificial Sequence
  Description of Artificial Sequence: Synthetic oligonucleotide
  Antisense strand to SEQ ID NO: 2480960
aagaccaaaguaaugaugg

SEQ ID NO: 2480962 - RNA, 19 nt, Artificial Sequence
  Description of Artificial Sequence: Synthetic oligonucleotide
  Sense strand starting at position 3656 of SEQ ID NO: 1887559
ucauuuccuugcuaacgua

SEQ ID NO: 2480963 - RNA, 19 nt, Artificial Sequence
  Description of Artificial Sequence: Synthetic oligonucleotide
  Antisense strand to SEQ ID NO: 2480962
uacguuagcaaggaaauga

SEQ ID NO: 2480964 - RNA, 19 nt, Artificial Sequence
  Description of Artificial Sequence: Synthetic oligonucleotide
  Sense strand starting at position 3669 of SEQ ID NO: 1887559
aacguacagucaugcauau

SEQ ID NO: 2480965 - RNA, 19 nt, Artificial Sequence
  Description of Artificial Sequence: Synthetic oligonucleotide
  Antisense strand to SEQ ID NO: 2480964
auaugcaugacuguacguu

SEQ ID NO: 2480966 - RNA, 19 nt, Artificial Sequence
  Description of Artificial Sequence: Synthetic oligonucleotide
  Sense strand starting at position 3671 of SEQ ID NO: 1887559
cguacagucaugcauauga

SEQ ID NO: 2480967 - RNA, 19 nt, Artificial Sequence
  Description of Artificial Sequence: Synthetic oligonucleotide
  Antisense strand to SEQ ID NO: 2480966
ucauaugcaugacuguacg

SEQ ID NO: 2480968 - RNA, 19 nt, Artificial Sequence
  Description of Artificial Sequence: Synthetic oligonucleotide
  Sense strand starting at position 3673 of SEQ ID NO: 1887559
uacagucaugcauaugaag

SEQ ID NO: 2480969 - RNA, 19 nt, Artificial Sequence
  Description of Artificial Sequence: Synthetic oligonucleotide
  Antisense strand to SEQ ID NO: 2480968
cuucauaugcaugacugua

SEQ ID NO: 2480970 - RNA, 19 nt, Artificial Sequence
  Description of Artificial Sequence: Synthetic oligonucleotide
  Sense strand starting at position 3709 of SEQ ID NO: 1887559
aagacuggaucugagucaa

SEQ ID NO: 2480971 - RNA, 19 nt, Artificial Sequence
  Description of Artificial Sequence: Synthetic oligonucleotide
  Antisense strand to SEQ ID NO: 2480970
uugacucagauccagucuu

SEQ ID NO: 2480972 - RNA, 19 nt, Artificial Sequence
  Description of Artificial Sequence: Synthetic oligonucleotide
  Sense strand starting at position 3849 of SEQ ID NO: 1887559
ggauaaagauuugaggugu

SEQ ID NO: 2480973 - RNA, 19 nt, Artificial Sequence
  Description of Artificial Sequence: Synthetic oligonucleotide
  Antisense strand to SEQ ID NO: 2480972
acaccucaaaucuuuaucc

SEQ ID NO: 2480974 - RNA, 19 nt, Artificial Sequence
  Description of Artificial Sequence: Synthetic oligonucleotide
  Sense strand starting at position 235 of SEQ ID NO: 1887560
aggcgaaacucccucucaa

SEQ ID NO: 2480975 - RNA, 19 nt, Artificial Sequence
  Description of Artificial Sequence: Synthetic oligonucleotide
  Antisense strand to SEQ ID NO: 2480974
uugagagggaguuucgccu

SEQ ID NO: 2480976 - RNA, 19 nt, Artificial Sequence
  Description of Artificial Sequence: Synthetic oligonucleotide
  Sense strand starting at position 305 of SEQ ID NO: 1887560
auacguauacacgaacauu

SEQ ID NO: 2480977 - RNA, 19 nt, Artificial Sequence
  Description of Artificial Sequence: Synthetic oligonucleotide
  Antisense strand to SEQ ID NO: 2480976
aauguucguguauacguau

SEQ ID NO: 2480978 - RNA, 19 nt, Artificial Sequence
  Description of Artificial Sequence: Synthetic oligonucleotide
  Sense strand starting at position 364 of SEQ ID NO: 1887560
gccaaaugugcgucaaugu

SEQ ID NO: 2480979 - RNA, 19 nt, Artificial Sequence
  Description of Artificial Sequence: Synthetic oligonucleotide
  Antisense strand to SEQ ID NO: 2480978
acauugacgcacauuuggc

SEQ ID NO: 2480980 - RNA, 19 nt, Artificial Sequence
  Description of Artificial Sequence: Synthetic oligonucleotide
  Sense strand starting at position 452 of SEQ ID NO: 1887560
cgugguaugaugugaauaa

SEQ ID NO: 2480981 - RNA, 19 nt, Artificial Sequence
  Description of Artificial Sequence: Synthetic oligonucleotide
  Antisense strand to SEQ ID NO: 2480980
uuauucacaucauaccacg

SEQ ID NO: 2480982 - RNA, 19 nt, Artificial Sequence
  Description of Artificial Sequence: Synthetic oligonucleotide
  Sense strand starting at position 720 of SEQ ID NO: 1887560
cgucguuaagcgccagaaa

SEQ ID NO: 2480983 - RNA, 19 nt, Artificial Sequence
  Description of Artificial Sequence: Synthetic oligonucleotide
  Antisense strand to SEQ ID NO: 2480982
uuucuggcgcuuaacgacg

SEQ ID NO: 2480984 - RNA, 19 nt, Artificial Sequence
  Description of Artificial Sequence: Synthetic oligonucleotide
  Sense strand starting at position 812 of SEQ ID NO: 1887560
cggguuccuccauagagga

SEQ ID NO: 2480985 - RNA, 19 nt, Artificial Sequence
  Description of Artificial Sequence: Synthetic oligonucleotide
  Antisense strand to SEQ ID NO: 2480984
uccucuauggaggaacccg

SEQ ID NO: 2480986 - RNA, 19 nt, Artificial Sequence
  Description of Artificial Sequence: Synthetic oligonucleotide
  Sense strand starting at position 920 of SEQ ID NO: 1887560
gggucauagauugguucga

SEQ ID NO: 2480987 - RNA, 19 nt, Artificial Sequence
  Description of Artificial Sequence: Synthetic oligonucleotide
  Antisense strand to SEQ ID NO: 2480986
ucgaaccaaucuaugaccc

SEQ ID NO: 2480988 - RNA, 19 nt, Artificial Sequence
  Description of Artificial Sequence: Synthetic oligonucleotide
  Sense strand starting at position 921 of SEQ ID NO: 1887560
ggucauagauugguucgau

SEQ ID NO: 2480989 - RNA, 19 nt, Artificial Sequence
  Description of Artificial Sequence: Synthetic oligonucleotide
  Antisense strand to SEQ ID NO: 2480988
aucgaaccaaucuaugacc

SEQ ID NO: 2480990 - RNA, 19 nt, Artificial Sequence
  Description of Artificial Sequence: Synthetic oligonucleotide
  Sense strand starting at position 922 of SEQ ID NO: 1887560
gucauagauugguucgauc

SEQ ID NO: 2480991 - RNA, 19 nt, Artificial Sequence
  Description of Artificial Sequence: Synthetic oligonucleotide
  Antisense strand to SEQ ID NO: 2480990
gaucgaaccaaucuaugac

SEQ ID NO: 2480992 - RNA, 19 nt, Artificial Sequence
  Description of Artificial Sequence: Synthetic oligonucleotide
  Sense strand starting at position 924 of SEQ ID NO: 1887560
cauagauugguucgaucag

SEQ ID NO: 2480993 - RNA, 19 nt, Artificial Sequence
  Description of Artificial Sequence: Synthetic oligonucleotide
  Antisense strand to SEQ ID NO: 2480992
cugaucgaaccaaucuaug

SEQ ID NO: 2480994 - RNA, 19 nt, Artificial Sequence
  Description of Artificial Sequence: Synthetic oligonucleotide
  Sense strand starting at position 930 of SEQ ID NO: 1887560
uugguucgaucaguuauga

SEQ ID NO: 2480995 - RNA, 19 nt, Artificial Sequence
  Description of Artificial Sequence: Synthetic oligonucleotide
  Antisense strand to SEQ ID NO: 2480994
ucauaacugaucgaaccaa

SEQ ID NO: 2480996 - RNA, 19 nt, Artificial Sequence
  Description of Artificial Sequence: Synthetic oligonucleotide
  Sense strand starting at position 941 of SEQ ID NO: 1887560
aguuaugacguuuacauag

SEQ ID NO: 2480997 - RNA, 19 nt, Artificial Sequence
  Description of Artificial Sequence: Synthetic oligonucleotide
  Antisense strand to SEQ ID NO: 2480996
cuauguaaacgucauaacu

SEQ ID NO: 2480998 - RNA, 19 nt, Artificial Sequence
  Description of Artificial Sequence: Synthetic oligonucleotide
  Sense strand starting at position 1237 of SEQ ID NO: 1887560
agugauggcuucuuaacuc

SEQ ID NO: 2480999 - RNA, 19 nt, Artificial Sequence
  Description of Artificial Sequence: Synthetic oligonucleotide
  Antisense strand to SEQ ID NO: 2480998
gaguuaagaagccaucacu

SEQ ID NO: 2481000 - RNA, 19 nt, Artificial Sequence
  Description of Artificial Sequence: Synthetic oligonucleotide
  Sense strand starting at position 1282 of SEQ ID NO: 1887560
acuagaugccauugccauu

SEQ ID NO: 2481001 - RNA, 19 nt, Artificial Sequence
  Description of Artificial Sequence: Synthetic oligonucleotide
  Antisense strand to SEQ ID NO: 2481000
aauggcaauggcaucuagu

SEQ ID NO: 2481002 - RNA, 19 nt, Artificial Sequence
  Description of Artificial Sequence: Synthetic oligonucleotide
  Sense strand starting at position 1298 of SEQ ID NO: 1887560
auugaauuaugugccuuaa

SEQ ID NO: 2481003 - RNA, 19 nt, Artificial Sequence
  Description of Artificial Sequence: Synthetic oligonucleotide
  Antisense strand to SEQ ID NO: 2481002
uuaaggcacauaauucaau

SEQ ID NO: 2481004 - RNA, 19 nt, Artificial Sequence
  Description of Artificial Sequence: Synthetic oligonucleotide
  Sense strand starting at position 1430 of SEQ ID NO: 1887560
ugagcaauauuugauacaa

SEQ ID NO: 2481005 - RNA, 19 nt, Artificial Sequence
  Description of Artificial Sequence: Synthetic oligonucleotide
  Antisense strand to SEQ ID NO: 2481004
uuguaucaaauauugcuca

SEQ ID NO: 2481006 - RNA, 19 nt, Artificial Sequence
  Description of Artificial Sequence: Synthetic oligonucleotide
  Sense strand starting at position 1432 of SEQ ID NO: 1887560
agcaauauuugauacaaug

SEQ ID NO: 2481007 - RNA, 19 nt, Artificial Sequence
  Description of Artificial Sequence: Synthetic oligonucleotide
  Antisense strand to SEQ ID NO: 2481006
cauuguaucaaauauugcu

SEQ ID NO: 2481008 - RNA, 19 nt, Artificial Sequence
  Description of Artificial Sequence: Synthetic oligonucleotide
  Sense strand starting at position 1504 of SEQ ID NO: 1887560
auagaaaugugggcaaacu

SEQ ID NO: 2481009 - RNA, 19 nt, Artificial Sequence
  Description of Artificial Sequence: Synthetic oligonucleotide
  Antisense strand to SEQ ID NO: 2481008
aguuugcccacauuucuau

SEQ ID NO: 2481010 - RNA, 19 nt, Artificial Sequence
  Description of Artificial Sequence: Synthetic oligonucleotide
  Sense strand starting at position 1515 of SEQ ID NO: 1887560
ggcaaacuauuugaccaau

SEQ ID NO: 2481011 - RNA, 19 nt, Artificial Sequence
  Description of Artificial Sequence: Synthetic oligonucleotide
  Antisense strand to SEQ ID NO: 2481010
auuggucaaauaguuugcc

SEQ ID NO: 2481012 - RNA, 19 nt, Artificial Sequence
  Description of Artificial Sequence: Synthetic oligonucleotide
  Sense strand starting at position 1716 of SEQ ID NO: 1887560
auuggaggcguuuagacuu

SEQ ID NO: 2481013 - RNA, 19 nt, Artificial Sequence
  Description of Artificial Sequence: Synthetic oligonucleotide
  Antisense strand to SEQ ID NO: 2481012
aagucuaaacgccuccaau

SEQ ID NO: 2481014 - RNA, 19 nt, Artificial Sequence
  Description of Artificial Sequence: Synthetic oligonucleotide
  Sense strand starting at position 1789 of SEQ ID NO: 1887560
cgacucucaggauaacagu

SEQ ID NO: 2481015 - RNA, 19 nt, Artificial Sequence
  Description of Artificial Sequence: Synthetic oligonucleotide
  Antisense strand to SEQ ID NO: 2481014
acuguuauccugagagucg

SEQ ID NO: 2481016 - RNA, 19 nt, Artificial Sequence
  Description of Artificial Sequence: Synthetic oligonucleotide
  Sense strand starting at position 1917 of SEQ ID NO: 1887560
cagcauucggaggagugua

SEQ ID NO: 2481017 - RNA, 19 nt, Artificial Sequence
  Description of Artificial Sequence: Synthetic oligonucleotide
  Antisense strand to SEQ ID NO: 2481016
uacacuccuccgaaugcug

SEQ ID NO: 2481018 - RNA, 19 nt, Artificial Sequence
  Description of Artificial Sequence: Synthetic oligonucleotide
  Sense strand starting at position 1925 of SEQ ID NO: 1887560
ggaggaguguaauccaaau

SEQ ID NO: 2481019 - RNA, 19 nt, Artificial Sequence
  Description of Artificial Sequence: Synthetic oligonucleotide
  Antisense strand to SEQ ID NO: 2481018
auuuggauuacacuccucc

SEQ ID NO: 2481020 - RNA, 19 nt, Artificial Sequence
  Description of Artificial Sequence: Synthetic oligonucleotide
  Sense strand starting at position 1988 of SEQ ID NO: 1887560
caauucugggaaugguagu

SEQ ID NO: 2481021 - RNA, 19 nt, Artificial Sequence
  Description of Artificial Sequence: Synthetic oligonucleotide
  Antisense strand to SEQ ID NO: 2481020
acuaccauucccagaauug

SEQ ID NO: 2481022 - RNA, 19 nt, Artificial Sequence
  Description of Artificial Sequence: Synthetic oligonucleotide
  Sense strand starting at position 2118 of SEQ ID NO: 1887560
gguggaucccagggaauuc

SEQ ID NO: 2481023 - RNA, 19 nt, Artificial Sequence
  Description of Artificial Sequence: Synthetic oligonucleotide
  Antisense strand to SEQ ID NO: 2481022
gaauucccugggauccacc

SEQ ID NO: 2481024 - RNA, 19 nt, Artificial Sequence
  Description of Artificial Sequence: Synthetic oligonucleotide
  Sense strand starting at position 2161 of SEQ ID NO: 1887560
gggucgucgcggucaguuu

SEQ ID NO: 2481025 - RNA, 19 nt, Artificial Sequence
  Description of Artificial Sequence: Synthetic oligonucleotide
  Antisense strand to SEQ ID NO: 2481024
aaacugaccgcgacgaccc

SEQ ID NO: 2481026 - RNA, 19 nt, Artificial Sequence
  Description of Artificial Sequence: Synthetic oligonucleotide
  Sense strand starting at position 2183 of SEQ ID NO: 1887560
ucaggaauucugggaagug

SEQ ID NO: 2481027 - RNA, 19 nt, Artificial Sequence
  Description of Artificial Sequence: Synthetic oligonucleotide
  Antisense strand to SEQ ID NO: 2481026
cacuucccagaauuccuga

SEQ ID NO: 2481028 - RNA, 19 nt, Artificial Sequence
  Description of Artificial Sequence: Synthetic oligonucleotide
  Sense strand starting at position 2206 of SEQ ID NO: 1887560
ccagacacucaguggagua

SEQ ID NO: 2481029 - RNA, 19 nt, Artificial Sequence
  Description of Artificial Sequence: Synthetic oligonucleotide
  Antisense strand to SEQ ID NO: 2481028
uacuccacugagugucugg

SEQ ID NO: 2481030 - RNA, 19 nt, Artificial Sequence
  Description of Artificial Sequence: Synthetic oligonucleotide
  Sense strand starting at position 2583 of SEQ ID NO: 1887560
cugggauguuacuuaaucu

SEQ ID NO: 2481031 - RNA, 19 nt, Artificial Sequence
  Description of Artificial Sequence: Synthetic oligonucleotide
  Antisense strand to SEQ ID NO: 2481030
agauuaaguaacaucccag

SEQ ID NO: 2481032 - RNA, 19 nt, Artificial Sequence
  Description of Artificial Sequence: Synthetic oligonucleotide
  Sense strand starting at position 2615 of SEQ ID NO: 1887560
guuacaguucuuuaagaug

SEQ ID NO: 2481033 - RNA, 19 nt, Artificial Sequence
  Description of Artificial Sequence: Synthetic oligonucleotide
  Antisense strand to SEQ ID NO: 2481032
caucuuaaagaacuguaac

SEQ ID NO: 2481034 - RNA, 19 nt, Artificial Sequence
  Description of Artificial Sequence: Synthetic oligonucleotide
  Sense strand starting at position 2670 of SEQ ID NO: 1887560
aacugaaagcgguaacaca

SEQ ID NO: 2481035 - RNA, 19 nt, Artificial Sequence
  Description of Artificial Sequence: Synthetic oligonucleotide
  Antisense strand to SEQ ID NO: 2481034
uguguuaccgcuuucaguu

SEQ ID NO: 2481036 - RNA, 19 nt, Artificial Sequence
  Description of Artificial Sequence: Synthetic oligonucleotide
  Sense strand starting at position 2810 of SEQ ID NO: 1887560
cccugauuccugcaagacg

SEQ ID NO: 2481037 - RNA, 19 nt, Artificial Sequence
  Description of Artificial Sequence: Synthetic oligonucleotide
  Antisense strand to SEQ ID NO: 2481036
cgucuugcaggaaucaggg

SEQ ID NO: 2481038 - RNA, 19 nt, Artificial Sequence
  Description of Artificial Sequence: Synthetic oligonucleotide
  Sense strand starting at position 3621 of SEQ ID NO: 1887560
ccagccugaagugguaaau

SEQ ID NO: 2481039 - RNA, 19 nt, Artificial Sequence
  Description of Artificial Sequence: Synthetic oligonucleotide
  Antisense strand to SEQ ID NO: 2481038
auuuaccacuucaggcugg

SEQ ID NO: 2481040 - RNA, 19 nt, Artificial Sequence
  Description of Artificial Sequence: Synthetic oligonucleotide
  Sense strand starting at position 3714 of SEQ ID NO: 1887560
uaaagucauguuugucaga

SEQ ID NO: 2481041 - RNA, 19 nt, Artificial Sequence
  Description of Artificial Sequence: Synthetic oligonucleotide
  Antisense strand to SEQ ID NO: 2481040
ucugacaaacaugacuuua

SEQ ID NO: 2481042 - RNA, 19 nt, Artificial Sequence
  Description of Artificial Sequence: Synthetic oligonucleotide
  Sense strand starting at position 3715 of SEQ ID NO: 1887560
aaagucauguuugucagau

SEQ ID NO: 2481043 - RNA, 19 nt, Artificial Sequence
  Description of Artificial Sequence: Synthetic oligonucleotide
  Antisense strand to SEQ ID NO: 2481042
aucugacaaacaugacuuu

SEQ ID NO: 2481044 - RNA, 19 nt, Artificial Sequence
  Description of Artificial Sequence: Synthetic oligonucleotide
  Sense strand starting at position 3716 of SEQ ID NO: 1887560
aagucauguuugucagauu

SEQ ID NO: 2481045 - RNA, 19 nt, Artificial Sequence
  Description of Artificial Sequence: Synthetic oligonucleotide
  Antisense strand to SEQ ID NO: 2481044
aaucugacaaacaugacuu

SEQ ID NO: 2481046 - RNA, 19 nt, Artificial Sequence
  Description of Artificial Sequence: Synthetic oligonucleotide
  Sense strand starting at position 3724 of SEQ ID NO: 1887560
uuugucagauuuccgcauu

SEQ ID NO: 2481047 - RNA, 19 nt, Artificial Sequence
  Description of Artificial Sequence: Synthetic oligonucleotide
  Antisense strand to SEQ ID NO: 2481046
aaugcggaaaucugacaaa

SEQ ID NO: 2481048 - RNA, 19 nt, Artificial Sequence
  Description of Artificial Sequence: Synthetic oligonucleotide
  Sense strand starting at position 3727 of SEQ ID NO: 1887560
gucagauuuccgcauugua

SEQ ID NO: 2481049 - RNA, 19 nt, Artificial Sequence
  Description of Artificial Sequence: Synthetic oligonucleotide
  Antisense strand to SEQ ID NO: 2481048
uacaaugcggaaaucugac

SEQ ID NO: 2481050 - RNA, 19 nt, Artificial Sequence
  Description of Artificial Sequence: Synthetic oligonucleotide
  Sense strand starting at position 3853 of SEQ ID NO: 1887560
uuuauuagugcacauucua

SEQ ID NO: 2481051 - RNA, 19 nt, Artificial Sequence
  Description of Artificial Sequence: Synthetic oligonucleotide
  Antisense strand to SEQ ID NO: 2481050
uagaaugugcacuaauaaa

SEQ ID NO: 2481052 - RNA, 19 nt, Artificial Sequence
  Description of Artificial Sequence: Synthetic oligonucleotide
  Sense strand starting at position 3929 of SEQ ID NO: 1887560
auauucuaucaguguagau

SEQ ID NO: 2481053 - RNA, 19 nt, Artificial Sequence
  Description of Artificial Sequence: Synthetic oligonucleotide
  Antisense strand to SEQ ID NO: 2481052
aucuacacugauagaauau

SEQ ID NO: 2481054 - RNA, 19 nt, Artificial Sequence
  Description of Artificial Sequence: Synthetic oligonucleotide
  Sense strand starting at position 368 of SEQ ID NO: 1887561
aguaguuuccgaagguggu

SEQ ID NO: 2481055 - RNA, 19 nt, Artificial Sequence
  Description of Artificial Sequence: Synthetic oligonucleotide
  Antisense strand to SEQ ID NO: 2481054
accaccuucggaaacuacu

SEQ ID NO: 2481056 - RNA, 19 nt, Artificial Sequence
  Description of Artificial Sequence: Synthetic oligonucleotide
  Sense strand starting at position 395 of SEQ ID NO: 1887561
aggugucugagacgguaau

SEQ ID NO: 2481057 - RNA, 19 nt, Artificial Sequence
  Description of Artificial Sequence: Synthetic oligonucleotide
  Antisense strand to SEQ ID NO: 2481056
auuaccgucucagacaccu

SEQ ID NO: 2481058 - RNA, 19 nt, Artificial Sequence
  Description of Artificial Sequence: Synthetic oligonucleotide
  Sense strand starting at position 408 of SEQ ID NO: 1887561
gguaauuagcagcagucuu

SEQ ID NO: 2481059 - RNA, 19 nt, Artificial Sequence
  Description of Artificial Sequence: Synthetic oligonucleotide
  Antisense strand to SEQ ID NO: 2481058
aagacugcugcuaauuacc

SEQ ID NO: 2481060 - RNA, 19 nt, Artificial Sequence
  Description of Artificial Sequence: Synthetic oligonucleotide
  Sense strand starting at position 922 of SEQ ID NO: 1887561
gcauuugugcgcugagaac

SEQ ID NO: 2481061 - RNA, 19 nt, Artificial Sequence
  Description of Artificial Sequence: Synthetic oligonucleotide
  Antisense strand to SEQ ID NO: 2481060
guucucagcgcacaaaugc

SEQ ID NO: 2481062 - RNA, 19 nt, Artificial Sequence
  Description of Artificial Sequence: Synthetic oligonucleotide
  Sense strand starting at position 970 of SEQ ID NO: 1887561
acaguagugucauuaacua

SEQ ID NO: 2481063 - RNA, 19 nt, Artificial Sequence
  Description of Artificial Sequence: Synthetic oligonucleotide
  Antisense strand to SEQ ID NO: 2481062
uaguuaaugacacuacugu

SEQ ID NO: 2481064 - RNA, 19 nt, Artificial Sequence
  Description of Artificial Sequence: Synthetic oligonucleotide
  Sense strand starting at position 1234 of SEQ ID NO: 1887561
uccgucuuuagaugggaaa

SEQ ID NO: 2481065 - RNA, 19 nt, Artificial Sequence
  Description of Artificial Sequence: Synthetic oligonucleotide
  Antisense strand to SEQ ID NO: 2481064
uuucccaucuaaagacgga

SEQ ID NO: 2481066 - RNA, 19 nt, Artificial Sequence
  Description of Artificial Sequence: Synthetic oligonucleotide
  Sense strand starting at position 1287 of SEQ ID NO: 1887561
ugggucagugguggaauua

SEQ ID NO: 2481067 - RNA, 19 nt, Artificial Sequence
  Description of Artificial Sequence: Synthetic oligonucleotide
  Antisense strand to SEQ ID NO: 2481066
uaauuccaccacugaccca

SEQ ID NO: 2481068 - RNA, 19 nt, Artificial Sequence
  Description of Artificial Sequence: Synthetic oligonucleotide
  Sense strand starting at position 1288 of SEQ ID NO: 1887561
gggucagugguggaauuaa

SEQ ID NO: 2481069 - RNA, 19 nt, Artificial Sequence
  Description of Artificial Sequence: Synthetic oligonucleotide
  Antisense strand to SEQ ID NO: 2481068
uuaauuccaccacugaccc

SEQ ID NO: 2481070 - RNA, 19 nt, Artificial Sequence
  Description of Artificial Sequence: Synthetic oligonucleotide
  Sense strand starting at position 1336 of SEQ ID NO: 1887561
ggcucuuuccacuacacga

SEQ ID NO: 2481071 - RNA, 19 nt, Artificial Sequence
  Description of Artificial Sequence: Synthetic oligonucleotide
  Antisense strand to SEQ ID NO: 2481070
ucguguaguggaaagagcc

SEQ ID NO: 2481072 - RNA, 19 nt, Artificial Sequence
  Description of Artificial Sequence: Synthetic oligonucleotide
  Sense strand starting at position 1353 of SEQ ID NO: 1887561
gauacaacugaacguguua

SEQ ID NO: 2481073 - RNA, 19 nt, Artificial Sequence
  Description of Artificial Sequence: Synthetic oligonucleotide
  Antisense strand to SEQ ID NO: 2481072
uaacacguucaguuguauc

SEQ ID NO: 2481074 - RNA, 19 nt, Artificial Sequence
  Description of Artificial Sequence: Synthetic oligonucleotide
  Sense strand starting at position 1579 of SEQ ID NO: 1887561
ugccuuuaucuucgggaga

SEQ ID NO: 2481075 - RNA, 19 nt, Artificial Sequence
  Description of Artificial Sequence: Synthetic oligonucleotide
  Antisense strand to SEQ ID NO: 2481074
ucucccgaagauaaaggca

SEQ ID NO: 2481076 - RNA, 19 nt, Artificial Sequence
  Description of Artificial Sequence: Synthetic oligonucleotide
  Sense strand starting at position 1596 of SEQ ID NO: 1887561
gagcgaauggcucagaucu

SEQ ID NO: 2481077 - RNA, 19 nt, Artificial Sequence
  Description of Artificial Sequence: Synthetic oligonucleotide
  Antisense strand to SEQ ID NO: 2481076
agaucugagccauucgcuc

SEQ ID NO: 2481078 - RNA, 19 nt, Artificial Sequence
  Description of Artificial Sequence: Synthetic oligonucleotide
  Sense strand starting at position 1607 of SEQ ID NO: 1887561
ucagaucuccgcggagaug

SEQ ID NO: 2481079 - RNA, 19 nt, Artificial Sequence
  Description of Artificial Sequence: Synthetic oligonucleotide
  Antisense strand to SEQ ID NO: 2481078
caucuccgcggagaucuga

SEQ ID NO: 2481080 - RNA, 19 nt, Artificial Sequence
  Description of Artificial Sequence: Synthetic oligonucleotide
  Sense strand starting at position 2131 of SEQ ID NO: 1887561
cgaaguugaacugggacau

SEQ ID NO: 2481081 - RNA, 19 nt, Artificial Sequence
  Description of Artificial Sequence: Synthetic oligonucleotide
  Antisense strand to SEQ ID NO: 2481080
augucccaguucaacuucg

SEQ ID NO: 2481082 - RNA, 19 nt, Artificial Sequence
  Description of Artificial Sequence: Synthetic oligonucleotide
  Sense strand starting at position 2178 of SEQ ID NO: 1887561
aagccaugccuggaaauga

SEQ ID NO: 2481083 - RNA, 19 nt, Artificial Sequence
  Description of Artificial Sequence: Synthetic oligonucleotide
  Antisense strand to SEQ ID NO: 2481082
ucauuuccaggcauggcuu

SEQ ID NO: 2481084 - RNA, 19 nt, Artificial Sequence
  Description of Artificial Sequence: Synthetic oligonucleotide
  Sense strand starting at position 2218 of SEQ ID NO: 1887561
gauugagagucagaagaca

SEQ ID NO: 2481085 - RNA, 19 nt, Artificial Sequence
  Description of Artificial Sequence: Synthetic oligonucleotide
  Antisense strand to SEQ ID NO: 2481084
ugucuucugacucucaauc

SEQ ID NO: 2481086 - RNA, 19 nt, Artificial Sequence
  Description of Artificial Sequence: Synthetic oligonucleotide
  Sense strand starting at position 2226 of SEQ ID NO: 1887561
gucagaagacaugguguuu

SEQ ID NO: 2481087 - RNA, 19 nt, Artificial Sequence
  Description of Artificial Sequence: Synthetic oligonucleotide
  Antisense strand to SEQ ID NO: 2481086
aaacaccaugucuucugac

SEQ ID NO: 2481088 - RNA, 19 nt, Artificial Sequence
  Description of Artificial Sequence: Synthetic oligonucleotide
  Sense strand starting at position 2563 of SEQ ID NO: 1887561
ugaagugacuucuccgauc

SEQ ID NO: 2481089 - RNA, 19 nt, Artificial Sequence
  Description of Artificial Sequence: Synthetic oligonucleotide
  Antisense strand to SEQ ID NO: 2481088
gaucggagaagucacuuca

SEQ ID NO: 2481090 - RNA, 19 nt, Artificial Sequence
  Description of Artificial Sequence: Synthetic oligonucleotide
  Sense strand starting at position 2565 of SEQ ID NO: 1887561
aagugacuucuccgaucua

SEQ ID NO: 2481091 - RNA, 19 nt, Artificial Sequence
  Description of Artificial Sequence: Synthetic oligonucleotide
  Antisense strand to SEQ ID NO: 2481090
uagaucggagaagucacuu

SEQ ID NO: 2481092 - RNA, 19 nt, Artificial Sequence
  Description of Artificial Sequence: Synthetic oligonucleotide
  Sense strand starting at position 2758 of SEQ ID NO: 1887561
agccuucucguagggaaau

SEQ ID NO: 2481093 - RNA, 19 nt, Artificial Sequence
  Description of Artificial Sequence: Synthetic oligonucleotide
  Antisense strand to SEQ ID NO: 2481092
auuucccuacgagaaggcu

SEQ ID NO: 2481094 - RNA, 19 nt, Artificial Sequence
  Description of Artificial Sequence: Synthetic oligonucleotide
  Sense strand starting at position 2760 of SEQ ID NO: 1887561
ccuucucguagggaaauau

SEQ ID NO: 2481095 - RNA, 19 nt, Artificial Sequence
  Description of Artificial Sequence: Synthetic oligonucleotide
  Antisense strand to SEQ ID NO: 2481094
auauuucccuacgagaagg

SEQ ID NO: 2481096 - RNA, 19 nt, Artificial Sequence
  Description of Artificial Sequence: Synthetic oligonucleotide
  Sense strand starting at position 2770 of SEQ ID NO: 1887561
gggaaauauuuccacuuaa

SEQ ID NO: 2481097 - RNA, 19 nt, Artificial Sequence
  Description of Artificial Sequence: Synthetic oligonucleotide
  Antisense strand to SEQ ID NO: 2481096
uuaaguggaaauauuuccc

SEQ ID NO: 2481098 - RNA, 19 nt, Artificial Sequence
  Description of Artificial Sequence: Synthetic oligonucleotide
  Sense strand starting at position 2782 of SEQ ID NO: 1887561
cacuuaaugcuuugacgga

SEQ ID NO: 2481099 - RNA, 19 nt, Artificial Sequence
  Description of Artificial Sequence: Synthetic oligonucleotide
  Antisense strand to SEQ ID NO: 2481098
uccgucaaagcauuaagug

SEQ ID NO: 2481100 - RNA, 19 nt, Artificial Sequence
  Description of Artificial Sequence: Synthetic oligonucleotide
  Sense strand starting at position 2807 of SEQ ID NO: 1887561
gggcuacagucucucagau

SEQ ID NO: 2481101 - RNA, 19 nt, Artificial Sequence
  Description of Artificial Sequence: Synthetic oligonucleotide
  Antisense strand to SEQ ID NO: 2481100
aucugagagacuguagccc

SEQ ID NO: 2481102 - RNA, 19 nt, Artificial Sequence
  Description of Artificial Sequence: Synthetic oligonucleotide
  Sense strand starting at position 2865 of SEQ ID NO: 1887561
uguggaaaccugcacuuaa

SEQ ID NO: 2481103 - RNA, 19 nt, Artificial Sequence
  Description of Artificial Sequence: Synthetic oligonucleotide
  Antisense strand to SEQ ID NO: 2481102
uuaagugcagguuuccaca

SEQ ID NO: 2481104 - RNA, 19 nt, Artificial Sequence
  Description of Artificial Sequence: Synthetic oligonucleotide
  Sense strand starting at position 2889 of SEQ ID NO: 1887561
cuagcuuugccaggaaaca

SEQ ID NO: 2481105 - RNA, 19 nt, Artificial Sequence
  Description of Artificial Sequence: Synthetic oligonucleotide
  Antisense strand to SEQ ID NO: 2481104
uguuuccuggcaaagcuag

SEQ ID NO: 2481106 - RNA, 19 nt, Artificial Sequence
  Description of Artificial Sequence: Synthetic oligonucleotide
  Sense strand starting at position 2926 of SEQ ID NO: 1887561
ugcagagucugaccuuaca

SEQ ID NO: 2481107 - RNA, 19 nt, Artificial Sequence
  Description of Artificial Sequence: Synthetic oligonucleotide
  Antisense strand to SEQ ID NO: 2481106
uguaaggucagacucugca

SEQ ID NO: 2481108 - RNA, 19 nt, Artificial Sequence
  Description of Artificial Sequence: Synthetic oligonucleotide
  Sense strand starting at position 3023 of SEQ ID NO: 1887561
ggccuugaggacuaaggua

SEQ ID NO: 2481109 - RNA, 19 nt, Artificial Sequence
  Description of Artificial Sequence: Synthetic oligonucleotide
  Antisense strand to SEQ ID NO: 2481108
uaccuuaguccucaaggcc

SEQ ID NO: 2481110 - RNA, 19 nt, Artificial Sequence
  Description of Artificial Sequence: Synthetic oligonucleotide
  Sense strand starting at position 3300 of SEQ ID NO: 1887561
ggauacauuugcuagacac

SEQ ID NO: 2481111 - RNA, 19 nt, Artificial Sequence
  Description of Artificial Sequence: Synthetic oligonucleotide
  Antisense strand to SEQ ID NO: 2481110
gugucuagcaaauguaucc

SEQ ID NO: 2481112 - RNA, 19 nt, Artificial Sequence
  Description of Artificial Sequence: Synthetic oligonucleotide
  Sense strand starting at position 3385 of SEQ ID NO: 1887561
uuuagagucucucccuaag

SEQ ID NO: 2481113 - RNA, 19 nt, Artificial Sequence
  Description of Artificial Sequence: Synthetic oligonucleotide
  Antisense strand to SEQ ID NO: 2481112
cuuagggagagacucuaaa

SEQ ID NO: 2481114 - RNA, 19 nt, Artificial Sequence
  Description of Artificial Sequence: Synthetic oligonucleotide
  Sense strand starting at position 3503 of SEQ ID NO: 1887561
ucccuuguagccuaucaua

SEQ ID NO: 2481115 - RNA, 19 nt, Artificial Sequence
  Description of Artificial Sequence: Synthetic oligonucleotide
  Antisense strand to SEQ ID NO: 2481114
uaugauaggcuacaaggga

SEQ ID NO: 2481116 - RNA, 19 nt, Artificial Sequence
  Description of Artificial Sequence: Synthetic oligonucleotide
  Sense strand starting at position 3603 of SEQ ID NO: 1887561
uccuuacuguguuuaaaca

SEQ ID NO: 2481117 - RNA, 19 nt, Artificial Sequence
  Description of Artificial Sequence: Synthetic oligonucleotide
  Antisense strand to SEQ ID NO: 2481116
uguuuaaacacaguaagga

SEQ ID NO: 2481118 - RNA, 19 nt, Artificial Sequence
  Description of Artificial Sequence: Synthetic oligonucleotide
  Sense strand starting at position 3604 of SEQ ID NO: 1887561
ccuuacuguguuuaaacau

SEQ ID NO: 2481119 - RNA, 19 nt, Artificial Sequence
  Description of Artificial Sequence: Synthetic oligonucleotide
  Antisense strand to SEQ ID NO: 2481118
auguuuaaacacaguaagg

SEQ ID NO: 2481120 - RNA, 19 nt, Artificial Sequence
  Description of Artificial Sequence: Synthetic oligonucleotide
  Sense strand starting at position 3611 of SEQ ID NO: 1887561
guguuuaaacaugggcuca

SEQ ID NO: 2481121 - RNA, 19 nt, Artificial Sequence
  Description of Artificial Sequence: Synthetic oligonucleotide
  Antisense strand to SEQ ID NO: 2481120
ugagcccauguuuaaacac

SEQ ID NO: 2481122 - RNA, 19 nt, Artificial Sequence
  Description of Artificial Sequence: Synthetic oligonucleotide
  Sense strand starting at position 3613 of SEQ ID NO: 1887561
guuuaaacaugggcucaca

SEQ ID NO: 2481123 - RNA, 19 nt, Artificial Sequence
  Description of Artificial Sequence: Synthetic oligonucleotide
  Antisense strand to SEQ ID NO: 2481122
ugugagcccauguuuaaac

SEQ ID NO: 2481124 - RNA, 19 nt, Artificial Sequence
  Description of Artificial Sequence: Synthetic oligonucleotide
  Sense strand starting at position 3857 of SEQ ID NO: 1887561
ucccuugaucuccagucua

SEQ ID NO: 2481125 - RNA, 19 nt, Artificial Sequence
  Description of Artificial Sequence: Synthetic oligonucleotide
  Antisense strand to SEQ ID NO: 2481124
uagacuggagaucaaggga

SEQ ID NO: 2481126 - RNA, 19 nt, Artificial Sequence
  Description of Artificial Sequence: Synthetic oligonucleotide
  Sense strand starting at position 3870 of SEQ ID NO: 1887561
agucuaguucucugacuac

SEQ ID NO: 2481127 - RNA, 19 nt, Artificial Sequence
  Description of Artificial Sequence: Synthetic oligonucleotide
  Antisense strand to SEQ ID NO: 2481126
guagucagagaacuagacu

SEQ ID NO: 2481128 - RNA, 19 nt, Artificial Sequence
  Description of Artificial Sequence: Synthetic oligonucleotide
  Sense strand starting at position 3873 of SEQ ID NO: 1887561
cuaguucucugacuacagu

SEQ ID NO: 2481129 - RNA, 19 nt, Artificial Sequence
  Description of Artificial Sequence: Synthetic oligonucleotide
  Antisense strand to SEQ ID NO: 2481128
acuguagucagagaacuag

SEQ ID NO: 2481130 - RNA, 19 nt, Artificial Sequence
  Description of Artificial Sequence: Synthetic oligonucleotide
  Sense strand starting at position 3904 of SEQ ID NO: 1887561
uguggucugaaaggauuga

SEQ ID NO: 2481131 - RNA, 19 nt, Artificial Sequence
  Description of Artificial Sequence: Synthetic oligonucleotide
  Antisense strand to SEQ ID NO: 2481130
ucaauccuuucagaccaca

SEQ ID NO: 2481132 - RNA, 19 nt, Artificial Sequence
  Description of Artificial Sequence: Synthetic oligonucleotide
  Sense strand starting at position 3963 of SEQ ID NO: 1887561
agcuguucugaguagcaag

SEQ ID NO: 2481133 - RNA, 19 nt, Artificial Sequence
  Description of Artificial Sequence: Synthetic oligonucleotide
  Antisense strand to SEQ ID NO: 2481132
cuugcuacucagaacagcu

SEQ ID NO: 2481134 - RNA, 19 nt, Artificial Sequence
  Description of Artificial Sequence: Synthetic oligonucleotide
  Sense strand starting at position 479 of SEQ ID NO: 1887562
ugcguaaaugucgcuuuga

SEQ ID NO: 2481135 - RNA, 19 nt, Artificial Sequence
  Description of Artificial Sequence: Synthetic oligonucleotide
  Antisense strand to SEQ ID NO: 2481134
ucaaagcgacauuuacgca

SEQ ID NO: 2481136 - RNA, 19 nt, Artificial Sequence
  Description of Artificial Sequence: Synthetic oligonucleotide
  Sense strand starting at position 535 of SEQ ID NO: 1887562
cgggaagacccucauguau

SEQ ID NO: 2481137 - RNA, 19 nt, Artificial Sequence
  Description of Artificial Sequence: Synthetic oligonucleotide
  Antisense strand to SEQ ID NO: 2481136
auacaugagggucuucccg

SEQ ID NO: 2481138 - RNA, 19 nt, Artificial Sequence
  Description of Artificial Sequence: Synthetic oligonucleotide
  Sense strand starting at position 585 of SEQ ID NO: 1887562
guggaucuccucugugaaa

SEQ ID NO: 2481139 - RNA, 19 nt, Artificial Sequence
  Description of Artificial Sequence: Synthetic oligonucleotide
  Antisense strand to SEQ ID NO: 2481138
uuucacagaggagauccac

SEQ ID NO: 2481140 - RNA, 19 nt, Artificial Sequence
  Description of Artificial Sequence: Synthetic oligonucleotide
  Sense strand starting at position 586 of SEQ ID NO: 1887562
uggaucuccucugugaaau

SEQ ID NO: 2481141 - RNA, 19 nt, Artificial Sequence
  Description of Artificial Sequence: Synthetic oligonucleotide
  Antisense strand to SEQ ID NO: 2481140
auuucacagaggagaucca

SEQ ID NO: 2481142 - RNA, 19 nt, Artificial Sequence
  Description of Artificial Sequence: Synthetic oligonucleotide
  Sense strand starting at position 587 of SEQ ID NO: 1887562
ggaucuccucugugaaaug

SEQ ID NO: 2481143 - RNA, 19 nt, Artificial Sequence
  Description of Artificial Sequence: Synthetic oligonucleotide
  Antisense strand to SEQ ID NO: 2481142
cauuucacagaggagaucc

SEQ ID NO: 2481144 - RNA, 19 nt, Artificial Sequence
  Description of Artificial Sequence: Synthetic oligonucleotide
  Sense strand starting at position 599 of SEQ ID NO: 1887562
ugaaauggccuuuacgaua

SEQ ID NO: 2481145 - RNA, 19 nt, Artificial Sequence
  Description of Artificial Sequence: Synthetic oligonucleotide
  Antisense strand to SEQ ID NO: 2481144
uaucguaaaggccauuuca

SEQ ID NO: 2481146 - RNA, 19 nt, Artificial Sequence
  Description of Artificial Sequence: Synthetic oligonucleotide
  Sense strand starting at position 618 of SEQ ID NO: 1887562
cgggauguuguggagugua

SEQ ID NO: 2481147 - RNA, 19 nt, Artificial Sequence
  Description of Artificial Sequence: Synthetic oligonucleotide
  Antisense strand to SEQ ID NO: 2481146
uacacuccacaacaucccg

SEQ ID NO: 2481148 - RNA, 19 nt, Artificial Sequence
  Description of Artificial Sequence: Synthetic oligonucleotide
  Sense strand starting at position 621 of SEQ ID NO: 1887562
gauguuguggaguguagau

SEQ ID NO: 2481149 - RNA, 19 nt, Artificial Sequence
  Description of Artificial Sequence: Synthetic oligonucleotide
  Antisense strand to SEQ ID NO: 2481148
aucuacacuccacaacauc

SEQ ID NO: 2481150 - RNA, 19 nt, Artificial Sequence
  Description of Artificial Sequence: Synthetic oligonucleotide
  Sense strand starting at position 651 of SEQ ID NO: 1887562
gucaccucucgugugcaua

SEQ ID NO: 2481151 - RNA, 19 nt, Artificial Sequence
  Description of Artificial Sequence: Synthetic oligonucleotide
  Antisense strand to SEQ ID NO: 2481150
uaugcacacgagaggugac

SEQ ID NO: 2481152 - RNA, 19 nt, Artificial Sequence
  Description of Artificial Sequence: Synthetic oligonucleotide
  Sense strand starting at position 765 of SEQ ID NO: 1887562
guaguugugccuguaguau

SEQ ID NO: 2481153 - RNA, 19 nt, Artificial Sequence
  Description of Artificial Sequence: Synthetic oligonucleotide
  Antisense strand to SEQ ID NO: 2481152
auacuacaggcacaacuac

SEQ ID NO: 2481154 - RNA, 19 nt, Artificial Sequence
  Description of Artificial Sequence: Synthetic oligonucleotide
  Sense strand starting at position 817 of SEQ ID NO: 1887562
gcgaguggccaggaaguau

SEQ ID NO: 2481155 - RNA, 19 nt, Artificial Sequence
  Description of Artificial Sequence: Synthetic oligonucleotide
  Antisense strand to SEQ ID NO: 2481154
auacuuccuggccacucgc

SEQ ID NO: 2481156 - RNA, 19 nt, Artificial Sequence
  Description of Artificial Sequence: Synthetic oligonucleotide
  Sense strand starting at position 828 of SEQ ID NO: 1887562
ggaaguaugcuugggcaca

SEQ ID NO: 2481157 - RNA, 19 nt, Artificial Sequence
  Description of Artificial Sequence: Synthetic oligonucleotide
  Antisense strand to SEQ ID NO: 2481156
ugugcccaagcauacuucc

SEQ ID NO: 2481158 - RNA, 19 nt, Artificial Sequence
  Description of Artificial Sequence: Synthetic oligonucleotide
  Sense strand starting at position 830 of SEQ ID NO: 1887562
aaguaugcuugggcacaua

SEQ ID NO: 2481159 - RNA, 19 nt, Artificial Sequence
  Description of Artificial Sequence: Synthetic oligonucleotide
  Antisense strand to SEQ ID NO: 2481158
uaugugcccaagcauacuu

SEQ ID NO: 2481160 - RNA, 19 nt, Artificial Sequence
  Description of Artificial Sequence: Synthetic oligonucleotide
  Sense strand starting at position 839 of SEQ ID NO: 1887562
ugggcacauauguguagaa

SEQ ID NO: 2481161 - RNA, 19 nt, Artificial Sequence
  Description of Artificial Sequence: Synthetic oligonucleotide
  Antisense strand to SEQ ID NO: 2481160
uucuacacauaugugccca

SEQ ID NO: 2481162 - RNA, 19 nt, Artificial Sequence
  Description of Artificial Sequence: Synthetic oligonucleotide
  Sense strand starting at position 841 of SEQ ID NO: 1887562
ggcacauauguguagaagu

SEQ ID NO: 2481163 - RNA, 19 nt, Artificial Sequence
  Description of Artificial Sequence: Synthetic oligonucleotide
  Antisense strand to SEQ ID NO: 2481162
acuucuacacauaugugcc

SEQ ID NO: 2481164 - RNA, 19 nt, Artificial Sequence
  Description of Artificial Sequence: Synthetic oligonucleotide
  Sense strand starting at position 898 of SEQ ID NO: 1887562
gguaucaguauaugggagu

SEQ ID NO: 2481165 - RNA, 19 nt, Artificial Sequence
  Description of Artificial Sequence: Synthetic oligonucleotide
  Antisense strand to SEQ ID NO: 2481164
acucccauauacugauacc

SEQ ID NO: 2481166 - RNA, 19 nt, Artificial Sequence
  Description of Artificial Sequence: Synthetic oligonucleotide
  Sense strand starting at position 904 of SEQ ID NO: 1887562
aguauaugggagugaccau

SEQ ID NO: 2481167 - RNA, 19 nt, Artificial Sequence
  Description of Artificial Sequence: Synthetic oligonucleotide
  Antisense strand to SEQ ID NO: 2481166
auggucacucccauauacu

SEQ ID NO: 2481168 - RNA, 19 nt, Artificial Sequence
  Description of Artificial Sequence: Synthetic oligonucleotide
  Sense strand starting at position 1762 of SEQ ID NO: 1887562
ggagauggcaccugucaag

SEQ ID NO: 2481169 - RNA, 19 nt, Artificial Sequence
  Description of Artificial Sequence: Synthetic oligonucleotide
  Antisense strand to SEQ ID NO: 2481168
cuugacaggugccaucucc

SEQ ID NO: 2481170 - RNA, 19 nt, Artificial Sequence
  Description of Artificial Sequence: Synthetic oligonucleotide
  Sense strand starting at position 2563 of SEQ ID NO: 1887562
augggcaauccuuggauaa

SEQ ID NO: 2481171 - RNA, 19 nt, Artificial Sequence
  Description of Artificial Sequence: Synthetic oligonucleotide
  Antisense strand to SEQ ID NO: 2481170
uuauccaaggauugcccau

SEQ ID NO: 2481172 - RNA, 19 nt, Artificial Sequence
  Description of Artificial Sequence: Synthetic oligonucleotide
  Sense strand starting at position 2564 of SEQ ID NO: 1887562
ugggcaauccuuggauaag

SEQ ID NO: 2481173 - RNA, 19 nt, Artificial Sequence
  Description of Artificial Sequence: Synthetic oligonucleotide
  Antisense strand to SEQ ID NO: 2481172
cuuauccaaggauugccca

SEQ ID NO: 2481174 - RNA, 19 nt, Artificial Sequence
  Description of Artificial Sequence: Synthetic oligonucleotide
  Sense strand starting at position 2685 of SEQ ID NO: 1887562
gugugcaguaguucugagu

SEQ ID NO: 2481175 - RNA, 19 nt, Artificial Sequence
  Description of Artificial Sequence: Synthetic oligonucleotide
  Antisense strand to SEQ ID NO: 2481174
acucagaacuacugcacac

SEQ ID NO: 2481176 - RNA, 19 nt, Artificial Sequence
  Description of Artificial Sequence: Synthetic oligonucleotide
  Sense strand starting at position 2700 of SEQ ID NO: 1887562
gagugcucugagugggacu

SEQ ID NO: 2481177 - RNA, 19 nt, Artificial Sequence
  Description of Artificial Sequence: Synthetic oligonucleotide
  Antisense strand to SEQ ID NO: 2481176
agucccacucagagcacuc

SEQ ID NO: 2481178 - RNA, 19 nt, Artificial Sequence
  Description of Artificial Sequence: Synthetic oligonucleotide
  Sense strand starting at position 2715 of SEQ ID NO: 1887562
gacugcugugugcuuguga

SEQ ID NO: 2481179 - RNA, 19 nt, Artificial Sequence
  Description of Artificial Sequence: Synthetic oligonucleotide
  Antisense strand to SEQ ID NO: 2481178
ucacaagcacacagcaguc

SEQ ID NO: 2481180 - RNA, 19 nt, Artificial Sequence
  Description of Artificial Sequence: Synthetic oligonucleotide
  Sense strand starting at position 2972 of SEQ ID NO: 1887562
ccaaaugucaguuggcuga

SEQ ID NO: 2481181 - RNA, 19 nt, Artificial Sequence
  Description of Artificial Sequence: Synthetic oligonucleotide
  Antisense strand to SEQ ID NO: 2481180
ucagccaacugacauuugg

SEQ ID NO: 2481182 - RNA, 19 nt, Artificial Sequence
  Description of Artificial Sequence: Synthetic oligonucleotide
  Sense strand starting at position 2979 of SEQ ID NO: 1887562
ucaguuggcugagugaaca

SEQ ID NO: 2481183 - RNA, 19 nt, Artificial Sequence
  Description of Artificial Sequence: Synthetic oligonucleotide
  Antisense strand to SEQ ID NO: 2481182
uguucacucagccaacuga

SEQ ID NO: 2481184 - RNA, 19 nt, Artificial Sequence
  Description of Artificial Sequence: Synthetic oligonucleotide
  Sense strand starting at position 3008 of SEQ ID NO: 1887562
ggcacuguacaaggugauu

SEQ ID NO: 2481185 - RNA, 19 nt, Artificial Sequence
  Description of Artificial Sequence: Synthetic oligonucleotide
  Antisense strand to SEQ ID NO: 2481184
aaucaccuuguacagugcc

SEQ ID NO: 2481186 - RNA, 19 nt, Artificial Sequence
  Description of Artificial Sequence: Synthetic oligonucleotide
  Sense strand starting at position 3031 of SEQ ID NO: 1887562
gcuguuggcucauuuagua

SEQ ID NO: 2481187 - RNA, 19 nt, Artificial Sequence
  Description of Artificial Sequence: Synthetic oligonucleotide
  Antisense strand to SEQ ID NO: 2481186
uacuaaaugagccaacagc

SEQ ID NO: 2481188 - RNA, 19 nt, Artificial Sequence
  Description of Artificial Sequence: Synthetic oligonucleotide
  Sense strand starting at position 3044 of SEQ ID NO: 1887562
uuaguagaauguguauaug

SEQ ID NO: 2481189 - RNA, 19 nt, Artificial Sequence
  Description of Artificial Sequence: Synthetic oligonucleotide
  Antisense strand to SEQ ID NO: 2481188
cauauacacauucuacuaa

SEQ ID NO: 2481190 - RNA, 19 nt, Artificial Sequence
  Description of Artificial Sequence: Synthetic oligonucleotide
  Sense strand starting at position 3047 of SEQ ID NO: 1887562
guagaauguguauaugucu

SEQ ID NO: 2481191 - RNA, 19 nt, Artificial Sequence
  Description of Artificial Sequence: Synthetic oligonucleotide
  Antisense strand to SEQ ID NO: 2481190
agacauauacacauucuac

SEQ ID NO: 2481192 - RNA, 19 nt, Artificial Sequence
  Description of Artificial Sequence: Synthetic oligonucleotide
  Sense strand starting at position 3055 of SEQ ID NO: 1887562
uguauaugucuguauggug

SEQ ID NO: 2481193 - RNA, 19 nt, Artificial Sequence
  Description of Artificial Sequence: Synthetic oligonucleotide
  Antisense strand to SEQ ID NO: 2481192
caccauacagacauauaca

SEQ ID NO: 2481194 - RNA, 19 nt, Artificial Sequence
  Description of Artificial Sequence: Synthetic oligonucleotide
  Sense strand starting at position 3099 of SEQ ID NO: 1887562
gggagucuuaaaugaggua

SEQ ID NO: 2481195 - RNA, 19 nt, Artificial Sequence
  Description of Artificial Sequence: Synthetic oligonucleotide
  Antisense strand to SEQ ID NO: 2481194
uaccucauuuaagacuccc

SEQ ID NO: 2481196 - RNA, 19 nt, Artificial Sequence
  Description of Artificial Sequence: Synthetic oligonucleotide
  Sense strand starting at position 3111 of SEQ ID NO: 1887562
ugagguaauacauguagca

SEQ ID NO: 2481197 - RNA, 19 nt, Artificial Sequence
  Description of Artificial Sequence: Synthetic oligonucleotide
  Antisense strand to SEQ ID NO: 2481196
ugcuacauguauuaccuca

SEQ ID NO: 2481198 - RNA, 19 nt, Artificial Sequence
  Description of Artificial Sequence: Synthetic oligonucleotide
  Sense strand starting at position 3113 of SEQ ID NO: 1887562
agguaauacauguagcaug

SEQ ID NO: 2481199 - RNA, 19 nt, Artificial Sequence
  Description of Artificial Sequence: Synthetic oligonucleotide
  Antisense strand to SEQ ID NO: 2481198
caugcuacauguauuaccu

SEQ ID NO: 2481200 - RNA, 19 nt, Artificial Sequence
  Description of Artificial Sequence: Synthetic oligonucleotide
  Sense strand starting at position 3230 of SEQ ID NO: 1887562
uggugugugcuguccuaua

SEQ ID NO: 2481201 - RNA, 19 nt, Artificial Sequence
  Description of Artificial Sequence: Synthetic oligonucleotide
  Antisense strand to SEQ ID NO: 2481200
uauaggacagcacacacca

SEQ ID NO: 2481202 - RNA, 19 nt, Artificial Sequence
  Description of Artificial Sequence: Synthetic oligonucleotide
  Sense strand starting at position 3232 of SEQ ID NO: 1887562
gugugugcuguccuauaug

SEQ ID NO: 2481203 - RNA, 19 nt, Artificial Sequence
  Description of Artificial Sequence: Synthetic oligonucleotide
  Antisense strand to SEQ ID NO: 2481202
cauauaggacagcacacac

SEQ ID NO: 2481204 - RNA, 19 nt, Artificial Sequence
  Description of Artificial Sequence: Synthetic oligonucleotide
  Sense strand starting at position 3291 of SEQ ID NO: 1887562
guaucuauugaguaguucu

SEQ ID NO: 2481205 - RNA, 19 nt, Artificial Sequence
  Description of Artificial Sequence: Synthetic oligonucleotide
  Antisense strand to SEQ ID NO: 2481204
agaacuacucaauagauac

SEQ ID NO: 2481206 - RNA, 19 nt, Artificial Sequence
  Description of Artificial Sequence: Synthetic oligonucleotide
  Sense strand starting at position 3389 of SEQ ID NO: 1887562
accugucaccaaugacagu

SEQ ID NO: 2481207 - RNA, 19 nt, Artificial Sequence
  Description of Artificial Sequence: Synthetic oligonucleotide
  Antisense strand to SEQ ID NO: 2481206
acugucauuggugacaggu

SEQ ID NO: 2481208 - RNA, 19 nt, Artificial Sequence
  Description of Artificial Sequence: Synthetic oligonucleotide
  Sense strand starting at position 3812 of SEQ ID NO: 1887562
gugauuuaguugguagagu

SEQ ID NO: 2481209 - RNA, 19 nt, Artificial Sequence
  Description of Artificial Sequence: Synthetic oligonucleotide
  Antisense strand to SEQ ID NO: 2481208
acucuaccaacuaaaucac

SEQ ID NO: 2481210 - RNA, 19 nt, Artificial Sequence
  Description of Artificial Sequence: Synthetic oligonucleotide
  Sense strand starting at position 3858 of SEQ ID NO: 1887562
ggugucugagcagggauau

SEQ ID NO: 2481211 - RNA, 19 nt, Artificial Sequence
  Description of Artificial Sequence: Synthetic oligonucleotide
  Antisense strand to SEQ ID NO: 2481210
auaucccugcucagacacc

SEQ ID NO: 2481212 - RNA, 19 nt, Artificial Sequence
  Description of Artificial Sequence: Synthetic oligonucleotide
  Sense strand starting at position 3859 of SEQ ID NO: 1887562
gugucugagcagggauaug

SEQ ID NO: 2481213 - RNA, 19 nt, Artificial Sequence
  Description of Artificial Sequence: Synthetic oligonucleotide
  Antisense strand to SEQ ID NO: 2481212
cauaucccugcucagacac

SEQ ID NO: 2481214 - RNA, 19 nt, Artificial Sequence
  Description of Artificial Sequence: Synthetic oligonucleotide
  Sense strand starting at position 37 of SEQ ID NO: 1887563
uaaauauagucccugggaa

SEQ ID NO: 2481215 - RNA, 19 nt, Artificial Sequence
  Description of Artificial Sequence: Synthetic oligonucleotide
  Antisense strand to SEQ ID NO: 2481214
uucccagggacuauauuua

SEQ ID NO: 2481216 - RNA, 19 nt, Artificial Sequence
  Description of Artificial Sequence: Synthetic oligonucleotide
  Sense strand starting at position 38 of SEQ ID NO: 1887563
aaauauagucccugggaac

SEQ ID NO: 2481217 - RNA, 19 nt, Artificial Sequence
  Description of Artificial Sequence: Synthetic oligonucleotide
  Antisense strand to SEQ ID NO: 2481216
guucccagggacuauauuu

SEQ ID NO: 2481218 - RNA, 19 nt, Artificial Sequence
  Description of Artificial Sequence: Synthetic oligonucleotide
  Sense strand starting at position 39 of SEQ ID NO: 1887563
aauauagucccugggaacu

SEQ ID NO: 2481219 - RNA, 19 nt, Artificial Sequence
  Description of Artificial Sequence: Synthetic oligonucleotide
  Antisense strand to SEQ ID NO: 2481218
aguucccagggacuauauu

SEQ ID NO: 2481220 - RNA, 19 nt, Artificial Sequence
  Description of Artificial Sequence: Synthetic oligonucleotide
  Sense strand starting at position 123 of SEQ ID NO: 1887563
ccagcaaacuguuugaaca

SEQ ID NO: 2481221 - RNA, 19 nt, Artificial Sequence
  Description of Artificial Sequence: Synthetic oligonucleotide
  Antisense strand to SEQ ID NO: 2481220
uguucaaacaguuugcugg

SEQ ID NO: 2481222 - RNA, 19 nt, Artificial Sequence
  Description of Artificial Sequence: Synthetic oligonucleotide
  Sense strand starting at position 238 of SEQ ID NO: 1887563
aucaguucccauuaccuga

SEQ ID NO: 2481223 - RNA, 19 nt, Artificial Sequence
  Description of Artificial Sequence: Synthetic oligonucleotide
  Antisense strand to SEQ ID NO: 2481222
ucagguaaugggaacugau

SEQ ID NO: 2481224 - RNA, 19 nt, Artificial Sequence
  Description of Artificial Sequence: Synthetic oligonucleotide
  Sense strand starting at position 278 of SEQ ID NO: 1887563
ccuguagaaauguauguca

SEQ ID NO: 2481225 - RNA, 19 nt, Artificial Sequence
  Description of Artificial Sequence: Synthetic oligonucleotide
  Antisense strand to SEQ ID NO: 2481224
ugacauacauuucuacagg

SEQ ID NO: 2481226 - RNA, 19 nt, Artificial Sequence
  Description of Artificial Sequence: Synthetic oligonucleotide
  Sense strand starting at position 281 of SEQ ID NO: 1887563
guagaaauguaugucaaug

SEQ ID NO: 2481227 - RNA, 19 nt, Artificial Sequence
  Description of Artificial Sequence: Synthetic oligonucleotide
  Antisense strand to SEQ ID NO: 2481226
cauugacauacauuucuac

SEQ ID NO: 2481228 - RNA, 19 nt, Artificial Sequence
  Description of Artificial Sequence: Synthetic oligonucleotide
  Sense strand starting at position 311 of SEQ ID NO: 1887563
cucugauauuucguaugca

SEQ ID NO: 2481229 - RNA, 19 nt, Artificial Sequence
  Description of Artificial Sequence: Synthetic oligonucleotide
  Antisense strand to SEQ ID NO: 2481228
ugcauacgaaauaucagag

SEQ ID NO: 2481230 - RNA, 19 nt, Artificial Sequence
  Description of Artificial Sequence: Synthetic oligonucleotide
  Sense strand starting at position 314 of SEQ ID NO: 1887563
ugauauuucguaugcauua

SEQ ID NO: 2481231 - RNA, 19 nt, Artificial Sequence
  Description of Artificial Sequence: Synthetic oligonucleotide
  Antisense strand to SEQ ID NO: 2481230
uaaugcauacgaaauauca

SEQ ID NO: 2481232 - RNA, 19 nt, Artificial Sequence
  Description of Artificial Sequence: Synthetic oligonucleotide
  Sense strand starting at position 315 of SEQ ID NO: 1887563
gauauuucguaugcauuac

SEQ ID NO: 2481233 - RNA, 19 nt, Artificial Sequence
  Description of Artificial Sequence: Synthetic oligonucleotide
  Antisense strand to SEQ ID NO: 2481232
guaaugcauacgaaauauc

SEQ ID NO: 2481234 - RNA, 19 nt, Artificial Sequence
  Description of Artificial Sequence: Synthetic oligonucleotide
  Sense strand starting at position 364 of SEQ ID NO: 1887563
auuccugauagauggguuu

SEQ ID NO: 2481235 - RNA, 19 nt, Artificial Sequence
  Description of Artificial Sequence: Synthetic oligonucleotide
  Antisense strand to SEQ ID NO: 2481234
aaacccaucuaucaggaau

SEQ ID NO: 2481236 - RNA, 19 nt, Artificial Sequence
  Description of Artificial Sequence: Synthetic oligonucleotide
  Sense strand starting at position 366 of SEQ ID NO: 1887563
uccugauagauggguuuau

SEQ ID NO: 2481237 - RNA, 19 nt, Artificial Sequence
  Description of Artificial Sequence: Synthetic oligonucleotide
  Antisense strand to SEQ ID NO: 2481236
auaaacccaucuaucagga

SEQ ID NO: 2481238 - RNA, 19 nt, Artificial Sequence
  Description of Artificial Sequence: Synthetic oligonucleotide
  Sense strand starting at position 367 of SEQ ID NO: 1887563
ccugauagauggguuuauu

SEQ ID NO: 2481239 - RNA, 19 nt, Artificial Sequence
  Description of Artificial Sequence: Synthetic oligonucleotide
  Antisense strand to SEQ ID NO: 2481238
aauaaacccaucuaucagg

SEQ ID NO: 2481240 - RNA, 19 nt, Artificial Sequence
  Description of Artificial Sequence: Synthetic oligonucleotide
  Sense strand starting at position 435 of SEQ ID NO: 1887563
aagacaucguguuccauuu

SEQ ID NO: 2481241 - RNA, 19 nt, Artificial Sequence
  Description of Artificial Sequence: Synthetic oligonucleotide
  Antisense strand to SEQ ID NO: 2481240
aaauggaacacgaugucuu

SEQ ID NO: 2481242 - RNA, 19 nt, Artificial Sequence
  Description of Artificial Sequence: Synthetic oligonucleotide
  Sense strand starting at position 441 of SEQ ID NO: 1887563
ucguguuccauuuaauguc

SEQ ID NO: 2481243 - RNA, 19 nt, Artificial Sequence
  Description of Artificial Sequence: Synthetic oligonucleotide
  Antisense strand to SEQ ID NO: 2481242
gacauuaaauggaacacga

SEQ ID NO: 2481244 - RNA, 19 nt, Artificial Sequence
  Description of Artificial Sequence: Synthetic oligonucleotide
  Sense strand starting at position 554 of SEQ ID NO: 1887563
cugcuauagccagaaagau

SEQ ID NO: 2481245 - RNA, 19 nt, Artificial Sequence
  Description of Artificial Sequence: Synthetic oligonucleotide
  Antisense strand to SEQ ID NO: 2481244
aucuuucuggcuauagcag

SEQ ID NO: 2481246 - RNA, 19 nt, Artificial Sequence
  Description of Artificial Sequence: Synthetic oligonucleotide
  Sense strand starting at position 593 of SEQ ID NO: 1887563
caagacaggucaucugaau

SEQ ID NO: 2481247 - RNA, 19 nt, Artificial Sequence
  Description of Artificial Sequence: Synthetic oligonucleotide
  Antisense strand to SEQ ID NO: 2481246
auucagaugaccugucuug

SEQ ID NO: 2481248 - RNA, 19 nt, Artificial Sequence
  Description of Artificial Sequence: Synthetic oligonucleotide
  Sense strand starting at position 733 of SEQ ID NO: 1887563
guacaagcacaugguaaau

SEQ ID NO: 2481249 - RNA, 19 nt, Artificial Sequence
  Description of Artificial Sequence: Synthetic oligonucleotide
  Antisense strand to SEQ ID NO: 2481248
auuuaccaugugcuuguac

SEQ ID NO: 2481250 - RNA, 19 nt, Artificial Sequence
  Description of Artificial Sequence: Synthetic oligonucleotide
  Sense strand starting at position 780 of SEQ ID NO: 1887563
uaggguuuauccucaggga

SEQ ID NO: 2481251 - RNA, 19 nt, Artificial Sequence
  Description of Artificial Sequence: Synthetic oligonucleotide
  Antisense strand to SEQ ID NO: 2481250
ucccugaggauaaacccua

SEQ ID NO: 2481252 - RNA, 19 nt, Artificial Sequence
  Description of Artificial Sequence: Synthetic oligonucleotide
  Sense strand starting at position 980 of SEQ ID NO: 1887563
gcaggacauuuccaaagag

SEQ ID NO: 2481253 - RNA, 19 nt, Artificial Sequence
  Description of Artificial Sequence: Synthetic oligonucleotide
  Antisense strand to SEQ ID NO: 2481252
cucuuuggaaauguccugc

SEQ ID NO: 2481254 - RNA, 19 nt, Artificial Sequence
  Description of Artificial Sequence: Synthetic oligonucleotide
  Sense strand starting at position 1184 of SEQ ID NO: 1887563
ggguuucuuggauagcaca

SEQ ID NO: 2481255 - RNA, 19 nt, Artificial Sequence
  Description of Artificial Sequence: Synthetic oligonucleotide
  Antisense strand to SEQ ID NO: 2481254
ugugcuauccaagaaaccc

SEQ ID NO: 2481256 - RNA, 19 nt, Artificial Sequence
  Description of Artificial Sequence: Synthetic oligonucleotide
  Sense strand starting at position 1192 of SEQ ID NO: 1887563
uggauagcacaguaacuua

SEQ ID NO: 2481257 - RNA, 19 nt, Artificial Sequence
  Description of Artificial Sequence: Synthetic oligonucleotide
  Antisense strand to SEQ ID NO: 2481256
uaaguuacugugcuaucca

SEQ ID NO: 2481258 - RNA, 19 nt, Artificial Sequence
  Description of Artificial Sequence: Synthetic oligonucleotide
  Sense strand starting at position 1339 of SEQ ID NO: 1887563
uggaaucugucucuaauuc

SEQ ID NO: 2481259 - RNA, 19 nt, Artificial Sequence
  Description of Artificial Sequence: Synthetic oligonucleotide
  Antisense strand to SEQ ID NO: 2481258
gaauuagagacagauucca

SEQ ID NO: 2481260 - RNA, 19 nt, Artificial Sequence
  Description of Artificial Sequence: Synthetic oligonucleotide
  Sense strand starting at position 1383 of SEQ ID NO: 1887563
uuagaaaugcuaugguuac

SEQ ID NO: 2481261 - RNA, 19 nt, Artificial Sequence
  Description of Artificial Sequence: Synthetic oligonucleotide
  Antisense strand to SEQ ID NO: 2481260
guaaccauagcauuucuaa

SEQ ID NO: 2481262 - RNA, 19 nt, Artificial Sequence
  Description of Artificial Sequence: Synthetic oligonucleotide
  Sense strand starting at position 1451 of SEQ ID NO: 1887563
ggaugccuauuccugagaa

SEQ ID NO: 2481263 - RNA, 19 nt, Artificial Sequence
  Description of Artificial Sequence: Synthetic oligonucleotide
  Antisense strand to SEQ ID NO: 2481262
uucucaggaauaggcaucc

SEQ ID NO: 2481264 - RNA, 19 nt, Artificial Sequence
  Description of Artificial Sequence: Synthetic oligonucleotide
  Sense strand starting at position 1453 of SEQ ID NO: 1887563
augccuauuccugagaacu

SEQ ID NO: 2481265 - RNA, 19 nt, Artificial Sequence
  Description of Artificial Sequence: Synthetic oligonucleotide
  Antisense strand to SEQ ID NO: 2481264
aguucucaggaauaggcau

SEQ ID NO: 2481266 - RNA, 19 nt, Artificial Sequence
  Description of Artificial Sequence: Synthetic oligonucleotide
  Sense strand starting at position 1465 of SEQ ID NO: 1887563
gagaacucuuuaucgaguc

SEQ ID NO: 2481267 - RNA, 19 nt, Artificial Sequence
  Description of Artificial Sequence: Synthetic oligonucleotide
  Antisense strand to SEQ ID NO: 2481266
gacucgauaaagaguucuc

SEQ ID NO: 2481268 - RNA, 19 nt, Artificial Sequence
  Description of Artificial Sequence: Synthetic oligonucleotide
  Sense strand starting at position 1626 of SEQ ID NO: 1887563
ggcgauagggcugaggaau

SEQ ID NO: 2481269 - RNA, 19 nt, Artificial Sequence
  Description of Artificial Sequence: Synthetic oligonucleotide
  Antisense strand to SEQ ID NO: 2481268
auuccucagcccuaucgcc

SEQ ID NO: 2481270 - RNA, 19 nt, Artificial Sequence
  Description of Artificial Sequence: Synthetic oligonucleotide
  Sense strand starting at position 1638 of SEQ ID NO: 1887563
gaggaaucugcagagccua

SEQ ID NO: 2481271 - RNA, 19 nt, Artificial Sequence
  Description of Artificial Sequence: Synthetic oligonucleotide
  Antisense strand to SEQ ID NO: 2481270
uaggcucugcagauuccuc

SEQ ID NO: 2481272 - RNA, 19 nt, Artificial Sequence
  Description of Artificial Sequence: Synthetic oligonucleotide
  Sense strand starting at position 1821 of SEQ ID NO: 1887563
agcagacaggccugaaauu

SEQ ID NO: 2481273 - RNA, 19 nt, Artificial Sequence
  Description of Artificial Sequence: Synthetic oligonucleotide
  Antisense strand to SEQ ID NO: 2481272
aauuucaggccugucugcu

SEQ ID NO: 2481274 - RNA, 19 nt, Artificial Sequence
  Description of Artificial Sequence: Synthetic oligonucleotide
  Sense strand starting at position 1951 of SEQ ID NO: 1887563
cgcugauuucuguggagac

SEQ ID NO: 2481275 - RNA, 19 nt, Artificial Sequence
  Description of Artificial Sequence: Synthetic oligonucleotide
  Antisense strand to SEQ ID NO: 2481274
gucuccacagaaaucagcg

SEQ ID NO: 2481276 - RNA, 19 nt, Artificial Sequence
  Description of Artificial Sequence: Synthetic oligonucleotide
  Sense strand starting at position 2045 of SEQ ID NO: 1887563
cggugacuucugggaaaug

SEQ ID NO: 2481277 - RNA, 19 nt, Artificial Sequence
  Description of Artificial Sequence: Synthetic oligonucleotide
  Antisense strand to SEQ ID NO: 2481276
cauuucccagaagucaccg

SEQ ID NO: 2481278 - RNA, 19 nt, Artificial Sequence
  Description of Artificial Sequence: Synthetic oligonucleotide
  Sense strand starting at position 2159 of SEQ ID NO: 1887563
guugacuugcucuauuaag

SEQ ID NO: 2481279 - RNA, 19 nt, Artificial Sequence
  Description of Artificial Sequence: Synthetic oligonucleotide
  Antisense strand to SEQ ID NO: 2481278
cuuaauagagcaagucaac

SEQ ID NO: 2481280 - RNA, 19 nt, Artificial Sequence
  Description of Artificial Sequence: Synthetic oligonucleotide
  Sense strand starting at position 2169 of SEQ ID NO: 1887563
ucuauuaagggcuaugauu

SEQ ID NO: 2481281 - RNA, 19 nt, Artificial Sequence
  Description of Artificial Sequence: Synthetic oligonucleotide
  Antisense strand to SEQ ID NO: 2481280
aaucauagcccuuaauaga

SEQ ID NO: 2481282 - RNA, 19 nt, Artificial Sequence
  Description of Artificial Sequence: Synthetic oligonucleotide
  Sense strand starting at position 2520 of SEQ ID NO: 1887563
gguuguauuccggauuaug

SEQ ID NO: 2481283 - RNA, 19 nt, Artificial Sequence
  Description of Artificial Sequence: Synthetic oligonucleotide
  Antisense strand to SEQ ID NO: 2481282
cauaauccggaauacaacc

SEQ ID NO: 2481284 - RNA, 19 nt, Artificial Sequence
  Description of Artificial Sequence: Synthetic oligonucleotide
  Sense strand starting at position 2680 of SEQ ID NO: 1887563
auacgagucuggcugauuu

SEQ ID NO: 2481285 - RNA, 19 nt, Artificial Sequence
  Description of Artificial Sequence: Synthetic oligonucleotide
  Antisense strand to SEQ ID NO: 2481284
aaaucagccagacucguau

SEQ ID NO: 2481286 - RNA, 19 nt, Artificial Sequence
  Description of Artificial Sequence: Synthetic oligonucleotide
  Sense strand starting at position 2942 of SEQ ID NO: 1887563
acccaaauguaaguguaua

SEQ ID NO: 2481287 - RNA, 19 nt, Artificial Sequence
  Description of Artificial Sequence: Synthetic oligonucleotide
  Antisense strand to SEQ ID NO: 2481286
uauacacuuacauuugggu

SEQ ID NO: 2481288 - RNA, 19 nt, Artificial Sequence
  Description of Artificial Sequence: Synthetic oligonucleotide
  Sense strand starting at position 3546 of SEQ ID NO: 1887563
uccuuugugccagacuuaa

SEQ ID NO: 2481289 - RNA, 19 nt, Artificial Sequence
  Description of Artificial Sequence: Synthetic oligonucleotide
  Antisense strand to SEQ ID NO: 2481288
uuaagucuggcacaaagga

SEQ ID NO: 2481290 - RNA, 19 nt, Artificial Sequence
  Description of Artificial Sequence: Synthetic oligonucleotide
  Sense strand starting at position 3772 of SEQ ID NO: 1887563
cacucuugccuggagaguu

SEQ ID NO: 2481291 - RNA, 19 nt, Artificial Sequence
  Description of Artificial Sequence: Synthetic oligonucleotide
  Antisense strand to SEQ ID NO: 2481290
aacucuccaggcaagagug

SEQ ID NO: 2481292 - RNA, 19 nt, Artificial Sequence
  Description of Artificial Sequence: Synthetic oligonucleotide
  Sense strand starting at position 3838 of SEQ ID NO: 1887563
cauggagugcaguaauaag

SEQ ID NO: 2481293 - RNA, 19 nt, Artificial Sequence
  Description of Artificial Sequence: Synthetic oligonucleotide
  Antisense strand to SEQ ID NO: 2481292
cuuauuacugcacuccaug

SEQ ID NO: 2481294 - RNA, 19 nt, Artificial Sequence
  Description of Artificial Sequence: Synthetic oligonucleotide
  Sense strand starting at position 164 of SEQ ID NO: 1887564
guuauagugagccacgauu

SEQ ID NO: 2481295 - RNA, 19 nt, Artificial Sequence
  Description of Artificial Sequence: Synthetic oligonucleotide
  Antisense strand to SEQ ID NO: 2481294
aaucguggcucacuauaac

SEQ ID NO: 2481296 - RNA, 19 nt, Artificial Sequence
  Description of Artificial Sequence: Synthetic oligonucleotide
  Sense strand starting at position 166 of SEQ ID NO: 1887564
uauagugagccacgauuau

SEQ ID NO: 2481297 - RNA, 19 nt, Artificial Sequence
  Description of Artificial Sequence: Synthetic oligonucleotide
  Antisense strand to SEQ ID NO: 2481296
auaaucguggcucacuaua

SEQ ID NO: 2481298 - RNA, 19 nt, Artificial Sequence
  Description of Artificial Sequence: Synthetic oligonucleotide
  Sense strand starting at position 239 of SEQ ID NO: 1887564
caggaacuggauuguuuaa

SEQ ID NO: 2481299 - RNA, 19 nt, Artificial Sequence
  Description of Artificial Sequence: Synthetic oligonucleotide
  Antisense strand to SEQ ID NO: 2481298
uuaaacaauccaguuccug

SEQ ID NO: 2481300 - RNA, 19 nt, Artificial Sequence
  Description of Artificial Sequence: Synthetic oligonucleotide
  Sense strand starting at position 362 of SEQ ID NO: 1887564
ggcguacggccugugaguu

SEQ ID NO: 2481301 - RNA, 19 nt, Artificial Sequence
  Description of Artificial Sequence: Synthetic oligonucleotide
  Antisense strand to SEQ ID NO: 2481300
aacucacaggccguacgcc

SEQ ID NO: 2481302 - RNA, 19 nt, Artificial Sequence
  Description of Artificial Sequence: Synthetic oligonucleotide
  Sense strand starting at position 500 of SEQ ID NO: 1887564
gaggcuuugcacugggagu

SEQ ID NO: 2481303 - RNA, 19 nt, Artificial Sequence
  Description of Artificial Sequence: Synthetic oligonucleotide
  Antisense strand to SEQ ID NO: 2481302
acucccagugcaaagccuc

SEQ ID NO: 2481304 - RNA, 19 nt, Artificial Sequence
  Description of Artificial Sequence: Synthetic oligonucleotide
  Sense strand starting at position 511 of SEQ ID NO: 1887564
cugggaguggcuugucaga

SEQ ID NO: 2481305 - RNA, 19 nt, Artificial Sequence
  Description of Artificial Sequence: Synthetic oligonucleotide
  Antisense strand to SEQ ID NO: 2481304
ucugacaagccacucccag

SEQ ID NO: 2481306 - RNA, 19 nt, Artificial Sequence
  Description of Artificial Sequence: Synthetic oligonucleotide
  Sense strand starting at position 513 of SEQ ID NO: 1887564
gggaguggcuugucagaau

SEQ ID NO: 2481307 - RNA, 19 nt, Artificial Sequence
  Description of Artificial Sequence: Synthetic oligonucleotide
  Antisense strand to SEQ ID NO: 2481306
auucugacaagccacuccc

SEQ ID NO: 2481308 - RNA, 19 nt, Artificial Sequence
  Description of Artificial Sequence: Synthetic oligonucleotide
  Sense strand starting at position 547 of SEQ ID NO: 1887564
guuacuuagccugguuuga

SEQ ID NO: 2481309 - RNA, 19 nt, Artificial Sequence
  Description of Artificial Sequence: Synthetic oligonucleotide
  Antisense strand to SEQ ID NO: 2481308
ucaaaccaggcuaaguaac

SEQ ID NO: 2481310 - RNA, 19 nt, Artificial Sequence
  Description of Artificial Sequence: Synthetic oligonucleotide
  Sense strand starting at position 549 of SEQ ID NO: 1887564
uacuuagccugguuugaag

SEQ ID NO: 2481311 - RNA, 19 nt, Artificial Sequence
  Description of Artificial Sequence: Synthetic oligonucleotide
  Antisense strand to SEQ ID NO: 2481310
cuucaaaccaggcuaagua

SEQ ID NO: 2481312 - RNA, 19 nt, Artificial Sequence
  Description of Artificial Sequence: Synthetic oligonucleotide
  Sense strand starting at position 617 of SEQ ID NO: 1887564
ugcucucauccggagaagu

SEQ ID NO: 2481313 - RNA, 19 nt, Artificial Sequence
  Description of Artificial Sequence: Synthetic oligonucleotide
  Antisense strand to SEQ ID NO: 2481312
acuucuccggaugagagca

SEQ ID NO: 2481314 - RNA, 19 nt, Artificial Sequence
  Description of Artificial Sequence: Synthetic oligonucleotide
  Sense strand starting at position 619 of SEQ ID NO: 1887564
cucucauccggagaaguga

SEQ ID NO: 2481315 - RNA, 19 nt, Artificial Sequence
  Description of Artificial Sequence: Synthetic oligonucleotide
  Antisense strand to SEQ ID NO: 2481314
ucacuucuccggaugagag

SEQ ID NO: 2481316 - RNA, 19 nt, Artificial Sequence
  Description of Artificial Sequence: Synthetic oligonucleotide
  Sense strand starting at position 628 of SEQ ID NO: 1887564
ggagaagugaccuggucaa

SEQ ID NO: 2481317 - RNA, 19 nt, Artificial Sequence
  Description of Artificial Sequence: Synthetic oligonucleotide
  Antisense strand to SEQ ID NO: 2481316
uugaccaggucacuucucc

SEQ ID NO: 2481318 - RNA, 19 nt, Artificial Sequence
  Description of Artificial Sequence: Synthetic oligonucleotide
  Sense strand starting at position 632 of SEQ ID NO: 1887564
aagugaccuggucaaaugu

SEQ ID NO: 2481319 - RNA, 19 nt, Artificial Sequence
  Description of Artificial Sequence: Synthetic oligonucleotide
  Antisense strand to SEQ ID NO: 2481318
acauuugaccaggucacuu

SEQ ID NO: 2481320 - RNA, 19 nt, Artificial Sequence
  Description of Artificial Sequence: Synthetic oligonucleotide
  Sense strand starting at position 641 of SEQ ID NO: 1887564
ggucaaauguguuucugac

SEQ ID NO: 2481321 - RNA, 19 nt, Artificial Sequence
  Description of Artificial Sequence: Synthetic oligonucleotide
  Antisense strand to SEQ ID NO: 2481320
gucagaaacacauuugacc

SEQ ID NO: 2481322 - RNA, 19 nt, Artificial Sequence
  Description of Artificial Sequence: Synthetic oligonucleotide
  Sense strand starting at position 658 of SEQ ID NO: 1887564
accuucgcuguccaguaau

SEQ ID NO: 2481323 - RNA, 19 nt, Artificial Sequence
  Description of Artificial Sequence: Synthetic oligonucleotide
  Antisense strand to SEQ ID NO: 2481322
auuacuggacagcgaaggu

SEQ ID NO: 2481324 - RNA, 19 nt, Artificial Sequence
  Description of Artificial Sequence: Synthetic oligonucleotide
  Sense strand starting at position 661 of SEQ ID NO: 1887564
uucgcuguccaguaauaca

SEQ ID NO: 2481325 - RNA, 19 nt, Artificial Sequence
  Description of Artificial Sequence: Synthetic oligonucleotide
  Antisense strand to SEQ ID NO: 2481324
uguauuacuggacagcgaa

SEQ ID NO: 2481326 - RNA, 19 nt, Artificial Sequence
  Description of Artificial Sequence: Synthetic oligonucleotide
  Sense strand starting at position 818 of SEQ ID NO: 1887564
uggagcauucugggcucaa

SEQ ID NO: 2481327 - RNA, 19 nt, Artificial Sequence
  Description of Artificial Sequence: Synthetic oligonucleotide
  Antisense strand to SEQ ID NO: 2481326
uugagcccagaaugcucca

SEQ ID NO: 2481328 - RNA, 19 nt, Artificial Sequence
  Description of Artificial Sequence: Synthetic oligonucleotide
  Sense strand starting at position 819 of SEQ ID NO: 1887564
ggagcauucugggcucaag

SEQ ID NO: 2481329 - RNA, 19 nt, Artificial Sequence
  Description of Artificial Sequence: Synthetic oligonucleotide
  Antisense strand to SEQ ID NO: 2481328
cuugagcccagaaugcucc

SEQ ID NO: 2481330 - RNA, 19 nt, Artificial Sequence
  Description of Artificial Sequence: Synthetic oligonucleotide
  Sense strand starting at position 822 of SEQ ID NO: 1887564
gcauucugggcucaagaga

SEQ ID NO: 2481331 - RNA, 19 nt, Artificial Sequence
  Description of Artificial Sequence: Synthetic oligonucleotide
  Antisense strand to SEQ ID NO: 2481330
ucucuugagcccagaaugc

SEQ ID NO: 2481332 - RNA, 19 nt, Artificial Sequence
  Description of Artificial Sequence: Synthetic oligonucleotide
  Sense strand starting at position 1479 of SEQ ID NO: 1887564
gaaguuuccggauguauua

SEQ ID NO: 2481333 - RNA, 19 nt, Artificial Sequence
  Description of Artificial Sequence: Synthetic oligonucleotide
  Antisense strand to SEQ ID NO: 2481332
uaauacauccggaaacuuc

SEQ ID NO: 2481334 - RNA, 19 nt, Artificial Sequence
  Description of Artificial Sequence: Synthetic oligonucleotide
  Sense strand starting at position 1488 of SEQ ID NO: 1887564
ggauguauuauguggucau

SEQ ID NO: 2481335 - RNA, 19 nt, Artificial Sequence
  Description of Artificial Sequence: Synthetic oligonucleotide
  Antisense strand to SEQ ID NO: 2481334
augaccacauaauacaucc

SEQ ID NO: 2481336 - RNA, 19 nt, Artificial Sequence
  Description of Artificial Sequence: Synthetic oligonucleotide
  Sense strand starting at position 1491 of SEQ ID NO: 1887564
uguauuauguggucaugaa

SEQ ID NO: 2481337 - RNA, 19 nt, Artificial Sequence
  Description of Artificial Sequence: Synthetic oligonucleotide
  Antisense strand to SEQ ID NO: 2481336
uucaugaccacauaauaca

SEQ ID NO: 2481338 - RNA, 19 nt, Artificial Sequence
  Description of Artificial Sequence: Synthetic oligonucleotide
  Sense strand starting at position 1492 of SEQ ID NO: 1887564
guauuauguggucaugaau

SEQ ID NO: 2481339 - RNA, 19 nt, Artificial Sequence
  Description of Artificial Sequence: Synthetic oligonucleotide
  Antisense strand to SEQ ID NO: 2481338
auucaugaccacauaauac

SEQ ID NO: 2481340 - RNA, 19 nt, Artificial Sequence
  Description of Artificial Sequence: Synthetic oligonucleotide
  Sense strand starting at position 1495 of SEQ ID NO: 1887564
uuauguggucaugaaucau

SEQ ID NO: 2481341 - RNA, 19 nt, Artificial Sequence
  Description of Artificial Sequence: Synthetic oligonucleotide
  Antisense strand to SEQ ID NO: 2481340
augauucaugaccacauaa

SEQ ID NO: 2481342 - RNA, 19 nt, Artificial Sequence
  Description of Artificial Sequence: Synthetic oligonucleotide
  Sense strand starting at position 1499 of SEQ ID NO: 1887564
guggucaugaaucauguca

SEQ ID NO: 2481343 - RNA, 19 nt, Artificial Sequence
  Description of Artificial Sequence: Synthetic oligonucleotide
  Antisense strand to SEQ ID NO: 2481342
ugacaugauucaugaccac

SEQ ID NO: 2481344 - RNA, 19 nt, Artificial Sequence
  Description of Artificial Sequence: Synthetic oligonucleotide
  Sense strand starting at position 1504 of SEQ ID NO: 1887564
caugaaucaugucagggaa

SEQ ID NO: 2481345 - RNA, 19 nt, Artificial Sequence
  Description of Artificial Sequence: Synthetic oligonucleotide
  Antisense strand to SEQ ID NO: 2481344
uucccugacaugauucaug

SEQ ID NO: 2481346 - RNA, 19 nt, Artificial Sequence
  Description of Artificial Sequence: Synthetic oligonucleotide
  Sense strand starting at position 1801 of SEQ ID NO: 1887564
ccggauucccgaggucuga

SEQ ID NO: 2481347 - RNA, 19 nt, Artificial Sequence
  Description of Artificial Sequence: Synthetic oligonucleotide
  Antisense strand to SEQ ID NO: 2481346
ucagaccucgggaauccgg

SEQ ID NO: 2481348 - RNA, 19 nt, Artificial Sequence
  Description of Artificial Sequence: Synthetic oligonucleotide
  Sense strand starting at position 2363 of SEQ ID NO: 1887564
cgcuaagaagcuuggagau

SEQ ID NO: 2481349 - RNA, 19 nt, Artificial Sequence
  Description of Artificial Sequence: Synthetic oligonucleotide
  Antisense strand to SEQ ID NO: 2481348
aucuccaagcuucuuagcg

SEQ ID NO: 2481350 - RNA, 19 nt, Artificial Sequence
  Description of Artificial Sequence: Synthetic oligonucleotide
  Sense strand starting at position 2377 of SEQ ID NO: 1887564
gagauaguuucgcccuccu

SEQ ID NO: 2481351 - RNA, 19 nt, Artificial Sequence
  Description of Artificial Sequence: Synthetic oligonucleotide
  Antisense strand to SEQ ID NO: 2481350
aggagggcgaaacuaucuc

SEQ ID NO: 2481352 - RNA, 19 nt, Artificial Sequence
  Description of Artificial Sequence: Synthetic oligonucleotide
  Sense strand starting at position 2419 of SEQ ID NO: 1887564
cgcugauugguccgaggag

SEQ ID NO: 2481353 - RNA, 19 nt, Artificial Sequence
  Description of Artificial Sequence: Synthetic oligonucleotide
  Antisense strand to SEQ ID NO: 2481352
cuccucggaccaaucagcg

SEQ ID NO: 2481354 - RNA, 19 nt, Artificial Sequence
  Description of Artificial Sequence: Synthetic oligonucleotide
  Sense strand starting at position 2564 of SEQ ID NO: 1887564
gcacuucaguucucggaga

SEQ ID NO: 2481355 - RNA, 19 nt, Artificial Sequence
  Description of Artificial Sequence: Synthetic oligonucleotide
  Antisense strand to SEQ ID NO: 2481354
ucuccgagaacugaagugc

SEQ ID NO: 2481356 - RNA, 19 nt, Artificial Sequence
  Description of Artificial Sequence: Synthetic oligonucleotide
  Sense strand starting at position 2566 of SEQ ID NO: 1887564
acuucaguucucggagaga

SEQ ID NO: 2481357 - RNA, 19 nt, Artificial Sequence
  Description of Artificial Sequence: Synthetic oligonucleotide
  Antisense strand to SEQ ID NO: 2481356
ucucuccgagaacugaagu

SEQ ID NO: 2481358 - RNA, 19 nt, Artificial Sequence
  Description of Artificial Sequence: Synthetic oligonucleotide
  Sense strand starting at position 3225 of SEQ ID NO: 1887564
uuucuuaacccacggagau

SEQ ID NO: 2481359 - RNA, 19 nt, Artificial Sequence
  Description of Artificial Sequence: Synthetic oligonucleotide
  Antisense strand to SEQ ID NO: 2481358
aucuccguggguuaagaaa

SEQ ID NO: 2481360 - RNA, 19 nt, Artificial Sequence
  Description of Artificial Sequence: Synthetic oligonucleotide
  Sense strand starting at position 3254 of SEQ ID NO: 1887564
cgugguuucccuguggcaa

SEQ ID NO: 2481361 - RNA, 19 nt, Artificial Sequence
  Description of Artificial Sequence: Synthetic oligonucleotide
  Antisense strand to SEQ ID NO: 2481360
uugccacagggaaaccacg

SEQ ID NO: 2481362 - RNA, 19 nt, Artificial Sequence
  Description of Artificial Sequence: Synthetic oligonucleotide
  Sense strand starting at position 3690 of SEQ ID NO: 1887564
uugagcucucccugggaaa

SEQ ID NO: 2481363 - RNA, 19 nt, Artificial Sequence
  Description of Artificial Sequence: Synthetic oligonucleotide
  Antisense strand to SEQ ID NO: 2481362
uuucccagggagagcucaa

SEQ ID NO: 2481364 - RNA, 19 nt, Artificial Sequence
  Description of Artificial Sequence: Synthetic oligonucleotide
  Sense strand starting at position 3691 of SEQ ID NO: 1887564
ugagcucucccugggaaag

SEQ ID NO: 2481365 - RNA, 19 nt, Artificial Sequence
  Description of Artificial Sequence: Synthetic oligonucleotide
  Antisense strand to SEQ ID NO: 2481364
cuuucccagggagagcuca

SEQ ID NO: 2481366 - RNA, 19 nt, Artificial Sequence
  Description of Artificial Sequence: Synthetic oligonucleotide
  Sense strand starting at position 3765 of SEQ ID NO: 1887564
cucugugggcuuggauaaa

SEQ ID NO: 2481367 - RNA, 19 nt, Artificial Sequence
  Description of Artificial Sequence: Synthetic oligonucleotide
  Antisense strand to SEQ ID NO: 2481366
uuuauccaagcccacagag

SEQ ID NO: 2481368 - RNA, 19 nt, Artificial Sequence
  Description of Artificial Sequence: Synthetic oligonucleotide
  Sense strand starting at position 3818 of SEQ ID NO: 1887564
ggcauuagcuaguucucca

SEQ ID NO: 2481369 - RNA, 19 nt, Artificial Sequence
  Description of Artificial Sequence: Synthetic oligonucleotide
  Antisense strand to SEQ ID NO: 2481368
uggagaacuagcuaaugcc

SEQ ID NO: 2481370 - RNA, 19 nt, Artificial Sequence
  Description of Artificial Sequence: Synthetic oligonucleotide
  Sense strand starting at position 3822 of SEQ ID NO: 1887564
uuagcuaguucuccagguu

SEQ ID NO: 2481371 - RNA, 19 nt, Artificial Sequence
  Description of Artificial Sequence: Synthetic oligonucleotide
  Antisense strand to SEQ ID NO: 2481370
aaccuggagaacuagcuaa

SEQ ID NO: 2481372 - RNA, 19 nt, Artificial Sequence
  Description of Artificial Sequence: Synthetic oligonucleotide
  Sense strand starting at position 3823 of SEQ ID NO: 1887564
uagcuaguucuccagguuu

SEQ ID NO: 2481373 - RNA, 19 nt, Artificial Sequence
  Description of Artificial Sequence: Synthetic oligonucleotide
  Antisense strand to SEQ ID NO: 2481372
aaaccuggagaacuagcua

SEQ ID NO: 2481374 - RNA, 19 nt, Artificial Sequence
  Description of Artificial Sequence: Synthetic oligonucleotide
  Sense strand starting at position 5 of SEQ ID NO: 1887565
ggugcuauuaaguaugaga

SEQ ID NO: 2481375 - RNA, 19 nt, Artificial Sequence
  Description of Artificial Sequence: Synthetic oligonucleotide
  Antisense strand to SEQ ID NO: 2481374
ucucauacuuaauagcacc

SEQ ID NO: 2481376 - RNA, 19 nt, Artificial Sequence
  Description of Artificial Sequence: Synthetic oligonucleotide
  Sense strand starting at position 7 of SEQ ID NO: 1887565
ugcuauuaaguaugagaga

SEQ ID NO: 2481377 - RNA, 19 nt, Artificial Sequence
  Description of Artificial Sequence: Synthetic oligonucleotide
  Antisense strand to SEQ ID NO: 2481376
ucucucauacuuaauagca

SEQ ID NO: 2481378 - RNA, 19 nt, Artificial Sequence
  Description of Artificial Sequence: Synthetic oligonucleotide
  Sense strand starting at position 8 of SEQ ID NO: 1887565
gcuauuaaguaugagagaa

SEQ ID NO: 2481379 - RNA, 19 nt, Artificial Sequence
  Description of Artificial Sequence: Synthetic oligonucleotide
  Antisense strand to SEQ ID NO: 2481378
uucucucauacuuaauagc

SEQ ID NO: 2481380 - RNA, 19 nt, Artificial Sequence
  Description of Artificial Sequence: Synthetic oligonucleotide
  Sense strand starting at position 10 of SEQ ID NO: 1887565
uauuaaguaugagagaagu

SEQ ID NO: 2481381 - RNA, 19 nt, Artificial Sequence
  Description of Artificial Sequence: Synthetic oligonucleotide
  Antisense strand to SEQ ID NO: 2481380
acuucucucauacuuaaua

SEQ ID NO: 2481382 - RNA, 19 nt, Artificial Sequence
  Description of Artificial Sequence: Synthetic oligonucleotide
  Sense strand starting at position 159 of SEQ ID NO: 1887565
uuaucucaucuauggcaga

SEQ ID NO: 2481383 - RNA, 19 nt, Artificial Sequence
  Description of Artificial Sequence: Synthetic oligonucleotide
  Antisense strand to SEQ ID NO: 2481382
ucugccauagaugagauaa

SEQ ID NO: 2481384 - RNA, 19 nt, Artificial Sequence
  Description of Artificial Sequence: Synthetic oligonucleotide
  Sense strand starting at position 166 of SEQ ID NO: 1887565
aucuauggcagacgucuua

SEQ ID NO: 2481385 - RNA, 19 nt, Artificial Sequence
  Description of Artificial Sequence: Synthetic oligonucleotide
  Antisense strand to SEQ ID NO: 2481384
uaagacgucugccauagau

SEQ ID NO: 2481386 - RNA, 19 nt, Artificial Sequence
  Description of Artificial Sequence: Synthetic oligonucleotide
  Sense strand starting at position 177 of SEQ ID NO: 1887565
acgucuuaaugaggucagu

SEQ ID NO: 2481387 - RNA, 19 nt, Artificial Sequence
  Description of Artificial Sequence: Synthetic oligonucleotide
  Antisense strand to SEQ ID NO: 2481386
acugaccucauuaagacgu

SEQ ID NO: 2481388 - RNA, 19 nt, Artificial Sequence
  Description of Artificial Sequence: Synthetic oligonucleotide
  Sense strand starting at position 365 of SEQ ID NO: 1887565
gaaagagugucacuggcuu

SEQ ID NO: 2481389 - RNA, 19 nt, Artificial Sequence
  Description of Artificial Sequence: Synthetic oligonucleotide
  Antisense strand to SEQ ID NO: 2481388
aagccagugacacucuuuc

SEQ ID NO: 2481390 - RNA, 19 nt, Artificial Sequence
  Description of Artificial Sequence: Synthetic oligonucleotide
  Sense strand starting at position 421 of SEQ ID NO: 1887565
ccauauguccagugaaagc

SEQ ID NO: 2481391 - RNA, 19 nt, Artificial Sequence
  Description of Artificial Sequence: Synthetic oligonucleotide
  Antisense strand to SEQ ID NO: 2481390
gcuuucacuggacauaugg

SEQ ID NO: 2481392 - RNA, 19 nt, Artificial Sequence
  Description of Artificial Sequence: Synthetic oligonucleotide
  Sense strand starting at position 498 of SEQ ID NO: 1887565
gaaaucugguaguuuguga

SEQ ID NO: 2481393 - RNA, 19 nt, Artificial Sequence
  Description of Artificial Sequence: Synthetic oligonucleotide
  Antisense strand to SEQ ID NO: 2481392
ucacaaacuaccagauuuc

SEQ ID NO: 2481394 - RNA, 19 nt, Artificial Sequence
  Description of Artificial Sequence: Synthetic oligonucleotide
  Sense strand starting at position 502 of SEQ ID NO: 1887565
ucugguaguuugugauagu

SEQ ID NO: 2481395 - RNA, 19 nt, Artificial Sequence
  Description of Artificial Sequence: Synthetic oligonucleotide
  Antisense strand to SEQ ID NO: 2481394
acuaucacaaacuaccaga

SEQ ID NO: 2481396 - RNA, 19 nt, Artificial Sequence
  Description of Artificial Sequence: Synthetic oligonucleotide
  Sense strand starting at position 505 of SEQ ID NO: 1887565
gguaguuugugauagugga

SEQ ID NO: 2481397 - RNA, 19 nt, Artificial Sequence
  Description of Artificial Sequence: Synthetic oligonucleotide
  Antisense strand to SEQ ID NO: 2481396
uccacuaucacaaacuacc

SEQ ID NO: 2481398 - RNA, 19 nt, Artificial Sequence
  Description of Artificial Sequence: Synthetic oligonucleotide
  Sense strand starting at position 579 of SEQ ID NO: 1887565
gaaugacuuucugagggcu

SEQ ID NO: 2481399 - RNA, 19 nt, Artificial Sequence
  Description of Artificial Sequence: Synthetic oligonucleotide
  Antisense strand to SEQ ID NO: 2481398
agcccucagaaagucauuc

SEQ ID NO: 2481400 - RNA, 19 nt, Artificial Sequence
  Description of Artificial Sequence: Synthetic oligonucleotide
  Sense strand starting at position 596 of SEQ ID NO: 1887565
cuggccauuugagauccua

SEQ ID NO: 2481401 - RNA, 19 nt, Artificial Sequence
  Description of Artificial Sequence: Synthetic oligonucleotide
  Antisense strand to SEQ ID NO: 2481400
uaggaucucaaauggccag

SEQ ID NO: 2481402 - RNA, 19 nt, Artificial Sequence
  Description of Artificial Sequence: Synthetic oligonucleotide
  Sense strand starting at position 634 of SEQ ID NO: 1887565
acuaauauauugugaggga

SEQ ID NO: 2481403 - RNA, 19 nt, Artificial Sequence
  Description of Artificial Sequence: Synthetic oligonucleotide
  Antisense strand to SEQ ID NO: 2481402
ucccucacaauauauuagu

SEQ ID NO: 2481404 - RNA, 19 nt, Artificial Sequence
  Description of Artificial Sequence: Synthetic oligonucleotide
  Sense strand starting at position 687 of SEQ ID NO: 1887565
uuuauugugugcuuacaug

SEQ ID NO: 2481405 - RNA, 19 nt, Artificial Sequence
  Description of Artificial Sequence: Synthetic oligonucleotide
  Antisense strand to SEQ ID NO: 2481404
cauguaagcacacaauaaa

SEQ ID NO: 2481406 - RNA, 19 nt, Artificial Sequence
  Description of Artificial Sequence: Synthetic oligonucleotide
  Sense strand starting at position 694 of SEQ ID NO: 1887565
ugugcuuacaugugccaga

SEQ ID NO: 2481407 - RNA, 19 nt, Artificial Sequence
  Description of Artificial Sequence: Synthetic oligonucleotide
  Antisense strand to SEQ ID NO: 2481406
ucuggcacauguaagcaca

SEQ ID NO: 2481408 - RNA, 19 nt, Artificial Sequence
  Description of Artificial Sequence: Synthetic oligonucleotide
  Sense strand starting at position 1348 of SEQ ID NO: 1887565
cagacaugugcugagccau

SEQ ID NO: 2481409 - RNA, 19 nt, Artificial Sequence
  Description of Artificial Sequence: Synthetic oligonucleotide
  Antisense strand to SEQ ID NO: 2481408
auggcucagcacaugucug

SEQ ID NO: 2481410 - RNA, 19 nt, Artificial Sequence
  Description of Artificial Sequence: Synthetic oligonucleotide
  Sense strand starting at position 1409 of SEQ ID NO: 1887565
cgcucuggccuuugugaca

SEQ ID NO: 2481411 - RNA, 19 nt, Artificial Sequence
  Description of Artificial Sequence: Synthetic oligonucleotide
  Antisense strand to SEQ ID NO: 2481410
ugucacaaaggccagagcg

SEQ ID NO: 2481412 - RNA, 19 nt, Artificial Sequence
  Description of Artificial Sequence: Synthetic oligonucleotide
  Sense strand starting at position 1434 of SEQ ID NO: 1887565
uugcaucagcgguuugcaa

SEQ ID NO: 2481413 - RNA, 19 nt, Artificial Sequence
  Description of Artificial Sequence: Synthetic oligonucleotide
  Antisense strand to SEQ ID NO: 2481412
uugcaaaccgcugaugcaa

SEQ ID NO: 2481414 - RNA, 19 nt, Artificial Sequence
  Description of Artificial Sequence: Synthetic oligonucleotide
  Sense strand starting at position 1527 of SEQ ID NO: 1887565
gccggaagaagccaugaaa

SEQ ID NO: 2481415 - RNA, 19 nt, Artificial Sequence
  Description of Artificial Sequence: Synthetic oligonucleotide
  Antisense strand to SEQ ID NO: 2481414
uuucauggcuucuuccggc

SEQ ID NO: 2481416 - RNA, 19 nt, Artificial Sequence
  Description of Artificial Sequence: Synthetic oligonucleotide
  Sense strand starting at position 1704 of SEQ ID NO: 1887565
gcgcgugccugucauccaa

SEQ ID NO: 2481417 - RNA, 19 nt, Artificial Sequence
  Description of Artificial Sequence: Synthetic oligonucleotide
  Antisense strand to SEQ ID NO: 2481416
uuggaugacaggcacgcgc

SEQ ID NO: 2481418 - RNA, 19 nt, Artificial Sequence
  Description of Artificial Sequence: Synthetic oligonucleotide
  Sense strand starting at position 1888 of SEQ ID NO: 1887565
cuggacuccguguauagaa

SEQ ID NO: 2481419 - RNA, 19 nt, Artificial Sequence
  Description of Artificial Sequence: Synthetic oligonucleotide
  Antisense strand to SEQ ID NO: 2481418
uucuauacacggaguccag

SEQ ID NO: 2481420 - RNA, 19 nt, Artificial Sequence
  Description of Artificial Sequence: Synthetic oligonucleotide
  Sense strand starting at position 1900 of SEQ ID NO: 1887565
uauagaaccuggugucuca

SEQ ID NO: 2481421 - RNA, 19 nt, Artificial Sequence
  Description of Artificial Sequence: Synthetic oligonucleotide
  Antisense strand to SEQ ID NO: 2481420
ugagacaccagguucuaua

SEQ ID NO: 2481422 - RNA, 19 nt, Artificial Sequence
  Description of Artificial Sequence: Synthetic oligonucleotide
  Sense strand starting at position 1933 of SEQ ID NO: 1887565
agcagaggcaggugucuaa

SEQ ID NO: 2481423 - RNA, 19 nt, Artificial Sequence
  Description of Artificial Sequence: Synthetic oligonucleotide
  Antisense strand to SEQ ID NO: 2481422
uuagacaccugccucugcu

SEQ ID NO: 2481424 - RNA, 19 nt, Artificial Sequence
  Description of Artificial Sequence: Synthetic oligonucleotide
  Sense strand starting at position 1944 of SEQ ID NO: 1887565
gugucuaagccggaccauu

SEQ ID NO: 2481425 - RNA, 19 nt, Artificial Sequence
  Description of Artificial Sequence: Synthetic oligonucleotide
  Antisense strand to SEQ ID NO: 2481424
aaugguccggcuuagacac

SEQ ID NO: 2481426 - RNA, 19 nt, Artificial Sequence
  Description of Artificial Sequence: Synthetic oligonucleotide
  Sense strand starting at position 1981 of SEQ ID NO: 1887565
cccggugugcuaugagaac

SEQ ID NO: 2481427 - RNA, 19 nt, Artificial Sequence
  Description of Artificial Sequence: Synthetic oligonucleotide
  Antisense strand to SEQ ID NO: 2481426
guucucauagcacaccggg

SEQ ID NO: 2481428 - RNA, 19 nt, Artificial Sequence
  Description of Artificial Sequence: Synthetic oligonucleotide
  Sense strand starting at position 2036 of SEQ ID NO: 1887565
gccgcacuuuggcgagaaa

SEQ ID NO: 2481429 - RNA, 19 nt, Artificial Sequence
  Description of Artificial Sequence: Synthetic oligonucleotide
  Antisense strand to SEQ ID NO: 2481428
uuucucgccaaagugcggc

SEQ ID NO: 2481430 - RNA, 19 nt, Artificial Sequence
  Description of Artificial Sequence: Synthetic oligonucleotide
  Sense strand starting at position 2039 of SEQ ID NO: 1887565
gcacuuuggcgagaaagca

SEQ ID NO: 2481431 - RNA, 19 nt, Artificial Sequence
  Description of Artificial Sequence: Synthetic oligonucleotide
  Antisense strand to SEQ ID NO: 2481430
ugcuuucucgccaaagugc

SEQ ID NO: 2481432 - RNA, 19 nt, Artificial Sequence
  Description of Artificial Sequence: Synthetic oligonucleotide
  Sense strand starting at position 2360 of SEQ ID NO: 1887565
gcauuaaaggguggugacu

SEQ ID NO: 2481433 - RNA, 19 nt, Artificial Sequence
  Description of Artificial Sequence: Synthetic oligonucleotide
  Antisense strand to SEQ ID NO: 2481432
agucaccacccuuuaaugc

SEQ ID NO: 2481434 - RNA, 19 nt, Artificial Sequence
  Description of Artificial Sequence: Synthetic oligonucleotide
  Sense strand starting at position 2930 of SEQ ID NO: 1887565
guccucuggugauagcaga

SEQ ID NO: 2481435 - RNA, 19 nt, Artificial Sequence
  Description of Artificial Sequence: Synthetic oligonucleotide
  Antisense strand to SEQ ID NO: 2481434
ucugcuaucaccagaggac

SEQ ID NO: 2481436 - RNA, 19 nt, Artificial Sequence
  Description of Artificial Sequence: Synthetic oligonucleotide
  Sense strand starting at position 2979 of SEQ ID NO: 1887565
ccaucugccucguguugga

SEQ ID NO: 2481437 - RNA, 19 nt, Artificial Sequence
  Description of Artificial Sequence: Synthetic oligonucleotide
  Antisense strand to SEQ ID NO: 2481436
uccaacacgaggcagaugg

SEQ ID NO: 2481438 - RNA, 19 nt, Artificial Sequence
  Description of Artificial Sequence: Synthetic oligonucleotide
  Sense strand starting at position 3019 of SEQ ID NO: 1887565
cccaauguugccugcaagu

SEQ ID NO: 2481439 - RNA, 19 nt, Artificial Sequence
  Description of Artificial Sequence: Synthetic oligonucleotide
  Antisense strand to SEQ ID NO: 2481438
acuugcaggcaacauuggg

SEQ ID NO: 2481440 - RNA, 19 nt, Artificial Sequence
  Description of Artificial Sequence: Synthetic oligonucleotide
  Sense strand starting at position 3143 of SEQ ID NO: 1887565
gucuguagcucccuguauu

SEQ ID NO: 2481441 - RNA, 19 nt, Artificial Sequence
  Description of Artificial Sequence: Synthetic oligonucleotide
  Antisense strand to SEQ ID NO: 2481440
aauacagggagcuacagac

SEQ ID NO: 2481442 - RNA, 19 nt, Artificial Sequence
  Description of Artificial Sequence: Synthetic oligonucleotide
  Sense strand starting at position 3217 of SEQ ID NO: 1887565
gauugcagcucucaggaga

SEQ ID NO: 2481443 - RNA, 19 nt, Artificial Sequence
  Description of Artificial Sequence: Synthetic oligonucleotide
  Antisense strand to SEQ ID NO: 2481442
ucuccugagagcugcaauc

SEQ ID NO: 2481444 - RNA, 19 nt, Artificial Sequence
  Description of Artificial Sequence: Synthetic oligonucleotide
  Sense strand starting at position 3230 of SEQ ID NO: 1887565
aggagauccugugggaaga

SEQ ID NO: 2481445 - RNA, 19 nt, Artificial Sequence
  Description of Artificial Sequence: Synthetic oligonucleotide
  Antisense strand to SEQ ID NO: 2481444
ucuucccacaggaucuccu

SEQ ID NO: 2481446 - RNA, 19 nt, Artificial Sequence
  Description of Artificial Sequence: Synthetic oligonucleotide
  Sense strand starting at position 3315 of SEQ ID NO: 1887565
ccgcauguggcuggagaaa

SEQ ID NO: 2481447 - RNA, 19 nt, Artificial Sequence
  Description of Artificial Sequence: Synthetic oligonucleotide
  Antisense strand to SEQ ID NO: 2481446
uuucuccagccacaugcgg

SEQ ID NO: 2481448 - RNA, 19 nt, Artificial Sequence
  Description of Artificial Sequence: Synthetic oligonucleotide
  Sense strand starting at position 3611 of SEQ ID NO: 1887565
ccucucuugccgcaaauga

SEQ ID NO: 2481449 - RNA, 19 nt, Artificial Sequence
  Description of Artificial Sequence: Synthetic oligonucleotide
  Antisense strand to SEQ ID NO: 2481448
ucauuugcggcaagagagg

SEQ ID NO: 2481450 - RNA, 19 nt, Artificial Sequence
  Description of Artificial Sequence: Synthetic oligonucleotide
  Sense strand starting at position 3635 of SEQ ID NO: 1887565
ccauguucuuaucuaaagu

SEQ ID NO: 2481451 - RNA, 19 nt, Artificial Sequence
  Description of Artificial Sequence: Synthetic oligonucleotide
  Antisense strand to SEQ ID NO: 2481450
acuuuagauaagaacaugg

SEQ ID NO: 2481452 - RNA, 19 nt, Artificial Sequence
  Description of Artificial Sequence: Synthetic oligonucleotide
  Sense strand starting at position 3661 of SEQ ID NO: 1887565
gcaauuaggcacuagauuc

SEQ ID NO: 2481453 - RNA, 19 nt, Artificial Sequence
  Description of Artificial Sequence: Synthetic oligonucleotide
  Antisense strand to SEQ ID NO: 2481452
gaaucuagugccuaauugc

SEQ ID NO: 2481454 - RNA, 19 nt, Artificial Sequence
  Description of Artificial Sequence: Synthetic oligonucleotide
  Sense strand starting at position 18 of SEQ ID NO: 1887566
ggcugacuccugggagaag

SEQ ID NO: 2481455 - RNA, 19 nt, Artificial Sequence
  Description of Artificial Sequence: Synthetic oligonucleotide
  Antisense strand to SEQ ID NO: 2481454
cuucucccaggagucagcc

SEQ ID NO: 2481456 - RNA, 19 nt, Artificial Sequence
  Description of Artificial Sequence: Synthetic oligonucleotide
  Sense strand starting at position 84 of SEQ ID NO: 1887566
ugccuaugaccacagaacu

SEQ ID NO: 2481457 - RNA, 19 nt, Artificial Sequence
  Description of Artificial Sequence: Synthetic oligonucleotide
  Antisense strand to SEQ ID NO: 2481456
aguucuguggucauaggca

SEQ ID NO: 2481458 - RNA, 19 nt, Artificial Sequence
  Description of Artificial Sequence: Synthetic oligonucleotide
  Sense strand starting at position 299 of SEQ ID NO: 1887566
ccaggcugucaggagagau

SEQ ID NO: 2481459 - RNA, 19 nt, Artificial Sequence
  Description of Artificial Sequence: Synthetic oligonucleotide
  Antisense strand to SEQ ID NO: 2481458
aucucuccugacagccugg

SEQ ID NO: 2481460 - RNA, 19 nt, Artificial Sequence
  Description of Artificial Sequence: Synthetic oligonucleotide
  Sense strand starting at position 358 of SEQ ID NO: 1887566
gaaacacuugucugacguu

SEQ ID NO: 2481461 - RNA, 19 nt, Artificial Sequence
  Description of Artificial Sequence: Synthetic oligonucleotide
  Antisense strand to SEQ ID NO: 2481460
aacgucagacaaguguuuc

SEQ ID NO: 2481462 - RNA, 19 nt, Artificial Sequence
  Description of Artificial Sequence: Synthetic oligonucleotide
  Sense strand starting at position 492 of SEQ ID NO: 1887566
accuguggucccugaaauu

SEQ ID NO: 2481463 - RNA, 19 nt, Artificial Sequence
  Description of Artificial Sequence: Synthetic oligonucleotide
  Antisense strand to SEQ ID NO: 2481462
aauuucagggaccacaggu

SEQ ID NO: 2481464 - RNA, 19 nt, Artificial Sequence
  Description of Artificial Sequence: Synthetic oligonucleotide
  Sense strand starting at position 505 of SEQ ID NO: 1887566
gaaauucuguuaguuugau

SEQ ID NO: 2481465 - RNA, 19 nt, Artificial Sequence
  Description of Artificial Sequence: Synthetic oligonucleotide
  Antisense strand to SEQ ID NO: 2481464
aucaaacuaacagaauuuc

SEQ ID NO: 2481466 - RNA, 19 nt, Artificial Sequence
  Description of Artificial Sequence: Synthetic oligonucleotide
  Sense strand starting at position 514 of SEQ ID NO: 1887566
uuaguuugaugucuaacaa

SEQ ID NO: 2481467 - RNA, 19 nt, Artificial Sequence
  Description of Artificial Sequence: Synthetic oligonucleotide
  Antisense strand to SEQ ID NO: 2481466
uuguuagacaucaaacuaa

SEQ ID NO: 2481468 - RNA, 19 nt, Artificial Sequence
  Description of Artificial Sequence: Synthetic oligonucleotide
  Sense strand starting at position 577 of SEQ ID NO: 1887566
ugaaaugucuauccaugac

SEQ ID NO: 2481469 - RNA, 19 nt, Artificial Sequence
  Description of Artificial Sequence: Synthetic oligonucleotide
  Antisense strand to SEQ ID NO: 2481468
gucauggauagacauuuca

SEQ ID NO: 2481470 - RNA, 19 nt, Artificial Sequence
  Description of Artificial Sequence: Synthetic oligonucleotide
  Sense strand starting at position 626 of SEQ ID NO: 1887566
caaagugaauccuaugaga

SEQ ID NO: 2481471 - RNA, 19 nt, Artificial Sequence
  Description of Artificial Sequence: Synthetic oligonucleotide
  Antisense strand to SEQ ID NO: 2481470
ucucauaggauucacuuug

SEQ ID NO: 2481472 - RNA, 19 nt, Artificial Sequence
  Description of Artificial Sequence: Synthetic oligonucleotide
  Sense strand starting at position 629 of SEQ ID NO: 1887566
agugaauccuaugagauaa

SEQ ID NO: 2481473 - RNA, 19 nt, Artificial Sequence
  Description of Artificial Sequence: Synthetic oligonucleotide
  Antisense strand to SEQ ID NO: 2481472
uuaucucauaggauucacu

SEQ ID NO: 2481474 - RNA, 19 nt, Artificial Sequence
  Description of Artificial Sequence: Synthetic oligonucleotide
  Sense strand starting at position 658 of SEQ ID NO: 1887566
acgcuaagacaucauucuu

SEQ ID NO: 2481475 - RNA, 19 nt, Artificial Sequence
  Description of Artificial Sequence: Synthetic oligonucleotide
  Antisense strand to SEQ ID NO: 2481474
aagaaugaugucuuagcgu

SEQ ID NO: 2481476 - RNA, 19 nt, Artificial Sequence
  Description of Artificial Sequence: Synthetic oligonucleotide
  Sense strand starting at position 751 of SEQ ID NO: 1887566
gcaguuccuucugauuuaa

SEQ ID NO: 2481477 - RNA, 19 nt, Artificial Sequence
  Description of Artificial Sequence: Synthetic oligonucleotide
  Antisense strand to SEQ ID NO: 2481476
uuaaaucagaaggaacugc

SEQ ID NO: 2481478 - RNA, 19 nt, Artificial Sequence
  Description of Artificial Sequence: Synthetic oligonucleotide
  Sense strand starting at position 831 of SEQ ID NO: 1887566
gccugaauacuagguaauu

SEQ ID NO: 2481479 - RNA, 19 nt, Artificial Sequence
  Description of Artificial Sequence: Synthetic oligonucleotide
  Antisense strand to SEQ ID NO: 2481478
aauuaccuaguauucaggc

SEQ ID NO: 2481480 - RNA, 19 nt, Artificial Sequence
  Description of Artificial Sequence: Synthetic oligonucleotide
  Sense strand starting at position 832 of SEQ ID NO: 1887566
ccugaauacuagguaauuc

SEQ ID NO: 2481481 - RNA, 19 nt, Artificial Sequence
  Description of Artificial Sequence: Synthetic oligonucleotide
  Antisense strand to SEQ ID NO: 2481480
gaauuaccuaguauucagg

SEQ ID NO: 2481482 - RNA, 19 nt, Artificial Sequence
  Description of Artificial Sequence: Synthetic oligonucleotide
  Sense strand starting at position 841 of SEQ ID NO: 1887566
uagguaauucuauggaauu

SEQ ID NO: 2481483 - RNA, 19 nt, Artificial Sequence
  Description of Artificial Sequence: Synthetic oligonucleotide
  Antisense strand to SEQ ID NO: 2481482
aauuccauagaauuaccua

SEQ ID NO: 2481484 - RNA, 19 nt, Artificial Sequence
  Description of Artificial Sequence: Synthetic oligonucleotide
  Sense strand starting at position 843 of SEQ ID NO: 1887566
gguaauucuauggaauugu

SEQ ID NO: 2481485 - RNA, 19 nt, Artificial Sequence
  Description of Artificial Sequence: Synthetic oligonucleotide
  Antisense strand to SEQ ID NO: 2481484
acaauuccauagaauuacc

SEQ ID NO: 2481486 - RNA, 19 nt, Artificial Sequence
  Description of Artificial Sequence: Synthetic oligonucleotide
  Sense strand starting at position 884 of SEQ ID NO: 1887566
ugauauugcggcuagaaca

SEQ ID NO: 2481487 - RNA, 19 nt, Artificial Sequence
  Description of Artificial Sequence: Synthetic oligonucleotide
  Antisense strand to SEQ ID NO: 2481486
uguucuagccgcaauauca

SEQ ID NO: 2481488 - RNA, 19 nt, Artificial Sequence
  Description of Artificial Sequence: Synthetic oligonucleotide
  Sense strand starting at position 891 of SEQ ID NO: 1887566
gcggcuagaacagaauauu

SEQ ID NO: 2481489 - RNA, 19 nt, Artificial Sequence
  Description of Artificial Sequence: Synthetic oligonucleotide
  Antisense strand to SEQ ID NO: 2481488
aauauucuguucuagccgc

SEQ ID NO: 2481490 - RNA, 19 nt, Artificial Sequence
  Description of Artificial Sequence: Synthetic oligonucleotide
  Sense strand starting at position 954 of SEQ ID NO: 1887566
acaugaugucuucgacuua

SEQ ID NO: 2481491 - RNA, 19 nt, Artificial Sequence
  Description of Artificial Sequence: Synthetic oligonucleotide
  Antisense strand to SEQ ID NO: 2481490
uaagucgaagacaucaugu

SEQ ID NO: 2481492 - RNA, 19 nt, Artificial Sequence
  Description of Artificial Sequence: Synthetic oligonucleotide
  Sense strand starting at position 1155 of SEQ ID NO: 1887566
gucucagugcugggaggau

SEQ ID NO: 2481493 - RNA, 19 nt, Artificial Sequence
  Description of Artificial Sequence: Synthetic oligonucleotide
  Antisense strand to SEQ ID NO: 2481492
auccucccagcacugagac

SEQ ID NO: 2481494 - RNA, 19 nt, Artificial Sequence
  Description of Artificial Sequence: Synthetic oligonucleotide
  Sense strand starting at position 1208 of SEQ ID NO: 1887566
gagaguucuuaacccuguu

SEQ ID NO: 2481495 - RNA, 19 nt, Artificial Sequence
  Description of Artificial Sequence: Synthetic oligonucleotide
  Antisense strand to SEQ ID NO: 2481494
aacaggguuaagaacucuc

SEQ ID NO: 2481496 - RNA, 19 nt, Artificial Sequence
  Description of Artificial Sequence: Synthetic oligonucleotide
  Sense strand starting at position 1269 of SEQ ID NO: 1887566
aggaacauauccuagagau

SEQ ID NO: 2481497 - RNA, 19 nt, Artificial Sequence
  Description of Artificial Sequence: Synthetic oligonucleotide
  Antisense strand to SEQ ID NO: 2481496
aucucuaggauauguuccu

SEQ ID NO: 2481498 - RNA, 19 nt, Artificial Sequence
  Description of Artificial Sequence: Synthetic oligonucleotide
  Sense strand starting at position 1477 of SEQ ID NO: 1887566
aggugaaacugucaaacaa

SEQ ID NO: 2481499 - RNA, 19 nt, Artificial Sequence
  Description of Artificial Sequence: Synthetic oligonucleotide
  Antisense strand to SEQ ID NO: 2481498
uuguuugacaguuucaccu

SEQ ID NO: 2481500 - RNA, 19 nt, Artificial Sequence
  Description of Artificial Sequence: Synthetic oligonucleotide
  Sense strand starting at position 1502 of SEQ ID NO: 1887566
agcccaaauccaggugaaa

SEQ ID NO: 2481501 - RNA, 19 nt, Artificial Sequence
  Description of Artificial Sequence: Synthetic oligonucleotide
  Antisense strand to SEQ ID NO: 2481500
uuucaccuggauuugggcu

SEQ ID NO: 2481502 - RNA, 19 nt, Artificial Sequence
  Description of Artificial Sequence: Synthetic oligonucleotide
  Sense strand starting at position 2090 of SEQ ID NO: 1887566
aguuccuauggccaggaaa

SEQ ID NO: 2481503 - RNA, 19 nt, Artificial Sequence
  Description of Artificial Sequence: Synthetic oligonucleotide
  Antisense strand to SEQ ID NO: 2481502
uuuccuggccauaggaacu

SEQ ID NO: 2481504 - RNA, 19 nt, Artificial Sequence
  Description of Artificial Sequence: Synthetic oligonucleotide
  Sense strand starting at position 2137 of SEQ ID NO: 1887566
cgccuucuccuccaggaaa

SEQ ID NO: 2481505 - RNA, 19 nt, Artificial Sequence
  Description of Artificial Sequence: Synthetic oligonucleotide
  Antisense strand to SEQ ID NO: 2481504
uuuccuggaggagaaggcg

SEQ ID NO: 2481506 - RNA, 19 nt, Artificial Sequence
  Description of Artificial Sequence: Synthetic oligonucleotide
  Sense strand starting at position 2361 of SEQ ID NO: 1887566
gccugcucuggugaacaaa

SEQ ID NO: 2481507 - RNA, 19 nt, Artificial Sequence
  Description of Artificial Sequence: Synthetic oligonucleotide
  Antisense strand to SEQ ID NO: 2481506
uuuguucaccagagcaggc

SEQ ID NO: 2481508 - RNA, 19 nt, Artificial Sequence
  Description of Artificial Sequence: Synthetic oligonucleotide
  Sense strand starting at position 2831 of SEQ ID NO: 1887566
ccaccugaagucugugagu

SEQ ID NO: 2481509 - RNA, 19 nt, Artificial Sequence
  Description of Artificial Sequence: Synthetic oligonucleotide
  Antisense strand to SEQ ID NO: 2481508
acucacagacuucaggugg

SEQ ID NO: 2481510 - RNA, 19 nt, Artificial Sequence
  Description of Artificial Sequence: Synthetic oligonucleotide
  Sense strand starting at position 2833 of SEQ ID NO: 1887566
accugaagucugugaguuc

SEQ ID NO: 2481511 - RNA, 19 nt, Artificial Sequence
  Description of Artificial Sequence: Synthetic oligonucleotide
  Antisense strand to SEQ ID NO: 2481510
gaacucacagacuucaggu

SEQ ID NO: 2481512 - RNA, 19 nt, Artificial Sequence
  Description of Artificial Sequence: Synthetic oligonucleotide
  Sense strand starting at position 2836 of SEQ ID NO: 1887566
ugaagucugugaguucugu

SEQ ID NO: 2481513 - RNA, 19 nt, Artificial Sequence
  Description of Artificial Sequence: Synthetic oligonucleotide
  Antisense strand to SEQ ID NO: 2481512
acagaacucacagacuuca

SEQ ID NO: 2481514 - RNA, 19 nt, Artificial Sequence
  Description of Artificial Sequence: Synthetic oligonucleotide
  Sense strand starting at position 3033 of SEQ ID NO: 1887566
cugcuccaacuguguuauu

SEQ ID NO: 2481515 - RNA, 19 nt, Artificial Sequence
  Description of Artificial Sequence: Synthetic oligonucleotide
  Antisense strand to SEQ ID NO: 2481514
aauaacacaguuggagcag

SEQ ID NO: 2481516 - RNA, 19 nt, Artificial Sequence
  Description of Artificial Sequence: Synthetic oligonucleotide
  Sense strand starting at position 3034 of SEQ ID NO: 1887566
ugcuccaacuguguuauuu

SEQ ID NO: 2481517 - RNA, 19 nt, Artificial Sequence
  Description of Artificial Sequence: Synthetic oligonucleotide
  Antisense strand to SEQ ID NO: 2481516
aaauaacacaguuggagca

SEQ ID NO: 2481518 - RNA, 19 nt, Artificial Sequence
  Description of Artificial Sequence: Synthetic oligonucleotide
  Sense strand starting at position 3097 of SEQ ID NO: 1887566
aagcucugccuagaauguu

SEQ ID NO: 2481519 - RNA, 19 nt, Artificial Sequence
  Description of Artificial Sequence: Synthetic oligonucleotide
  Antisense strand to SEQ ID NO: 2481518
aacauucuaggcagagcuu

SEQ ID NO: 2481520 - RNA, 19 nt, Artificial Sequence
  Description of Artificial Sequence: Synthetic oligonucleotide
  Sense strand starting at position 3174 of SEQ ID NO: 1887566
gguugucccugaucauucu

SEQ ID NO: 2481521 - RNA, 19 nt, Artificial Sequence
  Description of Artificial Sequence: Synthetic oligonucleotide
  Antisense strand to SEQ ID NO: 2481520
agaaugaucagggacaacc

SEQ ID NO: 2481522 - RNA, 19 nt, Artificial Sequence
  Description of Artificial Sequence: Synthetic oligonucleotide
  Sense strand starting at position 3183 of SEQ ID NO: 1887566
ugaucauucuguuuaaguc

SEQ ID NO: 2481523 - RNA, 19 nt, Artificial Sequence
  Description of Artificial Sequence: Synthetic oligonucleotide
  Antisense strand to SEQ ID NO: 2481522
gacuuaaacagaaugauca

SEQ ID NO: 2481524 - RNA, 19 nt, Artificial Sequence
  Description of Artificial Sequence: Synthetic oligonucleotide
  Sense strand starting at position 3494 of SEQ ID NO: 1887566
acagaccucugucagacaa

SEQ ID NO: 2481525 - RNA, 19 nt, Artificial Sequence
  Description of Artificial Sequence: Synthetic oligonucleotide
  Antisense strand to SEQ ID NO: 2481524
uugucugacagaggucugu

SEQ ID NO: 2481526 - RNA, 19 nt, Artificial Sequence
  Description of Artificial Sequence: Synthetic oligonucleotide
  Sense strand starting at position 3718 of SEQ ID NO: 1887566
ggcuucuagcagugggaga

SEQ ID NO: 2481527 - RNA, 19 nt, Artificial Sequence
  Description of Artificial Sequence: Synthetic oligonucleotide
  Antisense strand to SEQ ID NO: 2481526
ucucccacugcuagaagcc

SEQ ID NO: 2481528 - RNA, 19 nt, Artificial Sequence
  Description of Artificial Sequence: Synthetic oligonucleotide
  Sense strand starting at position 3773 of SEQ ID NO: 1887566
ugggauuagcacuaagcau

SEQ ID NO: 2481529 - RNA, 19 nt, Artificial Sequence
  Description of Artificial Sequence: Synthetic oligonucleotide
  Antisense strand to SEQ ID NO: 2481528
augcuuagugcuaauccca

SEQ ID NO: 2481530 - RNA, 19 nt, Artificial Sequence
  Description of Artificial Sequence: Synthetic oligonucleotide
  Sense strand starting at position 3784 of SEQ ID NO: 1887566
cuaagcaugucuuugguca

SEQ ID NO: 2481531 - RNA, 19 nt, Artificial Sequence
  Description of Artificial Sequence: Synthetic oligonucleotide
  Antisense strand to SEQ ID NO: 2481530
ugaccaaagacaugcuuag

SEQ ID NO: 2481532 - RNA, 19 nt, Artificial Sequence
  Description of Artificial Sequence: Synthetic oligonucleotide
  Sense strand starting at position 3845 of SEQ ID NO: 1887566
cuccaugcucuugggagau

SEQ ID NO: 2481533 - RNA, 19 nt, Artificial Sequence
  Description of Artificial Sequence: Synthetic oligonucleotide
  Antisense strand to SEQ ID NO: 2481532
aucucccaagagcauggag

SEQ ID NO: 2481534 - RNA, 19 nt, Artificial Sequence
  Description of Artificial Sequence: Synthetic oligonucleotide
  Sense strand starting at position 26 of SEQ ID NO: 1887567
uaguguuaguacccaagga

SEQ ID NO: 2481535 - RNA, 19 nt, Artificial Sequence
  Description of Artificial Sequence: Synthetic oligonucleotide
  Antisense strand to SEQ ID NO: 2481534
uccuuggguacuaacacua

SEQ ID NO: 2481536 - RNA, 19 nt, Artificial Sequence
  Description of Artificial Sequence: Synthetic oligonucleotide
  Sense strand starting at position 27 of SEQ ID NO: 1887567
aguguuaguacccaaggau

SEQ ID NO: 2481537 - RNA, 19 nt, Artificial Sequence
  Description of Artificial Sequence: Synthetic oligonucleotide
  Antisense strand to SEQ ID NO: 2481536
auccuuggguacuaacacu

SEQ ID NO: 2481538 - RNA, 19 nt, Artificial Sequence
  Description of Artificial Sequence: Synthetic oligonucleotide
  Sense strand starting at position 40 of SEQ ID NO: 1887567
aaggaugacuucuauggga

SEQ ID NO: 2481539 - RNA, 19 nt, Artificial Sequence
  Description of Artificial Sequence: Synthetic oligonucleotide
  Antisense strand to SEQ ID NO: 2481538
ucccauagaagucauccuu

SEQ ID NO: 2481540 - RNA, 19 nt, Artificial Sequence
  Description of Artificial Sequence: Synthetic oligonucleotide
  Sense strand starting at position 45 of SEQ ID NO: 1887567
ugacuucuaugggagagau

SEQ ID NO: 2481541 - RNA, 19 nt, Artificial Sequence
  Description of Artificial Sequence: Synthetic oligonucleotide
  Antisense strand to SEQ ID NO: 2481540
aucucucccauagaaguca

SEQ ID NO: 2481542 - RNA, 19 nt, Artificial Sequence
  Description of Artificial Sequence: Synthetic oligonucleotide
  Sense strand starting at position 60 of SEQ ID NO: 1887567
agauacuuggucugggaau

SEQ ID NO: 2481543 - RNA, 19 nt, Artificial Sequence
  Description of Artificial Sequence: Synthetic oligonucleotide
  Antisense strand to SEQ ID NO: 2481542
auucccagaccaaguaucu

SEQ ID NO: 2481544 - RNA, 19 nt, Artificial Sequence
  Description of Artificial Sequence: Synthetic oligonucleotide
  Sense strand starting at position 310 of SEQ ID NO: 1887567
gaugguuagauggguggau

SEQ ID NO: 2481545 - RNA, 19 nt, Artificial Sequence
  Description of Artificial Sequence: Synthetic oligonucleotide
  Antisense strand to SEQ ID NO: 2481544
auccacccaucuaaccauc

SEQ ID NO: 2481546 - RNA, 19 nt, Artificial Sequence
  Description of Artificial Sequence: Synthetic oligonucleotide
  Sense strand starting at position 471 of SEQ ID NO: 1887567
ggguggauuggugagugaa

SEQ ID NO: 2481547 - RNA, 19 nt, Artificial Sequence
  Description of Artificial Sequence: Synthetic oligonucleotide
  Antisense strand to SEQ ID NO: 2481546
uucacucaccaauccaccc

SEQ ID NO: 2481548 - RNA, 19 nt, Artificial Sequence
  Description of Artificial Sequence: Synthetic oligonucleotide
  Sense strand starting at position 474 of SEQ ID NO: 1887567
uggauuggugagugaagga

SEQ ID NO: 2481549 - RNA, 19 nt, Artificial Sequence
  Description of Artificial Sequence: Synthetic oligonucleotide
  Antisense strand to SEQ ID NO: 2481548
uccuucacucaccaaucca

SEQ ID NO: 2481550 - RNA, 19 nt, Artificial Sequence
  Description of Artificial Sequence: Synthetic oligonucleotide
  Sense strand starting at position 620 of SEQ ID NO: 1887567
gcaggugauggaugaauga

SEQ ID NO: 2481551 - RNA, 19 nt, Artificial Sequence
  Description of Artificial Sequence: Synthetic oligonucleotide
  Antisense strand to SEQ ID NO: 2481550
ucauucauccaucaccugc

SEQ ID NO: 2481552 - RNA, 19 nt, Artificial Sequence
  Description of Artificial Sequence: Synthetic oligonucleotide
  Sense strand starting at position 769 of SEQ ID NO: 1887567
gguagauggauguaugagu

SEQ ID NO: 2481553 - RNA, 19 nt, Artificial Sequence
  Description of Artificial Sequence: Synthetic oligonucleotide
  Antisense strand to SEQ ID NO: 2481552
acucauacauccaucuacc

SEQ ID NO: 2481554 - RNA, 19 nt, Artificial Sequence
  Description of Artificial Sequence: Synthetic oligonucleotide
  Sense strand starting at position 828 of SEQ ID NO: 1887567
aguagaugaagcgauggau

SEQ ID NO: 2481555 - RNA, 19 nt, Artificial Sequence
  Description of Artificial Sequence: Synthetic oligonucleotide
  Antisense strand to SEQ ID NO: 2481554
auccaucgcuucaucuacu

SEQ ID NO: 2481556 - RNA, 19 nt, Artificial Sequence
  Description of Artificial Sequence: Synthetic oligonucleotide
  Sense strand starting at position 847 of SEQ ID NO: 1887567
ggauggguggauugaguaa

SEQ ID NO: 2481557 - RNA, 19 nt, Artificial Sequence
  Description of Artificial Sequence: Synthetic oligonucleotide
  Antisense strand to SEQ ID NO: 2481556
uuacucaauccacccaucc

SEQ ID NO: 2481558 - RNA, 19 nt, Artificial Sequence
  Description of Artificial Sequence: Synthetic oligonucleotide
  Sense strand starting at position 1246 of SEQ ID NO: 1887567
guggaugagugaguggaua

SEQ ID NO: 2481559 - RNA, 19 nt, Artificial Sequence
  Description of Artificial Sequence: Synthetic oligonucleotide
  Antisense strand to SEQ ID NO: 2481558
uauccacucacucauccac

SEQ ID NO: 2481560 - RNA, 19 nt, Artificial Sequence
  Description of Artificial Sequence: Synthetic oligonucleotide
  Sense strand starting at position 1291 of SEQ ID NO: 1887567
uggguaauggguggacaga

SEQ ID NO: 2481561 - RNA, 19 nt, Artificial Sequence
  Description of Artificial Sequence: Synthetic oligonucleotide
  Antisense strand to SEQ ID NO: 2481560
ucuguccacccauuaccca

SEQ ID NO: 2481562 - RNA, 19 nt, Artificial Sequence
  Description of Artificial Sequence: Synthetic oligonucleotide
  Sense strand starting at position 1576 of SEQ ID NO: 1887567
guggauggaugagugaaua

SEQ ID NO: 2481563 - RNA, 19 nt, Artificial Sequence
  Description of Artificial Sequence: Synthetic oligonucleotide
  Antisense strand to SEQ ID NO: 2481562
uauucacucauccauccac

SEQ ID NO: 2481564 - RNA, 19 nt, Artificial Sequence
  Description of Artificial Sequence: Synthetic oligonucleotide
  Sense strand starting at position 1624 of SEQ ID NO: 1887567
aaaguuuaggagugaaggu

SEQ ID NO: 2481565 - RNA, 19 nt, Artificial Sequence
  Description of Artificial Sequence: Synthetic oligonucleotide
  Antisense strand to SEQ ID NO: 2481564
accuucacuccuaaacuuu

SEQ ID NO: 2481566 - RNA, 19 nt, Artificial Sequence
  Description of Artificial Sequence: Synthetic oligonucleotide
  Sense strand starting at position 1756 of SEQ ID NO: 1887567
agaggugaugcccacaguu

SEQ ID NO: 2481567 - RNA, 19 nt, Artificial Sequence
  Description of Artificial Sequence: Synthetic oligonucleotide
  Antisense strand to SEQ ID NO: 2481566
aacugugggcaucaccucu

SEQ ID NO: 2481568 - RNA, 19 nt, Artificial Sequence
  Description of Artificial Sequence: Synthetic oligonucleotide
  Sense strand starting at position 2039 of SEQ ID NO: 1887567
ggacuuccugaguaacggu

SEQ ID NO: 2481569 - RNA, 19 nt, Artificial Sequence
  Description of Artificial Sequence: Synthetic oligonucleotide
  Antisense strand to SEQ ID NO: 2481568
accguuacucaggaagucc

SEQ ID NO: 2481570 - RNA, 19 nt, Artificial Sequence
  Description of Artificial Sequence: Synthetic oligonucleotide
  Sense strand starting at position 2079 of SEQ ID NO: 1887567
cacagaugguuaucagcga

SEQ ID NO: 2481571 - RNA, 19 nt, Artificial Sequence
  Description of Artificial Sequence: Synthetic oligonucleotide
  Antisense strand to SEQ ID NO: 2481570
ucgcugauaaccaucugug

SEQ ID NO: 2481572 - RNA, 19 nt, Artificial Sequence
  Description of Artificial Sequence: Synthetic oligonucleotide
  Sense strand starting at position 2099 of SEQ ID NO: 1887567
ccacauuucucagaagaga

SEQ ID NO: 2481573 - RNA, 19 nt, Artificial Sequence
  Description of Artificial Sequence: Synthetic oligonucleotide
  Antisense strand to SEQ ID NO: 2481572
ucucuucugagaaaugugg

SEQ ID NO: 2481574 - RNA, 19 nt, Artificial Sequence
  Description of Artificial Sequence: Synthetic oligonucleotide
  Sense strand starting at position 2297 of SEQ ID NO: 1887567
uuuggagauguuuggcaau

SEQ ID NO: 2481575 - RNA, 19 nt, Artificial Sequence
  Description of Artificial Sequence: Synthetic oligonucleotide
  Antisense strand to SEQ ID NO: 2481574
auugccaaacaucuccaaa

SEQ ID NO: 2481576 - RNA, 19 nt, Artificial Sequence
  Description of Artificial Sequence: Synthetic oligonucleotide
  Sense strand starting at position 2300 of SEQ ID NO: 1887567
ggagauguuuggcaauuuc

SEQ ID NO: 2481577 - RNA, 19 nt, Artificial Sequence
  Description of Artificial Sequence: Synthetic oligonucleotide
  Antisense strand to SEQ ID NO: 2481576
gaaauugccaaacaucucc

SEQ ID NO: 2481578 - RNA, 19 nt, Artificial Sequence
  Description of Artificial Sequence: Synthetic oligonucleotide
  Sense strand starting at position 2412 of SEQ ID NO: 1887567
acaguagaagcuugggaaa

SEQ ID NO: 2481579 - RNA, 19 nt, Artificial Sequence
  Description of Artificial Sequence: Synthetic oligonucleotide
  Antisense strand to SEQ ID NO: 2481578
uuucccaagcuucuacugu

SEQ ID NO: 2481580 - RNA, 19 nt, Artificial Sequence
  Description of Artificial Sequence: Synthetic oligonucleotide
  Sense strand starting at position 2474 of SEQ ID NO: 1887567
gggcguaagacucauccuu

SEQ ID NO: 2481581 - RNA, 19 nt, Artificial Sequence
  Description of Artificial Sequence: Synthetic oligonucleotide
  Antisense strand to SEQ ID NO: 2481580
aaggaugagucuuacgccc

SEQ ID NO: 2481582 - RNA, 19 nt, Artificial Sequence
  Description of Artificial Sequence: Synthetic oligonucleotide
  Sense strand starting at position 2498 of SEQ ID NO: 1887567
gcgggaaugacauggcaaa

SEQ ID NO: 2481583 - RNA, 19 nt, Artificial Sequence
  Description of Artificial Sequence: Synthetic oligonucleotide
  Antisense strand to SEQ ID NO: 2481582
uuugccaugucauucccgc

SEQ ID NO: 2481584 - RNA, 19 nt, Artificial Sequence
  Description of Artificial Sequence: Synthetic oligonucleotide
  Sense strand starting at position 2499 of SEQ ID NO: 1887567
cgggaaugacauggcaaau

SEQ ID NO: 2481585 - RNA, 19 nt, Artificial Sequence
  Description of Artificial Sequence: Synthetic oligonucleotide
  Antisense strand to SEQ ID NO: 2481584
auuugccaugucauucccg

SEQ ID NO: 2481586 - RNA, 19 nt, Artificial Sequence
  Description of Artificial Sequence: Synthetic oligonucleotide
  Sense strand starting at position 2535 of SEQ ID NO: 1887567
cuauucuugcugucgcuau

SEQ ID NO: 2481587 - RNA, 19 nt, Artificial Sequence
  Description of Artificial Sequence: Synthetic oligonucleotide
  Antisense strand to SEQ ID NO: 2481586
auagcgacagcaagaauag

SEQ ID NO: 2481588 - RNA, 19 nt, Artificial Sequence
  Description of Artificial Sequence: Synthetic oligonucleotide
  Sense strand starting at position 2537 of SEQ ID NO: 1887567
auucuugcugucgcuauua

SEQ ID NO: 2481589 - RNA, 19 nt, Artificial Sequence
  Description of Artificial Sequence: Synthetic oligonucleotide
  Antisense strand to SEQ ID NO: 2481588
uaauagcgacagcaagaau

SEQ ID NO: 2481590 - RNA, 19 nt, Artificial Sequence
  Description of Artificial Sequence: Synthetic oligonucleotide
  Sense strand starting at position 2563 of SEQ ID NO: 1887567
uggcauaucccagacguga

SEQ ID NO: 2481591 - RNA, 19 nt, Artificial Sequence
  Description of Artificial Sequence: Synthetic oligonucleotide
  Antisense strand to SEQ ID NO: 2481590
ucacgucugggauaugcca

SEQ ID NO: 2481592 - RNA, 19 nt, Artificial Sequence
  Description of Artificial Sequence: Synthetic oligonucleotide
  Sense strand starting at position 2565 of SEQ ID NO: 1887567
gcauaucccagacgugaug

SEQ ID NO: 2481593 - RNA, 19 nt, Artificial Sequence
  Description of Artificial Sequence: Synthetic oligonucleotide
  Antisense strand to SEQ ID NO: 2481592
caucacgucugggauaugc

SEQ ID NO: 2481594 - RNA, 19 nt, Artificial Sequence
  Description of Artificial Sequence: Synthetic oligonucleotide
  Sense strand starting at position 2859 of SEQ ID NO: 1887567
agggaucccugcucuugaa

SEQ ID NO: 2481595 - RNA, 19 nt, Artificial Sequence
  Description of Artificial Sequence: Synthetic oligonucleotide
  Antisense strand to SEQ ID NO: 2481594
uucaagagcagggaucccu

SEQ ID NO: 2481596 - RNA, 19 nt, Artificial Sequence
  Description of Artificial Sequence: Synthetic oligonucleotide
  Sense strand starting at position 2893 of SEQ ID NO: 1887567
ccagcauggcuaugaacuu

SEQ ID NO: 2481597 - RNA, 19 nt, Artificial Sequence
  Description of Artificial Sequence: Synthetic oligonucleotide
  Antisense strand to SEQ ID NO: 2481596
aaguucauagccaugcugg

SEQ ID NO: 2481598 - RNA, 19 nt, Artificial Sequence
  Description of Artificial Sequence: Synthetic oligonucleotide
  Sense strand starting at position 2965 of SEQ ID NO: 1887567
gcauuuguuuggucaggac

SEQ ID NO: 2481599 - RNA, 19 nt, Artificial Sequence
  Description of Artificial Sequence: Synthetic oligonucleotide
  Antisense strand to SEQ ID NO: 2481598
guccugaccaaacaaaugc

SEQ ID NO: 2481600 - RNA, 19 nt, Artificial Sequence
  Description of Artificial Sequence: Synthetic oligonucleotide
  Sense strand starting at position 3073 of SEQ ID NO: 1887567
cacagacacgugcauaaua

SEQ ID NO: 2481601 - RNA, 19 nt, Artificial Sequence
  Description of Artificial Sequence: Synthetic oligonucleotide
  Antisense strand to SEQ ID NO: 2481600
uauuaugcacgugucugug

SEQ ID NO: 2481602 - RNA, 19 nt, Artificial Sequence
  Description of Artificial Sequence: Synthetic oligonucleotide
  Sense strand starting at position 3075 of SEQ ID NO: 1887567
cagacacgugcauaauaca

SEQ ID NO: 2481603 - RNA, 19 nt, Artificial Sequence
  Description of Artificial Sequence: Synthetic oligonucleotide
  Antisense strand to SEQ ID NO: 2481602
uguauuaugcacgugucug

SEQ ID NO: 2481604 - RNA, 19 nt, Artificial Sequence
  Description of Artificial Sequence: Synthetic oligonucleotide
  Sense strand starting at position 3681 of SEQ ID NO: 1887567
cgaccucaucuggguuaau

SEQ ID NO: 2481605 - RNA, 19 nt, Artificial Sequence
  Description of Artificial Sequence: Synthetic oligonucleotide
  Antisense strand to SEQ ID NO: 2481604
auuaacccagaugaggucg

SEQ ID NO: 2481606 - RNA, 19 nt, Artificial Sequence
  Description of Artificial Sequence: Synthetic oligonucleotide
  Sense strand starting at position 3682 of SEQ ID NO: 1887567
gaccucaucuggguuaauu

SEQ ID NO: 2481607 - RNA, 19 nt, Artificial Sequence
  Description of Artificial Sequence: Synthetic oligonucleotide
  Antisense strand to SEQ ID NO: 2481606
aauuaacccagaugagguc

SEQ ID NO: 2481608 - RNA, 19 nt, Artificial Sequence
  Description of Artificial Sequence: Synthetic oligonucleotide
  Sense strand starting at position 3752 of SEQ ID NO: 1887567
ggguuaggucuugaacgua

SEQ ID NO: 2481609 - RNA, 19 nt, Artificial Sequence
  Description of Artificial Sequence: Synthetic oligonucleotide
  Antisense strand to SEQ ID NO: 2481608
uacguucaagaccuaaccc

SEQ ID NO: 2481610 - RNA, 19 nt, Artificial Sequence
  Description of Artificial Sequence: Synthetic oligonucleotide
  Sense strand starting at position 3755 of SEQ ID NO: 1887567
uuaggucuugaacguauga

SEQ ID NO: 2481611 - RNA, 19 nt, Artificial Sequence
  Description of Artificial Sequence: Synthetic oligonucleotide
  Antisense strand to SEQ ID NO: 2481610
ucauacguucaagaccuaa

SEQ ID NO: 2481612 - RNA, 19 nt, Artificial Sequence
  Description of Artificial Sequence: Synthetic oligonucleotide
  Sense strand starting at position 3757 of SEQ ID NO: 1887567
aggucuugaacguaugaau

SEQ ID NO: 2481613 - RNA, 19 nt, Artificial Sequence
  Description of Artificial Sequence: Synthetic oligonucleotide
  Antisense strand to SEQ ID NO: 2481612
auucauacguucaagaccu

SEQ ID NO: 2481614 - RNA, 19 nt, Artificial Sequence
  Description of Artificial Sequence: Synthetic oligonucleotide
  Sense strand starting at position 202 of SEQ ID NO: 1887568
gggugugguucaggugauu

SEQ ID NO: 2481615 - RNA, 19 nt, Artificial Sequence
  Description of Artificial Sequence: Synthetic oligonucleotide
  Antisense strand to SEQ ID NO: 2481614
aaucaccugaaccacaccc

SEQ ID NO: 2481616 - RNA, 19 nt, Artificial Sequence
  Description of Artificial Sequence: Synthetic oligonucleotide
  Sense strand starting at position 358 of SEQ ID NO: 1887568
ugccaauagacguaaugag

SEQ ID NO: 2481617 - RNA, 19 nt, Artificial Sequence
  Description of Artificial Sequence: Synthetic oligonucleotide
  Antisense strand to SEQ ID NO: 2481616
cucauuacgucuauuggca

SEQ ID NO: 2481618 - RNA, 19 nt, Artificial Sequence
  Description of Artificial Sequence: Synthetic oligonucleotide
  Sense strand starting at position 365 of SEQ ID NO: 1887568
agacguaaugagugcgacu

SEQ ID NO: 2481619 - RNA, 19 nt, Artificial Sequence
  Description of Artificial Sequence: Synthetic oligonucleotide
  Antisense strand to SEQ ID NO: 2481618
agucgcacucauuacgucu

SEQ ID NO: 2481620 - RNA, 19 nt, Artificial Sequence
  Description of Artificial Sequence: Synthetic oligonucleotide
  Sense strand starting at position 367 of SEQ ID NO: 1887568
acguaaugagugcgacuca

SEQ ID NO: 2481621 - RNA, 19 nt, Artificial Sequence
  Description of Artificial Sequence: Synthetic oligonucleotide
  Antisense strand to SEQ ID NO: 2481620
ugagucgcacucauuacgu

SEQ ID NO: 2481622 - RNA, 19 nt, Artificial Sequence
  Description of Artificial Sequence: Synthetic oligonucleotide
  Sense strand starting at position 514 of SEQ ID NO: 1887568
gcuggaguucucgguacug

SEQ ID NO: 2481623 - RNA, 19 nt, Artificial Sequence
  Description of Artificial Sequence: Synthetic oligonucleotide
  Antisense strand to SEQ ID NO: 2481622
caguaccgagaacuccagc

SEQ ID NO: 2481624 - RNA, 19 nt, Artificial Sequence
  Description of Artificial Sequence: Synthetic oligonucleotide
  Sense strand starting at position 516 of SEQ ID NO: 1887568
uggaguucucgguacugua

SEQ ID NO: 2481625 - RNA, 19 nt, Artificial Sequence
  Description of Artificial Sequence: Synthetic oligonucleotide
  Antisense strand to SEQ ID NO: 2481624
uacaguaccgagaacucca

SEQ ID NO: 2481626 - RNA, 19 nt, Artificial Sequence
  Description of Artificial Sequence: Synthetic oligonucleotide
  Sense strand starting at position 1025 of SEQ ID NO: 1887568
uacuuaacguccuggaaac

SEQ ID NO: 2481627 - RNA, 19 nt, Artificial Sequence
  Description of Artificial Sequence: Synthetic oligonucleotide
  Antisense strand to SEQ ID NO: 2481626
guuuccaggacguuaagua

SEQ ID NO: 2481628 - RNA, 19 nt, Artificial Sequence
  Description of Artificial Sequence: Synthetic oligonucleotide
  Sense strand starting at position 1026 of SEQ ID NO: 1887568
acuuaacguccuggaaacu

SEQ ID NO: 2481629 - RNA, 19 nt, Artificial Sequence
  Description of Artificial Sequence: Synthetic oligonucleotide
  Antisense strand to SEQ ID NO: 2481628
aguuuccaggacguuaagu

SEQ ID NO: 2481630 - RNA, 19 nt, Artificial Sequence
  Description of Artificial Sequence: Synthetic oligonucleotide
  Sense strand starting at position 1050 of SEQ ID NO: 1887568
uucgcauccuagggaagua

SEQ ID NO: 2481631 - RNA, 19 nt, Artificial Sequence
  Description of Artificial Sequence: Synthetic oligonucleotide
  Antisense strand to SEQ ID NO: 2481630
uacuucccuaggaugcgaa

SEQ ID NO: 2481632 - RNA, 19 nt, Artificial Sequence
  Description of Artificial Sequence: Synthetic oligonucleotide
  Sense strand starting at position 1051 of SEQ ID NO: 1887568
ucgcauccuagggaaguaa

SEQ ID NO: 2481633 - RNA, 19 nt, Artificial Sequence
  Description of Artificial Sequence: Synthetic oligonucleotide
  Antisense strand to SEQ ID NO: 2481632
uuacuucccuaggaugcga

SEQ ID NO: 2481634 - RNA, 19 nt, Artificial Sequence
  Description of Artificial Sequence: Synthetic oligonucleotide
  Sense strand starting at position 1183 of SEQ ID NO: 1887568
cgcgguuccugagagguga

SEQ ID NO: 2481635 - RNA, 19 nt, Artificial Sequence
  Description of Artificial Sequence: Synthetic oligonucleotide
  Antisense strand to SEQ ID NO: 2481634
ucaccucucaggaaccgcg

SEQ ID NO: 2481636 - RNA, 19 nt, Artificial Sequence
  Description of Artificial Sequence: Synthetic oligonucleotide
  Sense strand starting at position 1187 of SEQ ID NO: 1887568
guuccugagaggugacacu

SEQ ID NO: 2481637 - RNA, 19 nt, Artificial Sequence
  Description of Artificial Sequence: Synthetic oligonucleotide
  Antisense strand to SEQ ID NO: 2481636
agugucaccucucaggaac

SEQ ID NO: 2481638 - RNA, 19 nt, Artificial Sequence
  Description of Artificial Sequence: Synthetic oligonucleotide
  Sense strand starting at position 1207 of SEQ ID NO: 1887568
aggacuccugggugcuuaa

SEQ ID NO: 2481639 - RNA, 19 nt, Artificial Sequence
  Description of Artificial Sequence: Synthetic oligonucleotide
  Antisense strand to SEQ ID NO: 2481638
uuaagcacccaggaguccu

SEQ ID NO: 2481640 - RNA, 19 nt, Artificial Sequence
  Description of Artificial Sequence: Synthetic oligonucleotide
  Sense strand starting at position 1258 of SEQ ID NO: 1887568
gguucuugcugcuacagaa

SEQ ID NO: 2481641 - RNA, 19 nt, Artificial Sequence
  Description of Artificial Sequence: Synthetic oligonucleotide
  Antisense strand to SEQ ID NO: 2481640
uucuguagcagcaagaacc

SEQ ID NO: 2481642 - RNA, 19 nt, Artificial Sequence
  Description of Artificial Sequence: Synthetic oligonucleotide
  Sense strand starting at position 1454 of SEQ ID NO: 1887568
ccggucggauacugugaaa

SEQ ID NO: 2481643 - RNA, 19 nt, Artificial Sequence
  Description of Artificial Sequence: Synthetic oligonucleotide
  Antisense strand to SEQ ID NO: 2481642
uuucacaguauccgaccgg

SEQ ID NO: 2481644 - RNA, 19 nt, Artificial Sequence
  Description of Artificial Sequence: Synthetic oligonucleotide
  Sense strand starting at position 1491 of SEQ ID NO: 1887568
ggguucuucguccaggcaa

SEQ ID NO: 2481645 - RNA, 19 nt, Artificial Sequence
  Description of Artificial Sequence: Synthetic oligonucleotide
  Antisense strand to SEQ ID NO: 2481644
uugccuggacgaagaaccc

SEQ ID NO: 2481646 - RNA, 19 nt, Artificial Sequence
  Description of Artificial Sequence: Synthetic oligonucleotide
  Sense strand starting at position 1493 of SEQ ID NO: 1887568
guucuucguccaggcaauu

SEQ ID NO: 2481647 - RNA, 19 nt, Artificial Sequence
  Description of Artificial Sequence: Synthetic oligonucleotide
  Antisense strand to SEQ ID NO: 2481646
aauugccuggacgaagaac

SEQ ID NO: 2481648 - RNA, 19 nt, Artificial Sequence
  Description of Artificial Sequence: Synthetic oligonucleotide
  Sense strand starting at position 1506 of SEQ ID NO: 1887568
gcaauuagagccugagcaa

SEQ ID NO: 2481649 - RNA, 19 nt, Artificial Sequence
  Description of Artificial Sequence: Synthetic oligonucleotide
  Antisense strand to SEQ ID NO: 2481648
uugcucaggcucuaauugc

SEQ ID NO: 2481650 - RNA, 19 nt, Artificial Sequence
  Description of Artificial Sequence: Synthetic oligonucleotide
  Sense strand starting at position 1902 of SEQ ID NO: 1887568
cccgucucagaauauucua

SEQ ID NO: 2481651 - RNA, 19 nt, Artificial Sequence
  Description of Artificial Sequence: Synthetic oligonucleotide
  Antisense strand to SEQ ID NO: 2481650
uagaauauucugagacggg

SEQ ID NO: 2481652 - RNA, 19 nt, Artificial Sequence
  Description of Artificial Sequence: Synthetic oligonucleotide
  Sense strand starting at position 1971 of SEQ ID NO: 1887568
cccugaaggugaguuugua

SEQ ID NO: 2481653 - RNA, 19 nt, Artificial Sequence
  Description of Artificial Sequence: Synthetic oligonucleotide
  Antisense strand to SEQ ID NO: 2481652
uacaaacucaccuucaggg

SEQ ID NO: 2481654 - RNA, 19 nt, Artificial Sequence
  Description of Artificial Sequence: Synthetic oligonucleotide
  Sense strand starting at position 2341 of SEQ ID NO: 1887568
cagagacucacgugaagga

SEQ ID NO: 2481655 - RNA, 19 nt, Artificial Sequence
  Description of Artificial Sequence: Synthetic oligonucleotide
  Antisense strand to SEQ ID NO: 2481654
uccuucacgugagucucug

SEQ ID NO: 2481656 - RNA, 19 nt, Artificial Sequence
  Description of Artificial Sequence: Synthetic oligonucleotide
  Sense strand starting at position 2567 of SEQ ID NO: 1887568
aaagcccaguugugagaau

SEQ ID NO: 2481657 - RNA, 19 nt, Artificial Sequence
  Description of Artificial Sequence: Synthetic oligonucleotide
  Antisense strand to SEQ ID NO: 2481656
auucucacaacugggcuuu

SEQ ID NO: 2481658 - RNA, 19 nt, Artificial Sequence
  Description of Artificial Sequence: Synthetic oligonucleotide
  Sense strand starting at position 2576 of SEQ ID NO: 1887568
uugugagaauccugcuuug

SEQ ID NO: 2481659 - RNA, 19 nt, Artificial Sequence
  Description of Artificial Sequence: Synthetic oligonucleotide
  Antisense strand to SEQ ID NO: 2481658
caaagcaggauucucacaa

SEQ ID NO: 2481660 - RNA, 19 nt, Artificial Sequence
  Description of Artificial Sequence: Synthetic oligonucleotide
  Sense strand starting at position 2579 of SEQ ID NO: 1887568
ugagaauccugcuuugcaa

SEQ ID NO: 2481661 - RNA, 19 nt, Artificial Sequence
  Description of Artificial Sequence: Synthetic oligonucleotide
  Antisense strand to SEQ ID NO: 2481660
uugcaaagcaggauucuca

SEQ ID NO: 2481662 - RNA, 19 nt, Artificial Sequence
  Description of Artificial Sequence: Synthetic oligonucleotide
  Sense strand starting at position 2911 of SEQ ID NO: 1887568
aggguaugggugggauaau

SEQ ID NO: 2481663 - RNA, 19 nt, Artificial Sequence
  Description of Artificial Sequence: Synthetic oligonucleotide
  Antisense strand to SEQ ID NO: 2481662
auuaucccacccauacccu

SEQ ID NO: 2481664 - RNA, 19 nt, Artificial Sequence
  Description of Artificial Sequence: Synthetic oligonucleotide
  Sense strand starting at position 2912 of SEQ ID NO: 1887568
ggguaugggugggauaaug

SEQ ID NO: 2481665 - RNA, 19 nt, Artificial Sequence
  Description of Artificial Sequence: Synthetic oligonucleotide
  Antisense strand to SEQ ID NO: 2481664
cauuaucccacccauaccc

SEQ ID NO: 2481666 - RNA, 19 nt, Artificial Sequence
  Description of Artificial Sequence: Synthetic oligonucleotide
  Sense strand starting at position 2922 of SEQ ID NO: 1887568
gggauaaugcggugggaaa

SEQ ID NO: 2481667 - RNA, 19 nt, Artificial Sequence
  Description of Artificial Sequence: Synthetic oligonucleotide
  Antisense strand to SEQ ID NO: 2481666
uuucccaccgcauuauccc

SEQ ID NO: 2481668 - RNA, 19 nt, Artificial Sequence
  Description of Artificial Sequence: Synthetic oligonucleotide
  Sense strand starting at position 2980 of SEQ ID NO: 1887568
guaccucgguugcagagau

SEQ ID NO: 2481669 - RNA, 19 nt, Artificial Sequence
  Description of Artificial Sequence: Synthetic oligonucleotide
  Antisense strand to SEQ ID NO: 2481668
aucucugcaaccgagguac

SEQ ID NO: 2481670 - RNA, 19 nt, Artificial Sequence
  Description of Artificial Sequence: Synthetic oligonucleotide
  Sense strand starting at position 3465 of SEQ ID NO: 1887568
gguaacgauuuccagacau

SEQ ID NO: 2481671 - RNA, 19 nt, Artificial Sequence
  Description of Artificial Sequence: Synthetic oligonucleotide
  Antisense strand to SEQ ID NO: 2481670
augucuggaaaucguuacc

SEQ ID NO: 2481672 - RNA, 19 nt, Artificial Sequence
  Description of Artificial Sequence: Synthetic oligonucleotide
  Sense strand starting at position 3508 of SEQ ID NO: 1887568
gcaugcacgugcugaagua

SEQ ID NO: 2481673 - RNA, 19 nt, Artificial Sequence
  Description of Artificial Sequence: Synthetic oligonucleotide
  Antisense strand to SEQ ID NO: 2481672
uacuucagcacgugcaugc

SEQ ID NO: 2481674 - RNA, 19 nt, Artificial Sequence
  Description of Artificial Sequence: Synthetic oligonucleotide
  Sense strand starting at position 3554 of SEQ ID NO: 1887568
ugccuuugauuggcuugaa

SEQ ID NO: 2481675 - RNA, 19 nt, Artificial Sequence
  Description of Artificial Sequence: Synthetic oligonucleotide
  Antisense strand to SEQ ID NO: 2481674
uucaagccaaucaaaggca

SEQ ID NO: 2481676 - RNA, 19 nt, Artificial Sequence
  Description of Artificial Sequence: Synthetic oligonucleotide
  Sense strand starting at position 3555 of SEQ ID NO: 1887568
gccuuugauuggcuugaaa

SEQ ID NO: 2481677 - RNA, 19 nt, Artificial Sequence
  Description of Artificial Sequence: Synthetic oligonucleotide
  Antisense strand to SEQ ID NO: 2481676
uuucaagccaaucaaaggc

SEQ ID NO: 2481678 - RNA, 19 nt, Artificial Sequence
  Description of Artificial Sequence: Synthetic oligonucleotide
  Sense strand starting at position 3651 of SEQ ID NO: 1887568
gggcuuugaugagugagaa

SEQ ID NO: 2481679 - RNA, 19 nt, Artificial Sequence
  Description of Artificial Sequence: Synthetic oligonucleotide
  Antisense strand to SEQ ID NO: 2481678
uucucacucaucaaagccc

SEQ ID NO: 2481680 - RNA, 19 nt, Artificial Sequence
  Description of Artificial Sequence: Synthetic oligonucleotide
  Sense strand starting at position 3652 of SEQ ID NO: 1887568
ggcuuugaugagugagaaa

SEQ ID NO: 2481681 - RNA, 19 nt, Artificial Sequence
  Description of Artificial Sequence: Synthetic oligonucleotide
  Antisense strand to SEQ ID NO: 2481680
uuucucacucaucaaagcc

SEQ ID NO: 2481682 - RNA, 19 nt, Artificial Sequence
  Description of Artificial Sequence: Synthetic oligonucleotide
  Sense strand starting at position 3717 of SEQ ID NO: 1887568
uggaaacggagcuauuagu

SEQ ID NO: 2481683 - RNA, 19 nt, Artificial Sequence
  Description of Artificial Sequence: Synthetic oligonucleotide
  Antisense strand to SEQ ID NO: 2481682
acuaauagcuccguuucca

SEQ ID NO: 2481684 - RNA, 19 nt, Artificial Sequence
  Description of Artificial Sequence: Synthetic oligonucleotide
  Sense strand starting at position 167 of SEQ ID NO: 1887570
aguggauagcccuggauga

SEQ ID NO: 2481685 - RNA, 19 nt, Artificial Sequence
  Description of Artificial Sequence: Synthetic oligonucleotide
  Antisense strand to SEQ ID NO: 2481684
ucauccagggcuauccacu

SEQ ID NO: 2481686 - RNA, 19 nt, Artificial Sequence
  Description of Artificial Sequence: Synthetic oligonucleotide
  Sense strand starting at position 169 of SEQ ID NO: 1887570
uggauagcccuggaugacu

SEQ ID NO: 2481687 - RNA, 19 nt, Artificial Sequence
  Description of Artificial Sequence: Synthetic oligonucleotide
  Antisense strand to SEQ ID NO: 2481686
agucauccagggcuaucca

SEQ ID NO: 2481688 - RNA, 19 nt, Artificial Sequence
  Description of Artificial Sequence: Synthetic oligonucleotide
  Sense strand starting at position 233 of SEQ ID NO: 1887570
cccuuauauuagguggcaa

SEQ ID NO: 2481689 - RNA, 19 nt, Artificial Sequence
  Description of Artificial Sequence: Synthetic oligonucleotide
  Antisense strand to SEQ ID NO: 2481688
uugccaccuaauauaaggg

SEQ ID NO: 2481690 - RNA, 19 nt, Artificial Sequence
  Description of Artificial Sequence: Synthetic oligonucleotide
  Sense strand starting at position 1078 of SEQ ID NO: 1887570
ggcacucuggcuggagaaa

SEQ ID NO: 2481691 - RNA, 19 nt, Artificial Sequence
  Description of Artificial Sequence: Synthetic oligonucleotide
  Antisense strand to SEQ ID NO: 2481690
uuucuccagccagagugcc

SEQ ID NO: 2481692 - RNA, 19 nt, Artificial Sequence
  Description of Artificial Sequence: Synthetic oligonucleotide
  Sense strand starting at position 1271 of SEQ ID NO: 1887570
gcgcacuuugcaguaucau

SEQ ID NO: 2481693 - RNA, 19 nt, Artificial Sequence
  Description of Artificial Sequence: Synthetic oligonucleotide
  Antisense strand to SEQ ID NO: 2481692
augauacugcaaagugcgc

SEQ ID NO: 2481694 - RNA, 19 nt, Artificial Sequence
  Description of Artificial Sequence: Synthetic oligonucleotide
  Sense strand starting at position 1459 of SEQ ID NO: 1887570
cugagacuguagucccaua

SEQ ID NO: 2481695 - RNA, 19 nt, Artificial Sequence
  Description of Artificial Sequence: Synthetic oligonucleotide
  Antisense strand to SEQ ID NO: 2481694
uaugggacuacagucucag

SEQ ID NO: 2481696 - RNA, 19 nt, Artificial Sequence
  Description of Artificial Sequence: Synthetic oligonucleotide
  Sense strand starting at position 2074 of SEQ ID NO: 1887570
cugcuuugugcugagauug

SEQ ID NO: 2481697 - RNA, 19 nt, Artificial Sequence
  Description of Artificial Sequence: Synthetic oligonucleotide
  Antisense strand to SEQ ID NO: 2481696
caaucucagcacaaagcag

SEQ ID NO: 2481698 - RNA, 19 nt, Artificial Sequence
  Description of Artificial Sequence: Synthetic oligonucleotide
  Sense strand starting at position 2554 of SEQ ID NO: 1887570
ccgaagguccgcguguaaa

SEQ ID NO: 2481699 - RNA, 19 nt, Artificial Sequence
  Description of Artificial Sequence: Synthetic oligonucleotide
  Antisense strand to SEQ ID NO: 2481698
uuuacacgcggaccuucgg

SEQ ID NO: 2481700 - RNA, 19 nt, Artificial Sequence
  Description of Artificial Sequence: Synthetic oligonucleotide
  Sense strand starting at position 2779 of SEQ ID NO: 1887570
ggaacaaccucaguucugu

SEQ ID NO: 2481701 - RNA, 19 nt, Artificial Sequence
  Description of Artificial Sequence: Synthetic oligonucleotide
  Antisense strand to SEQ ID NO: 2481700
acagaacugagguuguucc

SEQ ID NO: 2481702 - RNA, 19 nt, Artificial Sequence
  Description of Artificial Sequence: Synthetic oligonucleotide
  Sense strand starting at position 2784 of SEQ ID NO: 1887570
aaccucaguucugugaaag

SEQ ID NO: 2481703 - RNA, 19 nt, Artificial Sequence
  Description of Artificial Sequence: Synthetic oligonucleotide
  Antisense strand to SEQ ID NO: 2481702
cuuucacagaacugagguu

SEQ ID NO: 2481704 - RNA, 19 nt, Artificial Sequence
  Description of Artificial Sequence: Synthetic oligonucleotide
  Sense strand starting at position 2785 of SEQ ID NO: 1887570
accucaguucugugaaagg

SEQ ID NO: 2481705 - RNA, 19 nt, Artificial Sequence
  Description of Artificial Sequence: Synthetic oligonucleotide
  Antisense strand to SEQ ID NO: 2481704
ccuuucacagaacugaggu

SEQ ID NO: 2481706 - RNA, 19 nt, Artificial Sequence
  Description of Artificial Sequence: Synthetic oligonucleotide
  Sense strand starting at position 2816 of SEQ ID NO: 1887570
gacagaaucuccguggaca

SEQ ID NO: 2481707 - RNA, 19 nt, Artificial Sequence
  Description of Artificial Sequence: Synthetic oligonucleotide
  Antisense strand to SEQ ID NO: 2481706
uguccacggagauucuguc

SEQ ID NO: 2481708 - RNA, 19 nt, Artificial Sequence
  Description of Artificial Sequence: Synthetic oligonucleotide
  Sense strand starting at position 2817 of SEQ ID NO: 1887570
acagaaucuccguggacau

SEQ ID NO: 2481709 - RNA, 19 nt, Artificial Sequence
  Description of Artificial Sequence: Synthetic oligonucleotide
  Antisense strand to SEQ ID NO: 2481708
auguccacggagauucugu

SEQ ID NO: 2481710 - RNA, 19 nt, Artificial Sequence
  Description of Artificial Sequence: Synthetic oligonucleotide
  Sense strand starting at position 2829 of SEQ ID NO: 1887570
uggacaucugucuggagga

SEQ ID NO: 2481711 - RNA, 19 nt, Artificial Sequence
  Description of Artificial Sequence: Synthetic oligonucleotide
  Antisense strand to SEQ ID NO: 2481710
uccuccagacagaugucca

SEQ ID NO: 2481712 - RNA, 19 nt, Artificial Sequence
  Description of Artificial Sequence: Synthetic oligonucleotide
  Sense strand starting at position 2834 of SEQ ID NO: 1887570
aucugucuggaggagcaau

SEQ ID NO: 2481713 - RNA, 19 nt, Artificial Sequence
  Description of Artificial Sequence: Synthetic oligonucleotide
  Antisense strand to SEQ ID NO: 2481712
auugcuccuccagacagau

SEQ ID NO: 2481714 - RNA, 19 nt, Artificial Sequence
  Description of Artificial Sequence: Synthetic oligonucleotide
  Sense strand starting at position 2928 of SEQ ID NO: 1887570
aaagucaucuguguuugac

SEQ ID NO: 2481715 - RNA, 19 nt, Artificial Sequence
  Description of Artificial Sequence: Synthetic oligonucleotide
  Antisense strand to SEQ ID NO: 2481714
gucaaacacagaugacuuu

SEQ ID NO: 2481716 - RNA, 19 nt, Artificial Sequence
  Description of Artificial Sequence: Synthetic oligonucleotide
  Sense strand starting at position 2930 of SEQ ID NO: 1887570
agucaucuguguuugacaa

SEQ ID NO: 2481717 - RNA, 19 nt, Artificial Sequence
  Description of Artificial Sequence: Synthetic oligonucleotide
  Antisense strand to SEQ ID NO: 2481716
uugucaaacacagaugacu

SEQ ID NO: 2481718 - RNA, 19 nt, Artificial Sequence
  Description of Artificial Sequence: Synthetic oligonucleotide
  Sense strand starting at position 2931 of SEQ ID NO: 1887570
gucaucuguguuugacaag

SEQ ID NO: 2481719 - RNA, 19 nt, Artificial Sequence
  Description of Artificial Sequence: Synthetic oligonucleotide
  Antisense strand to SEQ ID NO: 2481718
cuugucaaacacagaugac

SEQ ID NO: 2481720 - RNA, 19 nt, Artificial Sequence
  Description of Artificial Sequence: Synthetic oligonucleotide
  Sense strand starting at position 3066 of SEQ ID NO: 1887570
acaguagggccucgauaug

SEQ ID NO: 2481721 - RNA, 19 nt, Artificial Sequence
  Description of Artificial Sequence: Synthetic oligonucleotide
  Antisense strand to SEQ ID NO: 2481720
cauaucgaggcccuacugu

SEQ ID NO: 2481722 - RNA, 19 nt, Artificial Sequence
  Description of Artificial Sequence: Synthetic oligonucleotide
  Sense strand starting at position 3295 of SEQ ID NO: 1887570
cagauuggaugguuuauau

SEQ ID NO: 2481723 - RNA, 19 nt, Artificial Sequence
  Description of Artificial Sequence: Synthetic oligonucleotide
  Antisense strand to SEQ ID NO: 2481722
auauaaaccauccaaucug

SEQ ID NO: 2481724 - RNA, 19 nt, Artificial Sequence
  Description of Artificial Sequence: Synthetic oligonucleotide
  Sense strand starting at position 3323 of SEQ ID NO: 1887570
cuguuucuacucuguaaac

SEQ ID NO: 2481725 - RNA, 19 nt, Artificial Sequence
  Description of Artificial Sequence: Synthetic oligonucleotide
  Antisense strand to SEQ ID NO: 2481724
guuuacagaguagaaacag

SEQ ID NO: 2481726 - RNA, 19 nt, Artificial Sequence
  Description of Artificial Sequence: Synthetic oligonucleotide
  Sense strand starting at position 3324 of SEQ ID NO: 1887570
uguuucuacucuguaaacu

SEQ ID NO: 2481727 - RNA, 19 nt, Artificial Sequence
  Description of Artificial Sequence: Synthetic oligonucleotide
  Antisense strand to SEQ ID NO: 2481726
aguuuacagaguagaaaca

SEQ ID NO: 2481728 - RNA, 19 nt, Artificial Sequence
  Description of Artificial Sequence: Synthetic oligonucleotide
  Sense strand starting at position 3325 of SEQ ID NO: 1887570
guuucuacucuguaaacua

SEQ ID NO: 2481729 - RNA, 19 nt, Artificial Sequence
  Description of Artificial Sequence: Synthetic oligonucleotide
  Antisense strand to SEQ ID NO: 2481728
uaguuuacagaguagaaac

SEQ ID NO: 2481730 - RNA, 19 nt, Artificial Sequence
  Description of Artificial Sequence: Synthetic oligonucleotide
  Sense strand starting at position 3460 of SEQ ID NO: 1887570
ccaugaacguacuuauaau

SEQ ID NO: 2481731 - RNA, 19 nt, Artificial Sequence
  Description of Artificial Sequence: Synthetic oligonucleotide
  Antisense strand to SEQ ID NO: 2481730
auuauaaguacguucaugg

SEQ ID NO: 2481732 - RNA, 19 nt, Artificial Sequence
  Description of Artificial Sequence: Synthetic oligonucleotide
  Sense strand starting at position 3486 of SEQ ID NO: 1887570
cugaaauacuugucugcug

SEQ ID NO: 2481733 - RNA, 19 nt, Artificial Sequence
  Description of Artificial Sequence: Synthetic oligonucleotide
  Antisense strand to SEQ ID NO: 2481732
cagcagacaaguauuucag

SEQ ID NO: 2481734 - RNA, 19 nt, Artificial Sequence
  Description of Artificial Sequence: Synthetic oligonucleotide
  Sense strand starting at position 3487 of SEQ ID NO: 1887570
ugaaauacuugucugcuga

SEQ ID NO: 2481735 - RNA, 19 nt, Artificial Sequence
  Description of Artificial Sequence: Synthetic oligonucleotide
  Antisense strand to SEQ ID NO: 2481734
ucagcagacaaguauuuca

SEQ ID NO: 2481736 - RNA, 19 nt, Artificial Sequence
  Description of Artificial Sequence: Synthetic oligonucleotide
  Sense strand starting at position 3488 of SEQ ID NO: 1887570
gaaauacuugucugcugau

SEQ ID NO: 2481737 - RNA, 19 nt, Artificial Sequence
  Description of Artificial Sequence: Synthetic oligonucleotide
  Antisense strand to SEQ ID NO: 2481736
aucagcagacaaguauuuc

SEQ ID NO: 2481738 - RNA, 19 nt, Artificial Sequence
  Description of Artificial Sequence: Synthetic oligonucleotide
  Sense strand starting at position 3502 of SEQ ID NO: 1887570
cugauuacaucaucucgga

SEQ ID NO: 2481739 - RNA, 19 nt, Artificial Sequence
  Description of Artificial Sequence: Synthetic oligonucleotide
  Antisense strand to SEQ ID NO: 2481738
uccgagaugauguaaucag

SEQ ID NO: 2481740 - RNA, 19 nt, Artificial Sequence
  Description of Artificial Sequence: Synthetic oligonucleotide
  Sense strand starting at position 3642 of SEQ ID NO: 1887570
agacuaaauucuguuguau

SEQ ID NO: 2481741 - RNA, 19 nt, Artificial Sequence
  Description of Artificial Sequence: Synthetic oligonucleotide
  Antisense strand to SEQ ID NO: 2481740
auacaacagaauuuagucu

SEQ ID NO: 2481742 - RNA, 19 nt, Artificial Sequence
  Description of Artificial Sequence: Synthetic oligonucleotide
  Sense strand starting at position 3651 of SEQ ID NO: 1887570
ucuguuguauucuuuggaa

SEQ ID NO: 2481743 - RNA, 19 nt, Artificial Sequence
  Description of Artificial Sequence: Synthetic oligonucleotide
  Antisense strand to SEQ ID NO: 2481742
uuccaaagaauacaacaga

SEQ ID NO: 2481744 - RNA, 19 nt, Artificial Sequence
  Description of Artificial Sequence: Synthetic oligonucleotide
  Sense strand starting at position 3653 of SEQ ID NO: 1887570
uguuguauucuuuggaaga

SEQ ID NO: 2481745 - RNA, 19 nt, Artificial Sequence
  Description of Artificial Sequence: Synthetic oligonucleotide
  Antisense strand to SEQ ID NO: 2481744
ucuuccaaagaauacaaca

SEQ ID NO: 2481746 - RNA, 19 nt, Artificial Sequence
  Description of Artificial Sequence: Synthetic oligonucleotide
  Sense strand starting at position 3664 of SEQ ID NO: 1887570
uuggaagagcauuguuauu

SEQ ID NO: 2481747 - RNA, 19 nt, Artificial Sequence
  Description of Artificial Sequence: Synthetic oligonucleotide
  Antisense strand to SEQ ID NO: 2481746
aauaacaaugcucuuccaa

SEQ ID NO: 2481748 - RNA, 19 nt, Artificial Sequence
  Description of Artificial Sequence: Synthetic oligonucleotide
  Sense strand starting at position 3666 of SEQ ID NO: 1887570
ggaagagcauuguuauuau

SEQ ID NO: 2481749 - RNA, 19 nt, Artificial Sequence
  Description of Artificial Sequence: Synthetic oligonucleotide
  Antisense strand to SEQ ID NO: 2481748
auaauaacaaugcucuucc

SEQ ID NO: 2481750 - RNA, 19 nt, Artificial Sequence
  Description of Artificial Sequence: Synthetic oligonucleotide
  Sense strand starting at position 3694 of SEQ ID NO: 1887570
ggguaaauguggcugaauu

SEQ ID NO: 2481751 - RNA, 19 nt, Artificial Sequence
  Description of Artificial Sequence: Synthetic oligonucleotide
  Antisense strand to SEQ ID NO: 2481750
aauucagccacauuuaccc

SEQ ID NO: 2481752 - RNA, 19 nt, Artificial Sequence
  Description of Artificial Sequence: Synthetic oligonucleotide
  Sense strand starting at position 3695 of SEQ ID NO: 1887570
gguaaauguggcugaauuc

SEQ ID NO: 2481753 - RNA, 19 nt, Artificial Sequence
  Description of Artificial Sequence: Synthetic oligonucleotide
  Antisense strand to SEQ ID NO: 2481752
gaauucagccacauuuacc

SEQ ID NO: 2481754 - RNA, 19 nt, Artificial Sequence
  Description of Artificial Sequence: Synthetic oligonucleotide
  Sense strand starting at position 3793 of SEQ ID NO: 1887570
auagaugaauguuucuaug

SEQ ID NO: 2481755 - RNA, 19 nt, Artificial Sequence
  Description of Artificial Sequence: Synthetic oligonucleotide
  Antisense strand to SEQ ID NO: 2481754
cauagaaacauucaucuau

SEQ ID NO: 2481756 - RNA, 19 nt, Artificial Sequence
  Description of Artificial Sequence: Synthetic oligonucleotide
  Sense strand starting at position 3795 of SEQ ID NO: 1887570
agaugaauguuucuaugua

SEQ ID NO: 2481757 - RNA, 19 nt, Artificial Sequence
  Description of Artificial Sequence: Synthetic oligonucleotide
  Antisense strand to SEQ ID NO: 2481756
uacauagaaacauucaucu

SEQ ID NO: 2481758 - RNA, 19 nt, Artificial Sequence
  Description of Artificial Sequence: Synthetic oligonucleotide
  Sense strand starting at position 3844 of SEQ ID NO: 1887570
cauuguuaucugugagagu

SEQ ID NO: 2481759 - RNA, 19 nt, Artificial Sequence
  Description of Artificial Sequence: Synthetic oligonucleotide
  Antisense strand to SEQ ID NO: 2481758
acucucacagauaacaaug

SEQ ID NO: 2481760 - RNA, 19 nt, Artificial Sequence
  Description of Artificial Sequence: Synthetic oligonucleotide
  Sense strand starting at position 3882 of SEQ ID NO: 1887570
ccaguauuaccggaagcca

SEQ ID NO: 2481761 - RNA, 19 nt, Artificial Sequence
  Description of Artificial Sequence: Synthetic oligonucleotide
  Antisense strand to SEQ ID NO: 2481760
uggcuuccgguaauacugg

SEQ ID NO: 2481762 - RNA, 19 nt, Artificial Sequence
  Description of Artificial Sequence: Synthetic oligonucleotide
  Sense strand starting at position 3942 of SEQ ID NO: 1887570
gaguaucuacuauggauag

SEQ ID NO: 2481763 - RNA, 19 nt, Artificial Sequence
  Description of Artificial Sequence: Synthetic oligonucleotide
  Antisense strand to SEQ ID NO: 2481762
cuauccauaguagauacuc

SEQ ID NO: 2481764 - RNA, 19 nt, Artificial Sequence
  Description of Artificial Sequence: Synthetic oligonucleotide
  Sense strand starting at position 650 of SEQ ID NO: 1887569
ggcacucuggcuggagaaa

SEQ ID NO: 2481765 - RNA, 19 nt, Artificial Sequence
  Description of Artificial Sequence: Synthetic oligonucleotide
  Antisense strand to SEQ ID NO: 2481764
uuucuccagccagagugcc

SEQ ID NO: 2481766 - RNA, 19 nt, Artificial Sequence
  Description of Artificial Sequence: Synthetic oligonucleotide
  Sense strand starting at position 843 of SEQ ID NO: 1887569
gcgcacuuugcaguaucau

SEQ ID NO: 2481767 - RNA, 19 nt, Artificial Sequence
  Description of Artificial Sequence: Synthetic oligonucleotide
  Antisense strand to SEQ ID NO: 2481766
augauacugcaaagugcgc

SEQ ID NO: 2481768 - RNA, 19 nt, Artificial Sequence
  Description of Artificial Sequence: Synthetic oligonucleotide
  Sense strand starting at position 1031 of SEQ ID NO: 1887569
cugagacuguagucccaua

SEQ ID NO: 2481769 - RNA, 19 nt, Artificial Sequence
  Description of Artificial Sequence: Synthetic oligonucleotide
  Antisense strand to SEQ ID NO: 2481768
uaugggacuacagucucag

SEQ ID NO: 2481770 - RNA, 19 nt, Artificial Sequence
  Description of Artificial Sequence: Synthetic oligonucleotide
  Sense strand starting at position 1646 of SEQ ID NO: 1887569
cugcuuugugcugagauug

SEQ ID NO: 2481771 - RNA, 19 nt, Artificial Sequence
  Description of Artificial Sequence: Synthetic oligonucleotide
  Antisense strand to SEQ ID NO: 2481770
caaucucagcacaaagcag

SEQ ID NO: 2481772 - RNA, 19 nt, Artificial Sequence
  Description of Artificial Sequence: Synthetic oligonucleotide
  Sense strand starting at position 2126 of SEQ ID NO: 1887569
ccgaagguccgcguguaaa

SEQ ID NO: 2481773 - RNA, 19 nt, Artificial Sequence
  Description of Artificial Sequence: Synthetic oligonucleotide
  Antisense strand to SEQ ID NO: 2481772
uuuacacgcggaccuucgg

SEQ ID NO: 2481774 - RNA, 19 nt, Artificial Sequence
  Description of Artificial Sequence: Synthetic oligonucleotide
  Sense strand starting at position 2351 of SEQ ID NO: 1887569
ggaacaaccucaguucugu

SEQ ID NO: 2481775 - RNA, 19 nt, Artificial Sequence
  Description of Artificial Sequence: Synthetic oligonucleotide
  Antisense strand to SEQ ID NO: 2481774
acagaacugagguuguucc

SEQ ID NO: 2481776 - RNA, 19 nt, Artificial Sequence
  Description of Artificial Sequence: Synthetic oligonucleotide
  Sense strand starting at position 2356 of SEQ ID NO: 1887569
aaccucaguucugugaaag

SEQ ID NO: 2481777 - RNA, 19 nt, Artificial Sequence
  Description of Artificial Sequence: Synthetic oligonucleotide
  Antisense strand to SEQ ID NO: 2481776
cuuucacagaacugagguu

SEQ ID NO: 2481778 - RNA, 19 nt, Artificial Sequence
  Description of Artificial Sequence: Synthetic oligonucleotide
  Sense strand starting at position 2357 of SEQ ID NO: 1887569
accucaguucugugaaagg

SEQ ID NO: 2481779 - RNA, 19 nt, Artificial Sequence
  Description of Artificial Sequence: Synthetic oligonucleotide
  Antisense strand to SEQ ID NO: 2481778
ccuuucacagaacugaggu

SEQ ID NO: 2481780 - RNA, 19 nt, Artificial Sequence
  Description of Artificial Sequence: Synthetic oligonucleotide
  Sense strand starting at position 2388 of SEQ ID NO: 1887569
gacagaaucuccguggaca

SEQ ID NO: 2481781 - RNA, 19 nt, Artificial Sequence
  Description of Artificial Sequence: Synthetic oligonucleotide
  Antisense strand to SEQ ID NO: 2481780
uguccacggagauucuguc

SEQ ID NO: 2481782 - RNA, 19 nt, Artificial Sequence
  Description of Artificial Sequence: Synthetic oligonucleotide
  Sense strand starting at position 2389 of SEQ ID NO: 1887569
acagaaucuccguggacau

SEQ ID NO: 2481783 - RNA, 19 nt, Artificial Sequence
  Description of Artificial Sequence: Synthetic oligonucleotide
  Antisense strand to SEQ ID NO: 2481782
auguccacggagauucugu

SEQ ID NO: 2481784 - RNA, 19 nt, Artificial Sequence
  Description of Artificial Sequence: Synthetic oligonucleotide
  Sense strand starting at position 2401 of SEQ ID NO: 1887569
uggacaucugucuggagga

SEQ ID NO: 2481785 - RNA, 19 nt, Artificial Sequence
  Description of Artificial Sequence: Synthetic oligonucleotide
  Antisense strand to SEQ ID NO: 2481784
uccuccagacagaugucca

SEQ ID NO: 2481786 - RNA, 19 nt, Artificial Sequence
  Description of Artificial Sequence: Synthetic oligonucleotide
  Sense strand starting at position 2406 of SEQ ID NO: 1887569
aucugucuggaggagcaau

SEQ ID NO: 2481787 - RNA, 19 nt, Artificial Sequence
  Description of Artificial Sequence: Synthetic oligonucleotide
  Antisense strand to SEQ ID NO: 2481786
auugcuccuccagacagau

SEQ ID NO: 2481788 - RNA, 19 nt, Artificial Sequence
  Description of Artificial Sequence: Synthetic oligonucleotide
  Sense strand starting at position 2500 of SEQ ID NO: 1887569
aaagucaucuguguuugac

SEQ ID NO: 2481789 - RNA, 19 nt, Artificial Sequence
  Description of Artificial Sequence: Synthetic oligonucleotide
  Antisense strand to SEQ ID NO: 2481788
gucaaacacagaugacuuu

SEQ ID NO: 2481790 - RNA, 19 nt, Artificial Sequence
  Description of Artificial Sequence: Synthetic oligonucleotide
  Sense strand starting at position 2502 of SEQ ID NO: 1887569
agucaucuguguuugacaa

SEQ ID NO: 2481791 - RNA, 19 nt, Artificial Sequence
  Description of Artificial Sequence: Synthetic oligonucleotide
  Antisense strand to SEQ ID NO: 2481790
uugucaaacacagaugacu

SEQ ID NO: 2481792 - RNA, 19 nt, Artificial Sequence
  Description of Artificial Sequence: Synthetic oligonucleotide
  Sense strand starting at position 2503 of SEQ ID NO: 1887569
gucaucuguguuugacaag

SEQ ID NO: 2481793 - RNA, 19 nt, Artificial Sequence
  Description of Artificial Sequence: Synthetic oligonucleotide
  Antisense strand to SEQ ID NO: 2481792
cuugucaaacacagaugac

SEQ ID NO: 2481794 - RNA, 19 nt, Artificial Sequence
  Description of Artificial Sequence: Synthetic oligonucleotide
  Sense strand starting at position 2638 of SEQ ID NO: 1887569
acaguagggccucgauaug

SEQ ID NO: 2481795 - RNA, 19 nt, Artificial Sequence
  Description of Artificial Sequence: Synthetic oligonucleotide
  Antisense strand to SEQ ID NO: 2481794
cauaucgaggcccuacugu

SEQ ID NO: 2481796 - RNA, 19 nt, Artificial Sequence
  Description of Artificial Sequence: Synthetic oligonucleotide
  Sense strand starting at position 2867 of SEQ ID NO: 1887569
cagauuggaugguuuauau

SEQ ID NO: 2481797 - RNA, 19 nt, Artificial Sequence
  Description of Artificial Sequence: Synthetic oligonucleotide
  Antisense strand to SEQ ID NO: 2481796
auauaaaccauccaaucug

SEQ ID NO: 2481798 - RNA, 19 nt, Artificial Sequence
  Description of Artificial Sequence: Synthetic oligonucleotide
  Sense strand starting at position 2895 of SEQ ID NO: 1887569
cuguuucuacucuguaaac

SEQ ID NO: 2481799 - RNA, 19 nt, Artificial Sequence
  Description of Artificial Sequence: Synthetic oligonucleotide
  Antisense strand to SEQ ID NO: 2481798
guuuacagaguagaaacag

SEQ ID NO: 2481800 - RNA, 19 nt, Artificial Sequence
  Description of Artificial Sequence: Synthetic oligonucleotide
  Sense strand starting at position 2896 of SEQ ID NO: 1887569
uguuucuacucuguaaacu

SEQ ID NO: 2481801 - RNA, 19 nt, Artificial Sequence
  Description of Artificial Sequence: Synthetic oligonucleotide
  Antisense strand to SEQ ID NO: 2481800
aguuuacagaguagaaaca

SEQ ID NO: 2481802 - RNA, 19 nt, Artificial Sequence
  Description of Artificial Sequence: Synthetic oligonucleotide
  Sense strand starting at position 2897 of SEQ ID NO: 1887569
guuucuacucuguaaacua

SEQ ID NO: 2481803 - RNA, 19 nt, Artificial Sequence
  Description of Artificial Sequence: Synthetic oligonucleotide
  Antisense strand to SEQ ID NO: 2481802
uaguuuacagaguagaaac

SEQ ID NO: 2481804 - RNA, 19 nt, Artificial Sequence
  Description of Artificial Sequence: Synthetic oligonucleotide
  Sense strand starting at position 2970 of SEQ ID NO: 1887569
uuccaugucucugcugaga

SEQ ID NO: 2481805 - RNA, 19 nt, Artificial Sequence
  Description of Artificial Sequence: Synthetic oligonucleotide
  Antisense strand to SEQ ID NO: 2481804
ucucagcagagacauggaa

SEQ ID NO: 2481806 - RNA, 19 nt, Artificial Sequence
  Description of Artificial Sequence: Synthetic oligonucleotide
  Sense strand starting at position 3032 of SEQ ID NO: 1887569
ccaugaacguacuuauaau

SEQ ID NO: 2481807 - RNA, 19 nt, Artificial Sequence
  Description of Artificial Sequence: Synthetic oligonucleotide
  Antisense strand to SEQ ID NO: 2481806
auuauaaguacguucaugg

SEQ ID NO: 2481808 - RNA, 19 nt, Artificial Sequence
  Description of Artificial Sequence: Synthetic oligonucleotide
  Sense strand starting at position 3058 of SEQ ID NO: 1887569
cugaaauacuugucugcug

SEQ ID NO: 2481809 - RNA, 19 nt, Artificial Sequence
  Description of Artificial Sequence: Synthetic oligonucleotide
  Antisense strand to SEQ ID NO: 2481808
cagcagacaaguauuucag

SEQ ID NO: 2481810 - RNA, 19 nt, Artificial Sequence
  Description of Artificial Sequence: Synthetic oligonucleotide
  Sense strand starting at position 3059 of SEQ ID NO: 1887569
ugaaauacuugucugcuga

SEQ ID NO: 2481811 - RNA, 19 nt, Artificial Sequence
  Description of Artificial Sequence: Synthetic oligonucleotide
  Antisense strand to SEQ ID NO: 2481810
ucagcagacaaguauuuca

SEQ ID NO: 2481812 - RNA, 19 nt, Artificial Sequence
  Description of Artificial Sequence: Synthetic oligonucleotide
  Sense strand starting at position 3060 of SEQ ID NO: 1887569
gaaauacuugucugcugau

SEQ ID NO: 2481813 - RNA, 19 nt, Artificial Sequence
  Description of Artificial Sequence: Synthetic oligonucleotide
  Antisense strand to SEQ ID NO: 2481812
aucagcagacaaguauuuc

SEQ ID NO: 2481814 - RNA, 19 nt, Artificial Sequence
  Description of Artificial Sequence: Synthetic oligonucleotide
  Sense strand starting at position 3074 of SEQ ID NO: 1887569
cugauuacaucaucucgga

SEQ ID NO: 2481815 - RNA, 19 nt, Artificial Sequence
  Description of Artificial Sequence: Synthetic oligonucleotide
  Antisense strand to SEQ ID NO: 2481814
uccgagaugauguaaucag

SEQ ID NO: 2481816 - RNA, 19 nt, Artificial Sequence
  Description of Artificial Sequence: Synthetic oligonucleotide
  Sense strand starting at position 3214 of SEQ ID NO: 1887569
agacuaaauucuguuguau

SEQ ID NO: 2481817 - RNA, 19 nt, Artificial Sequence
  Description of Artificial Sequence: Synthetic oligonucleotide
  Antisense strand to SEQ ID NO: 2481816
auacaacagaauuuagucu

SEQ ID NO: 2481818 - RNA, 19 nt, Artificial Sequence
  Description of Artificial Sequence: Synthetic oligonucleotide
  Sense strand starting at position 3223 of SEQ ID NO: 1887569
ucuguuguauucuuuggaa

SEQ ID NO: 2481819 - RNA, 19 nt, Artificial Sequence
  Description of Artificial Sequence: Synthetic oligonucleotide
  Antisense strand to SEQ ID NO: 2481818
uuccaaagaauacaacaga

SEQ ID NO: 2481820 - RNA, 19 nt, Artificial Sequence
  Description of Artificial Sequence: Synthetic oligonucleotide
  Sense strand starting at position 3225 of SEQ ID NO: 1887569
uguuguauucuuuggaaga

SEQ ID NO: 2481821 - RNA, 19 nt, Artificial Sequence
  Description of Artificial Sequence: Synthetic oligonucleotide
  Antisense strand to SEQ ID NO: 2481820
ucuuccaaagaauacaaca

SEQ ID NO: 2481822 - RNA, 19 nt, Artificial Sequence
  Description of Artificial Sequence: Synthetic oligonucleotide
  Sense strand starting at position 3236 of SEQ ID NO: 1887569
uuggaagagcauuguuauu

SEQ ID NO: 2481823 - RNA, 19 nt, Artificial Sequence
  Description of Artificial Sequence: Synthetic oligonucleotide
  Antisense strand to SEQ ID NO: 2481822
aauaacaaugcucuuccaa

SEQ ID NO: 2481824 - RNA, 19 nt, Artificial Sequence
  Description of Artificial Sequence: Synthetic oligonucleotide
  Sense strand starting at position 3238 of SEQ ID NO: 1887569
ggaagagcauuguuauuau

SEQ ID NO: 2481825 - RNA, 19 nt, Artificial Sequence
  Description of Artificial Sequence: Synthetic oligonucleotide
  Antisense strand to SEQ ID NO: 2481824
auaauaacaaugcucuucc

SEQ ID NO: 2481826 - RNA, 19 nt, Artificial Sequence
  Description of Artificial Sequence: Synthetic oligonucleotide
  Sense strand starting at position 3266 of SEQ ID NO: 1887569
ggguaaauguggcugaauu

SEQ ID NO: 2481827 - RNA, 19 nt, Artificial Sequence
  Description of Artificial Sequence: Synthetic oligonucleotide
  Antisense strand to SEQ ID NO: 2481826
aauucagccacauuuaccc

SEQ ID NO: 2481828 - RNA, 19 nt, Artificial Sequence
  Description of Artificial Sequence: Synthetic oligonucleotide
  Sense strand starting at position 3267 of SEQ ID NO: 1887569
gguaaauguggcugaauuc

SEQ ID NO: 2481829 - RNA, 19 nt, Artificial Sequence
  Description of Artificial Sequence: Synthetic oligonucleotide
  Antisense strand to SEQ ID NO: 2481828
gaauucagccacauuuacc

SEQ ID NO: 2481830 - RNA, 19 nt, Artificial Sequence
  Description of Artificial Sequence: Synthetic oligonucleotide
  Sense strand starting at position 3365 of SEQ ID NO: 1887569
auagaugaauguuucuaug

SEQ ID NO: 2481831 - RNA, 19 nt, Artificial Sequence
  Description of Artificial Sequence: Synthetic oligonucleotide
  Antisense strand to SEQ ID NO: 2481830
cauagaaacauucaucuau

SEQ ID NO: 2481832 - RNA, 19 nt, Artificial Sequence
  Description of Artificial Sequence: Synthetic oligonucleotide
  Sense strand starting at position 3367 of SEQ ID NO: 1887569
agaugaauguuucuaugua

SEQ ID NO: 2481833 - RNA, 19 nt, Artificial Sequence
  Description of Artificial Sequence: Synthetic oligonucleotide
  Antisense strand to SEQ ID NO: 2481832
uacauagaaacauucaucu

SEQ ID NO: 2481834 - RNA, 19 nt, Artificial Sequence
  Description of Artificial Sequence: Synthetic oligonucleotide
  Sense strand starting at position 3412 of SEQ ID NO: 1887569
guaucauuguuaucuguga

SEQ ID NO: 2481835 - RNA, 19 nt, Artificial Sequence
  Description of Artificial Sequence: Synthetic oligonucleotide
  Antisense strand to SEQ ID NO: 2481834
ucacagauaacaaugauac

SEQ ID NO: 2481836 - RNA, 19 nt, Artificial Sequence
  Description of Artificial Sequence: Synthetic oligonucleotide
  Sense strand starting at position 3416 of SEQ ID NO: 1887569
cauuguuaucugugagagu

SEQ ID NO: 2481837 - RNA, 19 nt, Artificial Sequence
  Description of Artificial Sequence: Synthetic oligonucleotide
  Antisense strand to SEQ ID NO: 2481836
acucucacagauaacaaug

SEQ ID NO: 2481838 - RNA, 19 nt, Artificial Sequence
  Description of Artificial Sequence: Synthetic oligonucleotide
  Sense strand starting at position 3454 of SEQ ID NO: 1887569
ccaguauuaccggaagcca

SEQ ID NO: 2481839 - RNA, 19 nt, Artificial Sequence
  Description of Artificial Sequence: Synthetic oligonucleotide
  Antisense strand to SEQ ID NO: 2481838
uggcuuccgguaauacugg

SEQ ID NO: 2481840 - RNA, 19 nt, Artificial Sequence
  Description of Artificial Sequence: Synthetic oligonucleotide
  Sense strand starting at position 3514 of SEQ ID NO: 1887569
gaguaucuacuauggauag

SEQ ID NO: 2481841 - RNA, 19 nt, Artificial Sequence
  Description of Artificial Sequence: Synthetic oligonucleotide
  Antisense strand to SEQ ID NO: 2481840
cuauccauaguagauacuc

SEQ ID NO: 2481842 - RNA, 19 nt, Artificial Sequence
  Description of Artificial Sequence: Synthetic oligonucleotide
  Sense strand starting at position 3871 of SEQ ID NO: 1887569
gugucauuauauuugugau

SEQ ID NO: 2481843 - RNA, 19 nt, Artificial Sequence
  Description of Artificial Sequence: Synthetic oligonucleotide
  Antisense strand to SEQ ID NO: 2481842
aucacaaauauaaugacac

SEQ ID NO: 2481844 - RNA, 19 nt, Artificial Sequence
  Description of Artificial Sequence: Synthetic oligonucleotide
  Sense strand starting at position 89 of SEQ ID NO: 1887571
ucuucuugggaaugcaauu

SEQ ID NO: 2481845 - RNA, 19 nt, Artificial Sequence
  Description of Artificial Sequence: Synthetic oligonucleotide
  Antisense strand to SEQ ID NO: 2481844
aauugcauucccaagaaga

SEQ ID NO: 2481846 - RNA, 19 nt, Artificial Sequence
  Description of Artificial Sequence: Synthetic oligonucleotide
  Sense strand starting at position 336 of SEQ ID NO: 1887571
gcuccugaagcuuagaaac

SEQ ID NO: 2481847 - RNA, 19 nt, Artificial Sequence
  Description of Artificial Sequence: Synthetic oligonucleotide
  Antisense strand to SEQ ID NO: 2481846
guuucuaagcuucaggagc

SEQ ID NO: 2481848 - RNA, 19 nt, Artificial Sequence
  Description of Artificial Sequence: Synthetic oligonucleotide
  Sense strand starting at position 432 of SEQ ID NO: 1887571
acagaugugcuuuacaaca

SEQ ID NO: 2481849 - RNA, 19 nt, Artificial Sequence
  Description of Artificial Sequence: Synthetic oligonucleotide
  Antisense strand to SEQ ID NO: 2481848
uguuguaaagcacaucugu

SEQ ID NO: 2481850 - RNA, 19 nt, Artificial Sequence
  Description of Artificial Sequence: Synthetic oligonucleotide
  Sense strand starting at position 509 of SEQ ID NO: 1887571
ccguuugcccuauaaauaa

SEQ ID NO: 2481851 - RNA, 19 nt, Artificial Sequence
  Description of Artificial Sequence: Synthetic oligonucleotide
  Antisense strand to SEQ ID NO: 2481850
uuauuuauagggcaaacgg

SEQ ID NO: 2481852 - RNA, 19 nt, Artificial Sequence
  Description of Artificial Sequence: Synthetic oligonucleotide
  Sense strand starting at position 690 of SEQ ID NO: 1887571
ggucaugggacacgcaaua

SEQ ID NO: 2481853 - RNA, 19 nt, Artificial Sequence
  Description of Artificial Sequence: Synthetic oligonucleotide
  Antisense strand to SEQ ID NO: 2481852
uauugcgugucccaugacc

SEQ ID NO: 2481854 - RNA, 19 nt, Artificial Sequence
  Description of Artificial Sequence: Synthetic oligonucleotide
  Sense strand starting at position 772 of SEQ ID NO: 1887571
cacuacuucggagguaaua

SEQ ID NO: 2481855 - RNA, 19 nt, Artificial Sequence
  Description of Artificial Sequence: Synthetic oligonucleotide
  Antisense strand to SEQ ID NO: 2481854
uauuaccuccgaaguagug

SEQ ID NO: 2481856 - RNA, 19 nt, Artificial Sequence
  Description of Artificial Sequence: Synthetic oligonucleotide
  Sense strand starting at position 1069 of SEQ ID NO: 1887571
ccgagcuuccucgugguaa

SEQ ID NO: 2481857 - RNA, 19 nt, Artificial Sequence
  Description of Artificial Sequence: Synthetic oligonucleotide
  Antisense strand to SEQ ID NO: 2481856
uuaccacgaggaagcucgg

SEQ ID NO: 2481858 - RNA, 19 nt, Artificial Sequence
  Description of Artificial Sequence: Synthetic oligonucleotide
  Sense strand starting at position 1114 of SEQ ID NO: 1887571
cuugcaaacugaucagaaa

SEQ ID NO: 2481859 - RNA, 19 nt, Artificial Sequence
  Description of Artificial Sequence: Synthetic oligonucleotide
  Antisense strand to SEQ ID NO: 2481858
uuucugaucaguuugcaag

SEQ ID NO: 2481860 - RNA, 19 nt, Artificial Sequence
  Description of Artificial Sequence: Synthetic oligonucleotide
  Sense strand starting at position 1147 of SEQ ID NO: 1887571
gaguccugucccgacaaga

SEQ ID NO: 2481861 - RNA, 19 nt, Artificial Sequence
  Description of Artificial Sequence: Synthetic oligonucleotide
  Antisense strand to SEQ ID NO: 2481860
ucuugucgggacaggacuc

SEQ ID NO: 2481862 - RNA, 19 nt, Artificial Sequence
  Description of Artificial Sequence: Synthetic oligonucleotide
  Sense strand starting at position 1323 of SEQ ID NO: 1887571
gguuuaaugcaagaagcaa

SEQ ID NO: 2481863 - RNA, 19 nt, Artificial Sequence
  Description of Artificial Sequence: Synthetic oligonucleotide
  Antisense strand to SEQ ID NO: 2481862
uugcuucuugcauuaaacc

SEQ ID NO: 2481864 - RNA, 19 nt, Artificial Sequence
  Description of Artificial Sequence: Synthetic oligonucleotide
  Sense strand starting at position 1350 of SEQ ID NO: 1887571
ugaagcguucugccucauu

SEQ ID NO: 2481865 - RNA, 19 nt, Artificial Sequence
  Description of Artificial Sequence: Synthetic oligonucleotide
  Antisense strand to SEQ ID NO: 2481864
aaugaggcagaacgcuuca

SEQ ID NO: 2481866 - RNA, 19 nt, Artificial Sequence
  Description of Artificial Sequence: Synthetic oligonucleotide
  Sense strand starting at position 1421 of SEQ ID NO: 1887571
ggauguuaacuguaccgau

SEQ ID NO: 2481867 - RNA, 19 nt, Artificial Sequence
  Description of Artificial Sequence: Synthetic oligonucleotide
  Antisense strand to SEQ ID NO: 2481866
aucgguacaguuaacaucc

SEQ ID NO: 2481868 - RNA, 19 nt, Artificial Sequence
  Description of Artificial Sequence: Synthetic oligonucleotide
  Sense strand starting at position 1545 of SEQ ID NO: 1887571
uaauuaguuuaguuggaga

SEQ ID NO: 2481869 - RNA, 19 nt, Artificial Sequence
  Description of Artificial Sequence: Synthetic oligonucleotide
  Antisense strand to SEQ ID NO: 2481868
ucuccaacuaaacuaauua

SEQ ID NO: 2481870 - RNA, 19 nt, Artificial Sequence
  Description of Artificial Sequence: Synthetic oligonucleotide
  Sense strand starting at position 1547 of SEQ ID NO: 1887571
auuaguuuaguuggagaaa

SEQ ID NO: 2481871 - RNA, 19 nt, Artificial Sequence
  Description of Artificial Sequence: Synthetic oligonucleotide
  Antisense strand to SEQ ID NO: 2481870
uuucuccaacuaaacuaau

SEQ ID NO: 2481872 - RNA, 19 nt, Artificial Sequence
  Description of Artificial Sequence: Synthetic oligonucleotide
  Sense strand starting at position 1606 of SEQ ID NO: 1887571
agacaaggucauugacgau

SEQ ID NO: 2481873 - RNA, 19 nt, Artificial Sequence
  Description of Artificial Sequence: Synthetic oligonucleotide
  Antisense strand to SEQ ID NO: 2481872
aucgucaaugaccuugucu

SEQ ID NO: 2481874 - RNA, 19 nt, Artificial Sequence
  Description of Artificial Sequence: Synthetic oligonucleotide
  Sense strand starting at position 1613 of SEQ ID NO: 1887571
gucauugacgaucaaacuu

SEQ ID NO: 2481875 - RNA, 19 nt, Artificial Sequence
  Description of Artificial Sequence: Synthetic oligonucleotide
  Antisense strand to SEQ ID NO: 2481874
aaguuugaucgucaaugac

SEQ ID NO: 2481876 - RNA, 19 nt, Artificial Sequence
  Description of Artificial Sequence: Synthetic oligonucleotide
  Sense strand starting at position 1705 of SEQ ID NO: 1887571
cgcucuguggccuauauuu

SEQ ID NO: 2481877 - RNA, 19 nt, Artificial Sequence
  Description of Artificial Sequence: Synthetic oligonucleotide
  Antisense strand to SEQ ID NO: 2481876
aaauauaggccacagagcg

SEQ ID NO: 2481878 - RNA, 19 nt, Artificial Sequence
  Description of Artificial Sequence: Synthetic oligonucleotide
  Sense strand starting at position 1751 of SEQ ID NO: 1887571
gucugaugucccgacaauu

SEQ ID NO: 2481879 - RNA, 19 nt, Artificial Sequence
  Description of Artificial Sequence: Synthetic oligonucleotide
  Antisense strand to SEQ ID NO: 2481878
aauugucgggacaucagac

SEQ ID NO: 2481880 - RNA, 19 nt, Artificial Sequence
  Description of Artificial Sequence: Synthetic oligonucleotide
  Sense strand starting at position 1787 of SEQ ID NO: 1887571
aggccagucaugcagaaau

SEQ ID NO: 2481881 - RNA, 19 nt, Artificial Sequence
  Description of Artificial Sequence: Synthetic oligonucleotide
  Antisense strand to SEQ ID NO: 2481880
auuucugcaugacuggccu

SEQ ID NO: 2481882 - RNA, 19 nt, Artificial Sequence
  Description of Artificial Sequence: Synthetic oligonucleotide
  Sense strand starting at position 1862 of SEQ ID NO: 1887571
gggucauggagauauggcu

SEQ ID NO: 2481883 - RNA, 19 nt, Artificial Sequence
  Description of Artificial Sequence: Synthetic oligonucleotide
  Antisense strand to SEQ ID NO: 2481882
agccauaucuccaugaccc

SEQ ID NO: 2481884 - RNA, 19 nt, Artificial Sequence
  Description of Artificial Sequence: Synthetic oligonucleotide
  Sense strand starting at position 1886 of SEQ ID NO: 1887571
aggucaggcaguugaaaug

SEQ ID NO: 2481885 - RNA, 19 nt, Artificial Sequence
  Description of Artificial Sequence: Synthetic oligonucleotide
  Antisense strand to SEQ ID NO: 2481884
cauuucaacugccugaccu

SEQ ID NO: 2481886 - RNA, 19 nt, Artificial Sequence
  Description of Artificial Sequence: Synthetic oligonucleotide
  Sense strand starting at position 1892 of SEQ ID NO: 1887571
ggcaguugaaauggaaguu

SEQ ID NO: 2481887 - RNA, 19 nt, Artificial Sequence
  Description of Artificial Sequence: Synthetic oligonucleotide
  Antisense strand to SEQ ID NO: 2481886
aacuuccauuucaacugcc

SEQ ID NO: 2481888 - RNA, 19 nt, Artificial Sequence
  Description of Artificial Sequence: Synthetic oligonucleotide
  Sense strand starting at position 2532 of SEQ ID NO: 1887571
agcucaucugcugaagagu

SEQ ID NO: 2481889 - RNA, 19 nt, Artificial Sequence
  Description of Artificial Sequence: Synthetic oligonucleotide
  Antisense strand to SEQ ID NO: 2481888
acucuucagcagaugagcu

SEQ ID NO: 2481890 - RNA, 19 nt, Artificial Sequence
  Description of Artificial Sequence: Synthetic oligonucleotide
  Sense strand starting at position 2543 of SEQ ID NO: 1887571
ugaagagugucuuuaugag

SEQ ID NO: 2481891 - RNA, 19 nt, Artificial Sequence
  Description of Artificial Sequence: Synthetic oligonucleotide
  Antisense strand to SEQ ID NO: 2481890
cucauaaagacacucuuca

SEQ ID NO: 2481892 - RNA, 19 nt, Artificial Sequence
  Description of Artificial Sequence: Synthetic oligonucleotide
  Sense strand starting at position 2925 of SEQ ID NO: 1887571
aaggaugucaugugucuga

SEQ ID NO: 2481893 - RNA, 19 nt, Artificial Sequence
  Description of Artificial Sequence: Synthetic oligonucleotide
  Antisense strand to SEQ ID NO: 2481892
ucagacacaugacauccuu

SEQ ID NO: 2481894 - RNA, 19 nt, Artificial Sequence
  Description of Artificial Sequence: Synthetic oligonucleotide
  Sense strand starting at position 2939 of SEQ ID NO: 1887571
ucugauguaccaugaauca

SEQ ID NO: 2481895 - RNA, 19 nt, Artificial Sequence
  Description of Artificial Sequence: Synthetic oligonucleotide
  Antisense strand to SEQ ID NO: 2481894
ugauucaugguacaucaga

SEQ ID NO: 2481896 - RNA, 19 nt, Artificial Sequence
  Description of Artificial Sequence: Synthetic oligonucleotide
  Sense strand starting at position 3112 of SEQ ID NO: 1887571
gguauaggcauguaaugca

SEQ ID NO: 2481897 - RNA, 19 nt, Artificial Sequence
  Description of Artificial Sequence: Synthetic oligonucleotide
  Antisense strand to SEQ ID NO: 2481896
ugcauuacaugccuauacc

SEQ ID NO: 2481898 - RNA, 19 nt, Artificial Sequence
  Description of Artificial Sequence: Synthetic oligonucleotide
  Sense strand starting at position 3233 of SEQ ID NO: 1887571
uuauuauugauaggucgga

SEQ ID NO: 2481899 - RNA, 19 nt, Artificial Sequence
  Description of Artificial Sequence: Synthetic oligonucleotide
  Antisense strand to SEQ ID NO: 2481898
uccgaccuaucaauaauaa

SEQ ID NO: 2481900 - RNA, 19 nt, Artificial Sequence
  Description of Artificial Sequence: Synthetic oligonucleotide
  Sense strand starting at position 3237 of SEQ ID NO: 1887571
uauugauaggucggacaaa

SEQ ID NO: 2481901 - RNA, 19 nt, Artificial Sequence
  Description of Artificial Sequence: Synthetic oligonucleotide
  Antisense strand to SEQ ID NO: 2481900
uuuguccgaccuaucaaua

SEQ ID NO: 2481902 - RNA, 19 nt, Artificial Sequence
  Description of Artificial Sequence: Synthetic oligonucleotide
  Sense strand starting at position 3596 of SEQ ID NO: 1887571
acgucuuuacgagcagugu

SEQ ID NO: 2481903 - RNA, 19 nt, Artificial Sequence
  Description of Artificial Sequence: Synthetic oligonucleotide
  Antisense strand to SEQ ID NO: 2481902
acacugcucguaaagacgu

SEQ ID NO: 2481904 - RNA, 19 nt, Artificial Sequence
  Description of Artificial Sequence: Synthetic oligonucleotide
  Sense strand starting at position 3655 of SEQ ID NO: 1887571
agaggauggcuuuguauug

SEQ ID NO: 2481905 - RNA, 19 nt, Artificial Sequence
  Description of Artificial Sequence: Synthetic oligonucleotide
  Antisense strand to SEQ ID NO: 2481904
caauacaaagccauccucu

SEQ ID NO: 2481906 - RNA, 19 nt, Artificial Sequence
  Description of Artificial Sequence: Synthetic oligonucleotide
  Sense strand starting at position 3656 of SEQ ID NO: 1887571
gaggauggcuuuguauuga

SEQ ID NO: 2481907 - RNA, 19 nt, Artificial Sequence
  Description of Artificial Sequence: Synthetic oligonucleotide
  Antisense strand to SEQ ID NO: 2481906
ucaauacaaagccauccuc

SEQ ID NO: 2481908 - RNA, 19 nt, Artificial Sequence
  Description of Artificial Sequence: Synthetic oligonucleotide
  Sense strand starting at position 3661 of SEQ ID NO: 1887571
uggcuuuguauugagagac

SEQ ID NO: 2481909 - RNA, 19 nt, Artificial Sequence
  Description of Artificial Sequence: Synthetic oligonucleotide
  Antisense strand to SEQ ID NO: 2481908
gucucucaauacaaagcca

SEQ ID NO: 2481910 - RNA, 19 nt, Artificial Sequence
  Description of Artificial Sequence: Synthetic oligonucleotide
  Sense strand starting at position 3679 of SEQ ID NO: 1887571
caugauauguaaguagcaa

SEQ ID NO: 2481911 - RNA, 19 nt, Artificial Sequence
  Description of Artificial Sequence: Synthetic oligonucleotide
  Antisense strand to SEQ ID NO: 2481910
uugcuacuuacauaucaug

SEQ ID NO: 2481912 - RNA, 19 nt, Artificial Sequence
  Description of Artificial Sequence: Synthetic oligonucleotide
  Sense strand starting at position 3694 of SEQ ID NO: 1887571
gcaacagaaguguaaaucu

SEQ ID NO: 2481913 - RNA, 19 nt, Artificial Sequence
  Description of Artificial Sequence: Synthetic oligonucleotide
  Antisense strand to SEQ ID NO: 2481912
agauuuacacuucuguugc

SEQ ID NO: 2481914 - RNA, 19 nt, Artificial Sequence
  Description of Artificial Sequence: Synthetic oligonucleotide
  Sense strand starting at position 3704 of SEQ ID NO: 1887571
uguaaaucugaguauuccu

SEQ ID NO: 2481915 - RNA, 19 nt, Artificial Sequence
  Description of Artificial Sequence: Synthetic oligonucleotide
  Antisense strand to SEQ ID NO: 2481914
aggaauacucagauuuaca

SEQ ID NO: 2481916 - RNA, 19 nt, Artificial Sequence
  Description of Artificial Sequence: Synthetic oligonucleotide
  Sense strand starting at position 3787 of SEQ ID NO: 1887571
agauguguugauuagugaa

SEQ ID NO: 2481917 - RNA, 19 nt, Artificial Sequence
  Description of Artificial Sequence: Synthetic oligonucleotide
  Antisense strand to SEQ ID NO: 2481916
uucacuaaucaacacaucu

SEQ ID NO: 2481918 - RNA, 19 nt, Artificial Sequence
  Description of Artificial Sequence: Synthetic oligonucleotide
  Sense strand starting at position 3789 of SEQ ID NO: 1887571
auguguugauuagugaauu

SEQ ID NO: 2481919 - RNA, 19 nt, Artificial Sequence
  Description of Artificial Sequence: Synthetic oligonucleotide
  Antisense strand to SEQ ID NO: 2481918
aauucacuaaucaacacau

SEQ ID NO: 2481920 - RNA, 19 nt, Artificial Sequence
  Description of Artificial Sequence: Synthetic oligonucleotide
  Sense strand starting at position 3905 of SEQ ID NO: 1887571
gaaguaugccugggaagga

SEQ ID NO: 2481921 - RNA, 19 nt, Artificial Sequence
  Description of Artificial Sequence: Synthetic oligonucleotide
  Antisense strand to SEQ ID NO: 2481920
uccuucccaggcauacuuc

SEQ ID NO: 2481922 - RNA, 19 nt, Artificial Sequence
  Description of Artificial Sequence: Synthetic oligonucleotide
  Sense strand starting at position 3983 of SEQ ID NO: 1887571
agagaacucuaggaaauag

SEQ ID NO: 2481923 - RNA, 19 nt, Artificial Sequence
  Description of Artificial Sequence: Synthetic oligonucleotide
  Antisense strand to SEQ ID NO: 2481922
cuauuuccuagaguucucu

SEQ ID NO: 2481924 - RNA, 19 nt, Artificial Sequence
  Description of Artificial Sequence: Synthetic oligonucleotide
  Sense strand starting at position 282 of SEQ ID NO: 1887572
uuaggagauuaguuuggau

SEQ ID NO: 2481925 - RNA, 19 nt, Artificial Sequence
  Description of Artificial Sequence: Synthetic oligonucleotide
  Antisense strand to SEQ ID NO: 2481924
auccaaacuaaucuccuaa

SEQ ID NO: 2481926 - RNA, 19 nt, Artificial Sequence
  Description of Artificial Sequence: Synthetic oligonucleotide
  Sense strand starting at position 284 of SEQ ID NO: 1887572
aggagauuaguuuggauug

SEQ ID NO: 2481927 - RNA, 19 nt, Artificial Sequence
  Description of Artificial Sequence: Synthetic oligonucleotide
  Antisense strand to SEQ ID NO: 2481926
caauccaaacuaaucuccu

SEQ ID NO: 2481928 - RNA, 19 nt, Artificial Sequence
  Description of Artificial Sequence: Synthetic oligonucleotide
  Sense strand starting at position 289 of SEQ ID NO: 1887572
auuaguuuggauuggucau

SEQ ID NO: 2481929 - RNA, 19 nt, Artificial Sequence
  Description of Artificial Sequence: Synthetic oligonucleotide
  Antisense strand to SEQ ID NO: 2481928
augaccaauccaaacuaau

SEQ ID NO: 2481930 - RNA, 19 nt, Artificial Sequence
  Description of Artificial Sequence: Synthetic oligonucleotide
  Sense strand starting at position 331 of SEQ ID NO: 1887572
guccauuaacacuggaaga

SEQ ID NO: 2481931 - RNA, 19 nt, Artificial Sequence
  Description of Artificial Sequence: Synthetic oligonucleotide
  Antisense strand to SEQ ID NO: 2481930
ucuuccaguguuaauggac

SEQ ID NO: 2481932 - RNA, 19 nt, Artificial Sequence
  Description of Artificial Sequence: Synthetic oligonucleotide
  Sense strand starting at position 507 of SEQ ID NO: 1887572
cuuaucuuucgggaaggca

SEQ ID NO: 2481933 - RNA, 19 nt, Artificial Sequence
  Description of Artificial Sequence: Synthetic oligonucleotide
  Antisense strand to SEQ ID NO: 2481932
ugccuucccgaaagauaag

SEQ ID NO: 2481934 - RNA, 19 nt, Artificial Sequence
  Description of Artificial Sequence: Synthetic oligonucleotide
  Sense strand starting at position 714 of SEQ ID NO: 1887572
ugguuuauaggccaaugua

SEQ ID NO: 2481935 - RNA, 19 nt, Artificial Sequence
  Description of Artificial Sequence: Synthetic oligonucleotide
  Antisense strand to SEQ ID NO: 2481934
uacauuggccuauaaacca

SEQ ID NO: 2481936 - RNA, 19 nt, Artificial Sequence
  Description of Artificial Sequence: Synthetic oligonucleotide
  Sense strand starting at position 776 of SEQ ID NO: 1887572
uuagaugaauuguuuccua

SEQ ID NO: 2481937 - RNA, 19 nt, Artificial Sequence
  Description of Artificial Sequence: Synthetic oligonucleotide
  Antisense strand to SEQ ID NO: 2481936
uaggaaacaauucaucuaa

SEQ ID NO: 2481938 - RNA, 19 nt, Artificial Sequence
  Description of Artificial Sequence: Synthetic oligonucleotide
  Sense strand starting at position 1016 of SEQ ID NO: 1887572
uccugaguacuuggaacuu

SEQ ID NO: 2481939 - RNA, 19 nt, Artificial Sequence
  Description of Artificial Sequence: Synthetic oligonucleotide
  Antisense strand to SEQ ID NO: 2481938
aaguuccaaguacucagga

SEQ ID NO: 2481940 - RNA, 19 nt, Artificial Sequence
  Description of Artificial Sequence: Synthetic oligonucleotide
  Sense strand starting at position 1194 of SEQ ID NO: 1887572
gcgcuuggccaggaagaaa

SEQ ID NO: 2481941 - RNA, 19 nt, Artificial Sequence
  Description of Artificial Sequence: Synthetic oligonucleotide
  Antisense strand to SEQ ID NO: 2481940
uuucuuccuggccaagcgc

SEQ ID NO: 2481942 - RNA, 19 nt, Artificial Sequence
  Description of Artificial Sequence: Synthetic oligonucleotide
  Sense strand starting at position 1322 of SEQ ID NO: 1887572
cucugagguacugagcaau

SEQ ID NO: 2481943 - RNA, 19 nt, Artificial Sequence
  Description of Artificial Sequence: Synthetic oligonucleotide
  Antisense strand to SEQ ID NO: 2481942
auugcucaguaccucagag

SEQ ID NO: 2481944 - RNA, 19 nt, Artificial Sequence
  Description of Artificial Sequence: Synthetic oligonucleotide
  Sense strand starting at position 1341 of SEQ ID NO: 1887572
ucacuacauucgcugaaau

SEQ ID NO: 2481945 - RNA, 19 nt, Artificial Sequence
  Description of Artificial Sequence: Synthetic oligonucleotide
  Antisense strand to SEQ ID NO: 2481944
auuucagcgaauguaguga

SEQ ID NO: 2481946 - RNA, 19 nt, Artificial Sequence
  Description of Artificial Sequence: Synthetic oligonucleotide
  Sense strand starting at position 1415 of SEQ ID NO: 1887572
auagcuauuccaugacgac

SEQ ID NO: 2481947 - RNA, 19 nt, Artificial Sequence
  Description of Artificial Sequence: Synthetic oligonucleotide
  Antisense strand to SEQ ID NO: 2481946
gucgucauggaauagcuau

SEQ ID NO: 2481948 - RNA, 19 nt, Artificial Sequence
  Description of Artificial Sequence: Synthetic oligonucleotide
  Sense strand starting at position 1416 of SEQ ID NO: 1887572
uagcuauuccaugacgaca

SEQ ID NO: 2481949 - RNA, 19 nt, Artificial Sequence
  Description of Artificial Sequence: Synthetic oligonucleotide
  Antisense strand to SEQ ID NO: 2481948
ugucgucauggaauagcua

SEQ ID NO: 2481950 - RNA, 19 nt, Artificial Sequence
  Description of Artificial Sequence: Synthetic oligonucleotide
  Sense strand starting at position 1592 of SEQ ID NO: 1887572
accucccaucgucagauua

SEQ ID NO: 2481951 - RNA, 19 nt, Artificial Sequence
  Description of Artificial Sequence: Synthetic oligonucleotide
  Antisense strand to SEQ ID NO: 2481950
uaaucugacgaugggaggu

SEQ ID NO: 2481952 - RNA, 19 nt, Artificial Sequence
  Description of Artificial Sequence: Synthetic oligonucleotide
  Sense strand starting at position 1599 of SEQ ID NO: 1887572
aucgucagauuauccuaau

SEQ ID NO: 2481953 - RNA, 19 nt, Artificial Sequence
  Description of Artificial Sequence: Synthetic oligonucleotide
  Antisense strand to SEQ ID NO: 2481952
auuaggauaaucugacgau

SEQ ID NO: 2481954 - RNA, 19 nt, Artificial Sequence
  Description of Artificial Sequence: Synthetic oligonucleotide
  Sense strand starting at position 1600 of SEQ ID NO: 1887572
ucgucagauuauccuaauc

SEQ ID NO: 2481955 - RNA, 19 nt, Artificial Sequence
  Description of Artificial Sequence: Synthetic oligonucleotide
  Antisense strand to SEQ ID NO: 2481954
gauuaggauaaucugacga

SEQ ID NO: 2481956 - RNA, 19 nt, Artificial Sequence
  Description of Artificial Sequence: Synthetic oligonucleotide
  Sense strand starting at position 1672 of SEQ ID NO: 1887572
gugggaggcguuuagacuu

SEQ ID NO: 2481957 - RNA, 19 nt, Artificial Sequence
  Description of Artificial Sequence: Synthetic oligonucleotide
  Antisense strand to SEQ ID NO: 2481956
aagucuaaacgccucccac

SEQ ID NO: 2481958 - RNA, 19 nt, Artificial Sequence
  Description of Artificial Sequence: Synthetic oligonucleotide
  Sense strand starting at position 1692 of SEQ ID NO: 1887572
aggaauuccugucuauaca

SEQ ID NO: 2481959 - RNA, 19 nt, Artificial Sequence
  Description of Artificial Sequence: Synthetic oligonucleotide
  Antisense strand to SEQ ID NO: 2481958
uguauagacaggaauuccu

SEQ ID NO: 2481960 - RNA, 19 nt, Artificial Sequence
  Description of Artificial Sequence: Synthetic oligonucleotide
  Sense strand starting at position 1693 of SEQ ID NO: 1887572
ggaauuccugucuauacac

SEQ ID NO: 2481961 - RNA, 19 nt, Artificial Sequence
  Description of Artificial Sequence: Synthetic oligonucleotide
  Antisense strand to SEQ ID NO: 2481960
guguauagacaggaauucc

SEQ ID NO: 2481962 - RNA, 19 nt, Artificial Sequence
  Description of Artificial Sequence: Synthetic oligonucleotide
  Sense strand starting at position 1780 of SEQ ID NO: 1887572
ggcgcucagagauauggaa

SEQ ID NO: 2481963 - RNA, 19 nt, Artificial Sequence
  Description of Artificial Sequence: Synthetic oligonucleotide
  Antisense strand to SEQ ID NO: 2481962
uuccauaucucugagcgcc

SEQ ID NO: 2481964 - RNA, 19 nt, Artificial Sequence
  Description of Artificial Sequence: Synthetic oligonucleotide
  Sense strand starting at position 1782 of SEQ ID NO: 1887572
cgcucagagauauggaaua

SEQ ID NO: 2481965 - RNA, 19 nt, Artificial Sequence
  Description of Artificial Sequence: Synthetic oligonucleotide
  Antisense strand to SEQ ID NO: 2481964
uauuccauaucucugagcg

SEQ ID NO: 2481966 - RNA, 19 nt, Artificial Sequence
  Description of Artificial Sequence: Synthetic oligonucleotide
  Sense strand starting at position 1888 of SEQ ID NO: 1887572
uccuuuggcauuggaggaa

SEQ ID NO: 2481967 - RNA, 19 nt, Artificial Sequence
  Description of Artificial Sequence: Synthetic oligonucleotide
  Antisense strand to SEQ ID NO: 2481966
uuccuccaaugccaaagga

SEQ ID NO: 2481968 - RNA, 19 nt, Artificial Sequence
  Description of Artificial Sequence: Synthetic oligonucleotide
  Sense strand starting at position 1960 of SEQ ID NO: 1887572
gagugaauucugggaacug

SEQ ID NO: 2481969 - RNA, 19 nt, Artificial Sequence
  Description of Artificial Sequence: Synthetic oligonucleotide
  Antisense strand to SEQ ID NO: 2481968
caguucccagaauucacuc

SEQ ID NO: 2481970 - RNA, 19 nt, Artificial Sequence
  Description of Artificial Sequence: Synthetic oligonucleotide
  Sense strand starting at position 2275 of SEQ ID NO: 1887572
cacggaagcuuucugggau

SEQ ID NO: 2481971 - RNA, 19 nt, Artificial Sequence
  Description of Artificial Sequence: Synthetic oligonucleotide
  Antisense strand to SEQ ID NO: 2481970
aucccagaaagcuuccgug

SEQ ID NO: 2481972 - RNA, 19 nt, Artificial Sequence
  Description of Artificial Sequence: Synthetic oligonucleotide
  Sense strand starting at position 2433 of SEQ ID NO: 1887572
uggaguguuacucaauguc

SEQ ID NO: 2481973 - RNA, 19 nt, Artificial Sequence
  Description of Artificial Sequence: Synthetic oligonucleotide
  Antisense strand to SEQ ID NO: 2481972
gacauugaguaacacucca

SEQ ID NO: 2481974 - RNA, 19 nt, Artificial Sequence
  Description of Artificial Sequence: Synthetic oligonucleotide
  Sense strand starting at position 2439 of SEQ ID NO: 1887572
guuacucaauguccuuaua

SEQ ID NO: 2481975 - RNA, 19 nt, Artificial Sequence
  Description of Artificial Sequence: Synthetic oligonucleotide
  Antisense strand to SEQ ID NO: 2481974
uauaaggacauugaguaac

SEQ ID NO: 2481976 - RNA, 19 nt, Artificial Sequence
  Description of Artificial Sequence: Synthetic oligonucleotide
  Sense strand starting at position 2585 of SEQ ID NO: 1887572
cuuguuaacuucccgaaga

SEQ ID NO: 2481977 - RNA, 19 nt, Artificial Sequence
  Description of Artificial Sequence: Synthetic oligonucleotide
  Antisense strand to SEQ ID NO: 2481976
ucuucgggaaguuaacaag

SEQ ID NO: 2481978 - RNA, 19 nt, Artificial Sequence
  Description of Artificial Sequence: Synthetic oligonucleotide
  Sense strand starting at position 2775 of SEQ ID NO: 1887572
cgaugcagucaggguauuu

SEQ ID NO: 2481979 - RNA, 19 nt, Artificial Sequence
  Description of Artificial Sequence: Synthetic oligonucleotide
  Antisense strand to SEQ ID NO: 2481978
aaauacccugacugcaucg

SEQ ID NO: 2481980 - RNA, 19 nt, Artificial Sequence
  Description of Artificial Sequence: Synthetic oligonucleotide
  Sense strand starting at position 2862 of SEQ ID NO: 1887572
agggcaaaucucuauguga

SEQ ID NO: 2481981 - RNA, 19 nt, Artificial Sequence
  Description of Artificial Sequence: Synthetic oligonucleotide
  Antisense strand to SEQ ID NO: 2481980
ucacauagagauuugcccu

SEQ ID NO: 2481982 - RNA, 19 nt, Artificial Sequence
  Description of Artificial Sequence: Synthetic oligonucleotide
  Sense strand starting at position 2864 of SEQ ID NO: 1887572
ggcaaaucucuaugugauu

SEQ ID NO: 2481983 - RNA, 19 nt, Artificial Sequence
  Description of Artificial Sequence: Synthetic oligonucleotide
  Antisense strand to SEQ ID NO: 2481982
aaucacauagagauuugcc

SEQ ID NO: 2481984 - RNA, 19 nt, Artificial Sequence
  Description of Artificial Sequence: Synthetic oligonucleotide
  Sense strand starting at position 2865 of SEQ ID NO: 1887572
gcaaaucucuaugugauug

SEQ ID NO: 2481985 - RNA, 19 nt, Artificial Sequence
  Description of Artificial Sequence: Synthetic oligonucleotide
  Antisense strand to SEQ ID NO: 2481984
caaucacauagagauuugc

SEQ ID NO: 2481986 - RNA, 19 nt, Artificial Sequence
  Description of Artificial Sequence: Synthetic oligonucleotide
  Sense strand starting at position 2935 of SEQ ID NO: 1887572
cucgggaauggguguugau

SEQ ID NO: 2481987 - RNA, 19 nt, Artificial Sequence
  Description of Artificial Sequence: Synthetic oligonucleotide
  Antisense strand to SEQ ID NO: 2481986
aucaacacccauucccgag

SEQ ID NO: 2481988 - RNA, 19 nt, Artificial Sequence
  Description of Artificial Sequence: Synthetic oligonucleotide
  Sense strand starting at position 2944 of SEQ ID NO: 1887572
ggguguugauaaucauuaa

SEQ ID NO: 2481989 - RNA, 19 nt, Artificial Sequence
  Description of Artificial Sequence: Synthetic oligonucleotide
  Antisense strand to SEQ ID NO: 2481988
uuaaugauuaucaacaccc

SEQ ID NO: 2481990 - RNA, 19 nt, Artificial Sequence
  Description of Artificial Sequence: Synthetic oligonucleotide
  Sense strand starting at position 3145 of SEQ ID NO: 1887572
ugaucaccucuuggauaca

SEQ ID NO: 2481991 - RNA, 19 nt, Artificial Sequence
  Description of Artificial Sequence: Synthetic oligonucleotide
  Antisense strand to SEQ ID NO: 2481990
uguauccaagaggugauca

SEQ ID NO: 2481992 - RNA, 19 nt, Artificial Sequence
  Description of Artificial Sequence: Synthetic oligonucleotide
  Sense strand starting at position 3215 of SEQ ID NO: 1887572
accugauugaaaggacguu

SEQ ID NO: 2481993 - RNA, 19 nt, Artificial Sequence
  Description of Artificial Sequence: Synthetic oligonucleotide
  Antisense strand to SEQ ID NO: 2481992
aacguccuuucaaucaggu

SEQ ID NO: 2481994 - RNA, 19 nt, Artificial Sequence
  Description of Artificial Sequence: Synthetic oligonucleotide
  Sense strand starting at position 3326 of SEQ ID NO: 1887572
ggaacuguaucauugugga

SEQ ID NO: 2481995 - RNA, 19 nt, Artificial Sequence
  Description of Artificial Sequence: Synthetic oligonucleotide
  Antisense strand to SEQ ID NO: 2481994
uccacaaugauacaguucc

SEQ ID NO: 2481996 - RNA, 19 nt, Artificial Sequence
  Description of Artificial Sequence: Synthetic oligonucleotide
  Sense strand starting at position 3392 of SEQ ID NO: 1887572
ccauguauccaagauguaa

SEQ ID NO: 2481997 - RNA, 19 nt, Artificial Sequence
  Description of Artificial Sequence: Synthetic oligonucleotide
  Antisense strand to SEQ ID NO: 2481996
uuacaucuuggauacaugg

SEQ ID NO: 2481998 - RNA, 19 nt, Artificial Sequence
  Description of Artificial Sequence: Synthetic oligonucleotide
  Sense strand starting at position 3396 of SEQ ID NO: 1887572
guauccaagauguaaaggu

SEQ ID NO: 2481999 - RNA, 19 nt, Artificial Sequence
  Description of Artificial Sequence: Synthetic oligonucleotide
  Antisense strand to SEQ ID NO: 2481998
accuuuacaucuuggauac

SEQ ID NO: 2482000 - RNA, 19 nt, Artificial Sequence
  Description of Artificial Sequence: Synthetic oligonucleotide
  Sense strand starting at position 3400 of SEQ ID NO: 1887572
ccaagauguaaagguagua

SEQ ID NO: 2482001 - RNA, 19 nt, Artificial Sequence
  Description of Artificial Sequence: Synthetic oligonucleotide
  Antisense strand to SEQ ID NO: 2482000
uacuaccuuuacaucuugg

SEQ ID NO: 2482002 - RNA, 19 nt, Artificial Sequence
  Description of Artificial Sequence: Synthetic oligonucleotide
  Sense strand starting at position 3885 of SEQ ID NO: 1887572
agugaacugccauauuaua

SEQ ID NO: 2482003 - RNA, 19 nt, Artificial Sequence
  Description of Artificial Sequence: Synthetic oligonucleotide
  Antisense strand to SEQ ID NO: 2482002
uauaauauggcaguucacu

SEQ ID NO: 2482004 - RNA, 19 nt, Artificial Sequence
  Description of Artificial Sequence: Synthetic oligonucleotide
  Sense strand starting at position 554 of SEQ ID NO: 1887573
gugagcuagggucacauua

SEQ ID NO: 2482005 - RNA, 19 nt, Artificial Sequence
  Description of Artificial Sequence: Synthetic oligonucleotide
  Antisense strand to SEQ ID NO: 2482004
uaaugugacccuagcucac

SEQ ID NO: 2482006 - RNA, 19 nt, Artificial Sequence
  Description of Artificial Sequence: Synthetic oligonucleotide
  Sense strand starting at position 556 of SEQ ID NO: 1887573
gagcuagggucacauuacu

SEQ ID NO: 2482007 - RNA, 19 nt, Artificial Sequence
  Description of Artificial Sequence: Synthetic oligonucleotide
  Antisense strand to SEQ ID NO: 2482006
aguaaugugacccuagcuc

SEQ ID NO: 2482008 - RNA, 19 nt, Artificial Sequence
  Description of Artificial Sequence: Synthetic oligonucleotide
  Sense strand starting at position 564 of SEQ ID NO: 1887573
gucacauuacugcacucua

SEQ ID NO: 2482009 - RNA, 19 nt, Artificial Sequence
  Description of Artificial Sequence: Synthetic oligonucleotide
  Antisense strand to SEQ ID NO: 2482008
uagagugcaguaaugugac

SEQ ID NO: 2482010 - RNA, 19 nt, Artificial Sequence
  Description of Artificial Sequence: Synthetic oligonucleotide
  Sense strand starting at position 577 of SEQ ID NO: 1887573
acucuauccugggugagaa

SEQ ID NO: 2482011 - RNA, 19 nt, Artificial Sequence
  Description of Artificial Sequence: Synthetic oligonucleotide
  Antisense strand to SEQ ID NO: 2482010
uucucacccaggauagagu

SEQ ID NO: 2482012 - RNA, 19 nt, Artificial Sequence
  Description of Artificial Sequence: Synthetic oligonucleotide
  Sense strand starting at position 578 of SEQ ID NO: 1887573
cucuauccugggugagaac

SEQ ID NO: 2482013 - RNA, 19 nt, Artificial Sequence
  Description of Artificial Sequence: Synthetic oligonucleotide
  Antisense strand to SEQ ID NO: 2482012
guucucacccaggauagag

SEQ ID NO: 2482014 - RNA, 19 nt, Artificial Sequence
  Description of Artificial Sequence: Synthetic oligonucleotide
  Sense strand starting at position 593 of SEQ ID NO: 1887573
gaaccugucucagaaagag

SEQ ID NO: 2482015 - RNA, 19 nt, Artificial Sequence
  Description of Artificial Sequence: Synthetic oligonucleotide
  Antisense strand to SEQ ID NO: 2482014
cucuuucugagacagguuc

SEQ ID NO: 2482016 - RNA, 19 nt, Artificial Sequence
  Description of Artificial Sequence: Synthetic oligonucleotide
  Sense strand starting at position 1146 of SEQ ID NO: 1887573
cuaacauaagaccguguuu

SEQ ID NO: 2482017 - RNA, 19 nt, Artificial Sequence
  Description of Artificial Sequence: Synthetic oligonucleotide
  Antisense strand to SEQ ID NO: 2482016
aaacacggucuuauguuag

SEQ ID NO: 2482018 - RNA, 19 nt, Artificial Sequence
  Description of Artificial Sequence: Synthetic oligonucleotide
  Sense strand starting at position 1148 of SEQ ID NO: 1887573
aacauaagaccguguuucu

SEQ ID NO: 2482019 - RNA, 19 nt, Artificial Sequence
  Description of Artificial Sequence: Synthetic oligonucleotide
  Antisense strand to SEQ ID NO: 2482018
agaaacacggucuuauguu

SEQ ID NO: 2482020 - RNA, 19 nt, Artificial Sequence
  Description of Artificial Sequence: Synthetic oligonucleotide
  Sense strand starting at position 1290 of SEQ ID NO: 1887573
acaucugaauaguuguauu

SEQ ID NO: 2482021 - RNA, 19 nt, Artificial Sequence
  Description of Artificial Sequence: Synthetic oligonucleotide
  Antisense strand to SEQ ID NO: 2482020
aauacaacuauucagaugu

SEQ ID NO: 2482022 - RNA, 19 nt, Artificial Sequence
  Description of Artificial Sequence: Synthetic oligonucleotide
  Sense strand starting at position 1376 of SEQ ID NO: 1887573
ggugacuucuuccaaacac

SEQ ID NO: 2482023 - RNA, 19 nt, Artificial Sequence
  Description of Artificial Sequence: Synthetic oligonucleotide
  Antisense strand to SEQ ID NO: 2482022
guguuuggaagaagucacc

SEQ ID NO: 2482024 - RNA, 19 nt, Artificial Sequence
  Description of Artificial Sequence: Synthetic oligonucleotide
  Sense strand starting at position 1474 of SEQ ID NO: 1887573
ucagcauagccuuguuaac

SEQ ID NO: 2482025 - RNA, 19 nt, Artificial Sequence
  Description of Artificial Sequence: Synthetic oligonucleotide
  Antisense strand to SEQ ID NO: 2482024
guuaacaaggcuaugcuga

SEQ ID NO: 2482026 - RNA, 19 nt, Artificial Sequence
  Description of Artificial Sequence: Synthetic oligonucleotide
  Sense strand starting at position 1476 of SEQ ID NO: 1887573
agcauagccuuguuaacaa

SEQ ID NO: 2482027 - RNA, 19 nt, Artificial Sequence
  Description of Artificial Sequence: Synthetic oligonucleotide
  Antisense strand to SEQ ID NO: 2482026
uuguuaacaaggcuaugcu

SEQ ID NO: 2482028 - RNA, 19 nt, Artificial Sequence
  Description of Artificial Sequence: Synthetic oligonucleotide
  Sense strand starting at position 2262 of SEQ ID NO: 1887573
cggcgagguucccagaaug

SEQ ID NO: 2482029 - RNA, 19 nt, Artificial Sequence
  Description of Artificial Sequence: Synthetic oligonucleotide
  Antisense strand to SEQ ID NO: 2482028
cauucugggaaccucgccg

SEQ ID NO: 2482030 - RNA, 19 nt, Artificial Sequence
  Description of Artificial Sequence: Synthetic oligonucleotide
  Sense strand starting at position 2319 of SEQ ID NO: 1887573
cccauauugugggagagau

SEQ ID NO: 2482031 - RNA, 19 nt, Artificial Sequence
  Description of Artificial Sequence: Synthetic oligonucleotide
  Antisense strand to SEQ ID NO: 2482030
aucucucccacaauauggg

SEQ ID NO: 2482032 - RNA, 19 nt, Artificial Sequence
  Description of Artificial Sequence: Synthetic oligonucleotide
  Sense strand starting at position 2691 of SEQ ID NO: 1887573
ccgaaauccugucagaauc

SEQ ID NO: 2482033 - RNA, 19 nt, Artificial Sequence
  Description of Artificial Sequence: Synthetic oligonucleotide
  Antisense strand to SEQ ID NO: 2482032
gauucugacaggauuucgg

SEQ ID NO: 2482034 - RNA, 19 nt, Artificial Sequence
  Description of Artificial Sequence: Synthetic oligonucleotide
  Sense strand starting at position 2693 of SEQ ID NO: 1887573
gaaauccugucagaaucgu

SEQ ID NO: 2482035 - RNA, 19 nt, Artificial Sequence
  Description of Artificial Sequence: Synthetic oligonucleotide
  Antisense strand to SEQ ID NO: 2482034
acgauucugacaggauuuc

SEQ ID NO: 2482036 - RNA, 19 nt, Artificial Sequence
  Description of Artificial Sequence: Synthetic oligonucleotide
  Sense strand starting at position 2699 of SEQ ID NO: 1887573
cugucagaaucgucuagaa

SEQ ID NO: 2482037 - RNA, 19 nt, Artificial Sequence
  Description of Artificial Sequence: Synthetic oligonucleotide
  Antisense strand to SEQ ID NO: 2482036
uucuagacgauucugacag

SEQ ID NO: 2482038 - RNA, 19 nt, Artificial Sequence
  Description of Artificial Sequence: Synthetic oligonucleotide
  Sense strand starting at position 2701 of SEQ ID NO: 1887573
gucagaaucgucuagaaau

SEQ ID NO: 2482039 - RNA, 19 nt, Artificial Sequence
  Description of Artificial Sequence: Synthetic oligonucleotide
  Antisense strand to SEQ ID NO: 2482038
auuucuagacgauucugac

SEQ ID NO: 2482040 - RNA, 19 nt, Artificial Sequence
  Description of Artificial Sequence: Synthetic oligonucleotide
  Sense strand starting at position 2708 of SEQ ID NO: 1887573
ucgucuagaaauugucaga

SEQ ID NO: 2482041 - RNA, 19 nt, Artificial Sequence
  Description of Artificial Sequence: Synthetic oligonucleotide
  Antisense strand to SEQ ID NO: 2482040
ucugacaauuucuagacga

SEQ ID NO: 2482042 - RNA, 19 nt, Artificial Sequence
  Description of Artificial Sequence: Synthetic oligonucleotide
  Sense strand starting at position 2711 of SEQ ID NO: 1887573
ucuagaaauugucagacuu

SEQ ID NO: 2482043 - RNA, 19 nt, Artificial Sequence
  Description of Artificial Sequence: Synthetic oligonucleotide
  Antisense strand to SEQ ID NO: 2482042
aagucugacaauuucuaga

SEQ ID NO: 2482044 - RNA, 19 nt, Artificial Sequence
  Description of Artificial Sequence: Synthetic oligonucleotide
  Sense strand starting at position 2793 of SEQ ID NO: 1887573
caccuagacucgugucaga

SEQ ID NO: 2482045 - RNA, 19 nt, Artificial Sequence
  Description of Artificial Sequence: Synthetic oligonucleotide
  Antisense strand to SEQ ID NO: 2482044
ucugacacgagucuaggug

SEQ ID NO: 2482046 - RNA, 19 nt, Artificial Sequence
  Description of Artificial Sequence: Synthetic oligonucleotide
  Sense strand starting at position 2796 of SEQ ID NO: 1887573
cuagacucgugucagagau

SEQ ID NO: 2482047 - RNA, 19 nt, Artificial Sequence
  Description of Artificial Sequence: Synthetic oligonucleotide
  Antisense strand to SEQ ID NO: 2482046
aucucugacacgagucuag

SEQ ID NO: 2482048 - RNA, 19 nt, Artificial Sequence
  Description of Artificial Sequence: Synthetic oligonucleotide
  Sense strand starting at position 2816 of SEQ ID NO: 1887573
cccagaaauccuggcaggu

SEQ ID NO: 2482049 - RNA, 19 nt, Artificial Sequence
  Description of Artificial Sequence: Synthetic oligonucleotide
  Antisense strand to SEQ ID NO: 2482048
accugccaggauuucuggg

SEQ ID NO: 2482050 - RNA, 19 nt, Artificial Sequence
  Description of Artificial Sequence: Synthetic oligonucleotide
  Sense strand starting at position 2857 of SEQ ID NO: 1887573
cucagauuccgucagagag

SEQ ID NO: 2482051 - RNA, 19 nt, Artificial Sequence
  Description of Artificial Sequence: Synthetic oligonucleotide
  Antisense strand to SEQ ID NO: 2482050
cucucugacggaaucugag

SEQ ID NO: 2482052 - RNA, 19 nt, Artificial Sequence
  Description of Artificial Sequence: Synthetic oligonucleotide
  Sense strand starting at position 2859 of SEQ ID NO: 1887573
cagauuccgucagagagca

SEQ ID NO: 2482053 - RNA, 19 nt, Artificial Sequence
  Description of Artificial Sequence: Synthetic oligonucleotide
  Antisense strand to SEQ ID NO: 2482052
ugcucucugacggaaucug

SEQ ID NO: 2482054 - RNA, 19 nt, Artificial Sequence
  Description of Artificial Sequence: Synthetic oligonucleotide
  Sense strand starting at position 3517 of SEQ ID NO: 1887573
ccguguuuccagaacggug

SEQ ID NO: 2482055 - RNA, 19 nt, Artificial Sequence
  Description of Artificial Sequence: Synthetic oligonucleotide
  Antisense strand to SEQ ID NO: 2482054
caccguucuggaaacacgg

SEQ ID NO: 2482056 - RNA, 19 nt, Artificial Sequence
  Description of Artificial Sequence: Synthetic oligonucleotide
  Sense strand starting at position 3827 of SEQ ID NO: 1887573
ccauguacauccugaguug

SEQ ID NO: 2482057 - RNA, 19 nt, Artificial Sequence
  Description of Artificial Sequence: Synthetic oligonucleotide
  Antisense strand to SEQ ID NO: 2482056
caacucaggauguacaugg

SEQ ID NO: 2482058 - RNA, 19 nt, Artificial Sequence
  Description of Artificial Sequence: Synthetic oligonucleotide
  Sense strand starting at position 129 of SEQ ID NO: 1887574
aucugacaucacuacuguu

SEQ ID NO: 2482059 - RNA, 19 nt, Artificial Sequence
  Description of Artificial Sequence: Synthetic oligonucleotide
  Antisense strand to SEQ ID NO: 2482058
aacaguagugaugucagau

SEQ ID NO: 2482060 - RNA, 19 nt, Artificial Sequence
  Description of Artificial Sequence: Synthetic oligonucleotide
  Sense strand starting at position 329 of SEQ ID NO: 1887574
cagagaagcucuuugcuga

SEQ ID NO: 2482061 - RNA, 19 nt, Artificial Sequence
  Description of Artificial Sequence: Synthetic oligonucleotide
  Antisense strand to SEQ ID NO: 2482060
ucagcaaagagcuucucug

SEQ ID NO: 2482062 - RNA, 19 nt, Artificial Sequence
  Description of Artificial Sequence: Synthetic oligonucleotide
  Sense strand starting at position 330 of SEQ ID NO: 1887574
agagaagcucuuugcugau

SEQ ID NO: 2482063 - RNA, 19 nt, Artificial Sequence
  Description of Artificial Sequence: Synthetic oligonucleotide
  Antisense strand to SEQ ID NO: 2482062
aucagcaaagagcuucucu

SEQ ID NO: 2482064 - RNA, 19 nt, Artificial Sequence
  Description of Artificial Sequence: Synthetic oligonucleotide
  Sense strand starting at position 332 of SEQ ID NO: 1887574
agaagcucuuugcugauuu

SEQ ID NO: 2482065 - RNA, 19 nt, Artificial Sequence
  Description of Artificial Sequence: Synthetic oligonucleotide
  Antisense strand to SEQ ID NO: 2482064
aaaucagcaaagagcuucu

SEQ ID NO: 2482066 - RNA, 19 nt, Artificial Sequence
  Description of Artificial Sequence: Synthetic oligonucleotide
  Sense strand starting at position 344 of SEQ ID NO: 1887574
cugauuuggcccugccaua

SEQ ID NO: 2482067 - RNA, 19 nt, Artificial Sequence
  Description of Artificial Sequence: Synthetic oligonucleotide
  Antisense strand to SEQ ID NO: 2482066
uauggcagggccaaaucag

SEQ ID NO: 2482068 - RNA, 19 nt, Artificial Sequence
  Description of Artificial Sequence: Synthetic oligonucleotide
  Sense strand starting at position 392 of SEQ ID NO: 1887574
ucugauaucuggcuuccaa

SEQ ID NO: 2482069 - RNA, 19 nt, Artificial Sequence
  Description of Artificial Sequence: Synthetic oligonucleotide
  Antisense strand to SEQ ID NO: 2482068
uuggaagccagauaucaga

SEQ ID NO: 2482070 - RNA, 19 nt, Artificial Sequence
  Description of Artificial Sequence: Synthetic oligonucleotide
  Sense strand starting at position 415 of SEQ ID NO: 1887574
auucccuauaguugugagu

SEQ ID NO: 2482071 - RNA, 19 nt, Artificial Sequence
  Description of Artificial Sequence: Synthetic oligonucleotide
  Antisense strand to SEQ ID NO: 2482070
acucacaacuauagggaau

SEQ ID NO: 2482072 - RNA, 19 nt, Artificial Sequence
  Description of Artificial Sequence: Synthetic oligonucleotide
  Sense strand starting at position 421 of SEQ ID NO: 1887574
uauaguugugaguaagcaa

SEQ ID NO: 2482073 - RNA, 19 nt, Artificial Sequence
  Description of Artificial Sequence: Synthetic oligonucleotide
  Antisense strand to SEQ ID NO: 2482072
uugcuuacucacaacuaua

SEQ ID NO: 2482074 - RNA, 19 nt, Artificial Sequence
  Description of Artificial Sequence: Synthetic oligonucleotide
  Sense strand starting at position 496 of SEQ ID NO: 1887574
gaaguacuuuaugcaagau

SEQ ID NO: 2482075 - RNA, 19 nt, Artificial Sequence
  Description of Artificial Sequence: Synthetic oligonucleotide
  Antisense strand to SEQ ID NO: 2482074
aucuugcauaaaguacuuc

SEQ ID NO: 2482076 - RNA, 19 nt, Artificial Sequence
  Description of Artificial Sequence: Synthetic oligonucleotide
  Sense strand starting at position 506 of SEQ ID NO: 1887574
augcaagauugugcuacuu

SEQ ID NO: 2482077 - RNA, 19 nt, Artificial Sequence
  Description of Artificial Sequence: Synthetic oligonucleotide
  Antisense strand to SEQ ID NO: 2482076
aaguagcacaaucuugcau

SEQ ID NO: 2482078 - RNA, 19 nt, Artificial Sequence
  Description of Artificial Sequence: Synthetic oligonucleotide
  Sense strand starting at position 518 of SEQ ID NO: 1887574
gcuacuuguguguuuaccu

SEQ ID NO: 2482079 - RNA, 19 nt, Artificial Sequence
  Description of Artificial Sequence: Synthetic oligonucleotide
  Antisense strand to SEQ ID NO: 2482078
agguaaacacacaaguagc

SEQ ID NO: 2482080 - RNA, 19 nt, Artificial Sequence
  Description of Artificial Sequence: Synthetic oligonucleotide
  Sense strand starting at position 529 of SEQ ID NO: 1887574
guuuaccuuucuguagauu

SEQ ID NO: 2482081 - RNA, 19 nt, Artificial Sequence
  Description of Artificial Sequence: Synthetic oligonucleotide
  Antisense strand to SEQ ID NO: 2482080
aaucuacagaaagguaaac

SEQ ID NO: 2482082 - RNA, 19 nt, Artificial Sequence
  Description of Artificial Sequence: Synthetic oligonucleotide
  Sense strand starting at position 638 of SEQ ID NO: 1887574
gggacucacuuuccauagu

SEQ ID NO: 2482083 - RNA, 19 nt, Artificial Sequence
  Description of Artificial Sequence: Synthetic oligonucleotide
  Antisense strand to SEQ ID NO: 2482082
acuauggaaagugaguccc

SEQ ID NO: 2482084 - RNA, 19 nt, Artificial Sequence
  Description of Artificial Sequence: Synthetic oligonucleotide
  Sense strand starting at position 662 of SEQ ID NO: 1887574
cucaguaugcagugaggaa

SEQ ID NO: 2482085 - RNA, 19 nt, Artificial Sequence
  Description of Artificial Sequence: Synthetic oligonucleotide
  Antisense strand to SEQ ID NO: 2482084
uuccucacugcauacugag

SEQ ID NO: 2482086 - RNA, 19 nt, Artificial Sequence
  Description of Artificial Sequence: Synthetic oligonucleotide
  Sense strand starting at position 663 of SEQ ID NO: 1887574
ucaguaugcagugaggaaa

SEQ ID NO: 2482087 - RNA, 19 nt, Artificial Sequence
  Description of Artificial Sequence: Synthetic oligonucleotide
  Antisense strand to SEQ ID NO: 2482086
uuuccucacugcauacuga

SEQ ID NO: 2482088 - RNA, 19 nt, Artificial Sequence
  Description of Artificial Sequence: Synthetic oligonucleotide
  Sense strand starting at position 816 of SEQ ID NO: 1887574
agaugaguccaagguguua

SEQ ID NO: 2482089 - RNA, 19 nt, Artificial Sequence
  Description of Artificial Sequence: Synthetic oligonucleotide
  Antisense strand to SEQ ID NO: 2482088
uaacaccuuggacucaucu

SEQ ID NO: 2482090 - RNA, 19 nt, Artificial Sequence
  Description of Artificial Sequence: Synthetic oligonucleotide
  Sense strand starting at position 818 of SEQ ID NO: 1887574
augaguccaagguguuaca

SEQ ID NO: 2482091 - RNA, 19 nt, Artificial Sequence
  Description of Artificial Sequence: Synthetic oligonucleotide
  Antisense strand to SEQ ID NO: 2482090
uguaacaccuuggacucau

SEQ ID NO: 2482092 - RNA, 19 nt, Artificial Sequence
  Description of Artificial Sequence: Synthetic oligonucleotide
  Sense strand starting at position 830 of SEQ ID NO: 1887574
uguuacaugcaguaucaua

SEQ ID NO: 2482093 - RNA, 19 nt, Artificial Sequence
  Description of Artificial Sequence: Synthetic oligonucleotide
  Antisense strand to SEQ ID NO: 2482092
uaugauacugcauguaaca

SEQ ID NO: 2482094 - RNA, 19 nt, Artificial Sequence
  Description of Artificial Sequence: Synthetic oligonucleotide
  Sense strand starting at position 1168 of SEQ ID NO: 1887574
guuggagguucagugaaga

SEQ ID NO: 2482095 - RNA, 19 nt, Artificial Sequence
  Description of Artificial Sequence: Synthetic oligonucleotide
  Antisense strand to SEQ ID NO: 2482094
ucuucacugaaccuccaac

SEQ ID NO: 2482096 - RNA, 19 nt, Artificial Sequence
  Description of Artificial Sequence: Synthetic oligonucleotide
  Sense strand starting at position 1225 of SEQ ID NO: 1887574
ggaugaggaacguguuuga

SEQ ID NO: 2482097 - RNA, 19 nt, Artificial Sequence
  Description of Artificial Sequence: Synthetic oligonucleotide
  Antisense strand to SEQ ID NO: 2482096
ucaaacacguuccucaucc

SEQ ID NO: 2482098 - RNA, 19 nt, Artificial Sequence
  Description of Artificial Sequence: Synthetic oligonucleotide
  Sense strand starting at position 1303 of SEQ ID NO: 1887574
cacugacuggcuuauggau

SEQ ID NO: 2482099 - RNA, 19 nt, Artificial Sequence
  Description of Artificial Sequence: Synthetic oligonucleotide
  Antisense strand to SEQ ID NO: 2482098
auccauaagccagucagug

SEQ ID NO: 2482100 - RNA, 19 nt, Artificial Sequence
  Description of Artificial Sequence: Synthetic oligonucleotide
  Sense strand starting at position 1309 of SEQ ID NO: 1887574
cuggcuuauggaugauuga

SEQ ID NO: 2482101 - RNA, 19 nt, Artificial Sequence
  Description of Artificial Sequence: Synthetic oligonucleotide
  Antisense strand to SEQ ID NO: 2482100
ucaaucauccauaagccag

SEQ ID NO: 2482102 - RNA, 19 nt, Artificial Sequence
  Description of Artificial Sequence: Synthetic oligonucleotide
  Sense strand starting at position 1312 of SEQ ID NO: 1887574
gcuuauggaugauugacau

SEQ ID NO: 2482103 - RNA, 19 nt, Artificial Sequence
  Description of Artificial Sequence: Synthetic oligonucleotide
  Antisense strand to SEQ ID NO: 2482102
augucaaucauccauaagc

SEQ ID NO: 2482104 - RNA, 19 nt, Artificial Sequence
  Description of Artificial Sequence: Synthetic oligonucleotide
  Sense strand starting at position 1316 of SEQ ID NO: 1887574
auggaugauugacauaaag

SEQ ID NO: 2482105 - RNA, 19 nt, Artificial Sequence
  Description of Artificial Sequence: Synthetic oligonucleotide
  Antisense strand to SEQ ID NO: 2482104
cuuuaugucaaucauccau

SEQ ID NO: 2482106 - RNA, 19 nt, Artificial Sequence
  Description of Artificial Sequence: Synthetic oligonucleotide
  Sense strand starting at position 1394 of SEQ ID NO: 1887574
ggcgguaaccgugugacua

SEQ ID NO: 2482107 - RNA, 19 nt, Artificial Sequence
  Description of Artificial Sequence: Synthetic oligonucleotide
  Antisense strand to SEQ ID NO: 2482106
uagucacacgguuaccgcc

SEQ ID NO: 2482108 - RNA, 19 nt, Artificial Sequence
  Description of Artificial Sequence: Synthetic oligonucleotide
  Sense strand starting at position 1504 of SEQ ID NO: 1887574
uuaccugauugucugagga

SEQ ID NO: 2482109 - RNA, 19 nt, Artificial Sequence
  Description of Artificial Sequence: Synthetic oligonucleotide
  Antisense strand to SEQ ID NO: 2482108
uccucagacaaucagguaa

SEQ ID NO: 2482110 - RNA, 19 nt, Artificial Sequence
  Description of Artificial Sequence: Synthetic oligonucleotide
  Sense strand starting at position 1710 of SEQ ID NO: 1887574
ccucgugacugauccagaa

SEQ ID NO: 2482111 - RNA, 19 nt, Artificial Sequence
  Description of Artificial Sequence: Synthetic oligonucleotide
  Antisense strand to SEQ ID NO: 2482110
uucuggaucagucacgagg

SEQ ID NO: 2482112 - RNA, 19 nt, Artificial Sequence
  Description of Artificial Sequence: Synthetic oligonucleotide
  Sense strand starting at position 1712 of SEQ ID NO: 1887574
ucgugacugauccagaaug

SEQ ID NO: 2482113 - RNA, 19 nt, Artificial Sequence
  Description of Artificial Sequence: Synthetic oligonucleotide
  Antisense strand to SEQ ID NO: 2482112
cauucuggaucagucacga

SEQ ID NO: 2482114 - RNA, 19 nt, Artificial Sequence
  Description of Artificial Sequence: Synthetic oligonucleotide
  Sense strand starting at position 2213 of SEQ ID NO: 1887574
agaggaauccuacgggcuu

SEQ ID NO: 2482115 - RNA, 19 nt, Artificial Sequence
  Description of Artificial Sequence: Synthetic oligonucleotide
  Antisense strand to SEQ ID NO: 2482114
aagcccguaggauuccucu

SEQ ID NO: 2482116 - RNA, 19 nt, Artificial Sequence
  Description of Artificial Sequence: Synthetic oligonucleotide
  Sense strand starting at position 2264 of SEQ ID NO: 1887574
acguuugggcgccaaauuu

SEQ ID NO: 2482117 - RNA, 19 nt, Artificial Sequence
  Description of Artificial Sequence: Synthetic oligonucleotide
  Antisense strand to SEQ ID NO: 2482116
aaauuuggcgcccaaacgu

SEQ ID NO: 2482118 - RNA, 19 nt, Artificial Sequence
  Description of Artificial Sequence: Synthetic oligonucleotide
  Sense strand starting at position 2350 of SEQ ID NO: 1887574
uccguuccucuugauuaaa

SEQ ID NO: 2482119 - RNA, 19 nt, Artificial Sequence
  Description of Artificial Sequence: Synthetic oligonucleotide
  Antisense strand to SEQ ID NO: 2482118
uuuaaucaagaggaacgga

SEQ ID NO: 2482120 - RNA, 19 nt, Artificial Sequence
  Description of Artificial Sequence: Synthetic oligonucleotide
  Sense strand starting at position 2352 of SEQ ID NO: 1887574
cguuccucuugauuaaauc

SEQ ID NO: 2482121 - RNA, 19 nt, Artificial Sequence
  Description of Artificial Sequence: Synthetic oligonucleotide
  Antisense strand to SEQ ID NO: 2482120
gauuuaaucaagaggaacg

SEQ ID NO: 2482122 - RNA, 19 nt, Artificial Sequence
  Description of Artificial Sequence: Synthetic oligonucleotide
  Sense strand starting at position 2538 of SEQ ID NO: 1887574
gcugcucugggaugaacuu

SEQ ID NO: 2482123 - RNA, 19 nt, Artificial Sequence
  Description of Artificial Sequence: Synthetic oligonucleotide
  Antisense strand to SEQ ID NO: 2482122
aaguucaucccagagcagc

SEQ ID NO: 2482124 - RNA, 19 nt, Artificial Sequence
  Description of Artificial Sequence: Synthetic oligonucleotide
  Sense strand starting at position 2912 of SEQ ID NO: 1887574
acagguuuccucuggugag

SEQ ID NO: 2482125 - RNA, 19 nt, Artificial Sequence
  Description of Artificial Sequence: Synthetic oligonucleotide
  Antisense strand to SEQ ID NO: 2482124
cucaccagaggaaaccugu

SEQ ID NO: 2482126 - RNA, 19 nt, Artificial Sequence
  Description of Artificial Sequence: Synthetic oligonucleotide
  Sense strand starting at position 2964 of SEQ ID NO: 1887574
cugagcaucccauguuaca

SEQ ID NO: 2482127 - RNA, 19 nt, Artificial Sequence
  Description of Artificial Sequence: Synthetic oligonucleotide
  Antisense strand to SEQ ID NO: 2482126
uguaacaugggaugcucag

SEQ ID NO: 2482128 - RNA, 19 nt, Artificial Sequence
  Description of Artificial Sequence: Synthetic oligonucleotide
  Sense strand starting at position 3378 of SEQ ID NO: 1887574
gcgcgaucucagcucugua

SEQ ID NO: 2482129 - RNA, 19 nt, Artificial Sequence
  Description of Artificial Sequence: Synthetic oligonucleotide
  Antisense strand to SEQ ID NO: 2482128
uacagagcugagaucgcgc

SEQ ID NO: 2482130 - RNA, 19 nt, Artificial Sequence
  Description of Artificial Sequence: Synthetic oligonucleotide
  Sense strand starting at position 3638 of SEQ ID NO: 1887574
aucuauaugucuucuguuu

SEQ ID NO: 2482131 - RNA, 19 nt, Artificial Sequence
  Description of Artificial Sequence: Synthetic oligonucleotide
  Antisense strand to SEQ ID NO: 2482130
aaacagaagacauauagau

SEQ ID NO: 2482132 - RNA, 19 nt, Artificial Sequence
  Description of Artificial Sequence: Synthetic oligonucleotide
  Sense strand starting at position 3759 of SEQ ID NO: 1887574
auagucuucuguuuaauuc

SEQ ID NO: 2482133 - RNA, 19 nt, Artificial Sequence
  Description of Artificial Sequence: Synthetic oligonucleotide
  Antisense strand to SEQ ID NO: 2482132
gaauuaaacagaagacuau

SEQ ID NO: 2482134 - RNA, 19 nt, Artificial Sequence
  Description of Artificial Sequence: Synthetic oligonucleotide
  Sense strand starting at position 3958 of SEQ ID NO: 1887574
augagaugccagcggugaa

SEQ ID NO: 2482135 - RNA, 19 nt, Artificial Sequence
  Description of Artificial Sequence: Synthetic oligonucleotide
  Antisense strand to SEQ ID NO: 2482134
uucaccgcuggcaucucau

SEQ ID NO: 2482136 - RNA, 19 nt, Artificial Sequence
  Description of Artificial Sequence: Synthetic oligonucleotide
  Sense strand starting at position 3983 of SEQ ID NO: 1887574
ccuccugauguccagguaa

SEQ ID NO: 2482137 - RNA, 19 nt, Artificial Sequence
  Description of Artificial Sequence: Synthetic oligonucleotide
  Antisense strand to SEQ ID NO: 2482136
uuaccuggacaucaggagg

SEQ ID NO: 2482138 - RNA, 19 nt, Artificial Sequence
  Description of Artificial Sequence: Synthetic oligonucleotide
  Sense strand starting at position 364 of SEQ ID NO: 1887576
ucuaaugguuuauuaguga

SEQ ID NO: 2482139 - RNA, 19 nt, Artificial Sequence
  Description of Artificial Sequence: Synthetic oligonucleotide
  Antisense strand to SEQ ID NO: 2482138
ucacuaauaaaccauuaga

SEQ ID NO: 2482140 - RNA, 19 nt, Artificial Sequence
  Description of Artificial Sequence: Synthetic oligonucleotide
  Sense strand starting at position 367 of SEQ ID NO: 1887576
aaugguuuauuagugacaa

SEQ ID NO: 2482141 - RNA, 19 nt, Artificial Sequence
  Description of Artificial Sequence: Synthetic oligonucleotide
  Antisense strand to SEQ ID NO: 2482140
uugucacuaauaaaccauu

SEQ ID NO: 2482142 - RNA, 19 nt, Artificial Sequence
  Description of Artificial Sequence: Synthetic oligonucleotide
  Sense strand starting at position 368 of SEQ ID NO: 1887576
augguuuauuagugacaau

SEQ ID NO: 2482143 - RNA, 19 nt, Artificial Sequence
  Description of Artificial Sequence: Synthetic oligonucleotide
  Antisense strand to SEQ ID NO: 2482142
auugucacuaauaaaccau

SEQ ID NO: 2482144 - RNA, 19 nt, Artificial Sequence
  Description of Artificial Sequence: Synthetic oligonucleotide
  Sense strand starting at position 369 of SEQ ID NO: 1887576
ugguuuauuagugacaaug

SEQ ID NO: 2482145 - RNA, 19 nt, Artificial Sequence
  Description of Artificial Sequence: Synthetic oligonucleotide
  Antisense strand to SEQ ID NO: 2482144
cauugucacuaauaaacca

SEQ ID NO: 2482146 - RNA, 19 nt, Artificial Sequence
  Description of Artificial Sequence: Synthetic oligonucleotide
  Sense strand starting at position 371 of SEQ ID NO: 1887576
guuuauuagugacaaugac

SEQ ID NO: 2482147 - RNA, 19 nt, Artificial Sequence
  Description of Artificial Sequence: Synthetic oligonucleotide
  Antisense strand to SEQ ID NO: 2482146
gucauugucacuaauaaac

SEQ ID NO: 2482148 - RNA, 19 nt, Artificial Sequence
  Description of Artificial Sequence: Synthetic oligonucleotide
  Sense strand starting at position 529 of SEQ ID NO: 1887576
uuggaucucagacguguuu

SEQ ID NO: 2482149 - RNA, 19 nt, Artificial Sequence
  Description of Artificial Sequence: Synthetic oligonucleotide
  Antisense strand to SEQ ID NO: 2482148
aaacacgucugagauccaa

SEQ ID NO: 2482150 - RNA, 19 nt, Artificial Sequence
  Description of Artificial Sequence: Synthetic oligonucleotide
  Sense strand starting at position 567 of SEQ ID NO: 1887576
gacacuaggugucaaauuc

SEQ ID NO: 2482151 - RNA, 19 nt, Artificial Sequence
  Description of Artificial Sequence: Synthetic oligonucleotide
  Antisense strand to SEQ ID NO: 2482150
gaauuugacaccuaguguc

SEQ ID NO: 2482152 - RNA, 19 nt, Artificial Sequence
  Description of Artificial Sequence: Synthetic oligonucleotide
  Sense strand starting at position 577 of SEQ ID NO: 1887576
gucaaauucuagcgagaac

SEQ ID NO: 2482153 - RNA, 19 nt, Artificial Sequence
  Description of Artificial Sequence: Synthetic oligonucleotide
  Antisense strand to SEQ ID NO: 2482152
guucucgcuagaauuugac

SEQ ID NO: 2482154 - RNA, 19 nt, Artificial Sequence
  Description of Artificial Sequence: Synthetic oligonucleotide
  Sense strand starting at position 819 of SEQ ID NO: 1887576
uggugaguccuggaaagca

SEQ ID NO: 2482155 - RNA, 19 nt, Artificial Sequence
  Description of Artificial Sequence: Synthetic oligonucleotide
  Antisense strand to SEQ ID NO: 2482154
ugcuuuccaggacucacca

SEQ ID NO: 2482156 - RNA, 19 nt, Artificial Sequence
  Description of Artificial Sequence: Synthetic oligonucleotide
  Sense strand starting at position 988 of SEQ ID NO: 1887576
ggcccagaggucgagauau

SEQ ID NO: 2482157 - RNA, 19 nt, Artificial Sequence
  Description of Artificial Sequence: Synthetic oligonucleotide
  Antisense strand to SEQ ID NO: 2482156
auaucucgaccucugggcc

SEQ ID NO: 2482158 - RNA, 19 nt, Artificial Sequence
  Description of Artificial Sequence: Synthetic oligonucleotide
  Sense strand starting at position 1297 of SEQ ID NO: 1887576
ggccuagaggucgauaucu

SEQ ID NO: 2482159 - RNA, 19 nt, Artificial Sequence
  Description of Artificial Sequence: Synthetic oligonucleotide
  Antisense strand to SEQ ID NO: 2482158
agauaucgaccucuaggcc

SEQ ID NO: 2482160 - RNA, 19 nt, Artificial Sequence
  Description of Artificial Sequence: Synthetic oligonucleotide
  Sense strand starting at position 1327 of SEQ ID NO: 1887576
ggagauaugugccuaggau

SEQ ID NO: 2482161 - RNA, 19 nt, Artificial Sequence
  Description of Artificial Sequence: Synthetic oligonucleotide
  Antisense strand to SEQ ID NO: 2482160
auccuaggcacauaucucc

SEQ ID NO: 2482162 - RNA, 19 nt, Artificial Sequence
  Description of Artificial Sequence: Synthetic oligonucleotide
  Sense strand starting at position 1328 of SEQ ID NO: 1887576
gagauaugugccuaggaug

SEQ ID NO: 2482163 - RNA, 19 nt, Artificial Sequence
  Description of Artificial Sequence: Synthetic oligonucleotide
  Antisense strand to SEQ ID NO: 2482162
cauccuaggcacauaucuc

SEQ ID NO: 2482164 - RNA, 19 nt, Artificial Sequence
  Description of Artificial Sequence: Synthetic oligonucleotide
  Sense strand starting at position 1386 of SEQ ID NO: 1887576
gauauaugggccuggagug

SEQ ID NO: 2482165 - RNA, 19 nt, Artificial Sequence
  Description of Artificial Sequence: Synthetic oligonucleotide
  Antisense strand to SEQ ID NO: 2482164
cacuccaggcccauauauc

SEQ ID NO: 2482166 - RNA, 19 nt, Artificial Sequence
  Description of Artificial Sequence: Synthetic oligonucleotide
  Sense strand starting at position 1488 of SEQ ID NO: 1887576
gagccuggauuggagauau

SEQ ID NO: 2482167 - RNA, 19 nt, Artificial Sequence
  Description of Artificial Sequence: Synthetic oligonucleotide
  Antisense strand to SEQ ID NO: 2482166
auaucuccaauccaggcuc

SEQ ID NO: 2482168 - RNA, 19 nt, Artificial Sequence
  Description of Artificial Sequence: Synthetic oligonucleotide
  Sense strand starting at position 1524 of SEQ ID NO: 1887576
augggcuuaggguggaaau

SEQ ID NO: 2482169 - RNA, 19 nt, Artificial Sequence
  Description of Artificial Sequence: Synthetic oligonucleotide
  Antisense strand to SEQ ID NO: 2482168
auuuccacccuaagcccau

SEQ ID NO: 2482170 - RNA, 19 nt, Artificial Sequence
  Description of Artificial Sequence: Synthetic oligonucleotide
  Sense strand starting at position 1525 of SEQ ID NO: 1887576
ugggcuuaggguggaaaua

SEQ ID NO: 2482171 - RNA, 19 nt, Artificial Sequence
  Description of Artificial Sequence: Synthetic oligonucleotide
  Antisense strand to SEQ ID NO: 2482170
uauuuccacccuaagccca

SEQ ID NO: 2482172 - RNA, 19 nt, Artificial Sequence
  Description of Artificial Sequence: Synthetic oligonucleotide
  Sense strand starting at position 1576 of SEQ ID NO: 1887576
gagauaugggcuugaggug

SEQ ID NO: 2482173 - RNA, 19 nt, Artificial Sequence
  Description of Artificial Sequence: Synthetic oligonucleotide
  Antisense strand to SEQ ID NO: 2482172
caccucaagcccauaucuc

SEQ ID NO: 2482174 - RNA, 19 nt, Artificial Sequence
  Description of Artificial Sequence: Synthetic oligonucleotide
  Sense strand starting at position 1750 of SEQ ID NO: 1887576
gcagaugggucauccauca

SEQ ID NO: 2482175 - RNA, 19 nt, Artificial Sequence
  Description of Artificial Sequence: Synthetic oligonucleotide
  Antisense strand to SEQ ID NO: 2482174
ugauggaugacccaucugc

SEQ ID NO: 2482176 - RNA, 19 nt, Artificial Sequence
  Description of Artificial Sequence: Synthetic oligonucleotide
  Sense strand starting at position 1757 of SEQ ID NO: 1887576
ggucauccaucaugaucuu

SEQ ID NO: 2482177 - RNA, 19 nt, Artificial Sequence
  Description of Artificial Sequence: Synthetic oligonucleotide
  Antisense strand to SEQ ID NO: 2482176
aagaucaugauggaugacc

SEQ ID NO: 2482178 - RNA, 19 nt, Artificial Sequence
  Description of Artificial Sequence: Synthetic oligonucleotide
  Sense strand starting at position 2013 of SEQ ID NO: 1887576
guuagacuacggugcucaa

SEQ ID NO: 2482179 - RNA, 19 nt, Artificial Sequence
  Description of Artificial Sequence: Synthetic oligonucleotide
  Antisense strand to SEQ ID NO: 2482178
uugagcaccguagucuaac

SEQ ID NO: 2482180 - RNA, 19 nt, Artificial Sequence
  Description of Artificial Sequence: Synthetic oligonucleotide
  Sense strand starting at position 2229 of SEQ ID NO: 1887576
ucaggcaucggcugauauu

SEQ ID NO: 2482181 - RNA, 19 nt, Artificial Sequence
  Description of Artificial Sequence: Synthetic oligonucleotide
  Antisense strand to SEQ ID NO: 2482180
aauaucagccgaugccuga

SEQ ID NO: 2482182 - RNA, 19 nt, Artificial Sequence
  Description of Artificial Sequence: Synthetic oligonucleotide
  Sense strand starting at position 2914 of SEQ ID NO: 1887576
caugcaaguccugacugua

SEQ ID NO: 2482183 - RNA, 19 nt, Artificial Sequence
  Description of Artificial Sequence: Synthetic oligonucleotide
  Antisense strand to SEQ ID NO: 2482182
uacagucaggacuugcaug

SEQ ID NO: 2482184 - RNA, 19 nt, Artificial Sequence
  Description of Artificial Sequence: Synthetic oligonucleotide
  Sense strand starting at position 2917 of SEQ ID NO: 1887576
gcaaguccugacuguauuu

SEQ ID NO: 2482185 - RNA, 19 nt, Artificial Sequence
  Description of Artificial Sequence: Synthetic oligonucleotide
  Antisense strand to SEQ ID NO: 2482184
aaauacagucaggacuugc

SEQ ID NO: 2482186 - RNA, 19 nt, Artificial Sequence
  Description of Artificial Sequence: Synthetic oligonucleotide
  Sense strand starting at position 3028 of SEQ ID NO: 1887576
gugacuauuuaugauauag

SEQ ID NO: 2482187 - RNA, 19 nt, Artificial Sequence
  Description of Artificial Sequence: Synthetic oligonucleotide
  Antisense strand to SEQ ID NO: 2482186
cuauaucauaaauagucac

SEQ ID NO: 2482188 - RNA, 19 nt, Artificial Sequence
  Description of Artificial Sequence: Synthetic oligonucleotide
  Sense strand starting at position 3123 of SEQ ID NO: 1887576
uccugaugggcucagugua

SEQ ID NO: 2482189 - RNA, 19 nt, Artificial Sequence
  Description of Artificial Sequence: Synthetic oligonucleotide
  Antisense strand to SEQ ID NO: 2482188
uacacugagcccaucagga

SEQ ID NO: 2482190 - RNA, 19 nt, Artificial Sequence
  Description of Artificial Sequence: Synthetic oligonucleotide
  Sense strand starting at position 3202 of SEQ ID NO: 1887576
gggagucuccaucagcuuu

SEQ ID NO: 2482191 - RNA, 19 nt, Artificial Sequence
  Description of Artificial Sequence: Synthetic oligonucleotide
  Antisense strand to SEQ ID NO: 2482190
aaagcugauggagacuccc

SEQ ID NO: 2482192 - RNA, 19 nt, Artificial Sequence
  Description of Artificial Sequence: Synthetic oligonucleotide
  Sense strand starting at position 3282 of SEQ ID NO: 1887576
ggaacugauucuccugagu

SEQ ID NO: 2482193 - RNA, 19 nt, Artificial Sequence
  Description of Artificial Sequence: Synthetic oligonucleotide
  Antisense strand to SEQ ID NO: 2482192
acucaggagaaucaguucc

SEQ ID NO: 2482194 - RNA, 19 nt, Artificial Sequence
  Description of Artificial Sequence: Synthetic oligonucleotide
  Sense strand starting at position 3404 of SEQ ID NO: 1887576
gugccaugcuucugauaau

SEQ ID NO: 2482195 - RNA, 19 nt, Artificial Sequence
  Description of Artificial Sequence: Synthetic oligonucleotide
  Antisense strand to SEQ ID NO: 2482194
auuaucagaagcauggcac

SEQ ID NO: 2482196 - RNA, 19 nt, Artificial Sequence
  Description of Artificial Sequence: Synthetic oligonucleotide
  Sense strand starting at position 163 of SEQ ID NO: 1887577
gagauaugggucugcagug

SEQ ID NO: 2482197 - RNA, 19 nt, Artificial Sequence
  Description of Artificial Sequence: Synthetic oligonucleotide
  Antisense strand to SEQ ID NO: 2482196
cacugcagacccauaucuc

SEQ ID NO: 2482198 - RNA, 19 nt, Artificial Sequence
  Description of Artificial Sequence: Synthetic oligonucleotide
  Sense strand starting at position 168 of SEQ ID NO: 1887577
augggucugcaguggagau

SEQ ID NO: 2482199 - RNA, 19 nt, Artificial Sequence
  Description of Artificial Sequence: Synthetic oligonucleotide
  Antisense strand to SEQ ID NO: 2482198
aucuccacugcagacccau

SEQ ID NO: 2482200 - RNA, 19 nt, Artificial Sequence
  Description of Artificial Sequence: Synthetic oligonucleotide
  Sense strand starting at position 169 of SEQ ID NO: 1887577
ugggucugcaguggagaua

SEQ ID NO: 2482201 - RNA, 19 nt, Artificial Sequence
  Description of Artificial Sequence: Synthetic oligonucleotide
  Antisense strand to SEQ ID NO: 2482200
uaucuccacugcagaccca

SEQ ID NO: 2482202 - RNA, 19 nt, Artificial Sequence
  Description of Artificial Sequence: Synthetic oligonucleotide
  Sense strand starting at position 170 of SEQ ID NO: 1887577
gggucugcaguggagauau

SEQ ID NO: 2482203 - RNA, 19 nt, Artificial Sequence
  Description of Artificial Sequence: Synthetic oligonucleotide
  Antisense strand to SEQ ID NO: 2482202
auaucuccacugcagaccc

SEQ ID NO: 2482204 - RNA, 19 nt, Artificial Sequence
  Description of Artificial Sequence: Synthetic oligonucleotide
  Sense strand starting at position 471 of SEQ ID NO: 1887577
aaguuaugggccuggaggu

SEQ ID NO: 2482205 - RNA, 19 nt, Artificial Sequence
  Description of Artificial Sequence: Synthetic oligonucleotide
  Antisense strand to SEQ ID NO: 2482204
accuccaggcccauaacuu

SEQ ID NO: 2482206 - RNA, 19 nt, Artificial Sequence
  Description of Artificial Sequence: Synthetic oligonucleotide
  Sense strand starting at position 663 of SEQ ID NO: 1887577
gagauaugagccuggagug

SEQ ID NO: 2482207 - RNA, 19 nt, Artificial Sequence
  Description of Artificial Sequence: Synthetic oligonucleotide
  Antisense strand to SEQ ID NO: 2482206
cacuccaggcucauaucuc

SEQ ID NO: 2482208 - RNA, 19 nt, Artificial Sequence
  Description of Artificial Sequence: Synthetic oligonucleotide
  Sense strand starting at position 739 of SEQ ID NO: 1887577
gacauaugggucuggagug

SEQ ID NO: 2482209 - RNA, 19 nt, Artificial Sequence
  Description of Artificial Sequence: Synthetic oligonucleotide
  Antisense strand to SEQ ID NO: 2482208
cacuccagacccauauguc

SEQ ID NO: 2482210 - RNA, 19 nt, Artificial Sequence
  Description of Artificial Sequence: Synthetic oligonucleotide
  Sense strand starting at position 853 of SEQ ID NO: 1887577
gagauaugggucuggagug

SEQ ID NO: 2482211 - RNA, 19 nt, Artificial Sequence
  Description of Artificial Sequence: Synthetic oligonucleotide
  Antisense strand to SEQ ID NO: 2482210
cacuccagacccauaucuc

SEQ ID NO: 2482212 - RNA, 19 nt, Artificial Sequence
  Description of Artificial Sequence: Synthetic oligonucleotide
  Sense strand starting at position 986 of SEQ ID NO: 1887577
gagauaugugccuggaggu

SEQ ID NO: 2482213 - RNA, 19 nt, Artificial Sequence
  Description of Artificial Sequence: Synthetic oligonucleotide
  Antisense strand to SEQ ID NO: 2482212
accuccaggcacauaucuc

SEQ ID NO: 2482214 - RNA, 19 nt, Artificial Sequence
  Description of Artificial Sequence: Synthetic oligonucleotide
  Sense strand starting at position 1107 of SEQ ID NO: 1887577
ugggccugguguguagaua

SEQ ID NO: 2482215 - RNA, 19 nt, Artificial Sequence
  Description of Artificial Sequence: Synthetic oligonucleotide
  Antisense strand to SEQ ID NO: 2482214
uaucuacacaccaggccca

SEQ ID NO: 2482216 - RNA, 19 nt, Artificial Sequence
  Description of Artificial Sequence: Synthetic oligonucleotide
  Sense strand starting at position 1108 of SEQ ID NO: 1887577
gggccugguguguagauau

SEQ ID NO: 2482217 - RNA, 19 nt, Artificial Sequence
  Description of Artificial Sequence: Synthetic oligonucleotide
  Antisense strand to SEQ ID NO: 2482216
auaucuacacaccaggccc

SEQ ID NO: 2482218 - RNA, 19 nt, Artificial Sequence
  Description of Artificial Sequence: Synthetic oligonucleotide
  Sense strand starting at position 1139 of SEQ ID NO: 1887577
gagauauggcccuggagug

SEQ ID NO: 2482219 - RNA, 19 nt, Artificial Sequence
  Description of Artificial Sequence: Synthetic oligonucleotide
  Antisense strand to SEQ ID NO: 2482218
cacuccagggccauaucuc

SEQ ID NO: 2482220 - RNA, 19 nt, Artificial Sequence
  Description of Artificial Sequence: Synthetic oligonucleotide
  Sense strand starting at position 1184 of SEQ ID NO: 1887577
gggccuacgguggagauau

SEQ ID NO: 2482221 - RNA, 19 nt, Artificial Sequence
  Description of Artificial Sequence: Synthetic oligonucleotide
  Antisense strand to SEQ ID NO: 2482220
auaucuccaccguaggccc

SEQ ID NO: 2482222 - RNA, 19 nt, Artificial Sequence
  Description of Artificial Sequence: Synthetic oligonucleotide
  Sense strand starting at position 1215 of SEQ ID NO: 1887577
gggauaugggccuggaaug

SEQ ID NO: 2482223 - RNA, 19 nt, Artificial Sequence
  Description of Artificial Sequence: Synthetic oligonucleotide
  Antisense strand to SEQ ID NO: 2482222
cauuccaggcccauauccc

SEQ ID NO: 2482224 - RNA, 19 nt, Artificial Sequence
  Description of Artificial Sequence: Synthetic oligonucleotide
  Sense strand starting at position 1273 of SEQ ID NO: 1887577
gagauaugggccugaugug

SEQ ID NO: 2482225 - RNA, 19 nt, Artificial Sequence
  Description of Artificial Sequence: Synthetic oligonucleotide
  Antisense strand to SEQ ID NO: 2482224
cacaucaggcccauaucuc

SEQ ID NO: 2482226 - RNA, 19 nt, Artificial Sequence
  Description of Artificial Sequence: Synthetic oligonucleotide
  Sense strand starting at position 1280 of SEQ ID NO: 1887577
gggccugauguggagauau

SEQ ID NO: 2482227 - RNA, 19 nt, Artificial Sequence
  Description of Artificial Sequence: Synthetic oligonucleotide
  Antisense strand to SEQ ID NO: 2482226
auaucuccacaucaggccc

SEQ ID NO: 2482228 - RNA, 19 nt, Artificial Sequence
  Description of Artificial Sequence: Synthetic oligonucleotide
  Sense strand starting at position 1292 of SEQ ID NO: 1887577
gagauaugggcuuggagug

SEQ ID NO: 2482229 - RNA, 19 nt, Artificial Sequence
  Description of Artificial Sequence: Synthetic oligonucleotide
  Antisense strand to SEQ ID NO: 2482228
cacuccaagcccauaucuc

SEQ ID NO: 2482230 - RNA, 19 nt, Artificial Sequence
  Description of Artificial Sequence: Synthetic oligonucleotide
  Sense strand starting at position 1298 of SEQ ID NO: 1887577
ugggcuuggaguggagaua

SEQ ID NO: 2482231 - RNA, 19 nt, Artificial Sequence
  Description of Artificial Sequence: Synthetic oligonucleotide
  Antisense strand to SEQ ID NO: 2482230
uaucuccacuccaagccca

SEQ ID NO: 2482232 - RNA, 19 nt, Artificial Sequence
  Description of Artificial Sequence: Synthetic oligonucleotide
  Sense strand starting at position 1312 of SEQ ID NO: 1887577
agauaugauccuggagugu

SEQ ID NO: 2482233 - RNA, 19 nt, Artificial Sequence
  Description of Artificial Sequence: Synthetic oligonucleotide
  Antisense strand to SEQ ID NO: 2482232
acacuccaggaucauaucu

SEQ ID NO: 2482234 - RNA, 19 nt, Artificial Sequence
  Description of Artificial Sequence: Synthetic oligonucleotide
  Sense strand starting at position 1330 of SEQ ID NO: 1887577
uaguuaugggccuggaggu

SEQ ID NO: 2482235 - RNA, 19 nt, Artificial Sequence
  Description of Artificial Sequence: Synthetic oligonucleotide
  Antisense strand to SEQ ID NO: 2482234
accuccaggcccauaacua

SEQ ID NO: 2482236 - RNA, 19 nt, Artificial Sequence
  Description of Artificial Sequence: Synthetic oligonucleotide
  Sense strand starting at position 1526 of SEQ ID NO: 1887577
augggucuaggguggaaau

SEQ ID NO: 2482237 - RNA, 19 nt, Artificial Sequence
  Description of Artificial Sequence: Synthetic oligonucleotide
  Antisense strand to SEQ ID NO: 2482236
auuuccacccuagacccau

SEQ ID NO: 2482238 - RNA, 19 nt, Artificial Sequence
  Description of Artificial Sequence: Synthetic oligonucleotide
  Sense strand starting at position 1527 of SEQ ID NO: 1887577
ugggucuaggguggaaaua

SEQ ID NO: 2482239 - RNA, 19 nt, Artificial Sequence
  Description of Artificial Sequence: Synthetic oligonucleotide
  Antisense strand to SEQ ID NO: 2482238
uauuuccacccuagaccca

SEQ ID NO: 2482240 - RNA, 19 nt, Artificial Sequence
  Description of Artificial Sequence: Synthetic oligonucleotide
  Sense strand starting at position 1629 of SEQ ID NO: 1887577
agccgagagcacuguucuu

SEQ ID NO: 2482241 - RNA, 19 nt, Artificial Sequence
  Description of Artificial Sequence: Synthetic oligonucleotide
  Antisense strand to SEQ ID NO: 2482240
aagaacagugcucucggcu

SEQ ID NO: 2482242 - RNA, 19 nt, Artificial Sequence
  Description of Artificial Sequence: Synthetic oligonucleotide
  Sense strand starting at position 1752 of SEQ ID NO: 1887577
gcaaauggaucuuccauca

SEQ ID NO: 2482243 - RNA, 19 nt, Artificial Sequence
  Description of Artificial Sequence: Synthetic oligonucleotide
  Antisense strand to SEQ ID NO: 2482242
ugauggaagauccauuugc

SEQ ID NO: 2482244 - RNA, 19 nt, Artificial Sequence
  Description of Artificial Sequence: Synthetic oligonucleotide
  Sense strand starting at position 1819 of SEQ ID NO: 1887577
gaggguaaguccuucucca

SEQ ID NO: 2482245 - RNA, 19 nt, Artificial Sequence
  Description of Artificial Sequence: Synthetic oligonucleotide
  Antisense strand to SEQ ID NO: 2482244
uggagaaggacuuacccuc

SEQ ID NO: 2482246 - RNA, 19 nt, Artificial Sequence
  Description of Artificial Sequence: Synthetic oligonucleotide
  Sense strand starting at position 2015 of SEQ ID NO: 1887577
guuggacuaggguguucaa

SEQ ID NO: 2482247 - RNA, 19 nt, Artificial Sequence
  Description of Artificial Sequence: Synthetic oligonucleotide
  Antisense strand to SEQ ID NO: 2482246
uugaacacccuaguccaac

SEQ ID NO: 2482248 - RNA, 19 nt, Artificial Sequence
  Description of Artificial Sequence: Synthetic oligonucleotide
  Sense strand starting at position 2298 of SEQ ID NO: 1887577
uuaugucaguaaucuuaca

SEQ ID NO: 2482249 - RNA, 19 nt, Artificial Sequence
  Description of Artificial Sequence: Synthetic oligonucleotide
  Antisense strand to SEQ ID NO: 2482248
uguaagauuacugacauaa

SEQ ID NO: 2482250 - RNA, 19 nt, Artificial Sequence
  Description of Artificial Sequence: Synthetic oligonucleotide
  Sense strand starting at position 2391 of SEQ ID NO: 1887577
acaccuugucuuuguggga

SEQ ID NO: 2482251 - RNA, 19 nt, Artificial Sequence
  Description of Artificial Sequence: Synthetic oligonucleotide
  Antisense strand to SEQ ID NO: 2482250
ucccacaaagacaaggugu

SEQ ID NO: 2482252 - RNA, 19 nt, Artificial Sequence
  Description of Artificial Sequence: Synthetic oligonucleotide
  Sense strand starting at position 2392 of SEQ ID NO: 1887577
caccuugucuuugugggau

SEQ ID NO: 2482253 - RNA, 19 nt, Artificial Sequence
  Description of Artificial Sequence: Synthetic oligonucleotide
  Antisense strand to SEQ ID NO: 2482252
aucccacaaagacaaggug

SEQ ID NO: 2482254 - RNA, 19 nt, Artificial Sequence
  Description of Artificial Sequence: Synthetic oligonucleotide
  Sense strand starting at position 2451 of SEQ ID NO: 1887577
gccauagaaauguggaaag

SEQ ID NO: 2482255 - RNA, 19 nt, Artificial Sequence
  Description of Artificial Sequence: Synthetic oligonucleotide
  Antisense strand to SEQ ID NO: 2482254
cuuuccacauuucuauggc

SEQ ID NO: 2482256 - RNA, 19 nt, Artificial Sequence
  Description of Artificial Sequence: Synthetic oligonucleotide
  Sense strand starting at position 2626 of SEQ ID NO: 1887577
cucuaaucuuggguuuaac

SEQ ID NO: 2482257 - RNA, 19 nt, Artificial Sequence
  Description of Artificial Sequence: Synthetic oligonucleotide
  Antisense strand to SEQ ID NO: 2482256
guuaaacccaagauuagag

SEQ ID NO: 2482258 - RNA, 19 nt, Artificial Sequence
  Description of Artificial Sequence: Synthetic oligonucleotide
  Sense strand starting at position 2892 of SEQ ID NO: 1887577
uaggcauguccuugagggu

SEQ ID NO: 2482259 - RNA, 19 nt, Artificial Sequence
  Description of Artificial Sequence: Synthetic oligonucleotide
  Antisense strand to SEQ ID NO: 2482258
acccucaaggacaugccua

SEQ ID NO: 2482260 - RNA, 19 nt, Artificial Sequence
  Description of Artificial Sequence: Synthetic oligonucleotide
  Sense strand starting at position 2998 of SEQ ID NO: 1887577
cagugaugacugcauucua

SEQ ID NO: 2482261 - RNA, 19 nt, Artificial Sequence
  Description of Artificial Sequence: Synthetic oligonucleotide
  Antisense strand to SEQ ID NO: 2482260
uagaaugcagucaucacug

SEQ ID NO: 2482262 - RNA, 19 nt, Artificial Sequence
  Description of Artificial Sequence: Synthetic oligonucleotide
  Sense strand starting at position 3009 of SEQ ID NO: 1887577
gcauucuaaucccuggagu

SEQ ID NO: 2482263 - RNA, 19 nt, Artificial Sequence
  Description of Artificial Sequence: Synthetic oligonucleotide
  Antisense strand to SEQ ID NO: 2482262
acuccagggauuagaaugc

SEQ ID NO: 2482264 - RNA, 19 nt, Artificial Sequence
  Description of Artificial Sequence: Synthetic oligonucleotide
  Sense strand starting at position 3204 of SEQ ID NO: 1887577
gggagacuccaucagcuuu

SEQ ID NO: 2482265 - RNA, 19 nt, Artificial Sequence
  Description of Artificial Sequence: Synthetic oligonucleotide
  Antisense strand to SEQ ID NO: 2482264
aaagcugauggagucuccc

SEQ ID NO: 2482266 - RNA, 19 nt, Artificial Sequence
  Description of Artificial Sequence: Synthetic oligonucleotide
  Sense strand starting at position 3260 of SEQ ID NO: 1887577
gccuauagaggcugggaaa

SEQ ID NO: 2482267 - RNA, 19 nt, Artificial Sequence
  Description of Artificial Sequence: Synthetic oligonucleotide
  Antisense strand to SEQ ID NO: 2482266
uuucccagccucuauaggc

SEQ ID NO: 2482268 - RNA, 19 nt, Artificial Sequence
  Description of Artificial Sequence: Synthetic oligonucleotide
  Sense strand starting at position 3284 of SEQ ID NO: 1887577
guaacugauucuccugagu

SEQ ID NO: 2482269 - RNA, 19 nt, Artificial Sequence
  Description of Artificial Sequence: Synthetic oligonucleotide
  Antisense strand to SEQ ID NO: 2482268
acucaggagaaucaguuac

SEQ ID NO: 2482270 - RNA, 19 nt, Artificial Sequence
  Description of Artificial Sequence: Synthetic oligonucleotide
  Sense strand starting at position 3361 of SEQ ID NO: 1887577
cgcuuucugucuccagaau

SEQ ID NO: 2482271 - RNA, 19 nt, Artificial Sequence
  Description of Artificial Sequence: Synthetic oligonucleotide
  Antisense strand to SEQ ID NO: 2482270
auucuggagacagaaagcg

SEQ ID NO: 2482272 - RNA, 19 nt, Artificial Sequence
  Description of Artificial Sequence: Synthetic oligonucleotide
  Sense strand starting at position 3362 of SEQ ID NO: 1887577
gcuuucugucuccagaauc

SEQ ID NO: 2482273 - RNA, 19 nt, Artificial Sequence
  Description of Artificial Sequence: Synthetic oligonucleotide
  Antisense strand to SEQ ID NO: 2482272
gauucuggagacagaaagc

SEQ ID NO: 2482274 - RNA, 19 nt, Artificial Sequence
  Description of Artificial Sequence: Synthetic oligonucleotide
  Sense strand starting at position 3755 of SEQ ID NO: 1887577
gguugauacuccucaaauc

SEQ ID NO: 2482275 - RNA, 19 nt, Artificial Sequence
  Description of Artificial Sequence: Synthetic oligonucleotide
  Antisense strand to SEQ ID NO: 2482274
gauuugaggaguaucaacc

SEQ ID NO: 2482276 - RNA, 19 nt, Artificial Sequence
  Description of Artificial Sequence: Synthetic oligonucleotide
  Sense strand starting at position 964 of SEQ ID NO: 1887575
gaguuauaggccuauagua

SEQ ID NO: 2482277 - RNA, 19 nt, Artificial Sequence
  Description of Artificial Sequence: Synthetic oligonucleotide
  Antisense strand to SEQ ID NO: 2482276
uacuauaggccuauaacuc

SEQ ID NO: 2482278 - RNA, 19 nt, Artificial Sequence
  Description of Artificial Sequence: Synthetic oligonucleotide
  Sense strand starting at position 966 of SEQ ID NO: 1887575
guuauaggccuauaguaga

SEQ ID NO: 2482279 - RNA, 19 nt, Artificial Sequence
  Description of Artificial Sequence: Synthetic oligonucleotide
  Antisense strand to SEQ ID NO: 2482278
ucuacuauaggccuauaac

SEQ ID NO: 2482280 - RNA, 19 nt, Artificial Sequence
  Description of Artificial Sequence: Synthetic oligonucleotide
  Sense strand starting at position 1038 of SEQ ID NO: 1887575
guggauaucugggccuaga

SEQ ID NO: 2482281 - RNA, 19 nt, Artificial Sequence
  Description of Artificial Sequence: Synthetic oligonucleotide
  Antisense strand to SEQ ID NO: 2482280
ucuaggcccagauauccac

SEQ ID NO: 2482282 - RNA, 19 nt, Artificial Sequence
  Description of Artificial Sequence: Synthetic oligonucleotide
  Sense strand starting at position 1047 of SEQ ID NO: 1887575
ugggccuagaguggaaaua

SEQ ID NO: 2482283 - RNA, 19 nt, Artificial Sequence
  Description of Artificial Sequence: Synthetic oligonucleotide
  Antisense strand to SEQ ID NO: 2482282
uauuuccacucuaggccca

SEQ ID NO: 2482284 - RNA, 19 nt, Artificial Sequence
  Description of Artificial Sequence: Synthetic oligonucleotide
  Sense strand starting at position 1200 of SEQ ID NO: 1887575
acgggccuucaguagagau

SEQ ID NO: 2482285 - RNA, 19 nt, Artificial Sequence
  Description of Artificial Sequence: Synthetic oligonucleotide
  Antisense strand to SEQ ID NO: 2482284
aucucuacugaaggcccgu

SEQ ID NO: 2482286 - RNA, 19 nt, Artificial Sequence
  Description of Artificial Sequence: Synthetic oligonucleotide
  Sense strand starting at position 1202 of SEQ ID NO: 1887575
gggccuucaguagagauau

SEQ ID NO: 2482287 - RNA, 19 nt, Artificial Sequence
  Description of Artificial Sequence: Synthetic oligonucleotide
  Antisense strand to SEQ ID NO: 2482286
auaucucuacugaaggccc

SEQ ID NO: 2482288 - RNA, 19 nt, Artificial Sequence
  Description of Artificial Sequence: Synthetic oligonucleotide
  Sense strand starting at position 1317 of SEQ ID NO: 1887575
gggccugguguggagauau

SEQ ID NO: 2482289 - RNA, 19 nt, Artificial Sequence
  Description of Artificial Sequence: Synthetic oligonucleotide
  Antisense strand to SEQ ID NO: 2482288
auaucuccacaccaggccc

SEQ ID NO: 2482290 - RNA, 19 nt, Artificial Sequence
  Description of Artificial Sequence: Synthetic oligonucleotide
  Sense strand starting at position 1348 of SEQ ID NO: 1887575
gagauaugggccuagguug

SEQ ID NO: 2482291 - RNA, 19 nt, Artificial Sequence
  Description of Artificial Sequence: Synthetic oligonucleotide
  Antisense strand to SEQ ID NO: 2482290
caaccuaggcccauaucuc

SEQ ID NO: 2482292 - RNA, 19 nt, Artificial Sequence
  Description of Artificial Sequence: Synthetic oligonucleotide
  Sense strand starting at position 1405 of SEQ ID NO: 1887575
gagauaugggcuuacagug

SEQ ID NO: 2482293 - RNA, 19 nt, Artificial Sequence
  Description of Artificial Sequence: Synthetic oligonucleotide
  Antisense strand to SEQ ID NO: 2482292
cacuguaagcccauaucuc

SEQ ID NO: 2482294 - RNA, 19 nt, Artificial Sequence
  Description of Artificial Sequence: Synthetic oligonucleotide
  Sense strand starting at position 1422 of SEQ ID NO: 1887575
uggagaucuuggccuggau

SEQ ID NO: 2482295 - RNA, 19 nt, Artificial Sequence
  Description of Artificial Sequence: Synthetic oligonucleotide
  Antisense strand to SEQ ID NO: 2482294
auccaggccaagaucucca

SEQ ID NO: 2482296 - RNA, 19 nt, Artificial Sequence
  Description of Artificial Sequence: Synthetic oligonucleotide
  Sense strand starting at position 1424 of SEQ ID NO: 1887575
gagaucuuggccuggauug

SEQ ID NO: 2482297 - RNA, 19 nt, Artificial Sequence
  Description of Artificial Sequence: Synthetic oligonucleotide
  Antisense strand to SEQ ID NO: 2482296
caauccaggccaagaucuc

SEQ ID NO: 2482298 - RNA, 19 nt, Artificial Sequence
  Description of Artificial Sequence: Synthetic oligonucleotide
  Sense strand starting at position 1462 of SEQ ID NO: 1887575
gcgauaugggccuaugaug

SEQ ID NO: 2482299 - RNA, 19 nt, Artificial Sequence
  Description of Artificial Sequence: Synthetic oligonucleotide
  Antisense strand to SEQ ID NO: 2482298
caucauaggcccauaucgc

SEQ ID NO: 2482300 - RNA, 19 nt, Artificial Sequence
  Description of Artificial Sequence: Synthetic oligonucleotide
  Sense strand starting at position 1468 of SEQ ID NO: 1887575
ugggccuaugauggaaaua

SEQ ID NO: 2482301 - RNA, 19 nt, Artificial Sequence
  Description of Artificial Sequence: Synthetic oligonucleotide
  Antisense strand to SEQ ID NO: 2482300
uauuuccaucauaggccca

SEQ ID NO: 2482302 - RNA, 19 nt, Artificial Sequence
  Description of Artificial Sequence: Synthetic oligonucleotide
  Sense strand starting at position 1478 of SEQ ID NO: 1887575
auggaaauaucggccugga

SEQ ID NO: 2482303 - RNA, 19 nt, Artificial Sequence
  Description of Artificial Sequence: Synthetic oligonucleotide
  Antisense strand to SEQ ID NO: 2482302
uccaggccgauauuuccau

SEQ ID NO: 2482304 - RNA, 19 nt, Artificial Sequence
  Description of Artificial Sequence: Synthetic oligonucleotide
  Sense strand starting at position 1538 of SEQ ID NO: 1887575
gaaauauuggccuggagug

SEQ ID NO: 2482305 - RNA, 19 nt, Artificial Sequence
  Description of Artificial Sequence: Synthetic oligonucleotide
  Antisense strand to SEQ ID NO: 2482304
cacuccaggccaauauuuc

SEQ ID NO: 2482306 - RNA, 19 nt, Artificial Sequence
  Description of Artificial Sequence: Synthetic oligonucleotide
  Sense strand starting at position 2673 of SEQ ID NO: 1887575
ggcacugagcucuacaaca

SEQ ID NO: 2482307 - RNA, 19 nt, Artificial Sequence
  Description of Artificial Sequence: Synthetic oligonucleotide
  Antisense strand to SEQ ID NO: 2482306
uguuguagagcucagugcc

SEQ ID NO: 2482308 - RNA, 19 nt, Artificial Sequence
  Description of Artificial Sequence: Synthetic oligonucleotide
  Sense strand starting at position 3198 of SEQ ID NO: 1887575
gggagacuccaccagcuuu

SEQ ID NO: 2482309 - RNA, 19 nt, Artificial Sequence
  Description of Artificial Sequence: Synthetic oligonucleotide
  Antisense strand to SEQ ID NO: 2482308
aaagcugguggagucuccc

SEQ ID NO: 2482310 - RNA, 19 nt, Artificial Sequence
  Description of Artificial Sequence: Synthetic oligonucleotide
  Sense strand starting at position 3278 of SEQ ID NO: 1887575
ggaaaugauucuccagagu

SEQ ID NO: 2482311 - RNA, 19 nt, Artificial Sequence
  Description of Artificial Sequence: Synthetic oligonucleotide
  Antisense strand to SEQ ID NO: 2482310
acucuggagaaucauuucc

SEQ ID NO: 2482312 - RNA, 19 nt, Artificial Sequence
  Description of Artificial Sequence: Synthetic oligonucleotide
  Sense strand starting at position 3351 of SEQ ID NO: 1887575
gguccuauuucugucucca

SEQ ID NO: 2482313 - RNA, 19 nt, Artificial Sequence
  Description of Artificial Sequence: Synthetic oligonucleotide
  Antisense strand to SEQ ID NO: 2482312
uggagacagaaauaggacc

SEQ ID NO: 2482314 - RNA, 19 nt, Artificial Sequence
  Description of Artificial Sequence: Synthetic oligonucleotide
  Sense strand starting at position 3353 of SEQ ID NO: 1887575
uccuauuucugucuccagu

SEQ ID NO: 2482315 - RNA, 19 nt, Artificial Sequence
  Description of Artificial Sequence: Synthetic oligonucleotide
  Antisense strand to SEQ ID NO: 2482314
acuggagacagaaauagga

SEQ ID NO: 2482316 - RNA, 19 nt, Artificial Sequence
  Description of Artificial Sequence: Synthetic oligonucleotide
  Sense strand starting at position 3367 of SEQ ID NO: 1887575
ccaguagugaaauggguca

SEQ ID NO: 2482317 - RNA, 19 nt, Artificial Sequence
  Description of Artificial Sequence: Synthetic oligonucleotide
  Antisense strand to SEQ ID NO: 2482316
ugacccauuucacuacugg

SEQ ID NO: 2482318 - RNA, 19 nt, Artificial Sequence
  Description of Artificial Sequence: Synthetic oligonucleotide
  Sense strand starting at position 3509 of SEQ ID NO: 1887575
gcgcauguaauccuagcga

SEQ ID NO: 2482319 - RNA, 19 nt, Artificial Sequence
  Description of Artificial Sequence: Synthetic oligonucleotide
  Antisense strand to SEQ ID NO: 2482318
ucgcuaggauuacaugcgc

SEQ ID NO: 2482320 - RNA, 19 nt, Artificial Sequence
  Description of Artificial Sequence: Synthetic oligonucleotide
  Sense strand starting at position 3699 of SEQ ID NO: 1887575
gcaagugugggaugaugau

SEQ ID NO: 2482321 - RNA, 19 nt, Artificial Sequence
  Description of Artificial Sequence: Synthetic oligonucleotide
  Antisense strand to SEQ ID NO: 2482320
aucaucaucccacacuugc

SEQ ID NO: 2482322 - RNA, 19 nt, Artificial Sequence
  Description of Artificial Sequence: Synthetic oligonucleotide
  Sense strand starting at position 249 of SEQ ID NO: 1887578
ggcugccucuacucuuauu

SEQ ID NO: 2482323 - RNA, 19 nt, Artificial Sequence
  Description of Artificial Sequence: Synthetic oligonucleotide
  Antisense strand to SEQ ID NO: 2482322
aauaagaguagaggcagcc

SEQ ID NO: 2482324 - RNA, 19 nt, Artificial Sequence
  Description of Artificial Sequence: Synthetic oligonucleotide
  Sense strand starting at position 309 of SEQ ID NO: 1887578
ggguaugagggccggaauu

SEQ ID NO: 2482325 - RNA, 19 nt, Artificial Sequence
  Description of Artificial Sequence: Synthetic oligonucleotide
  Antisense strand to SEQ ID NO: 2482324
aauuccggcccucauaccc

SEQ ID NO: 2482326 - RNA, 19 nt, Artificial Sequence
  Description of Artificial Sequence: Synthetic oligonucleotide
  Sense strand starting at position 387 of SEQ ID NO: 1887578
uugagaauaagacggcauu

SEQ ID NO: 2482327 - RNA, 19 nt, Artificial Sequence
  Description of Artificial Sequence: Synthetic oligonucleotide
  Antisense strand to SEQ ID NO: 2482326
aaugccgucuuauucucaa

SEQ ID NO: 2482328 - RNA, 19 nt, Artificial Sequence
  Description of Artificial Sequence: Synthetic oligonucleotide
  Sense strand starting at position 505 of SEQ ID NO: 1887578
cgcuaacugaucugggaga

SEQ ID NO: 2482329 - RNA, 19 nt, Artificial Sequence
  Description of Artificial Sequence: Synthetic oligonucleotide
  Antisense strand to SEQ ID NO: 2482328
ucucccagaucaguuagcg

SEQ ID NO: 2482330 - RNA, 19 nt, Artificial Sequence
  Description of Artificial Sequence: Synthetic oligonucleotide
  Sense strand starting at position 753 of SEQ ID NO: 1887578
ggagaagucagauggguuu

SEQ ID NO: 2482331 - RNA, 19 nt, Artificial Sequence
  Description of Artificial Sequence: Synthetic oligonucleotide
  Antisense strand to SEQ ID NO: 2482330
aaacccaucugacuucucc

SEQ ID NO: 2482332 - RNA, 19 nt, Artificial Sequence
  Description of Artificial Sequence: Synthetic oligonucleotide
  Sense strand starting at position 756 of SEQ ID NO: 1887578
gaagucagauggguuugua

SEQ ID NO: 2482333 - RNA, 19 nt, Artificial Sequence
  Description of Artificial Sequence: Synthetic oligonucleotide
  Antisense strand to SEQ ID NO: 2482332
uacaaacccaucugacuuc

SEQ ID NO: 2482334 - RNA, 19 nt, Artificial Sequence
  Description of Artificial Sequence: Synthetic oligonucleotide
  Sense strand starting at position 1010 of SEQ ID NO: 1887578
accacugucugguuuguau

SEQ ID NO: 2482335 - RNA, 19 nt, Artificial Sequence
  Description of Artificial Sequence: Synthetic oligonucleotide
  Antisense strand to SEQ ID NO: 2482334
auacaaaccagacaguggu

SEQ ID NO: 2482336 - RNA, 19 nt, Artificial Sequence
  Description of Artificial Sequence: Synthetic oligonucleotide
  Sense strand starting at position 1153 of SEQ ID NO: 1887578
gguugcccauagugaagua

SEQ ID NO: 2482337 - RNA, 19 nt, Artificial Sequence
  Description of Artificial Sequence: Synthetic oligonucleotide
  Antisense strand to SEQ ID NO: 2482336
uacuucacuaugggcaacc

SEQ ID NO: 2482338 - RNA, 19 nt, Artificial Sequence
  Description of Artificial Sequence: Synthetic oligonucleotide
  Sense strand starting at position 1162 of SEQ ID NO: 1887578
uagugaaguaggcaaguuu

SEQ ID NO: 2482339 - RNA, 19 nt, Artificial Sequence
  Description of Artificial Sequence: Synthetic oligonucleotide
  Antisense strand to SEQ ID NO: 2482338
aaacuugccuacuucacua

SEQ ID NO: 2482340 - RNA, 19 nt, Artificial Sequence
  Description of Artificial Sequence: Synthetic oligonucleotide
  Sense strand starting at position 1456 of SEQ ID NO: 1887578
ugaauaaucaggcagucgu

SEQ ID NO: 2482341 - RNA, 19 nt, Artificial Sequence
  Description of Artificial Sequence: Synthetic oligonucleotide
  Antisense strand to SEQ ID NO: 2482340
acgacugccugauuauuca

SEQ ID NO: 2482342 - RNA, 19 nt, Artificial Sequence
  Description of Artificial Sequence: Synthetic oligonucleotide
  Sense strand starting at position 2529 of SEQ ID NO: 1887578
cguauaugagccggucgua

SEQ ID NO: 2482343 - RNA, 19 nt, Artificial Sequence
  Description of Artificial Sequence: Synthetic oligonucleotide
  Antisense strand to SEQ ID NO: 2482342
uacgaccggcucauauacg

SEQ ID NO: 2482344 - RNA, 19 nt, Artificial Sequence
  Description of Artificial Sequence: Synthetic oligonucleotide
  Sense strand starting at position 2625 of SEQ ID NO: 1887578
uccugaaggucacugacaa

SEQ ID NO: 2482345 - RNA, 19 nt, Artificial Sequence
  Description of Artificial Sequence: Synthetic oligonucleotide
  Antisense strand to SEQ ID NO: 2482344
uugucagugaccuucagga

SEQ ID NO: 2482346 - RNA, 19 nt, Artificial Sequence
  Description of Artificial Sequence: Synthetic oligonucleotide
  Sense strand starting at position 2626 of SEQ ID NO: 1887578
ccugaaggucacugacaaa

SEQ ID NO: 2482347 - RNA, 19 nt, Artificial Sequence
  Description of Artificial Sequence: Synthetic oligonucleotide
  Antisense strand to SEQ ID NO: 2482346
uuugucagugaccuucagg

SEQ ID NO: 2482348 - RNA, 19 nt, Artificial Sequence
  Description of Artificial Sequence: Synthetic oligonucleotide
  Sense strand starting at position 2661 of SEQ ID NO: 1887578
aggagaggcugccauauau

SEQ ID NO: 2482349 - RNA, 19 nt, Artificial Sequence
  Description of Artificial Sequence: Synthetic oligonucleotide
  Antisense strand to SEQ ID NO: 2482348
auauauggcagccucuccu

SEQ ID NO: 2482350 - RNA, 19 nt, Artificial Sequence
  Description of Artificial Sequence: Synthetic oligonucleotide
  Sense strand starting at position 2671 of SEQ ID NO: 1887578
gccauauauccagggcuga

SEQ ID NO: 2482351 - RNA, 19 nt, Artificial Sequence
  Description of Artificial Sequence: Synthetic oligonucleotide
  Antisense strand to SEQ ID NO: 2482350
ucagcccuggauauauggc

SEQ ID NO: 2482352 - RNA, 19 nt, Artificial Sequence
  Description of Artificial Sequence: Synthetic oligonucleotide
  Sense strand starting at position 2723 of SEQ ID NO: 1887578
aaauuuaccucgugccuga

SEQ ID NO: 2482353 - RNA, 19 nt, Artificial Sequence
  Description of Artificial Sequence: Synthetic oligonucleotide
  Antisense strand to SEQ ID NO: 2482352
ucaggcacgagguaaauuu

SEQ ID NO: 2482354 - RNA, 19 nt, Artificial Sequence
  Description of Artificial Sequence: Synthetic oligonucleotide
  Sense strand starting at position 2834 of SEQ ID NO: 1887578
uugagucucuuuccagaac

SEQ ID NO: 2482355 - RNA, 19 nt, Artificial Sequence
  Description of Artificial Sequence: Synthetic oligonucleotide
  Antisense strand to SEQ ID NO: 2482354
guucuggaaagagacucaa

SEQ ID NO: 2482356 - RNA, 19 nt, Artificial Sequence
  Description of Artificial Sequence: Synthetic oligonucleotide
  Sense strand starting at position 2845 of SEQ ID NO: 1887578
uccagaaccuuggugugaa

SEQ ID NO: 2482357 - RNA, 19 nt, Artificial Sequence
  Description of Artificial Sequence: Synthetic oligonucleotide
  Antisense strand to SEQ ID NO: 2482356
uucacaccaagguucugga

SEQ ID NO: 2482358 - RNA, 19 nt, Artificial Sequence
  Description of Artificial Sequence: Synthetic oligonucleotide
  Sense strand starting at position 2846 of SEQ ID NO: 1887578
ccagaaccuuggugugaac

SEQ ID NO: 2482359 - RNA, 19 nt, Artificial Sequence
  Description of Artificial Sequence: Synthetic oligonucleotide
  Antisense strand to SEQ ID NO: 2482358
guucacaccaagguucugg

SEQ ID NO: 2482360 - RNA, 19 nt, Artificial Sequence
  Description of Artificial Sequence: Synthetic oligonucleotide
  Sense strand starting at position 2848 of SEQ ID NO: 1887578
agaaccuuggugugaacuu

SEQ ID NO: 2482361 - RNA, 19 nt, Artificial Sequence
  Description of Artificial Sequence: Synthetic oligonucleotide
  Antisense strand to SEQ ID NO: 2482360
aaguucacaccaagguucu

SEQ ID NO: 2482362 - RNA, 19 nt, Artificial Sequence
  Description of Artificial Sequence: Synthetic oligonucleotide
  Sense strand starting at position 2849 of SEQ ID NO: 1887578
gaaccuuggugugaacuua

SEQ ID NO: 2482363 - RNA, 19 nt, Artificial Sequence
  Description of Artificial Sequence: Synthetic oligonucleotide
  Antisense strand to SEQ ID NO: 2482362
uaaguucacaccaagguuc

SEQ ID NO: 2482364 - RNA, 19 nt, Artificial Sequence
  Description of Artificial Sequence: Synthetic oligonucleotide
  Sense strand starting at position 2944 of SEQ ID NO: 1887578
accaguucgguccaacaga

SEQ ID NO: 2482365 - RNA, 19 nt, Artificial Sequence
  Description of Artificial Sequence: Synthetic oligonucleotide
  Antisense strand to SEQ ID NO: 2482364
ucuguuggaccgaacuggu

SEQ ID NO: 2482366 - RNA, 19 nt, Artificial Sequence
  Description of Artificial Sequence: Synthetic oligonucleotide
  Sense strand starting at position 2969 of SEQ ID NO: 1887578
aggcaaccaccaugucauu

SEQ ID NO: 2482367 - RNA, 19 nt, Artificial Sequence
  Description of Artificial Sequence: Synthetic oligonucleotide
  Antisense strand to SEQ ID NO: 2482366
aaugacauggugguugccu

SEQ ID NO: 2482368 - RNA, 19 nt, Artificial Sequence
  Description of Artificial Sequence: Synthetic oligonucleotide
  Sense strand starting at position 3005 of SEQ ID NO: 1887578
ggauauaauucgcaaccca

SEQ ID NO: 2482369 - RNA, 19 nt, Artificial Sequence
  Description of Artificial Sequence: Synthetic oligonucleotide
  Antisense strand to SEQ ID NO: 2482368
uggguugcgaauuauaucc

SEQ ID NO: 2482370 - RNA, 19 nt, Artificial Sequence
  Description of Artificial Sequence: Synthetic oligonucleotide
  Sense strand starting at position 3034 of SEQ ID NO: 1887578
ccauuuaagguguguaagu

SEQ ID NO: 2482371 - RNA, 19 nt, Artificial Sequence
  Description of Artificial Sequence: Synthetic oligonucleotide
  Antisense strand to SEQ ID NO: 2482370
acuuacacaccuuaaaugg

SEQ ID NO: 2482372 - RNA, 19 nt, Artificial Sequence
  Description of Artificial Sequence: Synthetic oligonucleotide
  Sense strand starting at position 3064 of SEQ ID NO: 1887578
cguguauuaccuuauguuu

SEQ ID NO: 2482373 - RNA, 19 nt, Artificial Sequence
  Description of Artificial Sequence: Synthetic oligonucleotide
  Antisense strand to SEQ ID NO: 2482372
aaacauaagguaauacacg

SEQ ID NO: 2482374 - RNA, 19 nt, Artificial Sequence
  Description of Artificial Sequence: Synthetic oligonucleotide
  Sense strand starting at position 3222 of SEQ ID NO: 1887578
ccaguaguagcugggacaa

SEQ ID NO: 2482375 - RNA, 19 nt, Artificial Sequence
  Description of Artificial Sequence: Synthetic oligonucleotide
  Antisense strand to SEQ ID NO: 2482374
uugucccagcuacuacugg

SEQ ID NO: 2482376 - RNA, 19 nt, Artificial Sequence
  Description of Artificial Sequence: Synthetic oligonucleotide
  Sense strand starting at position 3449 of SEQ ID NO: 1887578
gguuaaguggcaugaucac

SEQ ID NO: 2482377 - RNA, 19 nt, Artificial Sequence
  Description of Artificial Sequence: Synthetic oligonucleotide
  Antisense strand to SEQ ID NO: 2482376
gugaucaugccacuuaacc

SEQ ID NO: 2482378 - RNA, 19 nt, Artificial Sequence
  Description of Artificial Sequence: Synthetic oligonucleotide
  Sense strand starting at position 3907 of SEQ ID NO: 1887578
accaaacccggcuauuauu

SEQ ID NO: 2482379 - RNA, 19 nt, Artificial Sequence
  Description of Artificial Sequence: Synthetic oligonucleotide
  Antisense strand to SEQ ID NO: 2482378
aauaauagccggguuuggu

SEQ ID NO: 2482380 - RNA, 19 nt, Artificial Sequence
  Description of Artificial Sequence: Synthetic oligonucleotide
  Sense strand starting at position 66 of SEQ ID NO: 1887579
ccugccagguuucuaagau

SEQ ID NO: 2482381 - RNA, 19 nt, Artificial Sequence
  Description of Artificial Sequence: Synthetic oligonucleotide
  Antisense strand to SEQ ID NO: 2482380
aucuuagaaaccuggcagg

SEQ ID NO: 2482382 - RNA, 19 nt, Artificial Sequence
  Description of Artificial Sequence: Synthetic oligonucleotide
  Sense strand starting at position 70 of SEQ ID NO: 1887579
ccagguuucuaagauauuu

SEQ ID NO: 2482383 - RNA, 19 nt, Artificial Sequence
  Description of Artificial Sequence: Synthetic oligonucleotide
  Antisense strand to SEQ ID NO: 2482382
aaauaucuuagaaaccugg

SEQ ID NO: 2482384 - RNA, 19 nt, Artificial Sequence
  Description of Artificial Sequence: Synthetic oligonucleotide
  Sense strand starting at position 114 of SEQ ID NO: 1887579
ccuggauacugugcugaua

SEQ ID NO: 2482385 - RNA, 19 nt, Artificial Sequence
  Description of Artificial Sequence: Synthetic oligonucleotide
  Antisense strand to SEQ ID NO: 2482384
uaucagcacaguauccagg

SEQ ID NO: 2482386 - RNA, 19 nt, Artificial Sequence
  Description of Artificial Sequence: Synthetic oligonucleotide
  Sense strand starting at position 117 of SEQ ID NO: 1887579
ggauacugugcugauaaca

SEQ ID NO: 2482387 - RNA, 19 nt, Artificial Sequence
  Description of Artificial Sequence: Synthetic oligonucleotide
  Antisense strand to SEQ ID NO: 2482386
uguuaucagcacaguaucc

SEQ ID NO: 2482388 - RNA, 19 nt, Artificial Sequence
  Description of Artificial Sequence: Synthetic oligonucleotide
  Sense strand starting at position 423 of SEQ ID NO: 1887579
caggaagagucacucauuc

SEQ ID NO: 2482389 - RNA, 19 nt, Artificial Sequence
  Description of Artificial Sequence: Synthetic oligonucleotide
  Antisense strand to SEQ ID NO: 2482388
gaaugagugacucuuccug

SEQ ID NO: 2482390 - RNA, 19 nt, Artificial Sequence
  Description of Artificial Sequence: Synthetic oligonucleotide
  Sense strand starting at position 550 of SEQ ID NO: 1887579
gcuucuuuacaguggauaa

SEQ ID NO: 2482391 - RNA, 19 nt, Artificial Sequence
  Description of Artificial Sequence: Synthetic oligonucleotide
  Antisense strand to SEQ ID NO: 2482390
uuauccacuguaaagaagc

SEQ ID NO: 2482392 - RNA, 19 nt, Artificial Sequence
  Description of Artificial Sequence: Synthetic oligonucleotide
  Sense strand starting at position 569 of SEQ ID NO: 1887579
uguuuaugagguugaucca

SEQ ID NO: 2482393 - RNA, 19 nt, Artificial Sequence
  Description of Artificial Sequence: Synthetic oligonucleotide
  Antisense strand to SEQ ID NO: 2482392
uggaucaaccucauaaaca

SEQ ID NO: 2482394 - RNA, 19 nt, Artificial Sequence
  Description of Artificial Sequence: Synthetic oligonucleotide
  Sense strand starting at position 570 of SEQ ID NO: 1887579
guuuaugagguugauccau

SEQ ID NO: 2482395 - RNA, 19 nt, Artificial Sequence
  Description of Artificial Sequence: Synthetic oligonucleotide
  Antisense strand to SEQ ID NO: 2482394
auggaucaaccucauaaac

SEQ ID NO: 2482396 - RNA, 19 nt, Artificial Sequence
  Description of Artificial Sequence: Synthetic oligonucleotide
  Sense strand starting at position 572 of SEQ ID NO: 1887579
uuaugagguugauccaugu

SEQ ID NO: 2482397 - RNA, 19 nt, Artificial Sequence
  Description of Artificial Sequence: Synthetic oligonucleotide
  Antisense strand to SEQ ID NO: 2482396
acauggaucaaccucauaa

SEQ ID NO: 2482398 - RNA, 19 nt, Artificial Sequence
  Description of Artificial Sequence: Synthetic oligonucleotide
  Sense strand starting at position 576 of SEQ ID NO: 1887579
gagguugauccauguugua

SEQ ID NO: 2482399 - RNA, 19 nt, Artificial Sequence
  Description of Artificial Sequence: Synthetic oligonucleotide
  Antisense strand to SEQ ID NO: 2482398
uacaacauggaucaaccuc

SEQ ID NO: 2482400 - RNA, 19 nt, Artificial Sequence
  Description of Artificial Sequence: Synthetic oligonucleotide
  Sense strand starting at position 772 of SEQ ID NO: 1887579
cuauuacccugggcuaauu

SEQ ID NO: 2482401 - RNA, 19 nt, Artificial Sequence
  Description of Artificial Sequence: Synthetic oligonucleotide
  Antisense strand to SEQ ID NO: 2482400
aauuagcccaggguaauag

SEQ ID NO: 2482402 - RNA, 19 nt, Artificial Sequence
  Description of Artificial Sequence: Synthetic oligonucleotide
  Sense strand starting at position 885 of SEQ ID NO: 1887579
gugcuagaaguacaggaau

SEQ ID NO: 2482403 - RNA, 19 nt, Artificial Sequence
  Description of Artificial Sequence: Synthetic oligonucleotide
  Antisense strand to SEQ ID NO: 2482402
auuccuguacuucuagcac

SEQ ID NO: 2482404 - RNA, 19 nt, Artificial Sequence
  Description of Artificial Sequence: Synthetic oligonucleotide
  Sense strand starting at position 887 of SEQ ID NO: 1887579
gcuagaaguacaggaauga

SEQ ID NO: 2482405 - RNA, 19 nt, Artificial Sequence
  Description of Artificial Sequence: Synthetic oligonucleotide
  Antisense strand to SEQ ID NO: 2482404
ucauuccuguacuucuagc

SEQ ID NO: 2482406 - RNA, 19 nt, Artificial Sequence
  Description of Artificial Sequence: Synthetic oligonucleotide
  Sense strand starting at position 1330 of SEQ ID NO: 1887579
ggcuguugugaacaaggau

SEQ ID NO: 2482407 - RNA, 19 nt, Artificial Sequence
  Description of Artificial Sequence: Synthetic oligonucleotide
  Antisense strand to SEQ ID NO: 2482406
auccuuguucacaacagcc

SEQ ID NO: 2482408 - RNA, 19 nt, Artificial Sequence
  Description of Artificial Sequence: Synthetic oligonucleotide
  Sense strand starting at position 1358 of SEQ ID NO: 1887579
aucucuuaccuuggucaca

SEQ ID NO: 2482409 - RNA, 19 nt, Artificial Sequence
  Description of Artificial Sequence: Synthetic oligonucleotide
  Antisense strand to SEQ ID NO: 2482408
ugugaccaagguaagagau

SEQ ID NO: 2482410 - RNA, 19 nt, Artificial Sequence
  Description of Artificial Sequence: Synthetic oligonucleotide
  Sense strand starting at position 1590 of SEQ ID NO: 1887579
ccagauaaucuugguugau

SEQ ID NO: 2482411 - RNA, 19 nt, Artificial Sequence
  Description of Artificial Sequence: Synthetic oligonucleotide
  Antisense strand to SEQ ID NO: 2482410
aucaaccaagauuaucugg

SEQ ID NO: 2482412 - RNA, 19 nt, Artificial Sequence
  Description of Artificial Sequence: Synthetic oligonucleotide
  Sense strand starting at position 1591 of SEQ ID NO: 1887579
cagauaaucuugguugauu

SEQ ID NO: 2482413 - RNA, 19 nt, Artificial Sequence
  Description of Artificial Sequence: Synthetic oligonucleotide
  Antisense strand to SEQ ID NO: 2482412
aaucaaccaagauuaucug

SEQ ID NO: 2482414 - RNA, 19 nt, Artificial Sequence
  Description of Artificial Sequence: Synthetic oligonucleotide
  Sense strand starting at position 1592 of SEQ ID NO: 1887579
agauaaucuugguugauuc

SEQ ID NO: 2482415 - RNA, 19 nt, Artificial Sequence
  Description of Artificial Sequence: Synthetic oligonucleotide
  Antisense strand to SEQ ID NO: 2482414
gaaucaaccaagauuaucu

SEQ ID NO: 2482416 - RNA, 19 nt, Artificial Sequence
  Description of Artificial Sequence: Synthetic oligonucleotide
  Sense strand starting at position 1672 of SEQ ID NO: 1887579
agcugucaccuccaauaga

SEQ ID NO: 2482417 - RNA, 19 nt, Artificial Sequence
  Description of Artificial Sequence: Synthetic oligonucleotide
  Antisense strand to SEQ ID NO: 2482416
ucuauuggaggugacagcu

SEQ ID NO: 2482418 - RNA, 19 nt, Artificial Sequence
  Description of Artificial Sequence: Synthetic oligonucleotide
  Sense strand starting at position 2147 of SEQ ID NO: 1887579
ggaauugccuucccaggaa

SEQ ID NO: 2482419 - RNA, 19 nt, Artificial Sequence
  Description of Artificial Sequence: Synthetic oligonucleotide
  Antisense strand to SEQ ID NO: 2482418
uuccugggaaggcaauucc

SEQ ID NO: 2482420 - RNA, 19 nt, Artificial Sequence
  Description of Artificial Sequence: Synthetic oligonucleotide
  Sense strand starting at position 2189 of SEQ ID NO: 1887579
ggacguucugugccaugca

SEQ ID NO: 2482421 - RNA, 19 nt, Artificial Sequence
  Description of Artificial Sequence: Synthetic oligonucleotide
  Antisense strand to SEQ ID NO: 2482420
ugcauggcacagaacgucc

SEQ ID NO: 2482422 - RNA, 19 nt, Artificial Sequence
  Description of Artificial Sequence: Synthetic oligonucleotide
  Sense strand starting at position 2207 of SEQ ID NO: 1887579
agcucaaagcaucagaguu

SEQ ID NO: 2482423 - RNA, 19 nt, Artificial Sequence
  Description of Artificial Sequence: Synthetic oligonucleotide
  Antisense strand to SEQ ID NO: 2482422
aacucugaugcuuugagcu

SEQ ID NO: 2482424 - RNA, 19 nt, Artificial Sequence
  Description of Artificial Sequence: Synthetic oligonucleotide
  Sense strand starting at position 2221 of SEQ ID NO: 1887579
gaguuugugcggcuccaca

SEQ ID NO: 2482425 - RNA, 19 nt, Artificial Sequence
  Description of Artificial Sequence: Synthetic oligonucleotide
  Antisense strand to SEQ ID NO: 2482424
uguggagccgcacaaacuc

SEQ ID NO: 2482426 - RNA, 19 nt, Artificial Sequence
  Description of Artificial Sequence: Synthetic oligonucleotide
  Sense strand starting at position 2272 of SEQ ID NO: 1887579
aggugaauucucuaucguu

SEQ ID NO: 2482427 - RNA, 19 nt, Artificial Sequence
  Description of Artificial Sequence: Synthetic oligonucleotide
  Antisense strand to SEQ ID NO: 2482426
aacgauagagaauucaccu

SEQ ID NO: 2482428 - RNA, 19 nt, Artificial Sequence
  Description of Artificial Sequence: Synthetic oligonucleotide
  Sense strand starting at position 2308 of SEQ ID NO: 1887579
aaggguccuuccucauaga

SEQ ID NO: 2482429 - RNA, 19 nt, Artificial Sequence
  Description of Artificial Sequence: Synthetic oligonucleotide
  Antisense strand to SEQ ID NO: 2482428
ucuaugaggaaggacccuu

SEQ ID NO: 2482430 - RNA, 19 nt, Artificial Sequence
  Description of Artificial Sequence: Synthetic oligonucleotide
  Sense strand starting at position 2601 of SEQ ID NO: 1887579
aaagauagcuagucuagaa

SEQ ID NO: 2482431 - RNA, 19 nt, Artificial Sequence
  Description of Artificial Sequence: Synthetic oligonucleotide
  Antisense strand to SEQ ID NO: 2482430
uucuagacuagcuaucuuu

SEQ ID NO: 2482432 - RNA, 19 nt, Artificial Sequence
  Description of Artificial Sequence: Synthetic oligonucleotide
  Sense strand starting at position 2775 of SEQ ID NO: 1887579
gguuauaggguuuauacag

SEQ ID NO: 2482433 - RNA, 19 nt, Artificial Sequence
  Description of Artificial Sequence: Synthetic oligonucleotide
  Antisense strand to SEQ ID NO: 2482432
cuguauaaacccuauaacc

SEQ ID NO: 2482434 - RNA, 19 nt, Artificial Sequence
  Description of Artificial Sequence: Synthetic oligonucleotide
  Sense strand starting at position 2809 of SEQ ID NO: 1887579
auccucuacguuuaggaau

SEQ ID NO: 2482435 - RNA, 19 nt, Artificial Sequence
  Description of Artificial Sequence: Synthetic oligonucleotide
  Antisense strand to SEQ ID NO: 2482434
auuccuaaacguagaggau

SEQ ID NO: 2482436 - RNA, 19 nt, Artificial Sequence
  Description of Artificial Sequence: Synthetic oligonucleotide
  Sense strand starting at position 2851 of SEQ ID NO: 1887579
gguagaaaucaagguauca

SEQ ID NO: 2482437 - RNA, 19 nt, Artificial Sequence
  Description of Artificial Sequence: Synthetic oligonucleotide
  Antisense strand to SEQ ID NO: 2482436
ugauaccuugauuucuacc

SEQ ID NO: 2482438 - RNA, 19 nt, Artificial Sequence
  Description of Artificial Sequence: Synthetic oligonucleotide
  Sense strand starting at position 3337 of SEQ ID NO: 1887579
aagcuugcugcaugaaaga

SEQ ID NO: 2482439 - RNA, 19 nt, Artificial Sequence
  Description of Artificial Sequence: Synthetic oligonucleotide
  Antisense strand to SEQ ID NO: 2482438
ucuuucaugcagcaagcuu

SEQ ID NO: 2482440 - RNA, 19 nt, Artificial Sequence
  Description of Artificial Sequence: Synthetic oligonucleotide
  Sense strand starting at position 3354 of SEQ ID NO: 1887579
gaggaaaguguguacacau

SEQ ID NO: 2482441 - RNA, 19 nt, Artificial Sequence
  Description of Artificial Sequence: Synthetic oligonucleotide
  Antisense strand to SEQ ID NO: 2482440
auguguacacacuuuccuc

SEQ ID NO: 2482442 - RNA, 19 nt, Artificial Sequence
  Description of Artificial Sequence: Synthetic oligonucleotide
  Sense strand starting at position 3536 of SEQ ID NO: 1887579
uguggaguagugcaucaga

SEQ ID NO: 2482443 - RNA, 19 nt, Artificial Sequence
  Description of Artificial Sequence: Synthetic oligonucleotide
  Antisense strand to SEQ ID NO: 2482442
ucugaugcacuacuccaca

SEQ ID NO: 2482444 - RNA, 19 nt, Artificial Sequence
  Description of Artificial Sequence: Synthetic oligonucleotide
  Sense strand starting at position 3539 of SEQ ID NO: 1887579
ggaguagugcaucagauuc

SEQ ID NO: 2482445 - RNA, 19 nt, Artificial Sequence
  Description of Artificial Sequence: Synthetic oligonucleotide
  Antisense strand to SEQ ID NO: 2482444
gaaucugaugcacuacucc

SEQ ID NO: 2482446 - RNA, 19 nt, Artificial Sequence
  Description of Artificial Sequence: Synthetic oligonucleotide
  Sense strand starting at position 3626 of SEQ ID NO: 1887579
gggcuugugacuuacuucu

SEQ ID NO: 2482447 - RNA, 19 nt, Artificial Sequence
  Description of Artificial Sequence: Synthetic oligonucleotide
  Antisense strand to SEQ ID NO: 2482446
agaaguaagucacaagccc

SEQ ID NO: 2482448 - RNA, 19 nt, Artificial Sequence
  Description of Artificial Sequence: Synthetic oligonucleotide
  Sense strand starting at position 3653 of SEQ ID NO: 1887579
ggaauguggcaggguugau

SEQ ID NO: 2482449 - RNA, 19 nt, Artificial Sequence
  Description of Artificial Sequence: Synthetic oligonucleotide
  Antisense strand to SEQ ID NO: 2482448
aucaacccugccacauucc

SEQ ID NO: 2482450 - RNA, 19 nt, Artificial Sequence
  Description of Artificial Sequence: Synthetic oligonucleotide
  Sense strand starting at position 3684 of SEQ ID NO: 1887579
cugugaugccaugagauug

SEQ ID NO: 2482451 - RNA, 19 nt, Artificial Sequence
  Description of Artificial Sequence: Synthetic oligonucleotide
  Antisense strand to SEQ ID NO: 2482450
caaucucauggcaucacag

SEQ ID NO: 2482452 - RNA, 19 nt, Artificial Sequence
  Description of Artificial Sequence: Synthetic oligonucleotide
  Sense strand starting at position 3689 of SEQ ID NO: 1887579
augccaugagauuguaagu

SEQ ID NO: 2482453 - RNA, 19 nt, Artificial Sequence
  Description of Artificial Sequence: Synthetic oligonucleotide
  Antisense strand to SEQ ID NO: 2482452
acuuacaaucucauggcau

SEQ ID NO: 2482454 - RNA, 19 nt, Artificial Sequence
  Description of Artificial Sequence: Synthetic oligonucleotide
  Sense strand starting at position 3731 of SEQ ID NO: 1887579
gcuggcuuugaagauccaa

SEQ ID NO: 2482455 - RNA, 19 nt, Artificial Sequence
  Description of Artificial Sequence: Synthetic oligonucleotide
  Antisense strand to SEQ ID NO: 2482454
uuggaucuucaaagccagc

SEQ ID NO: 2482456 - RNA, 19 nt, Artificial Sequence
  Description of Artificial Sequence: Synthetic oligonucleotide
  Sense strand starting at position 3958 of SEQ ID NO: 1887579
agaggauccagcugaguca

SEQ ID NO: 2482457 - RNA, 19 nt, Artificial Sequence
  Description of Artificial Sequence: Synthetic oligonucleotide
  Antisense strand to SEQ ID NO: 2482456
ugacucagcuggauccucu

SEQ ID NO: 2482458 - RNA, 19 nt, Artificial Sequence
  Description of Artificial Sequence: Synthetic oligonucleotide
  Sense strand starting at position 3961 of SEQ ID NO: 1887579
ggauccagcugagucauau

SEQ ID NO: 2482459 - RNA, 19 nt, Artificial Sequence
  Description of Artificial Sequence: Synthetic oligonucleotide
  Antisense strand to SEQ ID NO: 2482458
auaugacucagcuggaucc

SEQ ID NO: 2482460 - RNA, 19 nt, Artificial Sequence
  Description of Artificial Sequence: Synthetic oligonucleotide
  Sense strand starting at position 193 of SEQ ID NO: 1887580
cagcauauagucggccaaa

SEQ ID NO: 2482461 - RNA, 19 nt, Artificial Sequence
  Description of Artificial Sequence: Synthetic oligonucleotide
  Antisense strand to SEQ ID NO: 2482460
uuuggccgacuauaugcug

SEQ ID NO: 2482462 - RNA, 19 nt, Artificial Sequence
  Description of Artificial Sequence: Synthetic oligonucleotide
  Sense strand starting at position 238 of SEQ ID NO: 1887580
guaaaugugcagcaucaua

SEQ ID NO: 2482463 - RNA, 19 nt, Artificial Sequence
  Description of Artificial Sequence: Synthetic oligonucleotide
  Antisense strand to SEQ ID NO: 2482462
uaugaugcugcacauuuac

SEQ ID NO: 2482464 - RNA, 19 nt, Artificial Sequence
  Description of Artificial Sequence: Synthetic oligonucleotide
  Sense strand starting at position 563 of SEQ ID NO: 1887580
ccuguuuaauggcuuauua

SEQ ID NO: 2482465 - RNA, 19 nt, Artificial Sequence
  Description of Artificial Sequence: Synthetic oligonucleotide
  Antisense strand to SEQ ID NO: 2482464
uaauaagccauuaaacagg

SEQ ID NO: 2482466 - RNA, 19 nt, Artificial Sequence
  Description of Artificial Sequence: Synthetic oligonucleotide
  Sense strand starting at position 565 of SEQ ID NO: 1887580
uguuuaauggcuuauuaca

SEQ ID NO: 2482467 - RNA, 19 nt, Artificial Sequence
  Description of Artificial Sequence: Synthetic oligonucleotide
  Antisense strand to SEQ ID NO: 2482466
uguaauaagccauuaaaca

SEQ ID NO: 2482468 - RNA, 19 nt, Artificial Sequence
  Description of Artificial Sequence: Synthetic oligonucleotide
  Sense strand starting at position 743 of SEQ ID NO: 1887580
agcuccagcucuccagaaa

SEQ ID NO: 2482469 - RNA, 19 nt, Artificial Sequence
  Description of Artificial Sequence: Synthetic oligonucleotide
  Antisense strand to SEQ ID NO: 2482468
uuucuggagagcuggagcu

SEQ ID NO: 2482470 - RNA, 19 nt, Artificial Sequence
  Description of Artificial Sequence: Synthetic oligonucleotide
  Sense strand starting at position 870 of SEQ ID NO: 1887580
gguugugcucgagcuauac

SEQ ID NO: 2482471 - RNA, 19 nt, Artificial Sequence
  Description of Artificial Sequence: Synthetic oligonucleotide
  Antisense strand to SEQ ID NO: 2482470
guauagcucgagcacaacc

SEQ ID NO: 2482472 - RNA, 19 nt, Artificial Sequence
  Description of Artificial Sequence: Synthetic oligonucleotide
  Sense strand starting at position 872 of SEQ ID NO: 1887580
uugugcucgagcuauacaa

SEQ ID NO: 2482473 - RNA, 19 nt, Artificial Sequence
  Description of Artificial Sequence: Synthetic oligonucleotide
  Antisense strand to SEQ ID NO: 2482472
uuguauagcucgagcacaa

SEQ ID NO: 2482474 - RNA, 19 nt, Artificial Sequence
  Description of Artificial Sequence: Synthetic oligonucleotide
  Sense strand starting at position 874 of SEQ ID NO: 1887580
gugcucgagcuauacaaau

SEQ ID NO: 2482475 - RNA, 19 nt, Artificial Sequence
  Description of Artificial Sequence: Synthetic oligonucleotide
  Antisense strand to SEQ ID NO: 2482474
auuuguauagcucgagcac

SEQ ID NO: 2482476 - RNA, 19 nt, Artificial Sequence
  Description of Artificial Sequence: Synthetic oligonucleotide
  Sense strand starting at position 890 of SEQ ID NO: 1887580
aaugccucucagggagaua

SEQ ID NO: 2482477 - RNA, 19 nt, Artificial Sequence
  Description of Artificial Sequence: Synthetic oligonucleotide
  Antisense strand to SEQ ID NO: 2482476
uaucucccugagaggcauu

SEQ ID NO: 2482478 - RNA, 19 nt, Artificial Sequence
  Description of Artificial Sequence: Synthetic oligonucleotide
  Sense strand starting at position 1116 of SEQ ID NO: 1887580
uuccuaacguuguuuaaca

SEQ ID NO: 2482479 - RNA, 19 nt, Artificial Sequence
  Description of Artificial Sequence: Synthetic oligonucleotide
  Antisense strand to SEQ ID NO: 2482478
uguuaaacaacguuaggaa

SEQ ID NO: 2482480 - RNA, 19 nt, Artificial Sequence
  Description of Artificial Sequence: Synthetic oligonucleotide
  Sense strand starting at position 1117 of SEQ ID NO: 1887580
uccuaacguuguuuaacau

SEQ ID NO: 2482481 - RNA, 19 nt, Artificial Sequence
  Description of Artificial Sequence: Synthetic oligonucleotide
  Antisense strand to SEQ ID NO: 2482480
auguuaaacaacguuagga

SEQ ID NO: 2482482 - RNA, 19 nt, Artificial Sequence
  Description of Artificial Sequence: Synthetic oligonucleotide
  Sense strand starting at position 1118 of SEQ ID NO: 1887580
ccuaacguuguuuaacauu

SEQ ID NO: 2482483 - RNA, 19 nt, Artificial Sequence
  Description of Artificial Sequence: Synthetic oligonucleotide
  Antisense strand to SEQ ID NO: 2482482
aauguuaaacaacguuagg

SEQ ID NO: 2482484 - RNA, 19 nt, Artificial Sequence
  Description of Artificial Sequence: Synthetic oligonucleotide
  Sense strand starting at position 1199 of SEQ ID NO: 1887580
agcagugaaugcucaagca

SEQ ID NO: 2482485 - RNA, 19 nt, Artificial Sequence
  Description of Artificial Sequence: Synthetic oligonucleotide
  Antisense strand to SEQ ID NO: 2482484
ugcuugagcauucacugcu

SEQ ID NO: 2482486 - RNA, 19 nt, Artificial Sequence
  Description of Artificial Sequence: Synthetic oligonucleotide
  Sense strand starting at position 1546 of SEQ ID NO: 1887580
gccaccaagguauauguua

SEQ ID NO: 2482487 - RNA, 19 nt, Artificial Sequence
  Description of Artificial Sequence: Synthetic oligonucleotide
  Antisense strand to SEQ ID NO: 2482486
uaacauauaccuugguggc

SEQ ID NO: 2482488 - RNA, 19 nt, Artificial Sequence
  Description of Artificial Sequence: Synthetic oligonucleotide
  Sense strand starting at position 1554 of SEQ ID NO: 1887580
gguauauguuaacuguaac

SEQ ID NO: 2482489 - RNA, 19 nt, Artificial Sequence
  Description of Artificial Sequence: Synthetic oligonucleotide
  Antisense strand to SEQ ID NO: 2482488
guuacaguuaacauauacc

SEQ ID NO: 2482490 - RNA, 19 nt, Artificial Sequence
  Description of Artificial Sequence: Synthetic oligonucleotide
  Sense strand starting at position 1884 of SEQ ID NO: 1887580
ggccaaucuguuggcaaca

SEQ ID NO: 2482491 - RNA, 19 nt, Artificial Sequence
  Description of Artificial Sequence: Synthetic oligonucleotide
  Antisense strand to SEQ ID NO: 2482490
uguugccaacagauuggcc

SEQ ID NO: 2482492 - RNA, 19 nt, Artificial Sequence
  Description of Artificial Sequence: Synthetic oligonucleotide
  Sense strand starting at position 1947 of SEQ ID NO: 1887580
cgggcauagacaugaaaga

SEQ ID NO: 2482493 - RNA, 19 nt, Artificial Sequence
  Description of Artificial Sequence: Synthetic oligonucleotide
  Antisense strand to SEQ ID NO: 2482492
ucuuucaugucuaugcccg

SEQ ID NO: 2482494 - RNA, 19 nt, Artificial Sequence
  Description of Artificial Sequence: Synthetic oligonucleotide
  Sense strand starting at position 1966 of SEQ ID NO: 1887580
ggucaaguuaagcaaggau

SEQ ID NO: 2482495 - RNA, 19 nt, Artificial Sequence
  Description of Artificial Sequence: Synthetic oligonucleotide
  Antisense strand to SEQ ID NO: 2482494
auccuugcuuaacuugacc

SEQ ID NO: 2482496 - RNA, 19 nt, Artificial Sequence
  Description of Artificial Sequence: Synthetic oligonucleotide
  Sense strand starting at position 2009 of SEQ ID NO: 1887580
aaagaucaaugcgugagau

SEQ ID NO: 2482497 - RNA, 19 nt, Artificial Sequence
  Description of Artificial Sequence: Synthetic oligonucleotide
  Antisense strand to SEQ ID NO: 2482496
aucucacgcauugaucuuu

SEQ ID NO: 2482498 - RNA, 19 nt, Artificial Sequence
  Description of Artificial Sequence: Synthetic oligonucleotide
  Sense strand starting at position 2010 of SEQ ID NO: 1887580
aagaucaaugcgugagaug

SEQ ID NO: 2482499 - RNA, 19 nt, Artificial Sequence
  Description of Artificial Sequence: Synthetic oligonucleotide
  Antisense strand to SEQ ID NO: 2482498
caucucacgcauugaucuu

SEQ ID NO: 2482500 - RNA, 19 nt, Artificial Sequence
  Description of Artificial Sequence: Synthetic oligonucleotide
  Sense strand starting at position 2078 of SEQ ID NO: 1887580
aguaguaaaggcuguggua

SEQ ID NO: 2482501 - RNA, 19 nt, Artificial Sequence
  Description of Artificial Sequence: Synthetic oligonucleotide
  Antisense strand to SEQ ID NO: 2482500
uaccacagccuuuacuacu

SEQ ID NO: 2482502 - RNA, 19 nt, Artificial Sequence
  Description of Artificial Sequence: Synthetic oligonucleotide
  Sense strand starting at position 2080 of SEQ ID NO: 1887580
uaguaaaggcugugguaua

SEQ ID NO: 2482503 - RNA, 19 nt, Artificial Sequence
  Description of Artificial Sequence: Synthetic oligonucleotide
  Antisense strand to SEQ ID NO: 2482502
uauaccacagccuuuacua

SEQ ID NO: 2482504 - RNA, 19 nt, Artificial Sequence
  Description of Artificial Sequence: Synthetic oligonucleotide
  Sense strand starting at position 2292 of SEQ ID NO: 1887580
cucacuaauggcuaaguca

SEQ ID NO: 2482505 - RNA, 19 nt, Artificial Sequence
  Description of Artificial Sequence: Synthetic oligonucleotide
  Antisense strand to SEQ ID NO: 2482504
ugacuuagccauuagugag

SEQ ID NO: 2482506 - RNA, 19 nt, Artificial Sequence
  Description of Artificial Sequence: Synthetic oligonucleotide
  Sense strand starting at position 2300 of SEQ ID NO: 1887580
uggcuaagucacuauauga

SEQ ID NO: 2482507 - RNA, 19 nt, Artificial Sequence
  Description of Artificial Sequence: Synthetic oligonucleotide
  Antisense strand to SEQ ID NO: 2482506
ucauauagugacuuagcca

SEQ ID NO: 2482508 - RNA, 19 nt, Artificial Sequence
  Description of Artificial Sequence: Synthetic oligonucleotide
  Sense strand starting at position 2362 of SEQ ID NO: 1887580
gagaaagagccaugcuuua

SEQ ID NO: 2482509 - RNA, 19 nt, Artificial Sequence
  Description of Artificial Sequence: Synthetic oligonucleotide
  Antisense strand to SEQ ID NO: 2482508
uaaagcauggcucuuucuc

SEQ ID NO: 2482510 - RNA, 19 nt, Artificial Sequence
  Description of Artificial Sequence: Synthetic oligonucleotide
  Sense strand starting at position 2367 of SEQ ID NO: 1887580
agagccaugcuuuaugaaa

SEQ ID NO: 2482511 - RNA, 19 nt, Artificial Sequence
  Description of Artificial Sequence: Synthetic oligonucleotide
  Antisense strand to SEQ ID NO: 2482510
uuucauaaagcauggcucu

SEQ ID NO: 2482512 - RNA, 19 nt, Artificial Sequence
  Description of Artificial Sequence: Synthetic oligonucleotide
  Sense strand starting at position 2430 of SEQ ID NO: 1887580
cgguacaugcuagugcuua

SEQ ID NO: 2482513 - RNA, 19 nt, Artificial Sequence
  Description of Artificial Sequence: Synthetic oligonucleotide
  Antisense strand to SEQ ID NO: 2482512
uaagcacuagcauguaccg

SEQ ID NO: 2482514 - RNA, 19 nt, Artificial Sequence
  Description of Artificial Sequence: Synthetic oligonucleotide
  Sense strand starting at position 2757 of SEQ ID NO: 1887580
cuaugaaccuccucugagu

SEQ ID NO: 2482515 - RNA, 19 nt, Artificial Sequence
  Description of Artificial Sequence: Synthetic oligonucleotide
  Antisense strand to SEQ ID NO: 2482514
acucagaggagguucauag

SEQ ID NO: 2482516 - RNA, 19 nt, Artificial Sequence
  Description of Artificial Sequence: Synthetic oligonucleotide
  Sense strand starting at position 3066 of SEQ ID NO: 1887580
acaguaaucuuguccacug

SEQ ID NO: 2482517 - RNA, 19 nt, Artificial Sequence
  Description of Artificial Sequence: Synthetic oligonucleotide
  Antisense strand to SEQ ID NO: 2482516
caguggacaagauuacugu

SEQ ID NO: 2482518 - RNA, 19 nt, Artificial Sequence
  Description of Artificial Sequence: Synthetic oligonucleotide
  Sense strand starting at position 3191 of SEQ ID NO: 1887580
ccggcuaaucuugagacga

SEQ ID NO: 2482519 - RNA, 19 nt, Artificial Sequence
  Description of Artificial Sequence: Synthetic oligonucleotide
  Antisense strand to SEQ ID NO: 2482518
ucgucucaagauuagccgg

SEQ ID NO: 2482520 - RNA, 19 nt, Artificial Sequence
  Description of Artificial Sequence: Synthetic oligonucleotide
  Sense strand starting at position 3289 of SEQ ID NO: 1887580
ggaaacaagcccuguucua

SEQ ID NO: 2482521 - RNA, 19 nt, Artificial Sequence
  Description of Artificial Sequence: Synthetic oligonucleotide
  Antisense strand to SEQ ID NO: 2482520
uagaacagggcuuguuucc

SEQ ID NO: 2482522 - RNA, 19 nt, Artificial Sequence
  Description of Artificial Sequence: Synthetic oligonucleotide
  Sense strand starting at position 3353 of SEQ ID NO: 1887580
ggacucgucaagcaaguaa

SEQ ID NO: 2482523 - RNA, 19 nt, Artificial Sequence
  Description of Artificial Sequence: Synthetic oligonucleotide
  Antisense strand to SEQ ID NO: 2482522
uuacuugcuugacgagucc

SEQ ID NO: 2482524 - RNA, 19 nt, Artificial Sequence
  Description of Artificial Sequence: Synthetic oligonucleotide
  Sense strand starting at position 3357 of SEQ ID NO: 1887580
ucgucaagcaaguaaaugu

SEQ ID NO: 2482525 - RNA, 19 nt, Artificial Sequence
  Description of Artificial Sequence: Synthetic oligonucleotide
  Antisense strand to SEQ ID NO: 2482524
acauuuacuugcuugacga

SEQ ID NO: 2482526 - RNA, 19 nt, Artificial Sequence
  Description of Artificial Sequence: Synthetic oligonucleotide
  Sense strand starting at position 3417 of SEQ ID NO: 1887580
uuuccuauuuguucuguca

SEQ ID NO: 2482527 - RNA, 19 nt, Artificial Sequence
  Description of Artificial Sequence: Synthetic oligonucleotide
  Antisense strand to SEQ ID NO: 2482526
ugacagaacaaauaggaaa

SEQ ID NO: 2482528 - RNA, 19 nt, Artificial Sequence
  Description of Artificial Sequence: Synthetic oligonucleotide
  Sense strand starting at position 3611 of SEQ ID NO: 1887580
ccuguuacacuauauguau

SEQ ID NO: 2482529 - RNA, 19 nt, Artificial Sequence
  Description of Artificial Sequence: Synthetic oligonucleotide
  Antisense strand to SEQ ID NO: 2482528
auacauauaguguaacagg

SEQ ID NO: 2482530 - RNA, 19 nt, Artificial Sequence
  Description of Artificial Sequence: Synthetic oligonucleotide
  Sense strand starting at position 3638 of SEQ ID NO: 1887580
uacagagacucgcuuagaa

SEQ ID NO: 2482531 - RNA, 19 nt, Artificial Sequence
  Description of Artificial Sequence: Synthetic oligonucleotide
  Antisense strand to SEQ ID NO: 2482530
uucuaagcgagucucugua

SEQ ID NO: 2482532 - RNA, 19 nt, Artificial Sequence
  Description of Artificial Sequence: Synthetic oligonucleotide
  Sense strand starting at position 3640 of SEQ ID NO: 1887580
cagagacucgcuuagaaac

SEQ ID NO: 2482533 - RNA, 19 nt, Artificial Sequence
  Description of Artificial Sequence: Synthetic oligonucleotide
  Antisense strand to SEQ ID NO: 2482532
guuucuaagcgagucucug

SEQ ID NO: 2482534 - RNA, 19 nt, Artificial Sequence
  Description of Artificial Sequence: Synthetic oligonucleotide
  Sense strand starting at position 3732 of SEQ ID NO: 1887580
aagucuuuaccugggacuu

SEQ ID NO: 2482535 - RNA, 19 nt, Artificial Sequence
  Description of Artificial Sequence: Synthetic oligonucleotide
  Antisense strand to SEQ ID NO: 2482534
aagucccagguaaagacuu

SEQ ID NO: 2482536 - RNA, 19 nt, Artificial Sequence
  Description of Artificial Sequence: Synthetic oligonucleotide
  Sense strand starting at position 3802 of SEQ ID NO: 1887580
gggcuauauccauauacuu

SEQ ID NO: 2482537 - RNA, 19 nt, Artificial Sequence
  Description of Artificial Sequence: Synthetic oligonucleotide
  Antisense strand to SEQ ID NO: 2482536
aaguauauggauauagccc

SEQ ID NO: 2482538 - RNA, 19 nt, Artificial Sequence
  Description of Artificial Sequence: Synthetic oligonucleotide
  Sense strand starting at position 3943 of SEQ ID NO: 1887580
uagcaauaguuugcuggaa

SEQ ID NO: 2482539 - RNA, 19 nt, Artificial Sequence
  Description of Artificial Sequence: Synthetic oligonucleotide
  Antisense strand to SEQ ID NO: 2482538
uuccagcaaacuauugcua

SEQ ID NO: 2482540 - RNA, 19 nt, Artificial Sequence
  Description of Artificial Sequence: Synthetic oligonucleotide
  Sense strand starting at position 56 of SEQ ID NO: 1887581
uguaccauccaagagcuuu

SEQ ID NO: 2482541 - RNA, 19 nt, Artificial Sequence
  Description of Artificial Sequence: Synthetic oligonucleotide
  Antisense strand to SEQ ID NO: 2482540
aaagcucuuggaugguaca

SEQ ID NO: 2482542 - RNA, 19 nt, Artificial Sequence
  Description of Artificial Sequence: Synthetic oligonucleotide
  Sense strand starting at position 219 of SEQ ID NO: 1887581
ugugaucugggccaagaua

SEQ ID NO: 2482543 - RNA, 19 nt, Artificial Sequence
  Description of Artificial Sequence: Synthetic oligonucleotide
  Antisense strand to SEQ ID NO: 2482542
uaucuuggcccagaucaca

SEQ ID NO: 2482544 - RNA, 19 nt, Artificial Sequence
  Description of Artificial Sequence: Synthetic oligonucleotide
  Sense strand starting at position 226 of SEQ ID NO: 1887581
ugggccaagauauauguua

SEQ ID NO: 2482545 - RNA, 19 nt, Artificial Sequence
  Description of Artificial Sequence: Synthetic oligonucleotide
  Antisense strand to SEQ ID NO: 2482544
uaacauauaucuuggccca

SEQ ID NO: 2482546 - RNA, 19 nt, Artificial Sequence
  Description of Artificial Sequence: Synthetic oligonucleotide
  Sense strand starting at position 779 of SEQ ID NO: 1887581
guugcaucagcuguauguu

SEQ ID NO: 2482547 - RNA, 19 nt, Artificial Sequence
  Description of Artificial Sequence: Synthetic oligonucleotide
  Antisense strand to SEQ ID NO: 2482546
aacauacagcugaugcaac

SEQ ID NO: 2482548 - RNA, 19 nt, Artificial Sequence
  Description of Artificial Sequence: Synthetic oligonucleotide
  Sense strand starting at position 791 of SEQ ID NO: 1887581
guauguugaacccagugau

SEQ ID NO: 2482549 - RNA, 19 nt, Artificial Sequence
  Description of Artificial Sequence: Synthetic oligonucleotide
  Antisense strand to SEQ ID NO: 2482548
aucacuggguucaacauac

SEQ ID NO: 2482550 - RNA, 19 nt, Artificial Sequence
  Description of Artificial Sequence: Synthetic oligonucleotide
  Sense strand starting at position 794 of SEQ ID NO: 1887581
uguugaacccagugauaug

SEQ ID NO: 2482551 - RNA, 19 nt, Artificial Sequence
  Description of Artificial Sequence: Synthetic oligonucleotide
  Antisense strand to SEQ ID NO: 2482550
cauaucacuggguucaaca

SEQ ID NO: 2482552 - RNA, 19 nt, Artificial Sequence
  Description of Artificial Sequence: Synthetic oligonucleotide
  Sense strand starting at position 795 of SEQ ID NO: 1887581
guugaacccagugauaugu

SEQ ID NO: 2482553 - RNA, 19 nt, Artificial Sequence
  Description of Artificial Sequence: Synthetic oligonucleotide
  Antisense strand to SEQ ID NO: 2482552
acauaucacuggguucaac

SEQ ID NO: 2482554 - RNA, 19 nt, Artificial Sequence
  Description of Artificial Sequence: Synthetic oligonucleotide
  Sense strand starting at position 841 of SEQ ID NO: 1887581
ggcagaagagagugucaua

SEQ ID NO: 2482555 - RNA, 19 nt, Artificial Sequence
  Description of Artificial Sequence: Synthetic oligonucleotide
  Antisense strand to SEQ ID NO: 2482554
uaugacacucucuucugcc

SEQ ID NO: 2482556 - RNA, 19 nt, Artificial Sequence
  Description of Artificial Sequence: Synthetic oligonucleotide
  Sense strand starting at position 868 of SEQ ID NO: 1887581
gucagucccagugauacau

SEQ ID NO: 2482557 - RNA, 19 nt, Artificial Sequence
  Description of Artificial Sequence: Synthetic oligonucleotide
  Antisense strand to SEQ ID NO: 2482556
auguaucacugggacugac

SEQ ID NO: 2482558 - RNA, 19 nt, Artificial Sequence
  Description of Artificial Sequence: Synthetic oligonucleotide
  Sense strand starting at position 1047 of SEQ ID NO: 1887581
gcaucaccugggugaugaa

SEQ ID NO: 2482559 - RNA, 19 nt, Artificial Sequence
  Description of Artificial Sequence: Synthetic oligonucleotide
  Antisense strand to SEQ ID NO: 2482558
uucaucacccaggugaugc

SEQ ID NO: 2482560 - RNA, 19 nt, Artificial Sequence
  Description of Artificial Sequence: Synthetic oligonucleotide
  Sense strand starting at position 1204 of SEQ ID NO: 1887581
uucucaguccagcaauaug

SEQ ID NO: 2482561 - RNA, 19 nt, Artificial Sequence
  Description of Artificial Sequence: Synthetic oligonucleotide
  Antisense strand to SEQ ID NO: 2482560
cauauugcuggacugagaa

SEQ ID NO: 2482562 - RNA, 19 nt, Artificial Sequence
  Description of Artificial Sequence: Synthetic oligonucleotide
  Sense strand starting at position 1295 of SEQ ID NO: 1887581
cacaauguucccuguagga

SEQ ID NO: 2482563 - RNA, 19 nt, Artificial Sequence
  Description of Artificial Sequence: Synthetic oligonucleotide
  Antisense strand to SEQ ID NO: 2482562
uccuacagggaacauugug

SEQ ID NO: 2482564 - RNA, 19 nt, Artificial Sequence
  Description of Artificial Sequence: Synthetic oligonucleotide
  Sense strand starting at position 1297 of SEQ ID NO: 1887581
caauguucccuguaggaag

SEQ ID NO: 2482565 - RNA, 19 nt, Artificial Sequence
  Description of Artificial Sequence: Synthetic oligonucleotide
  Antisense strand to SEQ ID NO: 2482564
cuuccuacagggaacauug

SEQ ID NO: 2482566 - RNA, 19 nt, Artificial Sequence
  Description of Artificial Sequence: Synthetic oligonucleotide
  Sense strand starting at position 1373 of SEQ ID NO: 1887581
caaucauaccugugagcag

SEQ ID NO: 2482567 - RNA, 19 nt, Artificial Sequence
  Description of Artificial Sequence: Synthetic oligonucleotide
  Antisense strand to SEQ ID NO: 2482566
cugcucacagguaugauug

SEQ ID NO: 2482568 - RNA, 19 nt, Artificial Sequence
  Description of Artificial Sequence: Synthetic oligonucleotide
  Sense strand starting at position 1481 of SEQ ID NO: 1887581
agauaucaccuaggugcua

SEQ ID NO: 2482569 - RNA, 19 nt, Artificial Sequence
  Description of Artificial Sequence: Synthetic oligonucleotide
  Antisense strand to SEQ ID NO: 2482568
uagcaccuaggugauaucu

SEQ ID NO: 2482570 - RNA, 19 nt, Artificial Sequence
  Description of Artificial Sequence: Synthetic oligonucleotide
  Sense strand starting at position 1492 of SEQ ID NO: 1887581
aggugcuagguccagaaau

SEQ ID NO: 2482571 - RNA, 19 nt, Artificial Sequence
  Description of Artificial Sequence: Synthetic oligonucleotide
  Antisense strand to SEQ ID NO: 2482570
auuucuggaccuagcaccu

SEQ ID NO: 2482572 - RNA, 19 nt, Artificial Sequence
  Description of Artificial Sequence: Synthetic oligonucleotide
  Sense strand starting at position 1518 of SEQ ID NO: 1887581
aaugucucucaugggcaaa

SEQ ID NO: 2482573 - RNA, 19 nt, Artificial Sequence
  Description of Artificial Sequence: Synthetic oligonucleotide
  Antisense strand to SEQ ID NO: 2482572
uuugcccaugagagacauu

SEQ ID NO: 2482574 - RNA, 19 nt, Artificial Sequence
  Description of Artificial Sequence: Synthetic oligonucleotide
  Sense strand starting at position 1643 of SEQ ID NO: 1887581
ugguguuggacccaggaau

SEQ ID NO: 2482575 - RNA, 19 nt, Artificial Sequence
  Description of Artificial Sequence: Synthetic oligonucleotide
  Antisense strand to SEQ ID NO: 2482574
auuccuggguccaacacca

SEQ ID NO: 2482576 - RNA, 19 nt, Artificial Sequence
  Description of Artificial Sequence: Synthetic oligonucleotide
  Sense strand starting at position 1847 of SEQ ID NO: 1887581
agcaaagagauaugugaca

SEQ ID NO: 2482577 - RNA, 19 nt, Artificial Sequence
  Description of Artificial Sequence: Synthetic oligonucleotide
  Antisense strand to SEQ ID NO: 2482576
ugucacauaucucuuugcu

SEQ ID NO: 2482578 - RNA, 19 nt, Artificial Sequence
  Description of Artificial Sequence: Synthetic oligonucleotide
  Sense strand starting at position 2337 of SEQ ID NO: 1887581
ucacauuaccugggagcaa

SEQ ID NO: 2482579 - RNA, 19 nt, Artificial Sequence
  Description of Artificial Sequence: Synthetic oligonucleotide
  Antisense strand to SEQ ID NO: 2482578
uugcucccagguaauguga

SEQ ID NO: 2482580 - RNA, 19 nt, Artificial Sequence
  Description of Artificial Sequence: Synthetic oligonucleotide
  Sense strand starting at position 2349 of SEQ ID NO: 1887581
ggagcaaggcucugagaua

SEQ ID NO: 2482581 - RNA, 19 nt, Artificial Sequence
  Description of Artificial Sequence: Synthetic oligonucleotide
  Antisense strand to SEQ ID NO: 2482580
uaucucagagccuugcucc

SEQ ID NO: 2482582 - RNA, 19 nt, Artificial Sequence
  Description of Artificial Sequence: Synthetic oligonucleotide
  Sense strand starting at position 2402 of SEQ ID NO: 1887581
ggagaauagaguuacguca

SEQ ID NO: 2482583 - RNA, 19 nt, Artificial Sequence
  Description of Artificial Sequence: Synthetic oligonucleotide
  Antisense strand to SEQ ID NO: 2482582
ugacguaacucuauucucc

SEQ ID NO: 2482584 - RNA, 19 nt, Artificial Sequence
  Description of Artificial Sequence: Synthetic oligonucleotide
  Sense strand starting at position 2563 of SEQ ID NO: 1887581
uguacauaucccgauucua

SEQ ID NO: 2482585 - RNA, 19 nt, Artificial Sequence
  Description of Artificial Sequence: Synthetic oligonucleotide
  Antisense strand to SEQ ID NO: 2482584
uagaaucgggauauguaca

SEQ ID NO: 2482586 - RNA, 19 nt, Artificial Sequence
  Description of Artificial Sequence: Synthetic oligonucleotide
  Sense strand starting at position 2572 of SEQ ID NO: 1887581
cccgauucuagguaugaga

SEQ ID NO: 2482587 - RNA, 19 nt, Artificial Sequence
  Description of Artificial Sequence: Synthetic oligonucleotide
  Antisense strand to SEQ ID NO: 2482586
ucucauaccuagaaucggg

SEQ ID NO: 2482588 - RNA, 19 nt, Artificial Sequence
  Description of Artificial Sequence: Synthetic oligonucleotide
  Sense strand starting at position 2608 of SEQ ID NO: 1887581
guugguucuaaguacacua

SEQ ID NO: 2482589 - RNA, 19 nt, Artificial Sequence
  Description of Artificial Sequence: Synthetic oligonucleotide
  Antisense strand to SEQ ID NO: 2482588
uaguguacuuagaaccaac

SEQ ID NO: 2482590 - RNA, 19 nt, Artificial Sequence
  Description of Artificial Sequence: Synthetic oligonucleotide
  Sense strand starting at position 2626 of SEQ ID NO: 1887581
agucacagucucugaaaug

SEQ ID NO: 2482591 - RNA, 19 nt, Artificial Sequence
  Description of Artificial Sequence: Synthetic oligonucleotide
  Antisense strand to SEQ ID NO: 2482590
cauuucagagacugugacu

SEQ ID NO: 2482592 - RNA, 19 nt, Artificial Sequence
  Description of Artificial Sequence: Synthetic oligonucleotide
  Sense strand starting at position 2648 of SEQ ID NO: 1887581
ugaaucagugcaugagaaa

SEQ ID NO: 2482593 - RNA, 19 nt, Artificial Sequence
  Description of Artificial Sequence: Synthetic oligonucleotide
  Antisense strand to SEQ ID NO: 2482592
uuucucaugcacugauuca

SEQ ID NO: 2482594 - RNA, 19 nt, Artificial Sequence
  Description of Artificial Sequence: Synthetic oligonucleotide
  Sense strand starting at position 2877 of SEQ ID NO: 1887581
uguacauaugagugucaaa

SEQ ID NO: 2482595 - RNA, 19 nt, Artificial Sequence
  Description of Artificial Sequence: Synthetic oligonucleotide
  Antisense strand to SEQ ID NO: 2482594
uuugacacucauauguaca

SEQ ID NO: 2482596 - RNA, 19 nt, Artificial Sequence
  Description of Artificial Sequence: Synthetic oligonucleotide
  Sense strand starting at position 2975 of SEQ ID NO: 1887581
guccuuugugacugggaga

SEQ ID NO: 2482597 - RNA, 19 nt, Artificial Sequence
  Description of Artificial Sequence: Synthetic oligonucleotide
  Antisense strand to SEQ ID NO: 2482596
ucucccagucacaaaggac

SEQ ID NO: 2482598 - RNA, 19 nt, Artificial Sequence
  Description of Artificial Sequence: Synthetic oligonucleotide
  Sense strand starting at position 3002 of SEQ ID NO: 1887581
cugguuuggacucaugauu

SEQ ID NO: 2482599 - RNA, 19 nt, Artificial Sequence
  Description of Artificial Sequence: Synthetic oligonucleotide
  Antisense strand to SEQ ID NO: 2482598
aaucaugaguccaaaccag

SEQ ID NO: 2482600 - RNA, 19 nt, Artificial Sequence
  Description of Artificial Sequence: Synthetic oligonucleotide
  Sense strand starting at position 3065 of SEQ ID NO: 1887581
aauggcucaguccagauau

SEQ ID NO: 2482601 - RNA, 19 nt, Artificial Sequence
  Description of Artificial Sequence: Synthetic oligonucleotide
  Antisense strand to SEQ ID NO: 2482600
auaucuggacugagccauu

SEQ ID NO: 2482602 - RNA, 19 nt, Artificial Sequence
  Description of Artificial Sequence: Synthetic oligonucleotide
  Sense strand starting at position 3067 of SEQ ID NO: 1887581
uggcucaguccagauauaa

SEQ ID NO: 2482603 - RNA, 19 nt, Artificial Sequence
  Description of Artificial Sequence: Synthetic oligonucleotide
  Antisense strand to SEQ ID NO: 2482602
uuauaucuggacugagcca

SEQ ID NO: 2482604 - RNA, 19 nt, Artificial Sequence
  Description of Artificial Sequence: Synthetic oligonucleotide
  Sense strand starting at position 3183 of SEQ ID NO: 1887581
ugcauccaccuguaagauu

SEQ ID NO: 2482605 - RNA, 19 nt, Artificial Sequence
  Description of Artificial Sequence: Synthetic oligonucleotide
  Antisense strand to SEQ ID NO: 2482604
aaucuuacagguggaugca

SEQ ID NO: 2482606 - RNA, 19 nt, Artificial Sequence
  Description of Artificial Sequence: Synthetic oligonucleotide
  Sense strand starting at position 3636 of SEQ ID NO: 1887581
acuauauuacccgaggguu

SEQ ID NO: 2482607 - RNA, 19 nt, Artificial Sequence
  Description of Artificial Sequence: Synthetic oligonucleotide
  Antisense strand to SEQ ID NO: 2482606
aacccucggguaauauagu

SEQ ID NO: 2482608 - RNA, 19 nt, Artificial Sequence
  Description of Artificial Sequence: Synthetic oligonucleotide
  Sense strand starting at position 3638 of SEQ ID NO: 1887581
uauauuacccgaggguuua

SEQ ID NO: 2482609 - RNA, 19 nt, Artificial Sequence
  Description of Artificial Sequence: Synthetic oligonucleotide
  Antisense strand to SEQ ID NO: 2482608
uaaacccucggguaauaua

SEQ ID NO: 2482610 - RNA, 19 nt, Artificial Sequence
  Description of Artificial Sequence: Synthetic oligonucleotide
  Sense strand starting at position 3639 of SEQ ID NO: 1887581
auauuacccgaggguuuau

SEQ ID NO: 2482611 - RNA, 19 nt, Artificial Sequence
  Description of Artificial Sequence: Synthetic oligonucleotide
  Antisense strand to SEQ ID NO: 2482610
auaaacccucggguaauau

SEQ ID NO: 2482612 - RNA, 19 nt, Artificial Sequence
  Description of Artificial Sequence: Synthetic oligonucleotide
  Sense strand starting at position 3659 of SEQ ID NO: 1887581
caauaugugagagagugua

SEQ ID NO: 2482613 - RNA, 19 nt, Artificial Sequence
  Description of Artificial Sequence: Synthetic oligonucleotide
  Antisense strand to SEQ ID NO: 2482612
uacacucucucacauauug

SEQ ID NO: 2482614 - RNA, 19 nt, Artificial Sequence
  Description of Artificial Sequence: Synthetic oligonucleotide
  Sense strand starting at position 3764 of SEQ ID NO: 1887581
gcuaguuugaggcaugaga

SEQ ID NO: 2482615 - RNA, 19 nt, Artificial Sequence
  Description of Artificial Sequence: Synthetic oligonucleotide
  Antisense strand to SEQ ID NO: 2482614
ucucaugccucaaacuagc

SEQ ID NO: 2482616 - RNA, 19 nt, Artificial Sequence
  Description of Artificial Sequence: Synthetic oligonucleotide
  Sense strand starting at position 3936 of SEQ ID NO: 1887581
ugggugguuggucagagau

SEQ ID NO: 2482617 - RNA, 19 nt, Artificial Sequence
  Description of Artificial Sequence: Synthetic oligonucleotide
  Antisense strand to SEQ ID NO: 2482616
aucucugaccaaccaccca

SEQ ID NO: 2482618 - RNA, 19 nt, Artificial Sequence
  Description of Artificial Sequence: Synthetic oligonucleotide
  Sense strand starting at position 3942 of SEQ ID NO: 1887581
guuggucagagauacguua

SEQ ID NO: 2482619 - RNA, 19 nt, Artificial Sequence
  Description of Artificial Sequence: Synthetic oligonucleotide
  Antisense strand to SEQ ID NO: 2482618
uaacguaucucugaccaac

SEQ ID NO: 2482620 - RNA, 19 nt, Artificial Sequence
  Description of Artificial Sequence: Synthetic oligonucleotide
  Sense strand starting at position 289 of SEQ ID NO: 1887582
agaguuaaaucacucaggu

SEQ ID NO: 2482621 - RNA, 19 nt, Artificial Sequence
  Description of Artificial Sequence: Synthetic oligonucleotide
  Antisense strand to SEQ ID NO: 2482620
accugagugauuuaacucu

SEQ ID NO: 2482622 - RNA, 19 nt, Artificial Sequence
  Description of Artificial Sequence: Synthetic oligonucleotide
  Sense strand starting at position 327 of SEQ ID NO: 1887582
acaaucauaucugcaggaa

SEQ ID NO: 2482623 - RNA, 19 nt, Artificial Sequence
  Description of Artificial Sequence: Synthetic oligonucleotide
  Antisense strand to SEQ ID NO: 2482622
uuccugcagauaugauugu

SEQ ID NO: 2482624 - RNA, 19 nt, Artificial Sequence
  Description of Artificial Sequence: Synthetic oligonucleotide
  Sense strand starting at position 330 of SEQ ID NO: 1887582
aucauaucugcaggaauau

SEQ ID NO: 2482625 - RNA, 19 nt, Artificial Sequence
  Description of Artificial Sequence: Synthetic oligonucleotide
  Antisense strand to SEQ ID NO: 2482624
auauuccugcagauaugau

SEQ ID NO: 2482626 - RNA, 19 nt, Artificial Sequence
  Description of Artificial Sequence: Synthetic oligonucleotide
  Sense strand starting at position 331 of SEQ ID NO: 1887582
ucauaucugcaggaauauc

SEQ ID NO: 2482627 - RNA, 19 nt, Artificial Sequence
  Description of Artificial Sequence: Synthetic oligonucleotide
  Antisense strand to SEQ ID NO: 2482626
gauauuccugcagauauga

SEQ ID NO: 2482628 - RNA, 19 nt, Artificial Sequence
  Description of Artificial Sequence: Synthetic oligonucleotide
  Sense strand starting at position 340 of SEQ ID NO: 1887582
caggaauauccagguaugu

SEQ ID NO: 2482629 - RNA, 19 nt, Artificial Sequence
  Description of Artificial Sequence: Synthetic oligonucleotide
  Antisense strand to SEQ ID NO: 2482628
acauaccuggauauuccug

SEQ ID NO: 2482630 - RNA, 19 nt, Artificial Sequence
  Description of Artificial Sequence: Synthetic oligonucleotide
  Sense strand starting at position 344 of SEQ ID NO: 1887582
aauauccagguaugugauu

SEQ ID NO: 2482631 - RNA, 19 nt, Artificial Sequence
  Description of Artificial Sequence: Synthetic oligonucleotide
  Antisense strand to SEQ ID NO: 2482630
aaucacauaccuggauauu

SEQ ID NO: 2482632 - RNA, 19 nt, Artificial Sequence
  Description of Artificial Sequence: Synthetic oligonucleotide
  Sense strand starting at position 345 of SEQ ID NO: 1887582
auauccagguaugugauua

SEQ ID NO: 2482633 - RNA, 19 nt, Artificial Sequence
  Description of Artificial Sequence: Synthetic oligonucleotide
  Antisense strand to SEQ ID NO: 2482632
uaaucacauaccuggauau

SEQ ID NO: 2482634 - RNA, 19 nt, Artificial Sequence
  Description of Artificial Sequence: Synthetic oligonucleotide
  Sense strand starting at position 349 of SEQ ID NO: 1887582
ccagguaugugauuaacaa

SEQ ID NO: 2482635 - RNA, 19 nt, Artificial Sequence
  Description of Artificial Sequence: Synthetic oligonucleotide
  Antisense strand to SEQ ID NO: 2482634
uuguuaaucacauaccugg

SEQ ID NO: 2482636 - RNA, 19 nt, Artificial Sequence
  Description of Artificial Sequence: Synthetic oligonucleotide
  Sense strand starting at position 382 of SEQ ID NO: 1887582
agguucuagguguaagauu

SEQ ID NO: 2482637 - RNA, 19 nt, Artificial Sequence
  Description of Artificial Sequence: Synthetic oligonucleotide
  Antisense strand to SEQ ID NO: 2482636
aaucuuacaccuagaaccu

SEQ ID NO: 2482638 - RNA, 19 nt, Artificial Sequence
  Description of Artificial Sequence: Synthetic oligonucleotide
  Sense strand starting at position 773 of SEQ ID NO: 1887582
guagaauaaucuguccaug

SEQ ID NO: 2482639 - RNA, 19 nt, Artificial Sequence
  Description of Artificial Sequence: Synthetic oligonucleotide
  Antisense strand to SEQ ID NO: 2482638
cauggacagauuauucuac

SEQ ID NO: 2482640 - RNA, 19 nt, Artificial Sequence
  Description of Artificial Sequence: Synthetic oligonucleotide
  Sense strand starting at position 775 of SEQ ID NO: 1887582
agaauaaucuguccaugag

SEQ ID NO: 2482641 - RNA, 19 nt, Artificial Sequence
  Description of Artificial Sequence: Synthetic oligonucleotide
  Antisense strand to SEQ ID NO: 2482640
cucauggacagauuauucu

SEQ ID NO: 2482642 - RNA, 19 nt, Artificial Sequence
  Description of Artificial Sequence: Synthetic oligonucleotide
  Sense strand starting at position 848 of SEQ ID NO: 1887582
uuguguugaaucugagacu

SEQ ID NO: 2482643 - RNA, 19 nt, Artificial Sequence
  Description of Artificial Sequence: Synthetic oligonucleotide
  Antisense strand to SEQ ID NO: 2482642
agucucagauucaacacaa

SEQ ID NO: 2482644 - RNA, 19 nt, Artificial Sequence
  Description of Artificial Sequence: Synthetic oligonucleotide
  Sense strand starting at position 886 of SEQ ID NO: 1887582
gggauccagguaugauagu

SEQ ID NO: 2482645 - RNA, 19 nt, Artificial Sequence
  Description of Artificial Sequence: Synthetic oligonucleotide
  Antisense strand to SEQ ID NO: 2482644
acuaucauaccuggauccc

SEQ ID NO: 2482646 - RNA, 19 nt, Artificial Sequence
  Description of Artificial Sequence: Synthetic oligonucleotide
  Sense strand starting at position 1073 of SEQ ID NO: 1887582
gcuuuaugcagugugccua

SEQ ID NO: 2482647 - RNA, 19 nt, Artificial Sequence
  Description of Artificial Sequence: Synthetic oligonucleotide
  Antisense strand to SEQ ID NO: 2482646
uaggcacacugcauaaagc

SEQ ID NO: 2482648 - RNA, 19 nt, Artificial Sequence
  Description of Artificial Sequence: Synthetic oligonucleotide
  Sense strand starting at position 1124 of SEQ ID NO: 1887582
uuuauagacccauggucau

SEQ ID NO: 2482649 - RNA, 19 nt, Artificial Sequence
  Description of Artificial Sequence: Synthetic oligonucleotide
  Antisense strand to SEQ ID NO: 2482648
augaccaugggucuauaaa

SEQ ID NO: 2482650 - RNA, 19 nt, Artificial Sequence
  Description of Artificial Sequence: Synthetic oligonucleotide
  Sense strand starting at position 1174 of SEQ ID NO: 1887582
guuggcaggguucaaauua

SEQ ID NO: 2482651 - RNA, 19 nt, Artificial Sequence
  Description of Artificial Sequence: Synthetic oligonucleotide
  Antisense strand to SEQ ID NO: 2482650
uaauuugaacccugccaac

SEQ ID NO: 2482652 - RNA, 19 nt, Artificial Sequence
  Description of Artificial Sequence: Synthetic oligonucleotide
  Sense strand starting at position 1408 of SEQ ID NO: 1887582
uugugcauuguagaaacaa

SEQ ID NO: 2482653 - RNA, 19 nt, Artificial Sequence
  Description of Artificial Sequence: Synthetic oligonucleotide
  Antisense strand to SEQ ID NO: 2482652
uuguuucuacaaugcacaa

SEQ ID NO: 2482654 - RNA, 19 nt, Artificial Sequence
  Description of Artificial Sequence: Synthetic oligonucleotide
  Sense strand starting at position 1636 of SEQ ID NO: 1887582
gucacaaucucaccuguaa

SEQ ID NO: 2482655 - RNA, 19 nt, Artificial Sequence
  Description of Artificial Sequence: Synthetic oligonucleotide
  Antisense strand to SEQ ID NO: 2482654
uuacaggugagauugugac

SEQ ID NO: 2482656 - RNA, 19 nt, Artificial Sequence
  Description of Artificial Sequence: Synthetic oligonucleotide
  Sense strand starting at position 1684 of SEQ ID NO: 1887582
cuggaugcuguaugaggaa

SEQ ID NO: 2482657 - RNA, 19 nt, Artificial Sequence
  Description of Artificial Sequence: Synthetic oligonucleotide
  Antisense strand to SEQ ID NO: 2482656
uuccucauacagcauccag

SEQ ID NO: 2482658 - RNA, 19 nt, Artificial Sequence
  Description of Artificial Sequence: Synthetic oligonucleotide
  Sense strand starting at position 1831 of SEQ ID NO: 1887582
ugggcagagcuauauguca

SEQ ID NO: 2482659 - RNA, 19 nt, Artificial Sequence
  Description of Artificial Sequence: Synthetic oligonucleotide
  Antisense strand to SEQ ID NO: 2482658
ugacauauagcucugccca

SEQ ID NO: 2482660 - RNA, 19 nt, Artificial Sequence
  Description of Artificial Sequence: Synthetic oligonucleotide
  Sense strand starting at position 1890 of SEQ ID NO: 1887582
acaucacuuaggcgauaga

SEQ ID NO: 2482661 - RNA, 19 nt, Artificial Sequence
  Description of Artificial Sequence: Synthetic oligonucleotide
  Antisense strand to SEQ ID NO: 2482660
ucuaucgccuaagugaugu

SEQ ID NO: 2482662 - RNA, 19 nt, Artificial Sequence
  Description of Artificial Sequence: Synthetic oligonucleotide
  Sense strand starting at position 1891 of SEQ ID NO: 1887582
caucacuuaggcgauagau

SEQ ID NO: 2482663 - RNA, 19 nt, Artificial Sequence
  Description of Artificial Sequence: Synthetic oligonucleotide
  Antisense strand to SEQ ID NO: 2482662
aucuaucgccuaagugaug

SEQ ID NO: 2482664 - RNA, 19 nt, Artificial Sequence
  Description of Artificial Sequence: Synthetic oligonucleotide
  Sense strand starting at position 1899 of SEQ ID NO: 1887582
aggcgauagaugcagacau

SEQ ID NO: 2482665 - RNA, 19 nt, Artificial Sequence
  Description of Artificial Sequence: Synthetic oligonucleotide
  Antisense strand to SEQ ID NO: 2482664
augucugcaucuaucgccu

SEQ ID NO: 2482666 - RNA, 19 nt, Artificial Sequence
  Description of Artificial Sequence: Synthetic oligonucleotide
  Sense strand starting at position 1901 of SEQ ID NO: 1887582
gcgauagaugcagacauau

SEQ ID NO: 2482667 - RNA, 19 nt, Artificial Sequence
  Description of Artificial Sequence: Synthetic oligonucleotide
  Antisense strand to SEQ ID NO: 2482666
auaugucugcaucuaucgc

SEQ ID NO: 2482668 - RNA, 19 nt, Artificial Sequence
  Description of Artificial Sequence: Synthetic oligonucleotide
  Sense strand starting at position 1962 of SEQ ID NO: 1887582
gauccaauccuguaggugu

SEQ ID NO: 2482669 - RNA, 19 nt, Artificial Sequence
  Description of Artificial Sequence: Synthetic oligonucleotide
  Antisense strand to SEQ ID NO: 2482668
acaccuacaggauuggauc

SEQ ID NO: 2482670 - RNA, 19 nt, Artificial Sequence
  Description of Artificial Sequence: Synthetic oligonucleotide
  Sense strand starting at position 2054 of SEQ ID NO: 1887582
acuggauccagugauaugu

SEQ ID NO: 2482671 - RNA, 19 nt, Artificial Sequence
  Description of Artificial Sequence: Synthetic oligonucleotide
  Antisense strand to SEQ ID NO: 2482670
acauaucacuggauccagu

SEQ ID NO: 2482672 - RNA, 19 nt, Artificial Sequence
  Description of Artificial Sequence: Synthetic oligonucleotide
  Sense strand starting at position 2130 of SEQ ID NO: 1887582
guuggaucaagccauaugu

SEQ ID NO: 2482673 - RNA, 19 nt, Artificial Sequence
  Description of Artificial Sequence: Synthetic oligonucleotide
  Antisense strand to SEQ ID NO: 2482672
acauauggcuugauccaac

SEQ ID NO: 2482674 - RNA, 19 nt, Artificial Sequence
  Description of Artificial Sequence: Synthetic oligonucleotide
  Sense strand starting at position 2132 of SEQ ID NO: 1887582
uggaucaagccauauguca

SEQ ID NO: 2482675 - RNA, 19 nt, Artificial Sequence
  Description of Artificial Sequence: Synthetic oligonucleotide
  Antisense strand to SEQ ID NO: 2482674
ugacauauggcuugaucca

SEQ ID NO: 2482676 - RNA, 19 nt, Artificial Sequence
  Description of Artificial Sequence: Synthetic oligonucleotide
  Sense strand starting at position 2186 of SEQ ID NO: 1887582
agagucaaaucucuuaggu

SEQ ID NO: 2482677 - RNA, 19 nt, Artificial Sequence
  Description of Artificial Sequence: Synthetic oligonucleotide
  Antisense strand to SEQ ID NO: 2482676
accuaagagauuugacucu

SEQ ID NO: 2482678 - RNA, 19 nt, Artificial Sequence
  Description of Artificial Sequence: Synthetic oligonucleotide
  Sense strand starting at position 2275 of SEQ ID NO: 1887582
ugucacaauucccuugaga

SEQ ID NO: 2482679 - RNA, 19 nt, Artificial Sequence
  Description of Artificial Sequence: Synthetic oligonucleotide
  Antisense strand to SEQ ID NO: 2482678
ucucaagggaauugugaca

SEQ ID NO: 2482680 - RNA, 19 nt, Artificial Sequence
  Description of Artificial Sequence: Synthetic oligonucleotide
  Sense strand starting at position 2277 of SEQ ID NO: 1887582
ucacaauucccuugagagg

SEQ ID NO: 2482681 - RNA, 19 nt, Artificial Sequence
  Description of Artificial Sequence: Synthetic oligonucleotide
  Antisense strand to SEQ ID NO: 2482680
ccucucaagggaauuguga

SEQ ID NO: 2482682 - RNA, 19 nt, Artificial Sequence
  Description of Artificial Sequence: Synthetic oligonucleotide
  Sense strand starting at position 2877 of SEQ ID NO: 1887582
auaauauuccugugggcag

SEQ ID NO: 2482683 - RNA, 19 nt, Artificial Sequence
  Description of Artificial Sequence: Synthetic oligonucleotide
  Antisense strand to SEQ ID NO: 2482682
cugcccacaggaauauuau

SEQ ID NO: 2482684 - RNA, 19 nt, Artificial Sequence
  Description of Artificial Sequence: Synthetic oligonucleotide
  Sense strand starting at position 2911 of SEQ ID NO: 1887582
gucacauuaccuuaauguu

SEQ ID NO: 2482685 - RNA, 19 nt, Artificial Sequence
  Description of Artificial Sequence: Synthetic oligonucleotide
  Antisense strand to SEQ ID NO: 2482684
aacauuaagguaaugugac

SEQ ID NO: 2482686 - RNA, 19 nt, Artificial Sequence
  Description of Artificial Sequence: Synthetic oligonucleotide
  Sense strand starting at position 3008 of SEQ ID NO: 1887582
guuugauaauaugucacaa

SEQ ID NO: 2482687 - RNA, 19 nt, Artificial Sequence
  Description of Artificial Sequence: Synthetic oligonucleotide
  Antisense strand to SEQ ID NO: 2482686
uugugacauauuaucaaac

SEQ ID NO: 2482688 - RNA, 19 nt, Artificial Sequence
  Description of Artificial Sequence: Synthetic oligonucleotide
  Sense strand starting at position 3157 of SEQ ID NO: 1887582
ucagccauacgucauauua

SEQ ID NO: 2482689 - RNA, 19 nt, Artificial Sequence
  Description of Artificial Sequence: Synthetic oligonucleotide
  Antisense strand to SEQ ID NO: 2482688
uaauaugacguauggcuga

SEQ ID NO: 2482690 - RNA, 19 nt, Artificial Sequence
  Description of Artificial Sequence: Synthetic oligonucleotide
  Sense strand starting at position 3472 of SEQ ID NO: 1887582
acaaucucuccuuggguaa

SEQ ID NO: 2482691 - RNA, 19 nt, Artificial Sequence
  Description of Artificial Sequence: Synthetic oligonucleotide
  Antisense strand to SEQ ID NO: 2482690
uuacccaaggagagauugu

SEQ ID NO: 2482692 - RNA, 19 nt, Artificial Sequence
  Description of Artificial Sequence: Synthetic oligonucleotide
  Sense strand starting at position 3509 of SEQ ID NO: 1887582
gaguuacauuaccuaggua

SEQ ID NO: 2482693 - RNA, 19 nt, Artificial Sequence
  Description of Artificial Sequence: Synthetic oligonucleotide
  Antisense strand to SEQ ID NO: 2482692
uaccuagguaauguaacuc

SEQ ID NO: 2482694 - RNA, 19 nt, Artificial Sequence
  Description of Artificial Sequence: Synthetic oligonucleotide
  Sense strand starting at position 3512 of SEQ ID NO: 1887582
uuacauuaccuagguacuu

SEQ ID NO: 2482695 - RNA, 19 nt, Artificial Sequence
  Description of Artificial Sequence: Synthetic oligonucleotide
  Antisense strand to SEQ ID NO: 2482694
aaguaccuagguaauguaa

SEQ ID NO: 2482696 - RNA, 19 nt, Artificial Sequence
  Description of Artificial Sequence: Synthetic oligonucleotide
  Sense strand starting at position 3523 of SEQ ID NO: 1887582
agguacuugguccaggaau

SEQ ID NO: 2482697 - RNA, 19 nt, Artificial Sequence
  Description of Artificial Sequence: Synthetic oligonucleotide
  Antisense strand to SEQ ID NO: 2482696
auuccuggaccaaguaccu

SEQ ID NO: 2482698 - RNA, 19 nt, Artificial Sequence
  Description of Artificial Sequence: Synthetic oligonucleotide
  Sense strand starting at position 3525 of SEQ ID NO: 1887582
guacuugguccaggaauau

SEQ ID NO: 2482699 - RNA, 19 nt, Artificial Sequence
  Description of Artificial Sequence: Synthetic oligonucleotide
  Antisense strand to SEQ ID NO: 2482698
auauuccuggaccaaguac

SEQ ID NO: 2482700 - RNA, 19 nt, Artificial Sequence
  Description of Artificial Sequence: Synthetic oligonucleotide
  Sense strand starting at position 59 of SEQ ID NO: 1887583
ggagcuguagcccagaacu

SEQ ID NO: 2482701 - RNA, 19 nt, Artificial Sequence
  Description of Artificial Sequence: Synthetic oligonucleotide
  Antisense strand to SEQ ID NO: 2482700
aguucugggcuacagcucc

SEQ ID NO: 2482702 - RNA, 19 nt, Artificial Sequence
  Description of Artificial Sequence: Synthetic oligonucleotide
  Sense strand starting at position 141 of SEQ ID NO: 1887583
cuuggucaccucugucaaa

SEQ ID NO: 2482703 - RNA, 19 nt, Artificial Sequence
  Description of Artificial Sequence: Synthetic oligonucleotide
  Antisense strand to SEQ ID NO: 2482702
uuugacagaggugaccaag

SEQ ID NO: 2482704 - RNA, 19 nt, Artificial Sequence
  Description of Artificial Sequence: Synthetic oligonucleotide
  Sense strand starting at position 215 of SEQ ID NO: 1887583
uccacuguccuccagacua

SEQ ID NO: 2482705 - RNA, 19 nt, Artificial Sequence
  Description of Artificial Sequence: Synthetic oligonucleotide
  Antisense strand to SEQ ID NO: 2482704
uagucuggaggacagugga

SEQ ID NO: 2482706 - RNA, 19 nt, Artificial Sequence
  Description of Artificial Sequence: Synthetic oligonucleotide
  Sense strand starting at position 825 of SEQ ID NO: 1887583
uagagaugaggcugucacu

SEQ ID NO: 2482707 - RNA, 19 nt, Artificial Sequence
  Description of Artificial Sequence: Synthetic oligonucleotide
  Antisense strand to SEQ ID NO: 2482706
agugacagccucaucucua

SEQ ID NO: 2482708 - RNA, 19 nt, Artificial Sequence
  Description of Artificial Sequence: Synthetic oligonucleotide
  Sense strand starting at position 1052 of SEQ ID NO: 1887583
gucucauuccuccaguucu

SEQ ID NO: 2482709 - RNA, 19 nt, Artificial Sequence
  Description of Artificial Sequence: Synthetic oligonucleotide
  Antisense strand to SEQ ID NO: 2482708
agaacuggaggaaugagac

SEQ ID NO: 2482710 - RNA, 19 nt, Artificial Sequence
  Description of Artificial Sequence: Synthetic oligonucleotide
  Sense strand starting at position 1063 of SEQ ID NO: 1887583
ccaguucuggaccaacuau

SEQ ID NO: 2482711 - RNA, 19 nt, Artificial Sequence
  Description of Artificial Sequence: Synthetic oligonucleotide
  Antisense strand to SEQ ID NO: 2482710
auaguugguccagaacugg

SEQ ID NO: 2482712 - RNA, 19 nt, Artificial Sequence
  Description of Artificial Sequence: Synthetic oligonucleotide
  Sense strand starting at position 1575 of SEQ ID NO: 1887583
ucaggaaauguuugucuaa

SEQ ID NO: 2482713 - RNA, 19 nt, Artificial Sequence
  Description of Artificial Sequence: Synthetic oligonucleotide
  Antisense strand to SEQ ID NO: 2482712
uuagacaaacauuuccuga

SEQ ID NO: 2482714 - RNA, 19 nt, Artificial Sequence
  Description of Artificial Sequence: Synthetic oligonucleotide
  Sense strand starting at position 1576 of SEQ ID NO: 1887583
caggaaauguuugucuaac

SEQ ID NO: 2482715 - RNA, 19 nt, Artificial Sequence
  Description of Artificial Sequence: Synthetic oligonucleotide
  Antisense strand to SEQ ID NO: 2482714
guuagacaaacauuuccug

SEQ ID NO: 2482716 - RNA, 19 nt, Artificial Sequence
  Description of Artificial Sequence: Synthetic oligonucleotide
  Sense strand starting at position 1577 of SEQ ID NO: 1887583
aggaaauguuugucuaacu

SEQ ID NO: 2482717 - RNA, 19 nt, Artificial Sequence
  Description of Artificial Sequence: Synthetic oligonucleotide
  Antisense strand to SEQ ID NO: 2482716
aguuagacaaacauuuccu

SEQ ID NO: 2482718 - RNA, 19 nt, Artificial Sequence
  Description of Artificial Sequence: Synthetic oligonucleotide
  Sense strand starting at position 1578 of SEQ ID NO: 1887583
ggaaauguuugucuaacua

SEQ ID NO: 2482719 - RNA, 19 nt, Artificial Sequence
  Description of Artificial Sequence: Synthetic oligonucleotide
  Antisense strand to SEQ ID NO: 2482718
uaguuagacaaacauuucc

SEQ ID NO: 2482720 - RNA, 19 nt, Artificial Sequence
  Description of Artificial Sequence: Synthetic oligonucleotide
  Sense strand starting at position 1582 of SEQ ID NO: 1887583
auguuugucuaacuaauag

SEQ ID NO: 2482721 - RNA, 19 nt, Artificial Sequence
  Description of Artificial Sequence: Synthetic oligonucleotide
  Antisense strand to SEQ ID NO: 2482720
cuauuaguuagacaaacau

SEQ ID NO: 2482722 - RNA, 19 nt, Artificial Sequence
  Description of Artificial Sequence: Synthetic oligonucleotide
  Sense strand starting at position 1592 of SEQ ID NO: 1887583
aacuaauaggugggagagu

SEQ ID NO: 2482723 - RNA, 19 nt, Artificial Sequence
  Description of Artificial Sequence: Synthetic oligonucleotide
  Antisense strand to SEQ ID NO: 2482722
acucucccaccuauuaguu

SEQ ID NO: 2482724 - RNA, 19 nt, Artificial Sequence
  Description of Artificial Sequence: Synthetic oligonucleotide
  Sense strand starting at position 1630 of SEQ ID NO: 1887583
cgagggaauccgugaguga

SEQ ID NO: 2482725 - RNA, 19 nt, Artificial Sequence
  Description of Artificial Sequence: Synthetic oligonucleotide
  Antisense strand to SEQ ID NO: 2482724
ucacucacggauucccucg

SEQ ID NO: 2482726 - RNA, 19 nt, Artificial Sequence
  Description of Artificial Sequence: Synthetic oligonucleotide
  Sense strand starting at position 1631 of SEQ ID NO: 1887583
gagggaauccgugagugag

SEQ ID NO: 2482727 - RNA, 19 nt, Artificial Sequence
  Description of Artificial Sequence: Synthetic oligonucleotide
  Antisense strand to SEQ ID NO: 2482726
cucacucacggauucccuc

SEQ ID NO: 2482728 - RNA, 19 nt, Artificial Sequence
  Description of Artificial Sequence: Synthetic oligonucleotide
  Sense strand starting at position 1634 of SEQ ID NO: 1887583
ggaauccgugagugagaga

SEQ ID NO: 2482729 - RNA, 19 nt, Artificial Sequence
  Description of Artificial Sequence: Synthetic oligonucleotide
  Antisense strand to SEQ ID NO: 2482728
ucucucacucacggauucc

SEQ ID NO: 2482730 - RNA, 19 nt, Artificial Sequence
  Description of Artificial Sequence: Synthetic oligonucleotide
  Sense strand starting at position 1639 of SEQ ID NO: 1887583
ccgugagugagagaauuga

SEQ ID NO: 2482731 - RNA, 19 nt, Artificial Sequence
  Description of Artificial Sequence: Synthetic oligonucleotide
  Antisense strand to SEQ ID NO: 2482730
ucaauucucucacucacgg

SEQ ID NO: 2482732 - RNA, 19 nt, Artificial Sequence
  Description of Artificial Sequence: Synthetic oligonucleotide
  Sense strand starting at position 1762 of SEQ ID NO: 1887583
ggucucaguuucuccaaga

SEQ ID NO: 2482733 - RNA, 19 nt, Artificial Sequence
  Description of Artificial Sequence: Synthetic oligonucleotide
  Antisense strand to SEQ ID NO: 2482732
ucuuggagaaacugagacc

SEQ ID NO: 2482734 - RNA, 19 nt, Artificial Sequence
  Description of Artificial Sequence: Synthetic oligonucleotide
  Sense strand starting at position 1763 of SEQ ID NO: 1887583
gucucaguuucuccaagaa

SEQ ID NO: 2482735 - RNA, 19 nt, Artificial Sequence
  Description of Artificial Sequence: Synthetic oligonucleotide
  Antisense strand to SEQ ID NO: 2482734
uucuuggagaaacugagac

SEQ ID NO: 2482736 - RNA, 19 nt, Artificial Sequence
  Description of Artificial Sequence: Synthetic oligonucleotide
  Sense strand starting at position 1858 of SEQ ID NO: 1887583
gagcuaugugcagaauccu

SEQ ID NO: 2482737 - RNA, 19 nt, Artificial Sequence
  Description of Artificial Sequence: Synthetic oligonucleotide
  Antisense strand to SEQ ID NO: 2482736
aggauucugcacauagcuc

SEQ ID NO: 2482738 - RNA, 19 nt, Artificial Sequence
  Description of Artificial Sequence: Synthetic oligonucleotide
  Sense strand starting at position 2120 of SEQ ID NO: 1887583
guguccauuggcuggaaga

SEQ ID NO: 2482739 - RNA, 19 nt, Artificial Sequence
  Description of Artificial Sequence: Synthetic oligonucleotide
  Antisense strand to SEQ ID NO: 2482738
ucuuccagccaauggacac

SEQ ID NO: 2482740 - RNA, 19 nt, Artificial Sequence
  Description of Artificial Sequence: Synthetic oligonucleotide
  Sense strand starting at position 2121 of SEQ ID NO: 1887583
uguccauuggcuggaagau

SEQ ID NO: 2482741 - RNA, 19 nt, Artificial Sequence
  Description of Artificial Sequence: Synthetic oligonucleotide
  Antisense strand to SEQ ID NO: 2482740
aucuuccagccaauggaca

SEQ ID NO: 2482742 - RNA, 19 nt, Artificial Sequence
  Description of Artificial Sequence: Synthetic oligonucleotide
  Sense strand starting at position 2122 of SEQ ID NO: 1887583
guccauuggcuggaagaua

SEQ ID NO: 2482743 - RNA, 19 nt, Artificial Sequence
  Description of Artificial Sequence: Synthetic oligonucleotide
  Antisense strand to SEQ ID NO: 2482742
uaucuuccagccaauggac

SEQ ID NO: 2482744 - RNA, 19 nt, Artificial Sequence
  Description of Artificial Sequence: Synthetic oligonucleotide
  Sense strand starting at position 2140 of SEQ ID NO: 1887583
agugacugacgucauggau

SEQ ID NO: 2482745 - RNA, 19 nt, Artificial Sequence
  Description of Artificial Sequence: Synthetic oligonucleotide
  Antisense strand to SEQ ID NO: 2482744
auccaugacgucagucacu

SEQ ID NO: 2482746 - RNA, 19 nt, Artificial Sequence
  Description of Artificial Sequence: Synthetic oligonucleotide
  Sense strand starting at position 2146 of SEQ ID NO: 1887583
ugacgucauggauagcuuu

SEQ ID NO: 2482747 - RNA, 19 nt, Artificial Sequence
  Description of Artificial Sequence: Synthetic oligonucleotide
  Antisense strand to SEQ ID NO: 2482746
aaagcuauccaugacguca

SEQ ID NO: 2482748 - RNA, 19 nt, Artificial Sequence
  Description of Artificial Sequence: Synthetic oligonucleotide
  Sense strand starting at position 2158 of SEQ ID NO: 1887583
uagcuuucgccgccagacu

SEQ ID NO: 2482749 - RNA, 19 nt, Artificial Sequence
  Description of Artificial Sequence: Synthetic oligonucleotide
  Antisense strand to SEQ ID NO: 2482748
agucuggcggcgaaagcua

SEQ ID NO: 2482750 - RNA, 19 nt, Artificial Sequence
  Description of Artificial Sequence: Synthetic oligonucleotide
  Sense strand starting at position 2254 of SEQ ID NO: 1887583
cagaauggucgugaaugga

SEQ ID NO: 2482751 - RNA, 19 nt, Artificial Sequence
  Description of Artificial Sequence: Synthetic oligonucleotide
  Antisense strand to SEQ ID NO: 2482750
uccauucacgaccauucug

SEQ ID NO: 2482752 - RNA, 19 nt, Artificial Sequence
  Description of Artificial Sequence: Synthetic oligonucleotide
  Sense strand starting at position 2315 of SEQ ID NO: 1887583
uugggucuugaggaagguu

SEQ ID NO: 2482753 - RNA, 19 nt, Artificial Sequence
  Description of Artificial Sequence: Synthetic oligonucleotide
  Antisense strand to SEQ ID NO: 2482752
aaccuuccucaagacccaa

SEQ ID NO: 2482754 - RNA, 19 nt, Artificial Sequence
  Description of Artificial Sequence: Synthetic oligonucleotide
  Sense strand starting at position 2349 of SEQ ID NO: 1887583
cagacuccuugguucugaa

SEQ ID NO: 2482755 - RNA, 19 nt, Artificial Sequence
  Description of Artificial Sequence: Synthetic oligonucleotide
  Antisense strand to SEQ ID NO: 2482754
uucagaaccaaggagucug

SEQ ID NO: 2482756 - RNA, 19 nt, Artificial Sequence
  Description of Artificial Sequence: Synthetic oligonucleotide
  Sense strand starting at position 2408 of SEQ ID NO: 1887583
cccggacuccugggucaga

SEQ ID NO: 2482757 - RNA, 19 nt, Artificial Sequence
  Description of Artificial Sequence: Synthetic oligonucleotide
  Antisense strand to SEQ ID NO: 2482756
ucugacccaggaguccggg

SEQ ID NO: 2482758 - RNA, 19 nt, Artificial Sequence
  Description of Artificial Sequence: Synthetic oligonucleotide
  Sense strand starting at position 2446 of SEQ ID NO: 1887583
ccugaagguuuggugucua

SEQ ID NO: 2482759 - RNA, 19 nt, Artificial Sequence
  Description of Artificial Sequence: Synthetic oligonucleotide
  Antisense strand to SEQ ID NO: 2482758
uagacaccaaaccuucagg

SEQ ID NO: 2482760 - RNA, 19 nt, Artificial Sequence
  Description of Artificial Sequence: Synthetic oligonucleotide
  Sense strand starting at position 2538 of SEQ ID NO: 1887583
ggcuauuuaugggaaggga

SEQ ID NO: 2482761 - RNA, 19 nt, Artificial Sequence
  Description of Artificial Sequence: Synthetic oligonucleotide
  Antisense strand to SEQ ID NO: 2482760
ucccuucccauaaauagcc

SEQ ID NO: 2482762 - RNA, 19 nt, Artificial Sequence
  Description of Artificial Sequence: Synthetic oligonucleotide
  Sense strand starting at position 2577 of SEQ ID NO: 1887583
aaguguucuggguaaugag

SEQ ID NO: 2482763 - RNA, 19 nt, Artificial Sequence
  Description of Artificial Sequence: Synthetic oligonucleotide
  Antisense strand to SEQ ID NO: 2482762
cucauuacccagaacacuu

SEQ ID NO: 2482764 - RNA, 19 nt, Artificial Sequence
  Description of Artificial Sequence: Synthetic oligonucleotide
  Sense strand starting at position 2637 of SEQ ID NO: 1887583
gaagcucuggccuggauau

SEQ ID NO: 2482765 - RNA, 19 nt, Artificial Sequence
  Description of Artificial Sequence: Synthetic oligonucleotide
  Antisense strand to SEQ ID NO: 2482764
auauccaggccagagcuuc

SEQ ID NO: 2482766 - RNA, 19 nt, Artificial Sequence
  Description of Artificial Sequence: Synthetic oligonucleotide
  Sense strand starting at position 2730 of SEQ ID NO: 1887583
uggagacucacgugagacu

SEQ ID NO: 2482767 - RNA, 19 nt, Artificial Sequence
  Description of Artificial Sequence: Synthetic oligonucleotide
  Antisense strand to SEQ ID NO: 2482766
agucucacgugagucucca

SEQ ID NO: 2482768 - RNA, 19 nt, Artificial Sequence
  Description of Artificial Sequence: Synthetic oligonucleotide
  Sense strand starting at position 2948 of SEQ ID NO: 1887583
aggccuagugagggagaau

SEQ ID NO: 2482769 - RNA, 19 nt, Artificial Sequence
  Description of Artificial Sequence: Synthetic oligonucleotide
  Antisense strand to SEQ ID NO: 2482768
auucucccucacuaggccu

SEQ ID NO: 2482770 - RNA, 19 nt, Artificial Sequence
  Description of Artificial Sequence: Synthetic oligonucleotide
  Sense strand starting at position 3187 of SEQ ID NO: 1887583
ccgugaauccacgauacua

SEQ ID NO: 2482771 - RNA, 19 nt, Artificial Sequence
  Description of Artificial Sequence: Synthetic oligonucleotide
  Antisense strand to SEQ ID NO: 2482770
uaguaucguggauucacgg

SEQ ID NO: 2482772 - RNA, 19 nt, Artificial Sequence
  Description of Artificial Sequence: Synthetic oligonucleotide
  Sense strand starting at position 3286 of SEQ ID NO: 1887583
agccuauuaggaggugaua

SEQ ID NO: 2482773 - RNA, 19 nt, Artificial Sequence
  Description of Artificial Sequence: Synthetic oligonucleotide
  Antisense strand to SEQ ID NO: 2482772
uaucaccuccuaauaggcu

SEQ ID NO: 2482774 - RNA, 19 nt, Artificial Sequence
  Description of Artificial Sequence: Synthetic oligonucleotide
  Sense strand starting at position 3540 of SEQ ID NO: 1887583
accagagguccuggcacau

SEQ ID NO: 2482775 - RNA, 19 nt, Artificial Sequence
  Description of Artificial Sequence: Synthetic oligonucleotide
  Antisense strand to SEQ ID NO: 2482774
augugccaggaccucuggu

SEQ ID NO: 2482776 - RNA, 19 nt, Artificial Sequence
  Description of Artificial Sequence: Synthetic oligonucleotide
  Sense strand starting at position 3800 of SEQ ID NO: 1887583
gggucaccuaugggauguu

SEQ ID NO: 2482777 - RNA, 19 nt, Artificial Sequence
  Description of Artificial Sequence: Synthetic oligonucleotide
  Antisense strand to SEQ ID NO: 2482776
aacaucccauaggugaccc

SEQ ID NO: 2482778 - RNA, 19 nt, Artificial Sequence
  Description of Artificial Sequence: Synthetic oligonucleotide
  Sense strand starting at position 3932 of SEQ ID NO: 1887583
caauuuguguuagauuuga

SEQ ID NO: 2482779 - RNA, 19 nt, Artificial Sequence
  Description of Artificial Sequence: Synthetic oligonucleotide
  Antisense strand to SEQ ID NO: 2482778
ucaaaucuaacacaaauug

SEQ ID NO: 2482780 - RNA, 19 nt, Artificial Sequence
  Description of Artificial Sequence: Synthetic oligonucleotide
  Sense strand starting at position 711 of SEQ ID NO: 1887584
guuuaaccacccugucauc

SEQ ID NO: 2482781 - RNA, 19 nt, Artificial Sequence
  Description of Artificial Sequence: Synthetic oligonucleotide
  Antisense strand to SEQ ID NO: 2482780
gaugacagggugguuaaac

SEQ ID NO: 2482782 - RNA, 19 nt, Artificial Sequence
  Description of Artificial Sequence: Synthetic oligonucleotide
  Sense strand starting at position 764 of SEQ ID NO: 1887584
cugggaaugugccugacaa

SEQ ID NO: 2482783 - RNA, 19 nt, Artificial Sequence
  Description of Artificial Sequence: Synthetic oligonucleotide
  Antisense strand to SEQ ID NO: 2482782
uugucaggcacauucccag

SEQ ID NO: 2482784 - RNA, 19 nt, Artificial Sequence
  Description of Artificial Sequence: Synthetic oligonucleotide
  Sense strand starting at position 765 of SEQ ID NO: 1887584
ugggaaugugccugacaau

SEQ ID NO: 2482785 - RNA, 19 nt, Artificial Sequence
  Description of Artificial Sequence: Synthetic oligonucleotide
  Antisense strand to SEQ ID NO: 2482784
auugucaggcacauuccca

SEQ ID NO: 2482786 - RNA, 19 nt, Artificial Sequence
  Description of Artificial Sequence: Synthetic oligonucleotide
  Sense strand starting at position 766 of SEQ ID NO: 1887584
gggaaugugccugacaauu

SEQ ID NO: 2482787 - RNA, 19 nt, Artificial Sequence
  Description of Artificial Sequence: Synthetic oligonucleotide
  Antisense strand to SEQ ID NO: 2482786
aauugucaggcacauuccc

SEQ ID NO: 2482788 - RNA, 19 nt, Artificial Sequence
  Description of Artificial Sequence: Synthetic oligonucleotide
  Sense strand starting at position 787 of SEQ ID NO: 1887584
gacuaaaugcuguguacac

SEQ ID NO: 2482789 - RNA, 19 nt, Artificial Sequence
  Description of Artificial Sequence: Synthetic oligonucleotide
  Antisense strand to SEQ ID NO: 2482788
guguacacagcauuuaguc

SEQ ID NO: 2482790 - RNA, 19 nt, Artificial Sequence
  Description of Artificial Sequence: Synthetic oligonucleotide
  Sense strand starting at position 788 of SEQ ID NO: 1887584
acuaaaugcuguguacaca

SEQ ID NO: 2482791 - RNA, 19 nt, Artificial Sequence
  Description of Artificial Sequence: Synthetic oligonucleotide
  Antisense strand to SEQ ID NO: 2482790
uguguacacagcauuuagu

SEQ ID NO: 2482792 - RNA, 19 nt, Artificial Sequence
  Description of Artificial Sequence: Synthetic oligonucleotide
  Sense strand starting at position 789 of SEQ ID NO: 1887584
cuaaaugcuguguacacau

SEQ ID NO: 2482793 - RNA, 19 nt, Artificial Sequence
  Description of Artificial Sequence: Synthetic oligonucleotide
  Antisense strand to SEQ ID NO: 2482792
auguguacacagcauuuag

SEQ ID NO: 2482794 - RNA, 19 nt, Artificial Sequence
  Description of Artificial Sequence: Synthetic oligonucleotide
  Sense strand starting at position 828 of SEQ ID NO: 1887584
ucucaauagcccugagaga

SEQ ID NO: 2482795 - RNA, 19 nt, Artificial Sequence
  Description of Artificial Sequence: Synthetic oligonucleotide
  Antisense strand to SEQ ID NO: 2482794
ucucucagggcuauugaga

SEQ ID NO: 2482796 - RNA, 19 nt, Artificial Sequence
  Description of Artificial Sequence: Synthetic oligonucleotide
  Sense strand starting at position 926 of SEQ ID NO: 1887584
cuguucucaccuggaaaga

SEQ ID NO: 2482797 - RNA, 19 nt, Artificial Sequence
  Description of Artificial Sequence: Synthetic oligonucleotide
  Antisense strand to SEQ ID NO: 2482796
ucuuuccaggugagaacag

SEQ ID NO: 2482798 - RNA, 19 nt, Artificial Sequence
  Description of Artificial Sequence: Synthetic oligonucleotide
  Sense strand starting at position 1020 of SEQ ID NO: 1887584
ucuauaugggaaugcaaga

SEQ ID NO: 2482799 - RNA, 19 nt, Artificial Sequence
  Description of Artificial Sequence: Synthetic oligonucleotide
  Antisense strand to SEQ ID NO: 2482798
ucuugcauucccauauaga

SEQ ID NO: 2482800 - RNA, 19 nt, Artificial Sequence
  Description of Artificial Sequence: Synthetic oligonucleotide
  Sense strand starting at position 1159 of SEQ ID NO: 1887584
ggaaguagccagcaugaau

SEQ ID NO: 2482801 - RNA, 19 nt, Artificial Sequence
  Description of Artificial Sequence: Synthetic oligonucleotide
  Antisense strand to SEQ ID NO: 2482800
auucaugcuggcuacuucc

SEQ ID NO: 2482802 - RNA, 19 nt, Artificial Sequence
  Description of Artificial Sequence: Synthetic oligonucleotide
  Sense strand starting at position 1220 of SEQ ID NO: 1887584
gggaaacuguaauugagua

SEQ ID NO: 2482803 - RNA, 19 nt, Artificial Sequence
  Description of Artificial Sequence: Synthetic oligonucleotide
  Antisense strand to SEQ ID NO: 2482802
uacucaauuacaguuuccc

SEQ ID NO: 2482804 - RNA, 19 nt, Artificial Sequence
  Description of Artificial Sequence: Synthetic oligonucleotide
  Sense strand starting at position 1225 of SEQ ID NO: 1887584
acuguaauugaguaccaca

SEQ ID NO: 2482805 - RNA, 19 nt, Artificial Sequence
  Description of Artificial Sequence: Synthetic oligonucleotide
  Antisense strand to SEQ ID NO: 2482804
ugugguacucaauuacagu

SEQ ID NO: 2482806 - RNA, 19 nt, Artificial Sequence
  Description of Artificial Sequence: Synthetic oligonucleotide
  Sense strand starting at position 1228 of SEQ ID NO: 1887584
guaauugaguaccacauuu

SEQ ID NO: 2482807 - RNA, 19 nt, Artificial Sequence
  Description of Artificial Sequence: Synthetic oligonucleotide
  Antisense strand to SEQ ID NO: 2482806
aaaugugguacucaauuac

SEQ ID NO: 2482808 - RNA, 19 nt, Artificial Sequence
  Description of Artificial Sequence: Synthetic oligonucleotide
  Sense strand starting at position 1600 of SEQ ID NO: 1887584
acucuuuaggaaugcaacu

SEQ ID NO: 2482809 - RNA, 19 nt, Artificial Sequence
  Description of Artificial Sequence: Synthetic oligonucleotide
  Antisense strand to SEQ ID NO: 2482808
aguugcauuccuaaagagu

SEQ ID NO: 2482810 - RNA, 19 nt, Artificial Sequence
  Description of Artificial Sequence: Synthetic oligonucleotide
  Sense strand starting at position 1632 of SEQ ID NO: 1887584
auggcaagcuuaucuaaca

SEQ ID NO: 2482811 - RNA, 19 nt, Artificial Sequence
  Description of Artificial Sequence: Synthetic oligonucleotide
  Antisense strand to SEQ ID NO: 2482810
uguuagauaagcuugccau

SEQ ID NO: 2482812 - RNA, 19 nt, Artificial Sequence
  Description of Artificial Sequence: Synthetic oligonucleotide
  Sense strand starting at position 1633 of SEQ ID NO: 1887584
uggcaagcuuaucuaacaa

SEQ ID NO: 2482813 - RNA, 19 nt, Artificial Sequence
  Description of Artificial Sequence: Synthetic oligonucleotide
  Antisense strand to SEQ ID NO: 2482812
uuguuagauaagcuugcca

SEQ ID NO: 2482814 - RNA, 19 nt, Artificial Sequence
  Description of Artificial Sequence: Synthetic oligonucleotide
  Sense strand starting at position 1717 of SEQ ID NO: 1887584
ccaucagauugccuugaga

SEQ ID NO: 2482815 - RNA, 19 nt, Artificial Sequence
  Description of Artificial Sequence: Synthetic oligonucleotide
  Antisense strand to SEQ ID NO: 2482814
ucucaaggcaaucugaugg

SEQ ID NO: 2482816 - RNA, 19 nt, Artificial Sequence
  Description of Artificial Sequence: Synthetic oligonucleotide
  Sense strand starting at position 1719 of SEQ ID NO: 1887584
aucagauugccuugagaca

SEQ ID NO: 2482817 - RNA, 19 nt, Artificial Sequence
  Description of Artificial Sequence: Synthetic oligonucleotide
  Antisense strand to SEQ ID NO: 2482816
ugucucaaggcaaucugau

SEQ ID NO: 2482818 - RNA, 19 nt, Artificial Sequence
  Description of Artificial Sequence: Synthetic oligonucleotide
  Sense strand starting at position 1876 of SEQ ID NO: 1887584
gcuuucuguccugaaagcu

SEQ ID NO: 2482819 - RNA, 19 nt, Artificial Sequence
  Description of Artificial Sequence: Synthetic oligonucleotide
  Antisense strand to SEQ ID NO: 2482818
agcuuucaggacagaaagc

SEQ ID NO: 2482820 - RNA, 19 nt, Artificial Sequence
  Description of Artificial Sequence: Synthetic oligonucleotide
  Sense strand starting at position 2019 of SEQ ID NO: 1887584
accuguguuuggguauaaa

SEQ ID NO: 2482821 - RNA, 19 nt, Artificial Sequence
  Description of Artificial Sequence: Synthetic oligonucleotide
  Antisense strand to SEQ ID NO: 2482820
uuuauacccaaacacaggu

SEQ ID NO: 2482822 - RNA, 19 nt, Artificial Sequence
  Description of Artificial Sequence: Synthetic oligonucleotide
  Sense strand starting at position 2743 of SEQ ID NO: 1887584
uuuacuucgucccuaugaa

SEQ ID NO: 2482823 - RNA, 19 nt, Artificial Sequence
  Description of Artificial Sequence: Synthetic oligonucleotide
  Antisense strand to SEQ ID NO: 2482822
uucauagggacgaaguaaa

SEQ ID NO: 2482824 - RNA, 19 nt, Artificial Sequence
  Description of Artificial Sequence: Synthetic oligonucleotide
  Sense strand starting at position 2744 of SEQ ID NO: 1887584
uuacuucgucccuaugaau

SEQ ID NO: 2482825 - RNA, 19 nt, Artificial Sequence
  Description of Artificial Sequence: Synthetic oligonucleotide
  Antisense strand to SEQ ID NO: 2482824
auucauagggacgaaguaa

SEQ ID NO: 2482826 - RNA, 19 nt, Artificial Sequence
  Description of Artificial Sequence: Synthetic oligonucleotide
  Sense strand starting at position 3070 of SEQ ID NO: 1887584
ugacauaugucugugucca

SEQ ID NO: 2482827 - RNA, 19 nt, Artificial Sequence
  Description of Artificial Sequence: Synthetic oligonucleotide
  Antisense strand to SEQ ID NO: 2482826
uggacacagacauauguca

SEQ ID NO: 2482828 - RNA, 19 nt, Artificial Sequence
  Description of Artificial Sequence: Synthetic oligonucleotide
  Sense strand starting at position 3071 of SEQ ID NO: 1887584
gacauaugucuguguccac

SEQ ID NO: 2482829 - RNA, 19 nt, Artificial Sequence
  Description of Artificial Sequence: Synthetic oligonucleotide
  Antisense strand to SEQ ID NO: 2482828
guggacacagacauauguc

SEQ ID NO: 2482830 - RNA, 19 nt, Artificial Sequence
  Description of Artificial Sequence: Synthetic oligonucleotide
  Sense strand starting at position 3099 of SEQ ID NO: 1887584
cccugagguuccuuuauga

SEQ ID NO: 2482831 - RNA, 19 nt, Artificial Sequence
  Description of Artificial Sequence: Synthetic oligonucleotide
  Antisense strand to SEQ ID NO: 2482830
ucauaaaggaaccucaggg

SEQ ID NO: 2482832 - RNA, 19 nt, Artificial Sequence
  Description of Artificial Sequence: Synthetic oligonucleotide
  Sense strand starting at position 3344 of SEQ ID NO: 1887584
uggcuucugauugguuuga

SEQ ID NO: 2482833 - RNA, 19 nt, Artificial Sequence
  Description of Artificial Sequence: Synthetic oligonucleotide
  Antisense strand to SEQ ID NO: 2482832
ucaaaccaaucagaagcca

SEQ ID NO: 2482834 - RNA, 19 nt, Artificial Sequence
  Description of Artificial Sequence: Synthetic oligonucleotide
  Sense strand starting at position 3345 of SEQ ID NO: 1887584
ggcuucugauugguuugau

SEQ ID NO: 2482835 - RNA, 19 nt, Artificial Sequence
  Description of Artificial Sequence: Synthetic oligonucleotide
  Antisense strand to SEQ ID NO: 2482834
aucaaaccaaucagaagcc

SEQ ID NO: 2482836 - RNA, 19 nt, Artificial Sequence
  Description of Artificial Sequence: Synthetic oligonucleotide
  Sense strand starting at position 3346 of SEQ ID NO: 1887584
gcuucugauugguuugaug

SEQ ID NO: 2482837 - RNA, 19 nt, Artificial Sequence
  Description of Artificial Sequence: Synthetic oligonucleotide
  Antisense strand to SEQ ID NO: 2482836
caucaaaccaaucagaagc

SEQ ID NO: 2482838 - RNA, 19 nt, Artificial Sequence
  Description of Artificial Sequence: Synthetic oligonucleotide
  Sense strand starting at position 3366 of SEQ ID NO: 1887584
ggugacagcuccuucuacu

SEQ ID NO: 2482839 - RNA, 19 nt, Artificial Sequence
  Description of Artificial Sequence: Synthetic oligonucleotide
  Antisense strand to SEQ ID NO: 2482838
aguagaaggagcugucacc

SEQ ID NO: 2482840 - RNA, 19 nt, Artificial Sequence
  Description of Artificial Sequence: Synthetic oligonucleotide
  Sense strand starting at position 3385 of SEQ ID NO: 1887584
cucucaagugauuggccaa

SEQ ID NO: 2482841 - RNA, 19 nt, Artificial Sequence
  Description of Artificial Sequence: Synthetic oligonucleotide
  Antisense strand to SEQ ID NO: 2482840
uuggccaaucacuugagag

SEQ ID NO: 2482842 - RNA, 19 nt, Artificial Sequence
  Description of Artificial Sequence: Synthetic oligonucleotide
  Sense strand starting at position 3405 of SEQ ID NO: 1887584
ugaggaaucccugguucca

SEQ ID NO: 2482843 - RNA, 19 nt, Artificial Sequence
  Description of Artificial Sequence: Synthetic oligonucleotide
  Antisense strand to SEQ ID NO: 2482842
uggaaccagggauuccuca

SEQ ID NO: 2482844 - RNA, 19 nt, Artificial Sequence
  Description of Artificial Sequence: Synthetic oligonucleotide
  Sense strand starting at position 3457 of SEQ ID NO: 1887584
ccuugaucaucuuuguuua

SEQ ID NO: 2482845 - RNA, 19 nt, Artificial Sequence
  Description of Artificial Sequence: Synthetic oligonucleotide
  Antisense strand to SEQ ID NO: 2482844
uaaacaaagaugaucaagg

SEQ ID NO: 2482846 - RNA, 19 nt, Artificial Sequence
  Description of Artificial Sequence: Synthetic oligonucleotide
  Sense strand starting at position 3460 of SEQ ID NO: 1887584
ugaucaucuuuguuuaaag

SEQ ID NO: 2482847 - RNA, 19 nt, Artificial Sequence
  Description of Artificial Sequence: Synthetic oligonucleotide
  Antisense strand to SEQ ID NO: 2482846
cuuuaaacaaagaugauca

SEQ ID NO: 2482848 - RNA, 19 nt, Artificial Sequence
  Description of Artificial Sequence: Synthetic oligonucleotide
  Sense strand starting at position 3471 of SEQ ID NO: 1887584
guuuaaagauuccuccuga

SEQ ID NO: 2482849 - RNA, 19 nt, Artificial Sequence
  Description of Artificial Sequence: Synthetic oligonucleotide
  Antisense strand to SEQ ID NO: 2482848
ucaggaggaaucuuuaaac

SEQ ID NO: 2482850 - RNA, 19 nt, Artificial Sequence
  Description of Artificial Sequence: Synthetic oligonucleotide
  Sense strand starting at position 3538 of SEQ ID NO: 1887584
ggagucuuguguuucagga

SEQ ID NO: 2482851 - RNA, 19 nt, Artificial Sequence
  Description of Artificial Sequence: Synthetic oligonucleotide
  Antisense strand to SEQ ID NO: 2482850
uccugaaacacaagacucc

SEQ ID NO: 2482852 - RNA, 19 nt, Artificial Sequence
  Description of Artificial Sequence: Synthetic oligonucleotide
  Sense strand starting at position 3601 of SEQ ID NO: 1887584
acagaagaguucuuugauc

SEQ ID NO: 2482853 - RNA, 19 nt, Artificial Sequence
  Description of Artificial Sequence: Synthetic oligonucleotide
  Antisense strand to SEQ ID NO: 2482852
gaucaaagaacucuucugu

SEQ ID NO: 2482854 - RNA, 19 nt, Artificial Sequence
  Description of Artificial Sequence: Synthetic oligonucleotide
  Sense strand starting at position 3603 of SEQ ID NO: 1887584
agaagaguucuuugaucaa

SEQ ID NO: 2482855 - RNA, 19 nt, Artificial Sequence
  Description of Artificial Sequence: Synthetic oligonucleotide
  Antisense strand to SEQ ID NO: 2482854
uugaucaaagaacucuucu

SEQ ID NO: 2482856 - RNA, 19 nt, Artificial Sequence
  Description of Artificial Sequence: Synthetic oligonucleotide
  Sense strand starting at position 3606 of SEQ ID NO: 1887584
agaguucuuugaucaaaug

SEQ ID NO: 2482857 - RNA, 19 nt, Artificial Sequence
  Description of Artificial Sequence: Synthetic oligonucleotide
  Antisense strand to SEQ ID NO: 2482856
cauuugaucaaagaacucu

SEQ ID NO: 2482858 - RNA, 19 nt, Artificial Sequence
  Description of Artificial Sequence: Synthetic oligonucleotide
  Sense strand starting at position 3607 of SEQ ID NO: 1887584
gaguucuuugaucaaaugu

SEQ ID NO: 2482859 - RNA, 19 nt, Artificial Sequence
  Description of Artificial Sequence: Synthetic oligonucleotide
  Antisense strand to SEQ ID NO: 2482858
acauuugaucaaagaacuc

SEQ ID NO: 2482860 - RNA, 19 nt, Artificial Sequence
  Description of Artificial Sequence: Synthetic oligonucleotide
  Sense strand starting at position 100 of SEQ ID NO: 1887585
gagcuuguuucccuacugu

SEQ ID NO: 2482861 - RNA, 19 nt, Artificial Sequence
  Description of Artificial Sequence: Synthetic oligonucleotide
  Antisense strand to SEQ ID NO: 2482860
acaguagggaaacaagcuc

SEQ ID NO: 2482862 - RNA, 19 nt, Artificial Sequence
  Description of Artificial Sequence: Synthetic oligonucleotide
  Sense strand starting at position 104 of SEQ ID NO: 1887585
uuguuucccuacugucuua

SEQ ID NO: 2482863 - RNA, 19 nt, Artificial Sequence
  Description of Artificial Sequence: Synthetic oligonucleotide
  Antisense strand to SEQ ID NO: 2482862
uaagacaguagggaaacaa

SEQ ID NO: 2482864 - RNA, 19 nt, Artificial Sequence
  Description of Artificial Sequence: Synthetic oligonucleotide
  Sense strand starting at position 122 of SEQ ID NO: 1887585
acuaucuuagccuguuuau

SEQ ID NO: 2482865 - RNA, 19 nt, Artificial Sequence
  Description of Artificial Sequence: Synthetic oligonucleotide
  Antisense strand to SEQ ID NO: 2482864
auaaacaggcuaagauagu

SEQ ID NO: 2482866 - RNA, 19 nt, Artificial Sequence
  Description of Artificial Sequence: Synthetic oligonucleotide
  Sense strand starting at position 131 of SEQ ID NO: 1887585
gccuguuuaugcugcuaua

SEQ ID NO: 2482867 - RNA, 19 nt, Artificial Sequence
  Description of Artificial Sequence: Synthetic oligonucleotide
  Antisense strand to SEQ ID NO: 2482866
uauagcagcauaaacaggc

SEQ ID NO: 2482868 - RNA, 19 nt, Artificial Sequence
  Description of Artificial Sequence: Synthetic oligonucleotide
  Sense strand starting at position 442 of SEQ ID NO: 1887585
uaauacaugcuuuguggga

SEQ ID NO: 2482869 - RNA, 19 nt, Artificial Sequence
  Description of Artificial Sequence: Synthetic oligonucleotide
  Antisense strand to SEQ ID NO: 2482868
ucccacaaagcauguauua

SEQ ID NO: 2482870 - RNA, 19 nt, Artificial Sequence
  Description of Artificial Sequence: Synthetic oligonucleotide
  Sense strand starting at position 443 of SEQ ID NO: 1887585
aauacaugcuuugugggaa

SEQ ID NO: 2482871 - RNA, 19 nt, Artificial Sequence
  Description of Artificial Sequence: Synthetic oligonucleotide
  Antisense strand to SEQ ID NO: 2482870
uucccacaaagcauguauu

SEQ ID NO: 2482872 - RNA, 19 nt, Artificial Sequence
  Description of Artificial Sequence: Synthetic oligonucleotide
  Sense strand starting at position 444 of SEQ ID NO: 1887585
auacaugcuuugugggaaa

SEQ ID NO: 2482873 - RNA, 19 nt, Artificial Sequence
  Description of Artificial Sequence: Synthetic oligonucleotide
  Antisense strand to SEQ ID NO: 2482872
uuucccacaaagcauguau

SEQ ID NO: 2482874 - RNA, 19 nt, Artificial Sequence
  Description of Artificial Sequence: Synthetic oligonucleotide
  Sense strand starting at position 446 of SEQ ID NO: 1887585
acaugcuuugugggaaaca

SEQ ID NO: 2482875 - RNA, 19 nt, Artificial Sequence
  Description of Artificial Sequence: Synthetic oligonucleotide
  Antisense strand to SEQ ID NO: 2482874
uguuucccacaaagcaugu

SEQ ID NO: 2482876 - RNA, 19 nt, Artificial Sequence
  Description of Artificial Sequence: Synthetic oligonucleotide
  Sense strand starting at position 516 of SEQ ID NO: 1887585
ggguucugaucccaagacu

SEQ ID NO: 2482877 - RNA, 19 nt, Artificial Sequence
  Description of Artificial Sequence: Synthetic oligonucleotide
  Antisense strand to SEQ ID NO: 2482876
agucuugggaucagaaccc

SEQ ID NO: 2482878 - RNA, 19 nt, Artificial Sequence
  Description of Artificial Sequence: Synthetic oligonucleotide
  Sense strand starting at position 525 of SEQ ID NO: 1887585
ucccaagacucauggaaga

SEQ ID NO: 2482879 - RNA, 19 nt, Artificial Sequence
  Description of Artificial Sequence: Synthetic oligonucleotide
  Antisense strand to SEQ ID NO: 2482878
ucuuccaugagucuuggga

SEQ ID NO: 2482880 - RNA, 19 nt, Artificial Sequence
  Description of Artificial Sequence: Synthetic oligonucleotide
  Sense strand starting at position 608 of SEQ ID NO: 1887585
auguaaucucagcaaugcu

SEQ ID NO: 2482881 - RNA, 19 nt, Artificial Sequence
  Description of Artificial Sequence: Synthetic oligonucleotide
  Antisense strand to SEQ ID NO: 2482880
agcauugcugagauuacau

SEQ ID NO: 2482882 - RNA, 19 nt, Artificial Sequence
  Description of Artificial Sequence: Synthetic oligonucleotide
  Sense strand starting at position 819 of SEQ ID NO: 1887585
gagugcaugucuuauagua

SEQ ID NO: 2482883 - RNA, 19 nt, Artificial Sequence
  Description of Artificial Sequence: Synthetic oligonucleotide
  Antisense strand to SEQ ID NO: 2482882
uacuauaagacaugcacuc

SEQ ID NO: 2482884 - RNA, 19 nt, Artificial Sequence
  Description of Artificial Sequence: Synthetic oligonucleotide
  Sense strand starting at position 821 of SEQ ID NO: 1887585
gugcaugucuuauaguacu

SEQ ID NO: 2482885 - RNA, 19 nt, Artificial Sequence
  Description of Artificial Sequence: Synthetic oligonucleotide
  Antisense strand to SEQ ID NO: 2482884
aguacuauaagacaugcac

SEQ ID NO: 2482886 - RNA, 19 nt, Artificial Sequence
  Description of Artificial Sequence: Synthetic oligonucleotide
  Sense strand starting at position 827 of SEQ ID NO: 1887585
gucuuauaguacuguuaua

SEQ ID NO: 2482887 - RNA, 19 nt, Artificial Sequence
  Description of Artificial Sequence: Synthetic oligonucleotide
  Antisense strand to SEQ ID NO: 2482886
uauaacaguacuauaagac

SEQ ID NO: 2482888 - RNA, 19 nt, Artificial Sequence
  Description of Artificial Sequence: Synthetic oligonucleotide
  Sense strand starting at position 838 of SEQ ID NO: 1887585
cuguuauaauaagcaaaug

SEQ ID NO: 2482889 - RNA, 19 nt, Artificial Sequence
  Description of Artificial Sequence: Synthetic oligonucleotide
  Antisense strand to SEQ ID NO: 2482888
cauuugcuuauuauaacag

SEQ ID NO: 2482890 - RNA, 19 nt, Artificial Sequence
  Description of Artificial Sequence: Synthetic oligonucleotide
  Sense strand starting at position 864 of SEQ ID NO: 1887585
acaagaaagucuuaguaca

SEQ ID NO: 2482891 - RNA, 19 nt, Artificial Sequence
  Description of Artificial Sequence: Synthetic oligonucleotide
  Antisense strand to SEQ ID NO: 2482890
uguacuaagacuuucuugu

SEQ ID NO: 2482892 - RNA, 19 nt, Artificial Sequence
  Description of Artificial Sequence: Synthetic oligonucleotide
  Sense strand starting at position 972 of SEQ ID NO: 1887585
gggucucacagauggauug

SEQ ID NO: 2482893 - RNA, 19 nt, Artificial Sequence
  Description of Artificial Sequence: Synthetic oligonucleotide
  Antisense strand to SEQ ID NO: 2482892
caauccaucugugagaccc

SEQ ID NO: 2482894 - RNA, 19 nt, Artificial Sequence
  Description of Artificial Sequence: Synthetic oligonucleotide
  Sense strand starting at position 979 of SEQ ID NO: 1887585
acagauggauugccuaauu

SEQ ID NO: 2482895 - RNA, 19 nt, Artificial Sequence
  Description of Artificial Sequence: Synthetic oligonucleotide
  Antisense strand to SEQ ID NO: 2482894
aauuaggcaauccaucugu

SEQ ID NO: 2482896 - RNA, 19 nt, Artificial Sequence
  Description of Artificial Sequence: Synthetic oligonucleotide
  Sense strand starting at position 990 of SEQ ID NO: 1887585
gccuaauuugcuuauagcu

SEQ ID NO: 2482897 - RNA, 19 nt, Artificial Sequence
  Description of Artificial Sequence: Synthetic oligonucleotide
  Antisense strand to SEQ ID NO: 2482896
agcuauaagcaaauuaggc

SEQ ID NO: 2482898 - RNA, 19 nt, Artificial Sequence
  Description of Artificial Sequence: Synthetic oligonucleotide
  Sense strand starting at position 1049 of SEQ ID NO: 1887585
uuucuauguugggagauag

SEQ ID NO: 2482899 - RNA, 19 nt, Artificial Sequence
  Description of Artificial Sequence: Synthetic oligonucleotide
  Antisense strand to SEQ ID NO: 2482898
cuaucucccaacauagaaa

SEQ ID NO: 2482900 - RNA, 19 nt, Artificial Sequence
  Description of Artificial Sequence: Synthetic oligonucleotide
  Sense strand starting at position 1122 of SEQ ID NO: 1887585
agcaaacauuugccguaaa

SEQ ID NO: 2482901 - RNA, 19 nt, Artificial Sequence
  Description of Artificial Sequence: Synthetic oligonucleotide
  Antisense strand to SEQ ID NO: 2482900
uuuacggcaaauguuugcu

SEQ ID NO: 2482902 - RNA, 19 nt, Artificial Sequence
  Description of Artificial Sequence: Synthetic oligonucleotide
  Sense strand starting at position 1176 of SEQ ID NO: 1887585
uucuuauaccuguggaaga

SEQ ID NO: 2482903 - RNA, 19 nt, Artificial Sequence
  Description of Artificial Sequence: Synthetic oligonucleotide
  Antisense strand to SEQ ID NO: 2482902
ucuuccacagguauaagaa

SEQ ID NO: 2482904 - RNA, 19 nt, Artificial Sequence
  Description of Artificial Sequence: Synthetic oligonucleotide
  Sense strand starting at position 1177 of SEQ ID NO: 1887585
ucuuauaccuguggaagaa

SEQ ID NO: 2482905 - RNA, 19 nt, Artificial Sequence
  Description of Artificial Sequence: Synthetic oligonucleotide
  Antisense strand to SEQ ID NO: 2482904
uucuuccacagguauaaga

SEQ ID NO: 2482906 - RNA, 19 nt, Artificial Sequence
  Description of Artificial Sequence: Synthetic oligonucleotide
  Sense strand starting at position 427 of SEQ ID NO: 1887586
cugaguucugaccagagug

SEQ ID NO: 2482907 - RNA, 19 nt, Artificial Sequence
  Description of Artificial Sequence: Synthetic oligonucleotide
  Antisense strand to SEQ ID NO: 2482906
cacucuggucagaacucag

SEQ ID NO: 2482908 - RNA, 19 nt, Artificial Sequence
  Description of Artificial Sequence: Synthetic oligonucleotide
  Sense strand starting at position 946 of SEQ ID NO: 1887586
gguggaucacagcgaguaa

SEQ ID NO: 2482909 - RNA, 19 nt, Artificial Sequence
  Description of Artificial Sequence: Synthetic oligonucleotide
  Antisense strand to SEQ ID NO: 2482908
uuacucgcugugauccacc

SEQ ID NO: 2482910 - RNA, 19 nt, Artificial Sequence
  Description of Artificial Sequence: Synthetic oligonucleotide
  Sense strand starting at position 947 of SEQ ID NO: 1887586
guggaucacagcgaguaau

SEQ ID NO: 2482911 - RNA, 19 nt, Artificial Sequence
  Description of Artificial Sequence: Synthetic oligonucleotide
  Antisense strand to SEQ ID NO: 2482910
auuacucgcugugauccac

SEQ ID NO: 2482912 - RNA, 19 nt, Artificial Sequence
  Description of Artificial Sequence: Synthetic oligonucleotide
  Sense strand starting at position 950 of SEQ ID NO: 1887586
gaucacagcgaguaaugga

SEQ ID NO: 2482913 - RNA, 19 nt, Artificial Sequence
  Description of Artificial Sequence: Synthetic oligonucleotide
  Antisense strand to SEQ ID NO: 2482912
uccauuacucgcugugauc

SEQ ID NO: 2482914 - RNA, 19 nt, Artificial Sequence
  Description of Artificial Sequence: Synthetic oligonucleotide
  Sense strand starting at position 2418 of SEQ ID NO: 1887586
acgggacuucuuggaagag

SEQ ID NO: 2482915 - RNA, 19 nt, Artificial Sequence
  Description of Artificial Sequence: Synthetic oligonucleotide
  Antisense strand to SEQ ID NO: 2482914
cucuuccaagaagucccgu

SEQ ID NO: 2482916 - RNA, 19 nt, Artificial Sequence
  Description of Artificial Sequence: Synthetic oligonucleotide
  Sense strand starting at position 3044 of SEQ ID NO: 1887586
gccggaucaugcgguucaa

SEQ ID NO: 2482917 - RNA, 19 nt, Artificial Sequence
  Description of Artificial Sequence: Synthetic oligonucleotide
  Antisense strand to SEQ ID NO: 2482916
uugaaccgcaugauccggc

SEQ ID NO: 2482918 - RNA, 19 nt, Artificial Sequence
  Description of Artificial Sequence: Synthetic oligonucleotide
  Sense strand starting at position 3131 of SEQ ID NO: 1887586
agcagacucuucccagaac

SEQ ID NO: 2482919 - RNA, 19 nt, Artificial Sequence
  Description of Artificial Sequence: Synthetic oligonucleotide
  Antisense strand to SEQ ID NO: 2482918
guucugggaagagucugcu

SEQ ID NO: 2482920 - RNA, 19 nt, Artificial Sequence
  Description of Artificial Sequence: Synthetic oligonucleotide
  Sense strand starting at position 3521 of SEQ ID NO: 1887586
gcuguauacuucugggaaa

SEQ ID NO: 2482921 - RNA, 19 nt, Artificial Sequence
  Description of Artificial Sequence: Synthetic oligonucleotide
  Antisense strand to SEQ ID NO: 2482920
uuucccagaaguauacagc

SEQ ID NO: 2482922 - RNA, 19 nt, Artificial Sequence
  Description of Artificial Sequence: Synthetic oligonucleotide
  Sense strand starting at position 3568 of SEQ ID NO: 1887586
gcaucaucuccugguccuu

SEQ ID NO: 2482923 - RNA, 19 nt, Artificial Sequence
  Description of Artificial Sequence: Synthetic oligonucleotide
  Antisense strand to SEQ ID NO: 2482922
aaggaccaggagaugaugc

SEQ ID NO: 2482924 - RNA, 19 nt, Artificial Sequence
  Description of Artificial Sequence: Synthetic oligonucleotide
  Sense strand starting at position 332 of SEQ ID NO: 1887587
uucuuugccuguugaaacu

SEQ ID NO: 2482925 - RNA, 19 nt, Artificial Sequence
  Description of Artificial Sequence: Synthetic oligonucleotide
  Antisense strand to SEQ ID NO: 2482924
aguuucaacaggcaaagaa

SEQ ID NO: 2482926 - RNA, 19 nt, Artificial Sequence
  Description of Artificial Sequence: Synthetic oligonucleotide
  Sense strand starting at position 1165 of SEQ ID NO: 1887587
ccaguauucggguaggagu

SEQ ID NO: 2482927 - RNA, 19 nt, Artificial Sequence
  Description of Artificial Sequence: Synthetic oligonucleotide
  Antisense strand to SEQ ID NO: 2482926
acuccuacccgaauacugg

SEQ ID NO: 2482928 - RNA, 19 nt, Artificial Sequence
  Description of Artificial Sequence: Synthetic oligonucleotide
  Sense strand starting at position 1279 of SEQ ID NO: 1887587
cccugauucggcucgugca

SEQ ID NO: 2482929 - RNA, 19 nt, Artificial Sequence
  Description of Artificial Sequence: Synthetic oligonucleotide
  Antisense strand to SEQ ID NO: 2482928
ugcacgagccgaaucaggg

SEQ ID NO: 2482930 - RNA, 19 nt, Artificial Sequence
  Description of Artificial Sequence: Synthetic oligonucleotide
  Sense strand starting at position 2110 of SEQ ID NO: 1887587
ggguguggcuuccgugaca

SEQ ID NO: 2482931 - RNA, 19 nt, Artificial Sequence
  Description of Artificial Sequence: Synthetic oligonucleotide
  Antisense strand to SEQ ID NO: 2482930
ugucacggaagccacaccc

SEQ ID NO: 2482932 - RNA, 19 nt, Artificial Sequence
  Description of Artificial Sequence: Synthetic oligonucleotide
  Sense strand starting at position 2113 of SEQ ID NO: 1887587
uguggcuuccgugacaauc

SEQ ID NO: 2482933 - RNA, 19 nt, Artificial Sequence
  Description of Artificial Sequence: Synthetic oligonucleotide
  Antisense strand to SEQ ID NO: 2482932
gauugucacggaagccaca

SEQ ID NO: 2482934 - RNA, 19 nt, Artificial Sequence
  Description of Artificial Sequence: Synthetic oligonucleotide
  Sense strand starting at position 2115 of SEQ ID NO: 1887587
uggcuuccgugacaaucau

SEQ ID NO: 2482935 - RNA, 19 nt, Artificial Sequence
  Description of Artificial Sequence: Synthetic oligonucleotide
  Antisense strand to SEQ ID NO: 2482934
augauugucacggaagcca

SEQ ID NO: 2482936 - RNA, 19 nt, Artificial Sequence
  Description of Artificial Sequence: Synthetic oligonucleotide
  Sense strand starting at position 2122 of SEQ ID NO: 1887587
cgugacaaucauuaucucu

SEQ ID NO: 2482937 - RNA, 19 nt, Artificial Sequence
  Description of Artificial Sequence: Synthetic oligonucleotide
  Antisense strand to SEQ ID NO: 2482936
agagauaaugauugucacg

SEQ ID NO: 2482938 - RNA, 19 nt, Artificial Sequence
  Description of Artificial Sequence: Synthetic oligonucleotide
  Sense strand starting at position 2129 of SEQ ID NO: 1887587
aucauuaucucuugggaau

SEQ ID NO: 2482939 - RNA, 19 nt, Artificial Sequence
  Description of Artificial Sequence: Synthetic oligonucleotide
  Antisense strand to SEQ ID NO: 2482938
auucccaagagauaaugau

SEQ ID NO: 2482940 - RNA, 19 nt, Artificial Sequence
  Description of Artificial Sequence: Synthetic oligonucleotide
  Sense strand starting at position 2130 of SEQ ID NO: 1887587
ucauuaucucuugggaauu

SEQ ID NO: 2482941 - RNA, 19 nt, Artificial Sequence
  Description of Artificial Sequence: Synthetic oligonucleotide
  Antisense strand to SEQ ID NO: 2482940
aauucccaagagauaauga

SEQ ID NO: 2482942 - RNA, 19 nt, Artificial Sequence
  Description of Artificial Sequence: Synthetic oligonucleotide
  Sense strand starting at position 2132 of SEQ ID NO: 1887587
auuaucucuugggaauuua

SEQ ID NO: 2482943 - RNA, 19 nt, Artificial Sequence
  Description of Artificial Sequence: Synthetic oligonucleotide
  Antisense strand to SEQ ID NO: 2482942
uaaauucccaagagauaau

SEQ ID NO: 2482944 - RNA, 19 nt, Artificial Sequence
  Description of Artificial Sequence: Synthetic oligonucleotide
  Sense strand starting at position 2148 of SEQ ID NO: 1887587
uuaagaauguguccuagag

SEQ ID NO: 2482945 - RNA, 19 nt, Artificial Sequence
  Description of Artificial Sequence: Synthetic oligonucleotide
  Antisense strand to SEQ ID NO: 2482944
cucuaggacacauucuuaa

SEQ ID NO: 2482946 - RNA, 19 nt, Artificial Sequence
  Description of Artificial Sequence: Synthetic oligonucleotide
  Sense strand starting at position 2206 of SEQ ID NO: 1887587
ucaggucugccuuacacau

SEQ ID NO: 2482947 - RNA, 19 nt, Artificial Sequence
  Description of Artificial Sequence: Synthetic oligonucleotide
  Antisense strand to SEQ ID NO: 2482946
auguguaaggcagaccuga

SEQ ID NO: 2482948 - RNA, 19 nt, Artificial Sequence
  Description of Artificial Sequence: Synthetic oligonucleotide
  Sense strand starting at position 2361 of SEQ ID NO: 1887587
gaaguacauguaugaaaua

SEQ ID NO: 2482949 - RNA, 19 nt, Artificial Sequence
  Description of Artificial Sequence: Synthetic oligonucleotide
  Antisense strand to SEQ ID NO: 2482948
uauuucauacauguacuuc

SEQ ID NO: 2482950 - RNA, 19 nt, Artificial Sequence
  Description of Artificial Sequence: Synthetic oligonucleotide
  Sense strand starting at position 2558 of SEQ ID NO: 1887587
uaguguggcuucuguaauu

SEQ ID NO: 2482951 - RNA, 19 nt, Artificial Sequence
  Description of Artificial Sequence: Synthetic oligonucleotide
  Antisense strand to SEQ ID NO: 2482950
aauuacagaagccacacua

SEQ ID NO: 2482952 - RNA, 19 nt, Artificial Sequence
  Description of Artificial Sequence: Synthetic oligonucleotide
  Sense strand starting at position 2567 of SEQ ID NO: 1887587
uucuguaauuggcagguua

SEQ ID NO: 2482953 - RNA, 19 nt, Artificial Sequence
  Description of Artificial Sequence: Synthetic oligonucleotide
  Antisense strand to SEQ ID NO: 2482952
uaaccugccaauuacagaa

SEQ ID NO: 2482954 - RNA, 19 nt, Artificial Sequence
  Description of Artificial Sequence: Synthetic oligonucleotide
  Sense strand starting at position 2569 of SEQ ID NO: 1887587
cuguaauuggcagguuaga

SEQ ID NO: 2482955 - RNA, 19 nt, Artificial Sequence
  Description of Artificial Sequence: Synthetic oligonucleotide
  Antisense strand to SEQ ID NO: 2482954
ucuaaccugccaauuacag

SEQ ID NO: 2482956 - RNA, 19 nt, Artificial Sequence
  Description of Artificial Sequence: Synthetic oligonucleotide
  Sense strand starting at position 2578 of SEQ ID NO: 1887587
gcagguuagacagaguaag

SEQ ID NO: 2482957 - RNA, 19 nt, Artificial Sequence
  Description of Artificial Sequence: Synthetic oligonucleotide
  Antisense strand to SEQ ID NO: 2482956
cuuacucugucuaaccugc

SEQ ID NO: 2482958 - RNA, 19 nt, Artificial Sequence
  Description of Artificial Sequence: Synthetic oligonucleotide
  Sense strand starting at position 2588 of SEQ ID NO: 1887587
cagaguaaguuacugaaga

SEQ ID NO: 2482959 - RNA, 19 nt, Artificial Sequence
  Description of Artificial Sequence: Synthetic oligonucleotide
  Antisense strand to SEQ ID NO: 2482958
ucuucaguaacuuacucug

SEQ ID NO: 2482960 - RNA, 19 nt, Artificial Sequence
  Description of Artificial Sequence: Synthetic oligonucleotide
  Sense strand starting at position 2589 of SEQ ID NO: 1887587
agaguaaguuacugaagag

SEQ ID NO: 2482961 - RNA, 19 nt, Artificial Sequence
  Description of Artificial Sequence: Synthetic oligonucleotide
  Antisense strand to SEQ ID NO: 2482960
cucuucaguaacuuacucu

SEQ ID NO: 2482962 - RNA, 19 nt, Artificial Sequence
  Description of Artificial Sequence: Synthetic oligonucleotide
  Sense strand starting at position 2698 of SEQ ID NO: 1887587
gguaccaggcucugugauu

SEQ ID NO: 2482963 - RNA, 19 nt, Artificial Sequence
  Description of Artificial Sequence: Synthetic oligonucleotide
  Antisense strand to SEQ ID NO: 2482962
aaucacagagccugguacc

SEQ ID NO: 2482964 - RNA, 19 nt, Artificial Sequence
  Description of Artificial Sequence: Synthetic oligonucleotide
  Sense strand starting at position 2699 of SEQ ID NO: 1887587
guaccaggcucugugauua

SEQ ID NO: 2482965 - RNA, 19 nt, Artificial Sequence
  Description of Artificial Sequence: Synthetic oligonucleotide
  Antisense strand to SEQ ID NO: 2482964
uaaucacagagccugguac

SEQ ID NO: 2482966 - RNA, 19 nt, Artificial Sequence
  Description of Artificial Sequence: Synthetic oligonucleotide
  Sense strand starting at position 2703 of SEQ ID NO: 1887587
caggcucugugauuaaugu

SEQ ID NO: 2482967 - RNA, 19 nt, Artificial Sequence
  Description of Artificial Sequence: Synthetic oligonucleotide
  Antisense strand to SEQ ID NO: 2482966
acauuaaucacagagccug

SEQ ID NO: 2482968 - RNA, 19 nt, Artificial Sequence
  Description of Artificial Sequence: Synthetic oligonucleotide
  Sense strand starting at position 2707 of SEQ ID NO: 1887587
cucugugauuaaugucuca

SEQ ID NO: 2482969 - RNA, 19 nt, Artificial Sequence
  Description of Artificial Sequence: Synthetic oligonucleotide
  Antisense strand to SEQ ID NO: 2482968
ugagacauuaaucacagag

SEQ ID NO: 2482970 - RNA, 19 nt, Artificial Sequence
  Description of Artificial Sequence: Synthetic oligonucleotide
  Sense strand starting at position 2714 of SEQ ID NO: 1887587
auuaaugucucacacaugu

SEQ ID NO: 2482971 - RNA, 19 nt, Artificial Sequence
  Description of Artificial Sequence: Synthetic oligonucleotide
  Antisense strand to SEQ ID NO: 2482970
acaugugugagacauuaau

SEQ ID NO: 2482972 - RNA, 19 nt, Artificial Sequence
  Description of Artificial Sequence: Synthetic oligonucleotide
  Sense strand starting at position 2770 of SEQ ID NO: 1887587
gagucagucuuacacugca

SEQ ID NO: 2482973 - RNA, 19 nt, Artificial Sequence
  Description of Artificial Sequence: Synthetic oligonucleotide
  Antisense strand to SEQ ID NO: 2482972
ugcaguguaagacugacuc

SEQ ID NO: 2482974 - RNA, 19 nt, Artificial Sequence
  Description of Artificial Sequence: Synthetic oligonucleotide
  Sense strand starting at position 2773 of SEQ ID NO: 1887587
ucagucuuacacugcagau

SEQ ID NO: 2482975 - RNA, 19 nt, Artificial Sequence
  Description of Artificial Sequence: Synthetic oligonucleotide
  Antisense strand to SEQ ID NO: 2482974
aucugcaguguaagacuga

SEQ ID NO: 2482976 - RNA, 19 nt, Artificial Sequence
  Description of Artificial Sequence: Synthetic oligonucleotide
  Sense strand starting at position 2775 of SEQ ID NO: 1887587
agucuuacacugcagauga

SEQ ID NO: 2482977 - RNA, 19 nt, Artificial Sequence
  Description of Artificial Sequence: Synthetic oligonucleotide
  Antisense strand to SEQ ID NO: 2482976
ucaucugcaguguaagacu

SEQ ID NO: 2482978 - RNA, 19 nt, Artificial Sequence
  Description of Artificial Sequence: Synthetic oligonucleotide
  Sense strand starting at position 2870 of SEQ ID NO: 1887587
ugugguuugcgcagacaga

SEQ ID NO: 2482979 - RNA, 19 nt, Artificial Sequence
  Description of Artificial Sequence: Synthetic oligonucleotide
  Antisense strand to SEQ ID NO: 2482978
ucugucugcgcaaaccaca

SEQ ID NO: 2482980 - RNA, 19 nt, Artificial Sequence
  Description of Artificial Sequence: Synthetic oligonucleotide
  Sense strand starting at position 2871 of SEQ ID NO: 1887587
gugguuugcgcagacagaa

SEQ ID NO: 2482981 - RNA, 19 nt, Artificial Sequence
  Description of Artificial Sequence: Synthetic oligonucleotide
  Antisense strand to SEQ ID NO: 2482980
uucugucugcgcaaaccac

SEQ ID NO: 2482982 - RNA, 19 nt, Artificial Sequence
  Description of Artificial Sequence: Synthetic oligonucleotide
  Sense strand starting at position 2920 of SEQ ID NO: 1887587
uuucuugucggugauguuu

SEQ ID NO: 2482983 - RNA, 19 nt, Artificial Sequence
  Description of Artificial Sequence: Synthetic oligonucleotide
  Antisense strand to SEQ ID NO: 2482982
aaacaucaccgacaagaaa

SEQ ID NO: 2482984 - RNA, 19 nt, Artificial Sequence
  Description of Artificial Sequence: Synthetic oligonucleotide
  Sense strand starting at position 2922 of SEQ ID NO: 1887587
ucuugucggugauguuuau

SEQ ID NO: 2482985 - RNA, 19 nt, Artificial Sequence
  Description of Artificial Sequence: Synthetic oligonucleotide
  Antisense strand to SEQ ID NO: 2482984
auaaacaucaccgacaaga

SEQ ID NO: 2482986 - RNA, 19 nt, Artificial Sequence
  Description of Artificial Sequence: Synthetic oligonucleotide
  Sense strand starting at position 2926 of SEQ ID NO: 1887587
gucggugauguuuaugaaa

SEQ ID NO: 2482987 - RNA, 19 nt, Artificial Sequence
  Description of Artificial Sequence: Synthetic oligonucleotide
  Antisense strand to SEQ ID NO: 2482986
uuucauaaacaucaccgac

SEQ ID NO: 2482988 - RNA, 19 nt, Artificial Sequence
  Description of Artificial Sequence: Synthetic oligonucleotide
  Sense strand starting at position 2928 of SEQ ID NO: 1887587
cggugauguuuaugaaagu

SEQ ID NO: 2482989 - RNA, 19 nt, Artificial Sequence
  Description of Artificial Sequence: Synthetic oligonucleotide
  Antisense strand to SEQ ID NO: 2482988
acuuucauaaacaucaccg

SEQ ID NO: 2482990 - RNA, 19 nt, Artificial Sequence
  Description of Artificial Sequence: Synthetic oligonucleotide
  Sense strand starting at position 3221 of SEQ ID NO: 1887587
cccagauugucccacugua

SEQ ID NO: 2482991 - RNA, 19 nt, Artificial Sequence
  Description of Artificial Sequence: Synthetic oligonucleotide
  Antisense strand to SEQ ID NO: 2482990
uacagugggacaaucuggg

SEQ ID NO: 2482992 - RNA, 19 nt, Artificial Sequence
  Description of Artificial Sequence: Synthetic oligonucleotide
  Sense strand starting at position 3361 of SEQ ID NO: 1887587
aguugaugaaguugaguau

SEQ ID NO: 2482993 - RNA, 19 nt, Artificial Sequence
  Description of Artificial Sequence: Synthetic oligonucleotide
  Antisense strand to SEQ ID NO: 2482992
auacucaacuucaucaacu

SEQ ID NO: 2482994 - RNA, 19 nt, Artificial Sequence
  Description of Artificial Sequence: Synthetic oligonucleotide
  Sense strand starting at position 3362 of SEQ ID NO: 1887587
guugaugaaguugaguauu

SEQ ID NO: 2482995 - RNA, 19 nt, Artificial Sequence
  Description of Artificial Sequence: Synthetic oligonucleotide
  Antisense strand to SEQ ID NO: 2482994
aauacucaacuucaucaac

SEQ ID NO: 2482996 - RNA, 19 nt, Artificial Sequence
  Description of Artificial Sequence: Synthetic oligonucleotide
  Sense strand starting at position 3415 of SEQ ID NO: 1887587
ggcucccuguaucaucaua

SEQ ID NO: 2482997 - RNA, 19 nt, Artificial Sequence
  Description of Artificial Sequence: Synthetic oligonucleotide
  Antisense strand to SEQ ID NO: 2482996
uaugaugauacagggagcc

SEQ ID NO: 2482998 - RNA, 19 nt, Artificial Sequence
  Description of Artificial Sequence: Synthetic oligonucleotide
  Sense strand starting at position 3420 of SEQ ID NO: 1887587
ccuguaucaucauaagggu

SEQ ID NO: 2482999 - RNA, 19 nt, Artificial Sequence
  Description of Artificial Sequence: Synthetic oligonucleotide
  Antisense strand to SEQ ID NO: 2482998
acccuuaugaugauacagg

SEQ ID NO: 2483000 - RNA, 19 nt, Artificial Sequence
  Description of Artificial Sequence: Synthetic oligonucleotide
  Sense strand starting at position 3437 of SEQ ID NO: 1887587
guccuugugagugaaagag

SEQ ID NO: 2483001 - RNA, 19 nt, Artificial Sequence
  Description of Artificial Sequence: Synthetic oligonucleotide
  Antisense strand to SEQ ID NO: 2483000
cucuuucacucacaaggac

SEQ ID NO: 2483002 - RNA, 19 nt, Artificial Sequence
  Description of Artificial Sequence: Synthetic oligonucleotide
  Sense strand starting at position 283 of SEQ ID NO: 1887588
cucaaugccuguucugagu

SEQ ID NO: 2483003 - RNA, 19 nt, Artificial Sequence
  Description of Artificial Sequence: Synthetic oligonucleotide
  Antisense strand to SEQ ID NO: 2483002
acucagaacaggcauugag

SEQ ID NO: 2483004 - RNA, 19 nt, Artificial Sequence
  Description of Artificial Sequence: Synthetic oligonucleotide
  Sense strand starting at position 289 of SEQ ID NO: 1887588
gccuguucugaguagguau

SEQ ID NO: 2483005 - RNA, 19 nt, Artificial Sequence
  Description of Artificial Sequence: Synthetic oligonucleotide
  Antisense strand to SEQ ID NO: 2483004
auaccuacucagaacaggc

SEQ ID NO: 2483006 - RNA, 19 nt, Artificial Sequence
  Description of Artificial Sequence: Synthetic oligonucleotide
  Sense strand starting at position 301 of SEQ ID NO: 1887588
uagguauuccauugggugu

SEQ ID NO: 2483007 - RNA, 19 nt, Artificial Sequence
  Description of Artificial Sequence: Synthetic oligonucleotide
  Antisense strand to SEQ ID NO: 2483006
acacccaauggaauaccua

SEQ ID NO: 2483008 - RNA, 19 nt, Artificial Sequence
  Description of Artificial Sequence: Synthetic oligonucleotide
  Sense strand starting at position 308 of SEQ ID NO: 1887588
uccauuggguguucuggaa

SEQ ID NO: 2483009 - RNA, 19 nt, Artificial Sequence
  Description of Artificial Sequence: Synthetic oligonucleotide
  Antisense strand to SEQ ID NO: 2483008
uuccagaacacccaaugga

SEQ ID NO: 2483010 - RNA, 19 nt, Artificial Sequence
  Description of Artificial Sequence: Synthetic oligonucleotide
  Sense strand starting at position 416 of SEQ ID NO: 1887588
ccuggucccguagaguauu

SEQ ID NO: 2483011 - RNA, 19 nt, Artificial Sequence
  Description of Artificial Sequence: Synthetic oligonucleotide
  Antisense strand to SEQ ID NO: 2483010
aauacucuacgggaccagg

SEQ ID NO: 2483012 - RNA, 19 nt, Artificial Sequence
  Description of Artificial Sequence: Synthetic oligonucleotide
  Sense strand starting at position 449 of SEQ ID NO: 1887588
ugcagaguccacugacuca

SEQ ID NO: 2483013 - RNA, 19 nt, Artificial Sequence
  Description of Artificial Sequence: Synthetic oligonucleotide
  Antisense strand to SEQ ID NO: 2483012
ugagucaguggacucugca

SEQ ID NO: 2483014 - RNA, 19 nt, Artificial Sequence
  Description of Artificial Sequence: Synthetic oligonucleotide
  Sense strand starting at position 490 of SEQ ID NO: 1887588
ggccaccuaccuugaagua

SEQ ID NO: 2483015 - RNA, 19 nt, Artificial Sequence
  Description of Artificial Sequence: Synthetic oligonucleotide
  Antisense strand to SEQ ID NO: 2483014
uacuucaagguagguggcc

SEQ ID NO: 2483016 - RNA, 19 nt, Artificial Sequence
  Description of Artificial Sequence: Synthetic oligonucleotide
  Sense strand starting at position 491 of SEQ ID NO: 1887588
gccaccuaccuugaaguaa

SEQ ID NO: 2483017 - RNA, 19 nt, Artificial Sequence
  Description of Artificial Sequence: Synthetic oligonucleotide
  Antisense strand to SEQ ID NO: 2483016
uuacuucaagguagguggc

SEQ ID NO: 2483018 - RNA, 19 nt, Artificial Sequence
  Description of Artificial Sequence: Synthetic oligonucleotide
  Sense strand starting at position 594 of SEQ ID NO: 1887588
uagaucagcucuccagaga

SEQ ID NO: 2483019 - RNA, 19 nt, Artificial Sequence
  Description of Artificial Sequence: Synthetic oligonucleotide
  Antisense strand to SEQ ID NO: 2483018
ucucuggagagcugaucua

SEQ ID NO: 2483020 - RNA, 19 nt, Artificial Sequence
  Description of Artificial Sequence: Synthetic oligonucleotide
  Sense strand starting at position 1687 of SEQ ID NO: 1887588
ugggauuccauguguaauc

SEQ ID NO: 2483021 - RNA, 19 nt, Artificial Sequence
  Description of Artificial Sequence: Synthetic oligonucleotide
  Antisense strand to SEQ ID NO: 2483020
gauuacacauggaauccca

SEQ ID NO: 2483022 - RNA, 19 nt, Artificial Sequence
  Description of Artificial Sequence: Synthetic oligonucleotide
  Sense strand starting at position 1689 of SEQ ID NO: 1887588
ggauuccauguguaaucca

SEQ ID NO: 2483023 - RNA, 19 nt, Artificial Sequence
  Description of Artificial Sequence: Synthetic oligonucleotide
  Antisense strand to SEQ ID NO: 2483022
uggauuacacauggaaucc

SEQ ID NO: 2483024 - RNA, 19 nt, Artificial Sequence
  Description of Artificial Sequence: Synthetic oligonucleotide
  Sense strand starting at position 1967 of SEQ ID NO: 1887588
ggauucugcuuuggguaca

SEQ ID NO: 2483025 - RNA, 19 nt, Artificial Sequence
  Description of Artificial Sequence: Synthetic oligonucleotide
  Antisense strand to SEQ ID NO: 2483024
uguacccaaagcagaaucc

SEQ ID NO: 2483026 - RNA, 19 nt, Artificial Sequence
  Description of Artificial Sequence: Synthetic oligonucleotide
  Sense strand starting at position 1970 of SEQ ID NO: 1887588
uucugcuuuggguacagaa

SEQ ID NO: 2483027 - RNA, 19 nt, Artificial Sequence
  Description of Artificial Sequence: Synthetic oligonucleotide
  Antisense strand to SEQ ID NO: 2483026
uucuguacccaaagcagaa

SEQ ID NO: 2483028 - RNA, 19 nt, Artificial Sequence
  Description of Artificial Sequence: Synthetic oligonucleotide
  Sense strand starting at position 1972 of SEQ ID NO: 1887588
cugcuuuggguacagaauu

SEQ ID NO: 2483029 - RNA, 19 nt, Artificial Sequence
  Description of Artificial Sequence: Synthetic oligonucleotide
  Antisense strand to SEQ ID NO: 2483028
aauucuguacccaaagcag

SEQ ID NO: 2483030 - RNA, 19 nt, Artificial Sequence
  Description of Artificial Sequence: Synthetic oligonucleotide
  Sense strand starting at position 2017 of SEQ ID NO: 1887588
ucucguucuugcugaaauu

SEQ ID NO: 2483031 - RNA, 19 nt, Artificial Sequence
  Description of Artificial Sequence: Synthetic oligonucleotide
  Antisense strand to SEQ ID NO: 2483030
aauuucagcaagaacgaga

SEQ ID NO: 2483032 - RNA, 19 nt, Artificial Sequence
  Description of Artificial Sequence: Synthetic oligonucleotide
  Sense strand starting at position 2018 of SEQ ID NO: 1887588
cucguucuugcugaaauuc

SEQ ID NO: 2483033 - RNA, 19 nt, Artificial Sequence
  Description of Artificial Sequence: Synthetic oligonucleotide
  Antisense strand to SEQ ID NO: 2483032
gaauuucagcaagaacgag

SEQ ID NO: 2483034 - RNA, 19 nt, Artificial Sequence
  Description of Artificial Sequence: Synthetic oligonucleotide
  Sense strand starting at position 2028 of SEQ ID NO: 1887588
cugaaauucucgucuggcu

SEQ ID NO: 2483035 - RNA, 19 nt, Artificial Sequence
  Description of Artificial Sequence: Synthetic oligonucleotide
  Antisense strand to SEQ ID NO: 2483034
agccagacgagaauuucag

SEQ ID NO: 2483036 - RNA, 19 nt, Artificial Sequence
  Description of Artificial Sequence: Synthetic oligonucleotide
  Sense strand starting at position 2041 of SEQ ID NO: 1887588
cuggcugguaccugaauua

SEQ ID NO: 2483037 - RNA, 19 nt, Artificial Sequence
  Description of Artificial Sequence: Synthetic oligonucleotide
  Antisense strand to SEQ ID NO: 2483036
uaauucagguaccagccag

SEQ ID NO: 2483038 - RNA, 19 nt, Artificial Sequence
  Description of Artificial Sequence: Synthetic oligonucleotide
  Sense strand starting at position 2199 of SEQ ID NO: 1887588
agcaguaauuuguaaguuu

SEQ ID NO: 2483039 - RNA, 19 nt, Artificial Sequence
  Description of Artificial Sequence: Synthetic oligonucleotide
  Antisense strand to SEQ ID NO: 2483038
aaacuuacaaauuacugcu

SEQ ID NO: 2483040 - RNA, 19 nt, Artificial Sequence
  Description of Artificial Sequence: Synthetic oligonucleotide
  Sense strand starting at position 2545 of SEQ ID NO: 1887588
cgccguaauugauaaguuu

SEQ ID NO: 2483041 - RNA, 19 nt, Artificial Sequence
  Description of Artificial Sequence: Synthetic oligonucleotide
  Antisense strand to SEQ ID NO: 2483040
aaacuuaucaauuacggcg

SEQ ID NO: 2483042 - RNA, 19 nt, Artificial Sequence
  Description of Artificial Sequence: Synthetic oligonucleotide
  Sense strand starting at position 2637 of SEQ ID NO: 1887588
guguguccaugcugugaac

SEQ ID NO: 2483043 - RNA, 19 nt, Artificial Sequence
  Description of Artificial Sequence: Synthetic oligonucleotide
  Antisense strand to SEQ ID NO: 2483042
guucacagcauggacacac

SEQ ID NO: 2483044 - RNA, 19 nt, Artificial Sequence
  Description of Artificial Sequence: Synthetic oligonucleotide
  Sense strand starting at position 2713 of SEQ ID NO: 1887588
uguauagggacugguacua

SEQ ID NO: 2483045 - RNA, 19 nt, Artificial Sequence
  Description of Artificial Sequence: Synthetic oligonucleotide
  Antisense strand to SEQ ID NO: 2483044
uaguaccagucccuauaca

SEQ ID NO: 2483046 - RNA, 19 nt, Artificial Sequence
  Description of Artificial Sequence: Synthetic oligonucleotide
  Sense strand starting at position 2733 of SEQ ID NO: 1887588
ccgcgguuucgggcaugua

SEQ ID NO: 2483047 - RNA, 19 nt, Artificial Sequence
  Description of Artificial Sequence: Synthetic oligonucleotide
  Antisense strand to SEQ ID NO: 2483046
uacaugcccgaaaccgcgg

SEQ ID NO: 2483048 - RNA, 19 nt, Artificial Sequence
  Description of Artificial Sequence: Synthetic oligonucleotide
  Sense strand starting at position 2943 of SEQ ID NO: 1887588
caagcauagucccgaugga

SEQ ID NO: 2483049 - RNA, 19 nt, Artificial Sequence
  Description of Artificial Sequence: Synthetic oligonucleotide
  Antisense strand to SEQ ID NO: 2483048
uccaucgggacuaugcuug

SEQ ID NO: 2483050 - RNA, 19 nt, Artificial Sequence
  Description of Artificial Sequence: Synthetic oligonucleotide
  Sense strand starting at position 2997 of SEQ ID NO: 1887588
aagccaugauugcuauagu

SEQ ID NO: 2483051 - RNA, 19 nt, Artificial Sequence
  Description of Artificial Sequence: Synthetic oligonucleotide
  Antisense strand to SEQ ID NO: 2483050
acuauagcaaucauggcuu

SEQ ID NO: 2483052 - RNA, 19 nt, Artificial Sequence
  Description of Artificial Sequence: Synthetic oligonucleotide
  Sense strand starting at position 2998 of SEQ ID NO: 1887588
agccaugauugcuauaguc

SEQ ID NO: 2483053 - RNA, 19 nt, Artificial Sequence
  Description of Artificial Sequence: Synthetic oligonucleotide
  Antisense strand to SEQ ID NO: 2483052
gacuauagcaaucauggcu

SEQ ID NO: 2483054 - RNA, 19 nt, Artificial Sequence
  Description of Artificial Sequence: Synthetic oligonucleotide
  Sense strand starting at position 3000 of SEQ ID NO: 1887588
ccaugauugcuauagucag

SEQ ID NO: 2483055 - RNA, 19 nt, Artificial Sequence
  Description of Artificial Sequence: Synthetic oligonucleotide
  Antisense strand to SEQ ID NO: 2483054
cugacuauagcaaucaugg

SEQ ID NO: 2483056 - RNA, 19 nt, Artificial Sequence
  Description of Artificial Sequence: Synthetic oligonucleotide
  Sense strand starting at position 3006 of SEQ ID NO: 1887588
uugcuauagucagggcuca

SEQ ID NO: 2483057 - RNA, 19 nt, Artificial Sequence
  Description of Artificial Sequence: Synthetic oligonucleotide
  Antisense strand to SEQ ID NO: 2483056
ugagcccugacuauagcaa

SEQ ID NO: 2483058 - RNA, 19 nt, Artificial Sequence
  Description of Artificial Sequence: Synthetic oligonucleotide
  Sense strand starting at position 3007 of SEQ ID NO: 1887588
ugcuauagucagggcucaa

SEQ ID NO: 2483059 - RNA, 19 nt, Artificial Sequence
  Description of Artificial Sequence: Synthetic oligonucleotide
  Antisense strand to SEQ ID NO: 2483058
uugagcccugacuauagca

SEQ ID NO: 2483060 - RNA, 19 nt, Artificial Sequence
  Description of Artificial Sequence: Synthetic oligonucleotide
  Sense strand starting at position 3028 of SEQ ID NO: 1887588
cagggugaguuccaauguu

SEQ ID NO: 2483061 - RNA, 19 nt, Artificial Sequence
  Description of Artificial Sequence: Synthetic oligonucleotide
  Antisense strand to SEQ ID NO: 2483060
aacauuggaacucacccug

SEQ ID NO: 2483062 - RNA, 19 nt, Artificial Sequence
  Description of Artificial Sequence: Synthetic oligonucleotide
  Sense strand starting at position 3058 of SEQ ID NO: 1887588
gagggugacugucguuaac

SEQ ID NO: 2483063 - RNA, 19 nt, Artificial Sequence
  Description of Artificial Sequence: Synthetic oligonucleotide
  Antisense strand to SEQ ID NO: 2483062
guuaacgacagucacccuc

SEQ ID NO: 2483064 - RNA, 19 nt, Artificial Sequence
  Description of Artificial Sequence: Synthetic oligonucleotide
  Sense strand starting at position 3060 of SEQ ID NO: 1887588
gggugacugucguuaacaa

SEQ ID NO: 2483065 - RNA, 19 nt, Artificial Sequence
  Description of Artificial Sequence: Synthetic oligonucleotide
  Antisense strand to SEQ ID NO: 2483064
uuguuaacgacagucaccc

SEQ ID NO: 2483066 - RNA, 19 nt, Artificial Sequence
  Description of Artificial Sequence: Synthetic oligonucleotide
  Sense strand starting at position 3061 of SEQ ID NO: 1887588
ggugacugucguuaacaac

SEQ ID NO: 2483067 - RNA, 19 nt, Artificial Sequence
  Description of Artificial Sequence: Synthetic oligonucleotide
  Antisense strand to SEQ ID NO: 2483066
guuguuaacgacagucacc

SEQ ID NO: 2483068 - RNA, 19 nt, Artificial Sequence
  Description of Artificial Sequence: Synthetic oligonucleotide
  Sense strand starting at position 3064 of SEQ ID NO: 1887588
gacugucguuaacaacuua

SEQ ID NO: 2483069 - RNA, 19 nt, Artificial Sequence
  Description of Artificial Sequence: Synthetic oligonucleotide
  Antisense strand to SEQ ID NO: 2483068
uaaguuguuaacgacaguc

SEQ ID NO: 2483070 - RNA, 19 nt, Artificial Sequence
  Description of Artificial Sequence: Synthetic oligonucleotide
  Sense strand starting at position 3387 of SEQ ID NO: 1887588
uucccaaugcaaggaaaua

SEQ ID NO: 2483071 - RNA, 19 nt, Artificial Sequence
  Description of Artificial Sequence: Synthetic oligonucleotide
  Antisense strand to SEQ ID NO: 2483070
uauuuccuugcauugggaa

SEQ ID NO: 2483072 - RNA, 19 nt, Artificial Sequence
  Description of Artificial Sequence: Synthetic oligonucleotide
  Sense strand starting at position 3404 of SEQ ID NO: 1887588
uaaucaauguuugaaguga

SEQ ID NO: 2483073 - RNA, 19 nt, Artificial Sequence
  Description of Artificial Sequence: Synthetic oligonucleotide
  Antisense strand to SEQ ID NO: 2483072
ucacuucaaacauugauua

SEQ ID NO: 2483074 - RNA, 19 nt, Artificial Sequence
  Description of Artificial Sequence: Synthetic oligonucleotide
  Sense strand starting at position 3408 of SEQ ID NO: 1887588
caauguuugaagugauggu

SEQ ID NO: 2483075 - RNA, 19 nt, Artificial Sequence
  Description of Artificial Sequence: Synthetic oligonucleotide
  Antisense strand to SEQ ID NO: 2483074
accaucacuucaaacauug

SEQ ID NO: 2483076 - RNA, 19 nt, Artificial Sequence
  Description of Artificial Sequence: Synthetic oligonucleotide
  Sense strand starting at position 3412 of SEQ ID NO: 1887588
guuugaagugaugguuaug

SEQ ID NO: 2483077 - RNA, 19 nt, Artificial Sequence
  Description of Artificial Sequence: Synthetic oligonucleotide
  Antisense strand to SEQ ID NO: 2483076
cauaaccaucacuucaaac

SEQ ID NO: 2483078 - RNA, 19 nt, Artificial Sequence
  Description of Artificial Sequence: Synthetic oligonucleotide
  Sense strand starting at position 3417 of SEQ ID NO: 1887588
aagugaugguuaugauauu

SEQ ID NO: 2483079 - RNA, 19 nt, Artificial Sequence
  Description of Artificial Sequence: Synthetic oligonucleotide
  Antisense strand to SEQ ID NO: 2483078
aauaucauaaccaucacuu

SEQ ID NO: 2483080 - RNA, 19 nt, Artificial Sequence
  Description of Artificial Sequence: Synthetic oligonucleotide
  Sense strand starting at position 3418 of SEQ ID NO: 1887588
agugaugguuaugauauua

SEQ ID NO: 2483081 - RNA, 19 nt, Artificial Sequence
  Description of Artificial Sequence: Synthetic oligonucleotide
  Antisense strand to SEQ ID NO: 2483080
uaauaucauaaccaucacu

SEQ ID NO: 2483082 - RNA, 19 nt, Artificial Sequence
  Description of Artificial Sequence: Synthetic oligonucleotide
  Sense strand starting at position 26 of SEQ ID NO: 1887589
cccagugugcugcauugua

SEQ ID NO: 2483083 - RNA, 19 nt, Artificial Sequence
  Description of Artificial Sequence: Synthetic oligonucleotide
  Antisense strand to SEQ ID NO: 2483082
uacaaugcagcacacuggg

SEQ ID NO: 2483084 - RNA, 19 nt, Artificial Sequence
  Description of Artificial Sequence: Synthetic oligonucleotide
  Sense strand starting at position 69 of SEQ ID NO: 1887589
gagugugagcuauggagaa

SEQ ID NO: 2483085 - RNA, 19 nt, Artificial Sequence
  Description of Artificial Sequence: Synthetic oligonucleotide
  Antisense strand to SEQ ID NO: 2483084
uucuccauagcucacacuc

SEQ ID NO: 2483086 - RNA, 19 nt, Artificial Sequence
  Description of Artificial Sequence: Synthetic oligonucleotide
  Sense strand starting at position 71 of SEQ ID NO: 1887589
gugugagcuauggagaaga

SEQ ID NO: 2483087 - RNA, 19 nt, Artificial Sequence
  Description of Artificial Sequence: Synthetic oligonucleotide
  Antisense strand to SEQ ID NO: 2483086
ucuucuccauagcucacac

SEQ ID NO: 2483088 - RNA, 19 nt, Artificial Sequence
  Description of Artificial Sequence: Synthetic oligonucleotide
  Sense strand starting at position 179 of SEQ ID NO: 1887589
guuuaugccaagugaaaug

SEQ ID NO: 2483089 - RNA, 19 nt, Artificial Sequence
  Description of Artificial Sequence: Synthetic oligonucleotide
  Antisense strand to SEQ ID NO: 2483088
cauuucacuuggcauaaac

SEQ ID NO: 2483090 - RNA, 19 nt, Artificial Sequence
  Description of Artificial Sequence: Synthetic oligonucleotide
  Sense strand starting at position 237 of SEQ ID NO: 1887589
ugauuucccugagaaggau

SEQ ID NO: 2483091 - RNA, 19 nt, Artificial Sequence
  Description of Artificial Sequence: Synthetic oligonucleotide
  Antisense strand to SEQ ID NO: 2483090
auccuucucagggaaauca

SEQ ID NO: 2483092 - RNA, 19 nt, Artificial Sequence
  Description of Artificial Sequence: Synthetic oligonucleotide
  Sense strand starting at position 246 of SEQ ID NO: 1887589
ugagaaggaucucuuuguc

SEQ ID NO: 2483093 - RNA, 19 nt, Artificial Sequence
  Description of Artificial Sequence: Synthetic oligonucleotide
  Antisense strand to SEQ ID NO: 2483092
gacaaagagauccuucuca

SEQ ID NO: 2483094 - RNA, 19 nt, Artificial Sequence
  Description of Artificial Sequence: Synthetic oligonucleotide
  Sense strand starting at position 249 of SEQ ID NO: 1887589
gaaggaucucuuugucaug

SEQ ID NO: 2483095 - RNA, 19 nt, Artificial Sequence
  Description of Artificial Sequence: Synthetic oligonucleotide
  Antisense strand to SEQ ID NO: 2483094
caugacaaagagauccuuc

SEQ ID NO: 2483096 - RNA, 19 nt, Artificial Sequence
  Description of Artificial Sequence: Synthetic oligonucleotide
  Sense strand starting at position 251 of SEQ ID NO: 1887589
aggaucucuuugucauguu

SEQ ID NO: 2483097 - RNA, 19 nt, Artificial Sequence
  Description of Artificial Sequence: Synthetic oligonucleotide
  Antisense strand to SEQ ID NO: 2483096
aacaugacaaagagauccu

SEQ ID NO: 2483098 - RNA, 19 nt, Artificial Sequence
  Description of Artificial Sequence: Synthetic oligonucleotide
  Sense strand starting at position 254 of SEQ ID NO: 1887589
aucucuuugucauguugag

SEQ ID NO: 2483099 - RNA, 19 nt, Artificial Sequence
  Description of Artificial Sequence: Synthetic oligonucleotide
  Antisense strand to SEQ ID NO: 2483098
cucaacaugacaaagagau

SEQ ID NO: 2483100 - RNA, 19 nt, Artificial Sequence
  Description of Artificial Sequence: Synthetic oligonucleotide
  Sense strand starting at position 258 of SEQ ID NO: 1887589
cuuugucauguugagaacu

SEQ ID NO: 2483101 - RNA, 19 nt, Artificial Sequence
  Description of Artificial Sequence: Synthetic oligonucleotide
  Antisense strand to SEQ ID NO: 2483100
aguucucaacaugacaaag

SEQ ID NO: 2483102 - RNA, 19 nt, Artificial Sequence
  Description of Artificial Sequence: Synthetic oligonucleotide
  Sense strand starting at position 260 of SEQ ID NO: 1887589
uugucauguugagaacuga

SEQ ID NO: 2483103 - RNA, 19 nt, Artificial Sequence
  Description of Artificial Sequence: Synthetic oligonucleotide
  Antisense strand to SEQ ID NO: 2483102
ucaguucucaacaugacaa

SEQ ID NO: 2483104 - RNA, 19 nt, Artificial Sequence
  Description of Artificial Sequence: Synthetic oligonucleotide
  Sense strand starting at position 281 of SEQ ID NO: 1887589
ccuagaaagugucuaguac

SEQ ID NO: 2483105 - RNA, 19 nt, Artificial Sequence
  Description of Artificial Sequence: Synthetic oligonucleotide
  Antisense strand to SEQ ID NO: 2483104
guacuagacacuuucuagg

SEQ ID NO: 2483106 - RNA, 19 nt, Artificial Sequence
  Description of Artificial Sequence: Synthetic oligonucleotide
  Sense strand starting at position 282 of SEQ ID NO: 1887589
cuagaaagugucuaguaca

SEQ ID NO: 2483107 - RNA, 19 nt, Artificial Sequence
  Description of Artificial Sequence: Synthetic oligonucleotide
  Antisense strand to SEQ ID NO: 2483106
uguacuagacacuuucuag

SEQ ID NO: 2483108 - RNA, 19 nt, Artificial Sequence
  Description of Artificial Sequence: Synthetic oligonucleotide
  Sense strand starting at position 287 of SEQ ID NO: 1887589
aagugucuaguacauggaa

SEQ ID NO: 2483109 - RNA, 19 nt, Artificial Sequence
  Description of Artificial Sequence: Synthetic oligonucleotide
  Antisense strand to SEQ ID NO: 2483108
uuccauguacuagacacuu

SEQ ID NO: 2483110 - RNA, 19 nt, Artificial Sequence
  Description of Artificial Sequence: Synthetic oligonucleotide
  Sense strand starting at position 289 of SEQ ID NO: 1887589
gugucuaguacauggaaag

SEQ ID NO: 2483111 - RNA, 19 nt, Artificial Sequence
  Description of Artificial Sequence: Synthetic oligonucleotide
  Antisense strand to SEQ ID NO: 2483110
cuuuccauguacuagacac

SEQ ID NO: 2483112 - RNA, 19 nt, Artificial Sequence
  Description of Artificial Sequence: Synthetic oligonucleotide
  Sense strand starting at position 323 of SEQ ID NO: 1887589
aucugucgcucuuagagua

SEQ ID NO: 2483113 - RNA, 19 nt, Artificial Sequence
  Description of Artificial Sequence: Synthetic oligonucleotide
  Antisense strand to SEQ ID NO: 2483112
uacucuaagagcgacagau

SEQ ID NO: 2483114 - RNA, 19 nt, Artificial Sequence
  Description of Artificial Sequence: Synthetic oligonucleotide
  Sense strand starting at position 385 of SEQ ID NO: 1887589
gcgguacagggauaaauua

SEQ ID NO: 2483115 - RNA, 19 nt, Artificial Sequence
  Description of Artificial Sequence: Synthetic oligonucleotide
  Antisense strand to SEQ ID NO: 2483114
uaauuuaucccuguaccgc

SEQ ID NO: 2483116 - RNA, 19 nt, Artificial Sequence
  Description of Artificial Sequence: Synthetic oligonucleotide
  Sense strand starting at position 430 of SEQ ID NO: 1887589
gggauucucccacgggcau

SEQ ID NO: 2483117 - RNA, 19 nt, Artificial Sequence
  Description of Artificial Sequence: Synthetic oligonucleotide
  Antisense strand to SEQ ID NO: 2483116
augcccgugggagaauccc

SEQ ID NO: 2483118 - RNA, 19 nt, Artificial Sequence
  Description of Artificial Sequence: Synthetic oligonucleotide
  Sense strand starting at position 547 of SEQ ID NO: 1887589
ucagaacccugcuuggaau

SEQ ID NO: 2483119 - RNA, 19 nt, Artificial Sequence
  Description of Artificial Sequence: Synthetic oligonucleotide
  Antisense strand to SEQ ID NO: 2483118
auuccaagcaggguucuga

SEQ ID NO: 2483120 - RNA, 19 nt, Artificial Sequence
  Description of Artificial Sequence: Synthetic oligonucleotide
  Sense strand starting at position 605 of SEQ ID NO: 1887589
gguccugaaucugcauaga

SEQ ID NO: 2483121 - RNA, 19 nt, Artificial Sequence
  Description of Artificial Sequence: Synthetic oligonucleotide
  Antisense strand to SEQ ID NO: 2483120
ucuaugcagauucaggacc

SEQ ID NO: 2483122 - RNA, 19 nt, Artificial Sequence
  Description of Artificial Sequence: Synthetic oligonucleotide
  Sense strand starting at position 696 of SEQ ID NO: 1887589
gguccaaagugguuucuaa

SEQ ID NO: 2483123 - RNA, 19 nt, Artificial Sequence
  Description of Artificial Sequence: Synthetic oligonucleotide
  Antisense strand to SEQ ID NO: 2483122
uuagaaaccacuuuggacc

SEQ ID NO: 2483124 - RNA, 19 nt, Artificial Sequence
  Description of Artificial Sequence: Synthetic oligonucleotide
  Sense strand starting at position 703 of SEQ ID NO: 1887589
agugguuucuaagggcaca

SEQ ID NO: 2483125 - RNA, 19 nt, Artificial Sequence
  Description of Artificial Sequence: Synthetic oligonucleotide
  Antisense strand to SEQ ID NO: 2483124
ugugcccuuagaaaccacu

SEQ ID NO: 2483126 - RNA, 19 nt, Artificial Sequence
  Description of Artificial Sequence: Synthetic oligonucleotide
  Sense strand starting at position 704 of SEQ ID NO: 1887589
gugguuucuaagggcacau

SEQ ID NO: 2483127 - RNA, 19 nt, Artificial Sequence
  Description of Artificial Sequence: Synthetic oligonucleotide
  Antisense strand to SEQ ID NO: 2483126
augugcccuuagaaaccac

SEQ ID NO: 2483128 - RNA, 19 nt, Artificial Sequence
  Description of Artificial Sequence: Synthetic oligonucleotide
  Sense strand starting at position 808 of SEQ ID NO: 1887589
ggaggaaaguccuauagga

SEQ ID NO: 2483129 - RNA, 19 nt, Artificial Sequence
  Description of Artificial Sequence: Synthetic oligonucleotide
  Antisense strand to SEQ ID NO: 2483128
uccuauaggacuuuccucc

SEQ ID NO: 2483130 - RNA, 19 nt, Artificial Sequence
  Description of Artificial Sequence: Synthetic oligonucleotide
  Sense strand starting at position 871 of SEQ ID NO: 1887589
gggcuugauagaugagcca

SEQ ID NO: 2483131 - RNA, 19 nt, Artificial Sequence
  Description of Artificial Sequence: Synthetic oligonucleotide
  Antisense strand to SEQ ID NO: 2483130
uggcucaucuaucaagccc

SEQ ID NO: 2483132 - RNA, 19 nt, Artificial Sequence
  Description of Artificial Sequence: Synthetic oligonucleotide
  Sense strand starting at position 908 of SEQ ID NO: 1887589
gagugacuccugggccaua

SEQ ID NO: 2483133 - RNA, 19 nt, Artificial Sequence
  Description of Artificial Sequence: Synthetic oligonucleotide
  Antisense strand to SEQ ID NO: 2483132
uauggcccaggagucacuc

SEQ ID NO: 2483134 - RNA, 19 nt, Artificial Sequence
  Description of Artificial Sequence: Synthetic oligonucleotide
  Sense strand starting at position 1500 of SEQ ID NO: 1887589
ucgcuuugcaccgggcaaa

SEQ ID NO: 2483135 - RNA, 19 nt, Artificial Sequence
  Description of Artificial Sequence: Synthetic oligonucleotide
  Antisense strand to SEQ ID NO: 2483134
uuugcccggugcaaagcga

SEQ ID NO: 2483136 - RNA, 19 nt, Artificial Sequence
  Description of Artificial Sequence: Synthetic oligonucleotide
  Sense strand starting at position 3380 of SEQ ID NO: 1887589
gaccgacugccucgcuuua

SEQ ID NO: 2483137 - RNA, 19 nt, Artificial Sequence
  Description of Artificial Sequence: Synthetic oligonucleotide
  Antisense strand to SEQ ID NO: 2483136
uaaagcgaggcagucgguc

SEQ ID NO: 2483138 - RNA, 19 nt, Artificial Sequence
  Description of Artificial Sequence: Synthetic oligonucleotide
  Sense strand starting at position 96 of SEQ ID NO: 1887590
cugugugucgcguuaaugu

SEQ ID NO: 2483139 - RNA, 19 nt, Artificial Sequence
  Description of Artificial Sequence: Synthetic oligonucleotide
  Antisense strand to SEQ ID NO: 2483138
acauuaacgcgacacacag

SEQ ID NO: 2483140 - RNA, 19 nt, Artificial Sequence
  Description of Artificial Sequence: Synthetic oligonucleotide
  Sense strand starting at position 98 of SEQ ID NO: 1887590
gugugucgcguuaauguca

SEQ ID NO: 2483141 - RNA, 19 nt, Artificial Sequence
  Description of Artificial Sequence: Synthetic oligonucleotide
  Antisense strand to SEQ ID NO: 2483140
ugacauuaacgcgacacac

SEQ ID NO: 2483142 - RNA, 19 nt, Artificial Sequence
  Description of Artificial Sequence: Synthetic oligonucleotide
  Sense strand starting at position 101 of SEQ ID NO: 1887590
ugucgcguuaaugucagaa

SEQ ID NO: 2483143 - RNA, 19 nt, Artificial Sequence
  Description of Artificial Sequence: Synthetic oligonucleotide
  Antisense strand to SEQ ID NO: 2483142
uucugacauuaacgcgaca

SEQ ID NO: 2483144 - RNA, 19 nt, Artificial Sequence
  Description of Artificial Sequence: Synthetic oligonucleotide
  Sense strand starting at position 105 of SEQ ID NO: 1887590
gcguuaaugucagaagcac

SEQ ID NO: 2483145 - RNA, 19 nt, Artificial Sequence
  Description of Artificial Sequence: Synthetic oligonucleotide
  Antisense strand to SEQ ID NO: 2483144
gugcuucugacauuaacgc

SEQ ID NO: 2483146 - RNA, 19 nt, Artificial Sequence
  Description of Artificial Sequence: Synthetic oligonucleotide
  Sense strand starting at position 234 of SEQ ID NO: 1887590
gcaucugcagucugugagu

SEQ ID NO: 2483147 - RNA, 19 nt, Artificial Sequence
  Description of Artificial Sequence: Synthetic oligonucleotide
  Antisense strand to SEQ ID NO: 2483146
acucacagacugcagaugc

SEQ ID NO: 2483148 - RNA, 19 nt, Artificial Sequence
  Description of Artificial Sequence: Synthetic oligonucleotide
  Sense strand starting at position 322 of SEQ ID NO: 1887590
guagaccugucucagaacu

SEQ ID NO: 2483149 - RNA, 19 nt, Artificial Sequence
  Description of Artificial Sequence: Synthetic oligonucleotide
  Antisense strand to SEQ ID NO: 2483148
aguucugagacaggucuac

SEQ ID NO: 2483150 - RNA, 19 nt, Artificial Sequence
  Description of Artificial Sequence: Synthetic oligonucleotide
  Sense strand starting at position 324 of SEQ ID NO: 1887590
agaccugucucagaacuag

SEQ ID NO: 2483151 - RNA, 19 nt, Artificial Sequence
  Description of Artificial Sequence: Synthetic oligonucleotide
  Antisense strand to SEQ ID NO: 2483150
cuaguucugagacaggucu

SEQ ID NO: 2483152 - RNA, 19 nt, Artificial Sequence
  Description of Artificial Sequence: Synthetic oligonucleotide
  Sense strand starting at position 505 of SEQ ID NO: 1887590
ggaauuggcugcccuguua

SEQ ID NO: 2483153 - RNA, 19 nt, Artificial Sequence
  Description of Artificial Sequence: Synthetic oligonucleotide
  Antisense strand to SEQ ID NO: 2483152
uaacagggcagccaauucc

SEQ ID NO: 2483154 - RNA, 19 nt, Artificial Sequence
  Description of Artificial Sequence: Synthetic oligonucleotide
  Sense strand starting at position 517 of SEQ ID NO: 1887590
ccuguuaauuucugugaca

SEQ ID NO: 2483155 - RNA, 19 nt, Artificial Sequence
  Description of Artificial Sequence: Synthetic oligonucleotide
  Antisense strand to SEQ ID NO: 2483154
ugucacagaaauuaacagg

SEQ ID NO: 2483156 - RNA, 19 nt, Artificial Sequence
  Description of Artificial Sequence: Synthetic oligonucleotide
  Sense strand starting at position 618 of SEQ ID NO: 1887590
aggugagaauucucuguaa

SEQ ID NO: 2483157 - RNA, 19 nt, Artificial Sequence
  Description of Artificial Sequence: Synthetic oligonucleotide
  Antisense strand to SEQ ID NO: 2483156
uuacagagaauucucaccu

SEQ ID NO: 2483158 - RNA, 19 nt, Artificial Sequence
  Description of Artificial Sequence: Synthetic oligonucleotide
  Sense strand starting at position 620 of SEQ ID NO: 1887590
gugagaauucucuguaauu

SEQ ID NO: 2483159 - RNA, 19 nt, Artificial Sequence
  Description of Artificial Sequence: Synthetic oligonucleotide
  Antisense strand to SEQ ID NO: 2483158
aauuacagagaauucucac

SEQ ID NO: 2483160 - RNA, 19 nt, Artificial Sequence
  Description of Artificial Sequence: Synthetic oligonucleotide
  Sense strand starting at position 621 of SEQ ID NO: 1887590
ugagaauucucuguaauuc

SEQ ID NO: 2483161 - RNA, 19 nt, Artificial Sequence
  Description of Artificial Sequence: Synthetic oligonucleotide
  Antisense strand to SEQ ID NO: 2483160
gaauuacagagaauucuca

SEQ ID NO: 2483162 - RNA, 19 nt, Artificial Sequence
  Description of Artificial Sequence: Synthetic oligonucleotide
  Sense strand starting at position 633 of SEQ ID NO: 1887590
guaauuccaucuugacugu

SEQ ID NO: 2483163 - RNA, 19 nt, Artificial Sequence
  Description of Artificial Sequence: Synthetic oligonucleotide
  Antisense strand to SEQ ID NO: 2483162
acagucaagauggaauuac

SEQ ID NO: 2483164 - RNA, 19 nt, Artificial Sequence
  Description of Artificial Sequence: Synthetic oligonucleotide
  Sense strand starting at position 658 of SEQ ID NO: 1887590
gauggauucuguuaccauu

SEQ ID NO: 2483165 - RNA, 19 nt, Artificial Sequence
  Description of Artificial Sequence: Synthetic oligonucleotide
  Antisense strand to SEQ ID NO: 2483164
aaugguaacagaauccauc

SEQ ID NO: 2483166 - RNA, 19 nt, Artificial Sequence
  Description of Artificial Sequence: Synthetic oligonucleotide
  Sense strand starting at position 752 of SEQ ID NO: 1887590
ggaguccucccucagcauu

SEQ ID NO: 2483167 - RNA, 19 nt, Artificial Sequence
  Description of Artificial Sequence: Synthetic oligonucleotide
  Antisense strand to SEQ ID NO: 2483166
aaugcugagggaggacucc

SEQ ID NO: 2483168 - RNA, 19 nt, Artificial Sequence
  Description of Artificial Sequence: Synthetic oligonucleotide
  Sense strand starting at position 781 of SEQ ID NO: 1887590
gcauccauccugcagucau

SEQ ID NO: 2483169 - RNA, 19 nt, Artificial Sequence
  Description of Artificial Sequence: Synthetic oligonucleotide
  Antisense strand to SEQ ID NO: 2483168
augacugcaggauggaugc

SEQ ID NO: 2483170 - RNA, 19 nt, Artificial Sequence
  Description of Artificial Sequence: Synthetic oligonucleotide
  Sense strand starting at position 858 of SEQ ID NO: 1887590
gugugugcuuaauuguuca

SEQ ID NO: 2483171 - RNA, 19 nt, Artificial Sequence
  Description of Artificial Sequence: Synthetic oligonucleotide
  Antisense strand to SEQ ID NO: 2483170
ugaacaauuaagcacacac

SEQ ID NO: 2483172 - RNA, 19 nt, Artificial Sequence
  Description of Artificial Sequence: Synthetic oligonucleotide
  Sense strand starting at position 901 of SEQ ID NO: 1887590
agcagagaugccugugauu

SEQ ID NO: 2483173 - RNA, 19 nt, Artificial Sequence
  Description of Artificial Sequence: Synthetic oligonucleotide
  Antisense strand to SEQ ID NO: 2483172
aaucacaggcaucucugcu

SEQ ID NO: 2483174 - RNA, 19 nt, Artificial Sequence
  Description of Artificial Sequence: Synthetic oligonucleotide
  Sense strand starting at position 932 of SEQ ID NO: 1887590
ggaggacucguacaaguag

SEQ ID NO: 2483175 - RNA, 19 nt, Artificial Sequence
  Description of Artificial Sequence: Synthetic oligonucleotide
  Antisense strand to SEQ ID NO: 2483174
cuacuuguacgaguccucc

SEQ ID NO: 2483176 - RNA, 19 nt, Artificial Sequence
  Description of Artificial Sequence: Synthetic oligonucleotide
  Sense strand starting at position 1063 of SEQ ID NO: 1887590
gaaggauuaugguggccaa

SEQ ID NO: 2483177 - RNA, 19 nt, Artificial Sequence
  Description of Artificial Sequence: Synthetic oligonucleotide
  Antisense strand to SEQ ID NO: 2483176
uuggccaccauaauccuuc

SEQ ID NO: 2483178 - RNA, 19 nt, Artificial Sequence
  Description of Artificial Sequence: Synthetic oligonucleotide
  Sense strand starting at position 1066 of SEQ ID NO: 1887590
ggauuaugguggccaagag

SEQ ID NO: 2483179 - RNA, 19 nt, Artificial Sequence
  Description of Artificial Sequence: Synthetic oligonucleotide
  Antisense strand to SEQ ID NO: 2483178
cucuuggccaccauaaucc

SEQ ID NO: 2483180 - RNA, 19 nt, Artificial Sequence
  Description of Artificial Sequence: Synthetic oligonucleotide
  Sense strand starting at position 1078 of SEQ ID NO: 1887590
ccaagagccuucuuaaggu

SEQ ID NO: 2483181 - RNA, 19 nt, Artificial Sequence
  Description of Artificial Sequence: Synthetic oligonucleotide
  Antisense strand to SEQ ID NO: 2483180
accuuaagaaggcucuugg

SEQ ID NO: 2483182 - RNA, 19 nt, Artificial Sequence
  Description of Artificial Sequence: Synthetic oligonucleotide
  Sense strand starting at position 1082 of SEQ ID NO: 1887590
gagccuucuuaagguugau

SEQ ID NO: 2483183 - RNA, 19 nt, Artificial Sequence
  Description of Artificial Sequence: Synthetic oligonucleotide
  Antisense strand to SEQ ID NO: 2483182
aucaaccuuaagaaggcuc

SEQ ID NO: 2483184 - RNA, 19 nt, Artificial Sequence
  Description of Artificial Sequence: Synthetic oligonucleotide
  Sense strand starting at position 1102 of SEQ ID NO: 1887590
uuuaaauaugcauagguga

SEQ ID NO: 2483185 - RNA, 19 nt, Artificial Sequence
  Description of Artificial Sequence: Synthetic oligonucleotide
  Antisense strand to SEQ ID NO: 2483184
ucaccuaugcauauuuaaa

SEQ ID NO: 2483186 - RNA, 19 nt, Artificial Sequence
  Description of Artificial Sequence: Synthetic oligonucleotide
  Sense strand starting at position 1105 of SEQ ID NO: 1887590
aaauaugcauaggugaaga

SEQ ID NO: 2483187 - RNA, 19 nt, Artificial Sequence
  Description of Artificial Sequence: Synthetic oligonucleotide
  Antisense strand to SEQ ID NO: 2483186
ucuucaccuaugcauauuu

SEQ ID NO: 2483188 - RNA, 19 nt, Artificial Sequence
  Description of Artificial Sequence: Synthetic oligonucleotide
  Sense strand starting at position 1160 of SEQ ID NO: 1887590
cuuuauagagugugaccua

SEQ ID NO: 2483189 - RNA, 19 nt, Artificial Sequence
  Description of Artificial Sequence: Synthetic oligonucleotide
  Antisense strand to SEQ ID NO: 2483188
uaggucacacucuauaaag

SEQ ID NO: 2483190 - RNA, 19 nt, Artificial Sequence
  Description of Artificial Sequence: Synthetic oligonucleotide
  Sense strand starting at position 1161 of SEQ ID NO: 1887590
uuuauagagugugaccuaa

SEQ ID NO: 2483191 - RNA, 19 nt, Artificial Sequence
  Description of Artificial Sequence: Synthetic oligonucleotide
  Antisense strand to SEQ ID NO: 2483190
uuaggucacacucuauaaa

SEQ ID NO: 2483192 - RNA, 19 nt, Artificial Sequence
  Description of Artificial Sequence: Synthetic oligonucleotide
  Sense strand starting at position 1163 of SEQ ID NO: 1887590
uauagagugugaccuaaau

SEQ ID NO: 2483193 - RNA, 19 nt, Artificial Sequence
  Description of Artificial Sequence: Synthetic oligonucleotide
  Antisense strand to SEQ ID NO: 2483192
auuuaggucacacucuaua

SEQ ID NO: 2483194 - RNA, 19 nt, Artificial Sequence
  Description of Artificial Sequence: Synthetic oligonucleotide
  Sense strand starting at position 1268 of SEQ ID NO: 1887590
ggccuaacucugcacugau

SEQ ID NO: 2483195 - RNA, 19 nt, Artificial Sequence
  Description of Artificial Sequence: Synthetic oligonucleotide
  Antisense strand to SEQ ID NO: 2483194
aucagugcagaguuaggcc

SEQ ID NO: 2483196 - RNA, 19 nt, Artificial Sequence
  Description of Artificial Sequence: Synthetic oligonucleotide
  Sense strand starting at position 1271 of SEQ ID NO: 1887590
cuaacucugcacugaugaa

SEQ ID NO: 2483197 - RNA, 19 nt, Artificial Sequence
  Description of Artificial Sequence: Synthetic oligonucleotide
  Antisense strand to SEQ ID NO: 2483196
uucaucagugcagaguuag

SEQ ID NO: 2483198 - RNA, 19 nt, Artificial Sequence
  Description of Artificial Sequence: Synthetic oligonucleotide
  Sense strand starting at position 1317 of SEQ ID NO: 1887590
gugcuuguuacccaggcua

SEQ ID NO: 2483199 - RNA, 19 nt, Artificial Sequence
  Description of Artificial Sequence: Synthetic oligonucleotide
  Antisense strand to SEQ ID NO: 2483198
uagccuggguaacaagcac

SEQ ID NO: 2483200 - RNA, 19 nt, Artificial Sequence
  Description of Artificial Sequence: Synthetic oligonucleotide
  Sense strand starting at position 1319 of SEQ ID NO: 1887590
gcuuguuacccaggcuaga

SEQ ID NO: 2483201 - RNA, 19 nt, Artificial Sequence
  Description of Artificial Sequence: Synthetic oligonucleotide
  Antisense strand to SEQ ID NO: 2483200
ucuagccuggguaacaagc

SEQ ID NO: 2483202 - RNA, 19 nt, Artificial Sequence
  Description of Artificial Sequence: Synthetic oligonucleotide
  Sense strand starting at position 1448 of SEQ ID NO: 1887590
gcgcuaacugucugguacu

SEQ ID NO: 2483203 - RNA, 19 nt, Artificial Sequence
  Description of Artificial Sequence: Synthetic oligonucleotide
  Antisense strand to SEQ ID NO: 2483202
aguaccagacaguuagcgc

SEQ ID NO: 2483204 - RNA, 19 nt, Artificial Sequence
  Description of Artificial Sequence: Synthetic oligonucleotide
  Sense strand starting at position 1480 of SEQ ID NO: 1887590
cgcggaguuucaucauguu

SEQ ID NO: 2483205 - RNA, 19 nt, Artificial Sequence
  Description of Artificial Sequence: Synthetic oligonucleotide
  Antisense strand to SEQ ID NO: 2483204
aacaugaugaaacuccgcg

SEQ ID NO: 2483206 - RNA, 19 nt, Artificial Sequence
  Description of Artificial Sequence: Synthetic oligonucleotide
  Sense strand starting at position 1498 of SEQ ID NO: 1887590
ugguuaggcuggugugauc

SEQ ID NO: 2483207 - RNA, 19 nt, Artificial Sequence
  Description of Artificial Sequence: Synthetic oligonucleotide
  Antisense strand to SEQ ID NO: 2483206
gaucacaccagccuaacca

SEQ ID NO: 2483208 - RNA, 19 nt, Artificial Sequence
  Description of Artificial Sequence: Synthetic oligonucleotide
  Sense strand starting at position 1583 of SEQ ID NO: 1887590
ucacuuugccaguaugcau

SEQ ID NO: 2483209 - RNA, 19 nt, Artificial Sequence
  Description of Artificial Sequence: Synthetic oligonucleotide
  Antisense strand to SEQ ID NO: 2483208
augcauacuggcaaaguga

SEQ ID NO: 2483210 - RNA, 19 nt, Artificial Sequence
  Description of Artificial Sequence: Synthetic oligonucleotide
  Sense strand starting at position 1590 of SEQ ID NO: 1887590
gccaguaugcauuguucuu

SEQ ID NO: 2483211 - RNA, 19 nt, Artificial Sequence
  Description of Artificial Sequence: Synthetic oligonucleotide
  Antisense strand to SEQ ID NO: 2483210
aagaacaaugcauacuggc

SEQ ID NO: 2483212 - RNA, 19 nt, Artificial Sequence
  Description of Artificial Sequence: Synthetic oligonucleotide
  Sense strand starting at position 1595 of SEQ ID NO: 1887590
uaugcauuguucuuagugu

SEQ ID NO: 2483213 - RNA, 19 nt, Artificial Sequence
  Description of Artificial Sequence: Synthetic oligonucleotide
  Antisense strand to SEQ ID NO: 2483212
acacuaagaacaaugcaua

SEQ ID NO: 2483214 - RNA, 19 nt, Artificial Sequence
  Description of Artificial Sequence: Synthetic oligonucleotide
  Sense strand starting at position 1606 of SEQ ID NO: 1887590
cuuagugucagccgcugaa

SEQ ID NO: 2483215 - RNA, 19 nt, Artificial Sequence
  Description of Artificial Sequence: Synthetic oligonucleotide
  Antisense strand to SEQ ID NO: 2483214
uucagcggcugacacuaag

SEQ ID NO: 2483216 - RNA, 19 nt, Artificial Sequence
  Description of Artificial Sequence: Synthetic oligonucleotide
  Sense strand starting at position 2647 of SEQ ID NO: 1887590
cugugucuuugaggcugua

SEQ ID NO: 2483217 - RNA, 19 nt, Artificial Sequence
  Description of Artificial Sequence: Synthetic oligonucleotide
  Antisense strand to SEQ ID NO: 2483216
uacagccucaaagacacag

SEQ ID NO: 2483218 - RNA, 19 nt, Artificial Sequence
  Description of Artificial Sequence: Synthetic oligonucleotide
  Sense strand starting at position 224 of SEQ ID NO: 1887591
gaaugaagucagggcaacu

SEQ ID NO: 2483219 - RNA, 19 nt, Artificial Sequence
  Description of Artificial Sequence: Synthetic oligonucleotide
  Antisense strand to SEQ ID NO: 2483218
aguugcccugacuucauuc

SEQ ID NO: 2483220 - RNA, 19 nt, Artificial Sequence
  Description of Artificial Sequence: Synthetic oligonucleotide
  Sense strand starting at position 469 of SEQ ID NO: 1887591
accuguaauuccggcgcau

SEQ ID NO: 2483221 - RNA, 19 nt, Artificial Sequence
  Description of Artificial Sequence: Synthetic oligonucleotide
  Antisense strand to SEQ ID NO: 2483220
augcgccggaauuacaggu

SEQ ID NO: 2483222 - RNA, 19 nt, Artificial Sequence
  Description of Artificial Sequence: Synthetic oligonucleotide
  Sense strand starting at position 470 of SEQ ID NO: 1887591
ccuguaauuccggcgcauu

SEQ ID NO: 2483223 - RNA, 19 nt, Artificial Sequence
  Description of Artificial Sequence: Synthetic oligonucleotide
  Antisense strand to SEQ ID NO: 2483222
aaugcgccggaauuacagg

SEQ ID NO: 2483224 - RNA, 19 nt, Artificial Sequence
  Description of Artificial Sequence: Synthetic oligonucleotide
  Sense strand starting at position 1244 of SEQ ID NO: 1887591
aggagaaucgugugaacug

SEQ ID NO: 2483225 - RNA, 19 nt, Artificial Sequence
  Description of Artificial Sequence: Synthetic oligonucleotide
  Antisense strand to SEQ ID NO: 2483224
caguucacacgauucuccu

SEQ ID NO: 2483226 - RNA, 19 nt, Artificial Sequence
  Description of Artificial Sequence: Synthetic oligonucleotide
  Sense strand starting at position 1630 of SEQ ID NO: 1887591
gcagcuuccucuuggguaa

SEQ ID NO: 2483227 - RNA, 19 nt, Artificial Sequence
  Description of Artificial Sequence: Synthetic oligonucleotide
  Antisense strand to SEQ ID NO: 2483226
uuacccaagaggaagcugc

SEQ ID NO: 2483228 - RNA, 19 nt, Artificial Sequence
  Description of Artificial Sequence: Synthetic oligonucleotide
  Sense strand starting at position 1915 of SEQ ID NO: 1887591
gucugauucugaguccuca

SEQ ID NO: 2483229 - RNA, 19 nt, Artificial Sequence
  Description of Artificial Sequence: Synthetic oligonucleotide
  Antisense strand to SEQ ID NO: 2483228
ugaggacucagaaucagac

SEQ ID NO: 2483230 - RNA, 19 nt, Artificial Sequence
  Description of Artificial Sequence: Synthetic oligonucleotide
  Sense strand starting at position 2161 of SEQ ID NO: 1887591
gaacuuagccacugugaac

SEQ ID NO: 2483231 - RNA, 19 nt, Artificial Sequence
  Description of Artificial Sequence: Synthetic oligonucleotide
  Antisense strand to SEQ ID NO: 2483230
guucacaguggcuaaguuc

SEQ ID NO: 2483232 - RNA, 19 nt, Artificial Sequence
  Description of Artificial Sequence: Synthetic oligonucleotide
  Sense strand starting at position 2303 of SEQ ID NO: 1887591
guuggaaaucccuggcaau

SEQ ID NO: 2483233 - RNA, 19 nt, Artificial Sequence
  Description of Artificial Sequence: Synthetic oligonucleotide
  Antisense strand to SEQ ID NO: 2483232
auugccagggauuuccaac

SEQ ID NO: 2483234 - RNA, 19 nt, Artificial Sequence
  Description of Artificial Sequence: Synthetic oligonucleotide
  Sense strand starting at position 2304 of SEQ ID NO: 1887591
uuggaaaucccuggcaaug

SEQ ID NO: 2483235 - RNA, 19 nt, Artificial Sequence
  Description of Artificial Sequence: Synthetic oligonucleotide
  Antisense strand to SEQ ID NO: 2483234
cauugccagggauuuccaa

SEQ ID NO: 2483236 - RNA, 19 nt, Artificial Sequence
  Description of Artificial Sequence: Synthetic oligonucleotide
  Sense strand starting at position 2309 of SEQ ID NO: 1887591
aaucccuggcaaugugauu

SEQ ID NO: 2483237 - RNA, 19 nt, Artificial Sequence
  Description of Artificial Sequence: Synthetic oligonucleotide
  Antisense strand to SEQ ID NO: 2483236
aaucacauugccagggauu

SEQ ID NO: 2483238 - RNA, 19 nt, Artificial Sequence
  Description of Artificial Sequence: Synthetic oligonucleotide
  Sense strand starting at position 2321 of SEQ ID NO: 1887591
ugugauuugugacaggaag

SEQ ID NO: 2483239 - RNA, 19 nt, Artificial Sequence
  Description of Artificial Sequence: Synthetic oligonucleotide
  Antisense strand to SEQ ID NO: 2483238
cuuccugucacaaaucaca

SEQ ID NO: 2483240 - RNA, 19 nt, Artificial Sequence
  Description of Artificial Sequence: Synthetic oligonucleotide
  Sense strand starting at position 2485 of SEQ ID NO: 1887591
cccagaugcuuccuuugau

SEQ ID NO: 2483241 - RNA, 19 nt, Artificial Sequence
  Description of Artificial Sequence: Synthetic oligonucleotide
  Antisense strand to SEQ ID NO: 2483240
aucaaaggaagcaucuggg

SEQ ID NO: 2483242 - RNA, 19 nt, Artificial Sequence
  Description of Artificial Sequence: Synthetic oligonucleotide
  Sense strand starting at position 2486 of SEQ ID NO: 1887591
ccagaugcuuccuuugauc

SEQ ID NO: 2483243 - RNA, 19 nt, Artificial Sequence
  Description of Artificial Sequence: Synthetic oligonucleotide
  Antisense strand to SEQ ID NO: 2483242
gaucaaaggaagcaucugg

SEQ ID NO: 2483244 - RNA, 19 nt, Artificial Sequence
  Description of Artificial Sequence: Synthetic oligonucleotide
  Sense strand starting at position 2488 of SEQ ID NO: 1887591
agaugcuuccuuugaucac

SEQ ID NO: 2483245 - RNA, 19 nt, Artificial Sequence
  Description of Artificial Sequence: Synthetic oligonucleotide
  Antisense strand to SEQ ID NO: 2483244
gugaucaaaggaagcaucu

SEQ ID NO: 2483246 - RNA, 19 nt, Artificial Sequence
  Description of Artificial Sequence: Synthetic oligonucleotide
  Sense strand starting at position 2494 of SEQ ID NO: 1887591
uuccuuugaucacagggaa

SEQ ID NO: 2483247 - RNA, 19 nt, Artificial Sequence
  Description of Artificial Sequence: Synthetic oligonucleotide
  Antisense strand to SEQ ID NO: 2483246
uucccugugaucaaaggaa

SEQ ID NO: 2483248 - RNA, 19 nt, Artificial Sequence
  Description of Artificial Sequence: Synthetic oligonucleotide
  Sense strand starting at position 2497 of SEQ ID NO: 1887591
cuuugaucacagggaagcu

SEQ ID NO: 2483249 - RNA, 19 nt, Artificial Sequence
  Description of Artificial Sequence: Synthetic oligonucleotide
  Antisense strand to SEQ ID NO: 2483248
agcuucccugugaucaaag

SEQ ID NO: 2483250 - RNA, 19 nt, Artificial Sequence
  Description of Artificial Sequence: Synthetic oligonucleotide
  Sense strand starting at position 3055 of SEQ ID NO: 1887591
ugcauagcccagugagaug

SEQ ID NO: 2483251 - RNA, 19 nt, Artificial Sequence
  Description of Artificial Sequence: Synthetic oligonucleotide
  Antisense strand to SEQ ID NO: 2483250
caucucacugggcuaugca

SEQ ID NO: 2483252 - RNA, 19 nt, Artificial Sequence
  Description of Artificial Sequence: Synthetic oligonucleotide
  Sense strand starting at position 3066 of SEQ ID NO: 1887591
gugagaugucaccgaguau

SEQ ID NO: 2483253 - RNA, 19 nt, Artificial Sequence
  Description of Artificial Sequence: Synthetic oligonucleotide
  Antisense strand to SEQ ID NO: 2483252
auacucggugacaucucac

SEQ ID NO: 2483254 - RNA, 19 nt, Artificial Sequence
  Description of Artificial Sequence: Synthetic oligonucleotide
  Sense strand starting at position 3067 of SEQ ID NO: 1887591
ugagaugucaccgaguaug

SEQ ID NO: 2483255 - RNA, 19 nt, Artificial Sequence
  Description of Artificial Sequence: Synthetic oligonucleotide
  Antisense strand to SEQ ID NO: 2483254
cauacucggugacaucuca

SEQ ID NO: 2483256 - RNA, 19 nt, Artificial Sequence
  Description of Artificial Sequence: Synthetic oligonucleotide
  Sense strand starting at position 3070 of SEQ ID NO: 1887591
gaugucaccgaguauguau

SEQ ID NO: 2483257 - RNA, 19 nt, Artificial Sequence
  Description of Artificial Sequence: Synthetic oligonucleotide
  Antisense strand to SEQ ID NO: 2483256
auacauacucggugacauc

SEQ ID NO: 2483258 - RNA, 19 nt, Artificial Sequence
  Description of Artificial Sequence: Synthetic oligonucleotide
  Sense strand starting at position 3081 of SEQ ID NO: 1887591
guauguaugucacucagua

SEQ ID NO: 2483259 - RNA, 19 nt, Artificial Sequence
  Description of Artificial Sequence: Synthetic oligonucleotide
  Antisense strand to SEQ ID NO: 2483258
uacugagugacauacauac

SEQ ID NO: 2483260 - RNA, 19 nt, Artificial Sequence
  Description of Artificial Sequence: Synthetic oligonucleotide
  Sense strand starting at position 3083 of SEQ ID NO: 1887591
auguaugucacucaguaag

SEQ ID NO: 2483261 - RNA, 19 nt, Artificial Sequence
  Description of Artificial Sequence: Synthetic oligonucleotide
  Antisense strand to SEQ ID NO: 2483260
cuuacugagugacauacau

SEQ ID NO: 2483262 - RNA, 19 nt, Artificial Sequence
  Description of Artificial Sequence: Synthetic oligonucleotide
  Sense strand starting at position 3157 of SEQ ID NO: 1887591
gugguccucuaguucgaaa

SEQ ID NO: 2483263 - RNA, 19 nt, Artificial Sequence
  Description of Artificial Sequence: Synthetic oligonucleotide
  Antisense strand to SEQ ID NO: 2483262
uuucgaacuagaggaccac

SEQ ID NO: 2483264 - RNA, 19 nt, Artificial Sequence
  Description of Artificial Sequence: Synthetic oligonucleotide
  Sense strand starting at position 119 of SEQ ID NO: 1887592
ccggaagucuugcuauaua

SEQ ID NO: 2483265 - RNA, 19 nt, Artificial Sequence
  Description of Artificial Sequence: Synthetic oligonucleotide
  Antisense strand to SEQ ID NO: 2483264
uauauagcaagacuuccgg

SEQ ID NO: 2483266 - RNA, 19 nt, Artificial Sequence
  Description of Artificial Sequence: Synthetic oligonucleotide
  Sense strand starting at position 201 of SEQ ID NO: 1887592
ggcucauauggccagaagu

SEQ ID NO: 2483267 - RNA, 19 nt, Artificial Sequence
  Description of Artificial Sequence: Synthetic oligonucleotide
  Antisense strand to SEQ ID NO: 2483266
acuucuggccauaugagcc

SEQ ID NO: 2483268 - RNA, 19 nt, Artificial Sequence
  Description of Artificial Sequence: Synthetic oligonucleotide
  Sense strand starting at position 203 of SEQ ID NO: 1887592
cucauauggccagaagugu

SEQ ID NO: 2483269 - RNA, 19 nt, Artificial Sequence
  Description of Artificial Sequence: Synthetic oligonucleotide
  Antisense strand to SEQ ID NO: 2483268
acacuucuggccauaugag

SEQ ID NO: 2483270 - RNA, 19 nt, Artificial Sequence
  Description of Artificial Sequence: Synthetic oligonucleotide
  Sense strand starting at position 256 of SEQ ID NO: 1887592
augguuacuuuaucagaac

SEQ ID NO: 2483271 - RNA, 19 nt, Artificial Sequence
  Description of Artificial Sequence: Synthetic oligonucleotide
  Antisense strand to SEQ ID NO: 2483270
guucugauaaaguaaccau

SEQ ID NO: 2483272 - RNA, 19 nt, Artificial Sequence
  Description of Artificial Sequence: Synthetic oligonucleotide
  Sense strand starting at position 310 of SEQ ID NO: 1887592
gacuuacucucagcaguag

SEQ ID NO: 2483273 - RNA, 19 nt, Artificial Sequence
  Description of Artificial Sequence: Synthetic oligonucleotide
  Antisense strand to SEQ ID NO: 2483272
cuacugcugagaguaaguc

SEQ ID NO: 2483274 - RNA, 19 nt, Artificial Sequence
  Description of Artificial Sequence: Synthetic oligonucleotide
  Sense strand starting at position 424 of SEQ ID NO: 1887592
uuaacuaagcgaugauauu

SEQ ID NO: 2483275 - RNA, 19 nt, Artificial Sequence
  Description of Artificial Sequence: Synthetic oligonucleotide
  Antisense strand to SEQ ID NO: 2483274
aauaucaucgcuuaguuaa

SEQ ID NO: 2483276 - RNA, 19 nt, Artificial Sequence
  Description of Artificial Sequence: Synthetic oligonucleotide
  Sense strand starting at position 682 of SEQ ID NO: 1887592
agcugacauuuguuucuau

SEQ ID NO: 2483277 - RNA, 19 nt, Artificial Sequence
  Description of Artificial Sequence: Synthetic oligonucleotide
  Antisense strand to SEQ ID NO: 2483276
auagaaacaaaugucagcu

SEQ ID NO: 2483278 - RNA, 19 nt, Artificial Sequence
  Description of Artificial Sequence: Synthetic oligonucleotide
  Sense strand starting at position 683 of SEQ ID NO: 1887592
gcugacauuuguuucuauc

SEQ ID NO: 2483279 - RNA, 19 nt, Artificial Sequence
  Description of Artificial Sequence: Synthetic oligonucleotide
  Antisense strand to SEQ ID NO: 2483278
gauagaaacaaaugucagc

SEQ ID NO: 2483280 - RNA, 19 nt, Artificial Sequence
  Description of Artificial Sequence: Synthetic oligonucleotide
  Sense strand starting at position 734 of SEQ ID NO: 1887592
cacagaacgugugcucuuu

SEQ ID NO: 2483281 - RNA, 19 nt, Artificial Sequence
  Description of Artificial Sequence: Synthetic oligonucleotide
  Antisense strand to SEQ ID NO: 2483280
aaagagcacacguucugug

SEQ ID NO: 2483282 - RNA, 19 nt, Artificial Sequence
  Description of Artificial Sequence: Synthetic oligonucleotide
  Sense strand starting at position 740 of SEQ ID NO: 1887592
acgugugcucuuuacuaac

SEQ ID NO: 2483283 - RNA, 19 nt, Artificial Sequence
  Description of Artificial Sequence: Synthetic oligonucleotide
  Antisense strand to SEQ ID NO: 2483282
guuaguaaagagcacacgu

SEQ ID NO: 2483284 - RNA, 19 nt, Artificial Sequence
  Description of Artificial Sequence: Synthetic oligonucleotide
  Sense strand starting at position 742 of SEQ ID NO: 1887592
gugugcucuuuacuaacaa

SEQ ID NO: 2483285 - RNA, 19 nt, Artificial Sequence
  Description of Artificial Sequence: Synthetic oligonucleotide
  Antisense strand to SEQ ID NO: 2483284
uuguuaguaaagagcacac

SEQ ID NO: 2483286 - RNA, 19 nt, Artificial Sequence
  Description of Artificial Sequence: Synthetic oligonucleotide
  Sense strand starting at position 827 of SEQ ID NO: 1887592
uaguguuggagucagacca

SEQ ID NO: 2483287 - RNA, 19 nt, Artificial Sequence
  Description of Artificial Sequence: Synthetic oligonucleotide
  Antisense strand to SEQ ID NO: 2483286
uggucugacuccaacacua

SEQ ID NO: 2483288 - RNA, 19 nt, Artificial Sequence
  Description of Artificial Sequence: Synthetic oligonucleotide
  Sense strand starting at position 924 of SEQ ID NO: 1887592
ugacaaauacaacguuuga

SEQ ID NO: 2483289 - RNA, 19 nt, Artificial Sequence
  Description of Artificial Sequence: Synthetic oligonucleotide
  Antisense strand to SEQ ID NO: 2483288
ucaaacguuguauuuguca

SEQ ID NO: 2483290 - RNA, 19 nt, Artificial Sequence
  Description of Artificial Sequence: Synthetic oligonucleotide
  Sense strand starting at position 1350 of SEQ ID NO: 1887592
cugagagccucaccuguaa

SEQ ID NO: 2483291 - RNA, 19 nt, Artificial Sequence
  Description of Artificial Sequence: Synthetic oligonucleotide
  Antisense strand to SEQ ID NO: 2483290
uuacaggugaggcucucag

SEQ ID NO: 2483292 - RNA, 19 nt, Artificial Sequence
  Description of Artificial Sequence: Synthetic oligonucleotide
  Sense strand starting at position 1444 of SEQ ID NO: 1887592
gucaguaccugcucucaaa

SEQ ID NO: 2483293 - RNA, 19 nt, Artificial Sequence
  Description of Artificial Sequence: Synthetic oligonucleotide
  Antisense strand to SEQ ID NO: 2483292
uuugagagcagguacugac

SEQ ID NO: 2483294 - RNA, 19 nt, Artificial Sequence
  Description of Artificial Sequence: Synthetic oligonucleotide
  Sense strand starting at position 1604 of SEQ ID NO: 1887592
aagcacuggucagugacaa

SEQ ID NO: 2483295 - RNA, 19 nt, Artificial Sequence
  Description of Artificial Sequence: Synthetic oligonucleotide
  Antisense strand to SEQ ID NO: 2483294
uugucacugaccagugcuu

SEQ ID NO: 2483296 - RNA, 19 nt, Artificial Sequence
  Description of Artificial Sequence: Synthetic oligonucleotide
  Sense strand starting at position 1718 of SEQ ID NO: 1887592
ccuacugaucccugcgcau

SEQ ID NO: 2483297 - RNA, 19 nt, Artificial Sequence
  Description of Artificial Sequence: Synthetic oligonucleotide
  Antisense strand to SEQ ID NO: 2483296
augcgcagggaucaguagg

SEQ ID NO: 2483298 - RNA, 19 nt, Artificial Sequence
  Description of Artificial Sequence: Synthetic oligonucleotide
  Sense strand starting at position 2058 of SEQ ID NO: 1887592
ggaagugugccgcuuccuu

SEQ ID NO: 2483299 - RNA, 19 nt, Artificial Sequence
  Description of Artificial Sequence: Synthetic oligonucleotide
  Antisense strand to SEQ ID NO: 2483298
aaggaagcggcacacuucc

SEQ ID NO: 2483300 - RNA, 19 nt, Artificial Sequence
  Description of Artificial Sequence: Synthetic oligonucleotide
  Sense strand starting at position 3029 of SEQ ID NO: 1887592
ucucaaacucauggucuga

SEQ ID NO: 2483301 - RNA, 19 nt, Artificial Sequence
  Description of Artificial Sequence: Synthetic oligonucleotide
  Antisense strand to SEQ ID NO: 2483300
ucagaccaugaguuugaga

SEQ ID NO: 2483302 - RNA, 19 nt, Artificial Sequence
  Description of Artificial Sequence: Synthetic oligonucleotide
  Sense strand starting at position 3109 of SEQ ID NO: 1887592
agcgcuagucguccuuauu

SEQ ID NO: 2483303 - RNA, 19 nt, Artificial Sequence
  Description of Artificial Sequence: Synthetic oligonucleotide
  Antisense strand to SEQ ID NO: 2483302
aauaaggacgacuagcgcu

SEQ ID NO: 2483304 - RNA, 19 nt, Artificial Sequence
  Description of Artificial Sequence: Synthetic oligonucleotide
  Sense strand starting at position 3110 of SEQ ID NO: 1887592
gcgcuagucguccuuauua

SEQ ID NO: 2483305 - RNA, 19 nt, Artificial Sequence
  Description of Artificial Sequence: Synthetic oligonucleotide
  Antisense strand to SEQ ID NO: 2483304
uaauaaggacgacuagcgc

SEQ ID NO: 2483306 - RNA, 19 nt, Artificial Sequence
  Description of Artificial Sequence: Synthetic oligonucleotide
  Sense strand starting at position 3112 of SEQ ID NO: 1887592
gcuagucguccuuauuaau

SEQ ID NO: 2483307 - RNA, 19 nt, Artificial Sequence
  Description of Artificial Sequence: Synthetic oligonucleotide
  Antisense strand to SEQ ID NO: 2483306
auuaauaaggacgacuagc

SEQ ID NO: 2483308 - RNA, 19 nt, Artificial Sequence
  Description of Artificial Sequence: Synthetic oligonucleotide
  Sense strand starting at position 3118 of SEQ ID NO: 1887592
cguccuuauuaauaaagaa

SEQ ID NO: 2483309 - RNA, 19 nt, Artificial Sequence
  Description of Artificial Sequence: Synthetic oligonucleotide
  Antisense strand to SEQ ID NO: 2483308
uucuuuauuaauaaggacg

SEQ ID NO: 2483310 - RNA, 19 nt, Artificial Sequence
  Description of Artificial Sequence: Synthetic oligonucleotide
  Sense strand starting at position 3156 of SEQ ID NO: 1887592
aguuguuuacaauggcauu

SEQ ID NO: 2483311 - RNA, 19 nt, Artificial Sequence
  Description of Artificial Sequence: Synthetic oligonucleotide
  Antisense strand to SEQ ID NO: 2483310
aaugccauuguaaacaacu

SEQ ID NO: 2483312 - RNA, 19 nt, Artificial Sequence
  Description of Artificial Sequence: Synthetic oligonucleotide
  Sense strand starting at position 3220 of SEQ ID NO: 1887592
guugcagugccugacacau

SEQ ID NO: 2483313 - RNA, 19 nt, Artificial Sequence
  Description of Artificial Sequence: Synthetic oligonucleotide
  Antisense strand to SEQ ID NO: 2483312
augugucaggcacugcaac

SEQ ID NO: 2483314 - RNA, 19 nt, Artificial Sequence
  Description of Artificial Sequence: Synthetic oligonucleotide
  Sense strand starting at position 3246 of SEQ ID NO: 1887592
acuuaaauauguguugguu

SEQ ID NO: 2483315 - RNA, 19 nt, Artificial Sequence
  Description of Artificial Sequence: Synthetic oligonucleotide
  Antisense strand to SEQ ID NO: 2483314
aaccaacacauauuuaagu

SEQ ID NO: 2483316 - RNA, 19 nt, Artificial Sequence
  Description of Artificial Sequence: Synthetic oligonucleotide
  Sense strand starting at position 3370 of SEQ ID NO: 1887592
guaggacuuuguuaaacac

SEQ ID NO: 2483317 - RNA, 19 nt, Artificial Sequence
  Description of Artificial Sequence: Synthetic oligonucleotide
  Antisense strand to SEQ ID NO: 2483316
guguuuaacaaaguccuac

SEQ ID NO: 2483318 - RNA, 19 nt, Artificial Sequence
  Description of Artificial Sequence: Synthetic oligonucleotide
  Sense strand starting at position 3416 of SEQ ID NO: 1887592
cuccauuuccagugcuuga

SEQ ID NO: 2483319 - RNA, 19 nt, Artificial Sequence
  Description of Artificial Sequence: Synthetic oligonucleotide
  Antisense strand to SEQ ID NO: 2483318
ucaagcacuggaaauggag

SEQ ID NO: 2483320 - RNA, 19 nt, Artificial Sequence
  Description of Artificial Sequence: Synthetic oligonucleotide
  Sense strand starting at position 3421 of SEQ ID NO: 1887592
uuuccagugcuugaaagca

SEQ ID NO: 2483321 - RNA, 19 nt, Artificial Sequence
  Description of Artificial Sequence: Synthetic oligonucleotide
  Antisense strand to SEQ ID NO: 2483320
ugcuuucaagcacuggaaa

SEQ ID NO: 2483322 - RNA, 19 nt, Artificial Sequence
  Description of Artificial Sequence: Synthetic oligonucleotide
  Sense strand starting at position 3431 of SEQ ID NO: 1887592
uugaaagcacaguacuuaa

SEQ ID NO: 2483323 - RNA, 19 nt, Artificial Sequence
  Description of Artificial Sequence: Synthetic oligonucleotide
  Antisense strand to SEQ ID NO: 2483322
uuaaguacugugcuuucaa

SEQ ID NO: 2483324 - RNA, 19 nt, Artificial Sequence
  Description of Artificial Sequence: Synthetic oligonucleotide
  Sense strand starting at position 3501 of SEQ ID NO: 1887592
uguauaauguuaguugguu

SEQ ID NO: 2483325 - RNA, 19 nt, Artificial Sequence
  Description of Artificial Sequence: Synthetic oligonucleotide
  Antisense strand to SEQ ID NO: 2483324
aaccaacuaacauuauaca

SEQ ID NO: 2483326 - RNA, 19 nt, Artificial Sequence
  Description of Artificial Sequence: Synthetic oligonucleotide
  Sense strand starting at position 3502 of SEQ ID NO: 1887592
guauaauguuaguugguuu

SEQ ID NO: 2483327 - RNA, 19 nt, Artificial Sequence
  Description of Artificial Sequence: Synthetic oligonucleotide
  Antisense strand to SEQ ID NO: 2483326
aaaccaacuaacauuauac

SEQ ID NO: 2483328 - RNA, 19 nt, Artificial Sequence
  Description of Artificial Sequence: Synthetic oligonucleotide
  Sense strand starting at position 3515 of SEQ ID NO: 1887592
ugguuuguucuguagagca

SEQ ID NO: 2483329 - RNA, 19 nt, Artificial Sequence
  Description of Artificial Sequence: Synthetic oligonucleotide
  Antisense strand to SEQ ID NO: 2483328
ugcucuacagaacaaacca

SEQ ID NO: 2483330 - RNA, 19 nt, Artificial Sequence
  Description of Artificial Sequence: Synthetic oligonucleotide
  Sense strand starting at position 3517 of SEQ ID NO: 1887592
guuuguucuguagagcaag

SEQ ID NO: 2483331 - RNA, 19 nt, Artificial Sequence
  Description of Artificial Sequence: Synthetic oligonucleotide
  Antisense strand to SEQ ID NO: 2483330
cuugcucuacagaacaaac

SEQ ID NO: 2483332 - RNA, 19 nt, Artificial Sequence
  Description of Artificial Sequence: Synthetic oligonucleotide
  Sense strand starting at position 3520 of SEQ ID NO: 1887592
uguucuguagagcaaguua

SEQ ID NO: 2483333 - RNA, 19 nt, Artificial Sequence
  Description of Artificial Sequence: Synthetic oligonucleotide
  Antisense strand to SEQ ID NO: 2483332
uaacuugcucuacagaaca

SEQ ID NO: 2483334 - RNA, 19 nt, Artificial Sequence
  Description of Artificial Sequence: Synthetic oligonucleotide
  Sense strand starting at position 3531 of SEQ ID NO: 1887592
gcaaguuacccuuaggaau

SEQ ID NO: 2483335 - RNA, 19 nt, Artificial Sequence
  Description of Artificial Sequence: Synthetic oligonucleotide
  Antisense strand to SEQ ID NO: 2483334
auuccuaaggguaacuugc

SEQ ID NO: 2483336 - RNA, 19 nt, Artificial Sequence
  Description of Artificial Sequence: Synthetic oligonucleotide
  Sense strand starting at position 3549 of SEQ ID NO: 1887592
uuaauaaacuguggaaaca

SEQ ID NO: 2483337 - RNA, 19 nt, Artificial Sequence
  Description of Artificial Sequence: Synthetic oligonucleotide
  Antisense strand to SEQ ID NO: 2483336
uguuuccacaguuuauuaa

SEQ ID NO: 2483338 - RNA, 19 nt, Artificial Sequence
  Description of Artificial Sequence: Synthetic oligonucleotide
  Sense strand starting at position 3574 of SEQ ID NO: 1887592
ucaggcuacuagucacauu

SEQ ID NO: 2483339 - RNA, 19 nt, Artificial Sequence
  Description of Artificial Sequence: Synthetic oligonucleotide
  Antisense strand to SEQ ID NO: 2483338
aaugugacuaguagccuga

SEQ ID NO: 2483340 - RNA, 19 nt, Artificial Sequence
  Description of Artificial Sequence: Synthetic oligonucleotide
  Sense strand starting at position 3577 of SEQ ID NO: 1887592
ggcuacuagucacauuuaa

SEQ ID NO: 2483341 - RNA, 19 nt, Artificial Sequence
  Description of Artificial Sequence: Synthetic oligonucleotide
  Antisense strand to SEQ ID NO: 2483340
uuaaaugugacuaguagcc

SEQ ID NO: 2483342 - RNA, 19 nt, Artificial Sequence
  Description of Artificial Sequence: Synthetic oligonucleotide
  Sense strand starting at position 3818 of SEQ ID NO: 1887592
ugaagcugccagugugaau

SEQ ID NO: 2483343 - RNA, 19 nt, Artificial Sequence
  Description of Artificial Sequence: Synthetic oligonucleotide
  Antisense strand to SEQ ID NO: 2483342
auucacacuggcagcuuca

SEQ ID NO: 2483344 - RNA, 19 nt, Artificial Sequence
  Description of Artificial Sequence: Synthetic oligonucleotide
  Sense strand starting at position 69 of SEQ ID NO: 1887593
uaccauauggccuaggagu

SEQ ID NO: 2483345 - RNA, 19 nt, Artificial Sequence
  Description of Artificial Sequence: Synthetic oligonucleotide
  Antisense strand to SEQ ID NO: 2483344
acuccuaggccauauggua

SEQ ID NO: 2483346 - RNA, 19 nt, Artificial Sequence
  Description of Artificial Sequence: Synthetic oligonucleotide
  Sense strand starting at position 71 of SEQ ID NO: 1887593
ccauauggccuaggaguau

SEQ ID NO: 2483347 - RNA, 19 nt, Artificial Sequence
  Description of Artificial Sequence: Synthetic oligonucleotide
  Antisense strand to SEQ ID NO: 2483346
auacuccuaggccauaugg

SEQ ID NO: 2483348 - RNA, 19 nt, Artificial Sequence
  Description of Artificial Sequence: Synthetic oligonucleotide
  Sense strand starting at position 77 of SEQ ID NO: 1887593
ggccuaggaguauagucaa

SEQ ID NO: 2483349 - RNA, 19 nt, Artificial Sequence
  Description of Artificial Sequence: Synthetic oligonucleotide
  Antisense strand to SEQ ID NO: 2483348
uugacuauacuccuaggcc

SEQ ID NO: 2483350 - RNA, 19 nt, Artificial Sequence
  Description of Artificial Sequence: Synthetic oligonucleotide
  Sense strand starting at position 80 of SEQ ID NO: 1887593
cuaggaguauagucaauua

SEQ ID NO: 2483351 - RNA, 19 nt, Artificial Sequence
  Description of Artificial Sequence: Synthetic oligonucleotide
  Antisense strand to SEQ ID NO: 2483350
uaauugacuauacuccuag

SEQ ID NO: 2483352 - RNA, 19 nt, Artificial Sequence
  Description of Artificial Sequence: Synthetic oligonucleotide
  Sense strand starting at position 115 of SEQ ID NO: 1887593
guagguacagucuaugaug

SEQ ID NO: 2483353 - RNA, 19 nt, Artificial Sequence
  Description of Artificial Sequence: Synthetic oligonucleotide
  Antisense strand to SEQ ID NO: 2483352
caucauagacuguaccuac

SEQ ID NO: 2483354 - RNA, 19 nt, Artificial Sequence
  Description of Artificial Sequence: Synthetic oligonucleotide
  Sense strand starting at position 117 of SEQ ID NO: 1887593
agguacagucuaugauguu

SEQ ID NO: 2483355 - RNA, 19 nt, Artificial Sequence
  Description of Artificial Sequence: Synthetic oligonucleotide
  Antisense strand to SEQ ID NO: 2483354
aacaucauagacuguaccu

SEQ ID NO: 2483356 - RNA, 19 nt, Artificial Sequence
  Description of Artificial Sequence: Synthetic oligonucleotide
  Sense strand starting at position 176 of SEQ ID NO: 1887593
agguauucccauuguuaaa

SEQ ID NO: 2483357 - RNA, 19 nt, Artificial Sequence
  Description of Artificial Sequence: Synthetic oligonucleotide
  Antisense strand to SEQ ID NO: 2483356
uuuaacaaugggaauaccu

SEQ ID NO: 2483358 - RNA, 19 nt, Artificial Sequence
  Description of Artificial Sequence: Synthetic oligonucleotide
  Sense strand starting at position 328 of SEQ ID NO: 1887593
guggaagaucuaugcacag

SEQ ID NO: 2483359 - RNA, 19 nt, Artificial Sequence
  Description of Artificial Sequence: Synthetic oligonucleotide
  Antisense strand to SEQ ID NO: 2483358
cugugcauagaucuuccac

SEQ ID NO: 2483360 - RNA, 19 nt, Artificial Sequence
  Description of Artificial Sequence: Synthetic oligonucleotide
  Sense strand starting at position 388 of SEQ ID NO: 1887593
auaguaugagguugguaca

SEQ ID NO: 2483361 - RNA, 19 nt, Artificial Sequence
  Description of Artificial Sequence: Synthetic oligonucleotide
  Antisense strand to SEQ ID NO: 2483360
uguaccaaccucauacuau

SEQ ID NO: 2483362 - RNA, 19 nt, Artificial Sequence
  Description of Artificial Sequence: Synthetic oligonucleotide
  Sense strand starting at position 501 of SEQ ID NO: 1887593
gacacagacucuuuguguu

SEQ ID NO: 2483363 - RNA, 19 nt, Artificial Sequence
  Description of Artificial Sequence: Synthetic oligonucleotide
  Antisense strand to SEQ ID NO: 2483362
aacacaaagagucuguguc

SEQ ID NO: 2483364 - RNA, 19 nt, Artificial Sequence
  Description of Artificial Sequence: Synthetic oligonucleotide
  Sense strand starting at position 521 of SEQ ID NO: 1887593
cuguguauucugcugcaac

SEQ ID NO: 2483365 - RNA, 19 nt, Artificial Sequence
  Description of Artificial Sequence: Synthetic oligonucleotide
  Antisense strand to SEQ ID NO: 2483364
guugcagcagaauacacag

SEQ ID NO: 2483366 - RNA, 19 nt, Artificial Sequence
  Description of Artificial Sequence: Synthetic oligonucleotide
  Sense strand starting at position 595 of SEQ ID NO: 1887593
gcuaaauuuguuggcccau

SEQ ID NO: 2483367 - RNA, 19 nt, Artificial Sequence
  Description of Artificial Sequence: Synthetic oligonucleotide
  Antisense strand to SEQ ID NO: 2483366
augggccaacaaauuuagc

SEQ ID NO: 2483368 - RNA, 19 nt, Artificial Sequence
  Description of Artificial Sequence: Synthetic oligonucleotide
  Sense strand starting at position 637 of SEQ ID NO: 1887593
gcgaaauauuucuaggaga

SEQ ID NO: 2483369 - RNA, 19 nt, Artificial Sequence
  Description of Artificial Sequence: Synthetic oligonucleotide
  Antisense strand to SEQ ID NO: 2483368
ucuccuagaaauauuucgc

SEQ ID NO: 2483370 - RNA, 19 nt, Artificial Sequence
  Description of Artificial Sequence: Synthetic oligonucleotide
  Sense strand starting at position 709 of SEQ ID NO: 1887593
aaguuaauauuggcaaguu

SEQ ID NO: 2483371 - RNA, 19 nt, Artificial Sequence
  Description of Artificial Sequence: Synthetic oligonucleotide
  Antisense strand to SEQ ID NO: 2483370
aacuugccaauauuaacuu

SEQ ID NO: 2483372 - RNA, 19 nt, Artificial Sequence
  Description of Artificial Sequence: Synthetic oligonucleotide
  Sense strand starting at position 746 of SEQ ID NO: 1887593
ccugaaagauagucuaugu

SEQ ID NO: 2483373 - RNA, 19 nt, Artificial Sequence
  Description of Artificial Sequence: Synthetic oligonucleotide
  Antisense strand to SEQ ID NO: 2483372
acauagacuaucuuucagg

SEQ ID NO: 2483374 - RNA, 19 nt, Artificial Sequence
  Description of Artificial Sequence: Synthetic oligonucleotide
  Sense strand starting at position 751 of SEQ ID NO: 1887593
aagauagucuauguuauug

SEQ ID NO: 2483375 - RNA, 19 nt, Artificial Sequence
  Description of Artificial Sequence: Synthetic oligonucleotide
  Antisense strand to SEQ ID NO: 2483374
caauaacauagacuaucuu

SEQ ID NO: 2483376 - RNA, 19 nt, Artificial Sequence
  Description of Artificial Sequence: Synthetic oligonucleotide
  Sense strand starting at position 814 of SEQ ID NO: 1887593
guggaaucugcagaagucu

SEQ ID NO: 2483377 - RNA, 19 nt, Artificial Sequence
  Description of Artificial Sequence: Synthetic oligonucleotide
  Antisense strand to SEQ ID NO: 2483376
agacuucugcagauuccac

SEQ ID NO: 2483378 - RNA, 19 nt, Artificial Sequence
  Description of Artificial Sequence: Synthetic oligonucleotide
  Sense strand starting at position 825 of SEQ ID NO: 1887593
agaagucugaggugccauu

SEQ ID NO: 2483379 - RNA, 19 nt, Artificial Sequence
  Description of Artificial Sequence: Synthetic oligonucleotide
  Antisense strand to SEQ ID NO: 2483378
aauggcaccucagacuucu

SEQ ID NO: 2483380 - RNA, 19 nt, Artificial Sequence
  Description of Artificial Sequence: Synthetic oligonucleotide
  Sense strand starting at position 838 of SEQ ID NO: 1887593
gccauuuccugucccuaua

SEQ ID NO: 2483381 - RNA, 19 nt, Artificial Sequence
  Description of Artificial Sequence: Synthetic oligonucleotide
  Antisense strand to SEQ ID NO: 2483380
uauagggacaggaaauggc

SEQ ID NO: 2483382 - RNA, 19 nt, Artificial Sequence
  Description of Artificial Sequence: Synthetic oligonucleotide
  Sense strand starting at position 847 of SEQ ID NO: 1887593
ugucccuauaccugggaga

SEQ ID NO: 2483383 - RNA, 19 nt, Artificial Sequence
  Description of Artificial Sequence: Synthetic oligonucleotide
  Antisense strand to SEQ ID NO: 2483382
ucucccagguauagggaca

SEQ ID NO: 2483384 - RNA, 19 nt, Artificial Sequence
  Description of Artificial Sequence: Synthetic oligonucleotide
  Sense strand starting at position 848 of SEQ ID NO: 1887593
gucccuauaccugggagaa

SEQ ID NO: 2483385 - RNA, 19 nt, Artificial Sequence
  Description of Artificial Sequence: Synthetic oligonucleotide
  Antisense strand to SEQ ID NO: 2483384
uucucccagguauagggac

SEQ ID NO: 2483386 - RNA, 19 nt, Artificial Sequence
  Description of Artificial Sequence: Synthetic oligonucleotide
  Sense strand starting at position 1041 of SEQ ID NO: 1887593
ugauacgcugucuggagaa

SEQ ID NO: 2483387 - RNA, 19 nt, Artificial Sequence
  Description of Artificial Sequence: Synthetic oligonucleotide
  Antisense strand to SEQ ID NO: 2483386
uucuccagacagcguauca

SEQ ID NO: 2483388 - RNA, 19 nt, Artificial Sequence
  Description of Artificial Sequence: Synthetic oligonucleotide
  Sense strand starting at position 1043 of SEQ ID NO: 1887593
auacgcugucuggagaaau

SEQ ID NO: 2483389 - RNA, 19 nt, Artificial Sequence
  Description of Artificial Sequence: Synthetic oligonucleotide
  Antisense strand to SEQ ID NO: 2483388
auuucuccagacagcguau

SEQ ID NO: 2483390 - RNA, 19 nt, Artificial Sequence
  Description of Artificial Sequence: Synthetic oligonucleotide
  Sense strand starting at position 1134 of SEQ ID NO: 1887593
uggccaaugguccacuuau

SEQ ID NO: 2483391 - RNA, 19 nt, Artificial Sequence
  Description of Artificial Sequence: Synthetic oligonucleotide
  Antisense strand to SEQ ID NO: 2483390
auaaguggaccauuggcca

SEQ ID NO: 2483392 - RNA, 19 nt, Artificial Sequence
  Description of Artificial Sequence: Synthetic oligonucleotide
  Sense strand starting at position 1183 of SEQ ID NO: 1887593
gcaaguacucauuacagcu

SEQ ID NO: 2483393 - RNA, 19 nt, Artificial Sequence
  Description of Artificial Sequence: Synthetic oligonucleotide
  Antisense strand to SEQ ID NO: 2483392
agcuguaaugaguacuugc

SEQ ID NO: 2483394 - RNA, 19 nt, Artificial Sequence
  Description of Artificial Sequence: Synthetic oligonucleotide
  Sense strand starting at position 1191 of SEQ ID NO: 1887593
ucauuacagcucugacaug

SEQ ID NO: 2483395 - RNA, 19 nt, Artificial Sequence
  Description of Artificial Sequence: Synthetic oligonucleotide
  Antisense strand to SEQ ID NO: 2483394
caugucagagcuguaauga

SEQ ID NO: 2483396 - RNA, 19 nt, Artificial Sequence
  Description of Artificial Sequence: Synthetic oligonucleotide
  Sense strand starting at position 1238 of SEQ ID NO: 1887593
aguguaauccauuaugcac

SEQ ID NO: 2483397 - RNA, 19 nt, Artificial Sequence
  Description of Artificial Sequence: Synthetic oligonucleotide
  Antisense strand to SEQ ID NO: 2483396
gugcauaauggauuacacu

SEQ ID NO: 2483398 - RNA, 19 nt, Artificial Sequence
  Description of Artificial Sequence: Synthetic oligonucleotide
  Sense strand starting at position 1275 of SEQ ID NO: 1887593
aaagucuggugguuaaaug

SEQ ID NO: 2483399 - RNA, 19 nt, Artificial Sequence
  Description of Artificial Sequence: Synthetic oligonucleotide
  Antisense strand to SEQ ID NO: 2483398
cauuuaaccaccagacuuu

SEQ ID NO: 2483400 - RNA, 19 nt, Artificial Sequence
  Description of Artificial Sequence: Synthetic oligonucleotide
  Sense strand starting at position 1284 of SEQ ID NO: 1887593
ugguuaaaugcaugaucug

SEQ ID NO: 2483401 - RNA, 19 nt, Artificial Sequence
  Description of Artificial Sequence: Synthetic oligonucleotide
  Antisense strand to SEQ ID NO: 2483400
cagaucaugcauuuaacca

SEQ ID NO: 2483402 - RNA, 19 nt, Artificial Sequence
  Description of Artificial Sequence: Synthetic oligonucleotide
  Sense strand starting at position 1285 of SEQ ID NO: 1887593
gguuaaaugcaugaucugu

SEQ ID NO: 2483403 - RNA, 19 nt, Artificial Sequence
  Description of Artificial Sequence: Synthetic oligonucleotide
  Antisense strand to SEQ ID NO: 2483402
acagaucaugcauuuaacc

SEQ ID NO: 2483404 - RNA, 19 nt, Artificial Sequence
  Description of Artificial Sequence: Synthetic oligonucleotide
  Sense strand starting at position 1290 of SEQ ID NO: 1887593
aaugcaugaucuguggaau

SEQ ID NO: 2483405 - RNA, 19 nt, Artificial Sequence
  Description of Artificial Sequence: Synthetic oligonucleotide
  Antisense strand to SEQ ID NO: 2483404
auuccacagaucaugcauu

SEQ ID NO: 2483406 - RNA, 19 nt, Artificial Sequence
  Description of Artificial Sequence: Synthetic oligonucleotide
  Sense strand starting at position 1291 of SEQ ID NO: 1887593
augcaugaucuguggaauc

SEQ ID NO: 2483407 - RNA, 19 nt, Artificial Sequence
  Description of Artificial Sequence: Synthetic oligonucleotide
  Antisense strand to SEQ ID NO: 2483406
gauuccacagaucaugcau

SEQ ID NO: 2483408 - RNA, 19 nt, Artificial Sequence
  Description of Artificial Sequence: Synthetic oligonucleotide
  Sense strand starting at position 1293 of SEQ ID NO: 1887593
gcaugaucuguggaaucag

SEQ ID NO: 2483409 - RNA, 19 nt, Artificial Sequence
  Description of Artificial Sequence: Synthetic oligonucleotide
  Antisense strand to SEQ ID NO: 2483408
cugauuccacagaucaugc

SEQ ID NO: 2483410 - RNA, 19 nt, Artificial Sequence
  Description of Artificial Sequence: Synthetic oligonucleotide
  Sense strand starting at position 1409 of SEQ ID NO: 1887593
gccuguuagaaagggaagu

SEQ ID NO: 2483411 - RNA, 19 nt, Artificial Sequence
  Description of Artificial Sequence: Synthetic oligonucleotide
  Antisense strand to SEQ ID NO: 2483410
acuucccuuucuaacaggc

SEQ ID NO: 2483412 - RNA, 19 nt, Artificial Sequence
  Description of Artificial Sequence: Synthetic oligonucleotide
  Sense strand starting at position 1436 of SEQ ID NO: 1887593
gaagcaugugggcaguuua

SEQ ID NO: 2483413 - RNA, 19 nt, Artificial Sequence
  Description of Artificial Sequence: Synthetic oligonucleotide
  Antisense strand to SEQ ID NO: 2483412
uaaacugcccacaugcuuc

SEQ ID NO: 2483414 - RNA, 19 nt, Artificial Sequence
  Description of Artificial Sequence: Synthetic oligonucleotide
  Sense strand starting at position 1684 of SEQ ID NO: 1887593
gaggguucuuuguccuaug

SEQ ID NO: 2483415 - RNA, 19 nt, Artificial Sequence
  Description of Artificial Sequence: Synthetic oligonucleotide
  Antisense strand to SEQ ID NO: 2483414
cauaggacaaagaacccuc

SEQ ID NO: 2483416 - RNA, 19 nt, Artificial Sequence
  Description of Artificial Sequence: Synthetic oligonucleotide
  Sense strand starting at position 2732 of SEQ ID NO: 1887593
ggccuugaaggaugucaua

SEQ ID NO: 2483417 - RNA, 19 nt, Artificial Sequence
  Description of Artificial Sequence: Synthetic oligonucleotide
  Antisense strand to SEQ ID NO: 2483416
uaugacauccuucaaggcc

SEQ ID NO: 2483418 - RNA, 19 nt, Artificial Sequence
  Description of Artificial Sequence: Synthetic oligonucleotide
  Sense strand starting at position 2801 of SEQ ID NO: 1887593
cugagacuggcaugauaug

SEQ ID NO: 2483419 - RNA, 19 nt, Artificial Sequence
  Description of Artificial Sequence: Synthetic oligonucleotide
  Antisense strand to SEQ ID NO: 2483418
cauaucaugccagucucag

SEQ ID NO: 2483420 - RNA, 19 nt, Artificial Sequence
  Description of Artificial Sequence: Synthetic oligonucleotide
  Sense strand starting at position 3467 of SEQ ID NO: 1887593
gauggauguuuggcuauua

SEQ ID NO: 2483421 - RNA, 19 nt, Artificial Sequence
  Description of Artificial Sequence: Synthetic oligonucleotide
  Antisense strand to SEQ ID NO: 2483420
uaauagccaaacauccauc

SEQ ID NO: 2483422 - RNA, 19 nt, Artificial Sequence
  Description of Artificial Sequence: Synthetic oligonucleotide
  Sense strand starting at position 3831 of SEQ ID NO: 1887593
uggcaacaugcaggaauua

SEQ ID NO: 2483423 - RNA, 19 nt, Artificial Sequence
  Description of Artificial Sequence: Synthetic oligonucleotide
  Antisense strand to SEQ ID NO: 2483422
uaauuccugcauguugcca

SEQ ID NO: 2483424 - RNA, 19 nt, Artificial Sequence
  Description of Artificial Sequence: Synthetic oligonucleotide
  Sense strand starting at position 13 of SEQ ID NO: 1887594
ugauuaugacaccgauuac

SEQ ID NO: 2483425 - RNA, 19 nt, Artificial Sequence
  Description of Artificial Sequence: Synthetic oligonucleotide
  Antisense strand to SEQ ID NO: 2483424
guaaucggugucauaauca

SEQ ID NO: 2483426 - RNA, 19 nt, Artificial Sequence
  Description of Artificial Sequence: Synthetic oligonucleotide
  Sense strand starting at position 22 of SEQ ID NO: 1887594
caccgauuaccuggcugau

SEQ ID NO: 2483427 - RNA, 19 nt, Artificial Sequence
  Description of Artificial Sequence: Synthetic oligonucleotide
  Antisense strand to SEQ ID NO: 2483426
aucagccagguaaucggug

SEQ ID NO: 2483428 - RNA, 19 nt, Artificial Sequence
  Description of Artificial Sequence: Synthetic oligonucleotide
  Sense strand starting at position 196 of SEQ ID NO: 1887594
ucuucuguauuagagauuu

SEQ ID NO: 2483429 - RNA, 19 nt, Artificial Sequence
  Description of Artificial Sequence: Synthetic oligonucleotide
  Antisense strand to SEQ ID NO: 2483428
aaaucucuaauacagaaga

SEQ ID NO: 2483430 - RNA, 19 nt, Artificial Sequence
  Description of Artificial Sequence: Synthetic oligonucleotide
  Sense strand starting at position 291 of SEQ ID NO: 1887594
gguuuaucuuaguccauuc

SEQ ID NO: 2483431 - RNA, 19 nt, Artificial Sequence
  Description of Artificial Sequence: Synthetic oligonucleotide
  Antisense strand to SEQ ID NO: 2483430
gaauggacuaagauaaacc

SEQ ID NO: 2483432 - RNA, 19 nt, Artificial Sequence
  Description of Artificial Sequence: Synthetic oligonucleotide
  Sense strand starting at position 413 of SEQ ID NO: 1887594
cagagucaguguuugguga

SEQ ID NO: 2483433 - RNA, 19 nt, Artificial Sequence
  Description of Artificial Sequence: Synthetic oligonucleotide
  Antisense strand to SEQ ID NO: 2483432
ucaccaaacacugacucug

SEQ ID NO: 2483434 - RNA, 19 nt, Artificial Sequence
  Description of Artificial Sequence: Synthetic oligonucleotide
  Sense strand starting at position 550 of SEQ ID NO: 1887594
aggagccuucgugaccuaa

SEQ ID NO: 2483435 - RNA, 19 nt, Artificial Sequence
  Description of Artificial Sequence: Synthetic oligonucleotide
  Antisense strand to SEQ ID NO: 2483434
uuaggucacgaaggcuccu

SEQ ID NO: 2483436 - RNA, 19 nt, Artificial Sequence
  Description of Artificial Sequence: Synthetic oligonucleotide
  Sense strand starting at position 623 of SEQ ID NO: 1887594
cgugaaucuuggagggaca

SEQ ID NO: 2483437 - RNA, 19 nt, Artificial Sequence
  Description of Artificial Sequence: Synthetic oligonucleotide
  Antisense strand to SEQ ID NO: 2483436
ugucccuccaagauucacg

SEQ ID NO: 2483438 - RNA, 19 nt, Artificial Sequence
  Description of Artificial Sequence: Synthetic oligonucleotide
  Sense strand starting at position 755 of SEQ ID NO: 1887594
gacauauugugaucaaugu

SEQ ID NO: 2483439 - RNA, 19 nt, Artificial Sequence
  Description of Artificial Sequence: Synthetic oligonucleotide
  Antisense strand to SEQ ID NO: 2483438
acauugaucacaauauguc

SEQ ID NO: 2483440 - RNA, 19 nt, Artificial Sequence
  Description of Artificial Sequence: Synthetic oligonucleotide
  Sense strand starting at position 756 of SEQ ID NO: 1887594
acauauugugaucaaugug

SEQ ID NO: 2483441 - RNA, 19 nt, Artificial Sequence
  Description of Artificial Sequence: Synthetic oligonucleotide
  Antisense strand to SEQ ID NO: 2483440
cacauugaucacaauaugu

SEQ ID NO: 2483442 - RNA, 19 nt, Artificial Sequence
  Description of Artificial Sequence: Synthetic oligonucleotide
  Sense strand starting at position 775 of SEQ ID NO: 1887594
ggguuauaucauuauugua

SEQ ID NO: 2483443 - RNA, 19 nt, Artificial Sequence
  Description of Artificial Sequence: Synthetic oligonucleotide
  Antisense strand to SEQ ID NO: 2483442
uacaauaaugauauaaccc

SEQ ID NO: 2483444 - RNA, 19 nt, Artificial Sequence
  Description of Artificial Sequence: Synthetic oligonucleotide
  Sense strand starting at position 824 of SEQ ID NO: 1887594
ggcacaagauguuccagau

SEQ ID NO: 2483445 - RNA, 19 nt, Artificial Sequence
  Description of Artificial Sequence: Synthetic oligonucleotide
  Antisense strand to SEQ ID NO: 2483444
aucuggaacaucuugugcc

SEQ ID NO: 2483446 - RNA, 19 nt, Artificial Sequence
  Description of Artificial Sequence: Synthetic oligonucleotide
  Sense strand starting at position 928 of SEQ ID NO: 1887594
aaauuuauuccgugguucu

SEQ ID NO: 2483447 - RNA, 19 nt, Artificial Sequence
  Description of Artificial Sequence: Synthetic oligonucleotide
  Antisense strand to SEQ ID NO: 2483446
agaaccacggaauaaauuu

SEQ ID NO: 2483448 - RNA, 19 nt, Artificial Sequence
  Description of Artificial Sequence: Synthetic oligonucleotide
  Sense strand starting at position 929 of SEQ ID NO: 1887594
aauuuauuccgugguucua

SEQ ID NO: 2483449 - RNA, 19 nt, Artificial Sequence
  Description of Artificial Sequence: Synthetic oligonucleotide
  Antisense strand to SEQ ID NO: 2483448
uagaaccacggaauaaauu

SEQ ID NO: 2483450 - RNA, 19 nt, Artificial Sequence
  Description of Artificial Sequence: Synthetic oligonucleotide
  Sense strand starting at position 1289 of SEQ ID NO: 1887594
acguuauugugauuaucca

SEQ ID NO: 2483451 - RNA, 19 nt, Artificial Sequence
  Description of Artificial Sequence: Synthetic oligonucleotide
  Antisense strand to SEQ ID NO: 2483450
uggauaaucacaauaacgu

SEQ ID NO: 2483452 - RNA, 19 nt, Artificial Sequence
  Description of Artificial Sequence: Synthetic oligonucleotide
  Sense strand starting at position 1290 of SEQ ID NO: 1887594
cguuauugugauuauccau

SEQ ID NO: 2483453 - RNA, 19 nt, Artificial Sequence
  Description of Artificial Sequence: Synthetic oligonucleotide
  Antisense strand to SEQ ID NO: 2483452
auggauaaucacaauaacg

SEQ ID NO: 2483454 - RNA, 19 nt, Artificial Sequence
  Description of Artificial Sequence: Synthetic oligonucleotide
  Sense strand starting at position 1296 of SEQ ID NO: 1887594
ugugauuauccaugggcuu

SEQ ID NO: 2483455 - RNA, 19 nt, Artificial Sequence
  Description of Artificial Sequence: Synthetic oligonucleotide
  Antisense strand to SEQ ID NO: 2483454
aagcccauggauaaucaca

SEQ ID NO: 2483456 - RNA, 19 nt, Artificial Sequence
  Description of Artificial Sequence: Synthetic oligonucleotide
  Sense strand starting at position 1297 of SEQ ID NO: 1887594
gugauuauccaugggcuuu

SEQ ID NO: 2483457 - RNA, 19 nt, Artificial Sequence
  Description of Artificial Sequence: Synthetic oligonucleotide
  Antisense strand to SEQ ID NO: 2483456
aaagcccauggauaaucac

SEQ ID NO: 2483458 - RNA, 19 nt, Artificial Sequence
  Description of Artificial Sequence: Synthetic oligonucleotide
  Sense strand starting at position 1408 of SEQ ID NO: 1887594
agggcuguugcgucuugau

SEQ ID NO: 2483459 - RNA, 19 nt, Artificial Sequence
  Description of Artificial Sequence: Synthetic oligonucleotide
  Antisense strand to SEQ ID NO: 2483458
aucaagacgcaacagcccu

SEQ ID NO: 2483460 - RNA, 19 nt, Artificial Sequence
  Description of Artificial Sequence: Synthetic oligonucleotide
  Sense strand starting at position 1435 of SEQ ID NO: 1887594
gguaguuacaggcaucauc

SEQ ID NO: 2483461 - RNA, 19 nt, Artificial Sequence
  Description of Artificial Sequence: Synthetic oligonucleotide
  Antisense strand to SEQ ID NO: 2483460
gaugaugccuguaacuacc

SEQ ID NO: 2483462 - RNA, 19 nt, Artificial Sequence
  Description of Artificial Sequence: Synthetic oligonucleotide
  Sense strand starting at position 1619 of SEQ ID NO: 1887594
gcggauuugcgaggccaaa

SEQ ID NO: 2483463 - RNA, 19 nt, Artificial Sequence
  Description of Artificial Sequence: Synthetic oligonucleotide
  Antisense strand to SEQ ID NO: 2483462
uuuggccucgcaaauccgc

SEQ ID NO: 2483464 - RNA, 19 nt, Artificial Sequence
  Description of Artificial Sequence: Synthetic oligonucleotide
  Sense strand starting at position 1932 of SEQ ID NO: 1887594
gcaauagccagugaucagu

SEQ ID NO: 2483465 - RNA, 19 nt, Artificial Sequence
  Description of Artificial Sequence: Synthetic oligonucleotide
  Antisense strand to SEQ ID NO: 2483464
acugaucacuggcuauugc

SEQ ID NO: 2483466 - RNA, 19 nt, Artificial Sequence
  Description of Artificial Sequence: Synthetic oligonucleotide
  Sense strand starting at position 1966 of SEQ ID NO: 1887594
gugauagcgacagaaacau

SEQ ID NO: 2483467 - RNA, 19 nt, Artificial Sequence
  Description of Artificial Sequence: Synthetic oligonucleotide
  Antisense strand to SEQ ID NO: 2483466
auguuucugucgcuaucac

SEQ ID NO: 2483468 - RNA, 19 nt, Artificial Sequence
  Description of Artificial Sequence: Synthetic oligonucleotide
  Sense strand starting at position 2179 of SEQ ID NO: 1887594
caggauagauguuucgaga

SEQ ID NO: 2483469 - RNA, 19 nt, Artificial Sequence
  Description of Artificial Sequence: Synthetic oligonucleotide
  Antisense strand to SEQ ID NO: 2483468
ucucgaaacaucuauccug

SEQ ID NO: 2483470 - RNA, 19 nt, Artificial Sequence
  Description of Artificial Sequence: Synthetic oligonucleotide
  Sense strand starting at position 2232 of SEQ ID NO: 1887594
acgcuaaacgugccuuuga

SEQ ID NO: 2483471 - RNA, 19 nt, Artificial Sequence
  Description of Artificial Sequence: Synthetic oligonucleotide
  Antisense strand to SEQ ID NO: 2483470
ucaaaggcacguuuagcgu

SEQ ID NO: 2483472 - RNA, 19 nt, Artificial Sequence
  Description of Artificial Sequence: Synthetic oligonucleotide
  Sense strand starting at position 2247 of SEQ ID NO: 1887594
uugacacugugauuaaauc

SEQ ID NO: 2483473 - RNA, 19 nt, Artificial Sequence
  Description of Artificial Sequence: Synthetic oligonucleotide
  Antisense strand to SEQ ID NO: 2483472
gauuuaaucacagugucaa

SEQ ID NO: 2483474 - RNA, 19 nt, Artificial Sequence
  Description of Artificial Sequence: Synthetic oligonucleotide
  Sense strand starting at position 2327 of SEQ ID NO: 1887594
aaucguauuucugauaaga

SEQ ID NO: 2483475 - RNA, 19 nt, Artificial Sequence
  Description of Artificial Sequence: Synthetic oligonucleotide
  Antisense strand to SEQ ID NO: 2483474
ucuuaucagaaauacgauu

SEQ ID NO: 2483476 - RNA, 19 nt, Artificial Sequence
  Description of Artificial Sequence: Synthetic oligonucleotide
  Sense strand starting at position 2576 of SEQ ID NO: 1887594
gaaauuaacaggugugggu

SEQ ID NO: 2483477 - RNA, 19 nt, Artificial Sequence
  Description of Artificial Sequence: Synthetic oligonucleotide
  Antisense strand to SEQ ID NO: 2483476
acccacaccuguuaauuuc

SEQ ID NO: 2483478 - RNA, 19 nt, Artificial Sequence
  Description of Artificial Sequence: Synthetic oligonucleotide
  Sense strand starting at position 2606 of SEQ ID NO: 1887594
gaaauuaacagguguugug

SEQ ID NO: 2483479 - RNA, 19 nt, Artificial Sequence
  Description of Artificial Sequence: Synthetic oligonucleotide
  Antisense strand to SEQ ID NO: 2483478
cacaacaccuguuaauuuc

SEQ ID NO: 2483480 - RNA, 19 nt, Artificial Sequence
  Description of Artificial Sequence: Synthetic oligonucleotide
  Sense strand starting at position 2724 of SEQ ID NO: 1887594
ucccaauaguagguaugua

SEQ ID NO: 2483481 - RNA, 19 nt, Artificial Sequence
  Description of Artificial Sequence: Synthetic oligonucleotide
  Antisense strand to SEQ ID NO: 2483480
uacauaccuacuauuggga

SEQ ID NO: 2483482 - RNA, 19 nt, Artificial Sequence
  Description of Artificial Sequence: Synthetic oligonucleotide
  Sense strand starting at position 2736 of SEQ ID NO: 1887594
guauguacuccacacaauu

SEQ ID NO: 2483483 - RNA, 19 nt, Artificial Sequence
  Description of Artificial Sequence: Synthetic oligonucleotide
  Antisense strand to SEQ ID NO: 2483482
aauuguguggaguacauac

SEQ ID NO: 2483484 - RNA, 19 nt, Artificial Sequence
  Description of Artificial Sequence: Synthetic oligonucleotide
  Sense strand starting at position 2805 of SEQ ID NO: 1887594
uuuauaguagccgaaagau

SEQ ID NO: 2483485 - RNA, 19 nt, Artificial Sequence
  Description of Artificial Sequence: Synthetic oligonucleotide
  Antisense strand to SEQ ID NO: 2483484
aucuuucggcuacuauaaa

SEQ ID NO: 2483486 - RNA, 19 nt, Artificial Sequence
  Description of Artificial Sequence: Synthetic oligonucleotide
  Sense strand starting at position 3000 of SEQ ID NO: 1887594
ggagucaaggcucacuuua

SEQ ID NO: 2483487 - RNA, 19 nt, Artificial Sequence
  Description of Artificial Sequence: Synthetic oligonucleotide
  Antisense strand to SEQ ID NO: 2483486
uaaagugagccuugacucc

SEQ ID NO: 2483488 - RNA, 19 nt, Artificial Sequence
  Description of Artificial Sequence: Synthetic oligonucleotide
  Sense strand starting at position 3002 of SEQ ID NO: 1887594
agucaaggcucacuuuaaa

SEQ ID NO: 2483489 - RNA, 19 nt, Artificial Sequence
  Description of Artificial Sequence: Synthetic oligonucleotide
  Antisense strand to SEQ ID NO: 2483488
uuuaaagugagccuugacu

SEQ ID NO: 2483490 - RNA, 19 nt, Artificial Sequence
  Description of Artificial Sequence: Synthetic oligonucleotide
  Sense strand starting at position 3090 of SEQ ID NO: 1887594
ggguauuugagccgauauc

SEQ ID NO: 2483491 - RNA, 19 nt, Artificial Sequence
  Description of Artificial Sequence: Synthetic oligonucleotide
  Antisense strand to SEQ ID NO: 2483490
gauaucggcucaaauaccc

SEQ ID NO: 2483492 - RNA, 19 nt, Artificial Sequence
  Description of Artificial Sequence: Synthetic oligonucleotide
  Sense strand starting at position 3101 of SEQ ID NO: 1887594
ccgauaucccaguagucaa

SEQ ID NO: 2483493 - RNA, 19 nt, Artificial Sequence
  Description of Artificial Sequence: Synthetic oligonucleotide
  Antisense strand to SEQ ID NO: 2483492
uugacuacugggauaucgg

SEQ ID NO: 2483494 - RNA, 19 nt, Artificial Sequence
  Description of Artificial Sequence: Synthetic oligonucleotide
  Sense strand starting at position 3108 of SEQ ID NO: 1887594
cccaguagucaacacuaga

SEQ ID NO: 2483495 - RNA, 19 nt, Artificial Sequence
  Description of Artificial Sequence: Synthetic oligonucleotide
  Antisense strand to SEQ ID NO: 2483494
ucuaguguugacuacuggg

SEQ ID NO: 2483496 - RNA, 19 nt, Artificial Sequence
  Description of Artificial Sequence: Synthetic oligonucleotide
  Sense strand starting at position 3132 of SEQ ID NO: 1887594
guaggagacugcucagaaa

SEQ ID NO: 2483497 - RNA, 19 nt, Artificial Sequence
  Description of Artificial Sequence: Synthetic oligonucleotide
  Antisense strand to SEQ ID NO: 2483496
uuucugagcagucuccuac

SEQ ID NO: 2483498 - RNA, 19 nt, Artificial Sequence
  Description of Artificial Sequence: Synthetic oligonucleotide
  Sense strand starting at position 3594 of SEQ ID NO: 1887594
ucgggcguucuggacaauu

SEQ ID NO: 2483499 - RNA, 19 nt, Artificial Sequence
  Description of Artificial Sequence: Synthetic oligonucleotide
  Antisense strand to SEQ ID NO: 2483498
aauuguccagaacgcccga

SEQ ID NO: 2483500 - RNA, 19 nt, Artificial Sequence
  Description of Artificial Sequence: Synthetic oligonucleotide
  Sense strand starting at position 3654 of SEQ ID NO: 1887594
ggacaagaauccucugcaa

SEQ ID NO: 2483501 - RNA, 19 nt, Artificial Sequence
  Description of Artificial Sequence: Synthetic oligonucleotide
  Antisense strand to SEQ ID NO: 2483500
uugcagaggauucuugucc

SEQ ID NO: 2483502 - RNA, 19 nt, Artificial Sequence
  Description of Artificial Sequence: Synthetic oligonucleotide
  Sense strand starting at position 3656 of SEQ ID NO: 1887594
acaagaauccucugcaaug

SEQ ID NO: 2483503 - RNA, 19 nt, Artificial Sequence
  Description of Artificial Sequence: Synthetic oligonucleotide
  Antisense strand to SEQ ID NO: 2483502
cauugcagaggauucuugu

SEQ ID NO: 2483504 - RNA, 19 nt, Artificial Sequence
  Description of Artificial Sequence: Synthetic oligonucleotide
  Sense strand starting at position 2122 of SEQ ID NO: 1887595
agcugacucaucuggagau

SEQ ID NO: 2483505 - RNA, 19 nt, Artificial Sequence
  Description of Artificial Sequence: Synthetic oligonucleotide
  Antisense strand to SEQ ID NO: 2483504
aucuccagaugagucagcu

SEQ ID NO: 2483506 - RNA, 19 nt, Artificial Sequence
  Description of Artificial Sequence: Synthetic oligonucleotide
  Sense strand starting at position 2158 of SEQ ID NO: 1887595
uuucguucucuuuauguga

SEQ ID NO: 2483507 - RNA, 19 nt, Artificial Sequence
  Description of Artificial Sequence: Synthetic oligonucleotide
  Antisense strand to SEQ ID NO: 2483506
ucacauaaagagaacgaaa

SEQ ID NO: 2483508 - RNA, 19 nt, Artificial Sequence
  Description of Artificial Sequence: Synthetic oligonucleotide
  Sense strand starting at position 2235 of SEQ ID NO: 1887595
cgacuugauagagguggau

SEQ ID NO: 2483509 - RNA, 19 nt, Artificial Sequence
  Description of Artificial Sequence: Synthetic oligonucleotide
  Antisense strand to SEQ ID NO: 2483508
auccaccucuaucaagucg

SEQ ID NO: 2483510 - RNA, 19 nt, Artificial Sequence
  Description of Artificial Sequence: Synthetic oligonucleotide
  Sense strand starting at position 2311 of SEQ ID NO: 1887595
aucagugcuccucagggau

SEQ ID NO: 2483511 - RNA, 19 nt, Artificial Sequence
  Description of Artificial Sequence: Synthetic oligonucleotide
  Antisense strand to SEQ ID NO: 2483510
aucccugaggagcacugau

SEQ ID NO: 2483512 - RNA, 19 nt, Artificial Sequence
  Description of Artificial Sequence: Synthetic oligonucleotide
  Sense strand starting at position 2314 of SEQ ID NO: 1887595
agugcuccucagggauauu

SEQ ID NO: 2483513 - RNA, 19 nt, Artificial Sequence
  Description of Artificial Sequence: Synthetic oligonucleotide
  Antisense strand to SEQ ID NO: 2483512
aauaucccugaggagcacu

SEQ ID NO: 2483514 - RNA, 19 nt, Artificial Sequence
  Description of Artificial Sequence: Synthetic oligonucleotide
  Sense strand starting at position 2493 of SEQ ID NO: 1887595
ucuguaaauuugucugguu

SEQ ID NO: 2483515 - RNA, 19 nt, Artificial Sequence
  Description of Artificial Sequence: Synthetic oligonucleotide
  Antisense strand to SEQ ID NO: 2483514
aaccagacaaauuuacaga

SEQ ID NO: 2483516 - RNA, 19 nt, Artificial Sequence
  Description of Artificial Sequence: Synthetic oligonucleotide
  Sense strand starting at position 2509 of SEQ ID NO: 1887595
guucuuugcuauuugugau

SEQ ID NO: 2483517 - RNA, 19 nt, Artificial Sequence
  Description of Artificial Sequence: Synthetic oligonucleotide
  Antisense strand to SEQ ID NO: 2483516
aucacaaauagcaaagaac

SEQ ID NO: 2483518 - RNA, 19 nt, Artificial Sequence
  Description of Artificial Sequence: Synthetic oligonucleotide
  Sense strand starting at position 2522 of SEQ ID NO: 1887595
ugugauugguggccauuua

SEQ ID NO: 2483519 - RNA, 19 nt, Artificial Sequence
  Description of Artificial Sequence: Synthetic oligonucleotide
  Antisense strand to SEQ ID NO: 2483518
uaaauggccaccaaucaca

SEQ ID NO: 2483520 - RNA, 19 nt, Artificial Sequence
  Description of Artificial Sequence: Synthetic oligonucleotide
  Sense strand starting at position 2602 of SEQ ID NO: 1887595
cagucuuuggaagauguau

SEQ ID NO: 2483521 - RNA, 19 nt, Artificial Sequence
  Description of Artificial Sequence: Synthetic oligonucleotide
  Antisense strand to SEQ ID NO: 2483520
auacaucuuccaaagacug

SEQ ID NO: 2483522 - RNA, 19 nt, Artificial Sequence
  Description of Artificial Sequence: Synthetic oligonucleotide
  Sense strand starting at position 2747 of SEQ ID NO: 1887595
ggagcucuccuuugauugu

SEQ ID NO: 2483523 - RNA, 19 nt, Artificial Sequence
  Description of Artificial Sequence: Synthetic oligonucleotide
  Antisense strand to SEQ ID NO: 2483522
acaaucaaaggagagcucc

SEQ ID NO: 2483524 - RNA, 19 nt, Artificial Sequence
  Description of Artificial Sequence: Synthetic oligonucleotide
  Sense strand starting at position 2756 of SEQ ID NO: 1887595
cuuugauuguagucuguuu

SEQ ID NO: 2483525 - RNA, 19 nt, Artificial Sequence
  Description of Artificial Sequence: Synthetic oligonucleotide
  Antisense strand to SEQ ID NO: 2483524
aaacagacuacaaucaaag

SEQ ID NO: 2483526 - RNA, 19 nt, Artificial Sequence
  Description of Artificial Sequence: Synthetic oligonucleotide
  Sense strand starting at position 2836 of SEQ ID NO: 1887595
ggccucugccuaggauuua

SEQ ID NO: 2483527 - RNA, 19 nt, Artificial Sequence
  Description of Artificial Sequence: Synthetic oligonucleotide
  Antisense strand to SEQ ID NO: 2483526
uaaauccuaggcagaggcc

SEQ ID NO: 2483528 - RNA, 19 nt, Artificial Sequence
  Description of Artificial Sequence: Synthetic oligonucleotide
  Sense strand starting at position 2864 of SEQ ID NO: 1887595
gccagaagacuuuggauug

SEQ ID NO: 2483529 - RNA, 19 nt, Artificial Sequence
  Description of Artificial Sequence: Synthetic oligonucleotide
  Antisense strand to SEQ ID NO: 2483528
caauccaaagucuucuggc

SEQ ID NO: 2483530 - RNA, 19 nt, Artificial Sequence
  Description of Artificial Sequence: Synthetic oligonucleotide
  Sense strand starting at position 2865 of SEQ ID NO: 1887595
ccagaagacuuuggauuga

SEQ ID NO: 2483531 - RNA, 19 nt, Artificial Sequence
  Description of Artificial Sequence: Synthetic oligonucleotide
  Antisense strand to SEQ ID NO: 2483530
ucaauccaaagucuucugg

SEQ ID NO: 2483532 - RNA, 19 nt, Artificial Sequence
  Description of Artificial Sequence: Synthetic oligonucleotide
  Sense strand starting at position 2916 of SEQ ID NO: 1887595
uguauugugagaugucagu

SEQ ID NO: 2483533 - RNA, 19 nt, Artificial Sequence
  Description of Artificial Sequence: Synthetic oligonucleotide
  Antisense strand to SEQ ID NO: 2483532
acugacaucucacaauaca

SEQ ID NO: 2483534 - RNA, 19 nt, Artificial Sequence
  Description of Artificial Sequence: Synthetic oligonucleotide
  Sense strand starting at position 2922 of SEQ ID NO: 1887595
gugagaugucaguguagaa

SEQ ID NO: 2483535 - RNA, 19 nt, Artificial Sequence
  Description of Artificial Sequence: Synthetic oligonucleotide
  Antisense strand to SEQ ID NO: 2483534
uucuacacugacaucucac

SEQ ID NO: 2483536 - RNA, 19 nt, Artificial Sequence
  Description of Artificial Sequence: Synthetic oligonucleotide
  Sense strand starting at position 2926 of SEQ ID NO: 1887595
gaugucaguguagaaaucu

SEQ ID NO: 2483537 - RNA, 19 nt, Artificial Sequence
  Description of Artificial Sequence: Synthetic oligonucleotide
  Antisense strand to SEQ ID NO: 2483536
agauuucuacacugacauc

SEQ ID NO: 2483538 - RNA, 19 nt, Artificial Sequence
  Description of Artificial Sequence: Synthetic oligonucleotide
  Sense strand starting at position 3007 of SEQ ID NO: 1887595
gcuacaguuaugugagaga

SEQ ID NO: 2483539 - RNA, 19 nt, Artificial Sequence
  Description of Artificial Sequence: Synthetic oligonucleotide
  Antisense strand to SEQ ID NO: 2483538
ucucucacauaacuguagc

SEQ ID NO: 2483540 - RNA, 19 nt, Artificial Sequence
  Description of Artificial Sequence: Synthetic oligonucleotide
  Sense strand starting at position 3063 of SEQ ID NO: 1887595
aguguaaacgagcaucuua

SEQ ID NO: 2483541 - RNA, 19 nt, Artificial Sequence
  Description of Artificial Sequence: Synthetic oligonucleotide
  Antisense strand to SEQ ID NO: 2483540
uaagaugcucguuuacacu

SEQ ID NO: 2483542 - RNA, 19 nt, Artificial Sequence
  Description of Artificial Sequence: Synthetic oligonucleotide
  Sense strand starting at position 3077 of SEQ ID NO: 1887595
ucuuaagagugagagauca

SEQ ID NO: 2483543 - RNA, 19 nt, Artificial Sequence
  Description of Artificial Sequence: Synthetic oligonucleotide
  Antisense strand to SEQ ID NO: 2483542
ugaucucucacucuuaaga

SEQ ID NO: 2483544 - RNA, 19 nt, Artificial Sequence
  Description of Artificial Sequence: Synthetic oligonucleotide
  Sense strand starting at position 3254 of SEQ ID NO: 1887595
uuagaaucagcaugaaucu

SEQ ID NO: 2483545 - RNA, 19 nt, Artificial Sequence
  Description of Artificial Sequence: Synthetic oligonucleotide
  Antisense strand to SEQ ID NO: 2483544
agauucaugcugauucuaa

SEQ ID NO: 2483546 - RNA, 19 nt, Artificial Sequence
  Description of Artificial Sequence: Synthetic oligonucleotide
  Sense strand starting at position 3335 of SEQ ID NO: 1887595
ccuagaugucuuugagaca

SEQ ID NO: 2483547 - RNA, 19 nt, Artificial Sequence
  Description of Artificial Sequence: Synthetic oligonucleotide
  Antisense strand to SEQ ID NO: 2483546
ugucucaaagacaucuagg

SEQ ID NO: 2483548 - RNA, 19 nt, Artificial Sequence
  Description of Artificial Sequence: Synthetic oligonucleotide
  Sense strand starting at position 3336 of SEQ ID NO: 1887595
cuagaugucuuugagacau

SEQ ID NO: 2483549 - RNA, 19 nt, Artificial Sequence
  Description of Artificial Sequence: Synthetic oligonucleotide
  Antisense strand to SEQ ID NO: 2483548
augucucaaagacaucuag

SEQ ID NO: 2483550 - RNA, 19 nt, Artificial Sequence
  Description of Artificial Sequence: Synthetic oligonucleotide
  Sense strand starting at position 3357 of SEQ ID NO: 1887595
gaggauguccagugcagaa

SEQ ID NO: 2483551 - RNA, 19 nt, Artificial Sequence
  Description of Artificial Sequence: Synthetic oligonucleotide
  Antisense strand to SEQ ID NO: 2483550
uucugcacuggacauccuc

SEQ ID NO: 2483552 - RNA, 19 nt, Artificial Sequence
  Description of Artificial Sequence: Synthetic oligonucleotide
  Sense strand starting at position 3359 of SEQ ID NO: 1887595
ggauguccagugcagaauu

SEQ ID NO: 2483553 - RNA, 19 nt, Artificial Sequence
  Description of Artificial Sequence: Synthetic oligonucleotide
  Antisense strand to SEQ ID NO: 2483552
aauucugcacuggacaucc

SEQ ID NO: 2483554 - RNA, 19 nt, Artificial Sequence
  Description of Artificial Sequence: Synthetic oligonucleotide
  Sense strand starting at position 3382 of SEQ ID NO: 1887595
caggcugacgagugguuaa

SEQ ID NO: 2483555 - RNA, 19 nt, Artificial Sequence
  Description of Artificial Sequence: Synthetic oligonucleotide
  Antisense strand to SEQ ID NO: 2483554
uuaaccacucgucagccug

SEQ ID NO: 2483556 - RNA, 19 nt, Artificial Sequence
  Description of Artificial Sequence: Synthetic oligonucleotide
  Sense strand starting at position 3413 of SEQ ID NO: 1887595
cucgguguaagagaaauga

SEQ ID NO: 2483557 - RNA, 19 nt, Artificial Sequence
  Description of Artificial Sequence: Synthetic oligonucleotide
  Antisense strand to SEQ ID NO: 2483556
ucauuucucuuacaccgag

SEQ ID NO: 2483558 - RNA, 19 nt, Artificial Sequence
  Description of Artificial Sequence: Synthetic oligonucleotide
  Sense strand starting at position 3424 of SEQ ID NO: 1887595
agaaaugagucauucuguu

SEQ ID NO: 2483559 - RNA, 19 nt, Artificial Sequence
  Description of Artificial Sequence: Synthetic oligonucleotide
  Antisense strand to SEQ ID NO: 2483558
aacagaaugacucauuucu

SEQ ID NO: 2483560 - RNA, 19 nt, Artificial Sequence
  Description of Artificial Sequence: Synthetic oligonucleotide
  Sense strand starting at position 3473 of SEQ ID NO: 1887595
gagauaacuuugguuggua

SEQ ID NO: 2483561 - RNA, 19 nt, Artificial Sequence
  Description of Artificial Sequence: Synthetic oligonucleotide
  Antisense strand to SEQ ID NO: 2483560
uaccaaccaaaguuaucuc

SEQ ID NO: 2483562 - RNA, 19 nt, Artificial Sequence
  Description of Artificial Sequence: Synthetic oligonucleotide
  Sense strand starting at position 3495 of SEQ ID NO: 1887595
agaugagaguuucucuagu

SEQ ID NO: 2483563 - RNA, 19 nt, Artificial Sequence
  Description of Artificial Sequence: Synthetic oligonucleotide
  Antisense strand to SEQ ID NO: 2483562
acuagagaaacucucaucu

SEQ ID NO: 2483564 - RNA, 19 nt, Artificial Sequence
  Description of Artificial Sequence: Synthetic oligonucleotide
  Sense strand starting at position 3516 of SEQ ID NO: 1887595
gcuguuacuuuggugaaac

SEQ ID NO: 2483565 - RNA, 19 nt, Artificial Sequence
  Description of Artificial Sequence: Synthetic oligonucleotide
  Antisense strand to SEQ ID NO: 2483564
guuucaccaaaguaacagc

SEQ ID NO: 2483566 - RNA, 19 nt, Artificial Sequence
  Description of Artificial Sequence: Synthetic oligonucleotide
  Sense strand starting at position 3659 of SEQ ID NO: 1887595
uggauacacgguugaauua

SEQ ID NO: 2483567 - RNA, 19 nt, Artificial Sequence
  Description of Artificial Sequence: Synthetic oligonucleotide
  Antisense strand to SEQ ID NO: 2483566
uaauucaaccguguaucca

SEQ ID NO: 2483568 - RNA, 19 nt, Artificial Sequence
  Description of Artificial Sequence: Synthetic oligonucleotide
  Sense strand starting at position 3688 of SEQ ID NO: 1887595
gguugguacggugaauaga

SEQ ID NO: 2483569 - RNA, 19 nt, Artificial Sequence
  Description of Artificial Sequence: Synthetic oligonucleotide
  Antisense strand to SEQ ID NO: 2483568
ucuauucaccguaccaacc

SEQ ID NO: 2483570 - RNA, 19 nt, Artificial Sequence
  Description of Artificial Sequence: Synthetic oligonucleotide
  Sense strand starting at position 3697 of SEQ ID NO: 1887595
ggugaauagaugugugcaa

SEQ ID NO: 2483571 - RNA, 19 nt, Artificial Sequence
  Description of Artificial Sequence: Synthetic oligonucleotide
  Antisense strand to SEQ ID NO: 2483570
uugcacacaucuauucacc

SEQ ID NO: 2483572 - RNA, 19 nt, Artificial Sequence
  Description of Artificial Sequence: Synthetic oligonucleotide
  Sense strand starting at position 3698 of SEQ ID NO: 1887595
gugaauagaugugugcaaa

SEQ ID NO: 2483573 - RNA, 19 nt, Artificial Sequence
  Description of Artificial Sequence: Synthetic oligonucleotide
  Antisense strand to SEQ ID NO: 2483572
uuugcacacaucuauucac

SEQ ID NO: 2483574 - RNA, 19 nt, Artificial Sequence
  Description of Artificial Sequence: Synthetic oligonucleotide
  Sense strand starting at position 3699 of SEQ ID NO: 1887595
ugaauagaugugugcaaag

SEQ ID NO: 2483575 - RNA, 19 nt, Artificial Sequence
  Description of Artificial Sequence: Synthetic oligonucleotide
  Antisense strand to SEQ ID NO: 2483574
cuuugcacacaucuauuca

SEQ ID NO: 2483576 - RNA, 19 nt, Artificial Sequence
  Description of Artificial Sequence: Synthetic oligonucleotide
  Sense strand starting at position 3701 of SEQ ID NO: 1887595
aauagaugugugcaaagca

SEQ ID NO: 2483577 - RNA, 19 nt, Artificial Sequence
  Description of Artificial Sequence: Synthetic oligonucleotide
  Antisense strand to SEQ ID NO: 2483576
ugcuuugcacacaucuauu

SEQ ID NO: 2483578 - RNA, 19 nt, Artificial Sequence
  Description of Artificial Sequence: Synthetic oligonucleotide
  Sense strand starting at position 3951 of SEQ ID NO: 1887595
gagguagaguuugcguuga

SEQ ID NO: 2483579 - RNA, 19 nt, Artificial Sequence
  Description of Artificial Sequence: Synthetic oligonucleotide
  Antisense strand to SEQ ID NO: 2483578
ucaacgcaaacucuaccuc

SEQ ID NO: 2483580 - RNA, 19 nt, Artificial Sequence
  Description of Artificial Sequence: Synthetic oligonucleotide
  Sense strand starting at position 3955 of SEQ ID NO: 1887595
uagaguuugcguugagcca

SEQ ID NO: 2483581 - RNA, 19 nt, Artificial Sequence
  Description of Artificial Sequence: Synthetic oligonucleotide
  Antisense strand to SEQ ID NO: 2483580
uggcucaacgcaaacucua

SEQ ID NO: 2483582 - RNA, 19 nt, Artificial Sequence
  Description of Artificial Sequence: Synthetic oligonucleotide
  Sense strand starting at position 3956 of SEQ ID NO: 1887595
agaguuugcguugagccaa

SEQ ID NO: 2483583 - RNA, 19 nt, Artificial Sequence
  Description of Artificial Sequence: Synthetic oligonucleotide
  Antisense strand to SEQ ID NO: 2483582
uuggcucaacgcaaacucu

SEQ ID NO: 2483584 - RNA, 19 nt, Artificial Sequence
  Description of Artificial Sequence: Synthetic oligonucleotide
  Sense strand starting at position 2150 of SEQ ID NO: 1887596
ccguuauuccuagagaauu

SEQ ID NO: 2483585 - RNA, 19 nt, Artificial Sequence
  Description of Artificial Sequence: Synthetic oligonucleotide
  Antisense strand to SEQ ID NO: 2483584
aauucucuaggaauaacgg

SEQ ID NO: 2483586 - RNA, 19 nt, Artificial Sequence
  Description of Artificial Sequence: Synthetic oligonucleotide
  Sense strand starting at position 2220 of SEQ ID NO: 1887596
uuaaccauaucgcuguaga

SEQ ID NO: 2483587 - RNA, 19 nt, Artificial Sequence
  Description of Artificial Sequence: Synthetic oligonucleotide
  Antisense strand to SEQ ID NO: 2483586
ucuacagcgauaugguuaa

SEQ ID NO: 2483588 - RNA, 19 nt, Artificial Sequence
  Description of Artificial Sequence: Synthetic oligonucleotide
  Sense strand starting at position 2221 of SEQ ID NO: 1887596
uaaccauaucgcuguagaa

SEQ ID NO: 2483589 - RNA, 19 nt, Artificial Sequence
  Description of Artificial Sequence: Synthetic oligonucleotide
  Antisense strand to SEQ ID NO: 2483588
uucuacagcgauaugguua

SEQ ID NO: 2483590 - RNA, 19 nt, Artificial Sequence
  Description of Artificial Sequence: Synthetic oligonucleotide
  Sense strand starting at position 2248 of SEQ ID NO: 1887596
ugaauauucuaaggcaugu

SEQ ID NO: 2483591 - RNA, 19 nt, Artificial Sequence
  Description of Artificial Sequence: Synthetic oligonucleotide
  Antisense strand to SEQ ID NO: 2483590
acaugccuuagaauauuca

SEQ ID NO: 2483592 - RNA, 19 nt, Artificial Sequence
  Description of Artificial Sequence: Synthetic oligonucleotide
  Sense strand starting at position 2278 of SEQ ID NO: 1887596
uugugucuguugguagaaa

SEQ ID NO: 2483593 - RNA, 19 nt, Artificial Sequence
  Description of Artificial Sequence: Synthetic oligonucleotide
  Antisense strand to SEQ ID NO: 2483592
uuucuaccaacagacacaa

SEQ ID NO: 2483594 - RNA, 19 nt, Artificial Sequence
  Description of Artificial Sequence: Synthetic oligonucleotide
  Sense strand starting at position 2325 of SEQ ID NO: 1887596
uuuccaaaguaguaagaaa

SEQ ID NO: 2483595 - RNA, 19 nt, Artificial Sequence
  Description of Artificial Sequence: Synthetic oligonucleotide
  Antisense strand to SEQ ID NO: 2483594
uuucuuacuacuuuggaaa

SEQ ID NO: 2483596 - RNA, 19 nt, Artificial Sequence
  Description of Artificial Sequence: Synthetic oligonucleotide
  Sense strand starting at position 2356 of SEQ ID NO: 1887596
uaaggauacuuugggaaac

SEQ ID NO: 2483597 - RNA, 19 nt, Artificial Sequence
  Description of Artificial Sequence: Synthetic oligonucleotide
  Antisense strand to SEQ ID NO: 2483596
guuucccaaaguauccuua

SEQ ID NO: 2483598 - RNA, 19 nt, Artificial Sequence
  Description of Artificial Sequence: Synthetic oligonucleotide
  Sense strand starting at position 2388 of SEQ ID NO: 1887596
cugucuuuacacugaguga

SEQ ID NO: 2483599 - RNA, 19 nt, Artificial Sequence
  Description of Artificial Sequence: Synthetic oligonucleotide
  Antisense strand to SEQ ID NO: 2483598
ucacucaguguaaagacag

SEQ ID NO: 2483600 - RNA, 19 nt, Artificial Sequence
  Description of Artificial Sequence: Synthetic oligonucleotide
  Sense strand starting at position 2391 of SEQ ID NO: 1887596
ucuuuacacugagugagua

SEQ ID NO: 2483601 - RNA, 19 nt, Artificial Sequence
  Description of Artificial Sequence: Synthetic oligonucleotide
  Antisense strand to SEQ ID NO: 2483600
uacucacucaguguaaaga

SEQ ID NO: 2483602 - RNA, 19 nt, Artificial Sequence
  Description of Artificial Sequence: Synthetic oligonucleotide
  Sense strand starting at position 2392 of SEQ ID NO: 1887596
cuuuacacugagugaguaa

SEQ ID NO: 2483603 - RNA, 19 nt, Artificial Sequence
  Description of Artificial Sequence: Synthetic oligonucleotide
  Antisense strand to SEQ ID NO: 2483602
uuacucacucaguguaaag

SEQ ID NO: 2483604 - RNA, 19 nt, Artificial Sequence
  Description of Artificial Sequence: Synthetic oligonucleotide
  Sense strand starting at position 2407 of SEQ ID NO: 1887596
guaacaaggcucuguaaag

SEQ ID NO: 2483605 - RNA, 19 nt, Artificial Sequence
  Description of Artificial Sequence: Synthetic oligonucleotide
  Antisense strand to SEQ ID NO: 2483604
cuuuacagagccuuguuac

SEQ ID NO: 2483606 - RNA, 19 nt, Artificial Sequence
  Description of Artificial Sequence: Synthetic oligonucleotide
  Sense strand starting at position 2432 of SEQ ID NO: 1887596
gggaauuggucacuagcag

SEQ ID NO: 2483607 - RNA, 19 nt, Artificial Sequence
  Description of Artificial Sequence: Synthetic oligonucleotide
  Antisense strand to SEQ ID NO: 2483606
cugcuagugaccaauuccc

SEQ ID NO: 2483608 - RNA, 19 nt, Artificial Sequence
  Description of Artificial Sequence: Synthetic oligonucleotide
  Sense strand starting at position 2459 of SEQ ID NO: 1887596
gacaucaagcacuguaaga

SEQ ID NO: 2483609 - RNA, 19 nt, Artificial Sequence
  Description of Artificial Sequence: Synthetic oligonucleotide
  Antisense strand to SEQ ID NO: 2483608
ucuuacagugcuugauguc

SEQ ID NO: 2483610 - RNA, 19 nt, Artificial Sequence
  Description of Artificial Sequence: Synthetic oligonucleotide
  Sense strand starting at position 2506 of SEQ ID NO: 1887596
agcguuuacugauaaauug

SEQ ID NO: 2483611 - RNA, 19 nt, Artificial Sequence
  Description of Artificial Sequence: Synthetic oligonucleotide
  Antisense strand to SEQ ID NO: 2483610
caauuuaucaguaaacgcu

SEQ ID NO: 2483612 - RNA, 19 nt, Artificial Sequence
  Description of Artificial Sequence: Synthetic oligonucleotide
  Sense strand starting at position 2567 of SEQ ID NO: 1887596
augcauccauguuaaugau

SEQ ID NO: 2483613 - RNA, 19 nt, Artificial Sequence
  Description of Artificial Sequence: Synthetic oligonucleotide
  Antisense strand to SEQ ID NO: 2483612
aucauuaacauggaugcau

SEQ ID NO: 2483614 - RNA, 19 nt, Artificial Sequence
  Description of Artificial Sequence: Synthetic oligonucleotide
  Sense strand starting at position 2584 of SEQ ID NO: 1887596
augucacugucuuaccuaa

SEQ ID NO: 2483615 - RNA, 19 nt, Artificial Sequence
  Description of Artificial Sequence: Synthetic oligonucleotide
  Antisense strand to SEQ ID NO: 2483614
uuagguaagacagugacau

SEQ ID NO: 2483616 - RNA, 19 nt, Artificial Sequence
  Description of Artificial Sequence: Synthetic oligonucleotide
  Sense strand starting at position 2586 of SEQ ID NO: 1887596
gucacugucuuaccuaacu

SEQ ID NO: 2483617 - RNA, 19 nt, Artificial Sequence
  Description of Artificial Sequence: Synthetic oligonucleotide
  Antisense strand to SEQ ID NO: 2483616
aguuagguaagacagugac

SEQ ID NO: 2483618 - RNA, 19 nt, Artificial Sequence
  Description of Artificial Sequence: Synthetic oligonucleotide
  Sense strand starting at position 2754 of SEQ ID NO: 1887596
cuggccuucuucuauaaag

SEQ ID NO: 2483619 - RNA, 19 nt, Artificial Sequence
  Description of Artificial Sequence: Synthetic oligonucleotide
  Antisense strand to SEQ ID NO: 2483618
cuuuauagaagaaggccag

SEQ ID NO: 2483620 - RNA, 19 nt, Artificial Sequence
  Description of Artificial Sequence: Synthetic oligonucleotide
  Sense strand starting at position 2756 of SEQ ID NO: 1887596
ggccuucuucuauaaagaa

SEQ ID NO: 2483621 - RNA, 19 nt, Artificial Sequence
  Description of Artificial Sequence: Synthetic oligonucleotide
  Antisense strand to SEQ ID NO: 2483620
uucuuuauagaagaaggcc

SEQ ID NO: 2483622 - RNA, 19 nt, Artificial Sequence
  Description of Artificial Sequence: Synthetic oligonucleotide
  Sense strand starting at position 2822 of SEQ ID NO: 1887596
agacauaauugguggcaca

SEQ ID NO: 2483623 - RNA, 19 nt, Artificial Sequence
  Description of Artificial Sequence: Synthetic oligonucleotide
  Antisense strand to SEQ ID NO: 2483622
ugugccaccaauuaugucu

SEQ ID NO: 2483624 - RNA, 19 nt, Artificial Sequence
  Description of Artificial Sequence: Synthetic oligonucleotide
  Sense strand starting at position 2926 of SEQ ID NO: 1887596
cuuuaaagggccugauagu

SEQ ID NO: 2483625 - RNA, 19 nt, Artificial Sequence
  Description of Artificial Sequence: Synthetic oligonucleotide
  Antisense strand to SEQ ID NO: 2483624
acuaucaggcccuuuaaag

SEQ ID NO: 2483626 - RNA, 19 nt, Artificial Sequence
  Description of Artificial Sequence: Synthetic oligonucleotide
  Sense strand starting at position 2927 of SEQ ID NO: 1887596
uuuaaagggccugauagua

SEQ ID NO: 2483627 - RNA, 19 nt, Artificial Sequence
  Description of Artificial Sequence: Synthetic oligonucleotide
  Antisense strand to SEQ ID NO: 2483626
uacuaucaggcccuuuaaa

SEQ ID NO: 2483628 - RNA, 19 nt, Artificial Sequence
  Description of Artificial Sequence: Synthetic oligonucleotide
  Sense strand starting at position 3273 of SEQ ID NO: 1887596
uguugauguuccuaugaau

SEQ ID NO: 2483629 - RNA, 19 nt, Artificial Sequence
  Description of Artificial Sequence: Synthetic oligonucleotide
  Antisense strand to SEQ ID NO: 2483628
auucauaggaacaucaaca

SEQ ID NO: 2483630 - RNA, 19 nt, Artificial Sequence
  Description of Artificial Sequence: Synthetic oligonucleotide
  Sense strand starting at position 3276 of SEQ ID NO: 1887596
ugauguuccuaugaaugag

SEQ ID NO: 2483631 - RNA, 19 nt, Artificial Sequence
  Description of Artificial Sequence: Synthetic oligonucleotide
  Antisense strand to SEQ ID NO: 2483630
cucauucauaggaacauca

SEQ ID NO: 2483632 - RNA, 19 nt, Artificial Sequence
  Description of Artificial Sequence: Synthetic oligonucleotide
  Sense strand starting at position 3279 of SEQ ID NO: 1887596
uguuccuaugaaugagaaa

SEQ ID NO: 2483633 - RNA, 19 nt, Artificial Sequence
  Description of Artificial Sequence: Synthetic oligonucleotide
  Antisense strand to SEQ ID NO: 2483632
uuucucauucauaggaaca

SEQ ID NO: 2483634 - RNA, 19 nt, Artificial Sequence
  Description of Artificial Sequence: Synthetic oligonucleotide
  Sense strand starting at position 3291 of SEQ ID NO: 1887596
ugagaaagcggucaugugu

SEQ ID NO: 2483635 - RNA, 19 nt, Artificial Sequence
  Description of Artificial Sequence: Synthetic oligonucleotide
  Antisense strand to SEQ ID NO: 2483634
acacaugaccgcuuucuca

SEQ ID NO: 2483636 - RNA, 19 nt, Artificial Sequence
  Description of Artificial Sequence: Synthetic oligonucleotide
  Sense strand starting at position 3300 of SEQ ID NO: 1887596
ggucaugugucuuacagaa

SEQ ID NO: 2483637 - RNA, 19 nt, Artificial Sequence
  Description of Artificial Sequence: Synthetic oligonucleotide
  Antisense strand to SEQ ID NO: 2483636
uucuguaagacacaugacc

SEQ ID NO: 2483638 - RNA, 19 nt, Artificial Sequence
  Description of Artificial Sequence: Synthetic oligonucleotide
  Sense strand starting at position 3350 of SEQ ID NO: 1887596
gcaugaguuauggagcugu

SEQ ID NO: 2483639 - RNA, 19 nt, Artificial Sequence
  Description of Artificial Sequence: Synthetic oligonucleotide
  Antisense strand to SEQ ID NO: 2483638
acagcuccauaacucaugc

SEQ ID NO: 2483640 - RNA, 19 nt, Artificial Sequence
  Description of Artificial Sequence: Synthetic oligonucleotide
  Sense strand starting at position 3361 of SEQ ID NO: 1887596
ggagcuguuggccaugagu

SEQ ID NO: 2483641 - RNA, 19 nt, Artificial Sequence
  Description of Artificial Sequence: Synthetic oligonucleotide
  Antisense strand to SEQ ID NO: 2483640
acucauggccaacagcucc

SEQ ID NO: 2483642 - RNA, 19 nt, Artificial Sequence
  Description of Artificial Sequence: Synthetic oligonucleotide
  Sense strand starting at position 3798 of SEQ ID NO: 1887596
accagaugcuuacaggaaa

SEQ ID NO: 2483643 - RNA, 19 nt, Artificial Sequence
  Description of Artificial Sequence: Synthetic oligonucleotide
  Antisense strand to SEQ ID NO: 2483642
uuuccuguaagcaucuggu

SEQ ID NO: 2483644 - RNA, 19 nt, Artificial Sequence
  Description of Artificial Sequence: Synthetic oligonucleotide
  Sense strand starting at position 3837 of SEQ ID NO: 1887596
gaagcaguggaaugguauu

SEQ ID NO: 2483645 - RNA, 19 nt, Artificial Sequence
  Description of Artificial Sequence: Synthetic oligonucleotide
  Antisense strand to SEQ ID NO: 2483644
aauaccauuccacugcuuc

SEQ ID NO: 2483646 - RNA, 19 nt, Artificial Sequence
  Description of Artificial Sequence: Synthetic oligonucleotide
  Sense strand starting at position 3855 of SEQ ID NO: 1887596
ucacuaauuccguguuugu

SEQ ID NO: 2483647 - RNA, 19 nt, Artificial Sequence
  Description of Artificial Sequence: Synthetic oligonucleotide
  Antisense strand to SEQ ID NO: 2483646
acaaacacggaauuaguga

SEQ ID NO: 2483648 - RNA, 19 nt, Artificial Sequence
  Description of Artificial Sequence: Synthetic oligonucleotide
  Sense strand starting at position 3888 of SEQ ID NO: 1887596
ccauaacuacugugaauag

SEQ ID NO: 2483649 - RNA, 19 nt, Artificial Sequence
  Description of Artificial Sequence: Synthetic oligonucleotide
  Antisense strand to SEQ ID NO: 2483648
cuauucacaguaguuaugg

SEQ ID NO: 2483650 - RNA, 19 nt, Artificial Sequence
  Description of Artificial Sequence: Synthetic oligonucleotide
  Sense strand starting at position 3936 of SEQ ID NO: 1887596
ggccaucuggucuguguaa

SEQ ID NO: 2483651 - RNA, 19 nt, Artificial Sequence
  Description of Artificial Sequence: Synthetic oligonucleotide
  Antisense strand to SEQ ID NO: 2483650
uuacacagaccagauggcc

SEQ ID NO: 2483652 - RNA, 19 nt, Artificial Sequence
  Description of Artificial Sequence: Synthetic oligonucleotide
  Sense strand starting at position 3938 of SEQ ID NO: 1887596
ccaucuggucuguguaacu

SEQ ID NO: 2483653 - RNA, 19 nt, Artificial Sequence
  Description of Artificial Sequence: Synthetic oligonucleotide
  Antisense strand to SEQ ID NO: 2483652
aguuacacagaccagaugg

SEQ ID NO: 2483654 - RNA, 19 nt, Artificial Sequence
  Description of Artificial Sequence: Synthetic oligonucleotide
  Sense strand starting at position 3948 of SEQ ID NO: 1887596
uguguaacuacucgagucu

SEQ ID NO: 2483655 - RNA, 19 nt, Artificial Sequence
  Description of Artificial Sequence: Synthetic oligonucleotide
  Antisense strand to SEQ ID NO: 2483654
agacucgaguaguuacaca

SEQ ID NO: 2483656 - RNA, 19 nt, Artificial Sequence
  Description of Artificial Sequence: Synthetic oligonucleotide
  Sense strand starting at position 3957 of SEQ ID NO: 1887596
acucgagucuguccuugua

SEQ ID NO: 2483657 - RNA, 19 nt, Artificial Sequence
  Description of Artificial Sequence: Synthetic oligonucleotide
  Antisense strand to SEQ ID NO: 2483656
uacaaggacagacucgagu

SEQ ID NO: 2483658 - RNA, 19 nt, Artificial Sequence
  Description of Artificial Sequence: Synthetic oligonucleotide
  Sense strand starting at position 3965 of SEQ ID NO: 1887596
cuguccuuguagcucaaau

SEQ ID NO: 2483659 - RNA, 19 nt, Artificial Sequence
  Description of Artificial Sequence: Synthetic oligonucleotide
  Antisense strand to SEQ ID NO: 2483658
auuugagcuacaaggacag

SEQ ID NO: 2483660 - RNA, 19 nt, Artificial Sequence
  Description of Artificial Sequence: Synthetic oligonucleotide
  Sense strand starting at position 3967 of SEQ ID NO: 1887596
guccuuguagcucaaauau

SEQ ID NO: 2483661 - RNA, 19 nt, Artificial Sequence
  Description of Artificial Sequence: Synthetic oligonucleotide
  Antisense strand to SEQ ID NO: 2483660
auauuugagcuacaaggac

SEQ ID NO: 2483662 - RNA, 19 nt, Artificial Sequence
  Description of Artificial Sequence: Synthetic oligonucleotide
  Sense strand starting at position 3976 of SEQ ID NO: 1887596
gcucaaauauagcaauaga

SEQ ID NO: 2483663 - RNA, 19 nt, Artificial Sequence
  Description of Artificial Sequence: Synthetic oligonucleotide
  Antisense strand to SEQ ID NO: 2483662
ucuauugcuauauuugagc

SEQ ID NO: 2483664 - RNA, 19 nt, Artificial Sequence
  Description of Artificial Sequence: Synthetic oligonucleotide
  Sense strand starting at position 56 of SEQ ID NO: 1887597
aaaucagguuggccaauau

SEQ ID NO: 2483665 - RNA, 19 nt, Artificial Sequence
  Description of Artificial Sequence: Synthetic oligonucleotide
  Antisense strand to SEQ ID NO: 2483664
auauuggccaaccugauuu

SEQ ID NO: 2483666 - RNA, 19 nt, Artificial Sequence
  Description of Artificial Sequence: Synthetic oligonucleotide
  Sense strand starting at position 60 of SEQ ID NO: 1887597
cagguuggccaauauaauc

SEQ ID NO: 2483667 - RNA, 19 nt, Artificial Sequence
  Description of Artificial Sequence: Synthetic oligonucleotide
  Antisense strand to SEQ ID NO: 2483666
gauuauauuggccaaccug

SEQ ID NO: 2483668 - RNA, 19 nt, Artificial Sequence
  Description of Artificial Sequence: Synthetic oligonucleotide
  Sense strand starting at position 111 of SEQ ID NO: 1887597
agcagacgauuacugaaau

SEQ ID NO: 2483669 - RNA, 19 nt, Artificial Sequence
  Description of Artificial Sequence: Synthetic oligonucleotide
  Antisense strand to SEQ ID NO: 2483668
auuucaguaaucgucugcu

SEQ ID NO: 2483670 - RNA, 19 nt, Artificial Sequence
  Description of Artificial Sequence: Synthetic oligonucleotide
  Sense strand starting at position 148 of SEQ ID NO: 1887597
aagguuauauggccaccua

SEQ ID NO: 2483671 - RNA, 19 nt, Artificial Sequence
  Description of Artificial Sequence: Synthetic oligonucleotide
  Antisense strand to SEQ ID NO: 2483670
uagguggccauauaaccuu

SEQ ID NO: 2483672 - RNA, 19 nt, Artificial Sequence
  Description of Artificial Sequence: Synthetic oligonucleotide
  Sense strand starting at position 149 of SEQ ID NO: 1887597
agguuauauggccaccuau

SEQ ID NO: 2483673 - RNA, 19 nt, Artificial Sequence
  Description of Artificial Sequence: Synthetic oligonucleotide
  Antisense strand to SEQ ID NO: 2483672
auagguggccauauaaccu

SEQ ID NO: 2483674 - RNA, 19 nt, Artificial Sequence
  Description of Artificial Sequence: Synthetic oligonucleotide
  Sense strand starting at position 333 of SEQ ID NO: 1887597
uugagacaaugucuuuguu

SEQ ID NO: 2483675 - RNA, 19 nt, Artificial Sequence
  Description of Artificial Sequence: Synthetic oligonucleotide
  Antisense strand to SEQ ID NO: 2483674
aacaaagacauugucucaa

SEQ ID NO: 2483676 - RNA, 19 nt, Artificial Sequence
  Description of Artificial Sequence: Synthetic oligonucleotide
  Sense strand starting at position 335 of SEQ ID NO: 1887597
gagacaaugucuuuguucu

SEQ ID NO: 2483677 - RNA, 19 nt, Artificial Sequence
  Description of Artificial Sequence: Synthetic oligonucleotide
  Antisense strand to SEQ ID NO: 2483676
agaacaaagacauugucuc

SEQ ID NO: 2483678 - RNA, 19 nt, Artificial Sequence
  Description of Artificial Sequence: Synthetic oligonucleotide
  Sense strand starting at position 354 of SEQ ID NO: 1887597
cuacauuuacguuguuaua

SEQ ID NO: 2483679 - RNA, 19 nt, Artificial Sequence
  Description of Artificial Sequence: Synthetic oligonucleotide
  Antisense strand to SEQ ID NO: 2483678
uauaacaacguaaauguag

SEQ ID NO: 2483680 - RNA, 19 nt, Artificial Sequence
  Description of Artificial Sequence: Synthetic oligonucleotide
  Sense strand starting at position 356 of SEQ ID NO: 1887597
acauuuacguuguuauacu

SEQ ID NO: 2483681 - RNA, 19 nt, Artificial Sequence
  Description of Artificial Sequence: Synthetic oligonucleotide
  Antisense strand to SEQ ID NO: 2483680
aguauaacaacguaaaugu

SEQ ID NO: 2483682 - RNA, 19 nt, Artificial Sequence
  Description of Artificial Sequence: Synthetic oligonucleotide
  Sense strand starting at position 400 of SEQ ID NO: 1887597
ggauccuauuaucugaacu

SEQ ID NO: 2483683 - RNA, 19 nt, Artificial Sequence
  Description of Artificial Sequence: Synthetic oligonucleotide
  Antisense strand to SEQ ID NO: 2483682
aguucagauaauaggaucc

SEQ ID NO: 2483684 - RNA, 19 nt, Artificial Sequence
  Description of Artificial Sequence: Synthetic oligonucleotide
  Sense strand starting at position 431 of SEQ ID NO: 1887597
ucuucucagguaugacaga

SEQ ID NO: 2483685 - RNA, 19 nt, Artificial Sequence
  Description of Artificial Sequence: Synthetic oligonucleotide
  Antisense strand to SEQ ID NO: 2483684
ucugucauaccugagaaga

SEQ ID NO: 2483686 - RNA, 19 nt, Artificial Sequence
  Description of Artificial Sequence: Synthetic oligonucleotide
  Sense strand starting at position 445 of SEQ ID NO: 1887597
acagaauucugucuugaaa

SEQ ID NO: 2483687 - RNA, 19 nt, Artificial Sequence
  Description of Artificial Sequence: Synthetic oligonucleotide
  Antisense strand to SEQ ID NO: 2483686
uuucaagacagaauucugu

SEQ ID NO: 2483688 - RNA, 19 nt, Artificial Sequence
  Description of Artificial Sequence: Synthetic oligonucleotide
  Sense strand starting at position 469 of SEQ ID NO: 1887597
gggaguagucccugaguaa

SEQ ID NO: 2483689 - RNA, 19 nt, Artificial Sequence
  Description of Artificial Sequence: Synthetic oligonucleotide
  Antisense strand to SEQ ID NO: 2483688
uuacucagggacuacuccc

SEQ ID NO: 2483690 - RNA, 19 nt, Artificial Sequence
  Description of Artificial Sequence: Synthetic oligonucleotide
  Sense strand starting at position 470 of SEQ ID NO: 1887597
ggaguagucccugaguaau

SEQ ID NO: 2483691 - RNA, 19 nt, Artificial Sequence
  Description of Artificial Sequence: Synthetic oligonucleotide
  Antisense strand to SEQ ID NO: 2483690
auuacucagggacuacucc

SEQ ID NO: 2483692 - RNA, 19 nt, Artificial Sequence
  Description of Artificial Sequence: Synthetic oligonucleotide
  Sense strand starting at position 473 of SEQ ID NO: 1887597
guagucccugaguaaucuu

SEQ ID NO: 2483693 - RNA, 19 nt, Artificial Sequence
  Description of Artificial Sequence: Synthetic oligonucleotide
  Antisense strand to SEQ ID NO: 2483692
aagauuacucagggacuac

SEQ ID NO: 2483694 - RNA, 19 nt, Artificial Sequence
  Description of Artificial Sequence: Synthetic oligonucleotide
  Sense strand starting at position 920 of SEQ ID NO: 1887597
gccgaauuacuuuauucua

SEQ ID NO: 2483695 - RNA, 19 nt, Artificial Sequence
  Description of Artificial Sequence: Synthetic oligonucleotide
  Antisense strand to SEQ ID NO: 2483694
uagaauaaaguaauucggc

SEQ ID NO: 2483696 - RNA, 19 nt, Artificial Sequence
  Description of Artificial Sequence: Synthetic oligonucleotide
  Sense strand starting at position 1029 of SEQ ID NO: 1887597
ucaacaggauugguauaau

SEQ ID NO: 2483697 - RNA, 19 nt, Artificial Sequence
  Description of Artificial Sequence: Synthetic oligonucleotide
  Antisense strand to SEQ ID NO: 2483696
auuauaccaauccuguuga

SEQ ID NO: 2483698 - RNA, 19 nt, Artificial Sequence
  Description of Artificial Sequence: Synthetic oligonucleotide
  Sense strand starting at position 1077 of SEQ ID NO: 1887597
ugaaguguauuuccagcga

SEQ ID NO: 2483699 - RNA, 19 nt, Artificial Sequence
  Description of Artificial Sequence: Synthetic oligonucleotide
  Antisense strand to SEQ ID NO: 2483698
ucgcuggaaauacacuuca

SEQ ID NO: 2483700 - RNA, 19 nt, Artificial Sequence
  Description of Artificial Sequence: Synthetic oligonucleotide
  Sense strand starting at position 1081 of SEQ ID NO: 1887597
guguauuuccagcgaauuc

SEQ ID NO: 2483701 - RNA, 19 nt, Artificial Sequence
  Description of Artificial Sequence: Synthetic oligonucleotide
  Antisense strand to SEQ ID NO: 2483700
gaauucgcuggaaauacac

SEQ ID NO: 2483702 - RNA, 19 nt, Artificial Sequence
  Description of Artificial Sequence: Synthetic oligonucleotide
  Sense strand starting at position 1092 of SEQ ID NO: 1887597
gcgaauucacgagguagga

SEQ ID NO: 2483703 - RNA, 19 nt, Artificial Sequence
  Description of Artificial Sequence: Synthetic oligonucleotide
  Antisense strand to SEQ ID NO: 2483702
uccuaccucgugaauucgc

SEQ ID NO: 2483704 - RNA, 19 nt, Artificial Sequence
  Description of Artificial Sequence: Synthetic oligonucleotide
  Sense strand starting at position 1203 of SEQ ID NO: 1887597
guaacuguauugucccaaa

SEQ ID NO: 2483705 - RNA, 19 nt, Artificial Sequence
  Description of Artificial Sequence: Synthetic oligonucleotide
  Antisense strand to SEQ ID NO: 2483704
uuugggacaauacaguuac

SEQ ID NO: 2483706 - RNA, 19 nt, Artificial Sequence
  Description of Artificial Sequence: Synthetic oligonucleotide
  Sense strand starting at position 1236 of SEQ ID NO: 1887597
gagucaccacaauguagaa

SEQ ID NO: 2483707 - RNA, 19 nt, Artificial Sequence
  Description of Artificial Sequence: Synthetic oligonucleotide
  Antisense strand to SEQ ID NO: 2483706
uucuacauuguggugacuc

SEQ ID NO: 2483708 - RNA, 19 nt, Artificial Sequence
  Description of Artificial Sequence: Synthetic oligonucleotide
  Sense strand starting at position 1327 of SEQ ID NO: 1887597
ccuagagucuaucuguuac

SEQ ID NO: 2483709 - RNA, 19 nt, Artificial Sequence
  Description of Artificial Sequence: Synthetic oligonucleotide
  Antisense strand to SEQ ID NO: 2483708
guaacagauagacucuagg

SEQ ID NO: 2483710 - RNA, 19 nt, Artificial Sequence
  Description of Artificial Sequence: Synthetic oligonucleotide
  Sense strand starting at position 1360 of SEQ ID NO: 1887597
agggcaauuccugauccau

SEQ ID NO: 2483711 - RNA, 19 nt, Artificial Sequence
  Description of Artificial Sequence: Synthetic oligonucleotide
  Antisense strand to SEQ ID NO: 2483710
auggaucaggaauugcccu

SEQ ID NO: 2483712 - RNA, 19 nt, Artificial Sequence
  Description of Artificial Sequence: Synthetic oligonucleotide
  Sense strand starting at position 1362 of SEQ ID NO: 1887597
ggcaauuccugauccauaa

SEQ ID NO: 2483713 - RNA, 19 nt, Artificial Sequence
  Description of Artificial Sequence: Synthetic oligonucleotide
  Antisense strand to SEQ ID NO: 2483712
uuauggaucaggaauugcc

SEQ ID NO: 2483714 - RNA, 19 nt, Artificial Sequence
  Description of Artificial Sequence: Synthetic oligonucleotide
  Sense strand starting at position 1457 of SEQ ID NO: 1887597
accauuucucuguggcagu

SEQ ID NO: 2483715 - RNA, 19 nt, Artificial Sequence
  Description of Artificial Sequence: Synthetic oligonucleotide
  Antisense strand to SEQ ID NO: 2483714
acugccacagagaaauggu

SEQ ID NO: 2483716 - RNA, 19 nt, Artificial Sequence
  Description of Artificial Sequence: Synthetic oligonucleotide
  Sense strand starting at position 1470 of SEQ ID NO: 1887597
ggcagucauacuugacuga

SEQ ID NO: 2483717 - RNA, 19 nt, Artificial Sequence
  Description of Artificial Sequence: Synthetic oligonucleotide
  Antisense strand to SEQ ID NO: 2483716
ucagucaaguaugacugcc

SEQ ID NO: 2483718 - RNA, 19 nt, Artificial Sequence
  Description of Artificial Sequence: Synthetic oligonucleotide
  Sense strand starting at position 1985 of SEQ ID NO: 1887597
agucccugucgggaaauga

SEQ ID NO: 2483719 - RNA, 19 nt, Artificial Sequence
  Description of Artificial Sequence: Synthetic oligonucleotide
  Antisense strand to SEQ ID NO: 2483718
ucauuucccgacagggacu

SEQ ID NO: 2483720 - RNA, 19 nt, Artificial Sequence
  Description of Artificial Sequence: Synthetic oligonucleotide
  Sense strand starting at position 2277 of SEQ ID NO: 1887597
ugaugacugcccuguagaa

SEQ ID NO: 2483721 - RNA, 19 nt, Artificial Sequence
  Description of Artificial Sequence: Synthetic oligonucleotide
  Antisense strand to SEQ ID NO: 2483720
uucuacagggcagucauca

SEQ ID NO: 2483722 - RNA, 19 nt, Artificial Sequence
  Description of Artificial Sequence: Synthetic oligonucleotide
  Sense strand starting at position 2279 of SEQ ID NO: 1887597
augacugcccuguagaauc

SEQ ID NO: 2483723 - RNA, 19 nt, Artificial Sequence
  Description of Artificial Sequence: Synthetic oligonucleotide
  Antisense strand to SEQ ID NO: 2483722
gauucuacagggcagucau

SEQ ID NO: 2483724 - RNA, 19 nt, Artificial Sequence
  Description of Artificial Sequence: Synthetic oligonucleotide
  Sense strand starting at position 2344 of SEQ ID NO: 1887597
uccugaagguagguuuaua

SEQ ID NO: 2483725 - RNA, 19 nt, Artificial Sequence
  Description of Artificial Sequence: Synthetic oligonucleotide
  Antisense strand to SEQ ID NO: 2483724
uauaaaccuaccuucagga

SEQ ID NO: 2483726 - RNA, 19 nt, Artificial Sequence
  Description of Artificial Sequence: Synthetic oligonucleotide
  Sense strand starting at position 2369 of SEQ ID NO: 1887597
aauucuguacgcuugugua

SEQ ID NO: 2483727 - RNA, 19 nt, Artificial Sequence
  Description of Artificial Sequence: Synthetic oligonucleotide
  Antisense strand to SEQ ID NO: 2483726
uacacaagcguacagaauu

SEQ ID NO: 2483728 - RNA, 19 nt, Artificial Sequence
  Description of Artificial Sequence: Synthetic oligonucleotide
  Sense strand starting at position 2371 of SEQ ID NO: 1887597
uucuguacgcuuguguaau

SEQ ID NO: 2483729 - RNA, 19 nt, Artificial Sequence
  Description of Artificial Sequence: Synthetic oligonucleotide
  Antisense strand to SEQ ID NO: 2483728
auuacacaagcguacagaa

SEQ ID NO: 2483730 - RNA, 19 nt, Artificial Sequence
  Description of Artificial Sequence: Synthetic oligonucleotide
  Sense strand starting at position 2461 of SEQ ID NO: 1887597
gguaaugccuggucaugag

SEQ ID NO: 2483731 - RNA, 19 nt, Artificial Sequence
  Description of Artificial Sequence: Synthetic oligonucleotide
  Antisense strand to SEQ ID NO: 2483730
cucaugaccaggcauuacc

SEQ ID NO: 2483732 - RNA, 19 nt, Artificial Sequence
  Description of Artificial Sequence: Synthetic oligonucleotide
  Sense strand starting at position 2814 of SEQ ID NO: 1887597
aaccaagguuguguuuaua

SEQ ID NO: 2483733 - RNA, 19 nt, Artificial Sequence
  Description of Artificial Sequence: Synthetic oligonucleotide
  Antisense strand to SEQ ID NO: 2483732
uauaaacacaaccuugguu

SEQ ID NO: 2483734 - RNA, 19 nt, Artificial Sequence
  Description of Artificial Sequence: Synthetic oligonucleotide
  Sense strand starting at position 2817 of SEQ ID NO: 1887597
caagguuguguuuauaugu

SEQ ID NO: 2483735 - RNA, 19 nt, Artificial Sequence
  Description of Artificial Sequence: Synthetic oligonucleotide
  Antisense strand to SEQ ID NO: 2483734
acauauaaacacaaccuug

SEQ ID NO: 2483736 - RNA, 19 nt, Artificial Sequence
  Description of Artificial Sequence: Synthetic oligonucleotide
  Sense strand starting at position 2896 of SEQ ID NO: 1887597
uuuagucaucagcauuauu

SEQ ID NO: 2483737 - RNA, 19 nt, Artificial Sequence
  Description of Artificial Sequence: Synthetic oligonucleotide
  Antisense strand to SEQ ID NO: 2483736
aauaaugcugaugacuaaa

SEQ ID NO: 2483738 - RNA, 19 nt, Artificial Sequence
  Description of Artificial Sequence: Synthetic oligonucleotide
  Sense strand starting at position 3011 of SEQ ID NO: 1887597
ccagucauacaguagcuaa

SEQ ID NO: 2483739 - RNA, 19 nt, Artificial Sequence
  Description of Artificial Sequence: Synthetic oligonucleotide
  Antisense strand to SEQ ID NO: 2483738
uuagcuacuguaugacugg

SEQ ID NO: 2483740 - RNA, 19 nt, Artificial Sequence
  Description of Artificial Sequence: Synthetic oligonucleotide
  Sense strand starting at position 3585 of SEQ ID NO: 1887597
ccuaguaagccuuagggua

SEQ ID NO: 2483741 - RNA, 19 nt, Artificial Sequence
  Description of Artificial Sequence: Synthetic oligonucleotide
  Antisense strand to SEQ ID NO: 2483740
uacccuaaggcuuacuagg

SEQ ID NO: 2483742 - RNA, 19 nt, Artificial Sequence
  Description of Artificial Sequence: Synthetic oligonucleotide
  Sense strand starting at position 3710 of SEQ ID NO: 1887597
ggguaucaguuauuaauau

SEQ ID NO: 2483743 - RNA, 19 nt, Artificial Sequence
  Description of Artificial Sequence: Synthetic oligonucleotide
  Antisense strand to SEQ ID NO: 2483742
auauuaauaacugauaccc

SEQ ID NO: 2483744 - RNA, 19 nt, Artificial Sequence
  Description of Artificial Sequence: Synthetic oligonucleotide
  Sense strand starting at position 1988 of SEQ ID NO: 1887598
cuugauacgucucugacua

SEQ ID NO: 2483745 - RNA, 19 nt, Artificial Sequence
  Description of Artificial Sequence: Synthetic oligonucleotide
  Antisense strand to SEQ ID NO: 2483744
uagucagagacguaucaag

SEQ ID NO: 2483746 - RNA, 19 nt, Artificial Sequence
  Description of Artificial Sequence: Synthetic oligonucleotide
  Sense strand starting at position 1989 of SEQ ID NO: 1887598
uugauacgucucugacuac

SEQ ID NO: 2483747 - RNA, 19 nt, Artificial Sequence
  Description of Artificial Sequence: Synthetic oligonucleotide
  Antisense strand to SEQ ID NO: 2483746
guagucagagacguaucaa

SEQ ID NO: 2483748 - RNA, 19 nt, Artificial Sequence
  Description of Artificial Sequence: Synthetic oligonucleotide
  Sense strand starting at position 2015 of SEQ ID NO: 1887598
agaggucuccucggcaaga

SEQ ID NO: 2483749 - RNA, 19 nt, Artificial Sequence
  Description of Artificial Sequence: Synthetic oligonucleotide
  Antisense strand to SEQ ID NO: 2483748
ucuugccgaggagaccucu

SEQ ID NO: 2483750 - RNA, 19 nt, Artificial Sequence
  Description of Artificial Sequence: Synthetic oligonucleotide
  Sense strand starting at position 2017 of SEQ ID NO: 1887598
aggucuccucggcaagacu

SEQ ID NO: 2483751 - RNA, 19 nt, Artificial Sequence
  Description of Artificial Sequence: Synthetic oligonucleotide
  Antisense strand to SEQ ID NO: 2483750
agucuugccgaggagaccu

SEQ ID NO: 2483752 - RNA, 19 nt, Artificial Sequence
  Description of Artificial Sequence: Synthetic oligonucleotide
  Sense strand starting at position 2033 of SEQ ID NO: 1887598
acuguacuucucgcgguaa

SEQ ID NO: 2483753 - RNA, 19 nt, Artificial Sequence
  Description of Artificial Sequence: Synthetic oligonucleotide
  Antisense strand to SEQ ID NO: 2483752
uuaccgcgagaaguacagu

SEQ ID NO: 2483754 - RNA, 19 nt, Artificial Sequence
  Description of Artificial Sequence: Synthetic oligonucleotide
  Sense strand starting at position 2036 of SEQ ID NO: 1887598
guacuucucgcgguaauuc

SEQ ID NO: 2483755 - RNA, 19 nt, Artificial Sequence
  Description of Artificial Sequence: Synthetic oligonucleotide
  Antisense strand to SEQ ID NO: 2483754
gaauuaccgcgagaaguac

SEQ ID NO: 2483756 - RNA, 19 nt, Artificial Sequence
  Description of Artificial Sequence: Synthetic oligonucleotide
  Sense strand starting at position 2257 of SEQ ID NO: 1887598
uggugaaugaucgcgcgau

SEQ ID NO: 2483757 - RNA, 19 nt, Artificial Sequence
  Description of Artificial Sequence: Synthetic oligonucleotide
  Antisense strand to SEQ ID NO: 2483756
aucgcgcgaucauucacca

SEQ ID NO: 2483758 - RNA, 19 nt, Artificial Sequence
  Description of Artificial Sequence: Synthetic oligonucleotide
  Sense strand starting at position 2259 of SEQ ID NO: 1887598
gugaaugaucgcgcgauug

SEQ ID NO: 2483759 - RNA, 19 nt, Artificial Sequence
  Description of Artificial Sequence: Synthetic oligonucleotide
  Antisense strand to SEQ ID NO: 2483758
caaucgcgcgaucauucac

SEQ ID NO: 2483760 - RNA, 19 nt, Artificial Sequence
  Description of Artificial Sequence: Synthetic oligonucleotide
  Sense strand starting at position 2292 of SEQ ID NO: 1887598
ugugaugaguguguuucca

SEQ ID NO: 2483761 - RNA, 19 nt, Artificial Sequence
  Description of Artificial Sequence: Synthetic oligonucleotide
  Antisense strand to SEQ ID NO: 2483760
uggaaacacacucaucaca

SEQ ID NO: 2483762 - RNA, 19 nt, Artificial Sequence
  Description of Artificial Sequence: Synthetic oligonucleotide
  Sense strand starting at position 2294 of SEQ ID NO: 1887598
ugaugaguguguuuccaac

SEQ ID NO: 2483763 - RNA, 19 nt, Artificial Sequence
  Description of Artificial Sequence: Synthetic oligonucleotide
  Antisense strand to SEQ ID NO: 2483762
guuggaaacacacucauca

SEQ ID NO: 2483764 - RNA, 19 nt, Artificial Sequence
  Description of Artificial Sequence: Synthetic oligonucleotide
  Sense strand starting at position 2461 of SEQ ID NO: 1887598
gacuauaugcugugugacu

SEQ ID NO: 2483765 - RNA, 19 nt, Artificial Sequence
  Description of Artificial Sequence: Synthetic oligonucleotide
  Antisense strand to SEQ ID NO: 2483764
agucacacagcauauaguc

SEQ ID NO: 2483766 - RNA, 19 nt, Artificial Sequence
  Description of Artificial Sequence: Synthetic oligonucleotide
  Sense strand starting at position 2597 of SEQ ID NO: 1887598
ugacaaugugguugugacu

SEQ ID NO: 2483767 - RNA, 19 nt, Artificial Sequence
  Description of Artificial Sequence: Synthetic oligonucleotide
  Antisense strand to SEQ ID NO: 2483766
agucacaaccacauuguca

SEQ ID NO: 2483768 - RNA, 19 nt, Artificial Sequence
  Description of Artificial Sequence: Synthetic oligonucleotide
  Sense strand starting at position 2638 of SEQ ID NO: 1887598
ugcacuugugcuuauguga

SEQ ID NO: 2483769 - RNA, 19 nt, Artificial Sequence
  Description of Artificial Sequence: Synthetic oligonucleotide
  Antisense strand to SEQ ID NO: 2483768
ucacauaagcacaagugca

SEQ ID NO: 2483770 - RNA, 19 nt, Artificial Sequence
  Description of Artificial Sequence: Synthetic oligonucleotide
  Sense strand starting at position 2645 of SEQ ID NO: 1887598
gugcuuaugugaccgauag

SEQ ID NO: 2483771 - RNA, 19 nt, Artificial Sequence
  Description of Artificial Sequence: Synthetic oligonucleotide
  Antisense strand to SEQ ID NO: 2483770
cuaucggucacauaagcac

SEQ ID NO: 2483772 - RNA, 19 nt, Artificial Sequence
  Description of Artificial Sequence: Synthetic oligonucleotide
  Sense strand starting at position 2646 of SEQ ID NO: 1887598
ugcuuaugugaccgauaga

SEQ ID NO: 2483773 - RNA, 19 nt, Artificial Sequence
  Description of Artificial Sequence: Synthetic oligonucleotide
  Antisense strand to SEQ ID NO: 2483772
ucuaucggucacauaagca

SEQ ID NO: 2483774 - RNA, 19 nt, Artificial Sequence
  Description of Artificial Sequence: Synthetic oligonucleotide
  Sense strand starting at position 2647 of SEQ ID NO: 1887598
gcuuaugugaccgauagag

SEQ ID NO: 2483775 - RNA, 19 nt, Artificial Sequence
  Description of Artificial Sequence: Synthetic oligonucleotide
  Antisense strand to SEQ ID NO: 2483774
cucuaucggucacauaagc

SEQ ID NO: 2483776 - RNA, 19 nt, Artificial Sequence
  Description of Artificial Sequence: Synthetic oligonucleotide
  Sense strand starting at position 2697 of SEQ ID NO: 1887598
guggauugucuguagcuga

SEQ ID NO: 2483777 - RNA, 19 nt, Artificial Sequence
  Description of Artificial Sequence: Synthetic oligonucleotide
  Antisense strand to SEQ ID NO: 2483776
ucagcuacagacaauccac

SEQ ID NO: 2483778 - RNA, 19 nt, Artificial Sequence
  Description of Artificial Sequence: Synthetic oligonucleotide
  Sense strand starting at position 2727 of SEQ ID NO: 1887598
gugggagugugaucagguu

SEQ ID NO: 2483779 - RNA, 19 nt, Artificial Sequence
  Description of Artificial Sequence: Synthetic oligonucleotide
  Antisense strand to SEQ ID NO: 2483778
aaccugaucacacucccac

SEQ ID NO: 2483780 - RNA, 19 nt, Artificial Sequence
  Description of Artificial Sequence: Synthetic oligonucleotide
  Sense strand starting at position 2788 of SEQ ID NO: 1887598
acguauacuucucuaggca

SEQ ID NO: 2483781 - RNA, 19 nt, Artificial Sequence
  Description of Artificial Sequence: Synthetic oligonucleotide
  Antisense strand to SEQ ID NO: 2483780
ugccuagagaaguauacgu

SEQ ID NO: 2483782 - RNA, 19 nt, Artificial Sequence
  Description of Artificial Sequence: Synthetic oligonucleotide
  Sense strand starting at position 2789 of SEQ ID NO: 1887598
cguauacuucucuaggcau

SEQ ID NO: 2483783 - RNA, 19 nt, Artificial Sequence
  Description of Artificial Sequence: Synthetic oligonucleotide
  Antisense strand to SEQ ID NO: 2483782
augccuagagaaguauacg

SEQ ID NO: 2483784 - RNA, 19 nt, Artificial Sequence
  Description of Artificial Sequence: Synthetic oligonucleotide
  Sense strand starting at position 2840 of SEQ ID NO: 1887598
auaugaauguugucauacu

SEQ ID NO: 2483785 - RNA, 19 nt, Artificial Sequence
  Description of Artificial Sequence: Synthetic oligonucleotide
  Antisense strand to SEQ ID NO: 2483784
aguaugacaacauucauau

SEQ ID NO: 2483786 - RNA, 19 nt, Artificial Sequence
  Description of Artificial Sequence: Synthetic oligonucleotide
  Sense strand starting at position 2851 of SEQ ID NO: 1887598
gucauacugucuuugguuu

SEQ ID NO: 2483787 - RNA, 19 nt, Artificial Sequence
  Description of Artificial Sequence: Synthetic oligonucleotide
  Antisense strand to SEQ ID NO: 2483786
aaaccaaagacaguaugac

SEQ ID NO: 2483788 - RNA, 19 nt, Artificial Sequence
  Description of Artificial Sequence: Synthetic oligonucleotide
  Sense strand starting at position 2852 of SEQ ID NO: 1887598
ucauacugucuuugguuua

SEQ ID NO: 2483789 - RNA, 19 nt, Artificial Sequence
  Description of Artificial Sequence: Synthetic oligonucleotide
  Antisense strand to SEQ ID NO: 2483788
uaaaccaaagacaguauga

SEQ ID NO: 2483790 - RNA, 19 nt, Artificial Sequence
  Description of Artificial Sequence: Synthetic oligonucleotide
  Sense strand starting at position 2883 of SEQ ID NO: 1887598
ugugaaucaucccuauuag

SEQ ID NO: 2483791 - RNA, 19 nt, Artificial Sequence
  Description of Artificial Sequence: Synthetic oligonucleotide
  Antisense strand to SEQ ID NO: 2483790
cuaauagggaugauucaca

SEQ ID NO: 2483792 - RNA, 19 nt, Artificial Sequence
  Description of Artificial Sequence: Synthetic oligonucleotide
  Sense strand starting at position 3046 of SEQ ID NO: 1887598
ggguacacaugcuugaguu

SEQ ID NO: 2483793 - RNA, 19 nt, Artificial Sequence
  Description of Artificial Sequence: Synthetic oligonucleotide
  Antisense strand to SEQ ID NO: 2483792
aacucaagcauguguaccc

SEQ ID NO: 2483794 - RNA, 19 nt, Artificial Sequence
  Description of Artificial Sequence: Synthetic oligonucleotide
  Sense strand starting at position 3047 of SEQ ID NO: 1887598
gguacacaugcuugaguuu

SEQ ID NO: 2483795 - RNA, 19 nt, Artificial Sequence
  Description of Artificial Sequence: Synthetic oligonucleotide
  Antisense strand to SEQ ID NO: 2483794
aaacucaagcauguguacc

SEQ ID NO: 2483796 - RNA, 19 nt, Artificial Sequence
  Description of Artificial Sequence: Synthetic oligonucleotide
  Sense strand starting at position 3048 of SEQ ID NO: 1887598
guacacaugcuugaguuua

SEQ ID NO: 2483797 - RNA, 19 nt, Artificial Sequence
  Description of Artificial Sequence: Synthetic oligonucleotide
  Antisense strand to SEQ ID NO: 2483796
uaaacucaagcauguguac

SEQ ID NO: 2483798 - RNA, 19 nt, Artificial Sequence
  Description of Artificial Sequence: Synthetic oligonucleotide
  Sense strand starting at position 3050 of SEQ ID NO: 1887598
acacaugcuugaguuuauu

SEQ ID NO: 2483799 - RNA, 19 nt, Artificial Sequence
  Description of Artificial Sequence: Synthetic oligonucleotide
  Antisense strand to SEQ ID NO: 2483798
aauaaacucaagcaugugu

SEQ ID NO: 2483800 - RNA, 19 nt, Artificial Sequence
  Description of Artificial Sequence: Synthetic oligonucleotide
  Sense strand starting at position 3060 of SEQ ID NO: 1887598
gaguuuauuuaccagcaga

SEQ ID NO: 2483801 - RNA, 19 nt, Artificial Sequence
  Description of Artificial Sequence: Synthetic oligonucleotide
  Antisense strand to SEQ ID NO: 2483800
ucugcugguaaauaaacuc

SEQ ID NO: 2483802 - RNA, 19 nt, Artificial Sequence
  Description of Artificial Sequence: Synthetic oligonucleotide
  Sense strand starting at position 3073 of SEQ ID NO: 1887598
agcagaauugccgguucau

SEQ ID NO: 2483803 - RNA, 19 nt, Artificial Sequence
  Description of Artificial Sequence: Synthetic oligonucleotide
  Antisense strand to SEQ ID NO: 2483802
augaaccggcaauucugcu

SEQ ID NO: 2483804 - RNA, 19 nt, Artificial Sequence
  Description of Artificial Sequence: Synthetic oligonucleotide
  Sense strand starting at position 3103 of SEQ ID NO: 1887598
uuuacuaaacagugucaaa

SEQ ID NO: 2483805 - RNA, 19 nt, Artificial Sequence
  Description of Artificial Sequence: Synthetic oligonucleotide
  Antisense strand to SEQ ID NO: 2483804
uuugacacuguuuaguaaa

SEQ ID NO: 2483806 - RNA, 19 nt, Artificial Sequence
  Description of Artificial Sequence: Synthetic oligonucleotide
  Sense strand starting at position 3139 of SEQ ID NO: 1887598
ugcacaaauuuguacuuga

SEQ ID NO: 2483807 - RNA, 19 nt, Artificial Sequence
  Description of Artificial Sequence: Synthetic oligonucleotide
  Antisense strand to SEQ ID NO: 2483806
ucaaguacaaauuugugca

SEQ ID NO: 2483808 - RNA, 19 nt, Artificial Sequence
  Description of Artificial Sequence: Synthetic oligonucleotide
  Sense strand starting at position 3150 of SEQ ID NO: 1887598
guacuugaacagcaauguu

SEQ ID NO: 2483809 - RNA, 19 nt, Artificial Sequence
  Description of Artificial Sequence: Synthetic oligonucleotide
  Antisense strand to SEQ ID NO: 2483808
aacauugcuguucaaguac

SEQ ID NO: 2483810 - RNA, 19 nt, Artificial Sequence
  Description of Artificial Sequence: Synthetic oligonucleotide
  Sense strand starting at position 3391 of SEQ ID NO: 1887598
guggcuggcaccuauaagu

SEQ ID NO: 2483811 - RNA, 19 nt, Artificial Sequence
  Description of Artificial Sequence: Synthetic oligonucleotide
  Antisense strand to SEQ ID NO: 2483810
acuuauaggugccagccac

SEQ ID NO: 2483812 - RNA, 19 nt, Artificial Sequence
  Description of Artificial Sequence: Synthetic oligonucleotide
  Sense strand starting at position 3467 of SEQ ID NO: 1887598
gcaggaagccaugaucaua

SEQ ID NO: 2483813 - RNA, 19 nt, Artificial Sequence
  Description of Artificial Sequence: Synthetic oligonucleotide
  Antisense strand to SEQ ID NO: 2483812
uaugaucauggcuuccugc

SEQ ID NO: 2483814 - RNA, 19 nt, Artificial Sequence
  Description of Artificial Sequence: Synthetic oligonucleotide
  Sense strand starting at position 3542 of SEQ ID NO: 1887598
cuauauaaagugugcaaau

SEQ ID NO: 2483815 - RNA, 19 nt, Artificial Sequence
  Description of Artificial Sequence: Synthetic oligonucleotide
  Antisense strand to SEQ ID NO: 2483814
auuugcacacuuuauauag

SEQ ID NO: 2483816 - RNA, 19 nt, Artificial Sequence
  Description of Artificial Sequence: Synthetic oligonucleotide
  Sense strand starting at position 3544 of SEQ ID NO: 1887598
auauaaagugugcaaaucu

SEQ ID NO: 2483817 - RNA, 19 nt, Artificial Sequence
  Description of Artificial Sequence: Synthetic oligonucleotide
  Antisense strand to SEQ ID NO: 2483816
agauuugcacacuuuauau

SEQ ID NO: 2483818 - RNA, 19 nt, Artificial Sequence
  Description of Artificial Sequence: Synthetic oligonucleotide
  Sense strand starting at position 3554 of SEQ ID NO: 1887598
ugcaaaucuuaaguguaca

SEQ ID NO: 2483819 - RNA, 19 nt, Artificial Sequence
  Description of Artificial Sequence: Synthetic oligonucleotide
  Antisense strand to SEQ ID NO: 2483818
uguacacuuaagauuugca

SEQ ID NO: 2483820 - RNA, 19 nt, Artificial Sequence
  Description of Artificial Sequence: Synthetic oligonucleotide
  Sense strand starting at position 3617 of SEQ ID NO: 1887598
cugagaugcuucccucaua

SEQ ID NO: 2483821 - RNA, 19 nt, Artificial Sequence
  Description of Artificial Sequence: Synthetic oligonucleotide
  Antisense strand to SEQ ID NO: 2483820
uaugagggaagcaucucag

SEQ ID NO: 2483822 - RNA, 19 nt, Artificial Sequence
  Description of Artificial Sequence: Synthetic oligonucleotide
  Sense strand starting at position 3618 of SEQ ID NO: 1887598
ugagaugcuucccucauac

SEQ ID NO: 2483823 - RNA, 19 nt, Artificial Sequence
  Description of Artificial Sequence: Synthetic oligonucleotide
  Antisense strand to SEQ ID NO: 2483822
guaugagggaagcaucuca

SEQ ID NO: 2483824 - RNA, 19 nt, Artificial Sequence
  Description of Artificial Sequence: Synthetic oligonucleotide
  Sense strand starting at position 263 of SEQ ID NO: 1887599
ccucaacuuuaauggaaga

SEQ ID NO: 2483825 - RNA, 19 nt, Artificial Sequence
  Description of Artificial Sequence: Synthetic oligonucleotide
  Antisense strand to SEQ ID NO: 2483824
ucuuccauuaaaguugagg

SEQ ID NO: 2483826 - RNA, 19 nt, Artificial Sequence
  Description of Artificial Sequence: Synthetic oligonucleotide
  Sense strand starting at position 327 of SEQ ID NO: 1887599
cuacguguugguccagcua

SEQ ID NO: 2483827 - RNA, 19 nt, Artificial Sequence
  Description of Artificial Sequence: Synthetic oligonucleotide
  Antisense strand to SEQ ID NO: 2483826
uagcuggaccaacacguag

SEQ ID NO: 2483828 - RNA, 19 nt, Artificial Sequence
  Description of Artificial Sequence: Synthetic oligonucleotide
  Sense strand starting at position 330 of SEQ ID NO: 1887599
cguguugguccagcuacuu

SEQ ID NO: 2483829 - RNA, 19 nt, Artificial Sequence
  Description of Artificial Sequence: Synthetic oligonucleotide
  Antisense strand to SEQ ID NO: 2483828
aaguagcuggaccaacacg

SEQ ID NO: 2483830 - RNA, 19 nt, Artificial Sequence
  Description of Artificial Sequence: Synthetic oligonucleotide
  Sense strand starting at position 342 of SEQ ID NO: 1887599
gcuacuuccuggcucacau

SEQ ID NO: 2483831 - RNA, 19 nt, Artificial Sequence
  Description of Artificial Sequence: Synthetic oligonucleotide
  Antisense strand to SEQ ID NO: 2483830
augugagccaggaaguagc

SEQ ID NO: 2483832 - RNA, 19 nt, Artificial Sequence
  Description of Artificial Sequence: Synthetic oligonucleotide
  Sense strand starting at position 533 of SEQ ID NO: 1887599
gugcuuccuccuugacuca

SEQ ID NO: 2483833 - RNA, 19 nt, Artificial Sequence
  Description of Artificial Sequence: Synthetic oligonucleotide
  Antisense strand to SEQ ID NO: 2483832
ugagucaaggaggaagcac

SEQ ID NO: 2483834 - RNA, 19 nt, Artificial Sequence
  Description of Artificial Sequence: Synthetic oligonucleotide
  Sense strand starting at position 664 of SEQ ID NO: 1887599
gacggcugagucuagaaga

SEQ ID NO: 2483835 - RNA, 19 nt, Artificial Sequence
  Description of Artificial Sequence: Synthetic oligonucleotide
  Antisense strand to SEQ ID NO: 2483834
ucuucuagacucagccguc

SEQ ID NO: 2483836 - RNA, 19 nt, Artificial Sequence
  Description of Artificial Sequence: Synthetic oligonucleotide
  Sense strand starting at position 804 of SEQ ID NO: 1887599
guccucuguuucugcugaa

SEQ ID NO: 2483837 - RNA, 19 nt, Artificial Sequence
  Description of Artificial Sequence: Synthetic oligonucleotide
  Antisense strand to SEQ ID NO: 2483836
uucagcagaaacagaggac

SEQ ID NO: 2483838 - RNA, 19 nt, Artificial Sequence
  Description of Artificial Sequence: Synthetic oligonucleotide
  Sense strand starting at position 805 of SEQ ID NO: 1887599
uccucuguuucugcugaaa

SEQ ID NO: 2483839 - RNA, 19 nt, Artificial Sequence
  Description of Artificial Sequence: Synthetic oligonucleotide
  Antisense strand to SEQ ID NO: 2483838
uuucagcagaaacagagga

SEQ ID NO: 2483840 - RNA, 19 nt, Artificial Sequence
  Description of Artificial Sequence: Synthetic oligonucleotide
  Sense strand starting at position 807 of SEQ ID NO: 1887599
cucuguuucugcugaaaug

SEQ ID NO: 2483841 - RNA, 19 nt, Artificial Sequence
  Description of Artificial Sequence: Synthetic oligonucleotide
  Antisense strand to SEQ ID NO: 2483840
cauuucagcagaaacagag

SEQ ID NO: 2483842 - RNA, 19 nt, Artificial Sequence
  Description of Artificial Sequence: Synthetic oligonucleotide
  Sense strand starting at position 808 of SEQ ID NO: 1887599
ucuguuucugcugaaauga

SEQ ID NO: 2483843 - RNA, 19 nt, Artificial Sequence
  Description of Artificial Sequence: Synthetic oligonucleotide
  Antisense strand to SEQ ID NO: 2483842
ucauuucagcagaaacaga

SEQ ID NO: 2483844 - RNA, 19 nt, Artificial Sequence
  Description of Artificial Sequence: Synthetic oligonucleotide
  Sense strand starting at position 875 of SEQ ID NO: 1887599
ggagcugagugcuuaguga

SEQ ID NO: 2483845 - RNA, 19 nt, Artificial Sequence
  Description of Artificial Sequence: Synthetic oligonucleotide
  Antisense strand to SEQ ID NO: 2483844
ucacuaagcacucagcucc

SEQ ID NO: 2483846 - RNA, 19 nt, Artificial Sequence
  Description of Artificial Sequence: Synthetic oligonucleotide
  Sense strand starting at position 884 of SEQ ID NO: 1887599
ugcuuagugaacugaggaa

SEQ ID NO: 2483847 - RNA, 19 nt, Artificial Sequence
  Description of Artificial Sequence: Synthetic oligonucleotide
  Antisense strand to SEQ ID NO: 2483846
uuccucaguucacuaagca

SEQ ID NO: 2483848 - RNA, 19 nt, Artificial Sequence
  Description of Artificial Sequence: Synthetic oligonucleotide
  Sense strand starting at position 1010 of SEQ ID NO: 1887599
uaaagauguuucuaggcac

SEQ ID NO: 2483849 - RNA, 19 nt, Artificial Sequence
  Description of Artificial Sequence: Synthetic oligonucleotide
  Antisense strand to SEQ ID NO: 2483848
gugccuagaaacaucuuua

SEQ ID NO: 2483850 - RNA, 19 nt, Artificial Sequence
  Description of Artificial Sequence: Synthetic oligonucleotide
  Sense strand starting at position 1013 of SEQ ID NO: 1887599
agauguuucuaggcacugu

SEQ ID NO: 2483851 - RNA, 19 nt, Artificial Sequence
  Description of Artificial Sequence: Synthetic oligonucleotide
  Antisense strand to SEQ ID NO: 2483850
acagugccuagaaacaucu

SEQ ID NO: 2483852 - RNA, 19 nt, Artificial Sequence
  Description of Artificial Sequence: Synthetic oligonucleotide
  Sense strand starting at position 1135 of SEQ ID NO: 1887599
uuuccugagcuaugaaaug

SEQ ID NO: 2483853 - RNA, 19 nt, Artificial Sequence
  Description of Artificial Sequence: Synthetic oligonucleotide
  Antisense strand to SEQ ID NO: 2483852
cauuucauagcucaggaaa

SEQ ID NO: 2483854 - RNA, 19 nt, Artificial Sequence
  Description of Artificial Sequence: Synthetic oligonucleotide
  Sense strand starting at position 1162 of SEQ ID NO: 1887599
aguggugccuucugaauga

SEQ ID NO: 2483855 - RNA, 19 nt, Artificial Sequence
  Description of Artificial Sequence: Synthetic oligonucleotide
  Antisense strand to SEQ ID NO: 2483854
ucauucagaaggcaccacu

SEQ ID NO: 2483856 - RNA, 19 nt, Artificial Sequence
  Description of Artificial Sequence: Synthetic oligonucleotide
  Sense strand starting at position 1218 of SEQ ID NO: 1887599
ggccucugcucugcuauua

SEQ ID NO: 2483857 - RNA, 19 nt, Artificial Sequence
  Description of Artificial Sequence: Synthetic oligonucleotide
  Antisense strand to SEQ ID NO: 2483856
uaauagcagagcagaggcc

SEQ ID NO: 2483858 - RNA, 19 nt, Artificial Sequence
  Description of Artificial Sequence: Synthetic oligonucleotide
  Sense strand starting at position 1341 of SEQ ID NO: 1887599
uaggcacugucuuauagga

SEQ ID NO: 2483859 - RNA, 19 nt, Artificial Sequence
  Description of Artificial Sequence: Synthetic oligonucleotide
  Antisense strand to SEQ ID NO: 2483858
uccuauaagacagugccua

SEQ ID NO: 2483860 - RNA, 19 nt, Artificial Sequence
  Description of Artificial Sequence: Synthetic oligonucleotide
  Sense strand starting at position 1343 of SEQ ID NO: 1887599
ggcacugucuuauaggaga

SEQ ID NO: 2483861 - RNA, 19 nt, Artificial Sequence
  Description of Artificial Sequence: Synthetic oligonucleotide
  Antisense strand to SEQ ID NO: 2483860
ucuccuauaagacagugcc

SEQ ID NO: 2483862 - RNA, 19 nt, Artificial Sequence
  Description of Artificial Sequence: Synthetic oligonucleotide
  Sense strand starting at position 1388 of SEQ ID NO: 1887599
agaagaacuucucauggga

SEQ ID NO: 2483863 - RNA, 19 nt, Artificial Sequence
  Description of Artificial Sequence: Synthetic oligonucleotide
  Antisense strand to SEQ ID NO: 2483862
ucccaugagaaguucuucu

SEQ ID NO: 2483864 - RNA, 19 nt, Artificial Sequence
  Description of Artificial Sequence: Synthetic oligonucleotide
  Sense strand starting at position 1801 of SEQ ID NO: 1887599
cuguaaagggaguauugua

SEQ ID NO: 2483865 - RNA, 19 nt, Artificial Sequence
  Description of Artificial Sequence: Synthetic oligonucleotide
  Antisense strand to SEQ ID NO: 2483864
uacaauacucccuuuacag

SEQ ID NO: 2483866 - RNA, 19 nt, Artificial Sequence
  Description of Artificial Sequence: Synthetic oligonucleotide
  Sense strand starting at position 2408 of SEQ ID NO: 1887599
gcauuucuauuauggauuu

SEQ ID NO: 2483867 - RNA, 19 nt, Artificial Sequence
  Description of Artificial Sequence: Synthetic oligonucleotide
  Antisense strand to SEQ ID NO: 2483866
aaauccauaauagaaaugc

SEQ ID NO: 2483868 - RNA, 19 nt, Artificial Sequence
  Description of Artificial Sequence: Synthetic oligonucleotide
  Sense strand starting at position 3341 of SEQ ID NO: 1887599
ccagccauccuguaggauu

SEQ ID NO: 2483869 - RNA, 19 nt, Artificial Sequence
  Description of Artificial Sequence: Synthetic oligonucleotide
  Antisense strand to SEQ ID NO: 2483868
aauccuacaggauggcugg

SEQ ID NO: 2483870 - RNA, 19 nt, Artificial Sequence
  Description of Artificial Sequence: Synthetic oligonucleotide
  Sense strand starting at position 3466 of SEQ ID NO: 1887599
acuaccuguacguggauau

SEQ ID NO: 2483871 - RNA, 19 nt, Artificial Sequence
  Description of Artificial Sequence: Synthetic oligonucleotide
  Antisense strand to SEQ ID NO: 2483870
auauccacguacagguagu

SEQ ID NO: 2483872 - RNA, 19 nt, Artificial Sequence
  Description of Artificial Sequence: Synthetic oligonucleotide
  Sense strand starting at position 3515 of SEQ ID NO: 1887599
gugccugaccuccaggaaa

SEQ ID NO: 2483873 - RNA, 19 nt, Artificial Sequence
  Description of Artificial Sequence: Synthetic oligonucleotide
  Antisense strand to SEQ ID NO: 2483872
uuuccuggaggucaggcac

SEQ ID NO: 2483874 - RNA, 19 nt, Artificial Sequence
  Description of Artificial Sequence: Synthetic oligonucleotide
  Sense strand starting at position 3517 of SEQ ID NO: 1887599
gccugaccuccaggaaaga

SEQ ID NO: 2483875 - RNA, 19 nt, Artificial Sequence
  Description of Artificial Sequence: Synthetic oligonucleotide
  Antisense strand to SEQ ID NO: 2483874
ucuuuccuggaggucaggc

SEQ ID NO: 2483876 - RNA, 19 nt, Artificial Sequence
  Description of Artificial Sequence: Synthetic oligonucleotide
  Sense strand starting at position 3954 of SEQ ID NO: 1887599
gccgcuuuguccuggcgau

SEQ ID NO: 2483877 - RNA, 19 nt, Artificial Sequence
  Description of Artificial Sequence: Synthetic oligonucleotide
  Antisense strand to SEQ ID NO: 2483876
aucgccaggacaaagcggc

SEQ ID NO: 2483878 - RNA, 19 nt, Artificial Sequence
  Description of Artificial Sequence: Synthetic oligonucleotide
  Sense strand starting at position 297 of SEQ ID NO: 1887600
agugcaacuuggucucaaa

SEQ ID NO: 2483879 - RNA, 19 nt, Artificial Sequence
  Description of Artificial Sequence: Synthetic oligonucleotide
  Antisense strand to SEQ ID NO: 2483878
uuugagaccaaguugcacu

SEQ ID NO: 2483880 - RNA, 19 nt, Artificial Sequence
  Description of Artificial Sequence: Synthetic oligonucleotide
  Sense strand starting at position 409 of SEQ ID NO: 1887600
ccaacagauccuugagauu

SEQ ID NO: 2483881 - RNA, 19 nt, Artificial Sequence
  Description of Artificial Sequence: Synthetic oligonucleotide
  Antisense strand to SEQ ID NO: 2483880
aaucucaaggaucuguugg

SEQ ID NO: 2483882 - RNA, 19 nt, Artificial Sequence
  Description of Artificial Sequence: Synthetic oligonucleotide
  Sense strand starting at position 412 of SEQ ID NO: 1887600
acagauccuugagauuugu

SEQ ID NO: 2483883 - RNA, 19 nt, Artificial Sequence
  Description of Artificial Sequence: Synthetic oligonucleotide
  Antisense strand to SEQ ID NO: 2483882
acaaaucucaaggaucugu

SEQ ID NO: 2483884 - RNA, 19 nt, Artificial Sequence
  Description of Artificial Sequence: Synthetic oligonucleotide
  Sense strand starting at position 422 of SEQ ID NO: 1887600
gagauuuguuuagaagagu

SEQ ID NO: 2483885 - RNA, 19 nt, Artificial Sequence
  Description of Artificial Sequence: Synthetic oligonucleotide
  Antisense strand to SEQ ID NO: 2483884
acucuucuaaacaaaucuc

SEQ ID NO: 2483886 - RNA, 19 nt, Artificial Sequence
  Description of Artificial Sequence: Synthetic oligonucleotide
  Sense strand starting at position 431 of SEQ ID NO: 1887600
uuagaagagucuggagagu

SEQ ID NO: 2483887 - RNA, 19 nt, Artificial Sequence
  Description of Artificial Sequence: Synthetic oligonucleotide
  Antisense strand to SEQ ID NO: 2483886
acucuccagacucuucuaa

SEQ ID NO: 2483888 - RNA, 19 nt, Artificial Sequence
  Description of Artificial Sequence: Synthetic oligonucleotide
  Sense strand starting at position 433 of SEQ ID NO: 1887600
agaagagucuggagaguga

SEQ ID NO: 2483889 - RNA, 19 nt, Artificial Sequence
  Description of Artificial Sequence: Synthetic oligonucleotide
  Antisense strand to SEQ ID NO: 2483888
ucacucuccagacucuucu

SEQ ID NO: 2483890 - RNA, 19 nt, Artificial Sequence
  Description of Artificial Sequence: Synthetic oligonucleotide
  Sense strand starting at position 480 of SEQ ID NO: 1887600
ugcucugccaguuaggaga

SEQ ID NO: 2483891 - RNA, 19 nt, Artificial Sequence
  Description of Artificial Sequence: Synthetic oligonucleotide
  Antisense strand to SEQ ID NO: 2483890
ucuccuaacuggcagagca

SEQ ID NO: 2483892 - RNA, 19 nt, Artificial Sequence
  Description of Artificial Sequence: Synthetic oligonucleotide
  Sense strand starting at position 659 of SEQ ID NO: 1887600
caaggcucuuagucugaaa

SEQ ID NO: 2483893 - RNA, 19 nt, Artificial Sequence
  Description of Artificial Sequence: Synthetic oligonucleotide
  Antisense strand to SEQ ID NO: 2483892
uuucagacuaagagccuug

SEQ ID NO: 2483894 - RNA, 19 nt, Artificial Sequence
  Description of Artificial Sequence: Synthetic oligonucleotide
  Sense strand starting at position 661 of SEQ ID NO: 1887600
aggcucuuagucugaaaug

SEQ ID NO: 2483895 - RNA, 19 nt, Artificial Sequence
  Description of Artificial Sequence: Synthetic oligonucleotide
  Antisense strand to SEQ ID NO: 2483894
cauuucagacuaagagccu

SEQ ID NO: 2483896 - RNA, 19 nt, Artificial Sequence
  Description of Artificial Sequence: Synthetic oligonucleotide
  Sense strand starting at position 662 of SEQ ID NO: 1887600
ggcucuuagucugaaauga

SEQ ID NO: 2483897 - RNA, 19 nt, Artificial Sequence
  Description of Artificial Sequence: Synthetic oligonucleotide
  Antisense strand to SEQ ID NO: 2483896
ucauuucagacuaagagcc

SEQ ID NO: 2483898 - RNA, 19 nt, Artificial Sequence
  Description of Artificial Sequence: Synthetic oligonucleotide
  Sense strand starting at position 694 of SEQ ID NO: 1887600
accggaaugacuuguucuc

SEQ ID NO: 2483899 - RNA, 19 nt, Artificial Sequence
  Description of Artificial Sequence: Synthetic oligonucleotide
  Antisense strand to SEQ ID NO: 2483898
gagaacaagucauuccggu

SEQ ID NO: 2483900 - RNA, 19 nt, Artificial Sequence
  Description of Artificial Sequence: Synthetic oligonucleotide
  Sense strand starting at position 696 of SEQ ID NO: 1887600
cggaaugacuuguucucua

SEQ ID NO: 2483901 - RNA, 19 nt, Artificial Sequence
  Description of Artificial Sequence: Synthetic oligonucleotide
  Antisense strand to SEQ ID NO: 2483900
uagagaacaagucauuccg

SEQ ID NO: 2483902 - RNA, 19 nt, Artificial Sequence
  Description of Artificial Sequence: Synthetic oligonucleotide
  Sense strand starting at position 700 of SEQ ID NO: 1887600
augacuuguucucuacagu

SEQ ID NO: 2483903 - RNA, 19 nt, Artificial Sequence
  Description of Artificial Sequence: Synthetic oligonucleotide
  Antisense strand to SEQ ID NO: 2483902
acuguagagaacaagucau

SEQ ID NO: 2483904 - RNA, 19 nt, Artificial Sequence
  Description of Artificial Sequence: Synthetic oligonucleotide
  Sense strand starting at position 701 of SEQ ID NO: 1887600
ugacuuguucucuacagua

SEQ ID NO: 2483905 - RNA, 19 nt, Artificial Sequence
  Description of Artificial Sequence: Synthetic oligonucleotide
  Antisense strand to SEQ ID NO: 2483904
uacuguagagaacaaguca

SEQ ID NO: 2483906 - RNA, 19 nt, Artificial Sequence
  Description of Artificial Sequence: Synthetic oligonucleotide
  Sense strand starting at position 703 of SEQ ID NO: 1887600
acuuguucucuacaguauu

SEQ ID NO: 2483907 - RNA, 19 nt, Artificial Sequence
  Description of Artificial Sequence: Synthetic oligonucleotide
  Antisense strand to SEQ ID NO: 2483906
aauacuguagagaacaagu

SEQ ID NO: 2483908 - RNA, 19 nt, Artificial Sequence
  Description of Artificial Sequence: Synthetic oligonucleotide
  Sense strand starting at position 709 of SEQ ID NO: 1887600
ucucuacaguauucucaga

SEQ ID NO: 2483909 - RNA, 19 nt, Artificial Sequence
  Description of Artificial Sequence: Synthetic oligonucleotide
  Antisense strand to SEQ ID NO: 2483908
ucugagaauacuguagaga

SEQ ID NO: 2483910 - RNA, 19 nt, Artificial Sequence
  Description of Artificial Sequence: Synthetic oligonucleotide
  Sense strand starting at position 808 of SEQ ID NO: 1887600
gcucuacuauuucucguaa

SEQ ID NO: 2483911 - RNA, 19 nt, Artificial Sequence
  Description of Artificial Sequence: Synthetic oligonucleotide
  Antisense strand to SEQ ID NO: 2483910
uuacgagaaauaguagagc

SEQ ID NO: 2483912 - RNA, 19 nt, Artificial Sequence
  Description of Artificial Sequence: Synthetic oligonucleotide
  Sense strand starting at position 821 of SEQ ID NO: 1887600
ucguaauuauugccuucua

SEQ ID NO: 2483913 - RNA, 19 nt, Artificial Sequence
  Description of Artificial Sequence: Synthetic oligonucleotide
  Antisense strand to SEQ ID NO: 2483912
uagaaggcaauaauuacga

SEQ ID NO: 2483914 - RNA, 19 nt, Artificial Sequence
  Description of Artificial Sequence: Synthetic oligonucleotide
  Sense strand starting at position 822 of SEQ ID NO: 1887600
cguaauuauugccuucuaa

SEQ ID NO: 2483915 - RNA, 19 nt, Artificial Sequence
  Description of Artificial Sequence: Synthetic oligonucleotide
  Antisense strand to SEQ ID NO: 2483914
uuagaaggcaauaauuacg

SEQ ID NO: 2483916 - RNA, 19 nt, Artificial Sequence
  Description of Artificial Sequence: Synthetic oligonucleotide
  Sense strand starting at position 860 of SEQ ID NO: 1887600
aucuuuauugccugucuca

SEQ ID NO: 2483917 - RNA, 19 nt, Artificial Sequence
  Description of Artificial Sequence: Synthetic oligonucleotide
  Antisense strand to SEQ ID NO: 2483916
ugagacaggcaauaaagau

SEQ ID NO: 2483918 - RNA, 19 nt, Artificial Sequence
  Description of Artificial Sequence: Synthetic oligonucleotide
  Sense strand starting at position 1081 of SEQ ID NO: 1887600
agaacacucucuggcaaau

SEQ ID NO: 2483919 - RNA, 19 nt, Artificial Sequence
  Description of Artificial Sequence: Synthetic oligonucleotide
  Antisense strand to SEQ ID NO: 2483918
auuugccagagaguguucu

SEQ ID NO: 2483920 - RNA, 19 nt, Artificial Sequence
  Description of Artificial Sequence: Synthetic oligonucleotide
  Sense strand starting at position 1116 of SEQ ID NO: 1887600
guauuugucuaagaaagga

SEQ ID NO: 2483921 - RNA, 19 nt, Artificial Sequence
  Description of Artificial Sequence: Synthetic oligonucleotide
  Antisense strand to SEQ ID NO: 2483920
uccuuucuuagacaaauac

SEQ ID NO: 2483922 - RNA, 19 nt, Artificial Sequence
  Description of Artificial Sequence: Synthetic oligonucleotide
  Sense strand starting at position 1140 of SEQ ID NO: 1887600
uucugaucccagugaggcu

SEQ ID NO: 2483923 - RNA, 19 nt, Artificial Sequence
  Description of Artificial Sequence: Synthetic oligonucleotide
  Antisense strand to SEQ ID NO: 2483922
agccucacugggaucagaa

SEQ ID NO: 2483924 - RNA, 19 nt, Artificial Sequence
  Description of Artificial Sequence: Synthetic oligonucleotide
  Sense strand starting at position 1270 of SEQ ID NO: 1887600
uucuaugaccggcguucua

SEQ ID NO: 2483925 - RNA, 19 nt, Artificial Sequence
  Description of Artificial Sequence: Synthetic oligonucleotide
  Antisense strand to SEQ ID NO: 2483924
uagaacgccggucauagaa

SEQ ID NO: 2483926 - RNA, 19 nt, Artificial Sequence
  Description of Artificial Sequence: Synthetic oligonucleotide
  Sense strand starting at position 1280 of SEQ ID NO: 1887600
ggcguucuaaaguggauaa

SEQ ID NO: 2483927 - RNA, 19 nt, Artificial Sequence
  Description of Artificial Sequence: Synthetic oligonucleotide
  Antisense strand to SEQ ID NO: 2483926
uuauccacuuuagaacgcc

SEQ ID NO: 2483928 - RNA, 19 nt, Artificial Sequence
  Description of Artificial Sequence: Synthetic oligonucleotide
  Sense strand starting at position 1281 of SEQ ID NO: 1887600
gcguucuaaaguggauaau

SEQ ID NO: 2483929 - RNA, 19 nt, Artificial Sequence
  Description of Artificial Sequence: Synthetic oligonucleotide
  Antisense strand to SEQ ID NO: 2483928
auuauccacuuuagaacgc

SEQ ID NO: 2483930 - RNA, 19 nt, Artificial Sequence
  Description of Artificial Sequence: Synthetic oligonucleotide
  Sense strand starting at position 1292 of SEQ ID NO: 1887600
uggauaauccuaggcucau

SEQ ID NO: 2483931 - RNA, 19 nt, Artificial Sequence
  Description of Artificial Sequence: Synthetic oligonucleotide
  Antisense strand to SEQ ID NO: 2483930
augagccuaggauuaucca

SEQ ID NO: 2483932 - RNA, 19 nt, Artificial Sequence
  Description of Artificial Sequence: Synthetic oligonucleotide
  Sense strand starting at position 1293 of SEQ ID NO: 1887600
ggauaauccuaggcucauc

SEQ ID NO: 2483933 - RNA, 19 nt, Artificial Sequence
  Description of Artificial Sequence: Synthetic oligonucleotide
  Antisense strand to SEQ ID NO: 2483932
gaugagccuaggauuaucc

SEQ ID NO: 2483934 - RNA, 19 nt, Artificial Sequence
  Description of Artificial Sequence: Synthetic oligonucleotide
  Sense strand starting at position 1329 of SEQ ID NO: 1887600
ucuaacggauccuaagaaa

SEQ ID NO: 2483935 - RNA, 19 nt, Artificial Sequence
  Description of Artificial Sequence: Synthetic oligonucleotide
  Antisense strand to SEQ ID NO: 2483934
uuucuuaggauccguuaga

SEQ ID NO: 2483936 - RNA, 19 nt, Artificial Sequence
  Description of Artificial Sequence: Synthetic oligonucleotide
  Sense strand starting at position 1360 of SEQ ID NO: 1887600
aggacuuuggcucaagguu

SEQ ID NO: 2483937 - RNA, 19 nt, Artificial Sequence
  Description of Artificial Sequence: Synthetic oligonucleotide
  Antisense strand to SEQ ID NO: 2483936
aaccuugagccaaaguccu

SEQ ID NO: 2483938 - RNA, 19 nt, Artificial Sequence
  Description of Artificial Sequence: Synthetic oligonucleotide
  Sense strand starting at position 1384 of SEQ ID NO: 1887600
gcuaguggugagcagacaa

SEQ ID NO: 2483939 - RNA, 19 nt, Artificial Sequence
  Description of Artificial Sequence: Synthetic oligonucleotide
  Antisense strand to SEQ ID NO: 2483938
uugucugcucaccacuagc

SEQ ID NO: 2483940 - RNA, 19 nt, Artificial Sequence
  Description of Artificial Sequence: Synthetic oligonucleotide
  Sense strand starting at position 1413 of SEQ ID NO: 1887600
ugcacccuucgagaaacuu

SEQ ID NO: 2483941 - RNA, 19 nt, Artificial Sequence
  Description of Artificial Sequence: Synthetic oligonucleotide
  Antisense strand to SEQ ID NO: 2483940
aaguuucucgaagggugca

SEQ ID NO: 2483942 - RNA, 19 nt, Artificial Sequence
  Description of Artificial Sequence: Synthetic oligonucleotide
  Sense strand starting at position 1538 of SEQ ID NO: 1887600
ccucgauaaucuugauaaa

SEQ ID NO: 2483943 - RNA, 19 nt, Artificial Sequence
  Description of Artificial Sequence: Synthetic oligonucleotide
  Antisense strand to SEQ ID NO: 2483942
uuuaucaagauuaucgagg

SEQ ID NO: 2483944 - RNA, 19 nt, Artificial Sequence
  Description of Artificial Sequence: Synthetic oligonucleotide
  Sense strand starting at position 1627 of SEQ ID NO: 1887600
ggcgugagcgccguuauga

SEQ ID NO: 2483945 - RNA, 19 nt, Artificial Sequence
  Description of Artificial Sequence: Synthetic oligonucleotide
  Antisense strand to SEQ ID NO: 2483944
ucauaacggcgcucacgcc

SEQ ID NO: 2483946 - RNA, 19 nt, Artificial Sequence
  Description of Artificial Sequence: Synthetic oligonucleotide
  Sense strand starting at position 2395 of SEQ ID NO: 1887600
ccgggauucgucugcgcau

SEQ ID NO: 2483947 - RNA, 19 nt, Artificial Sequence
  Description of Artificial Sequence: Synthetic oligonucleotide
  Antisense strand to SEQ ID NO: 2483946
augcgcagacgaaucccgg

SEQ ID NO: 2483948 - RNA, 19 nt, Artificial Sequence
  Description of Artificial Sequence: Synthetic oligonucleotide
  Sense strand starting at position 3308 of SEQ ID NO: 1887600
aauguuagguuagugcaua

SEQ ID NO: 2483949 - RNA, 19 nt, Artificial Sequence
  Description of Artificial Sequence: Synthetic oligonucleotide
  Antisense strand to SEQ ID NO: 2483948
uaugcacuaaccuaacauu

SEQ ID NO: 2483950 - RNA, 19 nt, Artificial Sequence
  Description of Artificial Sequence: Synthetic oligonucleotide
  Sense strand starting at position 3342 of SEQ ID NO: 1887600
gggaccaguugcugaaacu

SEQ ID NO: 2483951 - RNA, 19 nt, Artificial Sequence
  Description of Artificial Sequence: Synthetic oligonucleotide
  Antisense strand to SEQ ID NO: 2483950
aguuucagcaacugguccc

SEQ ID NO: 2483952 - RNA, 19 nt, Artificial Sequence
  Description of Artificial Sequence: Synthetic oligonucleotide
  Sense strand starting at position 3390 of SEQ ID NO: 1887600
ggacuaaacugucacauuc

SEQ ID NO: 2483953 - RNA, 19 nt, Artificial Sequence
  Description of Artificial Sequence: Synthetic oligonucleotide
  Antisense strand to SEQ ID NO: 2483952
gaaugugacaguuuagucc

SEQ ID NO: 2483954 - RNA, 19 nt, Artificial Sequence
  Description of Artificial Sequence: Synthetic oligonucleotide
  Sense strand starting at position 3414 of SEQ ID NO: 1887600
ggaccugugagcuguauuc

SEQ ID NO: 2483955 - RNA, 19 nt, Artificial Sequence
  Description of Artificial Sequence: Synthetic oligonucleotide
  Antisense strand to SEQ ID NO: 2483954
gaauacagcucacaggucc

SEQ ID NO: 2483956 - RNA, 19 nt, Artificial Sequence
  Description of Artificial Sequence: Synthetic oligonucleotide
  Sense strand starting at position 3416 of SEQ ID NO: 1887600
accugugagcuguauucuu

SEQ ID NO: 2483957 - RNA, 19 nt, Artificial Sequence
  Description of Artificial Sequence: Synthetic oligonucleotide
  Antisense strand to SEQ ID NO: 2483956
aagaauacagcucacaggu

SEQ ID NO: 2483958 - RNA, 19 nt, Artificial Sequence
  Description of Artificial Sequence: Synthetic oligonucleotide
  Sense strand starting at position 44 of SEQ ID NO: 1887601
gcgugaucuuggcccuaau

SEQ ID NO: 2483959 - RNA, 19 nt, Artificial Sequence
  Description of Artificial Sequence: Synthetic oligonucleotide
  Antisense strand to SEQ ID NO: 2483958
auuagggccaagaucacgc

SEQ ID NO: 2483960 - RNA, 19 nt, Artificial Sequence
  Description of Artificial Sequence: Synthetic oligonucleotide
  Sense strand starting at position 779 of SEQ ID NO: 1887601
gcaggagacacacgauuau

SEQ ID NO: 2483961 - RNA, 19 nt, Artificial Sequence
  Description of Artificial Sequence: Synthetic oligonucleotide
  Antisense strand to SEQ ID NO: 2483960
auaaucgugugucuccugc

SEQ ID NO: 2483962 - RNA, 19 nt, Artificial Sequence
  Description of Artificial Sequence: Synthetic oligonucleotide
  Sense strand starting at position 788 of SEQ ID NO: 1887601
acacgauuaucugggcaga

SEQ ID NO: 2483963 - RNA, 19 nt, Artificial Sequence
  Description of Artificial Sequence: Synthetic oligonucleotide
  Antisense strand to SEQ ID NO: 2483962
ucugcccagauaaucgugu

SEQ ID NO: 2483964 - RNA, 19 nt, Artificial Sequence
  Description of Artificial Sequence: Synthetic oligonucleotide
  Sense strand starting at position 789 of SEQ ID NO: 1887601
cacgauuaucugggcagaa

SEQ ID NO: 2483965 - RNA, 19 nt, Artificial Sequence
  Description of Artificial Sequence: Synthetic oligonucleotide
  Antisense strand to SEQ ID NO: 2483964
uucugcccagauaaucgug

SEQ ID NO: 2483966 - RNA, 19 nt, Artificial Sequence
  Description of Artificial Sequence: Synthetic oligonucleotide
  Sense strand starting at position 790 of SEQ ID NO: 1887601
acgauuaucugggcagaau

SEQ ID NO: 2483967 - RNA, 19 nt, Artificial Sequence
  Description of Artificial Sequence: Synthetic oligonucleotide
  Antisense strand to SEQ ID NO: 2483966
auucugcccagauaaucgu

SEQ ID NO: 2483968 - RNA, 19 nt, Artificial Sequence
  Description of Artificial Sequence: Synthetic oligonucleotide
  Sense strand starting at position 791 of SEQ ID NO: 1887601
cgauuaucugggcagaauc

SEQ ID NO: 2483969 - RNA, 19 nt, Artificial Sequence
  Description of Artificial Sequence: Synthetic oligonucleotide
  Antisense strand to SEQ ID NO: 2483968
gauucugcccagauaaucg

SEQ ID NO: 2483970 - RNA, 19 nt, Artificial Sequence
  Description of Artificial Sequence: Synthetic oligonucleotide
  Sense strand starting at position 801 of SEQ ID NO: 1887601
ggcagaaucaguuagagca

SEQ ID NO: 2483971 - RNA, 19 nt, Artificial Sequence
  Description of Artificial Sequence: Synthetic oligonucleotide
  Antisense strand to SEQ ID NO: 2483970
ugcucuaacugauucugcc

SEQ ID NO: 2483972 - RNA, 19 nt, Artificial Sequence
  Description of Artificial Sequence: Synthetic oligonucleotide
  Sense strand starting at position 1200 of SEQ ID NO: 1887601
agcgacuaguuagacagaa

SEQ ID NO: 2483973 - RNA, 19 nt, Artificial Sequence
  Description of Artificial Sequence: Synthetic oligonucleotide
  Antisense strand to SEQ ID NO: 2483972
uucugucuaacuagucgcu

SEQ ID NO: 2483974 - RNA, 19 nt, Artificial Sequence
  Description of Artificial Sequence: Synthetic oligonucleotide
  Sense strand starting at position 1219 of SEQ ID NO: 1887601
ggcagcaacuucuccaaga

SEQ ID NO: 2483975 - RNA, 19 nt, Artificial Sequence
  Description of Artificial Sequence: Synthetic oligonucleotide
  Antisense strand to SEQ ID NO: 2483974
ucuuggagaaguugcugcc

SEQ ID NO: 2483976 - RNA, 19 nt, Artificial Sequence
  Description of Artificial Sequence: Synthetic oligonucleotide
  Sense strand starting at position 1276 of SEQ ID NO: 1887601
gugcaugacacccgaguau

SEQ ID NO: 2483977 - RNA, 19 nt, Artificial Sequence
  Description of Artificial Sequence: Synthetic oligonucleotide
  Antisense strand to SEQ ID NO: 2483976
auacucgggugucaugcac

SEQ ID NO: 2483978 - RNA, 19 nt, Artificial Sequence
  Description of Artificial Sequence: Synthetic oligonucleotide
  Sense strand starting at position 1285 of SEQ ID NO: 1887601
acccgaguaugucuugaac

SEQ ID NO: 2483979 - RNA, 19 nt, Artificial Sequence
  Description of Artificial Sequence: Synthetic oligonucleotide
  Antisense strand to SEQ ID NO: 2483978
guucaagacauacucgggu

SEQ ID NO: 2483980 - RNA, 19 nt, Artificial Sequence
  Description of Artificial Sequence: Synthetic oligonucleotide
  Sense strand starting at position 1287 of SEQ ID NO: 1887601
ccgaguaugucuugaacug

SEQ ID NO: 2483981 - RNA, 19 nt, Artificial Sequence
  Description of Artificial Sequence: Synthetic oligonucleotide
  Antisense strand to SEQ ID NO: 2483980
caguucaagacauacucgg

SEQ ID NO: 2483982 - RNA, 19 nt, Artificial Sequence
  Description of Artificial Sequence: Synthetic oligonucleotide
  Sense strand starting at position 1450 of SEQ ID NO: 1887601
gcagcucgaugcuacgaua

SEQ ID NO: 2483983 - RNA, 19 nt, Artificial Sequence
  Description of Artificial Sequence: Synthetic oligonucleotide
  Antisense strand to SEQ ID NO: 2483982
uaucguagcaucgagcugc

SEQ ID NO: 2483984 - RNA, 19 nt, Artificial Sequence
  Description of Artificial Sequence: Synthetic oligonucleotide
  Sense strand starting at position 1689 of SEQ ID NO: 1887601
uguugagagucacagggau

SEQ ID NO: 2483985 - RNA, 19 nt, Artificial Sequence
  Description of Artificial Sequence: Synthetic oligonucleotide
  Antisense strand to SEQ ID NO: 2483984
aucccugugacucucaaca

SEQ ID NO: 2483986 - RNA, 19 nt, Artificial Sequence
  Description of Artificial Sequence: Synthetic oligonucleotide
  Sense strand starting at position 1727 of SEQ ID NO: 1887601
auggaauugacgugaggga

SEQ ID NO: 2483987 - RNA, 19 nt, Artificial Sequence
  Description of Artificial Sequence: Synthetic oligonucleotide
  Antisense strand to SEQ ID NO: 2483986
ucccucacgucaauuccau

SEQ ID NO: 2483988 - RNA, 19 nt, Artificial Sequence
  Description of Artificial Sequence: Synthetic oligonucleotide
  Sense strand starting at position 1863 of SEQ ID NO: 1887601
gggcguagacgugguguua

SEQ ID NO: 2483989 - RNA, 19 nt, Artificial Sequence
  Description of Artificial Sequence: Synthetic oligonucleotide
  Antisense strand to SEQ ID NO: 2483988
uaacaccacgucuacgccc

SEQ ID NO: 2483990 - RNA, 19 nt, Artificial Sequence
  Description of Artificial Sequence: Synthetic oligonucleotide
  Sense strand starting at position 1946 of SEQ ID NO: 1887601
gggcgauucuccucuuucu

SEQ ID NO: 2483991 - RNA, 19 nt, Artificial Sequence
  Description of Artificial Sequence: Synthetic oligonucleotide
  Antisense strand to SEQ ID NO: 2483990
agaaagaggagaaucgccc

SEQ ID NO: 2483992 - RNA, 19 nt, Artificial Sequence
  Description of Artificial Sequence: Synthetic oligonucleotide
  Sense strand starting at position 3265 of SEQ ID NO: 1887601
uggguaauuuguuacaaag

SEQ ID NO: 2483993 - RNA, 19 nt, Artificial Sequence
  Description of Artificial Sequence: Synthetic oligonucleotide
  Antisense strand to SEQ ID NO: 2483992
cuuuguaacaaauuaccca

SEQ ID NO: 2483994 - RNA, 19 nt, Artificial Sequence
  Description of Artificial Sequence: Synthetic oligonucleotide
  Sense strand starting at position 3275 of SEQ ID NO: 1887601
guuacaaaguaauagcuaa

SEQ ID NO: 2483995 - RNA, 19 nt, Artificial Sequence
  Description of Artificial Sequence: Synthetic oligonucleotide
  Antisense strand to SEQ ID NO: 2483994
uuagcuauuacuuuguaac

SEQ ID NO: 2483996 - RNA, 19 nt, Artificial Sequence
  Description of Artificial Sequence: Synthetic oligonucleotide
  Sense strand starting at position 3307 of SEQ ID NO: 1887601
aucuuagaagcuggauagu

SEQ ID NO: 2483997 - RNA, 19 nt, Artificial Sequence
  Description of Artificial Sequence: Synthetic oligonucleotide
  Antisense strand to SEQ ID NO: 2483996
acuauccagcuucuaagau

SEQ ID NO: 2483998 - RNA, 19 nt, Artificial Sequence
  Description of Artificial Sequence: Synthetic oligonucleotide
  Sense strand starting at position 3313 of SEQ ID NO: 1887601
gaagcuggauaguaaauaa

SEQ ID NO: 2483999 - RNA, 19 nt, Artificial Sequence
  Description of Artificial Sequence: Synthetic oligonucleotide
  Antisense strand to SEQ ID NO: 2483998
uuauuuacuauccagcuuc

SEQ ID NO: 2484000 - RNA, 19 nt, Artificial Sequence
  Description of Artificial Sequence: Synthetic oligonucleotide
  Sense strand starting at position 3343 of SEQ ID NO: 1887601
gggcgauguggagaaauug

SEQ ID NO: 2484001 - RNA, 19 nt, Artificial Sequence
  Description of Artificial Sequence: Synthetic oligonucleotide
  Antisense strand to SEQ ID NO: 2484000
caauuucuccacaucgccc

SEQ ID NO: 2484002 - RNA, 19 nt, Artificial Sequence
  Description of Artificial Sequence: Synthetic oligonucleotide
  Sense strand starting at position 3370 of SEQ ID NO: 1887601
guguccuguugaugggaau

SEQ ID NO: 2484003 - RNA, 19 nt, Artificial Sequence
  Description of Artificial Sequence: Synthetic oligonucleotide
  Antisense strand to SEQ ID NO: 2484002
auucccaucaacaggacac

SEQ ID NO: 2484004 - RNA, 19 nt, Artificial Sequence
  Description of Artificial Sequence: Synthetic oligonucleotide
  Sense strand starting at position 3373 of SEQ ID NO: 1887601
uccuguugaugggaaugua

SEQ ID NO: 2484005 - RNA, 19 nt, Artificial Sequence
  Description of Artificial Sequence: Synthetic oligonucleotide
  Antisense strand to SEQ ID NO: 2484004
uacauucccaucaacagga

SEQ ID NO: 2484006 - RNA, 19 nt, Artificial Sequence
  Description of Artificial Sequence: Synthetic oligonucleotide
  Sense strand starting at position 3734 of SEQ ID NO: 1887601
ucguguucauagcaguagu

SEQ ID NO: 2484007 - RNA, 19 nt, Artificial Sequence
  Description of Artificial Sequence: Synthetic oligonucleotide
  Antisense strand to SEQ ID NO: 2484006
acuacugcuaugaacacga

SEQ ID NO: 2484008 - RNA, 19 nt, Artificial Sequence
  Description of Artificial Sequence: Synthetic oligonucleotide
  Sense strand starting at position 3744 of SEQ ID NO: 1887601
agcaguaguauucgcaaga

SEQ ID NO: 2484009 - RNA, 19 nt, Artificial Sequence
  Description of Artificial Sequence: Synthetic oligonucleotide
  Antisense strand to SEQ ID NO: 2484008
ucuugcgaauacuacugcu

SEQ ID NO: 2484010 - RNA, 19 nt, Artificial Sequence
  Description of Artificial Sequence: Synthetic oligonucleotide
  Sense strand starting at position 3745 of SEQ ID NO: 1887601
gcaguaguauucgcaagaa

SEQ ID NO: 2484011 - RNA, 19 nt, Artificial Sequence
  Description of Artificial Sequence: Synthetic oligonucleotide
  Antisense strand to SEQ ID NO: 2484010
uucuugcgaauacuacugc

SEQ ID NO: 2484012 - RNA, 19 nt, Artificial Sequence
  Description of Artificial Sequence: Synthetic oligonucleotide
  Sense strand starting at position 3872 of SEQ ID NO: 1887601
ucugaugcaugcugugaca

SEQ ID NO: 2484013 - RNA, 19 nt, Artificial Sequence
  Description of Artificial Sequence: Synthetic oligonucleotide
  Antisense strand to SEQ ID NO: 2484012
ugucacagcaugcaucaga

SEQ ID NO: 2484014 - RNA, 19 nt, Artificial Sequence
  Description of Artificial Sequence: Synthetic oligonucleotide
  Sense strand starting at position 3881 of SEQ ID NO: 1887601
ugcugugacaucgaugaac

SEQ ID NO: 2484015 - RNA, 19 nt, Artificial Sequence
  Description of Artificial Sequence: Synthetic oligonucleotide
  Antisense strand to SEQ ID NO: 2484014
guucaucgaugucacagca

SEQ ID NO: 2484016 - RNA, 19 nt, Artificial Sequence
  Description of Artificial Sequence: Synthetic oligonucleotide
  Sense strand starting at position 3883 of SEQ ID NO: 1887601
cugugacaucgaugaacca

SEQ ID NO: 2484017 - RNA, 19 nt, Artificial Sequence
  Description of Artificial Sequence: Synthetic oligonucleotide
  Antisense strand to SEQ ID NO: 2484016
ugguucaucgaugucacag

SEQ ID NO: 2484018 - RNA, 19 nt, Artificial Sequence
  Description of Artificial Sequence: Synthetic oligonucleotide
  Sense strand starting at position 3884 of SEQ ID NO: 1887601
ugugacaucgaugaaccau

SEQ ID NO: 2484019 - RNA, 19 nt, Artificial Sequence
  Description of Artificial Sequence: Synthetic oligonucleotide
  Antisense strand to SEQ ID NO: 2484018
augguucaucgaugucaca

SEQ ID NO: 2484020 - RNA, 19 nt, Artificial Sequence
  Description of Artificial Sequence: Synthetic oligonucleotide
  Sense strand starting at position 380 of SEQ ID NO: 1887602
cgaagcacuucuuugaauc

SEQ ID NO: 2484021 - RNA, 19 nt, Artificial Sequence
  Description of Artificial Sequence: Synthetic oligonucleotide
  Antisense strand to SEQ ID NO: 2484020
gauucaaagaagugcuucg

SEQ ID NO: 2484022 - RNA, 19 nt, Artificial Sequence
  Description of Artificial Sequence: Synthetic oligonucleotide
  Sense strand starting at position 415 of SEQ ID NO: 1887602
uguguaggccuguauuaug

SEQ ID NO: 2484023 - RNA, 19 nt, Artificial Sequence
  Description of Artificial Sequence: Synthetic oligonucleotide
  Antisense strand to SEQ ID NO: 2484022
cauaauacaggccuacaca

SEQ ID NO: 2484024 - RNA, 19 nt, Artificial Sequence
  Description of Artificial Sequence: Synthetic oligonucleotide
  Sense strand starting at position 418 of SEQ ID NO: 1887602
guaggccuguauuauguau

SEQ ID NO: 2484025 - RNA, 19 nt, Artificial Sequence
  Description of Artificial Sequence: Synthetic oligonucleotide
  Antisense strand to SEQ ID NO: 2484024
auacauaauacaggccuac

SEQ ID NO: 2484026 - RNA, 19 nt, Artificial Sequence
  Description of Artificial Sequence: Synthetic oligonucleotide
  Sense strand starting at position 429 of SEQ ID NO: 1887602
uuauguauucuagauguga

SEQ ID NO: 2484027 - RNA, 19 nt, Artificial Sequence
  Description of Artificial Sequence: Synthetic oligonucleotide
  Antisense strand to SEQ ID NO: 2484026
ucacaucuagaauacauaa

SEQ ID NO: 2484028 - RNA, 19 nt, Artificial Sequence
  Description of Artificial Sequence: Synthetic oligonucleotide
  Sense strand starting at position 431 of SEQ ID NO: 1887602
auguauucuagaugugagu

SEQ ID NO: 2484029 - RNA, 19 nt, Artificial Sequence
  Description of Artificial Sequence: Synthetic oligonucleotide
  Antisense strand to SEQ ID NO: 2484028
acucacaucuagaauacau

SEQ ID NO: 2484030 - RNA, 19 nt, Artificial Sequence
  Description of Artificial Sequence: Synthetic oligonucleotide
  Sense strand starting at position 433 of SEQ ID NO: 1887602
guauucuagaugugaguaa

SEQ ID NO: 2484031 - RNA, 19 nt, Artificial Sequence
  Description of Artificial Sequence: Synthetic oligonucleotide
  Antisense strand to SEQ ID NO: 2484030
uuacucacaucuagaauac

SEQ ID NO: 2484032 - RNA, 19 nt, Artificial Sequence
  Description of Artificial Sequence: Synthetic oligonucleotide
  Sense strand starting at position 434 of SEQ ID NO: 1887602
uauucuagaugugaguaau

SEQ ID NO: 2484033 - RNA, 19 nt, Artificial Sequence
  Description of Artificial Sequence: Synthetic oligonucleotide
  Antisense strand to SEQ ID NO: 2484032
auuacucacaucuagaaua

SEQ ID NO: 2484034 - RNA, 19 nt, Artificial Sequence
  Description of Artificial Sequence: Synthetic oligonucleotide
  Sense strand starting at position 437 of SEQ ID NO: 1887602
ucuagaugugaguaaucua

SEQ ID NO: 2484035 - RNA, 19 nt, Artificial Sequence
  Description of Artificial Sequence: Synthetic oligonucleotide
  Antisense strand to SEQ ID NO: 2484034
uagauuacucacaucuaga

SEQ ID NO: 2484036 - RNA, 19 nt, Artificial Sequence
  Description of Artificial Sequence: Synthetic oligonucleotide
  Sense strand starting at position 442 of SEQ ID NO: 1887602
augugaguaaucuagggug

SEQ ID NO: 2484037 - RNA, 19 nt, Artificial Sequence
  Description of Artificial Sequence: Synthetic oligonucleotide
  Antisense strand to SEQ ID NO: 2484036
cacccuagauuacucacau

SEQ ID NO: 2484038 - RNA, 19 nt, Artificial Sequence
  Description of Artificial Sequence: Synthetic oligonucleotide
  Sense strand starting at position 444 of SEQ ID NO: 1887602
gugaguaaucuagggugau

SEQ ID NO: 2484039 - RNA, 19 nt, Artificial Sequence
  Description of Artificial Sequence: Synthetic oligonucleotide
  Antisense strand to SEQ ID NO: 2484038
aucacccuagauuacucac

SEQ ID NO: 2484040 - RNA, 19 nt, Artificial Sequence
  Description of Artificial Sequence: Synthetic oligonucleotide
  Sense strand starting at position 445 of SEQ ID NO: 1887602
ugaguaaucuagggugauu

SEQ ID NO: 2484041 - RNA, 19 nt, Artificial Sequence
  Description of Artificial Sequence: Synthetic oligonucleotide
  Antisense strand to SEQ ID NO: 2484040
aaucacccuagauuacuca

SEQ ID NO: 2484042 - RNA, 19 nt, Artificial Sequence
  Description of Artificial Sequence: Synthetic oligonucleotide
  Sense strand starting at position 743 of SEQ ID NO: 1887602
auuaaagaauuagccugau

SEQ ID NO: 2484043 - RNA, 19 nt, Artificial Sequence
  Description of Artificial Sequence: Synthetic oligonucleotide
  Antisense strand to SEQ ID NO: 2484042
aucaggcuaauucuuuaau

SEQ ID NO: 2484044 - RNA, 19 nt, Artificial Sequence
  Description of Artificial Sequence: Synthetic oligonucleotide
  Sense strand starting at position 822 of SEQ ID NO: 1887602
gccagagagaucgaggcua

SEQ ID NO: 2484045 - RNA, 19 nt, Artificial Sequence
  Description of Artificial Sequence: Synthetic oligonucleotide
  Antisense strand to SEQ ID NO: 2484044
uagccucgaucucucuggc

SEQ ID NO: 2484046 - RNA, 19 nt, Artificial Sequence
  Description of Artificial Sequence: Synthetic oligonucleotide
  Sense strand starting at position 824 of SEQ ID NO: 1887602
cagagagaucgaggcuaca

SEQ ID NO: 2484047 - RNA, 19 nt, Artificial Sequence
  Description of Artificial Sequence: Synthetic oligonucleotide
  Antisense strand to SEQ ID NO: 2484046
uguagccucgaucucucug

SEQ ID NO: 2484048 - RNA, 19 nt, Artificial Sequence
  Description of Artificial Sequence: Synthetic oligonucleotide
  Sense strand starting at position 953 of SEQ ID NO: 1887602
ggauucuuccaaugcauua

SEQ ID NO: 2484049 - RNA, 19 nt, Artificial Sequence
  Description of Artificial Sequence: Synthetic oligonucleotide
  Antisense strand to SEQ ID NO: 2484048
uaaugcauuggaagaaucc

SEQ ID NO: 2484050 - RNA, 19 nt, Artificial Sequence
  Description of Artificial Sequence: Synthetic oligonucleotide
  Sense strand starting at position 969 of SEQ ID NO: 1887602
uuacaaauaucagguuguu

SEQ ID NO: 2484051 - RNA, 19 nt, Artificial Sequence
  Description of Artificial Sequence: Synthetic oligonucleotide
  Antisense strand to SEQ ID NO: 2484050
aacaaccugauauuuguaa

SEQ ID NO: 2484052 - RNA, 19 nt, Artificial Sequence
  Description of Artificial Sequence: Synthetic oligonucleotide
  Sense strand starting at position 972 of SEQ ID NO: 1887602
caaauaucagguuguugag

SEQ ID NO: 2484053 - RNA, 19 nt, Artificial Sequence
  Description of Artificial Sequence: Synthetic oligonucleotide
  Antisense strand to SEQ ID NO: 2484052
cucaacaaccugauauuug

SEQ ID NO: 2484054 - RNA, 19 nt, Artificial Sequence
  Description of Artificial Sequence: Synthetic oligonucleotide
  Sense strand starting at position 975 of SEQ ID NO: 1887602
auaucagguuguugaguuu

SEQ ID NO: 2484055 - RNA, 19 nt, Artificial Sequence
  Description of Artificial Sequence: Synthetic oligonucleotide
  Antisense strand to SEQ ID NO: 2484054
aaacucaacaaccugauau

SEQ ID NO: 2484056 - RNA, 19 nt, Artificial Sequence
  Description of Artificial Sequence: Synthetic oligonucleotide
  Sense strand starting at position 1278 of SEQ ID NO: 1887602
gcuacugaauucuugaaac

SEQ ID NO: 2484057 - RNA, 19 nt, Artificial Sequence
  Description of Artificial Sequence: Synthetic oligonucleotide
  Antisense strand to SEQ ID NO: 2484056
guuucaagaauucaguagc

SEQ ID NO: 2484058 - RNA, 19 nt, Artificial Sequence
  Description of Artificial Sequence: Synthetic oligonucleotide
  Sense strand starting at position 2102 of SEQ ID NO: 1887602
ggcgcaggcguagugaaau

SEQ ID NO: 2484059 - RNA, 19 nt, Artificial Sequence
  Description of Artificial Sequence: Synthetic oligonucleotide
  Antisense strand to SEQ ID NO: 2484058
auuucacuacgccugcgcc

SEQ ID NO: 2484060 - RNA, 19 nt, Artificial Sequence
  Description of Artificial Sequence: Synthetic oligonucleotide
  Sense strand starting at position 2114 of SEQ ID NO: 1887602
gugaaauucucagagcccu

SEQ ID NO: 2484061 - RNA, 19 nt, Artificial Sequence
  Description of Artificial Sequence: Synthetic oligonucleotide
  Antisense strand to SEQ ID NO: 2484060
agggcucugagaauuucac

SEQ ID NO: 2484062 - RNA, 19 nt, Artificial Sequence
  Description of Artificial Sequence: Synthetic oligonucleotide
  Sense strand starting at position 2616 of SEQ ID NO: 1887602
gcgaauauuuauugagcuc

SEQ ID NO: 2484063 - RNA, 19 nt, Artificial Sequence
  Description of Artificial Sequence: Synthetic oligonucleotide
  Antisense strand to SEQ ID NO: 2484062
gagcucaauaaauauucgc

SEQ ID NO: 2484064 - RNA, 19 nt, Artificial Sequence
  Description of Artificial Sequence: Synthetic oligonucleotide
  Sense strand starting at position 2652 of SEQ ID NO: 1887602
ccgauaagcuauguacaga

SEQ ID NO: 2484065 - RNA, 19 nt, Artificial Sequence
  Description of Artificial Sequence: Synthetic oligonucleotide
  Antisense strand to SEQ ID NO: 2484064
ucuguacauagcuuaucgg

SEQ ID NO: 2484066 - RNA, 19 nt, Artificial Sequence
  Description of Artificial Sequence: Synthetic oligonucleotide
  Sense strand starting at position 2655 of SEQ ID NO: 1887602
auaagcuauguacagacau

SEQ ID NO: 2484067 - RNA, 19 nt, Artificial Sequence
  Description of Artificial Sequence: Synthetic oligonucleotide
  Antisense strand to SEQ ID NO: 2484066
augucuguacauagcuuau

SEQ ID NO: 2484068 - RNA, 19 nt, Artificial Sequence
  Description of Artificial Sequence: Synthetic oligonucleotide
  Sense strand starting at position 2669 of SEQ ID NO: 1887602
gacauaauucguuguaggu

SEQ ID NO: 2484069 - RNA, 19 nt, Artificial Sequence
  Description of Artificial Sequence: Synthetic oligonucleotide
  Antisense strand to SEQ ID NO: 2484068
accuacaacgaauuauguc

SEQ ID NO: 2484070 - RNA, 19 nt, Artificial Sequence
  Description of Artificial Sequence: Synthetic oligonucleotide
  Sense strand starting at position 2684 of SEQ ID NO: 1887602
aggucucauuuccacauuu

SEQ ID NO: 2484071 - RNA, 19 nt, Artificial Sequence
  Description of Artificial Sequence: Synthetic oligonucleotide
  Antisense strand to SEQ ID NO: 2484070
aaauguggaaaugagaccu

SEQ ID NO: 2484072 - RNA, 19 nt, Artificial Sequence
  Description of Artificial Sequence: Synthetic oligonucleotide
  Sense strand starting at position 2729 of SEQ ID NO: 1887602
gguuaagucacgugcccaa

SEQ ID NO: 2484073 - RNA, 19 nt, Artificial Sequence
  Description of Artificial Sequence: Synthetic oligonucleotide
  Antisense strand to SEQ ID NO: 2484072
uugggcacgugacuuaacc

SEQ ID NO: 2484074 - RNA, 19 nt, Artificial Sequence
  Description of Artificial Sequence: Synthetic oligonucleotide
  Sense strand starting at position 2744 of SEQ ID NO: 1887602
ccaaguucucacggccuau

SEQ ID NO: 2484075 - RNA, 19 nt, Artificial Sequence
  Description of Artificial Sequence: Synthetic oligonucleotide
  Antisense strand to SEQ ID NO: 2484074
auaggccgugagaacuugg

SEQ ID NO: 2484076 - RNA, 19 nt, Artificial Sequence
  Description of Artificial Sequence: Synthetic oligonucleotide
  Sense strand starting at position 2748 of SEQ ID NO: 1887602
guucucacggccuauaaau

SEQ ID NO: 2484077 - RNA, 19 nt, Artificial Sequence
  Description of Artificial Sequence: Synthetic oligonucleotide
  Antisense strand to SEQ ID NO: 2484076
auuuauaggccgugagaac

SEQ ID NO: 2484078 - RNA, 19 nt, Artificial Sequence
  Description of Artificial Sequence: Synthetic oligonucleotide
  Sense strand starting at position 2755 of SEQ ID NO: 1887602
cggccuauaaauugaggga

SEQ ID NO: 2484079 - RNA, 19 nt, Artificial Sequence
  Description of Artificial Sequence: Synthetic oligonucleotide
  Antisense strand to SEQ ID NO: 2484078
ucccucaauuuauaggccg

SEQ ID NO: 2484080 - RNA, 19 nt, Artificial Sequence
  Description of Artificial Sequence: Synthetic oligonucleotide
  Sense strand starting at position 2758 of SEQ ID NO: 1887602
ccuauaaauugagggauuc

SEQ ID NO: 2484081 - RNA, 19 nt, Artificial Sequence
  Description of Artificial Sequence: Synthetic oligonucleotide
  Antisense strand to SEQ ID NO: 2484080
gaaucccucaauuuauagg

SEQ ID NO: 2484082 - RNA, 19 nt, Artificial Sequence
  Description of Artificial Sequence: Synthetic oligonucleotide
  Sense strand starting at position 3212 of SEQ ID NO: 1887602
uucccuggcucugguaauu

SEQ ID NO: 2484083 - RNA, 19 nt, Artificial Sequence
  Description of Artificial Sequence: Synthetic oligonucleotide
  Antisense strand to SEQ ID NO: 2484082
aauuaccagagccagggaa

SEQ ID NO: 2484084 - RNA, 19 nt, Artificial Sequence
  Description of Artificial Sequence: Synthetic oligonucleotide
  Sense strand starting at position 3280 of SEQ ID NO: 1887602
gucggugccuacuuuauua

SEQ ID NO: 2484085 - RNA, 19 nt, Artificial Sequence
  Description of Artificial Sequence: Synthetic oligonucleotide
  Antisense strand to SEQ ID NO: 2484084
uaauaaaguaggcaccgac

SEQ ID NO: 2484086 - RNA, 19 nt, Artificial Sequence
  Description of Artificial Sequence: Synthetic oligonucleotide
  Sense strand starting at position 3282 of SEQ ID NO: 1887602
cggugccuacuuuauuaua

SEQ ID NO: 2484087 - RNA, 19 nt, Artificial Sequence
  Description of Artificial Sequence: Synthetic oligonucleotide
  Antisense strand to SEQ ID NO: 2484086
uauaauaaaguaggcaccg

SEQ ID NO: 2484088 - RNA, 19 nt, Artificial Sequence
  Description of Artificial Sequence: Synthetic oligonucleotide
  Sense strand starting at position 3304 of SEQ ID NO: 1887602
guugauaauuauugucauc

SEQ ID NO: 2484089 - RNA, 19 nt, Artificial Sequence
  Description of Artificial Sequence: Synthetic oligonucleotide
  Antisense strand to SEQ ID NO: 2484088
gaugacaauaauuaucaac

SEQ ID NO: 2484090 - RNA, 19 nt, Artificial Sequence
  Description of Artificial Sequence: Synthetic oligonucleotide
  Sense strand starting at position 3544 of SEQ ID NO: 1887602
uaggauaccuccucuggga

SEQ ID NO: 2484091 - RNA, 19 nt, Artificial Sequence
  Description of Artificial Sequence: Synthetic oligonucleotide
  Antisense strand to SEQ ID NO: 2484090
ucccagaggagguauccua

SEQ ID NO: 2484092 - RNA, 19 nt, Artificial Sequence
  Description of Artificial Sequence: Synthetic oligonucleotide
  Sense strand starting at position 3546 of SEQ ID NO: 1887602
ggauaccuccucugggauu

SEQ ID NO: 2484093 - RNA, 19 nt, Artificial Sequence
  Description of Artificial Sequence: Synthetic oligonucleotide
  Antisense strand to SEQ ID NO: 2484092
aaucccagaggagguaucc

SEQ ID NO: 2484094 - RNA, 19 nt, Artificial Sequence
  Description of Artificial Sequence: Synthetic oligonucleotide
  Sense strand starting at position 3547 of SEQ ID NO: 1887602
gauaccuccucugggauua

SEQ ID NO: 2484095 - RNA, 19 nt, Artificial Sequence
  Description of Artificial Sequence: Synthetic oligonucleotide
  Antisense strand to SEQ ID NO: 2484094
uaaucccagaggagguauc

SEQ ID NO: 2484096 - RNA, 19 nt, Artificial Sequence
  Description of Artificial Sequence: Synthetic oligonucleotide
  Sense strand starting at position 3560 of SEQ ID NO: 1887602
ggauuagcccucugggauu

SEQ ID NO: 2484097 - RNA, 19 nt, Artificial Sequence
  Description of Artificial Sequence: Synthetic oligonucleotide
  Antisense strand to SEQ ID NO: 2484096
aaucccagagggcuaaucc

SEQ ID NO: 2484098 - RNA, 19 nt, Artificial Sequence
  Description of Artificial Sequence: Synthetic oligonucleotide
  Sense strand starting at position 3573 of SEQ ID NO: 1887602
gggauuccaugaugaugga

SEQ ID NO: 2484099 - RNA, 19 nt, Artificial Sequence
  Description of Artificial Sequence: Synthetic oligonucleotide
  Antisense strand to SEQ ID NO: 2484098
uccaucaucauggaauccc

SEQ ID NO: 2484100 - RNA, 19 nt, Artificial Sequence
  Description of Artificial Sequence: Synthetic oligonucleotide
  Sense strand starting at position 2 of SEQ ID NO: 1887603
uguuguuaccgucgaguca

SEQ ID NO: 2484101 - RNA, 19 nt, Artificial Sequence
  Description of Artificial Sequence: Synthetic oligonucleotide
  Antisense strand to SEQ ID NO: 2484100
ugacucgacgguaacaaca

SEQ ID NO: 2484102 - RNA, 19 nt, Artificial Sequence
  Description of Artificial Sequence: Synthetic oligonucleotide
  Sense strand starting at position 4 of SEQ ID NO: 1887603
uuguuaccgucgagucaga

SEQ ID NO: 2484103 - RNA, 19 nt, Artificial Sequence
  Description of Artificial Sequence: Synthetic oligonucleotide
  Antisense strand to SEQ ID NO: 2484102
ucugacucgacgguaacaa

SEQ ID NO: 2484104 - RNA, 19 nt, Artificial Sequence
  Description of Artificial Sequence: Synthetic oligonucleotide
  Sense strand starting at position 11 of SEQ ID NO: 1887603
cgucgagucagagaguagu

SEQ ID NO: 2484105 - RNA, 19 nt, Artificial Sequence
  Description of Artificial Sequence: Synthetic oligonucleotide
  Antisense strand to SEQ ID NO: 2484104
acuacucucugacucgacg

SEQ ID NO: 2484106 - RNA, 19 nt, Artificial Sequence
  Description of Artificial Sequence: Synthetic oligonucleotide
  Sense strand starting at position 21 of SEQ ID NO: 1887603
gagaguaguccuggagagg

SEQ ID NO: 2484107 - RNA, 19 nt, Artificial Sequence
  Description of Artificial Sequence: Synthetic oligonucleotide
  Antisense strand to SEQ ID NO: 2484106
ccucuccaggacuacucuc

SEQ ID NO: 2484108 - RNA, 19 nt, Artificial Sequence
  Description of Artificial Sequence: Synthetic oligonucleotide
  Sense strand starting at position 22 of SEQ ID NO: 1887603
agaguaguccuggagaggu

SEQ ID NO: 2484109 - RNA, 19 nt, Artificial Sequence
  Description of Artificial Sequence: Synthetic oligonucleotide
  Antisense strand to SEQ ID NO: 2484108
accucuccaggacuacucu

SEQ ID NO: 2484110 - RNA, 19 nt, Artificial Sequence
  Description of Artificial Sequence: Synthetic oligonucleotide
  Sense strand starting at position 321 of SEQ ID NO: 1887603
uugugcucccagggugauu

SEQ ID NO: 2484111 - RNA, 19 nt, Artificial Sequence
  Description of Artificial Sequence: Synthetic oligonucleotide
  Antisense strand to SEQ ID NO: 2484110
aaucacccugggagcacaa

SEQ ID NO: 2484112 - RNA, 19 nt, Artificial Sequence
  Description of Artificial Sequence: Synthetic oligonucleotide
  Sense strand starting at position 356 of SEQ ID NO: 1887603
gugugauggugugcuccaa

SEQ ID NO: 2484113 - RNA, 19 nt, Artificial Sequence
  Description of Artificial Sequence: Synthetic oligonucleotide
  Antisense strand to SEQ ID NO: 2484112
uuggagcacaccaucacac

SEQ ID NO: 2484114 - RNA, 19 nt, Artificial Sequence
  Description of Artificial Sequence: Synthetic oligonucleotide
  Sense strand starting at position 419 of SEQ ID NO: 1887603
gccuucugucgccgucaga

SEQ ID NO: 2484115 - RNA, 19 nt, Artificial Sequence
  Description of Artificial Sequence: Synthetic oligonucleotide
  Antisense strand to SEQ ID NO: 2484114
ucugacggcgacagaaggc

SEQ ID NO: 2484116 - RNA, 19 nt, Artificial Sequence
  Description of Artificial Sequence: Synthetic oligonucleotide
  Sense strand starting at position 437 of SEQ ID NO: 1887603
agugcugucuuaugugaag

SEQ ID NO: 2484117 - RNA, 19 nt, Artificial Sequence
  Description of Artificial Sequence: Synthetic oligonucleotide
  Antisense strand to SEQ ID NO: 2484116
cuucacauaagacagcacu

SEQ ID NO: 2484118 - RNA, 19 nt, Artificial Sequence
  Description of Artificial Sequence: Synthetic oligonucleotide
  Sense strand starting at position 439 of SEQ ID NO: 1887603
ugcugucuuaugugaagug

SEQ ID NO: 2484119 - RNA, 19 nt, Artificial Sequence
  Description of Artificial Sequence: Synthetic oligonucleotide
  Antisense strand to SEQ ID NO: 2484118
cacuucacauaagacagca

SEQ ID NO: 2484120 - RNA, 19 nt, Artificial Sequence
  Description of Artificial Sequence: Synthetic oligonucleotide
  Sense strand starting at position 624 of SEQ ID NO: 1887603
caaucucaugccuggaagu

SEQ ID NO: 2484121 - RNA, 19 nt, Artificial Sequence
  Description of Artificial Sequence: Synthetic oligonucleotide
  Antisense strand to SEQ ID NO: 2484120
acuuccaggcaugagauug

SEQ ID NO: 2484122 - RNA, 19 nt, Artificial Sequence
  Description of Artificial Sequence: Synthetic oligonucleotide
  Sense strand starting at position 626 of SEQ ID NO: 1887603
aucucaugccuggaagucu

SEQ ID NO: 2484123 - RNA, 19 nt, Artificial Sequence
  Description of Artificial Sequence: Synthetic oligonucleotide
  Antisense strand to SEQ ID NO: 2484122
agacuuccaggcaugagau

SEQ ID NO: 2484124 - RNA, 19 nt, Artificial Sequence
  Description of Artificial Sequence: Synthetic oligonucleotide
  Sense strand starting at position 2275 of SEQ ID NO: 1887603
agcccuugcucauauggau

SEQ ID NO: 2484125 - RNA, 19 nt, Artificial Sequence
  Description of Artificial Sequence: Synthetic oligonucleotide
  Antisense strand to SEQ ID NO: 2484124
auccauaugagcaagggcu

SEQ ID NO: 2484126 - RNA, 19 nt, Artificial Sequence
  Description of Artificial Sequence: Synthetic oligonucleotide
  Sense strand starting at position 2281 of SEQ ID NO: 1887603
ugcucauauggaugagaac

SEQ ID NO: 2484127 - RNA, 19 nt, Artificial Sequence
  Description of Artificial Sequence: Synthetic oligonucleotide
  Antisense strand to SEQ ID NO: 2484126
guucucauccauaugagca

SEQ ID NO: 2484128 - RNA, 19 nt, Artificial Sequence
  Description of Artificial Sequence: Synthetic oligonucleotide
  Sense strand starting at position 2535 of SEQ ID NO: 1887603
cccuuagaguugucccaaa

SEQ ID NO: 2484129 - RNA, 19 nt, Artificial Sequence
  Description of Artificial Sequence: Synthetic oligonucleotide
  Antisense strand to SEQ ID NO: 2484128
uuugggacaacucuaaggg

SEQ ID NO: 2484130 - RNA, 19 nt, Artificial Sequence
  Description of Artificial Sequence: Synthetic oligonucleotide
  Sense strand starting at position 2794 of SEQ ID NO: 1887603
ugccuuugggcucaagcaa

SEQ ID NO: 2484131 - RNA, 19 nt, Artificial Sequence
  Description of Artificial Sequence: Synthetic oligonucleotide
  Antisense strand to SEQ ID NO: 2484130
uugcuugagcccaaaggca

SEQ ID NO: 2484132 - RNA, 19 nt, Artificial Sequence
  Description of Artificial Sequence: Synthetic oligonucleotide
  Sense strand starting at position 2829 of SEQ ID NO: 1887603
ucccgauuagcugauacua

SEQ ID NO: 2484133 - RNA, 19 nt, Artificial Sequence
  Description of Artificial Sequence: Synthetic oligonucleotide
  Antisense strand to SEQ ID NO: 2484132
uaguaucagcuaaucggga

SEQ ID NO: 2484134 - RNA, 19 nt, Artificial Sequence
  Description of Artificial Sequence: Synthetic oligonucleotide
  Sense strand starting at position 2831 of SEQ ID NO: 1887603
ccgauuagcugauacuaca

SEQ ID NO: 2484135 - RNA, 19 nt, Artificial Sequence
  Description of Artificial Sequence: Synthetic oligonucleotide
  Antisense strand to SEQ ID NO: 2484134
uguaguaucagcuaaucgg

SEQ ID NO: 2484136 - RNA, 19 nt, Artificial Sequence
  Description of Artificial Sequence: Synthetic oligonucleotide
  Sense strand starting at position 2988 of SEQ ID NO: 1887603
gagcccagccucgaucauu

SEQ ID NO: 2484137 - RNA, 19 nt, Artificial Sequence
  Description of Artificial Sequence: Synthetic oligonucleotide
  Antisense strand to SEQ ID NO: 2484136
aaugaucgaggcugggcuc

SEQ ID NO: 2484138 - RNA, 19 nt, Artificial Sequence
  Description of Artificial Sequence: Synthetic oligonucleotide
  Sense strand starting at position 3075 of SEQ ID NO: 1887603
ucauguuaguauccucagu

SEQ ID NO: 2484139 - RNA, 19 nt, Artificial Sequence
  Description of Artificial Sequence: Synthetic oligonucleotide
  Antisense strand to SEQ ID NO: 2484138
acugaggauacuaacauga

SEQ ID NO: 2484140 - RNA, 19 nt, Artificial Sequence
  Description of Artificial Sequence: Synthetic oligonucleotide
  Sense strand starting at position 3077 of SEQ ID NO: 1887603
auguuaguauccucaguuu

SEQ ID NO: 2484141 - RNA, 19 nt, Artificial Sequence
  Description of Artificial Sequence: Synthetic oligonucleotide
  Antisense strand to SEQ ID NO: 2484140
aaacugaggauacuaacau

SEQ ID NO: 2484142 - RNA, 19 nt, Artificial Sequence
  Description of Artificial Sequence: Synthetic oligonucleotide
  Sense strand starting at position 3233 of SEQ ID NO: 1887603
ugccgagaaucuccucaga

SEQ ID NO: 2484143 - RNA, 19 nt, Artificial Sequence
  Description of Artificial Sequence: Synthetic oligonucleotide
  Antisense strand to SEQ ID NO: 2484142
ucugaggagauucucggca

SEQ ID NO: 2484144 - RNA, 19 nt, Artificial Sequence
  Description of Artificial Sequence: Synthetic oligonucleotide
  Sense strand starting at position 3235 of SEQ ID NO: 1887603
ccgagaaucuccucagaca

SEQ ID NO: 2484145 - RNA, 19 nt, Artificial Sequence
  Description of Artificial Sequence: Synthetic oligonucleotide
  Antisense strand to SEQ ID NO: 2484144
ugucugaggagauucucgg

SEQ ID NO: 2484146 - RNA, 19 nt, Artificial Sequence
  Description of Artificial Sequence: Synthetic oligonucleotide
  Sense strand starting at position 3369 of SEQ ID NO: 1887603
uccaguuuacaguggauau

SEQ ID NO: 2484147 - RNA, 19 nt, Artificial Sequence
  Description of Artificial Sequence: Synthetic oligonucleotide
  Antisense strand to SEQ ID NO: 2484146
auauccacuguaaacugga

SEQ ID NO: 2484148 - RNA, 19 nt, Artificial Sequence
  Description of Artificial Sequence: Synthetic oligonucleotide
  Sense strand starting at position 3412 of SEQ ID NO: 1887603
aagagagguuuaccuguuu

SEQ ID NO: 2484149 - RNA, 19 nt, Artificial Sequence
  Description of Artificial Sequence: Synthetic oligonucleotide
  Antisense strand to SEQ ID NO: 2484148
aaacagguaaaccucucuu

SEQ ID NO: 2484150 - RNA, 19 nt, Artificial Sequence
  Description of Artificial Sequence: Synthetic oligonucleotide
  Sense strand starting at position 3419 of SEQ ID NO: 1887603
guuuaccuguuuccgagau

SEQ ID NO: 2484151 - RNA, 19 nt, Artificial Sequence
  Description of Artificial Sequence: Synthetic oligonucleotide
  Antisense strand to SEQ ID NO: 2484150
aucucggaaacagguaaac

SEQ ID NO: 2484152 - RNA, 19 nt, Artificial Sequence
  Description of Artificial Sequence: Synthetic oligonucleotide
  Sense strand starting at position 3423 of SEQ ID NO: 1887603
accuguuuccgagaugcua

SEQ ID NO: 2484153 - RNA, 19 nt, Artificial Sequence
  Description of Artificial Sequence: Synthetic oligonucleotide
  Antisense strand to SEQ ID NO: 2484152
uagcaucucggaaacaggu

SEQ ID NO: 2484154 - RNA, 19 nt, Artificial Sequence
  Description of Artificial Sequence: Synthetic oligonucleotide
  Sense strand starting at position 3425 of SEQ ID NO: 1887603
cuguuuccgagaugcuaca

SEQ ID NO: 2484155 - RNA, 19 nt, Artificial Sequence
  Description of Artificial Sequence: Synthetic oligonucleotide
  Antisense strand to SEQ ID NO: 2484154
uguagcaucucggaaacag

SEQ ID NO: 2484156 - RNA, 19 nt, Artificial Sequence
  Description of Artificial Sequence: Synthetic oligonucleotide
  Sense strand starting at position 3527 of SEQ ID NO: 1887603
ugcuuuguuucuggcaaac

SEQ ID NO: 2484157 - RNA, 19 nt, Artificial Sequence
  Description of Artificial Sequence: Synthetic oligonucleotide
  Antisense strand to SEQ ID NO: 2484156
guuugccagaaacaaagca

SEQ ID NO: 2484158 - RNA, 19 nt, Artificial Sequence
  Description of Artificial Sequence: Synthetic oligonucleotide
  Sense strand starting at position 3529 of SEQ ID NO: 1887603
cuuuguuucuggcaaacug

SEQ ID NO: 2484159 - RNA, 19 nt, Artificial Sequence
  Description of Artificial Sequence: Synthetic oligonucleotide
  Antisense strand to SEQ ID NO: 2484158
caguuugccagaaacaaag

SEQ ID NO: 2484160 - RNA, 19 nt, Artificial Sequence
  Description of Artificial Sequence: Synthetic oligonucleotide
  Sense strand starting at position 3694 of SEQ ID NO: 1887603
ccaggcuggucucagauua

SEQ ID NO: 2484161 - RNA, 19 nt, Artificial Sequence
  Description of Artificial Sequence: Synthetic oligonucleotide
  Antisense strand to SEQ ID NO: 2484160
uaaucugagaccagccugg

SEQ ID NO: 2484162 - RNA, 19 nt, Artificial Sequence
  Description of Artificial Sequence: Synthetic oligonucleotide
  Sense strand starting at position 3705 of SEQ ID NO: 1887603
ucagauuacugagcucaag

SEQ ID NO: 2484163 - RNA, 19 nt, Artificial Sequence
  Description of Artificial Sequence: Synthetic oligonucleotide
  Antisense strand to SEQ ID NO: 2484162
cuugagcucaguaaucuga

SEQ ID NO: 2484164 - RNA, 19 nt, Artificial Sequence
  Description of Artificial Sequence: Synthetic oligonucleotide
  Sense strand starting at position 3793 of SEQ ID NO: 1887603
cuuaguucuuucugcucau

SEQ ID NO: 2484165 - RNA, 19 nt, Artificial Sequence
  Description of Artificial Sequence: Synthetic oligonucleotide
  Antisense strand to SEQ ID NO: 2484164
augagcagaaagaacuaag

SEQ ID NO: 2484166 - RNA, 19 nt, Artificial Sequence
  Description of Artificial Sequence: Synthetic oligonucleotide
  Sense strand starting at position 3796 of SEQ ID NO: 1887603
aguucuuucugcucauuga

SEQ ID NO: 2484167 - RNA, 19 nt, Artificial Sequence
  Description of Artificial Sequence: Synthetic oligonucleotide
  Antisense strand to SEQ ID NO: 2484166
ucaaugagcagaaagaacu

SEQ ID NO: 2484168 - RNA, 19 nt, Artificial Sequence
  Description of Artificial Sequence: Synthetic oligonucleotide
  Sense strand starting at position 3797 of SEQ ID NO: 1887603
guucuuucugcucauugaa

SEQ ID NO: 2484169 - RNA, 19 nt, Artificial Sequence
  Description of Artificial Sequence: Synthetic oligonucleotide
  Antisense strand to SEQ ID NO: 2484168
uucaaugagcagaaagaac

SEQ ID NO: 2484170 - RNA, 19 nt, Artificial Sequence
  Description of Artificial Sequence: Synthetic oligonucleotide
  Sense strand starting at position 3804 of SEQ ID NO: 1887603
cugcucauugaagagucaa

SEQ ID NO: 2484171 - RNA, 19 nt, Artificial Sequence
  Description of Artificial Sequence: Synthetic oligonucleotide
  Antisense strand to SEQ ID NO: 2484170
uugacucuucaaugagcag

SEQ ID NO: 2484172 - RNA, 19 nt, Artificial Sequence
  Description of Artificial Sequence: Synthetic oligonucleotide
  Sense strand starting at position 3863 of SEQ ID NO: 1887603
gaccuugaauggugaauuu

SEQ ID NO: 2484173 - RNA, 19 nt, Artificial Sequence
  Description of Artificial Sequence: Synthetic oligonucleotide
  Antisense strand to SEQ ID NO: 2484172
aaauucaccauucaagguc

SEQ ID NO: 2484174 - RNA, 19 nt, Artificial Sequence
  Description of Artificial Sequence: Synthetic oligonucleotide
  Sense strand starting at position 3933 of SEQ ID NO: 1887603
cucacauaacccuggauga

SEQ ID NO: 2484175 - RNA, 19 nt, Artificial Sequence
  Description of Artificial Sequence: Synthetic oligonucleotide
  Antisense strand to SEQ ID NO: 2484174
ucauccaggguuaugugag

SEQ ID NO: 2484176 - RNA, 19 nt, Artificial Sequence
  Description of Artificial Sequence: Synthetic oligonucleotide
  Sense strand starting at position 3950 of SEQ ID NO: 1887603
gagggauucuccuggcaua

SEQ ID NO: 2484177 - RNA, 19 nt, Artificial Sequence
  Description of Artificial Sequence: Synthetic oligonucleotide
  Antisense strand to SEQ ID NO: 2484176
uaugccaggagaaucccuc

SEQ ID NO: 2484178 - RNA, 19 nt, Artificial Sequence
  Description of Artificial Sequence: Synthetic oligonucleotide
  Sense strand starting at position 3951 of SEQ ID NO: 1887603
agggauucuccuggcauau

SEQ ID NO: 2484179 - RNA, 19 nt, Artificial Sequence
  Description of Artificial Sequence: Synthetic oligonucleotide
  Antisense strand to SEQ ID NO: 2484178
auaugccaggagaaucccu

SEQ ID NO: 2484180 - RNA, 19 nt, Artificial Sequence
  Description of Artificial Sequence: Synthetic oligonucleotide
  Sense strand starting at position 244 of SEQ ID NO: 1887604
ccacacaagugcuaugcaa

SEQ ID NO: 2484181 - RNA, 19 nt, Artificial Sequence
  Description of Artificial Sequence: Synthetic oligonucleotide
  Antisense strand to SEQ ID NO: 2484180
uugcauagcacuugugugg

SEQ ID NO: 2484182 - RNA, 19 nt, Artificial Sequence
  Description of Artificial Sequence: Synthetic oligonucleotide
  Sense strand starting at position 246 of SEQ ID NO: 1887604
acacaagugcuaugcaaau

SEQ ID NO: 2484183 - RNA, 19 nt, Artificial Sequence
  Description of Artificial Sequence: Synthetic oligonucleotide
  Antisense strand to SEQ ID NO: 2484182
auuugcauagcacuugugu

SEQ ID NO: 2484184 - RNA, 19 nt, Artificial Sequence
  Description of Artificial Sequence: Synthetic oligonucleotide
  Sense strand starting at position 610 of SEQ ID NO: 1887604
caagcuugugccugcugaa

SEQ ID NO: 2484185 - RNA, 19 nt, Artificial Sequence
  Description of Artificial Sequence: Synthetic oligonucleotide
  Antisense strand to SEQ ID NO: 2484184
uucagcaggcacaagcuug

SEQ ID NO: 2484186 - RNA, 19 nt, Artificial Sequence
  Description of Artificial Sequence: Synthetic oligonucleotide
  Sense strand starting at position 667 of SEQ ID NO: 1887604
cugcuccauccuugucaua

SEQ ID NO: 2484187 - RNA, 19 nt, Artificial Sequence
  Description of Artificial Sequence: Synthetic oligonucleotide
  Antisense strand to SEQ ID NO: 2484186
uaugacaaggauggagcag

SEQ ID NO: 2484188 - RNA, 19 nt, Artificial Sequence
  Description of Artificial Sequence: Synthetic oligonucleotide
  Sense strand starting at position 669 of SEQ ID NO: 1887604
gcuccauccuugucauaug

SEQ ID NO: 2484189 - RNA, 19 nt, Artificial Sequence
  Description of Artificial Sequence: Synthetic oligonucleotide
  Antisense strand to SEQ ID NO: 2484188
cauaugacaaggauggagc

SEQ ID NO: 2484190 - RNA, 19 nt, Artificial Sequence
  Description of Artificial Sequence: Synthetic oligonucleotide
  Sense strand starting at position 670 of SEQ ID NO: 1887604
cuccauccuugucauauga

SEQ ID NO: 2484191 - RNA, 19 nt, Artificial Sequence
  Description of Artificial Sequence: Synthetic oligonucleotide
  Antisense strand to SEQ ID NO: 2484190
ucauaugacaaggauggag

SEQ ID NO: 2484192 - RNA, 19 nt, Artificial Sequence
  Description of Artificial Sequence: Synthetic oligonucleotide
  Sense strand starting at position 733 of SEQ ID NO: 1887604
ccaaguaagucucuguuaa

SEQ ID NO: 2484193 - RNA, 19 nt, Artificial Sequence
  Description of Artificial Sequence: Synthetic oligonucleotide
  Antisense strand to SEQ ID NO: 2484192
uuaacagagacuuacuugg

SEQ ID NO: 2484194 - RNA, 19 nt, Artificial Sequence
  Description of Artificial Sequence: Synthetic oligonucleotide
  Sense strand starting at position 737 of SEQ ID NO: 1887604
guaagucucuguuaauucu

SEQ ID NO: 2484195 - RNA, 19 nt, Artificial Sequence
  Description of Artificial Sequence: Synthetic oligonucleotide
  Antisense strand to SEQ ID NO: 2484194
agaauuaacagagacuuac

SEQ ID NO: 2484196 - RNA, 19 nt, Artificial Sequence
  Description of Artificial Sequence: Synthetic oligonucleotide
  Sense strand starting at position 1033 of SEQ ID NO: 1887604
ggccuuacuugggauuaca

SEQ ID NO: 2484197 - RNA, 19 nt, Artificial Sequence
  Description of Artificial Sequence: Synthetic oligonucleotide
  Antisense strand to SEQ ID NO: 2484196
uguaaucccaaguaaggcc

SEQ ID NO: 2484198 - RNA, 19 nt, Artificial Sequence
  Description of Artificial Sequence: Synthetic oligonucleotide
  Sense strand starting at position 1128 of SEQ ID NO: 1887604
aggaucauuuguuguugua

SEQ ID NO: 2484199 - RNA, 19 nt, Artificial Sequence
  Description of Artificial Sequence: Synthetic oligonucleotide
  Antisense strand to SEQ ID NO: 2484198
uacaacaacaaaugauccu

SEQ ID NO: 2484200 - RNA, 19 nt, Artificial Sequence
  Description of Artificial Sequence: Synthetic oligonucleotide
  Sense strand starting at position 1130 of SEQ ID NO: 1887604
gaucauuuguuguuguauc

SEQ ID NO: 2484201 - RNA, 19 nt, Artificial Sequence
  Description of Artificial Sequence: Synthetic oligonucleotide
  Antisense strand to SEQ ID NO: 2484200
gauacaacaacaaaugauc

SEQ ID NO: 2484202 - RNA, 19 nt, Artificial Sequence
  Description of Artificial Sequence: Synthetic oligonucleotide
  Sense strand starting at position 1140 of SEQ ID NO: 1887604
uguuguaucuuggugucua

SEQ ID NO: 2484203 - RNA, 19 nt, Artificial Sequence
  Description of Artificial Sequence: Synthetic oligonucleotide
  Antisense strand to SEQ ID NO: 2484202
uagacaccaagauacaaca

SEQ ID NO: 2484204 - RNA, 19 nt, Artificial Sequence
  Description of Artificial Sequence: Synthetic oligonucleotide
  Sense strand starting at position 1141 of SEQ ID NO: 1887604
guuguaucuuggugucuag

SEQ ID NO: 2484205 - RNA, 19 nt, Artificial Sequence
  Description of Artificial Sequence: Synthetic oligonucleotide
  Antisense strand to SEQ ID NO: 2484204
cuagacaccaagauacaac

SEQ ID NO: 2484206 - RNA, 19 nt, Artificial Sequence
  Description of Artificial Sequence: Synthetic oligonucleotide
  Sense strand starting at position 1144 of SEQ ID NO: 1887604
guaucuuggugucuagaac

SEQ ID NO: 2484207 - RNA, 19 nt, Artificial Sequence
  Description of Artificial Sequence: Synthetic oligonucleotide
  Antisense strand to SEQ ID NO: 2484206
guucuagacaccaagauac

SEQ ID NO: 2484208 - RNA, 19 nt, Artificial Sequence
  Description of Artificial Sequence: Synthetic oligonucleotide
  Sense strand starting at position 1145 of SEQ ID NO: 1887604
uaucuuggugucuagaaca

SEQ ID NO: 2484209 - RNA, 19 nt, Artificial Sequence
  Description of Artificial Sequence: Synthetic oligonucleotide
  Antisense strand to SEQ ID NO: 2484208
uguucuagacaccaagaua

SEQ ID NO: 2484210 - RNA, 19 nt, Artificial Sequence
  Description of Artificial Sequence: Synthetic oligonucleotide
  Sense strand starting at position 2184 of SEQ ID NO: 1887604
cuguaagcccaaggaaauu

SEQ ID NO: 2484211 - RNA, 19 nt, Artificial Sequence
  Description of Artificial Sequence: Synthetic oligonucleotide
  Antisense strand to SEQ ID NO: 2484210
aauuuccuugggcuuacag

SEQ ID NO: 2484212 - RNA, 19 nt, Artificial Sequence
  Description of Artificial Sequence: Synthetic oligonucleotide
  Sense strand starting at position 2270 of SEQ ID NO: 1887604
ccuagauaaggugguugaa

SEQ ID NO: 2484213 - RNA, 19 nt, Artificial Sequence
  Description of Artificial Sequence: Synthetic oligonucleotide
  Antisense strand to SEQ ID NO: 2484212
uucaaccaccuuaucuagg

SEQ ID NO: 2484214 - RNA, 19 nt, Artificial Sequence
  Description of Artificial Sequence: Synthetic oligonucleotide
  Sense strand starting at position 2272 of SEQ ID NO: 1887604
uagauaaggugguugaaau

SEQ ID NO: 2484215 - RNA, 19 nt, Artificial Sequence
  Description of Artificial Sequence: Synthetic oligonucleotide
  Antisense strand to SEQ ID NO: 2484214
auuucaaccaccuuaucua

SEQ ID NO: 2484216 - RNA, 19 nt, Artificial Sequence
  Description of Artificial Sequence: Synthetic oligonucleotide
  Sense strand starting at position 2296 of SEQ ID NO: 1887604
auuccaucuucucuugagu

SEQ ID NO: 2484217 - RNA, 19 nt, Artificial Sequence
  Description of Artificial Sequence: Synthetic oligonucleotide
  Antisense strand to SEQ ID NO: 2484216
acucaagagaagauggaau

SEQ ID NO: 2484218 - RNA, 19 nt, Artificial Sequence
  Description of Artificial Sequence: Synthetic oligonucleotide
  Sense strand starting at position 2426 of SEQ ID NO: 1887604
gcccuuugauuaccagaaa

SEQ ID NO: 2484219 - RNA, 19 nt, Artificial Sequence
  Description of Artificial Sequence: Synthetic oligonucleotide
  Antisense strand to SEQ ID NO: 2484218
uuucugguaaucaaagggc

SEQ ID NO: 2484220 - RNA, 19 nt, Artificial Sequence
  Description of Artificial Sequence: Synthetic oligonucleotide
  Sense strand starting at position 2452 of SEQ ID NO: 1887604
gcccuugaguacugacuga

SEQ ID NO: 2484221 - RNA, 19 nt, Artificial Sequence
  Description of Artificial Sequence: Synthetic oligonucleotide
  Antisense strand to SEQ ID NO: 2484220
ucagucaguacucaagggc

SEQ ID NO: 2484222 - RNA, 19 nt, Artificial Sequence
  Description of Artificial Sequence: Synthetic oligonucleotide
  Sense strand starting at position 2456 of SEQ ID NO: 1887604
uugaguacugacugaauau

SEQ ID NO: 2484223 - RNA, 19 nt, Artificial Sequence
  Description of Artificial Sequence: Synthetic oligonucleotide
  Antisense strand to SEQ ID NO: 2484222
auauucagucaguacucaa

SEQ ID NO: 2484224 - RNA, 19 nt, Artificial Sequence
  Description of Artificial Sequence: Synthetic oligonucleotide
  Sense strand starting at position 2467 of SEQ ID NO: 1887604
cugaauauuguaugcugaa

SEQ ID NO: 2484225 - RNA, 19 nt, Artificial Sequence
  Description of Artificial Sequence: Synthetic oligonucleotide
  Antisense strand to SEQ ID NO: 2484224
uucagcauacaauauucag

SEQ ID NO: 2484226 - RNA, 19 nt, Artificial Sequence
  Description of Artificial Sequence: Synthetic oligonucleotide
  Sense strand starting at position 2468 of SEQ ID NO: 1887604
ugaauauuguaugcugaac

SEQ ID NO: 2484227 - RNA, 19 nt, Artificial Sequence
  Description of Artificial Sequence: Synthetic oligonucleotide
  Antisense strand to SEQ ID NO: 2484226
guucagcauacaauauuca

SEQ ID NO: 2484228 - RNA, 19 nt, Artificial Sequence
  Description of Artificial Sequence: Synthetic oligonucleotide
  Sense strand starting at position 2533 of SEQ ID NO: 1887604
gacgcuucccacuggauga

SEQ ID NO: 2484229 - RNA, 19 nt, Artificial Sequence
  Description of Artificial Sequence: Synthetic oligonucleotide
  Antisense strand to SEQ ID NO: 2484228
ucauccagugggaagcguc

SEQ ID NO: 2484230 - RNA, 19 nt, Artificial Sequence
  Description of Artificial Sequence: Synthetic oligonucleotide
  Sense strand starting at position 2667 of SEQ ID NO: 1887604
ucaaauggauacucuguau

SEQ ID NO: 2484231 - RNA, 19 nt, Artificial Sequence
  Description of Artificial Sequence: Synthetic oligonucleotide
  Antisense strand to SEQ ID NO: 2484230
auacagaguauccauuuga

SEQ ID NO: 2484232 - RNA, 19 nt, Artificial Sequence
  Description of Artificial Sequence: Synthetic oligonucleotide
  Sense strand starting at position 2682 of SEQ ID NO: 1887604
guaucaugucaggaggagu

SEQ ID NO: 2484233 - RNA, 19 nt, Artificial Sequence
  Description of Artificial Sequence: Synthetic oligonucleotide
  Antisense strand to SEQ ID NO: 2484232
acuccuccugacaugauac

SEQ ID NO: 2484234 - RNA, 19 nt, Artificial Sequence
  Description of Artificial Sequence: Synthetic oligonucleotide
  Sense strand starting at position 3034 of SEQ ID NO: 1887604
guaccauuaugcccaguua

SEQ ID NO: 2484235 - RNA, 19 nt, Artificial Sequence
  Description of Artificial Sequence: Synthetic oligonucleotide
  Antisense strand to SEQ ID NO: 2484234
uaacugggcauaaugguac

SEQ ID NO: 2484236 - RNA, 19 nt, Artificial Sequence
  Description of Artificial Sequence: Synthetic oligonucleotide
  Sense strand starting at position 3299 of SEQ ID NO: 1887604
cagccucucgaguagaaua

SEQ ID NO: 2484237 - RNA, 19 nt, Artificial Sequence
  Description of Artificial Sequence: Synthetic oligonucleotide
  Antisense strand to SEQ ID NO: 2484236
uauucuacucgagaggcug

SEQ ID NO: 2484238 - RNA, 19 nt, Artificial Sequence
  Description of Artificial Sequence: Synthetic oligonucleotide
  Sense strand starting at position 3301 of SEQ ID NO: 1887604
gccucucgaguagaauagu

SEQ ID NO: 2484239 - RNA, 19 nt, Artificial Sequence
  Description of Artificial Sequence: Synthetic oligonucleotide
  Antisense strand to SEQ ID NO: 2484238
acuauucuacucgagaggc

SEQ ID NO: 2484240 - RNA, 19 nt, Artificial Sequence
  Description of Artificial Sequence: Synthetic oligonucleotide
  Sense strand starting at position 3309 of SEQ ID NO: 1887604
aguagaauaguaggcaagu

SEQ ID NO: 2484241 - RNA, 19 nt, Artificial Sequence
  Description of Artificial Sequence: Synthetic oligonucleotide
  Antisense strand to SEQ ID NO: 2484240
acuugccuacuauucuacu

SEQ ID NO: 2484242 - RNA, 19 nt, Artificial Sequence
  Description of Artificial Sequence: Synthetic oligonucleotide
  Sense strand starting at position 3326 of SEQ ID NO: 1887604
gucaccauucuuggaugau

SEQ ID NO: 2484243 - RNA, 19 nt, Artificial Sequence
  Description of Artificial Sequence: Synthetic oligonucleotide
  Antisense strand to SEQ ID NO: 2484242
aucauccaagaauggugac

SEQ ID NO: 2484244 - RNA, 19 nt, Artificial Sequence
  Description of Artificial Sequence: Synthetic oligonucleotide
  Sense strand starting at position 3327 of SEQ ID NO: 1887604
ucaccauucuuggaugauu

SEQ ID NO: 2484245 - RNA, 19 nt, Artificial Sequence
  Description of Artificial Sequence: Synthetic oligonucleotide
  Antisense strand to SEQ ID NO: 2484244
aaucauccaagaaugguga

SEQ ID NO: 2484246 - RNA, 19 nt, Artificial Sequence
  Description of Artificial Sequence: Synthetic oligonucleotide
  Sense strand starting at position 3469 of SEQ ID NO: 1887604
accaaugccuggccuauaa

SEQ ID NO: 2484247 - RNA, 19 nt, Artificial Sequence
  Description of Artificial Sequence: Synthetic oligonucleotide
  Antisense strand to SEQ ID NO: 2484246
uuauaggccaggcauuggu

SEQ ID NO: 2484248 - RNA, 19 nt, Artificial Sequence
  Description of Artificial Sequence: Synthetic oligonucleotide
  Sense strand starting at position 3505 of SEQ ID NO: 1887604
auggaaguguggaguuaag

SEQ ID NO: 2484249 - RNA, 19 nt, Artificial Sequence
  Description of Artificial Sequence: Synthetic oligonucleotide
  Antisense strand to SEQ ID NO: 2484248
cuuaacuccacacuuccau

SEQ ID NO: 2484250 - RNA, 19 nt, Artificial Sequence
  Description of Artificial Sequence: Synthetic oligonucleotide
  Sense strand starting at position 3569 of SEQ ID NO: 1887604
ggcuaagacuuguauccag

SEQ ID NO: 2484251 - RNA, 19 nt, Artificial Sequence
  Description of Artificial Sequence: Synthetic oligonucleotide
  Antisense strand to SEQ ID NO: 2484250
cuggauacaagucuuagcc

SEQ ID NO: 2484252 - RNA, 19 nt, Artificial Sequence
  Description of Artificial Sequence: Synthetic oligonucleotide
  Sense strand starting at position 3640 of SEQ ID NO: 1887604
gauggagucucauauugca

SEQ ID NO: 2484253 - RNA, 19 nt, Artificial Sequence
  Description of Artificial Sequence: Synthetic oligonucleotide
  Antisense strand to SEQ ID NO: 2484252
ugcaauaugagacuccauc

SEQ ID NO: 2484254 - RNA, 19 nt, Artificial Sequence
  Description of Artificial Sequence: Synthetic oligonucleotide
  Sense strand starting at position 3648 of SEQ ID NO: 1887604
cucauauugcagugguaca

SEQ ID NO: 2484255 - RNA, 19 nt, Artificial Sequence
  Description of Artificial Sequence: Synthetic oligonucleotide
  Antisense strand to SEQ ID NO: 2484254
uguaccacugcaauaugag

SEQ ID NO: 2484256 - RNA, 19 nt, Artificial Sequence
  Description of Artificial Sequence: Synthetic oligonucleotide
  Sense strand starting at position 3890 of SEQ ID NO: 1887604
ccgcgucuggccugaaaga

SEQ ID NO: 2484257 - RNA, 19 nt, Artificial Sequence
  Description of Artificial Sequence: Synthetic oligonucleotide
  Antisense strand to SEQ ID NO: 2484256
ucuuucaggccagacgcgg

SEQ ID NO: 2484258 - RNA, 19 nt, Artificial Sequence
  Description of Artificial Sequence: Synthetic oligonucleotide
  Sense strand starting at position 3891 of SEQ ID NO: 1887604
cgcgucuggccugaaagau

SEQ ID NO: 2484259 - RNA, 19 nt, Artificial Sequence
  Description of Artificial Sequence: Synthetic oligonucleotide
  Antisense strand to SEQ ID NO: 2484258
aucuuucaggccagacgcg

SEQ ID NO: 2484260 - RNA, 19 nt, Artificial Sequence
  Description of Artificial Sequence: Synthetic oligonucleotide
  Sense strand starting at position 77 of SEQ ID NO: 1887605
uguugaauauuacugagag

SEQ ID NO: 2484261 - RNA, 19 nt, Artificial Sequence
  Description of Artificial Sequence: Synthetic oligonucleotide
  Antisense strand to SEQ ID NO: 2484260
cucucaguaauauucaaca

SEQ ID NO: 2484262 - RNA, 19 nt, Artificial Sequence
  Description of Artificial Sequence: Synthetic oligonucleotide
  Sense strand starting at position 93 of SEQ ID NO: 1887605
gagauaaagugagauuaag

SEQ ID NO: 2484263 - RNA, 19 nt, Artificial Sequence
  Description of Artificial Sequence: Synthetic oligonucleotide
  Antisense strand to SEQ ID NO: 2484262
cuuaaucucacuuuaucuc

SEQ ID NO: 2484264 - RNA, 19 nt, Artificial Sequence
  Description of Artificial Sequence: Synthetic oligonucleotide
  Sense strand starting at position 242 of SEQ ID NO: 1887605
acaguagacugcucuauca

SEQ ID NO: 2484265 - RNA, 19 nt, Artificial Sequence
  Description of Artificial Sequence: Synthetic oligonucleotide
  Antisense strand to SEQ ID NO: 2484264
ugauagagcagucuacugu

SEQ ID NO: 2484266 - RNA, 19 nt, Artificial Sequence
  Description of Artificial Sequence: Synthetic oligonucleotide
  Sense strand starting at position 244 of SEQ ID NO: 1887605
aguagacugcucuaucaag

SEQ ID NO: 2484267 - RNA, 19 nt, Artificial Sequence
  Description of Artificial Sequence: Synthetic oligonucleotide
  Antisense strand to SEQ ID NO: 2484266
cuugauagagcagucuacu

SEQ ID NO: 2484268 - RNA, 19 nt, Artificial Sequence
  Description of Artificial Sequence: Synthetic oligonucleotide
  Sense strand starting at position 250 of SEQ ID NO: 1887605
cugcucuaucaagaggcau

SEQ ID NO: 2484269 - RNA, 19 nt, Artificial Sequence
  Description of Artificial Sequence: Synthetic oligonucleotide
  Antisense strand to SEQ ID NO: 2484268
augccucuugauagagcag

SEQ ID NO: 2484270 - RNA, 19 nt, Artificial Sequence
  Description of Artificial Sequence: Synthetic oligonucleotide
  Sense strand starting at position 328 of SEQ ID NO: 1887605
uggugucuuguggaaauua

SEQ ID NO: 2484271 - RNA, 19 nt, Artificial Sequence
  Description of Artificial Sequence: Synthetic oligonucleotide
  Antisense strand to SEQ ID NO: 2484270
uaauuuccacaagacacca

SEQ ID NO: 2484272 - RNA, 19 nt, Artificial Sequence
  Description of Artificial Sequence: Synthetic oligonucleotide
  Sense strand starting at position 487 of SEQ ID NO: 1887605
caaagaucucugugggaca

SEQ ID NO: 2484273 - RNA, 19 nt, Artificial Sequence
  Description of Artificial Sequence: Synthetic oligonucleotide
  Antisense strand to SEQ ID NO: 2484272
ugucccacagagaucuuug

SEQ ID NO: 2484274 - RNA, 19 nt, Artificial Sequence
  Description of Artificial Sequence: Synthetic oligonucleotide
  Sense strand starting at position 508 of SEQ ID NO: 1887605
gggaaucugcauuguuuaa

SEQ ID NO: 2484275 - RNA, 19 nt, Artificial Sequence
  Description of Artificial Sequence: Synthetic oligonucleotide
  Antisense strand to SEQ ID NO: 2484274
uuaaacaaugcagauuccc

SEQ ID NO: 2484276 - RNA, 19 nt, Artificial Sequence
  Description of Artificial Sequence: Synthetic oligonucleotide
  Sense strand starting at position 545 of SEQ ID NO: 1887605
uaaugagaguagccagauu

SEQ ID NO: 2484277 - RNA, 19 nt, Artificial Sequence
  Description of Artificial Sequence: Synthetic oligonucleotide
  Antisense strand to SEQ ID NO: 2484276
aaucuggcuacucucauua

SEQ ID NO: 2484278 - RNA, 19 nt, Artificial Sequence
  Description of Artificial Sequence: Synthetic oligonucleotide
  Sense strand starting at position 575 of SEQ ID NO: 1887605
aaccuaagucaggguacua

SEQ ID NO: 2484279 - RNA, 19 nt, Artificial Sequence
  Description of Artificial Sequence: Synthetic oligonucleotide
  Antisense strand to SEQ ID NO: 2484278
uaguacccugacuuagguu

SEQ ID NO: 2484280 - RNA, 19 nt, Artificial Sequence
  Description of Artificial Sequence: Synthetic oligonucleotide
  Sense strand starting at position 771 of SEQ ID NO: 1887605
acugauaacuccuugagua

SEQ ID NO: 2484281 - RNA, 19 nt, Artificial Sequence
  Description of Artificial Sequence: Synthetic oligonucleotide
  Antisense strand to SEQ ID NO: 2484280
uacucaaggaguuaucagu

SEQ ID NO: 2484282 - RNA, 19 nt, Artificial Sequence
  Description of Artificial Sequence: Synthetic oligonucleotide
  Sense strand starting at position 772 of SEQ ID NO: 1887605
cugauaacuccuugaguau

SEQ ID NO: 2484283 - RNA, 19 nt, Artificial Sequence
  Description of Artificial Sequence: Synthetic oligonucleotide
  Antisense strand to SEQ ID NO: 2484282
auacucaaggaguuaucag

SEQ ID NO: 2484284 - RNA, 19 nt, Artificial Sequence
  Description of Artificial Sequence: Synthetic oligonucleotide
  Sense strand starting at position 819 of SEQ ID NO: 1887605
gucugugugcuccuuaggu

SEQ ID NO: 2484285 - RNA, 19 nt, Artificial Sequence
  Description of Artificial Sequence: Synthetic oligonucleotide
  Antisense strand to SEQ ID NO: 2484284
accuaaggagcacacagac

SEQ ID NO: 2484286 - RNA, 19 nt, Artificial Sequence
  Description of Artificial Sequence: Synthetic oligonucleotide
  Sense strand starting at position 821 of SEQ ID NO: 1887605
cugugugcuccuuagguaa

SEQ ID NO: 2484287 - RNA, 19 nt, Artificial Sequence
  Description of Artificial Sequence: Synthetic oligonucleotide
  Antisense strand to SEQ ID NO: 2484286
uuaccuaaggagcacacag

SEQ ID NO: 2484288 - RNA, 19 nt, Artificial Sequence
  Description of Artificial Sequence: Synthetic oligonucleotide
  Sense strand starting at position 824 of SEQ ID NO: 1887605
ugugcuccuuagguaaaca

SEQ ID NO: 2484289 - RNA, 19 nt, Artificial Sequence
  Description of Artificial Sequence: Synthetic oligonucleotide
  Antisense strand to SEQ ID NO: 2484288
uguuuaccuaaggagcaca

SEQ ID NO: 2484290 - RNA, 19 nt, Artificial Sequence
  Description of Artificial Sequence: Synthetic oligonucleotide
  Sense strand starting at position 921 of SEQ ID NO: 1887605
aaucgcgcuguguaaauuu

SEQ ID NO: 2484291 - RNA, 19 nt, Artificial Sequence
  Description of Artificial Sequence: Synthetic oligonucleotide
  Antisense strand to SEQ ID NO: 2484290
aaauuuacacagcgcgauu

SEQ ID NO: 2484292 - RNA, 19 nt, Artificial Sequence
  Description of Artificial Sequence: Synthetic oligonucleotide
  Sense strand starting at position 989 of SEQ ID NO: 1887605
aaaugaugcuccgugaaua

SEQ ID NO: 2484293 - RNA, 19 nt, Artificial Sequence
  Description of Artificial Sequence: Synthetic oligonucleotide
  Antisense strand to SEQ ID NO: 2484292
uauucacggagcaucauuu

SEQ ID NO: 2484294 - RNA, 19 nt, Artificial Sequence
  Description of Artificial Sequence: Synthetic oligonucleotide
  Sense strand starting at position 990 of SEQ ID NO: 1887605
aaugaugcuccgugaauau

SEQ ID NO: 2484295 - RNA, 19 nt, Artificial Sequence
  Description of Artificial Sequence: Synthetic oligonucleotide
  Antisense strand to SEQ ID NO: 2484294
auauucacggagcaucauu

SEQ ID NO: 2484296 - RNA, 19 nt, Artificial Sequence
  Description of Artificial Sequence: Synthetic oligonucleotide
  Sense strand starting at position 999 of SEQ ID NO: 1887605
ccgugaauaucccuguaua

SEQ ID NO: 2484297 - RNA, 19 nt, Artificial Sequence
  Description of Artificial Sequence: Synthetic oligonucleotide
  Antisense strand to SEQ ID NO: 2484296
uauacagggauauucacgg

SEQ ID NO: 2484298 - RNA, 19 nt, Artificial Sequence
  Description of Artificial Sequence: Synthetic oligonucleotide
  Sense strand starting at position 1000 of SEQ ID NO: 1887605
cgugaauaucccuguauag

SEQ ID NO: 2484299 - RNA, 19 nt, Artificial Sequence
  Description of Artificial Sequence: Synthetic oligonucleotide
  Antisense strand to SEQ ID NO: 2484298
cuauacagggauauucacg

SEQ ID NO: 2484300 - RNA, 19 nt, Artificial Sequence
  Description of Artificial Sequence: Synthetic oligonucleotide
  Sense strand starting at position 1012 of SEQ ID NO: 1887605
uguauagaaucuucuguau

SEQ ID NO: 2484301 - RNA, 19 nt, Artificial Sequence
  Description of Artificial Sequence: Synthetic oligonucleotide
  Antisense strand to SEQ ID NO: 2484300
auacagaagauucuauaca

SEQ ID NO: 2484302 - RNA, 19 nt, Artificial Sequence
  Description of Artificial Sequence: Synthetic oligonucleotide
  Sense strand starting at position 1023 of SEQ ID NO: 1887605
uucuguauaucccuguauu

SEQ ID NO: 2484303 - RNA, 19 nt, Artificial Sequence
  Description of Artificial Sequence: Synthetic oligonucleotide
  Antisense strand to SEQ ID NO: 2484302
aauacagggauauacagaa

SEQ ID NO: 2484304 - RNA, 19 nt, Artificial Sequence
  Description of Artificial Sequence: Synthetic oligonucleotide
  Sense strand starting at position 1057 of SEQ ID NO: 1887605
guuccuugagaguggaaua

SEQ ID NO: 2484305 - RNA, 19 nt, Artificial Sequence
  Description of Artificial Sequence: Synthetic oligonucleotide
  Antisense strand to SEQ ID NO: 2484304
uauuccacucucaaggaac

SEQ ID NO: 2484306 - RNA, 19 nt, Artificial Sequence
  Description of Artificial Sequence: Synthetic oligonucleotide
  Sense strand starting at position 1067 of SEQ ID NO: 1887605
aguggaauaguuggaccaa

SEQ ID NO: 2484307 - RNA, 19 nt, Artificial Sequence
  Description of Artificial Sequence: Synthetic oligonucleotide
  Antisense strand to SEQ ID NO: 2484306
uugguccaacuauuccacu

SEQ ID NO: 2484308 - RNA, 19 nt, Artificial Sequence
  Description of Artificial Sequence: Synthetic oligonucleotide
  Sense strand starting at position 1085 of SEQ ID NO: 1887605
aagaguacauuagugaacu

SEQ ID NO: 2484309 - RNA, 19 nt, Artificial Sequence
  Description of Artificial Sequence: Synthetic oligonucleotide
  Antisense strand to SEQ ID NO: 2484308
aguucacuaauguacucuu

SEQ ID NO: 2484310 - RNA, 19 nt, Artificial Sequence
  Description of Artificial Sequence: Synthetic oligonucleotide
  Sense strand starting at position 1207 of SEQ ID NO: 1887605
auuccuugucccuagaagu

SEQ ID NO: 2484311 - RNA, 19 nt, Artificial Sequence
  Description of Artificial Sequence: Synthetic oligonucleotide
  Antisense strand to SEQ ID NO: 2484310
acuucuagggacaaggaau

SEQ ID NO: 2484312 - RNA, 19 nt, Artificial Sequence
  Description of Artificial Sequence: Synthetic oligonucleotide
  Sense strand starting at position 3127 of SEQ ID NO: 1887605
ggcgcuguucugguugauu

SEQ ID NO: 2484313 - RNA, 19 nt, Artificial Sequence
  Description of Artificial Sequence: Synthetic oligonucleotide
  Antisense strand to SEQ ID NO: 2484312
aaucaaccagaacagcgcc

SEQ ID NO: 2484314 - RNA, 19 nt, Artificial Sequence
  Description of Artificial Sequence: Synthetic oligonucleotide
  Sense strand starting at position 3172 of SEQ ID NO: 1887605
gaaugacuguggguugcau

SEQ ID NO: 2484315 - RNA, 19 nt, Artificial Sequence
  Description of Artificial Sequence: Synthetic oligonucleotide
  Antisense strand to SEQ ID NO: 2484314
augcaacccacagucauuc

SEQ ID NO: 2484316 - RNA, 19 nt, Artificial Sequence
  Description of Artificial Sequence: Synthetic oligonucleotide
  Sense strand starting at position 3193 of SEQ ID NO: 1887605
gauguaauggucuguucca

SEQ ID NO: 2484317 - RNA, 19 nt, Artificial Sequence
  Description of Artificial Sequence: Synthetic oligonucleotide
  Antisense strand to SEQ ID NO: 2484316
uggaacagaccauuacauc

SEQ ID NO: 2484318 - RNA, 19 nt, Artificial Sequence
  Description of Artificial Sequence: Synthetic oligonucleotide
  Sense strand starting at position 3265 of SEQ ID NO: 1887605
ggcgcuguucuaguugauu

SEQ ID NO: 2484319 - RNA, 19 nt, Artificial Sequence
  Description of Artificial Sequence: Synthetic oligonucleotide
  Antisense strand to SEQ ID NO: 2484318
aaucaacuagaacagcgcc

SEQ ID NO: 2484320 - RNA, 19 nt, Artificial Sequence
  Description of Artificial Sequence: Synthetic oligonucleotide
  Sense strand starting at position 3306 of SEQ ID NO: 1887605
ggcugaagugauuggguaa

SEQ ID NO: 2484321 - RNA, 19 nt, Artificial Sequence
  Description of Artificial Sequence: Synthetic oligonucleotide
  Antisense strand to SEQ ID NO: 2484320
uuacccaaucacuucagcc

SEQ ID NO: 2484322 - RNA, 19 nt, Artificial Sequence
  Description of Artificial Sequence: Synthetic oligonucleotide
  Sense strand starting at position 3307 of SEQ ID NO: 1887605
gcugaagugauuggguaac

SEQ ID NO: 2484323 - RNA, 19 nt, Artificial Sequence
  Description of Artificial Sequence: Synthetic oligonucleotide
  Antisense strand to SEQ ID NO: 2484322
guuacccaaucacuucagc

SEQ ID NO: 2484324 - RNA, 19 nt, Artificial Sequence
  Description of Artificial Sequence: Synthetic oligonucleotide
  Sense strand starting at position 3309 of SEQ ID NO: 1887605
ugaagugauuggguaacua

SEQ ID NO: 2484325 - RNA, 19 nt, Artificial Sequence
  Description of Artificial Sequence: Synthetic oligonucleotide
  Antisense strand to SEQ ID NO: 2484324
uaguuacccaaucacuuca

SEQ ID NO: 2484326 - RNA, 19 nt, Artificial Sequence
  Description of Artificial Sequence: Synthetic oligonucleotide
  Sense strand starting at position 3452 of SEQ ID NO: 1887605
auuagaugugacgaucugu

SEQ ID NO: 2484327 - RNA, 19 nt, Artificial Sequence
  Description of Artificial Sequence: Synthetic oligonucleotide
  Antisense strand to SEQ ID NO: 2484326
acagaucgucacaucuaau

SEQ ID NO: 2484328 - RNA, 19 nt, Artificial Sequence
  Description of Artificial Sequence: Synthetic oligonucleotide
  Sense strand starting at position 3573 of SEQ ID NO: 1887605
ugaagugacuguguagcau

SEQ ID NO: 2484329 - RNA, 19 nt, Artificial Sequence
  Description of Artificial Sequence: Synthetic oligonucleotide
  Antisense strand to SEQ ID NO: 2484328
augcuacacagucacuuca

SEQ ID NO: 2484330 - RNA, 19 nt, Artificial Sequence
  Description of Artificial Sequence: Synthetic oligonucleotide
  Sense strand starting at position 3581 of SEQ ID NO: 1887605
cuguguagcauuggauaug

SEQ ID NO: 2484331 - RNA, 19 nt, Artificial Sequence
  Description of Artificial Sequence: Synthetic oligonucleotide
  Antisense strand to SEQ ID NO: 2484330
cauauccaaugcuacacag

SEQ ID NO: 2484332 - RNA, 19 nt, Artificial Sequence
  Description of Artificial Sequence: Synthetic oligonucleotide
  Sense strand starting at position 3764 of SEQ ID NO: 1887605
gggcgccaucuuuaaugaa

SEQ ID NO: 2484333 - RNA, 19 nt, Artificial Sequence
  Description of Artificial Sequence: Synthetic oligonucleotide
  Antisense strand to SEQ ID NO: 2484332
uucauuaaagauggcgccc

SEQ ID NO: 2484334 - RNA, 19 nt, Artificial Sequence
  Description of Artificial Sequence: Synthetic oligonucleotide
  Sense strand starting at position 3776 of SEQ ID NO: 1887605
uaaugaaagugcuugagau

SEQ ID NO: 2484335 - RNA, 19 nt, Artificial Sequence
  Description of Artificial Sequence: Synthetic oligonucleotide
  Antisense strand to SEQ ID NO: 2484334
aucucaagcacuuucauua

SEQ ID NO: 2484336 - RNA, 19 nt, Artificial Sequence
  Description of Artificial Sequence: Synthetic oligonucleotide
  Sense strand starting at position 3777 of SEQ ID NO: 1887605
aaugaaagugcuugagauu

SEQ ID NO: 2484337 - RNA, 19 nt, Artificial Sequence
  Description of Artificial Sequence: Synthetic oligonucleotide
  Antisense strand to SEQ ID NO: 2484336
aaucucaagcacuuucauu

SEQ ID NO: 2484338 - RNA, 19 nt, Artificial Sequence
  Description of Artificial Sequence: Synthetic oligonucleotide
  Sense strand starting at position 3786 of SEQ ID NO: 1887605
gcuugagauuugcugcgca

SEQ ID NO: 2484339 - RNA, 19 nt, Artificial Sequence
  Description of Artificial Sequence: Synthetic oligonucleotide
  Antisense strand to SEQ ID NO: 2484338
ugcgcagcaaaucucaagc

SEQ ID NO: 2484340 - RNA, 19 nt, Artificial Sequence
  Description of Artificial Sequence: Synthetic oligonucleotide
  Sense strand starting at position 117 of SEQ ID NO: 1887606
ccaggagacucaggauuua

SEQ ID NO: 2484341 - RNA, 19 nt, Artificial Sequence
  Description of Artificial Sequence: Synthetic oligonucleotide
  Antisense strand to SEQ ID NO: 2484340
uaaauccugagucuccugg

SEQ ID NO: 2484342 - RNA, 19 nt, Artificial Sequence
  Description of Artificial Sequence: Synthetic oligonucleotide
  Sense strand starting at position 135 of SEQ ID NO: 1887606
aaggaauaggucuggaagu

SEQ ID NO: 2484343 - RNA, 19 nt, Artificial Sequence
  Description of Artificial Sequence: Synthetic oligonucleotide
  Antisense strand to SEQ ID NO: 2484342
acuuccagaccuauuccuu

SEQ ID NO: 2484344 - RNA, 19 nt, Artificial Sequence
  Description of Artificial Sequence: Synthetic oligonucleotide
  Sense strand starting at position 175 of SEQ ID NO: 1887606
agacuaaugccguauucca

SEQ ID NO: 2484345 - RNA, 19 nt, Artificial Sequence
  Description of Artificial Sequence: Synthetic oligonucleotide
  Antisense strand to SEQ ID NO: 2484344
uggaauacggcauuagucu

SEQ ID NO: 2484346 - RNA, 19 nt, Artificial Sequence
  Description of Artificial Sequence: Synthetic oligonucleotide
  Sense strand starting at position 182 of SEQ ID NO: 1887606
ugccguauuccagaguauu

SEQ ID NO: 2484347 - RNA, 19 nt, Artificial Sequence
  Description of Artificial Sequence: Synthetic oligonucleotide
  Antisense strand to SEQ ID NO: 2484346
aauacucuggaauacggca

SEQ ID NO: 2484348 - RNA, 19 nt, Artificial Sequence
  Description of Artificial Sequence: Synthetic oligonucleotide
  Sense strand starting at position 188 of SEQ ID NO: 1887606
auuccagaguauucuggaa

SEQ ID NO: 2484349 - RNA, 19 nt, Artificial Sequence
  Description of Artificial Sequence: Synthetic oligonucleotide
  Antisense strand to SEQ ID NO: 2484348
uuccagaauacucuggaau

SEQ ID NO: 2484350 - RNA, 19 nt, Artificial Sequence
  Description of Artificial Sequence: Synthetic oligonucleotide
  Sense strand starting at position 228 of SEQ ID NO: 1887606
guuguuucuggauaaauga

SEQ ID NO: 2484351 - RNA, 19 nt, Artificial Sequence
  Description of Artificial Sequence: Synthetic oligonucleotide
  Antisense strand to SEQ ID NO: 2484350
ucauuuauccagaaacaac

SEQ ID NO: 2484352 - RNA, 19 nt, Artificial Sequence
  Description of Artificial Sequence: Synthetic oligonucleotide
  Sense strand starting at position 292 of SEQ ID NO: 1887606
aagguucugagagguauau

SEQ ID NO: 2484353 - RNA, 19 nt, Artificial Sequence
  Description of Artificial Sequence: Synthetic oligonucleotide
  Antisense strand to SEQ ID NO: 2484352
auauaccucucagaaccuu

SEQ ID NO: 2484354 - RNA, 19 nt, Artificial Sequence
  Description of Artificial Sequence: Synthetic oligonucleotide
  Sense strand starting at position 305 of SEQ ID NO: 1887606
guauaugcccuucguuuaa

SEQ ID NO: 2484355 - RNA, 19 nt, Artificial Sequence
  Description of Artificial Sequence: Synthetic oligonucleotide
  Antisense strand to SEQ ID NO: 2484354
uuaaacgaagggcauauac

SEQ ID NO: 2484356 - RNA, 19 nt, Artificial Sequence
  Description of Artificial Sequence: Synthetic oligonucleotide
  Sense strand starting at position 307 of SEQ ID NO: 1887606
auaugcccuucguuuaaga

SEQ ID NO: 2484357 - RNA, 19 nt, Artificial Sequence
  Description of Artificial Sequence: Synthetic oligonucleotide
  Antisense strand to SEQ ID NO: 2484356
ucuuaaacgaagggcauau

SEQ ID NO: 2484358 - RNA, 19 nt, Artificial Sequence
  Description of Artificial Sequence: Synthetic oligonucleotide
  Sense strand starting at position 603 of SEQ ID NO: 1887606
gaaggaaacuucgucucaa

SEQ ID NO: 2484359 - RNA, 19 nt, Artificial Sequence
  Description of Artificial Sequence: Synthetic oligonucleotide
  Antisense strand to SEQ ID NO: 2484358
uugagacgaaguuuccuuc

SEQ ID NO: 2484360 - RNA, 19 nt, Artificial Sequence
  Description of Artificial Sequence: Synthetic oligonucleotide
  Sense strand starting at position 652 of SEQ ID NO: 1887606
aacagacacugguauguaa

SEQ ID NO: 2484361 - RNA, 19 nt, Artificial Sequence
  Description of Artificial Sequence: Synthetic oligonucleotide
  Antisense strand to SEQ ID NO: 2484360
uuacauaccagugucuguu

SEQ ID NO: 2484362 - RNA, 19 nt, Artificial Sequence
  Description of Artificial Sequence: Synthetic oligonucleotide
  Sense strand starting at position 699 of SEQ ID NO: 1887606
agguuaaaccuuuaagucu

SEQ ID NO: 2484363 - RNA, 19 nt, Artificial Sequence
  Description of Artificial Sequence: Synthetic oligonucleotide
  Antisense strand to SEQ ID NO: 2484362
agacuuaaagguuuaaccu

SEQ ID NO: 2484364 - RNA, 19 nt, Artificial Sequence
  Description of Artificial Sequence: Synthetic oligonucleotide
  Sense strand starting at position 804 of SEQ ID NO: 1887606
cucuguuguggucagauag

SEQ ID NO: 2484365 - RNA, 19 nt, Artificial Sequence
  Description of Artificial Sequence: Synthetic oligonucleotide
  Antisense strand to SEQ ID NO: 2484364
cuaucugaccacaacagag

SEQ ID NO: 2484366 - RNA, 19 nt, Artificial Sequence
  Description of Artificial Sequence: Synthetic oligonucleotide
  Sense strand starting at position 851 of SEQ ID NO: 1887606
ccaggagagucccuggaua

SEQ ID NO: 2484367 - RNA, 19 nt, Artificial Sequence
  Description of Artificial Sequence: Synthetic oligonucleotide
  Antisense strand to SEQ ID NO: 2484366
uauccagggacucuccugg

SEQ ID NO: 2484368 - RNA, 19 nt, Artificial Sequence
  Description of Artificial Sequence: Synthetic oligonucleotide
  Sense strand starting at position 880 of SEQ ID NO: 1887606
caauuugggucacagagua

SEQ ID NO: 2484369 - RNA, 19 nt, Artificial Sequence
  Description of Artificial Sequence: Synthetic oligonucleotide
  Antisense strand to SEQ ID NO: 2484368
uacucugugacccaaauug

SEQ ID NO: 2484370 - RNA, 19 nt, Artificial Sequence
  Description of Artificial Sequence: Synthetic oligonucleotide
  Sense strand starting at position 935 of SEQ ID NO: 1887606
ggguucugggcuugaguua

SEQ ID NO: 2484371 - RNA, 19 nt, Artificial Sequence
  Description of Artificial Sequence: Synthetic oligonucleotide
  Antisense strand to SEQ ID NO: 2484370
uaacucaagcccagaaccc

SEQ ID NO: 2484372 - RNA, 19 nt, Artificial Sequence
  Description of Artificial Sequence: Synthetic oligonucleotide
  Sense strand starting at position 1012 of SEQ ID NO: 1887606
ggugacagggucugcaaua

SEQ ID NO: 2484373 - RNA, 19 nt, Artificial Sequence
  Description of Artificial Sequence: Synthetic oligonucleotide
  Antisense strand to SEQ ID NO: 2484372
uauugcagacccugucacc

SEQ ID NO: 2484374 - RNA, 19 nt, Artificial Sequence
  Description of Artificial Sequence: Synthetic oligonucleotide
  Sense strand starting at position 1076 of SEQ ID NO: 1887606
aggauuuccugguauaaug

SEQ ID NO: 2484375 - RNA, 19 nt, Artificial Sequence
  Description of Artificial Sequence: Synthetic oligonucleotide
  Antisense strand to SEQ ID NO: 2484374
cauuauaccaggaaauccu

SEQ ID NO: 2484376 - RNA, 19 nt, Artificial Sequence
  Description of Artificial Sequence: Synthetic oligonucleotide
  Sense strand starting at position 1192 of SEQ ID NO: 1887606
acccaaguacucggugaga

SEQ ID NO: 2484377 - RNA, 19 nt, Artificial Sequence
  Description of Artificial Sequence: Synthetic oligonucleotide
  Antisense strand to SEQ ID NO: 2484376
ucucaccgaguacuugggu

SEQ ID NO: 2484378 - RNA, 19 nt, Artificial Sequence
  Description of Artificial Sequence: Synthetic oligonucleotide
  Sense strand starting at position 1194 of SEQ ID NO: 1887606
ccaaguacucggugagacu

SEQ ID NO: 2484379 - RNA, 19 nt, Artificial Sequence
  Description of Artificial Sequence: Synthetic oligonucleotide
  Antisense strand to SEQ ID NO: 2484378
agucucaccgaguacuugg

SEQ ID NO: 2484380 - RNA, 19 nt, Artificial Sequence
  Description of Artificial Sequence: Synthetic oligonucleotide
  Sense strand starting at position 1195 of SEQ ID NO: 1887606
caaguacucggugagacua

SEQ ID NO: 2484381 - RNA, 19 nt, Artificial Sequence
  Description of Artificial Sequence: Synthetic oligonucleotide
  Antisense strand to SEQ ID NO: 2484380
uagucucaccgaguacuug

SEQ ID NO: 2484382 - RNA, 19 nt, Artificial Sequence
  Description of Artificial Sequence: Synthetic oligonucleotide
  Sense strand starting at position 1353 of SEQ ID NO: 1887606
gaucaagaucccggaaagu

SEQ ID NO: 2484383 - RNA, 19 nt, Artificial Sequence
  Description of Artificial Sequence: Synthetic oligonucleotide
  Antisense strand to SEQ ID NO: 2484382
acuuuccgggaucuugauc

SEQ ID NO: 2484384 - RNA, 19 nt, Artificial Sequence
  Description of Artificial Sequence: Synthetic oligonucleotide
  Sense strand starting at position 1444 of SEQ ID NO: 1887606
ggaagugaauacccgaaua

SEQ ID NO: 2484385 - RNA, 19 nt, Artificial Sequence
  Description of Artificial Sequence: Synthetic oligonucleotide
  Antisense strand to SEQ ID NO: 2484384
uauucggguauucacuucc

SEQ ID NO: 2484386 - RNA, 19 nt, Artificial Sequence
  Description of Artificial Sequence: Synthetic oligonucleotide
  Sense strand starting at position 1505 of SEQ ID NO: 1887606
ggcagaguucuggguauaa

SEQ ID NO: 2484387 - RNA, 19 nt, Artificial Sequence
  Description of Artificial Sequence: Synthetic oligonucleotide
  Antisense strand to SEQ ID NO: 2484386
uuauacccagaacucugcc

SEQ ID NO: 2484388 - RNA, 19 nt, Artificial Sequence
  Description of Artificial Sequence: Synthetic oligonucleotide
  Sense strand starting at position 1509 of SEQ ID NO: 1887606
gaguucuggguauaaaugu

SEQ ID NO: 2484389 - RNA, 19 nt, Artificial Sequence
  Description of Artificial Sequence: Synthetic oligonucleotide
  Antisense strand to SEQ ID NO: 2484388
acauuuauacccagaacuc

SEQ ID NO: 2484390 - RNA, 19 nt, Artificial Sequence
  Description of Artificial Sequence: Synthetic oligonucleotide
  Sense strand starting at position 1524 of SEQ ID NO: 1887606
auguuaacugccgaacaga

SEQ ID NO: 2484391 - RNA, 19 nt, Artificial Sequence
  Description of Artificial Sequence: Synthetic oligonucleotide
  Antisense strand to SEQ ID NO: 2484390
ucuguucggcaguuaacau

SEQ ID NO: 2484392 - RNA, 19 nt, Artificial Sequence
  Description of Artificial Sequence: Synthetic oligonucleotide
  Sense strand starting at position 1527 of SEQ ID NO: 1887606
uuaacugccgaacagaauu

SEQ ID NO: 2484393 - RNA, 19 nt, Artificial Sequence
  Description of Artificial Sequence: Synthetic oligonucleotide
  Antisense strand to SEQ ID NO: 2484392
aauucuguucggcaguuaa

SEQ ID NO: 2484394 - RNA, 19 nt, Artificial Sequence
  Description of Artificial Sequence: Synthetic oligonucleotide
  Sense strand starting at position 1735 of SEQ ID NO: 1887606
gugagaauccuagguguga

SEQ ID NO: 2484395 - RNA, 19 nt, Artificial Sequence
  Description of Artificial Sequence: Synthetic oligonucleotide
  Antisense strand to SEQ ID NO: 2484394
ucacaccuaggauucucac

SEQ ID NO: 2484396 - RNA, 19 nt, Artificial Sequence
  Description of Artificial Sequence: Synthetic oligonucleotide
  Sense strand starting at position 1882 of SEQ ID NO: 1887606
gugcgucucgucuucauca

SEQ ID NO: 2484397 - RNA, 19 nt, Artificial Sequence
  Description of Artificial Sequence: Synthetic oligonucleotide
  Antisense strand to SEQ ID NO: 2484396
ugaugaagacgagacgcac

SEQ ID NO: 2484398 - RNA, 19 nt, Artificial Sequence
  Description of Artificial Sequence: Synthetic oligonucleotide
  Sense strand starting at position 2064 of SEQ ID NO: 1887606
gacgucacaucccuaguaa

SEQ ID NO: 2484399 - RNA, 19 nt, Artificial Sequence
  Description of Artificial Sequence: Synthetic oligonucleotide
  Antisense strand to SEQ ID NO: 2484398
uuacuagggaugugacguc

SEQ ID NO: 2484400 - RNA, 19 nt, Artificial Sequence
  Description of Artificial Sequence: Synthetic oligonucleotide
  Sense strand starting at position 2065 of SEQ ID NO: 1887606
acgucacaucccuaguaac

SEQ ID NO: 2484401 - RNA, 19 nt, Artificial Sequence
  Description of Artificial Sequence: Synthetic oligonucleotide
  Antisense strand to SEQ ID NO: 2484400
guuacuagggaugugacgu

SEQ ID NO: 2484402 - RNA, 19 nt, Artificial Sequence
  Description of Artificial Sequence: Synthetic oligonucleotide
  Sense strand starting at position 2209 of SEQ ID NO: 1887606
auaugagugcgcgcuucaa

SEQ ID NO: 2484403 - RNA, 19 nt, Artificial Sequence
  Description of Artificial Sequence: Synthetic oligonucleotide
  Antisense strand to SEQ ID NO: 2484402
uugaagcgcgcacucauau

SEQ ID NO: 2484404 - RNA, 19 nt, Artificial Sequence
  Description of Artificial Sequence: Synthetic oligonucleotide
  Sense strand starting at position 2211 of SEQ ID NO: 1887606
augagugcgcgcuucaacu

SEQ ID NO: 2484405 - RNA, 19 nt, Artificial Sequence
  Description of Artificial Sequence: Synthetic oligonucleotide
  Antisense strand to SEQ ID NO: 2484404
aguugaagcgcgcacucau

SEQ ID NO: 2484406 - RNA, 19 nt, Artificial Sequence
  Description of Artificial Sequence: Synthetic oligonucleotide
  Sense strand starting at position 2421 of SEQ ID NO: 1887606
ccugaugacuccucggacu

SEQ ID NO: 2484407 - RNA, 19 nt, Artificial Sequence
  Description of Artificial Sequence: Synthetic oligonucleotide
  Antisense strand to SEQ ID NO: 2484406
aguccgaggagucaucagg

SEQ ID NO: 2484408 - RNA, 19 nt, Artificial Sequence
  Description of Artificial Sequence: Synthetic oligonucleotide
  Sense strand starting at position 2423 of SEQ ID NO: 1887606
ugaugacuccucggacuuu

SEQ ID NO: 2484409 - RNA, 19 nt, Artificial Sequence
  Description of Artificial Sequence: Synthetic oligonucleotide
  Antisense strand to SEQ ID NO: 2484408
aaaguccgaggagucauca

SEQ ID NO: 2484410 - RNA, 19 nt, Artificial Sequence
  Description of Artificial Sequence: Synthetic oligonucleotide
  Sense strand starting at position 2987 of SEQ ID NO: 1887606
gauaauaggccguguugca

SEQ ID NO: 2484411 - RNA, 19 nt, Artificial Sequence
  Description of Artificial Sequence: Synthetic oligonucleotide
  Antisense strand to SEQ ID NO: 2484410
ugcaacacggccuauuauc

SEQ ID NO: 2484412 - RNA, 19 nt, Artificial Sequence
  Description of Artificial Sequence: Synthetic oligonucleotide
  Sense strand starting at position 3014 of SEQ ID NO: 1887606
ccaggauuaucucagauua

SEQ ID NO: 2484413 - RNA, 19 nt, Artificial Sequence
  Description of Artificial Sequence: Synthetic oligonucleotide
  Antisense strand to SEQ ID NO: 2484412
uaaucugagauaauccugg

SEQ ID NO: 2484414 - RNA, 19 nt, Artificial Sequence
  Description of Artificial Sequence: Synthetic oligonucleotide
  Sense strand starting at position 3016 of SEQ ID NO: 1887606
aggauuaucucagauuaaa

SEQ ID NO: 2484415 - RNA, 19 nt, Artificial Sequence
  Description of Artificial Sequence: Synthetic oligonucleotide
  Antisense strand to SEQ ID NO: 2484414
uuuaaucugagauaauccu

SEQ ID NO: 2484416 - RNA, 19 nt, Artificial Sequence
  Description of Artificial Sequence: Synthetic oligonucleotide
  Sense strand starting at position 3148 of SEQ ID NO: 1887606
gagcgaaguucuccagaag

SEQ ID NO: 2484417 - RNA, 19 nt, Artificial Sequence
  Description of Artificial Sequence: Synthetic oligonucleotide
  Antisense strand to SEQ ID NO: 2484416
cuucuggagaacuucgcuc

SEQ ID NO: 2484418 - RNA, 19 nt, Artificial Sequence
  Description of Artificial Sequence: Synthetic oligonucleotide
  Sense strand starting at position 3628 of SEQ ID NO: 1887606
ccguaugcccuuuagggau

SEQ ID NO: 2484419 - RNA, 19 nt, Artificial Sequence
  Description of Artificial Sequence: Synthetic oligonucleotide
  Antisense strand to SEQ ID NO: 2484418
aucccuaaagggcauacgg

SEQ ID NO: 2484420 - RNA, 19 nt, Artificial Sequence
  Description of Artificial Sequence: Synthetic oligonucleotide
  Sense strand starting at position 18 of SEQ ID NO: 1887607
caucguuggcaccaauaaa

SEQ ID NO: 2484421 - RNA, 19 nt, Artificial Sequence
  Description of Artificial Sequence: Synthetic oligonucleotide
  Antisense strand to SEQ ID NO: 2484420
uuuauuggugccaacgaug

SEQ ID NO: 2484422 - RNA, 19 nt, Artificial Sequence
  Description of Artificial Sequence: Synthetic oligonucleotide
  Sense strand starting at position 293 of SEQ ID NO: 1887607
gcugcagugcccugaaaga

SEQ ID NO: 2484423 - RNA, 19 nt, Artificial Sequence
  Description of Artificial Sequence: Synthetic oligonucleotide
  Antisense strand to SEQ ID NO: 2484422
ucuuucagggcacugcagc

SEQ ID NO: 2484424 - RNA, 19 nt, Artificial Sequence
  Description of Artificial Sequence: Synthetic oligonucleotide
  Sense strand starting at position 779 of SEQ ID NO: 1887607
cugaguucugaccagagug

SEQ ID NO: 2484425 - RNA, 19 nt, Artificial Sequence
  Description of Artificial Sequence: Synthetic oligonucleotide
  Antisense strand to SEQ ID NO: 2484424
cacucuggucagaacucag

SEQ ID NO: 2484426 - RNA, 19 nt, Artificial Sequence
  Description of Artificial Sequence: Synthetic oligonucleotide
  Sense strand starting at position 1298 of SEQ ID NO: 1887607
gguggaucacagcgaguaa

SEQ ID NO: 2484427 - RNA, 19 nt, Artificial Sequence
  Description of Artificial Sequence: Synthetic oligonucleotide
  Antisense strand to SEQ ID NO: 2484426
uuacucgcugugauccacc

SEQ ID NO: 2484428 - RNA, 19 nt, Artificial Sequence
  Description of Artificial Sequence: Synthetic oligonucleotide
  Sense strand starting at position 1299 of SEQ ID NO: 1887607
guggaucacagcgaguaau

SEQ ID NO: 2484429 - RNA, 19 nt, Artificial Sequence
  Description of Artificial Sequence: Synthetic oligonucleotide
  Antisense strand to SEQ ID NO: 2484428
auuacucgcugugauccac

SEQ ID NO: 2484430 - RNA, 19 nt, Artificial Sequence
  Description of Artificial Sequence: Synthetic oligonucleotide
  Sense strand starting at position 1302 of SEQ ID NO: 1887607
gaucacagcgaguaaugga

SEQ ID NO: 2484431 - RNA, 19 nt, Artificial Sequence
  Description of Artificial Sequence: Synthetic oligonucleotide
  Antisense strand to SEQ ID NO: 2484430
uccauuacucgcugugauc

SEQ ID NO: 2484432 - RNA, 19 nt, Artificial Sequence
  Description of Artificial Sequence: Synthetic oligonucleotide
  Sense strand starting at position 2770 of SEQ ID NO: 1887607
acgggacuucuuggaagag

SEQ ID NO: 2484433 - RNA, 19 nt, Artificial Sequence
  Description of Artificial Sequence: Synthetic oligonucleotide
  Antisense strand to SEQ ID NO: 2484432
cucuuccaagaagucccgu

SEQ ID NO: 2484434 - RNA, 19 nt, Artificial Sequence
  Description of Artificial Sequence: Synthetic oligonucleotide
  Sense strand starting at position 3396 of SEQ ID NO: 1887607
gccggaucaugcgguucaa

SEQ ID NO: 2484435 - RNA, 19 nt, Artificial Sequence
  Description of Artificial Sequence: Synthetic oligonucleotide
  Antisense strand to SEQ ID NO: 2484434
uugaaccgcaugauccggc

SEQ ID NO: 2484436 - RNA, 19 nt, Artificial Sequence
  Description of Artificial Sequence: Synthetic oligonucleotide
  Sense strand starting at position 3483 of SEQ ID NO: 1887607
agcagacucuucccagaac

SEQ ID NO: 2484437 - RNA, 19 nt, Artificial Sequence
  Description of Artificial Sequence: Synthetic oligonucleotide
  Antisense strand to SEQ ID NO: 2484436
guucugggaagagucugcu

SEQ ID NO: 2484438 - RNA, 19 nt, Artificial Sequence
  Description of Artificial Sequence: Synthetic oligonucleotide
  Sense strand starting at position 3873 of SEQ ID NO: 1887607
gcuguauacuucugggaaa

SEQ ID NO: 2484439 - RNA, 19 nt, Artificial Sequence
  Description of Artificial Sequence: Synthetic oligonucleotide
  Antisense strand to SEQ ID NO: 2484438
uuucccagaaguauacagc

SEQ ID NO: 2484440 - RNA, 19 nt, Artificial Sequence
  Description of Artificial Sequence: Synthetic oligonucleotide
  Sense strand starting at position 3920 of SEQ ID NO: 1887607
gcaucaucuccugguccuu

SEQ ID NO: 2484441 - RNA, 19 nt, Artificial Sequence
  Description of Artificial Sequence: Synthetic oligonucleotide
  Antisense strand to SEQ ID NO: 2484440
aaggaccaggagaugaugc

SEQ ID NO: 2484442 - RNA, 19 nt, Artificial Sequence
  Description of Artificial Sequence: Synthetic oligonucleotide
  Sense strand starting at position 499 of SEQ ID NO: 1887608
gcuagugugucaucgccga

SEQ ID NO: 2484443 - RNA, 19 nt, Artificial Sequence
  Description of Artificial Sequence: Synthetic oligonucleotide
  Antisense strand to SEQ ID NO: 2484442
ucggcgaugacacacuagc

SEQ ID NO: 2484444 - RNA, 19 nt, Artificial Sequence
  Description of Artificial Sequence: Synthetic oligonucleotide
  Sense strand starting at position 501 of SEQ ID NO: 1887608
uagugugucaucgccgaaa

SEQ ID NO: 2484445 - RNA, 19 nt, Artificial Sequence
  Description of Artificial Sequence: Synthetic oligonucleotide
  Antisense strand to SEQ ID NO: 2484444
uuucggcgaugacacacua

SEQ ID NO: 2484446 - RNA, 19 nt, Artificial Sequence
  Description of Artificial Sequence: Synthetic oligonucleotide
  Sense strand starting at position 1016 of SEQ ID NO: 1887608
guaccuuuauuugaacaga

SEQ ID NO: 2484447 - RNA, 19 nt, Artificial Sequence
  Description of Artificial Sequence: Synthetic oligonucleotide
  Antisense strand to SEQ ID NO: 2484446
ucuguucaaauaaagguac

SEQ ID NO: 2484448 - RNA, 19 nt, Artificial Sequence
  Description of Artificial Sequence: Synthetic oligonucleotide
  Sense strand starting at position 1144 of SEQ ID NO: 1887608
agcuuugucuggcucugua

SEQ ID NO: 2484449 - RNA, 19 nt, Artificial Sequence
  Description of Artificial Sequence: Synthetic oligonucleotide
  Antisense strand to SEQ ID NO: 2484448
uacagagccagacaaagcu

SEQ ID NO: 2484450 - RNA, 19 nt, Artificial Sequence
  Description of Artificial Sequence: Synthetic oligonucleotide
  Sense strand starting at position 1391 of SEQ ID NO: 1887608
ggcuuuggaugucuccaaa

SEQ ID NO: 2484451 - RNA, 19 nt, Artificial Sequence
  Description of Artificial Sequence: Synthetic oligonucleotide
  Antisense strand to SEQ ID NO: 2484450
uuuggagacauccaaagcc

SEQ ID NO: 2484452 - RNA, 19 nt, Artificial Sequence
  Description of Artificial Sequence: Synthetic oligonucleotide
  Sense strand starting at position 1394 of SEQ ID NO: 1887608
uuuggaugucuccaaacca

SEQ ID NO: 2484453 - RNA, 19 nt, Artificial Sequence
  Description of Artificial Sequence: Synthetic oligonucleotide
  Antisense strand to SEQ ID NO: 2484452
ugguuuggagacauccaaa

SEQ ID NO: 2484454 - RNA, 19 nt, Artificial Sequence
  Description of Artificial Sequence: Synthetic oligonucleotide
  Sense strand starting at position 1865 of SEQ ID NO: 1887608
cggauuucguuccuguaga

SEQ ID NO: 2484455 - RNA, 19 nt, Artificial Sequence
  Description of Artificial Sequence: Synthetic oligonucleotide
  Antisense strand to SEQ ID NO: 2484454
ucuacaggaacgaaauccg

SEQ ID NO: 2484456 - RNA, 19 nt, Artificial Sequence
  Description of Artificial Sequence: Synthetic oligonucleotide
  Sense strand starting at position 1866 of SEQ ID NO: 1887608
ggauuucguuccuguagaa

SEQ ID NO: 2484457 - RNA, 19 nt, Artificial Sequence
  Description of Artificial Sequence: Synthetic oligonucleotide
  Antisense strand to SEQ ID NO: 2484456
uucuacaggaacgaaaucc

SEQ ID NO: 2484458 - RNA, 19 nt, Artificial Sequence
  Description of Artificial Sequence: Synthetic oligonucleotide
  Sense strand starting at position 1884 of SEQ ID NO: 1887608
agaugaggcuucuccgcau

SEQ ID NO: 2484459 - RNA, 19 nt, Artificial Sequence
  Description of Artificial Sequence: Synthetic oligonucleotide
  Antisense strand to SEQ ID NO: 2484458
augcggagaagccucaucu

SEQ ID NO: 2484460 - RNA, 19 nt, Artificial Sequence
  Description of Artificial Sequence: Synthetic oligonucleotide
  Sense strand starting at position 1887 of SEQ ID NO: 1887608
ugaggcuucuccgcaugaa

SEQ ID NO: 2484461 - RNA, 19 nt, Artificial Sequence
  Description of Artificial Sequence: Synthetic oligonucleotide
  Antisense strand to SEQ ID NO: 2484460
uucaugcggagaagccuca

SEQ ID NO: 2484462 - RNA, 19 nt, Artificial Sequence
  Description of Artificial Sequence: Synthetic oligonucleotide
  Sense strand starting at position 1888 of SEQ ID NO: 1887608
gaggcuucuccgcaugaac

SEQ ID NO: 2484463 - RNA, 19 nt, Artificial Sequence
  Description of Artificial Sequence: Synthetic oligonucleotide
  Antisense strand to SEQ ID NO: 2484462
guucaugcggagaagccuc

SEQ ID NO: 2484464 - RNA, 19 nt, Artificial Sequence
  Description of Artificial Sequence: Synthetic oligonucleotide
  Sense strand starting at position 2135 of SEQ ID NO: 1887608
gcagcuuccucuugccauu

SEQ ID NO: 2484465 - RNA, 19 nt, Artificial Sequence
  Description of Artificial Sequence: Synthetic oligonucleotide
  Antisense strand to SEQ ID NO: 2484464
aauggcaagaggaagcugc

SEQ ID NO: 2484466 - RNA, 19 nt, Artificial Sequence
  Description of Artificial Sequence: Synthetic oligonucleotide
  Sense strand starting at position 2217 of SEQ ID NO: 1887608
ccaugaguauggcccugua

SEQ ID NO: 2484467 - RNA, 19 nt, Artificial Sequence
  Description of Artificial Sequence: Synthetic oligonucleotide
  Antisense strand to SEQ ID NO: 2484466
uacagggccauacucaugg

SEQ ID NO: 2484468 - RNA, 19 nt, Artificial Sequence
  Description of Artificial Sequence: Synthetic oligonucleotide
  Sense strand starting at position 2220 of SEQ ID NO: 1887608
ugaguauggcccuguauau

SEQ ID NO: 2484469 - RNA, 19 nt, Artificial Sequence
  Description of Artificial Sequence: Synthetic oligonucleotide
  Antisense strand to SEQ ID NO: 2484468
auauacagggccauacuca

SEQ ID NO: 2484470 - RNA, 19 nt, Artificial Sequence
  Description of Artificial Sequence: Synthetic oligonucleotide
  Sense strand starting at position 2238 of SEQ ID NO: 1887608
uaaacagggucuuugcaua

SEQ ID NO: 2484471 - RNA, 19 nt, Artificial Sequence
  Description of Artificial Sequence: Synthetic oligonucleotide
  Antisense strand to SEQ ID NO: 2484470
uaugcaaagacccuguuua

SEQ ID NO: 2484472 - RNA, 19 nt, Artificial Sequence
  Description of Artificial Sequence: Synthetic oligonucleotide
  Sense strand starting at position 2243 of SEQ ID NO: 1887608
agggucuuugcauauaaac

SEQ ID NO: 2484473 - RNA, 19 nt, Artificial Sequence
  Description of Artificial Sequence: Synthetic oligonucleotide
  Antisense strand to SEQ ID NO: 2484472
guuuauaugcaaagacccu

SEQ ID NO: 2484474 - RNA, 19 nt, Artificial Sequence
  Description of Artificial Sequence: Synthetic oligonucleotide
  Sense strand starting at position 3102 of SEQ ID NO: 1887608
uguagagaauguuucugau

SEQ ID NO: 2484475 - RNA, 19 nt, Artificial Sequence
  Description of Artificial Sequence: Synthetic oligonucleotide
  Antisense strand to SEQ ID NO: 2484474
aucagaaacauucucuaca

SEQ ID NO: 2484476 - RNA, 19 nt, Artificial Sequence
  Description of Artificial Sequence: Synthetic oligonucleotide
  Sense strand starting at position 3104 of SEQ ID NO: 1887608
uagagaauguuucugauau

SEQ ID NO: 2484477 - RNA, 19 nt, Artificial Sequence
  Description of Artificial Sequence: Synthetic oligonucleotide
  Antisense strand to SEQ ID NO: 2484476
auaucagaaacauucucua

SEQ ID NO: 2484478 - RNA, 19 nt, Artificial Sequence
  Description of Artificial Sequence: Synthetic oligonucleotide
  Sense strand starting at position 3105 of SEQ ID NO: 1887608
agagaauguuucugauauu

SEQ ID NO: 2484479 - RNA, 19 nt, Artificial Sequence
  Description of Artificial Sequence: Synthetic oligonucleotide
  Antisense strand to SEQ ID NO: 2484478
aauaucagaaacauucucu

SEQ ID NO: 2484480 - RNA, 19 nt, Artificial Sequence
  Description of Artificial Sequence: Synthetic oligonucleotide
  Sense strand starting at position 3106 of SEQ ID NO: 1887608
gagaauguuucugauauuu

SEQ ID NO: 2484481 - RNA, 19 nt, Artificial Sequence
  Description of Artificial Sequence: Synthetic oligonucleotide
  Antisense strand to SEQ ID NO: 2484480
aaauaucagaaacauucuc

SEQ ID NO: 2484482 - RNA, 19 nt, Artificial Sequence
  Description of Artificial Sequence: Synthetic oligonucleotide
  Sense strand starting at position 3271 of SEQ ID NO: 1887608
gccauauaacaaugcuaga

SEQ ID NO: 2484483 - RNA, 19 nt, Artificial Sequence
  Description of Artificial Sequence: Synthetic oligonucleotide
  Antisense strand to SEQ ID NO: 2484482
ucuagcauuguuauauggc

SEQ ID NO: 2484484 - RNA, 19 nt, Artificial Sequence
  Description of Artificial Sequence: Synthetic oligonucleotide
  Sense strand starting at position 3474 of SEQ ID NO: 1887608
aaugcacucuuguguuuga

SEQ ID NO: 2484485 - RNA, 19 nt, Artificial Sequence
  Description of Artificial Sequence: Synthetic oligonucleotide
  Antisense strand to SEQ ID NO: 2484484
ucaaacacaagagugcauu

SEQ ID NO: 2484486 - RNA, 19 nt, Artificial Sequence
  Description of Artificial Sequence: Synthetic oligonucleotide
  Sense strand starting at position 3477 of SEQ ID NO: 1887608
gcacucuuguguuugagga

SEQ ID NO: 2484487 - RNA, 19 nt, Artificial Sequence
  Description of Artificial Sequence: Synthetic oligonucleotide
  Antisense strand to SEQ ID NO: 2484486
uccucaaacacaagagugc

SEQ ID NO: 2484488 - RNA, 19 nt, Artificial Sequence
  Description of Artificial Sequence: Synthetic oligonucleotide
  Sense strand starting at position 3478 of SEQ ID NO: 1887608
cacucuuguguuugaggag

SEQ ID NO: 2484489 - RNA, 19 nt, Artificial Sequence
  Description of Artificial Sequence: Synthetic oligonucleotide
  Antisense strand to SEQ ID NO: 2484488
cuccucaaacacaagagug

SEQ ID NO: 2484490 - RNA, 19 nt, Artificial Sequence
  Description of Artificial Sequence: Synthetic oligonucleotide
  Sense strand starting at position 3481 of SEQ ID NO: 1887608
ucuuguguuugaggagggu

SEQ ID NO: 2484491 - RNA, 19 nt, Artificial Sequence
  Description of Artificial Sequence: Synthetic oligonucleotide
  Antisense strand to SEQ ID NO: 2484490
acccuccucaaacacaaga

SEQ ID NO: 2484492 - RNA, 19 nt, Artificial Sequence
  Description of Artificial Sequence: Synthetic oligonucleotide
  Sense strand starting at position 3604 of SEQ ID NO: 1887608
cccacucacugauggagaa

SEQ ID NO: 2484493 - RNA, 19 nt, Artificial Sequence
  Description of Artificial Sequence: Synthetic oligonucleotide
  Antisense strand to SEQ ID NO: 2484492
uucuccaucagugaguggg

SEQ ID NO: 2484494 - RNA, 19 nt, Artificial Sequence
  Description of Artificial Sequence: Synthetic oligonucleotide
  Sense strand starting at position 3776 of SEQ ID NO: 1887608
cggccucgucuguccgaaa

SEQ ID NO: 2484495 - RNA, 19 nt, Artificial Sequence
  Description of Artificial Sequence: Synthetic oligonucleotide
  Antisense strand to SEQ ID NO: 2484494
uuucggacagacgaggccg

SEQ ID NO: 2484496 - RNA, 19 nt, Artificial Sequence
  Description of Artificial Sequence: Synthetic oligonucleotide
  Sense strand starting at position 3779 of SEQ ID NO: 1887608
ccucgucuguccgaaagua

SEQ ID NO: 2484497 - RNA, 19 nt, Artificial Sequence
  Description of Artificial Sequence: Synthetic oligonucleotide
  Antisense strand to SEQ ID NO: 2484496
uacuuucggacagacgagg

SEQ ID NO: 2484498 - RNA, 19 nt, Artificial Sequence
  Description of Artificial Sequence: Synthetic oligonucleotide
  Sense strand starting at position 40 of SEQ ID NO: 1887609
cacugugaugcuuggugga

SEQ ID NO: 2484499 - RNA, 19 nt, Artificial Sequence
  Description of Artificial Sequence: Synthetic oligonucleotide
  Antisense strand to SEQ ID NO: 2484498
uccaccaagcaucacagug

SEQ ID NO: 2484500 - RNA, 19 nt, Artificial Sequence
  Description of Artificial Sequence: Synthetic oligonucleotide
  Sense strand starting at position 42 of SEQ ID NO: 1887609
cugugaugcuugguggaug

SEQ ID NO: 2484501 - RNA, 19 nt, Artificial Sequence
  Description of Artificial Sequence: Synthetic oligonucleotide
  Antisense strand to SEQ ID NO: 2484500
cauccaccaagcaucacag

SEQ ID NO: 2484502 - RNA, 19 nt, Artificial Sequence
  Description of Artificial Sequence: Synthetic oligonucleotide
  Sense strand starting at position 246 of SEQ ID NO: 1887609
uacuaucugcugcagagau

SEQ ID NO: 2484503 - RNA, 19 nt, Artificial Sequence
  Description of Artificial Sequence: Synthetic oligonucleotide
  Antisense strand to SEQ ID NO: 2484502
aucucugcagcagauagua

SEQ ID NO: 2484504 - RNA, 19 nt, Artificial Sequence
  Description of Artificial Sequence: Synthetic oligonucleotide
  Sense strand starting at position 600 of SEQ ID NO: 1887609
ggaaacugaggcugacuua

SEQ ID NO: 2484505 - RNA, 19 nt, Artificial Sequence
  Description of Artificial Sequence: Synthetic oligonucleotide
  Antisense strand to SEQ ID NO: 2484504
uaagucagccucaguuucc

SEQ ID NO: 2484506 - RNA, 19 nt, Artificial Sequence
  Description of Artificial Sequence: Synthetic oligonucleotide
  Sense strand starting at position 614 of SEQ ID NO: 1887609
acuuaaacuucccgugacu

SEQ ID NO: 2484507 - RNA, 19 nt, Artificial Sequence
  Description of Artificial Sequence: Synthetic oligonucleotide
  Antisense strand to SEQ ID NO: 2484506
agucacgggaaguuuaagu

SEQ ID NO: 2484508 - RNA, 19 nt, Artificial Sequence
  Description of Artificial Sequence: Synthetic oligonucleotide
  Sense strand starting at position 616 of SEQ ID NO: 1887609
uuaaacuucccgugacuug

SEQ ID NO: 2484509 - RNA, 19 nt, Artificial Sequence
  Description of Artificial Sequence: Synthetic oligonucleotide
  Antisense strand to SEQ ID NO: 2484508
caagucacgggaaguuuaa

SEQ ID NO: 2484510 - RNA, 19 nt, Artificial Sequence
  Description of Artificial Sequence: Synthetic oligonucleotide
  Sense strand starting at position 635 of SEQ ID NO: 1887609
gagcucucaccucgagaca

SEQ ID NO: 2484511 - RNA, 19 nt, Artificial Sequence
  Description of Artificial Sequence: Synthetic oligonucleotide
  Antisense strand to SEQ ID NO: 2484510
ugucucgaggugagagcuc

SEQ ID NO: 2484512 - RNA, 19 nt, Artificial Sequence
  Description of Artificial Sequence: Synthetic oligonucleotide
  Sense strand starting at position 1288 of SEQ ID NO: 1887609
uuccuuagcccagguuuau

SEQ ID NO: 2484513 - RNA, 19 nt, Artificial Sequence
  Description of Artificial Sequence: Synthetic oligonucleotide
  Antisense strand to SEQ ID NO: 2484512
auaaaccugggcuaaggaa

SEQ ID NO: 2484514 - RNA, 19 nt, Artificial Sequence
  Description of Artificial Sequence: Synthetic oligonucleotide
  Sense strand starting at position 1294 of SEQ ID NO: 1887609
agcccagguuuauuuagua

SEQ ID NO: 2484515 - RNA, 19 nt, Artificial Sequence
  Description of Artificial Sequence: Synthetic oligonucleotide
  Antisense strand to SEQ ID NO: 2484514
uacuaaauaaaccugggcu

SEQ ID NO: 2484516 - RNA, 19 nt, Artificial Sequence
  Description of Artificial Sequence: Synthetic oligonucleotide
  Sense strand starting at position 1421 of SEQ ID NO: 1887609
gacugacaguccugggauu

SEQ ID NO: 2484517 - RNA, 19 nt, Artificial Sequence
  Description of Artificial Sequence: Synthetic oligonucleotide
  Antisense strand to SEQ ID NO: 2484516
aaucccaggacugucaguc

SEQ ID NO: 2484518 - RNA, 19 nt, Artificial Sequence
  Description of Artificial Sequence: Synthetic oligonucleotide
  Sense strand starting at position 1454 of SEQ ID NO: 1887609
ugcguuucccuuccaguga

SEQ ID NO: 2484519 - RNA, 19 nt, Artificial Sequence
  Description of Artificial Sequence: Synthetic oligonucleotide
  Antisense strand to SEQ ID NO: 2484518
ucacuggaagggaaacgca

SEQ ID NO: 2484520 - RNA, 19 nt, Artificial Sequence
  Description of Artificial Sequence: Synthetic oligonucleotide
  Sense strand starting at position 1523 of SEQ ID NO: 1887609
ggguagaguccuggucgga

SEQ ID NO: 2484521 - RNA, 19 nt, Artificial Sequence
  Description of Artificial Sequence: Synthetic oligonucleotide
  Antisense strand to SEQ ID NO: 2484520
uccgaccaggacucuaccc

SEQ ID NO: 2484522 - RNA, 19 nt, Artificial Sequence
  Description of Artificial Sequence: Synthetic oligonucleotide
  Sense strand starting at position 1603 of SEQ ID NO: 1887609
aagggaugaugccuuaaca

SEQ ID NO: 2484523 - RNA, 19 nt, Artificial Sequence
  Description of Artificial Sequence: Synthetic oligonucleotide
  Antisense strand to SEQ ID NO: 2484522
uguuaaggcaucaucccuu

SEQ ID NO: 2484524 - RNA, 19 nt, Artificial Sequence
  Description of Artificial Sequence: Synthetic oligonucleotide
  Sense strand starting at position 2267 of SEQ ID NO: 1887609
ucaacaaacgcuuggcaaa

SEQ ID NO: 2484525 - RNA, 19 nt, Artificial Sequence
  Description of Artificial Sequence: Synthetic oligonucleotide
  Antisense strand to SEQ ID NO: 2484524
uuugccaagcguuuguuga

SEQ ID NO: 2484526 - RNA, 19 nt, Artificial Sequence
  Description of Artificial Sequence: Synthetic oligonucleotide
  Sense strand starting at position 2358 of SEQ ID NO: 1887609
cugacauccuagugugaga

SEQ ID NO: 2484527 - RNA, 19 nt, Artificial Sequence
  Description of Artificial Sequence: Synthetic oligonucleotide
  Antisense strand to SEQ ID NO: 2484526
ucucacacuaggaugucag

SEQ ID NO: 2484528 - RNA, 19 nt, Artificial Sequence
  Description of Artificial Sequence: Synthetic oligonucleotide
  Sense strand starting at position 2360 of SEQ ID NO: 1887609
gacauccuagugugagaga

SEQ ID NO: 2484529 - RNA, 19 nt, Artificial Sequence
  Description of Artificial Sequence: Synthetic oligonucleotide
  Antisense strand to SEQ ID NO: 2484528
ucucucacacuaggauguc

SEQ ID NO: 2484530 - RNA, 19 nt, Artificial Sequence
  Description of Artificial Sequence: Synthetic oligonucleotide
  Sense strand starting at position 2363 of SEQ ID NO: 1887609
auccuagugugagagacua

SEQ ID NO: 2484531 - RNA, 19 nt, Artificial Sequence
  Description of Artificial Sequence: Synthetic oligonucleotide
  Antisense strand to SEQ ID NO: 2484530
uagucucucacacuaggau

SEQ ID NO: 2484532 - RNA, 19 nt, Artificial Sequence
  Description of Artificial Sequence: Synthetic oligonucleotide
  Sense strand starting at position 2386 of SEQ ID NO: 1887609
ggaagaugauuacaugaau

SEQ ID NO: 2484533 - RNA, 19 nt, Artificial Sequence
  Description of Artificial Sequence: Synthetic oligonucleotide
  Antisense strand to SEQ ID NO: 2484532
auucauguaaucaucuucc

SEQ ID NO: 2484534 - RNA, 19 nt, Artificial Sequence
  Description of Artificial Sequence: Synthetic oligonucleotide
  Sense strand starting at position 2950 of SEQ ID NO: 1887609
uaucucauguguuagaggu

SEQ ID NO: 2484535 - RNA, 19 nt, Artificial Sequence
  Description of Artificial Sequence: Synthetic oligonucleotide
  Antisense strand to SEQ ID NO: 2484534
accucuaacacaugagaua

SEQ ID NO: 2484536 - RNA, 19 nt, Artificial Sequence
  Description of Artificial Sequence: Synthetic oligonucleotide
  Sense strand starting at position 2952 of SEQ ID NO: 1887609
ucucauguguuagagguga

SEQ ID NO: 2484537 - RNA, 19 nt, Artificial Sequence
  Description of Artificial Sequence: Synthetic oligonucleotide
  Antisense strand to SEQ ID NO: 2484536
ucaccucuaacacaugaga

SEQ ID NO: 2484538 - RNA, 19 nt, Artificial Sequence
  Description of Artificial Sequence: Synthetic oligonucleotide
  Sense strand starting at position 2954 of SEQ ID NO: 1887609
ucauguguuagaggugaua

SEQ ID NO: 2484539 - RNA, 19 nt, Artificial Sequence
  Description of Artificial Sequence: Synthetic oligonucleotide
  Antisense strand to SEQ ID NO: 2484538
uaucaccucuaacacauga

SEQ ID NO: 2484540 - RNA, 19 nt, Artificial Sequence
  Description of Artificial Sequence: Synthetic oligonucleotide
  Sense strand starting at position 2956 of SEQ ID NO: 1887609
auguguuagaggugauaac

SEQ ID NO: 2484541 - RNA, 19 nt, Artificial Sequence
  Description of Artificial Sequence: Synthetic oligonucleotide
  Antisense strand to SEQ ID NO: 2484540
guuaucaccucuaacacau

SEQ ID NO: 2484542 - RNA, 19 nt, Artificial Sequence
  Description of Artificial Sequence: Synthetic oligonucleotide
  Sense strand starting at position 2957 of SEQ ID NO: 1887609
uguguuagaggugauaacu

SEQ ID NO: 2484543 - RNA, 19 nt, Artificial Sequence
  Description of Artificial Sequence: Synthetic oligonucleotide
  Antisense strand to SEQ ID NO: 2484542
aguuaucaccucuaacaca

SEQ ID NO: 2484544 - RNA, 19 nt, Artificial Sequence
  Description of Artificial Sequence: Synthetic oligonucleotide
  Sense strand starting at position 3048 of SEQ ID NO: 1887609
uagaauuugucucagguuu

SEQ ID NO: 2484545 - RNA, 19 nt, Artificial Sequence
  Description of Artificial Sequence: Synthetic oligonucleotide
  Antisense strand to SEQ ID NO: 2484544
aaaccugagacaaauucua

SEQ ID NO: 2484546 - RNA, 19 nt, Artificial Sequence
  Description of Artificial Sequence: Synthetic oligonucleotide
  Sense strand starting at position 3133 of SEQ ID NO: 1887609
uguccauaaucucaguacu

SEQ ID NO: 2484547 - RNA, 19 nt, Artificial Sequence
  Description of Artificial Sequence: Synthetic oligonucleotide
  Antisense strand to SEQ ID NO: 2484546
aguacugagauuauggaca

SEQ ID NO: 2484548 - RNA, 19 nt, Artificial Sequence
  Description of Artificial Sequence: Synthetic oligonucleotide
  Sense strand starting at position 3420 of SEQ ID NO: 1887609
augcaucacugcugaaaga

SEQ ID NO: 2484549 - RNA, 19 nt, Artificial Sequence
  Description of Artificial Sequence: Synthetic oligonucleotide
  Antisense strand to SEQ ID NO: 2484548
ucuuucagcagugaugcau

SEQ ID NO: 2484550 - RNA, 19 nt, Artificial Sequence
  Description of Artificial Sequence: Synthetic oligonucleotide
  Sense strand starting at position 3433 of SEQ ID NO: 1887609
gaaagagugcuccaagcag

SEQ ID NO: 2484551 - RNA, 19 nt, Artificial Sequence
  Description of Artificial Sequence: Synthetic oligonucleotide
  Antisense strand to SEQ ID NO: 2484550
cugcuuggagcacucuuuc

SEQ ID NO: 2484552 - RNA, 19 nt, Artificial Sequence
  Description of Artificial Sequence: Synthetic oligonucleotide
  Sense strand starting at position 3480 of SEQ ID NO: 1887609
gugggagugucugaaauag

SEQ ID NO: 2484553 - RNA, 19 nt, Artificial Sequence
  Description of Artificial Sequence: Synthetic oligonucleotide
  Antisense strand to SEQ ID NO: 2484552
cuauuucagacacucccac

SEQ ID NO: 2484554 - RNA, 19 nt, Artificial Sequence
  Description of Artificial Sequence: Synthetic oligonucleotide
  Sense strand starting at position 3482 of SEQ ID NO: 1887609
gggagugucugaaauaggu

SEQ ID NO: 2484555 - RNA, 19 nt, Artificial Sequence
  Description of Artificial Sequence: Synthetic oligonucleotide
  Antisense strand to SEQ ID NO: 2484554
accuauuucagacacuccc

SEQ ID NO: 2484556 - RNA, 19 nt, Artificial Sequence
  Description of Artificial Sequence: Synthetic oligonucleotide
  Sense strand starting at position 3484 of SEQ ID NO: 1887609
gagugucugaaauagguga

SEQ ID NO: 2484557 - RNA, 19 nt, Artificial Sequence
  Description of Artificial Sequence: Synthetic oligonucleotide
  Antisense strand to SEQ ID NO: 2484556
ucaccuauuucagacacuc

SEQ ID NO: 2484558 - RNA, 19 nt, Artificial Sequence
  Description of Artificial Sequence: Synthetic oligonucleotide
  Sense strand starting at position 26 of SEQ ID NO: 1887610
gucacaugugccugucuca

SEQ ID NO: 2484559 - RNA, 19 nt, Artificial Sequence
  Description of Artificial Sequence: Synthetic oligonucleotide
  Antisense strand to SEQ ID NO: 2484558
ugagacaggcacaugugac

SEQ ID NO: 2484560 - RNA, 19 nt, Artificial Sequence
  Description of Artificial Sequence: Synthetic oligonucleotide
  Sense strand starting at position 73 of SEQ ID NO: 1887610
acugcugucaccugaguga

SEQ ID NO: 2484561 - RNA, 19 nt, Artificial Sequence
  Description of Artificial Sequence: Synthetic oligonucleotide
  Antisense strand to SEQ ID NO: 2484560
ucacucaggugacagcagu

SEQ ID NO: 2484562 - RNA, 19 nt, Artificial Sequence
  Description of Artificial Sequence: Synthetic oligonucleotide
  Sense strand starting at position 77 of SEQ ID NO: 1887610
cugucaccugagugaucca

SEQ ID NO: 2484563 - RNA, 19 nt, Artificial Sequence
  Description of Artificial Sequence: Synthetic oligonucleotide
  Antisense strand to SEQ ID NO: 2484562
uggaucacucaggugacag

SEQ ID NO: 2484564 - RNA, 19 nt, Artificial Sequence
  Description of Artificial Sequence: Synthetic oligonucleotide
  Sense strand starting at position 189 of SEQ ID NO: 1887610
aguguaugucucugagcgu

SEQ ID NO: 2484565 - RNA, 19 nt, Artificial Sequence
  Description of Artificial Sequence: Synthetic oligonucleotide
  Antisense strand to SEQ ID NO: 2484564
acgcucagagacauacacu

SEQ ID NO: 2484566 - RNA, 19 nt, Artificial Sequence
  Description of Artificial Sequence: Synthetic oligonucleotide
  Sense strand starting at position 227 of SEQ ID NO: 1887610
uguguucuauccuagagga

SEQ ID NO: 2484567 - RNA, 19 nt, Artificial Sequence
  Description of Artificial Sequence: Synthetic oligonucleotide
  Antisense strand to SEQ ID NO: 2484566
uccucuaggauagaacaca

SEQ ID NO: 2484568 - RNA, 19 nt, Artificial Sequence
  Description of Artificial Sequence: Synthetic oligonucleotide
  Sense strand starting at position 246 of SEQ ID NO: 1887610
agaugccuucccuaagauc

SEQ ID NO: 2484569 - RNA, 19 nt, Artificial Sequence
  Description of Artificial Sequence: Synthetic oligonucleotide
  Antisense strand to SEQ ID NO: 2484568
gaucuuagggaaggcaucu

SEQ ID NO: 2484570 - RNA, 19 nt, Artificial Sequence
  Description of Artificial Sequence: Synthetic oligonucleotide
  Sense strand starting at position 319 of SEQ ID NO: 1887610
gcaagaagauugucccacu

SEQ ID NO: 2484571 - RNA, 19 nt, Artificial Sequence
  Description of Artificial Sequence: Synthetic oligonucleotide
  Antisense strand to SEQ ID NO: 2484570
agugggacaaucuucuugc

SEQ ID NO: 2484572 - RNA, 19 nt, Artificial Sequence
  Description of Artificial Sequence: Synthetic oligonucleotide
  Sense strand starting at position 322 of SEQ ID NO: 1887610
agaagauugucccacuuua

SEQ ID NO: 2484573 - RNA, 19 nt, Artificial Sequence
  Description of Artificial Sequence: Synthetic oligonucleotide
  Antisense strand to SEQ ID NO: 2484572
uaaagugggacaaucuucu

SEQ ID NO: 2484574 - RNA, 19 nt, Artificial Sequence
  Description of Artificial Sequence: Synthetic oligonucleotide
  Sense strand starting at position 531 of SEQ ID NO: 1887610
ucagccuucguuuggacaa

SEQ ID NO: 2484575 - RNA, 19 nt, Artificial Sequence
  Description of Artificial Sequence: Synthetic oligonucleotide
  Antisense strand to SEQ ID NO: 2484574
uuguccaaacgaaggcuga

SEQ ID NO: 2484576 - RNA, 19 nt, Artificial Sequence
  Description of Artificial Sequence: Synthetic oligonucleotide
  Sense strand starting at position 546 of SEQ ID NO: 1887610
acaaguagcugagcucaau

SEQ ID NO: 2484577 - RNA, 19 nt, Artificial Sequence
  Description of Artificial Sequence: Synthetic oligonucleotide
  Antisense strand to SEQ ID NO: 2484576
auugagcucagcuacuugu

SEQ ID NO: 2484578 - RNA, 19 nt, Artificial Sequence
  Description of Artificial Sequence: Synthetic oligonucleotide
  Sense strand starting at position 2828 of SEQ ID NO: 1887610
cccaaauguuccuggaauc

SEQ ID NO: 2484579 - RNA, 19 nt, Artificial Sequence
  Description of Artificial Sequence: Synthetic oligonucleotide
  Antisense strand to SEQ ID NO: 2484578
gauuccaggaacauuuggg

SEQ ID NO: 2484580 - RNA, 19 nt, Artificial Sequence
  Description of Artificial Sequence: Synthetic oligonucleotide
  Sense strand starting at position 2969 of SEQ ID NO: 1887610
gaaggcauggccugauaga

SEQ ID NO: 2484581 - RNA, 19 nt, Artificial Sequence
  Description of Artificial Sequence: Synthetic oligonucleotide
  Antisense strand to SEQ ID NO: 2484580
ucuaucaggccaugccuuc

SEQ ID NO: 2484582 - RNA, 19 nt, Artificial Sequence
  Description of Artificial Sequence: Synthetic oligonucleotide
  Sense strand starting at position 3019 of SEQ ID NO: 1887610
gaaccucauuugucucgua

SEQ ID NO: 2484583 - RNA, 19 nt, Artificial Sequence
  Description of Artificial Sequence: Synthetic oligonucleotide
  Antisense strand to SEQ ID NO: 2484582
uacgagacaaaugagguuc

SEQ ID NO: 2484584 - RNA, 19 nt, Artificial Sequence
  Description of Artificial Sequence: Synthetic oligonucleotide
  Sense strand starting at position 3022 of SEQ ID NO: 1887610
ccucauuugucucguaauu

SEQ ID NO: 2484585 - RNA, 19 nt, Artificial Sequence
  Description of Artificial Sequence: Synthetic oligonucleotide
  Antisense strand to SEQ ID NO: 2484584
aauuacgagacaaaugagg

SEQ ID NO: 2484586 - RNA, 19 nt, Artificial Sequence
  Description of Artificial Sequence: Synthetic oligonucleotide
  Sense strand starting at position 3024 of SEQ ID NO: 1887610
ucauuugucucguaauuug

SEQ ID NO: 2484587 - RNA, 19 nt, Artificial Sequence
  Description of Artificial Sequence: Synthetic oligonucleotide
  Antisense strand to SEQ ID NO: 2484586
caaauuacgagacaaauga

SEQ ID NO: 2484588 - RNA, 19 nt, Artificial Sequence
  Description of Artificial Sequence: Synthetic oligonucleotide
  Sense strand starting at position 3075 of SEQ ID NO: 1887610
uccugucagucugcagaga

SEQ ID NO: 2484589 - RNA, 19 nt, Artificial Sequence
  Description of Artificial Sequence: Synthetic oligonucleotide
  Antisense strand to SEQ ID NO: 2484588
ucucugcagacugacagga

SEQ ID NO: 2484590 - RNA, 19 nt, Artificial Sequence
  Description of Artificial Sequence: Synthetic oligonucleotide
  Sense strand starting at position 3178 of SEQ ID NO: 1887610
uugggucauuuacaacuau

SEQ ID NO: 2484591 - RNA, 19 nt, Artificial Sequence
  Description of Artificial Sequence: Synthetic oligonucleotide
  Antisense strand to SEQ ID NO: 2484590
auaguuguaaaugacccaa

SEQ ID NO: 2484592 - RNA, 19 nt, Artificial Sequence
  Description of Artificial Sequence: Synthetic oligonucleotide
  Sense strand starting at position 3871 of SEQ ID NO: 1887610
ggaugucuuuccucacuuc

SEQ ID NO: 2484593 - RNA, 19 nt, Artificial Sequence
  Description of Artificial Sequence: Synthetic oligonucleotide
  Antisense strand to SEQ ID NO: 2484592
gaagugaggaaagacaucc

SEQ ID NO: 2484594 - RNA, 19 nt, Artificial Sequence
  Description of Artificial Sequence: Synthetic oligonucleotide
  Sense strand starting at position 93 of SEQ ID NO: 1887611
ggacgugcucugugaccuu

SEQ ID NO: 2484595 - RNA, 19 nt, Artificial Sequence
  Description of Artificial Sequence: Synthetic oligonucleotide
  Antisense strand to SEQ ID NO: 2484594
aaggucacagagcacgucc

SEQ ID NO: 2484596 - RNA, 19 nt, Artificial Sequence
  Description of Artificial Sequence: Synthetic oligonucleotide
  Sense strand starting at position 159 of SEQ ID NO: 1887611
gcagaaaggcagcgguaau

SEQ ID NO: 2484597 - RNA, 19 nt, Artificial Sequence
  Description of Artificial Sequence: Synthetic oligonucleotide
  Antisense strand to SEQ ID NO: 2484596
auuaccgcugccuuucugc

SEQ ID NO: 2484598 - RNA, 19 nt, Artificial Sequence
  Description of Artificial Sequence: Synthetic oligonucleotide
  Sense strand starting at position 192 of SEQ ID NO: 1887611
ggaagccauucuugugaca

SEQ ID NO: 2484599 - RNA, 19 nt, Artificial Sequence
  Description of Artificial Sequence: Synthetic oligonucleotide
  Antisense strand to SEQ ID NO: 2484598
ugucacaagaauggcuucc

SEQ ID NO: 2484600 - RNA, 19 nt, Artificial Sequence
  Description of Artificial Sequence: Synthetic oligonucleotide
  Sense strand starting at position 195 of SEQ ID NO: 1887611
agccauucuugugacacau

SEQ ID NO: 2484601 - RNA, 19 nt, Artificial Sequence
  Description of Artificial Sequence: Synthetic oligonucleotide
  Antisense strand to SEQ ID NO: 2484600
augugucacaagaauggcu

SEQ ID NO: 2484602 - RNA, 19 nt, Artificial Sequence
  Description of Artificial Sequence: Synthetic oligonucleotide
  Sense strand starting at position 197 of SEQ ID NO: 1887611
ccauucuugugacacauuu

SEQ ID NO: 2484603 - RNA, 19 nt, Artificial Sequence
  Description of Artificial Sequence: Synthetic oligonucleotide
  Antisense strand to SEQ ID NO: 2484602
aaaugugucacaagaaugg

SEQ ID NO: 2484604 - RNA, 19 nt, Artificial Sequence
  Description of Artificial Sequence: Synthetic oligonucleotide
  Sense strand starting at position 332 of SEQ ID NO: 1887611
agcugaauuccuggcaggu

SEQ ID NO: 2484605 - RNA, 19 nt, Artificial Sequence
  Description of Artificial Sequence: Synthetic oligonucleotide
  Antisense strand to SEQ ID NO: 2484604
accugccaggaauucagcu

SEQ ID NO: 2484606 - RNA, 19 nt, Artificial Sequence
  Description of Artificial Sequence: Synthetic oligonucleotide
  Sense strand starting at position 334 of SEQ ID NO: 1887611
cugaauuccuggcagguca

SEQ ID NO: 2484607 - RNA, 19 nt, Artificial Sequence
  Description of Artificial Sequence: Synthetic oligonucleotide
  Antisense strand to SEQ ID NO: 2484606
ugaccugccaggaauucag

SEQ ID NO: 2484608 - RNA, 19 nt, Artificial Sequence
  Description of Artificial Sequence: Synthetic oligonucleotide
  Sense strand starting at position 653 of SEQ ID NO: 1887611
agggcuugugcuuggguua

SEQ ID NO: 2484609 - RNA, 19 nt, Artificial Sequence
  Description of Artificial Sequence: Synthetic oligonucleotide
  Antisense strand to SEQ ID NO: 2484608
uaacccaagcacaagcccu

SEQ ID NO: 2484610 - RNA, 19 nt, Artificial Sequence
  Description of Artificial Sequence: Synthetic oligonucleotide
  Sense strand starting at position 654 of SEQ ID NO: 1887611
gggcuugugcuuggguuaa

SEQ ID NO: 2484611 - RNA, 19 nt, Artificial Sequence
  Description of Artificial Sequence: Synthetic oligonucleotide
  Antisense strand to SEQ ID NO: 2484610
uuaacccaagcacaagccc

SEQ ID NO: 2484612 - RNA, 19 nt, Artificial Sequence
  Description of Artificial Sequence: Synthetic oligonucleotide
  Sense strand starting at position 668 of SEQ ID NO: 1887611
guuaauauuuacugcugca

SEQ ID NO: 2484613 - RNA, 19 nt, Artificial Sequence
  Description of Artificial Sequence: Synthetic oligonucleotide
  Antisense strand to SEQ ID NO: 2484612
ugcagcaguaaauauuaac

SEQ ID NO: 2484614 - RNA, 19 nt, Artificial Sequence
  Description of Artificial Sequence: Synthetic oligonucleotide
  Sense strand starting at position 1157 of SEQ ID NO: 1887611
ccgugaucagcuguuuguu

SEQ ID NO: 2484615 - RNA, 19 nt, Artificial Sequence
  Description of Artificial Sequence: Synthetic oligonucleotide
  Antisense strand to SEQ ID NO: 2484614
aacaaacagcugaucacgg

SEQ ID NO: 2484616 - RNA, 19 nt, Artificial Sequence
  Description of Artificial Sequence: Synthetic oligonucleotide
  Sense strand starting at position 1158 of SEQ ID NO: 1887611
cgugaucagcuguuuguuu

SEQ ID NO: 2484617 - RNA, 19 nt, Artificial Sequence
  Description of Artificial Sequence: Synthetic oligonucleotide
  Antisense strand to SEQ ID NO: 2484616
aaacaaacagcugaucacg

SEQ ID NO: 2484618 - RNA, 19 nt, Artificial Sequence
  Description of Artificial Sequence: Synthetic oligonucleotide
  Sense strand starting at position 1481 of SEQ ID NO: 1887611
cucugagugaggugggaau

SEQ ID NO: 2484619 - RNA, 19 nt, Artificial Sequence
  Description of Artificial Sequence: Synthetic oligonucleotide
  Antisense strand to SEQ ID NO: 2484618
auucccaccucacucagag

SEQ ID NO: 2484620 - RNA, 19 nt, Artificial Sequence
  Description of Artificial Sequence: Synthetic oligonucleotide
  Sense strand starting at position 1532 of SEQ ID NO: 1887611
ccugguggcgguuauuaaa

SEQ ID NO: 2484621 - RNA, 19 nt, Artificial Sequence
  Description of Artificial Sequence: Synthetic oligonucleotide
  Antisense strand to SEQ ID NO: 2484620
uuuaauaaccgccaccagg

SEQ ID NO: 2484622 - RNA, 19 nt, Artificial Sequence
  Description of Artificial Sequence: Synthetic oligonucleotide
  Sense strand starting at position 1653 of SEQ ID NO: 1887611
ucaucaucgucauccacua

SEQ ID NO: 2484623 - RNA, 19 nt, Artificial Sequence
  Description of Artificial Sequence: Synthetic oligonucleotide
  Antisense strand to SEQ ID NO: 2484622
uaguggaugacgaugauga

SEQ ID NO: 2484624 - RNA, 19 nt, Artificial Sequence
  Description of Artificial Sequence: Synthetic oligonucleotide
  Sense strand starting at position 1673 of SEQ ID NO: 1887611
gcagccugcucccuugaau

SEQ ID NO: 2484625 - RNA, 19 nt, Artificial Sequence
  Description of Artificial Sequence: Synthetic oligonucleotide
  Antisense strand to SEQ ID NO: 2484624
auucaagggagcaggcugc

SEQ ID NO: 2484626 - RNA, 19 nt, Artificial Sequence
  Description of Artificial Sequence: Synthetic oligonucleotide
  Sense strand starting at position 1676 of SEQ ID NO: 1887611
gccugcucccuugaaugaa

SEQ ID NO: 2484627 - RNA, 19 nt, Artificial Sequence
  Description of Artificial Sequence: Synthetic oligonucleotide
  Antisense strand to SEQ ID NO: 2484626
uucauucaagggagcaggc

SEQ ID NO: 2484628 - RNA, 19 nt, Artificial Sequence
  Description of Artificial Sequence: Synthetic oligonucleotide
  Sense strand starting at position 1773 of SEQ ID NO: 1887611
ggugauagccuucagugau

SEQ ID NO: 2484629 - RNA, 19 nt, Artificial Sequence
  Description of Artificial Sequence: Synthetic oligonucleotide
  Antisense strand to SEQ ID NO: 2484628
aucacugaaggcuaucacc

SEQ ID NO: 2484630 - RNA, 19 nt, Artificial Sequence
  Description of Artificial Sequence: Synthetic oligonucleotide
  Sense strand starting at position 2150 of SEQ ID NO: 1887611
gacacaguccucuguugca

SEQ ID NO: 2484631 - RNA, 19 nt, Artificial Sequence
  Description of Artificial Sequence: Synthetic oligonucleotide
  Antisense strand to SEQ ID NO: 2484630
ugcaacagaggacuguguc

SEQ ID NO: 2484632 - RNA, 19 nt, Artificial Sequence
  Description of Artificial Sequence: Synthetic oligonucleotide
  Sense strand starting at position 3040 of SEQ ID NO: 1887611
cugagagacugcguuccua

SEQ ID NO: 2484633 - RNA, 19 nt, Artificial Sequence
  Description of Artificial Sequence: Synthetic oligonucleotide
  Antisense strand to SEQ ID NO: 2484632
uaggaacgcagucucucag

SEQ ID NO: 2484634 - RNA, 19 nt, Artificial Sequence
  Description of Artificial Sequence: Synthetic oligonucleotide
  Sense strand starting at position 3044 of SEQ ID NO: 1887611
gagacugcguuccuagacu

SEQ ID NO: 2484635 - RNA, 19 nt, Artificial Sequence
  Description of Artificial Sequence: Synthetic oligonucleotide
  Antisense strand to SEQ ID NO: 2484634
agucuaggaacgcagucuc

SEQ ID NO: 2484636 - RNA, 19 nt, Artificial Sequence
  Description of Artificial Sequence: Synthetic oligonucleotide
  Sense strand starting at position 3146 of SEQ ID NO: 1887611
gccaccugccaguguuuau

SEQ ID NO: 2484637 - RNA, 19 nt, Artificial Sequence
  Description of Artificial Sequence: Synthetic oligonucleotide
  Antisense strand to SEQ ID NO: 2484636
auaaacacuggcagguggc

SEQ ID NO: 2484638 - RNA, 19 nt, Artificial Sequence
  Description of Artificial Sequence: Synthetic oligonucleotide
  Sense strand starting at position 3149 of SEQ ID NO: 1887611
accugccaguguuuauuua

SEQ ID NO: 2484639 - RNA, 19 nt, Artificial Sequence
  Description of Artificial Sequence: Synthetic oligonucleotide
  Antisense strand to SEQ ID NO: 2484638
uaaauaaacacuggcaggu

SEQ ID NO: 2484640 - RNA, 19 nt, Artificial Sequence
  Description of Artificial Sequence: Synthetic oligonucleotide
  Sense strand starting at position 3153 of SEQ ID NO: 1887611
gccaguguuuauuuaggca

SEQ ID NO: 2484641 - RNA, 19 nt, Artificial Sequence
  Description of Artificial Sequence: Synthetic oligonucleotide
  Antisense strand to SEQ ID NO: 2484640
ugccuaaauaaacacuggc

SEQ ID NO: 2484642 - RNA, 19 nt, Artificial Sequence
  Description of Artificial Sequence: Synthetic oligonucleotide
  Sense strand starting at position 3172 of SEQ ID NO: 1887611
ggcgccuuccgguaucagu

SEQ ID NO: 2484643 - RNA, 19 nt, Artificial Sequence
  Description of Artificial Sequence: Synthetic oligonucleotide
  Antisense strand to SEQ ID NO: 2484642
acugauaccggaaggcgcc

SEQ ID NO: 2484644 - RNA, 19 nt, Artificial Sequence
  Description of Artificial Sequence: Synthetic oligonucleotide
  Sense strand starting at position 3306 of SEQ ID NO: 1887611
gaccuaggccugugaagga

SEQ ID NO: 2484645 - RNA, 19 nt, Artificial Sequence
  Description of Artificial Sequence: Synthetic oligonucleotide
  Antisense strand to SEQ ID NO: 2484644
uccuucacaggccuagguc

SEQ ID NO: 2484646 - RNA, 19 nt, Artificial Sequence
  Description of Artificial Sequence: Synthetic oligonucleotide
  Sense strand starting at position 3325 of SEQ ID NO: 1887611
gagagucauugugaaauca

SEQ ID NO: 2484647 - RNA, 19 nt, Artificial Sequence
  Description of Artificial Sequence: Synthetic oligonucleotide
  Antisense strand to SEQ ID NO: 2484646
ugauuucacaaugacucuc

SEQ ID NO: 2484648 - RNA, 19 nt, Artificial Sequence
  Description of Artificial Sequence: Synthetic oligonucleotide
  Sense strand starting at position 3424 of SEQ ID NO: 1887611
cacacaggucuguauguuu

SEQ ID NO: 2484649 - RNA, 19 nt, Artificial Sequence
  Description of Artificial Sequence: Synthetic oligonucleotide
  Antisense strand to SEQ ID NO: 2484648
aaacauacagaccugugug

SEQ ID NO: 2484650 - RNA, 19 nt, Artificial Sequence
  Description of Artificial Sequence: Synthetic oligonucleotide
  Sense strand starting at position 3586 of SEQ ID NO: 1887611
acuugaggaucaggaguuu

SEQ ID NO: 2484651 - RNA, 19 nt, Artificial Sequence
  Description of Artificial Sequence: Synthetic oligonucleotide
  Antisense strand to SEQ ID NO: 2484650
aaacuccugauccucaagu

SEQ ID NO: 2484652 - RNA, 19 nt, Artificial Sequence
  Description of Artificial Sequence: Synthetic oligonucleotide
  Sense strand starting at position 3592 of SEQ ID NO: 1887611
ggaucaggaguuugauacu

SEQ ID NO: 2484653 - RNA, 19 nt, Artificial Sequence
  Description of Artificial Sequence: Synthetic oligonucleotide
  Antisense strand to SEQ ID NO: 2484652
aguaucaaacuccugaucc

SEQ ID NO: 2484654 - RNA, 19 nt, Artificial Sequence
  Description of Artificial Sequence: Synthetic oligonucleotide
  Sense strand starting at position 3894 of SEQ ID NO: 1887611
gcagaaccacgauguuauc

SEQ ID NO: 2484655 - RNA, 19 nt, Artificial Sequence
  Description of Artificial Sequence: Synthetic oligonucleotide
  Antisense strand to SEQ ID NO: 2484654
gauaacaucgugguucugc

SEQ ID NO: 2484656 - RNA, 19 nt, Artificial Sequence
  Description of Artificial Sequence: Synthetic oligonucleotide
  Sense strand starting at position 3904 of SEQ ID NO: 1887611
gauguuaucccaggccuuu

SEQ ID NO: 2484657 - RNA, 19 nt, Artificial Sequence
  Description of Artificial Sequence: Synthetic oligonucleotide
  Antisense strand to SEQ ID NO: 2484656
aaaggccugggauaacauc

SEQ ID NO: 2484658 - RNA, 19 nt, Artificial Sequence
  Description of Artificial Sequence: Synthetic oligonucleotide
  Sense strand starting at position 3916 of SEQ ID NO: 1887611
ggccuuugaucuugaccuu

SEQ ID NO: 2484659 - RNA, 19 nt, Artificial Sequence
  Description of Artificial Sequence: Synthetic oligonucleotide
  Antisense strand to SEQ ID NO: 2484658
aaggucaagaucaaaggcc

SEQ ID NO: 2484660 - RNA, 19 nt, Artificial Sequence
  Description of Artificial Sequence: Synthetic oligonucleotide
  Sense strand starting at position 2 of SEQ ID NO: 1887612
cucuuauguuuauugaagu

SEQ ID NO: 2484661 - RNA, 19 nt, Artificial Sequence
  Description of Artificial Sequence: Synthetic oligonucleotide
  Antisense strand to SEQ ID NO: 2484660
acuucaauaaacauaagag

SEQ ID NO: 2484662 - RNA, 19 nt, Artificial Sequence
  Description of Artificial Sequence: Synthetic oligonucleotide
  Sense strand starting at position 100 of SEQ ID NO: 1887612
uagaguugaggaugcagua

SEQ ID NO: 2484663 - RNA, 19 nt, Artificial Sequence
  Description of Artificial Sequence: Synthetic oligonucleotide
  Antisense strand to SEQ ID NO: 2484662
uacugcauccucaacucua

SEQ ID NO: 2484664 - RNA, 19 nt, Artificial Sequence
  Description of Artificial Sequence: Synthetic oligonucleotide
  Sense strand starting at position 159 of SEQ ID NO: 1887612
caguaugaguucuccuaug

SEQ ID NO: 2484665 - RNA, 19 nt, Artificial Sequence
  Description of Artificial Sequence: Synthetic oligonucleotide
  Antisense strand to SEQ ID NO: 2484664
cauaggagaacucauacug

SEQ ID NO: 2484666 - RNA, 19 nt, Artificial Sequence
  Description of Artificial Sequence: Synthetic oligonucleotide
  Sense strand starting at position 165 of SEQ ID NO: 1887612
gaguucuccuauguuuaug

SEQ ID NO: 2484667 - RNA, 19 nt, Artificial Sequence
  Description of Artificial Sequence: Synthetic oligonucleotide
  Antisense strand to SEQ ID NO: 2484666
cauaaacauaggagaacuc

SEQ ID NO: 2484668 - RNA, 19 nt, Artificial Sequence
  Description of Artificial Sequence: Synthetic oligonucleotide
  Sense strand starting at position 185 of SEQ ID NO: 1887612
gggcuugaggaccauguaa

SEQ ID NO: 2484669 - RNA, 19 nt, Artificial Sequence
  Description of Artificial Sequence: Synthetic oligonucleotide
  Antisense strand to SEQ ID NO: 2484668
uuacaugguccucaagccc

SEQ ID NO: 2484670 - RNA, 19 nt, Artificial Sequence
  Description of Artificial Sequence: Synthetic oligonucleotide
  Sense strand starting at position 187 of SEQ ID NO: 1887612
gcuugaggaccauguaaag

SEQ ID NO: 2484671 - RNA, 19 nt, Artificial Sequence
  Description of Artificial Sequence: Synthetic oligonucleotide
  Antisense strand to SEQ ID NO: 2484670
cuuuacaugguccucaagc

SEQ ID NO: 2484672 - RNA, 19 nt, Artificial Sequence
  Description of Artificial Sequence: Synthetic oligonucleotide
  Sense strand starting at position 252 of SEQ ID NO: 1887612
uguauaguaaggugugaaa

SEQ ID NO: 2484673 - RNA, 19 nt, Artificial Sequence
  Description of Artificial Sequence: Synthetic oligonucleotide
  Antisense strand to SEQ ID NO: 2484672
uuucacaccuuacuauaca

SEQ ID NO: 2484674 - RNA, 19 nt, Artificial Sequence
  Description of Artificial Sequence: Synthetic oligonucleotide
  Sense strand starting at position 338 of SEQ ID NO: 1887612
uucacuaaggguugaggau

SEQ ID NO: 2484675 - RNA, 19 nt, Artificial Sequence
  Description of Artificial Sequence: Synthetic oligonucleotide
  Antisense strand to SEQ ID NO: 2484674
auccucaacccuuagugaa

SEQ ID NO: 2484676 - RNA, 19 nt, Artificial Sequence
  Description of Artificial Sequence: Synthetic oligonucleotide
  Sense strand starting at position 422 of SEQ ID NO: 1887612
ccuaguaaggugugaggaa

SEQ ID NO: 2484677 - RNA, 19 nt, Artificial Sequence
  Description of Artificial Sequence: Synthetic oligonucleotide
  Antisense strand to SEQ ID NO: 2484676
uuccucacaccuuacuagg

SEQ ID NO: 2484678 - RNA, 19 nt, Artificial Sequence
  Description of Artificial Sequence: Synthetic oligonucleotide
  Sense strand starting at position 431 of SEQ ID NO: 1887612
gugugaggaaugggugaaa

SEQ ID NO: 2484679 - RNA, 19 nt, Artificial Sequence
  Description of Artificial Sequence: Synthetic oligonucleotide
  Antisense strand to SEQ ID NO: 2484678
uuucacccauuccucacac

SEQ ID NO: 2484680 - RNA, 19 nt, Artificial Sequence
  Description of Artificial Sequence: Synthetic oligonucleotide
  Sense strand starting at position 597 of SEQ ID NO: 1887612
aggguugcaggauguuuaa

SEQ ID NO: 2484681 - RNA, 19 nt, Artificial Sequence
  Description of Artificial Sequence: Synthetic oligonucleotide
  Antisense strand to SEQ ID NO: 2484680
uuaaacauccugcaacccu

SEQ ID NO: 2484682 - RNA, 19 nt, Artificial Sequence
  Description of Artificial Sequence: Synthetic oligonucleotide
  Sense strand starting at position 681 of SEQ ID NO: 1887612
agcugugagggccaguuaa

SEQ ID NO: 2484683 - RNA, 19 nt, Artificial Sequence
  Description of Artificial Sequence: Synthetic oligonucleotide
  Antisense strand to SEQ ID NO: 2484682
uuaacuggcccucacagcu

SEQ ID NO: 2484684 - RNA, 19 nt, Artificial Sequence
  Description of Artificial Sequence: Synthetic oligonucleotide
  Sense strand starting at position 759 of SEQ ID NO: 1887612
ucaguaagcguagaggaau

SEQ ID NO: 2484685 - RNA, 19 nt, Artificial Sequence
  Description of Artificial Sequence: Synthetic oligonucleotide
  Antisense strand to SEQ ID NO: 2484684
auuccucuacgcuuacuga

SEQ ID NO: 2484686 - RNA, 19 nt, Artificial Sequence
  Description of Artificial Sequence: Synthetic oligonucleotide
  Sense strand starting at position 765 of SEQ ID NO: 1887612
agcguagaggaauacuuaa

SEQ ID NO: 2484687 - RNA, 19 nt, Artificial Sequence
  Description of Artificial Sequence: Synthetic oligonucleotide
  Antisense strand to SEQ ID NO: 2484686
uuaaguauuccucuacgcu

SEQ ID NO: 2484688 - RNA, 19 nt, Artificial Sequence
  Description of Artificial Sequence: Synthetic oligonucleotide
  Sense strand starting at position 909 of SEQ ID NO: 1887612
guaugaaucuucucauguu

SEQ ID NO: 2484689 - RNA, 19 nt, Artificial Sequence
  Description of Artificial Sequence: Synthetic oligonucleotide
  Antisense strand to SEQ ID NO: 2484688
aacaugagaagauucauac

SEQ ID NO: 2484690 - RNA, 19 nt, Artificial Sequence
  Description of Artificial Sequence: Synthetic oligonucleotide
  Sense strand starting at position 1018 of SEQ ID NO: 1887612
ggguugugggaugguuaaa

SEQ ID NO: 2484691 - RNA, 19 nt, Artificial Sequence
  Description of Artificial Sequence: Synthetic oligonucleotide
  Antisense strand to SEQ ID NO: 2484690
uuuaaccaucccacaaccc

SEQ ID NO: 2484692 - RNA, 19 nt, Artificial Sequence
  Description of Artificial Sequence: Synthetic oligonucleotide
  Sense strand starting at position 1101 of SEQ ID NO: 1887612
agcugugaggaccaguuaa

SEQ ID NO: 2484693 - RNA, 19 nt, Artificial Sequence
  Description of Artificial Sequence: Synthetic oligonucleotide
  Antisense strand to SEQ ID NO: 2484692
uuaacugguccucacagcu

SEQ ID NO: 2484694 - RNA, 19 nt, Artificial Sequence
  Description of Artificial Sequence: Synthetic oligonucleotide
  Sense strand starting at position 1135 of SEQ ID NO: 1887612
ccucacauuugugggauuu

SEQ ID NO: 2484695 - RNA, 19 nt, Artificial Sequence
  Description of Artificial Sequence: Synthetic oligonucleotide
  Antisense strand to SEQ ID NO: 2484694
aaaucccacaaaugugagg

SEQ ID NO: 2484696 - RNA, 19 nt, Artificial Sequence
  Description of Artificial Sequence: Synthetic oligonucleotide
  Sense strand starting at position 1137 of SEQ ID NO: 1887612
ucacauuugugggauuucu

SEQ ID NO: 2484697 - RNA, 19 nt, Artificial Sequence
  Description of Artificial Sequence: Synthetic oligonucleotide
  Antisense strand to SEQ ID NO: 2484696
agaaaucccacaaauguga

SEQ ID NO: 2484698 - RNA, 19 nt, Artificial Sequence
  Description of Artificial Sequence: Synthetic oligonucleotide
  Sense strand starting at position 1273 of SEQ ID NO: 1887612
uugaguaccaguuaaaguc

SEQ ID NO: 2484699 - RNA, 19 nt, Artificial Sequence
  Description of Artificial Sequence: Synthetic oligonucleotide
  Antisense strand to SEQ ID NO: 2484698
gacuuuaacugguacucaa

SEQ ID NO: 2484700 - RNA, 19 nt, Artificial Sequence
  Description of Artificial Sequence: Synthetic oligonucleotide
  Sense strand starting at position 1378 of SEQ ID NO: 1887612
ugccacauucuauauguuu

SEQ ID NO: 2484701 - RNA, 19 nt, Artificial Sequence
  Description of Artificial Sequence: Synthetic oligonucleotide
  Antisense strand to SEQ ID NO: 2484700
aaacauauagaauguggca

SEQ ID NO: 2484702 - RNA, 19 nt, Artificial Sequence
  Description of Artificial Sequence: Synthetic oligonucleotide
  Sense strand starting at position 1413 of SEQ ID NO: 1887612
guacgucuucugucuguuu

SEQ ID NO: 2484703 - RNA, 19 nt, Artificial Sequence
  Description of Artificial Sequence: Synthetic oligonucleotide
  Antisense strand to SEQ ID NO: 2484702
aaacagacagaagacguac

SEQ ID NO: 2484704 - RNA, 19 nt, Artificial Sequence
  Description of Artificial Sequence: Synthetic oligonucleotide
  Sense strand starting at position 1505 of SEQ ID NO: 1887612
auugguuaagcccauuaua

SEQ ID NO: 2484705 - RNA, 19 nt, Artificial Sequence
  Description of Artificial Sequence: Synthetic oligonucleotide
  Antisense strand to SEQ ID NO: 2484704
uauaaugggcuuaaccaau

SEQ ID NO: 2484706 - RNA, 19 nt, Artificial Sequence
  Description of Artificial Sequence: Synthetic oligonucleotide
  Sense strand starting at position 1875 of SEQ ID NO: 1887612
guauaagugaauuaagugu

SEQ ID NO: 2484707 - RNA, 19 nt, Artificial Sequence
  Description of Artificial Sequence: Synthetic oligonucleotide
  Antisense strand to SEQ ID NO: 2484706
acacuuaauucacuuauac

SEQ ID NO: 2484708 - RNA, 19 nt, Artificial Sequence
  Description of Artificial Sequence: Synthetic oligonucleotide
  Sense strand starting at position 1879 of SEQ ID NO: 1887612
aagugaauuaaguguguga

SEQ ID NO: 2484709 - RNA, 19 nt, Artificial Sequence
  Description of Artificial Sequence: Synthetic oligonucleotide
  Antisense strand to SEQ ID NO: 2484708
ucacacacuuaauucacuu

SEQ ID NO: 2484710 - RNA, 19 nt, Artificial Sequence
  Description of Artificial Sequence: Synthetic oligonucleotide
  Sense strand starting at position 1881 of SEQ ID NO: 1887612
gugaauuaagugugugaag

SEQ ID NO: 2484711 - RNA, 19 nt, Artificial Sequence
  Description of Artificial Sequence: Synthetic oligonucleotide
  Antisense strand to SEQ ID NO: 2484710
cuucacacacuuaauucac

SEQ ID NO: 2484712 - RNA, 19 nt, Artificial Sequence
  Description of Artificial Sequence: Synthetic oligonucleotide
  Sense strand starting at position 2062 of SEQ ID NO: 1887612
gaggcagaugugggugaau

SEQ ID NO: 2484713 - RNA, 19 nt, Artificial Sequence
  Description of Artificial Sequence: Synthetic oligonucleotide
  Antisense strand to SEQ ID NO: 2484712
auucacccacaucugccuc

SEQ ID NO: 2484714 - RNA, 19 nt, Artificial Sequence
  Description of Artificial Sequence: Synthetic oligonucleotide
  Sense strand starting at position 2064 of SEQ ID NO: 1887612
ggcagaugugggugaauca

SEQ ID NO: 2484715 - RNA, 19 nt, Artificial Sequence
  Description of Artificial Sequence: Synthetic oligonucleotide
  Antisense strand to SEQ ID NO: 2484714
ugauucacccacaucugcc

SEQ ID NO: 2484716 - RNA, 19 nt, Artificial Sequence
  Description of Artificial Sequence: Synthetic oligonucleotide
  Sense strand starting at position 2403 of SEQ ID NO: 1887612
aggugaucagccugaccaa

SEQ ID NO: 2484717 - RNA, 19 nt, Artificial Sequence
  Description of Artificial Sequence: Synthetic oligonucleotide
  Antisense strand to SEQ ID NO: 2484716
uuggucaggcugaucaccu

SEQ ID NO: 2484718 - RNA, 19 nt, Artificial Sequence
  Description of Artificial Sequence: Synthetic oligonucleotide
  Sense strand starting at position 2470 of SEQ ID NO: 1887612
gguaauagguaccuguaau

SEQ ID NO: 2484719 - RNA, 19 nt, Artificial Sequence
  Description of Artificial Sequence: Synthetic oligonucleotide
  Antisense strand to SEQ ID NO: 2484718
auuacagguaccuauuacc

SEQ ID NO: 2484720 - RNA, 19 nt, Artificial Sequence
  Description of Artificial Sequence: Synthetic oligonucleotide
  Sense strand starting at position 2514 of SEQ ID NO: 1887612
ggauaauugcuugaacucu

SEQ ID NO: 2484721 - RNA, 19 nt, Artificial Sequence
  Description of Artificial Sequence: Synthetic oligonucleotide
  Antisense strand to SEQ ID NO: 2484720
agaguucaagcaauuaucc

SEQ ID NO: 2484722 - RNA, 19 nt, Artificial Sequence
  Description of Artificial Sequence: Synthetic oligonucleotide
  Sense strand starting at position 2569 of SEQ ID NO: 1887612
ugcacuccagacuaguuaa

SEQ ID NO: 2484723 - RNA, 19 nt, Artificial Sequence
  Description of Artificial Sequence: Synthetic oligonucleotide
  Antisense strand to SEQ ID NO: 2484722
uuaacuagucuggagugca

SEQ ID NO: 2484724 - RNA, 19 nt, Artificial Sequence
  Description of Artificial Sequence: Synthetic oligonucleotide
  Sense strand starting at position 2710 of SEQ ID NO: 1887612
uuuagacacuaguugauau

SEQ ID NO: 2484725 - RNA, 19 nt, Artificial Sequence
  Description of Artificial Sequence: Synthetic oligonucleotide
  Antisense strand to SEQ ID NO: 2484724
auaucaacuagugucuaaa

SEQ ID NO: 2484726 - RNA, 19 nt, Artificial Sequence
  Description of Artificial Sequence: Synthetic oligonucleotide
  Sense strand starting at position 2774 of SEQ ID NO: 1887612
augacacuuugagucugaa

SEQ ID NO: 2484727 - RNA, 19 nt, Artificial Sequence
  Description of Artificial Sequence: Synthetic oligonucleotide
  Antisense strand to SEQ ID NO: 2484726
uucagacucaaagugucau

SEQ ID NO: 2484728 - RNA, 19 nt, Artificial Sequence
  Description of Artificial Sequence: Synthetic oligonucleotide
  Sense strand starting at position 2777 of SEQ ID NO: 1887612
acacuuugagucugaaggu

SEQ ID NO: 2484729 - RNA, 19 nt, Artificial Sequence
  Description of Artificial Sequence: Synthetic oligonucleotide
  Antisense strand to SEQ ID NO: 2484728
accuucagacucaaagugu

SEQ ID NO: 2484730 - RNA, 19 nt, Artificial Sequence
  Description of Artificial Sequence: Synthetic oligonucleotide
  Sense strand starting at position 2790 of SEQ ID NO: 1887612
gaagguaaauuauagagaa

SEQ ID NO: 2484731 - RNA, 19 nt, Artificial Sequence
  Description of Artificial Sequence: Synthetic oligonucleotide
  Antisense strand to SEQ ID NO: 2484730
uucucuauaauuuaccuuc

SEQ ID NO: 2484732 - RNA, 19 nt, Artificial Sequence
  Description of Artificial Sequence: Synthetic oligonucleotide
  Sense strand starting at position 2841 of SEQ ID NO: 1887612
ggguguagugaaugauuac

SEQ ID NO: 2484733 - RNA, 19 nt, Artificial Sequence
  Description of Artificial Sequence: Synthetic oligonucleotide
  Antisense strand to SEQ ID NO: 2484732
guaaucauucacuacaccc

SEQ ID NO: 2484734 - RNA, 19 nt, Artificial Sequence
  Description of Artificial Sequence: Synthetic oligonucleotide
  Sense strand starting at position 2842 of SEQ ID NO: 1887612
gguguagugaaugauuacu

SEQ ID NO: 2484735 - RNA, 19 nt, Artificial Sequence
  Description of Artificial Sequence: Synthetic oligonucleotide
  Antisense strand to SEQ ID NO: 2484734
aguaaucauucacuacacc

SEQ ID NO: 2484736 - RNA, 19 nt, Artificial Sequence
  Description of Artificial Sequence: Synthetic oligonucleotide
  Sense strand starting at position 2844 of SEQ ID NO: 1887612
uguagugaaugauuacuua

SEQ ID NO: 2484737 - RNA, 19 nt, Artificial Sequence
  Description of Artificial Sequence: Synthetic oligonucleotide
  Antisense strand to SEQ ID NO: 2484736
uaaguaaucauucacuaca

SEQ ID NO: 2484738 - RNA, 19 nt, Artificial Sequence
  Description of Artificial Sequence: Synthetic oligonucleotide
  Sense strand starting at position 2959 of SEQ ID NO: 1887612
cagacuaugccaggacaga

SEQ ID NO: 2484739 - RNA, 19 nt, Artificial Sequence
  Description of Artificial Sequence: Synthetic oligonucleotide
  Antisense strand to SEQ ID NO: 2484738
ucuguccuggcauagucug

SEQ ID NO: 2484740 - RNA, 19 nt, Artificial Sequence
  Description of Artificial Sequence: Synthetic oligonucleotide
  Sense strand starting at position 404 of SEQ ID NO: 1887613
aagugauagucuccugccu

SEQ ID NO: 2484741 - RNA, 19 nt, Artificial Sequence
  Description of Artificial Sequence: Synthetic oligonucleotide
  Antisense strand to SEQ ID NO: 2484740
aggcaggagacuaucacuu

SEQ ID NO: 2484742 - RNA, 19 nt, Artificial Sequence
  Description of Artificial Sequence: Synthetic oligonucleotide
  Sense strand starting at position 743 of SEQ ID NO: 1887613
aaaucaagugugcguugau

SEQ ID NO: 2484743 - RNA, 19 nt, Artificial Sequence
  Description of Artificial Sequence: Synthetic oligonucleotide
  Antisense strand to SEQ ID NO: 2484742
aucaacgcacacuugauuu

SEQ ID NO: 2484744 - RNA, 19 nt, Artificial Sequence
  Description of Artificial Sequence: Synthetic oligonucleotide
  Sense strand starting at position 744 of SEQ ID NO: 1887613
aaucaagugugcguugaua

SEQ ID NO: 2484745 - RNA, 19 nt, Artificial Sequence
  Description of Artificial Sequence: Synthetic oligonucleotide
  Antisense strand to SEQ ID NO: 2484744
uaucaacgcacacuugauu

SEQ ID NO: 2484746 - RNA, 19 nt, Artificial Sequence
  Description of Artificial Sequence: Synthetic oligonucleotide
  Sense strand starting at position 746 of SEQ ID NO: 1887613
ucaagugugcguugauaac

SEQ ID NO: 2484747 - RNA, 19 nt, Artificial Sequence
  Description of Artificial Sequence: Synthetic oligonucleotide
  Antisense strand to SEQ ID NO: 2484746
guuaucaacgcacacuuga

SEQ ID NO: 2484748 - RNA, 19 nt, Artificial Sequence
  Description of Artificial Sequence: Synthetic oligonucleotide
  Sense strand starting at position 755 of SEQ ID NO: 1887613
cguugauaacguggucaua

SEQ ID NO: 2484749 - RNA, 19 nt, Artificial Sequence
  Description of Artificial Sequence: Synthetic oligonucleotide
  Antisense strand to SEQ ID NO: 2484748
uaugaccacguuaucaacg

SEQ ID NO: 2484750 - RNA, 19 nt, Artificial Sequence
  Description of Artificial Sequence: Synthetic oligonucleotide
  Sense strand starting at position 757 of SEQ ID NO: 1887613
uugauaacguggucauaca

SEQ ID NO: 2484751 - RNA, 19 nt, Artificial Sequence
  Description of Artificial Sequence: Synthetic oligonucleotide
  Antisense strand to SEQ ID NO: 2484750
uguaugaccacguuaucaa

SEQ ID NO: 2484752 - RNA, 19 nt, Artificial Sequence
  Description of Artificial Sequence: Synthetic oligonucleotide
  Sense strand starting at position 828 of SEQ ID NO: 1887613
accucugugcucuugcgaa

SEQ ID NO: 2484753 - RNA, 19 nt, Artificial Sequence
  Description of Artificial Sequence: Synthetic oligonucleotide
  Antisense strand to SEQ ID NO: 2484752
uucgcaagagcacagaggu

SEQ ID NO: 2484754 - RNA, 19 nt, Artificial Sequence
  Description of Artificial Sequence: Synthetic oligonucleotide
  Sense strand starting at position 1060 of SEQ ID NO: 1887613
uugugaaaguaucuguggu

SEQ ID NO: 2484755 - RNA, 19 nt, Artificial Sequence
  Description of Artificial Sequence: Synthetic oligonucleotide
  Antisense strand to SEQ ID NO: 2484754
accacagauacuuucacaa

SEQ ID NO: 2484756 - RNA, 19 nt, Artificial Sequence
  Description of Artificial Sequence: Synthetic oligonucleotide
  Sense strand starting at position 1061 of SEQ ID NO: 1887613
ugugaaaguaucugugguu

SEQ ID NO: 2484757 - RNA, 19 nt, Artificial Sequence
  Description of Artificial Sequence: Synthetic oligonucleotide
  Antisense strand to SEQ ID NO: 2484756
aaccacagauacuuucaca

SEQ ID NO: 2484758 - RNA, 19 nt, Artificial Sequence
  Description of Artificial Sequence: Synthetic oligonucleotide
  Sense strand starting at position 1062 of SEQ ID NO: 1887613
gugaaaguaucugugguuu

SEQ ID NO: 2484759 - RNA, 19 nt, Artificial Sequence
  Description of Artificial Sequence: Synthetic oligonucleotide
  Antisense strand to SEQ ID NO: 2484758
aaaccacagauacuuucac

SEQ ID NO: 2484760 - RNA, 19 nt, Artificial Sequence
  Description of Artificial Sequence: Synthetic oligonucleotide
  Sense strand starting at position 1081 of SEQ ID NO: 1887613
ugucccaugugacauuuau

SEQ ID NO: 2484761 - RNA, 19 nt, Artificial Sequence
  Description of Artificial Sequence: Synthetic oligonucleotide
  Antisense strand to SEQ ID NO: 2484760
auaaaugucacaugggaca

SEQ ID NO: 2484762 - RNA, 19 nt, Artificial Sequence
  Description of Artificial Sequence: Synthetic oligonucleotide
  Sense strand starting at position 1129 of SEQ ID NO: 1887613
auagcuuguuucucauauu

SEQ ID NO: 2484763 - RNA, 19 nt, Artificial Sequence
  Description of Artificial Sequence: Synthetic oligonucleotide
  Antisense strand to SEQ ID NO: 2484762
aauaugagaaacaagcuau

SEQ ID NO: 2484764 - RNA, 19 nt, Artificial Sequence
  Description of Artificial Sequence: Synthetic oligonucleotide
  Sense strand starting at position 1336 of SEQ ID NO: 1887613
aaggucuauuccgagaaau

SEQ ID NO: 2484765 - RNA, 19 nt, Artificial Sequence
  Description of Artificial Sequence: Synthetic oligonucleotide
  Antisense strand to SEQ ID NO: 2484764
auuucucggaauagaccuu

SEQ ID NO: 2484766 - RNA, 19 nt, Artificial Sequence
  Description of Artificial Sequence: Synthetic oligonucleotide
  Sense strand starting at position 1359 of SEQ ID NO: 1887613
ggaagcuguuaagcaagaa

SEQ ID NO: 2484767 - RNA, 19 nt, Artificial Sequence
  Description of Artificial Sequence: Synthetic oligonucleotide
  Antisense strand to SEQ ID NO: 2484766
uucuugcuuaacagcuucc

SEQ ID NO: 2484768 - RNA, 19 nt, Artificial Sequence
  Description of Artificial Sequence: Synthetic oligonucleotide
  Sense strand starting at position 1565 of SEQ ID NO: 1887613
ggucauaguggugagcauu

SEQ ID NO: 2484769 - RNA, 19 nt, Artificial Sequence
  Description of Artificial Sequence: Synthetic oligonucleotide
  Antisense strand to SEQ ID NO: 2484768
aaugcucaccacuaugacc

SEQ ID NO: 2484770 - RNA, 19 nt, Artificial Sequence
  Description of Artificial Sequence: Synthetic oligonucleotide
  Sense strand starting at position 1614 of SEQ ID NO: 1887613
gggagaauuucuggaaccu

SEQ ID NO: 2484771 - RNA, 19 nt, Artificial Sequence
  Description of Artificial Sequence: Synthetic oligonucleotide
  Antisense strand to SEQ ID NO: 2484770
agguuccagaaauucuccc

SEQ ID NO: 2484772 - RNA, 19 nt, Artificial Sequence
  Description of Artificial Sequence: Synthetic oligonucleotide
  Sense strand starting at position 1643 of SEQ ID NO: 1887613
ggaugcaaugaguggagau

SEQ ID NO: 2484773 - RNA, 19 nt, Artificial Sequence
  Description of Artificial Sequence: Synthetic oligonucleotide
  Antisense strand to SEQ ID NO: 2484772
aucuccacucauugcaucc

SEQ ID NO: 2484774 - RNA, 19 nt, Artificial Sequence
  Description of Artificial Sequence: Synthetic oligonucleotide
  Sense strand starting at position 1655 of SEQ ID NO: 1887613
uggagaucaucccacucua

SEQ ID NO: 2484775 - RNA, 19 nt, Artificial Sequence
  Description of Artificial Sequence: Synthetic oligonucleotide
  Antisense strand to SEQ ID NO: 2484774
uagagugggaugaucucca

SEQ ID NO: 2484776 - RNA, 19 nt, Artificial Sequence
  Description of Artificial Sequence: Synthetic oligonucleotide
  Sense strand starting at position 1986 of SEQ ID NO: 1887613
agacucauagcuugagauc

SEQ ID NO: 2484777 - RNA, 19 nt, Artificial Sequence
  Description of Artificial Sequence: Synthetic oligonucleotide
  Antisense strand to SEQ ID NO: 2484776
gaucucaagcuaugagucu

SEQ ID NO: 2484778 - RNA, 19 nt, Artificial Sequence
  Description of Artificial Sequence: Synthetic oligonucleotide
  Sense strand starting at position 1987 of SEQ ID NO: 1887613
gacucauagcuugagaucu

SEQ ID NO: 2484779 - RNA, 19 nt, Artificial Sequence
  Description of Artificial Sequence: Synthetic oligonucleotide
  Antisense strand to SEQ ID NO: 2484778
agaucucaagcuaugaguc

SEQ ID NO: 2484780 - RNA, 19 nt, Artificial Sequence
  Description of Artificial Sequence: Synthetic oligonucleotide
  Sense strand starting at position 2023 of SEQ ID NO: 1887613
ggguuucguguuggaauuu

SEQ ID NO: 2484781 - RNA, 19 nt, Artificial Sequence
  Description of Artificial Sequence: Synthetic oligonucleotide
  Antisense strand to SEQ ID NO: 2484780
aaauuccaacacgaaaccc

SEQ ID NO: 2484782 - RNA, 19 nt, Artificial Sequence
  Description of Artificial Sequence: Synthetic oligonucleotide
  Sense strand starting at position 2040 of SEQ ID NO: 1887613
uuucuuugaccagguuuaa

SEQ ID NO: 2484783 - RNA, 19 nt, Artificial Sequence
  Description of Artificial Sequence: Synthetic oligonucleotide
  Antisense strand to SEQ ID NO: 2484782
uuaaaccuggucaaagaaa

SEQ ID NO: 2484784 - RNA, 19 nt, Artificial Sequence
  Description of Artificial Sequence: Synthetic oligonucleotide
  Sense strand starting at position 2294 of SEQ ID NO: 1887613
aauggauucugagccaagu

SEQ ID NO: 2484785 - RNA, 19 nt, Artificial Sequence
  Description of Artificial Sequence: Synthetic oligonucleotide
  Antisense strand to SEQ ID NO: 2484784
acuuggcucagaauccauu

SEQ ID NO: 2484786 - RNA, 19 nt, Artificial Sequence
  Description of Artificial Sequence: Synthetic oligonucleotide
  Sense strand starting at position 2296 of SEQ ID NO: 1887613
uggauucugagccaagugu

SEQ ID NO: 2484787 - RNA, 19 nt, Artificial Sequence
  Description of Artificial Sequence: Synthetic oligonucleotide
  Antisense strand to SEQ ID NO: 2484786
acacuuggcucagaaucca

SEQ ID NO: 2484788 - RNA, 19 nt, Artificial Sequence
  Description of Artificial Sequence: Synthetic oligonucleotide
  Sense strand starting at position 2366 of SEQ ID NO: 1887613
ugugaucuaagauguugaa

SEQ ID NO: 2484789 - RNA, 19 nt, Artificial Sequence
  Description of Artificial Sequence: Synthetic oligonucleotide
  Antisense strand to SEQ ID NO: 2484788
uucaacaucuuagaucaca

SEQ ID NO: 2484790 - RNA, 19 nt, Artificial Sequence
  Description of Artificial Sequence: Synthetic oligonucleotide
  Sense strand starting at position 2369 of SEQ ID NO: 1887613
gaucuaagauguugaacua

SEQ ID NO: 2484791 - RNA, 19 nt, Artificial Sequence
  Description of Artificial Sequence: Synthetic oligonucleotide
  Antisense strand to SEQ ID NO: 2484790
uaguucaacaucuuagauc

SEQ ID NO: 2484792 - RNA, 19 nt, Artificial Sequence
  Description of Artificial Sequence: Synthetic oligonucleotide
  Sense strand starting at position 2788 of SEQ ID NO: 1887613
ugauaucagucaucucugu

SEQ ID NO: 2484793 - RNA, 19 nt, Artificial Sequence
  Description of Artificial Sequence: Synthetic oligonucleotide
  Antisense strand to SEQ ID NO: 2484792
acagagaugacugauauca

SEQ ID NO: 2484794 - RNA, 19 nt, Artificial Sequence
  Description of Artificial Sequence: Synthetic oligonucleotide
  Sense strand starting at position 2792 of SEQ ID NO: 1887613
aucagucaucucugugugu

SEQ ID NO: 2484795 - RNA, 19 nt, Artificial Sequence
  Description of Artificial Sequence: Synthetic oligonucleotide
  Antisense strand to SEQ ID NO: 2484794
acacacagagaugacugau

SEQ ID NO: 2484796 - RNA, 19 nt, Artificial Sequence
  Description of Artificial Sequence: Synthetic oligonucleotide
  Sense strand starting at position 2793 of SEQ ID NO: 1887613
ucagucaucucugugugua

SEQ ID NO: 2484797 - RNA, 19 nt, Artificial Sequence
  Description of Artificial Sequence: Synthetic oligonucleotide
  Antisense strand to SEQ ID NO: 2484796
uacacacagagaugacuga

SEQ ID NO: 2484798 - RNA, 19 nt, Artificial Sequence
  Description of Artificial Sequence: Synthetic oligonucleotide
  Sense strand starting at position 2794 of SEQ ID NO: 1887613
cagucaucucuguguguag

SEQ ID NO: 2484799 - RNA, 19 nt, Artificial Sequence
  Description of Artificial Sequence: Synthetic oligonucleotide
  Antisense strand to SEQ ID NO: 2484798
cuacacacagagaugacug

SEQ ID NO: 2484800 - RNA, 19 nt, Artificial Sequence
  Description of Artificial Sequence: Synthetic oligonucleotide
  Sense strand starting at position 2795 of SEQ ID NO: 1887613
agucaucucuguguguaga

SEQ ID NO: 2484801 - RNA, 19 nt, Artificial Sequence
  Description of Artificial Sequence: Synthetic oligonucleotide
  Antisense strand to SEQ ID NO: 2484800
ucuacacacagagaugacu

SEQ ID NO: 2484802 - RNA, 19 nt, Artificial Sequence
  Description of Artificial Sequence: Synthetic oligonucleotide
  Sense strand starting at position 2796 of SEQ ID NO: 1887613
gucaucucuguguguagaa

SEQ ID NO: 2484803 - RNA, 19 nt, Artificial Sequence
  Description of Artificial Sequence: Synthetic oligonucleotide
  Antisense strand to SEQ ID NO: 2484802
uucuacacacagagaugac

SEQ ID NO: 2484804 - RNA, 19 nt, Artificial Sequence
  Description of Artificial Sequence: Synthetic oligonucleotide
  Sense strand starting at position 2803 of SEQ ID NO: 1887613
cuguguguagaagaguauu

SEQ ID NO: 2484805 - RNA, 19 nt, Artificial Sequence
  Description of Artificial Sequence: Synthetic oligonucleotide
  Antisense strand to SEQ ID NO: 2484804
aauacucuucuacacacag

SEQ ID NO: 2484806 - RNA, 19 nt, Artificial Sequence
  Description of Artificial Sequence: Synthetic oligonucleotide
  Sense strand starting at position 3213 of SEQ ID NO: 1887613
ugccaaaguguugauauug

SEQ ID NO: 2484807 - RNA, 19 nt, Artificial Sequence
  Description of Artificial Sequence: Synthetic oligonucleotide
  Antisense strand to SEQ ID NO: 2484806
caauaucaacacuuuggca

SEQ ID NO: 2484808 - RNA, 19 nt, Artificial Sequence
  Description of Artificial Sequence: Synthetic oligonucleotide
  Sense strand starting at position 3222 of SEQ ID NO: 1887613
guugauauugcaggcauga

SEQ ID NO: 2484809 - RNA, 19 nt, Artificial Sequence
  Description of Artificial Sequence: Synthetic oligonucleotide
  Antisense strand to SEQ ID NO: 2484808
ucaugccugcaauaucaac

SEQ ID NO: 2484810 - RNA, 19 nt, Artificial Sequence
  Description of Artificial Sequence: Synthetic oligonucleotide
  Sense strand starting at position 3463 of SEQ ID NO: 1887613
caugaugggucucauauug

SEQ ID NO: 2484811 - RNA, 19 nt, Artificial Sequence
  Description of Artificial Sequence: Synthetic oligonucleotide
  Antisense strand to SEQ ID NO: 2484810
caauaugagacccaucaug

SEQ ID NO: 2484812 - RNA, 19 nt, Artificial Sequence
  Description of Artificial Sequence: Synthetic oligonucleotide
  Sense strand starting at position 3884 of SEQ ID NO: 1887613
gcaaauguauugccgagau

SEQ ID NO: 2484813 - RNA, 19 nt, Artificial Sequence
  Description of Artificial Sequence: Synthetic oligonucleotide
  Antisense strand to SEQ ID NO: 2484812
aucucggcaauacauuugc

SEQ ID NO: 2484814 - RNA, 19 nt, Artificial Sequence
  Description of Artificial Sequence: Synthetic oligonucleotide
  Sense strand starting at position 3886 of SEQ ID NO: 1887613
aaauguauugccgagauca

SEQ ID NO: 2484815 - RNA, 19 nt, Artificial Sequence
  Description of Artificial Sequence: Synthetic oligonucleotide
  Antisense strand to SEQ ID NO: 2484814
ugaucucggcaauacauuu

SEQ ID NO: 2484816 - RNA, 19 nt, Artificial Sequence
  Description of Artificial Sequence: Synthetic oligonucleotide
  Sense strand starting at position 3888 of SEQ ID NO: 1887613
auguauugccgagaucagc

SEQ ID NO: 2484817 - RNA, 19 nt, Artificial Sequence
  Description of Artificial Sequence: Synthetic oligonucleotide
  Antisense strand to SEQ ID NO: 2484816
gcugaucucggcaauacau

SEQ ID NO: 2484818 - RNA, 19 nt, Artificial Sequence
  Description of Artificial Sequence: Synthetic oligonucleotide
  Sense strand starting at position 3896 of SEQ ID NO: 1887613
ccgagaucagcaugaacgu

SEQ ID NO: 2484819 - RNA, 19 nt, Artificial Sequence
  Description of Artificial Sequence: Synthetic oligonucleotide
  Antisense strand to SEQ ID NO: 2484818
acguucaugcugaucucgg

SEQ ID NO: 2484820 - RNA, 19 nt, Artificial Sequence
  Description of Artificial Sequence: Synthetic oligonucleotide
  Sense strand starting at position 37 of SEQ ID NO: 1887614
acacaugagugcuugcuuu

SEQ ID NO: 2484821 - RNA, 19 nt, Artificial Sequence
  Description of Artificial Sequence: Synthetic oligonucleotide
  Antisense strand to SEQ ID NO: 2484820
aaagcaagcacucaugugu

SEQ ID NO: 2484822 - RNA, 19 nt, Artificial Sequence
  Description of Artificial Sequence: Synthetic oligonucleotide
  Sense strand starting at position 126 of SEQ ID NO: 1887614
ucaugauggucucauauuu

SEQ ID NO: 2484823 - RNA, 19 nt, Artificial Sequence
  Description of Artificial Sequence: Synthetic oligonucleotide
  Antisense strand to SEQ ID NO: 2484822
aaauaugagaccaucauga

SEQ ID NO: 2484824 - RNA, 19 nt, Artificial Sequence
  Description of Artificial Sequence: Synthetic oligonucleotide
  Sense strand starting at position 382 of SEQ ID NO: 1887614
cagcccuguuagucuugaa

SEQ ID NO: 2484825 - RNA, 19 nt, Artificial Sequence
  Description of Artificial Sequence: Synthetic oligonucleotide
  Antisense strand to SEQ ID NO: 2484824
uucaagacuaacagggcug

SEQ ID NO: 2484826 - RNA, 19 nt, Artificial Sequence
  Description of Artificial Sequence: Synthetic oligonucleotide
  Sense strand starting at position 385 of SEQ ID NO: 1887614
cccuguuagucuugaacau

SEQ ID NO: 2484827 - RNA, 19 nt, Artificial Sequence
  Description of Artificial Sequence: Synthetic oligonucleotide
  Antisense strand to SEQ ID NO: 2484826
auguucaagacuaacaggg

SEQ ID NO: 2484828 - RNA, 19 nt, Artificial Sequence
  Description of Artificial Sequence: Synthetic oligonucleotide
  Sense strand starting at position 386 of SEQ ID NO: 1887614
ccuguuagucuugaacaug

SEQ ID NO: 2484829 - RNA, 19 nt, Artificial Sequence
  Description of Artificial Sequence: Synthetic oligonucleotide
  Antisense strand to SEQ ID NO: 2484828
cauguucaagacuaacagg

SEQ ID NO: 2484830 - RNA, 19 nt, Artificial Sequence
  Description of Artificial Sequence: Synthetic oligonucleotide
  Sense strand starting at position 684 of SEQ ID NO: 1887614
ccagucuggucucgaacaa

SEQ ID NO: 2484831 - RNA, 19 nt, Artificial Sequence
  Description of Artificial Sequence: Synthetic oligonucleotide
  Antisense strand to SEQ ID NO: 2484830
uuguucgagaccagacugg

SEQ ID NO: 2484832 - RNA, 19 nt, Artificial Sequence
  Description of Artificial Sequence: Synthetic oligonucleotide
  Sense strand starting at position 771 of SEQ ID NO: 1887614
cuggacuagucccauauuu

SEQ ID NO: 2484833 - RNA, 19 nt, Artificial Sequence
  Description of Artificial Sequence: Synthetic oligonucleotide
  Antisense strand to SEQ ID NO: 2484832
aaauaugggacuaguccag

SEQ ID NO: 2484834 - RNA, 19 nt, Artificial Sequence
  Description of Artificial Sequence: Synthetic oligonucleotide
  Sense strand starting at position 960 of SEQ ID NO: 1887614
cauguagucccauguacca

SEQ ID NO: 2484835 - RNA, 19 nt, Artificial Sequence
  Description of Artificial Sequence: Synthetic oligonucleotide
  Antisense strand to SEQ ID NO: 2484834
ugguacaugggacuacaug

SEQ ID NO: 2484836 - RNA, 19 nt, Artificial Sequence
  Description of Artificial Sequence: Synthetic oligonucleotide
  Sense strand starting at position 1055 of SEQ ID NO: 1887614
gcauuuaucuccuggucac

SEQ ID NO: 2484837 - RNA, 19 nt, Artificial Sequence
  Description of Artificial Sequence: Synthetic oligonucleotide
  Antisense strand to SEQ ID NO: 2484836
gugaccaggagauaaaugc

SEQ ID NO: 2484838 - RNA, 19 nt, Artificial Sequence
  Description of Artificial Sequence: Synthetic oligonucleotide
  Sense strand starting at position 1058 of SEQ ID NO: 1887614
uuuaucuccuggucacaca

SEQ ID NO: 2484839 - RNA, 19 nt, Artificial Sequence
  Description of Artificial Sequence: Synthetic oligonucleotide
  Antisense strand to SEQ ID NO: 2484838
ugugugaccaggagauaaa

SEQ ID NO: 2484840 - RNA, 19 nt, Artificial Sequence
  Description of Artificial Sequence: Synthetic oligonucleotide
  Sense strand starting at position 1067 of SEQ ID NO: 1887614
uggucacacaccgaagauu

SEQ ID NO: 2484841 - RNA, 19 nt, Artificial Sequence
  Description of Artificial Sequence: Synthetic oligonucleotide
  Antisense strand to SEQ ID NO: 2484840
aaucuucggugugugacca

SEQ ID NO: 2484842 - RNA, 19 nt, Artificial Sequence
  Description of Artificial Sequence: Synthetic oligonucleotide
  Sense strand starting at position 1268 of SEQ ID NO: 1887614
aguggcucauguuuguauu

SEQ ID NO: 2484843 - RNA, 19 nt, Artificial Sequence
  Description of Artificial Sequence: Synthetic oligonucleotide
  Antisense strand to SEQ ID NO: 2484842
aauacaaacaugagccacu

SEQ ID NO: 2484844 - RNA, 19 nt, Artificial Sequence
  Description of Artificial Sequence: Synthetic oligonucleotide
  Sense strand starting at position 1469 of SEQ ID NO: 1887614
acuugauccuggguggcau

SEQ ID NO: 2484845 - RNA, 19 nt, Artificial Sequence
  Description of Artificial Sequence: Synthetic oligonucleotide
  Antisense strand to SEQ ID NO: 2484844
augccacccaggaucaagu

SEQ ID NO: 2484846 - RNA, 19 nt, Artificial Sequence
  Description of Artificial Sequence: Synthetic oligonucleotide
  Sense strand starting at position 1470 of SEQ ID NO: 1887614
cuugauccuggguggcaua

SEQ ID NO: 2484847 - RNA, 19 nt, Artificial Sequence
  Description of Artificial Sequence: Synthetic oligonucleotide
  Antisense strand to SEQ ID NO: 2484846
uaugccacccaggaucaag

SEQ ID NO: 2484848 - RNA, 19 nt, Artificial Sequence
  Description of Artificial Sequence: Synthetic oligonucleotide
  Sense strand starting at position 1480 of SEQ ID NO: 1887614
gguggcauacauugcagua

SEQ ID NO: 2484849 - RNA, 19 nt, Artificial Sequence
  Description of Artificial Sequence: Synthetic oligonucleotide
  Antisense strand to SEQ ID NO: 2484848
uacugcaauguaugccacc

SEQ ID NO: 2484850 - RNA, 19 nt, Artificial Sequence
  Description of Artificial Sequence: Synthetic oligonucleotide
  Sense strand starting at position 2189 of SEQ ID NO: 1887614
ggcaguccuccugaguauu

SEQ ID NO: 2484851 - RNA, 19 nt, Artificial Sequence
  Description of Artificial Sequence: Synthetic oligonucleotide
  Antisense strand to SEQ ID NO: 2484850
aauacucaggaggacugcc

SEQ ID NO: 2484852 - RNA, 19 nt, Artificial Sequence
  Description of Artificial Sequence: Synthetic oligonucleotide
  Sense strand starting at position 2192 of SEQ ID NO: 1887614
aguccuccugaguauuauc

SEQ ID NO: 2484853 - RNA, 19 nt, Artificial Sequence
  Description of Artificial Sequence: Synthetic oligonucleotide
  Antisense strand to SEQ ID NO: 2484852
gauaauacucaggaggacu

SEQ ID NO: 2484854 - RNA, 19 nt, Artificial Sequence
  Description of Artificial Sequence: Synthetic oligonucleotide
  Sense strand starting at position 2376 of SEQ ID NO: 1887614
agcugagauuacuggugga

SEQ ID NO: 2484855 - RNA, 19 nt, Artificial Sequence
  Description of Artificial Sequence: Synthetic oligonucleotide
  Antisense strand to SEQ ID NO: 2484854
uccaccaguaaucucagcu

SEQ ID NO: 2484856 - RNA, 19 nt, Artificial Sequence
  Description of Artificial Sequence: Synthetic oligonucleotide
  Sense strand starting at position 2380 of SEQ ID NO: 1887614
gagauuacugguggagcca

SEQ ID NO: 2484857 - RNA, 19 nt, Artificial Sequence
  Description of Artificial Sequence: Synthetic oligonucleotide
  Antisense strand to SEQ ID NO: 2484856
uggcuccaccaguaaucuc

SEQ ID NO: 2484858 - RNA, 19 nt, Artificial Sequence
  Description of Artificial Sequence: Synthetic oligonucleotide
  Sense strand starting at position 2564 of SEQ ID NO: 1887614
agacaauuggccuggaauu

SEQ ID NO: 2484859 - RNA, 19 nt, Artificial Sequence
  Description of Artificial Sequence: Synthetic oligonucleotide
  Antisense strand to SEQ ID NO: 2484858
aauuccaggccaauugucu

SEQ ID NO: 2484860 - RNA, 19 nt, Artificial Sequence
  Description of Artificial Sequence: Synthetic oligonucleotide
  Sense strand starting at position 2565 of SEQ ID NO: 1887614
gacaauuggccuggaauuc

SEQ ID NO: 2484861 - RNA, 19 nt, Artificial Sequence
  Description of Artificial Sequence: Synthetic oligonucleotide
  Antisense strand to SEQ ID NO: 2484860
gaauuccaggccaauuguc

SEQ ID NO: 2484862 - RNA, 19 nt, Artificial Sequence
  Description of Artificial Sequence: Synthetic oligonucleotide
  Sense strand starting at position 3250 of SEQ ID NO: 1887614
agagaucuaaguuggaagu

SEQ ID NO: 2484863 - RNA, 19 nt, Artificial Sequence
  Description of Artificial Sequence: Synthetic oligonucleotide
  Antisense strand to SEQ ID NO: 2484862
acuuccaacuuagaucucu

SEQ ID NO: 2484864 - RNA, 19 nt, Artificial Sequence
  Description of Artificial Sequence: Synthetic oligonucleotide
  Sense strand starting at position 3330 of SEQ ID NO: 1887614
auuauccacgucugaugau

SEQ ID NO: 2484865 - RNA, 19 nt, Artificial Sequence
  Description of Artificial Sequence: Synthetic oligonucleotide
  Antisense strand to SEQ ID NO: 2484864
aucaucagacguggauaau

SEQ ID NO: 2484866 - RNA, 19 nt, Artificial Sequence
  Description of Artificial Sequence: Synthetic oligonucleotide
  Sense strand starting at position 3793 of SEQ ID NO: 1887614
ccagguguucaccggaguu

SEQ ID NO: 2484867 - RNA, 19 nt, Artificial Sequence
  Description of Artificial Sequence: Synthetic oligonucleotide
  Antisense strand to SEQ ID NO: 2484866
aacuccggugaacaccugg

SEQ ID NO: 2484868 - RNA, 19 nt, Artificial Sequence
  Description of Artificial Sequence: Synthetic oligonucleotide
  Sense strand starting at position 3826 of SEQ ID NO: 1887614
cacaguuucuacggaagca

SEQ ID NO: 2484869 - RNA, 19 nt, Artificial Sequence
  Description of Artificial Sequence: Synthetic oligonucleotide
  Antisense strand to SEQ ID NO: 2484868
ugcuuccguagaaacugug

SEQ ID NO: 2484870 - RNA, 19 nt, Artificial Sequence
  Description of Artificial Sequence: Synthetic oligonucleotide
  Sense strand starting at position 3827 of SEQ ID NO: 1887614
acaguuucuacggaagcaa

SEQ ID NO: 2484871 - RNA, 19 nt, Artificial Sequence
  Description of Artificial Sequence: Synthetic oligonucleotide
  Antisense strand to SEQ ID NO: 2484870
uugcuuccguagaaacugu

SEQ ID NO: 2484872 - RNA, 19 nt, Artificial Sequence
  Description of Artificial Sequence: Synthetic oligonucleotide
  Sense strand starting at position 3852 of SEQ ID NO: 1887614
uggaaucuaagauguugau

SEQ ID NO: 2484873 - RNA, 19 nt, Artificial Sequence
  Description of Artificial Sequence: Synthetic oligonucleotide
  Antisense strand to SEQ ID NO: 2484872
aucaacaucuuagauucca

SEQ ID NO: 2484874 - RNA, 19 nt, Artificial Sequence
  Description of Artificial Sequence: Synthetic oligonucleotide
  Sense strand starting at position 3858 of SEQ ID NO: 1887614
cuaagauguugaugaauau

SEQ ID NO: 2484875 - RNA, 19 nt, Artificial Sequence
  Description of Artificial Sequence: Synthetic oligonucleotide
  Antisense strand to SEQ ID NO: 2484874
auauucaucaacaucuuag

SEQ ID NO: 2484876 - RNA, 19 nt, Artificial Sequence
  Description of Artificial Sequence: Synthetic oligonucleotide
  Sense strand starting at position 54 of SEQ ID NO: 1887619
agaaaucauuguugaagac

SEQ ID NO: 2484877 - RNA, 19 nt, Artificial Sequence
  Description of Artificial Sequence: Synthetic oligonucleotide
  Antisense strand to SEQ ID NO: 2484876
gucuucaacaaugauuucu

SEQ ID NO: 2484878 - RNA, 19 nt, Artificial Sequence
  Description of Artificial Sequence: Synthetic oligonucleotide
  Sense strand starting at position 506 of SEQ ID NO: 1887619
caggaaacauggugaaacu

SEQ ID NO: 2484879 - RNA, 19 nt, Artificial Sequence
  Description of Artificial Sequence: Synthetic oligonucleotide
  Antisense strand to SEQ ID NO: 2484878
aguuucaccauguuuccug

SEQ ID NO: 2484880 - RNA, 19 nt, Artificial Sequence
  Description of Artificial Sequence: Synthetic oligonucleotide
  Sense strand starting at position 1101 of SEQ ID NO: 1887619
ggucuauggcaccaaacaa

SEQ ID NO: 2484881 - RNA, 19 nt, Artificial Sequence
  Description of Artificial Sequence: Synthetic oligonucleotide
  Antisense strand to SEQ ID NO: 2484880
uuguuuggugccauagacc

SEQ ID NO: 2484882 - RNA, 19 nt, Artificial Sequence
  Description of Artificial Sequence: Synthetic oligonucleotide
  Sense strand starting at position 1180 of SEQ ID NO: 1887619
uuaagaaccucugggaaug

SEQ ID NO: 2484883 - RNA, 19 nt, Artificial Sequence
  Description of Artificial Sequence: Synthetic oligonucleotide
  Antisense strand to SEQ ID NO: 2484882
cauucccagagguucuuaa

SEQ ID NO: 2484884 - RNA, 19 nt, Artificial Sequence
  Description of Artificial Sequence: Synthetic oligonucleotide
  Sense strand starting at position 1202 of SEQ ID NO: 1887619
gcacgugcaucuguaauac

SEQ ID NO: 2484885 - RNA, 19 nt, Artificial Sequence
  Description of Artificial Sequence: Synthetic oligonucleotide
  Antisense strand to SEQ ID NO: 2484884
guauuacagaugcacgugc

SEQ ID NO: 2484886 - RNA, 19 nt, Artificial Sequence
  Description of Artificial Sequence: Synthetic oligonucleotide
  Sense strand starting at position 1282 of SEQ ID NO: 1887619
gcuauagucgcaccauugu

SEQ ID NO: 2484887 - RNA, 19 nt, Artificial Sequence
  Description of Artificial Sequence: Synthetic oligonucleotide
  Antisense strand to SEQ ID NO: 2484886
acaauggugcgacuauagc

SEQ ID NO: 2484888 - RNA, 19 nt, Artificial Sequence
  Description of Artificial Sequence: Synthetic oligonucleotide
  Sense strand starting at position 1330 of SEQ ID NO: 1887619
ccaugauauccuggguaga

SEQ ID NO: 2484889 - RNA, 19 nt, Artificial Sequence
  Description of Artificial Sequence: Synthetic oligonucleotide
  Antisense strand to SEQ ID NO: 2484888
ucuacccaggauaucaugg

SEQ ID NO: 2484890 - RNA, 19 nt, Artificial Sequence
  Description of Artificial Sequence: Synthetic oligonucleotide
  Sense strand starting at position 1331 of SEQ ID NO: 1887619
caugauauccuggguagaa

SEQ ID NO: 2484891 - RNA, 19 nt, Artificial Sequence
  Description of Artificial Sequence: Synthetic oligonucleotide
  Antisense strand to SEQ ID NO: 2484890
uucuacccaggauaucaug

SEQ ID NO: 2484892 - RNA, 19 nt, Artificial Sequence
  Description of Artificial Sequence: Synthetic oligonucleotide
  Sense strand starting at position 1717 of SEQ ID NO: 1887619
agaacaauguugcauaaca

SEQ ID NO: 2484893 - RNA, 19 nt, Artificial Sequence
  Description of Artificial Sequence: Synthetic oligonucleotide
  Antisense strand to SEQ ID NO: 2484892
uguuaugcaacauuguucu

SEQ ID NO: 2484894 - RNA, 19 nt, Artificial Sequence
  Description of Artificial Sequence: Synthetic oligonucleotide
  Sense strand starting at position 1805 of SEQ ID NO: 1887619
ugagaaagcugauugcagu

SEQ ID NO: 2484895 - RNA, 19 nt, Artificial Sequence
  Description of Artificial Sequence: Synthetic oligonucleotide
  Antisense strand to SEQ ID NO: 2484894
acugcaaucagcuuucuca

SEQ ID NO: 2484896 - RNA, 19 nt, Artificial Sequence
  Description of Artificial Sequence: Synthetic oligonucleotide
  Sense strand starting at position 1812 of SEQ ID NO: 1887619
gcugauugcaguggagaga

SEQ ID NO: 2484897 - RNA, 19 nt, Artificial Sequence
  Description of Artificial Sequence: Synthetic oligonucleotide
  Antisense strand to SEQ ID NO: 2484896
ucucuccacugcaaucagc

SEQ ID NO: 2484898 - RNA, 19 nt, Artificial Sequence
  Description of Artificial Sequence: Synthetic oligonucleotide
  Sense strand starting at position 1907 of SEQ ID NO: 1887619
ggguuaugaugaggauuca

SEQ ID NO: 2484899 - RNA, 19 nt, Artificial Sequence
  Description of Artificial Sequence: Synthetic oligonucleotide
  Antisense strand to SEQ ID NO: 2484898
ugaauccucaucauaaccc

SEQ ID NO: 2484900 - RNA, 19 nt, Artificial Sequence
  Description of Artificial Sequence: Synthetic oligonucleotide
  Sense strand starting at position 2004 of SEQ ID NO: 1887619
gaaugucaugucugacuuc

SEQ ID NO: 2484901 - RNA, 19 nt, Artificial Sequence
  Description of Artificial Sequence: Synthetic oligonucleotide
  Antisense strand to SEQ ID NO: 2484900
gaagucagacaugacauuc

SEQ ID NO: 2484902 - RNA, 19 nt, Artificial Sequence
  Description of Artificial Sequence: Synthetic oligonucleotide
  Sense strand starting at position 2024 of SEQ ID NO: 1887619
aacucuuccuacgugguua

SEQ ID NO: 2484903 - RNA, 19 nt, Artificial Sequence
  Description of Artificial Sequence: Synthetic oligonucleotide
  Antisense strand to SEQ ID NO: 2484902
uaaccacguaggaagaguu

SEQ ID NO: 2484904 - RNA, 19 nt, Artificial Sequence
  Description of Artificial Sequence: Synthetic oligonucleotide
  Sense strand starting at position 2242 of SEQ ID NO: 1887619
accuuugauuuaugagaag

SEQ ID NO: 2484905 - RNA, 19 nt, Artificial Sequence
  Description of Artificial Sequence: Synthetic oligonucleotide
  Antisense strand to SEQ ID NO: 2484904
cuucucauaaaucaaaggu

SEQ ID NO: 2484906 - RNA, 19 nt, Artificial Sequence
  Description of Artificial Sequence: Synthetic oligonucleotide
  Sense strand starting at position 2245 of SEQ ID NO: 1887619
uuugauuuaugagaaggcu

SEQ ID NO: 2484907 - RNA, 19 nt, Artificial Sequence
  Description of Artificial Sequence: Synthetic oligonucleotide
  Antisense strand to SEQ ID NO: 2484906
agccuucucauaaaucaaa

SEQ ID NO: 2484908 - RNA, 19 nt, Artificial Sequence
  Description of Artificial Sequence: Synthetic oligonucleotide
  Sense strand starting at position 2253 of SEQ ID NO: 1887619
augagaaggcuaugcacau

SEQ ID NO: 2484909 - RNA, 19 nt, Artificial Sequence
  Description of Artificial Sequence: Synthetic oligonucleotide
  Antisense strand to SEQ ID NO: 2484908
augugcauagccuucucau

SEQ ID NO: 2484910 - RNA, 19 nt, Artificial Sequence
  Description of Artificial Sequence: Synthetic oligonucleotide
  Sense strand starting at position 2593 of SEQ ID NO: 1887619
gcuagaauuacaggcagga

SEQ ID NO: 2484911 - RNA, 19 nt, Artificial Sequence
  Description of Artificial Sequence: Synthetic oligonucleotide
  Antisense strand to SEQ ID NO: 2484910
uccugccuguaauucuagc

SEQ ID NO: 2484912 - RNA, 19 nt, Artificial Sequence
  Description of Artificial Sequence: Synthetic oligonucleotide
  Sense strand starting at position 2648 of SEQ ID NO: 1887619
cagcauuaccugugaaaga

SEQ ID NO: 2484913 - RNA, 19 nt, Artificial Sequence
  Description of Artificial Sequence: Synthetic oligonucleotide
  Antisense strand to SEQ ID NO: 2484912
ucuuucacagguaaugcug

SEQ ID NO: 2484914 - RNA, 19 nt, Artificial Sequence
  Description of Artificial Sequence: Synthetic oligonucleotide
  Sense strand starting at position 2649 of SEQ ID NO: 1887619
agcauuaccugugaaagaa

SEQ ID NO: 2484915 - RNA, 19 nt, Artificial Sequence
  Description of Artificial Sequence: Synthetic oligonucleotide
  Antisense strand to SEQ ID NO: 2484914
uucuuucacagguaaugcu

SEQ ID NO: 2484916 - RNA, 19 nt, Artificial Sequence
  Description of Artificial Sequence: Synthetic oligonucleotide
  Sense strand starting at position 2658 of SEQ ID NO: 1887619
ugugaaagaauccaagugu

SEQ ID NO: 2484917 - RNA, 19 nt, Artificial Sequence
  Description of Artificial Sequence: Synthetic oligonucleotide
  Antisense strand to SEQ ID NO: 2484916
acacuuggauucuuucaca

SEQ ID NO: 2484918 - RNA, 19 nt, Artificial Sequence
  Description of Artificial Sequence: Synthetic oligonucleotide
  Sense strand starting at position 2687 of SEQ ID NO: 1887619
aguccugucuaugaacaca

SEQ ID NO: 2484919 - RNA, 19 nt, Artificial Sequence
  Description of Artificial Sequence: Synthetic oligonucleotide
  Antisense strand to SEQ ID NO: 2484918
uguguucauagacaggacu

SEQ ID NO: 2484920 - RNA, 19 nt, Artificial Sequence
  Description of Artificial Sequence: Synthetic oligonucleotide
  Sense strand starting at position 2711 of SEQ ID NO: 1887619
aggagugauuggcagcaaa

SEQ ID NO: 2484921 - RNA, 19 nt, Artificial Sequence
  Description of Artificial Sequence: Synthetic oligonucleotide
  Antisense strand to SEQ ID NO: 2484920
uuugcugccaaucacuccu

SEQ ID NO: 2484922 - RNA, 19 nt, Artificial Sequence
  Description of Artificial Sequence: Synthetic oligonucleotide
  Sense strand starting at position 3058 of SEQ ID NO: 1887619
cgaccaauaucugucuucu

SEQ ID NO: 2484923 - RNA, 19 nt, Artificial Sequence
  Description of Artificial Sequence: Synthetic oligonucleotide
  Antisense strand to SEQ ID NO: 2484922
agaagacagauauuggucg

SEQ ID NO: 2484924 - RNA, 19 nt, Artificial Sequence
  Description of Artificial Sequence: Synthetic oligonucleotide
  Sense strand starting at position 3066 of SEQ ID NO: 1887619
aucugucuucuugaugcaa

SEQ ID NO: 2484925 - RNA, 19 nt, Artificial Sequence
  Description of Artificial Sequence: Synthetic oligonucleotide
  Antisense strand to SEQ ID NO: 2484924
uugcaucaagaagacagau

SEQ ID NO: 2484926 - RNA, 19 nt, Artificial Sequence
  Description of Artificial Sequence: Synthetic oligonucleotide
  Sense strand starting at position 3133 of SEQ ID NO: 1887619
gcagucuucugaucuaccu

SEQ ID NO: 2484927 - RNA, 19 nt, Artificial Sequence
  Description of Artificial Sequence: Synthetic oligonucleotide
  Antisense strand to SEQ ID NO: 2484926
agguagaucagaagacugc

SEQ ID NO: 2484928 - RNA, 19 nt, Artificial Sequence
  Description of Artificial Sequence: Synthetic oligonucleotide
  Sense strand starting at position 3186 of SEQ ID NO: 1887619
gcaagaaauuccuagucuu

SEQ ID NO: 2484929 - RNA, 19 nt, Artificial Sequence
  Description of Artificial Sequence: Synthetic oligonucleotide
  Antisense strand to SEQ ID NO: 2484928
aagacuaggaauuucuugc

SEQ ID NO: 2484930 - RNA, 19 nt, Artificial Sequence
  Description of Artificial Sequence: Synthetic oligonucleotide
  Sense strand starting at position 3300 of SEQ ID NO: 1887619
gugccaguauguucuuauc

SEQ ID NO: 2484931 - RNA, 19 nt, Artificial Sequence
  Description of Artificial Sequence: Synthetic oligonucleotide
  Antisense strand to SEQ ID NO: 2484930
gauaagaacauacuggcac

SEQ ID NO: 2484932 - RNA, 19 nt, Artificial Sequence
  Description of Artificial Sequence: Synthetic oligonucleotide
  Sense strand starting at position 3302 of SEQ ID NO: 1887619
gccaguauguucuuaucag

SEQ ID NO: 2484933 - RNA, 19 nt, Artificial Sequence
  Description of Artificial Sequence: Synthetic oligonucleotide
  Antisense strand to SEQ ID NO: 2484932
cugauaagaacauacuggc

SEQ ID NO: 2484934 - RNA, 19 nt, Artificial Sequence
  Description of Artificial Sequence: Synthetic oligonucleotide
  Sense strand starting at position 3340 of SEQ ID NO: 1887619
gauugcaugucaccaagga

SEQ ID NO: 2484935 - RNA, 19 nt, Artificial Sequence
  Description of Artificial Sequence: Synthetic oligonucleotide
  Antisense strand to SEQ ID NO: 2484934
uccuuggugacaugcaauc

SEQ ID NO: 2484936 - RNA, 19 nt, Artificial Sequence
  Description of Artificial Sequence: Synthetic oligonucleotide
  Sense strand starting at position 3344 of SEQ ID NO: 1887619
gcaugucaccaaggagaca

SEQ ID NO: 2484937 - RNA, 19 nt, Artificial Sequence
  Description of Artificial Sequence: Synthetic oligonucleotide
  Antisense strand to SEQ ID NO: 2484936
ugucuccuuggugacaugc

SEQ ID NO: 2484938 - RNA, 19 nt, Artificial Sequence
  Description of Artificial Sequence: Synthetic oligonucleotide
  Sense strand starting at position 3443 of SEQ ID NO: 1887619
agaagacaguguuggaaug

SEQ ID NO: 2484939 - RNA, 19 nt, Artificial Sequence
  Description of Artificial Sequence: Synthetic oligonucleotide
  Antisense strand to SEQ ID NO: 2484938
cauuccaacacugucuucu

SEQ ID NO: 2484940 - RNA, 19 nt, Artificial Sequence
  Description of Artificial Sequence: Synthetic oligonucleotide
  Sense strand starting at position 3450 of SEQ ID NO: 1887619
aguguuggaauguguugaa

SEQ ID NO: 2484941 - RNA, 19 nt, Artificial Sequence
  Description of Artificial Sequence: Synthetic oligonucleotide
  Antisense strand to SEQ ID NO: 2484940
uucaacacauuccaacacu

SEQ ID NO: 2484942 - RNA, 19 nt, Artificial Sequence
  Description of Artificial Sequence: Synthetic oligonucleotide
  Sense strand starting at position 3454 of SEQ ID NO: 1887619
uuggaauguguugaauucu

SEQ ID NO: 2484943 - RNA, 19 nt, Artificial Sequence
  Description of Artificial Sequence: Synthetic oligonucleotide
  Antisense strand to SEQ ID NO: 2484942
agaauucaacacauuccaa

SEQ ID NO: 2484944 - RNA, 19 nt, Artificial Sequence
  Description of Artificial Sequence: Synthetic oligonucleotide
  Sense strand starting at position 3463 of SEQ ID NO: 1887619
guugaauucugacauucug

SEQ ID NO: 2484945 - RNA, 19 nt, Artificial Sequence
  Description of Artificial Sequence: Synthetic oligonucleotide
  Antisense strand to SEQ ID NO: 2484944
cagaaugucagaauucaac

SEQ ID NO: 2484946 - RNA, 19 nt, Artificial Sequence
  Description of Artificial Sequence: Synthetic oligonucleotide
  Sense strand starting at position 3471 of SEQ ID NO: 1887619
cugacauucuguucuacca

SEQ ID NO: 2484947 - RNA, 19 nt, Artificial Sequence
  Description of Artificial Sequence: Synthetic oligonucleotide
  Antisense strand to SEQ ID NO: 2484946
ugguagaacagaaugucag

SEQ ID NO: 2484948 - RNA, 19 nt, Artificial Sequence
  Description of Artificial Sequence: Synthetic oligonucleotide
  Sense strand starting at position 3522 of SEQ ID NO: 1887619
ggagaguguggcugggaaa

SEQ ID NO: 2484949 - RNA, 19 nt, Artificial Sequence
  Description of Artificial Sequence: Synthetic oligonucleotide
  Antisense strand to SEQ ID NO: 2484948
uuucccagccacacucucc

SEQ ID NO: 2484950 - RNA, 19 nt, Artificial Sequence
  Description of Artificial Sequence: Synthetic oligonucleotide
  Sense strand starting at position 3523 of SEQ ID NO: 1887619
gagaguguggcugggaaau

SEQ ID NO: 2484951 - RNA, 19 nt, Artificial Sequence
  Description of Artificial Sequence: Synthetic oligonucleotide
  Antisense strand to SEQ ID NO: 2484950
auuucccagccacacucuc

SEQ ID NO: 2484952 - RNA, 19 nt, Artificial Sequence
  Description of Artificial Sequence: Synthetic oligonucleotide
  Sense strand starting at position 3548 of SEQ ID NO: 1887619
auuacuucucagugcacau

SEQ ID NO: 2484953 - RNA, 19 nt, Artificial Sequence
  Description of Artificial Sequence: Synthetic oligonucleotide
  Antisense strand to SEQ ID NO: 2484952
augugcacugagaaguaau

SEQ ID NO: 2484954 - RNA, 19 nt, Artificial Sequence
  Description of Artificial Sequence: Synthetic oligonucleotide
  Sense strand starting at position 3573 of SEQ ID NO: 1887619
agugauccuccauguguca

SEQ ID NO: 2484955 - RNA, 19 nt, Artificial Sequence
  Description of Artificial Sequence: Synthetic oligonucleotide
  Antisense strand to SEQ ID NO: 2484954
ugacacauggaggaucacu

SEQ ID NO: 2484956 - RNA, 19 nt, Artificial Sequence
  Description of Artificial Sequence: Synthetic oligonucleotide
  Sense strand starting at position 101 of SEQ ID NO: 1887620
aucugugaaauggacguaa

SEQ ID NO: 2484957 - RNA, 19 nt, Artificial Sequence
  Description of Artificial Sequence: Synthetic oligonucleotide
  Antisense strand to SEQ ID NO: 2484956
uuacguccauuucacagau

SEQ ID NO: 2484958 - RNA, 19 nt, Artificial Sequence
  Description of Artificial Sequence: Synthetic oligonucleotide
  Sense strand starting at position 103 of SEQ ID NO: 1887620
cugugaaauggacguaaag

SEQ ID NO: 2484959 - RNA, 19 nt, Artificial Sequence
  Description of Artificial Sequence: Synthetic oligonucleotide
  Antisense strand to SEQ ID NO: 2484958
cuuuacguccauuucacag

SEQ ID NO: 2484960 - RNA, 19 nt, Artificial Sequence
  Description of Artificial Sequence: Synthetic oligonucleotide
  Sense strand starting at position 105 of SEQ ID NO: 1887620
gugaaauggacguaaaguu

SEQ ID NO: 2484961 - RNA, 19 nt, Artificial Sequence
  Description of Artificial Sequence: Synthetic oligonucleotide
  Antisense strand to SEQ ID NO: 2484960
aacuuuacguccauuucac

SEQ ID NO: 2484962 - RNA, 19 nt, Artificial Sequence
  Description of Artificial Sequence: Synthetic oligonucleotide
  Sense strand starting at position 115 of SEQ ID NO: 1887620
cguaaaguucccuacacag

SEQ ID NO: 2484963 - RNA, 19 nt, Artificial Sequence
  Description of Artificial Sequence: Synthetic oligonucleotide
  Antisense strand to SEQ ID NO: 2484962
cuguguagggaacuuuacg

SEQ ID NO: 2484964 - RNA, 19 nt, Artificial Sequence
  Description of Artificial Sequence: Synthetic oligonucleotide
  Sense strand starting at position 148 of SEQ ID NO: 1887620
guuaaaggcauucgauaaa

SEQ ID NO: 2484965 - RNA, 19 nt, Artificial Sequence
  Description of Artificial Sequence: Synthetic oligonucleotide
  Antisense strand to SEQ ID NO: 2484964
uuuaucgaaugccuuuaac

SEQ ID NO: 2484966 - RNA, 19 nt, Artificial Sequence
  Description of Artificial Sequence: Synthetic oligonucleotide
  Sense strand starting at position 323 of SEQ ID NO: 1887620
guguggagaugguuggaua

SEQ ID NO: 2484967 - RNA, 19 nt, Artificial Sequence
  Description of Artificial Sequence: Synthetic oligonucleotide
  Antisense strand to SEQ ID NO: 2484966
uauccaaccaucuccacac

SEQ ID NO: 2484968 - RNA, 19 nt, Artificial Sequence
  Description of Artificial Sequence: Synthetic oligonucleotide
  Sense strand starting at position 334 of SEQ ID NO: 1887620
guuggauacuguguaugaa

SEQ ID NO: 2484969 - RNA, 19 nt, Artificial Sequence
  Description of Artificial Sequence: Synthetic oligonucleotide
  Antisense strand to SEQ ID NO: 2484968
uucauacacaguauccaac

SEQ ID NO: 2484970 - RNA, 19 nt, Artificial Sequence
  Description of Artificial Sequence: Synthetic oligonucleotide
  Sense strand starting at position 335 of SEQ ID NO: 1887620
uuggauacuguguaugaau

SEQ ID NO: 2484971 - RNA, 19 nt, Artificial Sequence
  Description of Artificial Sequence: Synthetic oligonucleotide
  Antisense strand to SEQ ID NO: 2484970
auucauacacaguauccaa

SEQ ID NO: 2484972 - RNA, 19 nt, Artificial Sequence
  Description of Artificial Sequence: Synthetic oligonucleotide
  Sense strand starting at position 337 of SEQ ID NO: 1887620
ggauacuguguaugaauga

SEQ ID NO: 2484973 - RNA, 19 nt, Artificial Sequence
  Description of Artificial Sequence: Synthetic oligonucleotide
  Antisense strand to SEQ ID NO: 2484972
ucauucauacacaguaucc

SEQ ID NO: 2484974 - RNA, 19 nt, Artificial Sequence
  Description of Artificial Sequence: Synthetic oligonucleotide
  Sense strand starting at position 344 of SEQ ID NO: 1887620
guguaugaaugauugggua

SEQ ID NO: 2484975 - RNA, 19 nt, Artificial Sequence
  Description of Artificial Sequence: Synthetic oligonucleotide
  Antisense strand to SEQ ID NO: 2484974
uacccaaucauucauacac

SEQ ID NO: 2484976 - RNA, 19 nt, Artificial Sequence
  Description of Artificial Sequence: Synthetic oligonucleotide
  Sense strand starting at position 346 of SEQ ID NO: 1887620
guaugaaugauuggguaaa

SEQ ID NO: 2484977 - RNA, 19 nt, Artificial Sequence
  Description of Artificial Sequence: Synthetic oligonucleotide
  Antisense strand to SEQ ID NO: 2484976
uuuacccaaucauucauac

SEQ ID NO: 2484978 - RNA, 19 nt, Artificial Sequence
  Description of Artificial Sequence: Synthetic oligonucleotide
  Sense strand starting at position 437 of SEQ ID NO: 1887620
uuagcauuugcuggauguu

SEQ ID NO: 2484979 - RNA, 19 nt, Artificial Sequence
  Description of Artificial Sequence: Synthetic oligonucleotide
  Antisense strand to SEQ ID NO: 2484978
aacauccagcaaaugcuaa

SEQ ID NO: 2484980 - RNA, 19 nt, Artificial Sequence
  Description of Artificial Sequence: Synthetic oligonucleotide
  Sense strand starting at position 440 of SEQ ID NO: 1887620
gcauuugcuggauguuuga

SEQ ID NO: 2484981 - RNA, 19 nt, Artificial Sequence
  Description of Artificial Sequence: Synthetic oligonucleotide
  Antisense strand to SEQ ID NO: 2484980
ucaaacauccagcaaaugc

SEQ ID NO: 2484982 - RNA, 19 nt, Artificial Sequence
  Description of Artificial Sequence: Synthetic oligonucleotide
  Sense strand starting at position 762 of SEQ ID NO: 1887620
cuugguuguauggauaaau

SEQ ID NO: 2484983 - RNA, 19 nt, Artificial Sequence
  Description of Artificial Sequence: Synthetic oligonucleotide
  Antisense strand to SEQ ID NO: 2484982
auuuauccauacaaccaag

SEQ ID NO: 2484984 - RNA, 19 nt, Artificial Sequence
  Description of Artificial Sequence: Synthetic oligonucleotide
  Sense strand starting at position 844 of SEQ ID NO: 1887620
ggguguuugggugaauuaa

SEQ ID NO: 2484985 - RNA, 19 nt, Artificial Sequence
  Description of Artificial Sequence: Synthetic oligonucleotide
  Antisense strand to SEQ ID NO: 2484984
uuaauucacccaaacaccc

SEQ ID NO: 2484986 - RNA, 19 nt, Artificial Sequence
  Description of Artificial Sequence: Synthetic oligonucleotide
  Sense strand starting at position 853 of SEQ ID NO: 1887620
ggugaauuaauaggugguu

SEQ ID NO: 2484987 - RNA, 19 nt, Artificial Sequence
  Description of Artificial Sequence: Synthetic oligonucleotide
  Antisense strand to SEQ ID NO: 2484986
aaccaccuauuaauucacc

SEQ ID NO: 2484988 - RNA, 19 nt, Artificial Sequence
  Description of Artificial Sequence: Synthetic oligonucleotide
  Sense strand starting at position 856 of SEQ ID NO: 1887620
gaauuaauaggugguugga

SEQ ID NO: 2484989 - RNA, 19 nt, Artificial Sequence
  Description of Artificial Sequence: Synthetic oligonucleotide
  Antisense strand to SEQ ID NO: 2484988
uccaaccaccuauuaauuc

SEQ ID NO: 2484990 - RNA, 19 nt, Artificial Sequence
  Description of Artificial Sequence: Synthetic oligonucleotide
  Sense strand starting at position 880 of SEQ ID NO: 1887620
ggguggauaggugauuagu

SEQ ID NO: 2484991 - RNA, 19 nt, Artificial Sequence
  Description of Artificial Sequence: Synthetic oligonucleotide
  Antisense strand to SEQ ID NO: 2484990
acuaaucaccuauccaccc

SEQ ID NO: 2484992 - RNA, 19 nt, Artificial Sequence
  Description of Artificial Sequence: Synthetic oligonucleotide
  Sense strand starting at position 883 of SEQ ID NO: 1887620
uggauaggugauuaguuca

SEQ ID NO: 2484993 - RNA, 19 nt, Artificial Sequence
  Description of Artificial Sequence: Synthetic oligonucleotide
  Antisense strand to SEQ ID NO: 2484992
ugaacuaaucaccuaucca

SEQ ID NO: 2484994 - RNA, 19 nt, Artificial Sequence
  Description of Artificial Sequence: Synthetic oligonucleotide
  Sense strand starting at position 888 of SEQ ID NO: 1887620
aggugauuaguucauugga

SEQ ID NO: 2484995 - RNA, 19 nt, Artificial Sequence
  Description of Artificial Sequence: Synthetic oligonucleotide
  Antisense strand to SEQ ID NO: 2484994
uccaaugaacuaaucaccu

SEQ ID NO: 2484996 - RNA, 19 nt, Artificial Sequence
  Description of Artificial Sequence: Synthetic oligonucleotide
  Sense strand starting at position 907 of SEQ ID NO: 1887620
uagguagaugagugauuga

SEQ ID NO: 2484997 - RNA, 19 nt, Artificial Sequence
  Description of Artificial Sequence: Synthetic oligonucleotide
  Antisense strand to SEQ ID NO: 2484996
ucaaucacucaucuaccua

SEQ ID NO: 2484998 - RNA, 19 nt, Artificial Sequence
  Description of Artificial Sequence: Synthetic oligonucleotide
  Sense strand starting at position 910 of SEQ ID NO: 1887620
guagaugagugauugauag

SEQ ID NO: 2484999 - RNA, 19 nt, Artificial Sequence
  Description of Artificial Sequence: Synthetic oligonucleotide
  Antisense strand to SEQ ID NO: 2484998
cuaucaaucacucaucuac

SEQ ID NO: 2485000 - RNA, 19 nt, Artificial Sequence
  Description of Artificial Sequence: Synthetic oligonucleotide
  Sense strand starting at position 947 of SEQ ID NO: 1887620
auagcuaggugguuagaua

SEQ ID NO: 2485001 - RNA, 19 nt, Artificial Sequence
  Description of Artificial Sequence: Synthetic oligonucleotide
  Antisense strand to SEQ ID NO: 2485000
uaucuaaccaccuagcuau

SEQ ID NO: 2485002 - RNA, 19 nt, Artificial Sequence
  Description of Artificial Sequence: Synthetic oligonucleotide
  Sense strand starting at position 948 of SEQ ID NO: 1887620
uagcuaggugguuagauau

SEQ ID NO: 2485003 - RNA, 19 nt, Artificial Sequence
  Description of Artificial Sequence: Synthetic oligonucleotide
  Antisense strand to SEQ ID NO: 2485002
auaucuaaccaccuagcua

SEQ ID NO: 2485004 - RNA, 19 nt, Artificial Sequence
  Description of Artificial Sequence: Synthetic oligonucleotide
  Sense strand starting at position 955 of SEQ ID NO: 1887620
gugguuagauaucuggaua

SEQ ID NO: 2485005 - RNA, 19 nt, Artificial Sequence
  Description of Artificial Sequence: Synthetic oligonucleotide
  Antisense strand to SEQ ID NO: 2485004
uauccagauaucuaaccac

SEQ ID NO: 2485006 - RNA, 19 nt, Artificial Sequence
  Description of Artificial Sequence: Synthetic oligonucleotide
  Sense strand starting at position 956 of SEQ ID NO: 1887620
ugguuagauaucuggauac

SEQ ID NO: 2485007 - RNA, 19 nt, Artificial Sequence
  Description of Artificial Sequence: Synthetic oligonucleotide
  Antisense strand to SEQ ID NO: 2485006
guauccagauaucuaacca

SEQ ID NO: 2485008 - RNA, 19 nt, Artificial Sequence
  Description of Artificial Sequence: Synthetic oligonucleotide
  Sense strand starting at position 1117 of SEQ ID NO: 1887620
caguguggaugauugggaa

SEQ ID NO: 2485009 - RNA, 19 nt, Artificial Sequence
  Description of Artificial Sequence: Synthetic oligonucleotide
  Antisense strand to SEQ ID NO: 2485008
uucccaaucauccacacug

SEQ ID NO: 2485010 - RNA, 19 nt, Artificial Sequence
  Description of Artificial Sequence: Synthetic oligonucleotide
  Sense strand starting at position 2463 of SEQ ID NO: 1887620
cgaggacuagagcaaucuu

SEQ ID NO: 2485011 - RNA, 19 nt, Artificial Sequence
  Description of Artificial Sequence: Synthetic oligonucleotide
  Antisense strand to SEQ ID NO: 2485010
aagauugcucuaguccucg

SEQ ID NO: 2485012 - RNA, 19 nt, Artificial Sequence
  Description of Artificial Sequence: Synthetic oligonucleotide
  Sense strand starting at position 2515 of SEQ ID NO: 1887620
cuggguaugcaugagggau

SEQ ID NO: 2485013 - RNA, 19 nt, Artificial Sequence
  Description of Artificial Sequence: Synthetic oligonucleotide
  Antisense strand to SEQ ID NO: 2485012
aucccucaugcauacccag

SEQ ID NO: 2485014 - RNA, 19 nt, Artificial Sequence
  Description of Artificial Sequence: Synthetic oligonucleotide
  Sense strand starting at position 2668 of SEQ ID NO: 1887620
ggaucauugguaugggaca

SEQ ID NO: 2485015 - RNA, 19 nt, Artificial Sequence
  Description of Artificial Sequence: Synthetic oligonucleotide
  Antisense strand to SEQ ID NO: 2485014
ugucccauaccaaugaucc

SEQ ID NO: 2485016 - RNA, 19 nt, Artificial Sequence
  Description of Artificial Sequence: Synthetic oligonucleotide
  Sense strand starting at position 2737 of SEQ ID NO: 1887620
auaggaucagaguguacaa

SEQ ID NO: 2485017 - RNA, 19 nt, Artificial Sequence
  Description of Artificial Sequence: Synthetic oligonucleotide
  Antisense strand to SEQ ID NO: 2485016
uuguacacucugauccuau

SEQ ID NO: 2485018 - RNA, 19 nt, Artificial Sequence
  Description of Artificial Sequence: Synthetic oligonucleotide
  Sense strand starting at position 2762 of SEQ ID NO: 1887620
gggauucuugccgaggaaa

SEQ ID NO: 2485019 - RNA, 19 nt, Artificial Sequence
  Description of Artificial Sequence: Synthetic oligonucleotide
  Antisense strand to SEQ ID NO: 2485018
uuuccucggcaagaauccc

SEQ ID NO: 2485020 - RNA, 19 nt, Artificial Sequence
  Description of Artificial Sequence: Synthetic oligonucleotide
  Sense strand starting at position 2859 of SEQ ID NO: 1887620
gggaggcgucuggagaaau

SEQ ID NO: 2485021 - RNA, 19 nt, Artificial Sequence
  Description of Artificial Sequence: Synthetic oligonucleotide
  Antisense strand to SEQ ID NO: 2485020
auuucuccagacgccuccc

SEQ ID NO: 2485022 - RNA, 19 nt, Artificial Sequence
  Description of Artificial Sequence: Synthetic oligonucleotide
  Sense strand starting at position 2919 of SEQ ID NO: 1887620
gugucaauauggguaaacu

SEQ ID NO: 2485023 - RNA, 19 nt, Artificial Sequence
  Description of Artificial Sequence: Synthetic oligonucleotide
  Antisense strand to SEQ ID NO: 2485022
aguuuacccauauugacac

SEQ ID NO: 2485024 - RNA, 19 nt, Artificial Sequence
  Description of Artificial Sequence: Synthetic oligonucleotide
  Sense strand starting at position 2943 of SEQ ID NO: 1887620
agugcaggaucuguauaaa

SEQ ID NO: 2485025 - RNA, 19 nt, Artificial Sequence
  Description of Artificial Sequence: Synthetic oligonucleotide
  Antisense strand to SEQ ID NO: 2485024
uuuauacagauccugcacu

SEQ ID NO: 2485026 - RNA, 19 nt, Artificial Sequence
  Description of Artificial Sequence: Synthetic oligonucleotide
  Sense strand starting at position 3015 of SEQ ID NO: 1887620
ggauagaagguguguggaa

SEQ ID NO: 2485027 - RNA, 19 nt, Artificial Sequence
  Description of Artificial Sequence: Synthetic oligonucleotide
  Antisense strand to SEQ ID NO: 2485026
uuccacacaccuucuaucc

SEQ ID NO: 2485028 - RNA, 19 nt, Artificial Sequence
  Description of Artificial Sequence: Synthetic oligonucleotide
  Sense strand starting at position 3016 of SEQ ID NO: 1887620
gauagaagguguguggaaa

SEQ ID NO: 2485029 - RNA, 19 nt, Artificial Sequence
  Description of Artificial Sequence: Synthetic oligonucleotide
  Antisense strand to SEQ ID NO: 2485028
uuuccacacaccuucuauc

SEQ ID NO: 2485030 - RNA, 19 nt, Artificial Sequence
  Description of Artificial Sequence: Synthetic oligonucleotide
  Sense strand starting at position 3413 of SEQ ID NO: 1887620
cgagacauucuggauggca

SEQ ID NO: 2485031 - RNA, 19 nt, Artificial Sequence
  Description of Artificial Sequence: Synthetic oligonucleotide
  Antisense strand to SEQ ID NO: 2485030
ugccauccagaaugucucg

SEQ ID NO: 2485032 - RNA, 19 nt, Artificial Sequence
  Description of Artificial Sequence: Synthetic oligonucleotide
  Sense strand starting at position 3713 of SEQ ID NO: 1887620
cauacuaauuggguccaga

SEQ ID NO: 2485033 - RNA, 19 nt, Artificial Sequence
  Description of Artificial Sequence: Synthetic oligonucleotide
  Antisense strand to SEQ ID NO: 2485032
ucuggacccaauuaguaug

SEQ ID NO: 2485034 - RNA, 19 nt, Artificial Sequence
  Description of Artificial Sequence: Synthetic oligonucleotide
  Sense strand starting at position 3768 of SEQ ID NO: 1887620
ccacuuauuccacagguau

SEQ ID NO: 2485035 - RNA, 19 nt, Artificial Sequence
  Description of Artificial Sequence: Synthetic oligonucleotide
  Antisense strand to SEQ ID NO: 2485034
auaccuguggaauaagugg

SEQ ID NO: 2485036 - RNA, 19 nt, Artificial Sequence
  Description of Artificial Sequence: Synthetic oligonucleotide
  Sense strand starting at position 2 of SEQ ID NO: 1887621
cucagaaauguuggaauua

SEQ ID NO: 2485037 - RNA, 19 nt, Artificial Sequence
  Description of Artificial Sequence: Synthetic oligonucleotide
  Antisense strand to SEQ ID NO: 2485036
uaauuccaacauuucugag

SEQ ID NO: 2485038 - RNA, 19 nt, Artificial Sequence
  Description of Artificial Sequence: Synthetic oligonucleotide
  Sense strand starting at position 3 of SEQ ID NO: 1887621
ucagaaauguuggaauuaa

SEQ ID NO: 2485039 - RNA, 19 nt, Artificial Sequence
  Description of Artificial Sequence: Synthetic oligonucleotide
  Antisense strand to SEQ ID NO: 2485038
uuaauuccaacauuucuga

SEQ ID NO: 2485040 - RNA, 19 nt, Artificial Sequence
  Description of Artificial Sequence: Synthetic oligonucleotide
  Sense strand starting at position 11 of SEQ ID NO: 1887621
guuggaauuaaacguuugu

SEQ ID NO: 2485041 - RNA, 19 nt, Artificial Sequence
  Description of Artificial Sequence: Synthetic oligonucleotide
  Antisense strand to SEQ ID NO: 2485040
acaaacguuuaauuccaac

SEQ ID NO: 2485042 - RNA, 19 nt, Artificial Sequence
  Description of Artificial Sequence: Synthetic oligonucleotide
  Sense strand starting at position 71 of SEQ ID NO: 1887621
agguguggugugagauguu

SEQ ID NO: 2485043 - RNA, 19 nt, Artificial Sequence
  Description of Artificial Sequence: Synthetic oligonucleotide
  Antisense strand to SEQ ID NO: 2485042
aacaucucacaccacaccu

SEQ ID NO: 2485044 - RNA, 19 nt, Artificial Sequence
  Description of Artificial Sequence: Synthetic oligonucleotide
  Sense strand starting at position 98 of SEQ ID NO: 1887621
aguggugagccaggaacaa

SEQ ID NO: 2485045 - RNA, 19 nt, Artificial Sequence
  Description of Artificial Sequence: Synthetic oligonucleotide
  Antisense strand to SEQ ID NO: 2485044
uuguuccuggcucaccacu

SEQ ID NO: 2485046 - RNA, 19 nt, Artificial Sequence
  Description of Artificial Sequence: Synthetic oligonucleotide
  Sense strand starting at position 167 of SEQ ID NO: 1887621
agccaaguauaaccagaau

SEQ ID NO: 2485047 - RNA, 19 nt, Artificial Sequence
  Description of Artificial Sequence: Synthetic oligonucleotide
  Antisense strand to SEQ ID NO: 2485046
auucugguuauacuuggcu

SEQ ID NO: 2485048 - RNA, 19 nt, Artificial Sequence
  Description of Artificial Sequence: Synthetic oligonucleotide
  Sense strand starting at position 280 of SEQ ID NO: 1887621
aacugaugcugagcgauaa

SEQ ID NO: 2485049 - RNA, 19 nt, Artificial Sequence
  Description of Artificial Sequence: Synthetic oligonucleotide
  Antisense strand to SEQ ID NO: 2485048
uuaucgcucagcaucaguu

SEQ ID NO: 2485050 - RNA, 19 nt, Artificial Sequence
  Description of Artificial Sequence: Synthetic oligonucleotide
  Sense strand starting at position 284 of SEQ ID NO: 1887621
gaugcugagcgauaaggga

SEQ ID NO: 2485051 - RNA, 19 nt, Artificial Sequence
  Description of Artificial Sequence: Synthetic oligonucleotide
  Antisense strand to SEQ ID NO: 2485050
ucccuuaucgcucagcauc

SEQ ID NO: 2485052 - RNA, 19 nt, Artificial Sequence
  Description of Artificial Sequence: Synthetic oligonucleotide
  Sense strand starting at position 293 of SEQ ID NO: 1887621
cgauaagggaccugugguu

SEQ ID NO: 2485053 - RNA, 19 nt, Artificial Sequence
  Description of Artificial Sequence: Synthetic oligonucleotide
  Antisense strand to SEQ ID NO: 2485052
aaccacaggucccuuaucg

SEQ ID NO: 2485054 - RNA, 19 nt, Artificial Sequence
  Description of Artificial Sequence: Synthetic oligonucleotide
  Sense strand starting at position 299 of SEQ ID NO: 1887621
gggaccugugguugucagu

SEQ ID NO: 2485055 - RNA, 19 nt, Artificial Sequence
  Description of Artificial Sequence: Synthetic oligonucleotide
  Antisense strand to SEQ ID NO: 2485054
acugacaaccacagguccc

SEQ ID NO: 2485056 - RNA, 19 nt, Artificial Sequence
  Description of Artificial Sequence: Synthetic oligonucleotide
  Sense strand starting at position 380 of SEQ ID NO: 1887621
ccuccaguuugcuugugaa

SEQ ID NO: 2485057 - RNA, 19 nt, Artificial Sequence
  Description of Artificial Sequence: Synthetic oligonucleotide
  Antisense strand to SEQ ID NO: 2485056
uucacaagcaaacuggagg

SEQ ID NO: 2485058 - RNA, 19 nt, Artificial Sequence
  Description of Artificial Sequence: Synthetic oligonucleotide
  Sense strand starting at position 503 of SEQ ID NO: 1887621
gguugaauuggcgaguaga

SEQ ID NO: 2485059 - RNA, 19 nt, Artificial Sequence
  Description of Artificial Sequence: Synthetic oligonucleotide
  Antisense strand to SEQ ID NO: 2485058
ucuacucgccaauucaacc

SEQ ID NO: 2485060 - RNA, 19 nt, Artificial Sequence
  Description of Artificial Sequence: Synthetic oligonucleotide
  Sense strand starting at position 554 of SEQ ID NO: 1887621
gagccuuuagccuggugaa

SEQ ID NO: 2485061 - RNA, 19 nt, Artificial Sequence
  Description of Artificial Sequence: Synthetic oligonucleotide
  Antisense strand to SEQ ID NO: 2485060
uucaccaggcuaaaggcuc

SEQ ID NO: 2485062 - RNA, 19 nt, Artificial Sequence
  Description of Artificial Sequence: Synthetic oligonucleotide
  Sense strand starting at position 555 of SEQ ID NO: 1887621
agccuuuagccuggugaag

SEQ ID NO: 2485063 - RNA, 19 nt, Artificial Sequence
  Description of Artificial Sequence: Synthetic oligonucleotide
  Antisense strand to SEQ ID NO: 2485062
cuucaccaggcuaaaggcu

SEQ ID NO: 2485064 - RNA, 19 nt, Artificial Sequence
  Description of Artificial Sequence: Synthetic oligonucleotide
  Sense strand starting at position 832 of SEQ ID NO: 1887621
gggaucuuccgcgccuuua

SEQ ID NO: 2485065 - RNA, 19 nt, Artificial Sequence
  Description of Artificial Sequence: Synthetic oligonucleotide
  Antisense strand to SEQ ID NO: 2485064
uaaaggcgcggaagauccc

SEQ ID NO: 2485066 - RNA, 19 nt, Artificial Sequence
  Description of Artificial Sequence: Synthetic oligonucleotide
  Sense strand starting at position 842 of SEQ ID NO: 1887621
gcgccuuuaccagagcauu

SEQ ID NO: 2485067 - RNA, 19 nt, Artificial Sequence
  Description of Artificial Sequence: Synthetic oligonucleotide
  Antisense strand to SEQ ID NO: 2485066
aaugcucugguaaaggcgc

SEQ ID NO: 2485068 - RNA, 19 nt, Artificial Sequence
  Description of Artificial Sequence: Synthetic oligonucleotide
  Sense strand starting at position 1114 of SEQ ID NO: 1887621
uggucugucucuuuccuga

SEQ ID NO: 2485069 - RNA, 19 nt, Artificial Sequence
  Description of Artificial Sequence: Synthetic oligonucleotide
  Antisense strand to SEQ ID NO: 2485068
ucaggaaagagacagacca

SEQ ID NO: 2485070 - RNA, 19 nt, Artificial Sequence
  Description of Artificial Sequence: Synthetic oligonucleotide
  Sense strand starting at position 1219 of SEQ ID NO: 1887621
ccuguugucuggcugugaa

SEQ ID NO: 2485071 - RNA, 19 nt, Artificial Sequence
  Description of Artificial Sequence: Synthetic oligonucleotide
  Antisense strand to SEQ ID NO: 2485070
uucacagccagacaacagg

SEQ ID NO: 2485072 - RNA, 19 nt, Artificial Sequence
  Description of Artificial Sequence: Synthetic oligonucleotide
  Sense strand starting at position 1221 of SEQ ID NO: 1887621
uguugucuggcugugaagu

SEQ ID NO: 2485073 - RNA, 19 nt, Artificial Sequence
  Description of Artificial Sequence: Synthetic oligonucleotide
  Antisense strand to SEQ ID NO: 2485072
acuucacagccagacaaca

SEQ ID NO: 2485074 - RNA, 19 nt, Artificial Sequence
  Description of Artificial Sequence: Synthetic oligonucleotide
  Sense strand starting at position 1227 of SEQ ID NO: 1887621
cuggcugugaaguguaaag

SEQ ID NO: 2485075 - RNA, 19 nt, Artificial Sequence
  Description of Artificial Sequence: Synthetic oligonucleotide
  Antisense strand to SEQ ID NO: 2485074
cuuuacacuucacagccag

SEQ ID NO: 2485076 - RNA, 19 nt, Artificial Sequence
  Description of Artificial Sequence: Synthetic oligonucleotide
  Sense strand starting at position 1229 of SEQ ID NO: 1887621
ggcugugaaguguaaaggu

SEQ ID NO: 2485077 - RNA, 19 nt, Artificial Sequence
  Description of Artificial Sequence: Synthetic oligonucleotide
  Antisense strand to SEQ ID NO: 2485076
accuuuacacuucacagcc

SEQ ID NO: 2485078 - RNA, 19 nt, Artificial Sequence
  Description of Artificial Sequence: Synthetic oligonucleotide
  Sense strand starting at position 1239 of SEQ ID NO: 1887621
uguaaaggucuuggcuuua

SEQ ID NO: 2485079 - RNA, 19 nt, Artificial Sequence
  Description of Artificial Sequence: Synthetic oligonucleotide
  Antisense strand to SEQ ID NO: 2485078
uaaagccaagaccuuuaca

SEQ ID NO: 2485080 - RNA, 19 nt, Artificial Sequence
  Description of Artificial Sequence: Synthetic oligonucleotide
  Sense strand starting at position 1337 of SEQ ID NO: 1887621
ccuaucugcagaugaggaa

SEQ ID NO: 2485081 - RNA, 19 nt, Artificial Sequence
  Description of Artificial Sequence: Synthetic oligonucleotide
  Antisense strand to SEQ ID NO: 2485080
uuccucaucugcagauagg

SEQ ID NO: 2485082 - RNA, 19 nt, Artificial Sequence
  Description of Artificial Sequence: Synthetic oligonucleotide
  Sense strand starting at position 1402 of SEQ ID NO: 1887621
agcugaguuacaggucuca

SEQ ID NO: 2485083 - RNA, 19 nt, Artificial Sequence
  Description of Artificial Sequence: Synthetic oligonucleotide
  Antisense strand to SEQ ID NO: 2485082
ugagaccuguaacucagcu

SEQ ID NO: 2485084 - RNA, 19 nt, Artificial Sequence
  Description of Artificial Sequence: Synthetic oligonucleotide
  Sense strand starting at position 1414 of SEQ ID NO: 1887621
ggucucagauucuagaaac

SEQ ID NO: 2485085 - RNA, 19 nt, Artificial Sequence
  Description of Artificial Sequence: Synthetic oligonucleotide
  Antisense strand to SEQ ID NO: 2485084
guuucuagaaucugagacc

SEQ ID NO: 2485086 - RNA, 19 nt, Artificial Sequence
  Description of Artificial Sequence: Synthetic oligonucleotide
  Sense strand starting at position 1701 of SEQ ID NO: 1887621
gcgagaggcagguacaaua

SEQ ID NO: 2485087 - RNA, 19 nt, Artificial Sequence
  Description of Artificial Sequence: Synthetic oligonucleotide
  Antisense strand to SEQ ID NO: 2485086
uauuguaccugccucucgc

SEQ ID NO: 2485088 - RNA, 19 nt, Artificial Sequence
  Description of Artificial Sequence: Synthetic oligonucleotide
  Sense strand starting at position 1727 of SEQ ID NO: 1887621
guguacuuugcgcaucaca

SEQ ID NO: 2485089 - RNA, 19 nt, Artificial Sequence
  Description of Artificial Sequence: Synthetic oligonucleotide
  Antisense strand to SEQ ID NO: 2485088
ugugaugcgcaaaguacac

SEQ ID NO: 2485090 - RNA, 19 nt, Artificial Sequence
  Description of Artificial Sequence: Synthetic oligonucleotide
  Sense strand starting at position 2330 of SEQ ID NO: 1887621
ggcugcuguguuuacaaca

SEQ ID NO: 2485091 - RNA, 19 nt, Artificial Sequence
  Description of Artificial Sequence: Synthetic oligonucleotide
  Antisense strand to SEQ ID NO: 2485090
uguuguaaacacagcagcc

SEQ ID NO: 2485092 - RNA, 19 nt, Artificial Sequence
  Description of Artificial Sequence: Synthetic oligonucleotide
  Sense strand starting at position 2363 of SEQ ID NO: 1887621
cgguuuccucccugauugu

SEQ ID NO: 2485093 - RNA, 19 nt, Artificial Sequence
  Description of Artificial Sequence: Synthetic oligonucleotide
  Antisense strand to SEQ ID NO: 2485092
acaaucagggaggaaaccg

SEQ ID NO: 2485094 - RNA, 19 nt, Artificial Sequence
  Description of Artificial Sequence: Synthetic oligonucleotide
  Sense strand starting at position 2364 of SEQ ID NO: 1887621
gguuuccucccugauuguu

SEQ ID NO: 2485095 - RNA, 19 nt, Artificial Sequence
  Description of Artificial Sequence: Synthetic oligonucleotide
  Antisense strand to SEQ ID NO: 2485094
aacaaucagggaggaaacc

SEQ ID NO: 2485096 - RNA, 19 nt, Artificial Sequence
  Description of Artificial Sequence: Synthetic oligonucleotide
  Sense strand starting at position 2514 of SEQ ID NO: 1887621
ggccuuccaccugaagagu

SEQ ID NO: 2485097 - RNA, 19 nt, Artificial Sequence
  Description of Artificial Sequence: Synthetic oligonucleotide
  Antisense strand to SEQ ID NO: 2485096
acucuucagguggaaggcc

SEQ ID NO: 2485098 - RNA, 19 nt, Artificial Sequence
  Description of Artificial Sequence: Synthetic oligonucleotide
  Sense strand starting at position 3037 of SEQ ID NO: 1887621
auacucugaccuggaguuu

SEQ ID NO: 2485099 - RNA, 19 nt, Artificial Sequence
  Description of Artificial Sequence: Synthetic oligonucleotide
  Antisense strand to SEQ ID NO: 2485098
aaacuccaggucagaguau

SEQ ID NO: 2485100 - RNA, 19 nt, Artificial Sequence
  Description of Artificial Sequence: Synthetic oligonucleotide
  Sense strand starting at position 3084 of SEQ ID NO: 1887621
gucuuuaauuaagugaaug

SEQ ID NO: 2485101 - RNA, 19 nt, Artificial Sequence
  Description of Artificial Sequence: Synthetic oligonucleotide
  Antisense strand to SEQ ID NO: 2485100
cauucacuuaauuaaagac

SEQ ID NO: 2485102 - RNA, 19 nt, Artificial Sequence
  Description of Artificial Sequence: Synthetic oligonucleotide
  Sense strand starting at position 3165 of SEQ ID NO: 1887621
ugugucaucguucaggaac

SEQ ID NO: 2485103 - RNA, 19 nt, Artificial Sequence
  Description of Artificial Sequence: Synthetic oligonucleotide
  Antisense strand to SEQ ID NO: 2485102
guuccugaacgaugacaca

SEQ ID NO: 2485104 - RNA, 19 nt, Artificial Sequence
  Description of Artificial Sequence: Synthetic oligonucleotide
  Sense strand starting at position 3240 of SEQ ID NO: 1887621
aucauugcacucugaaaga

SEQ ID NO: 2485105 - RNA, 19 nt, Artificial Sequence
  Description of Artificial Sequence: Synthetic oligonucleotide
  Antisense strand to SEQ ID NO: 2485104
ucuuucagagugcaaugau

SEQ ID NO: 2485106 - RNA, 19 nt, Artificial Sequence
  Description of Artificial Sequence: Synthetic oligonucleotide
  Sense strand starting at position 3602 of SEQ ID NO: 1887621
aaucguaauuucuguagaa

SEQ ID NO: 2485107 - RNA, 19 nt, Artificial Sequence
  Description of Artificial Sequence: Synthetic oligonucleotide
  Antisense strand to SEQ ID NO: 2485106
uucuacagaaauuacgauu

SEQ ID NO: 2485108 - RNA, 19 nt, Artificial Sequence
  Description of Artificial Sequence: Synthetic oligonucleotide
  Sense strand starting at position 3777 of SEQ ID NO: 1887621
aguuacuguccuugauaac

SEQ ID NO: 2485109 - RNA, 19 nt, Artificial Sequence
  Description of Artificial Sequence: Synthetic oligonucleotide
  Antisense strand to SEQ ID NO: 2485108
guuaucaaggacaguaacu

SEQ ID NO: 2485110 - RNA, 19 nt, Artificial Sequence
  Description of Artificial Sequence: Synthetic oligonucleotide
  Sense strand starting at position 3792 of SEQ ID NO: 1887621
uaacguaugucagccucaa

SEQ ID NO: 2485111 - RNA, 19 nt, Artificial Sequence
  Description of Artificial Sequence: Synthetic oligonucleotide
  Antisense strand to SEQ ID NO: 2485110
uugaggcugacauacguua

SEQ ID NO: 2485112 - RNA, 19 nt, Artificial Sequence
  Description of Artificial Sequence: Synthetic oligonucleotide
  Sense strand starting at position 3851 of SEQ ID NO: 1887621
aggaaugaauuaugugaag

SEQ ID NO: 2485113 - RNA, 19 nt, Artificial Sequence
  Description of Artificial Sequence: Synthetic oligonucleotide
  Antisense strand to SEQ ID NO: 2485112
cuucacauaauucauuccu

SEQ ID NO: 2485114 - RNA, 19 nt, Artificial Sequence
  Description of Artificial Sequence: Synthetic oligonucleotide
  Sense strand starting at position 3854 of SEQ ID NO: 1887621
aaugaauuaugugaaguug

SEQ ID NO: 2485115 - RNA, 19 nt, Artificial Sequence
  Description of Artificial Sequence: Synthetic oligonucleotide
  Antisense strand to SEQ ID NO: 2485114
caacuucacauaauucauu

SEQ ID NO: 2485116 - RNA, 19 nt, Artificial Sequence
  Description of Artificial Sequence: Synthetic oligonucleotide
  Sense strand starting at position 31 of SEQ ID NO: 1887622
ccagcugucucugaaagga

SEQ ID NO: 2485117 - RNA, 19 nt, Artificial Sequence
  Description of Artificial Sequence: Synthetic oligonucleotide
  Antisense strand to SEQ ID NO: 2485116
uccuuucagagacagcugg

SEQ ID NO: 2485118 - RNA, 19 nt, Artificial Sequence
  Description of Artificial Sequence: Synthetic oligonucleotide
  Sense strand starting at position 39 of SEQ ID NO: 1887622
cucugaaaggaguguggua

SEQ ID NO: 2485119 - RNA, 19 nt, Artificial Sequence
  Description of Artificial Sequence: Synthetic oligonucleotide
  Antisense strand to SEQ ID NO: 2485118
uaccacacuccuuucagag

SEQ ID NO: 2485120 - RNA, 19 nt, Artificial Sequence
  Description of Artificial Sequence: Synthetic oligonucleotide
  Sense strand starting at position 52 of SEQ ID NO: 1887622
gugguagucccaggcucau

SEQ ID NO: 2485121 - RNA, 19 nt, Artificial Sequence
  Description of Artificial Sequence: Synthetic oligonucleotide
  Antisense strand to SEQ ID NO: 2485120
augagccugggacuaccac

SEQ ID NO: 2485122 - RNA, 19 nt, Artificial Sequence
  Description of Artificial Sequence: Synthetic oligonucleotide
  Sense strand starting at position 122 of SEQ ID NO: 1887622
cuggucucccuccaagagu

SEQ ID NO: 2485123 - RNA, 19 nt, Artificial Sequence
  Description of Artificial Sequence: Synthetic oligonucleotide
  Antisense strand to SEQ ID NO: 2485122
acucuuggagggagaccag

SEQ ID NO: 2485124 - RNA, 19 nt, Artificial Sequence
  Description of Artificial Sequence: Synthetic oligonucleotide
  Sense strand starting at position 148 of SEQ ID NO: 1887622
ucgguugucuuaguggaac

SEQ ID NO: 2485125 - RNA, 19 nt, Artificial Sequence
  Description of Artificial Sequence: Synthetic oligonucleotide
  Antisense strand to SEQ ID NO: 2485124
guuccacuaagacaaccga

SEQ ID NO: 2485126 - RNA, 19 nt, Artificial Sequence
  Description of Artificial Sequence: Synthetic oligonucleotide
  Sense strand starting at position 658 of SEQ ID NO: 1887622
gaaagaacccucuggaguu

SEQ ID NO: 2485127 - RNA, 19 nt, Artificial Sequence
  Description of Artificial Sequence: Synthetic oligonucleotide
  Antisense strand to SEQ ID NO: 2485126
aacuccagaggguucuuuc

SEQ ID NO: 2485128 - RNA, 19 nt, Artificial Sequence
  Description of Artificial Sequence: Synthetic oligonucleotide
  Sense strand starting at position 1052 of SEQ ID NO: 1887622
aacgcuugacuccaguuau

SEQ ID NO: 2485129 - RNA, 19 nt, Artificial Sequence
  Description of Artificial Sequence: Synthetic oligonucleotide
  Antisense strand to SEQ ID NO: 2485128
auaacuggagucaagcguu

SEQ ID NO: 2485130 - RNA, 19 nt, Artificial Sequence
  Description of Artificial Sequence: Synthetic oligonucleotide
  Sense strand starting at position 1063 of SEQ ID NO: 1887622
ccaguuauuagaggcugca

SEQ ID NO: 2485131 - RNA, 19 nt, Artificial Sequence
  Description of Artificial Sequence: Synthetic oligonucleotide
  Antisense strand to SEQ ID NO: 2485130
ugcagccucuaauaacugg

SEQ ID NO: 2485132 - RNA, 19 nt, Artificial Sequence
  Description of Artificial Sequence: Synthetic oligonucleotide
  Sense strand starting at position 2123 of SEQ ID NO: 1887622
ugcaccuagaucugggaaa

SEQ ID NO: 2485133 - RNA, 19 nt, Artificial Sequence
  Description of Artificial Sequence: Synthetic oligonucleotide
  Antisense strand to SEQ ID NO: 2485132
uuucccagaucuaggugca

SEQ ID NO: 2485134 - RNA, 19 nt, Artificial Sequence
  Description of Artificial Sequence: Synthetic oligonucleotide
  Sense strand starting at position 2253 of SEQ ID NO: 1887622
caaagugauccuggaggug

SEQ ID NO: 2485135 - RNA, 19 nt, Artificial Sequence
  Description of Artificial Sequence: Synthetic oligonucleotide
  Antisense strand to SEQ ID NO: 2485134
caccuccaggaucacuuug

SEQ ID NO: 2485136 - RNA, 19 nt, Artificial Sequence
  Description of Artificial Sequence: Synthetic oligonucleotide
  Sense strand starting at position 2343 of SEQ ID NO: 1887622
uuccaaguguucccgggaa

SEQ ID NO: 2485137 - RNA, 19 nt, Artificial Sequence
  Description of Artificial Sequence: Synthetic oligonucleotide
  Antisense strand to SEQ ID NO: 2485136
uucccgggaacacuuggaa

SEQ ID NO: 2485138 - RNA, 19 nt, Artificial Sequence
  Description of Artificial Sequence: Synthetic oligonucleotide
  Sense strand starting at position 2345 of SEQ ID NO: 1887622
ccaaguguucccgggaagu

SEQ ID NO: 2485139 - RNA, 19 nt, Artificial Sequence
  Description of Artificial Sequence: Synthetic oligonucleotide
  Antisense strand to SEQ ID NO: 2485138
acuucccgggaacacuugg

SEQ ID NO: 2485140 - RNA, 19 nt, Artificial Sequence
  Description of Artificial Sequence: Synthetic oligonucleotide
  Sense strand starting at position 2347 of SEQ ID NO: 1887622
aaguguucccgggaagucu

SEQ ID NO: 2485141 - RNA, 19 nt, Artificial Sequence
  Description of Artificial Sequence: Synthetic oligonucleotide
  Antisense strand to SEQ ID NO: 2485140
agacuucccgggaacacuu

SEQ ID NO: 2485142 - RNA, 19 nt, Artificial Sequence
  Description of Artificial Sequence: Synthetic oligonucleotide
  Sense strand starting at position 2435 of SEQ ID NO: 1887622
guaauacguucugggagcu

SEQ ID NO: 2485143 - RNA, 19 nt, Artificial Sequence
  Description of Artificial Sequence: Synthetic oligonucleotide
  Antisense strand to SEQ ID NO: 2485142
agcucccagaacguauuac

SEQ ID NO: 2485144 - RNA, 19 nt, Artificial Sequence
  Description of Artificial Sequence: Synthetic oligonucleotide
  Sense strand starting at position 2445 of SEQ ID NO: 1887622
cugggagcuucacugaguu

SEQ ID NO: 2485145 - RNA, 19 nt, Artificial Sequence
  Description of Artificial Sequence: Synthetic oligonucleotide
  Antisense strand to SEQ ID NO: 2485144
aacucagugaagcucccag

SEQ ID NO: 2485146 - RNA, 19 nt, Artificial Sequence
  Description of Artificial Sequence: Synthetic oligonucleotide
  Sense strand starting at position 2744 of SEQ ID NO: 1887622
agucccuuccuccagugau

SEQ ID NO: 2485147 - RNA, 19 nt, Artificial Sequence
  Description of Artificial Sequence: Synthetic oligonucleotide
  Antisense strand to SEQ ID NO: 2485146
aucacuggaggaagggacu

SEQ ID NO: 2485148 - RNA, 19 nt, Artificial Sequence
  Description of Artificial Sequence: Synthetic oligonucleotide
  Sense strand starting at position 3032 of SEQ ID NO: 1887622
cgagauaccugucccuaca

SEQ ID NO: 2485149 - RNA, 19 nt, Artificial Sequence
  Description of Artificial Sequence: Synthetic oligonucleotide
  Antisense strand to SEQ ID NO: 2485148
uguagggacagguaucucg

SEQ ID NO: 2485150 - RNA, 19 nt, Artificial Sequence
  Description of Artificial Sequence: Synthetic oligonucleotide
  Sense strand starting at position 3069 of SEQ ID NO: 1887622
gguguagugagccuguagu

SEQ ID NO: 2485151 - RNA, 19 nt, Artificial Sequence
  Description of Artificial Sequence: Synthetic oligonucleotide
  Antisense strand to SEQ ID NO: 2485150
acuacaggcucacuacacc

SEQ ID NO: 2485152 - RNA, 19 nt, Artificial Sequence
  Description of Artificial Sequence: Synthetic oligonucleotide
  Sense strand starting at position 3130 of SEQ ID NO: 1887622
ccaagaguucgaggcucga

SEQ ID NO: 2485153 - RNA, 19 nt, Artificial Sequence
  Description of Artificial Sequence: Synthetic oligonucleotide
  Antisense strand to SEQ ID NO: 2485152
ucgagccucgaacucuugg

SEQ ID NO: 2485154 - RNA, 19 nt, Artificial Sequence
  Description of Artificial Sequence: Synthetic oligonucleotide
  Sense strand starting at position 3572 of SEQ ID NO: 1887622
cuaagccaguccucaaaga

SEQ ID NO: 2485155 - RNA, 19 nt, Artificial Sequence
  Description of Artificial Sequence: Synthetic oligonucleotide
  Antisense strand to SEQ ID NO: 2485154
ucuuugaggacuggcuuag

SEQ ID NO: 2485156 - RNA, 19 nt, Artificial Sequence
  Description of Artificial Sequence: Synthetic oligonucleotide
  Sense strand starting at position 3956 of SEQ ID NO: 1887622
gccugaucggcuucucuuu

SEQ ID NO: 2485157 - RNA, 19 nt, Artificial Sequence
  Description of Artificial Sequence: Synthetic oligonucleotide
  Antisense strand to SEQ ID NO: 2485156
aaagagaagccgaucaggc

SEQ ID NO: 2485158 - RNA, 19 nt, Artificial Sequence
  Description of Artificial Sequence: Synthetic oligonucleotide
  Sense strand starting at position 69 of SEQ ID NO: 1887623
agcaguuaccaguaacuua

SEQ ID NO: 2485159 - RNA, 19 nt, Artificial Sequence
  Description of Artificial Sequence: Synthetic oligonucleotide
  Antisense strand to SEQ ID NO: 2485158
uaaguuacugguaacugcu

SEQ ID NO: 2485160 - RNA, 19 nt, Artificial Sequence
  Description of Artificial Sequence: Synthetic oligonucleotide
  Sense strand starting at position 207 of SEQ ID NO: 1887623
ccagcugucucugaaagga

SEQ ID NO: 2485161 - RNA, 19 nt, Artificial Sequence
  Description of Artificial Sequence: Synthetic oligonucleotide
  Antisense strand to SEQ ID NO: 2485160
uccuuucagagacagcugg

SEQ ID NO: 2485162 - RNA, 19 nt, Artificial Sequence
  Description of Artificial Sequence: Synthetic oligonucleotide
  Sense strand starting at position 215 of SEQ ID NO: 1887623
cucugaaaggaguguggua

SEQ ID NO: 2485163 - RNA, 19 nt, Artificial Sequence
  Description of Artificial Sequence: Synthetic oligonucleotide
  Antisense strand to SEQ ID NO: 2485162
uaccacacuccuuucagag

SEQ ID NO: 2485164 - RNA, 19 nt, Artificial Sequence
  Description of Artificial Sequence: Synthetic oligonucleotide
  Sense strand starting at position 228 of SEQ ID NO: 1887623
gugguagucccaggcucau

SEQ ID NO: 2485165 - RNA, 19 nt, Artificial Sequence
  Description of Artificial Sequence: Synthetic oligonucleotide
  Antisense strand to SEQ ID NO: 2485164
augagccugggacuaccac

SEQ ID NO: 2485166 - RNA, 19 nt, Artificial Sequence
  Description of Artificial Sequence: Synthetic oligonucleotide
  Sense strand starting at position 298 of SEQ ID NO: 1887623
cuggucucccuccaagagu

SEQ ID NO: 2485167 - RNA, 19 nt, Artificial Sequence
  Description of Artificial Sequence: Synthetic oligonucleotide
  Antisense strand to SEQ ID NO: 2485166
acucuuggagggagaccag

SEQ ID NO: 2485168 - RNA, 19 nt, Artificial Sequence
  Description of Artificial Sequence: Synthetic oligonucleotide
  Sense strand starting at position 324 of SEQ ID NO: 1887623
ucgguugucuuaguggaac

SEQ ID NO: 2485169 - RNA, 19 nt, Artificial Sequence
  Description of Artificial Sequence: Synthetic oligonucleotide
  Antisense strand to SEQ ID NO: 2485168
guuccacuaagacaaccga

SEQ ID NO: 2485170 - RNA, 19 nt, Artificial Sequence
  Description of Artificial Sequence: Synthetic oligonucleotide
  Sense strand starting at position 834 of SEQ ID NO: 1887623
gaaagaacccucuggaguu

SEQ ID NO: 2485171 - RNA, 19 nt, Artificial Sequence
  Description of Artificial Sequence: Synthetic oligonucleotide
  Antisense strand to SEQ ID NO: 2485170
aacuccagaggguucuuuc

SEQ ID NO: 2485172 - RNA, 19 nt, Artificial Sequence
  Description of Artificial Sequence: Synthetic oligonucleotide
  Sense strand starting at position 1228 of SEQ ID NO: 1887623
aacgcuugacuccaguuau

SEQ ID NO: 2485173 - RNA, 19 nt, Artificial Sequence
  Description of Artificial Sequence: Synthetic oligonucleotide
  Antisense strand to SEQ ID NO: 2485172
auaacuggagucaagcguu

SEQ ID NO: 2485174 - RNA, 19 nt, Artificial Sequence
  Description of Artificial Sequence: Synthetic oligonucleotide
  Sense strand starting at position 1239 of SEQ ID NO: 1887623
ccaguuauuagaggcugca

SEQ ID NO: 2485175 - RNA, 19 nt, Artificial Sequence
  Description of Artificial Sequence: Synthetic oligonucleotide
  Antisense strand to SEQ ID NO: 2485174
ugcagccucuaauaacugg

SEQ ID NO: 2485176 - RNA, 19 nt, Artificial Sequence
  Description of Artificial Sequence: Synthetic oligonucleotide
  Sense strand starting at position 2299 of SEQ ID NO: 1887623
ugcaccuagaucugggaaa

SEQ ID NO: 2485177 - RNA, 19 nt, Artificial Sequence
  Description of Artificial Sequence: Synthetic oligonucleotide
  Antisense strand to SEQ ID NO: 2485176
uuucccagaucuaggugca

SEQ ID NO: 2485178 - RNA, 19 nt, Artificial Sequence
  Description of Artificial Sequence: Synthetic oligonucleotide
  Sense strand starting at position 2429 of SEQ ID NO: 1887623
caaagugauccuggaggug

SEQ ID NO: 2485179 - RNA, 19 nt, Artificial Sequence
  Description of Artificial Sequence: Synthetic oligonucleotide
  Antisense strand to SEQ ID NO: 2485178
caccuccaggaucacuuug

SEQ ID NO: 2485180 - RNA, 19 nt, Artificial Sequence
  Description of Artificial Sequence: Synthetic oligonucleotide
  Sense strand starting at position 2519 of SEQ ID NO: 1887623
uuccaaguguucccgggaa

SEQ ID NO: 2485181 - RNA, 19 nt, Artificial Sequence
  Description of Artificial Sequence: Synthetic oligonucleotide
  Antisense strand to SEQ ID NO: 2485180
uucccgggaacacuuggaa

SEQ ID NO: 2485182 - RNA, 19 nt, Artificial Sequence
  Description of Artificial Sequence: Synthetic oligonucleotide
  Sense strand starting at position 2521 of SEQ ID NO: 1887623
ccaaguguucccgggaagu

SEQ ID NO: 2485183 - RNA, 19 nt, Artificial Sequence
  Description of Artificial Sequence: Synthetic oligonucleotide
  Antisense strand to SEQ ID NO: 2485182
acuucccgggaacacuugg

SEQ ID NO: 2485184 - RNA, 19 nt, Artificial Sequence
  Description of Artificial Sequence: Synthetic oligonucleotide
  Sense strand starting at position 2523 of SEQ ID NO: 1887623
aaguguucccgggaagucu

SEQ ID NO: 2485185 - RNA, 19 nt, Artificial Sequence
  Description of Artificial Sequence: Synthetic oligonucleotide
  Antisense strand to SEQ ID NO: 2485184
agacuucccgggaacacuu

SEQ ID NO: 2485186 - RNA, 19 nt, Artificial Sequence
  Description of Artificial Sequence: Synthetic oligonucleotide
  Sense strand starting at position 2611 of SEQ ID NO: 1887623
guaauacguucugggagcu

SEQ ID NO: 2485187 - RNA, 19 nt, Artificial Sequence
  Description of Artificial Sequence: Synthetic oligonucleotide
  Antisense strand to SEQ ID NO: 2485186
agcucccagaacguauuac

SEQ ID NO: 2485188 - RNA, 19 nt, Artificial Sequence
  Description of Artificial Sequence: Synthetic oligonucleotide
  Sense strand starting at position 2621 of SEQ ID NO: 1887623
cugggagcuucacugaguu

SEQ ID NO: 2485189 - RNA, 19 nt, Artificial Sequence
  Description of Artificial Sequence: Synthetic oligonucleotide
  Antisense strand to SEQ ID NO: 2485188
aacucagugaagcucccag

SEQ ID NO: 2485190 - RNA, 19 nt, Artificial Sequence
  Description of Artificial Sequence: Synthetic oligonucleotide
  Sense strand starting at position 2920 of SEQ ID NO: 1887623
agucccuuccuccagugau

SEQ ID NO: 2485191 - RNA, 19 nt, Artificial Sequence
  Description of Artificial Sequence: Synthetic oligonucleotide
  Antisense strand to SEQ ID NO: 2485190
aucacuggaggaagggacu

SEQ ID NO: 2485192 - RNA, 19 nt, Artificial Sequence
  Description of Artificial Sequence: Synthetic oligonucleotide
  Sense strand starting at position 3208 of SEQ ID NO: 1887623
cgagauaccugucccuaca

SEQ ID NO: 2485193 - RNA, 19 nt, Artificial Sequence
  Description of Artificial Sequence: Synthetic oligonucleotide
  Antisense strand to SEQ ID NO: 2485192
uguagggacagguaucucg

SEQ ID NO: 2485194 - RNA, 19 nt, Artificial Sequence
  Description of Artificial Sequence: Synthetic oligonucleotide
  Sense strand starting at position 3245 of SEQ ID NO: 1887623
gguguagugagccuguagu

SEQ ID NO: 2485195 - RNA, 19 nt, Artificial Sequence
  Description of Artificial Sequence: Synthetic oligonucleotide
  Antisense strand to SEQ ID NO: 2485194
acuacaggcucacuacacc

SEQ ID NO: 2485196 - RNA, 19 nt, Artificial Sequence
  Description of Artificial Sequence: Synthetic oligonucleotide
  Sense strand starting at position 3306 of SEQ ID NO: 1887623
ccaagaguucgaggcucga

SEQ ID NO: 2485197 - RNA, 19 nt, Artificial Sequence
  Description of Artificial Sequence: Synthetic oligonucleotide
  Antisense strand to SEQ ID NO: 2485196
ucgagccucgaacucuugg

SEQ ID NO: 2485198 - RNA, 19 nt, Artificial Sequence
  Description of Artificial Sequence: Synthetic oligonucleotide
  Sense strand starting at position 3748 of SEQ ID NO: 1887623
cuaagccaguccucaaaga

SEQ ID NO: 2485199 - RNA, 19 nt, Artificial Sequence
  Description of Artificial Sequence: Synthetic oligonucleotide
  Antisense strand to SEQ ID NO: 2485198
ucuuugaggacuggcuuag

SEQ ID NO: 2485200 - RNA, 19 nt, Artificial Sequence
  Description of Artificial Sequence: Synthetic oligonucleotide
  Sense strand starting at position 178 of SEQ ID NO: 1887624
gugggagagucacuaguca

SEQ ID NO: 2485201 - RNA, 19 nt, Artificial Sequence
  Description of Artificial Sequence: Synthetic oligonucleotide
  Antisense strand to SEQ ID NO: 2485200
ugacuagugacucucccac

SEQ ID NO: 2485202 - RNA, 19 nt, Artificial Sequence
  Description of Artificial Sequence: Synthetic oligonucleotide
  Sense strand starting at position 182 of SEQ ID NO: 1887624
gagagucacuagucacaag

SEQ ID NO: 2485203 - RNA, 19 nt, Artificial Sequence
  Description of Artificial Sequence: Synthetic oligonucleotide
  Antisense strand to SEQ ID NO: 2485202
cuugugacuagugacucuc

SEQ ID NO: 2485204 - RNA, 19 nt, Artificial Sequence
  Description of Artificial Sequence: Synthetic oligonucleotide
  Sense strand starting at position 434 of SEQ ID NO: 1887624
ccgcaaggcucaucacuuu

SEQ ID NO: 2485205 - RNA, 19 nt, Artificial Sequence
  Description of Artificial Sequence: Synthetic oligonucleotide
  Antisense strand to SEQ ID NO: 2485204
aaagugaugagccuugcgg

SEQ ID NO: 2485206 - RNA, 19 nt, Artificial Sequence
  Description of Artificial Sequence: Synthetic oligonucleotide
  Sense strand starting at position 905 of SEQ ID NO: 1887624
cugcguugaugggaagaga

SEQ ID NO: 2485207 - RNA, 19 nt, Artificial Sequence
  Description of Artificial Sequence: Synthetic oligonucleotide
  Antisense strand to SEQ ID NO: 2485206
ucucuucccaucaacgcag

SEQ ID NO: 2485208 - RNA, 19 nt, Artificial Sequence
  Description of Artificial Sequence: Synthetic oligonucleotide
  Sense strand starting at position 1352 of SEQ ID NO: 1887624
cgcucuucccggugggaaa

SEQ ID NO: 2485209 - RNA, 19 nt, Artificial Sequence
  Description of Artificial Sequence: Synthetic oligonucleotide
  Antisense strand to SEQ ID NO: 2485208
uuucccaccgggaagagcg

SEQ ID NO: 2485210 - RNA, 19 nt, Artificial Sequence
  Description of Artificial Sequence: Synthetic oligonucleotide
  Sense strand starting at position 1364 of SEQ ID NO: 1887624
ugggaaagaugcugugcaa

SEQ ID NO: 2485211 - RNA, 19 nt, Artificial Sequence
  Description of Artificial Sequence: Synthetic oligonucleotide
  Antisense strand to SEQ ID NO: 2485210
uugcacagcaucuuuccca

SEQ ID NO: 2485212 - RNA, 19 nt, Artificial Sequence
  Description of Artificial Sequence: Synthetic oligonucleotide
  Sense strand starting at position 1367 of SEQ ID NO: 1887624
gaaagaugcugugcaaguc

SEQ ID NO: 2485213 - RNA, 19 nt, Artificial Sequence
  Description of Artificial Sequence: Synthetic oligonucleotide
  Antisense strand to SEQ ID NO: 2485212
gacuugcacagcaucuuuc

SEQ ID NO: 2485214 - RNA, 19 nt, Artificial Sequence
  Description of Artificial Sequence: Synthetic oligonucleotide
  Sense strand starting at position 1375 of SEQ ID NO: 1887624
cugugcaagucaucagguu

SEQ ID NO: 2485215 - RNA, 19 nt, Artificial Sequence
  Description of Artificial Sequence: Synthetic oligonucleotide
  Antisense strand to SEQ ID NO: 2485214
aaccugaugacuugcacag

SEQ ID NO: 2485216 - RNA, 19 nt, Artificial Sequence
  Description of Artificial Sequence: Synthetic oligonucleotide
  Sense strand starting at position 1376 of SEQ ID NO: 1887624
ugugcaagucaucagguuu

SEQ ID NO: 2485217 - RNA, 19 nt, Artificial Sequence
  Description of Artificial Sequence: Synthetic oligonucleotide
  Antisense strand to SEQ ID NO: 2485216
aaaccugaugacuugcaca

SEQ ID NO: 2485218 - RNA, 19 nt, Artificial Sequence
  Description of Artificial Sequence: Synthetic oligonucleotide
  Sense strand starting at position 1382 of SEQ ID NO: 1887624
agucaucagguuuaaauua

SEQ ID NO: 2485219 - RNA, 19 nt, Artificial Sequence
  Description of Artificial Sequence: Synthetic oligonucleotide
  Antisense strand to SEQ ID NO: 2485218
uaauuuaaaccugaugacu

SEQ ID NO: 2485220 - RNA, 19 nt, Artificial Sequence
  Description of Artificial Sequence: Synthetic oligonucleotide
  Sense strand starting at position 1743 of SEQ ID NO: 1887624
ggagauuuauugcacuguu

SEQ ID NO: 2485221 - RNA, 19 nt, Artificial Sequence
  Description of Artificial Sequence: Synthetic oligonucleotide
  Antisense strand to SEQ ID NO: 2485220
aacagugcaauaaaucucc

SEQ ID NO: 2485222 - RNA, 19 nt, Artificial Sequence
  Description of Artificial Sequence: Synthetic oligonucleotide
  Sense strand starting at position 1824 of SEQ ID NO: 1887624
ggcgucaucgcuuggucuu

SEQ ID NO: 2485223 - RNA, 19 nt, Artificial Sequence
  Description of Artificial Sequence: Synthetic oligonucleotide
  Antisense strand to SEQ ID NO: 2485222
aagaccaagcgaugacgcc

SEQ ID NO: 2485224 - RNA, 19 nt, Artificial Sequence
  Description of Artificial Sequence: Synthetic oligonucleotide
  Sense strand starting at position 1842 of SEQ ID NO: 1887624
uggcgucuucucgaaccuu

SEQ ID NO: 2485225 - RNA, 19 nt, Artificial Sequence
  Description of Artificial Sequence: Synthetic oligonucleotide
  Antisense strand to SEQ ID NO: 2485224
aagguucgagaagacgcca

SEQ ID NO: 2485226 - RNA, 19 nt, Artificial Sequence
  Description of Artificial Sequence: Synthetic oligonucleotide
  Sense strand starting at position 1850 of SEQ ID NO: 1887624
ucucgaaccuuccagauca

SEQ ID NO: 2485227 - RNA, 19 nt, Artificial Sequence
  Description of Artificial Sequence: Synthetic oligonucleotide
  Antisense strand to SEQ ID NO: 2485226
ugaucuggaagguucgaga

SEQ ID NO: 2485228 - RNA, 19 nt, Artificial Sequence
  Description of Artificial Sequence: Synthetic oligonucleotide
  Sense strand starting at position 1983 of SEQ ID NO: 1887624
ucaccauuguccuggauga

SEQ ID NO: 2485229 - RNA, 19 nt, Artificial Sequence
  Description of Artificial Sequence: Synthetic oligonucleotide
  Antisense strand to SEQ ID NO: 2485228
ucauccaggacaaugguga

SEQ ID NO: 2485230 - RNA, 19 nt, Artificial Sequence
  Description of Artificial Sequence: Synthetic oligonucleotide
  Sense strand starting at position 1984 of SEQ ID NO: 1887624
caccauuguccuggaugau

SEQ ID NO: 2485231 - RNA, 19 nt, Artificial Sequence
  Description of Artificial Sequence: Synthetic oligonucleotide
  Antisense strand to SEQ ID NO: 2485230
aucauccaggacaauggug

SEQ ID NO: 2485232 - RNA, 19 nt, Artificial Sequence
  Description of Artificial Sequence: Synthetic oligonucleotide
  Sense strand starting at position 1985 of SEQ ID NO: 1887624
accauuguccuggaugauc

SEQ ID NO: 2485233 - RNA, 19 nt, Artificial Sequence
  Description of Artificial Sequence: Synthetic oligonucleotide
  Antisense strand to SEQ ID NO: 2485232
gaucauccaggacaauggu

SEQ ID NO: 2485234 - RNA, 19 nt, Artificial Sequence
  Description of Artificial Sequence: Synthetic oligonucleotide
  Sense strand starting at position 1996 of SEQ ID NO: 1887624
ggaugaucugucugaggua

SEQ ID NO: 2485235 - RNA, 19 nt, Artificial Sequence
  Description of Artificial Sequence: Synthetic oligonucleotide
  Antisense strand to SEQ ID NO: 2485234
uaccucagacagaucaucc

SEQ ID NO: 2485236 - RNA, 19 nt, Artificial Sequence
  Description of Artificial Sequence: Synthetic oligonucleotide
  Sense strand starting at position 1997 of SEQ ID NO: 1887624
gaugaucugucugagguag

SEQ ID NO: 2485237 - RNA, 19 nt, Artificial Sequence
  Description of Artificial Sequence: Synthetic oligonucleotide
  Antisense strand to SEQ ID NO: 2485236
cuaccucagacagaucauc

SEQ ID NO: 2485238 - RNA, 19 nt, Artificial Sequence
  Description of Artificial Sequence: Synthetic oligonucleotide
  Sense strand starting at position 1999 of SEQ ID NO: 1887624
ugaucugucugagguaguc

SEQ ID NO: 2485239 - RNA, 19 nt, Artificial Sequence
  Description of Artificial Sequence: Synthetic oligonucleotide
  Antisense strand to SEQ ID NO: 2485238
gacuaccucagacagauca

SEQ ID NO: 2485240 - RNA, 19 nt, Artificial Sequence
  Description of Artificial Sequence: Synthetic oligonucleotide
  Sense strand starting at position 2011 of SEQ ID NO: 1887624
gguagucggccaugagguu

SEQ ID NO: 2485241 - RNA, 19 nt, Artificial Sequence
  Description of Artificial Sequence: Synthetic oligonucleotide
  Antisense strand to SEQ ID NO: 2485240
aaccucauggccgacuacc

SEQ ID NO: 2485242 - RNA, 19 nt, Artificial Sequence
  Description of Artificial Sequence: Synthetic oligonucleotide
  Sense strand starting at position 2219 of SEQ ID NO: 1887624
ggcuguguccgaugaggau

SEQ ID NO: 2485243 - RNA, 19 nt, Artificial Sequence
  Description of Artificial Sequence: Synthetic oligonucleotide
  Antisense strand to SEQ ID NO: 2485242
auccucaucggacacagcc

SEQ ID NO: 2485244 - RNA, 19 nt, Artificial Sequence
  Description of Artificial Sequence: Synthetic oligonucleotide
  Sense strand starting at position 2234 of SEQ ID NO: 1887624
ggauggugucagcgcugaa

SEQ ID NO: 2485245 - RNA, 19 nt, Artificial Sequence
  Description of Artificial Sequence: Synthetic oligonucleotide
  Antisense strand to SEQ ID NO: 2485244
uucagcgcugacaccaucc

SEQ ID NO: 2485246 - RNA, 19 nt, Artificial Sequence
  Description of Artificial Sequence: Synthetic oligonucleotide
  Sense strand starting at position 2237 of SEQ ID NO: 1887624
uggugucagcgcugaacau

SEQ ID NO: 2485247 - RNA, 19 nt, Artificial Sequence
  Description of Artificial Sequence: Synthetic oligonucleotide
  Antisense strand to SEQ ID NO: 2485246
auguucagcgcugacacca

SEQ ID NO: 2485248 - RNA, 19 nt, Artificial Sequence
  Description of Artificial Sequence: Synthetic oligonucleotide
  Sense strand starting at position 2290 of SEQ ID NO: 1887624
acacuugugucggcaaggu

SEQ ID NO: 2485249 - RNA, 19 nt, Artificial Sequence
  Description of Artificial Sequence: Synthetic oligonucleotide
  Antisense strand to SEQ ID NO: 2485248
accuugccgacacaagugu

SEQ ID NO: 2485250 - RNA, 19 nt, Artificial Sequence
  Description of Artificial Sequence: Synthetic oligonucleotide
  Sense strand starting at position 2494 of SEQ ID NO: 1887624
ucacgaaggugucauaaac

SEQ ID NO: 2485251 - RNA, 19 nt, Artificial Sequence
  Description of Artificial Sequence: Synthetic oligonucleotide
  Antisense strand to SEQ ID NO: 2485250
guuuaugacaccuucguga

SEQ ID NO: 2485252 - RNA, 19 nt, Artificial Sequence
  Description of Artificial Sequence: Synthetic oligonucleotide
  Sense strand starting at position 2557 of SEQ ID NO: 1887624
ggccauaugugguguagga

SEQ ID NO: 2485253 - RNA, 19 nt, Artificial Sequence
  Description of Artificial Sequence: Synthetic oligonucleotide
  Antisense strand to SEQ ID NO: 2485252
uccuacaccacauauggcc

SEQ ID NO: 2485254 - RNA, 19 nt, Artificial Sequence
  Description of Artificial Sequence: Synthetic oligonucleotide
  Sense strand starting at position 2559 of SEQ ID NO: 1887624
ccauaugugguguaggacu

SEQ ID NO: 2485255 - RNA, 19 nt, Artificial Sequence
  Description of Artificial Sequence: Synthetic oligonucleotide
  Antisense strand to SEQ ID NO: 2485254
aguccuacaccacauaugg

SEQ ID NO: 2485256 - RNA, 19 nt, Artificial Sequence
  Description of Artificial Sequence: Synthetic oligonucleotide
  Sense strand starting at position 2587 of SEQ ID NO: 1887624
ggaugcaccucagaugugu

SEQ ID NO: 2485257 - RNA, 19 nt, Artificial Sequence
  Description of Artificial Sequence: Synthetic oligonucleotide
  Antisense strand to SEQ ID NO: 2485256
acacaucugaggugcaucc

SEQ ID NO: 2485258 - RNA, 19 nt, Artificial Sequence
  Description of Artificial Sequence: Synthetic oligonucleotide
  Sense strand starting at position 2801 of SEQ ID NO: 1887624
uuggcucugcugggaagua

SEQ ID NO: 2485259 - RNA, 19 nt, Artificial Sequence
  Description of Artificial Sequence: Synthetic oligonucleotide
  Antisense strand to SEQ ID NO: 2485258
uacuucccagcagagccaa

SEQ ID NO: 2485260 - RNA, 19 nt, Artificial Sequence
  Description of Artificial Sequence: Synthetic oligonucleotide
  Sense strand starting at position 2802 of SEQ ID NO: 1887624
uggcucugcugggaaguau

SEQ ID NO: 2485261 - RNA, 19 nt, Artificial Sequence
  Description of Artificial Sequence: Synthetic oligonucleotide
  Antisense strand to SEQ ID NO: 2485260
auacuucccagcagagcca

SEQ ID NO: 2485262 - RNA, 19 nt, Artificial Sequence
  Description of Artificial Sequence: Synthetic oligonucleotide
  Sense strand starting at position 2852 of SEQ ID NO: 1887624
accggugcugcgagagaaa

SEQ ID NO: 2485263 - RNA, 19 nt, Artificial Sequence
  Description of Artificial Sequence: Synthetic oligonucleotide
  Antisense strand to SEQ ID NO: 2485262
uuucucucgcagcaccggu

SEQ ID NO: 2485264 - RNA, 19 nt, Artificial Sequence
  Description of Artificial Sequence: Synthetic oligonucleotide
  Sense strand starting at position 3009 of SEQ ID NO: 1887624
gggugggugucuccugaga

SEQ ID NO: 2485265 - RNA, 19 nt, Artificial Sequence
  Description of Artificial Sequence: Synthetic oligonucleotide
  Antisense strand to SEQ ID NO: 2485264
ucucaggagacacccaccc

SEQ ID NO: 2485266 - RNA, 19 nt, Artificial Sequence
  Description of Artificial Sequence: Synthetic oligonucleotide
  Sense strand starting at position 3025 of SEQ ID NO: 1887624
agagcucuuucucaaaggu

SEQ ID NO: 2485267 - RNA, 19 nt, Artificial Sequence
  Description of Artificial Sequence: Synthetic oligonucleotide
  Antisense strand to SEQ ID NO: 2485266
accuuugagaaagagcucu

SEQ ID NO: 2485268 - RNA, 19 nt, Artificial Sequence
  Description of Artificial Sequence: Synthetic oligonucleotide
  Sense strand starting at position 3318 of SEQ ID NO: 1887624
gugcuacguucucugggua

SEQ ID NO: 2485269 - RNA, 19 nt, Artificial Sequence
  Description of Artificial Sequence: Synthetic oligonucleotide
  Antisense strand to SEQ ID NO: 2485268
uacccagagaacguagcac

SEQ ID NO: 2485270 - RNA, 19 nt, Artificial Sequence
  Description of Artificial Sequence: Synthetic oligonucleotide
  Sense strand starting at position 3319 of SEQ ID NO: 1887624
ugcuacguucucuggguaa

SEQ ID NO: 2485271 - RNA, 19 nt, Artificial Sequence
  Description of Artificial Sequence: Synthetic oligonucleotide
  Antisense strand to SEQ ID NO: 2485270
uuacccagagaacguagca

SEQ ID NO: 2485272 - RNA, 19 nt, Artificial Sequence
  Description of Artificial Sequence: Synthetic oligonucleotide
  Sense strand starting at position 3321 of SEQ ID NO: 1887624
cuacguucucuggguaaca

SEQ ID NO: 2485273 - RNA, 19 nt, Artificial Sequence
  Description of Artificial Sequence: Synthetic oligonucleotide
  Antisense strand to SEQ ID NO: 2485272
uguuacccagagaacguag

SEQ ID NO: 2485274 - RNA, 19 nt, Artificial Sequence
  Description of Artificial Sequence: Synthetic oligonucleotide
  Sense strand starting at position 3323 of SEQ ID NO: 1887624
acguucucuggguaacaca

SEQ ID NO: 2485275 - RNA, 19 nt, Artificial Sequence
  Description of Artificial Sequence: Synthetic oligonucleotide
  Antisense strand to SEQ ID NO: 2485274
uguguuacccagagaacgu

SEQ ID NO: 2485276 - RNA, 19 nt, Artificial Sequence
  Description of Artificial Sequence: Synthetic oligonucleotide
  Sense strand starting at position 3419 of SEQ ID NO: 1887624
gcagaagucuguugagaac

SEQ ID NO: 2485277 - RNA, 19 nt, Artificial Sequence
  Description of Artificial Sequence: Synthetic oligonucleotide
  Antisense strand to SEQ ID NO: 2485276
guucucaacagacuucugc

SEQ ID NO: 2485278 - RNA, 19 nt, Artificial Sequence
  Description of Artificial Sequence: Synthetic oligonucleotide
  Sense strand starting at position 3796 of SEQ ID NO: 1887624
ccagguaucccugaggcga

SEQ ID NO: 2485279 - RNA, 19 nt, Artificial Sequence
  Description of Artificial Sequence: Synthetic oligonucleotide
  Antisense strand to SEQ ID NO: 2485278
ucgccucagggauaccugg

SEQ ID NO: 2485280 - RNA, 19 nt, Artificial Sequence
  Description of Artificial Sequence: Synthetic oligonucleotide
  Sense strand starting at position 24 of SEQ ID NO: 1887625
cugcaugugucccagguuu

SEQ ID NO: 2485281 - RNA, 19 nt, Artificial Sequence
  Description of Artificial Sequence: Synthetic oligonucleotide
  Antisense strand to SEQ ID NO: 2485280
aaaccugggacacaugcag

SEQ ID NO: 2485282 - RNA, 19 nt, Artificial Sequence
  Description of Artificial Sequence: Synthetic oligonucleotide
  Sense strand starting at position 287 of SEQ ID NO: 1887625
gggaaugcucuguaggagu

SEQ ID NO: 2485283 - RNA, 19 nt, Artificial Sequence
  Description of Artificial Sequence: Synthetic oligonucleotide
  Antisense strand to SEQ ID NO: 2485282
acuccuacagagcauuccc

SEQ ID NO: 2485284 - RNA, 19 nt, Artificial Sequence
  Description of Artificial Sequence: Synthetic oligonucleotide
  Sense strand starting at position 370 of SEQ ID NO: 1887625
gucccagacuuagagagaa

SEQ ID NO: 2485285 - RNA, 19 nt, Artificial Sequence
  Description of Artificial Sequence: Synthetic oligonucleotide
  Antisense strand to SEQ ID NO: 2485284
uucucucuaagucugggac

SEQ ID NO: 2485286 - RNA, 19 nt, Artificial Sequence
  Description of Artificial Sequence: Synthetic oligonucleotide
  Sense strand starting at position 470 of SEQ ID NO: 1887625
gggcucauuggcuaagaga

SEQ ID NO: 2485287 - RNA, 19 nt, Artificial Sequence
  Description of Artificial Sequence: Synthetic oligonucleotide
  Antisense strand to SEQ ID NO: 2485286
ucucuuagccaaugagccc

SEQ ID NO: 2485288 - RNA, 19 nt, Artificial Sequence
  Description of Artificial Sequence: Synthetic oligonucleotide
  Sense strand starting at position 528 of SEQ ID NO: 1887625
ugaggaaacccucacgcuu

SEQ ID NO: 2485289 - RNA, 19 nt, Artificial Sequence
  Description of Artificial Sequence: Synthetic oligonucleotide
  Antisense strand to SEQ ID NO: 2485288
aagcgugaggguuuccuca

SEQ ID NO: 2485290 - RNA, 19 nt, Artificial Sequence
  Description of Artificial Sequence: Synthetic oligonucleotide
  Sense strand starting at position 792 of SEQ ID NO: 1887625
agacgcucaucucuggaau

SEQ ID NO: 2485291 - RNA, 19 nt, Artificial Sequence
  Description of Artificial Sequence: Synthetic oligonucleotide
  Antisense strand to SEQ ID NO: 2485290
auuccagagaugagcgucu

SEQ ID NO: 2485292 - RNA, 19 nt, Artificial Sequence
  Description of Artificial Sequence: Synthetic oligonucleotide
  Sense strand starting at position 794 of SEQ ID NO: 1887625
acgcucaucucuggaaugu

SEQ ID NO: 2485293 - RNA, 19 nt, Artificial Sequence
  Description of Artificial Sequence: Synthetic oligonucleotide
  Antisense strand to SEQ ID NO: 2485292
acauuccagagaugagcgu

SEQ ID NO: 2485294 - RNA, 19 nt, Artificial Sequence
  Description of Artificial Sequence: Synthetic oligonucleotide
  Sense strand starting at position 795 of SEQ ID NO: 1887625
cgcucaucucuggaauguu

SEQ ID NO: 2485295 - RNA, 19 nt, Artificial Sequence
  Description of Artificial Sequence: Synthetic oligonucleotide
  Antisense strand to SEQ ID NO: 2485294
aacauuccagagaugagcg

SEQ ID NO: 2485296 - RNA, 19 nt, Artificial Sequence
  Description of Artificial Sequence: Synthetic oligonucleotide
  Sense strand starting at position 803 of SEQ ID NO: 1887625
ucuggaauguuccugaaac

SEQ ID NO: 2485297 - RNA, 19 nt, Artificial Sequence
  Description of Artificial Sequence: Synthetic oligonucleotide
  Antisense strand to SEQ ID NO: 2485296
guuucaggaacauuccaga

SEQ ID NO: 2485298 - RNA, 19 nt, Artificial Sequence
  Description of Artificial Sequence: Synthetic oligonucleotide
  Sense strand starting at position 804 of SEQ ID NO: 1887625
cuggaauguuccugaaacc

SEQ ID NO: 2485299 - RNA, 19 nt, Artificial Sequence
  Description of Artificial Sequence: Synthetic oligonucleotide
  Antisense strand to SEQ ID NO: 2485298
gguuucaggaacauuccag

SEQ ID NO: 2485300 - RNA, 19 nt, Artificial Sequence
  Description of Artificial Sequence: Synthetic oligonucleotide
  Sense strand starting at position 1112 of SEQ ID NO: 1887625
uccgccuugcagugagaaa

SEQ ID NO: 2485301 - RNA, 19 nt, Artificial Sequence
  Description of Artificial Sequence: Synthetic oligonucleotide
  Antisense strand to SEQ ID NO: 2485300
uuucucacugcaaggcgga

SEQ ID NO: 2485302 - RNA, 19 nt, Artificial Sequence
  Description of Artificial Sequence: Synthetic oligonucleotide
  Sense strand starting at position 1305 of SEQ ID NO: 1887625
gcagcauugcaagucuagu

SEQ ID NO: 2485303 - RNA, 19 nt, Artificial Sequence
  Description of Artificial Sequence: Synthetic oligonucleotide
  Antisense strand to SEQ ID NO: 2485302
acuagacuugcaaugcugc

SEQ ID NO: 2485304 - RNA, 19 nt, Artificial Sequence
  Description of Artificial Sequence: Synthetic oligonucleotide
  Sense strand starting at position 1366 of SEQ ID NO: 1887625
uuucucaucugagaguuga

SEQ ID NO: 2485305 - RNA, 19 nt, Artificial Sequence
  Description of Artificial Sequence: Synthetic oligonucleotide
  Antisense strand to SEQ ID NO: 2485304
ucaacucucagaugagaaa

SEQ ID NO: 2485306 - RNA, 19 nt, Artificial Sequence
  Description of Artificial Sequence: Synthetic oligonucleotide
  Sense strand starting at position 1643 of SEQ ID NO: 1887625
uuagaugccucagugagac

SEQ ID NO: 2485307 - RNA, 19 nt, Artificial Sequence
  Description of Artificial Sequence: Synthetic oligonucleotide
  Antisense strand to SEQ ID NO: 2485306
gucucacugaggcaucuaa

SEQ ID NO: 2485308 - RNA, 19 nt, Artificial Sequence
  Description of Artificial Sequence: Synthetic oligonucleotide
  Sense strand starting at position 1815 of SEQ ID NO: 1887625
ccucgaaucuucuaugcga

SEQ ID NO: 2485309 - RNA, 19 nt, Artificial Sequence
  Description of Artificial Sequence: Synthetic oligonucleotide
  Antisense strand to SEQ ID NO: 2485308
ucgcauagaagauucgagg

SEQ ID NO: 2485310 - RNA, 19 nt, Artificial Sequence
  Description of Artificial Sequence: Synthetic oligonucleotide
  Sense strand starting at position 1942 of SEQ ID NO: 1887625
ugcagacuacuguacacau

SEQ ID NO: 2485311 - RNA, 19 nt, Artificial Sequence
  Description of Artificial Sequence: Synthetic oligonucleotide
  Antisense strand to SEQ ID NO: 2485310
auguguacaguagucugca

SEQ ID NO: 2485312 - RNA, 19 nt, Artificial Sequence
  Description of Artificial Sequence: Synthetic oligonucleotide
  Sense strand starting at position 2007 of SEQ ID NO: 1887625
ggcuauccauccugcagaa

SEQ ID NO: 2485313 - RNA, 19 nt, Artificial Sequence
  Description of Artificial Sequence: Synthetic oligonucleotide
  Antisense strand to SEQ ID NO: 2485312
uucugcaggauggauagcc

SEQ ID NO: 2485314 - RNA, 19 nt, Artificial Sequence
  Description of Artificial Sequence: Synthetic oligonucleotide
  Sense strand starting at position 2097 of SEQ ID NO: 1887625
cacucuucccgagacgauc

SEQ ID NO: 2485315 - RNA, 19 nt, Artificial Sequence
  Description of Artificial Sequence: Synthetic oligonucleotide
  Antisense strand to SEQ ID NO: 2485314
gaucgucucgggaagagug

SEQ ID NO: 2485316 - RNA, 19 nt, Artificial Sequence
  Description of Artificial Sequence: Synthetic oligonucleotide
  Sense strand starting at position 2150 of SEQ ID NO: 1887625
cggcucgcaucuggagaaa

SEQ ID NO: 2485317 - RNA, 19 nt, Artificial Sequence
  Description of Artificial Sequence: Synthetic oligonucleotide
  Antisense strand to SEQ ID NO: 2485316
uuucuccagaugcgagccg

SEQ ID NO: 2485318 - RNA, 19 nt, Artificial Sequence
  Description of Artificial Sequence: Synthetic oligonucleotide
  Sense strand starting at position 2161 of SEQ ID NO: 1887625
uggagaaaguucuggguuu

SEQ ID NO: 2485319 - RNA, 19 nt, Artificial Sequence
  Description of Artificial Sequence: Synthetic oligonucleotide
  Antisense strand to SEQ ID NO: 2485318
aaacccagaacuuucucca

SEQ ID NO: 2485320 - RNA, 19 nt, Artificial Sequence
  Description of Artificial Sequence: Synthetic oligonucleotide
  Sense strand starting at position 2249 of SEQ ID NO: 1887625
ggaggaaugucugacucuu

SEQ ID NO: 2485321 - RNA, 19 nt, Artificial Sequence
  Description of Artificial Sequence: Synthetic oligonucleotide
  Antisense strand to SEQ ID NO: 2485320
aagagucagacauuccucc

SEQ ID NO: 2485322 - RNA, 19 nt, Artificial Sequence
  Description of Artificial Sequence: Synthetic oligonucleotide
  Sense strand starting at position 2366 of SEQ ID NO: 1887625
cacugauuucucggcggaa

SEQ ID NO: 2485323 - RNA, 19 nt, Artificial Sequence
  Description of Artificial Sequence: Synthetic oligonucleotide
  Antisense strand to SEQ ID NO: 2485322
uuccgccgagaaaucagug

SEQ ID NO: 2485324 - RNA, 19 nt, Artificial Sequence
  Description of Artificial Sequence: Synthetic oligonucleotide
  Sense strand starting at position 2367 of SEQ ID NO: 1887625
acugauuucucggcggaau

SEQ ID NO: 2485325 - RNA, 19 nt, Artificial Sequence
  Description of Artificial Sequence: Synthetic oligonucleotide
  Antisense strand to SEQ ID NO: 2485324
auuccgccgagaaaucagu

SEQ ID NO: 2485326 - RNA, 19 nt, Artificial Sequence
  Description of Artificial Sequence: Synthetic oligonucleotide
  Sense strand starting at position 2368 of SEQ ID NO: 1887625
cugauuucucggcggaauc

SEQ ID NO: 2485327 - RNA, 19 nt, Artificial Sequence
  Description of Artificial Sequence: Synthetic oligonucleotide
  Antisense strand to SEQ ID NO: 2485326
gauuccgccgagaaaucag

SEQ ID NO: 2485328 - RNA, 19 nt, Artificial Sequence
  Description of Artificial Sequence: Synthetic oligonucleotide
  Sense strand starting at position 2379 of SEQ ID NO: 1887625
gcggaaucgcacuguaaac

SEQ ID NO: 2485329 - RNA, 19 nt, Artificial Sequence
  Description of Artificial Sequence: Synthetic oligonucleotide
  Antisense strand to SEQ ID NO: 2485328
guuuacagugcgauuccgc

SEQ ID NO: 2485330 - RNA, 19 nt, Artificial Sequence
  Description of Artificial Sequence: Synthetic oligonucleotide
  Sense strand starting at position 2417 of SEQ ID NO: 1887625
gcuggaauggccugugacu

SEQ ID NO: 2485331 - RNA, 19 nt, Artificial Sequence
  Description of Artificial Sequence: Synthetic oligonucleotide
  Antisense strand to SEQ ID NO: 2485330
agucacaggccauuccagc

SEQ ID NO: 2485332 - RNA, 19 nt, Artificial Sequence
  Description of Artificial Sequence: Synthetic oligonucleotide
  Sense strand starting at position 2426 of SEQ ID NO: 1887625
gccugugacucaguuacuu

SEQ ID NO: 2485333 - RNA, 19 nt, Artificial Sequence
  Description of Artificial Sequence: Synthetic oligonucleotide
  Antisense strand to SEQ ID NO: 2485332
aaguaacugagucacaggc

SEQ ID NO: 2485334 - RNA, 19 nt, Artificial Sequence
  Description of Artificial Sequence: Synthetic oligonucleotide
  Sense strand starting at position 2922 of SEQ ID NO: 1887625
ccauccuccuuggauagau

SEQ ID NO: 2485335 - RNA, 19 nt, Artificial Sequence
  Description of Artificial Sequence: Synthetic oligonucleotide
  Antisense strand to SEQ ID NO: 2485334
aucuauccaaggaggaugg

SEQ ID NO: 2485336 - RNA, 19 nt, Artificial Sequence
  Description of Artificial Sequence: Synthetic oligonucleotide
  Sense strand starting at position 3098 of SEQ ID NO: 1887625
cuugcaaaguccugacagu

SEQ ID NO: 2485337 - RNA, 19 nt, Artificial Sequence
  Description of Artificial Sequence: Synthetic oligonucleotide
  Antisense strand to SEQ ID NO: 2485336
acugucaggacuuugcaag

SEQ ID NO: 2485338 - RNA, 19 nt, Artificial Sequence
  Description of Artificial Sequence: Synthetic oligonucleotide
  Sense strand starting at position 3242 of SEQ ID NO: 1887625
agaggaguuuccagagacg

SEQ ID NO: 2485339 - RNA, 19 nt, Artificial Sequence
  Description of Artificial Sequence: Synthetic oligonucleotide
  Antisense strand to SEQ ID NO: 2485338
cgucucuggaaacuccucu

SEQ ID NO: 2485340 - RNA, 19 nt, Artificial Sequence
  Description of Artificial Sequence: Synthetic oligonucleotide
  Sense strand starting at position 3472 of SEQ ID NO: 1887625
cacacaucacugggugagu

SEQ ID NO: 2485341 - RNA, 19 nt, Artificial Sequence
  Description of Artificial Sequence: Synthetic oligonucleotide
  Antisense strand to SEQ ID NO: 2485340
acucacccagugaugugug

SEQ ID NO: 2485342 - RNA, 19 nt, Artificial Sequence
  Description of Artificial Sequence: Synthetic oligonucleotide
  Sense strand starting at position 3786 of SEQ ID NO: 1887625
gaguaaggcuucugcagca

SEQ ID NO: 2485343 - RNA, 19 nt, Artificial Sequence
  Description of Artificial Sequence: Synthetic oligonucleotide
  Antisense strand to SEQ ID NO: 2485342
ugcugcagaagccuuacuc

SEQ ID NO: 2485344 - RNA, 19 nt, Artificial Sequence
  Description of Artificial Sequence: Synthetic oligonucleotide
  Sense strand starting at position 99 of SEQ ID NO: 1887626
accuguaauuccggcgcau

SEQ ID NO: 2485345 - RNA, 19 nt, Artificial Sequence
  Description of Artificial Sequence: Synthetic oligonucleotide
  Antisense strand to SEQ ID NO: 2485344
augcgccggaauuacaggu

SEQ ID NO: 2485346 - RNA, 19 nt, Artificial Sequence
  Description of Artificial Sequence: Synthetic oligonucleotide
  Sense strand starting at position 100 of SEQ ID NO: 1887626
ccuguaauuccggcgcauu

SEQ ID NO: 2485347 - RNA, 19 nt, Artificial Sequence
  Description of Artificial Sequence: Synthetic oligonucleotide
  Antisense strand to SEQ ID NO: 2485346
aaugcgccggaauuacagg

SEQ ID NO: 2485348 - RNA, 19 nt, Artificial Sequence
  Description of Artificial Sequence: Synthetic oligonucleotide
  Sense strand starting at position 874 of SEQ ID NO: 1887626
aggagaaucgugugaacug

SEQ ID NO: 2485349 - RNA, 19 nt, Artificial Sequence
  Description of Artificial Sequence: Synthetic oligonucleotide
  Antisense strand to SEQ ID NO: 2485348
caguucacacgauucuccu

SEQ ID NO: 2485350 - RNA, 19 nt, Artificial Sequence
  Description of Artificial Sequence: Synthetic oligonucleotide
  Sense strand starting at position 1260 of SEQ ID NO: 1887626
gcagcuuccucuuggguaa

SEQ ID NO: 2485351 - RNA, 19 nt, Artificial Sequence
  Description of Artificial Sequence: Synthetic oligonucleotide
  Antisense strand to SEQ ID NO: 2485350
uuacccaagaggaagcugc

SEQ ID NO: 2485352 - RNA, 19 nt, Artificial Sequence
  Description of Artificial Sequence: Synthetic oligonucleotide
  Sense strand starting at position 1545 of SEQ ID NO: 1887626
gucugauucugaguccuca

SEQ ID NO: 2485353 - RNA, 19 nt, Artificial Sequence
  Description of Artificial Sequence: Synthetic oligonucleotide
  Antisense strand to SEQ ID NO: 2485352
ugaggacucagaaucagac

SEQ ID NO: 2485354 - RNA, 19 nt, Artificial Sequence
  Description of Artificial Sequence: Synthetic oligonucleotide
  Sense strand starting at position 1791 of SEQ ID NO: 1887626
gaacuuagccacugugaac

SEQ ID NO: 2485355 - RNA, 19 nt, Artificial Sequence
  Description of Artificial Sequence: Synthetic oligonucleotide
  Antisense strand to SEQ ID NO: 2485354
guucacaguggcuaaguuc

SEQ ID NO: 2485356 - RNA, 19 nt, Artificial Sequence
  Description of Artificial Sequence: Synthetic oligonucleotide
  Sense strand starting at position 1933 of SEQ ID NO: 1887626
guuggaaaucccuggcaau

SEQ ID NO: 2485357 - RNA, 19 nt, Artificial Sequence
  Description of Artificial Sequence: Synthetic oligonucleotide
  Antisense strand to SEQ ID NO: 2485356
auugccagggauuuccaac

SEQ ID NO: 2485358 - RNA, 19 nt, Artificial Sequence
  Description of Artificial Sequence: Synthetic oligonucleotide
  Sense strand starting at position 1934 of SEQ ID NO: 1887626
uuggaaaucccuggcaaug

SEQ ID NO: 2485359 - RNA, 19 nt, Artificial Sequence
  Description of Artificial Sequence: Synthetic oligonucleotide
  Antisense strand to SEQ ID NO: 2485358
cauugccagggauuuccaa

SEQ ID NO: 2485360 - RNA, 19 nt, Artificial Sequence
  Description of Artificial Sequence: Synthetic oligonucleotide
  Sense strand starting at position 1939 of SEQ ID NO: 1887626
aaucccuggcaaugugauu

SEQ ID NO: 2485361 - RNA, 19 nt, Artificial Sequence
  Description of Artificial Sequence: Synthetic oligonucleotide
  Antisense strand to SEQ ID NO: 2485360
aaucacauugccagggauu

SEQ ID NO: 2485362 - RNA, 19 nt, Artificial Sequence
  Description of Artificial Sequence: Synthetic oligonucleotide
  Sense strand starting at position 1951 of SEQ ID NO: 1887626
ugugauuugugacaggaag

SEQ ID NO: 2485363 - RNA, 19 nt, Artificial Sequence
  Description of Artificial Sequence: Synthetic oligonucleotide
  Antisense strand to SEQ ID NO: 2485362
cuuccugucacaaaucaca

SEQ ID NO: 2485364 - RNA, 19 nt, Artificial Sequence
  Description of Artificial Sequence: Synthetic oligonucleotide
  Sense strand starting at position 2115 of SEQ ID NO: 1887626
cccagaugcuuccuuugau

SEQ ID NO: 2485365 - RNA, 19 nt, Artificial Sequence
  Description of Artificial Sequence: Synthetic oligonucleotide
  Antisense strand to SEQ ID NO: 2485364
aucaaaggaagcaucuggg

SEQ ID NO: 2485366 - RNA, 19 nt, Artificial Sequence
  Description of Artificial Sequence: Synthetic oligonucleotide
  Sense strand starting at position 2116 of SEQ ID NO: 1887626
ccagaugcuuccuuugauc

SEQ ID NO: 2485367 - RNA, 19 nt, Artificial Sequence
  Description of Artificial Sequence: Synthetic oligonucleotide
  Antisense strand to SEQ ID NO: 2485366
gaucaaaggaagcaucugg

SEQ ID NO: 2485368 - RNA, 19 nt, Artificial Sequence
  Description of Artificial Sequence: Synthetic oligonucleotide
  Sense strand starting at position 2118 of SEQ ID NO: 1887626
agaugcuuccuuugaucac

SEQ ID NO: 2485369 - RNA, 19 nt, Artificial Sequence
  Description of Artificial Sequence: Synthetic oligonucleotide
  Antisense strand to SEQ ID NO: 2485368
gugaucaaaggaagcaucu

SEQ ID NO: 2485370 - RNA, 19 nt, Artificial Sequence
  Description of Artificial Sequence: Synthetic oligonucleotide
  Sense strand starting at position 2124 of SEQ ID NO: 1887626
uuccuuugaucacagggaa

SEQ ID NO: 2485371 - RNA, 19 nt, Artificial Sequence
  Description of Artificial Sequence: Synthetic oligonucleotide
  Antisense strand to SEQ ID NO: 2485370
uucccugugaucaaaggaa

SEQ ID NO: 2485372 - RNA, 19 nt, Artificial Sequence
  Description of Artificial Sequence: Synthetic oligonucleotide
  Sense strand starting at position 2127 of SEQ ID NO: 1887626
cuuugaucacagggaagcu

SEQ ID NO: 2485373 - RNA, 19 nt, Artificial Sequence
  Description of Artificial Sequence: Synthetic oligonucleotide
  Antisense strand to SEQ ID NO: 2485372
agcuucccugugaucaaag

SEQ ID NO: 2485374 - RNA, 19 nt, Artificial Sequence
  Description of Artificial Sequence: Synthetic oligonucleotide
  Sense strand starting at position 2685 of SEQ ID NO: 1887626
ugcauagcccagugagaug

SEQ ID NO: 2485375 - RNA, 19 nt, Artificial Sequence
  Description of Artificial Sequence: Synthetic oligonucleotide
  Antisense strand to SEQ ID NO: 2485374
caucucacugggcuaugca

SEQ ID NO: 2485376 - RNA, 19 nt, Artificial Sequence
  Description of Artificial Sequence: Synthetic oligonucleotide
  Sense strand starting at position 2696 of SEQ ID NO: 1887626
gugagaugucaccgaguau

SEQ ID NO: 2485377 - RNA, 19 nt, Artificial Sequence
  Description of Artificial Sequence: Synthetic oligonucleotide
  Antisense strand to SEQ ID NO: 2485376
auacucggugacaucucac

SEQ ID NO: 2485378 - RNA, 19 nt, Artificial Sequence
  Description of Artificial Sequence: Synthetic oligonucleotide
  Sense strand starting at position 2697 of SEQ ID NO: 1887626
ugagaugucaccgaguaug

SEQ ID NO: 2485379 - RNA, 19 nt, Artificial Sequence
  Description of Artificial Sequence: Synthetic oligonucleotide
  Antisense strand to SEQ ID NO: 2485378
cauacucggugacaucuca

SEQ ID NO: 2485380 - RNA, 19 nt, Artificial Sequence
  Description of Artificial Sequence: Synthetic oligonucleotide
  Sense strand starting at position 2700 of SEQ ID NO: 1887626
gaugucaccgaguauguau

SEQ ID NO: 2485381 - RNA, 19 nt, Artificial Sequence
  Description of Artificial Sequence: Synthetic oligonucleotide
  Antisense strand to SEQ ID NO: 2485380
auacauacucggugacauc

SEQ ID NO: 2485382 - RNA, 19 nt, Artificial Sequence
  Description of Artificial Sequence: Synthetic oligonucleotide
  Sense strand starting at position 2711 of SEQ ID NO: 1887626
guauguaugucacucagua

SEQ ID NO: 2485383 - RNA, 19 nt, Artificial Sequence
  Description of Artificial Sequence: Synthetic oligonucleotide
  Antisense strand to SEQ ID NO: 2485382
uacugagugacauacauac

SEQ ID NO: 2485384 - RNA, 19 nt, Artificial Sequence
  Description of Artificial Sequence: Synthetic oligonucleotide
  Sense strand starting at position 2713 of SEQ ID NO: 1887626
auguaugucacucaguaag

SEQ ID NO: 2485385 - RNA, 19 nt, Artificial Sequence
  Description of Artificial Sequence: Synthetic oligonucleotide
  Antisense strand to SEQ ID NO: 2485384
cuuacugagugacauacau

SEQ ID NO: 2485386 - RNA, 19 nt, Artificial Sequence
  Description of Artificial Sequence: Synthetic oligonucleotide
  Sense strand starting at position 2787 of SEQ ID NO: 1887626
gugguccucuaguucgaaa

SEQ ID NO: 2485387 - RNA, 19 nt, Artificial Sequence
  Description of Artificial Sequence: Synthetic oligonucleotide
  Antisense strand to SEQ ID NO: 2485386
uuucgaacuagaggaccac

SEQ ID NO: 2485388 - RNA, 19 nt, Artificial Sequence
  Description of Artificial Sequence: Synthetic oligonucleotide
  Sense strand starting at position 3659 of SEQ ID NO: 1887626
ugaggcugccgugaucuau

SEQ ID NO: 2485389 - RNA, 19 nt, Artificial Sequence
  Description of Artificial Sequence: Synthetic oligonucleotide
  Antisense strand to SEQ ID NO: 2485388
auagaucacggcagccuca

SEQ ID NO: 2485390 - RNA, 19 nt, Artificial Sequence
  Description of Artificial Sequence: Synthetic oligonucleotide
  Sense strand starting at position 3665 of SEQ ID NO: 1887626
ugccgugaucuaugaccau

SEQ ID NO: 2485391 - RNA, 19 nt, Artificial Sequence
  Description of Artificial Sequence: Synthetic oligonucleotide
  Antisense strand to SEQ ID NO: 2485390
auggucauagaucacggca

SEQ ID NO: 2485392 - RNA, 19 nt, Artificial Sequence
  Description of Artificial Sequence: Synthetic oligonucleotide
  Sense strand starting at position 3910 of SEQ ID NO: 1887626
ccagcagugcaacauuaaa

SEQ ID NO: 2485393 - RNA, 19 nt, Artificial Sequence
  Description of Artificial Sequence: Synthetic oligonucleotide
  Antisense strand to SEQ ID NO: 2485392
uuuaauguugcacugcugg

SEQ ID NO: 2485394 - RNA, 19 nt, Artificial Sequence
  Description of Artificial Sequence: Synthetic oligonucleotide
  Sense strand starting at position 154 of SEQ ID NO: 1887627
gaaugaagucagggcaacu

SEQ ID NO: 2485395 - RNA, 19 nt, Artificial Sequence
  Description of Artificial Sequence: Synthetic oligonucleotide
  Antisense strand to SEQ ID NO: 2485394
aguugcccugacuucauuc

SEQ ID NO: 2485396 - RNA, 19 nt, Artificial Sequence
  Description of Artificial Sequence: Synthetic oligonucleotide
  Sense strand starting at position 399 of SEQ ID NO: 1887627
accuguaauuccggcgcau

SEQ ID NO: 2485397 - RNA, 19 nt, Artificial Sequence
  Description of Artificial Sequence: Synthetic oligonucleotide
  Antisense strand to SEQ ID NO: 2485396
augcgccggaauuacaggu

SEQ ID NO: 2485398 - RNA, 19 nt, Artificial Sequence
  Description of Artificial Sequence: Synthetic oligonucleotide
  Sense strand starting at position 400 of SEQ ID NO: 1887627
ccuguaauuccggcgcauu

SEQ ID NO: 2485399 - RNA, 19 nt, Artificial Sequence
  Description of Artificial Sequence: Synthetic oligonucleotide
  Antisense strand to SEQ ID NO: 2485398
aaugcgccggaauuacagg

SEQ ID NO: 2485400 - RNA, 19 nt, Artificial Sequence
  Description of Artificial Sequence: Synthetic oligonucleotide
  Sense strand starting at position 1174 of SEQ ID NO: 1887627
aggagaaucgugugaacug

SEQ ID NO: 2485401 - RNA, 19 nt, Artificial Sequence
  Description of Artificial Sequence: Synthetic oligonucleotide
  Antisense strand to SEQ ID NO: 2485400
caguucacacgauucuccu

SEQ ID NO: 2485402 - RNA, 19 nt, Artificial Sequence
  Description of Artificial Sequence: Synthetic oligonucleotide
  Sense strand starting at position 1560 of SEQ ID NO: 1887627
gcagcuuccucuuggguaa

SEQ ID NO: 2485403 - RNA, 19 nt, Artificial Sequence
  Description of Artificial Sequence: Synthetic oligonucleotide
  Antisense strand to SEQ ID NO: 2485402
uuacccaagaggaagcugc

SEQ ID NO: 2485404 - RNA, 19 nt, Artificial Sequence
  Description of Artificial Sequence: Synthetic oligonucleotide
  Sense strand starting at position 1845 of SEQ ID NO: 1887627
gucugauucugaguccuca

SEQ ID NO: 2485405 - RNA, 19 nt, Artificial Sequence
  Description of Artificial Sequence: Synthetic oligonucleotide
  Antisense strand to SEQ ID NO: 2485404
ugaggacucagaaucagac

SEQ ID NO: 2485406 - RNA, 19 nt, Artificial Sequence
  Description of Artificial Sequence: Synthetic oligonucleotide
  Sense strand starting at position 2091 of SEQ ID NO: 1887627
gaacuuagccacugugaac

SEQ ID NO: 2485407 - RNA, 19 nt, Artificial Sequence
  Description of Artificial Sequence: Synthetic oligonucleotide
  Antisense strand to SEQ ID NO: 2485406
guucacaguggcuaaguuc

SEQ ID NO: 2485408 - RNA, 19 nt, Artificial Sequence
  Description of Artificial Sequence: Synthetic oligonucleotide
  Sense strand starting at position 2233 of SEQ ID NO: 1887627
guuggaaaucccuggcaau

SEQ ID NO: 2485409 - RNA, 19 nt, Artificial Sequence
  Description of Artificial Sequence: Synthetic oligonucleotide
  Antisense strand to SEQ ID NO: 2485408
auugccagggauuuccaac

SEQ ID NO: 2485410 - RNA, 19 nt, Artificial Sequence
  Description of Artificial Sequence: Synthetic oligonucleotide
  Sense strand starting at position 2234 of SEQ ID NO: 1887627
uuggaaaucccuggcaaug

SEQ ID NO: 2485411 - RNA, 19 nt, Artificial Sequence
  Description of Artificial Sequence: Synthetic oligonucleotide
  Antisense strand to SEQ ID NO: 2485410
cauugccagggauuuccaa

SEQ ID NO: 2485412 - RNA, 19 nt, Artificial Sequence
  Description of Artificial Sequence: Synthetic oligonucleotide
  Sense strand starting at position 2239 of SEQ ID NO: 1887627
aaucccuggcaaugugauu

SEQ ID NO: 2485413 - RNA, 19 nt, Artificial Sequence
  Description of Artificial Sequence: Synthetic oligonucleotide
  Antisense strand to SEQ ID NO: 2485412
aaucacauugccagggauu

SEQ ID NO: 2485414 - RNA, 19 nt, Artificial Sequence
  Description of Artificial Sequence: Synthetic oligonucleotide
  Sense strand starting at position 2251 of SEQ ID NO: 1887627
ugugauuugugacaggaag

SEQ ID NO: 2485415 - RNA, 19 nt, Artificial Sequence
  Description of Artificial Sequence: Synthetic oligonucleotide
  Antisense strand to SEQ ID NO: 2485414
cuuccugucacaaaucaca

SEQ ID NO: 2485416 - RNA, 19 nt, Artificial Sequence
  Description of Artificial Sequence: Synthetic oligonucleotide
  Sense strand starting at position 2415 of SEQ ID NO: 1887627
cccagaugcuuccuuugau

SEQ ID NO: 2485417 - RNA, 19 nt, Artificial Sequence
  Description of Artificial Sequence: Synthetic oligonucleotide
  Antisense strand to SEQ ID NO: 2485416
aucaaaggaagcaucuggg

SEQ ID NO: 2485418 - RNA, 19 nt, Artificial Sequence
  Description of Artificial Sequence: Synthetic oligonucleotide
  Sense strand starting at position 2416 of SEQ ID NO: 1887627
ccagaugcuuccuuugauc

SEQ ID NO: 2485419 - RNA, 19 nt, Artificial Sequence
  Description of Artificial Sequence: Synthetic oligonucleotide
  Antisense strand to SEQ ID NO: 2485418
gaucaaaggaagcaucugg

SEQ ID NO: 2485420 - RNA, 19 nt, Artificial Sequence
  Description of Artificial Sequence: Synthetic oligonucleotide
  Sense strand starting at position 2418 of SEQ ID NO: 1887627
agaugcuuccuuugaucac

SEQ ID NO: 2485421 - RNA, 19 nt, Artificial Sequence
  Description of Artificial Sequence: Synthetic oligonucleotide
  Antisense strand to SEQ ID NO: 2485420
gugaucaaaggaagcaucu

SEQ ID NO: 2485422 - RNA, 19 nt, Artificial Sequence
  Description of Artificial Sequence: Synthetic oligonucleotide
  Sense strand starting at position 2424 of SEQ ID NO: 1887627
uuccuuugaucacagggaa

SEQ ID NO: 2485423 - RNA, 19 nt, Artificial Sequence
  Description of Artificial Sequence: Synthetic oligonucleotide
  Antisense strand to SEQ ID NO: 2485422
uucccugugaucaaaggaa

SEQ ID NO: 2485424 - RNA, 19 nt, Artificial Sequence
  Description of Artificial Sequence: Synthetic oligonucleotide
  Sense strand starting at position 2427 of SEQ ID NO: 1887627
cuuugaucacagggaagcu

SEQ ID NO: 2485425 - RNA, 19 nt, Artificial Sequence
  Description of Artificial Sequence: Synthetic oligonucleotide
  Antisense strand to SEQ ID NO: 2485424
agcuucccugugaucaaag

SEQ ID NO: 2485426 - RNA, 19 nt, Artificial Sequence
  Description of Artificial Sequence: Synthetic oligonucleotide
  Sense strand starting at position 2985 of SEQ ID NO: 1887627
ugcauagcccagugagaug

SEQ ID NO: 2485427 - RNA, 19 nt, Artificial Sequence
  Description of Artificial Sequence: Synthetic oligonucleotide
  Antisense strand to SEQ ID NO: 2485426
caucucacugggcuaugca

SEQ ID NO: 2485428 - RNA, 19 nt, Artificial Sequence
  Description of Artificial Sequence: Synthetic oligonucleotide
  Sense strand starting at position 2996 of SEQ ID NO: 1887627
gugagaugucaccgaguau

SEQ ID NO: 2485429 - RNA, 19 nt, Artificial Sequence
  Description of Artificial Sequence: Synthetic oligonucleotide
  Antisense strand to SEQ ID NO: 2485428
auacucggugacaucucac

SEQ ID NO: 2485430 - RNA, 19 nt, Artificial Sequence
  Description of Artificial Sequence: Synthetic oligonucleotide
  Sense strand starting at position 2997 of SEQ ID NO: 1887627
ugagaugucaccgaguaug

SEQ ID NO: 2485431 - RNA, 19 nt, Artificial Sequence
  Description of Artificial Sequence: Synthetic oligonucleotide
  Antisense strand to SEQ ID NO: 2485430
cauacucggugacaucuca

SEQ ID NO: 2485432 - RNA, 19 nt, Artificial Sequence
  Description of Artificial Sequence: Synthetic oligonucleotide
  Sense strand starting at position 3000 of SEQ ID NO: 1887627
gaugucaccgaguauguau

SEQ ID NO: 2485433 - RNA, 19 nt, Artificial Sequence
  Description of Artificial Sequence: Synthetic oligonucleotide
  Antisense strand to SEQ ID NO: 2485432
auacauacucggugacauc

SEQ ID NO: 2485434 - RNA, 19 nt, Artificial Sequence
  Description of Artificial Sequence: Synthetic oligonucleotide
  Sense strand starting at position 3011 of SEQ ID NO: 1887627
guauguaugucacucagua

SEQ ID NO: 2485435 - RNA, 19 nt, Artificial Sequence
  Description of Artificial Sequence: Synthetic oligonucleotide
  Antisense strand to SEQ ID NO: 2485434
uacugagugacauacauac

SEQ ID NO: 2485436 - RNA, 19 nt, Artificial Sequence
  Description of Artificial Sequence: Synthetic oligonucleotide
  Sense strand starting at position 3013 of SEQ ID NO: 1887627
auguaugucacucaguaag

SEQ ID NO: 2485437 - RNA, 19 nt, Artificial Sequence
  Description of Artificial Sequence: Synthetic oligonucleotide
  Antisense strand to SEQ ID NO: 2485436
cuuacugagugacauacau

SEQ ID NO: 2485438 - RNA, 19 nt, Artificial Sequence
  Description of Artificial Sequence: Synthetic oligonucleotide
  Sense strand starting at position 3087 of SEQ ID NO: 1887627
gugguccucuaguucgaaa

SEQ ID NO: 2485439 - RNA, 19 nt, Artificial Sequence
  Description of Artificial Sequence: Synthetic oligonucleotide
  Antisense strand to SEQ ID NO: 2485438
uuucgaacuagaggaccac

SEQ ID NO: 2485440 - RNA, 19 nt, Artificial Sequence
  Description of Artificial Sequence: Synthetic oligonucleotide
  Sense strand starting at position 3959 of SEQ ID NO: 1887627
ugaggcugccgugaucuau

SEQ ID NO: 2485441 - RNA, 19 nt, Artificial Sequence
  Description of Artificial Sequence: Synthetic oligonucleotide
  Antisense strand to SEQ ID NO: 2485440
auagaucacggcagccuca

SEQ ID NO: 2485442 - RNA, 19 nt, Artificial Sequence
  Description of Artificial Sequence: Synthetic oligonucleotide
  Sense strand starting at position 3965 of SEQ ID NO: 1887627
ugccgugaucuaugaccau

SEQ ID NO: 2485443 - RNA, 19 nt, Artificial Sequence
  Description of Artificial Sequence: Synthetic oligonucleotide
  Antisense strand to SEQ ID NO: 2485442
auggucauagaucacggca

SEQ ID NO: 2485444 - RNA, 19 nt, Artificial Sequence
  Description of Artificial Sequence: Synthetic oligonucleotide
  Sense strand starting at position 241 of SEQ ID NO: 1887628
accuguaauuccggcgcau

SEQ ID NO: 2485445 - RNA, 19 nt, Artificial Sequence
  Description of Artificial Sequence: Synthetic oligonucleotide
  Antisense strand to SEQ ID NO: 2485444
augcgccggaauuacaggu

SEQ ID NO: 2485446 - RNA, 19 nt, Artificial Sequence
  Description of Artificial Sequence: Synthetic oligonucleotide
  Sense strand starting at position 242 of SEQ ID NO: 1887628
ccuguaauuccggcgcauu

SEQ ID NO: 2485447 - RNA, 19 nt, Artificial Sequence
  Description of Artificial Sequence: Synthetic oligonucleotide
  Antisense strand to SEQ ID NO: 2485446
aaugcgccggaauuacagg

SEQ ID NO: 2485448 - RNA, 19 nt, Artificial Sequence
  Description of Artificial Sequence: Synthetic oligonucleotide
  Sense strand starting at position 1016 of SEQ ID NO: 1887628
aggagaaucgugugaacug

SEQ ID NO: 2485449 - RNA, 19 nt, Artificial Sequence
  Description of Artificial Sequence: Synthetic oligonucleotide
  Antisense strand to SEQ ID NO: 2485448
caguucacacgauucuccu

SEQ ID NO: 2485450 - RNA, 19 nt, Artificial Sequence
  Description of Artificial Sequence: Synthetic oligonucleotide
  Sense strand starting at position 1402 of SEQ ID NO: 1887628
gcagcuuccucuuggguaa

SEQ ID NO: 2485451 - RNA, 19 nt, Artificial Sequence
  Description of Artificial Sequence: Synthetic oligonucleotide
  Antisense strand to SEQ ID NO: 2485450
uuacccaagaggaagcugc

SEQ ID NO: 2485452 - RNA, 19 nt, Artificial Sequence
  Description of Artificial Sequence: Synthetic oligonucleotide
  Sense strand starting at position 1687 of SEQ ID NO: 1887628
gucugauucugaguccuca

SEQ ID NO: 2485453 - RNA, 19 nt, Artificial Sequence
  Description of Artificial Sequence: Synthetic oligonucleotide
  Antisense strand to SEQ ID NO: 2485452
ugaggacucagaaucagac

SEQ ID NO: 2485454 - RNA, 19 nt, Artificial Sequence
  Description of Artificial Sequence: Synthetic oligonucleotide
  Sense strand starting at position 1933 of SEQ ID NO: 1887628
gaacuuagccacugugaac

SEQ ID NO: 2485455 - RNA, 19 nt, Artificial Sequence
  Description of Artificial Sequence: Synthetic oligonucleotide
  Antisense strand to SEQ ID NO: 2485454
guucacaguggcuaaguuc

SEQ ID NO: 2485456 - RNA, 19 nt, Artificial Sequence
  Description of Artificial Sequence: Synthetic oligonucleotide
  Sense strand starting at position 2075 of SEQ ID NO: 1887628
guuggaaaucccuggcaau

SEQ ID NO: 2485457 - RNA, 19 nt, Artificial Sequence
  Description of Artificial Sequence: Synthetic oligonucleotide
  Antisense strand to SEQ ID NO: 2485456
auugccagggauuuccaac

SEQ ID NO: 2485458 - RNA, 19 nt, Artificial Sequence
  Description of Artificial Sequence: Synthetic oligonucleotide
  Sense strand starting at position 2076 of SEQ ID NO: 1887628
uuggaaaucccuggcaaug

SEQ ID NO: 2485459 - RNA, 19 nt, Artificial Sequence
  Description of Artificial Sequence: Synthetic oligonucleotide
  Antisense strand to SEQ ID NO: 2485458
cauugccagggauuuccaa

SEQ ID NO: 2485460 - RNA, 19 nt, Artificial Sequence
  Description of Artificial Sequence: Synthetic oligonucleotide
  Sense strand starting at position 2081 of SEQ ID NO: 1887628
aaucccuggcaaugugauu

SEQ ID NO: 2485461 - RNA, 19 nt, Artificial Sequence
  Description of Artificial Sequence: Synthetic oligonucleotide
  Antisense strand to SEQ ID NO: 2485460
aaucacauugccagggauu

SEQ ID NO: 2485462 - RNA, 19 nt, Artificial Sequence
  Description of Artificial Sequence: Synthetic oligonucleotide
  Sense strand starting at position 2093 of SEQ ID NO: 1887628
ugugauuugugacaggaag

SEQ ID NO: 2485463 - RNA, 19 nt, Artificial Sequence
  Description of Artificial Sequence: Synthetic oligonucleotide
  Antisense strand to SEQ ID NO: 2485462
cuuccugucacaaaucaca

SEQ ID NO: 2485464 - RNA, 19 nt, Artificial Sequence
  Description of Artificial Sequence: Synthetic oligonucleotide
  Sense strand starting at position 2257 of SEQ ID NO: 1887628
cccagaugcuuccuuugau

SEQ ID NO: 2485465 - RNA, 19 nt, Artificial Sequence
  Description of Artificial Sequence: Synthetic oligonucleotide
  Antisense strand to SEQ ID NO: 2485464
aucaaaggaagcaucuggg

SEQ ID NO: 2485466 - RNA, 19 nt, Artificial Sequence
  Description of Artificial Sequence: Synthetic oligonucleotide
  Sense strand starting at position 2258 of SEQ ID NO: 1887628
ccagaugcuuccuuugauc

SEQ ID NO: 2485467 - RNA, 19 nt, Artificial Sequence
  Description of Artificial Sequence: Synthetic oligonucleotide
  Antisense strand to SEQ ID NO: 2485466
gaucaaaggaagcaucugg

SEQ ID NO: 2485468 - RNA, 19 nt, Artificial Sequence
  Description of Artificial Sequence: Synthetic oligonucleotide
  Sense strand starting at position 2260 of SEQ ID NO: 1887628
agaugcuuccuuugaucac

SEQ ID NO: 2485469 - RNA, 19 nt, Artificial Sequence
  Description of Artificial Sequence: Synthetic oligonucleotide
  Antisense strand to SEQ ID NO: 2485468
gugaucaaaggaagcaucu

SEQ ID NO: 2485470 - RNA, 19 nt, Artificial Sequence
  Description of Artificial Sequence: Synthetic oligonucleotide
  Sense strand starting at position 2266 of SEQ ID NO: 1887628
uuccuuugaucacagggaa

SEQ ID NO: 2485471 - RNA, 19 nt, Artificial Sequence
  Description of Artificial Sequence: Synthetic oligonucleotide
  Antisense strand to SEQ ID NO: 2485470
uucccugugaucaaaggaa

SEQ ID NO: 2485472 - RNA, 19 nt, Artificial Sequence
  Description of Artificial Sequence: Synthetic oligonucleotide
  Sense strand starting at position 2269 of SEQ ID NO: 1887628
cuuugaucacagggaagcu

SEQ ID NO: 2485473 - RNA, 19 nt, Artificial Sequence
  Description of Artificial Sequence: Synthetic oligonucleotide
  Antisense strand to SEQ ID NO: 2485472
agcuucccugugaucaaag

SEQ ID NO: 2485474 - RNA, 19 nt, Artificial Sequence
  Description of Artificial Sequence: Synthetic oligonucleotide
  Sense strand starting at position 2827 of SEQ ID NO: 1887628
ugcauagcccagugagaug

SEQ ID NO: 2485475 - RNA, 19 nt, Artificial Sequence
  Description of Artificial Sequence: Synthetic oligonucleotide
  Antisense strand to SEQ ID NO: 2485474
caucucacugggcuaugca

SEQ ID NO: 2485476 - RNA, 19 nt, Artificial Sequence
  Description of Artificial Sequence: Synthetic oligonucleotide
  Sense strand starting at position 2838 of SEQ ID NO: 1887628
gugagaugucaccgaguau

SEQ ID NO: 2485477 - RNA, 19 nt, Artificial Sequence
  Description of Artificial Sequence: Synthetic oligonucleotide
  Antisense strand to SEQ ID NO: 2485476
auacucggugacaucucac

SEQ ID NO: 2485478 - RNA, 19 nt, Artificial Sequence
  Description of Artificial Sequence: Synthetic oligonucleotide
  Sense strand starting at position 2839 of SEQ ID NO: 1887628
ugagaugucaccgaguaug

SEQ ID NO: 2485479 - RNA, 19 nt, Artificial Sequence
  Description of Artificial Sequence: Synthetic oligonucleotide
  Antisense strand to SEQ ID NO: 2485478
cauacucggugacaucuca

SEQ ID NO: 2485480 - RNA, 19 nt, Artificial Sequence
  Description of Artificial Sequence: Synthetic oligonucleotide
  Sense strand starting at position 2842 of SEQ ID NO: 1887628
gaugucaccgaguauguau

SEQ ID NO: 2485481 - RNA, 19 nt, Artificial Sequence
  Description of Artificial Sequence: Synthetic oligonucleotide
  Antisense strand to SEQ ID NO: 2485480
auacauacucggugacauc

SEQ ID NO: 2485482 - RNA, 19 nt, Artificial Sequence
  Description of Artificial Sequence: Synthetic oligonucleotide
  Sense strand starting at position 2853 of SEQ ID NO: 1887628
guauguaugucacucagua

SEQ ID NO: 2485483 - RNA, 19 nt, Artificial Sequence
  Description of Artificial Sequence: Synthetic oligonucleotide
  Antisense strand to SEQ ID NO: 2485482
uacugagugacauacauac

SEQ ID NO: 2485484 - RNA, 19 nt, Artificial Sequence
  Description of Artificial Sequence: Synthetic oligonucleotide
  Sense strand starting at position 2855 of SEQ ID NO: 1887628
auguaugucacucaguaag

SEQ ID NO: 2485485 - RNA, 19 nt, Artificial Sequence
  Description of Artificial Sequence: Synthetic oligonucleotide
  Antisense strand to SEQ ID NO: 2485484
cuuacugagugacauacau

SEQ ID NO: 2485486 - RNA, 19 nt, Artificial Sequence
  Description of Artificial Sequence: Synthetic oligonucleotide
  Sense strand starting at position 2929 of SEQ ID NO: 1887628
gugguccucuaguucgaaa

SEQ ID NO: 2485487 - RNA, 19 nt, Artificial Sequence
  Description of Artificial Sequence: Synthetic oligonucleotide
  Antisense strand to SEQ ID NO: 2485486
uuucgaacuagaggaccac

SEQ ID NO: 2485488 - RNA, 19 nt, Artificial Sequence
  Description of Artificial Sequence: Synthetic oligonucleotide
  Sense strand starting at position 3801 of SEQ ID NO: 1887628
ugaggcugccgugaucuau

SEQ ID NO: 2485489 - RNA, 19 nt, Artificial Sequence
  Description of Artificial Sequence: Synthetic oligonucleotide
  Antisense strand to SEQ ID NO: 2485488
auagaucacggcagccuca

SEQ ID NO: 2485490 - RNA, 19 nt, Artificial Sequence
  Description of Artificial Sequence: Synthetic oligonucleotide
  Sense strand starting at position 3807 of SEQ ID NO: 1887628
ugccgugaucuaugaccau

SEQ ID NO: 2485491 - RNA, 19 nt, Artificial Sequence
  Description of Artificial Sequence: Synthetic oligonucleotide
  Antisense strand to SEQ ID NO: 2485490
auggucauagaucacggca

SEQ ID NO: 2485492 - RNA, 19 nt, Artificial Sequence
  Description of Artificial Sequence: Synthetic oligonucleotide
  Sense strand starting at position 64 of SEQ ID NO: 1887629
cugccaccucggugaacau

SEQ ID NO: 2485493 - RNA, 19 nt, Artificial Sequence
  Description of Artificial Sequence: Synthetic oligonucleotide
  Antisense strand to SEQ ID NO: 2485492
auguucaccgagguggcag

SEQ ID NO: 2485494 - RNA, 19 nt, Artificial Sequence
  Description of Artificial Sequence: Synthetic oligonucleotide
  Sense strand starting at position 274 of SEQ ID NO: 1887629
gcauguuguacugucugca

SEQ ID NO: 2485495 - RNA, 19 nt, Artificial Sequence
  Description of Artificial Sequence: Synthetic oligonucleotide
  Antisense strand to SEQ ID NO: 2485494
ugcagacaguacaacaugc

SEQ ID NO: 2485496 - RNA, 19 nt, Artificial Sequence
  Description of Artificial Sequence: Synthetic oligonucleotide
  Sense strand starting at position 621 of SEQ ID NO: 1887629
gcacguccugcgaggucaa

SEQ ID NO: 2485497 - RNA, 19 nt, Artificial Sequence
  Description of Artificial Sequence: Synthetic oligonucleotide
  Antisense strand to SEQ ID NO: 2485496
uugaccucgcaggacgugc

SEQ ID NO: 2485498 - RNA, 19 nt, Artificial Sequence
  Description of Artificial Sequence: Synthetic oligonucleotide
  Sense strand starting at position 881 of SEQ ID NO: 1887629
ggucuaugugucggugagu

SEQ ID NO: 2485499 - RNA, 19 nt, Artificial Sequence
  Description of Artificial Sequence: Synthetic oligonucleotide
  Antisense strand to SEQ ID NO: 2485498
acucaccgacacauagacc

SEQ ID NO: 2485500 - RNA, 19 nt, Artificial Sequence
  Description of Artificial Sequence: Synthetic oligonucleotide
  Sense strand starting at position 1470 of SEQ ID NO: 1887629
gcugaagugucucgcccuu

SEQ ID NO: 2485501 - RNA, 19 nt, Artificial Sequence
  Description of Artificial Sequence: Synthetic oligonucleotide
  Antisense strand to SEQ ID NO: 2485500
aagggcgagacacuucagc

SEQ ID NO: 2485502 - RNA, 19 nt, Artificial Sequence
  Description of Artificial Sequence: Synthetic oligonucleotide
  Sense strand starting at position 1785 of SEQ ID NO: 1887629
gggccacgacucgguuuau

SEQ ID NO: 2485503 - RNA, 19 nt, Artificial Sequence
  Description of Artificial Sequence: Synthetic oligonucleotide
  Antisense strand to SEQ ID NO: 2485502
auaaaccgagucguggccc

SEQ ID NO: 2485504 - RNA, 19 nt, Artificial Sequence
  Description of Artificial Sequence: Synthetic oligonucleotide
  Sense strand starting at position 1794 of SEQ ID NO: 1887629
cucgguuuaucagcagaau

SEQ ID NO: 2485505 - RNA, 19 nt, Artificial Sequence
  Description of Artificial Sequence: Synthetic oligonucleotide
  Antisense strand to SEQ ID NO: 2485504
auucugcugauaaaccgag

SEQ ID NO: 2485506 - RNA, 19 nt, Artificial Sequence
  Description of Artificial Sequence: Synthetic oligonucleotide
  Sense strand starting at position 1795 of SEQ ID NO: 1887629
ucgguuuaucagcagaaua

SEQ ID NO: 2485507 - RNA, 19 nt, Artificial Sequence
  Description of Artificial Sequence: Synthetic oligonucleotide
  Antisense strand to SEQ ID NO: 2485506
uauucugcugauaaaccga

SEQ ID NO: 2485508 - RNA, 19 nt, Artificial Sequence
  Description of Artificial Sequence: Synthetic oligonucleotide
  Sense strand starting at position 1807 of SEQ ID NO: 1887629
cagaauaagucggugagca

SEQ ID NO: 2485509 - RNA, 19 nt, Artificial Sequence
  Description of Artificial Sequence: Synthetic oligonucleotide
  Antisense strand to SEQ ID NO: 2485508
ugcucaccgacuuauucug

SEQ ID NO: 2485510 - RNA, 19 nt, Artificial Sequence
  Description of Artificial Sequence: Synthetic oligonucleotide
  Sense strand starting at position 1808 of SEQ ID NO: 1887629
agaauaagucggugagcac

SEQ ID NO: 2485511 - RNA, 19 nt, Artificial Sequence
  Description of Artificial Sequence: Synthetic oligonucleotide
  Antisense strand to SEQ ID NO: 2485510
gugcucaccgacuuauucu

SEQ ID NO: 2485512 - RNA, 19 nt, Artificial Sequence
  Description of Artificial Sequence: Synthetic oligonucleotide
  Sense strand starting at position 2405 of SEQ ID NO: 1887629
gcgccaaguggcucaugau

SEQ ID NO: 2485513 - RNA, 19 nt, Artificial Sequence
  Description of Artificial Sequence: Synthetic oligonucleotide
  Antisense strand to SEQ ID NO: 2485512
aucaugagccacuuggcgc

SEQ ID NO: 2485514 - RNA, 19 nt, Artificial Sequence
  Description of Artificial Sequence: Synthetic oligonucleotide
  Sense strand starting at position 2471 of SEQ ID NO: 1887629
aggucaucgccauguccaa

SEQ ID NO: 2485515 - RNA, 19 nt, Artificial Sequence
  Description of Artificial Sequence: Synthetic oligonucleotide
  Antisense strand to SEQ ID NO: 2485514
uuggacauggcgaugaccu

SEQ ID NO: 2485516 - RNA, 19 nt, Artificial Sequence
  Description of Artificial Sequence: Synthetic oligonucleotide
  Sense strand starting at position 2973 of SEQ ID NO: 1887629
gggcuacuuccgcaagaug

SEQ ID NO: 2485517 - RNA, 19 nt, Artificial Sequence
  Description of Artificial Sequence: Synthetic oligonucleotide
  Antisense strand to SEQ ID NO: 2485516
caucuugcggaaguagccc

SEQ ID NO: 2485518 - RNA, 19 nt, Artificial Sequence
  Description of Artificial Sequence: Synthetic oligonucleotide
  Sense strand starting at position 466 of SEQ ID NO: 1887630
ccaccucucuuggugauga

SEQ ID NO: 2485519 - RNA, 19 nt, Artificial Sequence
  Description of Artificial Sequence: Synthetic oligonucleotide
  Antisense strand to SEQ ID NO: 2485518
ucaucaccaagagaggugg

SEQ ID NO: 2485520 - RNA, 19 nt, Artificial Sequence
  Description of Artificial Sequence: Synthetic oligonucleotide
  Sense strand starting at position 1000 of SEQ ID NO: 1887630
aggcaaugucccugaccuu

SEQ ID NO: 2485521 - RNA, 19 nt, Artificial Sequence
  Description of Artificial Sequence: Synthetic oligonucleotide
  Antisense strand to SEQ ID NO: 2485520
aaggucagggacauugccu

SEQ ID NO: 2485522 - RNA, 19 nt, Artificial Sequence
  Description of Artificial Sequence: Synthetic oligonucleotide
  Sense strand starting at position 1035 of SEQ ID NO: 1887630
cuccaucauucuggcagau

SEQ ID NO: 2485523 - RNA, 19 nt, Artificial Sequence
  Description of Artificial Sequence: Synthetic oligonucleotide
  Antisense strand to SEQ ID NO: 2485522
aucugccagaaugauggag

SEQ ID NO: 2485524 - RNA, 19 nt, Artificial Sequence
  Description of Artificial Sequence: Synthetic oligonucleotide
  Sense strand starting at position 1037 of SEQ ID NO: 1887630
ccaucauucuggcagauuc

SEQ ID NO: 2485525 - RNA, 19 nt, Artificial Sequence
  Description of Artificial Sequence: Synthetic oligonucleotide
  Antisense strand to SEQ ID NO: 2485524
gaaucugccagaaugaugg

SEQ ID NO: 2485526 - RNA, 19 nt, Artificial Sequence
  Description of Artificial Sequence: Synthetic oligonucleotide
  Sense strand starting at position 1070 of SEQ ID NO: 1887630
aggaguaaagucugagggu

SEQ ID NO: 2485527 - RNA, 19 nt, Artificial Sequence
  Description of Artificial Sequence: Synthetic oligonucleotide
  Antisense strand to SEQ ID NO: 2485526
acccucagacuuuacuccu

SEQ ID NO: 2485528 - RNA, 19 nt, Artificial Sequence
  Description of Artificial Sequence: Synthetic oligonucleotide
  Sense strand starting at position 1092 of SEQ ID NO: 1887630
gcacuuccugaagacacau

SEQ ID NO: 2485529 - RNA, 19 nt, Artificial Sequence
  Description of Artificial Sequence: Synthetic oligonucleotide
  Antisense strand to SEQ ID NO: 2485528
augugucuucaggaagugc

SEQ ID NO: 2485530 - RNA, 19 nt, Artificial Sequence
  Description of Artificial Sequence: Synthetic oligonucleotide
  Sense strand starting at position 1171 of SEQ ID NO: 1887630
uacgauuaguccugcaacu

SEQ ID NO: 2485531 - RNA, 19 nt, Artificial Sequence
  Description of Artificial Sequence: Synthetic oligonucleotide
  Antisense strand to SEQ ID NO: 2485530
aguugcaggacuaaucgua

SEQ ID NO: 2485532 - RNA, 19 nt, Artificial Sequence
  Description of Artificial Sequence: Synthetic oligonucleotide
  Sense strand starting at position 1317 of SEQ ID NO: 1887630
aaggaucccuugugaguau

SEQ ID NO: 2485533 - RNA, 19 nt, Artificial Sequence
  Description of Artificial Sequence: Synthetic oligonucleotide
  Antisense strand to SEQ ID NO: 2485532
auacucacaagggauccuu

SEQ ID NO: 2485534 - RNA, 19 nt, Artificial Sequence
  Description of Artificial Sequence: Synthetic oligonucleotide
  Sense strand starting at position 1318 of SEQ ID NO: 1887630
aggaucccuugugaguauu

SEQ ID NO: 2485535 - RNA, 19 nt, Artificial Sequence
  Description of Artificial Sequence: Synthetic oligonucleotide
  Antisense strand to SEQ ID NO: 2485534
aauacucacaagggauccu

SEQ ID NO: 2485536 - RNA, 19 nt, Artificial Sequence
  Description of Artificial Sequence: Synthetic oligonucleotide
  Sense strand starting at position 1375 of SEQ ID NO: 1887630
cccagccagucuuaauagu

SEQ ID NO: 2485537 - RNA, 19 nt, Artificial Sequence
  Description of Artificial Sequence: Synthetic oligonucleotide
  Antisense strand to SEQ ID NO: 2485536
acuauuaagacuggcuggg

SEQ ID NO: 2485538 - RNA, 19 nt, Artificial Sequence
  Description of Artificial Sequence: Synthetic oligonucleotide
  Sense strand starting at position 1384 of SEQ ID NO: 1887630
ucuuaauaguggcucauua

SEQ ID NO: 2485539 - RNA, 19 nt, Artificial Sequence
  Description of Artificial Sequence: Synthetic oligonucleotide
  Antisense strand to SEQ ID NO: 2485538
uaaugagccacuauuaaga

SEQ ID NO: 2485540 - RNA, 19 nt, Artificial Sequence
  Description of Artificial Sequence: Synthetic oligonucleotide
  Sense strand starting at position 1386 of SEQ ID NO: 1887630
uuaauaguggcucauuaag

SEQ ID NO: 2485541 - RNA, 19 nt, Artificial Sequence
  Description of Artificial Sequence: Synthetic oligonucleotide
  Antisense strand to SEQ ID NO: 2485540
cuuaaugagccacuauuaa

SEQ ID NO: 2485542 - RNA, 19 nt, Artificial Sequence
  Description of Artificial Sequence: Synthetic oligonucleotide
  Sense strand starting at position 1405 of SEQ ID NO: 1887630
cccuaacagccaugauagu

SEQ ID NO: 2485543 - RNA, 19 nt, Artificial Sequence
  Description of Artificial Sequence: Synthetic oligonucleotide
  Antisense strand to SEQ ID NO: 2485542
acuaucauggcuguuaggg

SEQ ID NO: 2485544 - RNA, 19 nt, Artificial Sequence
  Description of Artificial Sequence: Synthetic oligonucleotide
  Sense strand starting at position 1412 of SEQ ID NO: 1887630
agccaugauagugguaaca

SEQ ID NO: 2485545 - RNA, 19 nt, Artificial Sequence
  Description of Artificial Sequence: Synthetic oligonucleotide
  Antisense strand to SEQ ID NO: 2485544
uguuaccacuaucauggcu

SEQ ID NO: 2485546 - RNA, 19 nt, Artificial Sequence
  Description of Artificial Sequence: Synthetic oligonucleotide
  Sense strand starting at position 1414 of SEQ ID NO: 1887630
ccaugauagugguaacaag

SEQ ID NO: 2485547 - RNA, 19 nt, Artificial Sequence
  Description of Artificial Sequence: Synthetic oligonucleotide
  Antisense strand to SEQ ID NO: 2485546
cuuguuaccacuaucaugg

SEQ ID NO: 2485548 - RNA, 19 nt, Artificial Sequence
  Description of Artificial Sequence: Synthetic oligonucleotide
  Sense strand starting at position 1421 of SEQ ID NO: 1887630
agugguaacaagcauguaa

SEQ ID NO: 2485549 - RNA, 19 nt, Artificial Sequence
  Description of Artificial Sequence: Synthetic oligonucleotide
  Antisense strand to SEQ ID NO: 2485548
uuacaugcuuguuaccacu

SEQ ID NO: 2485550 - RNA, 19 nt, Artificial Sequence
  Description of Artificial Sequence: Synthetic oligonucleotide
  Sense strand starting at position 1423 of SEQ ID NO: 1887630
ugguaacaagcauguaaua

SEQ ID NO: 2485551 - RNA, 19 nt, Artificial Sequence
  Description of Artificial Sequence: Synthetic oligonucleotide
  Antisense strand to SEQ ID NO: 2485550
uauuacaugcuuguuacca

SEQ ID NO: 2485552 - RNA, 19 nt, Artificial Sequence
  Description of Artificial Sequence: Synthetic oligonucleotide
  Sense strand starting at position 1450 of SEQ ID NO: 1887630
cggcauuccugccucauca

SEQ ID NO: 2485553 - RNA, 19 nt, Artificial Sequence
  Description of Artificial Sequence: Synthetic oligonucleotide
  Antisense strand to SEQ ID NO: 2485552
ugaugaggcaggaaugccg

SEQ ID NO: 2485554 - RNA, 19 nt, Artificial Sequence
  Description of Artificial Sequence: Synthetic oligonucleotide
  Sense strand starting at position 1587 of SEQ ID NO: 1887630
ggguucuaaggguggacaa

SEQ ID NO: 2485555 - RNA, 19 nt, Artificial Sequence
  Description of Artificial Sequence: Synthetic oligonucleotide
  Antisense strand to SEQ ID NO: 2485554
uuguccacccuuagaaccc

SEQ ID NO: 2485556 - RNA, 19 nt, Artificial Sequence
  Description of Artificial Sequence: Synthetic oligonucleotide
  Sense strand starting at position 1635 of SEQ ID NO: 1887630
ugcugugacuccuagcuaa

SEQ ID NO: 2485557 - RNA, 19 nt, Artificial Sequence
  Description of Artificial Sequence: Synthetic oligonucleotide
  Antisense strand to SEQ ID NO: 2485556
uuagcuaggagucacagca

SEQ ID NO: 2485558 - RNA, 19 nt, Artificial Sequence
  Description of Artificial Sequence: Synthetic oligonucleotide
  Sense strand starting at position 1715 of SEQ ID NO: 1887630
uaggacuccugguucuaga

SEQ ID NO: 2485559 - RNA, 19 nt, Artificial Sequence
  Description of Artificial Sequence: Synthetic oligonucleotide
  Antisense strand to SEQ ID NO: 2485558
ucuagaaccaggaguccua

SEQ ID NO: 2485560 - RNA, 19 nt, Artificial Sequence
  Description of Artificial Sequence: Synthetic oligonucleotide
  Sense strand starting at position 1801 of SEQ ID NO: 1887630
cccgucucuuccugagcaa

SEQ ID NO: 2485561 - RNA, 19 nt, Artificial Sequence
  Description of Artificial Sequence: Synthetic oligonucleotide
  Antisense strand to SEQ ID NO: 2485560
uugcucaggaagagacggg

SEQ ID NO: 2485562 - RNA, 19 nt, Artificial Sequence
  Description of Artificial Sequence: Synthetic oligonucleotide
  Sense strand starting at position 1802 of SEQ ID NO: 1887630
ccgucucuuccugagcaau

SEQ ID NO: 2485563 - RNA, 19 nt, Artificial Sequence
  Description of Artificial Sequence: Synthetic oligonucleotide
  Antisense strand to SEQ ID NO: 2485562
auugcucaggaagagacgg

SEQ ID NO: 2485564 - RNA, 19 nt, Artificial Sequence
  Description of Artificial Sequence: Synthetic oligonucleotide
  Sense strand starting at position 1804 of SEQ ID NO: 1887630
gucucuuccugagcaauca

SEQ ID NO: 2485565 - RNA, 19 nt, Artificial Sequence
  Description of Artificial Sequence: Synthetic oligonucleotide
  Antisense strand to SEQ ID NO: 2485564
ugauugcucaggaagagac

SEQ ID NO: 2485566 - RNA, 19 nt, Artificial Sequence
  Description of Artificial Sequence: Synthetic oligonucleotide
  Sense strand starting at position 2007 of SEQ ID NO: 1887630
guuauuuagccaugcggga

SEQ ID NO: 2485567 - RNA, 19 nt, Artificial Sequence
  Description of Artificial Sequence: Synthetic oligonucleotide
  Antisense strand to SEQ ID NO: 2485566
ucccgcauggcuaaauaac

SEQ ID NO: 2485568 - RNA, 19 nt, Artificial Sequence
  Description of Artificial Sequence: Synthetic oligonucleotide
  Sense strand starting at position 2994 of SEQ ID NO: 1887630
aggaguucgccgagggcuu

SEQ ID NO: 2485569 - RNA, 19 nt, Artificial Sequence
  Description of Artificial Sequence: Synthetic oligonucleotide
  Antisense strand to SEQ ID NO: 2485568
aagcccucggcgaacuccu

SEQ ID NO: 2485570 - RNA, 19 nt, Artificial Sequence
  Description of Artificial Sequence: Synthetic oligonucleotide
  Sense strand starting at position 3363 of SEQ ID NO: 1887630
cguugucgcccaucgacau

SEQ ID NO: 2485571 - RNA, 19 nt, Artificial Sequence
  Description of Artificial Sequence: Synthetic oligonucleotide
  Antisense strand to SEQ ID NO: 2485570
augucgaugggcgacaacg

SEQ ID NO: 2485572 - RNA, 19 nt, Artificial Sequence
  Description of Artificial Sequence: Synthetic oligonucleotide
  Sense strand starting at position 3468 of SEQ ID NO: 1887630
gcaucucgcgccuggaaga

SEQ ID NO: 2485573 - RNA, 19 nt, Artificial Sequence
  Description of Artificial Sequence: Synthetic oligonucleotide
  Antisense strand to SEQ ID NO: 2485572
ucuuccaggcgcgagaugc

SEQ ID NO: 2485574 - RNA, 19 nt, Artificial Sequence
  Description of Artificial Sequence: Synthetic oligonucleotide
  Sense strand starting at position 3567 of SEQ ID NO: 1887630
agcagaaaguccucagcca

SEQ ID NO: 2485575 - RNA, 19 nt, Artificial Sequence
  Description of Artificial Sequence: Synthetic oligonucleotide
  Antisense strand to SEQ ID NO: 2485574
uggcugaggacuuucugcu

SEQ ID NO: 2485576 - RNA, 19 nt, Artificial Sequence
  Description of Artificial Sequence: Synthetic oligonucleotide
  Sense strand starting at position 522 of SEQ ID NO: 1887631
ccgauauguggccaauaug

SEQ ID NO: 2485577 - RNA, 19 nt, Artificial Sequence
  Description of Artificial Sequence: Synthetic oligonucleotide
  Antisense strand to SEQ ID NO: 2485576
cauauuggccacauaucgg

SEQ ID NO: 2485578 - RNA, 19 nt, Artificial Sequence
  Description of Artificial Sequence: Synthetic oligonucleotide
  Sense strand starting at position 540 of SEQ ID NO: 1887631
ggugaaacgcccgcuucua

SEQ ID NO: 2485579 - RNA, 19 nt, Artificial Sequence
  Description of Artificial Sequence: Synthetic oligonucleotide
  Antisense strand to SEQ ID NO: 2485578
uagaagcgggcguuucacc

SEQ ID NO: 2485580 - RNA, 19 nt, Artificial Sequence
  Description of Artificial Sequence: Synthetic oligonucleotide
  Sense strand starting at position 772 of SEQ ID NO: 1887631
ccugaaucucaguauggcu

SEQ ID NO: 2485581 - RNA, 19 nt, Artificial Sequence
  Description of Artificial Sequence: Synthetic oligonucleotide
  Antisense strand to SEQ ID NO: 2485580
agccauacugagauucagg

SEQ ID NO: 2485582 - RNA, 19 nt, Artificial Sequence
  Description of Artificial Sequence: Synthetic oligonucleotide
  Sense strand starting at position 839 of SEQ ID NO: 1887631
uuauuuccuuguguaucau

SEQ ID NO: 2485583 - RNA, 19 nt, Artificial Sequence
  Description of Artificial Sequence: Synthetic oligonucleotide
  Antisense strand to SEQ ID NO: 2485582
augauacacaaggaaauaa

SEQ ID NO: 2485584 - RNA, 19 nt, Artificial Sequence
  Description of Artificial Sequence: Synthetic oligonucleotide
  Sense strand starting at position 870 of SEQ ID NO: 1887631
cuuagaaucuuagcuuggu

SEQ ID NO: 2485585 - RNA, 19 nt, Artificial Sequence
  Description of Artificial Sequence: Synthetic oligonucleotide
  Antisense strand to SEQ ID NO: 2485584
accaagcuaagauucuaag

SEQ ID NO: 2485586 - RNA, 19 nt, Artificial Sequence
  Description of Artificial Sequence: Synthetic oligonucleotide
  Sense strand starting at position 871 of SEQ ID NO: 1887631
uuagaaucuuagcuugguu

SEQ ID NO: 2485587 - RNA, 19 nt, Artificial Sequence
  Description of Artificial Sequence: Synthetic oligonucleotide
  Antisense strand to SEQ ID NO: 2485586
aaccaagcuaagauucuaa

SEQ ID NO: 2485588 - RNA, 19 nt, Artificial Sequence
  Description of Artificial Sequence: Synthetic oligonucleotide
  Sense strand starting at position 873 of SEQ ID NO: 1887631
agaaucuuagcuugguuga

SEQ ID NO: 2485589 - RNA, 19 nt, Artificial Sequence
  Description of Artificial Sequence: Synthetic oligonucleotide
  Antisense strand to SEQ ID NO: 2485588
ucaaccaagcuaagauucu

SEQ ID NO: 2485590 - RNA, 19 nt, Artificial Sequence
  Description of Artificial Sequence: Synthetic oligonucleotide
  Sense strand starting at position 875 of SEQ ID NO: 1887631
aaucuuagcuugguugaca

SEQ ID NO: 2485591 - RNA, 19 nt, Artificial Sequence
  Description of Artificial Sequence: Synthetic oligonucleotide
  Antisense strand to SEQ ID NO: 2485590
ugucaaccaagcuaagauu

SEQ ID NO: 2485592 - RNA, 19 nt, Artificial Sequence
  Description of Artificial Sequence: Synthetic oligonucleotide
  Sense strand starting at position 907 of SEQ ID NO: 1887631
acaauaggugcuuaguaaa

SEQ ID NO: 2485593 - RNA, 19 nt, Artificial Sequence
  Description of Artificial Sequence: Synthetic oligonucleotide
  Antisense strand to SEQ ID NO: 2485592
uuuacuaagcaccuauugu

SEQ ID NO: 2485594 - RNA, 19 nt, Artificial Sequence
  Description of Artificial Sequence: Synthetic oligonucleotide
  Sense strand starting at position 1207 of SEQ ID NO: 1887631
gauggauucucgcuauacu

SEQ ID NO: 2485595 - RNA, 19 nt, Artificial Sequence
  Description of Artificial Sequence: Synthetic oligonucleotide
  Antisense strand to SEQ ID NO: 2485594
aguauagcgagaauccauc

SEQ ID NO: 2485596 - RNA, 19 nt, Artificial Sequence
  Description of Artificial Sequence: Synthetic oligonucleotide
  Sense strand starting at position 1208 of SEQ ID NO: 1887631
auggauucucgcuauacug

SEQ ID NO: 2485597 - RNA, 19 nt, Artificial Sequence
  Description of Artificial Sequence: Synthetic oligonucleotide
  Antisense strand to SEQ ID NO: 2485596
caguauagcgagaauccau

SEQ ID NO: 2485598 - RNA, 19 nt, Artificial Sequence
  Description of Artificial Sequence: Synthetic oligonucleotide
  Sense strand starting at position 1293 of SEQ ID NO: 1887631
agguguaaucccgagaaau

SEQ ID NO: 2485599 - RNA, 19 nt, Artificial Sequence
  Description of Artificial Sequence: Synthetic oligonucleotide
  Antisense strand to SEQ ID NO: 2485598
auuucucgggauuacaccu

SEQ ID NO: 2485600 - RNA, 19 nt, Artificial Sequence
  Description of Artificial Sequence: Synthetic oligonucleotide
  Sense strand starting at position 1295 of SEQ ID NO: 1887631
guguaaucccgagaaauga

SEQ ID NO: 2485601 - RNA, 19 nt, Artificial Sequence
  Description of Artificial Sequence: Synthetic oligonucleotide
  Antisense strand to SEQ ID NO: 2485600
ucauuucucgggauuacac

SEQ ID NO: 2485602 - RNA, 19 nt, Artificial Sequence
  Description of Artificial Sequence: Synthetic oligonucleotide
  Sense strand starting at position 1436 of SEQ ID NO: 1887631
aggcuuagcaagggugaga

SEQ ID NO: 2485603 - RNA, 19 nt, Artificial Sequence
  Description of Artificial Sequence: Synthetic oligonucleotide
  Antisense strand to SEQ ID NO: 2485602
ucucacccuugcuaagccu

SEQ ID NO: 2485604 - RNA, 19 nt, Artificial Sequence
  Description of Artificial Sequence: Synthetic oligonucleotide
  Sense strand starting at position 1648 of SEQ ID NO: 1887631
uuagcagugccuugacaag

SEQ ID NO: 2485605 - RNA, 19 nt, Artificial Sequence
  Description of Artificial Sequence: Synthetic oligonucleotide
  Antisense strand to SEQ ID NO: 2485604
cuugucaaggcacugcuaa

SEQ ID NO: 2485606 - RNA, 19 nt, Artificial Sequence
  Description of Artificial Sequence: Synthetic oligonucleotide
  Sense strand starting at position 1738 of SEQ ID NO: 1887631
cccauuguuucucuuggau

SEQ ID NO: 2485607 - RNA, 19 nt, Artificial Sequence
  Description of Artificial Sequence: Synthetic oligonucleotide
  Antisense strand to SEQ ID NO: 2485606
auccaagagaaacaauggg

SEQ ID NO: 2485608 - RNA, 19 nt, Artificial Sequence
  Description of Artificial Sequence: Synthetic oligonucleotide
  Sense strand starting at position 2584 of SEQ ID NO: 1887631
ggcacauuucugggccuca

SEQ ID NO: 2485609 - RNA, 19 nt, Artificial Sequence
  Description of Artificial Sequence: Synthetic oligonucleotide
  Antisense strand to SEQ ID NO: 2485608
ugaggcccagaaaugugcc

SEQ ID NO: 2485610 - RNA, 19 nt, Artificial Sequence
  Description of Artificial Sequence: Synthetic oligonucleotide
  Sense strand starting at position 2602 of SEQ ID NO: 1887631
aguauccucuuccucgaua

SEQ ID NO: 2485611 - RNA, 19 nt, Artificial Sequence
  Description of Artificial Sequence: Synthetic oligonucleotide
  Antisense strand to SEQ ID NO: 2485610
uaucgaggaagaggauacu

SEQ ID NO: 2485612 - RNA, 19 nt, Artificial Sequence
  Description of Artificial Sequence: Synthetic oligonucleotide
  Sense strand starting at position 2603 of SEQ ID NO: 1887631
guauccucuuccucgauau

SEQ ID NO: 2485613 - RNA, 19 nt, Artificial Sequence
  Description of Artificial Sequence: Synthetic oligonucleotide
  Antisense strand to SEQ ID NO: 2485612
auaucgaggaagaggauac

SEQ ID NO: 2485614 - RNA, 19 nt, Artificial Sequence
  Description of Artificial Sequence: Synthetic oligonucleotide
  Sense strand starting at position 2605 of SEQ ID NO: 1887631
auccucuuccucgauauga

SEQ ID NO: 2485615 - RNA, 19 nt, Artificial Sequence
  Description of Artificial Sequence: Synthetic oligonucleotide
  Antisense strand to SEQ ID NO: 2485614
ucauaucgaggaagaggau

SEQ ID NO: 2485616 - RNA, 19 nt, Artificial Sequence
  Description of Artificial Sequence: Synthetic oligonucleotide
  Sense strand starting at position 2697 of SEQ ID NO: 1887631
gaguuuaagagguggcugu

SEQ ID NO: 2485617 - RNA, 19 nt, Artificial Sequence
  Description of Artificial Sequence: Synthetic oligonucleotide
  Antisense strand to SEQ ID NO: 2485616
acagccaccucuuaaacuc

SEQ ID NO: 2485618 - RNA, 19 nt, Artificial Sequence
  Description of Artificial Sequence: Synthetic oligonucleotide
  Sense strand starting at position 2701 of SEQ ID NO: 1887631
uuaagagguggcugucuau

SEQ ID NO: 2485619 - RNA, 19 nt, Artificial Sequence
  Description of Artificial Sequence: Synthetic oligonucleotide
  Antisense strand to SEQ ID NO: 2485618
auagacagccaccucuuaa

SEQ ID NO: 2485620 - RNA, 19 nt, Artificial Sequence
  Description of Artificial Sequence: Synthetic oligonucleotide
  Sense strand starting at position 2713 of SEQ ID NO: 1887631
ugucuaugcccaugggauu

SEQ ID NO: 2485621 - RNA, 19 nt, Artificial Sequence
  Description of Artificial Sequence: Synthetic oligonucleotide
  Antisense strand to SEQ ID NO: 2485620
aaucccaugggcauagaca

SEQ ID NO: 2485622 - RNA, 19 nt, Artificial Sequence
  Description of Artificial Sequence: Synthetic oligonucleotide
  Sense strand starting at position 2834 of SEQ ID NO: 1887631
gugucaugccucucugcca

SEQ ID NO: 2485623 - RNA, 19 nt, Artificial Sequence
  Description of Artificial Sequence: Synthetic oligonucleotide
  Antisense strand to SEQ ID NO: 2485622
uggcagagaggcaugacac

SEQ ID NO: 2485624 - RNA, 19 nt, Artificial Sequence
  Description of Artificial Sequence: Synthetic oligonucleotide
  Sense strand starting at position 2855 of SEQ ID NO: 1887631
ccuguuuccucaccaggaa

SEQ ID NO: 2485625 - RNA, 19 nt, Artificial Sequence
  Description of Artificial Sequence: Synthetic oligonucleotide
  Antisense strand to SEQ ID NO: 2485624
uuccuggugaggaaacagg

SEQ ID NO: 2485626 - RNA, 19 nt, Artificial Sequence
  Description of Artificial Sequence: Synthetic oligonucleotide
  Sense strand starting at position 2856 of SEQ ID NO: 1887631
cuguuuccucaccaggaaa

SEQ ID NO: 2485627 - RNA, 19 nt, Artificial Sequence
  Description of Artificial Sequence: Synthetic oligonucleotide
  Antisense strand to SEQ ID NO: 2485626
uuuccuggugaggaaacag

SEQ ID NO: 2485628 - RNA, 19 nt, Artificial Sequence
  Description of Artificial Sequence: Synthetic oligonucleotide
  Sense strand starting at position 2948 of SEQ ID NO: 1887631
cuugauaaacuggguguua

SEQ ID NO: 2485629 - RNA, 19 nt, Artificial Sequence
  Description of Artificial Sequence: Synthetic oligonucleotide
  Antisense strand to SEQ ID NO: 2485628
uaacacccaguuuaucaag

SEQ ID NO: 2485630 - RNA, 19 nt, Artificial Sequence
  Description of Artificial Sequence: Synthetic oligonucleotide
  Sense strand starting at position 2949 of SEQ ID NO: 1887631
uugauaaacuggguguuau

SEQ ID NO: 2485631 - RNA, 19 nt, Artificial Sequence
  Description of Artificial Sequence: Synthetic oligonucleotide
  Antisense strand to SEQ ID NO: 2485630
auaacacccaguuuaucaa

SEQ ID NO: 2485632 - RNA, 19 nt, Artificial Sequence
  Description of Artificial Sequence: Synthetic oligonucleotide
  Sense strand starting at position 2950 of SEQ ID NO: 1887631
ugauaaacuggguguuauu

SEQ ID NO: 2485633 - RNA, 19 nt, Artificial Sequence
  Description of Artificial Sequence: Synthetic oligonucleotide
  Antisense strand to SEQ ID NO: 2485632
aauaacacccaguuuauca

SEQ ID NO: 2485634 - RNA, 19 nt, Artificial Sequence
  Description of Artificial Sequence: Synthetic oligonucleotide
  Sense strand starting at position 2976 of SEQ ID NO: 1887631
cucauccuccucuggagaa

SEQ ID NO: 2485635 - RNA, 19 nt, Artificial Sequence
  Description of Artificial Sequence: Synthetic oligonucleotide
  Antisense strand to SEQ ID NO: 2485634
uucuccagaggaggaugag

SEQ ID NO: 2485636 - RNA, 19 nt, Artificial Sequence
  Description of Artificial Sequence: Synthetic oligonucleotide
  Sense strand starting at position 3040 of SEQ ID NO: 1887631
ggaagucuucuccaacauu

SEQ ID NO: 2485637 - RNA, 19 nt, Artificial Sequence
  Description of Artificial Sequence: Synthetic oligonucleotide
  Antisense strand to SEQ ID NO: 2485636
aauguuggagaagacuucc

SEQ ID NO: 2485638 - RNA, 19 nt, Artificial Sequence
  Description of Artificial Sequence: Synthetic oligonucleotide
  Sense strand starting at position 3167 of SEQ ID NO: 1887631
uggcuuaugucaguaaucu

SEQ ID NO: 2485639 - RNA, 19 nt, Artificial Sequence
  Description of Artificial Sequence: Synthetic oligonucleotide
  Antisense strand to SEQ ID NO: 2485638
agauuacugacauaagcca

SEQ ID NO: 2485640 - RNA, 19 nt, Artificial Sequence
  Description of Artificial Sequence: Synthetic oligonucleotide
  Sense strand starting at position 3168 of SEQ ID NO: 1887631
ggcuuaugucaguaaucuc

SEQ ID NO: 2485641 - RNA, 19 nt, Artificial Sequence
  Description of Artificial Sequence: Synthetic oligonucleotide
  Antisense strand to SEQ ID NO: 2485640
gagauuacugacauaagcc

SEQ ID NO: 2485642 - RNA, 19 nt, Artificial Sequence
  Description of Artificial Sequence: Synthetic oligonucleotide
  Sense strand starting at position 3235 of SEQ ID NO: 1887631
gagacaagucugggcaaga

SEQ ID NO: 2485643 - RNA, 19 nt, Artificial Sequence
  Description of Artificial Sequence: Synthetic oligonucleotide
  Antisense strand to SEQ ID NO: 2485642
ucuugcccagacuugucuc

SEQ ID NO: 2485644 - RNA, 19 nt, Artificial Sequence
  Description of Artificial Sequence: Synthetic oligonucleotide
  Sense strand starting at position 3248 of SEQ ID NO: 1887631
gcaagauggcaauaccuca

SEQ ID NO: 2485645 - RNA, 19 nt, Artificial Sequence
  Description of Artificial Sequence: Synthetic oligonucleotide
  Antisense strand to SEQ ID NO: 2485644
ugagguauugccaucuugc

SEQ ID NO: 2485646 - RNA, 19 nt, Artificial Sequence
  Description of Artificial Sequence: Synthetic oligonucleotide
  Sense strand starting at position 3426 of SEQ ID NO: 1887631
gggcuugguggugggauua

SEQ ID NO: 2485647 - RNA, 19 nt, Artificial Sequence
  Description of Artificial Sequence: Synthetic oligonucleotide
  Antisense strand to SEQ ID NO: 2485646
uaaucccaccaccaagccc

SEQ ID NO: 2485648 - RNA, 19 nt, Artificial Sequence
  Description of Artificial Sequence: Synthetic oligonucleotide
  Sense strand starting at position 3538 of SEQ ID NO: 1887631
gcacuuccgccugaucaac

SEQ ID NO: 2485649 - RNA, 19 nt, Artificial Sequence
  Description of Artificial Sequence: Synthetic oligonucleotide
  Antisense strand to SEQ ID NO: 2485648
guugaucaggcggaagugc

SEQ ID NO: 2485650 - RNA, 19 nt, Artificial Sequence
  Description of Artificial Sequence: Synthetic oligonucleotide
  Sense strand starting at position 3680 of SEQ ID NO: 1887631
ccgaccauuugcuauagau

SEQ ID NO: 2485651 - RNA, 19 nt, Artificial Sequence
  Description of Artificial Sequence: Synthetic oligonucleotide
  Antisense strand to SEQ ID NO: 2485650
aucuauagcaaauggucgg

SEQ ID NO: 2485652 - RNA, 19 nt, Artificial Sequence
  Description of Artificial Sequence: Synthetic oligonucleotide
  Sense strand starting at position 3804 of SEQ ID NO: 1887631
acggaaucugcaugagaau

SEQ ID NO: 2485653 - RNA, 19 nt, Artificial Sequence
  Description of Artificial Sequence: Synthetic oligonucleotide
  Antisense strand to SEQ ID NO: 2485652
auucucaugcagauuccgu

SEQ ID NO: 2485654 - RNA, 19 nt, Artificial Sequence
  Description of Artificial Sequence: Synthetic oligonucleotide
  Sense strand starting at position 3827 of SEQ ID NO: 1887631
uuucuuacugucugugacu

SEQ ID NO: 2485655 - RNA, 19 nt, Artificial Sequence
  Description of Artificial Sequence: Synthetic oligonucleotide
  Antisense strand to SEQ ID NO: 2485654
agucacagacaguaagaaa

SEQ ID NO: 2485656 - RNA, 19 nt, Artificial Sequence
  Description of Artificial Sequence: Synthetic oligonucleotide
  Sense strand starting at position 32 of SEQ ID NO: 1887632
uggccagucccgugugagu

SEQ ID NO: 2485657 - RNA, 19 nt, Artificial Sequence
  Description of Artificial Sequence: Synthetic oligonucleotide
  Antisense strand to SEQ ID NO: 2485656
acucacacgggacuggcca

SEQ ID NO: 2485658 - RNA, 19 nt, Artificial Sequence
  Description of Artificial Sequence: Synthetic oligonucleotide
  Sense strand starting at position 42 of SEQ ID NO: 1887632
cgugugaguccuugugugu

SEQ ID NO: 2485659 - RNA, 19 nt, Artificial Sequence
  Description of Artificial Sequence: Synthetic oligonucleotide
  Antisense strand to SEQ ID NO: 2485658
acacacaaggacucacacg

SEQ ID NO: 2485660 - RNA, 19 nt, Artificial Sequence
  Description of Artificial Sequence: Synthetic oligonucleotide
  Sense strand starting at position 151 of SEQ ID NO: 1887632
ucccaaguggagugaguuu

SEQ ID NO: 2485661 - RNA, 19 nt, Artificial Sequence
  Description of Artificial Sequence: Synthetic oligonucleotide
  Antisense strand to SEQ ID NO: 2485660
aaacucacuccacuuggga

SEQ ID NO: 2485662 - RNA, 19 nt, Artificial Sequence
  Description of Artificial Sequence: Synthetic oligonucleotide
  Sense strand starting at position 162 of SEQ ID NO: 1887632
gugaguuuguguuguggga

SEQ ID NO: 2485663 - RNA, 19 nt, Artificial Sequence
  Description of Artificial Sequence: Synthetic oligonucleotide
  Antisense strand to SEQ ID NO: 2485662
ucccacaacacaaacucac

SEQ ID NO: 2485664 - RNA, 19 nt, Artificial Sequence
  Description of Artificial Sequence: Synthetic oligonucleotide
  Sense strand starting at position 164 of SEQ ID NO: 1887632
gaguuuguguugugggacu

SEQ ID NO: 2485665 - RNA, 19 nt, Artificial Sequence
  Description of Artificial Sequence: Synthetic oligonucleotide
  Antisense strand to SEQ ID NO: 2485664
agucccacaacacaaacuc

SEQ ID NO: 2485666 - RNA, 19 nt, Artificial Sequence
  Description of Artificial Sequence: Synthetic oligonucleotide
  Sense strand starting at position 236 of SEQ ID NO: 1887632
cccuguccuugcugugaga

SEQ ID NO: 2485667 - RNA, 19 nt, Artificial Sequence
  Description of Artificial Sequence: Synthetic oligonucleotide
  Antisense strand to SEQ ID NO: 2485666
ucucacagcaaggacaggg

SEQ ID NO: 2485668 - RNA, 19 nt, Artificial Sequence
  Description of Artificial Sequence: Synthetic oligonucleotide
  Sense strand starting at position 915 of SEQ ID NO: 1887632
gccaauguggucuuugugu

SEQ ID NO: 2485669 - RNA, 19 nt, Artificial Sequence
  Description of Artificial Sequence: Synthetic oligonucleotide
  Antisense strand to SEQ ID NO: 2485668
acacaaagaccacauuggc

SEQ ID NO: 2485670 - RNA, 19 nt, Artificial Sequence
  Description of Artificial Sequence: Synthetic oligonucleotide
  Sense strand starting at position 920 of SEQ ID NO: 1887632
uguggucuuuguguugcaa

SEQ ID NO: 2485671 - RNA, 19 nt, Artificial Sequence
  Description of Artificial Sequence: Synthetic oligonucleotide
  Antisense strand to SEQ ID NO: 2485670
uugcaacacaaagaccaca

SEQ ID NO: 2485672 - RNA, 19 nt, Artificial Sequence
  Description of Artificial Sequence: Synthetic oligonucleotide
  Sense strand starting at position 922 of SEQ ID NO: 1887632
uggucuuuguguugcaaga

SEQ ID NO: 2485673 - RNA, 19 nt, Artificial Sequence
  Description of Artificial Sequence: Synthetic oligonucleotide
  Antisense strand to SEQ ID NO: 2485672
ucuugcaacacaaagacca

SEQ ID NO: 2485674 - RNA, 19 nt, Artificial Sequence
  Description of Artificial Sequence: Synthetic oligonucleotide
  Sense strand starting at position 983 of SEQ ID NO: 1887632
ggaagucccuccuggaauc

SEQ ID NO: 2485675 - RNA, 19 nt, Artificial Sequence
  Description of Artificial Sequence: Synthetic oligonucleotide
  Antisense strand to SEQ ID NO: 2485674
gauuccaggagggacuucc

SEQ ID NO: 2485676 - RNA, 19 nt, Artificial Sequence
  Description of Artificial Sequence: Synthetic oligonucleotide
  Sense strand starting at position 993 of SEQ ID NO: 1887632
ccuggaaucugacugcagu

SEQ ID NO: 2485677 - RNA, 19 nt, Artificial Sequence
  Description of Artificial Sequence: Synthetic oligonucleotide
  Antisense strand to SEQ ID NO: 2485676
acugcagucagauuccagg

SEQ ID NO: 2485678 - RNA, 19 nt, Artificial Sequence
  Description of Artificial Sequence: Synthetic oligonucleotide
  Sense strand starting at position 1252 of SEQ ID NO: 1887632
gggccauuguguugggaag

SEQ ID NO: 2485679 - RNA, 19 nt, Artificial Sequence
  Description of Artificial Sequence: Synthetic oligonucleotide
  Antisense strand to SEQ ID NO: 2485678
cuucccaacacaauggccc

SEQ ID NO: 2485680 - RNA, 19 nt, Artificial Sequence
  Description of Artificial Sequence: Synthetic oligonucleotide
  Sense strand starting at position 1253 of SEQ ID NO: 1887632
ggccauuguguugggaagu

SEQ ID NO: 2485681 - RNA, 19 nt, Artificial Sequence
  Description of Artificial Sequence: Synthetic oligonucleotide
  Antisense strand to SEQ ID NO: 2485680
acuucccaacacaauggcc

SEQ ID NO: 2485682 - RNA, 19 nt, Artificial Sequence
  Description of Artificial Sequence: Synthetic oligonucleotide
  Sense strand starting at position 1254 of SEQ ID NO: 1887632
gccauuguguugggaaguc

SEQ ID NO: 2485683 - RNA, 19 nt, Artificial Sequence
  Description of Artificial Sequence: Synthetic oligonucleotide
  Antisense strand to SEQ ID NO: 2485682
gacuucccaacacaauggc

SEQ ID NO: 2485684 - RNA, 19 nt, Artificial Sequence
  Description of Artificial Sequence: Synthetic oligonucleotide
  Sense strand starting at position 1385 of SEQ ID NO: 1887632
gggaaaguguguccugguu

SEQ ID NO: 2485685 - RNA, 19 nt, Artificial Sequence
  Description of Artificial Sequence: Synthetic oligonucleotide
  Antisense strand to SEQ ID NO: 2485684
aaccaggacacacuuuccc

SEQ ID NO: 2485686 - RNA, 19 nt, Artificial Sequence
  Description of Artificial Sequence: Synthetic oligonucleotide
  Sense strand starting at position 1538 of SEQ ID NO: 1887632
ggcuguaggccuuagggaa

SEQ ID NO: 2485687 - RNA, 19 nt, Artificial Sequence
  Description of Artificial Sequence: Synthetic oligonucleotide
  Antisense strand to SEQ ID NO: 2485686
uucccuaaggccuacagcc

SEQ ID NO: 2485688 - RNA, 19 nt, Artificial Sequence
  Description of Artificial Sequence: Synthetic oligonucleotide
  Sense strand starting at position 1766 of SEQ ID NO: 1887632
agaccugaggcuugugauc

SEQ ID NO: 2485689 - RNA, 19 nt, Artificial Sequence
  Description of Artificial Sequence: Synthetic oligonucleotide
  Antisense strand to SEQ ID NO: 2485688
gaucacaagccucaggucu

SEQ ID NO: 2485690 - RNA, 19 nt, Artificial Sequence
  Description of Artificial Sequence: Synthetic oligonucleotide
  Sense strand starting at position 1895 of SEQ ID NO: 1887632
aauagaggucguuaagccu

SEQ ID NO: 2485691 - RNA, 19 nt, Artificial Sequence
  Description of Artificial Sequence: Synthetic oligonucleotide
  Antisense strand to SEQ ID NO: 2485690
aggcuuaacgaccucuauu

SEQ ID NO: 2485692 - RNA, 19 nt, Artificial Sequence
  Description of Artificial Sequence: Synthetic oligonucleotide
  Sense strand starting at position 2055 of SEQ ID NO: 1887632
gaaauugacucacuagcga

SEQ ID NO: 2485693 - RNA, 19 nt, Artificial Sequence
  Description of Artificial Sequence: Synthetic oligonucleotide
  Antisense strand to SEQ ID NO: 2485692
ucgcuagugagucaauuuc

SEQ ID NO: 2485694 - RNA, 19 nt, Artificial Sequence
  Description of Artificial Sequence: Synthetic oligonucleotide
  Sense strand starting at position 2692 of SEQ ID NO: 1887632
gcucauauaucccgggcua

SEQ ID NO: 2485695 - RNA, 19 nt, Artificial Sequence
  Description of Artificial Sequence: Synthetic oligonucleotide
  Antisense strand to SEQ ID NO: 2485694
uagcccgggauauaugagc

SEQ ID NO: 2485696 - RNA, 19 nt, Artificial Sequence
  Description of Artificial Sequence: Synthetic oligonucleotide
  Sense strand starting at position 2693 of SEQ ID NO: 1887632
cucauauaucccgggcuau

SEQ ID NO: 2485697 - RNA, 19 nt, Artificial Sequence
  Description of Artificial Sequence: Synthetic oligonucleotide
  Antisense strand to SEQ ID NO: 2485696
auagcccgggauauaugag

SEQ ID NO: 2485698 - RNA, 19 nt, Artificial Sequence
  Description of Artificial Sequence: Synthetic oligonucleotide
  Sense strand starting at position 2694 of SEQ ID NO: 1887632
ucauauaucccgggcuauu

SEQ ID NO: 2485699 - RNA, 19 nt, Artificial Sequence
  Description of Artificial Sequence: Synthetic oligonucleotide
  Antisense strand to SEQ ID NO: 2485698
aauagcccgggauauauga

SEQ ID NO: 2485700 - RNA, 19 nt, Artificial Sequence
  Description of Artificial Sequence: Synthetic oligonucleotide
  Sense strand starting at position 2706 of SEQ ID NO: 1887632
ggcuauuuauagccgguga

SEQ ID NO: 2485701 - RNA, 19 nt, Artificial Sequence
  Description of Artificial Sequence: Synthetic oligonucleotide
  Antisense strand to SEQ ID NO: 2485700
ucaccggcuauaaauagcc

SEQ ID NO: 2485702 - RNA, 19 nt, Artificial Sequence
  Description of Artificial Sequence: Synthetic oligonucleotide
  Sense strand starting at position 2708 of SEQ ID NO: 1887632
cuauuuauagccggugagu

SEQ ID NO: 2485703 - RNA, 19 nt, Artificial Sequence
  Description of Artificial Sequence: Synthetic oligonucleotide
  Antisense strand to SEQ ID NO: 2485702
acucaccggcuauaaauag

SEQ ID NO: 2485704 - RNA, 19 nt, Artificial Sequence
  Description of Artificial Sequence: Synthetic oligonucleotide
  Sense strand starting at position 2710 of SEQ ID NO: 1887632
auuuauagccggugaguca

SEQ ID NO: 2485705 - RNA, 19 nt, Artificial Sequence
  Description of Artificial Sequence: Synthetic oligonucleotide
  Antisense strand to SEQ ID NO: 2485704
ugacucaccggcuauaaau

SEQ ID NO: 2485706 - RNA, 19 nt, Artificial Sequence
  Description of Artificial Sequence: Synthetic oligonucleotide
  Sense strand starting at position 2979 of SEQ ID NO: 1887632
cccgcauugcuugcuuauu

SEQ ID NO: 2485707 - RNA, 19 nt, Artificial Sequence
  Description of Artificial Sequence: Synthetic oligonucleotide
  Antisense strand to SEQ ID NO: 2485706
aauaagcaagcaaugcggg

SEQ ID NO: 2485708 - RNA, 19 nt, Artificial Sequence
  Description of Artificial Sequence: Synthetic oligonucleotide
  Sense strand starting at position 2980 of SEQ ID NO: 1887632
ccgcauugcuugcuuauua

SEQ ID NO: 2485709 - RNA, 19 nt, Artificial Sequence
  Description of Artificial Sequence: Synthetic oligonucleotide
  Antisense strand to SEQ ID NO: 2485708
uaauaagcaagcaaugcgg

SEQ ID NO: 2485710 - RNA, 19 nt, Artificial Sequence
  Description of Artificial Sequence: Synthetic oligonucleotide
  Sense strand starting at position 2981 of SEQ ID NO: 1887632
cgcauugcuugcuuauuaa

SEQ ID NO: 2485711 - RNA, 19 nt, Artificial Sequence
  Description of Artificial Sequence: Synthetic oligonucleotide
  Antisense strand to SEQ ID NO: 2485710
uuaauaagcaagcaaugcg

SEQ ID NO: 2485712 - RNA, 19 nt, Artificial Sequence
  Description of Artificial Sequence: Synthetic oligonucleotide
  Sense strand starting at position 2984 of SEQ ID NO: 1887632
auugcuugcuuauuaagaa

SEQ ID NO: 2485713 - RNA, 19 nt, Artificial Sequence
  Description of Artificial Sequence: Synthetic oligonucleotide
  Antisense strand to SEQ ID NO: 2485712
uucuuaauaagcaagcaau

SEQ ID NO: 2485714 - RNA, 19 nt, Artificial Sequence
  Description of Artificial Sequence: Synthetic oligonucleotide
  Sense strand starting at position 2985 of SEQ ID NO: 1887632
uugcuugcuuauuaagaaa

SEQ ID NO: 2485715 - RNA, 19 nt, Artificial Sequence
  Description of Artificial Sequence: Synthetic oligonucleotide
  Antisense strand to SEQ ID NO: 2485714
uuucuuaauaagcaagcaa

SEQ ID NO: 2485716 - RNA, 19 nt, Artificial Sequence
  Description of Artificial Sequence: Synthetic oligonucleotide
  Sense strand starting at position 3029 of SEQ ID NO: 1887632
uggugaagcuccuuacucu

SEQ ID NO: 2485717 - RNA, 19 nt, Artificial Sequence
  Description of Artificial Sequence: Synthetic oligonucleotide
  Antisense strand to SEQ ID NO: 2485716
agaguaaggagcuucacca

SEQ ID NO: 2485718 - RNA, 19 nt, Artificial Sequence
  Description of Artificial Sequence: Synthetic oligonucleotide
  Sense strand starting at position 3076 of SEQ ID NO: 1887632
aaggaaaucucucgaguug

SEQ ID NO: 2485719 - RNA, 19 nt, Artificial Sequence
  Description of Artificial Sequence: Synthetic oligonucleotide
  Antisense strand to SEQ ID NO: 2485718
caacucgagagauuuccuu

SEQ ID NO: 2485720 - RNA, 19 nt, Artificial Sequence
  Description of Artificial Sequence: Synthetic oligonucleotide
  Sense strand starting at position 3129 of SEQ ID NO: 1887632
ccguauuuaccaggccaga

SEQ ID NO: 2485721 - RNA, 19 nt, Artificial Sequence
  Description of Artificial Sequence: Synthetic oligonucleotide
  Antisense strand to SEQ ID NO: 2485720
ucuggccugguaaauacgg

SEQ ID NO: 2485722 - RNA, 19 nt, Artificial Sequence
  Description of Artificial Sequence: Synthetic oligonucleotide
  Sense strand starting at position 3153 of SEQ ID NO: 1887632
ggcuuagaaucauggagca

SEQ ID NO: 2485723 - RNA, 19 nt, Artificial Sequence
  Description of Artificial Sequence: Synthetic oligonucleotide
  Antisense strand to SEQ ID NO: 2485722
ugcuccaugauucuaagcc

SEQ ID NO: 2485724 - RNA, 19 nt, Artificial Sequence
  Description of Artificial Sequence: Synthetic oligonucleotide
  Sense strand starting at position 3163 of SEQ ID NO: 1887632
cauggagcauucuuagcuu

SEQ ID NO: 2485725 - RNA, 19 nt, Artificial Sequence
  Description of Artificial Sequence: Synthetic oligonucleotide
  Antisense strand to SEQ ID NO: 2485724
aagcuaagaaugcuccaug

SEQ ID NO: 2485726 - RNA, 19 nt, Artificial Sequence
  Description of Artificial Sequence: Synthetic oligonucleotide
  Sense strand starting at position 3169 of SEQ ID NO: 1887632
gcauucuuagcuuagcgua

SEQ ID NO: 2485727 - RNA, 19 nt, Artificial Sequence
  Description of Artificial Sequence: Synthetic oligonucleotide
  Antisense strand to SEQ ID NO: 2485726
uacgcuaagcuaagaaugc

SEQ ID NO: 2485728 - RNA, 19 nt, Artificial Sequence
  Description of Artificial Sequence: Synthetic oligonucleotide
  Sense strand starting at position 3171 of SEQ ID NO: 1887632
auucuuagcuuagcguaua

SEQ ID NO: 2485729 - RNA, 19 nt, Artificial Sequence
  Description of Artificial Sequence: Synthetic oligonucleotide
  Antisense strand to SEQ ID NO: 2485728
uauacgcuaagcuaagaau

SEQ ID NO: 2485730 - RNA, 19 nt, Artificial Sequence
  Description of Artificial Sequence: Synthetic oligonucleotide
  Sense strand starting at position 3174 of SEQ ID NO: 1887632
cuuagcuuagcguauauga

SEQ ID NO: 2485731 - RNA, 19 nt, Artificial Sequence
  Description of Artificial Sequence: Synthetic oligonucleotide
  Antisense strand to SEQ ID NO: 2485730
ucauauacgcuaagcuaag

SEQ ID NO: 2485732 - RNA, 19 nt, Artificial Sequence
  Description of Artificial Sequence: Synthetic oligonucleotide
  Sense strand starting at position 3176 of SEQ ID NO: 1887632
uagcuuagcguauaugaca

SEQ ID NO: 2485733 - RNA, 19 nt, Artificial Sequence
  Description of Artificial Sequence: Synthetic oligonucleotide
  Antisense strand to SEQ ID NO: 2485732
ugucauauacgcuaagcua

SEQ ID NO: 2485734 - RNA, 19 nt, Artificial Sequence
  Description of Artificial Sequence: Synthetic oligonucleotide
  Sense strand starting at position 3181 of SEQ ID NO: 1887632
uagcguauaugacauaguu

SEQ ID NO: 2485735 - RNA, 19 nt, Artificial Sequence
  Description of Artificial Sequence: Synthetic oligonucleotide
  Antisense strand to SEQ ID NO: 2485734
aacuaugucauauacgcua

SEQ ID NO: 2485736 - RNA, 19 nt, Artificial Sequence
  Description of Artificial Sequence: Synthetic oligonucleotide
  Sense strand starting at position 568 of SEQ ID NO: 1887633
ggcucaagcguccuucuau

SEQ ID NO: 2485737 - RNA, 19 nt, Artificial Sequence
  Description of Artificial Sequence: Synthetic oligonucleotide
  Antisense strand to SEQ ID NO: 2485736
auagaaggacgcuugagcc

SEQ ID NO: 2485738 - RNA, 19 nt, Artificial Sequence
  Description of Artificial Sequence: Synthetic oligonucleotide
  Sense strand starting at position 569 of SEQ ID NO: 1887633
gcucaagcguccuucuauc

SEQ ID NO: 2485739 - RNA, 19 nt, Artificial Sequence
  Description of Artificial Sequence: Synthetic oligonucleotide
  Antisense strand to SEQ ID NO: 2485738
gauagaaggacgcuugagc

SEQ ID NO: 2485740 - RNA, 19 nt, Artificial Sequence
  Description of Artificial Sequence: Synthetic oligonucleotide
  Sense strand starting at position 730 of SEQ ID NO: 1887633
ugucauauacgcuaagcua

SEQ ID NO: 2485741 - RNA, 19 nt, Artificial Sequence
  Description of Artificial Sequence: Synthetic oligonucleotide
  Antisense strand to SEQ ID NO: 2485740
uagcuuagcguauaugaca

SEQ ID NO: 2485742 - RNA, 19 nt, Artificial Sequence
  Description of Artificial Sequence: Synthetic oligonucleotide
  Sense strand starting at position 744 of SEQ ID NO: 1887633
agcuaagaaugcuccauga

SEQ ID NO: 2485743 - RNA, 19 nt, Artificial Sequence
  Description of Artificial Sequence: Synthetic oligonucleotide
  Antisense strand to SEQ ID NO: 2485742
ucauggagcauucuuagcu

SEQ ID NO: 2485744 - RNA, 19 nt, Artificial Sequence
  Description of Artificial Sequence: Synthetic oligonucleotide
  Sense strand starting at position 746 of SEQ ID NO: 1887633
cuaagaaugcuccaugauu

SEQ ID NO: 2485745 - RNA, 19 nt, Artificial Sequence
  Description of Artificial Sequence: Synthetic oligonucleotide
  Antisense strand to SEQ ID NO: 2485744
aaucauggagcauucuuag

SEQ ID NO: 2485746 - RNA, 19 nt, Artificial Sequence
  Description of Artificial Sequence: Synthetic oligonucleotide
  Sense strand starting at position 772 of SEQ ID NO: 1887633
cugguucuggccugguaaa

SEQ ID NO: 2485747 - RNA, 19 nt, Artificial Sequence
  Description of Artificial Sequence: Synthetic oligonucleotide
  Antisense strand to SEQ ID NO: 2485746
uuuaccaggccagaaccag

SEQ ID NO: 2485748 - RNA, 19 nt, Artificial Sequence
  Description of Artificial Sequence: Synthetic oligonucleotide
  Sense strand starting at position 773 of SEQ ID NO: 1887633
ugguucuggccugguaaau

SEQ ID NO: 2485749 - RNA, 19 nt, Artificial Sequence
  Description of Artificial Sequence: Synthetic oligonucleotide
  Antisense strand to SEQ ID NO: 2485748
auuuaccaggccagaacca

SEQ ID NO: 2485750 - RNA, 19 nt, Artificial Sequence
  Description of Artificial Sequence: Synthetic oligonucleotide
  Sense strand starting at position 782 of SEQ ID NO: 1887633
ccugguaaauacggaguaa

SEQ ID NO: 2485751 - RNA, 19 nt, Artificial Sequence
  Description of Artificial Sequence: Synthetic oligonucleotide
  Antisense strand to SEQ ID NO: 2485750
uuacuccguauuuaccagg

SEQ ID NO: 2485752 - RNA, 19 nt, Artificial Sequence
  Description of Artificial Sequence: Synthetic oligonucleotide
  Sense strand starting at position 838 of SEQ ID NO: 1887633
gagauuuccuuuggaugca

SEQ ID NO: 2485753 - RNA, 19 nt, Artificial Sequence
  Description of Artificial Sequence: Synthetic oligonucleotide
  Antisense strand to SEQ ID NO: 2485752
ugcauccaaaggaaaucuc

SEQ ID NO: 2485754 - RNA, 19 nt, Artificial Sequence
  Description of Artificial Sequence: Synthetic oligonucleotide
  Sense strand starting at position 839 of SEQ ID NO: 1887633
agauuuccuuuggaugcaa

SEQ ID NO: 2485755 - RNA, 19 nt, Artificial Sequence
  Description of Artificial Sequence: Synthetic oligonucleotide
  Antisense strand to SEQ ID NO: 2485754
uugcauccaaaggaaaucu

SEQ ID NO: 2485756 - RNA, 19 nt, Artificial Sequence
  Description of Artificial Sequence: Synthetic oligonucleotide
  Sense strand starting at position 917 of SEQ ID NO: 1887633
uugguuucuuaauaagcaa

SEQ ID NO: 2485757 - RNA, 19 nt, Artificial Sequence
  Description of Artificial Sequence: Synthetic oligonucleotide
  Antisense strand to SEQ ID NO: 2485756
uugcuuauuaagaaaccaa

SEQ ID NO: 2485758 - RNA, 19 nt, Artificial Sequence
  Description of Artificial Sequence: Synthetic oligonucleotide
  Sense strand starting at position 932 of SEQ ID NO: 1887633
gcaagcaaugcggguguaa

SEQ ID NO: 2485759 - RNA, 19 nt, Artificial Sequence
  Description of Artificial Sequence: Synthetic oligonucleotide
  Antisense strand to SEQ ID NO: 2485758
uuacacccgcauugcuugc

SEQ ID NO: 2485760 - RNA, 19 nt, Artificial Sequence
  Description of Artificial Sequence: Synthetic oligonucleotide
  Sense strand starting at position 934 of SEQ ID NO: 1887633
aagcaaugcggguguaaug

SEQ ID NO: 2485761 - RNA, 19 nt, Artificial Sequence
  Description of Artificial Sequence: Synthetic oligonucleotide
  Antisense strand to SEQ ID NO: 2485760
cauuacacccgcauugcuu

SEQ ID NO: 2485762 - RNA, 19 nt, Artificial Sequence
  Description of Artificial Sequence: Synthetic oligonucleotide
  Sense strand starting at position 943 of SEQ ID NO: 1887633
ggguguaauguucaaacug

SEQ ID NO: 2485763 - RNA, 19 nt, Artificial Sequence
  Description of Artificial Sequence: Synthetic oligonucleotide
  Antisense strand to SEQ ID NO: 2485762
caguuugaacauuacaccc

SEQ ID NO: 2485764 - RNA, 19 nt, Artificial Sequence
  Description of Artificial Sequence: Synthetic oligonucleotide
  Sense strand starting at position 979 of SEQ ID NO: 1887633
ggcgcaugauguuugugau

SEQ ID NO: 2485765 - RNA, 19 nt, Artificial Sequence
  Description of Artificial Sequence: Synthetic oligonucleotide
  Antisense strand to SEQ ID NO: 2485764
aucacaaacaucaugcgcc

SEQ ID NO: 2485766 - RNA, 19 nt, Artificial Sequence
  Description of Artificial Sequence: Synthetic oligonucleotide
  Sense strand starting at position 980 of SEQ ID NO: 1887633
gcgcaugauguuugugauu

SEQ ID NO: 2485767 - RNA, 19 nt, Artificial Sequence
  Description of Artificial Sequence: Synthetic oligonucleotide
  Antisense strand to SEQ ID NO: 2485766
aaucacaaacaucaugcgc

SEQ ID NO: 2485768 - RNA, 19 nt, Artificial Sequence
  Description of Artificial Sequence: Synthetic oligonucleotide
  Sense strand starting at position 982 of SEQ ID NO: 1887633
gcaugauguuugugauuuc

SEQ ID NO: 2485769 - RNA, 19 nt, Artificial Sequence
  Description of Artificial Sequence: Synthetic oligonucleotide
  Antisense strand to SEQ ID NO: 2485768
gaaaucacaaacaucaugc

SEQ ID NO: 2485770 - RNA, 19 nt, Artificial Sequence
  Description of Artificial Sequence: Synthetic oligonucleotide
  Sense strand starting at position 989 of SEQ ID NO: 1887633
guuugugauuucccauucu

SEQ ID NO: 2485771 - RNA, 19 nt, Artificial Sequence
  Description of Artificial Sequence: Synthetic oligonucleotide
  Antisense strand to SEQ ID NO: 2485770
agaaugggaaaucacaaac

SEQ ID NO: 2485772 - RNA, 19 nt, Artificial Sequence
  Description of Artificial Sequence: Synthetic oligonucleotide
  Sense strand starting at position 1009 of SEQ ID NO: 1887633
ugcugugggcuucgaauau

SEQ ID NO: 2485773 - RNA, 19 nt, Artificial Sequence
  Description of Artificial Sequence: Synthetic oligonucleotide
  Antisense strand to SEQ ID NO: 2485772
auauucgaagcccacagca

SEQ ID NO: 2485774 - RNA, 19 nt, Artificial Sequence
  Description of Artificial Sequence: Synthetic oligonucleotide
  Sense strand starting at position 1013 of SEQ ID NO: 1887633
gugggcuucgaauauuugu

SEQ ID NO: 2485775 - RNA, 19 nt, Artificial Sequence
  Description of Artificial Sequence: Synthetic oligonucleotide
  Antisense strand to SEQ ID NO: 2485774
acaaauauucgaagcccac

SEQ ID NO: 2485776 - RNA, 19 nt, Artificial Sequence
  Description of Artificial Sequence: Synthetic oligonucleotide
  Sense strand starting at position 1193 of SEQ ID NO: 1887633
ugcugacucaccggcuaua

SEQ ID NO: 2485777 - RNA, 19 nt, Artificial Sequence
  Description of Artificial Sequence: Synthetic oligonucleotide
  Antisense strand to SEQ ID NO: 2485776
uauagccggugagucagca

SEQ ID NO: 2485778 - RNA, 19 nt, Artificial Sequence
  Description of Artificial Sequence: Synthetic oligonucleotide
  Sense strand starting at position 1196 of SEQ ID NO: 1887633
ugacucaccggcuauaaau

SEQ ID NO: 2485779 - RNA, 19 nt, Artificial Sequence
  Description of Artificial Sequence: Synthetic oligonucleotide
  Antisense strand to SEQ ID NO: 2485778
auuuauagccggugaguca

SEQ ID NO: 2485780 - RNA, 19 nt, Artificial Sequence
  Description of Artificial Sequence: Synthetic oligonucleotide
  Sense strand starting at position 1207 of SEQ ID NO: 1887633
cuauaaauagcccgggaua

SEQ ID NO: 2485781 - RNA, 19 nt, Artificial Sequence
  Description of Artificial Sequence: Synthetic oligonucleotide
  Antisense strand to SEQ ID NO: 2485780
uaucccgggcuauuuauag

SEQ ID NO: 2485782 - RNA, 19 nt, Artificial Sequence
  Description of Artificial Sequence: Synthetic oligonucleotide
  Sense strand starting at position 1208 of SEQ ID NO: 1887633
uauaaauagcccgggauau

SEQ ID NO: 2485783 - RNA, 19 nt, Artificial Sequence
  Description of Artificial Sequence: Synthetic oligonucleotide
  Antisense strand to SEQ ID NO: 2485782
auaucccgggcuauuuaua

SEQ ID NO: 2485784 - RNA, 19 nt, Artificial Sequence
  Description of Artificial Sequence: Synthetic oligonucleotide
  Sense strand starting at position 1209 of SEQ ID NO: 1887633
auaaauagcccgggauaua

SEQ ID NO: 2485785 - RNA, 19 nt, Artificial Sequence
  Description of Artificial Sequence: Synthetic oligonucleotide
  Antisense strand to SEQ ID NO: 2485784
uauaucccgggcuauuuau

SEQ ID NO: 2485786 - RNA, 19 nt, Artificial Sequence
  Description of Artificial Sequence: Synthetic oligonucleotide
  Sense strand starting at position 1210 of SEQ ID NO: 1887633
uaaauagcccgggauauau

SEQ ID NO: 2485787 - RNA, 19 nt, Artificial Sequence
  Description of Artificial Sequence: Synthetic oligonucleotide
  Antisense strand to SEQ ID NO: 2485786
auauaucccgggcuauuua

SEQ ID NO: 2485788 - RNA, 19 nt, Artificial Sequence
  Description of Artificial Sequence: Synthetic oligonucleotide
  Sense strand starting at position 1828 of SEQ ID NO: 1887633
ccgccucauuucuagugau

SEQ ID NO: 2485789 - RNA, 19 nt, Artificial Sequence
  Description of Artificial Sequence: Synthetic oligonucleotide
  Antisense strand to SEQ ID NO: 2485788
aucacuagaaaugaggcgg

SEQ ID NO: 2485790 - RNA, 19 nt, Artificial Sequence
  Description of Artificial Sequence: Synthetic oligonucleotide
  Sense strand starting at position 1840 of SEQ ID NO: 1887633
uagugaucccaucgcuagu

SEQ ID NO: 2485791 - RNA, 19 nt, Artificial Sequence
  Description of Artificial Sequence: Synthetic oligonucleotide
  Antisense strand to SEQ ID NO: 2485790
acuagcgaugggaucacua

SEQ ID NO: 2485792 - RNA, 19 nt, Artificial Sequence
  Description of Artificial Sequence: Synthetic oligonucleotide
  Sense strand starting at position 1849 of SEQ ID NO: 1887633
caucgcuagugagucaauu

SEQ ID NO: 2485793 - RNA, 19 nt, Artificial Sequence
  Description of Artificial Sequence: Synthetic oligonucleotide
  Antisense strand to SEQ ID NO: 2485792
aauugacucacuagcgaug

SEQ ID NO: 2485794 - RNA, 19 nt, Artificial Sequence
  Description of Artificial Sequence: Synthetic oligonucleotide
  Sense strand starting at position 1851 of SEQ ID NO: 1887633
ucgcuagugagucaauuuc

SEQ ID NO: 2485795 - RNA, 19 nt, Artificial Sequence
  Description of Artificial Sequence: Synthetic oligonucleotide
  Antisense strand to SEQ ID NO: 2485794
gaaauugacucacuagcga

SEQ ID NO: 2485796 - RNA, 19 nt, Artificial Sequence
  Description of Artificial Sequence: Synthetic oligonucleotide
  Sense strand starting at position 1858 of SEQ ID NO: 1887633
ugagucaauuucucagcuu

SEQ ID NO: 2485797 - RNA, 19 nt, Artificial Sequence
  Description of Artificial Sequence: Synthetic oligonucleotide
  Antisense strand to SEQ ID NO: 2485796
aagcugagaaauugacuca

SEQ ID NO: 2485798 - RNA, 19 nt, Artificial Sequence
  Description of Artificial Sequence: Synthetic oligonucleotide
  Sense strand starting at position 2094 of SEQ ID NO: 1887633
ggaguaucccaaggucaca

SEQ ID NO: 2485799 - RNA, 19 nt, Artificial Sequence
  Description of Artificial Sequence: Synthetic oligonucleotide
  Antisense strand to SEQ ID NO: 2485798
ugugaccuugggauacucc

SEQ ID NO: 2485800 - RNA, 19 nt, Artificial Sequence
  Description of Artificial Sequence: Synthetic oligonucleotide
  Sense strand starting at position 2409 of SEQ ID NO: 1887633
ugaccuuggccuugaaauc

SEQ ID NO: 2485801 - RNA, 19 nt, Artificial Sequence
  Description of Artificial Sequence: Synthetic oligonucleotide
  Antisense strand to SEQ ID NO: 2485800
gauuucaaggccaagguca

SEQ ID NO: 2485802 - RNA, 19 nt, Artificial Sequence
  Description of Artificial Sequence: Synthetic oligonucleotide
  Sense strand starting at position 2444 of SEQ ID NO: 1887633
gcuuccaggaacugaguua

SEQ ID NO: 2485803 - RNA, 19 nt, Artificial Sequence
  Description of Artificial Sequence: Synthetic oligonucleotide
  Antisense strand to SEQ ID NO: 2485802
uaacucaguuccuggaagc

SEQ ID NO: 2485804 - RNA, 19 nt, Artificial Sequence
  Description of Artificial Sequence: Synthetic oligonucleotide
  Sense strand starting at position 2451 of SEQ ID NO: 1887633
ggaacugaguuagggaagu

SEQ ID NO: 2485805 - RNA, 19 nt, Artificial Sequence
  Description of Artificial Sequence: Synthetic oligonucleotide
  Antisense strand to SEQ ID NO: 2485804
acuucccuaacucaguucc

SEQ ID NO: 2485806 - RNA, 19 nt, Artificial Sequence
  Description of Artificial Sequence: Synthetic oligonucleotide
  Sense strand starting at position 2889 of SEQ ID NO: 1887633
gagacagugggcugcaauu

SEQ ID NO: 2485807 - RNA, 19 nt, Artificial Sequence
  Description of Artificial Sequence: Synthetic oligonucleotide
  Antisense strand to SEQ ID NO: 2485806
aauugcagcccacugucuc

SEQ ID NO: 2485808 - RNA, 19 nt, Artificial Sequence
  Description of Artificial Sequence: Synthetic oligonucleotide
  Sense strand starting at position 3724 of SEQ ID NO: 1887633
guguaugagggcugugaca

SEQ ID NO: 2485809 - RNA, 19 nt, Artificial Sequence
  Description of Artificial Sequence: Synthetic oligonucleotide
  Antisense strand to SEQ ID NO: 2485808
ugucacagcccucauacac

SEQ ID NO: 2485810 - RNA, 19 nt, Artificial Sequence
  Description of Artificial Sequence: Synthetic oligonucleotide
  Sense strand starting at position 3726 of SEQ ID NO: 1887633
guaugagggcugugacagu

SEQ ID NO: 2485811 - RNA, 19 nt, Artificial Sequence
  Description of Artificial Sequence: Synthetic oligonucleotide
  Antisense strand to SEQ ID NO: 2485810
acugucacagcccucauac

SEQ ID NO: 2485812 - RNA, 19 nt, Artificial Sequence
  Description of Artificial Sequence: Synthetic oligonucleotide
  Sense strand starting at position 299 of SEQ ID NO: 1887634
ccugucaucuguccucaua

SEQ ID NO: 2485813 - RNA, 19 nt, Artificial Sequence
  Description of Artificial Sequence: Synthetic oligonucleotide
  Antisense strand to SEQ ID NO: 2485812
uaugaggacagaugacagg

SEQ ID NO: 2485814 - RNA, 19 nt, Artificial Sequence
  Description of Artificial Sequence: Synthetic oligonucleotide
  Sense strand starting at position 425 of SEQ ID NO: 1887634
ugggcugaaccuugagaca

SEQ ID NO: 2485815 - RNA, 19 nt, Artificial Sequence
  Description of Artificial Sequence: Synthetic oligonucleotide
  Antisense strand to SEQ ID NO: 2485814
ugucucaagguucagccca

SEQ ID NO: 2485816 - RNA, 19 nt, Artificial Sequence
  Description of Artificial Sequence: Synthetic oligonucleotide
  Sense strand starting at position 436 of SEQ ID NO: 1887634
uugagacaucuuggcuuaa

SEQ ID NO: 2485817 - RNA, 19 nt, Artificial Sequence
  Description of Artificial Sequence: Synthetic oligonucleotide
  Antisense strand to SEQ ID NO: 2485816
uuaagccaagaugucucaa

SEQ ID NO: 2485818 - RNA, 19 nt, Artificial Sequence
  Description of Artificial Sequence: Synthetic oligonucleotide
  Sense strand starting at position 437 of SEQ ID NO: 1887634
ugagacaucuuggcuuaaa

SEQ ID NO: 2485819 - RNA, 19 nt, Artificial Sequence
  Description of Artificial Sequence: Synthetic oligonucleotide
  Antisense strand to SEQ ID NO: 2485818
uuuaagccaagaugucuca

SEQ ID NO: 2485820 - RNA, 19 nt, Artificial Sequence
  Description of Artificial Sequence: Synthetic oligonucleotide
  Sense strand starting at position 438 of SEQ ID NO: 1887634
gagacaucuuggcuuaaag

SEQ ID NO: 2485821 - RNA, 19 nt, Artificial Sequence
  Description of Artificial Sequence: Synthetic oligonucleotide
  Antisense strand to SEQ ID NO: 2485820
cuuuaagccaagaugucuc

SEQ ID NO: 2485822 - RNA, 19 nt, Artificial Sequence
  Description of Artificial Sequence: Synthetic oligonucleotide
  Sense strand starting at position 448 of SEQ ID NO: 1887634
ggcuuaaagaacuguaugu

SEQ ID NO: 2485823 - RNA, 19 nt, Artificial Sequence
  Description of Artificial Sequence: Synthetic oligonucleotide
  Antisense strand to SEQ ID NO: 2485822
acauacaguucuuuaagcc

SEQ ID NO: 2485824 - RNA, 19 nt, Artificial Sequence
  Description of Artificial Sequence: Synthetic oligonucleotide
  Sense strand starting at position 450 of SEQ ID NO: 1887634
cuuaaagaacuguauguuu

SEQ ID NO: 2485825 - RNA, 19 nt, Artificial Sequence
  Description of Artificial Sequence: Synthetic oligonucleotide
  Antisense strand to SEQ ID NO: 2485824
aaacauacaguucuuuaag

SEQ ID NO: 2485826 - RNA, 19 nt, Artificial Sequence
  Description of Artificial Sequence: Synthetic oligonucleotide
  Sense strand starting at position 738 of SEQ ID NO: 1887634
cugagacgcugucuccaaa

SEQ ID NO: 2485827 - RNA, 19 nt, Artificial Sequence
  Description of Artificial Sequence: Synthetic oligonucleotide
  Antisense strand to SEQ ID NO: 2485826
uuuggagacagcgucucag

SEQ ID NO: 2485828 - RNA, 19 nt, Artificial Sequence
  Description of Artificial Sequence: Synthetic oligonucleotide
  Sense strand starting at position 804 of SEQ ID NO: 1887634
gggugcuguuauggacuaa

SEQ ID NO: 2485829 - RNA, 19 nt, Artificial Sequence
  Description of Artificial Sequence: Synthetic oligonucleotide
  Antisense strand to SEQ ID NO: 2485828
uuaguccauaacagcaccc

SEQ ID NO: 2485830 - RNA, 19 nt, Artificial Sequence
  Description of Artificial Sequence: Synthetic oligonucleotide
  Sense strand starting at position 890 of SEQ ID NO: 1887634
ggugccuuuauggagguaa

SEQ ID NO: 2485831 - RNA, 19 nt, Artificial Sequence
  Description of Artificial Sequence: Synthetic oligonucleotide
  Antisense strand to SEQ ID NO: 2485830
uuaccuccauaaaggcacc

SEQ ID NO: 2485832 - RNA, 19 nt, Artificial Sequence
  Description of Artificial Sequence: Synthetic oligonucleotide
  Sense strand starting at position 892 of SEQ ID NO: 1887634
ugccuuuauggagguaauu

SEQ ID NO: 2485833 - RNA, 19 nt, Artificial Sequence
  Description of Artificial Sequence: Synthetic oligonucleotide
  Antisense strand to SEQ ID NO: 2485832
aauuaccuccauaaaggca

SEQ ID NO: 2485834 - RNA, 19 nt, Artificial Sequence
  Description of Artificial Sequence: Synthetic oligonucleotide
  Sense strand starting at position 914 of SEQ ID NO: 1887634
guuaauugaggccgaaaga

SEQ ID NO: 2485835 - RNA, 19 nt, Artificial Sequence
  Description of Artificial Sequence: Synthetic oligonucleotide
  Antisense strand to SEQ ID NO: 2485834
ucuuucggccucaauuaac

SEQ ID NO: 2485836 - RNA, 19 nt, Artificial Sequence
  Description of Artificial Sequence: Synthetic oligonucleotide
  Sense strand starting at position 927 of SEQ ID NO: 1887634
gaaagaguguggcuguaau

SEQ ID NO: 2485837 - RNA, 19 nt, Artificial Sequence
  Description of Artificial Sequence: Synthetic oligonucleotide
  Antisense strand to SEQ ID NO: 2485836
auuacagccacacucuuuc

SEQ ID NO: 2485838 - RNA, 19 nt, Artificial Sequence
  Description of Artificial Sequence: Synthetic oligonucleotide
  Sense strand starting at position 938 of SEQ ID NO: 1887634
gcuguaauccaaugggacu

SEQ ID NO: 2485839 - RNA, 19 nt, Artificial Sequence
  Description of Artificial Sequence: Synthetic oligonucleotide
  Antisense strand to SEQ ID NO: 2485838
agucccauuggauuacagc

SEQ ID NO: 2485840 - RNA, 19 nt, Artificial Sequence
  Description of Artificial Sequence: Synthetic oligonucleotide
  Sense strand starting at position 991 of SEQ ID NO: 1887634
cugagacaaucguguucug

SEQ ID NO: 2485841 - RNA, 19 nt, Artificial Sequence
  Description of Artificial Sequence: Synthetic oligonucleotide
  Antisense strand to SEQ ID NO: 2485840
cagaacacgauugucucag

SEQ ID NO: 2485842 - RNA, 19 nt, Artificial Sequence
  Description of Artificial Sequence: Synthetic oligonucleotide
  Sense strand starting at position 994 of SEQ ID NO: 1887634
agacaaucguguucuguca

SEQ ID NO: 2485843 - RNA, 19 nt, Artificial Sequence
  Description of Artificial Sequence: Synthetic oligonucleotide
  Antisense strand to SEQ ID NO: 2485842
ugacagaacacgauugucu

SEQ ID NO: 2485844 - RNA, 19 nt, Artificial Sequence
  Description of Artificial Sequence: Synthetic oligonucleotide
  Sense strand starting at position 1435 of SEQ ID NO: 1887634
agaaguaaaugucugucau

SEQ ID NO: 2485845 - RNA, 19 nt, Artificial Sequence
  Description of Artificial Sequence: Synthetic oligonucleotide
  Antisense strand to SEQ ID NO: 2485844
augacagacauuuacuucu

SEQ ID NO: 2485846 - RNA, 19 nt, Artificial Sequence
  Description of Artificial Sequence: Synthetic oligonucleotide
  Sense strand starting at position 1439 of SEQ ID NO: 1887634
guaaaugucugucauuuaa

SEQ ID NO: 2485847 - RNA, 19 nt, Artificial Sequence
  Description of Artificial Sequence: Synthetic oligonucleotide
  Antisense strand to SEQ ID NO: 2485846
uuaaaugacagacauuuac

SEQ ID NO: 2485848 - RNA, 19 nt, Artificial Sequence
  Description of Artificial Sequence: Synthetic oligonucleotide
  Sense strand starting at position 1524 of SEQ ID NO: 1887634
gauggacccugauagucau

SEQ ID NO: 2485849 - RNA, 19 nt, Artificial Sequence
  Description of Artificial Sequence: Synthetic oligonucleotide
  Antisense strand to SEQ ID NO: 2485848
augacuaucaggguccauc

SEQ ID NO: 2485850 - RNA, 19 nt, Artificial Sequence
  Description of Artificial Sequence: Synthetic oligonucleotide
  Sense strand starting at position 1527 of SEQ ID NO: 1887634
ggacccugauagucauguu

SEQ ID NO: 2485851 - RNA, 19 nt, Artificial Sequence
  Description of Artificial Sequence: Synthetic oligonucleotide
  Antisense strand to SEQ ID NO: 2485850
aacaugacuaucagggucc

SEQ ID NO: 2485852 - RNA, 19 nt, Artificial Sequence
  Description of Artificial Sequence: Synthetic oligonucleotide
  Sense strand starting at position 1530 of SEQ ID NO: 1887634
cccugauagucauguuaau

SEQ ID NO: 2485853 - RNA, 19 nt, Artificial Sequence
  Description of Artificial Sequence: Synthetic oligonucleotide
  Antisense strand to SEQ ID NO: 2485852
auuaacaugacuaucaggg

SEQ ID NO: 2485854 - RNA, 19 nt, Artificial Sequence
  Description of Artificial Sequence: Synthetic oligonucleotide
  Sense strand starting at position 1536 of SEQ ID NO: 1887634
uagucauguuaauguguca

SEQ ID NO: 2485855 - RNA, 19 nt, Artificial Sequence
  Description of Artificial Sequence: Synthetic oligonucleotide
  Antisense strand to SEQ ID NO: 2485854
ugacacauuaacaugacua

SEQ ID NO: 2485856 - RNA, 19 nt, Artificial Sequence
  Description of Artificial Sequence: Synthetic oligonucleotide
  Sense strand starting at position 1563 of SEQ ID NO: 1887634
aggcgagauccacaguuau

SEQ ID NO: 2485857 - RNA, 19 nt, Artificial Sequence
  Description of Artificial Sequence: Synthetic oligonucleotide
  Antisense strand to SEQ ID NO: 2485856
auaacuguggaucucgccu

SEQ ID NO: 2485858 - RNA, 19 nt, Artificial Sequence
  Description of Artificial Sequence: Synthetic oligonucleotide
  Sense strand starting at position 1596 of SEQ ID NO: 1887634
agauguugccaugaagguu

SEQ ID NO: 2485859 - RNA, 19 nt, Artificial Sequence
  Description of Artificial Sequence: Synthetic oligonucleotide
  Antisense strand to SEQ ID NO: 2485858
aaccuucauggcaacaucu

SEQ ID NO: 2485860 - RNA, 19 nt, Artificial Sequence
  Description of Artificial Sequence: Synthetic oligonucleotide
  Sense strand starting at position 2348 of SEQ ID NO: 1887634
ccauaaucagcugacugua

SEQ ID NO: 2485861 - RNA, 19 nt, Artificial Sequence
  Description of Artificial Sequence: Synthetic oligonucleotide
  Antisense strand to SEQ ID NO: 2485860
uacagucagcugauuaugg

SEQ ID NO: 2485862 - RNA, 19 nt, Artificial Sequence
  Description of Artificial Sequence: Synthetic oligonucleotide
  Sense strand starting at position 2375 of SEQ ID NO: 1887634
aggugauccugcuuguucu

SEQ ID NO: 2485863 - RNA, 19 nt, Artificial Sequence
  Description of Artificial Sequence: Synthetic oligonucleotide
  Antisense strand to SEQ ID NO: 2485862
agaacaagcaggaucaccu

SEQ ID NO: 2485864 - RNA, 19 nt, Artificial Sequence
  Description of Artificial Sequence: Synthetic oligonucleotide
  Sense strand starting at position 2376 of SEQ ID NO: 1887634
ggugauccugcuuguucua

SEQ ID NO: 2485865 - RNA, 19 nt, Artificial Sequence
  Description of Artificial Sequence: Synthetic oligonucleotide
  Antisense strand to SEQ ID NO: 2485864
uagaacaagcaggaucacc

SEQ ID NO: 2485866 - RNA, 19 nt, Artificial Sequence
  Description of Artificial Sequence: Synthetic oligonucleotide
  Sense strand starting at position 3027 of SEQ ID NO: 1887634
caggcagagucuugcuaug

SEQ ID NO: 2485867 - RNA, 19 nt, Artificial Sequence
  Description of Artificial Sequence: Synthetic oligonucleotide
  Antisense strand to SEQ ID NO: 2485866
cauagcaagacucugccug

SEQ ID NO: 2485868 - RNA, 19 nt, Artificial Sequence
  Description of Artificial Sequence: Synthetic oligonucleotide
  Sense strand starting at position 3169 of SEQ ID NO: 1887634
acaauucuguaagcugauu

SEQ ID NO: 2485869 - RNA, 19 nt, Artificial Sequence
  Description of Artificial Sequence: Synthetic oligonucleotide
  Antisense strand to SEQ ID NO: 2485868
aaucagcuuacagaauugu

SEQ ID NO: 2485870 - RNA, 19 nt, Artificial Sequence
  Description of Artificial Sequence: Synthetic oligonucleotide
  Sense strand starting at position 3177 of SEQ ID NO: 1887634
guaagcugauuccuugcau

SEQ ID NO: 2485871 - RNA, 19 nt, Artificial Sequence
  Description of Artificial Sequence: Synthetic oligonucleotide
  Antisense strand to SEQ ID NO: 2485870
augcaaggaaucagcuuac

SEQ ID NO: 2485872 - RNA, 19 nt, Artificial Sequence
  Description of Artificial Sequence: Synthetic oligonucleotide
  Sense strand starting at position 3181 of SEQ ID NO: 1887634
gcugauuccuugcauauaa

SEQ ID NO: 2485873 - RNA, 19 nt, Artificial Sequence
  Description of Artificial Sequence: Synthetic oligonucleotide
  Antisense strand to SEQ ID NO: 2485872
uuauaugcaaggaaucagc

SEQ ID NO: 2485874 - RNA, 19 nt, Artificial Sequence
  Description of Artificial Sequence: Synthetic oligonucleotide
  Sense strand starting at position 3221 of SEQ ID NO: 1887634
ccuggauguuucucugcuu

SEQ ID NO: 2485875 - RNA, 19 nt, Artificial Sequence
  Description of Artificial Sequence: Synthetic oligonucleotide
  Antisense strand to SEQ ID NO: 2485874
aagcagagaaacauccagg

SEQ ID NO: 2485876 - RNA, 19 nt, Artificial Sequence
  Description of Artificial Sequence: Synthetic oligonucleotide
  Sense strand starting at position 3224 of SEQ ID NO: 1887634
ggauguuucucugcuugau

SEQ ID NO: 2485877 - RNA, 19 nt, Artificial Sequence
  Description of Artificial Sequence: Synthetic oligonucleotide
  Antisense strand to SEQ ID NO: 2485876
aucaagcagagaaacaucc

SEQ ID NO: 2485878 - RNA, 19 nt, Artificial Sequence
  Description of Artificial Sequence: Synthetic oligonucleotide
  Sense strand starting at position 3234 of SEQ ID NO: 1887634
cugcuugaucccuaacuga

SEQ ID NO: 2485879 - RNA, 19 nt, Artificial Sequence
  Description of Artificial Sequence: Synthetic oligonucleotide
  Antisense strand to SEQ ID NO: 2485878
ucaguuagggaucaagcag

SEQ ID NO: 2485880 - RNA, 19 nt, Artificial Sequence
  Description of Artificial Sequence: Synthetic oligonucleotide
  Sense strand starting at position 3667 of SEQ ID NO: 1887634
ucuggaaguccucgaaggu

SEQ ID NO: 2485881 - RNA, 19 nt, Artificial Sequence
  Description of Artificial Sequence: Synthetic oligonucleotide
  Antisense strand to SEQ ID NO: 2485880
accuucgaggacuuccaga

SEQ ID NO: 2485882 - RNA, 19 nt, Artificial Sequence
  Description of Artificial Sequence: Synthetic oligonucleotide
  Sense strand starting at position 3785 of SEQ ID NO: 1887634
gccgcaaggugugaucuuu

SEQ ID NO: 2485883 - RNA, 19 nt, Artificial Sequence
  Description of Artificial Sequence: Synthetic oligonucleotide
  Antisense strand to SEQ ID NO: 2485882
aaagaucacaccuugcggc

SEQ ID NO: 2485884 - RNA, 19 nt, Artificial Sequence
  Description of Artificial Sequence: Synthetic oligonucleotide
  Sense strand starting at position 3793 of SEQ ID NO: 1887634
gugugaucuuuccuuccuu

SEQ ID NO: 2485885 - RNA, 19 nt, Artificial Sequence
  Description of Artificial Sequence: Synthetic oligonucleotide
  Antisense strand to SEQ ID NO: 2485884
aaggaaggaaagaucacac

SEQ ID NO: 2485886 - RNA, 19 nt, Artificial Sequence
  Description of Artificial Sequence: Synthetic oligonucleotide
  Sense strand starting at position 3920 of SEQ ID NO: 1887634
ggaguuguuuaacgggcaa

SEQ ID NO: 2485887 - RNA, 19 nt, Artificial Sequence
  Description of Artificial Sequence: Synthetic oligonucleotide
  Antisense strand to SEQ ID NO: 2485886
uugcccguuaaacaacucc

SEQ ID NO: 2485888 - RNA, 19 nt, Artificial Sequence
  Description of Artificial Sequence: Synthetic oligonucleotide
  Sense strand starting at position 3945 of SEQ ID NO: 1887634
ucaguuucgcaagaugaca

SEQ ID NO: 2485889 - RNA, 19 nt, Artificial Sequence
  Description of Artificial Sequence: Synthetic oligonucleotide
  Antisense strand to SEQ ID NO: 2485888
ugucaucuugcgaaacuga

SEQ ID NO: 2485890 - RNA, 19 nt, Artificial Sequence
  Description of Artificial Sequence: Synthetic oligonucleotide
  Sense strand starting at position 159 of SEQ ID NO: 1887635
cuccaagcucaauaggauu

SEQ ID NO: 2485891 - RNA, 19 nt, Artificial Sequence
  Description of Artificial Sequence: Synthetic oligonucleotide
  Antisense strand to SEQ ID NO: 2485890
aauccuauugagcuuggag

SEQ ID NO: 2485892 - RNA, 19 nt, Artificial Sequence
  Description of Artificial Sequence: Synthetic oligonucleotide
  Sense strand starting at position 203 of SEQ ID NO: 1887635
ucaggauuguugucuccua

SEQ ID NO: 2485893 - RNA, 19 nt, Artificial Sequence
  Description of Artificial Sequence: Synthetic oligonucleotide
  Antisense strand to SEQ ID NO: 2485892
uaggagacaacaauccuga

SEQ ID NO: 2485894 - RNA, 19 nt, Artificial Sequence
  Description of Artificial Sequence: Synthetic oligonucleotide
  Sense strand starting at position 211 of SEQ ID NO: 1887635
guugucuccuaccuauaac

SEQ ID NO: 2485895 - RNA, 19 nt, Artificial Sequence
  Description of Artificial Sequence: Synthetic oligonucleotide
  Antisense strand to SEQ ID NO: 2485894
guuauagguaggagacaac

SEQ ID NO: 2485896 - RNA, 19 nt, Artificial Sequence
  Description of Artificial Sequence: Synthetic oligonucleotide
  Sense strand starting at position 292 of SEQ ID NO: 1887635
ggaggccacuaguuguaaa

SEQ ID NO: 2485897 - RNA, 19 nt, Artificial Sequence
  Description of Artificial Sequence: Synthetic oligonucleotide
  Antisense strand to SEQ ID NO: 2485896
uuuacaacuaguggccucc

SEQ ID NO: 2485898 - RNA, 19 nt, Artificial Sequence
  Description of Artificial Sequence: Synthetic oligonucleotide
  Sense strand starting at position 337 of SEQ ID NO: 1887635
uacaacagugucugucaga

SEQ ID NO: 2485899 - RNA, 19 nt, Artificial Sequence
  Description of Artificial Sequence: Synthetic oligonucleotide
  Antisense strand to SEQ ID NO: 2485898
ucugacagacacuguugua

SEQ ID NO: 2485900 - RNA, 19 nt, Artificial Sequence
  Description of Artificial Sequence: Synthetic oligonucleotide
  Sense strand starting at position 338 of SEQ ID NO: 1887635
acaacagugucugucagau

SEQ ID NO: 2485901 - RNA, 19 nt, Artificial Sequence
  Description of Artificial Sequence: Synthetic oligonucleotide
  Antisense strand to SEQ ID NO: 2485900
aucugacagacacuguugu

SEQ ID NO: 2485902 - RNA, 19 nt, Artificial Sequence
  Description of Artificial Sequence: Synthetic oligonucleotide
  Sense strand starting at position 344 of SEQ ID NO: 1887635
gugucugucagauaguaag

SEQ ID NO: 2485903 - RNA, 19 nt, Artificial Sequence
  Description of Artificial Sequence: Synthetic oligonucleotide
  Antisense strand to SEQ ID NO: 2485902
cuuacuaucugacagacac

SEQ ID NO: 2485904 - RNA, 19 nt, Artificial Sequence
  Description of Artificial Sequence: Synthetic oligonucleotide
  Sense strand starting at position 351 of SEQ ID NO: 1887635
ucagauaguaagugcuuga

SEQ ID NO: 2485905 - RNA, 19 nt, Artificial Sequence
  Description of Artificial Sequence: Synthetic oligonucleotide
  Antisense strand to SEQ ID NO: 2485904
ucaagcacuuacuaucuga

SEQ ID NO: 2485906 - RNA, 19 nt, Artificial Sequence
  Description of Artificial Sequence: Synthetic oligonucleotide
  Sense strand starting at position 354 of SEQ ID NO: 1887635
gauaguaagugcuugaguu

SEQ ID NO: 2485907 - RNA, 19 nt, Artificial Sequence
  Description of Artificial Sequence: Synthetic oligonucleotide
  Antisense strand to SEQ ID NO: 2485906
aacucaagcacuuacuauc

SEQ ID NO: 2485908 - RNA, 19 nt, Artificial Sequence
  Description of Artificial Sequence: Synthetic oligonucleotide
  Sense strand starting at position 355 of SEQ ID NO: 1887635
auaguaagugcuugaguua

SEQ ID NO: 2485909 - RNA, 19 nt, Artificial Sequence
  Description of Artificial Sequence: Synthetic oligonucleotide
  Antisense strand to SEQ ID NO: 2485908
uaacucaagcacuuacuau

SEQ ID NO: 2485910 - RNA, 19 nt, Artificial Sequence
  Description of Artificial Sequence: Synthetic oligonucleotide
  Sense strand starting at position 356 of SEQ ID NO: 1887635
uaguaagugcuugaguuau

SEQ ID NO: 2485911 - RNA, 19 nt, Artificial Sequence
  Description of Artificial Sequence: Synthetic oligonucleotide
  Antisense strand to SEQ ID NO: 2485910
auaacucaagcacuuacua

SEQ ID NO: 2485912 - RNA, 19 nt, Artificial Sequence
  Description of Artificial Sequence: Synthetic oligonucleotide
  Sense strand starting at position 1032 of SEQ ID NO: 1887635
cuaugagcucaguaccuuu

SEQ ID NO: 2485913 - RNA, 19 nt, Artificial Sequence
  Description of Artificial Sequence: Synthetic oligonucleotide
  Antisense strand to SEQ ID NO: 2485912
aaagguacugagcucauag

SEQ ID NO: 2485914 - RNA, 19 nt, Artificial Sequence
  Description of Artificial Sequence: Synthetic oligonucleotide
  Sense strand starting at position 1066 of SEQ ID NO: 1887635
ggucuauggaccugagauc

SEQ ID NO: 2485915 - RNA, 19 nt, Artificial Sequence
  Description of Artificial Sequence: Synthetic oligonucleotide
  Antisense strand to SEQ ID NO: 2485914
gaucucagguccauagacc

SEQ ID NO: 2485916 - RNA, 19 nt, Artificial Sequence
  Description of Artificial Sequence: Synthetic oligonucleotide
  Sense strand starting at position 1157 of SEQ ID NO: 1887635
ugaacccaucucugucaga

SEQ ID NO: 2485917 - RNA, 19 nt, Artificial Sequence
  Description of Artificial Sequence: Synthetic oligonucleotide
  Antisense strand to SEQ ID NO: 2485916
ucugacagagauggguuca

SEQ ID NO: 2485918 - RNA, 19 nt, Artificial Sequence
  Description of Artificial Sequence: Synthetic oligonucleotide
  Sense strand starting at position 1765 of SEQ ID NO: 1887635
gaagauaacuucuuugguu

SEQ ID NO: 2485919 - RNA, 19 nt, Artificial Sequence
  Description of Artificial Sequence: Synthetic oligonucleotide
  Antisense strand to SEQ ID NO: 2485918
aaccaaagaaguuaucuuc

SEQ ID NO: 2485920 - RNA, 19 nt, Artificial Sequence
  Description of Artificial Sequence: Synthetic oligonucleotide
  Sense strand starting at position 1872 of SEQ ID NO: 1887635
cccggaggucuccgaugaa

SEQ ID NO: 2485921 - RNA, 19 nt, Artificial Sequence
  Description of Artificial Sequence: Synthetic oligonucleotide
  Antisense strand to SEQ ID NO: 2485920
uucaucggagaccuccggg

SEQ ID NO: 2485922 - RNA, 19 nt, Artificial Sequence
  Description of Artificial Sequence: Synthetic oligonucleotide
  Sense strand starting at position 1948 of SEQ ID NO: 1887635
guugaucuugcagagccua

SEQ ID NO: 2485923 - RNA, 19 nt, Artificial Sequence
  Description of Artificial Sequence: Synthetic oligonucleotide
  Antisense strand to SEQ ID NO: 2485922
uaggcucugcaagaucaac

SEQ ID NO: 2485924 - RNA, 19 nt, Artificial Sequence
  Description of Artificial Sequence: Synthetic oligonucleotide
  Sense strand starting at position 1981 of SEQ ID NO: 1887635
agaggcagugaucgccaaa

SEQ ID NO: 2485925 - RNA, 19 nt, Artificial Sequence
  Description of Artificial Sequence: Synthetic oligonucleotide
  Antisense strand to SEQ ID NO: 2485924
uuuggcgaucacugccucu

SEQ ID NO: 2485926 - RNA, 19 nt, Artificial Sequence
  Description of Artificial Sequence: Synthetic oligonucleotide
  Sense strand starting at position 2023 of SEQ ID NO: 1887635
ggacgcgauccuggaagaa

SEQ ID NO: 2485927 - RNA, 19 nt, Artificial Sequence
  Description of Artificial Sequence: Synthetic oligonucleotide
  Antisense strand to SEQ ID NO: 2485926
uucuuccaggaucgcgucc

SEQ ID NO: 2485928 - RNA, 19 nt, Artificial Sequence
  Description of Artificial Sequence: Synthetic oligonucleotide
  Sense strand starting at position 2197 of SEQ ID NO: 1887635
uugggugaaaccugagauc

SEQ ID NO: 2485929 - RNA, 19 nt, Artificial Sequence
  Description of Artificial Sequence: Synthetic oligonucleotide
  Antisense strand to SEQ ID NO: 2485928
gaucucagguuucacccaa

SEQ ID NO: 2485930 - RNA, 19 nt, Artificial Sequence
  Description of Artificial Sequence: Synthetic oligonucleotide
  Sense strand starting at position 2947 of SEQ ID NO: 1887635
gguaguugcgagggugaaa

SEQ ID NO: 2485931 - RNA, 19 nt, Artificial Sequence
  Description of Artificial Sequence: Synthetic oligonucleotide
  Antisense strand to SEQ ID NO: 2485930
uuucacccucgcaacuacc

SEQ ID NO: 2485932 - RNA, 19 nt, Artificial Sequence
  Description of Artificial Sequence: Synthetic oligonucleotide
  Sense strand starting at position 2956 of SEQ ID NO: 1887635
gagggugaaauugguuaau

SEQ ID NO: 2485933 - RNA, 19 nt, Artificial Sequence
  Description of Artificial Sequence: Synthetic oligonucleotide
  Antisense strand to SEQ ID NO: 2485932
auuaaccaauuucacccuc

SEQ ID NO: 2485934 - RNA, 19 nt, Artificial Sequence
  Description of Artificial Sequence: Synthetic oligonucleotide
  Sense strand starting at position 2958 of SEQ ID NO: 1887635
gggugaaauugguuaauua

SEQ ID NO: 2485935 - RNA, 19 nt, Artificial Sequence
  Description of Artificial Sequence: Synthetic oligonucleotide
  Antisense strand to SEQ ID NO: 2485934
uaauuaaccaauuucaccc

SEQ ID NO: 2485936 - RNA, 19 nt, Artificial Sequence
  Description of Artificial Sequence: Synthetic oligonucleotide
  Sense strand starting at position 2965 of SEQ ID NO: 1887635
auugguuaauuauugggaa

SEQ ID NO: 2485937 - RNA, 19 nt, Artificial Sequence
  Description of Artificial Sequence: Synthetic oligonucleotide
  Antisense strand to SEQ ID NO: 2485936
uucccaauaauuaaccaau

SEQ ID NO: 2485938 - RNA, 19 nt, Artificial Sequence
  Description of Artificial Sequence: Synthetic oligonucleotide
  Sense strand starting at position 2967 of SEQ ID NO: 1887635
ugguuaauuauugggaagu

SEQ ID NO: 2485939 - RNA, 19 nt, Artificial Sequence
  Description of Artificial Sequence: Synthetic oligonucleotide
  Antisense strand to SEQ ID NO: 2485938
acuucccaauaauuaacca

SEQ ID NO: 2485940 - RNA, 19 nt, Artificial Sequence
  Description of Artificial Sequence: Synthetic oligonucleotide
  Sense strand starting at position 2977 of SEQ ID NO: 1887635
uugggaagugccuggagua

SEQ ID NO: 2485941 - RNA, 19 nt, Artificial Sequence
  Description of Artificial Sequence: Synthetic oligonucleotide
  Antisense strand to SEQ ID NO: 2485940
uacuccaggcacuucccaa

SEQ ID NO: 2485942 - RNA, 19 nt, Artificial Sequence
  Description of Artificial Sequence: Synthetic oligonucleotide
  Sense strand starting at position 2978 of SEQ ID NO: 1887635
ugggaagugccuggaguau

SEQ ID NO: 2485943 - RNA, 19 nt, Artificial Sequence
  Description of Artificial Sequence: Synthetic oligonucleotide
  Antisense strand to SEQ ID NO: 2485942
auacuccaggcacuuccca

SEQ ID NO: 2485944 - RNA, 19 nt, Artificial Sequence
  Description of Artificial Sequence: Synthetic oligonucleotide
  Sense strand starting at position 3005 of SEQ ID NO: 1887635
cuguauuuguguuugcuau

SEQ ID NO: 2485945 - RNA, 19 nt, Artificial Sequence
  Description of Artificial Sequence: Synthetic oligonucleotide
  Antisense strand to SEQ ID NO: 2485944
auagcaaacacaaauacag

SEQ ID NO: 2485946 - RNA, 19 nt, Artificial Sequence
  Description of Artificial Sequence: Synthetic oligonucleotide
  Sense strand starting at position 3006 of SEQ ID NO: 1887635
uguauuuguguuugcuaug

SEQ ID NO: 2485947 - RNA, 19 nt, Artificial Sequence
  Description of Artificial Sequence: Synthetic oligonucleotide
  Antisense strand to SEQ ID NO: 2485946
cauagcaaacacaaauaca

SEQ ID NO: 2485948 - RNA, 19 nt, Artificial Sequence
  Description of Artificial Sequence: Synthetic oligonucleotide
  Sense strand starting at position 3007 of SEQ ID NO: 1887635
guauuuguguuugcuaugu

SEQ ID NO: 2485949 - RNA, 19 nt, Artificial Sequence
  Description of Artificial Sequence: Synthetic oligonucleotide
  Antisense strand to SEQ ID NO: 2485948
acauagcaaacacaaauac

SEQ ID NO: 2485950 - RNA, 19 nt, Artificial Sequence
  Description of Artificial Sequence: Synthetic oligonucleotide
  Sense strand starting at position 3021 of SEQ ID NO: 1887635
uauguuugagcagaguuga

SEQ ID NO: 2485951 - RNA, 19 nt, Artificial Sequence
  Description of Artificial Sequence: Synthetic oligonucleotide
  Antisense strand to SEQ ID NO: 2485950
ucaacucugcucaaacaua

SEQ ID NO: 2485952 - RNA, 19 nt, Artificial Sequence
  Description of Artificial Sequence: Synthetic oligonucleotide
  Sense strand starting at position 3034 of SEQ ID NO: 1887635
aguugaaaugugcagcuuu

SEQ ID NO: 2485953 - RNA, 19 nt, Artificial Sequence
  Description of Artificial Sequence: Synthetic oligonucleotide
  Antisense strand to SEQ ID NO: 2485952
aaagcugcacauuucaacu

SEQ ID NO: 2485954 - RNA, 19 nt, Artificial Sequence
  Description of Artificial Sequence: Synthetic oligonucleotide
  Sense strand starting at position 3350 of SEQ ID NO: 1887635
guuuguuuaacggagucuu

SEQ ID NO: 2485955 - RNA, 19 nt, Artificial Sequence
  Description of Artificial Sequence: Synthetic oligonucleotide
  Antisense strand to SEQ ID NO: 2485954
aagacuccguuaaacaaac

SEQ ID NO: 2485956 - RNA, 19 nt, Artificial Sequence
  Description of Artificial Sequence: Synthetic oligonucleotide
  Sense strand starting at position 3694 of SEQ ID NO: 1887635
cugagcucaagcgaugauu

SEQ ID NO: 2485957 - RNA, 19 nt, Artificial Sequence
  Description of Artificial Sequence: Synthetic oligonucleotide
  Antisense strand to SEQ ID NO: 2485956
aaucaucgcuugagcucag

SEQ ID NO: 2485958 - RNA, 19 nt, Artificial Sequence
  Description of Artificial Sequence: Synthetic oligonucleotide
  Sense strand starting at position 3737 of SEQ ID NO: 1887635
agaauuauauagccuuagu

SEQ ID NO: 2485959 - RNA, 19 nt, Artificial Sequence
  Description of Artificial Sequence: Synthetic oligonucleotide
  Antisense strand to SEQ ID NO: 2485958
acuaaggcuauauaauucu

SEQ ID NO: 2485960 - RNA, 19 nt, Artificial Sequence
  Description of Artificial Sequence: Synthetic oligonucleotide
  Sense strand starting at position 3847 of SEQ ID NO: 1887635
uugacucaguugcuugaga

SEQ ID NO: 2485961 - RNA, 19 nt, Artificial Sequence
  Description of Artificial Sequence: Synthetic oligonucleotide
  Antisense strand to SEQ ID NO: 2485960
ucucaagcaacugagucaa

SEQ ID NO: 2485962 - RNA, 19 nt, Artificial Sequence
  Description of Artificial Sequence: Synthetic oligonucleotide
  Sense strand starting at position 3848 of SEQ ID NO: 1887635
ugacucaguugcuugagaa

SEQ ID NO: 2485963 - RNA, 19 nt, Artificial Sequence
  Description of Artificial Sequence: Synthetic oligonucleotide
  Antisense strand to SEQ ID NO: 2485962
uucucaagcaacugaguca

SEQ ID NO: 2485964 - RNA, 19 nt, Artificial Sequence
  Description of Artificial Sequence: Synthetic oligonucleotide
  Sense strand starting at position 3849 of SEQ ID NO: 1887635
gacucaguugcuugagaau

SEQ ID NO: 2485965 - RNA, 19 nt, Artificial Sequence
  Description of Artificial Sequence: Synthetic oligonucleotide
  Antisense strand to SEQ ID NO: 2485964
auucucaagcaacugaguc

SEQ ID NO: 2485966 - RNA, 19 nt, Artificial Sequence
  Description of Artificial Sequence: Synthetic oligonucleotide
  Sense strand starting at position 3931 of SEQ ID NO: 1887635
ucacguauuccuuauguga

SEQ ID NO: 2485967 - RNA, 19 nt, Artificial Sequence
  Description of Artificial Sequence: Synthetic oligonucleotide
  Antisense strand to SEQ ID NO: 2485966
ucacauaaggaauacguga

SEQ ID NO: 2485968 - RNA, 19 nt, Artificial Sequence
  Description of Artificial Sequence: Synthetic oligonucleotide
  Sense strand starting at position 3934 of SEQ ID NO: 1887635
cguauuccuuaugugaaua

SEQ ID NO: 2485969 - RNA, 19 nt, Artificial Sequence
  Description of Artificial Sequence: Synthetic oligonucleotide
  Antisense strand to SEQ ID NO: 2485968
uauucacauaaggaauacg

SEQ ID NO: 2485970 - RNA, 19 nt, Artificial Sequence
  Description of Artificial Sequence: Synthetic oligonucleotide
  Sense strand starting at position 42 of SEQ ID NO: 1887636
gacaguuaucgcugucacc

SEQ ID NO: 2485971 - RNA, 19 nt, Artificial Sequence
  Description of Artificial Sequence: Synthetic oligonucleotide
  Antisense strand to SEQ ID NO: 2485970
ggugacagcgauaacuguc

SEQ ID NO: 2485972 - RNA, 19 nt, Artificial Sequence
  Description of Artificial Sequence: Synthetic oligonucleotide
  Sense strand starting at position 331 of SEQ ID NO: 1887636
agagcauaacucuaaguuc

SEQ ID NO: 2485973 - RNA, 19 nt, Artificial Sequence
  Description of Artificial Sequence: Synthetic oligonucleotide
  Antisense strand to SEQ ID NO: 2485972
gaacuuagaguuaugcucu

SEQ ID NO: 2485974 - RNA, 19 nt, Artificial Sequence
  Description of Artificial Sequence: Synthetic oligonucleotide
  Sense strand starting at position 334 of SEQ ID NO: 1887636
gcauaacucuaaguucuag

SEQ ID NO: 2485975 - RNA, 19 nt, Artificial Sequence
  Description of Artificial Sequence: Synthetic oligonucleotide
  Antisense strand to SEQ ID NO: 2485974
cuagaacuuagaguuaugc

SEQ ID NO: 2485976 - RNA, 19 nt, Artificial Sequence
  Description of Artificial Sequence: Synthetic oligonucleotide
  Sense strand starting at position 394 of SEQ ID NO: 1887636
aggcaauguacuuggguca

SEQ ID NO: 2485977 - RNA, 19 nt, Artificial Sequence
  Description of Artificial Sequence: Synthetic oligonucleotide
  Antisense strand to SEQ ID NO: 2485976
ugacccaaguacauugccu

SEQ ID NO: 2485978 - RNA, 19 nt, Artificial Sequence
  Description of Artificial Sequence: Synthetic oligonucleotide
  Sense strand starting at position 395 of SEQ ID NO: 1887636
ggcaauguacuugggucau

SEQ ID NO: 2485979 - RNA, 19 nt, Artificial Sequence
  Description of Artificial Sequence: Synthetic oligonucleotide
  Antisense strand to SEQ ID NO: 2485978
augacccaaguacauugcc

SEQ ID NO: 2485980 - RNA, 19 nt, Artificial Sequence
  Description of Artificial Sequence: Synthetic oligonucleotide
  Sense strand starting at position 401 of SEQ ID NO: 1887636
guacuugggucauagaaga

SEQ ID NO: 2485981 - RNA, 19 nt, Artificial Sequence
  Description of Artificial Sequence: Synthetic oligonucleotide
  Antisense strand to SEQ ID NO: 2485980
ucuucuaugacccaaguac

SEQ ID NO: 2485982 - RNA, 19 nt, Artificial Sequence
  Description of Artificial Sequence: Synthetic oligonucleotide
  Sense strand starting at position 424 of SEQ ID NO: 1887636
ucaguaacgccagacauga

SEQ ID NO: 2485983 - RNA, 19 nt, Artificial Sequence
  Description of Artificial Sequence: Synthetic oligonucleotide
  Antisense strand to SEQ ID NO: 2485982
ucaugucuggcguuacuga

SEQ ID NO: 2485984 - RNA, 19 nt, Artificial Sequence
  Description of Artificial Sequence: Synthetic oligonucleotide
  Sense strand starting at position 462 of SEQ ID NO: 1887636
agcacuuguggguggcaga

SEQ ID NO: 2485985 - RNA, 19 nt, Artificial Sequence
  Description of Artificial Sequence: Synthetic oligonucleotide
  Antisense strand to SEQ ID NO: 2485984
ucugccacccacaagugcu

SEQ ID NO: 2485986 - RNA, 19 nt, Artificial Sequence
  Description of Artificial Sequence: Synthetic oligonucleotide
  Sense strand starting at position 625 of SEQ ID NO: 1887636
augcaugcugccuaccaaa

SEQ ID NO: 2485987 - RNA, 19 nt, Artificial Sequence
  Description of Artificial Sequence: Synthetic oligonucleotide
  Antisense strand to SEQ ID NO: 2485986
uuugguaggcagcaugcau

SEQ ID NO: 2485988 - RNA, 19 nt, Artificial Sequence
  Description of Artificial Sequence: Synthetic oligonucleotide
  Sense strand starting at position 817 of SEQ ID NO: 1887636
ccgggaacuccaggucaua

SEQ ID NO: 2485989 - RNA, 19 nt, Artificial Sequence
  Description of Artificial Sequence: Synthetic oligonucleotide
  Antisense strand to SEQ ID NO: 2485988
uaugaccuggaguucccgg

SEQ ID NO: 2485990 - RNA, 19 nt, Artificial Sequence
  Description of Artificial Sequence: Synthetic oligonucleotide
  Sense strand starting at position 962 of SEQ ID NO: 1887636
ugaguaucccaguaugagc

SEQ ID NO: 2485991 - RNA, 19 nt, Artificial Sequence
  Description of Artificial Sequence: Synthetic oligonucleotide
  Antisense strand to SEQ ID NO: 2485990
gcucauacugggauacuca

SEQ ID NO: 2485992 - RNA, 19 nt, Artificial Sequence
  Description of Artificial Sequence: Synthetic oligonucleotide
  Sense strand starting at position 994 of SEQ ID NO: 1887636
cugccaucacugugacuuu

SEQ ID NO: 2485993 - RNA, 19 nt, Artificial Sequence
  Description of Artificial Sequence: Synthetic oligonucleotide
  Antisense strand to SEQ ID NO: 2485992
aaagucacagugauggcag

SEQ ID NO: 2485994 - RNA, 19 nt, Artificial Sequence
  Description of Artificial Sequence: Synthetic oligonucleotide
  Sense strand starting at position 1005 of SEQ ID NO: 1887636
gugacuuucuugccuacaa

SEQ ID NO: 2485995 - RNA, 19 nt, Artificial Sequence
  Description of Artificial Sequence: Synthetic oligonucleotide
  Antisense strand to SEQ ID NO: 2485994
uuguaggcaagaaagucac

SEQ ID NO: 2485996 - RNA, 19 nt, Artificial Sequence
  Description of Artificial Sequence: Synthetic oligonucleotide
  Sense strand starting at position 1006 of SEQ ID NO: 1887636
ugacuuucuugccuacaag

SEQ ID NO: 2485997 - RNA, 19 nt, Artificial Sequence
  Description of Artificial Sequence: Synthetic oligonucleotide
  Antisense strand to SEQ ID NO: 2485996
cuuguaggcaagaaaguca

SEQ ID NO: 2485998 - RNA, 19 nt, Artificial Sequence
  Description of Artificial Sequence: Synthetic oligonucleotide
  Sense strand starting at position 1024 of SEQ ID NO: 1887636
gagguuggccuccaaucau

SEQ ID NO: 2485999 - RNA, 19 nt, Artificial Sequence
  Description of Artificial Sequence: Synthetic oligonucleotide
  Antisense strand to SEQ ID NO: 2485998
augauuggaggccaaccuc

SEQ ID NO: 2486000 - RNA, 19 nt, Artificial Sequence
  Description of Artificial Sequence: Synthetic oligonucleotide
  Sense strand starting at position 1064 of SEQ ID NO: 1887636
gcaauaaacuugcuugcua

SEQ ID NO: 2486001 - RNA, 19 nt, Artificial Sequence
  Description of Artificial Sequence: Synthetic oligonucleotide
  Antisense strand to SEQ ID NO: 2486000
uagcaagcaaguuuauugc

SEQ ID NO: 2486002 - RNA, 19 nt, Artificial Sequence
  Description of Artificial Sequence: Synthetic oligonucleotide
  Sense strand starting at position 1090 of SEQ ID NO: 1887636
agaggaaaguuacauauca

SEQ ID NO: 2486003 - RNA, 19 nt, Artificial Sequence
  Description of Artificial Sequence: Synthetic oligonucleotide
  Antisense strand to SEQ ID NO: 2486002
ugauauguaacuuuccucu

SEQ ID NO: 2486004 - RNA, 19 nt, Artificial Sequence
  Description of Artificial Sequence: Synthetic oligonucleotide
  Sense strand starting at position 1133 of SEQ ID NO: 1887636
auuccuuucuuugugcaua

SEQ ID NO: 2486005 - RNA, 19 nt, Artificial Sequence
  Description of Artificial Sequence: Synthetic oligonucleotide
  Antisense strand to SEQ ID NO: 2486004
uaugcacaaagaaaggaau

SEQ ID NO: 2486006 - RNA, 19 nt, Artificial Sequence
  Description of Artificial Sequence: Synthetic oligonucleotide
  Sense strand starting at position 1524 of SEQ ID NO: 1887636
cccagauucccuuaguugu

SEQ ID NO: 2486007 - RNA, 19 nt, Artificial Sequence
  Description of Artificial Sequence: Synthetic oligonucleotide
  Antisense strand to SEQ ID NO: 2486006
acaacuaagggaaucuggg

SEQ ID NO: 2486008 - RNA, 19 nt, Artificial Sequence
  Description of Artificial Sequence: Synthetic oligonucleotide
  Sense strand starting at position 1631 of SEQ ID NO: 1887636
acaguuuccggcugggaau

SEQ ID NO: 2486009 - RNA, 19 nt, Artificial Sequence
  Description of Artificial Sequence: Synthetic oligonucleotide
  Antisense strand to SEQ ID NO: 2486008
auucccagccggaaacugu

SEQ ID NO: 2486010 - RNA, 19 nt, Artificial Sequence
  Description of Artificial Sequence: Synthetic oligonucleotide
  Sense strand starting at position 1661 of SEQ ID NO: 1887636
gcucuuuaguuccugcaga

SEQ ID NO: 2486011 - RNA, 19 nt, Artificial Sequence
  Description of Artificial Sequence: Synthetic oligonucleotide
  Antisense strand to SEQ ID NO: 2486010
ucugcaggaacuaaagagc

SEQ ID NO: 2486012 - RNA, 19 nt, Artificial Sequence
  Description of Artificial Sequence: Synthetic oligonucleotide
  Sense strand starting at position 1691 of SEQ ID NO: 1887636
cacggcauccguugauaug

SEQ ID NO: 2486013 - RNA, 19 nt, Artificial Sequence
  Description of Artificial Sequence: Synthetic oligonucleotide
  Antisense strand to SEQ ID NO: 2486012
cauaucaacggaugccgug

SEQ ID NO: 2486014 - RNA, 19 nt, Artificial Sequence
  Description of Artificial Sequence: Synthetic oligonucleotide
  Sense strand starting at position 1914 of SEQ ID NO: 1887636
cagguugagucuucucaag

SEQ ID NO: 2486015 - RNA, 19 nt, Artificial Sequence
  Description of Artificial Sequence: Synthetic oligonucleotide
  Antisense strand to SEQ ID NO: 2486014
cuugagaagacucaaccug

SEQ ID NO: 2486016 - RNA, 19 nt, Artificial Sequence
  Description of Artificial Sequence: Synthetic oligonucleotide
  Sense strand starting at position 1922 of SEQ ID NO: 1887636
gucuucucaagcgguaaca

SEQ ID NO: 2486017 - RNA, 19 nt, Artificial Sequence
  Description of Artificial Sequence: Synthetic oligonucleotide
  Antisense strand to SEQ ID NO: 2486016
uguuaccgcuugagaagac

SEQ ID NO: 2486018 - RNA, 19 nt, Artificial Sequence
  Description of Artificial Sequence: Synthetic oligonucleotide
  Sense strand starting at position 2081 of SEQ ID NO: 1887636
gagaguagcccuugaugag

SEQ ID NO: 2486019 - RNA, 19 nt, Artificial Sequence
  Description of Artificial Sequence: Synthetic oligonucleotide
  Antisense strand to SEQ ID NO: 2486018
cucaucaagggcuacucuc

SEQ ID NO: 2486020 - RNA, 19 nt, Artificial Sequence
  Description of Artificial Sequence: Synthetic oligonucleotide
  Sense strand starting at position 2157 of SEQ ID NO: 1887636
aggcuuuccacguauagau

SEQ ID NO: 2486021 - RNA, 19 nt, Artificial Sequence
  Description of Artificial Sequence: Synthetic oligonucleotide
  Antisense strand to SEQ ID NO: 2486020
aucuauacguggaaagccu

SEQ ID NO: 2486022 - RNA, 19 nt, Artificial Sequence
  Description of Artificial Sequence: Synthetic oligonucleotide
  Sense strand starting at position 2159 of SEQ ID NO: 1887636
gcuuuccacguauagauau

SEQ ID NO: 2486023 - RNA, 19 nt, Artificial Sequence
  Description of Artificial Sequence: Synthetic oligonucleotide
  Antisense strand to SEQ ID NO: 2486022
auaucuauacguggaaagc

SEQ ID NO: 2486024 - RNA, 19 nt, Artificial Sequence
  Description of Artificial Sequence: Synthetic oligonucleotide
  Sense strand starting at position 2222 of SEQ ID NO: 1887636
gacugaguacaaugcaagu

SEQ ID NO: 2486025 - RNA, 19 nt, Artificial Sequence
  Description of Artificial Sequence: Synthetic oligonucleotide
  Antisense strand to SEQ ID NO: 2486024
acuugcauuguacucaguc

SEQ ID NO: 2486026 - RNA, 19 nt, Artificial Sequence
  Description of Artificial Sequence: Synthetic oligonucleotide
  Sense strand starting at position 2268 of SEQ ID NO: 1887636
gggccuucguccuuaagac

SEQ ID NO: 2486027 - RNA, 19 nt, Artificial Sequence
  Description of Artificial Sequence: Synthetic oligonucleotide
  Antisense strand to SEQ ID NO: 2486026
gucuuaaggacgaaggccc

SEQ ID NO: 2486028 - RNA, 19 nt, Artificial Sequence
  Description of Artificial Sequence: Synthetic oligonucleotide
  Sense strand starting at position 2269 of SEQ ID NO: 1887636
ggccuucguccuuaagacu

SEQ ID NO: 2486029 - RNA, 19 nt, Artificial Sequence
  Description of Artificial Sequence: Synthetic oligonucleotide
  Antisense strand to SEQ ID NO: 2486028
agucuuaaggacgaaggcc

SEQ ID NO: 2486030 - RNA, 19 nt, Artificial Sequence
  Description of Artificial Sequence: Synthetic oligonucleotide
  Sense strand starting at position 2595 of SEQ ID NO: 1887636
gugagauccugacccuaaa

SEQ ID NO: 2486031 - RNA, 19 nt, Artificial Sequence
  Description of Artificial Sequence: Synthetic oligonucleotide
  Antisense strand to SEQ ID NO: 2486030
uuuagggucaggaucucac

SEQ ID NO: 2486032 - RNA, 19 nt, Artificial Sequence
  Description of Artificial Sequence: Synthetic oligonucleotide
  Sense strand starting at position 2663 of SEQ ID NO: 1887636
ggccaaugauacguccaca

SEQ ID NO: 2486033 - RNA, 19 nt, Artificial Sequence
  Description of Artificial Sequence: Synthetic oligonucleotide
  Antisense strand to SEQ ID NO: 2486032
uguggacguaucauuggcc

SEQ ID NO: 2486034 - RNA, 19 nt, Artificial Sequence
  Description of Artificial Sequence: Synthetic oligonucleotide
  Sense strand starting at position 2713 of SEQ ID NO: 1887636
ugcagcugcguucuuauau

SEQ ID NO: 2486035 - RNA, 19 nt, Artificial Sequence
  Description of Artificial Sequence: Synthetic oligonucleotide
  Antisense strand to SEQ ID NO: 2486034
auauaagaacgcagcugca

SEQ ID NO: 2486036 - RNA, 19 nt, Artificial Sequence
  Description of Artificial Sequence: Synthetic oligonucleotide
  Sense strand starting at position 2743 of SEQ ID NO: 1887636
ccacucaacuuugauagga

SEQ ID NO: 2486037 - RNA, 19 nt, Artificial Sequence
  Description of Artificial Sequence: Synthetic oligonucleotide
  Antisense strand to SEQ ID NO: 2486036
uccuaucaaaguugagugg

SEQ ID NO: 2486038 - RNA, 19 nt, Artificial Sequence
  Description of Artificial Sequence: Synthetic oligonucleotide
  Sense strand starting at position 2745 of SEQ ID NO: 1887636
acucaacuuugauaggauu

SEQ ID NO: 2486039 - RNA, 19 nt, Artificial Sequence
  Description of Artificial Sequence: Synthetic oligonucleotide
  Antisense strand to SEQ ID NO: 2486038
aauccuaucaaaguugagu

SEQ ID NO: 2486040 - RNA, 19 nt, Artificial Sequence
  Description of Artificial Sequence: Synthetic oligonucleotide
  Sense strand starting at position 2890 of SEQ ID NO: 1887636
gaaauuaggugaucccuau

SEQ ID NO: 2486041 - RNA, 19 nt, Artificial Sequence
  Description of Artificial Sequence: Synthetic oligonucleotide
  Antisense strand to SEQ ID NO: 2486040
auagggaucaccuaauuuc

SEQ ID NO: 2486042 - RNA, 19 nt, Artificial Sequence
  Description of Artificial Sequence: Synthetic oligonucleotide
  Sense strand starting at position 2894 of SEQ ID NO: 1887636
uuaggugaucccuauuacu

SEQ ID NO: 2486043 - RNA, 19 nt, Artificial Sequence
  Description of Artificial Sequence: Synthetic oligonucleotide
  Antisense strand to SEQ ID NO: 2486042
aguaauagggaucaccuaa

SEQ ID NO: 2486044 - RNA, 19 nt, Artificial Sequence
  Description of Artificial Sequence: Synthetic oligonucleotide
  Sense strand starting at position 2919 of SEQ ID NO: 1887636
gccaacauguauucguuau

SEQ ID NO: 2486045 - RNA, 19 nt, Artificial Sequence
  Description of Artificial Sequence: Synthetic oligonucleotide
  Antisense strand to SEQ ID NO: 2486044
auaacgaauacauguuggc

SEQ ID NO: 2486046 - RNA, 19 nt, Artificial Sequence
  Description of Artificial Sequence: Synthetic oligonucleotide
  Sense strand starting at position 3882 of SEQ ID NO: 1887636
ccacuagaguuccuuugac

SEQ ID NO: 2486047 - RNA, 19 nt, Artificial Sequence
  Description of Artificial Sequence: Synthetic oligonucleotide
  Antisense strand to SEQ ID NO: 2486046
gucaaaggaacucuagugg

SEQ ID NO: 2486048 - RNA, 19 nt, Artificial Sequence
  Description of Artificial Sequence: Synthetic oligonucleotide
  Sense strand starting at position 3892 of SEQ ID NO: 1887636
uccuuugaccuugaggcau

SEQ ID NO: 2486049 - RNA, 19 nt, Artificial Sequence
  Description of Artificial Sequence: Synthetic oligonucleotide
  Antisense strand to SEQ ID NO: 2486048
augccucaaggucaaagga

SEQ ID NO: 2486050 - RNA, 19 nt, Artificial Sequence
  Description of Artificial Sequence: Synthetic oligonucleotide
  Sense strand starting at position 964 of SEQ ID NO: 1887637
ucugguuauuucucugugu

SEQ ID NO: 2486051 - RNA, 19 nt, Artificial Sequence
  Description of Artificial Sequence: Synthetic oligonucleotide
  Antisense strand to SEQ ID NO: 2486050
acacagagaaauaaccaga

SEQ ID NO: 2486052 - RNA, 19 nt, Artificial Sequence
  Description of Artificial Sequence: Synthetic oligonucleotide
  Sense strand starting at position 965 of SEQ ID NO: 1887637
cugguuauuucucuguguu

SEQ ID NO: 2486053 - RNA, 19 nt, Artificial Sequence
  Description of Artificial Sequence: Synthetic oligonucleotide
  Antisense strand to SEQ ID NO: 2486052
aacacagagaaauaaccag

SEQ ID NO: 2486054 - RNA, 19 nt, Artificial Sequence
  Description of Artificial Sequence: Synthetic oligonucleotide
  Sense strand starting at position 966 of SEQ ID NO: 1887637
ugguuauuucucuguguuu

SEQ ID NO: 2486055 - RNA, 19 nt, Artificial Sequence
  Description of Artificial Sequence: Synthetic oligonucleotide
  Antisense strand to SEQ ID NO: 2486054
aaacacagagaaauaacca

SEQ ID NO: 2486056 - RNA, 19 nt, Artificial Sequence
  Description of Artificial Sequence: Synthetic oligonucleotide
  Sense strand starting at position 1190 of SEQ ID NO: 1887637
gggcucucacccuauauaa

SEQ ID NO: 2486057 - RNA, 19 nt, Artificial Sequence
  Description of Artificial Sequence: Synthetic oligonucleotide
  Antisense strand to SEQ ID NO: 2486056
uuauauagggugagagccc

SEQ ID NO: 2486058 - RNA, 19 nt, Artificial Sequence
  Description of Artificial Sequence: Synthetic oligonucleotide
  Sense strand starting at position 1277 of SEQ ID NO: 1887637
gaguauugcuauguuauuu

SEQ ID NO: 2486059 - RNA, 19 nt, Artificial Sequence
  Description of Artificial Sequence: Synthetic oligonucleotide
  Antisense strand to SEQ ID NO: 2486058
aaauaacauagcaauacuc

SEQ ID NO: 2486060 - RNA, 19 nt, Artificial Sequence
  Description of Artificial Sequence: Synthetic oligonucleotide
  Sense strand starting at position 1556 of SEQ ID NO: 1887637
caccguagccuuccgagua

SEQ ID NO: 2486061 - RNA, 19 nt, Artificial Sequence
  Description of Artificial Sequence: Synthetic oligonucleotide
  Antisense strand to SEQ ID NO: 2486060
uacucggaaggcuacggug

SEQ ID NO: 2486062 - RNA, 19 nt, Artificial Sequence
  Description of Artificial Sequence: Synthetic oligonucleotide
  Sense strand starting at position 1746 of SEQ ID NO: 1887637
gagugcuuugaauaucuau

SEQ ID NO: 2486063 - RNA, 19 nt, Artificial Sequence
  Description of Artificial Sequence: Synthetic oligonucleotide
  Antisense strand to SEQ ID NO: 2486062
auagauauucaaagcacuc

SEQ ID NO: 2486064 - RNA, 19 nt, Artificial Sequence
  Description of Artificial Sequence: Synthetic oligonucleotide
  Sense strand starting at position 1754 of SEQ ID NO: 1887637
ugaauaucuauacguggaa

SEQ ID NO: 2486065 - RNA, 19 nt, Artificial Sequence
  Description of Artificial Sequence: Synthetic oligonucleotide
  Antisense strand to SEQ ID NO: 2486064
uuccacguauagauauuca

SEQ ID NO: 2486066 - RNA, 19 nt, Artificial Sequence
  Description of Artificial Sequence: Synthetic oligonucleotide
  Sense strand starting at position 1755 of SEQ ID NO: 1887637
gaauaucuauacguggaaa

SEQ ID NO: 2486067 - RNA, 19 nt, Artificial Sequence
  Description of Artificial Sequence: Synthetic oligonucleotide
  Antisense strand to SEQ ID NO: 2486066
uuuccacguauagauauuc

SEQ ID NO: 2486068 - RNA, 19 nt, Artificial Sequence
  Description of Artificial Sequence: Synthetic oligonucleotide
  Sense strand starting at position 1791 of SEQ ID NO: 1887637
uuaagaaagggucguuaaa

SEQ ID NO: 2486069 - RNA, 19 nt, Artificial Sequence
  Description of Artificial Sequence: Synthetic oligonucleotide
  Antisense strand to SEQ ID NO: 2486068
uuuaacgacccuuucuuaa

SEQ ID NO: 2486070 - RNA, 19 nt, Artificial Sequence
  Description of Artificial Sequence: Synthetic oligonucleotide
  Sense strand starting at position 1793 of SEQ ID NO: 1887637
aagaaagggucguuaaauu

SEQ ID NO: 2486071 - RNA, 19 nt, Artificial Sequence
  Description of Artificial Sequence: Synthetic oligonucleotide
  Antisense strand to SEQ ID NO: 2486070
aauuuaacgacccuuucuu

SEQ ID NO: 2486072 - RNA, 19 nt, Artificial Sequence
  Description of Artificial Sequence: Synthetic oligonucleotide
  Sense strand starting at position 1803 of SEQ ID NO: 1887637
cguuaaauucgugcuuugu

SEQ ID NO: 2486073 - RNA, 19 nt, Artificial Sequence
  Description of Artificial Sequence: Synthetic oligonucleotide
  Antisense strand to SEQ ID NO: 2486072
acaaagcacgaauuuaacg

SEQ ID NO: 2486074 - RNA, 19 nt, Artificial Sequence
  Description of Artificial Sequence: Synthetic oligonucleotide
  Sense strand starting at position 1804 of SEQ ID NO: 1887637
guuaaauucgugcuuugua

SEQ ID NO: 2486075 - RNA, 19 nt, Artificial Sequence
  Description of Artificial Sequence: Synthetic oligonucleotide
  Antisense strand to SEQ ID NO: 2486074
uacaaagcacgaauuuaac

SEQ ID NO: 2486076 - RNA, 19 nt, Artificial Sequence
  Description of Artificial Sequence: Synthetic oligonucleotide
  Sense strand starting at position 1872 of SEQ ID NO: 1887637
ccucuucugauggguaagu

SEQ ID NO: 2486077 - RNA, 19 nt, Artificial Sequence
  Description of Artificial Sequence: Synthetic oligonucleotide
  Antisense strand to SEQ ID NO: 2486076
acuuacccaucagaagagg

SEQ ID NO: 2486078 - RNA, 19 nt, Artificial Sequence
  Description of Artificial Sequence: Synthetic oligonucleotide
  Sense strand starting at position 1992 of SEQ ID NO: 1887637
aguguuaccgcuugagaag

SEQ ID NO: 2486079 - RNA, 19 nt, Artificial Sequence
  Description of Artificial Sequence: Synthetic oligonucleotide
  Antisense strand to SEQ ID NO: 2486078
cuucucaagcgguaacacu

SEQ ID NO: 2486080 - RNA, 19 nt, Artificial Sequence
  Description of Artificial Sequence: Synthetic oligonucleotide
  Sense strand starting at position 1993 of SEQ ID NO: 1887637
guguuaccgcuugagaaga

SEQ ID NO: 2486081 - RNA, 19 nt, Artificial Sequence
  Description of Artificial Sequence: Synthetic oligonucleotide
  Antisense strand to SEQ ID NO: 2486080
ucuucucaagcgguaacac

SEQ ID NO: 2486082 - RNA, 19 nt, Artificial Sequence
  Description of Artificial Sequence: Synthetic oligonucleotide
  Sense strand starting at position 2086 of SEQ ID NO: 1887637
ggccguuuccucgugauau

SEQ ID NO: 2486083 - RNA, 19 nt, Artificial Sequence
  Description of Artificial Sequence: Synthetic oligonucleotide
  Antisense strand to SEQ ID NO: 2486082
auaucacgaggaaacggcc

SEQ ID NO: 2486084 - RNA, 19 nt, Artificial Sequence
  Description of Artificial Sequence: Synthetic oligonucleotide
  Sense strand starting at position 2088 of SEQ ID NO: 1887637
ccguuuccucgugauauaa

SEQ ID NO: 2486085 - RNA, 19 nt, Artificial Sequence
  Description of Artificial Sequence: Synthetic oligonucleotide
  Antisense strand to SEQ ID NO: 2486084
uuauaucacgaggaaacgg

SEQ ID NO: 2486086 - RNA, 19 nt, Artificial Sequence
  Description of Artificial Sequence: Synthetic oligonucleotide
  Sense strand starting at position 2249 of SEQ ID NO: 1887637
cggucuucugcaggaacua

SEQ ID NO: 2486087 - RNA, 19 nt, Artificial Sequence
  Description of Artificial Sequence: Synthetic oligonucleotide
  Antisense strand to SEQ ID NO: 2486086
uaguuccugcagaagaccg

SEQ ID NO: 2486088 - RNA, 19 nt, Artificial Sequence
  Description of Artificial Sequence: Synthetic oligonucleotide
  Sense strand starting at position 2250 of SEQ ID NO: 1887637
ggucuucugcaggaacuaa

SEQ ID NO: 2486089 - RNA, 19 nt, Artificial Sequence
  Description of Artificial Sequence: Synthetic oligonucleotide
  Antisense strand to SEQ ID NO: 2486088
uuaguuccugcagaagacc

SEQ ID NO: 2486090 - RNA, 19 nt, Artificial Sequence
  Description of Artificial Sequence: Synthetic oligonucleotide
  Sense strand starting at position 2295 of SEQ ID NO: 1887637
ggaaacugucuuggguaca

SEQ ID NO: 2486091 - RNA, 19 nt, Artificial Sequence
  Description of Artificial Sequence: Synthetic oligonucleotide
  Antisense strand to SEQ ID NO: 2486090
uguacccaagacaguuucc

SEQ ID NO: 2486092 - RNA, 19 nt, Artificial Sequence
  Description of Artificial Sequence: Synthetic oligonucleotide
  Sense strand starting at position 2377 of SEQ ID NO: 1887637
gggcucucaccugacacaa

SEQ ID NO: 2486093 - RNA, 19 nt, Artificial Sequence
  Description of Artificial Sequence: Synthetic oligonucleotide
  Antisense strand to SEQ ID NO: 2486092
uugugucaggugagagccc

SEQ ID NO: 2486094 - RNA, 19 nt, Artificial Sequence
  Description of Artificial Sequence: Synthetic oligonucleotide
  Sense strand starting at position 2814 of SEQ ID NO: 1887637
ugguguuauaauugauaug

SEQ ID NO: 2486095 - RNA, 19 nt, Artificial Sequence
  Description of Artificial Sequence: Synthetic oligonucleotide
  Antisense strand to SEQ ID NO: 2486094
cauaucaauuauaacacca

SEQ ID NO: 2486096 - RNA, 19 nt, Artificial Sequence
  Description of Artificial Sequence: Synthetic oligonucleotide
  Sense strand starting at position 2815 of SEQ ID NO: 1887637
gguguuauaauugauaugu

SEQ ID NO: 2486097 - RNA, 19 nt, Artificial Sequence
  Description of Artificial Sequence: Synthetic oligonucleotide
  Antisense strand to SEQ ID NO: 2486096
acauaucaauuauaacacc

SEQ ID NO: 2486098 - RNA, 19 nt, Artificial Sequence
  Description of Artificial Sequence: Synthetic oligonucleotide
  Sense strand starting at position 2858 of SEQ ID NO: 1887637
gcaaguuuauugcugacau

SEQ ID NO: 2486099 - RNA, 19 nt, Artificial Sequence
  Description of Artificial Sequence: Synthetic oligonucleotide
  Antisense strand to SEQ ID NO: 2486098
augucagcaauaaacuugc

SEQ ID NO: 2486100 - RNA, 19 nt, Artificial Sequence
  Description of Artificial Sequence: Synthetic oligonucleotide
  Sense strand starting at position 2877 of SEQ ID NO: 1887637
uuaacaugugcuuggauga

SEQ ID NO: 2486101 - RNA, 19 nt, Artificial Sequence
  Description of Artificial Sequence: Synthetic oligonucleotide
  Antisense strand to SEQ ID NO: 2486100
ucauccaagcacauguuaa

SEQ ID NO: 2486102 - RNA, 19 nt, Artificial Sequence
  Description of Artificial Sequence: Synthetic oligonucleotide
  Sense strand starting at position 2921 of SEQ ID NO: 1887637
gaaagucacagugauggca

SEQ ID NO: 2486103 - RNA, 19 nt, Artificial Sequence
  Description of Artificial Sequence: Synthetic oligonucleotide
  Antisense strand to SEQ ID NO: 2486102
ugccaucacugugacuuuc

SEQ ID NO: 2486104 - RNA, 19 nt, Artificial Sequence
  Description of Artificial Sequence: Synthetic oligonucleotide
  Sense strand starting at position 2952 of SEQ ID NO: 1887637
gagcucauacugggauacu

SEQ ID NO: 2486105 - RNA, 19 nt, Artificial Sequence
  Description of Artificial Sequence: Synthetic oligonucleotide
  Antisense strand to SEQ ID NO: 2486104
aguaucccaguaugagcuc

SEQ ID NO: 2486106 - RNA, 19 nt, Artificial Sequence
  Description of Artificial Sequence: Synthetic oligonucleotide
  Sense strand starting at position 3094 of SEQ ID NO: 1887637
ucagcuaugaccuggaguu

SEQ ID NO: 2486107 - RNA, 19 nt, Artificial Sequence
  Description of Artificial Sequence: Synthetic oligonucleotide
  Antisense strand to SEQ ID NO: 2486106
aacuccaggucauagcuga

SEQ ID NO: 2486108 - RNA, 19 nt, Artificial Sequence
  Description of Artificial Sequence: Synthetic oligonucleotide
  Sense strand starting at position 3095 of SEQ ID NO: 1887637
cagcuaugaccuggaguuc

SEQ ID NO: 2486109 - RNA, 19 nt, Artificial Sequence
  Description of Artificial Sequence: Synthetic oligonucleotide
  Antisense strand to SEQ ID NO: 2486108
gaacuccaggucauagcug

SEQ ID NO: 2486110 - RNA, 19 nt, Artificial Sequence
  Description of Artificial Sequence: Synthetic oligonucleotide
  Sense strand starting at position 3245 of SEQ ID NO: 1887637
gggaaucugguuggccuua

SEQ ID NO: 2486111 - RNA, 19 nt, Artificial Sequence
  Description of Artificial Sequence: Synthetic oligonucleotide
  Antisense strand to SEQ ID NO: 2486110
uaaggccaaccagauuccc

SEQ ID NO: 2486112 - RNA, 19 nt, Artificial Sequence
  Description of Artificial Sequence: Synthetic oligonucleotide
  Sense strand starting at position 3247 of SEQ ID NO: 1887637
gaaucugguuggccuuaaa

SEQ ID NO: 2486113 - RNA, 19 nt, Artificial Sequence
  Description of Artificial Sequence: Synthetic oligonucleotide
  Antisense strand to SEQ ID NO: 2486112
uuuaaggccaaccagauuc

SEQ ID NO: 2486114 - RNA, 19 nt, Artificial Sequence
  Description of Artificial Sequence: Synthetic oligonucleotide
  Sense strand starting at position 3322 of SEQ ID NO: 1887637
guggguuuggccagagcau

SEQ ID NO: 2486115 - RNA, 19 nt, Artificial Sequence
  Description of Artificial Sequence: Synthetic oligonucleotide
  Antisense strand to SEQ ID NO: 2486114
augcucuggccaaacccac

SEQ ID NO: 2486116 - RNA, 19 nt, Artificial Sequence
  Description of Artificial Sequence: Synthetic oligonucleotide
  Sense strand starting at position 3493 of SEQ ID NO: 1887637
caugucuggcguuacugaa

SEQ ID NO: 2486117 - RNA, 19 nt, Artificial Sequence
  Description of Artificial Sequence: Synthetic oligonucleotide
  Antisense strand to SEQ ID NO: 2486116
uucaguaacgccagacaug

SEQ ID NO: 2486118 - RNA, 19 nt, Artificial Sequence
  Description of Artificial Sequence: Synthetic oligonucleotide
  Sense strand starting at position 3592 of SEQ ID NO: 1887637
gaguuaugcucuuugagag

SEQ ID NO: 2486119 - RNA, 19 nt, Artificial Sequence
  Description of Artificial Sequence: Synthetic oligonucleotide
  Antisense strand to SEQ ID NO: 2486118
cucucaaagagcauaacuc

SEQ ID NO: 2486120 - RNA, 19 nt, Artificial Sequence
  Description of Artificial Sequence: Synthetic oligonucleotide
  Sense strand starting at position 3593 of SEQ ID NO: 1887637
aguuaugcucuuugagagu

SEQ ID NO: 2486121 - RNA, 19 nt, Artificial Sequence
  Description of Artificial Sequence: Synthetic oligonucleotide
  Antisense strand to SEQ ID NO: 2486120
acucucaaagagcauaacu

SEQ ID NO: 2486122 - RNA, 19 nt, Artificial Sequence
  Description of Artificial Sequence: Synthetic oligonucleotide
  Sense strand starting at position 3871 of SEQ ID NO: 1887637
cugggugacagcgauaacu

SEQ ID NO: 2486123 - RNA, 19 nt, Artificial Sequence
  Description of Artificial Sequence: Synthetic oligonucleotide
  Antisense strand to SEQ ID NO: 2486122
aguuaucgcugucacccag

SEQ ID NO: 2486124 - RNA, 19 nt, Artificial Sequence
  Description of Artificial Sequence: Synthetic oligonucleotide
  Sense strand starting at position 3873 of SEQ ID NO: 1887637
gggugacagcgauaacugu

SEQ ID NO: 2486125 - RNA, 19 nt, Artificial Sequence
  Description of Artificial Sequence: Synthetic oligonucleotide
  Antisense strand to SEQ ID NO: 2486124
acaguuaucgcugucaccc

SEQ ID NO: 2486126 - RNA, 19 nt, Artificial Sequence
  Description of Artificial Sequence: Synthetic oligonucleotide
  Sense strand starting at position 3951 of SEQ ID NO: 1887637
gccugagcucccuagauca

SEQ ID NO: 2486127 - RNA, 19 nt, Artificial Sequence
  Description of Artificial Sequence: Synthetic oligonucleotide
  Antisense strand to SEQ ID NO: 2486126
ugaucuagggagcucaggc

SEQ ID NO: 2486128 - RNA, 19 nt, Artificial Sequence
  Description of Artificial Sequence: Synthetic oligonucleotide
  Sense strand starting at position 3953 of SEQ ID NO: 1887637
cugagcucccuagaucaaa

SEQ ID NO: 2486129 - RNA, 19 nt, Artificial Sequence
  Description of Artificial Sequence: Synthetic oligonucleotide
  Antisense strand to SEQ ID NO: 2486128
uuugaucuagggagcucag

SEQ ID NO: 2486130 - RNA, 19 nt, Artificial Sequence
  Description of Artificial Sequence: Synthetic oligonucleotide
  Sense strand starting at position 158 of SEQ ID NO: 1887638
gggcuuauaugggaagauc

SEQ ID NO: 2486131 - RNA, 19 nt, Artificial Sequence
  Description of Artificial Sequence: Synthetic oligonucleotide
  Antisense strand to SEQ ID NO: 2486130
gaucuucccauauaagccc

SEQ ID NO: 2486132 - RNA, 19 nt, Artificial Sequence
  Description of Artificial Sequence: Synthetic oligonucleotide
  Sense strand starting at position 257 of SEQ ID NO: 1887638
gacaguuaucgcugucacc

SEQ ID NO: 2486133 - RNA, 19 nt, Artificial Sequence
  Description of Artificial Sequence: Synthetic oligonucleotide
  Antisense strand to SEQ ID NO: 2486132
ggugacagcgauaacuguc

SEQ ID NO: 2486134 - RNA, 19 nt, Artificial Sequence
  Description of Artificial Sequence: Synthetic oligonucleotide
  Sense strand starting at position 546 of SEQ ID NO: 1887638
agagcauaacucuaaguuc

SEQ ID NO: 2486135 - RNA, 19 nt, Artificial Sequence
  Description of Artificial Sequence: Synthetic oligonucleotide
  Antisense strand to SEQ ID NO: 2486134
gaacuuagaguuaugcucu

SEQ ID NO: 2486136 - RNA, 19 nt, Artificial Sequence
  Description of Artificial Sequence: Synthetic oligonucleotide
  Sense strand starting at position 549 of SEQ ID NO: 1887638
gcauaacucuaaguucuag

SEQ ID NO: 2486137 - RNA, 19 nt, Artificial Sequence
  Description of Artificial Sequence: Synthetic oligonucleotide
  Antisense strand to SEQ ID NO: 2486136
cuagaacuuagaguuaugc

SEQ ID NO: 2486138 - RNA, 19 nt, Artificial Sequence
  Description of Artificial Sequence: Synthetic oligonucleotide
  Sense strand starting at position 609 of SEQ ID NO: 1887638
aggcaauguacuuggguca

SEQ ID NO: 2486139 - RNA, 19 nt, Artificial Sequence
  Description of Artificial Sequence: Synthetic oligonucleotide
  Antisense strand to SEQ ID NO: 2486138
ugacccaaguacauugccu

SEQ ID NO: 2486140 - RNA, 19 nt, Artificial Sequence
  Description of Artificial Sequence: Synthetic oligonucleotide
  Sense strand starting at position 610 of SEQ ID NO: 1887638
ggcaauguacuugggucau

SEQ ID NO: 2486141 - RNA, 19 nt, Artificial Sequence
  Description of Artificial Sequence: Synthetic oligonucleotide
  Antisense strand to SEQ ID NO: 2486140
augacccaaguacauugcc

SEQ ID NO: 2486142 - RNA, 19 nt, Artificial Sequence
  Description of Artificial Sequence: Synthetic oligonucleotide
  Sense strand starting at position 616 of SEQ ID NO: 1887638
guacuugggucauagaaga

SEQ ID NO: 2486143 - RNA, 19 nt, Artificial Sequence
  Description of Artificial Sequence: Synthetic oligonucleotide
  Antisense strand to SEQ ID NO: 2486142
ucuucuaugacccaaguac

SEQ ID NO: 2486144 - RNA, 19 nt, Artificial Sequence
  Description of Artificial Sequence: Synthetic oligonucleotide
  Sense strand starting at position 639 of SEQ ID NO: 1887638
ucaguaacgccagacauga

SEQ ID NO: 2486145 - RNA, 19 nt, Artificial Sequence
  Description of Artificial Sequence: Synthetic oligonucleotide
  Antisense strand to SEQ ID NO: 2486144
ucaugucuggcguuacuga

SEQ ID NO: 2486146 - RNA, 19 nt, Artificial Sequence
  Description of Artificial Sequence: Synthetic oligonucleotide
  Sense strand starting at position 677 of SEQ ID NO: 1887638
agcacuuguggguggcaga

SEQ ID NO: 2486147 - RNA, 19 nt, Artificial Sequence
  Description of Artificial Sequence: Synthetic oligonucleotide
  Antisense strand to SEQ ID NO: 2486146
ucugccacccacaagugcu

SEQ ID NO: 2486148 - RNA, 19 nt, Artificial Sequence
  Description of Artificial Sequence: Synthetic oligonucleotide
  Sense strand starting at position 840 of SEQ ID NO: 1887638
augcaugcugccuaccaaa

SEQ ID NO: 2486149 - RNA, 19 nt, Artificial Sequence
  Description of Artificial Sequence: Synthetic oligonucleotide
  Antisense strand to SEQ ID NO: 2486148
uuugguaggcagcaugcau

SEQ ID NO: 2486150 - RNA, 19 nt, Artificial Sequence
  Description of Artificial Sequence: Synthetic oligonucleotide
  Sense strand starting at position 1032 of SEQ ID NO: 1887638
ccgggaacuccaggucaua

SEQ ID NO: 2486151 - RNA, 19 nt, Artificial Sequence
  Description of Artificial Sequence: Synthetic oligonucleotide
  Antisense strand to SEQ ID NO: 2486150
uaugaccuggaguucccgg

SEQ ID NO: 2486152 - RNA, 19 nt, Artificial Sequence
  Description of Artificial Sequence: Synthetic oligonucleotide
  Sense strand starting at position 1177 of SEQ ID NO: 1887638
ugaguaucccaguaugagc

SEQ ID NO: 2486153 - RNA, 19 nt, Artificial Sequence
  Description of Artificial Sequence: Synthetic oligonucleotide
  Antisense strand to SEQ ID NO: 2486152
gcucauacugggauacuca

SEQ ID NO: 2486154 - RNA, 19 nt, Artificial Sequence
  Description of Artificial Sequence: Synthetic oligonucleotide
  Sense strand starting at position 1209 of SEQ ID NO: 1887638
cugccaucacugugacuuu

SEQ ID NO: 2486155 - RNA, 19 nt, Artificial Sequence
  Description of Artificial Sequence: Synthetic oligonucleotide
  Antisense strand to SEQ ID NO: 2486154
aaagucacagugauggcag

SEQ ID NO: 2486156 - RNA, 19 nt, Artificial Sequence
  Description of Artificial Sequence: Synthetic oligonucleotide
  Sense strand starting at position 1220 of SEQ ID NO: 1887638
gugacuuucuugccuacaa

SEQ ID NO: 2486157 - RNA, 19 nt, Artificial Sequence
  Description of Artificial Sequence: Synthetic oligonucleotide
  Antisense strand to SEQ ID NO: 2486156
uuguaggcaagaaagucac

SEQ ID NO: 2486158 - RNA, 19 nt, Artificial Sequence
  Description of Artificial Sequence: Synthetic oligonucleotide
  Sense strand starting at position 1221 of SEQ ID NO: 1887638
ugacuuucuugccuacaag

SEQ ID NO: 2486159 - RNA, 19 nt, Artificial Sequence
  Description of Artificial Sequence: Synthetic oligonucleotide
  Antisense strand to SEQ ID NO: 2486158
cuuguaggcaagaaaguca

SEQ ID NO: 2486160 - RNA, 19 nt, Artificial Sequence
  Description of Artificial Sequence: Synthetic oligonucleotide
  Sense strand starting at position 1239 of SEQ ID NO: 1887638
gagguuggccuccaaucau

SEQ ID NO: 2486161 - RNA, 19 nt, Artificial Sequence
  Description of Artificial Sequence: Synthetic oligonucleotide
  Antisense strand to SEQ ID NO: 2486160
augauuggaggccaaccuc

SEQ ID NO: 2486162 - RNA, 19 nt, Artificial Sequence
  Description of Artificial Sequence: Synthetic oligonucleotide
  Sense strand starting at position 1279 of SEQ ID NO: 1887638
gcaauaaacuugcuugcua

SEQ ID NO: 2486163 - RNA, 19 nt, Artificial Sequence
  Description of Artificial Sequence: Synthetic oligonucleotide
  Antisense strand to SEQ ID NO: 2486162
uagcaagcaaguuuauugc

SEQ ID NO: 2486164 - RNA, 19 nt, Artificial Sequence
  Description of Artificial Sequence: Synthetic oligonucleotide
  Sense strand starting at position 1305 of SEQ ID NO: 1887638
agaggaaaguuacauauca

SEQ ID NO: 2486165 - RNA, 19 nt, Artificial Sequence
  Description of Artificial Sequence: Synthetic oligonucleotide
  Antisense strand to SEQ ID NO: 2486164
ugauauguaacuuuccucu

SEQ ID NO: 2486166 - RNA, 19 nt, Artificial Sequence
  Description of Artificial Sequence: Synthetic oligonucleotide
  Sense strand starting at position 1348 of SEQ ID NO: 1887638
auuccuuucuuugugcaua

SEQ ID NO: 2486167 - RNA, 19 nt, Artificial Sequence
  Description of Artificial Sequence: Synthetic oligonucleotide
  Antisense strand to SEQ ID NO: 2486166
uaugcacaaagaaaggaau

SEQ ID NO: 2486168 - RNA, 19 nt, Artificial Sequence
  Description of Artificial Sequence: Synthetic oligonucleotide
  Sense strand starting at position 1739 of SEQ ID NO: 1887638
cccagauucccuuaguugu

SEQ ID NO: 2486169 - RNA, 19 nt, Artificial Sequence
  Description of Artificial Sequence: Synthetic oligonucleotide
  Antisense strand to SEQ ID NO: 2486168
acaacuaagggaaucuggg

SEQ ID NO: 2486170 - RNA, 19 nt, Artificial Sequence
  Description of Artificial Sequence: Synthetic oligonucleotide
  Sense strand starting at position 1846 of SEQ ID NO: 1887638
acaguuuccggcugggaau

SEQ ID NO: 2486171 - RNA, 19 nt, Artificial Sequence
  Description of Artificial Sequence: Synthetic oligonucleotide
  Antisense strand to SEQ ID NO: 2486170
auucccagccggaaacugu

SEQ ID NO: 2486172 - RNA, 19 nt, Artificial Sequence
  Description of Artificial Sequence: Synthetic oligonucleotide
  Sense strand starting at position 1876 of SEQ ID NO: 1887638
gcucuuuaguuccugcaga

SEQ ID NO: 2486173 - RNA, 19 nt, Artificial Sequence
  Description of Artificial Sequence: Synthetic oligonucleotide
  Antisense strand to SEQ ID NO: 2486172
ucugcaggaacuaaagagc

SEQ ID NO: 2486174 - RNA, 19 nt, Artificial Sequence
  Description of Artificial Sequence: Synthetic oligonucleotide
  Sense strand starting at position 1906 of SEQ ID NO: 1887638
cacggcauccguugauaug

SEQ ID NO: 2486175 - RNA, 19 nt, Artificial Sequence
  Description of Artificial Sequence: Synthetic oligonucleotide
  Antisense strand to SEQ ID NO: 2486174
cauaucaacggaugccgug

SEQ ID NO: 2486176 - RNA, 19 nt, Artificial Sequence
  Description of Artificial Sequence: Synthetic oligonucleotide
  Sense strand starting at position 2116 of SEQ ID NO: 1887638
gguaucuucuccgcagguu

SEQ ID NO: 2486177 - RNA, 19 nt, Artificial Sequence
  Description of Artificial Sequence: Synthetic oligonucleotide
  Antisense strand to SEQ ID NO: 2486176
aaccugcggagaagauacc

SEQ ID NO: 2486178 - RNA, 19 nt, Artificial Sequence
  Description of Artificial Sequence: Synthetic oligonucleotide
  Sense strand starting at position 2129 of SEQ ID NO: 1887638
cagguugagucuucucaag

SEQ ID NO: 2486179 - RNA, 19 nt, Artificial Sequence
  Description of Artificial Sequence: Synthetic oligonucleotide
  Antisense strand to SEQ ID NO: 2486178
cuugagaagacucaaccug

SEQ ID NO: 2486180 - RNA, 19 nt, Artificial Sequence
  Description of Artificial Sequence: Synthetic oligonucleotide
  Sense strand starting at position 2137 of SEQ ID NO: 1887638
gucuucucaagcgguaaca

SEQ ID NO: 2486181 - RNA, 19 nt, Artificial Sequence
  Description of Artificial Sequence: Synthetic oligonucleotide
  Antisense strand to SEQ ID NO: 2486180
uguuaccgcuugagaagac

SEQ ID NO: 2486182 - RNA, 19 nt, Artificial Sequence
  Description of Artificial Sequence: Synthetic oligonucleotide
  Sense strand starting at position 2296 of SEQ ID NO: 1887638
gagaguagcccuugaugag

SEQ ID NO: 2486183 - RNA, 19 nt, Artificial Sequence
  Description of Artificial Sequence: Synthetic oligonucleotide
  Antisense strand to SEQ ID NO: 2486182
cucaucaagggcuacucuc

SEQ ID NO: 2486184 - RNA, 19 nt, Artificial Sequence
  Description of Artificial Sequence: Synthetic oligonucleotide
  Sense strand starting at position 2372 of SEQ ID NO: 1887638
aggcuuuccacguauagau

SEQ ID NO: 2486185 - RNA, 19 nt, Artificial Sequence
  Description of Artificial Sequence: Synthetic oligonucleotide
  Antisense strand to SEQ ID NO: 2486184
aucuauacguggaaagccu

SEQ ID NO: 2486186 - RNA, 19 nt, Artificial Sequence
  Description of Artificial Sequence: Synthetic oligonucleotide
  Sense strand starting at position 2374 of SEQ ID NO: 1887638
gcuuuccacguauagauau

SEQ ID NO: 2486187 - RNA, 19 nt, Artificial Sequence
  Description of Artificial Sequence: Synthetic oligonucleotide
  Antisense strand to SEQ ID NO: 2486186
auaucuauacguggaaagc

SEQ ID NO: 2486188 - RNA, 19 nt, Artificial Sequence
  Description of Artificial Sequence: Synthetic oligonucleotide
  Sense strand starting at position 2437 of SEQ ID NO: 1887638
gacugaguacaaugcaagu

SEQ ID NO: 2486189 - RNA, 19 nt, Artificial Sequence
  Description of Artificial Sequence: Synthetic oligonucleotide
  Antisense strand to SEQ ID NO: 2486188
acuugcauuguacucaguc

SEQ ID NO: 2486190 - RNA, 19 nt, Artificial Sequence
  Description of Artificial Sequence: Synthetic oligonucleotide
  Sense strand starting at position 2483 of SEQ ID NO: 1887638
gggccuucguccuuaagac

SEQ ID NO: 2486191 - RNA, 19 nt, Artificial Sequence
  Description of Artificial Sequence: Synthetic oligonucleotide
  Antisense strand to SEQ ID NO: 2486190
gucuuaaggacgaaggccc

SEQ ID NO: 2486192 - RNA, 19 nt, Artificial Sequence
  Description of Artificial Sequence: Synthetic oligonucleotide
  Sense strand starting at position 2484 of SEQ ID NO: 1887638
ggccuucguccuuaagacu

SEQ ID NO: 2486193 - RNA, 19 nt, Artificial Sequence
  Description of Artificial Sequence: Synthetic oligonucleotide
  Antisense strand to SEQ ID NO: 2486192
agucuuaaggacgaaggcc

SEQ ID NO: 2486194 - RNA, 19 nt, Artificial Sequence
  Description of Artificial Sequence: Synthetic oligonucleotide
  Sense strand starting at position 2810 of SEQ ID NO: 1887638
gugagauccugacccuaaa

SEQ ID NO: 2486195 - RNA, 19 nt, Artificial Sequence
  Description of Artificial Sequence: Synthetic oligonucleotide
  Antisense strand to SEQ ID NO: 2486194
uuuagggucaggaucucac

SEQ ID NO: 2486196 - RNA, 19 nt, Artificial Sequence
  Description of Artificial Sequence: Synthetic oligonucleotide
  Sense strand starting at position 2878 of SEQ ID NO: 1887638
ggccaaugauacguccaca

SEQ ID NO: 2486197 - RNA, 19 nt, Artificial Sequence
  Description of Artificial Sequence: Synthetic oligonucleotide
  Antisense strand to SEQ ID NO: 2486196
uguggacguaucauuggcc

SEQ ID NO: 2486198 - RNA, 19 nt, Artificial Sequence
  Description of Artificial Sequence: Synthetic oligonucleotide
  Sense strand starting at position 2928 of SEQ ID NO: 1887638
ugcagcugcguucuuauau

SEQ ID NO: 2486199 - RNA, 19 nt, Artificial Sequence
  Description of Artificial Sequence: Synthetic oligonucleotide
  Antisense strand to SEQ ID NO: 2486198
auauaagaacgcagcugca

SEQ ID NO: 2486200 - RNA, 19 nt, Artificial Sequence
  Description of Artificial Sequence: Synthetic oligonucleotide
  Sense strand starting at position 2958 of SEQ ID NO: 1887638
ccacucaacuuugauagga

SEQ ID NO: 2486201 - RNA, 19 nt, Artificial Sequence
  Description of Artificial Sequence: Synthetic oligonucleotide
  Antisense strand to SEQ ID NO: 2486200
uccuaucaaaguugagugg

SEQ ID NO: 2486202 - RNA, 19 nt, Artificial Sequence
  Description of Artificial Sequence: Synthetic oligonucleotide
  Sense strand starting at position 2960 of SEQ ID NO: 1887638
acucaacuuugauaggauu

SEQ ID NO: 2486203 - RNA, 19 nt, Artificial Sequence
  Description of Artificial Sequence: Synthetic oligonucleotide
  Antisense strand to SEQ ID NO: 2486202
aauccuaucaaaguugagu

SEQ ID NO: 2486204 - RNA, 19 nt, Artificial Sequence
  Description of Artificial Sequence: Synthetic oligonucleotide
  Sense strand starting at position 3105 of SEQ ID NO: 1887638
gaaauuaggugaucccuau

SEQ ID NO: 2486205 - RNA, 19 nt, Artificial Sequence
  Description of Artificial Sequence: Synthetic oligonucleotide
  Antisense strand to SEQ ID NO: 2486204
auagggaucaccuaauuuc

SEQ ID NO: 2486206 - RNA, 19 nt, Artificial Sequence
  Description of Artificial Sequence: Synthetic oligonucleotide
  Sense strand starting at position 3109 of SEQ ID NO: 1887638
uuaggugaucccuauuacu

SEQ ID NO: 2486207 - RNA, 19 nt, Artificial Sequence
  Description of Artificial Sequence: Synthetic oligonucleotide
  Antisense strand to SEQ ID NO: 2486206
aguaauagggaucaccuaa

SEQ ID NO: 2486208 - RNA, 19 nt, Artificial Sequence
  Description of Artificial Sequence: Synthetic oligonucleotide
  Sense strand starting at position 3134 of SEQ ID NO: 1887638
gccaacauguauucguuau

SEQ ID NO: 2486209 - RNA, 19 nt, Artificial Sequence
  Description of Artificial Sequence: Synthetic oligonucleotide
  Antisense strand to SEQ ID NO: 2486208
auaacgaauacauguuggc

SEQ ID NO: 2486210 - RNA, 19 nt, Artificial Sequence
  Description of Artificial Sequence: Synthetic oligonucleotide
  Sense strand starting at position 188 of SEQ ID NO: 1887639
agagaagucuuacugguua

SEQ ID NO: 2486211 - RNA, 19 nt, Artificial Sequence
  Description of Artificial Sequence: Synthetic oligonucleotide
  Antisense strand to SEQ ID NO: 2486210
uaaccaguaagacuucucu

SEQ ID NO: 2486212 - RNA, 19 nt, Artificial Sequence
  Description of Artificial Sequence: Synthetic oligonucleotide
  Sense strand starting at position 249 of SEQ ID NO: 1887639
ggcuacaacugcuuuauga

SEQ ID NO: 2486213 - RNA, 19 nt, Artificial Sequence
  Description of Artificial Sequence: Synthetic oligonucleotide
  Antisense strand to SEQ ID NO: 2486212
ucauaaagcaguuguagcc

SEQ ID NO: 2486214 - RNA, 19 nt, Artificial Sequence
  Description of Artificial Sequence: Synthetic oligonucleotide
  Sense strand starting at position 262 of SEQ ID NO: 1887639
uuaugaauugcggguacaa

SEQ ID NO: 2486215 - RNA, 19 nt, Artificial Sequence
  Description of Artificial Sequence: Synthetic oligonucleotide
  Antisense strand to SEQ ID NO: 2486214
uuguacccgcaauucauaa

SEQ ID NO: 2486216 - RNA, 19 nt, Artificial Sequence
  Description of Artificial Sequence: Synthetic oligonucleotide
  Sense strand starting at position 264 of SEQ ID NO: 1887639
augaauugcggguacaaau

SEQ ID NO: 2486217 - RNA, 19 nt, Artificial Sequence
  Description of Artificial Sequence: Synthetic oligonucleotide
  Antisense strand to SEQ ID NO: 2486216
auuuguacccgcaauucau

SEQ ID NO: 2486218 - RNA, 19 nt, Artificial Sequence
  Description of Artificial Sequence: Synthetic oligonucleotide
  Sense strand starting at position 298 of SEQ ID NO: 1887639
ccuugaauuugagaucuua

SEQ ID NO: 2486219 - RNA, 19 nt, Artificial Sequence
  Description of Artificial Sequence: Synthetic oligonucleotide
  Antisense strand to SEQ ID NO: 2486218
uaagaucucaaauucaagg

SEQ ID NO: 2486220 - RNA, 19 nt, Artificial Sequence
  Description of Artificial Sequence: Synthetic oligonucleotide
  Sense strand starting at position 1361 of SEQ ID NO: 1887639
agagcauaacucuaaguuc

SEQ ID NO: 2486221 - RNA, 19 nt, Artificial Sequence
  Description of Artificial Sequence: Synthetic oligonucleotide
  Antisense strand to SEQ ID NO: 2486220
gaacuuagaguuaugcucu

SEQ ID NO: 2486222 - RNA, 19 nt, Artificial Sequence
  Description of Artificial Sequence: Synthetic oligonucleotide
  Sense strand starting at position 1364 of SEQ ID NO: 1887639
gcauaacucuaaguucuag

SEQ ID NO: 2486223 - RNA, 19 nt, Artificial Sequence
  Description of Artificial Sequence: Synthetic oligonucleotide
  Antisense strand to SEQ ID NO: 2486222
cuagaacuuagaguuaugc

SEQ ID NO: 2486224 - RNA, 19 nt, Artificial Sequence
  Description of Artificial Sequence: Synthetic oligonucleotide
  Sense strand starting at position 1424 of SEQ ID NO: 1887639
aggcaauguacuuggguca

SEQ ID NO: 2486225 - RNA, 19 nt, Artificial Sequence
  Description of Artificial Sequence: Synthetic oligonucleotide
  Antisense strand to SEQ ID NO: 2486224
ugacccaaguacauugccu

SEQ ID NO: 2486226 - RNA, 19 nt, Artificial Sequence
  Description of Artificial Sequence: Synthetic oligonucleotide
  Sense strand starting at position 1425 of SEQ ID NO: 1887639
ggcaauguacuugggucau

SEQ ID NO: 2486227 - RNA, 19 nt, Artificial Sequence
  Description of Artificial Sequence: Synthetic oligonucleotide
  Antisense strand to SEQ ID NO: 2486226
augacccaaguacauugcc

SEQ ID NO: 2486228 - RNA, 19 nt, Artificial Sequence
  Description of Artificial Sequence: Synthetic oligonucleotide
  Sense strand starting at position 1454 of SEQ ID NO: 1887639
ucaguaacgccagacauga

SEQ ID NO: 2486229 - RNA, 19 nt, Artificial Sequence
  Description of Artificial Sequence: Synthetic oligonucleotide
  Antisense strand to SEQ ID NO: 2486228
ucaugucuggcguuacuga

SEQ ID NO: 2486230 - RNA, 19 nt, Artificial Sequence
  Description of Artificial Sequence: Synthetic oligonucleotide
  Sense strand starting at position 1492 of SEQ ID NO: 1887639
agcacuuguggguggcaga

SEQ ID NO: 2486231 - RNA, 19 nt, Artificial Sequence
  Description of Artificial Sequence: Synthetic oligonucleotide
  Antisense strand to SEQ ID NO: 2486230
ucugccacccacaagugcu

SEQ ID NO: 2486232 - RNA, 19 nt, Artificial Sequence
  Description of Artificial Sequence: Synthetic oligonucleotide
  Sense strand starting at position 1655 of SEQ ID NO: 1887639
augcaugcugccuaccaaa

SEQ ID NO: 2486233 - RNA, 19 nt, Artificial Sequence
  Description of Artificial Sequence: Synthetic oligonucleotide
  Antisense strand to SEQ ID NO: 2486232
uuugguaggcagcaugcau

SEQ ID NO: 2486234 - RNA, 19 nt, Artificial Sequence
  Description of Artificial Sequence: Synthetic oligonucleotide
  Sense strand starting at position 1847 of SEQ ID NO: 1887639
ccgggaacuccaggucaua

SEQ ID NO: 2486235 - RNA, 19 nt, Artificial Sequence
  Description of Artificial Sequence: Synthetic oligonucleotide
  Antisense strand to SEQ ID NO: 2486234
uaugaccuggaguucccgg

SEQ ID NO: 2486236 - RNA, 19 nt, Artificial Sequence
  Description of Artificial Sequence: Synthetic oligonucleotide
  Sense strand starting at position 1992 of SEQ ID NO: 1887639
ugaguaucccaguaugagc

SEQ ID NO: 2486237 - RNA, 19 nt, Artificial Sequence
  Description of Artificial Sequence: Synthetic oligonucleotide
  Antisense strand to SEQ ID NO: 2486236
gcucauacugggauacuca

SEQ ID NO: 2486238 - RNA, 19 nt, Artificial Sequence
  Description of Artificial Sequence: Synthetic oligonucleotide
  Sense strand starting at position 2024 of SEQ ID NO: 1887639
cugccaucacugugacuuu

SEQ ID NO: 2486239 - RNA, 19 nt, Artificial Sequence
  Description of Artificial Sequence: Synthetic oligonucleotide
  Antisense strand to SEQ ID NO: 2486238
aaagucacagugauggcag

SEQ ID NO: 2486240 - RNA, 19 nt, Artificial Sequence
  Description of Artificial Sequence: Synthetic oligonucleotide
  Sense strand starting at position 2035 of SEQ ID NO: 1887639
gugacuuucuugccuacaa

SEQ ID NO: 2486241 - RNA, 19 nt, Artificial Sequence
  Description of Artificial Sequence: Synthetic oligonucleotide
  Antisense strand to SEQ ID NO: 2486240
uuguaggcaagaaagucac

SEQ ID NO: 2486242 - RNA, 19 nt, Artificial Sequence
  Description of Artificial Sequence: Synthetic oligonucleotide
  Sense strand starting at position 2036 of SEQ ID NO: 1887639
ugacuuucuugccuacaag

SEQ ID NO: 2486243 - RNA, 19 nt, Artificial Sequence
  Description of Artificial Sequence: Synthetic oligonucleotide
  Antisense strand to SEQ ID NO: 2486242
cuuguaggcaagaaaguca

SEQ ID NO: 2486244 - RNA, 19 nt, Artificial Sequence
  Description of Artificial Sequence: Synthetic oligonucleotide
  Sense strand starting at position 2054 of SEQ ID NO: 1887639
gagguuggccuccaaucau

SEQ ID NO: 2486245 - RNA, 19 nt, Artificial Sequence
  Description of Artificial Sequence: Synthetic oligonucleotide
  Antisense strand to SEQ ID NO: 2486244
augauuggaggccaaccuc

SEQ ID NO: 2486246 - RNA, 19 nt, Artificial Sequence
  Description of Artificial Sequence: Synthetic oligonucleotide
  Sense strand starting at position 2094 of SEQ ID NO: 1887639
gcaauaaacuugcuugcua

SEQ ID NO: 2486247 - RNA, 19 nt, Artificial Sequence
  Description of Artificial Sequence: Synthetic oligonucleotide
  Antisense strand to SEQ ID NO: 2486246
uagcaagcaaguuuauugc

SEQ ID NO: 2486248 - RNA, 19 nt, Artificial Sequence
  Description of Artificial Sequence: Synthetic oligonucleotide
  Sense strand starting at position 2120 of SEQ ID NO: 1887639
agaggaaaguuacauauca

SEQ ID NO: 2486249 - RNA, 19 nt, Artificial Sequence
  Description of Artificial Sequence: Synthetic oligonucleotide
  Antisense strand to SEQ ID NO: 2486248
ugauauguaacuuuccucu

SEQ ID NO: 2486250 - RNA, 19 nt, Artificial Sequence
  Description of Artificial Sequence: Synthetic oligonucleotide
  Sense strand starting at position 2163 of SEQ ID NO: 1887639
auuccuuucuuugugcaua

SEQ ID NO: 2486251 - RNA, 19 nt, Artificial Sequence
  Description of Artificial Sequence: Synthetic oligonucleotide
  Antisense strand to SEQ ID NO: 2486250
uaugcacaaagaaaggaau

SEQ ID NO: 2486252 - RNA, 19 nt, Artificial Sequence
  Description of Artificial Sequence: Synthetic oligonucleotide
  Sense strand starting at position 2554 of SEQ ID NO: 1887639
cccagauucccuuaguugu

SEQ ID NO: 2486253 - RNA, 19 nt, Artificial Sequence
  Description of Artificial Sequence: Synthetic oligonucleotide
  Antisense strand to SEQ ID NO: 2486252
acaacuaagggaaucuggg

SEQ ID NO: 2486254 - RNA, 19 nt, Artificial Sequence
  Description of Artificial Sequence: Synthetic oligonucleotide
  Sense strand starting at position 2661 of SEQ ID NO: 1887639
acaguuuccggcugggaau

SEQ ID NO: 2486255 - RNA, 19 nt, Artificial Sequence
  Description of Artificial Sequence: Synthetic oligonucleotide
  Antisense strand to SEQ ID NO: 2486254
auucccagccggaaacugu

SEQ ID NO: 2486256 - RNA, 19 nt, Artificial Sequence
  Description of Artificial Sequence: Synthetic oligonucleotide
  Sense strand starting at position 2721 of SEQ ID NO: 1887639
cacggcauccguugauaug

SEQ ID NO: 2486257 - RNA, 19 nt, Artificial Sequence
  Description of Artificial Sequence: Synthetic oligonucleotide
  Antisense strand to SEQ ID NO: 2486256
cauaucaacggaugccgug

SEQ ID NO: 2486258 - RNA, 19 nt, Artificial Sequence
  Description of Artificial Sequence: Synthetic oligonucleotide
  Sense strand starting at position 2944 of SEQ ID NO: 1887639
cagguugagucuucucaag

SEQ ID NO: 2486259 - RNA, 19 nt, Artificial Sequence
  Description of Artificial Sequence: Synthetic oligonucleotide
  Antisense strand to SEQ ID NO: 2486258
cuugagaagacucaaccug

SEQ ID NO: 2486260 - RNA, 19 nt, Artificial Sequence
  Description of Artificial Sequence: Synthetic oligonucleotide
  Sense strand starting at position 2952 of SEQ ID NO: 1887639
gucuucucaagcgguaaca

SEQ ID NO: 2486261 - RNA, 19 nt, Artificial Sequence
  Description of Artificial Sequence: Synthetic oligonucleotide
  Antisense strand to SEQ ID NO: 2486260
uguuaccgcuugagaagac

SEQ ID NO: 2486262 - RNA, 19 nt, Artificial Sequence
  Description of Artificial Sequence: Synthetic oligonucleotide
  Sense strand starting at position 3111 of SEQ ID NO: 1887639
gagaguagcccuugaugag

SEQ ID NO: 2486263 - RNA, 19 nt, Artificial Sequence
  Description of Artificial Sequence: Synthetic oligonucleotide
  Antisense strand to SEQ ID NO: 2486262
cucaucaagggcuacucuc

SEQ ID NO: 2486264 - RNA, 19 nt, Artificial Sequence
  Description of Artificial Sequence: Synthetic oligonucleotide
  Sense strand starting at position 3187 of SEQ ID NO: 1887639
aggcuuuccacguauagau

SEQ ID NO: 2486265 - RNA, 19 nt, Artificial Sequence
  Description of Artificial Sequence: Synthetic oligonucleotide
  Antisense strand to SEQ ID NO: 2486264
aucuauacguggaaagccu

SEQ ID NO: 2486266 - RNA, 19 nt, Artificial Sequence
  Description of Artificial Sequence: Synthetic oligonucleotide
  Sense strand starting at position 3189 of SEQ ID NO: 1887639
gcuuuccacguauagauau

SEQ ID NO: 2486267 - RNA, 19 nt, Artificial Sequence
  Description of Artificial Sequence: Synthetic oligonucleotide
  Antisense strand to SEQ ID NO: 2486266
auaucuauacguggaaagc

SEQ ID NO: 2486268 - RNA, 19 nt, Artificial Sequence
  Description of Artificial Sequence: Synthetic oligonucleotide
  Sense strand starting at position 3252 of SEQ ID NO: 1887639
gacugaguacaaugcaagu

SEQ ID NO: 2486269 - RNA, 19 nt, Artificial Sequence
  Description of Artificial Sequence: Synthetic oligonucleotide
  Antisense strand to SEQ ID NO: 2486268
acuugcauuguacucaguc

SEQ ID NO: 2486270 - RNA, 19 nt, Artificial Sequence
  Description of Artificial Sequence: Synthetic oligonucleotide
  Sense strand starting at position 3298 of SEQ ID NO: 1887639
gggccuucguccuuaagac

SEQ ID NO: 2486271 - RNA, 19 nt, Artificial Sequence
  Description of Artificial Sequence: Synthetic oligonucleotide
  Antisense strand to SEQ ID NO: 2486270
gucuuaaggacgaaggccc

SEQ ID NO: 2486272 - RNA, 19 nt, Artificial Sequence
  Description of Artificial Sequence: Synthetic oligonucleotide
  Sense strand starting at position 3299 of SEQ ID NO: 1887639
ggccuucguccuuaagacu

SEQ ID NO: 2486273 - RNA, 19 nt, Artificial Sequence
  Description of Artificial Sequence: Synthetic oligonucleotide
  Antisense strand to SEQ ID NO: 2486272
agucuuaaggacgaaggcc

SEQ ID NO: 2486274 - RNA, 19 nt, Artificial Sequence
  Description of Artificial Sequence: Synthetic oligonucleotide
  Sense strand starting at position 3625 of SEQ ID NO: 1887639
gugagauccugacccuaaa

SEQ ID NO: 2486275 - RNA, 19 nt, Artificial Sequence
  Description of Artificial Sequence: Synthetic oligonucleotide
  Antisense strand to SEQ ID NO: 2486274
uuuagggucaggaucucac

SEQ ID NO: 2486276 - RNA, 19 nt, Artificial Sequence
  Description of Artificial Sequence: Synthetic oligonucleotide
  Sense strand starting at position 3693 of SEQ ID NO: 1887639
ggccaaugauacguccaca

SEQ ID NO: 2486277 - RNA, 19 nt, Artificial Sequence
  Description of Artificial Sequence: Synthetic oligonucleotide
  Antisense strand to SEQ ID NO: 2486276
uguggacguaucauuggcc

SEQ ID NO: 2486278 - RNA, 19 nt, Artificial Sequence
  Description of Artificial Sequence: Synthetic oligonucleotide
  Sense strand starting at position 3743 of SEQ ID NO: 1887639
ugcagcugcguucuuauau

SEQ ID NO: 2486279 - RNA, 19 nt, Artificial Sequence
  Description of Artificial Sequence: Synthetic oligonucleotide
  Antisense strand to SEQ ID NO: 2486278
auauaagaacgcagcugca

SEQ ID NO: 2486280 - RNA, 19 nt, Artificial Sequence
  Description of Artificial Sequence: Synthetic oligonucleotide
  Sense strand starting at position 3773 of SEQ ID NO: 1887639
ccacucaacuuugauagga

SEQ ID NO: 2486281 - RNA, 19 nt, Artificial Sequence
  Description of Artificial Sequence: Synthetic oligonucleotide
  Antisense strand to SEQ ID NO: 2486280
uccuaucaaaguugagugg

SEQ ID NO: 2486282 - RNA, 19 nt, Artificial Sequence
  Description of Artificial Sequence: Synthetic oligonucleotide
  Sense strand starting at position 3775 of SEQ ID NO: 1887639
acucaacuuugauaggauu

SEQ ID NO: 2486283 - RNA, 19 nt, Artificial Sequence
  Description of Artificial Sequence: Synthetic oligonucleotide
  Antisense strand to SEQ ID NO: 2486282
aauccuaucaaaguugagu

SEQ ID NO: 2486284 - RNA, 19 nt, Artificial Sequence
  Description of Artificial Sequence: Synthetic oligonucleotide
  Sense strand starting at position 3920 of SEQ ID NO: 1887639
gaaauuaggugaucccuau

SEQ ID NO: 2486285 - RNA, 19 nt, Artificial Sequence
  Description of Artificial Sequence: Synthetic oligonucleotide
  Antisense strand to SEQ ID NO: 2486284
auagggaucaccuaauuuc

SEQ ID NO: 2486286 - RNA, 19 nt, Artificial Sequence
  Description of Artificial Sequence: Synthetic oligonucleotide
  Sense strand starting at position 3924 of SEQ ID NO: 1887639
uuaggugaucccuauuacu

SEQ ID NO: 2486287 - RNA, 19 nt, Artificial Sequence
  Description of Artificial Sequence: Synthetic oligonucleotide
  Antisense strand to SEQ ID NO: 2486286
aguaauagggaucaccuaa

SEQ ID NO: 2486288 - RNA, 19 nt, Artificial Sequence
  Description of Artificial Sequence: Synthetic oligonucleotide
  Sense strand starting at position 3949 of SEQ ID NO: 1887639
gccaacauguauucguuau

SEQ ID NO: 2486289 - RNA, 19 nt, Artificial Sequence
  Description of Artificial Sequence: Synthetic oligonucleotide
  Antisense strand to SEQ ID NO: 2486288
auaacgaauacauguuggc

SEQ ID NO: 2486290 - RNA, 19 nt, Artificial Sequence
  Description of Artificial Sequence: Synthetic oligonucleotide
  Sense strand starting at position 697 of SEQ ID NO: 1887640
gcggccugcugucuguaau

SEQ ID NO: 2486291 - RNA, 19 nt, Artificial Sequence
  Description of Artificial Sequence: Synthetic oligonucleotide
  Antisense strand to SEQ ID NO: 2486290
auuacagacagcaggccgc

SEQ ID NO: 2486292 - RNA, 19 nt, Artificial Sequence
  Description of Artificial Sequence: Synthetic oligonucleotide
  Sense strand starting at position 698 of SEQ ID NO: 1887640
cggccugcugucuguaaua

SEQ ID NO: 2486293 - RNA, 19 nt, Artificial Sequence
  Description of Artificial Sequence: Synthetic oligonucleotide
  Antisense strand to SEQ ID NO: 2486292
uauuacagacagcaggccg

SEQ ID NO: 2486294 - RNA, 19 nt, Artificial Sequence
  Description of Artificial Sequence: Synthetic oligonucleotide
  Sense strand starting at position 700 of SEQ ID NO: 1887640
gccugcugucuguaauauu

SEQ ID NO: 2486295 - RNA, 19 nt, Artificial Sequence
  Description of Artificial Sequence: Synthetic oligonucleotide
  Antisense strand to SEQ ID NO: 2486294
aauauuacagacagcaggc

SEQ ID NO: 2486296 - RNA, 19 nt, Artificial Sequence
  Description of Artificial Sequence: Synthetic oligonucleotide
  Sense strand starting at position 1049 of SEQ ID NO: 1887640
gccuuaguguaguccgacu

SEQ ID NO: 2486297 - RNA, 19 nt, Artificial Sequence
  Description of Artificial Sequence: Synthetic oligonucleotide
  Antisense strand to SEQ ID NO: 2486296
agucggacuacacuaaggc

SEQ ID NO: 2486298 - RNA, 19 nt, Artificial Sequence
  Description of Artificial Sequence: Synthetic oligonucleotide
  Sense strand starting at position 1157 of SEQ ID NO: 1887640
ugguaguagugugaguagu

SEQ ID NO: 2486299 - RNA, 19 nt, Artificial Sequence
  Description of Artificial Sequence: Synthetic oligonucleotide
  Antisense strand to SEQ ID NO: 2486298
acuacucacacuacuacca

SEQ ID NO: 2486300 - RNA, 19 nt, Artificial Sequence
  Description of Artificial Sequence: Synthetic oligonucleotide
  Sense strand starting at position 1158 of SEQ ID NO: 1887640
gguaguagugugaguagua

SEQ ID NO: 2486301 - RNA, 19 nt, Artificial Sequence
  Description of Artificial Sequence: Synthetic oligonucleotide
  Antisense strand to SEQ ID NO: 2486300
uacuacucacacuacuacc

SEQ ID NO: 2486302 - RNA, 19 nt, Artificial Sequence
  Description of Artificial Sequence: Synthetic oligonucleotide
  Sense strand starting at position 1159 of SEQ ID NO: 1887640
guaguagugugaguaguag

SEQ ID NO: 2486303 - RNA, 19 nt, Artificial Sequence
  Description of Artificial Sequence: Synthetic oligonucleotide
  Antisense strand to SEQ ID NO: 2486302
cuacuacucacacuacuac

SEQ ID NO: 2486304 - RNA, 19 nt, Artificial Sequence
  Description of Artificial Sequence: Synthetic oligonucleotide
  Sense strand starting at position 1215 of SEQ ID NO: 1887640
cugcuuugccugcaggaga

SEQ ID NO: 2486305 - RNA, 19 nt, Artificial Sequence
  Description of Artificial Sequence: Synthetic oligonucleotide
  Antisense strand to SEQ ID NO: 2486304
ucuccugcaggcaaagcag

SEQ ID NO: 2486306 - RNA, 19 nt, Artificial Sequence
  Description of Artificial Sequence: Synthetic oligonucleotide
  Sense strand starting at position 1229 of SEQ ID NO: 1887640
ggagauaccucgggugaga

SEQ ID NO: 2486307 - RNA, 19 nt, Artificial Sequence
  Description of Artificial Sequence: Synthetic oligonucleotide
  Antisense strand to SEQ ID NO: 2486306
ucucacccgagguaucucc

SEQ ID NO: 2486308 - RNA, 19 nt, Artificial Sequence
  Description of Artificial Sequence: Synthetic oligonucleotide
  Sense strand starting at position 1289 of SEQ ID NO: 1887640
ucacuuacuugggucauga

SEQ ID NO: 2486309 - RNA, 19 nt, Artificial Sequence
  Description of Artificial Sequence: Synthetic oligonucleotide
  Antisense strand to SEQ ID NO: 2486308
ucaugacccaaguaaguga

SEQ ID NO: 2486310 - RNA, 19 nt, Artificial Sequence
  Description of Artificial Sequence: Synthetic oligonucleotide
  Sense strand starting at position 1572 of SEQ ID NO: 1887640
gaaagaagccgcgaaacuu

SEQ ID NO: 2486311 - RNA, 19 nt, Artificial Sequence
  Description of Artificial Sequence: Synthetic oligonucleotide
  Antisense strand to SEQ ID NO: 2486310
aaguuucgcggcuucuuuc

SEQ ID NO: 2486312 - RNA, 19 nt, Artificial Sequence
  Description of Artificial Sequence: Synthetic oligonucleotide
  Sense strand starting at position 1649 of SEQ ID NO: 1887640
uguugaugguauccacaaa

SEQ ID NO: 2486313 - RNA, 19 nt, Artificial Sequence
  Description of Artificial Sequence: Synthetic oligonucleotide
  Antisense strand to SEQ ID NO: 2486312
uuuguggauaccaucaaca

SEQ ID NO: 2486314 - RNA, 19 nt, Artificial Sequence
  Description of Artificial Sequence: Synthetic oligonucleotide
  Sense strand starting at position 1812 of SEQ ID NO: 1887640
gguugaagggcccaggauu

SEQ ID NO: 2486315 - RNA, 19 nt, Artificial Sequence
  Description of Artificial Sequence: Synthetic oligonucleotide
  Antisense strand to SEQ ID NO: 2486314
aauccugggcccuucaacc

SEQ ID NO: 2486316 - RNA, 19 nt, Artificial Sequence
  Description of Artificial Sequence: Synthetic oligonucleotide
  Sense strand starting at position 1908 of SEQ ID NO: 1887640
gagaguaaccaagguaagu

SEQ ID NO: 2486317 - RNA, 19 nt, Artificial Sequence
  Description of Artificial Sequence: Synthetic oligonucleotide
  Antisense strand to SEQ ID NO: 2486316
acuuaccuugguuacucuc

SEQ ID NO: 2486318 - RNA, 19 nt, Artificial Sequence
  Description of Artificial Sequence: Synthetic oligonucleotide
  Sense strand starting at position 1999 of SEQ ID NO: 1887640
gcugcuuggcguggucaau

SEQ ID NO: 2486319 - RNA, 19 nt, Artificial Sequence
  Description of Artificial Sequence: Synthetic oligonucleotide
  Antisense strand to SEQ ID NO: 2486318
auugaccacgccaagcagc

SEQ ID NO: 2486320 - RNA, 19 nt, Artificial Sequence
  Description of Artificial Sequence: Synthetic oligonucleotide
  Sense strand starting at position 2081 of SEQ ID NO: 1887640
ccgggagaucucuacgaag

SEQ ID NO: 2486321 - RNA, 19 nt, Artificial Sequence
  Description of Artificial Sequence: Synthetic oligonucleotide
  Antisense strand to SEQ ID NO: 2486320
cuucguagagaucucccgg

SEQ ID NO: 2486322 - RNA, 19 nt, Artificial Sequence
  Description of Artificial Sequence: Synthetic oligonucleotide
  Sense strand starting at position 2084 of SEQ ID NO: 1887640
ggagaucucuacgaaggcu

SEQ ID NO: 2486323 - RNA, 19 nt, Artificial Sequence
  Description of Artificial Sequence: Synthetic oligonucleotide
  Antisense strand to SEQ ID NO: 2486322
agccuucguagagaucucc

SEQ ID NO: 2486324 - RNA, 19 nt, Artificial Sequence
  Description of Artificial Sequence: Synthetic oligonucleotide
  Sense strand starting at position 2172 of SEQ ID NO: 1887640
agugauggcccagggaaga

SEQ ID NO: 2486325 - RNA, 19 nt, Artificial Sequence
  Description of Artificial Sequence: Synthetic oligonucleotide
  Antisense strand to SEQ ID NO: 2486324
ucuucccugggccaucacu

SEQ ID NO: 2486326 - RNA, 19 nt, Artificial Sequence
  Description of Artificial Sequence: Synthetic oligonucleotide
  Sense strand starting at position 2486 of SEQ ID NO: 1887640
uggaggaggucguugauga

SEQ ID NO: 2486327 - RNA, 19 nt, Artificial Sequence
  Description of Artificial Sequence: Synthetic oligonucleotide
  Antisense strand to SEQ ID NO: 2486326
ucaucaacgaccuccucca

SEQ ID NO: 2486328 - RNA, 19 nt, Artificial Sequence
  Description of Artificial Sequence: Synthetic oligonucleotide
  Sense strand starting at position 2487 of SEQ ID NO: 1887640
ggaggaggucguugaugau

SEQ ID NO: 2486329 - RNA, 19 nt, Artificial Sequence
  Description of Artificial Sequence: Synthetic oligonucleotide
  Antisense strand to SEQ ID NO: 2486328
aucaucaacgaccuccucc

SEQ ID NO: 2486330 - RNA, 19 nt, Artificial Sequence
  Description of Artificial Sequence: Synthetic oligonucleotide
  Sense strand starting at position 2736 of SEQ ID NO: 1887640
ggcccacauucccagagaa

SEQ ID NO: 2486331 - RNA, 19 nt, Artificial Sequence
  Description of Artificial Sequence: Synthetic oligonucleotide
  Antisense strand to SEQ ID NO: 2486330
uucucugggaaugugggcc

SEQ ID NO: 2486332 - RNA, 19 nt, Artificial Sequence
  Description of Artificial Sequence: Synthetic oligonucleotide
  Sense strand starting at position 2924 of SEQ ID NO: 1887640
gguggagugcccugaucca

SEQ ID NO: 2486333 - RNA, 19 nt, Artificial Sequence
  Description of Artificial Sequence: Synthetic oligonucleotide
  Antisense strand to SEQ ID NO: 2486332
uggaucagggcacuccacc

SEQ ID NO: 2486334 - RNA, 19 nt, Artificial Sequence
  Description of Artificial Sequence: Synthetic oligonucleotide
  Sense strand starting at position 2971 of SEQ ID NO: 1887640
caggauaggcuccaucgua

SEQ ID NO: 2486335 - RNA, 19 nt, Artificial Sequence
  Description of Artificial Sequence: Synthetic oligonucleotide
  Antisense strand to SEQ ID NO: 2486334
uacgauggagccuauccug

SEQ ID NO: 2486336 - RNA, 19 nt, Artificial Sequence
  Description of Artificial Sequence: Synthetic oligonucleotide
  Sense strand starting at position 3042 of SEQ ID NO: 1887640
guggaaagcccucaugugu

SEQ ID NO: 2486337 - RNA, 19 nt, Artificial Sequence
  Description of Artificial Sequence: Synthetic oligonucleotide
  Antisense strand to SEQ ID NO: 2486336
acacaugagggcuuuccac

SEQ ID NO: 2486338 - RNA, 19 nt, Artificial Sequence
  Description of Artificial Sequence: Synthetic oligonucleotide
  Sense strand starting at position 3057 of SEQ ID NO: 1887640
gugucugucccagagaaga

SEQ ID NO: 2486339 - RNA, 19 nt, Artificial Sequence
  Description of Artificial Sequence: Synthetic oligonucleotide
  Antisense strand to SEQ ID NO: 2486338
ucuucucugggacagacac

SEQ ID NO: 2486340 - RNA, 19 nt, Artificial Sequence
  Description of Artificial Sequence: Synthetic oligonucleotide
  Sense strand starting at position 3090 of SEQ ID NO: 1887640
uguucugacggcuggacua

SEQ ID NO: 2486341 - RNA, 19 nt, Artificial Sequence
  Description of Artificial Sequence: Synthetic oligonucleotide
  Antisense strand to SEQ ID NO: 2486340
uaguccagccgucagaaca

SEQ ID NO: 2486342 - RNA, 19 nt, Artificial Sequence
  Description of Artificial Sequence: Synthetic oligonucleotide
  Sense strand starting at position 3261 of SEQ ID NO: 1887640
ucuggaucuucuugaucau

SEQ ID NO: 2486343 - RNA, 19 nt, Artificial Sequence
  Description of Artificial Sequence: Synthetic oligonucleotide
  Antisense strand to SEQ ID NO: 2486342
augaucaagaagauccaga

SEQ ID NO: 2486344 - RNA, 19 nt, Artificial Sequence
  Description of Artificial Sequence: Synthetic oligonucleotide
  Sense strand starting at position 3469 of SEQ ID NO: 1887640
caucgaugccuccgccaau

SEQ ID NO: 2486345 - RNA, 19 nt, Artificial Sequence
  Description of Artificial Sequence: Synthetic oligonucleotide
  Antisense strand to SEQ ID NO: 2486344
auuggcggaggcaucgaug

SEQ ID NO: 2486346 - RNA, 19 nt, Artificial Sequence
  Description of Artificial Sequence: Synthetic oligonucleotide
  Sense strand starting at position 3486 of SEQ ID NO: 1887640
auccgagauccguacucau

SEQ ID NO: 2486347 - RNA, 19 nt, Artificial Sequence
  Description of Artificial Sequence: Synthetic oligonucleotide
  Antisense strand to SEQ ID NO: 2486346
augaguacggaucucggau

SEQ ID NO: 2486348 - RNA, 19 nt, Artificial Sequence
  Description of Artificial Sequence: Synthetic oligonucleotide
  Sense strand starting at position 3526 of SEQ ID NO: 1887640
ggucacguucccggaggau

SEQ ID NO: 2486349 - RNA, 19 nt, Artificial Sequence
  Description of Artificial Sequence: Synthetic oligonucleotide
  Antisense strand to SEQ ID NO: 2486348
auccuccgggaacgugacc

SEQ ID NO: 2486350 - RNA, 19 nt, Artificial Sequence
  Description of Artificial Sequence: Synthetic oligonucleotide
  Sense strand starting at position 3842 of SEQ ID NO: 1887640
gcaagccucuugguguuau

SEQ ID NO: 2486351 - RNA, 19 nt, Artificial Sequence
  Description of Artificial Sequence: Synthetic oligonucleotide
  Antisense strand to SEQ ID NO: 2486350
auaacaccaagaggcuugc

SEQ ID NO: 2486352 - RNA, 19 nt, Artificial Sequence
  Description of Artificial Sequence: Synthetic oligonucleotide
  Sense strand starting at position 3852 of SEQ ID NO: 1887640
ugguguuaugaccgacugu

SEQ ID NO: 2486353 - RNA, 19 nt, Artificial Sequence
  Description of Artificial Sequence: Synthetic oligonucleotide
  Antisense strand to SEQ ID NO: 2486352
acagucggucauaacacca

SEQ ID NO: 2486354 - RNA, 19 nt, Artificial Sequence
  Description of Artificial Sequence: Synthetic oligonucleotide
  Sense strand starting at position 3853 of SEQ ID NO: 1887640
gguguuaugaccgacuguu

SEQ ID NO: 2486355 - RNA, 19 nt, Artificial Sequence
  Description of Artificial Sequence: Synthetic oligonucleotide
  Antisense strand to SEQ ID NO: 2486354
aacagucggucauaacacc

SEQ ID NO: 2486356 - RNA, 19 nt, Artificial Sequence
  Description of Artificial Sequence: Synthetic oligonucleotide
  Sense strand starting at position 3873 of SEQ ID NO: 1887640
acauaucucucuggcggaa

SEQ ID NO: 2486357 - RNA, 19 nt, Artificial Sequence
  Description of Artificial Sequence: Synthetic oligonucleotide
  Antisense strand to SEQ ID NO: 2486356
uuccgccagagagauaugu

SEQ ID NO: 2486358 - RNA, 19 nt, Artificial Sequence
  Description of Artificial Sequence: Synthetic oligonucleotide
  Sense strand starting at position 3970 of SEQ ID NO: 1887640
accugcacuuuguaaggau

SEQ ID NO: 2486359 - RNA, 19 nt, Artificial Sequence
  Description of Artificial Sequence: Synthetic oligonucleotide
  Antisense strand to SEQ ID NO: 2486358
auccuuacaaagugcaggu

SEQ ID NO: 2486360 - RNA, 19 nt, Artificial Sequence
  Description of Artificial Sequence: Synthetic oligonucleotide
  Sense strand starting at position 353 of SEQ ID NO: 1887641
ccgcgacucuggcgaaaua

SEQ ID NO: 2486361 - RNA, 19 nt, Artificial Sequence
  Description of Artificial Sequence: Synthetic oligonucleotide
  Antisense strand to SEQ ID NO: 2486360
uauuucgccagagucgcgg

SEQ ID NO: 2486362 - RNA, 19 nt, Artificial Sequence
  Description of Artificial Sequence: Synthetic oligonucleotide
  Sense strand starting at position 354 of SEQ ID NO: 1887641
cgcgacucuggcgaaauaa

SEQ ID NO: 2486363 - RNA, 19 nt, Artificial Sequence
  Description of Artificial Sequence: Synthetic oligonucleotide
  Antisense strand to SEQ ID NO: 2486362
uuauuucgccagagucgcg

SEQ ID NO: 2486364 - RNA, 19 nt, Artificial Sequence
  Description of Artificial Sequence: Synthetic oligonucleotide
  Sense strand starting at position 391 of SEQ ID NO: 1887641
agagucaccugcuccuuua

SEQ ID NO: 2486365 - RNA, 19 nt, Artificial Sequence
  Description of Artificial Sequence: Synthetic oligonucleotide
  Antisense strand to SEQ ID NO: 2486364
uaaaggagcaggugacucu

SEQ ID NO: 2486366 - RNA, 19 nt, Artificial Sequence
  Description of Artificial Sequence: Synthetic oligonucleotide
  Sense strand starting at position 1549 of SEQ ID NO: 1887641
ccgcaauuggaggaguuga

SEQ ID NO: 2486367 - RNA, 19 nt, Artificial Sequence
  Description of Artificial Sequence: Synthetic oligonucleotide
  Antisense strand to SEQ ID NO: 2486366
ucaacuccuccaauugcgg

SEQ ID NO: 2486368 - RNA, 19 nt, Artificial Sequence
  Description of Artificial Sequence: Synthetic oligonucleotide
  Sense strand starting at position 2077 of SEQ ID NO: 1887641
cgcuguucucaguacugca

SEQ ID NO: 2486369 - RNA, 19 nt, Artificial Sequence
  Description of Artificial Sequence: Synthetic oligonucleotide
  Antisense strand to SEQ ID NO: 2486368
ugcaguacugagaacagcg

SEQ ID NO: 2486370 - RNA, 19 nt, Artificial Sequence
  Description of Artificial Sequence: Synthetic oligonucleotide
  Sense strand starting at position 2353 of SEQ ID NO: 1887641
ccgggaaucuuugggaucu

SEQ ID NO: 2486371 - RNA, 19 nt, Artificial Sequence
  Description of Artificial Sequence: Synthetic oligonucleotide
  Antisense strand to SEQ ID NO: 2486370
agaucccaaagauucccgg

SEQ ID NO: 2486372 - RNA, 19 nt, Artificial Sequence
  Description of Artificial Sequence: Synthetic oligonucleotide
  Sense strand starting at position 2354 of SEQ ID NO: 1887641
cgggaaucuuugggaucug

SEQ ID NO: 2486373 - RNA, 19 nt, Artificial Sequence
  Description of Artificial Sequence: Synthetic oligonucleotide
  Antisense strand to SEQ ID NO: 2486372
cagaucccaaagauucccg

SEQ ID NO: 2486374 - RNA, 19 nt, Artificial Sequence
  Description of Artificial Sequence: Synthetic oligonucleotide
  Sense strand starting at position 2355 of SEQ ID NO: 1887641
gggaaucuuugggaucugu

SEQ ID NO: 2486375 - RNA, 19 nt, Artificial Sequence
  Description of Artificial Sequence: Synthetic oligonucleotide
  Antisense strand to SEQ ID NO: 2486374
acagaucccaaagauuccc

SEQ ID NO: 2486376 - RNA, 19 nt, Artificial Sequence
  Description of Artificial Sequence: Synthetic oligonucleotide
  Sense strand starting at position 3734 of SEQ ID NO: 1887641
caaggauaucguggagucu

SEQ ID NO: 2486377 - RNA, 19 nt, Artificial Sequence
  Description of Artificial Sequence: Synthetic oligonucleotide
  Antisense strand to SEQ ID NO: 2486376
agacuccacgauauccuug

SEQ ID NO: 2486378 - RNA, 19 nt, Artificial Sequence
  Description of Artificial Sequence: Synthetic oligonucleotide
  Sense strand starting at position 1 of SEQ ID NO: 1887642
ugucgaacugcugguuaca

SEQ ID NO: 2486379 - RNA, 19 nt, Artificial Sequence
  Description of Artificial Sequence: Synthetic oligonucleotide
  Antisense strand to SEQ ID NO: 2486378
uguaaccagcaguucgaca

SEQ ID NO: 2486380 - RNA, 19 nt, Artificial Sequence
  Description of Artificial Sequence: Synthetic oligonucleotide
  Sense strand starting at position 56 of SEQ ID NO: 1887642
cacaucauucgaugaaggu

SEQ ID NO: 2486381 - RNA, 19 nt, Artificial Sequence
  Description of Artificial Sequence: Synthetic oligonucleotide
  Antisense strand to SEQ ID NO: 2486380
accuucaucgaaugaugug

SEQ ID NO: 2486382 - RNA, 19 nt, Artificial Sequence
  Description of Artificial Sequence: Synthetic oligonucleotide
  Sense strand starting at position 71 of SEQ ID NO: 1887642
agguguaguguccaucauu

SEQ ID NO: 2486383 - RNA, 19 nt, Artificial Sequence
  Description of Artificial Sequence: Synthetic oligonucleotide
  Antisense strand to SEQ ID NO: 2486382
aaugauggacacuacaccu

SEQ ID NO: 2486384 - RNA, 19 nt, Artificial Sequence
  Description of Artificial Sequence: Synthetic oligonucleotide
  Sense strand starting at position 269 of SEQ ID NO: 1887642
cugaauucuggagguccua

SEQ ID NO: 2486385 - RNA, 19 nt, Artificial Sequence
  Description of Artificial Sequence: Synthetic oligonucleotide
  Antisense strand to SEQ ID NO: 2486384
uaggaccuccagaauucag

SEQ ID NO: 2486386 - RNA, 19 nt, Artificial Sequence
  Description of Artificial Sequence: Synthetic oligonucleotide
  Sense strand starting at position 353 of SEQ ID NO: 1887642
gcaguaggauugcuugaau

SEQ ID NO: 2486387 - RNA, 19 nt, Artificial Sequence
  Description of Artificial Sequence: Synthetic oligonucleotide
  Antisense strand to SEQ ID NO: 2486386
auucaagcaauccuacugc

SEQ ID NO: 2486388 - RNA, 19 nt, Artificial Sequence
  Description of Artificial Sequence: Synthetic oligonucleotide
  Sense strand starting at position 356 of SEQ ID NO: 1887642
guaggauugcuugaaugca

SEQ ID NO: 2486389 - RNA, 19 nt, Artificial Sequence
  Description of Artificial Sequence: Synthetic oligonucleotide
  Antisense strand to SEQ ID NO: 2486388
ugcauucaagcaauccuac

SEQ ID NO: 2486390 - RNA, 19 nt, Artificial Sequence
  Description of Artificial Sequence: Synthetic oligonucleotide
  Sense strand starting at position 501 of SEQ ID NO: 1887642
gcucccgugagcuaugauu

SEQ ID NO: 2486391 - RNA, 19 nt, Artificial Sequence
  Description of Artificial Sequence: Synthetic oligonucleotide
  Antisense strand to SEQ ID NO: 2486390
aaucauagcucacgggagc

SEQ ID NO: 2486392 - RNA, 19 nt, Artificial Sequence
  Description of Artificial Sequence: Synthetic oligonucleotide
  Sense strand starting at position 503 of SEQ ID NO: 1887642
ucccgugagcuaugauuga

SEQ ID NO: 2486393 - RNA, 19 nt, Artificial Sequence
  Description of Artificial Sequence: Synthetic oligonucleotide
  Antisense strand to SEQ ID NO: 2486392
ucaaucauagcucacggga

SEQ ID NO: 2486394 - RNA, 19 nt, Artificial Sequence
  Description of Artificial Sequence: Synthetic oligonucleotide
  Sense strand starting at position 614 of SEQ ID NO: 1887642
cgcacuuaguaggaauuua

SEQ ID NO: 2486395 - RNA, 19 nt, Artificial Sequence
  Description of Artificial Sequence: Synthetic oligonucleotide
  Antisense strand to SEQ ID NO: 2486394
uaaauuccuacuaagugcg

SEQ ID NO: 2486396 - RNA, 19 nt, Artificial Sequence
  Description of Artificial Sequence: Synthetic oligonucleotide
  Sense strand starting at position 666 of SEQ ID NO: 1887642
ccuauuugcugcguugaca

SEQ ID NO: 2486397 - RNA, 19 nt, Artificial Sequence
  Description of Artificial Sequence: Synthetic oligonucleotide
  Antisense strand to SEQ ID NO: 2486396
ugucaacgcagcaaauagg

SEQ ID NO: 2486398 - RNA, 19 nt, Artificial Sequence
  Description of Artificial Sequence: Synthetic oligonucleotide
  Sense strand starting at position 702 of SEQ ID NO: 1887642
aggcucuuuguugagucaa

SEQ ID NO: 2486399 - RNA, 19 nt, Artificial Sequence
  Description of Artificial Sequence: Synthetic oligonucleotide
  Antisense strand to SEQ ID NO: 2486398
uugacucaacaaagagccu

SEQ ID NO: 2486400 - RNA, 19 nt, Artificial Sequence
  Description of Artificial Sequence: Synthetic oligonucleotide
  Sense strand starting at position 704 of SEQ ID NO: 1887642
gcucuuuguugagucaaua

SEQ ID NO: 2486401 - RNA, 19 nt, Artificial Sequence
  Description of Artificial Sequence: Synthetic oligonucleotide
  Antisense strand to SEQ ID NO: 2486400
uauugacucaacaaagagc

SEQ ID NO: 2486402 - RNA, 19 nt, Artificial Sequence
  Description of Artificial Sequence: Synthetic oligonucleotide
  Sense strand starting at position 981 of SEQ ID NO: 1887642
gccggucacaucuggaauu

SEQ ID NO: 2486403 - RNA, 19 nt, Artificial Sequence
  Description of Artificial Sequence: Synthetic oligonucleotide
  Antisense strand to SEQ ID NO: 2486402
aauuccagaugugaccggc

SEQ ID NO: 2486404 - RNA, 19 nt, Artificial Sequence
  Description of Artificial Sequence: Synthetic oligonucleotide
  Sense strand starting at position 1353 of SEQ ID NO: 1887642
gugcgcccucuccaagaau

SEQ ID NO: 2486405 - RNA, 19 nt, Artificial Sequence
  Description of Artificial Sequence: Synthetic oligonucleotide
  Antisense strand to SEQ ID NO: 2486404
auucuuggagagggcgcac

SEQ ID NO: 2486406 - RNA, 19 nt, Artificial Sequence
  Description of Artificial Sequence: Synthetic oligonucleotide
  Sense strand starting at position 1458 of SEQ ID NO: 1887642
ggcugaauccgagcgcuuu

SEQ ID NO: 2486407 - RNA, 19 nt, Artificial Sequence
  Description of Artificial Sequence: Synthetic oligonucleotide
  Antisense strand to SEQ ID NO: 2486406
aaagcgcucggauucagcc

SEQ ID NO: 2486408 - RNA, 19 nt, Artificial Sequence
  Description of Artificial Sequence: Synthetic oligonucleotide
  Sense strand starting at position 1911 of SEQ ID NO: 1887642
ugucucuguccuugucaga

SEQ ID NO: 2486409 - RNA, 19 nt, Artificial Sequence
  Description of Artificial Sequence: Synthetic oligonucleotide
  Antisense strand to SEQ ID NO: 2486408
ucugacaaggacagagaca

SEQ ID NO: 2486410 - RNA, 19 nt, Artificial Sequence
  Description of Artificial Sequence: Synthetic oligonucleotide
  Sense strand starting at position 2269 of SEQ ID NO: 1887642
ugggcuuugccugguugau

SEQ ID NO: 2486411 - RNA, 19 nt, Artificial Sequence
  Description of Artificial Sequence: Synthetic oligonucleotide
  Antisense strand to SEQ ID NO: 2486410
aucaaccaggcaaagccca

SEQ ID NO: 2486412 - RNA, 19 nt, Artificial Sequence
  Description of Artificial Sequence: Synthetic oligonucleotide
  Sense strand starting at position 2562 of SEQ ID NO: 1887642
auaucaugauaguuuccca

SEQ ID NO: 2486413 - RNA, 19 nt, Artificial Sequence
  Description of Artificial Sequence: Synthetic oligonucleotide
  Antisense strand to SEQ ID NO: 2486412
ugggaaacuaucaugauau

SEQ ID NO: 2486414 - RNA, 19 nt, Artificial Sequence
  Description of Artificial Sequence: Synthetic oligonucleotide
  Sense strand starting at position 2565 of SEQ ID NO: 1887642
ucaugauaguuucccauag

SEQ ID NO: 2486415 - RNA, 19 nt, Artificial Sequence
  Description of Artificial Sequence: Synthetic oligonucleotide
  Antisense strand to SEQ ID NO: 2486414
cuaugggaaacuaucauga

SEQ ID NO: 2486416 - RNA, 19 nt, Artificial Sequence
  Description of Artificial Sequence: Synthetic oligonucleotide
  Sense strand starting at position 2588 of SEQ ID NO: 1887642
aagcgcugugcagauaaua

SEQ ID NO: 2486417 - RNA, 19 nt, Artificial Sequence
  Description of Artificial Sequence: Synthetic oligonucleotide
  Antisense strand to SEQ ID NO: 2486416
uauuaucugcacagcgcuu

SEQ ID NO: 2486418 - RNA, 19 nt, Artificial Sequence
  Description of Artificial Sequence: Synthetic oligonucleotide
  Sense strand starting at position 2607 of SEQ ID NO: 1887642
aaacgagauucugugauua

SEQ ID NO: 2486419 - RNA, 19 nt, Artificial Sequence
  Description of Artificial Sequence: Synthetic oligonucleotide
  Antisense strand to SEQ ID NO: 2486418
uaaucacagaaucucguuu

SEQ ID NO: 2486420 - RNA, 19 nt, Artificial Sequence
  Description of Artificial Sequence: Synthetic oligonucleotide
  Sense strand starting at position 2609 of SEQ ID NO: 1887642
acgagauucugugauuaga

SEQ ID NO: 2486421 - RNA, 19 nt, Artificial Sequence
  Description of Artificial Sequence: Synthetic oligonucleotide
  Antisense strand to SEQ ID NO: 2486420
ucuaaucacagaaucucgu

SEQ ID NO: 2486422 - RNA, 19 nt, Artificial Sequence
  Description of Artificial Sequence: Synthetic oligonucleotide
  Sense strand starting at position 2633 of SEQ ID NO: 1887642
cuuggagauggcugcuauu

SEQ ID NO: 2486423 - RNA, 19 nt, Artificial Sequence
  Description of Artificial Sequence: Synthetic oligonucleotide
  Antisense strand to SEQ ID NO: 2486422
aauagcagccaucuccaag

SEQ ID NO: 2486424 - RNA, 19 nt, Artificial Sequence
  Description of Artificial Sequence: Synthetic oligonucleotide
  Sense strand starting at position 2698 of SEQ ID NO: 1887642
auagaaaggucacuuucua

SEQ ID NO: 2486425 - RNA, 19 nt, Artificial Sequence
  Description of Artificial Sequence: Synthetic oligonucleotide
  Antisense strand to SEQ ID NO: 2486424
uagaaagugaccuuucuau

SEQ ID NO: 2486426 - RNA, 19 nt, Artificial Sequence
  Description of Artificial Sequence: Synthetic oligonucleotide
  Sense strand starting at position 2705 of SEQ ID NO: 1887642
ggucacuuucuauaaggua

SEQ ID NO: 2486427 - RNA, 19 nt, Artificial Sequence
  Description of Artificial Sequence: Synthetic oligonucleotide
  Antisense strand to SEQ ID NO: 2486426
uaccuuauagaaagugacc

SEQ ID NO: 2486428 - RNA, 19 nt, Artificial Sequence
  Description of Artificial Sequence: Synthetic oligonucleotide
  Sense strand starting at position 2867 of SEQ ID NO: 1887642
uaggcuuaggcaggugaau

SEQ ID NO: 2486429 - RNA, 19 nt, Artificial Sequence
  Description of Artificial Sequence: Synthetic oligonucleotide
  Antisense strand to SEQ ID NO: 2486428
auucaccugccuaagccua

SEQ ID NO: 2486430 - RNA, 19 nt, Artificial Sequence
  Description of Artificial Sequence: Synthetic oligonucleotide
  Sense strand starting at position 3162 of SEQ ID NO: 1887642
ggguaaaggcuuggaggua

SEQ ID NO: 2486431 - RNA, 19 nt, Artificial Sequence
  Description of Artificial Sequence: Synthetic oligonucleotide
  Antisense strand to SEQ ID NO: 2486430
uaccuccaagccuuuaccc

SEQ ID NO: 2486432 - RNA, 19 nt, Artificial Sequence
  Description of Artificial Sequence: Synthetic oligonucleotide
  Sense strand starting at position 3203 of SEQ ID NO: 1887642
gguuuagugugguuggagu

SEQ ID NO: 2486433 - RNA, 19 nt, Artificial Sequence
  Description of Artificial Sequence: Synthetic oligonucleotide
  Antisense strand to SEQ ID NO: 2486432
acuccaaccacacuaaacc

SEQ ID NO: 2486434 - RNA, 19 nt, Artificial Sequence
  Description of Artificial Sequence: Synthetic oligonucleotide
  Sense strand starting at position 3207 of SEQ ID NO: 1887642
uagugugguuggaguggaa

SEQ ID NO: 2486435 - RNA, 19 nt, Artificial Sequence
  Description of Artificial Sequence: Synthetic oligonucleotide
  Antisense strand to SEQ ID NO: 2486434
uuccacuccaaccacacua

SEQ ID NO: 2486436 - RNA, 19 nt, Artificial Sequence
  Description of Artificial Sequence: Synthetic oligonucleotide
  Sense strand starting at position 3317 of SEQ ID NO: 1887642
gugacauggaguuacaagu

SEQ ID NO: 2486437 - RNA, 19 nt, Artificial Sequence
  Description of Artificial Sequence: Synthetic oligonucleotide
  Antisense strand to SEQ ID NO: 2486436
acuuguaacuccaugucac

SEQ ID NO: 2486438 - RNA, 19 nt, Artificial Sequence
  Description of Artificial Sequence: Synthetic oligonucleotide
  Sense strand starting at position 3550 of SEQ ID NO: 1887642
gacaaacagucgucugagu

SEQ ID NO: 2486439 - RNA, 19 nt, Artificial Sequence
  Description of Artificial Sequence: Synthetic oligonucleotide
  Antisense strand to SEQ ID NO: 2486438
acucagacgacuguuuguc

SEQ ID NO: 2486440 - RNA, 19 nt, Artificial Sequence
  Description of Artificial Sequence: Synthetic oligonucleotide
  Sense strand starting at position 3552 of SEQ ID NO: 1887642
caaacagucgucugagucu

SEQ ID NO: 2486441 - RNA, 19 nt, Artificial Sequence
  Description of Artificial Sequence: Synthetic oligonucleotide
  Antisense strand to SEQ ID NO: 2486440
agacucagacgacuguuug

SEQ ID NO: 2486442 - RNA, 19 nt, Artificial Sequence
  Description of Artificial Sequence: Synthetic oligonucleotide
  Sense strand starting at position 3561 of SEQ ID NO: 1887642
gucugagucuaucucucuu

SEQ ID NO: 2486443 - RNA, 19 nt, Artificial Sequence
  Description of Artificial Sequence: Synthetic oligonucleotide
  Antisense strand to SEQ ID NO: 2486442
aagagagauagacucagac

SEQ ID NO: 2486444 - RNA, 19 nt, Artificial Sequence
  Description of Artificial Sequence: Synthetic oligonucleotide
  Sense strand starting at position 3714 of SEQ ID NO: 1887642
ggcucuguguccuucucaa

SEQ ID NO: 2486445 - RNA, 19 nt, Artificial Sequence
  Description of Artificial Sequence: Synthetic oligonucleotide
  Antisense strand to SEQ ID NO: 2486444
uugagaaggacacagagcc

SEQ ID NO: 2486446 - RNA, 19 nt, Artificial Sequence
  Description of Artificial Sequence: Synthetic oligonucleotide
  Sense strand starting at position 3855 of SEQ ID NO: 1887642
ccaagugcuugccucagua

SEQ ID NO: 2486447 - RNA, 19 nt, Artificial Sequence
  Description of Artificial Sequence: Synthetic oligonucleotide
  Antisense strand to SEQ ID NO: 2486446
uacugaggcaagcacuugg

SEQ ID NO: 2486448 - RNA, 19 nt, Artificial Sequence
  Description of Artificial Sequence: Synthetic oligonucleotide
  Sense strand starting at position 3857 of SEQ ID NO: 1887642
aagugcuugccucaguaaa

SEQ ID NO: 2486449 - RNA, 19 nt, Artificial Sequence
  Description of Artificial Sequence: Synthetic oligonucleotide
  Antisense strand to SEQ ID NO: 2486448
uuuacugaggcaagcacuu

SEQ ID NO: 2486450 - RNA, 19 nt, Artificial Sequence
  Description of Artificial Sequence: Synthetic oligonucleotide
  Sense strand starting at position 3874 of SEQ ID NO: 1887642
aaguccuagugguuaagau

SEQ ID NO: 2486451 - RNA, 19 nt, Artificial Sequence
  Description of Artificial Sequence: Synthetic oligonucleotide
  Antisense strand to SEQ ID NO: 2486450
aucuuaaccacuaggacuu

SEQ ID NO: 2486452 - RNA, 19 nt, Artificial Sequence
  Description of Artificial Sequence: Synthetic oligonucleotide
  Sense strand starting at position 3887 of SEQ ID NO: 1887642
uaagaugagucuuggauag

SEQ ID NO: 2486453 - RNA, 19 nt, Artificial Sequence
  Description of Artificial Sequence: Synthetic oligonucleotide
  Antisense strand to SEQ ID NO: 2486452
cuauccaagacucaucuua

SEQ ID NO: 2486454 - RNA, 19 nt, Artificial Sequence
  Description of Artificial Sequence: Synthetic oligonucleotide
  Sense strand starting at position 3889 of SEQ ID NO: 1887642
agaugagucuuggauagaa

SEQ ID NO: 2486455 - RNA, 19 nt, Artificial Sequence
  Description of Artificial Sequence: Synthetic oligonucleotide
  Antisense strand to SEQ ID NO: 2486454
uucuauccaagacucaucu

SEQ ID NO: 2486456 - RNA, 19 nt, Artificial Sequence
  Description of Artificial Sequence: Synthetic oligonucleotide
  Sense strand starting at position 3941 of SEQ ID NO: 1887642
ugcuucucccucugugaau

SEQ ID NO: 2486457 - RNA, 19 nt, Artificial Sequence
  Description of Artificial Sequence: Synthetic oligonucleotide
  Antisense strand to SEQ ID NO: 2486456
auucacagagggagaagca

SEQ ID NO: 2486458 - RNA, 19 nt, Artificial Sequence
  Description of Artificial Sequence: Synthetic oligonucleotide
  Sense strand starting at position 32 of SEQ ID NO: 1887643
agugauagccaucaccaua

SEQ ID NO: 2486459 - RNA, 19 nt, Artificial Sequence
  Description of Artificial Sequence: Synthetic oligonucleotide
  Antisense strand to SEQ ID NO: 2486458
uauggugauggcuaucacu

SEQ ID NO: 2486460 - RNA, 19 nt, Artificial Sequence
  Description of Artificial Sequence: Synthetic oligonucleotide
  Sense strand starting at position 134 of SEQ ID NO: 1887643
acugacauuugguggagaa

SEQ ID NO: 2486461 - RNA, 19 nt, Artificial Sequence
  Description of Artificial Sequence: Synthetic oligonucleotide
  Antisense strand to SEQ ID NO: 2486460
uucuccaccaaaugucagu

SEQ ID NO: 2486462 - RNA, 19 nt, Artificial Sequence
  Description of Artificial Sequence: Synthetic oligonucleotide
  Sense strand starting at position 198 of SEQ ID NO: 1887643
agugauacgugccgugaag

SEQ ID NO: 2486463 - RNA, 19 nt, Artificial Sequence
  Description of Artificial Sequence: Synthetic oligonucleotide
  Antisense strand to SEQ ID NO: 2486462
cuucacggcacguaucacu

SEQ ID NO: 2486464 - RNA, 19 nt, Artificial Sequence
  Description of Artificial Sequence: Synthetic oligonucleotide
  Sense strand starting at position 200 of SEQ ID NO: 1887643
ugauacgugccgugaagaa

SEQ ID NO: 2486465 - RNA, 19 nt, Artificial Sequence
  Description of Artificial Sequence: Synthetic oligonucleotide
  Antisense strand to SEQ ID NO: 2486464
uucuucacggcacguauca

SEQ ID NO: 2486466 - RNA, 19 nt, Artificial Sequence
  Description of Artificial Sequence: Synthetic oligonucleotide
  Sense strand starting at position 251 of SEQ ID NO: 1887643
caggaucagugccaguuua

SEQ ID NO: 2486467 - RNA, 19 nt, Artificial Sequence
  Description of Artificial Sequence: Synthetic oligonucleotide
  Antisense strand to SEQ ID NO: 2486466
uaaacuggcacugauccug

SEQ ID NO: 2486468 - RNA, 19 nt, Artificial Sequence
  Description of Artificial Sequence: Synthetic oligonucleotide
  Sense strand starting at position 302 of SEQ ID NO: 1887643
ggugacaucugaggugaau

SEQ ID NO: 2486469 - RNA, 19 nt, Artificial Sequence
  Description of Artificial Sequence: Synthetic oligonucleotide
  Antisense strand to SEQ ID NO: 2486468
auucaccucagaugucacc

SEQ ID NO: 2486470 - RNA, 19 nt, Artificial Sequence
  Description of Artificial Sequence: Synthetic oligonucleotide
  Sense strand starting at position 651 of SEQ ID NO: 1887643
agagaagauguuggaaguu

SEQ ID NO: 2486471 - RNA, 19 nt, Artificial Sequence
  Description of Artificial Sequence: Synthetic oligonucleotide
  Antisense strand to SEQ ID NO: 2486470
aacuuccaacaucuucucu

SEQ ID NO: 2486472 - RNA, 19 nt, Artificial Sequence
  Description of Artificial Sequence: Synthetic oligonucleotide
  Sense strand starting at position 672 of SEQ ID NO: 1887643
ggugccugauguggaaaga

SEQ ID NO: 2486473 - RNA, 19 nt, Artificial Sequence
  Description of Artificial Sequence: Synthetic oligonucleotide
  Antisense strand to SEQ ID NO: 2486472
ucuuuccacaucaggcacc

SEQ ID NO: 2486474 - RNA, 19 nt, Artificial Sequence
  Description of Artificial Sequence: Synthetic oligonucleotide
  Sense strand starting at position 741 of SEQ ID NO: 1887643
gggaguugcuagaguacag

SEQ ID NO: 2486475 - RNA, 19 nt, Artificial Sequence
  Description of Artificial Sequence: Synthetic oligonucleotide
  Antisense strand to SEQ ID NO: 2486474
cuguacucuagcaacuccc

SEQ ID NO: 2486476 - RNA, 19 nt, Artificial Sequence
  Description of Artificial Sequence: Synthetic oligonucleotide
  Sense strand starting at position 1298 of SEQ ID NO: 1887643
gagagagggcuuugccgau

SEQ ID NO: 2486477 - RNA, 19 nt, Artificial Sequence
  Description of Artificial Sequence: Synthetic oligonucleotide
  Antisense strand to SEQ ID NO: 2486476
aucggcaaagcccucucuc

SEQ ID NO: 2486478 - RNA, 19 nt, Artificial Sequence
  Description of Artificial Sequence: Synthetic oligonucleotide
  Sense strand starting at position 1304 of SEQ ID NO: 1887643
gggcuuugccgaugccuga

SEQ ID NO: 2486479 - RNA, 19 nt, Artificial Sequence
  Description of Artificial Sequence: Synthetic oligonucleotide
  Antisense strand to SEQ ID NO: 2486478
ucaggcaucggcaaagccc

SEQ ID NO: 2486480 - RNA, 19 nt, Artificial Sequence
  Description of Artificial Sequence: Synthetic oligonucleotide
  Sense strand starting at position 1605 of SEQ ID NO: 1887643
caauaagucgccggccaaa

SEQ ID NO: 2486481 - RNA, 19 nt, Artificial Sequence
  Description of Artificial Sequence: Synthetic oligonucleotide
  Antisense strand to SEQ ID NO: 2486480
uuuggccggcgacuuauug

SEQ ID NO: 2486482 - RNA, 19 nt, Artificial Sequence
  Description of Artificial Sequence: Synthetic oligonucleotide
  Sense strand starting at position 2253 of SEQ ID NO: 1887643
agggcacuucuacacauau

SEQ ID NO: 2486483 - RNA, 19 nt, Artificial Sequence
  Description of Artificial Sequence: Synthetic oligonucleotide
  Antisense strand to SEQ ID NO: 2486482
auauguguagaagugcccu

SEQ ID NO: 2486484 - RNA, 19 nt, Artificial Sequence
  Description of Artificial Sequence: Synthetic oligonucleotide
  Sense strand starting at position 2432 of SEQ ID NO: 1887643
acuggcaguucucauauau

SEQ ID NO: 2486485 - RNA, 19 nt, Artificial Sequence
  Description of Artificial Sequence: Synthetic oligonucleotide
  Antisense strand to SEQ ID NO: 2486484
auauaugagaacugccagu

SEQ ID NO: 2486486 - RNA, 19 nt, Artificial Sequence
  Description of Artificial Sequence: Synthetic oligonucleotide
  Sense strand starting at position 2442 of SEQ ID NO: 1887643
cucauauaugcacacgaga

SEQ ID NO: 2486487 - RNA, 19 nt, Artificial Sequence
  Description of Artificial Sequence: Synthetic oligonucleotide
  Antisense strand to SEQ ID NO: 2486486
ucucgugugcauauaugag

SEQ ID NO: 2486488 - RNA, 19 nt, Artificial Sequence
  Description of Artificial Sequence: Synthetic oligonucleotide
  Sense strand starting at position 2488 of SEQ ID NO: 1887643
cacaacaucccguaucgua

SEQ ID NO: 2486489 - RNA, 19 nt, Artificial Sequence
  Description of Artificial Sequence: Synthetic oligonucleotide
  Antisense strand to SEQ ID NO: 2486488
uacgauacgggauguugug

SEQ ID NO: 2486490 - RNA, 19 nt, Artificial Sequence
  Description of Artificial Sequence: Synthetic oligonucleotide
  Sense strand starting at position 2570 of SEQ ID NO: 1887643
gagggucuucccgacagca

SEQ ID NO: 2486491 - RNA, 19 nt, Artificial Sequence
  Description of Artificial Sequence: Synthetic oligonucleotide
  Antisense strand to SEQ ID NO: 2486490
ugcugucgggaagacccuc

SEQ ID NO: 2486492 - RNA, 19 nt, Artificial Sequence
  Description of Artificial Sequence: Synthetic oligonucleotide
  Sense strand starting at position 2606 of SEQ ID NO: 1887643
acuggagccuugucucaaa

SEQ ID NO: 2486493 - RNA, 19 nt, Artificial Sequence
  Description of Artificial Sequence: Synthetic oligonucleotide
  Antisense strand to SEQ ID NO: 2486492
uuugagacaaggcuccagu

SEQ ID NO: 2486494 - RNA, 19 nt, Artificial Sequence
  Description of Artificial Sequence: Synthetic oligonucleotide
  Sense strand starting at position 2624 of SEQ ID NO: 1887643
agcgacauuuacgcaguaa

SEQ ID NO: 2486495 - RNA, 19 nt, Artificial Sequence
  Description of Artificial Sequence: Synthetic oligonucleotide
  Antisense strand to SEQ ID NO: 2486494
uuacugcguaaaugucgcu

SEQ ID NO: 2486496 - RNA, 19 nt, Artificial Sequence
  Description of Artificial Sequence: Synthetic oligonucleotide
  Sense strand starting at position 2625 of SEQ ID NO: 1887643
gcgacauuuacgcaguaag

SEQ ID NO: 2486497 - RNA, 19 nt, Artificial Sequence
  Description of Artificial Sequence: Synthetic oligonucleotide
  Antisense strand to SEQ ID NO: 2486496
cuuacugcguaaaugucgc

SEQ ID NO: 2486498 - RNA, 19 nt, Artificial Sequence
  Description of Artificial Sequence: Synthetic oligonucleotide
  Sense strand starting at position 2628 of SEQ ID NO: 1887643
acauuuacgcaguaagcuu

SEQ ID NO: 2486499 - RNA, 19 nt, Artificial Sequence
  Description of Artificial Sequence: Synthetic oligonucleotide
  Antisense strand to SEQ ID NO: 2486498
aagcuuacugcguaaaugu

SEQ ID NO: 2486500 - RNA, 19 nt, Artificial Sequence
  Description of Artificial Sequence: Synthetic oligonucleotide
  Sense strand starting at position 2884 of SEQ ID NO: 1887643
guauacgcucccugagaga

SEQ ID NO: 2486501 - RNA, 19 nt, Artificial Sequence
  Description of Artificial Sequence: Synthetic oligonucleotide
  Antisense strand to SEQ ID NO: 2486500
ucucucagggagcguauac

SEQ ID NO: 2486502 - RNA, 19 nt, Artificial Sequence
  Description of Artificial Sequence: Synthetic oligonucleotide
  Sense strand starting at position 2889 of SEQ ID NO: 1887643
cgcucccugagagaugaaa

SEQ ID NO: 2486503 - RNA, 19 nt, Artificial Sequence
  Description of Artificial Sequence: Synthetic oligonucleotide
  Antisense strand to SEQ ID NO: 2486502
uuucaucucucagggagcg

SEQ ID NO: 2486504 - RNA, 19 nt, Artificial Sequence
  Description of Artificial Sequence: Synthetic oligonucleotide
  Sense strand starting at position 3218 of SEQ ID NO: 1887643
agggcugagcgguaauuaa

SEQ ID NO: 2486505 - RNA, 19 nt, Artificial Sequence
  Description of Artificial Sequence: Synthetic oligonucleotide
  Antisense strand to SEQ ID NO: 2486504
uuaauuaccgcucagcccu

SEQ ID NO: 2486506 - RNA, 19 nt, Artificial Sequence
  Description of Artificial Sequence: Synthetic oligonucleotide
  Sense strand starting at position 3302 of SEQ ID NO: 1887643
gcucauauuucucgccgga

SEQ ID NO: 2486507 - RNA, 19 nt, Artificial Sequence
  Description of Artificial Sequence: Synthetic oligonucleotide
  Antisense strand to SEQ ID NO: 2486506
uccggcgagaaauaugagc

SEQ ID NO: 2486508 - RNA, 19 nt, Artificial Sequence
  Description of Artificial Sequence: Synthetic oligonucleotide
  Sense strand starting at position 3304 of SEQ ID NO: 1887643
ucauauuucucgccggauc

SEQ ID NO: 2486509 - RNA, 19 nt, Artificial Sequence
  Description of Artificial Sequence: Synthetic oligonucleotide
  Antisense strand to SEQ ID NO: 2486508
gauccggcgagaaauauga

SEQ ID NO: 2486510 - RNA, 19 nt, Artificial Sequence
  Description of Artificial Sequence: Synthetic oligonucleotide
  Sense strand starting at position 3306 of SEQ ID NO: 1887643
auauuucucgccggaucga

SEQ ID NO: 2486511 - RNA, 19 nt, Artificial Sequence
  Description of Artificial Sequence: Synthetic oligonucleotide
  Antisense strand to SEQ ID NO: 2486510
ucgauccggcgagaaauau

SEQ ID NO: 2486512 - RNA, 19 nt, Artificial Sequence
  Description of Artificial Sequence: Synthetic oligonucleotide
  Sense strand starting at position 3307 of SEQ ID NO: 1887643
uauuucucgccggaucgau

SEQ ID NO: 2486513 - RNA, 19 nt, Artificial Sequence
  Description of Artificial Sequence: Synthetic oligonucleotide
  Antisense strand to SEQ ID NO: 2486512
aucgauccggcgagaaaua

SEQ ID NO: 2486514 - RNA, 19 nt, Artificial Sequence
  Description of Artificial Sequence: Synthetic oligonucleotide
  Sense strand starting at position 3315 of SEQ ID NO: 1887643
gccggaucgauacguuuga

SEQ ID NO: 2486515 - RNA, 19 nt, Artificial Sequence
  Description of Artificial Sequence: Synthetic oligonucleotide
  Antisense strand to SEQ ID NO: 2486514
ucaaacguaucgauccggc

SEQ ID NO: 2486516 - RNA, 19 nt, Artificial Sequence
  Description of Artificial Sequence: Synthetic oligonucleotide
  Sense strand starting at position 3326 of SEQ ID NO: 1887643
acguuugacucccgacaag

SEQ ID NO: 2486517 - RNA, 19 nt, Artificial Sequence
  Description of Artificial Sequence: Synthetic oligonucleotide
  Antisense strand to SEQ ID NO: 2486516
cuugucgggagucaaacgu

SEQ ID NO: 2486518 - RNA, 19 nt, Artificial Sequence
  Description of Artificial Sequence: Synthetic oligonucleotide
  Sense strand starting at position 3343 of SEQ ID NO: 1887643
agacaauaaucgcuuguac

SEQ ID NO: 2486519 - RNA, 19 nt, Artificial Sequence
  Description of Artificial Sequence: Synthetic oligonucleotide
  Antisense strand to SEQ ID NO: 2486518
guacaagcgauuauugucu

SEQ ID NO: 2486520 - RNA, 19 nt, Artificial Sequence
  Description of Artificial Sequence: Synthetic oligonucleotide
  Sense strand starting at position 3365 of SEQ ID NO: 1887643
gccggcgagucgaucaaau

SEQ ID NO: 2486521 - RNA, 19 nt, Artificial Sequence
  Description of Artificial Sequence: Synthetic oligonucleotide
  Antisense strand to SEQ ID NO: 2486520
auuugaucgacucgccggc

SEQ ID NO: 2486522 - RNA, 19 nt, Artificial Sequence
  Description of Artificial Sequence: Synthetic oligonucleotide
  Sense strand starting at position 3367 of SEQ ID NO: 1887643
cggcgagucgaucaaauac

SEQ ID NO: 2486523 - RNA, 19 nt, Artificial Sequence
  Description of Artificial Sequence: Synthetic oligonucleotide
  Antisense strand to SEQ ID NO: 2486522
guauuugaucgacucgccg

SEQ ID NO: 2486524 - RNA, 19 nt, Artificial Sequence
  Description of Artificial Sequence: Synthetic oligonucleotide
  Sense strand starting at position 3384 of SEQ ID NO: 1887643
acauuauuagagcgagguc

SEQ ID NO: 2486525 - RNA, 19 nt, Artificial Sequence
  Description of Artificial Sequence: Synthetic oligonucleotide
  Antisense strand to SEQ ID NO: 2486524
gaccucgcucuaauaaugu

SEQ ID NO: 2486526 - RNA, 19 nt, Artificial Sequence
  Description of Artificial Sequence: Synthetic oligonucleotide
  Sense strand starting at position 3575 of SEQ ID NO: 1887643
uggugaucucucuacucag

SEQ ID NO: 2486527 - RNA, 19 nt, Artificial Sequence
  Description of Artificial Sequence: Synthetic oligonucleotide
  Antisense strand to SEQ ID NO: 2486526
cugaguagagagaucacca

SEQ ID NO: 2486528 - RNA, 19 nt, Artificial Sequence
  Description of Artificial Sequence: Synthetic oligonucleotide
  Sense strand starting at position 3605 of SEQ ID NO: 1887643
auccuugcucugugaggga

SEQ ID NO: 2486529 - RNA, 19 nt, Artificial Sequence
  Description of Artificial Sequence: Synthetic oligonucleotide
  Antisense strand to SEQ ID NO: 2486528
ucccucacagagcaaggau

SEQ ID NO: 2486530 - RNA, 19 nt, Artificial Sequence
  Description of Artificial Sequence: Synthetic oligonucleotide
  Sense strand starting at position 6 of SEQ ID NO: 1887644
cguaucuacuaagcaauau

SEQ ID NO: 2486531 - RNA, 19 nt, Artificial Sequence
  Description of Artificial Sequence: Synthetic oligonucleotide
  Antisense strand to SEQ ID NO: 2486530
auauugcuuaguagauacg

SEQ ID NO: 2486532 - RNA, 19 nt, Artificial Sequence
  Description of Artificial Sequence: Synthetic oligonucleotide
  Sense strand starting at position 154 of SEQ ID NO: 1887644
guucguuacacagugcauu

SEQ ID NO: 2486533 - RNA, 19 nt, Artificial Sequence
  Description of Artificial Sequence: Synthetic oligonucleotide
  Antisense strand to SEQ ID NO: 2486532
aaugcacuguguaacgaac

SEQ ID NO: 2486534 - RNA, 19 nt, Artificial Sequence
  Description of Artificial Sequence: Synthetic oligonucleotide
  Sense strand starting at position 324 of SEQ ID NO: 1887644
uuuccauauguagguaaua

SEQ ID NO: 2486535 - RNA, 19 nt, Artificial Sequence
  Description of Artificial Sequence: Synthetic oligonucleotide
  Antisense strand to SEQ ID NO: 2486534
uauuaccuacauauggaaa

SEQ ID NO: 2486536 - RNA, 19 nt, Artificial Sequence
  Description of Artificial Sequence: Synthetic oligonucleotide
  Sense strand starting at position 611 of SEQ ID NO: 1887644
acauguauauucccaggca

SEQ ID NO: 2486537 - RNA, 19 nt, Artificial Sequence
  Description of Artificial Sequence: Synthetic oligonucleotide
  Antisense strand to SEQ ID NO: 2486536
ugccugggaauauacaugu

SEQ ID NO: 2486538 - RNA, 19 nt, Artificial Sequence
  Description of Artificial Sequence: Synthetic oligonucleotide
  Sense strand starting at position 1637 of SEQ ID NO: 1887644
caaggauggccuuggaagu

SEQ ID NO: 2486539 - RNA, 19 nt, Artificial Sequence
  Description of Artificial Sequence: Synthetic oligonucleotide
  Antisense strand to SEQ ID NO: 2486538
acuuccaaggccauccuug

SEQ ID NO: 2486540 - RNA, 19 nt, Artificial Sequence
  Description of Artificial Sequence: Synthetic oligonucleotide
  Sense strand starting at position 1666 of SEQ ID NO: 1887644
uauggucuuggaugguauu

SEQ ID NO: 2486541 - RNA, 19 nt, Artificial Sequence
  Description of Artificial Sequence: Synthetic oligonucleotide
  Antisense strand to SEQ ID NO: 2486540
aauaccauccaagaccaua

SEQ ID NO: 2486542 - RNA, 19 nt, Artificial Sequence
  Description of Artificial Sequence: Synthetic oligonucleotide
  Sense strand starting at position 1773 of SEQ ID NO: 1887644
ggcaaucucugaguuugaa

SEQ ID NO: 2486543 - RNA, 19 nt, Artificial Sequence
  Description of Artificial Sequence: Synthetic oligonucleotide
  Antisense strand to SEQ ID NO: 2486542
uucaaacucagagauugcc

SEQ ID NO: 2486544 - RNA, 19 nt, Artificial Sequence
  Description of Artificial Sequence: Synthetic oligonucleotide
  Sense strand starting at position 1776 of SEQ ID NO: 1887644
aaucucugaguuugaagau

SEQ ID NO: 2486545 - RNA, 19 nt, Artificial Sequence
  Description of Artificial Sequence: Synthetic oligonucleotide
  Antisense strand to SEQ ID NO: 2486544
aucuucaaacucagagauu

SEQ ID NO: 2486546 - RNA, 19 nt, Artificial Sequence
  Description of Artificial Sequence: Synthetic oligonucleotide
  Sense strand starting at position 1793 of SEQ ID NO: 1887644
auuuauuucuagggugaca

SEQ ID NO: 2486547 - RNA, 19 nt, Artificial Sequence
  Description of Artificial Sequence: Synthetic oligonucleotide
  Antisense strand to SEQ ID NO: 2486546
ugucacccuagaaauaaau

SEQ ID NO: 2486548 - RNA, 19 nt, Artificial Sequence
  Description of Artificial Sequence: Synthetic oligonucleotide
  Sense strand starting at position 1820 of SEQ ID NO: 1887644
ugagaaggauaauauauga

SEQ ID NO: 2486549 - RNA, 19 nt, Artificial Sequence
  Description of Artificial Sequence: Synthetic oligonucleotide
  Antisense strand to SEQ ID NO: 2486548
ucauauauuauccuucuca

SEQ ID NO: 2486550 - RNA, 19 nt, Artificial Sequence
  Description of Artificial Sequence: Synthetic oligonucleotide
  Sense strand starting at position 1825 of SEQ ID NO: 1887644
aggauaauauaugauagga

SEQ ID NO: 2486551 - RNA, 19 nt, Artificial Sequence
  Description of Artificial Sequence: Synthetic oligonucleotide
  Antisense strand to SEQ ID NO: 2486550
uccuaucauauauuauccu

SEQ ID NO: 2486552 - RNA, 19 nt, Artificial Sequence
  Description of Artificial Sequence: Synthetic oligonucleotide
  Sense strand starting at position 1827 of SEQ ID NO: 1887644
gauaauauaugauaggaga

SEQ ID NO: 2486553 - RNA, 19 nt, Artificial Sequence
  Description of Artificial Sequence: Synthetic oligonucleotide
  Antisense strand to SEQ ID NO: 2486552
ucuccuaucauauauuauc

SEQ ID NO: 2486554 - RNA, 19 nt, Artificial Sequence
  Description of Artificial Sequence: Synthetic oligonucleotide
  Sense strand starting at position 1901 of SEQ ID NO: 1887644
aagguugaaaugugugaac

SEQ ID NO: 2486555 - RNA, 19 nt, Artificial Sequence
  Description of Artificial Sequence: Synthetic oligonucleotide
  Antisense strand to SEQ ID NO: 2486554
guucacacauuucaaccuu

SEQ ID NO: 2486556 - RNA, 19 nt, Artificial Sequence
  Description of Artificial Sequence: Synthetic oligonucleotide
  Sense strand starting at position 1903 of SEQ ID NO: 1887644
gguugaaaugugugaacau

SEQ ID NO: 2486557 - RNA, 19 nt, Artificial Sequence
  Description of Artificial Sequence: Synthetic oligonucleotide
  Antisense strand to SEQ ID NO: 2486556
auguucacacauuucaacc

SEQ ID NO: 2486558 - RNA, 19 nt, Artificial Sequence
  Description of Artificial Sequence: Synthetic oligonucleotide
  Sense strand starting at position 1960 of SEQ ID NO: 1887644
uuuaaaguucccuggagcu

SEQ ID NO: 2486559 - RNA, 19 nt, Artificial Sequence
  Description of Artificial Sequence: Synthetic oligonucleotide
  Antisense strand to SEQ ID NO: 2486558
agcuccagggaacuuuaaa

SEQ ID NO: 2486560 - RNA, 19 nt, Artificial Sequence
  Description of Artificial Sequence: Synthetic oligonucleotide
  Sense strand starting at position 1962 of SEQ ID NO: 1887644
uaaaguucccuggagcuga

SEQ ID NO: 2486561 - RNA, 19 nt, Artificial Sequence
  Description of Artificial Sequence: Synthetic oligonucleotide
  Antisense strand to SEQ ID NO: 2486560
ucagcuccagggaacuuua

SEQ ID NO: 2486562 - RNA, 19 nt, Artificial Sequence
  Description of Artificial Sequence: Synthetic oligonucleotide
  Sense strand starting at position 2027 of SEQ ID NO: 1887644
ugaugacugucgcccagaa

SEQ ID NO: 2486563 - RNA, 19 nt, Artificial Sequence
  Description of Artificial Sequence: Synthetic oligonucleotide
  Antisense strand to SEQ ID NO: 2486562
uucugggcgacagucauca

SEQ ID NO: 2486564 - RNA, 19 nt, Artificial Sequence
  Description of Artificial Sequence: Synthetic oligonucleotide
  Sense strand starting at position 2087 of SEQ ID NO: 1887644
ugagcagguuuaucacaga

SEQ ID NO: 2486565 - RNA, 19 nt, Artificial Sequence
  Description of Artificial Sequence: Synthetic oligonucleotide
  Antisense strand to SEQ ID NO: 2486564
ucugugauaaaccugcuca

SEQ ID NO: 2486566 - RNA, 19 nt, Artificial Sequence
  Description of Artificial Sequence: Synthetic oligonucleotide
  Sense strand starting at position 2120 of SEQ ID NO: 1887644
cacugagacaguuguugga

SEQ ID NO: 2486567 - RNA, 19 nt, Artificial Sequence
  Description of Artificial Sequence: Synthetic oligonucleotide
  Antisense strand to SEQ ID NO: 2486566
uccaacaacugucucagug

SEQ ID NO: 2486568 - RNA, 19 nt, Artificial Sequence
  Description of Artificial Sequence: Synthetic oligonucleotide
  Sense strand starting at position 2235 of SEQ ID NO: 1887644
guacacauccgauaucuaa

SEQ ID NO: 2486569 - RNA, 19 nt, Artificial Sequence
  Description of Artificial Sequence: Synthetic oligonucleotide
  Antisense strand to SEQ ID NO: 2486568
uuagauaucggauguguac

SEQ ID NO: 2486570 - RNA, 19 nt, Artificial Sequence
  Description of Artificial Sequence: Synthetic oligonucleotide
  Sense strand starting at position 2298 of SEQ ID NO: 1887644
ggacaacuauaauagaaau

SEQ ID NO: 2486571 - RNA, 19 nt, Artificial Sequence
  Description of Artificial Sequence: Synthetic oligonucleotide
  Antisense strand to SEQ ID NO: 2486570
auuucuauuauaguugucc

SEQ ID NO: 2486572 - RNA, 19 nt, Artificial Sequence
  Description of Artificial Sequence: Synthetic oligonucleotide
  Sense strand starting at position 2311 of SEQ ID NO: 1887644
agaaauguugcagggagga

SEQ ID NO: 2486573 - RNA, 19 nt, Artificial Sequence
  Description of Artificial Sequence: Synthetic oligonucleotide
  Antisense strand to SEQ ID NO: 2486572
uccucccugcaacauuucu

SEQ ID NO: 2486574 - RNA, 19 nt, Artificial Sequence
  Description of Artificial Sequence: Synthetic oligonucleotide
  Sense strand starting at position 2476 of SEQ ID NO: 1887644
aggaguagaguccggauga

SEQ ID NO: 2486575 - RNA, 19 nt, Artificial Sequence
  Description of Artificial Sequence: Synthetic oligonucleotide
  Antisense strand to SEQ ID NO: 2486574
ucauccggacucuacuccu

SEQ ID NO: 2486576 - RNA, 19 nt, Artificial Sequence
  Description of Artificial Sequence: Synthetic oligonucleotide
  Sense strand starting at position 2557 of SEQ ID NO: 1887644
gggacauaucagcaaccgu

SEQ ID NO: 2486577 - RNA, 19 nt, Artificial Sequence
  Description of Artificial Sequence: Synthetic oligonucleotide
  Antisense strand to SEQ ID NO: 2486576
acgguugcugauauguccc

SEQ ID NO: 2486578 - RNA, 19 nt, Artificial Sequence
  Description of Artificial Sequence: Synthetic oligonucleotide
  Sense strand starting at position 2791 of SEQ ID NO: 1887644
uggacuugagcccauugau

SEQ ID NO: 2486579 - RNA, 19 nt, Artificial Sequence
  Description of Artificial Sequence: Synthetic oligonucleotide
  Antisense strand to SEQ ID NO: 2486578
aucaaugggcucaagucca

SEQ ID NO: 2486580 - RNA, 19 nt, Artificial Sequence
  Description of Artificial Sequence: Synthetic oligonucleotide
  Sense strand starting at position 2794 of SEQ ID NO: 1887644
acuugagcccauugaucau

SEQ ID NO: 2486581 - RNA, 19 nt, Artificial Sequence
  Description of Artificial Sequence: Synthetic oligonucleotide
  Antisense strand to SEQ ID NO: 2486580
augaucaaugggcucaagu

SEQ ID NO: 2486582 - RNA, 19 nt, Artificial Sequence
  Description of Artificial Sequence: Synthetic oligonucleotide
  Sense strand starting at position 2921 of SEQ ID NO: 1887644
gaaguauauggaggguguu

SEQ ID NO: 2486583 - RNA, 19 nt, Artificial Sequence
  Description of Artificial Sequence: Synthetic oligonucleotide
  Antisense strand to SEQ ID NO: 2486582
aacacccuccauauacuuc

SEQ ID NO: 2486584 - RNA, 19 nt, Artificial Sequence
  Description of Artificial Sequence: Synthetic oligonucleotide
  Sense strand starting at position 2933 of SEQ ID NO: 1887644
ggguguuguccguucacau

SEQ ID NO: 2486585 - RNA, 19 nt, Artificial Sequence
  Description of Artificial Sequence: Synthetic oligonucleotide
  Antisense strand to SEQ ID NO: 2486584
augugaacggacaacaccc

SEQ ID NO: 2486586 - RNA, 19 nt, Artificial Sequence
  Description of Artificial Sequence: Synthetic oligonucleotide
  Sense strand starting at position 2934 of SEQ ID NO: 1887644
gguguuguccguucacauu

SEQ ID NO: 2486587 - RNA, 19 nt, Artificial Sequence
  Description of Artificial Sequence: Synthetic oligonucleotide
  Antisense strand to SEQ ID NO: 2486586
aaugugaacggacaacacc

SEQ ID NO: 2486588 - RNA, 19 nt, Artificial Sequence
  Description of Artificial Sequence: Synthetic oligonucleotide
  Sense strand starting at position 2964 of SEQ ID NO: 1887644
gggaccuggcuuuagacau

SEQ ID NO: 2486589 - RNA, 19 nt, Artificial Sequence
  Description of Artificial Sequence: Synthetic oligonucleotide
  Antisense strand to SEQ ID NO: 2486588
augucuaaagccagguccc

SEQ ID NO: 2486590 - RNA, 19 nt, Artificial Sequence
  Description of Artificial Sequence: Synthetic oligonucleotide
  Sense strand starting at position 2974 of SEQ ID NO: 1887644
uuuagacaugccugcuaga

SEQ ID NO: 2486591 - RNA, 19 nt, Artificial Sequence
  Description of Artificial Sequence: Synthetic oligonucleotide
  Antisense strand to SEQ ID NO: 2486590
ucuagcaggcaugucuaaa

SEQ ID NO: 2486592 - RNA, 19 nt, Artificial Sequence
  Description of Artificial Sequence: Synthetic oligonucleotide
  Sense strand starting at position 3182 of SEQ ID NO: 1887644
agaguucaucguuaaggga

SEQ ID NO: 2486593 - RNA, 19 nt, Artificial Sequence
  Description of Artificial Sequence: Synthetic oligonucleotide
  Antisense strand to SEQ ID NO: 2486592
ucccuuaacgaugaacucu

SEQ ID NO: 2486594 - RNA, 19 nt, Artificial Sequence
  Description of Artificial Sequence: Synthetic oligonucleotide
  Sense strand starting at position 3198 of SEQ ID NO: 1887644
ggacauuucucccauggaa

SEQ ID NO: 2486595 - RNA, 19 nt, Artificial Sequence
  Description of Artificial Sequence: Synthetic oligonucleotide
  Antisense strand to SEQ ID NO: 2486594
uuccaugggagaaaugucc

SEQ ID NO: 2486596 - RNA, 19 nt, Artificial Sequence
  Description of Artificial Sequence: Synthetic oligonucleotide
  Sense strand starting at position 3384 of SEQ ID NO: 1887644
ggaucugacccauggaggu

SEQ ID NO: 2486597 - RNA, 19 nt, Artificial Sequence
  Description of Artificial Sequence: Synthetic oligonucleotide
  Antisense strand to SEQ ID NO: 2486596
accuccaugggucagaucc

SEQ ID NO: 2486598 - RNA, 19 nt, Artificial Sequence
  Description of Artificial Sequence: Synthetic oligonucleotide
  Sense strand starting at position 3520 of SEQ ID NO: 1887644
gggcaaugaucuuccauac

SEQ ID NO: 2486599 - RNA, 19 nt, Artificial Sequence
  Description of Artificial Sequence: Synthetic oligonucleotide
  Antisense strand to SEQ ID NO: 2486598
guauggaagaucauugccc

SEQ ID NO: 2486600 - RNA, 19 nt, Artificial Sequence
  Description of Artificial Sequence: Synthetic oligonucleotide
  Sense strand starting at position 3610 of SEQ ID NO: 1887644
acagcaugaagauguagau

SEQ ID NO: 2486601 - RNA, 19 nt, Artificial Sequence
  Description of Artificial Sequence: Synthetic oligonucleotide
  Antisense strand to SEQ ID NO: 2486600
aucuacaucuucaugcugu

SEQ ID NO: 2486602 - RNA, 19 nt, Artificial Sequence
  Description of Artificial Sequence: Synthetic oligonucleotide
  Sense strand starting at position 3634 of SEQ ID NO: 1887644
cgaaacugccugugaagaa

SEQ ID NO: 2486603 - RNA, 19 nt, Artificial Sequence
  Description of Artificial Sequence: Synthetic oligonucleotide
  Antisense strand to SEQ ID NO: 2486602
uucuucacaggcaguuucg

SEQ ID NO: 2486604 - RNA, 19 nt, Artificial Sequence
  Description of Artificial Sequence: Synthetic oligonucleotide
  Sense strand starting at position 3638 of SEQ ID NO: 1887644
acugccugugaagaagauu

SEQ ID NO: 2486605 - RNA, 19 nt, Artificial Sequence
  Description of Artificial Sequence: Synthetic oligonucleotide
  Antisense strand to SEQ ID NO: 2486604
aaucuucuucacaggcagu

SEQ ID NO: 2486606 - RNA, 19 nt, Artificial Sequence
  Description of Artificial Sequence: Synthetic oligonucleotide
  Sense strand starting at position 3959 of SEQ ID NO: 1887644
ggucuuuagucucuacaua

SEQ ID NO: 2486607 - RNA, 19 nt, Artificial Sequence
  Description of Artificial Sequence: Synthetic oligonucleotide
  Antisense strand to SEQ ID NO: 2486606
uauguagagacuaaagacc

SEQ ID NO: 2486608 - RNA, 19 nt, Artificial Sequence
  Description of Artificial Sequence: Synthetic oligonucleotide
  Sense strand starting at position 3960 of SEQ ID NO: 1887644
gucuuuagucucuacauau

SEQ ID NO: 2486609 - RNA, 19 nt, Artificial Sequence
  Description of Artificial Sequence: Synthetic oligonucleotide
  Antisense strand to SEQ ID NO: 2486608
auauguagagacuaaagac

SEQ ID NO: 2486610 - RNA, 19 nt, Artificial Sequence
  Description of Artificial Sequence: Synthetic oligonucleotide
  Sense strand starting at position 1741 of SEQ ID NO: 1887645
ggcuucuucgcggucuaga

SEQ ID NO: 2486611 - RNA, 19 nt, Artificial Sequence
  Description of Artificial Sequence: Synthetic oligonucleotide
  Antisense strand to SEQ ID NO: 2486610
ucuagaccgcgaagaagcc

SEQ ID NO: 2486612 - RNA, 19 nt, Artificial Sequence
  Description of Artificial Sequence: Synthetic oligonucleotide
  Sense strand starting at position 1742 of SEQ ID NO: 1887645
gcuucuucgcggucuagag

SEQ ID NO: 2486613 - RNA, 19 nt, Artificial Sequence
  Description of Artificial Sequence: Synthetic oligonucleotide
  Antisense strand to SEQ ID NO: 2486612
cucuagaccgcgaagaagc

SEQ ID NO: 2486614 - RNA, 19 nt, Artificial Sequence
  Description of Artificial Sequence: Synthetic oligonucleotide
  Sense strand starting at position 1750 of SEQ ID NO: 1887645
gcggucuagagacaggaau

SEQ ID NO: 2486615 - RNA, 19 nt, Artificial Sequence
  Description of Artificial Sequence: Synthetic oligonucleotide
  Antisense strand to SEQ ID NO: 2486614
auuccugucucuagaccgc

SEQ ID NO: 2486616 - RNA, 19 nt, Artificial Sequence
  Description of Artificial Sequence: Synthetic oligonucleotide
  Sense strand starting at position 1806 of SEQ ID NO: 1887645
guuaacucuuccucuccga

SEQ ID NO: 2486617 - RNA, 19 nt, Artificial Sequence
  Description of Artificial Sequence: Synthetic oligonucleotide
  Antisense strand to SEQ ID NO: 2486616
ucggagaggaagaguuaac

SEQ ID NO: 2486618 - RNA, 19 nt, Artificial Sequence
  Description of Artificial Sequence: Synthetic oligonucleotide
  Sense strand starting at position 2210 of SEQ ID NO: 1887645
aggcuaggaucucaacauu

SEQ ID NO: 2486619 - RNA, 19 nt, Artificial Sequence
  Description of Artificial Sequence: Synthetic oligonucleotide
  Antisense strand to SEQ ID NO: 2486618
aauguugagauccuagccu

SEQ ID NO: 2486620 - RNA, 19 nt, Artificial Sequence
  Description of Artificial Sequence: Synthetic oligonucleotide
  Sense strand starting at position 2321 of SEQ ID NO: 1887645
ccgggaauuaccgggucuu

SEQ ID NO: 2486621 - RNA, 19 nt, Artificial Sequence
  Description of Artificial Sequence: Synthetic oligonucleotide
  Antisense strand to SEQ ID NO: 2486620
aagacccgguaauucccgg

SEQ ID NO: 2486622 - RNA, 19 nt, Artificial Sequence
  Description of Artificial Sequence: Synthetic oligonucleotide
  Sense strand starting at position 3053 of SEQ ID NO: 1887645
aacugcuucccuuguggga

SEQ ID NO: 2486623 - RNA, 19 nt, Artificial Sequence
  Description of Artificial Sequence: Synthetic oligonucleotide
  Antisense strand to SEQ ID NO: 2486622
ucccacaagggaagcaguu

SEQ ID NO: 2486624 - RNA, 19 nt, Artificial Sequence
  Description of Artificial Sequence: Synthetic oligonucleotide
  Sense strand starting at position 3228 of SEQ ID NO: 1887645
uuccuuuagccagaucuga

SEQ ID NO: 2486625 - RNA, 19 nt, Artificial Sequence
  Description of Artificial Sequence: Synthetic oligonucleotide
  Antisense strand to SEQ ID NO: 2486624
ucagaucuggcuaaaggaa

SEQ ID NO: 2486626 - RNA, 19 nt, Artificial Sequence
  Description of Artificial Sequence: Synthetic oligonucleotide
  Sense strand starting at position 3287 of SEQ ID NO: 1887645
cggcacuucucaccaucua

SEQ ID NO: 2486627 - RNA, 19 nt, Artificial Sequence
  Description of Artificial Sequence: Synthetic oligonucleotide
  Antisense strand to SEQ ID NO: 2486626
uagauggugagaagugccg

SEQ ID NO: 2486628 - RNA, 19 nt, Artificial Sequence
  Description of Artificial Sequence: Synthetic oligonucleotide
  Sense strand starting at position 3326 of SEQ ID NO: 1887645
ccaggaguaucccuugaca

SEQ ID NO: 2486629 - RNA, 19 nt, Artificial Sequence
  Description of Artificial Sequence: Synthetic oligonucleotide
  Antisense strand to SEQ ID NO: 2486628
ugucaagggauacuccugg

SEQ ID NO: 2486630 - RNA, 19 nt, Artificial Sequence
  Description of Artificial Sequence: Synthetic oligonucleotide
  Sense strand starting at position 3328 of SEQ ID NO: 1887645
aggaguaucccuugacacc

SEQ ID NO: 2486631 - RNA, 19 nt, Artificial Sequence
  Description of Artificial Sequence: Synthetic oligonucleotide
  Antisense strand to SEQ ID NO: 2486630
ggugucaagggauacuccu

SEQ ID NO: 2486632 - RNA, 19 nt, Artificial Sequence
  Description of Artificial Sequence: Synthetic oligonucleotide
  Sense strand starting at position 3329 of SEQ ID NO: 1887645
ggaguaucccuugacaccu

SEQ ID NO: 2486633 - RNA, 19 nt, Artificial Sequence
  Description of Artificial Sequence: Synthetic oligonucleotide
  Antisense strand to SEQ ID NO: 2486632
aggugucaagggauacucc

SEQ ID NO: 2486634 - RNA, 19 nt, Artificial Sequence
  Description of Artificial Sequence: Synthetic oligonucleotide
  Sense strand starting at position 3376 of SEQ ID NO: 1887645
agcaauccugucugaucca

SEQ ID NO: 2486635 - RNA, 19 nt, Artificial Sequence
  Description of Artificial Sequence: Synthetic oligonucleotide
  Antisense strand to SEQ ID NO: 2486634
uggaucagacaggauugcu

SEQ ID NO: 2486636 - RNA, 19 nt, Artificial Sequence
  Description of Artificial Sequence: Synthetic oligonucleotide
  Sense strand starting at position 3452 of SEQ ID NO: 1887645
gccaacaucgucugccauu

SEQ ID NO: 2486637 - RNA, 19 nt, Artificial Sequence
  Description of Artificial Sequence: Synthetic oligonucleotide
  Antisense strand to SEQ ID NO: 2486636
aauggcagacgauguuggc

SEQ ID NO: 2486638 - RNA, 19 nt, Artificial Sequence
  Description of Artificial Sequence: Synthetic oligonucleotide
  Sense strand starting at position 3453 of SEQ ID NO: 1887645
ccaacaucgucugccauuu

SEQ ID NO: 2486639 - RNA, 19 nt, Artificial Sequence
  Description of Artificial Sequence: Synthetic oligonucleotide
  Antisense strand to SEQ ID NO: 2486638
aaauggcagacgauguugg

SEQ ID NO: 2486640 - RNA, 19 nt, Artificial Sequence
  Description of Artificial Sequence: Synthetic oligonucleotide
  Sense strand starting at position 3558 of SEQ ID NO: 1887645
aaggaagccuguuaugaga

SEQ ID NO: 2486641 - RNA, 19 nt, Artificial Sequence
  Description of Artificial Sequence: Synthetic oligonucleotide
  Antisense strand to SEQ ID NO: 2486640
ucucauaacaggcuuccuu

SEQ ID NO: 2486642 - RNA, 19 nt, Artificial Sequence
  Description of Artificial Sequence: Synthetic oligonucleotide
  Sense strand starting at position 3567 of SEQ ID NO: 1887645
uguuaugagaccugaguca

SEQ ID NO: 2486643 - RNA, 19 nt, Artificial Sequence
  Description of Artificial Sequence: Synthetic oligonucleotide
  Antisense strand to SEQ ID NO: 2486642
ugacucaggucucauaaca

SEQ ID NO: 2486644 - RNA, 19 nt, Artificial Sequence
  Description of Artificial Sequence: Synthetic oligonucleotide
  Sense strand starting at position 3812 of SEQ ID NO: 1887645
aaaguugccuucucuguga

SEQ ID NO: 2486645 - RNA, 19 nt, Artificial Sequence
  Description of Artificial Sequence: Synthetic oligonucleotide
  Antisense strand to SEQ ID NO: 2486644
ucacagagaaggcaacuuu

SEQ ID NO: 2486646 - RNA, 19 nt, Artificial Sequence
  Description of Artificial Sequence: Synthetic oligonucleotide
  Sense strand starting at position 3814 of SEQ ID NO: 1887645
aguugccuucucugugaga

SEQ ID NO: 2486647 - RNA, 19 nt, Artificial Sequence
  Description of Artificial Sequence: Synthetic oligonucleotide
  Antisense strand to SEQ ID NO: 2486646
ucucacagagaaggcaacu

SEQ ID NO: 2486648 - RNA, 19 nt, Artificial Sequence
  Description of Artificial Sequence: Synthetic oligonucleotide
  Sense strand starting at position 3815 of SEQ ID NO: 1887645
guugccuucucugugagau

SEQ ID NO: 2486649 - RNA, 19 nt, Artificial Sequence
  Description of Artificial Sequence: Synthetic oligonucleotide
  Antisense strand to SEQ ID NO: 2486648
aucucacagagaaggcaac

SEQ ID NO: 2486650 - RNA, 19 nt, Artificial Sequence
  Description of Artificial Sequence: Synthetic oligonucleotide
  Sense strand starting at position 3816 of SEQ ID NO: 1887645
uugccuucucugugagauc

SEQ ID NO: 2486651 - RNA, 19 nt, Artificial Sequence
  Description of Artificial Sequence: Synthetic oligonucleotide
  Antisense strand to SEQ ID NO: 2486650
gaucucacagagaaggcaa

SEQ ID NO: 2486652 - RNA, 19 nt, Artificial Sequence
  Description of Artificial Sequence: Synthetic oligonucleotide
  Sense strand starting at position 3944 of SEQ ID NO: 1887645
guacuuaauucuuauguug

SEQ ID NO: 2486653 - RNA, 19 nt, Artificial Sequence
  Description of Artificial Sequence: Synthetic oligonucleotide
  Antisense strand to SEQ ID NO: 2486652
caacauaagaauuaaguac

SEQ ID NO: 2486654 - RNA, 19 nt, Artificial Sequence
  Description of Artificial Sequence: Synthetic oligonucleotide
  Sense strand starting at position 3952 of SEQ ID NO: 1887645
uucuuauguugacagcaau

SEQ ID NO: 2486655 - RNA, 19 nt, Artificial Sequence
  Description of Artificial Sequence: Synthetic oligonucleotide
  Antisense strand to SEQ ID NO: 2486654
auugcugucaacauaagaa

SEQ ID NO: 2486656 - RNA, 19 nt, Artificial Sequence
  Description of Artificial Sequence: Synthetic oligonucleotide
  Sense strand starting at position 3982 of SEQ ID NO: 1887645
cuagaaugucgcguccuca

SEQ ID NO: 2486657 - RNA, 19 nt, Artificial Sequence
  Description of Artificial Sequence: Synthetic oligonucleotide
  Antisense strand to SEQ ID NO: 2486656
ugaggacgcgacauucuag

SEQ ID NO: 2486658 - RNA, 19 nt, Artificial Sequence
  Description of Artificial Sequence: Synthetic oligonucleotide
  Sense strand starting at position 79 of SEQ ID NO: 1887646
gcaagcugcauauaggauu

SEQ ID NO: 2486659 - RNA, 19 nt, Artificial Sequence
  Description of Artificial Sequence: Synthetic oligonucleotide
  Antisense strand to SEQ ID NO: 2486658
aauccuauaugcagcuugc

SEQ ID NO: 2486660 - RNA, 19 nt, Artificial Sequence
  Description of Artificial Sequence: Synthetic oligonucleotide
  Sense strand starting at position 356 of SEQ ID NO: 1887646
cggagauugcaaugagcga

SEQ ID NO: 2486661 - RNA, 19 nt, Artificial Sequence
  Description of Artificial Sequence: Synthetic oligonucleotide
  Antisense strand to SEQ ID NO: 2486660
ucgcucauugcaaucuccg

SEQ ID NO: 2486662 - RNA, 19 nt, Artificial Sequence
  Description of Artificial Sequence: Synthetic oligonucleotide
  Sense strand starting at position 360 of SEQ ID NO: 1887646
gauugcaaugagcgagauu

SEQ ID NO: 2486663 - RNA, 19 nt, Artificial Sequence
  Description of Artificial Sequence: Synthetic oligonucleotide
  Antisense strand to SEQ ID NO: 2486662
aaucucgcucauugcaauc

SEQ ID NO: 2486664 - RNA, 19 nt, Artificial Sequence
  Description of Artificial Sequence: Synthetic oligonucleotide
  Sense strand starting at position 361 of SEQ ID NO: 1887646
auugcaaugagcgagauua

SEQ ID NO: 2486665 - RNA, 19 nt, Artificial Sequence
  Description of Artificial Sequence: Synthetic oligonucleotide
  Antisense strand to SEQ ID NO: 2486664
uaaucucgcucauugcaau

SEQ ID NO: 2486666 - RNA, 19 nt, Artificial Sequence
  Description of Artificial Sequence: Synthetic oligonucleotide
  Sense strand starting at position 1220 of SEQ ID NO: 1887646
uguauuucggccuggcuau

SEQ ID NO: 2486667 - RNA, 19 nt, Artificial Sequence
  Description of Artificial Sequence: Synthetic oligonucleotide
  Antisense strand to SEQ ID NO: 2486666
auagccaggccgaaauaca

SEQ ID NO: 2486668 - RNA, 19 nt, Artificial Sequence
  Description of Artificial Sequence: Synthetic oligonucleotide
  Sense strand starting at position 1221 of SEQ ID NO: 1887646
guauuucggccuggcuaua

SEQ ID NO: 2486669 - RNA, 19 nt, Artificial Sequence
  Description of Artificial Sequence: Synthetic oligonucleotide
  Antisense strand to SEQ ID NO: 2486668
uauagccaggccgaaauac

SEQ ID NO: 2486670 - RNA, 19 nt, Artificial Sequence
  Description of Artificial Sequence: Synthetic oligonucleotide
  Sense strand starting at position 1235 of SEQ ID NO: 1887646
cuauauuucgagugcucag

SEQ ID NO: 2486671 - RNA, 19 nt, Artificial Sequence
  Description of Artificial Sequence: Synthetic oligonucleotide
  Antisense strand to SEQ ID NO: 2486670
cugagcacucgaaauauag

SEQ ID NO: 2486672 - RNA, 19 nt, Artificial Sequence
  Description of Artificial Sequence: Synthetic oligonucleotide
  Sense strand starting at position 1365 of SEQ ID NO: 1887646
gucuuaauuucgucagcuc

SEQ ID NO: 2486673 - RNA, 19 nt, Artificial Sequence
  Description of Artificial Sequence: Synthetic oligonucleotide
  Antisense strand to SEQ ID NO: 2486672
gagcugacgaaauuaagac

SEQ ID NO: 2486674 - RNA, 19 nt, Artificial Sequence
  Description of Artificial Sequence: Synthetic oligonucleotide
  Sense strand starting at position 1618 of SEQ ID NO: 1887646
acuggagucccucaacacu

SEQ ID NO: 2486675 - RNA, 19 nt, Artificial Sequence
  Description of Artificial Sequence: Synthetic oligonucleotide
  Antisense strand to SEQ ID NO: 2486674
aguguugagggacuccagu

SEQ ID NO: 2486676 - RNA, 19 nt, Artificial Sequence
  Description of Artificial Sequence: Synthetic oligonucleotide
  Sense strand starting at position 1728 of SEQ ID NO: 1887646
auugaaaggucuucgcugu

SEQ ID NO: 2486677 - RNA, 19 nt, Artificial Sequence
  Description of Artificial Sequence: Synthetic oligonucleotide
  Antisense strand to SEQ ID NO: 2486676
acagcgaagaccuuucaau

SEQ ID NO: 2486678 - RNA, 19 nt, Artificial Sequence
  Description of Artificial Sequence: Synthetic oligonucleotide
  Sense strand starting at position 1732 of SEQ ID NO: 1887646
aaaggucuucgcugucaau

SEQ ID NO: 2486679 - RNA, 19 nt, Artificial Sequence
  Description of Artificial Sequence: Synthetic oligonucleotide
  Antisense strand to SEQ ID NO: 2486678
auugacagcgaagaccuuu

SEQ ID NO: 2486680 - RNA, 19 nt, Artificial Sequence
  Description of Artificial Sequence: Synthetic oligonucleotide
  Sense strand starting at position 1743 of SEQ ID NO: 1887646
cugucaaucacguauggga

SEQ ID NO: 2486681 - RNA, 19 nt, Artificial Sequence
  Description of Artificial Sequence: Synthetic oligonucleotide
  Antisense strand to SEQ ID NO: 2486680
ucccauacgugauugacag

SEQ ID NO: 2486682 - RNA, 19 nt, Artificial Sequence
  Description of Artificial Sequence: Synthetic oligonucleotide
  Sense strand starting at position 1783 of SEQ ID NO: 1887646
caggguuaucugggacucu

SEQ ID NO: 2486683 - RNA, 19 nt, Artificial Sequence
  Description of Artificial Sequence: Synthetic oligonucleotide
  Antisense strand to SEQ ID NO: 2486682
agagucccagauaacccug

SEQ ID NO: 2486684 - RNA, 19 nt, Artificial Sequence
  Description of Artificial Sequence: Synthetic oligonucleotide
  Sense strand starting at position 1796 of SEQ ID NO: 1887646
gacucuuuccugcaggacu

SEQ ID NO: 2486685 - RNA, 19 nt, Artificial Sequence
  Description of Artificial Sequence: Synthetic oligonucleotide
  Antisense strand to SEQ ID NO: 2486684
aguccugcaggaaagaguc

SEQ ID NO: 2486686 - RNA, 19 nt, Artificial Sequence
  Description of Artificial Sequence: Synthetic oligonucleotide
  Sense strand starting at position 1814 of SEQ ID NO: 1887646
uugucagaaccuugaauac

SEQ ID NO: 2486687 - RNA, 19 nt, Artificial Sequence
  Description of Artificial Sequence: Synthetic oligonucleotide
  Antisense strand to SEQ ID NO: 2486686
guauucaagguucugacaa

SEQ ID NO: 2486688 - RNA, 19 nt, Artificial Sequence
  Description of Artificial Sequence: Synthetic oligonucleotide
  Sense strand starting at position 1840 of SEQ ID NO: 1887646
uguguugugaguggucauu

SEQ ID NO: 2486689 - RNA, 19 nt, Artificial Sequence
  Description of Artificial Sequence: Synthetic oligonucleotide
  Antisense strand to SEQ ID NO: 2486688
aaugaccacucacaacaca

SEQ ID NO: 2486690 - RNA, 19 nt, Artificial Sequence
  Description of Artificial Sequence: Synthetic oligonucleotide
  Sense strand starting at position 1846 of SEQ ID NO: 1887646
gugaguggucauugccuau

SEQ ID NO: 2486691 - RNA, 19 nt, Artificial Sequence
  Description of Artificial Sequence: Synthetic oligonucleotide
  Antisense strand to SEQ ID NO: 2486690
auaggcaaugaccacucac

SEQ ID NO: 2486692 - RNA, 19 nt, Artificial Sequence
  Description of Artificial Sequence: Synthetic oligonucleotide
  Sense strand starting at position 1850 of SEQ ID NO: 1887646
guggucauugccuaugagu

SEQ ID NO: 2486693 - RNA, 19 nt, Artificial Sequence
  Description of Artificial Sequence: Synthetic oligonucleotide
  Antisense strand to SEQ ID NO: 2486692
acucauaggcaaugaccac

SEQ ID NO: 2486694 - RNA, 19 nt, Artificial Sequence
  Description of Artificial Sequence: Synthetic oligonucleotide
  Sense strand starting at position 1852 of SEQ ID NO: 1887646
ggucauugccuaugaguga

SEQ ID NO: 2486695 - RNA, 19 nt, Artificial Sequence
  Description of Artificial Sequence: Synthetic oligonucleotide
  Antisense strand to SEQ ID NO: 2486694
ucacucauaggcaaugacc

SEQ ID NO: 2486696 - RNA, 19 nt, Artificial Sequence
  Description of Artificial Sequence: Synthetic oligonucleotide
  Sense strand starting at position 1855 of SEQ ID NO: 1887646
cauugccuaugagugagaa

SEQ ID NO: 2486697 - RNA, 19 nt, Artificial Sequence
  Description of Artificial Sequence: Synthetic oligonucleotide
  Antisense strand to SEQ ID NO: 2486696
uucucacucauaggcaaug

SEQ ID NO: 2486698 - RNA, 19 nt, Artificial Sequence
  Description of Artificial Sequence: Synthetic oligonucleotide
  Sense strand starting at position 1856 of SEQ ID NO: 1887646
auugccuaugagugagaaa

SEQ ID NO: 2486699 - RNA, 19 nt, Artificial Sequence
  Description of Artificial Sequence: Synthetic oligonucleotide
  Antisense strand to SEQ ID NO: 2486698
uuucucacucauaggcaau

SEQ ID NO: 2486700 - RNA, 19 nt, Artificial Sequence
  Description of Artificial Sequence: Synthetic oligonucleotide
  Sense strand starting at position 2271 of SEQ ID NO: 1887646
cuauaauuggagcacguga

SEQ ID NO: 2486701 - RNA, 19 nt, Artificial Sequence
  Description of Artificial Sequence: Synthetic oligonucleotide
  Antisense strand to SEQ ID NO: 2486700
ucacgugcuccaauuauag

SEQ ID NO: 2486702 - RNA, 19 nt, Artificial Sequence
  Description of Artificial Sequence: Synthetic oligonucleotide
  Sense strand starting at position 2284 of SEQ ID NO: 1887646
acgugaguccugggucuca

SEQ ID NO: 2486703 - RNA, 19 nt, Artificial Sequence
  Description of Artificial Sequence: Synthetic oligonucleotide
  Antisense strand to SEQ ID NO: 2486702
ugagacccaggacucacgu

SEQ ID NO: 2486704 - RNA, 19 nt, Artificial Sequence
  Description of Artificial Sequence: Synthetic oligonucleotide
  Sense strand starting at position 2322 of SEQ ID NO: 1887646
cuggauuucuagcacugag

SEQ ID NO: 2486705 - RNA, 19 nt, Artificial Sequence
  Description of Artificial Sequence: Synthetic oligonucleotide
  Antisense strand to SEQ ID NO: 2486704
cucagugcuagaaauccag

SEQ ID NO: 2486706 - RNA, 19 nt, Artificial Sequence
  Description of Artificial Sequence: Synthetic oligonucleotide
  Sense strand starting at position 2616 of SEQ ID NO: 1887646
cuggacuccuggucuaaga

SEQ ID NO: 2486707 - RNA, 19 nt, Artificial Sequence
  Description of Artificial Sequence: Synthetic oligonucleotide
  Antisense strand to SEQ ID NO: 2486706
ucuuagaccaggaguccag

SEQ ID NO: 2486708 - RNA, 19 nt, Artificial Sequence
  Description of Artificial Sequence: Synthetic oligonucleotide
  Sense strand starting at position 2721 of SEQ ID NO: 1887646
gcgguugaggcguuuagca

SEQ ID NO: 2486709 - RNA, 19 nt, Artificial Sequence
  Description of Artificial Sequence: Synthetic oligonucleotide
  Antisense strand to SEQ ID NO: 2486708
ugcuaaacgccucaaccgc

SEQ ID NO: 2486710 - RNA, 19 nt, Artificial Sequence
  Description of Artificial Sequence: Synthetic oligonucleotide
  Sense strand starting at position 3056 of SEQ ID NO: 1887646
uuauguauggcccaggaca

SEQ ID NO: 2486711 - RNA, 19 nt, Artificial Sequence
  Description of Artificial Sequence: Synthetic oligonucleotide
  Antisense strand to SEQ ID NO: 2486710
uguccugggccauacauaa

SEQ ID NO: 2486712 - RNA, 19 nt, Artificial Sequence
  Description of Artificial Sequence: Synthetic oligonucleotide
  Sense strand starting at position 3157 of SEQ ID NO: 1887646
uguguaaccuacuugguua

SEQ ID NO: 2486713 - RNA, 19 nt, Artificial Sequence
  Description of Artificial Sequence: Synthetic oligonucleotide
  Antisense strand to SEQ ID NO: 2486712
uaaccaaguagguuacaca

SEQ ID NO: 2486714 - RNA, 19 nt, Artificial Sequence
  Description of Artificial Sequence: Synthetic oligonucleotide
  Sense strand starting at position 3158 of SEQ ID NO: 1887646
guguaaccuacuugguuau

SEQ ID NO: 2486715 - RNA, 19 nt, Artificial Sequence
  Description of Artificial Sequence: Synthetic oligonucleotide
  Antisense strand to SEQ ID NO: 2486714
auaaccaaguagguuacac

SEQ ID NO: 2486716 - RNA, 19 nt, Artificial Sequence
  Description of Artificial Sequence: Synthetic oligonucleotide
  Sense strand starting at position 3172 of SEQ ID NO: 1887646
guuaucucuggauggagca

SEQ ID NO: 2486717 - RNA, 19 nt, Artificial Sequence
  Description of Artificial Sequence: Synthetic oligonucleotide
  Antisense strand to SEQ ID NO: 2486716
ugcuccauccagagauaac

SEQ ID NO: 2486718 - RNA, 19 nt, Artificial Sequence
  Description of Artificial Sequence: Synthetic oligonucleotide
  Sense strand starting at position 3229 of SEQ ID NO: 1887646
ggcucacagcaauaagauu

SEQ ID NO: 2486719 - RNA, 19 nt, Artificial Sequence
  Description of Artificial Sequence: Synthetic oligonucleotide
  Antisense strand to SEQ ID NO: 2486718
aaucuuauugcugugagcc

SEQ ID NO: 2486720 - RNA, 19 nt, Artificial Sequence
  Description of Artificial Sequence: Synthetic oligonucleotide
  Sense strand starting at position 3682 of SEQ ID NO: 1887646
auaacuuguguccacugua

SEQ ID NO: 2486721 - RNA, 19 nt, Artificial Sequence
  Description of Artificial Sequence: Synthetic oligonucleotide
  Antisense strand to SEQ ID NO: 2486720
uacaguggacacaaguuau

SEQ ID NO: 2486722 - RNA, 19 nt, Artificial Sequence
  Description of Artificial Sequence: Synthetic oligonucleotide
  Sense strand starting at position 3685 of SEQ ID NO: 1887646
acuuguguccacuguagaa

SEQ ID NO: 2486723 - RNA, 19 nt, Artificial Sequence
  Description of Artificial Sequence: Synthetic oligonucleotide
  Antisense strand to SEQ ID NO: 2486722
uucuacaguggacacaagu

SEQ ID NO: 2486724 - RNA, 19 nt, Artificial Sequence
  Description of Artificial Sequence: Synthetic oligonucleotide
  Sense strand starting at position 3687 of SEQ ID NO: 1887646
uuguguccacuguagaaau

SEQ ID NO: 2486725 - RNA, 19 nt, Artificial Sequence
  Description of Artificial Sequence: Synthetic oligonucleotide
  Antisense strand to SEQ ID NO: 2486724
auuucuacaguggacacaa

SEQ ID NO: 2486726 - RNA, 19 nt, Artificial Sequence
  Description of Artificial Sequence: Synthetic oligonucleotide
  Sense strand starting at position 3689 of SEQ ID NO: 1887646
guguccacuguagaaauau

SEQ ID NO: 2486727 - RNA, 19 nt, Artificial Sequence
  Description of Artificial Sequence: Synthetic oligonucleotide
  Antisense strand to SEQ ID NO: 2486726
auauuucuacaguggacac

SEQ ID NO: 2486728 - RNA, 19 nt, Artificial Sequence
  Description of Artificial Sequence: Synthetic oligonucleotide
  Sense strand starting at position 3711 of SEQ ID NO: 1887646
acaauuuaguuaugagcaa

SEQ ID NO: 2486729 - RNA, 19 nt, Artificial Sequence
  Description of Artificial Sequence: Synthetic oligonucleotide
  Antisense strand to SEQ ID NO: 2486728
uugcucauaacuaaauugu

SEQ ID NO: 2486730 - RNA, 19 nt, Artificial Sequence
  Description of Artificial Sequence: Synthetic oligonucleotide
  Sense strand starting at position 3736 of SEQ ID NO: 1887646
gaaaguagugccuauaguu

SEQ ID NO: 2486731 - RNA, 19 nt, Artificial Sequence
  Description of Artificial Sequence: Synthetic oligonucleotide
  Antisense strand to SEQ ID NO: 2486730
aacuauaggcacuacuuuc

SEQ ID NO: 2486732 - RNA, 19 nt, Artificial Sequence
  Description of Artificial Sequence: Synthetic oligonucleotide
  Sense strand starting at position 3841 of SEQ ID NO: 1887646
ggaauuaugcuguacauau

SEQ ID NO: 2486733 - RNA, 19 nt, Artificial Sequence
  Description of Artificial Sequence: Synthetic oligonucleotide
  Antisense strand to SEQ ID NO: 2486732
auauguacagcauaauucc

SEQ ID NO: 2486734 - RNA, 19 nt, Artificial Sequence
  Description of Artificial Sequence: Synthetic oligonucleotide
  Sense strand starting at position 3878 of SEQ ID NO: 1887646
cugucuugugaauaccuuu

SEQ ID NO: 2486735 - RNA, 19 nt, Artificial Sequence
  Description of Artificial Sequence: Synthetic oligonucleotide
  Antisense strand to SEQ ID NO: 2486734
aaagguauucacaagacag

SEQ ID NO: 2486736 - RNA, 19 nt, Artificial Sequence
  Description of Artificial Sequence: Synthetic oligonucleotide
  Sense strand starting at position 3946 of SEQ ID NO: 1887646
uaggaagacugucaaacau

SEQ ID NO: 2486737 - RNA, 19 nt, Artificial Sequence
  Description of Artificial Sequence: Synthetic oligonucleotide
  Antisense strand to SEQ ID NO: 2486736
auguuugacagucuuccua

SEQ ID NO: 2486738 - RNA, 19 nt, Artificial Sequence
  Description of Artificial Sequence: Synthetic oligonucleotide
  Sense strand starting at position 122 of SEQ ID NO: 1887647
uuagauugccuuuggguaa

SEQ ID NO: 2486739 - RNA, 19 nt, Artificial Sequence
  Description of Artificial Sequence: Synthetic oligonucleotide
  Antisense strand to SEQ ID NO: 2486738
uuacccaaaggcaaucuaa

SEQ ID NO: 2486740 - RNA, 19 nt, Artificial Sequence
  Description of Artificial Sequence: Synthetic oligonucleotide
  Sense strand starting at position 156 of SEQ ID NO: 1887647
uucugcguaucaugcaaga

SEQ ID NO: 2486741 - RNA, 19 nt, Artificial Sequence
  Description of Artificial Sequence: Synthetic oligonucleotide
  Antisense strand to SEQ ID NO: 2486740
ucuugcaugauacgcagaa

SEQ ID NO: 2486742 - RNA, 19 nt, Artificial Sequence
  Description of Artificial Sequence: Synthetic oligonucleotide
  Sense strand starting at position 158 of SEQ ID NO: 1887647
cugcguaucaugcaagaga

SEQ ID NO: 2486743 - RNA, 19 nt, Artificial Sequence
  Description of Artificial Sequence: Synthetic oligonucleotide
  Antisense strand to SEQ ID NO: 2486742
ucucuugcaugauacgcag

SEQ ID NO: 2486744 - RNA, 19 nt, Artificial Sequence
  Description of Artificial Sequence: Synthetic oligonucleotide
  Sense strand starting at position 180 of SEQ ID NO: 1887647
cgcgaaccaagaugugaau

SEQ ID NO: 2486745 - RNA, 19 nt, Artificial Sequence
  Description of Artificial Sequence: Synthetic oligonucleotide
  Antisense strand to SEQ ID NO: 2486744
auucacaucuugguucgcg

SEQ ID NO: 2486746 - RNA, 19 nt, Artificial Sequence
  Description of Artificial Sequence: Synthetic oligonucleotide
  Sense strand starting at position 338 of SEQ ID NO: 1887647
cucgcucuuccgggaggaa

SEQ ID NO: 2486747 - RNA, 19 nt, Artificial Sequence
  Description of Artificial Sequence: Synthetic oligonucleotide
  Antisense strand to SEQ ID NO: 2486746
uuccucccggaagagcgag

SEQ ID NO: 2486748 - RNA, 19 nt, Artificial Sequence
  Description of Artificial Sequence: Synthetic oligonucleotide
  Sense strand starting at position 1126 of SEQ ID NO: 1887647
ccacaaagacugugcgauu

SEQ ID NO: 2486749 - RNA, 19 nt, Artificial Sequence
  Description of Artificial Sequence: Synthetic oligonucleotide
  Antisense strand to SEQ ID NO: 2486748
aaucgcacagucuuugugg

SEQ ID NO: 2486750 - RNA, 19 nt, Artificial Sequence
  Description of Artificial Sequence: Synthetic oligonucleotide
  Sense strand starting at position 1127 of SEQ ID NO: 1887647
cacaaagacugugcgauua

SEQ ID NO: 2486751 - RNA, 19 nt, Artificial Sequence
  Description of Artificial Sequence: Synthetic oligonucleotide
  Antisense strand to SEQ ID NO: 2486750
uaaucgcacagucuuugug

SEQ ID NO: 2486752 - RNA, 19 nt, Artificial Sequence
  Description of Artificial Sequence: Synthetic oligonucleotide
  Sense strand starting at position 1353 of SEQ ID NO: 1887647
agaccaagcguuugaauac

SEQ ID NO: 2486753 - RNA, 19 nt, Artificial Sequence
  Description of Artificial Sequence: Synthetic oligonucleotide
  Antisense strand to SEQ ID NO: 2486752
guauucaaacgcuuggucu

SEQ ID NO: 2486754 - RNA, 19 nt, Artificial Sequence
  Description of Artificial Sequence: Synthetic oligonucleotide
  Sense strand starting at position 1452 of SEQ ID NO: 1887647
agaaauaaaugagacacua

SEQ ID NO: 2486755 - RNA, 19 nt, Artificial Sequence
  Description of Artificial Sequence: Synthetic oligonucleotide
  Antisense strand to SEQ ID NO: 2486754
uagugucucauuuauuucu

SEQ ID NO: 2486756 - RNA, 19 nt, Artificial Sequence
  Description of Artificial Sequence: Synthetic oligonucleotide
  Sense strand starting at position 2893 of SEQ ID NO: 1887647
ucauuuccguuugcugaaa

SEQ ID NO: 2486757 - RNA, 19 nt, Artificial Sequence
  Description of Artificial Sequence: Synthetic oligonucleotide
  Antisense strand to SEQ ID NO: 2486756
uuucagcaaacggaaauga

SEQ ID NO: 2486758 - RNA, 19 nt, Artificial Sequence
  Description of Artificial Sequence: Synthetic oligonucleotide
  Sense strand starting at position 2955 of SEQ ID NO: 1887647
agaggaaggucccugcuau

SEQ ID NO: 2486759 - RNA, 19 nt, Artificial Sequence
  Description of Artificial Sequence: Synthetic oligonucleotide
  Antisense strand to SEQ ID NO: 2486758
auagcagggaccuuccucu

SEQ ID NO: 2486760 - RNA, 19 nt, Artificial Sequence
  Description of Artificial Sequence: Synthetic oligonucleotide
  Sense strand starting at position 2956 of SEQ ID NO: 1887647
gaggaaggucccugcuauc

SEQ ID NO: 2486761 - RNA, 19 nt, Artificial Sequence
  Description of Artificial Sequence: Synthetic oligonucleotide
  Antisense strand to SEQ ID NO: 2486760
gauagcagggaccuuccuc

SEQ ID NO: 2486762 - RNA, 19 nt, Artificial Sequence
  Description of Artificial Sequence: Synthetic oligonucleotide
  Sense strand starting at position 3136 of SEQ ID NO: 1887647
cagcgccucccuggaaauu

SEQ ID NO: 2486763 - RNA, 19 nt, Artificial Sequence
  Description of Artificial Sequence: Synthetic oligonucleotide
  Antisense strand to SEQ ID NO: 2486762
aauuuccagggaggcgcug

SEQ ID NO: 2486764 - RNA, 19 nt, Artificial Sequence
  Description of Artificial Sequence: Synthetic oligonucleotide
  Sense strand starting at position 3147 of SEQ ID NO: 1887647
uggaaauucucugcagcga

SEQ ID NO: 2486765 - RNA, 19 nt, Artificial Sequence
  Description of Artificial Sequence: Synthetic oligonucleotide
  Antisense strand to SEQ ID NO: 2486764
ucgcugcagagaauuucca

SEQ ID NO: 2486766 - RNA, 19 nt, Artificial Sequence
  Description of Artificial Sequence: Synthetic oligonucleotide
  Sense strand starting at position 3220 of SEQ ID NO: 1887647
aaaguagagucccagaaca

SEQ ID NO: 2486767 - RNA, 19 nt, Artificial Sequence
  Description of Artificial Sequence: Synthetic oligonucleotide
  Antisense strand to SEQ ID NO: 2486766
uguucugggacucuacuuu

SEQ ID NO: 2486768 - RNA, 19 nt, Artificial Sequence
  Description of Artificial Sequence: Synthetic oligonucleotide
  Sense strand starting at position 3246 of SEQ ID NO: 1887647
aacguuguuccagggaaag

SEQ ID NO: 2486769 - RNA, 19 nt, Artificial Sequence
  Description of Artificial Sequence: Synthetic oligonucleotide
  Antisense strand to SEQ ID NO: 2486768
cuuucccuggaacaacguu

SEQ ID NO: 2486770 - RNA, 19 nt, Artificial Sequence
  Description of Artificial Sequence: Synthetic oligonucleotide
  Sense strand starting at position 3248 of SEQ ID NO: 1887647
cguuguuccagggaaagac

SEQ ID NO: 2486771 - RNA, 19 nt, Artificial Sequence
  Description of Artificial Sequence: Synthetic oligonucleotide
  Antisense strand to SEQ ID NO: 2486770
gucuuucccuggaacaacg

SEQ ID NO: 2486772 - RNA, 19 nt, Artificial Sequence
  Description of Artificial Sequence: Synthetic oligonucleotide
  Sense strand starting at position 93 of SEQ ID NO: 1887648
gguuaauugugcccuucca

SEQ ID NO: 2486773 - RNA, 19 nt, Artificial Sequence
  Description of Artificial Sequence: Synthetic oligonucleotide
  Antisense strand to SEQ ID NO: 2486772
uggaagggcacaauuaacc

SEQ ID NO: 2486774 - RNA, 19 nt, Artificial Sequence
  Description of Artificial Sequence: Synthetic oligonucleotide
  Sense strand starting at position 526 of SEQ ID NO: 1887648
ggaggagcuagcgagaguu

SEQ ID NO: 2486775 - RNA, 19 nt, Artificial Sequence
  Description of Artificial Sequence: Synthetic oligonucleotide
  Antisense strand to SEQ ID NO: 2486774
aacucucgcuagcuccucc

SEQ ID NO: 2486776 - RNA, 19 nt, Artificial Sequence
  Description of Artificial Sequence: Synthetic oligonucleotide
  Sense strand starting at position 557 of SEQ ID NO: 1887648
gugaaggguucggccagua

SEQ ID NO: 2486777 - RNA, 19 nt, Artificial Sequence
  Description of Artificial Sequence: Synthetic oligonucleotide
  Antisense strand to SEQ ID NO: 2486776
uacuggccgaacccuucac

SEQ ID NO: 2486778 - RNA, 19 nt, Artificial Sequence
  Description of Artificial Sequence: Synthetic oligonucleotide
  Sense strand starting at position 679 of SEQ ID NO: 1887648
ugggcuuguuugggaacau

SEQ ID NO: 2486779 - RNA, 19 nt, Artificial Sequence
  Description of Artificial Sequence: Synthetic oligonucleotide
  Antisense strand to SEQ ID NO: 2486778
auguucccaaacaagccca

SEQ ID NO: 2486780 - RNA, 19 nt, Artificial Sequence
  Description of Artificial Sequence: Synthetic oligonucleotide
  Sense strand starting at position 680 of SEQ ID NO: 1887648
gggcuuguuugggaacaug

SEQ ID NO: 2486781 - RNA, 19 nt, Artificial Sequence
  Description of Artificial Sequence: Synthetic oligonucleotide
  Antisense strand to SEQ ID NO: 2486780
cauguucccaaacaagccc

SEQ ID NO: 2486782 - RNA, 19 nt, Artificial Sequence
  Description of Artificial Sequence: Synthetic oligonucleotide
  Sense strand starting at position 709 of SEQ ID NO: 1887648
ggagguuucucaugcaaac

SEQ ID NO: 2486783 - RNA, 19 nt, Artificial Sequence
  Description of Artificial Sequence: Synthetic oligonucleotide
  Antisense strand to SEQ ID NO: 2486782
guuugcaugagaaaccucc

SEQ ID NO: 2486784 - RNA, 19 nt, Artificial Sequence
  Description of Artificial Sequence: Synthetic oligonucleotide
  Sense strand starting at position 727 of SEQ ID NO: 1887648
ccagaugucugguucuucu

SEQ ID NO: 2486785 - RNA, 19 nt, Artificial Sequence
  Description of Artificial Sequence: Synthetic oligonucleotide
  Antisense strand to SEQ ID NO: 2486784
agaagaaccagacaucugg

SEQ ID NO: 2486786 - RNA, 19 nt, Artificial Sequence
  Description of Artificial Sequence: Synthetic oligonucleotide
  Sense strand starting at position 776 of SEQ ID NO: 1887648
cgguguuagccucgcauca

SEQ ID NO: 2486787 - RNA, 19 nt, Artificial Sequence
  Description of Artificial Sequence: Synthetic oligonucleotide
  Antisense strand to SEQ ID NO: 2486786
ugaugcgaggcuaacaccg

SEQ ID NO: 2486788 - RNA, 19 nt, Artificial Sequence
  Description of Artificial Sequence: Synthetic oligonucleotide
  Sense strand starting at position 838 of SEQ ID NO: 1887648
gguugugacucuuuccucu

SEQ ID NO: 2486789 - RNA, 19 nt, Artificial Sequence
  Description of Artificial Sequence: Synthetic oligonucleotide
  Antisense strand to SEQ ID NO: 2486788
agaggaaagagucacaacc

SEQ ID NO: 2486790 - RNA, 19 nt, Artificial Sequence
  Description of Artificial Sequence: Synthetic oligonucleotide
  Sense strand starting at position 845 of SEQ ID NO: 1887648
acucuuuccucugugcaga

SEQ ID NO: 2486791 - RNA, 19 nt, Artificial Sequence
  Description of Artificial Sequence: Synthetic oligonucleotide
  Antisense strand to SEQ ID NO: 2486790
ucugcacagaggaaagagu

SEQ ID NO: 2486792 - RNA, 19 nt, Artificial Sequence
  Description of Artificial Sequence: Synthetic oligonucleotide
  Sense strand starting at position 1269 of SEQ ID NO: 1887648
aggaguucuacgugcugag

SEQ ID NO: 2486793 - RNA, 19 nt, Artificial Sequence
  Description of Artificial Sequence: Synthetic oligonucleotide
  Antisense strand to SEQ ID NO: 2486792
cucagcacguagaacuccu

SEQ ID NO: 2486794 - RNA, 19 nt, Artificial Sequence
  Description of Artificial Sequence: Synthetic oligonucleotide
  Sense strand starting at position 1899 of SEQ ID NO: 1887648
acgagaaccuggccuugaa

SEQ ID NO: 2486795 - RNA, 19 nt, Artificial Sequence
  Description of Artificial Sequence: Synthetic oligonucleotide
  Antisense strand to SEQ ID NO: 2486794
uucaaggccagguucucgu

SEQ ID NO: 2486796 - RNA, 19 nt, Artificial Sequence
  Description of Artificial Sequence: Synthetic oligonucleotide
  Sense strand starting at position 2012 of SEQ ID NO: 1887648
gagccuccuuguucucaga

SEQ ID NO: 2486797 - RNA, 19 nt, Artificial Sequence
  Description of Artificial Sequence: Synthetic oligonucleotide
  Antisense strand to SEQ ID NO: 2486796
ucugagaacaaggaggcuc

SEQ ID NO: 2486798 - RNA, 19 nt, Artificial Sequence
  Description of Artificial Sequence: Synthetic oligonucleotide
  Sense strand starting at position 2015 of SEQ ID NO: 1887648
ccuccuuguucucagagca

SEQ ID NO: 2486799 - RNA, 19 nt, Artificial Sequence
  Description of Artificial Sequence: Synthetic oligonucleotide
  Antisense strand to SEQ ID NO: 2486798
ugcucugagaacaaggagg

SEQ ID NO: 2486800 - RNA, 19 nt, Artificial Sequence
  Description of Artificial Sequence: Synthetic oligonucleotide
  Sense strand starting at position 2145 of SEQ ID NO: 1887648
cggugacgugcguuagcua

SEQ ID NO: 2486801 - RNA, 19 nt, Artificial Sequence
  Description of Artificial Sequence: Synthetic oligonucleotide
  Antisense strand to SEQ ID NO: 2486800
uagcuaacgcacgucaccg

SEQ ID NO: 2486802 - RNA, 19 nt, Artificial Sequence
  Description of Artificial Sequence: Synthetic oligonucleotide
  Sense strand starting at position 2153 of SEQ ID NO: 1887648
ugcguuagcuagugcagua

SEQ ID NO: 2486803 - RNA, 19 nt, Artificial Sequence
  Description of Artificial Sequence: Synthetic oligonucleotide
  Antisense strand to SEQ ID NO: 2486802
uacugcacuagcuaacgca

SEQ ID NO: 2486804 - RNA, 19 nt, Artificial Sequence
  Description of Artificial Sequence: Synthetic oligonucleotide
  Sense strand starting at position 2371 of SEQ ID NO: 1887648
cugaccuucucgugggaca

SEQ ID NO: 2486805 - RNA, 19 nt, Artificial Sequence
  Description of Artificial Sequence: Synthetic oligonucleotide
  Antisense strand to SEQ ID NO: 2486804
ugucccacgagaaggucag

SEQ ID NO: 2486806 - RNA, 19 nt, Artificial Sequence
  Description of Artificial Sequence: Synthetic oligonucleotide
  Sense strand starting at position 2372 of SEQ ID NO: 1887648
ugaccuucucgugggacau

SEQ ID NO: 2486807 - RNA, 19 nt, Artificial Sequence
  Description of Artificial Sequence: Synthetic oligonucleotide
  Antisense strand to SEQ ID NO: 2486806
augucccacgagaagguca

SEQ ID NO: 2486808 - RNA, 19 nt, Artificial Sequence
  Description of Artificial Sequence: Synthetic oligonucleotide
  Sense strand starting at position 2465 of SEQ ID NO: 1887648
ucgagaagcucuugugaaa

SEQ ID NO: 2486809 - RNA, 19 nt, Artificial Sequence
  Description of Artificial Sequence: Synthetic oligonucleotide
  Antisense strand to SEQ ID NO: 2486808
uuucacaagagcuucucga

SEQ ID NO: 2486810 - RNA, 19 nt, Artificial Sequence
  Description of Artificial Sequence: Synthetic oligonucleotide
  Sense strand starting at position 2560 of SEQ ID NO: 1887648
ccaagccaccucuggaaau

SEQ ID NO: 2486811 - RNA, 19 nt, Artificial Sequence
  Description of Artificial Sequence: Synthetic oligonucleotide
  Antisense strand to SEQ ID NO: 2486810
auuuccagagguggcuugg

SEQ ID NO: 2486812 - RNA, 19 nt, Artificial Sequence
  Description of Artificial Sequence: Synthetic oligonucleotide
  Sense strand starting at position 2615 of SEQ ID NO: 1887648
gccguggagcuguggaauu

SEQ ID NO: 2486813 - RNA, 19 nt, Artificial Sequence
  Description of Artificial Sequence: Synthetic oligonucleotide
  Antisense strand to SEQ ID NO: 2486812
aauuccacagcuccacggc

SEQ ID NO: 2486814 - RNA, 19 nt, Artificial Sequence
  Description of Artificial Sequence: Synthetic oligonucleotide
  Sense strand starting at position 2738 of SEQ ID NO: 1887648
cuugguaacugugucauga

SEQ ID NO: 2486815 - RNA, 19 nt, Artificial Sequence
  Description of Artificial Sequence: Synthetic oligonucleotide
  Antisense strand to SEQ ID NO: 2486814
ucaugacacaguuaccaag

SEQ ID NO: 2486816 - RNA, 19 nt, Artificial Sequence
  Description of Artificial Sequence: Synthetic oligonucleotide
  Sense strand starting at position 2742 of SEQ ID NO: 1887648
guaacugugucaugaagcu

SEQ ID NO: 2486817 - RNA, 19 nt, Artificial Sequence
  Description of Artificial Sequence: Synthetic oligonucleotide
  Antisense strand to SEQ ID NO: 2486816
agcuucaugacacaguuac

SEQ ID NO: 2486818 - RNA, 19 nt, Artificial Sequence
  Description of Artificial Sequence: Synthetic oligonucleotide
  Sense strand starting at position 2952 of SEQ ID NO: 1887648
auaaacagguuguuugaau

SEQ ID NO: 2486819 - RNA, 19 nt, Artificial Sequence
  Description of Artificial Sequence: Synthetic oligonucleotide
  Antisense strand to SEQ ID NO: 2486818
auucaaacaaccuguuuau

SEQ ID NO: 2486820 - RNA, 19 nt, Artificial Sequence
  Description of Artificial Sequence: Synthetic oligonucleotide
  Sense strand starting at position 2953 of SEQ ID NO: 1887648
uaaacagguuguuugaaua

SEQ ID NO: 2486821 - RNA, 19 nt, Artificial Sequence
  Description of Artificial Sequence: Synthetic oligonucleotide
  Antisense strand to SEQ ID NO: 2486820
uauucaaacaaccuguuua

SEQ ID NO: 2486822 - RNA, 19 nt, Artificial Sequence
  Description of Artificial Sequence: Synthetic oligonucleotide
  Sense strand starting at position 2966 of SEQ ID NO: 1887648
ugaauauaguuucuugguu

SEQ ID NO: 2486823 - RNA, 19 nt, Artificial Sequence
  Description of Artificial Sequence: Synthetic oligonucleotide
  Antisense strand to SEQ ID NO: 2486822
aaccaagaaacuauauuca

SEQ ID NO: 2486824 - RNA, 19 nt, Artificial Sequence
  Description of Artificial Sequence: Synthetic oligonucleotide
  Sense strand starting at position 3048 of SEQ ID NO: 1887648
ggguguggcucccugucaa

SEQ ID NO: 2486825 - RNA, 19 nt, Artificial Sequence
  Description of Artificial Sequence: Synthetic oligonucleotide
  Antisense strand to SEQ ID NO: 2486824
uugacagggagccacaccc

SEQ ID NO: 2486826 - RNA, 19 nt, Artificial Sequence
  Description of Artificial Sequence: Synthetic oligonucleotide
  Sense strand starting at position 3139 of SEQ ID NO: 1887648
gaggaagucccgugcgcua

SEQ ID NO: 2486827 - RNA, 19 nt, Artificial Sequence
  Description of Artificial Sequence: Synthetic oligonucleotide
  Antisense strand to SEQ ID NO: 2486826
uagcgcacgggacuuccuc

SEQ ID NO: 2486828 - RNA, 19 nt, Artificial Sequence
  Description of Artificial Sequence: Synthetic oligonucleotide
  Sense strand starting at position 3314 of SEQ ID NO: 1887648
gggcuuggguaugaugaaa

SEQ ID NO: 2486829 - RNA, 19 nt, Artificial Sequence
  Description of Artificial Sequence: Synthetic oligonucleotide
  Antisense strand to SEQ ID NO: 2486828
uuucaucauacccaagccc

SEQ ID NO: 2486830 - RNA, 19 nt, Artificial Sequence
  Description of Artificial Sequence: Synthetic oligonucleotide
  Sense strand starting at position 3326 of SEQ ID NO: 1887648
gaugaaaggucuugagcug

SEQ ID NO: 2486831 - RNA, 19 nt, Artificial Sequence
  Description of Artificial Sequence: Synthetic oligonucleotide
  Antisense strand to SEQ ID NO: 2486830
cagcucaagaccuuucauc

SEQ ID NO: 2486832 - RNA, 19 nt, Artificial Sequence
  Description of Artificial Sequence: Synthetic oligonucleotide
  Sense strand starting at position 3331 of SEQ ID NO: 1887648
aaggucuugagcugggaga

SEQ ID NO: 2486833 - RNA, 19 nt, Artificial Sequence
  Description of Artificial Sequence: Synthetic oligonucleotide
  Antisense strand to SEQ ID NO: 2486832
ucucccagcucaagaccuu

SEQ ID NO: 2486834 - RNA, 19 nt, Artificial Sequence
  Description of Artificial Sequence: Synthetic oligonucleotide
  Sense strand starting at position 3332 of SEQ ID NO: 1887648
aggucuugagcugggagau

SEQ ID NO: 2486835 - RNA, 19 nt, Artificial Sequence
  Description of Artificial Sequence: Synthetic oligonucleotide
  Antisense strand to SEQ ID NO: 2486834
aucucccagcucaagaccu

SEQ ID NO: 2486836 - RNA, 19 nt, Artificial Sequence
  Description of Artificial Sequence: Synthetic oligonucleotide
  Sense strand starting at position 3345 of SEQ ID NO: 1887648
ggagaugauccuggguggu

SEQ ID NO: 2486837 - RNA, 19 nt, Artificial Sequence
  Description of Artificial Sequence: Synthetic oligonucleotide
  Antisense strand to SEQ ID NO: 2486836
accacccaggaucaucucc

SEQ ID NO: 2486838 - RNA, 19 nt, Artificial Sequence
  Description of Artificial Sequence: Synthetic oligonucleotide
  Sense strand starting at position 3368 of SEQ ID NO: 1887648
gacccaguguccucacaag

SEQ ID NO: 2486839 - RNA, 19 nt, Artificial Sequence
  Description of Artificial Sequence: Synthetic oligonucleotide
  Antisense strand to SEQ ID NO: 2486838
cuugugaggacacuggguc

SEQ ID NO: 2486840 - RNA, 19 nt, Artificial Sequence
  Description of Artificial Sequence: Synthetic oligonucleotide
  Sense strand starting at position 3574 of SEQ ID NO: 1887648
gugagauggugacuugcuu

SEQ ID NO: 2486841 - RNA, 19 nt, Artificial Sequence
  Description of Artificial Sequence: Synthetic oligonucleotide
  Antisense strand to SEQ ID NO: 2486840
aagcaagucaccaucucac

SEQ ID NO: 2486842 - RNA, 19 nt, Artificial Sequence
  Description of Artificial Sequence: Synthetic oligonucleotide
  Sense strand starting at position 3578 of SEQ ID NO: 1887648
gauggugacuugcuuuaag

SEQ ID NO: 2486843 - RNA, 19 nt, Artificial Sequence
  Description of Artificial Sequence: Synthetic oligonucleotide
  Antisense strand to SEQ ID NO: 2486842
cuuaaagcaagucaccauc

SEQ ID NO: 2486844 - RNA, 19 nt, Artificial Sequence
  Description of Artificial Sequence: Synthetic oligonucleotide
  Sense strand starting at position 3581 of SEQ ID NO: 1887648
ggugacuugcuuuaagcca

SEQ ID NO: 2486845 - RNA, 19 nt, Artificial Sequence
  Description of Artificial Sequence: Synthetic oligonucleotide
  Antisense strand to SEQ ID NO: 2486844
uggcuuaaagcaagucacc

SEQ ID NO: 2486846 - RNA, 19 nt, Artificial Sequence
  Description of Artificial Sequence: Synthetic oligonucleotide
  Sense strand starting at position 3600 of SEQ ID NO: 1887648
ccagguuugugguacagca

SEQ ID NO: 2486847 - RNA, 19 nt, Artificial Sequence
  Description of Artificial Sequence: Synthetic oligonucleotide
  Antisense strand to SEQ ID NO: 2486846
ugcuguaccacaaaccugg

SEQ ID NO: 2486848 - RNA, 19 nt, Artificial Sequence
  Description of Artificial Sequence: Synthetic oligonucleotide
  Sense strand starting at position 3881 of SEQ ID NO: 1887648
uguaaagcucaucaaaggu

SEQ ID NO: 2486849 - RNA, 19 nt, Artificial Sequence
  Description of Artificial Sequence: Synthetic oligonucleotide
  Antisense strand to SEQ ID NO: 2486848
accuuugaugagcuuuaca

SEQ ID NO: 2486850 - RNA, 19 nt, Artificial Sequence
  Description of Artificial Sequence: Synthetic oligonucleotide
  Sense strand starting at position 26 of SEQ ID NO: 1887649
guacuaucacucggccaca

SEQ ID NO: 2486851 - RNA, 19 nt, Artificial Sequence
  Description of Artificial Sequence: Synthetic oligonucleotide
  Antisense strand to SEQ ID NO: 2486850
uguggccgagugauaguac

SEQ ID NO: 2486852 - RNA, 19 nt, Artificial Sequence
  Description of Artificial Sequence: Synthetic oligonucleotide
  Sense strand starting at position 53 of SEQ ID NO: 1887649
ggaaauuccgaccaggcua

SEQ ID NO: 2486853 - RNA, 19 nt, Artificial Sequence
  Description of Artificial Sequence: Synthetic oligonucleotide
  Antisense strand to SEQ ID NO: 2486852
uagccuggucggaauuucc

SEQ ID NO: 2486854 - RNA, 19 nt, Artificial Sequence
  Description of Artificial Sequence: Synthetic oligonucleotide
  Sense strand starting at position 128 of SEQ ID NO: 1887649
ggacaaauccugugugauc

SEQ ID NO: 2486855 - RNA, 19 nt, Artificial Sequence
  Description of Artificial Sequence: Synthetic oligonucleotide
  Antisense strand to SEQ ID NO: 2486854
gaucacacaggauuugucc

SEQ ID NO: 2486856 - RNA, 19 nt, Artificial Sequence
  Description of Artificial Sequence: Synthetic oligonucleotide
  Sense strand starting at position 262 of SEQ ID NO: 1887649
aggacaaagugcuggagau

SEQ ID NO: 2486857 - RNA, 19 nt, Artificial Sequence
  Description of Artificial Sequence: Synthetic oligonucleotide
  Antisense strand to SEQ ID NO: 2486856
aucuccagcacuuuguccu

SEQ ID NO: 2486858 - RNA, 19 nt, Artificial Sequence
  Description of Artificial Sequence: Synthetic oligonucleotide
  Sense strand starting at position 263 of SEQ ID NO: 1887649
ggacaaagugcuggagaug

SEQ ID NO: 2486859 - RNA, 19 nt, Artificial Sequence
  Description of Artificial Sequence: Synthetic oligonucleotide
  Antisense strand to SEQ ID NO: 2486858
caucuccagcacuuugucc

SEQ ID NO: 2486860 - RNA, 19 nt, Artificial Sequence
  Description of Artificial Sequence: Synthetic oligonucleotide
  Sense strand starting at position 272 of SEQ ID NO: 1887649
gcuggagaugguugcguaa

SEQ ID NO: 2486861 - RNA, 19 nt, Artificial Sequence
  Description of Artificial Sequence: Synthetic oligonucleotide
  Antisense strand to SEQ ID NO: 2486860
uuacgcaaccaucuccagc

SEQ ID NO: 2486862 - RNA, 19 nt, Artificial Sequence
  Description of Artificial Sequence: Synthetic oligonucleotide
  Sense strand starting at position 275 of SEQ ID NO: 1887649
ggagaugguugcguaacaa

SEQ ID NO: 2486863 - RNA, 19 nt, Artificial Sequence
  Description of Artificial Sequence: Synthetic oligonucleotide
  Antisense strand to SEQ ID NO: 2486862
uuguuacgcaaccaucucc

SEQ ID NO: 2486864 - RNA, 19 nt, Artificial Sequence
  Description of Artificial Sequence: Synthetic oligonucleotide
  Sense strand starting at position 291 of SEQ ID NO: 1887649
caacguaaaugcguuuaau

SEQ ID NO: 2486865 - RNA, 19 nt, Artificial Sequence
  Description of Artificial Sequence: Synthetic oligonucleotide
  Antisense strand to SEQ ID NO: 2486864
auuaaacgcauuuacguug

SEQ ID NO: 2486866 - RNA, 19 nt, Artificial Sequence
  Description of Artificial Sequence: Synthetic oligonucleotide
  Sense strand starting at position 312 of SEQ ID NO: 1887649
caccgaacugugcgcuuaa

SEQ ID NO: 2486867 - RNA, 19 nt, Artificial Sequence
  Description of Artificial Sequence: Synthetic oligonucleotide
  Antisense strand to SEQ ID NO: 2486866
uuaagcgcacaguucggug

SEQ ID NO: 2486868 - RNA, 19 nt, Artificial Sequence
  Description of Artificial Sequence: Synthetic oligonucleotide
  Sense strand starting at position 313 of SEQ ID NO: 1887649
accgaacugugcgcuuaaa

SEQ ID NO: 2486869 - RNA, 19 nt, Artificial Sequence
  Description of Artificial Sequence: Synthetic oligonucleotide
  Antisense strand to SEQ ID NO: 2486868
uuuaagcgcacaguucggu

SEQ ID NO: 2486870 - RNA, 19 nt, Artificial Sequence
  Description of Artificial Sequence: Synthetic oligonucleotide
  Sense strand starting at position 325 of SEQ ID NO: 1887649
gcuuaaacaugguuccaau

SEQ ID NO: 2486871 - RNA, 19 nt, Artificial Sequence
  Description of Artificial Sequence: Synthetic oligonucleotide
  Antisense strand to SEQ ID NO: 2486870
auuggaaccauguuuaagc

SEQ ID NO: 2486872 - RNA, 19 nt, Artificial Sequence
  Description of Artificial Sequence: Synthetic oligonucleotide
  Sense strand starting at position 811 of SEQ ID NO: 1887649
cgcauagucucuguugcaa

SEQ ID NO: 2486873 - RNA, 19 nt, Artificial Sequence
  Description of Artificial Sequence: Synthetic oligonucleotide
  Antisense strand to SEQ ID NO: 2486872
uugcaacagagacuaugcg

SEQ ID NO: 2486874 - RNA, 19 nt, Artificial Sequence
  Description of Artificial Sequence: Synthetic oligonucleotide
  Sense strand starting at position 977 of SEQ ID NO: 1887649
gugguuuggcguguauguu

SEQ ID NO: 2486875 - RNA, 19 nt, Artificial Sequence
  Description of Artificial Sequence: Synthetic oligonucleotide
  Antisense strand to SEQ ID NO: 2486874
aacauacacgccaaaccac

SEQ ID NO: 2486876 - RNA, 19 nt, Artificial Sequence
  Description of Artificial Sequence: Synthetic oligonucleotide
  Sense strand starting at position 978 of SEQ ID NO: 1887649
ugguuuggcguguauguuu

SEQ ID NO: 2486877 - RNA, 19 nt, Artificial Sequence
  Description of Artificial Sequence: Synthetic oligonucleotide
  Antisense strand to SEQ ID NO: 2486876
aaacauacacgccaaacca

SEQ ID NO: 2486878 - RNA, 19 nt, Artificial Sequence
  Description of Artificial Sequence: Synthetic oligonucleotide
  Sense strand starting at position 983 of SEQ ID NO: 1887649
uggcguguauguuuaugaa

SEQ ID NO: 2486879 - RNA, 19 nt, Artificial Sequence
  Description of Artificial Sequence: Synthetic oligonucleotide
  Antisense strand to SEQ ID NO: 2486878
uucauaaacauacacgcca

SEQ ID NO: 2486880 - RNA, 19 nt, Artificial Sequence
  Description of Artificial Sequence: Synthetic oligonucleotide
  Sense strand starting at position 987 of SEQ ID NO: 1887649
guguauguuuaugaacaga

SEQ ID NO: 2486881 - RNA, 19 nt, Artificial Sequence
  Description of Artificial Sequence: Synthetic oligonucleotide
  Antisense strand to SEQ ID NO: 2486880
ucuguucauaaacauacac

SEQ ID NO: 2486882 - RNA, 19 nt, Artificial Sequence
  Description of Artificial Sequence: Synthetic oligonucleotide
  Sense strand starting at position 1002 of SEQ ID NO: 1887649
cagaaugucccuggaaagu

SEQ ID NO: 2486883 - RNA, 19 nt, Artificial Sequence
  Description of Artificial Sequence: Synthetic oligonucleotide
  Antisense strand to SEQ ID NO: 2486882
acuuuccagggacauucug

SEQ ID NO: 2486884 - RNA, 19 nt, Artificial Sequence
  Description of Artificial Sequence: Synthetic oligonucleotide
  Sense strand starting at position 1012 of SEQ ID NO: 1887649
cuggaaaguugguaacagu

SEQ ID NO: 2486885 - RNA, 19 nt, Artificial Sequence
  Description of Artificial Sequence: Synthetic oligonucleotide
  Antisense strand to SEQ ID NO: 2486884
acuguuaccaacuuuccag

SEQ ID NO: 2486886 - RNA, 19 nt, Artificial Sequence
  Description of Artificial Sequence: Synthetic oligonucleotide
  Sense strand starting at position 1015 of SEQ ID NO: 1887649
gaaaguugguaacagugau

SEQ ID NO: 2486887 - RNA, 19 nt, Artificial Sequence
  Description of Artificial Sequence: Synthetic oligonucleotide
  Antisense strand to SEQ ID NO: 2486886
aucacuguuaccaacuuuc

SEQ ID NO: 2486888 - RNA, 19 nt, Artificial Sequence
  Description of Artificial Sequence: Synthetic oligonucleotide
  Sense strand starting at position 1089 of SEQ ID NO: 1887649
ggucuugggugcuuucuau

SEQ ID NO: 2486889 - RNA, 19 nt, Artificial Sequence
  Description of Artificial Sequence: Synthetic oligonucleotide
  Antisense strand to SEQ ID NO: 2486888
auagaaagcacccaagacc

SEQ ID NO: 2486890 - RNA, 19 nt, Artificial Sequence
  Description of Artificial Sequence: Synthetic oligonucleotide
  Sense strand starting at position 1555 of SEQ ID NO: 1887649
uagaaagaugcucagcagu

SEQ ID NO: 2486891 - RNA, 19 nt, Artificial Sequence
  Description of Artificial Sequence: Synthetic oligonucleotide
  Antisense strand to SEQ ID NO: 2486890
acugcugagcaucuuucua

SEQ ID NO: 2486892 - RNA, 19 nt, Artificial Sequence
  Description of Artificial Sequence: Synthetic oligonucleotide
  Sense strand starting at position 1557 of SEQ ID NO: 1887649
gaaagaugcucagcaguga

SEQ ID NO: 2486893 - RNA, 19 nt, Artificial Sequence
  Description of Artificial Sequence: Synthetic oligonucleotide
  Antisense strand to SEQ ID NO: 2486892
ucacugcugagcaucuuuc

SEQ ID NO: 2486894 - RNA, 19 nt, Artificial Sequence
  Description of Artificial Sequence: Synthetic oligonucleotide
  Sense strand starting at position 1993 of SEQ ID NO: 1887649
uccuucccucaaugggaaa

SEQ ID NO: 2486895 - RNA, 19 nt, Artificial Sequence
  Description of Artificial Sequence: Synthetic oligonucleotide
  Antisense strand to SEQ ID NO: 2486894
uuucccauugagggaagga

SEQ ID NO: 2486896 - RNA, 19 nt, Artificial Sequence
  Description of Artificial Sequence: Synthetic oligonucleotide
  Sense strand starting at position 2103 of SEQ ID NO: 1887649
aggcacauuccagguacaa

SEQ ID NO: 2486897 - RNA, 19 nt, Artificial Sequence
  Description of Artificial Sequence: Synthetic oligonucleotide
  Antisense strand to SEQ ID NO: 2486896
uuguaccuggaaugugccu

SEQ ID NO: 2486898 - RNA, 19 nt, Artificial Sequence
  Description of Artificial Sequence: Synthetic oligonucleotide
  Sense strand starting at position 2222 of SEQ ID NO: 1887649
gauagaaccuuugcagaug

SEQ ID NO: 2486899 - RNA, 19 nt, Artificial Sequence
  Description of Artificial Sequence: Synthetic oligonucleotide
  Antisense strand to SEQ ID NO: 2486898
caucugcaaagguucuauc

SEQ ID NO: 2486900 - RNA, 19 nt, Artificial Sequence
  Description of Artificial Sequence: Synthetic oligonucleotide
  Sense strand starting at position 2246 of SEQ ID NO: 1887649
auauuaagaugagaucaca

SEQ ID NO: 2486901 - RNA, 19 nt, Artificial Sequence
  Description of Artificial Sequence: Synthetic oligonucleotide
  Antisense strand to SEQ ID NO: 2486900
ugugaucucaucuuaauau

SEQ ID NO: 2486902 - RNA, 19 nt, Artificial Sequence
  Description of Artificial Sequence: Synthetic oligonucleotide
  Sense strand starting at position 2291 of SEQ ID NO: 1887649
caggacuggugucuuuaga

SEQ ID NO: 2486903 - RNA, 19 nt, Artificial Sequence
  Description of Artificial Sequence: Synthetic oligonucleotide
  Antisense strand to SEQ ID NO: 2486902
ucuaaagacaccaguccug

SEQ ID NO: 2486904 - RNA, 19 nt, Artificial Sequence
  Description of Artificial Sequence: Synthetic oligonucleotide
  Sense strand starting at position 3346 of SEQ ID NO: 1887649
caaccaauguccguguuua

SEQ ID NO: 2486905 - RNA, 19 nt, Artificial Sequence
  Description of Artificial Sequence: Synthetic oligonucleotide
  Antisense strand to SEQ ID NO: 2486904
uaaacacggacauugguug

SEQ ID NO: 2486906 - RNA, 19 nt, Artificial Sequence
  Description of Artificial Sequence: Synthetic oligonucleotide
  Sense strand starting at position 3347 of SEQ ID NO: 1887649
aaccaauguccguguuuaa

SEQ ID NO: 2486907 - RNA, 19 nt, Artificial Sequence
  Description of Artificial Sequence: Synthetic oligonucleotide
  Antisense strand to SEQ ID NO: 2486906
uuaaacacggacauugguu

SEQ ID NO: 2486908 - RNA, 19 nt, Artificial Sequence
  Description of Artificial Sequence: Synthetic oligonucleotide
  Sense strand starting at position 3365 of SEQ ID NO: 1887649
agccacaccgucugugaaa

SEQ ID NO: 2486909 - RNA, 19 nt, Artificial Sequence
  Description of Artificial Sequence: Synthetic oligonucleotide
  Antisense strand to SEQ ID NO: 2486908
uuucacagacgguguggcu

SEQ ID NO: 2486910 - RNA, 19 nt, Artificial Sequence
  Description of Artificial Sequence: Synthetic oligonucleotide
  Sense strand starting at position 3366 of SEQ ID NO: 1887649
gccacaccgucugugaaau

SEQ ID NO: 2486911 - RNA, 19 nt, Artificial Sequence
  Description of Artificial Sequence: Synthetic oligonucleotide
  Antisense strand to SEQ ID NO: 2486910
auuucacagacgguguggc

SEQ ID NO: 2486912 - RNA, 19 nt, Artificial Sequence
  Description of Artificial Sequence: Synthetic oligonucleotide
  Sense strand starting at position 3378 of SEQ ID NO: 1887649
gugaaaucucacgauggca

SEQ ID NO: 2486913 - RNA, 19 nt, Artificial Sequence
  Description of Artificial Sequence: Synthetic oligonucleotide
  Antisense strand to SEQ ID NO: 2486912
ugccaucgugagauuucac

SEQ ID NO: 2486914 - RNA, 19 nt, Artificial Sequence
  Description of Artificial Sequence: Synthetic oligonucleotide
  Sense strand starting at position 3456 of SEQ ID NO: 1887649
guaggaagugcccaguaaa

SEQ ID NO: 2486915 - RNA, 19 nt, Artificial Sequence
  Description of Artificial Sequence: Synthetic oligonucleotide
  Antisense strand to SEQ ID NO: 2486914
uuuacugggcacuuccuac

SEQ ID NO: 2486916 - RNA, 19 nt, Artificial Sequence
  Description of Artificial Sequence: Synthetic oligonucleotide
  Sense strand starting at position 3470 of SEQ ID NO: 1887649
guaaacacuugugcaaaga

SEQ ID NO: 2486917 - RNA, 19 nt, Artificial Sequence
  Description of Artificial Sequence: Synthetic oligonucleotide
  Antisense strand to SEQ ID NO: 2486916
ucuuugcacaaguguuuac

SEQ ID NO: 2486918 - RNA, 19 nt, Artificial Sequence
  Description of Artificial Sequence: Synthetic oligonucleotide
  Sense strand starting at position 3673 of SEQ ID NO: 1887649
cuguuaggaauucgaggau

SEQ ID NO: 2486919 - RNA, 19 nt, Artificial Sequence
  Description of Artificial Sequence: Synthetic oligonucleotide
  Antisense strand to SEQ ID NO: 2486918
auccucgaauuccuaacag

SEQ ID NO: 2486920 - RNA, 19 nt, Artificial Sequence
  Description of Artificial Sequence: Synthetic oligonucleotide
  Sense strand starting at position 3801 of SEQ ID NO: 1887649
ccaugacucacucgucgua

SEQ ID NO: 2486921 - RNA, 19 nt, Artificial Sequence
  Description of Artificial Sequence: Synthetic oligonucleotide
  Antisense strand to SEQ ID NO: 2486920
uacgacgagugagucaugg

SEQ ID NO: 2486922 - RNA, 19 nt, Artificial Sequence
  Description of Artificial Sequence: Synthetic oligonucleotide
  Sense strand starting at position 3803 of SEQ ID NO: 1887649
augacucacucgucguauu

SEQ ID NO: 2486923 - RNA, 19 nt, Artificial Sequence
  Description of Artificial Sequence: Synthetic oligonucleotide
  Antisense strand to SEQ ID NO: 2486922
aauacgacgagugagucau

SEQ ID NO: 2486924 - RNA, 19 nt, Artificial Sequence
  Description of Artificial Sequence: Synthetic oligonucleotide
  Sense strand starting at position 3804 of SEQ ID NO: 1887649
ugacucacucgucguauuu

SEQ ID NO: 2486925 - RNA, 19 nt, Artificial Sequence
  Description of Artificial Sequence: Synthetic oligonucleotide
  Antisense strand to SEQ ID NO: 2486924
aaauacgacgagugaguca

SEQ ID NO: 2486926 - RNA, 19 nt, Artificial Sequence
  Description of Artificial Sequence: Synthetic oligonucleotide
  Sense strand starting at position 3960 of SEQ ID NO: 1887649
cguacucauugaccuguga

SEQ ID NO: 2486927 - RNA, 19 nt, Artificial Sequence
  Description of Artificial Sequence: Synthetic oligonucleotide
  Antisense strand to SEQ ID NO: 2486926
ucacaggucaaugaguacg

SEQ ID NO: 2486928 - RNA, 19 nt, Artificial Sequence
  Description of Artificial Sequence: Synthetic oligonucleotide
  Sense strand starting at position 3964 of SEQ ID NO: 1887649
cucauugaccugugaggaa

SEQ ID NO: 2486929 - RNA, 19 nt, Artificial Sequence
  Description of Artificial Sequence: Synthetic oligonucleotide
  Antisense strand to SEQ ID NO: 2486928
uuccucacaggucaaugag

SEQ ID NO: 2486930 - RNA, 19 nt, Artificial Sequence
  Description of Artificial Sequence: Synthetic oligonucleotide
  Sense strand starting at position 192 of SEQ ID NO: 1887650
gaggccuugucucacaaga

SEQ ID NO: 2486931 - RNA, 19 nt, Artificial Sequence
  Description of Artificial Sequence: Synthetic oligonucleotide
  Antisense strand to SEQ ID NO: 2486930
ucuugugagacaaggccuc

SEQ ID NO: 2486932 - RNA, 19 nt, Artificial Sequence
  Description of Artificial Sequence: Synthetic oligonucleotide
  Sense strand starting at position 194 of SEQ ID NO: 1887650
ggccuugucucacaagaaa

SEQ ID NO: 2486933 - RNA, 19 nt, Artificial Sequence
  Description of Artificial Sequence: Synthetic oligonucleotide
  Antisense strand to SEQ ID NO: 2486932
uuucuugugagacaaggcc

SEQ ID NO: 2486934 - RNA, 19 nt, Artificial Sequence
  Description of Artificial Sequence: Synthetic oligonucleotide
  Sense strand starting at position 303 of SEQ ID NO: 1887650
ggguauucauguccagaga

SEQ ID NO: 2486935 - RNA, 19 nt, Artificial Sequence
  Description of Artificial Sequence: Synthetic oligonucleotide
  Antisense strand to SEQ ID NO: 2486934
ucucuggacaugaauaccc

SEQ ID NO: 2486936 - RNA, 19 nt, Artificial Sequence
  Description of Artificial Sequence: Synthetic oligonucleotide
  Sense strand starting at position 304 of SEQ ID NO: 1887650
gguauucauguccagagag

SEQ ID NO: 2486937 - RNA, 19 nt, Artificial Sequence
  Description of Artificial Sequence: Synthetic oligonucleotide
  Antisense strand to SEQ ID NO: 2486936
cucucuggacaugaauacc

SEQ ID NO: 2486938 - RNA, 19 nt, Artificial Sequence
  Description of Artificial Sequence: Synthetic oligonucleotide
  Sense strand starting at position 783 of SEQ ID NO: 1887650
gugcauguuucucuugaga

SEQ ID NO: 2486939 - RNA, 19 nt, Artificial Sequence
  Description of Artificial Sequence: Synthetic oligonucleotide
  Antisense strand to SEQ ID NO: 2486938
ucucaagagaaacaugcac

SEQ ID NO: 2486940 - RNA, 19 nt, Artificial Sequence
  Description of Artificial Sequence: Synthetic oligonucleotide
  Sense strand starting at position 786 of SEQ ID NO: 1887650
cauguuucucuugagaagc

SEQ ID NO: 2486941 - RNA, 19 nt, Artificial Sequence
  Description of Artificial Sequence: Synthetic oligonucleotide
  Antisense strand to SEQ ID NO: 2486940
gcuucucaagagaaacaug

SEQ ID NO: 2486942 - RNA, 19 nt, Artificial Sequence
  Description of Artificial Sequence: Synthetic oligonucleotide
  Sense strand starting at position 810 of SEQ ID NO: 1887650
agaggugccggucaucuau

SEQ ID NO: 2486943 - RNA, 19 nt, Artificial Sequence
  Description of Artificial Sequence: Synthetic oligonucleotide
  Antisense strand to SEQ ID NO: 2486942
auagaugaccggcaccucu

SEQ ID NO: 2486944 - RNA, 19 nt, Artificial Sequence
  Description of Artificial Sequence: Synthetic oligonucleotide
  Sense strand starting at position 836 of SEQ ID NO: 1887650
ggucuugugggaugugacu

SEQ ID NO: 2486945 - RNA, 19 nt, Artificial Sequence
  Description of Artificial Sequence: Synthetic oligonucleotide
  Antisense strand to SEQ ID NO: 2486944
agucacaucccacaagacc

SEQ ID NO: 2486946 - RNA, 19 nt, Artificial Sequence
  Description of Artificial Sequence: Synthetic oligonucleotide
  Sense strand starting at position 842 of SEQ ID NO: 1887650
gugggaugugacugcucuu

SEQ ID NO: 2486947 - RNA, 19 nt, Artificial Sequence
  Description of Artificial Sequence: Synthetic oligonucleotide
  Antisense strand to SEQ ID NO: 2486946
aagagcagucacaucccac

SEQ ID NO: 2486948 - RNA, 19 nt, Artificial Sequence
  Description of Artificial Sequence: Synthetic oligonucleotide
  Sense strand starting at position 871 of SEQ ID NO: 1887650
agaucucucuuggauccaa

SEQ ID NO: 2486949 - RNA, 19 nt, Artificial Sequence
  Description of Artificial Sequence: Synthetic oligonucleotide
  Antisense strand to SEQ ID NO: 2486948
uuggauccaagagagaucu

SEQ ID NO: 2486950 - RNA, 19 nt, Artificial Sequence
  Description of Artificial Sequence: Synthetic oligonucleotide
  Sense strand starting at position 949 of SEQ ID NO: 1887650
gaaccuagaucccugugaa

SEQ ID NO: 2486951 - RNA, 19 nt, Artificial Sequence
  Description of Artificial Sequence: Synthetic oligonucleotide
  Antisense strand to SEQ ID NO: 2486950
uucacagggaucuagguuc

SEQ ID NO: 2486952 - RNA, 19 nt, Artificial Sequence
  Description of Artificial Sequence: Synthetic oligonucleotide
  Sense strand starting at position 950 of SEQ ID NO: 1887650
aaccuagaucccugugaag

SEQ ID NO: 2486953 - RNA, 19 nt, Artificial Sequence
  Description of Artificial Sequence: Synthetic oligonucleotide
  Antisense strand to SEQ ID NO: 2486952
cuucacagggaucuagguu

SEQ ID NO: 2486954 - RNA, 19 nt, Artificial Sequence
  Description of Artificial Sequence: Synthetic oligonucleotide
  Sense strand starting at position 974 of SEQ ID NO: 1887650
gucaccaucaccuguguga

SEQ ID NO: 2486955 - RNA, 19 nt, Artificial Sequence
  Description of Artificial Sequence: Synthetic oligonucleotide
  Antisense strand to SEQ ID NO: 2486954
ucacacaggugauggugac

SEQ ID NO: 2486956 - RNA, 19 nt, Artificial Sequence
  Description of Artificial Sequence: Synthetic oligonucleotide
  Sense strand starting at position 1630 of SEQ ID NO: 1887650
ggaguugugagucauuagu

SEQ ID NO: 2486957 - RNA, 19 nt, Artificial Sequence
  Description of Artificial Sequence: Synthetic oligonucleotide
  Antisense strand to SEQ ID NO: 2486956
acuaaugacucacaacucc

SEQ ID NO: 2486958 - RNA, 19 nt, Artificial Sequence
  Description of Artificial Sequence: Synthetic oligonucleotide
  Sense strand starting at position 1632 of SEQ ID NO: 1887650
aguugugagucauuaguac

SEQ ID NO: 2486959 - RNA, 19 nt, Artificial Sequence
  Description of Artificial Sequence: Synthetic oligonucleotide
  Antisense strand to SEQ ID NO: 2486958
guacuaaugacucacaacu

SEQ ID NO: 2486960 - RNA, 19 nt, Artificial Sequence
  Description of Artificial Sequence: Synthetic oligonucleotide
  Sense strand starting at position 1641 of SEQ ID NO: 1887650
ucauuaguacgccaggaaa

SEQ ID NO: 2486961 - RNA, 19 nt, Artificial Sequence
  Description of Artificial Sequence: Synthetic oligonucleotide
  Antisense strand to SEQ ID NO: 2486960
uuuccuggcguacuaauga

SEQ ID NO: 2486962 - RNA, 19 nt, Artificial Sequence
  Description of Artificial Sequence: Synthetic oligonucleotide
  Sense strand starting at position 1734 of SEQ ID NO: 1887650
aagcgccuucguucuuaga

SEQ ID NO: 2486963 - RNA, 19 nt, Artificial Sequence
  Description of Artificial Sequence: Synthetic oligonucleotide
  Antisense strand to SEQ ID NO: 2486962
ucuaagaacgaaggcgcuu

SEQ ID NO: 2486964 - RNA, 19 nt, Artificial Sequence
  Description of Artificial Sequence: Synthetic oligonucleotide
  Sense strand starting at position 1735 of SEQ ID NO: 1887650
agcgccuucguucuuagaa

SEQ ID NO: 2486965 - RNA, 19 nt, Artificial Sequence
  Description of Artificial Sequence: Synthetic oligonucleotide
  Antisense strand to SEQ ID NO: 2486964
uucuaagaacgaaggcgcu

SEQ ID NO: 2486966 - RNA, 19 nt, Artificial Sequence
  Description of Artificial Sequence: Synthetic oligonucleotide
  Sense strand starting at position 1736 of SEQ ID NO: 1887650
gcgccuucguucuuagaaa

SEQ ID NO: 2486967 - RNA, 19 nt, Artificial Sequence
  Description of Artificial Sequence: Synthetic oligonucleotide
  Antisense strand to SEQ ID NO: 2486966
uuucuaagaacgaaggcgc

SEQ ID NO: 2486968 - RNA, 19 nt, Artificial Sequence
  Description of Artificial Sequence: Synthetic oligonucleotide
  Sense strand starting at position 1788 of SEQ ID NO: 1887650
aucagugagucaggaggaa

SEQ ID NO: 2486969 - RNA, 19 nt, Artificial Sequence
  Description of Artificial Sequence: Synthetic oligonucleotide
  Antisense strand to SEQ ID NO: 2486968
uuccuccugacucacugau

SEQ ID NO: 2486970 - RNA, 19 nt, Artificial Sequence
  Description of Artificial Sequence: Synthetic oligonucleotide
  Sense strand starting at position 1998 of SEQ ID NO: 1887650
gccacagauuugcuucuca

SEQ ID NO: 2486971 - RNA, 19 nt, Artificial Sequence
  Description of Artificial Sequence: Synthetic oligonucleotide
  Antisense strand to SEQ ID NO: 2486970
ugagaagcaaaucuguggc

SEQ ID NO: 2486972 - RNA, 19 nt, Artificial Sequence
  Description of Artificial Sequence: Synthetic oligonucleotide
  Sense strand starting at position 2160 of SEQ ID NO: 1887650
cucagacaucgagguggaa

SEQ ID NO: 2486973 - RNA, 19 nt, Artificial Sequence
  Description of Artificial Sequence: Synthetic oligonucleotide
  Antisense strand to SEQ ID NO: 2486972
uuccaccucgaugucugag

SEQ ID NO: 2486974 - RNA, 19 nt, Artificial Sequence
  Description of Artificial Sequence: Synthetic oligonucleotide
  Sense strand starting at position 2674 of SEQ ID NO: 1887650
gagcuaugauugucccagu

SEQ ID NO: 2486975 - RNA, 19 nt, Artificial Sequence
  Description of Artificial Sequence: Synthetic oligonucleotide
  Antisense strand to SEQ ID NO: 2486974
acugggacaaucauagcuc

SEQ ID NO: 2486976 - RNA, 19 nt, Artificial Sequence
  Description of Artificial Sequence: Synthetic oligonucleotide
  Sense strand starting at position 2808 of SEQ ID NO: 1887650
ugaugucaaccauggaugu

SEQ ID NO: 2486977 - RNA, 19 nt, Artificial Sequence
  Description of Artificial Sequence: Synthetic oligonucleotide
  Antisense strand to SEQ ID NO: 2486976
acauccaugguugacauca

SEQ ID NO: 2486978 - RNA, 19 nt, Artificial Sequence
  Description of Artificial Sequence: Synthetic oligonucleotide
  Sense strand starting at position 2858 of SEQ ID NO: 1887650
gcucaucaguucuagcaaa

SEQ ID NO: 2486979 - RNA, 19 nt, Artificial Sequence
  Description of Artificial Sequence: Synthetic oligonucleotide
  Antisense strand to SEQ ID NO: 2486978
uuugcuagaacugaugagc

SEQ ID NO: 2486980 - RNA, 19 nt, Artificial Sequence
  Description of Artificial Sequence: Synthetic oligonucleotide
  Sense strand starting at position 2913 of SEQ ID NO: 1887650
guuacagaugugugggcua

SEQ ID NO: 2486981 - RNA, 19 nt, Artificial Sequence
  Description of Artificial Sequence: Synthetic oligonucleotide
  Antisense strand to SEQ ID NO: 2486980
uagcccacacaucuguaac

SEQ ID NO: 2486982 - RNA, 19 nt, Artificial Sequence
  Description of Artificial Sequence: Synthetic oligonucleotide
  Sense strand starting at position 2915 of SEQ ID NO: 1887650
uacagaugugugggcuaua

SEQ ID NO: 2486983 - RNA, 19 nt, Artificial Sequence
  Description of Artificial Sequence: Synthetic oligonucleotide
  Antisense strand to SEQ ID NO: 2486982
uauagcccacacaucugua

SEQ ID NO: 2486984 - RNA, 19 nt, Artificial Sequence
  Description of Artificial Sequence: Synthetic oligonucleotide
  Sense strand starting at position 2927 of SEQ ID NO: 1887650
ggcuauagggcugauagga

SEQ ID NO: 2486985 - RNA, 19 nt, Artificial Sequence
  Description of Artificial Sequence: Synthetic oligonucleotide
  Antisense strand to SEQ ID NO: 2486984
uccuaucagcccuauagcc

SEQ ID NO: 2486986 - RNA, 19 nt, Artificial Sequence
  Description of Artificial Sequence: Synthetic oligonucleotide
  Sense strand starting at position 2961 of SEQ ID NO: 1887650
cucucaguuuggcuaugaa

SEQ ID NO: 2486987 - RNA, 19 nt, Artificial Sequence
  Description of Artificial Sequence: Synthetic oligonucleotide
  Antisense strand to SEQ ID NO: 2486986
uucauagccaaacugagag

SEQ ID NO: 2486988 - RNA, 19 nt, Artificial Sequence
  Description of Artificial Sequence: Synthetic oligonucleotide
  Sense strand starting at position 2965 of SEQ ID NO: 1887650
caguuuggcuaugaaccua

SEQ ID NO: 2486989 - RNA, 19 nt, Artificial Sequence
  Description of Artificial Sequence: Synthetic oligonucleotide
  Antisense strand to SEQ ID NO: 2486988
uagguucauagccaaacug

SEQ ID NO: 2486990 - RNA, 19 nt, Artificial Sequence
  Description of Artificial Sequence: Synthetic oligonucleotide
  Sense strand starting at position 3362 of SEQ ID NO: 1887650
uuagguuacuccuaucaga

SEQ ID NO: 2486991 - RNA, 19 nt, Artificial Sequence
  Description of Artificial Sequence: Synthetic oligonucleotide
  Antisense strand to SEQ ID NO: 2486990
ucugauaggaguaaccuaa

SEQ ID NO: 2486992 - RNA, 19 nt, Artificial Sequence
  Description of Artificial Sequence: Synthetic oligonucleotide
  Sense strand starting at position 3365 of SEQ ID NO: 1887650
gguuacuccuaucagaaga

SEQ ID NO: 2486993 - RNA, 19 nt, Artificial Sequence
  Description of Artificial Sequence: Synthetic oligonucleotide
  Antisense strand to SEQ ID NO: 2486992
ucuucugauaggaguaacc

SEQ ID NO: 2486994 - RNA, 19 nt, Artificial Sequence
  Description of Artificial Sequence: Synthetic oligonucleotide
  Sense strand starting at position 3379 of SEQ ID NO: 1887650
gaagaucuguaccugaacu

SEQ ID NO: 2486995 - RNA, 19 nt, Artificial Sequence
  Description of Artificial Sequence: Synthetic oligonucleotide
  Antisense strand to SEQ ID NO: 2486994
aguucagguacagaucuuc

SEQ ID NO: 2486996 - RNA, 19 nt, Artificial Sequence
  Description of Artificial Sequence: Synthetic oligonucleotide
  Sense strand starting at position 3467 of SEQ ID NO: 1887650
uggucugguuucuuccaca

SEQ ID NO: 2486997 - RNA, 19 nt, Artificial Sequence
  Description of Artificial Sequence: Synthetic oligonucleotide
  Antisense strand to SEQ ID NO: 2486996
uguggaagaaaccagacca

SEQ ID NO: 2486998 - RNA, 19 nt, Artificial Sequence
  Description of Artificial Sequence: Synthetic oligonucleotide
  Sense strand starting at position 3472 of SEQ ID NO: 1887650
ugguuucuuccacaaauga

SEQ ID NO: 2486999 - RNA, 19 nt, Artificial Sequence
  Description of Artificial Sequence: Synthetic oligonucleotide
  Antisense strand to SEQ ID NO: 2486998
ucauuuguggaagaaacca

SEQ ID NO: 2487000 - RNA, 19 nt, Artificial Sequence
  Description of Artificial Sequence: Synthetic oligonucleotide
  Sense strand starting at position 3483 of SEQ ID NO: 1887650
acaaaugaaugguauagaa

SEQ ID NO: 2487001 - RNA, 19 nt, Artificial Sequence
  Description of Artificial Sequence: Synthetic oligonucleotide
  Antisense strand to SEQ ID NO: 2487000
uucuauaccauucauuugu

SEQ ID NO: 2487002 - RNA, 19 nt, Artificial Sequence
  Description of Artificial Sequence: Synthetic oligonucleotide
  Sense strand starting at position 3544 of SEQ ID NO: 1887650
guggguauuuauguguaaa

SEQ ID NO: 2487003 - RNA, 19 nt, Artificial Sequence
  Description of Artificial Sequence: Synthetic oligonucleotide
  Antisense strand to SEQ ID NO: 2487002
uuuacacauaaauacccac

SEQ ID NO: 2487004 - RNA, 19 nt, Artificial Sequence
  Description of Artificial Sequence: Synthetic oligonucleotide
  Sense strand starting at position 3564 of SEQ ID NO: 1887650
ugcuacaaugccuaggauu

SEQ ID NO: 2487005 - RNA, 19 nt, Artificial Sequence
  Description of Artificial Sequence: Synthetic oligonucleotide
  Antisense strand to SEQ ID NO: 2487004
aauccuaggcauuguagca

SEQ ID NO: 2487006 - RNA, 19 nt, Artificial Sequence
  Description of Artificial Sequence: Synthetic oligonucleotide
  Sense strand starting at position 3887 of SEQ ID NO: 1887650
gugccuaggauuuguguua

SEQ ID NO: 2487007 - RNA, 19 nt, Artificial Sequence
  Description of Artificial Sequence: Synthetic oligonucleotide
  Antisense strand to SEQ ID NO: 2487006
uaacacaaauccuaggcac

SEQ ID NO: 2487008 - RNA, 19 nt, Artificial Sequence
  Description of Artificial Sequence: Synthetic oligonucleotide
  Sense strand starting at position 3888 of SEQ ID NO: 1887650
ugccuaggauuuguguuaa

SEQ ID NO: 2487009 - RNA, 19 nt, Artificial Sequence
  Description of Artificial Sequence: Synthetic oligonucleotide
  Antisense strand to SEQ ID NO: 2487008
uuaacacaaauccuaggca

SEQ ID NO: 2487010 - RNA, 19 nt, Artificial Sequence
  Description of Artificial Sequence: Synthetic oligonucleotide
  Sense strand starting at position 18 of SEQ ID NO: 1887651
gggccuccaucaucuguaa

SEQ ID NO: 2487011 - RNA, 19 nt, Artificial Sequence
  Description of Artificial Sequence: Synthetic oligonucleotide
  Antisense strand to SEQ ID NO: 2487010
uuacagaugauggaggccc

SEQ ID NO: 2487012 - RNA, 19 nt, Artificial Sequence
  Description of Artificial Sequence: Synthetic oligonucleotide
  Sense strand starting at position 42 of SEQ ID NO: 1887651
gguaauagugcacacaguu

SEQ ID NO: 2487013 - RNA, 19 nt, Artificial Sequence
  Description of Artificial Sequence: Synthetic oligonucleotide
  Antisense strand to SEQ ID NO: 2487012
aacugugugcacuauuacc

SEQ ID NO: 2487014 - RNA, 19 nt, Artificial Sequence
  Description of Artificial Sequence: Synthetic oligonucleotide
  Sense strand starting at position 54 of SEQ ID NO: 1887651
cacaguuggugccacauaa

SEQ ID NO: 2487015 - RNA, 19 nt, Artificial Sequence
  Description of Artificial Sequence: Synthetic oligonucleotide
  Antisense strand to SEQ ID NO: 2487014
uuauguggcaccaacugug

SEQ ID NO: 2487016 - RNA, 19 nt, Artificial Sequence
  Description of Artificial Sequence: Synthetic oligonucleotide
  Sense strand starting at position 91 of SEQ ID NO: 1887651
gcuggugccucuugaggau

SEQ ID NO: 2487017 - RNA, 19 nt, Artificial Sequence
  Description of Artificial Sequence: Synthetic oligonucleotide
  Antisense strand to SEQ ID NO: 2487016
auccucaagaggcaccagc

SEQ ID NO: 2487018 - RNA, 19 nt, Artificial Sequence
  Description of Artificial Sequence: Synthetic oligonucleotide
  Sense strand starting at position 132 of SEQ ID NO: 1887651
gacagaugugccuggcugu

SEQ ID NO: 2487019 - RNA, 19 nt, Artificial Sequence
  Description of Artificial Sequence: Synthetic oligonucleotide
  Antisense strand to SEQ ID NO: 2487018
acagccaggcacaucuguc

SEQ ID NO: 2487020 - RNA, 19 nt, Artificial Sequence
  Description of Artificial Sequence: Synthetic oligonucleotide
  Sense strand starting at position 145 of SEQ ID NO: 1887651
ggcuguggugucuagauga

SEQ ID NO: 2487021 - RNA, 19 nt, Artificial Sequence
  Description of Artificial Sequence: Synthetic oligonucleotide
  Antisense strand to SEQ ID NO: 2487020
ucaucuagacaccacagcc

SEQ ID NO: 2487022 - RNA, 19 nt, Artificial Sequence
  Description of Artificial Sequence: Synthetic oligonucleotide
  Sense strand starting at position 355 of SEQ ID NO: 1887651
gaguauggauguccacuuu

SEQ ID NO: 2487023 - RNA, 19 nt, Artificial Sequence
  Description of Artificial Sequence: Synthetic oligonucleotide
  Antisense strand to SEQ ID NO: 2487022
aaaguggacauccauacuc

SEQ ID NO: 2487024 - RNA, 19 nt, Artificial Sequence
  Description of Artificial Sequence: Synthetic oligonucleotide
  Sense strand starting at position 364 of SEQ ID NO: 1887651
uguccacuuucccuacaga

SEQ ID NO: 2487025 - RNA, 19 nt, Artificial Sequence
  Description of Artificial Sequence: Synthetic oligonucleotide
  Antisense strand to SEQ ID NO: 2487024
ucuguagggaaaguggaca

SEQ ID NO: 2487026 - RNA, 19 nt, Artificial Sequence
  Description of Artificial Sequence: Synthetic oligonucleotide
  Sense strand starting at position 439 of SEQ ID NO: 1887651
gggaacgggucacuuaaga

SEQ ID NO: 2487027 - RNA, 19 nt, Artificial Sequence
  Description of Artificial Sequence: Synthetic oligonucleotide
  Antisense strand to SEQ ID NO: 2487026
ucuuaagugacccguuccc

SEQ ID NO: 2487028 - RNA, 19 nt, Artificial Sequence
  Description of Artificial Sequence: Synthetic oligonucleotide
  Sense strand starting at position 491 of SEQ ID NO: 1887651
cuggucuccugagggagaa

SEQ ID NO: 2487029 - RNA, 19 nt, Artificial Sequence
  Description of Artificial Sequence: Synthetic oligonucleotide
  Antisense strand to SEQ ID NO: 2487028
uucucccucaggagaccag

SEQ ID NO: 2487030 - RNA, 19 nt, Artificial Sequence
  Description of Artificial Sequence: Synthetic oligonucleotide
  Sense strand starting at position 707 of SEQ ID NO: 1887651
gccagaaucucagucaccu

SEQ ID NO: 2487031 - RNA, 19 nt, Artificial Sequence
  Description of Artificial Sequence: Synthetic oligonucleotide
  Antisense strand to SEQ ID NO: 2487030
aggugacugagauucuggc

SEQ ID NO: 2487032 - RNA, 19 nt, Artificial Sequence
  Description of Artificial Sequence: Synthetic oligonucleotide
  Sense strand starting at position 907 of SEQ ID NO: 1887651
gcggaagccgcucucagau

SEQ ID NO: 2487033 - RNA, 19 nt, Artificial Sequence
  Description of Artificial Sequence: Synthetic oligonucleotide
  Antisense strand to SEQ ID NO: 2487032
aucugagagcggcuuccgc

SEQ ID NO: 2487034 - RNA, 19 nt, Artificial Sequence
  Description of Artificial Sequence: Synthetic oligonucleotide
  Sense strand starting at position 1158 of SEQ ID NO: 1887651
ggcucuugugccuagcaca

SEQ ID NO: 2487035 - RNA, 19 nt, Artificial Sequence
  Description of Artificial Sequence: Synthetic oligonucleotide
  Antisense strand to SEQ ID NO: 2487034
ugugcuaggcacaagagcc

SEQ ID NO: 2487036 - RNA, 19 nt, Artificial Sequence
  Description of Artificial Sequence: Synthetic oligonucleotide
  Sense strand starting at position 1468 of SEQ ID NO: 1887651
agcuguacuugucaccaca

SEQ ID NO: 2487037 - RNA, 19 nt, Artificial Sequence
  Description of Artificial Sequence: Synthetic oligonucleotide
  Antisense strand to SEQ ID NO: 2487036
uguggugacaaguacagcu

SEQ ID NO: 2487038 - RNA, 19 nt, Artificial Sequence
  Description of Artificial Sequence: Synthetic oligonucleotide
  Sense strand starting at position 1470 of SEQ ID NO: 1887651
cuguacuugucaccacagu

SEQ ID NO: 2487039 - RNA, 19 nt, Artificial Sequence
  Description of Artificial Sequence: Synthetic oligonucleotide
  Antisense strand to SEQ ID NO: 2487038
acuguggugacaaguacag

SEQ ID NO: 2487040 - RNA, 19 nt, Artificial Sequence
  Description of Artificial Sequence: Synthetic oligonucleotide
  Sense strand starting at position 2482 of SEQ ID NO: 1887651
agcugugcgccugaucgau

SEQ ID NO: 2487041 - RNA, 19 nt, Artificial Sequence
  Description of Artificial Sequence: Synthetic oligonucleotide
  Antisense strand to SEQ ID NO: 2487040
aucgaucaggcgcacagcu

SEQ ID NO: 2487042 - RNA, 19 nt, Artificial Sequence
  Description of Artificial Sequence: Synthetic oligonucleotide
  Sense strand starting at position 2495 of SEQ ID NO: 1887651
aucgauucuugagacccaa

SEQ ID NO: 2487043 - RNA, 19 nt, Artificial Sequence
  Description of Artificial Sequence: Synthetic oligonucleotide
  Antisense strand to SEQ ID NO: 2487042
uugggucucaagaaucgau

SEQ ID NO: 2487044 - RNA, 19 nt, Artificial Sequence
  Description of Artificial Sequence: Synthetic oligonucleotide
  Sense strand starting at position 2643 of SEQ ID NO: 1887651
ggcugaaacucuccuaaag

SEQ ID NO: 2487045 - RNA, 19 nt, Artificial Sequence
  Description of Artificial Sequence: Synthetic oligonucleotide
  Antisense strand to SEQ ID NO: 2487044
cuuuaggagaguuucagcc

SEQ ID NO: 2487046 - RNA, 19 nt, Artificial Sequence
  Description of Artificial Sequence: Synthetic oligonucleotide
  Sense strand starting at position 2714 of SEQ ID NO: 1887651
ccucucuggccuuauaagu

SEQ ID NO: 2487047 - RNA, 19 nt, Artificial Sequence
  Description of Artificial Sequence: Synthetic oligonucleotide
  Antisense strand to SEQ ID NO: 2487046
acuuauaaggccagagagg

SEQ ID NO: 2487048 - RNA, 19 nt, Artificial Sequence
  Description of Artificial Sequence: Synthetic oligonucleotide
  Sense strand starting at position 3262 of SEQ ID NO: 1887651
agggaaagcuccgcaaaca

SEQ ID NO: 2487049 - RNA, 19 nt, Artificial Sequence
  Description of Artificial Sequence: Synthetic oligonucleotide
  Antisense strand to SEQ ID NO: 2487048
uguuugcggagcuuucccu

SEQ ID NO: 2487050 - RNA, 19 nt, Artificial Sequence
  Description of Artificial Sequence: Synthetic oligonucleotide
  Sense strand starting at position 3412 of SEQ ID NO: 1887651
ggagaucuuuccuuccaga

SEQ ID NO: 2487051 - RNA, 19 nt, Artificial Sequence
  Description of Artificial Sequence: Synthetic oligonucleotide
  Antisense strand to SEQ ID NO: 2487050
ucuggaaggaaagaucucc

SEQ ID NO: 2487052 - RNA, 19 nt, Artificial Sequence
  Description of Artificial Sequence: Synthetic oligonucleotide
  Sense strand starting at position 3509 of SEQ ID NO: 1887651
gcaggugauucuccaccca

SEQ ID NO: 2487053 - RNA, 19 nt, Artificial Sequence
  Description of Artificial Sequence: Synthetic oligonucleotide
  Antisense strand to SEQ ID NO: 2487052
uggguggagaaucaccugc

SEQ ID NO: 2487054 - RNA, 19 nt, Artificial Sequence
  Description of Artificial Sequence: Synthetic oligonucleotide
  Sense strand starting at position 3566 of SEQ ID NO: 1887651
uugggcagucgucagaaga

SEQ ID NO: 2487055 - RNA, 19 nt, Artificial Sequence
  Description of Artificial Sequence: Synthetic oligonucleotide
  Antisense strand to SEQ ID NO: 2487054
ucuucugacgacugcccaa

SEQ ID NO: 2487056 - RNA, 19 nt, Artificial Sequence
  Description of Artificial Sequence: Synthetic oligonucleotide
  Sense strand starting at position 3576 of SEQ ID NO: 1887651
gucagaagaucagauagaa

SEQ ID NO: 2487057 - RNA, 19 nt, Artificial Sequence
  Description of Artificial Sequence: Synthetic oligonucleotide
  Antisense strand to SEQ ID NO: 2487056
uucuaucugaucuucugac

SEQ ID NO: 2487058 - RNA, 19 nt, Artificial Sequence
  Description of Artificial Sequence: Synthetic oligonucleotide
  Sense strand starting at position 3599 of SEQ ID NO: 1887651
ugaguaucuuggcguuaga

SEQ ID NO: 2487059 - RNA, 19 nt, Artificial Sequence
  Description of Artificial Sequence: Synthetic oligonucleotide
  Antisense strand to SEQ ID NO: 2487058
ucuaacgccaagauacuca

SEQ ID NO: 2487060 - RNA, 19 nt, Artificial Sequence
  Description of Artificial Sequence: Synthetic oligonucleotide
  Sense strand starting at position 3602 of SEQ ID NO: 1887651
guaucuuggcguuagaaug

SEQ ID NO: 2487061 - RNA, 19 nt, Artificial Sequence
  Description of Artificial Sequence: Synthetic oligonucleotide
  Antisense strand to SEQ ID NO: 2487060
cauucuaacgccaagauac

SEQ ID NO: 2487062 - RNA, 19 nt, Artificial Sequence
  Description of Artificial Sequence: Synthetic oligonucleotide
  Sense strand starting at position 3612 of SEQ ID NO: 1887651
guuagaaugaguuggacag

SEQ ID NO: 2487063 - RNA, 19 nt, Artificial Sequence
  Description of Artificial Sequence: Synthetic oligonucleotide
  Antisense strand to SEQ ID NO: 2487062
cuguccaacucauucuaac

SEQ ID NO: 2487064 - RNA, 19 nt, Artificial Sequence
  Description of Artificial Sequence: Synthetic oligonucleotide
  Sense strand starting at position 3707 of SEQ ID NO: 1887651
ggaggugacuuucgagaug

SEQ ID NO: 2487065 - RNA, 19 nt, Artificial Sequence
  Description of Artificial Sequence: Synthetic oligonucleotide
  Antisense strand to SEQ ID NO: 2487064
caucucgaaagucaccucc

SEQ ID NO: 2487066 - RNA, 19 nt, Artificial Sequence
  Description of Artificial Sequence: Synthetic oligonucleotide
  Sense strand starting at position 3709 of SEQ ID NO: 1887651
aggugacuuucgagaugag

SEQ ID NO: 2487067 - RNA, 19 nt, Artificial Sequence
  Description of Artificial Sequence: Synthetic oligonucleotide
  Antisense strand to SEQ ID NO: 2487066
cucaucucgaaagucaccu

SEQ ID NO: 2487068 - RNA, 19 nt, Artificial Sequence
  Description of Artificial Sequence: Synthetic oligonucleotide
  Sense strand starting at position 3712 of SEQ ID NO: 1887651
ugacuuucgagaugagggu

SEQ ID NO: 2487069 - RNA, 19 nt, Artificial Sequence
  Description of Artificial Sequence: Synthetic oligonucleotide
  Antisense strand to SEQ ID NO: 2487068
acccucaucucgaaaguca

SEQ ID NO: 2487070 - RNA, 19 nt, Artificial Sequence
  Description of Artificial Sequence: Synthetic oligonucleotide
  Sense strand starting at position 3726 of SEQ ID NO: 1887651
aggguacacuuacaacaua

SEQ ID NO: 2487071 - RNA, 19 nt, Artificial Sequence
  Description of Artificial Sequence: Synthetic oligonucleotide
  Antisense strand to SEQ ID NO: 2487070
uauguuguaaguguacccu

SEQ ID NO: 2487072 - RNA, 19 nt, Artificial Sequence
  Description of Artificial Sequence: Synthetic oligonucleotide
  Sense strand starting at position 3769 of SEQ ID NO: 1887651
ugagguaucuaguccgcau

SEQ ID NO: 2487073 - RNA, 19 nt, Artificial Sequence
  Description of Artificial Sequence: Synthetic oligonucleotide
  Antisense strand to SEQ ID NO: 2487072
augcggacuagauaccuca

SEQ ID NO: 2487074 - RNA, 19 nt, Artificial Sequence
  Description of Artificial Sequence: Synthetic oligonucleotide
  Sense strand starting at position 3771 of SEQ ID NO: 1887651
agguaucuaguccgcauau

SEQ ID NO: 2487075 - RNA, 19 nt, Artificial Sequence
  Description of Artificial Sequence: Synthetic oligonucleotide
  Antisense strand to SEQ ID NO: 2487074
auaugcggacuagauaccu

SEQ ID NO: 2487076 - RNA, 19 nt, Artificial Sequence
  Description of Artificial Sequence: Synthetic oligonucleotide
  Sense strand starting at position 3772 of SEQ ID NO: 1887651
gguaucuaguccgcauaua

SEQ ID NO: 2487077 - RNA, 19 nt, Artificial Sequence
  Description of Artificial Sequence: Synthetic oligonucleotide
  Antisense strand to SEQ ID NO: 2487076
uauaugcggacuagauacc

SEQ ID NO: 2487078 - RNA, 19 nt, Artificial Sequence
  Description of Artificial Sequence: Synthetic oligonucleotide
  Sense strand starting at position 3773 of SEQ ID NO: 1887651
guaucuaguccgcauauac

SEQ ID NO: 2487079 - RNA, 19 nt, Artificial Sequence
  Description of Artificial Sequence: Synthetic oligonucleotide
  Antisense strand to SEQ ID NO: 2487078
guauaugcggacuagauac

SEQ ID NO: 2487080 - RNA, 19 nt, Artificial Sequence
  Description of Artificial Sequence: Synthetic oligonucleotide
  Sense strand starting at position 3791 of SEQ ID NO: 1887651
cagugacacguaugcauuu

SEQ ID NO: 2487081 - RNA, 19 nt, Artificial Sequence
  Description of Artificial Sequence: Synthetic oligonucleotide
  Antisense strand to SEQ ID NO: 2487080
aaaugcauacgugucacug

SEQ ID NO: 2487082 - RNA, 19 nt, Artificial Sequence
  Description of Artificial Sequence: Synthetic oligonucleotide
  Sense strand starting at position 3800 of SEQ ID NO: 1887651
guaugcauuuacugccaca

SEQ ID NO: 2487083 - RNA, 19 nt, Artificial Sequence
  Description of Artificial Sequence: Synthetic oligonucleotide
  Antisense strand to SEQ ID NO: 2487082
uguggcaguaaaugcauac

SEQ ID NO: 2487084 - RNA, 19 nt, Artificial Sequence
  Description of Artificial Sequence: Synthetic oligonucleotide
  Sense strand starting at position 3867 of SEQ ID NO: 1887651
cuuaaugucugcuugucua

SEQ ID NO: 2487085 - RNA, 19 nt, Artificial Sequence
  Description of Artificial Sequence: Synthetic oligonucleotide
  Antisense strand to SEQ ID NO: 2487084
uagacaagcagacauuaag

SEQ ID NO: 2487086 - RNA, 19 nt, Artificial Sequence
  Description of Artificial Sequence: Synthetic oligonucleotide
  Sense strand starting at position 3870 of SEQ ID NO: 1887651
aaugucugcuugucuagga

SEQ ID NO: 2487087 - RNA, 19 nt, Artificial Sequence
  Description of Artificial Sequence: Synthetic oligonucleotide
  Antisense strand to SEQ ID NO: 2487086
uccuagacaagcagacauu

SEQ ID NO: 2487088 - RNA, 19 nt, Artificial Sequence
  Description of Artificial Sequence: Synthetic oligonucleotide
  Sense strand starting at position 3920 of SEQ ID NO: 1887651
gggaucuggagccauagua

SEQ ID NO: 2487089 - RNA, 19 nt, Artificial Sequence
  Description of Artificial Sequence: Synthetic oligonucleotide
  Antisense strand to SEQ ID NO: 2487088
uacuauggcuccagauccc

SEQ ID NO: 2487090 - RNA, 19 nt, Artificial Sequence
  Description of Artificial Sequence: Synthetic oligonucleotide
  Sense strand starting at position 492 of SEQ ID NO: 1887652
aggaccucgcauuaaagua

SEQ ID NO: 2487091 - RNA, 19 nt, Artificial Sequence
  Description of Artificial Sequence: Synthetic oligonucleotide
  Antisense strand to SEQ ID NO: 2487090
uacuuuaaugcgagguccu

SEQ ID NO: 2487092 - RNA, 19 nt, Artificial Sequence
  Description of Artificial Sequence: Synthetic oligonucleotide
  Sense strand starting at position 899 of SEQ ID NO: 1887652
cuugguuauguccgggaag

SEQ ID NO: 2487093 - RNA, 19 nt, Artificial Sequence
  Description of Artificial Sequence: Synthetic oligonucleotide
  Antisense strand to SEQ ID NO: 2487092
cuucccggacauaaccaag

SEQ ID NO: 2487094 - RNA, 19 nt, Artificial Sequence
  Description of Artificial Sequence: Synthetic oligonucleotide
  Sense strand starting at position 900 of SEQ ID NO: 1887652
uugguuauguccgggaagu

SEQ ID NO: 2487095 - RNA, 19 nt, Artificial Sequence
  Description of Artificial Sequence: Synthetic oligonucleotide
  Antisense strand to SEQ ID NO: 2487094
acuucccggacauaaccaa

SEQ ID NO: 2487096 - RNA, 19 nt, Artificial Sequence
  Description of Artificial Sequence: Synthetic oligonucleotide
  Sense strand starting at position 901 of SEQ ID NO: 1887652
ugguuauguccgggaagug

SEQ ID NO: 2487097 - RNA, 19 nt, Artificial Sequence
  Description of Artificial Sequence: Synthetic oligonucleotide
  Antisense strand to SEQ ID NO: 2487096
cacuucccggacauaacca

SEQ ID NO: 2487098 - RNA, 19 nt, Artificial Sequence
  Description of Artificial Sequence: Synthetic oligonucleotide
  Sense strand starting at position 902 of SEQ ID NO: 1887652
gguuauguccgggaagugu

SEQ ID NO: 2487099 - RNA, 19 nt, Artificial Sequence
  Description of Artificial Sequence: Synthetic oligonucleotide
  Antisense strand to SEQ ID NO: 2487098
acacuucccggacauaacc

SEQ ID NO: 2487100 - RNA, 19 nt, Artificial Sequence
  Description of Artificial Sequence: Synthetic oligonucleotide
  Sense strand starting at position 911 of SEQ ID NO: 1887652
cgggaaguguucccacaca

SEQ ID NO: 2487101 - RNA, 19 nt, Artificial Sequence
  Description of Artificial Sequence: Synthetic oligonucleotide
  Antisense strand to SEQ ID NO: 2487100
ugugugggaacacuucccg

SEQ ID NO: 2487102 - RNA, 19 nt, Artificial Sequence
  Description of Artificial Sequence: Synthetic oligonucleotide
  Sense strand starting at position 2008 of SEQ ID NO: 1887652
cugugcuucgugcugggaa

SEQ ID NO: 2487103 - RNA, 19 nt, Artificial Sequence
  Description of Artificial Sequence: Synthetic oligonucleotide
  Antisense strand to SEQ ID NO: 2487102
uucccagcacgaagcacag

SEQ ID NO: 2487104 - RNA, 19 nt, Artificial Sequence
  Description of Artificial Sequence: Synthetic oligonucleotide
  Sense strand starting at position 2009 of SEQ ID NO: 1887652
ugugcuucgugcugggaaa

SEQ ID NO: 2487105 - RNA, 19 nt, Artificial Sequence
  Description of Artificial Sequence: Synthetic oligonucleotide
  Antisense strand to SEQ ID NO: 2487104
uuucccagcacgaagcaca

SEQ ID NO: 2487106 - RNA, 19 nt, Artificial Sequence
  Description of Artificial Sequence: Synthetic oligonucleotide
  Sense strand starting at position 2010 of SEQ ID NO: 1887652
gugcuucgugcugggaaac

SEQ ID NO: 2487107 - RNA, 19 nt, Artificial Sequence
  Description of Artificial Sequence: Synthetic oligonucleotide
  Antisense strand to SEQ ID NO: 2487106
guuucccagcacgaagcac

SEQ ID NO: 2487108 - RNA, 19 nt, Artificial Sequence
  Description of Artificial Sequence: Synthetic oligonucleotide
  Sense strand starting at position 2011 of SEQ ID NO: 1887652
ugcuucgugcugggaaaca

SEQ ID NO: 2487109 - RNA, 19 nt, Artificial Sequence
  Description of Artificial Sequence: Synthetic oligonucleotide
  Antisense strand to SEQ ID NO: 2487108
uguuucccagcacgaagca

SEQ ID NO: 2487110 - RNA, 19 nt, Artificial Sequence
  Description of Artificial Sequence: Synthetic oligonucleotide
  Sense strand starting at position 2101 of SEQ ID NO: 1887652
gggagcauucugagcacgu

SEQ ID NO: 2487111 - RNA, 19 nt, Artificial Sequence
  Description of Artificial Sequence: Synthetic oligonucleotide
  Antisense strand to SEQ ID NO: 2487110
acgugcucagaaugcuccc

SEQ ID NO: 2487112 - RNA, 19 nt, Artificial Sequence
  Description of Artificial Sequence: Synthetic oligonucleotide
  Sense strand starting at position 2102 of SEQ ID NO: 1887652
ggagcauucugagcacgua

SEQ ID NO: 2487113 - RNA, 19 nt, Artificial Sequence
  Description of Artificial Sequence: Synthetic oligonucleotide
  Antisense strand to SEQ ID NO: 2487112
uacgugcucagaaugcucc

SEQ ID NO: 2487114 - RNA, 19 nt, Artificial Sequence
  Description of Artificial Sequence: Synthetic oligonucleotide
  Sense strand starting at position 2332 of SEQ ID NO: 1887652
ggagccucaccuugaggau

SEQ ID NO: 2487115 - RNA, 19 nt, Artificial Sequence
  Description of Artificial Sequence: Synthetic oligonucleotide
  Antisense strand to SEQ ID NO: 2487114
auccucaaggugaggcucc

SEQ ID NO: 2487116 - RNA, 19 nt, Artificial Sequence
  Description of Artificial Sequence: Synthetic oligonucleotide
  Sense strand starting at position 2744 of SEQ ID NO: 1887652
gacugagaguuugagaagu

SEQ ID NO: 2487117 - RNA, 19 nt, Artificial Sequence
  Description of Artificial Sequence: Synthetic oligonucleotide
  Antisense strand to SEQ ID NO: 2487116
acuucucaaacucucaguc

SEQ ID NO: 2487118 - RNA, 19 nt, Artificial Sequence
  Description of Artificial Sequence: Synthetic oligonucleotide
  Sense strand starting at position 2746 of SEQ ID NO: 1887652
cugagaguuugagaaguca

SEQ ID NO: 2487119 - RNA, 19 nt, Artificial Sequence
  Description of Artificial Sequence: Synthetic oligonucleotide
  Antisense strand to SEQ ID NO: 2487118
ugacuucucaaacucucag

SEQ ID NO: 2487120 - RNA, 19 nt, Artificial Sequence
  Description of Artificial Sequence: Synthetic oligonucleotide
  Sense strand starting at position 2759 of SEQ ID NO: 1887652
aagucauccugacuggaag

SEQ ID NO: 2487121 - RNA, 19 nt, Artificial Sequence
  Description of Artificial Sequence: Synthetic oligonucleotide
  Antisense strand to SEQ ID NO: 2487120
cuuccagucaggaugacuu

SEQ ID NO: 2487122 - RNA, 19 nt, Artificial Sequence
  Description of Artificial Sequence: Synthetic oligonucleotide
  Sense strand starting at position 2760 of SEQ ID NO: 1887652
agucauccugacuggaaga

SEQ ID NO: 2487123 - RNA, 19 nt, Artificial Sequence
  Description of Artificial Sequence: Synthetic oligonucleotide
  Antisense strand to SEQ ID NO: 2487122
ucuuccagucaggaugacu

SEQ ID NO: 2487124 - RNA, 19 nt, Artificial Sequence
  Description of Artificial Sequence: Synthetic oligonucleotide
  Sense strand starting at position 2788 of SEQ ID NO: 1887652
agucuaggcaagugacuua

SEQ ID NO: 2487125 - RNA, 19 nt, Artificial Sequence
  Description of Artificial Sequence: Synthetic oligonucleotide
  Antisense strand to SEQ ID NO: 2487124
uaagucacuugccuagacu

SEQ ID NO: 2487126 - RNA, 19 nt, Artificial Sequence
  Description of Artificial Sequence: Synthetic oligonucleotide
  Sense strand starting at position 2886 of SEQ ID NO: 1887652
gaggaagugugcuauuaua

SEQ ID NO: 2487127 - RNA, 19 nt, Artificial Sequence
  Description of Artificial Sequence: Synthetic oligonucleotide
  Antisense strand to SEQ ID NO: 2487126
uauaauagcacacuuccuc

SEQ ID NO: 2487128 - RNA, 19 nt, Artificial Sequence
  Description of Artificial Sequence: Synthetic oligonucleotide
  Sense strand starting at position 2894 of SEQ ID NO: 1887652
gugcuauuauacuuccaca

SEQ ID NO: 2487129 - RNA, 19 nt, Artificial Sequence
  Description of Artificial Sequence: Synthetic oligonucleotide
  Antisense strand to SEQ ID NO: 2487128
uguggaaguauaauagcac

SEQ ID NO: 2487130 - RNA, 19 nt, Artificial Sequence
  Description of Artificial Sequence: Synthetic oligonucleotide
  Sense strand starting at position 2908 of SEQ ID NO: 1887652
ccacaucugccauggacau

SEQ ID NO: 2487131 - RNA, 19 nt, Artificial Sequence
  Description of Artificial Sequence: Synthetic oligonucleotide
  Antisense strand to SEQ ID NO: 2487130
auguccauggcagaugugg

SEQ ID NO: 2487132 - RNA, 19 nt, Artificial Sequence
  Description of Artificial Sequence: Synthetic oligonucleotide
  Sense strand starting at position 3008 of SEQ ID NO: 1887652
cuagauacgcuguagcaaa

SEQ ID NO: 2487133 - RNA, 19 nt, Artificial Sequence
  Description of Artificial Sequence: Synthetic oligonucleotide
  Antisense strand to SEQ ID NO: 2487132
uuugcuacagcguaucuag

SEQ ID NO: 2487134 - RNA, 19 nt, Artificial Sequence
  Description of Artificial Sequence: Synthetic oligonucleotide
  Sense strand starting at position 3376 of SEQ ID NO: 1887652
aaauuaagcugguguugaa

SEQ ID NO: 2487135 - RNA, 19 nt, Artificial Sequence
  Description of Artificial Sequence: Synthetic oligonucleotide
  Antisense strand to SEQ ID NO: 2487134
uucaacaccagcuuaauuu

SEQ ID NO: 2487136 - RNA, 19 nt, Artificial Sequence
  Description of Artificial Sequence: Synthetic oligonucleotide
  Sense strand starting at position 3417 of SEQ ID NO: 1887652
cucaaaugaaagugagagu

SEQ ID NO: 2487137 - RNA, 19 nt, Artificial Sequence
  Description of Artificial Sequence: Synthetic oligonucleotide
  Antisense strand to SEQ ID NO: 2487136
acucucacuuucauuugag

SEQ ID NO: 2487138 - RNA, 19 nt, Artificial Sequence
  Description of Artificial Sequence: Synthetic oligonucleotide
  Sense strand starting at position 3426 of SEQ ID NO: 1887652
aagugagagucugagcauu

SEQ ID NO: 2487139 - RNA, 19 nt, Artificial Sequence
  Description of Artificial Sequence: Synthetic oligonucleotide
  Antisense strand to SEQ ID NO: 2487138
aaugcucagacucucacuu

SEQ ID NO: 2487140 - RNA, 19 nt, Artificial Sequence
  Description of Artificial Sequence: Synthetic oligonucleotide
  Sense strand starting at position 3428 of SEQ ID NO: 1887652
gugagagucugagcauucu

SEQ ID NO: 2487141 - RNA, 19 nt, Artificial Sequence
  Description of Artificial Sequence: Synthetic oligonucleotide
  Antisense strand to SEQ ID NO: 2487140
agaaugcucagacucucac

SEQ ID NO: 2487142 - RNA, 19 nt, Artificial Sequence
  Description of Artificial Sequence: Synthetic oligonucleotide
  Sense strand starting at position 3434 of SEQ ID NO: 1887652
gucugagcauucuaaccuu

SEQ ID NO: 2487143 - RNA, 19 nt, Artificial Sequence
  Description of Artificial Sequence: Synthetic oligonucleotide
  Antisense strand to SEQ ID NO: 2487142
aagguuagaaugcucagac

SEQ ID NO: 2487144 - RNA, 19 nt, Artificial Sequence
  Description of Artificial Sequence: Synthetic oligonucleotide
  Sense strand starting at position 3437 of SEQ ID NO: 1887652
ugagcauucuaaccuuuga

SEQ ID NO: 2487145 - RNA, 19 nt, Artificial Sequence
  Description of Artificial Sequence: Synthetic oligonucleotide
  Antisense strand to SEQ ID NO: 2487144
ucaaagguuagaaugcuca

SEQ ID NO: 2487146 - RNA, 19 nt, Artificial Sequence
  Description of Artificial Sequence: Synthetic oligonucleotide
  Sense strand starting at position 3442 of SEQ ID NO: 1887652
auucuaaccuuugaggaaa

SEQ ID NO: 2487147 - RNA, 19 nt, Artificial Sequence
  Description of Artificial Sequence: Synthetic oligonucleotide
  Antisense strand to SEQ ID NO: 2487146
uuuccucaaagguuagaau

SEQ ID NO: 2487148 - RNA, 19 nt, Artificial Sequence
  Description of Artificial Sequence: Synthetic oligonucleotide
  Sense strand starting at position 3480 of SEQ ID NO: 1887652
ucuccaaagcugugugaaa

SEQ ID NO: 2487149 - RNA, 19 nt, Artificial Sequence
  Description of Artificial Sequence: Synthetic oligonucleotide
  Antisense strand to SEQ ID NO: 2487148
uuucacacagcuuuggaga

SEQ ID NO: 2487150 - RNA, 19 nt, Artificial Sequence
  Description of Artificial Sequence: Synthetic oligonucleotide
  Sense strand starting at position 3521 of SEQ ID NO: 1887652
uuccacuucuuggaaguga

SEQ ID NO: 2487151 - RNA, 19 nt, Artificial Sequence
  Description of Artificial Sequence: Synthetic oligonucleotide
  Antisense strand to SEQ ID NO: 2487150
ucacuuccaagaaguggaa

SEQ ID NO: 2487152 - RNA, 19 nt, Artificial Sequence
  Description of Artificial Sequence: Synthetic oligonucleotide
  Sense strand starting at position 3561 of SEQ ID NO: 1887652
gacuaugcaccgugaugaa

SEQ ID NO: 2487153 - RNA, 19 nt, Artificial Sequence
  Description of Artificial Sequence: Synthetic oligonucleotide
  Antisense strand to SEQ ID NO: 2487152
uucaucacggugcauaguc

SEQ ID NO: 2487154 - RNA, 19 nt, Artificial Sequence
  Description of Artificial Sequence: Synthetic oligonucleotide
  Sense strand starting at position 3679 of SEQ ID NO: 1887652
ucagaagacuuugaaugac

SEQ ID NO: 2487155 - RNA, 19 nt, Artificial Sequence
  Description of Artificial Sequence: Synthetic oligonucleotide
  Antisense strand to SEQ ID NO: 2487154
gucauucaaagucuucuga

SEQ ID NO: 2487156 - RNA, 19 nt, Artificial Sequence
  Description of Artificial Sequence: Synthetic oligonucleotide
  Sense strand starting at position 3745 of SEQ ID NO: 1887652
uggcuuaguuuccucauca

SEQ ID NO: 2487157 - RNA, 19 nt, Artificial Sequence
  Description of Artificial Sequence: Synthetic oligonucleotide
  Antisense strand to SEQ ID NO: 2487156
ugaugaggaaacuaagcca

SEQ ID NO: 2487158 - RNA, 19 nt, Artificial Sequence
  Description of Artificial Sequence: Synthetic oligonucleotide
  Sense strand starting at position 3804 of SEQ ID NO: 1887652
guccuaaagcaucgaggaa

SEQ ID NO: 2487159 - RNA, 19 nt, Artificial Sequence
  Description of Artificial Sequence: Synthetic oligonucleotide
  Antisense strand to SEQ ID NO: 2487158
uuccucgaugcuuuaggac

SEQ ID NO: 2487160 - RNA, 19 nt, Artificial Sequence
  Description of Artificial Sequence: Synthetic oligonucleotide
  Sense strand starting at position 3808 of SEQ ID NO: 1887652
uaaagcaucgaggaaaugu

SEQ ID NO: 2487161 - RNA, 19 nt, Artificial Sequence
  Description of Artificial Sequence: Synthetic oligonucleotide
  Antisense strand to SEQ ID NO: 2487160
acauuuccucgaugcuuua

SEQ ID NO: 2487162 - RNA, 19 nt, Artificial Sequence
  Description of Artificial Sequence: Synthetic oligonucleotide
  Sense strand starting at position 3965 of SEQ ID NO: 1887652
gcaaccuuggcucaaguga

SEQ ID NO: 2487163 - RNA, 19 nt, Artificial Sequence
  Description of Artificial Sequence: Synthetic oligonucleotide
  Antisense strand to SEQ ID NO: 2487162
ucacuugagccaagguugc

SEQ ID NO: 2487164 - RNA, 19 nt, Artificial Sequence
  Description of Artificial Sequence: Synthetic oligonucleotide
  Sense strand starting at position 358 of SEQ ID NO: 1887653
gaggucucauuauguuauc

SEQ ID NO: 2487165 - RNA, 19 nt, Artificial Sequence
  Description of Artificial Sequence: Synthetic oligonucleotide
  Antisense strand to SEQ ID NO: 2487164
gauaacauaaugagaccuc

SEQ ID NO: 2487166 - RNA, 19 nt, Artificial Sequence
  Description of Artificial Sequence: Synthetic oligonucleotide
  Sense strand starting at position 468 of SEQ ID NO: 1887653
cuguuaucuuuauuacugu

SEQ ID NO: 2487167 - RNA, 19 nt, Artificial Sequence
  Description of Artificial Sequence: Synthetic oligonucleotide
  Antisense strand to SEQ ID NO: 2487166
acaguaauaaagauaacag

SEQ ID NO: 2487168 - RNA, 19 nt, Artificial Sequence
  Description of Artificial Sequence: Synthetic oligonucleotide
  Sense strand starting at position 2635 of SEQ ID NO: 1887653
agccaucaccugggauuaa

SEQ ID NO: 2487169 - RNA, 19 nt, Artificial Sequence
  Description of Artificial Sequence: Synthetic oligonucleotide
  Antisense strand to SEQ ID NO: 2487168
uuaaucccaggugauggcu

SEQ ID NO: 2487170 - RNA, 19 nt, Artificial Sequence
  Description of Artificial Sequence: Synthetic oligonucleotide
  Sense strand starting at position 2636 of SEQ ID NO: 1887653
gccaucaccugggauuaaa

SEQ ID NO: 2487171 - RNA, 19 nt, Artificial Sequence
  Description of Artificial Sequence: Synthetic oligonucleotide
  Antisense strand to SEQ ID NO: 2487170
uuuaaucccaggugauggc

SEQ ID NO: 2487172 - RNA, 19 nt, Artificial Sequence
  Description of Artificial Sequence: Synthetic oligonucleotide
  Sense strand starting at position 2684 of SEQ ID NO: 1887653
gcuggucuucugcguaguu

SEQ ID NO: 2487173 - RNA, 19 nt, Artificial Sequence
  Description of Artificial Sequence: Synthetic oligonucleotide
  Antisense strand to SEQ ID NO: 2487172
aacuacgcagaagaccagc

SEQ ID NO: 2487174 - RNA, 19 nt, Artificial Sequence
  Description of Artificial Sequence: Synthetic oligonucleotide
  Sense strand starting at position 3146 of SEQ ID NO: 1887653
uaccgaguacucuguaucu

SEQ ID NO: 2487175 - RNA, 19 nt, Artificial Sequence
  Description of Artificial Sequence: Synthetic oligonucleotide
  Antisense strand to SEQ ID NO: 2487174
agauacagaguacucggua

SEQ ID NO: 2487176 - RNA, 19 nt, Artificial Sequence
  Description of Artificial Sequence: Synthetic oligonucleotide
  Sense strand starting at position 3148 of SEQ ID NO: 1887653
ccgaguacucuguaucugu

SEQ ID NO: 2487177 - RNA, 19 nt, Artificial Sequence
  Description of Artificial Sequence: Synthetic oligonucleotide
  Antisense strand to SEQ ID NO: 2487176
acagauacagaguacucgg

SEQ ID NO: 2487178 - RNA, 19 nt, Artificial Sequence
  Description of Artificial Sequence: Synthetic oligonucleotide
  Sense strand starting at position 3293 of SEQ ID NO: 1887653
gggauacaguaaugaauga

SEQ ID NO: 2487179 - RNA, 19 nt, Artificial Sequence
  Description of Artificial Sequence: Synthetic oligonucleotide
  Antisense strand to SEQ ID NO: 2487178
ucauucauuacuguauccc

SEQ ID NO: 2487180 - RNA, 19 nt, Artificial Sequence
  Description of Artificial Sequence: Synthetic oligonucleotide
  Sense strand starting at position 3612 of SEQ ID NO: 1887653
uccugaacuccuggacuaa

SEQ ID NO: 2487181 - RNA, 19 nt, Artificial Sequence
  Description of Artificial Sequence: Synthetic oligonucleotide
  Antisense strand to SEQ ID NO: 2487180
uuaguccaggaguucagga

SEQ ID NO: 2487182 - RNA, 19 nt, Artificial Sequence
  Description of Artificial Sequence: Synthetic oligonucleotide
  Sense strand starting at position 3706 of SEQ ID NO: 1887653
ugccucagucaacauguua

SEQ ID NO: 2487183 - RNA, 19 nt, Artificial Sequence
  Description of Artificial Sequence: Synthetic oligonucleotide
  Antisense strand to SEQ ID NO: 2487182
uaacauguugacugaggca

SEQ ID NO: 2487184 - RNA, 19 nt, Artificial Sequence
  Description of Artificial Sequence: Synthetic oligonucleotide
  Sense strand starting at position 3718 of SEQ ID NO: 1887653
cauguuaccuacuuggaga

SEQ ID NO: 2487185 - RNA, 19 nt, Artificial Sequence
  Description of Artificial Sequence: Synthetic oligonucleotide
  Antisense strand to SEQ ID NO: 2487184
ucuccaaguagguaacaug

SEQ ID NO: 2487186 - RNA, 19 nt, Artificial Sequence
  Description of Artificial Sequence: Synthetic oligonucleotide
  Sense strand starting at position 3902 of SEQ ID NO: 1887653
gccguauccucagcaccua

SEQ ID NO: 2487187 - RNA, 19 nt, Artificial Sequence
  Description of Artificial Sequence: Synthetic oligonucleotide
  Antisense strand to SEQ ID NO: 2487186
uaggugcugaggauacggc

SEQ ID NO: 2487188 - RNA, 19 nt, Artificial Sequence
  Description of Artificial Sequence: Synthetic oligonucleotide
  Sense strand starting at position 110 of SEQ ID NO: 1887654
uuguucugagagugagaca

SEQ ID NO: 2487189 - RNA, 19 nt, Artificial Sequence
  Description of Artificial Sequence: Synthetic oligonucleotide
  Antisense strand to SEQ ID NO: 2487188
ugucucacucucagaacaa

SEQ ID NO: 2487190 - RNA, 19 nt, Artificial Sequence
  Description of Artificial Sequence: Synthetic oligonucleotide
  Sense strand starting at position 147 of SEQ ID NO: 1887654
guggguuggacagaugcau

SEQ ID NO: 2487191 - RNA, 19 nt, Artificial Sequence
  Description of Artificial Sequence: Synthetic oligonucleotide
  Antisense strand to SEQ ID NO: 2487190
augcaucuguccaacccac

SEQ ID NO: 2487192 - RNA, 19 nt, Artificial Sequence
  Description of Artificial Sequence: Synthetic oligonucleotide
  Sense strand starting at position 228 of SEQ ID NO: 1887654
acuuuagguuguuucuaga

SEQ ID NO: 2487193 - RNA, 19 nt, Artificial Sequence
  Description of Artificial Sequence: Synthetic oligonucleotide
  Antisense strand to SEQ ID NO: 2487192
ucuagaaacaaccuaaagu

SEQ ID NO: 2487194 - RNA, 19 nt, Artificial Sequence
  Description of Artificial Sequence: Synthetic oligonucleotide
  Sense strand starting at position 387 of SEQ ID NO: 1887654
augagaugacuuuggucaa

SEQ ID NO: 2487195 - RNA, 19 nt, Artificial Sequence
  Description of Artificial Sequence: Synthetic oligonucleotide
  Antisense strand to SEQ ID NO: 2487194
uugaccaaagucaucucau

SEQ ID NO: 2487196 - RNA, 19 nt, Artificial Sequence
  Description of Artificial Sequence: Synthetic oligonucleotide
  Sense strand starting at position 390 of SEQ ID NO: 1887654
agaugacuuuggucaaacu

SEQ ID NO: 2487197 - RNA, 19 nt, Artificial Sequence
  Description of Artificial Sequence: Synthetic oligonucleotide
  Antisense strand to SEQ ID NO: 2487196
aguuugaccaaagucaucu

SEQ ID NO: 2487198 - RNA, 19 nt, Artificial Sequence
  Description of Artificial Sequence: Synthetic oligonucleotide
  Sense strand starting at position 543 of SEQ ID NO: 1887654
caagguuuaucacuagaug

SEQ ID NO: 2487199 - RNA, 19 nt, Artificial Sequence
  Description of Artificial Sequence: Synthetic oligonucleotide
  Antisense strand to SEQ ID NO: 2487198
caucuagugauaaaccuug

SEQ ID NO: 2487200 - RNA, 19 nt, Artificial Sequence
  Description of Artificial Sequence: Synthetic oligonucleotide
  Sense strand starting at position 544 of SEQ ID NO: 1887654
aagguuuaucacuagaugu

SEQ ID NO: 2487201 - RNA, 19 nt, Artificial Sequence
  Description of Artificial Sequence: Synthetic oligonucleotide
  Antisense strand to SEQ ID NO: 2487200
acaucuagugauaaaccuu

SEQ ID NO: 2487202 - RNA, 19 nt, Artificial Sequence
  Description of Artificial Sequence: Synthetic oligonucleotide
  Sense strand starting at position 546 of SEQ ID NO: 1887654
gguuuaucacuagauguuc

SEQ ID NO: 2487203 - RNA, 19 nt, Artificial Sequence
  Description of Artificial Sequence: Synthetic oligonucleotide
  Antisense strand to SEQ ID NO: 2487202
gaacaucuagugauaaacc

SEQ ID NO: 2487204 - RNA, 19 nt, Artificial Sequence
  Description of Artificial Sequence: Synthetic oligonucleotide
  Sense strand starting at position 554 of SEQ ID NO: 1887654
acuagauguucuuuaggac

SEQ ID NO: 2487205 - RNA, 19 nt, Artificial Sequence
  Description of Artificial Sequence: Synthetic oligonucleotide
  Antisense strand to SEQ ID NO: 2487204
guccuaaagaacaucuagu

SEQ ID NO: 2487206 - RNA, 19 nt, Artificial Sequence
  Description of Artificial Sequence: Synthetic oligonucleotide
  Sense strand starting at position 652 of SEQ ID NO: 1887654
uggcuuugaaccuguggaa

SEQ ID NO: 2487207 - RNA, 19 nt, Artificial Sequence
  Description of Artificial Sequence: Synthetic oligonucleotide
  Antisense strand to SEQ ID NO: 2487206
uuccacagguucaaagcca

SEQ ID NO: 2487208 - RNA, 19 nt, Artificial Sequence
  Description of Artificial Sequence: Synthetic oligonucleotide
  Sense strand starting at position 708 of SEQ ID NO: 1887654
ucccuuguugcugauaaga

SEQ ID NO: 2487209 - RNA, 19 nt, Artificial Sequence
  Description of Artificial Sequence: Synthetic oligonucleotide
  Antisense strand to SEQ ID NO: 2487208
ucuuaucagcaacaaggga

SEQ ID NO: 2487210 - RNA, 19 nt, Artificial Sequence
  Description of Artificial Sequence: Synthetic oligonucleotide
  Sense strand starting at position 896 of SEQ ID NO: 1887654
ggugcugucuacccagaga

SEQ ID NO: 2487211 - RNA, 19 nt, Artificial Sequence
  Description of Artificial Sequence: Synthetic oligonucleotide
  Antisense strand to SEQ ID NO: 2487210
ucucuggguagacagcacc

SEQ ID NO: 2487212 - RNA, 19 nt, Artificial Sequence
  Description of Artificial Sequence: Synthetic oligonucleotide
  Sense strand starting at position 1308 of SEQ ID NO: 1887654
gugagacugucuucuggga

SEQ ID NO: 2487213 - RNA, 19 nt, Artificial Sequence
  Description of Artificial Sequence: Synthetic oligonucleotide
  Antisense strand to SEQ ID NO: 2487212
ucccagaagacagucucac

SEQ ID NO: 2487214 - RNA, 19 nt, Artificial Sequence
  Description of Artificial Sequence: Synthetic oligonucleotide
  Sense strand starting at position 1312 of SEQ ID NO: 1887654
gacugucuucugggagggu

SEQ ID NO: 2487215 - RNA, 19 nt, Artificial Sequence
  Description of Artificial Sequence: Synthetic oligonucleotide
  Antisense strand to SEQ ID NO: 2487214
acccucccagaagacaguc

SEQ ID NO: 2487216 - RNA, 19 nt, Artificial Sequence
  Description of Artificial Sequence: Synthetic oligonucleotide
  Sense strand starting at position 1559 of SEQ ID NO: 1887654
ccaugcacuccauauugua

SEQ ID NO: 2487217 - RNA, 19 nt, Artificial Sequence
  Description of Artificial Sequence: Synthetic oligonucleotide
  Antisense strand to SEQ ID NO: 2487216
uacaauauggagugcaugg

SEQ ID NO: 2487218 - RNA, 19 nt, Artificial Sequence
  Description of Artificial Sequence: Synthetic oligonucleotide
  Sense strand starting at position 1695 of SEQ ID NO: 1887654
uauagcauuugugagaaac

SEQ ID NO: 2487219 - RNA, 19 nt, Artificial Sequence
  Description of Artificial Sequence: Synthetic oligonucleotide
  Antisense strand to SEQ ID NO: 2487218
guuucucacaaaugcuaua

SEQ ID NO: 2487220 - RNA, 19 nt, Artificial Sequence
  Description of Artificial Sequence: Synthetic oligonucleotide
  Sense strand starting at position 1697 of SEQ ID NO: 1887654
uagcauuugugagaaacaa

SEQ ID NO: 2487221 - RNA, 19 nt, Artificial Sequence
  Description of Artificial Sequence: Synthetic oligonucleotide
  Antisense strand to SEQ ID NO: 2487220
uuguuucucacaaaugcua

SEQ ID NO: 2487222 - RNA, 19 nt, Artificial Sequence
  Description of Artificial Sequence: Synthetic oligonucleotide
  Sense strand starting at position 1708 of SEQ ID NO: 1887654
agaaacaagacuugcguau

SEQ ID NO: 2487223 - RNA, 19 nt, Artificial Sequence
  Description of Artificial Sequence: Synthetic oligonucleotide
  Antisense strand to SEQ ID NO: 2487222
auacgcaagucuuguuucu

SEQ ID NO: 2487224 - RNA, 19 nt, Artificial Sequence
  Description of Artificial Sequence: Synthetic oligonucleotide
  Sense strand starting at position 1712 of SEQ ID NO: 1887654
acaagacuugcguauauga

SEQ ID NO: 2487225 - RNA, 19 nt, Artificial Sequence
  Description of Artificial Sequence: Synthetic oligonucleotide
  Antisense strand to SEQ ID NO: 2487224
ucauauacgcaagucuugu

SEQ ID NO: 2487226 - RNA, 19 nt, Artificial Sequence
  Description of Artificial Sequence: Synthetic oligonucleotide
  Sense strand starting at position 1714 of SEQ ID NO: 1887654
aagacuugcguauaugaac

SEQ ID NO: 2487227 - RNA, 19 nt, Artificial Sequence
  Description of Artificial Sequence: Synthetic oligonucleotide
  Antisense strand to SEQ ID NO: 2487226
guucauauacgcaagucuu

SEQ ID NO: 2487228 - RNA, 19 nt, Artificial Sequence
  Description of Artificial Sequence: Synthetic oligonucleotide
  Sense strand starting at position 1723 of SEQ ID NO: 1887654
guauaugaacggcagacuu

SEQ ID NO: 2487229 - RNA, 19 nt, Artificial Sequence
  Description of Artificial Sequence: Synthetic oligonucleotide
  Antisense strand to SEQ ID NO: 2487228
aagucugccguucauauac

SEQ ID NO: 2487230 - RNA, 19 nt, Artificial Sequence
  Description of Artificial Sequence: Synthetic oligonucleotide
  Sense strand starting at position 1904 of SEQ ID NO: 1887654
agguuaaagcuuuggauag

SEQ ID NO: 2487231 - RNA, 19 nt, Artificial Sequence
  Description of Artificial Sequence: Synthetic oligonucleotide
  Antisense strand to SEQ ID NO: 2487230
cuauccaaagcuuuaaccu

SEQ ID NO: 2487232 - RNA, 19 nt, Artificial Sequence
  Description of Artificial Sequence: Synthetic oligonucleotide
  Sense strand starting at position 2387 of SEQ ID NO: 1887654
ugcucaugaccuugauacu

SEQ ID NO: 2487233 - RNA, 19 nt, Artificial Sequence
  Description of Artificial Sequence: Synthetic oligonucleotide
  Antisense strand to SEQ ID NO: 2487232
aguaucaaggucaugagca

SEQ ID NO: 2487234 - RNA, 19 nt, Artificial Sequence
  Description of Artificial Sequence: Synthetic oligonucleotide
  Sense strand starting at position 2426 of SEQ ID NO: 1887654
acacauacguuucuccauu

SEQ ID NO: 2487235 - RNA, 19 nt, Artificial Sequence
  Description of Artificial Sequence: Synthetic oligonucleotide
  Antisense strand to SEQ ID NO: 2487234
aauggagaaacguaugugu

SEQ ID NO: 2487236 - RNA, 19 nt, Artificial Sequence
  Description of Artificial Sequence: Synthetic oligonucleotide
  Sense strand starting at position 2438 of SEQ ID NO: 1887654
cuccauuacggucagaugu

SEQ ID NO: 2487237 - RNA, 19 nt, Artificial Sequence
  Description of Artificial Sequence: Synthetic oligonucleotide
  Antisense strand to SEQ ID NO: 2487236
acaucugaccguaauggag

SEQ ID NO: 2487238 - RNA, 19 nt, Artificial Sequence
  Description of Artificial Sequence: Synthetic oligonucleotide
  Sense strand starting at position 2453 of SEQ ID NO: 1887654
augugacaucuugagugga

SEQ ID NO: 2487239 - RNA, 19 nt, Artificial Sequence
  Description of Artificial Sequence: Synthetic oligonucleotide
  Antisense strand to SEQ ID NO: 2487238
uccacucaagaugucacau

SEQ ID NO: 2487240 - RNA, 19 nt, Artificial Sequence
  Description of Artificial Sequence: Synthetic oligonucleotide
  Sense strand starting at position 2455 of SEQ ID NO: 1887654
gugacaucuugaguggacu

SEQ ID NO: 2487241 - RNA, 19 nt, Artificial Sequence
  Description of Artificial Sequence: Synthetic oligonucleotide
  Antisense strand to SEQ ID NO: 2487240
aguccacucaagaugucac

SEQ ID NO: 2487242 - RNA, 19 nt, Artificial Sequence
  Description of Artificial Sequence: Synthetic oligonucleotide
  Sense strand starting at position 2536 of SEQ ID NO: 1887654
gucuuacccuggucuggaa

SEQ ID NO: 2487243 - RNA, 19 nt, Artificial Sequence
  Description of Artificial Sequence: Synthetic oligonucleotide
  Antisense strand to SEQ ID NO: 2487242
uuccagaccaggguaagac

SEQ ID NO: 2487244 - RNA, 19 nt, Artificial Sequence
  Description of Artificial Sequence: Synthetic oligonucleotide
  Sense strand starting at position 2538 of SEQ ID NO: 1887654
cuuacccuggucuggaaau

SEQ ID NO: 2487245 - RNA, 19 nt, Artificial Sequence
  Description of Artificial Sequence: Synthetic oligonucleotide
  Antisense strand to SEQ ID NO: 2487244
auuuccagaccaggguaag

SEQ ID NO: 2487246 - RNA, 19 nt, Artificial Sequence
  Description of Artificial Sequence: Synthetic oligonucleotide
  Sense strand starting at position 2608 of SEQ ID NO: 1887654
cacugugacgagugggauu

SEQ ID NO: 2487247 - RNA, 19 nt, Artificial Sequence
  Description of Artificial Sequence: Synthetic oligonucleotide
  Antisense strand to SEQ ID NO: 2487246
aaucccacucgucacagug

SEQ ID NO: 2487248 - RNA, 19 nt, Artificial Sequence
  Description of Artificial Sequence: Synthetic oligonucleotide
  Sense strand starting at position 2658 of SEQ ID NO: 1887654
ggcucagugaugggacauu

SEQ ID NO: 2487249 - RNA, 19 nt, Artificial Sequence
  Description of Artificial Sequence: Synthetic oligonucleotide
  Antisense strand to SEQ ID NO: 2487248
aaugucccaucacugagcc

SEQ ID NO: 2487250 - RNA, 19 nt, Artificial Sequence
  Description of Artificial Sequence: Synthetic oligonucleotide
  Sense strand starting at position 2699 of SEQ ID NO: 1887654
gcggaugauaaccagucau

SEQ ID NO: 2487251 - RNA, 19 nt, Artificial Sequence
  Description of Artificial Sequence: Synthetic oligonucleotide
  Antisense strand to SEQ ID NO: 2487250
augacugguuaucauccgc

SEQ ID NO: 2487252 - RNA, 19 nt, Artificial Sequence
  Description of Artificial Sequence: Synthetic oligonucleotide
  Sense strand starting at position 2766 of SEQ ID NO: 1887654
auaagucauuguucccaaa

SEQ ID NO: 2487253 - RNA, 19 nt, Artificial Sequence
  Description of Artificial Sequence: Synthetic oligonucleotide
  Antisense strand to SEQ ID NO: 2487252
uuugggaacaaugacuuau

SEQ ID NO: 2487254 - RNA, 19 nt, Artificial Sequence
  Description of Artificial Sequence: Synthetic oligonucleotide
  Sense strand starting at position 2949 of SEQ ID NO: 1887654
cccacaauccagugucaag

SEQ ID NO: 2487255 - RNA, 19 nt, Artificial Sequence
  Description of Artificial Sequence: Synthetic oligonucleotide
  Antisense strand to SEQ ID NO: 2487254
cuugacacuggauuguggg

SEQ ID NO: 2487256 - RNA, 19 nt, Artificial Sequence
  Description of Artificial Sequence: Synthetic oligonucleotide
  Sense strand starting at position 3136 of SEQ ID NO: 1887654
ggacgacugccaugguaag

SEQ ID NO: 2487257 - RNA, 19 nt, Artificial Sequence
  Description of Artificial Sequence: Synthetic oligonucleotide
  Antisense strand to SEQ ID NO: 2487256
cuuaccauggcagucgucc

SEQ ID NO: 2487258 - RNA, 19 nt, Artificial Sequence
  Description of Artificial Sequence: Synthetic oligonucleotide
  Sense strand starting at position 3356 of SEQ ID NO: 1887654
cccauuacagucugaaaug

SEQ ID NO: 2487259 - RNA, 19 nt, Artificial Sequence
  Description of Artificial Sequence: Synthetic oligonucleotide
  Antisense strand to SEQ ID NO: 2487258
cauuucagacuguaauggg

SEQ ID NO: 2487260 - RNA, 19 nt, Artificial Sequence
  Description of Artificial Sequence: Synthetic oligonucleotide
  Sense strand starting at position 3667 of SEQ ID NO: 1887654
gggagcuucuaaccuagga

SEQ ID NO: 2487261 - RNA, 19 nt, Artificial Sequence
  Description of Artificial Sequence: Synthetic oligonucleotide
  Antisense strand to SEQ ID NO: 2487260
uccuagguuagaagcuccc

SEQ ID NO: 2487262 - RNA, 19 nt, Artificial Sequence
  Description of Artificial Sequence: Synthetic oligonucleotide
  Sense strand starting at position 3702 of SEQ ID NO: 1887654
gccaaacucuggucccuaa

SEQ ID NO: 2487263 - RNA, 19 nt, Artificial Sequence
  Description of Artificial Sequence: Synthetic oligonucleotide
  Antisense strand to SEQ ID NO: 2487262
uuagggaccagaguuuggc

SEQ ID NO: 2487264 - RNA, 19 nt, Artificial Sequence
  Description of Artificial Sequence: Synthetic oligonucleotide
  Sense strand starting at position 3930 of SEQ ID NO: 1887654
gaaguucuggacugacuga

SEQ ID NO: 2487265 - RNA, 19 nt, Artificial Sequence
  Description of Artificial Sequence: Synthetic oligonucleotide
  Antisense strand to SEQ ID NO: 2487264
ucagucaguccagaacuuc

SEQ ID NO: 2487266 - RNA, 19 nt, Artificial Sequence
  Description of Artificial Sequence: Synthetic oligonucleotide
  Sense strand starting at position 3982 of SEQ ID NO: 1887654
gagaucuguugggugggaa

SEQ ID NO: 2487267 - RNA, 19 nt, Artificial Sequence
  Description of Artificial Sequence: Synthetic oligonucleotide
  Antisense strand to SEQ ID NO: 2487266
uucccacccaacagaucuc

SEQ ID NO: 2487268 - RNA, 19 nt, Artificial Sequence
  Description of Artificial Sequence: Synthetic oligonucleotide
  Sense strand starting at position 61 of SEQ ID NO: 1887655
ugagguagaucucugcaga

SEQ ID NO: 2487269 - RNA, 19 nt, Artificial Sequence
  Description of Artificial Sequence: Synthetic oligonucleotide
  Antisense strand to SEQ ID NO: 2487268
ucugcagagaucuaccuca

SEQ ID NO: 2487270 - RNA, 19 nt, Artificial Sequence
  Description of Artificial Sequence: Synthetic oligonucleotide
  Sense strand starting at position 62 of SEQ ID NO: 1887655
gagguagaucucugcagag

SEQ ID NO: 2487271 - RNA, 19 nt, Artificial Sequence
  Description of Artificial Sequence: Synthetic oligonucleotide
  Antisense strand to SEQ ID NO: 2487270
cucugcagagaucuaccuc

SEQ ID NO: 2487272 - RNA, 19 nt, Artificial Sequence
  Description of Artificial Sequence: Synthetic oligonucleotide
  Sense strand starting at position 64 of SEQ ID NO: 1887655
gguagaucucugcagaguc

SEQ ID NO: 2487273 - RNA, 19 nt, Artificial Sequence
  Description of Artificial Sequence: Synthetic oligonucleotide
  Antisense strand to SEQ ID NO: 2487272
gacucugcagagaucuacc

SEQ ID NO: 2487274 - RNA, 19 nt, Artificial Sequence
  Description of Artificial Sequence: Synthetic oligonucleotide
  Sense strand starting at position 91 of SEQ ID NO: 1887655
ccucauccagucugaagaa

SEQ ID NO: 2487275 - RNA, 19 nt, Artificial Sequence
  Description of Artificial Sequence: Synthetic oligonucleotide
  Antisense strand to SEQ ID NO: 2487274
uucuucagacuggaugagg

SEQ ID NO: 2487276 - RNA, 19 nt, Artificial Sequence
  Description of Artificial Sequence: Synthetic oligonucleotide
  Sense strand starting at position 117 of SEQ ID NO: 1887655
ccagcagcccuagaucuau

SEQ ID NO: 2487277 - RNA, 19 nt, Artificial Sequence
  Description of Artificial Sequence: Synthetic oligonucleotide
  Antisense strand to SEQ ID NO: 2487276
auagaucuagggcugcugg

SEQ ID NO: 2487278 - RNA, 19 nt, Artificial Sequence
  Description of Artificial Sequence: Synthetic oligonucleotide
  Sense strand starting at position 123 of SEQ ID NO: 1887655
gcccuagaucuaugagguc

SEQ ID NO: 2487279 - RNA, 19 nt, Artificial Sequence
  Description of Artificial Sequence: Synthetic oligonucleotide
  Antisense strand to SEQ ID NO: 2487278
gaccucauagaucuagggc

SEQ ID NO: 2487280 - RNA, 19 nt, Artificial Sequence
  Description of Artificial Sequence: Synthetic oligonucleotide
  Sense strand starting at position 282 of SEQ ID NO: 1887655
cacgaugagucauucucau

SEQ ID NO: 2487281 - RNA, 19 nt, Artificial Sequence
  Description of Artificial Sequence: Synthetic oligonucleotide
  Antisense strand to SEQ ID NO: 2487280
augagaaugacucaucgug

SEQ ID NO: 2487282 - RNA, 19 nt, Artificial Sequence
  Description of Artificial Sequence: Synthetic oligonucleotide
  Sense strand starting at position 289 of SEQ ID NO: 1887655
agucauucucaugaggucu

SEQ ID NO: 2487283 - RNA, 19 nt, Artificial Sequence
  Description of Artificial Sequence: Synthetic oligonucleotide
  Antisense strand to SEQ ID NO: 2487282
agaccucaugagaaugacu

SEQ ID NO: 2487284 - RNA, 19 nt, Artificial Sequence
  Description of Artificial Sequence: Synthetic oligonucleotide
  Sense strand starting at position 295 of SEQ ID NO: 1887655
ucucaugaggucuguaaag

SEQ ID NO: 2487285 - RNA, 19 nt, Artificial Sequence
  Description of Artificial Sequence: Synthetic oligonucleotide
  Antisense strand to SEQ ID NO: 2487284
cuuuacagaccucaugaga

SEQ ID NO: 2487286 - RNA, 19 nt, Artificial Sequence
  Description of Artificial Sequence: Synthetic oligonucleotide
  Sense strand starting at position 306 of SEQ ID NO: 1887655
cuguaaagauguccauuau

SEQ ID NO: 2487287 - RNA, 19 nt, Artificial Sequence
  Description of Artificial Sequence: Synthetic oligonucleotide
  Antisense strand to SEQ ID NO: 2487286
auaauggacaucuuuacag

SEQ ID NO: 2487288 - RNA, 19 nt, Artificial Sequence
  Description of Artificial Sequence: Synthetic oligonucleotide
  Sense strand starting at position 307 of SEQ ID NO: 1887655
uguaaagauguccauuauc

SEQ ID NO: 2487289 - RNA, 19 nt, Artificial Sequence
  Description of Artificial Sequence: Synthetic oligonucleotide
  Antisense strand to SEQ ID NO: 2487288
gauaauggacaucuuuaca

SEQ ID NO: 2487290 - RNA, 19 nt, Artificial Sequence
  Description of Artificial Sequence: Synthetic oligonucleotide
  Sense strand starting at position 312 of SEQ ID NO: 1887655
agauguccauuaucaaaug

SEQ ID NO: 2487291 - RNA, 19 nt, Artificial Sequence
  Description of Artificial Sequence: Synthetic oligonucleotide
  Antisense strand to SEQ ID NO: 2487290
cauuugauaauggacaucu

SEQ ID NO: 2487292 - RNA, 19 nt, Artificial Sequence
  Description of Artificial Sequence: Synthetic oligonucleotide
  Sense strand starting at position 423 of SEQ ID NO: 1887655
gcucacuguccugaugagu

SEQ ID NO: 2487293 - RNA, 19 nt, Artificial Sequence
  Description of Artificial Sequence: Synthetic oligonucleotide
  Antisense strand to SEQ ID NO: 2487292
acucaucaggacagugagc

SEQ ID NO: 2487294 - RNA, 19 nt, Artificial Sequence
  Description of Artificial Sequence: Synthetic oligonucleotide
  Sense strand starting at position 733 of SEQ ID NO: 1887655
ucagcauauuuggacagaa

SEQ ID NO: 2487295 - RNA, 19 nt, Artificial Sequence
  Description of Artificial Sequence: Synthetic oligonucleotide
  Antisense strand to SEQ ID NO: 2487294
uucuguccaaauaugcuga

SEQ ID NO: 2487296 - RNA, 19 nt, Artificial Sequence
  Description of Artificial Sequence: Synthetic oligonucleotide
  Sense strand starting at position 900 of SEQ ID NO: 1887655
ucccgaguuggagggauaa

SEQ ID NO: 2487297 - RNA, 19 nt, Artificial Sequence
  Description of Artificial Sequence: Synthetic oligonucleotide
  Antisense strand to SEQ ID NO: 2487296
uuaucccuccaacucggga

SEQ ID NO: 2487298 - RNA, 19 nt, Artificial Sequence
  Description of Artificial Sequence: Synthetic oligonucleotide
  Sense strand starting at position 1029 of SEQ ID NO: 1887655
aguugcuaccucuggaaag

SEQ ID NO: 2487299 - RNA, 19 nt, Artificial Sequence
  Description of Artificial Sequence: Synthetic oligonucleotide
  Antisense strand to SEQ ID NO: 2487298
cuuuccagagguagcaacu

SEQ ID NO: 2487300 - RNA, 19 nt, Artificial Sequence
  Description of Artificial Sequence: Synthetic oligonucleotide
  Sense strand starting at position 1445 of SEQ ID NO: 1887655
guuucugacccuuggagag

SEQ ID NO: 2487301 - RNA, 19 nt, Artificial Sequence
  Description of Artificial Sequence: Synthetic oligonucleotide
  Antisense strand to SEQ ID NO: 2487300
cucuccaagggucagaaac

SEQ ID NO: 2487302 - RNA, 19 nt, Artificial Sequence
  Description of Artificial Sequence: Synthetic oligonucleotide
  Sense strand starting at position 1743 of SEQ ID NO: 1887655
gcgagauuacugcauagca

SEQ ID NO: 2487303 - RNA, 19 nt, Artificial Sequence
  Description of Artificial Sequence: Synthetic oligonucleotide
  Antisense strand to SEQ ID NO: 2487302
ugcuaugcaguaaucucgc

SEQ ID NO: 2487304 - RNA, 19 nt, Artificial Sequence
  Description of Artificial Sequence: Synthetic oligonucleotide
  Sense strand starting at position 1745 of SEQ ID NO: 1887655
gagauuacugcauagcaga

SEQ ID NO: 2487305 - RNA, 19 nt, Artificial Sequence
  Description of Artificial Sequence: Synthetic oligonucleotide
  Antisense strand to SEQ ID NO: 2487304
ucugcuaugcaguaaucuc

SEQ ID NO: 2487306 - RNA, 19 nt, Artificial Sequence
  Description of Artificial Sequence: Synthetic oligonucleotide
  Sense strand starting at position 1798 of SEQ ID NO: 1887655
gugguauggcaggaaaggu

SEQ ID NO: 2487307 - RNA, 19 nt, Artificial Sequence
  Description of Artificial Sequence: Synthetic oligonucleotide
  Antisense strand to SEQ ID NO: 2487306
accuuuccugccauaccac

SEQ ID NO: 2487308 - RNA, 19 nt, Artificial Sequence
  Description of Artificial Sequence: Synthetic oligonucleotide
  Sense strand starting at position 2141 of SEQ ID NO: 1887655
guuggucucacggaaaucu

SEQ ID NO: 2487309 - RNA, 19 nt, Artificial Sequence
  Description of Artificial Sequence: Synthetic oligonucleotide
  Antisense strand to SEQ ID NO: 2487308
agauuuccgugagaccaac

SEQ ID NO: 2487310 - RNA, 19 nt, Artificial Sequence
  Description of Artificial Sequence: Synthetic oligonucleotide
  Sense strand starting at position 2468 of SEQ ID NO: 1887655
ggcuguguucucaggugag

SEQ ID NO: 2487311 - RNA, 19 nt, Artificial Sequence
  Description of Artificial Sequence: Synthetic oligonucleotide
  Antisense strand to SEQ ID NO: 2487310
cucaccugagaacacagcc

SEQ ID NO: 2487312 - RNA, 19 nt, Artificial Sequence
  Description of Artificial Sequence: Synthetic oligonucleotide
  Sense strand starting at position 2619 of SEQ ID NO: 1887655
cgaguuacucuugacuucu

SEQ ID NO: 2487313 - RNA, 19 nt, Artificial Sequence
  Description of Artificial Sequence: Synthetic oligonucleotide
  Antisense strand to SEQ ID NO: 2487312
agaagucaagaguaacucg

SEQ ID NO: 2487314 - RNA, 19 nt, Artificial Sequence
  Description of Artificial Sequence: Synthetic oligonucleotide
  Sense strand starting at position 2683 of SEQ ID NO: 1887655
gggaacuugguuugaacua

SEQ ID NO: 2487315 - RNA, 19 nt, Artificial Sequence
  Description of Artificial Sequence: Synthetic oligonucleotide
  Antisense strand to SEQ ID NO: 2487314
uaguucaaaccaaguuccc

SEQ ID NO: 2487316 - RNA, 19 nt, Artificial Sequence
  Description of Artificial Sequence: Synthetic oligonucleotide
  Sense strand starting at position 2719 of SEQ ID NO: 1887655
auaggaaguuuccauuucu

SEQ ID NO: 2487317 - RNA, 19 nt, Artificial Sequence
  Description of Artificial Sequence: Synthetic oligonucleotide
  Antisense strand to SEQ ID NO: 2487316
agaaauggaaacuuccuau

SEQ ID NO: 2487318 - RNA, 19 nt, Artificial Sequence
  Description of Artificial Sequence: Synthetic oligonucleotide
  Sense strand starting at position 2804 of SEQ ID NO: 1887655
cauacugucggucaagaau

SEQ ID NO: 2487319 - RNA, 19 nt, Artificial Sequence
  Description of Artificial Sequence: Synthetic oligonucleotide
  Antisense strand to SEQ ID NO: 2487318
auucuugaccgacaguaug

SEQ ID NO: 2487320 - RNA, 19 nt, Artificial Sequence
  Description of Artificial Sequence: Synthetic oligonucleotide
  Sense strand starting at position 2823 of SEQ ID NO: 1887655
cgaaaccuuuggguugauu

SEQ ID NO: 2487321 - RNA, 19 nt, Artificial Sequence
  Description of Artificial Sequence: Synthetic oligonucleotide
  Antisense strand to SEQ ID NO: 2487320
aaucaacccaaagguuucg

SEQ ID NO: 2487322 - RNA, 19 nt, Artificial Sequence
  Description of Artificial Sequence: Synthetic oligonucleotide
  Sense strand starting at position 2836 of SEQ ID NO: 1887655
uugauugugccacacggua

SEQ ID NO: 2487323 - RNA, 19 nt, Artificial Sequence
  Description of Artificial Sequence: Synthetic oligonucleotide
  Antisense strand to SEQ ID NO: 2487322
uaccguguggcacaaucaa

SEQ ID NO: 2487324 - RNA, 19 nt, Artificial Sequence
  Description of Artificial Sequence: Synthetic oligonucleotide
  Sense strand starting at position 2867 of SEQ ID NO: 1887655
cuugaugucauauaacggu

SEQ ID NO: 2487325 - RNA, 19 nt, Artificial Sequence
  Description of Artificial Sequence: Synthetic oligonucleotide
  Antisense strand to SEQ ID NO: 2487324
accguuauaugacaucaag

SEQ ID NO: 2487326 - RNA, 19 nt, Artificial Sequence
  Description of Artificial Sequence: Synthetic oligonucleotide
  Sense strand starting at position 2919 of SEQ ID NO: 1887655
gaacguugacuugggucaa

SEQ ID NO: 2487327 - RNA, 19 nt, Artificial Sequence
  Description of Artificial Sequence: Synthetic oligonucleotide
  Antisense strand to SEQ ID NO: 2487326
uugacccaagucaacguuc

SEQ ID NO: 2487328 - RNA, 19 nt, Artificial Sequence
  Description of Artificial Sequence: Synthetic oligonucleotide
  Sense strand starting at position 2932 of SEQ ID NO: 1887655
ggucaaagaccauguaaau

SEQ ID NO: 2487329 - RNA, 19 nt, Artificial Sequence
  Description of Artificial Sequence: Synthetic oligonucleotide
  Antisense strand to SEQ ID NO: 2487328
auuuacauggucuuugacc

SEQ ID NO: 2487330 - RNA, 19 nt, Artificial Sequence
  Description of Artificial Sequence: Synthetic oligonucleotide
  Sense strand starting at position 2942 of SEQ ID NO: 1887655
cauguaaaucgcgagauug

SEQ ID NO: 2487331 - RNA, 19 nt, Artificial Sequence
  Description of Artificial Sequence: Synthetic oligonucleotide
  Antisense strand to SEQ ID NO: 2487330
caaucucgcgauuuacaug

SEQ ID NO: 2487332 - RNA, 19 nt, Artificial Sequence
  Description of Artificial Sequence: Synthetic oligonucleotide
  Sense strand starting at position 2954 of SEQ ID NO: 1887655
gagauugugguuugaauua

SEQ ID NO: 2487333 - RNA, 19 nt, Artificial Sequence
  Description of Artificial Sequence: Synthetic oligonucleotide
  Antisense strand to SEQ ID NO: 2487332
uaauucaaaccacaaucuc

SEQ ID NO: 2487334 - RNA, 19 nt, Artificial Sequence
  Description of Artificial Sequence: Synthetic oligonucleotide
  Sense strand starting at position 3011 of SEQ ID NO: 1887655
ccauuauaccuugguccca

SEQ ID NO: 2487335 - RNA, 19 nt, Artificial Sequence
  Description of Artificial Sequence: Synthetic oligonucleotide
  Antisense strand to SEQ ID NO: 2487334
ugggaccaagguauaaugg

SEQ ID NO: 2487336 - RNA, 19 nt, Artificial Sequence
  Description of Artificial Sequence: Synthetic oligonucleotide
  Sense strand starting at position 3088 of SEQ ID NO: 1887655
gacagaugcuucuugcuga

SEQ ID NO: 2487337 - RNA, 19 nt, Artificial Sequence
  Description of Artificial Sequence: Synthetic oligonucleotide
  Antisense strand to SEQ ID NO: 2487336
ucagcaagaagcaucuguc

SEQ ID NO: 2487338 - RNA, 19 nt, Artificial Sequence
  Description of Artificial Sequence: Synthetic oligonucleotide
  Sense strand starting at position 3102 of SEQ ID NO: 1887655
gcugacagcugaguaauuu

SEQ ID NO: 2487339 - RNA, 19 nt, Artificial Sequence
  Description of Artificial Sequence: Synthetic oligonucleotide
  Antisense strand to SEQ ID NO: 2487338
aaauuacucagcugucagc

SEQ ID NO: 2487340 - RNA, 19 nt, Artificial Sequence
  Description of Artificial Sequence: Synthetic oligonucleotide
  Sense strand starting at position 3457 of SEQ ID NO: 1887655
cuuguugcugugccauuaa

SEQ ID NO: 2487341 - RNA, 19 nt, Artificial Sequence
  Description of Artificial Sequence: Synthetic oligonucleotide
  Antisense strand to SEQ ID NO: 2487340
uuaauggcacagcaacaag

SEQ ID NO: 2487342 - RNA, 19 nt, Artificial Sequence
  Description of Artificial Sequence: Synthetic oligonucleotide
  Sense strand starting at position 3460 of SEQ ID NO: 1887655
guugcugugccauuaaguc

SEQ ID NO: 2487343 - RNA, 19 nt, Artificial Sequence
  Description of Artificial Sequence: Synthetic oligonucleotide
  Antisense strand to SEQ ID NO: 2487342
gacuuaauggcacagcaac

SEQ ID NO: 2487344 - RNA, 19 nt, Artificial Sequence
  Description of Artificial Sequence: Synthetic oligonucleotide
  Sense strand starting at position 3690 of SEQ ID NO: 1887655
ccaguuauccaguaccauc

SEQ ID NO: 2487345 - RNA, 19 nt, Artificial Sequence
  Description of Artificial Sequence: Synthetic oligonucleotide
  Antisense strand to SEQ ID NO: 2487344
gaugguacuggauaacugg

SEQ ID NO: 2487346 - RNA, 19 nt, Artificial Sequence
  Description of Artificial Sequence: Synthetic oligonucleotide
  Sense strand starting at position 3746 of SEQ ID NO: 1887655
cuuggccacuugucauaaa

SEQ ID NO: 2487347 - RNA, 19 nt, Artificial Sequence
  Description of Artificial Sequence: Synthetic oligonucleotide
  Antisense strand to SEQ ID NO: 2487346
uuuaugacaaguggccaag

SEQ ID NO: 2487348 - RNA, 19 nt, Artificial Sequence
  Description of Artificial Sequence: Synthetic oligonucleotide
  Sense strand starting at position 84 of SEQ ID NO: 1887656
ggcucacaccuguaggauu

SEQ ID NO: 2487349 - RNA, 19 nt, Artificial Sequence
  Description of Artificial Sequence: Synthetic oligonucleotide
  Antisense strand to SEQ ID NO: 2487348
aauccuacaggugugagcc

SEQ ID NO: 2487350 - RNA, 19 nt, Artificial Sequence
  Description of Artificial Sequence: Synthetic oligonucleotide
  Sense strand starting at position 248 of SEQ ID NO: 1887656
ccaggaguucuagguugga

SEQ ID NO: 2487351 - RNA, 19 nt, Artificial Sequence
  Description of Artificial Sequence: Synthetic oligonucleotide
  Antisense strand to SEQ ID NO: 2487350
uccaaccuagaacuccugg

SEQ ID NO: 2487352 - RNA, 19 nt, Artificial Sequence
  Description of Artificial Sequence: Synthetic oligonucleotide
  Sense strand starting at position 295 of SEQ ID NO: 1887656
gacccucaucuuggaguaa

SEQ ID NO: 2487353 - RNA, 19 nt, Artificial Sequence
  Description of Artificial Sequence: Synthetic oligonucleotide
  Antisense strand to SEQ ID NO: 2487352
uuacuccaagaugaggguc

SEQ ID NO: 2487354 - RNA, 19 nt, Artificial Sequence
  Description of Artificial Sequence: Synthetic oligonucleotide
  Sense strand starting at position 296 of SEQ ID NO: 1887656
acccucaucuuggaguaaa

SEQ ID NO: 2487355 - RNA, 19 nt, Artificial Sequence
  Description of Artificial Sequence: Synthetic oligonucleotide
  Antisense strand to SEQ ID NO: 2487354
uuuacuccaagaugagggu

SEQ ID NO: 2487356 - RNA, 19 nt, Artificial Sequence
  Description of Artificial Sequence: Synthetic oligonucleotide
  Sense strand starting at position 331 of SEQ ID NO: 1887656
acccaagucugauuauaag

SEQ ID NO: 2487357 - RNA, 19 nt, Artificial Sequence
  Description of Artificial Sequence: Synthetic oligonucleotide
  Antisense strand to SEQ ID NO: 2487356
cuuauaaucagacuugggu

SEQ ID NO: 2487358 - RNA, 19 nt, Artificial Sequence
  Description of Artificial Sequence: Synthetic oligonucleotide
  Sense strand starting at position 337 of SEQ ID NO: 1887656
gucugauuauaaguauacu

SEQ ID NO: 2487359 - RNA, 19 nt, Artificial Sequence
  Description of Artificial Sequence: Synthetic oligonucleotide
  Antisense strand to SEQ ID NO: 2487358
aguauacuuauaaucagac

SEQ ID NO: 2487360 - RNA, 19 nt, Artificial Sequence
  Description of Artificial Sequence: Synthetic oligonucleotide
  Sense strand starting at position 345 of SEQ ID NO: 1887656
auaaguauacucugcaggu

SEQ ID NO: 2487361 - RNA, 19 nt, Artificial Sequence
  Description of Artificial Sequence: Synthetic oligonucleotide
  Antisense strand to SEQ ID NO: 2487360
accugcagaguauacuuau

SEQ ID NO: 2487362 - RNA, 19 nt, Artificial Sequence
  Description of Artificial Sequence: Synthetic oligonucleotide
  Sense strand starting at position 351 of SEQ ID NO: 1887656
auacucugcagguguguua

SEQ ID NO: 2487363 - RNA, 19 nt, Artificial Sequence
  Description of Artificial Sequence: Synthetic oligonucleotide
  Antisense strand to SEQ ID NO: 2487362
uaacacaccugcagaguau

SEQ ID NO: 2487364 - RNA, 19 nt, Artificial Sequence
  Description of Artificial Sequence: Synthetic oligonucleotide
  Sense strand starting at position 498 of SEQ ID NO: 1887656
ccagcacucuggguguuua

SEQ ID NO: 2487365 - RNA, 19 nt, Artificial Sequence
  Description of Artificial Sequence: Synthetic oligonucleotide
  Antisense strand to SEQ ID NO: 2487364
uaaacacccagagugcugg

SEQ ID NO: 2487366 - RNA, 19 nt, Artificial Sequence
  Description of Artificial Sequence: Synthetic oligonucleotide
  Sense strand starting at position 499 of SEQ ID NO: 1887656
cagcacucuggguguuuau

SEQ ID NO: 2487367 - RNA, 19 nt, Artificial Sequence
  Description of Artificial Sequence: Synthetic oligonucleotide
  Antisense strand to SEQ ID NO: 2487366
auaaacacccagagugcug

SEQ ID NO: 2487368 - RNA, 19 nt, Artificial Sequence
  Description of Artificial Sequence: Synthetic oligonucleotide
  Sense strand starting at position 509 of SEQ ID NO: 1887656
gguguuuauugguuuccuu

SEQ ID NO: 2487369 - RNA, 19 nt, Artificial Sequence
  Description of Artificial Sequence: Synthetic oligonucleotide
  Antisense strand to SEQ ID NO: 2487368
aaggaaaccaauaaacacc

SEQ ID NO: 2487370 - RNA, 19 nt, Artificial Sequence
  Description of Artificial Sequence: Synthetic oligonucleotide
  Sense strand starting at position 512 of SEQ ID NO: 1887656
guuuauugguuuccuugga

SEQ ID NO: 2487371 - RNA, 19 nt, Artificial Sequence
  Description of Artificial Sequence: Synthetic oligonucleotide
  Antisense strand to SEQ ID NO: 2487370
uccaaggaaaccaauaaac

SEQ ID NO: 2487372 - RNA, 19 nt, Artificial Sequence
  Description of Artificial Sequence: Synthetic oligonucleotide
  Sense strand starting at position 513 of SEQ ID NO: 1887656
uuuauugguuuccuuggau

SEQ ID NO: 2487373 - RNA, 19 nt, Artificial Sequence
  Description of Artificial Sequence: Synthetic oligonucleotide
  Antisense strand to SEQ ID NO: 2487372
auccaaggaaaccaauaaa

SEQ ID NO: 2487374 - RNA, 19 nt, Artificial Sequence
  Description of Artificial Sequence: Synthetic oligonucleotide
  Sense strand starting at position 598 of SEQ ID NO: 1887656
guuugcauguguucuggaa

SEQ ID NO: 2487375 - RNA, 19 nt, Artificial Sequence
  Description of Artificial Sequence: Synthetic oligonucleotide
  Antisense strand to SEQ ID NO: 2487374
uuccagaacacaugcaaac

SEQ ID NO: 2487376 - RNA, 19 nt, Artificial Sequence
  Description of Artificial Sequence: Synthetic oligonucleotide
  Sense strand starting at position 673 of SEQ ID NO: 1887656
acagguugcccuuaugaau

SEQ ID NO: 2487377 - RNA, 19 nt, Artificial Sequence
  Description of Artificial Sequence: Synthetic oligonucleotide
  Antisense strand to SEQ ID NO: 2487376
auucauaagggcaaccugu

SEQ ID NO: 2487378 - RNA, 19 nt, Artificial Sequence
  Description of Artificial Sequence: Synthetic oligonucleotide
  Sense strand starting at position 774 of SEQ ID NO: 1887656
uggcuagauuuauagagaa

SEQ ID NO: 2487379 - RNA, 19 nt, Artificial Sequence
  Description of Artificial Sequence: Synthetic oligonucleotide
  Antisense strand to SEQ ID NO: 2487378
uucucuauaaaucuagcca

SEQ ID NO: 2487380 - RNA, 19 nt, Artificial Sequence
  Description of Artificial Sequence: Synthetic oligonucleotide
  Sense strand starting at position 868 of SEQ ID NO: 1887656
aauggaaucugagcuguuu

SEQ ID NO: 2487381 - RNA, 19 nt, Artificial Sequence
  Description of Artificial Sequence: Synthetic oligonucleotide
  Antisense strand to SEQ ID NO: 2487380
aaacagcucagauuccauu

SEQ ID NO: 2487382 - RNA, 19 nt, Artificial Sequence
  Description of Artificial Sequence: Synthetic oligonucleotide
  Sense strand starting at position 870 of SEQ ID NO: 1887656
uggaaucugagcuguuuaa

SEQ ID NO: 2487383 - RNA, 19 nt, Artificial Sequence
  Description of Artificial Sequence: Synthetic oligonucleotide
  Antisense strand to SEQ ID NO: 2487382
uuaaacagcucagauucca

SEQ ID NO: 2487384 - RNA, 19 nt, Artificial Sequence
  Description of Artificial Sequence: Synthetic oligonucleotide
  Sense strand starting at position 874 of SEQ ID NO: 1887656
aucugagcuguuuaagaau

SEQ ID NO: 2487385 - RNA, 19 nt, Artificial Sequence
  Description of Artificial Sequence: Synthetic oligonucleotide
  Antisense strand to SEQ ID NO: 2487384
auucuuaaacagcucagau

SEQ ID NO: 2487386 - RNA, 19 nt, Artificial Sequence
  Description of Artificial Sequence: Synthetic oligonucleotide
  Sense strand starting at position 1168 of SEQ ID NO: 1887656
agaccaccuuggucaauau

SEQ ID NO: 2487387 - RNA, 19 nt, Artificial Sequence
  Description of Artificial Sequence: Synthetic oligonucleotide
  Antisense strand to SEQ ID NO: 2487386
auauugaccaagguggucu

SEQ ID NO: 2487388 - RNA, 19 nt, Artificial Sequence
  Description of Artificial Sequence: Synthetic oligonucleotide
  Sense strand starting at position 1226 of SEQ ID NO: 1887656
gggugugguggaggguaau

SEQ ID NO: 2487389 - RNA, 19 nt, Artificial Sequence
  Description of Artificial Sequence: Synthetic oligonucleotide
  Antisense strand to SEQ ID NO: 2487388
auuacccuccaccacaccc

SEQ ID NO: 2487390 - RNA, 19 nt, Artificial Sequence
  Description of Artificial Sequence: Synthetic oligonucleotide
  Sense strand starting at position 1236 of SEQ ID NO: 1887656
gaggguaaucccggcuacu

SEQ ID NO: 2487391 - RNA, 19 nt, Artificial Sequence
  Description of Artificial Sequence: Synthetic oligonucleotide
  Antisense strand to SEQ ID NO: 2487390
aguagccgggauuacccuc

SEQ ID NO: 2487392 - RNA, 19 nt, Artificial Sequence
  Description of Artificial Sequence: Synthetic oligonucleotide
  Sense strand starting at position 1639 of SEQ ID NO: 1887656
ccgcaucucuauuuguauu

SEQ ID NO: 2487393 - RNA, 19 nt, Artificial Sequence
  Description of Artificial Sequence: Synthetic oligonucleotide
  Antisense strand to SEQ ID NO: 2487392
aauacaaauagagaugcgg

SEQ ID NO: 2487394 - RNA, 19 nt, Artificial Sequence
  Description of Artificial Sequence: Synthetic oligonucleotide
  Sense strand starting at position 1705 of SEQ ID NO: 1887656
cagggaaauucucaggcaa

SEQ ID NO: 2487395 - RNA, 19 nt, Artificial Sequence
  Description of Artificial Sequence: Synthetic oligonucleotide
  Antisense strand to SEQ ID NO: 2487394
uugccugagaauuucccug

SEQ ID NO: 2487396 - RNA, 19 nt, Artificial Sequence
  Description of Artificial Sequence: Synthetic oligonucleotide
  Sense strand starting at position 1743 of SEQ ID NO: 1887656
ugaaauuaccaagacgcuu

SEQ ID NO: 2487397 - RNA, 19 nt, Artificial Sequence
  Description of Artificial Sequence: Synthetic oligonucleotide
  Antisense strand to SEQ ID NO: 2487396
aagcgucuugguaauuuca

SEQ ID NO: 2487398 - RNA, 19 nt, Artificial Sequence
  Description of Artificial Sequence: Synthetic oligonucleotide
  Sense strand starting at position 2006 of SEQ ID NO: 1887656
gcuugagcauucucagggu

SEQ ID NO: 2487399 - RNA, 19 nt, Artificial Sequence
  Description of Artificial Sequence: Synthetic oligonucleotide
  Antisense strand to SEQ ID NO: 2487398
acccugagaaugcucaagc

SEQ ID NO: 2487400 - RNA, 19 nt, Artificial Sequence
  Description of Artificial Sequence: Synthetic oligonucleotide
  Sense strand starting at position 2010 of SEQ ID NO: 1887656
gagcauucucaggguccau

SEQ ID NO: 2487401 - RNA, 19 nt, Artificial Sequence
  Description of Artificial Sequence: Synthetic oligonucleotide
  Antisense strand to SEQ ID NO: 2487400
auggacccugagaaugcuc

SEQ ID NO: 2487402 - RNA, 19 nt, Artificial Sequence
  Description of Artificial Sequence: Synthetic oligonucleotide
  Sense strand starting at position 2019 of SEQ ID NO: 1887656
caggguccaucugaaauca

SEQ ID NO: 2487403 - RNA, 19 nt, Artificial Sequence
  Description of Artificial Sequence: Synthetic oligonucleotide
  Antisense strand to SEQ ID NO: 2487402
ugauuucagauggacccug

SEQ ID NO: 2487404 - RNA, 19 nt, Artificial Sequence
  Description of Artificial Sequence: Synthetic oligonucleotide
  Sense strand starting at position 2029 of SEQ ID NO: 1887656
cugaaaucagagugcaaac

SEQ ID NO: 2487405 - RNA, 19 nt, Artificial Sequence
  Description of Artificial Sequence: Synthetic oligonucleotide
  Antisense strand to SEQ ID NO: 2487404
guuugcacucugauuucag

SEQ ID NO: 2487406 - RNA, 19 nt, Artificial Sequence
  Description of Artificial Sequence: Synthetic oligonucleotide
  Sense strand starting at position 2083 of SEQ ID NO: 1887656
agcagaauuaggcagaagu

SEQ ID NO: 2487407 - RNA, 19 nt, Artificial Sequence
  Description of Artificial Sequence: Synthetic oligonucleotide
  Antisense strand to SEQ ID NO: 2487406
acuucugccuaauucugcu

SEQ ID NO: 2487408 - RNA, 19 nt, Artificial Sequence
  Description of Artificial Sequence: Synthetic oligonucleotide
  Sense strand starting at position 2093 of SEQ ID NO: 1887656
ggcagaaguaaguagaagu

SEQ ID NO: 2487409 - RNA, 19 nt, Artificial Sequence
  Description of Artificial Sequence: Synthetic oligonucleotide
  Antisense strand to SEQ ID NO: 2487408
acuucuacuuacuucugcc

SEQ ID NO: 2487410 - RNA, 19 nt, Artificial Sequence
  Description of Artificial Sequence: Synthetic oligonucleotide
  Sense strand starting at position 2190 of SEQ ID NO: 1887656
cgggacagacguuaugaga

SEQ ID NO: 2487411 - RNA, 19 nt, Artificial Sequence
  Description of Artificial Sequence: Synthetic oligonucleotide
  Antisense strand to SEQ ID NO: 2487410
ucucauaacgucugucccg

SEQ ID NO: 2487412 - RNA, 19 nt, Artificial Sequence
  Description of Artificial Sequence: Synthetic oligonucleotide
  Sense strand starting at position 2220 of SEQ ID NO: 1887656
cgaggcauacaauggagaa

SEQ ID NO: 2487413 - RNA, 19 nt, Artificial Sequence
  Description of Artificial Sequence: Synthetic oligonucleotide
  Antisense strand to SEQ ID NO: 2487412
uucuccauuguaugccucg

SEQ ID NO: 2487414 - RNA, 19 nt, Artificial Sequence
  Description of Artificial Sequence: Synthetic oligonucleotide
  Sense strand starting at position 2735 of SEQ ID NO: 1887656
caggaaacauggugaaacu

SEQ ID NO: 2487415 - RNA, 19 nt, Artificial Sequence
  Description of Artificial Sequence: Synthetic oligonucleotide
  Antisense strand to SEQ ID NO: 2487414
aguuucaccauguuuccug

SEQ ID NO: 2487416 - RNA, 19 nt, Artificial Sequence
  Description of Artificial Sequence: Synthetic oligonucleotide
  Sense strand starting at position 3330 of SEQ ID NO: 1887656
ggucuauggcaccaaacaa

SEQ ID NO: 2487417 - RNA, 19 nt, Artificial Sequence
  Description of Artificial Sequence: Synthetic oligonucleotide
  Antisense strand to SEQ ID NO: 2487416
uuguuuggugccauagacc

SEQ ID NO: 2487418 - RNA, 19 nt, Artificial Sequence
  Description of Artificial Sequence: Synthetic oligonucleotide
  Sense strand starting at position 3409 of SEQ ID NO: 1887656
uuaagaaccucugggaaug

SEQ ID NO: 2487419 - RNA, 19 nt, Artificial Sequence
  Description of Artificial Sequence: Synthetic oligonucleotide
  Antisense strand to SEQ ID NO: 2487418
cauucccagagguucuuaa

SEQ ID NO: 2487420 - RNA, 19 nt, Artificial Sequence
  Description of Artificial Sequence: Synthetic oligonucleotide
  Sense strand starting at position 3511 of SEQ ID NO: 1887656
gcuauagucgcaccauugu

SEQ ID NO: 2487421 - RNA, 19 nt, Artificial Sequence
  Description of Artificial Sequence: Synthetic oligonucleotide
  Antisense strand to SEQ ID NO: 2487420
acaauggugcgacuauagc

SEQ ID NO: 2487422 - RNA, 19 nt, Artificial Sequence
  Description of Artificial Sequence: Synthetic oligonucleotide
  Sense strand starting at position 3559 of SEQ ID NO: 1887656
ccaugauauccuggguaga

SEQ ID NO: 2487423 - RNA, 19 nt, Artificial Sequence
  Description of Artificial Sequence: Synthetic oligonucleotide
  Antisense strand to SEQ ID NO: 2487422
ucuacccaggauaucaugg

SEQ ID NO: 2487424 - RNA, 19 nt, Artificial Sequence
  Description of Artificial Sequence: Synthetic oligonucleotide
  Sense strand starting at position 3560 of SEQ ID NO: 1887656
caugauauccuggguagaa

SEQ ID NO: 2487425 - RNA, 19 nt, Artificial Sequence
  Description of Artificial Sequence: Synthetic oligonucleotide
  Antisense strand to SEQ ID NO: 2487424
uucuacccaggauaucaug

SEQ ID NO: 2487426 - RNA, 19 nt, Artificial Sequence
  Description of Artificial Sequence: Synthetic oligonucleotide
  Sense strand starting at position 3946 of SEQ ID NO: 1887656
agaacaauguugcauaaca

SEQ ID NO: 2487427 - RNA, 19 nt, Artificial Sequence
  Description of Artificial Sequence: Synthetic oligonucleotide
  Antisense strand to SEQ ID NO: 2487426
uguuaugcaacauuguucu

SEQ ID NO: 2487428 - RNA, 19 nt, Artificial Sequence
  Description of Artificial Sequence: Synthetic oligonucleotide
  Sense strand starting at position 516 of SEQ ID NO: 1887657
uuaucauguuggucaagcu

SEQ ID NO: 2487429 - RNA, 19 nt, Artificial Sequence
  Description of Artificial Sequence: Synthetic oligonucleotide
  Antisense strand to SEQ ID NO: 2487428
agcuugaccaacaugauaa

SEQ ID NO: 2487430 - RNA, 19 nt, Artificial Sequence
  Description of Artificial Sequence: Synthetic oligonucleotide
  Sense strand starting at position 850 of SEQ ID NO: 1887657
uggcaucugcucuaauaac

SEQ ID NO: 2487431 - RNA, 19 nt, Artificial Sequence
  Description of Artificial Sequence: Synthetic oligonucleotide
  Antisense strand to SEQ ID NO: 2487430
guuauuagagcagaugcca

SEQ ID NO: 2487432 - RNA, 19 nt, Artificial Sequence
  Description of Artificial Sequence: Synthetic oligonucleotide
  Sense strand starting at position 871 of SEQ ID NO: 1887657
guacauugacucuaggcuu

SEQ ID NO: 2487433 - RNA, 19 nt, Artificial Sequence
  Description of Artificial Sequence: Synthetic oligonucleotide
  Antisense strand to SEQ ID NO: 2487432
aagccuagagucaauguac

SEQ ID NO: 2487434 - RNA, 19 nt, Artificial Sequence
  Description of Artificial Sequence: Synthetic oligonucleotide
  Sense strand starting at position 874 of SEQ ID NO: 1887657
cauugacucuaggcuuaga

SEQ ID NO: 2487435 - RNA, 19 nt, Artificial Sequence
  Description of Artificial Sequence: Synthetic oligonucleotide
  Antisense strand to SEQ ID NO: 2487434
ucuaagccuagagucaaug

SEQ ID NO: 2487436 - RNA, 19 nt, Artificial Sequence
  Description of Artificial Sequence: Synthetic oligonucleotide
  Sense strand starting at position 877 of SEQ ID NO: 1887657
ugacucuaggcuuagauua

SEQ ID NO: 2487437 - RNA, 19 nt, Artificial Sequence
  Description of Artificial Sequence: Synthetic oligonucleotide
  Antisense strand to SEQ ID NO: 2487436
uaaucuaagccuagaguca

SEQ ID NO: 2487438 - RNA, 19 nt, Artificial Sequence
  Description of Artificial Sequence: Synthetic oligonucleotide
  Sense strand starting at position 960 of SEQ ID NO: 1887657
gauacagucccugauguca

SEQ ID NO: 2487439 - RNA, 19 nt, Artificial Sequence
  Description of Artificial Sequence: Synthetic oligonucleotide
  Antisense strand to SEQ ID NO: 2487438
ugacaucagggacuguauc

SEQ ID NO: 2487440 - RNA, 19 nt, Artificial Sequence
  Description of Artificial Sequence: Synthetic oligonucleotide
  Sense strand starting at position 973 of SEQ ID NO: 1887657
augucaucaggcugauaug

SEQ ID NO: 2487441 - RNA, 19 nt, Artificial Sequence
  Description of Artificial Sequence: Synthetic oligonucleotide
  Antisense strand to SEQ ID NO: 2487440
cauaucagccugaugacau

SEQ ID NO: 2487442 - RNA, 19 nt, Artificial Sequence
  Description of Artificial Sequence: Synthetic oligonucleotide
  Sense strand starting at position 1415 of SEQ ID NO: 1887657
uaacguauacuuuguguua

SEQ ID NO: 2487443 - RNA, 19 nt, Artificial Sequence
  Description of Artificial Sequence: Synthetic oligonucleotide
  Antisense strand to SEQ ID NO: 2487442
uaacacaaaguauacguua

SEQ ID NO: 2487444 - RNA, 19 nt, Artificial Sequence
  Description of Artificial Sequence: Synthetic oligonucleotide
  Sense strand starting at position 1416 of SEQ ID NO: 1887657
aacguauacuuuguguuaa

SEQ ID NO: 2487445 - RNA, 19 nt, Artificial Sequence
  Description of Artificial Sequence: Synthetic oligonucleotide
  Antisense strand to SEQ ID NO: 2487444
uuaacacaaaguauacguu

SEQ ID NO: 2487446 - RNA, 19 nt, Artificial Sequence
  Description of Artificial Sequence: Synthetic oligonucleotide
  Sense strand starting at position 1418 of SEQ ID NO: 1887657
cguauacuuuguguuaaua

SEQ ID NO: 2487447 - RNA, 19 nt, Artificial Sequence
  Description of Artificial Sequence: Synthetic oligonucleotide
  Antisense strand to SEQ ID NO: 2487446
uauuaacacaaaguauacg

SEQ ID NO: 2487448 - RNA, 19 nt, Artificial Sequence
  Description of Artificial Sequence: Synthetic oligonucleotide
  Sense strand starting at position 1520 of SEQ ID NO: 1887657
uggauagguuaauugcuua

SEQ ID NO: 2487449 - RNA, 19 nt, Artificial Sequence
  Description of Artificial Sequence: Synthetic oligonucleotide
  Antisense strand to SEQ ID NO: 2487448
uaagcaauuaaccuaucca

SEQ ID NO: 2487450 - RNA, 19 nt, Artificial Sequence
  Description of Artificial Sequence: Synthetic oligonucleotide
  Sense strand starting at position 1523 of SEQ ID NO: 1887657
auagguuaauugcuuaacu

SEQ ID NO: 2487451 - RNA, 19 nt, Artificial Sequence
  Description of Artificial Sequence: Synthetic oligonucleotide
  Antisense strand to SEQ ID NO: 2487450
aguuaagcaauuaaccuau

SEQ ID NO: 2487452 - RNA, 19 nt, Artificial Sequence
  Description of Artificial Sequence: Synthetic oligonucleotide
  Sense strand starting at position 1525 of SEQ ID NO: 1887657
agguuaauugcuuaacucu

SEQ ID NO: 2487453 - RNA, 19 nt, Artificial Sequence
  Description of Artificial Sequence: Synthetic oligonucleotide
  Antisense strand to SEQ ID NO: 2487452
agaguuaagcaauuaaccu

SEQ ID NO: 2487454 - RNA, 19 nt, Artificial Sequence
  Description of Artificial Sequence: Synthetic oligonucleotide
  Sense strand starting at position 1872 of SEQ ID NO: 1887657
cuggguacauguguaucaa

SEQ ID NO: 2487455 - RNA, 19 nt, Artificial Sequence
  Description of Artificial Sequence: Synthetic oligonucleotide
  Antisense strand to SEQ ID NO: 2487454
uugauacacauguacccag

SEQ ID NO: 2487456 - RNA, 19 nt, Artificial Sequence
  Description of Artificial Sequence: Synthetic oligonucleotide
  Sense strand starting at position 1873 of SEQ ID NO: 1887657
uggguacauguguaucaaa

SEQ ID NO: 2487457 - RNA, 19 nt, Artificial Sequence
  Description of Artificial Sequence: Synthetic oligonucleotide
  Antisense strand to SEQ ID NO: 2487456
uuugauacacauguaccca

SEQ ID NO: 2487458 - RNA, 19 nt, Artificial Sequence
  Description of Artificial Sequence: Synthetic oligonucleotide
  Sense strand starting at position 1897 of SEQ ID NO: 1887657
cgcuguacacccuaaauau

SEQ ID NO: 2487459 - RNA, 19 nt, Artificial Sequence
  Description of Artificial Sequence: Synthetic oligonucleotide
  Antisense strand to SEQ ID NO: 2487458
auauuuaggguguacagcg

SEQ ID NO: 2487460 - RNA, 19 nt, Artificial Sequence
  Description of Artificial Sequence: Synthetic oligonucleotide
  Sense strand starting at position 1928 of SEQ ID NO: 1887657
cauacuguauugucaggua

SEQ ID NO: 2487461 - RNA, 19 nt, Artificial Sequence
  Description of Artificial Sequence: Synthetic oligonucleotide
  Antisense strand to SEQ ID NO: 2487460
uaccugacaauacaguaug

SEQ ID NO: 2487462 - RNA, 19 nt, Artificial Sequence
  Description of Artificial Sequence: Synthetic oligonucleotide
  Sense strand starting at position 1937 of SEQ ID NO: 1887657
uugucagguagugauaaau

SEQ ID NO: 2487463 - RNA, 19 nt, Artificial Sequence
  Description of Artificial Sequence: Synthetic oligonucleotide
  Antisense strand to SEQ ID NO: 2487462
auuuaucacuaccugacaa

SEQ ID NO: 2487464 - RNA, 19 nt, Artificial Sequence
  Description of Artificial Sequence: Synthetic oligonucleotide
  Sense strand starting at position 2065 of SEQ ID NO: 1887657
gguccuguuggagagcauu

SEQ ID NO: 2487465 - RNA, 19 nt, Artificial Sequence
  Description of Artificial Sequence: Synthetic oligonucleotide
  Antisense strand to SEQ ID NO: 2487464
aaugcucuccaacaggacc

SEQ ID NO: 2487466 - RNA, 19 nt, Artificial Sequence
  Description of Artificial Sequence: Synthetic oligonucleotide
  Sense strand starting at position 2071 of SEQ ID NO: 1887657
guuggagagcauugguauc

SEQ ID NO: 2487467 - RNA, 19 nt, Artificial Sequence
  Description of Artificial Sequence: Synthetic oligonucleotide
  Antisense strand to SEQ ID NO: 2487466
gauaccaaugcucuccaac

SEQ ID NO: 2487468 - RNA, 19 nt, Artificial Sequence
  Description of Artificial Sequence: Synthetic oligonucleotide
  Sense strand starting at position 2077 of SEQ ID NO: 1887657
gagcauugguauccaguaa

SEQ ID NO: 2487469 - RNA, 19 nt, Artificial Sequence
  Description of Artificial Sequence: Synthetic oligonucleotide
  Antisense strand to SEQ ID NO: 2487468
uuacuggauaccaaugcuc

SEQ ID NO: 2487470 - RNA, 19 nt, Artificial Sequence
  Description of Artificial Sequence: Synthetic oligonucleotide
  Sense strand starting at position 2078 of SEQ ID NO: 1887657
agcauugguauccaguaag

SEQ ID NO: 2487471 - RNA, 19 nt, Artificial Sequence
  Description of Artificial Sequence: Synthetic oligonucleotide
  Antisense strand to SEQ ID NO: 2487470
cuuacuggauaccaaugcu

SEQ ID NO: 2487472 - RNA, 19 nt, Artificial Sequence
  Description of Artificial Sequence: Synthetic oligonucleotide
  Sense strand starting at position 2084 of SEQ ID NO: 1887657
gguauccaguaaggauuua

SEQ ID NO: 2487473 - RNA, 19 nt, Artificial Sequence
  Description of Artificial Sequence: Synthetic oligonucleotide
  Antisense strand to SEQ ID NO: 2487472
uaaauccuuacuggauacc

SEQ ID NO: 2487474 - RNA, 19 nt, Artificial Sequence
  Description of Artificial Sequence: Synthetic oligonucleotide
  Sense strand starting at position 2498 of SEQ ID NO: 1887657
ggagacugcaaccgagaaa

SEQ ID NO: 2487475 - RNA, 19 nt, Artificial Sequence
  Description of Artificial Sequence: Synthetic oligonucleotide
  Antisense strand to SEQ ID NO: 2487474
uuucucgguugcagucucc

SEQ ID NO: 2487476 - RNA, 19 nt, Artificial Sequence
  Description of Artificial Sequence: Synthetic oligonucleotide
  Sense strand starting at position 2594 of SEQ ID NO: 1887657
ugacgucaucgggacguua

SEQ ID NO: 2487477 - RNA, 19 nt, Artificial Sequence
  Description of Artificial Sequence: Synthetic oligonucleotide
  Antisense strand to SEQ ID NO: 2487476
uaacgucccgaugacguca

SEQ ID NO: 2487478 - RNA, 19 nt, Artificial Sequence
  Description of Artificial Sequence: Synthetic oligonucleotide
  Sense strand starting at position 2607 of SEQ ID NO: 1887657
acguuaagcaucguagcau

SEQ ID NO: 2487479 - RNA, 19 nt, Artificial Sequence
  Description of Artificial Sequence: Synthetic oligonucleotide
  Antisense strand to SEQ ID NO: 2487478
augcuacgaugcuuaacgu

SEQ ID NO: 2487480 - RNA, 19 nt, Artificial Sequence
  Description of Artificial Sequence: Synthetic oligonucleotide
  Sense strand starting at position 2619 of SEQ ID NO: 1887657
guagcauuaccuggacgua

SEQ ID NO: 2487481 - RNA, 19 nt, Artificial Sequence
  Description of Artificial Sequence: Synthetic oligonucleotide
  Antisense strand to SEQ ID NO: 2487480
uacguccagguaaugcuac

SEQ ID NO: 2487482 - RNA, 19 nt, Artificial Sequence
  Description of Artificial Sequence: Synthetic oligonucleotide
  Sense strand starting at position 2653 of SEQ ID NO: 1887657
ccggacagguccucugaua

SEQ ID NO: 2487483 - RNA, 19 nt, Artificial Sequence
  Description of Artificial Sequence: Synthetic oligonucleotide
  Antisense strand to SEQ ID NO: 2487482
uaucagaggaccuguccgg

SEQ ID NO: 2487484 - RNA, 19 nt, Artificial Sequence
  Description of Artificial Sequence: Synthetic oligonucleotide
  Sense strand starting at position 2673 of SEQ ID NO: 1887657
ucggguagguucucaauca

SEQ ID NO: 2487485 - RNA, 19 nt, Artificial Sequence
  Description of Artificial Sequence: Synthetic oligonucleotide
  Antisense strand to SEQ ID NO: 2487484
ugauugagaaccuacccga

SEQ ID NO: 2487486 - RNA, 19 nt, Artificial Sequence
  Description of Artificial Sequence: Synthetic oligonucleotide
  Sense strand starting at position 2701 of SEQ ID NO: 1887657
uuaguuauuuggucuguca

SEQ ID NO: 2487487 - RNA, 19 nt, Artificial Sequence
  Description of Artificial Sequence: Synthetic oligonucleotide
  Antisense strand to SEQ ID NO: 2487486
ugacagaccaaauaacuaa

SEQ ID NO: 2487488 - RNA, 19 nt, Artificial Sequence
  Description of Artificial Sequence: Synthetic oligonucleotide
  Sense strand starting at position 2703 of SEQ ID NO: 1887657
aguuauuuggucugucaau

SEQ ID NO: 2487489 - RNA, 19 nt, Artificial Sequence
  Description of Artificial Sequence: Synthetic oligonucleotide
  Antisense strand to SEQ ID NO: 2487488
auugacagaccaaauaacu

SEQ ID NO: 2487490 - RNA, 19 nt, Artificial Sequence
  Description of Artificial Sequence: Synthetic oligonucleotide
  Sense strand starting at position 2704 of SEQ ID NO: 1887657
guuauuuggucugucaauc

SEQ ID NO: 2487491 - RNA, 19 nt, Artificial Sequence
  Description of Artificial Sequence: Synthetic oligonucleotide
  Antisense strand to SEQ ID NO: 2487490
gauugacagaccaaauaac

SEQ ID NO: 2487492 - RNA, 19 nt, Artificial Sequence
  Description of Artificial Sequence: Synthetic oligonucleotide
  Sense strand starting at position 3382 of SEQ ID NO: 1887657
gguggagcuuucccaagau

SEQ ID NO: 2487493 - RNA, 19 nt, Artificial Sequence
  Description of Artificial Sequence: Synthetic oligonucleotide
  Antisense strand to SEQ ID NO: 2487492
aucuugggaaagcuccacc

SEQ ID NO: 2487494 - RNA, 19 nt, Artificial Sequence
  Description of Artificial Sequence: Synthetic oligonucleotide
  Sense strand starting at position 3470 of SEQ ID NO: 1887657
cgugaugggcgugaccaau

SEQ ID NO: 2487495 - RNA, 19 nt, Artificial Sequence
  Description of Artificial Sequence: Synthetic oligonucleotide
  Antisense strand to SEQ ID NO: 2487494
auuggucacgcccaucacg

SEQ ID NO: 2487496 - RNA, 19 nt, Artificial Sequence
  Description of Artificial Sequence: Synthetic oligonucleotide
  Sense strand starting at position 3525 of SEQ ID NO: 1887657
ucacgaggcuuguccugau

SEQ ID NO: 2487497 - RNA, 19 nt, Artificial Sequence
  Description of Artificial Sequence: Synthetic oligonucleotide
  Antisense strand to SEQ ID NO: 2487496
aucaggacaagccucguga

SEQ ID NO: 2487498 - RNA, 19 nt, Artificial Sequence
  Description of Artificial Sequence: Synthetic oligonucleotide
  Sense strand starting at position 3759 of SEQ ID NO: 1887657
ugagcacuuuacccgaauu

SEQ ID NO: 2487499 - RNA, 19 nt, Artificial Sequence
  Description of Artificial Sequence: Synthetic oligonucleotide
  Antisense strand to SEQ ID NO: 2487498
aauucggguaaagugcuca

SEQ ID NO: 2487500 - RNA, 19 nt, Artificial Sequence
  Description of Artificial Sequence: Synthetic oligonucleotide
  Sense strand starting at position 3761 of SEQ ID NO: 1887657
agcacuuuacccgaauuaa

SEQ ID NO: 2487501 - RNA, 19 nt, Artificial Sequence
  Description of Artificial Sequence: Synthetic oligonucleotide
  Antisense strand to SEQ ID NO: 2487500
uuaauucggguaaagugcu

SEQ ID NO: 2487502 - RNA, 19 nt, Artificial Sequence
  Description of Artificial Sequence: Synthetic oligonucleotide
  Sense strand starting at position 3797 of SEQ ID NO: 1887657
gcccuuugagguugauacu

SEQ ID NO: 2487503 - RNA, 19 nt, Artificial Sequence
  Description of Artificial Sequence: Synthetic oligonucleotide
  Antisense strand to SEQ ID NO: 2487502
aguaucaaccucaaagggc

SEQ ID NO: 2487504 - RNA, 19 nt, Artificial Sequence
  Description of Artificial Sequence: Synthetic oligonucleotide
  Sense strand starting at position 3869 of SEQ ID NO: 1887657
acaguuuauaaguguugga

SEQ ID NO: 2487505 - RNA, 19 nt, Artificial Sequence
  Description of Artificial Sequence: Synthetic oligonucleotide
  Antisense strand to SEQ ID NO: 2487504
uccaacacuuauaaacugu

SEQ ID NO: 2487506 - RNA, 19 nt, Artificial Sequence
  Description of Artificial Sequence: Synthetic oligonucleotide
  Sense strand starting at position 3963 of SEQ ID NO: 1887657
gggacuuuggguuguugga

SEQ ID NO: 2487507 - RNA, 19 nt, Artificial Sequence
  Description of Artificial Sequence: Synthetic oligonucleotide
  Antisense strand to SEQ ID NO: 2487506
uccaacaacccaaaguccc

SEQ ID NO: 2487508 - RNA, 19 nt, Artificial Sequence
  Description of Artificial Sequence: Synthetic oligonucleotide
  Sense strand starting at position 389 of SEQ ID NO: 1887658
cuggguaucaggugauguu

SEQ ID NO: 2487509 - RNA, 19 nt, Artificial Sequence
  Description of Artificial Sequence: Synthetic oligonucleotide
  Antisense strand to SEQ ID NO: 2487508
aacaucaccugauacccag

SEQ ID NO: 2487510 - RNA, 19 nt, Artificial Sequence
  Description of Artificial Sequence: Synthetic oligonucleotide
  Sense strand starting at position 390 of SEQ ID NO: 1887658
uggguaucaggugauguua

SEQ ID NO: 2487511 - RNA, 19 nt, Artificial Sequence
  Description of Artificial Sequence: Synthetic oligonucleotide
  Antisense strand to SEQ ID NO: 2487510
uaacaucaccugauaccca

SEQ ID NO: 2487512 - RNA, 19 nt, Artificial Sequence
  Description of Artificial Sequence: Synthetic oligonucleotide
  Sense strand starting at position 750 of SEQ ID NO: 1887658
guaacagcaugaucacauu

SEQ ID NO: 2487513 - RNA, 19 nt, Artificial Sequence
  Description of Artificial Sequence: Synthetic oligonucleotide
  Antisense strand to SEQ ID NO: 2487512
aaugugaucaugcuguuac

SEQ ID NO: 2487514 - RNA, 19 nt, Artificial Sequence
  Description of Artificial Sequence: Synthetic oligonucleotide
  Sense strand starting at position 806 of SEQ ID NO: 1887658
agacgcauuuaccgggaaa

SEQ ID NO: 2487515 - RNA, 19 nt, Artificial Sequence
  Description of Artificial Sequence: Synthetic oligonucleotide
  Antisense strand to SEQ ID NO: 2487514
uuucccgguaaaugcgucu

SEQ ID NO: 2487516 - RNA, 19 nt, Artificial Sequence
  Description of Artificial Sequence: Synthetic oligonucleotide
  Sense strand starting at position 825 of SEQ ID NO: 1887658
auuacaucacagugggaau

SEQ ID NO: 2487517 - RNA, 19 nt, Artificial Sequence
  Description of Artificial Sequence: Synthetic oligonucleotide
  Antisense strand to SEQ ID NO: 2487516
auucccacugugauguaau

SEQ ID NO: 2487518 - RNA, 19 nt, Artificial Sequence
  Description of Artificial Sequence: Synthetic oligonucleotide
  Sense strand starting at position 853 of SEQ ID NO: 1887658
auggacucgugcguucauu

SEQ ID NO: 2487519 - RNA, 19 nt, Artificial Sequence
  Description of Artificial Sequence: Synthetic oligonucleotide
  Antisense strand to SEQ ID NO: 2487518
aaugaacgcacgaguccau

SEQ ID NO: 2487520 - RNA, 19 nt, Artificial Sequence
  Description of Artificial Sequence: Synthetic oligonucleotide
  Sense strand starting at position 854 of SEQ ID NO: 1887658
uggacucgugcguucauua

SEQ ID NO: 2487521 - RNA, 19 nt, Artificial Sequence
  Description of Artificial Sequence: Synthetic oligonucleotide
  Antisense strand to SEQ ID NO: 2487520
uaaugaacgcacgagucca

SEQ ID NO: 2487522 - RNA, 19 nt, Artificial Sequence
  Description of Artificial Sequence: Synthetic oligonucleotide
  Sense strand starting at position 855 of SEQ ID NO: 1887658
ggacucgugcguucauuau

SEQ ID NO: 2487523 - RNA, 19 nt, Artificial Sequence
  Description of Artificial Sequence: Synthetic oligonucleotide
  Antisense strand to SEQ ID NO: 2487522
auaaugaacgcacgagucc

SEQ ID NO: 2487524 - RNA, 19 nt, Artificial Sequence
  Description of Artificial Sequence: Synthetic oligonucleotide
  Sense strand starting at position 1350 of SEQ ID NO: 1887658
uaccuaugaugguggucau

SEQ ID NO: 2487525 - RNA, 19 nt, Artificial Sequence
  Description of Artificial Sequence: Synthetic oligonucleotide
  Antisense strand to SEQ ID NO: 2487524
augaccaccaucauaggua

SEQ ID NO: 2487526 - RNA, 19 nt, Artificial Sequence
  Description of Artificial Sequence: Synthetic oligonucleotide
  Sense strand starting at position 1353 of SEQ ID NO: 1887658
cuaugaugguggucaugca

SEQ ID NO: 2487527 - RNA, 19 nt, Artificial Sequence
  Description of Artificial Sequence: Synthetic oligonucleotide
  Antisense strand to SEQ ID NO: 2487526
ugcaugaccaccaucauag

SEQ ID NO: 2487528 - RNA, 19 nt, Artificial Sequence
  Description of Artificial Sequence: Synthetic oligonucleotide
  Sense strand starting at position 1384 of SEQ ID NO: 1887658
ccgcaacauccuggaaagu

SEQ ID NO: 2487529 - RNA, 19 nt, Artificial Sequence
  Description of Artificial Sequence: Synthetic oligonucleotide
  Antisense strand to SEQ ID NO: 2487528
acuuuccaggauguugcgg

SEQ ID NO: 2487530 - RNA, 19 nt, Artificial Sequence
  Description of Artificial Sequence: Synthetic oligonucleotide
  Sense strand starting at position 1393 of SEQ ID NO: 1887658
ccuggaaaguguuaaacga

SEQ ID NO: 2487531 - RNA, 19 nt, Artificial Sequence
  Description of Artificial Sequence: Synthetic oligonucleotide
  Antisense strand to SEQ ID NO: 2487530
ucguuuaacacuuuccagg

SEQ ID NO: 2487532 - RNA, 19 nt, Artificial Sequence
  Description of Artificial Sequence: Synthetic oligonucleotide
  Sense strand starting at position 1400 of SEQ ID NO: 1887658
aguguuaaacgacaugaca

SEQ ID NO: 2487533 - RNA, 19 nt, Artificial Sequence
  Description of Artificial Sequence: Synthetic oligonucleotide
  Antisense strand to SEQ ID NO: 2487532
ugucaugucguuuaacacu

SEQ ID NO: 2487534 - RNA, 19 nt, Artificial Sequence
  Description of Artificial Sequence: Synthetic oligonucleotide
  Sense strand starting at position 1413 of SEQ ID NO: 1887658
augacaagcagguguaaga

SEQ ID NO: 2487535 - RNA, 19 nt, Artificial Sequence
  Description of Artificial Sequence: Synthetic oligonucleotide
  Antisense strand to SEQ ID NO: 2487534
ucuuacaccugcuugucau

SEQ ID NO: 2487536 - RNA, 19 nt, Artificial Sequence
  Description of Artificial Sequence: Synthetic oligonucleotide
  Sense strand starting at position 1440 of SEQ ID NO: 1887658
gcaagaggcugguaugaaa

SEQ ID NO: 2487537 - RNA, 19 nt, Artificial Sequence
  Description of Artificial Sequence: Synthetic oligonucleotide
  Antisense strand to SEQ ID NO: 2487536
uuucauaccagccucuugc

SEQ ID NO: 2487538 - RNA, 19 nt, Artificial Sequence
  Description of Artificial Sequence: Synthetic oligonucleotide
  Sense strand starting at position 1447 of SEQ ID NO: 1887658
gcugguaugaaaugcuacu

SEQ ID NO: 2487539 - RNA, 19 nt, Artificial Sequence
  Description of Artificial Sequence: Synthetic oligonucleotide
  Antisense strand to SEQ ID NO: 2487538
aguagcauuucauaccagc

SEQ ID NO: 2487540 - RNA, 19 nt, Artificial Sequence
  Description of Artificial Sequence: Synthetic oligonucleotide
  Sense strand starting at position 1474 of SEQ ID NO: 1887658
aauuaugcacgagaaugua

SEQ ID NO: 2487541 - RNA, 19 nt, Artificial Sequence
  Description of Artificial Sequence: Synthetic oligonucleotide
  Antisense strand to SEQ ID NO: 2487540
uacauucucgugcauaauu

SEQ ID NO: 2487542 - RNA, 19 nt, Artificial Sequence
  Description of Artificial Sequence: Synthetic oligonucleotide
  Sense strand starting at position 1477 of SEQ ID NO: 1887658
uaugcacgagaauguaaau

SEQ ID NO: 2487543 - RNA, 19 nt, Artificial Sequence
  Description of Artificial Sequence: Synthetic oligonucleotide
  Antisense strand to SEQ ID NO: 2487542
auuuacauucucgugcaua

SEQ ID NO: 2487544 - RNA, 19 nt, Artificial Sequence
  Description of Artificial Sequence: Synthetic oligonucleotide
  Sense strand starting at position 1492 of SEQ ID NO: 1887658
aaaugcauuuacguaugua

SEQ ID NO: 2487545 - RNA, 19 nt, Artificial Sequence
  Description of Artificial Sequence: Synthetic oligonucleotide
  Antisense strand to SEQ ID NO: 2487544
uacauacguaaaugcauuu

SEQ ID NO: 2487546 - RNA, 19 nt, Artificial Sequence
  Description of Artificial Sequence: Synthetic oligonucleotide
  Sense strand starting at position 1502 of SEQ ID NO: 1887658
acguauguauguguuugua

SEQ ID NO: 2487547 - RNA, 19 nt, Artificial Sequence
  Description of Artificial Sequence: Synthetic oligonucleotide
  Antisense strand to SEQ ID NO: 2487546
uacaaacacauacauacgu

SEQ ID NO: 2487548 - RNA, 19 nt, Artificial Sequence
  Description of Artificial Sequence: Synthetic oligonucleotide
  Sense strand starting at position 1505 of SEQ ID NO: 1887658
uauguauguguuuguaggu

SEQ ID NO: 2487549 - RNA, 19 nt, Artificial Sequence
  Description of Artificial Sequence: Synthetic oligonucleotide
  Antisense strand to SEQ ID NO: 2487548
accuacaaacacauacaua

SEQ ID NO: 2487550 - RNA, 19 nt, Artificial Sequence
  Description of Artificial Sequence: Synthetic oligonucleotide
  Sense strand starting at position 1510 of SEQ ID NO: 1887658
auguguuuguagguccaga

SEQ ID NO: 2487551 - RNA, 19 nt, Artificial Sequence
  Description of Artificial Sequence: Synthetic oligonucleotide
  Antisense strand to SEQ ID NO: 2487550
ucuggaccuacaaacacau

SEQ ID NO: 2487552 - RNA, 19 nt, Artificial Sequence
  Description of Artificial Sequence: Synthetic oligonucleotide
  Sense strand starting at position 1521 of SEQ ID NO: 1887658
gguccagacuucucuggaa

SEQ ID NO: 2487553 - RNA, 19 nt, Artificial Sequence
  Description of Artificial Sequence: Synthetic oligonucleotide
  Antisense strand to SEQ ID NO: 2487552
uuccagagaagucuggacc

SEQ ID NO: 2487554 - RNA, 19 nt, Artificial Sequence
  Description of Artificial Sequence: Synthetic oligonucleotide
  Sense strand starting at position 1523 of SEQ ID NO: 1887658
uccagacuucucuggaagu

SEQ ID NO: 2487555 - RNA, 19 nt, Artificial Sequence
  Description of Artificial Sequence: Synthetic oligonucleotide
  Antisense strand to SEQ ID NO: 2487554
acuuccagagaagucugga

SEQ ID NO: 2487556 - RNA, 19 nt, Artificial Sequence
  Description of Artificial Sequence: Synthetic oligonucleotide
  Sense strand starting at position 1524 of SEQ ID NO: 1887658
ccagacuucucuggaaguu

SEQ ID NO: 2487557 - RNA, 19 nt, Artificial Sequence
  Description of Artificial Sequence: Synthetic oligonucleotide
  Antisense strand to SEQ ID NO: 2487556
aacuuccagagaagucugg

SEQ ID NO: 2487558 - RNA, 19 nt, Artificial Sequence
  Description of Artificial Sequence: Synthetic oligonucleotide
  Sense strand starting at position 1537 of SEQ ID NO: 1887658
gaaguuaguguugguuaaa

SEQ ID NO: 2487559 - RNA, 19 nt, Artificial Sequence
  Description of Artificial Sequence: Synthetic oligonucleotide
  Antisense strand to SEQ ID NO: 2487558
uuuaaccaacacuaacuuc

SEQ ID NO: 2487560 - RNA, 19 nt, Artificial Sequence
  Description of Artificial Sequence: Synthetic oligonucleotide
  Sense strand starting at position 1538 of SEQ ID NO: 1887658
aaguuaguguugguuaaac

SEQ ID NO: 2487561 - RNA, 19 nt, Artificial Sequence
  Description of Artificial Sequence: Synthetic oligonucleotide
  Antisense strand to SEQ ID NO: 2487560
guuuaaccaacacuaacuu

SEQ ID NO: 2487562 - RNA, 19 nt, Artificial Sequence
  Description of Artificial Sequence: Synthetic oligonucleotide
  Sense strand starting at position 1540 of SEQ ID NO: 1887658
guuaguguugguuaaacuc

SEQ ID NO: 2487563 - RNA, 19 nt, Artificial Sequence
  Description of Artificial Sequence: Synthetic oligonucleotide
  Antisense strand to SEQ ID NO: 2487562
gaguuuaaccaacacuaac

SEQ ID NO: 2487564 - RNA, 19 nt, Artificial Sequence
  Description of Artificial Sequence: Synthetic oligonucleotide
  Sense strand starting at position 1618 of SEQ ID NO: 1887658
acgugacucuauuacucau

SEQ ID NO: 2487565 - RNA, 19 nt, Artificial Sequence
  Description of Artificial Sequence: Synthetic oligonucleotide
  Antisense strand to SEQ ID NO: 2487564
augaguaauagagucacgu

SEQ ID NO: 2487566 - RNA, 19 nt, Artificial Sequence
  Description of Artificial Sequence: Synthetic oligonucleotide
  Sense strand starting at position 1650 of SEQ ID NO: 1887658
gagugcuucuugcccuaau

SEQ ID NO: 2487567 - RNA, 19 nt, Artificial Sequence
  Description of Artificial Sequence: Synthetic oligonucleotide
  Antisense strand to SEQ ID NO: 2487566
auuagggcaagaagcacuc

SEQ ID NO: 2487568 - RNA, 19 nt, Artificial Sequence
  Description of Artificial Sequence: Synthetic oligonucleotide
  Sense strand starting at position 1651 of SEQ ID NO: 1887658
agugcuucuugcccuaauu

SEQ ID NO: 2487569 - RNA, 19 nt, Artificial Sequence
  Description of Artificial Sequence: Synthetic oligonucleotide
  Antisense strand to SEQ ID NO: 2487568
aauuagggcaagaagcacu

SEQ ID NO: 2487570 - RNA, 19 nt, Artificial Sequence
  Description of Artificial Sequence: Synthetic oligonucleotide
  Sense strand starting at position 1679 of SEQ ID NO: 1887658
cggugcuaagccugugauu

SEQ ID NO: 2487571 - RNA, 19 nt, Artificial Sequence
  Description of Artificial Sequence: Synthetic oligonucleotide
  Antisense strand to SEQ ID NO: 2487570
aaucacaggcuuagcaccg

SEQ ID NO: 2487572 - RNA, 19 nt, Artificial Sequence
  Description of Artificial Sequence: Synthetic oligonucleotide
  Sense strand starting at position 2681 of SEQ ID NO: 1887658
aucagauuagauggucuaa

SEQ ID NO: 2487573 - RNA, 19 nt, Artificial Sequence
  Description of Artificial Sequence: Synthetic oligonucleotide
  Antisense strand to SEQ ID NO: 2487572
uuagaccaucuaaucugau

SEQ ID NO: 2487574 - RNA, 19 nt, Artificial Sequence
  Description of Artificial Sequence: Synthetic oligonucleotide
  Sense strand starting at position 2683 of SEQ ID NO: 1887658
cagauuagauggucuaaac

SEQ ID NO: 2487575 - RNA, 19 nt, Artificial Sequence
  Description of Artificial Sequence: Synthetic oligonucleotide
  Antisense strand to SEQ ID NO: 2487574
guuuagaccaucuaaucug

SEQ ID NO: 2487576 - RNA, 19 nt, Artificial Sequence
  Description of Artificial Sequence: Synthetic oligonucleotide
  Sense strand starting at position 2869 of SEQ ID NO: 1887658
aggcaagauuaucucuaca

SEQ ID NO: 2487577 - RNA, 19 nt, Artificial Sequence
  Description of Artificial Sequence: Synthetic oligonucleotide
  Antisense strand to SEQ ID NO: 2487576
uguagagauaaucuugccu

SEQ ID NO: 2487578 - RNA, 19 nt, Artificial Sequence
  Description of Artificial Sequence: Synthetic oligonucleotide
  Sense strand starting at position 2871 of SEQ ID NO: 1887658
gcaagauuaucucuacaga

SEQ ID NO: 2487579 - RNA, 19 nt, Artificial Sequence
  Description of Artificial Sequence: Synthetic oligonucleotide
  Antisense strand to SEQ ID NO: 2487578
ucuguagagauaaucuugc

SEQ ID NO: 2487580 - RNA, 19 nt, Artificial Sequence
  Description of Artificial Sequence: Synthetic oligonucleotide
  Sense strand starting at position 3141 of SEQ ID NO: 1887658
cagcuucguucugggauuu

SEQ ID NO: 2487581 - RNA, 19 nt, Artificial Sequence
  Description of Artificial Sequence: Synthetic oligonucleotide
  Antisense strand to SEQ ID NO: 2487580
aaaucccagaacgaagcug

SEQ ID NO: 2487582 - RNA, 19 nt, Artificial Sequence
  Description of Artificial Sequence: Synthetic oligonucleotide
  Sense strand starting at position 3174 of SEQ ID NO: 1887658
agaucugaagugugcagaa

SEQ ID NO: 2487583 - RNA, 19 nt, Artificial Sequence
  Description of Artificial Sequence: Synthetic oligonucleotide
  Antisense strand to SEQ ID NO: 2487582
uucugcacacuucagaucu

SEQ ID NO: 2487584 - RNA, 19 nt, Artificial Sequence
  Description of Artificial Sequence: Synthetic oligonucleotide
  Sense strand starting at position 3708 of SEQ ID NO: 1887658
uucccugaagaguaguaua

SEQ ID NO: 2487585 - RNA, 19 nt, Artificial Sequence
  Description of Artificial Sequence: Synthetic oligonucleotide
  Antisense strand to SEQ ID NO: 2487584
uauacuacucuucagggaa

SEQ ID NO: 2487586 - RNA, 19 nt, Artificial Sequence
  Description of Artificial Sequence: Synthetic oligonucleotide
  Sense strand starting at position 3711 of SEQ ID NO: 1887658
ccugaagaguaguauagaa

SEQ ID NO: 2487587 - RNA, 19 nt, Artificial Sequence
  Description of Artificial Sequence: Synthetic oligonucleotide
  Antisense strand to SEQ ID NO: 2487586
uucuauacuacucuucagg

SEQ ID NO: 2487588 - RNA, 19 nt, Artificial Sequence
  Description of Artificial Sequence: Synthetic oligonucleotide
  Sense strand starting at position 273 of SEQ ID NO: 1887659
ggagguggcucacuugaau

SEQ ID NO: 2487589 - RNA, 19 nt, Artificial Sequence
  Description of Artificial Sequence: Synthetic oligonucleotide
  Antisense strand to SEQ ID NO: 2487588
auucaagugagccaccucc

SEQ ID NO: 2487590 - RNA, 19 nt, Artificial Sequence
  Description of Artificial Sequence: Synthetic oligonucleotide
  Sense strand starting at position 1063 of SEQ ID NO: 1887659
gaguuagauguguaucucu

SEQ ID NO: 2487591 - RNA, 19 nt, Artificial Sequence
  Description of Artificial Sequence: Synthetic oligonucleotide
  Antisense strand to SEQ ID NO: 2487590
agagauacacaucuaacuc

SEQ ID NO: 2487592 - RNA, 19 nt, Artificial Sequence
  Description of Artificial Sequence: Synthetic oligonucleotide
  Sense strand starting at position 1110 of SEQ ID NO: 1887659
aaauguuaugucuggaaca

SEQ ID NO: 2487593 - RNA, 19 nt, Artificial Sequence
  Description of Artificial Sequence: Synthetic oligonucleotide
  Antisense strand to SEQ ID NO: 2487592
uguuccagacauaacauuu

SEQ ID NO: 2487594 - RNA, 19 nt, Artificial Sequence
  Description of Artificial Sequence: Synthetic oligonucleotide
  Sense strand starting at position 1112 of SEQ ID NO: 1887659
auguuaugucuggaacaca

SEQ ID NO: 2487595 - RNA, 19 nt, Artificial Sequence
  Description of Artificial Sequence: Synthetic oligonucleotide
  Antisense strand to SEQ ID NO: 2487594
uguguuccagacauaacau

SEQ ID NO: 2487596 - RNA, 19 nt, Artificial Sequence
  Description of Artificial Sequence: Synthetic oligonucleotide
  Sense strand starting at position 1135 of SEQ ID NO: 1887659
ggcugcuugggauauauuc

SEQ ID NO: 2487597 - RNA, 19 nt, Artificial Sequence
  Description of Artificial Sequence: Synthetic oligonucleotide
  Antisense strand to SEQ ID NO: 2487596
gaauauaucccaagcagcc

SEQ ID NO: 2487598 - RNA, 19 nt, Artificial Sequence
  Description of Artificial Sequence: Synthetic oligonucleotide
  Sense strand starting at position 1231 of SEQ ID NO: 1887659
augucuccagguugacaua

SEQ ID NO: 2487599 - RNA, 19 nt, Artificial Sequence
  Description of Artificial Sequence: Synthetic oligonucleotide
  Antisense strand to SEQ ID NO: 2487598
uaugucaaccuggagacau

SEQ ID NO: 2487600 - RNA, 19 nt, Artificial Sequence
  Description of Artificial Sequence: Synthetic oligonucleotide
  Sense strand starting at position 1416 of SEQ ID NO: 1887659
gaaaguaacugcuugaagu

SEQ ID NO: 2487601 - RNA, 19 nt, Artificial Sequence
  Description of Artificial Sequence: Synthetic oligonucleotide
  Antisense strand to SEQ ID NO: 2487600
acuucaagcaguuacuuuc

SEQ ID NO: 2487602 - RNA, 19 nt, Artificial Sequence
  Description of Artificial Sequence: Synthetic oligonucleotide
  Sense strand starting at position 1417 of SEQ ID NO: 1887659
aaaguaacugcuugaagua

SEQ ID NO: 2487603 - RNA, 19 nt, Artificial Sequence
  Description of Artificial Sequence: Synthetic oligonucleotide
  Antisense strand to SEQ ID NO: 2487602
uacuucaagcaguuacuuu

SEQ ID NO: 2487604 - RNA, 19 nt, Artificial Sequence
  Description of Artificial Sequence: Synthetic oligonucleotide
  Sense strand starting at position 1459 of SEQ ID NO: 1887659
ccuauagaguugguacuua

SEQ ID NO: 2487605 - RNA, 19 nt, Artificial Sequence
  Description of Artificial Sequence: Synthetic oligonucleotide
  Antisense strand to SEQ ID NO: 2487604
uaaguaccaacucuauagg

SEQ ID NO: 2487606 - RNA, 19 nt, Artificial Sequence
  Description of Artificial Sequence: Synthetic oligonucleotide
  Sense strand starting at position 1469 of SEQ ID NO: 1887659
ugguacuuauggucuggaa

SEQ ID NO: 2487607 - RNA, 19 nt, Artificial Sequence
  Description of Artificial Sequence: Synthetic oligonucleotide
  Antisense strand to SEQ ID NO: 2487606
uuccagaccauaaguacca

SEQ ID NO: 2487608 - RNA, 19 nt, Artificial Sequence
  Description of Artificial Sequence: Synthetic oligonucleotide
  Sense strand starting at position 1471 of SEQ ID NO: 1887659
guacuuauggucuggaaau

SEQ ID NO: 2487609 - RNA, 19 nt, Artificial Sequence
  Description of Artificial Sequence: Synthetic oligonucleotide
  Antisense strand to SEQ ID NO: 2487608
auuuccagaccauaaguac

SEQ ID NO: 2487610 - RNA, 19 nt, Artificial Sequence
  Description of Artificial Sequence: Synthetic oligonucleotide
  Sense strand starting at position 1483 of SEQ ID NO: 1887659
uggaaauagccacauugua

SEQ ID NO: 2487611 - RNA, 19 nt, Artificial Sequence
  Description of Artificial Sequence: Synthetic oligonucleotide
  Antisense strand to SEQ ID NO: 2487610
uacaauguggcuauuucca

SEQ ID NO: 2487612 - RNA, 19 nt, Artificial Sequence
  Description of Artificial Sequence: Synthetic oligonucleotide
  Sense strand starting at position 1784 of SEQ ID NO: 1887659
cguggucauuuccuuaaag

SEQ ID NO: 2487613 - RNA, 19 nt, Artificial Sequence
  Description of Artificial Sequence: Synthetic oligonucleotide
  Antisense strand to SEQ ID NO: 2487612
cuuuaaggaaaugaccacg

SEQ ID NO: 2487614 - RNA, 19 nt, Artificial Sequence
  Description of Artificial Sequence: Synthetic oligonucleotide
  Sense strand starting at position 2094 of SEQ ID NO: 1887659
ucaauagcgaaagguagau

SEQ ID NO: 2487615 - RNA, 19 nt, Artificial Sequence
  Description of Artificial Sequence: Synthetic oligonucleotide
  Antisense strand to SEQ ID NO: 2487614
aucuaccuuucgcuauuga

SEQ ID NO: 2487616 - RNA, 19 nt, Artificial Sequence
  Description of Artificial Sequence: Synthetic oligonucleotide
  Sense strand starting at position 3219 of SEQ ID NO: 1887659
aauaaugcgguccaggaau

SEQ ID NO: 2487617 - RNA, 19 nt, Artificial Sequence
  Description of Artificial Sequence: Synthetic oligonucleotide
  Antisense strand to SEQ ID NO: 2487616
auuccuggaccgcauuauu

SEQ ID NO: 2487618 - RNA, 19 nt, Artificial Sequence
  Description of Artificial Sequence: Synthetic oligonucleotide
  Sense strand starting at position 3536 of SEQ ID NO: 1887659
agagaaucaaggugucgga

SEQ ID NO: 2487619 - RNA, 19 nt, Artificial Sequence
  Description of Artificial Sequence: Synthetic oligonucleotide
  Antisense strand to SEQ ID NO: 2487618
uccgacaccuugauucucu

SEQ ID NO: 2487620 - RNA, 19 nt, Artificial Sequence
  Description of Artificial Sequence: Synthetic oligonucleotide
  Sense strand starting at position 3575 of SEQ ID NO: 1887659
ggacucaguguuggagauu

SEQ ID NO: 2487621 - RNA, 19 nt, Artificial Sequence
  Description of Artificial Sequence: Synthetic oligonucleotide
  Antisense strand to SEQ ID NO: 2487620
aaucuccaacacugagucc

SEQ ID NO: 2487622 - RNA, 19 nt, Artificial Sequence
  Description of Artificial Sequence: Synthetic oligonucleotide
  Sense strand starting at position 3674 of SEQ ID NO: 1887659
uacugaacucugugaggac

SEQ ID NO: 2487623 - RNA, 19 nt, Artificial Sequence
  Description of Artificial Sequence: Synthetic oligonucleotide
  Antisense strand to SEQ ID NO: 2487622
guccucacagaguucagua

SEQ ID NO: 2487624 - RNA, 19 nt, Artificial Sequence
  Description of Artificial Sequence: Synthetic oligonucleotide
  Sense strand starting at position 261 of SEQ ID NO: 1887660
aucugucuucuugaugcaa

SEQ ID NO: 2487625 - RNA, 19 nt, Artificial Sequence
  Description of Artificial Sequence: Synthetic oligonucleotide
  Antisense strand to SEQ ID NO: 2487624
uugcaucaagaagacagau

SEQ ID NO: 2487626 - RNA, 19 nt, Artificial Sequence
  Description of Artificial Sequence: Synthetic oligonucleotide
  Sense strand starting at position 535 of SEQ ID NO: 1887660
gauugcaugucaccaagga

SEQ ID NO: 2487627 - RNA, 19 nt, Artificial Sequence
  Description of Artificial Sequence: Synthetic oligonucleotide
  Antisense strand to SEQ ID NO: 2487626
uccuuggugacaugcaauc

SEQ ID NO: 2487628 - RNA, 19 nt, Artificial Sequence
  Description of Artificial Sequence: Synthetic oligonucleotide
  Sense strand starting at position 539 of SEQ ID NO: 1887660
gcaugucaccaaggagaca

SEQ ID NO: 2487629 - RNA, 19 nt, Artificial Sequence
  Description of Artificial Sequence: Synthetic oligonucleotide
  Antisense strand to SEQ ID NO: 2487628
ugucuccuuggugacaugc

SEQ ID NO: 2487630 - RNA, 19 nt, Artificial Sequence
  Description of Artificial Sequence: Synthetic oligonucleotide
  Sense strand starting at position 649 of SEQ ID NO: 1887660
uuggaauguguugaauucu

SEQ ID NO: 2487631 - RNA, 19 nt, Artificial Sequence
  Description of Artificial Sequence: Synthetic oligonucleotide
  Antisense strand to SEQ ID NO: 2487630
agaauucaacacauuccaa

SEQ ID NO: 2487632 - RNA, 19 nt, Artificial Sequence
  Description of Artificial Sequence: Synthetic oligonucleotide
  Sense strand starting at position 717 of SEQ ID NO: 1887660
ggagaguguggcugggaaa

SEQ ID NO: 2487633 - RNA, 19 nt, Artificial Sequence
  Description of Artificial Sequence: Synthetic oligonucleotide
  Antisense strand to SEQ ID NO: 2487632
uuucccagccacacucucc

SEQ ID NO: 2487634 - RNA, 19 nt, Artificial Sequence
  Description of Artificial Sequence: Synthetic oligonucleotide
  Sense strand starting at position 718 of SEQ ID NO: 1887660
gagaguguggcugggaaau

SEQ ID NO: 2487635 - RNA, 19 nt, Artificial Sequence
  Description of Artificial Sequence: Synthetic oligonucleotide
  Antisense strand to SEQ ID NO: 2487634
auuucccagccacacucuc

SEQ ID NO: 2487636 - RNA, 19 nt, Artificial Sequence
  Description of Artificial Sequence: Synthetic oligonucleotide
  Sense strand starting at position 1531 of SEQ ID NO: 1887660
agugaucucaggugaucca

SEQ ID NO: 2487637 - RNA, 19 nt, Artificial Sequence
  Description of Artificial Sequence: Synthetic oligonucleotide
  Antisense strand to SEQ ID NO: 2487636
uggaucaccugagaucacu

SEQ ID NO: 2487638 - RNA, 19 nt, Artificial Sequence
  Description of Artificial Sequence: Synthetic oligonucleotide
  Sense strand starting at position 1775 of SEQ ID NO: 1887660
cccagagacccuggucauu

SEQ ID NO: 2487639 - RNA, 19 nt, Artificial Sequence
  Description of Artificial Sequence: Synthetic oligonucleotide
  Antisense strand to SEQ ID NO: 2487638
aaugaccagggucucuggg

SEQ ID NO: 2487640 - RNA, 19 nt, Artificial Sequence
  Description of Artificial Sequence: Synthetic oligonucleotide
  Sense strand starting at position 2086 of SEQ ID NO: 1887660
aauguugcucaauagugaa

SEQ ID NO: 2487641 - RNA, 19 nt, Artificial Sequence
  Description of Artificial Sequence: Synthetic oligonucleotide
  Antisense strand to SEQ ID NO: 2487640
uucacuauugagcaacauu

SEQ ID NO: 2487642 - RNA, 19 nt, Artificial Sequence
  Description of Artificial Sequence: Synthetic oligonucleotide
  Sense strand starting at position 2094 of SEQ ID NO: 1887660
ucaauagugaaagguagau

SEQ ID NO: 2487643 - RNA, 19 nt, Artificial Sequence
  Description of Artificial Sequence: Synthetic oligonucleotide
  Antisense strand to SEQ ID NO: 2487642
aucuaccuuucacuauuga

SEQ ID NO: 2487644 - RNA, 19 nt, Artificial Sequence
  Description of Artificial Sequence: Synthetic oligonucleotide
  Sense strand starting at position 2757 of SEQ ID NO: 1887660
ggagguggcucacuugaau

SEQ ID NO: 2487645 - RNA, 19 nt, Artificial Sequence
  Description of Artificial Sequence: Synthetic oligonucleotide
  Antisense strand to SEQ ID NO: 2487644
auucaagugagccaccucc

SEQ ID NO: 2487646 - RNA, 19 nt, Artificial Sequence
  Description of Artificial Sequence: Synthetic oligonucleotide
  Sense strand starting at position 3547 of SEQ ID NO: 1887660
gaguuagauguguaucucu

SEQ ID NO: 2487647 - RNA, 19 nt, Artificial Sequence
  Description of Artificial Sequence: Synthetic oligonucleotide
  Antisense strand to SEQ ID NO: 2487646
agagauacacaucuaacuc

SEQ ID NO: 2487648 - RNA, 19 nt, Artificial Sequence
  Description of Artificial Sequence: Synthetic oligonucleotide
  Sense strand starting at position 3594 of SEQ ID NO: 1887660
aaauguuaugucuggaaca

SEQ ID NO: 2487649 - RNA, 19 nt, Artificial Sequence
  Description of Artificial Sequence: Synthetic oligonucleotide
  Antisense strand to SEQ ID NO: 2487648
uguuccagacauaacauuu

SEQ ID NO: 2487650 - RNA, 19 nt, Artificial Sequence
  Description of Artificial Sequence: Synthetic oligonucleotide
  Sense strand starting at position 3596 of SEQ ID NO: 1887660
auguuaugucuggaacaca

SEQ ID NO: 2487651 - RNA, 19 nt, Artificial Sequence
  Description of Artificial Sequence: Synthetic oligonucleotide
  Antisense strand to SEQ ID NO: 2487650
uguguuccagacauaacau

SEQ ID NO: 2487652 - RNA, 19 nt, Artificial Sequence
  Description of Artificial Sequence: Synthetic oligonucleotide
  Sense strand starting at position 3619 of SEQ ID NO: 1887660
ggcugcuugggauauauuc

SEQ ID NO: 2487653 - RNA, 19 nt, Artificial Sequence
  Description of Artificial Sequence: Synthetic oligonucleotide
  Antisense strand to SEQ ID NO: 2487652
gaauauaucccaagcagcc

SEQ ID NO: 2487654 - RNA, 19 nt, Artificial Sequence
  Description of Artificial Sequence: Synthetic oligonucleotide
  Sense strand starting at position 3715 of SEQ ID NO: 1887660
augucuccagguugacaua

SEQ ID NO: 2487655 - RNA, 19 nt, Artificial Sequence
  Description of Artificial Sequence: Synthetic oligonucleotide
  Antisense strand to SEQ ID NO: 2487654
uaugucaaccuggagacau

SEQ ID NO: 2487656 - RNA, 19 nt, Artificial Sequence
  Description of Artificial Sequence: Synthetic oligonucleotide
  Sense strand starting at position 3900 of SEQ ID NO: 1887660
gaaaguaacugcuugaagu

SEQ ID NO: 2487657 - RNA, 19 nt, Artificial Sequence
  Description of Artificial Sequence: Synthetic oligonucleotide
  Antisense strand to SEQ ID NO: 2487656
acuucaagcaguuacuuuc

SEQ ID NO: 2487658 - RNA, 19 nt, Artificial Sequence
  Description of Artificial Sequence: Synthetic oligonucleotide
  Sense strand starting at position 3901 of SEQ ID NO: 1887660
aaaguaacugcuugaagua

SEQ ID NO: 2487659 - RNA, 19 nt, Artificial Sequence
  Description of Artificial Sequence: Synthetic oligonucleotide
  Antisense strand to SEQ ID NO: 2487658
uacuucaagcaguuacuuu

SEQ ID NO: 2487660 - RNA, 19 nt, Artificial Sequence
  Description of Artificial Sequence: Synthetic oligonucleotide
  Sense strand starting at position 3943 of SEQ ID NO: 1887660
ccuauagaguugguacuua

SEQ ID NO: 2487661 - RNA, 19 nt, Artificial Sequence
  Description of Artificial Sequence: Synthetic oligonucleotide
  Antisense strand to SEQ ID NO: 2487660
uaaguaccaacucuauagg

SEQ ID NO: 2487662 - RNA, 19 nt, Artificial Sequence
  Description of Artificial Sequence: Synthetic oligonucleotide
  Sense strand starting at position 3953 of SEQ ID NO: 1887660
ugguacuuauggucuggaa

SEQ ID NO: 2487663 - RNA, 19 nt, Artificial Sequence
  Description of Artificial Sequence: Synthetic oligonucleotide
  Antisense strand to SEQ ID NO: 2487662
uuccagaccauaaguacca

SEQ ID NO: 2487664 - RNA, 19 nt, Artificial Sequence
  Description of Artificial Sequence: Synthetic oligonucleotide
  Sense strand starting at position 3955 of SEQ ID NO: 1887660
guacuuauggucuggaaau

SEQ ID NO: 2487665 - RNA, 19 nt, Artificial Sequence
  Description of Artificial Sequence: Synthetic oligonucleotide
  Antisense strand to SEQ ID NO: 2487664
auuuccagaccauaaguac

SEQ ID NO: 2487666 - RNA, 19 nt, Artificial Sequence
  Description of Artificial Sequence: Synthetic oligonucleotide
  Sense strand starting at position 3967 of SEQ ID NO: 1887660
uggaaauagccacauugua

SEQ ID NO: 2487667 - RNA, 19 nt, Artificial Sequence
  Description of Artificial Sequence: Synthetic oligonucleotide
  Antisense strand to SEQ ID NO: 2487666
uacaauguggcuauuucca

SEQ ID NO: 2487668 - RNA, 19 nt, Artificial Sequence
  Description of Artificial Sequence: Synthetic oligonucleotide
  Sense strand starting at position 230 of SEQ ID NO: 1887661
ggugguacguacuuauagu

SEQ ID NO: 2487669 - RNA, 19 nt, Artificial Sequence
  Description of Artificial Sequence: Synthetic oligonucleotide
  Antisense strand to SEQ ID NO: 2487668
acuauaaguacguaccacc

SEQ ID NO: 2487670 - RNA, 19 nt, Artificial Sequence
  Description of Artificial Sequence: Synthetic oligonucleotide
  Sense strand starting at position 267 of SEQ ID NO: 1887661
ggagguggcucacuugaau

SEQ ID NO: 2487671 - RNA, 19 nt, Artificial Sequence
  Description of Artificial Sequence: Synthetic oligonucleotide
  Antisense strand to SEQ ID NO: 2487670
auucaagugagccaccucc

SEQ ID NO: 2487672 - RNA, 19 nt, Artificial Sequence
  Description of Artificial Sequence: Synthetic oligonucleotide
  Sense strand starting at position 505 of SEQ ID NO: 1887661
gcaacuaccuagcuuugaa

SEQ ID NO: 2487673 - RNA, 19 nt, Artificial Sequence
  Description of Artificial Sequence: Synthetic oligonucleotide
  Antisense strand to SEQ ID NO: 2487672
uucaaagcuagguaguugc

SEQ ID NO: 2487674 - RNA, 19 nt, Artificial Sequence
  Description of Artificial Sequence: Synthetic oligonucleotide
  Sense strand starting at position 552 of SEQ ID NO: 1887661
augucugucucacuaacuu

SEQ ID NO: 2487675 - RNA, 19 nt, Artificial Sequence
  Description of Artificial Sequence: Synthetic oligonucleotide
  Antisense strand to SEQ ID NO: 2487674
aaguuagugagacagacau

SEQ ID NO: 2487676 - RNA, 19 nt, Artificial Sequence
  Description of Artificial Sequence: Synthetic oligonucleotide
  Sense strand starting at position 1053 of SEQ ID NO: 1887661
accugaguuagauguguau

SEQ ID NO: 2487677 - RNA, 19 nt, Artificial Sequence
  Description of Artificial Sequence: Synthetic oligonucleotide
  Antisense strand to SEQ ID NO: 2487676
auacacaucuaacucaggu

SEQ ID NO: 2487678 - RNA, 19 nt, Artificial Sequence
  Description of Artificial Sequence: Synthetic oligonucleotide
  Sense strand starting at position 1055 of SEQ ID NO: 1887661
cugaguuagauguguaucu

SEQ ID NO: 2487679 - RNA, 19 nt, Artificial Sequence
  Description of Artificial Sequence: Synthetic oligonucleotide
  Antisense strand to SEQ ID NO: 2487678
agauacacaucuaacucag

SEQ ID NO: 2487680 - RNA, 19 nt, Artificial Sequence
  Description of Artificial Sequence: Synthetic oligonucleotide
  Sense strand starting at position 1057 of SEQ ID NO: 1887661
gaguuagauguguaucucu

SEQ ID NO: 2487681 - RNA, 19 nt, Artificial Sequence
  Description of Artificial Sequence: Synthetic oligonucleotide
  Antisense strand to SEQ ID NO: 2487680
agagauacacaucuaacuc

SEQ ID NO: 2487682 - RNA, 19 nt, Artificial Sequence
  Description of Artificial Sequence: Synthetic oligonucleotide
  Sense strand starting at position 1060 of SEQ ID NO: 1887661
uuagauguguaucucuaau

SEQ ID NO: 2487683 - RNA, 19 nt, Artificial Sequence
  Description of Artificial Sequence: Synthetic oligonucleotide
  Antisense strand to SEQ ID NO: 2487682
auuagagauacacaucuaa

SEQ ID NO: 2487684 - RNA, 19 nt, Artificial Sequence
  Description of Artificial Sequence: Synthetic oligonucleotide
  Sense strand starting at position 1062 of SEQ ID NO: 1887661
agauguguaucucuaaucu

SEQ ID NO: 2487685 - RNA, 19 nt, Artificial Sequence
  Description of Artificial Sequence: Synthetic oligonucleotide
  Antisense strand to SEQ ID NO: 2487684
agauuagagauacacaucu

SEQ ID NO: 2487686 - RNA, 19 nt, Artificial Sequence
  Description of Artificial Sequence: Synthetic oligonucleotide
  Sense strand starting at position 1066 of SEQ ID NO: 1887661
guguaucucuaaucuuagu

SEQ ID NO: 2487687 - RNA, 19 nt, Artificial Sequence
  Description of Artificial Sequence: Synthetic oligonucleotide
  Antisense strand to SEQ ID NO: 2487686
acuaagauuagagauacac

SEQ ID NO: 2487688 - RNA, 19 nt, Artificial Sequence
  Description of Artificial Sequence: Synthetic oligonucleotide
  Sense strand starting at position 1104 of SEQ ID NO: 1887661
aaauguuaugucuggaaca

SEQ ID NO: 2487689 - RNA, 19 nt, Artificial Sequence
  Description of Artificial Sequence: Synthetic oligonucleotide
  Antisense strand to SEQ ID NO: 2487688
uguuccagacauaacauuu

SEQ ID NO: 2487690 - RNA, 19 nt, Artificial Sequence
  Description of Artificial Sequence: Synthetic oligonucleotide
  Sense strand starting at position 1106 of SEQ ID NO: 1887661
auguuaugucuggaacaca

SEQ ID NO: 2487691 - RNA, 19 nt, Artificial Sequence
  Description of Artificial Sequence: Synthetic oligonucleotide
  Antisense strand to SEQ ID NO: 2487690
uguguuccagacauaacau

SEQ ID NO: 2487692 - RNA, 19 nt, Artificial Sequence
  Description of Artificial Sequence: Synthetic oligonucleotide
  Sense strand starting at position 1129 of SEQ ID NO: 1887661
ggcugcuugggauauauuc

SEQ ID NO: 2487693 - RNA, 19 nt, Artificial Sequence
  Description of Artificial Sequence: Synthetic oligonucleotide
  Antisense strand to SEQ ID NO: 2487692
gaauauaucccaagcagcc

SEQ ID NO: 2487694 - RNA, 19 nt, Artificial Sequence
  Description of Artificial Sequence: Synthetic oligonucleotide
  Sense strand starting at position 1225 of SEQ ID NO: 1887661
augucuccagguugacaua

SEQ ID NO: 2487695 - RNA, 19 nt, Artificial Sequence
  Description of Artificial Sequence: Synthetic oligonucleotide
  Antisense strand to SEQ ID NO: 2487694
uaugucaaccuggagacau

SEQ ID NO: 2487696 - RNA, 19 nt, Artificial Sequence
  Description of Artificial Sequence: Synthetic oligonucleotide
  Sense strand starting at position 1228 of SEQ ID NO: 1887661
ucuccagguugacauagaa

SEQ ID NO: 2487697 - RNA, 19 nt, Artificial Sequence
  Description of Artificial Sequence: Synthetic oligonucleotide
  Antisense strand to SEQ ID NO: 2487696
uucuaugucaaccuggaga

SEQ ID NO: 2487698 - RNA, 19 nt, Artificial Sequence
  Description of Artificial Sequence: Synthetic oligonucleotide
  Sense strand starting at position 1249 of SEQ ID NO: 1887661
uuucuacugguccgaaagu

SEQ ID NO: 2487699 - RNA, 19 nt, Artificial Sequence
  Description of Artificial Sequence: Synthetic oligonucleotide
  Antisense strand to SEQ ID NO: 2487698
acuuucggaccaguagaaa

SEQ ID NO: 2487700 - RNA, 19 nt, Artificial Sequence
  Description of Artificial Sequence: Synthetic oligonucleotide
  Sense strand starting at position 1262 of SEQ ID NO: 1887661
gaaaguugcaucuguacga

SEQ ID NO: 2487701 - RNA, 19 nt, Artificial Sequence
  Description of Artificial Sequence: Synthetic oligonucleotide
  Antisense strand to SEQ ID NO: 2487700
ucguacagaugcaacuuuc

SEQ ID NO: 2487702 - RNA, 19 nt, Artificial Sequence
  Description of Artificial Sequence: Synthetic oligonucleotide
  Sense strand starting at position 1356 of SEQ ID NO: 1887661
uuguaaucuuuacuaggca

SEQ ID NO: 2487703 - RNA, 19 nt, Artificial Sequence
  Description of Artificial Sequence: Synthetic oligonucleotide
  Antisense strand to SEQ ID NO: 2487702
ugccuaguaaagauuacaa

SEQ ID NO: 2487704 - RNA, 19 nt, Artificial Sequence
  Description of Artificial Sequence: Synthetic oligonucleotide
  Sense strand starting at position 1382 of SEQ ID NO: 1887661
uuagcaggccucugguuua

SEQ ID NO: 2487705 - RNA, 19 nt, Artificial Sequence
  Description of Artificial Sequence: Synthetic oligonucleotide
  Antisense strand to SEQ ID NO: 2487704
uaaaccagaggccugcuaa

SEQ ID NO: 2487706 - RNA, 19 nt, Artificial Sequence
  Description of Artificial Sequence: Synthetic oligonucleotide
  Sense strand starting at position 1385 of SEQ ID NO: 1887661
gcaggccucugguuuaaua

SEQ ID NO: 2487707 - RNA, 19 nt, Artificial Sequence
  Description of Artificial Sequence: Synthetic oligonucleotide
  Antisense strand to SEQ ID NO: 2487706
uauuaaaccagaggccugc

SEQ ID NO: 2487708 - RNA, 19 nt, Artificial Sequence
  Description of Artificial Sequence: Synthetic oligonucleotide
  Sense strand starting at position 1410 of SEQ ID NO: 1887661
gaaaguaacugcuugaagu

SEQ ID NO: 2487709 - RNA, 19 nt, Artificial Sequence
  Description of Artificial Sequence: Synthetic oligonucleotide
  Antisense strand to SEQ ID NO: 2487708
acuucaagcaguuacuuuc

SEQ ID NO: 2487710 - RNA, 19 nt, Artificial Sequence
  Description of Artificial Sequence: Synthetic oligonucleotide
  Sense strand starting at position 1411 of SEQ ID NO: 1887661
aaaguaacugcuugaagua

SEQ ID NO: 2487711 - RNA, 19 nt, Artificial Sequence
  Description of Artificial Sequence: Synthetic oligonucleotide
  Antisense strand to SEQ ID NO: 2487710
uacuucaagcaguuacuuu

SEQ ID NO: 2487712 - RNA, 19 nt, Artificial Sequence
  Description of Artificial Sequence: Synthetic oligonucleotide
  Sense strand starting at position 1453 of SEQ ID NO: 1887661
ccuauagaguugguacuua

SEQ ID NO: 2487713 - RNA, 19 nt, Artificial Sequence
  Description of Artificial Sequence: Synthetic oligonucleotide
  Antisense strand to SEQ ID NO: 2487712
uaaguaccaacucuauagg

SEQ ID NO: 2487714 - RNA, 19 nt, Artificial Sequence
  Description of Artificial Sequence: Synthetic oligonucleotide
  Sense strand starting at position 1457 of SEQ ID NO: 1887661
uagaguugguacuuauggu

SEQ ID NO: 2487715 - RNA, 19 nt, Artificial Sequence
  Description of Artificial Sequence: Synthetic oligonucleotide
  Antisense strand to SEQ ID NO: 2487714
accauaaguaccaacucua

SEQ ID NO: 2487716 - RNA, 19 nt, Artificial Sequence
  Description of Artificial Sequence: Synthetic oligonucleotide
  Sense strand starting at position 1463 of SEQ ID NO: 1887661
ugguacuuauggucuggaa

SEQ ID NO: 2487717 - RNA, 19 nt, Artificial Sequence
  Description of Artificial Sequence: Synthetic oligonucleotide
  Antisense strand to SEQ ID NO: 2487716
uuccagaccauaaguacca

SEQ ID NO: 2487718 - RNA, 19 nt, Artificial Sequence
  Description of Artificial Sequence: Synthetic oligonucleotide
  Sense strand starting at position 1465 of SEQ ID NO: 1887661
guacuuauggucuggaaau

SEQ ID NO: 2487719 - RNA, 19 nt, Artificial Sequence
  Description of Artificial Sequence: Synthetic oligonucleotide
  Antisense strand to SEQ ID NO: 2487718
auuuccagaccauaaguac

SEQ ID NO: 2487720 - RNA, 19 nt, Artificial Sequence
  Description of Artificial Sequence: Synthetic oligonucleotide
  Sense strand starting at position 1477 of SEQ ID NO: 1887661
uggaaauagccacauugua

SEQ ID NO: 2487721 - RNA, 19 nt, Artificial Sequence
  Description of Artificial Sequence: Synthetic oligonucleotide
  Antisense strand to SEQ ID NO: 2487720
uacaauguggcuauuucca

SEQ ID NO: 2487722 - RNA, 19 nt, Artificial Sequence
  Description of Artificial Sequence: Synthetic oligonucleotide
  Sense strand starting at position 1769 of SEQ ID NO: 1887661
cccagagaccguggucauu

SEQ ID NO: 2487723 - RNA, 19 nt, Artificial Sequence
  Description of Artificial Sequence: Synthetic oligonucleotide
  Antisense strand to SEQ ID NO: 2487722
aaugaccacggucucuggg

SEQ ID NO: 2487724 - RNA, 19 nt, Artificial Sequence
  Description of Artificial Sequence: Synthetic oligonucleotide
  Sense strand starting at position 1778 of SEQ ID NO: 1887661
cguggucauuuccuuaaag

SEQ ID NO: 2487725 - RNA, 19 nt, Artificial Sequence
  Description of Artificial Sequence: Synthetic oligonucleotide
  Antisense strand to SEQ ID NO: 2487724
cuuuaaggaaaugaccacg

SEQ ID NO: 2487726 - RNA, 19 nt, Artificial Sequence
  Description of Artificial Sequence: Synthetic oligonucleotide
  Sense strand starting at position 2080 of SEQ ID NO: 1887661
aauguugcucaauagcgaa

SEQ ID NO: 2487727 - RNA, 19 nt, Artificial Sequence
  Description of Artificial Sequence: Synthetic oligonucleotide
  Antisense strand to SEQ ID NO: 2487726
uucgcuauugagcaacauu

SEQ ID NO: 2487728 - RNA, 19 nt, Artificial Sequence
  Description of Artificial Sequence: Synthetic oligonucleotide
  Sense strand starting at position 2088 of SEQ ID NO: 1887661
ucaauagcgaaagguagau

SEQ ID NO: 2487729 - RNA, 19 nt, Artificial Sequence
  Description of Artificial Sequence: Synthetic oligonucleotide
  Antisense strand to SEQ ID NO: 2487728
aucuaccuuucgcuauuga

SEQ ID NO: 2487730 - RNA, 19 nt, Artificial Sequence
  Description of Artificial Sequence: Synthetic oligonucleotide
  Sense strand starting at position 2308 of SEQ ID NO: 1887661
gagcgaucaucagcucacu

SEQ ID NO: 2487731 - RNA, 19 nt, Artificial Sequence
  Description of Artificial Sequence: Synthetic oligonucleotide
  Antisense strand to SEQ ID NO: 2487730
agugagcugaugaucgcuc

SEQ ID NO: 2487732 - RNA, 19 nt, Artificial Sequence
  Description of Artificial Sequence: Synthetic oligonucleotide
  Sense strand starting at position 3213 of SEQ ID NO: 1887661
aauaaugcgguccaggaau

SEQ ID NO: 2487733 - RNA, 19 nt, Artificial Sequence
  Description of Artificial Sequence: Synthetic oligonucleotide
  Antisense strand to SEQ ID NO: 2487732
auuccuggaccgcauuauu

SEQ ID NO: 2487734 - RNA, 19 nt, Artificial Sequence
  Description of Artificial Sequence: Synthetic oligonucleotide
  Sense strand starting at position 3276 of SEQ ID NO: 1887661
ggcggaugacucgaggcuu

SEQ ID NO: 2487735 - RNA, 19 nt, Artificial Sequence
  Description of Artificial Sequence: Synthetic oligonucleotide
  Antisense strand to SEQ ID NO: 2487734
aagccucgagucauccgcc

SEQ ID NO: 2487736 - RNA, 19 nt, Artificial Sequence
  Description of Artificial Sequence: Synthetic oligonucleotide
  Sense strand starting at position 3530 of SEQ ID NO: 1887661
agagaaucaaggugucgga

SEQ ID NO: 2487737 - RNA, 19 nt, Artificial Sequence
  Description of Artificial Sequence: Synthetic oligonucleotide
  Antisense strand to SEQ ID NO: 2487736
uccgacaccuugauucucu

SEQ ID NO: 2487738 - RNA, 19 nt, Artificial Sequence
  Description of Artificial Sequence: Synthetic oligonucleotide
  Sense strand starting at position 3569 of SEQ ID NO: 1887661
ggacucaguguuggagauu

SEQ ID NO: 2487739 - RNA, 19 nt, Artificial Sequence
  Description of Artificial Sequence: Synthetic oligonucleotide
  Antisense strand to SEQ ID NO: 2487738
aaucuccaacacugagucc

SEQ ID NO: 2487740 - RNA, 19 nt, Artificial Sequence
  Description of Artificial Sequence: Synthetic oligonucleotide
  Sense strand starting at position 3570 of SEQ ID NO: 1887661
gacucaguguuggagauuu

SEQ ID NO: 2487741 - RNA, 19 nt, Artificial Sequence
  Description of Artificial Sequence: Synthetic oligonucleotide
  Antisense strand to SEQ ID NO: 2487740
aaaucuccaacacugaguc

SEQ ID NO: 2487742 - RNA, 19 nt, Artificial Sequence
  Description of Artificial Sequence: Synthetic oligonucleotide
  Sense strand starting at position 3668 of SEQ ID NO: 1887661
uacugaacucugugaggac

SEQ ID NO: 2487743 - RNA, 19 nt, Artificial Sequence
  Description of Artificial Sequence: Synthetic oligonucleotide
  Antisense strand to SEQ ID NO: 2487742
guccucacagaguucagua

SEQ ID NO: 2487744 - RNA, 19 nt, Artificial Sequence
  Description of Artificial Sequence: Synthetic oligonucleotide
  Sense strand starting at position 3825 of SEQ ID NO: 1887661
uuccuagcuucuguaaaug

SEQ ID NO: 2487745 - RNA, 19 nt, Artificial Sequence
  Description of Artificial Sequence: Synthetic oligonucleotide
  Antisense strand to SEQ ID NO: 2487744
cauuuacagaagcuaggaa

SEQ ID NO: 2487746 - RNA, 19 nt, Artificial Sequence
  Description of Artificial Sequence: Synthetic oligonucleotide
  Sense strand starting at position 3909 of SEQ ID NO: 1887661
gcuggaauagcaugaucuu

SEQ ID NO: 2487747 - RNA, 19 nt, Artificial Sequence
  Description of Artificial Sequence: Synthetic oligonucleotide
  Antisense strand to SEQ ID NO: 2487746
aagaucaugcuauuccagc

SEQ ID NO: 2487748 - RNA, 19 nt, Artificial Sequence
  Description of Artificial Sequence: Synthetic oligonucleotide
  Sense strand starting at position 247 of SEQ ID NO: 1887662
cgaccaauaucugucuucu

SEQ ID NO: 2487749 - RNA, 19 nt, Artificial Sequence
  Description of Artificial Sequence: Synthetic oligonucleotide
  Antisense strand to SEQ ID NO: 2487748
agaagacagauauuggucg

SEQ ID NO: 2487750 - RNA, 19 nt, Artificial Sequence
  Description of Artificial Sequence: Synthetic oligonucleotide
  Sense strand starting at position 255 of SEQ ID NO: 1887662
aucugucuucuugaugcaa

SEQ ID NO: 2487751 - RNA, 19 nt, Artificial Sequence
  Description of Artificial Sequence: Synthetic oligonucleotide
  Antisense strand to SEQ ID NO: 2487750
uugcaucaagaagacagau

SEQ ID NO: 2487752 - RNA, 19 nt, Artificial Sequence
  Description of Artificial Sequence: Synthetic oligonucleotide
  Sense strand starting at position 322 of SEQ ID NO: 1887662
gcagucuucugaucuaccu

SEQ ID NO: 2487753 - RNA, 19 nt, Artificial Sequence
  Description of Artificial Sequence: Synthetic oligonucleotide
  Antisense strand to SEQ ID NO: 2487752
agguagaucagaagacugc

SEQ ID NO: 2487754 - RNA, 19 nt, Artificial Sequence
  Description of Artificial Sequence: Synthetic oligonucleotide
  Sense strand starting at position 529 of SEQ ID NO: 1887662
gauugcaugucaccaagga

SEQ ID NO: 2487755 - RNA, 19 nt, Artificial Sequence
  Description of Artificial Sequence: Synthetic oligonucleotide
  Antisense strand to SEQ ID NO: 2487754
uccuuggugacaugcaauc

SEQ ID NO: 2487756 - RNA, 19 nt, Artificial Sequence
  Description of Artificial Sequence: Synthetic oligonucleotide
  Sense strand starting at position 533 of SEQ ID NO: 1887662
gcaugucaccaaggagaca

SEQ ID NO: 2487757 - RNA, 19 nt, Artificial Sequence
  Description of Artificial Sequence: Synthetic oligonucleotide
  Antisense strand to SEQ ID NO: 2487756
ugucuccuuggugacaugc

SEQ ID NO: 2487758 - RNA, 19 nt, Artificial Sequence
  Description of Artificial Sequence: Synthetic oligonucleotide
  Sense strand starting at position 639 of SEQ ID NO: 1887662
aguguuggaauguguugaa

SEQ ID NO: 2487759 - RNA, 19 nt, Artificial Sequence
  Description of Artificial Sequence: Synthetic oligonucleotide
  Antisense strand to SEQ ID NO: 2487758
uucaacacauuccaacacu

SEQ ID NO: 2487760 - RNA, 19 nt, Artificial Sequence
  Description of Artificial Sequence: Synthetic oligonucleotide
  Sense strand starting at position 643 of SEQ ID NO: 1887662
uuggaauguguugaauucu

SEQ ID NO: 2487761 - RNA, 19 nt, Artificial Sequence
  Description of Artificial Sequence: Synthetic oligonucleotide
  Antisense strand to SEQ ID NO: 2487760
agaauucaacacauuccaa

SEQ ID NO: 2487762 - RNA, 19 nt, Artificial Sequence
  Description of Artificial Sequence: Synthetic oligonucleotide
  Sense strand starting at position 660 of SEQ ID NO: 1887662
cugacauucuguucuacca

SEQ ID NO: 2487763 - RNA, 19 nt, Artificial Sequence
  Description of Artificial Sequence: Synthetic oligonucleotide
  Antisense strand to SEQ ID NO: 2487762
ugguagaacagaaugucag

SEQ ID NO: 2487764 - RNA, 19 nt, Artificial Sequence
  Description of Artificial Sequence: Synthetic oligonucleotide
  Sense strand starting at position 711 of SEQ ID NO: 1887662
ggagaguguggcugggaaa

SEQ ID NO: 2487765 - RNA, 19 nt, Artificial Sequence
  Description of Artificial Sequence: Synthetic oligonucleotide
  Antisense strand to SEQ ID NO: 2487764
uuucccagccacacucucc

SEQ ID NO: 2487766 - RNA, 19 nt, Artificial Sequence
  Description of Artificial Sequence: Synthetic oligonucleotide
  Sense strand starting at position 712 of SEQ ID NO: 1887662
gagaguguggcugggaaau

SEQ ID NO: 2487767 - RNA, 19 nt, Artificial Sequence
  Description of Artificial Sequence: Synthetic oligonucleotide
  Antisense strand to SEQ ID NO: 2487766
auuucccagccacacucuc

SEQ ID NO: 2487768 - RNA, 19 nt, Artificial Sequence
  Description of Artificial Sequence: Synthetic oligonucleotide
  Sense strand starting at position 737 of SEQ ID NO: 1887662
auuacuucucagugcacau

SEQ ID NO: 2487769 - RNA, 19 nt, Artificial Sequence
  Description of Artificial Sequence: Synthetic oligonucleotide
  Antisense strand to SEQ ID NO: 2487768
augugcacugagaaguaau

SEQ ID NO: 2487770 - RNA, 19 nt, Artificial Sequence
  Description of Artificial Sequence: Synthetic oligonucleotide
  Sense strand starting at position 762 of SEQ ID NO: 1887662
agugauccuccauguguca

SEQ ID NO: 2487771 - RNA, 19 nt, Artificial Sequence
  Description of Artificial Sequence: Synthetic oligonucleotide
  Antisense strand to SEQ ID NO: 2487770
ugacacauggaggaucacu

SEQ ID NO: 2487772 - RNA, 19 nt, Artificial Sequence
  Description of Artificial Sequence: Synthetic oligonucleotide
  Sense strand starting at position 1525 of SEQ ID NO: 1887662
agugaucucaggugaucca

SEQ ID NO: 2487773 - RNA, 19 nt, Artificial Sequence
  Description of Artificial Sequence: Synthetic oligonucleotide
  Antisense strand to SEQ ID NO: 2487772
uggaucaccugagaucacu

SEQ ID NO: 2487774 - RNA, 19 nt, Artificial Sequence
  Description of Artificial Sequence: Synthetic oligonucleotide
  Sense strand starting at position 1769 of SEQ ID NO: 1887662
cccagagacccuggucauu

SEQ ID NO: 2487775 - RNA, 19 nt, Artificial Sequence
  Description of Artificial Sequence: Synthetic oligonucleotide
  Antisense strand to SEQ ID NO: 2487774
aaugaccagggucucuggg

SEQ ID NO: 2487776 - RNA, 19 nt, Artificial Sequence
  Description of Artificial Sequence: Synthetic oligonucleotide
  Sense strand starting at position 2077 of SEQ ID NO: 1887662
cugaauguugcucaauagu

SEQ ID NO: 2487777 - RNA, 19 nt, Artificial Sequence
  Description of Artificial Sequence: Synthetic oligonucleotide
  Antisense strand to SEQ ID NO: 2487776
acuauugagcaacauucag

SEQ ID NO: 2487778 - RNA, 19 nt, Artificial Sequence
  Description of Artificial Sequence: Synthetic oligonucleotide
  Sense strand starting at position 2080 of SEQ ID NO: 1887662
aauguugcucaauagugaa

SEQ ID NO: 2487779 - RNA, 19 nt, Artificial Sequence
  Description of Artificial Sequence: Synthetic oligonucleotide
  Antisense strand to SEQ ID NO: 2487778
uucacuauugagcaacauu

SEQ ID NO: 2487780 - RNA, 19 nt, Artificial Sequence
  Description of Artificial Sequence: Synthetic oligonucleotide
  Sense strand starting at position 2088 of SEQ ID NO: 1887662
ucaauagugaaagguagau

SEQ ID NO: 2487781 - RNA, 19 nt, Artificial Sequence
  Description of Artificial Sequence: Synthetic oligonucleotide
  Antisense strand to SEQ ID NO: 2487780
aucuaccuuucacuauuga

SEQ ID NO: 2487782 - RNA, 19 nt, Artificial Sequence
  Description of Artificial Sequence: Synthetic oligonucleotide
  Sense strand starting at position 2751 of SEQ ID NO: 1887662
ggagguggcucacuugaau

SEQ ID NO: 2487783 - RNA, 19 nt, Artificial Sequence
  Description of Artificial Sequence: Synthetic oligonucleotide
  Antisense strand to SEQ ID NO: 2487782
auucaagugagccaccucc

SEQ ID NO: 2487784 - RNA, 19 nt, Artificial Sequence
  Description of Artificial Sequence: Synthetic oligonucleotide
  Sense strand starting at position 2989 of SEQ ID NO: 1887662
gcaacuaccuagcuuugaa

SEQ ID NO: 2487785 - RNA, 19 nt, Artificial Sequence
  Description of Artificial Sequence: Synthetic oligonucleotide
  Antisense strand to SEQ ID NO: 2487784
uucaaagcuagguaguugc

SEQ ID NO: 2487786 - RNA, 19 nt, Artificial Sequence
  Description of Artificial Sequence: Synthetic oligonucleotide
  Sense strand starting at position 3036 of SEQ ID NO: 1887662
augucugucucacuaacuu

SEQ ID NO: 2487787 - RNA, 19 nt, Artificial Sequence
  Description of Artificial Sequence: Synthetic oligonucleotide
  Antisense strand to SEQ ID NO: 2487786
aaguuagugagacagacau

SEQ ID NO: 2487788 - RNA, 19 nt, Artificial Sequence
  Description of Artificial Sequence: Synthetic oligonucleotide
  Sense strand starting at position 3537 of SEQ ID NO: 1887662
accugaguuagauguguau

SEQ ID NO: 2487789 - RNA, 19 nt, Artificial Sequence
  Description of Artificial Sequence: Synthetic oligonucleotide
  Antisense strand to SEQ ID NO: 2487788
auacacaucuaacucaggu

SEQ ID NO: 2487790 - RNA, 19 nt, Artificial Sequence
  Description of Artificial Sequence: Synthetic oligonucleotide
  Sense strand starting at position 3539 of SEQ ID NO: 1887662
cugaguuagauguguaucu

SEQ ID NO: 2487791 - RNA, 19 nt, Artificial Sequence
  Description of Artificial Sequence: Synthetic oligonucleotide
  Antisense strand to SEQ ID NO: 2487790
agauacacaucuaacucag

SEQ ID NO: 2487792 - RNA, 19 nt, Artificial Sequence
  Description of Artificial Sequence: Synthetic oligonucleotide
  Sense strand starting at position 3541 of SEQ ID NO: 1887662
gaguuagauguguaucucu

SEQ ID NO: 2487793 - RNA, 19 nt, Artificial Sequence
  Description of Artificial Sequence: Synthetic oligonucleotide
  Antisense strand to SEQ ID NO: 2487792
agagauacacaucuaacuc

SEQ ID NO: 2487794 - RNA, 19 nt, Artificial Sequence
  Description of Artificial Sequence: Synthetic oligonucleotide
  Sense strand starting at position 3544 of SEQ ID NO: 1887662
uuagauguguaucucuaau

SEQ ID NO: 2487795 - RNA, 19 nt, Artificial Sequence
  Description of Artificial Sequence: Synthetic oligonucleotide
  Antisense strand to SEQ ID NO: 2487794
auuagagauacacaucuaa

SEQ ID NO: 2487796 - RNA, 19 nt, Artificial Sequence
  Description of Artificial Sequence: Synthetic oligonucleotide
  Sense strand starting at position 3546 of SEQ ID NO: 1887662
agauguguaucucuaaucu

SEQ ID NO: 2487797 - RNA, 19 nt, Artificial Sequence
  Description of Artificial Sequence: Synthetic oligonucleotide
  Antisense strand to SEQ ID NO: 2487796
agauuagagauacacaucu

SEQ ID NO: 2487798 - RNA, 19 nt, Artificial Sequence
  Description of Artificial Sequence: Synthetic oligonucleotide
  Sense strand starting at position 3550 of SEQ ID NO: 1887662
guguaucucuaaucuuagu

SEQ ID NO: 2487799 - RNA, 19 nt, Artificial Sequence
  Description of Artificial Sequence: Synthetic oligonucleotide
  Antisense strand to SEQ ID NO: 2487798
acuaagauuagagauacac

SEQ ID NO: 2487800 - RNA, 19 nt, Artificial Sequence
  Description of Artificial Sequence: Synthetic oligonucleotide
  Sense strand starting at position 3588 of SEQ ID NO: 1887662
aaauguuaugucuggaaca

SEQ ID NO: 2487801 - RNA, 19 nt, Artificial Sequence
  Description of Artificial Sequence: Synthetic oligonucleotide
  Antisense strand to SEQ ID NO: 2487800
uguuccagacauaacauuu

SEQ ID NO: 2487802 - RNA, 19 nt, Artificial Sequence
  Description of Artificial Sequence: Synthetic oligonucleotide
  Sense strand starting at position 3590 of SEQ ID NO: 1887662
auguuaugucuggaacaca

SEQ ID NO: 2487803 - RNA, 19 nt, Artificial Sequence
  Description of Artificial Sequence: Synthetic oligonucleotide
  Antisense strand to SEQ ID NO: 2487802
uguguuccagacauaacau

SEQ ID NO: 2487804 - RNA, 19 nt, Artificial Sequence
  Description of Artificial Sequence: Synthetic oligonucleotide
  Sense strand starting at position 3613 of SEQ ID NO: 1887662
ggcugcuugggauauauuc

SEQ ID NO: 2487805 - RNA, 19 nt, Artificial Sequence
  Description of Artificial Sequence: Synthetic oligonucleotide
  Antisense strand to SEQ ID NO: 2487804
gaauauaucccaagcagcc

SEQ ID NO: 2487806 - RNA, 19 nt, Artificial Sequence
  Description of Artificial Sequence: Synthetic oligonucleotide
  Sense strand starting at position 3709 of SEQ ID NO: 1887662
augucuccagguugacaua

SEQ ID NO: 2487807 - RNA, 19 nt, Artificial Sequence
  Description of Artificial Sequence: Synthetic oligonucleotide
  Antisense strand to SEQ ID NO: 2487806
uaugucaaccuggagacau

SEQ ID NO: 2487808 - RNA, 19 nt, Artificial Sequence
  Description of Artificial Sequence: Synthetic oligonucleotide
  Sense strand starting at position 3733 of SEQ ID NO: 1887662
uuucuacugguccgaaagu

SEQ ID NO: 2487809 - RNA, 19 nt, Artificial Sequence
  Description of Artificial Sequence: Synthetic oligonucleotide
  Antisense strand to SEQ ID NO: 2487808
acuuucggaccaguagaaa

SEQ ID NO: 2487810 - RNA, 19 nt, Artificial Sequence
  Description of Artificial Sequence: Synthetic oligonucleotide
  Sense strand starting at position 3746 of SEQ ID NO: 1887662
gaaaguugcaucuguacga

SEQ ID NO: 2487811 - RNA, 19 nt, Artificial Sequence
  Description of Artificial Sequence: Synthetic oligonucleotide
  Antisense strand to SEQ ID NO: 2487810
ucguacagaugcaacuuuc

SEQ ID NO: 2487812 - RNA, 19 nt, Artificial Sequence
  Description of Artificial Sequence: Synthetic oligonucleotide
  Sense strand starting at position 3840 of SEQ ID NO: 1887662
uuguaaucuuuacuaggca

SEQ ID NO: 2487813 - RNA, 19 nt, Artificial Sequence
  Description of Artificial Sequence: Synthetic oligonucleotide
  Antisense strand to SEQ ID NO: 2487812
ugccuaguaaagauuacaa

SEQ ID NO: 2487814 - RNA, 19 nt, Artificial Sequence
  Description of Artificial Sequence: Synthetic oligonucleotide
  Sense strand starting at position 3894 of SEQ ID NO: 1887662
gaaaguaacugcuugaagu

SEQ ID NO: 2487815 - RNA, 19 nt, Artificial Sequence
  Description of Artificial Sequence: Synthetic oligonucleotide
  Antisense strand to SEQ ID NO: 2487814
acuucaagcaguuacuuuc

SEQ ID NO: 2487816 - RNA, 19 nt, Artificial Sequence
  Description of Artificial Sequence: Synthetic oligonucleotide
  Sense strand starting at position 3895 of SEQ ID NO: 1887662
aaaguaacugcuugaagua

SEQ ID NO: 2487817 - RNA, 19 nt, Artificial Sequence
  Description of Artificial Sequence: Synthetic oligonucleotide
  Antisense strand to SEQ ID NO: 2487816
uacuucaagcaguuacuuu

SEQ ID NO: 2487818 - RNA, 19 nt, Artificial Sequence
  Description of Artificial Sequence: Synthetic oligonucleotide
  Sense strand starting at position 3937 of SEQ ID NO: 1887662
ccuauagaguugguacuua

SEQ ID NO: 2487819 - RNA, 19 nt, Artificial Sequence
  Description of Artificial Sequence: Synthetic oligonucleotide
  Antisense strand to SEQ ID NO: 2487818
uaaguaccaacucuauagg

SEQ ID NO: 2487820 - RNA, 19 nt, Artificial Sequence
  Description of Artificial Sequence: Synthetic oligonucleotide
  Sense strand starting at position 3941 of SEQ ID NO: 1887662
uagaguugguacuuauggu

SEQ ID NO: 2487821 - RNA, 19 nt, Artificial Sequence
  Description of Artificial Sequence: Synthetic oligonucleotide
  Antisense strand to SEQ ID NO: 2487820
accauaaguaccaacucua

SEQ ID NO: 2487822 - RNA, 19 nt, Artificial Sequence
  Description of Artificial Sequence: Synthetic oligonucleotide
  Sense strand starting at position 3947 of SEQ ID NO: 1887662
ugguacuuauggucuggaa

SEQ ID NO: 2487823 - RNA, 19 nt, Artificial Sequence
  Description of Artificial Sequence: Synthetic oligonucleotide
  Antisense strand to SEQ ID NO: 2487822
uuccagaccauaaguacca

SEQ ID NO: 2487824 - RNA, 19 nt, Artificial Sequence
  Description of Artificial Sequence: Synthetic oligonucleotide
  Sense strand starting at position 3949 of SEQ ID NO: 1887662
guacuuauggucuggaaau

SEQ ID NO: 2487825 - RNA, 19 nt, Artificial Sequence
  Description of Artificial Sequence: Synthetic oligonucleotide
  Antisense strand to SEQ ID NO: 2487824
auuuccagaccauaaguac

SEQ ID NO: 2487826 - RNA, 19 nt, Artificial Sequence
  Description of Artificial Sequence: Synthetic oligonucleotide
  Sense strand starting at position 3961 of SEQ ID NO: 1887662
uggaaauagccacauugua

SEQ ID NO: 2487827 - RNA, 19 nt, Artificial Sequence
  Description of Artificial Sequence: Synthetic oligonucleotide
  Antisense strand to SEQ ID NO: 2487826
uacaauguggcuauuucca

SEQ ID NO: 2487828 - RNA, 19 nt, Artificial Sequence
  Description of Artificial Sequence: Synthetic oligonucleotide
  Sense strand starting at position 6 of SEQ ID NO: 1887663
guguacauaugacuacauu

SEQ ID NO: 2487829 - RNA, 19 nt, Artificial Sequence
  Description of Artificial Sequence: Synthetic oligonucleotide
  Antisense strand to SEQ ID NO: 2487828
aauguagucauauguacac

SEQ ID NO: 2487830 - RNA, 19 nt, Artificial Sequence
  Description of Artificial Sequence: Synthetic oligonucleotide
  Sense strand starting at position 69 of SEQ ID NO: 1887663
uugagacccugucuaugaa

SEQ ID NO: 2487831 - RNA, 19 nt, Artificial Sequence
  Description of Artificial Sequence: Synthetic oligonucleotide
  Antisense strand to SEQ ID NO: 2487830
uucauagacagggucucaa

SEQ ID NO: 2487832 - RNA, 19 nt, Artificial Sequence
  Description of Artificial Sequence: Synthetic oligonucleotide
  Sense strand starting at position 99 of SEQ ID NO: 1887663
agaauauacuguuugcuca

SEQ ID NO: 2487833 - RNA, 19 nt, Artificial Sequence
  Description of Artificial Sequence: Synthetic oligonucleotide
  Antisense strand to SEQ ID NO: 2487832
ugagcaaacaguauauucu

SEQ ID NO: 2487834 - RNA, 19 nt, Artificial Sequence
  Description of Artificial Sequence: Synthetic oligonucleotide
  Sense strand starting at position 280 of SEQ ID NO: 1887663
gcggcaugcaccugaaauc

SEQ ID NO: 2487835 - RNA, 19 nt, Artificial Sequence
  Description of Artificial Sequence: Synthetic oligonucleotide
  Antisense strand to SEQ ID NO: 2487834
gauuucaggugcaugccgc

SEQ ID NO: 2487836 - RNA, 19 nt, Artificial Sequence
  Description of Artificial Sequence: Synthetic oligonucleotide
  Sense strand starting at position 813 of SEQ ID NO: 1887663
gccuaagaggucuagguug

SEQ ID NO: 2487837 - RNA, 19 nt, Artificial Sequence
  Description of Artificial Sequence: Synthetic oligonucleotide
  Antisense strand to SEQ ID NO: 2487836
caaccuagaccucuuaggc

SEQ ID NO: 2487838 - RNA, 19 nt, Artificial Sequence
  Description of Artificial Sequence: Synthetic oligonucleotide
  Sense strand starting at position 815 of SEQ ID NO: 1887663
cuaagaggucuagguugga

SEQ ID NO: 2487839 - RNA, 19 nt, Artificial Sequence
  Description of Artificial Sequence: Synthetic oligonucleotide
  Antisense strand to SEQ ID NO: 2487838
uccaaccuagaccucuuag

SEQ ID NO: 2487840 - RNA, 19 nt, Artificial Sequence
  Description of Artificial Sequence: Synthetic oligonucleotide
  Sense strand starting at position 860 of SEQ ID NO: 1887663
acagaaacccuguguugca

SEQ ID NO: 2487841 - RNA, 19 nt, Artificial Sequence
  Description of Artificial Sequence: Synthetic oligonucleotide
  Antisense strand to SEQ ID NO: 2487840
ugcaacacaggguuucugu

SEQ ID NO: 2487842 - RNA, 19 nt, Artificial Sequence
  Description of Artificial Sequence: Synthetic oligonucleotide
  Sense strand starting at position 861 of SEQ ID NO: 1887663
cagaaacccuguguugcaa

SEQ ID NO: 2487843 - RNA, 19 nt, Artificial Sequence
  Description of Artificial Sequence: Synthetic oligonucleotide
  Antisense strand to SEQ ID NO: 2487842
uugcaacacaggguuucug

SEQ ID NO: 2487844 - RNA, 19 nt, Artificial Sequence
  Description of Artificial Sequence: Synthetic oligonucleotide
  Sense strand starting at position 938 of SEQ ID NO: 1887663
gcaaaugcguuaccaagau

SEQ ID NO: 2487845 - RNA, 19 nt, Artificial Sequence
  Description of Artificial Sequence: Synthetic oligonucleotide
  Antisense strand to SEQ ID NO: 2487844
aucuugguaacgcauuugc

SEQ ID NO: 2487846 - RNA, 19 nt, Artificial Sequence
  Description of Artificial Sequence: Synthetic oligonucleotide
  Sense strand starting at position 1230 of SEQ ID NO: 1887663
agguuagccuuguucacga

SEQ ID NO: 2487847 - RNA, 19 nt, Artificial Sequence
  Description of Artificial Sequence: Synthetic oligonucleotide
  Antisense strand to SEQ ID NO: 2487846
ucgugaacaaggcuaaccu

SEQ ID NO: 2487848 - RNA, 19 nt, Artificial Sequence
  Description of Artificial Sequence: Synthetic oligonucleotide
  Sense strand starting at position 1252 of SEQ ID NO: 1887663
ggcaacccuccugaguauu

SEQ ID NO: 2487849 - RNA, 19 nt, Artificial Sequence
  Description of Artificial Sequence: Synthetic oligonucleotide
  Antisense strand to SEQ ID NO: 2487848
aauacucaggaggguugcc

SEQ ID NO: 2487850 - RNA, 19 nt, Artificial Sequence
  Description of Artificial Sequence: Synthetic oligonucleotide
  Sense strand starting at position 1263 of SEQ ID NO: 1887663
ugaguauugucuccaaaga

SEQ ID NO: 2487851 - RNA, 19 nt, Artificial Sequence
  Description of Artificial Sequence: Synthetic oligonucleotide
  Antisense strand to SEQ ID NO: 2487850
ucuuuggagacaauacuca

SEQ ID NO: 2487852 - RNA, 19 nt, Artificial Sequence
  Description of Artificial Sequence: Synthetic oligonucleotide
  Sense strand starting at position 1542 of SEQ ID NO: 1887663
agacuaaucuggccaucau

SEQ ID NO: 2487853 - RNA, 19 nt, Artificial Sequence
  Description of Artificial Sequence: Synthetic oligonucleotide
  Antisense strand to SEQ ID NO: 2487852
augauggccagauuagucu

SEQ ID NO: 2487854 - RNA, 19 nt, Artificial Sequence
  Description of Artificial Sequence: Synthetic oligonucleotide
  Sense strand starting at position 1696 of SEQ ID NO: 1887663
gagagacugucucaagaga

SEQ ID NO: 2487855 - RNA, 19 nt, Artificial Sequence
  Description of Artificial Sequence: Synthetic oligonucleotide
  Antisense strand to SEQ ID NO: 2487854
ucucuugagacagucucuc

SEQ ID NO: 2487856 - RNA, 19 nt, Artificial Sequence
  Description of Artificial Sequence: Synthetic oligonucleotide
  Sense strand starting at position 1799 of SEQ ID NO: 1887663
aagagacccuguguugcaa

SEQ ID NO: 2487857 - RNA, 19 nt, Artificial Sequence
  Description of Artificial Sequence: Synthetic oligonucleotide
  Antisense strand to SEQ ID NO: 2487856
uugcaacacagggucucuu

SEQ ID NO: 2487858 - RNA, 19 nt, Artificial Sequence
  Description of Artificial Sequence: Synthetic oligonucleotide
  Sense strand starting at position 2569 of SEQ ID NO: 1887663
cuggauuucuaaggauguu

SEQ ID NO: 2487859 - RNA, 19 nt, Artificial Sequence
  Description of Artificial Sequence: Synthetic oligonucleotide
  Antisense strand to SEQ ID NO: 2487858
aacauccuuagaaauccag

SEQ ID NO: 2487860 - RNA, 19 nt, Artificial Sequence
  Description of Artificial Sequence: Synthetic oligonucleotide
  Sense strand starting at position 2732 of SEQ ID NO: 1887663
gcuccucaguaagauuuga

SEQ ID NO: 2487861 - RNA, 19 nt, Artificial Sequence
  Description of Artificial Sequence: Synthetic oligonucleotide
  Antisense strand to SEQ ID NO: 2487860
ucaaaucuuacugaggagc

SEQ ID NO: 2487862 - RNA, 19 nt, Artificial Sequence
  Description of Artificial Sequence: Synthetic oligonucleotide
  Sense strand starting at position 2923 of SEQ ID NO: 1887663
guauacuguugaccugaaa

SEQ ID NO: 2487863 - RNA, 19 nt, Artificial Sequence
  Description of Artificial Sequence: Synthetic oligonucleotide
  Antisense strand to SEQ ID NO: 2487862
uuucaggucaacaguauac

SEQ ID NO: 2487864 - RNA, 19 nt, Artificial Sequence
  Description of Artificial Sequence: Synthetic oligonucleotide
  Sense strand starting at position 3012 of SEQ ID NO: 1887663
agguaauggguaggaacau

SEQ ID NO: 2487865 - RNA, 19 nt, Artificial Sequence
  Description of Artificial Sequence: Synthetic oligonucleotide
  Antisense strand to SEQ ID NO: 2487864
auguuccuacccauuaccu

SEQ ID NO: 2487866 - RNA, 19 nt, Artificial Sequence
  Description of Artificial Sequence: Synthetic oligonucleotide
  Sense strand starting at position 3426 of SEQ ID NO: 1887663
uugccuaugcauggguuaa

SEQ ID NO: 2487867 - RNA, 19 nt, Artificial Sequence
  Description of Artificial Sequence: Synthetic oligonucleotide
  Antisense strand to SEQ ID NO: 2487866
uuaacccaugcauaggcaa

SEQ ID NO: 2487868 - RNA, 19 nt, Artificial Sequence
  Description of Artificial Sequence: Synthetic oligonucleotide
  Sense strand starting at position 3427 of SEQ ID NO: 1887663
ugccuaugcauggguuaau

SEQ ID NO: 2487869 - RNA, 19 nt, Artificial Sequence
  Description of Artificial Sequence: Synthetic oligonucleotide
  Antisense strand to SEQ ID NO: 2487868
auuaacccaugcauaggca

SEQ ID NO: 2487870 - RNA, 19 nt, Artificial Sequence
  Description of Artificial Sequence: Synthetic oligonucleotide
  Sense strand starting at position 3428 of SEQ ID NO: 1887663
gccuaugcauggguuaaua

SEQ ID NO: 2487871 - RNA, 19 nt, Artificial Sequence
  Description of Artificial Sequence: Synthetic oligonucleotide
  Antisense strand to SEQ ID NO: 2487870
uauuaacccaugcauaggc

SEQ ID NO: 2487872 - RNA, 19 nt, Artificial Sequence
  Description of Artificial Sequence: Synthetic oligonucleotide
  Sense strand starting at position 3430 of SEQ ID NO: 1887663
cuaugcauggguuaauauu

SEQ ID NO: 2487873 - RNA, 19 nt, Artificial Sequence
  Description of Artificial Sequence: Synthetic oligonucleotide
  Antisense strand to SEQ ID NO: 2487872
aauauuaacccaugcauag

SEQ ID NO: 2487874 - RNA, 19 nt, Artificial Sequence
  Description of Artificial Sequence: Synthetic oligonucleotide
  Sense strand starting at position 3490 of SEQ ID NO: 1887663
cccaguuuagucuggguga

SEQ ID NO: 2487875 - RNA, 19 nt, Artificial Sequence
  Description of Artificial Sequence: Synthetic oligonucleotide
  Antisense strand to SEQ ID NO: 2487874
ucacccagacuaaacuggg

SEQ ID NO: 2487876 - RNA, 19 nt, Artificial Sequence
  Description of Artificial Sequence: Synthetic oligonucleotide
  Sense strand starting at position 3492 of SEQ ID NO: 1887663
caguuuagucugggugaca

SEQ ID NO: 2487877 - RNA, 19 nt, Artificial Sequence
  Description of Artificial Sequence: Synthetic oligonucleotide
  Antisense strand to SEQ ID NO: 2487876
ugucacccagacuaaacug

SEQ ID NO: 2487878 - RNA, 19 nt, Artificial Sequence
  Description of Artificial Sequence: Synthetic oligonucleotide
  Sense strand starting at position 3493 of SEQ ID NO: 1887663
aguuuagucugggugacac

SEQ ID NO: 2487879 - RNA, 19 nt, Artificial Sequence
  Description of Artificial Sequence: Synthetic oligonucleotide
  Antisense strand to SEQ ID NO: 2487878
gugucacccagacuaaacu

SEQ ID NO: 2487880 - RNA, 19 nt, Artificial Sequence
  Description of Artificial Sequence: Synthetic oligonucleotide
  Sense strand starting at position 3709 of SEQ ID NO: 1887663
agagguguucuauaaagca

SEQ ID NO: 2487881 - RNA, 19 nt, Artificial Sequence
  Description of Artificial Sequence: Synthetic oligonucleotide
  Antisense strand to SEQ ID NO: 2487880
ugcuuuauagaacaccucu

SEQ ID NO: 2487882 - RNA, 19 nt, Artificial Sequence
  Description of Artificial Sequence: Synthetic oligonucleotide
  Sense strand starting at position 3734 of SEQ ID NO: 1887663
gcagaacuuccauggagua

SEQ ID NO: 2487883 - RNA, 19 nt, Artificial Sequence
  Description of Artificial Sequence: Synthetic oligonucleotide
  Antisense strand to SEQ ID NO: 2487882
uacuccauggaaguucugc

SEQ ID NO: 2487884 - RNA, 19 nt, Artificial Sequence
  Description of Artificial Sequence: Synthetic oligonucleotide
  Sense strand starting at position 3735 of SEQ ID NO: 1887663
cagaacuuccauggaguaa

SEQ ID NO: 2487885 - RNA, 19 nt, Artificial Sequence
  Description of Artificial Sequence: Synthetic oligonucleotide
  Antisense strand to SEQ ID NO: 2487884
uuacuccauggaaguucug

SEQ ID NO: 2487886 - RNA, 19 nt, Artificial Sequence
  Description of Artificial Sequence: Synthetic oligonucleotide
  Sense strand starting at position 3744 of SEQ ID NO: 1887663
cauggaguaagagguguua

SEQ ID NO: 2487887 - RNA, 19 nt, Artificial Sequence
  Description of Artificial Sequence: Synthetic oligonucleotide
  Antisense strand to SEQ ID NO: 2487886
uaacaccucuuacuccaug

SEQ ID NO: 2487888 - RNA, 19 nt, Artificial Sequence
  Description of Artificial Sequence: Synthetic oligonucleotide
  Sense strand starting at position 3746 of SEQ ID NO: 1887663
uggaguaagagguguuaag

SEQ ID NO: 2487889 - RNA, 19 nt, Artificial Sequence
  Description of Artificial Sequence: Synthetic oligonucleotide
  Antisense strand to SEQ ID NO: 2487888
cuuaacaccucuuacucca

SEQ ID NO: 2487890 - RNA, 19 nt, Artificial Sequence
  Description of Artificial Sequence: Synthetic oligonucleotide
  Sense strand starting at position 3757 of SEQ ID NO: 1887663
guguuaagggcuggacgaa

SEQ ID NO: 2487891 - RNA, 19 nt, Artificial Sequence
  Description of Artificial Sequence: Synthetic oligonucleotide
  Antisense strand to SEQ ID NO: 2487890
uucguccagcccuuaacac

SEQ ID NO: 2487892 - RNA, 19 nt, Artificial Sequence
  Description of Artificial Sequence: Synthetic oligonucleotide
  Sense strand starting at position 3832 of SEQ ID NO: 1887663
gagagacccuucuaggguu

SEQ ID NO: 2487893 - RNA, 19 nt, Artificial Sequence
  Description of Artificial Sequence: Synthetic oligonucleotide
  Antisense strand to SEQ ID NO: 2487892
aacccuagaagggucucuc

SEQ ID NO: 2487894 - RNA, 19 nt, Artificial Sequence
  Description of Artificial Sequence: Synthetic oligonucleotide
  Sense strand starting at position 3840 of SEQ ID NO: 1887663
cuucuaggguucuaaagga

SEQ ID NO: 2487895 - RNA, 19 nt, Artificial Sequence
  Description of Artificial Sequence: Synthetic oligonucleotide
  Antisense strand to SEQ ID NO: 2487894
uccuuuagaacccuagaag

SEQ ID NO: 2487896 - RNA, 19 nt, Artificial Sequence
  Description of Artificial Sequence: Synthetic oligonucleotide
  Sense strand starting at position 3886 of SEQ ID NO: 1887663
uuugucucaugugacauuu

SEQ ID NO: 2487897 - RNA, 19 nt, Artificial Sequence
  Description of Artificial Sequence: Synthetic oligonucleotide
  Antisense strand to SEQ ID NO: 2487896
aaaugucacaugagacaaa

SEQ ID NO: 2487898 - RNA, 19 nt, Artificial Sequence
  Description of Artificial Sequence: Synthetic oligonucleotide
  Sense strand starting at position 3894 of SEQ ID NO: 1887663
augugacauuugucacugu

SEQ ID NO: 2487899 - RNA, 19 nt, Artificial Sequence
  Description of Artificial Sequence: Synthetic oligonucleotide
  Antisense strand to SEQ ID NO: 2487898
acagugacaaaugucacau

SEQ ID NO: 2487900 - RNA, 19 nt, Artificial Sequence
  Description of Artificial Sequence: Synthetic oligonucleotide
  Sense strand starting at position 3903 of SEQ ID NO: 1887663
uugucacugugauugagau

SEQ ID NO: 2487901 - RNA, 19 nt, Artificial Sequence
  Description of Artificial Sequence: Synthetic oligonucleotide
  Antisense strand to SEQ ID NO: 2487900
aucucaaucacagugacaa

SEQ ID NO: 2487902 - RNA, 19 nt, Artificial Sequence
  Description of Artificial Sequence: Synthetic oligonucleotide
  Sense strand starting at position 3907 of SEQ ID NO: 1887663
cacugugauugagauggau

SEQ ID NO: 2487903 - RNA, 19 nt, Artificial Sequence
  Description of Artificial Sequence: Synthetic oligonucleotide
  Antisense strand to SEQ ID NO: 2487902
auccaucucaaucacagug

SEQ ID NO: 2487904 - RNA, 19 nt, Artificial Sequence
  Description of Artificial Sequence: Synthetic oligonucleotide
  Sense strand starting at position 3941 of SEQ ID NO: 1887663
uuauauuaggcacagcaaa

SEQ ID NO: 2487905 - RNA, 19 nt, Artificial Sequence
  Description of Artificial Sequence: Synthetic oligonucleotide
  Antisense strand to SEQ ID NO: 2487904
uuugcugugccuaauauaa

SEQ ID NO: 2487906 - RNA, 19 nt, Artificial Sequence
  Description of Artificial Sequence: Synthetic oligonucleotide
  Sense strand starting at position 3963 of SEQ ID NO: 1887663
uuuagaucuugccaagcaa

SEQ ID NO: 2487907 - RNA, 19 nt, Artificial Sequence
  Description of Artificial Sequence: Synthetic oligonucleotide
  Antisense strand to SEQ ID NO: 2487906
uugcuuggcaagaucuaaa

SEQ ID NO: 2487908 - RNA, 19 nt, Artificial Sequence
  Description of Artificial Sequence: Synthetic oligonucleotide
  Sense strand starting at position 412 of SEQ ID NO: 1887664
gcaaauguauugccgagau

SEQ ID NO: 2487909 - RNA, 19 nt, Artificial Sequence
  Description of Artificial Sequence: Synthetic oligonucleotide
  Antisense strand to SEQ ID NO: 2487908
aucucggcaauacauuugc

SEQ ID NO: 2487910 - RNA, 19 nt, Artificial Sequence
  Description of Artificial Sequence: Synthetic oligonucleotide
  Sense strand starting at position 414 of SEQ ID NO: 1887664
aaauguauugccgagauca

SEQ ID NO: 2487911 - RNA, 19 nt, Artificial Sequence
  Description of Artificial Sequence: Synthetic oligonucleotide
  Antisense strand to SEQ ID NO: 2487910
ugaucucggcaauacauuu

SEQ ID NO: 2487912 - RNA, 19 nt, Artificial Sequence
  Description of Artificial Sequence: Synthetic oligonucleotide
  Sense strand starting at position 416 of SEQ ID NO: 1887664
auguauugccgagaucagc

SEQ ID NO: 2487913 - RNA, 19 nt, Artificial Sequence
  Description of Artificial Sequence: Synthetic oligonucleotide
  Antisense strand to SEQ ID NO: 2487912
gcugaucucggcaauacau

SEQ ID NO: 2487914 - RNA, 19 nt, Artificial Sequence
  Description of Artificial Sequence: Synthetic oligonucleotide
  Sense strand starting at position 424 of SEQ ID NO: 1887664
ccgagaucagcaugaacgu

SEQ ID NO: 2487915 - RNA, 19 nt, Artificial Sequence
  Description of Artificial Sequence: Synthetic oligonucleotide
  Antisense strand to SEQ ID NO: 2487914
acguucaugcugaucucgg

SEQ ID NO: 2487916 - RNA, 19 nt, Artificial Sequence
  Description of Artificial Sequence: Synthetic oligonucleotide
  Sense strand starting at position 702 of SEQ ID NO: 1887664
agcaaugccgacuauacau

SEQ ID NO: 2487917 - RNA, 19 nt, Artificial Sequence
  Description of Artificial Sequence: Synthetic oligonucleotide
  Antisense strand to SEQ ID NO: 2487916
auguauagucggcauugcu

SEQ ID NO: 2487918 - RNA, 19 nt, Artificial Sequence
  Description of Artificial Sequence: Synthetic oligonucleotide
  Sense strand starting at position 737 of SEQ ID NO: 1887664
ugagaauugggcuggauuc

SEQ ID NO: 2487919 - RNA, 19 nt, Artificial Sequence
  Description of Artificial Sequence: Synthetic oligonucleotide
  Antisense strand to SEQ ID NO: 2487918
gaauccagcccaauucuca

SEQ ID NO: 2487920 - RNA, 19 nt, Artificial Sequence
  Description of Artificial Sequence: Synthetic oligonucleotide
  Sense strand starting at position 738 of SEQ ID NO: 1887664
gagaauugggcuggauucu

SEQ ID NO: 2487921 - RNA, 19 nt, Artificial Sequence
  Description of Artificial Sequence: Synthetic oligonucleotide
  Antisense strand to SEQ ID NO: 2487920
agaauccagcccaauucuc

SEQ ID NO: 2487922 - RNA, 19 nt, Artificial Sequence
  Description of Artificial Sequence: Synthetic oligonucleotide
  Sense strand starting at position 1058 of SEQ ID NO: 1887664
gauaccucauguguagaga

SEQ ID NO: 2487923 - RNA, 19 nt, Artificial Sequence
  Description of Artificial Sequence: Synthetic oligonucleotide
  Antisense strand to SEQ ID NO: 2487922
ucucuacacaugagguauc

SEQ ID NO: 2487924 - RNA, 19 nt, Artificial Sequence
  Description of Artificial Sequence: Synthetic oligonucleotide
  Sense strand starting at position 1253 of SEQ ID NO: 1887664
uacccaaagugauacgaga

SEQ ID NO: 2487925 - RNA, 19 nt, Artificial Sequence
  Description of Artificial Sequence: Synthetic oligonucleotide
  Antisense strand to SEQ ID NO: 2487924
ucucguaucacuuugggua

SEQ ID NO: 2487926 - RNA, 19 nt, Artificial Sequence
  Description of Artificial Sequence: Synthetic oligonucleotide
  Sense strand starting at position 1255 of SEQ ID NO: 1887664
cccaaagugauacgagagu

SEQ ID NO: 2487927 - RNA, 19 nt, Artificial Sequence
  Description of Artificial Sequence: Synthetic oligonucleotide
  Antisense strand to SEQ ID NO: 2487926
acucucguaucacuuuggg

SEQ ID NO: 2487928 - RNA, 19 nt, Artificial Sequence
  Description of Artificial Sequence: Synthetic oligonucleotide
  Sense strand starting at position 1264 of SEQ ID NO: 1887664
auacgagaguauucucugu

SEQ ID NO: 2487929 - RNA, 19 nt, Artificial Sequence
  Description of Artificial Sequence: Synthetic oligonucleotide
  Antisense strand to SEQ ID NO: 2487928
acagagaauacucucguau

SEQ ID NO: 2487930 - RNA, 19 nt, Artificial Sequence
  Description of Artificial Sequence: Synthetic oligonucleotide
  Sense strand starting at position 1266 of SEQ ID NO: 1887664
acgagaguauucucugugu

SEQ ID NO: 2487931 - RNA, 19 nt, Artificial Sequence
  Description of Artificial Sequence: Synthetic oligonucleotide
  Antisense strand to SEQ ID NO: 2487930
acacagagaauacucucgu

SEQ ID NO: 2487932 - RNA, 19 nt, Artificial Sequence
  Description of Artificial Sequence: Synthetic oligonucleotide
  Sense strand starting at position 1268 of SEQ ID NO: 1887664
gagaguauucucuguguau

SEQ ID NO: 2487933 - RNA, 19 nt, Artificial Sequence
  Description of Artificial Sequence: Synthetic oligonucleotide
  Antisense strand to SEQ ID NO: 2487932
auacacagagaauacucuc

SEQ ID NO: 2487934 - RNA, 19 nt, Artificial Sequence
  Description of Artificial Sequence: Synthetic oligonucleotide
  Sense strand starting at position 1269 of SEQ ID NO: 1887664
agaguauucucuguguaua

SEQ ID NO: 2487935 - RNA, 19 nt, Artificial Sequence
  Description of Artificial Sequence: Synthetic oligonucleotide
  Antisense strand to SEQ ID NO: 2487934
uauacacagagaauacucu

SEQ ID NO: 2487936 - RNA, 19 nt, Artificial Sequence
  Description of Artificial Sequence: Synthetic oligonucleotide
  Sense strand starting at position 1270 of SEQ ID NO: 1887664
gaguauucucuguguauag

SEQ ID NO: 2487937 - RNA, 19 nt, Artificial Sequence
  Description of Artificial Sequence: Synthetic oligonucleotide
  Antisense strand to SEQ ID NO: 2487936
cuauacacagagaauacuc

SEQ ID NO: 2487938 - RNA, 19 nt, Artificial Sequence
  Description of Artificial Sequence: Synthetic oligonucleotide
  Sense strand starting at position 1271 of SEQ ID NO: 1887664
aguauucucuguguauaga

SEQ ID NO: 2487939 - RNA, 19 nt, Artificial Sequence
  Description of Artificial Sequence: Synthetic oligonucleotide
  Antisense strand to SEQ ID NO: 2487938
ucuauacacagagaauacu

SEQ ID NO: 2487940 - RNA, 19 nt, Artificial Sequence
  Description of Artificial Sequence: Synthetic oligonucleotide
  Sense strand starting at position 1272 of SEQ ID NO: 1887664
guauucucuguguauagaa

SEQ ID NO: 2487941 - RNA, 19 nt, Artificial Sequence
  Description of Artificial Sequence: Synthetic oligonucleotide
  Antisense strand to SEQ ID NO: 2487940
uucuauacacagagaauac

SEQ ID NO: 2487942 - RNA, 19 nt, Artificial Sequence
  Description of Artificial Sequence: Synthetic oligonucleotide
  Sense strand starting at position 1274 of SEQ ID NO: 1887664
auucucuguguauagaaga

SEQ ID NO: 2487943 - RNA, 19 nt, Artificial Sequence
  Description of Artificial Sequence: Synthetic oligonucleotide
  Antisense strand to SEQ ID NO: 2487942
ucuucuauacacagagaau

SEQ ID NO: 2487944 - RNA, 19 nt, Artificial Sequence
  Description of Artificial Sequence: Synthetic oligonucleotide
  Sense strand starting at position 1300 of SEQ ID NO: 1887664
guguguauaugacuauguu

SEQ ID NO: 2487945 - RNA, 19 nt, Artificial Sequence
  Description of Artificial Sequence: Synthetic oligonucleotide
  Antisense strand to SEQ ID NO: 2487944
aacauagucauauacacac

SEQ ID NO: 2487946 - RNA, 19 nt, Artificial Sequence
  Description of Artificial Sequence: Synthetic oligonucleotide
  Sense strand starting at position 1301 of SEQ ID NO: 1887664
uguguauaugacuauguua

SEQ ID NO: 2487947 - RNA, 19 nt, Artificial Sequence
  Description of Artificial Sequence: Synthetic oligonucleotide
  Antisense strand to SEQ ID NO: 2487946
uaacauagucauauacaca

SEQ ID NO: 2487948 - RNA, 19 nt, Artificial Sequence
  Description of Artificial Sequence: Synthetic oligonucleotide
  Sense strand starting at position 1303 of SEQ ID NO: 1887664
uguauaugacuauguuaca

SEQ ID NO: 2487949 - RNA, 19 nt, Artificial Sequence
  Description of Artificial Sequence: Synthetic oligonucleotide
  Antisense strand to SEQ ID NO: 2487948
uguaacauagucauauaca

SEQ ID NO: 2487950 - RNA, 19 nt, Artificial Sequence
  Description of Artificial Sequence: Synthetic oligonucleotide
  Sense strand starting at position 1304 of SEQ ID NO: 1887664
guauaugacuauguuacau

SEQ ID NO: 2487951 - RNA, 19 nt, Artificial Sequence
  Description of Artificial Sequence: Synthetic oligonucleotide
  Antisense strand to SEQ ID NO: 2487950
auguaacauagucauauac

SEQ ID NO: 2487952 - RNA, 19 nt, Artificial Sequence
  Description of Artificial Sequence: Synthetic oligonucleotide
  Sense strand starting at position 1308 of SEQ ID NO: 1887664
augacuauguuacauguau

SEQ ID NO: 2487953 - RNA, 19 nt, Artificial Sequence
  Description of Artificial Sequence: Synthetic oligonucleotide
  Antisense strand to SEQ ID NO: 2487952
auacauguaacauagucau

SEQ ID NO: 2487954 - RNA, 19 nt, Artificial Sequence
  Description of Artificial Sequence: Synthetic oligonucleotide
  Sense strand starting at position 1388 of SEQ ID NO: 1887664
auacuaugugcucacauga

SEQ ID NO: 2487955 - RNA, 19 nt, Artificial Sequence
  Description of Artificial Sequence: Synthetic oligonucleotide
  Antisense strand to SEQ ID NO: 2487954
ucaugugagcacauaguau

SEQ ID NO: 2487956 - RNA, 19 nt, Artificial Sequence
  Description of Artificial Sequence: Synthetic oligonucleotide
  Sense strand starting at position 1419 of SEQ ID NO: 1887664
acacauaugugcuugcauu

SEQ ID NO: 2487957 - RNA, 19 nt, Artificial Sequence
  Description of Artificial Sequence: Synthetic oligonucleotide
  Antisense strand to SEQ ID NO: 2487956
aaugcaagcacauaugugu

SEQ ID NO: 2487958 - RNA, 19 nt, Artificial Sequence
  Description of Artificial Sequence: Synthetic oligonucleotide
  Sense strand starting at position 1631 of SEQ ID NO: 1887664
ccaucuacuugggaggaga

SEQ ID NO: 2487959 - RNA, 19 nt, Artificial Sequence
  Description of Artificial Sequence: Synthetic oligonucleotide
  Antisense strand to SEQ ID NO: 2487958
ucuccucccaaguagaugg

SEQ ID NO: 2487960 - RNA, 19 nt, Artificial Sequence
  Description of Artificial Sequence: Synthetic oligonucleotide
  Sense strand starting at position 2189 of SEQ ID NO: 1887664
agacaauccuccugaguuc

SEQ ID NO: 2487961 - RNA, 19 nt, Artificial Sequence
  Description of Artificial Sequence: Synthetic oligonucleotide
  Antisense strand to SEQ ID NO: 2487960
gaacucaggaggauugucu

SEQ ID NO: 2487962 - RNA, 19 nt, Artificial Sequence
  Description of Artificial Sequence: Synthetic oligonucleotide
  Sense strand starting at position 2312 of SEQ ID NO: 1887664
ucacauaagucccaguaca

SEQ ID NO: 2487963 - RNA, 19 nt, Artificial Sequence
  Description of Artificial Sequence: Synthetic oligonucleotide
  Antisense strand to SEQ ID NO: 2487962
uguacugggacuuauguga

SEQ ID NO: 2487964 - RNA, 19 nt, Artificial Sequence
  Description of Artificial Sequence: Synthetic oligonucleotide
  Sense strand starting at position 2361 of SEQ ID NO: 1887664
aauggaaucuaagaugaug

SEQ ID NO: 2487965 - RNA, 19 nt, Artificial Sequence
  Description of Artificial Sequence: Synthetic oligonucleotide
  Antisense strand to SEQ ID NO: 2487964
caucaucuuagauuccauu

SEQ ID NO: 2487966 - RNA, 19 nt, Artificial Sequence
  Description of Artificial Sequence: Synthetic oligonucleotide
  Sense strand starting at position 2363 of SEQ ID NO: 1887664
uggaaucuaagaugauguu

SEQ ID NO: 2487967 - RNA, 19 nt, Artificial Sequence
  Description of Artificial Sequence: Synthetic oligonucleotide
  Antisense strand to SEQ ID NO: 2487966
aacaucaucuuagauucca

SEQ ID NO: 2487968 - RNA, 19 nt, Artificial Sequence
  Description of Artificial Sequence: Synthetic oligonucleotide
  Sense strand starting at position 2542 of SEQ ID NO: 1887664
ccagguuuccagcaauucu

SEQ ID NO: 2487969 - RNA, 19 nt, Artificial Sequence
  Description of Artificial Sequence: Synthetic oligonucleotide
  Antisense strand to SEQ ID NO: 2487968
agaauugcuggaaaccugg

SEQ ID NO: 2487970 - RNA, 19 nt, Artificial Sequence
  Description of Artificial Sequence: Synthetic oligonucleotide
  Sense strand starting at position 2888 of SEQ ID NO: 1887664
agacgacaugccugagcua

SEQ ID NO: 2487971 - RNA, 19 nt, Artificial Sequence
  Description of Artificial Sequence: Synthetic oligonucleotide
  Antisense strand to SEQ ID NO: 2487970
uagcucaggcaugucgucu

SEQ ID NO: 2487972 - RNA, 19 nt, Artificial Sequence
  Description of Artificial Sequence: Synthetic oligonucleotide
  Sense strand starting at position 2995 of SEQ ID NO: 1887664
gccagaccuugucucauaa

SEQ ID NO: 2487973 - RNA, 19 nt, Artificial Sequence
  Description of Artificial Sequence: Synthetic oligonucleotide
  Antisense strand to SEQ ID NO: 2487972
uuaugagacaaggucuggc

SEQ ID NO: 2487974 - RNA, 19 nt, Artificial Sequence
  Description of Artificial Sequence: Synthetic oligonucleotide
  Sense strand starting at position 3077 of SEQ ID NO: 1887664
auacaagaguauucugugu

SEQ ID NO: 2487975 - RNA, 19 nt, Artificial Sequence
  Description of Artificial Sequence: Synthetic oligonucleotide
  Antisense strand to SEQ ID NO: 2487974
acacagaauacucuuguau

SEQ ID NO: 2487976 - RNA, 19 nt, Artificial Sequence
  Description of Artificial Sequence: Synthetic oligonucleotide
  Sense strand starting at position 3202 of SEQ ID NO: 1887664
acugaaugcucacacgaag

SEQ ID NO: 2487977 - RNA, 19 nt, Artificial Sequence
  Description of Artificial Sequence: Synthetic oligonucleotide
  Antisense strand to SEQ ID NO: 2487976
cuucgugugagcauucagu

SEQ ID NO: 2487978 - RNA, 19 nt, Artificial Sequence
  Description of Artificial Sequence: Synthetic oligonucleotide
  Sense strand starting at position 3205 of SEQ ID NO: 1887664
gaaugcucacacgaagagu

SEQ ID NO: 2487979 - RNA, 19 nt, Artificial Sequence
  Description of Artificial Sequence: Synthetic oligonucleotide
  Antisense strand to SEQ ID NO: 2487978
acucuucgugugagcauuc

SEQ ID NO: 2487980 - RNA, 19 nt, Artificial Sequence
  Description of Artificial Sequence: Synthetic oligonucleotide
  Sense strand starting at position 3208 of SEQ ID NO: 1887664
ugcucacacgaagaguaau

SEQ ID NO: 2487981 - RNA, 19 nt, Artificial Sequence
  Description of Artificial Sequence: Synthetic oligonucleotide
  Antisense strand to SEQ ID NO: 2487980
auuacucuucgugugagca

SEQ ID NO: 2487982 - RNA, 19 nt, Artificial Sequence
  Description of Artificial Sequence: Synthetic oligonucleotide
  Sense strand starting at position 3321 of SEQ ID NO: 1887664
ucaugauggucccauauuu

SEQ ID NO: 2487983 - RNA, 19 nt, Artificial Sequence
  Description of Artificial Sequence: Synthetic oligonucleotide
  Antisense strand to SEQ ID NO: 2487982
aaauaugggaccaucauga

SEQ ID NO: 2487984 - RNA, 19 nt, Artificial Sequence
  Description of Artificial Sequence: Synthetic oligonucleotide
  Sense strand starting at position 3403 of SEQ ID NO: 1887664
guauacuguuaaucugaaa

SEQ ID NO: 2487985 - RNA, 19 nt, Artificial Sequence
  Description of Artificial Sequence: Synthetic oligonucleotide
  Antisense strand to SEQ ID NO: 2487984
uuucagauuaacaguauac

SEQ ID NO: 2487986 - RNA, 19 nt, Artificial Sequence
  Description of Artificial Sequence: Synthetic oligonucleotide
  Sense strand starting at position 3775 of SEQ ID NO: 1887664
gagaaugaugccugcuucu

SEQ ID NO: 2487987 - RNA, 19 nt, Artificial Sequence
  Description of Artificial Sequence: Synthetic oligonucleotide
  Antisense strand to SEQ ID NO: 2487986
agaagcaggcaucauucuc

SEQ ID NO: 2487988 - RNA, 19 nt, Artificial Sequence
  Description of Artificial Sequence: Synthetic oligonucleotide
  Sense strand starting at position 6 of SEQ ID NO: 1887665
guguacauaugacuacauu

SEQ ID NO: 2487989 - RNA, 19 nt, Artificial Sequence
  Description of Artificial Sequence: Synthetic oligonucleotide
  Antisense strand to SEQ ID NO: 2487988
aauguagucauauguacac

SEQ ID NO: 2487990 - RNA, 19 nt, Artificial Sequence
  Description of Artificial Sequence: Synthetic oligonucleotide
  Sense strand starting at position 69 of SEQ ID NO: 1887665
uugagacccugucuaugaa

SEQ ID NO: 2487991 - RNA, 19 nt, Artificial Sequence
  Description of Artificial Sequence: Synthetic oligonucleotide
  Antisense strand to SEQ ID NO: 2487990
uucauagacagggucucaa

SEQ ID NO: 2487992 - RNA, 19 nt, Artificial Sequence
  Description of Artificial Sequence: Synthetic oligonucleotide
  Sense strand starting at position 99 of SEQ ID NO: 1887665
agaauauacuguuugcuca

SEQ ID NO: 2487993 - RNA, 19 nt, Artificial Sequence
  Description of Artificial Sequence: Synthetic oligonucleotide
  Antisense strand to SEQ ID NO: 2487992
ugagcaaacaguauauucu

SEQ ID NO: 2487994 - RNA, 19 nt, Artificial Sequence
  Description of Artificial Sequence: Synthetic oligonucleotide
  Sense strand starting at position 813 of SEQ ID NO: 1887665
gccuaagaggucuagguug

SEQ ID NO: 2487995 - RNA, 19 nt, Artificial Sequence
  Description of Artificial Sequence: Synthetic oligonucleotide
  Antisense strand to SEQ ID NO: 2487994
caaccuagaccucuuaggc

SEQ ID NO: 2487996 - RNA, 19 nt, Artificial Sequence
  Description of Artificial Sequence: Synthetic oligonucleotide
  Sense strand starting at position 815 of SEQ ID NO: 1887665
cuaagaggucuagguugga

SEQ ID NO: 2487997 - RNA, 19 nt, Artificial Sequence
  Description of Artificial Sequence: Synthetic oligonucleotide
  Antisense strand to SEQ ID NO: 2487996
uccaaccuagaccucuuag

SEQ ID NO: 2487998 - RNA, 19 nt, Artificial Sequence
  Description of Artificial Sequence: Synthetic oligonucleotide
  Sense strand starting at position 1252 of SEQ ID NO: 1887665
ggcaacccuccugaguauu

SEQ ID NO: 2487999 - RNA, 19 nt, Artificial Sequence
  Description of Artificial Sequence: Synthetic oligonucleotide
  Antisense strand to SEQ ID NO: 2487998
aauacucaggaggguugcc

SEQ ID NO: 2488000 - RNA, 19 nt, Artificial Sequence
  Description of Artificial Sequence: Synthetic oligonucleotide
  Sense strand starting at position 1263 of SEQ ID NO: 1887665
ugaguauugucuccaaaga

SEQ ID NO: 2488001 - RNA, 19 nt, Artificial Sequence
  Description of Artificial Sequence: Synthetic oligonucleotide
  Antisense strand to SEQ ID NO: 2488000
ucuuuggagacaauacuca

SEQ ID NO: 2488002 - RNA, 19 nt, Artificial Sequence
  Description of Artificial Sequence: Synthetic oligonucleotide
  Sense strand starting at position 1542 of SEQ ID NO: 1887665
agacuaaucuggccaucau

SEQ ID NO: 2488003 - RNA, 19 nt, Artificial Sequence
  Description of Artificial Sequence: Synthetic oligonucleotide
  Antisense strand to SEQ ID NO: 2488002
augauggccagauuagucu

SEQ ID NO: 2488004 - RNA, 19 nt, Artificial Sequence
  Description of Artificial Sequence: Synthetic oligonucleotide
  Sense strand starting at position 1799 of SEQ ID NO: 1887665
aagagacccuguguugcaa

SEQ ID NO: 2488005 - RNA, 19 nt, Artificial Sequence
  Description of Artificial Sequence: Synthetic oligonucleotide
  Antisense strand to SEQ ID NO: 2488004
uugcaacacagggucucuu

SEQ ID NO: 2488006 - RNA, 19 nt, Artificial Sequence
  Description of Artificial Sequence: Synthetic oligonucleotide
  Sense strand starting at position 2923 of SEQ ID NO: 1887665
guauacuguugaccugaaa

SEQ ID NO: 2488007 - RNA, 19 nt, Artificial Sequence
  Description of Artificial Sequence: Synthetic oligonucleotide
  Antisense strand to SEQ ID NO: 2488006
uuucaggucaacaguauac

SEQ ID NO: 2488008 - RNA, 19 nt, Artificial Sequence
  Description of Artificial Sequence: Synthetic oligonucleotide
  Sense strand starting at position 3012 of SEQ ID NO: 1887665
agguaauggguaggaacau

SEQ ID NO: 2488009 - RNA, 19 nt, Artificial Sequence
  Description of Artificial Sequence: Synthetic oligonucleotide
  Antisense strand to SEQ ID NO: 2488008
auguuccuacccauuaccu

SEQ ID NO: 2488010 - RNA, 19 nt, Artificial Sequence
  Description of Artificial Sequence: Synthetic oligonucleotide
  Sense strand starting at position 3430 of SEQ ID NO: 1887665
cuaugcauggguuaauauu

SEQ ID NO: 2488011 - RNA, 19 nt, Artificial Sequence
  Description of Artificial Sequence: Synthetic oligonucleotide
  Antisense strand to SEQ ID NO: 2488010
aauauuaacccaugcauag

SEQ ID NO: 2488012 - RNA, 19 nt, Artificial Sequence
  Description of Artificial Sequence: Synthetic oligonucleotide
  Sense strand starting at position 3709 of SEQ ID NO: 1887665
agagguguucuauaaagca

SEQ ID NO: 2488013 - RNA, 19 nt, Artificial Sequence
  Description of Artificial Sequence: Synthetic oligonucleotide
  Antisense strand to SEQ ID NO: 2488012
ugcuuuauagaacaccucu

SEQ ID NO: 2488014 - RNA, 19 nt, Artificial Sequence
  Description of Artificial Sequence: Synthetic oligonucleotide
  Sense strand starting at position 3734 of SEQ ID NO: 1887665
gcagaacuuccauggagua

SEQ ID NO: 2488015 - RNA, 19 nt, Artificial Sequence
  Description of Artificial Sequence: Synthetic oligonucleotide
  Antisense strand to SEQ ID NO: 2488014
uacuccauggaaguucugc

SEQ ID NO: 2488016 - RNA, 19 nt, Artificial Sequence
  Description of Artificial Sequence: Synthetic oligonucleotide
  Sense strand starting at position 3735 of SEQ ID NO: 1887665
cagaacuuccauggaguaa

SEQ ID NO: 2488017 - RNA, 19 nt, Artificial Sequence
  Description of Artificial Sequence: Synthetic oligonucleotide
  Antisense strand to SEQ ID NO: 2488016
uuacuccauggaaguucug

SEQ ID NO: 2488018 - RNA, 19 nt, Artificial Sequence
  Description of Artificial Sequence: Synthetic oligonucleotide
  Sense strand starting at position 3744 of SEQ ID NO: 1887665
cauggaguaagagguguua

SEQ ID NO: 2488019 - RNA, 19 nt, Artificial Sequence
  Description of Artificial Sequence: Synthetic oligonucleotide
  Antisense strand to SEQ ID NO: 2488018
uaacaccucuuacuccaug

SEQ ID NO: 2488020 - RNA, 19 nt, Artificial Sequence
  Description of Artificial Sequence: Synthetic oligonucleotide
  Sense strand starting at position 3746 of SEQ ID NO: 1887665
uggaguaagagguguuaag

SEQ ID NO: 2488021 - RNA, 19 nt, Artificial Sequence
  Description of Artificial Sequence: Synthetic oligonucleotide
  Antisense strand to SEQ ID NO: 2488020
cuuaacaccucuuacucca

SEQ ID NO: 2488022 - RNA, 19 nt, Artificial Sequence
  Description of Artificial Sequence: Synthetic oligonucleotide
  Sense strand starting at position 3894 of SEQ ID NO: 1887665
augugacauuugucacugu

SEQ ID NO: 2488023 - RNA, 19 nt, Artificial Sequence
  Description of Artificial Sequence: Synthetic oligonucleotide
  Antisense strand to SEQ ID NO: 2488022
acagugacaaaugucacau

SEQ ID NO: 2488024 - RNA, 19 nt, Artificial Sequence
  Description of Artificial Sequence: Synthetic oligonucleotide
  Sense strand starting at position 3903 of SEQ ID NO: 1887665
uugucacugugauugagau

SEQ ID NO: 2488025 - RNA, 19 nt, Artificial Sequence
  Description of Artificial Sequence: Synthetic oligonucleotide
  Antisense strand to SEQ ID NO: 2488024
aucucaaucacagugacaa

SEQ ID NO: 2488026 - RNA, 19 nt, Artificial Sequence
  Description of Artificial Sequence: Synthetic oligonucleotide
  Sense strand starting at position 3941 of SEQ ID NO: 1887665
uuauauuaggcacagcaaa

SEQ ID NO: 2488027 - RNA, 19 nt, Artificial Sequence
  Description of Artificial Sequence: Synthetic oligonucleotide
  Antisense strand to SEQ ID NO: 2488026
uuugcugugccuaauauaa

SEQ ID NO: 2488028 - RNA, 19 nt, Artificial Sequence
  Description of Artificial Sequence: Synthetic oligonucleotide
  Sense strand starting at position 414 of SEQ ID NO: 1887666
aaauguauugccgagauca

SEQ ID NO: 2488029 - RNA, 19 nt, Artificial Sequence
  Description of Artificial Sequence: Synthetic oligonucleotide
  Antisense strand to SEQ ID NO: 2488028
ugaucucggcaauacauuu

SEQ ID NO: 2488030 - RNA, 19 nt, Artificial Sequence
  Description of Artificial Sequence: Synthetic oligonucleotide
  Sense strand starting at position 702 of SEQ ID NO: 1887666
agcaaugccgacuauacau

SEQ ID NO: 2488031 - RNA, 19 nt, Artificial Sequence
  Description of Artificial Sequence: Synthetic oligonucleotide
  Antisense strand to SEQ ID NO: 2488030
auguauagucggcauugcu

SEQ ID NO: 2488032 - RNA, 19 nt, Artificial Sequence
  Description of Artificial Sequence: Synthetic oligonucleotide
  Sense strand starting at position 737 of SEQ ID NO: 1887666
ugagaauugggcuggauuc

SEQ ID NO: 2488033 - RNA, 19 nt, Artificial Sequence
  Description of Artificial Sequence: Synthetic oligonucleotide
  Antisense strand to SEQ ID NO: 2488032
gaauccagcccaauucuca

SEQ ID NO: 2488034 - RNA, 19 nt, Artificial Sequence
  Description of Artificial Sequence: Synthetic oligonucleotide
  Sense strand starting at position 738 of SEQ ID NO: 1887666
gagaauugggcuggauucu

SEQ ID NO: 2488035 - RNA, 19 nt, Artificial Sequence
  Description of Artificial Sequence: Synthetic oligonucleotide
  Antisense strand to SEQ ID NO: 2488034
agaauccagcccaauucuc

SEQ ID NO: 2488036 - RNA, 19 nt, Artificial Sequence
  Description of Artificial Sequence: Synthetic oligonucleotide
  Sense strand starting at position 1058 of SEQ ID NO: 1887666
gauaccucauguguagaga

SEQ ID NO: 2488037 - RNA, 19 nt, Artificial Sequence
  Description of Artificial Sequence: Synthetic oligonucleotide
  Antisense strand to SEQ ID NO: 2488036
ucucuacacaugagguauc

SEQ ID NO: 2488038 - RNA, 19 nt, Artificial Sequence
  Description of Artificial Sequence: Synthetic oligonucleotide
  Sense strand starting at position 1255 of SEQ ID NO: 1887666
cccaaagugauacgagagu

SEQ ID NO: 2488039 - RNA, 19 nt, Artificial Sequence
  Description of Artificial Sequence: Synthetic oligonucleotide
  Antisense strand to SEQ ID NO: 2488038
acucucguaucacuuuggg

SEQ ID NO: 2488040 - RNA, 19 nt, Artificial Sequence
  Description of Artificial Sequence: Synthetic oligonucleotide
  Sense strand starting at position 1272 of SEQ ID NO: 1887666
guauucucuguguauagaa

SEQ ID NO: 2488041 - RNA, 19 nt, Artificial Sequence
  Description of Artificial Sequence: Synthetic oligonucleotide
  Antisense strand to SEQ ID NO: 2488040
uucuauacacagagaauac

SEQ ID NO: 2488042 - RNA, 19 nt, Artificial Sequence
  Description of Artificial Sequence: Synthetic oligonucleotide
  Sense strand starting at position 1274 of SEQ ID NO: 1887666
auucucuguguauagaaga

SEQ ID NO: 2488043 - RNA, 19 nt, Artificial Sequence
  Description of Artificial Sequence: Synthetic oligonucleotide
  Antisense strand to SEQ ID NO: 2488042
ucuucuauacacagagaau

SEQ ID NO: 2488044 - RNA, 19 nt, Artificial Sequence
  Description of Artificial Sequence: Synthetic oligonucleotide
  Sense strand starting at position 1301 of SEQ ID NO: 1887666
uguguauaugacuauguua

SEQ ID NO: 2488045 - RNA, 19 nt, Artificial Sequence
  Description of Artificial Sequence: Synthetic oligonucleotide
  Antisense strand to SEQ ID NO: 2488044
uaacauagucauauacaca

SEQ ID NO: 2488046 - RNA, 19 nt, Artificial Sequence
  Description of Artificial Sequence: Synthetic oligonucleotide
  Sense strand starting at position 1303 of SEQ ID NO: 1887666
uguauaugacuauguuaca

SEQ ID NO: 2488047 - RNA, 19 nt, Artificial Sequence
  Description of Artificial Sequence: Synthetic oligonucleotide
  Antisense strand to SEQ ID NO: 2488046
uguaacauagucauauaca

SEQ ID NO: 2488048 - RNA, 19 nt, Artificial Sequence
  Description of Artificial Sequence: Synthetic oligonucleotide
  Sense strand starting at position 1304 of SEQ ID NO: 1887666
guauaugacuauguuacau

SEQ ID NO: 2488049 - RNA, 19 nt, Artificial Sequence
  Description of Artificial Sequence: Synthetic oligonucleotide
  Antisense strand to SEQ ID NO: 2488048
auguaacauagucauauac

SEQ ID NO: 2488050 - RNA, 19 nt, Artificial Sequence
  Description of Artificial Sequence: Synthetic oligonucleotide
  Sense strand starting at position 1388 of SEQ ID NO: 1887666
auacuaugugcucacauga

SEQ ID NO: 2488051 - RNA, 19 nt, Artificial Sequence
  Description of Artificial Sequence: Synthetic oligonucleotide
  Antisense strand to SEQ ID NO: 2488050
ucaugugagcacauaguau

SEQ ID NO: 2488052 - RNA, 19 nt, Artificial Sequence
  Description of Artificial Sequence: Synthetic oligonucleotide
  Sense strand starting at position 2361 of SEQ ID NO: 1887666
aauggaaucuaagaugaug

SEQ ID NO: 2488053 - RNA, 19 nt, Artificial Sequence
  Description of Artificial Sequence: Synthetic oligonucleotide
  Antisense strand to SEQ ID NO: 2488052
caucaucuuagauuccauu

SEQ ID NO: 2488054 - RNA, 19 nt, Artificial Sequence
  Description of Artificial Sequence: Synthetic oligonucleotide
  Sense strand starting at position 2363 of SEQ ID NO: 1887666
uggaaucuaagaugauguu

SEQ ID NO: 2488055 - RNA, 19 nt, Artificial Sequence
  Description of Artificial Sequence: Synthetic oligonucleotide
  Antisense strand to SEQ ID NO: 2488054
aacaucaucuuagauucca

SEQ ID NO: 2488056 - RNA, 19 nt, Artificial Sequence
  Description of Artificial Sequence: Synthetic oligonucleotide
  Sense strand starting at position 2542 of SEQ ID NO: 1887666
ccagguuuccagcaauucu

SEQ ID NO: 2488057 - RNA, 19 nt, Artificial Sequence
  Description of Artificial Sequence: Synthetic oligonucleotide
  Antisense strand to SEQ ID NO: 2488056
agaauugcuggaaaccugg

SEQ ID NO: 2488058 - RNA, 19 nt, Artificial Sequence
  Description of Artificial Sequence: Synthetic oligonucleotide
  Sense strand starting at position 2995 of SEQ ID NO: 1887666
gccagaccuugucucauaa

SEQ ID NO: 2488059 - RNA, 19 nt, Artificial Sequence
  Description of Artificial Sequence: Synthetic oligonucleotide
  Antisense strand to SEQ ID NO: 2488058
uuaugagacaaggucuggc

SEQ ID NO: 2488060 - RNA, 19 nt, Artificial Sequence
  Description of Artificial Sequence: Synthetic oligonucleotide
  Sense strand starting at position 3077 of SEQ ID NO: 1887666
auacaagaguauucugugu

SEQ ID NO: 2488061 - RNA, 19 nt, Artificial Sequence
  Description of Artificial Sequence: Synthetic oligonucleotide
  Antisense strand to SEQ ID NO: 2488060
acacagaauacucuuguau

SEQ ID NO: 2488062 - RNA, 19 nt, Artificial Sequence
  Description of Artificial Sequence: Synthetic oligonucleotide
  Sense strand starting at position 3205 of SEQ ID NO: 1887666
gaaugcucacacgaagagu

SEQ ID NO: 2488063 - RNA, 19 nt, Artificial Sequence
  Description of Artificial Sequence: Synthetic oligonucleotide
  Antisense strand to SEQ ID NO: 2488062
acucuucgugugagcauuc

SEQ ID NO: 2488064 - RNA, 19 nt, Artificial Sequence
  Description of Artificial Sequence: Synthetic oligonucleotide
  Sense strand starting at position 3208 of SEQ ID NO: 1887666
ugcucacacgaagaguaau

SEQ ID NO: 2488065 - RNA, 19 nt, Artificial Sequence
  Description of Artificial Sequence: Synthetic oligonucleotide
  Antisense strand to SEQ ID NO: 2488064
auuacucuucgugugagca

SEQ ID NO: 2488066 - RNA, 19 nt, Artificial Sequence
  Description of Artificial Sequence: Synthetic oligonucleotide
  Sense strand starting at position 3403 of SEQ ID NO: 1887666
guauacuguuaaucugaaa

SEQ ID NO: 2488067 - RNA, 19 nt, Artificial Sequence
  Description of Artificial Sequence: Synthetic oligonucleotide
  Antisense strand to SEQ ID NO: 2488066
uuucagauuaacaguauac

SEQ ID NO: 2488068 - RNA, 19 nt, Artificial Sequence
  Description of Artificial Sequence: Synthetic oligonucleotide
  Sense strand starting at position 698 of SEQ ID NO: 1887667
ggcaguccuccugaguauu

SEQ ID NO: 2488069 - RNA, 19 nt, Artificial Sequence
  Description of Artificial Sequence: Synthetic oligonucleotide
  Antisense strand to SEQ ID NO: 2488068
aauacucaggaggacugcc

SEQ ID NO: 2488070 - RNA, 19 nt, Artificial Sequence
  Description of Artificial Sequence: Synthetic oligonucleotide
  Sense strand starting at position 701 of SEQ ID NO: 1887667
aguccuccugaguauuauc

SEQ ID NO: 2488071 - RNA, 19 nt, Artificial Sequence
  Description of Artificial Sequence: Synthetic oligonucleotide
  Antisense strand to SEQ ID NO: 2488070
gauaauacucaggaggacu

SEQ ID NO: 2488072 - RNA, 19 nt, Artificial Sequence
  Description of Artificial Sequence: Synthetic oligonucleotide
  Sense strand starting at position 885 of SEQ ID NO: 1887667
agcugagauuacuggugga

SEQ ID NO: 2488073 - RNA, 19 nt, Artificial Sequence
  Description of Artificial Sequence: Synthetic oligonucleotide
  Antisense strand to SEQ ID NO: 2488072
uccaccaguaaucucagcu

SEQ ID NO: 2488074 - RNA, 19 nt, Artificial Sequence
  Description of Artificial Sequence: Synthetic oligonucleotide
  Sense strand starting at position 889 of SEQ ID NO: 1887667
gagauuacugguggagcca

SEQ ID NO: 2488075 - RNA, 19 nt, Artificial Sequence
  Description of Artificial Sequence: Synthetic oligonucleotide
  Antisense strand to SEQ ID NO: 2488074
uggcuccaccaguaaucuc

SEQ ID NO: 2488076 - RNA, 19 nt, Artificial Sequence
  Description of Artificial Sequence: Synthetic oligonucleotide
  Sense strand starting at position 1073 of SEQ ID NO: 1887667
agacaauuggccuggaauu

SEQ ID NO: 2488077 - RNA, 19 nt, Artificial Sequence
  Description of Artificial Sequence: Synthetic oligonucleotide
  Antisense strand to SEQ ID NO: 2488076
aauuccaggccaauugucu

SEQ ID NO: 2488078 - RNA, 19 nt, Artificial Sequence
  Description of Artificial Sequence: Synthetic oligonucleotide
  Sense strand starting at position 1074 of SEQ ID NO: 1887667
gacaauuggccuggaauuc

SEQ ID NO: 2488079 - RNA, 19 nt, Artificial Sequence
  Description of Artificial Sequence: Synthetic oligonucleotide
  Antisense strand to SEQ ID NO: 2488078
gaauuccaggccaauuguc

SEQ ID NO: 2488080 - RNA, 19 nt, Artificial Sequence
  Description of Artificial Sequence: Synthetic oligonucleotide
  Sense strand starting at position 1759 of SEQ ID NO: 1887667
agagaucuaaguuggaagu

SEQ ID NO: 2488081 - RNA, 19 nt, Artificial Sequence
  Description of Artificial Sequence: Synthetic oligonucleotide
  Antisense strand to SEQ ID NO: 2488080
acuuccaacuuagaucucu

SEQ ID NO: 2488082 - RNA, 19 nt, Artificial Sequence
  Description of Artificial Sequence: Synthetic oligonucleotide
  Sense strand starting at position 1839 of SEQ ID NO: 1887667
auuauccacgucugaugau

SEQ ID NO: 2488083 - RNA, 19 nt, Artificial Sequence
  Description of Artificial Sequence: Synthetic oligonucleotide
  Antisense strand to SEQ ID NO: 2488082
aucaucagacguggauaau

SEQ ID NO: 2488084 - RNA, 19 nt, Artificial Sequence
  Description of Artificial Sequence: Synthetic oligonucleotide
  Sense strand starting at position 2302 of SEQ ID NO: 1887667
ccagguguucaccggaguu

SEQ ID NO: 2488085 - RNA, 19 nt, Artificial Sequence
  Description of Artificial Sequence: Synthetic oligonucleotide
  Antisense strand to SEQ ID NO: 2488084
aacuccggugaacaccugg

SEQ ID NO: 2488086 - RNA, 19 nt, Artificial Sequence
  Description of Artificial Sequence: Synthetic oligonucleotide
  Sense strand starting at position 2335 of SEQ ID NO: 1887667
cacaguuucuacggaagca

SEQ ID NO: 2488087 - RNA, 19 nt, Artificial Sequence
  Description of Artificial Sequence: Synthetic oligonucleotide
  Antisense strand to SEQ ID NO: 2488086
ugcuuccguagaaacugug

SEQ ID NO: 2488088 - RNA, 19 nt, Artificial Sequence
  Description of Artificial Sequence: Synthetic oligonucleotide
  Sense strand starting at position 2336 of SEQ ID NO: 1887667
acaguuucuacggaagcaa

SEQ ID NO: 2488089 - RNA, 19 nt, Artificial Sequence
  Description of Artificial Sequence: Synthetic oligonucleotide
  Antisense strand to SEQ ID NO: 2488088
uugcuuccguagaaacugu

SEQ ID NO: 2488090 - RNA, 19 nt, Artificial Sequence
  Description of Artificial Sequence: Synthetic oligonucleotide
  Sense strand starting at position 2361 of SEQ ID NO: 1887667
uggaaucuaagauguugau

SEQ ID NO: 2488091 - RNA, 19 nt, Artificial Sequence
  Description of Artificial Sequence: Synthetic oligonucleotide
  Antisense strand to SEQ ID NO: 2488090
aucaacaucuuagauucca

SEQ ID NO: 2488092 - RNA, 19 nt, Artificial Sequence
  Description of Artificial Sequence: Synthetic oligonucleotide
  Sense strand starting at position 2367 of SEQ ID NO: 1887667
cuaagauguugaugaauau

SEQ ID NO: 2488093 - RNA, 19 nt, Artificial Sequence
  Description of Artificial Sequence: Synthetic oligonucleotide
  Antisense strand to SEQ ID NO: 2488092
auauucaucaacaucuuag

SEQ ID NO: 2488094 - RNA, 19 nt, Artificial Sequence
  Description of Artificial Sequence: Synthetic oligonucleotide
  Sense strand starting at position 3523 of SEQ ID NO: 1887667
ggugcaaugucucucaccu

SEQ ID NO: 2488095 - RNA, 19 nt, Artificial Sequence
  Description of Artificial Sequence: Synthetic oligonucleotide
  Antisense strand to SEQ ID NO: 2488094
aggugagagacauugcacc

SEQ ID NO: 2488096 - RNA, 19 nt, Artificial Sequence
  Description of Artificial Sequence: Synthetic oligonucleotide
  Sense strand starting at position 3881 of SEQ ID NO: 1887667
gugagcugagcuugcaaua

SEQ ID NO: 2488097 - RNA, 19 nt, Artificial Sequence
  Description of Artificial Sequence: Synthetic oligonucleotide
  Antisense strand to SEQ ID NO: 2488096
uauugcaagcucagcucac

SEQ ID NO: 2488098 - RNA, 19 nt, Artificial Sequence
  Description of Artificial Sequence: Synthetic oligonucleotide
  Sense strand starting at position 3886 of SEQ ID NO: 1887667
cugagcuugcaauacuaca

SEQ ID NO: 2488099 - RNA, 19 nt, Artificial Sequence
  Description of Artificial Sequence: Synthetic oligonucleotide
  Antisense strand to SEQ ID NO: 2488098
uguaguauugcaagcucag

SEQ ID NO: 2488100 - RNA, 19 nt, Artificial Sequence
  Description of Artificial Sequence: Synthetic oligonucleotide
  Sense strand starting at position 196 of SEQ ID NO: 1887668
uugguaggcugacuuaaga

SEQ ID NO: 2488101 - RNA, 19 nt, Artificial Sequence
  Description of Artificial Sequence: Synthetic oligonucleotide
  Antisense strand to SEQ ID NO: 2488100
ucuuaagucagccuaccaa

SEQ ID NO: 2488102 - RNA, 19 nt, Artificial Sequence
  Description of Artificial Sequence: Synthetic oligonucleotide
  Sense strand starting at position 255 of SEQ ID NO: 1887668
cucaguacuugggaggcaa

SEQ ID NO: 2488103 - RNA, 19 nt, Artificial Sequence
  Description of Artificial Sequence: Synthetic oligonucleotide
  Antisense strand to SEQ ID NO: 2488102
uugccucccaaguacugag

SEQ ID NO: 2488104 - RNA, 19 nt, Artificial Sequence
  Description of Artificial Sequence: Synthetic oligonucleotide
  Sense strand starting at position 441 of SEQ ID NO: 1887668
gcugcagugagcugauaau

SEQ ID NO: 2488105 - RNA, 19 nt, Artificial Sequence
  Description of Artificial Sequence: Synthetic oligonucleotide
  Antisense strand to SEQ ID NO: 2488104
auuaucagcucacugcagc

SEQ ID NO: 2488106 - RNA, 19 nt, Artificial Sequence
  Description of Artificial Sequence: Synthetic oligonucleotide
  Sense strand starting at position 541 of SEQ ID NO: 1887668
gagaucuaggugggaagua

SEQ ID NO: 2488107 - RNA, 19 nt, Artificial Sequence
  Description of Artificial Sequence: Synthetic oligonucleotide
  Antisense strand to SEQ ID NO: 2488106
uacuucccaccuagaucuc

SEQ ID NO: 2488108 - RNA, 19 nt, Artificial Sequence
  Description of Artificial Sequence: Synthetic oligonucleotide
  Sense strand starting at position 821 of SEQ ID NO: 1887668
uuggaaucuuccuugacca

SEQ ID NO: 2488109 - RNA, 19 nt, Artificial Sequence
  Description of Artificial Sequence: Synthetic oligonucleotide
  Antisense strand to SEQ ID NO: 2488108
uggucaaggaagauuccaa

SEQ ID NO: 2488110 - RNA, 19 nt, Artificial Sequence
  Description of Artificial Sequence: Synthetic oligonucleotide
  Sense strand starting at position 822 of SEQ ID NO: 1887668
uggaaucuuccuugaccag

SEQ ID NO: 2488111 - RNA, 19 nt, Artificial Sequence
  Description of Artificial Sequence: Synthetic oligonucleotide
  Antisense strand to SEQ ID NO: 2488110
cuggucaaggaagauucca

SEQ ID NO: 2488112 - RNA, 19 nt, Artificial Sequence
  Description of Artificial Sequence: Synthetic oligonucleotide
  Sense strand starting at position 828 of SEQ ID NO: 1887668
cuuccuugaccaggucaaa

SEQ ID NO: 2488113 - RNA, 19 nt, Artificial Sequence
  Description of Artificial Sequence: Synthetic oligonucleotide
  Antisense strand to SEQ ID NO: 2488112
uuugaccuggucaaggaag

SEQ ID NO: 2488114 - RNA, 19 nt, Artificial Sequence
  Description of Artificial Sequence: Synthetic oligonucleotide
  Sense strand starting at position 947 of SEQ ID NO: 1887668
aaagaaucagcagguuagu

SEQ ID NO: 2488115 - RNA, 19 nt, Artificial Sequence
  Description of Artificial Sequence: Synthetic oligonucleotide
  Antisense strand to SEQ ID NO: 2488114
acuaaccugcugauucuuu

SEQ ID NO: 2488116 - RNA, 19 nt, Artificial Sequence
  Description of Artificial Sequence: Synthetic oligonucleotide
  Sense strand starting at position 979 of SEQ ID NO: 1887668
gggcaauccuccuguguuu

SEQ ID NO: 2488117 - RNA, 19 nt, Artificial Sequence
  Description of Artificial Sequence: Synthetic oligonucleotide
  Antisense strand to SEQ ID NO: 2488116
aaacacaggaggauugccc

SEQ ID NO: 2488118 - RNA, 19 nt, Artificial Sequence
  Description of Artificial Sequence: Synthetic oligonucleotide
  Sense strand starting at position 1015 of SEQ ID NO: 1887668
agcaaugccuacuagauau

SEQ ID NO: 2488119 - RNA, 19 nt, Artificial Sequence
  Description of Artificial Sequence: Synthetic oligonucleotide
  Antisense strand to SEQ ID NO: 2488118
auaucuaguaggcauugcu

SEQ ID NO: 2488120 - RNA, 19 nt, Artificial Sequence
  Description of Artificial Sequence: Synthetic oligonucleotide
  Sense strand starting at position 1154 of SEQ ID NO: 1887668
uggaaucgaagauguugaa

SEQ ID NO: 2488121 - RNA, 19 nt, Artificial Sequence
  Description of Artificial Sequence: Synthetic oligonucleotide
  Antisense strand to SEQ ID NO: 2488120
uucaacaucuucgauucca

SEQ ID NO: 2488122 - RNA, 19 nt, Artificial Sequence
  Description of Artificial Sequence: Synthetic oligonucleotide
  Sense strand starting at position 1157 of SEQ ID NO: 1887668
aaucgaagauguugaagaa

SEQ ID NO: 2488123 - RNA, 19 nt, Artificial Sequence
  Description of Artificial Sequence: Synthetic oligonucleotide
  Antisense strand to SEQ ID NO: 2488122
uucuucaacaucuucgauu

SEQ ID NO: 2488124 - RNA, 19 nt, Artificial Sequence
  Description of Artificial Sequence: Synthetic oligonucleotide
  Sense strand starting at position 1316 of SEQ ID NO: 1887668
ggcccagguuugaggagua

SEQ ID NO: 2488125 - RNA, 19 nt, Artificial Sequence
  Description of Artificial Sequence: Synthetic oligonucleotide
  Antisense strand to SEQ ID NO: 2488124
uacuccucaaaccugggcc

SEQ ID NO: 2488126 - RNA, 19 nt, Artificial Sequence
  Description of Artificial Sequence: Synthetic oligonucleotide
  Sense strand starting at position 1326 of SEQ ID NO: 1887668
ugaggaguacuugagcuca

SEQ ID NO: 2488127 - RNA, 19 nt, Artificial Sequence
  Description of Artificial Sequence: Synthetic oligonucleotide
  Antisense strand to SEQ ID NO: 2488126
ugagcucaaguacuccuca

SEQ ID NO: 2488128 - RNA, 19 nt, Artificial Sequence
  Description of Artificial Sequence: Synthetic oligonucleotide
  Sense strand starting at position 1789 of SEQ ID NO: 1887668
acagauaccuugucuuaga

SEQ ID NO: 2488129 - RNA, 19 nt, Artificial Sequence
  Description of Artificial Sequence: Synthetic oligonucleotide
  Antisense strand to SEQ ID NO: 2488128
ucuaagacaagguaucugu

SEQ ID NO: 2488130 - RNA, 19 nt, Artificial Sequence
  Description of Artificial Sequence: Synthetic oligonucleotide
  Sense strand starting at position 1839 of SEQ ID NO: 1887668
auuauccaugucugaugau

SEQ ID NO: 2488131 - RNA, 19 nt, Artificial Sequence
  Description of Artificial Sequence: Synthetic oligonucleotide
  Antisense strand to SEQ ID NO: 2488130
aucaucagacauggauaau

SEQ ID NO: 2488132 - RNA, 19 nt, Artificial Sequence
  Description of Artificial Sequence: Synthetic oligonucleotide
  Sense strand starting at position 2294 of SEQ ID NO: 1887668
aauggauuaugagccaagu

SEQ ID NO: 2488133 - RNA, 19 nt, Artificial Sequence
  Description of Artificial Sequence: Synthetic oligonucleotide
  Antisense strand to SEQ ID NO: 2488132
acuuggcucauaauccauu

SEQ ID NO: 2488134 - RNA, 19 nt, Artificial Sequence
  Description of Artificial Sequence: Synthetic oligonucleotide
  Sense strand starting at position 2296 of SEQ ID NO: 1887668
uggauuaugagccaagugu

SEQ ID NO: 2488135 - RNA, 19 nt, Artificial Sequence
  Description of Artificial Sequence: Synthetic oligonucleotide
  Antisense strand to SEQ ID NO: 2488134
acacuuggcucauaaucca

SEQ ID NO: 2488136 - RNA, 19 nt, Artificial Sequence
  Description of Artificial Sequence: Synthetic oligonucleotide
  Sense strand starting at position 2366 of SEQ ID NO: 1887668
ucaacucuacgauguugaa

SEQ ID NO: 2488137 - RNA, 19 nt, Artificial Sequence
  Description of Artificial Sequence: Synthetic oligonucleotide
  Antisense strand to SEQ ID NO: 2488136
uucaacaucguagaguuga

SEQ ID NO: 2488138 - RNA, 19 nt, Artificial Sequence
  Description of Artificial Sequence: Synthetic oligonucleotide
  Sense strand starting at position 2376 of SEQ ID NO: 1887668
gauguugaauugucaaaca

SEQ ID NO: 2488139 - RNA, 19 nt, Artificial Sequence
  Description of Artificial Sequence: Synthetic oligonucleotide
  Antisense strand to SEQ ID NO: 2488138
uguuugacaauucaacauc

SEQ ID NO: 2488140 - RNA, 19 nt, Artificial Sequence
  Description of Artificial Sequence: Synthetic oligonucleotide
  Sense strand starting at position 2415 of SEQ ID NO: 1887668
gaccacaggcuuggucaua

SEQ ID NO: 2488141 - RNA, 19 nt, Artificial Sequence
  Description of Artificial Sequence: Synthetic oligonucleotide
  Antisense strand to SEQ ID NO: 2488140
uaugaccaagccugugguc

SEQ ID NO: 2488142 - RNA, 19 nt, Artificial Sequence
  Description of Artificial Sequence: Synthetic oligonucleotide
  Sense strand starting at position 2416 of SEQ ID NO: 1887668
accacaggcuuggucauaa

SEQ ID NO: 2488143 - RNA, 19 nt, Artificial Sequence
  Description of Artificial Sequence: Synthetic oligonucleotide
  Antisense strand to SEQ ID NO: 2488142
uuaugaccaagccuguggu

SEQ ID NO: 2488144 - RNA, 19 nt, Artificial Sequence
  Description of Artificial Sequence: Synthetic oligonucleotide
  Sense strand starting at position 2707 of SEQ ID NO: 1887668
gugugauagagcuagaccu

SEQ ID NO: 2488145 - RNA, 19 nt, Artificial Sequence
  Description of Artificial Sequence: Synthetic oligonucleotide
  Antisense strand to SEQ ID NO: 2488144
aggucuagcucuaucacac

SEQ ID NO: 2488146 - RNA, 19 nt, Artificial Sequence
  Description of Artificial Sequence: Synthetic oligonucleotide
  Sense strand starting at position 2780 of SEQ ID NO: 1887668
ccaaguugauaucagagua

SEQ ID NO: 2488147 - RNA, 19 nt, Artificial Sequence
  Description of Artificial Sequence: Synthetic oligonucleotide
  Antisense strand to SEQ ID NO: 2488146
uacucugauaucaacuugg

SEQ ID NO: 2488148 - RNA, 19 nt, Artificial Sequence
  Description of Artificial Sequence: Synthetic oligonucleotide
  Sense strand starting at position 2785 of SEQ ID NO: 1887668
uugauaucagaguauucuc

SEQ ID NO: 2488149 - RNA, 19 nt, Artificial Sequence
  Description of Artificial Sequence: Synthetic oligonucleotide
  Antisense strand to SEQ ID NO: 2488148
gagaauacucugauaucaa

SEQ ID NO: 2488150 - RNA, 19 nt, Artificial Sequence
  Description of Artificial Sequence: Synthetic oligonucleotide
  Sense strand starting at position 2872 of SEQ ID NO: 1887668
uuauauauguuugagacuc

SEQ ID NO: 2488151 - RNA, 19 nt, Artificial Sequence
  Description of Artificial Sequence: Synthetic oligonucleotide
  Antisense strand to SEQ ID NO: 2488150
gagucucaaacauauauaa

SEQ ID NO: 2488152 - RNA, 19 nt, Artificial Sequence
  Description of Artificial Sequence: Synthetic oligonucleotide
  Sense strand starting at position 2892 of SEQ ID NO: 1887668
gucucaaaguuccauauau

SEQ ID NO: 2488153 - RNA, 19 nt, Artificial Sequence
  Description of Artificial Sequence: Synthetic oligonucleotide
  Antisense strand to SEQ ID NO: 2488152
auauauggaacuuugagac

SEQ ID NO: 2488154 - RNA, 19 nt, Artificial Sequence
  Description of Artificial Sequence: Synthetic oligonucleotide
  Sense strand starting at position 2938 of SEQ ID NO: 1887668
acacaugagugcuugcuuu

SEQ ID NO: 2488155 - RNA, 19 nt, Artificial Sequence
  Description of Artificial Sequence: Synthetic oligonucleotide
  Antisense strand to SEQ ID NO: 2488154
aaagcaagcacucaugugu

SEQ ID NO: 2488156 - RNA, 19 nt, Artificial Sequence
  Description of Artificial Sequence: Synthetic oligonucleotide
  Sense strand starting at position 3027 of SEQ ID NO: 1887668
ucaugauggucucauauuu

SEQ ID NO: 2488157 - RNA, 19 nt, Artificial Sequence
  Description of Artificial Sequence: Synthetic oligonucleotide
  Antisense strand to SEQ ID NO: 2488156
aaauaugagaccaucauga

SEQ ID NO: 2488158 - RNA, 19 nt, Artificial Sequence
  Description of Artificial Sequence: Synthetic oligonucleotide
  Sense strand starting at position 3283 of SEQ ID NO: 1887668
cagcccuguuagucuugaa

SEQ ID NO: 2488159 - RNA, 19 nt, Artificial Sequence
  Description of Artificial Sequence: Synthetic oligonucleotide
  Antisense strand to SEQ ID NO: 2488158
uucaagacuaacagggcug

SEQ ID NO: 2488160 - RNA, 19 nt, Artificial Sequence
  Description of Artificial Sequence: Synthetic oligonucleotide
  Sense strand starting at position 3286 of SEQ ID NO: 1887668
cccuguuagucuugaacau

SEQ ID NO: 2488161 - RNA, 19 nt, Artificial Sequence
  Description of Artificial Sequence: Synthetic oligonucleotide
  Antisense strand to SEQ ID NO: 2488160
auguucaagacuaacaggg

SEQ ID NO: 2488162 - RNA, 19 nt, Artificial Sequence
  Description of Artificial Sequence: Synthetic oligonucleotide
  Sense strand starting at position 3287 of SEQ ID NO: 1887668
ccuguuagucuugaacaug

SEQ ID NO: 2488163 - RNA, 19 nt, Artificial Sequence
  Description of Artificial Sequence: Synthetic oligonucleotide
  Antisense strand to SEQ ID NO: 2488162
cauguucaagacuaacagg

SEQ ID NO: 2488164 - RNA, 19 nt, Artificial Sequence
  Description of Artificial Sequence: Synthetic oligonucleotide
  Sense strand starting at position 3585 of SEQ ID NO: 1887668
ccagucuggucucgaacaa

SEQ ID NO: 2488165 - RNA, 19 nt, Artificial Sequence
  Description of Artificial Sequence: Synthetic oligonucleotide
  Antisense strand to SEQ ID NO: 2488164
uuguucgagaccagacugg

SEQ ID NO: 2488166 - RNA, 19 nt, Artificial Sequence
  Description of Artificial Sequence: Synthetic oligonucleotide
  Sense strand starting at position 3672 of SEQ ID NO: 1887668
cuggacuagucccauauuu

SEQ ID NO: 2488167 - RNA, 19 nt, Artificial Sequence
  Description of Artificial Sequence: Synthetic oligonucleotide
  Antisense strand to SEQ ID NO: 2488166
aaauaugggacuaguccag

SEQ ID NO: 2488168 - RNA, 19 nt, Artificial Sequence
  Description of Artificial Sequence: Synthetic oligonucleotide
  Sense strand starting at position 3861 of SEQ ID NO: 1887668
cauguagucccauguacca

SEQ ID NO: 2488169 - RNA, 19 nt, Artificial Sequence
  Description of Artificial Sequence: Synthetic oligonucleotide
  Antisense strand to SEQ ID NO: 2488168
ugguacaugggacuacaug

SEQ ID NO: 2488170 - RNA, 19 nt, Artificial Sequence
  Description of Artificial Sequence: Synthetic oligonucleotide
  Sense strand starting at position 3956 of SEQ ID NO: 1887668
gcauuuaucuccuggucac

SEQ ID NO: 2488171 - RNA, 19 nt, Artificial Sequence
  Description of Artificial Sequence: Synthetic oligonucleotide
  Antisense strand to SEQ ID NO: 2488170
gugaccaggagauaaaugc

SEQ ID NO: 2488172 - RNA, 19 nt, Artificial Sequence
  Description of Artificial Sequence: Synthetic oligonucleotide
  Sense strand starting at position 3959 of SEQ ID NO: 1887668
uuuaucuccuggucacaca

SEQ ID NO: 2488173 - RNA, 19 nt, Artificial Sequence
  Description of Artificial Sequence: Synthetic oligonucleotide
  Antisense strand to SEQ ID NO: 2488172
ugugugaccaggagauaaa

SEQ ID NO: 2488174 - RNA, 19 nt, Artificial Sequence
  Description of Artificial Sequence: Synthetic oligonucleotide
  Sense strand starting at position 3968 of SEQ ID NO: 1887668
uggucacacaccgaagauu

SEQ ID NO: 2488175 - RNA, 19 nt, Artificial Sequence
  Description of Artificial Sequence: Synthetic oligonucleotide
  Antisense strand to SEQ ID NO: 2488174
aaucuucggugugugacca

SEQ ID NO: 2488176 - RNA, 19 nt, Artificial Sequence
  Description of Artificial Sequence: Synthetic oligonucleotide
  Sense strand starting at position 382 of SEQ ID NO: 1887669
ggaagcugccuucggcaau

SEQ ID NO: 2488177 - RNA, 19 nt, Artificial Sequence
  Description of Artificial Sequence: Synthetic oligonucleotide
  Antisense strand to SEQ ID NO: 2488176
auugccgaaggcagcuucc

SEQ ID NO: 2488178 - RNA, 19 nt, Artificial Sequence
  Description of Artificial Sequence: Synthetic oligonucleotide
  Sense strand starting at position 405 of SEQ ID NO: 1887669
auaggagucuccuuuggaa

SEQ ID NO: 2488179 - RNA, 19 nt, Artificial Sequence
  Description of Artificial Sequence: Synthetic oligonucleotide
  Antisense strand to SEQ ID NO: 2488178
uuccaaaggagacuccuau

SEQ ID NO: 2488180 - RNA, 19 nt, Artificial Sequence
  Description of Artificial Sequence: Synthetic oligonucleotide
  Sense strand starting at position 583 of SEQ ID NO: 1887669
gggcgggagucuuugucau

SEQ ID NO: 2488181 - RNA, 19 nt, Artificial Sequence
  Description of Artificial Sequence: Synthetic oligonucleotide
  Antisense strand to SEQ ID NO: 2488180
augacaaagacucccgccc

SEQ ID NO: 2488182 - RNA, 19 nt, Artificial Sequence
  Description of Artificial Sequence: Synthetic oligonucleotide
  Sense strand starting at position 585 of SEQ ID NO: 1887669
gcgggagucuuugucauca

SEQ ID NO: 2488183 - RNA, 19 nt, Artificial Sequence
  Description of Artificial Sequence: Synthetic oligonucleotide
  Antisense strand to SEQ ID NO: 2488182
ugaugacaaagacucccgc

SEQ ID NO: 2488184 - RNA, 19 nt, Artificial Sequence
  Description of Artificial Sequence: Synthetic oligonucleotide
  Sense strand starting at position 589 of SEQ ID NO: 1887669
gagucuuugucaucagauu

SEQ ID NO: 2488185 - RNA, 19 nt, Artificial Sequence
  Description of Artificial Sequence: Synthetic oligonucleotide
  Antisense strand to SEQ ID NO: 2488184
aaucugaugacaaagacuc

SEQ ID NO: 2488186 - RNA, 19 nt, Artificial Sequence
  Description of Artificial Sequence: Synthetic oligonucleotide
  Sense strand starting at position 590 of SEQ ID NO: 1887669
agucuuugucaucagauuc

SEQ ID NO: 2488187 - RNA, 19 nt, Artificial Sequence
  Description of Artificial Sequence: Synthetic oligonucleotide
  Antisense strand to SEQ ID NO: 2488186
gaaucugaugacaaagacu

SEQ ID NO: 2488188 - RNA, 19 nt, Artificial Sequence
  Description of Artificial Sequence: Synthetic oligonucleotide
  Sense strand starting at position 650 of SEQ ID NO: 1887669
gguucucucuaccagaaga

SEQ ID NO: 2488189 - RNA, 19 nt, Artificial Sequence
  Description of Artificial Sequence: Synthetic oligonucleotide
  Antisense strand to SEQ ID NO: 2488188
ucuucugguagagagaacc

SEQ ID NO: 2488190 - RNA, 19 nt, Artificial Sequence
  Description of Artificial Sequence: Synthetic oligonucleotide
  Sense strand starting at position 672 of SEQ ID NO: 1887669
agacuccguccagaucaaa

SEQ ID NO: 2488191 - RNA, 19 nt, Artificial Sequence
  Description of Artificial Sequence: Synthetic oligonucleotide
  Antisense strand to SEQ ID NO: 2488190
uuugaucuggacggagucu

SEQ ID NO: 2488192 - RNA, 19 nt, Artificial Sequence
  Description of Artificial Sequence: Synthetic oligonucleotide
  Sense strand starting at position 691 of SEQ ID NO: 1887669
cccaaauugucgccaguua

SEQ ID NO: 2488193 - RNA, 19 nt, Artificial Sequence
  Description of Artificial Sequence: Synthetic oligonucleotide
  Antisense strand to SEQ ID NO: 2488192
uaacuggcgacaauuuggg

SEQ ID NO: 2488194 - RNA, 19 nt, Artificial Sequence
  Description of Artificial Sequence: Synthetic oligonucleotide
  Sense strand starting at position 695 of SEQ ID NO: 1887669
aauugucgccaguuagcga

SEQ ID NO: 2488195 - RNA, 19 nt, Artificial Sequence
  Description of Artificial Sequence: Synthetic oligonucleotide
  Antisense strand to SEQ ID NO: 2488194
ucgcuaacuggcgacaauu

SEQ ID NO: 2488196 - RNA, 19 nt, Artificial Sequence
  Description of Artificial Sequence: Synthetic oligonucleotide
  Sense strand starting at position 860 of SEQ ID NO: 1887669
gugagcuucccaggcauca

SEQ ID NO: 2488197 - RNA, 19 nt, Artificial Sequence
  Description of Artificial Sequence: Synthetic oligonucleotide
  Antisense strand to SEQ ID NO: 2488196
ugaugccugggaagcucac

SEQ ID NO: 2488198 - RNA, 19 nt, Artificial Sequence
  Description of Artificial Sequence: Synthetic oligonucleotide
  Sense strand starting at position 1052 of SEQ ID NO: 1887669
augugacaugcccacaaga

SEQ ID NO: 2488199 - RNA, 19 nt, Artificial Sequence
  Description of Artificial Sequence: Synthetic oligonucleotide
  Antisense strand to SEQ ID NO: 2488198
ucuugugggcaugucacau

SEQ ID NO: 2488200 - RNA, 19 nt, Artificial Sequence
  Description of Artificial Sequence: Synthetic oligonucleotide
  Sense strand starting at position 1130 of SEQ ID NO: 1887669
gugggaacugacugcaaau

SEQ ID NO: 2488201 - RNA, 19 nt, Artificial Sequence
  Description of Artificial Sequence: Synthetic oligonucleotide
  Antisense strand to SEQ ID NO: 2488200
auuugcagucaguucccac

SEQ ID NO: 2488202 - RNA, 19 nt, Artificial Sequence
  Description of Artificial Sequence: Synthetic oligonucleotide
  Sense strand starting at position 1178 of SEQ ID NO: 1887669
ucuccugaacuagaauguu

SEQ ID NO: 2488203 - RNA, 19 nt, Artificial Sequence
  Description of Artificial Sequence: Synthetic oligonucleotide
  Antisense strand to SEQ ID NO: 2488202
aacauucuaguucaggaga

SEQ ID NO: 2488204 - RNA, 19 nt, Artificial Sequence
  Description of Artificial Sequence: Synthetic oligonucleotide
  Sense strand starting at position 1188 of SEQ ID NO: 1887669
uagaauguuggugguugaa

SEQ ID NO: 2488205 - RNA, 19 nt, Artificial Sequence
  Description of Artificial Sequence: Synthetic oligonucleotide
  Antisense strand to SEQ ID NO: 2488204
uucaaccaccaacauucua

SEQ ID NO: 2488206 - RNA, 19 nt, Artificial Sequence
  Description of Artificial Sequence: Synthetic oligonucleotide
  Sense strand starting at position 1452 of SEQ ID NO: 1887669
caguuacuccaguggcaga

SEQ ID NO: 2488207 - RNA, 19 nt, Artificial Sequence
  Description of Artificial Sequence: Synthetic oligonucleotide
  Antisense strand to SEQ ID NO: 2488206
ucugccacuggaguaacug

SEQ ID NO: 2488208 - RNA, 19 nt, Artificial Sequence
  Description of Artificial Sequence: Synthetic oligonucleotide
  Sense strand starting at position 1839 of SEQ ID NO: 1887669
gucauccacgucugaugau

SEQ ID NO: 2488209 - RNA, 19 nt, Artificial Sequence
  Description of Artificial Sequence: Synthetic oligonucleotide
  Antisense strand to SEQ ID NO: 2488208
aucaucagacguggaugac

SEQ ID NO: 2488210 - RNA, 19 nt, Artificial Sequence
  Description of Artificial Sequence: Synthetic oligonucleotide
  Sense strand starting at position 1854 of SEQ ID NO: 1887669
ugauaagcaugcucuccaa

SEQ ID NO: 2488211 - RNA, 19 nt, Artificial Sequence
  Description of Artificial Sequence: Synthetic oligonucleotide
  Antisense strand to SEQ ID NO: 2488210
uuggagagcaugcuuauca

SEQ ID NO: 2488212 - RNA, 19 nt, Artificial Sequence
  Description of Artificial Sequence: Synthetic oligonucleotide
  Sense strand starting at position 1985 of SEQ ID NO: 1887669
auggucacagccugagaua

SEQ ID NO: 2488213 - RNA, 19 nt, Artificial Sequence
  Description of Artificial Sequence: Synthetic oligonucleotide
  Antisense strand to SEQ ID NO: 2488212
uaucucaggcugugaccau

SEQ ID NO: 2488214 - RNA, 19 nt, Artificial Sequence
  Description of Artificial Sequence: Synthetic oligonucleotide
  Sense strand starting at position 1986 of SEQ ID NO: 1887669
uggucacagccugagauau

SEQ ID NO: 2488215 - RNA, 19 nt, Artificial Sequence
  Description of Artificial Sequence: Synthetic oligonucleotide
  Antisense strand to SEQ ID NO: 2488214
auaucucaggcugugacca

SEQ ID NO: 2488216 - RNA, 19 nt, Artificial Sequence
  Description of Artificial Sequence: Synthetic oligonucleotide
  Sense strand starting at position 1998 of SEQ ID NO: 1887669
gagauauucuugcucggug

SEQ ID NO: 2488217 - RNA, 19 nt, Artificial Sequence
  Description of Artificial Sequence: Synthetic oligonucleotide
  Antisense strand to SEQ ID NO: 2488216
caccgagcaagaauaucuc

SEQ ID NO: 2488218 - RNA, 19 nt, Artificial Sequence
  Description of Artificial Sequence: Synthetic oligonucleotide
  Sense strand starting at position 2000 of SEQ ID NO: 1887669
gauauucuugcucggugca

SEQ ID NO: 2488219 - RNA, 19 nt, Artificial Sequence
  Description of Artificial Sequence: Synthetic oligonucleotide
  Antisense strand to SEQ ID NO: 2488218
ugcaccgagcaagaauauc

SEQ ID NO: 2488220 - RNA, 19 nt, Artificial Sequence
  Description of Artificial Sequence: Synthetic oligonucleotide
  Sense strand starting at position 2033 of SEQ ID NO: 1887669
uuggaauguucuucgacca

SEQ ID NO: 2488221 - RNA, 19 nt, Artificial Sequence
  Description of Artificial Sequence: Synthetic oligonucleotide
  Antisense strand to SEQ ID NO: 2488220
uggucgaagaacauuccaa

SEQ ID NO: 2488222 - RNA, 19 nt, Artificial Sequence
  Description of Artificial Sequence: Synthetic oligonucleotide
  Sense strand starting at position 2038 of SEQ ID NO: 1887669
auguucuucgaccagguua

SEQ ID NO: 2488223 - RNA, 19 nt, Artificial Sequence
  Description of Artificial Sequence: Synthetic oligonucleotide
  Antisense strand to SEQ ID NO: 2488222
uaaccuggucgaagaacau

SEQ ID NO: 2488224 - RNA, 19 nt, Artificial Sequence
  Description of Artificial Sequence: Synthetic oligonucleotide
  Sense strand starting at position 2040 of SEQ ID NO: 1887669
guucuucgaccagguuaaa

SEQ ID NO: 2488225 - RNA, 19 nt, Artificial Sequence
  Description of Artificial Sequence: Synthetic oligonucleotide
  Antisense strand to SEQ ID NO: 2488224
uuuaaccuggucgaagaac

SEQ ID NO: 2488226 - RNA, 19 nt, Artificial Sequence
  Description of Artificial Sequence: Synthetic oligonucleotide
  Sense strand starting at position 2390 of SEQ ID NO: 1887669
uugucauacgcacaaauau

SEQ ID NO: 2488227 - RNA, 19 nt, Artificial Sequence
  Description of Artificial Sequence: Synthetic oligonucleotide
  Antisense strand to SEQ ID NO: 2488226
auauuugugcguaugacaa

SEQ ID NO: 2488228 - RNA, 19 nt, Artificial Sequence
  Description of Artificial Sequence: Synthetic oligonucleotide
  Sense strand starting at position 2420 of SEQ ID NO: 1887669
gaucacaggcuuggucaua

SEQ ID NO: 2488229 - RNA, 19 nt, Artificial Sequence
  Description of Artificial Sequence: Synthetic oligonucleotide
  Antisense strand to SEQ ID NO: 2488228
uaugaccaagccugugauc

SEQ ID NO: 2488230 - RNA, 19 nt, Artificial Sequence
  Description of Artificial Sequence: Synthetic oligonucleotide
  Sense strand starting at position 2421 of SEQ ID NO: 1887669
aucacaggcuuggucauaa

SEQ ID NO: 2488231 - RNA, 19 nt, Artificial Sequence
  Description of Artificial Sequence: Synthetic oligonucleotide
  Antisense strand to SEQ ID NO: 2488230
uuaugaccaagccugugau

SEQ ID NO: 2488232 - RNA, 19 nt, Artificial Sequence
  Description of Artificial Sequence: Synthetic oligonucleotide
  Sense strand starting at position 3062 of SEQ ID NO: 1887669
uuuauuuccuggucaugca

SEQ ID NO: 2488233 - RNA, 19 nt, Artificial Sequence
  Description of Artificial Sequence: Synthetic oligonucleotide
  Antisense strand to SEQ ID NO: 2488232
ugcaugaccaggaaauaaa

SEQ ID NO: 2488234 - RNA, 19 nt, Artificial Sequence
  Description of Artificial Sequence: Synthetic oligonucleotide
  Sense strand starting at position 3210 of SEQ ID NO: 1887669
auaccagugccagaauaau

SEQ ID NO: 2488235 - RNA, 19 nt, Artificial Sequence
  Description of Artificial Sequence: Synthetic oligonucleotide
  Antisense strand to SEQ ID NO: 2488234
auuauucuggcacugguau

SEQ ID NO: 2488236 - RNA, 19 nt, Artificial Sequence
  Description of Artificial Sequence: Synthetic oligonucleotide
  Sense strand starting at position 3271 of SEQ ID NO: 1887669
gcuuguauucucuggacaa

SEQ ID NO: 2488237 - RNA, 19 nt, Artificial Sequence
  Description of Artificial Sequence: Synthetic oligonucleotide
  Antisense strand to SEQ ID NO: 2488236
uuguccagagaauacaagc

SEQ ID NO: 2488238 - RNA, 19 nt, Artificial Sequence
  Description of Artificial Sequence: Synthetic oligonucleotide
  Sense strand starting at position 3273 of SEQ ID NO: 1887669
uuguauucucuggacaaca

SEQ ID NO: 2488239 - RNA, 19 nt, Artificial Sequence
  Description of Artificial Sequence: Synthetic oligonucleotide
  Antisense strand to SEQ ID NO: 2488238
uguuguccagagaauacaa

SEQ ID NO: 2488240 - RNA, 19 nt, Artificial Sequence
  Description of Artificial Sequence: Synthetic oligonucleotide
  Sense strand starting at position 3426 of SEQ ID NO: 1887669
cugagagguacagguugua

SEQ ID NO: 2488241 - RNA, 19 nt, Artificial Sequence
  Description of Artificial Sequence: Synthetic oligonucleotide
  Antisense strand to SEQ ID NO: 2488240
uacaaccuguaccucucag

SEQ ID NO: 2488242 - RNA, 19 nt, Artificial Sequence
  Description of Artificial Sequence: Synthetic oligonucleotide
  Sense strand starting at position 3535 of SEQ ID NO: 1887669
uacaaauguuagccaagga

SEQ ID NO: 2488243 - RNA, 19 nt, Artificial Sequence
  Description of Artificial Sequence: Synthetic oligonucleotide
  Antisense strand to SEQ ID NO: 2488242
uccuuggcuaacauuugua

SEQ ID NO: 2488244 - RNA, 19 nt, Artificial Sequence
  Description of Artificial Sequence: Synthetic oligonucleotide
  Sense strand starting at position 3539 of SEQ ID NO: 1887669
aauguuagccaaggaugau

SEQ ID NO: 2488245 - RNA, 19 nt, Artificial Sequence
  Description of Artificial Sequence: Synthetic oligonucleotide
  Antisense strand to SEQ ID NO: 2488244
aucauccuuggcuaacauu

SEQ ID NO: 2488246 - RNA, 19 nt, Artificial Sequence
  Description of Artificial Sequence: Synthetic oligonucleotide
  Sense strand starting at position 3700 of SEQ ID NO: 1887669
ggacuaucugagcgcaaga

SEQ ID NO: 2488247 - RNA, 19 nt, Artificial Sequence
  Description of Artificial Sequence: Synthetic oligonucleotide
  Antisense strand to SEQ ID NO: 2488246
ucuugcgcucagauagucc

SEQ ID NO: 2488248 - RNA, 19 nt, Artificial Sequence
  Description of Artificial Sequence: Synthetic oligonucleotide
  Sense strand starting at position 3702 of SEQ ID NO: 1887669
acuaucugagcgcaagaga

SEQ ID NO: 2488249 - RNA, 19 nt, Artificial Sequence
  Description of Artificial Sequence: Synthetic oligonucleotide
  Antisense strand to SEQ ID NO: 2488248
ucucuugcgcucagauagu

SEQ ID NO: 2488250 - RNA, 19 nt, Artificial Sequence
  Description of Artificial Sequence: Synthetic oligonucleotide
  Sense strand starting at position 3722 of SEQ ID NO: 1887669
cuagguuggaagugcuuau

SEQ ID NO: 2488251 - RNA, 19 nt, Artificial Sequence
  Description of Artificial Sequence: Synthetic oligonucleotide
  Antisense strand to SEQ ID NO: 2488250
auaagcacuuccaaccuag

SEQ ID NO: 2488252 - RNA, 19 nt, Artificial Sequence
  Description of Artificial Sequence: Synthetic oligonucleotide
  Sense strand starting at position 3726 of SEQ ID NO: 1887669
guuggaagugcuuauggac

SEQ ID NO: 2488253 - RNA, 19 nt, Artificial Sequence
  Description of Artificial Sequence: Synthetic oligonucleotide
  Antisense strand to SEQ ID NO: 2488252
guccauaagcacuuccaac

SEQ ID NO: 2488254 - RNA, 19 nt, Artificial Sequence
  Description of Artificial Sequence: Synthetic oligonucleotide
  Sense strand starting at position 3840 of SEQ ID NO: 1887669
acaaauguauuacugaagu

SEQ ID NO: 2488255 - RNA, 19 nt, Artificial Sequence
  Description of Artificial Sequence: Synthetic oligonucleotide
  Antisense strand to SEQ ID NO: 2488254
acuucaguaauacauuugu

SEQ ID NO: 2488256 - RNA, 19 nt, Artificial Sequence
  Description of Artificial Sequence: Synthetic oligonucleotide
  Sense strand starting at position 279 of SEQ ID NO: 1887670
gcccuagagaucuagguug

SEQ ID NO: 2488257 - RNA, 19 nt, Artificial Sequence
  Description of Artificial Sequence: Synthetic oligonucleotide
  Antisense strand to SEQ ID NO: 2488256
caaccuagaucucuagggc

SEQ ID NO: 2488258 - RNA, 19 nt, Artificial Sequence
  Description of Artificial Sequence: Synthetic oligonucleotide
  Sense strand starting at position 281 of SEQ ID NO: 1887670
ccuagagaucuagguugua

SEQ ID NO: 2488259 - RNA, 19 nt, Artificial Sequence
  Description of Artificial Sequence: Synthetic oligonucleotide
  Antisense strand to SEQ ID NO: 2488258
uacaaccuagaucucuagg

SEQ ID NO: 2488260 - RNA, 19 nt, Artificial Sequence
  Description of Artificial Sequence: Synthetic oligonucleotide
  Sense strand starting at position 284 of SEQ ID NO: 1887670
agagaucuagguuguaagu

SEQ ID NO: 2488261 - RNA, 19 nt, Artificial Sequence
  Description of Artificial Sequence: Synthetic oligonucleotide
  Antisense strand to SEQ ID NO: 2488260
acuuacaaccuagaucucu

SEQ ID NO: 2488262 - RNA, 19 nt, Artificial Sequence
  Description of Artificial Sequence: Synthetic oligonucleotide
  Sense strand starting at position 327 of SEQ ID NO: 1887670
cagacauccuguuguagaa

SEQ ID NO: 2488263 - RNA, 19 nt, Artificial Sequence
  Description of Artificial Sequence: Synthetic oligonucleotide
  Antisense strand to SEQ ID NO: 2488262
uucuacaacaggaugucug

SEQ ID NO: 2488264 - RNA, 19 nt, Artificial Sequence
  Description of Artificial Sequence: Synthetic oligonucleotide
  Sense strand starting at position 374 of SEQ ID NO: 1887670
ucagccaagucugaugaua

SEQ ID NO: 2488265 - RNA, 19 nt, Artificial Sequence
  Description of Artificial Sequence: Synthetic oligonucleotide
  Antisense strand to SEQ ID NO: 2488264
uaucaucagacuuggcuga

SEQ ID NO: 2488266 - RNA, 19 nt, Artificial Sequence
  Description of Artificial Sequence: Synthetic oligonucleotide
  Sense strand starting at position 376 of SEQ ID NO: 1887670
agccaagucugaugauaaa

SEQ ID NO: 2488267 - RNA, 19 nt, Artificial Sequence
  Description of Artificial Sequence: Synthetic oligonucleotide
  Antisense strand to SEQ ID NO: 2488266
uuuaucaucagacuuggcu

SEQ ID NO: 2488268 - RNA, 19 nt, Artificial Sequence
  Description of Artificial Sequence: Synthetic oligonucleotide
  Sense strand starting at position 544 of SEQ ID NO: 1887670
gcaccauggauauguuguu

SEQ ID NO: 2488269 - RNA, 19 nt, Artificial Sequence
  Description of Artificial Sequence: Synthetic oligonucleotide
  Antisense strand to SEQ ID NO: 2488268
aacaacauauccauggugc

SEQ ID NO: 2488270 - RNA, 19 nt, Artificial Sequence
  Description of Artificial Sequence: Synthetic oligonucleotide
  Sense strand starting at position 549 of SEQ ID NO: 1887670
auggauauguuguuggaau

SEQ ID NO: 2488271 - RNA, 19 nt, Artificial Sequence
  Description of Artificial Sequence: Synthetic oligonucleotide
  Antisense strand to SEQ ID NO: 2488270
auuccaacaacauauccau

SEQ ID NO: 2488272 - RNA, 19 nt, Artificial Sequence
  Description of Artificial Sequence: Synthetic oligonucleotide
  Sense strand starting at position 550 of SEQ ID NO: 1887670
uggauauguuguuggaauc

SEQ ID NO: 2488273 - RNA, 19 nt, Artificial Sequence
  Description of Artificial Sequence: Synthetic oligonucleotide
  Antisense strand to SEQ ID NO: 2488272
gauuccaacaacauaucca

SEQ ID NO: 2488274 - RNA, 19 nt, Artificial Sequence
  Description of Artificial Sequence: Synthetic oligonucleotide
  Sense strand starting at position 551 of SEQ ID NO: 1887670
ggauauguuguuggaaucu

SEQ ID NO: 2488275 - RNA, 19 nt, Artificial Sequence
  Description of Artificial Sequence: Synthetic oligonucleotide
  Antisense strand to SEQ ID NO: 2488274
agauuccaacaacauaucc

SEQ ID NO: 2488276 - RNA, 19 nt, Artificial Sequence
  Description of Artificial Sequence: Synthetic oligonucleotide
  Sense strand starting at position 561 of SEQ ID NO: 1887670
uuggaaucuuccuuagccu

SEQ ID NO: 2488277 - RNA, 19 nt, Artificial Sequence
  Description of Artificial Sequence: Synthetic oligonucleotide
  Antisense strand to SEQ ID NO: 2488276
aggcuaaggaagauuccaa

SEQ ID NO: 2488278 - RNA, 19 nt, Artificial Sequence
  Description of Artificial Sequence: Synthetic oligonucleotide
  Sense strand starting at position 567 of SEQ ID NO: 1887670
ucuuccuuagccuggugaa

SEQ ID NO: 2488279 - RNA, 19 nt, Artificial Sequence
  Description of Artificial Sequence: Synthetic oligonucleotide
  Antisense strand to SEQ ID NO: 2488278
uucaccaggcuaaggaaga

SEQ ID NO: 2488280 - RNA, 19 nt, Artificial Sequence
  Description of Artificial Sequence: Synthetic oligonucleotide
  Sense strand starting at position 568 of SEQ ID NO: 1887670
cuuccuuagccuggugaaa

SEQ ID NO: 2488281 - RNA, 19 nt, Artificial Sequence
  Description of Artificial Sequence: Synthetic oligonucleotide
  Antisense strand to SEQ ID NO: 2488280
uuucaccaggcuaaggaag

SEQ ID NO: 2488282 - RNA, 19 nt, Artificial Sequence
  Description of Artificial Sequence: Synthetic oligonucleotide
  Sense strand starting at position 622 of SEQ ID NO: 1887670
gcugguguguuuccugaau

SEQ ID NO: 2488283 - RNA, 19 nt, Artificial Sequence
  Description of Artificial Sequence: Synthetic oligonucleotide
  Antisense strand to SEQ ID NO: 2488282
auucaggaaacacaccagc

SEQ ID NO: 2488284 - RNA, 19 nt, Artificial Sequence
  Description of Artificial Sequence: Synthetic oligonucleotide
  Sense strand starting at position 720 of SEQ ID NO: 1887670
aggaaauccuccuaaguuu

SEQ ID NO: 2488285 - RNA, 19 nt, Artificial Sequence
  Description of Artificial Sequence: Synthetic oligonucleotide
  Antisense strand to SEQ ID NO: 2488284
aaacuuaggaggauuuccu

SEQ ID NO: 2488286 - RNA, 19 nt, Artificial Sequence
  Description of Artificial Sequence: Synthetic oligonucleotide
  Sense strand starting at position 788 of SEQ ID NO: 1887670
ccaagauaacugggcuaaa

SEQ ID NO: 2488287 - RNA, 19 nt, Artificial Sequence
  Description of Artificial Sequence: Synthetic oligonucleotide
  Antisense strand to SEQ ID NO: 2488286
uuuagcccaguuaucuugg

SEQ ID NO: 2488288 - RNA, 19 nt, Artificial Sequence
  Description of Artificial Sequence: Synthetic oligonucleotide
  Sense strand starting at position 799 of SEQ ID NO: 1887670
gggcuaaauuucuagacaa

SEQ ID NO: 2488289 - RNA, 19 nt, Artificial Sequence
  Description of Artificial Sequence: Synthetic oligonucleotide
  Antisense strand to SEQ ID NO: 2488288
uugucuagaaauuuagccc

SEQ ID NO: 2488290 - RNA, 19 nt, Artificial Sequence
  Description of Artificial Sequence: Synthetic oligonucleotide
  Sense strand starting at position 843 of SEQ ID NO: 1887670
ucacuugaguuccuauaua

SEQ ID NO: 2488291 - RNA, 19 nt, Artificial Sequence
  Description of Artificial Sequence: Synthetic oligonucleotide
  Antisense strand to SEQ ID NO: 2488290
uauauaggaacucaaguga

SEQ ID NO: 2488292 - RNA, 19 nt, Artificial Sequence
  Description of Artificial Sequence: Synthetic oligonucleotide
  Sense strand starting at position 1455 of SEQ ID NO: 1887670
guagacagguauucagaag

SEQ ID NO: 2488293 - RNA, 19 nt, Artificial Sequence
  Description of Artificial Sequence: Synthetic oligonucleotide
  Antisense strand to SEQ ID NO: 2488292
cuucugaauaccugucuac

SEQ ID NO: 2488294 - RNA, 19 nt, Artificial Sequence
  Description of Artificial Sequence: Synthetic oligonucleotide
  Sense strand starting at position 1722 of SEQ ID NO: 1887670
gcgcgagacucuguccgaa

SEQ ID NO: 2488295 - RNA, 19 nt, Artificial Sequence
  Description of Artificial Sequence: Synthetic oligonucleotide
  Antisense strand to SEQ ID NO: 2488294
uucggacagagucucgcgc

SEQ ID NO: 2488296 - RNA, 19 nt, Artificial Sequence
  Description of Artificial Sequence: Synthetic oligonucleotide
  Sense strand starting at position 1751 of SEQ ID NO: 1887670
acuuguugagcccaagaga

SEQ ID NO: 2488297 - RNA, 19 nt, Artificial Sequence
  Description of Artificial Sequence: Synthetic oligonucleotide
  Antisense strand to SEQ ID NO: 2488296
ucucuugggcucaacaagu

SEQ ID NO: 2488298 - RNA, 19 nt, Artificial Sequence
  Description of Artificial Sequence: Synthetic oligonucleotide
  Sense strand starting at position 1856 of SEQ ID NO: 1887670
ugaugauaagcaugcucuu

SEQ ID NO: 2488299 - RNA, 19 nt, Artificial Sequence
  Description of Artificial Sequence: Synthetic oligonucleotide
  Antisense strand to SEQ ID NO: 2488298
aagagcaugcuuaucauca

SEQ ID NO: 2488300 - RNA, 19 nt, Artificial Sequence
  Description of Artificial Sequence: Synthetic oligonucleotide
  Sense strand starting at position 2039 of SEQ ID NO: 1887670
uuucuuugacuagguuaaa

SEQ ID NO: 2488301 - RNA, 19 nt, Artificial Sequence
  Description of Artificial Sequence: Synthetic oligonucleotide
  Antisense strand to SEQ ID NO: 2488300
uuuaaccuagucaaagaaa

SEQ ID NO: 2488302 - RNA, 19 nt, Artificial Sequence
  Description of Artificial Sequence: Synthetic oligonucleotide
  Sense strand starting at position 2237 of SEQ ID NO: 1887670
cuacgugcaccuuauauuu

SEQ ID NO: 2488303 - RNA, 19 nt, Artificial Sequence
  Description of Artificial Sequence: Synthetic oligonucleotide
  Antisense strand to SEQ ID NO: 2488302
aaauauaaggugcacguag

SEQ ID NO: 2488304 - RNA, 19 nt, Artificial Sequence
  Description of Artificial Sequence: Synthetic oligonucleotide
  Sense strand starting at position 2239 of SEQ ID NO: 1887670
acgugcaccuuauauuuaa

SEQ ID NO: 2488305 - RNA, 19 nt, Artificial Sequence
  Description of Artificial Sequence: Synthetic oligonucleotide
  Antisense strand to SEQ ID NO: 2488304
uuaaauauaaggugcacgu

SEQ ID NO: 2488306 - RNA, 19 nt, Artificial Sequence
  Description of Artificial Sequence: Synthetic oligonucleotide
  Sense strand starting at position 2421 of SEQ ID NO: 1887670
ggaccacaggcuugguuau

SEQ ID NO: 2488307 - RNA, 19 nt, Artificial Sequence
  Description of Artificial Sequence: Synthetic oligonucleotide
  Antisense strand to SEQ ID NO: 2488306
auaaccaagccuguggucc

SEQ ID NO: 2488308 - RNA, 19 nt, Artificial Sequence
  Description of Artificial Sequence: Synthetic oligonucleotide
  Sense strand starting at position 2422 of SEQ ID NO: 1887670
gaccacaggcuugguuaua

SEQ ID NO: 2488309 - RNA, 19 nt, Artificial Sequence
  Description of Artificial Sequence: Synthetic oligonucleotide
  Antisense strand to SEQ ID NO: 2488308
uauaaccaagccugugguc

SEQ ID NO: 2488310 - RNA, 19 nt, Artificial Sequence
  Description of Artificial Sequence: Synthetic oligonucleotide
  Sense strand starting at position 2423 of SEQ ID NO: 1887670
accacaggcuugguuauaa

SEQ ID NO: 2488311 - RNA, 19 nt, Artificial Sequence
  Description of Artificial Sequence: Synthetic oligonucleotide
  Antisense strand to SEQ ID NO: 2488310
uuauaaccaagccuguggu

SEQ ID NO: 2488312 - RNA, 19 nt, Artificial Sequence
  Description of Artificial Sequence: Synthetic oligonucleotide
  Sense strand starting at position 2588 of SEQ ID NO: 1887670
guaaacccauguguauaaa

SEQ ID NO: 2488313 - RNA, 19 nt, Artificial Sequence
  Description of Artificial Sequence: Synthetic oligonucleotide
  Antisense strand to SEQ ID NO: 2488312
uuuauacacauggguuuac

SEQ ID NO: 2488314 - RNA, 19 nt, Artificial Sequence
  Description of Artificial Sequence: Synthetic oligonucleotide
  Sense strand starting at position 2615 of SEQ ID NO: 1887670
aagugagccagaugugguu

SEQ ID NO: 2488315 - RNA, 19 nt, Artificial Sequence
  Description of Artificial Sequence: Synthetic oligonucleotide
  Antisense strand to SEQ ID NO: 2488314
aaccacaucuggcucacuu

SEQ ID NO: 2488316 - RNA, 19 nt, Artificial Sequence
  Description of Artificial Sequence: Synthetic oligonucleotide
  Sense strand starting at position 3086 of SEQ ID NO: 1887670
auauauaaguagggauaca

SEQ ID NO: 2488317 - RNA, 19 nt, Artificial Sequence
  Description of Artificial Sequence: Synthetic oligonucleotide
  Antisense strand to SEQ ID NO: 2488316
uguaucccuacuuauauau

SEQ ID NO: 2488318 - RNA, 19 nt, Artificial Sequence
  Description of Artificial Sequence: Synthetic oligonucleotide
  Sense strand starting at position 3201 of SEQ ID NO: 1887670
uuguguguacaugauuaua

SEQ ID NO: 2488319 - RNA, 19 nt, Artificial Sequence
  Description of Artificial Sequence: Synthetic oligonucleotide
  Antisense strand to SEQ ID NO: 2488318
uauaaucauguacacacaa

SEQ ID NO: 2488320 - RNA, 19 nt, Artificial Sequence
  Description of Artificial Sequence: Synthetic oligonucleotide
  Sense strand starting at position 3203 of SEQ ID NO: 1887670
guguguacaugauuauauu

SEQ ID NO: 2488321 - RNA, 19 nt, Artificial Sequence
  Description of Artificial Sequence: Synthetic oligonucleotide
  Antisense strand to SEQ ID NO: 2488320
aauauaaucauguacacac

SEQ ID NO: 2488322 - RNA, 19 nt, Artificial Sequence
  Description of Artificial Sequence: Synthetic oligonucleotide
  Sense strand starting at position 3323 of SEQ ID NO: 1887670
acaaguucuugcuuuggua

SEQ ID NO: 2488323 - RNA, 19 nt, Artificial Sequence
  Description of Artificial Sequence: Synthetic oligonucleotide
  Antisense strand to SEQ ID NO: 2488322
uaccaaagcaagaacuugu

SEQ ID NO: 2488324 - RNA, 19 nt, Artificial Sequence
  Description of Artificial Sequence: Synthetic oligonucleotide
  Sense strand starting at position 3417 of SEQ ID NO: 1887670
ucccguauuuaucuacgua

SEQ ID NO: 2488325 - RNA, 19 nt, Artificial Sequence
  Description of Artificial Sequence: Synthetic oligonucleotide
  Antisense strand to SEQ ID NO: 2488324
uacguagauaaauacggga

SEQ ID NO: 2488326 - RNA, 19 nt, Artificial Sequence
  Description of Artificial Sequence: Synthetic oligonucleotide
  Sense strand starting at position 3418 of SEQ ID NO: 1887670
cccguauuuaucuacguau

SEQ ID NO: 2488327 - RNA, 19 nt, Artificial Sequence
  Description of Artificial Sequence: Synthetic oligonucleotide
  Antisense strand to SEQ ID NO: 2488326
auacguagauaaauacggg

SEQ ID NO: 2488328 - RNA, 19 nt, Artificial Sequence
  Description of Artificial Sequence: Synthetic oligonucleotide
  Sense strand starting at position 3751 of SEQ ID NO: 1887670
cuuuguugacacugagacu

SEQ ID NO: 2488329 - RNA, 19 nt, Artificial Sequence
  Description of Artificial Sequence: Synthetic oligonucleotide
  Antisense strand to SEQ ID NO: 2488328
agucucagugucaacaaag

SEQ ID NO: 2488330 - RNA, 19 nt, Artificial Sequence
  Description of Artificial Sequence: Synthetic oligonucleotide
  Sense strand starting at position 326 of SEQ ID NO: 1887671
uggagucagccgggaucau

SEQ ID NO: 2488331 - RNA, 19 nt, Artificial Sequence
  Description of Artificial Sequence: Synthetic oligonucleotide
  Antisense strand to SEQ ID NO: 2488330
augaucccggcugacucca

SEQ ID NO: 2488332 - RNA, 19 nt, Artificial Sequence
  Description of Artificial Sequence: Synthetic oligonucleotide
  Sense strand starting at position 558 of SEQ ID NO: 1887671
gcaagacuguaucccauaa

SEQ ID NO: 2488333 - RNA, 19 nt, Artificial Sequence
  Description of Artificial Sequence: Synthetic oligonucleotide
  Antisense strand to SEQ ID NO: 2488332
uuaugggauacagucuugc

SEQ ID NO: 2488334 - RNA, 19 nt, Artificial Sequence
  Description of Artificial Sequence: Synthetic oligonucleotide
  Sense strand starting at position 590 of SEQ ID NO: 1887671
gcccaacaggccuaucuua

SEQ ID NO: 2488335 - RNA, 19 nt, Artificial Sequence
  Description of Artificial Sequence: Synthetic oligonucleotide
  Antisense strand to SEQ ID NO: 2488334
uaagauaggccuguugggc

SEQ ID NO: 2488336 - RNA, 19 nt, Artificial Sequence
  Description of Artificial Sequence: Synthetic oligonucleotide
  Sense strand starting at position 639 of SEQ ID NO: 1887671
cagagaccuugucuuagaa

SEQ ID NO: 2488337 - RNA, 19 nt, Artificial Sequence
  Description of Artificial Sequence: Synthetic oligonucleotide
  Antisense strand to SEQ ID NO: 2488336
uucuaagacaaggucucug

SEQ ID NO: 2488338 - RNA, 19 nt, Artificial Sequence
  Description of Artificial Sequence: Synthetic oligonucleotide
  Sense strand starting at position 765 of SEQ ID NO: 1887671
auccaagucugauuacaag

SEQ ID NO: 2488339 - RNA, 19 nt, Artificial Sequence
  Description of Artificial Sequence: Synthetic oligonucleotide
  Antisense strand to SEQ ID NO: 2488338
cuuguaaucagacuuggau

SEQ ID NO: 2488340 - RNA, 19 nt, Artificial Sequence
  Description of Artificial Sequence: Synthetic oligonucleotide
  Sense strand starting at position 779 of SEQ ID NO: 1887671
acaagcauggucugcaaau

SEQ ID NO: 2488341 - RNA, 19 nt, Artificial Sequence
  Description of Artificial Sequence: Synthetic oligonucleotide
  Antisense strand to SEQ ID NO: 2488340
auuugcagaccaugcuugu

SEQ ID NO: 2488342 - RNA, 19 nt, Artificial Sequence
  Description of Artificial Sequence: Synthetic oligonucleotide
  Sense strand starting at position 952 of SEQ ID NO: 1887671
guugaaaucuuccuugacc

SEQ ID NO: 2488343 - RNA, 19 nt, Artificial Sequence
  Description of Artificial Sequence: Synthetic oligonucleotide
  Antisense strand to SEQ ID NO: 2488342
ggucaaggaagauuucaac

SEQ ID NO: 2488344 - RNA, 19 nt, Artificial Sequence
  Description of Artificial Sequence: Synthetic oligonucleotide
  Sense strand starting at position 954 of SEQ ID NO: 1887671
ugaaaucuuccuugaccag

SEQ ID NO: 2488345 - RNA, 19 nt, Artificial Sequence
  Description of Artificial Sequence: Synthetic oligonucleotide
  Antisense strand to SEQ ID NO: 2488344
cuggucaaggaagauuuca

SEQ ID NO: 2488346 - RNA, 19 nt, Artificial Sequence
  Description of Artificial Sequence: Synthetic oligonucleotide
  Sense strand starting at position 1215 of SEQ ID NO: 1887671
uggacuuugagcugagugu

SEQ ID NO: 2488347 - RNA, 19 nt, Artificial Sequence
  Description of Artificial Sequence: Synthetic oligonucleotide
  Antisense strand to SEQ ID NO: 2488346
acacucagcucaaagucca

SEQ ID NO: 2488348 - RNA, 19 nt, Artificial Sequence
  Description of Artificial Sequence: Synthetic oligonucleotide
  Sense strand starting at position 1216 of SEQ ID NO: 1887671
ggacuuugagcugaguguu

SEQ ID NO: 2488349 - RNA, 19 nt, Artificial Sequence
  Description of Artificial Sequence: Synthetic oligonucleotide
  Antisense strand to SEQ ID NO: 2488348
aacacucagcucaaagucc

SEQ ID NO: 2488350 - RNA, 19 nt, Artificial Sequence
  Description of Artificial Sequence: Synthetic oligonucleotide
  Sense strand starting at position 1252 of SEQ ID NO: 1887671
agggauacauaguuccgau

SEQ ID NO: 2488351 - RNA, 19 nt, Artificial Sequence
  Description of Artificial Sequence: Synthetic oligonucleotide
  Antisense strand to SEQ ID NO: 2488350
aucggaacuauguaucccu

SEQ ID NO: 2488352 - RNA, 19 nt, Artificial Sequence
  Description of Artificial Sequence: Synthetic oligonucleotide
  Sense strand starting at position 1285 of SEQ ID NO: 1887671
uggagucuaagauguugaa

SEQ ID NO: 2488353 - RNA, 19 nt, Artificial Sequence
  Description of Artificial Sequence: Synthetic oligonucleotide
  Antisense strand to SEQ ID NO: 2488352
uucaacaucuuagacucca

SEQ ID NO: 2488354 - RNA, 19 nt, Artificial Sequence
  Description of Artificial Sequence: Synthetic oligonucleotide
  Sense strand starting at position 1351 of SEQ ID NO: 1887671
gcuaguggaucaccugaaa

SEQ ID NO: 2488355 - RNA, 19 nt, Artificial Sequence
  Description of Artificial Sequence: Synthetic oligonucleotide
  Antisense strand to SEQ ID NO: 2488354
uuucaggugauccacuagc

SEQ ID NO: 2488356 - RNA, 19 nt, Artificial Sequence
  Description of Artificial Sequence: Synthetic oligonucleotide
  Sense strand starting at position 1654 of SEQ ID NO: 1887671
ggaguuuccggugagcaga

SEQ ID NO: 2488357 - RNA, 19 nt, Artificial Sequence
  Description of Artificial Sequence: Synthetic oligonucleotide
  Antisense strand to SEQ ID NO: 2488356
ucugcucaccggaaacucc

SEQ ID NO: 2488358 - RNA, 19 nt, Artificial Sequence
  Description of Artificial Sequence: Synthetic oligonucleotide
  Sense strand starting at position 1696 of SEQ ID NO: 1887671
gaaacaagagugugucuca

SEQ ID NO: 2488359 - RNA, 19 nt, Artificial Sequence
  Description of Artificial Sequence: Synthetic oligonucleotide
  Antisense strand to SEQ ID NO: 2488358
ugagacacacucuuguuuc

SEQ ID NO: 2488360 - RNA, 19 nt, Artificial Sequence
  Description of Artificial Sequence: Synthetic oligonucleotide
  Sense strand starting at position 1697 of SEQ ID NO: 1887671
aaacaagagugugucucaa

SEQ ID NO: 2488361 - RNA, 19 nt, Artificial Sequence
  Description of Artificial Sequence: Synthetic oligonucleotide
  Antisense strand to SEQ ID NO: 2488360
uugagacacacucuuguuu

SEQ ID NO: 2488362 - RNA, 19 nt, Artificial Sequence
  Description of Artificial Sequence: Synthetic oligonucleotide
  Sense strand starting at position 1752 of SEQ ID NO: 1887671
agaaaucuugguggaaggu

SEQ ID NO: 2488363 - RNA, 19 nt, Artificial Sequence
  Description of Artificial Sequence: Synthetic oligonucleotide
  Antisense strand to SEQ ID NO: 2488362
accuuccaccaagauuucu

SEQ ID NO: 2488364 - RNA, 19 nt, Artificial Sequence
  Description of Artificial Sequence: Synthetic oligonucleotide
  Sense strand starting at position 1794 of SEQ ID NO: 1887671
uagaaagccugucuuggaa

SEQ ID NO: 2488365 - RNA, 19 nt, Artificial Sequence
  Description of Artificial Sequence: Synthetic oligonucleotide
  Antisense strand to SEQ ID NO: 2488364
uuccaagacaggcuuucua

SEQ ID NO: 2488366 - RNA, 19 nt, Artificial Sequence
  Description of Artificial Sequence: Synthetic oligonucleotide
  Sense strand starting at position 2151 of SEQ ID NO: 1887671
augcauauugcauauauga

SEQ ID NO: 2488367 - RNA, 19 nt, Artificial Sequence
  Description of Artificial Sequence: Synthetic oligonucleotide
  Antisense strand to SEQ ID NO: 2488366
ucauauaugcaauaugcau

SEQ ID NO: 2488368 - RNA, 19 nt, Artificial Sequence
  Description of Artificial Sequence: Synthetic oligonucleotide
  Sense strand starting at position 2158 of SEQ ID NO: 1887671
uugcauauaugacugcaua

SEQ ID NO: 2488369 - RNA, 19 nt, Artificial Sequence
  Description of Artificial Sequence: Synthetic oligonucleotide
  Antisense strand to SEQ ID NO: 2488368
uaugcagucauauaugcaa

SEQ ID NO: 2488370 - RNA, 19 nt, Artificial Sequence
  Description of Artificial Sequence: Synthetic oligonucleotide
  Sense strand starting at position 2159 of SEQ ID NO: 1887671
ugcauauaugacugcauau

SEQ ID NO: 2488371 - RNA, 19 nt, Artificial Sequence
  Description of Artificial Sequence: Synthetic oligonucleotide
  Antisense strand to SEQ ID NO: 2488370
auaugcagucauauaugca

SEQ ID NO: 2488372 - RNA, 19 nt, Artificial Sequence
  Description of Artificial Sequence: Synthetic oligonucleotide
  Sense strand starting at position 2173 of SEQ ID NO: 1887671
cauauaugaccuggucaug

SEQ ID NO: 2488373 - RNA, 19 nt, Artificial Sequence
  Description of Artificial Sequence: Synthetic oligonucleotide
  Antisense strand to SEQ ID NO: 2488372
caugaccaggucauauaug

SEQ ID NO: 2488374 - RNA, 19 nt, Artificial Sequence
  Description of Artificial Sequence: Synthetic oligonucleotide
  Sense strand starting at position 2328 of SEQ ID NO: 1887671
uuuauaaaucagugccaga

SEQ ID NO: 2488375 - RNA, 19 nt, Artificial Sequence
  Description of Artificial Sequence: Synthetic oligonucleotide
  Antisense strand to SEQ ID NO: 2488374
ucuggcacugauuuauaaa

SEQ ID NO: 2488376 - RNA, 19 nt, Artificial Sequence
  Description of Artificial Sequence: Synthetic oligonucleotide
  Sense strand starting at position 2978 of SEQ ID NO: 1887671
gagagacucuguccgcuaa

SEQ ID NO: 2488377 - RNA, 19 nt, Artificial Sequence
  Description of Artificial Sequence: Synthetic oligonucleotide
  Antisense strand to SEQ ID NO: 2488376
uuagcggacagagucucuc

SEQ ID NO: 2488378 - RNA, 19 nt, Artificial Sequence
  Description of Artificial Sequence: Synthetic oligonucleotide
  Sense strand starting at position 2979 of SEQ ID NO: 1887671
agagacucuguccgcuaaa

SEQ ID NO: 2488379 - RNA, 19 nt, Artificial Sequence
  Description of Artificial Sequence: Synthetic oligonucleotide
  Antisense strand to SEQ ID NO: 2488378
uuuagcggacagagucucu

SEQ ID NO: 2488380 - RNA, 19 nt, Artificial Sequence
  Description of Artificial Sequence: Synthetic oligonucleotide
  Sense strand starting at position 3109 of SEQ ID NO: 1887671
ucguccaagccucaugaua

SEQ ID NO: 2488381 - RNA, 19 nt, Artificial Sequence
  Description of Artificial Sequence: Synthetic oligonucleotide
  Antisense strand to SEQ ID NO: 2488380
uaucaugaggcuuggacga

SEQ ID NO: 2488382 - RNA, 19 nt, Artificial Sequence
  Description of Artificial Sequence: Synthetic oligonucleotide
  Sense strand starting at position 3120 of SEQ ID NO: 1887671
ucaugauaagcaugcucua

SEQ ID NO: 2488383 - RNA, 19 nt, Artificial Sequence
  Description of Artificial Sequence: Synthetic oligonucleotide
  Antisense strand to SEQ ID NO: 2488382
uagagcaugcuuaucauga

SEQ ID NO: 2488384 - RNA, 19 nt, Artificial Sequence
  Description of Artificial Sequence: Synthetic oligonucleotide
  Sense strand starting at position 3123 of SEQ ID NO: 1887671
ugauaagcaugcucuacaa

SEQ ID NO: 2488385 - RNA, 19 nt, Artificial Sequence
  Description of Artificial Sequence: Synthetic oligonucleotide
  Antisense strand to SEQ ID NO: 2488384
uuguagagcaugcuuauca

SEQ ID NO: 2488386 - RNA, 19 nt, Artificial Sequence
  Description of Artificial Sequence: Synthetic oligonucleotide
  Sense strand starting at position 3138 of SEQ ID NO: 1887671
acaaauguauuaccgagau

SEQ ID NO: 2488387 - RNA, 19 nt, Artificial Sequence
  Description of Artificial Sequence: Synthetic oligonucleotide
  Antisense strand to SEQ ID NO: 2488386
aucucgguaauacauuugu

SEQ ID NO: 2488388 - RNA, 19 nt, Artificial Sequence
  Description of Artificial Sequence: Synthetic oligonucleotide
  Sense strand starting at position 3142 of SEQ ID NO: 1887671
auguauuaccgagauaagc

SEQ ID NO: 2488389 - RNA, 19 nt, Artificial Sequence
  Description of Artificial Sequence: Synthetic oligonucleotide
  Antisense strand to SEQ ID NO: 2488388
gcuuaucucgguaauacau

SEQ ID NO: 2488390 - RNA, 19 nt, Artificial Sequence
  Description of Artificial Sequence: Synthetic oligonucleotide
  Sense strand starting at position 3144 of SEQ ID NO: 1887671
guauuaccgagauaagcau

SEQ ID NO: 2488391 - RNA, 19 nt, Artificial Sequence
  Description of Artificial Sequence: Synthetic oligonucleotide
  Antisense strand to SEQ ID NO: 2488390
augcuuaucucgguaauac

SEQ ID NO: 2488392 - RNA, 19 nt, Artificial Sequence
  Description of Artificial Sequence: Synthetic oligonucleotide
  Sense strand starting at position 3264 of SEQ ID NO: 1887671
gagaucuucuugcuccaga

SEQ ID NO: 2488393 - RNA, 19 nt, Artificial Sequence
  Description of Artificial Sequence: Synthetic oligonucleotide
  Antisense strand to SEQ ID NO: 2488392
ucuggagcaagaagaucuc

SEQ ID NO: 2488394 - RNA, 19 nt, Artificial Sequence
  Description of Artificial Sequence: Synthetic oligonucleotide
  Sense strand starting at position 3265 of SEQ ID NO: 1887671
agaucuucuugcuccagaa

SEQ ID NO: 2488395 - RNA, 19 nt, Artificial Sequence
  Description of Artificial Sequence: Synthetic oligonucleotide
  Antisense strand to SEQ ID NO: 2488394
uucuggagcaagaagaucu

SEQ ID NO: 2488396 - RNA, 19 nt, Artificial Sequence
  Description of Artificial Sequence: Synthetic oligonucleotide
  Sense strand starting at position 3275 of SEQ ID NO: 1887671
gcuccagaacucuggguuu

SEQ ID NO: 2488397 - RNA, 19 nt, Artificial Sequence
  Description of Artificial Sequence: Synthetic oligonucleotide
  Antisense strand to SEQ ID NO: 2488396
aaacccagaguucuggagc

SEQ ID NO: 2488398 - RNA, 19 nt, Artificial Sequence
  Description of Artificial Sequence: Synthetic oligonucleotide
  Sense strand starting at position 3305 of SEQ ID NO: 1887671
uuuccuugcccagguuaaa

SEQ ID NO: 2488399 - RNA, 19 nt, Artificial Sequence
  Description of Artificial Sequence: Synthetic oligonucleotide
  Antisense strand to SEQ ID NO: 2488398
uuuaaccugggcaaggaaa

SEQ ID NO: 2488400 - RNA, 19 nt, Artificial Sequence
  Description of Artificial Sequence: Synthetic oligonucleotide
  Sense strand starting at position 3411 of SEQ ID NO: 1887671
aguuccuugcuacaaagaa

SEQ ID NO: 2488401 - RNA, 19 nt, Artificial Sequence
  Description of Artificial Sequence: Synthetic oligonucleotide
  Antisense strand to SEQ ID NO: 2488400
uucuuuguagcaaggaacu

SEQ ID NO: 2488402 - RNA, 19 nt, Artificial Sequence
  Description of Artificial Sequence: Synthetic oligonucleotide
  Sense strand starting at position 3435 of SEQ ID NO: 1887671
agguuagccuuaucccuaa

SEQ ID NO: 2488403 - RNA, 19 nt, Artificial Sequence
  Description of Artificial Sequence: Synthetic oligonucleotide
  Antisense strand to SEQ ID NO: 2488402
uuagggauaaggcuaaccu

SEQ ID NO: 2488404 - RNA, 19 nt, Artificial Sequence
  Description of Artificial Sequence: Synthetic oligonucleotide
  Sense strand starting at position 3736 of SEQ ID NO: 1887671
aauuuagugucagggacaa

SEQ ID NO: 2488405 - RNA, 19 nt, Artificial Sequence
  Description of Artificial Sequence: Synthetic oligonucleotide
  Antisense strand to SEQ ID NO: 2488404
uugucccugacacuaaauu

SEQ ID NO: 2488406 - RNA, 19 nt, Artificial Sequence
  Description of Artificial Sequence: Synthetic oligonucleotide
  Sense strand starting at position 3811 of SEQ ID NO: 1887671
auugacauccauugggauu

SEQ ID NO: 2488407 - RNA, 19 nt, Artificial Sequence
  Description of Artificial Sequence: Synthetic oligonucleotide
  Antisense strand to SEQ ID NO: 2488406
aaucccaauggaugucaau

SEQ ID NO: 2488408 - RNA, 19 nt, Artificial Sequence
  Description of Artificial Sequence: Synthetic oligonucleotide
  Sense strand starting at position 3843 of SEQ ID NO: 1887671
gauagauguggaggccuau

SEQ ID NO: 2488409 - RNA, 19 nt, Artificial Sequence
  Description of Artificial Sequence: Synthetic oligonucleotide
  Antisense strand to SEQ ID NO: 2488408
auaggccuccacaucuauc

SEQ ID NO: 2488410 - RNA, 19 nt, Artificial Sequence
  Description of Artificial Sequence: Synthetic oligonucleotide
  Sense strand starting at position 404 of SEQ ID NO: 1887672
uggagucagucgggaucau

SEQ ID NO: 2488411 - RNA, 19 nt, Artificial Sequence
  Description of Artificial Sequence: Synthetic oligonucleotide
  Antisense strand to SEQ ID NO: 2488410
augaucccgacugacucca

SEQ ID NO: 2488412 - RNA, 19 nt, Artificial Sequence
  Description of Artificial Sequence: Synthetic oligonucleotide
  Sense strand starting at position 757 of SEQ ID NO: 1887672
auccaagucugauaauaag

SEQ ID NO: 2488413 - RNA, 19 nt, Artificial Sequence
  Description of Artificial Sequence: Synthetic oligonucleotide
  Antisense strand to SEQ ID NO: 2488412
cuuauuaucagacuuggau

SEQ ID NO: 2488414 - RNA, 19 nt, Artificial Sequence
  Description of Artificial Sequence: Synthetic oligonucleotide
  Sense strand starting at position 766 of SEQ ID NO: 1887672
ugauaauaagcaugcaaau

SEQ ID NO: 2488415 - RNA, 19 nt, Artificial Sequence
  Description of Artificial Sequence: Synthetic oligonucleotide
  Antisense strand to SEQ ID NO: 2488414
auuugcaugcuuauuauca

SEQ ID NO: 2488416 - RNA, 19 nt, Artificial Sequence
  Description of Artificial Sequence: Synthetic oligonucleotide
  Sense strand starting at position 1100 of SEQ ID NO: 1887672
gggcgaucguccugaguuu

SEQ ID NO: 2488417 - RNA, 19 nt, Artificial Sequence
  Description of Artificial Sequence: Synthetic oligonucleotide
  Antisense strand to SEQ ID NO: 2488416
aaacucaggacgaucgccc

SEQ ID NO: 2488418 - RNA, 19 nt, Artificial Sequence
  Description of Artificial Sequence: Synthetic oligonucleotide
  Sense strand starting at position 1160 of SEQ ID NO: 1887672
acauuuagcuaagagaauu

SEQ ID NO: 2488419 - RNA, 19 nt, Artificial Sequence
  Description of Artificial Sequence: Synthetic oligonucleotide
  Antisense strand to SEQ ID NO: 2488418
aauucucuuagcuaaaugu

SEQ ID NO: 2488420 - RNA, 19 nt, Artificial Sequence
  Description of Artificial Sequence: Synthetic oligonucleotide
  Sense strand starting at position 1168 of SEQ ID NO: 1887672
cuaagagaauugggcugau

SEQ ID NO: 2488421 - RNA, 19 nt, Artificial Sequence
  Description of Artificial Sequence: Synthetic oligonucleotide
  Antisense strand to SEQ ID NO: 2488420
aucagcccaauucucuuag

SEQ ID NO: 2488422 - RNA, 19 nt, Artificial Sequence
  Description of Artificial Sequence: Synthetic oligonucleotide
  Sense strand starting at position 1171 of SEQ ID NO: 1887672
agagaauugggcugauguu

SEQ ID NO: 2488423 - RNA, 19 nt, Artificial Sequence
  Description of Artificial Sequence: Synthetic oligonucleotide
  Antisense strand to SEQ ID NO: 2488422
aacaucagcccaauucucu

SEQ ID NO: 2488424 - RNA, 19 nt, Artificial Sequence
  Description of Artificial Sequence: Synthetic oligonucleotide
  Sense strand starting at position 1172 of SEQ ID NO: 1887672
gagaauugggcugauguug

SEQ ID NO: 2488425 - RNA, 19 nt, Artificial Sequence
  Description of Artificial Sequence: Synthetic oligonucleotide
  Antisense strand to SEQ ID NO: 2488424
caacaucagcccaauucuc

SEQ ID NO: 2488426 - RNA, 19 nt, Artificial Sequence
  Description of Artificial Sequence: Synthetic oligonucleotide
  Sense strand starting at position 1177 of SEQ ID NO: 1887672
uugggcugauguugaagaa

SEQ ID NO: 2488427 - RNA, 19 nt, Artificial Sequence
  Description of Artificial Sequence: Synthetic oligonucleotide
  Antisense strand to SEQ ID NO: 2488426
uucuucaacaucagcccaa

SEQ ID NO: 2488428 - RNA, 19 nt, Artificial Sequence
  Description of Artificial Sequence: Synthetic oligonucleotide
  Sense strand starting at position 1178 of SEQ ID NO: 1887672
ugggcugauguugaagaau

SEQ ID NO: 2488429 - RNA, 19 nt, Artificial Sequence
  Description of Artificial Sequence: Synthetic oligonucleotide
  Antisense strand to SEQ ID NO: 2488428
auucuucaacaucagccca

SEQ ID NO: 2488430 - RNA, 19 nt, Artificial Sequence
  Description of Artificial Sequence: Synthetic oligonucleotide
  Sense strand starting at position 1635 of SEQ ID NO: 1887672
gggagaaucgccggaagcu

SEQ ID NO: 2488431 - RNA, 19 nt, Artificial Sequence
  Description of Artificial Sequence: Synthetic oligonucleotide
  Antisense strand to SEQ ID NO: 2488430
agcuuccggcgauucuccc

SEQ ID NO: 2488432 - RNA, 19 nt, Artificial Sequence
  Description of Artificial Sequence: Synthetic oligonucleotide
  Sense strand starting at position 1658 of SEQ ID NO: 1887672
ggcggaguuuccggucaac

SEQ ID NO: 2488433 - RNA, 19 nt, Artificial Sequence
  Description of Artificial Sequence: Synthetic oligonucleotide
  Antisense strand to SEQ ID NO: 2488432
guugaccggaaacuccgcc

SEQ ID NO: 2488434 - RNA, 19 nt, Artificial Sequence
  Description of Artificial Sequence: Synthetic oligonucleotide
  Sense strand starting at position 1808 of SEQ ID NO: 1887672
cagggaaccugucuuggaa

SEQ ID NO: 2488435 - RNA, 19 nt, Artificial Sequence
  Description of Artificial Sequence: Synthetic oligonucleotide
  Antisense strand to SEQ ID NO: 2488434
uuccaagacagguucccug

SEQ ID NO: 2488436 - RNA, 19 nt, Artificial Sequence
  Description of Artificial Sequence: Synthetic oligonucleotide
  Sense strand starting at position 2007 of SEQ ID NO: 1887672
gaggucuucuugcuccagu

SEQ ID NO: 2488437 - RNA, 19 nt, Artificial Sequence
  Description of Artificial Sequence: Synthetic oligonucleotide
  Antisense strand to SEQ ID NO: 2488436
acuggagcaagaagaccuc

SEQ ID NO: 2488438 - RNA, 19 nt, Artificial Sequence
  Description of Artificial Sequence: Synthetic oligonucleotide
  Sense strand starting at position 2008 of SEQ ID NO: 1887672
aggucuucuugcuccagua

SEQ ID NO: 2488439 - RNA, 19 nt, Artificial Sequence
  Description of Artificial Sequence: Synthetic oligonucleotide
  Antisense strand to SEQ ID NO: 2488438
uacuggagcaagaagaccu

SEQ ID NO: 2488440 - RNA, 19 nt, Artificial Sequence
  Description of Artificial Sequence: Synthetic oligonucleotide
  Sense strand starting at position 2010 of SEQ ID NO: 1887672
gucuucuugcuccaguacu

SEQ ID NO: 2488441 - RNA, 19 nt, Artificial Sequence
  Description of Artificial Sequence: Synthetic oligonucleotide
  Antisense strand to SEQ ID NO: 2488440
aguacuggagcaagaagac

SEQ ID NO: 2488442 - RNA, 19 nt, Artificial Sequence
  Description of Artificial Sequence: Synthetic oligonucleotide
  Sense strand starting at position 2738 of SEQ ID NO: 1887672
agagauauauuggacaugu

SEQ ID NO: 2488443 - RNA, 19 nt, Artificial Sequence
  Description of Artificial Sequence: Synthetic oligonucleotide
  Antisense strand to SEQ ID NO: 2488442
acauguccaauauaucucu

SEQ ID NO: 2488444 - RNA, 19 nt, Artificial Sequence
  Description of Artificial Sequence: Synthetic oligonucleotide
  Sense strand starting at position 2850 of SEQ ID NO: 1887672
cugcaaauguauuaccgaa

SEQ ID NO: 2488445 - RNA, 19 nt, Artificial Sequence
  Description of Artificial Sequence: Synthetic oligonucleotide
  Antisense strand to SEQ ID NO: 2488444
uucgguaauacauuugcag

SEQ ID NO: 2488446 - RNA, 19 nt, Artificial Sequence
  Description of Artificial Sequence: Synthetic oligonucleotide
  Sense strand starting at position 2852 of SEQ ID NO: 1887672
gcaaauguauuaccgaaau

SEQ ID NO: 2488447 - RNA, 19 nt, Artificial Sequence
  Description of Artificial Sequence: Synthetic oligonucleotide
  Antisense strand to SEQ ID NO: 2488446
auuucgguaauacauuugc

SEQ ID NO: 2488448 - RNA, 19 nt, Artificial Sequence
  Description of Artificial Sequence: Synthetic oligonucleotide
  Sense strand starting at position 3019 of SEQ ID NO: 1887672
uuuccuugaccuggucaaa

SEQ ID NO: 2488449 - RNA, 19 nt, Artificial Sequence
  Description of Artificial Sequence: Synthetic oligonucleotide
  Antisense strand to SEQ ID NO: 2488448
uuugaccaggucaaggaaa

SEQ ID NO: 2488450 - RNA, 19 nt, Artificial Sequence
  Description of Artificial Sequence: Synthetic oligonucleotide
  Sense strand starting at position 3064 of SEQ ID NO: 1887672
auugguccuguuugcauau

SEQ ID NO: 2488451 - RNA, 19 nt, Artificial Sequence
  Description of Artificial Sequence: Synthetic oligonucleotide
  Antisense strand to SEQ ID NO: 2488450
auaugcaaacaggaccaau

SEQ ID NO: 2488452 - RNA, 19 nt, Artificial Sequence
  Description of Artificial Sequence: Synthetic oligonucleotide
  Sense strand starting at position 3154 of SEQ ID NO: 1887672
agccuuguucaucgaggga

SEQ ID NO: 2488453 - RNA, 19 nt, Artificial Sequence
  Description of Artificial Sequence: Synthetic oligonucleotide
  Antisense strand to SEQ ID NO: 2488452
ucccucgaugaacaaggcu

SEQ ID NO: 2488454 - RNA, 19 nt, Artificial Sequence
  Description of Artificial Sequence: Synthetic oligonucleotide
  Sense strand starting at position 3157 of SEQ ID NO: 1887672
cuuguucaucgagggacaa

SEQ ID NO: 2488455 - RNA, 19 nt, Artificial Sequence
  Description of Artificial Sequence: Synthetic oligonucleotide
  Antisense strand to SEQ ID NO: 2488454
uugucccucgaugaacaag

SEQ ID NO: 2488456 - RNA, 19 nt, Artificial Sequence
  Description of Artificial Sequence: Synthetic oligonucleotide
  Sense strand starting at position 3170 of SEQ ID NO: 1887672
ggacaacuguccuggguuu

SEQ ID NO: 2488457 - RNA, 19 nt, Artificial Sequence
  Description of Artificial Sequence: Synthetic oligonucleotide
  Antisense strand to SEQ ID NO: 2488456
aaacccaggacaguugucc

SEQ ID NO: 2488458 - RNA, 19 nt, Artificial Sequence
  Description of Artificial Sequence: Synthetic oligonucleotide
  Sense strand starting at position 3225 of SEQ ID NO: 1887672
accuuauauucucaggagu

SEQ ID NO: 2488459 - RNA, 19 nt, Artificial Sequence
  Description of Artificial Sequence: Synthetic oligonucleotide
  Antisense strand to SEQ ID NO: 2488458
acuccugagaauauaaggu

SEQ ID NO: 2488460 - RNA, 19 nt, Artificial Sequence
  Description of Artificial Sequence: Synthetic oligonucleotide
  Sense strand starting at position 3227 of SEQ ID NO: 1887672
cuuauauucucaggaguua

SEQ ID NO: 2488461 - RNA, 19 nt, Artificial Sequence
  Description of Artificial Sequence: Synthetic oligonucleotide
  Antisense strand to SEQ ID NO: 2488460
uaacuccugagaauauaag

SEQ ID NO: 2488462 - RNA, 19 nt, Artificial Sequence
  Description of Artificial Sequence: Synthetic oligonucleotide
  Sense strand starting at position 3293 of SEQ ID NO: 1887672
aaguuagccagguauagag

SEQ ID NO: 2488463 - RNA, 19 nt, Artificial Sequence
  Description of Artificial Sequence: Synthetic oligonucleotide
  Antisense strand to SEQ ID NO: 2488462
cucuauaccuggcuaacuu

SEQ ID NO: 2488464 - RNA, 19 nt, Artificial Sequence
  Description of Artificial Sequence: Synthetic oligonucleotide
  Sense strand starting at position 3472 of SEQ ID NO: 1887672
ugcccaaagugauauaaga

SEQ ID NO: 2488465 - RNA, 19 nt, Artificial Sequence
  Description of Artificial Sequence: Synthetic oligonucleotide
  Antisense strand to SEQ ID NO: 2488464
ucuuauaucacuuugggca

SEQ ID NO: 2488466 - RNA, 19 nt, Artificial Sequence
  Description of Artificial Sequence: Synthetic oligonucleotide
  Sense strand starting at position 3485 of SEQ ID NO: 1887672
auaagaguauucucagggu

SEQ ID NO: 2488467 - RNA, 19 nt, Artificial Sequence
  Description of Artificial Sequence: Synthetic oligonucleotide
  Antisense strand to SEQ ID NO: 2488466
acccugagaauacucuuau

SEQ ID NO: 2488468 - RNA, 19 nt, Artificial Sequence
  Description of Artificial Sequence: Synthetic oligonucleotide
  Sense strand starting at position 3488 of SEQ ID NO: 1887672
agaguauucucagggugua

SEQ ID NO: 2488469 - RNA, 19 nt, Artificial Sequence
  Description of Artificial Sequence: Synthetic oligonucleotide
  Antisense strand to SEQ ID NO: 2488468
uacacccugagaauacucu

SEQ ID NO: 2488470 - RNA, 19 nt, Artificial Sequence
  Description of Artificial Sequence: Synthetic oligonucleotide
  Sense strand starting at position 3489 of SEQ ID NO: 1887672
gaguauucucaggguguaa

SEQ ID NO: 2488471 - RNA, 19 nt, Artificial Sequence
  Description of Artificial Sequence: Synthetic oligonucleotide
  Antisense strand to SEQ ID NO: 2488470
uuacacccugagaauacuc

SEQ ID NO: 2488472 - RNA, 19 nt, Artificial Sequence
  Description of Artificial Sequence: Synthetic oligonucleotide
  Sense strand starting at position 3519 of SEQ ID NO: 1887672
guguguacaugauauuaua

SEQ ID NO: 2488473 - RNA, 19 nt, Artificial Sequence
  Description of Artificial Sequence: Synthetic oligonucleotide
  Antisense strand to SEQ ID NO: 2488472
uauaauaucauguacacac

SEQ ID NO: 2488474 - RNA, 19 nt, Artificial Sequence
  Description of Artificial Sequence: Synthetic oligonucleotide
  Sense strand starting at position 3696 of SEQ ID NO: 1887672
ggaaguguaugccuguaau

SEQ ID NO: 2488475 - RNA, 19 nt, Artificial Sequence
  Description of Artificial Sequence: Synthetic oligonucleotide
  Antisense strand to SEQ ID NO: 2488474
auuacaggcauacacuucc

SEQ ID NO: 2488476 - RNA, 19 nt, Artificial Sequence
  Description of Artificial Sequence: Synthetic oligonucleotide
  Sense strand starting at position 3737 of SEQ ID NO: 1887672
guaggagagucgcuuuaac

SEQ ID NO: 2488477 - RNA, 19 nt, Artificial Sequence
  Description of Artificial Sequence: Synthetic oligonucleotide
  Antisense strand to SEQ ID NO: 2488476
guuaaagcgacucuccuac

SEQ ID NO: 2488478 - RNA, 19 nt, Artificial Sequence
  Description of Artificial Sequence: Synthetic oligonucleotide
  Sense strand starting at position 89 of SEQ ID NO: 1887673
gguuguaugggccgagauc

SEQ ID NO: 2488479 - RNA, 19 nt, Artificial Sequence
  Description of Artificial Sequence: Synthetic oligonucleotide
  Antisense strand to SEQ ID NO: 2488478
gaucucggcccauacaacc

SEQ ID NO: 2488480 - RNA, 19 nt, Artificial Sequence
  Description of Artificial Sequence: Synthetic oligonucleotide
  Sense strand starting at position 90 of SEQ ID NO: 1887673
guuguaugggccgagauca

SEQ ID NO: 2488481 - RNA, 19 nt, Artificial Sequence
  Description of Artificial Sequence: Synthetic oligonucleotide
  Antisense strand to SEQ ID NO: 2488480
ugaucucggcccauacaac

SEQ ID NO: 2488482 - RNA, 19 nt, Artificial Sequence
  Description of Artificial Sequence: Synthetic oligonucleotide
  Sense strand starting at position 659 of SEQ ID NO: 1887673
ugaugauaagcaugcaaau

SEQ ID NO: 2488483 - RNA, 19 nt, Artificial Sequence
  Description of Artificial Sequence: Synthetic oligonucleotide
  Antisense strand to SEQ ID NO: 2488482
auuugcaugcuuaucauca

SEQ ID NO: 2488484 - RNA, 19 nt, Artificial Sequence
  Description of Artificial Sequence: Synthetic oligonucleotide
  Sense strand starting at position 1058 of SEQ ID NO: 1887673
ccaagagauuagggcagaa

SEQ ID NO: 2488485 - RNA, 19 nt, Artificial Sequence
  Description of Artificial Sequence: Synthetic oligonucleotide
  Antisense strand to SEQ ID NO: 2488484
uucugcccuaaucucuugg

SEQ ID NO: 2488486 - RNA, 19 nt, Artificial Sequence
  Description of Artificial Sequence: Synthetic oligonucleotide
  Sense strand starting at position 1244 of SEQ ID NO: 1887673
acaggaccauuugagauua

SEQ ID NO: 2488487 - RNA, 19 nt, Artificial Sequence
  Description of Artificial Sequence: Synthetic oligonucleotide
  Antisense strand to SEQ ID NO: 2488486
uaaucucaaaugguccugu

SEQ ID NO: 2488488 - RNA, 19 nt, Artificial Sequence
  Description of Artificial Sequence: Synthetic oligonucleotide
  Sense strand starting at position 1590 of SEQ ID NO: 1887673
gcaacugaauucccaauga

SEQ ID NO: 2488489 - RNA, 19 nt, Artificial Sequence
  Description of Artificial Sequence: Synthetic oligonucleotide
  Antisense strand to SEQ ID NO: 2488488
ucauugggaauucaguugc

SEQ ID NO: 2488490 - RNA, 19 nt, Artificial Sequence
  Description of Artificial Sequence: Synthetic oligonucleotide
  Sense strand starting at position 1648 of SEQ ID NO: 1887673
gguggaguuuccggucaac

SEQ ID NO: 2488491 - RNA, 19 nt, Artificial Sequence
  Description of Artificial Sequence: Synthetic oligonucleotide
  Antisense strand to SEQ ID NO: 2488490
guugaccggaaacuccacc

SEQ ID NO: 2488492 - RNA, 19 nt, Artificial Sequence
  Description of Artificial Sequence: Synthetic oligonucleotide
  Sense strand starting at position 1651 of SEQ ID NO: 1887673
ggaguuuccggucaacaga

SEQ ID NO: 2488493 - RNA, 19 nt, Artificial Sequence
  Description of Artificial Sequence: Synthetic oligonucleotide
  Antisense strand to SEQ ID NO: 2488492
ucuguugaccggaaacucc

SEQ ID NO: 2488494 - RNA, 19 nt, Artificial Sequence
  Description of Artificial Sequence: Synthetic oligonucleotide
  Sense strand starting at position 1666 of SEQ ID NO: 1887673
cagagauucugcuacugca

SEQ ID NO: 2488495 - RNA, 19 nt, Artificial Sequence
  Description of Artificial Sequence: Synthetic oligonucleotide
  Antisense strand to SEQ ID NO: 2488494
ugcaguagcagaaucucug

SEQ ID NO: 2488496 - RNA, 19 nt, Artificial Sequence
  Description of Artificial Sequence: Synthetic oligonucleotide
  Sense strand starting at position 1791 of SEQ ID NO: 1887673
cagagacacugucuuggaa

SEQ ID NO: 2488497 - RNA, 19 nt, Artificial Sequence
  Description of Artificial Sequence: Synthetic oligonucleotide
  Antisense strand to SEQ ID NO: 2488496
uuccaagacagugucucug

SEQ ID NO: 2488498 - RNA, 19 nt, Artificial Sequence
  Description of Artificial Sequence: Synthetic oligonucleotide
  Sense strand starting at position 1840 of SEQ ID NO: 1887673
ucaugcacgucugaugaua

SEQ ID NO: 2488499 - RNA, 19 nt, Artificial Sequence
  Description of Artificial Sequence: Synthetic oligonucleotide
  Antisense strand to SEQ ID NO: 2488498
uaucaucagacgugcauga

SEQ ID NO: 2488500 - RNA, 19 nt, Artificial Sequence
  Description of Artificial Sequence: Synthetic oligonucleotide
  Sense strand starting at position 1842 of SEQ ID NO: 1887673
augcacgucugaugauaag

SEQ ID NO: 2488501 - RNA, 19 nt, Artificial Sequence
  Description of Artificial Sequence: Synthetic oligonucleotide
  Antisense strand to SEQ ID NO: 2488500
cuuaucaucagacgugcau

SEQ ID NO: 2488502 - RNA, 19 nt, Artificial Sequence
  Description of Artificial Sequence: Synthetic oligonucleotide
  Sense strand starting at position 1993 of SEQ ID NO: 1887673
gagaucuucuugcuccagu

SEQ ID NO: 2488503 - RNA, 19 nt, Artificial Sequence
  Description of Artificial Sequence: Synthetic oligonucleotide
  Antisense strand to SEQ ID NO: 2488502
acuggagcaagaagaucuc

SEQ ID NO: 2488504 - RNA, 19 nt, Artificial Sequence
  Description of Artificial Sequence: Synthetic oligonucleotide
  Sense strand starting at position 1994 of SEQ ID NO: 1887673
agaucuucuugcuccagua

SEQ ID NO: 2488505 - RNA, 19 nt, Artificial Sequence
  Description of Artificial Sequence: Synthetic oligonucleotide
  Antisense strand to SEQ ID NO: 2488504
uacuggagcaagaagaucu

SEQ ID NO: 2488506 - RNA, 19 nt, Artificial Sequence
  Description of Artificial Sequence: Synthetic oligonucleotide
  Sense strand starting at position 2004 of SEQ ID NO: 1887673
gcuccaguacucuggguua

SEQ ID NO: 2488507 - RNA, 19 nt, Artificial Sequence
  Description of Artificial Sequence: Synthetic oligonucleotide
  Antisense strand to SEQ ID NO: 2488506
uaacccagaguacuggagc

SEQ ID NO: 2488508 - RNA, 19 nt, Artificial Sequence
  Description of Artificial Sequence: Synthetic oligonucleotide
  Sense strand starting at position 2006 of SEQ ID NO: 1887673
uccaguacucuggguuauu

SEQ ID NO: 2488509 - RNA, 19 nt, Artificial Sequence
  Description of Artificial Sequence: Synthetic oligonucleotide
  Antisense strand to SEQ ID NO: 2488508
aauaacccagaguacugga

SEQ ID NO: 2488510 - RNA, 19 nt, Artificial Sequence
  Description of Artificial Sequence: Synthetic oligonucleotide
  Sense strand starting at position 2425 of SEQ ID NO: 1887673
cccggcuuccugugauucu

SEQ ID NO: 2488511 - RNA, 19 nt, Artificial Sequence
  Description of Artificial Sequence: Synthetic oligonucleotide
  Antisense strand to SEQ ID NO: 2488510
agaaucacaggaagccggg

SEQ ID NO: 2488512 - RNA, 19 nt, Artificial Sequence
  Description of Artificial Sequence: Synthetic oligonucleotide
  Sense strand starting at position 2603 of SEQ ID NO: 1887673
gauggaaucacagguguga

SEQ ID NO: 2488513 - RNA, 19 nt, Artificial Sequence
  Description of Artificial Sequence: Synthetic oligonucleotide
  Antisense strand to SEQ ID NO: 2488512
ucacaccugugauuccauc

SEQ ID NO: 2488514 - RNA, 19 nt, Artificial Sequence
  Description of Artificial Sequence: Synthetic oligonucleotide
  Sense strand starting at position 2632 of SEQ ID NO: 1887673
ccagccuuguccuauacuu

SEQ ID NO: 2488515 - RNA, 19 nt, Artificial Sequence
  Description of Artificial Sequence: Synthetic oligonucleotide
  Antisense strand to SEQ ID NO: 2488514
aaguauaggacaaggcugg

SEQ ID NO: 2488516 - RNA, 19 nt, Artificial Sequence
  Description of Artificial Sequence: Synthetic oligonucleotide
  Sense strand starting at position 2791 of SEQ ID NO: 1887673
cuuccuguacaugaguuaa

SEQ ID NO: 2488517 - RNA, 19 nt, Artificial Sequence
  Description of Artificial Sequence: Synthetic oligonucleotide
  Antisense strand to SEQ ID NO: 2488516
uuaacucauguacaggaag

SEQ ID NO: 2488518 - RNA, 19 nt, Artificial Sequence
  Description of Artificial Sequence: Synthetic oligonucleotide
  Sense strand starting at position 2793 of SEQ ID NO: 1887673
uccuguacaugaguuaaua

SEQ ID NO: 2488519 - RNA, 19 nt, Artificial Sequence
  Description of Artificial Sequence: Synthetic oligonucleotide
  Antisense strand to SEQ ID NO: 2488518
uauuaacucauguacagga

SEQ ID NO: 2488520 - RNA, 19 nt, Artificial Sequence
  Description of Artificial Sequence: Synthetic oligonucleotide
  Sense strand starting at position 2900 of SEQ ID NO: 1887673
gcccgucucguugcauaua

SEQ ID NO: 2488521 - RNA, 19 nt, Artificial Sequence
  Description of Artificial Sequence: Synthetic oligonucleotide
  Antisense strand to SEQ ID NO: 2488520
uauaugcaacgagacgggc

SEQ ID NO: 2488522 - RNA, 19 nt, Artificial Sequence
  Description of Artificial Sequence: Synthetic oligonucleotide
  Sense strand starting at position 3701 of SEQ ID NO: 1887673
gagagacuuugcuugcaaa

SEQ ID NO: 2488523 - RNA, 19 nt, Artificial Sequence
  Description of Artificial Sequence: Synthetic oligonucleotide
  Antisense strand to SEQ ID NO: 2488522
uuugcaagcaaagucucuc

SEQ ID NO: 2488524 - RNA, 19 nt, Artificial Sequence
  Description of Artificial Sequence: Synthetic oligonucleotide
  Sense strand starting at position 3790 of SEQ ID NO: 1887673
gagauccugucuuagaaug

SEQ ID NO: 2488525 - RNA, 19 nt, Artificial Sequence
  Description of Artificial Sequence: Synthetic oligonucleotide
  Antisense strand to SEQ ID NO: 2488524
cauucuaagacaggaucuc

SEQ ID NO: 2488526 - RNA, 19 nt, Artificial Sequence
  Description of Artificial Sequence: Synthetic oligonucleotide
  Sense strand starting at position 3792 of SEQ ID NO: 1887673
gauccugucuuagaaugaa

SEQ ID NO: 2488527 - RNA, 19 nt, Artificial Sequence
  Description of Artificial Sequence: Synthetic oligonucleotide
  Antisense strand to SEQ ID NO: 2488526
uucauucuaagacaggauc

SEQ ID NO: 2488528 - RNA, 19 nt, Artificial Sequence
  Description of Artificial Sequence: Synthetic oligonucleotide
  Sense strand starting at position 6 of SEQ ID NO: 1887674
ucaugaugguuccauauuu

SEQ ID NO: 2488529 - RNA, 19 nt, Artificial Sequence
  Description of Artificial Sequence: Synthetic oligonucleotide
  Antisense strand to SEQ ID NO: 2488528
aaauauggaaccaucauga

SEQ ID NO: 2488530 - RNA, 19 nt, Artificial Sequence
  Description of Artificial Sequence: Synthetic oligonucleotide
  Sense strand starting at position 62 of SEQ ID NO: 1887674
aagucuuacucugucgaca

SEQ ID NO: 2488531 - RNA, 19 nt, Artificial Sequence
  Description of Artificial Sequence: Synthetic oligonucleotide
  Antisense strand to SEQ ID NO: 2488530
ugucgacagaguaagacuu

SEQ ID NO: 2488532 - RNA, 19 nt, Artificial Sequence
  Description of Artificial Sequence: Synthetic oligonucleotide
  Sense strand starting at position 789 of SEQ ID NO: 1887674
ucuuccuguacgugaguua

SEQ ID NO: 2488533 - RNA, 19 nt, Artificial Sequence
  Description of Artificial Sequence: Synthetic oligonucleotide
  Antisense strand to SEQ ID NO: 2488532
uaacucacguacaggaaga

SEQ ID NO: 2488534 - RNA, 19 nt, Artificial Sequence
  Description of Artificial Sequence: Synthetic oligonucleotide
  Sense strand starting at position 790 of SEQ ID NO: 1887674
cuuccuguacgugaguuaa

SEQ ID NO: 2488535 - RNA, 19 nt, Artificial Sequence
  Description of Artificial Sequence: Synthetic oligonucleotide
  Antisense strand to SEQ ID NO: 2488534
uuaacucacguacaggaag

SEQ ID NO: 2488536 - RNA, 19 nt, Artificial Sequence
  Description of Artificial Sequence: Synthetic oligonucleotide
  Sense strand starting at position 792 of SEQ ID NO: 1887674
uccuguacgugaguuaaua

SEQ ID NO: 2488537 - RNA, 19 nt, Artificial Sequence
  Description of Artificial Sequence: Synthetic oligonucleotide
  Antisense strand to SEQ ID NO: 2488536
uauuaacucacguacagga

SEQ ID NO: 2488538 - RNA, 19 nt, Artificial Sequence
  Description of Artificial Sequence: Synthetic oligonucleotide
  Sense strand starting at position 794 of SEQ ID NO: 1887674
cuguacgugaguuaauauu

SEQ ID NO: 2488539 - RNA, 19 nt, Artificial Sequence
  Description of Artificial Sequence: Synthetic oligonucleotide
  Antisense strand to SEQ ID NO: 2488538
aauauuaacucacguacag

SEQ ID NO: 2488540 - RNA, 19 nt, Artificial Sequence
  Description of Artificial Sequence: Synthetic oligonucleotide
  Sense strand starting at position 892 of SEQ ID NO: 1887674
gugagacgcccguauuguu

SEQ ID NO: 2488541 - RNA, 19 nt, Artificial Sequence
  Description of Artificial Sequence: Synthetic oligonucleotide
  Antisense strand to SEQ ID NO: 2488540
aacaauacgggcgucucac

SEQ ID NO: 2488542 - RNA, 19 nt, Artificial Sequence
  Description of Artificial Sequence: Synthetic oligonucleotide
  Sense strand starting at position 899 of SEQ ID NO: 1887674
gcccguauuguugcauaua

SEQ ID NO: 2488543 - RNA, 19 nt, Artificial Sequence
  Description of Artificial Sequence: Synthetic oligonucleotide
  Antisense strand to SEQ ID NO: 2488542
uauaugcaacaauacgggc

SEQ ID NO: 2488544 - RNA, 19 nt, Artificial Sequence
  Description of Artificial Sequence: Synthetic oligonucleotide
  Sense strand starting at position 902 of SEQ ID NO: 1887674
cguauuguugcauauacga

SEQ ID NO: 2488545 - RNA, 19 nt, Artificial Sequence
  Description of Artificial Sequence: Synthetic oligonucleotide
  Antisense strand to SEQ ID NO: 2488544
ucguauaugcaacaauacg

SEQ ID NO: 2488546 - RNA, 19 nt, Artificial Sequence
  Description of Artificial Sequence: Synthetic oligonucleotide
  Sense strand starting at position 1070 of SEQ ID NO: 1887674
ucuauaaaccagugccaga

SEQ ID NO: 2488547 - RNA, 19 nt, Artificial Sequence
  Description of Artificial Sequence: Synthetic oligonucleotide
  Antisense strand to SEQ ID NO: 2488546
ucuggcacugguuuauaga

SEQ ID NO: 2488548 - RNA, 19 nt, Artificial Sequence
  Description of Artificial Sequence: Synthetic oligonucleotide
  Sense strand starting at position 1269 of SEQ ID NO: 1887674
gcauaccugugaucccaga

SEQ ID NO: 2488549 - RNA, 19 nt, Artificial Sequence
  Description of Artificial Sequence: Synthetic oligonucleotide
  Antisense strand to SEQ ID NO: 2488548
ucugggaucacagguaugc

SEQ ID NO: 2488550 - RNA, 19 nt, Artificial Sequence
  Description of Artificial Sequence: Synthetic oligonucleotide
  Sense strand starting at position 1282 of SEQ ID NO: 1887674
cccagaaauuugggaguca

SEQ ID NO: 2488551 - RNA, 19 nt, Artificial Sequence
  Description of Artificial Sequence: Synthetic oligonucleotide
  Antisense strand to SEQ ID NO: 2488550
ugacucccaaauuucuggg

SEQ ID NO: 2488552 - RNA, 19 nt, Artificial Sequence
  Description of Artificial Sequence: Synthetic oligonucleotide
  Sense strand starting at position 1283 of SEQ ID NO: 1887674
ccagaaauuugggagucag

SEQ ID NO: 2488553 - RNA, 19 nt, Artificial Sequence
  Description of Artificial Sequence: Synthetic oligonucleotide
  Antisense strand to SEQ ID NO: 2488552
cugacucccaaauuucugg

SEQ ID NO: 2488554 - RNA, 19 nt, Artificial Sequence
  Description of Artificial Sequence: Synthetic oligonucleotide
  Sense strand starting at position 1593 of SEQ ID NO: 1887674
gaugaacgccuguaaucuc

SEQ ID NO: 2488555 - RNA, 19 nt, Artificial Sequence
  Description of Artificial Sequence: Synthetic oligonucleotide
  Antisense strand to SEQ ID NO: 2488554
gagauuacaggcguucauc

SEQ ID NO: 2488556 - RNA, 19 nt, Artificial Sequence
  Description of Artificial Sequence: Synthetic oligonucleotide
  Sense strand starting at position 1676 of SEQ ID NO: 1887674
gagaucgccucacugcaua

SEQ ID NO: 2488557 - RNA, 19 nt, Artificial Sequence
  Description of Artificial Sequence: Synthetic oligonucleotide
  Antisense strand to SEQ ID NO: 2488556
uaugcagugaggcgaucuc

SEQ ID NO: 2488558 - RNA, 19 nt, Artificial Sequence
  Description of Artificial Sequence: Synthetic oligonucleotide
  Sense strand starting at position 1756 of SEQ ID NO: 1887674
cuggguuggacaugucacu

SEQ ID NO: 2488559 - RNA, 19 nt, Artificial Sequence
  Description of Artificial Sequence: Synthetic oligonucleotide
  Antisense strand to SEQ ID NO: 2488558
agugacauguccaacccag

SEQ ID NO: 2488560 - RNA, 19 nt, Artificial Sequence
  Description of Artificial Sequence: Synthetic oligonucleotide
  Sense strand starting at position 1874 of SEQ ID NO: 1887674
gcaaauguauuaccacgau

SEQ ID NO: 2488561 - RNA, 19 nt, Artificial Sequence
  Description of Artificial Sequence: Synthetic oligonucleotide
  Antisense strand to SEQ ID NO: 2488560
aucgugguaauacauuugc

SEQ ID NO: 2488562 - RNA, 19 nt, Artificial Sequence
  Description of Artificial Sequence: Synthetic oligonucleotide
  Sense strand starting at position 2313 of SEQ ID NO: 1887674
ucacuugaauuccaggaca

SEQ ID NO: 2488563 - RNA, 19 nt, Artificial Sequence
  Description of Artificial Sequence: Synthetic oligonucleotide
  Antisense strand to SEQ ID NO: 2488562
uguccuggaauucaaguga

SEQ ID NO: 2488564 - RNA, 19 nt, Artificial Sequence
  Description of Artificial Sequence: Synthetic oligonucleotide
  Sense strand starting at position 2417 of SEQ ID NO: 1887674
ggcauuaucccguaaaugc

SEQ ID NO: 2488565 - RNA, 19 nt, Artificial Sequence
  Description of Artificial Sequence: Synthetic oligonucleotide
  Antisense strand to SEQ ID NO: 2488564
gcauuuacgggauaaugcc

SEQ ID NO: 2488566 - RNA, 19 nt, Artificial Sequence
  Description of Artificial Sequence: Synthetic oligonucleotide
  Sense strand starting at position 2427 of SEQ ID NO: 1887674
cguaaaugcuucucaguaa

SEQ ID NO: 2488567 - RNA, 19 nt, Artificial Sequence
  Description of Artificial Sequence: Synthetic oligonucleotide
  Antisense strand to SEQ ID NO: 2488566
uuacugagaagcauuuacg

SEQ ID NO: 2488568 - RNA, 19 nt, Artificial Sequence
  Description of Artificial Sequence: Synthetic oligonucleotide
  Sense strand starting at position 2434 of SEQ ID NO: 1887674
gcuucucaguaacauuuga

SEQ ID NO: 2488569 - RNA, 19 nt, Artificial Sequence
  Description of Artificial Sequence: Synthetic oligonucleotide
  Antisense strand to SEQ ID NO: 2488568
ucaaauguuacugagaagc

SEQ ID NO: 2488570 - RNA, 19 nt, Artificial Sequence
  Description of Artificial Sequence: Synthetic oligonucleotide
  Sense strand starting at position 2617 of SEQ ID NO: 1887674
gguacaugccuguagauac

SEQ ID NO: 2488571 - RNA, 19 nt, Artificial Sequence
  Description of Artificial Sequence: Synthetic oligonucleotide
  Antisense strand to SEQ ID NO: 2488570
guaucuacaggcauguacc

SEQ ID NO: 2488572 - RNA, 19 nt, Artificial Sequence
  Description of Artificial Sequence: Synthetic oligonucleotide
  Sense strand starting at position 2843 of SEQ ID NO: 1887674
uggagauccugacaggaca

SEQ ID NO: 2488573 - RNA, 19 nt, Artificial Sequence
  Description of Artificial Sequence: Synthetic oligonucleotide
  Antisense strand to SEQ ID NO: 2488572
uguccugucaggaucucca

SEQ ID NO: 2488574 - RNA, 19 nt, Artificial Sequence
  Description of Artificial Sequence: Synthetic oligonucleotide
  Sense strand starting at position 3022 of SEQ ID NO: 1887674
ccuuccaugguugauuaua

SEQ ID NO: 2488575 - RNA, 19 nt, Artificial Sequence
  Description of Artificial Sequence: Synthetic oligonucleotide
  Antisense strand to SEQ ID NO: 2488574
uauaaucaaccauggaagg

SEQ ID NO: 2488576 - RNA, 19 nt, Artificial Sequence
  Description of Artificial Sequence: Synthetic oligonucleotide
  Sense strand starting at position 3030 of SEQ ID NO: 1887674
gguugauuauaagcauucu

SEQ ID NO: 2488577 - RNA, 19 nt, Artificial Sequence
  Description of Artificial Sequence: Synthetic oligonucleotide
  Antisense strand to SEQ ID NO: 2488576
agaaugcuuauaaucaacc

SEQ ID NO: 2488578 - RNA, 19 nt, Artificial Sequence
  Description of Artificial Sequence: Synthetic oligonucleotide
  Sense strand starting at position 3038 of SEQ ID NO: 1887674
auaagcauucucugcaagu

SEQ ID NO: 2488579 - RNA, 19 nt, Artificial Sequence
  Description of Artificial Sequence: Synthetic oligonucleotide
  Antisense strand to SEQ ID NO: 2488578
acuugcagagaaugcuuau

SEQ ID NO: 2488580 - RNA, 19 nt, Artificial Sequence
  Description of Artificial Sequence: Synthetic oligonucleotide
  Sense strand starting at position 3039 of SEQ ID NO: 1887674
uaagcauucucugcaagug

SEQ ID NO: 2488581 - RNA, 19 nt, Artificial Sequence
  Description of Artificial Sequence: Synthetic oligonucleotide
  Antisense strand to SEQ ID NO: 2488580
cacuugcagagaaugcuua

SEQ ID NO: 2488582 - RNA, 19 nt, Artificial Sequence
  Description of Artificial Sequence: Synthetic oligonucleotide
  Sense strand starting at position 3040 of SEQ ID NO: 1887674
aagcauucucugcaagugu

SEQ ID NO: 2488583 - RNA, 19 nt, Artificial Sequence
  Description of Artificial Sequence: Synthetic oligonucleotide
  Antisense strand to SEQ ID NO: 2488582
acacuugcagagaaugcuu

SEQ ID NO: 2488584 - RNA, 19 nt, Artificial Sequence
  Description of Artificial Sequence: Synthetic oligonucleotide
  Sense strand starting at position 3051 of SEQ ID NO: 1887674
gcaaguguauuaccaagau

SEQ ID NO: 2488585 - RNA, 19 nt, Artificial Sequence
  Description of Artificial Sequence: Synthetic oligonucleotide
  Antisense strand to SEQ ID NO: 2488584
aucuugguaauacacuugc

SEQ ID NO: 2488586 - RNA, 19 nt, Artificial Sequence
  Description of Artificial Sequence: Synthetic oligonucleotide
  Sense strand starting at position 3055 of SEQ ID NO: 1887674
guguauuaccaagaucaac

SEQ ID NO: 2488587 - RNA, 19 nt, Artificial Sequence
  Description of Artificial Sequence: Synthetic oligonucleotide
  Antisense strand to SEQ ID NO: 2488586
guugaucuugguaauacac

SEQ ID NO: 2488588 - RNA, 19 nt, Artificial Sequence
  Description of Artificial Sequence: Synthetic oligonucleotide
  Sense strand starting at position 3081 of SEQ ID NO: 1887674
uucucaaagcguuaacacu

SEQ ID NO: 2488589 - RNA, 19 nt, Artificial Sequence
  Description of Artificial Sequence: Synthetic oligonucleotide
  Antisense strand to SEQ ID NO: 2488588
aguguuaacgcuuugagaa

SEQ ID NO: 2488590 - RNA, 19 nt, Artificial Sequence
  Description of Artificial Sequence: Synthetic oligonucleotide
  Sense strand starting at position 3166 of SEQ ID NO: 1887674
gagaucuugcuccagcauu

SEQ ID NO: 2488591 - RNA, 19 nt, Artificial Sequence
  Description of Artificial Sequence: Synthetic oligonucleotide
  Antisense strand to SEQ ID NO: 2488590
aaugcuggagcaagaucuc

SEQ ID NO: 2488592 - RNA, 19 nt, Artificial Sequence
  Description of Artificial Sequence: Synthetic oligonucleotide
  Sense strand starting at position 3234 of SEQ ID NO: 1887674
aguaaagaugcauguauug

SEQ ID NO: 2488593 - RNA, 19 nt, Artificial Sequence
  Description of Artificial Sequence: Synthetic oligonucleotide
  Antisense strand to SEQ ID NO: 2488592
caauacaugcaucuuuacu

SEQ ID NO: 2488594 - RNA, 19 nt, Artificial Sequence
  Description of Artificial Sequence: Synthetic oligonucleotide
  Sense strand starting at position 3355 of SEQ ID NO: 1887674
gggcaauccugagcuuugu

SEQ ID NO: 2488595 - RNA, 19 nt, Artificial Sequence
  Description of Artificial Sequence: Synthetic oligonucleotide
  Antisense strand to SEQ ID NO: 2488594
acaaagcucaggauugccc

SEQ ID NO: 2488596 - RNA, 19 nt, Artificial Sequence
  Description of Artificial Sequence: Synthetic oligonucleotide
  Sense strand starting at position 3361 of SEQ ID NO: 1887674
uccugagcuuugucucuaa

SEQ ID NO: 2488597 - RNA, 19 nt, Artificial Sequence
  Description of Artificial Sequence: Synthetic oligonucleotide
  Antisense strand to SEQ ID NO: 2488596
uuagagacaaagcucagga

SEQ ID NO: 2488598 - RNA, 19 nt, Artificial Sequence
  Description of Artificial Sequence: Synthetic oligonucleotide
  Sense strand starting at position 3364 of SEQ ID NO: 1887674
ugagcuuugucucuaaaga

SEQ ID NO: 2488599 - RNA, 19 nt, Artificial Sequence
  Description of Artificial Sequence: Synthetic oligonucleotide
  Antisense strand to SEQ ID NO: 2488598
ucuuuagagacaaagcuca

SEQ ID NO: 2488600 - RNA, 19 nt, Artificial Sequence
  Description of Artificial Sequence: Synthetic oligonucleotide
  Sense strand starting at position 3365 of SEQ ID NO: 1887674
gagcuuugucucuaaagag

SEQ ID NO: 2488601 - RNA, 19 nt, Artificial Sequence
  Description of Artificial Sequence: Synthetic oligonucleotide
  Antisense strand to SEQ ID NO: 2488600
cucuuuagagacaaagcuc

SEQ ID NO: 2488602 - RNA, 19 nt, Artificial Sequence
  Description of Artificial Sequence: Synthetic oligonucleotide
  Sense strand starting at position 3907 of SEQ ID NO: 1887674
uauugaagacuauguauug

SEQ ID NO: 2488603 - RNA, 19 nt, Artificial Sequence
  Description of Artificial Sequence: Synthetic oligonucleotide
  Antisense strand to SEQ ID NO: 2488602
caauacauagucuucaaua

SEQ ID NO: 2488604 - RNA, 19 nt, Artificial Sequence
  Description of Artificial Sequence: Synthetic oligonucleotide
  Sense strand starting at position 3916 of SEQ ID NO: 1887674
cuauguauuguacgcacaa

SEQ ID NO: 2488605 - RNA, 19 nt, Artificial Sequence
  Description of Artificial Sequence: Synthetic oligonucleotide
  Antisense strand to SEQ ID NO: 2488604
uugugcguacaauacauag

SEQ ID NO: 2488606 - RNA, 19 nt, Artificial Sequence
  Description of Artificial Sequence: Synthetic oligonucleotide
  Sense strand starting at position 3917 of SEQ ID NO: 1887674
uauguauuguacgcacaaa

SEQ ID NO: 2488607 - RNA, 19 nt, Artificial Sequence
  Description of Artificial Sequence: Synthetic oligonucleotide
  Antisense strand to SEQ ID NO: 2488606
uuugugcguacaauacaua

SEQ ID NO: 2488608 - RNA, 19 nt, Artificial Sequence
  Description of Artificial Sequence: Synthetic oligonucleotide
  Sense strand starting at position 13 of SEQ ID NO: 1887675
gagaucuucuugcuccagu

SEQ ID NO: 2488609 - RNA, 19 nt, Artificial Sequence
  Description of Artificial Sequence: Synthetic oligonucleotide
  Antisense strand to SEQ ID NO: 2488608
acuggagcaagaagaucuc

SEQ ID NO: 2488610 - RNA, 19 nt, Artificial Sequence
  Description of Artificial Sequence: Synthetic oligonucleotide
  Sense strand starting at position 14 of SEQ ID NO: 1887675
agaucuucuugcuccagua

SEQ ID NO: 2488611 - RNA, 19 nt, Artificial Sequence
  Description of Artificial Sequence: Synthetic oligonucleotide
  Antisense strand to SEQ ID NO: 2488610
uacuggagcaagaagaucu

SEQ ID NO: 2488612 - RNA, 19 nt, Artificial Sequence
  Description of Artificial Sequence: Synthetic oligonucleotide
  Sense strand starting at position 24 of SEQ ID NO: 1887675
gcuccaguacucuggguua

SEQ ID NO: 2488613 - RNA, 19 nt, Artificial Sequence
  Description of Artificial Sequence: Synthetic oligonucleotide
  Antisense strand to SEQ ID NO: 2488612
uaacccagaguacuggagc

SEQ ID NO: 2488614 - RNA, 19 nt, Artificial Sequence
  Description of Artificial Sequence: Synthetic oligonucleotide
  Sense strand starting at position 26 of SEQ ID NO: 1887675
uccaguacucuggguuauu

SEQ ID NO: 2488615 - RNA, 19 nt, Artificial Sequence
  Description of Artificial Sequence: Synthetic oligonucleotide
  Antisense strand to SEQ ID NO: 2488614
aauaacccagaguacugga

SEQ ID NO: 2488616 - RNA, 19 nt, Artificial Sequence
  Description of Artificial Sequence: Synthetic oligonucleotide
  Sense strand starting at position 445 of SEQ ID NO: 1887675
cccggcuuccugugauucu

SEQ ID NO: 2488617 - RNA, 19 nt, Artificial Sequence
  Description of Artificial Sequence: Synthetic oligonucleotide
  Antisense strand to SEQ ID NO: 2488616
agaaucacaggaagccggg

SEQ ID NO: 2488618 - RNA, 19 nt, Artificial Sequence
  Description of Artificial Sequence: Synthetic oligonucleotide
  Sense strand starting at position 623 of SEQ ID NO: 1887675
gauggaaucacagguguga

SEQ ID NO: 2488619 - RNA, 19 nt, Artificial Sequence
  Description of Artificial Sequence: Synthetic oligonucleotide
  Antisense strand to SEQ ID NO: 2488618
ucacaccugugauuccauc

SEQ ID NO: 2488620 - RNA, 19 nt, Artificial Sequence
  Description of Artificial Sequence: Synthetic oligonucleotide
  Sense strand starting at position 652 of SEQ ID NO: 1887675
ccagccuuguccuauacuu

SEQ ID NO: 2488621 - RNA, 19 nt, Artificial Sequence
  Description of Artificial Sequence: Synthetic oligonucleotide
  Antisense strand to SEQ ID NO: 2488620
aaguauaggacaaggcugg

SEQ ID NO: 2488622 - RNA, 19 nt, Artificial Sequence
  Description of Artificial Sequence: Synthetic oligonucleotide
  Sense strand starting at position 811 of SEQ ID NO: 1887675
cuuccuguacaugaguuaa

SEQ ID NO: 2488623 - RNA, 19 nt, Artificial Sequence
  Description of Artificial Sequence: Synthetic oligonucleotide
  Antisense strand to SEQ ID NO: 2488622
uuaacucauguacaggaag

SEQ ID NO: 2488624 - RNA, 19 nt, Artificial Sequence
  Description of Artificial Sequence: Synthetic oligonucleotide
  Sense strand starting at position 813 of SEQ ID NO: 1887675
uccuguacaugaguuaaua

SEQ ID NO: 2488625 - RNA, 19 nt, Artificial Sequence
  Description of Artificial Sequence: Synthetic oligonucleotide
  Antisense strand to SEQ ID NO: 2488624
uauuaacucauguacagga

SEQ ID NO: 2488626 - RNA, 19 nt, Artificial Sequence
  Description of Artificial Sequence: Synthetic oligonucleotide
  Sense strand starting at position 920 of SEQ ID NO: 1887675
gcccgucucguugcauaua

SEQ ID NO: 2488627 - RNA, 19 nt, Artificial Sequence
  Description of Artificial Sequence: Synthetic oligonucleotide
  Antisense strand to SEQ ID NO: 2488626
uauaugcaacgagacgggc

SEQ ID NO: 2488628 - RNA, 19 nt, Artificial Sequence
  Description of Artificial Sequence: Synthetic oligonucleotide
  Sense strand starting at position 1721 of SEQ ID NO: 1887675
gagagacuuugcuugcaaa

SEQ ID NO: 2488629 - RNA, 19 nt, Artificial Sequence
  Description of Artificial Sequence: Synthetic oligonucleotide
  Antisense strand to SEQ ID NO: 2488628
uuugcaagcaaagucucuc

SEQ ID NO: 2488630 - RNA, 19 nt, Artificial Sequence
  Description of Artificial Sequence: Synthetic oligonucleotide
  Sense strand starting at position 1810 of SEQ ID NO: 1887675
gagauccugucuuagaaug

SEQ ID NO: 2488631 - RNA, 19 nt, Artificial Sequence
  Description of Artificial Sequence: Synthetic oligonucleotide
  Antisense strand to SEQ ID NO: 2488630
cauucuaagacaggaucuc

SEQ ID NO: 2488632 - RNA, 19 nt, Artificial Sequence
  Description of Artificial Sequence: Synthetic oligonucleotide
  Sense strand starting at position 1812 of SEQ ID NO: 1887675
gauccugucuuagaaugaa

SEQ ID NO: 2488633 - RNA, 19 nt, Artificial Sequence
  Description of Artificial Sequence: Synthetic oligonucleotide
  Antisense strand to SEQ ID NO: 2488632
uucauucuaagacaggauc

SEQ ID NO: 2488634 - RNA, 19 nt, Artificial Sequence
  Description of Artificial Sequence: Synthetic oligonucleotide
  Sense strand starting at position 2189 of SEQ ID NO: 1887675
gggcaauccuucugaguuu

SEQ ID NO: 2488635 - RNA, 19 nt, Artificial Sequence
  Description of Artificial Sequence: Synthetic oligonucleotide
  Antisense strand to SEQ ID NO: 2488634
aaacucagaaggauugccc

SEQ ID NO: 2488636 - RNA, 19 nt, Artificial Sequence
  Description of Artificial Sequence: Synthetic oligonucleotide
  Sense strand starting at position 2225 of SEQ ID NO: 1887675
agcaaugcccacuagacau

SEQ ID NO: 2488637 - RNA, 19 nt, Artificial Sequence
  Description of Artificial Sequence: Synthetic oligonucleotide
  Antisense strand to SEQ ID NO: 2488636
augucuagugggcauugcu

SEQ ID NO: 2488638 - RNA, 19 nt, Artificial Sequence
  Description of Artificial Sequence: Synthetic oligonucleotide
  Sense strand starting at position 2302 of SEQ ID NO: 1887675
agccaacucucacuugagu

SEQ ID NO: 2488639 - RNA, 19 nt, Artificial Sequence
  Description of Artificial Sequence: Synthetic oligonucleotide
  Antisense strand to SEQ ID NO: 2488638
acucaagugagaguuggcu

SEQ ID NO: 2488640 - RNA, 19 nt, Artificial Sequence
  Description of Artificial Sequence: Synthetic oligonucleotide
  Sense strand starting at position 2360 of SEQ ID NO: 1887675
aguggaaucuaugauguuc

SEQ ID NO: 2488641 - RNA, 19 nt, Artificial Sequence
  Description of Artificial Sequence: Synthetic oligonucleotide
  Antisense strand to SEQ ID NO: 2488640
gaacaucauagauuccacu

SEQ ID NO: 2488642 - RNA, 19 nt, Artificial Sequence
  Description of Artificial Sequence: Synthetic oligonucleotide
  Sense strand starting at position 2421 of SEQ ID NO: 1887675
acuguagucuagguugacu

SEQ ID NO: 2488643 - RNA, 19 nt, Artificial Sequence
  Description of Artificial Sequence: Synthetic oligonucleotide
  Antisense strand to SEQ ID NO: 2488642
agucaaccuagacuacagu

SEQ ID NO: 2488644 - RNA, 19 nt, Artificial Sequence
  Description of Artificial Sequence: Synthetic oligonucleotide
  Sense strand starting at position 2426 of SEQ ID NO: 1887675
agucuagguugacucaaga

SEQ ID NO: 2488645 - RNA, 19 nt, Artificial Sequence
  Description of Artificial Sequence: Synthetic oligonucleotide
  Antisense strand to SEQ ID NO: 2488644
ucuugagucaaccuagacu

SEQ ID NO: 2488646 - RNA, 19 nt, Artificial Sequence
  Description of Artificial Sequence: Synthetic oligonucleotide
  Sense strand starting at position 2870 of SEQ ID NO: 1887675
ggaagcugccuucggcaau

SEQ ID NO: 2488647 - RNA, 19 nt, Artificial Sequence
  Description of Artificial Sequence: Synthetic oligonucleotide
  Antisense strand to SEQ ID NO: 2488646
auugccgaaggcagcuucc

SEQ ID NO: 2488648 - RNA, 19 nt, Artificial Sequence
  Description of Artificial Sequence: Synthetic oligonucleotide
  Sense strand starting at position 2893 of SEQ ID NO: 1887675
auaggagucuccuuuggaa

SEQ ID NO: 2488649 - RNA, 19 nt, Artificial Sequence
  Description of Artificial Sequence: Synthetic oligonucleotide
  Antisense strand to SEQ ID NO: 2488648
uuccaaaggagacuccuau

SEQ ID NO: 2488650 - RNA, 19 nt, Artificial Sequence
  Description of Artificial Sequence: Synthetic oligonucleotide
  Sense strand starting at position 2897 of SEQ ID NO: 1887675
gagucuccuuuggaagcua

SEQ ID NO: 2488651 - RNA, 19 nt, Artificial Sequence
  Description of Artificial Sequence: Synthetic oligonucleotide
  Antisense strand to SEQ ID NO: 2488650
uagcuuccaaaggagacuc

SEQ ID NO: 2488652 - RNA, 19 nt, Artificial Sequence
  Description of Artificial Sequence: Synthetic oligonucleotide
  Sense strand starting at position 3071 of SEQ ID NO: 1887675
gggcgggagucuuugucau

SEQ ID NO: 2488653 - RNA, 19 nt, Artificial Sequence
  Description of Artificial Sequence: Synthetic oligonucleotide
  Antisense strand to SEQ ID NO: 2488652
augacaaagacucccgccc

SEQ ID NO: 2488654 - RNA, 19 nt, Artificial Sequence
  Description of Artificial Sequence: Synthetic oligonucleotide
  Sense strand starting at position 3073 of SEQ ID NO: 1887675
gcgggagucuuugucauca

SEQ ID NO: 2488655 - RNA, 19 nt, Artificial Sequence
  Description of Artificial Sequence: Synthetic oligonucleotide
  Antisense strand to SEQ ID NO: 2488654
ugaugacaaagacucccgc

SEQ ID NO: 2488656 - RNA, 19 nt, Artificial Sequence
  Description of Artificial Sequence: Synthetic oligonucleotide
  Sense strand starting at position 3075 of SEQ ID NO: 1887675
gggagucuuugucaucaga

SEQ ID NO: 2488657 - RNA, 19 nt, Artificial Sequence
  Description of Artificial Sequence: Synthetic oligonucleotide
  Antisense strand to SEQ ID NO: 2488656
ucugaugacaaagacuccc

SEQ ID NO: 2488658 - RNA, 19 nt, Artificial Sequence
  Description of Artificial Sequence: Synthetic oligonucleotide
  Sense strand starting at position 3077 of SEQ ID NO: 1887675
gagucuuugucaucagauu

SEQ ID NO: 2488659 - RNA, 19 nt, Artificial Sequence
  Description of Artificial Sequence: Synthetic oligonucleotide
  Antisense strand to SEQ ID NO: 2488658
aaucugaugacaaagacuc

SEQ ID NO: 2488660 - RNA, 19 nt, Artificial Sequence
  Description of Artificial Sequence: Synthetic oligonucleotide
  Sense strand starting at position 3078 of SEQ ID NO: 1887675
agucuuugucaucagauuc

SEQ ID NO: 2488661 - RNA, 19 nt, Artificial Sequence
  Description of Artificial Sequence: Synthetic oligonucleotide
  Antisense strand to SEQ ID NO: 2488660
gaaucugaugacaaagacu

SEQ ID NO: 2488662 - RNA, 19 nt, Artificial Sequence
  Description of Artificial Sequence: Synthetic oligonucleotide
  Sense strand starting at position 3138 of SEQ ID NO: 1887675
gguucucucuaccagaaga

SEQ ID NO: 2488663 - RNA, 19 nt, Artificial Sequence
  Description of Artificial Sequence: Synthetic oligonucleotide
  Antisense strand to SEQ ID NO: 2488662
ucuucugguagagagaacc

SEQ ID NO: 2488664 - RNA, 19 nt, Artificial Sequence
  Description of Artificial Sequence: Synthetic oligonucleotide
  Sense strand starting at position 3160 of SEQ ID NO: 1887675
agacuccguccagaucaaa

SEQ ID NO: 2488665 - RNA, 19 nt, Artificial Sequence
  Description of Artificial Sequence: Synthetic oligonucleotide
  Antisense strand to SEQ ID NO: 2488664
uuugaucuggacggagucu

SEQ ID NO: 2488666 - RNA, 19 nt, Artificial Sequence
  Description of Artificial Sequence: Synthetic oligonucleotide
  Sense strand starting at position 3179 of SEQ ID NO: 1887675
cccaaauugucgccaguua

SEQ ID NO: 2488667 - RNA, 19 nt, Artificial Sequence
  Description of Artificial Sequence: Synthetic oligonucleotide
  Antisense strand to SEQ ID NO: 2488666
uaacuggcgacaauuuggg

SEQ ID NO: 2488668 - RNA, 19 nt, Artificial Sequence
  Description of Artificial Sequence: Synthetic oligonucleotide
  Sense strand starting at position 3183 of SEQ ID NO: 1887675
aauugucgccaguuagcga

SEQ ID NO: 2488669 - RNA, 19 nt, Artificial Sequence
  Description of Artificial Sequence: Synthetic oligonucleotide
  Antisense strand to SEQ ID NO: 2488668
ucgcuaacuggcgacaauu

SEQ ID NO: 2488670 - RNA, 19 nt, Artificial Sequence
  Description of Artificial Sequence: Synthetic oligonucleotide
  Sense strand starting at position 3243 of SEQ ID NO: 1887675
ggugcaaugcccugguguu

SEQ ID NO: 2488671 - RNA, 19 nt, Artificial Sequence
  Description of Artificial Sequence: Synthetic oligonucleotide
  Antisense strand to SEQ ID NO: 2488670
aacaccagggcauugcacc

SEQ ID NO: 2488672 - RNA, 19 nt, Artificial Sequence
  Description of Artificial Sequence: Synthetic oligonucleotide
  Sense strand starting at position 3346 of SEQ ID NO: 1887675
uugugagcuucccaggcau

SEQ ID NO: 2488673 - RNA, 19 nt, Artificial Sequence
  Description of Artificial Sequence: Synthetic oligonucleotide
  Antisense strand to SEQ ID NO: 2488672
augccugggaagcucacaa

SEQ ID NO: 2488674 - RNA, 19 nt, Artificial Sequence
  Description of Artificial Sequence: Synthetic oligonucleotide
  Sense strand starting at position 3348 of SEQ ID NO: 1887675
gugagcuucccaggcauca

SEQ ID NO: 2488675 - RNA, 19 nt, Artificial Sequence
  Description of Artificial Sequence: Synthetic oligonucleotide
  Antisense strand to SEQ ID NO: 2488674
ugaugccugggaagcucac

SEQ ID NO: 2488676 - RNA, 19 nt, Artificial Sequence
  Description of Artificial Sequence: Synthetic oligonucleotide
  Sense strand starting at position 3540 of SEQ ID NO: 1887675
augugacaugcccacaaga

SEQ ID NO: 2488677 - RNA, 19 nt, Artificial Sequence
  Description of Artificial Sequence: Synthetic oligonucleotide
  Antisense strand to SEQ ID NO: 2488676
ucuugugggcaugucacau

SEQ ID NO: 2488678 - RNA, 19 nt, Artificial Sequence
  Description of Artificial Sequence: Synthetic oligonucleotide
  Sense strand starting at position 3618 of SEQ ID NO: 1887675
gugggaacugacugcaaau

SEQ ID NO: 2488679 - RNA, 19 nt, Artificial Sequence
  Description of Artificial Sequence: Synthetic oligonucleotide
  Antisense strand to SEQ ID NO: 2488678
auuugcagucaguucccac

SEQ ID NO: 2488680 - RNA, 19 nt, Artificial Sequence
  Description of Artificial Sequence: Synthetic oligonucleotide
  Sense strand starting at position 3666 of SEQ ID NO: 1887675
ucuccugaacuagaauguu

SEQ ID NO: 2488681 - RNA, 19 nt, Artificial Sequence
  Description of Artificial Sequence: Synthetic oligonucleotide
  Antisense strand to SEQ ID NO: 2488680
aacauucuaguucaggaga

SEQ ID NO: 2488682 - RNA, 19 nt, Artificial Sequence
  Description of Artificial Sequence: Synthetic oligonucleotide
  Sense strand starting at position 3675 of SEQ ID NO: 1887675
cuagaauguuggugguuga

SEQ ID NO: 2488683 - RNA, 19 nt, Artificial Sequence
  Description of Artificial Sequence: Synthetic oligonucleotide
  Antisense strand to SEQ ID NO: 2488682
ucaaccaccaacauucuag

SEQ ID NO: 2488684 - RNA, 19 nt, Artificial Sequence
  Description of Artificial Sequence: Synthetic oligonucleotide
  Sense strand starting at position 3676 of SEQ ID NO: 1887675
uagaauguuggugguugaa

SEQ ID NO: 2488685 - RNA, 19 nt, Artificial Sequence
  Description of Artificial Sequence: Synthetic oligonucleotide
  Antisense strand to SEQ ID NO: 2488684
uucaaccaccaacauucua

SEQ ID NO: 2488686 - RNA, 19 nt, Artificial Sequence
  Description of Artificial Sequence: Synthetic oligonucleotide
  Sense strand starting at position 3940 of SEQ ID NO: 1887675
caguuacuccaguggcaga

SEQ ID NO: 2488687 - RNA, 19 nt, Artificial Sequence
  Description of Artificial Sequence: Synthetic oligonucleotide
  Antisense strand to SEQ ID NO: 2488686
ucugccacuggaguaacug

SEQ ID NO: 2488688 - RNA, 19 nt, Artificial Sequence
  Description of Artificial Sequence: Synthetic oligonucleotide
  Sense strand starting at position 9 of SEQ ID NO: 1887676
gcucaugugcccuacauuu

SEQ ID NO: 2488689 - RNA, 19 nt, Artificial Sequence
  Description of Artificial Sequence: Synthetic oligonucleotide
  Antisense strand to SEQ ID NO: 2488688
aaauguagggcacaugagc

SEQ ID NO: 2488690 - RNA, 19 nt, Artificial Sequence
  Description of Artificial Sequence: Synthetic oligonucleotide
  Sense strand starting at position 78 of SEQ ID NO: 1887676
gcucuugcuacguagugaa

SEQ ID NO: 2488691 - RNA, 19 nt, Artificial Sequence
  Description of Artificial Sequence: Synthetic oligonucleotide
  Antisense strand to SEQ ID NO: 2488690
uucacuacguagcaagagc

SEQ ID NO: 2488692 - RNA, 19 nt, Artificial Sequence
  Description of Artificial Sequence: Synthetic oligonucleotide
  Sense strand starting at position 327 of SEQ ID NO: 1887676
ugucccaugugacaauuau

SEQ ID NO: 2488693 - RNA, 19 nt, Artificial Sequence
  Description of Artificial Sequence: Synthetic oligonucleotide
  Antisense strand to SEQ ID NO: 2488692
auaauugucacaugggaca

SEQ ID NO: 2488694 - RNA, 19 nt, Artificial Sequence
  Description of Artificial Sequence: Synthetic oligonucleotide
  Sense strand starting at position 357 of SEQ ID NO: 1887676
agacucaucuugucuacca

SEQ ID NO: 2488695 - RNA, 19 nt, Artificial Sequence
  Description of Artificial Sequence: Synthetic oligonucleotide
  Antisense strand to SEQ ID NO: 2488694
ugguagacaagaugagucu

SEQ ID NO: 2488696 - RNA, 19 nt, Artificial Sequence
  Description of Artificial Sequence: Synthetic oligonucleotide
  Sense strand starting at position 372 of SEQ ID NO: 1887676
accauaguuuguuucucau

SEQ ID NO: 2488697 - RNA, 19 nt, Artificial Sequence
  Description of Artificial Sequence: Synthetic oligonucleotide
  Antisense strand to SEQ ID NO: 2488696
augagaaacaaacuauggu

SEQ ID NO: 2488698 - RNA, 19 nt, Artificial Sequence
  Description of Artificial Sequence: Synthetic oligonucleotide
  Sense strand starting at position 430 of SEQ ID NO: 1887676
agccuuuaaaugcgaggua

SEQ ID NO: 2488699 - RNA, 19 nt, Artificial Sequence
  Description of Artificial Sequence: Synthetic oligonucleotide
  Antisense strand to SEQ ID NO: 2488698
uaccucgcauuuaaaggcu

SEQ ID NO: 2488700 - RNA, 19 nt, Artificial Sequence
  Description of Artificial Sequence: Synthetic oligonucleotide
  Sense strand starting at position 452 of SEQ ID NO: 1887676
uggguucauuacccgaaga

SEQ ID NO: 2488701 - RNA, 19 nt, Artificial Sequence
  Description of Artificial Sequence: Synthetic oligonucleotide
  Antisense strand to SEQ ID NO: 2488700
ucuucggguaaugaaccca

SEQ ID NO: 2488702 - RNA, 19 nt, Artificial Sequence
  Description of Artificial Sequence: Synthetic oligonucleotide
  Sense strand starting at position 486 of SEQ ID NO: 1887676
ggaagcugcagucaaagaa

SEQ ID NO: 2488703 - RNA, 19 nt, Artificial Sequence
  Description of Artificial Sequence: Synthetic oligonucleotide
  Antisense strand to SEQ ID NO: 2488702
uucuuugacugcagcuucc

SEQ ID NO: 2488704 - RNA, 19 nt, Artificial Sequence
  Description of Artificial Sequence: Synthetic oligonucleotide
  Sense strand starting at position 569 of SEQ ID NO: 1887676
gcucuauuccgagaaacga

SEQ ID NO: 2488705 - RNA, 19 nt, Artificial Sequence
  Description of Artificial Sequence: Synthetic oligonucleotide
  Antisense strand to SEQ ID NO: 2488704
ucguuucucggaauagagc

SEQ ID NO: 2488706 - RNA, 19 nt, Artificial Sequence
  Description of Artificial Sequence: Synthetic oligonucleotide
  Sense strand starting at position 588 of SEQ ID NO: 1887676
cggcaaguuguuggagaga

SEQ ID NO: 2488707 - RNA, 19 nt, Artificial Sequence
  Description of Artificial Sequence: Synthetic oligonucleotide
  Antisense strand to SEQ ID NO: 2488706
ucucuccaacaacuugccg

SEQ ID NO: 2488708 - RNA, 19 nt, Artificial Sequence
  Description of Artificial Sequence: Synthetic oligonucleotide
  Sense strand starting at position 685 of SEQ ID NO: 1887676
ggacauccauuugagauua

SEQ ID NO: 2488709 - RNA, 19 nt, Artificial Sequence
  Description of Artificial Sequence: Synthetic oligonucleotide
  Antisense strand to SEQ ID NO: 2488708
uaaucucaaauggaugucc

SEQ ID NO: 2488710 - RNA, 19 nt, Artificial Sequence
  Description of Artificial Sequence: Synthetic oligonucleotide
  Sense strand starting at position 995 of SEQ ID NO: 1887676
aggaaaugauuucgauuga

SEQ ID NO: 2488711 - RNA, 19 nt, Artificial Sequence
  Description of Artificial Sequence: Synthetic oligonucleotide
  Antisense strand to SEQ ID NO: 2488710
ucaaucgaaaucauuuccu

SEQ ID NO: 2488712 - RNA, 19 nt, Artificial Sequence
  Description of Artificial Sequence: Synthetic oligonucleotide
  Sense strand starting at position 996 of SEQ ID NO: 1887676
ggaaaugauuucgauugau

SEQ ID NO: 2488713 - RNA, 19 nt, Artificial Sequence
  Description of Artificial Sequence: Synthetic oligonucleotide
  Antisense strand to SEQ ID NO: 2488712
aucaaucgaaaucauuucc

SEQ ID NO: 2488714 - RNA, 19 nt, Artificial Sequence
  Description of Artificial Sequence: Synthetic oligonucleotide
  Sense strand starting at position 1005 of SEQ ID NO: 1887676
uucgauugauuacacuaaa

SEQ ID NO: 2488715 - RNA, 19 nt, Artificial Sequence
  Description of Artificial Sequence: Synthetic oligonucleotide
  Antisense strand to SEQ ID NO: 2488714
uuuaguguaaucaaucgaa

SEQ ID NO: 2488716 - RNA, 19 nt, Artificial Sequence
  Description of Artificial Sequence: Synthetic oligonucleotide
  Sense strand starting at position 1016 of SEQ ID NO: 1887676
acacuaaauugaugggaga

SEQ ID NO: 2488717 - RNA, 19 nt, Artificial Sequence
  Description of Artificial Sequence: Synthetic oligonucleotide
  Antisense strand to SEQ ID NO: 2488716
ucucccaucaauuuagugu

SEQ ID NO: 2488718 - RNA, 19 nt, Artificial Sequence
  Description of Artificial Sequence: Synthetic oligonucleotide
  Sense strand starting at position 1076 of SEQ ID NO: 1887676
ggugccauguaaucuguuu

SEQ ID NO: 2488719 - RNA, 19 nt, Artificial Sequence
  Description of Artificial Sequence: Synthetic oligonucleotide
  Antisense strand to SEQ ID NO: 2488718
aaacagauuacauggcacc

SEQ ID NO: 2488720 - RNA, 19 nt, Artificial Sequence
  Description of Artificial Sequence: Synthetic oligonucleotide
  Sense strand starting at position 1140 of SEQ ID NO: 1887676
uggcuauucgaagguguga

SEQ ID NO: 2488721 - RNA, 19 nt, Artificial Sequence
  Description of Artificial Sequence: Synthetic oligonucleotide
  Antisense strand to SEQ ID NO: 2488720
ucacaccuucgaauagcca

SEQ ID NO: 2488722 - RNA, 19 nt, Artificial Sequence
  Description of Artificial Sequence: Synthetic oligonucleotide
  Sense strand starting at position 1142 of SEQ ID NO: 1887676
gcuauucgaaggugugauc

SEQ ID NO: 2488723 - RNA, 19 nt, Artificial Sequence
  Description of Artificial Sequence: Synthetic oligonucleotide
  Antisense strand to SEQ ID NO: 2488722
gaucacaccuucgaauagc

SEQ ID NO: 2488724 - RNA, 19 nt, Artificial Sequence
  Description of Artificial Sequence: Synthetic oligonucleotide
  Sense strand starting at position 1155 of SEQ ID NO: 1887676
gugaucagugcaugguaca

SEQ ID NO: 2488725 - RNA, 19 nt, Artificial Sequence
  Description of Artificial Sequence: Synthetic oligonucleotide
  Antisense strand to SEQ ID NO: 2488724
uguaccaugcacugaucac

SEQ ID NO: 2488726 - RNA, 19 nt, Artificial Sequence
  Description of Artificial Sequence: Synthetic oligonucleotide
  Sense strand starting at position 1166 of SEQ ID NO: 1887676
augguacagucuggaaauc

SEQ ID NO: 2488727 - RNA, 19 nt, Artificial Sequence
  Description of Artificial Sequence: Synthetic oligonucleotide
  Antisense strand to SEQ ID NO: 2488726
gauuuccagacuguaccau

SEQ ID NO: 2488728 - RNA, 19 nt, Artificial Sequence
  Description of Artificial Sequence: Synthetic oligonucleotide
  Sense strand starting at position 1249 of SEQ ID NO: 1887676
gucaacucucuuugaaaug

SEQ ID NO: 2488729 - RNA, 19 nt, Artificial Sequence
  Description of Artificial Sequence: Synthetic oligonucleotide
  Antisense strand to SEQ ID NO: 2488728
cauuucaaagagaguugac

SEQ ID NO: 2488730 - RNA, 19 nt, Artificial Sequence
  Description of Artificial Sequence: Synthetic oligonucleotide
  Sense strand starting at position 1302 of SEQ ID NO: 1887676
ccacauaagcuguggagau

SEQ ID NO: 2488731 - RNA, 19 nt, Artificial Sequence
  Description of Artificial Sequence: Synthetic oligonucleotide
  Antisense strand to SEQ ID NO: 2488730
aucuccacagcuuaugugg

SEQ ID NO: 2488732 - RNA, 19 nt, Artificial Sequence
  Description of Artificial Sequence: Synthetic oligonucleotide
  Sense strand starting at position 1319 of SEQ ID NO: 1887676
augagacuauccugggaaa

SEQ ID NO: 2488733 - RNA, 19 nt, Artificial Sequence
  Description of Artificial Sequence: Synthetic oligonucleotide
  Antisense strand to SEQ ID NO: 2488732
uuucccaggauagucucau

SEQ ID NO: 2488734 - RNA, 19 nt, Artificial Sequence
  Description of Artificial Sequence: Synthetic oligonucleotide
  Sense strand starting at position 1581 of SEQ ID NO: 1887676
ggcggugggugcuuauaau

SEQ ID NO: 2488735 - RNA, 19 nt, Artificial Sequence
  Description of Artificial Sequence: Synthetic oligonucleotide
  Antisense strand to SEQ ID NO: 2488734
auuauaagcacccaccgcc

SEQ ID NO: 2488736 - RNA, 19 nt, Artificial Sequence
  Description of Artificial Sequence: Synthetic oligonucleotide
  Sense strand starting at position 1624 of SEQ ID NO: 1887676
gggagaaugucuggaaccu

SEQ ID NO: 2488737 - RNA, 19 nt, Artificial Sequence
  Description of Artificial Sequence: Synthetic oligonucleotide
  Antisense strand to SEQ ID NO: 2488736
agguuccagacauucuccc

SEQ ID NO: 2488738 - RNA, 19 nt, Artificial Sequence
  Description of Artificial Sequence: Synthetic oligonucleotide
  Sense strand starting at position 1658 of SEQ ID NO: 1887676
uggagauccugccacugua

SEQ ID NO: 2488739 - RNA, 19 nt, Artificial Sequence
  Description of Artificial Sequence: Synthetic oligonucleotide
  Antisense strand to SEQ ID NO: 2488738
uacaguggcaggaucucca

SEQ ID NO: 2488740 - RNA, 19 nt, Artificial Sequence
  Description of Artificial Sequence: Synthetic oligonucleotide
  Sense strand starting at position 2030 of SEQ ID NO: 1887676
gauguugcuguuggaauuu

SEQ ID NO: 2488741 - RNA, 19 nt, Artificial Sequence
  Description of Artificial Sequence: Synthetic oligonucleotide
  Antisense strand to SEQ ID NO: 2488740
aaauuccaacagcaacauc

SEQ ID NO: 2488742 - RNA, 19 nt, Artificial Sequence
  Description of Artificial Sequence: Synthetic oligonucleotide
  Sense strand starting at position 2789 of SEQ ID NO: 1887676
ugugguucaugccugcaga

SEQ ID NO: 2488743 - RNA, 19 nt, Artificial Sequence
  Description of Artificial Sequence: Synthetic oligonucleotide
  Antisense strand to SEQ ID NO: 2488742
ucugcaggcaugaaccaca

SEQ ID NO: 2488744 - RNA, 19 nt, Artificial Sequence
  Description of Artificial Sequence: Synthetic oligonucleotide
  Sense strand starting at position 2790 of SEQ ID NO: 1887676
gugguucaugccugcagau

SEQ ID NO: 2488745 - RNA, 19 nt, Artificial Sequence
  Description of Artificial Sequence: Synthetic oligonucleotide
  Antisense strand to SEQ ID NO: 2488744
aucugcaggcaugaaccac

SEQ ID NO: 2488746 - RNA, 19 nt, Artificial Sequence
  Description of Artificial Sequence: Synthetic oligonucleotide
  Sense strand starting at position 2953 of SEQ ID NO: 1887676
aagaguauucucuguguug

SEQ ID NO: 2488747 - RNA, 19 nt, Artificial Sequence
  Description of Artificial Sequence: Synthetic oligonucleotide
  Antisense strand to SEQ ID NO: 2488746
caacacagagaauacucuu

SEQ ID NO: 2488748 - RNA, 19 nt, Artificial Sequence
  Description of Artificial Sequence: Synthetic oligonucleotide
  Sense strand starting at position 3140 of SEQ ID NO: 1887676
ucuggaagcugggucauaa

SEQ ID NO: 2488749 - RNA, 19 nt, Artificial Sequence
  Description of Artificial Sequence: Synthetic oligonucleotide
  Antisense strand to SEQ ID NO: 2488748
uuaugacccagcuuccaga

SEQ ID NO: 2488750 - RNA, 19 nt, Artificial Sequence
  Description of Artificial Sequence: Synthetic oligonucleotide
  Sense strand starting at position 3144 of SEQ ID NO: 1887676
gaagcugggucauaagaau

SEQ ID NO: 2488751 - RNA, 19 nt, Artificial Sequence
  Description of Artificial Sequence: Synthetic oligonucleotide
  Antisense strand to SEQ ID NO: 2488750
auucuuaugacccagcuuc

SEQ ID NO: 2488752 - RNA, 19 nt, Artificial Sequence
  Description of Artificial Sequence: Synthetic oligonucleotide
  Sense strand starting at position 3184 of SEQ ID NO: 1887676
gcaugcaaugagugguguu

SEQ ID NO: 2488753 - RNA, 19 nt, Artificial Sequence
  Description of Artificial Sequence: Synthetic oligonucleotide
  Antisense strand to SEQ ID NO: 2488752
aacaccacucauugcaugc

SEQ ID NO: 2488754 - RNA, 19 nt, Artificial Sequence
  Description of Artificial Sequence: Synthetic oligonucleotide
  Sense strand starting at position 3223 of SEQ ID NO: 1887676
ugggucacagugugagauu

SEQ ID NO: 2488755 - RNA, 19 nt, Artificial Sequence
  Description of Artificial Sequence: Synthetic oligonucleotide
  Antisense strand to SEQ ID NO: 2488754
aaucucacacugugaccca

SEQ ID NO: 2488756 - RNA, 19 nt, Artificial Sequence
  Description of Artificial Sequence: Synthetic oligonucleotide
  Sense strand starting at position 3224 of SEQ ID NO: 1887676
gggucacagugugagauua

SEQ ID NO: 2488757 - RNA, 19 nt, Artificial Sequence
  Description of Artificial Sequence: Synthetic oligonucleotide
  Antisense strand to SEQ ID NO: 2488756
uaaucucacacugugaccc

SEQ ID NO: 2488758 - RNA, 19 nt, Artificial Sequence
  Description of Artificial Sequence: Synthetic oligonucleotide
  Sense strand starting at position 3266 of SEQ ID NO: 1887676
gcccaagagaucuagguua

SEQ ID NO: 2488759 - RNA, 19 nt, Artificial Sequence
  Description of Artificial Sequence: Synthetic oligonucleotide
  Antisense strand to SEQ ID NO: 2488758
uaaccuagaucucuugggc

SEQ ID NO: 2488760 - RNA, 19 nt, Artificial Sequence
  Description of Artificial Sequence: Synthetic oligonucleotide
  Sense strand starting at position 3365 of SEQ ID NO: 1887676
auccaacucugaugauaag

SEQ ID NO: 2488761 - RNA, 19 nt, Artificial Sequence
  Description of Artificial Sequence: Synthetic oligonucleotide
  Antisense strand to SEQ ID NO: 2488760
cuuaucaucagaguuggau

SEQ ID NO: 2488762 - RNA, 19 nt, Artificial Sequence
  Description of Artificial Sequence: Synthetic oligonucleotide
  Sense strand starting at position 3392 of SEQ ID NO: 1887676
gcaaauguauuauugccaa

SEQ ID NO: 2488763 - RNA, 19 nt, Artificial Sequence
  Description of Artificial Sequence: Synthetic oligonucleotide
  Antisense strand to SEQ ID NO: 2488762
uuggcaauaauacauuugc

SEQ ID NO: 2488764 - RNA, 19 nt, Artificial Sequence
  Description of Artificial Sequence: Synthetic oligonucleotide
  Sense strand starting at position 3396 of SEQ ID NO: 1887676
auguauuauugccaagauc

SEQ ID NO: 2488765 - RNA, 19 nt, Artificial Sequence
  Description of Artificial Sequence: Synthetic oligonucleotide
  Antisense strand to SEQ ID NO: 2488764
gaucuuggcaauaauacau

SEQ ID NO: 2488766 - RNA, 19 nt, Artificial Sequence
  Description of Artificial Sequence: Synthetic oligonucleotide
  Sense strand starting at position 3755 of SEQ ID NO: 1887676
agcaauaccugcuagacau

SEQ ID NO: 2488767 - RNA, 19 nt, Artificial Sequence
  Description of Artificial Sequence: Synthetic oligonucleotide
  Antisense strand to SEQ ID NO: 2488766
augucuagcagguauugcu

SEQ ID NO: 2488768 - RNA, 19 nt, Artificial Sequence
  Description of Artificial Sequence: Synthetic oligonucleotide
  Sense strand starting at position 203 of SEQ ID NO: 1887677
aauuuagugucagggacaa

SEQ ID NO: 2488769 - RNA, 19 nt, Artificial Sequence
  Description of Artificial Sequence: Synthetic oligonucleotide
  Antisense strand to SEQ ID NO: 2488768
uugucccugacacuaaauu

SEQ ID NO: 2488770 - RNA, 19 nt, Artificial Sequence
  Description of Artificial Sequence: Synthetic oligonucleotide
  Sense strand starting at position 278 of SEQ ID NO: 1887677
auugacauccauugggauu

SEQ ID NO: 2488771 - RNA, 19 nt, Artificial Sequence
  Description of Artificial Sequence: Synthetic oligonucleotide
  Antisense strand to SEQ ID NO: 2488770
aaucccaauggaugucaau

SEQ ID NO: 2488772 - RNA, 19 nt, Artificial Sequence
  Description of Artificial Sequence: Synthetic oligonucleotide
  Sense strand starting at position 281 of SEQ ID NO: 1887677
gacauccauugggauuaca

SEQ ID NO: 2488773 - RNA, 19 nt, Artificial Sequence
  Description of Artificial Sequence: Synthetic oligonucleotide
  Antisense strand to SEQ ID NO: 2488772
uguaaucccaauggauguc

SEQ ID NO: 2488774 - RNA, 19 nt, Artificial Sequence
  Description of Artificial Sequence: Synthetic oligonucleotide
  Sense strand starting at position 310 of SEQ ID NO: 1887677
gauagauguggaggccuau

SEQ ID NO: 2488775 - RNA, 19 nt, Artificial Sequence
  Description of Artificial Sequence: Synthetic oligonucleotide
  Antisense strand to SEQ ID NO: 2488774
auaggccuccacaucuauc

SEQ ID NO: 2488776 - RNA, 19 nt, Artificial Sequence
  Description of Artificial Sequence: Synthetic oligonucleotide
  Sense strand starting at position 618 of SEQ ID NO: 1887677
uuacucuccuaaugaagga

SEQ ID NO: 2488777 - RNA, 19 nt, Artificial Sequence
  Description of Artificial Sequence: Synthetic oligonucleotide
  Antisense strand to SEQ ID NO: 2488776
uccuucauuaggagaguaa

SEQ ID NO: 2488778 - RNA, 19 nt, Artificial Sequence
  Description of Artificial Sequence: Synthetic oligonucleotide
  Sense strand starting at position 635 of SEQ ID NO: 1887677
gaaacaugguuuggauuga

SEQ ID NO: 2488779 - RNA, 19 nt, Artificial Sequence
  Description of Artificial Sequence: Synthetic oligonucleotide
  Antisense strand to SEQ ID NO: 2488778
ucaauccaaaccauguuuc

SEQ ID NO: 2488780 - RNA, 19 nt, Artificial Sequence
  Description of Artificial Sequence: Synthetic oligonucleotide
  Sense strand starting at position 636 of SEQ ID NO: 1887677
aaacaugguuuggauugau

SEQ ID NO: 2488781 - RNA, 19 nt, Artificial Sequence
  Description of Artificial Sequence: Synthetic oligonucleotide
  Antisense strand to SEQ ID NO: 2488780
aucaauccaaaccauguuu

SEQ ID NO: 2488782 - RNA, 19 nt, Artificial Sequence
  Description of Artificial Sequence: Synthetic oligonucleotide
  Sense strand starting at position 639 of SEQ ID NO: 1887677
caugguuuggauugauuaa

SEQ ID NO: 2488783 - RNA, 19 nt, Artificial Sequence
  Description of Artificial Sequence: Synthetic oligonucleotide
  Antisense strand to SEQ ID NO: 2488782
uuaaucaauccaaaccaug

SEQ ID NO: 2488784 - RNA, 19 nt, Artificial Sequence
  Description of Artificial Sequence: Synthetic oligonucleotide
  Sense strand starting at position 720 of SEQ ID NO: 1887677
uggcauguaaucugcguuu

SEQ ID NO: 2488785 - RNA, 19 nt, Artificial Sequence
  Description of Artificial Sequence: Synthetic oligonucleotide
  Antisense strand to SEQ ID NO: 2488784
aaacgcagauuacaugcca

SEQ ID NO: 2488786 - RNA, 19 nt, Artificial Sequence
  Description of Artificial Sequence: Synthetic oligonucleotide
  Sense strand starting at position 798 of SEQ ID NO: 1887677
gugaucagugcaugguaua

SEQ ID NO: 2488787 - RNA, 19 nt, Artificial Sequence
  Description of Artificial Sequence: Synthetic oligonucleotide
  Antisense strand to SEQ ID NO: 2488786
uauaccaugcacugaucac

SEQ ID NO: 2488788 - RNA, 19 nt, Artificial Sequence
  Description of Artificial Sequence: Synthetic oligonucleotide
  Sense strand starting at position 888 of SEQ ID NO: 1887677
ggccgugucaccuaucuuu

SEQ ID NO: 2488789 - RNA, 19 nt, Artificial Sequence
  Description of Artificial Sequence: Synthetic oligonucleotide
  Antisense strand to SEQ ID NO: 2488788
aaagauaggugacacggcc

SEQ ID NO: 2488790 - RNA, 19 nt, Artificial Sequence
  Description of Artificial Sequence: Synthetic oligonucleotide
  Sense strand starting at position 891 of SEQ ID NO: 1887677
cgugucaccuaucuuugaa

SEQ ID NO: 2488791 - RNA, 19 nt, Artificial Sequence
  Description of Artificial Sequence: Synthetic oligonucleotide
  Antisense strand to SEQ ID NO: 2488790
uucaaagauaggugacacg

SEQ ID NO: 2488792 - RNA, 19 nt, Artificial Sequence
  Description of Artificial Sequence: Synthetic oligonucleotide
  Sense strand starting at position 894 of SEQ ID NO: 1887677
gucaccuaucuuugaaaug

SEQ ID NO: 2488793 - RNA, 19 nt, Artificial Sequence
  Description of Artificial Sequence: Synthetic oligonucleotide
  Antisense strand to SEQ ID NO: 2488792
cauuucaaagauaggugac

SEQ ID NO: 2488794 - RNA, 19 nt, Artificial Sequence
  Description of Artificial Sequence: Synthetic oligonucleotide
  Sense strand starting at position 1208 of SEQ ID NO: 1887677
ccagcuauuugcgaggcua

SEQ ID NO: 2488795 - RNA, 19 nt, Artificial Sequence
  Description of Artificial Sequence: Synthetic oligonucleotide
  Antisense strand to SEQ ID NO: 2488794
uagccucgcaaauagcugg

SEQ ID NO: 2488796 - RNA, 19 nt, Artificial Sequence
  Description of Artificial Sequence: Synthetic oligonucleotide
  Sense strand starting at position 1210 of SEQ ID NO: 1887677
agcuauuugcgaggcuaag

SEQ ID NO: 2488797 - RNA, 19 nt, Artificial Sequence
  Description of Artificial Sequence: Synthetic oligonucleotide
  Antisense strand to SEQ ID NO: 2488796
cuuagccucgcaaauagcu

SEQ ID NO: 2488798 - RNA, 19 nt, Artificial Sequence
  Description of Artificial Sequence: Synthetic oligonucleotide
  Sense strand starting at position 1300 of SEQ ID NO: 1887677
gggaguuacagugagugga

SEQ ID NO: 2488799 - RNA, 19 nt, Artificial Sequence
  Description of Artificial Sequence: Synthetic oligonucleotide
  Antisense strand to SEQ ID NO: 2488798
uccacucacuguaacuccc

SEQ ID NO: 2488800 - RNA, 19 nt, Artificial Sequence
  Description of Artificial Sequence: Synthetic oligonucleotide
  Sense strand starting at position 1638 of SEQ ID NO: 1887677
cugagauuccgccacugga

SEQ ID NO: 2488801 - RNA, 19 nt, Artificial Sequence
  Description of Artificial Sequence: Synthetic oligonucleotide
  Antisense strand to SEQ ID NO: 2488800
uccaguggcggaaucucag

SEQ ID NO: 2488802 - RNA, 19 nt, Artificial Sequence
  Description of Artificial Sequence: Synthetic oligonucleotide
  Sense strand starting at position 1839 of SEQ ID NO: 1887677
auccaagccugauaagcau

SEQ ID NO: 2488803 - RNA, 19 nt, Artificial Sequence
  Description of Artificial Sequence: Synthetic oligonucleotide
  Antisense strand to SEQ ID NO: 2488802
augcuuaucaggcuuggau

SEQ ID NO: 2488804 - RNA, 19 nt, Artificial Sequence
  Description of Artificial Sequence: Synthetic oligonucleotide
  Sense strand starting at position 1850 of SEQ ID NO: 1887677
auaagcaugcucugcgaau

SEQ ID NO: 2488805 - RNA, 19 nt, Artificial Sequence
  Description of Artificial Sequence: Synthetic oligonucleotide
  Antisense strand to SEQ ID NO: 2488804
auucgcagagcaugcuuau

SEQ ID NO: 2488806 - RNA, 19 nt, Artificial Sequence
  Description of Artificial Sequence: Synthetic oligonucleotide
  Sense strand starting at position 1851 of SEQ ID NO: 1887677
uaagcaugcucugcgaaug

SEQ ID NO: 2488807 - RNA, 19 nt, Artificial Sequence
  Description of Artificial Sequence: Synthetic oligonucleotide
  Antisense strand to SEQ ID NO: 2488806
cauucgcagagcaugcuua

SEQ ID NO: 2488808 - RNA, 19 nt, Artificial Sequence
  Description of Artificial Sequence: Synthetic oligonucleotide
  Sense strand starting at position 1852 of SEQ ID NO: 1887677
aagcaugcucugcgaaugu

SEQ ID NO: 2488809 - RNA, 19 nt, Artificial Sequence
  Description of Artificial Sequence: Synthetic oligonucleotide
  Antisense strand to SEQ ID NO: 2488808
acauucgcagagcaugcuu

SEQ ID NO: 2488810 - RNA, 19 nt, Artificial Sequence
  Description of Artificial Sequence: Synthetic oligonucleotide
  Sense strand starting at position 1856 of SEQ ID NO: 1887677
augcucugcgaauguauua

SEQ ID NO: 2488811 - RNA, 19 nt, Artificial Sequence
  Description of Artificial Sequence: Synthetic oligonucleotide
  Antisense strand to SEQ ID NO: 2488810
uaauacauucgcagagcau

SEQ ID NO: 2488812 - RNA, 19 nt, Artificial Sequence
  Description of Artificial Sequence: Synthetic oligonucleotide
  Sense strand starting at position 1863 of SEQ ID NO: 1887677
gcgaauguauuaccaagau

SEQ ID NO: 2488813 - RNA, 19 nt, Artificial Sequence
  Description of Artificial Sequence: Synthetic oligonucleotide
  Antisense strand to SEQ ID NO: 2488812
aucuugguaauacauucgc

SEQ ID NO: 2488814 - RNA, 19 nt, Artificial Sequence
  Description of Artificial Sequence: Synthetic oligonucleotide
  Sense strand starting at position 2000 of SEQ ID NO: 1887677
gcuccagccaucugggauu

SEQ ID NO: 2488815 - RNA, 19 nt, Artificial Sequence
  Description of Artificial Sequence: Synthetic oligonucleotide
  Antisense strand to SEQ ID NO: 2488814
aaucccagauggcuggagc

SEQ ID NO: 2488816 - RNA, 19 nt, Artificial Sequence
  Description of Artificial Sequence: Synthetic oligonucleotide
  Sense strand starting at position 2067 of SEQ ID NO: 1887677
augcauuuauucgcuguuu

SEQ ID NO: 2488817 - RNA, 19 nt, Artificial Sequence
  Description of Artificial Sequence: Synthetic oligonucleotide
  Antisense strand to SEQ ID NO: 2488816
aaacagcgaauaaaugcau

SEQ ID NO: 2488818 - RNA, 19 nt, Artificial Sequence
  Description of Artificial Sequence: Synthetic oligonucleotide
  Sense strand starting at position 2069 of SEQ ID NO: 1887677
gcauuuauucgcuguuuga

SEQ ID NO: 2488819 - RNA, 19 nt, Artificial Sequence
  Description of Artificial Sequence: Synthetic oligonucleotide
  Antisense strand to SEQ ID NO: 2488818
ucaaacagcgaauaaaugc

SEQ ID NO: 2488820 - RNA, 19 nt, Artificial Sequence
  Description of Artificial Sequence: Synthetic oligonucleotide
  Sense strand starting at position 2260 of SEQ ID NO: 1887677
acagcaauggauugaguca

SEQ ID NO: 2488821 - RNA, 19 nt, Artificial Sequence
  Description of Artificial Sequence: Synthetic oligonucleotide
  Antisense strand to SEQ ID NO: 2488820
ugacucaauccauugcugu

SEQ ID NO: 2488822 - RNA, 19 nt, Artificial Sequence
  Description of Artificial Sequence: Synthetic oligonucleotide
  Sense strand starting at position 2275 of SEQ ID NO: 1887677
gucacauggucacuugagu

SEQ ID NO: 2488823 - RNA, 19 nt, Artificial Sequence
  Description of Artificial Sequence: Synthetic oligonucleotide
  Antisense strand to SEQ ID NO: 2488822
acucaagugaccaugugac

SEQ ID NO: 2488824 - RNA, 19 nt, Artificial Sequence
  Description of Artificial Sequence: Synthetic oligonucleotide
  Sense strand starting at position 2722 of SEQ ID NO: 1887677
agugguucaugccuguaga

SEQ ID NO: 2488825 - RNA, 19 nt, Artificial Sequence
  Description of Artificial Sequence: Synthetic oligonucleotide
  Antisense strand to SEQ ID NO: 2488824
ucuacaggcaugaaccacu

SEQ ID NO: 2488826 - RNA, 19 nt, Artificial Sequence
  Description of Artificial Sequence: Synthetic oligonucleotide
  Sense strand starting at position 2894 of SEQ ID NO: 1887677
agaguauucucugugugca

SEQ ID NO: 2488827 - RNA, 19 nt, Artificial Sequence
  Description of Artificial Sequence: Synthetic oligonucleotide
  Antisense strand to SEQ ID NO: 2488826
ugcacacagagaauacucu

SEQ ID NO: 2488828 - RNA, 19 nt, Artificial Sequence
  Description of Artificial Sequence: Synthetic oligonucleotide
  Sense strand starting at position 2895 of SEQ ID NO: 1887677
gaguauucucugugugcag

SEQ ID NO: 2488829 - RNA, 19 nt, Artificial Sequence
  Description of Artificial Sequence: Synthetic oligonucleotide
  Antisense strand to SEQ ID NO: 2488828
cugcacacagagaauacuc

SEQ ID NO: 2488830 - RNA, 19 nt, Artificial Sequence
  Description of Artificial Sequence: Synthetic oligonucleotide
  Sense strand starting at position 2896 of SEQ ID NO: 1887677
aguauucucugugugcaga

SEQ ID NO: 2488831 - RNA, 19 nt, Artificial Sequence
  Description of Artificial Sequence: Synthetic oligonucleotide
  Antisense strand to SEQ ID NO: 2488830
ucugcacacagagaauacu

SEQ ID NO: 2488832 - RNA, 19 nt, Artificial Sequence
  Description of Artificial Sequence: Synthetic oligonucleotide
  Sense strand starting at position 2897 of SEQ ID NO: 1887677
guauucucugugugcagaa

SEQ ID NO: 2488833 - RNA, 19 nt, Artificial Sequence
  Description of Artificial Sequence: Synthetic oligonucleotide
  Antisense strand to SEQ ID NO: 2488832
uucugcacacagagaauac

SEQ ID NO: 2488834 - RNA, 19 nt, Artificial Sequence
  Description of Artificial Sequence: Synthetic oligonucleotide
  Sense strand starting at position 2899 of SEQ ID NO: 1887677
auucucugugugcagaaga

SEQ ID NO: 2488835 - RNA, 19 nt, Artificial Sequence
  Description of Artificial Sequence: Synthetic oligonucleotide
  Antisense strand to SEQ ID NO: 2488834
ucuucugcacacagagaau

SEQ ID NO: 2488836 - RNA, 19 nt, Artificial Sequence
  Description of Artificial Sequence: Synthetic oligonucleotide
  Sense strand starting at position 3007 of SEQ ID NO: 1887677
uguacuauaugcucacaua

SEQ ID NO: 2488837 - RNA, 19 nt, Artificial Sequence
  Description of Artificial Sequence: Synthetic oligonucleotide
  Antisense strand to SEQ ID NO: 2488836
uaugugagcauauaguaca

SEQ ID NO: 2488838 - RNA, 19 nt, Artificial Sequence
  Description of Artificial Sequence: Synthetic oligonucleotide
  Sense strand starting at position 3127 of SEQ ID NO: 1887677
auccaucucugaugauaag

SEQ ID NO: 2488839 - RNA, 19 nt, Artificial Sequence
  Description of Artificial Sequence: Synthetic oligonucleotide
  Antisense strand to SEQ ID NO: 2488838
cuuaucaucagagauggau

SEQ ID NO: 2488840 - RNA, 19 nt, Artificial Sequence
  Description of Artificial Sequence: Synthetic oligonucleotide
  Sense strand starting at position 3139 of SEQ ID NO: 1887677
ugauaagcaugcucugaaa

SEQ ID NO: 2488841 - RNA, 19 nt, Artificial Sequence
  Description of Artificial Sequence: Synthetic oligonucleotide
  Antisense strand to SEQ ID NO: 2488840
uuucagagcaugcuuauca

SEQ ID NO: 2488842 - RNA, 19 nt, Artificial Sequence
  Description of Artificial Sequence: Synthetic oligonucleotide
  Sense strand starting at position 3719 of SEQ ID NO: 1887677
uguaaacgcuccucaauaa

SEQ ID NO: 2488843 - RNA, 19 nt, Artificial Sequence
  Description of Artificial Sequence: Synthetic oligonucleotide
  Antisense strand to SEQ ID NO: 2488842
uuauugaggagcguuuaca

SEQ ID NO: 2488844 - RNA, 19 nt, Artificial Sequence
  Description of Artificial Sequence: Synthetic oligonucleotide
  Sense strand starting at position 3720 of SEQ ID NO: 1887677
guaaacgcuccucaauaaa

SEQ ID NO: 2488845 - RNA, 19 nt, Artificial Sequence
  Description of Artificial Sequence: Synthetic oligonucleotide
  Antisense strand to SEQ ID NO: 2488844
uuuauugaggagcguuuac

SEQ ID NO: 2488846 - RNA, 19 nt, Artificial Sequence
  Description of Artificial Sequence: Synthetic oligonucleotide
  Sense strand starting at position 3908 of SEQ ID NO: 1887677
ggugguguaugccugcaga

SEQ ID NO: 2488847 - RNA, 19 nt, Artificial Sequence
  Description of Artificial Sequence: Synthetic oligonucleotide
  Antisense strand to SEQ ID NO: 2488846
ucugcaggcauacaccacc

SEQ ID NO: 2488848 - RNA, 19 nt, Artificial Sequence
  Description of Artificial Sequence: Synthetic oligonucleotide
  Sense strand starting at position 17 of SEQ ID NO: 1887678
auggucacagccugagaua

SEQ ID NO: 2488849 - RNA, 19 nt, Artificial Sequence
  Description of Artificial Sequence: Synthetic oligonucleotide
  Antisense strand to SEQ ID NO: 2488848
uaucucaggcugugaccau

SEQ ID NO: 2488850 - RNA, 19 nt, Artificial Sequence
  Description of Artificial Sequence: Synthetic oligonucleotide
  Sense strand starting at position 18 of SEQ ID NO: 1887678
uggucacagccugagauau

SEQ ID NO: 2488851 - RNA, 19 nt, Artificial Sequence
  Description of Artificial Sequence: Synthetic oligonucleotide
  Antisense strand to SEQ ID NO: 2488850
auaucucaggcugugacca

SEQ ID NO: 2488852 - RNA, 19 nt, Artificial Sequence
  Description of Artificial Sequence: Synthetic oligonucleotide
  Sense strand starting at position 20 of SEQ ID NO: 1887678
gucacagccugagauauuc

SEQ ID NO: 2488853 - RNA, 19 nt, Artificial Sequence
  Description of Artificial Sequence: Synthetic oligonucleotide
  Antisense strand to SEQ ID NO: 2488852
gaauaucucaggcugugac

SEQ ID NO: 2488854 - RNA, 19 nt, Artificial Sequence
  Description of Artificial Sequence: Synthetic oligonucleotide
  Sense strand starting at position 30 of SEQ ID NO: 1887678
gagauauucuugcucggug

SEQ ID NO: 2488855 - RNA, 19 nt, Artificial Sequence
  Description of Artificial Sequence: Synthetic oligonucleotide
  Antisense strand to SEQ ID NO: 2488854
caccgagcaagaauaucuc

SEQ ID NO: 2488856 - RNA, 19 nt, Artificial Sequence
  Description of Artificial Sequence: Synthetic oligonucleotide
  Sense strand starting at position 32 of SEQ ID NO: 1887678
gauauucuugcucggugca

SEQ ID NO: 2488857 - RNA, 19 nt, Artificial Sequence
  Description of Artificial Sequence: Synthetic oligonucleotide
  Antisense strand to SEQ ID NO: 2488856
ugcaccgagcaagaauauc

SEQ ID NO: 2488858 - RNA, 19 nt, Artificial Sequence
  Description of Artificial Sequence: Synthetic oligonucleotide
  Sense strand starting at position 65 of SEQ ID NO: 1887678
uuggaauguucuucgacca

SEQ ID NO: 2488859 - RNA, 19 nt, Artificial Sequence
  Description of Artificial Sequence: Synthetic oligonucleotide
  Antisense strand to SEQ ID NO: 2488858
uggucgaagaacauuccaa

SEQ ID NO: 2488860 - RNA, 19 nt, Artificial Sequence
  Description of Artificial Sequence: Synthetic oligonucleotide
  Sense strand starting at position 70 of SEQ ID NO: 1887678
auguucuucgaccagguua

SEQ ID NO: 2488861 - RNA, 19 nt, Artificial Sequence
  Description of Artificial Sequence: Synthetic oligonucleotide
  Antisense strand to SEQ ID NO: 2488860
uaaccuggucgaagaacau

SEQ ID NO: 2488862 - RNA, 19 nt, Artificial Sequence
  Description of Artificial Sequence: Synthetic oligonucleotide
  Sense strand starting at position 72 of SEQ ID NO: 1887678
guucuucgaccagguuaaa

SEQ ID NO: 2488863 - RNA, 19 nt, Artificial Sequence
  Description of Artificial Sequence: Synthetic oligonucleotide
  Antisense strand to SEQ ID NO: 2488862
uuuaaccuggucgaagaac

SEQ ID NO: 2488864 - RNA, 19 nt, Artificial Sequence
  Description of Artificial Sequence: Synthetic oligonucleotide
  Sense strand starting at position 422 of SEQ ID NO: 1887678
uugucauacgcacaaauau

SEQ ID NO: 2488865 - RNA, 19 nt, Artificial Sequence
  Description of Artificial Sequence: Synthetic oligonucleotide
  Antisense strand to SEQ ID NO: 2488864
auauuugugcguaugacaa

SEQ ID NO: 2488866 - RNA, 19 nt, Artificial Sequence
  Description of Artificial Sequence: Synthetic oligonucleotide
  Sense strand starting at position 452 of SEQ ID NO: 1887678
gaucacaggcuuggucaua

SEQ ID NO: 2488867 - RNA, 19 nt, Artificial Sequence
  Description of Artificial Sequence: Synthetic oligonucleotide
  Antisense strand to SEQ ID NO: 2488866
uaugaccaagccugugauc

SEQ ID NO: 2488868 - RNA, 19 nt, Artificial Sequence
  Description of Artificial Sequence: Synthetic oligonucleotide
  Sense strand starting at position 453 of SEQ ID NO: 1887678
aucacaggcuuggucauaa

SEQ ID NO: 2488869 - RNA, 19 nt, Artificial Sequence
  Description of Artificial Sequence: Synthetic oligonucleotide
  Antisense strand to SEQ ID NO: 2488868
uuaugaccaagccugugau

SEQ ID NO: 2488870 - RNA, 19 nt, Artificial Sequence
  Description of Artificial Sequence: Synthetic oligonucleotide
  Sense strand starting at position 1094 of SEQ ID NO: 1887678
uuuauuuccuggucaugca

SEQ ID NO: 2488871 - RNA, 19 nt, Artificial Sequence
  Description of Artificial Sequence: Synthetic oligonucleotide
  Antisense strand to SEQ ID NO: 2488870
ugcaugaccaggaaauaaa

SEQ ID NO: 2488872 - RNA, 19 nt, Artificial Sequence
  Description of Artificial Sequence: Synthetic oligonucleotide
  Sense strand starting at position 1240 of SEQ ID NO: 1887678
cuauaccagugccagaaua

SEQ ID NO: 2488873 - RNA, 19 nt, Artificial Sequence
  Description of Artificial Sequence: Synthetic oligonucleotide
  Antisense strand to SEQ ID NO: 2488872
uauucuggcacugguauag

SEQ ID NO: 2488874 - RNA, 19 nt, Artificial Sequence
  Description of Artificial Sequence: Synthetic oligonucleotide
  Sense strand starting at position 1242 of SEQ ID NO: 1887678
auaccagugccagaauaau

SEQ ID NO: 2488875 - RNA, 19 nt, Artificial Sequence
  Description of Artificial Sequence: Synthetic oligonucleotide
  Antisense strand to SEQ ID NO: 2488874
auuauucuggcacugguau

SEQ ID NO: 2488876 - RNA, 19 nt, Artificial Sequence
  Description of Artificial Sequence: Synthetic oligonucleotide
  Sense strand starting at position 1303 of SEQ ID NO: 1887678
gcuuguauucucuggacaa

SEQ ID NO: 2488877 - RNA, 19 nt, Artificial Sequence
  Description of Artificial Sequence: Synthetic oligonucleotide
  Antisense strand to SEQ ID NO: 2488876
uuguccagagaauacaagc

SEQ ID NO: 2488878 - RNA, 19 nt, Artificial Sequence
  Description of Artificial Sequence: Synthetic oligonucleotide
  Sense strand starting at position 1304 of SEQ ID NO: 1887678
cuuguauucucuggacaac

SEQ ID NO: 2488879 - RNA, 19 nt, Artificial Sequence
  Description of Artificial Sequence: Synthetic oligonucleotide
  Antisense strand to SEQ ID NO: 2488878
guuguccagagaauacaag

SEQ ID NO: 2488880 - RNA, 19 nt, Artificial Sequence
  Description of Artificial Sequence: Synthetic oligonucleotide
  Sense strand starting at position 1305 of SEQ ID NO: 1887678
uuguauucucuggacaaca

SEQ ID NO: 2488881 - RNA, 19 nt, Artificial Sequence
  Description of Artificial Sequence: Synthetic oligonucleotide
  Antisense strand to SEQ ID NO: 2488880
uguuguccagagaauacaa

SEQ ID NO: 2488882 - RNA, 19 nt, Artificial Sequence
  Description of Artificial Sequence: Synthetic oligonucleotide
  Sense strand starting at position 1458 of SEQ ID NO: 1887678
cugagagguacagguugua

SEQ ID NO: 2488883 - RNA, 19 nt, Artificial Sequence
  Description of Artificial Sequence: Synthetic oligonucleotide
  Antisense strand to SEQ ID NO: 2488882
uacaaccuguaccucucag

SEQ ID NO: 2488884 - RNA, 19 nt, Artificial Sequence
  Description of Artificial Sequence: Synthetic oligonucleotide
  Sense strand starting at position 1567 of SEQ ID NO: 1887678
uacaaauguuagccaagga

SEQ ID NO: 2488885 - RNA, 19 nt, Artificial Sequence
  Description of Artificial Sequence: Synthetic oligonucleotide
  Antisense strand to SEQ ID NO: 2488884
uccuuggcuaacauuugua

SEQ ID NO: 2488886 - RNA, 19 nt, Artificial Sequence
  Description of Artificial Sequence: Synthetic oligonucleotide
  Sense strand starting at position 1571 of SEQ ID NO: 1887678
aauguuagccaaggaugau

SEQ ID NO: 2488887 - RNA, 19 nt, Artificial Sequence
  Description of Artificial Sequence: Synthetic oligonucleotide
  Antisense strand to SEQ ID NO: 2488886
aucauccuuggcuaacauu

SEQ ID NO: 2488888 - RNA, 19 nt, Artificial Sequence
  Description of Artificial Sequence: Synthetic oligonucleotide
  Sense strand starting at position 1732 of SEQ ID NO: 1887678
ggacuaucugagcgcaaga

SEQ ID NO: 2488889 - RNA, 19 nt, Artificial Sequence
  Description of Artificial Sequence: Synthetic oligonucleotide
  Antisense strand to SEQ ID NO: 2488888
ucuugcgcucagauagucc

SEQ ID NO: 2488890 - RNA, 19 nt, Artificial Sequence
  Description of Artificial Sequence: Synthetic oligonucleotide
  Sense strand starting at position 1734 of SEQ ID NO: 1887678
acuaucugagcgcaagaga

SEQ ID NO: 2488891 - RNA, 19 nt, Artificial Sequence
  Description of Artificial Sequence: Synthetic oligonucleotide
  Antisense strand to SEQ ID NO: 2488890
ucucuugcgcucagauagu

SEQ ID NO: 2488892 - RNA, 19 nt, Artificial Sequence
  Description of Artificial Sequence: Synthetic oligonucleotide
  Sense strand starting at position 1754 of SEQ ID NO: 1887678
cuagguuggaagugcuuau

SEQ ID NO: 2488893 - RNA, 19 nt, Artificial Sequence
  Description of Artificial Sequence: Synthetic oligonucleotide
  Antisense strand to SEQ ID NO: 2488892
auaagcacuuccaaccuag

SEQ ID NO: 2488894 - RNA, 19 nt, Artificial Sequence
  Description of Artificial Sequence: Synthetic oligonucleotide
  Sense strand starting at position 1758 of SEQ ID NO: 1887678
guuggaagugcuuauggac

SEQ ID NO: 2488895 - RNA, 19 nt, Artificial Sequence
  Description of Artificial Sequence: Synthetic oligonucleotide
  Antisense strand to SEQ ID NO: 2488894
guccauaagcacuuccaac

SEQ ID NO: 2488896 - RNA, 19 nt, Artificial Sequence
  Description of Artificial Sequence: Synthetic oligonucleotide
  Sense strand starting at position 1872 of SEQ ID NO: 1887678
acaaauguauuacugaagu

SEQ ID NO: 2488897 - RNA, 19 nt, Artificial Sequence
  Description of Artificial Sequence: Synthetic oligonucleotide
  Antisense strand to SEQ ID NO: 2488896
acuucaguaauacauuugu

SEQ ID NO: 2488898 - RNA, 19 nt, Artificial Sequence
  Description of Artificial Sequence: Synthetic oligonucleotide
  Sense strand starting at position 2048 of SEQ ID NO: 1887678
ccagguuaaaguggauaga

SEQ ID NO: 2488899 - RNA, 19 nt, Artificial Sequence
  Description of Artificial Sequence: Synthetic oligonucleotide
  Antisense strand to SEQ ID NO: 2488898
ucuauccacuuuaaccugg

SEQ ID NO: 2488900 - RNA, 19 nt, Artificial Sequence
  Description of Artificial Sequence: Synthetic oligonucleotide
  Sense strand starting at position 2167 of SEQ ID NO: 1887678
gcagguuagccuugcucau

SEQ ID NO: 2488901 - RNA, 19 nt, Artificial Sequence
  Description of Artificial Sequence: Synthetic oligonucleotide
  Antisense strand to SEQ ID NO: 2488900
augagcaaggcuaaccugc

SEQ ID NO: 2488902 - RNA, 19 nt, Artificial Sequence
  Description of Artificial Sequence: Synthetic oligonucleotide
  Sense strand starting at position 2258 of SEQ ID NO: 1887678
ccaagagaauugggcugaa

SEQ ID NO: 2488903 - RNA, 19 nt, Artificial Sequence
  Description of Artificial Sequence: Synthetic oligonucleotide
  Antisense strand to SEQ ID NO: 2488902
uucagcccaauucucuugg

SEQ ID NO: 2488904 - RNA, 19 nt, Artificial Sequence
  Description of Artificial Sequence: Synthetic oligonucleotide
  Sense strand starting at position 2367 of SEQ ID NO: 1887678
aaucuaagacguugaagaa

SEQ ID NO: 2488905 - RNA, 19 nt, Artificial Sequence
  Description of Artificial Sequence: Synthetic oligonucleotide
  Antisense strand to SEQ ID NO: 2488904
uucuucaacgucuuagauu

SEQ ID NO: 2488906 - RNA, 19 nt, Artificial Sequence
  Description of Artificial Sequence: Synthetic oligonucleotide
  Sense strand starting at position 2425 of SEQ ID NO: 1887678
cacaguuuaggcugacuua

SEQ ID NO: 2488907 - RNA, 19 nt, Artificial Sequence
  Description of Artificial Sequence: Synthetic oligonucleotide
  Antisense strand to SEQ ID NO: 2488906
uaagucagccuaaacugug

SEQ ID NO: 2488908 - RNA, 19 nt, Artificial Sequence
  Description of Artificial Sequence: Synthetic oligonucleotide
  Sense strand starting at position 2426 of SEQ ID NO: 1887678
acaguuuaggcugacuuaa

SEQ ID NO: 2488909 - RNA, 19 nt, Artificial Sequence
  Description of Artificial Sequence: Synthetic oligonucleotide
  Antisense strand to SEQ ID NO: 2488908
uuaagucagccuaaacugu

SEQ ID NO: 2488910 - RNA, 19 nt, Artificial Sequence
  Description of Artificial Sequence: Synthetic oligonucleotide
  Sense strand starting at position 2428 of SEQ ID NO: 1887678
aguuuaggcugacuuaaga

SEQ ID NO: 2488911 - RNA, 19 nt, Artificial Sequence
  Description of Artificial Sequence: Synthetic oligonucleotide
  Antisense strand to SEQ ID NO: 2488910
ucuuaagucagccuaaacu

SEQ ID NO: 2488912 - RNA, 19 nt, Artificial Sequence
  Description of Artificial Sequence: Synthetic oligonucleotide
  Sense strand starting at position 3220 of SEQ ID NO: 1887678
ucugaaaucuugccauugu

SEQ ID NO: 2488913 - RNA, 19 nt, Artificial Sequence
  Description of Artificial Sequence: Synthetic oligonucleotide
  Antisense strand to SEQ ID NO: 2488912
acaauggcaagauuucaga

SEQ ID NO: 2488914 - RNA, 19 nt, Artificial Sequence
  Description of Artificial Sequence: Synthetic oligonucleotide
  Sense strand starting at position 3452 of SEQ ID NO: 1887678
acaaucucauagugauaug

SEQ ID NO: 2488915 - RNA, 19 nt, Artificial Sequence
  Description of Artificial Sequence: Synthetic oligonucleotide
  Antisense strand to SEQ ID NO: 2488914
cauaucacuaugagauugu

SEQ ID NO: 2488916 - RNA, 19 nt, Artificial Sequence
  Description of Artificial Sequence: Synthetic oligonucleotide
  Sense strand starting at position 3455 of SEQ ID NO: 1887678
aucucauagugauaugagu

SEQ ID NO: 2488917 - RNA, 19 nt, Artificial Sequence
  Description of Artificial Sequence: Synthetic oligonucleotide
  Antisense strand to SEQ ID NO: 2488916
acucauaucacuaugagau

SEQ ID NO: 2488918 - RNA, 19 nt, Artificial Sequence
  Description of Artificial Sequence: Synthetic oligonucleotide
  Sense strand starting at position 3461 of SEQ ID NO: 1887678
uagugauaugaguaaccuc

SEQ ID NO: 2488919 - RNA, 19 nt, Artificial Sequence
  Description of Artificial Sequence: Synthetic oligonucleotide
  Antisense strand to SEQ ID NO: 2488918
gagguuacucauaucacua

SEQ ID NO: 2488920 - RNA, 19 nt, Artificial Sequence
  Description of Artificial Sequence: Synthetic oligonucleotide
  Sense strand starting at position 3577 of SEQ ID NO: 1887678
auauguauuuaucguagag

SEQ ID NO: 2488921 - RNA, 19 nt, Artificial Sequence
  Description of Artificial Sequence: Synthetic oligonucleotide
  Antisense strand to SEQ ID NO: 2488920
cucuacgauaaauacauau

SEQ ID NO: 2488922 - RNA, 19 nt, Artificial Sequence
  Description of Artificial Sequence: Synthetic oligonucleotide
  Sense strand starting at position 3579 of SEQ ID NO: 1887678
auguauuuaucguagagac

SEQ ID NO: 2488923 - RNA, 19 nt, Artificial Sequence
  Description of Artificial Sequence: Synthetic oligonucleotide
  Antisense strand to SEQ ID NO: 2488922
gucucuacgauaaauacau

SEQ ID NO: 2488924 - RNA, 19 nt, Artificial Sequence
  Description of Artificial Sequence: Synthetic oligonucleotide
  Sense strand starting at position 3877 of SEQ ID NO: 1887678
ucaugaugguuccauauuu

SEQ ID NO: 2488925 - RNA, 19 nt, Artificial Sequence
  Description of Artificial Sequence: Synthetic oligonucleotide
  Antisense strand to SEQ ID NO: 2488924
aaauauggaaccaucauga

SEQ ID NO: 2488926 - RNA, 19 nt, Artificial Sequence
  Description of Artificial Sequence: Synthetic oligonucleotide
  Sense strand starting at position 3933 of SEQ ID NO: 1887678
aagucuuacucugucgaca

SEQ ID NO: 2488927 - RNA, 19 nt, Artificial Sequence
  Description of Artificial Sequence: Synthetic oligonucleotide
  Antisense strand to SEQ ID NO: 2488926
ugucgacagaguaagacuu

SEQ ID NO: 2488928 - RNA, 19 nt, Artificial Sequence
  Description of Artificial Sequence: Synthetic oligonucleotide
  Sense strand starting at position 101 of SEQ ID NO: 1887679
gcauaccugugaucccaga

SEQ ID NO: 2488929 - RNA, 19 nt, Artificial Sequence
  Description of Artificial Sequence: Synthetic oligonucleotide
  Antisense strand to SEQ ID NO: 2488928
ucugggaucacagguaugc

SEQ ID NO: 2488930 - RNA, 19 nt, Artificial Sequence
  Description of Artificial Sequence: Synthetic oligonucleotide
  Sense strand starting at position 114 of SEQ ID NO: 1887679
cccagaaauuugggaguca

SEQ ID NO: 2488931 - RNA, 19 nt, Artificial Sequence
  Description of Artificial Sequence: Synthetic oligonucleotide
  Antisense strand to SEQ ID NO: 2488930
ugacucccaaauuucuggg

SEQ ID NO: 2488932 - RNA, 19 nt, Artificial Sequence
  Description of Artificial Sequence: Synthetic oligonucleotide
  Sense strand starting at position 115 of SEQ ID NO: 1887679
ccagaaauuugggagucag

SEQ ID NO: 2488933 - RNA, 19 nt, Artificial Sequence
  Description of Artificial Sequence: Synthetic oligonucleotide
  Antisense strand to SEQ ID NO: 2488932
cugacucccaaauuucugg

SEQ ID NO: 2488934 - RNA, 19 nt, Artificial Sequence
  Description of Artificial Sequence: Synthetic oligonucleotide
  Sense strand starting at position 425 of SEQ ID NO: 1887679
gaugaacgccuguaaucuc

SEQ ID NO: 2488935 - RNA, 19 nt, Artificial Sequence
  Description of Artificial Sequence: Synthetic oligonucleotide
  Antisense strand to SEQ ID NO: 2488934
gagauuacaggcguucauc

SEQ ID NO: 2488936 - RNA, 19 nt, Artificial Sequence
  Description of Artificial Sequence: Synthetic oligonucleotide
  Sense strand starting at position 508 of SEQ ID NO: 1887679
gagaucgccucacugcaua

SEQ ID NO: 2488937 - RNA, 19 nt, Artificial Sequence
  Description of Artificial Sequence: Synthetic oligonucleotide
  Antisense strand to SEQ ID NO: 2488936
uaugcagugaggcgaucuc

SEQ ID NO: 2488938 - RNA, 19 nt, Artificial Sequence
  Description of Artificial Sequence: Synthetic oligonucleotide
  Sense strand starting at position 588 of SEQ ID NO: 1887679
cuggguuggacaugucacu

SEQ ID NO: 2488939 - RNA, 19 nt, Artificial Sequence
  Description of Artificial Sequence: Synthetic oligonucleotide
  Antisense strand to SEQ ID NO: 2488938
agugacauguccaacccag

SEQ ID NO: 2488940 - RNA, 19 nt, Artificial Sequence
  Description of Artificial Sequence: Synthetic oligonucleotide
  Sense strand starting at position 706 of SEQ ID NO: 1887679
gcaaauguauuaccacgau

SEQ ID NO: 2488941 - RNA, 19 nt, Artificial Sequence
  Description of Artificial Sequence: Synthetic oligonucleotide
  Antisense strand to SEQ ID NO: 2488940
aucgugguaauacauuugc

SEQ ID NO: 2488942 - RNA, 19 nt, Artificial Sequence
  Description of Artificial Sequence: Synthetic oligonucleotide
  Sense strand starting at position 1249 of SEQ ID NO: 1887679
ggcauuaucccguaaaugc

SEQ ID NO: 2488943 - RNA, 19 nt, Artificial Sequence
  Description of Artificial Sequence: Synthetic oligonucleotide
  Antisense strand to SEQ ID NO: 2488942
gcauuuacgggauaaugcc

SEQ ID NO: 2488944 - RNA, 19 nt, Artificial Sequence
  Description of Artificial Sequence: Synthetic oligonucleotide
  Sense strand starting at position 1266 of SEQ ID NO: 1887679
gcuucucaguaacauuuga

SEQ ID NO: 2488945 - RNA, 19 nt, Artificial Sequence
  Description of Artificial Sequence: Synthetic oligonucleotide
  Antisense strand to SEQ ID NO: 2488944
ucaaauguuacugagaagc

SEQ ID NO: 2488946 - RNA, 19 nt, Artificial Sequence
  Description of Artificial Sequence: Synthetic oligonucleotide
  Sense strand starting at position 1449 of SEQ ID NO: 1887679
gguacaugccuguagauac

SEQ ID NO: 2488947 - RNA, 19 nt, Artificial Sequence
  Description of Artificial Sequence: Synthetic oligonucleotide
  Antisense strand to SEQ ID NO: 2488946
guaucuacaggcauguacc

SEQ ID NO: 2488948 - RNA, 19 nt, Artificial Sequence
  Description of Artificial Sequence: Synthetic oligonucleotide
  Sense strand starting at position 1675 of SEQ ID NO: 1887679
uggagauccugacaggaca

SEQ ID NO: 2488949 - RNA, 19 nt, Artificial Sequence
  Description of Artificial Sequence: Synthetic oligonucleotide
  Antisense strand to SEQ ID NO: 2488948
uguccugucaggaucucca

SEQ ID NO: 2488950 - RNA, 19 nt, Artificial Sequence
  Description of Artificial Sequence: Synthetic oligonucleotide
  Sense strand starting at position 1854 of SEQ ID NO: 1887679
ccuuccaugguugauuaua

SEQ ID NO: 2488951 - RNA, 19 nt, Artificial Sequence
  Description of Artificial Sequence: Synthetic oligonucleotide
  Antisense strand to SEQ ID NO: 2488950
uauaaucaaccauggaagg

SEQ ID NO: 2488952 - RNA, 19 nt, Artificial Sequence
  Description of Artificial Sequence: Synthetic oligonucleotide
  Sense strand starting at position 1862 of SEQ ID NO: 1887679
gguugauuauaagcauucu

SEQ ID NO: 2488953 - RNA, 19 nt, Artificial Sequence
  Description of Artificial Sequence: Synthetic oligonucleotide
  Antisense strand to SEQ ID NO: 2488952
agaaugcuuauaaucaacc

SEQ ID NO: 2488954 - RNA, 19 nt, Artificial Sequence
  Description of Artificial Sequence: Synthetic oligonucleotide
  Sense strand starting at position 1870 of SEQ ID NO: 1887679
auaagcauucucugcaagu

SEQ ID NO: 2488955 - RNA, 19 nt, Artificial Sequence
  Description of Artificial Sequence: Synthetic oligonucleotide
  Antisense strand to SEQ ID NO: 2488954
acuugcagagaaugcuuau

SEQ ID NO: 2488956 - RNA, 19 nt, Artificial Sequence
  Description of Artificial Sequence: Synthetic oligonucleotide
  Sense strand starting at position 1871 of SEQ ID NO: 1887679
uaagcauucucugcaagug

SEQ ID NO: 2488957 - RNA, 19 nt, Artificial Sequence
  Description of Artificial Sequence: Synthetic oligonucleotide
  Antisense strand to SEQ ID NO: 2488956
cacuugcagagaaugcuua

SEQ ID NO: 2488958 - RNA, 19 nt, Artificial Sequence
  Description of Artificial Sequence: Synthetic oligonucleotide
  Sense strand starting at position 1872 of SEQ ID NO: 1887679
aagcauucucugcaagugu

SEQ ID NO: 2488959 - RNA, 19 nt, Artificial Sequence
  Description of Artificial Sequence: Synthetic oligonucleotide
  Antisense strand to SEQ ID NO: 2488958
acacuugcagagaaugcuu

SEQ ID NO: 2488960 - RNA, 19 nt, Artificial Sequence
  Description of Artificial Sequence: Synthetic oligonucleotide
  Sense strand starting at position 1883 of SEQ ID NO: 1887679
gcaaguguauuaccaagau

SEQ ID NO: 2488961 - RNA, 19 nt, Artificial Sequence
  Description of Artificial Sequence: Synthetic oligonucleotide
  Antisense strand to SEQ ID NO: 2488960
aucuugguaauacacuugc

SEQ ID NO: 2488962 - RNA, 19 nt, Artificial Sequence
  Description of Artificial Sequence: Synthetic oligonucleotide
  Sense strand starting at position 1887 of SEQ ID NO: 1887679
guguauuaccaagaucaac

SEQ ID NO: 2488963 - RNA, 19 nt, Artificial Sequence
  Description of Artificial Sequence: Synthetic oligonucleotide
  Antisense strand to SEQ ID NO: 2488962
guugaucuugguaauacac

SEQ ID NO: 2488964 - RNA, 19 nt, Artificial Sequence
  Description of Artificial Sequence: Synthetic oligonucleotide
  Sense strand starting at position 1913 of SEQ ID NO: 1887679
uucucaaagcguuaacacu

SEQ ID NO: 2488965 - RNA, 19 nt, Artificial Sequence
  Description of Artificial Sequence: Synthetic oligonucleotide
  Antisense strand to SEQ ID NO: 2488964
aguguuaacgcuuugagaa

SEQ ID NO: 2488966 - RNA, 19 nt, Artificial Sequence
  Description of Artificial Sequence: Synthetic oligonucleotide
  Sense strand starting at position 1998 of SEQ ID NO: 1887679
gagaucuugcuccagcauu

SEQ ID NO: 2488967 - RNA, 19 nt, Artificial Sequence
  Description of Artificial Sequence: Synthetic oligonucleotide
  Antisense strand to SEQ ID NO: 2488966
aaugcuggagcaagaucuc

SEQ ID NO: 2488968 - RNA, 19 nt, Artificial Sequence
  Description of Artificial Sequence: Synthetic oligonucleotide
  Sense strand starting at position 2066 of SEQ ID NO: 1887679
aguaaagaugcauguauug

SEQ ID NO: 2488969 - RNA, 19 nt, Artificial Sequence
  Description of Artificial Sequence: Synthetic oligonucleotide
  Antisense strand to SEQ ID NO: 2488968
caauacaugcaucuuuacu

SEQ ID NO: 2488970 - RNA, 19 nt, Artificial Sequence
  Description of Artificial Sequence: Synthetic oligonucleotide
  Sense strand starting at position 2193 of SEQ ID NO: 1887679
uccugagcuuugucucuaa

SEQ ID NO: 2488971 - RNA, 19 nt, Artificial Sequence
  Description of Artificial Sequence: Synthetic oligonucleotide
  Antisense strand to SEQ ID NO: 2488970
uuagagacaaagcucagga

SEQ ID NO: 2488972 - RNA, 19 nt, Artificial Sequence
  Description of Artificial Sequence: Synthetic oligonucleotide
  Sense strand starting at position 2196 of SEQ ID NO: 1887679
ugagcuuugucucuaaaga

SEQ ID NO: 2488973 - RNA, 19 nt, Artificial Sequence
  Description of Artificial Sequence: Synthetic oligonucleotide
  Antisense strand to SEQ ID NO: 2488972
ucuuuagagacaaagcuca

SEQ ID NO: 2488974 - RNA, 19 nt, Artificial Sequence
  Description of Artificial Sequence: Synthetic oligonucleotide
  Sense strand starting at position 2197 of SEQ ID NO: 1887679
gagcuuugucucuaaagag

SEQ ID NO: 2488975 - RNA, 19 nt, Artificial Sequence
  Description of Artificial Sequence: Synthetic oligonucleotide
  Antisense strand to SEQ ID NO: 2488974
cucuuuagagacaaagcuc

SEQ ID NO: 2488976 - RNA, 19 nt, Artificial Sequence
  Description of Artificial Sequence: Synthetic oligonucleotide
  Sense strand starting at position 2739 of SEQ ID NO: 1887679
uauugaagacuauguauug

SEQ ID NO: 2488977 - RNA, 19 nt, Artificial Sequence
  Description of Artificial Sequence: Synthetic oligonucleotide
  Antisense strand to SEQ ID NO: 2488976
caauacauagucuucaaua

SEQ ID NO: 2488978 - RNA, 19 nt, Artificial Sequence
  Description of Artificial Sequence: Synthetic oligonucleotide
  Sense strand starting at position 2749 of SEQ ID NO: 1887679
uauguauuguacgcacaaa

SEQ ID NO: 2488979 - RNA, 19 nt, Artificial Sequence
  Description of Artificial Sequence: Synthetic oligonucleotide
  Antisense strand to SEQ ID NO: 2488978
uuugugcguacaauacaua

SEQ ID NO: 2488980 - RNA, 19 nt, Artificial Sequence
  Description of Artificial Sequence: Synthetic oligonucleotide
  Sense strand starting at position 2941 of SEQ ID NO: 1887679
gguaaacccuguguguaca

SEQ ID NO: 2488981 - RNA, 19 nt, Artificial Sequence
  Description of Artificial Sequence: Synthetic oligonucleotide
  Antisense strand to SEQ ID NO: 2488980
uguacacacaggguuuacc

SEQ ID NO: 2488982 - RNA, 19 nt, Artificial Sequence
  Description of Artificial Sequence: Synthetic oligonucleotide
  Sense strand starting at position 3173 of SEQ ID NO: 1887679
aucaguauucucuguguac

SEQ ID NO: 2488983 - RNA, 19 nt, Artificial Sequence
  Description of Artificial Sequence: Synthetic oligonucleotide
  Antisense strand to SEQ ID NO: 2488982
guacacagagaauacugau

SEQ ID NO: 2488984 - RNA, 19 nt, Artificial Sequence
  Description of Artificial Sequence: Synthetic oligonucleotide
  Sense strand starting at position 3174 of SEQ ID NO: 1887679
ucaguauucucuguguaca

SEQ ID NO: 2488985 - RNA, 19 nt, Artificial Sequence
  Description of Artificial Sequence: Synthetic oligonucleotide
  Antisense strand to SEQ ID NO: 2488984
uguacacagagaauacuga

SEQ ID NO: 2488986 - RNA, 19 nt, Artificial Sequence
  Description of Artificial Sequence: Synthetic oligonucleotide
  Sense strand starting at position 3175 of SEQ ID NO: 1887679
caguauucucuguguacag

SEQ ID NO: 2488987 - RNA, 19 nt, Artificial Sequence
  Description of Artificial Sequence: Synthetic oligonucleotide
  Antisense strand to SEQ ID NO: 2488986
cuguacacagagaauacug

SEQ ID NO: 2488988 - RNA, 19 nt, Artificial Sequence
  Description of Artificial Sequence: Synthetic oligonucleotide
  Sense strand starting at position 3176 of SEQ ID NO: 1887679
aguauucucuguguacaga

SEQ ID NO: 2488989 - RNA, 19 nt, Artificial Sequence
  Description of Artificial Sequence: Synthetic oligonucleotide
  Antisense strand to SEQ ID NO: 2488988
ucuguacacagagaauacu

SEQ ID NO: 2488990 - RNA, 19 nt, Artificial Sequence
  Description of Artificial Sequence: Synthetic oligonucleotide
  Sense strand starting at position 3177 of SEQ ID NO: 1887679
guauucucuguguacagaa

SEQ ID NO: 2488991 - RNA, 19 nt, Artificial Sequence
  Description of Artificial Sequence: Synthetic oligonucleotide
  Antisense strand to SEQ ID NO: 2488990
uucuguacacagagaauac

SEQ ID NO: 2488992 - RNA, 19 nt, Artificial Sequence
  Description of Artificial Sequence: Synthetic oligonucleotide
  Sense strand starting at position 3184 of SEQ ID NO: 1887679
cuguguacagaagaguauu

SEQ ID NO: 2488993 - RNA, 19 nt, Artificial Sequence
  Description of Artificial Sequence: Synthetic oligonucleotide
  Antisense strand to SEQ ID NO: 2488992
aauacucuucuguacacag

SEQ ID NO: 2488994 - RNA, 19 nt, Artificial Sequence
  Description of Artificial Sequence: Synthetic oligonucleotide
  Sense strand starting at position 3285 of SEQ ID NO: 1887679
aagaaagcucucuauguug

SEQ ID NO: 2488995 - RNA, 19 nt, Artificial Sequence
  Description of Artificial Sequence: Synthetic oligonucleotide
  Antisense strand to SEQ ID NO: 2488994
caacauagagagcuuucuu

SEQ ID NO: 2488996 - RNA, 19 nt, Artificial Sequence
  Description of Artificial Sequence: Synthetic oligonucleotide
  Sense strand starting at position 3303 of SEQ ID NO: 1887679
guuugcucacaggaagaau

SEQ ID NO: 2488997 - RNA, 19 nt, Artificial Sequence
  Description of Artificial Sequence: Synthetic oligonucleotide
  Antisense strand to SEQ ID NO: 2488996
auucuuccugugagcaaac

SEQ ID NO: 2488998 - RNA, 19 nt, Artificial Sequence
  Description of Artificial Sequence: Synthetic oligonucleotide
  Sense strand starting at position 3660 of SEQ ID NO: 1887679
gcagucacccgagaucaca

SEQ ID NO: 2488999 - RNA, 19 nt, Artificial Sequence
  Description of Artificial Sequence: Synthetic oligonucleotide
  Antisense strand to SEQ ID NO: 2488998
ugugaucucgggugacugc

SEQ ID NO: 2489000 - RNA, 19 nt, Artificial Sequence
  Description of Artificial Sequence: Synthetic oligonucleotide
  Sense strand starting at position 3757 of SEQ ID NO: 1887679
gugugaucagugcauggaa

SEQ ID NO: 2489001 - RNA, 19 nt, Artificial Sequence
  Description of Artificial Sequence: Synthetic oligonucleotide
  Antisense strand to SEQ ID NO: 2489000
uuccaugcacugaucacac

SEQ ID NO: 2489002 - RNA, 19 nt, Artificial Sequence
  Description of Artificial Sequence: Synthetic oligonucleotide
  Sense strand starting at position 3759 of SEQ ID NO: 1887679
gugaucagugcauggaaua

SEQ ID NO: 2489003 - RNA, 19 nt, Artificial Sequence
  Description of Artificial Sequence: Synthetic oligonucleotide
  Antisense strand to SEQ ID NO: 2489002
uauuccaugcacugaucac

SEQ ID NO: 2489004 - RNA, 19 nt, Artificial Sequence
  Description of Artificial Sequence: Synthetic oligonucleotide
  Sense strand starting at position 3941 of SEQ ID NO: 1887679
cagagaucauaucuguaug

SEQ ID NO: 2489005 - RNA, 19 nt, Artificial Sequence
  Description of Artificial Sequence: Synthetic oligonucleotide
  Antisense strand to SEQ ID NO: 2489004
cauacagauaugaucucug

SEQ ID NO: 2489006 - RNA, 19 nt, Artificial Sequence
  Description of Artificial Sequence: Synthetic oligonucleotide
  Sense strand starting at position 3943 of SEQ ID NO: 1887679
gagaucauaucuguaugaa

SEQ ID NO: 2489007 - RNA, 19 nt, Artificial Sequence
  Description of Artificial Sequence: Synthetic oligonucleotide
  Antisense strand to SEQ ID NO: 2489006
uucauacagauaugaucuc

SEQ ID NO: 2489008 - RNA, 19 nt, Artificial Sequence
  Description of Artificial Sequence: Synthetic oligonucleotide
  Sense strand starting at position 67 of SEQ ID NO: 1887680
ugugguucaugccugcaga

SEQ ID NO: 2489009 - RNA, 19 nt, Artificial Sequence
  Description of Artificial Sequence: Synthetic oligonucleotide
  Antisense strand to SEQ ID NO: 2489008
ucugcaggcaugaaccaca

SEQ ID NO: 2489010 - RNA, 19 nt, Artificial Sequence
  Description of Artificial Sequence: Synthetic oligonucleotide
  Sense strand starting at position 68 of SEQ ID NO: 1887680
gugguucaugccugcagau

SEQ ID NO: 2489011 - RNA, 19 nt, Artificial Sequence
  Description of Artificial Sequence: Synthetic oligonucleotide
  Antisense strand to SEQ ID NO: 2489010
aucugcaggcaugaaccac

SEQ ID NO: 2489012 - RNA, 19 nt, Artificial Sequence
  Description of Artificial Sequence: Synthetic oligonucleotide
  Sense strand starting at position 231 of SEQ ID NO: 1887680
aagaguauucucuguguug

SEQ ID NO: 2489013 - RNA, 19 nt, Artificial Sequence
  Description of Artificial Sequence: Synthetic oligonucleotide
  Antisense strand to SEQ ID NO: 2489012
caacacagagaauacucuu

SEQ ID NO: 2489014 - RNA, 19 nt, Artificial Sequence
  Description of Artificial Sequence: Synthetic oligonucleotide
  Sense strand starting at position 418 of SEQ ID NO: 1887680
ucuggaagcugggucauaa

SEQ ID NO: 2489015 - RNA, 19 nt, Artificial Sequence
  Description of Artificial Sequence: Synthetic oligonucleotide
  Antisense strand to SEQ ID NO: 2489014
uuaugacccagcuuccaga

SEQ ID NO: 2489016 - RNA, 19 nt, Artificial Sequence
  Description of Artificial Sequence: Synthetic oligonucleotide
  Sense strand starting at position 422 of SEQ ID NO: 1887680
gaagcugggucauaagaau

SEQ ID NO: 2489017 - RNA, 19 nt, Artificial Sequence
  Description of Artificial Sequence: Synthetic oligonucleotide
  Antisense strand to SEQ ID NO: 2489016
auucuuaugacccagcuuc

SEQ ID NO: 2489018 - RNA, 19 nt, Artificial Sequence
  Description of Artificial Sequence: Synthetic oligonucleotide
  Sense strand starting at position 462 of SEQ ID NO: 1887680
gcaugcaaugagugguguu

SEQ ID NO: 2489019 - RNA, 19 nt, Artificial Sequence
  Description of Artificial Sequence: Synthetic oligonucleotide
  Antisense strand to SEQ ID NO: 2489018
aacaccacucauugcaugc

SEQ ID NO: 2489020 - RNA, 19 nt, Artificial Sequence
  Description of Artificial Sequence: Synthetic oligonucleotide
  Sense strand starting at position 465 of SEQ ID NO: 1887680
ugcaaugagugguguucau

SEQ ID NO: 2489021 - RNA, 19 nt, Artificial Sequence
  Description of Artificial Sequence: Synthetic oligonucleotide
  Antisense strand to SEQ ID NO: 2489020
augaacaccacucauugca

SEQ ID NO: 2489022 - RNA, 19 nt, Artificial Sequence
  Description of Artificial Sequence: Synthetic oligonucleotide
  Sense strand starting at position 501 of SEQ ID NO: 1887680
ugggucacagugugagauu

SEQ ID NO: 2489023 - RNA, 19 nt, Artificial Sequence
  Description of Artificial Sequence: Synthetic oligonucleotide
  Antisense strand to SEQ ID NO: 2489022
aaucucacacugugaccca

SEQ ID NO: 2489024 - RNA, 19 nt, Artificial Sequence
  Description of Artificial Sequence: Synthetic oligonucleotide
  Sense strand starting at position 502 of SEQ ID NO: 1887680
gggucacagugugagauua

SEQ ID NO: 2489025 - RNA, 19 nt, Artificial Sequence
  Description of Artificial Sequence: Synthetic oligonucleotide
  Antisense strand to SEQ ID NO: 2489024
uaaucucacacugugaccc

SEQ ID NO: 2489026 - RNA, 19 nt, Artificial Sequence
  Description of Artificial Sequence: Synthetic oligonucleotide
  Sense strand starting at position 504 of SEQ ID NO: 1887680
gucacagugugagauuauc

SEQ ID NO: 2489027 - RNA, 19 nt, Artificial Sequence
  Description of Artificial Sequence: Synthetic oligonucleotide
  Antisense strand to SEQ ID NO: 2489026
gauaaucucacacugugac

SEQ ID NO: 2489028 - RNA, 19 nt, Artificial Sequence
  Description of Artificial Sequence: Synthetic oligonucleotide
  Sense strand starting at position 544 of SEQ ID NO: 1887680
gcccaagagaucuagguua

SEQ ID NO: 2489029 - RNA, 19 nt, Artificial Sequence
  Description of Artificial Sequence: Synthetic oligonucleotide
  Antisense strand to SEQ ID NO: 2489028
uaaccuagaucucuugggc

SEQ ID NO: 2489030 - RNA, 19 nt, Artificial Sequence
  Description of Artificial Sequence: Synthetic oligonucleotide
  Sense strand starting at position 643 of SEQ ID NO: 1887680
auccaacucugaugauaag

SEQ ID NO: 2489031 - RNA, 19 nt, Artificial Sequence
  Description of Artificial Sequence: Synthetic oligonucleotide
  Antisense strand to SEQ ID NO: 2489030
cuuaucaucagaguuggau

SEQ ID NO: 2489032 - RNA, 19 nt, Artificial Sequence
  Description of Artificial Sequence: Synthetic oligonucleotide
  Sense strand starting at position 670 of SEQ ID NO: 1887680
gcaaauguauuauugccaa

SEQ ID NO: 2489033 - RNA, 19 nt, Artificial Sequence
  Description of Artificial Sequence: Synthetic oligonucleotide
  Antisense strand to SEQ ID NO: 2489032
uuggcaauaauacauuugc

SEQ ID NO: 2489034 - RNA, 19 nt, Artificial Sequence
  Description of Artificial Sequence: Synthetic oligonucleotide
  Sense strand starting at position 674 of SEQ ID NO: 1887680
auguauuauugccaagauc

SEQ ID NO: 2489035 - RNA, 19 nt, Artificial Sequence
  Description of Artificial Sequence: Synthetic oligonucleotide
  Antisense strand to SEQ ID NO: 2489034
gaucuuggcaauaauacau

SEQ ID NO: 2489036 - RNA, 19 nt, Artificial Sequence
  Description of Artificial Sequence: Synthetic oligonucleotide
  Sense strand starting at position 1033 of SEQ ID NO: 1887680
agcaauaccugcuagacau

SEQ ID NO: 2489037 - RNA, 19 nt, Artificial Sequence
  Description of Artificial Sequence: Synthetic oligonucleotide
  Antisense strand to SEQ ID NO: 2489036
augucuagcagguauugcu

SEQ ID NO: 2489038 - RNA, 19 nt, Artificial Sequence
  Description of Artificial Sequence: Synthetic oligonucleotide
  Sense strand starting at position 1389 of SEQ ID NO: 1887680
gagaaaccaugucuguaca

SEQ ID NO: 2489039 - RNA, 19 nt, Artificial Sequence
  Description of Artificial Sequence: Synthetic oligonucleotide
  Antisense strand to SEQ ID NO: 2489038
uguacagacaugguuucuc

SEQ ID NO: 2489040 - RNA, 19 nt, Artificial Sequence
  Description of Artificial Sequence: Synthetic oligonucleotide
  Sense strand starting at position 1390 of SEQ ID NO: 1887680
agaaaccaugucuguacaa

SEQ ID NO: 2489041 - RNA, 19 nt, Artificial Sequence
  Description of Artificial Sequence: Synthetic oligonucleotide
  Antisense strand to SEQ ID NO: 2489040
uuguacagacaugguuucu

SEQ ID NO: 2489042 - RNA, 19 nt, Artificial Sequence
  Description of Artificial Sequence: Synthetic oligonucleotide
  Sense strand starting at position 1672 of SEQ ID NO: 1887680
cagagauccugacacugca

SEQ ID NO: 2489043 - RNA, 19 nt, Artificial Sequence
  Description of Artificial Sequence: Synthetic oligonucleotide
  Antisense strand to SEQ ID NO: 2489042
ugcagugucaggaucucug

SEQ ID NO: 2489044 - RNA, 19 nt, Artificial Sequence
  Description of Artificial Sequence: Synthetic oligonucleotide
  Sense strand starting at position 2190 of SEQ ID NO: 1887680
gagcaauccuccugaguuu

SEQ ID NO: 2489045 - RNA, 19 nt, Artificial Sequence
  Description of Artificial Sequence: Synthetic oligonucleotide
  Antisense strand to SEQ ID NO: 2489044
aaacucaggaggauugcuc

SEQ ID NO: 2489046 - RNA, 19 nt, Artificial Sequence
  Description of Artificial Sequence: Synthetic oligonucleotide
  Sense strand starting at position 2226 of SEQ ID NO: 1887680
agcaaugccucauagacau

SEQ ID NO: 2489047 - RNA, 19 nt, Artificial Sequence
  Description of Artificial Sequence: Synthetic oligonucleotide
  Antisense strand to SEQ ID NO: 2489046
augucuaugaggcauugcu

SEQ ID NO: 2489048 - RNA, 19 nt, Artificial Sequence
  Description of Artificial Sequence: Synthetic oligonucleotide
  Sense strand starting at position 2239 of SEQ ID NO: 1887680
agacauauguaccuuauau

SEQ ID NO: 2489049 - RNA, 19 nt, Artificial Sequence
  Description of Artificial Sequence: Synthetic oligonucleotide
  Antisense strand to SEQ ID NO: 2489048
auauaagguacauaugucu

SEQ ID NO: 2489050 - RNA, 19 nt, Artificial Sequence
  Description of Artificial Sequence: Synthetic oligonucleotide
  Sense strand starting at position 2366 of SEQ ID NO: 1887680
aauggaaucuacgauguua

SEQ ID NO: 2489051 - RNA, 19 nt, Artificial Sequence
  Description of Artificial Sequence: Synthetic oligonucleotide
  Antisense strand to SEQ ID NO: 2489050
uaacaucguagauuccauu

SEQ ID NO: 2489052 - RNA, 19 nt, Artificial Sequence
  Description of Artificial Sequence: Synthetic oligonucleotide
  Sense strand starting at position 2368 of SEQ ID NO: 1887680
uggaaucuacgauguuaaa

SEQ ID NO: 2489053 - RNA, 19 nt, Artificial Sequence
  Description of Artificial Sequence: Synthetic oligonucleotide
  Antisense strand to SEQ ID NO: 2489052
uuuaacaucguagauucca

SEQ ID NO: 2489054 - RNA, 19 nt, Artificial Sequence
  Description of Artificial Sequence: Synthetic oligonucleotide
  Sense strand starting at position 2409 of SEQ ID NO: 1887680
aaacauccuccaggguaga

SEQ ID NO: 2489055 - RNA, 19 nt, Artificial Sequence
  Description of Artificial Sequence: Synthetic oligonucleotide
  Antisense strand to SEQ ID NO: 2489054
ucuacccuggaggauguuu

SEQ ID NO: 2489056 - RNA, 19 nt, Artificial Sequence
  Description of Artificial Sequence: Synthetic oligonucleotide
  Sense strand starting at position 2540 of SEQ ID NO: 1887680
gaaguaucaccugagcuca

SEQ ID NO: 2489057 - RNA, 19 nt, Artificial Sequence
  Description of Artificial Sequence: Synthetic oligonucleotide
  Antisense strand to SEQ ID NO: 2489056
ugagcucaggugauacuuc

SEQ ID NO: 2489058 - RNA, 19 nt, Artificial Sequence
  Description of Artificial Sequence: Synthetic oligonucleotide
  Sense strand starting at position 2586 of SEQ ID NO: 1887680
gguguaagcccauguguau

SEQ ID NO: 2489059 - RNA, 19 nt, Artificial Sequence
  Description of Artificial Sequence: Synthetic oligonucleotide
  Antisense strand to SEQ ID NO: 2489058
auacacaugggcuuacacc

SEQ ID NO: 2489060 - RNA, 19 nt, Artificial Sequence
  Description of Artificial Sequence: Synthetic oligonucleotide
  Sense strand starting at position 2589 of SEQ ID NO: 1887680
guaagcccauguguauaaa

SEQ ID NO: 2489061 - RNA, 19 nt, Artificial Sequence
  Description of Artificial Sequence: Synthetic oligonucleotide
  Antisense strand to SEQ ID NO: 2489060
uuuauacacaugggcuuac

SEQ ID NO: 2489062 - RNA, 19 nt, Artificial Sequence
  Description of Artificial Sequence: Synthetic oligonucleotide
  Sense strand starting at position 2845 of SEQ ID NO: 1887680
gcacguauaugguauuaua

SEQ ID NO: 2489063 - RNA, 19 nt, Artificial Sequence
  Description of Artificial Sequence: Synthetic oligonucleotide
  Antisense strand to SEQ ID NO: 2489062
uauaauaccauauacgugc

SEQ ID NO: 2489064 - RNA, 19 nt, Artificial Sequence
  Description of Artificial Sequence: Synthetic oligonucleotide
  Sense strand starting at position 3099 of SEQ ID NO: 1887680
gguugaaauaagcgaagau

SEQ ID NO: 2489065 - RNA, 19 nt, Artificial Sequence
  Description of Artificial Sequence: Synthetic oligonucleotide
  Antisense strand to SEQ ID NO: 2489064
aucuucgcuuauuucaacc

SEQ ID NO: 2489066 - RNA, 19 nt, Artificial Sequence
  Description of Artificial Sequence: Synthetic oligonucleotide
  Sense strand starting at position 3100 of SEQ ID NO: 1887680
guugaaauaagcgaagauc

SEQ ID NO: 2489067 - RNA, 19 nt, Artificial Sequence
  Description of Artificial Sequence: Synthetic oligonucleotide
  Antisense strand to SEQ ID NO: 2489066
gaucuucgcuuauuucaac

SEQ ID NO: 2489068 - RNA, 19 nt, Artificial Sequence
  Description of Artificial Sequence: Synthetic oligonucleotide
  Sense strand starting at position 3222 of SEQ ID NO: 1887680
cguggugucagguaccuau

SEQ ID NO: 2489069 - RNA, 19 nt, Artificial Sequence
  Description of Artificial Sequence: Synthetic oligonucleotide
  Antisense strand to SEQ ID NO: 2489068
auagguaccugacaccacg

SEQ ID NO: 2489070 - RNA, 19 nt, Artificial Sequence
  Description of Artificial Sequence: Synthetic oligonucleotide
  Sense strand starting at position 3225 of SEQ ID NO: 1887680
ggugucagguaccuauaau

SEQ ID NO: 2489071 - RNA, 19 nt, Artificial Sequence
  Description of Artificial Sequence: Synthetic oligonucleotide
  Antisense strand to SEQ ID NO: 2489070
auuauagguaccugacacc

SEQ ID NO: 2489072 - RNA, 19 nt, Artificial Sequence
  Description of Artificial Sequence: Synthetic oligonucleotide
  Sense strand starting at position 3226 of SEQ ID NO: 1887680
gugucagguaccuauaauc

SEQ ID NO: 2489073 - RNA, 19 nt, Artificial Sequence
  Description of Artificial Sequence: Synthetic oligonucleotide
  Antisense strand to SEQ ID NO: 2489072
gauuauagguaccugacac

SEQ ID NO: 2489074 - RNA, 19 nt, Artificial Sequence
  Description of Artificial Sequence: Synthetic oligonucleotide
  Sense strand starting at position 3268 of SEQ ID NO: 1887680
aggagaacggcuugaaacu

SEQ ID NO: 2489075 - RNA, 19 nt, Artificial Sequence
  Description of Artificial Sequence: Synthetic oligonucleotide
  Antisense strand to SEQ ID NO: 2489074
aguuucaagccguucuccu

SEQ ID NO: 2489076 - RNA, 19 nt, Artificial Sequence
  Description of Artificial Sequence: Synthetic oligonucleotide
  Sense strand starting at position 3502 of SEQ ID NO: 1887680
gcaaauguauuagcaagau

SEQ ID NO: 2489077 - RNA, 19 nt, Artificial Sequence
  Description of Artificial Sequence: Synthetic oligonucleotide
  Antisense strand to SEQ ID NO: 2489076
aucuugcuaauacauuugc

SEQ ID NO: 2489078 - RNA, 19 nt, Artificial Sequence
  Description of Artificial Sequence: Synthetic oligonucleotide
  Sense strand starting at position 3856 of SEQ ID NO: 1887680
agcaaugacuacuagacau

SEQ ID NO: 2489079 - RNA, 19 nt, Artificial Sequence
  Description of Artificial Sequence: Synthetic oligonucleotide
  Antisense strand to SEQ ID NO: 2489078
augucuaguagucauugcu

SEQ ID NO: 2489080 - RNA, 19 nt, Artificial Sequence
  Description of Artificial Sequence: Synthetic oligonucleotide
  Sense strand starting at position 40 of SEQ ID NO: 1887681
cugguuugaucaguaaacc

SEQ ID NO: 2489081 - RNA, 19 nt, Artificial Sequence
  Description of Artificial Sequence: Synthetic oligonucleotide
  Antisense strand to SEQ ID NO: 2489080
gguuuacugaucaaaccag

SEQ ID NO: 2489082 - RNA, 19 nt, Artificial Sequence
  Description of Artificial Sequence: Synthetic oligonucleotide
  Sense strand starting at position 41 of SEQ ID NO: 1887681
ugguuugaucaguaaacca

SEQ ID NO: 2489083 - RNA, 19 nt, Artificial Sequence
  Description of Artificial Sequence: Synthetic oligonucleotide
  Antisense strand to SEQ ID NO: 2489082
ugguuuacugaucaaacca

SEQ ID NO: 2489084 - RNA, 19 nt, Artificial Sequence
  Description of Artificial Sequence: Synthetic oligonucleotide
  Sense strand starting at position 49 of SEQ ID NO: 1887681
ucaguaaaccacugugacu

SEQ ID NO: 2489085 - RNA, 19 nt, Artificial Sequence
  Description of Artificial Sequence: Synthetic oligonucleotide
  Antisense strand to SEQ ID NO: 2489084
agucacagugguuuacuga

SEQ ID NO: 2489086 - RNA, 19 nt, Artificial Sequence
  Description of Artificial Sequence: Synthetic oligonucleotide
  Sense strand starting at position 1054 of SEQ ID NO: 1887681
ggcggguguccucguguca

SEQ ID NO: 2489087 - RNA, 19 nt, Artificial Sequence
  Description of Artificial Sequence: Synthetic oligonucleotide
  Antisense strand to SEQ ID NO: 2489086
ugacacgaggacacccgcc

SEQ ID NO: 2489088 - RNA, 19 nt, Artificial Sequence
  Description of Artificial Sequence: Synthetic oligonucleotide
  Sense strand starting at position 1059 of SEQ ID NO: 1887681
guguccucgugucaggaaa

SEQ ID NO: 2489089 - RNA, 19 nt, Artificial Sequence
  Description of Artificial Sequence: Synthetic oligonucleotide
  Antisense strand to SEQ ID NO: 2489088
uuuccugacacgaggacac

SEQ ID NO: 2489090 - RNA, 19 nt, Artificial Sequence
  Description of Artificial Sequence: Synthetic oligonucleotide
  Sense strand starting at position 1546 of SEQ ID NO: 1887681
ggguguguaucaugagguc

SEQ ID NO: 2489091 - RNA, 19 nt, Artificial Sequence
  Description of Artificial Sequence: Synthetic oligonucleotide
  Antisense strand to SEQ ID NO: 2489090
gaccucaugauacacaccc

SEQ ID NO: 2489092 - RNA, 19 nt, Artificial Sequence
  Description of Artificial Sequence: Synthetic oligonucleotide
  Sense strand starting at position 1555 of SEQ ID NO: 1887681
ucaugaggucuugaucuuu

SEQ ID NO: 2489093 - RNA, 19 nt, Artificial Sequence
  Description of Artificial Sequence: Synthetic oligonucleotide
  Antisense strand to SEQ ID NO: 2489092
aaagaucaagaccucauga

SEQ ID NO: 2489094 - RNA, 19 nt, Artificial Sequence
  Description of Artificial Sequence: Synthetic oligonucleotide
  Sense strand starting at position 1560 of SEQ ID NO: 1887681
aggucuugaucuuugugau

SEQ ID NO: 2489095 - RNA, 19 nt, Artificial Sequence
  Description of Artificial Sequence: Synthetic oligonucleotide
  Antisense strand to SEQ ID NO: 2489094
aucacaaagaucaagaccu

SEQ ID NO: 2489096 - RNA, 19 nt, Artificial Sequence
  Description of Artificial Sequence: Synthetic oligonucleotide
  Sense strand starting at position 1561 of SEQ ID NO: 1887681
ggucuugaucuuugugaua

SEQ ID NO: 2489097 - RNA, 19 nt, Artificial Sequence
  Description of Artificial Sequence: Synthetic oligonucleotide
  Antisense strand to SEQ ID NO: 2489096
uaucacaaagaucaagacc

SEQ ID NO: 2489098 - RNA, 19 nt, Artificial Sequence
  Description of Artificial Sequence: Synthetic oligonucleotide
  Sense strand starting at position 1563 of SEQ ID NO: 1887681
ucuugaucuuugugauaag

SEQ ID NO: 2489099 - RNA, 19 nt, Artificial Sequence
  Description of Artificial Sequence: Synthetic oligonucleotide
  Antisense strand to SEQ ID NO: 2489098
cuuaucacaaagaucaaga

SEQ ID NO: 2489100 - RNA, 19 nt, Artificial Sequence
  Description of Artificial Sequence: Synthetic oligonucleotide
  Sense strand starting at position 1566 of SEQ ID NO: 1887681
ugaucuuugugauaagaac

SEQ ID NO: 2489101 - RNA, 19 nt, Artificial Sequence
  Description of Artificial Sequence: Synthetic oligonucleotide
  Antisense strand to SEQ ID NO: 2489100
guucuuaucacaaagauca

SEQ ID NO: 2489102 - RNA, 19 nt, Artificial Sequence
  Description of Artificial Sequence: Synthetic oligonucleotide
  Sense strand starting at position 1592 of SEQ ID NO: 1887681
gcaugugugcugcugacuu

SEQ ID NO: 2489103 - RNA, 19 nt, Artificial Sequence
  Description of Artificial Sequence: Synthetic oligonucleotide
  Antisense strand to SEQ ID NO: 2489102
aagucagcagcacacaugc

SEQ ID NO: 2489104 - RNA, 19 nt, Artificial Sequence
  Description of Artificial Sequence: Synthetic oligonucleotide
  Sense strand starting at position 1654 of SEQ ID NO: 1887681
cuuguugccgagugggaau

SEQ ID NO: 2489105 - RNA, 19 nt, Artificial Sequence
  Description of Artificial Sequence: Synthetic oligonucleotide
  Antisense strand to SEQ ID NO: 2489104
auucccacucggcaacaag

SEQ ID NO: 2489106 - RNA, 19 nt, Artificial Sequence
  Description of Artificial Sequence: Synthetic oligonucleotide
  Sense strand starting at position 1988 of SEQ ID NO: 1887681
caggucuccucagaggaca

SEQ ID NO: 2489107 - RNA, 19 nt, Artificial Sequence
  Description of Artificial Sequence: Synthetic oligonucleotide
  Antisense strand to SEQ ID NO: 2489106
uguccucugaggagaccug

SEQ ID NO: 2489108 - RNA, 19 nt, Artificial Sequence
  Description of Artificial Sequence: Synthetic oligonucleotide
  Sense strand starting at position 1990 of SEQ ID NO: 1887681
ggucuccucagaggacauu

SEQ ID NO: 2489109 - RNA, 19 nt, Artificial Sequence
  Description of Artificial Sequence: Synthetic oligonucleotide
  Antisense strand to SEQ ID NO: 2489108
aauguccucugaggagacc

SEQ ID NO: 2489110 - RNA, 19 nt, Artificial Sequence
  Description of Artificial Sequence: Synthetic oligonucleotide
  Sense strand starting at position 2096 of SEQ ID NO: 1887681
ggcagagucucaguauguc

SEQ ID NO: 2489111 - RNA, 19 nt, Artificial Sequence
  Description of Artificial Sequence: Synthetic oligonucleotide
  Antisense strand to SEQ ID NO: 2489110
gacauacugagacucugcc

SEQ ID NO: 2489112 - RNA, 19 nt, Artificial Sequence
  Description of Artificial Sequence: Synthetic oligonucleotide
  Sense strand starting at position 2541 of SEQ ID NO: 1887681
gccucugccaagggauaga

SEQ ID NO: 2489113 - RNA, 19 nt, Artificial Sequence
  Description of Artificial Sequence: Synthetic oligonucleotide
  Antisense strand to SEQ ID NO: 2489112
ucuaucccuuggcagaggc

SEQ ID NO: 2489114 - RNA, 19 nt, Artificial Sequence
  Description of Artificial Sequence: Synthetic oligonucleotide
  Sense strand starting at position 2678 of SEQ ID NO: 1887681
cgggcuaucuggguggaga

SEQ ID NO: 2489115 - RNA, 19 nt, Artificial Sequence
  Description of Artificial Sequence: Synthetic oligonucleotide
  Antisense strand to SEQ ID NO: 2489114
ucuccacccagauagcccg

SEQ ID NO: 2489116 - RNA, 19 nt, Artificial Sequence
  Description of Artificial Sequence: Synthetic oligonucleotide
  Sense strand starting at position 2679 of SEQ ID NO: 1887681
gggcuaucuggguggagaa

SEQ ID NO: 2489117 - RNA, 19 nt, Artificial Sequence
  Description of Artificial Sequence: Synthetic oligonucleotide
  Antisense strand to SEQ ID NO: 2489116
uucuccacccagauagccc

SEQ ID NO: 2489118 - RNA, 19 nt, Artificial Sequence
  Description of Artificial Sequence: Synthetic oligonucleotide
  Sense strand starting at position 2680 of SEQ ID NO: 1887681
ggcuaucuggguggagaaa

SEQ ID NO: 2489119 - RNA, 19 nt, Artificial Sequence
  Description of Artificial Sequence: Synthetic oligonucleotide
  Antisense strand to SEQ ID NO: 2489118
uuucuccacccagauagcc

SEQ ID NO: 2489120 - RNA, 19 nt, Artificial Sequence
  Description of Artificial Sequence: Synthetic oligonucleotide
  Sense strand starting at position 2851 of SEQ ID NO: 1887681
ugggccucccuuuaggaau

SEQ ID NO: 2489121 - RNA, 19 nt, Artificial Sequence
  Description of Artificial Sequence: Synthetic oligonucleotide
  Antisense strand to SEQ ID NO: 2489120
auuccuaaagggaggccca

SEQ ID NO: 2489122 - RNA, 19 nt, Artificial Sequence
  Description of Artificial Sequence: Synthetic oligonucleotide
  Sense strand starting at position 2853 of SEQ ID NO: 1887681
ggccucccuuuaggaauaa

SEQ ID NO: 2489123 - RNA, 19 nt, Artificial Sequence
  Description of Artificial Sequence: Synthetic oligonucleotide
  Antisense strand to SEQ ID NO: 2489122
uuauuccuaaagggaggcc

SEQ ID NO: 2489124 - RNA, 19 nt, Artificial Sequence
  Description of Artificial Sequence: Synthetic oligonucleotide
  Sense strand starting at position 2966 of SEQ ID NO: 1887681
gcaguauagcugugugauc

SEQ ID NO: 2489125 - RNA, 19 nt, Artificial Sequence
  Description of Artificial Sequence: Synthetic oligonucleotide
  Antisense strand to SEQ ID NO: 2489124
gaucacacagcuauacugc

SEQ ID NO: 2489126 - RNA, 19 nt, Artificial Sequence
  Description of Artificial Sequence: Synthetic oligonucleotide
  Sense strand starting at position 2967 of SEQ ID NO: 1887681
caguauagcugugugauca

SEQ ID NO: 2489127 - RNA, 19 nt, Artificial Sequence
  Description of Artificial Sequence: Synthetic oligonucleotide
  Antisense strand to SEQ ID NO: 2489126
ugaucacacagcuauacug

SEQ ID NO: 2489128 - RNA, 19 nt, Artificial Sequence
  Description of Artificial Sequence: Synthetic oligonucleotide
  Sense strand starting at position 2968 of SEQ ID NO: 1887681
aguauagcugugugaucag

SEQ ID NO: 2489129 - RNA, 19 nt, Artificial Sequence
  Description of Artificial Sequence: Synthetic oligonucleotide
  Antisense strand to SEQ ID NO: 2489128
cugaucacacagcuauacu

SEQ ID NO: 2489130 - RNA, 19 nt, Artificial Sequence
  Description of Artificial Sequence: Synthetic oligonucleotide
  Sense strand starting at position 2978 of SEQ ID NO: 1887681
ugugaucagcucugaaagu

SEQ ID NO: 2489131 - RNA, 19 nt, Artificial Sequence
  Description of Artificial Sequence: Synthetic oligonucleotide
  Antisense strand to SEQ ID NO: 2489130
acuuucagagcugaucaca

SEQ ID NO: 2489132 - RNA, 19 nt, Artificial Sequence
  Description of Artificial Sequence: Synthetic oligonucleotide
  Sense strand starting at position 2979 of SEQ ID NO: 1887681
gugaucagcucugaaagug

SEQ ID NO: 2489133 - RNA, 19 nt, Artificial Sequence
  Description of Artificial Sequence: Synthetic oligonucleotide
  Antisense strand to SEQ ID NO: 2489132
cacuuucagagcugaucac

SEQ ID NO: 2489134 - RNA, 19 nt, Artificial Sequence
  Description of Artificial Sequence: Synthetic oligonucleotide
  Sense strand starting at position 3027 of SEQ ID NO: 1887681
gggaaugcaucuugcaacu

SEQ ID NO: 2489135 - RNA, 19 nt, Artificial Sequence
  Description of Artificial Sequence: Synthetic oligonucleotide
  Antisense strand to SEQ ID NO: 2489134
aguugcaagaugcauuccc

SEQ ID NO: 2489136 - RNA, 19 nt, Artificial Sequence
  Description of Artificial Sequence: Synthetic oligonucleotide
  Sense strand starting at position 3029 of SEQ ID NO: 1887681
gaaugcaucuugcaacugu

SEQ ID NO: 2489137 - RNA, 19 nt, Artificial Sequence
  Description of Artificial Sequence: Synthetic oligonucleotide
  Antisense strand to SEQ ID NO: 2489136
acaguugcaagaugcauuc

SEQ ID NO: 2489138 - RNA, 19 nt, Artificial Sequence
  Description of Artificial Sequence: Synthetic oligonucleotide
  Sense strand starting at position 3108 of SEQ ID NO: 1887681
ggaggauguaugcaaccuu

SEQ ID NO: 2489139 - RNA, 19 nt, Artificial Sequence
  Description of Artificial Sequence: Synthetic oligonucleotide
  Antisense strand to SEQ ID NO: 2489138
aagguugcauacauccucc

SEQ ID NO: 2489140 - RNA, 19 nt, Artificial Sequence
  Description of Artificial Sequence: Synthetic oligonucleotide
  Sense strand starting at position 3216 of SEQ ID NO: 1887681
augggaugugucuguuaca

SEQ ID NO: 2489141 - RNA, 19 nt, Artificial Sequence
  Description of Artificial Sequence: Synthetic oligonucleotide
  Antisense strand to SEQ ID NO: 2489140
uguaacagacacaucccau

SEQ ID NO: 2489142 - RNA, 19 nt, Artificial Sequence
  Description of Artificial Sequence: Synthetic oligonucleotide
  Sense strand starting at position 3217 of SEQ ID NO: 1887681
ugggaugugucuguuacau

SEQ ID NO: 2489143 - RNA, 19 nt, Artificial Sequence
  Description of Artificial Sequence: Synthetic oligonucleotide
  Antisense strand to SEQ ID NO: 2489142
auguaacagacacauccca

SEQ ID NO: 2489144 - RNA, 19 nt, Artificial Sequence
  Description of Artificial Sequence: Synthetic oligonucleotide
  Sense strand starting at position 3219 of SEQ ID NO: 1887681
ggaugugucuguuacauuu

SEQ ID NO: 2489145 - RNA, 19 nt, Artificial Sequence
  Description of Artificial Sequence: Synthetic oligonucleotide
  Antisense strand to SEQ ID NO: 2489144
aaauguaacagacacaucc

SEQ ID NO: 2489146 - RNA, 19 nt, Artificial Sequence
  Description of Artificial Sequence: Synthetic oligonucleotide
  Sense strand starting at position 3283 of SEQ ID NO: 1887681
uggugaugguucccuagau

SEQ ID NO: 2489147 - RNA, 19 nt, Artificial Sequence
  Description of Artificial Sequence: Synthetic oligonucleotide
  Antisense strand to SEQ ID NO: 2489146
aucuagggaaccaucacca

SEQ ID NO: 2489148 - RNA, 19 nt, Artificial Sequence
  Description of Artificial Sequence: Synthetic oligonucleotide
  Sense strand starting at position 3284 of SEQ ID NO: 1887681
ggugaugguucccuagauu

SEQ ID NO: 2489149 - RNA, 19 nt, Artificial Sequence
  Description of Artificial Sequence: Synthetic oligonucleotide
  Antisense strand to SEQ ID NO: 2489148
aaucuagggaaccaucacc

SEQ ID NO: 2489150 - RNA, 19 nt, Artificial Sequence
  Description of Artificial Sequence: Synthetic oligonucleotide
  Sense strand starting at position 3628 of SEQ ID NO: 1887681
uggucagguucccucaauu

SEQ ID NO: 2489151 - RNA, 19 nt, Artificial Sequence
  Description of Artificial Sequence: Synthetic oligonucleotide
  Antisense strand to SEQ ID NO: 2489150
aauugagggaaccugacca

SEQ ID NO: 2489152 - RNA, 19 nt, Artificial Sequence
  Description of Artificial Sequence: Synthetic oligonucleotide
  Sense strand starting at position 3649 of SEQ ID NO: 1887681
aggccauguuuccaauuau

SEQ ID NO: 2489153 - RNA, 19 nt, Artificial Sequence
  Description of Artificial Sequence: Synthetic oligonucleotide
  Antisense strand to SEQ ID NO: 2489152
auaauuggaaacauggccu

SEQ ID NO: 2489154 - RNA, 19 nt, Artificial Sequence
  Description of Artificial Sequence: Synthetic oligonucleotide
  Sense strand starting at position 3696 of SEQ ID NO: 1887681
agguaucuuccauaugcuu

SEQ ID NO: 2489155 - RNA, 19 nt, Artificial Sequence
  Description of Artificial Sequence: Synthetic oligonucleotide
  Antisense strand to SEQ ID NO: 2489154
aagcauauggaagauaccu

SEQ ID NO: 2489156 - RNA, 19 nt, Artificial Sequence
  Description of Artificial Sequence: Synthetic oligonucleotide
  Sense strand starting at position 3788 of SEQ ID NO: 1887681
augagauccugcuaugagg

SEQ ID NO: 2489157 - RNA, 19 nt, Artificial Sequence
  Description of Artificial Sequence: Synthetic oligonucleotide
  Antisense strand to SEQ ID NO: 2489156
ccucauagcaggaucucau

SEQ ID NO: 2489158 - RNA, 19 nt, Artificial Sequence
  Description of Artificial Sequence: Synthetic oligonucleotide
  Sense strand starting at position 3956 of SEQ ID NO: 1887681
auguccaaacaguauuauu

SEQ ID NO: 2489159 - RNA, 19 nt, Artificial Sequence
  Description of Artificial Sequence: Synthetic oligonucleotide
  Antisense strand to SEQ ID NO: 2489158
aauaauacuguuuggacau

SEQ ID NO: 2489160 - RNA, 19 nt, Artificial Sequence
  Description of Artificial Sequence: Synthetic oligonucleotide
  Sense strand starting at position 624 of SEQ ID NO: 1887682
accuuaucuuuaccgagaa

SEQ ID NO: 2489161 - RNA, 19 nt, Artificial Sequence
  Description of Artificial Sequence: Synthetic oligonucleotide
  Antisense strand to SEQ ID NO: 2489160
uucucgguaaagauaaggu

SEQ ID NO: 2489162 - RNA, 19 nt, Artificial Sequence
  Description of Artificial Sequence: Synthetic oligonucleotide
  Sense strand starting at position 625 of SEQ ID NO: 1887682
ccuuaucuuuaccgagaac

SEQ ID NO: 2489163 - RNA, 19 nt, Artificial Sequence
  Description of Artificial Sequence: Synthetic oligonucleotide
  Antisense strand to SEQ ID NO: 2489162
guucucgguaaagauaagg

SEQ ID NO: 2489164 - RNA, 19 nt, Artificial Sequence
  Description of Artificial Sequence: Synthetic oligonucleotide
  Sense strand starting at position 644 of SEQ ID NO: 1887682
ugagcuggaugucuagaga

SEQ ID NO: 2489165 - RNA, 19 nt, Artificial Sequence
  Description of Artificial Sequence: Synthetic oligonucleotide
  Antisense strand to SEQ ID NO: 2489164
ucucuagacauccagcuca

SEQ ID NO: 2489166 - RNA, 19 nt, Artificial Sequence
  Description of Artificial Sequence: Synthetic oligonucleotide
  Sense strand starting at position 689 of SEQ ID NO: 1887682
ucaccugaguuccaguaca

SEQ ID NO: 2489167 - RNA, 19 nt, Artificial Sequence
  Description of Artificial Sequence: Synthetic oligonucleotide
  Antisense strand to SEQ ID NO: 2489166
uguacuggaacucagguga

SEQ ID NO: 2489168 - RNA, 19 nt, Artificial Sequence
  Description of Artificial Sequence: Synthetic oligonucleotide
  Sense strand starting at position 1860 of SEQ ID NO: 1887682
auaagcauucgcugcaaau

SEQ ID NO: 2489169 - RNA, 19 nt, Artificial Sequence
  Description of Artificial Sequence: Synthetic oligonucleotide
  Antisense strand to SEQ ID NO: 2489168
auuugcagcgaaugcuuau

SEQ ID NO: 2489170 - RNA, 19 nt, Artificial Sequence
  Description of Artificial Sequence: Synthetic oligonucleotide
  Sense strand starting at position 2033 of SEQ ID NO: 1887682
uuggaaucuuccuugacga

SEQ ID NO: 2489171 - RNA, 19 nt, Artificial Sequence
  Description of Artificial Sequence: Synthetic oligonucleotide
  Antisense strand to SEQ ID NO: 2489170
ucgucaaggaagauuccaa

SEQ ID NO: 2489172 - RNA, 19 nt, Artificial Sequence
  Description of Artificial Sequence: Synthetic oligonucleotide
  Sense strand starting at position 2034 of SEQ ID NO: 1887682
uggaaucuuccuugacgag

SEQ ID NO: 2489173 - RNA, 19 nt, Artificial Sequence
  Description of Artificial Sequence: Synthetic oligonucleotide
  Antisense strand to SEQ ID NO: 2489172
cucgucaaggaagauucca

SEQ ID NO: 2489174 - RNA, 19 nt, Artificial Sequence
  Description of Artificial Sequence: Synthetic oligonucleotide
  Sense strand starting at position 2040 of SEQ ID NO: 1887682
cuuccuugacgagguuaaa

SEQ ID NO: 2489175 - RNA, 19 nt, Artificial Sequence
  Description of Artificial Sequence: Synthetic oligonucleotide
  Antisense strand to SEQ ID NO: 2489174
uuuaaccucgucaaggaag

SEQ ID NO: 2489176 - RNA, 19 nt, Artificial Sequence
  Description of Artificial Sequence: Synthetic oligonucleotide
  Sense strand starting at position 2081 of SEQ ID NO: 1887682
auuuauuuguccgguuugu

SEQ ID NO: 2489177 - RNA, 19 nt, Artificial Sequence
  Description of Artificial Sequence: Synthetic oligonucleotide
  Antisense strand to SEQ ID NO: 2489176
acaaaccggacaaauaaau

SEQ ID NO: 2489178 - RNA, 19 nt, Artificial Sequence
  Description of Artificial Sequence: Synthetic oligonucleotide
  Sense strand starting at position 2382 of SEQ ID NO: 1887682
aagaauauacauugucgua

SEQ ID NO: 2489179 - RNA, 19 nt, Artificial Sequence
  Description of Artificial Sequence: Synthetic oligonucleotide
  Antisense strand to SEQ ID NO: 2489178
uacgacaauguauauucuu

SEQ ID NO: 2489180 - RNA, 19 nt, Artificial Sequence
  Description of Artificial Sequence: Synthetic oligonucleotide
  Sense strand starting at position 2384 of SEQ ID NO: 1887682
gaauauacauugucguaaa

SEQ ID NO: 2489181 - RNA, 19 nt, Artificial Sequence
  Description of Artificial Sequence: Synthetic oligonucleotide
  Antisense strand to SEQ ID NO: 2489180
uuuacgacaauguauauuc

SEQ ID NO: 2489182 - RNA, 19 nt, Artificial Sequence
  Description of Artificial Sequence: Synthetic oligonucleotide
  Sense strand starting at position 2406 of SEQ ID NO: 1887682
aaacauucucccggagaga

SEQ ID NO: 2489183 - RNA, 19 nt, Artificial Sequence
  Description of Artificial Sequence: Synthetic oligonucleotide
  Antisense strand to SEQ ID NO: 2489182
ucucuccgggagaauguuu

SEQ ID NO: 2489184 - RNA, 19 nt, Artificial Sequence
  Description of Artificial Sequence: Synthetic oligonucleotide
  Sense strand starting at position 2572 of SEQ ID NO: 1887682
gugaaaccaugacuguaaa

SEQ ID NO: 2489185 - RNA, 19 nt, Artificial Sequence
  Description of Artificial Sequence: Synthetic oligonucleotide
  Antisense strand to SEQ ID NO: 2489184
uuuacagucaugguuucac

SEQ ID NO: 2489186 - RNA, 19 nt, Artificial Sequence
  Description of Artificial Sequence: Synthetic oligonucleotide
  Sense strand starting at position 2867 of SEQ ID NO: 1887682
cagaguuccugacacugca

SEQ ID NO: 2489187 - RNA, 19 nt, Artificial Sequence
  Description of Artificial Sequence: Synthetic oligonucleotide
  Antisense strand to SEQ ID NO: 2489186
ugcagugucaggaacucug

SEQ ID NO: 2489188 - RNA, 19 nt, Artificial Sequence
  Description of Artificial Sequence: Synthetic oligonucleotide
  Sense strand starting at position 3195 of SEQ ID NO: 1887682
gcuccagcaucguggauuu

SEQ ID NO: 2489189 - RNA, 19 nt, Artificial Sequence
  Description of Artificial Sequence: Synthetic oligonucleotide
  Antisense strand to SEQ ID NO: 2489188
aaauccacgaugcuggagc

SEQ ID NO: 2489190 - RNA, 19 nt, Artificial Sequence
  Description of Artificial Sequence: Synthetic oligonucleotide
  Sense strand starting at position 3263 of SEQ ID NO: 1887682
cgcauuuauugguccuguu

SEQ ID NO: 2489191 - RNA, 19 nt, Artificial Sequence
  Description of Artificial Sequence: Synthetic oligonucleotide
  Antisense strand to SEQ ID NO: 2489190
aacaggaccaauaaaugcg

SEQ ID NO: 2489192 - RNA, 19 nt, Artificial Sequence
  Description of Artificial Sequence: Synthetic oligonucleotide
  Sense strand starting at position 3353 of SEQ ID NO: 1887682
gcagguuagcuuuguuuau

SEQ ID NO: 2489193 - RNA, 19 nt, Artificial Sequence
  Description of Artificial Sequence: Synthetic oligonucleotide
  Antisense strand to SEQ ID NO: 2489192
auaaacaaagcuaaccugc

SEQ ID NO: 2489194 - RNA, 19 nt, Artificial Sequence
  Description of Artificial Sequence: Synthetic oligonucleotide
  Sense strand starting at position 3355 of SEQ ID NO: 1887682
agguuagcuuuguuuauca

SEQ ID NO: 2489195 - RNA, 19 nt, Artificial Sequence
  Description of Artificial Sequence: Synthetic oligonucleotide
  Antisense strand to SEQ ID NO: 2489194
ugauaaacaaagcuaaccu

SEQ ID NO: 2489196 - RNA, 19 nt, Artificial Sequence
  Description of Artificial Sequence: Synthetic oligonucleotide
  Sense strand starting at position 3357 of SEQ ID NO: 1887682
guuagcuuuguuuaucaag

SEQ ID NO: 2489197 - RNA, 19 nt, Artificial Sequence
  Description of Artificial Sequence: Synthetic oligonucleotide
  Antisense strand to SEQ ID NO: 2489196
cuugauaaacaaagcuaac

SEQ ID NO: 2489198 - RNA, 19 nt, Artificial Sequence
  Description of Artificial Sequence: Synthetic oligonucleotide
  Sense strand starting at position 3376 of SEQ ID NO: 1887682
gggcaauccuccugagcuu

SEQ ID NO: 2489199 - RNA, 19 nt, Artificial Sequence
  Description of Artificial Sequence: Synthetic oligonucleotide
  Antisense strand to SEQ ID NO: 2489198
aagcucaggaggauugccc

SEQ ID NO: 2489200 - RNA, 19 nt, Artificial Sequence
  Description of Artificial Sequence: Synthetic oligonucleotide
  Sense strand starting at position 3377 of SEQ ID NO: 1887682
ggcaauccuccugagcuuu

SEQ ID NO: 2489201 - RNA, 19 nt, Artificial Sequence
  Description of Artificial Sequence: Synthetic oligonucleotide
  Antisense strand to SEQ ID NO: 2489200
aaagcucaggaggauugcc

SEQ ID NO: 2489202 - RNA, 19 nt, Artificial Sequence
  Description of Artificial Sequence: Synthetic oligonucleotide
  Sense strand starting at position 3388 of SEQ ID NO: 1887682
ugagcuuugucuccagaaa

SEQ ID NO: 2489203 - RNA, 19 nt, Artificial Sequence
  Description of Artificial Sequence: Synthetic oligonucleotide
  Antisense strand to SEQ ID NO: 2489202
uuucuggagacaaagcuca

SEQ ID NO: 2489204 - RNA, 19 nt, Artificial Sequence
  Description of Artificial Sequence: Synthetic oligonucleotide
  Sense strand starting at position 3389 of SEQ ID NO: 1887682
gagcuuugucuccagaaag

SEQ ID NO: 2489205 - RNA, 19 nt, Artificial Sequence
  Description of Artificial Sequence: Synthetic oligonucleotide
  Antisense strand to SEQ ID NO: 2489204
cuuucuggagacaaagcuc

SEQ ID NO: 2489206 - RNA, 19 nt, Artificial Sequence
  Description of Artificial Sequence: Synthetic oligonucleotide
  Sense strand starting at position 34 of SEQ ID NO: 1887683
ggcauuaguggguaagggu

SEQ ID NO: 2489207 - RNA, 19 nt, Artificial Sequence
  Description of Artificial Sequence: Synthetic oligonucleotide
  Antisense strand to SEQ ID NO: 2489206
acccuuacccacuaaugcc

SEQ ID NO: 2489208 - RNA, 19 nt, Artificial Sequence
  Description of Artificial Sequence: Synthetic oligonucleotide
  Sense strand starting at position 41 of SEQ ID NO: 1887683
guggguaaggguugaauca

SEQ ID NO: 2489209 - RNA, 19 nt, Artificial Sequence
  Description of Artificial Sequence: Synthetic oligonucleotide
  Antisense strand to SEQ ID NO: 2489208
ugauucaacccuuacccac

SEQ ID NO: 2489210 - RNA, 19 nt, Artificial Sequence
  Description of Artificial Sequence: Synthetic oligonucleotide
  Sense strand starting at position 94 of SEQ ID NO: 1887683
ccgagaaaugauggcaagu

SEQ ID NO: 2489211 - RNA, 19 nt, Artificial Sequence
  Description of Artificial Sequence: Synthetic oligonucleotide
  Antisense strand to SEQ ID NO: 2489210
acuugccaucauuucucgg

SEQ ID NO: 2489212 - RNA, 19 nt, Artificial Sequence
  Description of Artificial Sequence: Synthetic oligonucleotide
  Sense strand starting at position 96 of SEQ ID NO: 1887683
gagaaaugauggcaaguuu

SEQ ID NO: 2489213 - RNA, 19 nt, Artificial Sequence
  Description of Artificial Sequence: Synthetic oligonucleotide
  Antisense strand to SEQ ID NO: 2489212
aaacuugccaucauuucuc

SEQ ID NO: 2489214 - RNA, 19 nt, Artificial Sequence
  Description of Artificial Sequence: Synthetic oligonucleotide
  Sense strand starting at position 212 of SEQ ID NO: 1887683
acguggaggcguucuuagu

SEQ ID NO: 2489215 - RNA, 19 nt, Artificial Sequence
  Description of Artificial Sequence: Synthetic oligonucleotide
  Antisense strand to SEQ ID NO: 2489214
acuaagaacgccuccacgu

SEQ ID NO: 2489216 - RNA, 19 nt, Artificial Sequence
  Description of Artificial Sequence: Synthetic oligonucleotide
  Sense strand starting at position 218 of SEQ ID NO: 1887683
aggcguucuuagucucuua

SEQ ID NO: 2489217 - RNA, 19 nt, Artificial Sequence
  Description of Artificial Sequence: Synthetic oligonucleotide
  Antisense strand to SEQ ID NO: 2489216
uaagagacuaagaacgccu

SEQ ID NO: 2489218 - RNA, 19 nt, Artificial Sequence
  Description of Artificial Sequence: Synthetic oligonucleotide
  Sense strand starting at position 221 of SEQ ID NO: 1887683
cguucuuagucucuuaaug

SEQ ID NO: 2489219 - RNA, 19 nt, Artificial Sequence
  Description of Artificial Sequence: Synthetic oligonucleotide
  Antisense strand to SEQ ID NO: 2489218
cauuaagagacuaagaacg

SEQ ID NO: 2489220 - RNA, 19 nt, Artificial Sequence
  Description of Artificial Sequence: Synthetic oligonucleotide
  Sense strand starting at position 243 of SEQ ID NO: 1887683
gacacaugauuuggauuga

SEQ ID NO: 2489221 - RNA, 19 nt, Artificial Sequence
  Description of Artificial Sequence: Synthetic oligonucleotide
  Antisense strand to SEQ ID NO: 2489220
ucaauccaaaucauguguc

SEQ ID NO: 2489222 - RNA, 19 nt, Artificial Sequence
  Description of Artificial Sequence: Synthetic oligonucleotide
  Sense strand starting at position 244 of SEQ ID NO: 1887683
acacaugauuuggauugau

SEQ ID NO: 2489223 - RNA, 19 nt, Artificial Sequence
  Description of Artificial Sequence: Synthetic oligonucleotide
  Antisense strand to SEQ ID NO: 2489222
aucaauccaaaucaugugu

SEQ ID NO: 2489224 - RNA, 19 nt, Artificial Sequence
  Description of Artificial Sequence: Synthetic oligonucleotide
  Sense strand starting at position 253 of SEQ ID NO: 1887683
uuggauugauuacacuaaa

SEQ ID NO: 2489225 - RNA, 19 nt, Artificial Sequence
  Description of Artificial Sequence: Synthetic oligonucleotide
  Antisense strand to SEQ ID NO: 2489224
uuuaguguaaucaauccaa

SEQ ID NO: 2489226 - RNA, 19 nt, Artificial Sequence
  Description of Artificial Sequence: Synthetic oligonucleotide
  Sense strand starting at position 278 of SEQ ID NO: 1887683
ggaggcuaguguuucaaau

SEQ ID NO: 2489227 - RNA, 19 nt, Artificial Sequence
  Description of Artificial Sequence: Synthetic oligonucleotide
  Antisense strand to SEQ ID NO: 2489226
auuugaaacacuagccucc

SEQ ID NO: 2489228 - RNA, 19 nt, Artificial Sequence
  Description of Artificial Sequence: Synthetic oligonucleotide
  Sense strand starting at position 830 of SEQ ID NO: 1887683
gugaucagcacaugguaua

SEQ ID NO: 2489229 - RNA, 19 nt, Artificial Sequence
  Description of Artificial Sequence: Synthetic oligonucleotide
  Antisense strand to SEQ ID NO: 2489228
uauaccaugugcugaucac

SEQ ID NO: 2489230 - RNA, 19 nt, Artificial Sequence
  Description of Artificial Sequence: Synthetic oligonucleotide
  Sense strand starting at position 840 of SEQ ID NO: 1887683
caugguauagccuggaaau

SEQ ID NO: 2489231 - RNA, 19 nt, Artificial Sequence
  Description of Artificial Sequence: Synthetic oligonucleotide
  Antisense strand to SEQ ID NO: 2489230
auuuccaggcuauaccaug

SEQ ID NO: 2489232 - RNA, 19 nt, Artificial Sequence
  Description of Artificial Sequence: Synthetic oligonucleotide
  Sense strand starting at position 841 of SEQ ID NO: 1887683
augguauagccuggaaauc

SEQ ID NO: 2489233 - RNA, 19 nt, Artificial Sequence
  Description of Artificial Sequence: Synthetic oligonucleotide
  Antisense strand to SEQ ID NO: 2489232
gauuuccaggcuauaccau

SEQ ID NO: 2489234 - RNA, 19 nt, Artificial Sequence
  Description of Artificial Sequence: Synthetic oligonucleotide
  Sense strand starting at position 842 of SEQ ID NO: 1887683
ugguauagccuggaaauca

SEQ ID NO: 2489235 - RNA, 19 nt, Artificial Sequence
  Description of Artificial Sequence: Synthetic oligonucleotide
  Antisense strand to SEQ ID NO: 2489234
ugauuuccaggcuauacca

SEQ ID NO: 2489236 - RNA, 19 nt, Artificial Sequence
  Description of Artificial Sequence: Synthetic oligonucleotide
  Sense strand starting at position 918 of SEQ ID NO: 1887683
ggccaugucagcuacguuu

SEQ ID NO: 2489237 - RNA, 19 nt, Artificial Sequence
  Description of Artificial Sequence: Synthetic oligonucleotide
  Antisense strand to SEQ ID NO: 2489236
aaacguagcugacauggcc

SEQ ID NO: 2489238 - RNA, 19 nt, Artificial Sequence
  Description of Artificial Sequence: Synthetic oligonucleotide
  Sense strand starting at position 920 of SEQ ID NO: 1887683
ccaugucagcuacguuuga

SEQ ID NO: 2489239 - RNA, 19 nt, Artificial Sequence
  Description of Artificial Sequence: Synthetic oligonucleotide
  Antisense strand to SEQ ID NO: 2489238
ucaaacguagcugacaugg

SEQ ID NO: 2489240 - RNA, 19 nt, Artificial Sequence
  Description of Artificial Sequence: Synthetic oligonucleotide
  Sense strand starting at position 921 of SEQ ID NO: 1887683
caugucagcuacguuugaa

SEQ ID NO: 2489241 - RNA, 19 nt, Artificial Sequence
  Description of Artificial Sequence: Synthetic oligonucleotide
  Antisense strand to SEQ ID NO: 2489240
uucaaacguagcugacaug

SEQ ID NO: 2489242 - RNA, 19 nt, Artificial Sequence
  Description of Artificial Sequence: Synthetic oligonucleotide
  Sense strand starting at position 924 of SEQ ID NO: 1887683
gucagcuacguuugaaaug

SEQ ID NO: 2489243 - RNA, 19 nt, Artificial Sequence
  Description of Artificial Sequence: Synthetic oligonucleotide
  Antisense strand to SEQ ID NO: 2489242
cauuucaaacguagcugac

SEQ ID NO: 2489244 - RNA, 19 nt, Artificial Sequence
  Description of Artificial Sequence: Synthetic oligonucleotide
  Sense strand starting at position 929 of SEQ ID NO: 1887683
cuacguuugaaauggguca

SEQ ID NO: 2489245 - RNA, 19 nt, Artificial Sequence
  Description of Artificial Sequence: Synthetic oligonucleotide
  Antisense strand to SEQ ID NO: 2489244
ugacccauuucaaacguag

SEQ ID NO: 2489246 - RNA, 19 nt, Artificial Sequence
  Description of Artificial Sequence: Synthetic oligonucleotide
  Sense strand starting at position 971 of SEQ ID NO: 1887683
uuaggaucccuugagcuca

SEQ ID NO: 2489247 - RNA, 19 nt, Artificial Sequence
  Description of Artificial Sequence: Synthetic oligonucleotide
  Antisense strand to SEQ ID NO: 2489246
ugagcucaagggauccuaa

SEQ ID NO: 2489248 - RNA, 19 nt, Artificial Sequence
  Description of Artificial Sequence: Synthetic oligonucleotide
  Sense strand starting at position 1407 of SEQ ID NO: 1887683
uugguaggcugacuuaaga

SEQ ID NO: 2489249 - RNA, 19 nt, Artificial Sequence
  Description of Artificial Sequence: Synthetic oligonucleotide
  Antisense strand to SEQ ID NO: 2489248
ucuuaagucagccuaccaa

SEQ ID NO: 2489250 - RNA, 19 nt, Artificial Sequence
  Description of Artificial Sequence: Synthetic oligonucleotide
  Sense strand starting at position 1652 of SEQ ID NO: 1887683
gcugcagugagcugauaau

SEQ ID NO: 2489251 - RNA, 19 nt, Artificial Sequence
  Description of Artificial Sequence: Synthetic oligonucleotide
  Antisense strand to SEQ ID NO: 2489250
auuaucagcucacugcagc

SEQ ID NO: 2489252 - RNA, 19 nt, Artificial Sequence
  Description of Artificial Sequence: Synthetic oligonucleotide
  Sense strand starting at position 1752 of SEQ ID NO: 1887683
gagaucuaggugggaagua

SEQ ID NO: 2489253 - RNA, 19 nt, Artificial Sequence
  Description of Artificial Sequence: Synthetic oligonucleotide
  Antisense strand to SEQ ID NO: 2489252
uacuucccaccuagaucuc

SEQ ID NO: 2489254 - RNA, 19 nt, Artificial Sequence
  Description of Artificial Sequence: Synthetic oligonucleotide
  Sense strand starting at position 2032 of SEQ ID NO: 1887683
uuggaaucuuccuugacca

SEQ ID NO: 2489255 - RNA, 19 nt, Artificial Sequence
  Description of Artificial Sequence: Synthetic oligonucleotide
  Antisense strand to SEQ ID NO: 2489254
uggucaaggaagauuccaa

SEQ ID NO: 2489256 - RNA, 19 nt, Artificial Sequence
  Description of Artificial Sequence: Synthetic oligonucleotide
  Sense strand starting at position 2033 of SEQ ID NO: 1887683
uggaaucuuccuugaccag

SEQ ID NO: 2489257 - RNA, 19 nt, Artificial Sequence
  Description of Artificial Sequence: Synthetic oligonucleotide
  Antisense strand to SEQ ID NO: 2489256
cuggucaaggaagauucca

SEQ ID NO: 2489258 - RNA, 19 nt, Artificial Sequence
  Description of Artificial Sequence: Synthetic oligonucleotide
  Sense strand starting at position 2039 of SEQ ID NO: 1887683
cuuccuugaccaggucaaa

SEQ ID NO: 2489259 - RNA, 19 nt, Artificial Sequence
  Description of Artificial Sequence: Synthetic oligonucleotide
  Antisense strand to SEQ ID NO: 2489258
uuugaccuggucaaggaag

SEQ ID NO: 2489260 - RNA, 19 nt, Artificial Sequence
  Description of Artificial Sequence: Synthetic oligonucleotide
  Sense strand starting at position 2158 of SEQ ID NO: 1887683
aaagaaucagcagguuagu

SEQ ID NO: 2489261 - RNA, 19 nt, Artificial Sequence
  Description of Artificial Sequence: Synthetic oligonucleotide
  Antisense strand to SEQ ID NO: 2489260
acuaaccugcugauucuuu

SEQ ID NO: 2489262 - RNA, 19 nt, Artificial Sequence
  Description of Artificial Sequence: Synthetic oligonucleotide
  Sense strand starting at position 2365 of SEQ ID NO: 1887683
uggaaucgaagauguugaa

SEQ ID NO: 2489263 - RNA, 19 nt, Artificial Sequence
  Description of Artificial Sequence: Synthetic oligonucleotide
  Antisense strand to SEQ ID NO: 2489262
uucaacaucuucgauucca

SEQ ID NO: 2489264 - RNA, 19 nt, Artificial Sequence
  Description of Artificial Sequence: Synthetic oligonucleotide
  Sense strand starting at position 2527 of SEQ ID NO: 1887683
ggcccagguuugaggagua

SEQ ID NO: 2489265 - RNA, 19 nt, Artificial Sequence
  Description of Artificial Sequence: Synthetic oligonucleotide
  Antisense strand to SEQ ID NO: 2489264
uacuccucaaaccugggcc

SEQ ID NO: 2489266 - RNA, 19 nt, Artificial Sequence
  Description of Artificial Sequence: Synthetic oligonucleotide
  Sense strand starting at position 2537 of SEQ ID NO: 1887683
ugaggaguacuugagcuca

SEQ ID NO: 2489267 - RNA, 19 nt, Artificial Sequence
  Description of Artificial Sequence: Synthetic oligonucleotide
  Antisense strand to SEQ ID NO: 2489266
ugagcucaaguacuccuca

SEQ ID NO: 2489268 - RNA, 19 nt, Artificial Sequence
  Description of Artificial Sequence: Synthetic oligonucleotide
  Sense strand starting at position 3000 of SEQ ID NO: 1887683
acagauaccuugucuuaga

SEQ ID NO: 2489269 - RNA, 19 nt, Artificial Sequence
  Description of Artificial Sequence: Synthetic oligonucleotide
  Antisense strand to SEQ ID NO: 2489268
ucuaagacaagguaucugu

SEQ ID NO: 2489270 - RNA, 19 nt, Artificial Sequence
  Description of Artificial Sequence: Synthetic oligonucleotide
  Sense strand starting at position 3050 of SEQ ID NO: 1887683
auuauccaugucugaugau

SEQ ID NO: 2489271 - RNA, 19 nt, Artificial Sequence
  Description of Artificial Sequence: Synthetic oligonucleotide
  Antisense strand to SEQ ID NO: 2489270
aucaucagacauggauaau

SEQ ID NO: 2489272 - RNA, 19 nt, Artificial Sequence
  Description of Artificial Sequence: Synthetic oligonucleotide
  Sense strand starting at position 3505 of SEQ ID NO: 1887683
aauggauuaugagccaagu

SEQ ID NO: 2489273 - RNA, 19 nt, Artificial Sequence
  Description of Artificial Sequence: Synthetic oligonucleotide
  Antisense strand to SEQ ID NO: 2489272
acuuggcucauaauccauu

SEQ ID NO: 2489274 - RNA, 19 nt, Artificial Sequence
  Description of Artificial Sequence: Synthetic oligonucleotide
  Sense strand starting at position 3507 of SEQ ID NO: 1887683
uggauuaugagccaagugu

SEQ ID NO: 2489275 - RNA, 19 nt, Artificial Sequence
  Description of Artificial Sequence: Synthetic oligonucleotide
  Antisense strand to SEQ ID NO: 2489274
acacuuggcucauaaucca

SEQ ID NO: 2489276 - RNA, 19 nt, Artificial Sequence
  Description of Artificial Sequence: Synthetic oligonucleotide
  Sense strand starting at position 3577 of SEQ ID NO: 1887683
ucaacucuacgauguugaa

SEQ ID NO: 2489277 - RNA, 19 nt, Artificial Sequence
  Description of Artificial Sequence: Synthetic oligonucleotide
  Antisense strand to SEQ ID NO: 2489276
uucaacaucguagaguuga

SEQ ID NO: 2489278 - RNA, 19 nt, Artificial Sequence
  Description of Artificial Sequence: Synthetic oligonucleotide
  Sense strand starting at position 3587 of SEQ ID NO: 1887683
gauguugaauugucaaaca

SEQ ID NO: 2489279 - RNA, 19 nt, Artificial Sequence
  Description of Artificial Sequence: Synthetic oligonucleotide
  Antisense strand to SEQ ID NO: 2489278
uguuugacaauucaacauc

SEQ ID NO: 2489280 - RNA, 19 nt, Artificial Sequence
  Description of Artificial Sequence: Synthetic oligonucleotide
  Sense strand starting at position 3626 of SEQ ID NO: 1887683
gaccacaggcuuggucaua

SEQ ID NO: 2489281 - RNA, 19 nt, Artificial Sequence
  Description of Artificial Sequence: Synthetic oligonucleotide
  Antisense strand to SEQ ID NO: 2489280
uaugaccaagccugugguc

SEQ ID NO: 2489282 - RNA, 19 nt, Artificial Sequence
  Description of Artificial Sequence: Synthetic oligonucleotide
  Sense strand starting at position 3627 of SEQ ID NO: 1887683
accacaggcuuggucauaa

SEQ ID NO: 2489283 - RNA, 19 nt, Artificial Sequence
  Description of Artificial Sequence: Synthetic oligonucleotide
  Antisense strand to SEQ ID NO: 2489282
uuaugaccaagccuguggu

SEQ ID NO: 2489284 - RNA, 19 nt, Artificial Sequence
  Description of Artificial Sequence: Synthetic oligonucleotide
  Sense strand starting at position 3918 of SEQ ID NO: 1887683
gugugauagagcuagaccu

SEQ ID NO: 2489285 - RNA, 19 nt, Artificial Sequence
  Description of Artificial Sequence: Synthetic oligonucleotide
  Antisense strand to SEQ ID NO: 2489284
aggucuagcucuaucacac

SEQ ID NO: 2489286 - RNA, 19 nt, Artificial Sequence
  Description of Artificial Sequence: Synthetic oligonucleotide
  Sense strand starting at position 84 of SEQ ID NO: 1887684
acuugaucgcaggaguuaa

SEQ ID NO: 2489287 - RNA, 19 nt, Artificial Sequence
  Description of Artificial Sequence: Synthetic oligonucleotide
  Antisense strand to SEQ ID NO: 2489286
uuaacuccugcgaucaagu

SEQ ID NO: 2489288 - RNA, 19 nt, Artificial Sequence
  Description of Artificial Sequence: Synthetic oligonucleotide
  Sense strand starting at position 88 of SEQ ID NO: 1887684
gaucgcaggaguuaagagu

SEQ ID NO: 2489289 - RNA, 19 nt, Artificial Sequence
  Description of Artificial Sequence: Synthetic oligonucleotide
  Antisense strand to SEQ ID NO: 2489288
acucuuaacuccugcgauc

SEQ ID NO: 2489290 - RNA, 19 nt, Artificial Sequence
  Description of Artificial Sequence: Synthetic oligonucleotide
  Sense strand starting at position 123 of SEQ ID NO: 1887684
gcugaaaccucaucaguac

SEQ ID NO: 2489291 - RNA, 19 nt, Artificial Sequence
  Description of Artificial Sequence: Synthetic oligonucleotide
  Antisense strand to SEQ ID NO: 2489290
guacugaugagguuucagc

SEQ ID NO: 2489292 - RNA, 19 nt, Artificial Sequence
  Description of Artificial Sequence: Synthetic oligonucleotide
  Sense strand starting at position 178 of SEQ ID NO: 1887684
gccuguagacacuaaucca

SEQ ID NO: 2489293 - RNA, 19 nt, Artificial Sequence
  Description of Artificial Sequence: Synthetic oligonucleotide
  Antisense strand to SEQ ID NO: 2489292
uggauuagugucuacaggc

SEQ ID NO: 2489294 - RNA, 19 nt, Artificial Sequence
  Description of Artificial Sequence: Synthetic oligonucleotide
  Sense strand starting at position 318 of SEQ ID NO: 1887684
acuccaaagugauauaaga

SEQ ID NO: 2489295 - RNA, 19 nt, Artificial Sequence
  Description of Artificial Sequence: Synthetic oligonucleotide
  Antisense strand to SEQ ID NO: 2489294
ucuuauaucacuuuggagu

SEQ ID NO: 2489296 - RNA, 19 nt, Artificial Sequence
  Description of Artificial Sequence: Synthetic oligonucleotide
  Sense strand starting at position 326 of SEQ ID NO: 1887684
gugauauaagaguguucuc

SEQ ID NO: 2489297 - RNA, 19 nt, Artificial Sequence
  Description of Artificial Sequence: Synthetic oligonucleotide
  Antisense strand to SEQ ID NO: 2489296
gagaacacucuuauaucac

SEQ ID NO: 2489298 - RNA, 19 nt, Artificial Sequence
  Description of Artificial Sequence: Synthetic oligonucleotide
  Sense strand starting at position 329 of SEQ ID NO: 1887684
auauaagaguguucucugu

SEQ ID NO: 2489299 - RNA, 19 nt, Artificial Sequence
  Description of Artificial Sequence: Synthetic oligonucleotide
  Antisense strand to SEQ ID NO: 2489298
acagagaacacucuuauau

SEQ ID NO: 2489300 - RNA, 19 nt, Artificial Sequence
  Description of Artificial Sequence: Synthetic oligonucleotide
  Sense strand starting at position 331 of SEQ ID NO: 1887684
auaagaguguucucugugu

SEQ ID NO: 2489301 - RNA, 19 nt, Artificial Sequence
  Description of Artificial Sequence: Synthetic oligonucleotide
  Antisense strand to SEQ ID NO: 2489300
acacagagaacacucuuau

SEQ ID NO: 2489302 - RNA, 19 nt, Artificial Sequence
  Description of Artificial Sequence: Synthetic oligonucleotide
  Sense strand starting at position 336 of SEQ ID NO: 1887684
aguguucucuguguauaga

SEQ ID NO: 2489303 - RNA, 19 nt, Artificial Sequence
  Description of Artificial Sequence: Synthetic oligonucleotide
  Antisense strand to SEQ ID NO: 2489302
ucuauacacagagaacacu

SEQ ID NO: 2489304 - RNA, 19 nt, Artificial Sequence
  Description of Artificial Sequence: Synthetic oligonucleotide
  Sense strand starting at position 337 of SEQ ID NO: 1887684
guguucucuguguauagaa

SEQ ID NO: 2489305 - RNA, 19 nt, Artificial Sequence
  Description of Artificial Sequence: Synthetic oligonucleotide
  Antisense strand to SEQ ID NO: 2489304
uucuauacacagagaacac

SEQ ID NO: 2489306 - RNA, 19 nt, Artificial Sequence
  Description of Artificial Sequence: Synthetic oligonucleotide
  Sense strand starting at position 339 of SEQ ID NO: 1887684
guucucuguguauagaaga

SEQ ID NO: 2489307 - RNA, 19 nt, Artificial Sequence
  Description of Artificial Sequence: Synthetic oligonucleotide
  Antisense strand to SEQ ID NO: 2489306
ucuucuauacacagagaac

SEQ ID NO: 2489308 - RNA, 19 nt, Artificial Sequence
  Description of Artificial Sequence: Synthetic oligonucleotide
  Sense strand starting at position 344 of SEQ ID NO: 1887684
cuguguauagaagacuauu

SEQ ID NO: 2489309 - RNA, 19 nt, Artificial Sequence
  Description of Artificial Sequence: Synthetic oligonucleotide
  Antisense strand to SEQ ID NO: 2489308
aauagucuucuauacacag

SEQ ID NO: 2489310 - RNA, 19 nt, Artificial Sequence
  Description of Artificial Sequence: Synthetic oligonucleotide
  Sense strand starting at position 383 of SEQ ID NO: 1887684
acagaacauugugaugaaa

SEQ ID NO: 2489311 - RNA, 19 nt, Artificial Sequence
  Description of Artificial Sequence: Synthetic oligonucleotide
  Antisense strand to SEQ ID NO: 2489310
uuucaucacaauguucugu

SEQ ID NO: 2489312 - RNA, 19 nt, Artificial Sequence
  Description of Artificial Sequence: Synthetic oligonucleotide
  Sense strand starting at position 483 of SEQ ID NO: 1887684
acauauuggugcuuugaca

SEQ ID NO: 2489313 - RNA, 19 nt, Artificial Sequence
  Description of Artificial Sequence: Synthetic oligonucleotide
  Antisense strand to SEQ ID NO: 2489312
ugucaaagcaccaauaugu

SEQ ID NO: 2489314 - RNA, 19 nt, Artificial Sequence
  Description of Artificial Sequence: Synthetic oligonucleotide
  Sense strand starting at position 678 of SEQ ID NO: 1887684
ucaagaauggccuggcuaa

SEQ ID NO: 2489315 - RNA, 19 nt, Artificial Sequence
  Description of Artificial Sequence: Synthetic oligonucleotide
  Antisense strand to SEQ ID NO: 2489314
uuagccaggccauucuuga

SEQ ID NO: 2489316 - RNA, 19 nt, Artificial Sequence
  Description of Artificial Sequence: Synthetic oligonucleotide
  Sense strand starting at position 699 of SEQ ID NO: 1887684
uggugaaacugugucuaaa

SEQ ID NO: 2489317 - RNA, 19 nt, Artificial Sequence
  Description of Artificial Sequence: Synthetic oligonucleotide
  Antisense strand to SEQ ID NO: 2489316
uuuagacacaguuucacca

SEQ ID NO: 2489318 - RNA, 19 nt, Artificial Sequence
  Description of Artificial Sequence: Synthetic oligonucleotide
  Sense strand starting at position 947 of SEQ ID NO: 1887684
ugucucaaauagucaaaga

SEQ ID NO: 2489319 - RNA, 19 nt, Artificial Sequence
  Description of Artificial Sequence: Synthetic oligonucleotide
  Antisense strand to SEQ ID NO: 2489318
ucuuugacuauuugagaca

SEQ ID NO: 2489320 - RNA, 19 nt, Artificial Sequence
  Description of Artificial Sequence: Synthetic oligonucleotide
  Sense strand starting at position 988 of SEQ ID NO: 1887684
cucucuucuugauugugua

SEQ ID NO: 2489321 - RNA, 19 nt, Artificial Sequence
  Description of Artificial Sequence: Synthetic oligonucleotide
  Antisense strand to SEQ ID NO: 2489320
uacacaaucaagaagagag

SEQ ID NO: 2489322 - RNA, 19 nt, Artificial Sequence
  Description of Artificial Sequence: Synthetic oligonucleotide
  Sense strand starting at position 989 of SEQ ID NO: 1887684
ucucuucuugauuguguau

SEQ ID NO: 2489323 - RNA, 19 nt, Artificial Sequence
  Description of Artificial Sequence: Synthetic oligonucleotide
  Antisense strand to SEQ ID NO: 2489322
auacacaaucaagaagaga

SEQ ID NO: 2489324 - RNA, 19 nt, Artificial Sequence
  Description of Artificial Sequence: Synthetic oligonucleotide
  Sense strand starting at position 1001 of SEQ ID NO: 1887684
uguguaugggcucacuuaa

SEQ ID NO: 2489325 - RNA, 19 nt, Artificial Sequence
  Description of Artificial Sequence: Synthetic oligonucleotide
  Antisense strand to SEQ ID NO: 2489324
uuaagugagcccauacaca

SEQ ID NO: 2489326 - RNA, 19 nt, Artificial Sequence
  Description of Artificial Sequence: Synthetic oligonucleotide
  Sense strand starting at position 1171 of SEQ ID NO: 1887684
auugcuugaacgugggauu

SEQ ID NO: 2489327 - RNA, 19 nt, Artificial Sequence
  Description of Artificial Sequence: Synthetic oligonucleotide
  Antisense strand to SEQ ID NO: 2489326
aaucccacguucaagcaau

SEQ ID NO: 2489328 - RNA, 19 nt, Artificial Sequence
  Description of Artificial Sequence: Synthetic oligonucleotide
  Sense strand starting at position 1334 of SEQ ID NO: 1887684
gagagaauggcuugaaucu

SEQ ID NO: 2489329 - RNA, 19 nt, Artificial Sequence
  Description of Artificial Sequence: Synthetic oligonucleotide
  Antisense strand to SEQ ID NO: 2489328
agauucaagccauucucuc

SEQ ID NO: 2489330 - RNA, 19 nt, Artificial Sequence
  Description of Artificial Sequence: Synthetic oligonucleotide
  Sense strand starting at position 1497 of SEQ ID NO: 1887684
ggaucuugaggucaguagu

SEQ ID NO: 2489331 - RNA, 19 nt, Artificial Sequence
  Description of Artificial Sequence: Synthetic oligonucleotide
  Antisense strand to SEQ ID NO: 2489330
acuacugaccucaagaucc

SEQ ID NO: 2489332 - RNA, 19 nt, Artificial Sequence
  Description of Artificial Sequence: Synthetic oligonucleotide
  Sense strand starting at position 1753 of SEQ ID NO: 1887684
aaagaucuacguuggaagu

SEQ ID NO: 2489333 - RNA, 19 nt, Artificial Sequence
  Description of Artificial Sequence: Synthetic oligonucleotide
  Antisense strand to SEQ ID NO: 2489332
acuuccaacguagaucuuu

SEQ ID NO: 2489334 - RNA, 19 nt, Artificial Sequence
  Description of Artificial Sequence: Synthetic oligonucleotide
  Sense strand starting at position 2346 of SEQ ID NO: 1887684
uccugauuagagcagucaa

SEQ ID NO: 2489335 - RNA, 19 nt, Artificial Sequence
  Description of Artificial Sequence: Synthetic oligonucleotide
  Antisense strand to SEQ ID NO: 2489334
uugacugcucuaaucagga

SEQ ID NO: 2489336 - RNA, 19 nt, Artificial Sequence
  Description of Artificial Sequence: Synthetic oligonucleotide
  Sense strand starting at position 2367 of SEQ ID NO: 1887684
uggaaucuaccauguugaa

SEQ ID NO: 2489337 - RNA, 19 nt, Artificial Sequence
  Description of Artificial Sequence: Synthetic oligonucleotide
  Antisense strand to SEQ ID NO: 2489336
uucaacaugguagauucca

SEQ ID NO: 2489338 - RNA, 19 nt, Artificial Sequence
  Description of Artificial Sequence: Synthetic oligonucleotide
  Sense strand starting at position 2683 of SEQ ID NO: 1887684
aagcgugcucugcaaagau

SEQ ID NO: 2489339 - RNA, 19 nt, Artificial Sequence
  Description of Artificial Sequence: Synthetic oligonucleotide
  Antisense strand to SEQ ID NO: 2489338
aucuuugcagagcacgcuu

SEQ ID NO: 2489340 - RNA, 19 nt, Artificial Sequence
  Description of Artificial Sequence: Synthetic oligonucleotide
  Sense strand starting at position 2899 of SEQ ID NO: 1887684
ugcauuuauugacccugua

SEQ ID NO: 2489341 - RNA, 19 nt, Artificial Sequence
  Description of Artificial Sequence: Synthetic oligonucleotide
  Antisense strand to SEQ ID NO: 2489340
uacagggucaauaaaugca

SEQ ID NO: 2489342 - RNA, 19 nt, Artificial Sequence
  Description of Artificial Sequence: Synthetic oligonucleotide
  Sense strand starting at position 3064 of SEQ ID NO: 1887684
cguaccuuuaaccgagaaa

SEQ ID NO: 2489343 - RNA, 19 nt, Artificial Sequence
  Description of Artificial Sequence: Synthetic oligonucleotide
  Antisense strand to SEQ ID NO: 2489342
uuucucgguuaaagguacg

SEQ ID NO: 2489344 - RNA, 19 nt, Artificial Sequence
  Description of Artificial Sequence: Synthetic oligonucleotide
  Sense strand starting at position 3180 of SEQ ID NO: 1887684
uggagucuacgauguugaa

SEQ ID NO: 2489345 - RNA, 19 nt, Artificial Sequence
  Description of Artificial Sequence: Synthetic oligonucleotide
  Antisense strand to SEQ ID NO: 2489344
uucaacaucguagacucca

SEQ ID NO: 2489346 - RNA, 19 nt, Artificial Sequence
  Description of Artificial Sequence: Synthetic oligonucleotide
  Sense strand starting at position 3544 of SEQ ID NO: 1887684
ggcagauauugucucagaa

SEQ ID NO: 2489347 - RNA, 19 nt, Artificial Sequence
  Description of Artificial Sequence: Synthetic oligonucleotide
  Antisense strand to SEQ ID NO: 2489346
uucugagacaauaucugcc

SEQ ID NO: 2489348 - RNA, 19 nt, Artificial Sequence
  Description of Artificial Sequence: Synthetic oligonucleotide
  Sense strand starting at position 3607 of SEQ ID NO: 1887684
cuaggugauaucggaguau

SEQ ID NO: 2489349 - RNA, 19 nt, Artificial Sequence
  Description of Artificial Sequence: Synthetic oligonucleotide
  Antisense strand to SEQ ID NO: 2489348
auacuccgauaucaccuag

SEQ ID NO: 2489350 - RNA, 19 nt, Artificial Sequence
  Description of Artificial Sequence: Synthetic oligonucleotide
  Sense strand starting at position 3611 of SEQ ID NO: 1887684
gugauaucggaguauucuc

SEQ ID NO: 2489351 - RNA, 19 nt, Artificial Sequence
  Description of Artificial Sequence: Synthetic oligonucleotide
  Antisense strand to SEQ ID NO: 2489350
gagaauacuccgauaucac

SEQ ID NO: 2489352 - RNA, 19 nt, Artificial Sequence
  Description of Artificial Sequence: Synthetic oligonucleotide
  Sense strand starting at position 3619 of SEQ ID NO: 1887684
ggaguauucucuguguuua

SEQ ID NO: 2489353 - RNA, 19 nt, Artificial Sequence
  Description of Artificial Sequence: Synthetic oligonucleotide
  Antisense strand to SEQ ID NO: 2489352
uaaacacagagaauacucc

SEQ ID NO: 2489354 - RNA, 19 nt, Artificial Sequence
  Description of Artificial Sequence: Synthetic oligonucleotide
  Sense strand starting at position 3620 of SEQ ID NO: 1887684
gaguauucucuguguuuag

SEQ ID NO: 2489355 - RNA, 19 nt, Artificial Sequence
  Description of Artificial Sequence: Synthetic oligonucleotide
  Antisense strand to SEQ ID NO: 2489354
cuaaacacagagaauacuc

SEQ ID NO: 2489356 - RNA, 19 nt, Artificial Sequence
  Description of Artificial Sequence: Synthetic oligonucleotide
  Sense strand starting at position 3621 of SEQ ID NO: 1887684
aguauucucuguguuuaga

SEQ ID NO: 2489357 - RNA, 19 nt, Artificial Sequence
  Description of Artificial Sequence: Synthetic oligonucleotide
  Antisense strand to SEQ ID NO: 2489356
ucuaaacacagagaauacu

SEQ ID NO: 2489358 - RNA, 19 nt, Artificial Sequence
  Description of Artificial Sequence: Synthetic oligonucleotide
  Sense strand starting at position 3623 of SEQ ID NO: 1887684
uauucucuguguuuagaag

SEQ ID NO: 2489359 - RNA, 19 nt, Artificial Sequence
  Description of Artificial Sequence: Synthetic oligonucleotide
  Antisense strand to SEQ ID NO: 2489358
cuucuaaacacagagaaua

SEQ ID NO: 2489360 - RNA, 19 nt, Artificial Sequence
  Description of Artificial Sequence: Synthetic oligonucleotide
  Sense strand starting at position 3629 of SEQ ID NO: 1887684
cuguguuuagaagaguauu

SEQ ID NO: 2489361 - RNA, 19 nt, Artificial Sequence
  Description of Artificial Sequence: Synthetic oligonucleotide
  Antisense strand to SEQ ID NO: 2489360
aauacucuucuaaacacag

SEQ ID NO: 2489362 - RNA, 19 nt, Artificial Sequence
  Description of Artificial Sequence: Synthetic oligonucleotide
  Sense strand starting at position 3764 of SEQ ID NO: 1887684
auaacugcuugcuuuggaa

SEQ ID NO: 2489363 - RNA, 19 nt, Artificial Sequence
  Description of Artificial Sequence: Synthetic oligonucleotide
  Antisense strand to SEQ ID NO: 2489362
uuccaaagcaagcaguuau

SEQ ID NO: 2489364 - RNA, 19 nt, Artificial Sequence
  Description of Artificial Sequence: Synthetic oligonucleotide
  Sense strand starting at position 3808 of SEQ ID NO: 1887684
auagaauauccuggccacu

SEQ ID NO: 2489365 - RNA, 19 nt, Artificial Sequence
  Description of Artificial Sequence: Synthetic oligonucleotide
  Antisense strand to SEQ ID NO: 2489364
aguggccaggauauucuau

SEQ ID NO: 2489366 - RNA, 19 nt, Artificial Sequence
  Description of Artificial Sequence: Synthetic oligonucleotide
  Sense strand starting at position 11 of SEQ ID NO: 1887685
ggguuucguguuggaauuu

SEQ ID NO: 2489367 - RNA, 19 nt, Artificial Sequence
  Description of Artificial Sequence: Synthetic oligonucleotide
  Antisense strand to SEQ ID NO: 2489366
aaauuccaacacgaaaccc

SEQ ID NO: 2489368 - RNA, 19 nt, Artificial Sequence
  Description of Artificial Sequence: Synthetic oligonucleotide
  Sense strand starting at position 28 of SEQ ID NO: 1887685
uuucuuugaccagguuuaa

SEQ ID NO: 2489369 - RNA, 19 nt, Artificial Sequence
  Description of Artificial Sequence: Synthetic oligonucleotide
  Antisense strand to SEQ ID NO: 2489368
uuaaaccuggucaaagaaa

SEQ ID NO: 2489370 - RNA, 19 nt, Artificial Sequence
  Description of Artificial Sequence: Synthetic oligonucleotide
  Sense strand starting at position 282 of SEQ ID NO: 1887685
aauggauucugagccaagu

SEQ ID NO: 2489371 - RNA, 19 nt, Artificial Sequence
  Description of Artificial Sequence: Synthetic oligonucleotide
  Antisense strand to SEQ ID NO: 2489370
acuuggcucagaauccauu

SEQ ID NO: 2489372 - RNA, 19 nt, Artificial Sequence
  Description of Artificial Sequence: Synthetic oligonucleotide
  Sense strand starting at position 284 of SEQ ID NO: 1887685
uggauucugagccaagugu

SEQ ID NO: 2489373 - RNA, 19 nt, Artificial Sequence
  Description of Artificial Sequence: Synthetic oligonucleotide
  Antisense strand to SEQ ID NO: 2489372
acacuuggcucagaaucca

SEQ ID NO: 2489374 - RNA, 19 nt, Artificial Sequence
  Description of Artificial Sequence: Synthetic oligonucleotide
  Sense strand starting at position 354 of SEQ ID NO: 1887685
ugugaucuaagauguugaa

SEQ ID NO: 2489375 - RNA, 19 nt, Artificial Sequence
  Description of Artificial Sequence: Synthetic oligonucleotide
  Antisense strand to SEQ ID NO: 2489374
uucaacaucuuagaucaca

SEQ ID NO: 2489376 - RNA, 19 nt, Artificial Sequence
  Description of Artificial Sequence: Synthetic oligonucleotide
  Sense strand starting at position 776 of SEQ ID NO: 1887685
ugauaucagucaucucugu

SEQ ID NO: 2489377 - RNA, 19 nt, Artificial Sequence
  Description of Artificial Sequence: Synthetic oligonucleotide
  Antisense strand to SEQ ID NO: 2489376
acagagaugacugauauca

SEQ ID NO: 2489378 - RNA, 19 nt, Artificial Sequence
  Description of Artificial Sequence: Synthetic oligonucleotide
  Sense strand starting at position 781 of SEQ ID NO: 1887685
ucagucaucucugugugua

SEQ ID NO: 2489379 - RNA, 19 nt, Artificial Sequence
  Description of Artificial Sequence: Synthetic oligonucleotide
  Antisense strand to SEQ ID NO: 2489378
uacacacagagaugacuga

SEQ ID NO: 2489380 - RNA, 19 nt, Artificial Sequence
  Description of Artificial Sequence: Synthetic oligonucleotide
  Sense strand starting at position 782 of SEQ ID NO: 1887685
cagucaucucuguguguag

SEQ ID NO: 2489381 - RNA, 19 nt, Artificial Sequence
  Description of Artificial Sequence: Synthetic oligonucleotide
  Antisense strand to SEQ ID NO: 2489380
cuacacacagagaugacug

SEQ ID NO: 2489382 - RNA, 19 nt, Artificial Sequence
  Description of Artificial Sequence: Synthetic oligonucleotide
  Sense strand starting at position 783 of SEQ ID NO: 1887685
agucaucucuguguguaga

SEQ ID NO: 2489383 - RNA, 19 nt, Artificial Sequence
  Description of Artificial Sequence: Synthetic oligonucleotide
  Antisense strand to SEQ ID NO: 2489382
ucuacacacagagaugacu

SEQ ID NO: 2489384 - RNA, 19 nt, Artificial Sequence
  Description of Artificial Sequence: Synthetic oligonucleotide
  Sense strand starting at position 784 of SEQ ID NO: 1887685
gucaucucuguguguagaa

SEQ ID NO: 2489385 - RNA, 19 nt, Artificial Sequence
  Description of Artificial Sequence: Synthetic oligonucleotide
  Antisense strand to SEQ ID NO: 2489384
uucuacacacagagaugac

SEQ ID NO: 2489386 - RNA, 19 nt, Artificial Sequence
  Description of Artificial Sequence: Synthetic oligonucleotide
  Sense strand starting at position 791 of SEQ ID NO: 1887685
cuguguguagaagaguauu

SEQ ID NO: 2489387 - RNA, 19 nt, Artificial Sequence
  Description of Artificial Sequence: Synthetic oligonucleotide
  Antisense strand to SEQ ID NO: 2489386
aauacucuucuacacacag

SEQ ID NO: 2489388 - RNA, 19 nt, Artificial Sequence
  Description of Artificial Sequence: Synthetic oligonucleotide
  Sense strand starting at position 1201 of SEQ ID NO: 1887685
ugccaaaguguugauauug

SEQ ID NO: 2489389 - RNA, 19 nt, Artificial Sequence
  Description of Artificial Sequence: Synthetic oligonucleotide
  Antisense strand to SEQ ID NO: 2489388
caauaucaacacuuuggca

SEQ ID NO: 2489390 - RNA, 19 nt, Artificial Sequence
  Description of Artificial Sequence: Synthetic oligonucleotide
  Sense strand starting at position 1210 of SEQ ID NO: 1887685
guugauauugcaggcauga

SEQ ID NO: 2489391 - RNA, 19 nt, Artificial Sequence
  Description of Artificial Sequence: Synthetic oligonucleotide
  Antisense strand to SEQ ID NO: 2489390
ucaugccugcaauaucaac

SEQ ID NO: 2489392 - RNA, 19 nt, Artificial Sequence
  Description of Artificial Sequence: Synthetic oligonucleotide
  Sense strand starting at position 1872 of SEQ ID NO: 1887685
gcaaauguauugccgagau

SEQ ID NO: 2489393 - RNA, 19 nt, Artificial Sequence
  Description of Artificial Sequence: Synthetic oligonucleotide
  Antisense strand to SEQ ID NO: 2489392
aucucggcaauacauuugc

SEQ ID NO: 2489394 - RNA, 19 nt, Artificial Sequence
  Description of Artificial Sequence: Synthetic oligonucleotide
  Sense strand starting at position 1874 of SEQ ID NO: 1887685
aaauguauugccgagauca

SEQ ID NO: 2489395 - RNA, 19 nt, Artificial Sequence
  Description of Artificial Sequence: Synthetic oligonucleotide
  Antisense strand to SEQ ID NO: 2489394
ugaucucggcaauacauuu

SEQ ID NO: 2489396 - RNA, 19 nt, Artificial Sequence
  Description of Artificial Sequence: Synthetic oligonucleotide
  Sense strand starting at position 1876 of SEQ ID NO: 1887685
auguauugccgagaucagc

SEQ ID NO: 2489397 - RNA, 19 nt, Artificial Sequence
  Description of Artificial Sequence: Synthetic oligonucleotide
  Antisense strand to SEQ ID NO: 2489396
gcugaucucggcaauacau

SEQ ID NO: 2489398 - RNA, 19 nt, Artificial Sequence
  Description of Artificial Sequence: Synthetic oligonucleotide
  Sense strand starting at position 1884 of SEQ ID NO: 1887685
ccgagaucagcaugaacgu

SEQ ID NO: 2489399 - RNA, 19 nt, Artificial Sequence
  Description of Artificial Sequence: Synthetic oligonucleotide
  Antisense strand to SEQ ID NO: 2489398
acguucaugcugaucucgg

SEQ ID NO: 2489400 - RNA, 19 nt, Artificial Sequence
  Description of Artificial Sequence: Synthetic oligonucleotide
  Sense strand starting at position 2162 of SEQ ID NO: 1887685
agcaaugccgacuauacau

SEQ ID NO: 2489401 - RNA, 19 nt, Artificial Sequence
  Description of Artificial Sequence: Synthetic oligonucleotide
  Antisense strand to SEQ ID NO: 2489400
auguauagucggcauugcu

SEQ ID NO: 2489402 - RNA, 19 nt, Artificial Sequence
  Description of Artificial Sequence: Synthetic oligonucleotide
  Sense strand starting at position 2197 of SEQ ID NO: 1887685
ugagaauugggcuggauuc

SEQ ID NO: 2489403 - RNA, 19 nt, Artificial Sequence
  Description of Artificial Sequence: Synthetic oligonucleotide
  Antisense strand to SEQ ID NO: 2489402
gaauccagcccaauucuca

SEQ ID NO: 2489404 - RNA, 19 nt, Artificial Sequence
  Description of Artificial Sequence: Synthetic oligonucleotide
  Sense strand starting at position 2198 of SEQ ID NO: 1887685
gagaauugggcuggauucu

SEQ ID NO: 2489405 - RNA, 19 nt, Artificial Sequence
  Description of Artificial Sequence: Synthetic oligonucleotide
  Antisense strand to SEQ ID NO: 2489404
agaauccagcccaauucuc

SEQ ID NO: 2489406 - RNA, 19 nt, Artificial Sequence
  Description of Artificial Sequence: Synthetic oligonucleotide
  Sense strand starting at position 2518 of SEQ ID NO: 1887685
gauaccucauguguagaga

SEQ ID NO: 2489407 - RNA, 19 nt, Artificial Sequence
  Description of Artificial Sequence: Synthetic oligonucleotide
  Antisense strand to SEQ ID NO: 2489406
ucucuacacaugagguauc

SEQ ID NO: 2489408 - RNA, 19 nt, Artificial Sequence
  Description of Artificial Sequence: Synthetic oligonucleotide
  Sense strand starting at position 2713 of SEQ ID NO: 1887685
uacccaaagugauacgaga

SEQ ID NO: 2489409 - RNA, 19 nt, Artificial Sequence
  Description of Artificial Sequence: Synthetic oligonucleotide
  Antisense strand to SEQ ID NO: 2489408
ucucguaucacuuugggua

SEQ ID NO: 2489410 - RNA, 19 nt, Artificial Sequence
  Description of Artificial Sequence: Synthetic oligonucleotide
  Sense strand starting at position 2715 of SEQ ID NO: 1887685
cccaaagugauacgagagu

SEQ ID NO: 2489411 - RNA, 19 nt, Artificial Sequence
  Description of Artificial Sequence: Synthetic oligonucleotide
  Antisense strand to SEQ ID NO: 2489410
acucucguaucacuuuggg

SEQ ID NO: 2489412 - RNA, 19 nt, Artificial Sequence
  Description of Artificial Sequence: Synthetic oligonucleotide
  Sense strand starting at position 2724 of SEQ ID NO: 1887685
auacgagaguauucucugu

SEQ ID NO: 2489413 - RNA, 19 nt, Artificial Sequence
  Description of Artificial Sequence: Synthetic oligonucleotide
  Antisense strand to SEQ ID NO: 2489412
acagagaauacucucguau

SEQ ID NO: 2489414 - RNA, 19 nt, Artificial Sequence
  Description of Artificial Sequence: Synthetic oligonucleotide
  Sense strand starting at position 2726 of SEQ ID NO: 1887685
acgagaguauucucugugu

SEQ ID NO: 2489415 - RNA, 19 nt, Artificial Sequence
  Description of Artificial Sequence: Synthetic oligonucleotide
  Antisense strand to SEQ ID NO: 2489414
acacagagaauacucucgu

SEQ ID NO: 2489416 - RNA, 19 nt, Artificial Sequence
  Description of Artificial Sequence: Synthetic oligonucleotide
  Sense strand starting at position 2728 of SEQ ID NO: 1887685
gagaguauucucuguguau

SEQ ID NO: 2489417 - RNA, 19 nt, Artificial Sequence
  Description of Artificial Sequence: Synthetic oligonucleotide
  Antisense strand to SEQ ID NO: 2489416
auacacagagaauacucuc

SEQ ID NO: 2489418 - RNA, 19 nt, Artificial Sequence
  Description of Artificial Sequence: Synthetic oligonucleotide
  Sense strand starting at position 2729 of SEQ ID NO: 1887685
agaguauucucuguguaua

SEQ ID NO: 2489419 - RNA, 19 nt, Artificial Sequence
  Description of Artificial Sequence: Synthetic oligonucleotide
  Antisense strand to SEQ ID NO: 2489418
uauacacagagaauacucu

SEQ ID NO: 2489420 - RNA, 19 nt, Artificial Sequence
  Description of Artificial Sequence: Synthetic oligonucleotide
  Sense strand starting at position 2730 of SEQ ID NO: 1887685
gaguauucucuguguauag

SEQ ID NO: 2489421 - RNA, 19 nt, Artificial Sequence
  Description of Artificial Sequence: Synthetic oligonucleotide
  Antisense strand to SEQ ID NO: 2489420
cuauacacagagaauacuc

SEQ ID NO: 2489422 - RNA, 19 nt, Artificial Sequence
  Description of Artificial Sequence: Synthetic oligonucleotide
  Sense strand starting at position 2731 of SEQ ID NO: 1887685
aguauucucuguguauaga

SEQ ID NO: 2489423 - RNA, 19 nt, Artificial Sequence
  Description of Artificial Sequence: Synthetic oligonucleotide
  Antisense strand to SEQ ID NO: 2489422
ucuauacacagagaauacu

SEQ ID NO: 2489424 - RNA, 19 nt, Artificial Sequence
  Description of Artificial Sequence: Synthetic oligonucleotide
  Sense strand starting at position 2732 of SEQ ID NO: 1887685
guauucucuguguauagaa

SEQ ID NO: 2489425 - RNA, 19 nt, Artificial Sequence
  Description of Artificial Sequence: Synthetic oligonucleotide
  Antisense strand to SEQ ID NO: 2489424
uucuauacacagagaauac

SEQ ID NO: 2489426 - RNA, 19 nt, Artificial Sequence
  Description of Artificial Sequence: Synthetic oligonucleotide
  Sense strand starting at position 2734 of SEQ ID NO: 1887685
auucucuguguauagaaga

SEQ ID NO: 2489427 - RNA, 19 nt, Artificial Sequence
  Description of Artificial Sequence: Synthetic oligonucleotide
  Antisense strand to SEQ ID NO: 2489426
ucuucuauacacagagaau

SEQ ID NO: 2489428 - RNA, 19 nt, Artificial Sequence
  Description of Artificial Sequence: Synthetic oligonucleotide
  Sense strand starting at position 2760 of SEQ ID NO: 1887685
guguguauaugacuauguu

SEQ ID NO: 2489429 - RNA, 19 nt, Artificial Sequence
  Description of Artificial Sequence: Synthetic oligonucleotide
  Antisense strand to SEQ ID NO: 2489428
aacauagucauauacacac

SEQ ID NO: 2489430 - RNA, 19 nt, Artificial Sequence
  Description of Artificial Sequence: Synthetic oligonucleotide
  Sense strand starting at position 2761 of SEQ ID NO: 1887685
uguguauaugacuauguua

SEQ ID NO: 2489431 - RNA, 19 nt, Artificial Sequence
  Description of Artificial Sequence: Synthetic oligonucleotide
  Antisense strand to SEQ ID NO: 2489430
uaacauagucauauacaca

SEQ ID NO: 2489432 - RNA, 19 nt, Artificial Sequence
  Description of Artificial Sequence: Synthetic oligonucleotide
  Sense strand starting at position 2763 of SEQ ID NO: 1887685
uguauaugacuauguuaca

SEQ ID NO: 2489433 - RNA, 19 nt, Artificial Sequence
  Description of Artificial Sequence: Synthetic oligonucleotide
  Antisense strand to SEQ ID NO: 2489432
uguaacauagucauauaca

SEQ ID NO: 2489434 - RNA, 19 nt, Artificial Sequence
  Description of Artificial Sequence: Synthetic oligonucleotide
  Sense strand starting at position 2764 of SEQ ID NO: 1887685
guauaugacuauguuacau

SEQ ID NO: 2489435 - RNA, 19 nt, Artificial Sequence
  Description of Artificial Sequence: Synthetic oligonucleotide
  Antisense strand to SEQ ID NO: 2489434
auguaacauagucauauac

SEQ ID NO: 2489436 - RNA, 19 nt, Artificial Sequence
  Description of Artificial Sequence: Synthetic oligonucleotide
  Sense strand starting at position 2848 of SEQ ID NO: 1887685
auacuaugugcucacauga

SEQ ID NO: 2489437 - RNA, 19 nt, Artificial Sequence
  Description of Artificial Sequence: Synthetic oligonucleotide
  Antisense strand to SEQ ID NO: 2489436
ucaugugagcacauaguau

SEQ ID NO: 2489438 - RNA, 19 nt, Artificial Sequence
  Description of Artificial Sequence: Synthetic oligonucleotide
  Sense strand starting at position 2879 of SEQ ID NO: 1887685
acacauaugugcuugcauu

SEQ ID NO: 2489439 - RNA, 19 nt, Artificial Sequence
  Description of Artificial Sequence: Synthetic oligonucleotide
  Antisense strand to SEQ ID NO: 2489438
aaugcaagcacauaugugu

SEQ ID NO: 2489440 - RNA, 19 nt, Artificial Sequence
  Description of Artificial Sequence: Synthetic oligonucleotide
  Sense strand starting at position 3091 of SEQ ID NO: 1887685
ccaucuacuugggaggaga

SEQ ID NO: 2489441 - RNA, 19 nt, Artificial Sequence
  Description of Artificial Sequence: Synthetic oligonucleotide
  Antisense strand to SEQ ID NO: 2489440
ucuccucccaaguagaugg

SEQ ID NO: 2489442 - RNA, 19 nt, Artificial Sequence
  Description of Artificial Sequence: Synthetic oligonucleotide
  Sense strand starting at position 3821 of SEQ ID NO: 1887685
aauggaaucuaagaugaug

SEQ ID NO: 2489443 - RNA, 19 nt, Artificial Sequence
  Description of Artificial Sequence: Synthetic oligonucleotide
  Antisense strand to SEQ ID NO: 2489442
caucaucuuagauuccauu

SEQ ID NO: 2489444 - RNA, 19 nt, Artificial Sequence
  Description of Artificial Sequence: Synthetic oligonucleotide
  Sense strand starting at position 3823 of SEQ ID NO: 1887685
uggaaucuaagaugauguu

SEQ ID NO: 2489445 - RNA, 19 nt, Artificial Sequence
  Description of Artificial Sequence: Synthetic oligonucleotide
  Antisense strand to SEQ ID NO: 2489444
aacaucaucuuagauucca

SEQ ID NO: 2489446 - RNA, 19 nt, Artificial Sequence
  Description of Artificial Sequence: Synthetic oligonucleotide
  Sense strand starting at position 531 of SEQ ID NO: 1887686
uggagugcagcagaagauu

SEQ ID NO: 2489447 - RNA, 19 nt, Artificial Sequence
  Description of Artificial Sequence: Synthetic oligonucleotide
  Antisense strand to SEQ ID NO: 2489446
aaucuucugcugcacucca

SEQ ID NO: 2489448 - RNA, 19 nt, Artificial Sequence
  Description of Artificial Sequence: Synthetic oligonucleotide
  Sense strand starting at position 676 of SEQ ID NO: 1887686
gcacacuagucccauauuu

SEQ ID NO: 2489449 - RNA, 19 nt, Artificial Sequence
  Description of Artificial Sequence: Synthetic oligonucleotide
  Antisense strand to SEQ ID NO: 2489448
aaauaugggacuagugugc

SEQ ID NO: 2489450 - RNA, 19 nt, Artificial Sequence
  Description of Artificial Sequence: Synthetic oligonucleotide
  Sense strand starting at position 740 of SEQ ID NO: 1887686
cagcaaaucguuuguuguu

SEQ ID NO: 2489451 - RNA, 19 nt, Artificial Sequence
  Description of Artificial Sequence: Synthetic oligonucleotide
  Antisense strand to SEQ ID NO: 2489450
aacaacaaacgauuugcug

SEQ ID NO: 2489452 - RNA, 19 nt, Artificial Sequence
  Description of Artificial Sequence: Synthetic oligonucleotide
  Sense strand starting at position 746 of SEQ ID NO: 1887686
aucguuuguuguucaagua

SEQ ID NO: 2489453 - RNA, 19 nt, Artificial Sequence
  Description of Artificial Sequence: Synthetic oligonucleotide
  Antisense strand to SEQ ID NO: 2489452
uacuugaacaacaaacgau

SEQ ID NO: 2489454 - RNA, 19 nt, Artificial Sequence
  Description of Artificial Sequence: Synthetic oligonucleotide
  Sense strand starting at position 957 of SEQ ID NO: 1887686
cgccgucucaugcauuuau

SEQ ID NO: 2489455 - RNA, 19 nt, Artificial Sequence
  Description of Artificial Sequence: Synthetic oligonucleotide
  Antisense strand to SEQ ID NO: 2489454
auaaaugcaugagacggcg

SEQ ID NO: 2489456 - RNA, 19 nt, Artificial Sequence
  Description of Artificial Sequence: Synthetic oligonucleotide
  Sense strand starting at position 1405 of SEQ ID NO: 1887686
uggagucagccgggaucau

SEQ ID NO: 2489457 - RNA, 19 nt, Artificial Sequence
  Description of Artificial Sequence: Synthetic oligonucleotide
  Antisense strand to SEQ ID NO: 2489456
augaucccggcugacucca

SEQ ID NO: 2489458 - RNA, 19 nt, Artificial Sequence
  Description of Artificial Sequence: Synthetic oligonucleotide
  Sense strand starting at position 1500 of SEQ ID NO: 1887686
auauuagccgagugugaug

SEQ ID NO: 2489459 - RNA, 19 nt, Artificial Sequence
  Description of Artificial Sequence: Synthetic oligonucleotide
  Antisense strand to SEQ ID NO: 2489458
caucacacucggcuaauau

SEQ ID NO: 2489460 - RNA, 19 nt, Artificial Sequence
  Description of Artificial Sequence: Synthetic oligonucleotide
  Sense strand starting at position 1637 of SEQ ID NO: 1887686
gcaagacuguaucccauaa

SEQ ID NO: 2489461 - RNA, 19 nt, Artificial Sequence
  Description of Artificial Sequence: Synthetic oligonucleotide
  Antisense strand to SEQ ID NO: 2489460
uuaugggauacagucuugc

SEQ ID NO: 2489462 - RNA, 19 nt, Artificial Sequence
  Description of Artificial Sequence: Synthetic oligonucleotide
  Sense strand starting at position 1669 of SEQ ID NO: 1887686
gcccaacaggccuaucuua

SEQ ID NO: 2489463 - RNA, 19 nt, Artificial Sequence
  Description of Artificial Sequence: Synthetic oligonucleotide
  Antisense strand to SEQ ID NO: 2489462
uaagauaggccuguugggc

SEQ ID NO: 2489464 - RNA, 19 nt, Artificial Sequence
  Description of Artificial Sequence: Synthetic oligonucleotide
  Sense strand starting at position 1699 of SEQ ID NO: 1887686
ucuagucucuccugggcaa

SEQ ID NO: 2489465 - RNA, 19 nt, Artificial Sequence
  Description of Artificial Sequence: Synthetic oligonucleotide
  Antisense strand to SEQ ID NO: 2489464
uugcccaggagagacuaga

SEQ ID NO: 2489466 - RNA, 19 nt, Artificial Sequence
  Description of Artificial Sequence: Synthetic oligonucleotide
  Sense strand starting at position 1718 of SEQ ID NO: 1887686
cagagaccuugucuuagaa

SEQ ID NO: 2489467 - RNA, 19 nt, Artificial Sequence
  Description of Artificial Sequence: Synthetic oligonucleotide
  Antisense strand to SEQ ID NO: 2489466
uucuaagacaaggucucug

SEQ ID NO: 2489468 - RNA, 19 nt, Artificial Sequence
  Description of Artificial Sequence: Synthetic oligonucleotide
  Sense strand starting at position 1844 of SEQ ID NO: 1887686
auccaagucugauuacaag

SEQ ID NO: 2489469 - RNA, 19 nt, Artificial Sequence
  Description of Artificial Sequence: Synthetic oligonucleotide
  Antisense strand to SEQ ID NO: 2489468
cuuguaaucagacuuggau

SEQ ID NO: 2489470 - RNA, 19 nt, Artificial Sequence
  Description of Artificial Sequence: Synthetic oligonucleotide
  Sense strand starting at position 1858 of SEQ ID NO: 1887686
acaagcauggucugcaaau

SEQ ID NO: 2489471 - RNA, 19 nt, Artificial Sequence
  Description of Artificial Sequence: Synthetic oligonucleotide
  Antisense strand to SEQ ID NO: 2489470
auuugcagaccaugcuugu

SEQ ID NO: 2489472 - RNA, 19 nt, Artificial Sequence
  Description of Artificial Sequence: Synthetic oligonucleotide
  Sense strand starting at position 2031 of SEQ ID NO: 1887686
guugaaaucuuccuugacc

SEQ ID NO: 2489473 - RNA, 19 nt, Artificial Sequence
  Description of Artificial Sequence: Synthetic oligonucleotide
  Antisense strand to SEQ ID NO: 2489472
ggucaaggaagauuucaac

SEQ ID NO: 2489474 - RNA, 19 nt, Artificial Sequence
  Description of Artificial Sequence: Synthetic oligonucleotide
  Sense strand starting at position 2033 of SEQ ID NO: 1887686
ugaaaucuuccuugaccag

SEQ ID NO: 2489475 - RNA, 19 nt, Artificial Sequence
  Description of Artificial Sequence: Synthetic oligonucleotide
  Antisense strand to SEQ ID NO: 2489474
cuggucaaggaagauuuca

SEQ ID NO: 2489476 - RNA, 19 nt, Artificial Sequence
  Description of Artificial Sequence: Synthetic oligonucleotide
  Sense strand starting at position 2294 of SEQ ID NO: 1887686
uggacuuugagcugagugu

SEQ ID NO: 2489477 - RNA, 19 nt, Artificial Sequence
  Description of Artificial Sequence: Synthetic oligonucleotide
  Antisense strand to SEQ ID NO: 2489476
acacucagcucaaagucca

SEQ ID NO: 2489478 - RNA, 19 nt, Artificial Sequence
  Description of Artificial Sequence: Synthetic oligonucleotide
  Sense strand starting at position 2295 of SEQ ID NO: 1887686
ggacuuugagcugaguguu

SEQ ID NO: 2489479 - RNA, 19 nt, Artificial Sequence
  Description of Artificial Sequence: Synthetic oligonucleotide
  Antisense strand to SEQ ID NO: 2489478
aacacucagcucaaagucc

SEQ ID NO: 2489480 - RNA, 19 nt, Artificial Sequence
  Description of Artificial Sequence: Synthetic oligonucleotide
  Sense strand starting at position 2331 of SEQ ID NO: 1887686
agggauacauaguuccgau

SEQ ID NO: 2489481 - RNA, 19 nt, Artificial Sequence
  Description of Artificial Sequence: Synthetic oligonucleotide
  Antisense strand to SEQ ID NO: 2489480
aucggaacuauguaucccu

SEQ ID NO: 2489482 - RNA, 19 nt, Artificial Sequence
  Description of Artificial Sequence: Synthetic oligonucleotide
  Sense strand starting at position 2335 of SEQ ID NO: 1887686
auacauaguuccgauggga

SEQ ID NO: 2489483 - RNA, 19 nt, Artificial Sequence
  Description of Artificial Sequence: Synthetic oligonucleotide
  Antisense strand to SEQ ID NO: 2489482
ucccaucggaacuauguau

SEQ ID NO: 2489484 - RNA, 19 nt, Artificial Sequence
  Description of Artificial Sequence: Synthetic oligonucleotide
  Sense strand starting at position 2364 of SEQ ID NO: 1887686
uggagucuaagauguugaa

SEQ ID NO: 2489485 - RNA, 19 nt, Artificial Sequence
  Description of Artificial Sequence: Synthetic oligonucleotide
  Antisense strand to SEQ ID NO: 2489484
uucaacaucuuagacucca

SEQ ID NO: 2489486 - RNA, 19 nt, Artificial Sequence
  Description of Artificial Sequence: Synthetic oligonucleotide
  Sense strand starting at position 2367 of SEQ ID NO: 1887686
agucuaagauguugaagaa

SEQ ID NO: 2489487 - RNA, 19 nt, Artificial Sequence
  Description of Artificial Sequence: Synthetic oligonucleotide
  Antisense strand to SEQ ID NO: 2489486
uucuucaacaucuuagacu

SEQ ID NO: 2489488 - RNA, 19 nt, Artificial Sequence
  Description of Artificial Sequence: Synthetic oligonucleotide
  Sense strand starting at position 2430 of SEQ ID NO: 1887686
gcuaguggaucaccugaaa

SEQ ID NO: 2489489 - RNA, 19 nt, Artificial Sequence
  Description of Artificial Sequence: Synthetic oligonucleotide
  Antisense strand to SEQ ID NO: 2489488
uuucaggugauccacuagc

SEQ ID NO: 2489490 - RNA, 19 nt, Artificial Sequence
  Description of Artificial Sequence: Synthetic oligonucleotide
  Sense strand starting at position 2523 of SEQ ID NO: 1887686
ggcaguaggugccuguaau

SEQ ID NO: 2489491 - RNA, 19 nt, Artificial Sequence
  Description of Artificial Sequence: Synthetic oligonucleotide
  Antisense strand to SEQ ID NO: 2489490
auuacaggcaccuacugcc

SEQ ID NO: 2489492 - RNA, 19 nt, Artificial Sequence
  Description of Artificial Sequence: Synthetic oligonucleotide
  Sense strand starting at position 2524 of SEQ ID NO: 1887686
gcaguaggugccuguaauc

SEQ ID NO: 2489493 - RNA, 19 nt, Artificial Sequence
  Description of Artificial Sequence: Synthetic oligonucleotide
  Antisense strand to SEQ ID NO: 2489492
gauuacaggcaccuacugc

SEQ ID NO: 2489494 - RNA, 19 nt, Artificial Sequence
  Description of Artificial Sequence: Synthetic oligonucleotide
  Sense strand starting at position 2664 of SEQ ID NO: 1887686
ggugccugaugccugaauu

SEQ ID NO: 2489495 - RNA, 19 nt, Artificial Sequence
  Description of Artificial Sequence: Synthetic oligonucleotide
  Antisense strand to SEQ ID NO: 2489494
aauucaggcaucaggcacc

SEQ ID NO: 2489496 - RNA, 19 nt, Artificial Sequence
  Description of Artificial Sequence: Synthetic oligonucleotide
  Sense strand starting at position 2665 of SEQ ID NO: 1887686
gugccugaugccugaauuc

SEQ ID NO: 2489497 - RNA, 19 nt, Artificial Sequence
  Description of Artificial Sequence: Synthetic oligonucleotide
  Antisense strand to SEQ ID NO: 2489496
gaauucaggcaucaggcac

SEQ ID NO: 2489498 - RNA, 19 nt, Artificial Sequence
  Description of Artificial Sequence: Synthetic oligonucleotide
  Sense strand starting at position 2732 of SEQ ID NO: 1887686
uggaguuuccggugagcag

SEQ ID NO: 2489499 - RNA, 19 nt, Artificial Sequence
  Description of Artificial Sequence: Synthetic oligonucleotide
  Antisense strand to SEQ ID NO: 2489498
cugcucaccggaaacucca

SEQ ID NO: 2489500 - RNA, 19 nt, Artificial Sequence
  Description of Artificial Sequence: Synthetic oligonucleotide
  Sense strand starting at position 2733 of SEQ ID NO: 1887686
ggaguuuccggugagcaga

SEQ ID NO: 2489501 - RNA, 19 nt, Artificial Sequence
  Description of Artificial Sequence: Synthetic oligonucleotide
  Antisense strand to SEQ ID NO: 2489500
ucugcucaccggaaacucc

SEQ ID NO: 2489502 - RNA, 19 nt, Artificial Sequence
  Description of Artificial Sequence: Synthetic oligonucleotide
  Sense strand starting at position 2775 of SEQ ID NO: 1887686
gaaacaagagugugucuca

SEQ ID NO: 2489503 - RNA, 19 nt, Artificial Sequence
  Description of Artificial Sequence: Synthetic oligonucleotide
  Antisense strand to SEQ ID NO: 2489502
ugagacacacucuuguuuc

SEQ ID NO: 2489504 - RNA, 19 nt, Artificial Sequence
  Description of Artificial Sequence: Synthetic oligonucleotide
  Sense strand starting at position 2776 of SEQ ID NO: 1887686
aaacaagagugugucucaa

SEQ ID NO: 2489505 - RNA, 19 nt, Artificial Sequence
  Description of Artificial Sequence: Synthetic oligonucleotide
  Antisense strand to SEQ ID NO: 2489504
uugagacacacucuuguuu

SEQ ID NO: 2489506 - RNA, 19 nt, Artificial Sequence
  Description of Artificial Sequence: Synthetic oligonucleotide
  Sense strand starting at position 2831 of SEQ ID NO: 1887686
agaaaucuugguggaaggu

SEQ ID NO: 2489507 - RNA, 19 nt, Artificial Sequence
  Description of Artificial Sequence: Synthetic oligonucleotide
  Antisense strand to SEQ ID NO: 2489506
accuuccaccaagauuucu

SEQ ID NO: 2489508 - RNA, 19 nt, Artificial Sequence
  Description of Artificial Sequence: Synthetic oligonucleotide
  Sense strand starting at position 2873 of SEQ ID NO: 1887686
uagaaagccugucuuggaa

SEQ ID NO: 2489509 - RNA, 19 nt, Artificial Sequence
  Description of Artificial Sequence: Synthetic oligonucleotide
  Antisense strand to SEQ ID NO: 2489508
uuccaagacaggcuuucua

SEQ ID NO: 2489510 - RNA, 19 nt, Artificial Sequence
  Description of Artificial Sequence: Synthetic oligonucleotide
  Sense strand starting at position 2982 of SEQ ID NO: 1887686
caacguugcuugucucaaa

SEQ ID NO: 2489511 - RNA, 19 nt, Artificial Sequence
  Description of Artificial Sequence: Synthetic oligonucleotide
  Antisense strand to SEQ ID NO: 2489510
uuugagacaagcaacguug

SEQ ID NO: 2489512 - RNA, 19 nt, Artificial Sequence
  Description of Artificial Sequence: Synthetic oligonucleotide
  Sense strand starting at position 3230 of SEQ ID NO: 1887686
augcauauugcauauauga

SEQ ID NO: 2489513 - RNA, 19 nt, Artificial Sequence
  Description of Artificial Sequence: Synthetic oligonucleotide
  Antisense strand to SEQ ID NO: 2489512
ucauauaugcaauaugcau

SEQ ID NO: 2489514 - RNA, 19 nt, Artificial Sequence
  Description of Artificial Sequence: Synthetic oligonucleotide
  Sense strand starting at position 3237 of SEQ ID NO: 1887686
uugcauauaugacugcaua

SEQ ID NO: 2489515 - RNA, 19 nt, Artificial Sequence
  Description of Artificial Sequence: Synthetic oligonucleotide
  Antisense strand to SEQ ID NO: 2489514
uaugcagucauauaugcaa

SEQ ID NO: 2489516 - RNA, 19 nt, Artificial Sequence
  Description of Artificial Sequence: Synthetic oligonucleotide
  Sense strand starting at position 3238 of SEQ ID NO: 1887686
ugcauauaugacugcauau

SEQ ID NO: 2489517 - RNA, 19 nt, Artificial Sequence
  Description of Artificial Sequence: Synthetic oligonucleotide
  Antisense strand to SEQ ID NO: 2489516
auaugcagucauauaugca

SEQ ID NO: 2489518 - RNA, 19 nt, Artificial Sequence
  Description of Artificial Sequence: Synthetic oligonucleotide
  Sense strand starting at position 3252 of SEQ ID NO: 1887686
cauauaugaccuggucaug

SEQ ID NO: 2489519 - RNA, 19 nt, Artificial Sequence
  Description of Artificial Sequence: Synthetic oligonucleotide
  Antisense strand to SEQ ID NO: 2489518
caugaccaggucauauaug

SEQ ID NO: 2489520 - RNA, 19 nt, Artificial Sequence
  Description of Artificial Sequence: Synthetic oligonucleotide
  Sense strand starting at position 3407 of SEQ ID NO: 1887686
uuuauaaaucagugccaga

SEQ ID NO: 2489521 - RNA, 19 nt, Artificial Sequence
  Description of Artificial Sequence: Synthetic oligonucleotide
  Antisense strand to SEQ ID NO: 2489520
ucuggcacugauuuauaaa

SEQ ID NO: 2489522 - RNA, 19 nt, Artificial Sequence
  Description of Artificial Sequence: Synthetic oligonucleotide
  Sense strand starting at position 3410 of SEQ ID NO: 1887686
auaaaucagugccagaaua

SEQ ID NO: 2489523 - RNA, 19 nt, Artificial Sequence
  Description of Artificial Sequence: Synthetic oligonucleotide
  Antisense strand to SEQ ID NO: 2489522
uauucuggcacugauuuau

SEQ ID NO: 2489524 - RNA, 19 nt, Artificial Sequence
  Description of Artificial Sequence: Synthetic oligonucleotide
  Sense strand starting at position 292 of SEQ ID NO: 1887687
gggcaauccuccugaguuc

SEQ ID NO: 2489525 - RNA, 19 nt, Artificial Sequence
  Description of Artificial Sequence: Synthetic oligonucleotide
  Antisense strand to SEQ ID NO: 2489524
gaacucaggaggauugccc

SEQ ID NO: 2489526 - RNA, 19 nt, Artificial Sequence
  Description of Artificial Sequence: Synthetic oligonucleotide
  Sense strand starting at position 293 of SEQ ID NO: 1887687
ggcaauccuccugaguucu

SEQ ID NO: 2489527 - RNA, 19 nt, Artificial Sequence
  Description of Artificial Sequence: Synthetic oligonucleotide
  Antisense strand to SEQ ID NO: 2489526
agaacucaggaggauugcc

SEQ ID NO: 2489528 - RNA, 19 nt, Artificial Sequence
  Description of Artificial Sequence: Synthetic oligonucleotide
  Sense strand starting at position 354 of SEQ ID NO: 1887687
auuuaaccaugagaauuga

SEQ ID NO: 2489529 - RNA, 19 nt, Artificial Sequence
  Description of Artificial Sequence: Synthetic oligonucleotide
  Antisense strand to SEQ ID NO: 2489528
ucaauucucaugguuaaau

SEQ ID NO: 2489530 - RNA, 19 nt, Artificial Sequence
  Description of Artificial Sequence: Synthetic oligonucleotide
  Sense strand starting at position 589 of SEQ ID NO: 1887687
gguggcucacaccaauaaa

SEQ ID NO: 2489531 - RNA, 19 nt, Artificial Sequence
  Description of Artificial Sequence: Synthetic oligonucleotide
  Antisense strand to SEQ ID NO: 2489530
uuuauuggugugagccacc

SEQ ID NO: 2489532 - RNA, 19 nt, Artificial Sequence
  Description of Artificial Sequence: Synthetic oligonucleotide
  Sense strand starting at position 664 of SEQ ID NO: 1887687
caaccagcauggguaauau

SEQ ID NO: 2489533 - RNA, 19 nt, Artificial Sequence
  Description of Artificial Sequence: Synthetic oligonucleotide
  Antisense strand to SEQ ID NO: 2489532
auauuacccaugcugguug

SEQ ID NO: 2489534 - RNA, 19 nt, Artificial Sequence
  Description of Artificial Sequence: Synthetic oligonucleotide
  Sense strand starting at position 683 of SEQ ID NO: 1887687
ggugaaaccuuaugcacaa

SEQ ID NO: 2489535 - RNA, 19 nt, Artificial Sequence
  Description of Artificial Sequence: Synthetic oligonucleotide
  Antisense strand to SEQ ID NO: 2489534
uugugcauaagguuucacc

SEQ ID NO: 2489536 - RNA, 19 nt, Artificial Sequence
  Description of Artificial Sequence: Synthetic oligonucleotide
  Sense strand starting at position 684 of SEQ ID NO: 1887687
gugaaaccuuaugcacaaa

SEQ ID NO: 2489537 - RNA, 19 nt, Artificial Sequence
  Description of Artificial Sequence: Synthetic oligonucleotide
  Antisense strand to SEQ ID NO: 2489536
uuugugcauaagguuucac

SEQ ID NO: 2489538 - RNA, 19 nt, Artificial Sequence
  Description of Artificial Sequence: Synthetic oligonucleotide
  Sense strand starting at position 781 of SEQ ID NO: 1887687
gcaguaagucgacauggca

SEQ ID NO: 2489539 - RNA, 19 nt, Artificial Sequence
  Description of Artificial Sequence: Synthetic oligonucleotide
  Antisense strand to SEQ ID NO: 2489538
ugccaugucgacuuacugc

SEQ ID NO: 2489540 - RNA, 19 nt, Artificial Sequence
  Description of Artificial Sequence: Synthetic oligonucleotide
  Sense strand starting at position 909 of SEQ ID NO: 1887687
acaagaguauucuccgugu

SEQ ID NO: 2489541 - RNA, 19 nt, Artificial Sequence
  Description of Artificial Sequence: Synthetic oligonucleotide
  Antisense strand to SEQ ID NO: 2489540
acacggagaauacucuugu

SEQ ID NO: 2489542 - RNA, 19 nt, Artificial Sequence
  Description of Artificial Sequence: Synthetic oligonucleotide
  Sense strand starting at position 911 of SEQ ID NO: 1887687
aagaguauucuccgugugu

SEQ ID NO: 2489543 - RNA, 19 nt, Artificial Sequence
  Description of Artificial Sequence: Synthetic oligonucleotide
  Antisense strand to SEQ ID NO: 2489542
acacacggagaauacucuu

SEQ ID NO: 2489544 - RNA, 19 nt, Artificial Sequence
  Description of Artificial Sequence: Synthetic oligonucleotide
  Sense strand starting at position 912 of SEQ ID NO: 1887687
agaguauucuccgugugua

SEQ ID NO: 2489545 - RNA, 19 nt, Artificial Sequence
  Description of Artificial Sequence: Synthetic oligonucleotide
  Antisense strand to SEQ ID NO: 2489544
uacacacggagaauacucu

SEQ ID NO: 2489546 - RNA, 19 nt, Artificial Sequence
  Description of Artificial Sequence: Synthetic oligonucleotide
  Sense strand starting at position 913 of SEQ ID NO: 1887687
gaguauucuccguguguag

SEQ ID NO: 2489547 - RNA, 19 nt, Artificial Sequence
  Description of Artificial Sequence: Synthetic oligonucleotide
  Antisense strand to SEQ ID NO: 2489546
cuacacacggagaauacuc

SEQ ID NO: 2489548 - RNA, 19 nt, Artificial Sequence
  Description of Artificial Sequence: Synthetic oligonucleotide
  Sense strand starting at position 915 of SEQ ID NO: 1887687
guauucuccguguguagaa

SEQ ID NO: 2489549 - RNA, 19 nt, Artificial Sequence
  Description of Artificial Sequence: Synthetic oligonucleotide
  Antisense strand to SEQ ID NO: 2489548
uucuacacacggagaauac

SEQ ID NO: 2489550 - RNA, 19 nt, Artificial Sequence
  Description of Artificial Sequence: Synthetic oligonucleotide
  Sense strand starting at position 934 of SEQ ID NO: 1887687
caggguuugguguacauau

SEQ ID NO: 2489551 - RNA, 19 nt, Artificial Sequence
  Description of Artificial Sequence: Synthetic oligonucleotide
  Antisense strand to SEQ ID NO: 2489550
auauguacaccaaacccug

SEQ ID NO: 2489552 - RNA, 19 nt, Artificial Sequence
  Description of Artificial Sequence: Synthetic oligonucleotide
  Sense strand starting at position 936 of SEQ ID NO: 1887687
ggguuugguguacauauga

SEQ ID NO: 2489553 - RNA, 19 nt, Artificial Sequence
  Description of Artificial Sequence: Synthetic oligonucleotide
  Antisense strand to SEQ ID NO: 2489552
ucauauguacaccaaaccc

SEQ ID NO: 2489554 - RNA, 19 nt, Artificial Sequence
  Description of Artificial Sequence: Synthetic oligonucleotide
  Sense strand starting at position 943 of SEQ ID NO: 1887687
guguacauaugacuacauu

SEQ ID NO: 2489555 - RNA, 19 nt, Artificial Sequence
  Description of Artificial Sequence: Synthetic oligonucleotide
  Antisense strand to SEQ ID NO: 2489554
aauguagucauauguacac

SEQ ID NO: 2489556 - RNA, 19 nt, Artificial Sequence
  Description of Artificial Sequence: Synthetic oligonucleotide
  Sense strand starting at position 1006 of SEQ ID NO: 1887687
uugagacccugucuaugaa

SEQ ID NO: 2489557 - RNA, 19 nt, Artificial Sequence
  Description of Artificial Sequence: Synthetic oligonucleotide
  Antisense strand to SEQ ID NO: 2489556
uucauagacagggucucaa

SEQ ID NO: 2489558 - RNA, 19 nt, Artificial Sequence
  Description of Artificial Sequence: Synthetic oligonucleotide
  Sense strand starting at position 1036 of SEQ ID NO: 1887687
agaauauacuguuugcuca

SEQ ID NO: 2489559 - RNA, 19 nt, Artificial Sequence
  Description of Artificial Sequence: Synthetic oligonucleotide
  Antisense strand to SEQ ID NO: 2489558
ugagcaaacaguauauucu

SEQ ID NO: 2489560 - RNA, 19 nt, Artificial Sequence
  Description of Artificial Sequence: Synthetic oligonucleotide
  Sense strand starting at position 1217 of SEQ ID NO: 1887687
gcggcaugcaccugaaauc

SEQ ID NO: 2489561 - RNA, 19 nt, Artificial Sequence
  Description of Artificial Sequence: Synthetic oligonucleotide
  Antisense strand to SEQ ID NO: 2489560
gauuucaggugcaugccgc

SEQ ID NO: 2489562 - RNA, 19 nt, Artificial Sequence
  Description of Artificial Sequence: Synthetic oligonucleotide
  Sense strand starting at position 1750 of SEQ ID NO: 1887687
gccuaagaggucuagguug

SEQ ID NO: 2489563 - RNA, 19 nt, Artificial Sequence
  Description of Artificial Sequence: Synthetic oligonucleotide
  Antisense strand to SEQ ID NO: 2489562
caaccuagaccucuuaggc

SEQ ID NO: 2489564 - RNA, 19 nt, Artificial Sequence
  Description of Artificial Sequence: Synthetic oligonucleotide
  Sense strand starting at position 1752 of SEQ ID NO: 1887687
cuaagaggucuagguugga

SEQ ID NO: 2489565 - RNA, 19 nt, Artificial Sequence
  Description of Artificial Sequence: Synthetic oligonucleotide
  Antisense strand to SEQ ID NO: 2489564
uccaaccuagaccucuuag

SEQ ID NO: 2489566 - RNA, 19 nt, Artificial Sequence
  Description of Artificial Sequence: Synthetic oligonucleotide
  Sense strand starting at position 1797 of SEQ ID NO: 1887687
acagaaacccuguguugca

SEQ ID NO: 2489567 - RNA, 19 nt, Artificial Sequence
  Description of Artificial Sequence: Synthetic oligonucleotide
  Antisense strand to SEQ ID NO: 2489566
ugcaacacaggguuucugu

SEQ ID NO: 2489568 - RNA, 19 nt, Artificial Sequence
  Description of Artificial Sequence: Synthetic oligonucleotide
  Sense strand starting at position 1798 of SEQ ID NO: 1887687
cagaaacccuguguugcaa

SEQ ID NO: 2489569 - RNA, 19 nt, Artificial Sequence
  Description of Artificial Sequence: Synthetic oligonucleotide
  Antisense strand to SEQ ID NO: 2489568
uugcaacacaggguuucug

SEQ ID NO: 2489570 - RNA, 19 nt, Artificial Sequence
  Description of Artificial Sequence: Synthetic oligonucleotide
  Sense strand starting at position 1875 of SEQ ID NO: 1887687
gcaaaugcguuaccaagau

SEQ ID NO: 2489571 - RNA, 19 nt, Artificial Sequence
  Description of Artificial Sequence: Synthetic oligonucleotide
  Antisense strand to SEQ ID NO: 2489570
aucuugguaacgcauuugc

SEQ ID NO: 2489572 - RNA, 19 nt, Artificial Sequence
  Description of Artificial Sequence: Synthetic oligonucleotide
  Sense strand starting at position 2167 of SEQ ID NO: 1887687
agguuagccuuguucacga

SEQ ID NO: 2489573 - RNA, 19 nt, Artificial Sequence
  Description of Artificial Sequence: Synthetic oligonucleotide
  Antisense strand to SEQ ID NO: 2489572
ucgugaacaaggcuaaccu

SEQ ID NO: 2489574 - RNA, 19 nt, Artificial Sequence
  Description of Artificial Sequence: Synthetic oligonucleotide
  Sense strand starting at position 2188 of SEQ ID NO: 1887687
gggcaacccuccugaguau

SEQ ID NO: 2489575 - RNA, 19 nt, Artificial Sequence
  Description of Artificial Sequence: Synthetic oligonucleotide
  Antisense strand to SEQ ID NO: 2489574
auacucaggaggguugccc

SEQ ID NO: 2489576 - RNA, 19 nt, Artificial Sequence
  Description of Artificial Sequence: Synthetic oligonucleotide
  Sense strand starting at position 2189 of SEQ ID NO: 1887687
ggcaacccuccugaguauu

SEQ ID NO: 2489577 - RNA, 19 nt, Artificial Sequence
  Description of Artificial Sequence: Synthetic oligonucleotide
  Antisense strand to SEQ ID NO: 2489576
aauacucaggaggguugcc

SEQ ID NO: 2489578 - RNA, 19 nt, Artificial Sequence
  Description of Artificial Sequence: Synthetic oligonucleotide
  Sense strand starting at position 2200 of SEQ ID NO: 1887687
ugaguauugucuccaaaga

SEQ ID NO: 2489579 - RNA, 19 nt, Artificial Sequence
  Description of Artificial Sequence: Synthetic oligonucleotide
  Antisense strand to SEQ ID NO: 2489578
ucuuuggagacaauacuca

SEQ ID NO: 2489580 - RNA, 19 nt, Artificial Sequence
  Description of Artificial Sequence: Synthetic oligonucleotide
  Sense strand starting at position 2479 of SEQ ID NO: 1887687
agacuaaucuggccaucau

SEQ ID NO: 2489581 - RNA, 19 nt, Artificial Sequence
  Description of Artificial Sequence: Synthetic oligonucleotide
  Antisense strand to SEQ ID NO: 2489580
augauggccagauuagucu

SEQ ID NO: 2489582 - RNA, 19 nt, Artificial Sequence
  Description of Artificial Sequence: Synthetic oligonucleotide
  Sense strand starting at position 2633 of SEQ ID NO: 1887687
gagagacugucucaagaga

SEQ ID NO: 2489583 - RNA, 19 nt, Artificial Sequence
  Description of Artificial Sequence: Synthetic oligonucleotide
  Antisense strand to SEQ ID NO: 2489582
ucucuugagacagucucuc

SEQ ID NO: 2489584 - RNA, 19 nt, Artificial Sequence
  Description of Artificial Sequence: Synthetic oligonucleotide
  Sense strand starting at position 2736 of SEQ ID NO: 1887687
aagagacccuguguugcaa

SEQ ID NO: 2489585 - RNA, 19 nt, Artificial Sequence
  Description of Artificial Sequence: Synthetic oligonucleotide
  Antisense strand to SEQ ID NO: 2489584
uugcaacacagggucucuu

SEQ ID NO: 2489586 - RNA, 19 nt, Artificial Sequence
  Description of Artificial Sequence: Synthetic oligonucleotide
  Sense strand starting at position 3506 of SEQ ID NO: 1887687
cuggauuucuaaggauguu

SEQ ID NO: 2489587 - RNA, 19 nt, Artificial Sequence
  Description of Artificial Sequence: Synthetic oligonucleotide
  Antisense strand to SEQ ID NO: 2489586
aacauccuuagaaauccag

SEQ ID NO: 2489588 - RNA, 19 nt, Artificial Sequence
  Description of Artificial Sequence: Synthetic oligonucleotide
  Sense strand starting at position 3669 of SEQ ID NO: 1887687
gcuccucaguaagauuuga

SEQ ID NO: 2489589 - RNA, 19 nt, Artificial Sequence
  Description of Artificial Sequence: Synthetic oligonucleotide
  Antisense strand to SEQ ID NO: 2489588
ucaaaucuuacugaggagc

SEQ ID NO: 2489590 - RNA, 19 nt, Artificial Sequence
  Description of Artificial Sequence: Synthetic oligonucleotide
  Sense strand starting at position 3860 of SEQ ID NO: 1887687
guauacuguugaccugaaa

SEQ ID NO: 2489591 - RNA, 19 nt, Artificial Sequence
  Description of Artificial Sequence: Synthetic oligonucleotide
  Antisense strand to SEQ ID NO: 2489590
uuucaggucaacaguauac

SEQ ID NO: 2489592 - RNA, 19 nt, Artificial Sequence
  Description of Artificial Sequence: Synthetic oligonucleotide
  Sense strand starting at position 3949 of SEQ ID NO: 1887687
agguaauggguaggaacau

SEQ ID NO: 2489593 - RNA, 19 nt, Artificial Sequence
  Description of Artificial Sequence: Synthetic oligonucleotide
  Antisense strand to SEQ ID NO: 2489592
auguuccuacccauuaccu

SEQ ID NO: 2489594 - RNA, 19 nt, Artificial Sequence
  Description of Artificial Sequence: Synthetic oligonucleotide
  Sense strand starting at position 11 of SEQ ID NO: 1887688
ccgaauaauuucuacguag

SEQ ID NO: 2489595 - RNA, 19 nt, Artificial Sequence
  Description of Artificial Sequence: Synthetic oligonucleotide
  Antisense strand to SEQ ID NO: 2489594
cuacguagaaauuauucgg

SEQ ID NO: 2489596 - RNA, 19 nt, Artificial Sequence
  Description of Artificial Sequence: Synthetic oligonucleotide
  Sense strand starting at position 378 of SEQ ID NO: 1887688
gguguugaggacuggaaga

SEQ ID NO: 2489597 - RNA, 19 nt, Artificial Sequence
  Description of Artificial Sequence: Synthetic oligonucleotide
  Antisense strand to SEQ ID NO: 2489596
ucuuccaguccucaacacc

SEQ ID NO: 2489598 - RNA, 19 nt, Artificial Sequence
  Description of Artificial Sequence: Synthetic oligonucleotide
  Sense strand starting at position 462 of SEQ ID NO: 1887688
cuucuaggguccucaagau

SEQ ID NO: 2489599 - RNA, 19 nt, Artificial Sequence
  Description of Artificial Sequence: Synthetic oligonucleotide
  Antisense strand to SEQ ID NO: 2489598
aucuugaggacccuagaag

SEQ ID NO: 2489600 - RNA, 19 nt, Artificial Sequence
  Description of Artificial Sequence: Synthetic oligonucleotide
  Sense strand starting at position 517 of SEQ ID NO: 1887688
uuaucacugugacugagau

SEQ ID NO: 2489601 - RNA, 19 nt, Artificial Sequence
  Description of Artificial Sequence: Synthetic oligonucleotide
  Antisense strand to SEQ ID NO: 2489600
aucucagucacagugauaa

SEQ ID NO: 2489602 - RNA, 19 nt, Artificial Sequence
  Description of Artificial Sequence: Synthetic oligonucleotide
  Sense strand starting at position 518 of SEQ ID NO: 1887688
uaucacugugacugagauu

SEQ ID NO: 2489603 - RNA, 19 nt, Artificial Sequence
  Description of Artificial Sequence: Synthetic oligonucleotide
  Antisense strand to SEQ ID NO: 2489602
aaucucagucacagugaua

SEQ ID NO: 2489604 - RNA, 19 nt, Artificial Sequence
  Description of Artificial Sequence: Synthetic oligonucleotide
  Sense strand starting at position 536 of SEQ ID NO: 1887688
ucaucuugucuacaacagu

SEQ ID NO: 2489605 - RNA, 19 nt, Artificial Sequence
  Description of Artificial Sequence: Synthetic oligonucleotide
  Antisense strand to SEQ ID NO: 2489604
acuguuguagacaagauga

SEQ ID NO: 2489606 - RNA, 19 nt, Artificial Sequence
  Description of Artificial Sequence: Synthetic oligonucleotide
  Sense strand starting at position 588 of SEQ ID NO: 1887688
uuugacaucuuagcaagua

SEQ ID NO: 2489607 - RNA, 19 nt, Artificial Sequence
  Description of Artificial Sequence: Synthetic oligonucleotide
  Antisense strand to SEQ ID NO: 2489606
uacuugcuaagaugucaaa

SEQ ID NO: 2489608 - RNA, 19 nt, Artificial Sequence
  Description of Artificial Sequence: Synthetic oligonucleotide
  Sense strand starting at position 626 of SEQ ID NO: 1887688
guuuaagcccauuggaaug

SEQ ID NO: 2489609 - RNA, 19 nt, Artificial Sequence
  Description of Artificial Sequence: Synthetic oligonucleotide
  Antisense strand to SEQ ID NO: 2489608
cauuccaaugggcuuaaac

SEQ ID NO: 2489610 - RNA, 19 nt, Artificial Sequence
  Description of Artificial Sequence: Synthetic oligonucleotide
  Sense strand starting at position 637 of SEQ ID NO: 1887688
uuggaaugguaccuuggaa

SEQ ID NO: 2489611 - RNA, 19 nt, Artificial Sequence
  Description of Artificial Sequence: Synthetic oligonucleotide
  Antisense strand to SEQ ID NO: 2489610
uuccaagguaccauuccaa

SEQ ID NO: 2489612 - RNA, 19 nt, Artificial Sequence
  Description of Artificial Sequence: Synthetic oligonucleotide
  Sense strand starting at position 650 of SEQ ID NO: 1887688
uuggaaucguuacccaaag

SEQ ID NO: 2489613 - RNA, 19 nt, Artificial Sequence
  Description of Artificial Sequence: Synthetic oligonucleotide
  Antisense strand to SEQ ID NO: 2489612
cuuuggguaacgauuccaa

SEQ ID NO: 2489614 - RNA, 19 nt, Artificial Sequence
  Description of Artificial Sequence: Synthetic oligonucleotide
  Sense strand starting at position 651 of SEQ ID NO: 1887688
uggaaucguuacccaaaga

SEQ ID NO: 2489615 - RNA, 19 nt, Artificial Sequence
  Description of Artificial Sequence: Synthetic oligonucleotide
  Antisense strand to SEQ ID NO: 2489614
ucuuuggguaacgauucca

SEQ ID NO: 2489616 - RNA, 19 nt, Artificial Sequence
  Description of Artificial Sequence: Synthetic oligonucleotide
  Sense strand starting at position 685 of SEQ ID NO: 1887688
ggcagcuacagucaaagaa

SEQ ID NO: 2489617 - RNA, 19 nt, Artificial Sequence
  Description of Artificial Sequence: Synthetic oligonucleotide
  Antisense strand to SEQ ID NO: 2489616
uucuuugacuguagcugcc

SEQ ID NO: 2489618 - RNA, 19 nt, Artificial Sequence
  Description of Artificial Sequence: Synthetic oligonucleotide
  Sense strand starting at position 717 of SEQ ID NO: 1887688
gcauuagugggugaggguu

SEQ ID NO: 2489619 - RNA, 19 nt, Artificial Sequence
  Description of Artificial Sequence: Synthetic oligonucleotide
  Antisense strand to SEQ ID NO: 2489618
aacccucacccacuaaugc

SEQ ID NO: 2489620 - RNA, 19 nt, Artificial Sequence
  Description of Artificial Sequence: Synthetic oligonucleotide
  Sense strand starting at position 723 of SEQ ID NO: 1887688
gugggugaggguugaauca

SEQ ID NO: 2489621 - RNA, 19 nt, Artificial Sequence
  Description of Artificial Sequence: Synthetic oligonucleotide
  Antisense strand to SEQ ID NO: 2489620
ugauucaacccucacccac

SEQ ID NO: 2489622 - RNA, 19 nt, Artificial Sequence
  Description of Artificial Sequence: Synthetic oligonucleotide
  Sense strand starting at position 725 of SEQ ID NO: 1887688
gggugaggguugaaucaac

SEQ ID NO: 2489623 - RNA, 19 nt, Artificial Sequence
  Description of Artificial Sequence: Synthetic oligonucleotide
  Antisense strand to SEQ ID NO: 2489622
guugauucaacccucaccc

SEQ ID NO: 2489624 - RNA, 19 nt, Artificial Sequence
  Description of Artificial Sequence: Synthetic oligonucleotide
  Sense strand starting at position 776 of SEQ ID NO: 1887688
ccgagaaaugauggcaaga

SEQ ID NO: 2489625 - RNA, 19 nt, Artificial Sequence
  Description of Artificial Sequence: Synthetic oligonucleotide
  Antisense strand to SEQ ID NO: 2489624
ucuugccaucauuucucgg

SEQ ID NO: 2489626 - RNA, 19 nt, Artificial Sequence
  Description of Artificial Sequence: Synthetic oligonucleotide
  Sense strand starting at position 778 of SEQ ID NO: 1887688
gagaaaugauggcaagaug

SEQ ID NO: 2489627 - RNA, 19 nt, Artificial Sequence
  Description of Artificial Sequence: Synthetic oligonucleotide
  Antisense strand to SEQ ID NO: 2489626
caucuugccaucauuucuc

SEQ ID NO: 2489628 - RNA, 19 nt, Artificial Sequence
  Description of Artificial Sequence: Synthetic oligonucleotide
  Sense strand starting at position 958 of SEQ ID NO: 1887688
caugguuuggauugauuau

SEQ ID NO: 2489629 - RNA, 19 nt, Artificial Sequence
  Description of Artificial Sequence: Synthetic oligonucleotide
  Antisense strand to SEQ ID NO: 2489628
auaaucaauccaaaccaug

SEQ ID NO: 2489630 - RNA, 19 nt, Artificial Sequence
  Description of Artificial Sequence: Synthetic oligonucleotide
  Sense strand starting at position 986 of SEQ ID NO: 1887688
augggaggccauuguauga

SEQ ID NO: 2489631 - RNA, 19 nt, Artificial Sequence
  Description of Artificial Sequence: Synthetic oligonucleotide
  Antisense strand to SEQ ID NO: 2489630
ucauacaauggccucccau

SEQ ID NO: 2489632 - RNA, 19 nt, Artificial Sequence
  Description of Artificial Sequence: Synthetic oligonucleotide
  Sense strand starting at position 1114 of SEQ ID NO: 1887688
gugggaucugugcacggua

SEQ ID NO: 2489633 - RNA, 19 nt, Artificial Sequence
  Description of Artificial Sequence: Synthetic oligonucleotide
  Antisense strand to SEQ ID NO: 2489632
uaccgugcacagaucccac

SEQ ID NO: 2489634 - RNA, 19 nt, Artificial Sequence
  Description of Artificial Sequence: Synthetic oligonucleotide
  Sense strand starting at position 1115 of SEQ ID NO: 1887688
ugggaucugugcacgguau

SEQ ID NO: 2489635 - RNA, 19 nt, Artificial Sequence
  Description of Artificial Sequence: Synthetic oligonucleotide
  Antisense strand to SEQ ID NO: 2489634
auaccgugcacagauccca

SEQ ID NO: 2489636 - RNA, 19 nt, Artificial Sequence
  Description of Artificial Sequence: Synthetic oligonucleotide
  Sense strand starting at position 1116 of SEQ ID NO: 1887688
gggaucugugcacgguaua

SEQ ID NO: 2489637 - RNA, 19 nt, Artificial Sequence
  Description of Artificial Sequence: Synthetic oligonucleotide
  Antisense strand to SEQ ID NO: 2489636
uauaccgugcacagauccc

SEQ ID NO: 2489638 - RNA, 19 nt, Artificial Sequence
  Description of Artificial Sequence: Synthetic oligonucleotide
  Sense strand starting at position 1210 of SEQ ID NO: 1887688
gucaacuaucuuugaaaug

SEQ ID NO: 2489639 - RNA, 19 nt, Artificial Sequence
  Description of Artificial Sequence: Synthetic oligonucleotide
  Antisense strand to SEQ ID NO: 2489638
cauuucaaagauaguugac

SEQ ID NO: 2489640 - RNA, 19 nt, Artificial Sequence
  Description of Artificial Sequence: Synthetic oligonucleotide
  Sense strand starting at position 1624 of SEQ ID NO: 1887688
gugaguggagauuguccua

SEQ ID NO: 2489641 - RNA, 19 nt, Artificial Sequence
  Description of Artificial Sequence: Synthetic oligonucleotide
  Antisense strand to SEQ ID NO: 2489640
uaggacaaucuccacucac

SEQ ID NO: 2489642 - RNA, 19 nt, Artificial Sequence
  Description of Artificial Sequence: Synthetic oligonucleotide
  Sense strand starting at position 2013 of SEQ ID NO: 1887688
ccagcacucuggguuuauu

SEQ ID NO: 2489643 - RNA, 19 nt, Artificial Sequence
  Description of Artificial Sequence: Synthetic oligonucleotide
  Antisense strand to SEQ ID NO: 2489642
aauaaacccagagugcugg

SEQ ID NO: 2489644 - RNA, 19 nt, Artificial Sequence
  Description of Artificial Sequence: Synthetic oligonucleotide
  Sense strand starting at position 2021 of SEQ ID NO: 1887688
cuggguuuauuguuggaau

SEQ ID NO: 2489645 - RNA, 19 nt, Artificial Sequence
  Description of Artificial Sequence: Synthetic oligonucleotide
  Antisense strand to SEQ ID NO: 2489644
auuccaacaauaaacccag

SEQ ID NO: 2489646 - RNA, 19 nt, Artificial Sequence
  Description of Artificial Sequence: Synthetic oligonucleotide
  Sense strand starting at position 2040 of SEQ ID NO: 1887688
uuuccuugaccagguuuaa

SEQ ID NO: 2489647 - RNA, 19 nt, Artificial Sequence
  Description of Artificial Sequence: Synthetic oligonucleotide
  Antisense strand to SEQ ID NO: 2489646
uuaaaccuggucaaggaaa

SEQ ID NO: 2489648 - RNA, 19 nt, Artificial Sequence
  Description of Artificial Sequence: Synthetic oligonucleotide
  Sense strand starting at position 2330 of SEQ ID NO: 1887688
aguauaggcacauguagua

SEQ ID NO: 2489649 - RNA, 19 nt, Artificial Sequence
  Description of Artificial Sequence: Synthetic oligonucleotide
  Antisense strand to SEQ ID NO: 2489648
uacuacaugugccuauacu

SEQ ID NO: 2489650 - RNA, 19 nt, Artificial Sequence
  Description of Artificial Sequence: Synthetic oligonucleotide
  Sense strand starting at position 2387 of SEQ ID NO: 1887688
gaauguacauugucgcaca

SEQ ID NO: 2489651 - RNA, 19 nt, Artificial Sequence
  Description of Artificial Sequence: Synthetic oligonucleotide
  Antisense strand to SEQ ID NO: 2489650
ugugcgacaauguacauuc

SEQ ID NO: 2489652 - RNA, 19 nt, Artificial Sequence
  Description of Artificial Sequence: Synthetic oligonucleotide
  Sense strand starting at position 2804 of SEQ ID NO: 1887688
aagugauagucuccugccu

SEQ ID NO: 2489653 - RNA, 19 nt, Artificial Sequence
  Description of Artificial Sequence: Synthetic oligonucleotide
  Antisense strand to SEQ ID NO: 2489652
aggcaggagacuaucacuu

SEQ ID NO: 2489654 - RNA, 19 nt, Artificial Sequence
  Description of Artificial Sequence: Synthetic oligonucleotide
  Sense strand starting at position 3144 of SEQ ID NO: 1887688
aaucaagugugcguugaua

SEQ ID NO: 2489655 - RNA, 19 nt, Artificial Sequence
  Description of Artificial Sequence: Synthetic oligonucleotide
  Antisense strand to SEQ ID NO: 2489654
uaucaacgcacacuugauu

SEQ ID NO: 2489656 - RNA, 19 nt, Artificial Sequence
  Description of Artificial Sequence: Synthetic oligonucleotide
  Sense strand starting at position 3157 of SEQ ID NO: 1887688
uugauaacguggucauaca

SEQ ID NO: 2489657 - RNA, 19 nt, Artificial Sequence
  Description of Artificial Sequence: Synthetic oligonucleotide
  Antisense strand to SEQ ID NO: 2489656
uguaugaccacguuaucaa

SEQ ID NO: 2489658 - RNA, 19 nt, Artificial Sequence
  Description of Artificial Sequence: Synthetic oligonucleotide
  Sense strand starting at position 3228 of SEQ ID NO: 1887688
accucugugcucuugcgaa

SEQ ID NO: 2489659 - RNA, 19 nt, Artificial Sequence
  Description of Artificial Sequence: Synthetic oligonucleotide
  Antisense strand to SEQ ID NO: 2489658
uucgcaagagcacagaggu

SEQ ID NO: 2489660 - RNA, 19 nt, Artificial Sequence
  Description of Artificial Sequence: Synthetic oligonucleotide
  Sense strand starting at position 3460 of SEQ ID NO: 1887688
uugugaaaguaucuguggu

SEQ ID NO: 2489661 - RNA, 19 nt, Artificial Sequence
  Description of Artificial Sequence: Synthetic oligonucleotide
  Antisense strand to SEQ ID NO: 2489660
accacagauacuuucacaa

SEQ ID NO: 2489662 - RNA, 19 nt, Artificial Sequence
  Description of Artificial Sequence: Synthetic oligonucleotide
  Sense strand starting at position 3461 of SEQ ID NO: 1887688
ugugaaaguaucugugguu

SEQ ID NO: 2489663 - RNA, 19 nt, Artificial Sequence
  Description of Artificial Sequence: Synthetic oligonucleotide
  Antisense strand to SEQ ID NO: 2489662
aaccacagauacuuucaca

SEQ ID NO: 2489664 - RNA, 19 nt, Artificial Sequence
  Description of Artificial Sequence: Synthetic oligonucleotide
  Sense strand starting at position 3462 of SEQ ID NO: 1887688
gugaaaguaucugugguuu

SEQ ID NO: 2489665 - RNA, 19 nt, Artificial Sequence
  Description of Artificial Sequence: Synthetic oligonucleotide
  Antisense strand to SEQ ID NO: 2489664
aaaccacagauacuuucac

SEQ ID NO: 2489666 - RNA, 19 nt, Artificial Sequence
  Description of Artificial Sequence: Synthetic oligonucleotide
  Sense strand starting at position 3481 of SEQ ID NO: 1887688
ugucccaugugacauuuau

SEQ ID NO: 2489667 - RNA, 19 nt, Artificial Sequence
  Description of Artificial Sequence: Synthetic oligonucleotide
  Antisense strand to SEQ ID NO: 2489666
auaaaugucacaugggaca

SEQ ID NO: 2489668 - RNA, 19 nt, Artificial Sequence
  Description of Artificial Sequence: Synthetic oligonucleotide
  Sense strand starting at position 3529 of SEQ ID NO: 1887688
auagcuuguuucucauauu

SEQ ID NO: 2489669 - RNA, 19 nt, Artificial Sequence
  Description of Artificial Sequence: Synthetic oligonucleotide
  Antisense strand to SEQ ID NO: 2489668
aauaugagaaacaagcuau

SEQ ID NO: 2489670 - RNA, 19 nt, Artificial Sequence
  Description of Artificial Sequence: Synthetic oligonucleotide
  Sense strand starting at position 3759 of SEQ ID NO: 1887688
ggaagcuguuaagcaagaa

SEQ ID NO: 2489671 - RNA, 19 nt, Artificial Sequence
  Description of Artificial Sequence: Synthetic oligonucleotide
  Antisense strand to SEQ ID NO: 2489670
uucuugcuuaacagcuucc

SEQ ID NO: 2489672 - RNA, 19 nt, Artificial Sequence
  Description of Artificial Sequence: Synthetic oligonucleotide
  Sense strand starting at position 3965 of SEQ ID NO: 1887688
ggucauaguggugagcauu

SEQ ID NO: 2489673 - RNA, 19 nt, Artificial Sequence
  Description of Artificial Sequence: Synthetic oligonucleotide
  Antisense strand to SEQ ID NO: 2489672
aaugcucaccacuaugacc

SEQ ID NO: 2489674 - RNA, 19 nt, Artificial Sequence
  Description of Artificial Sequence: Synthetic oligonucleotide
  Sense strand starting at position 71 of SEQ ID NO: 1887689
ggcggugggugcuuauaau

SEQ ID NO: 2489675 - RNA, 19 nt, Artificial Sequence
  Description of Artificial Sequence: Synthetic oligonucleotide
  Antisense strand to SEQ ID NO: 2489674
auuauaagcacccaccgcc

SEQ ID NO: 2489676 - RNA, 19 nt, Artificial Sequence
  Description of Artificial Sequence: Synthetic oligonucleotide
  Sense strand starting at position 114 of SEQ ID NO: 1887689
gggagaaugucuggaaccu

SEQ ID NO: 2489677 - RNA, 19 nt, Artificial Sequence
  Description of Artificial Sequence: Synthetic oligonucleotide
  Antisense strand to SEQ ID NO: 2489676
agguuccagacauucuccc

SEQ ID NO: 2489678 - RNA, 19 nt, Artificial Sequence
  Description of Artificial Sequence: Synthetic oligonucleotide
  Sense strand starting at position 137 of SEQ ID NO: 1887689
ggcuguaguuguggagauc

SEQ ID NO: 2489679 - RNA, 19 nt, Artificial Sequence
  Description of Artificial Sequence: Synthetic oligonucleotide
  Antisense strand to SEQ ID NO: 2489678
gaucuccacaacuacagcc

SEQ ID NO: 2489680 - RNA, 19 nt, Artificial Sequence
  Description of Artificial Sequence: Synthetic oligonucleotide
  Sense strand starting at position 148 of SEQ ID NO: 1887689
uggagauccugccacugua

SEQ ID NO: 2489681 - RNA, 19 nt, Artificial Sequence
  Description of Artificial Sequence: Synthetic oligonucleotide
  Antisense strand to SEQ ID NO: 2489680
uacaguggcaggaucucca

SEQ ID NO: 2489682 - RNA, 19 nt, Artificial Sequence
  Description of Artificial Sequence: Synthetic oligonucleotide
  Sense strand starting at position 335 of SEQ ID NO: 1887689
ucguccacgucugaugaua

SEQ ID NO: 2489683 - RNA, 19 nt, Artificial Sequence
  Description of Artificial Sequence: Synthetic oligonucleotide
  Antisense strand to SEQ ID NO: 2489682
uaucaucagacguggacga

SEQ ID NO: 2489684 - RNA, 19 nt, Artificial Sequence
  Description of Artificial Sequence: Synthetic oligonucleotide
  Sense strand starting at position 337 of SEQ ID NO: 1887689
guccacgucugaugauaag

SEQ ID NO: 2489685 - RNA, 19 nt, Artificial Sequence
  Description of Artificial Sequence: Synthetic oligonucleotide
  Antisense strand to SEQ ID NO: 2489684
cuuaucaucagacguggac

SEQ ID NO: 2489686 - RNA, 19 nt, Artificial Sequence
  Description of Artificial Sequence: Synthetic oligonucleotide
  Sense strand starting at position 519 of SEQ ID NO: 1887689
ugauguugcuguuggaauu

SEQ ID NO: 2489687 - RNA, 19 nt, Artificial Sequence
  Description of Artificial Sequence: Synthetic oligonucleotide
  Antisense strand to SEQ ID NO: 2489686
aauuccaacagcaacauca

SEQ ID NO: 2489688 - RNA, 19 nt, Artificial Sequence
  Description of Artificial Sequence: Synthetic oligonucleotide
  Sense strand starting at position 520 of SEQ ID NO: 1887689
gauguugcuguuggaauuu

SEQ ID NO: 2489689 - RNA, 19 nt, Artificial Sequence
  Description of Artificial Sequence: Synthetic oligonucleotide
  Antisense strand to SEQ ID NO: 2489688
aaauuccaacagcaacauc

SEQ ID NO: 2489690 - RNA, 19 nt, Artificial Sequence
  Description of Artificial Sequence: Synthetic oligonucleotide
  Sense strand starting at position 687 of SEQ ID NO: 1887689
gcgcaauccuccugaguuu

SEQ ID NO: 2489691 - RNA, 19 nt, Artificial Sequence
  Description of Artificial Sequence: Synthetic oligonucleotide
  Antisense strand to SEQ ID NO: 2489690
aaacucaggaggauugcgc

SEQ ID NO: 2489692 - RNA, 19 nt, Artificial Sequence
  Description of Artificial Sequence: Synthetic oligonucleotide
  Sense strand starting at position 723 of SEQ ID NO: 1887689
agcaaugccugcuacauau

SEQ ID NO: 2489693 - RNA, 19 nt, Artificial Sequence
  Description of Artificial Sequence: Synthetic oligonucleotide
  Antisense strand to SEQ ID NO: 2489692
auauguagcaggcauugcu

SEQ ID NO: 2489694 - RNA, 19 nt, Artificial Sequence
  Description of Artificial Sequence: Synthetic oligonucleotide
  Sense strand starting at position 1279 of SEQ ID NO: 1887689
ugugguucaugccugcaga

SEQ ID NO: 2489695 - RNA, 19 nt, Artificial Sequence
  Description of Artificial Sequence: Synthetic oligonucleotide
  Antisense strand to SEQ ID NO: 2489694
ucugcaggcaugaaccaca

SEQ ID NO: 2489696 - RNA, 19 nt, Artificial Sequence
  Description of Artificial Sequence: Synthetic oligonucleotide
  Sense strand starting at position 1280 of SEQ ID NO: 1887689
gugguucaugccugcagau

SEQ ID NO: 2489697 - RNA, 19 nt, Artificial Sequence
  Description of Artificial Sequence: Synthetic oligonucleotide
  Antisense strand to SEQ ID NO: 2489696
aucugcaggcaugaaccac

SEQ ID NO: 2489698 - RNA, 19 nt, Artificial Sequence
  Description of Artificial Sequence: Synthetic oligonucleotide
  Sense strand starting at position 1443 of SEQ ID NO: 1887689
aagaguauucucuguguug

SEQ ID NO: 2489699 - RNA, 19 nt, Artificial Sequence
  Description of Artificial Sequence: Synthetic oligonucleotide
  Antisense strand to SEQ ID NO: 2489698
caacacagagaauacucuu

SEQ ID NO: 2489700 - RNA, 19 nt, Artificial Sequence
  Description of Artificial Sequence: Synthetic oligonucleotide
  Sense strand starting at position 1630 of SEQ ID NO: 1887689
ucuggaagcugggucauaa

SEQ ID NO: 2489701 - RNA, 19 nt, Artificial Sequence
  Description of Artificial Sequence: Synthetic oligonucleotide
  Antisense strand to SEQ ID NO: 2489700
uuaugacccagcuuccaga

SEQ ID NO: 2489702 - RNA, 19 nt, Artificial Sequence
  Description of Artificial Sequence: Synthetic oligonucleotide
  Sense strand starting at position 1634 of SEQ ID NO: 1887689
gaagcugggucauaagaau

SEQ ID NO: 2489703 - RNA, 19 nt, Artificial Sequence
  Description of Artificial Sequence: Synthetic oligonucleotide
  Antisense strand to SEQ ID NO: 2489702
auucuuaugacccagcuuc

SEQ ID NO: 2489704 - RNA, 19 nt, Artificial Sequence
  Description of Artificial Sequence: Synthetic oligonucleotide
  Sense strand starting at position 1674 of SEQ ID NO: 1887689
gcaugcaaugagugguguu

SEQ ID NO: 2489705 - RNA, 19 nt, Artificial Sequence
  Description of Artificial Sequence: Synthetic oligonucleotide
  Antisense strand to SEQ ID NO: 2489704
aacaccacucauugcaugc

SEQ ID NO: 2489706 - RNA, 19 nt, Artificial Sequence
  Description of Artificial Sequence: Synthetic oligonucleotide
  Sense strand starting at position 1677 of SEQ ID NO: 1887689
ugcaaugagugguguucau

SEQ ID NO: 2489707 - RNA, 19 nt, Artificial Sequence
  Description of Artificial Sequence: Synthetic oligonucleotide
  Antisense strand to SEQ ID NO: 2489706
augaacaccacucauugca

SEQ ID NO: 2489708 - RNA, 19 nt, Artificial Sequence
  Description of Artificial Sequence: Synthetic oligonucleotide
  Sense strand starting at position 1713 of SEQ ID NO: 1887689
ugggucacagugugagauu

SEQ ID NO: 2489709 - RNA, 19 nt, Artificial Sequence
  Description of Artificial Sequence: Synthetic oligonucleotide
  Antisense strand to SEQ ID NO: 2489708
aaucucacacugugaccca

SEQ ID NO: 2489710 - RNA, 19 nt, Artificial Sequence
  Description of Artificial Sequence: Synthetic oligonucleotide
  Sense strand starting at position 1714 of SEQ ID NO: 1887689
gggucacagugugagauua

SEQ ID NO: 2489711 - RNA, 19 nt, Artificial Sequence
  Description of Artificial Sequence: Synthetic oligonucleotide
  Antisense strand to SEQ ID NO: 2489710
uaaucucacacugugaccc

SEQ ID NO: 2489712 - RNA, 19 nt, Artificial Sequence
  Description of Artificial Sequence: Synthetic oligonucleotide
  Sense strand starting at position 1716 of SEQ ID NO: 1887689
gucacagugugagauuauc

SEQ ID NO: 2489713 - RNA, 19 nt, Artificial Sequence
  Description of Artificial Sequence: Synthetic oligonucleotide
  Antisense strand to SEQ ID NO: 2489712
gauaaucucacacugugac

SEQ ID NO: 2489714 - RNA, 19 nt, Artificial Sequence
  Description of Artificial Sequence: Synthetic oligonucleotide
  Sense strand starting at position 1756 of SEQ ID NO: 1887689
gcccaagagaucuagguua

SEQ ID NO: 2489715 - RNA, 19 nt, Artificial Sequence
  Description of Artificial Sequence: Synthetic oligonucleotide
  Antisense strand to SEQ ID NO: 2489714
uaaccuagaucucuugggc

SEQ ID NO: 2489716 - RNA, 19 nt, Artificial Sequence
  Description of Artificial Sequence: Synthetic oligonucleotide
  Sense strand starting at position 1855 of SEQ ID NO: 1887689
auccaacucugaugauaag

SEQ ID NO: 2489717 - RNA, 19 nt, Artificial Sequence
  Description of Artificial Sequence: Synthetic oligonucleotide
  Antisense strand to SEQ ID NO: 2489716
cuuaucaucagaguuggau

SEQ ID NO: 2489718 - RNA, 19 nt, Artificial Sequence
  Description of Artificial Sequence: Synthetic oligonucleotide
  Sense strand starting at position 1882 of SEQ ID NO: 1887689
gcaaauguauuauugccaa

SEQ ID NO: 2489719 - RNA, 19 nt, Artificial Sequence
  Description of Artificial Sequence: Synthetic oligonucleotide
  Antisense strand to SEQ ID NO: 2489718
uuggcaauaauacauuugc

SEQ ID NO: 2489720 - RNA, 19 nt, Artificial Sequence
  Description of Artificial Sequence: Synthetic oligonucleotide
  Sense strand starting at position 1886 of SEQ ID NO: 1887689
auguauuauugccaagauc

SEQ ID NO: 2489721 - RNA, 19 nt, Artificial Sequence
  Description of Artificial Sequence: Synthetic oligonucleotide
  Antisense strand to SEQ ID NO: 2489720
gaucuuggcaauaauacau

SEQ ID NO: 2489722 - RNA, 19 nt, Artificial Sequence
  Description of Artificial Sequence: Synthetic oligonucleotide
  Sense strand starting at position 2245 of SEQ ID NO: 1887689
agcaauaccugcuagacau

SEQ ID NO: 2489723 - RNA, 19 nt, Artificial Sequence
  Description of Artificial Sequence: Synthetic oligonucleotide
  Antisense strand to SEQ ID NO: 2489722
augucuagcagguauugcu

SEQ ID NO: 2489724 - RNA, 19 nt, Artificial Sequence
  Description of Artificial Sequence: Synthetic oligonucleotide
  Sense strand starting at position 2601 of SEQ ID NO: 1887689
gagaaaccaugucuguaca

SEQ ID NO: 2489725 - RNA, 19 nt, Artificial Sequence
  Description of Artificial Sequence: Synthetic oligonucleotide
  Antisense strand to SEQ ID NO: 2489724
uguacagacaugguuucuc

SEQ ID NO: 2489726 - RNA, 19 nt, Artificial Sequence
  Description of Artificial Sequence: Synthetic oligonucleotide
  Sense strand starting at position 2602 of SEQ ID NO: 1887689
agaaaccaugucuguacaa

SEQ ID NO: 2489727 - RNA, 19 nt, Artificial Sequence
  Description of Artificial Sequence: Synthetic oligonucleotide
  Antisense strand to SEQ ID NO: 2489726
uuguacagacaugguuucu

SEQ ID NO: 2489728 - RNA, 19 nt, Artificial Sequence
  Description of Artificial Sequence: Synthetic oligonucleotide
  Sense strand starting at position 2884 of SEQ ID NO: 1887689
cagagauccugacacugca

SEQ ID NO: 2489729 - RNA, 19 nt, Artificial Sequence
  Description of Artificial Sequence: Synthetic oligonucleotide
  Antisense strand to SEQ ID NO: 2489728
ugcagugucaggaucucug

SEQ ID NO: 2489730 - RNA, 19 nt, Artificial Sequence
  Description of Artificial Sequence: Synthetic oligonucleotide
  Sense strand starting at position 3402 of SEQ ID NO: 1887689
gagcaauccuccugaguuu

SEQ ID NO: 2489731 - RNA, 19 nt, Artificial Sequence
  Description of Artificial Sequence: Synthetic oligonucleotide
  Antisense strand to SEQ ID NO: 2489730
aaacucaggaggauugcuc

SEQ ID NO: 2489732 - RNA, 19 nt, Artificial Sequence
  Description of Artificial Sequence: Synthetic oligonucleotide
  Sense strand starting at position 3438 of SEQ ID NO: 1887689
agcaaugccucauagacau

SEQ ID NO: 2489733 - RNA, 19 nt, Artificial Sequence
  Description of Artificial Sequence: Synthetic oligonucleotide
  Antisense strand to SEQ ID NO: 2489732
augucuaugaggcauugcu

SEQ ID NO: 2489734 - RNA, 19 nt, Artificial Sequence
  Description of Artificial Sequence: Synthetic oligonucleotide
  Sense strand starting at position 3451 of SEQ ID NO: 1887689
agacauauguaccuuauau

SEQ ID NO: 2489735 - RNA, 19 nt, Artificial Sequence
  Description of Artificial Sequence: Synthetic oligonucleotide
  Antisense strand to SEQ ID NO: 2489734
auauaagguacauaugucu

SEQ ID NO: 2489736 - RNA, 19 nt, Artificial Sequence
  Description of Artificial Sequence: Synthetic oligonucleotide
  Sense strand starting at position 3578 of SEQ ID NO: 1887689
aauggaaucuacgauguua

SEQ ID NO: 2489737 - RNA, 19 nt, Artificial Sequence
  Description of Artificial Sequence: Synthetic oligonucleotide
  Antisense strand to SEQ ID NO: 2489736
uaacaucguagauuccauu

SEQ ID NO: 2489738 - RNA, 19 nt, Artificial Sequence
  Description of Artificial Sequence: Synthetic oligonucleotide
  Sense strand starting at position 3580 of SEQ ID NO: 1887689
uggaaucuacgauguuaaa

SEQ ID NO: 2489739 - RNA, 19 nt, Artificial Sequence
  Description of Artificial Sequence: Synthetic oligonucleotide
  Antisense strand to SEQ ID NO: 2489738
uuuaacaucguagauucca

SEQ ID NO: 2489740 - RNA, 19 nt, Artificial Sequence
  Description of Artificial Sequence: Synthetic oligonucleotide
  Sense strand starting at position 3621 of SEQ ID NO: 1887689
aaacauccuccaggguaga

SEQ ID NO: 2489741 - RNA, 19 nt, Artificial Sequence
  Description of Artificial Sequence: Synthetic oligonucleotide
  Antisense strand to SEQ ID NO: 2489740
ucuacccuggaggauguuu

SEQ ID NO: 2489742 - RNA, 19 nt, Artificial Sequence
  Description of Artificial Sequence: Synthetic oligonucleotide
  Sense strand starting at position 3752 of SEQ ID NO: 1887689
gaaguaucaccugagcuca

SEQ ID NO: 2489743 - RNA, 19 nt, Artificial Sequence
  Description of Artificial Sequence: Synthetic oligonucleotide
  Antisense strand to SEQ ID NO: 2489742
ugagcucaggugauacuuc

SEQ ID NO: 2489744 - RNA, 19 nt, Artificial Sequence
  Description of Artificial Sequence: Synthetic oligonucleotide
  Sense strand starting at position 3798 of SEQ ID NO: 1887689
gguguaagcccauguguau

SEQ ID NO: 2489745 - RNA, 19 nt, Artificial Sequence
  Description of Artificial Sequence: Synthetic oligonucleotide
  Antisense strand to SEQ ID NO: 2489744
auacacaugggcuuacacc

SEQ ID NO: 2489746 - RNA, 19 nt, Artificial Sequence
  Description of Artificial Sequence: Synthetic oligonucleotide
  Sense strand starting at position 3801 of SEQ ID NO: 1887689
guaagcccauguguauaaa

SEQ ID NO: 2489747 - RNA, 19 nt, Artificial Sequence
  Description of Artificial Sequence: Synthetic oligonucleotide
  Antisense strand to SEQ ID NO: 2489746
uuuauacacaugggcuuac

SEQ ID NO: 2489748 - RNA, 19 nt, Artificial Sequence
  Description of Artificial Sequence: Synthetic oligonucleotide
  Sense strand starting at position 18 of SEQ ID NO: 1887690
gggaguuacagugagugga

SEQ ID NO: 2489749 - RNA, 19 nt, Artificial Sequence
  Description of Artificial Sequence: Synthetic oligonucleotide
  Antisense strand to SEQ ID NO: 2489748
uccacucacuguaacuccc

SEQ ID NO: 2489750 - RNA, 19 nt, Artificial Sequence
  Description of Artificial Sequence: Synthetic oligonucleotide
  Sense strand starting at position 356 of SEQ ID NO: 1887690
cugagauuccgccacugga

SEQ ID NO: 2489751 - RNA, 19 nt, Artificial Sequence
  Description of Artificial Sequence: Synthetic oligonucleotide
  Antisense strand to SEQ ID NO: 2489750
uccaguggcggaaucucag

SEQ ID NO: 2489752 - RNA, 19 nt, Artificial Sequence
  Description of Artificial Sequence: Synthetic oligonucleotide
  Sense strand starting at position 557 of SEQ ID NO: 1887690
auccaagccugauaagcau

SEQ ID NO: 2489753 - RNA, 19 nt, Artificial Sequence
  Description of Artificial Sequence: Synthetic oligonucleotide
  Antisense strand to SEQ ID NO: 2489752
augcuuaucaggcuuggau

SEQ ID NO: 2489754 - RNA, 19 nt, Artificial Sequence
  Description of Artificial Sequence: Synthetic oligonucleotide
  Sense strand starting at position 568 of SEQ ID NO: 1887690
auaagcaugcucugcgaau

SEQ ID NO: 2489755 - RNA, 19 nt, Artificial Sequence
  Description of Artificial Sequence: Synthetic oligonucleotide
  Antisense strand to SEQ ID NO: 2489754
auucgcagagcaugcuuau

SEQ ID NO: 2489756 - RNA, 19 nt, Artificial Sequence
  Description of Artificial Sequence: Synthetic oligonucleotide
  Sense strand starting at position 569 of SEQ ID NO: 1887690
uaagcaugcucugcgaaug

SEQ ID NO: 2489757 - RNA, 19 nt, Artificial Sequence
  Description of Artificial Sequence: Synthetic oligonucleotide
  Antisense strand to SEQ ID NO: 2489756
cauucgcagagcaugcuua

SEQ ID NO: 2489758 - RNA, 19 nt, Artificial Sequence
  Description of Artificial Sequence: Synthetic oligonucleotide
  Sense strand starting at position 570 of SEQ ID NO: 1887690
aagcaugcucugcgaaugu

SEQ ID NO: 2489759 - RNA, 19 nt, Artificial Sequence
  Description of Artificial Sequence: Synthetic oligonucleotide
  Antisense strand to SEQ ID NO: 2489758
acauucgcagagcaugcuu

SEQ ID NO: 2489760 - RNA, 19 nt, Artificial Sequence
  Description of Artificial Sequence: Synthetic oligonucleotide
  Sense strand starting at position 574 of SEQ ID NO: 1887690
augcucugcgaauguauua

SEQ ID NO: 2489761 - RNA, 19 nt, Artificial Sequence
  Description of Artificial Sequence: Synthetic oligonucleotide
  Antisense strand to SEQ ID NO: 2489760
uaauacauucgcagagcau

SEQ ID NO: 2489762 - RNA, 19 nt, Artificial Sequence
  Description of Artificial Sequence: Synthetic oligonucleotide
  Sense strand starting at position 579 of SEQ ID NO: 1887690
cugcgaauguauuaccaag

SEQ ID NO: 2489763 - RNA, 19 nt, Artificial Sequence
  Description of Artificial Sequence: Synthetic oligonucleotide
  Antisense strand to SEQ ID NO: 2489762
cuugguaauacauucgcag

SEQ ID NO: 2489764 - RNA, 19 nt, Artificial Sequence
  Description of Artificial Sequence: Synthetic oligonucleotide
  Sense strand starting at position 581 of SEQ ID NO: 1887690
gcgaauguauuaccaagau

SEQ ID NO: 2489765 - RNA, 19 nt, Artificial Sequence
  Description of Artificial Sequence: Synthetic oligonucleotide
  Antisense strand to SEQ ID NO: 2489764
aucuugguaauacauucgc

SEQ ID NO: 2489766 - RNA, 19 nt, Artificial Sequence
  Description of Artificial Sequence: Synthetic oligonucleotide
  Sense strand starting at position 718 of SEQ ID NO: 1887690
gcuccagccaucugggauu

SEQ ID NO: 2489767 - RNA, 19 nt, Artificial Sequence
  Description of Artificial Sequence: Synthetic oligonucleotide
  Antisense strand to SEQ ID NO: 2489766
aaucccagauggcuggagc

SEQ ID NO: 2489768 - RNA, 19 nt, Artificial Sequence
  Description of Artificial Sequence: Synthetic oligonucleotide
  Sense strand starting at position 785 of SEQ ID NO: 1887690
augcauuuauucgcuguuu

SEQ ID NO: 2489769 - RNA, 19 nt, Artificial Sequence
  Description of Artificial Sequence: Synthetic oligonucleotide
  Antisense strand to SEQ ID NO: 2489768
aaacagcgaauaaaugcau

SEQ ID NO: 2489770 - RNA, 19 nt, Artificial Sequence
  Description of Artificial Sequence: Synthetic oligonucleotide
  Sense strand starting at position 787 of SEQ ID NO: 1887690
gcauuuauucgcuguuuga

SEQ ID NO: 2489771 - RNA, 19 nt, Artificial Sequence
  Description of Artificial Sequence: Synthetic oligonucleotide
  Antisense strand to SEQ ID NO: 2489770
ucaaacagcgaauaaaugc

SEQ ID NO: 2489772 - RNA, 19 nt, Artificial Sequence
  Description of Artificial Sequence: Synthetic oligonucleotide
  Sense strand starting at position 978 of SEQ ID NO: 1887690
acagcaauggauugaguca

SEQ ID NO: 2489773 - RNA, 19 nt, Artificial Sequence
  Description of Artificial Sequence: Synthetic oligonucleotide
  Antisense strand to SEQ ID NO: 2489772
ugacucaauccauugcugu

SEQ ID NO: 2489774 - RNA, 19 nt, Artificial Sequence
  Description of Artificial Sequence: Synthetic oligonucleotide
  Sense strand starting at position 993 of SEQ ID NO: 1887690
gucacauggucacuugagu

SEQ ID NO: 2489775 - RNA, 19 nt, Artificial Sequence
  Description of Artificial Sequence: Synthetic oligonucleotide
  Antisense strand to SEQ ID NO: 2489774
acucaagugaccaugugac

SEQ ID NO: 2489776 - RNA, 19 nt, Artificial Sequence
  Description of Artificial Sequence: Synthetic oligonucleotide
  Sense strand starting at position 1440 of SEQ ID NO: 1887690
agugguucaugccuguaga

SEQ ID NO: 2489777 - RNA, 19 nt, Artificial Sequence
  Description of Artificial Sequence: Synthetic oligonucleotide
  Antisense strand to SEQ ID NO: 2489776
ucuacaggcaugaaccacu

SEQ ID NO: 2489778 - RNA, 19 nt, Artificial Sequence
  Description of Artificial Sequence: Synthetic oligonucleotide
  Sense strand starting at position 1612 of SEQ ID NO: 1887690
agaguauucucugugugca

SEQ ID NO: 2489779 - RNA, 19 nt, Artificial Sequence
  Description of Artificial Sequence: Synthetic oligonucleotide
  Antisense strand to SEQ ID NO: 2489778
ugcacacagagaauacucu

SEQ ID NO: 2489780 - RNA, 19 nt, Artificial Sequence
  Description of Artificial Sequence: Synthetic oligonucleotide
  Sense strand starting at position 1613 of SEQ ID NO: 1887690
gaguauucucugugugcag

SEQ ID NO: 2489781 - RNA, 19 nt, Artificial Sequence
  Description of Artificial Sequence: Synthetic oligonucleotide
  Antisense strand to SEQ ID NO: 2489780
cugcacacagagaauacuc

SEQ ID NO: 2489782 - RNA, 19 nt, Artificial Sequence
  Description of Artificial Sequence: Synthetic oligonucleotide
  Sense strand starting at position 1614 of SEQ ID NO: 1887690
aguauucucugugugcaga

SEQ ID NO: 2489783 - RNA, 19 nt, Artificial Sequence
  Description of Artificial Sequence: Synthetic oligonucleotide
  Antisense strand to SEQ ID NO: 2489782
ucugcacacagagaauacu

SEQ ID NO: 2489784 - RNA, 19 nt, Artificial Sequence
  Description of Artificial Sequence: Synthetic oligonucleotide
  Sense strand starting at position 1615 of SEQ ID NO: 1887690
guauucucugugugcagaa

SEQ ID NO: 2489785 - RNA, 19 nt, Artificial Sequence
  Description of Artificial Sequence: Synthetic oligonucleotide
  Antisense strand to SEQ ID NO: 2489784
uucugcacacagagaauac

SEQ ID NO: 2489786 - RNA, 19 nt, Artificial Sequence
  Description of Artificial Sequence: Synthetic oligonucleotide
  Sense strand starting at position 1617 of SEQ ID NO: 1887690
auucucugugugcagaaga

SEQ ID NO: 2489787 - RNA, 19 nt, Artificial Sequence
  Description of Artificial Sequence: Synthetic oligonucleotide
  Antisense strand to SEQ ID NO: 2489786
ucuucugcacacagagaau

SEQ ID NO: 2489788 - RNA, 19 nt, Artificial Sequence
  Description of Artificial Sequence: Synthetic oligonucleotide
  Sense strand starting at position 1725 of SEQ ID NO: 1887690
uguacuauaugcucacaua

SEQ ID NO: 2489789 - RNA, 19 nt, Artificial Sequence
  Description of Artificial Sequence: Synthetic oligonucleotide
  Antisense strand to SEQ ID NO: 2489788
uaugugagcauauaguaca

SEQ ID NO: 2489790 - RNA, 19 nt, Artificial Sequence
  Description of Artificial Sequence: Synthetic oligonucleotide
  Sense strand starting at position 1845 of SEQ ID NO: 1887690
auccaucucugaugauaag

SEQ ID NO: 2489791 - RNA, 19 nt, Artificial Sequence
  Description of Artificial Sequence: Synthetic oligonucleotide
  Antisense strand to SEQ ID NO: 2489790
cuuaucaucagagauggau

SEQ ID NO: 2489792 - RNA, 19 nt, Artificial Sequence
  Description of Artificial Sequence: Synthetic oligonucleotide
  Sense strand starting at position 1857 of SEQ ID NO: 1887690
ugauaagcaugcucugaaa

SEQ ID NO: 2489793 - RNA, 19 nt, Artificial Sequence
  Description of Artificial Sequence: Synthetic oligonucleotide
  Antisense strand to SEQ ID NO: 2489792
uuucagagcaugcuuauca

SEQ ID NO: 2489794 - RNA, 19 nt, Artificial Sequence
  Description of Artificial Sequence: Synthetic oligonucleotide
  Sense strand starting at position 1996 of SEQ ID NO: 1887690
cugagaucuucuugcucug

SEQ ID NO: 2489795 - RNA, 19 nt, Artificial Sequence
  Description of Artificial Sequence: Synthetic oligonucleotide
  Antisense strand to SEQ ID NO: 2489794
cagagcaagaagaucucag

SEQ ID NO: 2489796 - RNA, 19 nt, Artificial Sequence
  Description of Artificial Sequence: Synthetic oligonucleotide
  Sense strand starting at position 2226 of SEQ ID NO: 1887690
ggcaaugccuacuacacau

SEQ ID NO: 2489797 - RNA, 19 nt, Artificial Sequence
  Description of Artificial Sequence: Synthetic oligonucleotide
  Antisense strand to SEQ ID NO: 2489796
auguguaguaggcauugcc

SEQ ID NO: 2489798 - RNA, 19 nt, Artificial Sequence
  Description of Artificial Sequence: Synthetic oligonucleotide
  Sense strand starting at position 2313 of SEQ ID NO: 1887690
ucgcuugaguuccaguaca

SEQ ID NO: 2489799 - RNA, 19 nt, Artificial Sequence
  Description of Artificial Sequence: Synthetic oligonucleotide
  Antisense strand to SEQ ID NO: 2489798
uguacuggaacucaagcga

SEQ ID NO: 2489800 - RNA, 19 nt, Artificial Sequence
  Description of Artificial Sequence: Synthetic oligonucleotide
  Sense strand starting at position 2437 of SEQ ID NO: 1887690
uguaaacgcuccucaauaa

SEQ ID NO: 2489801 - RNA, 19 nt, Artificial Sequence
  Description of Artificial Sequence: Synthetic oligonucleotide
  Antisense strand to SEQ ID NO: 2489800
uuauugaggagcguuuaca

SEQ ID NO: 2489802 - RNA, 19 nt, Artificial Sequence
  Description of Artificial Sequence: Synthetic oligonucleotide
  Sense strand starting at position 2438 of SEQ ID NO: 1887690
guaaacgcuccucaauaaa

SEQ ID NO: 2489803 - RNA, 19 nt, Artificial Sequence
  Description of Artificial Sequence: Synthetic oligonucleotide
  Antisense strand to SEQ ID NO: 2489802
uuuauugaggagcguuuac

SEQ ID NO: 2489804 - RNA, 19 nt, Artificial Sequence
  Description of Artificial Sequence: Synthetic oligonucleotide
  Sense strand starting at position 2626 of SEQ ID NO: 1887690
ggugguguaugccugcaga

SEQ ID NO: 2489805 - RNA, 19 nt, Artificial Sequence
  Description of Artificial Sequence: Synthetic oligonucleotide
  Antisense strand to SEQ ID NO: 2489804
ucugcaggcauacaccacc

SEQ ID NO: 2489806 - RNA, 19 nt, Artificial Sequence
  Description of Artificial Sequence: Synthetic oligonucleotide
  Sense strand starting at position 2881 of SEQ ID NO: 1887690
gagcaaaguuccugauacu

SEQ ID NO: 2489807 - RNA, 19 nt, Artificial Sequence
  Description of Artificial Sequence: Synthetic oligonucleotide
  Antisense strand to SEQ ID NO: 2489806
aguaucaggaacuuugcuc

SEQ ID NO: 2489808 - RNA, 19 nt, Artificial Sequence
  Description of Artificial Sequence: Synthetic oligonucleotide
  Sense strand starting at position 2882 of SEQ ID NO: 1887690
agcaaaguuccugauacug

SEQ ID NO: 2489809 - RNA, 19 nt, Artificial Sequence
  Description of Artificial Sequence: Synthetic oligonucleotide
  Antisense strand to SEQ ID NO: 2489808
caguaucaggaacuuugcu

SEQ ID NO: 2489810 - RNA, 19 nt, Artificial Sequence
  Description of Artificial Sequence: Synthetic oligonucleotide
  Sense strand starting at position 2884 of SEQ ID NO: 1887690
caaaguuccugauacugag

SEQ ID NO: 2489811 - RNA, 19 nt, Artificial Sequence
  Description of Artificial Sequence: Synthetic oligonucleotide
  Antisense strand to SEQ ID NO: 2489810
cucaguaucaggaacuuug

SEQ ID NO: 2489812 - RNA, 19 nt, Artificial Sequence
  Description of Artificial Sequence: Synthetic oligonucleotide
  Sense strand starting at position 3065 of SEQ ID NO: 1887690
gucugauuauaagcaugau

SEQ ID NO: 2489813 - RNA, 19 nt, Artificial Sequence
  Description of Artificial Sequence: Synthetic oligonucleotide
  Antisense strand to SEQ ID NO: 2489812
aucaugcuuauaaucagac

SEQ ID NO: 2489814 - RNA, 19 nt, Artificial Sequence
  Description of Artificial Sequence: Synthetic oligonucleotide
  Sense strand starting at position 3068 of SEQ ID NO: 1887690
ugauuauaagcaugaucuc

SEQ ID NO: 2489815 - RNA, 19 nt, Artificial Sequence
  Description of Artificial Sequence: Synthetic oligonucleotide
  Antisense strand to SEQ ID NO: 2489814
gagaucaugcuuauaauca

SEQ ID NO: 2489816 - RNA, 19 nt, Artificial Sequence
  Description of Artificial Sequence: Synthetic oligonucleotide
  Sense strand starting at position 3370 of SEQ ID NO: 1887690
cagguuagccuagaucauc

SEQ ID NO: 2489817 - RNA, 19 nt, Artificial Sequence
  Description of Artificial Sequence: Synthetic oligonucleotide
  Antisense strand to SEQ ID NO: 2489816
gaugaucuaggcuaaccug

SEQ ID NO: 2489818 - RNA, 19 nt, Artificial Sequence
  Description of Artificial Sequence: Synthetic oligonucleotide
  Sense strand starting at position 3392 of SEQ ID NO: 1887690
ggacaauccuccugaguuc

SEQ ID NO: 2489819 - RNA, 19 nt, Artificial Sequence
  Description of Artificial Sequence: Synthetic oligonucleotide
  Antisense strand to SEQ ID NO: 2489818
gaacucaggaggauugucc

SEQ ID NO: 2489820 - RNA, 19 nt, Artificial Sequence
  Description of Artificial Sequence: Synthetic oligonucleotide
  Sense strand starting at position 3562 of SEQ ID NO: 1887690
cugaaucucccauguugaa

SEQ ID NO: 2489821 - RNA, 19 nt, Artificial Sequence
  Description of Artificial Sequence: Synthetic oligonucleotide
  Antisense strand to SEQ ID NO: 2489820
uucaacaugggagauucag

SEQ ID NO: 2489822 - RNA, 19 nt, Artificial Sequence
  Description of Artificial Sequence: Synthetic oligonucleotide
  Sense strand starting at position 3729 of SEQ ID NO: 1887690
gugacgggugccugugauu

SEQ ID NO: 2489823 - RNA, 19 nt, Artificial Sequence
  Description of Artificial Sequence: Synthetic oligonucleotide
  Antisense strand to SEQ ID NO: 2489822
aaucacaggcacccgucac

SEQ ID NO: 2489824 - RNA, 19 nt, Artificial Sequence
  Description of Artificial Sequence: Synthetic oligonucleotide
  Sense strand starting at position 3792 of SEQ ID NO: 1887690
gaggcaaagguuugaguga

SEQ ID NO: 2489825 - RNA, 19 nt, Artificial Sequence
  Description of Artificial Sequence: Synthetic oligonucleotide
  Antisense strand to SEQ ID NO: 2489824
ucacucaaaccuuugccuc

SEQ ID NO: 2489826 - RNA, 19 nt, Artificial Sequence
  Description of Artificial Sequence: Synthetic oligonucleotide
  Sense strand starting at position 120 of SEQ ID NO: 1887691
gggcgaucguccugaguuu

SEQ ID NO: 2489827 - RNA, 19 nt, Artificial Sequence
  Description of Artificial Sequence: Synthetic oligonucleotide
  Antisense strand to SEQ ID NO: 2489826
aaacucaggacgaucgccc

SEQ ID NO: 2489828 - RNA, 19 nt, Artificial Sequence
  Description of Artificial Sequence: Synthetic oligonucleotide
  Sense strand starting at position 180 of SEQ ID NO: 1887691
acauuuagcuaagagaauu

SEQ ID NO: 2489829 - RNA, 19 nt, Artificial Sequence
  Description of Artificial Sequence: Synthetic oligonucleotide
  Antisense strand to SEQ ID NO: 2489828
aauucucuuagcuaaaugu

SEQ ID NO: 2489830 - RNA, 19 nt, Artificial Sequence
  Description of Artificial Sequence: Synthetic oligonucleotide
  Sense strand starting at position 188 of SEQ ID NO: 1887691
cuaagagaauugggcugau

SEQ ID NO: 2489831 - RNA, 19 nt, Artificial Sequence
  Description of Artificial Sequence: Synthetic oligonucleotide
  Antisense strand to SEQ ID NO: 2489830
aucagcccaauucucuuag

SEQ ID NO: 2489832 - RNA, 19 nt, Artificial Sequence
  Description of Artificial Sequence: Synthetic oligonucleotide
  Sense strand starting at position 191 of SEQ ID NO: 1887691
agagaauugggcugauguu

SEQ ID NO: 2489833 - RNA, 19 nt, Artificial Sequence
  Description of Artificial Sequence: Synthetic oligonucleotide
  Antisense strand to SEQ ID NO: 2489832
aacaucagcccaauucucu

SEQ ID NO: 2489834 - RNA, 19 nt, Artificial Sequence
  Description of Artificial Sequence: Synthetic oligonucleotide
  Sense strand starting at position 192 of SEQ ID NO: 1887691
gagaauugggcugauguug

SEQ ID NO: 2489835 - RNA, 19 nt, Artificial Sequence
  Description of Artificial Sequence: Synthetic oligonucleotide
  Antisense strand to SEQ ID NO: 2489834
caacaucagcccaauucuc

SEQ ID NO: 2489836 - RNA, 19 nt, Artificial Sequence
  Description of Artificial Sequence: Synthetic oligonucleotide
  Sense strand starting at position 197 of SEQ ID NO: 1887691
uugggcugauguugaagaa

SEQ ID NO: 2489837 - RNA, 19 nt, Artificial Sequence
  Description of Artificial Sequence: Synthetic oligonucleotide
  Antisense strand to SEQ ID NO: 2489836
uucuucaacaucagcccaa

SEQ ID NO: 2489838 - RNA, 19 nt, Artificial Sequence
  Description of Artificial Sequence: Synthetic oligonucleotide
  Sense strand starting at position 198 of SEQ ID NO: 1887691
ugggcugauguugaagaau

SEQ ID NO: 2489839 - RNA, 19 nt, Artificial Sequence
  Description of Artificial Sequence: Synthetic oligonucleotide
  Antisense strand to SEQ ID NO: 2489838
auucuucaacaucagccca

SEQ ID NO: 2489840 - RNA, 19 nt, Artificial Sequence
  Description of Artificial Sequence: Synthetic oligonucleotide
  Sense strand starting at position 655 of SEQ ID NO: 1887691
gggagaaucgccggaagcu

SEQ ID NO: 2489841 - RNA, 19 nt, Artificial Sequence
  Description of Artificial Sequence: Synthetic oligonucleotide
  Antisense strand to SEQ ID NO: 2489840
agcuuccggcgauucuccc

SEQ ID NO: 2489842 - RNA, 19 nt, Artificial Sequence
  Description of Artificial Sequence: Synthetic oligonucleotide
  Sense strand starting at position 678 of SEQ ID NO: 1887691
ggcggaguuuccggucaac

SEQ ID NO: 2489843 - RNA, 19 nt, Artificial Sequence
  Description of Artificial Sequence: Synthetic oligonucleotide
  Antisense strand to SEQ ID NO: 2489842
guugaccggaaacuccgcc

SEQ ID NO: 2489844 - RNA, 19 nt, Artificial Sequence
  Description of Artificial Sequence: Synthetic oligonucleotide
  Sense strand starting at position 828 of SEQ ID NO: 1887691
cagggaaccugucuuggaa

SEQ ID NO: 2489845 - RNA, 19 nt, Artificial Sequence
  Description of Artificial Sequence: Synthetic oligonucleotide
  Antisense strand to SEQ ID NO: 2489844
uuccaagacagguucccug

SEQ ID NO: 2489846 - RNA, 19 nt, Artificial Sequence
  Description of Artificial Sequence: Synthetic oligonucleotide
  Sense strand starting at position 1027 of SEQ ID NO: 1887691
gaggucuucuugcuccagu

SEQ ID NO: 2489847 - RNA, 19 nt, Artificial Sequence
  Description of Artificial Sequence: Synthetic oligonucleotide
  Antisense strand to SEQ ID NO: 2489846
acuggagcaagaagaccuc

SEQ ID NO: 2489848 - RNA, 19 nt, Artificial Sequence
  Description of Artificial Sequence: Synthetic oligonucleotide
  Sense strand starting at position 1028 of SEQ ID NO: 1887691
aggucuucuugcuccagua

SEQ ID NO: 2489849 - RNA, 19 nt, Artificial Sequence
  Description of Artificial Sequence: Synthetic oligonucleotide
  Antisense strand to SEQ ID NO: 2489848
uacuggagcaagaagaccu

SEQ ID NO: 2489850 - RNA, 19 nt, Artificial Sequence
  Description of Artificial Sequence: Synthetic oligonucleotide
  Sense strand starting at position 1030 of SEQ ID NO: 1887691
gucuucuugcuccaguacu

SEQ ID NO: 2489851 - RNA, 19 nt, Artificial Sequence
  Description of Artificial Sequence: Synthetic oligonucleotide
  Antisense strand to SEQ ID NO: 2489850
aguacuggagcaagaagac

SEQ ID NO: 2489852 - RNA, 19 nt, Artificial Sequence
  Description of Artificial Sequence: Synthetic oligonucleotide
  Sense strand starting at position 1758 of SEQ ID NO: 1887691
agagauauauuggacaugu

SEQ ID NO: 2489853 - RNA, 19 nt, Artificial Sequence
  Description of Artificial Sequence: Synthetic oligonucleotide
  Antisense strand to SEQ ID NO: 2489852
acauguccaauauaucucu

SEQ ID NO: 2489854 - RNA, 19 nt, Artificial Sequence
  Description of Artificial Sequence: Synthetic oligonucleotide
  Sense strand starting at position 1870 of SEQ ID NO: 1887691
cugcaaauguauuaccgaa

SEQ ID NO: 2489855 - RNA, 19 nt, Artificial Sequence
  Description of Artificial Sequence: Synthetic oligonucleotide
  Antisense strand to SEQ ID NO: 2489854
uucgguaauacauuugcag

SEQ ID NO: 2489856 - RNA, 19 nt, Artificial Sequence
  Description of Artificial Sequence: Synthetic oligonucleotide
  Sense strand starting at position 1872 of SEQ ID NO: 1887691
gcaaauguauuaccgaaau

SEQ ID NO: 2489857 - RNA, 19 nt, Artificial Sequence
  Description of Artificial Sequence: Synthetic oligonucleotide
  Antisense strand to SEQ ID NO: 2489856
auuucgguaauacauuugc

SEQ ID NO: 2489858 - RNA, 19 nt, Artificial Sequence
  Description of Artificial Sequence: Synthetic oligonucleotide
  Sense strand starting at position 2039 of SEQ ID NO: 1887691
uuuccuugaccuggucaaa

SEQ ID NO: 2489859 - RNA, 19 nt, Artificial Sequence
  Description of Artificial Sequence: Synthetic oligonucleotide
  Antisense strand to SEQ ID NO: 2489858
uuugaccaggucaaggaaa

SEQ ID NO: 2489860 - RNA, 19 nt, Artificial Sequence
  Description of Artificial Sequence: Synthetic oligonucleotide
  Sense strand starting at position 2084 of SEQ ID NO: 1887691
auugguccuguuugcauau

SEQ ID NO: 2489861 - RNA, 19 nt, Artificial Sequence
  Description of Artificial Sequence: Synthetic oligonucleotide
  Antisense strand to SEQ ID NO: 2489860
auaugcaaacaggaccaau

SEQ ID NO: 2489862 - RNA, 19 nt, Artificial Sequence
  Description of Artificial Sequence: Synthetic oligonucleotide
  Sense strand starting at position 2174 of SEQ ID NO: 1887691
agccuuguucaucgaggga

SEQ ID NO: 2489863 - RNA, 19 nt, Artificial Sequence
  Description of Artificial Sequence: Synthetic oligonucleotide
  Antisense strand to SEQ ID NO: 2489862
ucccucgaugaacaaggcu

SEQ ID NO: 2489864 - RNA, 19 nt, Artificial Sequence
  Description of Artificial Sequence: Synthetic oligonucleotide
  Sense strand starting at position 2177 of SEQ ID NO: 1887691
cuuguucaucgagggacaa

SEQ ID NO: 2489865 - RNA, 19 nt, Artificial Sequence
  Description of Artificial Sequence: Synthetic oligonucleotide
  Antisense strand to SEQ ID NO: 2489864
uugucccucgaugaacaag

SEQ ID NO: 2489866 - RNA, 19 nt, Artificial Sequence
  Description of Artificial Sequence: Synthetic oligonucleotide
  Sense strand starting at position 2190 of SEQ ID NO: 1887691
ggacaacuguccuggguuu

SEQ ID NO: 2489867 - RNA, 19 nt, Artificial Sequence
  Description of Artificial Sequence: Synthetic oligonucleotide
  Antisense strand to SEQ ID NO: 2489866
aaacccaggacaguugucc

SEQ ID NO: 2489868 - RNA, 19 nt, Artificial Sequence
  Description of Artificial Sequence: Synthetic oligonucleotide
  Sense strand starting at position 2245 of SEQ ID NO: 1887691
accuuauauucucaggagu

SEQ ID NO: 2489869 - RNA, 19 nt, Artificial Sequence
  Description of Artificial Sequence: Synthetic oligonucleotide
  Antisense strand to SEQ ID NO: 2489868
acuccugagaauauaaggu

SEQ ID NO: 2489870 - RNA, 19 nt, Artificial Sequence
  Description of Artificial Sequence: Synthetic oligonucleotide
  Sense strand starting at position 2247 of SEQ ID NO: 1887691
cuuauauucucaggaguua

SEQ ID NO: 2489871 - RNA, 19 nt, Artificial Sequence
  Description of Artificial Sequence: Synthetic oligonucleotide
  Antisense strand to SEQ ID NO: 2489870
uaacuccugagaauauaag

SEQ ID NO: 2489872 - RNA, 19 nt, Artificial Sequence
  Description of Artificial Sequence: Synthetic oligonucleotide
  Sense strand starting at position 2313 of SEQ ID NO: 1887691
aaguuagccagguauagag

SEQ ID NO: 2489873 - RNA, 19 nt, Artificial Sequence
  Description of Artificial Sequence: Synthetic oligonucleotide
  Antisense strand to SEQ ID NO: 2489872
cucuauaccuggcuaacuu

SEQ ID NO: 2489874 - RNA, 19 nt, Artificial Sequence
  Description of Artificial Sequence: Synthetic oligonucleotide
  Sense strand starting at position 2492 of SEQ ID NO: 1887691
ugcccaaagugauauaaga

SEQ ID NO: 2489875 - RNA, 19 nt, Artificial Sequence
  Description of Artificial Sequence: Synthetic oligonucleotide
  Antisense strand to SEQ ID NO: 2489874
ucuuauaucacuuugggca

SEQ ID NO: 2489876 - RNA, 19 nt, Artificial Sequence
  Description of Artificial Sequence: Synthetic oligonucleotide
  Sense strand starting at position 2505 of SEQ ID NO: 1887691
auaagaguauucucagggu

SEQ ID NO: 2489877 - RNA, 19 nt, Artificial Sequence
  Description of Artificial Sequence: Synthetic oligonucleotide
  Antisense strand to SEQ ID NO: 2489876
acccugagaauacucuuau

SEQ ID NO: 2489878 - RNA, 19 nt, Artificial Sequence
  Description of Artificial Sequence: Synthetic oligonucleotide
  Sense strand starting at position 2508 of SEQ ID NO: 1887691
agaguauucucagggugua

SEQ ID NO: 2489879 - RNA, 19 nt, Artificial Sequence
  Description of Artificial Sequence: Synthetic oligonucleotide
  Antisense strand to SEQ ID NO: 2489878
uacacccugagaauacucu

SEQ ID NO: 2489880 - RNA, 19 nt, Artificial Sequence
  Description of Artificial Sequence: Synthetic oligonucleotide
  Sense strand starting at position 2509 of SEQ ID NO: 1887691
gaguauucucaggguguaa

SEQ ID NO: 2489881 - RNA, 19 nt, Artificial Sequence
  Description of Artificial Sequence: Synthetic oligonucleotide
  Antisense strand to SEQ ID NO: 2489880
uuacacccugagaauacuc

SEQ ID NO: 2489882 - RNA, 19 nt, Artificial Sequence
  Description of Artificial Sequence: Synthetic oligonucleotide
  Sense strand starting at position 2539 of SEQ ID NO: 1887691
guguguacaugauauuaua

SEQ ID NO: 2489883 - RNA, 19 nt, Artificial Sequence
  Description of Artificial Sequence: Synthetic oligonucleotide
  Antisense strand to SEQ ID NO: 2489882
uauaauaucauguacacac

SEQ ID NO: 2489884 - RNA, 19 nt, Artificial Sequence
  Description of Artificial Sequence: Synthetic oligonucleotide
  Sense strand starting at position 2716 of SEQ ID NO: 1887691
ggaaguguaugccuguaau

SEQ ID NO: 2489885 - RNA, 19 nt, Artificial Sequence
  Description of Artificial Sequence: Synthetic oligonucleotide
  Antisense strand to SEQ ID NO: 2489884
auuacaggcauacacuucc

SEQ ID NO: 2489886 - RNA, 19 nt, Artificial Sequence
  Description of Artificial Sequence: Synthetic oligonucleotide
  Sense strand starting at position 2757 of SEQ ID NO: 1887691
guaggagagucgcuuuaac

SEQ ID NO: 2489887 - RNA, 19 nt, Artificial Sequence
  Description of Artificial Sequence: Synthetic oligonucleotide
  Antisense strand to SEQ ID NO: 2489886
guuaaagcgacucuccuac

SEQ ID NO: 2489888 - RNA, 19 nt, Artificial Sequence
  Description of Artificial Sequence: Synthetic oligonucleotide
  Sense strand starting at position 3260 of SEQ ID NO: 1887691
gguuucuacguguugguua

SEQ ID NO: 2489889 - RNA, 19 nt, Artificial Sequence
  Description of Artificial Sequence: Synthetic oligonucleotide
  Antisense strand to SEQ ID NO: 2489888
uaaccaacacguagaaacc

SEQ ID NO: 2489890 - RNA, 19 nt, Artificial Sequence
  Description of Artificial Sequence: Synthetic oligonucleotide
  Sense strand starting at position 3356 of SEQ ID NO: 1887691
cugugcucggccuauuuau

SEQ ID NO: 2489891 - RNA, 19 nt, Artificial Sequence
  Description of Artificial Sequence: Synthetic oligonucleotide
  Antisense strand to SEQ ID NO: 2489890
auaaauaggccgagcacag

SEQ ID NO: 2489892 - RNA, 19 nt, Artificial Sequence
  Description of Artificial Sequence: Synthetic oligonucleotide
  Sense strand starting at position 3465 of SEQ ID NO: 1887691
aagagauucucuugccgug

SEQ ID NO: 2489893 - RNA, 19 nt, Artificial Sequence
  Description of Artificial Sequence: Synthetic oligonucleotide
  Antisense strand to SEQ ID NO: 2489892
cacggcaagagaaucucuu

SEQ ID NO: 2489894 - RNA, 19 nt, Artificial Sequence
  Description of Artificial Sequence: Synthetic oligonucleotide
  Sense strand starting at position 138 of SEQ ID NO: 1887692
cuaugcauggguuaauauu

SEQ ID NO: 2489895 - RNA, 19 nt, Artificial Sequence
  Description of Artificial Sequence: Synthetic oligonucleotide
  Antisense strand to SEQ ID NO: 2489894
aauauuaacccaugcauag

SEQ ID NO: 2489896 - RNA, 19 nt, Artificial Sequence
  Description of Artificial Sequence: Synthetic oligonucleotide
  Sense strand starting at position 417 of SEQ ID NO: 1887692
agagguguucuauaaagca

SEQ ID NO: 2489897 - RNA, 19 nt, Artificial Sequence
  Description of Artificial Sequence: Synthetic oligonucleotide
  Antisense strand to SEQ ID NO: 2489896
ugcuuuauagaacaccucu

SEQ ID NO: 2489898 - RNA, 19 nt, Artificial Sequence
  Description of Artificial Sequence: Synthetic oligonucleotide
  Sense strand starting at position 442 of SEQ ID NO: 1887692
gcagaacuuccauggagua

SEQ ID NO: 2489899 - RNA, 19 nt, Artificial Sequence
  Description of Artificial Sequence: Synthetic oligonucleotide
  Antisense strand to SEQ ID NO: 2489898
uacuccauggaaguucugc

SEQ ID NO: 2489900 - RNA, 19 nt, Artificial Sequence
  Description of Artificial Sequence: Synthetic oligonucleotide
  Sense strand starting at position 443 of SEQ ID NO: 1887692
cagaacuuccauggaguaa

SEQ ID NO: 2489901 - RNA, 19 nt, Artificial Sequence
  Description of Artificial Sequence: Synthetic oligonucleotide
  Antisense strand to SEQ ID NO: 2489900
uuacuccauggaaguucug

SEQ ID NO: 2489902 - RNA, 19 nt, Artificial Sequence
  Description of Artificial Sequence: Synthetic oligonucleotide
  Sense strand starting at position 452 of SEQ ID NO: 1887692
cauggaguaagagguguua

SEQ ID NO: 2489903 - RNA, 19 nt, Artificial Sequence
  Description of Artificial Sequence: Synthetic oligonucleotide
  Antisense strand to SEQ ID NO: 2489902
uaacaccucuuacuccaug

SEQ ID NO: 2489904 - RNA, 19 nt, Artificial Sequence
  Description of Artificial Sequence: Synthetic oligonucleotide
  Sense strand starting at position 454 of SEQ ID NO: 1887692
uggaguaagagguguuaag

SEQ ID NO: 2489905 - RNA, 19 nt, Artificial Sequence
  Description of Artificial Sequence: Synthetic oligonucleotide
  Antisense strand to SEQ ID NO: 2489904
cuuaacaccucuuacucca

SEQ ID NO: 2489906 - RNA, 19 nt, Artificial Sequence
  Description of Artificial Sequence: Synthetic oligonucleotide
  Sense strand starting at position 602 of SEQ ID NO: 1887692
augugacauuugucacugu

SEQ ID NO: 2489907 - RNA, 19 nt, Artificial Sequence
  Description of Artificial Sequence: Synthetic oligonucleotide
  Antisense strand to SEQ ID NO: 2489906
acagugacaaaugucacau

SEQ ID NO: 2489908 - RNA, 19 nt, Artificial Sequence
  Description of Artificial Sequence: Synthetic oligonucleotide
  Sense strand starting at position 611 of SEQ ID NO: 1887692
uugucacugugauugagau

SEQ ID NO: 2489909 - RNA, 19 nt, Artificial Sequence
  Description of Artificial Sequence: Synthetic oligonucleotide
  Antisense strand to SEQ ID NO: 2489908
aucucaaucacagugacaa

SEQ ID NO: 2489910 - RNA, 19 nt, Artificial Sequence
  Description of Artificial Sequence: Synthetic oligonucleotide
  Sense strand starting at position 649 of SEQ ID NO: 1887692
uuauauuaggcacagcaaa

SEQ ID NO: 2489911 - RNA, 19 nt, Artificial Sequence
  Description of Artificial Sequence: Synthetic oligonucleotide
  Antisense strand to SEQ ID NO: 2489910
uuugcugugccuaauauaa

SEQ ID NO: 2489912 - RNA, 19 nt, Artificial Sequence
  Description of Artificial Sequence: Synthetic oligonucleotide
  Sense strand starting at position 756 of SEQ ID NO: 1887692
ggauaaaugguccagcugu

SEQ ID NO: 2489913 - RNA, 19 nt, Artificial Sequence
  Description of Artificial Sequence: Synthetic oligonucleotide
  Antisense strand to SEQ ID NO: 2489912
acagcuggaccauuuaucc

SEQ ID NO: 2489914 - RNA, 19 nt, Artificial Sequence
  Description of Artificial Sequence: Synthetic oligonucleotide
  Sense strand starting at position 802 of SEQ ID NO: 1887692
gcauuagugguugaggguu

SEQ ID NO: 2489915 - RNA, 19 nt, Artificial Sequence
  Description of Artificial Sequence: Synthetic oligonucleotide
  Antisense strand to SEQ ID NO: 2489914
aacccucaaccacuaaugc

SEQ ID NO: 2489916 - RNA, 19 nt, Artificial Sequence
  Description of Artificial Sequence: Synthetic oligonucleotide
  Sense strand starting at position 808 of SEQ ID NO: 1887692
gugguugaggguugaauca

SEQ ID NO: 2489917 - RNA, 19 nt, Artificial Sequence
  Description of Artificial Sequence: Synthetic oligonucleotide
  Antisense strand to SEQ ID NO: 2489916
ugauucaacccucaaccac

SEQ ID NO: 2489918 - RNA, 19 nt, Artificial Sequence
  Description of Artificial Sequence: Synthetic oligonucleotide
  Sense strand starting at position 866 of SEQ ID NO: 1887692
aaaugaugguaagcuguua

SEQ ID NO: 2489919 - RNA, 19 nt, Artificial Sequence
  Description of Artificial Sequence: Synthetic oligonucleotide
  Antisense strand to SEQ ID NO: 2489918
uaacagcuuaccaucauuu

SEQ ID NO: 2489920 - RNA, 19 nt, Artificial Sequence
  Description of Artificial Sequence: Synthetic oligonucleotide
  Sense strand starting at position 1141 of SEQ ID NO: 1887692
gcgccugucauucuagcua

SEQ ID NO: 2489921 - RNA, 19 nt, Artificial Sequence
  Description of Artificial Sequence: Synthetic oligonucleotide
  Antisense strand to SEQ ID NO: 2489920
uagcuagaaugacaggcgc

SEQ ID NO: 2489922 - RNA, 19 nt, Artificial Sequence
  Description of Artificial Sequence: Synthetic oligonucleotide
  Sense strand starting at position 1281 of SEQ ID NO: 1887692
gauagacuuggaggcuuau

SEQ ID NO: 2489923 - RNA, 19 nt, Artificial Sequence
  Description of Artificial Sequence: Synthetic oligonucleotide
  Antisense strand to SEQ ID NO: 2489922
auaagccuccaagucuauc

SEQ ID NO: 2489924 - RNA, 19 nt, Artificial Sequence
  Description of Artificial Sequence: Synthetic oligonucleotide
  Sense strand starting at position 1349 of SEQ ID NO: 1887692
auaggaggccauuguuuga

SEQ ID NO: 2489925 - RNA, 19 nt, Artificial Sequence
  Description of Artificial Sequence: Synthetic oligonucleotide
  Antisense strand to SEQ ID NO: 2489924
ucaaacaauggccuccuau

SEQ ID NO: 2489926 - RNA, 19 nt, Artificial Sequence
  Description of Artificial Sequence: Synthetic oligonucleotide
  Sense strand starting at position 1353 of SEQ ID NO: 1887692
gaggccauuguuugaccaa

SEQ ID NO: 2489927 - RNA, 19 nt, Artificial Sequence
  Description of Artificial Sequence: Synthetic oligonucleotide
  Antisense strand to SEQ ID NO: 2489926
uuggucaaacaauggccuc

SEQ ID NO: 2489928 - RNA, 19 nt, Artificial Sequence
  Description of Artificial Sequence: Synthetic oligonucleotide
  Sense strand starting at position 1488 of SEQ ID NO: 1887692
acgguauagcauugaaauc

SEQ ID NO: 2489929 - RNA, 19 nt, Artificial Sequence
  Description of Artificial Sequence: Synthetic oligonucleotide
  Antisense strand to SEQ ID NO: 2489928
gauuucaaugcuauaccgu

SEQ ID NO: 2489930 - RNA, 19 nt, Artificial Sequence
  Description of Artificial Sequence: Synthetic oligonucleotide
  Sense strand starting at position 1489 of SEQ ID NO: 1887692
cgguauagcauugaaauca

SEQ ID NO: 2489931 - RNA, 19 nt, Artificial Sequence
  Description of Artificial Sequence: Synthetic oligonucleotide
  Antisense strand to SEQ ID NO: 2489930
ugauuucaaugcuauaccg

SEQ ID NO: 2489932 - RNA, 19 nt, Artificial Sequence
  Description of Artificial Sequence: Synthetic oligonucleotide
  Sense strand starting at position 1598 of SEQ ID NO: 1887692
ggcucacaccuguaggauu

SEQ ID NO: 2489933 - RNA, 19 nt, Artificial Sequence
  Description of Artificial Sequence: Synthetic oligonucleotide
  Antisense strand to SEQ ID NO: 2489932
aauccuacaggugugagcc

SEQ ID NO: 2489934 - RNA, 19 nt, Artificial Sequence
  Description of Artificial Sequence: Synthetic oligonucleotide
  Sense strand starting at position 1762 of SEQ ID NO: 1887692
ccaggaguucuagguugga

SEQ ID NO: 2489935 - RNA, 19 nt, Artificial Sequence
  Description of Artificial Sequence: Synthetic oligonucleotide
  Antisense strand to SEQ ID NO: 2489934
uccaaccuagaacuccugg

SEQ ID NO: 2489936 - RNA, 19 nt, Artificial Sequence
  Description of Artificial Sequence: Synthetic oligonucleotide
  Sense strand starting at position 1809 of SEQ ID NO: 1887692
gacccucaucuuggaguaa

SEQ ID NO: 2489937 - RNA, 19 nt, Artificial Sequence
  Description of Artificial Sequence: Synthetic oligonucleotide
  Antisense strand to SEQ ID NO: 2489936
uuacuccaagaugaggguc

SEQ ID NO: 2489938 - RNA, 19 nt, Artificial Sequence
  Description of Artificial Sequence: Synthetic oligonucleotide
  Sense strand starting at position 1845 of SEQ ID NO: 1887692
acccaagucugauuauaag

SEQ ID NO: 2489939 - RNA, 19 nt, Artificial Sequence
  Description of Artificial Sequence: Synthetic oligonucleotide
  Antisense strand to SEQ ID NO: 2489938
cuuauaaucagacuugggu

SEQ ID NO: 2489940 - RNA, 19 nt, Artificial Sequence
  Description of Artificial Sequence: Synthetic oligonucleotide
  Sense strand starting at position 1851 of SEQ ID NO: 1887692
gucugauuauaaguauacu

SEQ ID NO: 2489941 - RNA, 19 nt, Artificial Sequence
  Description of Artificial Sequence: Synthetic oligonucleotide
  Antisense strand to SEQ ID NO: 2489940
aguauacuuauaaucagac

SEQ ID NO: 2489942 - RNA, 19 nt, Artificial Sequence
  Description of Artificial Sequence: Synthetic oligonucleotide
  Sense strand starting at position 2027 of SEQ ID NO: 1887692
uuuauugguuuccuuggau

SEQ ID NO: 2489943 - RNA, 19 nt, Artificial Sequence
  Description of Artificial Sequence: Synthetic oligonucleotide
  Antisense strand to SEQ ID NO: 2489942
auccaaggaaaccaauaaa

SEQ ID NO: 2489944 - RNA, 19 nt, Artificial Sequence
  Description of Artificial Sequence: Synthetic oligonucleotide
  Sense strand starting at position 2187 of SEQ ID NO: 1887692
acagguugcccuuaugaau

SEQ ID NO: 2489945 - RNA, 19 nt, Artificial Sequence
  Description of Artificial Sequence: Synthetic oligonucleotide
  Antisense strand to SEQ ID NO: 2489944
auucauaagggcaaccugu

SEQ ID NO: 2489946 - RNA, 19 nt, Artificial Sequence
  Description of Artificial Sequence: Synthetic oligonucleotide
  Sense strand starting at position 2288 of SEQ ID NO: 1887692
uggcuagauuuauagagaa

SEQ ID NO: 2489947 - RNA, 19 nt, Artificial Sequence
  Description of Artificial Sequence: Synthetic oligonucleotide
  Antisense strand to SEQ ID NO: 2489946
uucucuauaaaucuagcca

SEQ ID NO: 2489948 - RNA, 19 nt, Artificial Sequence
  Description of Artificial Sequence: Synthetic oligonucleotide
  Sense strand starting at position 2382 of SEQ ID NO: 1887692
aauggaaucugagcuguuu

SEQ ID NO: 2489949 - RNA, 19 nt, Artificial Sequence
  Description of Artificial Sequence: Synthetic oligonucleotide
  Antisense strand to SEQ ID NO: 2489948
aaacagcucagauuccauu

SEQ ID NO: 2489950 - RNA, 19 nt, Artificial Sequence
  Description of Artificial Sequence: Synthetic oligonucleotide
  Sense strand starting at position 2384 of SEQ ID NO: 1887692
uggaaucugagcuguuuaa

SEQ ID NO: 2489951 - RNA, 19 nt, Artificial Sequence
  Description of Artificial Sequence: Synthetic oligonucleotide
  Antisense strand to SEQ ID NO: 2489950
uuaaacagcucagauucca

SEQ ID NO: 2489952 - RNA, 19 nt, Artificial Sequence
  Description of Artificial Sequence: Synthetic oligonucleotide
  Sense strand starting at position 2388 of SEQ ID NO: 1887692
aucugagcuguuuaagaau

SEQ ID NO: 2489953 - RNA, 19 nt, Artificial Sequence
  Description of Artificial Sequence: Synthetic oligonucleotide
  Antisense strand to SEQ ID NO: 2489952
auucuuaaacagcucagau

SEQ ID NO: 2489954 - RNA, 19 nt, Artificial Sequence
  Description of Artificial Sequence: Synthetic oligonucleotide
  Sense strand starting at position 2682 of SEQ ID NO: 1887692
agaccaccuuggucaauau

SEQ ID NO: 2489955 - RNA, 19 nt, Artificial Sequence
  Description of Artificial Sequence: Synthetic oligonucleotide
  Antisense strand to SEQ ID NO: 2489954
auauugaccaagguggucu

SEQ ID NO: 2489956 - RNA, 19 nt, Artificial Sequence
  Description of Artificial Sequence: Synthetic oligonucleotide
  Sense strand starting at position 2740 of SEQ ID NO: 1887692
gggugugguggaggguaau

SEQ ID NO: 2489957 - RNA, 19 nt, Artificial Sequence
  Description of Artificial Sequence: Synthetic oligonucleotide
  Antisense strand to SEQ ID NO: 2489956
auuacccuccaccacaccc

SEQ ID NO: 2489958 - RNA, 19 nt, Artificial Sequence
  Description of Artificial Sequence: Synthetic oligonucleotide
  Sense strand starting at position 3153 of SEQ ID NO: 1887692
ccgcaucucuauuuguauu

SEQ ID NO: 2489959 - RNA, 19 nt, Artificial Sequence
  Description of Artificial Sequence: Synthetic oligonucleotide
  Antisense strand to SEQ ID NO: 2489958
aauacaaauagagaugcgg

SEQ ID NO: 2489960 - RNA, 19 nt, Artificial Sequence
  Description of Artificial Sequence: Synthetic oligonucleotide
  Sense strand starting at position 3257 of SEQ ID NO: 1887692
ugaaauuaccaagacgcuu

SEQ ID NO: 2489961 - RNA, 19 nt, Artificial Sequence
  Description of Artificial Sequence: Synthetic oligonucleotide
  Antisense strand to SEQ ID NO: 2489960
aagcgucuugguaauuuca

SEQ ID NO: 2489962 - RNA, 19 nt, Artificial Sequence
  Description of Artificial Sequence: Synthetic oligonucleotide
  Sense strand starting at position 3524 of SEQ ID NO: 1887692
gagcauucucaggguccau

SEQ ID NO: 2489963 - RNA, 19 nt, Artificial Sequence
  Description of Artificial Sequence: Synthetic oligonucleotide
  Antisense strand to SEQ ID NO: 2489962
auggacccugagaaugcuc

SEQ ID NO: 2489964 - RNA, 19 nt, Artificial Sequence
  Description of Artificial Sequence: Synthetic oligonucleotide
  Sense strand starting at position 3543 of SEQ ID NO: 1887692
cugaaaucagagugcaaac

SEQ ID NO: 2489965 - RNA, 19 nt, Artificial Sequence
  Description of Artificial Sequence: Synthetic oligonucleotide
  Antisense strand to SEQ ID NO: 2489964
guuugcacucugauuucag

SEQ ID NO: 2489966 - RNA, 19 nt, Artificial Sequence
  Description of Artificial Sequence: Synthetic oligonucleotide
  Sense strand starting at position 3597 of SEQ ID NO: 1887692
agcagaauuaggcagaagu

SEQ ID NO: 2489967 - RNA, 19 nt, Artificial Sequence
  Description of Artificial Sequence: Synthetic oligonucleotide
  Antisense strand to SEQ ID NO: 2489966
acuucugccuaauucugcu

SEQ ID NO: 2489968 - RNA, 19 nt, Artificial Sequence
  Description of Artificial Sequence: Synthetic oligonucleotide
  Sense strand starting at position 3607 of SEQ ID NO: 1887692
ggcagaaguaaguagaagu

SEQ ID NO: 2489969 - RNA, 19 nt, Artificial Sequence
  Description of Artificial Sequence: Synthetic oligonucleotide
  Antisense strand to SEQ ID NO: 2489968
acuucuacuuacuucugcc

SEQ ID NO: 2489970 - RNA, 19 nt, Artificial Sequence
  Description of Artificial Sequence: Synthetic oligonucleotide
  Sense strand starting at position 3704 of SEQ ID NO: 1887692
cgggacagacguuaugaga

SEQ ID NO: 2489971 - RNA, 19 nt, Artificial Sequence
  Description of Artificial Sequence: Synthetic oligonucleotide
  Antisense strand to SEQ ID NO: 2489970
ucucauaacgucugucccg

SEQ ID NO: 2489972 - RNA, 19 nt, Artificial Sequence
  Description of Artificial Sequence: Synthetic oligonucleotide
  Sense strand starting at position 3734 of SEQ ID NO: 1887692
cgaggcauacaauggagaa

SEQ ID NO: 2489973 - RNA, 19 nt, Artificial Sequence
  Description of Artificial Sequence: Synthetic oligonucleotide
  Antisense strand to SEQ ID NO: 2489972
uucuccauuguaugccucg

SEQ ID NO: 2489974 - RNA, 19 nt, Artificial Sequence
  Description of Artificial Sequence: Synthetic oligonucleotide
  Sense strand starting at position 38 of SEQ ID NO: 1887693
agacgacaugccugagcua

SEQ ID NO: 2489975 - RNA, 19 nt, Artificial Sequence
  Description of Artificial Sequence: Synthetic oligonucleotide
  Antisense strand to SEQ ID NO: 2489974
uagcucaggcaugucgucu

SEQ ID NO: 2489976 - RNA, 19 nt, Artificial Sequence
  Description of Artificial Sequence: Synthetic oligonucleotide
  Sense strand starting at position 145 of SEQ ID NO: 1887693
gccagaccuugucucauaa

SEQ ID NO: 2489977 - RNA, 19 nt, Artificial Sequence
  Description of Artificial Sequence: Synthetic oligonucleotide
  Antisense strand to SEQ ID NO: 2489976
uuaugagacaaggucuggc

SEQ ID NO: 2489978 - RNA, 19 nt, Artificial Sequence
  Description of Artificial Sequence: Synthetic oligonucleotide
  Sense strand starting at position 227 of SEQ ID NO: 1887693
auacaagaguauucugugu

SEQ ID NO: 2489979 - RNA, 19 nt, Artificial Sequence
  Description of Artificial Sequence: Synthetic oligonucleotide
  Antisense strand to SEQ ID NO: 2489978
acacagaauacucuuguau

SEQ ID NO: 2489980 - RNA, 19 nt, Artificial Sequence
  Description of Artificial Sequence: Synthetic oligonucleotide
  Sense strand starting at position 352 of SEQ ID NO: 1887693
acugaaugcucacacgaag

SEQ ID NO: 2489981 - RNA, 19 nt, Artificial Sequence
  Description of Artificial Sequence: Synthetic oligonucleotide
  Antisense strand to SEQ ID NO: 2489980
cuucgugugagcauucagu

SEQ ID NO: 2489982 - RNA, 19 nt, Artificial Sequence
  Description of Artificial Sequence: Synthetic oligonucleotide
  Sense strand starting at position 355 of SEQ ID NO: 1887693
gaaugcucacacgaagagu

SEQ ID NO: 2489983 - RNA, 19 nt, Artificial Sequence
  Description of Artificial Sequence: Synthetic oligonucleotide
  Antisense strand to SEQ ID NO: 2489982
acucuucgugugagcauuc

SEQ ID NO: 2489984 - RNA, 19 nt, Artificial Sequence
  Description of Artificial Sequence: Synthetic oligonucleotide
  Sense strand starting at position 358 of SEQ ID NO: 1887693
ugcucacacgaagaguaau

SEQ ID NO: 2489985 - RNA, 19 nt, Artificial Sequence
  Description of Artificial Sequence: Synthetic oligonucleotide
  Antisense strand to SEQ ID NO: 2489984
auuacucuucgugugagca

SEQ ID NO: 2489986 - RNA, 19 nt, Artificial Sequence
  Description of Artificial Sequence: Synthetic oligonucleotide
  Sense strand starting at position 471 of SEQ ID NO: 1887693
ucaugauggucccauauuu

SEQ ID NO: 2489987 - RNA, 19 nt, Artificial Sequence
  Description of Artificial Sequence: Synthetic oligonucleotide
  Antisense strand to SEQ ID NO: 2489986
aaauaugggaccaucauga

SEQ ID NO: 2489988 - RNA, 19 nt, Artificial Sequence
  Description of Artificial Sequence: Synthetic oligonucleotide
  Sense strand starting at position 553 of SEQ ID NO: 1887693
guauacuguuaaucugaaa

SEQ ID NO: 2489989 - RNA, 19 nt, Artificial Sequence
  Description of Artificial Sequence: Synthetic oligonucleotide
  Antisense strand to SEQ ID NO: 2489988
uuucagauuaacaguauac

SEQ ID NO: 2489990 - RNA, 19 nt, Artificial Sequence
  Description of Artificial Sequence: Synthetic oligonucleotide
  Sense strand starting at position 925 of SEQ ID NO: 1887693
gagaaugaugccugcuucu

SEQ ID NO: 2489991 - RNA, 19 nt, Artificial Sequence
  Description of Artificial Sequence: Synthetic oligonucleotide
  Antisense strand to SEQ ID NO: 2489990
agaagcaggcaucauucuc

SEQ ID NO: 2489992 - RNA, 19 nt, Artificial Sequence
  Description of Artificial Sequence: Synthetic oligonucleotide
  Sense strand starting at position 1238 of SEQ ID NO: 1887693
cccauacaagauuggucua

SEQ ID NO: 2489993 - RNA, 19 nt, Artificial Sequence
  Description of Artificial Sequence: Synthetic oligonucleotide
  Antisense strand to SEQ ID NO: 2489992
uagaccaaucuuguauggg

SEQ ID NO: 2489994 - RNA, 19 nt, Artificial Sequence
  Description of Artificial Sequence: Synthetic oligonucleotide
  Sense strand starting at position 1241 of SEQ ID NO: 1887693
auacaagauuggucuacgu

SEQ ID NO: 2489995 - RNA, 19 nt, Artificial Sequence
  Description of Artificial Sequence: Synthetic oligonucleotide
  Antisense strand to SEQ ID NO: 2489994
acguagaccaaucuuguau

SEQ ID NO: 2489996 - RNA, 19 nt, Artificial Sequence
  Description of Artificial Sequence: Synthetic oligonucleotide
  Sense strand starting at position 1243 of SEQ ID NO: 1887693
acaagauuggucuacguga

SEQ ID NO: 2489997 - RNA, 19 nt, Artificial Sequence
  Description of Artificial Sequence: Synthetic oligonucleotide
  Antisense strand to SEQ ID NO: 2489996
ucacguagaccaaucuugu

SEQ ID NO: 2489998 - RNA, 19 nt, Artificial Sequence
  Description of Artificial Sequence: Synthetic oligonucleotide
  Sense strand starting at position 1334 of SEQ ID NO: 1887693
guggguacugacugcaaau

SEQ ID NO: 2489999 - RNA, 19 nt, Artificial Sequence
  Description of Artificial Sequence: Synthetic oligonucleotide
  Antisense strand to SEQ ID NO: 2489998
auuugcagucaguacccac

SEQ ID NO: 2490000 - RNA, 19 nt, Artificial Sequence
  Description of Artificial Sequence: Synthetic oligonucleotide
  Sense strand starting at position 1698 of SEQ ID NO: 1887693
cagugagacucccugucaa

SEQ ID NO: 2490001 - RNA, 19 nt, Artificial Sequence
  Description of Artificial Sequence: Synthetic oligonucleotide
  Antisense strand to SEQ ID NO: 2490000
uugacagggagucucacug

SEQ ID NO: 2490002 - RNA, 19 nt, Artificial Sequence
  Description of Artificial Sequence: Synthetic oligonucleotide
  Sense strand starting at position 1750 of SEQ ID NO: 1887693
ccaagaaauguagguugaa

SEQ ID NO: 2490003 - RNA, 19 nt, Artificial Sequence
  Description of Artificial Sequence: Synthetic oligonucleotide
  Antisense strand to SEQ ID NO: 2490002
uucaaccuacauuucuugg

SEQ ID NO: 2490004 - RNA, 19 nt, Artificial Sequence
  Description of Artificial Sequence: Synthetic oligonucleotide
  Sense strand starting at position 1795 of SEQ ID NO: 1887693
cagggaccuugucuuggaa

SEQ ID NO: 2490005 - RNA, 19 nt, Artificial Sequence
  Description of Artificial Sequence: Synthetic oligonucleotide
  Antisense strand to SEQ ID NO: 2490004
uuccaagacaaggucccug

SEQ ID NO: 2490006 - RNA, 19 nt, Artificial Sequence
  Description of Artificial Sequence: Synthetic oligonucleotide
  Sense strand starting at position 1797 of SEQ ID NO: 1887693
gggaccuugucuuggaaua

SEQ ID NO: 2490007 - RNA, 19 nt, Artificial Sequence
  Description of Artificial Sequence: Synthetic oligonucleotide
  Antisense strand to SEQ ID NO: 2490006
uauuccaagacaagguccc

SEQ ID NO: 2490008 - RNA, 19 nt, Artificial Sequence
  Description of Artificial Sequence: Synthetic oligonucleotide
  Sense strand starting at position 1798 of SEQ ID NO: 1887693
ggaccuugucuuggaauac

SEQ ID NO: 2490009 - RNA, 19 nt, Artificial Sequence
  Description of Artificial Sequence: Synthetic oligonucleotide
  Antisense strand to SEQ ID NO: 2490008
guauuccaagacaaggucc

SEQ ID NO: 2490010 - RNA, 19 nt, Artificial Sequence
  Description of Artificial Sequence: Synthetic oligonucleotide
  Sense strand starting at position 1799 of SEQ ID NO: 1887693
gaccuugucuuggaauaca

SEQ ID NO: 2490011 - RNA, 19 nt, Artificial Sequence
  Description of Artificial Sequence: Synthetic oligonucleotide
  Antisense strand to SEQ ID NO: 2490010
uguauuccaagacaagguc

SEQ ID NO: 2490012 - RNA, 19 nt, Artificial Sequence
  Description of Artificial Sequence: Synthetic oligonucleotide
  Sense strand starting at position 2039 of SEQ ID NO: 1887693
cuuccuugaccagguuuaa

SEQ ID NO: 2490013 - RNA, 19 nt, Artificial Sequence
  Description of Artificial Sequence: Synthetic oligonucleotide
  Antisense strand to SEQ ID NO: 2490012
uuaaaccuggucaaggaag

SEQ ID NO: 2490014 - RNA, 19 nt, Artificial Sequence
  Description of Artificial Sequence: Synthetic oligonucleotide
  Sense strand starting at position 2512 of SEQ ID NO: 1887693
ggcaauccuccugaguucu

SEQ ID NO: 2490015 - RNA, 19 nt, Artificial Sequence
  Description of Artificial Sequence: Synthetic oligonucleotide
  Antisense strand to SEQ ID NO: 2490014
agaacucaggaggauugcc

SEQ ID NO: 2490016 - RNA, 19 nt, Artificial Sequence
  Description of Artificial Sequence: Synthetic oligonucleotide
  Sense strand starting at position 2573 of SEQ ID NO: 1887693
auuuaaccaugagaauuga

SEQ ID NO: 2490017 - RNA, 19 nt, Artificial Sequence
  Description of Artificial Sequence: Synthetic oligonucleotide
  Antisense strand to SEQ ID NO: 2490016
ucaauucucaugguuaaau

SEQ ID NO: 2490018 - RNA, 19 nt, Artificial Sequence
  Description of Artificial Sequence: Synthetic oligonucleotide
  Sense strand starting at position 2808 of SEQ ID NO: 1887693
gguggcucacaccaauaaa

SEQ ID NO: 2490019 - RNA, 19 nt, Artificial Sequence
  Description of Artificial Sequence: Synthetic oligonucleotide
  Antisense strand to SEQ ID NO: 2490018
uuuauuggugugagccacc

SEQ ID NO: 2490020 - RNA, 19 nt, Artificial Sequence
  Description of Artificial Sequence: Synthetic oligonucleotide
  Sense strand starting at position 2883 of SEQ ID NO: 1887693
caaccagcauggguaauau

SEQ ID NO: 2490021 - RNA, 19 nt, Artificial Sequence
  Description of Artificial Sequence: Synthetic oligonucleotide
  Antisense strand to SEQ ID NO: 2490020
auauuacccaugcugguug

SEQ ID NO: 2490022 - RNA, 19 nt, Artificial Sequence
  Description of Artificial Sequence: Synthetic oligonucleotide
  Sense strand starting at position 2902 of SEQ ID NO: 1887693
ggugaaaccuuaugcacaa

SEQ ID NO: 2490023 - RNA, 19 nt, Artificial Sequence
  Description of Artificial Sequence: Synthetic oligonucleotide
  Antisense strand to SEQ ID NO: 2490022
uugugcauaagguuucacc

SEQ ID NO: 2490024 - RNA, 19 nt, Artificial Sequence
  Description of Artificial Sequence: Synthetic oligonucleotide
  Sense strand starting at position 2903 of SEQ ID NO: 1887693
gugaaaccuuaugcacaaa

SEQ ID NO: 2490025 - RNA, 19 nt, Artificial Sequence
  Description of Artificial Sequence: Synthetic oligonucleotide
  Antisense strand to SEQ ID NO: 2490024
uuugugcauaagguuucac

SEQ ID NO: 2490026 - RNA, 19 nt, Artificial Sequence
  Description of Artificial Sequence: Synthetic oligonucleotide
  Sense strand starting at position 3000 of SEQ ID NO: 1887693
gcaguaagucgacauggca

SEQ ID NO: 2490027 - RNA, 19 nt, Artificial Sequence
  Description of Artificial Sequence: Synthetic oligonucleotide
  Antisense strand to SEQ ID NO: 2490026
ugccaugucgacuuacugc

SEQ ID NO: 2490028 - RNA, 19 nt, Artificial Sequence
  Description of Artificial Sequence: Synthetic oligonucleotide
  Sense strand starting at position 3128 of SEQ ID NO: 1887693
acaagaguauucuccgugu

SEQ ID NO: 2490029 - RNA, 19 nt, Artificial Sequence
  Description of Artificial Sequence: Synthetic oligonucleotide
  Antisense strand to SEQ ID NO: 2490028
acacggagaauacucuugu

SEQ ID NO: 2490030 - RNA, 19 nt, Artificial Sequence
  Description of Artificial Sequence: Synthetic oligonucleotide
  Sense strand starting at position 3130 of SEQ ID NO: 1887693
aagaguauucuccgugugu

SEQ ID NO: 2490031 - RNA, 19 nt, Artificial Sequence
  Description of Artificial Sequence: Synthetic oligonucleotide
  Antisense strand to SEQ ID NO: 2490030
acacacggagaauacucuu

SEQ ID NO: 2490032 - RNA, 19 nt, Artificial Sequence
  Description of Artificial Sequence: Synthetic oligonucleotide
  Sense strand starting at position 3131 of SEQ ID NO: 1887693
agaguauucuccgugugua

SEQ ID NO: 2490033 - RNA, 19 nt, Artificial Sequence
  Description of Artificial Sequence: Synthetic oligonucleotide
  Antisense strand to SEQ ID NO: 2490032
uacacacggagaauacucu

SEQ ID NO: 2490034 - RNA, 19 nt, Artificial Sequence
  Description of Artificial Sequence: Synthetic oligonucleotide
  Sense strand starting at position 3132 of SEQ ID NO: 1887693
gaguauucuccguguguag

SEQ ID NO: 2490035 - RNA, 19 nt, Artificial Sequence
  Description of Artificial Sequence: Synthetic oligonucleotide
  Antisense strand to SEQ ID NO: 2490034
cuacacacggagaauacuc

SEQ ID NO: 2490036 - RNA, 19 nt, Artificial Sequence
  Description of Artificial Sequence: Synthetic oligonucleotide
  Sense strand starting at position 3134 of SEQ ID NO: 1887693
guauucuccguguguagaa

SEQ ID NO: 2490037 - RNA, 19 nt, Artificial Sequence
  Description of Artificial Sequence: Synthetic oligonucleotide
  Antisense strand to SEQ ID NO: 2490036
uucuacacacggagaauac

SEQ ID NO: 2490038 - RNA, 19 nt, Artificial Sequence
  Description of Artificial Sequence: Synthetic oligonucleotide
  Sense strand starting at position 3153 of SEQ ID NO: 1887693
caggguuugguguacauau

SEQ ID NO: 2490039 - RNA, 19 nt, Artificial Sequence
  Description of Artificial Sequence: Synthetic oligonucleotide
  Antisense strand to SEQ ID NO: 2490038
auauguacaccaaacccug

SEQ ID NO: 2490040 - RNA, 19 nt, Artificial Sequence
  Description of Artificial Sequence: Synthetic oligonucleotide
  Sense strand starting at position 3155 of SEQ ID NO: 1887693
ggguuugguguacauauga

SEQ ID NO: 2490041 - RNA, 19 nt, Artificial Sequence
  Description of Artificial Sequence: Synthetic oligonucleotide
  Antisense strand to SEQ ID NO: 2490040
ucauauguacaccaaaccc

SEQ ID NO: 2490042 - RNA, 19 nt, Artificial Sequence
  Description of Artificial Sequence: Synthetic oligonucleotide
  Sense strand starting at position 3162 of SEQ ID NO: 1887693
guguacauaugacuacauu

SEQ ID NO: 2490043 - RNA, 19 nt, Artificial Sequence
  Description of Artificial Sequence: Synthetic oligonucleotide
  Antisense strand to SEQ ID NO: 2490042
aauguagucauauguacac

SEQ ID NO: 2490044 - RNA, 19 nt, Artificial Sequence
  Description of Artificial Sequence: Synthetic oligonucleotide
  Sense strand starting at position 3225 of SEQ ID NO: 1887693
uugagacccugucuaugaa

SEQ ID NO: 2490045 - RNA, 19 nt, Artificial Sequence
  Description of Artificial Sequence: Synthetic oligonucleotide
  Antisense strand to SEQ ID NO: 2490044
uucauagacagggucucaa

SEQ ID NO: 2490046 - RNA, 19 nt, Artificial Sequence
  Description of Artificial Sequence: Synthetic oligonucleotide
  Sense strand starting at position 3255 of SEQ ID NO: 1887693
agaauauacuguuugcuca

SEQ ID NO: 2490047 - RNA, 19 nt, Artificial Sequence
  Description of Artificial Sequence: Synthetic oligonucleotide
  Antisense strand to SEQ ID NO: 2490046
ugagcaaacaguauauucu

SEQ ID NO: 2490048 - RNA, 19 nt, Artificial Sequence
  Description of Artificial Sequence: Synthetic oligonucleotide
  Sense strand starting at position 3436 of SEQ ID NO: 1887693
gcggcaugcaccugaaauc

SEQ ID NO: 2490049 - RNA, 19 nt, Artificial Sequence
  Description of Artificial Sequence: Synthetic oligonucleotide
  Antisense strand to SEQ ID NO: 2490048
gauuucaggugcaugccgc

SEQ ID NO: 2490050 - RNA, 19 nt, Artificial Sequence
  Description of Artificial Sequence: Synthetic oligonucleotide
  Sense strand starting at position 3969 of SEQ ID NO: 1887693
gccuaagaggucuagguug

SEQ ID NO: 2490051 - RNA, 19 nt, Artificial Sequence
  Description of Artificial Sequence: Synthetic oligonucleotide
  Antisense strand to SEQ ID NO: 2490050
caaccuagaccucuuaggc

SEQ ID NO: 2490052 - RNA, 19 nt, Artificial Sequence
  Description of Artificial Sequence: Synthetic oligonucleotide
  Sense strand starting at position 3971 of SEQ ID NO: 1887693
cuaagaggucuagguugga

SEQ ID NO: 2490053 - RNA, 19 nt, Artificial Sequence
  Description of Artificial Sequence: Synthetic oligonucleotide
  Antisense strand to SEQ ID NO: 2490052
uccaaccuagaccucuuag

SEQ ID NO: 2490054 - RNA, 19 nt, Artificial Sequence
  Description of Artificial Sequence: Synthetic oligonucleotide
  Sense strand starting at position 47 of SEQ ID NO: 1887694
acaaguucuugcuuuggua

SEQ ID NO: 2490055 - RNA, 19 nt, Artificial Sequence
  Description of Artificial Sequence: Synthetic oligonucleotide
  Antisense strand to SEQ ID NO: 2490054
uaccaaagcaagaacuugu

SEQ ID NO: 2490056 - RNA, 19 nt, Artificial Sequence
  Description of Artificial Sequence: Synthetic oligonucleotide
  Sense strand starting at position 141 of SEQ ID NO: 1887694
ucccguauuuaucuacgua

SEQ ID NO: 2490057 - RNA, 19 nt, Artificial Sequence
  Description of Artificial Sequence: Synthetic oligonucleotide
  Antisense strand to SEQ ID NO: 2490056
uacguagauaaauacggga

SEQ ID NO: 2490058 - RNA, 19 nt, Artificial Sequence
  Description of Artificial Sequence: Synthetic oligonucleotide
  Sense strand starting at position 142 of SEQ ID NO: 1887694
cccguauuuaucuacguau

SEQ ID NO: 2490059 - RNA, 19 nt, Artificial Sequence
  Description of Artificial Sequence: Synthetic oligonucleotide
  Antisense strand to SEQ ID NO: 2490058
auacguagauaaauacggg

SEQ ID NO: 2490060 - RNA, 19 nt, Artificial Sequence
  Description of Artificial Sequence: Synthetic oligonucleotide
  Sense strand starting at position 475 of SEQ ID NO: 1887694
cuuuguugacacugagacu

SEQ ID NO: 2490061 - RNA, 19 nt, Artificial Sequence
  Description of Artificial Sequence: Synthetic oligonucleotide
  Antisense strand to SEQ ID NO: 2490060
agucucagugucaacaaag

SEQ ID NO: 2490062 - RNA, 19 nt, Artificial Sequence
  Description of Artificial Sequence: Synthetic oligonucleotide
  Sense strand starting at position 758 of SEQ ID NO: 1887694
cuggacuagucccaucauu

SEQ ID NO: 2490063 - RNA, 19 nt, Artificial Sequence
  Description of Artificial Sequence: Synthetic oligonucleotide
  Antisense strand to SEQ ID NO: 2490062
aaugaugggacuaguccag

SEQ ID NO: 2490064 - RNA, 19 nt, Artificial Sequence
  Description of Artificial Sequence: Synthetic oligonucleotide
  Sense strand starting at position 805 of SEQ ID NO: 1887694
accuaaauagcguaucauu

SEQ ID NO: 2490065 - RNA, 19 nt, Artificial Sequence
  Description of Artificial Sequence: Synthetic oligonucleotide
  Antisense strand to SEQ ID NO: 2490064
aaugauacgcuauuuaggu

SEQ ID NO: 2490066 - RNA, 19 nt, Artificial Sequence
  Description of Artificial Sequence: Synthetic oligonucleotide
  Sense strand starting at position 814 of SEQ ID NO: 1887694
gcguaucauuuauuguuua

SEQ ID NO: 2490067 - RNA, 19 nt, Artificial Sequence
  Description of Artificial Sequence: Synthetic oligonucleotide
  Antisense strand to SEQ ID NO: 2490066
uaaacaauaaaugauacgc

SEQ ID NO: 2490068 - RNA, 19 nt, Artificial Sequence
  Description of Artificial Sequence: Synthetic oligonucleotide
  Sense strand starting at position 919 of SEQ ID NO: 1887694
gccugugcauggguuaaua

SEQ ID NO: 2490069 - RNA, 19 nt, Artificial Sequence
  Description of Artificial Sequence: Synthetic oligonucleotide
  Antisense strand to SEQ ID NO: 2490068
uauuaacccaugcacaggc

SEQ ID NO: 2490070 - RNA, 19 nt, Artificial Sequence
  Description of Artificial Sequence: Synthetic oligonucleotide
  Sense strand starting at position 930 of SEQ ID NO: 1887694
gguuaauauuuacauguag

SEQ ID NO: 2490071 - RNA, 19 nt, Artificial Sequence
  Description of Artificial Sequence: Synthetic oligonucleotide
  Antisense strand to SEQ ID NO: 2490070
cuacauguaaauauuaacc

SEQ ID NO: 2490072 - RNA, 19 nt, Artificial Sequence
  Description of Artificial Sequence: Synthetic oligonucleotide
  Sense strand starting at position 1494 of SEQ ID NO: 1887694
uggagucagucgggaucau

SEQ ID NO: 2490073 - RNA, 19 nt, Artificial Sequence
  Description of Artificial Sequence: Synthetic oligonucleotide
  Antisense strand to SEQ ID NO: 2490072
augaucccgacugacucca

SEQ ID NO: 2490074 - RNA, 19 nt, Artificial Sequence
  Description of Artificial Sequence: Synthetic oligonucleotide
  Sense strand starting at position 1847 of SEQ ID NO: 1887694
auccaagucugauaauaag

SEQ ID NO: 2490075 - RNA, 19 nt, Artificial Sequence
  Description of Artificial Sequence: Synthetic oligonucleotide
  Antisense strand to SEQ ID NO: 2490074
cuuauuaucagacuuggau

SEQ ID NO: 2490076 - RNA, 19 nt, Artificial Sequence
  Description of Artificial Sequence: Synthetic oligonucleotide
  Sense strand starting at position 1856 of SEQ ID NO: 1887694
ugauaauaagcaugcaaau

SEQ ID NO: 2490077 - RNA, 19 nt, Artificial Sequence
  Description of Artificial Sequence: Synthetic oligonucleotide
  Antisense strand to SEQ ID NO: 2490076
auuugcaugcuuauuauca

SEQ ID NO: 2490078 - RNA, 19 nt, Artificial Sequence
  Description of Artificial Sequence: Synthetic oligonucleotide
  Sense strand starting at position 2190 of SEQ ID NO: 1887694
gggcgaucguccugaguuu

SEQ ID NO: 2490079 - RNA, 19 nt, Artificial Sequence
  Description of Artificial Sequence: Synthetic oligonucleotide
  Antisense strand to SEQ ID NO: 2490078
aaacucaggacgaucgccc

SEQ ID NO: 2490080 - RNA, 19 nt, Artificial Sequence
  Description of Artificial Sequence: Synthetic oligonucleotide
  Sense strand starting at position 2250 of SEQ ID NO: 1887694
acauuuagcuaagagaauu

SEQ ID NO: 2490081 - RNA, 19 nt, Artificial Sequence
  Description of Artificial Sequence: Synthetic oligonucleotide
  Antisense strand to SEQ ID NO: 2490080
aauucucuuagcuaaaugu

SEQ ID NO: 2490082 - RNA, 19 nt, Artificial Sequence
  Description of Artificial Sequence: Synthetic oligonucleotide
  Sense strand starting at position 2258 of SEQ ID NO: 1887694
cuaagagaauugggcugau

SEQ ID NO: 2490083 - RNA, 19 nt, Artificial Sequence
  Description of Artificial Sequence: Synthetic oligonucleotide
  Antisense strand to SEQ ID NO: 2490082
aucagcccaauucucuuag

SEQ ID NO: 2490084 - RNA, 19 nt, Artificial Sequence
  Description of Artificial Sequence: Synthetic oligonucleotide
  Sense strand starting at position 2261 of SEQ ID NO: 1887694
agagaauugggcugauguu

SEQ ID NO: 2490085 - RNA, 19 nt, Artificial Sequence
  Description of Artificial Sequence: Synthetic oligonucleotide
  Antisense strand to SEQ ID NO: 2490084
aacaucagcccaauucucu

SEQ ID NO: 2490086 - RNA, 19 nt, Artificial Sequence
  Description of Artificial Sequence: Synthetic oligonucleotide
  Sense strand starting at position 2262 of SEQ ID NO: 1887694
gagaauugggcugauguug

SEQ ID NO: 2490087 - RNA, 19 nt, Artificial Sequence
  Description of Artificial Sequence: Synthetic oligonucleotide
  Antisense strand to SEQ ID NO: 2490086
caacaucagcccaauucuc

SEQ ID NO: 2490088 - RNA, 19 nt, Artificial Sequence
  Description of Artificial Sequence: Synthetic oligonucleotide
  Sense strand starting at position 2267 of SEQ ID NO: 1887694
uugggcugauguugaagaa

SEQ ID NO: 2490089 - RNA, 19 nt, Artificial Sequence
  Description of Artificial Sequence: Synthetic oligonucleotide
  Antisense strand to SEQ ID NO: 2490088
uucuucaacaucagcccaa

SEQ ID NO: 2490090 - RNA, 19 nt, Artificial Sequence
  Description of Artificial Sequence: Synthetic oligonucleotide
  Sense strand starting at position 2268 of SEQ ID NO: 1887694
ugggcugauguugaagaau

SEQ ID NO: 2490091 - RNA, 19 nt, Artificial Sequence
  Description of Artificial Sequence: Synthetic oligonucleotide
  Antisense strand to SEQ ID NO: 2490090
auucuucaacaucagccca

SEQ ID NO: 2490092 - RNA, 19 nt, Artificial Sequence
  Description of Artificial Sequence: Synthetic oligonucleotide
  Sense strand starting at position 2725 of SEQ ID NO: 1887694
gggagaaucgccggaagcu

SEQ ID NO: 2490093 - RNA, 19 nt, Artificial Sequence
  Description of Artificial Sequence: Synthetic oligonucleotide
  Antisense strand to SEQ ID NO: 2490092
agcuuccggcgauucuccc

SEQ ID NO: 2490094 - RNA, 19 nt, Artificial Sequence
  Description of Artificial Sequence: Synthetic oligonucleotide
  Sense strand starting at position 2748 of SEQ ID NO: 1887694
ggcggaguuuccggucaac

SEQ ID NO: 2490095 - RNA, 19 nt, Artificial Sequence
  Description of Artificial Sequence: Synthetic oligonucleotide
  Antisense strand to SEQ ID NO: 2490094
guugaccggaaacuccgcc

SEQ ID NO: 2490096 - RNA, 19 nt, Artificial Sequence
  Description of Artificial Sequence: Synthetic oligonucleotide
  Sense strand starting at position 2898 of SEQ ID NO: 1887694
cagggaaccugucuuggaa

SEQ ID NO: 2490097 - RNA, 19 nt, Artificial Sequence
  Description of Artificial Sequence: Synthetic oligonucleotide
  Antisense strand to SEQ ID NO: 2490096
uuccaagacagguucccug

SEQ ID NO: 2490098 - RNA, 19 nt, Artificial Sequence
  Description of Artificial Sequence: Synthetic oligonucleotide
  Sense strand starting at position 3097 of SEQ ID NO: 1887694
gaggucuucuugcuccagu

SEQ ID NO: 2490099 - RNA, 19 nt, Artificial Sequence
  Description of Artificial Sequence: Synthetic oligonucleotide
  Antisense strand to SEQ ID NO: 2490098
acuggagcaagaagaccuc

SEQ ID NO: 2490100 - RNA, 19 nt, Artificial Sequence
  Description of Artificial Sequence: Synthetic oligonucleotide
  Sense strand starting at position 3098 of SEQ ID NO: 1887694
aggucuucuugcuccagua

SEQ ID NO: 2490101 - RNA, 19 nt, Artificial Sequence
  Description of Artificial Sequence: Synthetic oligonucleotide
  Antisense strand to SEQ ID NO: 2490100
uacuggagcaagaagaccu

SEQ ID NO: 2490102 - RNA, 19 nt, Artificial Sequence
  Description of Artificial Sequence: Synthetic oligonucleotide
  Sense strand starting at position 3100 of SEQ ID NO: 1887694
gucuucuugcuccaguacu

SEQ ID NO: 2490103 - RNA, 19 nt, Artificial Sequence
  Description of Artificial Sequence: Synthetic oligonucleotide
  Antisense strand to SEQ ID NO: 2490102
aguacuggagcaagaagac

SEQ ID NO: 2490104 - RNA, 19 nt, Artificial Sequence
  Description of Artificial Sequence: Synthetic oligonucleotide
  Sense strand starting at position 3828 of SEQ ID NO: 1887694
agagauauauuggacaugu

SEQ ID NO: 2490105 - RNA, 19 nt, Artificial Sequence
  Description of Artificial Sequence: Synthetic oligonucleotide
  Antisense strand to SEQ ID NO: 2490104
acauguccaauauaucucu

SEQ ID NO: 2490106 - RNA, 19 nt, Artificial Sequence
  Description of Artificial Sequence: Synthetic oligonucleotide
  Sense strand starting at position 3940 of SEQ ID NO: 1887694
cugcaaauguauuaccgaa

SEQ ID NO: 2490107 - RNA, 19 nt, Artificial Sequence
  Description of Artificial Sequence: Synthetic oligonucleotide
  Antisense strand to SEQ ID NO: 2490106
uucgguaauacauuugcag

SEQ ID NO: 2490108 - RNA, 19 nt, Artificial Sequence
  Description of Artificial Sequence: Synthetic oligonucleotide
  Sense strand starting at position 3942 of SEQ ID NO: 1887694
gcaaauguauuaccgaaau

SEQ ID NO: 2490109 - RNA, 19 nt, Artificial Sequence
  Description of Artificial Sequence: Synthetic oligonucleotide
  Antisense strand to SEQ ID NO: 2490108
auuucgguaauacauuugc

SEQ ID NO: 2490110 - RNA, 19 nt, Artificial Sequence
  Description of Artificial Sequence: Synthetic oligonucleotide
  Sense strand starting at position 323 of SEQ ID NO: 1887695
ccgucuggcuaauaucuau

SEQ ID NO: 2490111 - RNA, 19 nt, Artificial Sequence
  Description of Artificial Sequence: Synthetic oligonucleotide
  Antisense strand to SEQ ID NO: 2490110
auagauauuagccagacgg

SEQ ID NO: 2490112 - RNA, 19 nt, Artificial Sequence
  Description of Artificial Sequence: Synthetic oligonucleotide
  Sense strand starting at position 462 of SEQ ID NO: 1887695
ccagacuagucccaucauu

SEQ ID NO: 2490113 - RNA, 19 nt, Artificial Sequence
  Description of Artificial Sequence: Synthetic oligonucleotide
  Antisense strand to SEQ ID NO: 2490112
aaugaugggacuagucugg

SEQ ID NO: 2490114 - RNA, 19 nt, Artificial Sequence
  Description of Artificial Sequence: Synthetic oligonucleotide
  Sense strand starting at position 548 of SEQ ID NO: 1887695
agauacauuguuugucuaa

SEQ ID NO: 2490115 - RNA, 19 nt, Artificial Sequence
  Description of Artificial Sequence: Synthetic oligonucleotide
  Antisense strand to SEQ ID NO: 2490114
uuagacaaacaauguaucu

SEQ ID NO: 2490116 - RNA, 19 nt, Artificial Sequence
  Description of Artificial Sequence: Synthetic oligonucleotide
  Sense strand starting at position 587 of SEQ ID NO: 1887695
cccggugugaaccaaauaa

SEQ ID NO: 2490117 - RNA, 19 nt, Artificial Sequence
  Description of Artificial Sequence: Synthetic oligonucleotide
  Antisense strand to SEQ ID NO: 2490116
uuauuugguucacaccggg

SEQ ID NO: 2490118 - RNA, 19 nt, Artificial Sequence
  Description of Artificial Sequence: Synthetic oligonucleotide
  Sense strand starting at position 591 of SEQ ID NO: 1887695
gugugaaccaaauaauggu

SEQ ID NO: 2490119 - RNA, 19 nt, Artificial Sequence
  Description of Artificial Sequence: Synthetic oligonucleotide
  Antisense strand to SEQ ID NO: 2490118
accauuauuugguucacac

SEQ ID NO: 2490120 - RNA, 19 nt, Artificial Sequence
  Description of Artificial Sequence: Synthetic oligonucleotide
  Sense strand starting at position 742 of SEQ ID NO: 1887695
gcauuuauuuccuggucac

SEQ ID NO: 2490121 - RNA, 19 nt, Artificial Sequence
  Description of Artificial Sequence: Synthetic oligonucleotide
  Antisense strand to SEQ ID NO: 2490120
gugaccaggaaauaaaugc

SEQ ID NO: 2490122 - RNA, 19 nt, Artificial Sequence
  Description of Artificial Sequence: Synthetic oligonucleotide
  Sense strand starting at position 745 of SEQ ID NO: 1887695
uuuauuuccuggucacgca

SEQ ID NO: 2490123 - RNA, 19 nt, Artificial Sequence
  Description of Artificial Sequence: Synthetic oligonucleotide
  Antisense strand to SEQ ID NO: 2490122
ugcgugaccaggaaauaaa

SEQ ID NO: 2490124 - RNA, 19 nt, Artificial Sequence
  Description of Artificial Sequence: Synthetic oligonucleotide
  Sense strand starting at position 754 of SEQ ID NO: 1887695
uggucacgcacccaagauu

SEQ ID NO: 2490125 - RNA, 19 nt, Artificial Sequence
  Description of Artificial Sequence: Synthetic oligonucleotide
  Antisense strand to SEQ ID NO: 2490124
aaucuugggugcgugacca

SEQ ID NO: 2490126 - RNA, 19 nt, Artificial Sequence
  Description of Artificial Sequence: Synthetic oligonucleotide
  Sense strand starting at position 1288 of SEQ ID NO: 1887695
gguuguaugggccgagauc

SEQ ID NO: 2490127 - RNA, 19 nt, Artificial Sequence
  Description of Artificial Sequence: Synthetic oligonucleotide
  Antisense strand to SEQ ID NO: 2490126
gaucucggcccauacaacc

SEQ ID NO: 2490128 - RNA, 19 nt, Artificial Sequence
  Description of Artificial Sequence: Synthetic oligonucleotide
  Sense strand starting at position 1289 of SEQ ID NO: 1887695
guuguaugggccgagauca

SEQ ID NO: 2490129 - RNA, 19 nt, Artificial Sequence
  Description of Artificial Sequence: Synthetic oligonucleotide
  Antisense strand to SEQ ID NO: 2490128
ugaucucggcccauacaac

SEQ ID NO: 2490130 - RNA, 19 nt, Artificial Sequence
  Description of Artificial Sequence: Synthetic oligonucleotide
  Sense strand starting at position 1858 of SEQ ID NO: 1887695
ugaugauaagcaugcaaau

SEQ ID NO: 2490131 - RNA, 19 nt, Artificial Sequence
  Description of Artificial Sequence: Synthetic oligonucleotide
  Antisense strand to SEQ ID NO: 2490130
auuugcaugcuuaucauca

SEQ ID NO: 2490132 - RNA, 19 nt, Artificial Sequence
  Description of Artificial Sequence: Synthetic oligonucleotide
  Sense strand starting at position 2257 of SEQ ID NO: 1887695
ccaagagauuagggcagaa

SEQ ID NO: 2490133 - RNA, 19 nt, Artificial Sequence
  Description of Artificial Sequence: Synthetic oligonucleotide
  Antisense strand to SEQ ID NO: 2490132
uucugcccuaaucucuugg

SEQ ID NO: 2490134 - RNA, 19 nt, Artificial Sequence
  Description of Artificial Sequence: Synthetic oligonucleotide
  Sense strand starting at position 2443 of SEQ ID NO: 1887695
acaggaccauuugagauua

SEQ ID NO: 2490135 - RNA, 19 nt, Artificial Sequence
  Description of Artificial Sequence: Synthetic oligonucleotide
  Antisense strand to SEQ ID NO: 2490134
uaaucucaaaugguccugu

SEQ ID NO: 2490136 - RNA, 19 nt, Artificial Sequence
  Description of Artificial Sequence: Synthetic oligonucleotide
  Sense strand starting at position 2789 of SEQ ID NO: 1887695
gcaacugaauucccaauga

SEQ ID NO: 2490137 - RNA, 19 nt, Artificial Sequence
  Description of Artificial Sequence: Synthetic oligonucleotide
  Antisense strand to SEQ ID NO: 2490136
ucauugggaauucaguugc

SEQ ID NO: 2490138 - RNA, 19 nt, Artificial Sequence
  Description of Artificial Sequence: Synthetic oligonucleotide
  Sense strand starting at position 2847 of SEQ ID NO: 1887695
gguggaguuuccggucaac

SEQ ID NO: 2490139 - RNA, 19 nt, Artificial Sequence
  Description of Artificial Sequence: Synthetic oligonucleotide
  Antisense strand to SEQ ID NO: 2490138
guugaccggaaacuccacc

SEQ ID NO: 2490140 - RNA, 19 nt, Artificial Sequence
  Description of Artificial Sequence: Synthetic oligonucleotide
  Sense strand starting at position 2850 of SEQ ID NO: 1887695
ggaguuuccggucaacaga

SEQ ID NO: 2490141 - RNA, 19 nt, Artificial Sequence
  Description of Artificial Sequence: Synthetic oligonucleotide
  Antisense strand to SEQ ID NO: 2490140
ucuguugaccggaaacucc

SEQ ID NO: 2490142 - RNA, 19 nt, Artificial Sequence
  Description of Artificial Sequence: Synthetic oligonucleotide
  Sense strand starting at position 2865 of SEQ ID NO: 1887695
cagagauucugcuacugca

SEQ ID NO: 2490143 - RNA, 19 nt, Artificial Sequence
  Description of Artificial Sequence: Synthetic oligonucleotide
  Antisense strand to SEQ ID NO: 2490142
ugcaguagcagaaucucug

SEQ ID NO: 2490144 - RNA, 19 nt, Artificial Sequence
  Description of Artificial Sequence: Synthetic oligonucleotide
  Sense strand starting at position 2990 of SEQ ID NO: 1887695
cagagacacugucuuggaa

SEQ ID NO: 2490145 - RNA, 19 nt, Artificial Sequence
  Description of Artificial Sequence: Synthetic oligonucleotide
  Antisense strand to SEQ ID NO: 2490144
uuccaagacagugucucug

SEQ ID NO: 2490146 - RNA, 19 nt, Artificial Sequence
  Description of Artificial Sequence: Synthetic oligonucleotide
  Sense strand starting at position 3039 of SEQ ID NO: 1887695
ucaugcacgucugaugaua

SEQ ID NO: 2490147 - RNA, 19 nt, Artificial Sequence
  Description of Artificial Sequence: Synthetic oligonucleotide
  Antisense strand to SEQ ID NO: 2490146
uaucaucagacgugcauga

SEQ ID NO: 2490148 - RNA, 19 nt, Artificial Sequence
  Description of Artificial Sequence: Synthetic oligonucleotide
  Sense strand starting at position 3041 of SEQ ID NO: 1887695
augcacgucugaugauaag

SEQ ID NO: 2490149 - RNA, 19 nt, Artificial Sequence
  Description of Artificial Sequence: Synthetic oligonucleotide
  Antisense strand to SEQ ID NO: 2490148
cuuaucaucagacgugcau

SEQ ID NO: 2490150 - RNA, 19 nt, Artificial Sequence
  Description of Artificial Sequence: Synthetic oligonucleotide
  Sense strand starting at position 3192 of SEQ ID NO: 1887695
gagaucuucuugcuccagu

SEQ ID NO: 2490151 - RNA, 19 nt, Artificial Sequence
  Description of Artificial Sequence: Synthetic oligonucleotide
  Antisense strand to SEQ ID NO: 2490150
acuggagcaagaagaucuc

SEQ ID NO: 2490152 - RNA, 19 nt, Artificial Sequence
  Description of Artificial Sequence: Synthetic oligonucleotide
  Sense strand starting at position 3193 of SEQ ID NO: 1887695
agaucuucuugcuccagua

SEQ ID NO: 2490153 - RNA, 19 nt, Artificial Sequence
  Description of Artificial Sequence: Synthetic oligonucleotide
  Antisense strand to SEQ ID NO: 2490152
uacuggagcaagaagaucu

SEQ ID NO: 2490154 - RNA, 19 nt, Artificial Sequence
  Description of Artificial Sequence: Synthetic oligonucleotide
  Sense strand starting at position 3203 of SEQ ID NO: 1887695
gcuccaguacucuggguua

SEQ ID NO: 2490155 - RNA, 19 nt, Artificial Sequence
  Description of Artificial Sequence: Synthetic oligonucleotide
  Antisense strand to SEQ ID NO: 2490154
uaacccagaguacuggagc

SEQ ID NO: 2490156 - RNA, 19 nt, Artificial Sequence
  Description of Artificial Sequence: Synthetic oligonucleotide
  Sense strand starting at position 3205 of SEQ ID NO: 1887695
uccaguacucuggguuauu

SEQ ID NO: 2490157 - RNA, 19 nt, Artificial Sequence
  Description of Artificial Sequence: Synthetic oligonucleotide
  Antisense strand to SEQ ID NO: 2490156
aauaacccagaguacugga

SEQ ID NO: 2490158 - RNA, 19 nt, Artificial Sequence
  Description of Artificial Sequence: Synthetic oligonucleotide
  Sense strand starting at position 3624 of SEQ ID NO: 1887695
cccggcuuccugugauucu

SEQ ID NO: 2490159 - RNA, 19 nt, Artificial Sequence
  Description of Artificial Sequence: Synthetic oligonucleotide
  Antisense strand to SEQ ID NO: 2490158
agaaucacaggaagccggg

SEQ ID NO: 2490160 - RNA, 19 nt, Artificial Sequence
  Description of Artificial Sequence: Synthetic oligonucleotide
  Sense strand starting at position 3802 of SEQ ID NO: 1887695
gauggaaucacagguguga

SEQ ID NO: 2490161 - RNA, 19 nt, Artificial Sequence
  Description of Artificial Sequence: Synthetic oligonucleotide
  Antisense strand to SEQ ID NO: 2490160
ucacaccugugauuccauc

SEQ ID NO: 2490162 - RNA, 19 nt, Artificial Sequence
  Description of Artificial Sequence: Synthetic oligonucleotide
  Sense strand starting at position 3831 of SEQ ID NO: 1887695
ccagccuuguccuauacuu

SEQ ID NO: 2490163 - RNA, 19 nt, Artificial Sequence
  Description of Artificial Sequence: Synthetic oligonucleotide
  Antisense strand to SEQ ID NO: 2490162
aaguauaggacaaggcugg

SEQ ID NO: 2490164 - RNA, 19 nt, Artificial Sequence
  Description of Artificial Sequence: Synthetic oligonucleotide
  Sense strand starting at position 254 of SEQ ID NO: 1887696
agacuauucucugugcaua

SEQ ID NO: 2490165 - RNA, 19 nt, Artificial Sequence
  Description of Artificial Sequence: Synthetic oligonucleotide
  Antisense strand to SEQ ID NO: 2490164
uaugcacagagaauagucu

SEQ ID NO: 2490166 - RNA, 19 nt, Artificial Sequence
  Description of Artificial Sequence: Synthetic oligonucleotide
  Sense strand starting at position 255 of SEQ ID NO: 1887696
gacuauucucugugcauag

SEQ ID NO: 2490167 - RNA, 19 nt, Artificial Sequence
  Description of Artificial Sequence: Synthetic oligonucleotide
  Antisense strand to SEQ ID NO: 2490166
cuaugcacagagaauaguc

SEQ ID NO: 2490168 - RNA, 19 nt, Artificial Sequence
  Description of Artificial Sequence: Synthetic oligonucleotide
  Sense strand starting at position 256 of SEQ ID NO: 1887696
acuauucucugugcauaga

SEQ ID NO: 2490169 - RNA, 19 nt, Artificial Sequence
  Description of Artificial Sequence: Synthetic oligonucleotide
  Antisense strand to SEQ ID NO: 2490168
ucuaugcacagagaauagu

SEQ ID NO: 2490170 - RNA, 19 nt, Artificial Sequence
  Description of Artificial Sequence: Synthetic oligonucleotide
  Sense strand starting at position 257 of SEQ ID NO: 1887696
cuauucucugugcauagaa

SEQ ID NO: 2490171 - RNA, 19 nt, Artificial Sequence
  Description of Artificial Sequence: Synthetic oligonucleotide
  Antisense strand to SEQ ID NO: 2490170
uucuaugcacagagaauag

SEQ ID NO: 2490172 - RNA, 19 nt, Artificial Sequence
  Description of Artificial Sequence: Synthetic oligonucleotide
  Sense strand starting at position 259 of SEQ ID NO: 1887696
auucucugugcauagaaga

SEQ ID NO: 2490173 - RNA, 19 nt, Artificial Sequence
  Description of Artificial Sequence: Synthetic oligonucleotide
  Antisense strand to SEQ ID NO: 2490172
ucuucuaugcacagagaau

SEQ ID NO: 2490174 - RNA, 19 nt, Artificial Sequence
  Description of Artificial Sequence: Synthetic oligonucleotide
  Sense strand starting at position 283 of SEQ ID NO: 1887696
uuguguguaugugauauua

SEQ ID NO: 2490175 - RNA, 19 nt, Artificial Sequence
  Description of Artificial Sequence: Synthetic oligonucleotide
  Antisense strand to SEQ ID NO: 2490174
uaauaucacauacacacaa

SEQ ID NO: 2490176 - RNA, 19 nt, Artificial Sequence
  Description of Artificial Sequence: Synthetic oligonucleotide
  Sense strand starting at position 285 of SEQ ID NO: 1887696
guguguaugugauauuaca

SEQ ID NO: 2490177 - RNA, 19 nt, Artificial Sequence
  Description of Artificial Sequence: Synthetic oligonucleotide
  Antisense strand to SEQ ID NO: 2490176
uguaauaucacauacacac

SEQ ID NO: 2490178 - RNA, 19 nt, Artificial Sequence
  Description of Artificial Sequence: Synthetic oligonucleotide
  Sense strand starting at position 652 of SEQ ID NO: 1887696
guauucucacaggaaguau

SEQ ID NO: 2490179 - RNA, 19 nt, Artificial Sequence
  Description of Artificial Sequence: Synthetic oligonucleotide
  Antisense strand to SEQ ID NO: 2490178
auacuuccugugagaauac

SEQ ID NO: 2490180 - RNA, 19 nt, Artificial Sequence
  Description of Artificial Sequence: Synthetic oligonucleotide
  Sense strand starting at position 664 of SEQ ID NO: 1887696
gaaguauaauuccuacgca

SEQ ID NO: 2490181 - RNA, 19 nt, Artificial Sequence
  Description of Artificial Sequence: Synthetic oligonucleotide
  Antisense strand to SEQ ID NO: 2490180
ugcguaggaauuauacuuc

SEQ ID NO: 2490182 - RNA, 19 nt, Artificial Sequence
  Description of Artificial Sequence: Synthetic oligonucleotide
  Sense strand starting at position 667 of SEQ ID NO: 1887696
guauaauuccuacgcauau

SEQ ID NO: 2490183 - RNA, 19 nt, Artificial Sequence
  Description of Artificial Sequence: Synthetic oligonucleotide
  Antisense strand to SEQ ID NO: 2490182
auaugcguaggaauuauac

SEQ ID NO: 2490184 - RNA, 19 nt, Artificial Sequence
  Description of Artificial Sequence: Synthetic oligonucleotide
  Sense strand starting at position 684 of SEQ ID NO: 1887696
augugcuugcuuuggcaau

SEQ ID NO: 2490185 - RNA, 19 nt, Artificial Sequence
  Description of Artificial Sequence: Synthetic oligonucleotide
  Antisense strand to SEQ ID NO: 2490184
auugccaaagcaagcacau

SEQ ID NO: 2490186 - RNA, 19 nt, Artificial Sequence
  Description of Artificial Sequence: Synthetic oligonucleotide
  Sense strand starting at position 685 of SEQ ID NO: 1887696
ugugcuugcuuuggcaaua

SEQ ID NO: 2490187 - RNA, 19 nt, Artificial Sequence
  Description of Artificial Sequence: Synthetic oligonucleotide
  Antisense strand to SEQ ID NO: 2490186
uauugccaaagcaagcaca

SEQ ID NO: 2490188 - RNA, 19 nt, Artificial Sequence
  Description of Artificial Sequence: Synthetic oligonucleotide
  Sense strand starting at position 1104 of SEQ ID NO: 1887696
cccugucugcccuacuuau

SEQ ID NO: 2490189 - RNA, 19 nt, Artificial Sequence
  Description of Artificial Sequence: Synthetic oligonucleotide
  Antisense strand to SEQ ID NO: 2490188
auaaguagggcagacaggg

SEQ ID NO: 2490190 - RNA, 19 nt, Artificial Sequence
  Description of Artificial Sequence: Synthetic oligonucleotide
  Sense strand starting at position 1211 of SEQ ID NO: 1887696
ucaagagguucuucugcca

SEQ ID NO: 2490191 - RNA, 19 nt, Artificial Sequence
  Description of Artificial Sequence: Synthetic oligonucleotide
  Antisense strand to SEQ ID NO: 2490190
uggcagaagaaccucuuga

SEQ ID NO: 2490192 - RNA, 19 nt, Artificial Sequence
  Description of Artificial Sequence: Synthetic oligonucleotide
  Sense strand starting at position 1842 of SEQ ID NO: 1887696
gucguccaagucugaugau

SEQ ID NO: 2490193 - RNA, 19 nt, Artificial Sequence
  Description of Artificial Sequence: Synthetic oligonucleotide
  Antisense strand to SEQ ID NO: 2490192
aucaucagacuuggacgac

SEQ ID NO: 2490194 - RNA, 19 nt, Artificial Sequence
  Description of Artificial Sequence: Synthetic oligonucleotide
  Sense strand starting at position 1843 of SEQ ID NO: 1887696
ucguccaagucugaugaua

SEQ ID NO: 2490195 - RNA, 19 nt, Artificial Sequence
  Description of Artificial Sequence: Synthetic oligonucleotide
  Antisense strand to SEQ ID NO: 2490194
uaucaucagacuuggacga

SEQ ID NO: 2490196 - RNA, 19 nt, Artificial Sequence
  Description of Artificial Sequence: Synthetic oligonucleotide
  Sense strand starting at position 1845 of SEQ ID NO: 1887696
guccaagucugaugauaag

SEQ ID NO: 2490197 - RNA, 19 nt, Artificial Sequence
  Description of Artificial Sequence: Synthetic oligonucleotide
  Antisense strand to SEQ ID NO: 2490196
cuuaucaucagacuuggac

SEQ ID NO: 2490198 - RNA, 19 nt, Artificial Sequence
  Description of Artificial Sequence: Synthetic oligonucleotide
  Sense strand starting at position 1999 of SEQ ID NO: 1887696
agaucuucuugcuccagga

SEQ ID NO: 2490199 - RNA, 19 nt, Artificial Sequence
  Description of Artificial Sequence: Synthetic oligonucleotide
  Antisense strand to SEQ ID NO: 2490198
uccuggagcaagaagaucu

SEQ ID NO: 2490200 - RNA, 19 nt, Artificial Sequence
  Description of Artificial Sequence: Synthetic oligonucleotide
  Sense strand starting at position 2039 of SEQ ID NO: 1887696
uuucguuuaccagguuaaa

SEQ ID NO: 2490201 - RNA, 19 nt, Artificial Sequence
  Description of Artificial Sequence: Synthetic oligonucleotide
  Antisense strand to SEQ ID NO: 2490200
uuuaaccugguaaacgaaa

SEQ ID NO: 2490202 - RNA, 19 nt, Artificial Sequence
  Description of Artificial Sequence: Synthetic oligonucleotide
  Sense strand starting at position 2226 of SEQ ID NO: 1887696
aucaaugccgacuagacau

SEQ ID NO: 2490203 - RNA, 19 nt, Artificial Sequence
  Description of Artificial Sequence: Synthetic oligonucleotide
  Antisense strand to SEQ ID NO: 2490202
augucuagucggcauugau

SEQ ID NO: 2490204 - RNA, 19 nt, Artificial Sequence
  Description of Artificial Sequence: Synthetic oligonucleotide
  Sense strand starting at position 2991 of SEQ ID NO: 1887696
gagacacccugucucagau

SEQ ID NO: 2490205 - RNA, 19 nt, Artificial Sequence
  Description of Artificial Sequence: Synthetic oligonucleotide
  Antisense strand to SEQ ID NO: 2490204
aucugagacagggugucuc

SEQ ID NO: 2490206 - RNA, 19 nt, Artificial Sequence
  Description of Artificial Sequence: Synthetic oligonucleotide
  Sense strand starting at position 3045 of SEQ ID NO: 1887696
cacgucugaccauaagcau

SEQ ID NO: 2490207 - RNA, 19 nt, Artificial Sequence
  Description of Artificial Sequence: Synthetic oligonucleotide
  Antisense strand to SEQ ID NO: 2490206
augcuuauggucagacgug

SEQ ID NO: 2490208 - RNA, 19 nt, Artificial Sequence
  Description of Artificial Sequence: Synthetic oligonucleotide
  Sense strand starting at position 3508 of SEQ ID NO: 1887696
gccugagagccugagaucu

SEQ ID NO: 2490209 - RNA, 19 nt, Artificial Sequence
  Description of Artificial Sequence: Synthetic oligonucleotide
  Antisense strand to SEQ ID NO: 2490208
agaucucaggcucucaggc

SEQ ID NO: 2490210 - RNA, 19 nt, Artificial Sequence
  Description of Artificial Sequence: Synthetic oligonucleotide
  Sense strand starting at position 3551 of SEQ ID NO: 1887696
uuggaauucuccugaccag

SEQ ID NO: 2490211 - RNA, 19 nt, Artificial Sequence
  Description of Artificial Sequence: Synthetic oligonucleotide
  Antisense strand to SEQ ID NO: 2490210
cuggucaggagaauuccaa

SEQ ID NO: 2490212 - RNA, 19 nt, Artificial Sequence
  Description of Artificial Sequence: Synthetic oligonucleotide
  Sense strand starting at position 3692 of SEQ ID NO: 1887696
agccuuguuuaucauagca

SEQ ID NO: 2490213 - RNA, 19 nt, Artificial Sequence
  Description of Artificial Sequence: Synthetic oligonucleotide
  Antisense strand to SEQ ID NO: 2490212
ugcuaugauaaacaaggcu

SEQ ID NO: 2490214 - RNA, 19 nt, Artificial Sequence
  Description of Artificial Sequence: Synthetic oligonucleotide
  Sense strand starting at position 3694 of SEQ ID NO: 1887696
ccuuguuuaucauagcaca

SEQ ID NO: 2490215 - RNA, 19 nt, Artificial Sequence
  Description of Artificial Sequence: Synthetic oligonucleotide
  Antisense strand to SEQ ID NO: 2490214
ugugcuaugauaaacaagg

SEQ ID NO: 2490216 - RNA, 19 nt, Artificial Sequence
  Description of Artificial Sequence: Synthetic oligonucleotide
  Sense strand starting at position 3708 of SEQ ID NO: 1887696
gcacaauccuccugaguuu

SEQ ID NO: 2490217 - RNA, 19 nt, Artificial Sequence
  Description of Artificial Sequence: Synthetic oligonucleotide
  Antisense strand to SEQ ID NO: 2490216
aaacucaggaggauugugc

SEQ ID NO: 2490218 - RNA, 19 nt, Artificial Sequence
  Description of Artificial Sequence: Synthetic oligonucleotide
  Sense strand starting at position 3741 of SEQ ID NO: 1887696
agaagcaaugccuacuaga

SEQ ID NO: 2490219 - RNA, 19 nt, Artificial Sequence
  Description of Artificial Sequence: Synthetic oligonucleotide
  Antisense strand to SEQ ID NO: 2490218
ucuaguaggcauugcuucu

SEQ ID NO: 2490220 - RNA, 19 nt, Artificial Sequence
  Description of Artificial Sequence: Synthetic oligonucleotide
  Sense strand starting at position 3744 of SEQ ID NO: 1887696
agcaaugccuacuagaaau

SEQ ID NO: 2490221 - RNA, 19 nt, Artificial Sequence
  Description of Artificial Sequence: Synthetic oligonucleotide
  Antisense strand to SEQ ID NO: 2490220
auuucuaguaggcauugcu

SEQ ID NO: 2490222 - RNA, 19 nt, Artificial Sequence
  Description of Artificial Sequence: Synthetic oligonucleotide
  Sense strand starting at position 3844 of SEQ ID NO: 1887696
acaagcuguuccgguauaa

SEQ ID NO: 2490223 - RNA, 19 nt, Artificial Sequence
  Description of Artificial Sequence: Synthetic oligonucleotide
  Antisense strand to SEQ ID NO: 2490222
uuauaccggaacagcuugu

SEQ ID NO: 2490224 - RNA, 19 nt, Artificial Sequence
  Description of Artificial Sequence: Synthetic oligonucleotide
  Sense strand starting at position 3848 of SEQ ID NO: 1887696
gcuguuccgguauaauaaa

SEQ ID NO: 2490225 - RNA, 19 nt, Artificial Sequence
  Description of Artificial Sequence: Synthetic oligonucleotide
  Antisense strand to SEQ ID NO: 2490224
uuuauuauaccggaacagc

SEQ ID NO: 2490226 - RNA, 19 nt, Artificial Sequence
  Description of Artificial Sequence: Synthetic oligonucleotide
  Sense strand starting at position 3881 of SEQ ID NO: 1887696
gccguuccaguauaacaaa

SEQ ID NO: 2490227 - RNA, 19 nt, Artificial Sequence
  Description of Artificial Sequence: Synthetic oligonucleotide
  Antisense strand to SEQ ID NO: 2490226
uuuguuauacuggaacggc

SEQ ID NO: 2490228 - RNA, 19 nt, Artificial Sequence
  Description of Artificial Sequence: Synthetic oligonucleotide
  Sense strand starting at position 3884 of SEQ ID NO: 1887696
guuccaguauaacaaagaa

SEQ ID NO: 2490229 - RNA, 19 nt, Artificial Sequence
  Description of Artificial Sequence: Synthetic oligonucleotide
  Antisense strand to SEQ ID NO: 2490228
uucuuuguuauacuggaac

SEQ ID NO: 2490230 - RNA, 19 nt, Artificial Sequence
  Description of Artificial Sequence: Synthetic oligonucleotide
  Sense strand starting at position 596 of SEQ ID NO: 1887697
aaagaacgguccuuucuuu

SEQ ID NO: 2490231 - RNA, 19 nt, Artificial Sequence
  Description of Artificial Sequence: Synthetic oligonucleotide
  Antisense strand to SEQ ID NO: 2490230
aaagaaaggaccguucuuu

SEQ ID NO: 2490232 - RNA, 19 nt, Artificial Sequence
  Description of Artificial Sequence: Synthetic oligonucleotide
  Sense strand starting at position 618 of SEQ ID NO: 1887697
cuugccugugcaugguuaa

SEQ ID NO: 2490233 - RNA, 19 nt, Artificial Sequence
  Description of Artificial Sequence: Synthetic oligonucleotide
  Antisense strand to SEQ ID NO: 2490232
uuaaccaugcacaggcaag

SEQ ID NO: 2490234 - RNA, 19 nt, Artificial Sequence
  Description of Artificial Sequence: Synthetic oligonucleotide
  Sense strand starting at position 619 of SEQ ID NO: 1887697
uugccugugcaugguuaau

SEQ ID NO: 2490235 - RNA, 19 nt, Artificial Sequence
  Description of Artificial Sequence: Synthetic oligonucleotide
  Antisense strand to SEQ ID NO: 2490234
auuaaccaugcacaggcaa

SEQ ID NO: 2490236 - RNA, 19 nt, Artificial Sequence
  Description of Artificial Sequence: Synthetic oligonucleotide
  Sense strand starting at position 621 of SEQ ID NO: 1887697
gccugugcaugguuaauau

SEQ ID NO: 2490237 - RNA, 19 nt, Artificial Sequence
  Description of Artificial Sequence: Synthetic oligonucleotide
  Antisense strand to SEQ ID NO: 2490236
auauuaaccaugcacaggc

SEQ ID NO: 2490238 - RNA, 19 nt, Artificial Sequence
  Description of Artificial Sequence: Synthetic oligonucleotide
  Sense strand starting at position 728 of SEQ ID NO: 1887697
ccugucucguugcacauau

SEQ ID NO: 2490239 - RNA, 19 nt, Artificial Sequence
  Description of Artificial Sequence: Synthetic oligonucleotide
  Antisense strand to SEQ ID NO: 2490238
auaugugcaacgagacagg

SEQ ID NO: 2490240 - RNA, 19 nt, Artificial Sequence
  Description of Artificial Sequence: Synthetic oligonucleotide
  Sense strand starting at position 752 of SEQ ID NO: 1887697
ggucgugcagccaagaguu

SEQ ID NO: 2490241 - RNA, 19 nt, Artificial Sequence
  Description of Artificial Sequence: Synthetic oligonucleotide
  Antisense strand to SEQ ID NO: 2490240
aacucuuggcugcacgacc

SEQ ID NO: 2490242 - RNA, 19 nt, Artificial Sequence
  Description of Artificial Sequence: Synthetic oligonucleotide
  Sense strand starting at position 1286 of SEQ ID NO: 1887697
uggaguagaagguguugau

SEQ ID NO: 2490243 - RNA, 19 nt, Artificial Sequence
  Description of Artificial Sequence: Synthetic oligonucleotide
  Antisense strand to SEQ ID NO: 2490242
aucaacaccuucuacucca

SEQ ID NO: 2490244 - RNA, 19 nt, Artificial Sequence
  Description of Artificial Sequence: Synthetic oligonucleotide
  Sense strand starting at position 1440 of SEQ ID NO: 1887697
gggcaugauggugacacau

SEQ ID NO: 2490245 - RNA, 19 nt, Artificial Sequence
  Description of Artificial Sequence: Synthetic oligonucleotide
  Antisense strand to SEQ ID NO: 2490244
augugucaccaucaugccc

SEQ ID NO: 2490246 - RNA, 19 nt, Artificial Sequence
  Description of Artificial Sequence: Synthetic oligonucleotide
  Sense strand starting at position 1442 of SEQ ID NO: 1887697
gcaugauggugacacauau

SEQ ID NO: 2490247 - RNA, 19 nt, Artificial Sequence
  Description of Artificial Sequence: Synthetic oligonucleotide
  Antisense strand to SEQ ID NO: 2490246
auaugugucaccaucaugc

SEQ ID NO: 2490248 - RNA, 19 nt, Artificial Sequence
  Description of Artificial Sequence: Synthetic oligonucleotide
  Sense strand starting at position 1842 of SEQ ID NO: 1887697
auugucaaagucugauuau

SEQ ID NO: 2490249 - RNA, 19 nt, Artificial Sequence
  Description of Artificial Sequence: Synthetic oligonucleotide
  Antisense strand to SEQ ID NO: 2490248
auaaucagacuuugacaau

SEQ ID NO: 2490250 - RNA, 19 nt, Artificial Sequence
  Description of Artificial Sequence: Synthetic oligonucleotide
  Sense strand starting at position 1843 of SEQ ID NO: 1887697
uugucaaagucugauuaua

SEQ ID NO: 2490251 - RNA, 19 nt, Artificial Sequence
  Description of Artificial Sequence: Synthetic oligonucleotide
  Antisense strand to SEQ ID NO: 2490250
uauaaucagacuuugacaa

SEQ ID NO: 2490252 - RNA, 19 nt, Artificial Sequence
  Description of Artificial Sequence: Synthetic oligonucleotide
  Sense strand starting at position 1845 of SEQ ID NO: 1887697
gucaaagucugauuauaag

SEQ ID NO: 2490253 - RNA, 19 nt, Artificial Sequence
  Description of Artificial Sequence: Synthetic oligonucleotide
  Antisense strand to SEQ ID NO: 2490252
cuuauaaucagacuuugac

SEQ ID NO: 2490254 - RNA, 19 nt, Artificial Sequence
  Description of Artificial Sequence: Synthetic oligonucleotide
  Sense strand starting at position 1869 of SEQ ID NO: 1887697
ucugcaaaguuauuugcaa

SEQ ID NO: 2490255 - RNA, 19 nt, Artificial Sequence
  Description of Artificial Sequence: Synthetic oligonucleotide
  Antisense strand to SEQ ID NO: 2490254
uugcaaauaacuuugcaga

SEQ ID NO: 2490256 - RNA, 19 nt, Artificial Sequence
  Description of Artificial Sequence: Synthetic oligonucleotide
  Sense strand starting at position 2173 of SEQ ID NO: 1887697
agccuuguuuaucauagga

SEQ ID NO: 2490257 - RNA, 19 nt, Artificial Sequence
  Description of Artificial Sequence: Synthetic oligonucleotide
  Antisense strand to SEQ ID NO: 2490256
uccuaugauaaacaaggcu

SEQ ID NO: 2490258 - RNA, 19 nt, Artificial Sequence
  Description of Artificial Sequence: Synthetic oligonucleotide
  Sense strand starting at position 2175 of SEQ ID NO: 1887697
ccuuguuuaucauaggaca

SEQ ID NO: 2490259 - RNA, 19 nt, Artificial Sequence
  Description of Artificial Sequence: Synthetic oligonucleotide
  Antisense strand to SEQ ID NO: 2490258
uguccuaugauaaacaagg

SEQ ID NO: 2490260 - RNA, 19 nt, Artificial Sequence
  Description of Artificial Sequence: Synthetic oligonucleotide
  Sense strand starting at position 2178 of SEQ ID NO: 1887697
uguuuaucauaggacaauc

SEQ ID NO: 2490261 - RNA, 19 nt, Artificial Sequence
  Description of Artificial Sequence: Synthetic oligonucleotide
  Antisense strand to SEQ ID NO: 2490260
gauuguccuaugauaaaca

SEQ ID NO: 2490262 - RNA, 19 nt, Artificial Sequence
  Description of Artificial Sequence: Synthetic oligonucleotide
  Sense strand starting at position 2188 of SEQ ID NO: 1887697
aggacaaucuuccugaguu

SEQ ID NO: 2490263 - RNA, 19 nt, Artificial Sequence
  Description of Artificial Sequence: Synthetic oligonucleotide
  Antisense strand to SEQ ID NO: 2490262
aacucaggaagauuguccu

SEQ ID NO: 2490264 - RNA, 19 nt, Artificial Sequence
  Description of Artificial Sequence: Synthetic oligonucleotide
  Sense strand starting at position 2189 of SEQ ID NO: 1887697
ggacaaucuuccugaguuu

SEQ ID NO: 2490265 - RNA, 19 nt, Artificial Sequence
  Description of Artificial Sequence: Synthetic oligonucleotide
  Antisense strand to SEQ ID NO: 2490264
aaacucaggaagauugucc

SEQ ID NO: 2490266 - RNA, 19 nt, Artificial Sequence
  Description of Artificial Sequence: Synthetic oligonucleotide
  Sense strand starting at position 2192 of SEQ ID NO: 1887697
caaucuuccugaguuucgu

SEQ ID NO: 2490267 - RNA, 19 nt, Artificial Sequence
  Description of Artificial Sequence: Synthetic oligonucleotide
  Antisense strand to SEQ ID NO: 2490266
acgaaacucaggaagauug

SEQ ID NO: 2490268 - RNA, 19 nt, Artificial Sequence
  Description of Artificial Sequence: Synthetic oligonucleotide
  Sense strand starting at position 2201 of SEQ ID NO: 1887697
ugaguuucguaucugcuaa

SEQ ID NO: 2490269 - RNA, 19 nt, Artificial Sequence
  Description of Artificial Sequence: Synthetic oligonucleotide
  Antisense strand to SEQ ID NO: 2490268
uuagcagauacgaaacuca

SEQ ID NO: 2490270 - RNA, 19 nt, Artificial Sequence
  Description of Artificial Sequence: Synthetic oligonucleotide
  Sense strand starting at position 2202 of SEQ ID NO: 1887697
gaguuucguaucugcuaag

SEQ ID NO: 2490271 - RNA, 19 nt, Artificial Sequence
  Description of Artificial Sequence: Synthetic oligonucleotide
  Antisense strand to SEQ ID NO: 2490270
cuuagcagauacgaaacuc

SEQ ID NO: 2490272 - RNA, 19 nt, Artificial Sequence
  Description of Artificial Sequence: Synthetic oligonucleotide
  Sense strand starting at position 2203 of SEQ ID NO: 1887697
aguuucguaucugcuaaga

SEQ ID NO: 2490273 - RNA, 19 nt, Artificial Sequence
  Description of Artificial Sequence: Synthetic oligonucleotide
  Antisense strand to SEQ ID NO: 2490272
ucuuagcagauacgaaacu

SEQ ID NO: 2490274 - RNA, 19 nt, Artificial Sequence
  Description of Artificial Sequence: Synthetic oligonucleotide
  Sense strand starting at position 2205 of SEQ ID NO: 1887697
uuucguaucugcuaagaaa

SEQ ID NO: 2490275 - RNA, 19 nt, Artificial Sequence
  Description of Artificial Sequence: Synthetic oligonucleotide
  Antisense strand to SEQ ID NO: 2490274
uuucuuagcagauacgaaa

SEQ ID NO: 2490276 - RNA, 19 nt, Artificial Sequence
  Description of Artificial Sequence: Synthetic oligonucleotide
  Sense strand starting at position 2238 of SEQ ID NO: 1887697
acacguagcuuauauuuaa

SEQ ID NO: 2490277 - RNA, 19 nt, Artificial Sequence
  Description of Artificial Sequence: Synthetic oligonucleotide
  Antisense strand to SEQ ID NO: 2490276
uuaaauauaagcuacgugu

SEQ ID NO: 2490278 - RNA, 19 nt, Artificial Sequence
  Description of Artificial Sequence: Synthetic oligonucleotide
  Sense strand starting at position 2257 of SEQ ID NO: 1887697
gcaggagaauugguaagau

SEQ ID NO: 2490279 - RNA, 19 nt, Artificial Sequence
  Description of Artificial Sequence: Synthetic oligonucleotide
  Antisense strand to SEQ ID NO: 2490278
aucuuaccaauucuccugc

SEQ ID NO: 2490280 - RNA, 19 nt, Artificial Sequence
  Description of Artificial Sequence: Synthetic oligonucleotide
  Sense strand starting at position 2261 of SEQ ID NO: 1887697
gagaauugguaagauuucu

SEQ ID NO: 2490281 - RNA, 19 nt, Artificial Sequence
  Description of Artificial Sequence: Synthetic oligonucleotide
  Antisense strand to SEQ ID NO: 2490280
agaaaucuuaccaauucuc

SEQ ID NO: 2490282 - RNA, 19 nt, Artificial Sequence
  Description of Artificial Sequence: Synthetic oligonucleotide
  Sense strand starting at position 2267 of SEQ ID NO: 1887697
ugguaagauuucuggagaa

SEQ ID NO: 2490283 - RNA, 19 nt, Artificial Sequence
  Description of Artificial Sequence: Synthetic oligonucleotide
  Antisense strand to SEQ ID NO: 2490282
uucuccagaaaucuuacca

SEQ ID NO: 2490284 - RNA, 19 nt, Artificial Sequence
  Description of Artificial Sequence: Synthetic oligonucleotide
  Sense strand starting at position 2292 of SEQ ID NO: 1887697
uggauuaugagccaagggu

SEQ ID NO: 2490285 - RNA, 19 nt, Artificial Sequence
  Description of Artificial Sequence: Synthetic oligonucleotide
  Antisense strand to SEQ ID NO: 2490284
acccuuggcucauaaucca

SEQ ID NO: 2490286 - RNA, 19 nt, Artificial Sequence
  Description of Artificial Sequence: Synthetic oligonucleotide
  Sense strand starting at position 2311 of SEQ ID NO: 1887697
gcacuugaguuccaggaca

SEQ ID NO: 2490287 - RNA, 19 nt, Artificial Sequence
  Description of Artificial Sequence: Synthetic oligonucleotide
  Antisense strand to SEQ ID NO: 2490286
uguccuggaacucaagugc

SEQ ID NO: 2490288 - RNA, 19 nt, Artificial Sequence
  Description of Artificial Sequence: Synthetic oligonucleotide
  Sense strand starting at position 2419 of SEQ ID NO: 1887697
agaccauaggcuuggucau

SEQ ID NO: 2490289 - RNA, 19 nt, Artificial Sequence
  Description of Artificial Sequence: Synthetic oligonucleotide
  Antisense strand to SEQ ID NO: 2490288
augaccaagccuauggucu

SEQ ID NO: 2490290 - RNA, 19 nt, Artificial Sequence
  Description of Artificial Sequence: Synthetic oligonucleotide
  Sense strand starting at position 2420 of SEQ ID NO: 1887697
gaccauaggcuuggucaua

SEQ ID NO: 2490291 - RNA, 19 nt, Artificial Sequence
  Description of Artificial Sequence: Synthetic oligonucleotide
  Antisense strand to SEQ ID NO: 2490290
uaugaccaagccuaugguc

SEQ ID NO: 2490292 - RNA, 19 nt, Artificial Sequence
  Description of Artificial Sequence: Synthetic oligonucleotide
  Sense strand starting at position 2421 of SEQ ID NO: 1887697
accauaggcuuggucauaa

SEQ ID NO: 2490293 - RNA, 19 nt, Artificial Sequence
  Description of Artificial Sequence: Synthetic oligonucleotide
  Antisense strand to SEQ ID NO: 2490292
uuaugaccaagccuauggu

SEQ ID NO: 2490294 - RNA, 19 nt, Artificial Sequence
  Description of Artificial Sequence: Synthetic oligonucleotide
  Sense strand starting at position 2581 of SEQ ID NO: 1887697
uguaaacccauguguauga

SEQ ID NO: 2490295 - RNA, 19 nt, Artificial Sequence
  Description of Artificial Sequence: Synthetic oligonucleotide
  Antisense strand to SEQ ID NO: 2490294
ucauacacauggguuuaca

SEQ ID NO: 2490296 - RNA, 19 nt, Artificial Sequence
  Description of Artificial Sequence: Synthetic oligonucleotide
  Sense strand starting at position 3142 of SEQ ID NO: 1887697
aagguuauaucagaguauu

SEQ ID NO: 2490297 - RNA, 19 nt, Artificial Sequence
  Description of Artificial Sequence: Synthetic oligonucleotide
  Antisense strand to SEQ ID NO: 2490296
aauacucugauauaaccuu

SEQ ID NO: 2490298 - RNA, 19 nt, Artificial Sequence
  Description of Artificial Sequence: Synthetic oligonucleotide
  Sense strand starting at position 3145 of SEQ ID NO: 1887697
guuauaucagaguauucuc

SEQ ID NO: 2490299 - RNA, 19 nt, Artificial Sequence
  Description of Artificial Sequence: Synthetic oligonucleotide
  Antisense strand to SEQ ID NO: 2490298
gagaauacucugauauaac

SEQ ID NO: 2490300 - RNA, 19 nt, Artificial Sequence
  Description of Artificial Sequence: Synthetic oligonucleotide
  Sense strand starting at position 3778 of SEQ ID NO: 1887697
uggagugcagcagaagauu

SEQ ID NO: 2490301 - RNA, 19 nt, Artificial Sequence
  Description of Artificial Sequence: Synthetic oligonucleotide
  Antisense strand to SEQ ID NO: 2490300
aaucuucugcugcacucca

SEQ ID NO: 2490302 - RNA, 19 nt, Artificial Sequence
  Description of Artificial Sequence: Synthetic oligonucleotide
  Sense strand starting at position 3923 of SEQ ID NO: 1887697
gcacacuagucccauauuu

SEQ ID NO: 2490303 - RNA, 19 nt, Artificial Sequence
  Description of Artificial Sequence: Synthetic oligonucleotide
  Antisense strand to SEQ ID NO: 2490302
aaauaugggacuagugugc

SEQ ID NO: 2490304 - RNA, 19 nt, Artificial Sequence
  Description of Artificial Sequence: Synthetic oligonucleotide
  Sense strand starting at position 674 of SEQ ID NO: 1887698
auaagcauucgcugcaaau

SEQ ID NO: 2490305 - RNA, 19 nt, Artificial Sequence
  Description of Artificial Sequence: Synthetic oligonucleotide
  Antisense strand to SEQ ID NO: 2490304
auuugcagcgaaugcuuau

SEQ ID NO: 2490306 - RNA, 19 nt, Artificial Sequence
  Description of Artificial Sequence: Synthetic oligonucleotide
  Sense strand starting at position 847 of SEQ ID NO: 1887698
uuggaaucuuccuugacga

SEQ ID NO: 2490307 - RNA, 19 nt, Artificial Sequence
  Description of Artificial Sequence: Synthetic oligonucleotide
  Antisense strand to SEQ ID NO: 2490306
ucgucaaggaagauuccaa

SEQ ID NO: 2490308 - RNA, 19 nt, Artificial Sequence
  Description of Artificial Sequence: Synthetic oligonucleotide
  Sense strand starting at position 848 of SEQ ID NO: 1887698
uggaaucuuccuugacgag

SEQ ID NO: 2490309 - RNA, 19 nt, Artificial Sequence
  Description of Artificial Sequence: Synthetic oligonucleotide
  Antisense strand to SEQ ID NO: 2490308
cucgucaaggaagauucca

SEQ ID NO: 2490310 - RNA, 19 nt, Artificial Sequence
  Description of Artificial Sequence: Synthetic oligonucleotide
  Sense strand starting at position 854 of SEQ ID NO: 1887698
cuuccuugacgagguuaaa

SEQ ID NO: 2490311 - RNA, 19 nt, Artificial Sequence
  Description of Artificial Sequence: Synthetic oligonucleotide
  Antisense strand to SEQ ID NO: 2490310
uuuaaccucgucaaggaag

SEQ ID NO: 2490312 - RNA, 19 nt, Artificial Sequence
  Description of Artificial Sequence: Synthetic oligonucleotide
  Sense strand starting at position 895 of SEQ ID NO: 1887698
auuuauuuguccgguuugu

SEQ ID NO: 2490313 - RNA, 19 nt, Artificial Sequence
  Description of Artificial Sequence: Synthetic oligonucleotide
  Antisense strand to SEQ ID NO: 2490312
acaaaccggacaaauaaau

SEQ ID NO: 2490314 - RNA, 19 nt, Artificial Sequence
  Description of Artificial Sequence: Synthetic oligonucleotide
  Sense strand starting at position 1196 of SEQ ID NO: 1887698
aagaauauacauugucgua

SEQ ID NO: 2490315 - RNA, 19 nt, Artificial Sequence
  Description of Artificial Sequence: Synthetic oligonucleotide
  Antisense strand to SEQ ID NO: 2490314
uacgacaauguauauucuu

SEQ ID NO: 2490316 - RNA, 19 nt, Artificial Sequence
  Description of Artificial Sequence: Synthetic oligonucleotide
  Sense strand starting at position 1198 of SEQ ID NO: 1887698
gaauauacauugucguaaa

SEQ ID NO: 2490317 - RNA, 19 nt, Artificial Sequence
  Description of Artificial Sequence: Synthetic oligonucleotide
  Antisense strand to SEQ ID NO: 2490316
uuuacgacaauguauauuc

SEQ ID NO: 2490318 - RNA, 19 nt, Artificial Sequence
  Description of Artificial Sequence: Synthetic oligonucleotide
  Sense strand starting at position 1220 of SEQ ID NO: 1887698
aaacauucucccggagaga

SEQ ID NO: 2490319 - RNA, 19 nt, Artificial Sequence
  Description of Artificial Sequence: Synthetic oligonucleotide
  Antisense strand to SEQ ID NO: 2490318
ucucuccgggagaauguuu

SEQ ID NO: 2490320 - RNA, 19 nt, Artificial Sequence
  Description of Artificial Sequence: Synthetic oligonucleotide
  Sense strand starting at position 1386 of SEQ ID NO: 1887698
gugaaaccaugacuguaaa

SEQ ID NO: 2490321 - RNA, 19 nt, Artificial Sequence
  Description of Artificial Sequence: Synthetic oligonucleotide
  Antisense strand to SEQ ID NO: 2490320
uuuacagucaugguuucac

SEQ ID NO: 2490322 - RNA, 19 nt, Artificial Sequence
  Description of Artificial Sequence: Synthetic oligonucleotide
  Sense strand starting at position 1681 of SEQ ID NO: 1887698
cagaguuccugacacugca

SEQ ID NO: 2490323 - RNA, 19 nt, Artificial Sequence
  Description of Artificial Sequence: Synthetic oligonucleotide
  Antisense strand to SEQ ID NO: 2490322
ugcagugucaggaacucug

SEQ ID NO: 2490324 - RNA, 19 nt, Artificial Sequence
  Description of Artificial Sequence: Synthetic oligonucleotide
  Sense strand starting at position 2009 of SEQ ID NO: 1887698
gcuccagcaucguggauuu

SEQ ID NO: 2490325 - RNA, 19 nt, Artificial Sequence
  Description of Artificial Sequence: Synthetic oligonucleotide
  Antisense strand to SEQ ID NO: 2490324
aaauccacgaugcuggagc

SEQ ID NO: 2490326 - RNA, 19 nt, Artificial Sequence
  Description of Artificial Sequence: Synthetic oligonucleotide
  Sense strand starting at position 2077 of SEQ ID NO: 1887698
cgcauuuauugguccuguu

SEQ ID NO: 2490327 - RNA, 19 nt, Artificial Sequence
  Description of Artificial Sequence: Synthetic oligonucleotide
  Antisense strand to SEQ ID NO: 2490326
aacaggaccaauaaaugcg

SEQ ID NO: 2490328 - RNA, 19 nt, Artificial Sequence
  Description of Artificial Sequence: Synthetic oligonucleotide
  Sense strand starting at position 2167 of SEQ ID NO: 1887698
gcagguuagcuuuguuuau

SEQ ID NO: 2490329 - RNA, 19 nt, Artificial Sequence
  Description of Artificial Sequence: Synthetic oligonucleotide
  Antisense strand to SEQ ID NO: 2490328
auaaacaaagcuaaccugc

SEQ ID NO: 2490330 - RNA, 19 nt, Artificial Sequence
  Description of Artificial Sequence: Synthetic oligonucleotide
  Sense strand starting at position 2169 of SEQ ID NO: 1887698
agguuagcuuuguuuauca

SEQ ID NO: 2490331 - RNA, 19 nt, Artificial Sequence
  Description of Artificial Sequence: Synthetic oligonucleotide
  Antisense strand to SEQ ID NO: 2490330
ugauaaacaaagcuaaccu

SEQ ID NO: 2490332 - RNA, 19 nt, Artificial Sequence
  Description of Artificial Sequence: Synthetic oligonucleotide
  Sense strand starting at position 2171 of SEQ ID NO: 1887698
guuagcuuuguuuaucaag

SEQ ID NO: 2490333 - RNA, 19 nt, Artificial Sequence
  Description of Artificial Sequence: Synthetic oligonucleotide
  Antisense strand to SEQ ID NO: 2490332
cuugauaaacaaagcuaac

SEQ ID NO: 2490334 - RNA, 19 nt, Artificial Sequence
  Description of Artificial Sequence: Synthetic oligonucleotide
  Sense strand starting at position 2190 of SEQ ID NO: 1887698
gggcaauccuccugagcuu

SEQ ID NO: 2490335 - RNA, 19 nt, Artificial Sequence
  Description of Artificial Sequence: Synthetic oligonucleotide
  Antisense strand to SEQ ID NO: 2490334
aagcucaggaggauugccc

SEQ ID NO: 2490336 - RNA, 19 nt, Artificial Sequence
  Description of Artificial Sequence: Synthetic oligonucleotide
  Sense strand starting at position 2191 of SEQ ID NO: 1887698
ggcaauccuccugagcuuu

SEQ ID NO: 2490337 - RNA, 19 nt, Artificial Sequence
  Description of Artificial Sequence: Synthetic oligonucleotide
  Antisense strand to SEQ ID NO: 2490336
aaagcucaggaggauugcc

SEQ ID NO: 2490338 - RNA, 19 nt, Artificial Sequence
  Description of Artificial Sequence: Synthetic oligonucleotide
  Sense strand starting at position 2202 of SEQ ID NO: 1887698
ugagcuuugucuccagaaa

SEQ ID NO: 2490339 - RNA, 19 nt, Artificial Sequence
  Description of Artificial Sequence: Synthetic oligonucleotide
  Antisense strand to SEQ ID NO: 2490338
uuucuggagacaaagcuca

SEQ ID NO: 2490340 - RNA, 19 nt, Artificial Sequence
  Description of Artificial Sequence: Synthetic oligonucleotide
  Sense strand starting at position 2203 of SEQ ID NO: 1887698
gagcuuugucuccagaaag

SEQ ID NO: 2490341 - RNA, 19 nt, Artificial Sequence
  Description of Artificial Sequence: Synthetic oligonucleotide
  Antisense strand to SEQ ID NO: 2490340
cuuucuggagacaaagcuc

SEQ ID NO: 2490342 - RNA, 19 nt, Artificial Sequence
  Description of Artificial Sequence: Synthetic oligonucleotide
  Sense strand starting at position 2829 of SEQ ID NO: 1887698
agacuauucucugugcaua

SEQ ID NO: 2490343 - RNA, 19 nt, Artificial Sequence
  Description of Artificial Sequence: Synthetic oligonucleotide
  Antisense strand to SEQ ID NO: 2490342
uaugcacagagaauagucu

SEQ ID NO: 2490344 - RNA, 19 nt, Artificial Sequence
  Description of Artificial Sequence: Synthetic oligonucleotide
  Sense strand starting at position 2830 of SEQ ID NO: 1887698
gacuauucucugugcauag

SEQ ID NO: 2490345 - RNA, 19 nt, Artificial Sequence
  Description of Artificial Sequence: Synthetic oligonucleotide
  Antisense strand to SEQ ID NO: 2490344
cuaugcacagagaauaguc

SEQ ID NO: 2490346 - RNA, 19 nt, Artificial Sequence
  Description of Artificial Sequence: Synthetic oligonucleotide
  Sense strand starting at position 2831 of SEQ ID NO: 1887698
acuauucucugugcauaga

SEQ ID NO: 2490347 - RNA, 19 nt, Artificial Sequence
  Description of Artificial Sequence: Synthetic oligonucleotide
  Antisense strand to SEQ ID NO: 2490346
ucuaugcacagagaauagu

SEQ ID NO: 2490348 - RNA, 19 nt, Artificial Sequence
  Description of Artificial Sequence: Synthetic oligonucleotide
  Sense strand starting at position 2832 of SEQ ID NO: 1887698
cuauucucugugcauagaa

SEQ ID NO: 2490349 - RNA, 19 nt, Artificial Sequence
  Description of Artificial Sequence: Synthetic oligonucleotide
  Antisense strand to SEQ ID NO: 2490348
uucuaugcacagagaauag

SEQ ID NO: 2490350 - RNA, 19 nt, Artificial Sequence
  Description of Artificial Sequence: Synthetic oligonucleotide
  Sense strand starting at position 2834 of SEQ ID NO: 1887698
auucucugugcauagaaga

SEQ ID NO: 2490351 - RNA, 19 nt, Artificial Sequence
  Description of Artificial Sequence: Synthetic oligonucleotide
  Antisense strand to SEQ ID NO: 2490350
ucuucuaugcacagagaau

SEQ ID NO: 2490352 - RNA, 19 nt, Artificial Sequence
  Description of Artificial Sequence: Synthetic oligonucleotide
  Sense strand starting at position 2858 of SEQ ID NO: 1887698
uuguguguaugugauauua

SEQ ID NO: 2490353 - RNA, 19 nt, Artificial Sequence
  Description of Artificial Sequence: Synthetic oligonucleotide
  Antisense strand to SEQ ID NO: 2490352
uaauaucacauacacacaa

SEQ ID NO: 2490354 - RNA, 19 nt, Artificial Sequence
  Description of Artificial Sequence: Synthetic oligonucleotide
  Sense strand starting at position 2860 of SEQ ID NO: 1887698
guguguaugugauauuaca

SEQ ID NO: 2490355 - RNA, 19 nt, Artificial Sequence
  Description of Artificial Sequence: Synthetic oligonucleotide
  Antisense strand to SEQ ID NO: 2490354
uguaauaucacauacacac

SEQ ID NO: 2490356 - RNA, 19 nt, Artificial Sequence
  Description of Artificial Sequence: Synthetic oligonucleotide
  Sense strand starting at position 3227 of SEQ ID NO: 1887698
guauucucacaggaaguau

SEQ ID NO: 2490357 - RNA, 19 nt, Artificial Sequence
  Description of Artificial Sequence: Synthetic oligonucleotide
  Antisense strand to SEQ ID NO: 2490356
auacuuccugugagaauac

SEQ ID NO: 2490358 - RNA, 19 nt, Artificial Sequence
  Description of Artificial Sequence: Synthetic oligonucleotide
  Sense strand starting at position 3239 of SEQ ID NO: 1887698
gaaguauaauuccuacgca

SEQ ID NO: 2490359 - RNA, 19 nt, Artificial Sequence
  Description of Artificial Sequence: Synthetic oligonucleotide
  Antisense strand to SEQ ID NO: 2490358
ugcguaggaauuauacuuc

SEQ ID NO: 2490360 - RNA, 19 nt, Artificial Sequence
  Description of Artificial Sequence: Synthetic oligonucleotide
  Sense strand starting at position 3242 of SEQ ID NO: 1887698
guauaauuccuacgcauau

SEQ ID NO: 2490361 - RNA, 19 nt, Artificial Sequence
  Description of Artificial Sequence: Synthetic oligonucleotide
  Antisense strand to SEQ ID NO: 2490360
auaugcguaggaauuauac

SEQ ID NO: 2490362 - RNA, 19 nt, Artificial Sequence
  Description of Artificial Sequence: Synthetic oligonucleotide
  Sense strand starting at position 3259 of SEQ ID NO: 1887698
augugcuugcuuuggcaau

SEQ ID NO: 2490363 - RNA, 19 nt, Artificial Sequence
  Description of Artificial Sequence: Synthetic oligonucleotide
  Antisense strand to SEQ ID NO: 2490362
auugccaaagcaagcacau

SEQ ID NO: 2490364 - RNA, 19 nt, Artificial Sequence
  Description of Artificial Sequence: Synthetic oligonucleotide
  Sense strand starting at position 3260 of SEQ ID NO: 1887698
ugugcuugcuuuggcaaua

SEQ ID NO: 2490365 - RNA, 19 nt, Artificial Sequence
  Description of Artificial Sequence: Synthetic oligonucleotide
  Antisense strand to SEQ ID NO: 2490364
uauugccaaagcaagcaca

SEQ ID NO: 2490366 - RNA, 19 nt, Artificial Sequence
  Description of Artificial Sequence: Synthetic oligonucleotide
  Sense strand starting at position 3679 of SEQ ID NO: 1887698
cccugucugcccuacuuau

SEQ ID NO: 2490367 - RNA, 19 nt, Artificial Sequence
  Description of Artificial Sequence: Synthetic oligonucleotide
  Antisense strand to SEQ ID NO: 2490366
auaaguagggcagacaggg

SEQ ID NO: 2490368 - RNA, 19 nt, Artificial Sequence
  Description of Artificial Sequence: Synthetic oligonucleotide
  Sense strand starting at position 3786 of SEQ ID NO: 1887698
ucaagagguucuucugcca

SEQ ID NO: 2490369 - RNA, 19 nt, Artificial Sequence
  Description of Artificial Sequence: Synthetic oligonucleotide
  Antisense strand to SEQ ID NO: 2490368
uggcagaagaaccucuuga

SEQ ID NO: 2490370 - RNA, 19 nt, Artificial Sequence
  Description of Artificial Sequence: Synthetic oligonucleotide
  Sense strand starting at position 42 of SEQ ID NO: 1887699
cagagauccugacacugca

SEQ ID NO: 2490371 - RNA, 19 nt, Artificial Sequence
  Description of Artificial Sequence: Synthetic oligonucleotide
  Antisense strand to SEQ ID NO: 2490370
ugcagugucaggaucucug

SEQ ID NO: 2490372 - RNA, 19 nt, Artificial Sequence
  Description of Artificial Sequence: Synthetic oligonucleotide
  Sense strand starting at position 609 of SEQ ID NO: 1887699
agacauauguaccuuauau

SEQ ID NO: 2490373 - RNA, 19 nt, Artificial Sequence
  Description of Artificial Sequence: Synthetic oligonucleotide
  Antisense strand to SEQ ID NO: 2490372
auauaagguacauaugucu

SEQ ID NO: 2490374 - RNA, 19 nt, Artificial Sequence
  Description of Artificial Sequence: Synthetic oligonucleotide
  Sense strand starting at position 736 of SEQ ID NO: 1887699
aauggaaucuacgauguua

SEQ ID NO: 2490375 - RNA, 19 nt, Artificial Sequence
  Description of Artificial Sequence: Synthetic oligonucleotide
  Antisense strand to SEQ ID NO: 2490374
uaacaucguagauuccauu

SEQ ID NO: 2490376 - RNA, 19 nt, Artificial Sequence
  Description of Artificial Sequence: Synthetic oligonucleotide
  Sense strand starting at position 738 of SEQ ID NO: 1887699
uggaaucuacgauguuaaa

SEQ ID NO: 2490377 - RNA, 19 nt, Artificial Sequence
  Description of Artificial Sequence: Synthetic oligonucleotide
  Antisense strand to SEQ ID NO: 2490376
uuuaacaucguagauucca

SEQ ID NO: 2490378 - RNA, 19 nt, Artificial Sequence
  Description of Artificial Sequence: Synthetic oligonucleotide
  Sense strand starting at position 779 of SEQ ID NO: 1887699
aaacauccuccaggguaga

SEQ ID NO: 2490379 - RNA, 19 nt, Artificial Sequence
  Description of Artificial Sequence: Synthetic oligonucleotide
  Antisense strand to SEQ ID NO: 2490378
ucuacccuggaggauguuu

SEQ ID NO: 2490380 - RNA, 19 nt, Artificial Sequence
  Description of Artificial Sequence: Synthetic oligonucleotide
  Sense strand starting at position 910 of SEQ ID NO: 1887699
gaaguaucaccugagcuca

SEQ ID NO: 2490381 - RNA, 19 nt, Artificial Sequence
  Description of Artificial Sequence: Synthetic oligonucleotide
  Antisense strand to SEQ ID NO: 2490380
ugagcucaggugauacuuc

SEQ ID NO: 2490382 - RNA, 19 nt, Artificial Sequence
  Description of Artificial Sequence: Synthetic oligonucleotide
  Sense strand starting at position 956 of SEQ ID NO: 1887699
gguguaagcccauguguau

SEQ ID NO: 2490383 - RNA, 19 nt, Artificial Sequence
  Description of Artificial Sequence: Synthetic oligonucleotide
  Antisense strand to SEQ ID NO: 2490382
auacacaugggcuuacacc

SEQ ID NO: 2490384 - RNA, 19 nt, Artificial Sequence
  Description of Artificial Sequence: Synthetic oligonucleotide
  Sense strand starting at position 959 of SEQ ID NO: 1887699
guaagcccauguguauaaa

SEQ ID NO: 2490385 - RNA, 19 nt, Artificial Sequence
  Description of Artificial Sequence: Synthetic oligonucleotide
  Antisense strand to SEQ ID NO: 2490384
uuuauacacaugggcuuac

SEQ ID NO: 2490386 - RNA, 19 nt, Artificial Sequence
  Description of Artificial Sequence: Synthetic oligonucleotide
  Sense strand starting at position 1469 of SEQ ID NO: 1887699
gguugaaauaagcgaagau

SEQ ID NO: 2490387 - RNA, 19 nt, Artificial Sequence
  Description of Artificial Sequence: Synthetic oligonucleotide
  Antisense strand to SEQ ID NO: 2490386
aucuucgcuuauuucaacc

SEQ ID NO: 2490388 - RNA, 19 nt, Artificial Sequence
  Description of Artificial Sequence: Synthetic oligonucleotide
  Sense strand starting at position 1470 of SEQ ID NO: 1887699
guugaaauaagcgaagauc

SEQ ID NO: 2490389 - RNA, 19 nt, Artificial Sequence
  Description of Artificial Sequence: Synthetic oligonucleotide
  Antisense strand to SEQ ID NO: 2490388
gaucuucgcuuauuucaac

SEQ ID NO: 2490390 - RNA, 19 nt, Artificial Sequence
  Description of Artificial Sequence: Synthetic oligonucleotide
  Sense strand starting at position 1592 of SEQ ID NO: 1887699
cguggugucagguaccuau

SEQ ID NO: 2490391 - RNA, 19 nt, Artificial Sequence
  Description of Artificial Sequence: Synthetic oligonucleotide
  Antisense strand to SEQ ID NO: 2490390
auagguaccugacaccacg

SEQ ID NO: 2490392 - RNA, 19 nt, Artificial Sequence
  Description of Artificial Sequence: Synthetic oligonucleotide
  Sense strand starting at position 1595 of SEQ ID NO: 1887699
ggugucagguaccuauaau

SEQ ID NO: 2490393 - RNA, 19 nt, Artificial Sequence
  Description of Artificial Sequence: Synthetic oligonucleotide
  Antisense strand to SEQ ID NO: 2490392
auuauagguaccugacacc

SEQ ID NO: 2490394 - RNA, 19 nt, Artificial Sequence
  Description of Artificial Sequence: Synthetic oligonucleotide
  Sense strand starting at position 1596 of SEQ ID NO: 1887699
gugucagguaccuauaauc

SEQ ID NO: 2490395 - RNA, 19 nt, Artificial Sequence
  Description of Artificial Sequence: Synthetic oligonucleotide
  Antisense strand to SEQ ID NO: 2490394
gauuauagguaccugacac

SEQ ID NO: 2490396 - RNA, 19 nt, Artificial Sequence
  Description of Artificial Sequence: Synthetic oligonucleotide
  Sense strand starting at position 1638 of SEQ ID NO: 1887699
aggagaacggcuugaaacu

SEQ ID NO: 2490397 - RNA, 19 nt, Artificial Sequence
  Description of Artificial Sequence: Synthetic oligonucleotide
  Antisense strand to SEQ ID NO: 2490396
aguuucaagccguucuccu

SEQ ID NO: 2490398 - RNA, 19 nt, Artificial Sequence
  Description of Artificial Sequence: Synthetic oligonucleotide
  Sense strand starting at position 1872 of SEQ ID NO: 1887699
gcaaauguauuagcaagau

SEQ ID NO: 2490399 - RNA, 19 nt, Artificial Sequence
  Description of Artificial Sequence: Synthetic oligonucleotide
  Antisense strand to SEQ ID NO: 2490398
aucuugcuaauacauuugc

SEQ ID NO: 2490400 - RNA, 19 nt, Artificial Sequence
  Description of Artificial Sequence: Synthetic oligonucleotide
  Sense strand starting at position 2226 of SEQ ID NO: 1887699
agcaaugacuacuagacau

SEQ ID NO: 2490401 - RNA, 19 nt, Artificial Sequence
  Description of Artificial Sequence: Synthetic oligonucleotide
  Antisense strand to SEQ ID NO: 2490400
augucuaguagucauugcu

SEQ ID NO: 2490402 - RNA, 19 nt, Artificial Sequence
  Description of Artificial Sequence: Synthetic oligonucleotide
  Sense strand starting at position 2649 of SEQ ID NO: 1887699
gagugagacucugauuuaa

SEQ ID NO: 2490403 - RNA, 19 nt, Artificial Sequence
  Description of Artificial Sequence: Synthetic oligonucleotide
  Antisense strand to SEQ ID NO: 2490402
uuaaaucagagucucacuc

SEQ ID NO: 2490404 - RNA, 19 nt, Artificial Sequence
  Description of Artificial Sequence: Synthetic oligonucleotide
  Sense strand starting at position 2710 of SEQ ID NO: 1887699
uuauaagcaugcucugcaa

SEQ ID NO: 2490405 - RNA, 19 nt, Artificial Sequence
  Description of Artificial Sequence: Synthetic oligonucleotide
  Antisense strand to SEQ ID NO: 2490404
uugcagagcaugcuuauaa

SEQ ID NO: 2490406 - RNA, 19 nt, Artificial Sequence
  Description of Artificial Sequence: Synthetic oligonucleotide
  Sense strand starting at position 3056 of SEQ ID NO: 1887699
gaguuucgccuccagaaag

SEQ ID NO: 2490407 - RNA, 19 nt, Artificial Sequence
  Description of Artificial Sequence: Synthetic oligonucleotide
  Antisense strand to SEQ ID NO: 2490406
cuuucuggaggcgaaacuc

SEQ ID NO: 2490408 - RNA, 19 nt, Artificial Sequence
  Description of Artificial Sequence: Synthetic oligonucleotide
  Sense strand starting at position 3256 of SEQ ID NO: 1887699
acuugaucgcaggaguuaa

SEQ ID NO: 2490409 - RNA, 19 nt, Artificial Sequence
  Description of Artificial Sequence: Synthetic oligonucleotide
  Antisense strand to SEQ ID NO: 2490408
uuaacuccugcgaucaagu

SEQ ID NO: 2490410 - RNA, 19 nt, Artificial Sequence
  Description of Artificial Sequence: Synthetic oligonucleotide
  Sense strand starting at position 3260 of SEQ ID NO: 1887699
gaucgcaggaguuaagagu

SEQ ID NO: 2490411 - RNA, 19 nt, Artificial Sequence
  Description of Artificial Sequence: Synthetic oligonucleotide
  Antisense strand to SEQ ID NO: 2490410
acucuuaacuccugcgauc

SEQ ID NO: 2490412 - RNA, 19 nt, Artificial Sequence
  Description of Artificial Sequence: Synthetic oligonucleotide
  Sense strand starting at position 3295 of SEQ ID NO: 1887699
gcugaaaccucaucaguac

SEQ ID NO: 2490413 - RNA, 19 nt, Artificial Sequence
  Description of Artificial Sequence: Synthetic oligonucleotide
  Antisense strand to SEQ ID NO: 2490412
guacugaugagguuucagc

SEQ ID NO: 2490414 - RNA, 19 nt, Artificial Sequence
  Description of Artificial Sequence: Synthetic oligonucleotide
  Sense strand starting at position 3350 of SEQ ID NO: 1887699
gccuguagacacuaaucca

SEQ ID NO: 2490415 - RNA, 19 nt, Artificial Sequence
  Description of Artificial Sequence: Synthetic oligonucleotide
  Antisense strand to SEQ ID NO: 2490414
uggauuagugucuacaggc

SEQ ID NO: 2490416 - RNA, 19 nt, Artificial Sequence
  Description of Artificial Sequence: Synthetic oligonucleotide
  Sense strand starting at position 3490 of SEQ ID NO: 1887699
acuccaaagugauauaaga

SEQ ID NO: 2490417 - RNA, 19 nt, Artificial Sequence
  Description of Artificial Sequence: Synthetic oligonucleotide
  Antisense strand to SEQ ID NO: 2490416
ucuuauaucacuuuggagu

SEQ ID NO: 2490418 - RNA, 19 nt, Artificial Sequence
  Description of Artificial Sequence: Synthetic oligonucleotide
  Sense strand starting at position 3498 of SEQ ID NO: 1887699
gugauauaagaguguucuc

SEQ ID NO: 2490419 - RNA, 19 nt, Artificial Sequence
  Description of Artificial Sequence: Synthetic oligonucleotide
  Antisense strand to SEQ ID NO: 2490418
gagaacacucuuauaucac

SEQ ID NO: 2490420 - RNA, 19 nt, Artificial Sequence
  Description of Artificial Sequence: Synthetic oligonucleotide
  Sense strand starting at position 3501 of SEQ ID NO: 1887699
auauaagaguguucucugu

SEQ ID NO: 2490421 - RNA, 19 nt, Artificial Sequence
  Description of Artificial Sequence: Synthetic oligonucleotide
  Antisense strand to SEQ ID NO: 2490420
acagagaacacucuuauau

SEQ ID NO: 2490422 - RNA, 19 nt, Artificial Sequence
  Description of Artificial Sequence: Synthetic oligonucleotide
  Sense strand starting at position 3503 of SEQ ID NO: 1887699
auaagaguguucucugugu

SEQ ID NO: 2490423 - RNA, 19 nt, Artificial Sequence
  Description of Artificial Sequence: Synthetic oligonucleotide
  Antisense strand to SEQ ID NO: 2490422
acacagagaacacucuuau

SEQ ID NO: 2490424 - RNA, 19 nt, Artificial Sequence
  Description of Artificial Sequence: Synthetic oligonucleotide
  Sense strand starting at position 3505 of SEQ ID NO: 1887699
aagaguguucucuguguau

SEQ ID NO: 2490425 - RNA, 19 nt, Artificial Sequence
  Description of Artificial Sequence: Synthetic oligonucleotide
  Antisense strand to SEQ ID NO: 2490424
auacacagagaacacucuu

SEQ ID NO: 2490426 - RNA, 19 nt, Artificial Sequence
  Description of Artificial Sequence: Synthetic oligonucleotide
  Sense strand starting at position 3507 of SEQ ID NO: 1887699
gaguguucucuguguauag

SEQ ID NO: 2490427 - RNA, 19 nt, Artificial Sequence
  Description of Artificial Sequence: Synthetic oligonucleotide
  Antisense strand to SEQ ID NO: 2490426
cuauacacagagaacacuc

SEQ ID NO: 2490428 - RNA, 19 nt, Artificial Sequence
  Description of Artificial Sequence: Synthetic oligonucleotide
  Sense strand starting at position 3508 of SEQ ID NO: 1887699
aguguucucuguguauaga

SEQ ID NO: 2490429 - RNA, 19 nt, Artificial Sequence
  Description of Artificial Sequence: Synthetic oligonucleotide
  Antisense strand to SEQ ID NO: 2490428
ucuauacacagagaacacu

SEQ ID NO: 2490430 - RNA, 19 nt, Artificial Sequence
  Description of Artificial Sequence: Synthetic oligonucleotide
  Sense strand starting at position 3509 of SEQ ID NO: 1887699
guguucucuguguauagaa

SEQ ID NO: 2490431 - RNA, 19 nt, Artificial Sequence
  Description of Artificial Sequence: Synthetic oligonucleotide
  Antisense strand to SEQ ID NO: 2490430
uucuauacacagagaacac

SEQ ID NO: 2490432 - RNA, 19 nt, Artificial Sequence
  Description of Artificial Sequence: Synthetic oligonucleotide
  Sense strand starting at position 3511 of SEQ ID NO: 1887699
guucucuguguauagaaga

SEQ ID NO: 2490433 - RNA, 19 nt, Artificial Sequence
  Description of Artificial Sequence: Synthetic oligonucleotide
  Antisense strand to SEQ ID NO: 2490432
ucuucuauacacagagaac

SEQ ID NO: 2490434 - RNA, 19 nt, Artificial Sequence
  Description of Artificial Sequence: Synthetic oligonucleotide
  Sense strand starting at position 3516 of SEQ ID NO: 1887699
cuguguauagaagacuauu

SEQ ID NO: 2490435 - RNA, 19 nt, Artificial Sequence
  Description of Artificial Sequence: Synthetic oligonucleotide
  Antisense strand to SEQ ID NO: 2490434
aauagucuucuauacacag

SEQ ID NO: 2490436 - RNA, 19 nt, Artificial Sequence
  Description of Artificial Sequence: Synthetic oligonucleotide
  Sense strand starting at position 3554 of SEQ ID NO: 1887699
cacagaacauugugaugaa

SEQ ID NO: 2490437 - RNA, 19 nt, Artificial Sequence
  Description of Artificial Sequence: Synthetic oligonucleotide
  Antisense strand to SEQ ID NO: 2490436
uucaucacaauguucugug

SEQ ID NO: 2490438 - RNA, 19 nt, Artificial Sequence
  Description of Artificial Sequence: Synthetic oligonucleotide
  Sense strand starting at position 3555 of SEQ ID NO: 1887699
acagaacauugugaugaaa

SEQ ID NO: 2490439 - RNA, 19 nt, Artificial Sequence
  Description of Artificial Sequence: Synthetic oligonucleotide
  Antisense strand to SEQ ID NO: 2490438
uuucaucacaauguucugu

SEQ ID NO: 2490440 - RNA, 19 nt, Artificial Sequence
  Description of Artificial Sequence: Synthetic oligonucleotide
  Sense strand starting at position 3557 of SEQ ID NO: 1887699
agaacauugugaugaaaua

SEQ ID NO: 2490441 - RNA, 19 nt, Artificial Sequence
  Description of Artificial Sequence: Synthetic oligonucleotide
  Antisense strand to SEQ ID NO: 2490440
uauuucaucacaauguucu

SEQ ID NO: 2490442 - RNA, 19 nt, Artificial Sequence
  Description of Artificial Sequence: Synthetic oligonucleotide
  Sense strand starting at position 3655 of SEQ ID NO: 1887699
acauauuggugcuuugaca

SEQ ID NO: 2490443 - RNA, 19 nt, Artificial Sequence
  Description of Artificial Sequence: Synthetic oligonucleotide
  Antisense strand to SEQ ID NO: 2490442
ugucaaagcaccaauaugu

SEQ ID NO: 2490444 - RNA, 19 nt, Artificial Sequence
  Description of Artificial Sequence: Synthetic oligonucleotide
  Sense strand starting at position 3815 of SEQ ID NO: 1887699
gaggccuacgucggcaaau

SEQ ID NO: 2490445 - RNA, 19 nt, Artificial Sequence
  Description of Artificial Sequence: Synthetic oligonucleotide
  Antisense strand to SEQ ID NO: 2490444
auuugccgacguaggccuc

SEQ ID NO: 2490446 - RNA, 19 nt, Artificial Sequence
  Description of Artificial Sequence: Synthetic oligonucleotide
  Sense strand starting at position 3850 of SEQ ID NO: 1887699
ucaagaauggccuggcuaa

SEQ ID NO: 2490447 - RNA, 19 nt, Artificial Sequence
  Description of Artificial Sequence: Synthetic oligonucleotide
  Antisense strand to SEQ ID NO: 2490446
uuagccaggccauucuuga

SEQ ID NO: 2490448 - RNA, 19 nt, Artificial Sequence
  Description of Artificial Sequence: Synthetic oligonucleotide
  Sense strand starting at position 3871 of SEQ ID NO: 1887699
uggugaaacugugucuaaa

SEQ ID NO: 2490449 - RNA, 19 nt, Artificial Sequence
  Description of Artificial Sequence: Synthetic oligonucleotide
  Antisense strand to SEQ ID NO: 2490448
uuuagacacaguuucacca

SEQ ID NO: 2490450 - RNA, 19 nt, Artificial Sequence
  Description of Artificial Sequence: Synthetic oligonucleotide
  Sense strand starting at position 19 of SEQ ID NO: 1887700
uggagucuaagauguugaa

SEQ ID NO: 2490451 - RNA, 19 nt, Artificial Sequence
  Description of Artificial Sequence: Synthetic oligonucleotide
  Antisense strand to SEQ ID NO: 2490450
uucaacaucuuagacucca

SEQ ID NO: 2490452 - RNA, 19 nt, Artificial Sequence
  Description of Artificial Sequence: Synthetic oligonucleotide
  Sense strand starting at position 85 of SEQ ID NO: 1887700
gcuaguggaucaccugaaa

SEQ ID NO: 2490453 - RNA, 19 nt, Artificial Sequence
  Description of Artificial Sequence: Synthetic oligonucleotide
  Antisense strand to SEQ ID NO: 2490452
uuucaggugauccacuagc

SEQ ID NO: 2490454 - RNA, 19 nt, Artificial Sequence
  Description of Artificial Sequence: Synthetic oligonucleotide
  Sense strand starting at position 319 of SEQ ID NO: 1887700
ggugccugaugccugaauu

SEQ ID NO: 2490455 - RNA, 19 nt, Artificial Sequence
  Description of Artificial Sequence: Synthetic oligonucleotide
  Antisense strand to SEQ ID NO: 2490454
aauucaggcaucaggcacc

SEQ ID NO: 2490456 - RNA, 19 nt, Artificial Sequence
  Description of Artificial Sequence: Synthetic oligonucleotide
  Sense strand starting at position 387 of SEQ ID NO: 1887700
uggaguuuccggugagcag

SEQ ID NO: 2490457 - RNA, 19 nt, Artificial Sequence
  Description of Artificial Sequence: Synthetic oligonucleotide
  Antisense strand to SEQ ID NO: 2490456
cugcucaccggaaacucca

SEQ ID NO: 2490458 - RNA, 19 nt, Artificial Sequence
  Description of Artificial Sequence: Synthetic oligonucleotide
  Sense strand starting at position 388 of SEQ ID NO: 1887700
ggaguuuccggugagcaga

SEQ ID NO: 2490459 - RNA, 19 nt, Artificial Sequence
  Description of Artificial Sequence: Synthetic oligonucleotide
  Antisense strand to SEQ ID NO: 2490458
ucugcucaccggaaacucc

SEQ ID NO: 2490460 - RNA, 19 nt, Artificial Sequence
  Description of Artificial Sequence: Synthetic oligonucleotide
  Sense strand starting at position 430 of SEQ ID NO: 1887700
gaaacaagagugugucuca

SEQ ID NO: 2490461 - RNA, 19 nt, Artificial Sequence
  Description of Artificial Sequence: Synthetic oligonucleotide
  Antisense strand to SEQ ID NO: 2490460
ugagacacacucuuguuuc

SEQ ID NO: 2490462 - RNA, 19 nt, Artificial Sequence
  Description of Artificial Sequence: Synthetic oligonucleotide
  Sense strand starting at position 431 of SEQ ID NO: 1887700
aaacaagagugugucucaa

SEQ ID NO: 2490463 - RNA, 19 nt, Artificial Sequence
  Description of Artificial Sequence: Synthetic oligonucleotide
  Antisense strand to SEQ ID NO: 2490462
uugagacacacucuuguuu

SEQ ID NO: 2490464 - RNA, 19 nt, Artificial Sequence
  Description of Artificial Sequence: Synthetic oligonucleotide
  Sense strand starting at position 486 of SEQ ID NO: 1887700
agaaaucuugguggaaggu

SEQ ID NO: 2490465 - RNA, 19 nt, Artificial Sequence
  Description of Artificial Sequence: Synthetic oligonucleotide
  Antisense strand to SEQ ID NO: 2490464
accuuccaccaagauuucu

SEQ ID NO: 2490466 - RNA, 19 nt, Artificial Sequence
  Description of Artificial Sequence: Synthetic oligonucleotide
  Sense strand starting at position 528 of SEQ ID NO: 1887700
uagaaagccugucuuggaa

SEQ ID NO: 2490467 - RNA, 19 nt, Artificial Sequence
  Description of Artificial Sequence: Synthetic oligonucleotide
  Antisense strand to SEQ ID NO: 2490466
uuccaagacaggcuuucua

SEQ ID NO: 2490468 - RNA, 19 nt, Artificial Sequence
  Description of Artificial Sequence: Synthetic oligonucleotide
  Sense strand starting at position 885 of SEQ ID NO: 1887700
augcauauugcauauauga

SEQ ID NO: 2490469 - RNA, 19 nt, Artificial Sequence
  Description of Artificial Sequence: Synthetic oligonucleotide
  Antisense strand to SEQ ID NO: 2490468
ucauauaugcaauaugcau

SEQ ID NO: 2490470 - RNA, 19 nt, Artificial Sequence
  Description of Artificial Sequence: Synthetic oligonucleotide
  Sense strand starting at position 892 of SEQ ID NO: 1887700
uugcauauaugacugcaua

SEQ ID NO: 2490471 - RNA, 19 nt, Artificial Sequence
  Description of Artificial Sequence: Synthetic oligonucleotide
  Antisense strand to SEQ ID NO: 2490470
uaugcagucauauaugcaa

SEQ ID NO: 2490472 - RNA, 19 nt, Artificial Sequence
  Description of Artificial Sequence: Synthetic oligonucleotide
  Sense strand starting at position 893 of SEQ ID NO: 1887700
ugcauauaugacugcauau

SEQ ID NO: 2490473 - RNA, 19 nt, Artificial Sequence
  Description of Artificial Sequence: Synthetic oligonucleotide
  Antisense strand to SEQ ID NO: 2490472
auaugcagucauauaugca

SEQ ID NO: 2490474 - RNA, 19 nt, Artificial Sequence
  Description of Artificial Sequence: Synthetic oligonucleotide
  Sense strand starting at position 907 of SEQ ID NO: 1887700
cauauaugaccuggucaug

SEQ ID NO: 2490475 - RNA, 19 nt, Artificial Sequence
  Description of Artificial Sequence: Synthetic oligonucleotide
  Antisense strand to SEQ ID NO: 2490474
caugaccaggucauauaug

SEQ ID NO: 2490476 - RNA, 19 nt, Artificial Sequence
  Description of Artificial Sequence: Synthetic oligonucleotide
  Sense strand starting at position 1062 of SEQ ID NO: 1887700
uuuauaaaucagugccaga

SEQ ID NO: 2490477 - RNA, 19 nt, Artificial Sequence
  Description of Artificial Sequence: Synthetic oligonucleotide
  Antisense strand to SEQ ID NO: 2490476
ucuggcacugauuuauaaa

SEQ ID NO: 2490478 - RNA, 19 nt, Artificial Sequence
  Description of Artificial Sequence: Synthetic oligonucleotide
  Sense strand starting at position 1712 of SEQ ID NO: 1887700
gagagacucuguccgcuaa

SEQ ID NO: 2490479 - RNA, 19 nt, Artificial Sequence
  Description of Artificial Sequence: Synthetic oligonucleotide
  Antisense strand to SEQ ID NO: 2490478
uuagcggacagagucucuc

SEQ ID NO: 2490480 - RNA, 19 nt, Artificial Sequence
  Description of Artificial Sequence: Synthetic oligonucleotide
  Sense strand starting at position 1713 of SEQ ID NO: 1887700
agagacucuguccgcuaaa

SEQ ID NO: 2490481 - RNA, 19 nt, Artificial Sequence
  Description of Artificial Sequence: Synthetic oligonucleotide
  Antisense strand to SEQ ID NO: 2490480
uuuagcggacagagucucu

SEQ ID NO: 2490482 - RNA, 19 nt, Artificial Sequence
  Description of Artificial Sequence: Synthetic oligonucleotide
  Sense strand starting at position 1843 of SEQ ID NO: 1887700
ucguccaagccucaugaua

SEQ ID NO: 2490483 - RNA, 19 nt, Artificial Sequence
  Description of Artificial Sequence: Synthetic oligonucleotide
  Antisense strand to SEQ ID NO: 2490482
uaucaugaggcuuggacga

SEQ ID NO: 2490484 - RNA, 19 nt, Artificial Sequence
  Description of Artificial Sequence: Synthetic oligonucleotide
  Sense strand starting at position 1854 of SEQ ID NO: 1887700
ucaugauaagcaugcucua

SEQ ID NO: 2490485 - RNA, 19 nt, Artificial Sequence
  Description of Artificial Sequence: Synthetic oligonucleotide
  Antisense strand to SEQ ID NO: 2490484
uagagcaugcuuaucauga

SEQ ID NO: 2490486 - RNA, 19 nt, Artificial Sequence
  Description of Artificial Sequence: Synthetic oligonucleotide
  Sense strand starting at position 1857 of SEQ ID NO: 1887700
ugauaagcaugcucuacaa

SEQ ID NO: 2490487 - RNA, 19 nt, Artificial Sequence
  Description of Artificial Sequence: Synthetic oligonucleotide
  Antisense strand to SEQ ID NO: 2490486
uuguagagcaugcuuauca

SEQ ID NO: 2490488 - RNA, 19 nt, Artificial Sequence
  Description of Artificial Sequence: Synthetic oligonucleotide
  Sense strand starting at position 1872 of SEQ ID NO: 1887700
acaaauguauuaccgagau

SEQ ID NO: 2490489 - RNA, 19 nt, Artificial Sequence
  Description of Artificial Sequence: Synthetic oligonucleotide
  Antisense strand to SEQ ID NO: 2490488
aucucgguaauacauuugu

SEQ ID NO: 2490490 - RNA, 19 nt, Artificial Sequence
  Description of Artificial Sequence: Synthetic oligonucleotide
  Sense strand starting at position 1876 of SEQ ID NO: 1887700
auguauuaccgagauaagc

SEQ ID NO: 2490491 - RNA, 19 nt, Artificial Sequence
  Description of Artificial Sequence: Synthetic oligonucleotide
  Antisense strand to SEQ ID NO: 2490490
gcuuaucucgguaauacau

SEQ ID NO: 2490492 - RNA, 19 nt, Artificial Sequence
  Description of Artificial Sequence: Synthetic oligonucleotide
  Sense strand starting at position 1878 of SEQ ID NO: 1887700
guauuaccgagauaagcau

SEQ ID NO: 2490493 - RNA, 19 nt, Artificial Sequence
  Description of Artificial Sequence: Synthetic oligonucleotide
  Antisense strand to SEQ ID NO: 2490492
augcuuaucucgguaauac

SEQ ID NO: 2490494 - RNA, 19 nt, Artificial Sequence
  Description of Artificial Sequence: Synthetic oligonucleotide
  Sense strand starting at position 1998 of SEQ ID NO: 1887700
gagaucuucuugcuccaga

SEQ ID NO: 2490495 - RNA, 19 nt, Artificial Sequence
  Description of Artificial Sequence: Synthetic oligonucleotide
  Antisense strand to SEQ ID NO: 2490494
ucuggagcaagaagaucuc

SEQ ID NO: 2490496 - RNA, 19 nt, Artificial Sequence
  Description of Artificial Sequence: Synthetic oligonucleotide
  Sense strand starting at position 1999 of SEQ ID NO: 1887700
agaucuucuugcuccagaa

SEQ ID NO: 2490497 - RNA, 19 nt, Artificial Sequence
  Description of Artificial Sequence: Synthetic oligonucleotide
  Antisense strand to SEQ ID NO: 2490496
uucuggagcaagaagaucu

SEQ ID NO: 2490498 - RNA, 19 nt, Artificial Sequence
  Description of Artificial Sequence: Synthetic oligonucleotide
  Sense strand starting at position 2009 of SEQ ID NO: 1887700
gcuccagaacucuggguuu

SEQ ID NO: 2490499 - RNA, 19 nt, Artificial Sequence
  Description of Artificial Sequence: Synthetic oligonucleotide
  Antisense strand to SEQ ID NO: 2490498
aaacccagaguucuggagc

SEQ ID NO: 2490500 - RNA, 19 nt, Artificial Sequence
  Description of Artificial Sequence: Synthetic oligonucleotide
  Sense strand starting at position 2039 of SEQ ID NO: 1887700
uuuccuugcccagguuaaa

SEQ ID NO: 2490501 - RNA, 19 nt, Artificial Sequence
  Description of Artificial Sequence: Synthetic oligonucleotide
  Antisense strand to SEQ ID NO: 2490500
uuuaaccugggcaaggaaa

SEQ ID NO: 2490502 - RNA, 19 nt, Artificial Sequence
  Description of Artificial Sequence: Synthetic oligonucleotide
  Sense strand starting at position 2145 of SEQ ID NO: 1887700
aguuccuugcuacaaagaa

SEQ ID NO: 2490503 - RNA, 19 nt, Artificial Sequence
  Description of Artificial Sequence: Synthetic oligonucleotide
  Antisense strand to SEQ ID NO: 2490502
uucuuuguagcaaggaacu

SEQ ID NO: 2490504 - RNA, 19 nt, Artificial Sequence
  Description of Artificial Sequence: Synthetic oligonucleotide
  Sense strand starting at position 2167 of SEQ ID NO: 1887700
gcagguuagccuuaucccu

SEQ ID NO: 2490505 - RNA, 19 nt, Artificial Sequence
  Description of Artificial Sequence: Synthetic oligonucleotide
  Antisense strand to SEQ ID NO: 2490504
agggauaaggcuaaccugc

SEQ ID NO: 2490506 - RNA, 19 nt, Artificial Sequence
  Description of Artificial Sequence: Synthetic oligonucleotide
  Sense strand starting at position 2169 of SEQ ID NO: 1887700
agguuagccuuaucccuaa

SEQ ID NO: 2490507 - RNA, 19 nt, Artificial Sequence
  Description of Artificial Sequence: Synthetic oligonucleotide
  Antisense strand to SEQ ID NO: 2490506
uuagggauaaggcuaaccu

SEQ ID NO: 2490508 - RNA, 19 nt, Artificial Sequence
  Description of Artificial Sequence: Synthetic oligonucleotide
  Sense strand starting at position 2470 of SEQ ID NO: 1887700
aauuuagugucagggacaa

SEQ ID NO: 2490509 - RNA, 19 nt, Artificial Sequence
  Description of Artificial Sequence: Synthetic oligonucleotide
  Antisense strand to SEQ ID NO: 2490508
uugucccugacacuaaauu

SEQ ID NO: 2490510 - RNA, 19 nt, Artificial Sequence
  Description of Artificial Sequence: Synthetic oligonucleotide
  Sense strand starting at position 2545 of SEQ ID NO: 1887700
auugacauccauugggauu

SEQ ID NO: 2490511 - RNA, 19 nt, Artificial Sequence
  Description of Artificial Sequence: Synthetic oligonucleotide
  Antisense strand to SEQ ID NO: 2490510
aaucccaauggaugucaau

SEQ ID NO: 2490512 - RNA, 19 nt, Artificial Sequence
  Description of Artificial Sequence: Synthetic oligonucleotide
  Sense strand starting at position 2548 of SEQ ID NO: 1887700
gacauccauugggauuaca

SEQ ID NO: 2490513 - RNA, 19 nt, Artificial Sequence
  Description of Artificial Sequence: Synthetic oligonucleotide
  Antisense strand to SEQ ID NO: 2490512
uguaaucccaauggauguc

SEQ ID NO: 2490514 - RNA, 19 nt, Artificial Sequence
  Description of Artificial Sequence: Synthetic oligonucleotide
  Sense strand starting at position 2577 of SEQ ID NO: 1887700
gauagauguggaggccuau

SEQ ID NO: 2490515 - RNA, 19 nt, Artificial Sequence
  Description of Artificial Sequence: Synthetic oligonucleotide
  Antisense strand to SEQ ID NO: 2490514
auaggccuccacaucuauc

SEQ ID NO: 2490516 - RNA, 19 nt, Artificial Sequence
  Description of Artificial Sequence: Synthetic oligonucleotide
  Sense strand starting at position 2906 of SEQ ID NO: 1887700
caugguuuggauugauuaa

SEQ ID NO: 2490517 - RNA, 19 nt, Artificial Sequence
  Description of Artificial Sequence: Synthetic oligonucleotide
  Antisense strand to SEQ ID NO: 2490516
uuaaucaauccaaaccaug

SEQ ID NO: 2490518 - RNA, 19 nt, Artificial Sequence
  Description of Artificial Sequence: Synthetic oligonucleotide
  Sense strand starting at position 3065 of SEQ ID NO: 1887700
gugaucagugcaugguaua

SEQ ID NO: 2490519 - RNA, 19 nt, Artificial Sequence
  Description of Artificial Sequence: Synthetic oligonucleotide
  Antisense strand to SEQ ID NO: 2490518
uauaccaugcacugaucac

SEQ ID NO: 2490520 - RNA, 19 nt, Artificial Sequence
  Description of Artificial Sequence: Synthetic oligonucleotide
  Sense strand starting at position 3158 of SEQ ID NO: 1887700
cgugucaccuaucuuugaa

SEQ ID NO: 2490521 - RNA, 19 nt, Artificial Sequence
  Description of Artificial Sequence: Synthetic oligonucleotide
  Antisense strand to SEQ ID NO: 2490520
uucaaagauaggugacacg

SEQ ID NO: 2490522 - RNA, 19 nt, Artificial Sequence
  Description of Artificial Sequence: Synthetic oligonucleotide
  Sense strand starting at position 3161 of SEQ ID NO: 1887700
gucaccuaucuuugaaaug

SEQ ID NO: 2490523 - RNA, 19 nt, Artificial Sequence
  Description of Artificial Sequence: Synthetic oligonucleotide
  Antisense strand to SEQ ID NO: 2490522
cauuucaaagauaggugac

SEQ ID NO: 2490524 - RNA, 19 nt, Artificial Sequence
  Description of Artificial Sequence: Synthetic oligonucleotide
  Sense strand starting at position 3477 of SEQ ID NO: 1887700
agcuauuugcgaggcuaag

SEQ ID NO: 2490525 - RNA, 19 nt, Artificial Sequence
  Description of Artificial Sequence: Synthetic oligonucleotide
  Antisense strand to SEQ ID NO: 2490524
cuuagccucgcaaauagcu

SEQ ID NO: 2490526 - RNA, 19 nt, Artificial Sequence
  Description of Artificial Sequence: Synthetic oligonucleotide
  Sense strand starting at position 3567 of SEQ ID NO: 1887700
gggaguuacagugagugga

SEQ ID NO: 2490527 - RNA, 19 nt, Artificial Sequence
  Description of Artificial Sequence: Synthetic oligonucleotide
  Antisense strand to SEQ ID NO: 2490526
uccacucacuguaacuccc

SEQ ID NO: 2490528 - RNA, 19 nt, Artificial Sequence
  Description of Artificial Sequence: Synthetic oligonucleotide
  Sense strand starting at position 3905 of SEQ ID NO: 1887700
cugagauuccgccacugga

SEQ ID NO: 2490529 - RNA, 19 nt, Artificial Sequence
  Description of Artificial Sequence: Synthetic oligonucleotide
  Antisense strand to SEQ ID NO: 2490528
uccaguggcggaaucucag

SEQ ID NO: 2490530 - RNA, 19 nt, Artificial Sequence
  Description of Artificial Sequence: Synthetic oligonucleotide
  Sense strand starting at position 58 of SEQ ID NO: 1887701
gaaguaucaccugagcuca

SEQ ID NO: 2490531 - RNA, 19 nt, Artificial Sequence
  Description of Artificial Sequence: Synthetic oligonucleotide
  Antisense strand to SEQ ID NO: 2490530
ugagcucaggugauacuuc

SEQ ID NO: 2490532 - RNA, 19 nt, Artificial Sequence
  Description of Artificial Sequence: Synthetic oligonucleotide
  Sense strand starting at position 107 of SEQ ID NO: 1887701
guaagcccauguguauaaa

SEQ ID NO: 2490533 - RNA, 19 nt, Artificial Sequence
  Description of Artificial Sequence: Synthetic oligonucleotide
  Antisense strand to SEQ ID NO: 2490532
uuuauacacaugggcuuac

SEQ ID NO: 2490534 - RNA, 19 nt, Artificial Sequence
  Description of Artificial Sequence: Synthetic oligonucleotide
  Sense strand starting at position 617 of SEQ ID NO: 1887701
gguugaaauaagcgaagau

SEQ ID NO: 2490535 - RNA, 19 nt, Artificial Sequence
  Description of Artificial Sequence: Synthetic oligonucleotide
  Antisense strand to SEQ ID NO: 2490534
aucuucgcuuauuucaacc

SEQ ID NO: 2490536 - RNA, 19 nt, Artificial Sequence
  Description of Artificial Sequence: Synthetic oligonucleotide
  Sense strand starting at position 618 of SEQ ID NO: 1887701
guugaaauaagcgaagauc

SEQ ID NO: 2490537 - RNA, 19 nt, Artificial Sequence
  Description of Artificial Sequence: Synthetic oligonucleotide
  Antisense strand to SEQ ID NO: 2490536
gaucuucgcuuauuucaac

SEQ ID NO: 2490538 - RNA, 19 nt, Artificial Sequence
  Description of Artificial Sequence: Synthetic oligonucleotide
  Sense strand starting at position 740 of SEQ ID NO: 1887701
cguggugucagguaccuau

SEQ ID NO: 2490539 - RNA, 19 nt, Artificial Sequence
  Description of Artificial Sequence: Synthetic oligonucleotide
  Antisense strand to SEQ ID NO: 2490538
auagguaccugacaccacg

SEQ ID NO: 2490540 - RNA, 19 nt, Artificial Sequence
  Description of Artificial Sequence: Synthetic oligonucleotide
  Sense strand starting at position 743 of SEQ ID NO: 1887701
ggugucagguaccuauaau

SEQ ID NO: 2490541 - RNA, 19 nt, Artificial Sequence
  Description of Artificial Sequence: Synthetic oligonucleotide
  Antisense strand to SEQ ID NO: 2490540
auuauagguaccugacacc

SEQ ID NO: 2490542 - RNA, 19 nt, Artificial Sequence
  Description of Artificial Sequence: Synthetic oligonucleotide
  Sense strand starting at position 744 of SEQ ID NO: 1887701
gugucagguaccuauaauc

SEQ ID NO: 2490543 - RNA, 19 nt, Artificial Sequence
  Description of Artificial Sequence: Synthetic oligonucleotide
  Antisense strand to SEQ ID NO: 2490542
gauuauagguaccugacac

SEQ ID NO: 2490544 - RNA, 19 nt, Artificial Sequence
  Description of Artificial Sequence: Synthetic oligonucleotide
  Sense strand starting at position 786 of SEQ ID NO: 1887701
aggagaacggcuugaaacu

SEQ ID NO: 2490545 - RNA, 19 nt, Artificial Sequence
  Description of Artificial Sequence: Synthetic oligonucleotide
  Antisense strand to SEQ ID NO: 2490544
aguuucaagccguucuccu

SEQ ID NO: 2490546 - RNA, 19 nt, Artificial Sequence
  Description of Artificial Sequence: Synthetic oligonucleotide
  Sense strand starting at position 1020 of SEQ ID NO: 1887701
gcaaauguauuagcaagau

SEQ ID NO: 2490547 - RNA, 19 nt, Artificial Sequence
  Description of Artificial Sequence: Synthetic oligonucleotide
  Antisense strand to SEQ ID NO: 2490546
aucuugcuaauacauuugc

SEQ ID NO: 2490548 - RNA, 19 nt, Artificial Sequence
  Description of Artificial Sequence: Synthetic oligonucleotide
  Sense strand starting at position 1374 of SEQ ID NO: 1887701
agcaaugacuacuagacau

SEQ ID NO: 2490549 - RNA, 19 nt, Artificial Sequence
  Description of Artificial Sequence: Synthetic oligonucleotide
  Antisense strand to SEQ ID NO: 2490548
augucuaguagucauugcu

SEQ ID NO: 2490550 - RNA, 19 nt, Artificial Sequence
  Description of Artificial Sequence: Synthetic oligonucleotide
  Sense strand starting at position 1797 of SEQ ID NO: 1887701
gagugagacucugauuuaa

SEQ ID NO: 2490551 - RNA, 19 nt, Artificial Sequence
  Description of Artificial Sequence: Synthetic oligonucleotide
  Antisense strand to SEQ ID NO: 2490550
uuaaaucagagucucacuc

SEQ ID NO: 2490552 - RNA, 19 nt, Artificial Sequence
  Description of Artificial Sequence: Synthetic oligonucleotide
  Sense strand starting at position 1858 of SEQ ID NO: 1887701
uuauaagcaugcucugcaa

SEQ ID NO: 2490553 - RNA, 19 nt, Artificial Sequence
  Description of Artificial Sequence: Synthetic oligonucleotide
  Antisense strand to SEQ ID NO: 2490552
uugcagagcaugcuuauaa

SEQ ID NO: 2490554 - RNA, 19 nt, Artificial Sequence
  Description of Artificial Sequence: Synthetic oligonucleotide
  Sense strand starting at position 2204 of SEQ ID NO: 1887701
gaguuucgccuccagaaag

SEQ ID NO: 2490555 - RNA, 19 nt, Artificial Sequence
  Description of Artificial Sequence: Synthetic oligonucleotide
  Antisense strand to SEQ ID NO: 2490554
cuuucuggaggcgaaacuc

SEQ ID NO: 2490556 - RNA, 19 nt, Artificial Sequence
  Description of Artificial Sequence: Synthetic oligonucleotide
  Sense strand starting at position 2404 of SEQ ID NO: 1887701
acuugaucgcaggaguuaa

SEQ ID NO: 2490557 - RNA, 19 nt, Artificial Sequence
  Description of Artificial Sequence: Synthetic oligonucleotide
  Antisense strand to SEQ ID NO: 2490556
uuaacuccugcgaucaagu

SEQ ID NO: 2490558 - RNA, 19 nt, Artificial Sequence
  Description of Artificial Sequence: Synthetic oligonucleotide
  Sense strand starting at position 2408 of SEQ ID NO: 1887701
gaucgcaggaguuaagagu

SEQ ID NO: 2490559 - RNA, 19 nt, Artificial Sequence
  Description of Artificial Sequence: Synthetic oligonucleotide
  Antisense strand to SEQ ID NO: 2490558
acucuuaacuccugcgauc

SEQ ID NO: 2490560 - RNA, 19 nt, Artificial Sequence
  Description of Artificial Sequence: Synthetic oligonucleotide
  Sense strand starting at position 2443 of SEQ ID NO: 1887701
gcugaaaccucaucaguac

SEQ ID NO: 2490561 - RNA, 19 nt, Artificial Sequence
  Description of Artificial Sequence: Synthetic oligonucleotide
  Antisense strand to SEQ ID NO: 2490560
guacugaugagguuucagc

SEQ ID NO: 2490562 - RNA, 19 nt, Artificial Sequence
  Description of Artificial Sequence: Synthetic oligonucleotide
  Sense strand starting at position 2498 of SEQ ID NO: 1887701
gccuguagacacuaaucca

SEQ ID NO: 2490563 - RNA, 19 nt, Artificial Sequence
  Description of Artificial Sequence: Synthetic oligonucleotide
  Antisense strand to SEQ ID NO: 2490562
uggauuagugucuacaggc

SEQ ID NO: 2490564 - RNA, 19 nt, Artificial Sequence
  Description of Artificial Sequence: Synthetic oligonucleotide
  Sense strand starting at position 2638 of SEQ ID NO: 1887701
acuccaaagugauauaaga

SEQ ID NO: 2490565 - RNA, 19 nt, Artificial Sequence
  Description of Artificial Sequence: Synthetic oligonucleotide
  Antisense strand to SEQ ID NO: 2490564
ucuuauaucacuuuggagu

SEQ ID NO: 2490566 - RNA, 19 nt, Artificial Sequence
  Description of Artificial Sequence: Synthetic oligonucleotide
  Sense strand starting at position 2646 of SEQ ID NO: 1887701
gugauauaagaguguucuc

SEQ ID NO: 2490567 - RNA, 19 nt, Artificial Sequence
  Description of Artificial Sequence: Synthetic oligonucleotide
  Antisense strand to SEQ ID NO: 2490566
gagaacacucuuauaucac

SEQ ID NO: 2490568 - RNA, 19 nt, Artificial Sequence
  Description of Artificial Sequence: Synthetic oligonucleotide
  Sense strand starting at position 2649 of SEQ ID NO: 1887701
auauaagaguguucucugu

SEQ ID NO: 2490569 - RNA, 19 nt, Artificial Sequence
  Description of Artificial Sequence: Synthetic oligonucleotide
  Antisense strand to SEQ ID NO: 2490568
acagagaacacucuuauau

SEQ ID NO: 2490570 - RNA, 19 nt, Artificial Sequence
  Description of Artificial Sequence: Synthetic oligonucleotide
  Sense strand starting at position 2651 of SEQ ID NO: 1887701
auaagaguguucucugugu

SEQ ID NO: 2490571 - RNA, 19 nt, Artificial Sequence
  Description of Artificial Sequence: Synthetic oligonucleotide
  Antisense strand to SEQ ID NO: 2490570
acacagagaacacucuuau

SEQ ID NO: 2490572 - RNA, 19 nt, Artificial Sequence
  Description of Artificial Sequence: Synthetic oligonucleotide
  Sense strand starting at position 2653 of SEQ ID NO: 1887701
aagaguguucucuguguau

SEQ ID NO: 2490573 - RNA, 19 nt, Artificial Sequence
  Description of Artificial Sequence: Synthetic oligonucleotide
  Antisense strand to SEQ ID NO: 2490572
auacacagagaacacucuu

SEQ ID NO: 2490574 - RNA, 19 nt, Artificial Sequence
  Description of Artificial Sequence: Synthetic oligonucleotide
  Sense strand starting at position 2655 of SEQ ID NO: 1887701
gaguguucucuguguauag

SEQ ID NO: 2490575 - RNA, 19 nt, Artificial Sequence
  Description of Artificial Sequence: Synthetic oligonucleotide
  Antisense strand to SEQ ID NO: 2490574
cuauacacagagaacacuc

SEQ ID NO: 2490576 - RNA, 19 nt, Artificial Sequence
  Description of Artificial Sequence: Synthetic oligonucleotide
  Sense strand starting at position 2656 of SEQ ID NO: 1887701
aguguucucuguguauaga

SEQ ID NO: 2490577 - RNA, 19 nt, Artificial Sequence
  Description of Artificial Sequence: Synthetic oligonucleotide
  Antisense strand to SEQ ID NO: 2490576
ucuauacacagagaacacu

SEQ ID NO: 2490578 - RNA, 19 nt, Artificial Sequence
  Description of Artificial Sequence: Synthetic oligonucleotide
  Sense strand starting at position 2657 of SEQ ID NO: 1887701
guguucucuguguauagaa

SEQ ID NO: 2490579 - RNA, 19 nt, Artificial Sequence
  Description of Artificial Sequence: Synthetic oligonucleotide
  Antisense strand to SEQ ID NO: 2490578
uucuauacacagagaacac

SEQ ID NO: 2490580 - RNA, 19 nt, Artificial Sequence
  Description of Artificial Sequence: Synthetic oligonucleotide
  Sense strand starting at position 2659 of SEQ ID NO: 1887701
guucucuguguauagaaga

SEQ ID NO: 2490581 - RNA, 19 nt, Artificial Sequence
  Description of Artificial Sequence: Synthetic oligonucleotide
  Antisense strand to SEQ ID NO: 2490580
ucuucuauacacagagaac

SEQ ID NO: 2490582 - RNA, 19 nt, Artificial Sequence
  Description of Artificial Sequence: Synthetic oligonucleotide
  Sense strand starting at position 2664 of SEQ ID NO: 1887701
cuguguauagaagacuauu

SEQ ID NO: 2490583 - RNA, 19 nt, Artificial Sequence
  Description of Artificial Sequence: Synthetic oligonucleotide
  Antisense strand to SEQ ID NO: 2490582
aauagucuucuauacacag

SEQ ID NO: 2490584 - RNA, 19 nt, Artificial Sequence
  Description of Artificial Sequence: Synthetic oligonucleotide
  Sense strand starting at position 2703 of SEQ ID NO: 1887701
acagaacauugugaugaaa

SEQ ID NO: 2490585 - RNA, 19 nt, Artificial Sequence
  Description of Artificial Sequence: Synthetic oligonucleotide
  Antisense strand to SEQ ID NO: 2490584
uuucaucacaauguucugu

SEQ ID NO: 2490586 - RNA, 19 nt, Artificial Sequence
  Description of Artificial Sequence: Synthetic oligonucleotide
  Sense strand starting at position 2705 of SEQ ID NO: 1887701
agaacauugugaugaaaua

SEQ ID NO: 2490587 - RNA, 19 nt, Artificial Sequence
  Description of Artificial Sequence: Synthetic oligonucleotide
  Antisense strand to SEQ ID NO: 2490586
uauuucaucacaauguucu

SEQ ID NO: 2490588 - RNA, 19 nt, Artificial Sequence
  Description of Artificial Sequence: Synthetic oligonucleotide
  Sense strand starting at position 2803 of SEQ ID NO: 1887701
acauauuggugcuuugaca

SEQ ID NO: 2490589 - RNA, 19 nt, Artificial Sequence
  Description of Artificial Sequence: Synthetic oligonucleotide
  Antisense strand to SEQ ID NO: 2490588
ugucaaagcaccaauaugu

SEQ ID NO: 2490590 - RNA, 19 nt, Artificial Sequence
  Description of Artificial Sequence: Synthetic oligonucleotide
  Sense strand starting at position 2963 of SEQ ID NO: 1887701
gaggccuacgucggcaaau

SEQ ID NO: 2490591 - RNA, 19 nt, Artificial Sequence
  Description of Artificial Sequence: Synthetic oligonucleotide
  Antisense strand to SEQ ID NO: 2490590
auuugccgacguaggccuc

SEQ ID NO: 2490592 - RNA, 19 nt, Artificial Sequence
  Description of Artificial Sequence: Synthetic oligonucleotide
  Sense strand starting at position 2998 of SEQ ID NO: 1887701
ucaagaauggccuggcuaa

SEQ ID NO: 2490593 - RNA, 19 nt, Artificial Sequence
  Description of Artificial Sequence: Synthetic oligonucleotide
  Antisense strand to SEQ ID NO: 2490592
uuagccaggccauucuuga

SEQ ID NO: 2490594 - RNA, 19 nt, Artificial Sequence
  Description of Artificial Sequence: Synthetic oligonucleotide
  Sense strand starting at position 3019 of SEQ ID NO: 1887701
uggugaaacugugucuaaa

SEQ ID NO: 2490595 - RNA, 19 nt, Artificial Sequence
  Description of Artificial Sequence: Synthetic oligonucleotide
  Antisense strand to SEQ ID NO: 2490594
uuuagacacaguuucacca

SEQ ID NO: 2490596 - RNA, 19 nt, Artificial Sequence
  Description of Artificial Sequence: Synthetic oligonucleotide
  Sense strand starting at position 3267 of SEQ ID NO: 1887701
ugucucaaauagucaaaga

SEQ ID NO: 2490597 - RNA, 19 nt, Artificial Sequence
  Description of Artificial Sequence: Synthetic oligonucleotide
  Antisense strand to SEQ ID NO: 2490596
ucuuugacuauuugagaca

SEQ ID NO: 2490598 - RNA, 19 nt, Artificial Sequence
  Description of Artificial Sequence: Synthetic oligonucleotide
  Sense strand starting at position 3308 of SEQ ID NO: 1887701
cucucuucuugauugugua

SEQ ID NO: 2490599 - RNA, 19 nt, Artificial Sequence
  Description of Artificial Sequence: Synthetic oligonucleotide
  Antisense strand to SEQ ID NO: 2490598
uacacaaucaagaagagag

SEQ ID NO: 2490600 - RNA, 19 nt, Artificial Sequence
  Description of Artificial Sequence: Synthetic oligonucleotide
  Sense strand starting at position 3309 of SEQ ID NO: 1887701
ucucuucuugauuguguau

SEQ ID NO: 2490601 - RNA, 19 nt, Artificial Sequence
  Description of Artificial Sequence: Synthetic oligonucleotide
  Antisense strand to SEQ ID NO: 2490600
auacacaaucaagaagaga

SEQ ID NO: 2490602 - RNA, 19 nt, Artificial Sequence
  Description of Artificial Sequence: Synthetic oligonucleotide
  Sense strand starting at position 3321 of SEQ ID NO: 1887701
uguguaugggcucacuuaa

SEQ ID NO: 2490603 - RNA, 19 nt, Artificial Sequence
  Description of Artificial Sequence: Synthetic oligonucleotide
  Antisense strand to SEQ ID NO: 2490602
uuaagugagcccauacaca

SEQ ID NO: 2490604 - RNA, 19 nt, Artificial Sequence
  Description of Artificial Sequence: Synthetic oligonucleotide
  Sense strand starting at position 3491 of SEQ ID NO: 1887701
auugcuugaacgugggauu

SEQ ID NO: 2490605 - RNA, 19 nt, Artificial Sequence
  Description of Artificial Sequence: Synthetic oligonucleotide
  Antisense strand to SEQ ID NO: 2490604
aaucccacguucaagcaau

SEQ ID NO: 2490606 - RNA, 19 nt, Artificial Sequence
  Description of Artificial Sequence: Synthetic oligonucleotide
  Sense strand starting at position 3654 of SEQ ID NO: 1887701
gagagaauggcuugaaucu

SEQ ID NO: 2490607 - RNA, 19 nt, Artificial Sequence
  Description of Artificial Sequence: Synthetic oligonucleotide
  Antisense strand to SEQ ID NO: 2490606
agauucaagccauucucuc

SEQ ID NO: 2490608 - RNA, 19 nt, Artificial Sequence
  Description of Artificial Sequence: Synthetic oligonucleotide
  Sense strand starting at position 3817 of SEQ ID NO: 1887701
ggaucuugaggucaguagu

SEQ ID NO: 2490609 - RNA, 19 nt, Artificial Sequence
  Description of Artificial Sequence: Synthetic oligonucleotide
  Antisense strand to SEQ ID NO: 2490608
acuacugaccucaagaucc

SEQ ID NO: 2490610 - RNA, 19 nt, Artificial Sequence
  Description of Artificial Sequence: Synthetic oligonucleotide
  Sense strand starting at position 239 of SEQ ID NO: 1887702
agugguucaugccuguaga

SEQ ID NO: 2490611 - RNA, 19 nt, Artificial Sequence
  Description of Artificial Sequence: Synthetic oligonucleotide
  Antisense strand to SEQ ID NO: 2490610
ucuacaggcaugaaccacu

SEQ ID NO: 2490612 - RNA, 19 nt, Artificial Sequence
  Description of Artificial Sequence: Synthetic oligonucleotide
  Sense strand starting at position 411 of SEQ ID NO: 1887702
agaguauucucugugugca

SEQ ID NO: 2490613 - RNA, 19 nt, Artificial Sequence
  Description of Artificial Sequence: Synthetic oligonucleotide
  Antisense strand to SEQ ID NO: 2490612
ugcacacagagaauacucu

SEQ ID NO: 2490614 - RNA, 19 nt, Artificial Sequence
  Description of Artificial Sequence: Synthetic oligonucleotide
  Sense strand starting at position 412 of SEQ ID NO: 1887702
gaguauucucugugugcag

SEQ ID NO: 2490615 - RNA, 19 nt, Artificial Sequence
  Description of Artificial Sequence: Synthetic oligonucleotide
  Antisense strand to SEQ ID NO: 2490614
cugcacacagagaauacuc

SEQ ID NO: 2490616 - RNA, 19 nt, Artificial Sequence
  Description of Artificial Sequence: Synthetic oligonucleotide
  Sense strand starting at position 413 of SEQ ID NO: 1887702
aguauucucugugugcaga

SEQ ID NO: 2490617 - RNA, 19 nt, Artificial Sequence
  Description of Artificial Sequence: Synthetic oligonucleotide
  Antisense strand to SEQ ID NO: 2490616
ucugcacacagagaauacu

SEQ ID NO: 2490618 - RNA, 19 nt, Artificial Sequence
  Description of Artificial Sequence: Synthetic oligonucleotide
  Sense strand starting at position 414 of SEQ ID NO: 1887702
guauucucugugugcagaa

SEQ ID NO: 2490619 - RNA, 19 nt, Artificial Sequence
  Description of Artificial Sequence: Synthetic oligonucleotide
  Antisense strand to SEQ ID NO: 2490618
uucugcacacagagaauac

SEQ ID NO: 2490620 - RNA, 19 nt, Artificial Sequence
  Description of Artificial Sequence: Synthetic oligonucleotide
  Sense strand starting at position 416 of SEQ ID NO: 1887702
auucucugugugcagaaga

SEQ ID NO: 2490621 - RNA, 19 nt, Artificial Sequence
  Description of Artificial Sequence: Synthetic oligonucleotide
  Antisense strand to SEQ ID NO: 2490620
ucuucugcacacagagaau

SEQ ID NO: 2490622 - RNA, 19 nt, Artificial Sequence
  Description of Artificial Sequence: Synthetic oligonucleotide
  Sense strand starting at position 524 of SEQ ID NO: 1887702
uguacuauaugcucacaua

SEQ ID NO: 2490623 - RNA, 19 nt, Artificial Sequence
  Description of Artificial Sequence: Synthetic oligonucleotide
  Antisense strand to SEQ ID NO: 2490622
uaugugagcauauaguaca

SEQ ID NO: 2490624 - RNA, 19 nt, Artificial Sequence
  Description of Artificial Sequence: Synthetic oligonucleotide
  Sense strand starting at position 644 of SEQ ID NO: 1887702
auccaucucugaugauaag

SEQ ID NO: 2490625 - RNA, 19 nt, Artificial Sequence
  Description of Artificial Sequence: Synthetic oligonucleotide
  Antisense strand to SEQ ID NO: 2490624
cuuaucaucagagauggau

SEQ ID NO: 2490626 - RNA, 19 nt, Artificial Sequence
  Description of Artificial Sequence: Synthetic oligonucleotide
  Sense strand starting at position 656 of SEQ ID NO: 1887702
ugauaagcaugcucugaaa

SEQ ID NO: 2490627 - RNA, 19 nt, Artificial Sequence
  Description of Artificial Sequence: Synthetic oligonucleotide
  Antisense strand to SEQ ID NO: 2490626
uuucagagcaugcuuauca

SEQ ID NO: 2490628 - RNA, 19 nt, Artificial Sequence
  Description of Artificial Sequence: Synthetic oligonucleotide
  Sense strand starting at position 795 of SEQ ID NO: 1887702
cugagaucuucuugcucug

SEQ ID NO: 2490629 - RNA, 19 nt, Artificial Sequence
  Description of Artificial Sequence: Synthetic oligonucleotide
  Antisense strand to SEQ ID NO: 2490628
cagagcaagaagaucucag

SEQ ID NO: 2490630 - RNA, 19 nt, Artificial Sequence
  Description of Artificial Sequence: Synthetic oligonucleotide
  Sense strand starting at position 1025 of SEQ ID NO: 1887702
ggcaaugccuacuacacau

SEQ ID NO: 2490631 - RNA, 19 nt, Artificial Sequence
  Description of Artificial Sequence: Synthetic oligonucleotide
  Antisense strand to SEQ ID NO: 2490630
auguguaguaggcauugcc

SEQ ID NO: 2490632 - RNA, 19 nt, Artificial Sequence
  Description of Artificial Sequence: Synthetic oligonucleotide
  Sense strand starting at position 1112 of SEQ ID NO: 1887702
ucgcuugaguuccaguaca

SEQ ID NO: 2490633 - RNA, 19 nt, Artificial Sequence
  Description of Artificial Sequence: Synthetic oligonucleotide
  Antisense strand to SEQ ID NO: 2490632
uguacuggaacucaagcga

SEQ ID NO: 2490634 - RNA, 19 nt, Artificial Sequence
  Description of Artificial Sequence: Synthetic oligonucleotide
  Sense strand starting at position 1236 of SEQ ID NO: 1887702
uguaaacgcuccucaauaa

SEQ ID NO: 2490635 - RNA, 19 nt, Artificial Sequence
  Description of Artificial Sequence: Synthetic oligonucleotide
  Antisense strand to SEQ ID NO: 2490634
uuauugaggagcguuuaca

SEQ ID NO: 2490636 - RNA, 19 nt, Artificial Sequence
  Description of Artificial Sequence: Synthetic oligonucleotide
  Sense strand starting at position 1237 of SEQ ID NO: 1887702
guaaacgcuccucaauaaa

SEQ ID NO: 2490637 - RNA, 19 nt, Artificial Sequence
  Description of Artificial Sequence: Synthetic oligonucleotide
  Antisense strand to SEQ ID NO: 2490636
uuuauugaggagcguuuac

SEQ ID NO: 2490638 - RNA, 19 nt, Artificial Sequence
  Description of Artificial Sequence: Synthetic oligonucleotide
  Sense strand starting at position 1425 of SEQ ID NO: 1887702
ggugguguaugccugcaga

SEQ ID NO: 2490639 - RNA, 19 nt, Artificial Sequence
  Description of Artificial Sequence: Synthetic oligonucleotide
  Antisense strand to SEQ ID NO: 2490638
ucugcaggcauacaccacc

SEQ ID NO: 2490640 - RNA, 19 nt, Artificial Sequence
  Description of Artificial Sequence: Synthetic oligonucleotide
  Sense strand starting at position 1680 of SEQ ID NO: 1887702
gagcaaaguuccugauacu

SEQ ID NO: 2490641 - RNA, 19 nt, Artificial Sequence
  Description of Artificial Sequence: Synthetic oligonucleotide
  Antisense strand to SEQ ID NO: 2490640
aguaucaggaacuuugcuc

SEQ ID NO: 2490642 - RNA, 19 nt, Artificial Sequence
  Description of Artificial Sequence: Synthetic oligonucleotide
  Sense strand starting at position 1681 of SEQ ID NO: 1887702
agcaaaguuccugauacug

SEQ ID NO: 2490643 - RNA, 19 nt, Artificial Sequence
  Description of Artificial Sequence: Synthetic oligonucleotide
  Antisense strand to SEQ ID NO: 2490642
caguaucaggaacuuugcu

SEQ ID NO: 2490644 - RNA, 19 nt, Artificial Sequence
  Description of Artificial Sequence: Synthetic oligonucleotide
  Sense strand starting at position 1683 of SEQ ID NO: 1887702
caaaguuccugauacugag

SEQ ID NO: 2490645 - RNA, 19 nt, Artificial Sequence
  Description of Artificial Sequence: Synthetic oligonucleotide
  Antisense strand to SEQ ID NO: 2490644
cucaguaucaggaacuuug

SEQ ID NO: 2490646 - RNA, 19 nt, Artificial Sequence
  Description of Artificial Sequence: Synthetic oligonucleotide
  Sense strand starting at position 1864 of SEQ ID NO: 1887702
gucugauuauaagcaugau

SEQ ID NO: 2490647 - RNA, 19 nt, Artificial Sequence
  Description of Artificial Sequence: Synthetic oligonucleotide
  Antisense strand to SEQ ID NO: 2490646
aucaugcuuauaaucagac

SEQ ID NO: 2490648 - RNA, 19 nt, Artificial Sequence
  Description of Artificial Sequence: Synthetic oligonucleotide
  Sense strand starting at position 1867 of SEQ ID NO: 1887702
ugauuauaagcaugaucuc

SEQ ID NO: 2490649 - RNA, 19 nt, Artificial Sequence
  Description of Artificial Sequence: Synthetic oligonucleotide
  Antisense strand to SEQ ID NO: 2490648
gagaucaugcuuauaauca

SEQ ID NO: 2490650 - RNA, 19 nt, Artificial Sequence
  Description of Artificial Sequence: Synthetic oligonucleotide
  Sense strand starting at position 2169 of SEQ ID NO: 1887702
cagguuagccuagaucauc

SEQ ID NO: 2490651 - RNA, 19 nt, Artificial Sequence
  Description of Artificial Sequence: Synthetic oligonucleotide
  Antisense strand to SEQ ID NO: 2490650
gaugaucuaggcuaaccug

SEQ ID NO: 2490652 - RNA, 19 nt, Artificial Sequence
  Description of Artificial Sequence: Synthetic oligonucleotide
  Sense strand starting at position 2191 of SEQ ID NO: 1887702
ggacaauccuccugaguuc

SEQ ID NO: 2490653 - RNA, 19 nt, Artificial Sequence
  Description of Artificial Sequence: Synthetic oligonucleotide
  Antisense strand to SEQ ID NO: 2490652
gaacucaggaggauugucc

SEQ ID NO: 2490654 - RNA, 19 nt, Artificial Sequence
  Description of Artificial Sequence: Synthetic oligonucleotide
  Sense strand starting at position 2361 of SEQ ID NO: 1887702
cugaaucucccauguugaa

SEQ ID NO: 2490655 - RNA, 19 nt, Artificial Sequence
  Description of Artificial Sequence: Synthetic oligonucleotide
  Antisense strand to SEQ ID NO: 2490654
uucaacaugggagauucag

SEQ ID NO: 2490656 - RNA, 19 nt, Artificial Sequence
  Description of Artificial Sequence: Synthetic oligonucleotide
  Sense strand starting at position 2528 of SEQ ID NO: 1887702
gugacgggugccugugauu

SEQ ID NO: 2490657 - RNA, 19 nt, Artificial Sequence
  Description of Artificial Sequence: Synthetic oligonucleotide
  Antisense strand to SEQ ID NO: 2490656
aaucacaggcacccgucac

SEQ ID NO: 2490658 - RNA, 19 nt, Artificial Sequence
  Description of Artificial Sequence: Synthetic oligonucleotide
  Sense strand starting at position 2591 of SEQ ID NO: 1887702
gaggcaaagguuugaguga

SEQ ID NO: 2490659 - RNA, 19 nt, Artificial Sequence
  Description of Artificial Sequence: Synthetic oligonucleotide
  Antisense strand to SEQ ID NO: 2490658
ucacucaaaccuuugccuc

SEQ ID NO: 2490660 - RNA, 19 nt, Artificial Sequence
  Description of Artificial Sequence: Synthetic oligonucleotide
  Sense strand starting at position 2960 of SEQ ID NO: 1887702
uccuccaugucugauggaa

SEQ ID NO: 2490661 - RNA, 19 nt, Artificial Sequence
  Description of Artificial Sequence: Synthetic oligonucleotide
  Antisense strand to SEQ ID NO: 2490660
uuccaucagacauggagga

SEQ ID NO: 2490662 - RNA, 19 nt, Artificial Sequence
  Description of Artificial Sequence: Synthetic oligonucleotide
  Sense strand starting at position 2981 of SEQ ID NO: 1887702
acgcucugcgaaguuauua

SEQ ID NO: 2490663 - RNA, 19 nt, Artificial Sequence
  Description of Artificial Sequence: Synthetic oligonucleotide
  Antisense strand to SEQ ID NO: 2490662
uaauaacuucgcagagcgu

SEQ ID NO: 2490664 - RNA, 19 nt, Artificial Sequence
  Description of Artificial Sequence: Synthetic oligonucleotide
  Sense strand starting at position 2989 of SEQ ID NO: 1887702
cgaaguuauuaccaagauc

SEQ ID NO: 2490665 - RNA, 19 nt, Artificial Sequence
  Description of Artificial Sequence: Synthetic oligonucleotide
  Antisense strand to SEQ ID NO: 2490664
gaucuugguaauaacuucg

SEQ ID NO: 2490666 - RNA, 19 nt, Artificial Sequence
  Description of Artificial Sequence: Synthetic oligonucleotide
  Sense strand starting at position 3151 of SEQ ID NO: 1887702
cuacuugggagucagaagu

SEQ ID NO: 2490667 - RNA, 19 nt, Artificial Sequence
  Description of Artificial Sequence: Synthetic oligonucleotide
  Antisense strand to SEQ ID NO: 2490666
acuucugacucccaaguag

SEQ ID NO: 2490668 - RNA, 19 nt, Artificial Sequence
  Description of Artificial Sequence: Synthetic oligonucleotide
  Sense strand starting at position 3322 of SEQ ID NO: 1887702
gagugacacugccucacaa

SEQ ID NO: 2490669 - RNA, 19 nt, Artificial Sequence
  Description of Artificial Sequence: Synthetic oligonucleotide
  Antisense strand to SEQ ID NO: 2490668
uugugaggcagugucacuc

SEQ ID NO: 2490670 - RNA, 19 nt, Artificial Sequence
  Description of Artificial Sequence: Synthetic oligonucleotide
  Sense strand starting at position 3379 of SEQ ID NO: 1887702
cuugccugugcauagauua

SEQ ID NO: 2490671 - RNA, 19 nt, Artificial Sequence
  Description of Artificial Sequence: Synthetic oligonucleotide
  Antisense strand to SEQ ID NO: 2490670
uaaucuaugcacaggcaag

SEQ ID NO: 2490672 - RNA, 19 nt, Artificial Sequence
  Description of Artificial Sequence: Synthetic oligonucleotide
  Sense strand starting at position 3524 of SEQ ID NO: 1887702
gcucaugugcccuacauuu

SEQ ID NO: 2490673 - RNA, 19 nt, Artificial Sequence
  Description of Artificial Sequence: Synthetic oligonucleotide
  Antisense strand to SEQ ID NO: 2490672
aaauguagggcacaugagc

SEQ ID NO: 2490674 - RNA, 19 nt, Artificial Sequence
  Description of Artificial Sequence: Synthetic oligonucleotide
  Sense strand starting at position 3593 of SEQ ID NO: 1887702
gcucuugcuacguagugaa

SEQ ID NO: 2490675 - RNA, 19 nt, Artificial Sequence
  Description of Artificial Sequence: Synthetic oligonucleotide
  Antisense strand to SEQ ID NO: 2490674
uucacuacguagcaagagc

SEQ ID NO: 2490676 - RNA, 19 nt, Artificial Sequence
  Description of Artificial Sequence: Synthetic oligonucleotide
  Sense strand starting at position 3596 of SEQ ID NO: 1887702
cuugcuacguagugaacau

SEQ ID NO: 2490677 - RNA, 19 nt, Artificial Sequence
  Description of Artificial Sequence: Synthetic oligonucleotide
  Antisense strand to SEQ ID NO: 2490676
auguucacuacguagcaag

SEQ ID NO: 2490678 - RNA, 19 nt, Artificial Sequence
  Description of Artificial Sequence: Synthetic oligonucleotide
  Sense strand starting at position 3842 of SEQ ID NO: 1887702
ugucccaugugacaauuau

SEQ ID NO: 2490679 - RNA, 19 nt, Artificial Sequence
  Description of Artificial Sequence: Synthetic oligonucleotide
  Antisense strand to SEQ ID NO: 2490678
auaauugucacaugggaca

SEQ ID NO: 2490680 - RNA, 19 nt, Artificial Sequence
  Description of Artificial Sequence: Synthetic oligonucleotide
  Sense strand starting at position 3872 of SEQ ID NO: 1887702
agacucaucuugucuacca

SEQ ID NO: 2490681 - RNA, 19 nt, Artificial Sequence
  Description of Artificial Sequence: Synthetic oligonucleotide
  Antisense strand to SEQ ID NO: 2490680
ugguagacaagaugagucu

SEQ ID NO: 2490682 - RNA, 19 nt, Artificial Sequence
  Description of Artificial Sequence: Synthetic oligonucleotide
  Sense strand starting at position 3887 of SEQ ID NO: 1887702
accauaguuuguuucucau

SEQ ID NO: 2490683 - RNA, 19 nt, Artificial Sequence
  Description of Artificial Sequence: Synthetic oligonucleotide
  Antisense strand to SEQ ID NO: 2490682
augagaaacaaacuauggu

SEQ ID NO: 2490684 - RNA, 19 nt, Artificial Sequence
  Description of Artificial Sequence: Synthetic oligonucleotide
  Sense strand starting at position 3945 of SEQ ID NO: 1887702
agccuuuaaaugcgaggua

SEQ ID NO: 2490685 - RNA, 19 nt, Artificial Sequence
  Description of Artificial Sequence: Synthetic oligonucleotide
  Antisense strand to SEQ ID NO: 2490684
uaccucgcauuuaaaggcu

SEQ ID NO: 2490686 - RNA, 19 nt, Artificial Sequence
  Description of Artificial Sequence: Synthetic oligonucleotide
  Sense strand starting at position 3957 of SEQ ID NO: 1887702
cgagguaccuuggguucau

SEQ ID NO: 2490687 - RNA, 19 nt, Artificial Sequence
  Description of Artificial Sequence: Synthetic oligonucleotide
  Antisense strand to SEQ ID NO: 2490686
augaacccaagguaccucg

SEQ ID NO: 2490688 - RNA, 19 nt, Artificial Sequence
  Description of Artificial Sequence: Synthetic oligonucleotide
  Sense strand starting at position 3967 of SEQ ID NO: 1887702
uggguucauuacccgaaga

SEQ ID NO: 2490689 - RNA, 19 nt, Artificial Sequence
  Description of Artificial Sequence: Synthetic oligonucleotide
  Antisense strand to SEQ ID NO: 2490688
ucuucggguaaugaaccca

SEQ ID NO: 2490690 - RNA, 19 nt, Artificial Sequence
  Description of Artificial Sequence: Synthetic oligonucleotide
  Sense strand starting at position 24 of SEQ ID NO: 1887703
ugguaaacccuguguguac

SEQ ID NO: 2490691 - RNA, 19 nt, Artificial Sequence
  Description of Artificial Sequence: Synthetic oligonucleotide
  Antisense strand to SEQ ID NO: 2490690
guacacacaggguuuacca

SEQ ID NO: 2490692 - RNA, 19 nt, Artificial Sequence
  Description of Artificial Sequence: Synthetic oligonucleotide
  Sense strand starting at position 25 of SEQ ID NO: 1887703
gguaaacccuguguguaca

SEQ ID NO: 2490693 - RNA, 19 nt, Artificial Sequence
  Description of Artificial Sequence: Synthetic oligonucleotide
  Antisense strand to SEQ ID NO: 2490692
uguacacacaggguuuacc

SEQ ID NO: 2490694 - RNA, 19 nt, Artificial Sequence
  Description of Artificial Sequence: Synthetic oligonucleotide
  Sense strand starting at position 257 of SEQ ID NO: 1887703
aucaguauucucuguguac

SEQ ID NO: 2490695 - RNA, 19 nt, Artificial Sequence
  Description of Artificial Sequence: Synthetic oligonucleotide
  Antisense strand to SEQ ID NO: 2490694
guacacagagaauacugau

SEQ ID NO: 2490696 - RNA, 19 nt, Artificial Sequence
  Description of Artificial Sequence: Synthetic oligonucleotide
  Sense strand starting at position 258 of SEQ ID NO: 1887703
ucaguauucucuguguaca

SEQ ID NO: 2490697 - RNA, 19 nt, Artificial Sequence
  Description of Artificial Sequence: Synthetic oligonucleotide
  Antisense strand to SEQ ID NO: 2490696
uguacacagagaauacuga

SEQ ID NO: 2490698 - RNA, 19 nt, Artificial Sequence
  Description of Artificial Sequence: Synthetic oligonucleotide
  Sense strand starting at position 259 of SEQ ID NO: 1887703
caguauucucuguguacag

SEQ ID NO: 2490699 - RNA, 19 nt, Artificial Sequence
  Description of Artificial Sequence: Synthetic oligonucleotide
  Antisense strand to SEQ ID NO: 2490698
cuguacacagagaauacug

SEQ ID NO: 2490700 - RNA, 19 nt, Artificial Sequence
  Description of Artificial Sequence: Synthetic oligonucleotide
  Sense strand starting at position 260 of SEQ ID NO: 1887703
aguauucucuguguacaga

SEQ ID NO: 2490701 - RNA, 19 nt, Artificial Sequence
  Description of Artificial Sequence: Synthetic oligonucleotide
  Antisense strand to SEQ ID NO: 2490700
ucuguacacagagaauacu

SEQ ID NO: 2490702 - RNA, 19 nt, Artificial Sequence
  Description of Artificial Sequence: Synthetic oligonucleotide
  Sense strand starting at position 261 of SEQ ID NO: 1887703
guauucucuguguacagaa

SEQ ID NO: 2490703 - RNA, 19 nt, Artificial Sequence
  Description of Artificial Sequence: Synthetic oligonucleotide
  Antisense strand to SEQ ID NO: 2490702
uucuguacacagagaauac

SEQ ID NO: 2490704 - RNA, 19 nt, Artificial Sequence
  Description of Artificial Sequence: Synthetic oligonucleotide
  Sense strand starting at position 268 of SEQ ID NO: 1887703
cuguguacagaagaguauu

SEQ ID NO: 2490705 - RNA, 19 nt, Artificial Sequence
  Description of Artificial Sequence: Synthetic oligonucleotide
  Antisense strand to SEQ ID NO: 2490704
aauacucuucuguacacag

SEQ ID NO: 2490706 - RNA, 19 nt, Artificial Sequence
  Description of Artificial Sequence: Synthetic oligonucleotide
  Sense strand starting at position 369 of SEQ ID NO: 1887703
aagaaagcucucuauguug

SEQ ID NO: 2490707 - RNA, 19 nt, Artificial Sequence
  Description of Artificial Sequence: Synthetic oligonucleotide
  Antisense strand to SEQ ID NO: 2490706
caacauagagagcuuucuu

SEQ ID NO: 2490708 - RNA, 19 nt, Artificial Sequence
  Description of Artificial Sequence: Synthetic oligonucleotide
  Sense strand starting at position 371 of SEQ ID NO: 1887703
gaaagcucucuauguuguu

SEQ ID NO: 2490709 - RNA, 19 nt, Artificial Sequence
  Description of Artificial Sequence: Synthetic oligonucleotide
  Antisense strand to SEQ ID NO: 2490708
aacaacauagagagcuuuc

SEQ ID NO: 2490710 - RNA, 19 nt, Artificial Sequence
  Description of Artificial Sequence: Synthetic oligonucleotide
  Sense strand starting at position 387 of SEQ ID NO: 1887703
guuugcucacaggaagaau

SEQ ID NO: 2490711 - RNA, 19 nt, Artificial Sequence
  Description of Artificial Sequence: Synthetic oligonucleotide
  Antisense strand to SEQ ID NO: 2490710
auucuuccugugagcaaac

SEQ ID NO: 2490712 - RNA, 19 nt, Artificial Sequence
  Description of Artificial Sequence: Synthetic oligonucleotide
  Sense strand starting at position 744 of SEQ ID NO: 1887703
gcagucacccgagaucaca

SEQ ID NO: 2490713 - RNA, 19 nt, Artificial Sequence
  Description of Artificial Sequence: Synthetic oligonucleotide
  Antisense strand to SEQ ID NO: 2490712
ugugaucucgggugacugc

SEQ ID NO: 2490714 - RNA, 19 nt, Artificial Sequence
  Description of Artificial Sequence: Synthetic oligonucleotide
  Sense strand starting at position 789 of SEQ ID NO: 1887703
cugagacucugucaaacaa

SEQ ID NO: 2490715 - RNA, 19 nt, Artificial Sequence
  Description of Artificial Sequence: Synthetic oligonucleotide
  Antisense strand to SEQ ID NO: 2490714
uuguuugacagagucucag

SEQ ID NO: 2490716 - RNA, 19 nt, Artificial Sequence
  Description of Artificial Sequence: Synthetic oligonucleotide
  Sense strand starting at position 841 of SEQ ID NO: 1887703
gugugaucagugcauggaa

SEQ ID NO: 2490717 - RNA, 19 nt, Artificial Sequence
  Description of Artificial Sequence: Synthetic oligonucleotide
  Antisense strand to SEQ ID NO: 2490716
uuccaugcacugaucacac

SEQ ID NO: 2490718 - RNA, 19 nt, Artificial Sequence
  Description of Artificial Sequence: Synthetic oligonucleotide
  Sense strand starting at position 843 of SEQ ID NO: 1887703
gugaucagugcauggaaua

SEQ ID NO: 2490719 - RNA, 19 nt, Artificial Sequence
  Description of Artificial Sequence: Synthetic oligonucleotide
  Antisense strand to SEQ ID NO: 2490718
uauuccaugcacugaucac

SEQ ID NO: 2490720 - RNA, 19 nt, Artificial Sequence
  Description of Artificial Sequence: Synthetic oligonucleotide
  Sense strand starting at position 1025 of SEQ ID NO: 1887703
cagagaucauaucuguaug

SEQ ID NO: 2490721 - RNA, 19 nt, Artificial Sequence
  Description of Artificial Sequence: Synthetic oligonucleotide
  Antisense strand to SEQ ID NO: 2490720
cauacagauaugaucucug

SEQ ID NO: 2490722 - RNA, 19 nt, Artificial Sequence
  Description of Artificial Sequence: Synthetic oligonucleotide
  Sense strand starting at position 1027 of SEQ ID NO: 1887703
gagaucauaucuguaugaa

SEQ ID NO: 2490723 - RNA, 19 nt, Artificial Sequence
  Description of Artificial Sequence: Synthetic oligonucleotide
  Antisense strand to SEQ ID NO: 2490722
uucauacagauaugaucuc

SEQ ID NO: 2490724 - RNA, 19 nt, Artificial Sequence
  Description of Artificial Sequence: Synthetic oligonucleotide
  Sense strand starting at position 1759 of SEQ ID NO: 1887703
gcccuagagaucuagguug

SEQ ID NO: 2490725 - RNA, 19 nt, Artificial Sequence
  Description of Artificial Sequence: Synthetic oligonucleotide
  Antisense strand to SEQ ID NO: 2490724
caaccuagaucucuagggc

SEQ ID NO: 2490726 - RNA, 19 nt, Artificial Sequence
  Description of Artificial Sequence: Synthetic oligonucleotide
  Sense strand starting at position 1761 of SEQ ID NO: 1887703
ccuagagaucuagguugua

SEQ ID NO: 2490727 - RNA, 19 nt, Artificial Sequence
  Description of Artificial Sequence: Synthetic oligonucleotide
  Antisense strand to SEQ ID NO: 2490726
uacaaccuagaucucuagg

SEQ ID NO: 2490728 - RNA, 19 nt, Artificial Sequence
  Description of Artificial Sequence: Synthetic oligonucleotide
  Sense strand starting at position 1764 of SEQ ID NO: 1887703
agagaucuagguuguaagu

SEQ ID NO: 2490729 - RNA, 19 nt, Artificial Sequence
  Description of Artificial Sequence: Synthetic oligonucleotide
  Antisense strand to SEQ ID NO: 2490728
acuuacaaccuagaucucu

SEQ ID NO: 2490730 - RNA, 19 nt, Artificial Sequence
  Description of Artificial Sequence: Synthetic oligonucleotide
  Sense strand starting at position 2024 of SEQ ID NO: 1887703
gcaccauggauauguuguu

SEQ ID NO: 2490731 - RNA, 19 nt, Artificial Sequence
  Description of Artificial Sequence: Synthetic oligonucleotide
  Antisense strand to SEQ ID NO: 2490730
aacaacauauccauggugc

SEQ ID NO: 2490732 - RNA, 19 nt, Artificial Sequence
  Description of Artificial Sequence: Synthetic oligonucleotide
  Sense strand starting at position 2029 of SEQ ID NO: 1887703
auggauauguuguuggaau

SEQ ID NO: 2490733 - RNA, 19 nt, Artificial Sequence
  Description of Artificial Sequence: Synthetic oligonucleotide
  Antisense strand to SEQ ID NO: 2490732
auuccaacaacauauccau

SEQ ID NO: 2490734 - RNA, 19 nt, Artificial Sequence
  Description of Artificial Sequence: Synthetic oligonucleotide
  Sense strand starting at position 2031 of SEQ ID NO: 1887703
ggauauguuguuggaaucu

SEQ ID NO: 2490735 - RNA, 19 nt, Artificial Sequence
  Description of Artificial Sequence: Synthetic oligonucleotide
  Antisense strand to SEQ ID NO: 2490734
agauuccaacaacauaucc

SEQ ID NO: 2490736 - RNA, 19 nt, Artificial Sequence
  Description of Artificial Sequence: Synthetic oligonucleotide
  Sense strand starting at position 2041 of SEQ ID NO: 1887703
uuggaaucuuccuuagccu

SEQ ID NO: 2490737 - RNA, 19 nt, Artificial Sequence
  Description of Artificial Sequence: Synthetic oligonucleotide
  Antisense strand to SEQ ID NO: 2490736
aggcuaaggaagauuccaa

SEQ ID NO: 2490738 - RNA, 19 nt, Artificial Sequence
  Description of Artificial Sequence: Synthetic oligonucleotide
  Sense strand starting at position 2047 of SEQ ID NO: 1887703
ucuuccuuagccuggugaa

SEQ ID NO: 2490739 - RNA, 19 nt, Artificial Sequence
  Description of Artificial Sequence: Synthetic oligonucleotide
  Antisense strand to SEQ ID NO: 2490738
uucaccaggcuaaggaaga

SEQ ID NO: 2490740 - RNA, 19 nt, Artificial Sequence
  Description of Artificial Sequence: Synthetic oligonucleotide
  Sense strand starting at position 2048 of SEQ ID NO: 1887703
cuuccuuagccuggugaaa

SEQ ID NO: 2490741 - RNA, 19 nt, Artificial Sequence
  Description of Artificial Sequence: Synthetic oligonucleotide
  Antisense strand to SEQ ID NO: 2490740
uuucaccaggcuaaggaag

SEQ ID NO: 2490742 - RNA, 19 nt, Artificial Sequence
  Description of Artificial Sequence: Synthetic oligonucleotide
  Sense strand starting at position 2102 of SEQ ID NO: 1887703
gcugguguguuuccugaau

SEQ ID NO: 2490743 - RNA, 19 nt, Artificial Sequence
  Description of Artificial Sequence: Synthetic oligonucleotide
  Antisense strand to SEQ ID NO: 2490742
auucaggaaacacaccagc

SEQ ID NO: 2490744 - RNA, 19 nt, Artificial Sequence
  Description of Artificial Sequence: Synthetic oligonucleotide
  Sense strand starting at position 2200 of SEQ ID NO: 1887703
aggaaauccuccuaaguuu

SEQ ID NO: 2490745 - RNA, 19 nt, Artificial Sequence
  Description of Artificial Sequence: Synthetic oligonucleotide
  Antisense strand to SEQ ID NO: 2490744
aaacuuaggaggauuuccu

SEQ ID NO: 2490746 - RNA, 19 nt, Artificial Sequence
  Description of Artificial Sequence: Synthetic oligonucleotide
  Sense strand starting at position 2268 of SEQ ID NO: 1887703
ccaagauaacugggcuaaa

SEQ ID NO: 2490747 - RNA, 19 nt, Artificial Sequence
  Description of Artificial Sequence: Synthetic oligonucleotide
  Antisense strand to SEQ ID NO: 2490746
uuuagcccaguuaucuugg

SEQ ID NO: 2490748 - RNA, 19 nt, Artificial Sequence
  Description of Artificial Sequence: Synthetic oligonucleotide
  Sense strand starting at position 2279 of SEQ ID NO: 1887703
gggcuaaauuucuagacaa

SEQ ID NO: 2490749 - RNA, 19 nt, Artificial Sequence
  Description of Artificial Sequence: Synthetic oligonucleotide
  Antisense strand to SEQ ID NO: 2490748
uugucuagaaauuuagccc

SEQ ID NO: 2490750 - RNA, 19 nt, Artificial Sequence
  Description of Artificial Sequence: Synthetic oligonucleotide
  Sense strand starting at position 2323 of SEQ ID NO: 1887703
ucacuugaguuccuauaua

SEQ ID NO: 2490751 - RNA, 19 nt, Artificial Sequence
  Description of Artificial Sequence: Synthetic oligonucleotide
  Antisense strand to SEQ ID NO: 2490750
uauauaggaacucaaguga

SEQ ID NO: 2490752 - RNA, 19 nt, Artificial Sequence
  Description of Artificial Sequence: Synthetic oligonucleotide
  Sense strand starting at position 2935 of SEQ ID NO: 1887703
guagacagguauucagaag

SEQ ID NO: 2490753 - RNA, 19 nt, Artificial Sequence
  Description of Artificial Sequence: Synthetic oligonucleotide
  Antisense strand to SEQ ID NO: 2490752
cuucugaauaccugucuac

SEQ ID NO: 2490754 - RNA, 19 nt, Artificial Sequence
  Description of Artificial Sequence: Synthetic oligonucleotide
  Sense strand starting at position 3231 of SEQ ID NO: 1887703
acuuguugagcccaagaga

SEQ ID NO: 2490755 - RNA, 19 nt, Artificial Sequence
  Description of Artificial Sequence: Synthetic oligonucleotide
  Antisense strand to SEQ ID NO: 2490754
ucucuugggcucaacaagu

SEQ ID NO: 2490756 - RNA, 19 nt, Artificial Sequence
  Description of Artificial Sequence: Synthetic oligonucleotide
  Sense strand starting at position 3336 of SEQ ID NO: 1887703
ugaugauaagcaugcucuu

SEQ ID NO: 2490757 - RNA, 19 nt, Artificial Sequence
  Description of Artificial Sequence: Synthetic oligonucleotide
  Antisense strand to SEQ ID NO: 2490756
aagagcaugcuuaucauca

SEQ ID NO: 2490758 - RNA, 19 nt, Artificial Sequence
  Description of Artificial Sequence: Synthetic oligonucleotide
  Sense strand starting at position 3519 of SEQ ID NO: 1887703
uuucuuugacuagguuaaa

SEQ ID NO: 2490759 - RNA, 19 nt, Artificial Sequence
  Description of Artificial Sequence: Synthetic oligonucleotide
  Antisense strand to SEQ ID NO: 2490758
uuuaaccuagucaaagaaa

SEQ ID NO: 2490760 - RNA, 19 nt, Artificial Sequence
  Description of Artificial Sequence: Synthetic oligonucleotide
  Sense strand starting at position 3717 of SEQ ID NO: 1887703
cuacgugcaccuuauauuu

SEQ ID NO: 2490761 - RNA, 19 nt, Artificial Sequence
  Description of Artificial Sequence: Synthetic oligonucleotide
  Antisense strand to SEQ ID NO: 2490760
aaauauaaggugcacguag

SEQ ID NO: 2490762 - RNA, 19 nt, Artificial Sequence
  Description of Artificial Sequence: Synthetic oligonucleotide
  Sense strand starting at position 3719 of SEQ ID NO: 1887703
acgugcaccuuauauuuaa

SEQ ID NO: 2490763 - RNA, 19 nt, Artificial Sequence
  Description of Artificial Sequence: Synthetic oligonucleotide
  Antisense strand to SEQ ID NO: 2490762
uuaaauauaaggugcacgu

SEQ ID NO: 2490764 - RNA, 19 nt, Artificial Sequence
  Description of Artificial Sequence: Synthetic oligonucleotide
  Sense strand starting at position 3901 of SEQ ID NO: 1887703
ggaccacaggcuugguuau

SEQ ID NO: 2490765 - RNA, 19 nt, Artificial Sequence
  Description of Artificial Sequence: Synthetic oligonucleotide
  Antisense strand to SEQ ID NO: 2490764
auaaccaagccuguggucc

SEQ ID NO: 2490766 - RNA, 19 nt, Artificial Sequence
  Description of Artificial Sequence: Synthetic oligonucleotide
  Sense strand starting at position 3902 of SEQ ID NO: 1887703
gaccacaggcuugguuaua

SEQ ID NO: 2490767 - RNA, 19 nt, Artificial Sequence
  Description of Artificial Sequence: Synthetic oligonucleotide
  Antisense strand to SEQ ID NO: 2490766
uauaaccaagccugugguc

SEQ ID NO: 2490768 - RNA, 19 nt, Artificial Sequence
  Description of Artificial Sequence: Synthetic oligonucleotide
  Sense strand starting at position 3903 of SEQ ID NO: 1887703
accacaggcuugguuauaa

SEQ ID NO: 2490769 - RNA, 19 nt, Artificial Sequence
  Description of Artificial Sequence: Synthetic oligonucleotide
  Antisense strand to SEQ ID NO: 2490768
uuauaaccaagccuguggu

SEQ ID NO: 2490770 - RNA, 19 nt, Artificial Sequence
  Description of Artificial Sequence: Synthetic oligonucleotide
  Sense strand starting at position 127 of SEQ ID NO: 1887704
ugucucaaauagucaaaga

SEQ ID NO: 2490771 - RNA, 19 nt, Artificial Sequence
  Description of Artificial Sequence: Synthetic oligonucleotide
  Antisense strand to SEQ ID NO: 2490770
ucuuugacuauuugagaca

SEQ ID NO: 2490772 - RNA, 19 nt, Artificial Sequence
  Description of Artificial Sequence: Synthetic oligonucleotide
  Sense strand starting at position 168 of SEQ ID NO: 1887704
cucucuucuugauugugua

SEQ ID NO: 2490773 - RNA, 19 nt, Artificial Sequence
  Description of Artificial Sequence: Synthetic oligonucleotide
  Antisense strand to SEQ ID NO: 2490772
uacacaaucaagaagagag

SEQ ID NO: 2490774 - RNA, 19 nt, Artificial Sequence
  Description of Artificial Sequence: Synthetic oligonucleotide
  Sense strand starting at position 169 of SEQ ID NO: 1887704
ucucuucuugauuguguau

SEQ ID NO: 2490775 - RNA, 19 nt, Artificial Sequence
  Description of Artificial Sequence: Synthetic oligonucleotide
  Antisense strand to SEQ ID NO: 2490774
auacacaaucaagaagaga

SEQ ID NO: 2490776 - RNA, 19 nt, Artificial Sequence
  Description of Artificial Sequence: Synthetic oligonucleotide
  Sense strand starting at position 181 of SEQ ID NO: 1887704
uguguaugggcucacuuaa

SEQ ID NO: 2490777 - RNA, 19 nt, Artificial Sequence
  Description of Artificial Sequence: Synthetic oligonucleotide
  Antisense strand to SEQ ID NO: 2490776
uuaagugagcccauacaca

SEQ ID NO: 2490778 - RNA, 19 nt, Artificial Sequence
  Description of Artificial Sequence: Synthetic oligonucleotide
  Sense strand starting at position 351 of SEQ ID NO: 1887704
auugcuugaacgugggauu

SEQ ID NO: 2490779 - RNA, 19 nt, Artificial Sequence
  Description of Artificial Sequence: Synthetic oligonucleotide
  Antisense strand to SEQ ID NO: 2490778
aaucccacguucaagcaau

SEQ ID NO: 2490780 - RNA, 19 nt, Artificial Sequence
  Description of Artificial Sequence: Synthetic oligonucleotide
  Sense strand starting at position 472 of SEQ ID NO: 1887704
ggcucaugucugcgaucuc

SEQ ID NO: 2490781 - RNA, 19 nt, Artificial Sequence
  Description of Artificial Sequence: Synthetic oligonucleotide
  Antisense strand to SEQ ID NO: 2490780
gagaucgcagacaugagcc

SEQ ID NO: 2490782 - RNA, 19 nt, Artificial Sequence
  Description of Artificial Sequence: Synthetic oligonucleotide
  Sense strand starting at position 514 of SEQ ID NO: 1887704
gagagaauggcuugaaucu

SEQ ID NO: 2490783 - RNA, 19 nt, Artificial Sequence
  Description of Artificial Sequence: Synthetic oligonucleotide
  Antisense strand to SEQ ID NO: 2490782
agauucaagccauucucuc

SEQ ID NO: 2490784 - RNA, 19 nt, Artificial Sequence
  Description of Artificial Sequence: Synthetic oligonucleotide
  Sense strand starting at position 677 of SEQ ID NO: 1887704
ggaucuugaggucaguagu

SEQ ID NO: 2490785 - RNA, 19 nt, Artificial Sequence
  Description of Artificial Sequence: Synthetic oligonucleotide
  Antisense strand to SEQ ID NO: 2490784
acuacugaccucaagaucc

SEQ ID NO: 2490786 - RNA, 19 nt, Artificial Sequence
  Description of Artificial Sequence: Synthetic oligonucleotide
  Sense strand starting at position 933 of SEQ ID NO: 1887704
aaagaucuacguuggaagu

SEQ ID NO: 2490787 - RNA, 19 nt, Artificial Sequence
  Description of Artificial Sequence: Synthetic oligonucleotide
  Antisense strand to SEQ ID NO: 2490786
acuuccaacguagaucuuu

SEQ ID NO: 2490788 - RNA, 19 nt, Artificial Sequence
  Description of Artificial Sequence: Synthetic oligonucleotide
  Sense strand starting at position 1373 of SEQ ID NO: 1887704
gggaaauccuccugaguuu

SEQ ID NO: 2490789 - RNA, 19 nt, Artificial Sequence
  Description of Artificial Sequence: Synthetic oligonucleotide
  Antisense strand to SEQ ID NO: 2490788
aaacucaggaggauuuccc

SEQ ID NO: 2490790 - RNA, 19 nt, Artificial Sequence
  Description of Artificial Sequence: Synthetic oligonucleotide
  Sense strand starting at position 1517 of SEQ ID NO: 1887704
gacacacaguccugauuag

SEQ ID NO: 2490791 - RNA, 19 nt, Artificial Sequence
  Description of Artificial Sequence: Synthetic oligonucleotide
  Antisense strand to SEQ ID NO: 2490790
cuaaucaggacuguguguc

SEQ ID NO: 2490792 - RNA, 19 nt, Artificial Sequence
  Description of Artificial Sequence: Synthetic oligonucleotide
  Sense strand starting at position 1526 of SEQ ID NO: 1887704
uccugauuagagcagucaa

SEQ ID NO: 2490793 - RNA, 19 nt, Artificial Sequence
  Description of Artificial Sequence: Synthetic oligonucleotide
  Antisense strand to SEQ ID NO: 2490792
uugacugcucuaaucagga

SEQ ID NO: 2490794 - RNA, 19 nt, Artificial Sequence
  Description of Artificial Sequence: Synthetic oligonucleotide
  Sense strand starting at position 1547 of SEQ ID NO: 1887704
uggaaucuaccauguugaa

SEQ ID NO: 2490795 - RNA, 19 nt, Artificial Sequence
  Description of Artificial Sequence: Synthetic oligonucleotide
  Antisense strand to SEQ ID NO: 2490794
uucaacaugguagauucca

SEQ ID NO: 2490796 - RNA, 19 nt, Artificial Sequence
  Description of Artificial Sequence: Synthetic oligonucleotide
  Sense strand starting at position 1797 of SEQ ID NO: 1887704
gagacccagucuuagauaa

SEQ ID NO: 2490797 - RNA, 19 nt, Artificial Sequence
  Description of Artificial Sequence: Synthetic oligonucleotide
  Antisense strand to SEQ ID NO: 2490796
uuaucuaagacugggucuc

SEQ ID NO: 2490798 - RNA, 19 nt, Artificial Sequence
  Description of Artificial Sequence: Synthetic oligonucleotide
  Sense strand starting at position 1859 of SEQ ID NO: 1887704
uuauaagcgugcucugcaa

SEQ ID NO: 2490799 - RNA, 19 nt, Artificial Sequence
  Description of Artificial Sequence: Synthetic oligonucleotide
  Antisense strand to SEQ ID NO: 2490798
uugcagagcacgcuuauaa

SEQ ID NO: 2490800 - RNA, 19 nt, Artificial Sequence
  Description of Artificial Sequence: Synthetic oligonucleotide
  Sense strand starting at position 1863 of SEQ ID NO: 1887704
aagcgugcucugcaaagau

SEQ ID NO: 2490801 - RNA, 19 nt, Artificial Sequence
  Description of Artificial Sequence: Synthetic oligonucleotide
  Antisense strand to SEQ ID NO: 2490800
aucuuugcagagcacgcuu

SEQ ID NO: 2490802 - RNA, 19 nt, Artificial Sequence
  Description of Artificial Sequence: Synthetic oligonucleotide
  Sense strand starting at position 2079 of SEQ ID NO: 1887704
ugcauuuauugacccugua

SEQ ID NO: 2490803 - RNA, 19 nt, Artificial Sequence
  Description of Artificial Sequence: Synthetic oligonucleotide
  Antisense strand to SEQ ID NO: 2490802
uacagggucaauaaaugca

SEQ ID NO: 2490804 - RNA, 19 nt, Artificial Sequence
  Description of Artificial Sequence: Synthetic oligonucleotide
  Sense strand starting at position 2244 of SEQ ID NO: 1887704
cguaccuuuaaccgagaaa

SEQ ID NO: 2490805 - RNA, 19 nt, Artificial Sequence
  Description of Artificial Sequence: Synthetic oligonucleotide
  Antisense strand to SEQ ID NO: 2490804
uuucucgguuaaagguacg

SEQ ID NO: 2490806 - RNA, 19 nt, Artificial Sequence
  Description of Artificial Sequence: Synthetic oligonucleotide
  Sense strand starting at position 2360 of SEQ ID NO: 1887704
uggagucuacgauguugaa

SEQ ID NO: 2490807 - RNA, 19 nt, Artificial Sequence
  Description of Artificial Sequence: Synthetic oligonucleotide
  Antisense strand to SEQ ID NO: 2490806
uucaacaucguagacucca

SEQ ID NO: 2490808 - RNA, 19 nt, Artificial Sequence
  Description of Artificial Sequence: Synthetic oligonucleotide
  Sense strand starting at position 2724 of SEQ ID NO: 1887704
ggcagauauugucucagaa

SEQ ID NO: 2490809 - RNA, 19 nt, Artificial Sequence
  Description of Artificial Sequence: Synthetic oligonucleotide
  Antisense strand to SEQ ID NO: 2490808
uucugagacaauaucugcc

SEQ ID NO: 2490810 - RNA, 19 nt, Artificial Sequence
  Description of Artificial Sequence: Synthetic oligonucleotide
  Sense strand starting at position 2787 of SEQ ID NO: 1887704
cuaggugauaucggaguau

SEQ ID NO: 2490811 - RNA, 19 nt, Artificial Sequence
  Description of Artificial Sequence: Synthetic oligonucleotide
  Antisense strand to SEQ ID NO: 2490810
auacuccgauaucaccuag

SEQ ID NO: 2490812 - RNA, 19 nt, Artificial Sequence
  Description of Artificial Sequence: Synthetic oligonucleotide
  Sense strand starting at position 2791 of SEQ ID NO: 1887704
gugauaucggaguauucuc

SEQ ID NO: 2490813 - RNA, 19 nt, Artificial Sequence
  Description of Artificial Sequence: Synthetic oligonucleotide
  Antisense strand to SEQ ID NO: 2490812
gagaauacuccgauaucac

SEQ ID NO: 2490814 - RNA, 19 nt, Artificial Sequence
  Description of Artificial Sequence: Synthetic oligonucleotide
  Sense strand starting at position 2796 of SEQ ID NO: 1887704
aucggaguauucucugugu

SEQ ID NO: 2490815 - RNA, 19 nt, Artificial Sequence
  Description of Artificial Sequence: Synthetic oligonucleotide
  Antisense strand to SEQ ID NO: 2490814
acacagagaauacuccgau

SEQ ID NO: 2490816 - RNA, 19 nt, Artificial Sequence
  Description of Artificial Sequence: Synthetic oligonucleotide
  Sense strand starting at position 2798 of SEQ ID NO: 1887704
cggaguauucucuguguuu

SEQ ID NO: 2490817 - RNA, 19 nt, Artificial Sequence
  Description of Artificial Sequence: Synthetic oligonucleotide
  Antisense strand to SEQ ID NO: 2490816
aaacacagagaauacuccg

SEQ ID NO: 2490818 - RNA, 19 nt, Artificial Sequence
  Description of Artificial Sequence: Synthetic oligonucleotide
  Sense strand starting at position 2799 of SEQ ID NO: 1887704
ggaguauucucuguguuua

SEQ ID NO: 2490819 - RNA, 19 nt, Artificial Sequence
  Description of Artificial Sequence: Synthetic oligonucleotide
  Antisense strand to SEQ ID NO: 2490818
uaaacacagagaauacucc

SEQ ID NO: 2490820 - RNA, 19 nt, Artificial Sequence
  Description of Artificial Sequence: Synthetic oligonucleotide
  Sense strand starting at position 2800 of SEQ ID NO: 1887704
gaguauucucuguguuuag

SEQ ID NO: 2490821 - RNA, 19 nt, Artificial Sequence
  Description of Artificial Sequence: Synthetic oligonucleotide
  Antisense strand to SEQ ID NO: 2490820
cuaaacacagagaauacuc

SEQ ID NO: 2490822 - RNA, 19 nt, Artificial Sequence
  Description of Artificial Sequence: Synthetic oligonucleotide
  Sense strand starting at position 2801 of SEQ ID NO: 1887704
aguauucucuguguuuaga

SEQ ID NO: 2490823 - RNA, 19 nt, Artificial Sequence
  Description of Artificial Sequence: Synthetic oligonucleotide
  Antisense strand to SEQ ID NO: 2490822
ucuaaacacagagaauacu

SEQ ID NO: 2490824 - RNA, 19 nt, Artificial Sequence
  Description of Artificial Sequence: Synthetic oligonucleotide
  Sense strand starting at position 2803 of SEQ ID NO: 1887704
uauucucuguguuuagaag

SEQ ID NO: 2490825 - RNA, 19 nt, Artificial Sequence
  Description of Artificial Sequence: Synthetic oligonucleotide
  Antisense strand to SEQ ID NO: 2490824
cuucuaaacacagagaaua

SEQ ID NO: 2490826 - RNA, 19 nt, Artificial Sequence
  Description of Artificial Sequence: Synthetic oligonucleotide
  Sense strand starting at position 2809 of SEQ ID NO: 1887704
cuguguuuagaagaguauu

SEQ ID NO: 2490827 - RNA, 19 nt, Artificial Sequence
  Description of Artificial Sequence: Synthetic oligonucleotide
  Antisense strand to SEQ ID NO: 2490826
aauacucuucuaaacacag

SEQ ID NO: 2490828 - RNA, 19 nt, Artificial Sequence
  Description of Artificial Sequence: Synthetic oligonucleotide
  Sense strand starting at position 2914 of SEQ ID NO: 1887704
gcaugcuuauaggaagaau

SEQ ID NO: 2490829 - RNA, 19 nt, Artificial Sequence
  Description of Artificial Sequence: Synthetic oligonucleotide
  Antisense strand to SEQ ID NO: 2490828
auucuuccuauaagcaugc

SEQ ID NO: 2490830 - RNA, 19 nt, Artificial Sequence
  Description of Artificial Sequence: Synthetic oligonucleotide
  Sense strand starting at position 2944 of SEQ ID NO: 1887704
auaacugcuugcuuuggaa

SEQ ID NO: 2490831 - RNA, 19 nt, Artificial Sequence
  Description of Artificial Sequence: Synthetic oligonucleotide
  Antisense strand to SEQ ID NO: 2490830
uuccaaagcaagcaguuau

SEQ ID NO: 2490832 - RNA, 19 nt, Artificial Sequence
  Description of Artificial Sequence: Synthetic oligonucleotide
  Sense strand starting at position 2988 of SEQ ID NO: 1887704
auagaauauccuggccacu

SEQ ID NO: 2490833 - RNA, 19 nt, Artificial Sequence
  Description of Artificial Sequence: Synthetic oligonucleotide
  Antisense strand to SEQ ID NO: 2490832
aguggccaggauauucuau

SEQ ID NO: 2490834 - RNA, 19 nt, Artificial Sequence
  Description of Artificial Sequence: Synthetic oligonucleotide
  Sense strand starting at position 3331 of SEQ ID NO: 1887704
gcuagaauuacugguggaa

SEQ ID NO: 2490835 - RNA, 19 nt, Artificial Sequence
  Description of Artificial Sequence: Synthetic oligonucleotide
  Antisense strand to SEQ ID NO: 2490834
uuccaccaguaauucuagc

SEQ ID NO: 2490836 - RNA, 19 nt, Artificial Sequence
  Description of Artificial Sequence: Synthetic oligonucleotide
  Sense strand starting at position 3333 of SEQ ID NO: 1887704
uagaauuacugguggaagu

SEQ ID NO: 2490837 - RNA, 19 nt, Artificial Sequence
  Description of Artificial Sequence: Synthetic oligonucleotide
  Antisense strand to SEQ ID NO: 2490836
acuuccaccaguaauucua

SEQ ID NO: 2490838 - RNA, 19 nt, Artificial Sequence
  Description of Artificial Sequence: Synthetic oligonucleotide
  Sense strand starting at position 3360 of SEQ ID NO: 1887704
ccagacuagucccauauuu

SEQ ID NO: 2490839 - RNA, 19 nt, Artificial Sequence
  Description of Artificial Sequence: Synthetic oligonucleotide
  Antisense strand to SEQ ID NO: 2490838
aaauaugggacuagucugg

SEQ ID NO: 2490840 - RNA, 19 nt, Artificial Sequence
  Description of Artificial Sequence: Synthetic oligonucleotide
  Sense strand starting at position 3424 of SEQ ID NO: 1887704
ucgaguacaucucaaauac

SEQ ID NO: 2490841 - RNA, 19 nt, Artificial Sequence
  Description of Artificial Sequence: Synthetic oligonucleotide
  Antisense strand to SEQ ID NO: 2490840
guauuugagauguacucga

SEQ ID NO: 2490842 - RNA, 19 nt, Artificial Sequence
  Description of Artificial Sequence: Synthetic oligonucleotide
  Sense strand starting at position 3481 of SEQ ID NO: 1887704
ucaauucuacgugaaccca

SEQ ID NO: 2490843 - RNA, 19 nt, Artificial Sequence
  Description of Artificial Sequence: Synthetic oligonucleotide
  Antisense strand to SEQ ID NO: 2490842
uggguucacguagaauuga

SEQ ID NO: 2490844 - RNA, 19 nt, Artificial Sequence
  Description of Artificial Sequence: Synthetic oligonucleotide
  Sense strand starting at position 3523 of SEQ ID NO: 1887704
ccgaauaauuucuacguag

SEQ ID NO: 2490845 - RNA, 19 nt, Artificial Sequence
  Description of Artificial Sequence: Synthetic oligonucleotide
  Antisense strand to SEQ ID NO: 2490844
cuacguagaaauuauucgg

SEQ ID NO: 2490846 - RNA, 19 nt, Artificial Sequence
  Description of Artificial Sequence: Synthetic oligonucleotide
  Sense strand starting at position 3890 of SEQ ID NO: 1887704
gguguugaggacuggaaga

SEQ ID NO: 2490847 - RNA, 19 nt, Artificial Sequence
  Description of Artificial Sequence: Synthetic oligonucleotide
  Antisense strand to SEQ ID NO: 2490846
ucuuccaguccucaacacc

SEQ ID NO: 2490848 - RNA, 19 nt, Artificial Sequence
  Description of Artificial Sequence: Synthetic oligonucleotide
  Sense strand starting at position 3974 of SEQ ID NO: 1887704
cuucuaggguccucaagau

SEQ ID NO: 2490849 - RNA, 19 nt, Artificial Sequence
  Description of Artificial Sequence: Synthetic oligonucleotide
  Antisense strand to SEQ ID NO: 2490848
aucuugaggacccuagaag

SEQ ID NO: 2490850 - RNA, 19 nt, Artificial Sequence
  Description of Artificial Sequence: Synthetic oligonucleotide
  Sense strand starting at position 800 of SEQ ID NO: 1887705
ggugcaaugucucucaccu

SEQ ID NO: 2490851 - RNA, 19 nt, Artificial Sequence
  Description of Artificial Sequence: Synthetic oligonucleotide
  Antisense strand to SEQ ID NO: 2490850
aggugagagacauugcacc

SEQ ID NO: 2490852 - RNA, 19 nt, Artificial Sequence
  Description of Artificial Sequence: Synthetic oligonucleotide
  Sense strand starting at position 1158 of SEQ ID NO: 1887705
gugagcugagcuugcaaua

SEQ ID NO: 2490853 - RNA, 19 nt, Artificial Sequence
  Description of Artificial Sequence: Synthetic oligonucleotide
  Antisense strand to SEQ ID NO: 2490852
uauugcaagcucagcucac

SEQ ID NO: 2490854 - RNA, 19 nt, Artificial Sequence
  Description of Artificial Sequence: Synthetic oligonucleotide
  Sense strand starting at position 1163 of SEQ ID NO: 1887705
cugagcuugcaauacuaca

SEQ ID NO: 2490855 - RNA, 19 nt, Artificial Sequence
  Description of Artificial Sequence: Synthetic oligonucleotide
  Antisense strand to SEQ ID NO: 2490854
uguaguauugcaagcucag

SEQ ID NO: 2490856 - RNA, 19 nt, Artificial Sequence
  Description of Artificial Sequence: Synthetic oligonucleotide
  Sense strand starting at position 1272 of SEQ ID NO: 1887705
uaagaauacucuucgugug

SEQ ID NO: 2490857 - RNA, 19 nt, Artificial Sequence
  Description of Artificial Sequence: Synthetic oligonucleotide
  Antisense strand to SEQ ID NO: 2490856
cacacgaagaguauucuua

SEQ ID NO: 2490858 - RNA, 19 nt, Artificial Sequence
  Description of Artificial Sequence: Synthetic oligonucleotide
  Sense strand starting at position 1274 of SEQ ID NO: 1887705
agaauacucuucgugugca

SEQ ID NO: 2490859 - RNA, 19 nt, Artificial Sequence
  Description of Artificial Sequence: Synthetic oligonucleotide
  Antisense strand to SEQ ID NO: 2490858
ugcacacgaagaguauucu

SEQ ID NO: 2490860 - RNA, 19 nt, Artificial Sequence
  Description of Artificial Sequence: Synthetic oligonucleotide
  Sense strand starting at position 1277 of SEQ ID NO: 1887705
auacucuucgugugcagaa

SEQ ID NO: 2490861 - RNA, 19 nt, Artificial Sequence
  Description of Artificial Sequence: Synthetic oligonucleotide
  Antisense strand to SEQ ID NO: 2490860
uucugcacacgaagaguau

SEQ ID NO: 2490862 - RNA, 19 nt, Artificial Sequence
  Description of Artificial Sequence: Synthetic oligonucleotide
  Sense strand starting at position 1279 of SEQ ID NO: 1887705
acucuucgugugcagaaga

SEQ ID NO: 2490863 - RNA, 19 nt, Artificial Sequence
  Description of Artificial Sequence: Synthetic oligonucleotide
  Antisense strand to SEQ ID NO: 2490862
ucuucugcacacgaagagu

SEQ ID NO: 2490864 - RNA, 19 nt, Artificial Sequence
  Description of Artificial Sequence: Synthetic oligonucleotide
  Sense strand starting at position 1284 of SEQ ID NO: 1887705
ucgugugcagaagaguauu

SEQ ID NO: 2490865 - RNA, 19 nt, Artificial Sequence
  Description of Artificial Sequence: Synthetic oligonucleotide
  Antisense strand to SEQ ID NO: 2490864
aauacucuucugcacacga

SEQ ID NO: 2490866 - RNA, 19 nt, Artificial Sequence
  Description of Artificial Sequence: Synthetic oligonucleotide
  Sense strand starting at position 1368 of SEQ ID NO: 1887705
ugaaauccagucuguauua

SEQ ID NO: 2490867 - RNA, 19 nt, Artificial Sequence
  Description of Artificial Sequence: Synthetic oligonucleotide
  Antisense strand to SEQ ID NO: 2490866
uaauacagacuggauuuca

SEQ ID NO: 2490868 - RNA, 19 nt, Artificial Sequence
  Description of Artificial Sequence: Synthetic oligonucleotide
  Sense strand starting at position 1418 of SEQ ID NO: 1887705
ugguguacuucuguaauuc

SEQ ID NO: 2490869 - RNA, 19 nt, Artificial Sequence
  Description of Artificial Sequence: Synthetic oligonucleotide
  Antisense strand to SEQ ID NO: 2490868
gaauuacagaaguacacca

SEQ ID NO: 2490870 - RNA, 19 nt, Artificial Sequence
  Description of Artificial Sequence: Synthetic oligonucleotide
  Sense strand starting at position 2245 of SEQ ID NO: 1887705
accuuaucuuuaccgagaa

SEQ ID NO: 2490871 - RNA, 19 nt, Artificial Sequence
  Description of Artificial Sequence: Synthetic oligonucleotide
  Antisense strand to SEQ ID NO: 2490870
uucucgguaaagauaaggu

SEQ ID NO: 2490872 - RNA, 19 nt, Artificial Sequence
  Description of Artificial Sequence: Synthetic oligonucleotide
  Sense strand starting at position 2246 of SEQ ID NO: 1887705
ccuuaucuuuaccgagaac

SEQ ID NO: 2490873 - RNA, 19 nt, Artificial Sequence
  Description of Artificial Sequence: Synthetic oligonucleotide
  Antisense strand to SEQ ID NO: 2490872
guucucgguaaagauaagg

SEQ ID NO: 2490874 - RNA, 19 nt, Artificial Sequence
  Description of Artificial Sequence: Synthetic oligonucleotide
  Sense strand starting at position 2265 of SEQ ID NO: 1887705
ugagcuggaugucuagaga

SEQ ID NO: 2490875 - RNA, 19 nt, Artificial Sequence
  Description of Artificial Sequence: Synthetic oligonucleotide
  Antisense strand to SEQ ID NO: 2490874
ucucuagacauccagcuca

SEQ ID NO: 2490876 - RNA, 19 nt, Artificial Sequence
  Description of Artificial Sequence: Synthetic oligonucleotide
  Sense strand starting at position 2310 of SEQ ID NO: 1887705
ucaccugaguuccaguaca

SEQ ID NO: 2490877 - RNA, 19 nt, Artificial Sequence
  Description of Artificial Sequence: Synthetic oligonucleotide
  Antisense strand to SEQ ID NO: 2490876
uguacuggaacucagguga

SEQ ID NO: 2490878 - RNA, 19 nt, Artificial Sequence
  Description of Artificial Sequence: Synthetic oligonucleotide
  Sense strand starting at position 3481 of SEQ ID NO: 1887705
auaagcauucgcugcaaau

SEQ ID NO: 2490879 - RNA, 19 nt, Artificial Sequence
  Description of Artificial Sequence: Synthetic oligonucleotide
  Antisense strand to SEQ ID NO: 2490878
auuugcagcgaaugcuuau

SEQ ID NO: 2490880 - RNA, 19 nt, Artificial Sequence
  Description of Artificial Sequence: Synthetic oligonucleotide
  Sense strand starting at position 3654 of SEQ ID NO: 1887705
uuggaaucuuccuugacga

SEQ ID NO: 2490881 - RNA, 19 nt, Artificial Sequence
  Description of Artificial Sequence: Synthetic oligonucleotide
  Antisense strand to SEQ ID NO: 2490880
ucgucaaggaagauuccaa

SEQ ID NO: 2490882 - RNA, 19 nt, Artificial Sequence
  Description of Artificial Sequence: Synthetic oligonucleotide
  Sense strand starting at position 3655 of SEQ ID NO: 1887705
uggaaucuuccuugacgag

SEQ ID NO: 2490883 - RNA, 19 nt, Artificial Sequence
  Description of Artificial Sequence: Synthetic oligonucleotide
  Antisense strand to SEQ ID NO: 2490882
cucgucaaggaagauucca

SEQ ID NO: 2490884 - RNA, 19 nt, Artificial Sequence
  Description of Artificial Sequence: Synthetic oligonucleotide
  Sense strand starting at position 3661 of SEQ ID NO: 1887705
cuuccuugacgagguuaaa

SEQ ID NO: 2490885 - RNA, 19 nt, Artificial Sequence
  Description of Artificial Sequence: Synthetic oligonucleotide
  Antisense strand to SEQ ID NO: 2490884
uuuaaccucgucaaggaag

SEQ ID NO: 2490886 - RNA, 19 nt, Artificial Sequence
  Description of Artificial Sequence: Synthetic oligonucleotide
  Sense strand starting at position 3702 of SEQ ID NO: 1887705
auuuauuuguccgguuugu

SEQ ID NO: 2490887 - RNA, 19 nt, Artificial Sequence
  Description of Artificial Sequence: Synthetic oligonucleotide
  Antisense strand to SEQ ID NO: 2490886
acaaaccggacaaauaaau

SEQ ID NO: 2490888 - RNA, 19 nt, Artificial Sequence
  Description of Artificial Sequence: Synthetic oligonucleotide
  Sense strand starting at position 570 of SEQ ID NO: 1887706
cuuguuucucuguacucaa

SEQ ID NO: 2490889 - RNA, 19 nt, Artificial Sequence
  Description of Artificial Sequence: Synthetic oligonucleotide
  Antisense strand to SEQ ID NO: 2490888
uugaguacagagaaacaag

SEQ ID NO: 2490890 - RNA, 19 nt, Artificial Sequence
  Description of Artificial Sequence: Synthetic oligonucleotide
  Sense strand starting at position 659 of SEQ ID NO: 1887706
gagccucauccuugaggua

SEQ ID NO: 2490891 - RNA, 19 nt, Artificial Sequence
  Description of Artificial Sequence: Synthetic oligonucleotide
  Antisense strand to SEQ ID NO: 2490890
uaccucaaggaugaggcuc

SEQ ID NO: 2490892 - RNA, 19 nt, Artificial Sequence
  Description of Artificial Sequence: Synthetic oligonucleotide
  Sense strand starting at position 660 of SEQ ID NO: 1887706
agccucauccuugagguaa

SEQ ID NO: 2490893 - RNA, 19 nt, Artificial Sequence
  Description of Artificial Sequence: Synthetic oligonucleotide
  Antisense strand to SEQ ID NO: 2490892
uuaccucaaggaugaggcu

SEQ ID NO: 2490894 - RNA, 19 nt, Artificial Sequence
  Description of Artificial Sequence: Synthetic oligonucleotide
  Sense strand starting at position 747 of SEQ ID NO: 1887706
ggucacccucaguauucua

SEQ ID NO: 2490895 - RNA, 19 nt, Artificial Sequence
  Description of Artificial Sequence: Synthetic oligonucleotide
  Antisense strand to SEQ ID NO: 2490894
uagaauacugagggugacc

SEQ ID NO: 2490896 - RNA, 19 nt, Artificial Sequence
  Description of Artificial Sequence: Synthetic oligonucleotide
  Sense strand starting at position 1056 of SEQ ID NO: 1887706
acagaaaguuaagagagau

SEQ ID NO: 2490897 - RNA, 19 nt, Artificial Sequence
  Description of Artificial Sequence: Synthetic oligonucleotide
  Antisense strand to SEQ ID NO: 2490896
aucucucuuaacuuucugu

SEQ ID NO: 2490898 - RNA, 19 nt, Artificial Sequence
  Description of Artificial Sequence: Synthetic oligonucleotide
  Sense strand starting at position 1184 of SEQ ID NO: 1887706
gccaucagacucuggcuaa

SEQ ID NO: 2490899 - RNA, 19 nt, Artificial Sequence
  Description of Artificial Sequence: Synthetic oligonucleotide
  Antisense strand to SEQ ID NO: 2490898
uuagccagagucugauggc

SEQ ID NO: 2490900 - RNA, 19 nt, Artificial Sequence
  Description of Artificial Sequence: Synthetic oligonucleotide
  Sense strand starting at position 1187 of SEQ ID NO: 1887706
aucagacucuggcuaauca

SEQ ID NO: 2490901 - RNA, 19 nt, Artificial Sequence
  Description of Artificial Sequence: Synthetic oligonucleotide
  Antisense strand to SEQ ID NO: 2490900
ugauuagccagagucugau

SEQ ID NO: 2490902 - RNA, 19 nt, Artificial Sequence
  Description of Artificial Sequence: Synthetic oligonucleotide
  Sense strand starting at position 1360 of SEQ ID NO: 1887706
ccaccuugauguccagagu

SEQ ID NO: 2490903 - RNA, 19 nt, Artificial Sequence
  Description of Artificial Sequence: Synthetic oligonucleotide
  Antisense strand to SEQ ID NO: 2490902
acucuggacaucaaggugg

SEQ ID NO: 2490904 - RNA, 19 nt, Artificial Sequence
  Description of Artificial Sequence: Synthetic oligonucleotide
  Sense strand starting at position 1363 of SEQ ID NO: 1887706
ccuugauguccagagugaa

SEQ ID NO: 2490905 - RNA, 19 nt, Artificial Sequence
  Description of Artificial Sequence: Synthetic oligonucleotide
  Antisense strand to SEQ ID NO: 2490904
uucacucuggacaucaagg

SEQ ID NO: 2490906 - RNA, 19 nt, Artificial Sequence
  Description of Artificial Sequence: Synthetic oligonucleotide
  Sense strand starting at position 1366 of SEQ ID NO: 1887706
ugauguccagagugaaugu

SEQ ID NO: 2490907 - RNA, 19 nt, Artificial Sequence
  Description of Artificial Sequence: Synthetic oligonucleotide
  Antisense strand to SEQ ID NO: 2490906
acauucacucuggacauca

SEQ ID NO: 2490908 - RNA, 19 nt, Artificial Sequence
  Description of Artificial Sequence: Synthetic oligonucleotide
  Sense strand starting at position 1376 of SEQ ID NO: 1887706
agugaauguccuggucaca

SEQ ID NO: 2490909 - RNA, 19 nt, Artificial Sequence
  Description of Artificial Sequence: Synthetic oligonucleotide
  Antisense strand to SEQ ID NO: 2490908
ugugaccaggacauucacu

SEQ ID NO: 2490910 - RNA, 19 nt, Artificial Sequence
  Description of Artificial Sequence: Synthetic oligonucleotide
  Sense strand starting at position 1522 of SEQ ID NO: 1887706
ggcacuuaugcauagagag

SEQ ID NO: 2490911 - RNA, 19 nt, Artificial Sequence
  Description of Artificial Sequence: Synthetic oligonucleotide
  Antisense strand to SEQ ID NO: 2490910
cucucuaugcauaagugcc

SEQ ID NO: 2490912 - RNA, 19 nt, Artificial Sequence
  Description of Artificial Sequence: Synthetic oligonucleotide
  Sense strand starting at position 1600 of SEQ ID NO: 1887706
cgggaugagagccagugau

SEQ ID NO: 2490913 - RNA, 19 nt, Artificial Sequence
  Description of Artificial Sequence: Synthetic oligonucleotide
  Antisense strand to SEQ ID NO: 2490912
aucacuggcucucaucccg

SEQ ID NO: 2490914 - RNA, 19 nt, Artificial Sequence
  Description of Artificial Sequence: Synthetic oligonucleotide
  Sense strand starting at position 1907 of SEQ ID NO: 1887706
ggagcaauugacugagggu

SEQ ID NO: 2490915 - RNA, 19 nt, Artificial Sequence
  Description of Artificial Sequence: Synthetic oligonucleotide
  Antisense strand to SEQ ID NO: 2490914
acccucagucaauugcucc

SEQ ID NO: 2490916 - RNA, 19 nt, Artificial Sequence
  Description of Artificial Sequence: Synthetic oligonucleotide
  Sense strand starting at position 1916 of SEQ ID NO: 1887706
gacugagggucuucugacu

SEQ ID NO: 2490917 - RNA, 19 nt, Artificial Sequence
  Description of Artificial Sequence: Synthetic oligonucleotide
  Antisense strand to SEQ ID NO: 2490916
agucagaagacccucaguc

SEQ ID NO: 2490918 - RNA, 19 nt, Artificial Sequence
  Description of Artificial Sequence: Synthetic oligonucleotide
  Sense strand starting at position 2064 of SEQ ID NO: 1887706
auaguucucagagaggcau

SEQ ID NO: 2490919 - RNA, 19 nt, Artificial Sequence
  Description of Artificial Sequence: Synthetic oligonucleotide
  Antisense strand to SEQ ID NO: 2490918
augccucucugagaacuau

SEQ ID NO: 2490920 - RNA, 19 nt, Artificial Sequence
  Description of Artificial Sequence: Synthetic oligonucleotide
  Sense strand starting at position 2148 of SEQ ID NO: 1887706
auauuagaggagugguaag

SEQ ID NO: 2490921 - RNA, 19 nt, Artificial Sequence
  Description of Artificial Sequence: Synthetic oligonucleotide
  Antisense strand to SEQ ID NO: 2490920
cuuaccacuccucuaauau

SEQ ID NO: 2490922 - RNA, 19 nt, Artificial Sequence
  Description of Artificial Sequence: Synthetic oligonucleotide
  Sense strand starting at position 2300 of SEQ ID NO: 1887706
uuguuuccuggugagagaa

SEQ ID NO: 2490923 - RNA, 19 nt, Artificial Sequence
  Description of Artificial Sequence: Synthetic oligonucleotide
  Antisense strand to SEQ ID NO: 2490922
uucucucaccaggaaacaa

SEQ ID NO: 2490924 - RNA, 19 nt, Artificial Sequence
  Description of Artificial Sequence: Synthetic oligonucleotide
  Sense strand starting at position 2543 of SEQ ID NO: 1887706
cgagucauaagcuggaauc

SEQ ID NO: 2490925 - RNA, 19 nt, Artificial Sequence
  Description of Artificial Sequence: Synthetic oligonucleotide
  Antisense strand to SEQ ID NO: 2490924
gauuccagcuuaugacucg

SEQ ID NO: 2490926 - RNA, 19 nt, Artificial Sequence
  Description of Artificial Sequence: Synthetic oligonucleotide
  Sense strand starting at position 2544 of SEQ ID NO: 1887706
gagucauaagcuggaauca

SEQ ID NO: 2490927 - RNA, 19 nt, Artificial Sequence
  Description of Artificial Sequence: Synthetic oligonucleotide
  Antisense strand to SEQ ID NO: 2490926
ugauuccagcuuaugacuc

SEQ ID NO: 2490928 - RNA, 19 nt, Artificial Sequence
  Description of Artificial Sequence: Synthetic oligonucleotide
  Sense strand starting at position 2553 of SEQ ID NO: 1887706
gcuggaaucacgcagacau

SEQ ID NO: 2490929 - RNA, 19 nt, Artificial Sequence
  Description of Artificial Sequence: Synthetic oligonucleotide
  Antisense strand to SEQ ID NO: 2490928
augucugcgugauuccagc

SEQ ID NO: 2490930 - RNA, 19 nt, Artificial Sequence
  Description of Artificial Sequence: Synthetic oligonucleotide
  Sense strand starting at position 2555 of SEQ ID NO: 1887706
uggaaucacgcagacauca

SEQ ID NO: 2490931 - RNA, 19 nt, Artificial Sequence
  Description of Artificial Sequence: Synthetic oligonucleotide
  Antisense strand to SEQ ID NO: 2490930
ugaugucugcgugauucca

SEQ ID NO: 2490932 - RNA, 19 nt, Artificial Sequence
  Description of Artificial Sequence: Synthetic oligonucleotide
  Sense strand starting at position 2784 of SEQ ID NO: 1887706
cuuguaguggcugaguuaa

SEQ ID NO: 2490933 - RNA, 19 nt, Artificial Sequence
  Description of Artificial Sequence: Synthetic oligonucleotide
  Antisense strand to SEQ ID NO: 2490932
uuaacucagccacuacaag

SEQ ID NO: 2490934 - RNA, 19 nt, Artificial Sequence
  Description of Artificial Sequence: Synthetic oligonucleotide
  Sense strand starting at position 2885 of SEQ ID NO: 1887706
ccaagauaugcuugagaag

SEQ ID NO: 2490935 - RNA, 19 nt, Artificial Sequence
  Description of Artificial Sequence: Synthetic oligonucleotide
  Antisense strand to SEQ ID NO: 2490934
cuucucaagcauaucuugg

SEQ ID NO: 2490936 - RNA, 19 nt, Artificial Sequence
  Description of Artificial Sequence: Synthetic oligonucleotide
  Sense strand starting at position 2937 of SEQ ID NO: 1887706
aggagaacugccuguccca

SEQ ID NO: 2490937 - RNA, 19 nt, Artificial Sequence
  Description of Artificial Sequence: Synthetic oligonucleotide
  Antisense strand to SEQ ID NO: 2490936
ugggacaggcaguucuccu

SEQ ID NO: 2490938 - RNA, 19 nt, Artificial Sequence
  Description of Artificial Sequence: Synthetic oligonucleotide
  Sense strand starting at position 3517 of SEQ ID NO: 1887706
uucccaauuccgggaguga

SEQ ID NO: 2490939 - RNA, 19 nt, Artificial Sequence
  Description of Artificial Sequence: Synthetic oligonucleotide
  Antisense strand to SEQ ID NO: 2490938
ucacucccggaauugggaa

SEQ ID NO: 2490940 - RNA, 19 nt, Artificial Sequence
  Description of Artificial Sequence: Synthetic oligonucleotide
  Sense strand starting at position 3539 of SEQ ID NO: 1887706
gcauguggcauuugaccau

SEQ ID NO: 2490941 - RNA, 19 nt, Artificial Sequence
  Description of Artificial Sequence: Synthetic oligonucleotide
  Antisense strand to SEQ ID NO: 2490940
auggucaaaugccacaugc

SEQ ID NO: 2490942 - RNA, 19 nt, Artificial Sequence
  Description of Artificial Sequence: Synthetic oligonucleotide
  Sense strand starting at position 3602 of SEQ ID NO: 1887706
aggucaaaguccucuucuu

SEQ ID NO: 2490943 - RNA, 19 nt, Artificial Sequence
  Description of Artificial Sequence: Synthetic oligonucleotide
  Antisense strand to SEQ ID NO: 2490942
aagaagaggacuuugaccu

SEQ ID NO: 2490944 - RNA, 19 nt, Artificial Sequence
  Description of Artificial Sequence: Synthetic oligonucleotide
  Sense strand starting at position 3661 of SEQ ID NO: 1887706
gcaggagacaguuaugcuu

SEQ ID NO: 2490945 - RNA, 19 nt, Artificial Sequence
  Description of Artificial Sequence: Synthetic oligonucleotide
  Antisense strand to SEQ ID NO: 2490944
aagcauaacugucuccugc

SEQ ID NO: 2490946 - RNA, 19 nt, Artificial Sequence
  Description of Artificial Sequence: Synthetic oligonucleotide
  Sense strand starting at position 3664 of SEQ ID NO: 1887706
ggagacaguuaugcuuagu

SEQ ID NO: 2490947 - RNA, 19 nt, Artificial Sequence
  Description of Artificial Sequence: Synthetic oligonucleotide
  Antisense strand to SEQ ID NO: 2490946
acuaagcauaacugucucc

SEQ ID NO: 2490948 - RNA, 19 nt, Artificial Sequence
  Description of Artificial Sequence: Synthetic oligonucleotide
  Sense strand starting at position 3667 of SEQ ID NO: 1887706
gacaguuaugcuuaguaaa

SEQ ID NO: 2490949 - RNA, 19 nt, Artificial Sequence
  Description of Artificial Sequence: Synthetic oligonucleotide
  Antisense strand to SEQ ID NO: 2490948
uuuacuaagcauaacuguc

SEQ ID NO: 2490950 - RNA, 19 nt, Artificial Sequence
  Description of Artificial Sequence: Synthetic oligonucleotide
  Sense strand starting at position 3680 of SEQ ID NO: 1887706
aguaaauugugaccauugu

SEQ ID NO: 2490951 - RNA, 19 nt, Artificial Sequence
  Description of Artificial Sequence: Synthetic oligonucleotide
  Antisense strand to SEQ ID NO: 2490950
acaauggucacaauuuacu

SEQ ID NO: 2490952 - RNA, 19 nt, Artificial Sequence
  Description of Artificial Sequence: Synthetic oligonucleotide
  Sense strand starting at position 3688 of SEQ ID NO: 1887706
gugaccauugucuauuguu

SEQ ID NO: 2490953 - RNA, 19 nt, Artificial Sequence
  Description of Artificial Sequence: Synthetic oligonucleotide
  Antisense strand to SEQ ID NO: 2490952
aacaauagacaauggucac

SEQ ID NO: 2490954 - RNA, 19 nt, Artificial Sequence
  Description of Artificial Sequence: Synthetic oligonucleotide
  Sense strand starting at position 3779 of SEQ ID NO: 1887706
acacaucaugcuugaagca

SEQ ID NO: 2490955 - RNA, 19 nt, Artificial Sequence
  Description of Artificial Sequence: Synthetic oligonucleotide
  Antisense strand to SEQ ID NO: 2490954
ugcuucaagcaugaugugu

SEQ ID NO: 2490956 - RNA, 19 nt, Artificial Sequence
  Description of Artificial Sequence: Synthetic oligonucleotide
  Sense strand starting at position 3789 of SEQ ID NO: 1887706
cuugaagcauuccuggaaa

SEQ ID NO: 2490957 - RNA, 19 nt, Artificial Sequence
  Description of Artificial Sequence: Synthetic oligonucleotide
  Antisense strand to SEQ ID NO: 2490956
uuuccaggaaugcuucaag

SEQ ID NO: 2490958 - RNA, 19 nt, Artificial Sequence
  Description of Artificial Sequence: Synthetic oligonucleotide
  Sense strand starting at position 3842 of SEQ ID NO: 1887706
uuagcaggcuuauuaaaga

SEQ ID NO: 2490959 - RNA, 19 nt, Artificial Sequence
  Description of Artificial Sequence: Synthetic oligonucleotide
  Antisense strand to SEQ ID NO: 2490958
ucuuuaauaagccugcuaa

SEQ ID NO: 2490960 - RNA, 19 nt, Artificial Sequence
  Description of Artificial Sequence: Synthetic oligonucleotide
  Sense strand starting at position 3881 of SEQ ID NO: 1887706
ggugucugccucuaagaag

SEQ ID NO: 2490961 - RNA, 19 nt, Artificial Sequence
  Description of Artificial Sequence: Synthetic oligonucleotide
  Antisense strand to SEQ ID NO: 2490960
cuucuuagaggcagacacc

SEQ ID NO: 2490962 - RNA, 19 nt, Artificial Sequence
  Description of Artificial Sequence: Synthetic oligonucleotide
  Sense strand starting at position 3910 of SEQ ID NO: 1887706
ugaugaugagucuguuuga

SEQ ID NO: 2490963 - RNA, 19 nt, Artificial Sequence
  Description of Artificial Sequence: Synthetic oligonucleotide
  Antisense strand to SEQ ID NO: 2490962
ucaaacagacucaucauca

SEQ ID NO: 2490964 - RNA, 19 nt, Artificial Sequence
  Description of Artificial Sequence: Synthetic oligonucleotide
  Sense strand starting at position 3911 of SEQ ID NO: 1887706
gaugaugagucuguuugaa

SEQ ID NO: 2490965 - RNA, 19 nt, Artificial Sequence
  Description of Artificial Sequence: Synthetic oligonucleotide
  Antisense strand to SEQ ID NO: 2490964
uucaaacagacucaucauc

SEQ ID NO: 2490966 - RNA, 19 nt, Artificial Sequence
  Description of Artificial Sequence: Synthetic oligonucleotide
  Sense strand starting at position 3913 of SEQ ID NO: 1887706
ugaugagucuguuugaauc

SEQ ID NO: 2490967 - RNA, 19 nt, Artificial Sequence
  Description of Artificial Sequence: Synthetic oligonucleotide
  Antisense strand to SEQ ID NO: 2490966
gauucaaacagacucauca

SEQ ID NO: 2490968 - RNA, 19 nt, Artificial Sequence
  Description of Artificial Sequence: Synthetic oligonucleotide
  Sense strand starting at position 57 of SEQ ID NO: 1887707
ccuagaucucaccaagugu

SEQ ID NO: 2490969 - RNA, 19 nt, Artificial Sequence
  Description of Artificial Sequence: Synthetic oligonucleotide
  Antisense strand to SEQ ID NO: 2490968
acacuuggugagaucuagg

SEQ ID NO: 2490970 - RNA, 19 nt, Artificial Sequence
  Description of Artificial Sequence: Synthetic oligonucleotide
  Sense strand starting at position 680 of SEQ ID NO: 1887707
agaaacacuuaagauagau

SEQ ID NO: 2490971 - RNA, 19 nt, Artificial Sequence
  Description of Artificial Sequence: Synthetic oligonucleotide
  Antisense strand to SEQ ID NO: 2490970
aucuaucuuaaguguuucu

SEQ ID NO: 2490972 - RNA, 19 nt, Artificial Sequence
  Description of Artificial Sequence: Synthetic oligonucleotide
  Sense strand starting at position 694 of SEQ ID NO: 1887707
uagauaggcugagaaauaa

SEQ ID NO: 2490973 - RNA, 19 nt, Artificial Sequence
  Description of Artificial Sequence: Synthetic oligonucleotide
  Antisense strand to SEQ ID NO: 2490972
uuauuucucagccuaucua

SEQ ID NO: 2490974 - RNA, 19 nt, Artificial Sequence
  Description of Artificial Sequence: Synthetic oligonucleotide
  Sense strand starting at position 763 of SEQ ID NO: 1887707
gcacucuucuaagugguua

SEQ ID NO: 2490975 - RNA, 19 nt, Artificial Sequence
  Description of Artificial Sequence: Synthetic oligonucleotide
  Antisense strand to SEQ ID NO: 2490974
uaaccacuuagaagagugc

SEQ ID NO: 2490976 - RNA, 19 nt, Artificial Sequence
  Description of Artificial Sequence: Synthetic oligonucleotide
  Sense strand starting at position 767 of SEQ ID NO: 1887707
ucuucuaagugguuaacau

SEQ ID NO: 2490977 - RNA, 19 nt, Artificial Sequence
  Description of Artificial Sequence: Synthetic oligonucleotide
  Antisense strand to SEQ ID NO: 2490976
auguuaaccacuuagaaga

SEQ ID NO: 2490978 - RNA, 19 nt, Artificial Sequence
  Description of Artificial Sequence: Synthetic oligonucleotide
  Sense strand starting at position 768 of SEQ ID NO: 1887707
cuucuaagugguuaacaua

SEQ ID NO: 2490979 - RNA, 19 nt, Artificial Sequence
  Description of Artificial Sequence: Synthetic oligonucleotide
  Antisense strand to SEQ ID NO: 2490978
uauguuaaccacuuagaag

SEQ ID NO: 2490980 - RNA, 19 nt, Artificial Sequence
  Description of Artificial Sequence: Synthetic oligonucleotide
  Sense strand starting at position 960 of SEQ ID NO: 1887707
cuguguugugaauaaugac

SEQ ID NO: 2490981 - RNA, 19 nt, Artificial Sequence
  Description of Artificial Sequence: Synthetic oligonucleotide
  Antisense strand to SEQ ID NO: 2490980
gucauuauucacaacacag

SEQ ID NO: 2490982 - RNA, 19 nt, Artificial Sequence
  Description of Artificial Sequence: Synthetic oligonucleotide
  Sense strand starting at position 1866 of SEQ ID NO: 1887707
ggagggugugccuguaguu

SEQ ID NO: 2490983 - RNA, 19 nt, Artificial Sequence
  Description of Artificial Sequence: Synthetic oligonucleotide
  Antisense strand to SEQ ID NO: 2490982
aacuacaggcacacccucc

SEQ ID NO: 2490984 - RNA, 19 nt, Artificial Sequence
  Description of Artificial Sequence: Synthetic oligonucleotide
  Sense strand starting at position 1915 of SEQ ID NO: 1887707
ucacaugagccaugaucuu

SEQ ID NO: 2490985 - RNA, 19 nt, Artificial Sequence
  Description of Artificial Sequence: Synthetic oligonucleotide
  Antisense strand to SEQ ID NO: 2490984
aagaucauggcucauguga

SEQ ID NO: 2490986 - RNA, 19 nt, Artificial Sequence
  Description of Artificial Sequence: Synthetic oligonucleotide
  Sense strand starting at position 1924 of SEQ ID NO: 1887707
ccaugaucuugacacugga

SEQ ID NO: 2490987 - RNA, 19 nt, Artificial Sequence
  Description of Artificial Sequence: Synthetic oligonucleotide
  Antisense strand to SEQ ID NO: 2490986
uccagugucaagaucaugg

SEQ ID NO: 2490988 - RNA, 19 nt, Artificial Sequence
  Description of Artificial Sequence: Synthetic oligonucleotide
  Sense strand starting at position 2025 of SEQ ID NO: 1887707
cccugaacuccuggguaaa

SEQ ID NO: 2490989 - RNA, 19 nt, Artificial Sequence
  Description of Artificial Sequence: Synthetic oligonucleotide
  Antisense strand to SEQ ID NO: 2490988
uuuacccaggaguucaggg

SEQ ID NO: 2490990 - RNA, 19 nt, Artificial Sequence
  Description of Artificial Sequence: Synthetic oligonucleotide
  Sense strand starting at position 2240 of SEQ ID NO: 1887707
cacugagggucuccuuuaa

SEQ ID NO: 2490991 - RNA, 19 nt, Artificial Sequence
  Description of Artificial Sequence: Synthetic oligonucleotide
  Antisense strand to SEQ ID NO: 2490990
uuaaaggagacccucagug

SEQ ID NO: 2490992 - RNA, 19 nt, Artificial Sequence
  Description of Artificial Sequence: Synthetic oligonucleotide
  Sense strand starting at position 2325 of SEQ ID NO: 1887707
ggaguaggguuccuccaaa

SEQ ID NO: 2490993 - RNA, 19 nt, Artificial Sequence
  Description of Artificial Sequence: Synthetic oligonucleotide
  Antisense strand to SEQ ID NO: 2490992
uuuggaggaacccuacucc

SEQ ID NO: 2490994 - RNA, 19 nt, Artificial Sequence
  Description of Artificial Sequence: Synthetic oligonucleotide
  Sense strand starting at position 2726 of SEQ ID NO: 1887707
agggacuucuccuucuuau

SEQ ID NO: 2490995 - RNA, 19 nt, Artificial Sequence
  Description of Artificial Sequence: Synthetic oligonucleotide
  Antisense strand to SEQ ID NO: 2490994
auaagaaggagaagucccu

SEQ ID NO: 2490996 - RNA, 19 nt, Artificial Sequence
  Description of Artificial Sequence: Synthetic oligonucleotide
  Sense strand starting at position 3104 of SEQ ID NO: 1887707
ggaguuucucaggaagcug

SEQ ID NO: 2490997 - RNA, 19 nt, Artificial Sequence
  Description of Artificial Sequence: Synthetic oligonucleotide
  Antisense strand to SEQ ID NO: 2490996
cagcuuccugagaaacucc

SEQ ID NO: 2490998 - RNA, 19 nt, Artificial Sequence
  Description of Artificial Sequence: Synthetic oligonucleotide
  Sense strand starting at position 3181 of SEQ ID NO: 1887707
gggugaccucuuuauagca

SEQ ID NO: 2490999 - RNA, 19 nt, Artificial Sequence
  Description of Artificial Sequence: Synthetic oligonucleotide
  Antisense strand to SEQ ID NO: 2490998
ugcuauaaagaggucaccc

SEQ ID NO: 2491000 - RNA, 19 nt, Artificial Sequence
  Description of Artificial Sequence: Synthetic oligonucleotide
  Sense strand starting at position 3281 of SEQ ID NO: 1887707
gggugauguuuggagagag

SEQ ID NO: 2491001 - RNA, 19 nt, Artificial Sequence
  Description of Artificial Sequence: Synthetic oligonucleotide
  Antisense strand to SEQ ID NO: 2491000
cucucuccaaacaucaccc

SEQ ID NO: 2491002 - RNA, 19 nt, Artificial Sequence
  Description of Artificial Sequence: Synthetic oligonucleotide
  Sense strand starting at position 3487 of SEQ ID NO: 1887707
ccuggaugcaaaggucuau

SEQ ID NO: 2491003 - RNA, 19 nt, Artificial Sequence
  Description of Artificial Sequence: Synthetic oligonucleotide
  Antisense strand to SEQ ID NO: 2491002
auagaccuuugcauccagg

SEQ ID NO: 2491004 - RNA, 19 nt, Artificial Sequence
  Description of Artificial Sequence: Synthetic oligonucleotide
  Sense strand starting at position 3491 of SEQ ID NO: 1887707
gaugcaaaggucuauguag

SEQ ID NO: 2491005 - RNA, 19 nt, Artificial Sequence
  Description of Artificial Sequence: Synthetic oligonucleotide
  Antisense strand to SEQ ID NO: 2491004
cuacauagaccuuugcauc

SEQ ID NO: 2491006 - RNA, 19 nt, Artificial Sequence
  Description of Artificial Sequence: Synthetic oligonucleotide
  Sense strand starting at position 3507 of SEQ ID NO: 1887707
uagggcuuaucuguguaga

SEQ ID NO: 2491007 - RNA, 19 nt, Artificial Sequence
  Description of Artificial Sequence: Synthetic oligonucleotide
  Antisense strand to SEQ ID NO: 2491006
ucuacacagauaagcccua

SEQ ID NO: 2491008 - RNA, 19 nt, Artificial Sequence
  Description of Artificial Sequence: Synthetic oligonucleotide
  Sense strand starting at position 3508 of SEQ ID NO: 1887707
agggcuuaucuguguagag

SEQ ID NO: 2491009 - RNA, 19 nt, Artificial Sequence
  Description of Artificial Sequence: Synthetic oligonucleotide
  Antisense strand to SEQ ID NO: 2491008
cucuacacagauaagcccu

SEQ ID NO: 2491010 - RNA, 19 nt, Artificial Sequence
  Description of Artificial Sequence: Synthetic oligonucleotide
  Sense strand starting at position 3509 of SEQ ID NO: 1887707
gggcuuaucuguguagagu

SEQ ID NO: 2491011 - RNA, 19 nt, Artificial Sequence
  Description of Artificial Sequence: Synthetic oligonucleotide
  Antisense strand to SEQ ID NO: 2491010
acucuacacagauaagccc

SEQ ID NO: 2491012 - RNA, 19 nt, Artificial Sequence
  Description of Artificial Sequence: Synthetic oligonucleotide
  Sense strand starting at position 3510 of SEQ ID NO: 1887707
ggcuuaucuguguagaguu

SEQ ID NO: 2491013 - RNA, 19 nt, Artificial Sequence
  Description of Artificial Sequence: Synthetic oligonucleotide
  Antisense strand to SEQ ID NO: 2491012
aacucuacacagauaagcc

SEQ ID NO: 2491014 - RNA, 19 nt, Artificial Sequence
  Description of Artificial Sequence: Synthetic oligonucleotide
  Sense strand starting at position 3545 of SEQ ID NO: 1887707
gugugugagcucuauagga

SEQ ID NO: 2491015 - RNA, 19 nt, Artificial Sequence
  Description of Artificial Sequence: Synthetic oligonucleotide
  Antisense strand to SEQ ID NO: 2491014
uccuauagagcucacacac

SEQ ID NO: 2491016 - RNA, 19 nt, Artificial Sequence
  Description of Artificial Sequence: Synthetic oligonucleotide
  Sense strand starting at position 3547 of SEQ ID NO: 1887707
gugugagcucuauaggaug

SEQ ID NO: 2491017 - RNA, 19 nt, Artificial Sequence
  Description of Artificial Sequence: Synthetic oligonucleotide
  Antisense strand to SEQ ID NO: 2491016
cauccuauagagcucacac

SEQ ID NO: 2491018 - RNA, 19 nt, Artificial Sequence
  Description of Artificial Sequence: Synthetic oligonucleotide
  Sense strand starting at position 3566 of SEQ ID NO: 1887707
gguugcacauggucuagau

SEQ ID NO: 2491019 - RNA, 19 nt, Artificial Sequence
  Description of Artificial Sequence: Synthetic oligonucleotide
  Antisense strand to SEQ ID NO: 2491018
aucuagaccaugugcaacc

SEQ ID NO: 2491020 - RNA, 19 nt, Artificial Sequence
  Description of Artificial Sequence: Synthetic oligonucleotide
  Sense strand starting at position 3570 of SEQ ID NO: 1887707
gcacauggucuagauguau

SEQ ID NO: 2491021 - RNA, 19 nt, Artificial Sequence
  Description of Artificial Sequence: Synthetic oligonucleotide
  Antisense strand to SEQ ID NO: 2491020
auacaucuagaccaugugc

SEQ ID NO: 2491022 - RNA, 19 nt, Artificial Sequence
  Description of Artificial Sequence: Synthetic oligonucleotide
  Sense strand starting at position 3576 of SEQ ID NO: 1887707
ggucuagauguauguacgu

SEQ ID NO: 2491023 - RNA, 19 nt, Artificial Sequence
  Description of Artificial Sequence: Synthetic oligonucleotide
  Antisense strand to SEQ ID NO: 2491022
acguacauacaucuagacc

SEQ ID NO: 2491024 - RNA, 19 nt, Artificial Sequence
  Description of Artificial Sequence: Synthetic oligonucleotide
  Sense strand starting at position 3591 of SEQ ID NO: 1887707
acguguagguuguuucaaa

SEQ ID NO: 2491025 - RNA, 19 nt, Artificial Sequence
  Description of Artificial Sequence: Synthetic oligonucleotide
  Antisense strand to SEQ ID NO: 2491024
uuugaaacaaccuacacgu

SEQ ID NO: 2491026 - RNA, 19 nt, Artificial Sequence
  Description of Artificial Sequence: Synthetic oligonucleotide
  Sense strand starting at position 3592 of SEQ ID NO: 1887707
cguguagguuguuucaaag

SEQ ID NO: 2491027 - RNA, 19 nt, Artificial Sequence
  Description of Artificial Sequence: Synthetic oligonucleotide
  Antisense strand to SEQ ID NO: 2491026
cuuugaaacaaccuacacg

SEQ ID NO: 2491028 - RNA, 19 nt, Artificial Sequence
  Description of Artificial Sequence: Synthetic oligonucleotide
  Sense strand starting at position 3670 of SEQ ID NO: 1887707
ucuguauguguguauauga

SEQ ID NO: 2491029 - RNA, 19 nt, Artificial Sequence
  Description of Artificial Sequence: Synthetic oligonucleotide
  Antisense strand to SEQ ID NO: 2491028
ucauauacacacauacaga

SEQ ID NO: 2491030 - RNA, 19 nt, Artificial Sequence
  Description of Artificial Sequence: Synthetic oligonucleotide
  Sense strand starting at position 3677 of SEQ ID NO: 1887707
guguguauaugaucuguuu

SEQ ID NO: 2491031 - RNA, 19 nt, Artificial Sequence
  Description of Artificial Sequence: Synthetic oligonucleotide
  Antisense strand to SEQ ID NO: 2491030
aaacagaucauauacacac

SEQ ID NO: 2491032 - RNA, 19 nt, Artificial Sequence
  Description of Artificial Sequence: Synthetic oligonucleotide
  Sense strand starting at position 3679 of SEQ ID NO: 1887707
guguauaugaucuguuugu

SEQ ID NO: 2491033 - RNA, 19 nt, Artificial Sequence
  Description of Artificial Sequence: Synthetic oligonucleotide
  Antisense strand to SEQ ID NO: 2491032
acaaacagaucauauacac

SEQ ID NO: 2491034 - RNA, 19 nt, Artificial Sequence
  Description of Artificial Sequence: Synthetic oligonucleotide
  Sense strand starting at position 3683 of SEQ ID NO: 1887707
auaugaucuguuugugugu

SEQ ID NO: 2491035 - RNA, 19 nt, Artificial Sequence
  Description of Artificial Sequence: Synthetic oligonucleotide
  Antisense strand to SEQ ID NO: 2491034
acacacaaacagaucauau

SEQ ID NO: 2491036 - RNA, 19 nt, Artificial Sequence
  Description of Artificial Sequence: Synthetic oligonucleotide
  Sense strand starting at position 3722 of SEQ ID NO: 1887707
uggucuguguguauacgau

SEQ ID NO: 2491037 - RNA, 19 nt, Artificial Sequence
  Description of Artificial Sequence: Synthetic oligonucleotide
  Antisense strand to SEQ ID NO: 2491036
aucguauacacacagacca

SEQ ID NO: 2491038 - RNA, 19 nt, Artificial Sequence
  Description of Artificial Sequence: Synthetic oligonucleotide
  Sense strand starting at position 3730 of SEQ ID NO: 1887707
guguauacgaucuguaaug

SEQ ID NO: 2491039 - RNA, 19 nt, Artificial Sequence
  Description of Artificial Sequence: Synthetic oligonucleotide
  Antisense strand to SEQ ID NO: 2491038
cauuacagaucguauacac

SEQ ID NO: 2491040 - RNA, 19 nt, Artificial Sequence
  Description of Artificial Sequence: Synthetic oligonucleotide
  Sense strand starting at position 3731 of SEQ ID NO: 1887707
uguauacgaucuguaaugu

SEQ ID NO: 2491041 - RNA, 19 nt, Artificial Sequence
  Description of Artificial Sequence: Synthetic oligonucleotide
  Antisense strand to SEQ ID NO: 2491040
acauuacagaucguauaca

SEQ ID NO: 2491042 - RNA, 19 nt, Artificial Sequence
  Description of Artificial Sequence: Synthetic oligonucleotide
  Sense strand starting at position 3732 of SEQ ID NO: 1887707
guauacgaucuguaaugug

SEQ ID NO: 2491043 - RNA, 19 nt, Artificial Sequence
  Description of Artificial Sequence: Synthetic oligonucleotide
  Antisense strand to SEQ ID NO: 2491042
cacauuacagaucguauac

SEQ ID NO: 2491044 - RNA, 19 nt, Artificial Sequence
  Description of Artificial Sequence: Synthetic oligonucleotide
  Sense strand starting at position 3737 of SEQ ID NO: 1887707
cgaucuguaaugugcauuu

SEQ ID NO: 2491045 - RNA, 19 nt, Artificial Sequence
  Description of Artificial Sequence: Synthetic oligonucleotide
  Antisense strand to SEQ ID NO: 2491044
aaaugcacauuacagaucg

SEQ ID NO: 2491046 - RNA, 19 nt, Artificial Sequence
  Description of Artificial Sequence: Synthetic oligonucleotide
  Sense strand starting at position 3779 of SEQ ID NO: 1887707
guggcuggucuguauguau

SEQ ID NO: 2491047 - RNA, 19 nt, Artificial Sequence
  Description of Artificial Sequence: Synthetic oligonucleotide
  Antisense strand to SEQ ID NO: 2491046
auacauacagaccagccac

SEQ ID NO: 2491048 - RNA, 19 nt, Artificial Sequence
  Description of Artificial Sequence: Synthetic oligonucleotide
  Sense strand starting at position 786 of SEQ ID NO: 1887708
agaagaagacucuguucca

SEQ ID NO: 2491049 - RNA, 19 nt, Artificial Sequence
  Description of Artificial Sequence: Synthetic oligonucleotide
  Antisense strand to SEQ ID NO: 2491048
uggaacagagucuucuucu

SEQ ID NO: 2491050 - RNA, 19 nt, Artificial Sequence
  Description of Artificial Sequence: Synthetic oligonucleotide
  Sense strand starting at position 1127 of SEQ ID NO: 1887708
gagacccugucguuaaaua

SEQ ID NO: 2491051 - RNA, 19 nt, Artificial Sequence
  Description of Artificial Sequence: Synthetic oligonucleotide
  Antisense strand to SEQ ID NO: 2491050
uauuuaacgacagggucuc

SEQ ID NO: 2491052 - RNA, 19 nt, Artificial Sequence
  Description of Artificial Sequence: Synthetic oligonucleotide
  Sense strand starting at position 1229 of SEQ ID NO: 1887708
agagaaagcuuccuuauug

SEQ ID NO: 2491053 - RNA, 19 nt, Artificial Sequence
  Description of Artificial Sequence: Synthetic oligonucleotide
  Antisense strand to SEQ ID NO: 2491052
caauaaggaagcuuucucu

SEQ ID NO: 2491054 - RNA, 19 nt, Artificial Sequence
  Description of Artificial Sequence: Synthetic oligonucleotide
  Sense strand starting at position 1241 of SEQ ID NO: 1887708
cuuauugcccucugaaguu

SEQ ID NO: 2491055 - RNA, 19 nt, Artificial Sequence
  Description of Artificial Sequence: Synthetic oligonucleotide
  Antisense strand to SEQ ID NO: 2491054
aacuucagagggcaauaag

SEQ ID NO: 2491056 - RNA, 19 nt, Artificial Sequence
  Description of Artificial Sequence: Synthetic oligonucleotide
  Sense strand starting at position 1307 of SEQ ID NO: 1887708
acgaauguauuugaucaua

SEQ ID NO: 2491057 - RNA, 19 nt, Artificial Sequence
  Description of Artificial Sequence: Synthetic oligonucleotide
  Antisense strand to SEQ ID NO: 2491056
uaugaucaaauacauucgu

SEQ ID NO: 2491058 - RNA, 19 nt, Artificial Sequence
  Description of Artificial Sequence: Synthetic oligonucleotide
  Sense strand starting at position 1312 of SEQ ID NO: 1887708
uguauuugaucauaguguu

SEQ ID NO: 2491059 - RNA, 19 nt, Artificial Sequence
  Description of Artificial Sequence: Synthetic oligonucleotide
  Antisense strand to SEQ ID NO: 2491058
aacacuaugaucaaauaca

SEQ ID NO: 2491060 - RNA, 19 nt, Artificial Sequence
  Description of Artificial Sequence: Synthetic oligonucleotide
  Sense strand starting at position 1318 of SEQ ID NO: 1887708
ugaucauaguguuaccuga

SEQ ID NO: 2491061 - RNA, 19 nt, Artificial Sequence
  Description of Artificial Sequence: Synthetic oligonucleotide
  Antisense strand to SEQ ID NO: 2491060
ucagguaacacuaugauca

SEQ ID NO: 2491062 - RNA, 19 nt, Artificial Sequence
  Description of Artificial Sequence: Synthetic oligonucleotide
  Sense strand starting at position 1320 of SEQ ID NO: 1887708
aucauaguguuaccugaca

SEQ ID NO: 2491063 - RNA, 19 nt, Artificial Sequence
  Description of Artificial Sequence: Synthetic oligonucleotide
  Antisense strand to SEQ ID NO: 2491062
ugucagguaacacuaugau

SEQ ID NO: 2491064 - RNA, 19 nt, Artificial Sequence
  Description of Artificial Sequence: Synthetic oligonucleotide
  Sense strand starting at position 1520 of SEQ ID NO: 1887708
agugucuuaugcuuagguu

SEQ ID NO: 2491065 - RNA, 19 nt, Artificial Sequence
  Description of Artificial Sequence: Synthetic oligonucleotide
  Antisense strand to SEQ ID NO: 2491064
aaccuaagcauaagacacu

SEQ ID NO: 2491066 - RNA, 19 nt, Artificial Sequence
  Description of Artificial Sequence: Synthetic oligonucleotide
  Sense strand starting at position 1581 of SEQ ID NO: 1887708
aaggguuugucgugguuca

SEQ ID NO: 2491067 - RNA, 19 nt, Artificial Sequence
  Description of Artificial Sequence: Synthetic oligonucleotide
  Antisense strand to SEQ ID NO: 2491066
ugaaccacgacaaacccuu

SEQ ID NO: 2491068 - RNA, 19 nt, Artificial Sequence
  Description of Artificial Sequence: Synthetic oligonucleotide
  Sense strand starting at position 1582 of SEQ ID NO: 1887708
aggguuugucgugguucau

SEQ ID NO: 2491069 - RNA, 19 nt, Artificial Sequence
  Description of Artificial Sequence: Synthetic oligonucleotide
  Antisense strand to SEQ ID NO: 2491068
augaaccacgacaaacccu

SEQ ID NO: 2491070 - RNA, 19 nt, Artificial Sequence
  Description of Artificial Sequence: Synthetic oligonucleotide
  Sense strand starting at position 1585 of SEQ ID NO: 1887708
guuugucgugguucauacu

SEQ ID NO: 2491071 - RNA, 19 nt, Artificial Sequence
  Description of Artificial Sequence: Synthetic oligonucleotide
  Antisense strand to SEQ ID NO: 2491070
aguaugaaccacgacaaac

SEQ ID NO: 2491072 - RNA, 19 nt, Artificial Sequence
  Description of Artificial Sequence: Synthetic oligonucleotide
  Sense strand starting at position 1745 of SEQ ID NO: 1887708
cuacuugguuggcugagaa

SEQ ID NO: 2491073 - RNA, 19 nt, Artificial Sequence
  Description of Artificial Sequence: Synthetic oligonucleotide
  Antisense strand to SEQ ID NO: 2491072
uucucagccaaccaaguag

SEQ ID NO: 2491074 - RNA, 19 nt, Artificial Sequence
  Description of Artificial Sequence: Synthetic oligonucleotide
  Sense strand starting at position 1818 of SEQ ID NO: 1887708
uccaguguugccuggacaa

SEQ ID NO: 2491075 - RNA, 19 nt, Artificial Sequence
  Description of Artificial Sequence: Synthetic oligonucleotide
  Antisense strand to SEQ ID NO: 2491074
uuguccaggcaacacugga

SEQ ID NO: 2491076 - RNA, 19 nt, Artificial Sequence
  Description of Artificial Sequence: Synthetic oligonucleotide
  Sense strand starting at position 1820 of SEQ ID NO: 1887708
caguguugccuggacaaca

SEQ ID NO: 2491077 - RNA, 19 nt, Artificial Sequence
  Description of Artificial Sequence: Synthetic oligonucleotide
  Antisense strand to SEQ ID NO: 2491076
uguuguccaggcaacacug

SEQ ID NO: 2491078 - RNA, 19 nt, Artificial Sequence
  Description of Artificial Sequence: Synthetic oligonucleotide
  Sense strand starting at position 2007 of SEQ ID NO: 1887708
ggcagaaacuucuuugaaa

SEQ ID NO: 2491079 - RNA, 19 nt, Artificial Sequence
  Description of Artificial Sequence: Synthetic oligonucleotide
  Antisense strand to SEQ ID NO: 2491078
uuucaaagaaguuucugcc

SEQ ID NO: 2491080 - RNA, 19 nt, Artificial Sequence
  Description of Artificial Sequence: Synthetic oligonucleotide
  Sense strand starting at position 2008 of SEQ ID NO: 1887708
gcagaaacuucuuugaaac

SEQ ID NO: 2491081 - RNA, 19 nt, Artificial Sequence
  Description of Artificial Sequence: Synthetic oligonucleotide
  Antisense strand to SEQ ID NO: 2491080
guuucaaagaaguuucugc

SEQ ID NO: 2491082 - RNA, 19 nt, Artificial Sequence
  Description of Artificial Sequence: Synthetic oligonucleotide
  Sense strand starting at position 2051 of SEQ ID NO: 1887708
uaggguagaucagauaauu

SEQ ID NO: 2491083 - RNA, 19 nt, Artificial Sequence
  Description of Artificial Sequence: Synthetic oligonucleotide
  Antisense strand to SEQ ID NO: 2491082
aauuaucugaucuacccua

SEQ ID NO: 2491084 - RNA, 19 nt, Artificial Sequence
  Description of Artificial Sequence: Synthetic oligonucleotide
  Sense strand starting at position 2161 of SEQ ID NO: 1887708
agaucucauuucuacagga

SEQ ID NO: 2491085 - RNA, 19 nt, Artificial Sequence
  Description of Artificial Sequence: Synthetic oligonucleotide
  Antisense strand to SEQ ID NO: 2491084
uccuguagaaaugagaucu

SEQ ID NO: 2491086 - RNA, 19 nt, Artificial Sequence
  Description of Artificial Sequence: Synthetic oligonucleotide
  Sense strand starting at position 2552 of SEQ ID NO: 1887708
uuagaagggccuggugaau

SEQ ID NO: 2491087 - RNA, 19 nt, Artificial Sequence
  Description of Artificial Sequence: Synthetic oligonucleotide
  Antisense strand to SEQ ID NO: 2491086
auucaccaggcccuucuaa

SEQ ID NO: 2491088 - RNA, 19 nt, Artificial Sequence
  Description of Artificial Sequence: Synthetic oligonucleotide
  Sense strand starting at position 2564 of SEQ ID NO: 1887708
ggugaaugacacugcuacu

SEQ ID NO: 2491089 - RNA, 19 nt, Artificial Sequence
  Description of Artificial Sequence: Synthetic oligonucleotide
  Antisense strand to SEQ ID NO: 2491088
aguagcagugucauucacc

SEQ ID NO: 2491090 - RNA, 19 nt, Artificial Sequence
  Description of Artificial Sequence: Synthetic oligonucleotide
  Sense strand starting at position 2729 of SEQ ID NO: 1887708
ggcagaguggaugaaguua

SEQ ID NO: 2491091 - RNA, 19 nt, Artificial Sequence
  Description of Artificial Sequence: Synthetic oligonucleotide
  Antisense strand to SEQ ID NO: 2491090
uaacuucauccacucugcc

SEQ ID NO: 2491092 - RNA, 19 nt, Artificial Sequence
  Description of Artificial Sequence: Synthetic oligonucleotide
  Sense strand starting at position 2744 of SEQ ID NO: 1887708
guuagaagcaccgaauaaa

SEQ ID NO: 2491093 - RNA, 19 nt, Artificial Sequence
  Description of Artificial Sequence: Synthetic oligonucleotide
  Antisense strand to SEQ ID NO: 2491092
uuuauucggugcuucuaac

SEQ ID NO: 2491094 - RNA, 19 nt, Artificial Sequence
  Description of Artificial Sequence: Synthetic oligonucleotide
  Sense strand starting at position 2770 of SEQ ID NO: 1887708
cucugagauccguauaacc

SEQ ID NO: 2491095 - RNA, 19 nt, Artificial Sequence
  Description of Artificial Sequence: Synthetic oligonucleotide
  Antisense strand to SEQ ID NO: 2491094
gguuauacggaucucagag

SEQ ID NO: 2491096 - RNA, 19 nt, Artificial Sequence
  Description of Artificial Sequence: Synthetic oligonucleotide
  Sense strand starting at position 2772 of SEQ ID NO: 1887708
cugagauccguauaaccug

SEQ ID NO: 2491097 - RNA, 19 nt, Artificial Sequence
  Description of Artificial Sequence: Synthetic oligonucleotide
  Antisense strand to SEQ ID NO: 2491096
cagguuauacggaucucag

SEQ ID NO: 2491098 - RNA, 19 nt, Artificial Sequence
  Description of Artificial Sequence: Synthetic oligonucleotide
  Sense strand starting at position 2892 of SEQ ID NO: 1887708
ccgcgaaacugcugcuuaa

SEQ ID NO: 2491099 - RNA, 19 nt, Artificial Sequence
  Description of Artificial Sequence: Synthetic oligonucleotide
  Antisense strand to SEQ ID NO: 2491098
uuaagcagcaguuucgcgg

SEQ ID NO: 2491100 - RNA, 19 nt, Artificial Sequence
  Description of Artificial Sequence: Synthetic oligonucleotide
  Sense strand starting at position 2932 of SEQ ID NO: 1887708
ccgcgcaaguucucaaaga

SEQ ID NO: 2491101 - RNA, 19 nt, Artificial Sequence
  Description of Artificial Sequence: Synthetic oligonucleotide
  Antisense strand to SEQ ID NO: 2491100
ucuuugagaacuugcgcgg

SEQ ID NO: 2491102 - RNA, 19 nt, Artificial Sequence
  Description of Artificial Sequence: Synthetic oligonucleotide
  Sense strand starting at position 2933 of SEQ ID NO: 1887708
cgcgcaaguucucaaagag

SEQ ID NO: 2491103 - RNA, 19 nt, Artificial Sequence
  Description of Artificial Sequence: Synthetic oligonucleotide
  Antisense strand to SEQ ID NO: 2491102
cucuuugagaacuugcgcg

SEQ ID NO: 2491104 - RNA, 19 nt, Artificial Sequence
  Description of Artificial Sequence: Synthetic oligonucleotide
  Sense strand starting at position 3176 of SEQ ID NO: 1887708
ccgcuuguccuuugccauu

SEQ ID NO: 2491105 - RNA, 19 nt, Artificial Sequence
  Description of Artificial Sequence: Synthetic oligonucleotide
  Antisense strand to SEQ ID NO: 2491104
aauggcaaaggacaagcgg

SEQ ID NO: 2491106 - RNA, 19 nt, Artificial Sequence
  Description of Artificial Sequence: Synthetic oligonucleotide
  Sense strand starting at position 3267 of SEQ ID NO: 1887708
gggucugauuuccacacau

SEQ ID NO: 2491107 - RNA, 19 nt, Artificial Sequence
  Description of Artificial Sequence: Synthetic oligonucleotide
  Antisense strand to SEQ ID NO: 2491106
auguguggaaaucagaccc

SEQ ID NO: 2491108 - RNA, 19 nt, Artificial Sequence
  Description of Artificial Sequence: Synthetic oligonucleotide
  Sense strand starting at position 3894 of SEQ ID NO: 1887708
cgaggugaccaggguugaa

SEQ ID NO: 2491109 - RNA, 19 nt, Artificial Sequence
  Description of Artificial Sequence: Synthetic oligonucleotide
  Antisense strand to SEQ ID NO: 2491108
uucaacccuggucaccucg

SEQ ID NO: 2491110 - RNA, 19 nt, Artificial Sequence
  Description of Artificial Sequence: Synthetic oligonucleotide
  Sense strand starting at position 366 of SEQ ID NO: 1887709
uggagacuaaucugggcaa

SEQ ID NO: 2491111 - RNA, 19 nt, Artificial Sequence
  Description of Artificial Sequence: Synthetic oligonucleotide
  Antisense strand to SEQ ID NO: 2491110
uugcccagauuagucucca

SEQ ID NO: 2491112 - RNA, 19 nt, Artificial Sequence
  Description of Artificial Sequence: Synthetic oligonucleotide
  Sense strand starting at position 368 of SEQ ID NO: 1887709
gagacuaaucugggcaaug

SEQ ID NO: 2491113 - RNA, 19 nt, Artificial Sequence
  Description of Artificial Sequence: Synthetic oligonucleotide
  Antisense strand to SEQ ID NO: 2491112
cauugcccagauuagucuc

SEQ ID NO: 2491114 - RNA, 19 nt, Artificial Sequence
  Description of Artificial Sequence: Synthetic oligonucleotide
  Sense strand starting at position 369 of SEQ ID NO: 1887709
agacuaaucugggcaaugu

SEQ ID NO: 2491115 - RNA, 19 nt, Artificial Sequence
  Description of Artificial Sequence: Synthetic oligonucleotide
  Antisense strand to SEQ ID NO: 2491114
acauugcccagauuagucu

SEQ ID NO: 2491116 - RNA, 19 nt, Artificial Sequence
  Description of Artificial Sequence: Synthetic oligonucleotide
  Sense strand starting at position 370 of SEQ ID NO: 1887709
gacuaaucugggcaaugua

SEQ ID NO: 2491117 - RNA, 19 nt, Artificial Sequence
  Description of Artificial Sequence: Synthetic oligonucleotide
  Antisense strand to SEQ ID NO: 2491116
uacauugcccagauuaguc

SEQ ID NO: 2491118 - RNA, 19 nt, Artificial Sequence
  Description of Artificial Sequence: Synthetic oligonucleotide
  Sense strand starting at position 839 of SEQ ID NO: 1887709
auuaguauuaacugugguu

SEQ ID NO: 2491119 - RNA, 19 nt, Artificial Sequence
  Description of Artificial Sequence: Synthetic oligonucleotide
  Antisense strand to SEQ ID NO: 2491118
aaccacaguuaauacuaau

SEQ ID NO: 2491120 - RNA, 19 nt, Artificial Sequence
  Description of Artificial Sequence: Synthetic oligonucleotide
  Sense strand starting at position 841 of SEQ ID NO: 1887709
uaguauuaacugugguuac

SEQ ID NO: 2491121 - RNA, 19 nt, Artificial Sequence
  Description of Artificial Sequence: Synthetic oligonucleotide
  Antisense strand to SEQ ID NO: 2491120
guaaccacaguuaauacua

SEQ ID NO: 2491122 - RNA, 19 nt, Artificial Sequence
  Description of Artificial Sequence: Synthetic oligonucleotide
  Sense strand starting at position 893 of SEQ ID NO: 1887709
uccagucucgcugaaacuu

SEQ ID NO: 2491123 - RNA, 19 nt, Artificial Sequence
  Description of Artificial Sequence: Synthetic oligonucleotide
  Antisense strand to SEQ ID NO: 2491122
aaguuucagcgagacugga

SEQ ID NO: 2491124 - RNA, 19 nt, Artificial Sequence
  Description of Artificial Sequence: Synthetic oligonucleotide
  Sense strand starting at position 989 of SEQ ID NO: 1887709
uuucuaugagcucgacuuu

SEQ ID NO: 2491125 - RNA, 19 nt, Artificial Sequence
  Description of Artificial Sequence: Synthetic oligonucleotide
  Antisense strand to SEQ ID NO: 2491124
aaagucgagcucauagaaa

SEQ ID NO: 2491126 - RNA, 19 nt, Artificial Sequence
  Description of Artificial Sequence: Synthetic oligonucleotide
  Sense strand starting at position 1099 of SEQ ID NO: 1887709
uguugucuugaauggcaga

SEQ ID NO: 2491127 - RNA, 19 nt, Artificial Sequence
  Description of Artificial Sequence: Synthetic oligonucleotide
  Antisense strand to SEQ ID NO: 2491126
ucugccauucaagacaaca

SEQ ID NO: 2491128 - RNA, 19 nt, Artificial Sequence
  Description of Artificial Sequence: Synthetic oligonucleotide
  Sense strand starting at position 1100 of SEQ ID NO: 1887709
guugucuugaauggcagaa

SEQ ID NO: 2491129 - RNA, 19 nt, Artificial Sequence
  Description of Artificial Sequence: Synthetic oligonucleotide
  Antisense strand to SEQ ID NO: 2491128
uucugccauucaagacaac

SEQ ID NO: 2491130 - RNA, 19 nt, Artificial Sequence
  Description of Artificial Sequence: Synthetic oligonucleotide
  Sense strand starting at position 1146 of SEQ ID NO: 1887709
auuccaucguguguauaug

SEQ ID NO: 2491131 - RNA, 19 nt, Artificial Sequence
  Description of Artificial Sequence: Synthetic oligonucleotide
  Antisense strand to SEQ ID NO: 2491130
cauauacacacgauggaau

SEQ ID NO: 2491132 - RNA, 19 nt, Artificial Sequence
  Description of Artificial Sequence: Synthetic oligonucleotide
  Sense strand starting at position 1179 of SEQ ID NO: 1887709
uccauuaugucccuugaug

SEQ ID NO: 2491133 - RNA, 19 nt, Artificial Sequence
  Description of Artificial Sequence: Synthetic oligonucleotide
  Antisense strand to SEQ ID NO: 2491132
caucaagggacauaaugga

SEQ ID NO: 2491134 - RNA, 19 nt, Artificial Sequence
  Description of Artificial Sequence: Synthetic oligonucleotide
  Sense strand starting at position 1181 of SEQ ID NO: 1887709
cauuaugucccuugaugga

SEQ ID NO: 2491135 - RNA, 19 nt, Artificial Sequence
  Description of Artificial Sequence: Synthetic oligonucleotide
  Antisense strand to SEQ ID NO: 2491134
uccaucaagggacauaaug

SEQ ID NO: 2491136 - RNA, 19 nt, Artificial Sequence
  Description of Artificial Sequence: Synthetic oligonucleotide
  Sense strand starting at position 1240 of SEQ ID NO: 1887709
cugcaaugaacuugagagu

SEQ ID NO: 2491137 - RNA, 19 nt, Artificial Sequence
  Description of Artificial Sequence: Synthetic oligonucleotide
  Antisense strand to SEQ ID NO: 2491136
acucucaaguucauugcag

SEQ ID NO: 2491138 - RNA, 19 nt, Artificial Sequence
  Description of Artificial Sequence: Synthetic oligonucleotide
  Sense strand starting at position 1246 of SEQ ID NO: 1887709
ugaacuugagaguguagau

SEQ ID NO: 2491139 - RNA, 19 nt, Artificial Sequence
  Description of Artificial Sequence: Synthetic oligonucleotide
  Antisense strand to SEQ ID NO: 2491138
aucuacacucucaaguuca

SEQ ID NO: 2491140 - RNA, 19 nt, Artificial Sequence
  Description of Artificial Sequence: Synthetic oligonucleotide
  Sense strand starting at position 1311 of SEQ ID NO: 1887709
gguauaugagucugcuaga

SEQ ID NO: 2491141 - RNA, 19 nt, Artificial Sequence
  Description of Artificial Sequence: Synthetic oligonucleotide
  Antisense strand to SEQ ID NO: 2491140
ucuagcagacucauauacc

SEQ ID NO: 2491142 - RNA, 19 nt, Artificial Sequence
  Description of Artificial Sequence: Synthetic oligonucleotide
  Sense strand starting at position 1312 of SEQ ID NO: 1887709
guauaugagucugcuagau

SEQ ID NO: 2491143 - RNA, 19 nt, Artificial Sequence
  Description of Artificial Sequence: Synthetic oligonucleotide
  Antisense strand to SEQ ID NO: 2491142
aucuagcagacucauauac

SEQ ID NO: 2491144 - RNA, 19 nt, Artificial Sequence
  Description of Artificial Sequence: Synthetic oligonucleotide
  Sense strand starting at position 1316 of SEQ ID NO: 1887709
augagucugcuagauccau

SEQ ID NO: 2491145 - RNA, 19 nt, Artificial Sequence
  Description of Artificial Sequence: Synthetic oligonucleotide
  Antisense strand to SEQ ID NO: 2491144
auggaucuagcagacucau

SEQ ID NO: 2491146 - RNA, 19 nt, Artificial Sequence
  Description of Artificial Sequence: Synthetic oligonucleotide
  Sense strand starting at position 1322 of SEQ ID NO: 1887709
cugcuagauccauauguac

SEQ ID NO: 2491147 - RNA, 19 nt, Artificial Sequence
  Description of Artificial Sequence: Synthetic oligonucleotide
  Antisense strand to SEQ ID NO: 2491146
guacauauggaucuagcag

SEQ ID NO: 2491148 - RNA, 19 nt, Artificial Sequence
  Description of Artificial Sequence: Synthetic oligonucleotide
  Sense strand starting at position 1324 of SEQ ID NO: 1887709
gcuagauccauauguacga

SEQ ID NO: 2491149 - RNA, 19 nt, Artificial Sequence
  Description of Artificial Sequence: Synthetic oligonucleotide
  Antisense strand to SEQ ID NO: 2491148
ucguacauauggaucuagc

SEQ ID NO: 2491150 - RNA, 19 nt, Artificial Sequence
  Description of Artificial Sequence: Synthetic oligonucleotide
  Sense strand starting at position 1732 of SEQ ID NO: 1887709
uauggagucucacuguaug

SEQ ID NO: 2491151 - RNA, 19 nt, Artificial Sequence
  Description of Artificial Sequence: Synthetic oligonucleotide
  Antisense strand to SEQ ID NO: 2491150
cauacagugagacuccaua

SEQ ID NO: 2491152 - RNA, 19 nt, Artificial Sequence
  Description of Artificial Sequence: Synthetic oligonucleotide
  Sense strand starting at position 1933 of SEQ ID NO: 1887709
augucaaggccaggaguuu

SEQ ID NO: 2491153 - RNA, 19 nt, Artificial Sequence
  Description of Artificial Sequence: Synthetic oligonucleotide
  Antisense strand to SEQ ID NO: 2491152
aaacuccuggccuugacau

SEQ ID NO: 2491154 - RNA, 19 nt, Artificial Sequence
  Description of Artificial Sequence: Synthetic oligonucleotide
  Sense strand starting at position 2307 of SEQ ID NO: 1887709
ggccgaauuucucuuguuu

SEQ ID NO: 2491155 - RNA, 19 nt, Artificial Sequence
  Description of Artificial Sequence: Synthetic oligonucleotide
  Antisense strand to SEQ ID NO: 2491154
aaacaagagaaauucggcc

SEQ ID NO: 2491156 - RNA, 19 nt, Artificial Sequence
  Description of Artificial Sequence: Synthetic oligonucleotide
  Sense strand starting at position 2341 of SEQ ID NO: 1887709
gggauaauuuguuauagua

SEQ ID NO: 2491157 - RNA, 19 nt, Artificial Sequence
  Description of Artificial Sequence: Synthetic oligonucleotide
  Antisense strand to SEQ ID NO: 2491156
uacuauaacaaauuauccc

SEQ ID NO: 2491158 - RNA, 19 nt, Artificial Sequence
  Description of Artificial Sequence: Synthetic oligonucleotide
  Sense strand starting at position 2353 of SEQ ID NO: 1887709
uauaguagccguuaagaaa

SEQ ID NO: 2491159 - RNA, 19 nt, Artificial Sequence
  Description of Artificial Sequence: Synthetic oligonucleotide
  Antisense strand to SEQ ID NO: 2491158
uuucuuaacggcuacuaua

SEQ ID NO: 2491160 - RNA, 19 nt, Artificial Sequence
  Description of Artificial Sequence: Synthetic oligonucleotide
  Sense strand starting at position 2374 of SEQ ID NO: 1887709
aaugcaaucuguuugagcu

SEQ ID NO: 2491161 - RNA, 19 nt, Artificial Sequence
  Description of Artificial Sequence: Synthetic oligonucleotide
  Antisense strand to SEQ ID NO: 2491160
agcucaaacagauugcauu

SEQ ID NO: 2491162 - RNA, 19 nt, Artificial Sequence
  Description of Artificial Sequence: Synthetic oligonucleotide
  Sense strand starting at position 2375 of SEQ ID NO: 1887709
augcaaucuguuugagcuu

SEQ ID NO: 2491163 - RNA, 19 nt, Artificial Sequence
  Description of Artificial Sequence: Synthetic oligonucleotide
  Antisense strand to SEQ ID NO: 2491162
aagcucaaacagauugcau

SEQ ID NO: 2491164 - RNA, 19 nt, Artificial Sequence
  Description of Artificial Sequence: Synthetic oligonucleotide
  Sense strand starting at position 2542 of SEQ ID NO: 1887709
gggucacuguggcaauuua

SEQ ID NO: 2491165 - RNA, 19 nt, Artificial Sequence
  Description of Artificial Sequence: Synthetic oligonucleotide
  Antisense strand to SEQ ID NO: 2491164
uaaauugccacagugaccc

SEQ ID NO: 2491166 - RNA, 19 nt, Artificial Sequence
  Description of Artificial Sequence: Synthetic oligonucleotide
  Sense strand starting at position 2549 of SEQ ID NO: 1887709
uguggcaauuuacagauau

SEQ ID NO: 2491167 - RNA, 19 nt, Artificial Sequence
  Description of Artificial Sequence: Synthetic oligonucleotide
  Antisense strand to SEQ ID NO: 2491166
auaucuguaaauugccaca

SEQ ID NO: 2491168 - RNA, 19 nt, Artificial Sequence
  Description of Artificial Sequence: Synthetic oligonucleotide
  Sense strand starting at position 2781 of SEQ ID NO: 1887709
uugagagaaucgcuugaau

SEQ ID NO: 2491169 - RNA, 19 nt, Artificial Sequence
  Description of Artificial Sequence: Synthetic oligonucleotide
  Antisense strand to SEQ ID NO: 2491168
auucaagcgauucucucaa

SEQ ID NO: 2491170 - RNA, 19 nt, Artificial Sequence
  Description of Artificial Sequence: Synthetic oligonucleotide
  Sense strand starting at position 3186 of SEQ ID NO: 1887709
aggccagaauguuuauuga

SEQ ID NO: 2491171 - RNA, 19 nt, Artificial Sequence
  Description of Artificial Sequence: Synthetic oligonucleotide
  Antisense strand to SEQ ID NO: 2491170
ucaauaaacauucuggccu

SEQ ID NO: 2491172 - RNA, 19 nt, Artificial Sequence
  Description of Artificial Sequence: Synthetic oligonucleotide
  Sense strand starting at position 3189 of SEQ ID NO: 1887709
ccagaauguuuauugaguu

SEQ ID NO: 2491173 - RNA, 19 nt, Artificial Sequence
  Description of Artificial Sequence: Synthetic oligonucleotide
  Antisense strand to SEQ ID NO: 2491172
aacucaauaaacauucugg

SEQ ID NO: 2491174 - RNA, 19 nt, Artificial Sequence
  Description of Artificial Sequence: Synthetic oligonucleotide
  Sense strand starting at position 3257 of SEQ ID NO: 1887709
guuuguuuaccugcuaugu

SEQ ID NO: 2491175 - RNA, 19 nt, Artificial Sequence
  Description of Artificial Sequence: Synthetic oligonucleotide
  Antisense strand to SEQ ID NO: 2491174
acauagcagguaaacaaac

SEQ ID NO: 2491176 - RNA, 19 nt, Artificial Sequence
  Description of Artificial Sequence: Synthetic oligonucleotide
  Sense strand starting at position 3270 of SEQ ID NO: 1887709
cuauguggccuuggauaag

SEQ ID NO: 2491177 - RNA, 19 nt, Artificial Sequence
  Description of Artificial Sequence: Synthetic oligonucleotide
  Antisense strand to SEQ ID NO: 2491176
cuuauccaaggccacauag

SEQ ID NO: 2491178 - RNA, 19 nt, Artificial Sequence
  Description of Artificial Sequence: Synthetic oligonucleotide
  Sense strand starting at position 3338 of SEQ ID NO: 1887709
ugagauaagucaucucaga

SEQ ID NO: 2491179 - RNA, 19 nt, Artificial Sequence
  Description of Artificial Sequence: Synthetic oligonucleotide
  Antisense strand to SEQ ID NO: 2491178
ucugagaugacuuaucuca

SEQ ID NO: 2491180 - RNA, 19 nt, Artificial Sequence
  Description of Artificial Sequence: Synthetic oligonucleotide
  Sense strand starting at position 3346 of SEQ ID NO: 1887709
gucaucucagaggguugua

SEQ ID NO: 2491181 - RNA, 19 nt, Artificial Sequence
  Description of Artificial Sequence: Synthetic oligonucleotide
  Antisense strand to SEQ ID NO: 2491180
uacaacccucugagaugac

SEQ ID NO: 2491182 - RNA, 19 nt, Artificial Sequence
  Description of Artificial Sequence: Synthetic oligonucleotide
  Sense strand starting at position 3402 of SEQ ID NO: 1887709
ggcauaguccuggaagugu

SEQ ID NO: 2491183 - RNA, 19 nt, Artificial Sequence
  Description of Artificial Sequence: Synthetic oligonucleotide
  Antisense strand to SEQ ID NO: 2491182
acacuuccaggacuaugcc

SEQ ID NO: 2491184 - RNA, 19 nt, Artificial Sequence
  Description of Artificial Sequence: Synthetic oligonucleotide
  Sense strand starting at position 3406 of SEQ ID NO: 1887709
uaguccuggaaguguuuga

SEQ ID NO: 2491185 - RNA, 19 nt, Artificial Sequence
  Description of Artificial Sequence: Synthetic oligonucleotide
  Antisense strand to SEQ ID NO: 2491184
ucaaacacuuccaggacua

SEQ ID NO: 2491186 - RNA, 19 nt, Artificial Sequence
  Description of Artificial Sequence: Synthetic oligonucleotide
  Sense strand starting at position 3410 of SEQ ID NO: 1887709
ccuggaaguguuugaaaug

SEQ ID NO: 2491187 - RNA, 19 nt, Artificial Sequence
  Description of Artificial Sequence: Synthetic oligonucleotide
  Antisense strand to SEQ ID NO: 2491186
cauuucaaacacuuccagg

SEQ ID NO: 2491188 - RNA, 19 nt, Artificial Sequence
  Description of Artificial Sequence: Synthetic oligonucleotide
  Sense strand starting at position 3915 of SEQ ID NO: 1887709
ggcaauguucgccuguagu

SEQ ID NO: 2491189 - RNA, 19 nt, Artificial Sequence
  Description of Artificial Sequence: Synthetic oligonucleotide
  Antisense strand to SEQ ID NO: 2491188
acuacaggcgaacauugcc

SEQ ID NO: 2491190 - RNA, 19 nt, Artificial Sequence
  Description of Artificial Sequence: Synthetic oligonucleotide
  Sense strand starting at position 190 of SEQ ID NO: 1887710
gccagugugaacugagguu

SEQ ID NO: 2491191 - RNA, 19 nt, Artificial Sequence
  Description of Artificial Sequence: Synthetic oligonucleotide
  Antisense strand to SEQ ID NO: 2491190
aaccucaguucacacuggc

SEQ ID NO: 2491192 - RNA, 19 nt, Artificial Sequence
  Description of Artificial Sequence: Synthetic oligonucleotide
  Sense strand starting at position 636 of SEQ ID NO: 1887710
cccguccucccgugaacaa

SEQ ID NO: 2491193 - RNA, 19 nt, Artificial Sequence
  Description of Artificial Sequence: Synthetic oligonucleotide
  Antisense strand to SEQ ID NO: 2491192
uuguucacgggaggacggg

SEQ ID NO: 2491194 - RNA, 19 nt, Artificial Sequence
  Description of Artificial Sequence: Synthetic oligonucleotide
  Sense strand starting at position 870 of SEQ ID NO: 1887710
cugccagaauucuaagugu

SEQ ID NO: 2491195 - RNA, 19 nt, Artificial Sequence
  Description of Artificial Sequence: Synthetic oligonucleotide
  Antisense strand to SEQ ID NO: 2491194
acacuuagaauucuggcag

SEQ ID NO: 2491196 - RNA, 19 nt, Artificial Sequence
  Description of Artificial Sequence: Synthetic oligonucleotide
  Sense strand starting at position 873 of SEQ ID NO: 1887710
ccagaauucuaaguguuua

SEQ ID NO: 2491197 - RNA, 19 nt, Artificial Sequence
  Description of Artificial Sequence: Synthetic oligonucleotide
  Antisense strand to SEQ ID NO: 2491196
uaaacacuuagaauucugg

SEQ ID NO: 2491198 - RNA, 19 nt, Artificial Sequence
  Description of Artificial Sequence: Synthetic oligonucleotide
  Sense strand starting at position 878 of SEQ ID NO: 1887710
auucuaaguguuuacagga

SEQ ID NO: 2491199 - RNA, 19 nt, Artificial Sequence
  Description of Artificial Sequence: Synthetic oligonucleotide
  Antisense strand to SEQ ID NO: 2491198
uccuguaaacacuuagaau

SEQ ID NO: 2491200 - RNA, 19 nt, Artificial Sequence
  Description of Artificial Sequence: Synthetic oligonucleotide
  Sense strand starting at position 1335 of SEQ ID NO: 1887710
ccaccaguuuaucaguuua

SEQ ID NO: 2491201 - RNA, 19 nt, Artificial Sequence
  Description of Artificial Sequence: Synthetic oligonucleotide
  Antisense strand to SEQ ID NO: 2491200
uaaacugauaaacuggugg

SEQ ID NO: 2491202 - RNA, 19 nt, Artificial Sequence
  Description of Artificial Sequence: Synthetic oligonucleotide
  Sense strand starting at position 1337 of SEQ ID NO: 1887710
accaguuuaucaguuuacu

SEQ ID NO: 2491203 - RNA, 19 nt, Artificial Sequence
  Description of Artificial Sequence: Synthetic oligonucleotide
  Antisense strand to SEQ ID NO: 2491202
aguaaacugauaaacuggu

SEQ ID NO: 2491204 - RNA, 19 nt, Artificial Sequence
  Description of Artificial Sequence: Synthetic oligonucleotide
  Sense strand starting at position 1489 of SEQ ID NO: 1887710
ccucguacuugggaucuuu

SEQ ID NO: 2491205 - RNA, 19 nt, Artificial Sequence
  Description of Artificial Sequence: Synthetic oligonucleotide
  Antisense strand to SEQ ID NO: 2491204
aaagaucccaaguacgagg

SEQ ID NO: 2491206 - RNA, 19 nt, Artificial Sequence
  Description of Artificial Sequence: Synthetic oligonucleotide
  Sense strand starting at position 1522 of SEQ ID NO: 1887710
gaaugaaguccuuggccag

SEQ ID NO: 2491207 - RNA, 19 nt, Artificial Sequence
  Description of Artificial Sequence: Synthetic oligonucleotide
  Antisense strand to SEQ ID NO: 2491206
cuggccaaggacuucauuc

SEQ ID NO: 2491208 - RNA, 19 nt, Artificial Sequence
  Description of Artificial Sequence: Synthetic oligonucleotide
  Sense strand starting at position 1555 of SEQ ID NO: 1887710
ugaaguacuccucgucgaa

SEQ ID NO: 2491209 - RNA, 19 nt, Artificial Sequence
  Description of Artificial Sequence: Synthetic oligonucleotide
  Antisense strand to SEQ ID NO: 2491208
uucgacgaggaguacuuca

SEQ ID NO: 2491210 - RNA, 19 nt, Artificial Sequence
  Description of Artificial Sequence: Synthetic oligonucleotide
  Sense strand starting at position 1557 of SEQ ID NO: 1887710
aaguacuccucgucgaagu

SEQ ID NO: 2491211 - RNA, 19 nt, Artificial Sequence
  Description of Artificial Sequence: Synthetic oligonucleotide
  Antisense strand to SEQ ID NO: 2491210
acuucgacgaggaguacuu

SEQ ID NO: 2491212 - RNA, 19 nt, Artificial Sequence
  Description of Artificial Sequence: Synthetic oligonucleotide
  Sense strand starting at position 1577 of SEQ ID NO: 1887710
guaguucacggcugagaug

SEQ ID NO: 2491213 - RNA, 19 nt, Artificial Sequence
  Description of Artificial Sequence: Synthetic oligonucleotide
  Antisense strand to SEQ ID NO: 2491212
caucucagccgugaacuac

SEQ ID NO: 2491214 - RNA, 19 nt, Artificial Sequence
  Description of Artificial Sequence: Synthetic oligonucleotide
  Sense strand starting at position 1588 of SEQ ID NO: 1887710
cugagauguuggugagcgu

SEQ ID NO: 2491215 - RNA, 19 nt, Artificial Sequence
  Description of Artificial Sequence: Synthetic oligonucleotide
  Antisense strand to SEQ ID NO: 2491214
acgcucaccaacaucucag

SEQ ID NO: 2491216 - RNA, 19 nt, Artificial Sequence
  Description of Artificial Sequence: Synthetic oligonucleotide
  Sense strand starting at position 1789 of SEQ ID NO: 1887710
agaaccuuccugcaacgau

SEQ ID NO: 2491217 - RNA, 19 nt, Artificial Sequence
  Description of Artificial Sequence: Synthetic oligonucleotide
  Antisense strand to SEQ ID NO: 2491216
aucguugcaggaagguucu

SEQ ID NO: 2491218 - RNA, 19 nt, Artificial Sequence
  Description of Artificial Sequence: Synthetic oligonucleotide
  Sense strand starting at position 1880 of SEQ ID NO: 1887710
gcagaagucuccuuggaga

SEQ ID NO: 2491219 - RNA, 19 nt, Artificial Sequence
  Description of Artificial Sequence: Synthetic oligonucleotide
  Antisense strand to SEQ ID NO: 2491218
ucuccaaggagacuucugc

SEQ ID NO: 2491220 - RNA, 19 nt, Artificial Sequence
  Description of Artificial Sequence: Synthetic oligonucleotide
  Sense strand starting at position 1882 of SEQ ID NO: 1887710
agaagucuccuuggagacu

SEQ ID NO: 2491221 - RNA, 19 nt, Artificial Sequence
  Description of Artificial Sequence: Synthetic oligonucleotide
  Antisense strand to SEQ ID NO: 2491220
agucuccaaggagacuucu

SEQ ID NO: 2491222 - RNA, 19 nt, Artificial Sequence
  Description of Artificial Sequence: Synthetic oligonucleotide
  Sense strand starting at position 1894 of SEQ ID NO: 1887710
ggagacucgaaguaucugu

SEQ ID NO: 2491223 - RNA, 19 nt, Artificial Sequence
  Description of Artificial Sequence: Synthetic oligonucleotide
  Antisense strand to SEQ ID NO: 2491222
acagauacuucgagucucc

SEQ ID NO: 2491224 - RNA, 19 nt, Artificial Sequence
  Description of Artificial Sequence: Synthetic oligonucleotide
  Sense strand starting at position 1899 of SEQ ID NO: 1887710
cucgaaguaucugugcaga

SEQ ID NO: 2491225 - RNA, 19 nt, Artificial Sequence
  Description of Artificial Sequence: Synthetic oligonucleotide
  Antisense strand to SEQ ID NO: 2491224
ucugcacagauacuucgag

SEQ ID NO: 2491226 - RNA, 19 nt, Artificial Sequence
  Description of Artificial Sequence: Synthetic oligonucleotide
  Sense strand starting at position 2148 of SEQ ID NO: 1887710
gagacuaaacguggacuca

SEQ ID NO: 2491227 - RNA, 19 nt, Artificial Sequence
  Description of Artificial Sequence: Synthetic oligonucleotide
  Antisense strand to SEQ ID NO: 2491226
ugaguccacguuuagucuc

SEQ ID NO: 2491228 - RNA, 19 nt, Artificial Sequence
  Description of Artificial Sequence: Synthetic oligonucleotide
  Sense strand starting at position 2677 of SEQ ID NO: 1887710
aggcuaacgucuugguguu

SEQ ID NO: 2491229 - RNA, 19 nt, Artificial Sequence
  Description of Artificial Sequence: Synthetic oligonucleotide
  Antisense strand to SEQ ID NO: 2491228
aacaccaagacguuagccu

SEQ ID NO: 2491230 - RNA, 19 nt, Artificial Sequence
  Description of Artificial Sequence: Synthetic oligonucleotide
  Sense strand starting at position 2692 of SEQ ID NO: 1887710
uguucauaacguucguguu

SEQ ID NO: 2491231 - RNA, 19 nt, Artificial Sequence
  Description of Artificial Sequence: Synthetic oligonucleotide
  Antisense strand to SEQ ID NO: 2491230
aacacgaacguuaugaaca

SEQ ID NO: 2491232 - RNA, 19 nt, Artificial Sequence
  Description of Artificial Sequence: Synthetic oligonucleotide
  Sense strand starting at position 2764 of SEQ ID NO: 1887710
uucuguugcuccuuuguaa

SEQ ID NO: 2491233 - RNA, 19 nt, Artificial Sequence
  Description of Artificial Sequence: Synthetic oligonucleotide
  Antisense strand to SEQ ID NO: 2491232
uuacaaaggagcaacagaa

SEQ ID NO: 2491234 - RNA, 19 nt, Artificial Sequence
  Description of Artificial Sequence: Synthetic oligonucleotide
  Sense strand starting at position 2771 of SEQ ID NO: 1887710
gcuccuuuguaagucugaa

SEQ ID NO: 2491235 - RNA, 19 nt, Artificial Sequence
  Description of Artificial Sequence: Synthetic oligonucleotide
  Antisense strand to SEQ ID NO: 2491234
uucagacuuacaaaggagc

SEQ ID NO: 2491236 - RNA, 19 nt, Artificial Sequence
  Description of Artificial Sequence: Synthetic oligonucleotide
  Sense strand starting at position 2775 of SEQ ID NO: 1887710
cuuuguaagucugaauuau

SEQ ID NO: 2491237 - RNA, 19 nt, Artificial Sequence
  Description of Artificial Sequence: Synthetic oligonucleotide
  Antisense strand to SEQ ID NO: 2491236
auaauucagacuuacaaag

SEQ ID NO: 2491238 - RNA, 19 nt, Artificial Sequence
  Description of Artificial Sequence: Synthetic oligonucleotide
  Sense strand starting at position 2873 of SEQ ID NO: 1887710
ggcccacgccauuguuuau

SEQ ID NO: 2491239 - RNA, 19 nt, Artificial Sequence
  Description of Artificial Sequence: Synthetic oligonucleotide
  Antisense strand to SEQ ID NO: 2491238
auaaacaauggcgugggcc

SEQ ID NO: 2491240 - RNA, 19 nt, Artificial Sequence
  Description of Artificial Sequence: Synthetic oligonucleotide
  Sense strand starting at position 2884 of SEQ ID NO: 1887710
uuguuuauuuccuugcuua

SEQ ID NO: 2491241 - RNA, 19 nt, Artificial Sequence
  Description of Artificial Sequence: Synthetic oligonucleotide
  Antisense strand to SEQ ID NO: 2491240
uaagcaaggaaauaaacaa

SEQ ID NO: 2491242 - RNA, 19 nt, Artificial Sequence
  Description of Artificial Sequence: Synthetic oligonucleotide
  Sense strand starting at position 2885 of SEQ ID NO: 1887710
uguuuauuuccuugcuuac

SEQ ID NO: 2491243 - RNA, 19 nt, Artificial Sequence
  Description of Artificial Sequence: Synthetic oligonucleotide
  Antisense strand to SEQ ID NO: 2491242
guaagcaaggaaauaaaca

SEQ ID NO: 2491244 - RNA, 19 nt, Artificial Sequence
  Description of Artificial Sequence: Synthetic oligonucleotide
  Sense strand starting at position 2892 of SEQ ID NO: 1887710
uuccuugcuuacugaauga

SEQ ID NO: 2491245 - RNA, 19 nt, Artificial Sequence
  Description of Artificial Sequence: Synthetic oligonucleotide
  Antisense strand to SEQ ID NO: 2491244
ucauucaguaagcaaggaa

SEQ ID NO: 2491246 - RNA, 19 nt, Artificial Sequence
  Description of Artificial Sequence: Synthetic oligonucleotide
  Sense strand starting at position 2896 of SEQ ID NO: 1887710
uugcuuacugaaugagcua

SEQ ID NO: 2491247 - RNA, 19 nt, Artificial Sequence
  Description of Artificial Sequence: Synthetic oligonucleotide
  Antisense strand to SEQ ID NO: 2491246
uagcucauucaguaagcaa

SEQ ID NO: 2491248 - RNA, 19 nt, Artificial Sequence
  Description of Artificial Sequence: Synthetic oligonucleotide
  Sense strand starting at position 2903 of SEQ ID NO: 1887710
cugaaugagcuaugcccau

SEQ ID NO: 2491249 - RNA, 19 nt, Artificial Sequence
  Description of Artificial Sequence: Synthetic oligonucleotide
  Antisense strand to SEQ ID NO: 2491248
augggcauagcucauucag

SEQ ID NO: 2491250 - RNA, 19 nt, Artificial Sequence
  Description of Artificial Sequence: Synthetic oligonucleotide
  Sense strand starting at position 3203 of SEQ ID NO: 1887710
ugcaguaagccugagcuga

SEQ ID NO: 2491251 - RNA, 19 nt, Artificial Sequence
  Description of Artificial Sequence: Synthetic oligonucleotide
  Antisense strand to SEQ ID NO: 2491250
ucagcucaggcuuacugca

SEQ ID NO: 2491252 - RNA, 19 nt, Artificial Sequence
  Description of Artificial Sequence: Synthetic oligonucleotide
  Sense strand starting at position 3205 of SEQ ID NO: 1887710
caguaagccugagcugaga

SEQ ID NO: 2491253 - RNA, 19 nt, Artificial Sequence
  Description of Artificial Sequence: Synthetic oligonucleotide
  Antisense strand to SEQ ID NO: 2491252
ucucagcucaggcuuacug

SEQ ID NO: 2491254 - RNA, 19 nt, Artificial Sequence
  Description of Artificial Sequence: Synthetic oligonucleotide
  Sense strand starting at position 3950 of SEQ ID NO: 1887710
uccagaagccucugugaca

SEQ ID NO: 2491255 - RNA, 19 nt, Artificial Sequence
  Description of Artificial Sequence: Synthetic oligonucleotide
  Antisense strand to SEQ ID NO: 2491254
ugucacagaggcuucugga

SEQ ID NO: 2491256 - RNA, 19 nt, Artificial Sequence
  Description of Artificial Sequence: Synthetic oligonucleotide
  Sense strand starting at position 286 of SEQ ID NO: 1887711
gagacagagcuuugcaaac

SEQ ID NO: 2491257 - RNA, 19 nt, Artificial Sequence
  Description of Artificial Sequence: Synthetic oligonucleotide
  Antisense strand to SEQ ID NO: 2491256
guuugcaaagcucugucuc

SEQ ID NO: 2491258 - RNA, 19 nt, Artificial Sequence
  Description of Artificial Sequence: Synthetic oligonucleotide
  Sense strand starting at position 545 of SEQ ID NO: 1887711
ggccuugggugaucacagu

SEQ ID NO: 2491259 - RNA, 19 nt, Artificial Sequence
  Description of Artificial Sequence: Synthetic oligonucleotide
  Antisense strand to SEQ ID NO: 2491258
acugugaucacccaaggcc

SEQ ID NO: 2491260 - RNA, 19 nt, Artificial Sequence
  Description of Artificial Sequence: Synthetic oligonucleotide
  Sense strand starting at position 656 of SEQ ID NO: 1887711
gggacauuaucccuugaca

SEQ ID NO: 2491261 - RNA, 19 nt, Artificial Sequence
  Description of Artificial Sequence: Synthetic oligonucleotide
  Antisense strand to SEQ ID NO: 2491260
ugucaagggauaauguccc

SEQ ID NO: 2491262 - RNA, 19 nt, Artificial Sequence
  Description of Artificial Sequence: Synthetic oligonucleotide
  Sense strand starting at position 708 of SEQ ID NO: 1887711
ggaggaggauguuaucauu

SEQ ID NO: 2491263 - RNA, 19 nt, Artificial Sequence
  Description of Artificial Sequence: Synthetic oligonucleotide
  Antisense strand to SEQ ID NO: 2491262
aaugauaacauccuccucc

SEQ ID NO: 2491264 - RNA, 19 nt, Artificial Sequence
  Description of Artificial Sequence: Synthetic oligonucleotide
  Sense strand starting at position 748 of SEQ ID NO: 1887711
ugaguaguuccuggaaugg

SEQ ID NO: 2491265 - RNA, 19 nt, Artificial Sequence
  Description of Artificial Sequence: Synthetic oligonucleotide
  Antisense strand to SEQ ID NO: 2491264
ccauuccaggaacuacuca

SEQ ID NO: 2491266 - RNA, 19 nt, Artificial Sequence
  Description of Artificial Sequence: Synthetic oligonucleotide
  Sense strand starting at position 1210 of SEQ ID NO: 1887711
gguagucaugggcagacua

SEQ ID NO: 2491267 - RNA, 19 nt, Artificial Sequence
  Description of Artificial Sequence: Synthetic oligonucleotide
  Antisense strand to SEQ ID NO: 2491266
uagucugcccaugacuacc

SEQ ID NO: 2491268 - RNA, 19 nt, Artificial Sequence
  Description of Artificial Sequence: Synthetic oligonucleotide
  Sense strand starting at position 1275 of SEQ ID NO: 1887711
agcgcuagccaggaaucaa

SEQ ID NO: 2491269 - RNA, 19 nt, Artificial Sequence
  Description of Artificial Sequence: Synthetic oligonucleotide
  Antisense strand to SEQ ID NO: 2491268
uugauuccuggcuagcgcu

SEQ ID NO: 2491270 - RNA, 19 nt, Artificial Sequence
  Description of Artificial Sequence: Synthetic oligonucleotide
  Sense strand starting at position 1286 of SEQ ID NO: 1887711
ggaaucaagcuguaagagu

SEQ ID NO: 2491271 - RNA, 19 nt, Artificial Sequence
  Description of Artificial Sequence: Synthetic oligonucleotide
  Antisense strand to SEQ ID NO: 2491270
acucuuacagcuugauucc

SEQ ID NO: 2491272 - RNA, 19 nt, Artificial Sequence
  Description of Artificial Sequence: Synthetic oligonucleotide
  Sense strand starting at position 1297 of SEQ ID NO: 1887711
guaagagucagccagagag

SEQ ID NO: 2491273 - RNA, 19 nt, Artificial Sequence
  Description of Artificial Sequence: Synthetic oligonucleotide
  Antisense strand to SEQ ID NO: 2491272
cucucuggcugacucuuac

SEQ ID NO: 2491274 - RNA, 19 nt, Artificial Sequence
  Description of Artificial Sequence: Synthetic oligonucleotide
  Sense strand starting at position 1368 of SEQ ID NO: 1887711
gcuggugucacccaacaga

SEQ ID NO: 2491275 - RNA, 19 nt, Artificial Sequence
  Description of Artificial Sequence: Synthetic oligonucleotide
  Antisense strand to SEQ ID NO: 2491274
ucuguugggugacaccagc

SEQ ID NO: 2491276 - RNA, 19 nt, Artificial Sequence
  Description of Artificial Sequence: Synthetic oligonucleotide
  Sense strand starting at position 1386 of SEQ ID NO: 1887711
agggacugcucaguguuaa

SEQ ID NO: 2491277 - RNA, 19 nt, Artificial Sequence
  Description of Artificial Sequence: Synthetic oligonucleotide
  Antisense strand to SEQ ID NO: 2491276
uuaacacugagcagucccu

SEQ ID NO: 2491278 - RNA, 19 nt, Artificial Sequence
  Description of Artificial Sequence: Synthetic oligonucleotide
  Sense strand starting at position 1387 of SEQ ID NO: 1887711
gggacugcucaguguuaaa

SEQ ID NO: 2491279 - RNA, 19 nt, Artificial Sequence
  Description of Artificial Sequence: Synthetic oligonucleotide
  Antisense strand to SEQ ID NO: 2491278
uuuaacacugagcaguccc

SEQ ID NO: 2491280 - RNA, 19 nt, Artificial Sequence
  Description of Artificial Sequence: Synthetic oligonucleotide
  Sense strand starting at position 1524 of SEQ ID NO: 1887711
gaggcuugcccaggacaga

SEQ ID NO: 2491281 - RNA, 19 nt, Artificial Sequence
  Description of Artificial Sequence: Synthetic oligonucleotide
  Antisense strand to SEQ ID NO: 2491280
ucuguccugggcaagccuc

SEQ ID NO: 2491282 - RNA, 19 nt, Artificial Sequence
  Description of Artificial Sequence: Synthetic oligonucleotide
  Sense strand starting at position 1633 of SEQ ID NO: 1887711
cgguuucaccucugaugga

SEQ ID NO: 2491283 - RNA, 19 nt, Artificial Sequence
  Description of Artificial Sequence: Synthetic oligonucleotide
  Antisense strand to SEQ ID NO: 2491282
uccaucagaggugaaaccg

SEQ ID NO: 2491284 - RNA, 19 nt, Artificial Sequence
  Description of Artificial Sequence: Synthetic oligonucleotide
  Sense strand starting at position 2451 of SEQ ID NO: 1887711
cgggccuaugguugaguaa

SEQ ID NO: 2491285 - RNA, 19 nt, Artificial Sequence
  Description of Artificial Sequence: Synthetic oligonucleotide
  Antisense strand to SEQ ID NO: 2491284
uuacucaaccauaggcccg

SEQ ID NO: 2491286 - RNA, 19 nt, Artificial Sequence
  Description of Artificial Sequence: Synthetic oligonucleotide
  Sense strand starting at position 2452 of SEQ ID NO: 1887711
gggccuaugguugaguaaa

SEQ ID NO: 2491287 - RNA, 19 nt, Artificial Sequence
  Description of Artificial Sequence: Synthetic oligonucleotide
  Antisense strand to SEQ ID NO: 2491286
uuuacucaaccauaggccc

SEQ ID NO: 2491288 - RNA, 19 nt, Artificial Sequence
  Description of Artificial Sequence: Synthetic oligonucleotide
  Sense strand starting at position 2484 of SEQ ID NO: 1887711
gaccgucuugcugacuuau

SEQ ID NO: 2491289 - RNA, 19 nt, Artificial Sequence
  Description of Artificial Sequence: Synthetic oligonucleotide
  Antisense strand to SEQ ID NO: 2491288
auaagucagcaagacgguc

SEQ ID NO: 2491290 - RNA, 19 nt, Artificial Sequence
  Description of Artificial Sequence: Synthetic oligonucleotide
  Sense strand starting at position 2490 of SEQ ID NO: 1887711
cuugcugacuuauuggaca

SEQ ID NO: 2491291 - RNA, 19 nt, Artificial Sequence
  Description of Artificial Sequence: Synthetic oligonucleotide
  Antisense strand to SEQ ID NO: 2491290
uguccaauaagucagcaag

SEQ ID NO: 2491292 - RNA, 19 nt, Artificial Sequence
  Description of Artificial Sequence: Synthetic oligonucleotide
  Sense strand starting at position 2551 of SEQ ID NO: 1887711
gcaaguugucaagagagga

SEQ ID NO: 2491293 - RNA, 19 nt, Artificial Sequence
  Description of Artificial Sequence: Synthetic oligonucleotide
  Antisense strand to SEQ ID NO: 2491292
uccucucuugacaacuugc

SEQ ID NO: 2491294 - RNA, 19 nt, Artificial Sequence
  Description of Artificial Sequence: Synthetic oligonucleotide
  Sense strand starting at position 2687 of SEQ ID NO: 1887711
cuaccucguucccuaagaa

SEQ ID NO: 2491295 - RNA, 19 nt, Artificial Sequence
  Description of Artificial Sequence: Synthetic oligonucleotide
  Antisense strand to SEQ ID NO: 2491294
uucuuagggaacgagguag

SEQ ID NO: 2491296 - RNA, 19 nt, Artificial Sequence
  Description of Artificial Sequence: Synthetic oligonucleotide
  Sense strand starting at position 2699 of SEQ ID NO: 1887711
cuaagaauuucccauuggu

SEQ ID NO: 2491297 - RNA, 19 nt, Artificial Sequence
  Description of Artificial Sequence: Synthetic oligonucleotide
  Antisense strand to SEQ ID NO: 2491296
accaaugggaaauucuuag

SEQ ID NO: 2491298 - RNA, 19 nt, Artificial Sequence
  Description of Artificial Sequence: Synthetic oligonucleotide
  Sense strand starting at position 2777 of SEQ ID NO: 1887711
uccgaaucuugacuaucau

SEQ ID NO: 2491299 - RNA, 19 nt, Artificial Sequence
  Description of Artificial Sequence: Synthetic oligonucleotide
  Antisense strand to SEQ ID NO: 2491298
augauagucaagauucgga

SEQ ID NO: 2491300 - RNA, 19 nt, Artificial Sequence
  Description of Artificial Sequence: Synthetic oligonucleotide
  Sense strand starting at position 2778 of SEQ ID NO: 1887711
ccgaaucuugacuaucauu

SEQ ID NO: 2491301 - RNA, 19 nt, Artificial Sequence
  Description of Artificial Sequence: Synthetic oligonucleotide
  Antisense strand to SEQ ID NO: 2491300
aaugauagucaagauucgg

SEQ ID NO: 2491302 - RNA, 19 nt, Artificial Sequence
  Description of Artificial Sequence: Synthetic oligonucleotide
  Sense strand starting at position 2784 of SEQ ID NO: 1887711
cuugacuaucauugagaac

SEQ ID NO: 2491303 - RNA, 19 nt, Artificial Sequence
  Description of Artificial Sequence: Synthetic oligonucleotide
  Antisense strand to SEQ ID NO: 2491302
guucucaaugauagucaag

SEQ ID NO: 2491304 - RNA, 19 nt, Artificial Sequence
  Description of Artificial Sequence: Synthetic oligonucleotide
  Sense strand starting at position 2796 of SEQ ID NO: 1887711
ugagaaccauaucugucaa

SEQ ID NO: 2491305 - RNA, 19 nt, Artificial Sequence
  Description of Artificial Sequence: Synthetic oligonucleotide
  Antisense strand to SEQ ID NO: 2491304
uugacagauaugguucuca

SEQ ID NO: 2491306 - RNA, 19 nt, Artificial Sequence
  Description of Artificial Sequence: Synthetic oligonucleotide
  Sense strand starting at position 2825 of SEQ ID NO: 1887711
ucccguucuuccuugugau

SEQ ID NO: 2491307 - RNA, 19 nt, Artificial Sequence
  Description of Artificial Sequence: Synthetic oligonucleotide
  Antisense strand to SEQ ID NO: 2491306
aucacaaggaagaacggga

SEQ ID NO: 2491308 - RNA, 19 nt, Artificial Sequence
  Description of Artificial Sequence: Synthetic oligonucleotide
  Sense strand starting at position 2826 of SEQ ID NO: 1887711
cccguucuuccuugugauu

SEQ ID NO: 2491309 - RNA, 19 nt, Artificial Sequence
  Description of Artificial Sequence: Synthetic oligonucleotide
  Antisense strand to SEQ ID NO: 2491308
aaucacaaggaagaacggg

SEQ ID NO: 2491310 - RNA, 19 nt, Artificial Sequence
  Description of Artificial Sequence: Synthetic oligonucleotide
  Sense strand starting at position 2832 of SEQ ID NO: 1887711
cuuccuugugauuguugga

SEQ ID NO: 2491311 - RNA, 19 nt, Artificial Sequence
  Description of Artificial Sequence: Synthetic oligonucleotide
  Antisense strand to SEQ ID NO: 2491310
uccaacaaucacaaggaag

SEQ ID NO: 2491312 - RNA, 19 nt, Artificial Sequence
  Description of Artificial Sequence: Synthetic oligonucleotide
  Sense strand starting at position 2861 of SEQ ID NO: 1887711
agccuucugaaguauagga

SEQ ID NO: 2491313 - RNA, 19 nt, Artificial Sequence
  Description of Artificial Sequence: Synthetic oligonucleotide
  Antisense strand to SEQ ID NO: 2491312
uccuauacuucagaaggcu

SEQ ID NO: 2491314 - RNA, 19 nt, Artificial Sequence
  Description of Artificial Sequence: Synthetic oligonucleotide
  Sense strand starting at position 2866 of SEQ ID NO: 1887711
ucugaaguauaggauagau

SEQ ID NO: 2491315 - RNA, 19 nt, Artificial Sequence
  Description of Artificial Sequence: Synthetic oligonucleotide
  Antisense strand to SEQ ID NO: 2491314
aucuauccuauacuucaga

SEQ ID NO: 2491316 - RNA, 19 nt, Artificial Sequence
  Description of Artificial Sequence: Synthetic oligonucleotide
  Sense strand starting at position 2875 of SEQ ID NO: 1887711
uaggauagaucccaccgua

SEQ ID NO: 2491317 - RNA, 19 nt, Artificial Sequence
  Description of Artificial Sequence: Synthetic oligonucleotide
  Antisense strand to SEQ ID NO: 2491316
uacggugggaucuauccua

SEQ ID NO: 2491318 - RNA, 19 nt, Artificial Sequence
  Description of Artificial Sequence: Synthetic oligonucleotide
  Sense strand starting at position 3022 of SEQ ID NO: 1887711
gucccaaugcgcucugcaa

SEQ ID NO: 2491319 - RNA, 19 nt, Artificial Sequence
  Description of Artificial Sequence: Synthetic oligonucleotide
  Antisense strand to SEQ ID NO: 2491318
uugcagagcgcauugggac

SEQ ID NO: 2491320 - RNA, 19 nt, Artificial Sequence
  Description of Artificial Sequence: Synthetic oligonucleotide
  Sense strand starting at position 3024 of SEQ ID NO: 1887711
cccaaugcgcucugcaaau

SEQ ID NO: 2491321 - RNA, 19 nt, Artificial Sequence
  Description of Artificial Sequence: Synthetic oligonucleotide
  Antisense strand to SEQ ID NO: 2491320
auuugcagagcgcauuggg

SEQ ID NO: 2491322 - RNA, 19 nt, Artificial Sequence
  Description of Artificial Sequence: Synthetic oligonucleotide
  Sense strand starting at position 3030 of SEQ ID NO: 1887711
gcgcucugcaaaugguaga

SEQ ID NO: 2491323 - RNA, 19 nt, Artificial Sequence
  Description of Artificial Sequence: Synthetic oligonucleotide
  Antisense strand to SEQ ID NO: 2491322
ucuaccauuugcagagcgc

SEQ ID NO: 2491324 - RNA, 19 nt, Artificial Sequence
  Description of Artificial Sequence: Synthetic oligonucleotide
  Sense strand starting at position 3054 of SEQ ID NO: 1887711
agucauugcuuccuaggga

SEQ ID NO: 2491325 - RNA, 19 nt, Artificial Sequence
  Description of Artificial Sequence: Synthetic oligonucleotide
  Antisense strand to SEQ ID NO: 2491324
ucccuaggaagcaaugacu

SEQ ID NO: 2491326 - RNA, 19 nt, Artificial Sequence
  Description of Artificial Sequence: Synthetic oligonucleotide
  Sense strand starting at position 3057 of SEQ ID NO: 1887711
cauugcuuccuagggauag

SEQ ID NO: 2491327 - RNA, 19 nt, Artificial Sequence
  Description of Artificial Sequence: Synthetic oligonucleotide
  Antisense strand to SEQ ID NO: 2491326
cuaucccuaggaagcaaug

SEQ ID NO: 2491328 - RNA, 19 nt, Artificial Sequence
  Description of Artificial Sequence: Synthetic oligonucleotide
  Sense strand starting at position 3146 of SEQ ID NO: 1887711
ccgcuaacacuccaauguu

SEQ ID NO: 2491329 - RNA, 19 nt, Artificial Sequence
  Description of Artificial Sequence: Synthetic oligonucleotide
  Antisense strand to SEQ ID NO: 2491328
aacauuggaguguuagcgg

SEQ ID NO: 2491330 - RNA, 19 nt, Artificial Sequence
  Description of Artificial Sequence: Synthetic oligonucleotide
  Sense strand starting at position 3184 of SEQ ID NO: 1887711
uuagcagaucaugaaucuu

SEQ ID NO: 2491331 - RNA, 19 nt, Artificial Sequence
  Description of Artificial Sequence: Synthetic oligonucleotide
  Antisense strand to SEQ ID NO: 2491330
aagauucaugaucugcuaa

SEQ ID NO: 2491332 - RNA, 19 nt, Artificial Sequence
  Description of Artificial Sequence: Synthetic oligonucleotide
  Sense strand starting at position 3516 of SEQ ID NO: 1887711
cuuagaaacuggguccuua

SEQ ID NO: 2491333 - RNA, 19 nt, Artificial Sequence
  Description of Artificial Sequence: Synthetic oligonucleotide
  Antisense strand to SEQ ID NO: 2491332
uaaggacccaguuucuaag

SEQ ID NO: 2491334 - RNA, 19 nt, Artificial Sequence
  Description of Artificial Sequence: Synthetic oligonucleotide
  Sense strand starting at position 3562 of SEQ ID NO: 1887711
gugcacucauagcucaauu

SEQ ID NO: 2491335 - RNA, 19 nt, Artificial Sequence
  Description of Artificial Sequence: Synthetic oligonucleotide
  Antisense strand to SEQ ID NO: 2491334
aauugagcuaugagugcac

SEQ ID NO: 2491336 - RNA, 19 nt, Artificial Sequence
  Description of Artificial Sequence: Synthetic oligonucleotide
  Sense strand starting at position 115 of SEQ ID NO: 1887712
uucaaaggauuguggguaa

SEQ ID NO: 2491337 - RNA, 19 nt, Artificial Sequence
  Description of Artificial Sequence: Synthetic oligonucleotide
  Antisense strand to SEQ ID NO: 2491336
uuacccacaauccuuugaa

SEQ ID NO: 2491338 - RNA, 19 nt, Artificial Sequence
  Description of Artificial Sequence: Synthetic oligonucleotide
  Sense strand starting at position 118 of SEQ ID NO: 1887712
aaaggauuguggguaaauu

SEQ ID NO: 2491339 - RNA, 19 nt, Artificial Sequence
  Description of Artificial Sequence: Synthetic oligonucleotide
  Antisense strand to SEQ ID NO: 2491338
aauuuacccacaauccuuu

SEQ ID NO: 2491340 - RNA, 19 nt, Artificial Sequence
  Description of Artificial Sequence: Synthetic oligonucleotide
  Sense strand starting at position 553 of SEQ ID NO: 1887712
acggaaugguggcugagua

SEQ ID NO: 2491341 - RNA, 19 nt, Artificial Sequence
  Description of Artificial Sequence: Synthetic oligonucleotide
  Antisense strand to SEQ ID NO: 2491340
uacucagccaccauuccgu

SEQ ID NO: 2491342 - RNA, 19 nt, Artificial Sequence
  Description of Artificial Sequence: Synthetic oligonucleotide
  Sense strand starting at position 555 of SEQ ID NO: 1887712
ggaaugguggcugaguaga

SEQ ID NO: 2491343 - RNA, 19 nt, Artificial Sequence
  Description of Artificial Sequence: Synthetic oligonucleotide
  Antisense strand to SEQ ID NO: 2491342
ucuacucagccaccauucc

SEQ ID NO: 2491344 - RNA, 19 nt, Artificial Sequence
  Description of Artificial Sequence: Synthetic oligonucleotide
  Sense strand starting at position 557 of SEQ ID NO: 1887712
aaugguggcugaguagaau

SEQ ID NO: 2491345 - RNA, 19 nt, Artificial Sequence
  Description of Artificial Sequence: Synthetic oligonucleotide
  Antisense strand to SEQ ID NO: 2491344
auucuacucagccaccauu

SEQ ID NO: 2491346 - RNA, 19 nt, Artificial Sequence
  Description of Artificial Sequence: Synthetic oligonucleotide
  Sense strand starting at position 609 of SEQ ID NO: 1887712
gggaguuaguauuuaacgu

SEQ ID NO: 2491347 - RNA, 19 nt, Artificial Sequence
  Description of Artificial Sequence: Synthetic oligonucleotide
  Antisense strand to SEQ ID NO: 2491346
acguuaaauacuaacuccc

SEQ ID NO: 2491348 - RNA, 19 nt, Artificial Sequence
  Description of Artificial Sequence: Synthetic oligonucleotide
  Sense strand starting at position 613 of SEQ ID NO: 1887712
guuaguauuuaacgucuac

SEQ ID NO: 2491349 - RNA, 19 nt, Artificial Sequence
  Description of Artificial Sequence: Synthetic oligonucleotide
  Antisense strand to SEQ ID NO: 2491348
guagacguuaaauacuaac

SEQ ID NO: 2491350 - RNA, 19 nt, Artificial Sequence
  Description of Artificial Sequence: Synthetic oligonucleotide
  Sense strand starting at position 617 of SEQ ID NO: 1887712
guauuuaacgucuacagcu

SEQ ID NO: 2491351 - RNA, 19 nt, Artificial Sequence
  Description of Artificial Sequence: Synthetic oligonucleotide
  Antisense strand to SEQ ID NO: 2491350
agcuguagacguuaaauac

SEQ ID NO: 2491352 - RNA, 19 nt, Artificial Sequence
  Description of Artificial Sequence: Synthetic oligonucleotide
  Sense strand starting at position 801 of SEQ ID NO: 1887712
caagaaaucgcucgaccug

SEQ ID NO: 2491353 - RNA, 19 nt, Artificial Sequence
  Description of Artificial Sequence: Synthetic oligonucleotide
  Antisense strand to SEQ ID NO: 2491352
caggucgagcgauuucuug

SEQ ID NO: 2491354 - RNA, 19 nt, Artificial Sequence
  Description of Artificial Sequence: Synthetic oligonucleotide
  Sense strand starting at position 981 of SEQ ID NO: 1887712
guucuuauacaagguaaca

SEQ ID NO: 2491355 - RNA, 19 nt, Artificial Sequence
  Description of Artificial Sequence: Synthetic oligonucleotide
  Antisense strand to SEQ ID NO: 2491354
uguuaccuuguauaagaac

SEQ ID NO: 2491356 - RNA, 19 nt, Artificial Sequence
  Description of Artificial Sequence: Synthetic oligonucleotide
  Sense strand starting at position 1145 of SEQ ID NO: 1887712
gggcgauaagcacaucaga

SEQ ID NO: 2491357 - RNA, 19 nt, Artificial Sequence
  Description of Artificial Sequence: Synthetic oligonucleotide
  Antisense strand to SEQ ID NO: 2491356
ucugaugugcuuaucgccc

SEQ ID NO: 2491358 - RNA, 19 nt, Artificial Sequence
  Description of Artificial Sequence: Synthetic oligonucleotide
  Sense strand starting at position 1208 of SEQ ID NO: 1887712
agacuugggcuucaagagu

SEQ ID NO: 2491359 - RNA, 19 nt, Artificial Sequence
  Description of Artificial Sequence: Synthetic oligonucleotide
  Antisense strand to SEQ ID NO: 2491358
acucuugaagcccaagucu

SEQ ID NO: 2491360 - RNA, 19 nt, Artificial Sequence
  Description of Artificial Sequence: Synthetic oligonucleotide
  Sense strand starting at position 1278 of SEQ ID NO: 1887712
agaugaccucuuugauaac

SEQ ID NO: 2491361 - RNA, 19 nt, Artificial Sequence
  Description of Artificial Sequence: Synthetic oligonucleotide
  Antisense strand to SEQ ID NO: 2491360
guuaucaaagaggucaucu

SEQ ID NO: 2491362 - RNA, 19 nt, Artificial Sequence
  Description of Artificial Sequence: Synthetic oligonucleotide
  Sense strand starting at position 1362 of SEQ ID NO: 1887712
cuaagucucccgggaacgu

SEQ ID NO: 2491363 - RNA, 19 nt, Artificial Sequence
  Description of Artificial Sequence: Synthetic oligonucleotide
  Antisense strand to SEQ ID NO: 2491362
acguucccgggagacuuag

SEQ ID NO: 2491364 - RNA, 19 nt, Artificial Sequence
  Description of Artificial Sequence: Synthetic oligonucleotide
  Sense strand starting at position 1405 of SEQ ID NO: 1887712
ggucguacacaagaauacu

SEQ ID NO: 2491365 - RNA, 19 nt, Artificial Sequence
  Description of Artificial Sequence: Synthetic oligonucleotide
  Antisense strand to SEQ ID NO: 2491364
aguauucuuguguacgacc

SEQ ID NO: 2491366 - RNA, 19 nt, Artificial Sequence
  Description of Artificial Sequence: Synthetic oligonucleotide
  Sense strand starting at position 1461 of SEQ ID NO: 1887712
uggcgcaagauuugugcaa

SEQ ID NO: 2491367 - RNA, 19 nt, Artificial Sequence
  Description of Artificial Sequence: Synthetic oligonucleotide
  Antisense strand to SEQ ID NO: 2491366
uugcacaaaucuugcgcca

SEQ ID NO: 2491368 - RNA, 19 nt, Artificial Sequence
  Description of Artificial Sequence: Synthetic oligonucleotide
  Sense strand starting at position 1474 of SEQ ID NO: 1887712
gugcaagacucccucggau

SEQ ID NO: 2491369 - RNA, 19 nt, Artificial Sequence
  Description of Artificial Sequence: Synthetic oligonucleotide
  Antisense strand to SEQ ID NO: 2491368
auccgagggagucuugcac

SEQ ID NO: 2491370 - RNA, 19 nt, Artificial Sequence
  Description of Artificial Sequence: Synthetic oligonucleotide
  Sense strand starting at position 1476 of SEQ ID NO: 1887712
gcaagacucccucggauug

SEQ ID NO: 2491371 - RNA, 19 nt, Artificial Sequence
  Description of Artificial Sequence: Synthetic oligonucleotide
  Antisense strand to SEQ ID NO: 2491370
caauccgagggagucuugc

SEQ ID NO: 2491372 - RNA, 19 nt, Artificial Sequence
  Description of Artificial Sequence: Synthetic oligonucleotide
  Sense strand starting at position 1527 of SEQ ID NO: 1887712
ugacaaagucugcaacuca

SEQ ID NO: 2491373 - RNA, 19 nt, Artificial Sequence
  Description of Artificial Sequence: Synthetic oligonucleotide
  Antisense strand to SEQ ID NO: 2491372
ugaguugcagacuuuguca

SEQ ID NO: 2491374 - RNA, 19 nt, Artificial Sequence
  Description of Artificial Sequence: Synthetic oligonucleotide
  Sense strand starting at position 1631 of SEQ ID NO: 1887712
guugcagauuuauaaauac

SEQ ID NO: 2491375 - RNA, 19 nt, Artificial Sequence
  Description of Artificial Sequence: Synthetic oligonucleotide
  Antisense strand to SEQ ID NO: 2491374
guauuuauaaaucugcaac

SEQ ID NO: 2491376 - RNA, 19 nt, Artificial Sequence
  Description of Artificial Sequence: Synthetic oligonucleotide
  Sense strand starting at position 1656 of SEQ ID NO: 1887712
cgcacaugcgcauuggaau

SEQ ID NO: 2491377 - RNA, 19 nt, Artificial Sequence
  Description of Artificial Sequence: Synthetic oligonucleotide
  Antisense strand to SEQ ID NO: 2491376
auuccaaugcgcaugugcg

SEQ ID NO: 2491378 - RNA, 19 nt, Artificial Sequence
  Description of Artificial Sequence: Synthetic oligonucleotide
  Sense strand starting at position 1657 of SEQ ID NO: 1887712
gcacaugcgcauuggaauu

SEQ ID NO: 2491379 - RNA, 19 nt, Artificial Sequence
  Description of Artificial Sequence: Synthetic oligonucleotide
  Antisense strand to SEQ ID NO: 2491378
aauuccaaugcgcaugugc

SEQ ID NO: 2491380 - RNA, 19 nt, Artificial Sequence
  Description of Artificial Sequence: Synthetic oligonucleotide
  Sense strand starting at position 1813 of SEQ ID NO: 1887712
cccuguuucucgcuucuua

SEQ ID NO: 2491381 - RNA, 19 nt, Artificial Sequence
  Description of Artificial Sequence: Synthetic oligonucleotide
  Antisense strand to SEQ ID NO: 2491380
uaagaagcgagaaacaggg

SEQ ID NO: 2491382 - RNA, 19 nt, Artificial Sequence
  Description of Artificial Sequence: Synthetic oligonucleotide
  Sense strand starting at position 1823 of SEQ ID NO: 1887712
cgcuucuuaccucguaaug

SEQ ID NO: 2491383 - RNA, 19 nt, Artificial Sequence
  Description of Artificial Sequence: Synthetic oligonucleotide
  Antisense strand to SEQ ID NO: 2491382
cauuacgagguaagaagcg

SEQ ID NO: 2491384 - RNA, 19 nt, Artificial Sequence
  Description of Artificial Sequence: Synthetic oligonucleotide
  Sense strand starting at position 2087 of SEQ ID NO: 1887712
aucaacuugcgagaccaau

SEQ ID NO: 2491385 - RNA, 19 nt, Artificial Sequence
  Description of Artificial Sequence: Synthetic oligonucleotide
  Antisense strand to SEQ ID NO: 2491384
auuggucucgcaaguugau

SEQ ID NO: 2491386 - RNA, 19 nt, Artificial Sequence
  Description of Artificial Sequence: Synthetic oligonucleotide
  Sense strand starting at position 2210 of SEQ ID NO: 1887712
gauggcgucgcuguggaaa

SEQ ID NO: 2491387 - RNA, 19 nt, Artificial Sequence
  Description of Artificial Sequence: Synthetic oligonucleotide
  Antisense strand to SEQ ID NO: 2491386
uuuccacagcgacgccauc

SEQ ID NO: 2491388 - RNA, 19 nt, Artificial Sequence
  Description of Artificial Sequence: Synthetic oligonucleotide
  Sense strand starting at position 2431 of SEQ ID NO: 1887712
aggagacucuugaguggga

SEQ ID NO: 2491389 - RNA, 19 nt, Artificial Sequence
  Description of Artificial Sequence: Synthetic oligonucleotide
  Antisense strand to SEQ ID NO: 2491388
ucccacucaagagucuccu

SEQ ID NO: 2491390 - RNA, 19 nt, Artificial Sequence
  Description of Artificial Sequence: Synthetic oligonucleotide
  Sense strand starting at position 2605 of SEQ ID NO: 1887712
gaaacaaucucguucuguc

SEQ ID NO: 2491391 - RNA, 19 nt, Artificial Sequence
  Description of Artificial Sequence: Synthetic oligonucleotide
  Antisense strand to SEQ ID NO: 2491390
gacagaacgagauuguuuc

SEQ ID NO: 2491392 - RNA, 19 nt, Artificial Sequence
  Description of Artificial Sequence: Synthetic oligonucleotide
  Sense strand starting at position 2925 of SEQ ID NO: 1887712
uacauuggucucugccuga

SEQ ID NO: 2491393 - RNA, 19 nt, Artificial Sequence
  Description of Artificial Sequence: Synthetic oligonucleotide
  Antisense strand to SEQ ID NO: 2491392
ucaggcagagaccaaugua

SEQ ID NO: 2491394 - RNA, 19 nt, Artificial Sequence
  Description of Artificial Sequence: Synthetic oligonucleotide
  Sense strand starting at position 2938 of SEQ ID NO: 1887712
gccugacguccagaaucgu

SEQ ID NO: 2491395 - RNA, 19 nt, Artificial Sequence
  Description of Artificial Sequence: Synthetic oligonucleotide
  Antisense strand to SEQ ID NO: 2491394
acgauucuggacgucaggc

SEQ ID NO: 2491396 - RNA, 19 nt, Artificial Sequence
  Description of Artificial Sequence: Synthetic oligonucleotide
  Sense strand starting at position 3716 of SEQ ID NO: 1887712
ccuuacucuuguuuccaga

SEQ ID NO: 2491397 - RNA, 19 nt, Artificial Sequence
  Description of Artificial Sequence: Synthetic oligonucleotide
  Antisense strand to SEQ ID NO: 2491396
ucuggaaacaagaguaagg

SEQ ID NO: 2491398 - RNA, 19 nt, Artificial Sequence
  Description of Artificial Sequence: Synthetic oligonucleotide
  Sense strand starting at position 3751 of SEQ ID NO: 1887712
ucaugagcuguugaaccau

SEQ ID NO: 2491399 - RNA, 19 nt, Artificial Sequence
  Description of Artificial Sequence: Synthetic oligonucleotide
  Antisense strand to SEQ ID NO: 2491398
augguucaacagcucauga

SEQ ID NO: 2491400 - RNA, 19 nt, Artificial Sequence
  Description of Artificial Sequence: Synthetic oligonucleotide
  Sense strand starting at position 3760 of SEQ ID NO: 1887712
guugaaccaucuggaauuc

SEQ ID NO: 2491401 - RNA, 19 nt, Artificial Sequence
  Description of Artificial Sequence: Synthetic oligonucleotide
  Antisense strand to SEQ ID NO: 2491400
gaauuccagaugguucaac

SEQ ID NO: 2491402 - RNA, 19 nt, Artificial Sequence
  Description of Artificial Sequence: Synthetic oligonucleotide
  Sense strand starting at position 3779 of SEQ ID NO: 1887712
acaggccugucaugagaga

SEQ ID NO: 2491403 - RNA, 19 nt, Artificial Sequence
  Description of Artificial Sequence: Synthetic oligonucleotide
  Antisense strand to SEQ ID NO: 2491402
ucucucaugacaggccugu

SEQ ID NO: 2491404 - RNA, 19 nt, Artificial Sequence
  Description of Artificial Sequence: Synthetic oligonucleotide
  Sense strand starting at position 3815 of SEQ ID NO: 1887712
aaagguagaucacugauuc

SEQ ID NO: 2491405 - RNA, 19 nt, Artificial Sequence
  Description of Artificial Sequence: Synthetic oligonucleotide
  Antisense strand to SEQ ID NO: 2491404
gaaucagugaucuaccuuu

SEQ ID NO: 2491406 - RNA, 19 nt, Artificial Sequence
  Description of Artificial Sequence: Synthetic oligonucleotide
  Sense strand starting at position 3858 of SEQ ID NO: 1887712
gugagucagugcuuggaac

SEQ ID NO: 2491407 - RNA, 19 nt, Artificial Sequence
  Description of Artificial Sequence: Synthetic oligonucleotide
  Antisense strand to SEQ ID NO: 2491406
guuccaagcacugacucac

SEQ ID NO: 2491408 - RNA, 19 nt, Artificial Sequence
  Description of Artificial Sequence: Synthetic oligonucleotide
  Sense strand starting at position 3859 of SEQ ID NO: 1887712
ugagucagugcuuggaacu

SEQ ID NO: 2491409 - RNA, 19 nt, Artificial Sequence
  Description of Artificial Sequence: Synthetic oligonucleotide
  Antisense strand to SEQ ID NO: 2491408
aguuccaagcacugacuca

SEQ ID NO: 2491410 - RNA, 19 nt, Artificial Sequence
  Description of Artificial Sequence: Synthetic oligonucleotide
  Sense strand starting at position 3866 of SEQ ID NO: 1887712
gugcuuggaacucagucau

SEQ ID NO: 2491411 - RNA, 19 nt, Artificial Sequence
  Description of Artificial Sequence: Synthetic oligonucleotide
  Antisense strand to SEQ ID NO: 2491410
augacugaguuccaagcac

SEQ ID NO: 2491412 - RNA, 19 nt, Artificial Sequence
  Description of Artificial Sequence: Synthetic oligonucleotide
  Sense strand starting at position 3872 of SEQ ID NO: 1887712
ggaacucagucauccagau

SEQ ID NO: 2491413 - RNA, 19 nt, Artificial Sequence
  Description of Artificial Sequence: Synthetic oligonucleotide
  Antisense strand to SEQ ID NO: 2491412
aucuggaugacugaguucc

SEQ ID NO: 2491414 - RNA, 19 nt, Artificial Sequence
  Description of Artificial Sequence: Synthetic oligonucleotide
  Sense strand starting at position 3887 of SEQ ID NO: 1887712
agauuuggcucuggaaacu

SEQ ID NO: 2491415 - RNA, 19 nt, Artificial Sequence
  Description of Artificial Sequence: Synthetic oligonucleotide
  Antisense strand to SEQ ID NO: 2491414
aguuuccagagccaaaucu

SEQ ID NO: 2491416 - RNA, 19 nt, Artificial Sequence
  Description of Artificial Sequence: Synthetic oligonucleotide
  Sense strand starting at position 142 of SEQ ID NO: 1887713
caugaaucccuaggcaagu

SEQ ID NO: 2491417 - RNA, 19 nt, Artificial Sequence
  Description of Artificial Sequence: Synthetic oligonucleotide
  Antisense strand to SEQ ID NO: 2491416
acuugccuagggauucaug

SEQ ID NO: 2491418 - RNA, 19 nt, Artificial Sequence
  Description of Artificial Sequence: Synthetic oligonucleotide
  Sense strand starting at position 334 of SEQ ID NO: 1887713
ccagcaaugcccugguaca

SEQ ID NO: 2491419 - RNA, 19 nt, Artificial Sequence
  Description of Artificial Sequence: Synthetic oligonucleotide
  Antisense strand to SEQ ID NO: 2491418
uguaccagggcauugcugg

SEQ ID NO: 2491420 - RNA, 19 nt, Artificial Sequence
  Description of Artificial Sequence: Synthetic oligonucleotide
  Sense strand starting at position 398 of SEQ ID NO: 1887713
uuagcuuugccaugaggca

SEQ ID NO: 2491421 - RNA, 19 nt, Artificial Sequence
  Description of Artificial Sequence: Synthetic oligonucleotide
  Antisense strand to SEQ ID NO: 2491420
ugccucauggcaaagcuaa

SEQ ID NO: 2491422 - RNA, 19 nt, Artificial Sequence
  Description of Artificial Sequence: Synthetic oligonucleotide
  Sense strand starting at position 463 of SEQ ID NO: 1887713
ugggcuuugcggugaauaa

SEQ ID NO: 2491423 - RNA, 19 nt, Artificial Sequence
  Description of Artificial Sequence: Synthetic oligonucleotide
  Antisense strand to SEQ ID NO: 2491422
uuauucaccgcaaagccca

SEQ ID NO: 2491424 - RNA, 19 nt, Artificial Sequence
  Description of Artificial Sequence: Synthetic oligonucleotide
  Sense strand starting at position 464 of SEQ ID NO: 1887713
gggcuuugcggugaauaag

SEQ ID NO: 2491425 - RNA, 19 nt, Artificial Sequence
  Description of Artificial Sequence: Synthetic oligonucleotide
  Antisense strand to SEQ ID NO: 2491424
cuuauucaccgcaaagccc

SEQ ID NO: 2491426 - RNA, 19 nt, Artificial Sequence
  Description of Artificial Sequence: Synthetic oligonucleotide
  Sense strand starting at position 500 of SEQ ID NO: 1887713
ucuaucacugcugggaaau

SEQ ID NO: 2491427 - RNA, 19 nt, Artificial Sequence
  Description of Artificial Sequence: Synthetic oligonucleotide
  Antisense strand to SEQ ID NO: 2491426
auuucccagcagugauaga

SEQ ID NO: 2491428 - RNA, 19 nt, Artificial Sequence
  Description of Artificial Sequence: Synthetic oligonucleotide
  Sense strand starting at position 501 of SEQ ID NO: 1887713
cuaucacugcugggaaauc

SEQ ID NO: 2491429 - RNA, 19 nt, Artificial Sequence
  Description of Artificial Sequence: Synthetic oligonucleotide
  Antisense strand to SEQ ID NO: 2491428
gauuucccagcagugauag

SEQ ID NO: 2491430 - RNA, 19 nt, Artificial Sequence
  Description of Artificial Sequence: Synthetic oligonucleotide
  Sense strand starting at position 542 of SEQ ID NO: 1887713
ggccacuggccaggauuau

SEQ ID NO: 2491431 - RNA, 19 nt, Artificial Sequence
  Description of Artificial Sequence: Synthetic oligonucleotide
  Antisense strand to SEQ ID NO: 2491430
auaauccuggccaguggcc

SEQ ID NO: 2491432 - RNA, 19 nt, Artificial Sequence
  Description of Artificial Sequence: Synthetic oligonucleotide
  Sense strand starting at position 583 of SEQ ID NO: 1887713
aggacaggcucaucuuauu

SEQ ID NO: 2491433 - RNA, 19 nt, Artificial Sequence
  Description of Artificial Sequence: Synthetic oligonucleotide
  Antisense strand to SEQ ID NO: 2491432
aauaagaugagccuguccu

SEQ ID NO: 2491434 - RNA, 19 nt, Artificial Sequence
  Description of Artificial Sequence: Synthetic oligonucleotide
  Sense strand starting at position 761 of SEQ ID NO: 1887713
acuuuaaaguguccaagaa

SEQ ID NO: 2491435 - RNA, 19 nt, Artificial Sequence
  Description of Artificial Sequence: Synthetic oligonucleotide
  Antisense strand to SEQ ID NO: 2491434
uucuuggacacuuuaaagu

SEQ ID NO: 2491436 - RNA, 19 nt, Artificial Sequence
  Description of Artificial Sequence: Synthetic oligonucleotide
  Sense strand starting at position 803 of SEQ ID NO: 1887713
guggaaccuuccuuccaca

SEQ ID NO: 2491437 - RNA, 19 nt, Artificial Sequence
  Description of Artificial Sequence: Synthetic oligonucleotide
  Antisense strand to SEQ ID NO: 2491436
uguggaaggaagguuccac

SEQ ID NO: 2491438 - RNA, 19 nt, Artificial Sequence
  Description of Artificial Sequence: Synthetic oligonucleotide
  Sense strand starting at position 955 of SEQ ID NO: 1887713
gaaacacuguguuuccaag

SEQ ID NO: 2491439 - RNA, 19 nt, Artificial Sequence
  Description of Artificial Sequence: Synthetic oligonucleotide
  Antisense strand to SEQ ID NO: 2491438
cuuggaaacacaguguuuc

SEQ ID NO: 2491440 - RNA, 19 nt, Artificial Sequence
  Description of Artificial Sequence: Synthetic oligonucleotide
  Sense strand starting at position 962 of SEQ ID NO: 1887713
uguguuuccaagcaagguu

SEQ ID NO: 2491441 - RNA, 19 nt, Artificial Sequence
  Description of Artificial Sequence: Synthetic oligonucleotide
  Antisense strand to SEQ ID NO: 2491440
aaccuugcuuggaaacaca

SEQ ID NO: 2491442 - RNA, 19 nt, Artificial Sequence
  Description of Artificial Sequence: Synthetic oligonucleotide
  Sense strand starting at position 984 of SEQ ID NO: 1887713
ggaacauacuggcauuucu

SEQ ID NO: 2491443 - RNA, 19 nt, Artificial Sequence
  Description of Artificial Sequence: Synthetic oligonucleotide
  Antisense strand to SEQ ID NO: 2491442
agaaaugccaguauguucc

SEQ ID NO: 2491444 - RNA, 19 nt, Artificial Sequence
  Description of Artificial Sequence: Synthetic oligonucleotide
  Sense strand starting at position 1103 of SEQ ID NO: 1887713
ucuacugaucucugaggua

SEQ ID NO: 2491445 - RNA, 19 nt, Artificial Sequence
  Description of Artificial Sequence: Synthetic oligonucleotide
  Antisense strand to SEQ ID NO: 2491444
uaccucagagaucaguaga

SEQ ID NO: 2491446 - RNA, 19 nt, Artificial Sequence
  Description of Artificial Sequence: Synthetic oligonucleotide
  Sense strand starting at position 1110 of SEQ ID NO: 1887713
aucucugagguaugaaaca

SEQ ID NO: 2491447 - RNA, 19 nt, Artificial Sequence
  Description of Artificial Sequence: Synthetic oligonucleotide
  Antisense strand to SEQ ID NO: 2491446
uguuucauaccucagagau

SEQ ID NO: 2491448 - RNA, 19 nt, Artificial Sequence
  Description of Artificial Sequence: Synthetic oligonucleotide
  Sense strand starting at position 1199 of SEQ ID NO: 1887713
gcagucacacgaugaaaua

SEQ ID NO: 2491449 - RNA, 19 nt, Artificial Sequence
  Description of Artificial Sequence: Synthetic oligonucleotide
  Antisense strand to SEQ ID NO: 2491448
uauuucaucgugugacugc

SEQ ID NO: 2491450 - RNA, 19 nt, Artificial Sequence
  Description of Artificial Sequence: Synthetic oligonucleotide
  Sense strand starting at position 1856 of SEQ ID NO: 1887713
gguacuuaggaguauguuc

SEQ ID NO: 2491451 - RNA, 19 nt, Artificial Sequence
  Description of Artificial Sequence: Synthetic oligonucleotide
  Antisense strand to SEQ ID NO: 2491450
gaacauacuccuaaguacc

SEQ ID NO: 2491452 - RNA, 19 nt, Artificial Sequence
  Description of Artificial Sequence: Synthetic oligonucleotide
  Sense strand starting at position 1861 of SEQ ID NO: 1887713
uuaggaguauguuccaggu

SEQ ID NO: 2491453 - RNA, 19 nt, Artificial Sequence
  Description of Artificial Sequence: Synthetic oligonucleotide
  Antisense strand to SEQ ID NO: 2491452
accuggaacauacuccuaa

SEQ ID NO: 2491454 - RNA, 19 nt, Artificial Sequence
  Description of Artificial Sequence: Synthetic oligonucleotide
  Sense strand starting at position 1865 of SEQ ID NO: 1887713
gaguauguuccagguacua

SEQ ID NO: 2491455 - RNA, 19 nt, Artificial Sequence
  Description of Artificial Sequence: Synthetic oligonucleotide
  Antisense strand to SEQ ID NO: 2491454
uaguaccuggaacauacuc

SEQ ID NO: 2491456 - RNA, 19 nt, Artificial Sequence
  Description of Artificial Sequence: Synthetic oligonucleotide
  Sense strand starting at position 2052 of SEQ ID NO: 1887713
ccaucauguugucugucau

SEQ ID NO: 2491457 - RNA, 19 nt, Artificial Sequence
  Description of Artificial Sequence: Synthetic oligonucleotide
  Antisense strand to SEQ ID NO: 2491456
augacagacaacaugaugg

SEQ ID NO: 2491458 - RNA, 19 nt, Artificial Sequence
  Description of Artificial Sequence: Synthetic oligonucleotide
  Sense strand starting at position 2053 of SEQ ID NO: 1887713
caucauguugucugucaug

SEQ ID NO: 2491459 - RNA, 19 nt, Artificial Sequence
  Description of Artificial Sequence: Synthetic oligonucleotide
  Antisense strand to SEQ ID NO: 2491458
caugacagacaacaugaug

SEQ ID NO: 2491460 - RNA, 19 nt, Artificial Sequence
  Description of Artificial Sequence: Synthetic oligonucleotide
  Sense strand starting at position 2110 of SEQ ID NO: 1887713
gugcuagguuuacccucaa

SEQ ID NO: 2491461 - RNA, 19 nt, Artificial Sequence
  Description of Artificial Sequence: Synthetic oligonucleotide
  Antisense strand to SEQ ID NO: 2491460
uugaggguaaaccuagcac

SEQ ID NO: 2491462 - RNA, 19 nt, Artificial Sequence
  Description of Artificial Sequence: Synthetic oligonucleotide
  Sense strand starting at position 2136 of SEQ ID NO: 1887713
gcaugaugugccugggaau

SEQ ID NO: 2491463 - RNA, 19 nt, Artificial Sequence
  Description of Artificial Sequence: Synthetic oligonucleotide
  Antisense strand to SEQ ID NO: 2491462
auucccaggcacaucaugc

SEQ ID NO: 2491464 - RNA, 19 nt, Artificial Sequence
  Description of Artificial Sequence: Synthetic oligonucleotide
  Sense strand starting at position 2137 of SEQ ID NO: 1887713
caugaugugccugggaaug

SEQ ID NO: 2491465 - RNA, 19 nt, Artificial Sequence
  Description of Artificial Sequence: Synthetic oligonucleotide
  Antisense strand to SEQ ID NO: 2491464
cauucccaggcacaucaug

SEQ ID NO: 2491466 - RNA, 19 nt, Artificial Sequence
  Description of Artificial Sequence: Synthetic oligonucleotide
  Sense strand starting at position 2220 of SEQ ID NO: 1887713
augggaugcuguccagaga

SEQ ID NO: 2491467 - RNA, 19 nt, Artificial Sequence
  Description of Artificial Sequence: Synthetic oligonucleotide
  Antisense strand to SEQ ID NO: 2491466
ucucuggacagcaucccau

SEQ ID NO: 2491468 - RNA, 19 nt, Artificial Sequence
  Description of Artificial Sequence: Synthetic oligonucleotide
  Sense strand starting at position 2249 of SEQ ID NO: 1887713
gccugucuuacagacagga

SEQ ID NO: 2491469 - RNA, 19 nt, Artificial Sequence
  Description of Artificial Sequence: Synthetic oligonucleotide
  Antisense strand to SEQ ID NO: 2491468
uccugucuguaagacaggc

SEQ ID NO: 2491470 - RNA, 19 nt, Artificial Sequence
  Description of Artificial Sequence: Synthetic oligonucleotide
  Sense strand starting at position 2425 of SEQ ID NO: 1887713
gucaguuguagcuugccaa

SEQ ID NO: 2491471 - RNA, 19 nt, Artificial Sequence
  Description of Artificial Sequence: Synthetic oligonucleotide
  Antisense strand to SEQ ID NO: 2491470
uuggcaagcuacaacugac

SEQ ID NO: 2491472 - RNA, 19 nt, Artificial Sequence
  Description of Artificial Sequence: Synthetic oligonucleotide
  Sense strand starting at position 2428 of SEQ ID NO: 1887713
aguuguagcuugccaaaua

SEQ ID NO: 2491473 - RNA, 19 nt, Artificial Sequence
  Description of Artificial Sequence: Synthetic oligonucleotide
  Antisense strand to SEQ ID NO: 2491472
uauuuggcaagcuacaacu

SEQ ID NO: 2491474 - RNA, 19 nt, Artificial Sequence
  Description of Artificial Sequence: Synthetic oligonucleotide
  Sense strand starting at position 2492 of SEQ ID NO: 1887713
ccaggagcuugcucugaua

SEQ ID NO: 2491475 - RNA, 19 nt, Artificial Sequence
  Description of Artificial Sequence: Synthetic oligonucleotide
  Antisense strand to SEQ ID NO: 2491474
uaucagagcaagcuccugg

SEQ ID NO: 2491476 - RNA, 19 nt, Artificial Sequence
  Description of Artificial Sequence: Synthetic oligonucleotide
  Sense strand starting at position 2494 of SEQ ID NO: 1887713
aggagcuugcucugauaug

SEQ ID NO: 2491477 - RNA, 19 nt, Artificial Sequence
  Description of Artificial Sequence: Synthetic oligonucleotide
  Antisense strand to SEQ ID NO: 2491476
cauaucagagcaagcuccu

SEQ ID NO: 2491478 - RNA, 19 nt, Artificial Sequence
  Description of Artificial Sequence: Synthetic oligonucleotide
  Sense strand starting at position 2662 of SEQ ID NO: 1887713
agggcuagcuccucaggaa

SEQ ID NO: 2491479 - RNA, 19 nt, Artificial Sequence
  Description of Artificial Sequence: Synthetic oligonucleotide
  Antisense strand to SEQ ID NO: 2491478
uuccugaggagcuagcccu

SEQ ID NO: 2491480 - RNA, 19 nt, Artificial Sequence
  Description of Artificial Sequence: Synthetic oligonucleotide
  Sense strand starting at position 2912 of SEQ ID NO: 1887713
agucaucuacauuagcaca

SEQ ID NO: 2491481 - RNA, 19 nt, Artificial Sequence
  Description of Artificial Sequence: Synthetic oligonucleotide
  Antisense strand to SEQ ID NO: 2491480
ugugcuaauguagaugacu

SEQ ID NO: 2491482 - RNA, 19 nt, Artificial Sequence
  Description of Artificial Sequence: Synthetic oligonucleotide
  Sense strand starting at position 3291 of SEQ ID NO: 1887713
ggagguacuccuugcagua

SEQ ID NO: 2491483 - RNA, 19 nt, Artificial Sequence
  Description of Artificial Sequence: Synthetic oligonucleotide
  Antisense strand to SEQ ID NO: 2491482
uacugcaaggaguaccucc

SEQ ID NO: 2491484 - RNA, 19 nt, Artificial Sequence
  Description of Artificial Sequence: Synthetic oligonucleotide
  Sense strand starting at position 3402 of SEQ ID NO: 1887713
aaaguuguuguuugcauga

SEQ ID NO: 2491485 - RNA, 19 nt, Artificial Sequence
  Description of Artificial Sequence: Synthetic oligonucleotide
  Antisense strand to SEQ ID NO: 2491484
ucaugcaaacaacaacuuu

SEQ ID NO: 2491486 - RNA, 19 nt, Artificial Sequence
  Description of Artificial Sequence: Synthetic oligonucleotide
  Sense strand starting at position 3407 of SEQ ID NO: 1887713
uguuguuugcaugaaucaa

SEQ ID NO: 2491487 - RNA, 19 nt, Artificial Sequence
  Description of Artificial Sequence: Synthetic oligonucleotide
  Antisense strand to SEQ ID NO: 2491486
uugauucaugcaaacaaca

SEQ ID NO: 2491488 - RNA, 19 nt, Artificial Sequence
  Description of Artificial Sequence: Synthetic oligonucleotide
  Sense strand starting at position 3483 of SEQ ID NO: 1887713
acugaaguauaugaagaca

SEQ ID NO: 2491489 - RNA, 19 nt, Artificial Sequence
  Description of Artificial Sequence: Synthetic oligonucleotide
  Antisense strand to SEQ ID NO: 2491488
ugucuucauauacuucagu

SEQ ID NO: 2491490 - RNA, 19 nt, Artificial Sequence
  Description of Artificial Sequence: Synthetic oligonucleotide
  Sense strand starting at position 3634 of SEQ ID NO: 1887713
gugcaacggaccuagaaua

SEQ ID NO: 2491491 - RNA, 19 nt, Artificial Sequence
  Description of Artificial Sequence: Synthetic oligonucleotide
  Antisense strand to SEQ ID NO: 2491490
uauucuagguccguugcac

SEQ ID NO: 2491492 - RNA, 19 nt, Artificial Sequence
  Description of Artificial Sequence: Synthetic oligonucleotide
  Sense strand starting at position 3821 of SEQ ID NO: 1887713
acccuacucugcgugaaca

SEQ ID NO: 2491493 - RNA, 19 nt, Artificial Sequence
  Description of Artificial Sequence: Synthetic oligonucleotide
  Antisense strand to SEQ ID NO: 2491492
uguucacgcagaguagggu

SEQ ID NO: 2491494 - RNA, 19 nt, Artificial Sequence
  Description of Artificial Sequence: Synthetic oligonucleotide
  Sense strand starting at position 3823 of SEQ ID NO: 1887713
ccuacucugcgugaacaca

SEQ ID NO: 2491495 - RNA, 19 nt, Artificial Sequence
  Description of Artificial Sequence: Synthetic oligonucleotide
  Antisense strand to SEQ ID NO: 2491494
uguguucacgcagaguagg

SEQ ID NO: 2491496 - RNA, 19 nt, Artificial Sequence
  Description of Artificial Sequence: Synthetic oligonucleotide
  Sense strand starting at position 201 of SEQ ID NO: 1887714
cccagucugucaccugauu

SEQ ID NO: 2491497 - RNA, 19 nt, Artificial Sequence
  Description of Artificial Sequence: Synthetic oligonucleotide
  Antisense strand to SEQ ID NO: 2491496
aaucaggugacagacuggg

SEQ ID NO: 2491498 - RNA, 19 nt, Artificial Sequence
  Description of Artificial Sequence: Synthetic oligonucleotide
  Sense strand starting at position 217 of SEQ ID NO: 1887714
auuugaauucgcugccuag

SEQ ID NO: 2491499 - RNA, 19 nt, Artificial Sequence
  Description of Artificial Sequence: Synthetic oligonucleotide
  Antisense strand to SEQ ID NO: 2491498
cuaggcagcgaauucaaau

SEQ ID NO: 2491500 - RNA, 19 nt, Artificial Sequence
  Description of Artificial Sequence: Synthetic oligonucleotide
  Sense strand starting at position 329 of SEQ ID NO: 1887714
cuguauucccaguacugau

SEQ ID NO: 2491501 - RNA, 19 nt, Artificial Sequence
  Description of Artificial Sequence: Synthetic oligonucleotide
  Antisense strand to SEQ ID NO: 2491500
aucaguacugggaauacag

SEQ ID NO: 2491502 - RNA, 19 nt, Artificial Sequence
  Description of Artificial Sequence: Synthetic oligonucleotide
  Sense strand starting at position 361 of SEQ ID NO: 1887714
auacgagguguucaguaaa

SEQ ID NO: 2491503 - RNA, 19 nt, Artificial Sequence
  Description of Artificial Sequence: Synthetic oligonucleotide
  Antisense strand to SEQ ID NO: 2491502
uuuacugaacaccucguau

SEQ ID NO: 2491504 - RNA, 19 nt, Artificial Sequence
  Description of Artificial Sequence: Synthetic oligonucleotide
  Sense strand starting at position 364 of SEQ ID NO: 1887714
cgagguguucaguaaaugg

SEQ ID NO: 2491505 - RNA, 19 nt, Artificial Sequence
  Description of Artificial Sequence: Synthetic oligonucleotide
  Antisense strand to SEQ ID NO: 2491504
ccauuuacugaacaccucg

SEQ ID NO: 2491506 - RNA, 19 nt, Artificial Sequence
  Description of Artificial Sequence: Synthetic oligonucleotide
  Sense strand starting at position 1078 of SEQ ID NO: 1887714
gguucugugaacuggcaaa

SEQ ID NO: 2491507 - RNA, 19 nt, Artificial Sequence
  Description of Artificial Sequence: Synthetic oligonucleotide
  Antisense strand to SEQ ID NO: 2491506
uuugccaguucacagaacc

SEQ ID NO: 2491508 - RNA, 19 nt, Artificial Sequence
  Description of Artificial Sequence: Synthetic oligonucleotide
  Sense strand starting at position 1172 of SEQ ID NO: 1887714
acuguucuuagugaggaga

SEQ ID NO: 2491509 - RNA, 19 nt, Artificial Sequence
  Description of Artificial Sequence: Synthetic oligonucleotide
  Antisense strand to SEQ ID NO: 2491508
ucuccucacuaagaacagu

SEQ ID NO: 2491510 - RNA, 19 nt, Artificial Sequence
  Description of Artificial Sequence: Synthetic oligonucleotide
  Sense strand starting at position 1175 of SEQ ID NO: 1887714
guucuuagugaggagacau

SEQ ID NO: 2491511 - RNA, 19 nt, Artificial Sequence
  Description of Artificial Sequence: Synthetic oligonucleotide
  Antisense strand to SEQ ID NO: 2491510
augucuccucacuaagaac

SEQ ID NO: 2491512 - RNA, 19 nt, Artificial Sequence
  Description of Artificial Sequence: Synthetic oligonucleotide
  Sense strand starting at position 1202 of SEQ ID NO: 1887714
ggcuuauuguaugccagaa

SEQ ID NO: 2491513 - RNA, 19 nt, Artificial Sequence
  Description of Artificial Sequence: Synthetic oligonucleotide
  Antisense strand to SEQ ID NO: 2491512
uucuggcauacaauaagcc

SEQ ID NO: 2491514 - RNA, 19 nt, Artificial Sequence
  Description of Artificial Sequence: Synthetic oligonucleotide
  Sense strand starting at position 1206 of SEQ ID NO: 1887714
uauuguaugccagaacagu

SEQ ID NO: 2491515 - RNA, 19 nt, Artificial Sequence
  Description of Artificial Sequence: Synthetic oligonucleotide
  Antisense strand to SEQ ID NO: 2491514
acuguucuggcauacaaua

SEQ ID NO: 2491516 - RNA, 19 nt, Artificial Sequence
  Description of Artificial Sequence: Synthetic oligonucleotide
  Sense strand starting at position 1268 of SEQ ID NO: 1887714
auccuaucaggugggaauu

SEQ ID NO: 2491517 - RNA, 19 nt, Artificial Sequence
  Description of Artificial Sequence: Synthetic oligonucleotide
  Antisense strand to SEQ ID NO: 2491516
aauucccaccugauaggau

SEQ ID NO: 2491518 - RNA, 19 nt, Artificial Sequence
  Description of Artificial Sequence: Synthetic oligonucleotide
  Sense strand starting at position 1269 of SEQ ID NO: 1887714
uccuaucaggugggaauua

SEQ ID NO: 2491519 - RNA, 19 nt, Artificial Sequence
  Description of Artificial Sequence: Synthetic oligonucleotide
  Antisense strand to SEQ ID NO: 2491518
uaauucccaccugauagga

SEQ ID NO: 2491520 - RNA, 19 nt, Artificial Sequence
  Description of Artificial Sequence: Synthetic oligonucleotide
  Sense strand starting at position 1532 of SEQ ID NO: 1887714
gccuccguuccauaacaua

SEQ ID NO: 2491521 - RNA, 19 nt, Artificial Sequence
  Description of Artificial Sequence: Synthetic oligonucleotide
  Antisense strand to SEQ ID NO: 2491520
uauguuauggaacggaggc

SEQ ID NO: 2491522 - RNA, 19 nt, Artificial Sequence
  Description of Artificial Sequence: Synthetic oligonucleotide
  Sense strand starting at position 1597 of SEQ ID NO: 1887714
ggagcuucucguggauuaa

SEQ ID NO: 2491523 - RNA, 19 nt, Artificial Sequence
  Description of Artificial Sequence: Synthetic oligonucleotide
  Antisense strand to SEQ ID NO: 2491522
uuaauccacgagaagcucc

SEQ ID NO: 2491524 - RNA, 19 nt, Artificial Sequence
  Description of Artificial Sequence: Synthetic oligonucleotide
  Sense strand starting at position 1598 of SEQ ID NO: 1887714
gagcuucucguggauuaau

SEQ ID NO: 2491525 - RNA, 19 nt, Artificial Sequence
  Description of Artificial Sequence: Synthetic oligonucleotide
  Antisense strand to SEQ ID NO: 2491524
auuaauccacgagaagcuc

SEQ ID NO: 2491526 - RNA, 19 nt, Artificial Sequence
  Description of Artificial Sequence: Synthetic oligonucleotide
  Sense strand starting at position 1672 of SEQ ID NO: 1887714
gagugaacaguguggucca

SEQ ID NO: 2491527 - RNA, 19 nt, Artificial Sequence
  Description of Artificial Sequence: Synthetic oligonucleotide
  Antisense strand to SEQ ID NO: 2491526
uggaccacacuguucacuc

SEQ ID NO: 2491528 - RNA, 19 nt, Artificial Sequence
  Description of Artificial Sequence: Synthetic oligonucleotide
  Sense strand starting at position 1800 of SEQ ID NO: 1887714
acaccugcccaggguuaaa

SEQ ID NO: 2491529 - RNA, 19 nt, Artificial Sequence
  Description of Artificial Sequence: Synthetic oligonucleotide
  Antisense strand to SEQ ID NO: 2491528
uuuaacccugggcaggugu

SEQ ID NO: 2491530 - RNA, 19 nt, Artificial Sequence
  Description of Artificial Sequence: Synthetic oligonucleotide
  Sense strand starting at position 1928 of SEQ ID NO: 1887714
gacagucaccucuauaggu

SEQ ID NO: 2491531 - RNA, 19 nt, Artificial Sequence
  Description of Artificial Sequence: Synthetic oligonucleotide
  Antisense strand to SEQ ID NO: 2491530
accuauagaggugacuguc

SEQ ID NO: 2491532 - RNA, 19 nt, Artificial Sequence
  Description of Artificial Sequence: Synthetic oligonucleotide
  Sense strand starting at position 2073 of SEQ ID NO: 1887714
acccauagggucugauaag

SEQ ID NO: 2491533 - RNA, 19 nt, Artificial Sequence
  Description of Artificial Sequence: Synthetic oligonucleotide
  Antisense strand to SEQ ID NO: 2491532
cuuaucagacccuaugggu

SEQ ID NO: 2491534 - RNA, 19 nt, Artificial Sequence
  Description of Artificial Sequence: Synthetic oligonucleotide
  Sense strand starting at position 2102 of SEQ ID NO: 1887714
aggcaauucuuccucugaa

SEQ ID NO: 2491535 - RNA, 19 nt, Artificial Sequence
  Description of Artificial Sequence: Synthetic oligonucleotide
  Antisense strand to SEQ ID NO: 2491534
uucagaggaagaauugccu

SEQ ID NO: 2491536 - RNA, 19 nt, Artificial Sequence
  Description of Artificial Sequence: Synthetic oligonucleotide
  Sense strand starting at position 2103 of SEQ ID NO: 1887714
ggcaauucuuccucugaac

SEQ ID NO: 2491537 - RNA, 19 nt, Artificial Sequence
  Description of Artificial Sequence: Synthetic oligonucleotide
  Antisense strand to SEQ ID NO: 2491536
guucagaggaagaauugcc

SEQ ID NO: 2491538 - RNA, 19 nt, Artificial Sequence
  Description of Artificial Sequence: Synthetic oligonucleotide
  Sense strand starting at position 2184 of SEQ ID NO: 1887714
ggcagaguauaugcucaca

SEQ ID NO: 2491539 - RNA, 19 nt, Artificial Sequence
  Description of Artificial Sequence: Synthetic oligonucleotide
  Antisense strand to SEQ ID NO: 2491538
ugugagcauauacucugcc

SEQ ID NO: 2491540 - RNA, 19 nt, Artificial Sequence
  Description of Artificial Sequence: Synthetic oligonucleotide
  Sense strand starting at position 2186 of SEQ ID NO: 1887714
cagaguauaugcucacaga

SEQ ID NO: 2491541 - RNA, 19 nt, Artificial Sequence
  Description of Artificial Sequence: Synthetic oligonucleotide
  Antisense strand to SEQ ID NO: 2491540
ucugugagcauauacucug

SEQ ID NO: 2491542 - RNA, 19 nt, Artificial Sequence
  Description of Artificial Sequence: Synthetic oligonucleotide
  Sense strand starting at position 2187 of SEQ ID NO: 1887714
agaguauaugcucacagac

SEQ ID NO: 2491543 - RNA, 19 nt, Artificial Sequence
  Description of Artificial Sequence: Synthetic oligonucleotide
  Antisense strand to SEQ ID NO: 2491542
gucugugagcauauacucu

SEQ ID NO: 2491544 - RNA, 19 nt, Artificial Sequence
  Description of Artificial Sequence: Synthetic oligonucleotide
  Sense strand starting at position 2219 of SEQ ID NO: 1887714
ccaguuucuccuugacaag

SEQ ID NO: 2491545 - RNA, 19 nt, Artificial Sequence
  Description of Artificial Sequence: Synthetic oligonucleotide
  Antisense strand to SEQ ID NO: 2491544
cuugucaaggagaaacugg

SEQ ID NO: 2491546 - RNA, 19 nt, Artificial Sequence
  Description of Artificial Sequence: Synthetic oligonucleotide
  Sense strand starting at position 2331 of SEQ ID NO: 1887714
ugaaaugauuccucaucug

SEQ ID NO: 2491547 - RNA, 19 nt, Artificial Sequence
  Description of Artificial Sequence: Synthetic oligonucleotide
  Antisense strand to SEQ ID NO: 2491546
cagaugaggaaucauuuca

SEQ ID NO: 2491548 - RNA, 19 nt, Artificial Sequence
  Description of Artificial Sequence: Synthetic oligonucleotide
  Sense strand starting at position 2417 of SEQ ID NO: 1887714
uugagacuuaagugagauc

SEQ ID NO: 2491549 - RNA, 19 nt, Artificial Sequence
  Description of Artificial Sequence: Synthetic oligonucleotide
  Antisense strand to SEQ ID NO: 2491548
gaucucacuuaagucucaa

SEQ ID NO: 2491550 - RNA, 19 nt, Artificial Sequence
  Description of Artificial Sequence: Synthetic oligonucleotide
  Sense strand starting at position 2494 of SEQ ID NO: 1887714
auccacuagcucuggaaau

SEQ ID NO: 2491551 - RNA, 19 nt, Artificial Sequence
  Description of Artificial Sequence: Synthetic oligonucleotide
  Antisense strand to SEQ ID NO: 2491550
auuuccagagcuaguggau

SEQ ID NO: 2491552 - RNA, 19 nt, Artificial Sequence
  Description of Artificial Sequence: Synthetic oligonucleotide
  Sense strand starting at position 2512 of SEQ ID NO: 1887714
ugaucugccucucugagau

SEQ ID NO: 2491553 - RNA, 19 nt, Artificial Sequence
  Description of Artificial Sequence: Synthetic oligonucleotide
  Antisense strand to SEQ ID NO: 2491552
aucucagagaggcagauca

SEQ ID NO: 2491554 - RNA, 19 nt, Artificial Sequence
  Description of Artificial Sequence: Synthetic oligonucleotide
  Sense strand starting at position 2567 of SEQ ID NO: 1887714
gcgccuaccgcucuagaau

SEQ ID NO: 2491555 - RNA, 19 nt, Artificial Sequence
  Description of Artificial Sequence: Synthetic oligonucleotide
  Antisense strand to SEQ ID NO: 2491554
auucuagagcgguaggcgc

SEQ ID NO: 2491556 - RNA, 19 nt, Artificial Sequence
  Description of Artificial Sequence: Synthetic oligonucleotide
  Sense strand starting at position 2764 of SEQ ID NO: 1887714
ggagaaagauucuacagag

SEQ ID NO: 2491557 - RNA, 19 nt, Artificial Sequence
  Description of Artificial Sequence: Synthetic oligonucleotide
  Antisense strand to SEQ ID NO: 2491556
cucuguagaaucuuucucc

SEQ ID NO: 2491558 - RNA, 19 nt, Artificial Sequence
  Description of Artificial Sequence: Synthetic oligonucleotide
  Sense strand starting at position 2806 of SEQ ID NO: 1887714
ggaccuuucucuccaggaa

SEQ ID NO: 2491559 - RNA, 19 nt, Artificial Sequence
  Description of Artificial Sequence: Synthetic oligonucleotide
  Antisense strand to SEQ ID NO: 2491558
uuccuggagagaaaggucc

SEQ ID NO: 2491560 - RNA, 19 nt, Artificial Sequence
  Description of Artificial Sequence: Synthetic oligonucleotide
  Sense strand starting at position 2938 of SEQ ID NO: 1887714
cagccaguccucugggaac

SEQ ID NO: 2491561 - RNA, 19 nt, Artificial Sequence
  Description of Artificial Sequence: Synthetic oligonucleotide
  Antisense strand to SEQ ID NO: 2491560
guucccagaggacuggcug

SEQ ID NO: 2491562 - RNA, 19 nt, Artificial Sequence
  Description of Artificial Sequence: Synthetic oligonucleotide
  Sense strand starting at position 3256 of SEQ ID NO: 1887714
gaguguaaacaugaugugu

SEQ ID NO: 2491563 - RNA, 19 nt, Artificial Sequence
  Description of Artificial Sequence: Synthetic oligonucleotide
  Antisense strand to SEQ ID NO: 2491562
acacaucauguuuacacuc

SEQ ID NO: 2491564 - RNA, 19 nt, Artificial Sequence
  Description of Artificial Sequence: Synthetic oligonucleotide
  Sense strand starting at position 3262 of SEQ ID NO: 1887714
aaacaugaugugugaccga

SEQ ID NO: 2491565 - RNA, 19 nt, Artificial Sequence
  Description of Artificial Sequence: Synthetic oligonucleotide
  Antisense strand to SEQ ID NO: 2491564
ucggucacacaucauguuu

SEQ ID NO: 2491566 - RNA, 19 nt, Artificial Sequence
  Description of Artificial Sequence: Synthetic oligonucleotide
  Sense strand starting at position 3420 of SEQ ID NO: 1887714
gguaggaguggaugaaguu

SEQ ID NO: 2491567 - RNA, 19 nt, Artificial Sequence
  Description of Artificial Sequence: Synthetic oligonucleotide
  Antisense strand to SEQ ID NO: 2491566
aacuucauccacuccuacc

SEQ ID NO: 2491568 - RNA, 19 nt, Artificial Sequence
  Description of Artificial Sequence: Synthetic oligonucleotide
  Sense strand starting at position 3739 of SEQ ID NO: 1887714
aacuguuacugccugguaa

SEQ ID NO: 2491569 - RNA, 19 nt, Artificial Sequence
  Description of Artificial Sequence: Synthetic oligonucleotide
  Antisense strand to SEQ ID NO: 2491568
uuaccaggcaguaacaguu

SEQ ID NO: 2491570 - RNA, 19 nt, Artificial Sequence
  Description of Artificial Sequence: Synthetic oligonucleotide
  Sense strand starting at position 3750 of SEQ ID NO: 1887714
ccugguaaauaaucugaga

SEQ ID NO: 2491571 - RNA, 19 nt, Artificial Sequence
  Description of Artificial Sequence: Synthetic oligonucleotide
  Antisense strand to SEQ ID NO: 2491570
ucucagauuauuuaccagg

SEQ ID NO: 2491572 - RNA, 19 nt, Artificial Sequence
  Description of Artificial Sequence: Synthetic oligonucleotide
  Sense strand starting at position 3830 of SEQ ID NO: 1887714
ccuccagagucguuaagaa

SEQ ID NO: 2491573 - RNA, 19 nt, Artificial Sequence
  Description of Artificial Sequence: Synthetic oligonucleotide
  Antisense strand to SEQ ID NO: 2491572
uucuuaacgacucuggagg

SEQ ID NO: 2491574 - RNA, 19 nt, Artificial Sequence
  Description of Artificial Sequence: Synthetic oligonucleotide
  Sense strand starting at position 3859 of SEQ ID NO: 1887714
ggcugagaucaguguaaac

SEQ ID NO: 2491575 - RNA, 19 nt, Artificial Sequence
  Description of Artificial Sequence: Synthetic oligonucleotide
  Antisense strand to SEQ ID NO: 2491574
guuuacacugaucucagcc

SEQ ID NO: 2491576 - RNA, 19 nt, Artificial Sequence
  Description of Artificial Sequence: Synthetic oligonucleotide
  Sense strand starting at position 65 of SEQ ID NO: 1887715
cccgucucuugccaucaaa

SEQ ID NO: 2491577 - RNA, 19 nt, Artificial Sequence
  Description of Artificial Sequence: Synthetic oligonucleotide
  Antisense strand to SEQ ID NO: 2491576
uuugauggcaagagacggg

SEQ ID NO: 2491578 - RNA, 19 nt, Artificial Sequence
  Description of Artificial Sequence: Synthetic oligonucleotide
  Sense strand starting at position 68 of SEQ ID NO: 1887715
gucucuugccaucaaaggu

SEQ ID NO: 2491579 - RNA, 19 nt, Artificial Sequence
  Description of Artificial Sequence: Synthetic oligonucleotide
  Antisense strand to SEQ ID NO: 2491578
accuuugauggcaagagac

SEQ ID NO: 2491580 - RNA, 19 nt, Artificial Sequence
  Description of Artificial Sequence: Synthetic oligonucleotide
  Sense strand starting at position 106 of SEQ ID NO: 1887715
agugaaugguaucugugau

SEQ ID NO: 2491581 - RNA, 19 nt, Artificial Sequence
  Description of Artificial Sequence: Synthetic oligonucleotide
  Antisense strand to SEQ ID NO: 2491580
aucacagauaccauucacu

SEQ ID NO: 2491582 - RNA, 19 nt, Artificial Sequence
  Description of Artificial Sequence: Synthetic oligonucleotide
  Sense strand starting at position 107 of SEQ ID NO: 1887715
gugaaugguaucugugauu

SEQ ID NO: 2491583 - RNA, 19 nt, Artificial Sequence
  Description of Artificial Sequence: Synthetic oligonucleotide
  Antisense strand to SEQ ID NO: 2491582
aaucacagauaccauucac

SEQ ID NO: 2491584 - RNA, 19 nt, Artificial Sequence
  Description of Artificial Sequence: Synthetic oligonucleotide
  Sense strand starting at position 110 of SEQ ID NO: 1887715
aaugguaucugugauuggu

SEQ ID NO: 2491585 - RNA, 19 nt, Artificial Sequence
  Description of Artificial Sequence: Synthetic oligonucleotide
  Antisense strand to SEQ ID NO: 2491584
accaaucacagauaccauu

SEQ ID NO: 2491586 - RNA, 19 nt, Artificial Sequence
  Description of Artificial Sequence: Synthetic oligonucleotide
  Sense strand starting at position 112 of SEQ ID NO: 1887715
ugguaucugugauugguuu

SEQ ID NO: 2491587 - RNA, 19 nt, Artificial Sequence
  Description of Artificial Sequence: Synthetic oligonucleotide
  Antisense strand to SEQ ID NO: 2491586
aaaccaaucacagauacca

SEQ ID NO: 2491588 - RNA, 19 nt, Artificial Sequence
  Description of Artificial Sequence: Synthetic oligonucleotide
  Sense strand starting at position 114 of SEQ ID NO: 1887715
guaucugugauugguuucu

SEQ ID NO: 2491589 - RNA, 19 nt, Artificial Sequence
  Description of Artificial Sequence: Synthetic oligonucleotide
  Antisense strand to SEQ ID NO: 2491588
agaaaccaaucacagauac

SEQ ID NO: 2491590 - RNA, 19 nt, Artificial Sequence
  Description of Artificial Sequence: Synthetic oligonucleotide
  Sense strand starting at position 123 of SEQ ID NO: 1887715
auugguuucucucacccua

SEQ ID NO: 2491591 - RNA, 19 nt, Artificial Sequence
  Description of Artificial Sequence: Synthetic oligonucleotide
  Antisense strand to SEQ ID NO: 2491590
uagggugagagaaaccaau

SEQ ID NO: 2491592 - RNA, 19 nt, Artificial Sequence
  Description of Artificial Sequence: Synthetic oligonucleotide
  Sense strand starting at position 125 of SEQ ID NO: 1887715
ugguuucucucacccuauu

SEQ ID NO: 2491593 - RNA, 19 nt, Artificial Sequence
  Description of Artificial Sequence: Synthetic oligonucleotide
  Antisense strand to SEQ ID NO: 2491592
aauagggugagagaaacca

SEQ ID NO: 2491594 - RNA, 19 nt, Artificial Sequence
  Description of Artificial Sequence: Synthetic oligonucleotide
  Sense strand starting at position 566 of SEQ ID NO: 1887715
auugguaucuuccaucauu

SEQ ID NO: 2491595 - RNA, 19 nt, Artificial Sequence
  Description of Artificial Sequence: Synthetic oligonucleotide
  Antisense strand to SEQ ID NO: 2491594
aaugauggaagauaccaau

SEQ ID NO: 2491596 - RNA, 19 nt, Artificial Sequence
  Description of Artificial Sequence: Synthetic oligonucleotide
  Sense strand starting at position 639 of SEQ ID NO: 1887715
agcuccuucuaagaacuga

SEQ ID NO: 2491597 - RNA, 19 nt, Artificial Sequence
  Description of Artificial Sequence: Synthetic oligonucleotide
  Antisense strand to SEQ ID NO: 2491596
ucaguucuuagaaggagcu

SEQ ID NO: 2491598 - RNA, 19 nt, Artificial Sequence
  Description of Artificial Sequence: Synthetic oligonucleotide
  Sense strand starting at position 1040 of SEQ ID NO: 1887715
gaaacagggucucaaucuu

SEQ ID NO: 2491599 - RNA, 19 nt, Artificial Sequence
  Description of Artificial Sequence: Synthetic oligonucleotide
  Antisense strand to SEQ ID NO: 2491598
aagauugagacccuguuuc

SEQ ID NO: 2491600 - RNA, 19 nt, Artificial Sequence
  Description of Artificial Sequence: Synthetic oligonucleotide
  Sense strand starting at position 1048 of SEQ ID NO: 1887715
gucucaaucuuucgccaga

SEQ ID NO: 2491601 - RNA, 19 nt, Artificial Sequence
  Description of Artificial Sequence: Synthetic oligonucleotide
  Antisense strand to SEQ ID NO: 2491600
ucuggcgaaagauugagac

SEQ ID NO: 2491602 - RNA, 19 nt, Artificial Sequence
  Description of Artificial Sequence: Synthetic oligonucleotide
  Sense strand starting at position 1049 of SEQ ID NO: 1887715
ucucaaucuuucgccagau

SEQ ID NO: 2491603 - RNA, 19 nt, Artificial Sequence
  Description of Artificial Sequence: Synthetic oligonucleotide
  Antisense strand to SEQ ID NO: 2491602
aucuggcgaaagauugaga

SEQ ID NO: 2491604 - RNA, 19 nt, Artificial Sequence
  Description of Artificial Sequence: Synthetic oligonucleotide
  Sense strand starting at position 1050 of SEQ ID NO: 1887715
cucaaucuuucgccagauu

SEQ ID NO: 2491605 - RNA, 19 nt, Artificial Sequence
  Description of Artificial Sequence: Synthetic oligonucleotide
  Antisense strand to SEQ ID NO: 2491604
aaucuggcgaaagauugag

SEQ ID NO: 2491606 - RNA, 19 nt, Artificial Sequence
  Description of Artificial Sequence: Synthetic oligonucleotide
  Sense strand starting at position 1051 of SEQ ID NO: 1887715
ucaaucuuucgccagauug

SEQ ID NO: 2491607 - RNA, 19 nt, Artificial Sequence
  Description of Artificial Sequence: Synthetic oligonucleotide
  Antisense strand to SEQ ID NO: 2491606
caaucuggcgaaagauuga

SEQ ID NO: 2491608 - RNA, 19 nt, Artificial Sequence
  Description of Artificial Sequence: Synthetic oligonucleotide
  Sense strand starting at position 1061 of SEQ ID NO: 1887715
gccagauugcacuggcacu

SEQ ID NO: 2491609 - RNA, 19 nt, Artificial Sequence
  Description of Artificial Sequence: Synthetic oligonucleotide
  Antisense strand to SEQ ID NO: 2491608
agugccagugcaaucuggc

SEQ ID NO: 2491610 - RNA, 19 nt, Artificial Sequence
  Description of Artificial Sequence: Synthetic oligonucleotide
  Sense strand starting at position 1632 of SEQ ID NO: 1887715
ggugcgugcggcuucuuaa

SEQ ID NO: 2491611 - RNA, 19 nt, Artificial Sequence
  Description of Artificial Sequence: Synthetic oligonucleotide
  Antisense strand to SEQ ID NO: 2491610
uuaagaagccgcacgcacc

SEQ ID NO: 2491612 - RNA, 19 nt, Artificial Sequence
  Description of Artificial Sequence: Synthetic oligonucleotide
  Sense strand starting at position 1635 of SEQ ID NO: 1887715
gcgugcggcuucuuaacaa

SEQ ID NO: 2491613 - RNA, 19 nt, Artificial Sequence
  Description of Artificial Sequence: Synthetic oligonucleotide
  Antisense strand to SEQ ID NO: 2491612
uuguuaagaagccgcacgc

SEQ ID NO: 2491614 - RNA, 19 nt, Artificial Sequence
  Description of Artificial Sequence: Synthetic oligonucleotide
  Sense strand starting at position 1649 of SEQ ID NO: 1887715
aacaauugguaugguccaa

SEQ ID NO: 2491615 - RNA, 19 nt, Artificial Sequence
  Description of Artificial Sequence: Synthetic oligonucleotide
  Antisense strand to SEQ ID NO: 2491614
uuggaccauaccaauuguu

SEQ ID NO: 2491616 - RNA, 19 nt, Artificial Sequence
  Description of Artificial Sequence: Synthetic oligonucleotide
  Sense strand starting at position 1653 of SEQ ID NO: 1887715
auugguaugguccaacuuu

SEQ ID NO: 2491617 - RNA, 19 nt, Artificial Sequence
  Description of Artificial Sequence: Synthetic oligonucleotide
  Antisense strand to SEQ ID NO: 2491616
aaaguuggaccauaccaau

SEQ ID NO: 2491618 - RNA, 19 nt, Artificial Sequence
  Description of Artificial Sequence: Synthetic oligonucleotide
  Sense strand starting at position 1722 of SEQ ID NO: 1887715
ccugucuccuaguaacaaa

SEQ ID NO: 2491619 - RNA, 19 nt, Artificial Sequence
  Description of Artificial Sequence: Synthetic oligonucleotide
  Antisense strand to SEQ ID NO: 2491618
uuuguuacuaggagacagg

SEQ ID NO: 2491620 - RNA, 19 nt, Artificial Sequence
  Description of Artificial Sequence: Synthetic oligonucleotide
  Sense strand starting at position 1803 of SEQ ID NO: 1887715
gcagguggauucucucauu

SEQ ID NO: 2491621 - RNA, 19 nt, Artificial Sequence
  Description of Artificial Sequence: Synthetic oligonucleotide
  Antisense strand to SEQ ID NO: 2491620
aaugagagaauccaccugc

SEQ ID NO: 2491622 - RNA, 19 nt, Artificial Sequence
  Description of Artificial Sequence: Synthetic oligonucleotide
  Sense strand starting at position 1806 of SEQ ID NO: 1887715
gguggauucucucauuggu

SEQ ID NO: 2491623 - RNA, 19 nt, Artificial Sequence
  Description of Artificial Sequence: Synthetic oligonucleotide
  Antisense strand to SEQ ID NO: 2491622
accaaugagagaauccacc

SEQ ID NO: 2491624 - RNA, 19 nt, Artificial Sequence
  Description of Artificial Sequence: Synthetic oligonucleotide
  Sense strand starting at position 1808 of SEQ ID NO: 1887715
uggauucucucauugguga

SEQ ID NO: 2491625 - RNA, 19 nt, Artificial Sequence
  Description of Artificial Sequence: Synthetic oligonucleotide
  Antisense strand to SEQ ID NO: 2491624
ucaccaaugagagaaucca

SEQ ID NO: 2491626 - RNA, 19 nt, Artificial Sequence
  Description of Artificial Sequence: Synthetic oligonucleotide
  Sense strand starting at position 1809 of SEQ ID NO: 1887715
ggauucucucauuggugaa

SEQ ID NO: 2491627 - RNA, 19 nt, Artificial Sequence
  Description of Artificial Sequence: Synthetic oligonucleotide
  Antisense strand to SEQ ID NO: 2491626
uucaccaaugagagaaucc

SEQ ID NO: 2491628 - RNA, 19 nt, Artificial Sequence
  Description of Artificial Sequence: Synthetic oligonucleotide
  Sense strand starting at position 1831 of SEQ ID NO: 1887715
guucaaugaugggugaaau

SEQ ID NO: 2491629 - RNA, 19 nt, Artificial Sequence
  Description of Artificial Sequence: Synthetic oligonucleotide
  Antisense strand to SEQ ID NO: 2491628
auuucacccaucauugaac

SEQ ID NO: 2491630 - RNA, 19 nt, Artificial Sequence
  Description of Artificial Sequence: Synthetic oligonucleotide
  Sense strand starting at position 1871 of SEQ ID NO: 1887715
auuccaguaugggagugau

SEQ ID NO: 2491631 - RNA, 19 nt, Artificial Sequence
  Description of Artificial Sequence: Synthetic oligonucleotide
  Antisense strand to SEQ ID NO: 2491630
aucacucccauacuggaau

SEQ ID NO: 2491632 - RNA, 19 nt, Artificial Sequence
  Description of Artificial Sequence: Synthetic oligonucleotide
  Sense strand starting at position 1882 of SEQ ID NO: 1887715
ggagugauaggcugggaga

SEQ ID NO: 2491633 - RNA, 19 nt, Artificial Sequence
  Description of Artificial Sequence: Synthetic oligonucleotide
  Antisense strand to SEQ ID NO: 2491632
ucucccagccuaucacucc

SEQ ID NO: 2491634 - RNA, 19 nt, Artificial Sequence
  Description of Artificial Sequence: Synthetic oligonucleotide
  Sense strand starting at position 1885 of SEQ ID NO: 1887715
gugauaggcugggagaguu

SEQ ID NO: 2491635 - RNA, 19 nt, Artificial Sequence
  Description of Artificial Sequence: Synthetic oligonucleotide
  Antisense strand to SEQ ID NO: 2491634
aacucucccagccuaucac

SEQ ID NO: 2491636 - RNA, 19 nt, Artificial Sequence
  Description of Artificial Sequence: Synthetic oligonucleotide
  Sense strand starting at position 1898 of SEQ ID NO: 1887715
agaguuaaaugauggcaga

SEQ ID NO: 2491637 - RNA, 19 nt, Artificial Sequence
  Description of Artificial Sequence: Synthetic oligonucleotide
  Antisense strand to SEQ ID NO: 2491636
ucugccaucauuuaacucu

SEQ ID NO: 2491638 - RNA, 19 nt, Artificial Sequence
  Description of Artificial Sequence: Synthetic oligonucleotide
  Sense strand starting at position 1997 of SEQ ID NO: 1887715
cagauaaacuguggagagu

SEQ ID NO: 2491639 - RNA, 19 nt, Artificial Sequence
  Description of Artificial Sequence: Synthetic oligonucleotide
  Antisense strand to SEQ ID NO: 2491638
acucuccacaguuuaucug

SEQ ID NO: 2491640 - RNA, 19 nt, Artificial Sequence
  Description of Artificial Sequence: Synthetic oligonucleotide
  Sense strand starting at position 2036 of SEQ ID NO: 1887715
ugagaacuuccugguccca

SEQ ID NO: 2491641 - RNA, 19 nt, Artificial Sequence
  Description of Artificial Sequence: Synthetic oligonucleotide
  Antisense strand to SEQ ID NO: 2491640
ugggaccaggaaguucuca

SEQ ID NO: 2491642 - RNA, 19 nt, Artificial Sequence
  Description of Artificial Sequence: Synthetic oligonucleotide
  Sense strand starting at position 2971 of SEQ ID NO: 1887715
ggaacugcuuacccuuauu

SEQ ID NO: 2491643 - RNA, 19 nt, Artificial Sequence
  Description of Artificial Sequence: Synthetic oligonucleotide
  Antisense strand to SEQ ID NO: 2491642
aauaaggguaagcaguucc

SEQ ID NO: 2491644 - RNA, 19 nt, Artificial Sequence
  Description of Artificial Sequence: Synthetic oligonucleotide
  Sense strand starting at position 3098 of SEQ ID NO: 1887715
agugcucuggcaggaucau

SEQ ID NO: 2491645 - RNA, 19 nt, Artificial Sequence
  Description of Artificial Sequence: Synthetic oligonucleotide
  Antisense strand to SEQ ID NO: 2491644
augauccugccagagcacu

SEQ ID NO: 2491646 - RNA, 19 nt, Artificial Sequence
  Description of Artificial Sequence: Synthetic oligonucleotide
  Sense strand starting at position 3839 of SEQ ID NO: 1887715
aagcaagucugaguugagu

SEQ ID NO: 2491647 - RNA, 19 nt, Artificial Sequence
  Description of Artificial Sequence: Synthetic oligonucleotide
  Antisense strand to SEQ ID NO: 2491646
acucaacucagacuugcuu

SEQ ID NO: 2491648 - RNA, 19 nt, Artificial Sequence
  Description of Artificial Sequence: Synthetic oligonucleotide
  Sense strand starting at position 3841 of SEQ ID NO: 1887715
gcaagucugaguugaguuu

SEQ ID NO: 2491649 - RNA, 19 nt, Artificial Sequence
  Description of Artificial Sequence: Synthetic oligonucleotide
  Antisense strand to SEQ ID NO: 2491648
aaacucaacucagacuugc

SEQ ID NO: 2491650 - RNA, 19 nt, Artificial Sequence
  Description of Artificial Sequence: Synthetic oligonucleotide
  Sense strand starting at position 3850 of SEQ ID NO: 1887715
aguugaguuucucucacuu

SEQ ID NO: 2491651 - RNA, 19 nt, Artificial Sequence
  Description of Artificial Sequence: Synthetic oligonucleotide
  Antisense strand to SEQ ID NO: 2491650
aagugagagaaacucaacu

SEQ ID NO: 2491652 - RNA, 19 nt, Artificial Sequence
  Description of Artificial Sequence: Synthetic oligonucleotide
  Sense strand starting at position 3852 of SEQ ID NO: 1887715
uugaguuucucucacuuac

SEQ ID NO: 2491653 - RNA, 19 nt, Artificial Sequence
  Description of Artificial Sequence: Synthetic oligonucleotide
  Antisense strand to SEQ ID NO: 2491652
guaagugagagaaacucaa

SEQ ID NO: 2491654 - RNA, 19 nt, Artificial Sequence
  Description of Artificial Sequence: Synthetic oligonucleotide
  Sense strand starting at position 3910 of SEQ ID NO: 1887715
gccugaaucuacugccuuu

SEQ ID NO: 2491655 - RNA, 19 nt, Artificial Sequence
  Description of Artificial Sequence: Synthetic oligonucleotide
  Antisense strand to SEQ ID NO: 2491654
aaaggcaguagauucaggc

SEQ ID NO: 2491656 - RNA, 19 nt, Artificial Sequence
  Description of Artificial Sequence: Synthetic oligonucleotide
  Sense strand starting at position 36 of SEQ ID NO: 1887716
ucagaccucuggguuguaa

SEQ ID NO: 2491657 - RNA, 19 nt, Artificial Sequence
  Description of Artificial Sequence: Synthetic oligonucleotide
  Antisense strand to SEQ ID NO: 2491656
uuacaacccagaggucuga

SEQ ID NO: 2491658 - RNA, 19 nt, Artificial Sequence
  Description of Artificial Sequence: Synthetic oligonucleotide
  Sense strand starting at position 38 of SEQ ID NO: 1887716
agaccucuggguuguaagu

SEQ ID NO: 2491659 - RNA, 19 nt, Artificial Sequence
  Description of Artificial Sequence: Synthetic oligonucleotide
  Antisense strand to SEQ ID NO: 2491658
acuuacaacccagaggucu

SEQ ID NO: 2491660 - RNA, 19 nt, Artificial Sequence
  Description of Artificial Sequence: Synthetic oligonucleotide
  Sense strand starting at position 44 of SEQ ID NO: 1887716
cuggguuguaagugagaga

SEQ ID NO: 2491661 - RNA, 19 nt, Artificial Sequence
  Description of Artificial Sequence: Synthetic oligonucleotide
  Antisense strand to SEQ ID NO: 2491660
ucucucacuuacaacccag

SEQ ID NO: 2491662 - RNA, 19 nt, Artificial Sequence
  Description of Artificial Sequence: Synthetic oligonucleotide
  Sense strand starting at position 47 of SEQ ID NO: 1887716
gguuguaagugagagaaac

SEQ ID NO: 2491663 - RNA, 19 nt, Artificial Sequence
  Description of Artificial Sequence: Synthetic oligonucleotide
  Antisense strand to SEQ ID NO: 2491662
guuucucucacuuacaacc

SEQ ID NO: 2491664 - RNA, 19 nt, Artificial Sequence
  Description of Artificial Sequence: Synthetic oligonucleotide
  Sense strand starting at position 99 of SEQ ID NO: 1887716
uacugccuucugugaugga

SEQ ID NO: 2491665 - RNA, 19 nt, Artificial Sequence
  Description of Artificial Sequence: Synthetic oligonucleotide
  Antisense strand to SEQ ID NO: 2491664
uccaucacagaaggcagua

SEQ ID NO: 2491666 - RNA, 19 nt, Artificial Sequence
  Description of Artificial Sequence: Synthetic oligonucleotide
  Sense strand starting at position 100 of SEQ ID NO: 1887716
acugccuucugugauggaa

SEQ ID NO: 2491667 - RNA, 19 nt, Artificial Sequence
  Description of Artificial Sequence: Synthetic oligonucleotide
  Antisense strand to SEQ ID NO: 2491666
uuccaucacagaaggcagu

SEQ ID NO: 2491668 - RNA, 19 nt, Artificial Sequence
  Description of Artificial Sequence: Synthetic oligonucleotide
  Sense strand starting at position 478 of SEQ ID NO: 1887716
uuccaacacuuugagaaga

SEQ ID NO: 2491669 - RNA, 19 nt, Artificial Sequence
  Description of Artificial Sequence: Synthetic oligonucleotide
  Antisense strand to SEQ ID NO: 2491668
ucuucucaaaguguuggaa

SEQ ID NO: 2491670 - RNA, 19 nt, Artificial Sequence
  Description of Artificial Sequence: Synthetic oligonucleotide
  Sense strand starting at position 489 of SEQ ID NO: 1887716
ugagaagaugauugcuuga

SEQ ID NO: 2491671 - RNA, 19 nt, Artificial Sequence
  Description of Artificial Sequence: Synthetic oligonucleotide
  Antisense strand to SEQ ID NO: 2491670
ucaagcaaucaucuucuca

SEQ ID NO: 2491672 - RNA, 19 nt, Artificial Sequence
  Description of Artificial Sequence: Synthetic oligonucleotide
  Sense strand starting at position 491 of SEQ ID NO: 1887716
agaagaugauugcuugaac

SEQ ID NO: 2491673 - RNA, 19 nt, Artificial Sequence
  Description of Artificial Sequence: Synthetic oligonucleotide
  Antisense strand to SEQ ID NO: 2491672
guucaagcaaucaucuucu

SEQ ID NO: 2491674 - RNA, 19 nt, Artificial Sequence
  Description of Artificial Sequence: Synthetic oligonucleotide
  Sense strand starting at position 494 of SEQ ID NO: 1887716
agaugauugcuugaacgca

SEQ ID NO: 2491675 - RNA, 19 nt, Artificial Sequence
  Description of Artificial Sequence: Synthetic oligonucleotide
  Antisense strand to SEQ ID NO: 2491674
ugcguucaagcaaucaucu

SEQ ID NO: 2491676 - RNA, 19 nt, Artificial Sequence
  Description of Artificial Sequence: Synthetic oligonucleotide
  Sense strand starting at position 499 of SEQ ID NO: 1887716
auugcuugaacgcaggauu

SEQ ID NO: 2491677 - RNA, 19 nt, Artificial Sequence
  Description of Artificial Sequence: Synthetic oligonucleotide
  Antisense strand to SEQ ID NO: 2491676
aauccugcguucaagcaau

SEQ ID NO: 2491678 - RNA, 19 nt, Artificial Sequence
  Description of Artificial Sequence: Synthetic oligonucleotide
  Sense strand starting at position 803 of SEQ ID NO: 1887716
ccaugauccugccagagca

SEQ ID NO: 2491679 - RNA, 19 nt, Artificial Sequence
  Description of Artificial Sequence: Synthetic oligonucleotide
  Antisense strand to SEQ ID NO: 2491678
ugcucuggcaggaucaugg

SEQ ID NO: 2491680 - RNA, 19 nt, Artificial Sequence
  Description of Artificial Sequence: Synthetic oligonucleotide
  Sense strand starting at position 1174 of SEQ ID NO: 1887716
gaccuuaacccugaguggu

SEQ ID NO: 2491681 - RNA, 19 nt, Artificial Sequence
  Description of Artificial Sequence: Synthetic oligonucleotide
  Antisense strand to SEQ ID NO: 2491680
accacucaggguuaagguc

SEQ ID NO: 2491682 - RNA, 19 nt, Artificial Sequence
  Description of Artificial Sequence: Synthetic oligonucleotide
  Sense strand starting at position 1186 of SEQ ID NO: 1887716
gagugguggcggcagagau

SEQ ID NO: 2491683 - RNA, 19 nt, Artificial Sequence
  Description of Artificial Sequence: Synthetic oligonucleotide
  Antisense strand to SEQ ID NO: 2491682
aucucugccgccaccacuc

SEQ ID NO: 2491684 - RNA, 19 nt, Artificial Sequence
  Description of Artificial Sequence: Synthetic oligonucleotide
  Sense strand starting at position 1205 of SEQ ID NO: 1887716
gugagcucggccucaguuu

SEQ ID NO: 2491685 - RNA, 19 nt, Artificial Sequence
  Description of Artificial Sequence: Synthetic oligonucleotide
  Antisense strand to SEQ ID NO: 2491684
aaacugaggccgagcucac

SEQ ID NO: 2491686 - RNA, 19 nt, Artificial Sequence
  Description of Artificial Sequence: Synthetic oligonucleotide
  Sense strand starting at position 1213 of SEQ ID NO: 1887716
ggccucaguuuguccagua

SEQ ID NO: 2491687 - RNA, 19 nt, Artificial Sequence
  Description of Artificial Sequence: Synthetic oligonucleotide
  Antisense strand to SEQ ID NO: 2491686
uacuggacaaacugaggcc

SEQ ID NO: 2491688 - RNA, 19 nt, Artificial Sequence
  Description of Artificial Sequence: Synthetic oligonucleotide
  Sense strand starting at position 1214 of SEQ ID NO: 1887716
gccucaguuuguccaguaa

SEQ ID NO: 2491689 - RNA, 19 nt, Artificial Sequence
  Description of Artificial Sequence: Synthetic oligonucleotide
  Antisense strand to SEQ ID NO: 2491688
uuacuggacaaacugaggc

SEQ ID NO: 2491690 - RNA, 19 nt, Artificial Sequence
  Description of Artificial Sequence: Synthetic oligonucleotide
  Sense strand starting at position 1218 of SEQ ID NO: 1887716
caguuuguccaguaagaug

SEQ ID NO: 2491691 - RNA, 19 nt, Artificial Sequence
  Description of Artificial Sequence: Synthetic oligonucleotide
  Antisense strand to SEQ ID NO: 2491690
caucuuacuggacaaacug

SEQ ID NO: 2491692 - RNA, 19 nt, Artificial Sequence
  Description of Artificial Sequence: Synthetic oligonucleotide
  Sense strand starting at position 1398 of SEQ ID NO: 1887716
gagaucaggcugggcaaua

SEQ ID NO: 2491693 - RNA, 19 nt, Artificial Sequence
  Description of Artificial Sequence: Synthetic oligonucleotide
  Antisense strand to SEQ ID NO: 2491692
uauugcccagccugaucuc

SEQ ID NO: 2491694 - RNA, 19 nt, Artificial Sequence
  Description of Artificial Sequence: Synthetic oligonucleotide
  Sense strand starting at position 1425 of SEQ ID NO: 1887716
ccuugucucuacgacaaau

SEQ ID NO: 2491695 - RNA, 19 nt, Artificial Sequence
  Description of Artificial Sequence: Synthetic oligonucleotide
  Antisense strand to SEQ ID NO: 2491694
auuugucguagagacaagg

SEQ ID NO: 2491696 - RNA, 19 nt, Artificial Sequence
  Description of Artificial Sequence: Synthetic oligonucleotide
  Sense strand starting at position 1427 of SEQ ID NO: 1887716
uugucucuacgacaaauaa

SEQ ID NO: 2491697 - RNA, 19 nt, Artificial Sequence
  Description of Artificial Sequence: Synthetic oligonucleotide
  Antisense strand to SEQ ID NO: 2491696
uuauuugucguagagacaa

SEQ ID NO: 2491698 - RNA, 19 nt, Artificial Sequence
  Description of Artificial Sequence: Synthetic oligonucleotide
  Sense strand starting at position 1607 of SEQ ID NO: 1887716
aauagaacucuguguggcu

SEQ ID NO: 2491699 - RNA, 19 nt, Artificial Sequence
  Description of Artificial Sequence: Synthetic oligonucleotide
  Antisense strand to SEQ ID NO: 2491698
agccacacagaguucuauu

SEQ ID NO: 2491700 - RNA, 19 nt, Artificial Sequence
  Description of Artificial Sequence: Synthetic oligonucleotide
  Sense strand starting at position 1835 of SEQ ID NO: 1887716
cguuccuccaaaugggaau

SEQ ID NO: 2491701 - RNA, 19 nt, Artificial Sequence
  Description of Artificial Sequence: Synthetic oligonucleotide
  Antisense strand to SEQ ID NO: 2491700
auucccauuuggaggaacg

SEQ ID NO: 2491702 - RNA, 19 nt, Artificial Sequence
  Description of Artificial Sequence: Synthetic oligonucleotide
  Sense strand starting at position 1846 of SEQ ID NO: 1887716
augggaaucuugcuucucu

SEQ ID NO: 2491703 - RNA, 19 nt, Artificial Sequence
  Description of Artificial Sequence: Synthetic oligonucleotide
  Antisense strand to SEQ ID NO: 2491702
agagaagcaagauucccau

SEQ ID NO: 2491704 - RNA, 19 nt, Artificial Sequence
  Description of Artificial Sequence: Synthetic oligonucleotide
  Sense strand starting at position 1872 of SEQ ID NO: 1887716
ccaggaaguucucagucca

SEQ ID NO: 2491705 - RNA, 19 nt, Artificial Sequence
  Description of Artificial Sequence: Synthetic oligonucleotide
  Antisense strand to SEQ ID NO: 2491704
uggacugagaacuuccugg

SEQ ID NO: 2491706 - RNA, 19 nt, Artificial Sequence
  Description of Artificial Sequence: Synthetic oligonucleotide
  Sense strand starting at position 1910 of SEQ ID NO: 1887716
uccacaguuuaucugaguu

SEQ ID NO: 2491707 - RNA, 19 nt, Artificial Sequence
  Description of Artificial Sequence: Synthetic oligonucleotide
  Antisense strand to SEQ ID NO: 2491706
aacucagauaaacugugga

SEQ ID NO: 2491708 - RNA, 19 nt, Artificial Sequence
  Description of Artificial Sequence: Synthetic oligonucleotide
  Sense strand starting at position 2177 of SEQ ID NO: 1887716
ccaguuuguuacuaggaga

SEQ ID NO: 2491709 - RNA, 19 nt, Artificial Sequence
  Description of Artificial Sequence: Synthetic oligonucleotide
  Antisense strand to SEQ ID NO: 2491708
ucuccuaguaacaaacugg

SEQ ID NO: 2491710 - RNA, 19 nt, Artificial Sequence
  Description of Artificial Sequence: Synthetic oligonucleotide
  Sense strand starting at position 2180 of SEQ ID NO: 1887716
guuuguuacuaggagacag

SEQ ID NO: 2491711 - RNA, 19 nt, Artificial Sequence
  Description of Artificial Sequence: Synthetic oligonucleotide
  Antisense strand to SEQ ID NO: 2491710
cugucuccuaguaacaaac

SEQ ID NO: 2491712 - RNA, 19 nt, Artificial Sequence
  Description of Artificial Sequence: Synthetic oligonucleotide
  Sense strand starting at position 2236 of SEQ ID NO: 1887716
gaacuaacuuguugaaagu

SEQ ID NO: 2491713 - RNA, 19 nt, Artificial Sequence
  Description of Artificial Sequence: Synthetic oligonucleotide
  Antisense strand to SEQ ID NO: 2491712
acuuucaacaaguuaguuc

SEQ ID NO: 2491714 - RNA, 19 nt, Artificial Sequence
  Description of Artificial Sequence: Synthetic oligonucleotide
  Sense strand starting at position 2245 of SEQ ID NO: 1887716
uguugaaaguuggaccaua

SEQ ID NO: 2491715 - RNA, 19 nt, Artificial Sequence
  Description of Artificial Sequence: Synthetic oligonucleotide
  Antisense strand to SEQ ID NO: 2491714
uaugguccaacuuucaaca

SEQ ID NO: 2491716 - RNA, 19 nt, Artificial Sequence
  Description of Artificial Sequence: Synthetic oligonucleotide
  Sense strand starting at position 2827 of SEQ ID NO: 1887716
cugugaugcugugauagug

SEQ ID NO: 2491717 - RNA, 19 nt, Artificial Sequence
  Description of Artificial Sequence: Synthetic oligonucleotide
  Antisense strand to SEQ ID NO: 2491716
cacuaucacagcaucacag

SEQ ID NO: 2491718 - RNA, 19 nt, Artificial Sequence
  Description of Artificial Sequence: Synthetic oligonucleotide
  Sense strand starting at position 2848 of SEQ ID NO: 1887716
agugcaaucuggcgaaaga

SEQ ID NO: 2491719 - RNA, 19 nt, Artificial Sequence
  Description of Artificial Sequence: Synthetic oligonucleotide
  Antisense strand to SEQ ID NO: 2491718
ucuuucgccagauugcacu

SEQ ID NO: 2491720 - RNA, 19 nt, Artificial Sequence
  Description of Artificial Sequence: Synthetic oligonucleotide
  Sense strand starting at position 2849 of SEQ ID NO: 1887716
gugcaaucuggcgaaagau

SEQ ID NO: 2491721 - RNA, 19 nt, Artificial Sequence
  Description of Artificial Sequence: Synthetic oligonucleotide
  Antisense strand to SEQ ID NO: 2491720
aucuuucgccagauugcac

SEQ ID NO: 2491722 - RNA, 19 nt, Artificial Sequence
  Description of Artificial Sequence: Synthetic oligonucleotide
  Sense strand starting at position 3259 of SEQ ID NO: 1887716
ggaguucaguucuuagaag

SEQ ID NO: 2491723 - RNA, 19 nt, Artificial Sequence
  Description of Artificial Sequence: Synthetic oligonucleotide
  Antisense strand to SEQ ID NO: 2491722
cuucuaagaacugaacucc

SEQ ID NO: 2491724 - RNA, 19 nt, Artificial Sequence
  Description of Artificial Sequence: Synthetic oligonucleotide
  Sense strand starting at position 3829 of SEQ ID NO: 1887716
ggaagaaccuuugauggca

SEQ ID NO: 2491725 - RNA, 19 nt, Artificial Sequence
  Description of Artificial Sequence: Synthetic oligonucleotide
  Antisense strand to SEQ ID NO: 2491724
ugccaucaaagguucuucc

SEQ ID NO: 2491726 - RNA, 19 nt, Artificial Sequence
  Description of Artificial Sequence: Synthetic oligonucleotide
  Sense strand starting at position 3832 of SEQ ID NO: 1887716
agaaccuuugauggcaaga

SEQ ID NO: 2491727 - RNA, 19 nt, Artificial Sequence
  Description of Artificial Sequence: Synthetic oligonucleotide
  Antisense strand to SEQ ID NO: 2491726
ucuugccaucaaagguucu

SEQ ID NO: 2491728 - RNA, 19 nt, Artificial Sequence
  Description of Artificial Sequence: Synthetic oligonucleotide
  Sense strand starting at position 3834 of SEQ ID NO: 1887716
aaccuuugauggcaagaga

SEQ ID NO: 2491729 - RNA, 19 nt, Artificial Sequence
  Description of Artificial Sequence: Synthetic oligonucleotide
  Antisense strand to SEQ ID NO: 2491728
ucucuugccaucaaagguu

SEQ ID NO: 2491730 - RNA, 19 nt, Artificial Sequence
  Description of Artificial Sequence: Synthetic oligonucleotide
  Sense strand starting at position 179 of SEQ ID NO: 1887717
gauuuaauaguguggcucu

SEQ ID NO: 2491731 - RNA, 19 nt, Artificial Sequence
  Description of Artificial Sequence: Synthetic oligonucleotide
  Antisense strand to SEQ ID NO: 2491730
agagccacacuauuaaauc

SEQ ID NO: 2491732 - RNA, 19 nt, Artificial Sequence
  Description of Artificial Sequence: Synthetic oligonucleotide
  Sense strand starting at position 285 of SEQ ID NO: 1887717
gugagcuaugauggccaau

SEQ ID NO: 2491733 - RNA, 19 nt, Artificial Sequence
  Description of Artificial Sequence: Synthetic oligonucleotide
  Antisense strand to SEQ ID NO: 2491732
auuggccaucauagcucac

SEQ ID NO: 2491734 - RNA, 19 nt, Artificial Sequence
  Description of Artificial Sequence: Synthetic oligonucleotide
  Sense strand starting at position 365 of SEQ ID NO: 1887717
cuguccaucugagcucuua

SEQ ID NO: 2491735 - RNA, 19 nt, Artificial Sequence
  Description of Artificial Sequence: Synthetic oligonucleotide
  Antisense strand to SEQ ID NO: 2491734
uaagagcucagauggacag

SEQ ID NO: 2491736 - RNA, 19 nt, Artificial Sequence
  Description of Artificial Sequence: Synthetic oligonucleotide
  Sense strand starting at position 376 of SEQ ID NO: 1887717
agcucuuaccuguguugau

SEQ ID NO: 2491737 - RNA, 19 nt, Artificial Sequence
  Description of Artificial Sequence: Synthetic oligonucleotide
  Antisense strand to SEQ ID NO: 2491736
aucaacacagguaagagcu

SEQ ID NO: 2491738 - RNA, 19 nt, Artificial Sequence
  Description of Artificial Sequence: Synthetic oligonucleotide
  Sense strand starting at position 377 of SEQ ID NO: 1887717
gcucuuaccuguguugaua

SEQ ID NO: 2491739 - RNA, 19 nt, Artificial Sequence
  Description of Artificial Sequence: Synthetic oligonucleotide
  Antisense strand to SEQ ID NO: 2491738
uaucaacacagguaagagc

SEQ ID NO: 2491740 - RNA, 19 nt, Artificial Sequence
  Description of Artificial Sequence: Synthetic oligonucleotide
  Sense strand starting at position 534 of SEQ ID NO: 1887717
caagaugugcugugauguc

SEQ ID NO: 2491741 - RNA, 19 nt, Artificial Sequence
  Description of Artificial Sequence: Synthetic oligonucleotide
  Antisense strand to SEQ ID NO: 2491740
gacaucacagcacaucuug

SEQ ID NO: 2491742 - RNA, 19 nt, Artificial Sequence
  Description of Artificial Sequence: Synthetic oligonucleotide
  Sense strand starting at position 570 of SEQ ID NO: 1887717
cuguuuaggcagcagagau

SEQ ID NO: 2491743 - RNA, 19 nt, Artificial Sequence
  Description of Artificial Sequence: Synthetic oligonucleotide
  Antisense strand to SEQ ID NO: 2491742
aucucugcugccuaaacag

SEQ ID NO: 2491744 - RNA, 19 nt, Artificial Sequence
  Description of Artificial Sequence: Synthetic oligonucleotide
  Sense strand starting at position 891 of SEQ ID NO: 1887717
cagacugucugcuucugaa

SEQ ID NO: 2491745 - RNA, 19 nt, Artificial Sequence
  Description of Artificial Sequence: Synthetic oligonucleotide
  Antisense strand to SEQ ID NO: 2491744
uucagaagcagacagucug

SEQ ID NO: 2491746 - RNA, 19 nt, Artificial Sequence
  Description of Artificial Sequence: Synthetic oligonucleotide
  Sense strand starting at position 910 of SEQ ID NO: 1887717
ugcguagggaacuguguaa

SEQ ID NO: 2491747 - RNA, 19 nt, Artificial Sequence
  Description of Artificial Sequence: Synthetic oligonucleotide
  Antisense strand to SEQ ID NO: 2491746
uuacacaguucccuacgca

SEQ ID NO: 2491748 - RNA, 19 nt, Artificial Sequence
  Description of Artificial Sequence: Synthetic oligonucleotide
  Sense strand starting at position 938 of SEQ ID NO: 1887717
aucgaacucucuuccaaga

SEQ ID NO: 2491749 - RNA, 19 nt, Artificial Sequence
  Description of Artificial Sequence: Synthetic oligonucleotide
  Antisense strand to SEQ ID NO: 2491748
ucuuggaagagaguucgau

SEQ ID NO: 2491750 - RNA, 19 nt, Artificial Sequence
  Description of Artificial Sequence: Synthetic oligonucleotide
  Sense strand starting at position 940 of SEQ ID NO: 1887717
cgaacucucuuccaagaac

SEQ ID NO: 2491751 - RNA, 19 nt, Artificial Sequence
  Description of Artificial Sequence: Synthetic oligonucleotide
  Antisense strand to SEQ ID NO: 2491750
guucuuggaagagaguucg

SEQ ID NO: 2491752 - RNA, 19 nt, Artificial Sequence
  Description of Artificial Sequence: Synthetic oligonucleotide
  Sense strand starting at position 1054 of SEQ ID NO: 1887717
aaagguguaucaugaagga

SEQ ID NO: 2491753 - RNA, 19 nt, Artificial Sequence
  Description of Artificial Sequence: Synthetic oligonucleotide
  Antisense strand to SEQ ID NO: 2491752
uccuucaugauacaccuuu

SEQ ID NO: 2491754 - RNA, 19 nt, Artificial Sequence
  Description of Artificial Sequence: Synthetic oligonucleotide
  Sense strand starting at position 1058 of SEQ ID NO: 1887717
guguaucaugaaggauaca

SEQ ID NO: 2491755 - RNA, 19 nt, Artificial Sequence
  Description of Artificial Sequence: Synthetic oligonucleotide
  Antisense strand to SEQ ID NO: 2491754
uguauccuucaugauacac

SEQ ID NO: 2491756 - RNA, 19 nt, Artificial Sequence
  Description of Artificial Sequence: Synthetic oligonucleotide
  Sense strand starting at position 1721 of SEQ ID NO: 1887717
aggagagaguaauuauguu

SEQ ID NO: 2491757 - RNA, 19 nt, Artificial Sequence
  Description of Artificial Sequence: Synthetic oligonucleotide
  Antisense strand to SEQ ID NO: 2491756
aacauaauuacucucuccu

SEQ ID NO: 2491758 - RNA, 19 nt, Artificial Sequence
  Description of Artificial Sequence: Synthetic oligonucleotide
  Sense strand starting at position 1758 of SEQ ID NO: 1887717
gguuguaaggacugacuca

SEQ ID NO: 2491759 - RNA, 19 nt, Artificial Sequence
  Description of Artificial Sequence: Synthetic oligonucleotide
  Antisense strand to SEQ ID NO: 2491758
ugagucaguccuuacaacc

SEQ ID NO: 2491760 - RNA, 19 nt, Artificial Sequence
  Description of Artificial Sequence: Synthetic oligonucleotide
  Sense strand starting at position 1781 of SEQ ID NO: 1887717
aagugcugacgugaacauu

SEQ ID NO: 2491761 - RNA, 19 nt, Artificial Sequence
  Description of Artificial Sequence: Synthetic oligonucleotide
  Antisense strand to SEQ ID NO: 2491760
aauguucacgucagcacuu

SEQ ID NO: 2491762 - RNA, 19 nt, Artificial Sequence
  Description of Artificial Sequence: Synthetic oligonucleotide
  Sense strand starting at position 1790 of SEQ ID NO: 1887717
cgugaacauucugacauau

SEQ ID NO: 2491763 - RNA, 19 nt, Artificial Sequence
  Description of Artificial Sequence: Synthetic oligonucleotide
  Antisense strand to SEQ ID NO: 2491762
auaugucagaauguucacg

SEQ ID NO: 2491764 - RNA, 19 nt, Artificial Sequence
  Description of Artificial Sequence: Synthetic oligonucleotide
  Sense strand starting at position 1836 of SEQ ID NO: 1887717
augugucugugauugaguu

SEQ ID NO: 2491765 - RNA, 19 nt, Artificial Sequence
  Description of Artificial Sequence: Synthetic oligonucleotide
  Antisense strand to SEQ ID NO: 2491764
aacucaaucacagacacau

SEQ ID NO: 2491766 - RNA, 19 nt, Artificial Sequence
  Description of Artificial Sequence: Synthetic oligonucleotide
  Sense strand starting at position 1837 of SEQ ID NO: 1887717
ugugucugugauugaguuu

SEQ ID NO: 2491767 - RNA, 19 nt, Artificial Sequence
  Description of Artificial Sequence: Synthetic oligonucleotide
  Antisense strand to SEQ ID NO: 2491766
aaacucaaucacagacaca

SEQ ID NO: 2491768 - RNA, 19 nt, Artificial Sequence
  Description of Artificial Sequence: Synthetic oligonucleotide
  Sense strand starting at position 1991 of SEQ ID NO: 1887717
uaucacuuggugugucgaa

SEQ ID NO: 2491769 - RNA, 19 nt, Artificial Sequence
  Description of Artificial Sequence: Synthetic oligonucleotide
  Antisense strand to SEQ ID NO: 2491768
uucgacacaccaagugaua

SEQ ID NO: 2491770 - RNA, 19 nt, Artificial Sequence
  Description of Artificial Sequence: Synthetic oligonucleotide
  Sense strand starting at position 1998 of SEQ ID NO: 1887717
uggugugucgaacauaaua

SEQ ID NO: 2491771 - RNA, 19 nt, Artificial Sequence
  Description of Artificial Sequence: Synthetic oligonucleotide
  Antisense strand to SEQ ID NO: 2491770
uauuauguucgacacacca

SEQ ID NO: 2491772 - RNA, 19 nt, Artificial Sequence
  Description of Artificial Sequence: Synthetic oligonucleotide
  Sense strand starting at position 2028 of SEQ ID NO: 1887717
uauagaauuguggguuaau

SEQ ID NO: 2491773 - RNA, 19 nt, Artificial Sequence
  Description of Artificial Sequence: Synthetic oligonucleotide
  Antisense strand to SEQ ID NO: 2491772
auuaacccacaauucuaua

SEQ ID NO: 2491774 - RNA, 19 nt, Artificial Sequence
  Description of Artificial Sequence: Synthetic oligonucleotide
  Sense strand starting at position 2029 of SEQ ID NO: 1887717
auagaauuguggguuaauu

SEQ ID NO: 2491775 - RNA, 19 nt, Artificial Sequence
  Description of Artificial Sequence: Synthetic oligonucleotide
  Antisense strand to SEQ ID NO: 2491774
aauuaacccacaauucuau

SEQ ID NO: 2491776 - RNA, 19 nt, Artificial Sequence
  Description of Artificial Sequence: Synthetic oligonucleotide
  Sense strand starting at position 2050 of SEQ ID NO: 1887717
gugucugggcauuagaauc

SEQ ID NO: 2491777 - RNA, 19 nt, Artificial Sequence
  Description of Artificial Sequence: Synthetic oligonucleotide
  Antisense strand to SEQ ID NO: 2491776
gauucuaaugcccagacac

SEQ ID NO: 2491778 - RNA, 19 nt, Artificial Sequence
  Description of Artificial Sequence: Synthetic oligonucleotide
  Sense strand starting at position 2085 of SEQ ID NO: 1887717
gcaguuaaguaacagauca

SEQ ID NO: 2491779 - RNA, 19 nt, Artificial Sequence
  Description of Artificial Sequence: Synthetic oligonucleotide
  Antisense strand to SEQ ID NO: 2491778
ugaucuguuacuuaacugc

SEQ ID NO: 2491780 - RNA, 19 nt, Artificial Sequence
  Description of Artificial Sequence: Synthetic oligonucleotide
  Sense strand starting at position 2092 of SEQ ID NO: 1887717
aguaacagaucagcauuaa

SEQ ID NO: 2491781 - RNA, 19 nt, Artificial Sequence
  Description of Artificial Sequence: Synthetic oligonucleotide
  Antisense strand to SEQ ID NO: 2491780
uuaaugcugaucuguuacu

SEQ ID NO: 2491782 - RNA, 19 nt, Artificial Sequence
  Description of Artificial Sequence: Synthetic oligonucleotide
  Sense strand starting at position 2125 of SEQ ID NO: 1887717
uuaccuaacugaguaaagu

SEQ ID NO: 2491783 - RNA, 19 nt, Artificial Sequence
  Description of Artificial Sequence: Synthetic oligonucleotide
  Antisense strand to SEQ ID NO: 2491782
acuuuacucaguuagguaa

SEQ ID NO: 2491784 - RNA, 19 nt, Artificial Sequence
  Description of Artificial Sequence: Synthetic oligonucleotide
  Sense strand starting at position 2180 of SEQ ID NO: 1887717
gucauucuauaugcauaca

SEQ ID NO: 2491785 - RNA, 19 nt, Artificial Sequence
  Description of Artificial Sequence: Synthetic oligonucleotide
  Antisense strand to SEQ ID NO: 2491784
uguaugcauauagaaugac

SEQ ID NO: 2491786 - RNA, 19 nt, Artificial Sequence
  Description of Artificial Sequence: Synthetic oligonucleotide
  Sense strand starting at position 2235 of SEQ ID NO: 1887717
gccauuaacucauuaacgu

SEQ ID NO: 2491787 - RNA, 19 nt, Artificial Sequence
  Description of Artificial Sequence: Synthetic oligonucleotide
  Antisense strand to SEQ ID NO: 2491786
acguuaaugaguuaauggc

SEQ ID NO: 2491788 - RNA, 19 nt, Artificial Sequence
  Description of Artificial Sequence: Synthetic oligonucleotide
  Sense strand starting at position 2236 of SEQ ID NO: 1887717
ccauuaacucauuaacgug

SEQ ID NO: 2491789 - RNA, 19 nt, Artificial Sequence
  Description of Artificial Sequence: Synthetic oligonucleotide
  Antisense strand to SEQ ID NO: 2491788
cacguuaaugaguuaaugg

SEQ ID NO: 2491790 - RNA, 19 nt, Artificial Sequence
  Description of Artificial Sequence: Synthetic oligonucleotide
  Sense strand starting at position 2242 of SEQ ID NO: 1887717
acucauuaacgugauagug

SEQ ID NO: 2491791 - RNA, 19 nt, Artificial Sequence
  Description of Artificial Sequence: Synthetic oligonucleotide
  Antisense strand to SEQ ID NO: 2491790
cacuaucacguuaaugagu

SEQ ID NO: 2491792 - RNA, 19 nt, Artificial Sequence
  Description of Artificial Sequence: Synthetic oligonucleotide
  Sense strand starting at position 2251 of SEQ ID NO: 1887717
cgugauaguguagaacaca

SEQ ID NO: 2491793 - RNA, 19 nt, Artificial Sequence
  Description of Artificial Sequence: Synthetic oligonucleotide
  Antisense strand to SEQ ID NO: 2491792
uguguucuacacuaucacg

SEQ ID NO: 2491794 - RNA, 19 nt, Artificial Sequence
  Description of Artificial Sequence: Synthetic oligonucleotide
  Sense strand starting at position 2558 of SEQ ID NO: 1887717
ggcccaauaguguagaaca

SEQ ID NO: 2491795 - RNA, 19 nt, Artificial Sequence
  Description of Artificial Sequence: Synthetic oligonucleotide
  Antisense strand to SEQ ID NO: 2491794
uguucuacacuauugggcc

SEQ ID NO: 2491796 - RNA, 19 nt, Artificial Sequence
  Description of Artificial Sequence: Synthetic oligonucleotide
  Sense strand starting at position 3249 of SEQ ID NO: 1887717
gauguuguagcuuaacuau

SEQ ID NO: 2491797 - RNA, 19 nt, Artificial Sequence
  Description of Artificial Sequence: Synthetic oligonucleotide
  Antisense strand to SEQ ID NO: 2491796
auaguuaagcuacaacauc

SEQ ID NO: 2491798 - RNA, 19 nt, Artificial Sequence
  Description of Artificial Sequence: Synthetic oligonucleotide
  Sense strand starting at position 3378 of SEQ ID NO: 1887717
guugucucucaaugaccua

SEQ ID NO: 2491799 - RNA, 19 nt, Artificial Sequence
  Description of Artificial Sequence: Synthetic oligonucleotide
  Antisense strand to SEQ ID NO: 2491798
uaggucauugagagacaac

SEQ ID NO: 2491800 - RNA, 19 nt, Artificial Sequence
  Description of Artificial Sequence: Synthetic oligonucleotide
  Sense strand starting at position 3471 of SEQ ID NO: 1887717
ggguacagugaguaaucau

SEQ ID NO: 2491801 - RNA, 19 nt, Artificial Sequence
  Description of Artificial Sequence: Synthetic oligonucleotide
  Antisense strand to SEQ ID NO: 2491800
augauuacucacuguaccc

SEQ ID NO: 2491802 - RNA, 19 nt, Artificial Sequence
  Description of Artificial Sequence: Synthetic oligonucleotide
  Sense strand starting at position 3482 of SEQ ID NO: 1887717
guaaucauagcacaguaca

SEQ ID NO: 2491803 - RNA, 19 nt, Artificial Sequence
  Description of Artificial Sequence: Synthetic oligonucleotide
  Antisense strand to SEQ ID NO: 2491802
uguacugugcuaugauuac

SEQ ID NO: 2491804 - RNA, 19 nt, Artificial Sequence
  Description of Artificial Sequence: Synthetic oligonucleotide
  Sense strand starting at position 3576 of SEQ ID NO: 1887717
ccuggcagucauuauuauu

SEQ ID NO: 2491805 - RNA, 19 nt, Artificial Sequence
  Description of Artificial Sequence: Synthetic oligonucleotide
  Antisense strand to SEQ ID NO: 2491804
aauaauaaugacugccagg

SEQ ID NO: 2491806 - RNA, 19 nt, Artificial Sequence
  Description of Artificial Sequence: Synthetic oligonucleotide
  Sense strand starting at position 3643 of SEQ ID NO: 1887717
uaguacucaguuuaguuua

SEQ ID NO: 2491807 - RNA, 19 nt, Artificial Sequence
  Description of Artificial Sequence: Synthetic oligonucleotide
  Antisense strand to SEQ ID NO: 2491806
uaaacuaaacugaguacua

SEQ ID NO: 2491808 - RNA, 19 nt, Artificial Sequence
  Description of Artificial Sequence: Synthetic oligonucleotide
  Sense strand starting at position 3648 of SEQ ID NO: 1887717
cucaguuuaguuuauaaac

SEQ ID NO: 2491809 - RNA, 19 nt, Artificial Sequence
  Description of Artificial Sequence: Synthetic oligonucleotide
  Antisense strand to SEQ ID NO: 2491808
guuuauaaacuaaacugag

SEQ ID NO: 2491810 - RNA, 19 nt, Artificial Sequence
  Description of Artificial Sequence: Synthetic oligonucleotide
  Sense strand starting at position 46 of SEQ ID NO: 1887718
cagaacugucuugggcaca

SEQ ID NO: 2491811 - RNA, 19 nt, Artificial Sequence
  Description of Artificial Sequence: Synthetic oligonucleotide
  Antisense strand to SEQ ID NO: 2491810
ugugcccaagacaguucug

SEQ ID NO: 2491812 - RNA, 19 nt, Artificial Sequence
  Description of Artificial Sequence: Synthetic oligonucleotide
  Sense strand starting at position 49 of SEQ ID NO: 1887718
aacugucuugggcacagaa

SEQ ID NO: 2491813 - RNA, 19 nt, Artificial Sequence
  Description of Artificial Sequence: Synthetic oligonucleotide
  Antisense strand to SEQ ID NO: 2491812
uucugugcccaagacaguu

SEQ ID NO: 2491814 - RNA, 19 nt, Artificial Sequence
  Description of Artificial Sequence: Synthetic oligonucleotide
  Sense strand starting at position 538 of SEQ ID NO: 1887718
acagguaugcaugacaucu

SEQ ID NO: 2491815 - RNA, 19 nt, Artificial Sequence
  Description of Artificial Sequence: Synthetic oligonucleotide
  Antisense strand to SEQ ID NO: 2491814
agaugucaugcauaccugu

SEQ ID NO: 2491816 - RNA, 19 nt, Artificial Sequence
  Description of Artificial Sequence: Synthetic oligonucleotide
  Sense strand starting at position 1226 of SEQ ID NO: 1887718
uagguugaguuguguaacu

SEQ ID NO: 2491817 - RNA, 19 nt, Artificial Sequence
  Description of Artificial Sequence: Synthetic oligonucleotide
  Antisense strand to SEQ ID NO: 2491816
aguuacacaacucaaccua

SEQ ID NO: 2491818 - RNA, 19 nt, Artificial Sequence
  Description of Artificial Sequence: Synthetic oligonucleotide
  Sense strand starting at position 1276 of SEQ ID NO: 1887718
cccaaaguaccgugauugu

SEQ ID NO: 2491819 - RNA, 19 nt, Artificial Sequence
  Description of Artificial Sequence: Synthetic oligonucleotide
  Antisense strand to SEQ ID NO: 2491818
acaaucacgguacuuuggg

SEQ ID NO: 2491820 - RNA, 19 nt, Artificial Sequence
  Description of Artificial Sequence: Synthetic oligonucleotide
  Sense strand starting at position 1279 of SEQ ID NO: 1887718
aaaguaccgugauuguaag

SEQ ID NO: 2491821 - RNA, 19 nt, Artificial Sequence
  Description of Artificial Sequence: Synthetic oligonucleotide
  Antisense strand to SEQ ID NO: 2491820
cuuacaaucacgguacuuu

SEQ ID NO: 2491822 - RNA, 19 nt, Artificial Sequence
  Description of Artificial Sequence: Synthetic oligonucleotide
  Sense strand starting at position 1532 of SEQ ID NO: 1887718
uuccucuugggugaucuua

SEQ ID NO: 2491823 - RNA, 19 nt, Artificial Sequence
  Description of Artificial Sequence: Synthetic oligonucleotide
  Antisense strand to SEQ ID NO: 2491822
uaagaucacccaagaggaa

SEQ ID NO: 2491824 - RNA, 19 nt, Artificial Sequence
  Description of Artificial Sequence: Synthetic oligonucleotide
  Sense strand starting at position 1540 of SEQ ID NO: 1887718
gggugaucuuaugcacuug

SEQ ID NO: 2491825 - RNA, 19 nt, Artificial Sequence
  Description of Artificial Sequence: Synthetic oligonucleotide
  Antisense strand to SEQ ID NO: 2491824
caagugcauaagaucaccc

SEQ ID NO: 2491826 - RNA, 19 nt, Artificial Sequence
  Description of Artificial Sequence: Synthetic oligonucleotide
  Sense strand starting at position 1541 of SEQ ID NO: 1887718
ggugaucuuaugcacuuga

SEQ ID NO: 2491827 - RNA, 19 nt, Artificial Sequence
  Description of Artificial Sequence: Synthetic oligonucleotide
  Antisense strand to SEQ ID NO: 2491826
ucaagugcauaagaucacc

SEQ ID NO: 2491828 - RNA, 19 nt, Artificial Sequence
  Description of Artificial Sequence: Synthetic oligonucleotide
  Sense strand starting at position 2282 of SEQ ID NO: 1887718
gaggcugaccucugaaucu

SEQ ID NO: 2491829 - RNA, 19 nt, Artificial Sequence
  Description of Artificial Sequence: Synthetic oligonucleotide
  Antisense strand to SEQ ID NO: 2491828
agauucagaggucagccuc

SEQ ID NO: 2491830 - RNA, 19 nt, Artificial Sequence
  Description of Artificial Sequence: Synthetic oligonucleotide
  Sense strand starting at position 2443 of SEQ ID NO: 1887718
agcagauccaguuaagagu

SEQ ID NO: 2491831 - RNA, 19 nt, Artificial Sequence
  Description of Artificial Sequence: Synthetic oligonucleotide
  Antisense strand to SEQ ID NO: 2491830
acucuuaacuggaucugcu

SEQ ID NO: 2491832 - RNA, 19 nt, Artificial Sequence
  Description of Artificial Sequence: Synthetic oligonucleotide
  Sense strand starting at position 2452 of SEQ ID NO: 1887718
aguuaagagucagagacua

SEQ ID NO: 2491833 - RNA, 19 nt, Artificial Sequence
  Description of Artificial Sequence: Synthetic oligonucleotide
  Antisense strand to SEQ ID NO: 2491832
uagucucugacucuuaacu

SEQ ID NO: 2491834 - RNA, 19 nt, Artificial Sequence
  Description of Artificial Sequence: Synthetic oligonucleotide
  Sense strand starting at position 2460 of SEQ ID NO: 1887718
gucagagacuacccaucau

SEQ ID NO: 2491835 - RNA, 19 nt, Artificial Sequence
  Description of Artificial Sequence: Synthetic oligonucleotide
  Antisense strand to SEQ ID NO: 2491834
augauggguagucucugac

SEQ ID NO: 2491836 - RNA, 19 nt, Artificial Sequence
  Description of Artificial Sequence: Synthetic oligonucleotide
  Sense strand starting at position 2504 of SEQ ID NO: 1887718
aaaggaagaccugguucuu

SEQ ID NO: 2491837 - RNA, 19 nt, Artificial Sequence
  Description of Artificial Sequence: Synthetic oligonucleotide
  Antisense strand to SEQ ID NO: 2491836
aagaaccaggucuuccuuu

SEQ ID NO: 2491838 - RNA, 19 nt, Artificial Sequence
  Description of Artificial Sequence: Synthetic oligonucleotide
  Sense strand starting at position 2561 of SEQ ID NO: 1887718
cccugauucuguccugaau

SEQ ID NO: 2491839 - RNA, 19 nt, Artificial Sequence
  Description of Artificial Sequence: Synthetic oligonucleotide
  Antisense strand to SEQ ID NO: 2491838
auucaggacagaaucaggg

SEQ ID NO: 2491840 - RNA, 19 nt, Artificial Sequence
  Description of Artificial Sequence: Synthetic oligonucleotide
  Sense strand starting at position 2623 of SEQ ID NO: 1887718
aucagugcucuagaacuca

SEQ ID NO: 2491841 - RNA, 19 nt, Artificial Sequence
  Description of Artificial Sequence: Synthetic oligonucleotide
  Antisense strand to SEQ ID NO: 2491840
ugaguucuagagcacugau

SEQ ID NO: 2491842 - RNA, 19 nt, Artificial Sequence
  Description of Artificial Sequence: Synthetic oligonucleotide
  Sense strand starting at position 2651 of SEQ ID NO: 1887718
uuaguaagauugggaaaua

SEQ ID NO: 2491843 - RNA, 19 nt, Artificial Sequence
  Description of Artificial Sequence: Synthetic oligonucleotide
  Antisense strand to SEQ ID NO: 2491842
uauuucccaaucuuacuaa

SEQ ID NO: 2491844 - RNA, 19 nt, Artificial Sequence
  Description of Artificial Sequence: Synthetic oligonucleotide
  Sense strand starting at position 2652 of SEQ ID NO: 1887718
uaguaagauugggaaauaa

SEQ ID NO: 2491845 - RNA, 19 nt, Artificial Sequence
  Description of Artificial Sequence: Synthetic oligonucleotide
  Antisense strand to SEQ ID NO: 2491844
uuauuucccaaucuuacua

SEQ ID NO: 2491846 - RNA, 19 nt, Artificial Sequence
  Description of Artificial Sequence: Synthetic oligonucleotide
  Sense strand starting at position 2700 of SEQ ID NO: 1887718
agccuagaucugcgaucau

SEQ ID NO: 2491847 - RNA, 19 nt, Artificial Sequence
  Description of Artificial Sequence: Synthetic oligonucleotide
  Antisense strand to SEQ ID NO: 2491846
augaucgcagaucuaggcu

SEQ ID NO: 2491848 - RNA, 19 nt, Artificial Sequence
  Description of Artificial Sequence: Synthetic oligonucleotide
  Sense strand starting at position 2704 of SEQ ID NO: 1887718
uagaucugcgaucauaaug

SEQ ID NO: 2491849 - RNA, 19 nt, Artificial Sequence
  Description of Artificial Sequence: Synthetic oligonucleotide
  Antisense strand to SEQ ID NO: 2491848
cauuaugaucgcagaucua

SEQ ID NO: 2491850 - RNA, 19 nt, Artificial Sequence
  Description of Artificial Sequence: Synthetic oligonucleotide
  Sense strand starting at position 2709 of SEQ ID NO: 1887718
cugcgaucauaaugcaaua

SEQ ID NO: 2491851 - RNA, 19 nt, Artificial Sequence
  Description of Artificial Sequence: Synthetic oligonucleotide
  Antisense strand to SEQ ID NO: 2491850
uauugcauuaugaucgcag

SEQ ID NO: 2491852 - RNA, 19 nt, Artificial Sequence
  Description of Artificial Sequence: Synthetic oligonucleotide
  Sense strand starting at position 2725 of SEQ ID NO: 1887718
auaaauuguugcugggacu

SEQ ID NO: 2491853 - RNA, 19 nt, Artificial Sequence
  Description of Artificial Sequence: Synthetic oligonucleotide
  Antisense strand to SEQ ID NO: 2491852
agucccagcaacaauuuau

SEQ ID NO: 2491854 - RNA, 19 nt, Artificial Sequence
  Description of Artificial Sequence: Synthetic oligonucleotide
  Sense strand starting at position 2726 of SEQ ID NO: 1887718
uaaauuguugcugggacuu

SEQ ID NO: 2491855 - RNA, 19 nt, Artificial Sequence
  Description of Artificial Sequence: Synthetic oligonucleotide
  Antisense strand to SEQ ID NO: 2491854
aagucccagcaacaauuua

SEQ ID NO: 2491856 - RNA, 19 nt, Artificial Sequence
  Description of Artificial Sequence: Synthetic oligonucleotide
  Sense strand starting at position 2728 of SEQ ID NO: 1887718
aauuguugcugggacuuau

SEQ ID NO: 2491857 - RNA, 19 nt, Artificial Sequence
  Description of Artificial Sequence: Synthetic oligonucleotide
  Antisense strand to SEQ ID NO: 2491856
auaagucccagcaacaauu

SEQ ID NO: 2491858 - RNA, 19 nt, Artificial Sequence
  Description of Artificial Sequence: Synthetic oligonucleotide
  Sense strand starting at position 2732 of SEQ ID NO: 1887718
guugcugggacuuauucuu

SEQ ID NO: 2491859 - RNA, 19 nt, Artificial Sequence
  Description of Artificial Sequence: Synthetic oligonucleotide
  Antisense strand to SEQ ID NO: 2491858
aagaauaagucccagcaac

SEQ ID NO: 2491860 - RNA, 19 nt, Artificial Sequence
  Description of Artificial Sequence: Synthetic oligonucleotide
  Sense strand starting at position 2799 of SEQ ID NO: 1887718
ugggucucccucuaacuaa

SEQ ID NO: 2491861 - RNA, 19 nt, Artificial Sequence
  Description of Artificial Sequence: Synthetic oligonucleotide
  Antisense strand to SEQ ID NO: 2491860
uuaguuagagggagaccca

SEQ ID NO: 2491862 - RNA, 19 nt, Artificial Sequence
  Description of Artificial Sequence: Synthetic oligonucleotide
  Sense strand starting at position 2806 of SEQ ID NO: 1887718
cccucuaacuaaugggaca

SEQ ID NO: 2491863 - RNA, 19 nt, Artificial Sequence
  Description of Artificial Sequence: Synthetic oligonucleotide
  Antisense strand to SEQ ID NO: 2491862
ugucccauuaguuagaggg

SEQ ID NO: 2491864 - RNA, 19 nt, Artificial Sequence
  Description of Artificial Sequence: Synthetic oligonucleotide
  Sense strand starting at position 3106 of SEQ ID NO: 1887718
acccucgacuuagagaaua

SEQ ID NO: 2491865 - RNA, 19 nt, Artificial Sequence
  Description of Artificial Sequence: Synthetic oligonucleotide
  Antisense strand to SEQ ID NO: 2491864
uauucucuaagucgagggu

SEQ ID NO: 2491866 - RNA, 19 nt, Artificial Sequence
  Description of Artificial Sequence: Synthetic oligonucleotide
  Sense strand starting at position 3196 of SEQ ID NO: 1887718
ggacuucugccaggaaguc

SEQ ID NO: 2491867 - RNA, 19 nt, Artificial Sequence
  Description of Artificial Sequence: Synthetic oligonucleotide
  Antisense strand to SEQ ID NO: 2491866
gacuuccuggcagaagucc

SEQ ID NO: 2491868 - RNA, 19 nt, Artificial Sequence
  Description of Artificial Sequence: Synthetic oligonucleotide
  Sense strand starting at position 3503 of SEQ ID NO: 1887718
cagagauccucgggcuaac

SEQ ID NO: 2491869 - RNA, 19 nt, Artificial Sequence
  Description of Artificial Sequence: Synthetic oligonucleotide
  Antisense strand to SEQ ID NO: 2491868
guuagcccgaggaucucug

SEQ ID NO: 2491870 - RNA, 19 nt, Artificial Sequence
  Description of Artificial Sequence: Synthetic oligonucleotide
  Sense strand starting at position 3620 of SEQ ID NO: 1887718
ggaccucuaaacgguaauu

SEQ ID NO: 2491871 - RNA, 19 nt, Artificial Sequence
  Description of Artificial Sequence: Synthetic oligonucleotide
  Antisense strand to SEQ ID NO: 2491870
aauuaccguuuagaggucc

SEQ ID NO: 2491872 - RNA, 19 nt, Artificial Sequence
  Description of Artificial Sequence: Synthetic oligonucleotide
  Sense strand starting at position 3630 of SEQ ID NO: 1887718
acgguaauuacgggcgaca

SEQ ID NO: 2491873 - RNA, 19 nt, Artificial Sequence
  Description of Artificial Sequence: Synthetic oligonucleotide
  Antisense strand to SEQ ID NO: 2491872
ugucgcccguaauuaccgu

SEQ ID NO: 2491874 - RNA, 19 nt, Artificial Sequence
  Description of Artificial Sequence: Synthetic oligonucleotide
  Sense strand starting at position 3632 of SEQ ID NO: 1887718
gguaauuacgggcgacaac

SEQ ID NO: 2491875 - RNA, 19 nt, Artificial Sequence
  Description of Artificial Sequence: Synthetic oligonucleotide
  Antisense strand to SEQ ID NO: 2491874
guugucgcccguaauuacc

SEQ ID NO: 2491876 - RNA, 19 nt, Artificial Sequence
  Description of Artificial Sequence: Synthetic oligonucleotide
  Sense strand starting at position 3707 of SEQ ID NO: 1887718
ggcguuaccuccguccaga

SEQ ID NO: 2491877 - RNA, 19 nt, Artificial Sequence
  Description of Artificial Sequence: Synthetic oligonucleotide
  Antisense strand to SEQ ID NO: 2491876
ucuggacggagguaacgcc

SEQ ID NO: 2491878 - RNA, 19 nt, Artificial Sequence
  Description of Artificial Sequence: Synthetic oligonucleotide
  Sense strand starting at position 3708 of SEQ ID NO: 1887718
gcguuaccuccguccagaa

SEQ ID NO: 2491879 - RNA, 19 nt, Artificial Sequence
  Description of Artificial Sequence: Synthetic oligonucleotide
  Antisense strand to SEQ ID NO: 2491878
uucuggacggagguaacgc

SEQ ID NO: 2491880 - RNA, 19 nt, Artificial Sequence
  Description of Artificial Sequence: Synthetic oligonucleotide
  Sense strand starting at position 3955 of SEQ ID NO: 1887718
gccacuuugucauuggucu

SEQ ID NO: 2491881 - RNA, 19 nt, Artificial Sequence
  Description of Artificial Sequence: Synthetic oligonucleotide
  Antisense strand to SEQ ID NO: 2491880
agaccaaugacaaaguggc

SEQ ID NO: 2491882 - RNA, 19 nt, Artificial Sequence
  Description of Artificial Sequence: Synthetic oligonucleotide
  Sense strand starting at position 3956 of SEQ ID NO: 1887718
ccacuuugucauuggucua

SEQ ID NO: 2491883 - RNA, 19 nt, Artificial Sequence
  Description of Artificial Sequence: Synthetic oligonucleotide
  Antisense strand to SEQ ID NO: 2491882
uagaccaaugacaaagugg

SEQ ID NO: 2491884 - RNA, 19 nt, Artificial Sequence
  Description of Artificial Sequence: Synthetic oligonucleotide
  Sense strand starting at position 3963 of SEQ ID NO: 1887718
gucauuggucuaugcccau

SEQ ID NO: 2491885 - RNA, 19 nt, Artificial Sequence
  Description of Artificial Sequence: Synthetic oligonucleotide
  Antisense strand to SEQ ID NO: 2491884
augggcauagaccaaugac

SEQ ID NO: 2491886 - RNA, 19 nt, Artificial Sequence
  Description of Artificial Sequence: Synthetic oligonucleotide
  Sense strand starting at position 518 of SEQ ID NO: 1887719
ugccgaaguccacaaucuu

SEQ ID NO: 2491887 - RNA, 19 nt, Artificial Sequence
  Description of Artificial Sequence: Synthetic oligonucleotide
  Antisense strand to SEQ ID NO: 2491886
aagauuguggacuucggca

SEQ ID NO: 2491888 - RNA, 19 nt, Artificial Sequence
  Description of Artificial Sequence: Synthetic oligonucleotide
  Sense strand starting at position 578 of SEQ ID NO: 1887719
gcuugaggucgcagugaau

SEQ ID NO: 2491889 - RNA, 19 nt, Artificial Sequence
  Description of Artificial Sequence: Synthetic oligonucleotide
  Antisense strand to SEQ ID NO: 2491888
auucacugcgaccucaagc

SEQ ID NO: 2491890 - RNA, 19 nt, Artificial Sequence
  Description of Artificial Sequence: Synthetic oligonucleotide
  Sense strand starting at position 581 of SEQ ID NO: 1887719
ugaggucgcagugaaugau

SEQ ID NO: 2491891 - RNA, 19 nt, Artificial Sequence
  Description of Artificial Sequence: Synthetic oligonucleotide
  Antisense strand to SEQ ID NO: 2491890
aucauucacugcgaccuca

SEQ ID NO: 2491892 - RNA, 19 nt, Artificial Sequence
  Description of Artificial Sequence: Synthetic oligonucleotide
  Sense strand starting at position 591 of SEQ ID NO: 1887719
gugaaugaugcugagcuca

SEQ ID NO: 2491893 - RNA, 19 nt, Artificial Sequence
  Description of Artificial Sequence: Synthetic oligonucleotide
  Antisense strand to SEQ ID NO: 2491892
ugagcucagcaucauucac

SEQ ID NO: 2491894 - RNA, 19 nt, Artificial Sequence
  Description of Artificial Sequence: Synthetic oligonucleotide
  Sense strand starting at position 851 of SEQ ID NO: 1887719
auacaacgcucuuugauua

SEQ ID NO: 2491895 - RNA, 19 nt, Artificial Sequence
  Description of Artificial Sequence: Synthetic oligonucleotide
  Antisense strand to SEQ ID NO: 2491894
uaaucaaagagcguuguau

SEQ ID NO: 2491896 - RNA, 19 nt, Artificial Sequence
  Description of Artificial Sequence: Synthetic oligonucleotide
  Sense strand starting at position 948 of SEQ ID NO: 1887719
aguuaaugcucuuuccaag

SEQ ID NO: 2491897 - RNA, 19 nt, Artificial Sequence
  Description of Artificial Sequence: Synthetic oligonucleotide
  Antisense strand to SEQ ID NO: 2491896
cuuggaaagagcauuaacu

SEQ ID NO: 2491898 - RNA, 19 nt, Artificial Sequence
  Description of Artificial Sequence: Synthetic oligonucleotide
  Sense strand starting at position 959 of SEQ ID NO: 1887719
uuuccaagucucugucaaa

SEQ ID NO: 2491899 - RNA, 19 nt, Artificial Sequence
  Description of Artificial Sequence: Synthetic oligonucleotide
  Antisense strand to SEQ ID NO: 2491898
uuugacagagacuuggaaa

SEQ ID NO: 2491900 - RNA, 19 nt, Artificial Sequence
  Description of Artificial Sequence: Synthetic oligonucleotide
  Sense strand starting at position 960 of SEQ ID NO: 1887719
uuccaagucucugucaaac

SEQ ID NO: 2491901 - RNA, 19 nt, Artificial Sequence
  Description of Artificial Sequence: Synthetic oligonucleotide
  Antisense strand to SEQ ID NO: 2491900
guuugacagagacuuggaa

SEQ ID NO: 2491902 - RNA, 19 nt, Artificial Sequence
  Description of Artificial Sequence: Synthetic oligonucleotide
  Sense strand starting at position 1110 of SEQ ID NO: 1887719
uuccguuuacuuuaaggau

SEQ ID NO: 2491903 - RNA, 19 nt, Artificial Sequence
  Description of Artificial Sequence: Synthetic oligonucleotide
  Antisense strand to SEQ ID NO: 2491902
auccuuaaaguaaacggaa

SEQ ID NO: 2491904 - RNA, 19 nt, Artificial Sequence
  Description of Artificial Sequence: Synthetic oligonucleotide
  Sense strand starting at position 1164 of SEQ ID NO: 1887719
ccacuugcuguuuaugauu

SEQ ID NO: 2491905 - RNA, 19 nt, Artificial Sequence
  Description of Artificial Sequence: Synthetic oligonucleotide
  Antisense strand to SEQ ID NO: 2491904
aaucauaaacagcaagugg

SEQ ID NO: 2491906 - RNA, 19 nt, Artificial Sequence
  Description of Artificial Sequence: Synthetic oligonucleotide
  Sense strand starting at position 1189 of SEQ ID NO: 1887719
ugauguuuauguccaugag

SEQ ID NO: 2491907 - RNA, 19 nt, Artificial Sequence
  Description of Artificial Sequence: Synthetic oligonucleotide
  Antisense strand to SEQ ID NO: 2491906
cucauggacauaaacauca

SEQ ID NO: 2491908 - RNA, 19 nt, Artificial Sequence
  Description of Artificial Sequence: Synthetic oligonucleotide
  Sense strand starting at position 1331 of SEQ ID NO: 1887719
acuugaaugccugaguuuc

SEQ ID NO: 2491909 - RNA, 19 nt, Artificial Sequence
  Description of Artificial Sequence: Synthetic oligonucleotide
  Antisense strand to SEQ ID NO: 2491908
gaaacucaggcauucaagu

SEQ ID NO: 2491910 - RNA, 19 nt, Artificial Sequence
  Description of Artificial Sequence: Synthetic oligonucleotide
  Sense strand starting at position 1640 of SEQ ID NO: 1887719
uggucucgaucucuugaua

SEQ ID NO: 2491911 - RNA, 19 nt, Artificial Sequence
  Description of Artificial Sequence: Synthetic oligonucleotide
  Antisense strand to SEQ ID NO: 2491910
uaucaagagaucgagacca

SEQ ID NO: 2491912 - RNA, 19 nt, Artificial Sequence
  Description of Artificial Sequence: Synthetic oligonucleotide
  Sense strand starting at position 1643 of SEQ ID NO: 1887719
ucucgaucucuugauauca

SEQ ID NO: 2491913 - RNA, 19 nt, Artificial Sequence
  Description of Artificial Sequence: Synthetic oligonucleotide
  Antisense strand to SEQ ID NO: 2491912
ugauaucaagagaucgaga

SEQ ID NO: 2491914 - RNA, 19 nt, Artificial Sequence
  Description of Artificial Sequence: Synthetic oligonucleotide
  Sense strand starting at position 1923 of SEQ ID NO: 1887719
gcaggagaaucacugaugu

SEQ ID NO: 2491915 - RNA, 19 nt, Artificial Sequence
  Description of Artificial Sequence: Synthetic oligonucleotide
  Antisense strand to SEQ ID NO: 2491914
acaucagugauucuccugc

SEQ ID NO: 2491916 - RNA, 19 nt, Artificial Sequence
  Description of Artificial Sequence: Synthetic oligonucleotide
  Sense strand starting at position 1978 of SEQ ID NO: 1887719
cagccuccuccugagagua

SEQ ID NO: 2491917 - RNA, 19 nt, Artificial Sequence
  Description of Artificial Sequence: Synthetic oligonucleotide
  Antisense strand to SEQ ID NO: 2491916
uacucucaggaggaggcug

SEQ ID NO: 2491918 - RNA, 19 nt, Artificial Sequence
  Description of Artificial Sequence: Synthetic oligonucleotide
  Sense strand starting at position 2069 of SEQ ID NO: 1887719
aggccucaccuauauagua

SEQ ID NO: 2491919 - RNA, 19 nt, Artificial Sequence
  Description of Artificial Sequence: Synthetic oligonucleotide
  Antisense strand to SEQ ID NO: 2491918
uacuauauaggugaggccu

SEQ ID NO: 2491920 - RNA, 19 nt, Artificial Sequence
  Description of Artificial Sequence: Synthetic oligonucleotide
  Sense strand starting at position 2165 of SEQ ID NO: 1887719
uguucuugaugaucuugau

SEQ ID NO: 2491921 - RNA, 19 nt, Artificial Sequence
  Description of Artificial Sequence: Synthetic oligonucleotide
  Antisense strand to SEQ ID NO: 2491920
aucaagaucaucaagaaca

SEQ ID NO: 2491922 - RNA, 19 nt, Artificial Sequence
  Description of Artificial Sequence: Synthetic oligonucleotide
  Sense strand starting at position 2326 of SEQ ID NO: 1887719
gcauacuucgcagcugagu

SEQ ID NO: 2491923 - RNA, 19 nt, Artificial Sequence
  Description of Artificial Sequence: Synthetic oligonucleotide
  Antisense strand to SEQ ID NO: 2491922
acucagcugcgaaguaugc

SEQ ID NO: 2491924 - RNA, 19 nt, Artificial Sequence
  Description of Artificial Sequence: Synthetic oligonucleotide
  Sense strand starting at position 2367 of SEQ ID NO: 1887719
guguaaacacuggauguga

SEQ ID NO: 2491925 - RNA, 19 nt, Artificial Sequence
  Description of Artificial Sequence: Synthetic oligonucleotide
  Antisense strand to SEQ ID NO: 2491924
ucacauccaguguuuacac

SEQ ID NO: 2491926 - RNA, 19 nt, Artificial Sequence
  Description of Artificial Sequence: Synthetic oligonucleotide
  Sense strand starting at position 2369 of SEQ ID NO: 1887719
guaaacacuggaugugaaa

SEQ ID NO: 2491927 - RNA, 19 nt, Artificial Sequence
  Description of Artificial Sequence: Synthetic oligonucleotide
  Antisense strand to SEQ ID NO: 2491926
uuucacauccaguguuuac

SEQ ID NO: 2491928 - RNA, 19 nt, Artificial Sequence
  Description of Artificial Sequence: Synthetic oligonucleotide
  Sense strand starting at position 3075 of SEQ ID NO: 1887719
uugguugcugucuguauuu

SEQ ID NO: 2491929 - RNA, 19 nt, Artificial Sequence
  Description of Artificial Sequence: Synthetic oligonucleotide
  Antisense strand to SEQ ID NO: 2491928
aaauacagacagcaaccaa

SEQ ID NO: 2491930 - RNA, 19 nt, Artificial Sequence
  Description of Artificial Sequence: Synthetic oligonucleotide
  Sense strand starting at position 3094 of SEQ ID NO: 1887719
guuccaccugucuaggaaa

SEQ ID NO: 2491931 - RNA, 19 nt, Artificial Sequence
  Description of Artificial Sequence: Synthetic oligonucleotide
  Antisense strand to SEQ ID NO: 2491930
uuuccuagacagguggaac

SEQ ID NO: 2491932 - RNA, 19 nt, Artificial Sequence
  Description of Artificial Sequence: Synthetic oligonucleotide
  Sense strand starting at position 3096 of SEQ ID NO: 1887719
uccaccugucuaggaaaga

SEQ ID NO: 2491933 - RNA, 19 nt, Artificial Sequence
  Description of Artificial Sequence: Synthetic oligonucleotide
  Antisense strand to SEQ ID NO: 2491932
ucuuuccuagacaggugga

SEQ ID NO: 2491934 - RNA, 19 nt, Artificial Sequence
  Description of Artificial Sequence: Synthetic oligonucleotide
  Sense strand starting at position 3128 of SEQ ID NO: 1887719
cugagacuuucucuuguuc

SEQ ID NO: 2491935 - RNA, 19 nt, Artificial Sequence
  Description of Artificial Sequence: Synthetic oligonucleotide
  Antisense strand to SEQ ID NO: 2491934
gaacaagagaaagucucag

SEQ ID NO: 2491936 - RNA, 19 nt, Artificial Sequence
  Description of Artificial Sequence: Synthetic oligonucleotide
  Sense strand starting at position 3194 of SEQ ID NO: 1887719
cucuuagagaucuguggug

SEQ ID NO: 2491937 - RNA, 19 nt, Artificial Sequence
  Description of Artificial Sequence: Synthetic oligonucleotide
  Antisense strand to SEQ ID NO: 2491936
caccacagaucucuaagag

SEQ ID NO: 2491938 - RNA, 19 nt, Artificial Sequence
  Description of Artificial Sequence: Synthetic oligonucleotide
  Sense strand starting at position 3201 of SEQ ID NO: 1887719
agaucuguggugugaauga

SEQ ID NO: 2491939 - RNA, 19 nt, Artificial Sequence
  Description of Artificial Sequence: Synthetic oligonucleotide
  Antisense strand to SEQ ID NO: 2491938
ucauucacaccacagaucu

SEQ ID NO: 2491940 - RNA, 19 nt, Artificial Sequence
  Description of Artificial Sequence: Synthetic oligonucleotide
  Sense strand starting at position 3206 of SEQ ID NO: 1887719
uguggugugaaugagugaa

SEQ ID NO: 2491941 - RNA, 19 nt, Artificial Sequence
  Description of Artificial Sequence: Synthetic oligonucleotide
  Antisense strand to SEQ ID NO: 2491940
uucacucauucacaccaca

SEQ ID NO: 2491942 - RNA, 19 nt, Artificial Sequence
  Description of Artificial Sequence: Synthetic oligonucleotide
  Sense strand starting at position 3210 of SEQ ID NO: 1887719
gugugaaugagugaacucu

SEQ ID NO: 2491943 - RNA, 19 nt, Artificial Sequence
  Description of Artificial Sequence: Synthetic oligonucleotide
  Antisense strand to SEQ ID NO: 2491942
agaguucacucauucacac

SEQ ID NO: 2491944 - RNA, 19 nt, Artificial Sequence
  Description of Artificial Sequence: Synthetic oligonucleotide
  Sense strand starting at position 3216 of SEQ ID NO: 1887719
augagugaacucugaccuu

SEQ ID NO: 2491945 - RNA, 19 nt, Artificial Sequence
  Description of Artificial Sequence: Synthetic oligonucleotide
  Antisense strand to SEQ ID NO: 2491944
aaggucagaguucacucau

SEQ ID NO: 2491946 - RNA, 19 nt, Artificial Sequence
  Description of Artificial Sequence: Synthetic oligonucleotide
  Sense strand starting at position 3335 of SEQ ID NO: 1887719
uuggguacccucugaagua

SEQ ID NO: 2491947 - RNA, 19 nt, Artificial Sequence
  Description of Artificial Sequence: Synthetic oligonucleotide
  Antisense strand to SEQ ID NO: 2491946
uacuucagaggguacccaa

SEQ ID NO: 2491948 - RNA, 19 nt, Artificial Sequence
  Description of Artificial Sequence: Synthetic oligonucleotide
  Sense strand starting at position 3628 of SEQ ID NO: 1887719
guagcauuuauuggguauu

SEQ ID NO: 2491949 - RNA, 19 nt, Artificial Sequence
  Description of Artificial Sequence: Synthetic oligonucleotide
  Antisense strand to SEQ ID NO: 2491948
aauacccaauaaaugcuac

SEQ ID NO: 2491950 - RNA, 19 nt, Artificial Sequence
  Description of Artificial Sequence: Synthetic oligonucleotide
  Sense strand starting at position 3718 of SEQ ID NO: 1887719
cugugaaguagguaucauu

SEQ ID NO: 2491951 - RNA, 19 nt, Artificial Sequence
  Description of Artificial Sequence: Synthetic oligonucleotide
  Antisense strand to SEQ ID NO: 2491950
aaugauaccuacuucacag

SEQ ID NO: 2491952 - RNA, 19 nt, Artificial Sequence
  Description of Artificial Sequence: Synthetic oligonucleotide
  Sense strand starting at position 3757 of SEQ ID NO: 1887719
ugaguugaguucuccaacu

SEQ ID NO: 2491953 - RNA, 19 nt, Artificial Sequence
  Description of Artificial Sequence: Synthetic oligonucleotide
  Antisense strand to SEQ ID NO: 2491952
aguuggagaacucaacuca

SEQ ID NO: 2491954 - RNA, 19 nt, Artificial Sequence
  Description of Artificial Sequence: Synthetic oligonucleotide
  Sense strand starting at position 3759 of SEQ ID NO: 1887719
aguugaguucuccaacuca

SEQ ID NO: 2491955 - RNA, 19 nt, Artificial Sequence
  Description of Artificial Sequence: Synthetic oligonucleotide
  Antisense strand to SEQ ID NO: 2491954
ugaguuggagaacucaacu

SEQ ID NO: 2491956 - RNA, 19 nt, Artificial Sequence
  Description of Artificial Sequence: Synthetic oligonucleotide
  Sense strand starting at position 3782 of SEQ ID NO: 1887719
uggagaaccuaaggaauuu

SEQ ID NO: 2491957 - RNA, 19 nt, Artificial Sequence
  Description of Artificial Sequence: Synthetic oligonucleotide
  Antisense strand to SEQ ID NO: 2491956
aaauuccuuagguucucca

SEQ ID NO: 2491958 - RNA, 19 nt, Artificial Sequence
  Description of Artificial Sequence: Synthetic oligonucleotide
  Sense strand starting at position 3884 of SEQ ID NO: 1887719
gacccauuaugugcccaga

SEQ ID NO: 2491959 - RNA, 19 nt, Artificial Sequence
  Description of Artificial Sequence: Synthetic oligonucleotide
  Antisense strand to SEQ ID NO: 2491958
ucugggcacauaauggguc

SEQ ID NO: 2491960 - RNA, 19 nt, Artificial Sequence
  Description of Artificial Sequence: Synthetic oligonucleotide
  Sense strand starting at position 3886 of SEQ ID NO: 1887719
cccauuaugugcccagaag

SEQ ID NO: 2491961 - RNA, 19 nt, Artificial Sequence
  Description of Artificial Sequence: Synthetic oligonucleotide
  Antisense strand to SEQ ID NO: 2491960
cuucugggcacauaauggg

SEQ ID NO: 2491962 - RNA, 19 nt, Artificial Sequence
  Description of Artificial Sequence: Synthetic oligonucleotide
  Sense strand starting at position 3887 of SEQ ID NO: 1887719
ccauuaugugcccagaaga

SEQ ID NO: 2491963 - RNA, 19 nt, Artificial Sequence
  Description of Artificial Sequence: Synthetic oligonucleotide
  Antisense strand to SEQ ID NO: 2491962
ucuucugggcacauaaugg

SEQ ID NO: 2491964 - RNA, 19 nt, Artificial Sequence
  Description of Artificial Sequence: Synthetic oligonucleotide
  Sense strand starting at position 3901 of SEQ ID NO: 1887719
gaagaaugucuugggcaac

SEQ ID NO: 2491965 - RNA, 19 nt, Artificial Sequence
  Description of Artificial Sequence: Synthetic oligonucleotide
  Antisense strand to SEQ ID NO: 2491964
guugcccaagacauucuuc

SEQ ID NO: 2491966 - RNA, 19 nt, Artificial Sequence
  Description of Artificial Sequence: Synthetic oligonucleotide
  Sense strand starting at position 88 of SEQ ID NO: 1887720
cggauuucguuccuguaga

SEQ ID NO: 2491967 - RNA, 19 nt, Artificial Sequence
  Description of Artificial Sequence: Synthetic oligonucleotide
  Antisense strand to SEQ ID NO: 2491966
ucuacaggaacgaaauccg

SEQ ID NO: 2491968 - RNA, 19 nt, Artificial Sequence
  Description of Artificial Sequence: Synthetic oligonucleotide
  Sense strand starting at position 89 of SEQ ID NO: 1887720
ggauuucguuccuguagaa

SEQ ID NO: 2491969 - RNA, 19 nt, Artificial Sequence
  Description of Artificial Sequence: Synthetic oligonucleotide
  Antisense strand to SEQ ID NO: 2491968
uucuacaggaacgaaaucc

SEQ ID NO: 2491970 - RNA, 19 nt, Artificial Sequence
  Description of Artificial Sequence: Synthetic oligonucleotide
  Sense strand starting at position 107 of SEQ ID NO: 1887720
agaugaggcuucuccgcau

SEQ ID NO: 2491971 - RNA, 19 nt, Artificial Sequence
  Description of Artificial Sequence: Synthetic oligonucleotide
  Antisense strand to SEQ ID NO: 2491970
augcggagaagccucaucu

SEQ ID NO: 2491972 - RNA, 19 nt, Artificial Sequence
  Description of Artificial Sequence: Synthetic oligonucleotide
  Sense strand starting at position 110 of SEQ ID NO: 1887720
ugaggcuucuccgcaugaa

SEQ ID NO: 2491973 - RNA, 19 nt, Artificial Sequence
  Description of Artificial Sequence: Synthetic oligonucleotide
  Antisense strand to SEQ ID NO: 2491972
uucaugcggagaagccuca

SEQ ID NO: 2491974 - RNA, 19 nt, Artificial Sequence
  Description of Artificial Sequence: Synthetic oligonucleotide
  Sense strand starting at position 111 of SEQ ID NO: 1887720
gaggcuucuccgcaugaac

SEQ ID NO: 2491975 - RNA, 19 nt, Artificial Sequence
  Description of Artificial Sequence: Synthetic oligonucleotide
  Antisense strand to SEQ ID NO: 2491974
guucaugcggagaagccuc

SEQ ID NO: 2491976 - RNA, 19 nt, Artificial Sequence
  Description of Artificial Sequence: Synthetic oligonucleotide
  Sense strand starting at position 358 of SEQ ID NO: 1887720
gcagcuuccucuugccauu

SEQ ID NO: 2491977 - RNA, 19 nt, Artificial Sequence
  Description of Artificial Sequence: Synthetic oligonucleotide
  Antisense strand to SEQ ID NO: 2491976
aauggcaagaggaagcugc

SEQ ID NO: 2491978 - RNA, 19 nt, Artificial Sequence
  Description of Artificial Sequence: Synthetic oligonucleotide
  Sense strand starting at position 440 of SEQ ID NO: 1887720
ccaugaguauggcccugua

SEQ ID NO: 2491979 - RNA, 19 nt, Artificial Sequence
  Description of Artificial Sequence: Synthetic oligonucleotide
  Antisense strand to SEQ ID NO: 2491978
uacagggccauacucaugg

SEQ ID NO: 2491980 - RNA, 19 nt, Artificial Sequence
  Description of Artificial Sequence: Synthetic oligonucleotide
  Sense strand starting at position 443 of SEQ ID NO: 1887720
ugaguauggcccuguauau

SEQ ID NO: 2491981 - RNA, 19 nt, Artificial Sequence
  Description of Artificial Sequence: Synthetic oligonucleotide
  Antisense strand to SEQ ID NO: 2491980
auauacagggccauacuca

SEQ ID NO: 2491982 - RNA, 19 nt, Artificial Sequence
  Description of Artificial Sequence: Synthetic oligonucleotide
  Sense strand starting at position 461 of SEQ ID NO: 1887720
uaaacagggucuuugcaua

SEQ ID NO: 2491983 - RNA, 19 nt, Artificial Sequence
  Description of Artificial Sequence: Synthetic oligonucleotide
  Antisense strand to SEQ ID NO: 2491982
uaugcaaagacccuguuua

SEQ ID NO: 2491984 - RNA, 19 nt, Artificial Sequence
  Description of Artificial Sequence: Synthetic oligonucleotide
  Sense strand starting at position 466 of SEQ ID NO: 1887720
agggucuuugcauauaaac

SEQ ID NO: 2491985 - RNA, 19 nt, Artificial Sequence
  Description of Artificial Sequence: Synthetic oligonucleotide
  Antisense strand to SEQ ID NO: 2491984
guuuauaugcaaagacccu

SEQ ID NO: 2491986 - RNA, 19 nt, Artificial Sequence
  Description of Artificial Sequence: Synthetic oligonucleotide
  Sense strand starting at position 1325 of SEQ ID NO: 1887720
uguagagaauguuucugau

SEQ ID NO: 2491987 - RNA, 19 nt, Artificial Sequence
  Description of Artificial Sequence: Synthetic oligonucleotide
  Antisense strand to SEQ ID NO: 2491986
aucagaaacauucucuaca

SEQ ID NO: 2491988 - RNA, 19 nt, Artificial Sequence
  Description of Artificial Sequence: Synthetic oligonucleotide
  Sense strand starting at position 1327 of SEQ ID NO: 1887720
uagagaauguuucugauau

SEQ ID NO: 2491989 - RNA, 19 nt, Artificial Sequence
  Description of Artificial Sequence: Synthetic oligonucleotide
  Antisense strand to SEQ ID NO: 2491988
auaucagaaacauucucua

SEQ ID NO: 2491990 - RNA, 19 nt, Artificial Sequence
  Description of Artificial Sequence: Synthetic oligonucleotide
  Sense strand starting at position 1328 of SEQ ID NO: 1887720
agagaauguuucugauauu

SEQ ID NO: 2491991 - RNA, 19 nt, Artificial Sequence
  Description of Artificial Sequence: Synthetic oligonucleotide
  Antisense strand to SEQ ID NO: 2491990
aauaucagaaacauucucu

SEQ ID NO: 2491992 - RNA, 19 nt, Artificial Sequence
  Description of Artificial Sequence: Synthetic oligonucleotide
  Sense strand starting at position 1329 of SEQ ID NO: 1887720
gagaauguuucugauauuu

SEQ ID NO: 2491993 - RNA, 19 nt, Artificial Sequence
  Description of Artificial Sequence: Synthetic oligonucleotide
  Antisense strand to SEQ ID NO: 2491992
aaauaucagaaacauucuc

SEQ ID NO: 2491994 - RNA, 19 nt, Artificial Sequence
  Description of Artificial Sequence: Synthetic oligonucleotide
  Sense strand starting at position 1494 of SEQ ID NO: 1887720
gccauauaacaaugcuaga

SEQ ID NO: 2491995 - RNA, 19 nt, Artificial Sequence
  Description of Artificial Sequence: Synthetic oligonucleotide
  Antisense strand to SEQ ID NO: 2491994
ucuagcauuguuauauggc

SEQ ID NO: 2491996 - RNA, 19 nt, Artificial Sequence
  Description of Artificial Sequence: Synthetic oligonucleotide
  Sense strand starting at position 1697 of SEQ ID NO: 1887720
aaugcacucuuguguuuga

SEQ ID NO: 2491997 - RNA, 19 nt, Artificial Sequence
  Description of Artificial Sequence: Synthetic oligonucleotide
  Antisense strand to SEQ ID NO: 2491996
ucaaacacaagagugcauu

SEQ ID NO: 2491998 - RNA, 19 nt, Artificial Sequence
  Description of Artificial Sequence: Synthetic oligonucleotide
  Sense strand starting at position 1700 of SEQ ID NO: 1887720
gcacucuuguguuugagga

SEQ ID NO: 2491999 - RNA, 19 nt, Artificial Sequence
  Description of Artificial Sequence: Synthetic oligonucleotide
  Antisense strand to SEQ ID NO: 2491998
uccucaaacacaagagugc

SEQ ID NO: 2492000 - RNA, 19 nt, Artificial Sequence
  Description of Artificial Sequence: Synthetic oligonucleotide
  Sense strand starting at position 1701 of SEQ ID NO: 1887720
cacucuuguguuugaggag

SEQ ID NO: 2492001 - RNA, 19 nt, Artificial Sequence
  Description of Artificial Sequence: Synthetic oligonucleotide
  Antisense strand to SEQ ID NO: 2492000
cuccucaaacacaagagug

SEQ ID NO: 2492002 - RNA, 19 nt, Artificial Sequence
  Description of Artificial Sequence: Synthetic oligonucleotide
  Sense strand starting at position 1704 of SEQ ID NO: 1887720
ucuuguguuugaggagggu

SEQ ID NO: 2492003 - RNA, 19 nt, Artificial Sequence
  Description of Artificial Sequence: Synthetic oligonucleotide
  Antisense strand to SEQ ID NO: 2492002
acccuccucaaacacaaga

SEQ ID NO: 2492004 - RNA, 19 nt, Artificial Sequence
  Description of Artificial Sequence: Synthetic oligonucleotide
  Sense strand starting at position 1827 of SEQ ID NO: 1887720
cccacucacugauggagaa

SEQ ID NO: 2492005 - RNA, 19 nt, Artificial Sequence
  Description of Artificial Sequence: Synthetic oligonucleotide
  Antisense strand to SEQ ID NO: 2492004
uucuccaucagugaguggg

SEQ ID NO: 2492006 - RNA, 19 nt, Artificial Sequence
  Description of Artificial Sequence: Synthetic oligonucleotide
  Sense strand starting at position 1999 of SEQ ID NO: 1887720
cggccucgucuguccgaaa

SEQ ID NO: 2492007 - RNA, 19 nt, Artificial Sequence
  Description of Artificial Sequence: Synthetic oligonucleotide
  Antisense strand to SEQ ID NO: 2492006
uuucggacagacgaggccg

SEQ ID NO: 2492008 - RNA, 19 nt, Artificial Sequence
  Description of Artificial Sequence: Synthetic oligonucleotide
  Sense strand starting at position 2002 of SEQ ID NO: 1887720
ccucgucuguccgaaagua

SEQ ID NO: 2492009 - RNA, 19 nt, Artificial Sequence
  Description of Artificial Sequence: Synthetic oligonucleotide
  Antisense strand to SEQ ID NO: 2492008
uacuuucggacagacgagg

SEQ ID NO: 2492010 - RNA, 19 nt, Artificial Sequence
  Description of Artificial Sequence: Synthetic oligonucleotide
  Sense strand starting at position 2539 of SEQ ID NO: 1887720
gacggaccguuguuacaua

SEQ ID NO: 2492011 - RNA, 19 nt, Artificial Sequence
  Description of Artificial Sequence: Synthetic oligonucleotide
  Antisense strand to SEQ ID NO: 2492010
uauguaacaacgguccguc

SEQ ID NO: 2492012 - RNA, 19 nt, Artificial Sequence
  Description of Artificial Sequence: Synthetic oligonucleotide
  Sense strand starting at position 2547 of SEQ ID NO: 1887720
guuguuacauaaccauuaa

SEQ ID NO: 2492013 - RNA, 19 nt, Artificial Sequence
  Description of Artificial Sequence: Synthetic oligonucleotide
  Antisense strand to SEQ ID NO: 2492012
uuaaugguuauguaacaac

SEQ ID NO: 2492014 - RNA, 19 nt, Artificial Sequence
  Description of Artificial Sequence: Synthetic oligonucleotide
  Sense strand starting at position 2725 of SEQ ID NO: 1887720
gaccgaggguucguugaga

SEQ ID NO: 2492015 - RNA, 19 nt, Artificial Sequence
  Description of Artificial Sequence: Synthetic oligonucleotide
  Antisense strand to SEQ ID NO: 2492014
ucucaacgaacccucgguc

SEQ ID NO: 2492016 - RNA, 19 nt, Artificial Sequence
  Description of Artificial Sequence: Synthetic oligonucleotide
  Sense strand starting at position 2729 of SEQ ID NO: 1887720
gaggguucguugagagcgu

SEQ ID NO: 2492017 - RNA, 19 nt, Artificial Sequence
  Description of Artificial Sequence: Synthetic oligonucleotide
  Antisense strand to SEQ ID NO: 2492016
acgcucucaacgaacccuc

SEQ ID NO: 2492018 - RNA, 19 nt, Artificial Sequence
  Description of Artificial Sequence: Synthetic oligonucleotide
  Sense strand starting at position 3349 of SEQ ID NO: 1887720
gccaggaguggugguugua

SEQ ID NO: 2492019 - RNA, 19 nt, Artificial Sequence
  Description of Artificial Sequence: Synthetic oligonucleotide
  Antisense strand to SEQ ID NO: 2492018
uacaaccaccacuccuggc

SEQ ID NO: 2492020 - RNA, 19 nt, Artificial Sequence
  Description of Artificial Sequence: Synthetic oligonucleotide
  Sense strand starting at position 3604 of SEQ ID NO: 1887720
uugugauugugccguugca

SEQ ID NO: 2492021 - RNA, 19 nt, Artificial Sequence
  Description of Artificial Sequence: Synthetic oligonucleotide
  Antisense strand to SEQ ID NO: 2492020
ugcaacggcacaaucacaa

SEQ ID NO: 2492022 - RNA, 19 nt, Artificial Sequence
  Description of Artificial Sequence: Synthetic oligonucleotide
  Sense strand starting at position 3642 of SEQ ID NO: 1887720
gcaagacccuguuugacaa

SEQ ID NO: 2492023 - RNA, 19 nt, Artificial Sequence
  Description of Artificial Sequence: Synthetic oligonucleotide
  Antisense strand to SEQ ID NO: 2492022
uugucaaacagggucuugc

SEQ ID NO: 2492024 - RNA, 19 nt, Artificial Sequence
  Description of Artificial Sequence: Synthetic oligonucleotide
  Sense strand starting at position 3748 of SEQ ID NO: 1887720
gcuucuguaugcucaucua

SEQ ID NO: 2492025 - RNA, 19 nt, Artificial Sequence
  Description of Artificial Sequence: Synthetic oligonucleotide
  Antisense strand to SEQ ID NO: 2492024
uagaugagcauacagaagc

SEQ ID NO: 2492026 - RNA, 19 nt, Artificial Sequence
  Description of Artificial Sequence: Synthetic oligonucleotide
  Sense strand starting at position 3751 of SEQ ID NO: 1887720
ucuguaugcucaucuauac

SEQ ID NO: 2492027 - RNA, 19 nt, Artificial Sequence
  Description of Artificial Sequence: Synthetic oligonucleotide
  Antisense strand to SEQ ID NO: 2492026
guauagaugagcauacaga

SEQ ID NO: 2492028 - RNA, 19 nt, Artificial Sequence
  Description of Artificial Sequence: Synthetic oligonucleotide
  Sense strand starting at position 3762 of SEQ ID NO: 1887720
aucuauaccuguuaguuga

SEQ ID NO: 2492029 - RNA, 19 nt, Artificial Sequence
  Description of Artificial Sequence: Synthetic oligonucleotide
  Antisense strand to SEQ ID NO: 2492028
ucaacuaacagguauagau

SEQ ID NO: 2492030 - RNA, 19 nt, Artificial Sequence
  Description of Artificial Sequence: Synthetic oligonucleotide
  Sense strand starting at position 3792 of SEQ ID NO: 1887720
ugauguaauuccugugagc

SEQ ID NO: 2492031 - RNA, 19 nt, Artificial Sequence
  Description of Artificial Sequence: Synthetic oligonucleotide
  Antisense strand to SEQ ID NO: 2492030
gcucacaggaauuacauca

SEQ ID NO: 2492032 - RNA, 19 nt, Artificial Sequence
  Description of Artificial Sequence: Synthetic oligonucleotide
  Sense strand starting at position 3794 of SEQ ID NO: 1887720
auguaauuccugugagccu

SEQ ID NO: 2492033 - RNA, 19 nt, Artificial Sequence
  Description of Artificial Sequence: Synthetic oligonucleotide
  Antisense strand to SEQ ID NO: 2492032
aggcucacaggaauuacau

SEQ ID NO: 2492034 - RNA, 19 nt, Artificial Sequence
  Description of Artificial Sequence: Synthetic oligonucleotide
  Sense strand starting at position 3901 of SEQ ID NO: 1887720
cgcugugaccguuguucuu

SEQ ID NO: 2492035 - RNA, 19 nt, Artificial Sequence
  Description of Artificial Sequence: Synthetic oligonucleotide
  Antisense strand to SEQ ID NO: 2492034
aagaacaacggucacagcg

SEQ ID NO: 2492036 - RNA, 19 nt, Artificial Sequence
  Description of Artificial Sequence: Synthetic oligonucleotide
  Sense strand starting at position 3907 of SEQ ID NO: 1887720
gaccguuguucuuguguau

SEQ ID NO: 2492037 - RNA, 19 nt, Artificial Sequence
  Description of Artificial Sequence: Synthetic oligonucleotide
  Antisense strand to SEQ ID NO: 2492036
auacacaagaacaacgguc

SEQ ID NO: 2492038 - RNA, 19 nt, Artificial Sequence
  Description of Artificial Sequence: Synthetic oligonucleotide
  Sense strand starting at position 3911 of SEQ ID NO: 1887720
guuguucuuguguauccuu

SEQ ID NO: 2492039 - RNA, 19 nt, Artificial Sequence
  Description of Artificial Sequence: Synthetic oligonucleotide
  Antisense strand to SEQ ID NO: 2492038
aaggauacacaagaacaac

SEQ ID NO: 2492040 - RNA, 19 nt, Artificial Sequence
  Description of Artificial Sequence: Synthetic oligonucleotide
  Sense strand starting at position 3914 of SEQ ID NO: 1887720
guucuuguguauccuugga

SEQ ID NO: 2492041 - RNA, 19 nt, Artificial Sequence
  Description of Artificial Sequence: Synthetic oligonucleotide
  Antisense strand to SEQ ID NO: 2492040
uccaaggauacacaagaac

SEQ ID NO: 2492042 - RNA, 19 nt, Artificial Sequence
  Description of Artificial Sequence: Synthetic oligonucleotide
  Sense strand starting at position 3919 of SEQ ID NO: 1887720
uguguauccuuggacgaca

SEQ ID NO: 2492043 - RNA, 19 nt, Artificial Sequence
  Description of Artificial Sequence: Synthetic oligonucleotide
  Antisense strand to SEQ ID NO: 2492042
ugucguccaaggauacaca

SEQ ID NO: 2492044 - RNA, 19 nt, Artificial Sequence
  Description of Artificial Sequence: Synthetic oligonucleotide
  Sense strand starting at position 3966 of SEQ ID NO: 1887720
uagguuguuggcuagguua

SEQ ID NO: 2492045 - RNA, 19 nt, Artificial Sequence
  Description of Artificial Sequence: Synthetic oligonucleotide
  Antisense strand to SEQ ID NO: 2492044
uaaccuagccaacaaccua

SEQ ID NO: 2492046 - RNA, 19 nt, Artificial Sequence
  Description of Artificial Sequence: Synthetic oligonucleotide
  Sense strand starting at position 153 of SEQ ID NO: 1887721
uccguuuauuugcccucaa

SEQ ID NO: 2492047 - RNA, 19 nt, Artificial Sequence
  Description of Artificial Sequence: Synthetic oligonucleotide
  Antisense strand to SEQ ID NO: 2492046
uugagggcaaauaaacgga

SEQ ID NO: 2492048 - RNA, 19 nt, Artificial Sequence
  Description of Artificial Sequence: Synthetic oligonucleotide
  Sense strand starting at position 154 of SEQ ID NO: 1887721
ccguuuauuugcccucaaa

SEQ ID NO: 2492049 - RNA, 19 nt, Artificial Sequence
  Description of Artificial Sequence: Synthetic oligonucleotide
  Antisense strand to SEQ ID NO: 2492048
uuugagggcaaauaaacgg

SEQ ID NO: 2492050 - RNA, 19 nt, Artificial Sequence
  Description of Artificial Sequence: Synthetic oligonucleotide
  Sense strand starting at position 317 of SEQ ID NO: 1887721
ccagauaaaccauggccaa

SEQ ID NO: 2492051 - RNA, 19 nt, Artificial Sequence
  Description of Artificial Sequence: Synthetic oligonucleotide
  Antisense strand to SEQ ID NO: 2492050
uuggccaugguuuaucugg

SEQ ID NO: 2492052 - RNA, 19 nt, Artificial Sequence
  Description of Artificial Sequence: Synthetic oligonucleotide
  Sense strand starting at position 865 of SEQ ID NO: 1887721
gggucaaguucucucacca

SEQ ID NO: 2492053 - RNA, 19 nt, Artificial Sequence
  Description of Artificial Sequence: Synthetic oligonucleotide
  Antisense strand to SEQ ID NO: 2492052
uggugagagaacuugaccc

SEQ ID NO: 2492054 - RNA, 19 nt, Artificial Sequence
  Description of Artificial Sequence: Synthetic oligonucleotide
  Sense strand starting at position 906 of SEQ ID NO: 1887721
cucagagacuuaccugauu

SEQ ID NO: 2492055 - RNA, 19 nt, Artificial Sequence
  Description of Artificial Sequence: Synthetic oligonucleotide
  Antisense strand to SEQ ID NO: 2492054
aaucagguaagucucugag

SEQ ID NO: 2492056 - RNA, 19 nt, Artificial Sequence
  Description of Artificial Sequence: Synthetic oligonucleotide
  Sense strand starting at position 939 of SEQ ID NO: 1887721
ugacuuugucggcugcauu

SEQ ID NO: 2492057 - RNA, 19 nt, Artificial Sequence
  Description of Artificial Sequence: Synthetic oligonucleotide
  Antisense strand to SEQ ID NO: 2492056
aaugcagccgacaaaguca

SEQ ID NO: 2492058 - RNA, 19 nt, Artificial Sequence
  Description of Artificial Sequence: Synthetic oligonucleotide
  Sense strand starting at position 983 of SEQ ID NO: 1887721
guuguauuccuggagugga

SEQ ID NO: 2492059 - RNA, 19 nt, Artificial Sequence
  Description of Artificial Sequence: Synthetic oligonucleotide
  Antisense strand to SEQ ID NO: 2492058
uccacuccaggaauacaac

SEQ ID NO: 2492060 - RNA, 19 nt, Artificial Sequence
  Description of Artificial Sequence: Synthetic oligonucleotide
  Sense strand starting at position 986 of SEQ ID NO: 1887721
guauuccuggaguggauga

SEQ ID NO: 2492061 - RNA, 19 nt, Artificial Sequence
  Description of Artificial Sequence: Synthetic oligonucleotide
  Antisense strand to SEQ ID NO: 2492060
ucauccacuccaggaauac

SEQ ID NO: 2492062 - RNA, 19 nt, Artificial Sequence
  Description of Artificial Sequence: Synthetic oligonucleotide
  Sense strand starting at position 1014 of SEQ ID NO: 1887721
gugucaauccaauacagca

SEQ ID NO: 2492063 - RNA, 19 nt, Artificial Sequence
  Description of Artificial Sequence: Synthetic oligonucleotide
  Antisense strand to SEQ ID NO: 2492062
ugcuguauuggauugacac

SEQ ID NO: 2492064 - RNA, 19 nt, Artificial Sequence
  Description of Artificial Sequence: Synthetic oligonucleotide
  Sense strand starting at position 1087 of SEQ ID NO: 1887721
acccaacuggaucguuaau

SEQ ID NO: 2492065 - RNA, 19 nt, Artificial Sequence
  Description of Artificial Sequence: Synthetic oligonucleotide
  Antisense strand to SEQ ID NO: 2492064
auuaacgauccaguugggu

SEQ ID NO: 2492066 - RNA, 19 nt, Artificial Sequence
  Description of Artificial Sequence: Synthetic oligonucleotide
  Sense strand starting at position 1089 of SEQ ID NO: 1887721
ccaacuggaucguuaauuc

SEQ ID NO: 2492067 - RNA, 19 nt, Artificial Sequence
  Description of Artificial Sequence: Synthetic oligonucleotide
  Antisense strand to SEQ ID NO: 2492066
gaauuaacgauccaguugg

SEQ ID NO: 2492068 - RNA, 19 nt, Artificial Sequence
  Description of Artificial Sequence: Synthetic oligonucleotide
  Sense strand starting at position 1417 of SEQ ID NO: 1887721
gggaguauuuccuggagga

SEQ ID NO: 2492069 - RNA, 19 nt, Artificial Sequence
  Description of Artificial Sequence: Synthetic oligonucleotide
  Antisense strand to SEQ ID NO: 2492068
uccuccaggaaauacuccc

SEQ ID NO: 2492070 - RNA, 19 nt, Artificial Sequence
  Description of Artificial Sequence: Synthetic oligonucleotide
  Sense strand starting at position 1436 of SEQ ID NO: 1887721
ggaagauacuggaguugag

SEQ ID NO: 2492071 - RNA, 19 nt, Artificial Sequence
  Description of Artificial Sequence: Synthetic oligonucleotide
  Antisense strand to SEQ ID NO: 2492070
cucaacuccaguaucuucc

SEQ ID NO: 2492072 - RNA, 19 nt, Artificial Sequence
  Description of Artificial Sequence: Synthetic oligonucleotide
  Sense strand starting at position 1439 of SEQ ID NO: 1887721
agauacuggaguugaguuu

SEQ ID NO: 2492073 - RNA, 19 nt, Artificial Sequence
  Description of Artificial Sequence: Synthetic oligonucleotide
  Antisense strand to SEQ ID NO: 2492072
aaacucaacuccaguaucu

SEQ ID NO: 2492074 - RNA, 19 nt, Artificial Sequence
  Description of Artificial Sequence: Synthetic oligonucleotide
  Sense strand starting at position 1456 of SEQ ID NO: 1887721
uuugcagaaucaucaagaa

SEQ ID NO: 2492075 - RNA, 19 nt, Artificial Sequence
  Description of Artificial Sequence: Synthetic oligonucleotide
  Antisense strand to SEQ ID NO: 2492074
uucuugaugauucugcaaa

SEQ ID NO: 2492076 - RNA, 19 nt, Artificial Sequence
  Description of Artificial Sequence: Synthetic oligonucleotide
  Sense strand starting at position 1563 of SEQ ID NO: 1887721
gccugaccacuuugaaaca

SEQ ID NO: 2492077 - RNA, 19 nt, Artificial Sequence
  Description of Artificial Sequence: Synthetic oligonucleotide
  Antisense strand to SEQ ID NO: 2492076
uguuucaaaguggucaggc

SEQ ID NO: 2492078 - RNA, 19 nt, Artificial Sequence
  Description of Artificial Sequence: Synthetic oligonucleotide
  Sense strand starting at position 1582 of SEQ ID NO: 1887721
ggacgaggaauauguccuu

SEQ ID NO: 2492079 - RNA, 19 nt, Artificial Sequence
  Description of Artificial Sequence: Synthetic oligonucleotide
  Antisense strand to SEQ ID NO: 2492078
aaggacauauuccucgucc

SEQ ID NO: 2492080 - RNA, 19 nt, Artificial Sequence
  Description of Artificial Sequence: Synthetic oligonucleotide
  Sense strand starting at position 1585 of SEQ ID NO: 1887721
cgaggaauauguccuuaca

SEQ ID NO: 2492081 - RNA, 19 nt, Artificial Sequence
  Description of Artificial Sequence: Synthetic oligonucleotide
  Antisense strand to SEQ ID NO: 2492080
uguaaggacauauuccucg

SEQ ID NO: 2492082 - RNA, 19 nt, Artificial Sequence
  Description of Artificial Sequence: Synthetic oligonucleotide
  Sense strand starting at position 1587 of SEQ ID NO: 1887721
aggaauauguccuuacagc

SEQ ID NO: 2492083 - RNA, 19 nt, Artificial Sequence
  Description of Artificial Sequence: Synthetic oligonucleotide
  Antisense strand to SEQ ID NO: 2492082
gcuguaaggacauauuccu

SEQ ID NO: 2492084 - RNA, 19 nt, Artificial Sequence
  Description of Artificial Sequence: Synthetic oligonucleotide
  Sense strand starting at position 1588 of SEQ ID NO: 1887721
ggaauauguccuuacagcu

SEQ ID NO: 2492085 - RNA, 19 nt, Artificial Sequence
  Description of Artificial Sequence: Synthetic oligonucleotide
  Antisense strand to SEQ ID NO: 2492084
agcuguaaggacauauucc

SEQ ID NO: 2492086 - RNA, 19 nt, Artificial Sequence
  Description of Artificial Sequence: Synthetic oligonucleotide
  Sense strand starting at position 1625 of SEQ ID NO: 1887721
ccauauacuccucgaaggu

SEQ ID NO: 2492087 - RNA, 19 nt, Artificial Sequence
  Description of Artificial Sequence: Synthetic oligonucleotide
  Antisense strand to SEQ ID NO: 2492086
accuucgaggaguauaugg

SEQ ID NO: 2492088 - RNA, 19 nt, Artificial Sequence
  Description of Artificial Sequence: Synthetic oligonucleotide
  Sense strand starting at position 1626 of SEQ ID NO: 1887721
cauauacuccucgaagguu

SEQ ID NO: 2492089 - RNA, 19 nt, Artificial Sequence
  Description of Artificial Sequence: Synthetic oligonucleotide
  Antisense strand to SEQ ID NO: 2492088
aaccuucgaggaguauaug

SEQ ID NO: 2492090 - RNA, 19 nt, Artificial Sequence
  Description of Artificial Sequence: Synthetic oligonucleotide
  Sense strand starting at position 1657 of SEQ ID NO: 1887721
uggaucaccguguauuaau

SEQ ID NO: 2492091 - RNA, 19 nt, Artificial Sequence
  Description of Artificial Sequence: Synthetic oligonucleotide
  Antisense strand to SEQ ID NO: 2492090
auuaauacacggugaucca

SEQ ID NO: 2492092 - RNA, 19 nt, Artificial Sequence
  Description of Artificial Sequence: Synthetic oligonucleotide
  Sense strand starting at position 1718 of SEQ ID NO: 1887721
agagaagccucagcuuaau

SEQ ID NO: 2492093 - RNA, 19 nt, Artificial Sequence
  Description of Artificial Sequence: Synthetic oligonucleotide
  Antisense strand to SEQ ID NO: 2492092
auuaagcugaggcuucucu

SEQ ID NO: 2492094 - RNA, 19 nt, Artificial Sequence
  Description of Artificial Sequence: Synthetic oligonucleotide
  Sense strand starting at position 1790 of SEQ ID NO: 1887721
gccagaaauggcuggcuaa

SEQ ID NO: 2492095 - RNA, 19 nt, Artificial Sequence
  Description of Artificial Sequence: Synthetic oligonucleotide
  Antisense strand to SEQ ID NO: 2492094
uuagccagccauuucuggc

SEQ ID NO: 2492096 - RNA, 19 nt, Artificial Sequence
  Description of Artificial Sequence: Synthetic oligonucleotide
  Sense strand starting at position 1793 of SEQ ID NO: 1887721
agaaauggcuggcuaagaa

SEQ ID NO: 2492097 - RNA, 19 nt, Artificial Sequence
  Description of Artificial Sequence: Synthetic oligonucleotide
  Antisense strand to SEQ ID NO: 2492096
uucuuagccagccauuucu

SEQ ID NO: 2492098 - RNA, 19 nt, Artificial Sequence
  Description of Artificial Sequence: Synthetic oligonucleotide
  Sense strand starting at position 1806 of SEQ ID NO: 1887721
uaagaagaucgugaagguu

SEQ ID NO: 2492099 - RNA, 19 nt, Artificial Sequence
  Description of Artificial Sequence: Synthetic oligonucleotide
  Antisense strand to SEQ ID NO: 2492098
aaccuucacgaucuucuua

SEQ ID NO: 2492100 - RNA, 19 nt, Artificial Sequence
  Description of Artificial Sequence: Synthetic oligonucleotide
  Sense strand starting at position 2012 of SEQ ID NO: 1887721
ugggcaauggucagugguu

SEQ ID NO: 2492101 - RNA, 19 nt, Artificial Sequence
  Description of Artificial Sequence: Synthetic oligonucleotide
  Antisense strand to SEQ ID NO: 2492100
aaccacugaccauugccca

SEQ ID NO: 2492102 - RNA, 19 nt, Artificial Sequence
  Description of Artificial Sequence: Synthetic oligonucleotide
  Sense strand starting at position 2368 of SEQ ID NO: 1887721
cuaggccgagucugagaua

SEQ ID NO: 2492103 - RNA, 19 nt, Artificial Sequence
  Description of Artificial Sequence: Synthetic oligonucleotide
  Antisense strand to SEQ ID NO: 2492102
uaucucagacucggccuag

SEQ ID NO: 2492104 - RNA, 19 nt, Artificial Sequence
  Description of Artificial Sequence: Synthetic oligonucleotide
  Sense strand starting at position 2405 of SEQ ID NO: 1887721
gcuggcgcucuuguauaua

SEQ ID NO: 2492105 - RNA, 19 nt, Artificial Sequence
  Description of Artificial Sequence: Synthetic oligonucleotide
  Antisense strand to SEQ ID NO: 2492104
uauauacaagagcgccagc

SEQ ID NO: 2492106 - RNA, 19 nt, Artificial Sequence
  Description of Artificial Sequence: Synthetic oligonucleotide
  Sense strand starting at position 3081 of SEQ ID NO: 1887721
caaggugaaucugucaaac

SEQ ID NO: 2492107 - RNA, 19 nt, Artificial Sequence
  Description of Artificial Sequence: Synthetic oligonucleotide
  Antisense strand to SEQ ID NO: 2492106
guuugacagauucaccuug

SEQ ID NO: 2492108 - RNA, 19 nt, Artificial Sequence
  Description of Artificial Sequence: Synthetic oligonucleotide
  Sense strand starting at position 3111 of SEQ ID NO: 1887721
ggaggauuacaguguccuc

SEQ ID NO: 2492109 - RNA, 19 nt, Artificial Sequence
  Description of Artificial Sequence: Synthetic oligonucleotide
  Antisense strand to SEQ ID NO: 2492108
gaggacacuguaauccucc

SEQ ID NO: 2492110 - RNA, 19 nt, Artificial Sequence
  Description of Artificial Sequence: Synthetic oligonucleotide
  Sense strand starting at position 3138 of SEQ ID NO: 1887721
uacagugucguggaagaga

SEQ ID NO: 2492111 - RNA, 19 nt, Artificial Sequence
  Description of Artificial Sequence: Synthetic oligonucleotide
  Antisense strand to SEQ ID NO: 2492110
ucucuuccacgacacugua

SEQ ID NO: 2492112 - RNA, 19 nt, Artificial Sequence
  Description of Artificial Sequence: Synthetic oligonucleotide
  Sense strand starting at position 3261 of SEQ ID NO: 1887721
augcauaggaguuggcuaa

SEQ ID NO: 2492113 - RNA, 19 nt, Artificial Sequence
  Description of Artificial Sequence: Synthetic oligonucleotide
  Antisense strand to SEQ ID NO: 2492112
uuagccaacuccuaugcau

SEQ ID NO: 2492114 - RNA, 19 nt, Artificial Sequence
  Description of Artificial Sequence: Synthetic oligonucleotide
  Sense strand starting at position 3265 of SEQ ID NO: 1887721
auaggaguuggcuaagcaa

SEQ ID NO: 2492115 - RNA, 19 nt, Artificial Sequence
  Description of Artificial Sequence: Synthetic oligonucleotide
  Antisense strand to SEQ ID NO: 2492114
uugcuuagccaacuccuau

SEQ ID NO: 2492116 - RNA, 19 nt, Artificial Sequence
  Description of Artificial Sequence: Synthetic oligonucleotide
  Sense strand starting at position 3305 of SEQ ID NO: 1887721
aaaguugggccaugaacua

SEQ ID NO: 2492117 - RNA, 19 nt, Artificial Sequence
  Description of Artificial Sequence: Synthetic oligonucleotide
  Antisense strand to SEQ ID NO: 2492116
uaguucauggcccaacuuu

SEQ ID NO: 2492118 - RNA, 19 nt, Artificial Sequence
  Description of Artificial Sequence: Synthetic oligonucleotide
  Sense strand starting at position 3838 of SEQ ID NO: 1887721
gccauugcuguggaggaaa

SEQ ID NO: 2492119 - RNA, 19 nt, Artificial Sequence
  Description of Artificial Sequence: Synthetic oligonucleotide
  Antisense strand to SEQ ID NO: 2492118
uuuccuccacagcaauggc

SEQ ID NO: 2492120 - RNA, 19 nt, Artificial Sequence
  Description of Artificial Sequence: Synthetic oligonucleotide
  Sense strand starting at position 3840 of SEQ ID NO: 1887721
cauugcuguggaggaaaua

SEQ ID NO: 2492121 - RNA, 19 nt, Artificial Sequence
  Description of Artificial Sequence: Synthetic oligonucleotide
  Antisense strand to SEQ ID NO: 2492120
uauuuccuccacagcaaug

SEQ ID NO: 2492122 - RNA, 19 nt, Artificial Sequence
  Description of Artificial Sequence: Synthetic oligonucleotide
  Sense strand starting at position 3849 of SEQ ID NO: 1887721
ggaggaaauaggugucuca

SEQ ID NO: 2492123 - RNA, 19 nt, Artificial Sequence
  Description of Artificial Sequence: Synthetic oligonucleotide
  Antisense strand to SEQ ID NO: 2492122
ugagacaccuauuuccucc

SEQ ID NO: 2492124 - RNA, 19 nt, Artificial Sequence
  Description of Artificial Sequence: Synthetic oligonucleotide
  Sense strand starting at position 3852 of SEQ ID NO: 1887721
ggaaauaggugucucagac

SEQ ID NO: 2492125 - RNA, 19 nt, Artificial Sequence
  Description of Artificial Sequence: Synthetic oligonucleotide
  Antisense strand to SEQ ID NO: 2492124
gucugagacaccuauuucc

SEQ ID NO: 2492126 - RNA, 19 nt, Artificial Sequence
  Description of Artificial Sequence: Synthetic oligonucleotide
  Sense strand starting at position 58 of SEQ ID NO: 1887722
uggccagcccuacauuauu

SEQ ID NO: 2492127 - RNA, 19 nt, Artificial Sequence
  Description of Artificial Sequence: Synthetic oligonucleotide
  Antisense strand to SEQ ID NO: 2492126
aauaauguagggcuggcca

SEQ ID NO: 2492128 - RNA, 19 nt, Artificial Sequence
  Description of Artificial Sequence: Synthetic oligonucleotide
  Sense strand starting at position 128 of SEQ ID NO: 1887722
gcucuugaucugucgucca

SEQ ID NO: 2492129 - RNA, 19 nt, Artificial Sequence
  Description of Artificial Sequence: Synthetic oligonucleotide
  Antisense strand to SEQ ID NO: 2492128
uggacgacagaucaagagc

SEQ ID NO: 2492130 - RNA, 19 nt, Artificial Sequence
  Description of Artificial Sequence: Synthetic oligonucleotide
  Sense strand starting at position 331 of SEQ ID NO: 1887722
cuacaauuccugggcccaa

SEQ ID NO: 2492131 - RNA, 19 nt, Artificial Sequence
  Description of Artificial Sequence: Synthetic oligonucleotide
  Antisense strand to SEQ ID NO: 2492130
uugggcccaggaauuguag

SEQ ID NO: 2492132 - RNA, 19 nt, Artificial Sequence
  Description of Artificial Sequence: Synthetic oligonucleotide
  Sense strand starting at position 524 of SEQ ID NO: 1887722
cggagaugaucacaggaua

SEQ ID NO: 2492133 - RNA, 19 nt, Artificial Sequence
  Description of Artificial Sequence: Synthetic oligonucleotide
  Antisense strand to SEQ ID NO: 2492132
uauccugugaucaucuccg

SEQ ID NO: 2492134 - RNA, 19 nt, Artificial Sequence
  Description of Artificial Sequence: Synthetic oligonucleotide
  Sense strand starting at position 547 of SEQ ID NO: 1887722
augggugaguuaguguauu

SEQ ID NO: 2492135 - RNA, 19 nt, Artificial Sequence
  Description of Artificial Sequence: Synthetic oligonucleotide
  Antisense strand to SEQ ID NO: 2492134
aauacacuaacucacccau

SEQ ID NO: 2492136 - RNA, 19 nt, Artificial Sequence
  Description of Artificial Sequence: Synthetic oligonucleotide
  Sense strand starting at position 561 of SEQ ID NO: 1887722
guauuaaagcuccgggaca

SEQ ID NO: 2492137 - RNA, 19 nt, Artificial Sequence
  Description of Artificial Sequence: Synthetic oligonucleotide
  Antisense strand to SEQ ID NO: 2492136
ugucccggagcuuuaauac

SEQ ID NO: 2492138 - RNA, 19 nt, Artificial Sequence
  Description of Artificial Sequence: Synthetic oligonucleotide
  Sense strand starting at position 589 of SEQ ID NO: 1887722
cucaacaugugcgaacaau

SEQ ID NO: 2492139 - RNA, 19 nt, Artificial Sequence
  Description of Artificial Sequence: Synthetic oligonucleotide
  Antisense strand to SEQ ID NO: 2492138
auuguucgcacauguugag

SEQ ID NO: 2492140 - RNA, 19 nt, Artificial Sequence
  Description of Artificial Sequence: Synthetic oligonucleotide
  Sense strand starting at position 642 of SEQ ID NO: 1887722
ggucuucugcccugagaca

SEQ ID NO: 2492141 - RNA, 19 nt, Artificial Sequence
  Description of Artificial Sequence: Synthetic oligonucleotide
  Antisense strand to SEQ ID NO: 2492140
ugucucagggcagaagacc

SEQ ID NO: 2492142 - RNA, 19 nt, Artificial Sequence
  Description of Artificial Sequence: Synthetic oligonucleotide
  Sense strand starting at position 844 of SEQ ID NO: 1887722
ugcagauccuugguguuga

SEQ ID NO: 2492143 - RNA, 19 nt, Artificial Sequence
  Description of Artificial Sequence: Synthetic oligonucleotide
  Antisense strand to SEQ ID NO: 2492142
ucaacaccaaggaucugca

SEQ ID NO: 2492144 - RNA, 19 nt, Artificial Sequence
  Description of Artificial Sequence: Synthetic oligonucleotide
  Sense strand starting at position 875 of SEQ ID NO: 1887722
ccaggaaacugcuacuguu

SEQ ID NO: 2492145 - RNA, 19 nt, Artificial Sequence
  Description of Artificial Sequence: Synthetic oligonucleotide
  Antisense strand to SEQ ID NO: 2492144
aacaguagcaguuuccugg

SEQ ID NO: 2492146 - RNA, 19 nt, Artificial Sequence
  Description of Artificial Sequence: Synthetic oligonucleotide
  Sense strand starting at position 902 of SEQ ID NO: 1887722
gagggcaguccuggaaauc

SEQ ID NO: 2492147 - RNA, 19 nt, Artificial Sequence
  Description of Artificial Sequence: Synthetic oligonucleotide
  Antisense strand to SEQ ID NO: 2492146
gauuuccaggacugcccuc

SEQ ID NO: 2492148 - RNA, 19 nt, Artificial Sequence
  Description of Artificial Sequence: Synthetic oligonucleotide
  Sense strand starting at position 946 of SEQ ID NO: 1887722
gagugagucuugguuacuc

SEQ ID NO: 2492149 - RNA, 19 nt, Artificial Sequence
  Description of Artificial Sequence: Synthetic oligonucleotide
  Antisense strand to SEQ ID NO: 2492148
gaguaaccaagacucacuc

SEQ ID NO: 2492150 - RNA, 19 nt, Artificial Sequence
  Description of Artificial Sequence: Synthetic oligonucleotide
  Sense strand starting at position 1020 of SEQ ID NO: 1887722
ugcuccugccucugacaaa

SEQ ID NO: 2492151 - RNA, 19 nt, Artificial Sequence
  Description of Artificial Sequence: Synthetic oligonucleotide
  Antisense strand to SEQ ID NO: 2492150
uuugucagaggcaggagca

SEQ ID NO: 2492152 - RNA, 19 nt, Artificial Sequence
  Description of Artificial Sequence: Synthetic oligonucleotide
  Sense strand starting at position 1023 of SEQ ID NO: 1887722
uccugccucugacaaagaa

SEQ ID NO: 2492153 - RNA, 19 nt, Artificial Sequence
  Description of Artificial Sequence: Synthetic oligonucleotide
  Antisense strand to SEQ ID NO: 2492152
uucuuugucagaggcagga

SEQ ID NO: 2492154 - RNA, 19 nt, Artificial Sequence
  Description of Artificial Sequence: Synthetic oligonucleotide
  Sense strand starting at position 1045 of SEQ ID NO: 1887722
gggcccuuggguuacagau

SEQ ID NO: 2492155 - RNA, 19 nt, Artificial Sequence
  Description of Artificial Sequence: Synthetic oligonucleotide
  Antisense strand to SEQ ID NO: 2492154
aucuguaacccaagggccc

SEQ ID NO: 2492156 - RNA, 19 nt, Artificial Sequence
  Description of Artificial Sequence: Synthetic oligonucleotide
  Sense strand starting at position 1647 of SEQ ID NO: 1887722
uagcacauccuguguaaga

SEQ ID NO: 2492157 - RNA, 19 nt, Artificial Sequence
  Description of Artificial Sequence: Synthetic oligonucleotide
  Antisense strand to SEQ ID NO: 2492156
ucuuacacaggaugugcua

SEQ ID NO: 2492158 - RNA, 19 nt, Artificial Sequence
  Description of Artificial Sequence: Synthetic oligonucleotide
  Sense strand starting at position 1649 of SEQ ID NO: 1887722
gcacauccuguguaagaca

SEQ ID NO: 2492159 - RNA, 19 nt, Artificial Sequence
  Description of Artificial Sequence: Synthetic oligonucleotide
  Antisense strand to SEQ ID NO: 2492158
ugucuuacacaggaugugc

SEQ ID NO: 2492160 - RNA, 19 nt, Artificial Sequence
  Description of Artificial Sequence: Synthetic oligonucleotide
  Sense strand starting at position 1657 of SEQ ID NO: 1887722
uguguaagacaucauuacu

SEQ ID NO: 2492161 - RNA, 19 nt, Artificial Sequence
  Description of Artificial Sequence: Synthetic oligonucleotide
  Antisense strand to SEQ ID NO: 2492160
aguaaugaugucuuacaca

SEQ ID NO: 2492162 - RNA, 19 nt, Artificial Sequence
  Description of Artificial Sequence: Synthetic oligonucleotide
  Sense strand starting at position 1708 of SEQ ID NO: 1887722
gaugacgggacuuguacaa

SEQ ID NO: 2492163 - RNA, 19 nt, Artificial Sequence
  Description of Artificial Sequence: Synthetic oligonucleotide
  Antisense strand to SEQ ID NO: 2492162
uuguacaagucccgucauc

SEQ ID NO: 2492164 - RNA, 19 nt, Artificial Sequence
  Description of Artificial Sequence: Synthetic oligonucleotide
  Sense strand starting at position 1777 of SEQ ID NO: 1887722
cgugcucuccuccagcaaa

SEQ ID NO: 2492165 - RNA, 19 nt, Artificial Sequence
  Description of Artificial Sequence: Synthetic oligonucleotide
  Antisense strand to SEQ ID NO: 2492164
uuugcuggaggagagcacg

SEQ ID NO: 2492166 - RNA, 19 nt, Artificial Sequence
  Description of Artificial Sequence: Synthetic oligonucleotide
  Sense strand starting at position 1876 of SEQ ID NO: 1887722
gagagccauugguguagaa

SEQ ID NO: 2492167 - RNA, 19 nt, Artificial Sequence
  Description of Artificial Sequence: Synthetic oligonucleotide
  Antisense strand to SEQ ID NO: 2492166
uucuacaccaauggcucuc

SEQ ID NO: 2492168 - RNA, 19 nt, Artificial Sequence
  Description of Artificial Sequence: Synthetic oligonucleotide
  Sense strand starting at position 1878 of SEQ ID NO: 1887722
gagccauugguguagaaac

SEQ ID NO: 2492169 - RNA, 19 nt, Artificial Sequence
  Description of Artificial Sequence: Synthetic oligonucleotide
  Antisense strand to SEQ ID NO: 2492168
guuucuacaccaauggcuc

SEQ ID NO: 2492170 - RNA, 19 nt, Artificial Sequence
  Description of Artificial Sequence: Synthetic oligonucleotide
  Sense strand starting at position 2259 of SEQ ID NO: 1887722
uugagcucccagcaauauu

SEQ ID NO: 2492171 - RNA, 19 nt, Artificial Sequence
  Description of Artificial Sequence: Synthetic oligonucleotide
  Antisense strand to SEQ ID NO: 2492170
aauauugcugggagcucaa

SEQ ID NO: 2492172 - RNA, 19 nt, Artificial Sequence
  Description of Artificial Sequence: Synthetic oligonucleotide
  Sense strand starting at position 2298 of SEQ ID NO: 1887722
ccauuaagugcccagagga

SEQ ID NO: 2492173 - RNA, 19 nt, Artificial Sequence
  Description of Artificial Sequence: Synthetic oligonucleotide
  Antisense strand to SEQ ID NO: 2492172
uccucugggcacuuaaugg

SEQ ID NO: 2492174 - RNA, 19 nt, Artificial Sequence
  Description of Artificial Sequence: Synthetic oligonucleotide
  Sense strand starting at position 2622 of SEQ ID NO: 1887722
gcuucuccgagacaaaguu

SEQ ID NO: 2492175 - RNA, 19 nt, Artificial Sequence
  Description of Artificial Sequence: Synthetic oligonucleotide
  Antisense strand to SEQ ID NO: 2492174
aacuuugucucggagaagc

SEQ ID NO: 2492176 - RNA, 19 nt, Artificial Sequence
  Description of Artificial Sequence: Synthetic oligonucleotide
  Sense strand starting at position 2963 of SEQ ID NO: 1887722
accgguuccgaaugggaga

SEQ ID NO: 2492177 - RNA, 19 nt, Artificial Sequence
  Description of Artificial Sequence: Synthetic oligonucleotide
  Antisense strand to SEQ ID NO: 2492176
ucucccauucggaaccggu

SEQ ID NO: 2492178 - RNA, 19 nt, Artificial Sequence
  Description of Artificial Sequence: Synthetic oligonucleotide
  Sense strand starting at position 3021 of SEQ ID NO: 1887722
cuauaaagauuguccggau

SEQ ID NO: 2492179 - RNA, 19 nt, Artificial Sequence
  Description of Artificial Sequence: Synthetic oligonucleotide
  Antisense strand to SEQ ID NO: 2492178
auccggacaaucuuuauag

SEQ ID NO: 2492180 - RNA, 19 nt, Artificial Sequence
  Description of Artificial Sequence: Synthetic oligonucleotide
  Sense strand starting at position 3022 of SEQ ID NO: 1887722
uauaaagauuguccggaug

SEQ ID NO: 2492181 - RNA, 19 nt, Artificial Sequence
  Description of Artificial Sequence: Synthetic oligonucleotide
  Antisense strand to SEQ ID NO: 2492180
cauccggacaaucuuuaua

SEQ ID NO: 2492182 - RNA, 19 nt, Artificial Sequence
  Description of Artificial Sequence: Synthetic oligonucleotide
  Sense strand starting at position 3025 of SEQ ID NO: 1887722
aaagauuguccggauguga

SEQ ID NO: 2492183 - RNA, 19 nt, Artificial Sequence
  Description of Artificial Sequence: Synthetic oligonucleotide
  Antisense strand to SEQ ID NO: 2492182
ucacauccggacaaucuuu

SEQ ID NO: 2492184 - RNA, 19 nt, Artificial Sequence
  Description of Artificial Sequence: Synthetic oligonucleotide
  Sense strand starting at position 3029 of SEQ ID NO: 1887722
auuguccggaugugauuua

SEQ ID NO: 2492185 - RNA, 19 nt, Artificial Sequence
  Description of Artificial Sequence: Synthetic oligonucleotide
  Antisense strand to SEQ ID NO: 2492184
uaaaucacauccggacaau

SEQ ID NO: 2492186 - RNA, 19 nt, Artificial Sequence
  Description of Artificial Sequence: Synthetic oligonucleotide
  Sense strand starting at position 3049 of SEQ ID NO: 1887722
ugagcaguuuaucuaacca

SEQ ID NO: 2492187 - RNA, 19 nt, Artificial Sequence
  Description of Artificial Sequence: Synthetic oligonucleotide
  Antisense strand to SEQ ID NO: 2492186
ugguuagauaaacugcuca

SEQ ID NO: 2492188 - RNA, 19 nt, Artificial Sequence
  Description of Artificial Sequence: Synthetic oligonucleotide
  Sense strand starting at position 3061 of SEQ ID NO: 1887722
cuaaccaauugucauggau

SEQ ID NO: 2492189 - RNA, 19 nt, Artificial Sequence
  Description of Artificial Sequence: Synthetic oligonucleotide
  Antisense strand to SEQ ID NO: 2492188
auccaugacaauugguuag

SEQ ID NO: 2492190 - RNA, 19 nt, Artificial Sequence
  Description of Artificial Sequence: Synthetic oligonucleotide
  Sense strand starting at position 3120 of SEQ ID NO: 1887722
uuaacuguccgggacuaca

SEQ ID NO: 2492191 - RNA, 19 nt, Artificial Sequence
  Description of Artificial Sequence: Synthetic oligonucleotide
  Antisense strand to SEQ ID NO: 2492190
uguagucccggacaguuaa

SEQ ID NO: 2492192 - RNA, 19 nt, Artificial Sequence
  Description of Artificial Sequence: Synthetic oligonucleotide
  Sense strand starting at position 3222 of SEQ ID NO: 1887722
cucuucuugagccagggau

SEQ ID NO: 2492193 - RNA, 19 nt, Artificial Sequence
  Description of Artificial Sequence: Synthetic oligonucleotide
  Antisense strand to SEQ ID NO: 2492192
aucccuggcucaagaagag

SEQ ID NO: 2492194 - RNA, 19 nt, Artificial Sequence
  Description of Artificial Sequence: Synthetic oligonucleotide
  Sense strand starting at position 3505 of SEQ ID NO: 1887722
ucugcaaguugaguccuaa

SEQ ID NO: 2492195 - RNA, 19 nt, Artificial Sequence
  Description of Artificial Sequence: Synthetic oligonucleotide
  Antisense strand to SEQ ID NO: 2492194
uuaggacucaacuugcaga

SEQ ID NO: 2492196 - RNA, 19 nt, Artificial Sequence
  Description of Artificial Sequence: Synthetic oligonucleotide
  Sense strand starting at position 3571 of SEQ ID NO: 1887722
gaggcuuaaucucugguuu

SEQ ID NO: 2492197 - RNA, 19 nt, Artificial Sequence
  Description of Artificial Sequence: Synthetic oligonucleotide
  Antisense strand to SEQ ID NO: 2492196
aaaccagagauuaagccuc

SEQ ID NO: 2492198 - RNA, 19 nt, Artificial Sequence
  Description of Artificial Sequence: Synthetic oligonucleotide
  Sense strand starting at position 3572 of SEQ ID NO: 1887722
aggcuuaaucucugguuua

SEQ ID NO: 2492199 - RNA, 19 nt, Artificial Sequence
  Description of Artificial Sequence: Synthetic oligonucleotide
  Antisense strand to SEQ ID NO: 2492198
uaaaccagagauuaagccu

SEQ ID NO: 2492200 - RNA, 19 nt, Artificial Sequence
  Description of Artificial Sequence: Synthetic oligonucleotide
  Sense strand starting at position 3724 of SEQ ID NO: 1887722
caguuugagucucugagca

SEQ ID NO: 2492201 - RNA, 19 nt, Artificial Sequence
  Description of Artificial Sequence: Synthetic oligonucleotide
  Antisense strand to SEQ ID NO: 2492200
ugcucagagacucaaacug

SEQ ID NO: 2492202 - RNA, 19 nt, Artificial Sequence
  Description of Artificial Sequence: Synthetic oligonucleotide
  Sense strand starting at position 3726 of SEQ ID NO: 1887722
guuugagucucugagcaga

SEQ ID NO: 2492203 - RNA, 19 nt, Artificial Sequence
  Description of Artificial Sequence: Synthetic oligonucleotide
  Antisense strand to SEQ ID NO: 2492202
ucugcucagagacucaaac

SEQ ID NO: 2492204 - RNA, 19 nt, Artificial Sequence
  Description of Artificial Sequence: Synthetic oligonucleotide
  Sense strand starting at position 3866 of SEQ ID NO: 1887722
caggucucagcagagacau

SEQ ID NO: 2492205 - RNA, 19 nt, Artificial Sequence
  Description of Artificial Sequence: Synthetic oligonucleotide
  Antisense strand to SEQ ID NO: 2492204
augucucugcugagaccug

SEQ ID NO: 2492206 - RNA, 19 nt, Artificial Sequence
  Description of Artificial Sequence: Synthetic oligonucleotide
  Sense strand starting at position 108 of SEQ ID NO: 1887723
ggguccugcccggaaacuu

SEQ ID NO: 2492207 - RNA, 19 nt, Artificial Sequence
  Description of Artificial Sequence: Synthetic oligonucleotide
  Antisense strand to SEQ ID NO: 2492206
aaguuuccgggcaggaccc

SEQ ID NO: 2492208 - RNA, 19 nt, Artificial Sequence
  Description of Artificial Sequence: Synthetic oligonucleotide
  Sense strand starting at position 118 of SEQ ID NO: 1887723
cggaaacuuccuugagccu

SEQ ID NO: 2492209 - RNA, 19 nt, Artificial Sequence
  Description of Artificial Sequence: Synthetic oligonucleotide
  Antisense strand to SEQ ID NO: 2492208
aggcucaaggaaguuuccg

SEQ ID NO: 2492210 - RNA, 19 nt, Artificial Sequence
  Description of Artificial Sequence: Synthetic oligonucleotide
  Sense strand starting at position 281 of SEQ ID NO: 1887723
cccucaagucuuggaguca

SEQ ID NO: 2492211 - RNA, 19 nt, Artificial Sequence
  Description of Artificial Sequence: Synthetic oligonucleotide
  Antisense strand to SEQ ID NO: 2492210
ugacuccaagacuugaggg

SEQ ID NO: 2492212 - RNA, 19 nt, Artificial Sequence
  Description of Artificial Sequence: Synthetic oligonucleotide
  Sense strand starting at position 327 of SEQ ID NO: 1887723
ugauuaguaacgcguuucu

SEQ ID NO: 2492213 - RNA, 19 nt, Artificial Sequence
  Description of Artificial Sequence: Synthetic oligonucleotide
  Antisense strand to SEQ ID NO: 2492212
agaaacgcguuacuaauca

SEQ ID NO: 2492214 - RNA, 19 nt, Artificial Sequence
  Description of Artificial Sequence: Synthetic oligonucleotide
  Sense strand starting at position 329 of SEQ ID NO: 1887723
auuaguaacgcguuucugu

SEQ ID NO: 2492215 - RNA, 19 nt, Artificial Sequence
  Description of Artificial Sequence: Synthetic oligonucleotide
  Antisense strand to SEQ ID NO: 2492214
acagaaacgcguuacuaau

SEQ ID NO: 2492216 - RNA, 19 nt, Artificial Sequence
  Description of Artificial Sequence: Synthetic oligonucleotide
  Sense strand starting at position 468 of SEQ ID NO: 1887723
gggauauaaucagauuugu

SEQ ID NO: 2492217 - RNA, 19 nt, Artificial Sequence
  Description of Artificial Sequence: Synthetic oligonucleotide
  Antisense strand to SEQ ID NO: 2492216
acaaaucugauuauauccc

SEQ ID NO: 2492218 - RNA, 19 nt, Artificial Sequence
  Description of Artificial Sequence: Synthetic oligonucleotide
  Sense strand starting at position 477 of SEQ ID NO: 1887723
ucagauuugugcuucgaac

SEQ ID NO: 2492219 - RNA, 19 nt, Artificial Sequence
  Description of Artificial Sequence: Synthetic oligonucleotide
  Antisense strand to SEQ ID NO: 2492218
guucgaagcacaaaucuga

SEQ ID NO: 2492220 - RNA, 19 nt, Artificial Sequence
  Description of Artificial Sequence: Synthetic oligonucleotide
  Sense strand starting at position 616 of SEQ ID NO: 1887723
agggcugagcuguguagaa

SEQ ID NO: 2492221 - RNA, 19 nt, Artificial Sequence
  Description of Artificial Sequence: Synthetic oligonucleotide
  Antisense strand to SEQ ID NO: 2492220
uucuacacagcucagcccu

SEQ ID NO: 2492222 - RNA, 19 nt, Artificial Sequence
  Description of Artificial Sequence: Synthetic oligonucleotide
  Sense strand starting at position 618 of SEQ ID NO: 1887723
ggcugagcuguguagaacu

SEQ ID NO: 2492223 - RNA, 19 nt, Artificial Sequence
  Description of Artificial Sequence: Synthetic oligonucleotide
  Antisense strand to SEQ ID NO: 2492222
aguucuacacagcucagcc

SEQ ID NO: 2492224 - RNA, 19 nt, Artificial Sequence
  Description of Artificial Sequence: Synthetic oligonucleotide
  Sense strand starting at position 679 of SEQ ID NO: 1887723
aggccuugcaucugagaga

SEQ ID NO: 2492225 - RNA, 19 nt, Artificial Sequence
  Description of Artificial Sequence: Synthetic oligonucleotide
  Antisense strand to SEQ ID NO: 2492224
ucucucagaugcaaggccu

SEQ ID NO: 2492226 - RNA, 19 nt, Artificial Sequence
  Description of Artificial Sequence: Synthetic oligonucleotide
  Sense strand starting at position 718 of SEQ ID NO: 1887723
gggcaacuggauugucaaa

SEQ ID NO: 2492227 - RNA, 19 nt, Artificial Sequence
  Description of Artificial Sequence: Synthetic oligonucleotide
  Antisense strand to SEQ ID NO: 2492226
uuugacaauccaguugccc

SEQ ID NO: 2492228 - RNA, 19 nt, Artificial Sequence
  Description of Artificial Sequence: Synthetic oligonucleotide
  Sense strand starting at position 720 of SEQ ID NO: 1887723
gcaacuggauugucaaaca

SEQ ID NO: 2492229 - RNA, 19 nt, Artificial Sequence
  Description of Artificial Sequence: Synthetic oligonucleotide
  Antisense strand to SEQ ID NO: 2492228
uguuugacaauccaguugc

SEQ ID NO: 2492230 - RNA, 19 nt, Artificial Sequence
  Description of Artificial Sequence: Synthetic oligonucleotide
  Sense strand starting at position 937 of SEQ ID NO: 1887723
caccucgagccugagagau

SEQ ID NO: 2492231 - RNA, 19 nt, Artificial Sequence
  Description of Artificial Sequence: Synthetic oligonucleotide
  Antisense strand to SEQ ID NO: 2492230
aucucucaggcucgaggug

SEQ ID NO: 2492232 - RNA, 19 nt, Artificial Sequence
  Description of Artificial Sequence: Synthetic oligonucleotide
  Sense strand starting at position 1045 of SEQ ID NO: 1887723
aggaguugguuugagaaag

SEQ ID NO: 2492233 - RNA, 19 nt, Artificial Sequence
  Description of Artificial Sequence: Synthetic oligonucleotide
  Antisense strand to SEQ ID NO: 2492232
cuuucucaaaccaacuccu

SEQ ID NO: 2492234 - RNA, 19 nt, Artificial Sequence
  Description of Artificial Sequence: Synthetic oligonucleotide
  Sense strand starting at position 2176 of SEQ ID NO: 1887723
augggaagcuucccuaugu

SEQ ID NO: 2492235 - RNA, 19 nt, Artificial Sequence
  Description of Artificial Sequence: Synthetic oligonucleotide
  Antisense strand to SEQ ID NO: 2492234
acauagggaagcuucccau

SEQ ID NO: 2492236 - RNA, 19 nt, Artificial Sequence
  Description of Artificial Sequence: Synthetic oligonucleotide
  Sense strand starting at position 2627 of SEQ ID NO: 1887723
gcuugaguccugucugcca

SEQ ID NO: 2492237 - RNA, 19 nt, Artificial Sequence
  Description of Artificial Sequence: Synthetic oligonucleotide
  Antisense strand to SEQ ID NO: 2492236
uggcagacaggacucaagc

SEQ ID NO: 2492238 - RNA, 19 nt, Artificial Sequence
  Description of Artificial Sequence: Synthetic oligonucleotide
  Sense strand starting at position 3005 of SEQ ID NO: 1887723
aggagucaguccugcccaa

SEQ ID NO: 2492239 - RNA, 19 nt, Artificial Sequence
  Description of Artificial Sequence: Synthetic oligonucleotide
  Antisense strand to SEQ ID NO: 2492238
uugggcaggacugacuccu

SEQ ID NO: 2492240 - RNA, 19 nt, Artificial Sequence
  Description of Artificial Sequence: Synthetic oligonucleotide
  Sense strand starting at position 3159 of SEQ ID NO: 1887723
guuccuauccaugaagcca

SEQ ID NO: 2492241 - RNA, 19 nt, Artificial Sequence
  Description of Artificial Sequence: Synthetic oligonucleotide
  Antisense strand to SEQ ID NO: 2492240
uggcuucauggauaggaac

SEQ ID NO: 2492242 - RNA, 19 nt, Artificial Sequence
  Description of Artificial Sequence: Synthetic oligonucleotide
  Sense strand starting at position 3207 of SEQ ID NO: 1887723
cccacaucccuauggaagu

SEQ ID NO: 2492243 - RNA, 19 nt, Artificial Sequence
  Description of Artificial Sequence: Synthetic oligonucleotide
  Antisense strand to SEQ ID NO: 2492242
acuuccauagggauguggg

SEQ ID NO: 2492244 - RNA, 19 nt, Artificial Sequence
  Description of Artificial Sequence: Synthetic oligonucleotide
  Sense strand starting at position 3244 of SEQ ID NO: 1887723
ucuuauuucugagacggag

SEQ ID NO: 2492245 - RNA, 19 nt, Artificial Sequence
  Description of Artificial Sequence: Synthetic oligonucleotide
  Antisense strand to SEQ ID NO: 2492244
cuccgucucagaaauaaga

SEQ ID NO: 2492246 - RNA, 19 nt, Artificial Sequence
  Description of Artificial Sequence: Synthetic oligonucleotide
  Sense strand starting at position 3539 of SEQ ID NO: 1887723
ggaagucuuuacccaagag

SEQ ID NO: 2492247 - RNA, 19 nt, Artificial Sequence
  Description of Artificial Sequence: Synthetic oligonucleotide
  Antisense strand to SEQ ID NO: 2492246
cucuuggguaaagacuucc

SEQ ID NO: 2492248 - RNA, 19 nt, Artificial Sequence
  Description of Artificial Sequence: Synthetic oligonucleotide
  Sense strand starting at position 405 of SEQ ID NO: 1887724
gcuacucugugacacugaa

SEQ ID NO: 2492249 - RNA, 19 nt, Artificial Sequence
  Description of Artificial Sequence: Synthetic oligonucleotide
  Antisense strand to SEQ ID NO: 2492248
uucagugucacagaguagc

SEQ ID NO: 2492250 - RNA, 19 nt, Artificial Sequence
  Description of Artificial Sequence: Synthetic oligonucleotide
  Sense strand starting at position 446 of SEQ ID NO: 1887724
ccuguuuccucgcaagcca

SEQ ID NO: 2492251 - RNA, 19 nt, Artificial Sequence
  Description of Artificial Sequence: Synthetic oligonucleotide
  Antisense strand to SEQ ID NO: 2492250
uggcuugcgaggaaacagg

SEQ ID NO: 2492252 - RNA, 19 nt, Artificial Sequence
  Description of Artificial Sequence: Synthetic oligonucleotide
  Sense strand starting at position 476 of SEQ ID NO: 1887724
ggacgauuccuccacucca

SEQ ID NO: 2492253 - RNA, 19 nt, Artificial Sequence
  Description of Artificial Sequence: Synthetic oligonucleotide
  Antisense strand to SEQ ID NO: 2492252
uggaguggaggaaucgucc

SEQ ID NO: 2492254 - RNA, 19 nt, Artificial Sequence
  Description of Artificial Sequence: Synthetic oligonucleotide
  Sense strand starting at position 861 of SEQ ID NO: 1887724
gagggugugagcuacagau

SEQ ID NO: 2492255 - RNA, 19 nt, Artificial Sequence
  Description of Artificial Sequence: Synthetic oligonucleotide
  Antisense strand to SEQ ID NO: 2492254
aucuguagcucacacccuc

SEQ ID NO: 2492256 - RNA, 19 nt, Artificial Sequence
  Description of Artificial Sequence: Synthetic oligonucleotide
  Sense strand starting at position 1092 of SEQ ID NO: 1887724
cuuccagaguccuccagau

SEQ ID NO: 2492257 - RNA, 19 nt, Artificial Sequence
  Description of Artificial Sequence: Synthetic oligonucleotide
  Antisense strand to SEQ ID NO: 2492256
aucuggaggacucuggaag

SEQ ID NO: 2492258 - RNA, 19 nt, Artificial Sequence
  Description of Artificial Sequence: Synthetic oligonucleotide
  Sense strand starting at position 1094 of SEQ ID NO: 1887724
uccagaguccuccagauca

SEQ ID NO: 2492259 - RNA, 19 nt, Artificial Sequence
  Description of Artificial Sequence: Synthetic oligonucleotide
  Antisense strand to SEQ ID NO: 2492258
ugaucuggaggacucugga

SEQ ID NO: 2492260 - RNA, 19 nt, Artificial Sequence
  Description of Artificial Sequence: Synthetic oligonucleotide
  Sense strand starting at position 1436 of SEQ ID NO: 1887724
ccauuugggcugugccaau

SEQ ID NO: 2492261 - RNA, 19 nt, Artificial Sequence
  Description of Artificial Sequence: Synthetic oligonucleotide
  Antisense strand to SEQ ID NO: 2492260
auuggcacagcccaaaugg

SEQ ID NO: 2492262 - RNA, 19 nt, Artificial Sequence
  Description of Artificial Sequence: Synthetic oligonucleotide
  Sense strand starting at position 1667 of SEQ ID NO: 1887724
ggccgaaugcuugagggua

SEQ ID NO: 2492263 - RNA, 19 nt, Artificial Sequence
  Description of Artificial Sequence: Synthetic oligonucleotide
  Antisense strand to SEQ ID NO: 2492262
uacccucaagcauucggcc

SEQ ID NO: 2492264 - RNA, 19 nt, Artificial Sequence
  Description of Artificial Sequence: Synthetic oligonucleotide
  Sense strand starting at position 1668 of SEQ ID NO: 1887724
gccgaaugcuugaggguag

SEQ ID NO: 2492265 - RNA, 19 nt, Artificial Sequence
  Description of Artificial Sequence: Synthetic oligonucleotide
  Antisense strand to SEQ ID NO: 2492264
cuacccucaagcauucggc

SEQ ID NO: 2492266 - RNA, 19 nt, Artificial Sequence
  Description of Artificial Sequence: Synthetic oligonucleotide
  Sense strand starting at position 2240 of SEQ ID NO: 1887724
ccaggcugguuaugagauu

SEQ ID NO: 2492267 - RNA, 19 nt, Artificial Sequence
  Description of Artificial Sequence: Synthetic oligonucleotide
  Antisense strand to SEQ ID NO: 2492266
aaucucauaaccagccugg

SEQ ID NO: 2492268 - RNA, 19 nt, Artificial Sequence
  Description of Artificial Sequence: Synthetic oligonucleotide
  Sense strand starting at position 2331 of SEQ ID NO: 1887724
uuuccuuaaccuuggcaga

SEQ ID NO: 2492269 - RNA, 19 nt, Artificial Sequence
  Description of Artificial Sequence: Synthetic oligonucleotide
  Antisense strand to SEQ ID NO: 2492268
ucugccaagguuaaggaaa

SEQ ID NO: 2492270 - RNA, 19 nt, Artificial Sequence
  Description of Artificial Sequence: Synthetic oligonucleotide
  Sense strand starting at position 2332 of SEQ ID NO: 1887724
uuccuuaaccuuggcagaa

SEQ ID NO: 2492271 - RNA, 19 nt, Artificial Sequence
  Description of Artificial Sequence: Synthetic oligonucleotide
  Antisense strand to SEQ ID NO: 2492270
uucugccaagguuaaggaa

SEQ ID NO: 2492272 - RNA, 19 nt, Artificial Sequence
  Description of Artificial Sequence: Synthetic oligonucleotide
  Sense strand starting at position 2345 of SEQ ID NO: 1887724
gcagaauaauccuguuaua

SEQ ID NO: 2492273 - RNA, 19 nt, Artificial Sequence
  Description of Artificial Sequence: Synthetic oligonucleotide
  Antisense strand to SEQ ID NO: 2492272
uauaacaggauuauucugc

SEQ ID NO: 2492274 - RNA, 19 nt, Artificial Sequence
  Description of Artificial Sequence: Synthetic oligonucleotide
  Sense strand starting at position 2965 of SEQ ID NO: 1887724
cccggcuaauccuguuaca

SEQ ID NO: 2492275 - RNA, 19 nt, Artificial Sequence
  Description of Artificial Sequence: Synthetic oligonucleotide
  Antisense strand to SEQ ID NO: 2492274
uguaacaggauuagccggg

SEQ ID NO: 2492276 - RNA, 19 nt, Artificial Sequence
  Description of Artificial Sequence: Synthetic oligonucleotide
  Sense strand starting at position 2968 of SEQ ID NO: 1887724
ggcuaauccuguuacaucu

SEQ ID NO: 2492277 - RNA, 19 nt, Artificial Sequence
  Description of Artificial Sequence: Synthetic oligonucleotide
  Antisense strand to SEQ ID NO: 2492276
agauguaacaggauuagcc

SEQ ID NO: 2492278 - RNA, 19 nt, Artificial Sequence
  Description of Artificial Sequence: Synthetic oligonucleotide
  Sense strand starting at position 3588 of SEQ ID NO: 1887724
ggauaauuaugucccaucu

SEQ ID NO: 2492279 - RNA, 19 nt, Artificial Sequence
  Description of Artificial Sequence: Synthetic oligonucleotide
  Antisense strand to SEQ ID NO: 2492278
agaugggacauaauuaucc

SEQ ID NO: 2492280 - RNA, 19 nt, Artificial Sequence
  Description of Artificial Sequence: Synthetic oligonucleotide
  Sense strand starting at position 3600 of SEQ ID NO: 1887724
cccaucuuuggcugcuaua

SEQ ID NO: 2492281 - RNA, 19 nt, Artificial Sequence
  Description of Artificial Sequence: Synthetic oligonucleotide
  Antisense strand to SEQ ID NO: 2492280
uauagcagccaaagauggg

SEQ ID NO: 2492282 - RNA, 19 nt, Artificial Sequence
  Description of Artificial Sequence: Synthetic oligonucleotide
  Sense strand starting at position 3643 of SEQ ID NO: 1887724
uguauaagcucacuuugca

SEQ ID NO: 2492283 - RNA, 19 nt, Artificial Sequence
  Description of Artificial Sequence: Synthetic oligonucleotide
  Antisense strand to SEQ ID NO: 2492282
ugcaaagugagcuuauaca

SEQ ID NO: 2492284 - RNA, 19 nt, Artificial Sequence
  Description of Artificial Sequence: Synthetic oligonucleotide
  Sense strand starting at position 3665 of SEQ ID NO: 1887724
gggcaauugucucucuuag

SEQ ID NO: 2492285 - RNA, 19 nt, Artificial Sequence
  Description of Artificial Sequence: Synthetic oligonucleotide
  Antisense strand to SEQ ID NO: 2492284
cuaagagagacaauugccc

SEQ ID NO: 2492286 - RNA, 19 nt, Artificial Sequence
  Description of Artificial Sequence: Synthetic oligonucleotide
  Sense strand starting at position 3667 of SEQ ID NO: 1887724
gcaauugucucucuuagag

SEQ ID NO: 2492287 - RNA, 19 nt, Artificial Sequence
  Description of Artificial Sequence: Synthetic oligonucleotide
  Antisense strand to SEQ ID NO: 2492286
cucuaagagagacaauugc

SEQ ID NO: 2492288 - RNA, 19 nt, Artificial Sequence
  Description of Artificial Sequence: Synthetic oligonucleotide
  Sense strand starting at position 3671 of SEQ ID NO: 1887724
uugucucucuuagagaagu

SEQ ID NO: 2492289 - RNA, 19 nt, Artificial Sequence
  Description of Artificial Sequence: Synthetic oligonucleotide
  Antisense strand to SEQ ID NO: 2492288
acuucucuaagagagacaa

SEQ ID NO: 2492290 - RNA, 19 nt, Artificial Sequence
  Description of Artificial Sequence: Synthetic oligonucleotide
  Sense strand starting at position 3698 of SEQ ID NO: 1887724
guaaacuugcagggucaaa

SEQ ID NO: 2492291 - RNA, 19 nt, Artificial Sequence
  Description of Artificial Sequence: Synthetic oligonucleotide
  Antisense strand to SEQ ID NO: 2492290
uuugacccugcaaguuuac

SEQ ID NO: 2492292 - RNA, 19 nt, Artificial Sequence
  Description of Artificial Sequence: Synthetic oligonucleotide
  Sense strand starting at position 3742 of SEQ ID NO: 1887724
gcagaagaaccguauaugu

SEQ ID NO: 2492293 - RNA, 19 nt, Artificial Sequence
  Description of Artificial Sequence: Synthetic oligonucleotide
  Antisense strand to SEQ ID NO: 2492292
acauauacgguucuucugc

SEQ ID NO: 2492294 - RNA, 19 nt, Artificial Sequence
  Description of Artificial Sequence: Synthetic oligonucleotide
  Sense strand starting at position 3744 of SEQ ID NO: 1887724
agaagaaccguauaugucu

SEQ ID NO: 2492295 - RNA, 19 nt, Artificial Sequence
  Description of Artificial Sequence: Synthetic oligonucleotide
  Antisense strand to SEQ ID NO: 2492294
agacauauacgguucuucu

SEQ ID NO: 2492296 - RNA, 19 nt, Artificial Sequence
  Description of Artificial Sequence: Synthetic oligonucleotide
  Sense strand starting at position 3749 of SEQ ID NO: 1887724
aaccguauaugucuccgau

SEQ ID NO: 2492297 - RNA, 19 nt, Artificial Sequence
  Description of Artificial Sequence: Synthetic oligonucleotide
  Antisense strand to SEQ ID NO: 2492296
aucggagacauauacgguu

SEQ ID NO: 2492298 - RNA, 19 nt, Artificial Sequence
  Description of Artificial Sequence: Synthetic oligonucleotide
  Sense strand starting at position 3752 of SEQ ID NO: 1887724
cguauaugucuccgauccu

SEQ ID NO: 2492299 - RNA, 19 nt, Artificial Sequence
  Description of Artificial Sequence: Synthetic oligonucleotide
  Antisense strand to SEQ ID NO: 2492298
aggaucggagacauauacg

SEQ ID NO: 2492300 - RNA, 19 nt, Artificial Sequence
  Description of Artificial Sequence: Synthetic oligonucleotide
  Sense strand starting at position 3753 of SEQ ID NO: 1887724
guauaugucuccgauccua

SEQ ID NO: 2492301 - RNA, 19 nt, Artificial Sequence
  Description of Artificial Sequence: Synthetic oligonucleotide
  Antisense strand to SEQ ID NO: 2492300
uaggaucggagacauauac

SEQ ID NO: 2492302 - RNA, 19 nt, Artificial Sequence
  Description of Artificial Sequence: Synthetic oligonucleotide
  Sense strand starting at position 3761 of SEQ ID NO: 1887724
cuccgauccuaucgguaua

SEQ ID NO: 2492303 - RNA, 19 nt, Artificial Sequence
  Description of Artificial Sequence: Synthetic oligonucleotide
  Antisense strand to SEQ ID NO: 2492302
uauaccgauaggaucggag

SEQ ID NO: 2492304 - RNA, 19 nt, Artificial Sequence
  Description of Artificial Sequence: Synthetic oligonucleotide
  Sense strand starting at position 3762 of SEQ ID NO: 1887724
uccgauccuaucgguauau

SEQ ID NO: 2492305 - RNA, 19 nt, Artificial Sequence
  Description of Artificial Sequence: Synthetic oligonucleotide
  Antisense strand to SEQ ID NO: 2492304
auauaccgauaggaucgga

SEQ ID NO: 2492306 - RNA, 19 nt, Artificial Sequence
  Description of Artificial Sequence: Synthetic oligonucleotide
  Sense strand starting at position 3764 of SEQ ID NO: 1887724
cgauccuaucgguauauga

SEQ ID NO: 2492307 - RNA, 19 nt, Artificial Sequence
  Description of Artificial Sequence: Synthetic oligonucleotide
  Antisense strand to SEQ ID NO: 2492306
ucauauaccgauaggaucg

SEQ ID NO: 2492308 - RNA, 19 nt, Artificial Sequence
  Description of Artificial Sequence: Synthetic oligonucleotide
  Sense strand starting at position 3768 of SEQ ID NO: 1887724
ccuaucgguauaugaggaa

SEQ ID NO: 2492309 - RNA, 19 nt, Artificial Sequence
  Description of Artificial Sequence: Synthetic oligonucleotide
  Antisense strand to SEQ ID NO: 2492308
uuccucauauaccgauagg

SEQ ID NO: 2492310 - RNA, 19 nt, Artificial Sequence
  Description of Artificial Sequence: Synthetic oligonucleotide
  Sense strand starting at position 3771 of SEQ ID NO: 1887724
aucgguauaugaggaaaca

SEQ ID NO: 2492311 - RNA, 19 nt, Artificial Sequence
  Description of Artificial Sequence: Synthetic oligonucleotide
  Antisense strand to SEQ ID NO: 2492310
uguuuccucauauaccgau

SEQ ID NO: 2492312 - RNA, 19 nt, Artificial Sequence
  Description of Artificial Sequence: Synthetic oligonucleotide
  Sense strand starting at position 3800 of SEQ ID NO: 1887724
ccaugaaacugugaacacu

SEQ ID NO: 2492313 - RNA, 19 nt, Artificial Sequence
  Description of Artificial Sequence: Synthetic oligonucleotide
  Antisense strand to SEQ ID NO: 2492312
aguguucacaguuucaugg

SEQ ID NO: 2492314 - RNA, 19 nt, Artificial Sequence
  Description of Artificial Sequence: Synthetic oligonucleotide
  Sense strand starting at position 3816 of SEQ ID NO: 1887724
acugaucacuacugagaau

SEQ ID NO: 2492315 - RNA, 19 nt, Artificial Sequence
  Description of Artificial Sequence: Synthetic oligonucleotide
  Antisense strand to SEQ ID NO: 2492314
auucucaguagugaucagu

SEQ ID NO: 2492316 - RNA, 19 nt, Artificial Sequence
  Description of Artificial Sequence: Synthetic oligonucleotide
  Sense strand starting at position 3941 of SEQ ID NO: 1887724
gagugauccuccugccaag

SEQ ID NO: 2492317 - RNA, 19 nt, Artificial Sequence
  Description of Artificial Sequence: Synthetic oligonucleotide
  Antisense strand to SEQ ID NO: 2492316
cuuggcaggaggaucacuc

SEQ ID NO: 2492318 - RNA, 19 nt, Artificial Sequence
  Description of Artificial Sequence: Synthetic oligonucleotide
  Sense strand starting at position 222 of SEQ ID NO: 1887725
gaguguguaauggguguga

SEQ ID NO: 2492319 - RNA, 19 nt, Artificial Sequence
  Description of Artificial Sequence: Synthetic oligonucleotide
  Antisense strand to SEQ ID NO: 2492318
ucacacccauuacacacuc

SEQ ID NO: 2492320 - RNA, 19 nt, Artificial Sequence
  Description of Artificial Sequence: Synthetic oligonucleotide
  Sense strand starting at position 226 of SEQ ID NO: 1887725
guguaaugggugugagguu

SEQ ID NO: 2492321 - RNA, 19 nt, Artificial Sequence
  Description of Artificial Sequence: Synthetic oligonucleotide
  Antisense strand to SEQ ID NO: 2492320
aaccucacacccauuacac

SEQ ID NO: 2492322 - RNA, 19 nt, Artificial Sequence
  Description of Artificial Sequence: Synthetic oligonucleotide
  Sense strand starting at position 292 of SEQ ID NO: 1887725
gcuguacagcauggugaau

SEQ ID NO: 2492323 - RNA, 19 nt, Artificial Sequence
  Description of Artificial Sequence: Synthetic oligonucleotide
  Antisense strand to SEQ ID NO: 2492322
auucaccaugcuguacagc

SEQ ID NO: 2492324 - RNA, 19 nt, Artificial Sequence
  Description of Artificial Sequence: Synthetic oligonucleotide
  Sense strand starting at position 294 of SEQ ID NO: 1887725
uguacagcauggugaauua

SEQ ID NO: 2492325 - RNA, 19 nt, Artificial Sequence
  Description of Artificial Sequence: Synthetic oligonucleotide
  Antisense strand to SEQ ID NO: 2492324
uaauucaccaugcuguaca

SEQ ID NO: 2492326 - RNA, 19 nt, Artificial Sequence
  Description of Artificial Sequence: Synthetic oligonucleotide
  Sense strand starting at position 309 of SEQ ID NO: 1887725
auuacuaaaugcugcagaa

SEQ ID NO: 2492327 - RNA, 19 nt, Artificial Sequence
  Description of Artificial Sequence: Synthetic oligonucleotide
  Antisense strand to SEQ ID NO: 2492326
uucugcagcauuuaguaau

SEQ ID NO: 2492328 - RNA, 19 nt, Artificial Sequence
  Description of Artificial Sequence: Synthetic oligonucleotide
  Sense strand starting at position 319 of SEQ ID NO: 1887725
gcugcagaauuguuuauuu

SEQ ID NO: 2492329 - RNA, 19 nt, Artificial Sequence
  Description of Artificial Sequence: Synthetic oligonucleotide
  Antisense strand to SEQ ID NO: 2492328
aaauaaacaauucugcagc

SEQ ID NO: 2492330 - RNA, 19 nt, Artificial Sequence
  Description of Artificial Sequence: Synthetic oligonucleotide
  Sense strand starting at position 1127 of SEQ ID NO: 1887725
gccgggugugguguuacau

SEQ ID NO: 2492331 - RNA, 19 nt, Artificial Sequence
  Description of Artificial Sequence: Synthetic oligonucleotide
  Antisense strand to SEQ ID NO: 2492330
auguaacaccacacccggc

SEQ ID NO: 2492332 - RNA, 19 nt, Artificial Sequence
  Description of Artificial Sequence: Synthetic oligonucleotide
  Sense strand starting at position 1858 of SEQ ID NO: 1887725
agccuuaccucagagagau

SEQ ID NO: 2492333 - RNA, 19 nt, Artificial Sequence
  Description of Artificial Sequence: Synthetic oligonucleotide
  Antisense strand to SEQ ID NO: 2492332
aucucucugagguaaggcu

SEQ ID NO: 2492334 - RNA, 19 nt, Artificial Sequence
  Description of Artificial Sequence: Synthetic oligonucleotide
  Sense strand starting at position 2137 of SEQ ID NO: 1887725
gguugaauuccugaggcag

SEQ ID NO: 2492335 - RNA, 19 nt, Artificial Sequence
  Description of Artificial Sequence: Synthetic oligonucleotide
  Antisense strand to SEQ ID NO: 2492334
cugccucaggaauucaacc

SEQ ID NO: 2492336 - RNA, 19 nt, Artificial Sequence
  Description of Artificial Sequence: Synthetic oligonucleotide
  Sense strand starting at position 2413 of SEQ ID NO: 1887725
cugcuacugucccaucuua

SEQ ID NO: 2492337 - RNA, 19 nt, Artificial Sequence
  Description of Artificial Sequence: Synthetic oligonucleotide
  Antisense strand to SEQ ID NO: 2492336
uaagaugggacaguagcag

SEQ ID NO: 2492338 - RNA, 19 nt, Artificial Sequence
  Description of Artificial Sequence: Synthetic oligonucleotide
  Sense strand starting at position 3058 of SEQ ID NO: 1887725
ggcagaggagggugaauua

SEQ ID NO: 2492339 - RNA, 19 nt, Artificial Sequence
  Description of Artificial Sequence: Synthetic oligonucleotide
  Antisense strand to SEQ ID NO: 2492338
uaauucacccuccucugcc

SEQ ID NO: 2492340 - RNA, 19 nt, Artificial Sequence
  Description of Artificial Sequence: Synthetic oligonucleotide
  Sense strand starting at position 3154 of SEQ ID NO: 1887725
gguauagugccacacacuu

SEQ ID NO: 2492341 - RNA, 19 nt, Artificial Sequence
  Description of Artificial Sequence: Synthetic oligonucleotide
  Antisense strand to SEQ ID NO: 2492340
aaguguguggcacuauacc

SEQ ID NO: 2492342 - RNA, 19 nt, Artificial Sequence
  Description of Artificial Sequence: Synthetic oligonucleotide
  Sense strand starting at position 3565 of SEQ ID NO: 1887725
ggcugugccuagccauauu

SEQ ID NO: 2492343 - RNA, 19 nt, Artificial Sequence
  Description of Artificial Sequence: Synthetic oligonucleotide
  Antisense strand to SEQ ID NO: 2492342
aauauggcuaggcacagcc

SEQ ID NO: 2492344 - RNA, 19 nt, Artificial Sequence
  Description of Artificial Sequence: Synthetic oligonucleotide
  Sense strand starting at position 3568 of SEQ ID NO: 1887725
ugugccuagccauauugua

SEQ ID NO: 2492345 - RNA, 19 nt, Artificial Sequence
  Description of Artificial Sequence: Synthetic oligonucleotide
  Antisense strand to SEQ ID NO: 2492344
uacaauauggcuaggcaca

SEQ ID NO: 2492346 - RNA, 19 nt, Artificial Sequence
  Description of Artificial Sequence: Synthetic oligonucleotide
  Sense strand starting at position 3719 of SEQ ID NO: 1887725
cacauucuggcuugguuau

SEQ ID NO: 2492347 - RNA, 19 nt, Artificial Sequence
  Description of Artificial Sequence: Synthetic oligonucleotide
  Antisense strand to SEQ ID NO: 2492346
auaaccaagccagaaugug

SEQ ID NO: 2492348 - RNA, 19 nt, Artificial Sequence
  Description of Artificial Sequence: Synthetic oligonucleotide
  Sense strand starting at position 3720 of SEQ ID NO: 1887725
acauucuggcuugguuaua

SEQ ID NO: 2492349 - RNA, 19 nt, Artificial Sequence
  Description of Artificial Sequence: Synthetic oligonucleotide
  Antisense strand to SEQ ID NO: 2492348
uauaaccaagccagaaugu

SEQ ID NO: 2492350 - RNA, 19 nt, Artificial Sequence
  Description of Artificial Sequence: Synthetic oligonucleotide
  Sense strand starting at position 3721 of SEQ ID NO: 1887725
cauucuggcuugguuauaa

SEQ ID NO: 2492351 - RNA, 19 nt, Artificial Sequence
  Description of Artificial Sequence: Synthetic oligonucleotide
  Antisense strand to SEQ ID NO: 2492350
uuauaaccaagccagaaug

SEQ ID NO: 2492352 - RNA, 19 nt, Artificial Sequence
  Description of Artificial Sequence: Synthetic oligonucleotide
  Sense strand starting at position 3725 of SEQ ID NO: 1887725
cuggcuugguuauaaauaa

SEQ ID NO: 2492353 - RNA, 19 nt, Artificial Sequence
  Description of Artificial Sequence: Synthetic oligonucleotide
  Antisense strand to SEQ ID NO: 2492352
uuauuuauaaccaagccag

SEQ ID NO: 2492354 - RNA, 19 nt, Artificial Sequence
  Description of Artificial Sequence: Synthetic oligonucleotide
  Sense strand starting at position 3879 of SEQ ID NO: 1887725
ggucuuuguuuguuugacu

SEQ ID NO: 2492355 - RNA, 19 nt, Artificial Sequence
  Description of Artificial Sequence: Synthetic oligonucleotide
  Antisense strand to SEQ ID NO: 2492354
agucaaacaaacaaagacc

SEQ ID NO: 2492356 - RNA, 19 nt, Artificial Sequence
  Description of Artificial Sequence: Synthetic oligonucleotide
  Sense strand starting at position 3880 of SEQ ID NO: 1887725
gucuuuguuuguuugacuu

SEQ ID NO: 2492357 - RNA, 19 nt, Artificial Sequence
  Description of Artificial Sequence: Synthetic oligonucleotide
  Antisense strand to SEQ ID NO: 2492356
aagucaaacaaacaaagac

SEQ ID NO: 2492358 - RNA, 19 nt, Artificial Sequence
  Description of Artificial Sequence: Synthetic oligonucleotide
  Sense strand starting at position 209 of SEQ ID NO: 1887726
cgaaguugucguagaggca

SEQ ID NO: 2492359 - RNA, 19 nt, Artificial Sequence
  Description of Artificial Sequence: Synthetic oligonucleotide
  Antisense strand to SEQ ID NO: 2492358
ugccucuacgacaacuucg

SEQ ID NO: 2492360 - RNA, 19 nt, Artificial Sequence
  Description of Artificial Sequence: Synthetic oligonucleotide
  Sense strand starting at position 1675 of SEQ ID NO: 1887726
cugagaagccagcaugaca

SEQ ID NO: 2492361 - RNA, 19 nt, Artificial Sequence
  Description of Artificial Sequence: Synthetic oligonucleotide
  Antisense strand to SEQ ID NO: 2492360
ugucaugcuggcuucucag

SEQ ID NO: 2492362 - RNA, 19 nt, Artificial Sequence
  Description of Artificial Sequence: Synthetic oligonucleotide
  Sense strand starting at position 1759 of SEQ ID NO: 1887726
cugagcgacacucauugau

SEQ ID NO: 2492363 - RNA, 19 nt, Artificial Sequence
  Description of Artificial Sequence: Synthetic oligonucleotide
  Antisense strand to SEQ ID NO: 2492362
aucaaugagugucgcucag

SEQ ID NO: 2492364 - RNA, 19 nt, Artificial Sequence
  Description of Artificial Sequence: Synthetic oligonucleotide
  Sense strand starting at position 1761 of SEQ ID NO: 1887726
gagcgacacucauugaugu

SEQ ID NO: 2492365 - RNA, 19 nt, Artificial Sequence
  Description of Artificial Sequence: Synthetic oligonucleotide
  Antisense strand to SEQ ID NO: 2492364
acaucaaugagugucgcuc

SEQ ID NO: 2492366 - RNA, 19 nt, Artificial Sequence
  Description of Artificial Sequence: Synthetic oligonucleotide
  Sense strand starting at position 1771 of SEQ ID NO: 1887726
cauugaugucugccucgca

SEQ ID NO: 2492367 - RNA, 19 nt, Artificial Sequence
  Description of Artificial Sequence: Synthetic oligonucleotide
  Antisense strand to SEQ ID NO: 2492366
ugcgaggcagacaucaaug

SEQ ID NO: 2492368 - RNA, 19 nt, Artificial Sequence
  Description of Artificial Sequence: Synthetic oligonucleotide
  Sense strand starting at position 1897 of SEQ ID NO: 1887726
ggccgcagucauccucauu

SEQ ID NO: 2492369 - RNA, 19 nt, Artificial Sequence
  Description of Artificial Sequence: Synthetic oligonucleotide
  Antisense strand to SEQ ID NO: 2492368
aaugaggaugacugcggcc

SEQ ID NO: 2492370 - RNA, 19 nt, Artificial Sequence
  Description of Artificial Sequence: Synthetic oligonucleotide
  Sense strand starting at position 1900 of SEQ ID NO: 1887726
cgcagucauccucauuaau

SEQ ID NO: 2492371 - RNA, 19 nt, Artificial Sequence
  Description of Artificial Sequence: Synthetic oligonucleotide
  Antisense strand to SEQ ID NO: 2492370
auuaaugaggaugacugcg

SEQ ID NO: 2492372 - RNA, 19 nt, Artificial Sequence
  Description of Artificial Sequence: Synthetic oligonucleotide
  Sense strand starting at position 1909 of SEQ ID NO: 1887726
ccucauuaaucucgcagag

SEQ ID NO: 2492373 - RNA, 19 nt, Artificial Sequence
  Description of Artificial Sequence: Synthetic oligonucleotide
  Antisense strand to SEQ ID NO: 2492372
cucugcgagauuaaugagg

SEQ ID NO: 2492374 - RNA, 19 nt, Artificial Sequence
  Description of Artificial Sequence: Synthetic oligonucleotide
  Sense strand starting at position 1911 of SEQ ID NO: 1887726
ucauuaaucucgcagagca

SEQ ID NO: 2492375 - RNA, 19 nt, Artificial Sequence
  Description of Artificial Sequence: Synthetic oligonucleotide
  Antisense strand to SEQ ID NO: 2492374
ugcucugcgagauuaauga

SEQ ID NO: 2492376 - RNA, 19 nt, Artificial Sequence
  Description of Artificial Sequence: Synthetic oligonucleotide
  Sense strand starting at position 2050 of SEQ ID NO: 1887726
ccacgaggucaaugcauga

SEQ ID NO: 2492377 - RNA, 19 nt, Artificial Sequence
  Description of Artificial Sequence: Synthetic oligonucleotide
  Antisense strand to SEQ ID NO: 2492376
ucaugcauugaccucgugg

SEQ ID NO: 2492378 - RNA, 19 nt, Artificial Sequence
  Description of Artificial Sequence: Synthetic oligonucleotide
  Sense strand starting at position 2418 of SEQ ID NO: 1887726
gcuauaaugagaggcugaa

SEQ ID NO: 2492379 - RNA, 19 nt, Artificial Sequence
  Description of Artificial Sequence: Synthetic oligonucleotide
  Antisense strand to SEQ ID NO: 2492378
uucagccucucauuauagc

SEQ ID NO: 2492380 - RNA, 19 nt, Artificial Sequence
  Description of Artificial Sequence: Synthetic oligonucleotide
  Sense strand starting at position 2981 of SEQ ID NO: 1887726
ucaacauccuugguggaau

SEQ ID NO: 2492381 - RNA, 19 nt, Artificial Sequence
  Description of Artificial Sequence: Synthetic oligonucleotide
  Antisense strand to SEQ ID NO: 2492380
auuccaccaaggauguuga

SEQ ID NO: 2492382 - RNA, 19 nt, Artificial Sequence
  Description of Artificial Sequence: Synthetic oligonucleotide
  Sense strand starting at position 3022 of SEQ ID NO: 1887726
acuccaucagguugucaca

SEQ ID NO: 2492383 - RNA, 19 nt, Artificial Sequence
  Description of Artificial Sequence: Synthetic oligonucleotide
  Antisense strand to SEQ ID NO: 2492382
ugugacaaccugauggagu

SEQ ID NO: 2492384 - RNA, 19 nt, Artificial Sequence
  Description of Artificial Sequence: Synthetic oligonucleotide
  Sense strand starting at position 3025 of SEQ ID NO: 1887726
ccaucagguugucacacau

SEQ ID NO: 2492385 - RNA, 19 nt, Artificial Sequence
  Description of Artificial Sequence: Synthetic oligonucleotide
  Antisense strand to SEQ ID NO: 2492384
augugugacaaccugaugg

SEQ ID NO: 2492386 - RNA, 19 nt, Artificial Sequence
  Description of Artificial Sequence: Synthetic oligonucleotide
  Sense strand starting at position 3052 of SEQ ID NO: 1887726
caggcaaggucucaucacu

SEQ ID NO: 2492387 - RNA, 19 nt, Artificial Sequence
  Description of Artificial Sequence: Synthetic oligonucleotide
  Antisense strand to SEQ ID NO: 2492386
agugaugagaccuugccug

SEQ ID NO: 2492388 - RNA, 19 nt, Artificial Sequence
  Description of Artificial Sequence: Synthetic oligonucleotide
  Sense strand starting at position 3058 of SEQ ID NO: 1887726
aggucucaucacugacaua

SEQ ID NO: 2492389 - RNA, 19 nt, Artificial Sequence
  Description of Artificial Sequence: Synthetic oligonucleotide
  Antisense strand to SEQ ID NO: 2492388
uaugucagugaugagaccu

SEQ ID NO: 2492390 - RNA, 19 nt, Artificial Sequence
  Description of Artificial Sequence: Synthetic oligonucleotide
  Sense strand starting at position 3140 of SEQ ID NO: 1887726
gcugucucacagugacaga

SEQ ID NO: 2492391 - RNA, 19 nt, Artificial Sequence
  Description of Artificial Sequence: Synthetic oligonucleotide
  Antisense strand to SEQ ID NO: 2492390
ucugucacugugagacagc

SEQ ID NO: 2492392 - RNA, 19 nt, Artificial Sequence
  Description of Artificial Sequence: Synthetic oligonucleotide
  Sense strand starting at position 3356 of SEQ ID NO: 1887726
gggcaagcuucggauguca

SEQ ID NO: 2492393 - RNA, 19 nt, Artificial Sequence
  Description of Artificial Sequence: Synthetic oligonucleotide
  Antisense strand to SEQ ID NO: 2492392
ugacauccgaagcuugccc

SEQ ID NO: 2492394 - RNA, 19 nt, Artificial Sequence
  Description of Artificial Sequence: Synthetic oligonucleotide
  Sense strand starting at position 3358 of SEQ ID NO: 1887726
gcaagcuucggaugucaca

SEQ ID NO: 2492395 - RNA, 19 nt, Artificial Sequence
  Description of Artificial Sequence: Synthetic oligonucleotide
  Antisense strand to SEQ ID NO: 2492394
ugugacauccgaagcuugc

SEQ ID NO: 2492396 - RNA, 19 nt, Artificial Sequence
  Description of Artificial Sequence: Synthetic oligonucleotide
  Sense strand starting at position 3625 of SEQ ID NO: 1887726
ccgugaagcucucgaggca

SEQ ID NO: 2492397 - RNA, 19 nt, Artificial Sequence
  Description of Artificial Sequence: Synthetic oligonucleotide
  Antisense strand to SEQ ID NO: 2492396
ugccucgagagcuucacgg

SEQ ID NO: 2492398 - RNA, 19 nt, Artificial Sequence
  Description of Artificial Sequence: Synthetic oligonucleotide
  Sense strand starting at position 3915 of SEQ ID NO: 1887726
gacccuuaucucggcaaga

SEQ ID NO: 2492399 - RNA, 19 nt, Artificial Sequence
  Description of Artificial Sequence: Synthetic oligonucleotide
  Antisense strand to SEQ ID NO: 2492398
ucuugccgagauaaggguc

SEQ ID NO: 2492400 - RNA, 19 nt, Artificial Sequence
  Description of Artificial Sequence: Synthetic oligonucleotide
  Sense strand starting at position 3916 of SEQ ID NO: 1887726
acccuuaucucggcaagaa

SEQ ID NO: 2492401 - RNA, 19 nt, Artificial Sequence
  Description of Artificial Sequence: Synthetic oligonucleotide
  Antisense strand to SEQ ID NO: 2492400
uucuugccgagauaagggu

SEQ ID NO: 2492402 - RNA, 19 nt, Artificial Sequence
  Description of Artificial Sequence: Synthetic oligonucleotide
  Sense strand starting at position 3917 of SEQ ID NO: 1887726
cccuuaucucggcaagaag

SEQ ID NO: 2492403 - RNA, 19 nt, Artificial Sequence
  Description of Artificial Sequence: Synthetic oligonucleotide
  Antisense strand to SEQ ID NO: 2492402
cuucuugccgagauaaggg

SEQ ID NO: 2492404 - RNA, 19 nt, Artificial Sequence
  Description of Artificial Sequence: Synthetic oligonucleotide
  Sense strand starting at position 207 of SEQ ID NO: 1887727
cggccuagugcucacagau

SEQ ID NO: 2492405 - RNA, 19 nt, Artificial Sequence
  Description of Artificial Sequence: Synthetic oligonucleotide
  Antisense strand to SEQ ID NO: 2492404
aucugugagcacuaggccg

SEQ ID NO: 2492406 - RNA, 19 nt, Artificial Sequence
  Description of Artificial Sequence: Synthetic oligonucleotide
  Sense strand starting at position 300 of SEQ ID NO: 1887727
gcuaaaguccuagaaugau

SEQ ID NO: 2492407 - RNA, 19 nt, Artificial Sequence
  Description of Artificial Sequence: Synthetic oligonucleotide
  Antisense strand to SEQ ID NO: 2492406
aucauucuaggacuuuagc

SEQ ID NO: 2492408 - RNA, 19 nt, Artificial Sequence
  Description of Artificial Sequence: Synthetic oligonucleotide
  Sense strand starting at position 306 of SEQ ID NO: 1887727
guccuagaaugauuaucaa

SEQ ID NO: 2492409 - RNA, 19 nt, Artificial Sequence
  Description of Artificial Sequence: Synthetic oligonucleotide
  Antisense strand to SEQ ID NO: 2492408
uugauaaucauucuaggac

SEQ ID NO: 2492410 - RNA, 19 nt, Artificial Sequence
  Description of Artificial Sequence: Synthetic oligonucleotide
  Sense strand starting at position 367 of SEQ ID NO: 1887727
uccugaacguuugcaaucu

SEQ ID NO: 2492411 - RNA, 19 nt, Artificial Sequence
  Description of Artificial Sequence: Synthetic oligonucleotide
  Antisense strand to SEQ ID NO: 2492410
agauugcaaacguucagga

SEQ ID NO: 2492412 - RNA, 19 nt, Artificial Sequence
  Description of Artificial Sequence: Synthetic oligonucleotide
  Sense strand starting at position 507 of SEQ ID NO: 1887727
cucacagucccuugggauu

SEQ ID NO: 2492413 - RNA, 19 nt, Artificial Sequence
  Description of Artificial Sequence: Synthetic oligonucleotide
  Antisense strand to SEQ ID NO: 2492412
aaucccaagggacugugag

SEQ ID NO: 2492414 - RNA, 19 nt, Artificial Sequence
  Description of Artificial Sequence: Synthetic oligonucleotide
  Sense strand starting at position 529 of SEQ ID NO: 1887727
uccucauucuuucugguga

SEQ ID NO: 2492415 - RNA, 19 nt, Artificial Sequence
  Description of Artificial Sequence: Synthetic oligonucleotide
  Antisense strand to SEQ ID NO: 2492414
ucaccagaaagaaugagga

SEQ ID NO: 2492416 - RNA, 19 nt, Artificial Sequence
  Description of Artificial Sequence: Synthetic oligonucleotide
  Sense strand starting at position 534 of SEQ ID NO: 1887727
auucuuucuggugacaaac

SEQ ID NO: 2492417 - RNA, 19 nt, Artificial Sequence
  Description of Artificial Sequence: Synthetic oligonucleotide
  Antisense strand to SEQ ID NO: 2492416
guuugucaccagaaagaau

SEQ ID NO: 2492418 - RNA, 19 nt, Artificial Sequence
  Description of Artificial Sequence: Synthetic oligonucleotide
  Sense strand starting at position 586 of SEQ ID NO: 1887727
agggaugucucagucacag

SEQ ID NO: 2492419 - RNA, 19 nt, Artificial Sequence
  Description of Artificial Sequence: Synthetic oligonucleotide
  Antisense strand to SEQ ID NO: 2492418
cugugacugagacaucccu

SEQ ID NO: 2492420 - RNA, 19 nt, Artificial Sequence
  Description of Artificial Sequence: Synthetic oligonucleotide
  Sense strand starting at position 623 of SEQ ID NO: 1887727
ccugcauaauugcugagau

SEQ ID NO: 2492421 - RNA, 19 nt, Artificial Sequence
  Description of Artificial Sequence: Synthetic oligonucleotide
  Antisense strand to SEQ ID NO: 2492420
aucucagcaauuaugcagg

SEQ ID NO: 2492422 - RNA, 19 nt, Artificial Sequence
  Description of Artificial Sequence: Synthetic oligonucleotide
  Sense strand starting at position 625 of SEQ ID NO: 1887727
ugcauaauugcugagauua

SEQ ID NO: 2492423 - RNA, 19 nt, Artificial Sequence
  Description of Artificial Sequence: Synthetic oligonucleotide
  Antisense strand to SEQ ID NO: 2492422
uaaucucagcaauuaugca

SEQ ID NO: 2492424 - RNA, 19 nt, Artificial Sequence
  Description of Artificial Sequence: Synthetic oligonucleotide
  Sense strand starting at position 680 of SEQ ID NO: 1887727
augaguuauuguccugucu

SEQ ID NO: 2492425 - RNA, 19 nt, Artificial Sequence
  Description of Artificial Sequence: Synthetic oligonucleotide
  Antisense strand to SEQ ID NO: 2492424
agacaggacaauaacucau

SEQ ID NO: 2492426 - RNA, 19 nt, Artificial Sequence
  Description of Artificial Sequence: Synthetic oligonucleotide
  Sense strand starting at position 764 of SEQ ID NO: 1887727
gggaucagauuaguuauac

SEQ ID NO: 2492427 - RNA, 19 nt, Artificial Sequence
  Description of Artificial Sequence: Synthetic oligonucleotide
  Antisense strand to SEQ ID NO: 2492426
guauaacuaaucugauccc

SEQ ID NO: 2492428 - RNA, 19 nt, Artificial Sequence
  Description of Artificial Sequence: Synthetic oligonucleotide
  Sense strand starting at position 775 of SEQ ID NO: 1887727
aguuauaccuccuuuggga

SEQ ID NO: 2492429 - RNA, 19 nt, Artificial Sequence
  Description of Artificial Sequence: Synthetic oligonucleotide
  Antisense strand to SEQ ID NO: 2492428
ucccaaaggagguauaacu

SEQ ID NO: 2492430 - RNA, 19 nt, Artificial Sequence
  Description of Artificial Sequence: Synthetic oligonucleotide
  Sense strand starting at position 777 of SEQ ID NO: 1887727
uuauaccuccuuugggaaa

SEQ ID NO: 2492431 - RNA, 19 nt, Artificial Sequence
  Description of Artificial Sequence: Synthetic oligonucleotide
  Antisense strand to SEQ ID NO: 2492430
uuucccaaaggagguauaa

SEQ ID NO: 2492432 - RNA, 19 nt, Artificial Sequence
  Description of Artificial Sequence: Synthetic oligonucleotide
  Sense strand starting at position 944 of SEQ ID NO: 1887727
cugggaguuccaugagguc

SEQ ID NO: 2492433 - RNA, 19 nt, Artificial Sequence
  Description of Artificial Sequence: Synthetic oligonucleotide
  Antisense strand to SEQ ID NO: 2492432
gaccucauggaacucccag

SEQ ID NO: 2492434 - RNA, 19 nt, Artificial Sequence
  Description of Artificial Sequence: Synthetic oligonucleotide
  Sense strand starting at position 994 of SEQ ID NO: 1887727
caggauagggcuggacuua

SEQ ID NO: 2492435 - RNA, 19 nt, Artificial Sequence
  Description of Artificial Sequence: Synthetic oligonucleotide
  Antisense strand to SEQ ID NO: 2492434
uaaguccagcccuauccug

SEQ ID NO: 2492436 - RNA, 19 nt, Artificial Sequence
  Description of Artificial Sequence: Synthetic oligonucleotide
  Sense strand starting at position 1061 of SEQ ID NO: 1887727
ucuugaaugccauguagag

SEQ ID NO: 2492437 - RNA, 19 nt, Artificial Sequence
  Description of Artificial Sequence: Synthetic oligonucleotide
  Antisense strand to SEQ ID NO: 2492436
cucuacauggcauucaaga

SEQ ID NO: 2492438 - RNA, 19 nt, Artificial Sequence
  Description of Artificial Sequence: Synthetic oligonucleotide
  Sense strand starting at position 1445 of SEQ ID NO: 1887727
ccgugcauggcuuggauua

SEQ ID NO: 2492439 - RNA, 19 nt, Artificial Sequence
  Description of Artificial Sequence: Synthetic oligonucleotide
  Antisense strand to SEQ ID NO: 2492438
uaauccaagccaugcacgg

SEQ ID NO: 2492440 - RNA, 19 nt, Artificial Sequence
  Description of Artificial Sequence: Synthetic oligonucleotide
  Sense strand starting at position 1515 of SEQ ID NO: 1887727
aggacucuggauugaguga

SEQ ID NO: 2492441 - RNA, 19 nt, Artificial Sequence
  Description of Artificial Sequence: Synthetic oligonucleotide
  Antisense strand to SEQ ID NO: 2492440
ucacucaauccagaguccu

SEQ ID NO: 2492442 - RNA, 19 nt, Artificial Sequence
  Description of Artificial Sequence: Synthetic oligonucleotide
  Sense strand starting at position 1997 of SEQ ID NO: 1887727
gguaaugcccgguggaguu

SEQ ID NO: 2492443 - RNA, 19 nt, Artificial Sequence
  Description of Artificial Sequence: Synthetic oligonucleotide
  Antisense strand to SEQ ID NO: 2492442
aacuccaccgggcauuacc

SEQ ID NO: 2492444 - RNA, 19 nt, Artificial Sequence
  Description of Artificial Sequence: Synthetic oligonucleotide
  Sense strand starting at position 2021 of SEQ ID NO: 1887727
gagacaugauuaggaguaa

SEQ ID NO: 2492445 - RNA, 19 nt, Artificial Sequence
  Description of Artificial Sequence: Synthetic oligonucleotide
  Antisense strand to SEQ ID NO: 2492444
uuacuccuaaucaugucuc

SEQ ID NO: 2492446 - RNA, 19 nt, Artificial Sequence
  Description of Artificial Sequence: Synthetic oligonucleotide
  Sense strand starting at position 2022 of SEQ ID NO: 1887727
agacaugauuaggaguaaa

SEQ ID NO: 2492447 - RNA, 19 nt, Artificial Sequence
  Description of Artificial Sequence: Synthetic oligonucleotide
  Antisense strand to SEQ ID NO: 2492446
uuuacuccuaaucaugucu

SEQ ID NO: 2492448 - RNA, 19 nt, Artificial Sequence
  Description of Artificial Sequence: Synthetic oligonucleotide
  Sense strand starting at position 2134 of SEQ ID NO: 1887727
auaauuaguugcccuguga

SEQ ID NO: 2492449 - RNA, 19 nt, Artificial Sequence
  Description of Artificial Sequence: Synthetic oligonucleotide
  Antisense strand to SEQ ID NO: 2492448
ucacagggcaacuaauuau

SEQ ID NO: 2492450 - RNA, 19 nt, Artificial Sequence
  Description of Artificial Sequence: Synthetic oligonucleotide
  Sense strand starting at position 2276 of SEQ ID NO: 1887727
gaagguaucgggugaggca

SEQ ID NO: 2492451 - RNA, 19 nt, Artificial Sequence
  Description of Artificial Sequence: Synthetic oligonucleotide
  Antisense strand to SEQ ID NO: 2492450
ugccucacccgauaccuuc

SEQ ID NO: 2492452 - RNA, 19 nt, Artificial Sequence
  Description of Artificial Sequence: Synthetic oligonucleotide
  Sense strand starting at position 2362 of SEQ ID NO: 1887727
ggccucuucucagcgaacu

SEQ ID NO: 2492453 - RNA, 19 nt, Artificial Sequence
  Description of Artificial Sequence: Synthetic oligonucleotide
  Antisense strand to SEQ ID NO: 2492452
aguucgcugagaagaggcc

SEQ ID NO: 2492454 - RNA, 19 nt, Artificial Sequence
  Description of Artificial Sequence: Synthetic oligonucleotide
  Sense strand starting at position 2397 of SEQ ID NO: 1887727
cccagugaggcugguuuaa

SEQ ID NO: 2492455 - RNA, 19 nt, Artificial Sequence
  Description of Artificial Sequence: Synthetic oligonucleotide
  Antisense strand to SEQ ID NO: 2492454
uuaaaccagccucacuggg

SEQ ID NO: 2492456 - RNA, 19 nt, Artificial Sequence
  Description of Artificial Sequence: Synthetic oligonucleotide
  Sense strand starting at position 2399 of SEQ ID NO: 1887727
cagugaggcugguuuaauu

SEQ ID NO: 2492457 - RNA, 19 nt, Artificial Sequence
  Description of Artificial Sequence: Synthetic oligonucleotide
  Antisense strand to SEQ ID NO: 2492456
aauuaaaccagccucacug

SEQ ID NO: 2492458 - RNA, 19 nt, Artificial Sequence
  Description of Artificial Sequence: Synthetic oligonucleotide
  Sense strand starting at position 2436 of SEQ ID NO: 1887727
ucaguaguggagugggauu

SEQ ID NO: 2492459 - RNA, 19 nt, Artificial Sequence
  Description of Artificial Sequence: Synthetic oligonucleotide
  Antisense strand to SEQ ID NO: 2492458
aaucccacuccacuacuga

SEQ ID NO: 2492460 - RNA, 19 nt, Artificial Sequence
  Description of Artificial Sequence: Synthetic oligonucleotide
  Sense strand starting at position 3021 of SEQ ID NO: 1887727
ccaucuccugaguaucuga

SEQ ID NO: 2492461 - RNA, 19 nt, Artificial Sequence
  Description of Artificial Sequence: Synthetic oligonucleotide
  Antisense strand to SEQ ID NO: 2492460
ucagauacucaggagaugg

SEQ ID NO: 2492462 - RNA, 19 nt, Artificial Sequence
  Description of Artificial Sequence: Synthetic oligonucleotide
  Sense strand starting at position 3203 of SEQ ID NO: 1887727
aggugugaaucaccacacu

SEQ ID NO: 2492463 - RNA, 19 nt, Artificial Sequence
  Description of Artificial Sequence: Synthetic oligonucleotide
  Antisense strand to SEQ ID NO: 2492462
aguguggugauucacaccu

SEQ ID NO: 2492464 - RNA, 19 nt, Artificial Sequence
  Description of Artificial Sequence: Synthetic oligonucleotide
  Sense strand starting at position 3352 of SEQ ID NO: 1887727
ggaagagguuauccaugua

SEQ ID NO: 2492465 - RNA, 19 nt, Artificial Sequence
  Description of Artificial Sequence: Synthetic oligonucleotide
  Antisense strand to SEQ ID NO: 2492464
uacauggauaaccucuucc

SEQ ID NO: 2492466 - RNA, 19 nt, Artificial Sequence
  Description of Artificial Sequence: Synthetic oligonucleotide
  Sense strand starting at position 3406 of SEQ ID NO: 1887727
cuuuaaguuugucugcaga

SEQ ID NO: 2492467 - RNA, 19 nt, Artificial Sequence
  Description of Artificial Sequence: Synthetic oligonucleotide
  Antisense strand to SEQ ID NO: 2492466
ucugcagacaaacuuaaag

SEQ ID NO: 2492468 - RNA, 19 nt, Artificial Sequence
  Description of Artificial Sequence: Synthetic oligonucleotide
  Sense strand starting at position 3409 of SEQ ID NO: 1887727
uaaguuugucugcagacca

SEQ ID NO: 2492469 - RNA, 19 nt, Artificial Sequence
  Description of Artificial Sequence: Synthetic oligonucleotide
  Antisense strand to SEQ ID NO: 2492468
uggucugcagacaaacuua

SEQ ID NO: 2492470 - RNA, 19 nt, Artificial Sequence
  Description of Artificial Sequence: Synthetic oligonucleotide
  Sense strand starting at position 3434 of SEQ ID NO: 1887727
gauauauaguaacagcaga

SEQ ID NO: 2492471 - RNA, 19 nt, Artificial Sequence
  Description of Artificial Sequence: Synthetic oligonucleotide
  Antisense strand to SEQ ID NO: 2492470
ucugcuguuacuauauauc

SEQ ID NO: 2492472 - RNA, 19 nt, Artificial Sequence
  Description of Artificial Sequence: Synthetic oligonucleotide
  Sense strand starting at position 3529 of SEQ ID NO: 1887727
cuaagaagcaggugcuaua

SEQ ID NO: 2492473 - RNA, 19 nt, Artificial Sequence
  Description of Artificial Sequence: Synthetic oligonucleotide
  Antisense strand to SEQ ID NO: 2492472
uauagcaccugcuucuuag

SEQ ID NO: 2492474 - RNA, 19 nt, Artificial Sequence
  Description of Artificial Sequence: Synthetic oligonucleotide
  Sense strand starting at position 3665 of SEQ ID NO: 1887727
cuucccuuucuuuguguga

SEQ ID NO: 2492475 - RNA, 19 nt, Artificial Sequence
  Description of Artificial Sequence: Synthetic oligonucleotide
  Antisense strand to SEQ ID NO: 2492474
ucacacaaagaaagggaag

SEQ ID NO: 2492476 - RNA, 19 nt, Artificial Sequence
  Description of Artificial Sequence: Synthetic oligonucleotide
  Sense strand starting at position 3770 of SEQ ID NO: 1887727
uacagaugaccgugacaaa

SEQ ID NO: 2492477 - RNA, 19 nt, Artificial Sequence
  Description of Artificial Sequence: Synthetic oligonucleotide
  Antisense strand to SEQ ID NO: 2492476
uuugucacggucaucugua

SEQ ID NO: 2492478 - RNA, 19 nt, Artificial Sequence
  Description of Artificial Sequence: Synthetic oligonucleotide
  Sense strand starting at position 3813 of SEQ ID NO: 1887727
gacgacagcugcuugcaaa

SEQ ID NO: 2492479 - RNA, 19 nt, Artificial Sequence
  Description of Artificial Sequence: Synthetic oligonucleotide
  Antisense strand to SEQ ID NO: 2492478
uuugcaagcagcugucguc

SEQ ID NO: 2492480 - RNA, 19 nt, Artificial Sequence
  Description of Artificial Sequence: Synthetic oligonucleotide
  Sense strand starting at position 3826 of SEQ ID NO: 1887727
ugcaaacaccuguguccaa

SEQ ID NO: 2492481 - RNA, 19 nt, Artificial Sequence
  Description of Artificial Sequence: Synthetic oligonucleotide
  Antisense strand to SEQ ID NO: 2492480
uuggacacagguguuugca

SEQ ID NO: 2492482 - RNA, 19 nt, Artificial Sequence
  Description of Artificial Sequence: Synthetic oligonucleotide
  Sense strand starting at position 3827 of SEQ ID NO: 1887727
gcaaacaccuguguccaau

SEQ ID NO: 2492483 - RNA, 19 nt, Artificial Sequence
  Description of Artificial Sequence: Synthetic oligonucleotide
  Antisense strand to SEQ ID NO: 2492482
auuggacacagguguuugc

SEQ ID NO: 2492484 - RNA, 19 nt, Artificial Sequence
  Description of Artificial Sequence: Synthetic oligonucleotide
  Sense strand starting at position 207 of SEQ ID NO: 1887728
caggauuacgaaugaggca

SEQ ID NO: 2492485 - RNA, 19 nt, Artificial Sequence
  Description of Artificial Sequence: Synthetic oligonucleotide
  Antisense strand to SEQ ID NO: 2492484
ugccucauucguaauccug

SEQ ID NO: 2492486 - RNA, 19 nt, Artificial Sequence
  Description of Artificial Sequence: Synthetic oligonucleotide
  Sense strand starting at position 406 of SEQ ID NO: 1887728
uaauucucacuguggguau

SEQ ID NO: 2492487 - RNA, 19 nt, Artificial Sequence
  Description of Artificial Sequence: Synthetic oligonucleotide
  Antisense strand to SEQ ID NO: 2492486
auacccacagugagaauua

SEQ ID NO: 2492488 - RNA, 19 nt, Artificial Sequence
  Description of Artificial Sequence: Synthetic oligonucleotide
  Sense strand starting at position 441 of SEQ ID NO: 1887728
cguggaaacugagucucaa

SEQ ID NO: 2492489 - RNA, 19 nt, Artificial Sequence
  Description of Artificial Sequence: Synthetic oligonucleotide
  Antisense strand to SEQ ID NO: 2492488
uugagacucaguuuccacg

SEQ ID NO: 2492490 - RNA, 19 nt, Artificial Sequence
  Description of Artificial Sequence: Synthetic oligonucleotide
  Sense strand starting at position 885 of SEQ ID NO: 1887728
agagcuuucuccuuccaga

SEQ ID NO: 2492491 - RNA, 19 nt, Artificial Sequence
  Description of Artificial Sequence: Synthetic oligonucleotide
  Antisense strand to SEQ ID NO: 2492490
ucuggaaggagaaagcucu

SEQ ID NO: 2492492 - RNA, 19 nt, Artificial Sequence
  Description of Artificial Sequence: Synthetic oligonucleotide
  Sense strand starting at position 945 of SEQ ID NO: 1887728
gugacacuugacugacuaa

SEQ ID NO: 2492493 - RNA, 19 nt, Artificial Sequence
  Description of Artificial Sequence: Synthetic oligonucleotide
  Antisense strand to SEQ ID NO: 2492492
uuagucagucaagugucac

SEQ ID NO: 2492494 - RNA, 19 nt, Artificial Sequence
  Description of Artificial Sequence: Synthetic oligonucleotide
  Sense strand starting at position 985 of SEQ ID NO: 1887728
gccugagucagugauacag

SEQ ID NO: 2492495 - RNA, 19 nt, Artificial Sequence
  Description of Artificial Sequence: Synthetic oligonucleotide
  Antisense strand to SEQ ID NO: 2492494
cuguaucacugacucaggc

SEQ ID NO: 2492496 - RNA, 19 nt, Artificial Sequence
  Description of Artificial Sequence: Synthetic oligonucleotide
  Sense strand starting at position 1028 of SEQ ID NO: 1887728
gugcuccugcuguacuaua

SEQ ID NO: 2492497 - RNA, 19 nt, Artificial Sequence
  Description of Artificial Sequence: Synthetic oligonucleotide
  Antisense strand to SEQ ID NO: 2492496
uauaguacagcaggagcac

SEQ ID NO: 2492498 - RNA, 19 nt, Artificial Sequence
  Description of Artificial Sequence: Synthetic oligonucleotide
  Sense strand starting at position 1240 of SEQ ID NO: 1887728
ugugaugcucaguacgcau

SEQ ID NO: 2492499 - RNA, 19 nt, Artificial Sequence
  Description of Artificial Sequence: Synthetic oligonucleotide
  Antisense strand to SEQ ID NO: 2492498
augcguacugagcaucaca

SEQ ID NO: 2492500 - RNA, 19 nt, Artificial Sequence
  Description of Artificial Sequence: Synthetic oligonucleotide
  Sense strand starting at position 1300 of SEQ ID NO: 1887728
gagucaucuacggguacag

SEQ ID NO: 2492501 - RNA, 19 nt, Artificial Sequence
  Description of Artificial Sequence: Synthetic oligonucleotide
  Antisense strand to SEQ ID NO: 2492500
cuguacccguagaugacuc

SEQ ID NO: 2492502 - RNA, 19 nt, Artificial Sequence
  Description of Artificial Sequence: Synthetic oligonucleotide
  Sense strand starting at position 1317 of SEQ ID NO: 1887728
agcuaugugcucuguggau

SEQ ID NO: 2492503 - RNA, 19 nt, Artificial Sequence
  Description of Artificial Sequence: Synthetic oligonucleotide
  Antisense strand to SEQ ID NO: 2492502
auccacagagcacauagcu

SEQ ID NO: 2492504 - RNA, 19 nt, Artificial Sequence
  Description of Artificial Sequence: Synthetic oligonucleotide
  Sense strand starting at position 1319 of SEQ ID NO: 1887728
cuaugugcucuguggauag

SEQ ID NO: 2492505 - RNA, 19 nt, Artificial Sequence
  Description of Artificial Sequence: Synthetic oligonucleotide
  Antisense strand to SEQ ID NO: 2492504
cuauccacagagcacauag

SEQ ID NO: 2492506 - RNA, 19 nt, Artificial Sequence
  Description of Artificial Sequence: Synthetic oligonucleotide
  Sense strand starting at position 1600 of SEQ ID NO: 1887728
ucagauaauucgccugccu

SEQ ID NO: 2492507 - RNA, 19 nt, Artificial Sequence
  Description of Artificial Sequence: Synthetic oligonucleotide
  Antisense strand to SEQ ID NO: 2492506
aggcaggcgaauuaucuga

SEQ ID NO: 2492508 - RNA, 19 nt, Artificial Sequence
  Description of Artificial Sequence: Synthetic oligonucleotide
  Sense strand starting at position 1767 of SEQ ID NO: 1887728
ggcugugcccuccagagaa

SEQ ID NO: 2492509 - RNA, 19 nt, Artificial Sequence
  Description of Artificial Sequence: Synthetic oligonucleotide
  Antisense strand to SEQ ID NO: 2492508
uucucuggagggcacagcc

SEQ ID NO: 2492510 - RNA, 19 nt, Artificial Sequence
  Description of Artificial Sequence: Synthetic oligonucleotide
  Sense strand starting at position 2193 of SEQ ID NO: 1887728
agcagauagucgcuaaauu

SEQ ID NO: 2492511 - RNA, 19 nt, Artificial Sequence
  Description of Artificial Sequence: Synthetic oligonucleotide
  Antisense strand to SEQ ID NO: 2492510
aauuuagcgacuaucugcu

SEQ ID NO: 2492512 - RNA, 19 nt, Artificial Sequence
  Description of Artificial Sequence: Synthetic oligonucleotide
  Sense strand starting at position 2194 of SEQ ID NO: 1887728
gcagauagucgcuaaauua

SEQ ID NO: 2492513 - RNA, 19 nt, Artificial Sequence
  Description of Artificial Sequence: Synthetic oligonucleotide
  Antisense strand to SEQ ID NO: 2492512
uaauuuagcgacuaucugc

SEQ ID NO: 2492514 - RNA, 19 nt, Artificial Sequence
  Description of Artificial Sequence: Synthetic oligonucleotide
  Sense strand starting at position 2604 of SEQ ID NO: 1887728
guagugugagagggagauu

SEQ ID NO: 2492515 - RNA, 19 nt, Artificial Sequence
  Description of Artificial Sequence: Synthetic oligonucleotide
  Antisense strand to SEQ ID NO: 2492514
aaucucccucucacacuac

SEQ ID NO: 2492516 - RNA, 19 nt, Artificial Sequence
  Description of Artificial Sequence: Synthetic oligonucleotide
  Sense strand starting at position 2620 of SEQ ID NO: 1887728
auuuaagggucuugaucaa

SEQ ID NO: 2492517 - RNA, 19 nt, Artificial Sequence
  Description of Artificial Sequence: Synthetic oligonucleotide
  Antisense strand to SEQ ID NO: 2492516
uugaucaagacccuuaaau

SEQ ID NO: 2492518 - RNA, 19 nt, Artificial Sequence
  Description of Artificial Sequence: Synthetic oligonucleotide
  Sense strand starting at position 2627 of SEQ ID NO: 1887728
ggucuugaucaaggucuca

SEQ ID NO: 2492519 - RNA, 19 nt, Artificial Sequence
  Description of Artificial Sequence: Synthetic oligonucleotide
  Antisense strand to SEQ ID NO: 2492518
ugagaccuugaucaagacc

SEQ ID NO: 2492520 - RNA, 19 nt, Artificial Sequence
  Description of Artificial Sequence: Synthetic oligonucleotide
  Sense strand starting at position 2651 of SEQ ID NO: 1887728
acaauuccuuguguguaaa

SEQ ID NO: 2492521 - RNA, 19 nt, Artificial Sequence
  Description of Artificial Sequence: Synthetic oligonucleotide
  Antisense strand to SEQ ID NO: 2492520
uuuacacacaaggaauugu

SEQ ID NO: 2492522 - RNA, 19 nt, Artificial Sequence
  Description of Artificial Sequence: Synthetic oligonucleotide
  Sense strand starting at position 2762 of SEQ ID NO: 1887728
gcuagcucuuccuugacaa

SEQ ID NO: 2492523 - RNA, 19 nt, Artificial Sequence
  Description of Artificial Sequence: Synthetic oligonucleotide
  Antisense strand to SEQ ID NO: 2492522
uugucaaggaagagcuagc

SEQ ID NO: 2492524 - RNA, 19 nt, Artificial Sequence
  Description of Artificial Sequence: Synthetic oligonucleotide
  Sense strand starting at position 2823 of SEQ ID NO: 1887728
ccaacuucuuuagugguua

SEQ ID NO: 2492525 - RNA, 19 nt, Artificial Sequence
  Description of Artificial Sequence: Synthetic oligonucleotide
  Antisense strand to SEQ ID NO: 2492524
uaaccacuaaagaaguugg

SEQ ID NO: 2492526 - RNA, 19 nt, Artificial Sequence
  Description of Artificial Sequence: Synthetic oligonucleotide
  Sense strand starting at position 2827 of SEQ ID NO: 1887728
cuucuuuagugguuacuau

SEQ ID NO: 2492527 - RNA, 19 nt, Artificial Sequence
  Description of Artificial Sequence: Synthetic oligonucleotide
  Antisense strand to SEQ ID NO: 2492526
auaguaaccacuaaagaag

SEQ ID NO: 2492528 - RNA, 19 nt, Artificial Sequence
  Description of Artificial Sequence: Synthetic oligonucleotide
  Sense strand starting at position 2862 of SEQ ID NO: 1887728
uugaauugaaccugagguu

SEQ ID NO: 2492529 - RNA, 19 nt, Artificial Sequence
  Description of Artificial Sequence: Synthetic oligonucleotide
  Antisense strand to SEQ ID NO: 2492528
aaccucagguucaauucaa

SEQ ID NO: 2492530 - RNA, 19 nt, Artificial Sequence
  Description of Artificial Sequence: Synthetic oligonucleotide
  Sense strand starting at position 3167 of SEQ ID NO: 1887728
gcuugcacgcuucuauuaa

SEQ ID NO: 2492531 - RNA, 19 nt, Artificial Sequence
  Description of Artificial Sequence: Synthetic oligonucleotide
  Antisense strand to SEQ ID NO: 2492530
uuaauagaagcgugcaagc

SEQ ID NO: 2492532 - RNA, 19 nt, Artificial Sequence
  Description of Artificial Sequence: Synthetic oligonucleotide
  Sense strand starting at position 3269 of SEQ ID NO: 1887728
ggacucaacagguguguca

SEQ ID NO: 2492533 - RNA, 19 nt, Artificial Sequence
  Description of Artificial Sequence: Synthetic oligonucleotide
  Antisense strand to SEQ ID NO: 2492532
ugacacaccuguugagucc

SEQ ID NO: 2492534 - RNA, 19 nt, Artificial Sequence
  Description of Artificial Sequence: Synthetic oligonucleotide
  Sense strand starting at position 3278 of SEQ ID NO: 1887728
aggugugucaagugcuacu

SEQ ID NO: 2492535 - RNA, 19 nt, Artificial Sequence
  Description of Artificial Sequence: Synthetic oligonucleotide
  Antisense strand to SEQ ID NO: 2492534
aguagcacuugacacaccu

SEQ ID NO: 2492536 - RNA, 19 nt, Artificial Sequence
  Description of Artificial Sequence: Synthetic oligonucleotide
  Sense strand starting at position 3289 of SEQ ID NO: 1887728
gugcuacucuccuuuaaag

SEQ ID NO: 2492537 - RNA, 19 nt, Artificial Sequence
  Description of Artificial Sequence: Synthetic oligonucleotide
  Antisense strand to SEQ ID NO: 2492536
cuuuaaaggagaguagcac

SEQ ID NO: 2492538 - RNA, 19 nt, Artificial Sequence
  Description of Artificial Sequence: Synthetic oligonucleotide
  Sense strand starting at position 3291 of SEQ ID NO: 1887728
gcuacucuccuuuaaagag

SEQ ID NO: 2492539 - RNA, 19 nt, Artificial Sequence
  Description of Artificial Sequence: Synthetic oligonucleotide
  Antisense strand to SEQ ID NO: 2492538
cucuuuaaaggagaguagc

SEQ ID NO: 2492540 - RNA, 19 nt, Artificial Sequence
  Description of Artificial Sequence: Synthetic oligonucleotide
  Sense strand starting at position 3298 of SEQ ID NO: 1887728
uccuuuaaagagugaaacu

SEQ ID NO: 2492541 - RNA, 19 nt, Artificial Sequence
  Description of Artificial Sequence: Synthetic oligonucleotide
  Antisense strand to SEQ ID NO: 2492540
aguuucacucuuuaaagga

SEQ ID NO: 2492542 - RNA, 19 nt, Artificial Sequence
  Description of Artificial Sequence: Synthetic oligonucleotide
  Sense strand starting at position 3463 of SEQ ID NO: 1887728
agcagagucugguuuguuc

SEQ ID NO: 2492543 - RNA, 19 nt, Artificial Sequence
  Description of Artificial Sequence: Synthetic oligonucleotide
  Antisense strand to SEQ ID NO: 2492542
gaacaaaccagacucugcu

SEQ ID NO: 2492544 - RNA, 19 nt, Artificial Sequence
  Description of Artificial Sequence: Synthetic oligonucleotide
  Sense strand starting at position 3496 of SEQ ID NO: 1887728
ucagcaaguuggucugagu

SEQ ID NO: 2492545 - RNA, 19 nt, Artificial Sequence
  Description of Artificial Sequence: Synthetic oligonucleotide
  Antisense strand to SEQ ID NO: 2492544
acucagaccaacuugcuga

SEQ ID NO: 2492546 - RNA, 19 nt, Artificial Sequence
  Description of Artificial Sequence: Synthetic oligonucleotide
  Sense strand starting at position 3507 of SEQ ID NO: 1887728
gucugagucugcucuagug

SEQ ID NO: 2492547 - RNA, 19 nt, Artificial Sequence
  Description of Artificial Sequence: Synthetic oligonucleotide
  Antisense strand to SEQ ID NO: 2492546
cacuagagcagacucagac

SEQ ID NO: 2492548 - RNA, 19 nt, Artificial Sequence
  Description of Artificial Sequence: Synthetic oligonucleotide
  Sense strand starting at position 3509 of SEQ ID NO: 1887728
cugagucugcucuagugau

SEQ ID NO: 2492549 - RNA, 19 nt, Artificial Sequence
  Description of Artificial Sequence: Synthetic oligonucleotide
  Antisense strand to SEQ ID NO: 2492548
aucacuagagcagacucag

SEQ ID NO: 2492550 - RNA, 19 nt, Artificial Sequence
  Description of Artificial Sequence: Synthetic oligonucleotide
  Sense strand starting at position 3515 of SEQ ID NO: 1887728
cugcucuagugauuucuuu

SEQ ID NO: 2492551 - RNA, 19 nt, Artificial Sequence
  Description of Artificial Sequence: Synthetic oligonucleotide
  Antisense strand to SEQ ID NO: 2492550
aaagaaaucacuagagcag

SEQ ID NO: 2492552 - RNA, 19 nt, Artificial Sequence
  Description of Artificial Sequence: Synthetic oligonucleotide
  Sense strand starting at position 3523 of SEQ ID NO: 1887728
gugauuucuuuccucuagu

SEQ ID NO: 2492553 - RNA, 19 nt, Artificial Sequence
  Description of Artificial Sequence: Synthetic oligonucleotide
  Antisense strand to SEQ ID NO: 2492552
acuagaggaaagaaaucac

SEQ ID NO: 2492554 - RNA, 19 nt, Artificial Sequence
  Description of Artificial Sequence: Synthetic oligonucleotide
  Sense strand starting at position 3615 of SEQ ID NO: 1887728
ggcugcuucugcccagaaa

SEQ ID NO: 2492555 - RNA, 19 nt, Artificial Sequence
  Description of Artificial Sequence: Synthetic oligonucleotide
  Antisense strand to SEQ ID NO: 2492554
uuucugggcagaagcagcc

SEQ ID NO: 2492556 - RNA, 19 nt, Artificial Sequence
  Description of Artificial Sequence: Synthetic oligonucleotide
  Sense strand starting at position 3616 of SEQ ID NO: 1887728
gcugcuucugcccagaaac

SEQ ID NO: 2492557 - RNA, 19 nt, Artificial Sequence
  Description of Artificial Sequence: Synthetic oligonucleotide
  Antisense strand to SEQ ID NO: 2492556
guuucugggcagaagcagc

SEQ ID NO: 2492558 - RNA, 19 nt, Artificial Sequence
  Description of Artificial Sequence: Synthetic oligonucleotide
  Sense strand starting at position 3953 of SEQ ID NO: 1887728
gugccaugucuggccugua

SEQ ID NO: 2492559 - RNA, 19 nt, Artificial Sequence
  Description of Artificial Sequence: Synthetic oligonucleotide
  Antisense strand to SEQ ID NO: 2492558
uacaggccagacauggcac

SEQ ID NO: 2492560 - RNA, 19 nt, Artificial Sequence
  Description of Artificial Sequence: Synthetic oligonucleotide
  Sense strand starting at position 3956 of SEQ ID NO: 1887728
ccaugucuggccuguauua

SEQ ID NO: 2492561 - RNA, 19 nt, Artificial Sequence
  Description of Artificial Sequence: Synthetic oligonucleotide
  Antisense strand to SEQ ID NO: 2492560
uaauacaggccagacaugg

SEQ ID NO: 2492562 - RNA, 19 nt, Artificial Sequence
  Description of Artificial Sequence: Synthetic oligonucleotide
  Sense strand starting at position 3958 of SEQ ID NO: 1887728
augucuggccuguauuaau

SEQ ID NO: 2492563 - RNA, 19 nt, Artificial Sequence
  Description of Artificial Sequence: Synthetic oligonucleotide
  Antisense strand to SEQ ID NO: 2492562
auuaauacaggccagacau

SEQ ID NO: 2492564 - RNA, 19 nt, Artificial Sequence
  Description of Artificial Sequence: Synthetic oligonucleotide
  Sense strand starting at position 20 of SEQ ID NO: 1887729
cccucugugucacaggaau

SEQ ID NO: 2492565 - RNA, 19 nt, Artificial Sequence
  Description of Artificial Sequence: Synthetic oligonucleotide
  Antisense strand to SEQ ID NO: 2492564
auuccugugacacagaggg

SEQ ID NO: 2492566 - RNA, 19 nt, Artificial Sequence
  Description of Artificial Sequence: Synthetic oligonucleotide
  Sense strand starting at position 45 of SEQ ID NO: 1887729
ccggcauccucaggccaaa

SEQ ID NO: 2492567 - RNA, 19 nt, Artificial Sequence
  Description of Artificial Sequence: Synthetic oligonucleotide
  Antisense strand to SEQ ID NO: 2492566
uuuggccugaggaugccgg

SEQ ID NO: 2492568 - RNA, 19 nt, Artificial Sequence
  Description of Artificial Sequence: Synthetic oligonucleotide
  Sense strand starting at position 145 of SEQ ID NO: 1887729
cccucugugucaugggaau

SEQ ID NO: 2492569 - RNA, 19 nt, Artificial Sequence
  Description of Artificial Sequence: Synthetic oligonucleotide
  Antisense strand to SEQ ID NO: 2492568
auucccaugacacagaggg

SEQ ID NO: 2492570 - RNA, 19 nt, Artificial Sequence
  Description of Artificial Sequence: Synthetic oligonucleotide
  Sense strand starting at position 147 of SEQ ID NO: 1887729
cucugugucaugggaaucu

SEQ ID NO: 2492571 - RNA, 19 nt, Artificial Sequence
  Description of Artificial Sequence: Synthetic oligonucleotide
  Antisense strand to SEQ ID NO: 2492570
agauucccaugacacagag

SEQ ID NO: 2492572 - RNA, 19 nt, Artificial Sequence
  Description of Artificial Sequence: Synthetic oligonucleotide
  Sense strand starting at position 158 of SEQ ID NO: 1887729
gggaaucugucccuggcau

SEQ ID NO: 2492573 - RNA, 19 nt, Artificial Sequence
  Description of Artificial Sequence: Synthetic oligonucleotide
  Antisense strand to SEQ ID NO: 2492572
augccagggacagauuccc

SEQ ID NO: 2492574 - RNA, 19 nt, Artificial Sequence
  Description of Artificial Sequence: Synthetic oligonucleotide
  Sense strand starting at position 170 of SEQ ID NO: 1887729
cuggcauccuuaggccaaa

SEQ ID NO: 2492575 - RNA, 19 nt, Artificial Sequence
  Description of Artificial Sequence: Synthetic oligonucleotide
  Antisense strand to SEQ ID NO: 2492574
uuuggccuaaggaugccag

SEQ ID NO: 2492576 - RNA, 19 nt, Artificial Sequence
  Description of Artificial Sequence: Synthetic oligonucleotide
  Sense strand starting at position 194 of SEQ ID NO: 1887729
cgcuaagaguucuguuaau

SEQ ID NO: 2492577 - RNA, 19 nt, Artificial Sequence
  Description of Artificial Sequence: Synthetic oligonucleotide
  Antisense strand to SEQ ID NO: 2492576
auuaacagaacucuuagcg

SEQ ID NO: 2492578 - RNA, 19 nt, Artificial Sequence
  Description of Artificial Sequence: Synthetic oligonucleotide
  Sense strand starting at position 200 of SEQ ID NO: 1887729
gaguucuguuaauggaguu

SEQ ID NO: 2492579 - RNA, 19 nt, Artificial Sequence
  Description of Artificial Sequence: Synthetic oligonucleotide
  Antisense strand to SEQ ID NO: 2492578
aacuccauuaacagaacuc

SEQ ID NO: 2492580 - RNA, 19 nt, Artificial Sequence
  Description of Artificial Sequence: Synthetic oligonucleotide
  Sense strand starting at position 223 of SEQ ID NO: 1887729
ggucgaagugacugaacaa

SEQ ID NO: 2492581 - RNA, 19 nt, Artificial Sequence
  Description of Artificial Sequence: Synthetic oligonucleotide
  Antisense strand to SEQ ID NO: 2492580
uuguucagucacuucgacc

SEQ ID NO: 2492582 - RNA, 19 nt, Artificial Sequence
  Description of Artificial Sequence: Synthetic oligonucleotide
  Sense strand starting at position 224 of SEQ ID NO: 1887729
gucgaagugacugaacaau

SEQ ID NO: 2492583 - RNA, 19 nt, Artificial Sequence
  Description of Artificial Sequence: Synthetic oligonucleotide
  Antisense strand to SEQ ID NO: 2492582
auuguucagucacuucgac

SEQ ID NO: 2492584 - RNA, 19 nt, Artificial Sequence
  Description of Artificial Sequence: Synthetic oligonucleotide
  Sense strand starting at position 233 of SEQ ID NO: 1887729
acugaacaaucguaguuua

SEQ ID NO: 2492585 - RNA, 19 nt, Artificial Sequence
  Description of Artificial Sequence: Synthetic oligonucleotide
  Antisense strand to SEQ ID NO: 2492584
uaaacuacgauuguucagu

SEQ ID NO: 2492586 - RNA, 19 nt, Artificial Sequence
  Description of Artificial Sequence: Synthetic oligonucleotide
  Sense strand starting at position 236 of SEQ ID NO: 1887729
gaacaaucguaguuuaugu

SEQ ID NO: 2492587 - RNA, 19 nt, Artificial Sequence
  Description of Artificial Sequence: Synthetic oligonucleotide
  Antisense strand to SEQ ID NO: 2492586
acauaaacuacgauuguuc

SEQ ID NO: 2492588 - RNA, 19 nt, Artificial Sequence
  Description of Artificial Sequence: Synthetic oligonucleotide
  Sense strand starting at position 238 of SEQ ID NO: 1887729
acaaucguaguuuauguua

SEQ ID NO: 2492589 - RNA, 19 nt, Artificial Sequence
  Description of Artificial Sequence: Synthetic oligonucleotide
  Antisense strand to SEQ ID NO: 2492588
uaacauaaacuacgauugu

SEQ ID NO: 2492590 - RNA, 19 nt, Artificial Sequence
  Description of Artificial Sequence: Synthetic oligonucleotide
  Sense strand starting at position 246 of SEQ ID NO: 1887729
aguuuauguuaugucuaac

SEQ ID NO: 2492591 - RNA, 19 nt, Artificial Sequence
  Description of Artificial Sequence: Synthetic oligonucleotide
  Antisense strand to SEQ ID NO: 2492590
guuagacauaacauaaacu

SEQ ID NO: 2492592 - RNA, 19 nt, Artificial Sequence
  Description of Artificial Sequence: Synthetic oligonucleotide
  Sense strand starting at position 249 of SEQ ID NO: 1887729
uuauguuaugucuaacaga

SEQ ID NO: 2492593 - RNA, 19 nt, Artificial Sequence
  Description of Artificial Sequence: Synthetic oligonucleotide
  Antisense strand to SEQ ID NO: 2492592
ucuguuagacauaacauaa

SEQ ID NO: 2492594 - RNA, 19 nt, Artificial Sequence
  Description of Artificial Sequence: Synthetic oligonucleotide
  Sense strand starting at position 252 of SEQ ID NO: 1887729
uguuaugucuaacagaugu

SEQ ID NO: 2492595 - RNA, 19 nt, Artificial Sequence
  Description of Artificial Sequence: Synthetic oligonucleotide
  Antisense strand to SEQ ID NO: 2492594
acaucuguuagacauaaca

SEQ ID NO: 2492596 - RNA, 19 nt, Artificial Sequence
  Description of Artificial Sequence: Synthetic oligonucleotide
  Sense strand starting at position 262 of SEQ ID NO: 1887729
aacagaugucacugugcuu

SEQ ID NO: 2492597 - RNA, 19 nt, Artificial Sequence
  Description of Artificial Sequence: Synthetic oligonucleotide
  Antisense strand to SEQ ID NO: 2492596
aagcacagugacaucuguu

SEQ ID NO: 2492598 - RNA, 19 nt, Artificial Sequence
  Description of Artificial Sequence: Synthetic oligonucleotide
  Sense strand starting at position 273 of SEQ ID NO: 1887729
cugugcuucccucaagacu

SEQ ID NO: 2492599 - RNA, 19 nt, Artificial Sequence
  Description of Artificial Sequence: Synthetic oligonucleotide
  Antisense strand to SEQ ID NO: 2492598
agucuugagggaagcacag

SEQ ID NO: 2492600 - RNA, 19 nt, Artificial Sequence
  Description of Artificial Sequence: Synthetic oligonucleotide
  Sense strand starting at position 304 of SEQ ID NO: 1887729
acagcacuccugugaguuu

SEQ ID NO: 2492601 - RNA, 19 nt, Artificial Sequence
  Description of Artificial Sequence: Synthetic oligonucleotide
  Antisense strand to SEQ ID NO: 2492600
aaacucacaggagugcugu

SEQ ID NO: 2492602 - RNA, 19 nt, Artificial Sequence
  Description of Artificial Sequence: Synthetic oligonucleotide
  Sense strand starting at position 421 of SEQ ID NO: 1887729
ugggcuuccucgggaagca

SEQ ID NO: 2492603 - RNA, 19 nt, Artificial Sequence
  Description of Artificial Sequence: Synthetic oligonucleotide
  Antisense strand to SEQ ID NO: 2492602
ugcuucccgaggaagccca

SEQ ID NO: 2492604 - RNA, 19 nt, Artificial Sequence
  Description of Artificial Sequence: Synthetic oligonucleotide
  Sense strand starting at position 806 of SEQ ID NO: 1887729
guccucacuccagggauga

SEQ ID NO: 2492605 - RNA, 19 nt, Artificial Sequence
  Description of Artificial Sequence: Synthetic oligonucleotide
  Antisense strand to SEQ ID NO: 2492604
ucaucccuggagugaggac

SEQ ID NO: 2492606 - RNA, 19 nt, Artificial Sequence
  Description of Artificial Sequence: Synthetic oligonucleotide
  Sense strand starting at position 807 of SEQ ID NO: 1887729
uccucacuccagggaugau

SEQ ID NO: 2492607 - RNA, 19 nt, Artificial Sequence
  Description of Artificial Sequence: Synthetic oligonucleotide
  Antisense strand to SEQ ID NO: 2492606
aucaucccuggagugagga

SEQ ID NO: 2492608 - RNA, 19 nt, Artificial Sequence
  Description of Artificial Sequence: Synthetic oligonucleotide
  Sense strand starting at position 898 of SEQ ID NO: 1887729
cccugugucaccuauggga

SEQ ID NO: 2492609 - RNA, 19 nt, Artificial Sequence
  Description of Artificial Sequence: Synthetic oligonucleotide
  Antisense strand to SEQ ID NO: 2492608
ucccauaggugacacaggg

SEQ ID NO: 2492610 - RNA, 19 nt, Artificial Sequence
  Description of Artificial Sequence: Synthetic oligonucleotide
  Sense strand starting at position 984 of SEQ ID NO: 1887729
gaaggaugaugccagggau

SEQ ID NO: 2492611 - RNA, 19 nt, Artificial Sequence
  Description of Artificial Sequence: Synthetic oligonucleotide
  Antisense strand to SEQ ID NO: 2492610
aucccuggcaucauccuuc

SEQ ID NO: 2492612 - RNA, 19 nt, Artificial Sequence
  Description of Artificial Sequence: Synthetic oligonucleotide
  Sense strand starting at position 1171 of SEQ ID NO: 1887729
gccggaguuacaggaaaca

SEQ ID NO: 2492613 - RNA, 19 nt, Artificial Sequence
  Description of Artificial Sequence: Synthetic oligonucleotide
  Antisense strand to SEQ ID NO: 2492612
uguuuccuguaacuccggc

SEQ ID NO: 2492614 - RNA, 19 nt, Artificial Sequence
  Description of Artificial Sequence: Synthetic oligonucleotide
  Sense strand starting at position 2163 of SEQ ID NO: 1887729
cagagagggcccugauguu

SEQ ID NO: 2492615 - RNA, 19 nt, Artificial Sequence
  Description of Artificial Sequence: Synthetic oligonucleotide
  Antisense strand to SEQ ID NO: 2492614
aacaucagggcccucucug

SEQ ID NO: 2492616 - RNA, 19 nt, Artificial Sequence
  Description of Artificial Sequence: Synthetic oligonucleotide
  Sense strand starting at position 2263 of SEQ ID NO: 1887729
ggaagcucuccagggaaga

SEQ ID NO: 2492617 - RNA, 19 nt, Artificial Sequence
  Description of Artificial Sequence: Synthetic oligonucleotide
  Antisense strand to SEQ ID NO: 2492616
ucuucccuggagagcuucc

SEQ ID NO: 2492618 - RNA, 19 nt, Artificial Sequence
  Description of Artificial Sequence: Synthetic oligonucleotide
  Sense strand starting at position 2329 of SEQ ID NO: 1887729
acauguaugucccaacgga

SEQ ID NO: 2492619 - RNA, 19 nt, Artificial Sequence
  Description of Artificial Sequence: Synthetic oligonucleotide
  Antisense strand to SEQ ID NO: 2492618
uccguugggacauacaugu

SEQ ID NO: 2492620 - RNA, 19 nt, Artificial Sequence
  Description of Artificial Sequence: Synthetic oligonucleotide
  Sense strand starting at position 2376 of SEQ ID NO: 1887729
cuuucuguaugucaauuaa

SEQ ID NO: 2492621 - RNA, 19 nt, Artificial Sequence
  Description of Artificial Sequence: Synthetic oligonucleotide
  Antisense strand to SEQ ID NO: 2492620
uuaauugacauacagaaag

SEQ ID NO: 2492622 - RNA, 19 nt, Artificial Sequence
  Description of Artificial Sequence: Synthetic oligonucleotide
  Sense strand starting at position 2687 of SEQ ID NO: 1887729
uacugcgccuggugaauaa

SEQ ID NO: 2492623 - RNA, 19 nt, Artificial Sequence
  Description of Artificial Sequence: Synthetic oligonucleotide
  Antisense strand to SEQ ID NO: 2492622
uuauucaccaggcgcagua

SEQ ID NO: 2492624 - RNA, 19 nt, Artificial Sequence
  Description of Artificial Sequence: Synthetic oligonucleotide
  Sense strand starting at position 3249 of SEQ ID NO: 1887729
uagucaggcucguuucgaa

SEQ ID NO: 2492625 - RNA, 19 nt, Artificial Sequence
  Description of Artificial Sequence: Synthetic oligonucleotide
  Antisense strand to SEQ ID NO: 2492624
uucgaaacgagccugacua

SEQ ID NO: 2492626 - RNA, 19 nt, Artificial Sequence
  Description of Artificial Sequence: Synthetic oligonucleotide
  Sense strand starting at position 2 of SEQ ID NO: 1887730
cuucucuuugccugcgaau

SEQ ID NO: 2492627 - RNA, 19 nt, Artificial Sequence
  Description of Artificial Sequence: Synthetic oligonucleotide
  Antisense strand to SEQ ID NO: 2492626
auucgcaggcaaagagaag

SEQ ID NO: 2492628 - RNA, 19 nt, Artificial Sequence
  Description of Artificial Sequence: Synthetic oligonucleotide
  Sense strand starting at position 43 of SEQ ID NO: 1887730
aggagaugcgcauguguau

SEQ ID NO: 2492629 - RNA, 19 nt, Artificial Sequence
  Description of Artificial Sequence: Synthetic oligonucleotide
  Antisense strand to SEQ ID NO: 2492628
auacacaugcgcaucuccu

SEQ ID NO: 2492630 - RNA, 19 nt, Artificial Sequence
  Description of Artificial Sequence: Synthetic oligonucleotide
  Sense strand starting at position 50 of SEQ ID NO: 1887730
gcgcauguguauucuaagu

SEQ ID NO: 2492631 - RNA, 19 nt, Artificial Sequence
  Description of Artificial Sequence: Synthetic oligonucleotide
  Antisense strand to SEQ ID NO: 2492630
acuuagaauacacaugcgc

SEQ ID NO: 2492632 - RNA, 19 nt, Artificial Sequence
  Description of Artificial Sequence: Synthetic oligonucleotide
  Sense strand starting at position 52 of SEQ ID NO: 1887730
gcauguguauucuaagucu

SEQ ID NO: 2492633 - RNA, 19 nt, Artificial Sequence
  Description of Artificial Sequence: Synthetic oligonucleotide
  Antisense strand to SEQ ID NO: 2492632
agacuuagaauacacaugc

SEQ ID NO: 2492634 - RNA, 19 nt, Artificial Sequence
  Description of Artificial Sequence: Synthetic oligonucleotide
  Sense strand starting at position 55 of SEQ ID NO: 1887730
uguguauucuaagucucaa

SEQ ID NO: 2492635 - RNA, 19 nt, Artificial Sequence
  Description of Artificial Sequence: Synthetic oligonucleotide
  Antisense strand to SEQ ID NO: 2492634
uugagacuuagaauacaca

SEQ ID NO: 2492636 - RNA, 19 nt, Artificial Sequence
  Description of Artificial Sequence: Synthetic oligonucleotide
  Sense strand starting at position 106 of SEQ ID NO: 1887730
ggacucacaggcuguguua

SEQ ID NO: 2492637 - RNA, 19 nt, Artificial Sequence
  Description of Artificial Sequence: Synthetic oligonucleotide
  Antisense strand to SEQ ID NO: 2492636
uaacacagccugugagucc

SEQ ID NO: 2492638 - RNA, 19 nt, Artificial Sequence
  Description of Artificial Sequence: Synthetic oligonucleotide
  Sense strand starting at position 118 of SEQ ID NO: 1887730
uguguuaagugccuccuau

SEQ ID NO: 2492639 - RNA, 19 nt, Artificial Sequence
  Description of Artificial Sequence: Synthetic oligonucleotide
  Antisense strand to SEQ ID NO: 2492638
auaggaggcacuuaacaca

SEQ ID NO: 2492640 - RNA, 19 nt, Artificial Sequence
  Description of Artificial Sequence: Synthetic oligonucleotide
  Sense strand starting at position 128 of SEQ ID NO: 1887730
gccuccuaugggugaccua

SEQ ID NO: 2492641 - RNA, 19 nt, Artificial Sequence
  Description of Artificial Sequence: Synthetic oligonucleotide
  Antisense strand to SEQ ID NO: 2492640
uaggucacccauaggaggc

SEQ ID NO: 2492642 - RNA, 19 nt, Artificial Sequence
  Description of Artificial Sequence: Synthetic oligonucleotide
  Sense strand starting at position 154 of SEQ ID NO: 1887730
uccauuauagcacgaguca

SEQ ID NO: 2492643 - RNA, 19 nt, Artificial Sequence
  Description of Artificial Sequence: Synthetic oligonucleotide
  Antisense strand to SEQ ID NO: 2492642
ugacucgugcuauaaugga

SEQ ID NO: 2492644 - RNA, 19 nt, Artificial Sequence
  Description of Artificial Sequence: Synthetic oligonucleotide
  Sense strand starting at position 184 of SEQ ID NO: 1887730
acaaucugugacugaguca

SEQ ID NO: 2492645 - RNA, 19 nt, Artificial Sequence
  Description of Artificial Sequence: Synthetic oligonucleotide
  Antisense strand to SEQ ID NO: 2492644
ugacucagucacagauugu

SEQ ID NO: 2492646 - RNA, 19 nt, Artificial Sequence
  Description of Artificial Sequence: Synthetic oligonucleotide
  Sense strand starting at position 239 of SEQ ID NO: 1887730
agagcuugguucugacuca

SEQ ID NO: 2492647 - RNA, 19 nt, Artificial Sequence
  Description of Artificial Sequence: Synthetic oligonucleotide
  Antisense strand to SEQ ID NO: 2492646
ugagucagaaccaagcucu

SEQ ID NO: 2492648 - RNA, 19 nt, Artificial Sequence
  Description of Artificial Sequence: Synthetic oligonucleotide
  Sense strand starting at position 240 of SEQ ID NO: 1887730
gagcuugguucugacucau

SEQ ID NO: 2492649 - RNA, 19 nt, Artificial Sequence
  Description of Artificial Sequence: Synthetic oligonucleotide
  Antisense strand to SEQ ID NO: 2492648
augagucagaaccaagcuc

SEQ ID NO: 2492650 - RNA, 19 nt, Artificial Sequence
  Description of Artificial Sequence: Synthetic oligonucleotide
  Sense strand starting at position 246 of SEQ ID NO: 1887730
gguucugacucaucugugu

SEQ ID NO: 2492651 - RNA, 19 nt, Artificial Sequence
  Description of Artificial Sequence: Synthetic oligonucleotide
  Antisense strand to SEQ ID NO: 2492650
acacagaugagucagaacc

SEQ ID NO: 2492652 - RNA, 19 nt, Artificial Sequence
  Description of Artificial Sequence: Synthetic oligonucleotide
  Sense strand starting at position 495 of SEQ ID NO: 1887730
cccuguucugagcacucua

SEQ ID NO: 2492653 - RNA, 19 nt, Artificial Sequence
  Description of Artificial Sequence: Synthetic oligonucleotide
  Antisense strand to SEQ ID NO: 2492652
uagagugcucagaacaggg

SEQ ID NO: 2492654 - RNA, 19 nt, Artificial Sequence
  Description of Artificial Sequence: Synthetic oligonucleotide
  Sense strand starting at position 649 of SEQ ID NO: 1887730
cucagagccugaguuugua

SEQ ID NO: 2492655 - RNA, 19 nt, Artificial Sequence
  Description of Artificial Sequence: Synthetic oligonucleotide
  Antisense strand to SEQ ID NO: 2492654
uacaaacucaggcucugag

SEQ ID NO: 2492656 - RNA, 19 nt, Artificial Sequence
  Description of Artificial Sequence: Synthetic oligonucleotide
  Sense strand starting at position 917 of SEQ ID NO: 1887730
ggugguaccugagagcaga

SEQ ID NO: 2492657 - RNA, 19 nt, Artificial Sequence
  Description of Artificial Sequence: Synthetic oligonucleotide
  Antisense strand to SEQ ID NO: 2492656
ucugcucucagguaccacc

SEQ ID NO: 2492658 - RNA, 19 nt, Artificial Sequence
  Description of Artificial Sequence: Synthetic oligonucleotide
  Sense strand starting at position 1005 of SEQ ID NO: 1887730
ugucacugugcgugcuuua

SEQ ID NO: 2492659 - RNA, 19 nt, Artificial Sequence
  Description of Artificial Sequence: Synthetic oligonucleotide
  Antisense strand to SEQ ID NO: 2492658
uaaagcacgcacagugaca

SEQ ID NO: 2492660 - RNA, 19 nt, Artificial Sequence
  Description of Artificial Sequence: Synthetic oligonucleotide
  Sense strand starting at position 1799 of SEQ ID NO: 1887730
ucaccaugugcuggucauu

SEQ ID NO: 2492661 - RNA, 19 nt, Artificial Sequence
  Description of Artificial Sequence: Synthetic oligonucleotide
  Antisense strand to SEQ ID NO: 2492660
aaugaccagcacaugguga

SEQ ID NO: 2492662 - RNA, 19 nt, Artificial Sequence
  Description of Artificial Sequence: Synthetic oligonucleotide
  Sense strand starting at position 2123 of SEQ ID NO: 1887730
augauugcaucucaguaac

SEQ ID NO: 2492663 - RNA, 19 nt, Artificial Sequence
  Description of Artificial Sequence: Synthetic oligonucleotide
  Antisense strand to SEQ ID NO: 2492662
guuacugagaugcaaucau

SEQ ID NO: 2492664 - RNA, 19 nt, Artificial Sequence
  Description of Artificial Sequence: Synthetic oligonucleotide
  Sense strand starting at position 2243 of SEQ ID NO: 1887730
cauggauagaguggugaau

SEQ ID NO: 2492665 - RNA, 19 nt, Artificial Sequence
  Description of Artificial Sequence: Synthetic oligonucleotide
  Antisense strand to SEQ ID NO: 2492664
auucaccacucuauccaug

SEQ ID NO: 2492666 - RNA, 19 nt, Artificial Sequence
  Description of Artificial Sequence: Synthetic oligonucleotide
  Sense strand starting at position 2255 of SEQ ID NO: 1887730
ggugaauaaagugguccaa

SEQ ID NO: 2492667 - RNA, 19 nt, Artificial Sequence
  Description of Artificial Sequence: Synthetic oligonucleotide
  Antisense strand to SEQ ID NO: 2492666
uuggaccacuuuauucacc

SEQ ID NO: 2492668 - RNA, 19 nt, Artificial Sequence
  Description of Artificial Sequence: Synthetic oligonucleotide
  Sense strand starting at position 2257 of SEQ ID NO: 1887730
ugaauaaagugguccaaac

SEQ ID NO: 2492669 - RNA, 19 nt, Artificial Sequence
  Description of Artificial Sequence: Synthetic oligonucleotide
  Antisense strand to SEQ ID NO: 2492668
guuuggaccacuuuauuca

SEQ ID NO: 2492670 - RNA, 19 nt, Artificial Sequence
  Description of Artificial Sequence: Synthetic oligonucleotide
  Sense strand starting at position 2657 of SEQ ID NO: 1887730
agaguaacuuaaggaggaa

SEQ ID NO: 2492671 - RNA, 19 nt, Artificial Sequence
  Description of Artificial Sequence: Synthetic oligonucleotide
  Antisense strand to SEQ ID NO: 2492670
uuccuccuuaaguuacucu

SEQ ID NO: 2492672 - RNA, 19 nt, Artificial Sequence
  Description of Artificial Sequence: Synthetic oligonucleotide
  Sense strand starting at position 2926 of SEQ ID NO: 1887730
agcagagaaucagcgugau

SEQ ID NO: 2492673 - RNA, 19 nt, Artificial Sequence
  Description of Artificial Sequence: Synthetic oligonucleotide
  Antisense strand to SEQ ID NO: 2492672
aucacgcugauucucugcu

SEQ ID NO: 2492674 - RNA, 19 nt, Artificial Sequence
  Description of Artificial Sequence: Synthetic oligonucleotide
  Sense strand starting at position 2929 of SEQ ID NO: 1887730
agagaaucagcgugauguu

SEQ ID NO: 2492675 - RNA, 19 nt, Artificial Sequence
  Description of Artificial Sequence: Synthetic oligonucleotide
  Antisense strand to SEQ ID NO: 2492674
aacaucacgcugauucucu

SEQ ID NO: 2492676 - RNA, 19 nt, Artificial Sequence
  Description of Artificial Sequence: Synthetic oligonucleotide
  Sense strand starting at position 2930 of SEQ ID NO: 1887730
gagaaucagcgugauguua

SEQ ID NO: 2492677 - RNA, 19 nt, Artificial Sequence
  Description of Artificial Sequence: Synthetic oligonucleotide
  Antisense strand to SEQ ID NO: 2492676
uaacaucacgcugauucuc

SEQ ID NO: 2492678 - RNA, 19 nt, Artificial Sequence
  Description of Artificial Sequence: Synthetic oligonucleotide
  Sense strand starting at position 2932 of SEQ ID NO: 1887730
gaaucagcgugauguuaac

SEQ ID NO: 2492679 - RNA, 19 nt, Artificial Sequence
  Description of Artificial Sequence: Synthetic oligonucleotide
  Antisense strand to SEQ ID NO: 2492678
guuaacaucacgcugauuc

SEQ ID NO: 2492680 - RNA, 19 nt, Artificial Sequence
  Description of Artificial Sequence: Synthetic oligonucleotide
  Sense strand starting at position 2938 of SEQ ID NO: 1887730
gcgugauguuaacacgaca

SEQ ID NO: 2492681 - RNA, 19 nt, Artificial Sequence
  Description of Artificial Sequence: Synthetic oligonucleotide
  Antisense strand to SEQ ID NO: 2492680
ugucguguuaacaucacgc

SEQ ID NO: 2492682 - RNA, 19 nt, Artificial Sequence
  Description of Artificial Sequence: Synthetic oligonucleotide
  Sense strand starting at position 3003 of SEQ ID NO: 1887730
acaggucucuggguggauu

SEQ ID NO: 2492683 - RNA, 19 nt, Artificial Sequence
  Description of Artificial Sequence: Synthetic oligonucleotide
  Antisense strand to SEQ ID NO: 2492682
aauccacccagagaccugu

SEQ ID NO: 2492684 - RNA, 19 nt, Artificial Sequence
  Description of Artificial Sequence: Synthetic oligonucleotide
  Sense strand starting at position 3026 of SEQ ID NO: 1887730
cguuuaucuucucuccaca

SEQ ID NO: 2492685 - RNA, 19 nt, Artificial Sequence
  Description of Artificial Sequence: Synthetic oligonucleotide
  Antisense strand to SEQ ID NO: 2492684
uguggagagaagauaaacg

SEQ ID NO: 2492686 - RNA, 19 nt, Artificial Sequence
  Description of Artificial Sequence: Synthetic oligonucleotide
  Sense strand starting at position 3287 of SEQ ID NO: 1887730
cuagaaauaugagaauuag

SEQ ID NO: 2492687 - RNA, 19 nt, Artificial Sequence
  Description of Artificial Sequence: Synthetic oligonucleotide
  Antisense strand to SEQ ID NO: 2492686
cuaauucucauauuucuag

SEQ ID NO: 2492688 - RNA, 19 nt, Artificial Sequence
  Description of Artificial Sequence: Synthetic oligonucleotide
  Sense strand starting at position 3295 of SEQ ID NO: 1887730
augagaauuagccaagcgu

SEQ ID NO: 2492689 - RNA, 19 nt, Artificial Sequence
  Description of Artificial Sequence: Synthetic oligonucleotide
  Antisense strand to SEQ ID NO: 2492688
acgcuuggcuaauucucau

SEQ ID NO: 2492690 - RNA, 19 nt, Artificial Sequence
  Description of Artificial Sequence: Synthetic oligonucleotide
  Sense strand starting at position 3441 of SEQ ID NO: 1887730
ggguacuuugcagauauga

SEQ ID NO: 2492691 - RNA, 19 nt, Artificial Sequence
  Description of Artificial Sequence: Synthetic oligonucleotide
  Antisense strand to SEQ ID NO: 2492690
ucauaucugcaaaguaccc

SEQ ID NO: 2492692 - RNA, 19 nt, Artificial Sequence
  Description of Artificial Sequence: Synthetic oligonucleotide
  Sense strand starting at position 3457 of SEQ ID NO: 1887730
ugauaaaguuaaggaucau

SEQ ID NO: 2492693 - RNA, 19 nt, Artificial Sequence
  Description of Artificial Sequence: Synthetic oligonucleotide
  Antisense strand to SEQ ID NO: 2492692
augauccuuaacuuuauca

SEQ ID NO: 2492694 - RNA, 19 nt, Artificial Sequence
  Description of Artificial Sequence: Synthetic oligonucleotide
  Sense strand starting at position 3750 of SEQ ID NO: 1887730
ccgugagauggauguugga

SEQ ID NO: 2492695 - RNA, 19 nt, Artificial Sequence
  Description of Artificial Sequence: Synthetic oligonucleotide
  Antisense strand to SEQ ID NO: 2492694
uccaacauccaucucacgg

SEQ ID NO: 2492696 - RNA, 19 nt, Artificial Sequence
  Description of Artificial Sequence: Synthetic oligonucleotide
  Sense strand starting at position 3753 of SEQ ID NO: 1887730
ugagauggauguuggacuu

SEQ ID NO: 2492697 - RNA, 19 nt, Artificial Sequence
  Description of Artificial Sequence: Synthetic oligonucleotide
  Antisense strand to SEQ ID NO: 2492696
aaguccaacauccaucuca

SEQ ID NO: 2492698 - RNA, 19 nt, Artificial Sequence
  Description of Artificial Sequence: Synthetic oligonucleotide
  Sense strand starting at position 3799 of SEQ ID NO: 1887730
cgcugugcuggugguaauu

SEQ ID NO: 2492699 - RNA, 19 nt, Artificial Sequence
  Description of Artificial Sequence: Synthetic oligonucleotide
  Antisense strand to SEQ ID NO: 2492698
aauuaccaccagcacagcg

SEQ ID NO: 2492700 - RNA, 19 nt, Artificial Sequence
  Description of Artificial Sequence: Synthetic oligonucleotide
  Sense strand starting at position 3848 of SEQ ID NO: 1887730
gcacuugccuggcacagaa

SEQ ID NO: 2492701 - RNA, 19 nt, Artificial Sequence
  Description of Artificial Sequence: Synthetic oligonucleotide
  Antisense strand to SEQ ID NO: 2492700
uucugugccaggcaagugc

SEQ ID NO: 2492702 - RNA, 19 nt, Artificial Sequence
  Description of Artificial Sequence: Synthetic oligonucleotide
  Sense strand starting at position 3950 of SEQ ID NO: 1887730
ggagcaugauguuguucua

SEQ ID NO: 2492703 - RNA, 19 nt, Artificial Sequence
  Description of Artificial Sequence: Synthetic oligonucleotide
  Antisense strand to SEQ ID NO: 2492702
uagaacaacaucaugcucc

SEQ ID NO: 2492704 - RNA, 19 nt, Artificial Sequence
  Description of Artificial Sequence: Synthetic oligonucleotide
  Sense strand starting at position 3953 of SEQ ID NO: 1887730
gcaugauguuguucuagaa

SEQ ID NO: 2492705 - RNA, 19 nt, Artificial Sequence
  Description of Artificial Sequence: Synthetic oligonucleotide
  Antisense strand to SEQ ID NO: 2492704
uucuagaacaacaucaugc

SEQ ID NO: 2492706 - RNA, 19 nt, Artificial Sequence
  Description of Artificial Sequence: Synthetic oligonucleotide
  Sense strand starting at position 33 of SEQ ID NO: 1887731
ggcccugucccugauguca

SEQ ID NO: 2492707 - RNA, 19 nt, Artificial Sequence
  Description of Artificial Sequence: Synthetic oligonucleotide
  Antisense strand to SEQ ID NO: 2492706
ugacaucagggacagggcc

SEQ ID NO: 2492708 - RNA, 19 nt, Artificial Sequence
  Description of Artificial Sequence: Synthetic oligonucleotide
  Sense strand starting at position 365 of SEQ ID NO: 1887731
acagaaucauaagagaaca

SEQ ID NO: 2492709 - RNA, 19 nt, Artificial Sequence
  Description of Artificial Sequence: Synthetic oligonucleotide
  Antisense strand to SEQ ID NO: 2492708
uguucucuuaugauucugu

SEQ ID NO: 2492710 - RNA, 19 nt, Artificial Sequence
  Description of Artificial Sequence: Synthetic oligonucleotide
  Sense strand starting at position 399 of SEQ ID NO: 1887731
cccaauuaucuauguguuu

SEQ ID NO: 2492711 - RNA, 19 nt, Artificial Sequence
  Description of Artificial Sequence: Synthetic oligonucleotide
  Antisense strand to SEQ ID NO: 2492710
aaacacauagauaauuggg

SEQ ID NO: 2492712 - RNA, 19 nt, Artificial Sequence
  Description of Artificial Sequence: Synthetic oligonucleotide
  Sense strand starting at position 400 of SEQ ID NO: 1887731
ccaauuaucuauguguuug

SEQ ID NO: 2492713 - RNA, 19 nt, Artificial Sequence
  Description of Artificial Sequence: Synthetic oligonucleotide
  Antisense strand to SEQ ID NO: 2492712
caaacacauagauaauugg

SEQ ID NO: 2492714 - RNA, 19 nt, Artificial Sequence
  Description of Artificial Sequence: Synthetic oligonucleotide
  Sense strand starting at position 404 of SEQ ID NO: 1887731
uuaucuauguguuugggaa

SEQ ID NO: 2492715 - RNA, 19 nt, Artificial Sequence
  Description of Artificial Sequence: Synthetic oligonucleotide
  Antisense strand to SEQ ID NO: 2492714
uucccaaacacauagauaa

SEQ ID NO: 2492716 - RNA, 19 nt, Artificial Sequence
  Description of Artificial Sequence: Synthetic oligonucleotide
  Sense strand starting at position 405 of SEQ ID NO: 1887731
uaucuauguguuugggaaa

SEQ ID NO: 2492717 - RNA, 19 nt, Artificial Sequence
  Description of Artificial Sequence: Synthetic oligonucleotide
  Antisense strand to SEQ ID NO: 2492716
uuucccaaacacauagaua

SEQ ID NO: 2492718 - RNA, 19 nt, Artificial Sequence
  Description of Artificial Sequence: Synthetic oligonucleotide
  Sense strand starting at position 406 of SEQ ID NO: 1887731
aucuauguguuugggaaac

SEQ ID NO: 2492719 - RNA, 19 nt, Artificial Sequence
  Description of Artificial Sequence: Synthetic oligonucleotide
  Antisense strand to SEQ ID NO: 2492718
guuucccaaacacauagau

SEQ ID NO: 2492720 - RNA, 19 nt, Artificial Sequence
  Description of Artificial Sequence: Synthetic oligonucleotide
  Sense strand starting at position 428 of SEQ ID NO: 1887731
gugauuugcagccggaagu

SEQ ID NO: 2492721 - RNA, 19 nt, Artificial Sequence
  Description of Artificial Sequence: Synthetic oligonucleotide
  Antisense strand to SEQ ID NO: 2492720
acuuccggcugcaaaucac

SEQ ID NO: 2492722 - RNA, 19 nt, Artificial Sequence
  Description of Artificial Sequence: Synthetic oligonucleotide
  Sense strand starting at position 429 of SEQ ID NO: 1887731
ugauuugcagccggaagua

SEQ ID NO: 2492723 - RNA, 19 nt, Artificial Sequence
  Description of Artificial Sequence: Synthetic oligonucleotide
  Antisense strand to SEQ ID NO: 2492722
uacuuccggcugcaaauca

SEQ ID NO: 2492724 - RNA, 19 nt, Artificial Sequence
  Description of Artificial Sequence: Synthetic oligonucleotide
  Sense strand starting at position 444 of SEQ ID NO: 1887731
aguacuaacucucaggaau

SEQ ID NO: 2492725 - RNA, 19 nt, Artificial Sequence
  Description of Artificial Sequence: Synthetic oligonucleotide
  Antisense strand to SEQ ID NO: 2492724
auuccugagaguuaguacu

SEQ ID NO: 2492726 - RNA, 19 nt, Artificial Sequence
  Description of Artificial Sequence: Synthetic oligonucleotide
  Sense strand starting at position 513 of SEQ ID NO: 1887731
uucucuuuccugcaggagu

SEQ ID NO: 2492727 - RNA, 19 nt, Artificial Sequence
  Description of Artificial Sequence: Synthetic oligonucleotide
  Antisense strand to SEQ ID NO: 2492726
acuccugcaggaaagagaa

SEQ ID NO: 2492728 - RNA, 19 nt, Artificial Sequence
  Description of Artificial Sequence: Synthetic oligonucleotide
  Sense strand starting at position 568 of SEQ ID NO: 1887731
cgaguuacaaagugugaac

SEQ ID NO: 2492729 - RNA, 19 nt, Artificial Sequence
  Description of Artificial Sequence: Synthetic oligonucleotide
  Antisense strand to SEQ ID NO: 2492728
guucacacuuuguaacucg

SEQ ID NO: 2492730 - RNA, 19 nt, Artificial Sequence
  Description of Artificial Sequence: Synthetic oligonucleotide
  Sense strand starting at position 584 of SEQ ID NO: 1887731
aacugugacucccagaaag

SEQ ID NO: 2492731 - RNA, 19 nt, Artificial Sequence
  Description of Artificial Sequence: Synthetic oligonucleotide
  Antisense strand to SEQ ID NO: 2492730
cuuucugggagucacaguu

SEQ ID NO: 2492732 - RNA, 19 nt, Artificial Sequence
  Description of Artificial Sequence: Synthetic oligonucleotide
  Sense strand starting at position 586 of SEQ ID NO: 1887731
cugugacucccagaaagcu

SEQ ID NO: 2492733 - RNA, 19 nt, Artificial Sequence
  Description of Artificial Sequence: Synthetic oligonucleotide
  Antisense strand to SEQ ID NO: 2492732
agcuuucugggagucacag

SEQ ID NO: 2492734 - RNA, 19 nt, Artificial Sequence
  Description of Artificial Sequence: Synthetic oligonucleotide
  Sense strand starting at position 948 of SEQ ID NO: 1887731
aggugacucuaucuggaaa

SEQ ID NO: 2492735 - RNA, 19 nt, Artificial Sequence
  Description of Artificial Sequence: Synthetic oligonucleotide
  Antisense strand to SEQ ID NO: 2492734
uuuccagauagagucaccu

SEQ ID NO: 2492736 - RNA, 19 nt, Artificial Sequence
  Description of Artificial Sequence: Synthetic oligonucleotide
  Sense strand starting at position 949 of SEQ ID NO: 1887731
ggugacucuaucuggaaag

SEQ ID NO: 2492737 - RNA, 19 nt, Artificial Sequence
  Description of Artificial Sequence: Synthetic oligonucleotide
  Antisense strand to SEQ ID NO: 2492736
cuuuccagauagagucacc

SEQ ID NO: 2492738 - RNA, 19 nt, Artificial Sequence
  Description of Artificial Sequence: Synthetic oligonucleotide
  Sense strand starting at position 950 of SEQ ID NO: 1887731
gugacucuaucuggaaaga

SEQ ID NO: 2492739 - RNA, 19 nt, Artificial Sequence
  Description of Artificial Sequence: Synthetic oligonucleotide
  Antisense strand to SEQ ID NO: 2492738
ucuuuccagauagagucac

SEQ ID NO: 2492740 - RNA, 19 nt, Artificial Sequence
  Description of Artificial Sequence: Synthetic oligonucleotide
  Sense strand starting at position 963 of SEQ ID NO: 1887731
gaaagagggucuuugcaau

SEQ ID NO: 2492741 - RNA, 19 nt, Artificial Sequence
  Description of Artificial Sequence: Synthetic oligonucleotide
  Antisense strand to SEQ ID NO: 2492740
auugcaaagacccucuuuc

SEQ ID NO: 2492742 - RNA, 19 nt, Artificial Sequence
  Description of Artificial Sequence: Synthetic oligonucleotide
  Sense strand starting at position 970 of SEQ ID NO: 1887731
ggucuuugcaauuguagua

SEQ ID NO: 2492743 - RNA, 19 nt, Artificial Sequence
  Description of Artificial Sequence: Synthetic oligonucleotide
  Antisense strand to SEQ ID NO: 2492742
uacuacaauugcaaagacc

SEQ ID NO: 2492744 - RNA, 19 nt, Artificial Sequence
  Description of Artificial Sequence: Synthetic oligonucleotide
  Sense strand starting at position 975 of SEQ ID NO: 1887731
uugcaauuguaguaagaug

SEQ ID NO: 2492745 - RNA, 19 nt, Artificial Sequence
  Description of Artificial Sequence: Synthetic oligonucleotide
  Antisense strand to SEQ ID NO: 2492744
caucuuacuacaauugcaa

SEQ ID NO: 2492746 - RNA, 19 nt, Artificial Sequence
  Description of Artificial Sequence: Synthetic oligonucleotide
  Sense strand starting at position 1060 of SEQ ID NO: 1887731
gagagaaugccauguggag

SEQ ID NO: 2492747 - RNA, 19 nt, Artificial Sequence
  Description of Artificial Sequence: Synthetic oligonucleotide
  Antisense strand to SEQ ID NO: 2492746
cuccacauggcauucucuc

SEQ ID NO: 2492748 - RNA, 19 nt, Artificial Sequence
  Description of Artificial Sequence: Synthetic oligonucleotide
  Sense strand starting at position 1288 of SEQ ID NO: 1887731
gugguaauguguuaccaca

SEQ ID NO: 2492749 - RNA, 19 nt, Artificial Sequence
  Description of Artificial Sequence: Synthetic oligonucleotide
  Antisense strand to SEQ ID NO: 2492748
ugugguaacacauuaccac

SEQ ID NO: 2492750 - RNA, 19 nt, Artificial Sequence
  Description of Artificial Sequence: Synthetic oligonucleotide
  Sense strand starting at position 1397 of SEQ ID NO: 1887731
uguggaauaucccucaaau

SEQ ID NO: 2492751 - RNA, 19 nt, Artificial Sequence
  Description of Artificial Sequence: Synthetic oligonucleotide
  Antisense strand to SEQ ID NO: 2492750
auuugagggauauuccaca

SEQ ID NO: 2492752 - RNA, 19 nt, Artificial Sequence
  Description of Artificial Sequence: Synthetic oligonucleotide
  Sense strand starting at position 1408 of SEQ ID NO: 1887731
ccucaaaucuggugcauac

SEQ ID NO: 2492753 - RNA, 19 nt, Artificial Sequence
  Description of Artificial Sequence: Synthetic oligonucleotide
  Antisense strand to SEQ ID NO: 2492752
guaugcaccagauuugagg

SEQ ID NO: 2492754 - RNA, 19 nt, Artificial Sequence
  Description of Artificial Sequence: Synthetic oligonucleotide
  Sense strand starting at position 1417 of SEQ ID NO: 1887731
uggugcauacgaugauuau

SEQ ID NO: 2492755 - RNA, 19 nt, Artificial Sequence
  Description of Artificial Sequence: Synthetic oligonucleotide
  Antisense strand to SEQ ID NO: 2492754
auaaucaucguaugcacca

SEQ ID NO: 2492756 - RNA, 19 nt, Artificial Sequence
  Description of Artificial Sequence: Synthetic oligonucleotide
  Sense strand starting at position 1418 of SEQ ID NO: 1887731
ggugcauacgaugauuaua

SEQ ID NO: 2492757 - RNA, 19 nt, Artificial Sequence
  Description of Artificial Sequence: Synthetic oligonucleotide
  Antisense strand to SEQ ID NO: 2492756
uauaaucaucguaugcacc

SEQ ID NO: 2492758 - RNA, 19 nt, Artificial Sequence
  Description of Artificial Sequence: Synthetic oligonucleotide
  Sense strand starting at position 1420 of SEQ ID NO: 1887731
ugcauacgaugauuauaau

SEQ ID NO: 2492759 - RNA, 19 nt, Artificial Sequence
  Description of Artificial Sequence: Synthetic oligonucleotide
  Antisense strand to SEQ ID NO: 2492758
auuauaaucaucguaugca

SEQ ID NO: 2492760 - RNA, 19 nt, Artificial Sequence
  Description of Artificial Sequence: Synthetic oligonucleotide
  Sense strand starting at position 1421 of SEQ ID NO: 1887731
gcauacgaugauuauaaua

SEQ ID NO: 2492761 - RNA, 19 nt, Artificial Sequence
  Description of Artificial Sequence: Synthetic oligonucleotide
  Antisense strand to SEQ ID NO: 2492760
uauuauaaucaucguaugc

SEQ ID NO: 2492762 - RNA, 19 nt, Artificial Sequence
  Description of Artificial Sequence: Synthetic oligonucleotide
  Sense strand starting at position 1441 of SEQ ID NO: 1887731
aagucacggcucuagaaga

SEQ ID NO: 2492763 - RNA, 19 nt, Artificial Sequence
  Description of Artificial Sequence: Synthetic oligonucleotide
  Antisense strand to SEQ ID NO: 2492762
ucuucuagagccgugacuu

SEQ ID NO: 2492764 - RNA, 19 nt, Artificial Sequence
  Description of Artificial Sequence: Synthetic oligonucleotide
  Sense strand starting at position 1529 of SEQ ID NO: 1887731
ugggauucccgucaaaggu

SEQ ID NO: 2492765 - RNA, 19 nt, Artificial Sequence
  Description of Artificial Sequence: Synthetic oligonucleotide
  Antisense strand to SEQ ID NO: 2492764
accuuugacgggaauccca

SEQ ID NO: 2492766 - RNA, 19 nt, Artificial Sequence
  Description of Artificial Sequence: Synthetic oligonucleotide
  Sense strand starting at position 1538 of SEQ ID NO: 1887731
cgucaaaggucagcagaaa

SEQ ID NO: 2492767 - RNA, 19 nt, Artificial Sequence
  Description of Artificial Sequence: Synthetic oligonucleotide
  Antisense strand to SEQ ID NO: 2492766
uuucugcugaccuuugacg

SEQ ID NO: 2492768 - RNA, 19 nt, Artificial Sequence
  Description of Artificial Sequence: Synthetic oligonucleotide
  Sense strand starting at position 1705 of SEQ ID NO: 1887731
ggguggucugcgggagaca

SEQ ID NO: 2492769 - RNA, 19 nt, Artificial Sequence
  Description of Artificial Sequence: Synthetic oligonucleotide
  Antisense strand to SEQ ID NO: 2492768
ugucucccgcagaccaccc

SEQ ID NO: 2492770 - RNA, 19 nt, Artificial Sequence
  Description of Artificial Sequence: Synthetic oligonucleotide
  Sense strand starting at position 2850 of SEQ ID NO: 1887731
gcaggauucgaggacucgu

SEQ ID NO: 2492771 - RNA, 19 nt, Artificial Sequence
  Description of Artificial Sequence: Synthetic oligonucleotide
  Antisense strand to SEQ ID NO: 2492770
acgaguccucgaauccugc

SEQ ID NO: 2492772 - RNA, 19 nt, Artificial Sequence
  Description of Artificial Sequence: Synthetic oligonucleotide
  Sense strand starting at position 2899 of SEQ ID NO: 1887731
cagggauuccuuggguuuc

SEQ ID NO: 2492773 - RNA, 19 nt, Artificial Sequence
  Description of Artificial Sequence: Synthetic oligonucleotide
  Antisense strand to SEQ ID NO: 2492772
gaaacccaaggaaucccug

SEQ ID NO: 2492774 - RNA, 19 nt, Artificial Sequence
  Description of Artificial Sequence: Synthetic oligonucleotide
  Sense strand starting at position 3612 of SEQ ID NO: 1887731
ugggauagcuuagcucaca

SEQ ID NO: 2492775 - RNA, 19 nt, Artificial Sequence
  Description of Artificial Sequence: Synthetic oligonucleotide
  Antisense strand to SEQ ID NO: 2492774
ugugagcuaagcuauccca

SEQ ID NO: 2492776 - RNA, 19 nt, Artificial Sequence
  Description of Artificial Sequence: Synthetic oligonucleotide
  Sense strand starting at position 3613 of SEQ ID NO: 1887731
gggauagcuuagcucacaa

SEQ ID NO: 2492777 - RNA, 19 nt, Artificial Sequence
  Description of Artificial Sequence: Synthetic oligonucleotide
  Antisense strand to SEQ ID NO: 2492776
uugugagcuaagcuauccc

SEQ ID NO: 2492778 - RNA, 19 nt, Artificial Sequence
  Description of Artificial Sequence: Synthetic oligonucleotide
  Sense strand starting at position 3773 of SEQ ID NO: 1887731
gcaugucccuucccggaaa

SEQ ID NO: 2492779 - RNA, 19 nt, Artificial Sequence
  Description of Artificial Sequence: Synthetic oligonucleotide
  Antisense strand to SEQ ID NO: 2492778
uuuccgggaagggacaugc

SEQ ID NO: 2492780 - RNA, 19 nt, Artificial Sequence
  Description of Artificial Sequence: Synthetic oligonucleotide
  Sense strand starting at position 3774 of SEQ ID NO: 1887731
caugucccuucccggaaau

SEQ ID NO: 2492781 - RNA, 19 nt, Artificial Sequence
  Description of Artificial Sequence: Synthetic oligonucleotide
  Antisense strand to SEQ ID NO: 2492780
auuuccgggaagggacaug

SEQ ID NO: 2492782 - RNA, 19 nt, Artificial Sequence
  Description of Artificial Sequence: Synthetic oligonucleotide
  Sense strand starting at position 3775 of SEQ ID NO: 1887731
augucccuucccggaaaua

SEQ ID NO: 2492783 - RNA, 19 nt, Artificial Sequence
  Description of Artificial Sequence: Synthetic oligonucleotide
  Antisense strand to SEQ ID NO: 2492782
uauuuccgggaagggacau

SEQ ID NO: 2492784 - RNA, 19 nt, Artificial Sequence
  Description of Artificial Sequence: Synthetic oligonucleotide
  Sense strand starting at position 3776 of SEQ ID NO: 1887731
ugucccuucccggaaauau

SEQ ID NO: 2492785 - RNA, 19 nt, Artificial Sequence
  Description of Artificial Sequence: Synthetic oligonucleotide
  Antisense strand to SEQ ID NO: 2492784
auauuuccgggaagggaca

SEQ ID NO: 2492786 - RNA, 19 nt, Artificial Sequence
  Description of Artificial Sequence: Synthetic oligonucleotide
  Sense strand starting at position 235 of SEQ ID NO: 1887732
gugaucaaacccuaaaugu

SEQ ID NO: 2492787 - RNA, 19 nt, Artificial Sequence
  Description of Artificial Sequence: Synthetic oligonucleotide
  Antisense strand to SEQ ID NO: 2492786
acauuuaggguuugaucac

SEQ ID NO: 2492788 - RNA, 19 nt, Artificial Sequence
  Description of Artificial Sequence: Synthetic oligonucleotide
  Sense strand starting at position 263 of SEQ ID NO: 1887732
cgugcaauggaugagaguu

SEQ ID NO: 2492789 - RNA, 19 nt, Artificial Sequence
  Description of Artificial Sequence: Synthetic oligonucleotide
  Antisense strand to SEQ ID NO: 2492788
aacucucauccauugcacg

SEQ ID NO: 2492790 - RNA, 19 nt, Artificial Sequence
  Description of Artificial Sequence: Synthetic oligonucleotide
  Sense strand starting at position 353 of SEQ ID NO: 1887732
agucauaugucacugagau

SEQ ID NO: 2492791 - RNA, 19 nt, Artificial Sequence
  Description of Artificial Sequence: Synthetic oligonucleotide
  Antisense strand to SEQ ID NO: 2492790
aucucagugacauaugacu

SEQ ID NO: 2492792 - RNA, 19 nt, Artificial Sequence
  Description of Artificial Sequence: Synthetic oligonucleotide
  Sense strand starting at position 354 of SEQ ID NO: 1887732
gucauaugucacugagauu

SEQ ID NO: 2492793 - RNA, 19 nt, Artificial Sequence
  Description of Artificial Sequence: Synthetic oligonucleotide
  Antisense strand to SEQ ID NO: 2492792
aaucucagugacauaugac

SEQ ID NO: 2492794 - RNA, 19 nt, Artificial Sequence
  Description of Artificial Sequence: Synthetic oligonucleotide
  Sense strand starting at position 357 of SEQ ID NO: 1887732
auaugucacugagauuuaa

SEQ ID NO: 2492795 - RNA, 19 nt, Artificial Sequence
  Description of Artificial Sequence: Synthetic oligonucleotide
  Antisense strand to SEQ ID NO: 2492794
uuaaaucucagugacauau

SEQ ID NO: 2492796 - RNA, 19 nt, Artificial Sequence
  Description of Artificial Sequence: Synthetic oligonucleotide
  Sense strand starting at position 383 of SEQ ID NO: 1887732
uuuccugaaggcuaaugau

SEQ ID NO: 2492797 - RNA, 19 nt, Artificial Sequence
  Description of Artificial Sequence: Synthetic oligonucleotide
  Antisense strand to SEQ ID NO: 2492796
aucauuagccuucaggaaa

SEQ ID NO: 2492798 - RNA, 19 nt, Artificial Sequence
  Description of Artificial Sequence: Synthetic oligonucleotide
  Sense strand starting at position 404 of SEQ ID NO: 1887732
ugaacacccuugucauaug

SEQ ID NO: 2492799 - RNA, 19 nt, Artificial Sequence
  Description of Artificial Sequence: Synthetic oligonucleotide
  Antisense strand to SEQ ID NO: 2492798
cauaugacaaggguguuca

SEQ ID NO: 2492800 - RNA, 19 nt, Artificial Sequence
  Description of Artificial Sequence: Synthetic oligonucleotide
  Sense strand starting at position 485 of SEQ ID NO: 1887732
cuugucuugccugauuugu

SEQ ID NO: 2492801 - RNA, 19 nt, Artificial Sequence
  Description of Artificial Sequence: Synthetic oligonucleotide
  Antisense strand to SEQ ID NO: 2492800
acaaaucaggcaagacaag

SEQ ID NO: 2492802 - RNA, 19 nt, Artificial Sequence
  Description of Artificial Sequence: Synthetic oligonucleotide
  Sense strand starting at position 487 of SEQ ID NO: 1887732
ugucuugccugauuuguag

SEQ ID NO: 2492803 - RNA, 19 nt, Artificial Sequence
  Description of Artificial Sequence: Synthetic oligonucleotide
  Antisense strand to SEQ ID NO: 2492802
cuacaaaucaggcaagaca

SEQ ID NO: 2492804 - RNA, 19 nt, Artificial Sequence
  Description of Artificial Sequence: Synthetic oligonucleotide
  Sense strand starting at position 506 of SEQ ID NO: 1887732
acagguauuguggaugagu

SEQ ID NO: 2492805 - RNA, 19 nt, Artificial Sequence
  Description of Artificial Sequence: Synthetic oligonucleotide
  Antisense strand to SEQ ID NO: 2492804
acucauccacaauaccugu

SEQ ID NO: 2492806 - RNA, 19 nt, Artificial Sequence
  Description of Artificial Sequence: Synthetic oligonucleotide
  Sense strand starting at position 519 of SEQ ID NO: 1887732
augaguccuuucucagaaa

SEQ ID NO: 2492807 - RNA, 19 nt, Artificial Sequence
  Description of Artificial Sequence: Synthetic oligonucleotide
  Antisense strand to SEQ ID NO: 2492806
uuucugagaaaggacucau

SEQ ID NO: 2492808 - RNA, 19 nt, Artificial Sequence
  Description of Artificial Sequence: Synthetic oligonucleotide
  Sense strand starting at position 560 of SEQ ID NO: 1887732
cagucaguggcuugcauuu

SEQ ID NO: 2492809 - RNA, 19 nt, Artificial Sequence
  Description of Artificial Sequence: Synthetic oligonucleotide
  Antisense strand to SEQ ID NO: 2492808
aaaugcaagccacugacug

SEQ ID NO: 2492810 - RNA, 19 nt, Artificial Sequence
  Description of Artificial Sequence: Synthetic oligonucleotide
  Sense strand starting at position 651 of SEQ ID NO: 1887732
ugguuugcuguuuaacaaa

SEQ ID NO: 2492811 - RNA, 19 nt, Artificial Sequence
  Description of Artificial Sequence: Synthetic oligonucleotide
  Antisense strand to SEQ ID NO: 2492810
uuuguuaaacagcaaacca

SEQ ID NO: 2492812 - RNA, 19 nt, Artificial Sequence
  Description of Artificial Sequence: Synthetic oligonucleotide
  Sense strand starting at position 880 of SEQ ID NO: 1887732
cuguuaaacacauguggga

SEQ ID NO: 2492813 - RNA, 19 nt, Artificial Sequence
  Description of Artificial Sequence: Synthetic oligonucleotide
  Antisense strand to SEQ ID NO: 2492812
ucccacauguguuuaacag

SEQ ID NO: 2492814 - RNA, 19 nt, Artificial Sequence
  Description of Artificial Sequence: Synthetic oligonucleotide
  Sense strand starting at position 903 of SEQ ID NO: 1887732
uucuguacccuugauucca

SEQ ID NO: 2492815 - RNA, 19 nt, Artificial Sequence
  Description of Artificial Sequence: Synthetic oligonucleotide
  Antisense strand to SEQ ID NO: 2492814
uggaaucaaggguacagaa

SEQ ID NO: 2492816 - RNA, 19 nt, Artificial Sequence
  Description of Artificial Sequence: Synthetic oligonucleotide
  Sense strand starting at position 919 of SEQ ID NO: 1887732
ccauucuauugggcgauuu

SEQ ID NO: 2492817 - RNA, 19 nt, Artificial Sequence
  Description of Artificial Sequence: Synthetic oligonucleotide
  Antisense strand to SEQ ID NO: 2492816
aaaucgcccaauagaaugg

SEQ ID NO: 2492818 - RNA, 19 nt, Artificial Sequence
  Description of Artificial Sequence: Synthetic oligonucleotide
  Sense strand starting at position 931 of SEQ ID NO: 1887732
gcgauuuaaauaugcuugu

SEQ ID NO: 2492819 - RNA, 19 nt, Artificial Sequence
  Description of Artificial Sequence: Synthetic oligonucleotide
  Antisense strand to SEQ ID NO: 2492818
acaagcauauuuaaaucgc

SEQ ID NO: 2492820 - RNA, 19 nt, Artificial Sequence
  Description of Artificial Sequence: Synthetic oligonucleotide
  Sense strand starting at position 975 of SEQ ID NO: 1887732
gugucauaagucuucgucu

SEQ ID NO: 2492821 - RNA, 19 nt, Artificial Sequence
  Description of Artificial Sequence: Synthetic oligonucleotide
  Antisense strand to SEQ ID NO: 2492820
agacgaagacuuaugacac

SEQ ID NO: 2492822 - RNA, 19 nt, Artificial Sequence
  Description of Artificial Sequence: Synthetic oligonucleotide
  Sense strand starting at position 1113 of SEQ ID NO: 1887732
gugaauauuauguaggucu

SEQ ID NO: 2492823 - RNA, 19 nt, Artificial Sequence
  Description of Artificial Sequence: Synthetic oligonucleotide
  Antisense strand to SEQ ID NO: 2492822
agaccuacauaauauucac

SEQ ID NO: 2492824 - RNA, 19 nt, Artificial Sequence
  Description of Artificial Sequence: Synthetic oligonucleotide
  Sense strand starting at position 1415 of SEQ ID NO: 1887732
uacaguuuacauuagaggu

SEQ ID NO: 2492825 - RNA, 19 nt, Artificial Sequence
  Description of Artificial Sequence: Synthetic oligonucleotide
  Antisense strand to SEQ ID NO: 2492824
accucuaauguaaacugua

SEQ ID NO: 2492826 - RNA, 19 nt, Artificial Sequence
  Description of Artificial Sequence: Synthetic oligonucleotide
  Sense strand starting at position 2032 of SEQ ID NO: 1887732
gagcaauacgggugacuca

SEQ ID NO: 2492827 - RNA, 19 nt, Artificial Sequence
  Description of Artificial Sequence: Synthetic oligonucleotide
  Antisense strand to SEQ ID NO: 2492826
ugagucacccguauugcuc

SEQ ID NO: 2492828 - RNA, 19 nt, Artificial Sequence
  Description of Artificial Sequence: Synthetic oligonucleotide
  Sense strand starting at position 2041 of SEQ ID NO: 1887732
gggugacucaguuagugga

SEQ ID NO: 2492829 - RNA, 19 nt, Artificial Sequence
  Description of Artificial Sequence: Synthetic oligonucleotide
  Antisense strand to SEQ ID NO: 2492828
uccacuaacugagucaccc

SEQ ID NO: 2492830 - RNA, 19 nt, Artificial Sequence
  Description of Artificial Sequence: Synthetic oligonucleotide
  Sense strand starting at position 2049 of SEQ ID NO: 1887732
caguuaguggagugaaucu

SEQ ID NO: 2492831 - RNA, 19 nt, Artificial Sequence
  Description of Artificial Sequence: Synthetic oligonucleotide
  Antisense strand to SEQ ID NO: 2492830
agauucacuccacuaacug

SEQ ID NO: 2492832 - RNA, 19 nt, Artificial Sequence
  Description of Artificial Sequence: Synthetic oligonucleotide
  Sense strand starting at position 2056 of SEQ ID NO: 1887732
uggagugaaucucccaacu

SEQ ID NO: 2492833 - RNA, 19 nt, Artificial Sequence
  Description of Artificial Sequence: Synthetic oligonucleotide
  Antisense strand to SEQ ID NO: 2492832
aguugggagauucacucca

SEQ ID NO: 2492834 - RNA, 19 nt, Artificial Sequence
  Description of Artificial Sequence: Synthetic oligonucleotide
  Sense strand starting at position 2265 of SEQ ID NO: 1887732
cuguguaugguuuacacau

SEQ ID NO: 2492835 - RNA, 19 nt, Artificial Sequence
  Description of Artificial Sequence: Synthetic oligonucleotide
  Antisense strand to SEQ ID NO: 2492834
auguguaaaccauacacag

SEQ ID NO: 2492836 - RNA, 19 nt, Artificial Sequence
  Description of Artificial Sequence: Synthetic oligonucleotide
  Sense strand starting at position 2339 of SEQ ID NO: 1887732
acuuccuaccuguagcaua

SEQ ID NO: 2492837 - RNA, 19 nt, Artificial Sequence
  Description of Artificial Sequence: Synthetic oligonucleotide
  Antisense strand to SEQ ID NO: 2492836
uaugcuacagguaggaagu

SEQ ID NO: 2492838 - RNA, 19 nt, Artificial Sequence
  Description of Artificial Sequence: Synthetic oligonucleotide
  Sense strand starting at position 2376 of SEQ ID NO: 1887732
cguguauaaccugauuaau

SEQ ID NO: 2492839 - RNA, 19 nt, Artificial Sequence
  Description of Artificial Sequence: Synthetic oligonucleotide
  Antisense strand to SEQ ID NO: 2492838
auuaaucagguuauacacg

SEQ ID NO: 2492840 - RNA, 19 nt, Artificial Sequence
  Description of Artificial Sequence: Synthetic oligonucleotide
  Sense strand starting at position 2412 of SEQ ID NO: 1887732
ugugauuaccaguaugaau

SEQ ID NO: 2492841 - RNA, 19 nt, Artificial Sequence
  Description of Artificial Sequence: Synthetic oligonucleotide
  Antisense strand to SEQ ID NO: 2492840
auucauacugguaaucaca

SEQ ID NO: 2492842 - RNA, 19 nt, Artificial Sequence
  Description of Artificial Sequence: Synthetic oligonucleotide
  Sense strand starting at position 2414 of SEQ ID NO: 1887732
ugauuaccaguaugaauuc

SEQ ID NO: 2492843 - RNA, 19 nt, Artificial Sequence
  Description of Artificial Sequence: Synthetic oligonucleotide
  Antisense strand to SEQ ID NO: 2492842
gaauucauacugguaauca

SEQ ID NO: 2492844 - RNA, 19 nt, Artificial Sequence
  Description of Artificial Sequence: Synthetic oligonucleotide
  Sense strand starting at position 2423 of SEQ ID NO: 1887732
guaugaauucuuuacagua

SEQ ID NO: 2492845 - RNA, 19 nt, Artificial Sequence
  Description of Artificial Sequence: Synthetic oligonucleotide
  Antisense strand to SEQ ID NO: 2492844
uacuguaaagaauucauac

SEQ ID NO: 2492846 - RNA, 19 nt, Artificial Sequence
  Description of Artificial Sequence: Synthetic oligonucleotide
  Sense strand starting at position 2466 of SEQ ID NO: 1887732
caaagcaucgguuagguaa

SEQ ID NO: 2492847 - RNA, 19 nt, Artificial Sequence
  Description of Artificial Sequence: Synthetic oligonucleotide
  Antisense strand to SEQ ID NO: 2492846
uuaccuaaccgaugcuuug

SEQ ID NO: 2492848 - RNA, 19 nt, Artificial Sequence
  Description of Artificial Sequence: Synthetic oligonucleotide
  Sense strand starting at position 2474 of SEQ ID NO: 1887732
cgguuagguaacuauccaa

SEQ ID NO: 2492849 - RNA, 19 nt, Artificial Sequence
  Description of Artificial Sequence: Synthetic oligonucleotide
  Antisense strand to SEQ ID NO: 2492848
uuggauaguuaccuaaccg

SEQ ID NO: 2492850 - RNA, 19 nt, Artificial Sequence
  Description of Artificial Sequence: Synthetic oligonucleotide
  Sense strand starting at position 2481 of SEQ ID NO: 1887732
guaacuauccaagguccau

SEQ ID NO: 2492851 - RNA, 19 nt, Artificial Sequence
  Description of Artificial Sequence: Synthetic oligonucleotide
  Antisense strand to SEQ ID NO: 2492850
auggaccuuggauaguuac

SEQ ID NO: 2492852 - RNA, 19 nt, Artificial Sequence
  Description of Artificial Sequence: Synthetic oligonucleotide
  Sense strand starting at position 2487 of SEQ ID NO: 1887732
auccaagguccauagcuaa

SEQ ID NO: 2492853 - RNA, 19 nt, Artificial Sequence
  Description of Artificial Sequence: Synthetic oligonucleotide
  Antisense strand to SEQ ID NO: 2492852
uuagcuauggaccuuggau

SEQ ID NO: 2492854 - RNA, 19 nt, Artificial Sequence
  Description of Artificial Sequence: Synthetic oligonucleotide
  Sense strand starting at position 2581 of SEQ ID NO: 1887732
acacacauuucucagggaa

SEQ ID NO: 2492855 - RNA, 19 nt, Artificial Sequence
  Description of Artificial Sequence: Synthetic oligonucleotide
  Antisense strand to SEQ ID NO: 2492854
uucccugagaaaugugugu

SEQ ID NO: 2492856 - RNA, 19 nt, Artificial Sequence
  Description of Artificial Sequence: Synthetic oligonucleotide
  Sense strand starting at position 2610 of SEQ ID NO: 1887732
gcucauaaagcuugagauc

SEQ ID NO: 2492857 - RNA, 19 nt, Artificial Sequence
  Description of Artificial Sequence: Synthetic oligonucleotide
  Antisense strand to SEQ ID NO: 2492856
gaucucaagcuuuaugagc

SEQ ID NO: 2492858 - RNA, 19 nt, Artificial Sequence
  Description of Artificial Sequence: Synthetic oligonucleotide
  Sense strand starting at position 2842 of SEQ ID NO: 1887732
gcuccaguucccuagggau

SEQ ID NO: 2492859 - RNA, 19 nt, Artificial Sequence
  Description of Artificial Sequence: Synthetic oligonucleotide
  Antisense strand to SEQ ID NO: 2492858
aucccuagggaacuggagc

SEQ ID NO: 2492860 - RNA, 19 nt, Artificial Sequence
  Description of Artificial Sequence: Synthetic oligonucleotide
  Sense strand starting at position 3179 of SEQ ID NO: 1887732
aggacuuacuaugugcuau

SEQ ID NO: 2492861 - RNA, 19 nt, Artificial Sequence
  Description of Artificial Sequence: Synthetic oligonucleotide
  Antisense strand to SEQ ID NO: 2492860
auagcacauaguaaguccu

SEQ ID NO: 2492862 - RNA, 19 nt, Artificial Sequence
  Description of Artificial Sequence: Synthetic oligonucleotide
  Sense strand starting at position 3379 of SEQ ID NO: 1887732
ccucucuuaguguaaacaa

SEQ ID NO: 2492863 - RNA, 19 nt, Artificial Sequence
  Description of Artificial Sequence: Synthetic oligonucleotide
  Antisense strand to SEQ ID NO: 2492862
uuguuuacacuaagagagg

SEQ ID NO: 2492864 - RNA, 19 nt, Artificial Sequence
  Description of Artificial Sequence: Synthetic oligonucleotide
  Sense strand starting at position 3932 of SEQ ID NO: 1887732
accggacacuucucaacuu

SEQ ID NO: 2492865 - RNA, 19 nt, Artificial Sequence
  Description of Artificial Sequence: Synthetic oligonucleotide
  Antisense strand to SEQ ID NO: 2492864
aaguugagaaguguccggu

SEQ ID NO: 2492866 - RNA, 19 nt, Artificial Sequence
  Description of Artificial Sequence: Synthetic oligonucleotide
  Sense strand starting at position 109 of SEQ ID NO: 1887733
cagagauggucucacaaug

SEQ ID NO: 2492867 - RNA, 19 nt, Artificial Sequence
  Description of Artificial Sequence: Synthetic oligonucleotide
  Antisense strand to SEQ ID NO: 2492866
cauugugagaccaucucug

SEQ ID NO: 2492868 - RNA, 19 nt, Artificial Sequence
  Description of Artificial Sequence: Synthetic oligonucleotide
  Sense strand starting at position 140 of SEQ ID NO: 1887733
ggcugaaauuccugaacuc

SEQ ID NO: 2492869 - RNA, 19 nt, Artificial Sequence
  Description of Artificial Sequence: Synthetic oligonucleotide
  Antisense strand to SEQ ID NO: 2492868
gaguucaggaauuucagcc

SEQ ID NO: 2492870 - RNA, 19 nt, Artificial Sequence
  Description of Artificial Sequence: Synthetic oligonucleotide
  Sense strand starting at position 141 of SEQ ID NO: 1887733
gcugaaauuccugaacuca

SEQ ID NO: 2492871 - RNA, 19 nt, Artificial Sequence
  Description of Artificial Sequence: Synthetic oligonucleotide
  Antisense strand to SEQ ID NO: 2492870
ugaguucaggaauuucagc

SEQ ID NO: 2492872 - RNA, 19 nt, Artificial Sequence
  Description of Artificial Sequence: Synthetic oligonucleotide
  Sense strand starting at position 330 of SEQ ID NO: 1887733
ggauaucacgucugcaucu

SEQ ID NO: 2492873 - RNA, 19 nt, Artificial Sequence
  Description of Artificial Sequence: Synthetic oligonucleotide
  Antisense strand to SEQ ID NO: 2492872
agaugcagacgugauaucc

SEQ ID NO: 2492874 - RNA, 19 nt, Artificial Sequence
  Description of Artificial Sequence: Synthetic oligonucleotide
  Sense strand starting at position 616 of SEQ ID NO: 1887733
ucaagcgauuguccuaacu

SEQ ID NO: 2492875 - RNA, 19 nt, Artificial Sequence
  Description of Artificial Sequence: Synthetic oligonucleotide
  Antisense strand to SEQ ID NO: 2492874
aguuaggacaaucgcuuga

SEQ ID NO: 2492876 - RNA, 19 nt, Artificial Sequence
  Description of Artificial Sequence: Synthetic oligonucleotide
  Sense strand starting at position 618 of SEQ ID NO: 1887733
aagcgauuguccuaacuca

SEQ ID NO: 2492877 - RNA, 19 nt, Artificial Sequence
  Description of Artificial Sequence: Synthetic oligonucleotide
  Antisense strand to SEQ ID NO: 2492876
ugaguuaggacaaucgcuu

SEQ ID NO: 2492878 - RNA, 19 nt, Artificial Sequence
  Description of Artificial Sequence: Synthetic oligonucleotide
  Sense strand starting at position 843 of SEQ ID NO: 1887733
acagaugcuuguggcaaga

SEQ ID NO: 2492879 - RNA, 19 nt, Artificial Sequence
  Description of Artificial Sequence: Synthetic oligonucleotide
  Antisense strand to SEQ ID NO: 2492878
ucuugccacaagcaucugu

SEQ ID NO: 2492880 - RNA, 19 nt, Artificial Sequence
  Description of Artificial Sequence: Synthetic oligonucleotide
  Sense strand starting at position 845 of SEQ ID NO: 1887733
agaugcuuguggcaagaaa

SEQ ID NO: 2492881 - RNA, 19 nt, Artificial Sequence
  Description of Artificial Sequence: Synthetic oligonucleotide
  Antisense strand to SEQ ID NO: 2492880
uuucuugccacaagcaucu

SEQ ID NO: 2492882 - RNA, 19 nt, Artificial Sequence
  Description of Artificial Sequence: Synthetic oligonucleotide
  Sense strand starting at position 889 of SEQ ID NO: 1887733
cccagaggugacugauauu

SEQ ID NO: 2492883 - RNA, 19 nt, Artificial Sequence
  Description of Artificial Sequence: Synthetic oligonucleotide
  Antisense strand to SEQ ID NO: 2492882
aauaucagucaccucuggg

SEQ ID NO: 2492884 - RNA, 19 nt, Artificial Sequence
  Description of Artificial Sequence: Synthetic oligonucleotide
  Sense strand starting at position 892 of SEQ ID NO: 1887733
agaggugacugauauuaag

SEQ ID NO: 2492885 - RNA, 19 nt, Artificial Sequence
  Description of Artificial Sequence: Synthetic oligonucleotide
  Antisense strand to SEQ ID NO: 2492884
cuuaauaucagucaccucu

SEQ ID NO: 2492886 - RNA, 19 nt, Artificial Sequence
  Description of Artificial Sequence: Synthetic oligonucleotide
  Sense strand starting at position 895 of SEQ ID NO: 1887733
ggugacugauauuaagaug

SEQ ID NO: 2492887 - RNA, 19 nt, Artificial Sequence
  Description of Artificial Sequence: Synthetic oligonucleotide
  Antisense strand to SEQ ID NO: 2492886
caucuuaauaucagucacc

SEQ ID NO: 2492888 - RNA, 19 nt, Artificial Sequence
  Description of Artificial Sequence: Synthetic oligonucleotide
  Sense strand starting at position 900 of SEQ ID NO: 1887733
cugauauuaagaugugguu

SEQ ID NO: 2492889 - RNA, 19 nt, Artificial Sequence
  Description of Artificial Sequence: Synthetic oligonucleotide
  Antisense strand to SEQ ID NO: 2492888
aaccacaucuuaauaucag

SEQ ID NO: 2492890 - RNA, 19 nt, Artificial Sequence
  Description of Artificial Sequence: Synthetic oligonucleotide
  Sense strand starting at position 902 of SEQ ID NO: 1887733
gauauuaagaugugguuga

SEQ ID NO: 2492891 - RNA, 19 nt, Artificial Sequence
  Description of Artificial Sequence: Synthetic oligonucleotide
  Antisense strand to SEQ ID NO: 2492890
ucaaccacaucuuaauauc

SEQ ID NO: 2492892 - RNA, 19 nt, Artificial Sequence
  Description of Artificial Sequence: Synthetic oligonucleotide
  Sense strand starting at position 906 of SEQ ID NO: 1887733
uuaagaugugguugaccca

SEQ ID NO: 2492893 - RNA, 19 nt, Artificial Sequence
  Description of Artificial Sequence: Synthetic oligonucleotide
  Antisense strand to SEQ ID NO: 2492892
ugggucaaccacaucuuaa

SEQ ID NO: 2492894 - RNA, 19 nt, Artificial Sequence
  Description of Artificial Sequence: Synthetic oligonucleotide
  Sense strand starting at position 913 of SEQ ID NO: 1887733
gugguugacccacaaauca

SEQ ID NO: 2492895 - RNA, 19 nt, Artificial Sequence
  Description of Artificial Sequence: Synthetic oligonucleotide
  Antisense strand to SEQ ID NO: 2492894
ugauuugugggucaaccac

SEQ ID NO: 2492896 - RNA, 19 nt, Artificial Sequence
  Description of Artificial Sequence: Synthetic oligonucleotide
  Sense strand starting at position 1469 of SEQ ID NO: 1887733
agccgaaguggucaaugaa

SEQ ID NO: 2492897 - RNA, 19 nt, Artificial Sequence
  Description of Artificial Sequence: Synthetic oligonucleotide
  Antisense strand to SEQ ID NO: 2492896
uucauugaccacuucggcu

SEQ ID NO: 2492898 - RNA, 19 nt, Artificial Sequence
  Description of Artificial Sequence: Synthetic oligonucleotide
  Sense strand starting at position 1929 of SEQ ID NO: 1887733
ggcagcucugcuuagguga

SEQ ID NO: 2492899 - RNA, 19 nt, Artificial Sequence
  Description of Artificial Sequence: Synthetic oligonucleotide
  Antisense strand to SEQ ID NO: 2492898
ucaccuaagcagagcugcc

SEQ ID NO: 2492900 - RNA, 19 nt, Artificial Sequence
  Description of Artificial Sequence: Synthetic oligonucleotide
  Sense strand starting at position 1931 of SEQ ID NO: 1887733
cagcucugcuuaggugaga

SEQ ID NO: 2492901 - RNA, 19 nt, Artificial Sequence
  Description of Artificial Sequence: Synthetic oligonucleotide
  Antisense strand to SEQ ID NO: 2492900
ucucaccuaagcagagcug

SEQ ID NO: 2492902 - RNA, 19 nt, Artificial Sequence
  Description of Artificial Sequence: Synthetic oligonucleotide
  Sense strand starting at position 1951 of SEQ ID NO: 1887733
gggugaagacgugaggcau

SEQ ID NO: 2492903 - RNA, 19 nt, Artificial Sequence
  Description of Artificial Sequence: Synthetic oligonucleotide
  Antisense strand to SEQ ID NO: 2492902
augccucacgucuucaccc

SEQ ID NO: 2492904 - RNA, 19 nt, Artificial Sequence
  Description of Artificial Sequence: Synthetic oligonucleotide
  Sense strand starting at position 2522 of SEQ ID NO: 1887733
aagaauauguggugcauac

SEQ ID NO: 2492905 - RNA, 19 nt, Artificial Sequence
  Description of Artificial Sequence: Synthetic oligonucleotide
  Antisense strand to SEQ ID NO: 2492904
guaugcaccacauauucuu

SEQ ID NO: 2492906 - RNA, 19 nt, Artificial Sequence
  Description of Artificial Sequence: Synthetic oligonucleotide
  Sense strand starting at position 3054 of SEQ ID NO: 1887733
ucuacuugggcaugcaaga

SEQ ID NO: 2492907 - RNA, 19 nt, Artificial Sequence
  Description of Artificial Sequence: Synthetic oligonucleotide
  Antisense strand to SEQ ID NO: 2492906
ucuugcaugcccaaguaga

SEQ ID NO: 2492908 - RNA, 19 nt, Artificial Sequence
  Description of Artificial Sequence: Synthetic oligonucleotide
  Sense strand starting at position 3067 of SEQ ID NO: 1887733
gcaagaaguuguugaagac

SEQ ID NO: 2492909 - RNA, 19 nt, Artificial Sequence
  Description of Artificial Sequence: Synthetic oligonucleotide
  Antisense strand to SEQ ID NO: 2492908
gucuucaacaacuucuugc

SEQ ID NO: 2492910 - RNA, 19 nt, Artificial Sequence
  Description of Artificial Sequence: Synthetic oligonucleotide
  Sense strand starting at position 3301 of SEQ ID NO: 1887733
gcgucagggcugcaucauu

SEQ ID NO: 2492911 - RNA, 19 nt, Artificial Sequence
  Description of Artificial Sequence: Synthetic oligonucleotide
  Antisense strand to SEQ ID NO: 2492910
aaugaugcagcccugacgc

SEQ ID NO: 2492912 - RNA, 19 nt, Artificial Sequence
  Description of Artificial Sequence: Synthetic oligonucleotide
  Sense strand starting at position 3851 of SEQ ID NO: 1887733
uuggcaguccacugugaga

SEQ ID NO: 2492913 - RNA, 19 nt, Artificial Sequence
  Description of Artificial Sequence: Synthetic oligonucleotide
  Antisense strand to SEQ ID NO: 2492912
ucucacaguggacugccaa

SEQ ID NO: 2492914 - RNA, 19 nt, Artificial Sequence
  Description of Artificial Sequence: Synthetic oligonucleotide
  Sense strand starting at position 271 of SEQ ID NO: 1887734
caagaaugguggugugcau

SEQ ID NO: 2492915 - RNA, 19 nt, Artificial Sequence
  Description of Artificial Sequence: Synthetic oligonucleotide
  Antisense strand to SEQ ID NO: 2492914
augcacaccaccauucuug

SEQ ID NO: 2492916 - RNA, 19 nt, Artificial Sequence
  Description of Artificial Sequence: Synthetic oligonucleotide
  Sense strand starting at position 586 of SEQ ID NO: 1887734
agcgacaacgucuugcuau

SEQ ID NO: 2492917 - RNA, 19 nt, Artificial Sequence
  Description of Artificial Sequence: Synthetic oligonucleotide
  Antisense strand to SEQ ID NO: 2492916
auagcaagacguugucgcu

SEQ ID NO: 2492918 - RNA, 19 nt, Artificial Sequence
  Description of Artificial Sequence: Synthetic oligonucleotide
  Sense strand starting at position 587 of SEQ ID NO: 1887734
gcgacaacgucuugcuaug

SEQ ID NO: 2492919 - RNA, 19 nt, Artificial Sequence
  Description of Artificial Sequence: Synthetic oligonucleotide
  Antisense strand to SEQ ID NO: 2492918
cauagcaagacguugucgc

SEQ ID NO: 2492920 - RNA, 19 nt, Artificial Sequence
  Description of Artificial Sequence: Synthetic oligonucleotide
  Sense strand starting at position 729 of SEQ ID NO: 1887734
ugauaaacgcuuugaauac

SEQ ID NO: 2492921 - RNA, 19 nt, Artificial Sequence
  Description of Artificial Sequence: Synthetic oligonucleotide
  Antisense strand to SEQ ID NO: 2492920
guauucaaagcguuuauca

SEQ ID NO: 2492922 - RNA, 19 nt, Artificial Sequence
  Description of Artificial Sequence: Synthetic oligonucleotide
  Sense strand starting at position 754 of SEQ ID NO: 1887734
agcgcugaaucguaagcuu

SEQ ID NO: 2492923 - RNA, 19 nt, Artificial Sequence
  Description of Artificial Sequence: Synthetic oligonucleotide
  Antisense strand to SEQ ID NO: 2492922
aagcuuacgauucagcgcu

SEQ ID NO: 2492924 - RNA, 19 nt, Artificial Sequence
  Description of Artificial Sequence: Synthetic oligonucleotide
  Sense strand starting at position 782 of SEQ ID NO: 1887734
agugguaugcugugcaauu

SEQ ID NO: 2492925 - RNA, 19 nt, Artificial Sequence
  Description of Artificial Sequence: Synthetic oligonucleotide
  Antisense strand to SEQ ID NO: 2492924
aauugcacagcauaccacu

SEQ ID NO: 2492926 - RNA, 19 nt, Artificial Sequence
  Description of Artificial Sequence: Synthetic oligonucleotide
  Sense strand starting at position 783 of SEQ ID NO: 1887734
gugguaugcugugcaauuu

SEQ ID NO: 2492927 - RNA, 19 nt, Artificial Sequence
  Description of Artificial Sequence: Synthetic oligonucleotide
  Antisense strand to SEQ ID NO: 2492926
aaauugcacagcauaccac

SEQ ID NO: 2492928 - RNA, 19 nt, Artificial Sequence
  Description of Artificial Sequence: Synthetic oligonucleotide
  Sense strand starting at position 784 of SEQ ID NO: 1887734
ugguaugcugugcaauuua

SEQ ID NO: 2492929 - RNA, 19 nt, Artificial Sequence
  Description of Artificial Sequence: Synthetic oligonucleotide
  Antisense strand to SEQ ID NO: 2492928
uaaauugcacagcauacca

SEQ ID NO: 2492930 - RNA, 19 nt, Artificial Sequence
  Description of Artificial Sequence: Synthetic oligonucleotide
  Sense strand starting at position 955 of SEQ ID NO: 1887734
agccaucucugcucuguaa

SEQ ID NO: 2492931 - RNA, 19 nt, Artificial Sequence
  Description of Artificial Sequence: Synthetic oligonucleotide
  Antisense strand to SEQ ID NO: 2492930
uuacagagcagagauggcu

SEQ ID NO: 2492932 - RNA, 19 nt, Artificial Sequence
  Description of Artificial Sequence: Synthetic oligonucleotide
  Sense strand starting at position 1010 of SEQ ID NO: 1887734
aggacauguugcucccagu

SEQ ID NO: 2492933 - RNA, 19 nt, Artificial Sequence
  Description of Artificial Sequence: Synthetic oligonucleotide
  Antisense strand to SEQ ID NO: 2492932
acugggagcaacauguccu

SEQ ID NO: 2492934 - RNA, 19 nt, Artificial Sequence
  Description of Artificial Sequence: Synthetic oligonucleotide
  Sense strand starting at position 1033 of SEQ ID NO: 1887734
ucggauaucugaggcucuu

SEQ ID NO: 2492935 - RNA, 19 nt, Artificial Sequence
  Description of Artificial Sequence: Synthetic oligonucleotide
  Antisense strand to SEQ ID NO: 2492934
aagagccucagauauccga

SEQ ID NO: 2492936 - RNA, 19 nt, Artificial Sequence
  Description of Artificial Sequence: Synthetic oligonucleotide
  Sense strand starting at position 1039 of SEQ ID NO: 1887734
aucugaggcucuugacaaa

SEQ ID NO: 2492937 - RNA, 19 nt, Artificial Sequence
  Description of Artificial Sequence: Synthetic oligonucleotide
  Antisense strand to SEQ ID NO: 2492936
uuugucaagagccucagau

SEQ ID NO: 2492938 - RNA, 19 nt, Artificial Sequence
  Description of Artificial Sequence: Synthetic oligonucleotide
  Sense strand starting at position 1347 of SEQ ID NO: 1887734
gugccaaguuccuggguca

SEQ ID NO: 2492939 - RNA, 19 nt, Artificial Sequence
  Description of Artificial Sequence: Synthetic oligonucleotide
  Antisense strand to SEQ ID NO: 2492938
ugacccaggaacuuggcac

SEQ ID NO: 2492940 - RNA, 19 nt, Artificial Sequence
  Description of Artificial Sequence: Synthetic oligonucleotide
  Sense strand starting at position 1348 of SEQ ID NO: 1887734
ugccaaguuccugggucau

SEQ ID NO: 2492941 - RNA, 19 nt, Artificial Sequence
  Description of Artificial Sequence: Synthetic oligonucleotide
  Antisense strand to SEQ ID NO: 2492940
augacccaggaacuuggca

SEQ ID NO: 2492942 - RNA, 19 nt, Artificial Sequence
  Description of Artificial Sequence: Synthetic oligonucleotide
  Sense strand starting at position 1350 of SEQ ID NO: 1887734
ccaaguuccugggucauga

SEQ ID NO: 2492943 - RNA, 19 nt, Artificial Sequence
  Description of Artificial Sequence: Synthetic oligonucleotide
  Antisense strand to SEQ ID NO: 2492942
ucaugacccaggaacuugg

SEQ ID NO: 2492944 - RNA, 19 nt, Artificial Sequence
  Description of Artificial Sequence: Synthetic oligonucleotide
  Sense strand starting at position 1406 of SEQ ID NO: 1887734
agaaucacuugagucaagu

SEQ ID NO: 2492945 - RNA, 19 nt, Artificial Sequence
  Description of Artificial Sequence: Synthetic oligonucleotide
  Antisense strand to SEQ ID NO: 2492944
acuugacucaagugauucu

SEQ ID NO: 2492946 - RNA, 19 nt, Artificial Sequence
  Description of Artificial Sequence: Synthetic oligonucleotide
  Sense strand starting at position 1417 of SEQ ID NO: 1887734
agucaaguuucuuuccuuu

SEQ ID NO: 2492947 - RNA, 19 nt, Artificial Sequence
  Description of Artificial Sequence: Synthetic oligonucleotide
  Antisense strand to SEQ ID NO: 2492946
aaaggaaagaaacuugacu

SEQ ID NO: 2492948 - RNA, 19 nt, Artificial Sequence
  Description of Artificial Sequence: Synthetic oligonucleotide
  Sense strand starting at position 1449 of SEQ ID NO: 1887734
ggauacaccugguucucaa

SEQ ID NO: 2492949 - RNA, 19 nt, Artificial Sequence
  Description of Artificial Sequence: Synthetic oligonucleotide
  Antisense strand to SEQ ID NO: 2492948
uugagaaccagguguaucc

SEQ ID NO: 2492950 - RNA, 19 nt, Artificial Sequence
  Description of Artificial Sequence: Synthetic oligonucleotide
  Sense strand starting at position 1884 of SEQ ID NO: 1887734
acggguggaucugcucaau

SEQ ID NO: 2492951 - RNA, 19 nt, Artificial Sequence
  Description of Artificial Sequence: Synthetic oligonucleotide
  Antisense strand to SEQ ID NO: 2492950
auugagcagauccacccgu

SEQ ID NO: 2492952 - RNA, 19 nt, Artificial Sequence
  Description of Artificial Sequence: Synthetic oligonucleotide
  Sense strand starting at position 1887 of SEQ ID NO: 1887734
gguggaucugcucaaucag

SEQ ID NO: 2492953 - RNA, 19 nt, Artificial Sequence
  Description of Artificial Sequence: Synthetic oligonucleotide
  Antisense strand to SEQ ID NO: 2492952
cugauugagcagauccacc

SEQ ID NO: 2492954 - RNA, 19 nt, Artificial Sequence
  Description of Artificial Sequence: Synthetic oligonucleotide
  Sense strand starting at position 1911 of SEQ ID NO: 1887734
ggacgaucuucuccucguu

SEQ ID NO: 2492955 - RNA, 19 nt, Artificial Sequence
  Description of Artificial Sequence: Synthetic oligonucleotide
  Antisense strand to SEQ ID NO: 2492954
aacgaggagaagaucgucc

SEQ ID NO: 2492956 - RNA, 19 nt, Artificial Sequence
  Description of Artificial Sequence: Synthetic oligonucleotide
  Sense strand starting at position 1913 of SEQ ID NO: 1887734
acgaucuucuccucguuga

SEQ ID NO: 2492957 - RNA, 19 nt, Artificial Sequence
  Description of Artificial Sequence: Synthetic oligonucleotide
  Antisense strand to SEQ ID NO: 2492956
ucaacgaggagaagaucgu

SEQ ID NO: 2492958 - RNA, 19 nt, Artificial Sequence
  Description of Artificial Sequence: Synthetic oligonucleotide
  Sense strand starting at position 2124 of SEQ ID NO: 1887734
ucauccuucuuccgaagaa

SEQ ID NO: 2492959 - RNA, 19 nt, Artificial Sequence
  Description of Artificial Sequence: Synthetic oligonucleotide
  Antisense strand to SEQ ID NO: 2492958
uucuucggaagaaggauga

SEQ ID NO: 2492960 - RNA, 19 nt, Artificial Sequence
  Description of Artificial Sequence: Synthetic oligonucleotide
  Sense strand starting at position 2262 of SEQ ID NO: 1887734
ugaggaugcccaugaccuu

SEQ ID NO: 2492961 - RNA, 19 nt, Artificial Sequence
  Description of Artificial Sequence: Synthetic oligonucleotide
  Antisense strand to SEQ ID NO: 2492960
aaggucaugggcauccuca

SEQ ID NO: 2492962 - RNA, 19 nt, Artificial Sequence
  Description of Artificial Sequence: Synthetic oligonucleotide
  Sense strand starting at position 2271 of SEQ ID NO: 1887734
ccaugaccuugcugaagaa

SEQ ID NO: 2492963 - RNA, 19 nt, Artificial Sequence
  Description of Artificial Sequence: Synthetic oligonucleotide
  Antisense strand to SEQ ID NO: 2492962
uucuucagcaaggucaugg

SEQ ID NO: 2492964 - RNA, 19 nt, Artificial Sequence
  Description of Artificial Sequence: Synthetic oligonucleotide
  Sense strand starting at position 2386 of SEQ ID NO: 1887734
gggcacaucugaggucaga

SEQ ID NO: 2492965 - RNA, 19 nt, Artificial Sequence
  Description of Artificial Sequence: Synthetic oligonucleotide
  Antisense strand to SEQ ID NO: 2492964
ucugaccucagaugugccc

SEQ ID NO: 2492966 - RNA, 19 nt, Artificial Sequence
  Description of Artificial Sequence: Synthetic oligonucleotide
  Sense strand starting at position 2772 of SEQ ID NO: 1887734
ggcugacuccuggaaccuu

SEQ ID NO: 2492967 - RNA, 19 nt, Artificial Sequence
  Description of Artificial Sequence: Synthetic oligonucleotide
  Antisense strand to SEQ ID NO: 2492966
aagguuccaggagucagcc

SEQ ID NO: 2492968 - RNA, 19 nt, Artificial Sequence
  Description of Artificial Sequence: Synthetic oligonucleotide
  Sense strand starting at position 3038 of SEQ ID NO: 1887734
gggcgugcuggcuuauagu

SEQ ID NO: 2492969 - RNA, 19 nt, Artificial Sequence
  Description of Artificial Sequence: Synthetic oligonucleotide
  Antisense strand to SEQ ID NO: 2492968
acuauaagccagcacgccc

SEQ ID NO: 2492970 - RNA, 19 nt, Artificial Sequence
  Description of Artificial Sequence: Synthetic oligonucleotide
  Sense strand starting at position 3138 of SEQ ID NO: 1887734
acuccaaccuggugauaaa

SEQ ID NO: 2492971 - RNA, 19 nt, Artificial Sequence
  Description of Artificial Sequence: Synthetic oligonucleotide
  Antisense strand to SEQ ID NO: 2492970
uuuaucaccagguuggagu

SEQ ID NO: 2492972 - RNA, 19 nt, Artificial Sequence
  Description of Artificial Sequence: Synthetic oligonucleotide
  Sense strand starting at position 3149 of SEQ ID NO: 1887734
gugauaaagugagucucaa

SEQ ID NO: 2492973 - RNA, 19 nt, Artificial Sequence
  Description of Artificial Sequence: Synthetic oligonucleotide
  Antisense strand to SEQ ID NO: 2492972
uugagacucacuuuaucac

SEQ ID NO: 2492974 - RNA, 19 nt, Artificial Sequence
  Description of Artificial Sequence: Synthetic oligonucleotide
  Sense strand starting at position 3190 of SEQ ID NO: 1887734
ucagcaucgcuuggauuaa

SEQ ID NO: 2492975 - RNA, 19 nt, Artificial Sequence
  Description of Artificial Sequence: Synthetic oligonucleotide
  Antisense strand to SEQ ID NO: 2492974
uuaauccaagcgaugcuga

SEQ ID NO: 2492976 - RNA, 19 nt, Artificial Sequence
  Description of Artificial Sequence: Synthetic oligonucleotide
  Sense strand starting at position 3519 of SEQ ID NO: 1887734
acuggaguuuacugacacu

SEQ ID NO: 2492977 - RNA, 19 nt, Artificial Sequence
  Description of Artificial Sequence: Synthetic oligonucleotide
  Antisense strand to SEQ ID NO: 2492976
agugucaguaaacuccagu

SEQ ID NO: 2492978 - RNA, 19 nt, Artificial Sequence
  Description of Artificial Sequence: Synthetic oligonucleotide
  Sense strand starting at position 3522 of SEQ ID NO: 1887734
ggaguuuacugacacugac

SEQ ID NO: 2492979 - RNA, 19 nt, Artificial Sequence
  Description of Artificial Sequence: Synthetic oligonucleotide
  Antisense strand to SEQ ID NO: 2492978
gucagugucaguaaacucc

SEQ ID NO: 2492980 - RNA, 19 nt, Artificial Sequence
  Description of Artificial Sequence: Synthetic oligonucleotide
  Sense strand starting at position 3557 of SEQ ID NO: 1887734
gugaggcuugcguagugaa

SEQ ID NO: 2492981 - RNA, 19 nt, Artificial Sequence
  Description of Artificial Sequence: Synthetic oligonucleotide
  Antisense strand to SEQ ID NO: 2492980
uucacuacgcaagccucac

SEQ ID NO: 2492982 - RNA, 19 nt, Artificial Sequence
  Description of Artificial Sequence: Synthetic oligonucleotide
  Sense strand starting at position 3562 of SEQ ID NO: 1887734
gcuugcguagugaagguau

SEQ ID NO: 2492983 - RNA, 19 nt, Artificial Sequence
  Description of Artificial Sequence: Synthetic oligonucleotide
  Antisense strand to SEQ ID NO: 2492982
auaccuucacuacgcaagc

SEQ ID NO: 2492984 - RNA, 19 nt, Artificial Sequence
  Description of Artificial Sequence: Synthetic oligonucleotide
  Sense strand starting at position 3568 of SEQ ID NO: 1887734
guagugaagguauguguga

SEQ ID NO: 2492985 - RNA, 19 nt, Artificial Sequence
  Description of Artificial Sequence: Synthetic oligonucleotide
  Antisense strand to SEQ ID NO: 2492984
ucacacauaccuucacuac

SEQ ID NO: 2492986 - RNA, 19 nt, Artificial Sequence
  Description of Artificial Sequence: Synthetic oligonucleotide
  Sense strand starting at position 3569 of SEQ ID NO: 1887734
uagugaagguaugugugau

SEQ ID NO: 2492987 - RNA, 19 nt, Artificial Sequence
  Description of Artificial Sequence: Synthetic oligonucleotide
  Antisense strand to SEQ ID NO: 2492986
aucacacauaccuucacua

SEQ ID NO: 2492988 - RNA, 19 nt, Artificial Sequence
  Description of Artificial Sequence: Synthetic oligonucleotide
  Sense strand starting at position 3570 of SEQ ID NO: 1887734
agugaagguaugugugaug

SEQ ID NO: 2492989 - RNA, 19 nt, Artificial Sequence
  Description of Artificial Sequence: Synthetic oligonucleotide
  Antisense strand to SEQ ID NO: 2492988
caucacacauaccuucacu

SEQ ID NO: 2492990 - RNA, 19 nt, Artificial Sequence
  Description of Artificial Sequence: Synthetic oligonucleotide
  Sense strand starting at position 3575 of SEQ ID NO: 1887734
agguaugugugaugcugau

SEQ ID NO: 2492991 - RNA, 19 nt, Artificial Sequence
  Description of Artificial Sequence: Synthetic oligonucleotide
  Antisense strand to SEQ ID NO: 2492990
aucagcaucacacauaccu

SEQ ID NO: 2492992 - RNA, 19 nt, Artificial Sequence
  Description of Artificial Sequence: Synthetic oligonucleotide
  Sense strand starting at position 584 of SEQ ID NO: 1887735
gggauuugagccugucggu

SEQ ID NO: 2492993 - RNA, 19 nt, Artificial Sequence
  Description of Artificial Sequence: Synthetic oligonucleotide
  Antisense strand to SEQ ID NO: 2492992
accgacaggcucaaauccc

SEQ ID NO: 2492994 - RNA, 19 nt, Artificial Sequence
  Description of Artificial Sequence: Synthetic oligonucleotide
  Sense strand starting at position 865 of SEQ ID NO: 1887735
aauagaagcucggcacaaa

SEQ ID NO: 2492995 - RNA, 19 nt, Artificial Sequence
  Description of Artificial Sequence: Synthetic oligonucleotide
  Antisense strand to SEQ ID NO: 2492994
uuugugccgagcuucuauu

SEQ ID NO: 2492996 - RNA, 19 nt, Artificial Sequence
  Description of Artificial Sequence: Synthetic oligonucleotide
  Sense strand starting at position 1348 of SEQ ID NO: 1887735
cuguaucuuuauucuagga

SEQ ID NO: 2492997 - RNA, 19 nt, Artificial Sequence
  Description of Artificial Sequence: Synthetic oligonucleotide
  Antisense strand to SEQ ID NO: 2492996
uccuagaauaaagauacag

SEQ ID NO: 2492998 - RNA, 19 nt, Artificial Sequence
  Description of Artificial Sequence: Synthetic oligonucleotide
  Sense strand starting at position 1352 of SEQ ID NO: 1887735
aucuuuauucuaggaggca

SEQ ID NO: 2492999 - RNA, 19 nt, Artificial Sequence
  Description of Artificial Sequence: Synthetic oligonucleotide
  Antisense strand to SEQ ID NO: 2492998
ugccuccuagaauaaagau

SEQ ID NO: 2493000 - RNA, 19 nt, Artificial Sequence
  Description of Artificial Sequence: Synthetic oligonucleotide
  Sense strand starting at position 1353 of SEQ ID NO: 1887735
ucuuuauucuaggaggcaa

SEQ ID NO: 2493001 - RNA, 19 nt, Artificial Sequence
  Description of Artificial Sequence: Synthetic oligonucleotide
  Antisense strand to SEQ ID NO: 2493000
uugccuccuagaauaaaga

SEQ ID NO: 2493002 - RNA, 19 nt, Artificial Sequence
  Description of Artificial Sequence: Synthetic oligonucleotide
  Sense strand starting at position 1568 of SEQ ID NO: 1887735
ccaggcagcuaucuggaaa

SEQ ID NO: 2493003 - RNA, 19 nt, Artificial Sequence
  Description of Artificial Sequence: Synthetic oligonucleotide
  Antisense strand to SEQ ID NO: 2493002
uuuccagauagcugccugg

SEQ ID NO: 2493004 - RNA, 19 nt, Artificial Sequence
  Description of Artificial Sequence: Synthetic oligonucleotide
  Sense strand starting at position 1592 of SEQ ID NO: 1887735
ggagaugucgugugagggu

SEQ ID NO: 2493005 - RNA, 19 nt, Artificial Sequence
  Description of Artificial Sequence: Synthetic oligonucleotide
  Antisense strand to SEQ ID NO: 2493004
acccucacacgacaucucc

SEQ ID NO: 2493006 - RNA, 19 nt, Artificial Sequence
  Description of Artificial Sequence: Synthetic oligonucleotide
  Sense strand starting at position 2180 of SEQ ID NO: 1887735
cccaaagggucuucugcau

SEQ ID NO: 2493007 - RNA, 19 nt, Artificial Sequence
  Description of Artificial Sequence: Synthetic oligonucleotide
  Antisense strand to SEQ ID NO: 2493006
augcagaagacccuuuggg

SEQ ID NO: 2493008 - RNA, 19 nt, Artificial Sequence
  Description of Artificial Sequence: Synthetic oligonucleotide
  Sense strand starting at position 2758 of SEQ ID NO: 1887735
agcacucgagccuaugaga

SEQ ID NO: 2493009 - RNA, 19 nt, Artificial Sequence
  Description of Artificial Sequence: Synthetic oligonucleotide
  Antisense strand to SEQ ID NO: 2493008
ucucauaggcucgagugcu

SEQ ID NO: 2493010 - RNA, 19 nt, Artificial Sequence
  Description of Artificial Sequence: Synthetic oligonucleotide
  Sense strand starting at position 2807 of SEQ ID NO: 1887735
ucgggauaccagcaccauu

SEQ ID NO: 2493011 - RNA, 19 nt, Artificial Sequence
  Description of Artificial Sequence: Synthetic oligonucleotide
  Antisense strand to SEQ ID NO: 2493010
aauggugcugguaucccga

SEQ ID NO: 2493012 - RNA, 19 nt, Artificial Sequence
  Description of Artificial Sequence: Synthetic oligonucleotide
  Sense strand starting at position 3710 of SEQ ID NO: 1887735
ggcagagauggcugaguuu

SEQ ID NO: 2493013 - RNA, 19 nt, Artificial Sequence
  Description of Artificial Sequence: Synthetic oligonucleotide
  Antisense strand to SEQ ID NO: 2493012
aaacucagccaucucugcc

SEQ ID NO: 2493014 - RNA, 19 nt, Artificial Sequence
  Description of Artificial Sequence: Synthetic oligonucleotide
  Sense strand starting at position 3790 of SEQ ID NO: 1887735
cuggcugaauguugacuaa

SEQ ID NO: 2493015 - RNA, 19 nt, Artificial Sequence
  Description of Artificial Sequence: Synthetic oligonucleotide
  Antisense strand to SEQ ID NO: 2493014
uuagucaacauucagccag

SEQ ID NO: 2493016 - RNA, 19 nt, Artificial Sequence
  Description of Artificial Sequence: Synthetic oligonucleotide
  Sense strand starting at position 3793 of SEQ ID NO: 1887735
gcugaauguugacuaacac

SEQ ID NO: 2493017 - RNA, 19 nt, Artificial Sequence
  Description of Artificial Sequence: Synthetic oligonucleotide
  Antisense strand to SEQ ID NO: 2493016
guguuagucaacauucagc

SEQ ID NO: 2493018 - RNA, 19 nt, Artificial Sequence
  Description of Artificial Sequence: Synthetic oligonucleotide
  Sense strand starting at position 3840 of SEQ ID NO: 1887735
caaccuacgugcugaucaa

SEQ ID NO: 2493019 - RNA, 19 nt, Artificial Sequence
  Description of Artificial Sequence: Synthetic oligonucleotide
  Antisense strand to SEQ ID NO: 2493018
uugaucagcacguagguug

SEQ ID NO: 2493020 - RNA, 19 nt, Artificial Sequence
  Description of Artificial Sequence: Synthetic oligonucleotide
  Sense strand starting at position 3924 of SEQ ID NO: 1887735
acgccaucauuaggcgauu

SEQ ID NO: 2493021 - RNA, 19 nt, Artificial Sequence
  Description of Artificial Sequence: Synthetic oligonucleotide
  Antisense strand to SEQ ID NO: 2493020
aaucgccuaaugauggcgu

SEQ ID NO: 2493022 - RNA, 19 nt, Artificial Sequence
  Description of Artificial Sequence: Synthetic oligonucleotide
  Sense strand starting at position 3925 of SEQ ID NO: 1887735
cgccaucauuaggcgauuu

SEQ ID NO: 2493023 - RNA, 19 nt, Artificial Sequence
  Description of Artificial Sequence: Synthetic oligonucleotide
  Antisense strand to SEQ ID NO: 2493022
aaaucgccuaaugauggcg

SEQ ID NO: 2493024 - RNA, 19 nt, Artificial Sequence
  Description of Artificial Sequence: Synthetic oligonucleotide
  Sense strand starting at position 3943 of SEQ ID NO: 1887735
uugcuauugugugaacauu

SEQ ID NO: 2493025 - RNA, 19 nt, Artificial Sequence
  Description of Artificial Sequence: Synthetic oligonucleotide
  Antisense strand to SEQ ID NO: 2493024
aauguucacacaauagcaa

SEQ ID NO: 2493026 - RNA, 19 nt, Artificial Sequence
  Description of Artificial Sequence: Synthetic oligonucleotide
  Sense strand starting at position 2937 of SEQ ID NO: 1887736
gcuggacuccuccauuaga

SEQ ID NO: 2493027 - RNA, 19 nt, Artificial Sequence
  Description of Artificial Sequence: Synthetic oligonucleotide
  Antisense strand to SEQ ID NO: 2493026
ucuaauggaggaguccagc

SEQ ID NO: 2493028 - RNA, 19 nt, Artificial Sequence
  Description of Artificial Sequence: Synthetic oligonucleotide
  Sense strand starting at position 3133 of SEQ ID NO: 1887736
ccuguugugccucaaucuu

SEQ ID NO: 2493029 - RNA, 19 nt, Artificial Sequence
  Description of Artificial Sequence: Synthetic oligonucleotide
  Antisense strand to SEQ ID NO: 2493028
aagauugaggcacaacagg

SEQ ID NO: 2493030 - RNA, 19 nt, Artificial Sequence
  Description of Artificial Sequence: Synthetic oligonucleotide
  Sense strand starting at position 3626 of SEQ ID NO: 1887736
ggcacaaggcaucgugaau

SEQ ID NO: 2493031 - RNA, 19 nt, Artificial Sequence
  Description of Artificial Sequence: Synthetic oligonucleotide
  Antisense strand to SEQ ID NO: 2493030
auucacgaugccuugugcc

SEQ ID NO: 2493032 - RNA, 19 nt, Artificial Sequence
  Description of Artificial Sequence: Synthetic oligonucleotide
  Sense strand starting at position 7 of SEQ ID NO: 1887737
cugaaauccagcugaggga

SEQ ID NO: 2493033 - RNA, 19 nt, Artificial Sequence
  Description of Artificial Sequence: Synthetic oligonucleotide
  Antisense strand to SEQ ID NO: 2493032
ucccucagcuggauuucag

SEQ ID NO: 2493034 - RNA, 19 nt, Artificial Sequence
  Description of Artificial Sequence: Synthetic oligonucleotide
  Sense strand starting at position 202 of SEQ ID NO: 1887737
agaauacaccagugcaaau

SEQ ID NO: 2493035 - RNA, 19 nt, Artificial Sequence
  Description of Artificial Sequence: Synthetic oligonucleotide
  Antisense strand to SEQ ID NO: 2493034
auuugcacugguguauucu

SEQ ID NO: 2493036 - RNA, 19 nt, Artificial Sequence
  Description of Artificial Sequence: Synthetic oligonucleotide
  Sense strand starting at position 321 of SEQ ID NO: 1887737
cucccugucucugugacau

SEQ ID NO: 2493037 - RNA, 19 nt, Artificial Sequence
  Description of Artificial Sequence: Synthetic oligonucleotide
  Antisense strand to SEQ ID NO: 2493036
augucacagagacagggag

SEQ ID NO: 2493038 - RNA, 19 nt, Artificial Sequence
  Description of Artificial Sequence: Synthetic oligonucleotide
  Sense strand starting at position 334 of SEQ ID NO: 1887737
ugacaucugcuugggcaua

SEQ ID NO: 2493039 - RNA, 19 nt, Artificial Sequence
  Description of Artificial Sequence: Synthetic oligonucleotide
  Antisense strand to SEQ ID NO: 2493038
uaugcccaagcagauguca

SEQ ID NO: 2493040 - RNA, 19 nt, Artificial Sequence
  Description of Artificial Sequence: Synthetic oligonucleotide
  Sense strand starting at position 336 of SEQ ID NO: 1887737
acaucugcuugggcauaga

SEQ ID NO: 2493041 - RNA, 19 nt, Artificial Sequence
  Description of Artificial Sequence: Synthetic oligonucleotide
  Antisense strand to SEQ ID NO: 2493040
ucuaugcccaagcagaugu

SEQ ID NO: 2493042 - RNA, 19 nt, Artificial Sequence
  Description of Artificial Sequence: Synthetic oligonucleotide
  Sense strand starting at position 372 of SEQ ID NO: 1887737
gaggccuguuucucccaga

SEQ ID NO: 2493043 - RNA, 19 nt, Artificial Sequence
  Description of Artificial Sequence: Synthetic oligonucleotide
  Antisense strand to SEQ ID NO: 2493042
ucugggagaaacaggccuc

SEQ ID NO: 2493044 - RNA, 19 nt, Artificial Sequence
  Description of Artificial Sequence: Synthetic oligonucleotide
  Sense strand starting at position 377 of SEQ ID NO: 1887737
cuguuucucccagagcuga

SEQ ID NO: 2493045 - RNA, 19 nt, Artificial Sequence
  Description of Artificial Sequence: Synthetic oligonucleotide
  Antisense strand to SEQ ID NO: 2493044
ucagcucugggagaaacag

SEQ ID NO: 2493046 - RNA, 19 nt, Artificial Sequence
  Description of Artificial Sequence: Synthetic oligonucleotide
  Sense strand starting at position 582 of SEQ ID NO: 1887737
guuggaucuacugagccuu

SEQ ID NO: 2493047 - RNA, 19 nt, Artificial Sequence
  Description of Artificial Sequence: Synthetic oligonucleotide
  Antisense strand to SEQ ID NO: 2493046
aaggcucaguagauccaac

SEQ ID NO: 2493048 - RNA, 19 nt, Artificial Sequence
  Description of Artificial Sequence: Synthetic oligonucleotide
  Sense strand starting at position 588 of SEQ ID NO: 1887737
ucuacugagccuugaugau

SEQ ID NO: 2493049 - RNA, 19 nt, Artificial Sequence
  Description of Artificial Sequence: Synthetic oligonucleotide
  Antisense strand to SEQ ID NO: 2493048
aucaucaaggcucaguaga

SEQ ID NO: 2493050 - RNA, 19 nt, Artificial Sequence
  Description of Artificial Sequence: Synthetic oligonucleotide
  Sense strand starting at position 644 of SEQ ID NO: 1887737
gcacguuuccucccagugu

SEQ ID NO: 2493051 - RNA, 19 nt, Artificial Sequence
  Description of Artificial Sequence: Synthetic oligonucleotide
  Antisense strand to SEQ ID NO: 2493050
acacugggaggaaacgugc

SEQ ID NO: 2493052 - RNA, 19 nt, Artificial Sequence
  Description of Artificial Sequence: Synthetic oligonucleotide
  Sense strand starting at position 805 of SEQ ID NO: 1887737
ggucucugugaguaacagu

SEQ ID NO: 2493053 - RNA, 19 nt, Artificial Sequence
  Description of Artificial Sequence: Synthetic oligonucleotide
  Antisense strand to SEQ ID NO: 2493052
acuguuacucacagagacc

SEQ ID NO: 2493054 - RNA, 19 nt, Artificial Sequence
  Description of Artificial Sequence: Synthetic oligonucleotide
  Sense strand starting at position 958 of SEQ ID NO: 1887737
ucugguuuccucugagaaa

SEQ ID NO: 2493055 - RNA, 19 nt, Artificial Sequence
  Description of Artificial Sequence: Synthetic oligonucleotide
  Antisense strand to SEQ ID NO: 2493054
uuucucagaggaaaccaga

SEQ ID NO: 2493056 - RNA, 19 nt, Artificial Sequence
  Description of Artificial Sequence: Synthetic oligonucleotide
  Sense strand starting at position 991 of SEQ ID NO: 1887737
cuguuagucccugggauuu

SEQ ID NO: 2493057 - RNA, 19 nt, Artificial Sequence
  Description of Artificial Sequence: Synthetic oligonucleotide
  Antisense strand to SEQ ID NO: 2493056
aaaucccagggacuaacag

SEQ ID NO: 2493058 - RNA, 19 nt, Artificial Sequence
  Description of Artificial Sequence: Synthetic oligonucleotide
  Sense strand starting at position 1063 of SEQ ID NO: 1887737
agggaccucuuauuguuau

SEQ ID NO: 2493059 - RNA, 19 nt, Artificial Sequence
  Description of Artificial Sequence: Synthetic oligonucleotide
  Antisense strand to SEQ ID NO: 2493058
auaacaauaagaggucccu

SEQ ID NO: 2493060 - RNA, 19 nt, Artificial Sequence
  Description of Artificial Sequence: Synthetic oligonucleotide
  Sense strand starting at position 1089 of SEQ ID NO: 1887737
ggguuucuacauugguaag

SEQ ID NO: 2493061 - RNA, 19 nt, Artificial Sequence
  Description of Artificial Sequence: Synthetic oligonucleotide
  Antisense strand to SEQ ID NO: 2493060
cuuaccaauguagaaaccc

SEQ ID NO: 2493062 - RNA, 19 nt, Artificial Sequence
  Description of Artificial Sequence: Synthetic oligonucleotide
  Sense strand starting at position 1090 of SEQ ID NO: 1887737
gguuucuacauugguaaga

SEQ ID NO: 2493063 - RNA, 19 nt, Artificial Sequence
  Description of Artificial Sequence: Synthetic oligonucleotide
  Antisense strand to SEQ ID NO: 2493062
ucuuaccaauguagaaacc

SEQ ID NO: 2493064 - RNA, 19 nt, Artificial Sequence
  Description of Artificial Sequence: Synthetic oligonucleotide
  Sense strand starting at position 1228 of SEQ ID NO: 1887737
ugaugcugucaacagaucu

SEQ ID NO: 2493065 - RNA, 19 nt, Artificial Sequence
  Description of Artificial Sequence: Synthetic oligonucleotide
  Antisense strand to SEQ ID NO: 2493064
agaucuguugacagcauca

SEQ ID NO: 2493066 - RNA, 19 nt, Artificial Sequence
  Description of Artificial Sequence: Synthetic oligonucleotide
  Sense strand starting at position 1235 of SEQ ID NO: 1887737
gucaacagaucuucuggau

SEQ ID NO: 2493067 - RNA, 19 nt, Artificial Sequence
  Description of Artificial Sequence: Synthetic oligonucleotide
  Antisense strand to SEQ ID NO: 2493066
auccagaagaucuguugac

SEQ ID NO: 2493068 - RNA, 19 nt, Artificial Sequence
  Description of Artificial Sequence: Synthetic oligonucleotide
  Sense strand starting at position 1348 of SEQ ID NO: 1887737
gugugugagaguuacggua

SEQ ID NO: 2493069 - RNA, 19 nt, Artificial Sequence
  Description of Artificial Sequence: Synthetic oligonucleotide
  Antisense strand to SEQ ID NO: 2493068
uaccguaacucucacacac

SEQ ID NO: 2493070 - RNA, 19 nt, Artificial Sequence
  Description of Artificial Sequence: Synthetic oligonucleotide
  Sense strand starting at position 2013 of SEQ ID NO: 1887737
ggcuuguggcccgugagau

SEQ ID NO: 2493071 - RNA, 19 nt, Artificial Sequence
  Description of Artificial Sequence: Synthetic oligonucleotide
  Antisense strand to SEQ ID NO: 2493070
aucucacgggccacaagcc

SEQ ID NO: 2493072 - RNA, 19 nt, Artificial Sequence
  Description of Artificial Sequence: Synthetic oligonucleotide
  Sense strand starting at position 2019 of SEQ ID NO: 1887737
uggcccgugagaugugaaa

SEQ ID NO: 2493073 - RNA, 19 nt, Artificial Sequence
  Description of Artificial Sequence: Synthetic oligonucleotide
  Antisense strand to SEQ ID NO: 2493072
uuucacaucucacgggcca

SEQ ID NO: 2493074 - RNA, 19 nt, Artificial Sequence
  Description of Artificial Sequence: Synthetic oligonucleotide
  Sense strand starting at position 2021 of SEQ ID NO: 1887737
gcccgugagaugugaaaga

SEQ ID NO: 2493075 - RNA, 19 nt, Artificial Sequence
  Description of Artificial Sequence: Synthetic oligonucleotide
  Antisense strand to SEQ ID NO: 2493074
ucuuucacaucucacgggc

SEQ ID NO: 2493076 - RNA, 19 nt, Artificial Sequence
  Description of Artificial Sequence: Synthetic oligonucleotide
  Sense strand starting at position 2469 of SEQ ID NO: 1887737
ucagcuagugaaggguuaa

SEQ ID NO: 2493077 - RNA, 19 nt, Artificial Sequence
  Description of Artificial Sequence: Synthetic oligonucleotide
  Antisense strand to SEQ ID NO: 2493076
uuaacccuucacuagcuga

SEQ ID NO: 2493078 - RNA, 19 nt, Artificial Sequence
  Description of Artificial Sequence: Synthetic oligonucleotide
  Sense strand starting at position 2631 of SEQ ID NO: 1887737
aguguuugagauugauaca

SEQ ID NO: 2493079 - RNA, 19 nt, Artificial Sequence
  Description of Artificial Sequence: Synthetic oligonucleotide
  Antisense strand to SEQ ID NO: 2493078
uguaucaaucucaaacacu

SEQ ID NO: 2493080 - RNA, 19 nt, Artificial Sequence
  Description of Artificial Sequence: Synthetic oligonucleotide
  Sense strand starting at position 2632 of SEQ ID NO: 1887737
guguuugagauugauacau

SEQ ID NO: 2493081 - RNA, 19 nt, Artificial Sequence
  Description of Artificial Sequence: Synthetic oligonucleotide
  Antisense strand to SEQ ID NO: 2493080
auguaucaaucucaaacac

SEQ ID NO: 2493082 - RNA, 19 nt, Artificial Sequence
  Description of Artificial Sequence: Synthetic oligonucleotide
  Sense strand starting at position 2729 of SEQ ID NO: 1887737
acaucacaaguuugauaug

SEQ ID NO: 2493083 - RNA, 19 nt, Artificial Sequence
  Description of Artificial Sequence: Synthetic oligonucleotide
  Antisense strand to SEQ ID NO: 2493082
cauaucaaacuugugaugu

SEQ ID NO: 2493084 - RNA, 19 nt, Artificial Sequence
  Description of Artificial Sequence: Synthetic oligonucleotide
  Sense strand starting at position 2734 of SEQ ID NO: 1887737
acaaguuugauauguugua

SEQ ID NO: 2493085 - RNA, 19 nt, Artificial Sequence
  Description of Artificial Sequence: Synthetic oligonucleotide
  Antisense strand to SEQ ID NO: 2493084
uacaacauaucaaacuugu

SEQ ID NO: 2493086 - RNA, 19 nt, Artificial Sequence
  Description of Artificial Sequence: Synthetic oligonucleotide
  Sense strand starting at position 3203 of SEQ ID NO: 1887737
ugaugucuagauuaagucu

SEQ ID NO: 2493087 - RNA, 19 nt, Artificial Sequence
  Description of Artificial Sequence: Synthetic oligonucleotide
  Antisense strand to SEQ ID NO: 2493086
agacuuaaucuagacauca

SEQ ID NO: 2493088 - RNA, 19 nt, Artificial Sequence
  Description of Artificial Sequence: Synthetic oligonucleotide
  Sense strand starting at position 3206 of SEQ ID NO: 1887737
ugucuagauuaagucuguu

SEQ ID NO: 2493089 - RNA, 19 nt, Artificial Sequence
  Description of Artificial Sequence: Synthetic oligonucleotide
  Antisense strand to SEQ ID NO: 2493088
aacagacuuaaucuagaca

SEQ ID NO: 2493090 - RNA, 19 nt, Artificial Sequence
  Description of Artificial Sequence: Synthetic oligonucleotide
  Sense strand starting at position 3270 of SEQ ID NO: 1887737
gcugaaacuugguuuguga

SEQ ID NO: 2493091 - RNA, 19 nt, Artificial Sequence
  Description of Artificial Sequence: Synthetic oligonucleotide
  Antisense strand to SEQ ID NO: 2493090
ucacaaaccaaguuucagc

SEQ ID NO: 2493092 - RNA, 19 nt, Artificial Sequence
  Description of Artificial Sequence: Synthetic oligonucleotide
  Sense strand starting at position 3279 of SEQ ID NO: 1887737
ugguuugugacccagugua

SEQ ID NO: 2493093 - RNA, 19 nt, Artificial Sequence
  Description of Artificial Sequence: Synthetic oligonucleotide
  Antisense strand to SEQ ID NO: 2493092
uacacugggucacaaacca

SEQ ID NO: 2493094 - RNA, 19 nt, Artificial Sequence
  Description of Artificial Sequence: Synthetic oligonucleotide
  Sense strand starting at position 3289 of SEQ ID NO: 1887737
cccaguguaugguuaauuu

SEQ ID NO: 2493095 - RNA, 19 nt, Artificial Sequence
  Description of Artificial Sequence: Synthetic oligonucleotide
  Antisense strand to SEQ ID NO: 2493094
aaauuaaccauacacuggg

SEQ ID NO: 2493096 - RNA, 19 nt, Artificial Sequence
  Description of Artificial Sequence: Synthetic oligonucleotide
  Sense strand starting at position 3306 of SEQ ID NO: 1887737
uuugguuaauguuccauga

SEQ ID NO: 2493097 - RNA, 19 nt, Artificial Sequence
  Description of Artificial Sequence: Synthetic oligonucleotide
  Antisense strand to SEQ ID NO: 2493096
ucauggaacauuaaccaaa

SEQ ID NO: 2493098 - RNA, 19 nt, Artificial Sequence
  Description of Artificial Sequence: Synthetic oligonucleotide
  Sense strand starting at position 3310 of SEQ ID NO: 1887737
guuaauguuccaugaauac

SEQ ID NO: 2493099 - RNA, 19 nt, Artificial Sequence
  Description of Artificial Sequence: Synthetic oligonucleotide
  Antisense strand to SEQ ID NO: 2493098
guauucauggaacauuaac

SEQ ID NO: 2493100 - RNA, 19 nt, Artificial Sequence
  Description of Artificial Sequence: Synthetic oligonucleotide
  Sense strand starting at position 3342 of SEQ ID NO: 1887737
aaagcugucuuagcuauga

SEQ ID NO: 2493101 - RNA, 19 nt, Artificial Sequence
  Description of Artificial Sequence: Synthetic oligonucleotide
  Antisense strand to SEQ ID NO: 2493100
ucauagcuaagacagcuuu

SEQ ID NO: 2493102 - RNA, 19 nt, Artificial Sequence
  Description of Artificial Sequence: Synthetic oligonucleotide
  Sense strand starting at position 3503 of SEQ ID NO: 1887737
ugauaagggaccuguaucu

SEQ ID NO: 2493103 - RNA, 19 nt, Artificial Sequence
  Description of Artificial Sequence: Synthetic oligonucleotide
  Antisense strand to SEQ ID NO: 2493102
agauacaggucccuuauca

SEQ ID NO: 2493104 - RNA, 19 nt, Artificial Sequence
  Description of Artificial Sequence: Synthetic oligonucleotide
  Sense strand starting at position 3704 of SEQ ID NO: 1887737
ggaugccuauaaucagaua

SEQ ID NO: 2493105 - RNA, 19 nt, Artificial Sequence
  Description of Artificial Sequence: Synthetic oligonucleotide
  Antisense strand to SEQ ID NO: 2493104
uaucugauuauaggcaucc

SEQ ID NO: 2493106 - RNA, 19 nt, Artificial Sequence
  Description of Artificial Sequence: Synthetic oligonucleotide
  Sense strand starting at position 3718 of SEQ ID NO: 1887737
agauaacauguguaggcaa

SEQ ID NO: 2493107 - RNA, 19 nt, Artificial Sequence
  Description of Artificial Sequence: Synthetic oligonucleotide
  Antisense strand to SEQ ID NO: 2493106
uugccuacacauguuaucu

SEQ ID NO: 2493108 - RNA, 19 nt, Artificial Sequence
  Description of Artificial Sequence: Synthetic oligonucleotide
  Sense strand starting at position 3861 of SEQ ID NO: 1887737
uucuacuccuacguauaga

SEQ ID NO: 2493109 - RNA, 19 nt, Artificial Sequence
  Description of Artificial Sequence: Synthetic oligonucleotide
  Antisense strand to SEQ ID NO: 2493108
ucuauacguaggaguagaa

SEQ ID NO: 2493110 - RNA, 19 nt, Artificial Sequence
  Description of Artificial Sequence: Synthetic oligonucleotide
  Sense strand starting at position 3890 of SEQ ID NO: 1887737
augaguauauguccucaca

SEQ ID NO: 2493111 - RNA, 19 nt, Artificial Sequence
  Description of Artificial Sequence: Synthetic oligonucleotide
  Antisense strand to SEQ ID NO: 2493110
ugugaggacauauacucau

SEQ ID NO: 2493112 - RNA, 19 nt, Artificial Sequence
  Description of Artificial Sequence: Synthetic oligonucleotide
  Sense strand starting at position 117 of SEQ ID NO: 1887738
uccagaagaucaugaugga

SEQ ID NO: 2493113 - RNA, 19 nt, Artificial Sequence
  Description of Artificial Sequence: Synthetic oligonucleotide
  Antisense strand to SEQ ID NO: 2493112
uccaucaugaucuucugga

SEQ ID NO: 2493114 - RNA, 19 nt, Artificial Sequence
  Description of Artificial Sequence: Synthetic oligonucleotide
  Sense strand starting at position 120 of SEQ ID NO: 1887738
agaagaucaugauggaguu

SEQ ID NO: 2493115 - RNA, 19 nt, Artificial Sequence
  Description of Artificial Sequence: Synthetic oligonucleotide
  Antisense strand to SEQ ID NO: 2493114
aacuccaucaugaucuucu

SEQ ID NO: 2493116 - RNA, 19 nt, Artificial Sequence
  Description of Artificial Sequence: Synthetic oligonucleotide
  Sense strand starting at position 145 of SEQ ID NO: 1887738
gcaggcagagaucauggau

SEQ ID NO: 2493117 - RNA, 19 nt, Artificial Sequence
  Description of Artificial Sequence: Synthetic oligonucleotide
  Antisense strand to SEQ ID NO: 2493116
auccaugaucucugccugc

SEQ ID NO: 2493118 - RNA, 19 nt, Artificial Sequence
  Description of Artificial Sequence: Synthetic oligonucleotide
  Sense strand starting at position 148 of SEQ ID NO: 1887738
ggcagagaucauggauaug

SEQ ID NO: 2493119 - RNA, 19 nt, Artificial Sequence
  Description of Artificial Sequence: Synthetic oligonucleotide
  Antisense strand to SEQ ID NO: 2493118
cauauccaugaucucugcc

SEQ ID NO: 2493120 - RNA, 19 nt, Artificial Sequence
  Description of Artificial Sequence: Synthetic oligonucleotide
  Sense strand starting at position 175 of SEQ ID NO: 1887738
gaugaugaaugaugccauu

SEQ ID NO: 2493121 - RNA, 19 nt, Artificial Sequence
  Description of Artificial Sequence: Synthetic oligonucleotide
  Antisense strand to SEQ ID NO: 2493120
aauggcaucauucaucauc

SEQ ID NO: 2493122 - RNA, 19 nt, Artificial Sequence
  Description of Artificial Sequence: Synthetic oligonucleotide
  Sense strand starting at position 178 of SEQ ID NO: 1887738
gaugaaugaugccauugau

SEQ ID NO: 2493123 - RNA, 19 nt, Artificial Sequence
  Description of Artificial Sequence: Synthetic oligonucleotide
  Antisense strand to SEQ ID NO: 2493122
aucaauggcaucauucauc

SEQ ID NO: 2493124 - RNA, 19 nt, Artificial Sequence
  Description of Artificial Sequence: Synthetic oligonucleotide
  Sense strand starting at position 181 of SEQ ID NO: 1887738
gaaugaugccauugaugau

SEQ ID NO: 2493125 - RNA, 19 nt, Artificial Sequence
  Description of Artificial Sequence: Synthetic oligonucleotide
  Antisense strand to SEQ ID NO: 2493124
aucaucaauggcaucauuc

SEQ ID NO: 2493126 - RNA, 19 nt, Artificial Sequence
  Description of Artificial Sequence: Synthetic oligonucleotide
  Sense strand starting at position 193 of SEQ ID NO: 1887738
ugaugaugccaugggugau

SEQ ID NO: 2493127 - RNA, 19 nt, Artificial Sequence
  Description of Artificial Sequence: Synthetic oligonucleotide
  Antisense strand to SEQ ID NO: 2493126
aucacccauggcaucauca

SEQ ID NO: 2493128 - RNA, 19 nt, Artificial Sequence
  Description of Artificial Sequence: Synthetic oligonucleotide
  Sense strand starting at position 377 of SEQ ID NO: 1887738
ucgagugagugcuccaaau

SEQ ID NO: 2493129 - RNA, 19 nt, Artificial Sequence
  Description of Artificial Sequence: Synthetic oligonucleotide
  Antisense strand to SEQ ID NO: 2493128
auuuggagcacucacucga

SEQ ID NO: 2493130 - RNA, 19 nt, Artificial Sequence
  Description of Artificial Sequence: Synthetic oligonucleotide
  Sense strand starting at position 379 of SEQ ID NO: 1887738
gagugagugcuccaaaucc

SEQ ID NO: 2493131 - RNA, 19 nt, Artificial Sequence
  Description of Artificial Sequence: Synthetic oligonucleotide
  Antisense strand to SEQ ID NO: 2493130
ggauuuggagcacucacuc

SEQ ID NO: 2493132 - RNA, 19 nt, Artificial Sequence
  Description of Artificial Sequence: Synthetic oligonucleotide
  Sense strand starting at position 947 of SEQ ID NO: 1887738
cugguaggaucuugagagu

SEQ ID NO: 2493133 - RNA, 19 nt, Artificial Sequence
  Description of Artificial Sequence: Synthetic oligonucleotide
  Antisense strand to SEQ ID NO: 2493132
acucucaagauccuaccag

SEQ ID NO: 2493134 - RNA, 19 nt, Artificial Sequence
  Description of Artificial Sequence: Synthetic oligonucleotide
  Sense strand starting at position 950 of SEQ ID NO: 1887738
guaggaucuugagagucca

SEQ ID NO: 2493135 - RNA, 19 nt, Artificial Sequence
  Description of Artificial Sequence: Synthetic oligonucleotide
  Antisense strand to SEQ ID NO: 2493134
uggacucucaagauccuac

SEQ ID NO: 2493136 - RNA, 19 nt, Artificial Sequence
  Description of Artificial Sequence: Synthetic oligonucleotide
  Sense strand starting at position 983 of SEQ ID NO: 1887738
ggcuguaguguccaacacu

SEQ ID NO: 2493137 - RNA, 19 nt, Artificial Sequence
  Description of Artificial Sequence: Synthetic oligonucleotide
  Antisense strand to SEQ ID NO: 2493136
aguguuggacacuacagcc

SEQ ID NO: 2493138 - RNA, 19 nt, Artificial Sequence
  Description of Artificial Sequence: Synthetic oligonucleotide
  Sense strand starting at position 986 of SEQ ID NO: 1887738
uguaguguccaacacuguu

SEQ ID NO: 2493139 - RNA, 19 nt, Artificial Sequence
  Description of Artificial Sequence: Synthetic oligonucleotide
  Antisense strand to SEQ ID NO: 2493138
aacaguguuggacacuaca

SEQ ID NO: 2493140 - RNA, 19 nt, Artificial Sequence
  Description of Artificial Sequence: Synthetic oligonucleotide
  Sense strand starting at position 998 of SEQ ID NO: 1887738
cacuguuugguccagugau

SEQ ID NO: 2493141 - RNA, 19 nt, Artificial Sequence
  Description of Artificial Sequence: Synthetic oligonucleotide
  Antisense strand to SEQ ID NO: 2493140
aucacuggaccaaacagug

SEQ ID NO: 2493142 - RNA, 19 nt, Artificial Sequence
  Description of Artificial Sequence: Synthetic oligonucleotide
  Sense strand starting at position 1004 of SEQ ID NO: 1887738
uugguccagugaugguuua

SEQ ID NO: 2493143 - RNA, 19 nt, Artificial Sequence
  Description of Artificial Sequence: Synthetic oligonucleotide
  Antisense strand to SEQ ID NO: 2493142
uaaaccaucacuggaccaa

SEQ ID NO: 2493144 - RNA, 19 nt, Artificial Sequence
  Description of Artificial Sequence: Synthetic oligonucleotide
  Sense strand starting at position 1005 of SEQ ID NO: 1887738
ugguccagugaugguuuaa

SEQ ID NO: 2493145 - RNA, 19 nt, Artificial Sequence
  Description of Artificial Sequence: Synthetic oligonucleotide
  Antisense strand to SEQ ID NO: 2493144
uuaaaccaucacuggacca

SEQ ID NO: 2493146 - RNA, 19 nt, Artificial Sequence
  Description of Artificial Sequence: Synthetic oligonucleotide
  Sense strand starting at position 1015 of SEQ ID NO: 1887738
augguuuaaugacaacacu

SEQ ID NO: 2493147 - RNA, 19 nt, Artificial Sequence
  Description of Artificial Sequence: Synthetic oligonucleotide
  Antisense strand to SEQ ID NO: 2493146
aguguugucauuaaaccau

SEQ ID NO: 2493148 - RNA, 19 nt, Artificial Sequence
  Description of Artificial Sequence: Synthetic oligonucleotide
  Sense strand starting at position 1093 of SEQ ID NO: 1887738
ucgacuguagaguaacuaa

SEQ ID NO: 2493149 - RNA, 19 nt, Artificial Sequence
  Description of Artificial Sequence: Synthetic oligonucleotide
  Antisense strand to SEQ ID NO: 2493148
uuaguuacucuacagucga

SEQ ID NO: 2493150 - RNA, 19 nt, Artificial Sequence
  Description of Artificial Sequence: Synthetic oligonucleotide
  Sense strand starting at position 1122 of SEQ ID NO: 1887738
agagaugaaugauaauguu

SEQ ID NO: 2493151 - RNA, 19 nt, Artificial Sequence
  Description of Artificial Sequence: Synthetic oligonucleotide
  Antisense strand to SEQ ID NO: 2493150
aacauuaucauucaucucu

SEQ ID NO: 2493152 - RNA, 19 nt, Artificial Sequence
  Description of Artificial Sequence: Synthetic oligonucleotide
  Sense strand starting at position 1125 of SEQ ID NO: 1887738
gaugaaugauaauguuaag

SEQ ID NO: 2493153 - RNA, 19 nt, Artificial Sequence
  Description of Artificial Sequence: Synthetic oligonucleotide
  Antisense strand to SEQ ID NO: 2493152
cuuaacauuaucauucauc

SEQ ID NO: 2493154 - RNA, 19 nt, Artificial Sequence
  Description of Artificial Sequence: Synthetic oligonucleotide
  Sense strand starting at position 1131 of SEQ ID NO: 1887738
ugauaauguuaaguggacu

SEQ ID NO: 2493155 - RNA, 19 nt, Artificial Sequence
  Description of Artificial Sequence: Synthetic oligonucleotide
  Antisense strand to SEQ ID NO: 2493154
aguccacuuaacauuauca

SEQ ID NO: 2493156 - RNA, 19 nt, Artificial Sequence
  Description of Artificial Sequence: Synthetic oligonucleotide
  Sense strand starting at position 1188 of SEQ ID NO: 1887738
gucucaguucacuguggga

SEQ ID NO: 2493157 - RNA, 19 nt, Artificial Sequence
  Description of Artificial Sequence: Synthetic oligonucleotide
  Antisense strand to SEQ ID NO: 2493156
ucccacagugaacugagac

SEQ ID NO: 2493158 - RNA, 19 nt, Artificial Sequence
  Description of Artificial Sequence: Synthetic oligonucleotide
  Sense strand starting at position 1201 of SEQ ID NO: 1887738
gugggaccuucugaagaug

SEQ ID NO: 2493159 - RNA, 19 nt, Artificial Sequence
  Description of Artificial Sequence: Synthetic oligonucleotide
  Antisense strand to SEQ ID NO: 2493158
caucuucagaaggucccac

SEQ ID NO: 2493160 - RNA, 19 nt, Artificial Sequence
  Description of Artificial Sequence: Synthetic oligonucleotide
  Sense strand starting at position 1246 of SEQ ID NO: 1887738
ggaagcauucaguagagug

SEQ ID NO: 2493161 - RNA, 19 nt, Artificial Sequence
  Description of Artificial Sequence: Synthetic oligonucleotide
  Antisense strand to SEQ ID NO: 2493160
cacucuacugaaugcuucc

SEQ ID NO: 2493162 - RNA, 19 nt, Artificial Sequence
  Description of Artificial Sequence: Synthetic oligonucleotide
  Sense strand starting at position 1319 of SEQ ID NO: 1887738
cccaguaucccacagggua

SEQ ID NO: 2493163 - RNA, 19 nt, Artificial Sequence
  Description of Artificial Sequence: Synthetic oligonucleotide
  Antisense strand to SEQ ID NO: 2493162
uacccugugggauacuggg

SEQ ID NO: 2493164 - RNA, 19 nt, Artificial Sequence
  Description of Artificial Sequence: Synthetic oligonucleotide
  Sense strand starting at position 1360 of SEQ ID NO: 1887738
cauccuuugcccuggguga

SEQ ID NO: 2493165 - RNA, 19 nt, Artificial Sequence
  Description of Artificial Sequence: Synthetic oligonucleotide
  Antisense strand to SEQ ID NO: 2493164
ucacccagggcaaaggaug

SEQ ID NO: 2493166 - RNA, 19 nt, Artificial Sequence
  Description of Artificial Sequence: Synthetic oligonucleotide
  Sense strand starting at position 1481 of SEQ ID NO: 1887738
ugccaccagugcuugauaa

SEQ ID NO: 2493167 - RNA, 19 nt, Artificial Sequence
  Description of Artificial Sequence: Synthetic oligonucleotide
  Antisense strand to SEQ ID NO: 2493166
uuaucaagcacugguggca

SEQ ID NO: 2493168 - RNA, 19 nt, Artificial Sequence
  Description of Artificial Sequence: Synthetic oligonucleotide
  Sense strand starting at position 1491 of SEQ ID NO: 1887738
gcuugauaaggcugacuag

SEQ ID NO: 2493169 - RNA, 19 nt, Artificial Sequence
  Description of Artificial Sequence: Synthetic oligonucleotide
  Antisense strand to SEQ ID NO: 2493168
cuagucagccuuaucaagc

SEQ ID NO: 2493170 - RNA, 19 nt, Artificial Sequence
  Description of Artificial Sequence: Synthetic oligonucleotide
  Sense strand starting at position 1492 of SEQ ID NO: 1887738
cuugauaaggcugacuagu

SEQ ID NO: 2493171 - RNA, 19 nt, Artificial Sequence
  Description of Artificial Sequence: Synthetic oligonucleotide
  Antisense strand to SEQ ID NO: 2493170
acuagucagccuuaucaag

SEQ ID NO: 2493172 - RNA, 19 nt, Artificial Sequence
  Description of Artificial Sequence: Synthetic oligonucleotide
  Sense strand starting at position 1994 of SEQ ID NO: 1887738
uggcucaccucaguuaacu

SEQ ID NO: 2493173 - RNA, 19 nt, Artificial Sequence
  Description of Artificial Sequence: Synthetic oligonucleotide
  Antisense strand to SEQ ID NO: 2493172
aguuaacugaggugagcca

SEQ ID NO: 2493174 - RNA, 19 nt, Artificial Sequence
  Description of Artificial Sequence: Synthetic oligonucleotide
  Sense strand starting at position 2345 of SEQ ID NO: 1887738
cauuguaagggaugucaca

SEQ ID NO: 2493175 - RNA, 19 nt, Artificial Sequence
  Description of Artificial Sequence: Synthetic oligonucleotide
  Antisense strand to SEQ ID NO: 2493174
ugugacaucccuuacaaug

SEQ ID NO: 2493176 - RNA, 19 nt, Artificial Sequence
  Description of Artificial Sequence: Synthetic oligonucleotide
  Sense strand starting at position 2576 of SEQ ID NO: 1887738
acaugauccuguccagaca

SEQ ID NO: 2493177 - RNA, 19 nt, Artificial Sequence
  Description of Artificial Sequence: Synthetic oligonucleotide
  Antisense strand to SEQ ID NO: 2493176
ugucuggacaggaucaugu

SEQ ID NO: 2493178 - RNA, 19 nt, Artificial Sequence
  Description of Artificial Sequence: Synthetic oligonucleotide
  Sense strand starting at position 3018 of SEQ ID NO: 1887738
cagcuauaguuccuuggga

SEQ ID NO: 2493179 - RNA, 19 nt, Artificial Sequence
  Description of Artificial Sequence: Synthetic oligonucleotide
  Antisense strand to SEQ ID NO: 2493178
ucccaaggaacuauagcug

SEQ ID NO: 2493180 - RNA, 19 nt, Artificial Sequence
  Description of Artificial Sequence: Synthetic oligonucleotide
  Sense strand starting at position 3020 of SEQ ID NO: 1887738
gcuauaguuccuugggaca

SEQ ID NO: 2493181 - RNA, 19 nt, Artificial Sequence
  Description of Artificial Sequence: Synthetic oligonucleotide
  Antisense strand to SEQ ID NO: 2493180
ugucccaaggaacuauagc

SEQ ID NO: 2493182 - RNA, 19 nt, Artificial Sequence
  Description of Artificial Sequence: Synthetic oligonucleotide
  Sense strand starting at position 3036 of SEQ ID NO: 1887738
acaggcuuaccuugacaau

SEQ ID NO: 2493183 - RNA, 19 nt, Artificial Sequence
  Description of Artificial Sequence: Synthetic oligonucleotide
  Antisense strand to SEQ ID NO: 2493182
auugucaagguaagccugu

SEQ ID NO: 2493184 - RNA, 19 nt, Artificial Sequence
  Description of Artificial Sequence: Synthetic oligonucleotide
  Sense strand starting at position 3412 of SEQ ID NO: 1887738
uagggaucaucuccuuaga

SEQ ID NO: 2493185 - RNA, 19 nt, Artificial Sequence
  Description of Artificial Sequence: Synthetic oligonucleotide
  Antisense strand to SEQ ID NO: 2493184
ucuaaggagaugaucccua

SEQ ID NO: 2493186 - RNA, 19 nt, Artificial Sequence
  Description of Artificial Sequence: Synthetic oligonucleotide
  Sense strand starting at position 3788 of SEQ ID NO: 1887738
gccacaaucuugccugcaa

SEQ ID NO: 2493187 - RNA, 19 nt, Artificial Sequence
  Description of Artificial Sequence: Synthetic oligonucleotide
  Antisense strand to SEQ ID NO: 2493186
uugcaggcaagauuguggc

SEQ ID NO: 2493188 - RNA, 19 nt, Artificial Sequence
  Description of Artificial Sequence: Synthetic oligonucleotide
  Sense strand starting at position 3844 of SEQ ID NO: 1887738
guaauaacagagugaggua

SEQ ID NO: 2493189 - RNA, 19 nt, Artificial Sequence
  Description of Artificial Sequence: Synthetic oligonucleotide
  Antisense strand to SEQ ID NO: 2493188
uaccucacucuguuauuac

SEQ ID NO: 2493190 - RNA, 19 nt, Artificial Sequence
  Description of Artificial Sequence: Synthetic oligonucleotide
  Sense strand starting at position 69 of SEQ ID NO: 1887739
ugugcacaucgggaucauu

SEQ ID NO: 2493191 - RNA, 19 nt, Artificial Sequence
  Description of Artificial Sequence: Synthetic oligonucleotide
  Antisense strand to SEQ ID NO: 2493190
aaugaucccgaugugcaca

SEQ ID NO: 2493192 - RNA, 19 nt, Artificial Sequence
  Description of Artificial Sequence: Synthetic oligonucleotide
  Sense strand starting at position 78 of SEQ ID NO: 1887739
cgggaucauuucuggaaag

SEQ ID NO: 2493193 - RNA, 19 nt, Artificial Sequence
  Description of Artificial Sequence: Synthetic oligonucleotide
  Antisense strand to SEQ ID NO: 2493192
cuuuccagaaaugaucccg

SEQ ID NO: 2493194 - RNA, 19 nt, Artificial Sequence
  Description of Artificial Sequence: Synthetic oligonucleotide
  Sense strand starting at position 79 of SEQ ID NO: 1887739
gggaucauuucuggaaaga

SEQ ID NO: 2493195 - RNA, 19 nt, Artificial Sequence
  Description of Artificial Sequence: Synthetic oligonucleotide
  Antisense strand to SEQ ID NO: 2493194
ucuuuccagaaaugauccc

SEQ ID NO: 2493196 - RNA, 19 nt, Artificial Sequence
  Description of Artificial Sequence: Synthetic oligonucleotide
  Sense strand starting at position 89 of SEQ ID NO: 1887739
cuggaaagacugugugaga

SEQ ID NO: 2493197 - RNA, 19 nt, Artificial Sequence
  Description of Artificial Sequence: Synthetic oligonucleotide
  Antisense strand to SEQ ID NO: 2493196
ucucacacagucuuuccag

SEQ ID NO: 2493198 - RNA, 19 nt, Artificial Sequence
  Description of Artificial Sequence: Synthetic oligonucleotide
  Sense strand starting at position 90 of SEQ ID NO: 1887739
uggaaagacugugugagau

SEQ ID NO: 2493199 - RNA, 19 nt, Artificial Sequence
  Description of Artificial Sequence: Synthetic oligonucleotide
  Antisense strand to SEQ ID NO: 2493198
aucucacacagucuuucca

SEQ ID NO: 2493200 - RNA, 19 nt, Artificial Sequence
  Description of Artificial Sequence: Synthetic oligonucleotide
  Sense strand starting at position 92 of SEQ ID NO: 1887739
gaaagacugugugagauua

SEQ ID NO: 2493201 - RNA, 19 nt, Artificial Sequence
  Description of Artificial Sequence: Synthetic oligonucleotide
  Antisense strand to SEQ ID NO: 2493200
uaaucucacacagucuuuc

SEQ ID NO: 2493202 - RNA, 19 nt, Artificial Sequence
  Description of Artificial Sequence: Synthetic oligonucleotide
  Sense strand starting at position 94 of SEQ ID NO: 1887739
aagacugugugagauuauc

SEQ ID NO: 2493203 - RNA, 19 nt, Artificial Sequence
  Description of Artificial Sequence: Synthetic oligonucleotide
  Antisense strand to SEQ ID NO: 2493202
gauaaucucacacagucuu

SEQ ID NO: 2493204 - RNA, 19 nt, Artificial Sequence
  Description of Artificial Sequence: Synthetic oligonucleotide
  Sense strand starting at position 100 of SEQ ID NO: 1887739
gugugagauuaucucagga

SEQ ID NO: 2493205 - RNA, 19 nt, Artificial Sequence
  Description of Artificial Sequence: Synthetic oligonucleotide
  Antisense strand to SEQ ID NO: 2493204
uccugagauaaucucacac

SEQ ID NO: 2493206 - RNA, 19 nt, Artificial Sequence
  Description of Artificial Sequence: Synthetic oligonucleotide
  Sense strand starting at position 102 of SEQ ID NO: 1887739
gugagauuaucucaggaga

SEQ ID NO: 2493207 - RNA, 19 nt, Artificial Sequence
  Description of Artificial Sequence: Synthetic oligonucleotide
  Antisense strand to SEQ ID NO: 2493206
ucuccugagauaaucucac

SEQ ID NO: 2493208 - RNA, 19 nt, Artificial Sequence
  Description of Artificial Sequence: Synthetic oligonucleotide
  Sense strand starting at position 104 of SEQ ID NO: 1887739
gagauuaucucaggagagc

SEQ ID NO: 2493209 - RNA, 19 nt, Artificial Sequence
  Description of Artificial Sequence: Synthetic oligonucleotide
  Antisense strand to SEQ ID NO: 2493208
gcucuccugagauaaucuc

SEQ ID NO: 2493210 - RNA, 19 nt, Artificial Sequence
  Description of Artificial Sequence: Synthetic oligonucleotide
  Sense strand starting at position 836 of SEQ ID NO: 1887739
ggucaucucaagugucaug

SEQ ID NO: 2493211 - RNA, 19 nt, Artificial Sequence
  Description of Artificial Sequence: Synthetic oligonucleotide
  Antisense strand to SEQ ID NO: 2493210
caugacacuugagaugacc

SEQ ID NO: 2493212 - RNA, 19 nt, Artificial Sequence
  Description of Artificial Sequence: Synthetic oligonucleotide
  Sense strand starting at position 841 of SEQ ID NO: 1887739
ucucaagugucaugagcuc

SEQ ID NO: 2493213 - RNA, 19 nt, Artificial Sequence
  Description of Artificial Sequence: Synthetic oligonucleotide
  Antisense strand to SEQ ID NO: 2493212
gagcucaugacacuugaga

SEQ ID NO: 2493214 - RNA, 19 nt, Artificial Sequence
  Description of Artificial Sequence: Synthetic oligonucleotide
  Sense strand starting at position 1790 of SEQ ID NO: 1887739
gccggaacuccuugaggac

SEQ ID NO: 2493215 - RNA, 19 nt, Artificial Sequence
  Description of Artificial Sequence: Synthetic oligonucleotide
  Antisense strand to SEQ ID NO: 2493214
guccucaaggaguuccggc

SEQ ID NO: 2493216 - RNA, 19 nt, Artificial Sequence
  Description of Artificial Sequence: Synthetic oligonucleotide
  Sense strand starting at position 1884 of SEQ ID NO: 1887739
cuccuccucuugguagauu

SEQ ID NO: 2493217 - RNA, 19 nt, Artificial Sequence
  Description of Artificial Sequence: Synthetic oligonucleotide
  Antisense strand to SEQ ID NO: 2493216
aaucuaccaagaggaggag

SEQ ID NO: 2493218 - RNA, 19 nt, Artificial Sequence
  Description of Artificial Sequence: Synthetic oligonucleotide
  Sense strand starting at position 1885 of SEQ ID NO: 1887739
uccuccucuugguagauuu

SEQ ID NO: 2493219 - RNA, 19 nt, Artificial Sequence
  Description of Artificial Sequence: Synthetic oligonucleotide
  Antisense strand to SEQ ID NO: 2493218
aaaucuaccaagaggagga

SEQ ID NO: 2493220 - RNA, 19 nt, Artificial Sequence
  Description of Artificial Sequence: Synthetic oligonucleotide
  Sense strand starting at position 2073 of SEQ ID NO: 1887739
aacgguagccuuugacaaa

SEQ ID NO: 2493221 - RNA, 19 nt, Artificial Sequence
  Description of Artificial Sequence: Synthetic oligonucleotide
  Antisense strand to SEQ ID NO: 2493220
uuugucaaaggcuaccguu

SEQ ID NO: 2493222 - RNA, 19 nt, Artificial Sequence
  Description of Artificial Sequence: Synthetic oligonucleotide
  Sense strand starting at position 2074 of SEQ ID NO: 1887739
acgguagccuuugacaaau

SEQ ID NO: 2493223 - RNA, 19 nt, Artificial Sequence
  Description of Artificial Sequence: Synthetic oligonucleotide
  Antisense strand to SEQ ID NO: 2493222
auuugucaaaggcuaccgu

SEQ ID NO: 2493224 - RNA, 19 nt, Artificial Sequence
  Description of Artificial Sequence: Synthetic oligonucleotide
  Sense strand starting at position 2076 of SEQ ID NO: 1887739
gguagccuuugacaaaucu

SEQ ID NO: 2493225 - RNA, 19 nt, Artificial Sequence
  Description of Artificial Sequence: Synthetic oligonucleotide
  Antisense strand to SEQ ID NO: 2493224
agauuugucaaaggcuacc

SEQ ID NO: 2493226 - RNA, 19 nt, Artificial Sequence
  Description of Artificial Sequence: Synthetic oligonucleotide
  Sense strand starting at position 2083 of SEQ ID NO: 1887739
uuugacaaaucuggguaaa

SEQ ID NO: 2493227 - RNA, 19 nt, Artificial Sequence
  Description of Artificial Sequence: Synthetic oligonucleotide
  Antisense strand to SEQ ID NO: 2493226
uuuacccagauuugucaaa

SEQ ID NO: 2493228 - RNA, 19 nt, Artificial Sequence
  Description of Artificial Sequence: Synthetic oligonucleotide
  Sense strand starting at position 2112 of SEQ ID NO: 1887739
gcgagccuugcgcucuauu

SEQ ID NO: 2493229 - RNA, 19 nt, Artificial Sequence
  Description of Artificial Sequence: Synthetic oligonucleotide
  Antisense strand to SEQ ID NO: 2493228
aauagagcgcaaggcucgc

SEQ ID NO: 2493230 - RNA, 19 nt, Artificial Sequence
  Description of Artificial Sequence: Synthetic oligonucleotide
  Sense strand starting at position 2223 of SEQ ID NO: 1887739
uuccuuaucugaggaaugu

SEQ ID NO: 2493231 - RNA, 19 nt, Artificial Sequence
  Description of Artificial Sequence: Synthetic oligonucleotide
  Antisense strand to SEQ ID NO: 2493230
acauuccucagauaaggaa

SEQ ID NO: 2493232 - RNA, 19 nt, Artificial Sequence
  Description of Artificial Sequence: Synthetic oligonucleotide
  Sense strand starting at position 2279 of SEQ ID NO: 1887739
ggcaucugguuccaggauu

SEQ ID NO: 2493233 - RNA, 19 nt, Artificial Sequence
  Description of Artificial Sequence: Synthetic oligonucleotide
  Antisense strand to SEQ ID NO: 2493232
aauccuggaaccagaugcc

SEQ ID NO: 2493234 - RNA, 19 nt, Artificial Sequence
  Description of Artificial Sequence: Synthetic oligonucleotide
  Sense strand starting at position 2309 of SEQ ID NO: 1887739
augucuaaguaccuagaau

SEQ ID NO: 2493235 - RNA, 19 nt, Artificial Sequence
  Description of Artificial Sequence: Synthetic oligonucleotide
  Antisense strand to SEQ ID NO: 2493234
auucuagguacuuagacau

SEQ ID NO: 2493236 - RNA, 19 nt, Artificial Sequence
  Description of Artificial Sequence: Synthetic oligonucleotide
  Sense strand starting at position 2356 of SEQ ID NO: 1887739
uaucgaaacucauugugcu

SEQ ID NO: 2493237 - RNA, 19 nt, Artificial Sequence
  Description of Artificial Sequence: Synthetic oligonucleotide
  Antisense strand to SEQ ID NO: 2493236
agcacaaugaguuucgaua

SEQ ID NO: 2493238 - RNA, 19 nt, Artificial Sequence
  Description of Artificial Sequence: Synthetic oligonucleotide
  Sense strand starting at position 2537 of SEQ ID NO: 1887739
gugacacucugucuuaaga

SEQ ID NO: 2493239 - RNA, 19 nt, Artificial Sequence
  Description of Artificial Sequence: Synthetic oligonucleotide
  Antisense strand to SEQ ID NO: 2493238
ucuuaagacagagugucac

SEQ ID NO: 2493240 - RNA, 19 nt, Artificial Sequence
  Description of Artificial Sequence: Synthetic oligonucleotide
  Sense strand starting at position 3200 of SEQ ID NO: 1887739
agaaacucauugugcaaca

SEQ ID NO: 2493241 - RNA, 19 nt, Artificial Sequence
  Description of Artificial Sequence: Synthetic oligonucleotide
  Antisense strand to SEQ ID NO: 2493240
uguugcacaaugaguuucu

SEQ ID NO: 2493242 - RNA, 19 nt, Artificial Sequence
  Description of Artificial Sequence: Synthetic oligonucleotide
  Sense strand starting at position 3212 of SEQ ID NO: 1887739
ugcaacacuugcugacauu

SEQ ID NO: 2493243 - RNA, 19 nt, Artificial Sequence
  Description of Artificial Sequence: Synthetic oligonucleotide
  Antisense strand to SEQ ID NO: 2493242
aaugucagcaaguguugca

SEQ ID NO: 2493244 - RNA, 19 nt, Artificial Sequence
  Description of Artificial Sequence: Synthetic oligonucleotide
  Sense strand starting at position 3213 of SEQ ID NO: 1887739
gcaacacuugcugacauua

SEQ ID NO: 2493245 - RNA, 19 nt, Artificial Sequence
  Description of Artificial Sequence: Synthetic oligonucleotide
  Antisense strand to SEQ ID NO: 2493244
uaaugucagcaaguguugc

SEQ ID NO: 2493246 - RNA, 19 nt, Artificial Sequence
  Description of Artificial Sequence: Synthetic oligonucleotide
  Sense strand starting at position 3276 of SEQ ID NO: 1887739
uggcuaaugugauccgaau

SEQ ID NO: 2493247 - RNA, 19 nt, Artificial Sequence
  Description of Artificial Sequence: Synthetic oligonucleotide
  Antisense strand to SEQ ID NO: 2493246
auucggaucacauuagcca

SEQ ID NO: 2493248 - RNA, 19 nt, Artificial Sequence
  Description of Artificial Sequence: Synthetic oligonucleotide
  Sense strand starting at position 3278 of SEQ ID NO: 1887739
gcuaaugugauccgaauua

SEQ ID NO: 2493249 - RNA, 19 nt, Artificial Sequence
  Description of Artificial Sequence: Synthetic oligonucleotide
  Antisense strand to SEQ ID NO: 2493248
uaauucggaucacauuagc

SEQ ID NO: 2493250 - RNA, 19 nt, Artificial Sequence
  Description of Artificial Sequence: Synthetic oligonucleotide
  Sense strand starting at position 3433 of SEQ ID NO: 1887739
uccguuuauuugcccucaa

SEQ ID NO: 2493251 - RNA, 19 nt, Artificial Sequence
  Description of Artificial Sequence: Synthetic oligonucleotide
  Antisense strand to SEQ ID NO: 2493250
uugagggcaaauaaacgga

SEQ ID NO: 2493252 - RNA, 19 nt, Artificial Sequence
  Description of Artificial Sequence: Synthetic oligonucleotide
  Sense strand starting at position 3434 of SEQ ID NO: 1887739
ccguuuauuugcccucaaa

SEQ ID NO: 2493253 - RNA, 19 nt, Artificial Sequence
  Description of Artificial Sequence: Synthetic oligonucleotide
  Antisense strand to SEQ ID NO: 2493252
uuugagggcaaauaaacgg

SEQ ID NO: 2493254 - RNA, 19 nt, Artificial Sequence
  Description of Artificial Sequence: Synthetic oligonucleotide
  Sense strand starting at position 3597 of SEQ ID NO: 1887739
ccagauaaaccauggccaa

SEQ ID NO: 2493255 - RNA, 19 nt, Artificial Sequence
  Description of Artificial Sequence: Synthetic oligonucleotide
  Antisense strand to SEQ ID NO: 2493254
uuggccaugguuuaucugg

SEQ ID NO: 2493256 - RNA, 19 nt, Artificial Sequence
  Description of Artificial Sequence: Synthetic oligonucleotide
  Sense strand starting at position 3630 of SEQ ID NO: 1887739
gggcacagcuucuaaaugu

SEQ ID NO: 2493257 - RNA, 19 nt, Artificial Sequence
  Description of Artificial Sequence: Synthetic oligonucleotide
  Antisense strand to SEQ ID NO: 2493256
acauuuagaagcugugccc

SEQ ID NO: 2493258 - RNA, 19 nt, Artificial Sequence
  Description of Artificial Sequence: Synthetic oligonucleotide
  Sense strand starting at position 212 of SEQ ID NO: 1887740
acauuuguaucugagugga

SEQ ID NO: 2493259 - RNA, 19 nt, Artificial Sequence
  Description of Artificial Sequence: Synthetic oligonucleotide
  Antisense strand to SEQ ID NO: 2493258
uccacucagauacaaaugu

SEQ ID NO: 2493260 - RNA, 19 nt, Artificial Sequence
  Description of Artificial Sequence: Synthetic oligonucleotide
  Sense strand starting at position 215 of SEQ ID NO: 1887740
uuuguaucugaguggagac

SEQ ID NO: 2493261 - RNA, 19 nt, Artificial Sequence
  Description of Artificial Sequence: Synthetic oligonucleotide
  Antisense strand to SEQ ID NO: 2493260
gucuccacucagauacaaa

SEQ ID NO: 2493262 - RNA, 19 nt, Artificial Sequence
  Description of Artificial Sequence: Synthetic oligonucleotide
  Sense strand starting at position 216 of SEQ ID NO: 1887740
uuguaucugaguggagaca

SEQ ID NO: 2493263 - RNA, 19 nt, Artificial Sequence
  Description of Artificial Sequence: Synthetic oligonucleotide
  Antisense strand to SEQ ID NO: 2493262
ugucuccacucagauacaa

SEQ ID NO: 2493264 - RNA, 19 nt, Artificial Sequence
  Description of Artificial Sequence: Synthetic oligonucleotide
  Sense strand starting at position 260 of SEQ ID NO: 1887740
cuggcaguuauguggccaa

SEQ ID NO: 2493265 - RNA, 19 nt, Artificial Sequence
  Description of Artificial Sequence: Synthetic oligonucleotide
  Antisense strand to SEQ ID NO: 2493264
uuggccacauaacugccag

SEQ ID NO: 2493266 - RNA, 19 nt, Artificial Sequence
  Description of Artificial Sequence: Synthetic oligonucleotide
  Sense strand starting at position 263 of SEQ ID NO: 1887740
gcaguuauguggccaaaca

SEQ ID NO: 2493267 - RNA, 19 nt, Artificial Sequence
  Description of Artificial Sequence: Synthetic oligonucleotide
  Antisense strand to SEQ ID NO: 2493266
uguuuggccacauaacugc

SEQ ID NO: 2493268 - RNA, 19 nt, Artificial Sequence
  Description of Artificial Sequence: Synthetic oligonucleotide
  Sense strand starting at position 264 of SEQ ID NO: 1887740
caguuauguggccaaacac

SEQ ID NO: 2493269 - RNA, 19 nt, Artificial Sequence
  Description of Artificial Sequence: Synthetic oligonucleotide
  Antisense strand to SEQ ID NO: 2493268
guguuuggccacauaacug

SEQ ID NO: 2493270 - RNA, 19 nt, Artificial Sequence
  Description of Artificial Sequence: Synthetic oligonucleotide
  Sense strand starting at position 301 of SEQ ID NO: 1887740
cacccauuguucuguggca

SEQ ID NO: 2493271 - RNA, 19 nt, Artificial Sequence
  Description of Artificial Sequence: Synthetic oligonucleotide
  Antisense strand to SEQ ID NO: 2493270
ugccacagaacaaugggug

SEQ ID NO: 2493272 - RNA, 19 nt, Artificial Sequence
  Description of Artificial Sequence: Synthetic oligonucleotide
  Sense strand starting at position 302 of SEQ ID NO: 1887740
acccauuguucuguggcaa

SEQ ID NO: 2493273 - RNA, 19 nt, Artificial Sequence
  Description of Artificial Sequence: Synthetic oligonucleotide
  Antisense strand to SEQ ID NO: 2493272
uugccacagaacaaugggu

SEQ ID NO: 2493274 - RNA, 19 nt, Artificial Sequence
  Description of Artificial Sequence: Synthetic oligonucleotide
  Sense strand starting at position 303 of SEQ ID NO: 1887740
cccauuguucuguggcaac

SEQ ID NO: 2493275 - RNA, 19 nt, Artificial Sequence
  Description of Artificial Sequence: Synthetic oligonucleotide
  Antisense strand to SEQ ID NO: 2493274
guugccacagaacaauggg

SEQ ID NO: 2493276 - RNA, 19 nt, Artificial Sequence
  Description of Artificial Sequence: Synthetic oligonucleotide
  Sense strand starting at position 321 of SEQ ID NO: 1887740
cagcgagcauugucuuguu

SEQ ID NO: 2493277 - RNA, 19 nt, Artificial Sequence
  Description of Artificial Sequence: Synthetic oligonucleotide
  Antisense strand to SEQ ID NO: 2493276
aacaagacaaugcucgcug

SEQ ID NO: 2493278 - RNA, 19 nt, Artificial Sequence
  Description of Artificial Sequence: Synthetic oligonucleotide
  Sense strand starting at position 323 of SEQ ID NO: 1887740
gcgagcauugucuuguuua

SEQ ID NO: 2493279 - RNA, 19 nt, Artificial Sequence
  Description of Artificial Sequence: Synthetic oligonucleotide
  Antisense strand to SEQ ID NO: 2493278
uaaacaagacaaugcucgc

SEQ ID NO: 2493280 - RNA, 19 nt, Artificial Sequence
  Description of Artificial Sequence: Synthetic oligonucleotide
  Sense strand starting at position 324 of SEQ ID NO: 1887740
cgagcauugucuuguuuaa

SEQ ID NO: 2493281 - RNA, 19 nt, Artificial Sequence
  Description of Artificial Sequence: Synthetic oligonucleotide
  Antisense strand to SEQ ID NO: 2493280
uuaaacaagacaaugcucg

SEQ ID NO: 2493282 - RNA, 19 nt, Artificial Sequence
  Description of Artificial Sequence: Synthetic oligonucleotide
  Sense strand starting at position 517 of SEQ ID NO: 1887740
uuguaauccuaauuaguug

SEQ ID NO: 2493283 - RNA, 19 nt, Artificial Sequence
  Description of Artificial Sequence: Synthetic oligonucleotide
  Antisense strand to SEQ ID NO: 2493282
caacuaauuaggauuacaa

SEQ ID NO: 2493284 - RNA, 19 nt, Artificial Sequence
  Description of Artificial Sequence: Synthetic oligonucleotide
  Sense strand starting at position 524 of SEQ ID NO: 1887740
ccuaauuaguugggagguu

SEQ ID NO: 2493285 - RNA, 19 nt, Artificial Sequence
  Description of Artificial Sequence: Synthetic oligonucleotide
  Antisense strand to SEQ ID NO: 2493284
aaccucccaacuaauuagg

SEQ ID NO: 2493286 - RNA, 19 nt, Artificial Sequence
  Description of Artificial Sequence: Synthetic oligonucleotide
  Sense strand starting at position 1002 of SEQ ID NO: 1887740
cccgcaggcaucugaugau

SEQ ID NO: 2493287 - RNA, 19 nt, Artificial Sequence
  Description of Artificial Sequence: Synthetic oligonucleotide
  Antisense strand to SEQ ID NO: 2493286
aucaucagaugccugcggg

SEQ ID NO: 2493288 - RNA, 19 nt, Artificial Sequence
  Description of Artificial Sequence: Synthetic oligonucleotide
  Sense strand starting at position 1057 of SEQ ID NO: 1887740
gugccuucuccaguguucu

SEQ ID NO: 2493289 - RNA, 19 nt, Artificial Sequence
  Description of Artificial Sequence: Synthetic oligonucleotide
  Antisense strand to SEQ ID NO: 2493288
agaacacuggagaaggcac

SEQ ID NO: 2493290 - RNA, 19 nt, Artificial Sequence
  Description of Artificial Sequence: Synthetic oligonucleotide
  Sense strand starting at position 1065 of SEQ ID NO: 1887740
uccaguguucucugcugga

SEQ ID NO: 2493291 - RNA, 19 nt, Artificial Sequence
  Description of Artificial Sequence: Synthetic oligonucleotide
  Antisense strand to SEQ ID NO: 2493290
uccagcagagaacacugga

SEQ ID NO: 2493292 - RNA, 19 nt, Artificial Sequence
  Description of Artificial Sequence: Synthetic oligonucleotide
  Sense strand starting at position 1068 of SEQ ID NO: 1887740
aguguucucugcuggaaac

SEQ ID NO: 2493293 - RNA, 19 nt, Artificial Sequence
  Description of Artificial Sequence: Synthetic oligonucleotide
  Antisense strand to SEQ ID NO: 2493292
guuuccagcagagaacacu

SEQ ID NO: 2493294 - RNA, 19 nt, Artificial Sequence
  Description of Artificial Sequence: Synthetic oligonucleotide
  Sense strand starting at position 1293 of SEQ ID NO: 1887740
cagccaugggcuuggaaga

SEQ ID NO: 2493295 - RNA, 19 nt, Artificial Sequence
  Description of Artificial Sequence: Synthetic oligonucleotide
  Antisense strand to SEQ ID NO: 2493294
ucuuccaagcccauggcug

SEQ ID NO: 2493296 - RNA, 19 nt, Artificial Sequence
  Description of Artificial Sequence: Synthetic oligonucleotide
  Sense strand starting at position 1294 of SEQ ID NO: 1887740
agccaugggcuuggaagau

SEQ ID NO: 2493297 - RNA, 19 nt, Artificial Sequence
  Description of Artificial Sequence: Synthetic oligonucleotide
  Antisense strand to SEQ ID NO: 2493296
aucuuccaagcccauggcu

SEQ ID NO: 2493298 - RNA, 19 nt, Artificial Sequence
  Description of Artificial Sequence: Synthetic oligonucleotide
  Sense strand starting at position 1318 of SEQ ID NO: 1887740
ccuguugucuagccacuaa

SEQ ID NO: 2493299 - RNA, 19 nt, Artificial Sequence
  Description of Artificial Sequence: Synthetic oligonucleotide
  Antisense strand to SEQ ID NO: 2493298
uuaguggcuagacaacagg

SEQ ID NO: 2493300 - RNA, 19 nt, Artificial Sequence
  Description of Artificial Sequence: Synthetic oligonucleotide
  Sense strand starting at position 2019 of SEQ ID NO: 1887740
cgcucaccugcagaucauu

SEQ ID NO: 2493301 - RNA, 19 nt, Artificial Sequence
  Description of Artificial Sequence: Synthetic oligonucleotide
  Antisense strand to SEQ ID NO: 2493300
aaugaucugcaggugagcg

SEQ ID NO: 2493302 - RNA, 19 nt, Artificial Sequence
  Description of Artificial Sequence: Synthetic oligonucleotide
  Sense strand starting at position 2940 of SEQ ID NO: 1887740
agguguggugucuguaauc

SEQ ID NO: 2493303 - RNA, 19 nt, Artificial Sequence
  Description of Artificial Sequence: Synthetic oligonucleotide
  Antisense strand to SEQ ID NO: 2493302
gauuacagacaccacaccu

SEQ ID NO: 2493304 - RNA, 19 nt, Artificial Sequence
  Description of Artificial Sequence: Synthetic oligonucleotide
  Sense strand starting at position 3559 of SEQ ID NO: 1887740
ccagguugucccugaaagg

SEQ ID NO: 2493305 - RNA, 19 nt, Artificial Sequence
  Description of Artificial Sequence: Synthetic oligonucleotide
  Antisense strand to SEQ ID NO: 2493304
ccuuucagggacaaccugg

SEQ ID NO: 2493306 - RNA, 19 nt, Artificial Sequence
  Description of Artificial Sequence: Synthetic oligonucleotide
  Sense strand starting at position 3560 of SEQ ID NO: 1887740
cagguugucccugaaagga

SEQ ID NO: 2493307 - RNA, 19 nt, Artificial Sequence
  Description of Artificial Sequence: Synthetic oligonucleotide
  Antisense strand to SEQ ID NO: 2493306
uccuuucagggacaaccug

SEQ ID NO: 2493308 - RNA, 19 nt, Artificial Sequence
  Description of Artificial Sequence: Synthetic oligonucleotide
  Sense strand starting at position 3604 of SEQ ID NO: 1887740
ggcugaggguuccguuaac

SEQ ID NO: 2493309 - RNA, 19 nt, Artificial Sequence
  Description of Artificial Sequence: Synthetic oligonucleotide
  Antisense strand to SEQ ID NO: 2493308
guuaacggaacccucagcc

SEQ ID NO: 2493310 - RNA, 19 nt, Artificial Sequence
  Description of Artificial Sequence: Synthetic oligonucleotide
  Sense strand starting at position 3610 of SEQ ID NO: 1887740
ggguuccguuaacuggaua

SEQ ID NO: 2493311 - RNA, 19 nt, Artificial Sequence
  Description of Artificial Sequence: Synthetic oligonucleotide
  Antisense strand to SEQ ID NO: 2493310
uauccaguuaacggaaccc

SEQ ID NO: 2493312 - RNA, 19 nt, Artificial Sequence
  Description of Artificial Sequence: Synthetic oligonucleotide
  Sense strand starting at position 3611 of SEQ ID NO: 1887740
gguuccguuaacuggauau

SEQ ID NO: 2493313 - RNA, 19 nt, Artificial Sequence
  Description of Artificial Sequence: Synthetic oligonucleotide
  Antisense strand to SEQ ID NO: 2493312
auauccaguuaacggaacc

SEQ ID NO: 2493314 - RNA, 19 nt, Artificial Sequence
  Description of Artificial Sequence: Synthetic oligonucleotide
  Sense strand starting at position 3737 of SEQ ID NO: 1887740
gggauaugagucugugcaa

SEQ ID NO: 2493315 - RNA, 19 nt, Artificial Sequence
  Description of Artificial Sequence: Synthetic oligonucleotide
  Antisense strand to SEQ ID NO: 2493314
uugcacagacucauauccc

SEQ ID NO: 2493316 - RNA, 19 nt, Artificial Sequence
  Description of Artificial Sequence: Synthetic oligonucleotide
  Sense strand starting at position 3738 of SEQ ID NO: 1887740
ggauaugagucugugcaaa

SEQ ID NO: 2493317 - RNA, 19 nt, Artificial Sequence
  Description of Artificial Sequence: Synthetic oligonucleotide
  Antisense strand to SEQ ID NO: 2493316
uuugcacagacucauaucc

SEQ ID NO: 2493318 - RNA, 19 nt, Artificial Sequence
  Description of Artificial Sequence: Synthetic oligonucleotide
  Sense strand starting at position 3740 of SEQ ID NO: 1887740
auaugagucugugcaaagu

SEQ ID NO: 2493319 - RNA, 19 nt, Artificial Sequence
  Description of Artificial Sequence: Synthetic oligonucleotide
  Antisense strand to SEQ ID NO: 2493318
acuuugcacagacucauau

SEQ ID NO: 2493320 - RNA, 19 nt, Artificial Sequence
  Description of Artificial Sequence: Synthetic oligonucleotide
  Sense strand starting at position 3750 of SEQ ID NO: 1887740
gugcaaaguucagaggaug

SEQ ID NO: 2493321 - RNA, 19 nt, Artificial Sequence
  Description of Artificial Sequence: Synthetic oligonucleotide
  Antisense strand to SEQ ID NO: 2493320
cauccucugaacuuugcac

SEQ ID NO: 2493322 - RNA, 19 nt, Artificial Sequence
  Description of Artificial Sequence: Synthetic oligonucleotide
  Sense strand starting at position 3951 of SEQ ID NO: 1887740
cucaucgauaucuggaaga

SEQ ID NO: 2493323 - RNA, 19 nt, Artificial Sequence
  Description of Artificial Sequence: Synthetic oligonucleotide
  Antisense strand to SEQ ID NO: 2493322
ucuuccagauaucgaugag

SEQ ID NO: 2493324 - RNA, 19 nt, Artificial Sequence
  Description of Artificial Sequence: Synthetic oligonucleotide
  Sense strand starting at position 154 of SEQ ID NO: 1887741
cgaguccgagcucaauaaa

SEQ ID NO: 2493325 - RNA, 19 nt, Artificial Sequence
  Description of Artificial Sequence: Synthetic oligonucleotide
  Antisense strand to SEQ ID NO: 2493324
uuuauugagcucggacucg

SEQ ID NO: 2493326 - RNA, 19 nt, Artificial Sequence
  Description of Artificial Sequence: Synthetic oligonucleotide
  Sense strand starting at position 304 of SEQ ID NO: 1887741
guucauggucucugagugu

SEQ ID NO: 2493327 - RNA, 19 nt, Artificial Sequence
  Description of Artificial Sequence: Synthetic oligonucleotide
  Antisense strand to SEQ ID NO: 2493326
acacucagagaccaugaac

SEQ ID NO: 2493328 - RNA, 19 nt, Artificial Sequence
  Description of Artificial Sequence: Synthetic oligonucleotide
  Sense strand starting at position 317 of SEQ ID NO: 1887741
gaguguggguucgugguua

SEQ ID NO: 2493329 - RNA, 19 nt, Artificial Sequence
  Description of Artificial Sequence: Synthetic oligonucleotide
  Antisense strand to SEQ ID NO: 2493328
uaaccacgaacccacacuc

SEQ ID NO: 2493330 - RNA, 19 nt, Artificial Sequence
  Description of Artificial Sequence: Synthetic oligonucleotide
  Sense strand starting at position 318 of SEQ ID NO: 1887741
aguguggguucgugguuau

SEQ ID NO: 2493331 - RNA, 19 nt, Artificial Sequence
  Description of Artificial Sequence: Synthetic oligonucleotide
  Antisense strand to SEQ ID NO: 2493330
auaaccacgaacccacacu

SEQ ID NO: 2493332 - RNA, 19 nt, Artificial Sequence
  Description of Artificial Sequence: Synthetic oligonucleotide
  Sense strand starting at position 321 of SEQ ID NO: 1887741
guggguucgugguuaugga

SEQ ID NO: 2493333 - RNA, 19 nt, Artificial Sequence
  Description of Artificial Sequence: Synthetic oligonucleotide
  Antisense strand to SEQ ID NO: 2493332
uccauaaccacgaacccac

SEQ ID NO: 2493334 - RNA, 19 nt, Artificial Sequence
  Description of Artificial Sequence: Synthetic oligonucleotide
  Sense strand starting at position 1929 of SEQ ID NO: 1887741
gugccagucuaggaggaaa

SEQ ID NO: 2493335 - RNA, 19 nt, Artificial Sequence
  Description of Artificial Sequence: Synthetic oligonucleotide
  Antisense strand to SEQ ID NO: 2493334
uuuccuccuagacuggcac

SEQ ID NO: 2493336 - RNA, 19 nt, Artificial Sequence
  Description of Artificial Sequence: Synthetic oligonucleotide
  Sense strand starting at position 2126 of SEQ ID NO: 1887741
gggucaggcagagauaagu

SEQ ID NO: 2493337 - RNA, 19 nt, Artificial Sequence
  Description of Artificial Sequence: Synthetic oligonucleotide
  Antisense strand to SEQ ID NO: 2493336
acuuaucucugccugaccc

SEQ ID NO: 2493338 - RNA, 19 nt, Artificial Sequence
  Description of Artificial Sequence: Synthetic oligonucleotide
  Sense strand starting at position 2212 of SEQ ID NO: 1887741
accuauuagguuggagcaa

SEQ ID NO: 2493339 - RNA, 19 nt, Artificial Sequence
  Description of Artificial Sequence: Synthetic oligonucleotide
  Antisense strand to SEQ ID NO: 2493338
uugcuccaaccuaauaggu

SEQ ID NO: 2493340 - RNA, 19 nt, Artificial Sequence
  Description of Artificial Sequence: Synthetic oligonucleotide
  Sense strand starting at position 2503 of SEQ ID NO: 1887741
agucacacucugggugaaa

SEQ ID NO: 2493341 - RNA, 19 nt, Artificial Sequence
  Description of Artificial Sequence: Synthetic oligonucleotide
  Antisense strand to SEQ ID NO: 2493340
uuucacccagagugugacu

SEQ ID NO: 2493342 - RNA, 19 nt, Artificial Sequence
  Description of Artificial Sequence: Synthetic oligonucleotide
  Sense strand starting at position 2505 of SEQ ID NO: 1887741
ucacacucugggugaaaga

SEQ ID NO: 2493343 - RNA, 19 nt, Artificial Sequence
  Description of Artificial Sequence: Synthetic oligonucleotide
  Antisense strand to SEQ ID NO: 2493342
ucuuucacccagaguguga

SEQ ID NO: 2493344 - RNA, 19 nt, Artificial Sequence
  Description of Artificial Sequence: Synthetic oligonucleotide
  Sense strand starting at position 2952 of SEQ ID NO: 1887741
ugugguucuguggaaggaa

SEQ ID NO: 2493345 - RNA, 19 nt, Artificial Sequence
  Description of Artificial Sequence: Synthetic oligonucleotide
  Antisense strand to SEQ ID NO: 2493344
uuccuuccacagaaccaca

SEQ ID NO: 2493346 - RNA, 19 nt, Artificial Sequence
  Description of Artificial Sequence: Synthetic oligonucleotide
  Sense strand starting at position 3014 of SEQ ID NO: 1887741
ggcaguaugucugcugugu

SEQ ID NO: 2493347 - RNA, 19 nt, Artificial Sequence
  Description of Artificial Sequence: Synthetic oligonucleotide
  Antisense strand to SEQ ID NO: 2493346
acacagcagacauacugcc

SEQ ID NO: 2493348 - RNA, 19 nt, Artificial Sequence
  Description of Artificial Sequence: Synthetic oligonucleotide
  Sense strand starting at position 3018 of SEQ ID NO: 1887741
guaugucugcugugucuga

SEQ ID NO: 2493349 - RNA, 19 nt, Artificial Sequence
  Description of Artificial Sequence: Synthetic oligonucleotide
  Antisense strand to SEQ ID NO: 2493348
ucagacacagcagacauac

SEQ ID NO: 2493350 - RNA, 19 nt, Artificial Sequence
  Description of Artificial Sequence: Synthetic oligonucleotide
  Sense strand starting at position 3025 of SEQ ID NO: 1887741
ugcugugucugagaggcuu

SEQ ID NO: 2493351 - RNA, 19 nt, Artificial Sequence
  Description of Artificial Sequence: Synthetic oligonucleotide
  Antisense strand to SEQ ID NO: 2493350
aagccucucagacacagca

SEQ ID NO: 2493352 - RNA, 19 nt, Artificial Sequence
  Description of Artificial Sequence: Synthetic oligonucleotide
  Sense strand starting at position 3567 of SEQ ID NO: 1887741
gggugagaguccagucuga

SEQ ID NO: 2493353 - RNA, 19 nt, Artificial Sequence
  Description of Artificial Sequence: Synthetic oligonucleotide
  Antisense strand to SEQ ID NO: 2493352
ucagacuggacucucaccc

SEQ ID NO: 2493354 - RNA, 19 nt, Artificial Sequence
  Description of Artificial Sequence: Synthetic oligonucleotide
  Sense strand starting at position 3571 of SEQ ID NO: 1887741
gagaguccagucugacuca

SEQ ID NO: 2493355 - RNA, 19 nt, Artificial Sequence
  Description of Artificial Sequence: Synthetic oligonucleotide
  Antisense strand to SEQ ID NO: 2493354
ugagucagacuggacucuc

SEQ ID NO: 2493356 - RNA, 19 nt, Artificial Sequence
  Description of Artificial Sequence: Synthetic oligonucleotide
  Sense strand starting at position 3767 of SEQ ID NO: 1887741
cucauaucccaacgaggaa

SEQ ID NO: 2493357 - RNA, 19 nt, Artificial Sequence
  Description of Artificial Sequence: Synthetic oligonucleotide
  Antisense strand to SEQ ID NO: 2493356
uuccucguugggauaugag

SEQ ID NO: 2493358 - RNA, 19 nt, Artificial Sequence
  Description of Artificial Sequence: Synthetic oligonucleotide
  Sense strand starting at position 3826 of SEQ ID NO: 1887741
ccagcauucugccaccuga

SEQ ID NO: 2493359 - RNA, 19 nt, Artificial Sequence
  Description of Artificial Sequence: Synthetic oligonucleotide
  Antisense strand to SEQ ID NO: 2493358
ucagguggcagaaugcugg

SEQ ID NO: 2493360 - RNA, 19 nt, Artificial Sequence
  Description of Artificial Sequence: Synthetic oligonucleotide
  Sense strand starting at position 3842 of SEQ ID NO: 1887741
ugaaauggguucuaaucua

SEQ ID NO: 2493361 - RNA, 19 nt, Artificial Sequence
  Description of Artificial Sequence: Synthetic oligonucleotide
  Antisense strand to SEQ ID NO: 2493360
uagauuagaacccauuuca

SEQ ID NO: 2493362 - RNA, 19 nt, Artificial Sequence
  Description of Artificial Sequence: Synthetic oligonucleotide
  Sense strand starting at position 3850 of SEQ ID NO: 1887741
guucuaaucuaggagguuu

SEQ ID NO: 2493363 - RNA, 19 nt, Artificial Sequence
  Description of Artificial Sequence: Synthetic oligonucleotide
  Antisense strand to SEQ ID NO: 2493362
aaaccuccuagauuagaac

SEQ ID NO: 2493364 - RNA, 19 nt, Artificial Sequence
  Description of Artificial Sequence: Synthetic oligonucleotide
  Sense strand starting at position 3875 of SEQ ID NO: 1887741
acuauuuggucucauguuu

SEQ ID NO: 2493365 - RNA, 19 nt, Artificial Sequence
  Description of Artificial Sequence: Synthetic oligonucleotide
  Antisense strand to SEQ ID NO: 2493364
aaacaugagaccaaauagu

SEQ ID NO: 2493366 - RNA, 19 nt, Artificial Sequence
  Description of Artificial Sequence: Synthetic oligonucleotide
  Sense strand starting at position 3880 of SEQ ID NO: 1887741
uuggucucauguuuccaga

SEQ ID NO: 2493367 - RNA, 19 nt, Artificial Sequence
  Description of Artificial Sequence: Synthetic oligonucleotide
  Antisense strand to SEQ ID NO: 2493366
ucuggaaacaugagaccaa

SEQ ID NO: 2493368 - RNA, 19 nt, Artificial Sequence
  Description of Artificial Sequence: Synthetic oligonucleotide
  Sense strand starting at position 3882 of SEQ ID NO: 1887741
ggucucauguuuccagaca

SEQ ID NO: 2493369 - RNA, 19 nt, Artificial Sequence
  Description of Artificial Sequence: Synthetic oligonucleotide
  Antisense strand to SEQ ID NO: 2493368
ugucuggaaacaugagacc

SEQ ID NO: 2493370 - RNA, 19 nt, Artificial Sequence
  Description of Artificial Sequence: Synthetic oligonucleotide
  Sense strand starting at position 3883 of SEQ ID NO: 1887741
gucucauguuuccagacac

SEQ ID NO: 2493371 - RNA, 19 nt, Artificial Sequence
  Description of Artificial Sequence: Synthetic oligonucleotide
  Antisense strand to SEQ ID NO: 2493370
gugucuggaaacaugagac

SEQ ID NO: 2493372 - RNA, 19 nt, Artificial Sequence
  Description of Artificial Sequence: Synthetic oligonucleotide
  Sense strand starting at position 3891 of SEQ ID NO: 1887741
uuuccagacacgugguuaa

SEQ ID NO: 2493373 - RNA, 19 nt, Artificial Sequence
  Description of Artificial Sequence: Synthetic oligonucleotide
  Antisense strand to SEQ ID NO: 2493372
uuaaccacgugucuggaaa

SEQ ID NO: 2493374 - RNA, 19 nt, Artificial Sequence
  Description of Artificial Sequence: Synthetic oligonucleotide
  Sense strand starting at position 3949 of SEQ ID NO: 1887741
gacgacagaugguuucagu

SEQ ID NO: 2493375 - RNA, 19 nt, Artificial Sequence
  Description of Artificial Sequence: Synthetic oligonucleotide
  Antisense strand to SEQ ID NO: 2493374
acugaaaccaucugucguc

SEQ ID NO: 2493376 - RNA, 19 nt, Artificial Sequence
  Description of Artificial Sequence: Synthetic oligonucleotide
  Sense strand starting at position 825 of SEQ ID NO: 1887742
ccuuguccgaguuguucuu

SEQ ID NO: 2493377 - RNA, 19 nt, Artificial Sequence
  Description of Artificial Sequence: Synthetic oligonucleotide
  Antisense strand to SEQ ID NO: 2493376
aagaacaacucggacaagg

SEQ ID NO: 2493378 - RNA, 19 nt, Artificial Sequence
  Description of Artificial Sequence: Synthetic oligonucleotide
  Sense strand starting at position 831 of SEQ ID NO: 1887742
ccgaguuguucuugagcug

SEQ ID NO: 2493379 - RNA, 19 nt, Artificial Sequence
  Description of Artificial Sequence: Synthetic oligonucleotide
  Antisense strand to SEQ ID NO: 2493378
cagcucaagaacaacucgg

SEQ ID NO: 2493380 - RNA, 19 nt, Artificial Sequence
  Description of Artificial Sequence: Synthetic oligonucleotide
  Sense strand starting at position 867 of SEQ ID NO: 1887742
ggucgaucuccucgaugcu

SEQ ID NO: 2493381 - RNA, 19 nt, Artificial Sequence
  Description of Artificial Sequence: Synthetic oligonucleotide
  Antisense strand to SEQ ID NO: 2493380
agcaucgaggagaucgacc

SEQ ID NO: 2493382 - RNA, 19 nt, Artificial Sequence
  Description of Artificial Sequence: Synthetic oligonucleotide
  Sense strand starting at position 1437 of SEQ ID NO: 1887742
ccagcaucuuccggaacuu

SEQ ID NO: 2493383 - RNA, 19 nt, Artificial Sequence
  Description of Artificial Sequence: Synthetic oligonucleotide
  Antisense strand to SEQ ID NO: 2493382
aaguuccggaagaugcugg

SEQ ID NO: 2493384 - RNA, 19 nt, Artificial Sequence
  Description of Artificial Sequence: Synthetic oligonucleotide
  Sense strand starting at position 1874 of SEQ ID NO: 1887742
ccuugucguucuggucaga

SEQ ID NO: 2493385 - RNA, 19 nt, Artificial Sequence
  Description of Artificial Sequence: Synthetic oligonucleotide
  Antisense strand to SEQ ID NO: 2493384
ucugaccagaacgacaagg

SEQ ID NO: 2493386 - RNA, 19 nt, Artificial Sequence
  Description of Artificial Sequence: Synthetic oligonucleotide
  Sense strand starting at position 2078 of SEQ ID NO: 1887742
gcgccugugccaucuugaa

SEQ ID NO: 2493387 - RNA, 19 nt, Artificial Sequence
  Description of Artificial Sequence: Synthetic oligonucleotide
  Antisense strand to SEQ ID NO: 2493386
uucaagauggcacaggcgc

SEQ ID NO: 2493388 - RNA, 19 nt, Artificial Sequence
  Description of Artificial Sequence: Synthetic oligonucleotide
  Sense strand starting at position 2254 of SEQ ID NO: 1887742
gaggaaccuccaggcaauu

SEQ ID NO: 2493389 - RNA, 19 nt, Artificial Sequence
  Description of Artificial Sequence: Synthetic oligonucleotide
  Antisense strand to SEQ ID NO: 2493388
aauugccuggagguuccuc

SEQ ID NO: 2493390 - RNA, 19 nt, Artificial Sequence
  Description of Artificial Sequence: Synthetic oligonucleotide
  Sense strand starting at position 2273 of SEQ ID NO: 1887742
ccugguuccuugugcacaa

SEQ ID NO: 2493391 - RNA, 19 nt, Artificial Sequence
  Description of Artificial Sequence: Synthetic oligonucleotide
  Antisense strand to SEQ ID NO: 2493390
uugugcacaaggaaccagg

SEQ ID NO: 2493392 - RNA, 19 nt, Artificial Sequence
  Description of Artificial Sequence: Synthetic oligonucleotide
  Sense strand starting at position 2277 of SEQ ID NO: 1887742
guuccuugugcacaaguua

SEQ ID NO: 2493393 - RNA, 19 nt, Artificial Sequence
  Description of Artificial Sequence: Synthetic oligonucleotide
  Antisense strand to SEQ ID NO: 2493392
uaacuugugcacaaggaac

SEQ ID NO: 2493394 - RNA, 19 nt, Artificial Sequence
  Description of Artificial Sequence: Synthetic oligonucleotide
  Sense strand starting at position 2350 of SEQ ID NO: 1887742
acgugacucagccacgaaa

SEQ ID NO: 2493395 - RNA, 19 nt, Artificial Sequence
  Description of Artificial Sequence: Synthetic oligonucleotide
  Antisense strand to SEQ ID NO: 2493394
uuucguggcugagucacgu

SEQ ID NO: 2493396 - RNA, 19 nt, Artificial Sequence
  Description of Artificial Sequence: Synthetic oligonucleotide
  Sense strand starting at position 2415 of SEQ ID NO: 1887742
cgucacacucaaugagaga

SEQ ID NO: 2493397 - RNA, 19 nt, Artificial Sequence
  Description of Artificial Sequence: Synthetic oligonucleotide
  Antisense strand to SEQ ID NO: 2493396
ucucucauugagugugacg

SEQ ID NO: 2493398 - RNA, 19 nt, Artificial Sequence
  Description of Artificial Sequence: Synthetic oligonucleotide
  Sense strand starting at position 2474 of SEQ ID NO: 1887742
caugaaauguccugaaaug

SEQ ID NO: 2493399 - RNA, 19 nt, Artificial Sequence
  Description of Artificial Sequence: Synthetic oligonucleotide
  Antisense strand to SEQ ID NO: 2493398
cauuucaggacauuucaug

SEQ ID NO: 2493400 - RNA, 19 nt, Artificial Sequence
  Description of Artificial Sequence: Synthetic oligonucleotide
  Sense strand starting at position 2582 of SEQ ID NO: 1887742
gauggaauguucuagaauu

SEQ ID NO: 2493401 - RNA, 19 nt, Artificial Sequence
  Description of Artificial Sequence: Synthetic oligonucleotide
  Antisense strand to SEQ ID NO: 2493400
aauucuagaacauuccauc

SEQ ID NO: 2493402 - RNA, 19 nt, Artificial Sequence
  Description of Artificial Sequence: Synthetic oligonucleotide
  Sense strand starting at position 2595 of SEQ ID NO: 1887742
agaauuagagguggugguu

SEQ ID NO: 2493403 - RNA, 19 nt, Artificial Sequence
  Description of Artificial Sequence: Synthetic oligonucleotide
  Antisense strand to SEQ ID NO: 2493402
aaccaccaccucuaauucu

SEQ ID NO: 2493404 - RNA, 19 nt, Artificial Sequence
  Description of Artificial Sequence: Synthetic oligonucleotide
  Sense strand starting at position 2613 of SEQ ID NO: 1887742
ugcacaacccuguggagau

SEQ ID NO: 2493405 - RNA, 19 nt, Artificial Sequence
  Description of Artificial Sequence: Synthetic oligonucleotide
  Antisense strand to SEQ ID NO: 2493404
aucuccacaggguugugca

SEQ ID NO: 2493406 - RNA, 19 nt, Artificial Sequence
  Description of Artificial Sequence: Synthetic oligonucleotide
  Sense strand starting at position 2625 of SEQ ID NO: 1887742
uggagauccugccaaugcu

SEQ ID NO: 2493407 - RNA, 19 nt, Artificial Sequence
  Description of Artificial Sequence: Synthetic oligonucleotide
  Antisense strand to SEQ ID NO: 2493406
agcauuggcaggaucucca

SEQ ID NO: 2493408 - RNA, 19 nt, Artificial Sequence
  Description of Artificial Sequence: Synthetic oligonucleotide
  Sense strand starting at position 2730 of SEQ ID NO: 1887742
aagagaaucgcuugaccuu

SEQ ID NO: 2493409 - RNA, 19 nt, Artificial Sequence
  Description of Artificial Sequence: Synthetic oligonucleotide
  Antisense strand to SEQ ID NO: 2493408
aaggucaagcgauucucuu

SEQ ID NO: 2493410 - RNA, 19 nt, Artificial Sequence
  Description of Artificial Sequence: Synthetic oligonucleotide
  Sense strand starting at position 3420 of SEQ ID NO: 1887742
uagaaacgcuucugaagga

SEQ ID NO: 2493411 - RNA, 19 nt, Artificial Sequence
  Description of Artificial Sequence: Synthetic oligonucleotide
  Antisense strand to SEQ ID NO: 2493410
uccuucagaagcguuucua

SEQ ID NO: 2493412 - RNA, 19 nt, Artificial Sequence
  Description of Artificial Sequence: Synthetic oligonucleotide
  Sense strand starting at position 3953 of SEQ ID NO: 1887742
cacagaagcucucgugagu

SEQ ID NO: 2493413 - RNA, 19 nt, Artificial Sequence
  Description of Artificial Sequence: Synthetic oligonucleotide
  Antisense strand to SEQ ID NO: 2493412
acucacgagagcuucugug

SEQ ID NO: 2493414 - RNA, 19 nt, Artificial Sequence
  Description of Artificial Sequence: Synthetic oligonucleotide
  Sense strand starting at position 5 of SEQ ID NO: 1887743
gcccuuaaguguccacaaa

SEQ ID NO: 2493415 - RNA, 19 nt, Artificial Sequence
  Description of Artificial Sequence: Synthetic oligonucleotide
  Antisense strand to SEQ ID NO: 2493414
uuuguggacacuuaagggc

SEQ ID NO: 2493416 - RNA, 19 nt, Artificial Sequence
  Description of Artificial Sequence: Synthetic oligonucleotide
  Sense strand starting at position 6 of SEQ ID NO: 1887743
cccuuaaguguccacaaau

SEQ ID NO: 2493417 - RNA, 19 nt, Artificial Sequence
  Description of Artificial Sequence: Synthetic oligonucleotide
  Antisense strand to SEQ ID NO: 2493416
auuuguggacacuuaaggg

SEQ ID NO: 2493418 - RNA, 19 nt, Artificial Sequence
  Description of Artificial Sequence: Synthetic oligonucleotide
  Sense strand starting at position 571 of SEQ ID NO: 1887743
acuugauuaggguguugca

SEQ ID NO: 2493419 - RNA, 19 nt, Artificial Sequence
  Description of Artificial Sequence: Synthetic oligonucleotide
  Antisense strand to SEQ ID NO: 2493418
ugcaacacccuaaucaagu

SEQ ID NO: 2493420 - RNA, 19 nt, Artificial Sequence
  Description of Artificial Sequence: Synthetic oligonucleotide
  Sense strand starting at position 578 of SEQ ID NO: 1887743
uaggguguugcagagaauu

SEQ ID NO: 2493421 - RNA, 19 nt, Artificial Sequence
  Description of Artificial Sequence: Synthetic oligonucleotide
  Antisense strand to SEQ ID NO: 2493420
aauucucugcaacacccua

SEQ ID NO: 2493422 - RNA, 19 nt, Artificial Sequence
  Description of Artificial Sequence: Synthetic oligonucleotide
  Sense strand starting at position 590 of SEQ ID NO: 1887743
gagaauugggagugagucu

SEQ ID NO: 2493423 - RNA, 19 nt, Artificial Sequence
  Description of Artificial Sequence: Synthetic oligonucleotide
  Antisense strand to SEQ ID NO: 2493422
agacucacucccaauucuc

SEQ ID NO: 2493424 - RNA, 19 nt, Artificial Sequence
  Description of Artificial Sequence: Synthetic oligonucleotide
  Sense strand starting at position 599 of SEQ ID NO: 1887743
gagugagucuuauauauuu

SEQ ID NO: 2493425 - RNA, 19 nt, Artificial Sequence
  Description of Artificial Sequence: Synthetic oligonucleotide
  Antisense strand to SEQ ID NO: 2493424
aaauauauaagacucacuc

SEQ ID NO: 2493426 - RNA, 19 nt, Artificial Sequence
  Description of Artificial Sequence: Synthetic oligonucleotide
  Sense strand starting at position 817 of SEQ ID NO: 1887743
cuaugauuggcccaugaca

SEQ ID NO: 2493427 - RNA, 19 nt, Artificial Sequence
  Description of Artificial Sequence: Synthetic oligonucleotide
  Antisense strand to SEQ ID NO: 2493426
ugucaugggccaaucauag

SEQ ID NO: 2493428 - RNA, 19 nt, Artificial Sequence
  Description of Artificial Sequence: Synthetic oligonucleotide
  Sense strand starting at position 819 of SEQ ID NO: 1887743
augauuggcccaugacacu

SEQ ID NO: 2493429 - RNA, 19 nt, Artificial Sequence
  Description of Artificial Sequence: Synthetic oligonucleotide
  Antisense strand to SEQ ID NO: 2493428
agugucaugggccaaucau

SEQ ID NO: 2493430 - RNA, 19 nt, Artificial Sequence
  Description of Artificial Sequence: Synthetic oligonucleotide
  Sense strand starting at position 1216 of SEQ ID NO: 1887743
aggagaccaugucuuuaca

SEQ ID NO: 2493431 - RNA, 19 nt, Artificial Sequence
  Description of Artificial Sequence: Synthetic oligonucleotide
  Antisense strand to SEQ ID NO: 2493430
uguaaagacauggucuccu

SEQ ID NO: 2493432 - RNA, 19 nt, Artificial Sequence
  Description of Artificial Sequence: Synthetic oligonucleotide
  Sense strand starting at position 1570 of SEQ ID NO: 1887743
cccugagaacucuggucua

SEQ ID NO: 2493433 - RNA, 19 nt, Artificial Sequence
  Description of Artificial Sequence: Synthetic oligonucleotide
  Antisense strand to SEQ ID NO: 2493432
uagaccagaguucucaggg

SEQ ID NO: 2493434 - RNA, 19 nt, Artificial Sequence
  Description of Artificial Sequence: Synthetic oligonucleotide
  Sense strand starting at position 1587 of SEQ ID NO: 1887743
uagggagggcuuuaaaugu

SEQ ID NO: 2493435 - RNA, 19 nt, Artificial Sequence
  Description of Artificial Sequence: Synthetic oligonucleotide
  Antisense strand to SEQ ID NO: 2493434
acauuuaaagcccucccua

SEQ ID NO: 2493436 - RNA, 19 nt, Artificial Sequence
  Description of Artificial Sequence: Synthetic oligonucleotide
  Sense strand starting at position 1646 of SEQ ID NO: 1887743
guuagaggucuuggguuua

SEQ ID NO: 2493437 - RNA, 19 nt, Artificial Sequence
  Description of Artificial Sequence: Synthetic oligonucleotide
  Antisense strand to SEQ ID NO: 2493436
uaaacccaagaccucuaac

SEQ ID NO: 2493438 - RNA, 19 nt, Artificial Sequence
  Description of Artificial Sequence: Synthetic oligonucleotide
  Sense strand starting at position 1657 of SEQ ID NO: 1887743
uggguuuagagucagguau

SEQ ID NO: 2493439 - RNA, 19 nt, Artificial Sequence
  Description of Artificial Sequence: Synthetic oligonucleotide
  Antisense strand to SEQ ID NO: 2493438
auaccugacucuaaaccca

SEQ ID NO: 2493440 - RNA, 19 nt, Artificial Sequence
  Description of Artificial Sequence: Synthetic oligonucleotide
  Sense strand starting at position 1661 of SEQ ID NO: 1887743
uuuagagucagguauguuc

SEQ ID NO: 2493441 - RNA, 19 nt, Artificial Sequence
  Description of Artificial Sequence: Synthetic oligonucleotide
  Antisense strand to SEQ ID NO: 2493440
gaacauaccugacucuaaa

SEQ ID NO: 2493442 - RNA, 19 nt, Artificial Sequence
  Description of Artificial Sequence: Synthetic oligonucleotide
  Sense strand starting at position 1663 of SEQ ID NO: 1887743
uagagucagguauguucua

SEQ ID NO: 2493443 - RNA, 19 nt, Artificial Sequence
  Description of Artificial Sequence: Synthetic oligonucleotide
  Antisense strand to SEQ ID NO: 2493442
uagaacauaccugacucua

SEQ ID NO: 2493444 - RNA, 19 nt, Artificial Sequence
  Description of Artificial Sequence: Synthetic oligonucleotide
  Sense strand starting at position 1664 of SEQ ID NO: 1887743
agagucagguauguucuau

SEQ ID NO: 2493445 - RNA, 19 nt, Artificial Sequence
  Description of Artificial Sequence: Synthetic oligonucleotide
  Antisense strand to SEQ ID NO: 2493444
auagaacauaccugacucu

SEQ ID NO: 2493446 - RNA, 19 nt, Artificial Sequence
  Description of Artificial Sequence: Synthetic oligonucleotide
  Sense strand starting at position 1697 of SEQ ID NO: 1887743
gggcguacgagugauguga

SEQ ID NO: 2493447 - RNA, 19 nt, Artificial Sequence
  Description of Artificial Sequence: Synthetic oligonucleotide
  Antisense strand to SEQ ID NO: 2493446
ucacaucacucguacgccc

SEQ ID NO: 2493448 - RNA, 19 nt, Artificial Sequence
  Description of Artificial Sequence: Synthetic oligonucleotide
  Sense strand starting at position 1701 of SEQ ID NO: 1887743
guacgagugaugugacaaa

SEQ ID NO: 2493449 - RNA, 19 nt, Artificial Sequence
  Description of Artificial Sequence: Synthetic oligonucleotide
  Antisense strand to SEQ ID NO: 2493448
uuugucacaucacucguac

SEQ ID NO: 2493450 - RNA, 19 nt, Artificial Sequence
  Description of Artificial Sequence: Synthetic oligonucleotide
  Sense strand starting at position 1741 of SEQ ID NO: 1887743
guaugagcacaggauguau

SEQ ID NO: 2493451 - RNA, 19 nt, Artificial Sequence
  Description of Artificial Sequence: Synthetic oligonucleotide
  Antisense strand to SEQ ID NO: 2493450
auacauccugugcucauac

SEQ ID NO: 2493452 - RNA, 19 nt, Artificial Sequence
  Description of Artificial Sequence: Synthetic oligonucleotide
  Sense strand starting at position 1752 of SEQ ID NO: 1887743
ggauguauguccuuguuug

SEQ ID NO: 2493453 - RNA, 19 nt, Artificial Sequence
  Description of Artificial Sequence: Synthetic oligonucleotide
  Antisense strand to SEQ ID NO: 2493452
caaacaaggacauacaucc

SEQ ID NO: 2493454 - RNA, 19 nt, Artificial Sequence
  Description of Artificial Sequence: Synthetic oligonucleotide
  Sense strand starting at position 2116 of SEQ ID NO: 1887743
cccgguucuccuggagaga

SEQ ID NO: 2493455 - RNA, 19 nt, Artificial Sequence
  Description of Artificial Sequence: Synthetic oligonucleotide
  Antisense strand to SEQ ID NO: 2493454
ucucuccaggagaaccggg

SEQ ID NO: 2493456 - RNA, 19 nt, Artificial Sequence
  Description of Artificial Sequence: Synthetic oligonucleotide
  Sense strand starting at position 2117 of SEQ ID NO: 1887743
ccgguucuccuggagagaa

SEQ ID NO: 2493457 - RNA, 19 nt, Artificial Sequence
  Description of Artificial Sequence: Synthetic oligonucleotide
  Antisense strand to SEQ ID NO: 2493456
uucucuccaggagaaccgg

SEQ ID NO: 2493458 - RNA, 19 nt, Artificial Sequence
  Description of Artificial Sequence: Synthetic oligonucleotide
  Sense strand starting at position 2118 of SEQ ID NO: 1887743
cgguucuccuggagagaag

SEQ ID NO: 2493459 - RNA, 19 nt, Artificial Sequence
  Description of Artificial Sequence: Synthetic oligonucleotide
  Antisense strand to SEQ ID NO: 2493458
cuucucuccaggagaaccg

SEQ ID NO: 2493460 - RNA, 19 nt, Artificial Sequence
  Description of Artificial Sequence: Synthetic oligonucleotide
  Sense strand starting at position 2175 of SEQ ID NO: 1887743
acgucagagacaugggauu

SEQ ID NO: 2493461 - RNA, 19 nt, Artificial Sequence
  Description of Artificial Sequence: Synthetic oligonucleotide
  Antisense strand to SEQ ID NO: 2493460
aaucccaugucucugacgu

SEQ ID NO: 2493462 - RNA, 19 nt, Artificial Sequence
  Description of Artificial Sequence: Synthetic oligonucleotide
  Sense strand starting at position 2224 of SEQ ID NO: 1887743
cuucacuugugggcugaga

SEQ ID NO: 2493463 - RNA, 19 nt, Artificial Sequence
  Description of Artificial Sequence: Synthetic oligonucleotide
  Antisense strand to SEQ ID NO: 2493462
ucucagcccacaagugaag

SEQ ID NO: 2493464 - RNA, 19 nt, Artificial Sequence
  Description of Artificial Sequence: Synthetic oligonucleotide
  Sense strand starting at position 2319 of SEQ ID NO: 1887743
auguccuaggguugaagau

SEQ ID NO: 2493465 - RNA, 19 nt, Artificial Sequence
  Description of Artificial Sequence: Synthetic oligonucleotide
  Antisense strand to SEQ ID NO: 2493464
aucuucaacccuaggacau

SEQ ID NO: 2493466 - RNA, 19 nt, Artificial Sequence
  Description of Artificial Sequence: Synthetic oligonucleotide
  Sense strand starting at position 2367 of SEQ ID NO: 1887743
gcacaagguuucucaccga

SEQ ID NO: 2493467 - RNA, 19 nt, Artificial Sequence
  Description of Artificial Sequence: Synthetic oligonucleotide
  Antisense strand to SEQ ID NO: 2493466
ucggugagaaaccuugugc

SEQ ID NO: 2493468 - RNA, 19 nt, Artificial Sequence
  Description of Artificial Sequence: Synthetic oligonucleotide
  Sense strand starting at position 2370 of SEQ ID NO: 1887743
caagguuucucaccgaagu

SEQ ID NO: 2493469 - RNA, 19 nt, Artificial Sequence
  Description of Artificial Sequence: Synthetic oligonucleotide
  Antisense strand to SEQ ID NO: 2493468
acuucggugagaaaccuug

SEQ ID NO: 2493470 - RNA, 19 nt, Artificial Sequence
  Description of Artificial Sequence: Synthetic oligonucleotide
  Sense strand starting at position 2371 of SEQ ID NO: 1887743
aagguuucucaccgaaguc

SEQ ID NO: 2493471 - RNA, 19 nt, Artificial Sequence
  Description of Artificial Sequence: Synthetic oligonucleotide
  Antisense strand to SEQ ID NO: 2493470
gacuucggugagaaaccuu

SEQ ID NO: 2493472 - RNA, 19 nt, Artificial Sequence
  Description of Artificial Sequence: Synthetic oligonucleotide
  Sense strand starting at position 2372 of SEQ ID NO: 1887743
agguuucucaccgaagucu

SEQ ID NO: 2493473 - RNA, 19 nt, Artificial Sequence
  Description of Artificial Sequence: Synthetic oligonucleotide
  Antisense strand to SEQ ID NO: 2493472
agacuucggugagaaaccu

SEQ ID NO: 2493474 - RNA, 19 nt, Artificial Sequence
  Description of Artificial Sequence: Synthetic oligonucleotide
  Sense strand starting at position 2438 of SEQ ID NO: 1887743
gagguaucuuaccuguuga

SEQ ID NO: 2493475 - RNA, 19 nt, Artificial Sequence
  Description of Artificial Sequence: Synthetic oligonucleotide
  Antisense strand to SEQ ID NO: 2493474
ucaacagguaagauaccuc

SEQ ID NO: 2493476 - RNA, 19 nt, Artificial Sequence
  Description of Artificial Sequence: Synthetic oligonucleotide
  Sense strand starting at position 2778 of SEQ ID NO: 1887743
gugugugcuuaucuggaaa

SEQ ID NO: 2493477 - RNA, 19 nt, Artificial Sequence
  Description of Artificial Sequence: Synthetic oligonucleotide
  Antisense strand to SEQ ID NO: 2493476
uuuccagauaagcacacac

SEQ ID NO: 2493478 - RNA, 19 nt, Artificial Sequence
  Description of Artificial Sequence: Synthetic oligonucleotide
  Sense strand starting at position 2824 of SEQ ID NO: 1887743
aggugcaggucuccagaaa

SEQ ID NO: 2493479 - RNA, 19 nt, Artificial Sequence
  Description of Artificial Sequence: Synthetic oligonucleotide
  Antisense strand to SEQ ID NO: 2493478
uuucuggagaccugcaccu

SEQ ID NO: 2493480 - RNA, 19 nt, Artificial Sequence
  Description of Artificial Sequence: Synthetic oligonucleotide
  Sense strand starting at position 2825 of SEQ ID NO: 1887743
ggugcaggucuccagaaau

SEQ ID NO: 2493481 - RNA, 19 nt, Artificial Sequence
  Description of Artificial Sequence: Synthetic oligonucleotide
  Antisense strand to SEQ ID NO: 2493480
auuucuggagaccugcacc

SEQ ID NO: 2493482 - RNA, 19 nt, Artificial Sequence
  Description of Artificial Sequence: Synthetic oligonucleotide
  Sense strand starting at position 3027 of SEQ ID NO: 1887743
uccggauauuuggugcuga

SEQ ID NO: 2493483 - RNA, 19 nt, Artificial Sequence
  Description of Artificial Sequence: Synthetic oligonucleotide
  Antisense strand to SEQ ID NO: 2493482
ucagcaccaaauauccgga

SEQ ID NO: 2493484 - RNA, 19 nt, Artificial Sequence
  Description of Artificial Sequence: Synthetic oligonucleotide
  Sense strand starting at position 3031 of SEQ ID NO: 1887743
gauauuuggugcugaaaua

SEQ ID NO: 2493485 - RNA, 19 nt, Artificial Sequence
  Description of Artificial Sequence: Synthetic oligonucleotide
  Antisense strand to SEQ ID NO: 2493484
uauuucagcaccaaauauc

SEQ ID NO: 2493486 - RNA, 19 nt, Artificial Sequence
  Description of Artificial Sequence: Synthetic oligonucleotide
  Sense strand starting at position 3084 of SEQ ID NO: 1887743
gucccucgugcugaagaaa

SEQ ID NO: 2493487 - RNA, 19 nt, Artificial Sequence
  Description of Artificial Sequence: Synthetic oligonucleotide
  Antisense strand to SEQ ID NO: 2493486
uuucuucagcacgagggac

SEQ ID NO: 2493488 - RNA, 19 nt, Artificial Sequence
  Description of Artificial Sequence: Synthetic oligonucleotide
  Sense strand starting at position 3628 of SEQ ID NO: 1887743
gggauuccgccucagaaug

SEQ ID NO: 2493489 - RNA, 19 nt, Artificial Sequence
  Description of Artificial Sequence: Synthetic oligonucleotide
  Antisense strand to SEQ ID NO: 2493488
cauucugaggcggaauccc

SEQ ID NO: 2493490 - RNA, 19 nt, Artificial Sequence
  Description of Artificial Sequence: Synthetic oligonucleotide
  Sense strand starting at position 3796 of SEQ ID NO: 1887743
cuggguuccugagcuccaa

SEQ ID NO: 2493491 - RNA, 19 nt, Artificial Sequence
  Description of Artificial Sequence: Synthetic oligonucleotide
  Antisense strand to SEQ ID NO: 2493490
uuggagcucaggaacccag

SEQ ID NO: 2493492 - RNA, 19 nt, Artificial Sequence
  Description of Artificial Sequence: Synthetic oligonucleotide
  Sense strand starting at position 3960 of SEQ ID NO: 1887743
gcaacugacgucugugaaa

SEQ ID NO: 2493493 - RNA, 19 nt, Artificial Sequence
  Description of Artificial Sequence: Synthetic oligonucleotide
  Antisense strand to SEQ ID NO: 2493492
uuucacagacgucaguugc

SEQ ID NO: 2493494 - RNA, 19 nt, Artificial Sequence
  Description of Artificial Sequence: Synthetic oligonucleotide
  Sense strand starting at position 5 of SEQ ID NO: 1887744
cccugagaacucuggucua

SEQ ID NO: 2493495 - RNA, 19 nt, Artificial Sequence
  Description of Artificial Sequence: Synthetic oligonucleotide
  Antisense strand to SEQ ID NO: 2493494
uagaccagaguucucaggg

SEQ ID NO: 2493496 - RNA, 19 nt, Artificial Sequence
  Description of Artificial Sequence: Synthetic oligonucleotide
  Sense strand starting at position 22 of SEQ ID NO: 1887744
uagggagggcuuuaaaugu

SEQ ID NO: 2493497 - RNA, 19 nt, Artificial Sequence
  Description of Artificial Sequence: Synthetic oligonucleotide
  Antisense strand to SEQ ID NO: 2493496
acauuuaaagcccucccua

SEQ ID NO: 2493498 - RNA, 19 nt, Artificial Sequence
  Description of Artificial Sequence: Synthetic oligonucleotide
  Sense strand starting at position 81 of SEQ ID NO: 1887744
guuagaggucuuggguuua

SEQ ID NO: 2493499 - RNA, 19 nt, Artificial Sequence
  Description of Artificial Sequence: Synthetic oligonucleotide
  Antisense strand to SEQ ID NO: 2493498
uaaacccaagaccucuaac

SEQ ID NO: 2493500 - RNA, 19 nt, Artificial Sequence
  Description of Artificial Sequence: Synthetic oligonucleotide
  Sense strand starting at position 92 of SEQ ID NO: 1887744
uggguuuagagucagguau

SEQ ID NO: 2493501 - RNA, 19 nt, Artificial Sequence
  Description of Artificial Sequence: Synthetic oligonucleotide
  Antisense strand to SEQ ID NO: 2493500
auaccugacucuaaaccca

SEQ ID NO: 2493502 - RNA, 19 nt, Artificial Sequence
  Description of Artificial Sequence: Synthetic oligonucleotide
  Sense strand starting at position 96 of SEQ ID NO: 1887744
uuuagagucagguauguuc

SEQ ID NO: 2493503 - RNA, 19 nt, Artificial Sequence
  Description of Artificial Sequence: Synthetic oligonucleotide
  Antisense strand to SEQ ID NO: 2493502
gaacauaccugacucuaaa

SEQ ID NO: 2493504 - RNA, 19 nt, Artificial Sequence
  Description of Artificial Sequence: Synthetic oligonucleotide
  Sense strand starting at position 98 of SEQ ID NO: 1887744
uagagucagguauguucua

SEQ ID NO: 2493505 - RNA, 19 nt, Artificial Sequence
  Description of Artificial Sequence: Synthetic oligonucleotide
  Antisense strand to SEQ ID NO: 2493504
uagaacauaccugacucua

SEQ ID NO: 2493506 - RNA, 19 nt, Artificial Sequence
  Description of Artificial Sequence: Synthetic oligonucleotide
  Sense strand starting at position 99 of SEQ ID NO: 1887744
agagucagguauguucuau

SEQ ID NO: 2493507 - RNA, 19 nt, Artificial Sequence
  Description of Artificial Sequence: Synthetic oligonucleotide
  Antisense strand to SEQ ID NO: 2493506
auagaacauaccugacucu

SEQ ID NO: 2493508 - RNA, 19 nt, Artificial Sequence
  Description of Artificial Sequence: Synthetic oligonucleotide
  Sense strand starting at position 136 of SEQ ID NO: 1887744
guacgagugaugugacaaa

SEQ ID NO: 2493509 - RNA, 19 nt, Artificial Sequence
  Description of Artificial Sequence: Synthetic oligonucleotide
  Antisense strand to SEQ ID NO: 2493508
uuugucacaucacucguac

SEQ ID NO: 2493510 - RNA, 19 nt, Artificial Sequence
  Description of Artificial Sequence: Synthetic oligonucleotide
  Sense strand starting at position 176 of SEQ ID NO: 1887744
guaugagcacaggauguau

SEQ ID NO: 2493511 - RNA, 19 nt, Artificial Sequence
  Description of Artificial Sequence: Synthetic oligonucleotide
  Antisense strand to SEQ ID NO: 2493510
auacauccugugcucauac

SEQ ID NO: 2493512 - RNA, 19 nt, Artificial Sequence
  Description of Artificial Sequence: Synthetic oligonucleotide
  Sense strand starting at position 551 of SEQ ID NO: 1887744
cccgguucuccuggagaga

SEQ ID NO: 2493513 - RNA, 19 nt, Artificial Sequence
  Description of Artificial Sequence: Synthetic oligonucleotide
  Antisense strand to SEQ ID NO: 2493512
ucucuccaggagaaccggg

SEQ ID NO: 2493514 - RNA, 19 nt, Artificial Sequence
  Description of Artificial Sequence: Synthetic oligonucleotide
  Sense strand starting at position 552 of SEQ ID NO: 1887744
ccgguucuccuggagagaa

SEQ ID NO: 2493515 - RNA, 19 nt, Artificial Sequence
  Description of Artificial Sequence: Synthetic oligonucleotide
  Antisense strand to SEQ ID NO: 2493514
uucucuccaggagaaccgg

SEQ ID NO: 2493516 - RNA, 19 nt, Artificial Sequence
  Description of Artificial Sequence: Synthetic oligonucleotide
  Sense strand starting at position 553 of SEQ ID NO: 1887744
cgguucuccuggagagaag

SEQ ID NO: 2493517 - RNA, 19 nt, Artificial Sequence
  Description of Artificial Sequence: Synthetic oligonucleotide
  Antisense strand to SEQ ID NO: 2493516
cuucucuccaggagaaccg

SEQ ID NO: 2493518 - RNA, 19 nt, Artificial Sequence
  Description of Artificial Sequence: Synthetic oligonucleotide
  Sense strand starting at position 610 of SEQ ID NO: 1887744
acgucagagacaugggauu

SEQ ID NO: 2493519 - RNA, 19 nt, Artificial Sequence
  Description of Artificial Sequence: Synthetic oligonucleotide
  Antisense strand to SEQ ID NO: 2493518
aaucccaugucucugacgu

SEQ ID NO: 2493520 - RNA, 19 nt, Artificial Sequence
  Description of Artificial Sequence: Synthetic oligonucleotide
  Sense strand starting at position 659 of SEQ ID NO: 1887744
cuucacuugugggcugaga

SEQ ID NO: 2493521 - RNA, 19 nt, Artificial Sequence
  Description of Artificial Sequence: Synthetic oligonucleotide
  Antisense strand to SEQ ID NO: 2493520
ucucagcccacaagugaag

SEQ ID NO: 2493522 - RNA, 19 nt, Artificial Sequence
  Description of Artificial Sequence: Synthetic oligonucleotide
  Sense strand starting at position 754 of SEQ ID NO: 1887744
auguccuaggguugaagau

SEQ ID NO: 2493523 - RNA, 19 nt, Artificial Sequence
  Description of Artificial Sequence: Synthetic oligonucleotide
  Antisense strand to SEQ ID NO: 2493522
aucuucaacccuaggacau

SEQ ID NO: 2493524 - RNA, 19 nt, Artificial Sequence
  Description of Artificial Sequence: Synthetic oligonucleotide
  Sense strand starting at position 802 of SEQ ID NO: 1887744
gcacaagguuucucaccga

SEQ ID NO: 2493525 - RNA, 19 nt, Artificial Sequence
  Description of Artificial Sequence: Synthetic oligonucleotide
  Antisense strand to SEQ ID NO: 2493524
ucggugagaaaccuugugc

SEQ ID NO: 2493526 - RNA, 19 nt, Artificial Sequence
  Description of Artificial Sequence: Synthetic oligonucleotide
  Sense strand starting at position 805 of SEQ ID NO: 1887744
caagguuucucaccgaagu

SEQ ID NO: 2493527 - RNA, 19 nt, Artificial Sequence
  Description of Artificial Sequence: Synthetic oligonucleotide
  Antisense strand to SEQ ID NO: 2493526
acuucggugagaaaccuug

SEQ ID NO: 2493528 - RNA, 19 nt, Artificial Sequence
  Description of Artificial Sequence: Synthetic oligonucleotide
  Sense strand starting at position 806 of SEQ ID NO: 1887744
aagguuucucaccgaaguc

SEQ ID NO: 2493529 - RNA, 19 nt, Artificial Sequence
  Description of Artificial Sequence: Synthetic oligonucleotide
  Antisense strand to SEQ ID NO: 2493528
gacuucggugagaaaccuu

SEQ ID NO: 2493530 - RNA, 19 nt, Artificial Sequence
  Description of Artificial Sequence: Synthetic oligonucleotide
  Sense strand starting at position 807 of SEQ ID NO: 1887744
agguuucucaccgaagucu

SEQ ID NO: 2493531 - RNA, 19 nt, Artificial Sequence
  Description of Artificial Sequence: Synthetic oligonucleotide
  Antisense strand to SEQ ID NO: 2493530
agacuucggugagaaaccu

SEQ ID NO: 2493532 - RNA, 19 nt, Artificial Sequence
  Description of Artificial Sequence: Synthetic oligonucleotide
  Sense strand starting at position 873 of SEQ ID NO: 1887744
gagguaucuuaccuguuga

SEQ ID NO: 2493533 - RNA, 19 nt, Artificial Sequence
  Description of Artificial Sequence: Synthetic oligonucleotide
  Antisense strand to SEQ ID NO: 2493532
ucaacagguaagauaccuc

SEQ ID NO: 2493534 - RNA, 19 nt, Artificial Sequence
  Description of Artificial Sequence: Synthetic oligonucleotide
  Sense strand starting at position 1259 of SEQ ID NO: 1887744
aggugcaggucuccagaaa

SEQ ID NO: 2493535 - RNA, 19 nt, Artificial Sequence
  Description of Artificial Sequence: Synthetic oligonucleotide
  Antisense strand to SEQ ID NO: 2493534
uuucuggagaccugcaccu

SEQ ID NO: 2493536 - RNA, 19 nt, Artificial Sequence
  Description of Artificial Sequence: Synthetic oligonucleotide
  Sense strand starting at position 1260 of SEQ ID NO: 1887744
ggugcaggucuccagaaau

SEQ ID NO: 2493537 - RNA, 19 nt, Artificial Sequence
  Description of Artificial Sequence: Synthetic oligonucleotide
  Antisense strand to SEQ ID NO: 2493536
auuucuggagaccugcacc

SEQ ID NO: 2493538 - RNA, 19 nt, Artificial Sequence
  Description of Artificial Sequence: Synthetic oligonucleotide
  Sense strand starting at position 1462 of SEQ ID NO: 1887744
uccggauauuuggugcuga

SEQ ID NO: 2493539 - RNA, 19 nt, Artificial Sequence
  Description of Artificial Sequence: Synthetic oligonucleotide
  Antisense strand to SEQ ID NO: 2493538
ucagcaccaaauauccgga

SEQ ID NO: 2493540 - RNA, 19 nt, Artificial Sequence
  Description of Artificial Sequence: Synthetic oligonucleotide
  Sense strand starting at position 1519 of SEQ ID NO: 1887744
gucccucgugcugaagaaa

SEQ ID NO: 2493541 - RNA, 19 nt, Artificial Sequence
  Description of Artificial Sequence: Synthetic oligonucleotide
  Antisense strand to SEQ ID NO: 2493540
uuucuucagcacgagggac

SEQ ID NO: 2493542 - RNA, 19 nt, Artificial Sequence
  Description of Artificial Sequence: Synthetic oligonucleotide
  Sense strand starting at position 2063 of SEQ ID NO: 1887744
gggauuccgccucagaaug

SEQ ID NO: 2493543 - RNA, 19 nt, Artificial Sequence
  Description of Artificial Sequence: Synthetic oligonucleotide
  Antisense strand to SEQ ID NO: 2493542
cauucugaggcggaauccc

SEQ ID NO: 2493544 - RNA, 19 nt, Artificial Sequence
  Description of Artificial Sequence: Synthetic oligonucleotide
  Sense strand starting at position 2231 of SEQ ID NO: 1887744
cuggguuccugagcuccaa

SEQ ID NO: 2493545 - RNA, 19 nt, Artificial Sequence
  Description of Artificial Sequence: Synthetic oligonucleotide
  Antisense strand to SEQ ID NO: 2493544
uuggagcucaggaacccag

SEQ ID NO: 2493546 - RNA, 19 nt, Artificial Sequence
  Description of Artificial Sequence: Synthetic oligonucleotide
  Sense strand starting at position 2446 of SEQ ID NO: 1887744
gggacuuaagccugaagcu

SEQ ID NO: 2493547 - RNA, 19 nt, Artificial Sequence
  Description of Artificial Sequence: Synthetic oligonucleotide
  Antisense strand to SEQ ID NO: 2493546
agcuucaggcuuaaguccc

SEQ ID NO: 2493548 - RNA, 19 nt, Artificial Sequence
  Description of Artificial Sequence: Synthetic oligonucleotide
  Sense strand starting at position 2447 of SEQ ID NO: 1887744
ggacuuaagccugaagcuu

SEQ ID NO: 2493549 - RNA, 19 nt, Artificial Sequence
  Description of Artificial Sequence: Synthetic oligonucleotide
  Antisense strand to SEQ ID NO: 2493548
aagcuucaggcuuaagucc

SEQ ID NO: 2493550 - RNA, 19 nt, Artificial Sequence
  Description of Artificial Sequence: Synthetic oligonucleotide
  Sense strand starting at position 2577 of SEQ ID NO: 1887744
uucuccuuccuuugggaca

SEQ ID NO: 2493551 - RNA, 19 nt, Artificial Sequence
  Description of Artificial Sequence: Synthetic oligonucleotide
  Antisense strand to SEQ ID NO: 2493550
ugucccaaaggaaggagaa

SEQ ID NO: 2493552 - RNA, 19 nt, Artificial Sequence
  Description of Artificial Sequence: Synthetic oligonucleotide
  Sense strand starting at position 2626 of SEQ ID NO: 1887744
cugugaaguagugauaaua

SEQ ID NO: 2493553 - RNA, 19 nt, Artificial Sequence
  Description of Artificial Sequence: Synthetic oligonucleotide
  Antisense strand to SEQ ID NO: 2493552
uauuaucacuacuucacag

SEQ ID NO: 2493554 - RNA, 19 nt, Artificial Sequence
  Description of Artificial Sequence: Synthetic oligonucleotide
  Sense strand starting at position 2636 of SEQ ID NO: 1887744
gugauaauaguagaguauu

SEQ ID NO: 2493555 - RNA, 19 nt, Artificial Sequence
  Description of Artificial Sequence: Synthetic oligonucleotide
  Antisense strand to SEQ ID NO: 2493554
aauacucuacuauuaucac

SEQ ID NO: 2493556 - RNA, 19 nt, Artificial Sequence
  Description of Artificial Sequence: Synthetic oligonucleotide
  Sense strand starting at position 2711 of SEQ ID NO: 1887744
gcuaaugugaguuggguga

SEQ ID NO: 2493557 - RNA, 19 nt, Artificial Sequence
  Description of Artificial Sequence: Synthetic oligonucleotide
  Antisense strand to SEQ ID NO: 2493556
ucacccaacucacauuagc

SEQ ID NO: 2493558 - RNA, 19 nt, Artificial Sequence
  Description of Artificial Sequence: Synthetic oligonucleotide
  Sense strand starting at position 3308 of SEQ ID NO: 1887744
uguuauucuuuccugaucu

SEQ ID NO: 2493559 - RNA, 19 nt, Artificial Sequence
  Description of Artificial Sequence: Synthetic oligonucleotide
  Antisense strand to SEQ ID NO: 2493558
agaucaggaaagaauaaca

SEQ ID NO: 2493560 - RNA, 19 nt, Artificial Sequence
  Description of Artificial Sequence: Synthetic oligonucleotide
  Sense strand starting at position 3346 of SEQ ID NO: 1887744
ucaacaaacuuguuguacu

SEQ ID NO: 2493561 - RNA, 19 nt, Artificial Sequence
  Description of Artificial Sequence: Synthetic oligonucleotide
  Antisense strand to SEQ ID NO: 2493560
aguacaacaaguuuguuga

SEQ ID NO: 2493562 - RNA, 19 nt, Artificial Sequence
  Description of Artificial Sequence: Synthetic oligonucleotide
  Sense strand starting at position 3404 of SEQ ID NO: 1887744
ugccuuuagggaggguaaa

SEQ ID NO: 2493563 - RNA, 19 nt, Artificial Sequence
  Description of Artificial Sequence: Synthetic oligonucleotide
  Antisense strand to SEQ ID NO: 2493562
uuuacccucccuaaaggca

SEQ ID NO: 2493564 - RNA, 19 nt, Artificial Sequence
  Description of Artificial Sequence: Synthetic oligonucleotide
  Sense strand starting at position 3539 of SEQ ID NO: 1887744
agggacaguuaggauauaa

SEQ ID NO: 2493565 - RNA, 19 nt, Artificial Sequence
  Description of Artificial Sequence: Synthetic oligonucleotide
  Antisense strand to SEQ ID NO: 2493564
uuauauccuaacugucccu

SEQ ID NO: 2493566 - RNA, 19 nt, Artificial Sequence
  Description of Artificial Sequence: Synthetic oligonucleotide
  Sense strand starting at position 3680 of SEQ ID NO: 1887744
gggucagugccagacauuc

SEQ ID NO: 2493567 - RNA, 19 nt, Artificial Sequence
  Description of Artificial Sequence: Synthetic oligonucleotide
  Antisense strand to SEQ ID NO: 2493566
gaaugucuggcacugaccc

SEQ ID NO: 2493568 - RNA, 19 nt, Artificial Sequence
  Description of Artificial Sequence: Synthetic oligonucleotide
  Sense strand starting at position 3695 of SEQ ID NO: 1887744
auucuaccugcugagugau

SEQ ID NO: 2493569 - RNA, 19 nt, Artificial Sequence
  Description of Artificial Sequence: Synthetic oligonucleotide
  Antisense strand to SEQ ID NO: 2493568
aucacucagcagguagaau

SEQ ID NO: 2493570 - RNA, 19 nt, Artificial Sequence
  Description of Artificial Sequence: Synthetic oligonucleotide
  Sense strand starting at position 3701 of SEQ ID NO: 1887744
ccugcugagugaucugaag

SEQ ID NO: 2493571 - RNA, 19 nt, Artificial Sequence
  Description of Artificial Sequence: Synthetic oligonucleotide
  Antisense strand to SEQ ID NO: 2493570
cuucagaucacucagcagg

SEQ ID NO: 2493572 - RNA, 19 nt, Artificial Sequence
  Description of Artificial Sequence: Synthetic oligonucleotide
  Sense strand starting at position 3707 of SEQ ID NO: 1887744
gagugaucugaaggccuca

SEQ ID NO: 2493573 - RNA, 19 nt, Artificial Sequence
  Description of Artificial Sequence: Synthetic oligonucleotide
  Antisense strand to SEQ ID NO: 2493572
ugaggccuucagaucacuc

SEQ ID NO: 2493574 - RNA, 19 nt, Artificial Sequence
  Description of Artificial Sequence: Synthetic oligonucleotide
  Sense strand starting at position 112 of SEQ ID NO: 1887745
ggacucaagauucggaagu

SEQ ID NO: 2493575 - RNA, 19 nt, Artificial Sequence
  Description of Artificial Sequence: Synthetic oligonucleotide
  Antisense strand to SEQ ID NO: 2493574
acuuccgaaucuugagucc

SEQ ID NO: 2493576 - RNA, 19 nt, Artificial Sequence
  Description of Artificial Sequence: Synthetic oligonucleotide
  Sense strand starting at position 134 of SEQ ID NO: 1887745
gacauucugugcgucauua

SEQ ID NO: 2493577 - RNA, 19 nt, Artificial Sequence
  Description of Artificial Sequence: Synthetic oligonucleotide
  Antisense strand to SEQ ID NO: 2493576
uaaugacgcacagaauguc

SEQ ID NO: 2493578 - RNA, 19 nt, Artificial Sequence
  Description of Artificial Sequence: Synthetic oligonucleotide
  Sense strand starting at position 136 of SEQ ID NO: 1887745
cauucugugcgucauuaau

SEQ ID NO: 2493579 - RNA, 19 nt, Artificial Sequence
  Description of Artificial Sequence: Synthetic oligonucleotide
  Antisense strand to SEQ ID NO: 2493578
auuaaugacgcacagaaug

SEQ ID NO: 2493580 - RNA, 19 nt, Artificial Sequence
  Description of Artificial Sequence: Synthetic oligonucleotide
  Sense strand starting at position 138 of SEQ ID NO: 1887745
uucugugcgucauuaauga

SEQ ID NO: 2493581 - RNA, 19 nt, Artificial Sequence
  Description of Artificial Sequence: Synthetic oligonucleotide
  Antisense strand to SEQ ID NO: 2493580
ucauuaaugacgcacagaa

SEQ ID NO: 2493582 - RNA, 19 nt, Artificial Sequence
  Description of Artificial Sequence: Synthetic oligonucleotide
  Sense strand starting at position 200 of SEQ ID NO: 1887745
aggcacugaucuucuaguu

SEQ ID NO: 2493583 - RNA, 19 nt, Artificial Sequence
  Description of Artificial Sequence: Synthetic oligonucleotide
  Antisense strand to SEQ ID NO: 2493582
aacuagaagaucagugccu

SEQ ID NO: 2493584 - RNA, 19 nt, Artificial Sequence
  Description of Artificial Sequence: Synthetic oligonucleotide
  Sense strand starting at position 246 of SEQ ID NO: 1887745
ucaaucagaugugcugaau

SEQ ID NO: 2493585 - RNA, 19 nt, Artificial Sequence
  Description of Artificial Sequence: Synthetic oligonucleotide
  Antisense strand to SEQ ID NO: 2493584
auucagcacaucugauuga

SEQ ID NO: 2493586 - RNA, 19 nt, Artificial Sequence
  Description of Artificial Sequence: Synthetic oligonucleotide
  Sense strand starting at position 252 of SEQ ID NO: 1887745
agaugugcugaaugaauca

SEQ ID NO: 2493587 - RNA, 19 nt, Artificial Sequence
  Description of Artificial Sequence: Synthetic oligonucleotide
  Antisense strand to SEQ ID NO: 2493586
ugauucauucagcacaucu

SEQ ID NO: 2493588 - RNA, 19 nt, Artificial Sequence
  Description of Artificial Sequence: Synthetic oligonucleotide
  Sense strand starting at position 259 of SEQ ID NO: 1887745
cugaaugaaucagccuuaa

SEQ ID NO: 2493589 - RNA, 19 nt, Artificial Sequence
  Description of Artificial Sequence: Synthetic oligonucleotide
  Antisense strand to SEQ ID NO: 2493588
uuaaggcugauucauucag

SEQ ID NO: 2493590 - RNA, 19 nt, Artificial Sequence
  Description of Artificial Sequence: Synthetic oligonucleotide
  Sense strand starting at position 352 of SEQ ID NO: 1887745
caacuuugagucugugauc

SEQ ID NO: 2493591 - RNA, 19 nt, Artificial Sequence
  Description of Artificial Sequence: Synthetic oligonucleotide
  Antisense strand to SEQ ID NO: 2493590
gaucacagacucaaaguug

SEQ ID NO: 2493592 - RNA, 19 nt, Artificial Sequence
  Description of Artificial Sequence: Synthetic oligonucleotide
  Sense strand starting at position 487 of SEQ ID NO: 1887745
cucugcuuaagaugaggau

SEQ ID NO: 2493593 - RNA, 19 nt, Artificial Sequence
  Description of Artificial Sequence: Synthetic oligonucleotide
  Antisense strand to SEQ ID NO: 2493592
auccucaucuuaagcagag

SEQ ID NO: 2493594 - RNA, 19 nt, Artificial Sequence
  Description of Artificial Sequence: Synthetic oligonucleotide
  Sense strand starting at position 496 of SEQ ID NO: 1887745
agaugaggaugauaagagu

SEQ ID NO: 2493595 - RNA, 19 nt, Artificial Sequence
  Description of Artificial Sequence: Synthetic oligonucleotide
  Antisense strand to SEQ ID NO: 2493594
acucuuaucauccucaucu

SEQ ID NO: 2493596 - RNA, 19 nt, Artificial Sequence
  Description of Artificial Sequence: Synthetic oligonucleotide
  Sense strand starting at position 505 of SEQ ID NO: 1887745
ugauaagagucccugccuu

SEQ ID NO: 2493597 - RNA, 19 nt, Artificial Sequence
  Description of Artificial Sequence: Synthetic oligonucleotide
  Antisense strand to SEQ ID NO: 2493596
aaggcagggacucuuauca

SEQ ID NO: 2493598 - RNA, 19 nt, Artificial Sequence
  Description of Artificial Sequence: Synthetic oligonucleotide
  Sense strand starting at position 841 of SEQ ID NO: 1887745
agggcuguccugcaaggau

SEQ ID NO: 2493599 - RNA, 19 nt, Artificial Sequence
  Description of Artificial Sequence: Synthetic oligonucleotide
  Antisense strand to SEQ ID NO: 2493598
auccuugcaggacagcccu

SEQ ID NO: 2493600 - RNA, 19 nt, Artificial Sequence
  Description of Artificial Sequence: Synthetic oligonucleotide
  Sense strand starting at position 1006 of SEQ ID NO: 1887745
cgcucugauucugucuaua

SEQ ID NO: 2493601 - RNA, 19 nt, Artificial Sequence
  Description of Artificial Sequence: Synthetic oligonucleotide
  Antisense strand to SEQ ID NO: 2493600
uauagacagaaucagagcg

SEQ ID NO: 2493602 - RNA, 19 nt, Artificial Sequence
  Description of Artificial Sequence: Synthetic oligonucleotide
  Sense strand starting at position 1008 of SEQ ID NO: 1887745
cucugauucugucuauaua

SEQ ID NO: 2493603 - RNA, 19 nt, Artificial Sequence
  Description of Artificial Sequence: Synthetic oligonucleotide
  Antisense strand to SEQ ID NO: 2493602
uauauagacagaaucagag

SEQ ID NO: 2493604 - RNA, 19 nt, Artificial Sequence
  Description of Artificial Sequence: Synthetic oligonucleotide
  Sense strand starting at position 1125 of SEQ ID NO: 1887745
cagucauuguuacuaucgu

SEQ ID NO: 2493605 - RNA, 19 nt, Artificial Sequence
  Description of Artificial Sequence: Synthetic oligonucleotide
  Antisense strand to SEQ ID NO: 2493604
acgauaguaacaaugacug

SEQ ID NO: 2493606 - RNA, 19 nt, Artificial Sequence
  Description of Artificial Sequence: Synthetic oligonucleotide
  Sense strand starting at position 1132 of SEQ ID NO: 1887745
uguuacuaucgugggaaau

SEQ ID NO: 2493607 - RNA, 19 nt, Artificial Sequence
  Description of Artificial Sequence: Synthetic oligonucleotide
  Antisense strand to SEQ ID NO: 2493606
auuucccacgauaguaaca

SEQ ID NO: 2493608 - RNA, 19 nt, Artificial Sequence
  Description of Artificial Sequence: Synthetic oligonucleotide
  Sense strand starting at position 1133 of SEQ ID NO: 1887745
guuacuaucgugggaaauu

SEQ ID NO: 2493609 - RNA, 19 nt, Artificial Sequence
  Description of Artificial Sequence: Synthetic oligonucleotide
  Antisense strand to SEQ ID NO: 2493608
aauuucccacgauaguaac

SEQ ID NO: 2493610 - RNA, 19 nt, Artificial Sequence
  Description of Artificial Sequence: Synthetic oligonucleotide
  Sense strand starting at position 1227 of SEQ ID NO: 1887745
aggaguccuccucgggaaa

SEQ ID NO: 2493611 - RNA, 19 nt, Artificial Sequence
  Description of Artificial Sequence: Synthetic oligonucleotide
  Antisense strand to SEQ ID NO: 2493610
uuucccgaggaggacuccu

SEQ ID NO: 2493612 - RNA, 19 nt, Artificial Sequence
  Description of Artificial Sequence: Synthetic oligonucleotide
  Sense strand starting at position 1228 of SEQ ID NO: 1887745
ggaguccuccucgggaaac

SEQ ID NO: 2493613 - RNA, 19 nt, Artificial Sequence
  Description of Artificial Sequence: Synthetic oligonucleotide
  Antisense strand to SEQ ID NO: 2493612
guuucccgaggaggacucc

SEQ ID NO: 2493614 - RNA, 19 nt, Artificial Sequence
  Description of Artificial Sequence: Synthetic oligonucleotide
  Sense strand starting at position 1282 of SEQ ID NO: 1887745
gcagcuuccugauuggaga

SEQ ID NO: 2493615 - RNA, 19 nt, Artificial Sequence
  Description of Artificial Sequence: Synthetic oligonucleotide
  Antisense strand to SEQ ID NO: 2493614
ucuccaaucaggaagcugc

SEQ ID NO: 2493616 - RNA, 19 nt, Artificial Sequence
  Description of Artificial Sequence: Synthetic oligonucleotide
  Sense strand starting at position 1283 of SEQ ID NO: 1887745
cagcuuccugauuggagaa

SEQ ID NO: 2493617 - RNA, 19 nt, Artificial Sequence
  Description of Artificial Sequence: Synthetic oligonucleotide
  Antisense strand to SEQ ID NO: 2493616
uucuccaaucaggaagcug

SEQ ID NO: 2493618 - RNA, 19 nt, Artificial Sequence
  Description of Artificial Sequence: Synthetic oligonucleotide
  Sense strand starting at position 1590 of SEQ ID NO: 1887745
guccaacuaugugcucaaa

SEQ ID NO: 2493619 - RNA, 19 nt, Artificial Sequence
  Description of Artificial Sequence: Synthetic oligonucleotide
  Antisense strand to SEQ ID NO: 2493618
uuugagcacauaguuggac

SEQ ID NO: 2493620 - RNA, 19 nt, Artificial Sequence
  Description of Artificial Sequence: Synthetic oligonucleotide
  Sense strand starting at position 1593 of SEQ ID NO: 1887745
caacuaugugcucaaagga

SEQ ID NO: 2493621 - RNA, 19 nt, Artificial Sequence
  Description of Artificial Sequence: Synthetic oligonucleotide
  Antisense strand to SEQ ID NO: 2493620
uccuuugagcacauaguug

SEQ ID NO: 2493622 - RNA, 19 nt, Artificial Sequence
  Description of Artificial Sequence: Synthetic oligonucleotide
  Sense strand starting at position 1664 of SEQ ID NO: 1887745
uccagaauuggccacacua

SEQ ID NO: 2493623 - RNA, 19 nt, Artificial Sequence
  Description of Artificial Sequence: Synthetic oligonucleotide
  Antisense strand to SEQ ID NO: 2493622
uaguguggccaauucugga

SEQ ID NO: 2493624 - RNA, 19 nt, Artificial Sequence
  Description of Artificial Sequence: Synthetic oligonucleotide
  Sense strand starting at position 2004 of SEQ ID NO: 1887745
ccgggaugucaccaacagu

SEQ ID NO: 2493625 - RNA, 19 nt, Artificial Sequence
  Description of Artificial Sequence: Synthetic oligonucleotide
  Antisense strand to SEQ ID NO: 2493624
acuguuggugacaucccgg

SEQ ID NO: 2493626 - RNA, 19 nt, Artificial Sequence
  Description of Artificial Sequence: Synthetic oligonucleotide
  Sense strand starting at position 2089 of SEQ ID NO: 1887745
aaggcauccugcgcagaaa

SEQ ID NO: 2493627 - RNA, 19 nt, Artificial Sequence
  Description of Artificial Sequence: Synthetic oligonucleotide
  Antisense strand to SEQ ID NO: 2493626
uuucugcgcaggaugccuu

SEQ ID NO: 2493628 - RNA, 19 nt, Artificial Sequence
  Description of Artificial Sequence: Synthetic oligonucleotide
  Sense strand starting at position 2092 of SEQ ID NO: 1887745
gcauccugcgcagaaacuu

SEQ ID NO: 2493629 - RNA, 19 nt, Artificial Sequence
  Description of Artificial Sequence: Synthetic oligonucleotide
  Antisense strand to SEQ ID NO: 2493628
aaguuucugcgcaggaugc

SEQ ID NO: 2493630 - RNA, 19 nt, Artificial Sequence
  Description of Artificial Sequence: Synthetic oligonucleotide
  Sense strand starting at position 2100 of SEQ ID NO: 1887745
cgcagaaacuuugcuugga

SEQ ID NO: 2493631 - RNA, 19 nt, Artificial Sequence
  Description of Artificial Sequence: Synthetic oligonucleotide
  Antisense strand to SEQ ID NO: 2493630
uccaagcaaaguuucugcg

SEQ ID NO: 2493632 - RNA, 19 nt, Artificial Sequence
  Description of Artificial Sequence: Synthetic oligonucleotide
  Sense strand starting at position 2168 of SEQ ID NO: 1887745
cuguuuagagaguguacaa

SEQ ID NO: 2493633 - RNA, 19 nt, Artificial Sequence
  Description of Artificial Sequence: Synthetic oligonucleotide
  Antisense strand to SEQ ID NO: 2493632
uuguacacucucuaaacag

SEQ ID NO: 2493634 - RNA, 19 nt, Artificial Sequence
  Description of Artificial Sequence: Synthetic oligonucleotide
  Sense strand starting at position 2633 of SEQ ID NO: 1887745
cgagcuguacucugugaga

SEQ ID NO: 2493635 - RNA, 19 nt, Artificial Sequence
  Description of Artificial Sequence: Synthetic oligonucleotide
  Antisense strand to SEQ ID NO: 2493634
ucucacagaguacagcucg

SEQ ID NO: 2493636 - RNA, 19 nt, Artificial Sequence
  Description of Artificial Sequence: Synthetic oligonucleotide
  Sense strand starting at position 2693 of SEQ ID NO: 1887745
gggaguuccugggcccaau

SEQ ID NO: 2493637 - RNA, 19 nt, Artificial Sequence
  Description of Artificial Sequence: Synthetic oligonucleotide
  Antisense strand to SEQ ID NO: 2493636
auugggcccaggaacuccc

SEQ ID NO: 2493638 - RNA, 19 nt, Artificial Sequence
  Description of Artificial Sequence: Synthetic oligonucleotide
  Sense strand starting at position 2696 of SEQ ID NO: 1887745
aguuccugggcccaauaua

SEQ ID NO: 2493639 - RNA, 19 nt, Artificial Sequence
  Description of Artificial Sequence: Synthetic oligonucleotide
  Antisense strand to SEQ ID NO: 2493638
uauauugggcccaggaacu

SEQ ID NO: 2493640 - RNA, 19 nt, Artificial Sequence
  Description of Artificial Sequence: Synthetic oligonucleotide
  Sense strand starting at position 2924 of SEQ ID NO: 1887745
uggaaauccugagccuaag

SEQ ID NO: 2493641 - RNA, 19 nt, Artificial Sequence
  Description of Artificial Sequence: Synthetic oligonucleotide
  Antisense strand to SEQ ID NO: 2493640
cuuaggcucaggauuucca

SEQ ID NO: 2493642 - RNA, 19 nt, Artificial Sequence
  Description of Artificial Sequence: Synthetic oligonucleotide
  Sense strand starting at position 3038 of SEQ ID NO: 1887745
aggugaugccauuaccaac

SEQ ID NO: 2493643 - RNA, 19 nt, Artificial Sequence
  Description of Artificial Sequence: Synthetic oligonucleotide
  Antisense strand to SEQ ID NO: 2493642
guugguaauggcaucaccu

SEQ ID NO: 2493644 - RNA, 19 nt, Artificial Sequence
  Description of Artificial Sequence: Synthetic oligonucleotide
  Sense strand starting at position 3058 of SEQ ID NO: 1887745
cugguuaacugauaaacaa

SEQ ID NO: 2493645 - RNA, 19 nt, Artificial Sequence
  Description of Artificial Sequence: Synthetic oligonucleotide
  Antisense strand to SEQ ID NO: 2493644
uuguuuaucaguuaaccag

SEQ ID NO: 2493646 - RNA, 19 nt, Artificial Sequence
  Description of Artificial Sequence: Synthetic oligonucleotide
  Sense strand starting at position 3452 of SEQ ID NO: 1887745
gcugccgugagcuacaauu

SEQ ID NO: 2493647 - RNA, 19 nt, Artificial Sequence
  Description of Artificial Sequence: Synthetic oligonucleotide
  Antisense strand to SEQ ID NO: 2493646
aauuguagcucacggcagc

SEQ ID NO: 2493648 - RNA, 19 nt, Artificial Sequence
  Description of Artificial Sequence: Synthetic oligonucleotide
  Sense strand starting at position 3590 of SEQ ID NO: 1887745
agcuguguuccagugguuu

SEQ ID NO: 2493649 - RNA, 19 nt, Artificial Sequence
  Description of Artificial Sequence: Synthetic oligonucleotide
  Antisense strand to SEQ ID NO: 2493648
aaaccacuggaacacagcu

SEQ ID NO: 2493650 - RNA, 19 nt, Artificial Sequence
  Description of Artificial Sequence: Synthetic oligonucleotide
  Sense strand starting at position 3747 of SEQ ID NO: 1887745
cgaccuuugugguuucaag

SEQ ID NO: 2493651 - RNA, 19 nt, Artificial Sequence
  Description of Artificial Sequence: Synthetic oligonucleotide
  Antisense strand to SEQ ID NO: 2493650
cuugaaaccacaaaggucg

SEQ ID NO: 2493652 - RNA, 19 nt, Artificial Sequence
  Description of Artificial Sequence: Synthetic oligonucleotide
  Sense strand starting at position 3929 of SEQ ID NO: 1887745
gcggaaacuguccacuaga

SEQ ID NO: 2493653 - RNA, 19 nt, Artificial Sequence
  Description of Artificial Sequence: Synthetic oligonucleotide
  Antisense strand to SEQ ID NO: 2493652
ucuaguggacaguuuccgc

SEQ ID NO: 2493654 - RNA, 19 nt, Artificial Sequence
  Description of Artificial Sequence: Synthetic oligonucleotide
  Sense strand starting at position 128 of SEQ ID NO: 1887746
gugagagacuucccuguag

SEQ ID NO: 2493655 - RNA, 19 nt, Artificial Sequence
  Description of Artificial Sequence: Synthetic oligonucleotide
  Antisense strand to SEQ ID NO: 2493654
cuacagggaagucucucac

SEQ ID NO: 2493656 - RNA, 19 nt, Artificial Sequence
  Description of Artificial Sequence: Synthetic oligonucleotide
  Sense strand starting at position 130 of SEQ ID NO: 1887746
gagagacuucccuguagag

SEQ ID NO: 2493657 - RNA, 19 nt, Artificial Sequence
  Description of Artificial Sequence: Synthetic oligonucleotide
  Antisense strand to SEQ ID NO: 2493656
cucuacagggaagucucuc

SEQ ID NO: 2493658 - RNA, 19 nt, Artificial Sequence
  Description of Artificial Sequence: Synthetic oligonucleotide
  Sense strand starting at position 132 of SEQ ID NO: 1887746
gagacuucccuguagagua

SEQ ID NO: 2493659 - RNA, 19 nt, Artificial Sequence
  Description of Artificial Sequence: Synthetic oligonucleotide
  Antisense strand to SEQ ID NO: 2493658
uacucuacagggaagucuc

SEQ ID NO: 2493660 - RNA, 19 nt, Artificial Sequence
  Description of Artificial Sequence: Synthetic oligonucleotide
  Sense strand starting at position 315 of SEQ ID NO: 1887746
gcuagaaugcaauagcaua

SEQ ID NO: 2493661 - RNA, 19 nt, Artificial Sequence
  Description of Artificial Sequence: Synthetic oligonucleotide
  Antisense strand to SEQ ID NO: 2493660
uaugcuauugcauucuagc

SEQ ID NO: 2493662 - RNA, 19 nt, Artificial Sequence
  Description of Artificial Sequence: Synthetic oligonucleotide
  Sense strand starting at position 570 of SEQ ID NO: 1887746
ccaggagucuuaccuuucu

SEQ ID NO: 2493663 - RNA, 19 nt, Artificial Sequence
  Description of Artificial Sequence: Synthetic oligonucleotide
  Antisense strand to SEQ ID NO: 2493662
agaaagguaagacuccugg

SEQ ID NO: 2493664 - RNA, 19 nt, Artificial Sequence
  Description of Artificial Sequence: Synthetic oligonucleotide
  Sense strand starting at position 616 of SEQ ID NO: 1887746
gggcuccuuucucuagaga

SEQ ID NO: 2493665 - RNA, 19 nt, Artificial Sequence
  Description of Artificial Sequence: Synthetic oligonucleotide
  Antisense strand to SEQ ID NO: 2493664
ucucuagagaaaggagccc

SEQ ID NO: 2493666 - RNA, 19 nt, Artificial Sequence
  Description of Artificial Sequence: Synthetic oligonucleotide
  Sense strand starting at position 617 of SEQ ID NO: 1887746
ggcuccuuucucuagagaa

SEQ ID NO: 2493667 - RNA, 19 nt, Artificial Sequence
  Description of Artificial Sequence: Synthetic oligonucleotide
  Antisense strand to SEQ ID NO: 2493666
uucucuagagaaaggagcc

SEQ ID NO: 2493668 - RNA, 19 nt, Artificial Sequence
  Description of Artificial Sequence: Synthetic oligonucleotide
  Sense strand starting at position 687 of SEQ ID NO: 1887746
acgggauuagccuagucga

SEQ ID NO: 2493669 - RNA, 19 nt, Artificial Sequence
  Description of Artificial Sequence: Synthetic oligonucleotide
  Antisense strand to SEQ ID NO: 2493668
ucgacuaggcuaaucccgu

SEQ ID NO: 2493670 - RNA, 19 nt, Artificial Sequence
  Description of Artificial Sequence: Synthetic oligonucleotide
  Sense strand starting at position 688 of SEQ ID NO: 1887746
cgggauuagccuagucgau

SEQ ID NO: 2493671 - RNA, 19 nt, Artificial Sequence
  Description of Artificial Sequence: Synthetic oligonucleotide
  Antisense strand to SEQ ID NO: 2493670
aucgacuaggcuaaucccg

SEQ ID NO: 2493672 - RNA, 19 nt, Artificial Sequence
  Description of Artificial Sequence: Synthetic oligonucleotide
  Sense strand starting at position 1302 of SEQ ID NO: 1887746
ccuagaggccuugaguuau

SEQ ID NO: 2493673 - RNA, 19 nt, Artificial Sequence
  Description of Artificial Sequence: Synthetic oligonucleotide
  Antisense strand to SEQ ID NO: 2493672
auaacucaaggccucuagg

SEQ ID NO: 2493674 - RNA, 19 nt, Artificial Sequence
  Description of Artificial Sequence: Synthetic oligonucleotide
  Sense strand starting at position 1353 of SEQ ID NO: 1887746
gaaugaucgucacuggaca

SEQ ID NO: 2493675 - RNA, 19 nt, Artificial Sequence
  Description of Artificial Sequence: Synthetic oligonucleotide
  Antisense strand to SEQ ID NO: 2493674
uguccagugacgaucauuc

SEQ ID NO: 2493676 - RNA, 19 nt, Artificial Sequence
  Description of Artificial Sequence: Synthetic oligonucleotide
  Sense strand starting at position 1416 of SEQ ID NO: 1887746
ugacauaaccagcaguuua

SEQ ID NO: 2493677 - RNA, 19 nt, Artificial Sequence
  Description of Artificial Sequence: Synthetic oligonucleotide
  Antisense strand to SEQ ID NO: 2493676
uaaacugcugguuauguca

SEQ ID NO: 2493678 - RNA, 19 nt, Artificial Sequence
  Description of Artificial Sequence: Synthetic oligonucleotide
  Sense strand starting at position 1569 of SEQ ID NO: 1887746
ugucaagcugucuaauacu

SEQ ID NO: 2493679 - RNA, 19 nt, Artificial Sequence
  Description of Artificial Sequence: Synthetic oligonucleotide
  Antisense strand to SEQ ID NO: 2493678
aguauuagacagcuugaca

SEQ ID NO: 2493680 - RNA, 19 nt, Artificial Sequence
  Description of Artificial Sequence: Synthetic oligonucleotide
  Sense strand starting at position 1641 of SEQ ID NO: 1887746
cacagugcuguugagacaa

SEQ ID NO: 2493681 - RNA, 19 nt, Artificial Sequence
  Description of Artificial Sequence: Synthetic oligonucleotide
  Antisense strand to SEQ ID NO: 2493680
uugucucaacagcacugug

SEQ ID NO: 2493682 - RNA, 19 nt, Artificial Sequence
  Description of Artificial Sequence: Synthetic oligonucleotide
  Sense strand starting at position 1668 of SEQ ID NO: 1887746
ugucauagucauuagaccu

SEQ ID NO: 2493683 - RNA, 19 nt, Artificial Sequence
  Description of Artificial Sequence: Synthetic oligonucleotide
  Antisense strand to SEQ ID NO: 2493682
aggucuaaugacuaugaca

SEQ ID NO: 2493684 - RNA, 19 nt, Artificial Sequence
  Description of Artificial Sequence: Synthetic oligonucleotide
  Sense strand starting at position 1737 of SEQ ID NO: 1887746
gcugauuguggagggacau

SEQ ID NO: 2493685 - RNA, 19 nt, Artificial Sequence
  Description of Artificial Sequence: Synthetic oligonucleotide
  Antisense strand to SEQ ID NO: 2493684
augucccuccacaaucagc

SEQ ID NO: 2493686 - RNA, 19 nt, Artificial Sequence
  Description of Artificial Sequence: Synthetic oligonucleotide
  Sense strand starting at position 1771 of SEQ ID NO: 1887746
guguaugaauaaguuugaa

SEQ ID NO: 2493687 - RNA, 19 nt, Artificial Sequence
  Description of Artificial Sequence: Synthetic oligonucleotide
  Antisense strand to SEQ ID NO: 2493686
uucaaacuuauucauacac

SEQ ID NO: 2493688 - RNA, 19 nt, Artificial Sequence
  Description of Artificial Sequence: Synthetic oligonucleotide
  Sense strand starting at position 1784 of SEQ ID NO: 1887746
uuugaaagcugaccauaaa

SEQ ID NO: 2493689 - RNA, 19 nt, Artificial Sequence
  Description of Artificial Sequence: Synthetic oligonucleotide
  Antisense strand to SEQ ID NO: 2493688
uuuauggucagcuuucaaa

SEQ ID NO: 2493690 - RNA, 19 nt, Artificial Sequence
  Description of Artificial Sequence: Synthetic oligonucleotide
  Sense strand starting at position 1826 of SEQ ID NO: 1887746
gcacauaaagaguguauua

SEQ ID NO: 2493691 - RNA, 19 nt, Artificial Sequence
  Description of Artificial Sequence: Synthetic oligonucleotide
  Antisense strand to SEQ ID NO: 2493690
uaauacacucuuuaugugc

SEQ ID NO: 2493692 - RNA, 19 nt, Artificial Sequence
  Description of Artificial Sequence: Synthetic oligonucleotide
  Sense strand starting at position 1870 of SEQ ID NO: 1887746
ccaugaaugcaguagcuua

SEQ ID NO: 2493693 - RNA, 19 nt, Artificial Sequence
  Description of Artificial Sequence: Synthetic oligonucleotide
  Antisense strand to SEQ ID NO: 2493692
uaagcuacugcauucaugg

SEQ ID NO: 2493694 - RNA, 19 nt, Artificial Sequence
  Description of Artificial Sequence: Synthetic oligonucleotide
  Sense strand starting at position 1902 of SEQ ID NO: 1887746
uuauuaucucaugguucca

SEQ ID NO: 2493695 - RNA, 19 nt, Artificial Sequence
  Description of Artificial Sequence: Synthetic oligonucleotide
  Antisense strand to SEQ ID NO: 2493694
uggaaccaugagauaauaa

SEQ ID NO: 2493696 - RNA, 19 nt, Artificial Sequence
  Description of Artificial Sequence: Synthetic oligonucleotide
  Sense strand starting at position 1904 of SEQ ID NO: 1887746
auuaucucaugguuccaua

SEQ ID NO: 2493697 - RNA, 19 nt, Artificial Sequence
  Description of Artificial Sequence: Synthetic oligonucleotide
  Antisense strand to SEQ ID NO: 2493696
uauggaaccaugagauaau

SEQ ID NO: 2493698 - RNA, 19 nt, Artificial Sequence
  Description of Artificial Sequence: Synthetic oligonucleotide
  Sense strand starting at position 1914 of SEQ ID NO: 1887746
gguuccauaggucagaagu

SEQ ID NO: 2493699 - RNA, 19 nt, Artificial Sequence
  Description of Artificial Sequence: Synthetic oligonucleotide
  Antisense strand to SEQ ID NO: 2493698
acuucugaccuauggaacc

SEQ ID NO: 2493700 - RNA, 19 nt, Artificial Sequence
  Description of Artificial Sequence: Synthetic oligonucleotide
  Sense strand starting at position 1991 of SEQ ID NO: 1887746
aacuucugaccucggagau

SEQ ID NO: 2493701 - RNA, 19 nt, Artificial Sequence
  Description of Artificial Sequence: Synthetic oligonucleotide
  Antisense strand to SEQ ID NO: 2493700
aucuccgaggucagaaguu

SEQ ID NO: 2493702 - RNA, 19 nt, Artificial Sequence
  Description of Artificial Sequence: Synthetic oligonucleotide
  Sense strand starting at position 2245 of SEQ ID NO: 1887746
uuuaaagggucaccugauu

SEQ ID NO: 2493703 - RNA, 19 nt, Artificial Sequence
  Description of Artificial Sequence: Synthetic oligonucleotide
  Antisense strand to SEQ ID NO: 2493702
aaucaggugacccuuuaaa

SEQ ID NO: 2493704 - RNA, 19 nt, Artificial Sequence
  Description of Artificial Sequence: Synthetic oligonucleotide
  Sense strand starting at position 2378 of SEQ ID NO: 1887746
agugauaucucaucauguc

SEQ ID NO: 2493705 - RNA, 19 nt, Artificial Sequence
  Description of Artificial Sequence: Synthetic oligonucleotide
  Antisense strand to SEQ ID NO: 2493704
gacaugaugagauaucacu

SEQ ID NO: 2493706 - RNA, 19 nt, Artificial Sequence
  Description of Artificial Sequence: Synthetic oligonucleotide
  Sense strand starting at position 2435 of SEQ ID NO: 1887746
aagauauguucuccaggga

SEQ ID NO: 2493707 - RNA, 19 nt, Artificial Sequence
  Description of Artificial Sequence: Synthetic oligonucleotide
  Antisense strand to SEQ ID NO: 2493706
ucccuggagaacauaucuu

SEQ ID NO: 2493708 - RNA, 19 nt, Artificial Sequence
  Description of Artificial Sequence: Synthetic oligonucleotide
  Sense strand starting at position 2438 of SEQ ID NO: 1887746
auauguucuccagggagau

SEQ ID NO: 2493709 - RNA, 19 nt, Artificial Sequence
  Description of Artificial Sequence: Synthetic oligonucleotide
  Antisense strand to SEQ ID NO: 2493708
aucucccuggagaacauau

SEQ ID NO: 2493710 - RNA, 19 nt, Artificial Sequence
  Description of Artificial Sequence: Synthetic oligonucleotide
  Sense strand starting at position 2439 of SEQ ID NO: 1887746
uauguucuccagggagauc

SEQ ID NO: 2493711 - RNA, 19 nt, Artificial Sequence
  Description of Artificial Sequence: Synthetic oligonucleotide
  Antisense strand to SEQ ID NO: 2493710
gaucucccuggagaacaua

SEQ ID NO: 2493712 - RNA, 19 nt, Artificial Sequence
  Description of Artificial Sequence: Synthetic oligonucleotide
  Sense strand starting at position 2640 of SEQ ID NO: 1887746
gcaggcugugucccaguua

SEQ ID NO: 2493713 - RNA, 19 nt, Artificial Sequence
  Description of Artificial Sequence: Synthetic oligonucleotide
  Antisense strand to SEQ ID NO: 2493712
uaacugggacacagccugc

SEQ ID NO: 2493714 - RNA, 19 nt, Artificial Sequence
  Description of Artificial Sequence: Synthetic oligonucleotide
  Sense strand starting at position 2901 of SEQ ID NO: 1887746
augggugugcaggaacauu

SEQ ID NO: 2493715 - RNA, 19 nt, Artificial Sequence
  Description of Artificial Sequence: Synthetic oligonucleotide
  Antisense strand to SEQ ID NO: 2493714
aauguuccugcacacccau

SEQ ID NO: 2493716 - RNA, 19 nt, Artificial Sequence
  Description of Artificial Sequence: Synthetic oligonucleotide
  Sense strand starting at position 3196 of SEQ ID NO: 1887746
ggcuccuagcacuagaaga

SEQ ID NO: 2493717 - RNA, 19 nt, Artificial Sequence
  Description of Artificial Sequence: Synthetic oligonucleotide
  Antisense strand to SEQ ID NO: 2493716
ucuucuagugcuaggagcc

SEQ ID NO: 2493718 - RNA, 19 nt, Artificial Sequence
  Description of Artificial Sequence: Synthetic oligonucleotide
  Sense strand starting at position 3297 of SEQ ID NO: 1887746
gggaccuccuauucuaaac

SEQ ID NO: 2493719 - RNA, 19 nt, Artificial Sequence
  Description of Artificial Sequence: Synthetic oligonucleotide
  Antisense strand to SEQ ID NO: 2493718
guuuagaauaggagguccc

SEQ ID NO: 2493720 - RNA, 19 nt, Artificial Sequence
  Description of Artificial Sequence: Synthetic oligonucleotide
  Sense strand starting at position 3384 of SEQ ID NO: 1887746
cugagaauuucuggaagga

SEQ ID NO: 2493721 - RNA, 19 nt, Artificial Sequence
  Description of Artificial Sequence: Synthetic oligonucleotide
  Antisense strand to SEQ ID NO: 2493720
uccuuccagaaauucucag

SEQ ID NO: 2493722 - RNA, 19 nt, Artificial Sequence
  Description of Artificial Sequence: Synthetic oligonucleotide
  Sense strand starting at position 3447 of SEQ ID NO: 1887746
aguucuuuccaagggacau

SEQ ID NO: 2493723 - RNA, 19 nt, Artificial Sequence
  Description of Artificial Sequence: Synthetic oligonucleotide
  Antisense strand to SEQ ID NO: 2493722
augucccuuggaaagaacu

SEQ ID NO: 2493724 - RNA, 19 nt, Artificial Sequence
  Description of Artificial Sequence: Synthetic oligonucleotide
  Sense strand starting at position 3860 of SEQ ID NO: 1887746
ugcagaugcgacgaagauu

SEQ ID NO: 2493725 - RNA, 19 nt, Artificial Sequence
  Description of Artificial Sequence: Synthetic oligonucleotide
  Antisense strand to SEQ ID NO: 2493724
aaucuucgucgcaucugca

SEQ ID NO: 2493726 - RNA, 19 nt, Artificial Sequence
  Description of Artificial Sequence: Synthetic oligonucleotide
  Sense strand starting at position 3868 of SEQ ID NO: 1887746
cgacgaagauuccuaguca

SEQ ID NO: 2493727 - RNA, 19 nt, Artificial Sequence
  Description of Artificial Sequence: Synthetic oligonucleotide
  Antisense strand to SEQ ID NO: 2493726
ugacuaggaaucuucgucg

SEQ ID NO: 2493728 - RNA, 19 nt, Artificial Sequence
  Description of Artificial Sequence: Synthetic oligonucleotide
  Sense strand starting at position 3872 of SEQ ID NO: 1887746
gaagauuccuagucaguug

SEQ ID NO: 2493729 - RNA, 19 nt, Artificial Sequence
  Description of Artificial Sequence: Synthetic oligonucleotide
  Antisense strand to SEQ ID NO: 2493728
caacugacuaggaaucuuc

SEQ ID NO: 2493730 - RNA, 19 nt, Artificial Sequence
  Description of Artificial Sequence: Synthetic oligonucleotide
  Sense strand starting at position 3883 of SEQ ID NO: 1887746
gucaguugaccugagcuca

SEQ ID NO: 2493731 - RNA, 19 nt, Artificial Sequence
  Description of Artificial Sequence: Synthetic oligonucleotide
  Antisense strand to SEQ ID NO: 2493730
ugagcucaggucaacugac

SEQ ID NO: 2493732 - RNA, 19 nt, Artificial Sequence
  Description of Artificial Sequence: Synthetic oligonucleotide
  Sense strand starting at position 3888 of SEQ ID NO: 1887746
uugaccugagcucaucaaa

SEQ ID NO: 2493733 - RNA, 19 nt, Artificial Sequence
  Description of Artificial Sequence: Synthetic oligonucleotide
  Antisense strand to SEQ ID NO: 2493732
uuugaugagcucaggucaa

SEQ ID NO: 2493734 - RNA, 19 nt, Artificial Sequence
  Description of Artificial Sequence: Synthetic oligonucleotide
  Sense strand starting at position 69 of SEQ ID NO: 1887747
ccagacuucuccucaggua

SEQ ID NO: 2493735 - RNA, 19 nt, Artificial Sequence
  Description of Artificial Sequence: Synthetic oligonucleotide
  Antisense strand to SEQ ID NO: 2493734
uaccugaggagaagucugg

SEQ ID NO: 2493736 - RNA, 19 nt, Artificial Sequence
  Description of Artificial Sequence: Synthetic oligonucleotide
  Sense strand starting at position 72 of SEQ ID NO: 1887747
gacuucuccucagguaaug

SEQ ID NO: 2493737 - RNA, 19 nt, Artificial Sequence
  Description of Artificial Sequence: Synthetic oligonucleotide
  Antisense strand to SEQ ID NO: 2493736
cauuaccugaggagaaguc

SEQ ID NO: 2493738 - RNA, 19 nt, Artificial Sequence
  Description of Artificial Sequence: Synthetic oligonucleotide
  Sense strand starting at position 101 of SEQ ID NO: 1887747
cagaaauagccaugggcaa

SEQ ID NO: 2493739 - RNA, 19 nt, Artificial Sequence
  Description of Artificial Sequence: Synthetic oligonucleotide
  Antisense strand to SEQ ID NO: 2493738
uugcccauggcuauuucug

SEQ ID NO: 2493740 - RNA, 19 nt, Artificial Sequence
  Description of Artificial Sequence: Synthetic oligonucleotide
  Sense strand starting at position 166 of SEQ ID NO: 1887747
gcaggaggauuacuagauc

SEQ ID NO: 2493741 - RNA, 19 nt, Artificial Sequence
  Description of Artificial Sequence: Synthetic oligonucleotide
  Antisense strand to SEQ ID NO: 2493740
gaucuaguaauccuccugc

SEQ ID NO: 2493742 - RNA, 19 nt, Artificial Sequence
  Description of Artificial Sequence: Synthetic oligonucleotide
  Sense strand starting at position 174 of SEQ ID NO: 1887747
auuacuagaucccaggagu

SEQ ID NO: 2493743 - RNA, 19 nt, Artificial Sequence
  Description of Artificial Sequence: Synthetic oligonucleotide
  Antisense strand to SEQ ID NO: 2493742
acuccugggaucuaguaau

SEQ ID NO: 2493744 - RNA, 19 nt, Artificial Sequence
  Description of Artificial Sequence: Synthetic oligonucleotide
  Sense strand starting at position 1197 of SEQ ID NO: 1887747
gggauuccuugacugccaa

SEQ ID NO: 2493745 - RNA, 19 nt, Artificial Sequence
  Description of Artificial Sequence: Synthetic oligonucleotide
  Antisense strand to SEQ ID NO: 2493744
uuggcagucaaggaauccc

SEQ ID NO: 2493746 - RNA, 19 nt, Artificial Sequence
  Description of Artificial Sequence: Synthetic oligonucleotide
  Sense strand starting at position 2093 of SEQ ID NO: 1887747
uuggcaaacugcuccauaa

SEQ ID NO: 2493747 - RNA, 19 nt, Artificial Sequence
  Description of Artificial Sequence: Synthetic oligonucleotide
  Antisense strand to SEQ ID NO: 2493746
uuauggagcaguuugccaa

SEQ ID NO: 2493748 - RNA, 19 nt, Artificial Sequence
  Description of Artificial Sequence: Synthetic oligonucleotide
  Sense strand starting at position 2095 of SEQ ID NO: 1887747
ggcaaacugcuccauaaag

SEQ ID NO: 2493749 - RNA, 19 nt, Artificial Sequence
  Description of Artificial Sequence: Synthetic oligonucleotide
  Antisense strand to SEQ ID NO: 2493748
cuuuauggagcaguuugcc

SEQ ID NO: 2493750 - RNA, 19 nt, Artificial Sequence
  Description of Artificial Sequence: Synthetic oligonucleotide
  Sense strand starting at position 2128 of SEQ ID NO: 1887747
cacucaagcucuguaagga

SEQ ID NO: 2493751 - RNA, 19 nt, Artificial Sequence
  Description of Artificial Sequence: Synthetic oligonucleotide
  Antisense strand to SEQ ID NO: 2493750
uccuuacagagcuugagug

SEQ ID NO: 2493752 - RNA, 19 nt, Artificial Sequence
  Description of Artificial Sequence: Synthetic oligonucleotide
  Sense strand starting at position 2237 of SEQ ID NO: 1887747
gcugcuauucuguuuguga

SEQ ID NO: 2493753 - RNA, 19 nt, Artificial Sequence
  Description of Artificial Sequence: Synthetic oligonucleotide
  Antisense strand to SEQ ID NO: 2493752
ucacaaacagaauagcagc

SEQ ID NO: 2493754 - RNA, 19 nt, Artificial Sequence
  Description of Artificial Sequence: Synthetic oligonucleotide
  Sense strand starting at position 2239 of SEQ ID NO: 1887747
ugcuauucuguuugugaug

SEQ ID NO: 2493755 - RNA, 19 nt, Artificial Sequence
  Description of Artificial Sequence: Synthetic oligonucleotide
  Antisense strand to SEQ ID NO: 2493754
caucacaaacagaauagca

SEQ ID NO: 2493756 - RNA, 19 nt, Artificial Sequence
  Description of Artificial Sequence: Synthetic oligonucleotide
  Sense strand starting at position 2241 of SEQ ID NO: 1887747
cuauucuguuugugaugcu

SEQ ID NO: 2493757 - RNA, 19 nt, Artificial Sequence
  Description of Artificial Sequence: Synthetic oligonucleotide
  Antisense strand to SEQ ID NO: 2493756
agcaucacaaacagaauag

SEQ ID NO: 2493758 - RNA, 19 nt, Artificial Sequence
  Description of Artificial Sequence: Synthetic oligonucleotide
  Sense strand starting at position 2242 of SEQ ID NO: 1887747
uauucuguuugugaugcua

SEQ ID NO: 2493759 - RNA, 19 nt, Artificial Sequence
  Description of Artificial Sequence: Synthetic oligonucleotide
  Antisense strand to SEQ ID NO: 2493758
uagcaucacaaacagaaua

SEQ ID NO: 2493760 - RNA, 19 nt, Artificial Sequence
  Description of Artificial Sequence: Synthetic oligonucleotide
  Sense strand starting at position 2259 of SEQ ID NO: 1887747
uagccuagggcucguaaga

SEQ ID NO: 2493761 - RNA, 19 nt, Artificial Sequence
  Description of Artificial Sequence: Synthetic oligonucleotide
  Antisense strand to SEQ ID NO: 2493760
ucuuacgagcccuaggcua

SEQ ID NO: 2493762 - RNA, 19 nt, Artificial Sequence
  Description of Artificial Sequence: Synthetic oligonucleotide
  Sense strand starting at position 2736 of SEQ ID NO: 1887747
acuguucuauuggcaaagu

SEQ ID NO: 2493763 - RNA, 19 nt, Artificial Sequence
  Description of Artificial Sequence: Synthetic oligonucleotide
  Antisense strand to SEQ ID NO: 2493762
acuuugccaauagaacagu

SEQ ID NO: 2493764 - RNA, 19 nt, Artificial Sequence
  Description of Artificial Sequence: Synthetic oligonucleotide
  Sense strand starting at position 2745 of SEQ ID NO: 1887747
uuggcaaagucauguaaac

SEQ ID NO: 2493765 - RNA, 19 nt, Artificial Sequence
  Description of Artificial Sequence: Synthetic oligonucleotide
  Antisense strand to SEQ ID NO: 2493764
guuuacaugacuuugccaa

SEQ ID NO: 2493766 - RNA, 19 nt, Artificial Sequence
  Description of Artificial Sequence: Synthetic oligonucleotide
  Sense strand starting at position 2747 of SEQ ID NO: 1887747
ggcaaagucauguaaacag

SEQ ID NO: 2493767 - RNA, 19 nt, Artificial Sequence
  Description of Artificial Sequence: Synthetic oligonucleotide
  Antisense strand to SEQ ID NO: 2493766
cuguuuacaugacuuugcc

SEQ ID NO: 2493768 - RNA, 19 nt, Artificial Sequence
  Description of Artificial Sequence: Synthetic oligonucleotide
  Sense strand starting at position 2779 of SEQ ID NO: 1887747
acaguaggugcauaauaau

SEQ ID NO: 2493769 - RNA, 19 nt, Artificial Sequence
  Description of Artificial Sequence: Synthetic oligonucleotide
  Antisense strand to SEQ ID NO: 2493768
auuauuaugcaccuacugu

SEQ ID NO: 2493770 - RNA, 19 nt, Artificial Sequence
  Description of Artificial Sequence: Synthetic oligonucleotide
  Sense strand starting at position 2797 of SEQ ID NO: 1887747
uuguuagcugcuuguuaau

SEQ ID NO: 2493771 - RNA, 19 nt, Artificial Sequence
  Description of Artificial Sequence: Synthetic oligonucleotide
  Antisense strand to SEQ ID NO: 2493770
auuaacaagcagcuaacaa

SEQ ID NO: 2493772 - RNA, 19 nt, Artificial Sequence
  Description of Artificial Sequence: Synthetic oligonucleotide
  Sense strand starting at position 2806 of SEQ ID NO: 1887747
gcuuguuaauuguucucau

SEQ ID NO: 2493773 - RNA, 19 nt, Artificial Sequence
  Description of Artificial Sequence: Synthetic oligonucleotide
  Antisense strand to SEQ ID NO: 2493772
augagaacaauuaacaagc

SEQ ID NO: 2493774 - RNA, 19 nt, Artificial Sequence
  Description of Artificial Sequence: Synthetic oligonucleotide
  Sense strand starting at position 2810 of SEQ ID NO: 1887747
guuaauuguucucaucuuc

SEQ ID NO: 2493775 - RNA, 19 nt, Artificial Sequence
  Description of Artificial Sequence: Synthetic oligonucleotide
  Antisense strand to SEQ ID NO: 2493774
gaagaugagaacaauuaac

SEQ ID NO: 2493776 - RNA, 19 nt, Artificial Sequence
  Description of Artificial Sequence: Synthetic oligonucleotide
  Sense strand starting at position 3236 of SEQ ID NO: 1887747
ccaacucccucaggguaaa

SEQ ID NO: 2493777 - RNA, 19 nt, Artificial Sequence
  Description of Artificial Sequence: Synthetic oligonucleotide
  Antisense strand to SEQ ID NO: 2493776
uuuacccugagggaguugg

SEQ ID NO: 2493778 - RNA, 19 nt, Artificial Sequence
  Description of Artificial Sequence: Synthetic oligonucleotide
  Sense strand starting at position 3412 of SEQ ID NO: 1887747
gugccugcuuccucuagau

SEQ ID NO: 2493779 - RNA, 19 nt, Artificial Sequence
  Description of Artificial Sequence: Synthetic oligonucleotide
  Antisense strand to SEQ ID NO: 2493778
aucuagaggaagcaggcac

SEQ ID NO: 2493780 - RNA, 19 nt, Artificial Sequence
  Description of Artificial Sequence: Synthetic oligonucleotide
  Sense strand starting at position 3414 of SEQ ID NO: 1887747
gccugcuuccucuagauaa

SEQ ID NO: 2493781 - RNA, 19 nt, Artificial Sequence
  Description of Artificial Sequence: Synthetic oligonucleotide
  Antisense strand to SEQ ID NO: 2493780
uuaucuagaggaagcaggc

SEQ ID NO: 2493782 - RNA, 19 nt, Artificial Sequence
  Description of Artificial Sequence: Synthetic oligonucleotide
  Sense strand starting at position 3691 of SEQ ID NO: 1887747
gcaggugcuccaggaacau

SEQ ID NO: 2493783 - RNA, 19 nt, Artificial Sequence
  Description of Artificial Sequence: Synthetic oligonucleotide
  Antisense strand to SEQ ID NO: 2493782
auguuccuggagcaccugc

SEQ ID NO: 2493784 - RNA, 19 nt, Artificial Sequence
  Description of Artificial Sequence: Synthetic oligonucleotide
  Sense strand starting at position 3910 of SEQ ID NO: 1887747
aagacaucgccaggacaca

SEQ ID NO: 2493785 - RNA, 19 nt, Artificial Sequence
  Description of Artificial Sequence: Synthetic oligonucleotide
  Antisense strand to SEQ ID NO: 2493784
uguguccuggcgaugucuu

SEQ ID NO: 2493786 - RNA, 19 nt, Artificial Sequence
  Description of Artificial Sequence: Synthetic oligonucleotide
  Sense strand starting at position 3944 of SEQ ID NO: 1887747
cacagugagugcugggaaa

SEQ ID NO: 2493787 - RNA, 19 nt, Artificial Sequence
  Description of Artificial Sequence: Synthetic oligonucleotide
  Antisense strand to SEQ ID NO: 2493786
uuucccagcacucacugug

SEQ ID NO: 2493788 - RNA, 19 nt, Artificial Sequence
  Description of Artificial Sequence: Synthetic oligonucleotide
  Sense strand starting at position 3946 of SEQ ID NO: 1887747
cagugagugcugggaaaug

SEQ ID NO: 2493789 - RNA, 19 nt, Artificial Sequence
  Description of Artificial Sequence: Synthetic oligonucleotide
  Antisense strand to SEQ ID NO: 2493788
cauuucccagcacucacug

SEQ ID NO: 2493790 - RNA, 19 nt, Artificial Sequence
  Description of Artificial Sequence: Synthetic oligonucleotide
  Sense strand starting at position 3957 of SEQ ID NO: 1887747
gggaaaugguaucugacuc

SEQ ID NO: 2493791 - RNA, 19 nt, Artificial Sequence
  Description of Artificial Sequence: Synthetic oligonucleotide
  Antisense strand to SEQ ID NO: 2493790
gagucagauaccauuuccc

SEQ ID NO: 2493792 - RNA, 19 nt, Artificial Sequence
  Description of Artificial Sequence: Synthetic oligonucleotide
  Sense strand starting at position 3958 of SEQ ID NO: 1887747
ggaaaugguaucugacucu

SEQ ID NO: 2493793 - RNA, 19 nt, Artificial Sequence
  Description of Artificial Sequence: Synthetic oligonucleotide
  Antisense strand to SEQ ID NO: 2493792
agagucagauaccauuucc

SEQ ID NO: 2493794 - RNA, 19 nt, Artificial Sequence
  Description of Artificial Sequence: Synthetic oligonucleotide
  Sense strand starting at position 3965 of SEQ ID NO: 1887747
guaucugacucuugugaug

SEQ ID NO: 2493795 - RNA, 19 nt, Artificial Sequence
  Description of Artificial Sequence: Synthetic oligonucleotide
  Antisense strand to SEQ ID NO: 2493794
caucacaagagucagauac

SEQ ID NO: 2493796 - RNA, 19 nt, Artificial Sequence
  Description of Artificial Sequence: Synthetic oligonucleotide
  Sense strand starting at position 3967 of SEQ ID NO: 1887747
aucugacucuugugauggu

SEQ ID NO: 2493797 - RNA, 19 nt, Artificial Sequence
  Description of Artificial Sequence: Synthetic oligonucleotide
  Antisense strand to SEQ ID NO: 2493796
accaucacaagagucagau

SEQ ID NO: 2493798 - RNA, 19 nt, Artificial Sequence
  Description of Artificial Sequence: Synthetic oligonucleotide
  Sense strand starting at position 36 of SEQ ID NO: 1887748
aagcgauucucuugggacu

SEQ ID NO: 2493799 - RNA, 19 nt, Artificial Sequence
  Description of Artificial Sequence: Synthetic oligonucleotide
  Antisense strand to SEQ ID NO: 2493798
agucccaagagaaucgcuu

SEQ ID NO: 2493800 - RNA, 19 nt, Artificial Sequence
  Description of Artificial Sequence: Synthetic oligonucleotide
  Sense strand starting at position 37 of SEQ ID NO: 1887748
agcgauucucuugggacua

SEQ ID NO: 2493801 - RNA, 19 nt, Artificial Sequence
  Description of Artificial Sequence: Synthetic oligonucleotide
  Antisense strand to SEQ ID NO: 2493800
uagucccaagagaaucgcu

SEQ ID NO: 2493802 - RNA, 19 nt, Artificial Sequence
  Description of Artificial Sequence: Synthetic oligonucleotide
  Sense strand starting at position 38 of SEQ ID NO: 1887748
gcgauucucuugggacuac

SEQ ID NO: 2493803 - RNA, 19 nt, Artificial Sequence
  Description of Artificial Sequence: Synthetic oligonucleotide
  Antisense strand to SEQ ID NO: 2493802
guagucccaagagaaucgc

SEQ ID NO: 2493804 - RNA, 19 nt, Artificial Sequence
  Description of Artificial Sequence: Synthetic oligonucleotide
  Sense strand starting at position 39 of SEQ ID NO: 1887748
cgauucucuugggacuaca

SEQ ID NO: 2493805 - RNA, 19 nt, Artificial Sequence
  Description of Artificial Sequence: Synthetic oligonucleotide
  Antisense strand to SEQ ID NO: 2493804
uguagucccaagagaaucg

SEQ ID NO: 2493806 - RNA, 19 nt, Artificial Sequence
  Description of Artificial Sequence: Synthetic oligonucleotide
  Sense strand starting at position 339 of SEQ ID NO: 1887748
ggagcugucucuuacuauc

SEQ ID NO: 2493807 - RNA, 19 nt, Artificial Sequence
  Description of Artificial Sequence: Synthetic oligonucleotide
  Antisense strand to SEQ ID NO: 2493806
gauaguaagagacagcucc

SEQ ID NO: 2493808 - RNA, 19 nt, Artificial Sequence
  Description of Artificial Sequence: Synthetic oligonucleotide
  Sense strand starting at position 372 of SEQ ID NO: 1887748
ccucaaugacacuguuagu

SEQ ID NO: 2493809 - RNA, 19 nt, Artificial Sequence
  Description of Artificial Sequence: Synthetic oligonucleotide
  Antisense strand to SEQ ID NO: 2493808
acuaacagugucauugagg

SEQ ID NO: 2493810 - RNA, 19 nt, Artificial Sequence
  Description of Artificial Sequence: Synthetic oligonucleotide
  Sense strand starting at position 386 of SEQ ID NO: 1887748
uuaguuuagcacugccauu

SEQ ID NO: 2493811 - RNA, 19 nt, Artificial Sequence
  Description of Artificial Sequence: Synthetic oligonucleotide
  Antisense strand to SEQ ID NO: 2493810
aauggcagugcuaaacuaa

SEQ ID NO: 2493812 - RNA, 19 nt, Artificial Sequence
  Description of Artificial Sequence: Synthetic oligonucleotide
  Sense strand starting at position 400 of SEQ ID NO: 1887748
ccauuauaaucaggaggga

SEQ ID NO: 2493813 - RNA, 19 nt, Artificial Sequence
  Description of Artificial Sequence: Synthetic oligonucleotide
  Antisense strand to SEQ ID NO: 2493812
ucccuccugauuauaaugg

SEQ ID NO: 2493814 - RNA, 19 nt, Artificial Sequence
  Description of Artificial Sequence: Synthetic oligonucleotide
  Sense strand starting at position 900 of SEQ ID NO: 1887748
auagaugacuguugacuca

SEQ ID NO: 2493815 - RNA, 19 nt, Artificial Sequence
  Description of Artificial Sequence: Synthetic oligonucleotide
  Antisense strand to SEQ ID NO: 2493814
ugagucaacagucaucuau

SEQ ID NO: 2493816 - RNA, 19 nt, Artificial Sequence
  Description of Artificial Sequence: Synthetic oligonucleotide
  Sense strand starting at position 1312 of SEQ ID NO: 1887748
cuuugagccucuugcaagu

SEQ ID NO: 2493817 - RNA, 19 nt, Artificial Sequence
  Description of Artificial Sequence: Synthetic oligonucleotide
  Antisense strand to SEQ ID NO: 2493816
acuugcaagaggcucaaag

SEQ ID NO: 2493818 - RNA, 19 nt, Artificial Sequence
  Description of Artificial Sequence: Synthetic oligonucleotide
  Sense strand starting at position 1328 of SEQ ID NO: 1887748
agucaagcugauugcaaga

SEQ ID NO: 2493819 - RNA, 19 nt, Artificial Sequence
  Description of Artificial Sequence: Synthetic oligonucleotide
  Antisense strand to SEQ ID NO: 2493818
ucuugcaaucagcuugacu

SEQ ID NO: 2493820 - RNA, 19 nt, Artificial Sequence
  Description of Artificial Sequence: Synthetic oligonucleotide
  Sense strand starting at position 1386 of SEQ ID NO: 1887748
ugguuucaguggcagagau

SEQ ID NO: 2493821 - RNA, 19 nt, Artificial Sequence
  Description of Artificial Sequence: Synthetic oligonucleotide
  Antisense strand to SEQ ID NO: 2493820
aucucugccacugaaacca

SEQ ID NO: 2493822 - RNA, 19 nt, Artificial Sequence
  Description of Artificial Sequence: Synthetic oligonucleotide
  Sense strand starting at position 1388 of SEQ ID NO: 1887748
guuucaguggcagagauga

SEQ ID NO: 2493823 - RNA, 19 nt, Artificial Sequence
  Description of Artificial Sequence: Synthetic oligonucleotide
  Antisense strand to SEQ ID NO: 2493822
ucaucucugccacugaaac

SEQ ID NO: 2493824 - RNA, 19 nt, Artificial Sequence
  Description of Artificial Sequence: Synthetic oligonucleotide
  Sense strand starting at position 1403 of SEQ ID NO: 1887748
augacaaauuguugcccaa

SEQ ID NO: 2493825 - RNA, 19 nt, Artificial Sequence
  Description of Artificial Sequence: Synthetic oligonucleotide
  Antisense strand to SEQ ID NO: 2493824
uugggcaacaauuugucau

SEQ ID NO: 2493826 - RNA, 19 nt, Artificial Sequence
  Description of Artificial Sequence: Synthetic oligonucleotide
  Sense strand starting at position 1459 of SEQ ID NO: 1887748
ucugauuaugcuggguuua

SEQ ID NO: 2493827 - RNA, 19 nt, Artificial Sequence
  Description of Artificial Sequence: Synthetic oligonucleotide
  Antisense strand to SEQ ID NO: 2493826
uaaacccagcauaaucaga

SEQ ID NO: 2493828 - RNA, 19 nt, Artificial Sequence
  Description of Artificial Sequence: Synthetic oligonucleotide
  Sense strand starting at position 1464 of SEQ ID NO: 1887748
uuaugcuggguuuagcaua

SEQ ID NO: 2493829 - RNA, 19 nt, Artificial Sequence
  Description of Artificial Sequence: Synthetic oligonucleotide
  Antisense strand to SEQ ID NO: 2493828
uaugcuaaacccagcauaa

SEQ ID NO: 2493830 - RNA, 19 nt, Artificial Sequence
  Description of Artificial Sequence: Synthetic oligonucleotide
  Sense strand starting at position 1472 of SEQ ID NO: 1887748
gguuuagcauagccaucua

SEQ ID NO: 2493831 - RNA, 19 nt, Artificial Sequence
  Description of Artificial Sequence: Synthetic oligonucleotide
  Antisense strand to SEQ ID NO: 2493830
uagauggcuaugcuaaacc

SEQ ID NO: 2493832 - RNA, 19 nt, Artificial Sequence
  Description of Artificial Sequence: Synthetic oligonucleotide
  Sense strand starting at position 1618 of SEQ ID NO: 1887748
agucuuaccugaugacauu

SEQ ID NO: 2493833 - RNA, 19 nt, Artificial Sequence
  Description of Artificial Sequence: Synthetic oligonucleotide
  Antisense strand to SEQ ID NO: 2493832
aaugucaucagguaagacu

SEQ ID NO: 2493834 - RNA, 19 nt, Artificial Sequence
  Description of Artificial Sequence: Synthetic oligonucleotide
  Sense strand starting at position 1675 of SEQ ID NO: 1887748
acgauauauucugccuggu

SEQ ID NO: 2493835 - RNA, 19 nt, Artificial Sequence
  Description of Artificial Sequence: Synthetic oligonucleotide
  Antisense strand to SEQ ID NO: 2493834
accaggcagaauauaucgu

SEQ ID NO: 2493836 - RNA, 19 nt, Artificial Sequence
  Description of Artificial Sequence: Synthetic oligonucleotide
  Sense strand starting at position 1684 of SEQ ID NO: 1887748
ucugccugguccuuaagaa

SEQ ID NO: 2493837 - RNA, 19 nt, Artificial Sequence
  Description of Artificial Sequence: Synthetic oligonucleotide
  Antisense strand to SEQ ID NO: 2493836
uucuuaaggaccaggcaga

SEQ ID NO: 2493838 - RNA, 19 nt, Artificial Sequence
  Description of Artificial Sequence: Synthetic oligonucleotide
  Sense strand starting at position 1685 of SEQ ID NO: 1887748
cugccugguccuuaagaag

SEQ ID NO: 2493839 - RNA, 19 nt, Artificial Sequence
  Description of Artificial Sequence: Synthetic oligonucleotide
  Antisense strand to SEQ ID NO: 2493838
cuucuuaaggaccaggcag

SEQ ID NO: 2493840 - RNA, 19 nt, Artificial Sequence
  Description of Artificial Sequence: Synthetic oligonucleotide
  Sense strand starting at position 1914 of SEQ ID NO: 1887748
cacggacgugcgugacauu

SEQ ID NO: 2493841 - RNA, 19 nt, Artificial Sequence
  Description of Artificial Sequence: Synthetic oligonucleotide
  Antisense strand to SEQ ID NO: 2493840
aaugucacgcacguccgug

SEQ ID NO: 2493842 - RNA, 19 nt, Artificial Sequence
  Description of Artificial Sequence: Synthetic oligonucleotide
  Sense strand starting at position 1991 of SEQ ID NO: 1887748
cucuuugcaccgugagaag

SEQ ID NO: 2493843 - RNA, 19 nt, Artificial Sequence
  Description of Artificial Sequence: Synthetic oligonucleotide
  Antisense strand to SEQ ID NO: 2493842
cuucucacggugcaaagag

SEQ ID NO: 2493844 - RNA, 19 nt, Artificial Sequence
  Description of Artificial Sequence: Synthetic oligonucleotide
  Sense strand starting at position 2705 of SEQ ID NO: 1887748
gucugagguaccugauauc

SEQ ID NO: 2493845 - RNA, 19 nt, Artificial Sequence
  Description of Artificial Sequence: Synthetic oligonucleotide
  Antisense strand to SEQ ID NO: 2493844
gauaucagguaccucagac

SEQ ID NO: 2493846 - RNA, 19 nt, Artificial Sequence
  Description of Artificial Sequence: Synthetic oligonucleotide
  Sense strand starting at position 2714 of SEQ ID NO: 1887748
accugauauccaggcauuc

SEQ ID NO: 2493847 - RNA, 19 nt, Artificial Sequence
  Description of Artificial Sequence: Synthetic oligonucleotide
  Antisense strand to SEQ ID NO: 2493846
gaaugccuggauaucaggu

SEQ ID NO: 2493848 - RNA, 19 nt, Artificial Sequence
  Description of Artificial Sequence: Synthetic oligonucleotide
  Sense strand starting at position 2758 of SEQ ID NO: 1887748
cucuguuccuaaugcgacu

SEQ ID NO: 2493849 - RNA, 19 nt, Artificial Sequence
  Description of Artificial Sequence: Synthetic oligonucleotide
  Antisense strand to SEQ ID NO: 2493848
agucgcauuaggaacagag

SEQ ID NO: 2493850 - RNA, 19 nt, Artificial Sequence
  Description of Artificial Sequence: Synthetic oligonucleotide
  Sense strand starting at position 2767 of SEQ ID NO: 1887748
uaaugcgacuugucccaaa

SEQ ID NO: 2493851 - RNA, 19 nt, Artificial Sequence
  Description of Artificial Sequence: Synthetic oligonucleotide
  Antisense strand to SEQ ID NO: 2493850
uuugggacaagucgcauua

SEQ ID NO: 2493852 - RNA, 19 nt, Artificial Sequence
  Description of Artificial Sequence: Synthetic oligonucleotide
  Sense strand starting at position 3054 of SEQ ID NO: 1887748
gcaauuuccucugaaagag

SEQ ID NO: 2493853 - RNA, 19 nt, Artificial Sequence
  Description of Artificial Sequence: Synthetic oligonucleotide
  Antisense strand to SEQ ID NO: 2493852
cucuuucagaggaaauugc

SEQ ID NO: 2493854 - RNA, 19 nt, Artificial Sequence
  Description of Artificial Sequence: Synthetic oligonucleotide
  Sense strand starting at position 3409 of SEQ ID NO: 1887748
uugccuccauugugagaga

SEQ ID NO: 2493855 - RNA, 19 nt, Artificial Sequence
  Description of Artificial Sequence: Synthetic oligonucleotide
  Antisense strand to SEQ ID NO: 2493854
ucucucacaauggaggcaa

SEQ ID NO: 2493856 - RNA, 19 nt, Artificial Sequence
  Description of Artificial Sequence: Synthetic oligonucleotide
  Sense strand starting at position 3410 of SEQ ID NO: 1887748
ugccuccauugugagagaa

SEQ ID NO: 2493857 - RNA, 19 nt, Artificial Sequence
  Description of Artificial Sequence: Synthetic oligonucleotide
  Antisense strand to SEQ ID NO: 2493856
uucucucacaauggaggca

SEQ ID NO: 2493858 - RNA, 19 nt, Artificial Sequence
  Description of Artificial Sequence: Synthetic oligonucleotide
  Sense strand starting at position 3412 of SEQ ID NO: 1887748
ccuccauugugagagaaac

SEQ ID NO: 2493859 - RNA, 19 nt, Artificial Sequence
  Description of Artificial Sequence: Synthetic oligonucleotide
  Antisense strand to SEQ ID NO: 2493858
guuucucucacaauggagg

SEQ ID NO: 2493860 - RNA, 19 nt, Artificial Sequence
  Description of Artificial Sequence: Synthetic oligonucleotide
  Sense strand starting at position 3473 of SEQ ID NO: 1887748
gccgcaguggucuagcauu

SEQ ID NO: 2493861 - RNA, 19 nt, Artificial Sequence
  Description of Artificial Sequence: Synthetic oligonucleotide
  Antisense strand to SEQ ID NO: 2493860
aaugcuagaccacugcggc

SEQ ID NO: 2493862 - RNA, 19 nt, Artificial Sequence
  Description of Artificial Sequence: Synthetic oligonucleotide
  Sense strand starting at position 893 of SEQ ID NO: 1887749
aggcgagaacccugggaua

SEQ ID NO: 2493863 - RNA, 19 nt, Artificial Sequence
  Description of Artificial Sequence: Synthetic oligonucleotide
  Antisense strand to SEQ ID NO: 2493862
uaucccaggguucucgccu

SEQ ID NO: 2493864 - RNA, 19 nt, Artificial Sequence
  Description of Artificial Sequence: Synthetic oligonucleotide
  Sense strand starting at position 895 of SEQ ID NO: 1887749
gcgagaacccugggauaca

SEQ ID NO: 2493865 - RNA, 19 nt, Artificial Sequence
  Description of Artificial Sequence: Synthetic oligonucleotide
  Antisense strand to SEQ ID NO: 2493864
uguaucccaggguucucgc

SEQ ID NO: 2493866 - RNA, 19 nt, Artificial Sequence
  Description of Artificial Sequence: Synthetic oligonucleotide
  Sense strand starting at position 912 of SEQ ID NO: 1887749
cagagagccgucuguccuu

SEQ ID NO: 2493867 - RNA, 19 nt, Artificial Sequence
  Description of Artificial Sequence: Synthetic oligonucleotide
  Antisense strand to SEQ ID NO: 2493866
aaggacagacggcucucug

SEQ ID NO: 2493868 - RNA, 19 nt, Artificial Sequence
  Description of Artificial Sequence: Synthetic oligonucleotide
  Sense strand starting at position 945 of SEQ ID NO: 1887749
gucuaauggagcugauaca

SEQ ID NO: 2493869 - RNA, 19 nt, Artificial Sequence
  Description of Artificial Sequence: Synthetic oligonucleotide
  Antisense strand to SEQ ID NO: 2493868
uguaucagcuccauuagac

SEQ ID NO: 2493870 - RNA, 19 nt, Artificial Sequence
  Description of Artificial Sequence: Synthetic oligonucleotide
  Sense strand starting at position 963 of SEQ ID NO: 1887749
acacaaguugccuauggaa

SEQ ID NO: 2493871 - RNA, 19 nt, Artificial Sequence
  Description of Artificial Sequence: Synthetic oligonucleotide
  Antisense strand to SEQ ID NO: 2493870
uuccauaggcaacuugugu

SEQ ID NO: 2493872 - RNA, 19 nt, Artificial Sequence
  Description of Artificial Sequence: Synthetic oligonucleotide
  Sense strand starting at position 1022 of SEQ ID NO: 1887749
gggcuucagcgguugucau

SEQ ID NO: 2493873 - RNA, 19 nt, Artificial Sequence
  Description of Artificial Sequence: Synthetic oligonucleotide
  Antisense strand to SEQ ID NO: 2493872
augacaaccgcugaagccc

SEQ ID NO: 2493874 - RNA, 19 nt, Artificial Sequence
  Description of Artificial Sequence: Synthetic oligonucleotide
  Sense strand starting at position 1115 of SEQ ID NO: 1887749
uuugguugcaugcauaagu

SEQ ID NO: 2493875 - RNA, 19 nt, Artificial Sequence
  Description of Artificial Sequence: Synthetic oligonucleotide
  Antisense strand to SEQ ID NO: 2493874
acuuaugcaugcaaccaaa

SEQ ID NO: 2493876 - RNA, 19 nt, Artificial Sequence
  Description of Artificial Sequence: Synthetic oligonucleotide
  Sense strand starting at position 1414 of SEQ ID NO: 1887749
ugaaguauuccauggugug

SEQ ID NO: 2493877 - RNA, 19 nt, Artificial Sequence
  Description of Artificial Sequence: Synthetic oligonucleotide
  Antisense strand to SEQ ID NO: 2493876
cacaccauggaauacuuca

SEQ ID NO: 2493878 - RNA, 19 nt, Artificial Sequence
  Description of Artificial Sequence: Synthetic oligonucleotide
  Sense strand starting at position 1595 of SEQ ID NO: 1887749
ucaguauaaucaucaagug

SEQ ID NO: 2493879 - RNA, 19 nt, Artificial Sequence
  Description of Artificial Sequence: Synthetic oligonucleotide
  Antisense strand to SEQ ID NO: 2493878
cacuugaugauuauacuga

SEQ ID NO: 2493880 - RNA, 19 nt, Artificial Sequence
  Description of Artificial Sequence: Synthetic oligonucleotide
  Sense strand starting at position 1622 of SEQ ID NO: 1887749
gucuguucggccaguguua

SEQ ID NO: 2493881 - RNA, 19 nt, Artificial Sequence
  Description of Artificial Sequence: Synthetic oligonucleotide
  Antisense strand to SEQ ID NO: 2493880
uaacacuggccgaacagac

SEQ ID NO: 2493882 - RNA, 19 nt, Artificial Sequence
  Description of Artificial Sequence: Synthetic oligonucleotide
  Sense strand starting at position 1629 of SEQ ID NO: 1887749
cggccaguguuacuuuaau

SEQ ID NO: 2493883 - RNA, 19 nt, Artificial Sequence
  Description of Artificial Sequence: Synthetic oligonucleotide
  Antisense strand to SEQ ID NO: 2493882
auuaaaguaacacuggccg

SEQ ID NO: 2493884 - RNA, 19 nt, Artificial Sequence
  Description of Artificial Sequence: Synthetic oligonucleotide
  Sense strand starting at position 1635 of SEQ ID NO: 1887749
guguuacuuuaauccauua

SEQ ID NO: 2493885 - RNA, 19 nt, Artificial Sequence
  Description of Artificial Sequence: Synthetic oligonucleotide
  Antisense strand to SEQ ID NO: 2493884
uaauggauuaaaguaacac

SEQ ID NO: 2493886 - RNA, 19 nt, Artificial Sequence
  Description of Artificial Sequence: Synthetic oligonucleotide
  Sense strand starting at position 1669 of SEQ ID NO: 1887749
ggagauguuuaucacagag

SEQ ID NO: 2493887 - RNA, 19 nt, Artificial Sequence
  Description of Artificial Sequence: Synthetic oligonucleotide
  Antisense strand to SEQ ID NO: 2493886
cucugugauaaacaucucc

SEQ ID NO: 2493888 - RNA, 19 nt, Artificial Sequence
  Description of Artificial Sequence: Synthetic oligonucleotide
  Sense strand starting at position 1671 of SEQ ID NO: 1887749
agauguuuaucacagagau

SEQ ID NO: 2493889 - RNA, 19 nt, Artificial Sequence
  Description of Artificial Sequence: Synthetic oligonucleotide
  Antisense strand to SEQ ID NO: 2493888
aucucugugauaaacaucu

SEQ ID NO: 2493890 - RNA, 19 nt, Artificial Sequence
  Description of Artificial Sequence: Synthetic oligonucleotide
  Sense strand starting at position 1751 of SEQ ID NO: 1887749
accgcaguuugguccugau

SEQ ID NO: 2493891 - RNA, 19 nt, Artificial Sequence
  Description of Artificial Sequence: Synthetic oligonucleotide
  Antisense strand to SEQ ID NO: 2493890
aucaggaccaaacugcggu

SEQ ID NO: 2493892 - RNA, 19 nt, Artificial Sequence
  Description of Artificial Sequence: Synthetic oligonucleotide
  Sense strand starting at position 1772 of SEQ ID NO: 1887749
ggcacaagauaugcuuuau

SEQ ID NO: 2493893 - RNA, 19 nt, Artificial Sequence
  Description of Artificial Sequence: Synthetic oligonucleotide
  Antisense strand to SEQ ID NO: 2493892
auaaagcauaucuugugcc

SEQ ID NO: 2493894 - RNA, 19 nt, Artificial Sequence
  Description of Artificial Sequence: Synthetic oligonucleotide
  Sense strand starting at position 1783 of SEQ ID NO: 1887749
ugcuuuauccacugaugug

SEQ ID NO: 2493895 - RNA, 19 nt, Artificial Sequence
  Description of Artificial Sequence: Synthetic oligonucleotide
  Antisense strand to SEQ ID NO: 2493894
cacaucaguggauaaagca

SEQ ID NO: 2493896 - RNA, 19 nt, Artificial Sequence
  Description of Artificial Sequence: Synthetic oligonucleotide
  Sense strand starting at position 1797 of SEQ ID NO: 1887749
augugaaaugcccaggugu

SEQ ID NO: 2493897 - RNA, 19 nt, Artificial Sequence
  Description of Artificial Sequence: Synthetic oligonucleotide
  Antisense strand to SEQ ID NO: 2493896
acaccugggcauuucacau

SEQ ID NO: 2493898 - RNA, 19 nt, Artificial Sequence
  Description of Artificial Sequence: Synthetic oligonucleotide
  Sense strand starting at position 1799 of SEQ ID NO: 1887749
gugaaaugcccagguguuu

SEQ ID NO: 2493899 - RNA, 19 nt, Artificial Sequence
  Description of Artificial Sequence: Synthetic oligonucleotide
  Antisense strand to SEQ ID NO: 2493898
aaacaccugggcauuucac

SEQ ID NO: 2493900 - RNA, 19 nt, Artificial Sequence
  Description of Artificial Sequence: Synthetic oligonucleotide
  Sense strand starting at position 2734 of SEQ ID NO: 1887749
ggagcuuccugagggagau

SEQ ID NO: 2493901 - RNA, 19 nt, Artificial Sequence
  Description of Artificial Sequence: Synthetic oligonucleotide
  Antisense strand to SEQ ID NO: 2493900
aucucccucaggaagcucc

SEQ ID NO: 2493902 - RNA, 19 nt, Artificial Sequence
  Description of Artificial Sequence: Synthetic oligonucleotide
  Sense strand starting at position 2735 of SEQ ID NO: 1887749
gagcuuccugagggagauu

SEQ ID NO: 2493903 - RNA, 19 nt, Artificial Sequence
  Description of Artificial Sequence: Synthetic oligonucleotide
  Antisense strand to SEQ ID NO: 2493902
aaucucccucaggaagcuc

SEQ ID NO: 2493904 - RNA, 19 nt, Artificial Sequence
  Description of Artificial Sequence: Synthetic oligonucleotide
  Sense strand starting at position 2787 of SEQ ID NO: 1887749
uugggaucucugugaaccu

SEQ ID NO: 2493905 - RNA, 19 nt, Artificial Sequence
  Description of Artificial Sequence: Synthetic oligonucleotide
  Antisense strand to SEQ ID NO: 2493904
agguucacagagaucccaa

SEQ ID NO: 2493906 - RNA, 19 nt, Artificial Sequence
  Description of Artificial Sequence: Synthetic oligonucleotide
  Sense strand starting at position 2831 of SEQ ID NO: 1887749
caaguugugaggugggauu

SEQ ID NO: 2493907 - RNA, 19 nt, Artificial Sequence
  Description of Artificial Sequence: Synthetic oligonucleotide
  Antisense strand to SEQ ID NO: 2493906
aaucccaccucacaacuug

SEQ ID NO: 2493908 - RNA, 19 nt, Artificial Sequence
  Description of Artificial Sequence: Synthetic oligonucleotide
  Sense strand starting at position 2843 of SEQ ID NO: 1887749
ugggauuccuuccaggcua

SEQ ID NO: 2493909 - RNA, 19 nt, Artificial Sequence
  Description of Artificial Sequence: Synthetic oligonucleotide
  Antisense strand to SEQ ID NO: 2493908
uagccuggaaggaauccca

SEQ ID NO: 2493910 - RNA, 19 nt, Artificial Sequence
  Description of Artificial Sequence: Synthetic oligonucleotide
  Sense strand starting at position 2845 of SEQ ID NO: 1887749
ggauuccuuccaggcuaca

SEQ ID NO: 2493911 - RNA, 19 nt, Artificial Sequence
  Description of Artificial Sequence: Synthetic oligonucleotide
  Antisense strand to SEQ ID NO: 2493910
uguagccuggaaggaaucc

SEQ ID NO: 2493912 - RNA, 19 nt, Artificial Sequence
  Description of Artificial Sequence: Synthetic oligonucleotide
  Sense strand starting at position 2904 of SEQ ID NO: 1887749
gagguuugcggguggaagu

SEQ ID NO: 2493913 - RNA, 19 nt, Artificial Sequence
  Description of Artificial Sequence: Synthetic oligonucleotide
  Antisense strand to SEQ ID NO: 2493912
acuuccacccgcaaaccuc

SEQ ID NO: 2493914 - RNA, 19 nt, Artificial Sequence
  Description of Artificial Sequence: Synthetic oligonucleotide
  Sense strand starting at position 2914 of SEQ ID NO: 1887749
gguggaagucauggcaucu

SEQ ID NO: 2493915 - RNA, 19 nt, Artificial Sequence
  Description of Artificial Sequence: Synthetic oligonucleotide
  Antisense strand to SEQ ID NO: 2493914
agaugccaugacuuccacc

SEQ ID NO: 2493916 - RNA, 19 nt, Artificial Sequence
  Description of Artificial Sequence: Synthetic oligonucleotide
  Sense strand starting at position 2969 of SEQ ID NO: 1887749
acaguuccuggauggagua

SEQ ID NO: 2493917 - RNA, 19 nt, Artificial Sequence
  Description of Artificial Sequence: Synthetic oligonucleotide
  Antisense strand to SEQ ID NO: 2493916
uacuccauccaggaacugu

SEQ ID NO: 2493918 - RNA, 19 nt, Artificial Sequence
  Description of Artificial Sequence: Synthetic oligonucleotide
  Sense strand starting at position 3163 of SEQ ID NO: 1887749
ugcgauuugccucaucugu

SEQ ID NO: 2493919 - RNA, 19 nt, Artificial Sequence
  Description of Artificial Sequence: Synthetic oligonucleotide
  Antisense strand to SEQ ID NO: 2493918
acagaugaggcaaaucgca

SEQ ID NO: 2493920 - RNA, 19 nt, Artificial Sequence
  Description of Artificial Sequence: Synthetic oligonucleotide
  Sense strand starting at position 3228 of SEQ ID NO: 1887749
gucuguccuguccaaguga

SEQ ID NO: 2493921 - RNA, 19 nt, Artificial Sequence
  Description of Artificial Sequence: Synthetic oligonucleotide
  Antisense strand to SEQ ID NO: 2493920
ucacuuggacaggacagac

SEQ ID NO: 2493922 - RNA, 19 nt, Artificial Sequence
  Description of Artificial Sequence: Synthetic oligonucleotide
  Sense strand starting at position 3371 of SEQ ID NO: 1887749
aggaaaguugcagguccau

SEQ ID NO: 2493923 - RNA, 19 nt, Artificial Sequence
  Description of Artificial Sequence: Synthetic oligonucleotide
  Antisense strand to SEQ ID NO: 2493922
auggaccugcaacuuuccu

SEQ ID NO: 2493924 - RNA, 19 nt, Artificial Sequence
  Description of Artificial Sequence: Synthetic oligonucleotide
  Sense strand starting at position 3424 of SEQ ID NO: 1887749
cucacaucgggcugugaaa

SEQ ID NO: 2493925 - RNA, 19 nt, Artificial Sequence
  Description of Artificial Sequence: Synthetic oligonucleotide
  Antisense strand to SEQ ID NO: 2493924
uuucacagcccgaugugag

SEQ ID NO: 2493926 - RNA, 19 nt, Artificial Sequence
  Description of Artificial Sequence: Synthetic oligonucleotide
  Sense strand starting at position 3426 of SEQ ID NO: 1887749
cacaucgggcugugaaauu

SEQ ID NO: 2493927 - RNA, 19 nt, Artificial Sequence
  Description of Artificial Sequence: Synthetic oligonucleotide
  Antisense strand to SEQ ID NO: 2493926
aauuucacagcccgaugug

SEQ ID NO: 2493928 - RNA, 19 nt, Artificial Sequence
  Description of Artificial Sequence: Synthetic oligonucleotide
  Sense strand starting at position 3536 of SEQ ID NO: 1887749
ccaguuuccuucuuagacu

SEQ ID NO: 2493929 - RNA, 19 nt, Artificial Sequence
  Description of Artificial Sequence: Synthetic oligonucleotide
  Antisense strand to SEQ ID NO: 2493928
agucuaagaaggaaacugg

SEQ ID NO: 2493930 - RNA, 19 nt, Artificial Sequence
  Description of Artificial Sequence: Synthetic oligonucleotide
  Sense strand starting at position 3722 of SEQ ID NO: 1887749
ugucuugagcucugauuug

SEQ ID NO: 2493931 - RNA, 19 nt, Artificial Sequence
  Description of Artificial Sequence: Synthetic oligonucleotide
  Antisense strand to SEQ ID NO: 2493930
caaaucagagcucaagaca

SEQ ID NO: 2493932 - RNA, 19 nt, Artificial Sequence
  Description of Artificial Sequence: Synthetic oligonucleotide
  Sense strand starting at position 3731 of SEQ ID NO: 1887749
cucugauuuggcgguggga

SEQ ID NO: 2493933 - RNA, 19 nt, Artificial Sequence
  Description of Artificial Sequence: Synthetic oligonucleotide
  Antisense strand to SEQ ID NO: 2493932
ucccaccgccaaaucagag

SEQ ID NO: 2493934 - RNA, 19 nt, Artificial Sequence
  Description of Artificial Sequence: Synthetic oligonucleotide
  Sense strand starting at position 3843 of SEQ ID NO: 1887749
uggagccuguugucaugaa

SEQ ID NO: 2493935 - RNA, 19 nt, Artificial Sequence
  Description of Artificial Sequence: Synthetic oligonucleotide
  Antisense strand to SEQ ID NO: 2493934
uucaugacaacaggcucca

SEQ ID NO: 2493936 - RNA, 19 nt, Artificial Sequence
  Description of Artificial Sequence: Synthetic oligonucleotide
  Sense strand starting at position 3904 of SEQ ID NO: 1887749
augggagggccucagucau

SEQ ID NO: 2493937 - RNA, 19 nt, Artificial Sequence
  Description of Artificial Sequence: Synthetic oligonucleotide
  Antisense strand to SEQ ID NO: 2493936
augacugaggcccucccau

SEQ ID NO: 2493938 - RNA, 19 nt, Artificial Sequence
  Description of Artificial Sequence: Synthetic oligonucleotide
  Sense strand starting at position 3908 of SEQ ID NO: 1887749
gagggccucagucauggua

SEQ ID NO: 2493939 - RNA, 19 nt, Artificial Sequence
  Description of Artificial Sequence: Synthetic oligonucleotide
  Antisense strand to SEQ ID NO: 2493938
uaccaugacugaggcccuc

SEQ ID NO: 2493940 - RNA, 19 nt, Artificial Sequence
  Description of Artificial Sequence: Synthetic oligonucleotide
  Sense strand starting at position 3911 of SEQ ID NO: 1887749
ggccucagucaugguacau

SEQ ID NO: 2493941 - RNA, 19 nt, Artificial Sequence
  Description of Artificial Sequence: Synthetic oligonucleotide
  Antisense strand to SEQ ID NO: 2493940
auguaccaugacugaggcc

SEQ ID NO: 2493942 - RNA, 19 nt, Artificial Sequence
  Description of Artificial Sequence: Synthetic oligonucleotide
  Sense strand starting at position 5 of SEQ ID NO: 1887750
aucuaaugagccuaguauc

SEQ ID NO: 2493943 - RNA, 19 nt, Artificial Sequence
  Description of Artificial Sequence: Synthetic oligonucleotide
  Antisense strand to SEQ ID NO: 2493942
gauacuaggcucauuagau

SEQ ID NO: 2493944 - RNA, 19 nt, Artificial Sequence
  Description of Artificial Sequence: Synthetic oligonucleotide
  Sense strand starting at position 195 of SEQ ID NO: 1887750
gauuaagauggcuguaauu

SEQ ID NO: 2493945 - RNA, 19 nt, Artificial Sequence
  Description of Artificial Sequence: Synthetic oligonucleotide
  Antisense strand to SEQ ID NO: 2493944
aauuacagccaucuuaauc

SEQ ID NO: 2493946 - RNA, 19 nt, Artificial Sequence
  Description of Artificial Sequence: Synthetic oligonucleotide
  Sense strand starting at position 197 of SEQ ID NO: 1887750
uuaagauggcuguaauuag

SEQ ID NO: 2493947 - RNA, 19 nt, Artificial Sequence
  Description of Artificial Sequence: Synthetic oligonucleotide
  Antisense strand to SEQ ID NO: 2493946
cuaauuacagccaucuuaa

SEQ ID NO: 2493948 - RNA, 19 nt, Artificial Sequence
  Description of Artificial Sequence: Synthetic oligonucleotide
  Sense strand starting at position 485 of SEQ ID NO: 1887750
cuguuaagacagugaguaa

SEQ ID NO: 2493949 - RNA, 19 nt, Artificial Sequence
  Description of Artificial Sequence: Synthetic oligonucleotide
  Antisense strand to SEQ ID NO: 2493948
uuacucacugucuuaacag

SEQ ID NO: 2493950 - RNA, 19 nt, Artificial Sequence
  Description of Artificial Sequence: Synthetic oligonucleotide
  Sense strand starting at position 488 of SEQ ID NO: 1887750
uuaagacagugaguaaguu

SEQ ID NO: 2493951 - RNA, 19 nt, Artificial Sequence
  Description of Artificial Sequence: Synthetic oligonucleotide
  Antisense strand to SEQ ID NO: 2493950
aacuuacucacugucuuaa

SEQ ID NO: 2493952 - RNA, 19 nt, Artificial Sequence
  Description of Artificial Sequence: Synthetic oligonucleotide
  Sense strand starting at position 600 of SEQ ID NO: 1887750
acuuuaugccaugauugga

SEQ ID NO: 2493953 - RNA, 19 nt, Artificial Sequence
  Description of Artificial Sequence: Synthetic oligonucleotide
  Antisense strand to SEQ ID NO: 2493952
uccaaucauggcauaaagu

SEQ ID NO: 2493954 - RNA, 19 nt, Artificial Sequence
  Description of Artificial Sequence: Synthetic oligonucleotide
  Sense strand starting at position 938 of SEQ ID NO: 1887750
cuuuccaugcaaugggaua

SEQ ID NO: 2493955 - RNA, 19 nt, Artificial Sequence
  Description of Artificial Sequence: Synthetic oligonucleotide
  Antisense strand to SEQ ID NO: 2493954
uaucccauugcauggaaag

SEQ ID NO: 2493956 - RNA, 19 nt, Artificial Sequence
  Description of Artificial Sequence: Synthetic oligonucleotide
  Sense strand starting at position 952 of SEQ ID NO: 1887750
ggauaucacucaguccaaa

SEQ ID NO: 2493957 - RNA, 19 nt, Artificial Sequence
  Description of Artificial Sequence: Synthetic oligonucleotide
  Antisense strand to SEQ ID NO: 2493956
uuuggacugagugauaucc

SEQ ID NO: 2493958 - RNA, 19 nt, Artificial Sequence
  Description of Artificial Sequence: Synthetic oligonucleotide
  Sense strand starting at position 1002 of SEQ ID NO: 1887750
caaggauuauccucguaaa

SEQ ID NO: 2493959 - RNA, 19 nt, Artificial Sequence
  Description of Artificial Sequence: Synthetic oligonucleotide
  Antisense strand to SEQ ID NO: 2493958
uuuacgaggauaauccuug

SEQ ID NO: 2493960 - RNA, 19 nt, Artificial Sequence
  Description of Artificial Sequence: Synthetic oligonucleotide
  Sense strand starting at position 1003 of SEQ ID NO: 1887750
aaggauuauccucguaaac

SEQ ID NO: 2493961 - RNA, 19 nt, Artificial Sequence
  Description of Artificial Sequence: Synthetic oligonucleotide
  Antisense strand to SEQ ID NO: 2493960
guuuacgaggauaauccuu

SEQ ID NO: 2493962 - RNA, 19 nt, Artificial Sequence
  Description of Artificial Sequence: Synthetic oligonucleotide
  Sense strand starting at position 1185 of SEQ ID NO: 1887750
uggaaauagguacacguua

SEQ ID NO: 2493963 - RNA, 19 nt, Artificial Sequence
  Description of Artificial Sequence: Synthetic oligonucleotide
  Antisense strand to SEQ ID NO: 2493962
uaacguguaccuauuucca

SEQ ID NO: 2493964 - RNA, 19 nt, Artificial Sequence
  Description of Artificial Sequence: Synthetic oligonucleotide
  Sense strand starting at position 1281 of SEQ ID NO: 1887750
cuagaugguggugaugauu

SEQ ID NO: 2493965 - RNA, 19 nt, Artificial Sequence
  Description of Artificial Sequence: Synthetic oligonucleotide
  Antisense strand to SEQ ID NO: 2493964
aaucaucaccaccaucuag

SEQ ID NO: 2493966 - RNA, 19 nt, Artificial Sequence
  Description of Artificial Sequence: Synthetic oligonucleotide
  Sense strand starting at position 1786 of SEQ ID NO: 1887750
aaacuaguugauggugaca

SEQ ID NO: 2493967 - RNA, 19 nt, Artificial Sequence
  Description of Artificial Sequence: Synthetic oligonucleotide
  Antisense strand to SEQ ID NO: 2493966
ugucaccaucaacuaguuu

SEQ ID NO: 2493968 - RNA, 19 nt, Artificial Sequence
  Description of Artificial Sequence: Synthetic oligonucleotide
  Sense strand starting at position 1889 of SEQ ID NO: 1887750
gucaaagaaugacccuuau

SEQ ID NO: 2493969 - RNA, 19 nt, Artificial Sequence
  Description of Artificial Sequence: Synthetic oligonucleotide
  Antisense strand to SEQ ID NO: 2493968
auaagggucauucuuugac

SEQ ID NO: 2493970 - RNA, 19 nt, Artificial Sequence
  Description of Artificial Sequence: Synthetic oligonucleotide
  Sense strand starting at position 1973 of SEQ ID NO: 1887750
gggcaucuugcauaaacuc

SEQ ID NO: 2493971 - RNA, 19 nt, Artificial Sequence
  Description of Artificial Sequence: Synthetic oligonucleotide
  Antisense strand to SEQ ID NO: 2493970
gaguuuaugcaagaugccc

SEQ ID NO: 2493972 - RNA, 19 nt, Artificial Sequence
  Description of Artificial Sequence: Synthetic oligonucleotide
  Sense strand starting at position 1993 of SEQ ID NO: 1887750
ggaacuggguucuucuauu

SEQ ID NO: 2493973 - RNA, 19 nt, Artificial Sequence
  Description of Artificial Sequence: Synthetic oligonucleotide
  Antisense strand to SEQ ID NO: 2493972
aauagaagaacccaguucc

SEQ ID NO: 2493974 - RNA, 19 nt, Artificial Sequence
  Description of Artificial Sequence: Synthetic oligonucleotide
  Sense strand starting at position 2048 of SEQ ID NO: 1887750
ccuugauucuggcuuaaga

SEQ ID NO: 2493975 - RNA, 19 nt, Artificial Sequence
  Description of Artificial Sequence: Synthetic oligonucleotide
  Antisense strand to SEQ ID NO: 2493974
ucuuaagccagaaucaagg

SEQ ID NO: 2493976 - RNA, 19 nt, Artificial Sequence
  Description of Artificial Sequence: Synthetic oligonucleotide
  Sense strand starting at position 2190 of SEQ ID NO: 1887750
gaacaacuuguccaaacgu

SEQ ID NO: 2493977 - RNA, 19 nt, Artificial Sequence
  Description of Artificial Sequence: Synthetic oligonucleotide
  Antisense strand to SEQ ID NO: 2493976
acguuuggacaaguuguuc

SEQ ID NO: 2493978 - RNA, 19 nt, Artificial Sequence
  Description of Artificial Sequence: Synthetic oligonucleotide
  Sense strand starting at position 2238 of SEQ ID NO: 1887750
uguaauuauguugauugca

SEQ ID NO: 2493979 - RNA, 19 nt, Artificial Sequence
  Description of Artificial Sequence: Synthetic oligonucleotide
  Antisense strand to SEQ ID NO: 2493978
ugcaaucaacauaauuaca

SEQ ID NO: 2493980 - RNA, 19 nt, Artificial Sequence
  Description of Artificial Sequence: Synthetic oligonucleotide
  Sense strand starting at position 2241 of SEQ ID NO: 1887750
aauuauguugauugcaaug

SEQ ID NO: 2493981 - RNA, 19 nt, Artificial Sequence
  Description of Artificial Sequence: Synthetic oligonucleotide
  Antisense strand to SEQ ID NO: 2493980
cauugcaaucaacauaauu

SEQ ID NO: 2493982 - RNA, 19 nt, Artificial Sequence
  Description of Artificial Sequence: Synthetic oligonucleotide
  Sense strand starting at position 2246 of SEQ ID NO: 1887750
uguugauugcaaugaaaua

SEQ ID NO: 2493983 - RNA, 19 nt, Artificial Sequence
  Description of Artificial Sequence: Synthetic oligonucleotide
  Antisense strand to SEQ ID NO: 2493982
uauuucauugcaaucaaca

SEQ ID NO: 2493984 - RNA, 19 nt, Artificial Sequence
  Description of Artificial Sequence: Synthetic oligonucleotide
  Sense strand starting at position 2268 of SEQ ID NO: 1887750
cuaagagagggcugacauu

SEQ ID NO: 2493985 - RNA, 19 nt, Artificial Sequence
  Description of Artificial Sequence: Synthetic oligonucleotide
  Antisense strand to SEQ ID NO: 2493984
aaugucagcccucucuuag

SEQ ID NO: 2493986 - RNA, 19 nt, Artificial Sequence
  Description of Artificial Sequence: Synthetic oligonucleotide
  Sense strand starting at position 2307 of SEQ ID NO: 1887750
gaggucauuaggcaaacgu

SEQ ID NO: 2493987 - RNA, 19 nt, Artificial Sequence
  Description of Artificial Sequence: Synthetic oligonucleotide
  Antisense strand to SEQ ID NO: 2493986
acguuugccuaaugaccuc

SEQ ID NO: 2493988 - RNA, 19 nt, Artificial Sequence
  Description of Artificial Sequence: Synthetic oligonucleotide
  Sense strand starting at position 2756 of SEQ ID NO: 1887750
gggacauaguccucagguc

SEQ ID NO: 2493989 - RNA, 19 nt, Artificial Sequence
  Description of Artificial Sequence: Synthetic oligonucleotide
  Antisense strand to SEQ ID NO: 2493988
gaccugaggacuauguccc

SEQ ID NO: 2493990 - RNA, 19 nt, Artificial Sequence
  Description of Artificial Sequence: Synthetic oligonucleotide
  Sense strand starting at position 2757 of SEQ ID NO: 1887750
ggacauaguccucagguca

SEQ ID NO: 2493991 - RNA, 19 nt, Artificial Sequence
  Description of Artificial Sequence: Synthetic oligonucleotide
  Antisense strand to SEQ ID NO: 2493990
ugaccugaggacuaugucc

SEQ ID NO: 2493992 - RNA, 19 nt, Artificial Sequence
  Description of Artificial Sequence: Synthetic oligonucleotide
  Sense strand starting at position 2821 of SEQ ID NO: 1887750
cugccaucaguagaacaaa

SEQ ID NO: 2493993 - RNA, 19 nt, Artificial Sequence
  Description of Artificial Sequence: Synthetic oligonucleotide
  Antisense strand to SEQ ID NO: 2493992
uuuguucuacugauggcag

SEQ ID NO: 2493994 - RNA, 19 nt, Artificial Sequence
  Description of Artificial Sequence: Synthetic oligonucleotide
  Sense strand starting at position 2921 of SEQ ID NO: 1887750
gucuucuggccagagauca

SEQ ID NO: 2493995 - RNA, 19 nt, Artificial Sequence
  Description of Artificial Sequence: Synthetic oligonucleotide
  Antisense strand to SEQ ID NO: 2493994
ugaucucuggccagaagac

SEQ ID NO: 2493996 - RNA, 19 nt, Artificial Sequence
  Description of Artificial Sequence: Synthetic oligonucleotide
  Sense strand starting at position 2953 of SEQ ID NO: 1887750
auagauauguaguuggguu

SEQ ID NO: 2493997 - RNA, 19 nt, Artificial Sequence
  Description of Artificial Sequence: Synthetic oligonucleotide
  Antisense strand to SEQ ID NO: 2493996
aacccaacuacauaucuau

SEQ ID NO: 2493998 - RNA, 19 nt, Artificial Sequence
  Description of Artificial Sequence: Synthetic oligonucleotide
  Sense strand starting at position 2954 of SEQ ID NO: 1887750
uagauauguaguuggguua

SEQ ID NO: 2493999 - RNA, 19 nt, Artificial Sequence
  Description of Artificial Sequence: Synthetic oligonucleotide
  Antisense strand to SEQ ID NO: 2493998
uaacccaacuacauaucua

SEQ ID NO: 2494000 - RNA, 19 nt, Artificial Sequence
  Description of Artificial Sequence: Synthetic oligonucleotide
  Sense strand starting at position 2955 of SEQ ID NO: 1887750
agauauguaguuggguuau

SEQ ID NO: 2494001 - RNA, 19 nt, Artificial Sequence
  Description of Artificial Sequence: Synthetic oligonucleotide
  Antisense strand to SEQ ID NO: 2494000
auaacccaacuacauaucu

SEQ ID NO: 2494002 - RNA, 19 nt, Artificial Sequence
  Description of Artificial Sequence: Synthetic oligonucleotide
  Sense strand starting at position 3005 of SEQ ID NO: 1887750
ugagguguuucaguaagag

SEQ ID NO: 2494003 - RNA, 19 nt, Artificial Sequence
  Description of Artificial Sequence: Synthetic oligonucleotide
  Antisense strand to SEQ ID NO: 2494002
cucuuacugaaacaccuca

SEQ ID NO: 2494004 - RNA, 19 nt, Artificial Sequence
  Description of Artificial Sequence: Synthetic oligonucleotide
  Sense strand starting at position 3022 of SEQ ID NO: 1887750
agagaauuauaacuggcuu

SEQ ID NO: 2494005 - RNA, 19 nt, Artificial Sequence
  Description of Artificial Sequence: Synthetic oligonucleotide
  Antisense strand to SEQ ID NO: 2494004
aagccaguuauaauucucu

SEQ ID NO: 2494006 - RNA, 19 nt, Artificial Sequence
  Description of Artificial Sequence: Synthetic oligonucleotide
  Sense strand starting at position 3055 of SEQ ID NO: 1887750
acuuguguuaggugauuug

SEQ ID NO: 2494007 - RNA, 19 nt, Artificial Sequence
  Description of Artificial Sequence: Synthetic oligonucleotide
  Antisense strand to SEQ ID NO: 2494006
caaaucaccuaacacaagu

SEQ ID NO: 2494008 - RNA, 19 nt, Artificial Sequence
  Description of Artificial Sequence: Synthetic oligonucleotide
  Sense strand starting at position 3105 of SEQ ID NO: 1887750
uuuggaugucaggaaguca

SEQ ID NO: 2494009 - RNA, 19 nt, Artificial Sequence
  Description of Artificial Sequence: Synthetic oligonucleotide
  Antisense strand to SEQ ID NO: 2494008
ugacuuccugacauccaaa

SEQ ID NO: 2494010 - RNA, 19 nt, Artificial Sequence
  Description of Artificial Sequence: Synthetic oligonucleotide
  Sense strand starting at position 3113 of SEQ ID NO: 1887750
ucaggaagucagcauaauu

SEQ ID NO: 2494011 - RNA, 19 nt, Artificial Sequence
  Description of Artificial Sequence: Synthetic oligonucleotide
  Antisense strand to SEQ ID NO: 2494010
aauuaugcugacuuccuga

SEQ ID NO: 2494012 - RNA, 19 nt, Artificial Sequence
  Description of Artificial Sequence: Synthetic oligonucleotide
  Sense strand starting at position 3194 of SEQ ID NO: 1887750
gucaguuugggcuagaaua

SEQ ID NO: 2494013 - RNA, 19 nt, Artificial Sequence
  Description of Artificial Sequence: Synthetic oligonucleotide
  Antisense strand to SEQ ID NO: 2494012
uauucuagcccaaacugac

SEQ ID NO: 2494014 - RNA, 19 nt, Artificial Sequence
  Description of Artificial Sequence: Synthetic oligonucleotide
  Sense strand starting at position 3577 of SEQ ID NO: 1887750
caguacaacuggguucuua

SEQ ID NO: 2494015 - RNA, 19 nt, Artificial Sequence
  Description of Artificial Sequence: Synthetic oligonucleotide
  Antisense strand to SEQ ID NO: 2494014
uaagaacccaguuguacug

SEQ ID NO: 2494016 - RNA, 19 nt, Artificial Sequence
  Description of Artificial Sequence: Synthetic oligonucleotide
  Sense strand starting at position 3581 of SEQ ID NO: 1887750
acaacuggguucuuaguga

SEQ ID NO: 2494017 - RNA, 19 nt, Artificial Sequence
  Description of Artificial Sequence: Synthetic oligonucleotide
  Antisense strand to SEQ ID NO: 2494016
ucacuaagaacccaguugu

SEQ ID NO: 2494018 - RNA, 19 nt, Artificial Sequence
  Description of Artificial Sequence: Synthetic oligonucleotide
  Sense strand starting at position 3863 of SEQ ID NO: 1887750
gguaaauaaucaucagucu

SEQ ID NO: 2494019 - RNA, 19 nt, Artificial Sequence
  Description of Artificial Sequence: Synthetic oligonucleotide
  Antisense strand to SEQ ID NO: 2494018
agacugaugauuauuuacc

SEQ ID NO: 2494020 - RNA, 19 nt, Artificial Sequence
  Description of Artificial Sequence: Synthetic oligonucleotide
  Sense strand starting at position 3864 of SEQ ID NO: 1887750
guaaauaaucaucagucuu

SEQ ID NO: 2494021 - RNA, 19 nt, Artificial Sequence
  Description of Artificial Sequence: Synthetic oligonucleotide
  Antisense strand to SEQ ID NO: 2494020
aagacugaugauuauuuac

SEQ ID NO: 2494022 - RNA, 19 nt, Artificial Sequence
  Description of Artificial Sequence: Synthetic oligonucleotide
  Sense strand starting at position 486 of SEQ ID NO: 1887751
caugguaaccaggguuaca

SEQ ID NO: 2494023 - RNA, 19 nt, Artificial Sequence
  Description of Artificial Sequence: Synthetic oligonucleotide
  Antisense strand to SEQ ID NO: 2494022
uguaacccugguuaccaug

SEQ ID NO: 2494024 - RNA, 19 nt, Artificial Sequence
  Description of Artificial Sequence: Synthetic oligonucleotide
  Sense strand starting at position 529 of SEQ ID NO: 1887751
ggaccuagugugcaaggua

SEQ ID NO: 2494025 - RNA, 19 nt, Artificial Sequence
  Description of Artificial Sequence: Synthetic oligonucleotide
  Antisense strand to SEQ ID NO: 2494024
uaccuugcacacuaggucc

SEQ ID NO: 2494026 - RNA, 19 nt, Artificial Sequence
  Description of Artificial Sequence: Synthetic oligonucleotide
  Sense strand starting at position 640 of SEQ ID NO: 1887751
gggcaacaucuccauagca

SEQ ID NO: 2494027 - RNA, 19 nt, Artificial Sequence
  Description of Artificial Sequence: Synthetic oligonucleotide
  Antisense strand to SEQ ID NO: 2494026
ugcuauggagauguugccc

SEQ ID NO: 2494028 - RNA, 19 nt, Artificial Sequence
  Description of Artificial Sequence: Synthetic oligonucleotide
  Sense strand starting at position 1303 of SEQ ID NO: 1887751
auuagaaugaccggucaug

SEQ ID NO: 2494029 - RNA, 19 nt, Artificial Sequence
  Description of Artificial Sequence: Synthetic oligonucleotide
  Antisense strand to SEQ ID NO: 2494028
caugaccggucauucuaau

SEQ ID NO: 2494030 - RNA, 19 nt, Artificial Sequence
  Description of Artificial Sequence: Synthetic oligonucleotide
  Sense strand starting at position 2106 of SEQ ID NO: 1887751
cugucuccuuuaggcaaua

SEQ ID NO: 2494031 - RNA, 19 nt, Artificial Sequence
  Description of Artificial Sequence: Synthetic oligonucleotide
  Antisense strand to SEQ ID NO: 2494030
uauugccuaaaggagacag

SEQ ID NO: 2494032 - RNA, 19 nt, Artificial Sequence
  Description of Artificial Sequence: Synthetic oligonucleotide
  Sense strand starting at position 2258 of SEQ ID NO: 1887751
aagugcaauucugggacuu

SEQ ID NO: 2494033 - RNA, 19 nt, Artificial Sequence
  Description of Artificial Sequence: Synthetic oligonucleotide
  Antisense strand to SEQ ID NO: 2494032
aagucccagaauugcacuu

SEQ ID NO: 2494034 - RNA, 19 nt, Artificial Sequence
  Description of Artificial Sequence: Synthetic oligonucleotide
  Sense strand starting at position 2260 of SEQ ID NO: 1887751
gugcaauucugggacuucu

SEQ ID NO: 2494035 - RNA, 19 nt, Artificial Sequence
  Description of Artificial Sequence: Synthetic oligonucleotide
  Antisense strand to SEQ ID NO: 2494034
agaagucccagaauugcac

SEQ ID NO: 2494036 - RNA, 19 nt, Artificial Sequence
  Description of Artificial Sequence: Synthetic oligonucleotide
  Sense strand starting at position 2324 of SEQ ID NO: 1887751
gccucacucuguuugagac

SEQ ID NO: 2494037 - RNA, 19 nt, Artificial Sequence
  Description of Artificial Sequence: Synthetic oligonucleotide
  Antisense strand to SEQ ID NO: 2494036
gucucaaacagagugaggc

SEQ ID NO: 2494038 - RNA, 19 nt, Artificial Sequence
  Description of Artificial Sequence: Synthetic oligonucleotide
  Sense strand starting at position 2325 of SEQ ID NO: 1887751
ccucacucuguuugagaca

SEQ ID NO: 2494039 - RNA, 19 nt, Artificial Sequence
  Description of Artificial Sequence: Synthetic oligonucleotide
  Antisense strand to SEQ ID NO: 2494038
ugucucaaacagagugagg

SEQ ID NO: 2494040 - RNA, 19 nt, Artificial Sequence
  Description of Artificial Sequence: Synthetic oligonucleotide
  Sense strand starting at position 2330 of SEQ ID NO: 1887751
cucuguuugagacagagca

SEQ ID NO: 2494041 - RNA, 19 nt, Artificial Sequence
  Description of Artificial Sequence: Synthetic oligonucleotide
  Antisense strand to SEQ ID NO: 2494040
ugcucugucucaaacagag

SEQ ID NO: 2494042 - RNA, 19 nt, Artificial Sequence
  Description of Artificial Sequence: Synthetic oligonucleotide
  Sense strand starting at position 2491 of SEQ ID NO: 1887751
cagugccuaugcugagaaa

SEQ ID NO: 2494043 - RNA, 19 nt, Artificial Sequence
  Description of Artificial Sequence: Synthetic oligonucleotide
  Antisense strand to SEQ ID NO: 2494042
uuucucagcauaggcacug

SEQ ID NO: 2494044 - RNA, 19 nt, Artificial Sequence
  Description of Artificial Sequence: Synthetic oligonucleotide
  Sense strand starting at position 3125 of SEQ ID NO: 1887751
gguccaaggucuggaggaa

SEQ ID NO: 2494045 - RNA, 19 nt, Artificial Sequence
  Description of Artificial Sequence: Synthetic oligonucleotide
  Antisense strand to SEQ ID NO: 2494044
uuccuccagaccuuggacc

SEQ ID NO: 2494046 - RNA, 19 nt, Artificial Sequence
  Description of Artificial Sequence: Synthetic oligonucleotide
  Sense strand starting at position 3144 of SEQ ID NO: 1887751
ucuggagauuauuauaggu

SEQ ID NO: 2494047 - RNA, 19 nt, Artificial Sequence
  Description of Artificial Sequence: Synthetic oligonucleotide
  Antisense strand to SEQ ID NO: 2494046
accuauaauaaucuccaga

SEQ ID NO: 2494048 - RNA, 19 nt, Artificial Sequence
  Description of Artificial Sequence: Synthetic oligonucleotide
  Sense strand starting at position 3146 of SEQ ID NO: 1887751
uggagauuauuauagguca

SEQ ID NO: 2494049 - RNA, 19 nt, Artificial Sequence
  Description of Artificial Sequence: Synthetic oligonucleotide
  Antisense strand to SEQ ID NO: 2494048
ugaccuauaauaaucucca

SEQ ID NO: 2494050 - RNA, 19 nt, Artificial Sequence
  Description of Artificial Sequence: Synthetic oligonucleotide
  Sense strand starting at position 3248 of SEQ ID NO: 1887751
ggucuauaggcagagguca

SEQ ID NO: 2494051 - RNA, 19 nt, Artificial Sequence
  Description of Artificial Sequence: Synthetic oligonucleotide
  Antisense strand to SEQ ID NO: 2494050
ugaccucugccuauagacc

SEQ ID NO: 2494052 - RNA, 19 nt, Artificial Sequence
  Description of Artificial Sequence: Synthetic oligonucleotide
  Sense strand starting at position 3327 of SEQ ID NO: 1887751
gccagaaucuagggauuuc

SEQ ID NO: 2494053 - RNA, 19 nt, Artificial Sequence
  Description of Artificial Sequence: Synthetic oligonucleotide
  Antisense strand to SEQ ID NO: 2494052
gaaaucccuagauucuggc

SEQ ID NO: 2494054 - RNA, 19 nt, Artificial Sequence
  Description of Artificial Sequence: Synthetic oligonucleotide
  Sense strand starting at position 3753 of SEQ ID NO: 1887751
cuccuuagauccugagaac

SEQ ID NO: 2494055 - RNA, 19 nt, Artificial Sequence
  Description of Artificial Sequence: Synthetic oligonucleotide
  Antisense strand to SEQ ID NO: 2494054
guucucaggaucuaaggag

SEQ ID NO: 2494056 - RNA, 19 nt, Artificial Sequence
  Description of Artificial Sequence: Synthetic oligonucleotide
  Sense strand starting at position 3764 of SEQ ID NO: 1887751
cugagaaccucagagguga

SEQ ID NO: 2494057 - RNA, 19 nt, Artificial Sequence
  Description of Artificial Sequence: Synthetic oligonucleotide
  Antisense strand to SEQ ID NO: 2494056
ucaccucugagguucucag

SEQ ID NO: 2494058 - RNA, 19 nt, Artificial Sequence
  Description of Artificial Sequence: Synthetic oligonucleotide
  Sense strand starting at position 63 of SEQ ID NO: 1887752
cagggugcccuggaaagau

SEQ ID NO: 2494059 - RNA, 19 nt, Artificial Sequence
  Description of Artificial Sequence: Synthetic oligonucleotide
  Antisense strand to SEQ ID NO: 2494058
aucuuuccagggcacccug

SEQ ID NO: 2494060 - RNA, 19 nt, Artificial Sequence
  Description of Artificial Sequence: Synthetic oligonucleotide
  Sense strand starting at position 400 of SEQ ID NO: 1887752
ccacguccuccuuagaaac

SEQ ID NO: 2494061 - RNA, 19 nt, Artificial Sequence
  Description of Artificial Sequence: Synthetic oligonucleotide
  Antisense strand to SEQ ID NO: 2494060
guuucuaaggaggacgugg

SEQ ID NO: 2494062 - RNA, 19 nt, Artificial Sequence
  Description of Artificial Sequence: Synthetic oligonucleotide
  Sense strand starting at position 402 of SEQ ID NO: 1887752
acguccuccuuagaaacaa

SEQ ID NO: 2494063 - RNA, 19 nt, Artificial Sequence
  Description of Artificial Sequence: Synthetic oligonucleotide
  Antisense strand to SEQ ID NO: 2494062
uuguuucuaaggaggacgu

SEQ ID NO: 2494064 - RNA, 19 nt, Artificial Sequence
  Description of Artificial Sequence: Synthetic oligonucleotide
  Sense strand starting at position 420 of SEQ ID NO: 1887752
augguacagugacaaugau

SEQ ID NO: 2494065 - RNA, 19 nt, Artificial Sequence
  Description of Artificial Sequence: Synthetic oligonucleotide
  Antisense strand to SEQ ID NO: 2494064
aucauugucacuguaccau

SEQ ID NO: 2494066 - RNA, 19 nt, Artificial Sequence
  Description of Artificial Sequence: Synthetic oligonucleotide
  Sense strand starting at position 429 of SEQ ID NO: 1887752
ugacaaugauggcaacauu

SEQ ID NO: 2494067 - RNA, 19 nt, Artificial Sequence
  Description of Artificial Sequence: Synthetic oligonucleotide
  Antisense strand to SEQ ID NO: 2494066
aauguugccaucauuguca

SEQ ID NO: 2494068 - RNA, 19 nt, Artificial Sequence
  Description of Artificial Sequence: Synthetic oligonucleotide
  Sense strand starting at position 485 of SEQ ID NO: 1887752
aggagauugucugucugag

SEQ ID NO: 2494069 - RNA, 19 nt, Artificial Sequence
  Description of Artificial Sequence: Synthetic oligonucleotide
  Antisense strand to SEQ ID NO: 2494068
cucagacagacaaucuccu

SEQ ID NO: 2494070 - RNA, 19 nt, Artificial Sequence
  Description of Artificial Sequence: Synthetic oligonucleotide
  Sense strand starting at position 487 of SEQ ID NO: 1887752
gagauugucugucugagac

SEQ ID NO: 2494071 - RNA, 19 nt, Artificial Sequence
  Description of Artificial Sequence: Synthetic oligonucleotide
  Antisense strand to SEQ ID NO: 2494070
gucucagacagacaaucuc

SEQ ID NO: 2494072 - RNA, 19 nt, Artificial Sequence
  Description of Artificial Sequence: Synthetic oligonucleotide
  Sense strand starting at position 497 of SEQ ID NO: 1887752
gucugagacucacaacauc

SEQ ID NO: 2494073 - RNA, 19 nt, Artificial Sequence
  Description of Artificial Sequence: Synthetic oligonucleotide
  Antisense strand to SEQ ID NO: 2494072
gauguugugagucucagac

SEQ ID NO: 2494074 - RNA, 19 nt, Artificial Sequence
  Description of Artificial Sequence: Synthetic oligonucleotide
  Sense strand starting at position 508 of SEQ ID NO: 1887752
acaacaucacucugggagu

SEQ ID NO: 2494075 - RNA, 19 nt, Artificial Sequence
  Description of Artificial Sequence: Synthetic oligonucleotide
  Antisense strand to SEQ ID NO: 2494074
acucccagagugauguugu

SEQ ID NO: 2494076 - RNA, 19 nt, Artificial Sequence
  Description of Artificial Sequence: Synthetic oligonucleotide
  Sense strand starting at position 511 of SEQ ID NO: 1887752
acaucacucugggagucaa

SEQ ID NO: 2494077 - RNA, 19 nt, Artificial Sequence
  Description of Artificial Sequence: Synthetic oligonucleotide
  Antisense strand to SEQ ID NO: 2494076
uugacucccagagugaugu

SEQ ID NO: 2494078 - RNA, 19 nt, Artificial Sequence
  Description of Artificial Sequence: Synthetic oligonucleotide
  Sense strand starting at position 574 of SEQ ID NO: 1887752
ccagguccaucucaugaaa

SEQ ID NO: 2494079 - RNA, 19 nt, Artificial Sequence
  Description of Artificial Sequence: Synthetic oligonucleotide
  Antisense strand to SEQ ID NO: 2494078
uuucaugagauggaccugg

SEQ ID NO: 2494080 - RNA, 19 nt, Artificial Sequence
  Description of Artificial Sequence: Synthetic oligonucleotide
  Sense strand starting at position 576 of SEQ ID NO: 1887752
agguccaucucaugaaaga

SEQ ID NO: 2494081 - RNA, 19 nt, Artificial Sequence
  Description of Artificial Sequence: Synthetic oligonucleotide
  Antisense strand to SEQ ID NO: 2494080
ucuuucaugagauggaccu

SEQ ID NO: 2494082 - RNA, 19 nt, Artificial Sequence
  Description of Artificial Sequence: Synthetic oligonucleotide
  Sense strand starting at position 1296 of SEQ ID NO: 1887752
gccugagaucugggucuga

SEQ ID NO: 2494083 - RNA, 19 nt, Artificial Sequence
  Description of Artificial Sequence: Synthetic oligonucleotide
  Antisense strand to SEQ ID NO: 2494082
ucagacccagaucucaggc

SEQ ID NO: 2494084 - RNA, 19 nt, Artificial Sequence
  Description of Artificial Sequence: Synthetic oligonucleotide
  Sense strand starting at position 1539 of SEQ ID NO: 1887752
ggcugagguuugagauaag

SEQ ID NO: 2494085 - RNA, 19 nt, Artificial Sequence
  Description of Artificial Sequence: Synthetic oligonucleotide
  Antisense strand to SEQ ID NO: 2494084
cuuaucucaaaccucagcc

SEQ ID NO: 2494086 - RNA, 19 nt, Artificial Sequence
  Description of Artificial Sequence: Synthetic oligonucleotide
  Sense strand starting at position 1684 of SEQ ID NO: 1887752
uugggauuccugggucaga

SEQ ID NO: 2494087 - RNA, 19 nt, Artificial Sequence
  Description of Artificial Sequence: Synthetic oligonucleotide
  Antisense strand to SEQ ID NO: 2494086
ucugacccaggaaucccaa

SEQ ID NO: 2494088 - RNA, 19 nt, Artificial Sequence
  Description of Artificial Sequence: Synthetic oligonucleotide
  Sense strand starting at position 1685 of SEQ ID NO: 1887752
ugggauuccugggucagag

SEQ ID NO: 2494089 - RNA, 19 nt, Artificial Sequence
  Description of Artificial Sequence: Synthetic oligonucleotide
  Antisense strand to SEQ ID NO: 2494088
cucugacccaggaauccca

SEQ ID NO: 2494090 - RNA, 19 nt, Artificial Sequence
  Description of Artificial Sequence: Synthetic oligonucleotide
  Sense strand starting at position 1756 of SEQ ID NO: 1887752
uugggauuccugggucuga

SEQ ID NO: 2494091 - RNA, 19 nt, Artificial Sequence
  Description of Artificial Sequence: Synthetic oligonucleotide
  Antisense strand to SEQ ID NO: 2494090
ucagacccaggaaucccaa

SEQ ID NO: 2494092 - RNA, 19 nt, Artificial Sequence
  Description of Artificial Sequence: Synthetic oligonucleotide
  Sense strand starting at position 1801 of SEQ ID NO: 1887752
gggaacgguuucucaccau

SEQ ID NO: 2494093 - RNA, 19 nt, Artificial Sequence
  Description of Artificial Sequence: Synthetic oligonucleotide
  Antisense strand to SEQ ID NO: 2494092
auggugagaaaccguuccc

SEQ ID NO: 2494094 - RNA, 19 nt, Artificial Sequence
  Description of Artificial Sequence: Synthetic oligonucleotide
  Sense strand starting at position 1805 of SEQ ID NO: 1887752
acgguuucucaccauugga

SEQ ID NO: 2494095 - RNA, 19 nt, Artificial Sequence
  Description of Artificial Sequence: Synthetic oligonucleotide
  Antisense strand to SEQ ID NO: 2494094
uccaauggugagaaaccgu

SEQ ID NO: 2494096 - RNA, 19 nt, Artificial Sequence
  Description of Artificial Sequence: Synthetic oligonucleotide
  Sense strand starting at position 1926 of SEQ ID NO: 1887752
gucgaugaccuguaggaag

SEQ ID NO: 2494097 - RNA, 19 nt, Artificial Sequence
  Description of Artificial Sequence: Synthetic oligonucleotide
  Antisense strand to SEQ ID NO: 2494096
cuuccuacaggucaucgac

SEQ ID NO: 2494098 - RNA, 19 nt, Artificial Sequence
  Description of Artificial Sequence: Synthetic oligonucleotide
  Sense strand starting at position 1928 of SEQ ID NO: 1887752
cgaugaccuguaggaagau

SEQ ID NO: 2494099 - RNA, 19 nt, Artificial Sequence
  Description of Artificial Sequence: Synthetic oligonucleotide
  Antisense strand to SEQ ID NO: 2494098
aucuuccuacaggucaucg

SEQ ID NO: 2494100 - RNA, 19 nt, Artificial Sequence
  Description of Artificial Sequence: Synthetic oligonucleotide
  Sense strand starting at position 2072 of SEQ ID NO: 1887752
gugccagucucuccucauu

SEQ ID NO: 2494101 - RNA, 19 nt, Artificial Sequence
  Description of Artificial Sequence: Synthetic oligonucleotide
  Antisense strand to SEQ ID NO: 2494100
aaugaggagagacuggcac

SEQ ID NO: 2494102 - RNA, 19 nt, Artificial Sequence
  Description of Artificial Sequence: Synthetic oligonucleotide
  Sense strand starting at position 2574 of SEQ ID NO: 1887752
ugcguuggcggcgaugaau

SEQ ID NO: 2494103 - RNA, 19 nt, Artificial Sequence
  Description of Artificial Sequence: Synthetic oligonucleotide
  Antisense strand to SEQ ID NO: 2494102
auucaucgccgccaacgca

SEQ ID NO: 2494104 - RNA, 19 nt, Artificial Sequence
  Description of Artificial Sequence: Synthetic oligonucleotide
  Sense strand starting at position 2576 of SEQ ID NO: 1887752
cguuggcggcgaugaauua

SEQ ID NO: 2494105 - RNA, 19 nt, Artificial Sequence
  Description of Artificial Sequence: Synthetic oligonucleotide
  Antisense strand to SEQ ID NO: 2494104
uaauucaucgccgccaacg

SEQ ID NO: 2494106 - RNA, 19 nt, Artificial Sequence
  Description of Artificial Sequence: Synthetic oligonucleotide
  Sense strand starting at position 2585 of SEQ ID NO: 1887752
cgaugaauuaaccggagcu

SEQ ID NO: 2494107 - RNA, 19 nt, Artificial Sequence
  Description of Artificial Sequence: Synthetic oligonucleotide
  Antisense strand to SEQ ID NO: 2494106
agcuccgguuaauucaucg

SEQ ID NO: 2494108 - RNA, 19 nt, Artificial Sequence
  Description of Artificial Sequence: Synthetic oligonucleotide
  Sense strand starting at position 2586 of SEQ ID NO: 1887752
gaugaauuaaccggagcug

SEQ ID NO: 2494109 - RNA, 19 nt, Artificial Sequence
  Description of Artificial Sequence: Synthetic oligonucleotide
  Antisense strand to SEQ ID NO: 2494108
cagcuccgguuaauucauc

SEQ ID NO: 2494110 - RNA, 19 nt, Artificial Sequence
  Description of Artificial Sequence: Synthetic oligonucleotide
  Sense strand starting at position 3023 of SEQ ID NO: 1887752
gagggaaggucuuaguuuc

SEQ ID NO: 2494111 - RNA, 19 nt, Artificial Sequence
  Description of Artificial Sequence: Synthetic oligonucleotide
  Antisense strand to SEQ ID NO: 2494110
gaaacuaagaccuucccuc

SEQ ID NO: 2494112 - RNA, 19 nt, Artificial Sequence
  Description of Artificial Sequence: Synthetic oligonucleotide
  Sense strand starting at position 3031 of SEQ ID NO: 1887752
gucuuaguuucuccaagcu

SEQ ID NO: 2494113 - RNA, 19 nt, Artificial Sequence
  Description of Artificial Sequence: Synthetic oligonucleotide
  Antisense strand to SEQ ID NO: 2494112
agcuuggagaaacuaagac

SEQ ID NO: 2494114 - RNA, 19 nt, Artificial Sequence
  Description of Artificial Sequence: Synthetic oligonucleotide
  Sense strand starting at position 3108 of SEQ ID NO: 1887752
cucucuugggucugauacu

SEQ ID NO: 2494115 - RNA, 19 nt, Artificial Sequence
  Description of Artificial Sequence: Synthetic oligonucleotide
  Antisense strand to SEQ ID NO: 2494114
aguaucagacccaagagag

SEQ ID NO: 2494116 - RNA, 19 nt, Artificial Sequence
  Description of Artificial Sequence: Synthetic oligonucleotide
  Sense strand starting at position 3339 of SEQ ID NO: 1887752
agaggagggcucggugaaa

SEQ ID NO: 2494117 - RNA, 19 nt, Artificial Sequence
  Description of Artificial Sequence: Synthetic oligonucleotide
  Antisense strand to SEQ ID NO: 2494116
uuucaccgagcccuccucu

SEQ ID NO: 2494118 - RNA, 19 nt, Artificial Sequence
  Description of Artificial Sequence: Synthetic oligonucleotide
  Sense strand starting at position 3424 of SEQ ID NO: 1887752
gguaaaugcuuaccgucau

SEQ ID NO: 2494119 - RNA, 19 nt, Artificial Sequence
  Description of Artificial Sequence: Synthetic oligonucleotide
  Antisense strand to SEQ ID NO: 2494118
augacgguaagcauuuacc

SEQ ID NO: 2494120 - RNA, 19 nt, Artificial Sequence
  Description of Artificial Sequence: Synthetic oligonucleotide
  Sense strand starting at position 3425 of SEQ ID NO: 1887752
guaaaugcuuaccgucaua

SEQ ID NO: 2494121 - RNA, 19 nt, Artificial Sequence
  Description of Artificial Sequence: Synthetic oligonucleotide
  Antisense strand to SEQ ID NO: 2494120
uaugacgguaagcauuuac

SEQ ID NO: 2494122 - RNA, 19 nt, Artificial Sequence
  Description of Artificial Sequence: Synthetic oligonucleotide
  Sense strand starting at position 3757 of SEQ ID NO: 1887752
ugagacaccuccugucuca

SEQ ID NO: 2494123 - RNA, 19 nt, Artificial Sequence
  Description of Artificial Sequence: Synthetic oligonucleotide
  Antisense strand to SEQ ID NO: 2494122
ugagacaggaggugucuca

SEQ ID NO: 2494124 - RNA, 19 nt, Artificial Sequence
  Description of Artificial Sequence: Synthetic oligonucleotide
  Sense strand starting at position 3976 of SEQ ID NO: 1887752
gcaccucgcuacuuagagu

SEQ ID NO: 2494125 - RNA, 19 nt, Artificial Sequence
  Description of Artificial Sequence: Synthetic oligonucleotide
  Antisense strand to SEQ ID NO: 2494124
acucuaaguagcgaggugc

SEQ ID NO: 2494126 - RNA, 19 nt, Artificial Sequence
  Description of Artificial Sequence: Synthetic oligonucleotide
  Sense strand starting at position 2981 of SEQ ID NO: 1887753
caccuuugaugagaugagu

SEQ ID NO: 2494127 - RNA, 19 nt, Artificial Sequence
  Description of Artificial Sequence: Synthetic oligonucleotide
  Antisense strand to SEQ ID NO: 2494126
acucaucucaucaaaggug

SEQ ID NO: 2494128 - RNA, 19 nt, Artificial Sequence
  Description of Artificial Sequence: Synthetic oligonucleotide
  Sense strand starting at position 3038 of SEQ ID NO: 1887753
acguuauaaaccuggguuu

SEQ ID NO: 2494129 - RNA, 19 nt, Artificial Sequence
  Description of Artificial Sequence: Synthetic oligonucleotide
  Antisense strand to SEQ ID NO: 2494128
aaacccagguuuauaacgu

SEQ ID NO: 2494130 - RNA, 19 nt, Artificial Sequence
  Description of Artificial Sequence: Synthetic oligonucleotide
  Sense strand starting at position 3082 of SEQ ID NO: 1887753
uuugaacucuguuaaugau

SEQ ID NO: 2494131 - RNA, 19 nt, Artificial Sequence
  Description of Artificial Sequence: Synthetic oligonucleotide
  Antisense strand to SEQ ID NO: 2494130
aucauuaacagaguucaaa

SEQ ID NO: 2494132 - RNA, 19 nt, Artificial Sequence
  Description of Artificial Sequence: Synthetic oligonucleotide
  Sense strand starting at position 3099 of SEQ ID NO: 1887753
augucauccugcugugauc

SEQ ID NO: 2494133 - RNA, 19 nt, Artificial Sequence
  Description of Artificial Sequence: Synthetic oligonucleotide
  Antisense strand to SEQ ID NO: 2494132
gaucacagcaggaugacau

SEQ ID NO: 2494134 - RNA, 19 nt, Artificial Sequence
  Description of Artificial Sequence: Synthetic oligonucleotide
  Sense strand starting at position 3149 of SEQ ID NO: 1887753
ucauauaauuccugccgga

SEQ ID NO: 2494135 - RNA, 19 nt, Artificial Sequence
  Description of Artificial Sequence: Synthetic oligonucleotide
  Antisense strand to SEQ ID NO: 2494134
uccggcaggaauuauauga

SEQ ID NO: 2494136 - RNA, 19 nt, Artificial Sequence
  Description of Artificial Sequence: Synthetic oligonucleotide
  Sense strand starting at position 3152 of SEQ ID NO: 1887753
uauaauuccugccggagua

SEQ ID NO: 2494137 - RNA, 19 nt, Artificial Sequence
  Description of Artificial Sequence: Synthetic oligonucleotide
  Antisense strand to SEQ ID NO: 2494136
uacuccggcaggaauuaua

SEQ ID NO: 2494138 - RNA, 19 nt, Artificial Sequence
  Description of Artificial Sequence: Synthetic oligonucleotide
  Sense strand starting at position 3153 of SEQ ID NO: 1887753
auaauuccugccggaguau

SEQ ID NO: 2494139 - RNA, 19 nt, Artificial Sequence
  Description of Artificial Sequence: Synthetic oligonucleotide
  Antisense strand to SEQ ID NO: 2494138
auacuccggcaggaauuau

SEQ ID NO: 2494140 - RNA, 19 nt, Artificial Sequence
  Description of Artificial Sequence: Synthetic oligonucleotide
  Sense strand starting at position 3463 of SEQ ID NO: 1887753
ccuggaauuucccaaugcu

SEQ ID NO: 2494141 - RNA, 19 nt, Artificial Sequence
  Description of Artificial Sequence: Synthetic oligonucleotide
  Antisense strand to SEQ ID NO: 2494140
agcauugggaaauuccagg

SEQ ID NO: 2494142 - RNA, 19 nt, Artificial Sequence
  Description of Artificial Sequence: Synthetic oligonucleotide
  Sense strand starting at position 3513 of SEQ ID NO: 1887753
cuuaauugcgugccucuua

SEQ ID NO: 2494143 - RNA, 19 nt, Artificial Sequence
  Description of Artificial Sequence: Synthetic oligonucleotide
  Antisense strand to SEQ ID NO: 2494142
uaagaggcacgcaauuaag

SEQ ID NO: 2494144 - RNA, 19 nt, Artificial Sequence
  Description of Artificial Sequence: Synthetic oligonucleotide
  Sense strand starting at position 3514 of SEQ ID NO: 1887753
uuaauugcgugccucuuaa

SEQ ID NO: 2494145 - RNA, 19 nt, Artificial Sequence
  Description of Artificial Sequence: Synthetic oligonucleotide
  Antisense strand to SEQ ID NO: 2494144
uuaagaggcacgcaauuaa

SEQ ID NO: 2494146 - RNA, 19 nt, Artificial Sequence
  Description of Artificial Sequence: Synthetic oligonucleotide
  Sense strand starting at position 3522 of SEQ ID NO: 1887753
gugccucuuaaguguucca

SEQ ID NO: 2494147 - RNA, 19 nt, Artificial Sequence
  Description of Artificial Sequence: Synthetic oligonucleotide
  Antisense strand to SEQ ID NO: 2494146
uggaacacuuaagaggcac

SEQ ID NO: 2494148 - RNA, 19 nt, Artificial Sequence
  Description of Artificial Sequence: Synthetic oligonucleotide
  Sense strand starting at position 3871 of SEQ ID NO: 1887753
gcgcucagaucacuuucua

SEQ ID NO: 2494149 - RNA, 19 nt, Artificial Sequence
  Description of Artificial Sequence: Synthetic oligonucleotide
  Antisense strand to SEQ ID NO: 2494148
uagaaagugaucugagcgc

SEQ ID NO: 2494150 - RNA, 19 nt, Artificial Sequence
  Description of Artificial Sequence: Synthetic oligonucleotide
  Sense strand starting at position 3944 of SEQ ID NO: 1887753
ccaauugugucucaagguc

SEQ ID NO: 2494151 - RNA, 19 nt, Artificial Sequence
  Description of Artificial Sequence: Synthetic oligonucleotide
  Antisense strand to SEQ ID NO: 2494150
gaccuugagacacaauugg

SEQ ID NO: 2494152 - RNA, 19 nt, Artificial Sequence
  Description of Artificial Sequence: Synthetic oligonucleotide
  Sense strand starting at position 2186 of SEQ ID NO: 1887754
cccaaauguuccuggaauc

SEQ ID NO: 2494153 - RNA, 19 nt, Artificial Sequence
  Description of Artificial Sequence: Synthetic oligonucleotide
  Antisense strand to SEQ ID NO: 2494152
gauuccaggaacauuuggg

SEQ ID NO: 2494154 - RNA, 19 nt, Artificial Sequence
  Description of Artificial Sequence: Synthetic oligonucleotide
  Sense strand starting at position 2327 of SEQ ID NO: 1887754
gaaggcauggccugauaga

SEQ ID NO: 2494155 - RNA, 19 nt, Artificial Sequence
  Description of Artificial Sequence: Synthetic oligonucleotide
  Antisense strand to SEQ ID NO: 2494154
ucuaucaggccaugccuuc

SEQ ID NO: 2494156 - RNA, 19 nt, Artificial Sequence
  Description of Artificial Sequence: Synthetic oligonucleotide
  Sense strand starting at position 2377 of SEQ ID NO: 1887754
gaaccucauuugucucgua

SEQ ID NO: 2494157 - RNA, 19 nt, Artificial Sequence
  Description of Artificial Sequence: Synthetic oligonucleotide
  Antisense strand to SEQ ID NO: 2494156
uacgagacaaaugagguuc

SEQ ID NO: 2494158 - RNA, 19 nt, Artificial Sequence
  Description of Artificial Sequence: Synthetic oligonucleotide
  Sense strand starting at position 2380 of SEQ ID NO: 1887754
ccucauuugucucguaauu

SEQ ID NO: 2494159 - RNA, 19 nt, Artificial Sequence
  Description of Artificial Sequence: Synthetic oligonucleotide
  Antisense strand to SEQ ID NO: 2494158
aauuacgagacaaaugagg

SEQ ID NO: 2494160 - RNA, 19 nt, Artificial Sequence
  Description of Artificial Sequence: Synthetic oligonucleotide
  Sense strand starting at position 2382 of SEQ ID NO: 1887754
ucauuugucucguaauuug

SEQ ID NO: 2494161 - RNA, 19 nt, Artificial Sequence
  Description of Artificial Sequence: Synthetic oligonucleotide
  Antisense strand to SEQ ID NO: 2494160
caaauuacgagacaaauga

SEQ ID NO: 2494162 - RNA, 19 nt, Artificial Sequence
  Description of Artificial Sequence: Synthetic oligonucleotide
  Sense strand starting at position 2433 of SEQ ID NO: 1887754
uccugucagucugcagaga

SEQ ID NO: 2494163 - RNA, 19 nt, Artificial Sequence
  Description of Artificial Sequence: Synthetic oligonucleotide
  Antisense strand to SEQ ID NO: 2494162
ucucugcagacugacagga

SEQ ID NO: 2494164 - RNA, 19 nt, Artificial Sequence
  Description of Artificial Sequence: Synthetic oligonucleotide
  Sense strand starting at position 2536 of SEQ ID NO: 1887754
uugggucauuuacaacuau

SEQ ID NO: 2494165 - RNA, 19 nt, Artificial Sequence
  Description of Artificial Sequence: Synthetic oligonucleotide
  Antisense strand to SEQ ID NO: 2494164
auaguuguaaaugacccaa

SEQ ID NO: 2494166 - RNA, 19 nt, Artificial Sequence
  Description of Artificial Sequence: Synthetic oligonucleotide
  Sense strand starting at position 3229 of SEQ ID NO: 1887754
ggaugucuuuccucacuuc

SEQ ID NO: 2494167 - RNA, 19 nt, Artificial Sequence
  Description of Artificial Sequence: Synthetic oligonucleotide
  Antisense strand to SEQ ID NO: 2494166
gaagugaggaaagacaucc

SEQ ID NO: 2494168 - RNA, 19 nt, Artificial Sequence
  Description of Artificial Sequence: Synthetic oligonucleotide
  Sense strand starting at position 3796 of SEQ ID NO: 1887754
agccgagaaucucagagau

SEQ ID NO: 2494169 - RNA, 19 nt, Artificial Sequence
  Description of Artificial Sequence: Synthetic oligonucleotide
  Antisense strand to SEQ ID NO: 2494168
aucucugagauucucggcu

SEQ ID NO: 2494170 - RNA, 19 nt, Artificial Sequence
  Description of Artificial Sequence: Synthetic oligonucleotide
  Sense strand starting at position 3798 of SEQ ID NO: 1887754
ccgagaaucucagagauuc

SEQ ID NO: 2494171 - RNA, 19 nt, Artificial Sequence
  Description of Artificial Sequence: Synthetic oligonucleotide
  Antisense strand to SEQ ID NO: 2494170
gaaucucugagauucucgg

SEQ ID NO: 2494172 - RNA, 19 nt, Artificial Sequence
  Description of Artificial Sequence: Synthetic oligonucleotide
  Sense strand starting at position 63 of SEQ ID NO: 1887755
ucagccuucguuuggacaa

SEQ ID NO: 2494173 - RNA, 19 nt, Artificial Sequence
  Description of Artificial Sequence: Synthetic oligonucleotide
  Antisense strand to SEQ ID NO: 2494172
uuguccaaacgaaggcuga

SEQ ID NO: 2494174 - RNA, 19 nt, Artificial Sequence
  Description of Artificial Sequence: Synthetic oligonucleotide
  Sense strand starting at position 78 of SEQ ID NO: 1887755
acaaguagcugagcucaau

SEQ ID NO: 2494175 - RNA, 19 nt, Artificial Sequence
  Description of Artificial Sequence: Synthetic oligonucleotide
  Antisense strand to SEQ ID NO: 2494174
auugagcucagcuacuugu

SEQ ID NO: 2494176 - RNA, 19 nt, Artificial Sequence
  Description of Artificial Sequence: Synthetic oligonucleotide
  Sense strand starting at position 2360 of SEQ ID NO: 1887755
cccaaauguuccuggaauc

SEQ ID NO: 2494177 - RNA, 19 nt, Artificial Sequence
  Description of Artificial Sequence: Synthetic oligonucleotide
  Antisense strand to SEQ ID NO: 2494176
gauuccaggaacauuuggg

SEQ ID NO: 2494178 - RNA, 19 nt, Artificial Sequence
  Description of Artificial Sequence: Synthetic oligonucleotide
  Sense strand starting at position 2501 of SEQ ID NO: 1887755
gaaggcauggccugauaga

SEQ ID NO: 2494179 - RNA, 19 nt, Artificial Sequence
  Description of Artificial Sequence: Synthetic oligonucleotide
  Antisense strand to SEQ ID NO: 2494178
ucuaucaggccaugccuuc

SEQ ID NO: 2494180 - RNA, 19 nt, Artificial Sequence
  Description of Artificial Sequence: Synthetic oligonucleotide
  Sense strand starting at position 2551 of SEQ ID NO: 1887755
gaaccucauuugucucgua

SEQ ID NO: 2494181 - RNA, 19 nt, Artificial Sequence
  Description of Artificial Sequence: Synthetic oligonucleotide
  Antisense strand to SEQ ID NO: 2494180
uacgagacaaaugagguuc

SEQ ID NO: 2494182 - RNA, 19 nt, Artificial Sequence
  Description of Artificial Sequence: Synthetic oligonucleotide
  Sense strand starting at position 2554 of SEQ ID NO: 1887755
ccucauuugucucguaauu

SEQ ID NO: 2494183 - RNA, 19 nt, Artificial Sequence
  Description of Artificial Sequence: Synthetic oligonucleotide
  Antisense strand to SEQ ID NO: 2494182
aauuacgagacaaaugagg

SEQ ID NO: 2494184 - RNA, 19 nt, Artificial Sequence
  Description of Artificial Sequence: Synthetic oligonucleotide
  Sense strand starting at position 2556 of SEQ ID NO: 1887755
ucauuugucucguaauuug

SEQ ID NO: 2494185 - RNA, 19 nt, Artificial Sequence
  Description of Artificial Sequence: Synthetic oligonucleotide
  Antisense strand to SEQ ID NO: 2494184
caaauuacgagacaaauga

SEQ ID NO: 2494186 - RNA, 19 nt, Artificial Sequence
  Description of Artificial Sequence: Synthetic oligonucleotide
  Sense strand starting at position 2607 of SEQ ID NO: 1887755
uccugucagucugcagaga

SEQ ID NO: 2494187 - RNA, 19 nt, Artificial Sequence
  Description of Artificial Sequence: Synthetic oligonucleotide
  Antisense strand to SEQ ID NO: 2494186
ucucugcagacugacagga

SEQ ID NO: 2494188 - RNA, 19 nt, Artificial Sequence
  Description of Artificial Sequence: Synthetic oligonucleotide
  Sense strand starting at position 2710 of SEQ ID NO: 1887755
uugggucauuuacaacuau

SEQ ID NO: 2494189 - RNA, 19 nt, Artificial Sequence
  Description of Artificial Sequence: Synthetic oligonucleotide
  Antisense strand to SEQ ID NO: 2494188
auaguuguaaaugacccaa

SEQ ID NO: 2494190 - RNA, 19 nt, Artificial Sequence
  Description of Artificial Sequence: Synthetic oligonucleotide
  Sense strand starting at position 3403 of SEQ ID NO: 1887755
ggaugucuuuccucacuuc

SEQ ID NO: 2494191 - RNA, 19 nt, Artificial Sequence
  Description of Artificial Sequence: Synthetic oligonucleotide
  Antisense strand to SEQ ID NO: 2494190
gaagugaggaaagacaucc

SEQ ID NO: 2494192 - RNA, 19 nt, Artificial Sequence
  Description of Artificial Sequence: Synthetic oligonucleotide
  Sense strand starting at position 3970 of SEQ ID NO: 1887755
agccgagaaucucagagau

SEQ ID NO: 2494193 - RNA, 19 nt, Artificial Sequence
  Description of Artificial Sequence: Synthetic oligonucleotide
  Antisense strand to SEQ ID NO: 2494192
aucucugagauucucggcu

SEQ ID NO: 2494194 - RNA, 19 nt, Artificial Sequence
  Description of Artificial Sequence: Synthetic oligonucleotide
  Sense strand starting at position 3972 of SEQ ID NO: 1887755
ccgagaaucucagagauuc

SEQ ID NO: 2494195 - RNA, 19 nt, Artificial Sequence
  Description of Artificial Sequence: Synthetic oligonucleotide
  Antisense strand to SEQ ID NO: 2494194
gaaucucugagauucucgg

SEQ ID NO: 2494196 - RNA, 19 nt, Artificial Sequence
  Description of Artificial Sequence: Synthetic oligonucleotide
  Sense strand starting at position 99 of SEQ ID NO: 1887756
cagcaagaacccuggugaa

SEQ ID NO: 2494197 - RNA, 19 nt, Artificial Sequence
  Description of Artificial Sequence: Synthetic oligonucleotide
  Antisense strand to SEQ ID NO: 2494196
uucaccaggguucuugcug

SEQ ID NO: 2494198 - RNA, 19 nt, Artificial Sequence
  Description of Artificial Sequence: Synthetic oligonucleotide
  Sense strand starting at position 229 of SEQ ID NO: 1887756
aucacuccuuuguuagauu

SEQ ID NO: 2494199 - RNA, 19 nt, Artificial Sequence
  Description of Artificial Sequence: Synthetic oligonucleotide
  Antisense strand to SEQ ID NO: 2494198
aaucuaacaaaggagugau

SEQ ID NO: 2494200 - RNA, 19 nt, Artificial Sequence
  Description of Artificial Sequence: Synthetic oligonucleotide
  Sense strand starting at position 572 of SEQ ID NO: 1887756
ucggaaucgccgucauucu

SEQ ID NO: 2494201 - RNA, 19 nt, Artificial Sequence
  Description of Artificial Sequence: Synthetic oligonucleotide
  Antisense strand to SEQ ID NO: 2494200
agaaugacggcgauuccga

SEQ ID NO: 2494202 - RNA, 19 nt, Artificial Sequence
  Description of Artificial Sequence: Synthetic oligonucleotide
  Sense strand starting at position 665 of SEQ ID NO: 1887756
gcugucauucuagacaauc

SEQ ID NO: 2494203 - RNA, 19 nt, Artificial Sequence
  Description of Artificial Sequence: Synthetic oligonucleotide
  Antisense strand to SEQ ID NO: 2494202
gauugucuagaaugacagc

SEQ ID NO: 2494204 - RNA, 19 nt, Artificial Sequence
  Description of Artificial Sequence: Synthetic oligonucleotide
  Sense strand starting at position 807 of SEQ ID NO: 1887756
aauugaugggccugucaca

SEQ ID NO: 2494205 - RNA, 19 nt, Artificial Sequence
  Description of Artificial Sequence: Synthetic oligonucleotide
  Antisense strand to SEQ ID NO: 2494204
ugugacaggcccaucaauu

SEQ ID NO: 2494206 - RNA, 19 nt, Artificial Sequence
  Description of Artificial Sequence: Synthetic oligonucleotide
  Sense strand starting at position 881 of SEQ ID NO: 1887756
uggcauggcacugauuaag

SEQ ID NO: 2494207 - RNA, 19 nt, Artificial Sequence
  Description of Artificial Sequence: Synthetic oligonucleotide
  Antisense strand to SEQ ID NO: 2494206
cuuaaucagugccaugcca

SEQ ID NO: 2494208 - RNA, 19 nt, Artificial Sequence
  Description of Artificial Sequence: Synthetic oligonucleotide
  Sense strand starting at position 952 of SEQ ID NO: 1887756
uagggucuacccugaguau

SEQ ID NO: 2494209 - RNA, 19 nt, Artificial Sequence
  Description of Artificial Sequence: Synthetic oligonucleotide
  Antisense strand to SEQ ID NO: 2494208
auacucaggguagacccua

SEQ ID NO: 2494210 - RNA, 19 nt, Artificial Sequence
  Description of Artificial Sequence: Synthetic oligonucleotide
  Sense strand starting at position 953 of SEQ ID NO: 1887756
agggucuacccugaguaua

SEQ ID NO: 2494211 - RNA, 19 nt, Artificial Sequence
  Description of Artificial Sequence: Synthetic oligonucleotide
  Antisense strand to SEQ ID NO: 2494210
uauacucaggguagacccu

SEQ ID NO: 2494212 - RNA, 19 nt, Artificial Sequence
  Description of Artificial Sequence: Synthetic oligonucleotide
  Sense strand starting at position 955 of SEQ ID NO: 1887756
ggucuacccugaguauaau

SEQ ID NO: 2494213 - RNA, 19 nt, Artificial Sequence
  Description of Artificial Sequence: Synthetic oligonucleotide
  Antisense strand to SEQ ID NO: 2494212
auuauacucaggguagacc

SEQ ID NO: 2494214 - RNA, 19 nt, Artificial Sequence
  Description of Artificial Sequence: Synthetic oligonucleotide
  Sense strand starting at position 956 of SEQ ID NO: 1887756
gucuacccugaguauaauu

SEQ ID NO: 2494215 - RNA, 19 nt, Artificial Sequence
  Description of Artificial Sequence: Synthetic oligonucleotide
  Antisense strand to SEQ ID NO: 2494214
aauuauacucaggguagac

SEQ ID NO: 2494216 - RNA, 19 nt, Artificial Sequence
  Description of Artificial Sequence: Synthetic oligonucleotide
  Sense strand starting at position 1070 of SEQ ID NO: 1887756
uugcuuucucaugagguua

SEQ ID NO: 2494217 - RNA, 19 nt, Artificial Sequence
  Description of Artificial Sequence: Synthetic oligonucleotide
  Antisense strand to SEQ ID NO: 2494216
uaaccucaugagaaagcaa

SEQ ID NO: 2494218 - RNA, 19 nt, Artificial Sequence
  Description of Artificial Sequence: Synthetic oligonucleotide
  Sense strand starting at position 1075 of SEQ ID NO: 1887756
uucucaugagguuauuaug

SEQ ID NO: 2494219 - RNA, 19 nt, Artificial Sequence
  Description of Artificial Sequence: Synthetic oligonucleotide
  Antisense strand to SEQ ID NO: 2494218
cauaauaaccucaugagaa

SEQ ID NO: 2494220 - RNA, 19 nt, Artificial Sequence
  Description of Artificial Sequence: Synthetic oligonucleotide
  Sense strand starting at position 1083 of SEQ ID NO: 1887756
agguuauuaugagcauuaa

SEQ ID NO: 2494221 - RNA, 19 nt, Artificial Sequence
  Description of Artificial Sequence: Synthetic oligonucleotide
  Antisense strand to SEQ ID NO: 2494220
uuaaugcucauaauaaccu

SEQ ID NO: 2494222 - RNA, 19 nt, Artificial Sequence
  Description of Artificial Sequence: Synthetic oligonucleotide
  Sense strand starting at position 1084 of SEQ ID NO: 1887756
gguuauuaugagcauuaau

SEQ ID NO: 2494223 - RNA, 19 nt, Artificial Sequence
  Description of Artificial Sequence: Synthetic oligonucleotide
  Antisense strand to SEQ ID NO: 2494222
auuaaugcucauaauaacc

SEQ ID NO: 2494224 - RNA, 19 nt, Artificial Sequence
  Description of Artificial Sequence: Synthetic oligonucleotide
  Sense strand starting at position 1352 of SEQ ID NO: 1887756
aacagcugacagugagaaa

SEQ ID NO: 2494225 - RNA, 19 nt, Artificial Sequence
  Description of Artificial Sequence: Synthetic oligonucleotide
  Antisense strand to SEQ ID NO: 2494224
uuucucacugucagcuguu

SEQ ID NO: 2494226 - RNA, 19 nt, Artificial Sequence
  Description of Artificial Sequence: Synthetic oligonucleotide
  Sense strand starting at position 1406 of SEQ ID NO: 1887756
ccugaaggccuauaaccau

SEQ ID NO: 2494227 - RNA, 19 nt, Artificial Sequence
  Description of Artificial Sequence: Synthetic oligonucleotide
  Antisense strand to SEQ ID NO: 2494226
augguuauaggccuucagg

SEQ ID NO: 2494228 - RNA, 19 nt, Artificial Sequence
  Description of Artificial Sequence: Synthetic oligonucleotide
  Sense strand starting at position 1412 of SEQ ID NO: 1887756
ggccuauaaccaugggauu

SEQ ID NO: 2494229 - RNA, 19 nt, Artificial Sequence
  Description of Artificial Sequence: Synthetic oligonucleotide
  Antisense strand to SEQ ID NO: 2494228
aaucccaugguuauaggcc

SEQ ID NO: 2494230 - RNA, 19 nt, Artificial Sequence
  Description of Artificial Sequence: Synthetic oligonucleotide
  Sense strand starting at position 1532 of SEQ ID NO: 1887756
cugagcacugucuacugaa

SEQ ID NO: 2494231 - RNA, 19 nt, Artificial Sequence
  Description of Artificial Sequence: Synthetic oligonucleotide
  Antisense strand to SEQ ID NO: 2494230
uucaguagacagugcucag

SEQ ID NO: 2494232 - RNA, 19 nt, Artificial Sequence
  Description of Artificial Sequence: Synthetic oligonucleotide
  Sense strand starting at position 1542 of SEQ ID NO: 1887756
ucuacugaauugcuggaaa

SEQ ID NO: 2494233 - RNA, 19 nt, Artificial Sequence
  Description of Artificial Sequence: Synthetic oligonucleotide
  Antisense strand to SEQ ID NO: 2494232
uuuccagcaauucaguaga

SEQ ID NO: 2494234 - RNA, 19 nt, Artificial Sequence
  Description of Artificial Sequence: Synthetic oligonucleotide
  Sense strand starting at position 1545 of SEQ ID NO: 1887756
acugaauugcuggaaagca

SEQ ID NO: 2494235 - RNA, 19 nt, Artificial Sequence
  Description of Artificial Sequence: Synthetic oligonucleotide
  Antisense strand to SEQ ID NO: 2494234
ugcuuuccagcaauucagu

SEQ ID NO: 2494236 - RNA, 19 nt, Artificial Sequence
  Description of Artificial Sequence: Synthetic oligonucleotide
  Sense strand starting at position 1606 of SEQ ID NO: 1887756
ccagaucuuuccuugaguu

SEQ ID NO: 2494237 - RNA, 19 nt, Artificial Sequence
  Description of Artificial Sequence: Synthetic oligonucleotide
  Antisense strand to SEQ ID NO: 2494236
aacucaaggaaagaucugg

SEQ ID NO: 2494238 - RNA, 19 nt, Artificial Sequence
  Description of Artificial Sequence: Synthetic oligonucleotide
  Sense strand starting at position 1608 of SEQ ID NO: 1887756
agaucuuuccuugaguuac

SEQ ID NO: 2494239 - RNA, 19 nt, Artificial Sequence
  Description of Artificial Sequence: Synthetic oligonucleotide
  Antisense strand to SEQ ID NO: 2494238
guaacucaaggaaagaucu

SEQ ID NO: 2494240 - RNA, 19 nt, Artificial Sequence
  Description of Artificial Sequence: Synthetic oligonucleotide
  Sense strand starting at position 1682 of SEQ ID NO: 1887756
aaagacauuucuggaagug

SEQ ID NO: 2494241 - RNA, 19 nt, Artificial Sequence
  Description of Artificial Sequence: Synthetic oligonucleotide
  Antisense strand to SEQ ID NO: 2494240
cacuuccagaaaugucuuu

SEQ ID NO: 2494242 - RNA, 19 nt, Artificial Sequence
  Description of Artificial Sequence: Synthetic oligonucleotide
  Sense strand starting at position 1696 of SEQ ID NO: 1887756
aaguguaaccuuggaagca

SEQ ID NO: 2494243 - RNA, 19 nt, Artificial Sequence
  Description of Artificial Sequence: Synthetic oligonucleotide
  Antisense strand to SEQ ID NO: 2494242
ugcuuccaagguuacacuu

SEQ ID NO: 2494244 - RNA, 19 nt, Artificial Sequence
  Description of Artificial Sequence: Synthetic oligonucleotide
  Sense strand starting at position 1740 of SEQ ID NO: 1887756
gaacgagaaucagugccaa

SEQ ID NO: 2494245 - RNA, 19 nt, Artificial Sequence
  Description of Artificial Sequence: Synthetic oligonucleotide
  Antisense strand to SEQ ID NO: 2494244
uuggcacugauucucguuc

SEQ ID NO: 2494246 - RNA, 19 nt, Artificial Sequence
  Description of Artificial Sequence: Synthetic oligonucleotide
  Sense strand starting at position 1798 of SEQ ID NO: 1887756
gguaucuccugaucaagau

SEQ ID NO: 2494247 - RNA, 19 nt, Artificial Sequence
  Description of Artificial Sequence: Synthetic oligonucleotide
  Antisense strand to SEQ ID NO: 2494246
aucuugaucaggagauacc

SEQ ID NO: 2494248 - RNA, 19 nt, Artificial Sequence
  Description of Artificial Sequence: Synthetic oligonucleotide
  Sense strand starting at position 1799 of SEQ ID NO: 1887756
guaucuccugaucaagauu

SEQ ID NO: 2494249 - RNA, 19 nt, Artificial Sequence
  Description of Artificial Sequence: Synthetic oligonucleotide
  Antisense strand to SEQ ID NO: 2494248
aaucuugaucaggagauac

SEQ ID NO: 2494250 - RNA, 19 nt, Artificial Sequence
  Description of Artificial Sequence: Synthetic oligonucleotide
  Sense strand starting at position 1839 of SEQ ID NO: 1887756
uuucuaaguccugaaguua

SEQ ID NO: 2494251 - RNA, 19 nt, Artificial Sequence
  Description of Artificial Sequence: Synthetic oligonucleotide
  Antisense strand to SEQ ID NO: 2494250
uaacuucaggacuuagaaa

SEQ ID NO: 2494252 - RNA, 19 nt, Artificial Sequence
  Description of Artificial Sequence: Synthetic oligonucleotide
  Sense strand starting at position 1993 of SEQ ID NO: 1887756
caauguguccuggaacgaa

SEQ ID NO: 2494253 - RNA, 19 nt, Artificial Sequence
  Description of Artificial Sequence: Synthetic oligonucleotide
  Antisense strand to SEQ ID NO: 2494252
uucguuccaggacacauug

SEQ ID NO: 2494254 - RNA, 19 nt, Artificial Sequence
  Description of Artificial Sequence: Synthetic oligonucleotide
  Sense strand starting at position 2008 of SEQ ID NO: 1887756
cgaaauuugcacggugguu

SEQ ID NO: 2494255 - RNA, 19 nt, Artificial Sequence
  Description of Artificial Sequence: Synthetic oligonucleotide
  Antisense strand to SEQ ID NO: 2494254
aaccaccgugcaaauuucg

SEQ ID NO: 2494256 - RNA, 19 nt, Artificial Sequence
  Description of Artificial Sequence: Synthetic oligonucleotide
  Sense strand starting at position 2010 of SEQ ID NO: 1887756
aaauuugcacggugguuua

SEQ ID NO: 2494257 - RNA, 19 nt, Artificial Sequence
  Description of Artificial Sequence: Synthetic oligonucleotide
  Antisense strand to SEQ ID NO: 2494256
uaaaccaccgugcaaauuu

SEQ ID NO: 2494258 - RNA, 19 nt, Artificial Sequence
  Description of Artificial Sequence: Synthetic oligonucleotide
  Sense strand starting at position 2095 of SEQ ID NO: 1887756
ccucaaguagaugguuuaa

SEQ ID NO: 2494259 - RNA, 19 nt, Artificial Sequence
  Description of Artificial Sequence: Synthetic oligonucleotide
  Antisense strand to SEQ ID NO: 2494258
uuaaaccaucuacuugagg

SEQ ID NO: 2494260 - RNA, 19 nt, Artificial Sequence
  Description of Artificial Sequence: Synthetic oligonucleotide
  Sense strand starting at position 2118 of SEQ ID NO: 1887756
acaaucuugcauugagaug

SEQ ID NO: 2494261 - RNA, 19 nt, Artificial Sequence
  Description of Artificial Sequence: Synthetic oligonucleotide
  Antisense strand to SEQ ID NO: 2494260
caucucaaugcaagauugu

SEQ ID NO: 2494262 - RNA, 19 nt, Artificial Sequence
  Description of Artificial Sequence: Synthetic oligonucleotide
  Sense strand starting at position 2240 of SEQ ID NO: 1887756
agguucuaucuagaucagu

SEQ ID NO: 2494263 - RNA, 19 nt, Artificial Sequence
  Description of Artificial Sequence: Synthetic oligonucleotide
  Antisense strand to SEQ ID NO: 2494262
acugaucuagauagaaccu

SEQ ID NO: 2494264 - RNA, 19 nt, Artificial Sequence
  Description of Artificial Sequence: Synthetic oligonucleotide
  Sense strand starting at position 2271 of SEQ ID NO: 1887756
cugaauaaaucaucuccgu

SEQ ID NO: 2494265 - RNA, 19 nt, Artificial Sequence
  Description of Artificial Sequence: Synthetic oligonucleotide
  Antisense strand to SEQ ID NO: 2494264
acggagaugauuuauucag

SEQ ID NO: 2494266 - RNA, 19 nt, Artificial Sequence
  Description of Artificial Sequence: Synthetic oligonucleotide
  Sense strand starting at position 2364 of SEQ ID NO: 1887756
ggaguuaacaguugaccac

SEQ ID NO: 2494267 - RNA, 19 nt, Artificial Sequence
  Description of Artificial Sequence: Synthetic oligonucleotide
  Antisense strand to SEQ ID NO: 2494266
guggucaacuguuaacucc

SEQ ID NO: 2494268 - RNA, 19 nt, Artificial Sequence
  Description of Artificial Sequence: Synthetic oligonucleotide
  Sense strand starting at position 2429 of SEQ ID NO: 1887756
ugccaugucccugaaagaa

SEQ ID NO: 2494269 - RNA, 19 nt, Artificial Sequence
  Description of Artificial Sequence: Synthetic oligonucleotide
  Antisense strand to SEQ ID NO: 2494268
uucuuucagggacauggca

SEQ ID NO: 2494270 - RNA, 19 nt, Artificial Sequence
  Description of Artificial Sequence: Synthetic oligonucleotide
  Sense strand starting at position 2534 of SEQ ID NO: 1887756
gguggaauuuagcaacaac

SEQ ID NO: 2494271 - RNA, 19 nt, Artificial Sequence
  Description of Artificial Sequence: Synthetic oligonucleotide
  Antisense strand to SEQ ID NO: 2494270
guuguugcuaaauuccacc

SEQ ID NO: 2494272 - RNA, 19 nt, Artificial Sequence
  Description of Artificial Sequence: Synthetic oligonucleotide
  Sense strand starting at position 3589 of SEQ ID NO: 1887756
gcccuuuguccugcaguca

SEQ ID NO: 2494273 - RNA, 19 nt, Artificial Sequence
  Description of Artificial Sequence: Synthetic oligonucleotide
  Antisense strand to SEQ ID NO: 2494272
ugacugcaggacaaagggc

SEQ ID NO: 2494274 - RNA, 19 nt, Artificial Sequence
  Description of Artificial Sequence: Synthetic oligonucleotide
  Sense strand starting at position 3695 of SEQ ID NO: 1887756
gagaaucuuccagguccua

SEQ ID NO: 2494275 - RNA, 19 nt, Artificial Sequence
  Description of Artificial Sequence: Synthetic oligonucleotide
  Antisense strand to SEQ ID NO: 2494274
uaggaccuggaagauucuc

SEQ ID NO: 2494276 - RNA, 19 nt, Artificial Sequence
  Description of Artificial Sequence: Synthetic oligonucleotide
  Sense strand starting at position 20 of SEQ ID NO: 1887757
gguucugggagguauguaa

SEQ ID NO: 2494277 - RNA, 19 nt, Artificial Sequence
  Description of Artificial Sequence: Synthetic oligonucleotide
  Antisense strand to SEQ ID NO: 2494276
uuacauaccucccagaacc

SEQ ID NO: 2494278 - RNA, 19 nt, Artificial Sequence
  Description of Artificial Sequence: Synthetic oligonucleotide
  Sense strand starting at position 41 of SEQ ID NO: 1887757
acuguugcuccuggaagga

SEQ ID NO: 2494279 - RNA, 19 nt, Artificial Sequence
  Description of Artificial Sequence: Synthetic oligonucleotide
  Antisense strand to SEQ ID NO: 2494278
uccuuccaggagcaacagu

SEQ ID NO: 2494280 - RNA, 19 nt, Artificial Sequence
  Description of Artificial Sequence: Synthetic oligonucleotide
  Sense strand starting at position 135 of SEQ ID NO: 1887757
uuaacagaucugcaaguga

SEQ ID NO: 2494281 - RNA, 19 nt, Artificial Sequence
  Description of Artificial Sequence: Synthetic oligonucleotide
  Antisense strand to SEQ ID NO: 2494280
ucacuugcagaucuguuaa

SEQ ID NO: 2494282 - RNA, 19 nt, Artificial Sequence
  Description of Artificial Sequence: Synthetic oligonucleotide
  Sense strand starting at position 290 of SEQ ID NO: 1887757
acucaauccucagggaggu

SEQ ID NO: 2494283 - RNA, 19 nt, Artificial Sequence
  Description of Artificial Sequence: Synthetic oligonucleotide
  Antisense strand to SEQ ID NO: 2494282
accucccugaggauugagu

SEQ ID NO: 2494284 - RNA, 19 nt, Artificial Sequence
  Description of Artificial Sequence: Synthetic oligonucleotide
  Sense strand starting at position 338 of SEQ ID NO: 1887757
gcuccaagucagcguuaau

SEQ ID NO: 2494285 - RNA, 19 nt, Artificial Sequence
  Description of Artificial Sequence: Synthetic oligonucleotide
  Antisense strand to SEQ ID NO: 2494284
auuaacgcugacuuggagc

SEQ ID NO: 2494286 - RNA, 19 nt, Artificial Sequence
  Description of Artificial Sequence: Synthetic oligonucleotide
  Sense strand starting at position 341 of SEQ ID NO: 1887757
ccaagucagcguuaaugau

SEQ ID NO: 2494287 - RNA, 19 nt, Artificial Sequence
  Description of Artificial Sequence: Synthetic oligonucleotide
  Antisense strand to SEQ ID NO: 2494286
aucauuaacgcugacuugg

SEQ ID NO: 2494288 - RNA, 19 nt, Artificial Sequence
  Description of Artificial Sequence: Synthetic oligonucleotide
  Sense strand starting at position 451 of SEQ ID NO: 1887757
ggccaaagcuuucuaccuu

SEQ ID NO: 2494289 - RNA, 19 nt, Artificial Sequence
  Description of Artificial Sequence: Synthetic oligonucleotide
  Antisense strand to SEQ ID NO: 2494288
aagguagaaagcuuuggcc

SEQ ID NO: 2494290 - RNA, 19 nt, Artificial Sequence
  Description of Artificial Sequence: Synthetic oligonucleotide
  Sense strand starting at position 486 of SEQ ID NO: 1887757
ggaguacccgcugaagagu

SEQ ID NO: 2494291 - RNA, 19 nt, Artificial Sequence
  Description of Artificial Sequence: Synthetic oligonucleotide
  Antisense strand to SEQ ID NO: 2494290
acucuucagcggguacucc

SEQ ID NO: 2494292 - RNA, 19 nt, Artificial Sequence
  Description of Artificial Sequence: Synthetic oligonucleotide
  Sense strand starting at position 525 of SEQ ID NO: 1887757
gcaucucacccuuaguacu

SEQ ID NO: 2494293 - RNA, 19 nt, Artificial Sequence
  Description of Artificial Sequence: Synthetic oligonucleotide
  Antisense strand to SEQ ID NO: 2494292
aguacuaagggugagaugc

SEQ ID NO: 2494294 - RNA, 19 nt, Artificial Sequence
  Description of Artificial Sequence: Synthetic oligonucleotide
  Sense strand starting at position 531 of SEQ ID NO: 1887757
cacccuuaguacuagagga

SEQ ID NO: 2494295 - RNA, 19 nt, Artificial Sequence
  Description of Artificial Sequence: Synthetic oligonucleotide
  Antisense strand to SEQ ID NO: 2494294
uccucuaguacuaagggug

SEQ ID NO: 2494296 - RNA, 19 nt, Artificial Sequence
  Description of Artificial Sequence: Synthetic oligonucleotide
  Sense strand starting at position 635 of SEQ ID NO: 1887757
gugguacugugccuaaacu

SEQ ID NO: 2494297 - RNA, 19 nt, Artificial Sequence
  Description of Artificial Sequence: Synthetic oligonucleotide
  Antisense strand to SEQ ID NO: 2494296
aguuuaggcacaguaccac

SEQ ID NO: 2494298 - RNA, 19 nt, Artificial Sequence
  Description of Artificial Sequence: Synthetic oligonucleotide
  Sense strand starting at position 636 of SEQ ID NO: 1887757
ugguacugugccuaaacuu

SEQ ID NO: 2494299 - RNA, 19 nt, Artificial Sequence
  Description of Artificial Sequence: Synthetic oligonucleotide
  Antisense strand to SEQ ID NO: 2494298
aaguuuaggcacaguacca

SEQ ID NO: 2494300 - RNA, 19 nt, Artificial Sequence
  Description of Artificial Sequence: Synthetic oligonucleotide
  Sense strand starting at position 748 of SEQ ID NO: 1887757
gccagaaucucccuagcca

SEQ ID NO: 2494301 - RNA, 19 nt, Artificial Sequence
  Description of Artificial Sequence: Synthetic oligonucleotide
  Antisense strand to SEQ ID NO: 2494300
uggcuagggagauucuggc

SEQ ID NO: 2494302 - RNA, 19 nt, Artificial Sequence
  Description of Artificial Sequence: Synthetic oligonucleotide
  Sense strand starting at position 768 of SEQ ID NO: 1887757
ccaagauuaugcgauccag

SEQ ID NO: 2494303 - RNA, 19 nt, Artificial Sequence
  Description of Artificial Sequence: Synthetic oligonucleotide
  Antisense strand to SEQ ID NO: 2494302
cuggaucgcauaaucuugg

SEQ ID NO: 2494304 - RNA, 19 nt, Artificial Sequence
  Description of Artificial Sequence: Synthetic oligonucleotide
  Sense strand starting at position 811 of SEQ ID NO: 1887757
uccagauucugccucagga

SEQ ID NO: 2494305 - RNA, 19 nt, Artificial Sequence
  Description of Artificial Sequence: Synthetic oligonucleotide
  Antisense strand to SEQ ID NO: 2494304
uccugaggcagaaucugga

SEQ ID NO: 2494306 - RNA, 19 nt, Artificial Sequence
  Description of Artificial Sequence: Synthetic oligonucleotide
  Sense strand starting at position 821 of SEQ ID NO: 1887757
gccucaggaugucuuugua

SEQ ID NO: 2494307 - RNA, 19 nt, Artificial Sequence
  Description of Artificial Sequence: Synthetic oligonucleotide
  Antisense strand to SEQ ID NO: 2494306
uacaaagacauccugaggc

SEQ ID NO: 2494308 - RNA, 19 nt, Artificial Sequence
  Description of Artificial Sequence: Synthetic oligonucleotide
  Sense strand starting at position 956 of SEQ ID NO: 1887757
gguguaggacccugcagau

SEQ ID NO: 2494309 - RNA, 19 nt, Artificial Sequence
  Description of Artificial Sequence: Synthetic oligonucleotide
  Antisense strand to SEQ ID NO: 2494308
aucugcaggguccuacacc

SEQ ID NO: 2494310 - RNA, 19 nt, Artificial Sequence
  Description of Artificial Sequence: Synthetic oligonucleotide
  Sense strand starting at position 1039 of SEQ ID NO: 1887757
gaucauucccaucgcuaga

SEQ ID NO: 2494311 - RNA, 19 nt, Artificial Sequence
  Description of Artificial Sequence: Synthetic oligonucleotide
  Antisense strand to SEQ ID NO: 2494310
ucuagcgaugggaaugauc

SEQ ID NO: 2494312 - RNA, 19 nt, Artificial Sequence
  Description of Artificial Sequence: Synthetic oligonucleotide
  Sense strand starting at position 1098 of SEQ ID NO: 1887757
gguuucagucaggaguaga

SEQ ID NO: 2494313 - RNA, 19 nt, Artificial Sequence
  Description of Artificial Sequence: Synthetic oligonucleotide
  Antisense strand to SEQ ID NO: 2494312
ucuacuccugacugaaacc

SEQ ID NO: 2494314 - RNA, 19 nt, Artificial Sequence
  Description of Artificial Sequence: Synthetic oligonucleotide
  Sense strand starting at position 1109 of SEQ ID NO: 1887757
ggaguagauucagcagcaa

SEQ ID NO: 2494315 - RNA, 19 nt, Artificial Sequence
  Description of Artificial Sequence: Synthetic oligonucleotide
  Antisense strand to SEQ ID NO: 2494314
uugcugcugaaucuacucc

SEQ ID NO: 2494316 - RNA, 19 nt, Artificial Sequence
  Description of Artificial Sequence: Synthetic oligonucleotide
  Sense strand starting at position 1158 of SEQ ID NO: 1887757
gacagaugcugagagcaua

SEQ ID NO: 2494317 - RNA, 19 nt, Artificial Sequence
  Description of Artificial Sequence: Synthetic oligonucleotide
  Antisense strand to SEQ ID NO: 2494316
uaugcucucagcaucuguc

SEQ ID NO: 2494318 - RNA, 19 nt, Artificial Sequence
  Description of Artificial Sequence: Synthetic oligonucleotide
  Sense strand starting at position 1765 of SEQ ID NO: 1887757
uuuguuaguuuaccucaau

SEQ ID NO: 2494319 - RNA, 19 nt, Artificial Sequence
  Description of Artificial Sequence: Synthetic oligonucleotide
  Antisense strand to SEQ ID NO: 2494318
auugagguaaacuaacaaa

SEQ ID NO: 2494320 - RNA, 19 nt, Artificial Sequence
  Description of Artificial Sequence: Synthetic oligonucleotide
  Sense strand starting at position 1766 of SEQ ID NO: 1887757
uuguuaguuuaccucaauc

SEQ ID NO: 2494321 - RNA, 19 nt, Artificial Sequence
  Description of Artificial Sequence: Synthetic oligonucleotide
  Antisense strand to SEQ ID NO: 2494320
gauugagguaaacuaacaa

SEQ ID NO: 2494322 - RNA, 19 nt, Artificial Sequence
  Description of Artificial Sequence: Synthetic oligonucleotide
  Sense strand starting at position 1768 of SEQ ID NO: 1887757
guuaguuuaccucaaucag

SEQ ID NO: 2494323 - RNA, 19 nt, Artificial Sequence
  Description of Artificial Sequence: Synthetic oligonucleotide
  Antisense strand to SEQ ID NO: 2494322
cugauugagguaaacuaac

SEQ ID NO: 2494324 - RNA, 19 nt, Artificial Sequence
  Description of Artificial Sequence: Synthetic oligonucleotide
  Sense strand starting at position 2001 of SEQ ID NO: 1887757
ugaagugaccgcgagcaaa

SEQ ID NO: 2494325 - RNA, 19 nt, Artificial Sequence
  Description of Artificial Sequence: Synthetic oligonucleotide
  Antisense strand to SEQ ID NO: 2494324
uuugcucgcggucacuuca

SEQ ID NO: 2494326 - RNA, 19 nt, Artificial Sequence
  Description of Artificial Sequence: Synthetic oligonucleotide
  Sense strand starting at position 2039 of SEQ ID NO: 1887757
acucaaagauggcgacuaa

SEQ ID NO: 2494327 - RNA, 19 nt, Artificial Sequence
  Description of Artificial Sequence: Synthetic oligonucleotide
  Antisense strand to SEQ ID NO: 2494326
uuagucgccaucuuugagu

SEQ ID NO: 2494328 - RNA, 19 nt, Artificial Sequence
  Description of Artificial Sequence: Synthetic oligonucleotide
  Sense strand starting at position 2110 of SEQ ID NO: 1887757
gccgaagcgucaucuccau

SEQ ID NO: 2494329 - RNA, 19 nt, Artificial Sequence
  Description of Artificial Sequence: Synthetic oligonucleotide
  Antisense strand to SEQ ID NO: 2494328
auggagaugacgcuucggc

SEQ ID NO: 2494330 - RNA, 19 nt, Artificial Sequence
  Description of Artificial Sequence: Synthetic oligonucleotide
  Sense strand starting at position 2114 of SEQ ID NO: 1887757
aagcgucaucuccaugaac

SEQ ID NO: 2494331 - RNA, 19 nt, Artificial Sequence
  Description of Artificial Sequence: Synthetic oligonucleotide
  Antisense strand to SEQ ID NO: 2494330
guucauggagaugacgcuu

SEQ ID NO: 2494332 - RNA, 19 nt, Artificial Sequence
  Description of Artificial Sequence: Synthetic oligonucleotide
  Sense strand starting at position 2327 of SEQ ID NO: 1887757
ggaagacgauccuccagua

SEQ ID NO: 2494333 - RNA, 19 nt, Artificial Sequence
  Description of Artificial Sequence: Synthetic oligonucleotide
  Antisense strand to SEQ ID NO: 2494332
uacuggaggaucgucuucc

SEQ ID NO: 2494334 - RNA, 19 nt, Artificial Sequence
  Description of Artificial Sequence: Synthetic oligonucleotide
  Sense strand starting at position 3111 of SEQ ID NO: 1887757
gguauguggugguuuagga

SEQ ID NO: 2494335 - RNA, 19 nt, Artificial Sequence
  Description of Artificial Sequence: Synthetic oligonucleotide
  Antisense strand to SEQ ID NO: 2494334
uccuaaaccaccacauacc

SEQ ID NO: 2494336 - RNA, 19 nt, Artificial Sequence
  Description of Artificial Sequence: Synthetic oligonucleotide
  Sense strand starting at position 3329 of SEQ ID NO: 1887757
cugggaaucucugagucaa

SEQ ID NO: 2494337 - RNA, 19 nt, Artificial Sequence
  Description of Artificial Sequence: Synthetic oligonucleotide
  Antisense strand to SEQ ID NO: 2494336
uugacucagagauucccag

SEQ ID NO: 2494338 - RNA, 19 nt, Artificial Sequence
  Description of Artificial Sequence: Synthetic oligonucleotide
  Sense strand starting at position 3331 of SEQ ID NO: 1887757
gggaaucucugagucaaac

SEQ ID NO: 2494339 - RNA, 19 nt, Artificial Sequence
  Description of Artificial Sequence: Synthetic oligonucleotide
  Antisense strand to SEQ ID NO: 2494338
guuugacucagagauuccc

SEQ ID NO: 2494340 - RNA, 19 nt, Artificial Sequence
  Description of Artificial Sequence: Synthetic oligonucleotide
  Sense strand starting at position 3341 of SEQ ID NO: 1887757
gagucaaacgggugaagua

SEQ ID NO: 2494341 - RNA, 19 nt, Artificial Sequence
  Description of Artificial Sequence: Synthetic oligonucleotide
  Antisense strand to SEQ ID NO: 2494340
uacuucacccguuugacuc

SEQ ID NO: 2494342 - RNA, 19 nt, Artificial Sequence
  Description of Artificial Sequence: Synthetic oligonucleotide
  Sense strand starting at position 3438 of SEQ ID NO: 1887757
guuaaugaguaccagggau

SEQ ID NO: 2494343 - RNA, 19 nt, Artificial Sequence
  Description of Artificial Sequence: Synthetic oligonucleotide
  Antisense strand to SEQ ID NO: 2494342
aucccugguacucauuaac

SEQ ID NO: 2494344 - RNA, 19 nt, Artificial Sequence
  Description of Artificial Sequence: Synthetic oligonucleotide
  Sense strand starting at position 3484 of SEQ ID NO: 1887757
gcuauugugcugugaaccu

SEQ ID NO: 2494345 - RNA, 19 nt, Artificial Sequence
  Description of Artificial Sequence: Synthetic oligonucleotide
  Antisense strand to SEQ ID NO: 2494344
agguucacagcacaauagc

SEQ ID NO: 2494346 - RNA, 19 nt, Artificial Sequence
  Description of Artificial Sequence: Synthetic oligonucleotide
  Sense strand starting at position 3567 of SEQ ID NO: 1887757
gaaagcugggucugagaga

SEQ ID NO: 2494347 - RNA, 19 nt, Artificial Sequence
  Description of Artificial Sequence: Synthetic oligonucleotide
  Antisense strand to SEQ ID NO: 2494346
ucucucagacccagcuuuc

SEQ ID NO: 2494348 - RNA, 19 nt, Artificial Sequence
  Description of Artificial Sequence: Synthetic oligonucleotide
  Sense strand starting at position 3628 of SEQ ID NO: 1887757
ugggcaggaucuuugaguu

SEQ ID NO: 2494349 - RNA, 19 nt, Artificial Sequence
  Description of Artificial Sequence: Synthetic oligonucleotide
  Antisense strand to SEQ ID NO: 2494348
aacucaaagauccugccca

SEQ ID NO: 2494350 - RNA, 19 nt, Artificial Sequence
  Description of Artificial Sequence: Synthetic oligonucleotide
  Sense strand starting at position 3635 of SEQ ID NO: 1887757
gaucuuugaguuuggguga

SEQ ID NO: 2494351 - RNA, 19 nt, Artificial Sequence
  Description of Artificial Sequence: Synthetic oligonucleotide
  Antisense strand to SEQ ID NO: 2494350
ucacccaaacucaaagauc

SEQ ID NO: 2494352 - RNA, 19 nt, Artificial Sequence
  Description of Artificial Sequence: Synthetic oligonucleotide
  Sense strand starting at position 3638 of SEQ ID NO: 1887757
cuuugaguuugggugaaca

SEQ ID NO: 2494353 - RNA, 19 nt, Artificial Sequence
  Description of Artificial Sequence: Synthetic oligonucleotide
  Antisense strand to SEQ ID NO: 2494352
uguucacccaaacucaaag

SEQ ID NO: 2494354 - RNA, 19 nt, Artificial Sequence
  Description of Artificial Sequence: Synthetic oligonucleotide
  Sense strand starting at position 3733 of SEQ ID NO: 1887757
gcauuugggagcuguggau

SEQ ID NO: 2494355 - RNA, 19 nt, Artificial Sequence
  Description of Artificial Sequence: Synthetic oligonucleotide
  Antisense strand to SEQ ID NO: 2494354
auccacagcucccaaaugc

SEQ ID NO: 2494356 - RNA, 19 nt, Artificial Sequence
  Description of Artificial Sequence: Synthetic oligonucleotide
  Sense strand starting at position 83 of SEQ ID NO: 1887758
gaaccuguuuccuucugga

SEQ ID NO: 2494357 - RNA, 19 nt, Artificial Sequence
  Description of Artificial Sequence: Synthetic oligonucleotide
  Antisense strand to SEQ ID NO: 2494356
uccagaaggaaacagguuc

SEQ ID NO: 2494358 - RNA, 19 nt, Artificial Sequence
  Description of Artificial Sequence: Synthetic oligonucleotide
  Sense strand starting at position 119 of SEQ ID NO: 1887758
cuaacacucucagagaugu

SEQ ID NO: 2494359 - RNA, 19 nt, Artificial Sequence
  Description of Artificial Sequence: Synthetic oligonucleotide
  Antisense strand to SEQ ID NO: 2494358
acaucucugagaguguuag

SEQ ID NO: 2494360 - RNA, 19 nt, Artificial Sequence
  Description of Artificial Sequence: Synthetic oligonucleotide
  Sense strand starting at position 178 of SEQ ID NO: 1887758
ggagguagguuugauuugu

SEQ ID NO: 2494361 - RNA, 19 nt, Artificial Sequence
  Description of Artificial Sequence: Synthetic oligonucleotide
  Antisense strand to SEQ ID NO: 2494360
acaaaucaaaccuaccucc

SEQ ID NO: 2494362 - RNA, 19 nt, Artificial Sequence
  Description of Artificial Sequence: Synthetic oligonucleotide
  Sense strand starting at position 182 of SEQ ID NO: 1887758
guagguuugauuugugauc

SEQ ID NO: 2494363 - RNA, 19 nt, Artificial Sequence
  Description of Artificial Sequence: Synthetic oligonucleotide
  Antisense strand to SEQ ID NO: 2494362
gaucacaaaucaaaccuac

SEQ ID NO: 2494364 - RNA, 19 nt, Artificial Sequence
  Description of Artificial Sequence: Synthetic oligonucleotide
  Sense strand starting at position 184 of SEQ ID NO: 1887758
agguuugauuugugaucuc

SEQ ID NO: 2494365 - RNA, 19 nt, Artificial Sequence
  Description of Artificial Sequence: Synthetic oligonucleotide
  Antisense strand to SEQ ID NO: 2494364
gagaucacaaaucaaaccu

SEQ ID NO: 2494366 - RNA, 19 nt, Artificial Sequence
  Description of Artificial Sequence: Synthetic oligonucleotide
  Sense strand starting at position 392 of SEQ ID NO: 1887758
cucagcaugucucugucau

SEQ ID NO: 2494367 - RNA, 19 nt, Artificial Sequence
  Description of Artificial Sequence: Synthetic oligonucleotide
  Antisense strand to SEQ ID NO: 2494366
augacagagacaugcugag

SEQ ID NO: 2494368 - RNA, 19 nt, Artificial Sequence
  Description of Artificial Sequence: Synthetic oligonucleotide
  Sense strand starting at position 393 of SEQ ID NO: 1887758
ucagcaugucucugucauc

SEQ ID NO: 2494369 - RNA, 19 nt, Artificial Sequence
  Description of Artificial Sequence: Synthetic oligonucleotide
  Antisense strand to SEQ ID NO: 2494368
gaugacagagacaugcuga

SEQ ID NO: 2494370 - RNA, 19 nt, Artificial Sequence
  Description of Artificial Sequence: Synthetic oligonucleotide
  Sense strand starting at position 398 of SEQ ID NO: 1887758
augucucugucaucccuau

SEQ ID NO: 2494371 - RNA, 19 nt, Artificial Sequence
  Description of Artificial Sequence: Synthetic oligonucleotide
  Antisense strand to SEQ ID NO: 2494370
auagggaugacagagacau

SEQ ID NO: 2494372 - RNA, 19 nt, Artificial Sequence
  Description of Artificial Sequence: Synthetic oligonucleotide
  Sense strand starting at position 410 of SEQ ID NO: 1887758
ucccuauuacucgaggauc

SEQ ID NO: 2494373 - RNA, 19 nt, Artificial Sequence
  Description of Artificial Sequence: Synthetic oligonucleotide
  Antisense strand to SEQ ID NO: 2494372
gauccucgaguaauaggga

SEQ ID NO: 2494374 - RNA, 19 nt, Artificial Sequence
  Description of Artificial Sequence: Synthetic oligonucleotide
  Sense strand starting at position 412 of SEQ ID NO: 1887758
ccuauuacucgaggaucac

SEQ ID NO: 2494375 - RNA, 19 nt, Artificial Sequence
  Description of Artificial Sequence: Synthetic oligonucleotide
  Antisense strand to SEQ ID NO: 2494374
gugauccucgaguaauagg

SEQ ID NO: 2494376 - RNA, 19 nt, Artificial Sequence
  Description of Artificial Sequence: Synthetic oligonucleotide
  Sense strand starting at position 471 of SEQ ID NO: 1887758
cccugucucucccuguuau

SEQ ID NO: 2494377 - RNA, 19 nt, Artificial Sequence
  Description of Artificial Sequence: Synthetic oligonucleotide
  Antisense strand to SEQ ID NO: 2494376
auaacagggagagacaggg

SEQ ID NO: 2494378 - RNA, 19 nt, Artificial Sequence
  Description of Artificial Sequence: Synthetic oligonucleotide
  Sense strand starting at position 857 of SEQ ID NO: 1887758
cugagaccuccacagucuu

SEQ ID NO: 2494379 - RNA, 19 nt, Artificial Sequence
  Description of Artificial Sequence: Synthetic oligonucleotide
  Antisense strand to SEQ ID NO: 2494378
aagacuguggaggucucag

SEQ ID NO: 2494380 - RNA, 19 nt, Artificial Sequence
  Description of Artificial Sequence: Synthetic oligonucleotide
  Sense strand starting at position 1307 of SEQ ID NO: 1887758
ccuuccucgccucaagaua

SEQ ID NO: 2494381 - RNA, 19 nt, Artificial Sequence
  Description of Artificial Sequence: Synthetic oligonucleotide
  Antisense strand to SEQ ID NO: 2494380
uaucuugaggcgaggaagg

SEQ ID NO: 2494382 - RNA, 19 nt, Artificial Sequence
  Description of Artificial Sequence: Synthetic oligonucleotide
  Sense strand starting at position 1660 of SEQ ID NO: 1887758
gcuuccuucccggaauugu

SEQ ID NO: 2494383 - RNA, 19 nt, Artificial Sequence
  Description of Artificial Sequence: Synthetic oligonucleotide
  Antisense strand to SEQ ID NO: 2494382
acaauuccgggaaggaagc

SEQ ID NO: 2494384 - RNA, 19 nt, Artificial Sequence
  Description of Artificial Sequence: Synthetic oligonucleotide
  Sense strand starting at position 2218 of SEQ ID NO: 1887758
uugacaguucugcgcagaa

SEQ ID NO: 2494385 - RNA, 19 nt, Artificial Sequence
  Description of Artificial Sequence: Synthetic oligonucleotide
  Antisense strand to SEQ ID NO: 2494384
uucugcgcagaacugucaa

SEQ ID NO: 2494386 - RNA, 19 nt, Artificial Sequence
  Description of Artificial Sequence: Synthetic oligonucleotide
  Sense strand starting at position 2220 of SEQ ID NO: 1887758
gacaguucugcgcagaacu

SEQ ID NO: 2494387 - RNA, 19 nt, Artificial Sequence
  Description of Artificial Sequence: Synthetic oligonucleotide
  Antisense strand to SEQ ID NO: 2494386
aguucugcgcagaacuguc

SEQ ID NO: 2494388 - RNA, 19 nt, Artificial Sequence
  Description of Artificial Sequence: Synthetic oligonucleotide
  Sense strand starting at position 2222 of SEQ ID NO: 1887758
caguucugcgcagaacuua

SEQ ID NO: 2494389 - RNA, 19 nt, Artificial Sequence
  Description of Artificial Sequence: Synthetic oligonucleotide
  Antisense strand to SEQ ID NO: 2494388
uaaguucugcgcagaacug

SEQ ID NO: 2494390 - RNA, 19 nt, Artificial Sequence
  Description of Artificial Sequence: Synthetic oligonucleotide
  Sense strand starting at position 2391 of SEQ ID NO: 1887758
uuaagagguucucuaacuc

SEQ ID NO: 2494391 - RNA, 19 nt, Artificial Sequence
  Description of Artificial Sequence: Synthetic oligonucleotide
  Antisense strand to SEQ ID NO: 2494390
gaguuagagaaccucuuaa

SEQ ID NO: 2494392 - RNA, 19 nt, Artificial Sequence
  Description of Artificial Sequence: Synthetic oligonucleotide
  Sense strand starting at position 2838 of SEQ ID NO: 1887758
ggaguuugagucuaguuca

SEQ ID NO: 2494393 - RNA, 19 nt, Artificial Sequence
  Description of Artificial Sequence: Synthetic oligonucleotide
  Antisense strand to SEQ ID NO: 2494392
ugaacuagacucaaacucc

SEQ ID NO: 2494394 - RNA, 19 nt, Artificial Sequence
  Description of Artificial Sequence: Synthetic oligonucleotide
  Sense strand starting at position 2841 of SEQ ID NO: 1887758
guuugagucuaguucaagu

SEQ ID NO: 2494395 - RNA, 19 nt, Artificial Sequence
  Description of Artificial Sequence: Synthetic oligonucleotide
  Antisense strand to SEQ ID NO: 2494394
acuugaacuagacucaaac

SEQ ID NO: 2494396 - RNA, 19 nt, Artificial Sequence
  Description of Artificial Sequence: Synthetic oligonucleotide
  Sense strand starting at position 2941 of SEQ ID NO: 1887758
uugaguugcugguuucuga

SEQ ID NO: 2494397 - RNA, 19 nt, Artificial Sequence
  Description of Artificial Sequence: Synthetic oligonucleotide
  Antisense strand to SEQ ID NO: 2494396
ucagaaaccagcaacucaa

SEQ ID NO: 2494398 - RNA, 19 nt, Artificial Sequence
  Description of Artificial Sequence: Synthetic oligonucleotide
  Sense strand starting at position 3082 of SEQ ID NO: 1887758
ggaaguauuccacacgugu

SEQ ID NO: 2494399 - RNA, 19 nt, Artificial Sequence
  Description of Artificial Sequence: Synthetic oligonucleotide
  Antisense strand to SEQ ID NO: 2494398
acacguguggaauacuucc

SEQ ID NO: 2494400 - RNA, 19 nt, Artificial Sequence
  Description of Artificial Sequence: Synthetic oligonucleotide
  Sense strand starting at position 3228 of SEQ ID NO: 1887758
augagccuauggucauaua

SEQ ID NO: 2494401 - RNA, 19 nt, Artificial Sequence
  Description of Artificial Sequence: Synthetic oligonucleotide
  Antisense strand to SEQ ID NO: 2494400
uauaugaccauaggcucau

SEQ ID NO: 2494402 - RNA, 19 nt, Artificial Sequence
  Description of Artificial Sequence: Synthetic oligonucleotide
  Sense strand starting at position 3284 of SEQ ID NO: 1887758
gacaaauaguuugugcaga

SEQ ID NO: 2494403 - RNA, 19 nt, Artificial Sequence
  Description of Artificial Sequence: Synthetic oligonucleotide
  Antisense strand to SEQ ID NO: 2494402
ucugcacaaacuauuuguc

SEQ ID NO: 2494404 - RNA, 19 nt, Artificial Sequence
  Description of Artificial Sequence: Synthetic oligonucleotide
  Sense strand starting at position 3286 of SEQ ID NO: 1887758
caaauaguuugugcagaag

SEQ ID NO: 2494405 - RNA, 19 nt, Artificial Sequence
  Description of Artificial Sequence: Synthetic oligonucleotide
  Antisense strand to SEQ ID NO: 2494404
cuucugcacaaacuauuug

SEQ ID NO: 2494406 - RNA, 19 nt, Artificial Sequence
  Description of Artificial Sequence: Synthetic oligonucleotide
  Sense strand starting at position 3289 of SEQ ID NO: 1887758
auaguuugugcagaagaau

SEQ ID NO: 2494407 - RNA, 19 nt, Artificial Sequence
  Description of Artificial Sequence: Synthetic oligonucleotide
  Antisense strand to SEQ ID NO: 2494406
auucuucugcacaaacuau

SEQ ID NO: 2494408 - RNA, 19 nt, Artificial Sequence
  Description of Artificial Sequence: Synthetic oligonucleotide
  Sense strand starting at position 3308 of SEQ ID NO: 1887758
uccaaauaaucugcguaga

SEQ ID NO: 2494409 - RNA, 19 nt, Artificial Sequence
  Description of Artificial Sequence: Synthetic oligonucleotide
  Antisense strand to SEQ ID NO: 2494408
ucuacgcagauuauuugga

SEQ ID NO: 2494410 - RNA, 19 nt, Artificial Sequence
  Description of Artificial Sequence: Synthetic oligonucleotide
  Sense strand starting at position 3309 of SEQ ID NO: 1887758
ccaaauaaucugcguagau

SEQ ID NO: 2494411 - RNA, 19 nt, Artificial Sequence
  Description of Artificial Sequence: Synthetic oligonucleotide
  Antisense strand to SEQ ID NO: 2494410
aucuacgcagauuauuugg

SEQ ID NO: 2494412 - RNA, 19 nt, Artificial Sequence
  Description of Artificial Sequence: Synthetic oligonucleotide
  Sense strand starting at position 3310 of SEQ ID NO: 1887758
caaauaaucugcguagaua

SEQ ID NO: 2494413 - RNA, 19 nt, Artificial Sequence
  Description of Artificial Sequence: Synthetic oligonucleotide
  Antisense strand to SEQ ID NO: 2494412
uaucuacgcagauuauuug

SEQ ID NO: 2494414 - RNA, 19 nt, Artificial Sequence
  Description of Artificial Sequence: Synthetic oligonucleotide
  Sense strand starting at position 3311 of SEQ ID NO: 1887758
aaauaaucugcguagauac

SEQ ID NO: 2494415 - RNA, 19 nt, Artificial Sequence
  Description of Artificial Sequence: Synthetic oligonucleotide
  Antisense strand to SEQ ID NO: 2494414
guaucuacgcagauuauuu

SEQ ID NO: 2494416 - RNA, 19 nt, Artificial Sequence
  Description of Artificial Sequence: Synthetic oligonucleotide
  Sense strand starting at position 3321 of SEQ ID NO: 1887758
cguagauacucugcucuca

SEQ ID NO: 2494417 - RNA, 19 nt, Artificial Sequence
  Description of Artificial Sequence: Synthetic oligonucleotide
  Antisense strand to SEQ ID NO: 2494416
ugagagcagaguaucuacg

SEQ ID NO: 2494418 - RNA, 19 nt, Artificial Sequence
  Description of Artificial Sequence: Synthetic oligonucleotide
  Sense strand starting at position 3367 of SEQ ID NO: 1887758
guaaguauggacugugcau

SEQ ID NO: 2494419 - RNA, 19 nt, Artificial Sequence
  Description of Artificial Sequence: Synthetic oligonucleotide
  Antisense strand to SEQ ID NO: 2494418
augcacaguccauacuuac

SEQ ID NO: 2494420 - RNA, 19 nt, Artificial Sequence
  Description of Artificial Sequence: Synthetic oligonucleotide
  Sense strand starting at position 3458 of SEQ ID NO: 1887758
cauugacaucuaggugauu

SEQ ID NO: 2494421 - RNA, 19 nt, Artificial Sequence
  Description of Artificial Sequence: Synthetic oligonucleotide
  Antisense strand to SEQ ID NO: 2494420
aaucaccuagaugucaaug

SEQ ID NO: 2494422 - RNA, 19 nt, Artificial Sequence
  Description of Artificial Sequence: Synthetic oligonucleotide
  Sense strand starting at position 3460 of SEQ ID NO: 1887758
uugacaucuaggugauuga

SEQ ID NO: 2494423 - RNA, 19 nt, Artificial Sequence
  Description of Artificial Sequence: Synthetic oligonucleotide
  Antisense strand to SEQ ID NO: 2494422
ucaaucaccuagaugucaa

SEQ ID NO: 2494424 - RNA, 19 nt, Artificial Sequence
  Description of Artificial Sequence: Synthetic oligonucleotide
  Sense strand starting at position 3464 of SEQ ID NO: 1887758
caucuaggugauugagguu

SEQ ID NO: 2494425 - RNA, 19 nt, Artificial Sequence
  Description of Artificial Sequence: Synthetic oligonucleotide
  Antisense strand to SEQ ID NO: 2494424
aaccucaaucaccuagaug

SEQ ID NO: 2494426 - RNA, 19 nt, Artificial Sequence
  Description of Artificial Sequence: Synthetic oligonucleotide
  Sense strand starting at position 3519 of SEQ ID NO: 1887758
ucuuuacuucugggaucuu

SEQ ID NO: 2494427 - RNA, 19 nt, Artificial Sequence
  Description of Artificial Sequence: Synthetic oligonucleotide
  Antisense strand to SEQ ID NO: 2494426
aagaucccagaaguaaaga

SEQ ID NO: 2494428 - RNA, 19 nt, Artificial Sequence
  Description of Artificial Sequence: Synthetic oligonucleotide
  Sense strand starting at position 3643 of SEQ ID NO: 1887758
aucuguaguccugguacuu

SEQ ID NO: 2494429 - RNA, 19 nt, Artificial Sequence
  Description of Artificial Sequence: Synthetic oligonucleotide
  Antisense strand to SEQ ID NO: 2494428
aaguaccaggacuacagau

SEQ ID NO: 2494430 - RNA, 19 nt, Artificial Sequence
  Description of Artificial Sequence: Synthetic oligonucleotide
  Sense strand starting at position 3854 of SEQ ID NO: 1887758
cggagauugccucacugca

SEQ ID NO: 2494431 - RNA, 19 nt, Artificial Sequence
  Description of Artificial Sequence: Synthetic oligonucleotide
  Antisense strand to SEQ ID NO: 2494430
ugcagugaggcaaucuccg

SEQ ID NO: 2494432 - RNA, 19 nt, Artificial Sequence
  Description of Artificial Sequence: Synthetic oligonucleotide
  Sense strand starting at position 3967 of SEQ ID NO: 1887758
aggagacgugacugcuaaa

SEQ ID NO: 2494433 - RNA, 19 nt, Artificial Sequence
  Description of Artificial Sequence: Synthetic oligonucleotide
  Antisense strand to SEQ ID NO: 2494432
uuuagcagucacgucuccu

SEQ ID NO: 2494434 - RNA, 19 nt, Artificial Sequence
  Description of Artificial Sequence: Synthetic oligonucleotide
  Sense strand starting at position 3974 of SEQ ID NO: 1887758
gugacugcuaaauguaaug

SEQ ID NO: 2494435 - RNA, 19 nt, Artificial Sequence
  Description of Artificial Sequence: Synthetic oligonucleotide
  Antisense strand to SEQ ID NO: 2494434
cauuacauuuagcagucac

SEQ ID NO: 2494436 - RNA, 19 nt, Artificial Sequence
  Description of Artificial Sequence: Synthetic oligonucleotide
  Sense strand starting at position 278 of SEQ ID NO: 1887759
acaggaugauuccuuccua

SEQ ID NO: 2494437 - RNA, 19 nt, Artificial Sequence
  Description of Artificial Sequence: Synthetic oligonucleotide
  Antisense strand to SEQ ID NO: 2494436
uaggaaggaaucauccugu

SEQ ID NO: 2494438 - RNA, 19 nt, Artificial Sequence
  Description of Artificial Sequence: Synthetic oligonucleotide
  Sense strand starting at position 328 of SEQ ID NO: 1887759
caacauguggcuuauaggu

SEQ ID NO: 2494439 - RNA, 19 nt, Artificial Sequence
  Description of Artificial Sequence: Synthetic oligonucleotide
  Antisense strand to SEQ ID NO: 2494438
accuauaagccacauguug

SEQ ID NO: 2494440 - RNA, 19 nt, Artificial Sequence
  Description of Artificial Sequence: Synthetic oligonucleotide
  Sense strand starting at position 562 of SEQ ID NO: 1887759
ccagucugccuuugagaac

SEQ ID NO: 2494441 - RNA, 19 nt, Artificial Sequence
  Description of Artificial Sequence: Synthetic oligonucleotide
  Antisense strand to SEQ ID NO: 2494440
guucucaaaggcagacugg

SEQ ID NO: 2494442 - RNA, 19 nt, Artificial Sequence
  Description of Artificial Sequence: Synthetic oligonucleotide
  Sense strand starting at position 615 of SEQ ID NO: 1887759
agcacauaguuugugauuu

SEQ ID NO: 2494443 - RNA, 19 nt, Artificial Sequence
  Description of Artificial Sequence: Synthetic oligonucleotide
  Antisense strand to SEQ ID NO: 2494442
aaaucacaaacuaugugcu

SEQ ID NO: 2494444 - RNA, 19 nt, Artificial Sequence
  Description of Artificial Sequence: Synthetic oligonucleotide
  Sense strand starting at position 691 of SEQ ID NO: 1887759
cgauaaggccgugaucaag

SEQ ID NO: 2494445 - RNA, 19 nt, Artificial Sequence
  Description of Artificial Sequence: Synthetic oligonucleotide
  Antisense strand to SEQ ID NO: 2494444
cuugaucacggccuuaucg

SEQ ID NO: 2494446 - RNA, 19 nt, Artificial Sequence
  Description of Artificial Sequence: Synthetic oligonucleotide
  Sense strand starting at position 697 of SEQ ID NO: 1887759
ggccgugaucaagggagau

SEQ ID NO: 2494447 - RNA, 19 nt, Artificial Sequence
  Description of Artificial Sequence: Synthetic oligonucleotide
  Antisense strand to SEQ ID NO: 2494446
aucucccuugaucacggcc

SEQ ID NO: 2494448 - RNA, 19 nt, Artificial Sequence
  Description of Artificial Sequence: Synthetic oligonucleotide
  Sense strand starting at position 803 of SEQ ID NO: 1887759
cacagaugugcacauagua

SEQ ID NO: 2494449 - RNA, 19 nt, Artificial Sequence
  Description of Artificial Sequence: Synthetic oligonucleotide
  Antisense strand to SEQ ID NO: 2494448
uacuaugugcacaucugug

SEQ ID NO: 2494450 - RNA, 19 nt, Artificial Sequence
  Description of Artificial Sequence: Synthetic oligonucleotide
  Sense strand starting at position 885 of SEQ ID NO: 1887759
gucggaaacaccugguuua

SEQ ID NO: 2494451 - RNA, 19 nt, Artificial Sequence
  Description of Artificial Sequence: Synthetic oligonucleotide
  Antisense strand to SEQ ID NO: 2494450
uaaaccagguguuuccgac

SEQ ID NO: 2494452 - RNA, 19 nt, Artificial Sequence
  Description of Artificial Sequence: Synthetic oligonucleotide
  Sense strand starting at position 888 of SEQ ID NO: 1887759
ggaaacaccugguuuacau

SEQ ID NO: 2494453 - RNA, 19 nt, Artificial Sequence
  Description of Artificial Sequence: Synthetic oligonucleotide
  Antisense strand to SEQ ID NO: 2494452
auguaaaccagguguuucc

SEQ ID NO: 2494454 - RNA, 19 nt, Artificial Sequence
  Description of Artificial Sequence: Synthetic oligonucleotide
  Sense strand starting at position 927 of SEQ ID NO: 1887759
gcauaucagucaguggacu

SEQ ID NO: 2494455 - RNA, 19 nt, Artificial Sequence
  Description of Artificial Sequence: Synthetic oligonucleotide
  Antisense strand to SEQ ID NO: 2494454
aguccacugacugauaugc

SEQ ID NO: 2494456 - RNA, 19 nt, Artificial Sequence
  Description of Artificial Sequence: Synthetic oligonucleotide
  Sense strand starting at position 928 of SEQ ID NO: 1887759
cauaucagucaguggacuu

SEQ ID NO: 2494457 - RNA, 19 nt, Artificial Sequence
  Description of Artificial Sequence: Synthetic oligonucleotide
  Antisense strand to SEQ ID NO: 2494456
aaguccacugacugauaug

SEQ ID NO: 2494458 - RNA, 19 nt, Artificial Sequence
  Description of Artificial Sequence: Synthetic oligonucleotide
  Sense strand starting at position 972 of SEQ ID NO: 1887759
cucucuaaacugggauaau

SEQ ID NO: 2494459 - RNA, 19 nt, Artificial Sequence
  Description of Artificial Sequence: Synthetic oligonucleotide
  Antisense strand to SEQ ID NO: 2494458
auuaucccaguuuagagag

SEQ ID NO: 2494460 - RNA, 19 nt, Artificial Sequence
  Description of Artificial Sequence: Synthetic oligonucleotide
  Sense strand starting at position 1003 of SEQ ID NO: 1887759
agagguuucuuucuugcaa

SEQ ID NO: 2494461 - RNA, 19 nt, Artificial Sequence
  Description of Artificial Sequence: Synthetic oligonucleotide
  Antisense strand to SEQ ID NO: 2494460
uugcaagaaagaaaccucu

SEQ ID NO: 2494462 - RNA, 19 nt, Artificial Sequence
  Description of Artificial Sequence: Synthetic oligonucleotide
  Sense strand starting at position 1004 of SEQ ID NO: 1887759
gagguuucuuucuugcaaa

SEQ ID NO: 2494463 - RNA, 19 nt, Artificial Sequence
  Description of Artificial Sequence: Synthetic oligonucleotide
  Antisense strand to SEQ ID NO: 2494462
uuugcaagaaagaaaccuc

SEQ ID NO: 2494464 - RNA, 19 nt, Artificial Sequence
  Description of Artificial Sequence: Synthetic oligonucleotide
  Sense strand starting at position 1109 of SEQ ID NO: 1887759
acaguaggcccuugcagaa

SEQ ID NO: 2494465 - RNA, 19 nt, Artificial Sequence
  Description of Artificial Sequence: Synthetic oligonucleotide
  Antisense strand to SEQ ID NO: 2494464
uucugcaagggccuacugu

SEQ ID NO: 2494466 - RNA, 19 nt, Artificial Sequence
  Description of Artificial Sequence: Synthetic oligonucleotide
  Sense strand starting at position 1158 of SEQ ID NO: 1887759
gcaugacugucaccaagua

SEQ ID NO: 2494467 - RNA, 19 nt, Artificial Sequence
  Description of Artificial Sequence: Synthetic oligonucleotide
  Antisense strand to SEQ ID NO: 2494466
uacuuggugacagucaugc

SEQ ID NO: 2494468 - RNA, 19 nt, Artificial Sequence
  Description of Artificial Sequence: Synthetic oligonucleotide
  Sense strand starting at position 1170 of SEQ ID NO: 1887759
ccaaguagguguucgauaa

SEQ ID NO: 2494469 - RNA, 19 nt, Artificial Sequence
  Description of Artificial Sequence: Synthetic oligonucleotide
  Antisense strand to SEQ ID NO: 2494468
uuaucgaacaccuacuugg

SEQ ID NO: 2494470 - RNA, 19 nt, Artificial Sequence
  Description of Artificial Sequence: Synthetic oligonucleotide
  Sense strand starting at position 1171 of SEQ ID NO: 1887759
caaguagguguucgauaaa

SEQ ID NO: 2494471 - RNA, 19 nt, Artificial Sequence
  Description of Artificial Sequence: Synthetic oligonucleotide
  Antisense strand to SEQ ID NO: 2494470
uuuaucgaacaccuacuug

SEQ ID NO: 2494472 - RNA, 19 nt, Artificial Sequence
  Description of Artificial Sequence: Synthetic oligonucleotide
  Sense strand starting at position 1174 of SEQ ID NO: 1887759
guagguguucgauaaagga

SEQ ID NO: 2494473 - RNA, 19 nt, Artificial Sequence
  Description of Artificial Sequence: Synthetic oligonucleotide
  Antisense strand to SEQ ID NO: 2494472
uccuuuaucgaacaccuac

SEQ ID NO: 2494474 - RNA, 19 nt, Artificial Sequence
  Description of Artificial Sequence: Synthetic oligonucleotide
  Sense strand starting at position 1183 of SEQ ID NO: 1887759
cgauaaaggaggugguuau

SEQ ID NO: 2494475 - RNA, 19 nt, Artificial Sequence
  Description of Artificial Sequence: Synthetic oligonucleotide
  Antisense strand to SEQ ID NO: 2494474
auaaccaccuccuuuaucg

SEQ ID NO: 2494476 - RNA, 19 nt, Artificial Sequence
  Description of Artificial Sequence: Synthetic oligonucleotide
  Sense strand starting at position 1184 of SEQ ID NO: 1887759
gauaaaggaggugguuauu

SEQ ID NO: 2494477 - RNA, 19 nt, Artificial Sequence
  Description of Artificial Sequence: Synthetic oligonucleotide
  Antisense strand to SEQ ID NO: 2494476
aauaaccaccuccuuuauc

SEQ ID NO: 2494478 - RNA, 19 nt, Artificial Sequence
  Description of Artificial Sequence: Synthetic oligonucleotide
  Sense strand starting at position 1195 of SEQ ID NO: 1887759
ugguuauuauagcuggauc

SEQ ID NO: 2494479 - RNA, 19 nt, Artificial Sequence
  Description of Artificial Sequence: Synthetic oligonucleotide
  Antisense strand to SEQ ID NO: 2494478
gauccagcuauaauaacca

SEQ ID NO: 2494480 - RNA, 19 nt, Artificial Sequence
  Description of Artificial Sequence: Synthetic oligonucleotide
  Sense strand starting at position 1196 of SEQ ID NO: 1887759
gguuauuauagcuggauca

SEQ ID NO: 2494481 - RNA, 19 nt, Artificial Sequence
  Description of Artificial Sequence: Synthetic oligonucleotide
  Antisense strand to SEQ ID NO: 2494480
ugauccagcuauaauaacc

SEQ ID NO: 2494482 - RNA, 19 nt, Artificial Sequence
  Description of Artificial Sequence: Synthetic oligonucleotide
  Sense strand starting at position 1197 of SEQ ID NO: 1887759
guuauuauagcuggaucau

SEQ ID NO: 2494483 - RNA, 19 nt, Artificial Sequence
  Description of Artificial Sequence: Synthetic oligonucleotide
  Antisense strand to SEQ ID NO: 2494482
augauccagcuauaauaac

SEQ ID NO: 2494484 - RNA, 19 nt, Artificial Sequence
  Description of Artificial Sequence: Synthetic oligonucleotide
  Sense strand starting at position 1198 of SEQ ID NO: 1887759
uuauuauagcuggaucauu

SEQ ID NO: 2494485 - RNA, 19 nt, Artificial Sequence
  Description of Artificial Sequence: Synthetic oligonucleotide
  Antisense strand to SEQ ID NO: 2494484
aaugauccagcuauaauaa

SEQ ID NO: 2494486 - RNA, 19 nt, Artificial Sequence
  Description of Artificial Sequence: Synthetic oligonucleotide
  Sense strand starting at position 1226 of SEQ ID NO: 1887759
gggcaagaagaauguauua

SEQ ID NO: 2494487 - RNA, 19 nt, Artificial Sequence
  Description of Artificial Sequence: Synthetic oligonucleotide
  Antisense strand to SEQ ID NO: 2494486
uaauacauucuucuugccc

SEQ ID NO: 2494488 - RNA, 19 nt, Artificial Sequence
  Description of Artificial Sequence: Synthetic oligonucleotide
  Sense strand starting at position 1575 of SEQ ID NO: 1887759
aauagugaacuguggaguu

SEQ ID NO: 2494489 - RNA, 19 nt, Artificial Sequence
  Description of Artificial Sequence: Synthetic oligonucleotide
  Antisense strand to SEQ ID NO: 2494488
aacuccacaguucacuauu

SEQ ID NO: 2494490 - RNA, 19 nt, Artificial Sequence
  Description of Artificial Sequence: Synthetic oligonucleotide
  Sense strand starting at position 1600 of SEQ ID NO: 1887759
uuugguuuccaguacugac

SEQ ID NO: 2494491 - RNA, 19 nt, Artificial Sequence
  Description of Artificial Sequence: Synthetic oligonucleotide
  Antisense strand to SEQ ID NO: 2494490
gucaguacuggaaaccaaa

SEQ ID NO: 2494492 - RNA, 19 nt, Artificial Sequence
  Description of Artificial Sequence: Synthetic oligonucleotide
  Sense strand starting at position 1622 of SEQ ID NO: 1887759
ucguuacuagcugugugau

SEQ ID NO: 2494493 - RNA, 19 nt, Artificial Sequence
  Description of Artificial Sequence: Synthetic oligonucleotide
  Antisense strand to SEQ ID NO: 2494492
aucacacagcuaguaacga

SEQ ID NO: 2494494 - RNA, 19 nt, Artificial Sequence
  Description of Artificial Sequence: Synthetic oligonucleotide
  Sense strand starting at position 2048 of SEQ ID NO: 1887759
ggucgcuuagagagucgua

SEQ ID NO: 2494495 - RNA, 19 nt, Artificial Sequence
  Description of Artificial Sequence: Synthetic oligonucleotide
  Antisense strand to SEQ ID NO: 2494494
uacgacucucuaagcgacc

SEQ ID NO: 2494496 - RNA, 19 nt, Artificial Sequence
  Description of Artificial Sequence: Synthetic oligonucleotide
  Sense strand starting at position 2428 of SEQ ID NO: 1887759
gucaccgugcuggaagaau

SEQ ID NO: 2494497 - RNA, 19 nt, Artificial Sequence
  Description of Artificial Sequence: Synthetic oligonucleotide
  Antisense strand to SEQ ID NO: 2494496
auucuuccagcacggugac

SEQ ID NO: 2494498 - RNA, 19 nt, Artificial Sequence
  Description of Artificial Sequence: Synthetic oligonucleotide
  Sense strand starting at position 2705 of SEQ ID NO: 1887759
cggagauugucuccaucga

SEQ ID NO: 2494499 - RNA, 19 nt, Artificial Sequence
  Description of Artificial Sequence: Synthetic oligonucleotide
  Antisense strand to SEQ ID NO: 2494498
ucgauggagacaaucuccg

SEQ ID NO: 2494500 - RNA, 19 nt, Artificial Sequence
  Description of Artificial Sequence: Synthetic oligonucleotide
  Sense strand starting at position 2706 of SEQ ID NO: 1887759
ggagauugucuccaucgac

SEQ ID NO: 2494501 - RNA, 19 nt, Artificial Sequence
  Description of Artificial Sequence: Synthetic oligonucleotide
  Antisense strand to SEQ ID NO: 2494500
gucgauggagacaaucucc

SEQ ID NO: 2494502 - RNA, 19 nt, Artificial Sequence
  Description of Artificial Sequence: Synthetic oligonucleotide
  Sense strand starting at position 2709 of SEQ ID NO: 1887759
gauugucuccaucgacacu

SEQ ID NO: 2494503 - RNA, 19 nt, Artificial Sequence
  Description of Artificial Sequence: Synthetic oligonucleotide
  Antisense strand to SEQ ID NO: 2494502
agugucgauggagacaauc

SEQ ID NO: 2494504 - RNA, 19 nt, Artificial Sequence
  Description of Artificial Sequence: Synthetic oligonucleotide
  Sense strand starting at position 2765 of SEQ ID NO: 1887759
ggaucacguucaucaaggu

SEQ ID NO: 2494505 - RNA, 19 nt, Artificial Sequence
  Description of Artificial Sequence: Synthetic oligonucleotide
  Antisense strand to SEQ ID NO: 2494504
accuugaugaacgugaucc

SEQ ID NO: 2494506 - RNA, 19 nt, Artificial Sequence
  Description of Artificial Sequence: Synthetic oligonucleotide
  Sense strand starting at position 3232 of SEQ ID NO: 1887759
aaauaaagagguuguacua

SEQ ID NO: 2494507 - RNA, 19 nt, Artificial Sequence
  Description of Artificial Sequence: Synthetic oligonucleotide
  Antisense strand to SEQ ID NO: 2494506
uaguacaaccucuuuauuu

SEQ ID NO: 2494508 - RNA, 19 nt, Artificial Sequence
  Description of Artificial Sequence: Synthetic oligonucleotide
  Sense strand starting at position 3242 of SEQ ID NO: 1887759
guuguacuagauuagggau

SEQ ID NO: 2494509 - RNA, 19 nt, Artificial Sequence
  Description of Artificial Sequence: Synthetic oligonucleotide
  Antisense strand to SEQ ID NO: 2494508
aucccuaaucuaguacaac

SEQ ID NO: 2494510 - RNA, 19 nt, Artificial Sequence
  Description of Artificial Sequence: Synthetic oligonucleotide
  Sense strand starting at position 3692 of SEQ ID NO: 1887759
guuggaaagcuguagcuaa

SEQ ID NO: 2494511 - RNA, 19 nt, Artificial Sequence
  Description of Artificial Sequence: Synthetic oligonucleotide
  Antisense strand to SEQ ID NO: 2494510
uuagcuacagcuuuccaac

SEQ ID NO: 2494512 - RNA, 19 nt, Artificial Sequence
  Description of Artificial Sequence: Synthetic oligonucleotide
  Sense strand starting at position 3718 of SEQ ID NO: 1887759
ccacgaacuuguccauaga

SEQ ID NO: 2494513 - RNA, 19 nt, Artificial Sequence
  Description of Artificial Sequence: Synthetic oligonucleotide
  Antisense strand to SEQ ID NO: 2494512
ucuauggacaaguucgugg

SEQ ID NO: 2494514 - RNA, 19 nt, Artificial Sequence
  Description of Artificial Sequence: Synthetic oligonucleotide
  Sense strand starting at position 3721 of SEQ ID NO: 1887759
cgaacuuguccauagacaa

SEQ ID NO: 2494515 - RNA, 19 nt, Artificial Sequence
  Description of Artificial Sequence: Synthetic oligonucleotide
  Antisense strand to SEQ ID NO: 2494514
uugucuauggacaaguucg

SEQ ID NO: 2494516 - RNA, 19 nt, Artificial Sequence
  Description of Artificial Sequence: Synthetic oligonucleotide
  Sense strand starting at position 30 of SEQ ID NO: 1887760
augacucagucuuugaaag

SEQ ID NO: 2494517 - RNA, 19 nt, Artificial Sequence
  Description of Artificial Sequence: Synthetic oligonucleotide
  Antisense strand to SEQ ID NO: 2494516
cuuucaaagacugagucau

SEQ ID NO: 2494518 - RNA, 19 nt, Artificial Sequence
  Description of Artificial Sequence: Synthetic oligonucleotide
  Sense strand starting at position 523 of SEQ ID NO: 1887760
cuucuugaggccuaaacaa

SEQ ID NO: 2494519 - RNA, 19 nt, Artificial Sequence
  Description of Artificial Sequence: Synthetic oligonucleotide
  Antisense strand to SEQ ID NO: 2494518
uuguuuaggccucaagaag

SEQ ID NO: 2494520 - RNA, 19 nt, Artificial Sequence
  Description of Artificial Sequence: Synthetic oligonucleotide
  Sense strand starting at position 563 of SEQ ID NO: 1887760
ggagucuuaguuuaaaugu

SEQ ID NO: 2494521 - RNA, 19 nt, Artificial Sequence
  Description of Artificial Sequence: Synthetic oligonucleotide
  Antisense strand to SEQ ID NO: 2494520
acauuuaaacuaagacucc

SEQ ID NO: 2494522 - RNA, 19 nt, Artificial Sequence
  Description of Artificial Sequence: Synthetic oligonucleotide
  Sense strand starting at position 585 of SEQ ID NO: 1887760
augccuuggucuccaagau

SEQ ID NO: 2494523 - RNA, 19 nt, Artificial Sequence
  Description of Artificial Sequence: Synthetic oligonucleotide
  Antisense strand to SEQ ID NO: 2494522
aucuuggagaccaaggcau

SEQ ID NO: 2494524 - RNA, 19 nt, Artificial Sequence
  Description of Artificial Sequence: Synthetic oligonucleotide
  Sense strand starting at position 706 of SEQ ID NO: 1887760
gaggguuccucacucaaga

SEQ ID NO: 2494525 - RNA, 19 nt, Artificial Sequence
  Description of Artificial Sequence: Synthetic oligonucleotide
  Antisense strand to SEQ ID NO: 2494524
ucuugagugaggaacccuc

SEQ ID NO: 2494526 - RNA, 19 nt, Artificial Sequence
  Description of Artificial Sequence: Synthetic oligonucleotide
  Sense strand starting at position 708 of SEQ ID NO: 1887760
ggguuccucacucaagagu

SEQ ID NO: 2494527 - RNA, 19 nt, Artificial Sequence
  Description of Artificial Sequence: Synthetic oligonucleotide
  Antisense strand to SEQ ID NO: 2494526
acucuugagugaggaaccc

SEQ ID NO: 2494528 - RNA, 19 nt, Artificial Sequence
  Description of Artificial Sequence: Synthetic oligonucleotide
  Sense strand starting at position 717 of SEQ ID NO: 1887760
acucaagagucuuagugaa

SEQ ID NO: 2494529 - RNA, 19 nt, Artificial Sequence
  Description of Artificial Sequence: Synthetic oligonucleotide
  Antisense strand to SEQ ID NO: 2494528
uucacuaagacucuugagu

SEQ ID NO: 2494530 - RNA, 19 nt, Artificial Sequence
  Description of Artificial Sequence: Synthetic oligonucleotide
  Sense strand starting at position 719 of SEQ ID NO: 1887760
ucaagagucuuagugaagg

SEQ ID NO: 2494531 - RNA, 19 nt, Artificial Sequence
  Description of Artificial Sequence: Synthetic oligonucleotide
  Antisense strand to SEQ ID NO: 2494530
ccuucacuaagacucuuga

SEQ ID NO: 2494532 - RNA, 19 nt, Artificial Sequence
  Description of Artificial Sequence: Synthetic oligonucleotide
  Sense strand starting at position 788 of SEQ ID NO: 1887760
cggacagaucgcgaguuca

SEQ ID NO: 2494533 - RNA, 19 nt, Artificial Sequence
  Description of Artificial Sequence: Synthetic oligonucleotide
  Antisense strand to SEQ ID NO: 2494532
ugaacucgcgaucuguccg

SEQ ID NO: 2494534 - RNA, 19 nt, Artificial Sequence
  Description of Artificial Sequence: Synthetic oligonucleotide
  Sense strand starting at position 1048 of SEQ ID NO: 1887760
agucucaguguuggaggau

SEQ ID NO: 2494535 - RNA, 19 nt, Artificial Sequence
  Description of Artificial Sequence: Synthetic oligonucleotide
  Antisense strand to SEQ ID NO: 2494534
auccuccaacacugagacu

SEQ ID NO: 2494536 - RNA, 19 nt, Artificial Sequence
  Description of Artificial Sequence: Synthetic oligonucleotide
  Sense strand starting at position 1099 of SEQ ID NO: 1887760
guaguucacgucuguaauu

SEQ ID NO: 2494537 - RNA, 19 nt, Artificial Sequence
  Description of Artificial Sequence: Synthetic oligonucleotide
  Antisense strand to SEQ ID NO: 2494536
aauuacagacgugaacuac

SEQ ID NO: 2494538 - RNA, 19 nt, Artificial Sequence
  Description of Artificial Sequence: Synthetic oligonucleotide
  Sense strand starting at position 1189 of SEQ ID NO: 1887760
gggauacccucuucuuuac

SEQ ID NO: 2494539 - RNA, 19 nt, Artificial Sequence
  Description of Artificial Sequence: Synthetic oligonucleotide
  Antisense strand to SEQ ID NO: 2494538
guaaagaagaggguauccc

SEQ ID NO: 2494540 - RNA, 19 nt, Artificial Sequence
  Description of Artificial Sequence: Synthetic oligonucleotide
  Sense strand starting at position 1276 of SEQ ID NO: 1887760
guggaagaauggcuuaaga

SEQ ID NO: 2494541 - RNA, 19 nt, Artificial Sequence
  Description of Artificial Sequence: Synthetic oligonucleotide
  Antisense strand to SEQ ID NO: 2494540
ucuuaagccauucuuccac

SEQ ID NO: 2494542 - RNA, 19 nt, Artificial Sequence
  Description of Artificial Sequence: Synthetic oligonucleotide
  Sense strand starting at position 1286 of SEQ ID NO: 1887760
ggcuuaagaccacgaguuu

SEQ ID NO: 2494543 - RNA, 19 nt, Artificial Sequence
  Description of Artificial Sequence: Synthetic oligonucleotide
  Antisense strand to SEQ ID NO: 2494542
aaacucguggucuuaagcc

SEQ ID NO: 2494544 - RNA, 19 nt, Artificial Sequence
  Description of Artificial Sequence: Synthetic oligonucleotide
  Sense strand starting at position 1728 of SEQ ID NO: 1887760
gagcucugaucuuaggaga

SEQ ID NO: 2494545 - RNA, 19 nt, Artificial Sequence
  Description of Artificial Sequence: Synthetic oligonucleotide
  Antisense strand to SEQ ID NO: 2494544
ucuccuaagaucagagcuc

SEQ ID NO: 2494546 - RNA, 19 nt, Artificial Sequence
  Description of Artificial Sequence: Synthetic oligonucleotide
  Sense strand starting at position 1731 of SEQ ID NO: 1887760
cucugaucuuaggagaugu

SEQ ID NO: 2494547 - RNA, 19 nt, Artificial Sequence
  Description of Artificial Sequence: Synthetic oligonucleotide
  Antisense strand to SEQ ID NO: 2494546
acaucuccuaagaucagag

SEQ ID NO: 2494548 - RNA, 19 nt, Artificial Sequence
  Description of Artificial Sequence: Synthetic oligonucleotide
  Sense strand starting at position 1880 of SEQ ID NO: 1887760
gagaaucccucccagguuu

SEQ ID NO: 2494549 - RNA, 19 nt, Artificial Sequence
  Description of Artificial Sequence: Synthetic oligonucleotide
  Antisense strand to SEQ ID NO: 2494548
aaaccugggagggauucuc

SEQ ID NO: 2494550 - RNA, 19 nt, Artificial Sequence
  Description of Artificial Sequence: Synthetic oligonucleotide
  Sense strand starting at position 2056 of SEQ ID NO: 1887760
gugacuccacccuguuuau

SEQ ID NO: 2494551 - RNA, 19 nt, Artificial Sequence
  Description of Artificial Sequence: Synthetic oligonucleotide
  Antisense strand to SEQ ID NO: 2494550
auaaacaggguggagucac

SEQ ID NO: 2494552 - RNA, 19 nt, Artificial Sequence
  Description of Artificial Sequence: Synthetic oligonucleotide
  Sense strand starting at position 2159 of SEQ ID NO: 1887760
ugugcagaguauuugugua

SEQ ID NO: 2494553 - RNA, 19 nt, Artificial Sequence
  Description of Artificial Sequence: Synthetic oligonucleotide
  Antisense strand to SEQ ID NO: 2494552
uacacaaauacucugcaca

SEQ ID NO: 2494554 - RNA, 19 nt, Artificial Sequence
  Description of Artificial Sequence: Synthetic oligonucleotide
  Sense strand starting at position 2161 of SEQ ID NO: 1887760
ugcagaguauuuguguagu

SEQ ID NO: 2494555 - RNA, 19 nt, Artificial Sequence
  Description of Artificial Sequence: Synthetic oligonucleotide
  Antisense strand to SEQ ID NO: 2494554
acuacacaaauacucugca

SEQ ID NO: 2494556 - RNA, 19 nt, Artificial Sequence
  Description of Artificial Sequence: Synthetic oligonucleotide
  Sense strand starting at position 2163 of SEQ ID NO: 1887760
cagaguauuuguguagugu

SEQ ID NO: 2494557 - RNA, 19 nt, Artificial Sequence
  Description of Artificial Sequence: Synthetic oligonucleotide
  Antisense strand to SEQ ID NO: 2494556
acacuacacaaauacucug

SEQ ID NO: 2494558 - RNA, 19 nt, Artificial Sequence
  Description of Artificial Sequence: Synthetic oligonucleotide
  Sense strand starting at position 2164 of SEQ ID NO: 1887760
agaguauuuguguaguguc

SEQ ID NO: 2494559 - RNA, 19 nt, Artificial Sequence
  Description of Artificial Sequence: Synthetic oligonucleotide
  Antisense strand to SEQ ID NO: 2494558
gacacuacacaaauacucu

SEQ ID NO: 2494560 - RNA, 19 nt, Artificial Sequence
  Description of Artificial Sequence: Synthetic oligonucleotide
  Sense strand starting at position 2190 of SEQ ID NO: 1887760
guuguauccuguguccuua

SEQ ID NO: 2494561 - RNA, 19 nt, Artificial Sequence
  Description of Artificial Sequence: Synthetic oligonucleotide
  Antisense strand to SEQ ID NO: 2494560
uaaggacacaggauacaac

SEQ ID NO: 2494562 - RNA, 19 nt, Artificial Sequence
  Description of Artificial Sequence: Synthetic oligonucleotide
  Sense strand starting at position 2332 of SEQ ID NO: 1887760
acucauuaaccacaguguu

SEQ ID NO: 2494563 - RNA, 19 nt, Artificial Sequence
  Description of Artificial Sequence: Synthetic oligonucleotide
  Antisense strand to SEQ ID NO: 2494562
aacacugugguuaaugagu

SEQ ID NO: 2494564 - RNA, 19 nt, Artificial Sequence
  Description of Artificial Sequence: Synthetic oligonucleotide
  Sense strand starting at position 2342 of SEQ ID NO: 1887760
cacaguguuuccuuggcca

SEQ ID NO: 2494565 - RNA, 19 nt, Artificial Sequence
  Description of Artificial Sequence: Synthetic oligonucleotide
  Antisense strand to SEQ ID NO: 2494564
uggccaaggaaacacugug

SEQ ID NO: 2494566 - RNA, 19 nt, Artificial Sequence
  Description of Artificial Sequence: Synthetic oligonucleotide
  Sense strand starting at position 2344 of SEQ ID NO: 1887760
caguguuuccuuggccaag

SEQ ID NO: 2494567 - RNA, 19 nt, Artificial Sequence
  Description of Artificial Sequence: Synthetic oligonucleotide
  Antisense strand to SEQ ID NO: 2494566
cuuggccaaggaaacacug

SEQ ID NO: 2494568 - RNA, 19 nt, Artificial Sequence
  Description of Artificial Sequence: Synthetic oligonucleotide
  Sense strand starting at position 2372 of SEQ ID NO: 1887760
ccagcaggugucugugaag

SEQ ID NO: 2494569 - RNA, 19 nt, Artificial Sequence
  Description of Artificial Sequence: Synthetic oligonucleotide
  Antisense strand to SEQ ID NO: 2494568
cuucacagacaccugcugg

SEQ ID NO: 2494570 - RNA, 19 nt, Artificial Sequence
  Description of Artificial Sequence: Synthetic oligonucleotide
  Sense strand starting at position 2470 of SEQ ID NO: 1887760
gacucuuauuuguagguga

SEQ ID NO: 2494571 - RNA, 19 nt, Artificial Sequence
  Description of Artificial Sequence: Synthetic oligonucleotide
  Antisense strand to SEQ ID NO: 2494570
ucaccuacaaauaagaguc

SEQ ID NO: 2494572 - RNA, 19 nt, Artificial Sequence
  Description of Artificial Sequence: Synthetic oligonucleotide
  Sense strand starting at position 2486 of SEQ ID NO: 1887760
ugaaguauguuucuuguaa

SEQ ID NO: 2494573 - RNA, 19 nt, Artificial Sequence
  Description of Artificial Sequence: Synthetic oligonucleotide
  Antisense strand to SEQ ID NO: 2494572
uuacaagaaacauacuuca

SEQ ID NO: 2494574 - RNA, 19 nt, Artificial Sequence
  Description of Artificial Sequence: Synthetic oligonucleotide
  Sense strand starting at position 2487 of SEQ ID NO: 1887760
gaaguauguuucuuguaag

SEQ ID NO: 2494575 - RNA, 19 nt, Artificial Sequence
  Description of Artificial Sequence: Synthetic oligonucleotide
  Antisense strand to SEQ ID NO: 2494574
cuuacaagaaacauacuuc

SEQ ID NO: 2494576 - RNA, 19 nt, Artificial Sequence
  Description of Artificial Sequence: Synthetic oligonucleotide
  Sense strand starting at position 2493 of SEQ ID NO: 1887760
uguuucuuguaagcaacaa

SEQ ID NO: 2494577 - RNA, 19 nt, Artificial Sequence
  Description of Artificial Sequence: Synthetic oligonucleotide
  Antisense strand to SEQ ID NO: 2494576
uuguugcuuacaagaaaca

SEQ ID NO: 2494578 - RNA, 19 nt, Artificial Sequence
  Description of Artificial Sequence: Synthetic oligonucleotide
  Sense strand starting at position 2561 of SEQ ID NO: 1887760
ucgagaguuuaguccauuu

SEQ ID NO: 2494579 - RNA, 19 nt, Artificial Sequence
  Description of Artificial Sequence: Synthetic oligonucleotide
  Antisense strand to SEQ ID NO: 2494578
aaauggacuaaacucucga

SEQ ID NO: 2494580 - RNA, 19 nt, Artificial Sequence
  Description of Artificial Sequence: Synthetic oligonucleotide
  Sense strand starting at position 2646 of SEQ ID NO: 1887760
guaguauucucuucuuucu

SEQ ID NO: 2494581 - RNA, 19 nt, Artificial Sequence
  Description of Artificial Sequence: Synthetic oligonucleotide
  Antisense strand to SEQ ID NO: 2494580
agaaagaagagaauacuac

SEQ ID NO: 2494582 - RNA, 19 nt, Artificial Sequence
  Description of Artificial Sequence: Synthetic oligonucleotide
  Sense strand starting at position 2884 of SEQ ID NO: 1887760
ucaugauguuggccauacu

SEQ ID NO: 2494583 - RNA, 19 nt, Artificial Sequence
  Description of Artificial Sequence: Synthetic oligonucleotide
  Antisense strand to SEQ ID NO: 2494582
aguauggccaacaucauga

SEQ ID NO: 2494584 - RNA, 19 nt, Artificial Sequence
  Description of Artificial Sequence: Synthetic oligonucleotide
  Sense strand starting at position 2887 of SEQ ID NO: 1887760
ugauguuggccauacugau

SEQ ID NO: 2494585 - RNA, 19 nt, Artificial Sequence
  Description of Artificial Sequence: Synthetic oligonucleotide
  Antisense strand to SEQ ID NO: 2494584
aucaguauggccaacauca

SEQ ID NO: 2494586 - RNA, 19 nt, Artificial Sequence
  Description of Artificial Sequence: Synthetic oligonucleotide
  Sense strand starting at position 3594 of SEQ ID NO: 1887760
ugucuaugucuugaagcgu

SEQ ID NO: 2494587 - RNA, 19 nt, Artificial Sequence
  Description of Artificial Sequence: Synthetic oligonucleotide
  Antisense strand to SEQ ID NO: 2494586
acgcuucaagacauagaca

SEQ ID NO: 2494588 - RNA, 19 nt, Artificial Sequence
  Description of Artificial Sequence: Synthetic oligonucleotide
  Sense strand starting at position 3605 of SEQ ID NO: 1887760
ugaagcguuguuguaguua

SEQ ID NO: 2494589 - RNA, 19 nt, Artificial Sequence
  Description of Artificial Sequence: Synthetic oligonucleotide
  Antisense strand to SEQ ID NO: 2494588
uaacuacaacaacgcuuca

SEQ ID NO: 2494590 - RNA, 19 nt, Artificial Sequence
  Description of Artificial Sequence: Synthetic oligonucleotide
  Sense strand starting at position 3608 of SEQ ID NO: 1887760
agcguuguuguaguuauua

SEQ ID NO: 2494591 - RNA, 19 nt, Artificial Sequence
  Description of Artificial Sequence: Synthetic oligonucleotide
  Antisense strand to SEQ ID NO: 2494590
uaauaacuacaacaacgcu

SEQ ID NO: 2494592 - RNA, 19 nt, Artificial Sequence
  Description of Artificial Sequence: Synthetic oligonucleotide
  Sense strand starting at position 3682 of SEQ ID NO: 1887760
guuauacuguuacaauaca

SEQ ID NO: 2494593 - RNA, 19 nt, Artificial Sequence
  Description of Artificial Sequence: Synthetic oligonucleotide
  Antisense strand to SEQ ID NO: 2494592
uguauuguaacaguauaac

SEQ ID NO: 2494594 - RNA, 19 nt, Artificial Sequence
  Description of Artificial Sequence: Synthetic oligonucleotide
  Sense strand starting at position 3690 of SEQ ID NO: 1887760
guuacaauacaccauguuu

SEQ ID NO: 2494595 - RNA, 19 nt, Artificial Sequence
  Description of Artificial Sequence: Synthetic oligonucleotide
  Antisense strand to SEQ ID NO: 2494594
aaacaugguguauuguaac

SEQ ID NO: 2494596 - RNA, 19 nt, Artificial Sequence
  Description of Artificial Sequence: Synthetic oligonucleotide
  Sense strand starting at position 312 of SEQ ID NO: 1887761
gcaaacauagcucacuaga

SEQ ID NO: 2494597 - RNA, 19 nt, Artificial Sequence
  Description of Artificial Sequence: Synthetic oligonucleotide
  Antisense strand to SEQ ID NO: 2494596
ucuagugagcuauguuugc

SEQ ID NO: 2494598 - RNA, 19 nt, Artificial Sequence
  Description of Artificial Sequence: Synthetic oligonucleotide
  Sense strand starting at position 546 of SEQ ID NO: 1887761
uggcccaguuuguaaagau

SEQ ID NO: 2494599 - RNA, 19 nt, Artificial Sequence
  Description of Artificial Sequence: Synthetic oligonucleotide
  Antisense strand to SEQ ID NO: 2494598
aucuuuacaaacugggcca

SEQ ID NO: 2494600 - RNA, 19 nt, Artificial Sequence
  Description of Artificial Sequence: Synthetic oligonucleotide
  Sense strand starting at position 616 of SEQ ID NO: 1887761
ccaaccuguggcugagaau

SEQ ID NO: 2494601 - RNA, 19 nt, Artificial Sequence
  Description of Artificial Sequence: Synthetic oligonucleotide
  Antisense strand to SEQ ID NO: 2494600
auucucagccacagguugg

SEQ ID NO: 2494602 - RNA, 19 nt, Artificial Sequence
  Description of Artificial Sequence: Synthetic oligonucleotide
  Sense strand starting at position 617 of SEQ ID NO: 1887761
caaccuguggcugagaauu

SEQ ID NO: 2494603 - RNA, 19 nt, Artificial Sequence
  Description of Artificial Sequence: Synthetic oligonucleotide
  Antisense strand to SEQ ID NO: 2494602
aauucucagccacagguug

SEQ ID NO: 2494604 - RNA, 19 nt, Artificial Sequence
  Description of Artificial Sequence: Synthetic oligonucleotide
  Sense strand starting at position 619 of SEQ ID NO: 1887761
accuguggcugagaauuaa

SEQ ID NO: 2494605 - RNA, 19 nt, Artificial Sequence
  Description of Artificial Sequence: Synthetic oligonucleotide
  Antisense strand to SEQ ID NO: 2494604
uuaauucucagccacaggu

SEQ ID NO: 2494606 - RNA, 19 nt, Artificial Sequence
  Description of Artificial Sequence: Synthetic oligonucleotide
  Sense strand starting at position 639 of SEQ ID NO: 1887761
gggcaugaugcccaugaaa

SEQ ID NO: 2494607 - RNA, 19 nt, Artificial Sequence
  Description of Artificial Sequence: Synthetic oligonucleotide
  Antisense strand to SEQ ID NO: 2494606
uuucaugggcaucaugccc

SEQ ID NO: 2494608 - RNA, 19 nt, Artificial Sequence
  Description of Artificial Sequence: Synthetic oligonucleotide
  Sense strand starting at position 673 of SEQ ID NO: 1887761
gggcaagacucagauuuac

SEQ ID NO: 2494609 - RNA, 19 nt, Artificial Sequence
  Description of Artificial Sequence: Synthetic oligonucleotide
  Antisense strand to SEQ ID NO: 2494608
guaaaucugagucuugccc

SEQ ID NO: 2494610 - RNA, 19 nt, Artificial Sequence
  Description of Artificial Sequence: Synthetic oligonucleotide
  Sense strand starting at position 904 of SEQ ID NO: 1887761
aagggaauugcucgaacca

SEQ ID NO: 2494611 - RNA, 19 nt, Artificial Sequence
  Description of Artificial Sequence: Synthetic oligonucleotide
  Antisense strand to SEQ ID NO: 2494610
ugguucgagcaauucccuu

SEQ ID NO: 2494612 - RNA, 19 nt, Artificial Sequence
  Description of Artificial Sequence: Synthetic oligonucleotide
  Sense strand starting at position 1294 of SEQ ID NO: 1887761
ugauaauagcccugucuca

SEQ ID NO: 2494613 - RNA, 19 nt, Artificial Sequence
  Description of Artificial Sequence: Synthetic oligonucleotide
  Antisense strand to SEQ ID NO: 2494612
ugagacagggcuauuauca

SEQ ID NO: 2494614 - RNA, 19 nt, Artificial Sequence
  Description of Artificial Sequence: Synthetic oligonucleotide
  Sense strand starting at position 1628 of SEQ ID NO: 1887761
uaggcuuugcgguggcaau

SEQ ID NO: 2494615 - RNA, 19 nt, Artificial Sequence
  Description of Artificial Sequence: Synthetic oligonucleotide
  Antisense strand to SEQ ID NO: 2494614
auugccaccgcaaagccua

SEQ ID NO: 2494616 - RNA, 19 nt, Artificial Sequence
  Description of Artificial Sequence: Synthetic oligonucleotide
  Sense strand starting at position 1759 of SEQ ID NO: 1887761
gcuggcuaucgcgagacuu

SEQ ID NO: 2494617 - RNA, 19 nt, Artificial Sequence
  Description of Artificial Sequence: Synthetic oligonucleotide
  Antisense strand to SEQ ID NO: 2494616
aagucucgcgauagccagc

SEQ ID NO: 2494618 - RNA, 19 nt, Artificial Sequence
  Description of Artificial Sequence: Synthetic oligonucleotide
  Sense strand starting at position 1761 of SEQ ID NO: 1887761
uggcuaucgcgagacuucu

SEQ ID NO: 2494619 - RNA, 19 nt, Artificial Sequence
  Description of Artificial Sequence: Synthetic oligonucleotide
  Antisense strand to SEQ ID NO: 2494618
agaagucucgcgauagcca

SEQ ID NO: 2494620 - RNA, 19 nt, Artificial Sequence
  Description of Artificial Sequence: Synthetic oligonucleotide
  Sense strand starting at position 1816 of SEQ ID NO: 1887761
gcaacaagugagcaacuuu

SEQ ID NO: 2494621 - RNA, 19 nt, Artificial Sequence
  Description of Artificial Sequence: Synthetic oligonucleotide
  Antisense strand to SEQ ID NO: 2494620
aaaguugcucacuuguugc

SEQ ID NO: 2494622 - RNA, 19 nt, Artificial Sequence
  Description of Artificial Sequence: Synthetic oligonucleotide
  Sense strand starting at position 1824 of SEQ ID NO: 1887761
ugagcaacuuuauugauag

SEQ ID NO: 2494623 - RNA, 19 nt, Artificial Sequence
  Description of Artificial Sequence: Synthetic oligonucleotide
  Antisense strand to SEQ ID NO: 2494622
cuaucaauaaaguugcuca

SEQ ID NO: 2494624 - RNA, 19 nt, Artificial Sequence
  Description of Artificial Sequence: Synthetic oligonucleotide
  Sense strand starting at position 1834 of SEQ ID NO: 1887761
uauugauaggcgcggacau

SEQ ID NO: 2494625 - RNA, 19 nt, Artificial Sequence
  Description of Artificial Sequence: Synthetic oligonucleotide
  Antisense strand to SEQ ID NO: 2494624
auguccgcgccuaucaaua

SEQ ID NO: 2494626 - RNA, 19 nt, Artificial Sequence
  Description of Artificial Sequence: Synthetic oligonucleotide
  Sense strand starting at position 1918 of SEQ ID NO: 1887761
ggccgauuccuagagggug

SEQ ID NO: 2494627 - RNA, 19 nt, Artificial Sequence
  Description of Artificial Sequence: Synthetic oligonucleotide
  Antisense strand to SEQ ID NO: 2494626
cacccucuaggaaucggcc

SEQ ID NO: 2494628 - RNA, 19 nt, Artificial Sequence
  Description of Artificial Sequence: Synthetic oligonucleotide
  Sense strand starting at position 1919 of SEQ ID NO: 1887761
gccgauuccuagaggguga

SEQ ID NO: 2494629 - RNA, 19 nt, Artificial Sequence
  Description of Artificial Sequence: Synthetic oligonucleotide
  Antisense strand to SEQ ID NO: 2494628
ucacccucuaggaaucggc

SEQ ID NO: 2494630 - RNA, 19 nt, Artificial Sequence
  Description of Artificial Sequence: Synthetic oligonucleotide
  Sense strand starting at position 1920 of SEQ ID NO: 1887761
ccgauuccuagagggugaa

SEQ ID NO: 2494631 - RNA, 19 nt, Artificial Sequence
  Description of Artificial Sequence: Synthetic oligonucleotide
  Antisense strand to SEQ ID NO: 2494630
uucacccucuaggaaucgg

SEQ ID NO: 2494632 - RNA, 19 nt, Artificial Sequence
  Description of Artificial Sequence: Synthetic oligonucleotide
  Sense strand starting at position 1921 of SEQ ID NO: 1887761
cgauuccuagagggugaaa

SEQ ID NO: 2494633 - RNA, 19 nt, Artificial Sequence
  Description of Artificial Sequence: Synthetic oligonucleotide
  Antisense strand to SEQ ID NO: 2494632
uuucacccucuaggaaucg

SEQ ID NO: 2494634 - RNA, 19 nt, Artificial Sequence
  Description of Artificial Sequence: Synthetic oligonucleotide
  Sense strand starting at position 1952 of SEQ ID NO: 1887761
gcgaucagugcagacagau

SEQ ID NO: 2494635 - RNA, 19 nt, Artificial Sequence
  Description of Artificial Sequence: Synthetic oligonucleotide
  Antisense strand to SEQ ID NO: 2494634
aucugucugcacugaucgc

SEQ ID NO: 2494636 - RNA, 19 nt, Artificial Sequence
  Description of Artificial Sequence: Synthetic oligonucleotide
  Sense strand starting at position 1961 of SEQ ID NO: 1887761
gcagacagauuucgcuagu

SEQ ID NO: 2494637 - RNA, 19 nt, Artificial Sequence
  Description of Artificial Sequence: Synthetic oligonucleotide
  Antisense strand to SEQ ID NO: 2494636
acuagcgaaaucugucugc

SEQ ID NO: 2494638 - RNA, 19 nt, Artificial Sequence
  Description of Artificial Sequence: Synthetic oligonucleotide
  Sense strand starting at position 2154 of SEQ ID NO: 1887761
cugcauagcgaguggucau

SEQ ID NO: 2494639 - RNA, 19 nt, Artificial Sequence
  Description of Artificial Sequence: Synthetic oligonucleotide
  Antisense strand to SEQ ID NO: 2494638
augaccacucgcuaugcag

SEQ ID NO: 2494640 - RNA, 19 nt, Artificial Sequence
  Description of Artificial Sequence: Synthetic oligonucleotide
  Sense strand starting at position 2372 of SEQ ID NO: 1887761
gcuagaauuggaggcauaa

SEQ ID NO: 2494641 - RNA, 19 nt, Artificial Sequence
  Description of Artificial Sequence: Synthetic oligonucleotide
  Antisense strand to SEQ ID NO: 2494640
uuaugccuccaauucuagc

SEQ ID NO: 2494642 - RNA, 19 nt, Artificial Sequence
  Description of Artificial Sequence: Synthetic oligonucleotide
  Sense strand starting at position 2404 of SEQ ID NO: 1887761
ugaccaaucugagacugua

SEQ ID NO: 2494643 - RNA, 19 nt, Artificial Sequence
  Description of Artificial Sequence: Synthetic oligonucleotide
  Antisense strand to SEQ ID NO: 2494642
uacagucucagauugguca

SEQ ID NO: 2494644 - RNA, 19 nt, Artificial Sequence
  Description of Artificial Sequence: Synthetic oligonucleotide
  Sense strand starting at position 2407 of SEQ ID NO: 1887761
ccaaucugagacuguauaa

SEQ ID NO: 2494645 - RNA, 19 nt, Artificial Sequence
  Description of Artificial Sequence: Synthetic oligonucleotide
  Antisense strand to SEQ ID NO: 2494644
uuauacagucucagauugg

SEQ ID NO: 2494646 - RNA, 19 nt, Artificial Sequence
  Description of Artificial Sequence: Synthetic oligonucleotide
  Sense strand starting at position 2514 of SEQ ID NO: 1887761
cgggccaauccugguguua

SEQ ID NO: 2494647 - RNA, 19 nt, Artificial Sequence
  Description of Artificial Sequence: Synthetic oligonucleotide
  Antisense strand to SEQ ID NO: 2494646
uaacaccaggauuggcccg

SEQ ID NO: 2494648 - RNA, 19 nt, Artificial Sequence
  Description of Artificial Sequence: Synthetic oligonucleotide
  Sense strand starting at position 2551 of SEQ ID NO: 1887761
gacaguaucgaagguguga

SEQ ID NO: 2494649 - RNA, 19 nt, Artificial Sequence
  Description of Artificial Sequence: Synthetic oligonucleotide
  Antisense strand to SEQ ID NO: 2494648
ucacaccuucgauacuguc

SEQ ID NO: 2494650 - RNA, 19 nt, Artificial Sequence
  Description of Artificial Sequence: Synthetic oligonucleotide
  Sense strand starting at position 2556 of SEQ ID NO: 1887761
uaucgaaggugugaccaau

SEQ ID NO: 2494651 - RNA, 19 nt, Artificial Sequence
  Description of Artificial Sequence: Synthetic oligonucleotide
  Antisense strand to SEQ ID NO: 2494650
auuggucacaccuucgaua

SEQ ID NO: 2494652 - RNA, 19 nt, Artificial Sequence
  Description of Artificial Sequence: Synthetic oligonucleotide
  Sense strand starting at position 2567 of SEQ ID NO: 1887761
ugaccaaucuuguuuccag

SEQ ID NO: 2494653 - RNA, 19 nt, Artificial Sequence
  Description of Artificial Sequence: Synthetic oligonucleotide
  Antisense strand to SEQ ID NO: 2494652
cuggaaacaagauugguca

SEQ ID NO: 2494654 - RNA, 19 nt, Artificial Sequence
  Description of Artificial Sequence: Synthetic oligonucleotide
  Sense strand starting at position 2648 of SEQ ID NO: 1887761
uguccaauccuagagugag

SEQ ID NO: 2494655 - RNA, 19 nt, Artificial Sequence
  Description of Artificial Sequence: Synthetic oligonucleotide
  Antisense strand to SEQ ID NO: 2494654
cucacucuaggauuggaca

SEQ ID NO: 2494656 - RNA, 19 nt, Artificial Sequence
  Description of Artificial Sequence: Synthetic oligonucleotide
  Sense strand starting at position 2682 of SEQ ID NO: 1887761
ggaguuucaugaucccgga

SEQ ID NO: 2494657 - RNA, 19 nt, Artificial Sequence
  Description of Artificial Sequence: Synthetic oligonucleotide
  Antisense strand to SEQ ID NO: 2494656
uccgggaucaugaaacucc

SEQ ID NO: 2494658 - RNA, 19 nt, Artificial Sequence
  Description of Artificial Sequence: Synthetic oligonucleotide
  Sense strand starting at position 2704 of SEQ ID NO: 1887761
ggugguaguguuuggguuu

SEQ ID NO: 2494659 - RNA, 19 nt, Artificial Sequence
  Description of Artificial Sequence: Synthetic oligonucleotide
  Antisense strand to SEQ ID NO: 2494658
aaacccaaacacuaccacc

SEQ ID NO: 2494660 - RNA, 19 nt, Artificial Sequence
  Description of Artificial Sequence: Synthetic oligonucleotide
  Sense strand starting at position 2711 of SEQ ID NO: 1887761
guguuuggguuugaggaga

SEQ ID NO: 2494661 - RNA, 19 nt, Artificial Sequence
  Description of Artificial Sequence: Synthetic oligonucleotide
  Antisense strand to SEQ ID NO: 2494660
ucuccucaaacccaaacac

SEQ ID NO: 2494662 - RNA, 19 nt, Artificial Sequence
  Description of Artificial Sequence: Synthetic oligonucleotide
  Sense strand starting at position 3181 of SEQ ID NO: 1887761
gacugaguaucggauugau

SEQ ID NO: 2494663 - RNA, 19 nt, Artificial Sequence
  Description of Artificial Sequence: Synthetic oligonucleotide
  Antisense strand to SEQ ID NO: 2494662
aucaauccgauacucaguc

SEQ ID NO: 2494664 - RNA, 19 nt, Artificial Sequence
  Description of Artificial Sequence: Synthetic oligonucleotide
  Sense strand starting at position 3184 of SEQ ID NO: 1887761
ugaguaucggauugauaaa

SEQ ID NO: 2494665 - RNA, 19 nt, Artificial Sequence
  Description of Artificial Sequence: Synthetic oligonucleotide
  Antisense strand to SEQ ID NO: 2494664
uuuaucaauccgauacuca

SEQ ID NO: 2494666 - RNA, 19 nt, Artificial Sequence
  Description of Artificial Sequence: Synthetic oligonucleotide
  Sense strand starting at position 3216 of SEQ ID NO: 1887761
ucgaauuaguaaucaguau

SEQ ID NO: 2494667 - RNA, 19 nt, Artificial Sequence
  Description of Artificial Sequence: Synthetic oligonucleotide
  Antisense strand to SEQ ID NO: 2494666
auacugauuacuaauucga

SEQ ID NO: 2494668 - RNA, 19 nt, Artificial Sequence
  Description of Artificial Sequence: Synthetic oligonucleotide
  Sense strand starting at position 3217 of SEQ ID NO: 1887761
cgaauuaguaaucaguaug

SEQ ID NO: 2494669 - RNA, 19 nt, Artificial Sequence
  Description of Artificial Sequence: Synthetic oligonucleotide
  Antisense strand to SEQ ID NO: 2494668
cauacugauuacuaauucg

SEQ ID NO: 2494670 - RNA, 19 nt, Artificial Sequence
  Description of Artificial Sequence: Synthetic oligonucleotide
  Sense strand starting at position 3222 of SEQ ID NO: 1887761
uaguaaucaguauguaaag

SEQ ID NO: 2494671 - RNA, 19 nt, Artificial Sequence
  Description of Artificial Sequence: Synthetic oligonucleotide
  Antisense strand to SEQ ID NO: 2494670
cuuuacauacugauuacua

SEQ ID NO: 2494672 - RNA, 19 nt, Artificial Sequence
  Description of Artificial Sequence: Synthetic oligonucleotide
  Sense strand starting at position 3224 of SEQ ID NO: 1887761
guaaucaguauguaaaguu

SEQ ID NO: 2494673 - RNA, 19 nt, Artificial Sequence
  Description of Artificial Sequence: Synthetic oligonucleotide
  Antisense strand to SEQ ID NO: 2494672
aacuuuacauacugauuac

SEQ ID NO: 2494674 - RNA, 19 nt, Artificial Sequence
  Description of Artificial Sequence: Synthetic oligonucleotide
  Sense strand starting at position 3233 of SEQ ID NO: 1887761
auguaaaguugcgagaagu

SEQ ID NO: 2494675 - RNA, 19 nt, Artificial Sequence
  Description of Artificial Sequence: Synthetic oligonucleotide
  Antisense strand to SEQ ID NO: 2494674
acuucucgcaacuuuacau

SEQ ID NO: 2494676 - RNA, 19 nt, Artificial Sequence
  Description of Artificial Sequence: Synthetic oligonucleotide
  Sense strand starting at position 107 of SEQ ID NO: 1887762
aagaaugcuugagcucaag

SEQ ID NO: 2494677 - RNA, 19 nt, Artificial Sequence
  Description of Artificial Sequence: Synthetic oligonucleotide
  Antisense strand to SEQ ID NO: 2494676
cuugagcucaagcauucuu

SEQ ID NO: 2494678 - RNA, 19 nt, Artificial Sequence
  Description of Artificial Sequence: Synthetic oligonucleotide
  Sense strand starting at position 544 of SEQ ID NO: 1887762
ggagguuguggcuauagua

SEQ ID NO: 2494679 - RNA, 19 nt, Artificial Sequence
  Description of Artificial Sequence: Synthetic oligonucleotide
  Antisense strand to SEQ ID NO: 2494678
uacuauagccacaaccucc

SEQ ID NO: 2494680 - RNA, 19 nt, Artificial Sequence
  Description of Artificial Sequence: Synthetic oligonucleotide
  Sense strand starting at position 712 of SEQ ID NO: 1887762
agacuauaaagcugguuga

SEQ ID NO: 2494681 - RNA, 19 nt, Artificial Sequence
  Description of Artificial Sequence: Synthetic oligonucleotide
  Antisense strand to SEQ ID NO: 2494680
ucaaccagcuuuauagucu

SEQ ID NO: 2494682 - RNA, 19 nt, Artificial Sequence
  Description of Artificial Sequence: Synthetic oligonucleotide
  Sense strand starting at position 715 of SEQ ID NO: 1887762
cuauaaagcugguugagau

SEQ ID NO: 2494683 - RNA, 19 nt, Artificial Sequence
  Description of Artificial Sequence: Synthetic oligonucleotide
  Antisense strand to SEQ ID NO: 2494682
aucucaaccagcuuuauag

SEQ ID NO: 2494684 - RNA, 19 nt, Artificial Sequence
  Description of Artificial Sequence: Synthetic oligonucleotide
  Sense strand starting at position 716 of SEQ ID NO: 1887762
uauaaagcugguugagauc

SEQ ID NO: 2494685 - RNA, 19 nt, Artificial Sequence
  Description of Artificial Sequence: Synthetic oligonucleotide
  Antisense strand to SEQ ID NO: 2494684
gaucucaaccagcuuuaua

SEQ ID NO: 2494686 - RNA, 19 nt, Artificial Sequence
  Description of Artificial Sequence: Synthetic oligonucleotide
  Sense strand starting at position 722 of SEQ ID NO: 1887762
gcugguugagaucaauauu

SEQ ID NO: 2494687 - RNA, 19 nt, Artificial Sequence
  Description of Artificial Sequence: Synthetic oligonucleotide
  Antisense strand to SEQ ID NO: 2494686
aauauugaucucaaccagc

SEQ ID NO: 2494688 - RNA, 19 nt, Artificial Sequence
  Description of Artificial Sequence: Synthetic oligonucleotide
  Sense strand starting at position 843 of SEQ ID NO: 1887762
gcaguuccuucuccuugaa

SEQ ID NO: 2494689 - RNA, 19 nt, Artificial Sequence
  Description of Artificial Sequence: Synthetic oligonucleotide
  Antisense strand to SEQ ID NO: 2494688
uucaaggagaaggaacugc

SEQ ID NO: 2494690 - RNA, 19 nt, Artificial Sequence
  Description of Artificial Sequence: Synthetic oligonucleotide
  Sense strand starting at position 846 of SEQ ID NO: 1887762
guuccuucuccuugaaaug

SEQ ID NO: 2494691 - RNA, 19 nt, Artificial Sequence
  Description of Artificial Sequence: Synthetic oligonucleotide
  Antisense strand to SEQ ID NO: 2494690
cauuucaaggagaaggaac

SEQ ID NO: 2494692 - RNA, 19 nt, Artificial Sequence
  Description of Artificial Sequence: Synthetic oligonucleotide
  Sense strand starting at position 1128 of SEQ ID NO: 1887762
gagccuggaacgugguaau

SEQ ID NO: 2494693 - RNA, 19 nt, Artificial Sequence
  Description of Artificial Sequence: Synthetic oligonucleotide
  Antisense strand to SEQ ID NO: 2494692
auuaccacguuccaggcuc

SEQ ID NO: 2494694 - RNA, 19 nt, Artificial Sequence
  Description of Artificial Sequence: Synthetic oligonucleotide
  Sense strand starting at position 1138 of SEQ ID NO: 1887762
cgugguaauguguaaagaa

SEQ ID NO: 2494695 - RNA, 19 nt, Artificial Sequence
  Description of Artificial Sequence: Synthetic oligonucleotide
  Antisense strand to SEQ ID NO: 2494694
uucuuuacacauuaccacg

SEQ ID NO: 2494696 - RNA, 19 nt, Artificial Sequence
  Description of Artificial Sequence: Synthetic oligonucleotide
  Sense strand starting at position 1167 of SEQ ID NO: 1887762
acagaugaauccuuggucu

SEQ ID NO: 2494697 - RNA, 19 nt, Artificial Sequence
  Description of Artificial Sequence: Synthetic oligonucleotide
  Antisense strand to SEQ ID NO: 2494696
agaccaaggauucaucugu

SEQ ID NO: 2494698 - RNA, 19 nt, Artificial Sequence
  Description of Artificial Sequence: Synthetic oligonucleotide
  Sense strand starting at position 1169 of SEQ ID NO: 1887762
agaugaauccuuggucuca

SEQ ID NO: 2494699 - RNA, 19 nt, Artificial Sequence
  Description of Artificial Sequence: Synthetic oligonucleotide
  Antisense strand to SEQ ID NO: 2494698
ugagaccaaggauucaucu

SEQ ID NO: 2494700 - RNA, 19 nt, Artificial Sequence
  Description of Artificial Sequence: Synthetic oligonucleotide
  Sense strand starting at position 1170 of SEQ ID NO: 1887762
gaugaauccuuggucucau

SEQ ID NO: 2494701 - RNA, 19 nt, Artificial Sequence
  Description of Artificial Sequence: Synthetic oligonucleotide
  Antisense strand to SEQ ID NO: 2494700
augagaccaaggauucauc

SEQ ID NO: 2494702 - RNA, 19 nt, Artificial Sequence
  Description of Artificial Sequence: Synthetic oligonucleotide
  Sense strand starting at position 1178 of SEQ ID NO: 1887762
cuuggucucauggagcuaa

SEQ ID NO: 2494703 - RNA, 19 nt, Artificial Sequence
  Description of Artificial Sequence: Synthetic oligonucleotide
  Antisense strand to SEQ ID NO: 2494702
uuagcuccaugagaccaag

SEQ ID NO: 2494704 - RNA, 19 nt, Artificial Sequence
  Description of Artificial Sequence: Synthetic oligonucleotide
  Sense strand starting at position 1331 of SEQ ID NO: 1887762
guauuaauuucggaaauca

SEQ ID NO: 2494705 - RNA, 19 nt, Artificial Sequence
  Description of Artificial Sequence: Synthetic oligonucleotide
  Antisense strand to SEQ ID NO: 2494704
ugauuuccgaaauuaauac

SEQ ID NO: 2494706 - RNA, 19 nt, Artificial Sequence
  Description of Artificial Sequence: Synthetic oligonucleotide
  Sense strand starting at position 1384 of SEQ ID NO: 1887762
agaucauauuuggagguua

SEQ ID NO: 2494707 - RNA, 19 nt, Artificial Sequence
  Description of Artificial Sequence: Synthetic oligonucleotide
  Antisense strand to SEQ ID NO: 2494706
uaaccuccaaauaugaucu

SEQ ID NO: 2494708 - RNA, 19 nt, Artificial Sequence
  Description of Artificial Sequence: Synthetic oligonucleotide
  Sense strand starting at position 1444 of SEQ ID NO: 1887762
uggagucagguuuggguau

SEQ ID NO: 2494709 - RNA, 19 nt, Artificial Sequence
  Description of Artificial Sequence: Synthetic oligonucleotide
  Antisense strand to SEQ ID NO: 2494708
auacccaaaccugacucca

SEQ ID NO: 2494710 - RNA, 19 nt, Artificial Sequence
  Description of Artificial Sequence: Synthetic oligonucleotide
  Sense strand starting at position 1455 of SEQ ID NO: 1887762
uuggguaucaguggauaca

SEQ ID NO: 2494711 - RNA, 19 nt, Artificial Sequence
  Description of Artificial Sequence: Synthetic oligonucleotide
  Antisense strand to SEQ ID NO: 2494710
uguauccacugauacccaa

SEQ ID NO: 2494712 - RNA, 19 nt, Artificial Sequence
  Description of Artificial Sequence: Synthetic oligonucleotide
  Sense strand starting at position 1475 of SEQ ID NO: 1887762
uguggauuccaggagcuga

SEQ ID NO: 2494713 - RNA, 19 nt, Artificial Sequence
  Description of Artificial Sequence: Synthetic oligonucleotide
  Antisense strand to SEQ ID NO: 2494712
ucagcuccuggaauccaca

SEQ ID NO: 2494714 - RNA, 19 nt, Artificial Sequence
  Description of Artificial Sequence: Synthetic oligonucleotide
  Sense strand starting at position 1517 of SEQ ID NO: 1887762
guaagaaaugauuggguua

SEQ ID NO: 2494715 - RNA, 19 nt, Artificial Sequence
  Description of Artificial Sequence: Synthetic oligonucleotide
  Antisense strand to SEQ ID NO: 2494714
uaacccaaucauuucuuac

SEQ ID NO: 2494716 - RNA, 19 nt, Artificial Sequence
  Description of Artificial Sequence: Synthetic oligonucleotide
  Sense strand starting at position 1533 of SEQ ID NO: 1887762
uuaggaucauagcuagaua

SEQ ID NO: 2494717 - RNA, 19 nt, Artificial Sequence
  Description of Artificial Sequence: Synthetic oligonucleotide
  Antisense strand to SEQ ID NO: 2494716
uaucuagcuaugauccuaa

SEQ ID NO: 2494718 - RNA, 19 nt, Artificial Sequence
  Description of Artificial Sequence: Synthetic oligonucleotide
  Sense strand starting at position 1613 of SEQ ID NO: 1887762
aagucagauuuaggaguau

SEQ ID NO: 2494719 - RNA, 19 nt, Artificial Sequence
  Description of Artificial Sequence: Synthetic oligonucleotide
  Antisense strand to SEQ ID NO: 2494718
auacuccuaaaucugacuu

SEQ ID NO: 2494720 - RNA, 19 nt, Artificial Sequence
  Description of Artificial Sequence: Synthetic oligonucleotide
  Sense strand starting at position 1652 of SEQ ID NO: 1887762
aucagagauuaaugaggaa

SEQ ID NO: 2494721 - RNA, 19 nt, Artificial Sequence
  Description of Artificial Sequence: Synthetic oligonucleotide
  Antisense strand to SEQ ID NO: 2494720
uuccucauuaaucucugau

SEQ ID NO: 2494722 - RNA, 19 nt, Artificial Sequence
  Description of Artificial Sequence: Synthetic oligonucleotide
  Sense strand starting at position 2070 of SEQ ID NO: 1887762
gaguauucgggaggacuac

SEQ ID NO: 2494723 - RNA, 19 nt, Artificial Sequence
  Description of Artificial Sequence: Synthetic oligonucleotide
  Antisense strand to SEQ ID NO: 2494722
guaguccucccgaauacuc

SEQ ID NO: 2494724 - RNA, 19 nt, Artificial Sequence
  Description of Artificial Sequence: Synthetic oligonucleotide
  Sense strand starting at position 2559 of SEQ ID NO: 1887762
guugcuuagcgaucuguau

SEQ ID NO: 2494725 - RNA, 19 nt, Artificial Sequence
  Description of Artificial Sequence: Synthetic oligonucleotide
  Antisense strand to SEQ ID NO: 2494724
auacagaucgcuaagcaac

SEQ ID NO: 2494726 - RNA, 19 nt, Artificial Sequence
  Description of Artificial Sequence: Synthetic oligonucleotide
  Sense strand starting at position 2560 of SEQ ID NO: 1887762
uugcuuagcgaucuguauc

SEQ ID NO: 2494727 - RNA, 19 nt, Artificial Sequence
  Description of Artificial Sequence: Synthetic oligonucleotide
  Antisense strand to SEQ ID NO: 2494726
gauacagaucgcuaagcaa

SEQ ID NO: 2494728 - RNA, 19 nt, Artificial Sequence
  Description of Artificial Sequence: Synthetic oligonucleotide
  Sense strand starting at position 2606 of SEQ ID NO: 1887762
guguguucaggguucguuu

SEQ ID NO: 2494729 - RNA, 19 nt, Artificial Sequence
  Description of Artificial Sequence: Synthetic oligonucleotide
  Antisense strand to SEQ ID NO: 2494728
aaacgaacccugaacacac

SEQ ID NO: 2494730 - RNA, 19 nt, Artificial Sequence
  Description of Artificial Sequence: Synthetic oligonucleotide
  Sense strand starting at position 2607 of SEQ ID NO: 1887762
uguguucaggguucguuua

SEQ ID NO: 2494731 - RNA, 19 nt, Artificial Sequence
  Description of Artificial Sequence: Synthetic oligonucleotide
  Antisense strand to SEQ ID NO: 2494730
uaaacgaacccugaacaca

SEQ ID NO: 2494732 - RNA, 19 nt, Artificial Sequence
  Description of Artificial Sequence: Synthetic oligonucleotide
  Sense strand starting at position 2648 of SEQ ID NO: 1887762
caaugaucgcguguuucuc

SEQ ID NO: 2494733 - RNA, 19 nt, Artificial Sequence
  Description of Artificial Sequence: Synthetic oligonucleotide
  Antisense strand to SEQ ID NO: 2494732
gagaaacacgcgaucauug

SEQ ID NO: 2494734 - RNA, 19 nt, Artificial Sequence
  Description of Artificial Sequence: Synthetic oligonucleotide
  Sense strand starting at position 2729 of SEQ ID NO: 1887762
uggguaccugauuguuaga

SEQ ID NO: 2494735 - RNA, 19 nt, Artificial Sequence
  Description of Artificial Sequence: Synthetic oligonucleotide
  Antisense strand to SEQ ID NO: 2494734
ucuaacaaucagguaccca

SEQ ID NO: 2494736 - RNA, 19 nt, Artificial Sequence
  Description of Artificial Sequence: Synthetic oligonucleotide
  Sense strand starting at position 2958 of SEQ ID NO: 1887762
ugucguguccuuccuaacu

SEQ ID NO: 2494737 - RNA, 19 nt, Artificial Sequence
  Description of Artificial Sequence: Synthetic oligonucleotide
  Antisense strand to SEQ ID NO: 2494736
aguuaggaaggacacgaca

SEQ ID NO: 2494738 - RNA, 19 nt, Artificial Sequence
  Description of Artificial Sequence: Synthetic oligonucleotide
  Sense strand starting at position 2971 of SEQ ID NO: 1887762
cuaacuccuccugaguguu

SEQ ID NO: 2494739 - RNA, 19 nt, Artificial Sequence
  Description of Artificial Sequence: Synthetic oligonucleotide
  Antisense strand to SEQ ID NO: 2494738
aacacucaggaggaguuag

SEQ ID NO: 2494740 - RNA, 19 nt, Artificial Sequence
  Description of Artificial Sequence: Synthetic oligonucleotide
  Sense strand starting at position 3386 of SEQ ID NO: 1887762
aucccaucccaguguaacu

SEQ ID NO: 2494741 - RNA, 19 nt, Artificial Sequence
  Description of Artificial Sequence: Synthetic oligonucleotide
  Antisense strand to SEQ ID NO: 2494740
aguuacacugggaugggau

SEQ ID NO: 2494742 - RNA, 19 nt, Artificial Sequence
  Description of Artificial Sequence: Synthetic oligonucleotide
  Sense strand starting at position 3583 of SEQ ID NO: 1887762
gagagacggacuuguucca

SEQ ID NO: 2494743 - RNA, 19 nt, Artificial Sequence
  Description of Artificial Sequence: Synthetic oligonucleotide
  Antisense strand to SEQ ID NO: 2494742
uggaacaaguccgucucuc

SEQ ID NO: 2494744 - RNA, 19 nt, Artificial Sequence
  Description of Artificial Sequence: Synthetic oligonucleotide
  Sense strand starting at position 3590 of SEQ ID NO: 1887762
ggacuuguuccacauccca

SEQ ID NO: 2494745 - RNA, 19 nt, Artificial Sequence
  Description of Artificial Sequence: Synthetic oligonucleotide
  Antisense strand to SEQ ID NO: 2494744
ugggauguggaacaagucc

SEQ ID NO: 2494746 - RNA, 19 nt, Artificial Sequence
  Description of Artificial Sequence: Synthetic oligonucleotide
  Sense strand starting at position 3849 of SEQ ID NO: 1887762
ggucuuggaacgcacagau

SEQ ID NO: 2494747 - RNA, 19 nt, Artificial Sequence
  Description of Artificial Sequence: Synthetic oligonucleotide
  Antisense strand to SEQ ID NO: 2494746
aucugugcguuccaagacc

SEQ ID NO: 2494748 - RNA, 19 nt, Artificial Sequence
  Description of Artificial Sequence: Synthetic oligonucleotide
  Sense strand starting at position 3861 of SEQ ID NO: 1887762
cacagaucucguggacaag

SEQ ID NO: 2494749 - RNA, 19 nt, Artificial Sequence
  Description of Artificial Sequence: Synthetic oligonucleotide
  Antisense strand to SEQ ID NO: 2494748
cuuguccacgagaucugug

SEQ ID NO: 2494750 - RNA, 19 nt, Artificial Sequence
  Description of Artificial Sequence: Synthetic oligonucleotide
  Sense strand starting at position 3862 of SEQ ID NO: 1887762
acagaucucguggacaagu

SEQ ID NO: 2494751 - RNA, 19 nt, Artificial Sequence
  Description of Artificial Sequence: Synthetic oligonucleotide
  Antisense strand to SEQ ID NO: 2494750
acuuguccacgagaucugu

SEQ ID NO: 2494752 - RNA, 19 nt, Artificial Sequence
  Description of Artificial Sequence: Synthetic oligonucleotide
  Sense strand starting at position 3864 of SEQ ID NO: 1887762
agaucucguggacaaguga

SEQ ID NO: 2494753 - RNA, 19 nt, Artificial Sequence
  Description of Artificial Sequence: Synthetic oligonucleotide
  Antisense strand to SEQ ID NO: 2494752
ucacuuguccacgagaucu

SEQ ID NO: 2494754 - RNA, 19 nt, Artificial Sequence
  Description of Artificial Sequence: Synthetic oligonucleotide
  Sense strand starting at position 3901 of SEQ ID NO: 1887762
cagcgugaugacgaaagua

SEQ ID NO: 2494755 - RNA, 19 nt, Artificial Sequence
  Description of Artificial Sequence: Synthetic oligonucleotide
  Antisense strand to SEQ ID NO: 2494754
uacuuucgucaucacgcug

SEQ ID NO: 2494756 - RNA, 19 nt, Artificial Sequence
  Description of Artificial Sequence: Synthetic oligonucleotide
  Sense strand starting at position 24 of SEQ ID NO: 1887763
agacucccaucuguauuau

SEQ ID NO: 2494757 - RNA, 19 nt, Artificial Sequence
  Description of Artificial Sequence: Synthetic oligonucleotide
  Antisense strand to SEQ ID NO: 2494756
auaauacagaugggagucu

SEQ ID NO: 2494758 - RNA, 19 nt, Artificial Sequence
  Description of Artificial Sequence: Synthetic oligonucleotide
  Sense strand starting at position 109 of SEQ ID NO: 1887763
aaagaaagugccugacaug

SEQ ID NO: 2494759 - RNA, 19 nt, Artificial Sequence
  Description of Artificial Sequence: Synthetic oligonucleotide
  Antisense strand to SEQ ID NO: 2494758
caugucaggcacuuucuuu

SEQ ID NO: 2494760 - RNA, 19 nt, Artificial Sequence
  Description of Artificial Sequence: Synthetic oligonucleotide
  Sense strand starting at position 112 of SEQ ID NO: 1887763
gaaagugccugacaugaau

SEQ ID NO: 2494761 - RNA, 19 nt, Artificial Sequence
  Description of Artificial Sequence: Synthetic oligonucleotide
  Antisense strand to SEQ ID NO: 2494760
auucaugucaggcacuuuc

SEQ ID NO: 2494762 - RNA, 19 nt, Artificial Sequence
  Description of Artificial Sequence: Synthetic oligonucleotide
  Sense strand starting at position 148 of SEQ ID NO: 1887763
ccgggugggcugugacauu

SEQ ID NO: 2494763 - RNA, 19 nt, Artificial Sequence
  Description of Artificial Sequence: Synthetic oligonucleotide
  Antisense strand to SEQ ID NO: 2494762
aaugucacagcccacccgg

SEQ ID NO: 2494764 - RNA, 19 nt, Artificial Sequence
  Description of Artificial Sequence: Synthetic oligonucleotide
  Sense strand starting at position 194 of SEQ ID NO: 1887763
cgaggcuucuuacucgaaa

SEQ ID NO: 2494765 - RNA, 19 nt, Artificial Sequence
  Description of Artificial Sequence: Synthetic oligonucleotide
  Antisense strand to SEQ ID NO: 2494764
uuucgaguaagaagccucg

SEQ ID NO: 2494766 - RNA, 19 nt, Artificial Sequence
  Description of Artificial Sequence: Synthetic oligonucleotide
  Sense strand starting at position 581 of SEQ ID NO: 1887763
gggaguccggcuagcauua

SEQ ID NO: 2494767 - RNA, 19 nt, Artificial Sequence
  Description of Artificial Sequence: Synthetic oligonucleotide
  Antisense strand to SEQ ID NO: 2494766
uaaugcuagccggacuccc

SEQ ID NO: 2494768 - RNA, 19 nt, Artificial Sequence
  Description of Artificial Sequence: Synthetic oligonucleotide
  Sense strand starting at position 667 of SEQ ID NO: 1887763
gaguuugaaucucuucuag

SEQ ID NO: 2494769 - RNA, 19 nt, Artificial Sequence
  Description of Artificial Sequence: Synthetic oligonucleotide
  Antisense strand to SEQ ID NO: 2494768
cuagaagagauucaaacuc

SEQ ID NO: 2494770 - RNA, 19 nt, Artificial Sequence
  Description of Artificial Sequence: Synthetic oligonucleotide
  Sense strand starting at position 714 of SEQ ID NO: 1887763
ggcacagucauguggaaug

SEQ ID NO: 2494771 - RNA, 19 nt, Artificial Sequence
  Description of Artificial Sequence: Synthetic oligonucleotide
  Antisense strand to SEQ ID NO: 2494770
cauuccacaugacugugcc

SEQ ID NO: 2494772 - RNA, 19 nt, Artificial Sequence
  Description of Artificial Sequence: Synthetic oligonucleotide
  Sense strand starting at position 719 of SEQ ID NO: 1887763
agucauguggaaugacauu

SEQ ID NO: 2494773 - RNA, 19 nt, Artificial Sequence
  Description of Artificial Sequence: Synthetic oligonucleotide
  Antisense strand to SEQ ID NO: 2494772
aaugucauuccacaugacu

SEQ ID NO: 2494774 - RNA, 19 nt, Artificial Sequence
  Description of Artificial Sequence: Synthetic oligonucleotide
  Sense strand starting at position 814 of SEQ ID NO: 1887763
acuggagcuuuaguuaauu

SEQ ID NO: 2494775 - RNA, 19 nt, Artificial Sequence
  Description of Artificial Sequence: Synthetic oligonucleotide
  Antisense strand to SEQ ID NO: 2494774
aauuaacuaaagcuccagu

SEQ ID NO: 2494776 - RNA, 19 nt, Artificial Sequence
  Description of Artificial Sequence: Synthetic oligonucleotide
  Sense strand starting at position 1125 of SEQ ID NO: 1887763
caccgugucuggucuauuu

SEQ ID NO: 2494777 - RNA, 19 nt, Artificial Sequence
  Description of Artificial Sequence: Synthetic oligonucleotide
  Antisense strand to SEQ ID NO: 2494776
aaauagaccagacacggug

SEQ ID NO: 2494778 - RNA, 19 nt, Artificial Sequence
  Description of Artificial Sequence: Synthetic oligonucleotide
  Sense strand starting at position 1152 of SEQ ID NO: 1887763
ugcugaguauaauuggaag

SEQ ID NO: 2494779 - RNA, 19 nt, Artificial Sequence
  Description of Artificial Sequence: Synthetic oligonucleotide
  Antisense strand to SEQ ID NO: 2494778
cuuccaauuauacucagca

SEQ ID NO: 2494780 - RNA, 19 nt, Artificial Sequence
  Description of Artificial Sequence: Synthetic oligonucleotide
  Sense strand starting at position 1154 of SEQ ID NO: 1887763
cugaguauaauuggaaggu

SEQ ID NO: 2494781 - RNA, 19 nt, Artificial Sequence
  Description of Artificial Sequence: Synthetic oligonucleotide
  Antisense strand to SEQ ID NO: 2494780
accuuccaauuauacucag

SEQ ID NO: 2494782 - RNA, 19 nt, Artificial Sequence
  Description of Artificial Sequence: Synthetic oligonucleotide
  Sense strand starting at position 1166 of SEQ ID NO: 1887763
ggaagguggcgggaaucau

SEQ ID NO: 2494783 - RNA, 19 nt, Artificial Sequence
  Description of Artificial Sequence: Synthetic oligonucleotide
  Antisense strand to SEQ ID NO: 2494782
augauucccgccaccuucc

SEQ ID NO: 2494784 - RNA, 19 nt, Artificial Sequence
  Description of Artificial Sequence: Synthetic oligonucleotide
  Sense strand starting at position 1871 of SEQ ID NO: 1887763
uggccugacccugacauua

SEQ ID NO: 2494785 - RNA, 19 nt, Artificial Sequence
  Description of Artificial Sequence: Synthetic oligonucleotide
  Antisense strand to SEQ ID NO: 2494784
uaaugucagggucaggcca

SEQ ID NO: 2494786 - RNA, 19 nt, Artificial Sequence
  Description of Artificial Sequence: Synthetic oligonucleotide
  Sense strand starting at position 1873 of SEQ ID NO: 1887763
gccugacccugacauuaag

SEQ ID NO: 2494787 - RNA, 19 nt, Artificial Sequence
  Description of Artificial Sequence: Synthetic oligonucleotide
  Antisense strand to SEQ ID NO: 2494786
cuuaaugucagggucaggc

SEQ ID NO: 2494788 - RNA, 19 nt, Artificial Sequence
  Description of Artificial Sequence: Synthetic oligonucleotide
  Sense strand starting at position 2006 of SEQ ID NO: 1887763
ggcuuaagauccuuagcag

SEQ ID NO: 2494789 - RNA, 19 nt, Artificial Sequence
  Description of Artificial Sequence: Synthetic oligonucleotide
  Antisense strand to SEQ ID NO: 2494788
cugcuaaggaucuuaagcc

SEQ ID NO: 2494790 - RNA, 19 nt, Artificial Sequence
  Description of Artificial Sequence: Synthetic oligonucleotide
  Sense strand starting at position 2007 of SEQ ID NO: 1887763
gcuuaagauccuuagcagu

SEQ ID NO: 2494791 - RNA, 19 nt, Artificial Sequence
  Description of Artificial Sequence: Synthetic oligonucleotide
  Antisense strand to SEQ ID NO: 2494790
acugcuaaggaucuuaagc

SEQ ID NO: 2494792 - RNA, 19 nt, Artificial Sequence
  Description of Artificial Sequence: Synthetic oligonucleotide
  Sense strand starting at position 2009 of SEQ ID NO: 1887763
uuaagauccuuagcaguga

SEQ ID NO: 2494793 - RNA, 19 nt, Artificial Sequence
  Description of Artificial Sequence: Synthetic oligonucleotide
  Antisense strand to SEQ ID NO: 2494792
ucacugcuaaggaucuuaa

SEQ ID NO: 2494794 - RNA, 19 nt, Artificial Sequence
  Description of Artificial Sequence: Synthetic oligonucleotide
  Sense strand starting at position 2010 of SEQ ID NO: 1887763
uaagauccuuagcagugaa

SEQ ID NO: 2494795 - RNA, 19 nt, Artificial Sequence
  Description of Artificial Sequence: Synthetic oligonucleotide
  Antisense strand to SEQ ID NO: 2494794
uucacugcuaaggaucuua

SEQ ID NO: 2494796 - RNA, 19 nt, Artificial Sequence
  Description of Artificial Sequence: Synthetic oligonucleotide
  Sense strand starting at position 2013 of SEQ ID NO: 1887763
gauccuuagcagugaauca

SEQ ID NO: 2494797 - RNA, 19 nt, Artificial Sequence
  Description of Artificial Sequence: Synthetic oligonucleotide
  Antisense strand to SEQ ID NO: 2494796
ugauucacugcuaaggauc

SEQ ID NO: 2494798 - RNA, 19 nt, Artificial Sequence
  Description of Artificial Sequence: Synthetic oligonucleotide
  Sense strand starting at position 2020 of SEQ ID NO: 1887763
agcagugaaucacaagaua

SEQ ID NO: 2494799 - RNA, 19 nt, Artificial Sequence
  Description of Artificial Sequence: Synthetic oligonucleotide
  Antisense strand to SEQ ID NO: 2494798
uaucuugugauucacugcu

SEQ ID NO: 2494800 - RNA, 19 nt, Artificial Sequence
  Description of Artificial Sequence: Synthetic oligonucleotide
  Sense strand starting at position 2068 of SEQ ID NO: 1887763
acaggaucucagcgugaca

SEQ ID NO: 2494801 - RNA, 19 nt, Artificial Sequence
  Description of Artificial Sequence: Synthetic oligonucleotide
  Antisense strand to SEQ ID NO: 2494800
ugucacgcugagauccugu

SEQ ID NO: 2494802 - RNA, 19 nt, Artificial Sequence
  Description of Artificial Sequence: Synthetic oligonucleotide
  Sense strand starting at position 2669 of SEQ ID NO: 1887763
gcaauucuccuucgucaac

SEQ ID NO: 2494803 - RNA, 19 nt, Artificial Sequence
  Description of Artificial Sequence: Synthetic oligonucleotide
  Antisense strand to SEQ ID NO: 2494802
guugacgaaggagaauugc

SEQ ID NO: 2494804 - RNA, 19 nt, Artificial Sequence
  Description of Artificial Sequence: Synthetic oligonucleotide
  Sense strand starting at position 3090 of SEQ ID NO: 1887763
ccuggccucacgugaugau

SEQ ID NO: 2494805 - RNA, 19 nt, Artificial Sequence
  Description of Artificial Sequence: Synthetic oligonucleotide
  Antisense strand to SEQ ID NO: 2494804
aucaucacgugaggccagg

SEQ ID NO: 2494806 - RNA, 19 nt, Artificial Sequence
  Description of Artificial Sequence: Synthetic oligonucleotide
  Sense strand starting at position 3091 of SEQ ID NO: 1887763
cuggccucacgugaugauu

SEQ ID NO: 2494807 - RNA, 19 nt, Artificial Sequence
  Description of Artificial Sequence: Synthetic oligonucleotide
  Antisense strand to SEQ ID NO: 2494806
aaucaucacgugaggccag

SEQ ID NO: 2494808 - RNA, 19 nt, Artificial Sequence
  Description of Artificial Sequence: Synthetic oligonucleotide
  Sense strand starting at position 3099 of SEQ ID NO: 1887763
acgugaugauuccuccaac

SEQ ID NO: 2494809 - RNA, 19 nt, Artificial Sequence
  Description of Artificial Sequence: Synthetic oligonucleotide
  Antisense strand to SEQ ID NO: 2494808
guuggaggaaucaucacgu

SEQ ID NO: 2494810 - RNA, 19 nt, Artificial Sequence
  Description of Artificial Sequence: Synthetic oligonucleotide
  Sense strand starting at position 3100 of SEQ ID NO: 1887763
cgugaugauuccuccaacu

SEQ ID NO: 2494811 - RNA, 19 nt, Artificial Sequence
  Description of Artificial Sequence: Synthetic oligonucleotide
  Antisense strand to SEQ ID NO: 2494810
aguuggaggaaucaucacg

SEQ ID NO: 2494812 - RNA, 19 nt, Artificial Sequence
  Description of Artificial Sequence: Synthetic oligonucleotide
  Sense strand starting at position 3249 of SEQ ID NO: 1887763
uguaguaugggagggagau

SEQ ID NO: 2494813 - RNA, 19 nt, Artificial Sequence
  Description of Artificial Sequence: Synthetic oligonucleotide
  Antisense strand to SEQ ID NO: 2494812
aucucccucccauacuaca

SEQ ID NO: 2494814 - RNA, 19 nt, Artificial Sequence
  Description of Artificial Sequence: Synthetic oligonucleotide
  Sense strand starting at position 3250 of SEQ ID NO: 1887763
guaguaugggagggagauu

SEQ ID NO: 2494815 - RNA, 19 nt, Artificial Sequence
  Description of Artificial Sequence: Synthetic oligonucleotide
  Antisense strand to SEQ ID NO: 2494814
aaucucccucccauacuac

SEQ ID NO: 2494816 - RNA, 19 nt, Artificial Sequence
  Description of Artificial Sequence: Synthetic oligonucleotide
  Sense strand starting at position 3383 of SEQ ID NO: 1887763
ccaaguuuguaugucugua

SEQ ID NO: 2494817 - RNA, 19 nt, Artificial Sequence
  Description of Artificial Sequence: Synthetic oligonucleotide
  Antisense strand to SEQ ID NO: 2494816
uacagacauacaaacuugg

SEQ ID NO: 2494818 - RNA, 19 nt, Artificial Sequence
  Description of Artificial Sequence: Synthetic oligonucleotide
  Sense strand starting at position 3387 of SEQ ID NO: 1887763
guuuguaugucuguaugca

SEQ ID NO: 2494819 - RNA, 19 nt, Artificial Sequence
  Description of Artificial Sequence: Synthetic oligonucleotide
  Antisense strand to SEQ ID NO: 2494818
ugcauacagacauacaaac

SEQ ID NO: 2494820 - RNA, 19 nt, Artificial Sequence
  Description of Artificial Sequence: Synthetic oligonucleotide
  Sense strand starting at position 3391 of SEQ ID NO: 1887763
guaugucuguaugcaguaa

SEQ ID NO: 2494821 - RNA, 19 nt, Artificial Sequence
  Description of Artificial Sequence: Synthetic oligonucleotide
  Antisense strand to SEQ ID NO: 2494820
uuacugcauacagacauac

SEQ ID NO: 2494822 - RNA, 19 nt, Artificial Sequence
  Description of Artificial Sequence: Synthetic oligonucleotide
  Sense strand starting at position 3395 of SEQ ID NO: 1887763
gucuguaugcaguaagaga

SEQ ID NO: 2494823 - RNA, 19 nt, Artificial Sequence
  Description of Artificial Sequence: Synthetic oligonucleotide
  Antisense strand to SEQ ID NO: 2494822
ucucuuacugcauacagac

SEQ ID NO: 2494824 - RNA, 19 nt, Artificial Sequence
  Description of Artificial Sequence: Synthetic oligonucleotide
  Sense strand starting at position 3561 of SEQ ID NO: 1887763
aaugauguacuuuaugagu

SEQ ID NO: 2494825 - RNA, 19 nt, Artificial Sequence
  Description of Artificial Sequence: Synthetic oligonucleotide
  Antisense strand to SEQ ID NO: 2494824
acucauaaaguacaucauu

SEQ ID NO: 2494826 - RNA, 19 nt, Artificial Sequence
  Description of Artificial Sequence: Synthetic oligonucleotide
  Sense strand starting at position 3576 of SEQ ID NO: 1887763
gaguccuguuaacagaauu

SEQ ID NO: 2494827 - RNA, 19 nt, Artificial Sequence
  Description of Artificial Sequence: Synthetic oligonucleotide
  Antisense strand to SEQ ID NO: 2494826
aauucuguuaacaggacuc

SEQ ID NO: 2494828 - RNA, 19 nt, Artificial Sequence
  Description of Artificial Sequence: Synthetic oligonucleotide
  Sense strand starting at position 3587 of SEQ ID NO: 1887763
acagaauugugacccugga

SEQ ID NO: 2494829 - RNA, 19 nt, Artificial Sequence
  Description of Artificial Sequence: Synthetic oligonucleotide
  Antisense strand to SEQ ID NO: 2494828
uccagggucacaauucugu

SEQ ID NO: 2494830 - RNA, 19 nt, Artificial Sequence
  Description of Artificial Sequence: Synthetic oligonucleotide
  Sense strand starting at position 3786 of SEQ ID NO: 1887763
cccaguuucgguggcaaga

SEQ ID NO: 2494831 - RNA, 19 nt, Artificial Sequence
  Description of Artificial Sequence: Synthetic oligonucleotide
  Antisense strand to SEQ ID NO: 2494830
ucuugccaccgaaacuggg

SEQ ID NO: 2494832 - RNA, 19 nt, Artificial Sequence
  Description of Artificial Sequence: Synthetic oligonucleotide
  Sense strand starting at position 3799 of SEQ ID NO: 1887763
gcaagaauuuccuggcagc

SEQ ID NO: 2494833 - RNA, 19 nt, Artificial Sequence
  Description of Artificial Sequence: Synthetic oligonucleotide
  Antisense strand to SEQ ID NO: 2494832
gcugccaggaaauucuugc

SEQ ID NO: 2494834 - RNA, 19 nt, Artificial Sequence
  Description of Artificial Sequence: Synthetic oligonucleotide
  Sense strand starting at position 3854 of SEQ ID NO: 1887763
cagugacaugcccagauaa

SEQ ID NO: 2494835 - RNA, 19 nt, Artificial Sequence
  Description of Artificial Sequence: Synthetic oligonucleotide
  Antisense strand to SEQ ID NO: 2494834
uuaucugggcaugucacug

SEQ ID NO: 2494836 - RNA, 19 nt, Artificial Sequence
  Description of Artificial Sequence: Synthetic oligonucleotide
  Sense strand starting at position 98 of SEQ ID NO: 1887764
gcggcuggaucccuugaga

SEQ ID NO: 2494837 - RNA, 19 nt, Artificial Sequence
  Description of Artificial Sequence: Synthetic oligonucleotide
  Antisense strand to SEQ ID NO: 2494836
ucucaagggauccagccgc

SEQ ID NO: 2494838 - RNA, 19 nt, Artificial Sequence
  Description of Artificial Sequence: Synthetic oligonucleotide
  Sense strand starting at position 101 of SEQ ID NO: 1887764
gcuggaucccuugagacca

SEQ ID NO: 2494839 - RNA, 19 nt, Artificial Sequence
  Description of Artificial Sequence: Synthetic oligonucleotide
  Antisense strand to SEQ ID NO: 2494838
uggucucaagggauccagc

SEQ ID NO: 2494840 - RNA, 19 nt, Artificial Sequence
  Description of Artificial Sequence: Synthetic oligonucleotide
  Sense strand starting at position 955 of SEQ ID NO: 1887764
uuucuaagcuggucucgaa

SEQ ID NO: 2494841 - RNA, 19 nt, Artificial Sequence
  Description of Artificial Sequence: Synthetic oligonucleotide
  Antisense strand to SEQ ID NO: 2494840
uucgagaccagcuuagaaa

SEQ ID NO: 2494842 - RNA, 19 nt, Artificial Sequence
  Description of Artificial Sequence: Synthetic oligonucleotide
  Sense strand starting at position 959 of SEQ ID NO: 1887764
uaagcuggucucgaacuua

SEQ ID NO: 2494843 - RNA, 19 nt, Artificial Sequence
  Description of Artificial Sequence: Synthetic oligonucleotide
  Antisense strand to SEQ ID NO: 2494842
uaaguucgagaccagcuua

SEQ ID NO: 2494844 - RNA, 19 nt, Artificial Sequence
  Description of Artificial Sequence: Synthetic oligonucleotide
  Sense strand starting at position 970 of SEQ ID NO: 1887764
cgaacuuaaugugcucaaa

SEQ ID NO: 2494845 - RNA, 19 nt, Artificial Sequence
  Description of Artificial Sequence: Synthetic oligonucleotide
  Antisense strand to SEQ ID NO: 2494844
uuugagcacauuaaguucg

SEQ ID NO: 2494846 - RNA, 19 nt, Artificial Sequence
  Description of Artificial Sequence: Synthetic oligonucleotide
  Sense strand starting at position 973 of SEQ ID NO: 1887764
acuuaaugugcucaaauga

SEQ ID NO: 2494847 - RNA, 19 nt, Artificial Sequence
  Description of Artificial Sequence: Synthetic oligonucleotide
  Antisense strand to SEQ ID NO: 2494846
ucauuugagcacauuaagu

SEQ ID NO: 2494848 - RNA, 19 nt, Artificial Sequence
  Description of Artificial Sequence: Synthetic oligonucleotide
  Sense strand starting at position 1120 of SEQ ID NO: 1887764
agcgcagauccagaguuua

SEQ ID NO: 2494849 - RNA, 19 nt, Artificial Sequence
  Description of Artificial Sequence: Synthetic oligonucleotide
  Antisense strand to SEQ ID NO: 2494848
uaaacucuggaucugcgcu

SEQ ID NO: 2494850 - RNA, 19 nt, Artificial Sequence
  Description of Artificial Sequence: Synthetic oligonucleotide
  Sense strand starting at position 1128 of SEQ ID NO: 1887764
uccagaguuuaggcagaga

SEQ ID NO: 2494851 - RNA, 19 nt, Artificial Sequence
  Description of Artificial Sequence: Synthetic oligonucleotide
  Antisense strand to SEQ ID NO: 2494850
ucucugccuaaacucugga

SEQ ID NO: 2494852 - RNA, 19 nt, Artificial Sequence
  Description of Artificial Sequence: Synthetic oligonucleotide
  Sense strand starting at position 1198 of SEQ ID NO: 1887764
agaggauggagccgucaaa

SEQ ID NO: 2494853 - RNA, 19 nt, Artificial Sequence
  Description of Artificial Sequence: Synthetic oligonucleotide
  Antisense strand to SEQ ID NO: 2494852
uuugacggcuccauccucu

SEQ ID NO: 2494854 - RNA, 19 nt, Artificial Sequence
  Description of Artificial Sequence: Synthetic oligonucleotide
  Sense strand starting at position 1242 of SEQ ID NO: 1887764
acagaaucauguucuggaa

SEQ ID NO: 2494855 - RNA, 19 nt, Artificial Sequence
  Description of Artificial Sequence: Synthetic oligonucleotide
  Antisense strand to SEQ ID NO: 2494854
uuccagaacaugauucugu

SEQ ID NO: 2494856 - RNA, 19 nt, Artificial Sequence
  Description of Artificial Sequence: Synthetic oligonucleotide
  Sense strand starting at position 1280 of SEQ ID NO: 1887764
gucagaugcagguggaaau

SEQ ID NO: 2494857 - RNA, 19 nt, Artificial Sequence
  Description of Artificial Sequence: Synthetic oligonucleotide
  Antisense strand to SEQ ID NO: 2494856
auuuccaccugcaucugac

SEQ ID NO: 2494858 - RNA, 19 nt, Artificial Sequence
  Description of Artificial Sequence: Synthetic oligonucleotide
  Sense strand starting at position 1343 of SEQ ID NO: 1887764
ggaggaagguugugcuugu

SEQ ID NO: 2494859 - RNA, 19 nt, Artificial Sequence
  Description of Artificial Sequence: Synthetic oligonucleotide
  Antisense strand to SEQ ID NO: 2494858
acaagcacaaccuuccucc

SEQ ID NO: 2494860 - RNA, 19 nt, Artificial Sequence
  Description of Artificial Sequence: Synthetic oligonucleotide
  Sense strand starting at position 1347 of SEQ ID NO: 1887764
gaagguugugcuugucuga

SEQ ID NO: 2494861 - RNA, 19 nt, Artificial Sequence
  Description of Artificial Sequence: Synthetic oligonucleotide
  Antisense strand to SEQ ID NO: 2494860
ucagacaagcacaaccuuc

SEQ ID NO: 2494862 - RNA, 19 nt, Artificial Sequence
  Description of Artificial Sequence: Synthetic oligonucleotide
  Sense strand starting at position 1504 of SEQ ID NO: 1887764
ggcagaggucccugauaac

SEQ ID NO: 2494863 - RNA, 19 nt, Artificial Sequence
  Description of Artificial Sequence: Synthetic oligonucleotide
  Antisense strand to SEQ ID NO: 2494862
guuaucagggaccucugcc

SEQ ID NO: 2494864 - RNA, 19 nt, Artificial Sequence
  Description of Artificial Sequence: Synthetic oligonucleotide
  Sense strand starting at position 1562 of SEQ ID NO: 1887764
gccagagaauccugcauga

SEQ ID NO: 2494865 - RNA, 19 nt, Artificial Sequence
  Description of Artificial Sequence: Synthetic oligonucleotide
  Antisense strand to SEQ ID NO: 2494864
ucaugcaggauucucuggc

SEQ ID NO: 2494866 - RNA, 19 nt, Artificial Sequence
  Description of Artificial Sequence: Synthetic oligonucleotide
  Sense strand starting at position 1566 of SEQ ID NO: 1887764
gagaauccugcaugacagu

SEQ ID NO: 2494867 - RNA, 19 nt, Artificial Sequence
  Description of Artificial Sequence: Synthetic oligonucleotide
  Antisense strand to SEQ ID NO: 2494866
acugucaugcaggauucuc

SEQ ID NO: 2494868 - RNA, 19 nt, Artificial Sequence
  Description of Artificial Sequence: Synthetic oligonucleotide
  Sense strand starting at position 1588 of SEQ ID NO: 1887764
ccaagcauguuuccucgaa

SEQ ID NO: 2494869 - RNA, 19 nt, Artificial Sequence
  Description of Artificial Sequence: Synthetic oligonucleotide
  Antisense strand to SEQ ID NO: 2494868
uucgaggaaacaugcuugg

SEQ ID NO: 2494870 - RNA, 19 nt, Artificial Sequence
  Description of Artificial Sequence: Synthetic oligonucleotide
  Sense strand starting at position 1589 of SEQ ID NO: 1887764
caagcauguuuccucgaac

SEQ ID NO: 2494871 - RNA, 19 nt, Artificial Sequence
  Description of Artificial Sequence: Synthetic oligonucleotide
  Antisense strand to SEQ ID NO: 2494870
guucgaggaaacaugcuug

SEQ ID NO: 2494872 - RNA, 19 nt, Artificial Sequence
  Description of Artificial Sequence: Synthetic oligonucleotide
  Sense strand starting at position 1592 of SEQ ID NO: 1887764
gcauguuuccucgaacccu

SEQ ID NO: 2494873 - RNA, 19 nt, Artificial Sequence
  Description of Artificial Sequence: Synthetic oligonucleotide
  Antisense strand to SEQ ID NO: 2494872
aggguucgaggaaacaugc

SEQ ID NO: 2494874 - RNA, 19 nt, Artificial Sequence
  Description of Artificial Sequence: Synthetic oligonucleotide
  Sense strand starting at position 1601 of SEQ ID NO: 1887764
cucgaacccucccuuugau

SEQ ID NO: 2494875 - RNA, 19 nt, Artificial Sequence
  Description of Artificial Sequence: Synthetic oligonucleotide
  Antisense strand to SEQ ID NO: 2494874
aucaaagggaggguucgag

SEQ ID NO: 2494876 - RNA, 19 nt, Artificial Sequence
  Description of Artificial Sequence: Synthetic oligonucleotide
  Sense strand starting at position 1708 of SEQ ID NO: 1887764
cgcgggagacccguaguua

SEQ ID NO: 2494877 - RNA, 19 nt, Artificial Sequence
  Description of Artificial Sequence: Synthetic oligonucleotide
  Antisense strand to SEQ ID NO: 2494876
uaacuacgggucucccgcg

SEQ ID NO: 2494878 - RNA, 19 nt, Artificial Sequence
  Description of Artificial Sequence: Synthetic oligonucleotide
  Sense strand starting at position 1720 of SEQ ID NO: 1887764
guaguuaccuguccucuga

SEQ ID NO: 2494879 - RNA, 19 nt, Artificial Sequence
  Description of Artificial Sequence: Synthetic oligonucleotide
  Antisense strand to SEQ ID NO: 2494878
ucagaggacagguaacuac

SEQ ID NO: 2494880 - RNA, 19 nt, Artificial Sequence
  Description of Artificial Sequence: Synthetic oligonucleotide
  Sense strand starting at position 1722 of SEQ ID NO: 1887764
aguuaccuguccucugaua

SEQ ID NO: 2494881 - RNA, 19 nt, Artificial Sequence
  Description of Artificial Sequence: Synthetic oligonucleotide
  Antisense strand to SEQ ID NO: 2494880
uaucagaggacagguaacu

SEQ ID NO: 2494882 - RNA, 19 nt, Artificial Sequence
  Description of Artificial Sequence: Synthetic oligonucleotide
  Sense strand starting at position 1727 of SEQ ID NO: 1887764
ccuguccucugauaacaga

SEQ ID NO: 2494883 - RNA, 19 nt, Artificial Sequence
  Description of Artificial Sequence: Synthetic oligonucleotide
  Antisense strand to SEQ ID NO: 2494882
ucuguuaucagaggacagg

SEQ ID NO: 2494884 - RNA, 19 nt, Artificial Sequence
  Description of Artificial Sequence: Synthetic oligonucleotide
  Sense strand starting at position 1805 of SEQ ID NO: 1887764
ugagauaccuugcuauccu

SEQ ID NO: 2494885 - RNA, 19 nt, Artificial Sequence
  Description of Artificial Sequence: Synthetic oligonucleotide
  Antisense strand to SEQ ID NO: 2494884
aggauagcaagguaucuca

SEQ ID NO: 2494886 - RNA, 19 nt, Artificial Sequence
  Description of Artificial Sequence: Synthetic oligonucleotide
  Sense strand starting at position 2038 of SEQ ID NO: 1887764
ggagugguagcgugcccaa

SEQ ID NO: 2494887 - RNA, 19 nt, Artificial Sequence
  Description of Artificial Sequence: Synthetic oligonucleotide
  Antisense strand to SEQ ID NO: 2494886
uugggcacgcuaccacucc

SEQ ID NO: 2494888 - RNA, 19 nt, Artificial Sequence
  Description of Artificial Sequence: Synthetic oligonucleotide
  Sense strand starting at position 2069 of SEQ ID NO: 1887764
aguugaaguugucgggaau

SEQ ID NO: 2494889 - RNA, 19 nt, Artificial Sequence
  Description of Artificial Sequence: Synthetic oligonucleotide
  Antisense strand to SEQ ID NO: 2494888
auucccgacaacuucaacu

SEQ ID NO: 2494890 - RNA, 19 nt, Artificial Sequence
  Description of Artificial Sequence: Synthetic oligonucleotide
  Sense strand starting at position 2070 of SEQ ID NO: 1887764
guugaaguugucgggaaug

SEQ ID NO: 2494891 - RNA, 19 nt, Artificial Sequence
  Description of Artificial Sequence: Synthetic oligonucleotide
  Antisense strand to SEQ ID NO: 2494890
cauucccgacaacuucaac

SEQ ID NO: 2494892 - RNA, 19 nt, Artificial Sequence
  Description of Artificial Sequence: Synthetic oligonucleotide
  Sense strand starting at position 2072 of SEQ ID NO: 1887764
ugaaguugucgggaaugag

SEQ ID NO: 2494893 - RNA, 19 nt, Artificial Sequence
  Description of Artificial Sequence: Synthetic oligonucleotide
  Antisense strand to SEQ ID NO: 2494892
cucauucccgacaacuuca

SEQ ID NO: 2494894 - RNA, 19 nt, Artificial Sequence
  Description of Artificial Sequence: Synthetic oligonucleotide
  Sense strand starting at position 2496 of SEQ ID NO: 1887764
cguccauucuccuggguca

SEQ ID NO: 2494895 - RNA, 19 nt, Artificial Sequence
  Description of Artificial Sequence: Synthetic oligonucleotide
  Antisense strand to SEQ ID NO: 2494894
ugacccaggagaauggacg

SEQ ID NO: 2494896 - RNA, 19 nt, Artificial Sequence
  Description of Artificial Sequence: Synthetic oligonucleotide
  Sense strand starting at position 2699 of SEQ ID NO: 1887764
ggcucauccucuugaguag

SEQ ID NO: 2494897 - RNA, 19 nt, Artificial Sequence
  Description of Artificial Sequence: Synthetic oligonucleotide
  Antisense strand to SEQ ID NO: 2494896
cuacucaagaggaugagcc

SEQ ID NO: 2494898 - RNA, 19 nt, Artificial Sequence
  Description of Artificial Sequence: Synthetic oligonucleotide
  Sense strand starting at position 3082 of SEQ ID NO: 1887764
cggccaggcugcucuagaa

SEQ ID NO: 2494899 - RNA, 19 nt, Artificial Sequence
  Description of Artificial Sequence: Synthetic oligonucleotide
  Antisense strand to SEQ ID NO: 2494898
uucuagagcagccuggccg

SEQ ID NO: 2494900 - RNA, 19 nt, Artificial Sequence
  Description of Artificial Sequence: Synthetic oligonucleotide
  Sense strand starting at position 3094 of SEQ ID NO: 1887764
ucuagaacugcuggacuca

SEQ ID NO: 2494901 - RNA, 19 nt, Artificial Sequence
  Description of Artificial Sequence: Synthetic oligonucleotide
  Antisense strand to SEQ ID NO: 2494900
ugaguccagcaguucuaga

SEQ ID NO: 2494902 - RNA, 19 nt, Artificial Sequence
  Description of Artificial Sequence: Synthetic oligonucleotide
  Sense strand starting at position 93 of SEQ ID NO: 1887765
ucaggcuucucauuggaga

SEQ ID NO: 2494903 - RNA, 19 nt, Artificial Sequence
  Description of Artificial Sequence: Synthetic oligonucleotide
  Antisense strand to SEQ ID NO: 2494902
ucuccaaugagaagccuga

SEQ ID NO: 2494904 - RNA, 19 nt, Artificial Sequence
  Description of Artificial Sequence: Synthetic oligonucleotide
  Sense strand starting at position 94 of SEQ ID NO: 1887765
caggcuucucauuggagau

SEQ ID NO: 2494905 - RNA, 19 nt, Artificial Sequence
  Description of Artificial Sequence: Synthetic oligonucleotide
  Antisense strand to SEQ ID NO: 2494904
aucuccaaugagaagccug

SEQ ID NO: 2494906 - RNA, 19 nt, Artificial Sequence
  Description of Artificial Sequence: Synthetic oligonucleotide
  Sense strand starting at position 113 of SEQ ID NO: 1887765
gccauaacgguugaacuca

SEQ ID NO: 2494907 - RNA, 19 nt, Artificial Sequence
  Description of Artificial Sequence: Synthetic oligonucleotide
  Antisense strand to SEQ ID NO: 2494906
ugaguucaaccguuauggc

SEQ ID NO: 2494908 - RNA, 19 nt, Artificial Sequence
  Description of Artificial Sequence: Synthetic oligonucleotide
  Sense strand starting at position 121 of SEQ ID NO: 1887765
gguugaacucaguggagau

SEQ ID NO: 2494909 - RNA, 19 nt, Artificial Sequence
  Description of Artificial Sequence: Synthetic oligonucleotide
  Antisense strand to SEQ ID NO: 2494908
aucuccacugaguucaacc

SEQ ID NO: 2494910 - RNA, 19 nt, Artificial Sequence
  Description of Artificial Sequence: Synthetic oligonucleotide
  Sense strand starting at position 122 of SEQ ID NO: 1887765
guugaacucaguggagaug

SEQ ID NO: 2494911 - RNA, 19 nt, Artificial Sequence
  Description of Artificial Sequence: Synthetic oligonucleotide
  Antisense strand to SEQ ID NO: 2494910
caucuccacugaguucaac

SEQ ID NO: 2494912 - RNA, 19 nt, Artificial Sequence
  Description of Artificial Sequence: Synthetic oligonucleotide
  Sense strand starting at position 134 of SEQ ID NO: 1887765
ggagauguacucugucuuu

SEQ ID NO: 2494913 - RNA, 19 nt, Artificial Sequence
  Description of Artificial Sequence: Synthetic oligonucleotide
  Antisense strand to SEQ ID NO: 2494912
aaagacagaguacaucucc

SEQ ID NO: 2494914 - RNA, 19 nt, Artificial Sequence
  Description of Artificial Sequence: Synthetic oligonucleotide
  Sense strand starting at position 472 of SEQ ID NO: 1887765
gauugaugagaucgauggu

SEQ ID NO: 2494915 - RNA, 19 nt, Artificial Sequence
  Description of Artificial Sequence: Synthetic oligonucleotide
  Antisense strand to SEQ ID NO: 2494914
accaucgaucucaucaauc

SEQ ID NO: 2494916 - RNA, 19 nt, Artificial Sequence
  Description of Artificial Sequence: Synthetic oligonucleotide
  Sense strand starting at position 475 of SEQ ID NO: 1887765
ugaugagaucgauggugac

SEQ ID NO: 2494917 - RNA, 19 nt, Artificial Sequence
  Description of Artificial Sequence: Synthetic oligonucleotide
  Antisense strand to SEQ ID NO: 2494916
gucaccaucgaucucauca

SEQ ID NO: 2494918 - RNA, 19 nt, Artificial Sequence
  Description of Artificial Sequence: Synthetic oligonucleotide
  Sense strand starting at position 523 of SEQ ID NO: 1887765
guuugugcuguuucuccaa

SEQ ID NO: 2494919 - RNA, 19 nt, Artificial Sequence
  Description of Artificial Sequence: Synthetic oligonucleotide
  Antisense strand to SEQ ID NO: 2494918
uuggagaaacagcacaaac

SEQ ID NO: 2494920 - RNA, 19 nt, Artificial Sequence
  Description of Artificial Sequence: Synthetic oligonucleotide
  Sense strand starting at position 547 of SEQ ID NO: 1887765
uggcuuuguacuggacgaa

SEQ ID NO: 2494921 - RNA, 19 nt, Artificial Sequence
  Description of Artificial Sequence: Synthetic oligonucleotide
  Antisense strand to SEQ ID NO: 2494920
uucguccaguacaaagcca

SEQ ID NO: 2494922 - RNA, 19 nt, Artificial Sequence
  Description of Artificial Sequence: Synthetic oligonucleotide
  Sense strand starting at position 832 of SEQ ID NO: 1887765
aggaacucauaccugagua

SEQ ID NO: 2494923 - RNA, 19 nt, Artificial Sequence
  Description of Artificial Sequence: Synthetic oligonucleotide
  Antisense strand to SEQ ID NO: 2494922
uacucagguaugaguuccu

SEQ ID NO: 2494924 - RNA, 19 nt, Artificial Sequence
  Description of Artificial Sequence: Synthetic oligonucleotide
  Sense strand starting at position 833 of SEQ ID NO: 1887765
ggaacucauaccugaguag

SEQ ID NO: 2494925 - RNA, 19 nt, Artificial Sequence
  Description of Artificial Sequence: Synthetic oligonucleotide
  Antisense strand to SEQ ID NO: 2494924
cuacucagguaugaguucc

SEQ ID NO: 2494926 - RNA, 19 nt, Artificial Sequence
  Description of Artificial Sequence: Synthetic oligonucleotide
  Sense strand starting at position 834 of SEQ ID NO: 1887765
gaacucauaccugaguagu

SEQ ID NO: 2494927 - RNA, 19 nt, Artificial Sequence
  Description of Artificial Sequence: Synthetic oligonucleotide
  Antisense strand to SEQ ID NO: 2494926
acuacucagguaugaguuc

SEQ ID NO: 2494928 - RNA, 19 nt, Artificial Sequence
  Description of Artificial Sequence: Synthetic oligonucleotide
  Sense strand starting at position 836 of SEQ ID NO: 1887765
acucauaccugaguaguuu

SEQ ID NO: 2494929 - RNA, 19 nt, Artificial Sequence
  Description of Artificial Sequence: Synthetic oligonucleotide
  Antisense strand to SEQ ID NO: 2494928
aaacuacucagguaugagu

SEQ ID NO: 2494930 - RNA, 19 nt, Artificial Sequence
  Description of Artificial Sequence: Synthetic oligonucleotide
  Sense strand starting at position 917 of SEQ ID NO: 1887765
ggauaucagggaggcuauu

SEQ ID NO: 2494931 - RNA, 19 nt, Artificial Sequence
  Description of Artificial Sequence: Synthetic oligonucleotide
  Antisense strand to SEQ ID NO: 2494930
aauagccucccugauaucc

SEQ ID NO: 2494932 - RNA, 19 nt, Artificial Sequence
  Description of Artificial Sequence: Synthetic oligonucleotide
  Sense strand starting at position 928 of SEQ ID NO: 1887765
aggcuauugcaguacuuga

SEQ ID NO: 2494933 - RNA, 19 nt, Artificial Sequence
  Description of Artificial Sequence: Synthetic oligonucleotide
  Antisense strand to SEQ ID NO: 2494932
ucaaguacugcaauagccu

SEQ ID NO: 2494934 - RNA, 19 nt, Artificial Sequence
  Description of Artificial Sequence: Synthetic oligonucleotide
  Sense strand starting at position 1071 of SEQ ID NO: 1887765
ggcagaguccggugggaau

SEQ ID NO: 2494935 - RNA, 19 nt, Artificial Sequence
  Description of Artificial Sequence: Synthetic oligonucleotide
  Antisense strand to SEQ ID NO: 2494934
auucccaccggacucugcc

SEQ ID NO: 2494936 - RNA, 19 nt, Artificial Sequence
  Description of Artificial Sequence: Synthetic oligonucleotide
  Sense strand starting at position 1072 of SEQ ID NO: 1887765
gcagaguccggugggaauu

SEQ ID NO: 2494937 - RNA, 19 nt, Artificial Sequence
  Description of Artificial Sequence: Synthetic oligonucleotide
  Antisense strand to SEQ ID NO: 2494936
aauucccaccggacucugc

SEQ ID NO: 2494938 - RNA, 19 nt, Artificial Sequence
  Description of Artificial Sequence: Synthetic oligonucleotide
  Sense strand starting at position 1190 of SEQ ID NO: 1887765
gacaaaugcugguuucuuu

SEQ ID NO: 2494939 - RNA, 19 nt, Artificial Sequence
  Description of Artificial Sequence: Synthetic oligonucleotide
  Antisense strand to SEQ ID NO: 2494938
aaagaaaccagcauuuguc

SEQ ID NO: 2494940 - RNA, 19 nt, Artificial Sequence
  Description of Artificial Sequence: Synthetic oligonucleotide
  Sense strand starting at position 1228 of SEQ ID NO: 1887765
guccaaaugcuuuaaugga

SEQ ID NO: 2494941 - RNA, 19 nt, Artificial Sequence
  Description of Artificial Sequence: Synthetic oligonucleotide
  Antisense strand to SEQ ID NO: 2494940
uccauuaaagcauuuggac

SEQ ID NO: 2494942 - RNA, 19 nt, Artificial Sequence
  Description of Artificial Sequence: Synthetic oligonucleotide
  Sense strand starting at position 1366 of SEQ ID NO: 1887765
acucaaucgucuucggaag

SEQ ID NO: 2494943 - RNA, 19 nt, Artificial Sequence
  Description of Artificial Sequence: Synthetic oligonucleotide
  Antisense strand to SEQ ID NO: 2494942
cuuccgaagacgauugagu

SEQ ID NO: 2494944 - RNA, 19 nt, Artificial Sequence
  Description of Artificial Sequence: Synthetic oligonucleotide
  Sense strand starting at position 1367 of SEQ ID NO: 1887765
cucaaucgucuucggaaga

SEQ ID NO: 2494945 - RNA, 19 nt, Artificial Sequence
  Description of Artificial Sequence: Synthetic oligonucleotide
  Antisense strand to SEQ ID NO: 2494944
ucuuccgaagacgauugag

SEQ ID NO: 2494946 - RNA, 19 nt, Artificial Sequence
  Description of Artificial Sequence: Synthetic oligonucleotide
  Sense strand starting at position 1477 of SEQ ID NO: 1887765
accugaaucucagaaggaa

SEQ ID NO: 2494947 - RNA, 19 nt, Artificial Sequence
  Description of Artificial Sequence: Synthetic oligonucleotide
  Antisense strand to SEQ ID NO: 2494946
uuccuucugagauucaggu

SEQ ID NO: 2494948 - RNA, 19 nt, Artificial Sequence
  Description of Artificial Sequence: Synthetic oligonucleotide
  Sense strand starting at position 1555 of SEQ ID NO: 1887765
ugacguuguucagcagaaa

SEQ ID NO: 2494949 - RNA, 19 nt, Artificial Sequence
  Description of Artificial Sequence: Synthetic oligonucleotide
  Antisense strand to SEQ ID NO: 2494948
uuucugcugaacaacguca

SEQ ID NO: 2494950 - RNA, 19 nt, Artificial Sequence
  Description of Artificial Sequence: Synthetic oligonucleotide
  Sense strand starting at position 1790 of SEQ ID NO: 1887765
cggaaaguggguugagaug

SEQ ID NO: 2494951 - RNA, 19 nt, Artificial Sequence
  Description of Artificial Sequence: Synthetic oligonucleotide
  Antisense strand to SEQ ID NO: 2494950
caucucaacccacuuuccg

SEQ ID NO: 2494952 - RNA, 19 nt, Artificial Sequence
  Description of Artificial Sequence: Synthetic oligonucleotide
  Sense strand starting at position 2031 of SEQ ID NO: 1887765
ugugauugguggagagaua

SEQ ID NO: 2494953 - RNA, 19 nt, Artificial Sequence
  Description of Artificial Sequence: Synthetic oligonucleotide
  Antisense strand to SEQ ID NO: 2494952
uaucucuccaccaaucaca

SEQ ID NO: 2494954 - RNA, 19 nt, Artificial Sequence
  Description of Artificial Sequence: Synthetic oligonucleotide
  Sense strand starting at position 2043 of SEQ ID NO: 1887765
agagauaucucagucugga

SEQ ID NO: 2494955 - RNA, 19 nt, Artificial Sequence
  Description of Artificial Sequence: Synthetic oligonucleotide
  Antisense strand to SEQ ID NO: 2494954
uccagacugagauaucucu

SEQ ID NO: 2494956 - RNA, 19 nt, Artificial Sequence
  Description of Artificial Sequence: Synthetic oligonucleotide
  Sense strand starting at position 2069 of SEQ ID NO: 1887765
uugagagugacguaacguu

SEQ ID NO: 2494957 - RNA, 19 nt, Artificial Sequence
  Description of Artificial Sequence: Synthetic oligonucleotide
  Antisense strand to SEQ ID NO: 2494956
aacguuacgucacucucaa

SEQ ID NO: 2494958 - RNA, 19 nt, Artificial Sequence
  Description of Artificial Sequence: Synthetic oligonucleotide
  Sense strand starting at position 2443 of SEQ ID NO: 1887765
ggugauuggccuuaagcag

SEQ ID NO: 2494959 - RNA, 19 nt, Artificial Sequence
  Description of Artificial Sequence: Synthetic oligonucleotide
  Antisense strand to SEQ ID NO: 2494958
cugcuuaaggccaaucacc

SEQ ID NO: 2494960 - RNA, 19 nt, Artificial Sequence
  Description of Artificial Sequence: Synthetic oligonucleotide
  Sense strand starting at position 2506 of SEQ ID NO: 1887765
gccagguuagucggagaga

SEQ ID NO: 2494961 - RNA, 19 nt, Artificial Sequence
  Description of Artificial Sequence: Synthetic oligonucleotide
  Antisense strand to SEQ ID NO: 2494960
ucucuccgacuaaccuggc

SEQ ID NO: 2494962 - RNA, 19 nt, Artificial Sequence
  Description of Artificial Sequence: Synthetic oligonucleotide
  Sense strand starting at position 2878 of SEQ ID NO: 1887765
agcgaagcucggcagagau

SEQ ID NO: 2494963 - RNA, 19 nt, Artificial Sequence
  Description of Artificial Sequence: Synthetic oligonucleotide
  Antisense strand to SEQ ID NO: 2494962
aucucugccgagcuucgcu

SEQ ID NO: 2494964 - RNA, 19 nt, Artificial Sequence
  Description of Artificial Sequence: Synthetic oligonucleotide
  Sense strand starting at position 2975 of SEQ ID NO: 1887765
ucguuaaagccugaggaga

SEQ ID NO: 2494965 - RNA, 19 nt, Artificial Sequence
  Description of Artificial Sequence: Synthetic oligonucleotide
  Antisense strand to SEQ ID NO: 2494964
ucuccucaggcuuuaacga

SEQ ID NO: 2494966 - RNA, 19 nt, Artificial Sequence
  Description of Artificial Sequence: Synthetic oligonucleotide
  Sense strand starting at position 3007 of SEQ ID NO: 1887765
cggagauucugcccuugau

SEQ ID NO: 2494967 - RNA, 19 nt, Artificial Sequence
  Description of Artificial Sequence: Synthetic oligonucleotide
  Antisense strand to SEQ ID NO: 2494966
aucaagggcagaaucuccg

SEQ ID NO: 2494968 - RNA, 19 nt, Artificial Sequence
  Description of Artificial Sequence: Synthetic oligonucleotide
  Sense strand starting at position 3010 of SEQ ID NO: 1887765
agauucugcccuugauuga

SEQ ID NO: 2494969 - RNA, 19 nt, Artificial Sequence
  Description of Artificial Sequence: Synthetic oligonucleotide
  Antisense strand to SEQ ID NO: 2494968
ucaaucaagggcagaaucu

SEQ ID NO: 2494970 - RNA, 19 nt, Artificial Sequence
  Description of Artificial Sequence: Synthetic oligonucleotide
  Sense strand starting at position 3011 of SEQ ID NO: 1887765
gauucugcccuugauugau

SEQ ID NO: 2494971 - RNA, 19 nt, Artificial Sequence
  Description of Artificial Sequence: Synthetic oligonucleotide
  Antisense strand to SEQ ID NO: 2494970
aucaaucaagggcagaauc

SEQ ID NO: 2494972 - RNA, 19 nt, Artificial Sequence
  Description of Artificial Sequence: Synthetic oligonucleotide
  Sense strand starting at position 3096 of SEQ ID NO: 1887765
aguggugacagcuauagga

SEQ ID NO: 2494973 - RNA, 19 nt, Artificial Sequence
  Description of Artificial Sequence: Synthetic oligonucleotide
  Antisense strand to SEQ ID NO: 2494972
uccuauagcugucaccacu

SEQ ID NO: 2494974 - RNA, 19 nt, Artificial Sequence
  Description of Artificial Sequence: Synthetic oligonucleotide
  Sense strand starting at position 3122 of SEQ ID NO: 1887765
cgaauauuacuuuggaaag

SEQ ID NO: 2494975 - RNA, 19 nt, Artificial Sequence
  Description of Artificial Sequence: Synthetic oligonucleotide
  Antisense strand to SEQ ID NO: 2494974
cuuuccaaaguaauauucg

SEQ ID NO: 2494976 - RNA, 19 nt, Artificial Sequence
  Description of Artificial Sequence: Synthetic oligonucleotide
  Sense strand starting at position 3201 of SEQ ID NO: 1887765
guagaucugccagagguau

SEQ ID NO: 2494977 - RNA, 19 nt, Artificial Sequence
  Description of Artificial Sequence: Synthetic oligonucleotide
  Antisense strand to SEQ ID NO: 2494976
auaccucuggcagaucuac

SEQ ID NO: 2494978 - RNA, 19 nt, Artificial Sequence
  Description of Artificial Sequence: Synthetic oligonucleotide
  Sense strand starting at position 3232 of SEQ ID NO: 1887765
uuccauuucccacguguuu

SEQ ID NO: 2494979 - RNA, 19 nt, Artificial Sequence
  Description of Artificial Sequence: Synthetic oligonucleotide
  Antisense strand to SEQ ID NO: 2494978
aaacacgugggaaauggaa

SEQ ID NO: 2494980 - RNA, 19 nt, Artificial Sequence
  Description of Artificial Sequence: Synthetic oligonucleotide
  Sense strand starting at position 3597 of SEQ ID NO: 1887765
cuggcuaauuuguaagauu

SEQ ID NO: 2494981 - RNA, 19 nt, Artificial Sequence
  Description of Artificial Sequence: Synthetic oligonucleotide
  Antisense strand to SEQ ID NO: 2494980
aaucuuacaaauuagccag

SEQ ID NO: 2494982 - RNA, 19 nt, Artificial Sequence
  Description of Artificial Sequence: Synthetic oligonucleotide
  Sense strand starting at position 173 of SEQ ID NO: 1887766
ugcuguccucuccaaagau

SEQ ID NO: 2494983 - RNA, 19 nt, Artificial Sequence
  Description of Artificial Sequence: Synthetic oligonucleotide
  Antisense strand to SEQ ID NO: 2494982
aucuuuggagaggacagca

SEQ ID NO: 2494984 - RNA, 19 nt, Artificial Sequence
  Description of Artificial Sequence: Synthetic oligonucleotide
  Sense strand starting at position 284 of SEQ ID NO: 1887766
acaggauggucucacuaug

SEQ ID NO: 2494985 - RNA, 19 nt, Artificial Sequence
  Description of Artificial Sequence: Synthetic oligonucleotide
  Antisense strand to SEQ ID NO: 2494984
cauagugagaccauccugu

SEQ ID NO: 2494986 - RNA, 19 nt, Artificial Sequence
  Description of Artificial Sequence: Synthetic oligonucleotide
  Sense strand starting at position 453 of SEQ ID NO: 1887766
uggcuugauucggcucacu

SEQ ID NO: 2494987 - RNA, 19 nt, Artificial Sequence
  Description of Artificial Sequence: Synthetic oligonucleotide
  Antisense strand to SEQ ID NO: 2494986
agugagccgaaucaagcca

SEQ ID NO: 2494988 - RNA, 19 nt, Artificial Sequence
  Description of Artificial Sequence: Synthetic oligonucleotide
  Sense strand starting at position 700 of SEQ ID NO: 1887766
aaucauguacucgagagca

SEQ ID NO: 2494989 - RNA, 19 nt, Artificial Sequence
  Description of Artificial Sequence: Synthetic oligonucleotide
  Antisense strand to SEQ ID NO: 2494988
ugcucucgaguacaugauu

SEQ ID NO: 2494990 - RNA, 19 nt, Artificial Sequence
  Description of Artificial Sequence: Synthetic oligonucleotide
  Sense strand starting at position 900 of SEQ ID NO: 1887766
agacauuccugagucccau

SEQ ID NO: 2494991 - RNA, 19 nt, Artificial Sequence
  Description of Artificial Sequence: Synthetic oligonucleotide
  Antisense strand to SEQ ID NO: 2494990
augggacucaggaaugucu

SEQ ID NO: 2494992 - RNA, 19 nt, Artificial Sequence
  Description of Artificial Sequence: Synthetic oligonucleotide
  Sense strand starting at position 939 of SEQ ID NO: 1887766
ucaucugcccuggaaacuu

SEQ ID NO: 2494993 - RNA, 19 nt, Artificial Sequence
  Description of Artificial Sequence: Synthetic oligonucleotide
  Antisense strand to SEQ ID NO: 2494992
aaguuuccagggcagauga

SEQ ID NO: 2494994 - RNA, 19 nt, Artificial Sequence
  Description of Artificial Sequence: Synthetic oligonucleotide
  Sense strand starting at position 1022 of SEQ ID NO: 1887766
gaaugagugcuugaaccca

SEQ ID NO: 2494995 - RNA, 19 nt, Artificial Sequence
  Description of Artificial Sequence: Synthetic oligonucleotide
  Antisense strand to SEQ ID NO: 2494994
uggguucaagcacucauuc

SEQ ID NO: 2494996 - RNA, 19 nt, Artificial Sequence
  Description of Artificial Sequence: Synthetic oligonucleotide
  Sense strand starting at position 1038 of SEQ ID NO: 1887766
ccaggaguuuaagcaacua

SEQ ID NO: 2494997 - RNA, 19 nt, Artificial Sequence
  Description of Artificial Sequence: Synthetic oligonucleotide
  Antisense strand to SEQ ID NO: 2494996
uaguugcuuaaacuccugg

SEQ ID NO: 2494998 - RNA, 19 nt, Artificial Sequence
  Description of Artificial Sequence: Synthetic oligonucleotide
  Sense strand starting at position 1230 of SEQ ID NO: 1887766
gcaagaccgugucaaacaa

SEQ ID NO: 2494999 - RNA, 19 nt, Artificial Sequence
  Description of Artificial Sequence: Synthetic oligonucleotide
  Antisense strand to SEQ ID NO: 2494998
uuguuugacacggucuugc

SEQ ID NO: 2495000 - RNA, 19 nt, Artificial Sequence
  Description of Artificial Sequence: Synthetic oligonucleotide
  Sense strand starting at position 1862 of SEQ ID NO: 1887766
guguauugcaccgccuaca

SEQ ID NO: 2495001 - RNA, 19 nt, Artificial Sequence
  Description of Artificial Sequence: Synthetic oligonucleotide
  Antisense strand to SEQ ID NO: 2495000
uguaggcggugcaauacac

SEQ ID NO: 2495002 - RNA, 19 nt, Artificial Sequence
  Description of Artificial Sequence: Synthetic oligonucleotide
  Sense strand starting at position 2105 of SEQ ID NO: 1887766
cucgcaucuccucagaguu

SEQ ID NO: 2495003 - RNA, 19 nt, Artificial Sequence
  Description of Artificial Sequence: Synthetic oligonucleotide
  Antisense strand to SEQ ID NO: 2495002
aacucugaggagaugcgag

SEQ ID NO: 2495004 - RNA, 19 nt, Artificial Sequence
  Description of Artificial Sequence: Synthetic oligonucleotide
  Sense strand starting at position 2239 of SEQ ID NO: 1887766
ccucuuauagcuugaucga

SEQ ID NO: 2495005 - RNA, 19 nt, Artificial Sequence
  Description of Artificial Sequence: Synthetic oligonucleotide
  Antisense strand to SEQ ID NO: 2495004
ucgaucaagcuauaagagg

SEQ ID NO: 2495006 - RNA, 19 nt, Artificial Sequence
  Description of Artificial Sequence: Synthetic oligonucleotide
  Sense strand starting at position 2240 of SEQ ID NO: 1887766
cucuuauagcuugaucgac

SEQ ID NO: 2495007 - RNA, 19 nt, Artificial Sequence
  Description of Artificial Sequence: Synthetic oligonucleotide
  Antisense strand to SEQ ID NO: 2495006
gucgaucaagcuauaagag

SEQ ID NO: 2495008 - RNA, 19 nt, Artificial Sequence
  Description of Artificial Sequence: Synthetic oligonucleotide
  Sense strand starting at position 2362 of SEQ ID NO: 1887766
gcucuuccucuagagcuuu

SEQ ID NO: 2495009 - RNA, 19 nt, Artificial Sequence
  Description of Artificial Sequence: Synthetic oligonucleotide
  Antisense strand to SEQ ID NO: 2495008
aaagcucuagaggaagagc

SEQ ID NO: 2495010 - RNA, 19 nt, Artificial Sequence
  Description of Artificial Sequence: Synthetic oligonucleotide
  Sense strand starting at position 2510 of SEQ ID NO: 1887766
agugaccucgcuuguuuau

SEQ ID NO: 2495011 - RNA, 19 nt, Artificial Sequence
  Description of Artificial Sequence: Synthetic oligonucleotide
  Antisense strand to SEQ ID NO: 2495010
auaaacaagcgaggucacu

SEQ ID NO: 2495012 - RNA, 19 nt, Artificial Sequence
  Description of Artificial Sequence: Synthetic oligonucleotide
  Sense strand starting at position 2511 of SEQ ID NO: 1887766
gugaccucgcuuguuuauu

SEQ ID NO: 2495013 - RNA, 19 nt, Artificial Sequence
  Description of Artificial Sequence: Synthetic oligonucleotide
  Antisense strand to SEQ ID NO: 2495012
aauaaacaagcgaggucac

SEQ ID NO: 2495014 - RNA, 19 nt, Artificial Sequence
  Description of Artificial Sequence: Synthetic oligonucleotide
  Sense strand starting at position 2539 of SEQ ID NO: 1887766
agauuacaguucugggcau

SEQ ID NO: 2495015 - RNA, 19 nt, Artificial Sequence
  Description of Artificial Sequence: Synthetic oligonucleotide
  Antisense strand to SEQ ID NO: 2495014
augcccagaacuguaaucu

SEQ ID NO: 2495016 - RNA, 19 nt, Artificial Sequence
  Description of Artificial Sequence: Synthetic oligonucleotide
  Sense strand starting at position 2540 of SEQ ID NO: 1887766
gauuacaguucugggcaua

SEQ ID NO: 2495017 - RNA, 19 nt, Artificial Sequence
  Description of Artificial Sequence: Synthetic oligonucleotide
  Antisense strand to SEQ ID NO: 2495016
uaugcccagaacuguaauc

SEQ ID NO: 2495018 - RNA, 19 nt, Artificial Sequence
  Description of Artificial Sequence: Synthetic oligonucleotide
  Sense strand starting at position 2543 of SEQ ID NO: 1887766
uacaguucugggcauagaa

SEQ ID NO: 2495019 - RNA, 19 nt, Artificial Sequence
  Description of Artificial Sequence: Synthetic oligonucleotide
  Antisense strand to SEQ ID NO: 2495018
uucuaugcccagaacugua

SEQ ID NO: 2495020 - RNA, 19 nt, Artificial Sequence
  Description of Artificial Sequence: Synthetic oligonucleotide
  Sense strand starting at position 2569 of SEQ ID NO: 1887766
ccacgugguuaccgaauga

SEQ ID NO: 2495021 - RNA, 19 nt, Artificial Sequence
  Description of Artificial Sequence: Synthetic oligonucleotide
  Antisense strand to SEQ ID NO: 2495020
ucauucgguaaccacgugg

SEQ ID NO: 2495022 - RNA, 19 nt, Artificial Sequence
  Description of Artificial Sequence: Synthetic oligonucleotide
  Sense strand starting at position 2573 of SEQ ID NO: 1887766
gugguuaccgaaugaagga

SEQ ID NO: 2495023 - RNA, 19 nt, Artificial Sequence
  Description of Artificial Sequence: Synthetic oligonucleotide
  Antisense strand to SEQ ID NO: 2495022
uccuucauucgguaaccac

SEQ ID NO: 2495024 - RNA, 19 nt, Artificial Sequence
  Description of Artificial Sequence: Synthetic oligonucleotide
  Sense strand starting at position 2591 of SEQ ID NO: 1887766
aaggauguuuacugagaga

SEQ ID NO: 2495025 - RNA, 19 nt, Artificial Sequence
  Description of Artificial Sequence: Synthetic oligonucleotide
  Antisense strand to SEQ ID NO: 2495024
ucucucaguaaacauccuu

SEQ ID NO: 2495026 - RNA, 19 nt, Artificial Sequence
  Description of Artificial Sequence: Synthetic oligonucleotide
  Sense strand starting at position 2594 of SEQ ID NO: 1887766
gauguuuacugagagacuc

SEQ ID NO: 2495027 - RNA, 19 nt, Artificial Sequence
  Description of Artificial Sequence: Synthetic oligonucleotide
  Antisense strand to SEQ ID NO: 2495026
gagucucucaguaaacauc

SEQ ID NO: 2495028 - RNA, 19 nt, Artificial Sequence
  Description of Artificial Sequence: Synthetic oligonucleotide
  Sense strand starting at position 2636 of SEQ ID NO: 1887766
agcgaauccucacaucuuu

SEQ ID NO: 2495029 - RNA, 19 nt, Artificial Sequence
  Description of Artificial Sequence: Synthetic oligonucleotide
  Antisense strand to SEQ ID NO: 2495028
aaagaugugaggauucgcu

SEQ ID NO: 2495030 - RNA, 19 nt, Artificial Sequence
  Description of Artificial Sequence: Synthetic oligonucleotide
  Sense strand starting at position 2655 of SEQ ID NO: 1887766
guuucuaguccuuaggaca

SEQ ID NO: 2495031 - RNA, 19 nt, Artificial Sequence
  Description of Artificial Sequence: Synthetic oligonucleotide
  Antisense strand to SEQ ID NO: 2495030
uguccuaaggacuagaaac

SEQ ID NO: 2495032 - RNA, 19 nt, Artificial Sequence
  Description of Artificial Sequence: Synthetic oligonucleotide
  Sense strand starting at position 2685 of SEQ ID NO: 1887766
gcuccuagugcacaagaaa

SEQ ID NO: 2495033 - RNA, 19 nt, Artificial Sequence
  Description of Artificial Sequence: Synthetic oligonucleotide
  Antisense strand to SEQ ID NO: 2495032
uuucuugugcacuaggagc

SEQ ID NO: 2495034 - RNA, 19 nt, Artificial Sequence
  Description of Artificial Sequence: Synthetic oligonucleotide
  Sense strand starting at position 2838 of SEQ ID NO: 1887766
ccagcuauuugggacuuga

SEQ ID NO: 2495035 - RNA, 19 nt, Artificial Sequence
  Description of Artificial Sequence: Synthetic oligonucleotide
  Antisense strand to SEQ ID NO: 2495034
ucaagucccaaauagcugg

SEQ ID NO: 2495036 - RNA, 19 nt, Artificial Sequence
  Description of Artificial Sequence: Synthetic oligonucleotide
  Sense strand starting at position 2978 of SEQ ID NO: 1887766
aaaguaauggccuggacau

SEQ ID NO: 2495037 - RNA, 19 nt, Artificial Sequence
  Description of Artificial Sequence: Synthetic oligonucleotide
  Antisense strand to SEQ ID NO: 2495036
auguccaggccauuacuuu

SEQ ID NO: 2495038 - RNA, 19 nt, Artificial Sequence
  Description of Artificial Sequence: Synthetic oligonucleotide
  Sense strand starting at position 2979 of SEQ ID NO: 1887766
aaguaauggccuggacaug

SEQ ID NO: 2495039 - RNA, 19 nt, Artificial Sequence
  Description of Artificial Sequence: Synthetic oligonucleotide
  Antisense strand to SEQ ID NO: 2495038
cauguccaggccauuacuu

SEQ ID NO: 2495040 - RNA, 19 nt, Artificial Sequence
  Description of Artificial Sequence: Synthetic oligonucleotide
  Sense strand starting at position 3032 of SEQ ID NO: 1887766
ccuauuugcuaugaggaca

SEQ ID NO: 2495041 - RNA, 19 nt, Artificial Sequence
  Description of Artificial Sequence: Synthetic oligonucleotide
  Antisense strand to SEQ ID NO: 2495040
uguccucauagcaaauagg

SEQ ID NO: 2495042 - RNA, 19 nt, Artificial Sequence
  Description of Artificial Sequence: Synthetic oligonucleotide
  Sense strand starting at position 3233 of SEQ ID NO: 1887766
gaccgagugucuggacaau

SEQ ID NO: 2495043 - RNA, 19 nt, Artificial Sequence
  Description of Artificial Sequence: Synthetic oligonucleotide
  Antisense strand to SEQ ID NO: 2495042
auuguccagacacucgguc

SEQ ID NO: 2495044 - RNA, 19 nt, Artificial Sequence
  Description of Artificial Sequence: Synthetic oligonucleotide
  Sense strand starting at position 3252 of SEQ ID NO: 1887766
agggaaagcucucugauga

SEQ ID NO: 2495045 - RNA, 19 nt, Artificial Sequence
  Description of Artificial Sequence: Synthetic oligonucleotide
  Antisense strand to SEQ ID NO: 2495044
ucaucagagagcuuucccu

SEQ ID NO: 2495046 - RNA, 19 nt, Artificial Sequence
  Description of Artificial Sequence: Synthetic oligonucleotide
  Sense strand starting at position 3253 of SEQ ID NO: 1887766
gggaaagcucucugaugaa

SEQ ID NO: 2495047 - RNA, 19 nt, Artificial Sequence
  Description of Artificial Sequence: Synthetic oligonucleotide
  Antisense strand to SEQ ID NO: 2495046
uucaucagagagcuuuccc

SEQ ID NO: 2495048 - RNA, 19 nt, Artificial Sequence
  Description of Artificial Sequence: Synthetic oligonucleotide
  Sense strand starting at position 3256 of SEQ ID NO: 1887766
aaagcucucugaugaagga

SEQ ID NO: 2495049 - RNA, 19 nt, Artificial Sequence
  Description of Artificial Sequence: Synthetic oligonucleotide
  Antisense strand to SEQ ID NO: 2495048
uccuucaucagagagcuuu

SEQ ID NO: 2495050 - RNA, 19 nt, Artificial Sequence
  Description of Artificial Sequence: Synthetic oligonucleotide
  Sense strand starting at position 3302 of SEQ ID NO: 1887766
aguaauagauugcauggga

SEQ ID NO: 2495051 - RNA, 19 nt, Artificial Sequence
  Description of Artificial Sequence: Synthetic oligonucleotide
  Antisense strand to SEQ ID NO: 2495050
ucccaugcaaucuauuacu

SEQ ID NO: 2495052 - RNA, 19 nt, Artificial Sequence
  Description of Artificial Sequence: Synthetic oligonucleotide
  Sense strand starting at position 3541 of SEQ ID NO: 1887766
gcuaaauuagcuggucaug

SEQ ID NO: 2495053 - RNA, 19 nt, Artificial Sequence
  Description of Artificial Sequence: Synthetic oligonucleotide
  Antisense strand to SEQ ID NO: 2495052
caugaccagcuaauuuagc

SEQ ID NO: 2495054 - RNA, 19 nt, Artificial Sequence
  Description of Artificial Sequence: Synthetic oligonucleotide
  Sense strand starting at position 3794 of SEQ ID NO: 1887766
aggaaauggucucgaagga

SEQ ID NO: 2495055 - RNA, 19 nt, Artificial Sequence
  Description of Artificial Sequence: Synthetic oligonucleotide
  Antisense strand to SEQ ID NO: 2495054
uccuucgagaccauuuccu

SEQ ID NO: 2495056 - RNA, 19 nt, Artificial Sequence
  Description of Artificial Sequence: Synthetic oligonucleotide
  Sense strand starting at position 41 of SEQ ID NO: 1887767
cagccauuccuguaaaugg

SEQ ID NO: 2495057 - RNA, 19 nt, Artificial Sequence
  Description of Artificial Sequence: Synthetic oligonucleotide
  Antisense strand to SEQ ID NO: 2495056
ccauuuacaggaauggcug

SEQ ID NO: 2495058 - RNA, 19 nt, Artificial Sequence
  Description of Artificial Sequence: Synthetic oligonucleotide
  Sense strand starting at position 78 of SEQ ID NO: 1887767
gaaucuuugggauguugga

SEQ ID NO: 2495059 - RNA, 19 nt, Artificial Sequence
  Description of Artificial Sequence: Synthetic oligonucleotide
  Antisense strand to SEQ ID NO: 2495058
uccaacaucccaaagauuc

SEQ ID NO: 2495060 - RNA, 19 nt, Artificial Sequence
  Description of Artificial Sequence: Synthetic oligonucleotide
  Sense strand starting at position 173 of SEQ ID NO: 1887767
gcagaaaggcagugaaaga

SEQ ID NO: 2495061 - RNA, 19 nt, Artificial Sequence
  Description of Artificial Sequence: Synthetic oligonucleotide
  Antisense strand to SEQ ID NO: 2495060
ucuuucacugccuuucugc

SEQ ID NO: 2495062 - RNA, 19 nt, Artificial Sequence
  Description of Artificial Sequence: Synthetic oligonucleotide
  Sense strand starting at position 489 of SEQ ID NO: 1887767
agaggaggguguccugaaa

SEQ ID NO: 2495063 - RNA, 19 nt, Artificial Sequence
  Description of Artificial Sequence: Synthetic oligonucleotide
  Antisense strand to SEQ ID NO: 2495062
uuucaggacacccuccucu

SEQ ID NO: 2495064 - RNA, 19 nt, Artificial Sequence
  Description of Artificial Sequence: Synthetic oligonucleotide
  Sense strand starting at position 641 of SEQ ID NO: 1887767
cacagaagagguugucuga

SEQ ID NO: 2495065 - RNA, 19 nt, Artificial Sequence
  Description of Artificial Sequence: Synthetic oligonucleotide
  Antisense strand to SEQ ID NO: 2495064
ucagacaaccucuucugug

SEQ ID NO: 2495066 - RNA, 19 nt, Artificial Sequence
  Description of Artificial Sequence: Synthetic oligonucleotide
  Sense strand starting at position 644 of SEQ ID NO: 1887767
agaagagguugucugagca

SEQ ID NO: 2495067 - RNA, 19 nt, Artificial Sequence
  Description of Artificial Sequence: Synthetic oligonucleotide
  Antisense strand to SEQ ID NO: 2495066
ugcucagacaaccucuucu

SEQ ID NO: 2495068 - RNA, 19 nt, Artificial Sequence
  Description of Artificial Sequence: Synthetic oligonucleotide
  Sense strand starting at position 730 of SEQ ID NO: 1887767
gagaaagggugaguaguuu

SEQ ID NO: 2495069 - RNA, 19 nt, Artificial Sequence
  Description of Artificial Sequence: Synthetic oligonucleotide
  Antisense strand to SEQ ID NO: 2495068
aaacuacucacccuuucuc

SEQ ID NO: 2495070 - RNA, 19 nt, Artificial Sequence
  Description of Artificial Sequence: Synthetic oligonucleotide
  Sense strand starting at position 790 of SEQ ID NO: 1887767
cuggucacuuguucugaaa

SEQ ID NO: 2495071 - RNA, 19 nt, Artificial Sequence
  Description of Artificial Sequence: Synthetic oligonucleotide
  Antisense strand to SEQ ID NO: 2495070
uuucagaacaagugaccag

SEQ ID NO: 2495072 - RNA, 19 nt, Artificial Sequence
  Description of Artificial Sequence: Synthetic oligonucleotide
  Sense strand starting at position 919 of SEQ ID NO: 1887767
uuagcaaggcuccaugaga

SEQ ID NO: 2495073 - RNA, 19 nt, Artificial Sequence
  Description of Artificial Sequence: Synthetic oligonucleotide
  Antisense strand to SEQ ID NO: 2495072
ucucauggagccuugcuaa

SEQ ID NO: 2495074 - RNA, 19 nt, Artificial Sequence
  Description of Artificial Sequence: Synthetic oligonucleotide
  Sense strand starting at position 927 of SEQ ID NO: 1887767
gcuccaugagaaugguuag

SEQ ID NO: 2495075 - RNA, 19 nt, Artificial Sequence
  Description of Artificial Sequence: Synthetic oligonucleotide
  Antisense strand to SEQ ID NO: 2495074
cuaaccauucucauggagc

SEQ ID NO: 2495076 - RNA, 19 nt, Artificial Sequence
  Description of Artificial Sequence: Synthetic oligonucleotide
  Sense strand starting at position 930 of SEQ ID NO: 1887767
ccaugagaaugguuaguuc

SEQ ID NO: 2495077 - RNA, 19 nt, Artificial Sequence
  Description of Artificial Sequence: Synthetic oligonucleotide
  Antisense strand to SEQ ID NO: 2495076
gaacuaaccauucucaugg

SEQ ID NO: 2495078 - RNA, 19 nt, Artificial Sequence
  Description of Artificial Sequence: Synthetic oligonucleotide
  Sense strand starting at position 934 of SEQ ID NO: 1887767
gagaaugguuaguuccuga

SEQ ID NO: 2495079 - RNA, 19 nt, Artificial Sequence
  Description of Artificial Sequence: Synthetic oligonucleotide
  Antisense strand to SEQ ID NO: 2495078
ucaggaacuaaccauucuc

SEQ ID NO: 2495080 - RNA, 19 nt, Artificial Sequence
  Description of Artificial Sequence: Synthetic oligonucleotide
  Sense strand starting at position 1396 of SEQ ID NO: 1887767
ggguggagcgcucagaaga

SEQ ID NO: 2495081 - RNA, 19 nt, Artificial Sequence
  Description of Artificial Sequence: Synthetic oligonucleotide
  Antisense strand to SEQ ID NO: 2495080
ucuucugagcgcuccaccc

SEQ ID NO: 2495082 - RNA, 19 nt, Artificial Sequence
  Description of Artificial Sequence: Synthetic oligonucleotide
  Sense strand starting at position 1576 of SEQ ID NO: 1887767
aaaugugacccuugaaggu

SEQ ID NO: 2495083 - RNA, 19 nt, Artificial Sequence
  Description of Artificial Sequence: Synthetic oligonucleotide
  Antisense strand to SEQ ID NO: 2495082
accuucaagggucacauuu

SEQ ID NO: 2495084 - RNA, 19 nt, Artificial Sequence
  Description of Artificial Sequence: Synthetic oligonucleotide
  Sense strand starting at position 1674 of SEQ ID NO: 1887767
ccgauagaguccucucaaa

SEQ ID NO: 2495085 - RNA, 19 nt, Artificial Sequence
  Description of Artificial Sequence: Synthetic oligonucleotide
  Antisense strand to SEQ ID NO: 2495084
uuugagaggacucuaucgg

SEQ ID NO: 2495086 - RNA, 19 nt, Artificial Sequence
  Description of Artificial Sequence: Synthetic oligonucleotide
  Sense strand starting at position 1737 of SEQ ID NO: 1887767
cccugaaacuucuucggaa

SEQ ID NO: 2495087 - RNA, 19 nt, Artificial Sequence
  Description of Artificial Sequence: Synthetic oligonucleotide
  Antisense strand to SEQ ID NO: 2495086
uuccgaagaaguuucaggg

SEQ ID NO: 2495088 - RNA, 19 nt, Artificial Sequence
  Description of Artificial Sequence: Synthetic oligonucleotide
  Sense strand starting at position 1738 of SEQ ID NO: 1887767
ccugaaacuucuucggaag

SEQ ID NO: 2495089 - RNA, 19 nt, Artificial Sequence
  Description of Artificial Sequence: Synthetic oligonucleotide
  Antisense strand to SEQ ID NO: 2495088
cuuccgaagaaguuucagg

SEQ ID NO: 2495090 - RNA, 19 nt, Artificial Sequence
  Description of Artificial Sequence: Synthetic oligonucleotide
  Sense strand starting at position 1962 of SEQ ID NO: 1887767
cgcauaagcagacaugaga

SEQ ID NO: 2495091 - RNA, 19 nt, Artificial Sequence
  Description of Artificial Sequence: Synthetic oligonucleotide
  Antisense strand to SEQ ID NO: 2495090
ucucaugucugcuuaugcg

SEQ ID NO: 2495092 - RNA, 19 nt, Artificial Sequence
  Description of Artificial Sequence: Synthetic oligonucleotide
  Sense strand starting at position 2154 of SEQ ID NO: 1887767
aggaaaugugcaggacuca

SEQ ID NO: 2495093 - RNA, 19 nt, Artificial Sequence
  Description of Artificial Sequence: Synthetic oligonucleotide
  Antisense strand to SEQ ID NO: 2495092
ugaguccugcacauuuccu

SEQ ID NO: 2495094 - RNA, 19 nt, Artificial Sequence
  Description of Artificial Sequence: Synthetic oligonucleotide
  Sense strand starting at position 2166 of SEQ ID NO: 1887767
ggacucaucaacugguaag

SEQ ID NO: 2495095 - RNA, 19 nt, Artificial Sequence
  Description of Artificial Sequence: Synthetic oligonucleotide
  Antisense strand to SEQ ID NO: 2495094
cuuaccaguugaugagucc

SEQ ID NO: 2495096 - RNA, 19 nt, Artificial Sequence
  Description of Artificial Sequence: Synthetic oligonucleotide
  Sense strand starting at position 2204 of SEQ ID NO: 1887767
aauaucgugcuggauauau

SEQ ID NO: 2495097 - RNA, 19 nt, Artificial Sequence
  Description of Artificial Sequence: Synthetic oligonucleotide
  Antisense strand to SEQ ID NO: 2495096
auauauccagcacgauauu

SEQ ID NO: 2495098 - RNA, 19 nt, Artificial Sequence
  Description of Artificial Sequence: Synthetic oligonucleotide
  Sense strand starting at position 2206 of SEQ ID NO: 1887767
uaucgugcuggauauauga

SEQ ID NO: 2495099 - RNA, 19 nt, Artificial Sequence
  Description of Artificial Sequence: Synthetic oligonucleotide
  Antisense strand to SEQ ID NO: 2495098
ucauauauccagcacgaua

SEQ ID NO: 2495100 - RNA, 19 nt, Artificial Sequence
  Description of Artificial Sequence: Synthetic oligonucleotide
  Sense strand starting at position 2208 of SEQ ID NO: 1887767
ucgugcuggauauaugaau

SEQ ID NO: 2495101 - RNA, 19 nt, Artificial Sequence
  Description of Artificial Sequence: Synthetic oligonucleotide
  Antisense strand to SEQ ID NO: 2495100
auucauauauccagcacga

SEQ ID NO: 2495102 - RNA, 19 nt, Artificial Sequence
  Description of Artificial Sequence: Synthetic oligonucleotide
  Sense strand starting at position 2280 of SEQ ID NO: 1887767
ggaaauaugagauguuucu

SEQ ID NO: 2495103 - RNA, 19 nt, Artificial Sequence
  Description of Artificial Sequence: Synthetic oligonucleotide
  Antisense strand to SEQ ID NO: 2495102
agaaacaucucauauuucc

SEQ ID NO: 2495104 - RNA, 19 nt, Artificial Sequence
  Description of Artificial Sequence: Synthetic oligonucleotide
  Sense strand starting at position 2290 of SEQ ID NO: 1887767
gauguuucugaagaguuuc

SEQ ID NO: 2495105 - RNA, 19 nt, Artificial Sequence
  Description of Artificial Sequence: Synthetic oligonucleotide
  Antisense strand to SEQ ID NO: 2495104
gaaacucuucagaaacauc

SEQ ID NO: 2495106 - RNA, 19 nt, Artificial Sequence
  Description of Artificial Sequence: Synthetic oligonucleotide
  Sense strand starting at position 2310 of SEQ ID NO: 1887767
gcagcuugucaggaaagga

SEQ ID NO: 2495107 - RNA, 19 nt, Artificial Sequence
  Description of Artificial Sequence: Synthetic oligonucleotide
  Antisense strand to SEQ ID NO: 2495106
uccuuuccugacaagcugc

SEQ ID NO: 2495108 - RNA, 19 nt, Artificial Sequence
  Description of Artificial Sequence: Synthetic oligonucleotide
  Sense strand starting at position 2349 of SEQ ID NO: 1887767
agaugagcaucaucuggau

SEQ ID NO: 2495109 - RNA, 19 nt, Artificial Sequence
  Description of Artificial Sequence: Synthetic oligonucleotide
  Antisense strand to SEQ ID NO: 2495108
auccagaugaugcucaucu

SEQ ID NO: 2495110 - RNA, 19 nt, Artificial Sequence
  Description of Artificial Sequence: Synthetic oligonucleotide
  Sense strand starting at position 2389 of SEQ ID NO: 1887767
uacaauuuccguugcuagu

SEQ ID NO: 2495111 - RNA, 19 nt, Artificial Sequence
  Description of Artificial Sequence: Synthetic oligonucleotide
  Antisense strand to SEQ ID NO: 2495110
acuagcaacggaaauugua

SEQ ID NO: 2495112 - RNA, 19 nt, Artificial Sequence
  Description of Artificial Sequence: Synthetic oligonucleotide
  Sense strand starting at position 2447 of SEQ ID NO: 1887767
ucuaacauaucggucagaa

SEQ ID NO: 2495113 - RNA, 19 nt, Artificial Sequence
  Description of Artificial Sequence: Synthetic oligonucleotide
  Antisense strand to SEQ ID NO: 2495112
uucugaccgauauguuaga

SEQ ID NO: 2495114 - RNA, 19 nt, Artificial Sequence
  Description of Artificial Sequence: Synthetic oligonucleotide
  Sense strand starting at position 2460 of SEQ ID NO: 1887767
ucagaauacuggccacuuu

SEQ ID NO: 2495115 - RNA, 19 nt, Artificial Sequence
  Description of Artificial Sequence: Synthetic oligonucleotide
  Antisense strand to SEQ ID NO: 2495114
aaaguggccaguauucuga

SEQ ID NO: 2495116 - RNA, 19 nt, Artificial Sequence
  Description of Artificial Sequence: Synthetic oligonucleotide
  Sense strand starting at position 2502 of SEQ ID NO: 1887767
gguucuuuauaagugaaau

SEQ ID NO: 2495117 - RNA, 19 nt, Artificial Sequence
  Description of Artificial Sequence: Synthetic oligonucleotide
  Antisense strand to SEQ ID NO: 2495116
auuucacuuauaaagaacc

SEQ ID NO: 2495118 - RNA, 19 nt, Artificial Sequence
  Description of Artificial Sequence: Synthetic oligonucleotide
  Sense strand starting at position 2521 of SEQ ID NO: 1887767
aaaugagcccaugauaugu

SEQ ID NO: 2495119 - RNA, 19 nt, Artificial Sequence
  Description of Artificial Sequence: Synthetic oligonucleotide
  Antisense strand to SEQ ID NO: 2495118
acauaucaugggcucauuu

SEQ ID NO: 2495120 - RNA, 19 nt, Artificial Sequence
  Description of Artificial Sequence: Synthetic oligonucleotide
  Sense strand starting at position 2529 of SEQ ID NO: 1887767
ccaugauaugugcaaugag

SEQ ID NO: 2495121 - RNA, 19 nt, Artificial Sequence
  Description of Artificial Sequence: Synthetic oligonucleotide
  Antisense strand to SEQ ID NO: 2495120
cucauugcacauaucaugg

SEQ ID NO: 2495122 - RNA, 19 nt, Artificial Sequence
  Description of Artificial Sequence: Synthetic oligonucleotide
  Sense strand starting at position 2578 of SEQ ID NO: 1887767
augagagcguuccuggaga

SEQ ID NO: 2495123 - RNA, 19 nt, Artificial Sequence
  Description of Artificial Sequence: Synthetic oligonucleotide
  Antisense strand to SEQ ID NO: 2495122
ucuccaggaacgcucucau

SEQ ID NO: 2495124 - RNA, 19 nt, Artificial Sequence
  Description of Artificial Sequence: Synthetic oligonucleotide
  Sense strand starting at position 3176 of SEQ ID NO: 1887767
gggaguuccgucuauacau

SEQ ID NO: 2495125 - RNA, 19 nt, Artificial Sequence
  Description of Artificial Sequence: Synthetic oligonucleotide
  Antisense strand to SEQ ID NO: 2495124
auguauagacggaacuccc

SEQ ID NO: 2495126 - RNA, 19 nt, Artificial Sequence
  Description of Artificial Sequence: Synthetic oligonucleotide
  Sense strand starting at position 3345 of SEQ ID NO: 1887767
uuuagaguucucugguaag

SEQ ID NO: 2495127 - RNA, 19 nt, Artificial Sequence
  Description of Artificial Sequence: Synthetic oligonucleotide
  Antisense strand to SEQ ID NO: 2495126
cuuaccagagaacucuaaa

SEQ ID NO: 2495128 - RNA, 19 nt, Artificial Sequence
  Description of Artificial Sequence: Synthetic oligonucleotide
  Sense strand starting at position 3361 of SEQ ID NO: 1887767
aagcuuugauuggcaaaug

SEQ ID NO: 2495129 - RNA, 19 nt, Artificial Sequence
  Description of Artificial Sequence: Synthetic oligonucleotide
  Antisense strand to SEQ ID NO: 2495128
cauuugccaaucaaagcuu

SEQ ID NO: 2495130 - RNA, 19 nt, Artificial Sequence
  Description of Artificial Sequence: Synthetic oligonucleotide
  Sense strand starting at position 3735 of SEQ ID NO: 1887767
auuguuacaaagggaugua

SEQ ID NO: 2495131 - RNA, 19 nt, Artificial Sequence
  Description of Artificial Sequence: Synthetic oligonucleotide
  Antisense strand to SEQ ID NO: 2495130
uacaucccuuuguaacaau

SEQ ID NO: 2495132 - RNA, 19 nt, Artificial Sequence
  Description of Artificial Sequence: Synthetic oligonucleotide
  Sense strand starting at position 3738 of SEQ ID NO: 1887767
guuacaaagggauguacau

SEQ ID NO: 2495133 - RNA, 19 nt, Artificial Sequence
  Description of Artificial Sequence: Synthetic oligonucleotide
  Antisense strand to SEQ ID NO: 2495132
auguacaucccuuuguaac

SEQ ID NO: 2495134 - RNA, 19 nt, Artificial Sequence
  Description of Artificial Sequence: Synthetic oligonucleotide
  Sense strand starting at position 3839 of SEQ ID NO: 1887767
guuaauuauauugggagua

SEQ ID NO: 2495135 - RNA, 19 nt, Artificial Sequence
  Description of Artificial Sequence: Synthetic oligonucleotide
  Antisense strand to SEQ ID NO: 2495134
uacucccaauauaauuaac

SEQ ID NO: 2495136 - RNA, 19 nt, Artificial Sequence
  Description of Artificial Sequence: Synthetic oligonucleotide
  Sense strand starting at position 3 of SEQ ID NO: 1887768
gucugaucacgucgaauug

SEQ ID NO: 2495137 - RNA, 19 nt, Artificial Sequence
  Description of Artificial Sequence: Synthetic oligonucleotide
  Antisense strand to SEQ ID NO: 2495136
caauucgacgugaucagac

SEQ ID NO: 2495138 - RNA, 19 nt, Artificial Sequence
  Description of Artificial Sequence: Synthetic oligonucleotide
  Sense strand starting at position 21 of SEQ ID NO: 1887768
ggacuuggucacgaagagu

SEQ ID NO: 2495139 - RNA, 19 nt, Artificial Sequence
  Description of Artificial Sequence: Synthetic oligonucleotide
  Antisense strand to SEQ ID NO: 2495138
acucuucgugaccaagucc

SEQ ID NO: 2495140 - RNA, 19 nt, Artificial Sequence
  Description of Artificial Sequence: Synthetic oligonucleotide
  Sense strand starting at position 29 of SEQ ID NO: 1887768
ucacgaagaguuuguucga

SEQ ID NO: 2495141 - RNA, 19 nt, Artificial Sequence
  Description of Artificial Sequence: Synthetic oligonucleotide
  Antisense strand to SEQ ID NO: 2495140
ucgaacaaacucuucguga

SEQ ID NO: 2495142 - RNA, 19 nt, Artificial Sequence
  Description of Artificial Sequence: Synthetic oligonucleotide
  Sense strand starting at position 30 of SEQ ID NO: 1887768
cacgaagaguuuguucgau

SEQ ID NO: 2495143 - RNA, 19 nt, Artificial Sequence
  Description of Artificial Sequence: Synthetic oligonucleotide
  Antisense strand to SEQ ID NO: 2495142
aucgaacaaacucuucgug

SEQ ID NO: 2495144 - RNA, 19 nt, Artificial Sequence
  Description of Artificial Sequence: Synthetic oligonucleotide
  Sense strand starting at position 32 of SEQ ID NO: 1887768
cgaagaguuuguucgauga

SEQ ID NO: 2495145 - RNA, 19 nt, Artificial Sequence
  Description of Artificial Sequence: Synthetic oligonucleotide
  Antisense strand to SEQ ID NO: 2495144
ucaucgaacaaacucuucg

SEQ ID NO: 2495146 - RNA, 19 nt, Artificial Sequence
  Description of Artificial Sequence: Synthetic oligonucleotide
  Sense strand starting at position 36 of SEQ ID NO: 1887768
gaguuuguucgaugaguuc

SEQ ID NO: 2495147 - RNA, 19 nt, Artificial Sequence
  Description of Artificial Sequence: Synthetic oligonucleotide
  Antisense strand to SEQ ID NO: 2495146
gaacucaucgaacaaacuc

SEQ ID NO: 2495148 - RNA, 19 nt, Artificial Sequence
  Description of Artificial Sequence: Synthetic oligonucleotide
  Sense strand starting at position 42 of SEQ ID NO: 1887768
guucgaugaguucgggaga

SEQ ID NO: 2495149 - RNA, 19 nt, Artificial Sequence
  Description of Artificial Sequence: Synthetic oligonucleotide
  Antisense strand to SEQ ID NO: 2495148
ucucccgaacucaucgaac

SEQ ID NO: 2495150 - RNA, 19 nt, Artificial Sequence
  Description of Artificial Sequence: Synthetic oligonucleotide
  Sense strand starting at position 45 of SEQ ID NO: 1887768
cgaugaguucgggagaauu

SEQ ID NO: 2495151 - RNA, 19 nt, Artificial Sequence
  Description of Artificial Sequence: Synthetic oligonucleotide
  Antisense strand to SEQ ID NO: 2495150
aauucucccgaacucaucg

SEQ ID NO: 2495152 - RNA, 19 nt, Artificial Sequence
  Description of Artificial Sequence: Synthetic oligonucleotide
  Sense strand starting at position 54 of SEQ ID NO: 1887768
cgggagaauucggcuacgu

SEQ ID NO: 2495153 - RNA, 19 nt, Artificial Sequence
  Description of Artificial Sequence: Synthetic oligonucleotide
  Antisense strand to SEQ ID NO: 2495152
acguagccgaauucucccg

SEQ ID NO: 2495154 - RNA, 19 nt, Artificial Sequence
  Description of Artificial Sequence: Synthetic oligonucleotide
  Sense strand starting at position 72 of SEQ ID NO: 1887768
uccgauugagcucgggaga

SEQ ID NO: 2495155 - RNA, 19 nt, Artificial Sequence
  Description of Artificial Sequence: Synthetic oligonucleotide
  Antisense strand to SEQ ID NO: 2495154
ucucccgagcucaaucgga

SEQ ID NO: 2495156 - RNA, 19 nt, Artificial Sequence
  Description of Artificial Sequence: Synthetic oligonucleotide
  Sense strand starting at position 75 of SEQ ID NO: 1887768
gauugagcucgggagacuu

SEQ ID NO: 2495157 - RNA, 19 nt, Artificial Sequence
  Description of Artificial Sequence: Synthetic oligonucleotide
  Antisense strand to SEQ ID NO: 2495156
aagucucccgagcucaauc

SEQ ID NO: 2495158 - RNA, 19 nt, Artificial Sequence
  Description of Artificial Sequence: Synthetic oligonucleotide
  Sense strand starting at position 86 of SEQ ID NO: 1887768
ggagacuucggauaaguuc

SEQ ID NO: 2495159 - RNA, 19 nt, Artificial Sequence
  Description of Artificial Sequence: Synthetic oligonucleotide
  Antisense strand to SEQ ID NO: 2495158
gaacuuauccgaagucucc

SEQ ID NO: 2495160 - RNA, 19 nt, Artificial Sequence
  Description of Artificial Sequence: Synthetic oligonucleotide
  Sense strand starting at position 92 of SEQ ID NO: 1887768
uucggauaaguucgagcuu

SEQ ID NO: 2495161 - RNA, 19 nt, Artificial Sequence
  Description of Artificial Sequence: Synthetic oligonucleotide
  Antisense strand to SEQ ID NO: 2495160
aagcucgaacuuauccgaa

SEQ ID NO: 2495162 - RNA, 19 nt, Artificial Sequence
  Description of Artificial Sequence: Synthetic oligonucleotide
  Sense strand starting at position 105 of SEQ ID NO: 1887768
gagcuuguucgccuaaguc

SEQ ID NO: 2495163 - RNA, 19 nt, Artificial Sequence
  Description of Artificial Sequence: Synthetic oligonucleotide
  Antisense strand to SEQ ID NO: 2495162
gacuuaggcgaacaagcuc

SEQ ID NO: 2495164 - RNA, 19 nt, Artificial Sequence
  Description of Artificial Sequence: Synthetic oligonucleotide
  Sense strand starting at position 132 of SEQ ID NO: 1887768
cucggucugcuucgaacaa

SEQ ID NO: 2495165 - RNA, 19 nt, Artificial Sequence
  Description of Artificial Sequence: Synthetic oligonucleotide
  Antisense strand to SEQ ID NO: 2495164
uuguucgaagcagaccgag

SEQ ID NO: 2495166 - RNA, 19 nt, Artificial Sequence
  Description of Artificial Sequence: Synthetic oligonucleotide
  Sense strand starting at position 494 of SEQ ID NO: 1887768
gcgcgucuguggacaaaua

SEQ ID NO: 2495167 - RNA, 19 nt, Artificial Sequence
  Description of Artificial Sequence: Synthetic oligonucleotide
  Antisense strand to SEQ ID NO: 2495166
uauuuguccacagacgcgc

SEQ ID NO: 2495168 - RNA, 19 nt, Artificial Sequence
  Description of Artificial Sequence: Synthetic oligonucleotide
  Sense strand starting at position 868 of SEQ ID NO: 1887768
aagggaaugugcuucgcua

SEQ ID NO: 2495169 - RNA, 19 nt, Artificial Sequence
  Description of Artificial Sequence: Synthetic oligonucleotide
  Antisense strand to SEQ ID NO: 2495168
uagcgaagcacauucccuu

SEQ ID NO: 2495170 - RNA, 19 nt, Artificial Sequence
  Description of Artificial Sequence: Synthetic oligonucleotide
  Sense strand starting at position 870 of SEQ ID NO: 1887768
gggaaugugcuucgcuagu

SEQ ID NO: 2495171 - RNA, 19 nt, Artificial Sequence
  Description of Artificial Sequence: Synthetic oligonucleotide
  Antisense strand to SEQ ID NO: 2495170
acuagcgaagcacauuccc

SEQ ID NO: 2495172 - RNA, 19 nt, Artificial Sequence
  Description of Artificial Sequence: Synthetic oligonucleotide
  Sense strand starting at position 935 of SEQ ID NO: 1887768
cccacucccugguugaaau

SEQ ID NO: 2495173 - RNA, 19 nt, Artificial Sequence
  Description of Artificial Sequence: Synthetic oligonucleotide
  Antisense strand to SEQ ID NO: 2495172
auuucaaccagggaguggg

SEQ ID NO: 2495174 - RNA, 19 nt, Artificial Sequence
  Description of Artificial Sequence: Synthetic oligonucleotide
  Sense strand starting at position 996 of SEQ ID NO: 1887768
cagcuaugaccuuggagag

SEQ ID NO: 2495175 - RNA, 19 nt, Artificial Sequence
  Description of Artificial Sequence: Synthetic oligonucleotide
  Antisense strand to SEQ ID NO: 2495174
cucuccaaggucauagcug

SEQ ID NO: 2495176 - RNA, 19 nt, Artificial Sequence
  Description of Artificial Sequence: Synthetic oligonucleotide
  Sense strand starting at position 1303 of SEQ ID NO: 1887768
aggucuuccuccguggaca

SEQ ID NO: 2495177 - RNA, 19 nt, Artificial Sequence
  Description of Artificial Sequence: Synthetic oligonucleotide
  Antisense strand to SEQ ID NO: 2495176
uguccacggaggaagaccu

SEQ ID NO: 2495178 - RNA, 19 nt, Artificial Sequence
  Description of Artificial Sequence: Synthetic oligonucleotide
  Sense strand starting at position 2514 of SEQ ID NO: 1887768
gcagcuugcugggccaaua

SEQ ID NO: 2495179 - RNA, 19 nt, Artificial Sequence
  Description of Artificial Sequence: Synthetic oligonucleotide
  Antisense strand to SEQ ID NO: 2495178
uauuggcccagcaagcugc

SEQ ID NO: 2495180 - RNA, 19 nt, Artificial Sequence
  Description of Artificial Sequence: Synthetic oligonucleotide
  Sense strand starting at position 2599 of SEQ ID NO: 1887768
uccauuauugagggcauca

SEQ ID NO: 2495181 - RNA, 19 nt, Artificial Sequence
  Description of Artificial Sequence: Synthetic oligonucleotide
  Antisense strand to SEQ ID NO: 2495180
ugaugcccucaauaaugga

SEQ ID NO: 2495182 - RNA, 19 nt, Artificial Sequence
  Description of Artificial Sequence: Synthetic oligonucleotide
  Sense strand starting at position 2608 of SEQ ID NO: 1887768
gagggcaucaccgagguau

SEQ ID NO: 2495183 - RNA, 19 nt, Artificial Sequence
  Description of Artificial Sequence: Synthetic oligonucleotide
  Antisense strand to SEQ ID NO: 2495182
auaccucggugaugcccuc

SEQ ID NO: 2495184 - RNA, 19 nt, Artificial Sequence
  Description of Artificial Sequence: Synthetic oligonucleotide
  Sense strand starting at position 2610 of SEQ ID NO: 1887768
gggcaucaccgagguauag

SEQ ID NO: 2495185 - RNA, 19 nt, Artificial Sequence
  Description of Artificial Sequence: Synthetic oligonucleotide
  Antisense strand to SEQ ID NO: 2495184
cuauaccucggugaugccc

SEQ ID NO: 2495186 - RNA, 19 nt, Artificial Sequence
  Description of Artificial Sequence: Synthetic oligonucleotide
  Sense strand starting at position 2621 of SEQ ID NO: 1887768
agguauagaguuugccaau

SEQ ID NO: 2495187 - RNA, 19 nt, Artificial Sequence
  Description of Artificial Sequence: Synthetic oligonucleotide
  Antisense strand to SEQ ID NO: 2495186
auuggcaaacucuauaccu

SEQ ID NO: 2495188 - RNA, 19 nt, Artificial Sequence
  Description of Artificial Sequence: Synthetic oligonucleotide
  Sense strand starting at position 2622 of SEQ ID NO: 1887768
gguauagaguuugccaaug

SEQ ID NO: 2495189 - RNA, 19 nt, Artificial Sequence
  Description of Artificial Sequence: Synthetic oligonucleotide
  Antisense strand to SEQ ID NO: 2495188
cauuggcaaacucuauacc

SEQ ID NO: 2495190 - RNA, 19 nt, Artificial Sequence
  Description of Artificial Sequence: Synthetic oligonucleotide
  Sense strand starting at position 2627 of SEQ ID NO: 1887768
agaguuugccaauguccga

SEQ ID NO: 2495191 - RNA, 19 nt, Artificial Sequence
  Description of Artificial Sequence: Synthetic oligonucleotide
  Antisense strand to SEQ ID NO: 2495190
ucggacauuggcaaacucu

SEQ ID NO: 2495192 - RNA, 19 nt, Artificial Sequence
  Description of Artificial Sequence: Synthetic oligonucleotide
  Sense strand starting at position 2927 of SEQ ID NO: 1887768
ccugcugucuccuccuaga

SEQ ID NO: 2495193 - RNA, 19 nt, Artificial Sequence
  Description of Artificial Sequence: Synthetic oligonucleotide
  Antisense strand to SEQ ID NO: 2495192
ucuaggaggagacagcagg

SEQ ID NO: 2495194 - RNA, 19 nt, Artificial Sequence
  Description of Artificial Sequence: Synthetic oligonucleotide
  Sense strand starting at position 3050 of SEQ ID NO: 1887768
ucuggugucugggaggauu

SEQ ID NO: 2495195 - RNA, 19 nt, Artificial Sequence
  Description of Artificial Sequence: Synthetic oligonucleotide
  Antisense strand to SEQ ID NO: 2495194
aauccucccagacaccaga

SEQ ID NO: 2495196 - RNA, 19 nt, Artificial Sequence
  Description of Artificial Sequence: Synthetic oligonucleotide
  Sense strand starting at position 3058 of SEQ ID NO: 1887768
cugggaggauucccagagu

SEQ ID NO: 2495197 - RNA, 19 nt, Artificial Sequence
  Description of Artificial Sequence: Synthetic oligonucleotide
  Antisense strand to SEQ ID NO: 2495196
acucugggaauccucccag

SEQ ID NO: 2495198 - RNA, 19 nt, Artificial Sequence
  Description of Artificial Sequence: Synthetic oligonucleotide
  Sense strand starting at position 3086 of SEQ ID NO: 1887768
gugcucuacccucagaaug

SEQ ID NO: 2495199 - RNA, 19 nt, Artificial Sequence
  Description of Artificial Sequence: Synthetic oligonucleotide
  Antisense strand to SEQ ID NO: 2495198
cauucugaggguagagcac

SEQ ID NO: 2495200 - RNA, 19 nt, Artificial Sequence
  Description of Artificial Sequence: Synthetic oligonucleotide
  Sense strand starting at position 3150 of SEQ ID NO: 1887768
aggcuuagcaugugucaca

SEQ ID NO: 2495201 - RNA, 19 nt, Artificial Sequence
  Description of Artificial Sequence: Synthetic oligonucleotide
  Antisense strand to SEQ ID NO: 2495200
ugugacacaugcuaagccu

SEQ ID NO: 2495202 - RNA, 19 nt, Artificial Sequence
  Description of Artificial Sequence: Synthetic oligonucleotide
  Sense strand starting at position 3354 of SEQ ID NO: 1887768
ggagaagcccauugaucag

SEQ ID NO: 2495203 - RNA, 19 nt, Artificial Sequence
  Description of Artificial Sequence: Synthetic oligonucleotide
  Antisense strand to SEQ ID NO: 2495202
cugaucaaugggcuucucc

SEQ ID NO: 2495204 - RNA, 19 nt, Artificial Sequence
  Description of Artificial Sequence: Synthetic oligonucleotide
  Sense strand starting at position 3401 of SEQ ID NO: 1887768
augcuaaggccagauacau

SEQ ID NO: 2495205 - RNA, 19 nt, Artificial Sequence
  Description of Artificial Sequence: Synthetic oligonucleotide
  Antisense strand to SEQ ID NO: 2495204
auguaucuggccuuagcau

SEQ ID NO: 2495206 - RNA, 19 nt, Artificial Sequence
  Description of Artificial Sequence: Synthetic oligonucleotide
  Sense strand starting at position 3407 of SEQ ID NO: 1887768
aggccagauacaugagagu

SEQ ID NO: 2495207 - RNA, 19 nt, Artificial Sequence
  Description of Artificial Sequence: Synthetic oligonucleotide
  Antisense strand to SEQ ID NO: 2495206
acucucauguaucuggccu

SEQ ID NO: 2495208 - RNA, 19 nt, Artificial Sequence
  Description of Artificial Sequence: Synthetic oligonucleotide
  Sense strand starting at position 3496 of SEQ ID NO: 1887768
ucagguaucuggccaggaa

SEQ ID NO: 2495209 - RNA, 19 nt, Artificial Sequence
  Description of Artificial Sequence: Synthetic oligonucleotide
  Antisense strand to SEQ ID NO: 2495208
uuccuggccagauaccuga

SEQ ID NO: 2495210 - RNA, 19 nt, Artificial Sequence
  Description of Artificial Sequence: Synthetic oligonucleotide
  Sense strand starting at position 3714 of SEQ ID NO: 1887768
cugugagagaagugacaau

SEQ ID NO: 2495211 - RNA, 19 nt, Artificial Sequence
  Description of Artificial Sequence: Synthetic oligonucleotide
  Antisense strand to SEQ ID NO: 2495210
auugucacuucucucacag

SEQ ID NO: 2495212 - RNA, 19 nt, Artificial Sequence
  Description of Artificial Sequence: Synthetic oligonucleotide
  Sense strand starting at position 3912 of SEQ ID NO: 1887768
caaaguguggacuacuauu

SEQ ID NO: 2495213 - RNA, 19 nt, Artificial Sequence
  Description of Artificial Sequence: Synthetic oligonucleotide
  Antisense strand to SEQ ID NO: 2495212
aauaguaguccacacuuug

SEQ ID NO: 2495214 - RNA, 19 nt, Artificial Sequence
  Description of Artificial Sequence: Synthetic oligonucleotide
  Sense strand starting at position 3918 of SEQ ID NO: 1887768
guggacuacuauucccauu

SEQ ID NO: 2495215 - RNA, 19 nt, Artificial Sequence
  Description of Artificial Sequence: Synthetic oligonucleotide
  Antisense strand to SEQ ID NO: 2495214
aaugggaauaguaguccac

SEQ ID NO: 2495216 - RNA, 19 nt, Artificial Sequence
  Description of Artificial Sequence: Synthetic oligonucleotide
  Sense strand starting at position 32 of SEQ ID NO: 1887769
cuaugaaugcaaggauugu

SEQ ID NO: 2495217 - RNA, 19 nt, Artificial Sequence
  Description of Artificial Sequence: Synthetic oligonucleotide
  Antisense strand to SEQ ID NO: 2495216
acaauccuugcauucauag

SEQ ID NO: 2495218 - RNA, 19 nt, Artificial Sequence
  Description of Artificial Sequence: Synthetic oligonucleotide
  Sense strand starting at position 36 of SEQ ID NO: 1887769
gaaugcaaggauuguggua

SEQ ID NO: 2495219 - RNA, 19 nt, Artificial Sequence
  Description of Artificial Sequence: Synthetic oligonucleotide
  Antisense strand to SEQ ID NO: 2495218
uaccacaauccuugcauuc

SEQ ID NO: 2495220 - RNA, 19 nt, Artificial Sequence
  Description of Artificial Sequence: Synthetic oligonucleotide
  Sense strand starting at position 185 of SEQ ID NO: 1887769
aguaguucugaggauucag

SEQ ID NO: 2495221 - RNA, 19 nt, Artificial Sequence
  Description of Artificial Sequence: Synthetic oligonucleotide
  Antisense strand to SEQ ID NO: 2495220
cugaauccucagaacuacu

SEQ ID NO: 2495222 - RNA, 19 nt, Artificial Sequence
  Description of Artificial Sequence: Synthetic oligonucleotide
  Sense strand starting at position 196 of SEQ ID NO: 1887769
ggauucagggcuuaaacgu

SEQ ID NO: 2495223 - RNA, 19 nt, Artificial Sequence
  Description of Artificial Sequence: Synthetic oligonucleotide
  Antisense strand to SEQ ID NO: 2495222
acguuuaagcccugaaucc

SEQ ID NO: 2495224 - RNA, 19 nt, Artificial Sequence
  Description of Artificial Sequence: Synthetic oligonucleotide
  Sense strand starting at position 617 of SEQ ID NO: 1887769
ucaugccagcaugaucaua

SEQ ID NO: 2495225 - RNA, 19 nt, Artificial Sequence
  Description of Artificial Sequence: Synthetic oligonucleotide
  Antisense strand to SEQ ID NO: 2495224
uaugaucaugcuggcauga

SEQ ID NO: 2495226 - RNA, 19 nt, Artificial Sequence
  Description of Artificial Sequence: Synthetic oligonucleotide
  Sense strand starting at position 622 of SEQ ID NO: 1887769
ccagcaugaucauauuuga

SEQ ID NO: 2495227 - RNA, 19 nt, Artificial Sequence
  Description of Artificial Sequence: Synthetic oligonucleotide
  Antisense strand to SEQ ID NO: 2495226
ucaaauaugaucaugcugg

SEQ ID NO: 2495228 - RNA, 19 nt, Artificial Sequence
  Description of Artificial Sequence: Synthetic oligonucleotide
  Sense strand starting at position 2001 of SEQ ID NO: 1887769
uucucuucguuauuuaucu

SEQ ID NO: 2495229 - RNA, 19 nt, Artificial Sequence
  Description of Artificial Sequence: Synthetic oligonucleotide
  Antisense strand to SEQ ID NO: 2495228
agauaaauaacgaagagaa

SEQ ID NO: 2495230 - RNA, 19 nt, Artificial Sequence
  Description of Artificial Sequence: Synthetic oligonucleotide
  Sense strand starting at position 2147 of SEQ ID NO: 1887769
ucagcucuccuagaguauu

SEQ ID NO: 2495231 - RNA, 19 nt, Artificial Sequence
  Description of Artificial Sequence: Synthetic oligonucleotide
  Antisense strand to SEQ ID NO: 2495230
aauacucuaggagagcuga

SEQ ID NO: 2495232 - RNA, 19 nt, Artificial Sequence
  Description of Artificial Sequence: Synthetic oligonucleotide
  Sense strand starting at position 2159 of SEQ ID NO: 1887769
gaguauuucugaguguugu

SEQ ID NO: 2495233 - RNA, 19 nt, Artificial Sequence
  Description of Artificial Sequence: Synthetic oligonucleotide
  Antisense strand to SEQ ID NO: 2495232
acaacacucagaaauacuc

SEQ ID NO: 2495234 - RNA, 19 nt, Artificial Sequence
  Description of Artificial Sequence: Synthetic oligonucleotide
  Sense strand starting at position 2160 of SEQ ID NO: 1887769
aguauuucugaguguugug

SEQ ID NO: 2495235 - RNA, 19 nt, Artificial Sequence
  Description of Artificial Sequence: Synthetic oligonucleotide
  Antisense strand to SEQ ID NO: 2495234
cacaacacucagaaauacu

SEQ ID NO: 2495236 - RNA, 19 nt, Artificial Sequence
  Description of Artificial Sequence: Synthetic oligonucleotide
  Sense strand starting at position 2377 of SEQ ID NO: 1887769
aauguaaguguagaucauu

SEQ ID NO: 2495237 - RNA, 19 nt, Artificial Sequence
  Description of Artificial Sequence: Synthetic oligonucleotide
  Antisense strand to SEQ ID NO: 2495236
aaugaucuacacuuacauu

SEQ ID NO: 2495238 - RNA, 19 nt, Artificial Sequence
  Description of Artificial Sequence: Synthetic oligonucleotide
  Sense strand starting at position 2385 of SEQ ID NO: 1887769
uguagaucauuugaacaag

SEQ ID NO: 2495239 - RNA, 19 nt, Artificial Sequence
  Description of Artificial Sequence: Synthetic oligonucleotide
  Antisense strand to SEQ ID NO: 2495238
cuuguucaaaugaucuaca

SEQ ID NO: 2495240 - RNA, 19 nt, Artificial Sequence
  Description of Artificial Sequence: Synthetic oligonucleotide
  Sense strand starting at position 2425 of SEQ ID NO: 1887769
gggaaaugugucugaaucu

SEQ ID NO: 2495241 - RNA, 19 nt, Artificial Sequence
  Description of Artificial Sequence: Synthetic oligonucleotide
  Antisense strand to SEQ ID NO: 2495240
agauucagacacauuuccc

SEQ ID NO: 2495242 - RNA, 19 nt, Artificial Sequence
  Description of Artificial Sequence: Synthetic oligonucleotide
  Sense strand starting at position 2461 of SEQ ID NO: 1887769
aggauuagggcuuggaagu

SEQ ID NO: 2495243 - RNA, 19 nt, Artificial Sequence
  Description of Artificial Sequence: Synthetic oligonucleotide
  Antisense strand to SEQ ID NO: 2495242
acuuccaagcccuaauccu

SEQ ID NO: 2495244 - RNA, 19 nt, Artificial Sequence
  Description of Artificial Sequence: Synthetic oligonucleotide
  Sense strand starting at position 2462 of SEQ ID NO: 1887769
ggauuagggcuuggaagua

SEQ ID NO: 2495245 - RNA, 19 nt, Artificial Sequence
  Description of Artificial Sequence: Synthetic oligonucleotide
  Antisense strand to SEQ ID NO: 2495244
uacuuccaagcccuaaucc

SEQ ID NO: 2495246 - RNA, 19 nt, Artificial Sequence
  Description of Artificial Sequence: Synthetic oligonucleotide
  Sense strand starting at position 2537 of SEQ ID NO: 1887769
agcagaaaugagugaguca

SEQ ID NO: 2495247 - RNA, 19 nt, Artificial Sequence
  Description of Artificial Sequence: Synthetic oligonucleotide
  Antisense strand to SEQ ID NO: 2495246
ugacucacucauuucugcu

SEQ ID NO: 2495248 - RNA, 19 nt, Artificial Sequence
  Description of Artificial Sequence: Synthetic oligonucleotide
  Sense strand starting at position 2645 of SEQ ID NO: 1887769
gguuucugagaaugaauug

SEQ ID NO: 2495249 - RNA, 19 nt, Artificial Sequence
  Description of Artificial Sequence: Synthetic oligonucleotide
  Antisense strand to SEQ ID NO: 2495248
caauucauucucagaaacc

SEQ ID NO: 2495250 - RNA, 19 nt, Artificial Sequence
  Description of Artificial Sequence: Synthetic oligonucleotide
  Sense strand starting at position 2701 of SEQ ID NO: 1887769
gaugguaugguguagguga

SEQ ID NO: 2495251 - RNA, 19 nt, Artificial Sequence
  Description of Artificial Sequence: Synthetic oligonucleotide
  Antisense strand to SEQ ID NO: 2495250
ucaccuacaccauaccauc

SEQ ID NO: 2495252 - RNA, 19 nt, Artificial Sequence
  Description of Artificial Sequence: Synthetic oligonucleotide
  Sense strand starting at position 2774 of SEQ ID NO: 1887769
ggcagugagguuuacuaca

SEQ ID NO: 2495253 - RNA, 19 nt, Artificial Sequence
  Description of Artificial Sequence: Synthetic oligonucleotide
  Antisense strand to SEQ ID NO: 2495252
uguaguaaaccucacugcc

SEQ ID NO: 2495254 - RNA, 19 nt, Artificial Sequence
  Description of Artificial Sequence: Synthetic oligonucleotide
  Sense strand starting at position 2776 of SEQ ID NO: 1887769
cagugagguuuacuacaug

SEQ ID NO: 2495255 - RNA, 19 nt, Artificial Sequence
  Description of Artificial Sequence: Synthetic oligonucleotide
  Antisense strand to SEQ ID NO: 2495254
cauguaguaaaccucacug

SEQ ID NO: 2495256 - RNA, 19 nt, Artificial Sequence
  Description of Artificial Sequence: Synthetic oligonucleotide
  Sense strand starting at position 2810 of SEQ ID NO: 1887769
aaacgagaaucaguguuga

SEQ ID NO: 2495257 - RNA, 19 nt, Artificial Sequence
  Description of Artificial Sequence: Synthetic oligonucleotide
  Antisense strand to SEQ ID NO: 2495256
ucaacacugauucucguuu

SEQ ID NO: 2495258 - RNA, 19 nt, Artificial Sequence
  Description of Artificial Sequence: Synthetic oligonucleotide
  Sense strand starting at position 2838 of SEQ ID NO: 1887769
gaacuuuguggguacauua

SEQ ID NO: 2495259 - RNA, 19 nt, Artificial Sequence
  Description of Artificial Sequence: Synthetic oligonucleotide
  Antisense strand to SEQ ID NO: 2495258
uaauguacccacaaaguuc

SEQ ID NO: 2495260 - RNA, 19 nt, Artificial Sequence
  Description of Artificial Sequence: Synthetic oligonucleotide
  Sense strand starting at position 2950 of SEQ ID NO: 1887769
gguaguaacaaaugguaaa

SEQ ID NO: 2495261 - RNA, 19 nt, Artificial Sequence
  Description of Artificial Sequence: Synthetic oligonucleotide
  Antisense strand to SEQ ID NO: 2495260
uuuaccauuuguuacuacc

SEQ ID NO: 2495262 - RNA, 19 nt, Artificial Sequence
  Description of Artificial Sequence: Synthetic oligonucleotide
  Sense strand starting at position 2982 of SEQ ID NO: 1887769
guuuaaaccuaucugugga

SEQ ID NO: 2495263 - RNA, 19 nt, Artificial Sequence
  Description of Artificial Sequence: Synthetic oligonucleotide
  Antisense strand to SEQ ID NO: 2495262
uccacagauagguuuaaac

SEQ ID NO: 2495264 - RNA, 19 nt, Artificial Sequence
  Description of Artificial Sequence: Synthetic oligonucleotide
  Sense strand starting at position 3030 of SEQ ID NO: 1887769
ucacgaguuauguagcaac

SEQ ID NO: 2495265 - RNA, 19 nt, Artificial Sequence
  Description of Artificial Sequence: Synthetic oligonucleotide
  Antisense strand to SEQ ID NO: 2495264
guugcuacauaacucguga

SEQ ID NO: 2495266 - RNA, 19 nt, Artificial Sequence
  Description of Artificial Sequence: Synthetic oligonucleotide
  Sense strand starting at position 3040 of SEQ ID NO: 1887769
uguagcaacguggaaauau

SEQ ID NO: 2495267 - RNA, 19 nt, Artificial Sequence
  Description of Artificial Sequence: Synthetic oligonucleotide
  Antisense strand to SEQ ID NO: 2495266
auauuuccacguugcuaca

SEQ ID NO: 2495268 - RNA, 19 nt, Artificial Sequence
  Description of Artificial Sequence: Synthetic oligonucleotide
  Sense strand starting at position 3232 of SEQ ID NO: 1887769
aggcuuauaguugagcauu

SEQ ID NO: 2495269 - RNA, 19 nt, Artificial Sequence
  Description of Artificial Sequence: Synthetic oligonucleotide
  Antisense strand to SEQ ID NO: 2495268
aaugcucaacuauaagccu

SEQ ID NO: 2495270 - RNA, 19 nt, Artificial Sequence
  Description of Artificial Sequence: Synthetic oligonucleotide
  Sense strand starting at position 3235 of SEQ ID NO: 1887769
cuuauaguugagcauuauu

SEQ ID NO: 2495271 - RNA, 19 nt, Artificial Sequence
  Description of Artificial Sequence: Synthetic oligonucleotide
  Antisense strand to SEQ ID NO: 2495270
aauaaugcucaacuauaag

SEQ ID NO: 2495272 - RNA, 19 nt, Artificial Sequence
  Description of Artificial Sequence: Synthetic oligonucleotide
  Sense strand starting at position 3440 of SEQ ID NO: 1887769
ugugcacagguuuaugauu

SEQ ID NO: 2495273 - RNA, 19 nt, Artificial Sequence
  Description of Artificial Sequence: Synthetic oligonucleotide
  Antisense strand to SEQ ID NO: 2495272
aaucauaaaccugugcaca

SEQ ID NO: 2495274 - RNA, 19 nt, Artificial Sequence
  Description of Artificial Sequence: Synthetic oligonucleotide
  Sense strand starting at position 3445 of SEQ ID NO: 1887769
acagguuuaugauuauaac

SEQ ID NO: 2495275 - RNA, 19 nt, Artificial Sequence
  Description of Artificial Sequence: Synthetic oligonucleotide
  Antisense strand to SEQ ID NO: 2495274
guuauaaucauaaaccugu

SEQ ID NO: 2495276 - RNA, 19 nt, Artificial Sequence
  Description of Artificial Sequence: Synthetic oligonucleotide
  Sense strand starting at position 3454 of SEQ ID NO: 1887769
ugauuauaacugugucaaa

SEQ ID NO: 2495277 - RNA, 19 nt, Artificial Sequence
  Description of Artificial Sequence: Synthetic oligonucleotide
  Antisense strand to SEQ ID NO: 2495276
uuugacacaguuauaauca

SEQ ID NO: 2495278 - RNA, 19 nt, Artificial Sequence
  Description of Artificial Sequence: Synthetic oligonucleotide
  Sense strand starting at position 3493 of SEQ ID NO: 1887769
uuacauuaccuuuguggaa

SEQ ID NO: 2495279 - RNA, 19 nt, Artificial Sequence
  Description of Artificial Sequence: Synthetic oligonucleotide
  Antisense strand to SEQ ID NO: 2495278
uuccacaaagguaauguaa

SEQ ID NO: 2495280 - RNA, 19 nt, Artificial Sequence
  Description of Artificial Sequence: Synthetic oligonucleotide
  Sense strand starting at position 3497 of SEQ ID NO: 1887769
auuaccuuuguggaauuau

SEQ ID NO: 2495281 - RNA, 19 nt, Artificial Sequence
  Description of Artificial Sequence: Synthetic oligonucleotide
  Antisense strand to SEQ ID NO: 2495280
auaauuccacaaagguaau

SEQ ID NO: 2495282 - RNA, 19 nt, Artificial Sequence
  Description of Artificial Sequence: Synthetic oligonucleotide
  Sense strand starting at position 3564 of SEQ ID NO: 1887769
uccugauaacaguguauua

SEQ ID NO: 2495283 - RNA, 19 nt, Artificial Sequence
  Description of Artificial Sequence: Synthetic oligonucleotide
  Antisense strand to SEQ ID NO: 2495282
uaauacacuguuaucagga

SEQ ID NO: 2495284 - RNA, 19 nt, Artificial Sequence
  Description of Artificial Sequence: Synthetic oligonucleotide
  Sense strand starting at position 3566 of SEQ ID NO: 1887769
cugauaacaguguauuaug

SEQ ID NO: 2495285 - RNA, 19 nt, Artificial Sequence
  Description of Artificial Sequence: Synthetic oligonucleotide
  Antisense strand to SEQ ID NO: 2495284
cauaauacacuguuaucag

SEQ ID NO: 2495286 - RNA, 19 nt, Artificial Sequence
  Description of Artificial Sequence: Synthetic oligonucleotide
  Sense strand starting at position 3591 of SEQ ID NO: 1887769
uccauuggugugcauaaua

SEQ ID NO: 2495287 - RNA, 19 nt, Artificial Sequence
  Description of Artificial Sequence: Synthetic oligonucleotide
  Antisense strand to SEQ ID NO: 2495286
uauuaugcacaccaaugga

SEQ ID NO: 2495288 - RNA, 19 nt, Artificial Sequence
  Description of Artificial Sequence: Synthetic oligonucleotide
  Sense strand starting at position 3734 of SEQ ID NO: 1887769
uugugauaacaguguuaaa

SEQ ID NO: 2495289 - RNA, 19 nt, Artificial Sequence
  Description of Artificial Sequence: Synthetic oligonucleotide
  Antisense strand to SEQ ID NO: 2495288
uuuaacacuguuaucacaa

SEQ ID NO: 2495290 - RNA, 19 nt, Artificial Sequence
  Description of Artificial Sequence: Synthetic oligonucleotide
  Sense strand starting at position 3749 of SEQ ID NO: 1887769
uaaauaugugugcauaaag

SEQ ID NO: 2495291 - RNA, 19 nt, Artificial Sequence
  Description of Artificial Sequence: Synthetic oligonucleotide
  Antisense strand to SEQ ID NO: 2495290
cuuuaugcacacauauuua

SEQ ID NO: 2495292 - RNA, 19 nt, Artificial Sequence
  Description of Artificial Sequence: Synthetic oligonucleotide
  Sense strand starting at position 3805 of SEQ ID NO: 1887769
guugucauugugggaauuu

SEQ ID NO: 2495293 - RNA, 19 nt, Artificial Sequence
  Description of Artificial Sequence: Synthetic oligonucleotide
  Antisense strand to SEQ ID NO: 2495292
aaauucccacaaugacaac

SEQ ID NO: 2495294 - RNA, 19 nt, Artificial Sequence
  Description of Artificial Sequence: Synthetic oligonucleotide
  Sense strand starting at position 3848 of SEQ ID NO: 1887769
cuuaaauaaucuuuggugu

SEQ ID NO: 2495295 - RNA, 19 nt, Artificial Sequence
  Description of Artificial Sequence: Synthetic oligonucleotide
  Antisense strand to SEQ ID NO: 2495294
acaccaaagauuauuuaag

SEQ ID NO: 2495296 - RNA, 19 nt, Artificial Sequence
  Description of Artificial Sequence: Synthetic oligonucleotide
  Sense strand starting at position 544 of SEQ ID NO: 1887770
cuuacucauggcugagagu

SEQ ID NO: 2495297 - RNA, 19 nt, Artificial Sequence
  Description of Artificial Sequence: Synthetic oligonucleotide
  Antisense strand to SEQ ID NO: 2495296
acucucagccaugaguaag

SEQ ID NO: 2495298 - RNA, 19 nt, Artificial Sequence
  Description of Artificial Sequence: Synthetic oligonucleotide
  Sense strand starting at position 545 of SEQ ID NO: 1887770
uuacucauggcugagagua

SEQ ID NO: 2495299 - RNA, 19 nt, Artificial Sequence
  Description of Artificial Sequence: Synthetic oligonucleotide
  Antisense strand to SEQ ID NO: 2495298
uacucucagccaugaguaa

SEQ ID NO: 2495300 - RNA, 19 nt, Artificial Sequence
  Description of Artificial Sequence: Synthetic oligonucleotide
  Sense strand starting at position 815 of SEQ ID NO: 1887770
cucccaugcccugggauua

SEQ ID NO: 2495301 - RNA, 19 nt, Artificial Sequence
  Description of Artificial Sequence: Synthetic oligonucleotide
  Antisense strand to SEQ ID NO: 2495300
uaaucccagggcaugggag

SEQ ID NO: 2495302 - RNA, 19 nt, Artificial Sequence
  Description of Artificial Sequence: Synthetic oligonucleotide
  Sense strand starting at position 1201 of SEQ ID NO: 1887770
gguagauuaucaucuggaa

SEQ ID NO: 2495303 - RNA, 19 nt, Artificial Sequence
  Description of Artificial Sequence: Synthetic oligonucleotide
  Antisense strand to SEQ ID NO: 2495302
uuccagaugauaaucuacc

SEQ ID NO: 2495304 - RNA, 19 nt, Artificial Sequence
  Description of Artificial Sequence: Synthetic oligonucleotide
  Sense strand starting at position 1401 of SEQ ID NO: 1887770
ggccucauuccugaaaguu

SEQ ID NO: 2495305 - RNA, 19 nt, Artificial Sequence
  Description of Artificial Sequence: Synthetic oligonucleotide
  Antisense strand to SEQ ID NO: 2495304
aacuuucaggaaugaggcc

SEQ ID NO: 2495306 - RNA, 19 nt, Artificial Sequence
  Description of Artificial Sequence: Synthetic oligonucleotide
  Sense strand starting at position 1409 of SEQ ID NO: 1887770
uccugaaaguucccucuga

SEQ ID NO: 2495307 - RNA, 19 nt, Artificial Sequence
  Description of Artificial Sequence: Synthetic oligonucleotide
  Antisense strand to SEQ ID NO: 2495306
ucagagggaacuuucagga

SEQ ID NO: 2495308 - RNA, 19 nt, Artificial Sequence
  Description of Artificial Sequence: Synthetic oligonucleotide
  Sense strand starting at position 1410 of SEQ ID NO: 1887770
ccugaaaguucccucugag

SEQ ID NO: 2495309 - RNA, 19 nt, Artificial Sequence
  Description of Artificial Sequence: Synthetic oligonucleotide
  Antisense strand to SEQ ID NO: 2495308
cucagagggaacuuucagg

SEQ ID NO: 2495310 - RNA, 19 nt, Artificial Sequence
  Description of Artificial Sequence: Synthetic oligonucleotide
  Sense strand starting at position 1413 of SEQ ID NO: 1887770
gaaaguucccucugagcug

SEQ ID NO: 2495311 - RNA, 19 nt, Artificial Sequence
  Description of Artificial Sequence: Synthetic oligonucleotide
  Antisense strand to SEQ ID NO: 2495310
cagcucagagggaacuuuc

SEQ ID NO: 2495312 - RNA, 19 nt, Artificial Sequence
  Description of Artificial Sequence: Synthetic oligonucleotide
  Sense strand starting at position 1428 of SEQ ID NO: 1887770
gcuggagucuuccucucaa

SEQ ID NO: 2495313 - RNA, 19 nt, Artificial Sequence
  Description of Artificial Sequence: Synthetic oligonucleotide
  Antisense strand to SEQ ID NO: 2495312
uugagaggaagacuccagc

SEQ ID NO: 2495314 - RNA, 19 nt, Artificial Sequence
  Description of Artificial Sequence: Synthetic oligonucleotide
  Sense strand starting at position 1494 of SEQ ID NO: 1887770
ucgagaccucauuacccau

SEQ ID NO: 2495315 - RNA, 19 nt, Artificial Sequence
  Description of Artificial Sequence: Synthetic oligonucleotide
  Antisense strand to SEQ ID NO: 2495314
auggguaaugaggucucga

SEQ ID NO: 2495316 - RNA, 19 nt, Artificial Sequence
  Description of Artificial Sequence: Synthetic oligonucleotide
  Sense strand starting at position 1571 of SEQ ID NO: 1887770
cuucucgaagucuaggaau

SEQ ID NO: 2495317 - RNA, 19 nt, Artificial Sequence
  Description of Artificial Sequence: Synthetic oligonucleotide
  Antisense strand to SEQ ID NO: 2495316
auuccuagacuucgagaag

SEQ ID NO: 2495318 - RNA, 19 nt, Artificial Sequence
  Description of Artificial Sequence: Synthetic oligonucleotide
  Sense strand starting at position 1573 of SEQ ID NO: 1887770
ucucgaagucuaggaaucu

SEQ ID NO: 2495319 - RNA, 19 nt, Artificial Sequence
  Description of Artificial Sequence: Synthetic oligonucleotide
  Antisense strand to SEQ ID NO: 2495318
agauuccuagacuucgaga

SEQ ID NO: 2495320 - RNA, 19 nt, Artificial Sequence
  Description of Artificial Sequence: Synthetic oligonucleotide
  Sense strand starting at position 1582 of SEQ ID NO: 1887770
cuaggaaucucccugucau

SEQ ID NO: 2495321 - RNA, 19 nt, Artificial Sequence
  Description of Artificial Sequence: Synthetic oligonucleotide
  Antisense strand to SEQ ID NO: 2495320
augacagggagauuccuag

SEQ ID NO: 2495322 - RNA, 19 nt, Artificial Sequence
  Description of Artificial Sequence: Synthetic oligonucleotide
  Sense strand starting at position 1786 of SEQ ID NO: 1887770
ccagaaagguuccucucaa

SEQ ID NO: 2495323 - RNA, 19 nt, Artificial Sequence
  Description of Artificial Sequence: Synthetic oligonucleotide
  Antisense strand to SEQ ID NO: 2495322
uugagaggaaccuuucugg

SEQ ID NO: 2495324 - RNA, 19 nt, Artificial Sequence
  Description of Artificial Sequence: Synthetic oligonucleotide
  Sense strand starting at position 1916 of SEQ ID NO: 1887770
guccacugacccgaaauau

SEQ ID NO: 2495325 - RNA, 19 nt, Artificial Sequence
  Description of Artificial Sequence: Synthetic oligonucleotide
  Antisense strand to SEQ ID NO: 2495324
auauuucgggucaguggac

SEQ ID NO: 2495326 - RNA, 19 nt, Artificial Sequence
  Description of Artificial Sequence: Synthetic oligonucleotide
  Sense strand starting at position 2008 of SEQ ID NO: 1887770
acagaagcucacugguguu

SEQ ID NO: 2495327 - RNA, 19 nt, Artificial Sequence
  Description of Artificial Sequence: Synthetic oligonucleotide
  Antisense strand to SEQ ID NO: 2495326
aacaccagugagcuucugu

SEQ ID NO: 2495328 - RNA, 19 nt, Artificial Sequence
  Description of Artificial Sequence: Synthetic oligonucleotide
  Sense strand starting at position 2468 of SEQ ID NO: 1887770
ccgaacuguccaggaguaa

SEQ ID NO: 2495329 - RNA, 19 nt, Artificial Sequence
  Description of Artificial Sequence: Synthetic oligonucleotide
  Antisense strand to SEQ ID NO: 2495328
uuacuccuggacaguucgg

SEQ ID NO: 2495330 - RNA, 19 nt, Artificial Sequence
  Description of Artificial Sequence: Synthetic oligonucleotide
  Sense strand starting at position 2469 of SEQ ID NO: 1887770
cgaacuguccaggaguaaa

SEQ ID NO: 2495331 - RNA, 19 nt, Artificial Sequence
  Description of Artificial Sequence: Synthetic oligonucleotide
  Antisense strand to SEQ ID NO: 2495330
uuuacuccuggacaguucg

SEQ ID NO: 2495332 - RNA, 19 nt, Artificial Sequence
  Description of Artificial Sequence: Synthetic oligonucleotide
  Sense strand starting at position 2623 of SEQ ID NO: 1887770
ggugaagaucggugucuga

SEQ ID NO: 2495333 - RNA, 19 nt, Artificial Sequence
  Description of Artificial Sequence: Synthetic oligonucleotide
  Antisense strand to SEQ ID NO: 2495332
ucagacaccgaucuucacc

SEQ ID NO: 2495334 - RNA, 19 nt, Artificial Sequence
  Description of Artificial Sequence: Synthetic oligonucleotide
  Sense strand starting at position 2626 of SEQ ID NO: 1887770
gaagaucggugucugaagu

SEQ ID NO: 2495335 - RNA, 19 nt, Artificial Sequence
  Description of Artificial Sequence: Synthetic oligonucleotide
  Antisense strand to SEQ ID NO: 2495334
acuucagacaccgaucuuc

SEQ ID NO: 2495336 - RNA, 19 nt, Artificial Sequence
  Description of Artificial Sequence: Synthetic oligonucleotide
  Sense strand starting at position 2627 of SEQ ID NO: 1887770
aagaucggugucugaagua

SEQ ID NO: 2495337 - RNA, 19 nt, Artificial Sequence
  Description of Artificial Sequence: Synthetic oligonucleotide
  Antisense strand to SEQ ID NO: 2495336
uacuucagacaccgaucuu

SEQ ID NO: 2495338 - RNA, 19 nt, Artificial Sequence
  Description of Artificial Sequence: Synthetic oligonucleotide
  Sense strand starting at position 2640 of SEQ ID NO: 1887770
gaaguaaaggcuugcuuac

SEQ ID NO: 2495339 - RNA, 19 nt, Artificial Sequence
  Description of Artificial Sequence: Synthetic oligonucleotide
  Antisense strand to SEQ ID NO: 2495338
guaagcaagccuuuacuuc

SEQ ID NO: 2495340 - RNA, 19 nt, Artificial Sequence
  Description of Artificial Sequence: Synthetic oligonucleotide
  Sense strand starting at position 2666 of SEQ ID NO: 1887770
ggguucugguuucugggau

SEQ ID NO: 2495341 - RNA, 19 nt, Artificial Sequence
  Description of Artificial Sequence: Synthetic oligonucleotide
  Antisense strand to SEQ ID NO: 2495340
aucccagaaaccagaaccc

SEQ ID NO: 2495342 - RNA, 19 nt, Artificial Sequence
  Description of Artificial Sequence: Synthetic oligonucleotide
  Sense strand starting at position 2758 of SEQ ID NO: 1887770
cuagaagaacccuggugau

SEQ ID NO: 2495343 - RNA, 19 nt, Artificial Sequence
  Description of Artificial Sequence: Synthetic oligonucleotide
  Antisense strand to SEQ ID NO: 2495342
aucaccaggguucuucuag

SEQ ID NO: 2495344 - RNA, 19 nt, Artificial Sequence
  Description of Artificial Sequence: Synthetic oligonucleotide
  Sense strand starting at position 2790 of SEQ ID NO: 1887770
ggcgauggccagugaaaua

SEQ ID NO: 2495345 - RNA, 19 nt, Artificial Sequence
  Description of Artificial Sequence: Synthetic oligonucleotide
  Antisense strand to SEQ ID NO: 2495344
uauuucacuggccaucgcc

SEQ ID NO: 2495346 - RNA, 19 nt, Artificial Sequence
  Description of Artificial Sequence: Synthetic oligonucleotide
  Sense strand starting at position 2806 of SEQ ID NO: 1887770
auacuuacucucuggagua

SEQ ID NO: 2495347 - RNA, 19 nt, Artificial Sequence
  Description of Artificial Sequence: Synthetic oligonucleotide
  Antisense strand to SEQ ID NO: 2495346
uacuccagagaguaaguau

SEQ ID NO: 2495348 - RNA, 19 nt, Artificial Sequence
  Description of Artificial Sequence: Synthetic oligonucleotide
  Sense strand starting at position 2819 of SEQ ID NO: 1887770
ggaguagaggcgugacauc

SEQ ID NO: 2495349 - RNA, 19 nt, Artificial Sequence
  Description of Artificial Sequence: Synthetic oligonucleotide
  Antisense strand to SEQ ID NO: 2495348
gaugucacgccucuacucc

SEQ ID NO: 2495350 - RNA, 19 nt, Artificial Sequence
  Description of Artificial Sequence: Synthetic oligonucleotide
  Sense strand starting at position 2872 of SEQ ID NO: 1887770
uggcuucugguguauaacu

SEQ ID NO: 2495351 - RNA, 19 nt, Artificial Sequence
  Description of Artificial Sequence: Synthetic oligonucleotide
  Antisense strand to SEQ ID NO: 2495350
aguuauacaccagaagcca

SEQ ID NO: 2495352 - RNA, 19 nt, Artificial Sequence
  Description of Artificial Sequence: Synthetic oligonucleotide
  Sense strand starting at position 2899 of SEQ ID NO: 1887770
gagauaaaggccuagcuuu

SEQ ID NO: 2495353 - RNA, 19 nt, Artificial Sequence
  Description of Artificial Sequence: Synthetic oligonucleotide
  Antisense strand to SEQ ID NO: 2495352
aaagcuaggccuuuaucuc

SEQ ID NO: 2495354 - RNA, 19 nt, Artificial Sequence
  Description of Artificial Sequence: Synthetic oligonucleotide
  Sense strand starting at position 3158 of SEQ ID NO: 1887770
gggccuugguaucuaagga

SEQ ID NO: 2495355 - RNA, 19 nt, Artificial Sequence
  Description of Artificial Sequence: Synthetic oligonucleotide
  Antisense strand to SEQ ID NO: 2495354
uccuuagauaccaaggccc

SEQ ID NO: 2495356 - RNA, 19 nt, Artificial Sequence
  Description of Artificial Sequence: Synthetic oligonucleotide
  Sense strand starting at position 3168 of SEQ ID NO: 1887770
aucuaaggagucugaccau

SEQ ID NO: 2495357 - RNA, 19 nt, Artificial Sequence
  Description of Artificial Sequence: Synthetic oligonucleotide
  Antisense strand to SEQ ID NO: 2495356
auggucagacuccuuagau

SEQ ID NO: 2495358 - RNA, 19 nt, Artificial Sequence
  Description of Artificial Sequence: Synthetic oligonucleotide
  Sense strand starting at position 3202 of SEQ ID NO: 1887770
aguggugaugcggacucau

SEQ ID NO: 2495359 - RNA, 19 nt, Artificial Sequence
  Description of Artificial Sequence: Synthetic oligonucleotide
  Antisense strand to SEQ ID NO: 2495358
augaguccgcaucaccacu

SEQ ID NO: 2495360 - RNA, 19 nt, Artificial Sequence
  Description of Artificial Sequence: Synthetic oligonucleotide
  Sense strand starting at position 3231 of SEQ ID NO: 1887770
gagcccuaaugacugagaa

SEQ ID NO: 2495361 - RNA, 19 nt, Artificial Sequence
  Description of Artificial Sequence: Synthetic oligonucleotide
  Antisense strand to SEQ ID NO: 2495360
uucucagucauuagggcuc

SEQ ID NO: 2495362 - RNA, 19 nt, Artificial Sequence
  Description of Artificial Sequence: Synthetic oligonucleotide
  Sense strand starting at position 3233 of SEQ ID NO: 1887770
gcccuaaugacugagaagu

SEQ ID NO: 2495363 - RNA, 19 nt, Artificial Sequence
  Description of Artificial Sequence: Synthetic oligonucleotide
  Antisense strand to SEQ ID NO: 2495362
acuucucagucauuagggc

SEQ ID NO: 2495364 - RNA, 19 nt, Artificial Sequence
  Description of Artificial Sequence: Synthetic oligonucleotide
  Sense strand starting at position 3244 of SEQ ID NO: 1887770
ugagaagucugaugauuug

SEQ ID NO: 2495365 - RNA, 19 nt, Artificial Sequence
  Description of Artificial Sequence: Synthetic oligonucleotide
  Antisense strand to SEQ ID NO: 2495364
caaaucaucagacuucuca

SEQ ID NO: 2495366 - RNA, 19 nt, Artificial Sequence
  Description of Artificial Sequence: Synthetic oligonucleotide
  Sense strand starting at position 3372 of SEQ ID NO: 1887770
gguggugggaucuagguaa

SEQ ID NO: 2495367 - RNA, 19 nt, Artificial Sequence
  Description of Artificial Sequence: Synthetic oligonucleotide
  Antisense strand to SEQ ID NO: 2495366
uuaccuagaucccaccacc

SEQ ID NO: 2495368 - RNA, 19 nt, Artificial Sequence
  Description of Artificial Sequence: Synthetic oligonucleotide
  Sense strand starting at position 3525 of SEQ ID NO: 1887770
ggaaccaauucucugucaa

SEQ ID NO: 2495369 - RNA, 19 nt, Artificial Sequence
  Description of Artificial Sequence: Synthetic oligonucleotide
  Antisense strand to SEQ ID NO: 2495368
uugacagagaauugguucc

SEQ ID NO: 2495370 - RNA, 19 nt, Artificial Sequence
  Description of Artificial Sequence: Synthetic oligonucleotide
  Sense strand starting at position 3591 of SEQ ID NO: 1887770
ggcucaaucagcuauacga

SEQ ID NO: 2495371 - RNA, 19 nt, Artificial Sequence
  Description of Artificial Sequence: Synthetic oligonucleotide
  Antisense strand to SEQ ID NO: 2495370
ucguauagcugauugagcc

SEQ ID NO: 2495372 - RNA, 19 nt, Artificial Sequence
  Description of Artificial Sequence: Synthetic oligonucleotide
  Sense strand starting at position 3723 of SEQ ID NO: 1887770
cgggugauugcuucguguu

SEQ ID NO: 2495373 - RNA, 19 nt, Artificial Sequence
  Description of Artificial Sequence: Synthetic oligonucleotide
  Antisense strand to SEQ ID NO: 2495372
aacacgaagcaaucacccg

SEQ ID NO: 2495374 - RNA, 19 nt, Artificial Sequence
  Description of Artificial Sequence: Synthetic oligonucleotide
  Sense strand starting at position 3804 of SEQ ID NO: 1887770
ccugucauugcugagacau

SEQ ID NO: 2495375 - RNA, 19 nt, Artificial Sequence
  Description of Artificial Sequence: Synthetic oligonucleotide
  Antisense strand to SEQ ID NO: 2495374
augucucagcaaugacagg

SEQ ID NO: 2495376 - RNA, 19 nt, Artificial Sequence
  Description of Artificial Sequence: Synthetic oligonucleotide
  Sense strand starting at position 877 of SEQ ID NO: 1887771
gcagcagggcauugauuau

SEQ ID NO: 2495377 - RNA, 19 nt, Artificial Sequence
  Description of Artificial Sequence: Synthetic oligonucleotide
  Antisense strand to SEQ ID NO: 2495376
auaaucaaugcccugcugc

SEQ ID NO: 2495378 - RNA, 19 nt, Artificial Sequence
  Description of Artificial Sequence: Synthetic oligonucleotide
  Sense strand starting at position 1002 of SEQ ID NO: 1887771
cgugcuguucuagagaaug

SEQ ID NO: 2495379 - RNA, 19 nt, Artificial Sequence
  Description of Artificial Sequence: Synthetic oligonucleotide
  Antisense strand to SEQ ID NO: 2495378
cauucucuagaacagcacg

SEQ ID NO: 2495380 - RNA, 19 nt, Artificial Sequence
  Description of Artificial Sequence: Synthetic oligonucleotide
  Sense strand starting at position 1004 of SEQ ID NO: 1887771
ugcuguucuagagaaugga

SEQ ID NO: 2495381 - RNA, 19 nt, Artificial Sequence
  Description of Artificial Sequence: Synthetic oligonucleotide
  Antisense strand to SEQ ID NO: 2495380
uccauucucuagaacagca

SEQ ID NO: 2495382 - RNA, 19 nt, Artificial Sequence
  Description of Artificial Sequence: Synthetic oligonucleotide
  Sense strand starting at position 1008 of SEQ ID NO: 1887771
guucuagagaauggaucau

SEQ ID NO: 2495383 - RNA, 19 nt, Artificial Sequence
  Description of Artificial Sequence: Synthetic oligonucleotide
  Antisense strand to SEQ ID NO: 2495382
augauccauucucuagaac

SEQ ID NO: 2495384 - RNA, 19 nt, Artificial Sequence
  Description of Artificial Sequence: Synthetic oligonucleotide
  Sense strand starting at position 1085 of SEQ ID NO: 1887771
uggguuaaguugcuuguca

SEQ ID NO: 2495385 - RNA, 19 nt, Artificial Sequence
  Description of Artificial Sequence: Synthetic oligonucleotide
  Antisense strand to SEQ ID NO: 2495384
ugacaagcaacuuaaccca

SEQ ID NO: 2495386 - RNA, 19 nt, Artificial Sequence
  Description of Artificial Sequence: Synthetic oligonucleotide
  Sense strand starting at position 1086 of SEQ ID NO: 1887771
ggguuaaguugcuugucaa

SEQ ID NO: 2495387 - RNA, 19 nt, Artificial Sequence
  Description of Artificial Sequence: Synthetic oligonucleotide
  Antisense strand to SEQ ID NO: 2495386
uugacaagcaacuuaaccc

SEQ ID NO: 2495388 - RNA, 19 nt, Artificial Sequence
  Description of Artificial Sequence: Synthetic oligonucleotide
  Sense strand starting at position 1087 of SEQ ID NO: 1887771
gguuaaguugcuugucaag

SEQ ID NO: 2495389 - RNA, 19 nt, Artificial Sequence
  Description of Artificial Sequence: Synthetic oligonucleotide
  Antisense strand to SEQ ID NO: 2495388
cuugacaagcaacuuaacc

SEQ ID NO: 2495390 - RNA, 19 nt, Artificial Sequence
  Description of Artificial Sequence: Synthetic oligonucleotide
  Sense strand starting at position 1089 of SEQ ID NO: 1887771
uuaaguugcuugucaagga

SEQ ID NO: 2495391 - RNA, 19 nt, Artificial Sequence
  Description of Artificial Sequence: Synthetic oligonucleotide
  Antisense strand to SEQ ID NO: 2495390
uccuugacaagcaacuuaa

SEQ ID NO: 2495392 - RNA, 19 nt, Artificial Sequence
  Description of Artificial Sequence: Synthetic oligonucleotide
  Sense strand starting at position 1090 of SEQ ID NO: 1887771
uaaguugcuugucaaggau

SEQ ID NO: 2495393 - RNA, 19 nt, Artificial Sequence
  Description of Artificial Sequence: Synthetic oligonucleotide
  Antisense strand to SEQ ID NO: 2495392
auccuugacaagcaacuua

SEQ ID NO: 2495394 - RNA, 19 nt, Artificial Sequence
  Description of Artificial Sequence: Synthetic oligonucleotide
  Sense strand starting at position 1104 of SEQ ID NO: 1887771
aggauucaggguggcuaua

SEQ ID NO: 2495395 - RNA, 19 nt, Artificial Sequence
  Description of Artificial Sequence: Synthetic oligonucleotide
  Antisense strand to SEQ ID NO: 2495394
uauagccacccugaauccu

SEQ ID NO: 2495396 - RNA, 19 nt, Artificial Sequence
  Description of Artificial Sequence: Synthetic oligonucleotide
  Sense strand starting at position 1117 of SEQ ID NO: 1887771
gcuauaaggauaggugcua

SEQ ID NO: 2495397 - RNA, 19 nt, Artificial Sequence
  Description of Artificial Sequence: Synthetic oligonucleotide
  Antisense strand to SEQ ID NO: 2495396
uagcaccuauccuuauagc

SEQ ID NO: 2495398 - RNA, 19 nt, Artificial Sequence
  Description of Artificial Sequence: Synthetic oligonucleotide
  Sense strand starting at position 2030 of SEQ ID NO: 1887771
cggaaaugcccgagcgcau

SEQ ID NO: 2495399 - RNA, 19 nt, Artificial Sequence
  Description of Artificial Sequence: Synthetic oligonucleotide
  Antisense strand to SEQ ID NO: 2495398
augcgcucgggcauuuccg

SEQ ID NO: 2495400 - RNA, 19 nt, Artificial Sequence
  Description of Artificial Sequence: Synthetic oligonucleotide
  Sense strand starting at position 2102 of SEQ ID NO: 1887771
ccgaguguuuccggaagua

SEQ ID NO: 2495401 - RNA, 19 nt, Artificial Sequence
  Description of Artificial Sequence: Synthetic oligonucleotide
  Antisense strand to SEQ ID NO: 2495400
uacuuccggaaacacucgg

SEQ ID NO: 2495402 - RNA, 19 nt, Artificial Sequence
  Description of Artificial Sequence: Synthetic oligonucleotide
  Sense strand starting at position 2103 of SEQ ID NO: 1887771
cgaguguuuccggaaguag

SEQ ID NO: 2495403 - RNA, 19 nt, Artificial Sequence
  Description of Artificial Sequence: Synthetic oligonucleotide
  Antisense strand to SEQ ID NO: 2495402
cuacuuccggaaacacucg

SEQ ID NO: 2495404 - RNA, 19 nt, Artificial Sequence
  Description of Artificial Sequence: Synthetic oligonucleotide
  Sense strand starting at position 2125 of SEQ ID NO: 1887771
aacguaaucccgcgggacu

SEQ ID NO: 2495405 - RNA, 19 nt, Artificial Sequence
  Description of Artificial Sequence: Synthetic oligonucleotide
  Antisense strand to SEQ ID NO: 2495404
agucccgcgggauuacguu

SEQ ID NO: 2495406 - RNA, 19 nt, Artificial Sequence
  Description of Artificial Sequence: Synthetic oligonucleotide
  Sense strand starting at position 2172 of SEQ ID NO: 1887771
ccgagcguuuccagaggua

SEQ ID NO: 2495407 - RNA, 19 nt, Artificial Sequence
  Description of Artificial Sequence: Synthetic oligonucleotide
  Antisense strand to SEQ ID NO: 2495406
uaccucuggaaacgcucgg

SEQ ID NO: 2495408 - RNA, 19 nt, Artificial Sequence
  Description of Artificial Sequence: Synthetic oligonucleotide
  Sense strand starting at position 2249 of SEQ ID NO: 1887771
gcccgagcgcuuucggaaa

SEQ ID NO: 2495409 - RNA, 19 nt, Artificial Sequence
  Description of Artificial Sequence: Synthetic oligonucleotide
  Antisense strand to SEQ ID NO: 2495408
uuuccgaaagcgcucgggc

SEQ ID NO: 2495410 - RNA, 19 nt, Artificial Sequence
  Description of Artificial Sequence: Synthetic oligonucleotide
  Sense strand starting at position 2321 of SEQ ID NO: 1887771
ccgcggagcguuucuggaa

SEQ ID NO: 2495411 - RNA, 19 nt, Artificial Sequence
  Description of Artificial Sequence: Synthetic oligonucleotide
  Antisense strand to SEQ ID NO: 2495410
uuccagaaacgcuccgcgg

SEQ ID NO: 2495412 - RNA, 19 nt, Artificial Sequence
  Description of Artificial Sequence: Synthetic oligonucleotide
  Sense strand starting at position 2322 of SEQ ID NO: 1887771
cgcggagcguuucuggaaa

SEQ ID NO: 2495413 - RNA, 19 nt, Artificial Sequence
  Description of Artificial Sequence: Synthetic oligonucleotide
  Antisense strand to SEQ ID NO: 2495412
uuuccagaaacgcuccgcg

SEQ ID NO: 2495414 - RNA, 19 nt, Artificial Sequence
  Description of Artificial Sequence: Synthetic oligonucleotide
  Sense strand starting at position 2324 of SEQ ID NO: 1887771
cggagcguuucuggaaaua

SEQ ID NO: 2495415 - RNA, 19 nt, Artificial Sequence
  Description of Artificial Sequence: Synthetic oligonucleotide
  Antisense strand to SEQ ID NO: 2495414
uauuuccagaaacgcuccg

SEQ ID NO: 2495416 - RNA, 19 nt, Artificial Sequence
  Description of Artificial Sequence: Synthetic oligonucleotide
  Sense strand starting at position 2346 of SEQ ID NO: 1887771
gaaugugcucagugcccaa

SEQ ID NO: 2495417 - RNA, 19 nt, Artificial Sequence
  Description of Artificial Sequence: Synthetic oligonucleotide
  Antisense strand to SEQ ID NO: 2495416
uugggcacugagcacauuc

SEQ ID NO: 2495418 - RNA, 19 nt, Artificial Sequence
  Description of Artificial Sequence: Synthetic oligonucleotide
  Sense strand starting at position 2397 of SEQ ID NO: 1887771
ccgccagcuuaugggaauu

SEQ ID NO: 2495419 - RNA, 19 nt, Artificial Sequence
  Description of Artificial Sequence: Synthetic oligonucleotide
  Antisense strand to SEQ ID NO: 2495418
aauucccauaagcuggcgg

SEQ ID NO: 2495420 - RNA, 19 nt, Artificial Sequence
  Description of Artificial Sequence: Synthetic oligonucleotide
  Sense strand starting at position 2450 of SEQ ID NO: 1887771
gcguucucaagcucagcaa

SEQ ID NO: 2495421 - RNA, 19 nt, Artificial Sequence
  Description of Artificial Sequence: Synthetic oligonucleotide
  Antisense strand to SEQ ID NO: 2495420
uugcugagcuugagaacgc

SEQ ID NO: 2495422 - RNA, 19 nt, Artificial Sequence
  Description of Artificial Sequence: Synthetic oligonucleotide
  Sense strand starting at position 2506 of SEQ ID NO: 1887771
aaagcagaagucggagaaa

SEQ ID NO: 2495423 - RNA, 19 nt, Artificial Sequence
  Description of Artificial Sequence: Synthetic oligonucleotide
  Antisense strand to SEQ ID NO: 2495422
uuucuccgacuucugcuuu

SEQ ID NO: 2495424 - RNA, 19 nt, Artificial Sequence
  Description of Artificial Sequence: Synthetic oligonucleotide
  Sense strand starting at position 2518 of SEQ ID NO: 1887771
ggagaaagccaggguugaa

SEQ ID NO: 2495425 - RNA, 19 nt, Artificial Sequence
  Description of Artificial Sequence: Synthetic oligonucleotide
  Antisense strand to SEQ ID NO: 2495424
uucaacccuggcuuucucc

SEQ ID NO: 2495426 - RNA, 19 nt, Artificial Sequence
  Description of Artificial Sequence: Synthetic oligonucleotide
  Sense strand starting at position 2597 of SEQ ID NO: 1887771
acuagaauuuagcggacuu

SEQ ID NO: 2495427 - RNA, 19 nt, Artificial Sequence
  Description of Artificial Sequence: Synthetic oligonucleotide
  Antisense strand to SEQ ID NO: 2495426
aaguccgcuaaauucuagu

SEQ ID NO: 2495428 - RNA, 19 nt, Artificial Sequence
  Description of Artificial Sequence: Synthetic oligonucleotide
  Sense strand starting at position 2626 of SEQ ID NO: 1887771
gccgacgguuuccggaaau

SEQ ID NO: 2495429 - RNA, 19 nt, Artificial Sequence
  Description of Artificial Sequence: Synthetic oligonucleotide
  Antisense strand to SEQ ID NO: 2495428
auuuccggaaaccgucggc

SEQ ID NO: 2495430 - RNA, 19 nt, Artificial Sequence
  Description of Artificial Sequence: Synthetic oligonucleotide
  Sense strand starting at position 2667 of SEQ ID NO: 1887771
ggcuguagccaagaguguu

SEQ ID NO: 2495431 - RNA, 19 nt, Artificial Sequence
  Description of Artificial Sequence: Synthetic oligonucleotide
  Antisense strand to SEQ ID NO: 2495430
aacacucuuggcuacagcc

SEQ ID NO: 2495432 - RNA, 19 nt, Artificial Sequence
  Description of Artificial Sequence: Synthetic oligonucleotide
  Sense strand starting at position 2673 of SEQ ID NO: 1887771
agccaagaguguuugcaug

SEQ ID NO: 2495433 - RNA, 19 nt, Artificial Sequence
  Description of Artificial Sequence: Synthetic oligonucleotide
  Antisense strand to SEQ ID NO: 2495432
caugcaaacacucuuggcu

SEQ ID NO: 2495434 - RNA, 19 nt, Artificial Sequence
  Description of Artificial Sequence: Synthetic oligonucleotide
  Sense strand starting at position 2708 of SEQ ID NO: 1887771
gaaguaacggauugcucua

SEQ ID NO: 2495435 - RNA, 19 nt, Artificial Sequence
  Description of Artificial Sequence: Synthetic oligonucleotide
  Antisense strand to SEQ ID NO: 2495434
uagagcaauccguuacuuc

SEQ ID NO: 2495436 - RNA, 19 nt, Artificial Sequence
  Description of Artificial Sequence: Synthetic oligonucleotide
  Sense strand starting at position 3155 of SEQ ID NO: 1887771
gcugcaaugugccgugauu

SEQ ID NO: 2495437 - RNA, 19 nt, Artificial Sequence
  Description of Artificial Sequence: Synthetic oligonucleotide
  Antisense strand to SEQ ID NO: 2495436
aaucacggcacauugcagc

SEQ ID NO: 2495438 - RNA, 19 nt, Artificial Sequence
  Description of Artificial Sequence: Synthetic oligonucleotide
  Sense strand starting at position 3254 of SEQ ID NO: 1887771
agaugucuggaggaagcuu

SEQ ID NO: 2495439 - RNA, 19 nt, Artificial Sequence
  Description of Artificial Sequence: Synthetic oligonucleotide
  Antisense strand to SEQ ID NO: 2495438
aagcuuccuccagacaucu

SEQ ID NO: 2495440 - RNA, 19 nt, Artificial Sequence
  Description of Artificial Sequence: Synthetic oligonucleotide
  Sense strand starting at position 3292 of SEQ ID NO: 1887771
ggaguacucgcagggagag

SEQ ID NO: 2495441 - RNA, 19 nt, Artificial Sequence
  Description of Artificial Sequence: Synthetic oligonucleotide
  Antisense strand to SEQ ID NO: 2495440
cucucccugcgaguacucc

SEQ ID NO: 2495442 - RNA, 19 nt, Artificial Sequence
  Description of Artificial Sequence: Synthetic oligonucleotide
  Sense strand starting at position 3390 of SEQ ID NO: 1887771
ugcaaugacuuugagccau

SEQ ID NO: 2495443 - RNA, 19 nt, Artificial Sequence
  Description of Artificial Sequence: Synthetic oligonucleotide
  Antisense strand to SEQ ID NO: 2495442
auggcucaaagucauugca

SEQ ID NO: 2495444 - RNA, 19 nt, Artificial Sequence
  Description of Artificial Sequence: Synthetic oligonucleotide
  Sense strand starting at position 3396 of SEQ ID NO: 1887771
gacuuugagccaugggucu

SEQ ID NO: 2495445 - RNA, 19 nt, Artificial Sequence
  Description of Artificial Sequence: Synthetic oligonucleotide
  Antisense strand to SEQ ID NO: 2495444
agacccauggcucaaaguc

SEQ ID NO: 2495446 - RNA, 19 nt, Artificial Sequence
  Description of Artificial Sequence: Synthetic oligonucleotide
  Sense strand starting at position 3398 of SEQ ID NO: 1887771
cuuugagccaugggucuau

SEQ ID NO: 2495447 - RNA, 19 nt, Artificial Sequence
  Description of Artificial Sequence: Synthetic oligonucleotide
  Antisense strand to SEQ ID NO: 2495446
auagacccauggcucaaag

SEQ ID NO: 2495448 - RNA, 19 nt, Artificial Sequence
  Description of Artificial Sequence: Synthetic oligonucleotide
  Sense strand starting at position 3482 of SEQ ID NO: 1887771
ggagcucaucuuuguaaau

SEQ ID NO: 2495449 - RNA, 19 nt, Artificial Sequence
  Description of Artificial Sequence: Synthetic oligonucleotide
  Antisense strand to SEQ ID NO: 2495448
auuuacaaagaugagcucc

SEQ ID NO: 2495450 - RNA, 19 nt, Artificial Sequence
  Description of Artificial Sequence: Synthetic oligonucleotide
  Sense strand starting at position 281 of SEQ ID NO: 1887772
ugggauagccuuuauuauc

SEQ ID NO: 2495451 - RNA, 19 nt, Artificial Sequence
  Description of Artificial Sequence: Synthetic oligonucleotide
  Antisense strand to SEQ ID NO: 2495450
gauaauaaaggcuauccca

SEQ ID NO: 2495452 - RNA, 19 nt, Artificial Sequence
  Description of Artificial Sequence: Synthetic oligonucleotide
  Sense strand starting at position 412 of SEQ ID NO: 1887772
caggaacuguacucaggua

SEQ ID NO: 2495453 - RNA, 19 nt, Artificial Sequence
  Description of Artificial Sequence: Synthetic oligonucleotide
  Antisense strand to SEQ ID NO: 2495452
uaccugaguacaguuccug

SEQ ID NO: 2495454 - RNA, 19 nt, Artificial Sequence
  Description of Artificial Sequence: Synthetic oligonucleotide
  Sense strand starting at position 437 of SEQ ID NO: 1887772
acccgaaagcucugcucuu

SEQ ID NO: 2495455 - RNA, 19 nt, Artificial Sequence
  Description of Artificial Sequence: Synthetic oligonucleotide
  Antisense strand to SEQ ID NO: 2495454
aagagcagagcuuucgggu

SEQ ID NO: 2495456 - RNA, 19 nt, Artificial Sequence
  Description of Artificial Sequence: Synthetic oligonucleotide
  Sense strand starting at position 438 of SEQ ID NO: 1887772
cccgaaagcucugcucuua

SEQ ID NO: 2495457 - RNA, 19 nt, Artificial Sequence
  Description of Artificial Sequence: Synthetic oligonucleotide
  Antisense strand to SEQ ID NO: 2495456
uaagagcagagcuuucggg

SEQ ID NO: 2495458 - RNA, 19 nt, Artificial Sequence
  Description of Artificial Sequence: Synthetic oligonucleotide
  Sense strand starting at position 512 of SEQ ID NO: 1887772
gauguuacccagggaguga

SEQ ID NO: 2495459 - RNA, 19 nt, Artificial Sequence
  Description of Artificial Sequence: Synthetic oligonucleotide
  Antisense strand to SEQ ID NO: 2495458
ucacucccuggguaacauc

SEQ ID NO: 2495460 - RNA, 19 nt, Artificial Sequence
  Description of Artificial Sequence: Synthetic oligonucleotide
  Sense strand starting at position 622 of SEQ ID NO: 1887772
cauggagugucacccauaa

SEQ ID NO: 2495461 - RNA, 19 nt, Artificial Sequence
  Description of Artificial Sequence: Synthetic oligonucleotide
  Antisense strand to SEQ ID NO: 2495460
uuaugggugacacuccaug

SEQ ID NO: 2495462 - RNA, 19 nt, Artificial Sequence
  Description of Artificial Sequence: Synthetic oligonucleotide
  Sense strand starting at position 762 of SEQ ID NO: 1887772
cgcggguuccaggugcaaa

SEQ ID NO: 2495463 - RNA, 19 nt, Artificial Sequence
  Description of Artificial Sequence: Synthetic oligonucleotide
  Antisense strand to SEQ ID NO: 2495462
uuugcaccuggaacccgcg

SEQ ID NO: 2495464 - RNA, 19 nt, Artificial Sequence
  Description of Artificial Sequence: Synthetic oligonucleotide
  Sense strand starting at position 763 of SEQ ID NO: 1887772
gcggguuccaggugcaaau

SEQ ID NO: 2495465 - RNA, 19 nt, Artificial Sequence
  Description of Artificial Sequence: Synthetic oligonucleotide
  Antisense strand to SEQ ID NO: 2495464
auuugcaccuggaacccgc

SEQ ID NO: 2495466 - RNA, 19 nt, Artificial Sequence
  Description of Artificial Sequence: Synthetic oligonucleotide
  Sense strand starting at position 943 of SEQ ID NO: 1887772
gcacucaaccaaggagaau

SEQ ID NO: 2495467 - RNA, 19 nt, Artificial Sequence
  Description of Artificial Sequence: Synthetic oligonucleotide
  Antisense strand to SEQ ID NO: 2495466
auucuccuugguugagugc

SEQ ID NO: 2495468 - RNA, 19 nt, Artificial Sequence
  Description of Artificial Sequence: Synthetic oligonucleotide
  Sense strand starting at position 968 of SEQ ID NO: 1887772
ugcaaaugcgauugcuaug

SEQ ID NO: 2495469 - RNA, 19 nt, Artificial Sequence
  Description of Artificial Sequence: Synthetic oligonucleotide
  Antisense strand to SEQ ID NO: 2495468
cauagcaaucgcauuugca

SEQ ID NO: 2495470 - RNA, 19 nt, Artificial Sequence
  Description of Artificial Sequence: Synthetic oligonucleotide
  Sense strand starting at position 1114 of SEQ ID NO: 1887772
cccugaaaugaaugaucuu

SEQ ID NO: 2495471 - RNA, 19 nt, Artificial Sequence
  Description of Artificial Sequence: Synthetic oligonucleotide
  Antisense strand to SEQ ID NO: 2495470
aagaucauucauuucaggg

SEQ ID NO: 2495472 - RNA, 19 nt, Artificial Sequence
  Description of Artificial Sequence: Synthetic oligonucleotide
  Sense strand starting at position 1159 of SEQ ID NO: 1887772
ucaguuuccuugcugguaa

SEQ ID NO: 2495473 - RNA, 19 nt, Artificial Sequence
  Description of Artificial Sequence: Synthetic oligonucleotide
  Antisense strand to SEQ ID NO: 2495472
uuaccagcaaggaaacuga

SEQ ID NO: 2495474 - RNA, 19 nt, Artificial Sequence
  Description of Artificial Sequence: Synthetic oligonucleotide
  Sense strand starting at position 1228 of SEQ ID NO: 1887772
acuuaaagcgcuugacaca

SEQ ID NO: 2495475 - RNA, 19 nt, Artificial Sequence
  Description of Artificial Sequence: Synthetic oligonucleotide
  Antisense strand to SEQ ID NO: 2495474
ugugucaagcgcuuuaagu

SEQ ID NO: 2495476 - RNA, 19 nt, Artificial Sequence
  Description of Artificial Sequence: Synthetic oligonucleotide
  Sense strand starting at position 1329 of SEQ ID NO: 1887772
gcagaaugucacgggcgau

SEQ ID NO: 2495477 - RNA, 19 nt, Artificial Sequence
  Description of Artificial Sequence: Synthetic oligonucleotide
  Antisense strand to SEQ ID NO: 2495476
aucgcccgugacauucugc

SEQ ID NO: 2495478 - RNA, 19 nt, Artificial Sequence
  Description of Artificial Sequence: Synthetic oligonucleotide
  Sense strand starting at position 1341 of SEQ ID NO: 1887772
gggcgaugucgcagacuca

SEQ ID NO: 2495479 - RNA, 19 nt, Artificial Sequence
  Description of Artificial Sequence: Synthetic oligonucleotide
  Antisense strand to SEQ ID NO: 2495478
ugagucugcgacaucgccc

SEQ ID NO: 2495480 - RNA, 19 nt, Artificial Sequence
  Description of Artificial Sequence: Synthetic oligonucleotide
  Sense strand starting at position 1360 of SEQ ID NO: 1887772
gcauuagguguacacagua

SEQ ID NO: 2495481 - RNA, 19 nt, Artificial Sequence
  Description of Artificial Sequence: Synthetic oligonucleotide
  Antisense strand to SEQ ID NO: 2495480
uacuguguacaccuaaugc

SEQ ID NO: 2495482 - RNA, 19 nt, Artificial Sequence
  Description of Artificial Sequence: Synthetic oligonucleotide
  Sense strand starting at position 1513 of SEQ ID NO: 1887772
gugcauuaggccgagaggu

SEQ ID NO: 2495483 - RNA, 19 nt, Artificial Sequence
  Description of Artificial Sequence: Synthetic oligonucleotide
  Antisense strand to SEQ ID NO: 2495482
accucucggccuaaugcac

SEQ ID NO: 2495484 - RNA, 19 nt, Artificial Sequence
  Description of Artificial Sequence: Synthetic oligonucleotide
  Sense strand starting at position 1515 of SEQ ID NO: 1887772
gcauuaggccgagagguau

SEQ ID NO: 2495485 - RNA, 19 nt, Artificial Sequence
  Description of Artificial Sequence: Synthetic oligonucleotide
  Antisense strand to SEQ ID NO: 2495484
auaccucucggccuaaugc

SEQ ID NO: 2495486 - RNA, 19 nt, Artificial Sequence
  Description of Artificial Sequence: Synthetic oligonucleotide
  Sense strand starting at position 2014 of SEQ ID NO: 1887772
uggccuucuauuggguaga

SEQ ID NO: 2495487 - RNA, 19 nt, Artificial Sequence
  Description of Artificial Sequence: Synthetic oligonucleotide
  Antisense strand to SEQ ID NO: 2495486
ucuacccaauagaaggcca

SEQ ID NO: 2495488 - RNA, 19 nt, Artificial Sequence
  Description of Artificial Sequence: Synthetic oligonucleotide
  Sense strand starting at position 2016 of SEQ ID NO: 1887772
gccuucuauuggguagaag

SEQ ID NO: 2495489 - RNA, 19 nt, Artificial Sequence
  Description of Artificial Sequence: Synthetic oligonucleotide
  Antisense strand to SEQ ID NO: 2495488
cuucuacccaauagaaggc

SEQ ID NO: 2495490 - RNA, 19 nt, Artificial Sequence
  Description of Artificial Sequence: Synthetic oligonucleotide
  Sense strand starting at position 2230 of SEQ ID NO: 1887772
cgggauagagcuuauggau

SEQ ID NO: 2495491 - RNA, 19 nt, Artificial Sequence
  Description of Artificial Sequence: Synthetic oligonucleotide
  Antisense strand to SEQ ID NO: 2495490
auccauaagcucuaucccg

SEQ ID NO: 2495492 - RNA, 19 nt, Artificial Sequence
  Description of Artificial Sequence: Synthetic oligonucleotide
  Sense strand starting at position 2237 of SEQ ID NO: 1887772
gagcuuauggauuggcuaa

SEQ ID NO: 2495493 - RNA, 19 nt, Artificial Sequence
  Description of Artificial Sequence: Synthetic oligonucleotide
  Antisense strand to SEQ ID NO: 2495492
uuagccaauccauaagcuc

SEQ ID NO: 2495494 - RNA, 19 nt, Artificial Sequence
  Description of Artificial Sequence: Synthetic oligonucleotide
  Sense strand starting at position 2238 of SEQ ID NO: 1887772
agcuuauggauuggcuaau

SEQ ID NO: 2495495 - RNA, 19 nt, Artificial Sequence
  Description of Artificial Sequence: Synthetic oligonucleotide
  Antisense strand to SEQ ID NO: 2495494
auuagccaauccauaagcu

SEQ ID NO: 2495496 - RNA, 19 nt, Artificial Sequence
  Description of Artificial Sequence: Synthetic oligonucleotide
  Sense strand starting at position 2406 of SEQ ID NO: 1887772
ugcaguugccuuggagaug

SEQ ID NO: 2495497 - RNA, 19 nt, Artificial Sequence
  Description of Artificial Sequence: Synthetic oligonucleotide
  Antisense strand to SEQ ID NO: 2495496
caucuccaaggcaacugca

SEQ ID NO: 2495498 - RNA, 19 nt, Artificial Sequence
  Description of Artificial Sequence: Synthetic oligonucleotide
  Sense strand starting at position 2430 of SEQ ID NO: 1887772
cuaaguacccgaugcuuaa

SEQ ID NO: 2495499 - RNA, 19 nt, Artificial Sequence
  Description of Artificial Sequence: Synthetic oligonucleotide
  Antisense strand to SEQ ID NO: 2495498
uuaagcaucggguacuuag

SEQ ID NO: 2495500 - RNA, 19 nt, Artificial Sequence
  Description of Artificial Sequence: Synthetic oligonucleotide
  Sense strand starting at position 2477 of SEQ ID NO: 1887772
accuguuucccacagaugu

SEQ ID NO: 2495501 - RNA, 19 nt, Artificial Sequence
  Description of Artificial Sequence: Synthetic oligonucleotide
  Antisense strand to SEQ ID NO: 2495500
acaucugugggaaacaggu

SEQ ID NO: 2495502 - RNA, 19 nt, Artificial Sequence
  Description of Artificial Sequence: Synthetic oligonucleotide
  Sense strand starting at position 2788 of SEQ ID NO: 1887772
ggguagauaugggaguuga

SEQ ID NO: 2495503 - RNA, 19 nt, Artificial Sequence
  Description of Artificial Sequence: Synthetic oligonucleotide
  Antisense strand to SEQ ID NO: 2495502
ucaacucccauaucuaccc

SEQ ID NO: 2495504 - RNA, 19 nt, Artificial Sequence
  Description of Artificial Sequence: Synthetic oligonucleotide
  Sense strand starting at position 2844 of SEQ ID NO: 1887772
agcauagaacccuauguga

SEQ ID NO: 2495505 - RNA, 19 nt, Artificial Sequence
  Description of Artificial Sequence: Synthetic oligonucleotide
  Antisense strand to SEQ ID NO: 2495504
ucacauaggguucuaugcu

SEQ ID NO: 2495506 - RNA, 19 nt, Artificial Sequence
  Description of Artificial Sequence: Synthetic oligonucleotide
  Sense strand starting at position 2851 of SEQ ID NO: 1887772
aacccuaugugaccguuaa

SEQ ID NO: 2495507 - RNA, 19 nt, Artificial Sequence
  Description of Artificial Sequence: Synthetic oligonucleotide
  Antisense strand to SEQ ID NO: 2495506
uuaacggucacauaggguu

SEQ ID NO: 2495508 - RNA, 19 nt, Artificial Sequence
  Description of Artificial Sequence: Synthetic oligonucleotide
  Sense strand starting at position 2852 of SEQ ID NO: 1887772
acccuaugugaccguuaaa

SEQ ID NO: 2495509 - RNA, 19 nt, Artificial Sequence
  Description of Artificial Sequence: Synthetic oligonucleotide
  Antisense strand to SEQ ID NO: 2495508
uuuaacggucacauagggu

SEQ ID NO: 2495510 - RNA, 19 nt, Artificial Sequence
  Description of Artificial Sequence: Synthetic oligonucleotide
  Sense strand starting at position 2873 of SEQ ID NO: 1887772
gaaugaggcucagugaagu

SEQ ID NO: 2495511 - RNA, 19 nt, Artificial Sequence
  Description of Artificial Sequence: Synthetic oligonucleotide
  Antisense strand to SEQ ID NO: 2495510
acuucacugagccucauuc

SEQ ID NO: 2495512 - RNA, 19 nt, Artificial Sequence
  Description of Artificial Sequence: Synthetic oligonucleotide
  Sense strand starting at position 2935 of SEQ ID NO: 1887772
gcaguagaaggcuaagaga

SEQ ID NO: 2495513 - RNA, 19 nt, Artificial Sequence
  Description of Artificial Sequence: Synthetic oligonucleotide
  Antisense strand to SEQ ID NO: 2495512
ucucuuagccuucuacugc

SEQ ID NO: 2495514 - RNA, 19 nt, Artificial Sequence
  Description of Artificial Sequence: Synthetic oligonucleotide
  Sense strand starting at position 2971 of SEQ ID NO: 1887772
ggguuuaaagccugggacu

SEQ ID NO: 2495515 - RNA, 19 nt, Artificial Sequence
  Description of Artificial Sequence: Synthetic oligonucleotide
  Antisense strand to SEQ ID NO: 2495514
agucccaggcuuuaaaccc

SEQ ID NO: 2495516 - RNA, 19 nt, Artificial Sequence
  Description of Artificial Sequence: Synthetic oligonucleotide
  Sense strand starting at position 2973 of SEQ ID NO: 1887772
guuuaaagccugggacuga

SEQ ID NO: 2495517 - RNA, 19 nt, Artificial Sequence
  Description of Artificial Sequence: Synthetic oligonucleotide
  Antisense strand to SEQ ID NO: 2495516
ucagucccaggcuuuaaac

SEQ ID NO: 2495518 - RNA, 19 nt, Artificial Sequence
  Description of Artificial Sequence: Synthetic oligonucleotide
  Sense strand starting at position 3009 of SEQ ID NO: 1887772
ugaacugauuacuuaacgu

SEQ ID NO: 2495519 - RNA, 19 nt, Artificial Sequence
  Description of Artificial Sequence: Synthetic oligonucleotide
  Antisense strand to SEQ ID NO: 2495518
acguuaaguaaucaguuca

SEQ ID NO: 2495520 - RNA, 19 nt, Artificial Sequence
  Description of Artificial Sequence: Synthetic oligonucleotide
  Sense strand starting at position 3075 of SEQ ID NO: 1887772
acauccuucuguuugaugu

SEQ ID NO: 2495521 - RNA, 19 nt, Artificial Sequence
  Description of Artificial Sequence: Synthetic oligonucleotide
  Antisense strand to SEQ ID NO: 2495520
acaucaaacagaaggaugu

SEQ ID NO: 2495522 - RNA, 19 nt, Artificial Sequence
  Description of Artificial Sequence: Synthetic oligonucleotide
  Sense strand starting at position 3611 of SEQ ID NO: 1887772
uuuguuucccaagggacau

SEQ ID NO: 2495523 - RNA, 19 nt, Artificial Sequence
  Description of Artificial Sequence: Synthetic oligonucleotide
  Antisense strand to SEQ ID NO: 2495522
augucccuugggaaacaaa

SEQ ID NO: 2495524 - RNA, 19 nt, Artificial Sequence
  Description of Artificial Sequence: Synthetic oligonucleotide
  Sense strand starting at position 3631 of SEQ ID NO: 1887772
uggcaacaucuugauacau

SEQ ID NO: 2495525 - RNA, 19 nt, Artificial Sequence
  Description of Artificial Sequence: Synthetic oligonucleotide
  Antisense strand to SEQ ID NO: 2495524
auguaucaagauguugcca

SEQ ID NO: 2495526 - RNA, 19 nt, Artificial Sequence
  Description of Artificial Sequence: Synthetic oligonucleotide
  Sense strand starting at position 3687 of SEQ ID NO: 1887772
ggagauacuacuggcuacu

SEQ ID NO: 2495527 - RNA, 19 nt, Artificial Sequence
  Description of Artificial Sequence: Synthetic oligonucleotide
  Antisense strand to SEQ ID NO: 2495526
aguagccaguaguaucucc

SEQ ID NO: 2495528 - RNA, 19 nt, Artificial Sequence
  Description of Artificial Sequence: Synthetic oligonucleotide
  Sense strand starting at position 3806 of SEQ ID NO: 1887772
accuguaauccagggcuuu

SEQ ID NO: 2495529 - RNA, 19 nt, Artificial Sequence
  Description of Artificial Sequence: Synthetic oligonucleotide
  Antisense strand to SEQ ID NO: 2495528
aaagcccuggauuacaggu

SEQ ID NO: 2495530 - RNA, 19 nt, Artificial Sequence
  Description of Artificial Sequence: Synthetic oligonucleotide
  Sense strand starting at position 184 of SEQ ID NO: 1887773
agacaugugaguugaaacu

SEQ ID NO: 2495531 - RNA, 19 nt, Artificial Sequence
  Description of Artificial Sequence: Synthetic oligonucleotide
  Antisense strand to SEQ ID NO: 2495530
aguuucaacucacaugucu

SEQ ID NO: 2495532 - RNA, 19 nt, Artificial Sequence
  Description of Artificial Sequence: Synthetic oligonucleotide
  Sense strand starting at position 193 of SEQ ID NO: 1887773
aguugaaacucccugugaa

SEQ ID NO: 2495533 - RNA, 19 nt, Artificial Sequence
  Description of Artificial Sequence: Synthetic oligonucleotide
  Antisense strand to SEQ ID NO: 2495532
uucacagggaguuucaacu

SEQ ID NO: 2495534 - RNA, 19 nt, Artificial Sequence
  Description of Artificial Sequence: Synthetic oligonucleotide
  Sense strand starting at position 194 of SEQ ID NO: 1887773
guugaaacucccugugaau

SEQ ID NO: 2495535 - RNA, 19 nt, Artificial Sequence
  Description of Artificial Sequence: Synthetic oligonucleotide
  Antisense strand to SEQ ID NO: 2495534
auucacagggaguuucaac

SEQ ID NO: 2495536 - RNA, 19 nt, Artificial Sequence
  Description of Artificial Sequence: Synthetic oligonucleotide
  Sense strand starting at position 227 of SEQ ID NO: 1887773
ugagucuucccugagcgca

SEQ ID NO: 2495537 - RNA, 19 nt, Artificial Sequence
  Description of Artificial Sequence: Synthetic oligonucleotide
  Antisense strand to SEQ ID NO: 2495536
ugcgcucagggaagacuca

SEQ ID NO: 2495538 - RNA, 19 nt, Artificial Sequence
  Description of Artificial Sequence: Synthetic oligonucleotide
  Sense strand starting at position 272 of SEQ ID NO: 1887773
cuaucacugcuccgccaua

SEQ ID NO: 2495539 - RNA, 19 nt, Artificial Sequence
  Description of Artificial Sequence: Synthetic oligonucleotide
  Antisense strand to SEQ ID NO: 2495538
uauggcggagcagugauag

SEQ ID NO: 2495540 - RNA, 19 nt, Artificial Sequence
  Description of Artificial Sequence: Synthetic oligonucleotide
  Sense strand starting at position 297 of SEQ ID NO: 1887773
cgcacucuggacugaaauc

SEQ ID NO: 2495541 - RNA, 19 nt, Artificial Sequence
  Description of Artificial Sequence: Synthetic oligonucleotide
  Antisense strand to SEQ ID NO: 2495540
gauuucaguccagagugcg

SEQ ID NO: 2495542 - RNA, 19 nt, Artificial Sequence
  Description of Artificial Sequence: Synthetic oligonucleotide
  Sense strand starting at position 990 of SEQ ID NO: 1887773
aggagucauccuggacucu

SEQ ID NO: 2495543 - RNA, 19 nt, Artificial Sequence
  Description of Artificial Sequence: Synthetic oligonucleotide
  Antisense strand to SEQ ID NO: 2495542
agaguccaggaugacuccu

SEQ ID NO: 2495544 - RNA, 19 nt, Artificial Sequence
  Description of Artificial Sequence: Synthetic oligonucleotide
  Sense strand starting at position 1184 of SEQ ID NO: 1887773
gggcgaaucguguuguuuc

SEQ ID NO: 2495545 - RNA, 19 nt, Artificial Sequence
  Description of Artificial Sequence: Synthetic oligonucleotide
  Antisense strand to SEQ ID NO: 2495544
gaaacaacacgauucgccc

SEQ ID NO: 2495546 - RNA, 19 nt, Artificial Sequence
  Description of Artificial Sequence: Synthetic oligonucleotide
  Sense strand starting at position 1186 of SEQ ID NO: 1887773
gcgaaucguguuguuucca

SEQ ID NO: 2495547 - RNA, 19 nt, Artificial Sequence
  Description of Artificial Sequence: Synthetic oligonucleotide
  Antisense strand to SEQ ID NO: 2495546
uggaaacaacacgauucgc

SEQ ID NO: 2495548 - RNA, 19 nt, Artificial Sequence
  Description of Artificial Sequence: Synthetic oligonucleotide
  Sense strand starting at position 1432 of SEQ ID NO: 1887773
acaggcucuucgcucauua

SEQ ID NO: 2495549 - RNA, 19 nt, Artificial Sequence
  Description of Artificial Sequence: Synthetic oligonucleotide
  Antisense strand to SEQ ID NO: 2495548
uaaugagcgaagagccugu

SEQ ID NO: 2495550 - RNA, 19 nt, Artificial Sequence
  Description of Artificial Sequence: Synthetic oligonucleotide
  Sense strand starting at position 1498 of SEQ ID NO: 1887773
agagcacugcuuuacugau

SEQ ID NO: 2495551 - RNA, 19 nt, Artificial Sequence
  Description of Artificial Sequence: Synthetic oligonucleotide
  Antisense strand to SEQ ID NO: 2495550
aucaguaaagcagugcucu

SEQ ID NO: 2495552 - RNA, 19 nt, Artificial Sequence
  Description of Artificial Sequence: Synthetic oligonucleotide
  Sense strand starting at position 1543 of SEQ ID NO: 1887773
gucugucuucccgagacag

SEQ ID NO: 2495553 - RNA, 19 nt, Artificial Sequence
  Description of Artificial Sequence: Synthetic oligonucleotide
  Antisense strand to SEQ ID NO: 2495552
cugucucgggaagacagac

SEQ ID NO: 2495554 - RNA, 19 nt, Artificial Sequence
  Description of Artificial Sequence: Synthetic oligonucleotide
  Sense strand starting at position 1559 of SEQ ID NO: 1887773
cagggacuucucugacuug

SEQ ID NO: 2495555 - RNA, 19 nt, Artificial Sequence
  Description of Artificial Sequence: Synthetic oligonucleotide
  Antisense strand to SEQ ID NO: 2495554
caagucagagaagucccug

SEQ ID NO: 2495556 - RNA, 19 nt, Artificial Sequence
  Description of Artificial Sequence: Synthetic oligonucleotide
  Sense strand starting at position 1573 of SEQ ID NO: 1887773
acuuguuccugcuuccaga

SEQ ID NO: 2495557 - RNA, 19 nt, Artificial Sequence
  Description of Artificial Sequence: Synthetic oligonucleotide
  Antisense strand to SEQ ID NO: 2495556
ucuggaagcaggaacaagu

SEQ ID NO: 2495558 - RNA, 19 nt, Artificial Sequence
  Description of Artificial Sequence: Synthetic oligonucleotide
  Sense strand starting at position 1601 of SEQ ID NO: 1887773
ggcacagaguacucaaaca

SEQ ID NO: 2495559 - RNA, 19 nt, Artificial Sequence
  Description of Artificial Sequence: Synthetic oligonucleotide
  Antisense strand to SEQ ID NO: 2495558
uguuugaguacucugugcc

SEQ ID NO: 2495560 - RNA, 19 nt, Artificial Sequence
  Description of Artificial Sequence: Synthetic oligonucleotide
  Sense strand starting at position 2439 of SEQ ID NO: 1887773
ucaguuucccuauacguaa

SEQ ID NO: 2495561 - RNA, 19 nt, Artificial Sequence
  Description of Artificial Sequence: Synthetic oligonucleotide
  Antisense strand to SEQ ID NO: 2495560
uuacguauagggaaacuga

SEQ ID NO: 2495562 - RNA, 19 nt, Artificial Sequence
  Description of Artificial Sequence: Synthetic oligonucleotide
  Sense strand starting at position 2442 of SEQ ID NO: 1887773
guuucccuauacguaaauu

SEQ ID NO: 2495563 - RNA, 19 nt, Artificial Sequence
  Description of Artificial Sequence: Synthetic oligonucleotide
  Antisense strand to SEQ ID NO: 2495562
aauuuacguauagggaaac

SEQ ID NO: 2495564 - RNA, 19 nt, Artificial Sequence
  Description of Artificial Sequence: Synthetic oligonucleotide
  Sense strand starting at position 2473 of SEQ ID NO: 1887773
gcaugauagggacacuugu

SEQ ID NO: 2495565 - RNA, 19 nt, Artificial Sequence
  Description of Artificial Sequence: Synthetic oligonucleotide
  Antisense strand to SEQ ID NO: 2495564
acaagugucccuaucaugc

SEQ ID NO: 2495566 - RNA, 19 nt, Artificial Sequence
  Description of Artificial Sequence: Synthetic oligonucleotide
  Sense strand starting at position 2519 of SEQ ID NO: 1887773
uaaggugaucauugguaac

SEQ ID NO: 2495567 - RNA, 19 nt, Artificial Sequence
  Description of Artificial Sequence: Synthetic oligonucleotide
  Antisense strand to SEQ ID NO: 2495566
guuaccaaugaucaccuua

SEQ ID NO: 2495568 - RNA, 19 nt, Artificial Sequence
  Description of Artificial Sequence: Synthetic oligonucleotide
  Sense strand starting at position 2521 of SEQ ID NO: 1887773
aggugaucauugguaacua

SEQ ID NO: 2495569 - RNA, 19 nt, Artificial Sequence
  Description of Artificial Sequence: Synthetic oligonucleotide
  Antisense strand to SEQ ID NO: 2495568
uaguuaccaaugaucaccu

SEQ ID NO: 2495570 - RNA, 19 nt, Artificial Sequence
  Description of Artificial Sequence: Synthetic oligonucleotide
  Sense strand starting at position 2730 of SEQ ID NO: 1887773
cgugcuguucccucaacuu

SEQ ID NO: 2495571 - RNA, 19 nt, Artificial Sequence
  Description of Artificial Sequence: Synthetic oligonucleotide
  Antisense strand to SEQ ID NO: 2495570
aaguugagggaacagcacg

SEQ ID NO: 2495572 - RNA, 19 nt, Artificial Sequence
  Description of Artificial Sequence: Synthetic oligonucleotide
  Sense strand starting at position 2783 of SEQ ID NO: 1887773
cagcgauugccucuguugu

SEQ ID NO: 2495573 - RNA, 19 nt, Artificial Sequence
  Description of Artificial Sequence: Synthetic oligonucleotide
  Antisense strand to SEQ ID NO: 2495572
acaacagaggcaaucgcug

SEQ ID NO: 2495574 - RNA, 19 nt, Artificial Sequence
  Description of Artificial Sequence: Synthetic oligonucleotide
  Sense strand starting at position 2799 of SEQ ID NO: 1887773
ugugauaccuucccugauu

SEQ ID NO: 2495575 - RNA, 19 nt, Artificial Sequence
  Description of Artificial Sequence: Synthetic oligonucleotide
  Antisense strand to SEQ ID NO: 2495574
aaucagggaagguaucaca

SEQ ID NO: 2495576 - RNA, 19 nt, Artificial Sequence
  Description of Artificial Sequence: Synthetic oligonucleotide
  Sense strand starting at position 2834 of SEQ ID NO: 1887773
cagugccacgcucauuaaa

SEQ ID NO: 2495577 - RNA, 19 nt, Artificial Sequence
  Description of Artificial Sequence: Synthetic oligonucleotide
  Antisense strand to SEQ ID NO: 2495576
uuuaaugagcguggcacug

SEQ ID NO: 2495578 - RNA, 19 nt, Artificial Sequence
  Description of Artificial Sequence: Synthetic oligonucleotide
  Sense strand starting at position 2865 of SEQ ID NO: 1887773
cgagucuugguaggaggau

SEQ ID NO: 2495579 - RNA, 19 nt, Artificial Sequence
  Description of Artificial Sequence: Synthetic oligonucleotide
  Antisense strand to SEQ ID NO: 2495578
auccuccuaccaagacucg

SEQ ID NO: 2495580 - RNA, 19 nt, Artificial Sequence
  Description of Artificial Sequence: Synthetic oligonucleotide
  Sense strand starting at position 2874 of SEQ ID NO: 1887773
guaggaggaugguuaucuu

SEQ ID NO: 2495581 - RNA, 19 nt, Artificial Sequence
  Description of Artificial Sequence: Synthetic oligonucleotide
  Antisense strand to SEQ ID NO: 2495580
aagauaaccauccuccuac

SEQ ID NO: 2495582 - RNA, 19 nt, Artificial Sequence
  Description of Artificial Sequence: Synthetic oligonucleotide
  Sense strand starting at position 2877 of SEQ ID NO: 1887773
ggaggaugguuaucuuguu

SEQ ID NO: 2495583 - RNA, 19 nt, Artificial Sequence
  Description of Artificial Sequence: Synthetic oligonucleotide
  Antisense strand to SEQ ID NO: 2495582
aacaagauaaccauccucc

SEQ ID NO: 2495584 - RNA, 19 nt, Artificial Sequence
  Description of Artificial Sequence: Synthetic oligonucleotide
  Sense strand starting at position 2899 of SEQ ID NO: 1887773
agauguuuccagugccuag

SEQ ID NO: 2495585 - RNA, 19 nt, Artificial Sequence
  Description of Artificial Sequence: Synthetic oligonucleotide
  Antisense strand to SEQ ID NO: 2495584
cuaggcacuggaaacaucu

SEQ ID NO: 2495586 - RNA, 19 nt, Artificial Sequence
  Description of Artificial Sequence: Synthetic oligonucleotide
  Sense strand starting at position 2903 of SEQ ID NO: 1887773
guuuccagugccuagaauu

SEQ ID NO: 2495587 - RNA, 19 nt, Artificial Sequence
  Description of Artificial Sequence: Synthetic oligonucleotide
  Antisense strand to SEQ ID NO: 2495586
aauucuaggcacuggaaac

SEQ ID NO: 2495588 - RNA, 19 nt, Artificial Sequence
  Description of Artificial Sequence: Synthetic oligonucleotide
  Sense strand starting at position 2914 of SEQ ID NO: 1887773
cuagaauugugccuaacug

SEQ ID NO: 2495589 - RNA, 19 nt, Artificial Sequence
  Description of Artificial Sequence: Synthetic oligonucleotide
  Antisense strand to SEQ ID NO: 2495588
caguuaggcacaauucuag

SEQ ID NO: 2495590 - RNA, 19 nt, Artificial Sequence
  Description of Artificial Sequence: Synthetic oligonucleotide
  Sense strand starting at position 2915 of SEQ ID NO: 1887773
uagaauugugccuaacugu

SEQ ID NO: 2495591 - RNA, 19 nt, Artificial Sequence
  Description of Artificial Sequence: Synthetic oligonucleotide
  Antisense strand to SEQ ID NO: 2495590
acaguuaggcacaauucua

SEQ ID NO: 2495592 - RNA, 19 nt, Artificial Sequence
  Description of Artificial Sequence: Synthetic oligonucleotide
  Sense strand starting at position 2921 of SEQ ID NO: 1887773
ugugccuaacuguaguuaa

SEQ ID NO: 2495593 - RNA, 19 nt, Artificial Sequence
  Description of Artificial Sequence: Synthetic oligonucleotide
  Antisense strand to SEQ ID NO: 2495592
uuaacuacaguuaggcaca

SEQ ID NO: 2495594 - RNA, 19 nt, Artificial Sequence
  Description of Artificial Sequence: Synthetic oligonucleotide
  Sense strand starting at position 2931 of SEQ ID NO: 1887773
uguaguuaaugcucuggaa

SEQ ID NO: 2495595 - RNA, 19 nt, Artificial Sequence
  Description of Artificial Sequence: Synthetic oligonucleotide
  Antisense strand to SEQ ID NO: 2495594
uuccagagcauuaacuaca

SEQ ID NO: 2495596 - RNA, 19 nt, Artificial Sequence
  Description of Artificial Sequence: Synthetic oligonucleotide
  Sense strand starting at position 2933 of SEQ ID NO: 1887773
uaguuaaugcucuggaaac

SEQ ID NO: 2495597 - RNA, 19 nt, Artificial Sequence
  Description of Artificial Sequence: Synthetic oligonucleotide
  Antisense strand to SEQ ID NO: 2495596
guuuccagagcauuaacua

SEQ ID NO: 2495598 - RNA, 19 nt, Artificial Sequence
  Description of Artificial Sequence: Synthetic oligonucleotide
  Sense strand starting at position 2935 of SEQ ID NO: 1887773
guuaaugcucuggaaacau

SEQ ID NO: 2495599 - RNA, 19 nt, Artificial Sequence
  Description of Artificial Sequence: Synthetic oligonucleotide
  Antisense strand to SEQ ID NO: 2495598
auguuuccagagcauuaac

SEQ ID NO: 2495600 - RNA, 19 nt, Artificial Sequence
  Description of Artificial Sequence: Synthetic oligonucleotide
  Sense strand starting at position 2946 of SEQ ID NO: 1887773
ggaaacauuuauuggguga

SEQ ID NO: 2495601 - RNA, 19 nt, Artificial Sequence
  Description of Artificial Sequence: Synthetic oligonucleotide
  Antisense strand to SEQ ID NO: 2495600
ucacccaauaaauguuucc

SEQ ID NO: 2495602 - RNA, 19 nt, Artificial Sequence
  Description of Artificial Sequence: Synthetic oligonucleotide
  Sense strand starting at position 2959 of SEQ ID NO: 1887773
gggugaaugucuccaucuc

SEQ ID NO: 2495603 - RNA, 19 nt, Artificial Sequence
  Description of Artificial Sequence: Synthetic oligonucleotide
  Antisense strand to SEQ ID NO: 2495602
gagauggagacauucaccc

SEQ ID NO: 2495604 - RNA, 19 nt, Artificial Sequence
  Description of Artificial Sequence: Synthetic oligonucleotide
  Sense strand starting at position 2960 of SEQ ID NO: 1887773
ggugaaugucuccaucucu

SEQ ID NO: 2495605 - RNA, 19 nt, Artificial Sequence
  Description of Artificial Sequence: Synthetic oligonucleotide
  Antisense strand to SEQ ID NO: 2495604
agagauggagacauucacc

SEQ ID NO: 2495606 - RNA, 19 nt, Artificial Sequence
  Description of Artificial Sequence: Synthetic oligonucleotide
  Sense strand starting at position 3021 of SEQ ID NO: 1887773
aacacuuguuguucggaca

SEQ ID NO: 2495607 - RNA, 19 nt, Artificial Sequence
  Description of Artificial Sequence: Synthetic oligonucleotide
  Antisense strand to SEQ ID NO: 2495606
uguccgaacaacaaguguu

SEQ ID NO: 2495608 - RNA, 19 nt, Artificial Sequence
  Description of Artificial Sequence: Synthetic oligonucleotide
  Sense strand starting at position 3132 of SEQ ID NO: 1887773
ggccucuguccugaacuuu

SEQ ID NO: 2495609 - RNA, 19 nt, Artificial Sequence
  Description of Artificial Sequence: Synthetic oligonucleotide
  Antisense strand to SEQ ID NO: 2495608
aaaguucaggacagaggcc

SEQ ID NO: 2495610 - RNA, 19 nt, Artificial Sequence
  Description of Artificial Sequence: Synthetic oligonucleotide
  Sense strand starting at position 72 of SEQ ID NO: 1887774
agaagaugagguugguauu

SEQ ID NO: 2495611 - RNA, 19 nt, Artificial Sequence
  Description of Artificial Sequence: Synthetic oligonucleotide
  Antisense strand to SEQ ID NO: 2495610
aauaccaaccucaucuucu

SEQ ID NO: 2495612 - RNA, 19 nt, Artificial Sequence
  Description of Artificial Sequence: Synthetic oligonucleotide
  Sense strand starting at position 73 of SEQ ID NO: 1887774
gaagaugagguugguauua

SEQ ID NO: 2495613 - RNA, 19 nt, Artificial Sequence
  Description of Artificial Sequence: Synthetic oligonucleotide
  Antisense strand to SEQ ID NO: 2495612
uaauaccaaccucaucuuc

SEQ ID NO: 2495614 - RNA, 19 nt, Artificial Sequence
  Description of Artificial Sequence: Synthetic oligonucleotide
  Sense strand starting at position 135 of SEQ ID NO: 1887774
acaucuaugcuagaaguuc

SEQ ID NO: 2495615 - RNA, 19 nt, Artificial Sequence
  Description of Artificial Sequence: Synthetic oligonucleotide
  Antisense strand to SEQ ID NO: 2495614
gaacuucuagcauagaugu

SEQ ID NO: 2495616 - RNA, 19 nt, Artificial Sequence
  Description of Artificial Sequence: Synthetic oligonucleotide
  Sense strand starting at position 244 of SEQ ID NO: 1887774
acccuagauccugaguguu

SEQ ID NO: 2495617 - RNA, 19 nt, Artificial Sequence
  Description of Artificial Sequence: Synthetic oligonucleotide
  Antisense strand to SEQ ID NO: 2495616
aacacucaggaucuagggu

SEQ ID NO: 2495618 - RNA, 19 nt, Artificial Sequence
  Description of Artificial Sequence: Synthetic oligonucleotide
  Sense strand starting at position 250 of SEQ ID NO: 1887774
gauccugaguguuuaacau

SEQ ID NO: 2495619 - RNA, 19 nt, Artificial Sequence
  Description of Artificial Sequence: Synthetic oligonucleotide
  Antisense strand to SEQ ID NO: 2495618
auguuaaacacucaggauc

SEQ ID NO: 2495620 - RNA, 19 nt, Artificial Sequence
  Description of Artificial Sequence: Synthetic oligonucleotide
  Sense strand starting at position 383 of SEQ ID NO: 1887774
gauauagcugucuaggaug

SEQ ID NO: 2495621 - RNA, 19 nt, Artificial Sequence
  Description of Artificial Sequence: Synthetic oligonucleotide
  Antisense strand to SEQ ID NO: 2495620
cauccuagacagcuauauc

SEQ ID NO: 2495622 - RNA, 19 nt, Artificial Sequence
  Description of Artificial Sequence: Synthetic oligonucleotide
  Sense strand starting at position 494 of SEQ ID NO: 1887774
gguguccugaacugauaaa

SEQ ID NO: 2495623 - RNA, 19 nt, Artificial Sequence
  Description of Artificial Sequence: Synthetic oligonucleotide
  Antisense strand to SEQ ID NO: 2495622
uuuaucaguucaggacacc

SEQ ID NO: 2495624 - RNA, 19 nt, Artificial Sequence
  Description of Artificial Sequence: Synthetic oligonucleotide
  Sense strand starting at position 676 of SEQ ID NO: 1887774
ugguuuaugagcuaaauag

SEQ ID NO: 2495625 - RNA, 19 nt, Artificial Sequence
  Description of Artificial Sequence: Synthetic oligonucleotide
  Antisense strand to SEQ ID NO: 2495624
cuauuuagcucauaaacca

SEQ ID NO: 2495626 - RNA, 19 nt, Artificial Sequence
  Description of Artificial Sequence: Synthetic oligonucleotide
  Sense strand starting at position 683 of SEQ ID NO: 1887774
ugagcuaaauagcuagaaa

SEQ ID NO: 2495627 - RNA, 19 nt, Artificial Sequence
  Description of Artificial Sequence: Synthetic oligonucleotide
  Antisense strand to SEQ ID NO: 2495626
uuucuagcuauuuagcuca

SEQ ID NO: 2495628 - RNA, 19 nt, Artificial Sequence
  Description of Artificial Sequence: Synthetic oligonucleotide
  Sense strand starting at position 742 of SEQ ID NO: 1887774
ucuuguacuucccugagaa

SEQ ID NO: 2495629 - RNA, 19 nt, Artificial Sequence
  Description of Artificial Sequence: Synthetic oligonucleotide
  Antisense strand to SEQ ID NO: 2495628
uucucagggaaguacaaga

SEQ ID NO: 2495630 - RNA, 19 nt, Artificial Sequence
  Description of Artificial Sequence: Synthetic oligonucleotide
  Sense strand starting at position 744 of SEQ ID NO: 1887774
uuguacuucccugagaaug

SEQ ID NO: 2495631 - RNA, 19 nt, Artificial Sequence
  Description of Artificial Sequence: Synthetic oligonucleotide
  Antisense strand to SEQ ID NO: 2495630
cauucucagggaaguacaa

SEQ ID NO: 2495632 - RNA, 19 nt, Artificial Sequence
  Description of Artificial Sequence: Synthetic oligonucleotide
  Sense strand starting at position 749 of SEQ ID NO: 1887774
cuucccugagaauguuuga

SEQ ID NO: 2495633 - RNA, 19 nt, Artificial Sequence
  Description of Artificial Sequence: Synthetic oligonucleotide
  Antisense strand to SEQ ID NO: 2495632
ucaaacauucucagggaag

SEQ ID NO: 2495634 - RNA, 19 nt, Artificial Sequence
  Description of Artificial Sequence: Synthetic oligonucleotide
  Sense strand starting at position 758 of SEQ ID NO: 1887774
gaauguuugaugcaaggug

SEQ ID NO: 2495635 - RNA, 19 nt, Artificial Sequence
  Description of Artificial Sequence: Synthetic oligonucleotide
  Antisense strand to SEQ ID NO: 2495634
caccuugcaucaaacauuc

SEQ ID NO: 2495636 - RNA, 19 nt, Artificial Sequence
  Description of Artificial Sequence: Synthetic oligonucleotide
  Sense strand starting at position 1273 of SEQ ID NO: 1887774
ggaagucuuucugcaacaa

SEQ ID NO: 2495637 - RNA, 19 nt, Artificial Sequence
  Description of Artificial Sequence: Synthetic oligonucleotide
  Antisense strand to SEQ ID NO: 2495636
uuguugcagaaagacuucc

SEQ ID NO: 2495638 - RNA, 19 nt, Artificial Sequence
  Description of Artificial Sequence: Synthetic oligonucleotide
  Sense strand starting at position 1369 of SEQ ID NO: 1887774
acuuaugugcaugagcaaa

SEQ ID NO: 2495639 - RNA, 19 nt, Artificial Sequence
  Description of Artificial Sequence: Synthetic oligonucleotide
  Antisense strand to SEQ ID NO: 2495638
uuugcucaugcacauaagu

SEQ ID NO: 2495640 - RNA, 19 nt, Artificial Sequence
  Description of Artificial Sequence: Synthetic oligonucleotide
  Sense strand starting at position 1394 of SEQ ID NO: 1887774
cucagacaugccgagacaa

SEQ ID NO: 2495641 - RNA, 19 nt, Artificial Sequence
  Description of Artificial Sequence: Synthetic oligonucleotide
  Antisense strand to SEQ ID NO: 2495640
uugucucggcaugucugag

SEQ ID NO: 2495642 - RNA, 19 nt, Artificial Sequence
  Description of Artificial Sequence: Synthetic oligonucleotide
  Sense strand starting at position 1396 of SEQ ID NO: 1887774
cagacaugccgagacaauc

SEQ ID NO: 2495643 - RNA, 19 nt, Artificial Sequence
  Description of Artificial Sequence: Synthetic oligonucleotide
  Antisense strand to SEQ ID NO: 2495642
gauugucucggcaugucug

SEQ ID NO: 2495644 - RNA, 19 nt, Artificial Sequence
  Description of Artificial Sequence: Synthetic oligonucleotide
  Sense strand starting at position 1528 of SEQ ID NO: 1887774
ggaccaaagcuuuggguua

SEQ ID NO: 2495645 - RNA, 19 nt, Artificial Sequence
  Description of Artificial Sequence: Synthetic oligonucleotide
  Antisense strand to SEQ ID NO: 2495644
uaacccaaagcuuuggucc

SEQ ID NO: 2495646 - RNA, 19 nt, Artificial Sequence
  Description of Artificial Sequence: Synthetic oligonucleotide
  Sense strand starting at position 1533 of SEQ ID NO: 1887774
aaagcuuuggguuagugau

SEQ ID NO: 2495647 - RNA, 19 nt, Artificial Sequence
  Description of Artificial Sequence: Synthetic oligonucleotide
  Antisense strand to SEQ ID NO: 2495646
aucacuaacccaaagcuuu

SEQ ID NO: 2495648 - RNA, 19 nt, Artificial Sequence
  Description of Artificial Sequence: Synthetic oligonucleotide
  Sense strand starting at position 1577 of SEQ ID NO: 1887774
uuugcaucagguuaagagu

SEQ ID NO: 2495649 - RNA, 19 nt, Artificial Sequence
  Description of Artificial Sequence: Synthetic oligonucleotide
  Antisense strand to SEQ ID NO: 2495648
acucuuaaccugaugcaaa

SEQ ID NO: 2495650 - RNA, 19 nt, Artificial Sequence
  Description of Artificial Sequence: Synthetic oligonucleotide
  Sense strand starting at position 1583 of SEQ ID NO: 1887774
ucagguuaagagugugaaa

SEQ ID NO: 2495651 - RNA, 19 nt, Artificial Sequence
  Description of Artificial Sequence: Synthetic oligonucleotide
  Antisense strand to SEQ ID NO: 2495650
uuucacacucuuaaccuga

SEQ ID NO: 2495652 - RNA, 19 nt, Artificial Sequence
  Description of Artificial Sequence: Synthetic oligonucleotide
  Sense strand starting at position 1818 of SEQ ID NO: 1887774
uccuguagcgguucuguua

SEQ ID NO: 2495653 - RNA, 19 nt, Artificial Sequence
  Description of Artificial Sequence: Synthetic oligonucleotide
  Antisense strand to SEQ ID NO: 2495652
uaacagaaccgcuacagga

SEQ ID NO: 2495654 - RNA, 19 nt, Artificial Sequence
  Description of Artificial Sequence: Synthetic oligonucleotide
  Sense strand starting at position 2074 of SEQ ID NO: 1887774
aagggauucggcuacugag

SEQ ID NO: 2495655 - RNA, 19 nt, Artificial Sequence
  Description of Artificial Sequence: Synthetic oligonucleotide
  Antisense strand to SEQ ID NO: 2495654
cucaguagccgaaucccuu

SEQ ID NO: 2495656 - RNA, 19 nt, Artificial Sequence
  Description of Artificial Sequence: Synthetic oligonucleotide
  Sense strand starting at position 2313 of SEQ ID NO: 1887774
gucuuugucgucccuaauc

SEQ ID NO: 2495657 - RNA, 19 nt, Artificial Sequence
  Description of Artificial Sequence: Synthetic oligonucleotide
  Antisense strand to SEQ ID NO: 2495656
gauuagggacgacaaagac

SEQ ID NO: 2495658 - RNA, 19 nt, Artificial Sequence
  Description of Artificial Sequence: Synthetic oligonucleotide
  Sense strand starting at position 2413 of SEQ ID NO: 1887774
ccgugucugcugcuaacua

SEQ ID NO: 2495659 - RNA, 19 nt, Artificial Sequence
  Description of Artificial Sequence: Synthetic oligonucleotide
  Antisense strand to SEQ ID NO: 2495658
uaguuagcagcagacacgg

SEQ ID NO: 2495660 - RNA, 19 nt, Artificial Sequence
  Description of Artificial Sequence: Synthetic oligonucleotide
  Sense strand starting at position 2546 of SEQ ID NO: 1887774
ucagaaagcuuucuugaga

SEQ ID NO: 2495661 - RNA, 19 nt, Artificial Sequence
  Description of Artificial Sequence: Synthetic oligonucleotide
  Antisense strand to SEQ ID NO: 2495660
ucucaagaaagcuuucuga

SEQ ID NO: 2495662 - RNA, 19 nt, Artificial Sequence
  Description of Artificial Sequence: Synthetic oligonucleotide
  Sense strand starting at position 2763 of SEQ ID NO: 1887774
caacuacucggguaucuga

SEQ ID NO: 2495663 - RNA, 19 nt, Artificial Sequence
  Description of Artificial Sequence: Synthetic oligonucleotide
  Antisense strand to SEQ ID NO: 2495662
ucagauacccgaguaguug

SEQ ID NO: 2495664 - RNA, 19 nt, Artificial Sequence
  Description of Artificial Sequence: Synthetic oligonucleotide
  Sense strand starting at position 2984 of SEQ ID NO: 1887774
cccaguguugggcagaacu

SEQ ID NO: 2495665 - RNA, 19 nt, Artificial Sequence
  Description of Artificial Sequence: Synthetic oligonucleotide
  Antisense strand to SEQ ID NO: 2495664
aguucugcccaacacuggg

SEQ ID NO: 2495666 - RNA, 19 nt, Artificial Sequence
  Description of Artificial Sequence: Synthetic oligonucleotide
  Sense strand starting at position 3089 of SEQ ID NO: 1887774
cucaacuuugaguacagua

SEQ ID NO: 2495667 - RNA, 19 nt, Artificial Sequence
  Description of Artificial Sequence: Synthetic oligonucleotide
  Antisense strand to SEQ ID NO: 2495666
uacuguacucaaaguugag

SEQ ID NO: 2495668 - RNA, 19 nt, Artificial Sequence
  Description of Artificial Sequence: Synthetic oligonucleotide
  Sense strand starting at position 3094 of SEQ ID NO: 1887774
cuuugaguacaguauacau

SEQ ID NO: 2495669 - RNA, 19 nt, Artificial Sequence
  Description of Artificial Sequence: Synthetic oligonucleotide
  Antisense strand to SEQ ID NO: 2495668
auguauacuguacucaaag

SEQ ID NO: 2495670 - RNA, 19 nt, Artificial Sequence
  Description of Artificial Sequence: Synthetic oligonucleotide
  Sense strand starting at position 3297 of SEQ ID NO: 1887774
gcauauguaguacacuuau

SEQ ID NO: 2495671 - RNA, 19 nt, Artificial Sequence
  Description of Artificial Sequence: Synthetic oligonucleotide
  Antisense strand to SEQ ID NO: 2495670
auaaguguacuacauaugc

SEQ ID NO: 2495672 - RNA, 19 nt, Artificial Sequence
  Description of Artificial Sequence: Synthetic oligonucleotide
  Sense strand starting at position 3394 of SEQ ID NO: 1887774
uguaauuuaugggacugau

SEQ ID NO: 2495673 - RNA, 19 nt, Artificial Sequence
  Description of Artificial Sequence: Synthetic oligonucleotide
  Antisense strand to SEQ ID NO: 2495672
aucagucccauaaauuaca

SEQ ID NO: 2495674 - RNA, 19 nt, Artificial Sequence
  Description of Artificial Sequence: Synthetic oligonucleotide
  Sense strand starting at position 3469 of SEQ ID NO: 1887774
uacaauaugguuugaaaug

SEQ ID NO: 2495675 - RNA, 19 nt, Artificial Sequence
  Description of Artificial Sequence: Synthetic oligonucleotide
  Antisense strand to SEQ ID NO: 2495674
cauuucaaaccauauugua

SEQ ID NO: 2495676 - RNA, 19 nt, Artificial Sequence
  Description of Artificial Sequence: Synthetic oligonucleotide
  Sense strand starting at position 3496 of SEQ ID NO: 1887774
uuguguaauggcuaaauga

SEQ ID NO: 2495677 - RNA, 19 nt, Artificial Sequence
  Description of Artificial Sequence: Synthetic oligonucleotide
  Antisense strand to SEQ ID NO: 2495676
ucauuuagccauuacacaa

SEQ ID NO: 2495678 - RNA, 19 nt, Artificial Sequence
  Description of Artificial Sequence: Synthetic oligonucleotide
  Sense strand starting at position 3580 of SEQ ID NO: 1887774
ucagguuauuaacugaaau

SEQ ID NO: 2495679 - RNA, 19 nt, Artificial Sequence
  Description of Artificial Sequence: Synthetic oligonucleotide
  Antisense strand to SEQ ID NO: 2495678
auuucaguuaauaaccuga

SEQ ID NO: 2495680 - RNA, 19 nt, Artificial Sequence
  Description of Artificial Sequence: Synthetic oligonucleotide
  Sense strand starting at position 3732 of SEQ ID NO: 1887774
agaccucugugauuaugga

SEQ ID NO: 2495681 - RNA, 19 nt, Artificial Sequence
  Description of Artificial Sequence: Synthetic oligonucleotide
  Antisense strand to SEQ ID NO: 2495680
uccauaaucacagaggucu

SEQ ID NO: 2495682 - RNA, 19 nt, Artificial Sequence
  Description of Artificial Sequence: Synthetic oligonucleotide
  Sense strand starting at position 3760 of SEQ ID NO: 1887774
gaagaccugugucuuugaa

SEQ ID NO: 2495683 - RNA, 19 nt, Artificial Sequence
  Description of Artificial Sequence: Synthetic oligonucleotide
  Antisense strand to SEQ ID NO: 2495682
uucaaagacacaggucuuc

SEQ ID NO: 2495684 - RNA, 19 nt, Artificial Sequence
  Description of Artificial Sequence: Synthetic oligonucleotide
  Sense strand starting at position 3762 of SEQ ID NO: 1887774
agaccugugucuuugaaag

SEQ ID NO: 2495685 - RNA, 19 nt, Artificial Sequence
  Description of Artificial Sequence: Synthetic oligonucleotide
  Antisense strand to SEQ ID NO: 2495684
cuuucaaagacacaggucu

SEQ ID NO: 2495686 - RNA, 19 nt, Artificial Sequence
  Description of Artificial Sequence: Synthetic oligonucleotide
  Sense strand starting at position 3857 of SEQ ID NO: 1887774
cucgaauucccugauggug

SEQ ID NO: 2495687 - RNA, 19 nt, Artificial Sequence
  Description of Artificial Sequence: Synthetic oligonucleotide
  Antisense strand to SEQ ID NO: 2495686
caccaucagggaauucgag

SEQ ID NO: 2495688 - RNA, 19 nt, Artificial Sequence
  Description of Artificial Sequence: Synthetic oligonucleotide
  Sense strand starting at position 3885 of SEQ ID NO: 1887774
gucguccuugaguugcaau

SEQ ID NO: 2495689 - RNA, 19 nt, Artificial Sequence
  Description of Artificial Sequence: Synthetic oligonucleotide
  Antisense strand to SEQ ID NO: 2495688
auugcaacucaaggacgac

SEQ ID NO: 2495690 - RNA, 19 nt, Artificial Sequence
  Description of Artificial Sequence: Synthetic oligonucleotide
  Sense strand starting at position 85 of SEQ ID NO: 1887775
gaaagaaauuuguauggca

SEQ ID NO: 2495691 - RNA, 19 nt, Artificial Sequence
  Description of Artificial Sequence: Synthetic oligonucleotide
  Antisense strand to SEQ ID NO: 2495690
ugccauacaaauuucuuuc

SEQ ID NO: 2495692 - RNA, 19 nt, Artificial Sequence
  Description of Artificial Sequence: Synthetic oligonucleotide
  Sense strand starting at position 88 of SEQ ID NO: 1887775
agaaauuuguauggcagca

SEQ ID NO: 2495693 - RNA, 19 nt, Artificial Sequence
  Description of Artificial Sequence: Synthetic oligonucleotide
  Antisense strand to SEQ ID NO: 2495692
ugcugccauacaaauuucu

SEQ ID NO: 2495694 - RNA, 19 nt, Artificial Sequence
  Description of Artificial Sequence: Synthetic oligonucleotide
  Sense strand starting at position 104 of SEQ ID NO: 1887775
gcagguagcuucuagaucu

SEQ ID NO: 2495695 - RNA, 19 nt, Artificial Sequence
  Description of Artificial Sequence: Synthetic oligonucleotide
  Antisense strand to SEQ ID NO: 2495694
agaucuagaagcuaccugc

SEQ ID NO: 2495696 - RNA, 19 nt, Artificial Sequence
  Description of Artificial Sequence: Synthetic oligonucleotide
  Sense strand starting at position 114 of SEQ ID NO: 1887775
ucuagaucuccuuaugagc

SEQ ID NO: 2495697 - RNA, 19 nt, Artificial Sequence
  Description of Artificial Sequence: Synthetic oligonucleotide
  Antisense strand to SEQ ID NO: 2495696
gcucauaaggagaucuaga

SEQ ID NO: 2495698 - RNA, 19 nt, Artificial Sequence
  Description of Artificial Sequence: Synthetic oligonucleotide
  Sense strand starting at position 161 of SEQ ID NO: 1887775
ugauguguguucggcucau

SEQ ID NO: 2495699 - RNA, 19 nt, Artificial Sequence
  Description of Artificial Sequence: Synthetic oligonucleotide
  Antisense strand to SEQ ID NO: 2495698
augagccgaacacacauca

SEQ ID NO: 2495700 - RNA, 19 nt, Artificial Sequence
  Description of Artificial Sequence: Synthetic oligonucleotide
  Sense strand starting at position 173 of SEQ ID NO: 1887775
ggcucauuggccugggaga

SEQ ID NO: 2495701 - RNA, 19 nt, Artificial Sequence
  Description of Artificial Sequence: Synthetic oligonucleotide
  Antisense strand to SEQ ID NO: 2495700
ucucccaggccaaugagcc

SEQ ID NO: 2495702 - RNA, 19 nt, Artificial Sequence
  Description of Artificial Sequence: Synthetic oligonucleotide
  Sense strand starting at position 186 of SEQ ID NO: 1887775
gggagaguguacuuggaga

SEQ ID NO: 2495703 - RNA, 19 nt, Artificial Sequence
  Description of Artificial Sequence: Synthetic oligonucleotide
  Antisense strand to SEQ ID NO: 2495702
ucuccaaguacacucuccc

SEQ ID NO: 2495704 - RNA, 19 nt, Artificial Sequence
  Description of Artificial Sequence: Synthetic oligonucleotide
  Sense strand starting at position 188 of SEQ ID NO: 1887775
gagaguguacuuggagaag

SEQ ID NO: 2495705 - RNA, 19 nt, Artificial Sequence
  Description of Artificial Sequence: Synthetic oligonucleotide
  Antisense strand to SEQ ID NO: 2495704
cuucuccaaguacacucuc

SEQ ID NO: 2495706 - RNA, 19 nt, Artificial Sequence
  Description of Artificial Sequence: Synthetic oligonucleotide
  Sense strand starting at position 370 of SEQ ID NO: 1887775
gagugaugaggcugugaag

SEQ ID NO: 2495707 - RNA, 19 nt, Artificial Sequence
  Description of Artificial Sequence: Synthetic oligonucleotide
  Antisense strand to SEQ ID NO: 2495706
cuucacagccucaucacuc

SEQ ID NO: 2495708 - RNA, 19 nt, Artificial Sequence
  Description of Artificial Sequence: Synthetic oligonucleotide
  Sense strand starting at position 464 of SEQ ID NO: 1887775
acuccugaauccuugugga

SEQ ID NO: 2495709 - RNA, 19 nt, Artificial Sequence
  Description of Artificial Sequence: Synthetic oligonucleotide
  Antisense strand to SEQ ID NO: 2495708
uccacaaggauucaggagu

SEQ ID NO: 2495710 - RNA, 19 nt, Artificial Sequence
  Description of Artificial Sequence: Synthetic oligonucleotide
  Sense strand starting at position 467 of SEQ ID NO: 1887775
ccugaauccuuguggaggu

SEQ ID NO: 2495711 - RNA, 19 nt, Artificial Sequence
  Description of Artificial Sequence: Synthetic oligonucleotide
  Antisense strand to SEQ ID NO: 2495710
accuccacaaggauucagg

SEQ ID NO: 2495712 - RNA, 19 nt, Artificial Sequence
  Description of Artificial Sequence: Synthetic oligonucleotide
  Sense strand starting at position 468 of SEQ ID NO: 1887775
cugaauccuuguggaggua

SEQ ID NO: 2495713 - RNA, 19 nt, Artificial Sequence
  Description of Artificial Sequence: Synthetic oligonucleotide
  Antisense strand to SEQ ID NO: 2495712
uaccuccacaaggauucag

SEQ ID NO: 2495714 - RNA, 19 nt, Artificial Sequence
  Description of Artificial Sequence: Synthetic oligonucleotide
  Sense strand starting at position 469 of SEQ ID NO: 1887775
ugaauccuuguggagguaa

SEQ ID NO: 2495715 - RNA, 19 nt, Artificial Sequence
  Description of Artificial Sequence: Synthetic oligonucleotide
  Antisense strand to SEQ ID NO: 2495714
uuaccuccacaaggauuca

SEQ ID NO: 2495716 - RNA, 19 nt, Artificial Sequence
  Description of Artificial Sequence: Synthetic oligonucleotide
  Sense strand starting at position 471 of SEQ ID NO: 1887775
aauccuuguggagguaaau

SEQ ID NO: 2495717 - RNA, 19 nt, Artificial Sequence
  Description of Artificial Sequence: Synthetic oligonucleotide
  Antisense strand to SEQ ID NO: 2495716
auuuaccuccacaaggauu

SEQ ID NO: 2495718 - RNA, 19 nt, Artificial Sequence
  Description of Artificial Sequence: Synthetic oligonucleotide
  Sense strand starting at position 515 of SEQ ID NO: 1887775
ugaggucuuguuuggagag

SEQ ID NO: 2495719 - RNA, 19 nt, Artificial Sequence
  Description of Artificial Sequence: Synthetic oligonucleotide
  Antisense strand to SEQ ID NO: 2495718
cucuccaaacaagaccuca

SEQ ID NO: 2495720 - RNA, 19 nt, Artificial Sequence
  Description of Artificial Sequence: Synthetic oligonucleotide
  Sense strand starting at position 516 of SEQ ID NO: 1887775
gaggucuuguuuggagaga

SEQ ID NO: 2495721 - RNA, 19 nt, Artificial Sequence
  Description of Artificial Sequence: Synthetic oligonucleotide
  Antisense strand to SEQ ID NO: 2495720
ucucuccaaacaagaccuc

SEQ ID NO: 2495722 - RNA, 19 nt, Artificial Sequence
  Description of Artificial Sequence: Synthetic oligonucleotide
  Sense strand starting at position 542 of SEQ ID NO: 1887775
ggcagacagccucaguaaa

SEQ ID NO: 2495723 - RNA, 19 nt, Artificial Sequence
  Description of Artificial Sequence: Synthetic oligonucleotide
  Antisense strand to SEQ ID NO: 2495722
uuuacugaggcugucugcc

SEQ ID NO: 2495724 - RNA, 19 nt, Artificial Sequence
  Description of Artificial Sequence: Synthetic oligonucleotide
  Sense strand starting at position 761 of SEQ ID NO: 1887775
aggcuaagucugugugucu

SEQ ID NO: 2495725 - RNA, 19 nt, Artificial Sequence
  Description of Artificial Sequence: Synthetic oligonucleotide
  Antisense strand to SEQ ID NO: 2495724
agacacacagacuuagccu

SEQ ID NO: 2495726 - RNA, 19 nt, Artificial Sequence
  Description of Artificial Sequence: Synthetic oligonucleotide
  Sense strand starting at position 793 of SEQ ID NO: 1887775
ggguucuaagcagagcaaa

SEQ ID NO: 2495727 - RNA, 19 nt, Artificial Sequence
  Description of Artificial Sequence: Synthetic oligonucleotide
  Antisense strand to SEQ ID NO: 2495726
uuugcucugcuuagaaccc

SEQ ID NO: 2495728 - RNA, 19 nt, Artificial Sequence
  Description of Artificial Sequence: Synthetic oligonucleotide
  Sense strand starting at position 822 of SEQ ID NO: 1887775
caggauuccuaggugcuga

SEQ ID NO: 2495729 - RNA, 19 nt, Artificial Sequence
  Description of Artificial Sequence: Synthetic oligonucleotide
  Antisense strand to SEQ ID NO: 2495728
ucagcaccuaggaauccug

SEQ ID NO: 2495730 - RNA, 19 nt, Artificial Sequence
  Description of Artificial Sequence: Synthetic oligonucleotide
  Sense strand starting at position 1077 of SEQ ID NO: 1887775
ccggguauucccgggucaa

SEQ ID NO: 2495731 - RNA, 19 nt, Artificial Sequence
  Description of Artificial Sequence: Synthetic oligonucleotide
  Antisense strand to SEQ ID NO: 2495730
uugacccgggaauacccgg

SEQ ID NO: 2495732 - RNA, 19 nt, Artificial Sequence
  Description of Artificial Sequence: Synthetic oligonucleotide
  Sense strand starting at position 1078 of SEQ ID NO: 1887775
cggguauucccgggucaaa

SEQ ID NO: 2495733 - RNA, 19 nt, Artificial Sequence
  Description of Artificial Sequence: Synthetic oligonucleotide
  Antisense strand to SEQ ID NO: 2495732
uuugacccgggaauacccg

SEQ ID NO: 2495734 - RNA, 19 nt, Artificial Sequence
  Description of Artificial Sequence: Synthetic oligonucleotide
  Sense strand starting at position 2372 of SEQ ID NO: 1887775
ggcuaaagguuggauuuca

SEQ ID NO: 2495735 - RNA, 19 nt, Artificial Sequence
  Description of Artificial Sequence: Synthetic oligonucleotide
  Antisense strand to SEQ ID NO: 2495734
ugaaauccaaccuuuagcc

SEQ ID NO: 2495736 - RNA, 19 nt, Artificial Sequence
  Description of Artificial Sequence: Synthetic oligonucleotide
  Sense strand starting at position 2408 of SEQ ID NO: 1887775
ggaaagacgcgcuguguuu

SEQ ID NO: 2495737 - RNA, 19 nt, Artificial Sequence
  Description of Artificial Sequence: Synthetic oligonucleotide
  Antisense strand to SEQ ID NO: 2495736
aaacacagcgcgucuuucc

SEQ ID NO: 2495738 - RNA, 19 nt, Artificial Sequence
  Description of Artificial Sequence: Synthetic oligonucleotide
  Sense strand starting at position 2749 of SEQ ID NO: 1887775
ucggacuagucucuuggaa

SEQ ID NO: 2495739 - RNA, 19 nt, Artificial Sequence
  Description of Artificial Sequence: Synthetic oligonucleotide
  Antisense strand to SEQ ID NO: 2495738
uuccaagagacuaguccga

SEQ ID NO: 2495740 - RNA, 19 nt, Artificial Sequence
  Description of Artificial Sequence: Synthetic oligonucleotide
  Sense strand starting at position 2751 of SEQ ID NO: 1887775
ggacuagucucuuggaagc

SEQ ID NO: 2495741 - RNA, 19 nt, Artificial Sequence
  Description of Artificial Sequence: Synthetic oligonucleotide
  Antisense strand to SEQ ID NO: 2495740
gcuuccaagagacuagucc

SEQ ID NO: 2495742 - RNA, 19 nt, Artificial Sequence
  Description of Artificial Sequence: Synthetic oligonucleotide
  Sense strand starting at position 2789 of SEQ ID NO: 1887775
gaccuagggagaggucuua

SEQ ID NO: 2495743 - RNA, 19 nt, Artificial Sequence
  Description of Artificial Sequence: Synthetic oligonucleotide
  Antisense strand to SEQ ID NO: 2495742
uaagaccucucccuagguc

SEQ ID NO: 2495744 - RNA, 19 nt, Artificial Sequence
  Description of Artificial Sequence: Synthetic oligonucleotide
  Sense strand starting at position 2802 of SEQ ID NO: 1887775
gucuuaaccucuguucuca

SEQ ID NO: 2495745 - RNA, 19 nt, Artificial Sequence
  Description of Artificial Sequence: Synthetic oligonucleotide
  Antisense strand to SEQ ID NO: 2495744
ugagaacagagguuaagac

SEQ ID NO: 2495746 - RNA, 19 nt, Artificial Sequence
  Description of Artificial Sequence: Synthetic oligonucleotide
  Sense strand starting at position 3154 of SEQ ID NO: 1887775
acaguagguuccguaucuu

SEQ ID NO: 2495747 - RNA, 19 nt, Artificial Sequence
  Description of Artificial Sequence: Synthetic oligonucleotide
  Antisense strand to SEQ ID NO: 2495746
aagauacggaaccuacugu

SEQ ID NO: 2495748 - RNA, 19 nt, Artificial Sequence
  Description of Artificial Sequence: Synthetic oligonucleotide
  Sense strand starting at position 3162 of SEQ ID NO: 1887775
uuccguaucuugggaugga

SEQ ID NO: 2495749 - RNA, 19 nt, Artificial Sequence
  Description of Artificial Sequence: Synthetic oligonucleotide
  Antisense strand to SEQ ID NO: 2495748
uccaucccaagauacggaa

SEQ ID NO: 2495750 - RNA, 19 nt, Artificial Sequence
  Description of Artificial Sequence: Synthetic oligonucleotide
  Sense strand starting at position 3163 of SEQ ID NO: 1887775
uccguaucuugggauggaa

SEQ ID NO: 2495751 - RNA, 19 nt, Artificial Sequence
  Description of Artificial Sequence: Synthetic oligonucleotide
  Antisense strand to SEQ ID NO: 2495750
uuccaucccaagauacgga

SEQ ID NO: 2495752 - RNA, 19 nt, Artificial Sequence
  Description of Artificial Sequence: Synthetic oligonucleotide
  Sense strand starting at position 3635 of SEQ ID NO: 1887775
cugagaugucaaugccuca

SEQ ID NO: 2495753 - RNA, 19 nt, Artificial Sequence
  Description of Artificial Sequence: Synthetic oligonucleotide
  Antisense strand to SEQ ID NO: 2495752
ugaggcauugacaucucag

SEQ ID NO: 2495754 - RNA, 19 nt, Artificial Sequence
  Description of Artificial Sequence: Synthetic oligonucleotide
  Sense strand starting at position 3660 of SEQ ID NO: 1887775
ccucgugggagucauuaac

SEQ ID NO: 2495755 - RNA, 19 nt, Artificial Sequence
  Description of Artificial Sequence: Synthetic oligonucleotide
  Antisense strand to SEQ ID NO: 2495754
guuaaugacucccacgagg

SEQ ID NO: 2495756 - RNA, 19 nt, Artificial Sequence
  Description of Artificial Sequence: Synthetic oligonucleotide
  Sense strand starting at position 3709 of SEQ ID NO: 1887775
ccaggauucccaugucagg

SEQ ID NO: 2495757 - RNA, 19 nt, Artificial Sequence
  Description of Artificial Sequence: Synthetic oligonucleotide
  Antisense strand to SEQ ID NO: 2495756
ccugacaugggaauccugg

SEQ ID NO: 2495758 - RNA, 19 nt, Artificial Sequence
  Description of Artificial Sequence: Synthetic oligonucleotide
  Sense strand starting at position 3977 of SEQ ID NO: 1887775
ugaguuuaucccuggcuca

SEQ ID NO: 2495759 - RNA, 19 nt, Artificial Sequence
  Description of Artificial Sequence: Synthetic oligonucleotide
  Antisense strand to SEQ ID NO: 2495758
ugagccagggauaaacuca

SEQ ID NO: 2495760 - RNA, 19 nt, Artificial Sequence
  Description of Artificial Sequence: Synthetic oligonucleotide
  Sense strand starting at position 3978 of SEQ ID NO: 1887775
gaguuuaucccuggcucac

SEQ ID NO: 2495761 - RNA, 19 nt, Artificial Sequence
  Description of Artificial Sequence: Synthetic oligonucleotide
  Antisense strand to SEQ ID NO: 2495760
gugagccagggauaaacuc

SEQ ID NO: 2495762 - RNA, 19 nt, Artificial Sequence
  Description of Artificial Sequence: Synthetic oligonucleotide
  Sense strand starting at position 95 of SEQ ID NO: 1887776
cgcccuaugaacuagguaa

SEQ ID NO: 2495763 - RNA, 19 nt, Artificial Sequence
  Description of Artificial Sequence: Synthetic oligonucleotide
  Antisense strand to SEQ ID NO: 2495762
uuaccuaguucauagggcg

SEQ ID NO: 2495764 - RNA, 19 nt, Artificial Sequence
  Description of Artificial Sequence: Synthetic oligonucleotide
  Sense strand starting at position 97 of SEQ ID NO: 1887776
cccuaugaacuagguaauu

SEQ ID NO: 2495765 - RNA, 19 nt, Artificial Sequence
  Description of Artificial Sequence: Synthetic oligonucleotide
  Antisense strand to SEQ ID NO: 2495764
aauuaccuaguucauaggg

SEQ ID NO: 2495766 - RNA, 19 nt, Artificial Sequence
  Description of Artificial Sequence: Synthetic oligonucleotide
  Sense strand starting at position 232 of SEQ ID NO: 1887776
agugauauaccaggaaccu

SEQ ID NO: 2495767 - RNA, 19 nt, Artificial Sequence
  Description of Artificial Sequence: Synthetic oligonucleotide
  Antisense strand to SEQ ID NO: 2495766
agguuccugguauaucacu

SEQ ID NO: 2495768 - RNA, 19 nt, Artificial Sequence
  Description of Artificial Sequence: Synthetic oligonucleotide
  Sense strand starting at position 422 of SEQ ID NO: 1887776
gugucauaauucguucagu

SEQ ID NO: 2495769 - RNA, 19 nt, Artificial Sequence
  Description of Artificial Sequence: Synthetic oligonucleotide
  Antisense strand to SEQ ID NO: 2495768
acugaacgaauuaugacac

SEQ ID NO: 2495770 - RNA, 19 nt, Artificial Sequence
  Description of Artificial Sequence: Synthetic oligonucleotide
  Sense strand starting at position 503 of SEQ ID NO: 1887776
gacccaaagcggugaagua

SEQ ID NO: 2495771 - RNA, 19 nt, Artificial Sequence
  Description of Artificial Sequence: Synthetic oligonucleotide
  Antisense strand to SEQ ID NO: 2495770
uacuucaccgcuuuggguc

SEQ ID NO: 2495772 - RNA, 19 nt, Artificial Sequence
  Description of Artificial Sequence: Synthetic oligonucleotide
  Sense strand starting at position 562 of SEQ ID NO: 1887776
aguucuaacuguucucaau

SEQ ID NO: 2495773 - RNA, 19 nt, Artificial Sequence
  Description of Artificial Sequence: Synthetic oligonucleotide
  Antisense strand to SEQ ID NO: 2495772
auugagaacaguuagaacu

SEQ ID NO: 2495774 - RNA, 19 nt, Artificial Sequence
  Description of Artificial Sequence: Synthetic oligonucleotide
  Sense strand starting at position 606 of SEQ ID NO: 1887776
ugggucaccucaucccaua

SEQ ID NO: 2495775 - RNA, 19 nt, Artificial Sequence
  Description of Artificial Sequence: Synthetic oligonucleotide
  Antisense strand to SEQ ID NO: 2495774
uaugggaugaggugaccca

SEQ ID NO: 2495776 - RNA, 19 nt, Artificial Sequence
  Description of Artificial Sequence: Synthetic oligonucleotide
  Sense strand starting at position 713 of SEQ ID NO: 1887776
ucaagaguucccgaccaag

SEQ ID NO: 2495777 - RNA, 19 nt, Artificial Sequence
  Description of Artificial Sequence: Synthetic oligonucleotide
  Antisense strand to SEQ ID NO: 2495776
cuuggucgggaacucuuga

SEQ ID NO: 2495778 - RNA, 19 nt, Artificial Sequence
  Description of Artificial Sequence: Synthetic oligonucleotide
  Sense strand starting at position 800 of SEQ ID NO: 1887776
ccgguaaucgcagcuaauu

SEQ ID NO: 2495779 - RNA, 19 nt, Artificial Sequence
  Description of Artificial Sequence: Synthetic oligonucleotide
  Antisense strand to SEQ ID NO: 2495778
aauuagcugcgauuaccgg

SEQ ID NO: 2495780 - RNA, 19 nt, Artificial Sequence
  Description of Artificial Sequence: Synthetic oligonucleotide
  Sense strand starting at position 802 of SEQ ID NO: 1887776
gguaaucgcagcuaauuag

SEQ ID NO: 2495781 - RNA, 19 nt, Artificial Sequence
  Description of Artificial Sequence: Synthetic oligonucleotide
  Antisense strand to SEQ ID NO: 2495780
cuaauuagcugcgauuacc

SEQ ID NO: 2495782 - RNA, 19 nt, Artificial Sequence
  Description of Artificial Sequence: Synthetic oligonucleotide
  Sense strand starting at position 1548 of SEQ ID NO: 1887776
cgcugagucuucuccgcga

SEQ ID NO: 2495783 - RNA, 19 nt, Artificial Sequence
  Description of Artificial Sequence: Synthetic oligonucleotide
  Antisense strand to SEQ ID NO: 2495782
ucgcggagaagacucagcg

SEQ ID NO: 2495784 - RNA, 19 nt, Artificial Sequence
  Description of Artificial Sequence: Synthetic oligonucleotide
  Sense strand starting at position 2039 of SEQ ID NO: 1887776
agcaguaguuucuagccaa

SEQ ID NO: 2495785 - RNA, 19 nt, Artificial Sequence
  Description of Artificial Sequence: Synthetic oligonucleotide
  Antisense strand to SEQ ID NO: 2495784
uuggcuagaaacuacugcu

SEQ ID NO: 2495786 - RNA, 19 nt, Artificial Sequence
  Description of Artificial Sequence: Synthetic oligonucleotide
  Sense strand starting at position 2042 of SEQ ID NO: 1887776
aguaguuucuagccaauga

SEQ ID NO: 2495787 - RNA, 19 nt, Artificial Sequence
  Description of Artificial Sequence: Synthetic oligonucleotide
  Antisense strand to SEQ ID NO: 2495786
ucauuggcuagaaacuacu

SEQ ID NO: 2495788 - RNA, 19 nt, Artificial Sequence
  Description of Artificial Sequence: Synthetic oligonucleotide
  Sense strand starting at position 2043 of SEQ ID NO: 1887776
guaguuucuagccaaugag

SEQ ID NO: 2495789 - RNA, 19 nt, Artificial Sequence
  Description of Artificial Sequence: Synthetic oligonucleotide
  Antisense strand to SEQ ID NO: 2495788
cucauuggcuagaaacuac

SEQ ID NO: 2495790 - RNA, 19 nt, Artificial Sequence
  Description of Artificial Sequence: Synthetic oligonucleotide
  Sense strand starting at position 2121 of SEQ ID NO: 1887776
gcgugcgucggugguaaua

SEQ ID NO: 2495791 - RNA, 19 nt, Artificial Sequence
  Description of Artificial Sequence: Synthetic oligonucleotide
  Antisense strand to SEQ ID NO: 2495790
uauuaccaccgacgcacgc

SEQ ID NO: 2495792 - RNA, 19 nt, Artificial Sequence
  Description of Artificial Sequence: Synthetic oligonucleotide
  Sense strand starting at position 2247 of SEQ ID NO: 1887776
gagugagacuuugauuugu

SEQ ID NO: 2495793 - RNA, 19 nt, Artificial Sequence
  Description of Artificial Sequence: Synthetic oligonucleotide
  Antisense strand to SEQ ID NO: 2495792
acaaaucaaagucucacuc

SEQ ID NO: 2495794 - RNA, 19 nt, Artificial Sequence
  Description of Artificial Sequence: Synthetic oligonucleotide
  Sense strand starting at position 2253 of SEQ ID NO: 1887776
gacuuugauuugugcuuga

SEQ ID NO: 2495795 - RNA, 19 nt, Artificial Sequence
  Description of Artificial Sequence: Synthetic oligonucleotide
  Antisense strand to SEQ ID NO: 2495794
ucaagcacaaaucaaaguc

SEQ ID NO: 2495796 - RNA, 19 nt, Artificial Sequence
  Description of Artificial Sequence: Synthetic oligonucleotide
  Sense strand starting at position 2264 of SEQ ID NO: 1887776
gugcuugauuuaugccaag

SEQ ID NO: 2495797 - RNA, 19 nt, Artificial Sequence
  Description of Artificial Sequence: Synthetic oligonucleotide
  Antisense strand to SEQ ID NO: 2495796
cuuggcauaaaucaagcac

SEQ ID NO: 2495798 - RNA, 19 nt, Artificial Sequence
  Description of Artificial Sequence: Synthetic oligonucleotide
  Sense strand starting at position 2457 of SEQ ID NO: 1887776
cgccucagccugcagaaau

SEQ ID NO: 2495799 - RNA, 19 nt, Artificial Sequence
  Description of Artificial Sequence: Synthetic oligonucleotide
  Antisense strand to SEQ ID NO: 2495798
auuucugcaggcugaggcg

SEQ ID NO: 2495800 - RNA, 19 nt, Artificial Sequence
  Description of Artificial Sequence: Synthetic oligonucleotide
  Sense strand starting at position 2467 of SEQ ID NO: 1887776
ugcagaaauagcugggacu

SEQ ID NO: 2495801 - RNA, 19 nt, Artificial Sequence
  Description of Artificial Sequence: Synthetic oligonucleotide
  Antisense strand to SEQ ID NO: 2495800
agucccagcuauuucugca

SEQ ID NO: 2495802 - RNA, 19 nt, Artificial Sequence
  Description of Artificial Sequence: Synthetic oligonucleotide
  Sense strand starting at position 2468 of SEQ ID NO: 1887776
gcagaaauagcugggacua

SEQ ID NO: 2495803 - RNA, 19 nt, Artificial Sequence
  Description of Artificial Sequence: Synthetic oligonucleotide
  Antisense strand to SEQ ID NO: 2495802
uagucccagcuauuucugc

SEQ ID NO: 2495804 - RNA, 19 nt, Artificial Sequence
  Description of Artificial Sequence: Synthetic oligonucleotide
  Sense strand starting at position 2469 of SEQ ID NO: 1887776
cagaaauagcugggacuau

SEQ ID NO: 2495805 - RNA, 19 nt, Artificial Sequence
  Description of Artificial Sequence: Synthetic oligonucleotide
  Antisense strand to SEQ ID NO: 2495804
auagucccagcuauuucug

SEQ ID NO: 2495806 - RNA, 19 nt, Artificial Sequence
  Description of Artificial Sequence: Synthetic oligonucleotide
  Sense strand starting at position 2623 of SEQ ID NO: 1887776
gcgcgucucccaucuguuu

SEQ ID NO: 2495807 - RNA, 19 nt, Artificial Sequence
  Description of Artificial Sequence: Synthetic oligonucleotide
  Antisense strand to SEQ ID NO: 2495806
aaacagaugggagacgcgc

SEQ ID NO: 2495808 - RNA, 19 nt, Artificial Sequence
  Description of Artificial Sequence: Synthetic oligonucleotide
  Sense strand starting at position 2652 of SEQ ID NO: 1887776
aucugauguccuggagaau

SEQ ID NO: 2495809 - RNA, 19 nt, Artificial Sequence
  Description of Artificial Sequence: Synthetic oligonucleotide
  Antisense strand to SEQ ID NO: 2495808
auucuccaggacaucagau

SEQ ID NO: 2495810 - RNA, 19 nt, Artificial Sequence
  Description of Artificial Sequence: Synthetic oligonucleotide
  Sense strand starting at position 2722 of SEQ ID NO: 1887776
caagcugugcguucugcua

SEQ ID NO: 2495811 - RNA, 19 nt, Artificial Sequence
  Description of Artificial Sequence: Synthetic oligonucleotide
  Antisense strand to SEQ ID NO: 2495810
uagcagaacgcacagcuug

SEQ ID NO: 2495812 - RNA, 19 nt, Artificial Sequence
  Description of Artificial Sequence: Synthetic oligonucleotide
  Sense strand starting at position 2761 of SEQ ID NO: 1887776
uucugagaucucugcauaa

SEQ ID NO: 2495813 - RNA, 19 nt, Artificial Sequence
  Description of Artificial Sequence: Synthetic oligonucleotide
  Antisense strand to SEQ ID NO: 2495812
uuaugcagagaucucagaa

SEQ ID NO: 2495814 - RNA, 19 nt, Artificial Sequence
  Description of Artificial Sequence: Synthetic oligonucleotide
  Sense strand starting at position 2763 of SEQ ID NO: 1887776
cugagaucucugcauaaau

SEQ ID NO: 2495815 - RNA, 19 nt, Artificial Sequence
  Description of Artificial Sequence: Synthetic oligonucleotide
  Antisense strand to SEQ ID NO: 2495814
auuuaugcagagaucucag

SEQ ID NO: 2495816 - RNA, 19 nt, Artificial Sequence
  Description of Artificial Sequence: Synthetic oligonucleotide
  Sense strand starting at position 2958 of SEQ ID NO: 1887776
cugggcugugacuauguau

SEQ ID NO: 2495817 - RNA, 19 nt, Artificial Sequence
  Description of Artificial Sequence: Synthetic oligonucleotide
  Antisense strand to SEQ ID NO: 2495816
auacauagucacagcccag

SEQ ID NO: 2495818 - RNA, 19 nt, Artificial Sequence
  Description of Artificial Sequence: Synthetic oligonucleotide
  Sense strand starting at position 2965 of SEQ ID NO: 1887776
gugacuauguauucgaauu
